United States Patent Application Publication US 2018/0305689 A1 - sequence listing, part 155

SEQ ID NO: 2222552 - RNA, 19 nt, Artificial Sequence
  Description of Artificial Sequence: Synthetic oligonucleotide
  Sense strand starting at position 856 of SEQ ID NO: 1883870
gcaccuuuguauuuccuau

SEQ ID NO: 2222553 - RNA, 19 nt, Artificial Sequence
  Description of Artificial Sequence: Synthetic oligonucleotide
  Antisense strand to SEQ ID NO: 2222552
auaggaaauacaaaggugc

SEQ ID NO: 2222554 - RNA, 19 nt, Artificial Sequence
  Description of Artificial Sequence: Synthetic oligonucleotide
  Sense strand starting at position 68 of SEQ ID NO: 1883870
ugagaauguuucuuaaacc

SEQ ID NO: 2222555 - RNA, 19 nt, Artificial Sequence
  Description of Artificial Sequence: Synthetic oligonucleotide
  Antisense strand to SEQ ID NO: 2222554
gguuuaagaaacauucuca

SEQ ID NO: 2222556 - RNA, 19 nt, Artificial Sequence
  Description of Artificial Sequence: Synthetic oligonucleotide
  Sense strand starting at position 67 of SEQ ID NO: 1883870
cugagaauguuucuuaaac

SEQ ID NO: 2222557 - RNA, 19 nt, Artificial Sequence
  Description of Artificial Sequence: Synthetic oligonucleotide
  Antisense strand to SEQ ID NO: 2222556
guuuaagaaacauucucag

SEQ ID NO: 2222558 - RNA, 19 nt, Artificial Sequence
  Description of Artificial Sequence: Synthetic oligonucleotide
  Sense strand starting at position 265 of SEQ ID NO: 1883870
gugauugccaccuagggau

SEQ ID NO: 2222559 - RNA, 19 nt, Artificial Sequence
  Description of Artificial Sequence: Synthetic oligonucleotide
  Antisense strand to SEQ ID NO: 2222558
aucccuagguggcaaucac

SEQ ID NO: 2222560 - RNA, 19 nt, Artificial Sequence
  Description of Artificial Sequence: Synthetic oligonucleotide
  Sense strand starting at position 2367 of SEQ ID NO: 1883870
acuaguuauggccauuaca

SEQ ID NO: 2222561 - RNA, 19 nt, Artificial Sequence
  Description of Artificial Sequence: Synthetic oligonucleotide
  Antisense strand to SEQ ID NO: 2222560
uguaauggccauaacuagu

SEQ ID NO: 2222562 - RNA, 19 nt, Artificial Sequence
  Description of Artificial Sequence: Synthetic oligonucleotide
  Sense strand starting at position 2831 of SEQ ID NO: 1883870
guuagcaagcaacaagauu

SEQ ID NO: 2222563 - RNA, 19 nt, Artificial Sequence
  Description of Artificial Sequence: Synthetic oligonucleotide
  Antisense strand to SEQ ID NO: 2222562
aaucuuguugcuugcuaac

SEQ ID NO: 2222564 - RNA, 19 nt, Artificial Sequence
  Description of Artificial Sequence: Synthetic oligonucleotide
  Sense strand starting at position 2686 of SEQ ID NO: 1883870
aguguuaaaucucuuaaga

SEQ ID NO: 2222565 - RNA, 19 nt, Artificial Sequence
  Description of Artificial Sequence: Synthetic oligonucleotide
  Antisense strand to SEQ ID NO: 2222564
ucuuaagagauuuaacacu

SEQ ID NO: 2222566 - RNA, 19 nt, Artificial Sequence
  Description of Artificial Sequence: Synthetic oligonucleotide
  Sense strand starting at position 65 of SEQ ID NO: 1883870
cccugagaauguuucuuaa

SEQ ID NO: 2222567 - RNA, 19 nt, Artificial Sequence
  Description of Artificial Sequence: Synthetic oligonucleotide
  Antisense strand to SEQ ID NO: 2222566
uuaagaaacauucucaggg

SEQ ID NO: 2222568 - RNA, 19 nt, Artificial Sequence
  Description of Artificial Sequence: Synthetic oligonucleotide
  Sense strand starting at position 55 of SEQ ID NO: 1883870
ucucuacagucccugagaa

SEQ ID NO: 2222569 - RNA, 19 nt, Artificial Sequence
  Description of Artificial Sequence: Synthetic oligonucleotide
  Antisense strand to SEQ ID NO: 2222568
uucucagggacuguagaga

SEQ ID NO: 2222570 - RNA, 19 nt, Artificial Sequence
  Description of Artificial Sequence: Synthetic oligonucleotide
  Sense strand starting at position 344 of SEQ ID NO: 1883870
ggacauuaucuaugcccaa

SEQ ID NO: 2222571 - RNA, 19 nt, Artificial Sequence
  Description of Artificial Sequence: Synthetic oligonucleotide
  Antisense strand to SEQ ID NO: 2222570
uugggcauagauaaugucc

SEQ ID NO: 2222572 - RNA, 19 nt, Artificial Sequence
  Description of Artificial Sequence: Synthetic oligonucleotide
  Sense strand starting at position 85 of SEQ ID NO: 1883870
ccaggaauuugggaugcaa

SEQ ID NO: 2222573 - RNA, 19 nt, Artificial Sequence
  Description of Artificial Sequence: Synthetic oligonucleotide
  Antisense strand to SEQ ID NO: 2222572
uugcaucccaaauuccugg

SEQ ID NO: 2222574 - RNA, 19 nt, Artificial Sequence
  Description of Artificial Sequence: Synthetic oligonucleotide
  Sense strand starting at position 1200 of SEQ ID NO: 1883870
agggaagaauuggaagaau

SEQ ID NO: 2222575 - RNA, 19 nt, Artificial Sequence
  Description of Artificial Sequence: Synthetic oligonucleotide
  Antisense strand to SEQ ID NO: 2222574
auucuuccaauucuucccu

SEQ ID NO: 2222576 - RNA, 19 nt, Artificial Sequence
  Description of Artificial Sequence: Synthetic oligonucleotide
  Sense strand starting at position 56 of SEQ ID NO: 1883870
cucuacagucccugagaau

SEQ ID NO: 2222577 - RNA, 19 nt, Artificial Sequence
  Description of Artificial Sequence: Synthetic oligonucleotide
  Antisense strand to SEQ ID NO: 2222576
auucucagggacuguagag

SEQ ID NO: 2222578 - RNA, 19 nt, Artificial Sequence
  Description of Artificial Sequence: Synthetic oligonucleotide
  Sense strand starting at position 2410 of SEQ ID NO: 1883870
uuggacaugcacugauauu

SEQ ID NO: 2222579 - RNA, 19 nt, Artificial Sequence
  Description of Artificial Sequence: Synthetic oligonucleotide
  Antisense strand to SEQ ID NO: 2222578
aauaucagugcauguccaa

SEQ ID NO: 2222580 - RNA, 19 nt, Artificial Sequence
  Description of Artificial Sequence: Synthetic oligonucleotide
  Sense strand starting at position 1833 of SEQ ID NO: 1883870
aggccacaugacugcuaaa

SEQ ID NO: 2222581 - RNA, 19 nt, Artificial Sequence
  Description of Artificial Sequence: Synthetic oligonucleotide
  Antisense strand to SEQ ID NO: 2222580
uuuagcagucauguggccu

SEQ ID NO: 2222582 - RNA, 19 nt, Artificial Sequence
  Description of Artificial Sequence: Synthetic oligonucleotide
  Sense strand starting at position 1025 of SEQ ID NO: 1883870
ggguccgaugcugaauauu

SEQ ID NO: 2222583 - RNA, 19 nt, Artificial Sequence
  Description of Artificial Sequence: Synthetic oligonucleotide
  Antisense strand to SEQ ID NO: 2222582
aauauucagcaucggaccc

SEQ ID NO: 2222584 - RNA, 19 nt, Artificial Sequence
  Description of Artificial Sequence: Synthetic oligonucleotide
  Sense strand starting at position 1586 of SEQ ID NO: 1883870
gcuuauagaugcuuaauaa

SEQ ID NO: 2222585 - RNA, 19 nt, Artificial Sequence
  Description of Artificial Sequence: Synthetic oligonucleotide
  Antisense strand to SEQ ID NO: 2222584
uuauuaagcaucuauaagc

SEQ ID NO: 2222586 - RNA, 19 nt, Artificial Sequence
  Description of Artificial Sequence: Synthetic oligonucleotide
  Sense strand starting at position 332 of SEQ ID NO: 1883870
ucaaucugugugggacauu

SEQ ID NO: 2222587 - RNA, 19 nt, Artificial Sequence
  Description of Artificial Sequence: Synthetic oligonucleotide
  Antisense strand to SEQ ID NO: 2222586
aaugucccacacagauuga

SEQ ID NO: 2222588 - RNA, 19 nt, Artificial Sequence
  Description of Artificial Sequence: Synthetic oligonucleotide
  Sense strand starting at position 2516 of SEQ ID NO: 1883870
aucauauuguguccggaaa

SEQ ID NO: 2222589 - RNA, 19 nt, Artificial Sequence
  Description of Artificial Sequence: Synthetic oligonucleotide
  Antisense strand to SEQ ID NO: 2222588
uuuccggacacaauaugau

SEQ ID NO: 2222590 - RNA, 19 nt, Artificial Sequence
  Description of Artificial Sequence: Synthetic oligonucleotide
  Sense strand starting at position 1015 of SEQ ID NO: 1883870
cuccaauuauggguccgau

SEQ ID NO: 2222591 - RNA, 19 nt, Artificial Sequence
  Description of Artificial Sequence: Synthetic oligonucleotide
  Antisense strand to SEQ ID NO: 2222590
aucggacccauaauuggag

SEQ ID NO: 2222592 - RNA, 19 nt, Artificial Sequence
  Description of Artificial Sequence: Synthetic oligonucleotide
  Sense strand starting at position 406 of SEQ ID NO: 1883870
uuuguaaaugugcaguuaa

SEQ ID NO: 2222593 - RNA, 19 nt, Artificial Sequence
  Description of Artificial Sequence: Synthetic oligonucleotide
  Antisense strand to SEQ ID NO: 2222592
uuaacugcacauuuacaaa

SEQ ID NO: 2222594 - RNA, 19 nt, Artificial Sequence
  Description of Artificial Sequence: Synthetic oligonucleotide
  Sense strand starting at position 1256 of SEQ ID NO: 1883870
uccuaaguauuugaugauc

SEQ ID NO: 2222595 - RNA, 19 nt, Artificial Sequence
  Description of Artificial Sequence: Synthetic oligonucleotide
  Antisense strand to SEQ ID NO: 2222594
gaucaucaaauacuuagga

SEQ ID NO: 2222596 - RNA, 19 nt, Artificial Sequence
  Description of Artificial Sequence: Synthetic oligonucleotide
  Sense strand starting at position 142 of SEQ ID NO: 1883870
ucagaagaguaauagaaca

SEQ ID NO: 2222597 - RNA, 19 nt, Artificial Sequence
  Description of Artificial Sequence: Synthetic oligonucleotide
  Antisense strand to SEQ ID NO: 2222596
uguucuauuacucuucuga

SEQ ID NO: 2222598 - RNA, 19 nt, Artificial Sequence
  Description of Artificial Sequence: Synthetic oligonucleotide
  Sense strand starting at position 2517 of SEQ ID NO: 1883870
ucauauuguguccggaaau

SEQ ID NO: 2222599 - RNA, 19 nt, Artificial Sequence
  Description of Artificial Sequence: Synthetic oligonucleotide
  Antisense strand to SEQ ID NO: 2222598
auuuccggacacaauauga

SEQ ID NO: 2222600 - RNA, 19 nt, Artificial Sequence
  Description of Artificial Sequence: Synthetic oligonucleotide
  Sense strand starting at position 2673 of SEQ ID NO: 1883870
gaucuucgcaaugaguguu

SEQ ID NO: 2222601 - RNA, 19 nt, Artificial Sequence
  Description of Artificial Sequence: Synthetic oligonucleotide
  Antisense strand to SEQ ID NO: 2222600
aacacucauugcgaagauc

SEQ ID NO: 2222602 - RNA, 19 nt, Artificial Sequence
  Description of Artificial Sequence: Synthetic oligonucleotide
  Sense strand starting at position 330 of SEQ ID NO: 1883870
gcucaaucugugugggaca

SEQ ID NO: 2222603 - RNA, 19 nt, Artificial Sequence
  Description of Artificial Sequence: Synthetic oligonucleotide
  Antisense strand to SEQ ID NO: 2222602
ugucccacacagauugagc

SEQ ID NO: 2222604 - RNA, 19 nt, Artificial Sequence
  Description of Artificial Sequence: Synthetic oligonucleotide
  Sense strand starting at position 1258 of SEQ ID NO: 1883870
cuaaguauuugaugaucac

SEQ ID NO: 2222605 - RNA, 19 nt, Artificial Sequence
  Description of Artificial Sequence: Synthetic oligonucleotide
  Antisense strand to SEQ ID NO: 2222604
gugaucaucaaauacuuag

SEQ ID NO: 2222606 - RNA, 19 nt, Artificial Sequence
  Description of Artificial Sequence: Synthetic oligonucleotide
  Sense strand starting at position 1018 of SEQ ID NO: 1883870
caauuauggguccgaugcu

SEQ ID NO: 2222607 - RNA, 19 nt, Artificial Sequence
  Description of Artificial Sequence: Synthetic oligonucleotide
  Antisense strand to SEQ ID NO: 2222606
agcaucggacccauaauug

SEQ ID NO: 2222608 - RNA, 19 nt, Artificial Sequence
  Description of Artificial Sequence: Synthetic oligonucleotide
  Sense strand starting at position 1285 of SEQ ID NO: 1883870
ugcuuagaacccugcagua

SEQ ID NO: 2222609 - RNA, 19 nt, Artificial Sequence
  Description of Artificial Sequence: Synthetic oligonucleotide
  Antisense strand to SEQ ID NO: 2222608
uacugcaggguucuaagca

SEQ ID NO: 2222610 - RNA, 19 nt, Artificial Sequence
  Description of Artificial Sequence: Synthetic oligonucleotide
  Sense strand starting at position 2676 of SEQ ID NO: 1883870
cuucgcaaugaguguuaaa

SEQ ID NO: 2222611 - RNA, 19 nt, Artificial Sequence
  Description of Artificial Sequence: Synthetic oligonucleotide
  Antisense strand to SEQ ID NO: 2222610
uuuaacacucauugcgaag

SEQ ID NO: 2222612 - RNA, 19 nt, Artificial Sequence
  Description of Artificial Sequence: Synthetic oligonucleotide
  Sense strand starting at position 1106 of SEQ ID NO: 1883870
ggaugacauucguucugcu

SEQ ID NO: 2222613 - RNA, 19 nt, Artificial Sequence
  Description of Artificial Sequence: Synthetic oligonucleotide
  Antisense strand to SEQ ID NO: 2222612
agcagaacgaaugucaucc

SEQ ID NO: 2222614 - RNA, 19 nt, Artificial Sequence
  Description of Artificial Sequence: Synthetic oligonucleotide
  Sense strand starting at position 2672 of SEQ ID NO: 1883870
agaucuucgcaaugagugu

SEQ ID NO: 2222615 - RNA, 19 nt, Artificial Sequence
  Description of Artificial Sequence: Synthetic oligonucleotide
  Antisense strand to SEQ ID NO: 2222614
acacucauugcgaagaucu

SEQ ID NO: 2222616 - RNA, 19 nt, Artificial Sequence
  Description of Artificial Sequence: Synthetic oligonucleotide
  Sense strand starting at position 484 of SEQ ID NO: 1883870
uuguuugucuuccuaaagu

SEQ ID NO: 2222617 - RNA, 19 nt, Artificial Sequence
  Description of Artificial Sequence: Synthetic oligonucleotide
  Antisense strand to SEQ ID NO: 2222616
acuuuaggaagacaaacaa

SEQ ID NO: 2222618 - RNA, 19 nt, Artificial Sequence
  Description of Artificial Sequence: Synthetic oligonucleotide
  Sense strand starting at position 1575 of SEQ ID NO: 1883870
aaguguuguuugcuuauag

SEQ ID NO: 2222619 - RNA, 19 nt, Artificial Sequence
  Description of Artificial Sequence: Synthetic oligonucleotide
  Antisense strand to SEQ ID NO: 2222618
cuauaagcaaacaacacuu

SEQ ID NO: 2222620 - RNA, 19 nt, Artificial Sequence
  Description of Artificial Sequence: Synthetic oligonucleotide
  Sense strand starting at position 803 of SEQ ID NO: 1883871
augucaaagcuugauauag

SEQ ID NO: 2222621 - RNA, 19 nt, Artificial Sequence
  Description of Artificial Sequence: Synthetic oligonucleotide
  Antisense strand to SEQ ID NO: 2222620
cuauaucaagcuuugacau

SEQ ID NO: 2222622 - RNA, 19 nt, Artificial Sequence
  Description of Artificial Sequence: Synthetic oligonucleotide
  Sense strand starting at position 2658 of SEQ ID NO: 1883871
gacaaaucugagcaacgua

SEQ ID NO: 2222623 - RNA, 19 nt, Artificial Sequence
  Description of Artificial Sequence: Synthetic oligonucleotide
  Antisense strand to SEQ ID NO: 2222622
uacguugcucagauuuguc

SEQ ID NO: 2222624 - RNA, 19 nt, Artificial Sequence
  Description of Artificial Sequence: Synthetic oligonucleotide
  Sense strand starting at position 2663 of SEQ ID NO: 1883871
aucugagcaacguaaagau

SEQ ID NO: 2222625 - RNA, 19 nt, Artificial Sequence
  Description of Artificial Sequence: Synthetic oligonucleotide
  Antisense strand to SEQ ID NO: 2222624
aucuuuacguugcucagau

SEQ ID NO: 2222626 - RNA, 19 nt, Artificial Sequence
  Description of Artificial Sequence: Synthetic oligonucleotide
  Sense strand starting at position 693 of SEQ ID NO: 1883871
uuuacagcucaguauuaag

SEQ ID NO: 2222627 - RNA, 19 nt, Artificial Sequence
  Description of Artificial Sequence: Synthetic oligonucleotide
  Antisense strand to SEQ ID NO: 2222626
cuuaauacugagcuguaaa

SEQ ID NO: 2222628 - RNA, 19 nt, Artificial Sequence
  Description of Artificial Sequence: Synthetic oligonucleotide
  Sense strand starting at position 2605 of SEQ ID NO: 1883871
cccaguacugcggaagacu

SEQ ID NO: 2222629 - RNA, 19 nt, Artificial Sequence
  Description of Artificial Sequence: Synthetic oligonucleotide
  Antisense strand to SEQ ID NO: 2222628
agucuuccgcaguacuggg

SEQ ID NO: 2222630 - RNA, 19 nt, Artificial Sequence
  Description of Artificial Sequence: Synthetic oligonucleotide
  Sense strand starting at position 2156 of SEQ ID NO: 1883871
accggaacgcauggagaua

SEQ ID NO: 2222631 - RNA, 19 nt, Artificial Sequence
  Description of Artificial Sequence: Synthetic oligonucleotide
  Antisense strand to SEQ ID NO: 2222630
uaucuccaugcguuccggu

SEQ ID NO: 2222632 - RNA, 19 nt, Artificial Sequence
  Description of Artificial Sequence: Synthetic oligonucleotide
  Sense strand starting at position 2657 of SEQ ID NO: 1883871
agacaaaucugagcaacgu

SEQ ID NO: 2222633 - RNA, 19 nt, Artificial Sequence
  Description of Artificial Sequence: Synthetic oligonucleotide
  Antisense strand to SEQ ID NO: 2222632
acguugcucagauuugucu

SEQ ID NO: 2222634 - RNA, 19 nt, Artificial Sequence
  Description of Artificial Sequence: Synthetic oligonucleotide
  Sense strand starting at position 690 of SEQ ID NO: 1883871
ggguuuacagcucaguauu

SEQ ID NO: 2222635 - RNA, 19 nt, Artificial Sequence
  Description of Artificial Sequence: Synthetic oligonucleotide
  Antisense strand to SEQ ID NO: 2222634
aauacugagcuguaaaccc

SEQ ID NO: 2222636 - RNA, 19 nt, Artificial Sequence
  Description of Artificial Sequence: Synthetic oligonucleotide
  Sense strand starting at position 1046 of SEQ ID NO: 1883871
uggcgugagcaugauaaug

SEQ ID NO: 2222637 - RNA, 19 nt, Artificial Sequence
  Description of Artificial Sequence: Synthetic oligonucleotide
  Antisense strand to SEQ ID NO: 2222636
cauuaucaugcucacgcca

SEQ ID NO: 2222638 - RNA, 19 nt, Artificial Sequence
  Description of Artificial Sequence: Synthetic oligonucleotide
  Sense strand starting at position 1090 of SEQ ID NO: 1883871
uguuucuacuauguuaaca

SEQ ID NO: 2222639 - RNA, 19 nt, Artificial Sequence
  Description of Artificial Sequence: Synthetic oligonucleotide
  Antisense strand to SEQ ID NO: 2222638
uguuaacauaguagaaaca

SEQ ID NO: 2222640 - RNA, 19 nt, Artificial Sequence
  Description of Artificial Sequence: Synthetic oligonucleotide
  Sense strand starting at position 1056 of SEQ ID NO: 1883871
augauaaugugccuacuuu

SEQ ID NO: 2222641 - RNA, 19 nt, Artificial Sequence
  Description of Artificial Sequence: Synthetic oligonucleotide
  Antisense strand to SEQ ID NO: 2222640
aaaguaggcacauuaucau

SEQ ID NO: 2222642 - RNA, 19 nt, Artificial Sequence
  Description of Artificial Sequence: Synthetic oligonucleotide
  Sense strand starting at position 928 of SEQ ID NO: 1883871
acuguuguugacgaguuca

SEQ ID NO: 2222643 - RNA, 19 nt, Artificial Sequence
  Description of Artificial Sequence: Synthetic oligonucleotide
  Antisense strand to SEQ ID NO: 2222642
ugaacucgucaacaacagu

SEQ ID NO: 2222644 - RNA, 19 nt, Artificial Sequence
  Description of Artificial Sequence: Synthetic oligonucleotide
  Sense strand starting at position 308 of SEQ ID NO: 1883871
guccauccugggcgacaaa

SEQ ID NO: 2222645 - RNA, 19 nt, Artificial Sequence
  Description of Artificial Sequence: Synthetic oligonucleotide
  Antisense strand to SEQ ID NO: 2222644
uuugucgcccaggauggac

SEQ ID NO: 2222646 - RNA, 19 nt, Artificial Sequence
  Description of Artificial Sequence: Synthetic oligonucleotide
  Sense strand starting at position 692 of SEQ ID NO: 1883871
guuuacagcucaguauuaa

SEQ ID NO: 2222647 - RNA, 19 nt, Artificial Sequence
  Description of Artificial Sequence: Synthetic oligonucleotide
  Antisense strand to SEQ ID NO: 2222646
uuaauacugagcuguaaac

SEQ ID NO: 2222648 - RNA, 19 nt, Artificial Sequence
  Description of Artificial Sequence: Synthetic oligonucleotide
  Sense strand starting at position 1089 of SEQ ID NO: 1883871
uuguuucuacuauguuaac

SEQ ID NO: 2222649 - RNA, 19 nt, Artificial Sequence
  Description of Artificial Sequence: Synthetic oligonucleotide
  Antisense strand to SEQ ID NO: 2222648
guuaacauaguagaaacaa

SEQ ID NO: 2222650 - RNA, 19 nt, Artificial Sequence
  Description of Artificial Sequence: Synthetic oligonucleotide
  Sense strand starting at position 3626 of SEQ ID NO: 1883871
gugcccugagcaugauaau

SEQ ID NO: 2222651 - RNA, 19 nt, Artificial Sequence
  Description of Artificial Sequence: Synthetic oligonucleotide
  Antisense strand to SEQ ID NO: 2222650
auuaucaugcucagggcac

SEQ ID NO: 2222652 - RNA, 19 nt, Artificial Sequence
  Description of Artificial Sequence: Synthetic oligonucleotide
  Sense strand starting at position 3635 of SEQ ID NO: 1883871
gcaugauaaugugcuacuu

SEQ ID NO: 2222653 - RNA, 19 nt, Artificial Sequence
  Description of Artificial Sequence: Synthetic oligonucleotide
  Antisense strand to SEQ ID NO: 2222652
aaguagcacauuaucaugc

SEQ ID NO: 2222654 - RNA, 19 nt, Artificial Sequence
  Description of Artificial Sequence: Synthetic oligonucleotide
  Sense strand starting at position 1054 of SEQ ID NO: 1883871
gcaugauaaugugccuacu

SEQ ID NO: 2222655 - RNA, 19 nt, Artificial Sequence
  Description of Artificial Sequence: Synthetic oligonucleotide
  Antisense strand to SEQ ID NO: 2222654
aguaggcacauuaucaugc

SEQ ID NO: 2222656 - RNA, 19 nt, Artificial Sequence
  Description of Artificial Sequence: Synthetic oligonucleotide
  Sense strand starting at position 3667 of SEQ ID NO: 1883871
uguuguuuccacuacguua

SEQ ID NO: 2222657 - RNA, 19 nt, Artificial Sequence
  Description of Artificial Sequence: Synthetic oligonucleotide
  Antisense strand to SEQ ID NO: 2222656
uaacguaguggaaacaaca

SEQ ID NO: 2222658 - RNA, 19 nt, Artificial Sequence
  Description of Artificial Sequence: Synthetic oligonucleotide
  Sense strand starting at position 838 of SEQ ID NO: 1883871
aacuuaggaugagaauguu

SEQ ID NO: 2222659 - RNA, 19 nt, Artificial Sequence
  Description of Artificial Sequence: Synthetic oligonucleotide
  Antisense strand to SEQ ID NO: 2222658
aacauucucauccuaaguu

SEQ ID NO: 2222660 - RNA, 19 nt, Artificial Sequence
  Description of Artificial Sequence: Synthetic oligonucleotide
  Sense strand starting at position 2975 of SEQ ID NO: 1883871
gucauucacgccugggauu

SEQ ID NO: 2222661 - RNA, 19 nt, Artificial Sequence
  Description of Artificial Sequence: Synthetic oligonucleotide
  Antisense strand to SEQ ID NO: 2222660
aaucccaggcgugaaugac

SEQ ID NO: 2222662 - RNA, 19 nt, Artificial Sequence
  Description of Artificial Sequence: Synthetic oligonucleotide
  Sense strand starting at position 1460 of SEQ ID NO: 1883871
gcccguuuccucgaccuca

SEQ ID NO: 2222663 - RNA, 19 nt, Artificial Sequence
  Description of Artificial Sequence: Synthetic oligonucleotide
  Antisense strand to SEQ ID NO: 2222662
ugaggucgaggaaacgggc

SEQ ID NO: 2222664 - RNA, 19 nt, Artificial Sequence
  Description of Artificial Sequence: Synthetic oligonucleotide
  Sense strand starting at position 2682 of SEQ ID NO: 1883871
ccuguugucugugccaaca

SEQ ID NO: 2222665 - RNA, 19 nt, Artificial Sequence
  Description of Artificial Sequence: Synthetic oligonucleotide
  Antisense strand to SEQ ID NO: 2222664
uguuggcacagacaacagg

SEQ ID NO: 2222666 - RNA, 19 nt, Artificial Sequence
  Description of Artificial Sequence: Synthetic oligonucleotide
  Sense strand starting at position 3902 of SEQ ID NO: 1883871
gucuguuaccucggccuca

SEQ ID NO: 2222667 - RNA, 19 nt, Artificial Sequence
  Description of Artificial Sequence: Synthetic oligonucleotide
  Antisense strand to SEQ ID NO: 2222666
ugaggccgagguaacagac

SEQ ID NO: 2222668 - RNA, 19 nt, Artificial Sequence
  Description of Artificial Sequence: Synthetic oligonucleotide
  Sense strand starting at position 3620 of SEQ ID NO: 1883871
agugcagugcccugagcau

SEQ ID NO: 2222669 - RNA, 19 nt, Artificial Sequence
  Description of Artificial Sequence: Synthetic oligonucleotide
  Antisense strand to SEQ ID NO: 2222668
augcucagggcacugcacu

SEQ ID NO: 2222670 - RNA, 19 nt, Artificial Sequence
  Description of Artificial Sequence: Synthetic oligonucleotide
  Sense strand starting at position 696 of SEQ ID NO: 1883871
acagcucaguauuaaguaa

SEQ ID NO: 2222671 - RNA, 19 nt, Artificial Sequence
  Description of Artificial Sequence: Synthetic oligonucleotide
  Antisense strand to SEQ ID NO: 2222670
uuacuuaauacugagcugu

SEQ ID NO: 2222672 - RNA, 19 nt, Artificial Sequence
  Description of Artificial Sequence: Synthetic oligonucleotide
  Sense strand starting at position 795 of SEQ ID NO: 1883871
augguaucaugucaaagcu

SEQ ID NO: 2222673 - RNA, 19 nt, Artificial Sequence
  Description of Artificial Sequence: Synthetic oligonucleotide
  Antisense strand to SEQ ID NO: 2222672
agcuuugacaugauaccau

SEQ ID NO: 2222674 - RNA, 19 nt, Artificial Sequence
  Description of Artificial Sequence: Synthetic oligonucleotide
  Sense strand starting at position 805 of SEQ ID NO: 1883871
gucaaagcuugauauaguu

SEQ ID NO: 2222675 - RNA, 19 nt, Artificial Sequence
  Description of Artificial Sequence: Synthetic oligonucleotide
  Antisense strand to SEQ ID NO: 2222674
aacuauaucaagcuuugac

SEQ ID NO: 2222676 - RNA, 19 nt, Artificial Sequence
  Description of Artificial Sequence: Synthetic oligonucleotide
  Sense strand starting at position 1569 of SEQ ID NO: 1883871
gaaacaaacucgcauucgu

SEQ ID NO: 2222677 - RNA, 19 nt, Artificial Sequence
  Description of Artificial Sequence: Synthetic oligonucleotide
  Antisense strand to SEQ ID NO: 2222676
acgaaugcgaguuuguuuc

SEQ ID NO: 2222678 - RNA, 19 nt, Artificial Sequence
  Description of Artificial Sequence: Synthetic oligonucleotide
  Sense strand starting at position 2614 of SEQ ID NO: 1883871
gcggaagacugagguguaa

SEQ ID NO: 2222679 - RNA, 19 nt, Artificial Sequence
  Description of Artificial Sequence: Synthetic oligonucleotide
  Antisense strand to SEQ ID NO: 2222678
uuacaccucagucuuccgc

SEQ ID NO: 2222680 - RNA, 19 nt, Artificial Sequence
  Description of Artificial Sequence: Synthetic oligonucleotide
  Sense strand starting at position 1084 of SEQ ID NO: 1883871
cuguguuguuucuacuaug

SEQ ID NO: 2222681 - RNA, 19 nt, Artificial Sequence
  Description of Artificial Sequence: Synthetic oligonucleotide
  Antisense strand to SEQ ID NO: 2222680
cauaguagaaacaacacag

SEQ ID NO: 2222682 - RNA, 19 nt, Artificial Sequence
  Description of Artificial Sequence: Synthetic oligonucleotide
  Sense strand starting at position 2675 of SEQ ID NO: 1883871
uaaagauccuguugucugu

SEQ ID NO: 2222683 - RNA, 19 nt, Artificial Sequence
  Description of Artificial Sequence: Synthetic oligonucleotide
  Antisense strand to SEQ ID NO: 2222682
acagacaacaggaucuuua

SEQ ID NO: 2222684 - RNA, 19 nt, Artificial Sequence
  Description of Artificial Sequence: Synthetic oligonucleotide
  Sense strand starting at position 2672 of SEQ ID NO: 1883871
acguaaagauccuguuguc

SEQ ID NO: 2222685 - RNA, 19 nt, Artificial Sequence
  Description of Artificial Sequence: Synthetic oligonucleotide
  Antisense strand to SEQ ID NO: 2222684
gacaacaggaucuuuacgu

SEQ ID NO: 2222686 - RNA, 19 nt, Artificial Sequence
  Description of Artificial Sequence: Synthetic oligonucleotide
  Sense strand starting at position 2684 of SEQ ID NO: 1883871
uguugucugugccaacauu

SEQ ID NO: 2222687 - RNA, 19 nt, Artificial Sequence
  Description of Artificial Sequence: Synthetic oligonucleotide
  Antisense strand to SEQ ID NO: 2222686
aauguuggcacagacaaca

SEQ ID NO: 2222688 - RNA, 19 nt, Artificial Sequence
  Description of Artificial Sequence: Synthetic oligonucleotide
  Sense strand starting at position 270 of SEQ ID NO: 1883872
gauggucacucacuaaaga

SEQ ID NO: 2222689 - RNA, 19 nt, Artificial Sequence
  Description of Artificial Sequence: Synthetic oligonucleotide
  Antisense strand to SEQ ID NO: 2222688
ucuuuagugagugaccauc

SEQ ID NO: 2222690 - RNA, 19 nt, Artificial Sequence
  Description of Artificial Sequence: Synthetic oligonucleotide
  Sense strand starting at position 1121 of SEQ ID NO: 1883872
ggucaaagaucacugauau

SEQ ID NO: 2222691 - RNA, 19 nt, Artificial Sequence
  Description of Artificial Sequence: Synthetic oligonucleotide
  Antisense strand to SEQ ID NO: 2222690
auaucagugaucuuugacc

SEQ ID NO: 2222692 - RNA, 19 nt, Artificial Sequence
  Description of Artificial Sequence: Synthetic oligonucleotide
  Sense strand starting at position 2965 of SEQ ID NO: 1883872
gccuucugugucuuucuau

SEQ ID NO: 2222693 - RNA, 19 nt, Artificial Sequence
  Description of Artificial Sequence: Synthetic oligonucleotide
  Antisense strand to SEQ ID NO: 2222692
auagaaagacacagaaggc

SEQ ID NO: 2222694 - RNA, 19 nt, Artificial Sequence
  Description of Artificial Sequence: Synthetic oligonucleotide
  Sense strand starting at position 2255 of SEQ ID NO: 1883872
gcgaguccuauuugggaau

SEQ ID NO: 2222695 - RNA, 19 nt, Artificial Sequence
  Description of Artificial Sequence: Synthetic oligonucleotide
  Antisense strand to SEQ ID NO: 2222694
auucccaaauaggacucgc

SEQ ID NO: 2222696 - RNA, 19 nt, Artificial Sequence
  Description of Artificial Sequence: Synthetic oligonucleotide
  Sense strand starting at position 1156 of SEQ ID NO: 1883872
ccugacguuccacaagaaa

SEQ ID NO: 2222697 - RNA, 19 nt, Artificial Sequence
  Description of Artificial Sequence: Synthetic oligonucleotide
  Antisense strand to SEQ ID NO: 2222696
uuucuuguggaacgucagg

SEQ ID NO: 2222698 - RNA, 19 nt, Artificial Sequence
  Description of Artificial Sequence: Synthetic oligonucleotide
  Sense strand starting at position 2248 of SEQ ID NO: 1883872
guuagcagcgaguccuauu

SEQ ID NO: 2222699 - RNA, 19 nt, Artificial Sequence
  Description of Artificial Sequence: Synthetic oligonucleotide
  Antisense strand to SEQ ID NO: 2222698
aauaggacucgcugcuaac

SEQ ID NO: 2222700 - RNA, 19 nt, Artificial Sequence
  Description of Artificial Sequence: Synthetic oligonucleotide
  Sense strand starting at position 952 of SEQ ID NO: 1883872
guuagaacagaauauacgu

SEQ ID NO: 2222701 - RNA, 19 nt, Artificial Sequence
  Description of Artificial Sequence: Synthetic oligonucleotide
  Antisense strand to SEQ ID NO: 2222700
acguauauucuguucuaac

SEQ ID NO: 2222702 - RNA, 19 nt, Artificial Sequence
  Description of Artificial Sequence: Synthetic oligonucleotide
  Sense strand starting at position 2540 of SEQ ID NO: 1883872
aaaggugaccucuaagucu

SEQ ID NO: 2222703 - RNA, 19 nt, Artificial Sequence
  Description of Artificial Sequence: Synthetic oligonucleotide
  Antisense strand to SEQ ID NO: 2222702
agacuuagaggucaccuuu

SEQ ID NO: 2222704 - RNA, 19 nt, Artificial Sequence
  Description of Artificial Sequence: Synthetic oligonucleotide
  Sense strand starting at position 296 of SEQ ID NO: 1883872
aguuuagcauuucuguaau

SEQ ID NO: 2222705 - RNA, 19 nt, Artificial Sequence
  Description of Artificial Sequence: Synthetic oligonucleotide
  Antisense strand to SEQ ID NO: 2222704
auuacagaaaugcuaaacu

SEQ ID NO: 2222706 - RNA, 19 nt, Artificial Sequence
  Description of Artificial Sequence: Synthetic oligonucleotide
  Sense strand starting at position 2571 of SEQ ID NO: 1883872
gacauucuauggguuuaaa

SEQ ID NO: 2222707 - RNA, 19 nt, Artificial Sequence
  Description of Artificial Sequence: Synthetic oligonucleotide
  Antisense strand to SEQ ID NO: 2222706
uuuaaacccauagaauguc

SEQ ID NO: 2222708 - RNA, 19 nt, Artificial Sequence
  Description of Artificial Sequence: Synthetic oligonucleotide
  Sense strand starting at position 1471 of SEQ ID NO: 1883872
ccgauagaugucuacuaug

SEQ ID NO: 2222709 - RNA, 19 nt, Artificial Sequence
  Description of Artificial Sequence: Synthetic oligonucleotide
  Antisense strand to SEQ ID NO: 2222708
cauaguagacaucuaucgg

SEQ ID NO: 2222710 - RNA, 19 nt, Artificial Sequence
  Description of Artificial Sequence: Synthetic oligonucleotide
  Sense strand starting at position 1085 of SEQ ID NO: 1883872
gacgcuagucuggaaacaa

SEQ ID NO: 2222711 - RNA, 19 nt, Artificial Sequence
  Description of Artificial Sequence: Synthetic oligonucleotide
  Antisense strand to SEQ ID NO: 2222710
uuguuuccagacuagcguc

SEQ ID NO: 2222712 - RNA, 19 nt, Artificial Sequence
  Description of Artificial Sequence: Synthetic oligonucleotide
  Sense strand starting at position 1985 of SEQ ID NO: 1883872
cacucauuugggcgucuga

SEQ ID NO: 2222713 - RNA, 19 nt, Artificial Sequence
  Description of Artificial Sequence: Synthetic oligonucleotide
  Antisense strand to SEQ ID NO: 2222712
ucagacgcccaaaugagug

SEQ ID NO: 2222714 - RNA, 19 nt, Artificial Sequence
  Description of Artificial Sequence: Synthetic oligonucleotide
  Sense strand starting at position 2106 of SEQ ID NO: 1883872
uugcaauuggaaugaguaa

SEQ ID NO: 2222715 - RNA, 19 nt, Artificial Sequence
  Description of Artificial Sequence: Synthetic oligonucleotide
  Antisense strand to SEQ ID NO: 2222714
uuacucauuccaauugcaa

SEQ ID NO: 2222716 - RNA, 19 nt, Artificial Sequence
  Description of Artificial Sequence: Synthetic oligonucleotide
  Sense strand starting at position 2581 of SEQ ID NO: 1883872
ggguuuaaaccagguaauc

SEQ ID NO: 2222717 - RNA, 19 nt, Artificial Sequence
  Description of Artificial Sequence: Synthetic oligonucleotide
  Antisense strand to SEQ ID NO: 2222716
gauuaccugguuuaaaccc

SEQ ID NO: 2222718 - RNA, 19 nt, Artificial Sequence
  Description of Artificial Sequence: Synthetic oligonucleotide
  Sense strand starting at position 2362 of SEQ ID NO: 1883872
guugaaaggugacuucuag

SEQ ID NO: 2222719 - RNA, 19 nt, Artificial Sequence
  Description of Artificial Sequence: Synthetic oligonucleotide
  Antisense strand to SEQ ID NO: 2222718
cuagaagucaccuuucaac

SEQ ID NO: 2222720 - RNA, 19 nt, Artificial Sequence
  Description of Artificial Sequence: Synthetic oligonucleotide
  Sense strand starting at position 2980 of SEQ ID NO: 1883872
cuaugucugcuggaauuag

SEQ ID NO: 2222721 - RNA, 19 nt, Artificial Sequence
  Description of Artificial Sequence: Synthetic oligonucleotide
  Antisense strand to SEQ ID NO: 2222720
cuaauuccagcagacauag

SEQ ID NO: 2222722 - RNA, 19 nt, Artificial Sequence
  Description of Artificial Sequence: Synthetic oligonucleotide
  Sense strand starting at position 2161 of SEQ ID NO: 1883872
ggucacuaagaguguaaga

SEQ ID NO: 2222723 - RNA, 19 nt, Artificial Sequence
  Description of Artificial Sequence: Synthetic oligonucleotide
  Antisense strand to SEQ ID NO: 2222722
ucuuacacucuuagugacc

SEQ ID NO: 2222724 - RNA, 19 nt, Artificial Sequence
  Description of Artificial Sequence: Synthetic oligonucleotide
  Sense strand starting at position 936 of SEQ ID NO: 1883872
agcacuaacgaguaaaguu

SEQ ID NO: 2222725 - RNA, 19 nt, Artificial Sequence
  Description of Artificial Sequence: Synthetic oligonucleotide
  Antisense strand to SEQ ID NO: 2222724
aacuuuacucguuagugcu

SEQ ID NO: 2222726 - RNA, 19 nt, Artificial Sequence
  Description of Artificial Sequence: Synthetic oligonucleotide
  Sense strand starting at position 3381 of SEQ ID NO: 1883872
gucagaucucuugagcuca

SEQ ID NO: 2222727 - RNA, 19 nt, Artificial Sequence
  Description of Artificial Sequence: Synthetic oligonucleotide
  Antisense strand to SEQ ID NO: 2222726
ugagcucaagagaucugac

SEQ ID NO: 2222728 - RNA, 19 nt, Artificial Sequence
  Description of Artificial Sequence: Synthetic oligonucleotide
  Sense strand starting at position 2258 of SEQ ID NO: 1883872
aguccuauuugggaauuaa

SEQ ID NO: 2222729 - RNA, 19 nt, Artificial Sequence
  Description of Artificial Sequence: Synthetic oligonucleotide
  Antisense strand to SEQ ID NO: 2222728
uuaauucccaaauaggacu

SEQ ID NO: 2222730 - RNA, 19 nt, Artificial Sequence
  Description of Artificial Sequence: Synthetic oligonucleotide
  Sense strand starting at position 415 of SEQ ID NO: 1883872
aguuaaugcggacaaugua

SEQ ID NO: 2222731 - RNA, 19 nt, Artificial Sequence
  Description of Artificial Sequence: Synthetic oligonucleotide
  Antisense strand to SEQ ID NO: 2222730
uacauuguccgcauuaacu

SEQ ID NO: 2222732 - RNA, 19 nt, Artificial Sequence
  Description of Artificial Sequence: Synthetic oligonucleotide
  Sense strand starting at position 784 of SEQ ID NO: 1883872
uuuaguuuagguugggaca

SEQ ID NO: 2222733 - RNA, 19 nt, Artificial Sequence
  Description of Artificial Sequence: Synthetic oligonucleotide
  Antisense strand to SEQ ID NO: 2222732
ugucccaaccuaaacuaaa

SEQ ID NO: 2222734 - RNA, 19 nt, Artificial Sequence
  Description of Artificial Sequence: Synthetic oligonucleotide
  Sense strand starting at position 785 of SEQ ID NO: 1883872
uuaguuuagguugggacau

SEQ ID NO: 2222735 - RNA, 19 nt, Artificial Sequence
  Description of Artificial Sequence: Synthetic oligonucleotide
  Antisense strand to SEQ ID NO: 2222734
augucccaaccuaaacuaa

SEQ ID NO: 2222736 - RNA, 19 nt, Artificial Sequence
  Description of Artificial Sequence: Synthetic oligonucleotide
  Sense strand starting at position 3260 of SEQ ID NO: 1883872
gcugguguacuccaaacau

SEQ ID NO: 2222737 - RNA, 19 nt, Artificial Sequence
  Description of Artificial Sequence: Synthetic oligonucleotide
  Antisense strand to SEQ ID NO: 2222736
auguuuggaguacaccagc

SEQ ID NO: 2222738 - RNA, 19 nt, Artificial Sequence
  Description of Artificial Sequence: Synthetic oligonucleotide
  Sense strand starting at position 2568 of SEQ ID NO: 1883872
ucugacauucuauggguuu

SEQ ID NO: 2222739 - RNA, 19 nt, Artificial Sequence
  Description of Artificial Sequence: Synthetic oligonucleotide
  Antisense strand to SEQ ID NO: 2222738
aaacccauagaaugucaga

SEQ ID NO: 2222740 - RNA, 19 nt, Artificial Sequence
  Description of Artificial Sequence: Synthetic oligonucleotide
  Sense strand starting at position 2897 of SEQ ID NO: 1883872
gguaaacuucugggcucaa

SEQ ID NO: 2222741 - RNA, 19 nt, Artificial Sequence
  Description of Artificial Sequence: Synthetic oligonucleotide
  Antisense strand to SEQ ID NO: 2222740
uugagcccagaaguuuacc

SEQ ID NO: 2222742 - RNA, 19 nt, Artificial Sequence
  Description of Artificial Sequence: Synthetic oligonucleotide
  Sense strand starting at position 228 of SEQ ID NO: 1883872
guucuagcagguuaguaaa

SEQ ID NO: 2222743 - RNA, 19 nt, Artificial Sequence
  Description of Artificial Sequence: Synthetic oligonucleotide
  Antisense strand to SEQ ID NO: 2222742
uuuacuaaccugcuagaac

SEQ ID NO: 2222744 - RNA, 19 nt, Artificial Sequence
  Description of Artificial Sequence: Synthetic oligonucleotide
  Sense strand starting at position 1470 of SEQ ID NO: 1883872
cccgauagaugucuacuau

SEQ ID NO: 2222745 - RNA, 19 nt, Artificial Sequence
  Description of Artificial Sequence: Synthetic oligonucleotide
  Antisense strand to SEQ ID NO: 2222744
auaguagacaucuaucggg

SEQ ID NO: 2222746 - RNA, 19 nt, Artificial Sequence
  Description of Artificial Sequence: Synthetic oligonucleotide
  Sense strand starting at position 1490 of SEQ ID NO: 1883872
ccugucuuccaguagggua

SEQ ID NO: 2222747 - RNA, 19 nt, Artificial Sequence
  Description of Artificial Sequence: Synthetic oligonucleotide
  Antisense strand to SEQ ID NO: 2222746
uacccuacuggaagacagg

SEQ ID NO: 2222748 - RNA, 19 nt, Artificial Sequence
  Description of Artificial Sequence: Synthetic oligonucleotide
  Sense strand starting at position 1504 of SEQ ID NO: 1883872
ggguauuagucuccuuaau

SEQ ID NO: 2222749 - RNA, 19 nt, Artificial Sequence
  Description of Artificial Sequence: Synthetic oligonucleotide
  Antisense strand to SEQ ID NO: 2222748
auuaaggagacuaauaccc

SEQ ID NO: 2222750 - RNA, 19 nt, Artificial Sequence
  Description of Artificial Sequence: Synthetic oligonucleotide
  Sense strand starting at position 2170 of SEQ ID NO: 1883872
gaguguaagacuuggguuu

SEQ ID NO: 2222751 - RNA, 19 nt, Artificial Sequence
  Description of Artificial Sequence: Synthetic oligonucleotide
  Antisense strand to SEQ ID NO: 2222750
aaacccaagucuuacacuc

SEQ ID NO: 2222752 - RNA, 19 nt, Artificial Sequence
  Description of Artificial Sequence: Synthetic oligonucleotide
  Sense strand starting at position 466 of SEQ ID NO: 1883872
uugccauaauacguaaacu

SEQ ID NO: 2222753 - RNA, 19 nt, Artificial Sequence
  Description of Artificial Sequence: Synthetic oligonucleotide
  Antisense strand to SEQ ID NO: 2222752
aguuuacguauuauggcaa

SEQ ID NO: 2222754 - RNA, 19 nt, Artificial Sequence
  Description of Artificial Sequence: Synthetic oligonucleotide
  Sense strand starting at position 1506 of SEQ ID NO: 1883872
guauuagucuccuuaaucc

SEQ ID NO: 2222755 - RNA, 19 nt, Artificial Sequence
  Description of Artificial Sequence: Synthetic oligonucleotide
  Antisense strand to SEQ ID NO: 2222754
ggauuaaggagacuaauac

SEQ ID NO: 2222756 - RNA, 19 nt, Artificial Sequence
  Description of Artificial Sequence: Synthetic oligonucleotide
  Sense strand starting at position 2257 of SEQ ID NO: 1883872
gaguccuauuugggaauua

SEQ ID NO: 2222757 - RNA, 19 nt, Artificial Sequence
  Description of Artificial Sequence: Synthetic oligonucleotide
  Antisense strand to SEQ ID NO: 2222756
uaauucccaaauaggacuc

SEQ ID NO: 2222758 - RNA, 19 nt, Artificial Sequence
  Description of Artificial Sequence: Synthetic oligonucleotide
  Sense strand starting at position 266 of SEQ ID NO: 1883872
cagcgauggucacucacua

SEQ ID NO: 2222759 - RNA, 19 nt, Artificial Sequence
  Description of Artificial Sequence: Synthetic oligonucleotide
  Antisense strand to SEQ ID NO: 2222758
uagugagugaccaucgcug

SEQ ID NO: 2222760 - RNA, 19 nt, Artificial Sequence
  Description of Artificial Sequence: Synthetic oligonucleotide
  Sense strand starting at position 41 of SEQ ID NO: 1883872
aguggugggugucuauaau

SEQ ID NO: 2222761 - RNA, 19 nt, Artificial Sequence
  Description of Artificial Sequence: Synthetic oligonucleotide
  Antisense strand to SEQ ID NO: 2222760
auuauagacacccaccacu

SEQ ID NO: 2222762 - RNA, 19 nt, Artificial Sequence
  Description of Artificial Sequence: Synthetic oligonucleotide
  Sense strand starting at position 2976 of SEQ ID NO: 1883872
cuuucuaugucugcuggaa

SEQ ID NO: 2222763 - RNA, 19 nt, Artificial Sequence
  Description of Artificial Sequence: Synthetic oligonucleotide
  Antisense strand to SEQ ID NO: 2222762
uuccagcagacauagaaag

SEQ ID NO: 2222764 - RNA, 19 nt, Artificial Sequence
  Description of Artificial Sequence: Synthetic oligonucleotide
  Sense strand starting at position 986 of SEQ ID NO: 1883872
uaccaaaucugguuucgca

SEQ ID NO: 2222765 - RNA, 19 nt, Artificial Sequence
  Description of Artificial Sequence: Synthetic oligonucleotide
  Antisense strand to SEQ ID NO: 2222764
ugcgaaaccagauuuggua

SEQ ID NO: 2222766 - RNA, 19 nt, Artificial Sequence
  Description of Artificial Sequence: Synthetic oligonucleotide
  Sense strand starting at position 2508 of SEQ ID NO: 1883872
gaacgcgacucuguaucaa

SEQ ID NO: 2222767 - RNA, 19 nt, Artificial Sequence
  Description of Artificial Sequence: Synthetic oligonucleotide
  Antisense strand to SEQ ID NO: 2222766
uugauacagagucgcguuc

SEQ ID NO: 2222768 - RNA, 19 nt, Artificial Sequence
  Description of Artificial Sequence: Synthetic oligonucleotide
  Sense strand starting at position 971 of SEQ ID NO: 1883873
gcgcgaauccuaccacagu

SEQ ID NO: 2222769 - RNA, 19 nt, Artificial Sequence
  Description of Artificial Sequence: Synthetic oligonucleotide
  Antisense strand to SEQ ID NO: 2222768
acugugguaggauucgcgc

SEQ ID NO: 2222770 - RNA, 19 nt, Artificial Sequence
  Description of Artificial Sequence: Synthetic oligonucleotide
  Sense strand starting at position 3943 of SEQ ID NO: 1883873
ugauauuuagguuggugca

SEQ ID NO: 2222771 - RNA, 19 nt, Artificial Sequence
  Description of Artificial Sequence: Synthetic oligonucleotide
  Antisense strand to SEQ ID NO: 2222770
ugcaccaaccuaaauauca

SEQ ID NO: 2222772 - RNA, 19 nt, Artificial Sequence
  Description of Artificial Sequence: Synthetic oligonucleotide
  Sense strand starting at position 1243 of SEQ ID NO: 1883873
aauacaaacggcgagauau

SEQ ID NO: 2222773 - RNA, 19 nt, Artificial Sequence
  Description of Artificial Sequence: Synthetic oligonucleotide
  Antisense strand to SEQ ID NO: 2222772
auaucucgccguuuguauu

SEQ ID NO: 2222774 - RNA, 19 nt, Artificial Sequence
  Description of Artificial Sequence: Synthetic oligonucleotide
  Sense strand starting at position 2312 of SEQ ID NO: 1883873
uggcgugcacuuguauaau

SEQ ID NO: 2222775 - RNA, 19 nt, Artificial Sequence
  Description of Artificial Sequence: Synthetic oligonucleotide
  Antisense strand to SEQ ID NO: 2222774
auuauacaagugcacgcca

SEQ ID NO: 2222776 - RNA, 19 nt, Artificial Sequence
  Description of Artificial Sequence: Synthetic oligonucleotide
  Sense strand starting at position 2322 of SEQ ID NO: 1883873
uuguauaauccuggaaagg

SEQ ID NO: 2222777 - RNA, 19 nt, Artificial Sequence
  Description of Artificial Sequence: Synthetic oligonucleotide
  Antisense strand to SEQ ID NO: 2222776
ccuuuccaggauuauacaa

SEQ ID NO: 2222778 - RNA, 19 nt, Artificial Sequence
  Description of Artificial Sequence: Synthetic oligonucleotide
  Sense strand starting at position 884 of SEQ ID NO: 1883873
cuaaccucccucgagacau

SEQ ID NO: 2222779 - RNA, 19 nt, Artificial Sequence
  Description of Artificial Sequence: Synthetic oligonucleotide
  Antisense strand to SEQ ID NO: 2222778
augucucgagggagguuag

SEQ ID NO: 2222780 - RNA, 19 nt, Artificial Sequence
  Description of Artificial Sequence: Synthetic oligonucleotide
  Sense strand starting at position 2310 of SEQ ID NO: 1883873
ccuggcgugcacuuguaua

SEQ ID NO: 2222781 - RNA, 19 nt, Artificial Sequence
  Description of Artificial Sequence: Synthetic oligonucleotide
  Antisense strand to SEQ ID NO: 2222780
uauacaagugcacgccagg

SEQ ID NO: 2222782 - RNA, 19 nt, Artificial Sequence
  Description of Artificial Sequence: Synthetic oligonucleotide
  Sense strand starting at position 3981 of SEQ ID NO: 1883873
cauuucuuucgguggcaaa

SEQ ID NO: 2222783 - RNA, 19 nt, Artificial Sequence
  Description of Artificial Sequence: Synthetic oligonucleotide
  Antisense strand to SEQ ID NO: 2222782
uuugccaccgaaagaaaug

SEQ ID NO: 2222784 - RNA, 19 nt, Artificial Sequence
  Description of Artificial Sequence: Synthetic oligonucleotide
  Sense strand starting at position 398 of SEQ ID NO: 1883873
gaagacuaagccugugaag

SEQ ID NO: 2222785 - RNA, 19 nt, Artificial Sequence
  Description of Artificial Sequence: Synthetic oligonucleotide
  Antisense strand to SEQ ID NO: 2222784
cuucacaggcuuagucuuc

SEQ ID NO: 2222786 - RNA, 19 nt, Artificial Sequence
  Description of Artificial Sequence: Synthetic oligonucleotide
  Sense strand starting at position 612 of SEQ ID NO: 1883873
uuguaagagacuuguggaa

SEQ ID NO: 2222787 - RNA, 19 nt, Artificial Sequence
  Description of Artificial Sequence: Synthetic oligonucleotide
  Antisense strand to SEQ ID NO: 2222786
uuccacaagucucuuacaa

SEQ ID NO: 2222788 - RNA, 19 nt, Artificial Sequence
  Description of Artificial Sequence: Synthetic oligonucleotide
  Sense strand starting at position 748 of SEQ ID NO: 1883873
guauuagaaggcgagaagu

SEQ ID NO: 2222789 - RNA, 19 nt, Artificial Sequence
  Description of Artificial Sequence: Synthetic oligonucleotide
  Antisense strand to SEQ ID NO: 2222788
acuucucgccuucuaauac

SEQ ID NO: 2222790 - RNA, 19 nt, Artificial Sequence
  Description of Artificial Sequence: Synthetic oligonucleotide
  Sense strand starting at position 3980 of SEQ ID NO: 1883873
ccauuucuuucgguggcaa

SEQ ID NO: 2222791 - RNA, 19 nt, Artificial Sequence
  Description of Artificial Sequence: Synthetic oligonucleotide
  Antisense strand to SEQ ID NO: 2222790
uugccaccgaaagaaaugg

SEQ ID NO: 2222792 - RNA, 19 nt, Artificial Sequence
  Description of Artificial Sequence: Synthetic oligonucleotide
  Sense strand starting at position 31 of SEQ ID NO: 1883873
aucucuggugcugaaauca

SEQ ID NO: 2222793 - RNA, 19 nt, Artificial Sequence
  Description of Artificial Sequence: Synthetic oligonucleotide
  Antisense strand to SEQ ID NO: 2222792
ugauuucagcaccagagau

SEQ ID NO: 2222794 - RNA, 19 nt, Artificial Sequence
  Description of Artificial Sequence: Synthetic oligonucleotide
  Sense strand starting at position 2696 of SEQ ID NO: 1883873
gacauuuccguucguagac

SEQ ID NO: 2222795 - RNA, 19 nt, Artificial Sequence
  Description of Artificial Sequence: Synthetic oligonucleotide
  Antisense strand to SEQ ID NO: 2222794
gucuacgaacggaaauguc

SEQ ID NO: 2222796 - RNA, 19 nt, Artificial Sequence
  Description of Artificial Sequence: Synthetic oligonucleotide
  Sense strand starting at position 1005 of SEQ ID NO: 1883873
ggguucuuauucuugagag

SEQ ID NO: 2222797 - RNA, 19 nt, Artificial Sequence
  Description of Artificial Sequence: Synthetic oligonucleotide
  Antisense strand to SEQ ID NO: 2222796
cucucaagaauaagaaccc

SEQ ID NO: 2222798 - RNA, 19 nt, Artificial Sequence
  Description of Artificial Sequence: Synthetic oligonucleotide
  Sense strand starting at position 588 of SEQ ID NO: 1883873
ggucugaguggcuagggau

SEQ ID NO: 2222799 - RNA, 19 nt, Artificial Sequence
  Description of Artificial Sequence: Synthetic oligonucleotide
  Antisense strand to SEQ ID NO: 2222798
aucccuagccacucagacc

SEQ ID NO: 2222800 - RNA, 19 nt, Artificial Sequence
  Description of Artificial Sequence: Synthetic oligonucleotide
  Sense strand starting at position 745 of SEQ ID NO: 1883873
ugaguauuagaaggcgaga

SEQ ID NO: 2222801 - RNA, 19 nt, Artificial Sequence
  Description of Artificial Sequence: Synthetic oligonucleotide
  Antisense strand to SEQ ID NO: 2222800
ucucgccuucuaauacuca

SEQ ID NO: 2222802 - RNA, 19 nt, Artificial Sequence
  Description of Artificial Sequence: Synthetic oligonucleotide
  Sense strand starting at position 945 of SEQ ID NO: 1883873
cuggaaacccuucgaaucu

SEQ ID NO: 2222803 - RNA, 19 nt, Artificial Sequence
  Description of Artificial Sequence: Synthetic oligonucleotide
  Antisense strand to SEQ ID NO: 2222802
agauucgaaggguuuccag

SEQ ID NO: 2222804 - RNA, 19 nt, Artificial Sequence
  Description of Artificial Sequence: Synthetic oligonucleotide
  Sense strand starting at position 2510 of SEQ ID NO: 1883873
ugcuacuuucgcgcggaaa

SEQ ID NO: 2222805 - RNA, 19 nt, Artificial Sequence
  Description of Artificial Sequence: Synthetic oligonucleotide
  Antisense strand to SEQ ID NO: 2222804
uuuccgcgcgaaaguagca

SEQ ID NO: 2222806 - RNA, 19 nt, Artificial Sequence
  Description of Artificial Sequence: Synthetic oligonucleotide
  Sense strand starting at position 384 of SEQ ID NO: 1883873
ucuggacagucuucgaaga

SEQ ID NO: 2222807 - RNA, 19 nt, Artificial Sequence
  Description of Artificial Sequence: Synthetic oligonucleotide
  Antisense strand to SEQ ID NO: 2222806
ucuucgaagacuguccaga

SEQ ID NO: 2222808 - RNA, 19 nt, Artificial Sequence
  Description of Artificial Sequence: Synthetic oligonucleotide
  Sense strand starting at position 734 of SEQ ID NO: 1883873
cgugaacgacaugaguauu

SEQ ID NO: 2222809 - RNA, 19 nt, Artificial Sequence
  Description of Artificial Sequence: Synthetic oligonucleotide
  Antisense strand to SEQ ID NO: 2222808
aauacucaugucguucacg

SEQ ID NO: 2222810 - RNA, 19 nt, Artificial Sequence
  Description of Artificial Sequence: Synthetic oligonucleotide
  Sense strand starting at position 42 of SEQ ID NO: 1883873
ugaaaucaccaguguccua

SEQ ID NO: 2222811 - RNA, 19 nt, Artificial Sequence
  Description of Artificial Sequence: Synthetic oligonucleotide
  Antisense strand to SEQ ID NO: 2222810
uaggacacuggugauuuca

SEQ ID NO: 2222812 - RNA, 19 nt, Artificial Sequence
  Description of Artificial Sequence: Synthetic oligonucleotide
  Sense strand starting at position 49 of SEQ ID NO: 1883873
accaguguccuaggaauuc

SEQ ID NO: 2222813 - RNA, 19 nt, Artificial Sequence
  Description of Artificial Sequence: Synthetic oligonucleotide
  Antisense strand to SEQ ID NO: 2222812
gaauuccuaggacacuggu

SEQ ID NO: 2222814 - RNA, 19 nt, Artificial Sequence
  Description of Artificial Sequence: Synthetic oligonucleotide
  Sense strand starting at position 374 of SEQ ID NO: 1883873
cuaugaaauuucuggacag

SEQ ID NO: 2222815 - RNA, 19 nt, Artificial Sequence
  Description of Artificial Sequence: Synthetic oligonucleotide
  Antisense strand to SEQ ID NO: 2222814
cuguccagaaauuucauag

SEQ ID NO: 2222816 - RNA, 19 nt, Artificial Sequence
  Description of Artificial Sequence: Synthetic oligonucleotide
  Sense strand starting at position 1007 of SEQ ID NO: 1883873
guucuuauucuugagagcu

SEQ ID NO: 2222817 - RNA, 19 nt, Artificial Sequence
  Description of Artificial Sequence: Synthetic oligonucleotide
  Antisense strand to SEQ ID NO: 2222816
agcucucaagaauaagaac

SEQ ID NO: 2222818 - RNA, 19 nt, Artificial Sequence
  Description of Artificial Sequence: Synthetic oligonucleotide
  Sense strand starting at position 2318 of SEQ ID NO: 1883873
gcacuuguauaauccugga

SEQ ID NO: 2222819 - RNA, 19 nt, Artificial Sequence
  Description of Artificial Sequence: Synthetic oligonucleotide
  Antisense strand to SEQ ID NO: 2222818
uccaggauuauacaagugc

SEQ ID NO: 2222820 - RNA, 19 nt, Artificial Sequence
  Description of Artificial Sequence: Synthetic oligonucleotide
  Sense strand starting at position 2270 of SEQ ID NO: 1883873
augguucuuuggucucaaa

SEQ ID NO: 2222821 - RNA, 19 nt, Artificial Sequence
  Description of Artificial Sequence: Synthetic oligonucleotide
  Antisense strand to SEQ ID NO: 2222820
uuugagaccaaagaaccau

SEQ ID NO: 2222822 - RNA, 19 nt, Artificial Sequence
  Description of Artificial Sequence: Synthetic oligonucleotide
  Sense strand starting at position 2729 of SEQ ID NO: 1883873
gugccuuuggccuaaggga

SEQ ID NO: 2222823 - RNA, 19 nt, Artificial Sequence
  Description of Artificial Sequence: Synthetic oligonucleotide
  Antisense strand to SEQ ID NO: 2222822
ucccuuaggccaaaggcac

SEQ ID NO: 2222824 - RNA, 19 nt, Artificial Sequence
  Description of Artificial Sequence: Synthetic oligonucleotide
  Sense strand starting at position 999 of SEQ ID NO: 1883873
gaguuaggguucuuauucu

SEQ ID NO: 2222825 - RNA, 19 nt, Artificial Sequence
  Description of Artificial Sequence: Synthetic oligonucleotide
  Antisense strand to SEQ ID NO: 2222824
agaauaagaacccuaacuc

SEQ ID NO: 2222826 - RNA, 19 nt, Artificial Sequence
  Description of Artificial Sequence: Synthetic oligonucleotide
  Sense strand starting at position 2693 of SEQ ID NO: 1883873
ccggacauuuccguucgua

SEQ ID NO: 2222827 - RNA, 19 nt, Artificial Sequence
  Description of Artificial Sequence: Synthetic oligonucleotide
  Antisense strand to SEQ ID NO: 2222826
uacgaacggaaauguccgg

SEQ ID NO: 2222828 - RNA, 19 nt, Artificial Sequence
  Description of Artificial Sequence: Synthetic oligonucleotide
  Sense strand starting at position 3357 of SEQ ID NO: 1883873
ggugcuaauuauucccaua

SEQ ID NO: 2222829 - RNA, 19 nt, Artificial Sequence
  Description of Artificial Sequence: Synthetic oligonucleotide
  Antisense strand to SEQ ID NO: 2222828
uaugggaauaauuagcacc

SEQ ID NO: 2222830 - RNA, 19 nt, Artificial Sequence
  Description of Artificial Sequence: Synthetic oligonucleotide
  Sense strand starting at position 2266 of SEQ ID NO: 1883873
ggauaugguucuuuggucu

SEQ ID NO: 2222831 - RNA, 19 nt, Artificial Sequence
  Description of Artificial Sequence: Synthetic oligonucleotide
  Antisense strand to SEQ ID NO: 2222830
agaccaaagaaccauaucc

SEQ ID NO: 2222832 - RNA, 19 nt, Artificial Sequence
  Description of Artificial Sequence: Synthetic oligonucleotide
  Sense strand starting at position 2269 of SEQ ID NO: 1883873
uaugguucuuuggucucaa

SEQ ID NO: 2222833 - RNA, 19 nt, Artificial Sequence
  Description of Artificial Sequence: Synthetic oligonucleotide
  Antisense strand to SEQ ID NO: 2222832
uugagaccaaagaaccaua

SEQ ID NO: 2222834 - RNA, 19 nt, Artificial Sequence
  Description of Artificial Sequence: Synthetic oligonucleotide
  Sense strand starting at position 375 of SEQ ID NO: 1883873
uaugaaauuucuggacagu

SEQ ID NO: 2222835 - RNA, 19 nt, Artificial Sequence
  Description of Artificial Sequence: Synthetic oligonucleotide
  Antisense strand to SEQ ID NO: 2222834
acuguccagaaauuucaua

SEQ ID NO: 2222836 - RNA, 19 nt, Artificial Sequence
  Description of Artificial Sequence: Synthetic oligonucleotide
  Sense strand starting at position 603 of SEQ ID NO: 1883873
ggauauagauuguaagaga

SEQ ID NO: 2222837 - RNA, 19 nt, Artificial Sequence
  Description of Artificial Sequence: Synthetic oligonucleotide
  Antisense strand to SEQ ID NO: 2222836
ucucuuacaaucuauaucc

SEQ ID NO: 2222838 - RNA, 19 nt, Artificial Sequence
  Description of Artificial Sequence: Synthetic oligonucleotide
  Sense strand starting at position 508 of SEQ ID NO: 1883873
gccaaacuguggucuauca

SEQ ID NO: 2222839 - RNA, 19 nt, Artificial Sequence
  Description of Artificial Sequence: Synthetic oligonucleotide
  Antisense strand to SEQ ID NO: 2222838
ugauagaccacaguuuggc

SEQ ID NO: 2222840 - RNA, 19 nt, Artificial Sequence
  Description of Artificial Sequence: Synthetic oligonucleotide
  Sense strand starting at position 2814 of SEQ ID NO: 1883873
agacccuacuaggauuaaa

SEQ ID NO: 2222841 - RNA, 19 nt, Artificial Sequence
  Description of Artificial Sequence: Synthetic oligonucleotide
  Antisense strand to SEQ ID NO: 2222840
uuuaauccuaguagggucu

SEQ ID NO: 2222842 - RNA, 19 nt, Artificial Sequence
  Description of Artificial Sequence: Synthetic oligonucleotide
  Sense strand starting at position 3940 of SEQ ID NO: 1883873
agaugauauuuagguuggu

SEQ ID NO: 2222843 - RNA, 19 nt, Artificial Sequence
  Description of Artificial Sequence: Synthetic oligonucleotide
  Antisense strand to SEQ ID NO: 2222842
accaaccuaaauaucaucu

SEQ ID NO: 2222844 - RNA, 19 nt, Artificial Sequence
  Description of Artificial Sequence: Synthetic oligonucleotide
  Sense strand starting at position 360 of SEQ ID NO: 1883873
aguguaauuuguuacuaug

SEQ ID NO: 2222845 - RNA, 19 nt, Artificial Sequence
  Description of Artificial Sequence: Synthetic oligonucleotide
  Antisense strand to SEQ ID NO: 2222844
cauaguaacaaauuacacu

SEQ ID NO: 2222846 - RNA, 19 nt, Artificial Sequence
  Description of Artificial Sequence: Synthetic oligonucleotide
  Sense strand starting at position 733 of SEQ ID NO: 1883873
gcgugaacgacaugaguau

SEQ ID NO: 2222847 - RNA, 19 nt, Artificial Sequence
  Description of Artificial Sequence: Synthetic oligonucleotide
  Antisense strand to SEQ ID NO: 2222846
auacucaugucguucacgc

SEQ ID NO: 2222848 - RNA, 19 nt, Artificial Sequence
  Description of Artificial Sequence: Synthetic oligonucleotide
  Sense strand starting at position 2061 of SEQ ID NO: 1883874
acagaaugucagcaaaccu

SEQ ID NO: 2222849 - RNA, 19 nt, Artificial Sequence
  Description of Artificial Sequence: Synthetic oligonucleotide
  Antisense strand to SEQ ID NO: 2222848
agguuugcugacauucugu

SEQ ID NO: 2222850 - RNA, 19 nt, Artificial Sequence
  Description of Artificial Sequence: Synthetic oligonucleotide
  Sense strand starting at position 2956 of SEQ ID NO: 1883874
auuugugagucuuuccuac

SEQ ID NO: 2222851 - RNA, 19 nt, Artificial Sequence
  Description of Artificial Sequence: Synthetic oligonucleotide
  Antisense strand to SEQ ID NO: 2222850
guaggaaagacucacaaau

SEQ ID NO: 2222852 - RNA, 19 nt, Artificial Sequence
  Description of Artificial Sequence: Synthetic oligonucleotide
  Sense strand starting at position 3728 of SEQ ID NO: 1883874
ggagcaggucuugaucaca

SEQ ID NO: 2222853 - RNA, 19 nt, Artificial Sequence
  Description of Artificial Sequence: Synthetic oligonucleotide
  Antisense strand to SEQ ID NO: 2222852
ugugaucaagaccugcucc

SEQ ID NO: 2222854 - RNA, 19 nt, Artificial Sequence
  Description of Artificial Sequence: Synthetic oligonucleotide
  Sense strand starting at position 2435 of SEQ ID NO: 1883874
uucugaaaucgacauccuu

SEQ ID NO: 2222855 - RNA, 19 nt, Artificial Sequence
  Description of Artificial Sequence: Synthetic oligonucleotide
  Antisense strand to SEQ ID NO: 2222854
aaggaugucgauuucagaa

SEQ ID NO: 2222856 - RNA, 19 nt, Artificial Sequence
  Description of Artificial Sequence: Synthetic oligonucleotide
  Sense strand starting at position 3474 of SEQ ID NO: 1883874
acuccuacagugcaagaau

SEQ ID NO: 2222857 - RNA, 19 nt, Artificial Sequence
  Description of Artificial Sequence: Synthetic oligonucleotide
  Antisense strand to SEQ ID NO: 2222856
auucuugcacuguaggagu

SEQ ID NO: 2222858 - RNA, 19 nt, Artificial Sequence
  Description of Artificial Sequence: Synthetic oligonucleotide
  Sense strand starting at position 2894 of SEQ ID NO: 1883874
ccacacuauugggugaaua

SEQ ID NO: 2222859 - RNA, 19 nt, Artificial Sequence
  Description of Artificial Sequence: Synthetic oligonucleotide
  Antisense strand to SEQ ID NO: 2222858
uauucacccaauagugugg

SEQ ID NO: 2222860 - RNA, 19 nt, Artificial Sequence
  Description of Artificial Sequence: Synthetic oligonucleotide
  Sense strand starting at position 239 of SEQ ID NO: 1883874
gguaacugucauuaacacu

SEQ ID NO: 2222861 - RNA, 19 nt, Artificial Sequence
  Description of Artificial Sequence: Synthetic oligonucleotide
  Antisense strand to SEQ ID NO: 2222860
aguguuaaugacaguuacc

SEQ ID NO: 2222862 - RNA, 19 nt, Artificial Sequence
  Description of Artificial Sequence: Synthetic oligonucleotide
  Sense strand starting at position 2902 of SEQ ID NO: 1883874
uugggugaauauguaacaa

SEQ ID NO: 2222863 - RNA, 19 nt, Artificial Sequence
  Description of Artificial Sequence: Synthetic oligonucleotide
  Antisense strand to SEQ ID NO: 2222862
uuguuacauauucacccaa

SEQ ID NO: 2222864 - RNA, 19 nt, Artificial Sequence
  Description of Artificial Sequence: Synthetic oligonucleotide
  Sense strand starting at position 1547 of SEQ ID NO: 1883874
gugggacugccugauagau

SEQ ID NO: 2222865 - RNA, 19 nt, Artificial Sequence
  Description of Artificial Sequence: Synthetic oligonucleotide
  Antisense strand to SEQ ID NO: 2222864
aucuaucaggcagucccac

SEQ ID NO: 2222866 - RNA, 19 nt, Artificial Sequence
  Description of Artificial Sequence: Synthetic oligonucleotide
  Sense strand starting at position 2895 of SEQ ID NO: 1883874
cacacuauugggugaauau

SEQ ID NO: 2222867 - RNA, 19 nt, Artificial Sequence
  Description of Artificial Sequence: Synthetic oligonucleotide
  Antisense strand to SEQ ID NO: 2222866
auauucacccaauagugug

SEQ ID NO: 2222868 - RNA, 19 nt, Artificial Sequence
  Description of Artificial Sequence: Synthetic oligonucleotide
  Sense strand starting at position 3577 of SEQ ID NO: 1883874
aaguaaguccugcagagau

SEQ ID NO: 2222869 - RNA, 19 nt, Artificial Sequence
  Description of Artificial Sequence: Synthetic oligonucleotide
  Antisense strand to SEQ ID NO: 2222868
aucucugcaggacuuacuu

SEQ ID NO: 2222870 - RNA, 19 nt, Artificial Sequence
  Description of Artificial Sequence: Synthetic oligonucleotide
  Sense strand starting at position 3590 of SEQ ID NO: 1883874
agagaugcagucuggaaca

SEQ ID NO: 2222871 - RNA, 19 nt, Artificial Sequence
  Description of Artificial Sequence: Synthetic oligonucleotide
  Antisense strand to SEQ ID NO: 2222870
uguuccagacugcaucucu

SEQ ID NO: 2222872 - RNA, 19 nt, Artificial Sequence
  Description of Artificial Sequence: Synthetic oligonucleotide
  Sense strand starting at position 2491 of SEQ ID NO: 1883874
gggucuuugggccacacaa

SEQ ID NO: 2222873 - RNA, 19 nt, Artificial Sequence
  Description of Artificial Sequence: Synthetic oligonucleotide
  Antisense strand to SEQ ID NO: 2222872
uuguguggcccaaagaccc

SEQ ID NO: 2222874 - RNA, 19 nt, Artificial Sequence
  Description of Artificial Sequence: Synthetic oligonucleotide
  Sense strand starting at position 910 of SEQ ID NO: 1883874
gccauauaaccuggagacu

SEQ ID NO: 2222875 - RNA, 19 nt, Artificial Sequence
  Description of Artificial Sequence: Synthetic oligonucleotide
  Antisense strand to SEQ ID NO: 2222874
agucuccagguuauauggc

SEQ ID NO: 2222876 - RNA, 19 nt, Artificial Sequence
  Description of Artificial Sequence: Synthetic oligonucleotide
  Sense strand starting at position 398 of SEQ ID NO: 1883874
gguacaauuccacauggcu

SEQ ID NO: 2222877 - RNA, 19 nt, Artificial Sequence
  Description of Artificial Sequence: Synthetic oligonucleotide
  Antisense strand to SEQ ID NO: 2222876
agccauguggaauuguacc

SEQ ID NO: 2222878 - RNA, 19 nt, Artificial Sequence
  Description of Artificial Sequence: Synthetic oligonucleotide
  Sense strand starting at position 1759 of SEQ ID NO: 1883874
cgcuccucccaagauaaca

SEQ ID NO: 2222879 - RNA, 19 nt, Artificial Sequence
  Description of Artificial Sequence: Synthetic oligonucleotide
  Antisense strand to SEQ ID NO: 2222878
uguuaucuugggaggagcg

SEQ ID NO: 2222880 - RNA, 19 nt, Artificial Sequence
  Description of Artificial Sequence: Synthetic oligonucleotide
  Sense strand starting at position 238 of SEQ ID NO: 1883874
ggguaacugucauuaacac

SEQ ID NO: 2222881 - RNA, 19 nt, Artificial Sequence
  Description of Artificial Sequence: Synthetic oligonucleotide
  Antisense strand to SEQ ID NO: 2222880
guguuaaugacaguuaccc

SEQ ID NO: 2222882 - RNA, 19 nt, Artificial Sequence
  Description of Artificial Sequence: Synthetic oligonucleotide
  Sense strand starting at position 1692 of SEQ ID NO: 1883874
ccaacagacccuugguuau

SEQ ID NO: 2222883 - RNA, 19 nt, Artificial Sequence
  Description of Artificial Sequence: Synthetic oligonucleotide
  Antisense strand to SEQ ID NO: 2222882
auaaccaagggucuguugg

SEQ ID NO: 2222884 - RNA, 19 nt, Artificial Sequence
  Description of Artificial Sequence: Synthetic oligonucleotide
  Sense strand starting at position 1612 of SEQ ID NO: 1883874
gaaguuugacgucacucau

SEQ ID NO: 2222885 - RNA, 19 nt, Artificial Sequence
  Description of Artificial Sequence: Synthetic oligonucleotide
  Antisense strand to SEQ ID NO: 2222884
augagugacgucaaacuuc

SEQ ID NO: 2222886 - RNA, 19 nt, Artificial Sequence
  Description of Artificial Sequence: Synthetic oligonucleotide
  Sense strand starting at position 2235 of SEQ ID NO: 1883874
aguagagcucccugggaca

SEQ ID NO: 2222887 - RNA, 19 nt, Artificial Sequence
  Description of Artificial Sequence: Synthetic oligonucleotide
  Antisense strand to SEQ ID NO: 2222886
ugucccagggagcucuacu

SEQ ID NO: 2222888 - RNA, 19 nt, Artificial Sequence
  Description of Artificial Sequence: Synthetic oligonucleotide
  Sense strand starting at position 2928 of SEQ ID NO: 1883874
ucuugcucucaucaacgaa

SEQ ID NO: 2222889 - RNA, 19 nt, Artificial Sequence
  Description of Artificial Sequence: Synthetic oligonucleotide
  Antisense strand to SEQ ID NO: 2222888
uucguugaugagagcaaga

SEQ ID NO: 2222890 - RNA, 19 nt, Artificial Sequence
  Description of Artificial Sequence: Synthetic oligonucleotide
  Sense strand starting at position 3013 of SEQ ID NO: 1883874
uucuuugagccucauggua

SEQ ID NO: 2222891 - RNA, 19 nt, Artificial Sequence
  Description of Artificial Sequence: Synthetic oligonucleotide
  Antisense strand to SEQ ID NO: 2222890
uaccaugaggcucaaagaa

SEQ ID NO: 2222892 - RNA, 19 nt, Artificial Sequence
  Description of Artificial Sequence: Synthetic oligonucleotide
  Sense strand starting at position 760 of SEQ ID NO: 1883874
ucaaguugaccagggcuua

SEQ ID NO: 2222893 - RNA, 19 nt, Artificial Sequence
  Description of Artificial Sequence: Synthetic oligonucleotide
  Antisense strand to SEQ ID NO: 2222892
uaagcccuggucaacuuga

SEQ ID NO: 2222894 - RNA, 19 nt, Artificial Sequence
  Description of Artificial Sequence: Synthetic oligonucleotide
  Sense strand starting at position 2931 of SEQ ID NO: 1883874
ugcucucaucaacgaaaca

SEQ ID NO: 2222895 - RNA, 19 nt, Artificial Sequence
  Description of Artificial Sequence: Synthetic oligonucleotide
  Antisense strand to SEQ ID NO: 2222894
uguuucguugaugagagca

SEQ ID NO: 2222896 - RNA, 19 nt, Artificial Sequence
  Description of Artificial Sequence: Synthetic oligonucleotide
  Sense strand starting at position 3359 of SEQ ID NO: 1883874
cuccucuuccagggucaau

SEQ ID NO: 2222897 - RNA, 19 nt, Artificial Sequence
  Description of Artificial Sequence: Synthetic oligonucleotide
  Antisense strand to SEQ ID NO: 2222896
auugacccuggaagaggag

SEQ ID NO: 2222898 - RNA, 19 nt, Artificial Sequence
  Description of Artificial Sequence: Synthetic oligonucleotide
  Sense strand starting at position 3038 of SEQ ID NO: 1883874
agagguaagcacuguuauu

SEQ ID NO: 2222899 - RNA, 19 nt, Artificial Sequence
  Description of Artificial Sequence: Synthetic oligonucleotide
  Antisense strand to SEQ ID NO: 2222898
aauaacagugcuuaccucu

SEQ ID NO: 2222900 - RNA, 19 nt, Artificial Sequence
  Description of Artificial Sequence: Synthetic oligonucleotide
  Sense strand starting at position 2958 of SEQ ID NO: 1883874
uugugagucuuuccuacaa

SEQ ID NO: 2222901 - RNA, 19 nt, Artificial Sequence
  Description of Artificial Sequence: Synthetic oligonucleotide
  Antisense strand to SEQ ID NO: 2222900
uuguaggaaagacucacaa

SEQ ID NO: 2222902 - RNA, 19 nt, Artificial Sequence
  Description of Artificial Sequence: Synthetic oligonucleotide
  Sense strand starting at position 3430 of SEQ ID NO: 1883874
cgccuuuaagauggagcaa

SEQ ID NO: 2222903 - RNA, 19 nt, Artificial Sequence
  Description of Artificial Sequence: Synthetic oligonucleotide
  Antisense strand to SEQ ID NO: 2222902
uugcuccaucuuaaaggcg

SEQ ID NO: 2222904 - RNA, 19 nt, Artificial Sequence
  Description of Artificial Sequence: Synthetic oligonucleotide
  Sense strand starting at position 3771 of SEQ ID NO: 1883874
gggugagucaccugaggcu

SEQ ID NO: 2222905 - RNA, 19 nt, Artificial Sequence
  Description of Artificial Sequence: Synthetic oligonucleotide
  Antisense strand to SEQ ID NO: 2222904
agccucaggugacucaccc

SEQ ID NO: 2222906 - RNA, 19 nt, Artificial Sequence
  Description of Artificial Sequence: Synthetic oligonucleotide
  Sense strand starting at position 2950 of SEQ ID NO: 1883874
augaauauuugugagucuu

SEQ ID NO: 2222907 - RNA, 19 nt, Artificial Sequence
  Description of Artificial Sequence: Synthetic oligonucleotide
  Antisense strand to SEQ ID NO: 2222906
aagacucacaaauauucau

SEQ ID NO: 2222908 - RNA, 19 nt, Artificial Sequence
  Description of Artificial Sequence: Synthetic oligonucleotide
  Sense strand starting at position 1088 of SEQ ID NO: 1883874
ggucuagacaguggcuauu

SEQ ID NO: 2222909 - RNA, 19 nt, Artificial Sequence
  Description of Artificial Sequence: Synthetic oligonucleotide
  Antisense strand to SEQ ID NO: 2222908
aauagccacugucuagacc

SEQ ID NO: 2222910 - RNA, 19 nt, Artificial Sequence
  Description of Artificial Sequence: Synthetic oligonucleotide
  Sense strand starting at position 783 of SEQ ID NO: 1883874
ccugcaaugccaggucaaa

SEQ ID NO: 2222911 - RNA, 19 nt, Artificial Sequence
  Description of Artificial Sequence: Synthetic oligonucleotide
  Antisense strand to SEQ ID NO: 2222910
uuugaccuggcauugcagg

SEQ ID NO: 2222912 - RNA, 19 nt, Artificial Sequence
  Description of Artificial Sequence: Synthetic oligonucleotide
  Sense strand starting at position 830 of SEQ ID NO: 1883874
gcccgacuccuuuggaacu

SEQ ID NO: 2222913 - RNA, 19 nt, Artificial Sequence
  Description of Artificial Sequence: Synthetic oligonucleotide
  Antisense strand to SEQ ID NO: 2222912
aguuccaaaggagucgggc

SEQ ID NO: 2222914 - RNA, 19 nt, Artificial Sequence
  Description of Artificial Sequence: Synthetic oligonucleotide
  Sense strand starting at position 3424 of SEQ ID NO: 1883874
gcuccucgccuuuaagaug

SEQ ID NO: 2222915 - RNA, 19 nt, Artificial Sequence
  Description of Artificial Sequence: Synthetic oligonucleotide
  Antisense strand to SEQ ID NO: 2222914
caucuuaaaggcgaggagc

SEQ ID NO: 2222916 - RNA, 19 nt, Artificial Sequence
  Description of Artificial Sequence: Synthetic oligonucleotide
  Sense strand starting at position 2208 of SEQ ID NO: 1883874
agcuguuggccauggaacu

SEQ ID NO: 2222917 - RNA, 19 nt, Artificial Sequence
  Description of Artificial Sequence: Synthetic oligonucleotide
  Antisense strand to SEQ ID NO: 2222916
aguuccauggccaacagcu

SEQ ID NO: 2222918 - RNA, 19 nt, Artificial Sequence
  Description of Artificial Sequence: Synthetic oligonucleotide
  Sense strand starting at position 1187 of SEQ ID NO: 1883874
cccuuuccugcuggucaaa

SEQ ID NO: 2222919 - RNA, 19 nt, Artificial Sequence
  Description of Artificial Sequence: Synthetic oligonucleotide
  Antisense strand to SEQ ID NO: 2222918
uuugaccagcaggaaaggg

SEQ ID NO: 2222920 - RNA, 19 nt, Artificial Sequence
  Description of Artificial Sequence: Synthetic oligonucleotide
  Sense strand starting at position 2949 of SEQ ID NO: 1883874
aaugaauauuugugagucu

SEQ ID NO: 2222921 - RNA, 19 nt, Artificial Sequence
  Description of Artificial Sequence: Synthetic oligonucleotide
  Antisense strand to SEQ ID NO: 2222920
agacucacaaauauucauu

SEQ ID NO: 2222922 - RNA, 19 nt, Artificial Sequence
  Description of Artificial Sequence: Synthetic oligonucleotide
  Sense strand starting at position 1553 of SEQ ID NO: 1883874
cugccugauagauguguuu

SEQ ID NO: 2222923 - RNA, 19 nt, Artificial Sequence
  Description of Artificial Sequence: Synthetic oligonucleotide
  Antisense strand to SEQ ID NO: 2222922
aaacacaucuaucaggcag

SEQ ID NO: 2222924 - RNA, 19 nt, Artificial Sequence
  Description of Artificial Sequence: Synthetic oligonucleotide
  Sense strand starting at position 2018 of SEQ ID NO: 1883874
gcagcugcucuuugaauga

SEQ ID NO: 2222925 - RNA, 19 nt, Artificial Sequence
  Description of Artificial Sequence: Synthetic oligonucleotide
  Antisense strand to SEQ ID NO: 2222924
ucauucaaagagcagcugc

SEQ ID NO: 2222926 - RNA, 19 nt, Artificial Sequence
  Description of Artificial Sequence: Synthetic oligonucleotide
  Sense strand starting at position 3372 of SEQ ID NO: 1883874
gucaauguguggucucgaa

SEQ ID NO: 2222927 - RNA, 19 nt, Artificial Sequence
  Description of Artificial Sequence: Synthetic oligonucleotide
  Antisense strand to SEQ ID NO: 2222926
uucgagaccacacauugac

SEQ ID NO: 2222928 - RNA, 19 nt, Artificial Sequence
  Description of Artificial Sequence: Synthetic oligonucleotide
  Sense strand starting at position 58 of SEQ ID NO: 1883875
uugggcauuccugagaaug

SEQ ID NO: 2222929 - RNA, 19 nt, Artificial Sequence
  Description of Artificial Sequence: Synthetic oligonucleotide
  Antisense strand to SEQ ID NO: 2222928
cauucucaggaaugcccaa

SEQ ID NO: 2222930 - RNA, 19 nt, Artificial Sequence
  Description of Artificial Sequence: Synthetic oligonucleotide
  Sense strand starting at position 2720 of SEQ ID NO: 1883875
gagaaaccucuaggagcau

SEQ ID NO: 2222931 - RNA, 19 nt, Artificial Sequence
  Description of Artificial Sequence: Synthetic oligonucleotide
  Antisense strand to SEQ ID NO: 2222930
augcuccuagagguuucuc

SEQ ID NO: 2222932 - RNA, 19 nt, Artificial Sequence
  Description of Artificial Sequence: Synthetic oligonucleotide
  Sense strand starting at position 1570 of SEQ ID NO: 1883875
augccaaacagaugggauu

SEQ ID NO: 2222933 - RNA, 19 nt, Artificial Sequence
  Description of Artificial Sequence: Synthetic oligonucleotide
  Antisense strand to SEQ ID NO: 2222932
aaucccaucuguuuggcau

SEQ ID NO: 2222934 - RNA, 19 nt, Artificial Sequence
  Description of Artificial Sequence: Synthetic oligonucleotide
  Sense strand starting at position 234 of SEQ ID NO: 1883875
gcaauugugcugguuugua

SEQ ID NO: 2222935 - RNA, 19 nt, Artificial Sequence
  Description of Artificial Sequence: Synthetic oligonucleotide
  Antisense strand to SEQ ID NO: 2222934
uacaaaccagcacaauugc

SEQ ID NO: 2222936 - RNA, 19 nt, Artificial Sequence
  Description of Artificial Sequence: Synthetic oligonucleotide
  Sense strand starting at position 3389 of SEQ ID NO: 1883875
gcagaaauggaaugaaguu

SEQ ID NO: 2222937 - RNA, 19 nt, Artificial Sequence
  Description of Artificial Sequence: Synthetic oligonucleotide
  Antisense strand to SEQ ID NO: 2222936
aacuucauuccauuucugc

SEQ ID NO: 2222938 - RNA, 19 nt, Artificial Sequence
  Description of Artificial Sequence: Synthetic oligonucleotide
  Sense strand starting at position 703 of SEQ ID NO: 1883875
gcagccagacaauaucaau

SEQ ID NO: 2222939 - RNA, 19 nt, Artificial Sequence
  Description of Artificial Sequence: Synthetic oligonucleotide
  Antisense strand to SEQ ID NO: 2222938
auugauauugucuggcugc

SEQ ID NO: 2222940 - RNA, 19 nt, Artificial Sequence
  Description of Artificial Sequence: Synthetic oligonucleotide
  Sense strand starting at position 3795 of SEQ ID NO: 1883875
ggcagaaugauguaauagu

SEQ ID NO: 2222941 - RNA, 19 nt, Artificial Sequence
  Description of Artificial Sequence: Synthetic oligonucleotide
  Antisense strand to SEQ ID NO: 2222940
acuauuacaucauucugcc

SEQ ID NO: 2222942 - RNA, 19 nt, Artificial Sequence
  Description of Artificial Sequence: Synthetic oligonucleotide
  Sense strand starting at position 1675 of SEQ ID NO: 1883875
gugguacacagagagcauu

SEQ ID NO: 2222943 - RNA, 19 nt, Artificial Sequence
  Description of Artificial Sequence: Synthetic oligonucleotide
  Antisense strand to SEQ ID NO: 2222942
aaugcucucuguguaccac

SEQ ID NO: 2222944 - RNA, 19 nt, Artificial Sequence
  Description of Artificial Sequence: Synthetic oligonucleotide
  Sense strand starting at position 3756 of SEQ ID NO: 1883875
agcauugguagaggaugau

SEQ ID NO: 2222945 - RNA, 19 nt, Artificial Sequence
  Description of Artificial Sequence: Synthetic oligonucleotide
  Antisense strand to SEQ ID NO: 2222944
aucauccucuaccaaugcu

SEQ ID NO: 2222946 - RNA, 19 nt, Artificial Sequence
  Description of Artificial Sequence: Synthetic oligonucleotide
  Sense strand starting at position 342 of SEQ ID NO: 1883875
gaccaugucugacucauga

SEQ ID NO: 2222947 - RNA, 19 nt, Artificial Sequence
  Description of Artificial Sequence: Synthetic oligonucleotide
  Antisense strand to SEQ ID NO: 2222946
ucaugagucagacaugguc

SEQ ID NO: 2222948 - RNA, 19 nt, Artificial Sequence
  Description of Artificial Sequence: Synthetic oligonucleotide
  Sense strand starting at position 207 of SEQ ID NO: 1883875
guuagagaugauuggguca

SEQ ID NO: 2222949 - RNA, 19 nt, Artificial Sequence
  Description of Artificial Sequence: Synthetic oligonucleotide
  Antisense strand to SEQ ID NO: 2222948
ugacccaaucaucucuaac

SEQ ID NO: 2222950 - RNA, 19 nt, Artificial Sequence
  Description of Artificial Sequence: Synthetic oligonucleotide
  Sense strand starting at position 1581 of SEQ ID NO: 1883875
augggauugguccgagaua

SEQ ID NO: 2222951 - RNA, 19 nt, Artificial Sequence
  Description of Artificial Sequence: Synthetic oligonucleotide
  Antisense strand to SEQ ID NO: 2222950
uaucucggaccaaucccau

SEQ ID NO: 2222952 - RNA, 19 nt, Artificial Sequence
  Description of Artificial Sequence: Synthetic oligonucleotide
  Sense strand starting at position 2732 of SEQ ID NO: 1883875
ggagcauuccagugaggag

SEQ ID NO: 2222953 - RNA, 19 nt, Artificial Sequence
  Description of Artificial Sequence: Synthetic oligonucleotide
  Antisense strand to SEQ ID NO: 2222952
cuccucacuggaaugcucc

SEQ ID NO: 2222954 - RNA, 19 nt, Artificial Sequence
  Description of Artificial Sequence: Synthetic oligonucleotide
  Sense strand starting at position 728 of SEQ ID NO: 1883875
gcacuuagucaugagacuu

SEQ ID NO: 2222955 - RNA, 19 nt, Artificial Sequence
  Description of Artificial Sequence: Synthetic oligonucleotide
  Antisense strand to SEQ ID NO: 2222954
aagucucaugacuaagugc

SEQ ID NO: 2222956 - RNA, 19 nt, Artificial Sequence
  Description of Artificial Sequence: Synthetic oligonucleotide
  Sense strand starting at position 855 of SEQ ID NO: 1883875
ucaauaaauggcuggugaa

SEQ ID NO: 2222957 - RNA, 19 nt, Artificial Sequence
  Description of Artificial Sequence: Synthetic oligonucleotide
  Antisense strand to SEQ ID NO: 2222956
uucaccagccauuuauuga

SEQ ID NO: 2222958 - RNA, 19 nt, Artificial Sequence
  Description of Artificial Sequence: Synthetic oligonucleotide
  Sense strand starting at position 856 of SEQ ID NO: 1883875
caauaaauggcuggugaau

SEQ ID NO: 2222959 - RNA, 19 nt, Artificial Sequence
  Description of Artificial Sequence: Synthetic oligonucleotide
  Antisense strand to SEQ ID NO: 2222958
auucaccagccauuuauug

SEQ ID NO: 2222960 - RNA, 19 nt, Artificial Sequence
  Description of Artificial Sequence: Synthetic oligonucleotide
  Sense strand starting at position 1360 of SEQ ID NO: 1883875
gaaggcaaucagcaaguuu

SEQ ID NO: 2222961 - RNA, 19 nt, Artificial Sequence
  Description of Artificial Sequence: Synthetic oligonucleotide
  Antisense strand to SEQ ID NO: 2222960
aaacuugcugauugccuuc

SEQ ID NO: 2222962 - RNA, 19 nt, Artificial Sequence
  Description of Artificial Sequence: Synthetic oligonucleotide
  Sense strand starting at position 3811 of SEQ ID NO: 1883875
aguuaagaucuaggaguuc

SEQ ID NO: 2222963 - RNA, 19 nt, Artificial Sequence
  Description of Artificial Sequence: Synthetic oligonucleotide
  Antisense strand to SEQ ID NO: 2222962
gaacuccuagaucuuaacu

SEQ ID NO: 2222964 - RNA, 19 nt, Artificial Sequence
  Description of Artificial Sequence: Synthetic oligonucleotide
  Sense strand starting at position 1169 of SEQ ID NO: 1883875
gacaaaccuguuuguagga

SEQ ID NO: 2222965 - RNA, 19 nt, Artificial Sequence
  Description of Artificial Sequence: Synthetic oligonucleotide
  Antisense strand to SEQ ID NO: 2222964
uccuacaaacagguuuguc

SEQ ID NO: 2222966 - RNA, 19 nt, Artificial Sequence
  Description of Artificial Sequence: Synthetic oligonucleotide
  Sense strand starting at position 250 of SEQ ID NO: 1883875
guaagcucuggagagcaau

SEQ ID NO: 2222967 - RNA, 19 nt, Artificial Sequence
  Description of Artificial Sequence: Synthetic oligonucleotide
  Antisense strand to SEQ ID NO: 2222966
auugcucuccagagcuuac

SEQ ID NO: 2222968 - RNA, 19 nt, Artificial Sequence
  Description of Artificial Sequence: Synthetic oligonucleotide
  Sense strand starting at position 1270 of SEQ ID NO: 1883875
ucaucuuguguauacuaua

SEQ ID NO: 2222969 - RNA, 19 nt, Artificial Sequence
  Description of Artificial Sequence: Synthetic oligonucleotide
  Antisense strand to SEQ ID NO: 2222968
uauaguauacacaagauga

SEQ ID NO: 2222970 - RNA, 19 nt, Artificial Sequence
  Description of Artificial Sequence: Synthetic oligonucleotide
  Sense strand starting at position 3749 of SEQ ID NO: 1883875
ugaacucagcauugguaga

SEQ ID NO: 2222971 - RNA, 19 nt, Artificial Sequence
  Description of Artificial Sequence: Synthetic oligonucleotide
  Antisense strand to SEQ ID NO: 2222970
ucuaccaaugcugaguuca

SEQ ID NO: 2222972 - RNA, 19 nt, Artificial Sequence
  Description of Artificial Sequence: Synthetic oligonucleotide
  Sense strand starting at position 3711 of SEQ ID NO: 1883875
acggccuauggguaucuaa

SEQ ID NO: 2222973 - RNA, 19 nt, Artificial Sequence
  Description of Artificial Sequence: Synthetic oligonucleotide
  Antisense strand to SEQ ID NO: 2222972
uuagauacccauaggccgu

SEQ ID NO: 2222974 - RNA, 19 nt, Artificial Sequence
  Description of Artificial Sequence: Synthetic oligonucleotide
  Sense strand starting at position 3714 of SEQ ID NO: 1883875
gccuauggguaucuaaaca

SEQ ID NO: 2222975 - RNA, 19 nt, Artificial Sequence
  Description of Artificial Sequence: Synthetic oligonucleotide
  Antisense strand to SEQ ID NO: 2222974
uguuuagauacccauaggc

SEQ ID NO: 2222976 - RNA, 19 nt, Artificial Sequence
  Description of Artificial Sequence: Synthetic oligonucleotide
  Sense strand starting at position 2287 of SEQ ID NO: 1883875
uaucuugcaugaguuagaa

SEQ ID NO: 2222977 - RNA, 19 nt, Artificial Sequence
  Description of Artificial Sequence: Synthetic oligonucleotide
  Antisense strand to SEQ ID NO: 2222976
uucuaacucaugcaagaua

SEQ ID NO: 2222978 - RNA, 19 nt, Artificial Sequence
  Description of Artificial Sequence: Synthetic oligonucleotide
  Sense strand starting at position 976 of SEQ ID NO: 1883875
ucacauagaccuuggcuua

SEQ ID NO: 2222979 - RNA, 19 nt, Artificial Sequence
  Description of Artificial Sequence: Synthetic oligonucleotide
  Antisense strand to SEQ ID NO: 2222978
uaagccaaggucuauguga

SEQ ID NO: 2222980 - RNA, 19 nt, Artificial Sequence
  Description of Artificial Sequence: Synthetic oligonucleotide
  Sense strand starting at position 1348 of SEQ ID NO: 1883875
uccaguucugcagaaggca

SEQ ID NO: 2222981 - RNA, 19 nt, Artificial Sequence
  Description of Artificial Sequence: Synthetic oligonucleotide
  Antisense strand to SEQ ID NO: 2222980
ugccuucugcagaacugga

SEQ ID NO: 2222982 - RNA, 19 nt, Artificial Sequence
  Description of Artificial Sequence: Synthetic oligonucleotide
  Sense strand starting at position 3941 of SEQ ID NO: 1883875
ucccuaugucuguaaaugu

SEQ ID NO: 2222983 - RNA, 19 nt, Artificial Sequence
  Description of Artificial Sequence: Synthetic oligonucleotide
  Antisense strand to SEQ ID NO: 2222982
acauuuacagacauaggga

SEQ ID NO: 2222984 - RNA, 19 nt, Artificial Sequence
  Description of Artificial Sequence: Synthetic oligonucleotide
  Sense strand starting at position 789 of SEQ ID NO: 1883875
cggacagacuucuauuuau

SEQ ID NO: 2222985 - RNA, 19 nt, Artificial Sequence
  Description of Artificial Sequence: Synthetic oligonucleotide
  Antisense strand to SEQ ID NO: 2222984
auaaauagaagucuguccg

SEQ ID NO: 2222986 - RNA, 19 nt, Artificial Sequence
  Description of Artificial Sequence: Synthetic oligonucleotide
  Sense strand starting at position 370 of SEQ ID NO: 1883875
gcaaguugucugcagauaa

SEQ ID NO: 2222987 - RNA, 19 nt, Artificial Sequence
  Description of Artificial Sequence: Synthetic oligonucleotide
  Antisense strand to SEQ ID NO: 2222986
uuaucugcagacaacuugc

SEQ ID NO: 2222988 - RNA, 19 nt, Artificial Sequence
  Description of Artificial Sequence: Synthetic oligonucleotide
  Sense strand starting at position 176 of SEQ ID NO: 1883875
auuauugcucuuggaggua

SEQ ID NO: 2222989 - RNA, 19 nt, Artificial Sequence
  Description of Artificial Sequence: Synthetic oligonucleotide
  Antisense strand to SEQ ID NO: 2222988
uaccuccaagagcaauaau

SEQ ID NO: 2222990 - RNA, 19 nt, Artificial Sequence
  Description of Artificial Sequence: Synthetic oligonucleotide
  Sense strand starting at position 762 of SEQ ID NO: 1883875
ggcagaaaugcugaacgcu

SEQ ID NO: 2222991 - RNA, 19 nt, Artificial Sequence
  Description of Artificial Sequence: Synthetic oligonucleotide
  Antisense strand to SEQ ID NO: 2222990
agcguucagcauuucugcc

SEQ ID NO: 2222992 - RNA, 19 nt, Artificial Sequence
  Description of Artificial Sequence: Synthetic oligonucleotide
  Sense strand starting at position 246 of SEQ ID NO: 1883875
guuuguaagcucuggagag

SEQ ID NO: 2222993 - RNA, 19 nt, Artificial Sequence
  Description of Artificial Sequence: Synthetic oligonucleotide
  Antisense strand to SEQ ID NO: 2222992
cucuccagagcuuacaaac

SEQ ID NO: 2222994 - RNA, 19 nt, Artificial Sequence
  Description of Artificial Sequence: Synthetic oligonucleotide
  Sense strand starting at position 172 of SEQ ID NO: 1883875
ggucauuauugcucuugga

SEQ ID NO: 2222995 - RNA, 19 nt, Artificial Sequence
  Description of Artificial Sequence: Synthetic oligonucleotide
  Antisense strand to SEQ ID NO: 2222994
uccaagagcaauaaugacc

SEQ ID NO: 2222996 - RNA, 19 nt, Artificial Sequence
  Description of Artificial Sequence: Synthetic oligonucleotide
  Sense strand starting at position 2343 of SEQ ID NO: 1883875
acucgucugguuggaauua

SEQ ID NO: 2222997 - RNA, 19 nt, Artificial Sequence
  Description of Artificial Sequence: Synthetic oligonucleotide
  Antisense strand to SEQ ID NO: 2222996
uaauuccaaccagacgagu

SEQ ID NO: 2222998 - RNA, 19 nt, Artificial Sequence
  Description of Artificial Sequence: Synthetic oligonucleotide
  Sense strand starting at position 3939 of SEQ ID NO: 1883875
agucccuaugucuguaaau

SEQ ID NO: 2222999 - RNA, 19 nt, Artificial Sequence
  Description of Artificial Sequence: Synthetic oligonucleotide
  Antisense strand to SEQ ID NO: 2222998
auuuacagacauagggacu

SEQ ID NO: 2223000 - RNA, 19 nt, Artificial Sequence
  Description of Artificial Sequence: Synthetic oligonucleotide
  Sense strand starting at position 3940 of SEQ ID NO: 1883875
gucccuaugucuguaaaug

SEQ ID NO: 2223001 - RNA, 19 nt, Artificial Sequence
  Description of Artificial Sequence: Synthetic oligonucleotide
  Antisense strand to SEQ ID NO: 2223000
cauuuacagacauagggac

SEQ ID NO: 2223002 - RNA, 19 nt, Artificial Sequence
  Description of Artificial Sequence: Synthetic oligonucleotide
  Sense strand starting at position 367 of SEQ ID NO: 1883875
aaggcaaguugucugcaga

SEQ ID NO: 2223003 - RNA, 19 nt, Artificial Sequence
  Description of Artificial Sequence: Synthetic oligonucleotide
  Antisense strand to SEQ ID NO: 2223002
ucugcagacaacuugccuu

SEQ ID NO: 2223004 - RNA, 19 nt, Artificial Sequence
  Description of Artificial Sequence: Synthetic oligonucleotide
  Sense strand starting at position 2341 of SEQ ID NO: 1883875
cuacucgucugguuggaau

SEQ ID NO: 2223005 - RNA, 19 nt, Artificial Sequence
  Description of Artificial Sequence: Synthetic oligonucleotide
  Antisense strand to SEQ ID NO: 2223004
auuccaaccagacgaguag

SEQ ID NO: 2223006 - RNA, 19 nt, Artificial Sequence
  Description of Artificial Sequence: Synthetic oligonucleotide
  Sense strand starting at position 146 of SEQ ID NO: 1883875
gaggaauguuguccugccu

SEQ ID NO: 2223007 - RNA, 19 nt, Artificial Sequence
  Description of Artificial Sequence: Synthetic oligonucleotide
  Antisense strand to SEQ ID NO: 2223006
aggcaggacaacauuccuc

SEQ ID NO: 2223008 - RNA, 19 nt, Artificial Sequence
  Description of Artificial Sequence: Synthetic oligonucleotide
  Sense strand starting at position 3432 of SEQ ID NO: 1883876
auguguagugaacauggaa

SEQ ID NO: 2223009 - RNA, 19 nt, Artificial Sequence
  Description of Artificial Sequence: Synthetic oligonucleotide
  Antisense strand to SEQ ID NO: 2223008
uuccauguucacuacacau

SEQ ID NO: 2223010 - RNA, 19 nt, Artificial Sequence
  Description of Artificial Sequence: Synthetic oligonucleotide
  Sense strand starting at position 256 of SEQ ID NO: 1883876
ugguuagaugcucaacaga

SEQ ID NO: 2223011 - RNA, 19 nt, Artificial Sequence
  Description of Artificial Sequence: Synthetic oligonucleotide
  Antisense strand to SEQ ID NO: 2223010
ucuguugagcaucuaacca

SEQ ID NO: 2223012 - RNA, 19 nt, Artificial Sequence
  Description of Artificial Sequence: Synthetic oligonucleotide
  Sense strand starting at position 559 of SEQ ID NO: 1883876
auaaucguugaugagcaaa

SEQ ID NO: 2223013 - RNA, 19 nt, Artificial Sequence
  Description of Artificial Sequence: Synthetic oligonucleotide
  Antisense strand to SEQ ID NO: 2223012
uuugcucaucaacgauuau

SEQ ID NO: 2223014 - RNA, 19 nt, Artificial Sequence
  Description of Artificial Sequence: Synthetic oligonucleotide
  Sense strand starting at position 3736 of SEQ ID NO: 1883876
ugacaugaguuagucaaag

SEQ ID NO: 2223015 - RNA, 19 nt, Artificial Sequence
  Description of Artificial Sequence: Synthetic oligonucleotide
  Antisense strand to SEQ ID NO: 2223014
cuuugacuaacucauguca

SEQ ID NO: 2223016 - RNA, 19 nt, Artificial Sequence
  Description of Artificial Sequence: Synthetic oligonucleotide
  Sense strand starting at position 3447 of SEQ ID NO: 1883876
ggaaucugauguguaacaa

SEQ ID NO: 2223017 - RNA, 19 nt, Artificial Sequence
  Description of Artificial Sequence: Synthetic oligonucleotide
  Antisense strand to SEQ ID NO: 2223016
uuguuacacaucagauucc

SEQ ID NO: 2223018 - RNA, 19 nt, Artificial Sequence
  Description of Artificial Sequence: Synthetic oligonucleotide
  Sense strand starting at position 3277 of SEQ ID NO: 1883876
gugcgaucacguuuagguu

SEQ ID NO: 2223019 - RNA, 19 nt, Artificial Sequence
  Description of Artificial Sequence: Synthetic oligonucleotide
  Antisense strand to SEQ ID NO: 2223018
aaccuaaacgugaucgcac

SEQ ID NO: 2223020 - RNA, 19 nt, Artificial Sequence
  Description of Artificial Sequence: Synthetic oligonucleotide
  Sense strand starting at position 2937 of SEQ ID NO: 1883876
agaggacucagucggaauc

SEQ ID NO: 2223021 - RNA, 19 nt, Artificial Sequence
  Description of Artificial Sequence: Synthetic oligonucleotide
  Antisense strand to SEQ ID NO: 2223020
gauuccgacugaguccucu

SEQ ID NO: 2223022 - RNA, 19 nt, Artificial Sequence
  Description of Artificial Sequence: Synthetic oligonucleotide
  Sense strand starting at position 3124 of SEQ ID NO: 1883876
ugaagugagagcgaacuuu

SEQ ID NO: 2223023 - RNA, 19 nt, Artificial Sequence
  Description of Artificial Sequence: Synthetic oligonucleotide
  Antisense strand to SEQ ID NO: 2223022
aaaguucgcucucacuuca

SEQ ID NO: 2223024 - RNA, 19 nt, Artificial Sequence
  Description of Artificial Sequence: Synthetic oligonucleotide
  Sense strand starting at position 809 of SEQ ID NO: 1883876
aucacuuucugaguggaua

SEQ ID NO: 2223025 - RNA, 19 nt, Artificial Sequence
  Description of Artificial Sequence: Synthetic oligonucleotide
  Antisense strand to SEQ ID NO: 2223024
uauccacucagaaagugau

SEQ ID NO: 2223026 - RNA, 19 nt, Artificial Sequence
  Description of Artificial Sequence: Synthetic oligonucleotide
  Sense strand starting at position 555 of SEQ ID NO: 1883876
aacuauaaucguugaugag

SEQ ID NO: 2223027 - RNA, 19 nt, Artificial Sequence
  Description of Artificial Sequence: Synthetic oligonucleotide
  Antisense strand to SEQ ID NO: 2223026
cucaucaacgauuauaguu

SEQ ID NO: 2223028 - RNA, 19 nt, Artificial Sequence
  Description of Artificial Sequence: Synthetic oligonucleotide
  Sense strand starting at position 3255 of SEQ ID NO: 1883876
cgcccucugcgauugguua

SEQ ID NO: 2223029 - RNA, 19 nt, Artificial Sequence
  Description of Artificial Sequence: Synthetic oligonucleotide
  Antisense strand to SEQ ID NO: 2223028
uaaccaaucgcagagggcg

SEQ ID NO: 2223030 - RNA, 19 nt, Artificial Sequence
  Description of Artificial Sequence: Synthetic oligonucleotide
  Sense strand starting at position 3446 of SEQ ID NO: 1883876
uggaaucugauguguaaca

SEQ ID NO: 2223031 - RNA, 19 nt, Artificial Sequence
  Description of Artificial Sequence: Synthetic oligonucleotide
  Antisense strand to SEQ ID NO: 2223030
uguuacacaucagauucca

SEQ ID NO: 2223032 - RNA, 19 nt, Artificial Sequence
  Description of Artificial Sequence: Synthetic oligonucleotide
  Sense strand starting at position 810 of SEQ ID NO: 1883876
ucacuuucugaguggauag

SEQ ID NO: 2223033 - RNA, 19 nt, Artificial Sequence
  Description of Artificial Sequence: Synthetic oligonucleotide
  Antisense strand to SEQ ID NO: 2223032
cuauccacucagaaaguga

SEQ ID NO: 2223034 - RNA, 19 nt, Artificial Sequence
  Description of Artificial Sequence: Synthetic oligonucleotide
  Sense strand starting at position 554 of SEQ ID NO: 1883876
uaacuauaaucguugauga

SEQ ID NO: 2223035 - RNA, 19 nt, Artificial Sequence
  Description of Artificial Sequence: Synthetic oligonucleotide
  Antisense strand to SEQ ID NO: 2223034
ucaucaacgauuauaguua

SEQ ID NO: 2223036 - RNA, 19 nt, Artificial Sequence
  Description of Artificial Sequence: Synthetic oligonucleotide
  Sense strand starting at position 2968 of SEQ ID NO: 1883876
cgaagugaucuucagaugu

SEQ ID NO: 2223037 - RNA, 19 nt, Artificial Sequence
  Description of Artificial Sequence: Synthetic oligonucleotide
  Antisense strand to SEQ ID NO: 2223036
acaucugaagaucacuucg

SEQ ID NO: 2223038 - RNA, 19 nt, Artificial Sequence
  Description of Artificial Sequence: Synthetic oligonucleotide
  Sense strand starting at position 2213 of SEQ ID NO: 1883876
ugggcuucugagcauugaa

SEQ ID NO: 2223039 - RNA, 19 nt, Artificial Sequence
  Description of Artificial Sequence: Synthetic oligonucleotide
  Antisense strand to SEQ ID NO: 2223038
uucaaugcucagaagccca

SEQ ID NO: 2223040 - RNA, 19 nt, Artificial Sequence
  Description of Artificial Sequence: Synthetic oligonucleotide
  Sense strand starting at position 2694 of SEQ ID NO: 1883876
acguuuccucgagaggaau

SEQ ID NO: 2223041 - RNA, 19 nt, Artificial Sequence
  Description of Artificial Sequence: Synthetic oligonucleotide
  Antisense strand to SEQ ID NO: 2223040
auuccucucgaggaaacgu

SEQ ID NO: 2223042 - RNA, 19 nt, Artificial Sequence
  Description of Artificial Sequence: Synthetic oligonucleotide
  Sense strand starting at position 46 of SEQ ID NO: 1883876
auugcuagccuugacaaau

SEQ ID NO: 2223043 - RNA, 19 nt, Artificial Sequence
  Description of Artificial Sequence: Synthetic oligonucleotide
  Antisense strand to SEQ ID NO: 2223042
auuugucaaggcuagcaau

SEQ ID NO: 2223044 - RNA, 19 nt, Artificial Sequence
  Description of Artificial Sequence: Synthetic oligonucleotide
  Sense strand starting at position 301 of SEQ ID NO: 1883876
gggcuaagugugcaagaaa

SEQ ID NO: 2223045 - RNA, 19 nt, Artificial Sequence
  Description of Artificial Sequence: Synthetic oligonucleotide
  Antisense strand to SEQ ID NO: 2223044
uuucuugcacacuuagccc

SEQ ID NO: 2223046 - RNA, 19 nt, Artificial Sequence
  Description of Artificial Sequence: Synthetic oligonucleotide
  Sense strand starting at position 11 of SEQ ID NO: 1883876
uggauauaguaaguuccua

SEQ ID NO: 2223047 - RNA, 19 nt, Artificial Sequence
  Description of Artificial Sequence: Synthetic oligonucleotide
  Antisense strand to SEQ ID NO: 2223046
uaggaacuuacuauaucca

SEQ ID NO: 2223048 - RNA, 19 nt, Artificial Sequence
  Description of Artificial Sequence: Synthetic oligonucleotide
  Sense strand starting at position 2692 of SEQ ID NO: 1883876
ugacguuuccucgagagga

SEQ ID NO: 2223049 - RNA, 19 nt, Artificial Sequence
  Description of Artificial Sequence: Synthetic oligonucleotide
  Antisense strand to SEQ ID NO: 2223048
uccucucgaggaaacguca

SEQ ID NO: 2223050 - RNA, 19 nt, Artificial Sequence
  Description of Artificial Sequence: Synthetic oligonucleotide
  Sense strand starting at position 2928 of SEQ ID NO: 1883876
gccuuucugagaggacuca

SEQ ID NO: 2223051 - RNA, 19 nt, Artificial Sequence
  Description of Artificial Sequence: Synthetic oligonucleotide
  Antisense strand to SEQ ID NO: 2223050
ugaguccucucagaaaggc

SEQ ID NO: 2223052 - RNA, 19 nt, Artificial Sequence
  Description of Artificial Sequence: Synthetic oligonucleotide
  Sense strand starting at position 3901 of SEQ ID NO: 1883876
ggcaguuauugacccuaaa

SEQ ID NO: 2223053 - RNA, 19 nt, Artificial Sequence
  Description of Artificial Sequence: Synthetic oligonucleotide
  Antisense strand to SEQ ID NO: 2223052
uuuagggucaauaacugcc

SEQ ID NO: 2223054 - RNA, 19 nt, Artificial Sequence
  Description of Artificial Sequence: Synthetic oligonucleotide
  Sense strand starting at position 3 of SEQ ID NO: 1883876
gugucuccuggauauagua

SEQ ID NO: 2223055 - RNA, 19 nt, Artificial Sequence
  Description of Artificial Sequence: Synthetic oligonucleotide
  Antisense strand to SEQ ID NO: 2223054
uacuauauccaggagacac

SEQ ID NO: 2223056 - RNA, 19 nt, Artificial Sequence
  Description of Artificial Sequence: Synthetic oligonucleotide
  Sense strand starting at position 429 of SEQ ID NO: 1883876
cuuguaauugaauguuaca

SEQ ID NO: 2223057 - RNA, 19 nt, Artificial Sequence
  Description of Artificial Sequence: Synthetic oligonucleotide
  Antisense strand to SEQ ID NO: 2223056
uguaacauucaauuacaag

SEQ ID NO: 2223058 - RNA, 19 nt, Artificial Sequence
  Description of Artificial Sequence: Synthetic oligonucleotide
  Sense strand starting at position 424 of SEQ ID NO: 1883876
cgauucuuguaauugaaug

SEQ ID NO: 2223059 - RNA, 19 nt, Artificial Sequence
  Description of Artificial Sequence: Synthetic oligonucleotide
  Antisense strand to SEQ ID NO: 2223058
cauucaauuacaagaaucg

SEQ ID NO: 2223060 - RNA, 19 nt, Artificial Sequence
  Description of Artificial Sequence: Synthetic oligonucleotide
  Sense strand starting at position 3809 of SEQ ID NO: 1883876
ugaaauauuugacaugcca

SEQ ID NO: 2223061 - RNA, 19 nt, Artificial Sequence
  Description of Artificial Sequence: Synthetic oligonucleotide
  Antisense strand to SEQ ID NO: 2223060
uggcaugucaaauauuuca

SEQ ID NO: 2223062 - RNA, 19 nt, Artificial Sequence
  Description of Artificial Sequence: Synthetic oligonucleotide
  Sense strand starting at position 247 of SEQ ID NO: 1883876
cucccacucugguuagaug

SEQ ID NO: 2223063 - RNA, 19 nt, Artificial Sequence
  Description of Artificial Sequence: Synthetic oligonucleotide
  Antisense strand to SEQ ID NO: 2223062
caucuaaccagagugggag

SEQ ID NO: 2223064 - RNA, 19 nt, Artificial Sequence
  Description of Artificial Sequence: Synthetic oligonucleotide
  Sense strand starting at position 1 of SEQ ID NO: 1883876
gugugucuccuggauauag

SEQ ID NO: 2223065 - RNA, 19 nt, Artificial Sequence
  Description of Artificial Sequence: Synthetic oligonucleotide
  Antisense strand to SEQ ID NO: 2223064
cuauauccaggagacacac

SEQ ID NO: 2223066 - RNA, 19 nt, Artificial Sequence
  Description of Artificial Sequence: Synthetic oligonucleotide
  Sense strand starting at position 3766 of SEQ ID NO: 1883876
ccuuguauugggcagguga

SEQ ID NO: 2223067 - RNA, 19 nt, Artificial Sequence
  Description of Artificial Sequence: Synthetic oligonucleotide
  Antisense strand to SEQ ID NO: 2223066
ucaccugcccaauacaagg

SEQ ID NO: 2223068 - RNA, 19 nt, Artificial Sequence
  Description of Artificial Sequence: Synthetic oligonucleotide
  Sense strand starting at position 300 of SEQ ID NO: 1883876
agggcuaagugugcaagaa

SEQ ID NO: 2223069 - RNA, 19 nt, Artificial Sequence
  Description of Artificial Sequence: Synthetic oligonucleotide
  Antisense strand to SEQ ID NO: 2223068
uucuugcacacuuagcccu

SEQ ID NO: 2223070 - RNA, 19 nt, Artificial Sequence
  Description of Artificial Sequence: Synthetic oligonucleotide
  Sense strand starting at position 2898 of SEQ ID NO: 1883876
cucguaacuuuccuggaca

SEQ ID NO: 2223071 - RNA, 19 nt, Artificial Sequence
  Description of Artificial Sequence: Synthetic oligonucleotide
  Antisense strand to SEQ ID NO: 2223070
uguccaggaaaguuacgag

SEQ ID NO: 2223072 - RNA, 19 nt, Artificial Sequence
  Description of Artificial Sequence: Synthetic oligonucleotide
  Sense strand starting at position 2719 of SEQ ID NO: 1883876
cuaggcuagugacuguaau

SEQ ID NO: 2223073 - RNA, 19 nt, Artificial Sequence
  Description of Artificial Sequence: Synthetic oligonucleotide
  Antisense strand to SEQ ID NO: 2223072
auuacagucacuagccuag

SEQ ID NO: 2223074 - RNA, 19 nt, Artificial Sequence
  Description of Artificial Sequence: Synthetic oligonucleotide
  Sense strand starting at position 130 of SEQ ID NO: 1883876
agaauagagucagaauaug

SEQ ID NO: 2223075 - RNA, 19 nt, Artificial Sequence
  Description of Artificial Sequence: Synthetic oligonucleotide
  Antisense strand to SEQ ID NO: 2223074
cauauucugacucuauucu

SEQ ID NO: 2223076 - RNA, 19 nt, Artificial Sequence
  Description of Artificial Sequence: Synthetic oligonucleotide
  Sense strand starting at position 2710 of SEQ ID NO: 1883876
aauugaguccuaggcuagu

SEQ ID NO: 2223077 - RNA, 19 nt, Artificial Sequence
  Description of Artificial Sequence: Synthetic oligonucleotide
  Antisense strand to SEQ ID NO: 2223076
acuagccuaggacucaauu

SEQ ID NO: 2223078 - RNA, 19 nt, Artificial Sequence
  Description of Artificial Sequence: Synthetic oligonucleotide
  Sense strand starting at position 2720 of SEQ ID NO: 1883876
uaggcuagugacuguaauu

SEQ ID NO: 2223079 - RNA, 19 nt, Artificial Sequence
  Description of Artificial Sequence: Synthetic oligonucleotide
  Antisense strand to SEQ ID NO: 2223078
aauuacagucacuagccua

SEQ ID NO: 2223080 - RNA, 19 nt, Artificial Sequence
  Description of Artificial Sequence: Synthetic oligonucleotide
  Sense strand starting at position 3562 of SEQ ID NO: 1883876
aguauagugccaugacuug

SEQ ID NO: 2223081 - RNA, 19 nt, Artificial Sequence
  Description of Artificial Sequence: Synthetic oligonucleotide
  Antisense strand to SEQ ID NO: 2223080
caagucauggcacuauacu

SEQ ID NO: 2223082 - RNA, 19 nt, Artificial Sequence
  Description of Artificial Sequence: Synthetic oligonucleotide
  Sense strand starting at position 3113 of SEQ ID NO: 1883876
ucacgugcuccugaaguga

SEQ ID NO: 2223083 - RNA, 19 nt, Artificial Sequence
  Description of Artificial Sequence: Synthetic oligonucleotide
  Antisense strand to SEQ ID NO: 2223082
ucacuucaggagcacguga

SEQ ID NO: 2223084 - RNA, 19 nt, Artificial Sequence
  Description of Artificial Sequence: Synthetic oligonucleotide
  Sense strand starting at position 418 of SEQ ID NO: 1883876
uuuccucgauucuuguaau

SEQ ID NO: 2223085 - RNA, 19 nt, Artificial Sequence
  Description of Artificial Sequence: Synthetic oligonucleotide
  Antisense strand to SEQ ID NO: 2223084
auuacaagaaucgaggaaa

SEQ ID NO: 2223086 - RNA, 19 nt, Artificial Sequence
  Description of Artificial Sequence: Synthetic oligonucleotide
  Sense strand starting at position 2212 of SEQ ID NO: 1883876
gugggcuucugagcauuga

SEQ ID NO: 2223087 - RNA, 19 nt, Artificial Sequence
  Description of Artificial Sequence: Synthetic oligonucleotide
  Antisense strand to SEQ ID NO: 2223086
ucaaugcucagaagcccac

SEQ ID NO: 2223088 - RNA, 19 nt, Artificial Sequence
  Description of Artificial Sequence: Synthetic oligonucleotide
  Sense strand starting at position 3616 of SEQ ID NO: 1883877
guaaguauuuaucuguuug

SEQ ID NO: 2223089 - RNA, 19 nt, Artificial Sequence
  Description of Artificial Sequence: Synthetic oligonucleotide
  Antisense strand to SEQ ID NO: 2223088
caaacagauaaauacuuac

SEQ ID NO: 2223090 - RNA, 19 nt, Artificial Sequence
  Description of Artificial Sequence: Synthetic oligonucleotide
  Sense strand starting at position 916 of SEQ ID NO: 1883877
guauuucuuggaggguguu

SEQ ID NO: 2223091 - RNA, 19 nt, Artificial Sequence
  Description of Artificial Sequence: Synthetic oligonucleotide
  Antisense strand to SEQ ID NO: 2223090
aacacccuccaagaaauac

SEQ ID NO: 2223092 - RNA, 19 nt, Artificial Sequence
  Description of Artificial Sequence: Synthetic oligonucleotide
  Sense strand starting at position 2817 of SEQ ID NO: 1883877
uuaaacacccgcuagaaau

SEQ ID NO: 2223093 - RNA, 19 nt, Artificial Sequence
  Description of Artificial Sequence: Synthetic oligonucleotide
  Antisense strand to SEQ ID NO: 2223092
auuucuagcggguguuuaa

SEQ ID NO: 2223094 - RNA, 19 nt, Artificial Sequence
  Description of Artificial Sequence: Synthetic oligonucleotide
  Sense strand starting at position 2798 of SEQ ID NO: 1883877
cauuaugcgcuuguuuauu

SEQ ID NO: 2223095 - RNA, 19 nt, Artificial Sequence
  Description of Artificial Sequence: Synthetic oligonucleotide
  Antisense strand to SEQ ID NO: 2223094
aauaaacaagcgcauaaug

SEQ ID NO: 2223096 - RNA, 19 nt, Artificial Sequence
  Description of Artificial Sequence: Synthetic oligonucleotide
  Sense strand starting at position 3231 of SEQ ID NO: 1883877
aacuuugaucuguagugga

SEQ ID NO: 2223097 - RNA, 19 nt, Artificial Sequence
  Description of Artificial Sequence: Synthetic oligonucleotide
  Antisense strand to SEQ ID NO: 2223096
uccacuacagaucaaaguu

SEQ ID NO: 2223098 - RNA, 19 nt, Artificial Sequence
  Description of Artificial Sequence: Synthetic oligonucleotide
  Sense strand starting at position 2598 of SEQ ID NO: 1883877
ggauaugugggucagagug

SEQ ID NO: 2223099 - RNA, 19 nt, Artificial Sequence
  Description of Artificial Sequence: Synthetic oligonucleotide
  Antisense strand to SEQ ID NO: 2223098
cacucugacccacauaucc

SEQ ID NO: 2223100 - RNA, 19 nt, Artificial Sequence
  Description of Artificial Sequence: Synthetic oligonucleotide
  Sense strand starting at position 3146 of SEQ ID NO: 1883877
guuuaugcugcuucuuagu

SEQ ID NO: 2223101 - RNA, 19 nt, Artificial Sequence
  Description of Artificial Sequence: Synthetic oligonucleotide
  Antisense strand to SEQ ID NO: 2223100
acuaagaagcagcauaaac

SEQ ID NO: 2223102 - RNA, 19 nt, Artificial Sequence
  Description of Artificial Sequence: Synthetic oligonucleotide
  Sense strand starting at position 3105 of SEQ ID NO: 1883877
gcugcucagccuguuugau

SEQ ID NO: 2223103 - RNA, 19 nt, Artificial Sequence
  Description of Artificial Sequence: Synthetic oligonucleotide
  Antisense strand to SEQ ID NO: 2223102
aucaaacaggcugagcagc

SEQ ID NO: 2223104 - RNA, 19 nt, Artificial Sequence
  Description of Artificial Sequence: Synthetic oligonucleotide
  Sense strand starting at position 2063 of SEQ ID NO: 1883877
cgcccucgaguuguuuaua

SEQ ID NO: 2223105 - RNA, 19 nt, Artificial Sequence
  Description of Artificial Sequence: Synthetic oligonucleotide
  Antisense strand to SEQ ID NO: 2223104
uauaaacaacucgagggcg

SEQ ID NO: 2223106 - RNA, 19 nt, Artificial Sequence
  Description of Artificial Sequence: Synthetic oligonucleotide
  Sense strand starting at position 2102 of SEQ ID NO: 1883877
ucaugagugcgggaugaaa

SEQ ID NO: 2223107 - RNA, 19 nt, Artificial Sequence
  Description of Artificial Sequence: Synthetic oligonucleotide
  Antisense strand to SEQ ID NO: 2223106
uuucaucccgcacucauga

SEQ ID NO: 2223108 - RNA, 19 nt, Artificial Sequence
  Description of Artificial Sequence: Synthetic oligonucleotide
  Sense strand starting at position 153 of SEQ ID NO: 1883877
uuugcaagauacuuaagau

SEQ ID NO: 2223109 - RNA, 19 nt, Artificial Sequence
  Description of Artificial Sequence: Synthetic oligonucleotide
  Antisense strand to SEQ ID NO: 2223108
aucuuaaguaucuugcaaa

SEQ ID NO: 2223110 - RNA, 19 nt, Artificial Sequence
  Description of Artificial Sequence: Synthetic oligonucleotide
  Sense strand starting at position 741 of SEQ ID NO: 1883877
gguccugcagaugauuaau

SEQ ID NO: 2223111 - RNA, 19 nt, Artificial Sequence
  Description of Artificial Sequence: Synthetic oligonucleotide
  Antisense strand to SEQ ID NO: 2223110
auuaaucaucugcaggacc

SEQ ID NO: 2223112 - RNA, 19 nt, Artificial Sequence
  Description of Artificial Sequence: Synthetic oligonucleotide
  Sense strand starting at position 3053 of SEQ ID NO: 1883877
uaguaucaugauggagagu

SEQ ID NO: 2223113 - RNA, 19 nt, Artificial Sequence
  Description of Artificial Sequence: Synthetic oligonucleotide
  Antisense strand to SEQ ID NO: 2223112
acucuccaucaugauacua

SEQ ID NO: 2223114 - RNA, 19 nt, Artificial Sequence
  Description of Artificial Sequence: Synthetic oligonucleotide
  Sense strand starting at position 1001 of SEQ ID NO: 1883877
aagacagcuccguauaaau

SEQ ID NO: 2223115 - RNA, 19 nt, Artificial Sequence
  Description of Artificial Sequence: Synthetic oligonucleotide
  Antisense strand to SEQ ID NO: 2223114
auuuauacggagcugucuu

SEQ ID NO: 2223116 - RNA, 19 nt, Artificial Sequence
  Description of Artificial Sequence: Synthetic oligonucleotide
  Sense strand starting at position 3880 of SEQ ID NO: 1883877
ucucucauuccggaauauu

SEQ ID NO: 2223117 - RNA, 19 nt, Artificial Sequence
  Description of Artificial Sequence: Synthetic oligonucleotide
  Antisense strand to SEQ ID NO: 2223116
aauauuccggaaugagaga

SEQ ID NO: 2223118 - RNA, 19 nt, Artificial Sequence
  Description of Artificial Sequence: Synthetic oligonucleotide
  Sense strand starting at position 2834 of SEQ ID NO: 1883877
auuagacuccuuugugaaa

SEQ ID NO: 2223119 - RNA, 19 nt, Artificial Sequence
  Description of Artificial Sequence: Synthetic oligonucleotide
  Antisense strand to SEQ ID NO: 2223118
uuucacaaaggagucuaau

SEQ ID NO: 2223120 - RNA, 19 nt, Artificial Sequence
  Description of Artificial Sequence: Synthetic oligonucleotide
  Sense strand starting at position 1094 of SEQ ID NO: 1883877
gaaguuaacuccuccugag

SEQ ID NO: 2223121 - RNA, 19 nt, Artificial Sequence
  Description of Artificial Sequence: Synthetic oligonucleotide
  Antisense strand to SEQ ID NO: 2223120
cucaggaggaguuaacuuc

SEQ ID NO: 2223122 - RNA, 19 nt, Artificial Sequence
  Description of Artificial Sequence: Synthetic oligonucleotide
  Sense strand starting at position 219 of SEQ ID NO: 1883877
uagauauaacagcggaauu

SEQ ID NO: 2223123 - RNA, 19 nt, Artificial Sequence
  Description of Artificial Sequence: Synthetic oligonucleotide
  Antisense strand to SEQ ID NO: 2223122
aauuccgcuguuauaucua

SEQ ID NO: 2223124 - RNA, 19 nt, Artificial Sequence
  Description of Artificial Sequence: Synthetic oligonucleotide
  Sense strand starting at position 1200 of SEQ ID NO: 1883877
ggagaugcucccugggaca

SEQ ID NO: 2223125 - RNA, 19 nt, Artificial Sequence
  Description of Artificial Sequence: Synthetic oligonucleotide
  Antisense strand to SEQ ID NO: 2223124
ugucccagggagcaucucc

SEQ ID NO: 2223126 - RNA, 19 nt, Artificial Sequence
  Description of Artificial Sequence: Synthetic oligonucleotide
  Sense strand starting at position 2595 of SEQ ID NO: 1883877
uuaggauaugugggucaga

SEQ ID NO: 2223127 - RNA, 19 nt, Artificial Sequence
  Description of Artificial Sequence: Synthetic oligonucleotide
  Antisense strand to SEQ ID NO: 2223126
ucugacccacauauccuaa

SEQ ID NO: 2223128 - RNA, 19 nt, Artificial Sequence
  Description of Artificial Sequence: Synthetic oligonucleotide
  Sense strand starting at position 1003 of SEQ ID NO: 1883877
gacagcuccguauaaauga

SEQ ID NO: 2223129 - RNA, 19 nt, Artificial Sequence
  Description of Artificial Sequence: Synthetic oligonucleotide
  Antisense strand to SEQ ID NO: 2223128
ucauuuauacggagcuguc

SEQ ID NO: 2223130 - RNA, 19 nt, Artificial Sequence
  Description of Artificial Sequence: Synthetic oligonucleotide
  Sense strand starting at position 838 of SEQ ID NO: 1883877
ucgaaagaucuguaauugu

SEQ ID NO: 2223131 - RNA, 19 nt, Artificial Sequence
  Description of Artificial Sequence: Synthetic oligonucleotide
  Antisense strand to SEQ ID NO: 2223130
acaauuacagaucuuucga

SEQ ID NO: 2223132 - RNA, 19 nt, Artificial Sequence
  Description of Artificial Sequence: Synthetic oligonucleotide
  Sense strand starting at position 2986 of SEQ ID NO: 1883877
ucguuuaugagauaaugua

SEQ ID NO: 2223133 - RNA, 19 nt, Artificial Sequence
  Description of Artificial Sequence: Synthetic oligonucleotide
  Antisense strand to SEQ ID NO: 2223132
uacauuaucucauaaacga

SEQ ID NO: 2223134 - RNA, 19 nt, Artificial Sequence
  Description of Artificial Sequence: Synthetic oligonucleotide
  Sense strand starting at position 743 of SEQ ID NO: 1883877
uccugcagaugauuaauua

SEQ ID NO: 2223135 - RNA, 19 nt, Artificial Sequence
  Description of Artificial Sequence: Synthetic oligonucleotide
  Antisense strand to SEQ ID NO: 2223134
uaauuaaucaucugcagga

SEQ ID NO: 2223136 - RNA, 19 nt, Artificial Sequence
  Description of Artificial Sequence: Synthetic oligonucleotide
  Sense strand starting at position 436 of SEQ ID NO: 1883877
cagaacauugguuguauga

SEQ ID NO: 2223137 - RNA, 19 nt, Artificial Sequence
  Description of Artificial Sequence: Synthetic oligonucleotide
  Antisense strand to SEQ ID NO: 2223136
ucauacaaccaauguucug

SEQ ID NO: 2223138 - RNA, 19 nt, Artificial Sequence
  Description of Artificial Sequence: Synthetic oligonucleotide
  Sense strand starting at position 2563 of SEQ ID NO: 1883877
cugaccuaggaauguguaa

SEQ ID NO: 2223139 - RNA, 19 nt, Artificial Sequence
  Description of Artificial Sequence: Synthetic oligonucleotide
  Antisense strand to SEQ ID NO: 2223138
uuacacauuccuaggucag

SEQ ID NO: 2223140 - RNA, 19 nt, Artificial Sequence
  Description of Artificial Sequence: Synthetic oligonucleotide
  Sense strand starting at position 366 of SEQ ID NO: 1883877
cuguuagcugaaugagaga

SEQ ID NO: 2223141 - RNA, 19 nt, Artificial Sequence
  Description of Artificial Sequence: Synthetic oligonucleotide
  Antisense strand to SEQ ID NO: 2223140
ucucucauucagcuaacag

SEQ ID NO: 2223142 - RNA, 19 nt, Artificial Sequence
  Description of Artificial Sequence: Synthetic oligonucleotide
  Sense strand starting at position 2835 of SEQ ID NO: 1883877
uuagacuccuuugugaaau

SEQ ID NO: 2223143 - RNA, 19 nt, Artificial Sequence
  Description of Artificial Sequence: Synthetic oligonucleotide
  Antisense strand to SEQ ID NO: 2223142
auuucacaaaggagucuaa

SEQ ID NO: 2223144 - RNA, 19 nt, Artificial Sequence
  Description of Artificial Sequence: Synthetic oligonucleotide
  Sense strand starting at position 747 of SEQ ID NO: 1883877
gcagaugauuaauuacagu

SEQ ID NO: 2223145 - RNA, 19 nt, Artificial Sequence
  Description of Artificial Sequence: Synthetic oligonucleotide
  Antisense strand to SEQ ID NO: 2223144
acuguaauuaaucaucugc

SEQ ID NO: 2223146 - RNA, 19 nt, Artificial Sequence
  Description of Artificial Sequence: Synthetic oligonucleotide
  Sense strand starting at position 2796 of SEQ ID NO: 1883877
ugcauuaugcgcuuguuua

SEQ ID NO: 2223147 - RNA, 19 nt, Artificial Sequence
  Description of Artificial Sequence: Synthetic oligonucleotide
  Antisense strand to SEQ ID NO: 2223146
uaaacaagcgcauaaugca

SEQ ID NO: 2223148 - RNA, 19 nt, Artificial Sequence
  Description of Artificial Sequence: Synthetic oligonucleotide
  Sense strand starting at position 2539 of SEQ ID NO: 1883877
gcuugugugguugcaguua

SEQ ID NO: 2223149 - RNA, 19 nt, Artificial Sequence
  Description of Artificial Sequence: Synthetic oligonucleotide
  Antisense strand to SEQ ID NO: 2223148
uaacugcaaccacacaagc

SEQ ID NO: 2223150 - RNA, 19 nt, Artificial Sequence
  Description of Artificial Sequence: Synthetic oligonucleotide
  Sense strand starting at position 148 of SEQ ID NO: 1883877
aaacguuugcaagauacuu

SEQ ID NO: 2223151 - RNA, 19 nt, Artificial Sequence
  Description of Artificial Sequence: Synthetic oligonucleotide
  Antisense strand to SEQ ID NO: 2223150
aaguaucuugcaaacguuu

SEQ ID NO: 2223152 - RNA, 19 nt, Artificial Sequence
  Description of Artificial Sequence: Synthetic oligonucleotide
  Sense strand starting at position 3285 of SEQ ID NO: 1883877
gagugugauuaaucaacuu

SEQ ID NO: 2223153 - RNA, 19 nt, Artificial Sequence
  Description of Artificial Sequence: Synthetic oligonucleotide
  Antisense strand to SEQ ID NO: 2223152
aaguugauuaaucacacuc

SEQ ID NO: 2223154 - RNA, 19 nt, Artificial Sequence
  Description of Artificial Sequence: Synthetic oligonucleotide
  Sense strand starting at position 434 of SEQ ID NO: 1883877
cacagaacauugguuguau

SEQ ID NO: 2223155 - RNA, 19 nt, Artificial Sequence
  Description of Artificial Sequence: Synthetic oligonucleotide
  Antisense strand to SEQ ID NO: 2223154
auacaaccaauguucugug

SEQ ID NO: 2223156 - RNA, 19 nt, Artificial Sequence
  Description of Artificial Sequence: Synthetic oligonucleotide
  Sense strand starting at position 3281 of SEQ ID NO: 1883877
ucuagagugugauuaauca

SEQ ID NO: 2223157 - RNA, 19 nt, Artificial Sequence
  Description of Artificial Sequence: Synthetic oligonucleotide
  Antisense strand to SEQ ID NO: 2223156
ugauuaaucacacucuaga

SEQ ID NO: 2223158 - RNA, 19 nt, Artificial Sequence
  Description of Artificial Sequence: Synthetic oligonucleotide
  Sense strand starting at position 2486 of SEQ ID NO: 1883877
ggguucggcggauaacaaa

SEQ ID NO: 2223159 - RNA, 19 nt, Artificial Sequence
  Description of Artificial Sequence: Synthetic oligonucleotide
  Antisense strand to SEQ ID NO: 2223158
uuuguuauccgccgaaccc

SEQ ID NO: 2223160 - RNA, 19 nt, Artificial Sequence
  Description of Artificial Sequence: Synthetic oligonucleotide
  Sense strand starting at position 1000 of SEQ ID NO: 1883877
aaagacagcuccguauaaa

SEQ ID NO: 2223161 - RNA, 19 nt, Artificial Sequence
  Description of Artificial Sequence: Synthetic oligonucleotide
  Antisense strand to SEQ ID NO: 2223160
uuuauacggagcugucuuu

SEQ ID NO: 2223162 - RNA, 19 nt, Artificial Sequence
  Description of Artificial Sequence: Synthetic oligonucleotide
  Sense strand starting at position 204 of SEQ ID NO: 1883877
uugaauuugcagcgcuaga

SEQ ID NO: 2223163 - RNA, 19 nt, Artificial Sequence
  Description of Artificial Sequence: Synthetic oligonucleotide
  Antisense strand to SEQ ID NO: 2223162
ucuagcgcugcaaauucaa

SEQ ID NO: 2223164 - RNA, 19 nt, Artificial Sequence
  Description of Artificial Sequence: Synthetic oligonucleotide
  Sense strand starting at position 335 of SEQ ID NO: 1883877
ucguuucuccgugcaggua

SEQ ID NO: 2223165 - RNA, 19 nt, Artificial Sequence
  Description of Artificial Sequence: Synthetic oligonucleotide
  Antisense strand to SEQ ID NO: 2223164
uaccugcacggagaaacga

SEQ ID NO: 2223166 - RNA, 19 nt, Artificial Sequence
  Description of Artificial Sequence: Synthetic oligonucleotide
  Sense strand starting at position 3227 of SEQ ID NO: 1883877
ggugaacuuugaucuguag

SEQ ID NO: 2223167 - RNA, 19 nt, Artificial Sequence
  Description of Artificial Sequence: Synthetic oligonucleotide
  Antisense strand to SEQ ID NO: 2223166
cuacagaucaaaguucacc

SEQ ID NO: 2223168 - RNA, 19 nt, Artificial Sequence
  Description of Artificial Sequence: Synthetic oligonucleotide
  Sense strand starting at position 2421 of SEQ ID NO: 1883878
aacagaugauaguccugau

SEQ ID NO: 2223169 - RNA, 19 nt, Artificial Sequence
  Description of Artificial Sequence: Synthetic oligonucleotide
  Antisense strand to SEQ ID NO: 2223168
aucaggacuaucaucuguu

SEQ ID NO: 2223170 - RNA, 19 nt, Artificial Sequence
  Description of Artificial Sequence: Synthetic oligonucleotide
  Sense strand starting at position 1124 of SEQ ID NO: 1883878
cugauugcugaguaggaga

SEQ ID NO: 2223171 - RNA, 19 nt, Artificial Sequence
  Description of Artificial Sequence: Synthetic oligonucleotide
  Antisense strand to SEQ ID NO: 2223170
ucuccuacucagcaaucag

SEQ ID NO: 2223172 - RNA, 19 nt, Artificial Sequence
  Description of Artificial Sequence: Synthetic oligonucleotide
  Sense strand starting at position 2321 of SEQ ID NO: 1883878
gagucuuugggaggauuag

SEQ ID NO: 2223173 - RNA, 19 nt, Artificial Sequence
  Description of Artificial Sequence: Synthetic oligonucleotide
  Antisense strand to SEQ ID NO: 2223172
cuaauccucccaaagacuc

SEQ ID NO: 2223174 - RNA, 19 nt, Artificial Sequence
  Description of Artificial Sequence: Synthetic oligonucleotide
  Sense strand starting at position 1035 of SEQ ID NO: 1883878
caagaaaucgcagagguca

SEQ ID NO: 2223175 - RNA, 19 nt, Artificial Sequence
  Description of Artificial Sequence: Synthetic oligonucleotide
  Antisense strand to SEQ ID NO: 2223174
ugaccucugcgauuucuug

SEQ ID NO: 2223176 - RNA, 19 nt, Artificial Sequence
  Description of Artificial Sequence: Synthetic oligonucleotide
  Sense strand starting at position 2944 of SEQ ID NO: 1883878
gaaaucuuagguugaauug

SEQ ID NO: 2223177 - RNA, 19 nt, Artificial Sequence
  Description of Artificial Sequence: Synthetic oligonucleotide
  Antisense strand to SEQ ID NO: 2223176
caauucaaccuaagauuuc

SEQ ID NO: 2223178 - RNA, 19 nt, Artificial Sequence
  Description of Artificial Sequence: Synthetic oligonucleotide
  Sense strand starting at position 967 of SEQ ID NO: 1883878
ucugcaaugagagaucagu

SEQ ID NO: 2223179 - RNA, 19 nt, Artificial Sequence
  Description of Artificial Sequence: Synthetic oligonucleotide
  Antisense strand to SEQ ID NO: 2223178
acugaucucucauugcaga

SEQ ID NO: 2223180 - RNA, 19 nt, Artificial Sequence
  Description of Artificial Sequence: Synthetic oligonucleotide
  Sense strand starting at position 2118 of SEQ ID NO: 1883878
ggguccgugcugagaucau

SEQ ID NO: 2223181 - RNA, 19 nt, Artificial Sequence
  Description of Artificial Sequence: Synthetic oligonucleotide
  Antisense strand to SEQ ID NO: 2223180
augaucucagcacggaccc

SEQ ID NO: 2223182 - RNA, 19 nt, Artificial Sequence
  Description of Artificial Sequence: Synthetic oligonucleotide
  Sense strand starting at position 1180 of SEQ ID NO: 1883878
gcguucuuccaguuccuau

SEQ ID NO: 2223183 - RNA, 19 nt, Artificial Sequence
  Description of Artificial Sequence: Synthetic oligonucleotide
  Antisense strand to SEQ ID NO: 2223182
auaggaacuggaagaacgc

SEQ ID NO: 2223184 - RNA, 19 nt, Artificial Sequence
  Description of Artificial Sequence: Synthetic oligonucleotide
  Sense strand starting at position 796 of SEQ ID NO: 1883878
guaauacagcucuaaacug

SEQ ID NO: 2223185 - RNA, 19 nt, Artificial Sequence
  Description of Artificial Sequence: Synthetic oligonucleotide
  Antisense strand to SEQ ID NO: 2223184
caguuuagagcuguauuac

SEQ ID NO: 2223186 - RNA, 19 nt, Artificial Sequence
  Description of Artificial Sequence: Synthetic oligonucleotide
  Sense strand starting at position 2942 of SEQ ID NO: 1883878
cugaaaucuuagguugaau

SEQ ID NO: 2223187 - RNA, 19 nt, Artificial Sequence
  Description of Artificial Sequence: Synthetic oligonucleotide
  Antisense strand to SEQ ID NO: 2223186
auucaaccuaagauuucag

SEQ ID NO: 2223188 - RNA, 19 nt, Artificial Sequence
  Description of Artificial Sequence: Synthetic oligonucleotide
  Sense strand starting at position 2335 of SEQ ID NO: 1883878
auuagauugccaggacaau

SEQ ID NO: 2223189 - RNA, 19 nt, Artificial Sequence
  Description of Artificial Sequence: Synthetic oligonucleotide
  Antisense strand to SEQ ID NO: 2223188
auuguccuggcaaucuaau

SEQ ID NO: 2223190 - RNA, 19 nt, Artificial Sequence
  Description of Artificial Sequence: Synthetic oligonucleotide
  Sense strand starting at position 2880 of SEQ ID NO: 1883878
uguucuaauuuaucgguca

SEQ ID NO: 2223191 - RNA, 19 nt, Artificial Sequence
  Description of Artificial Sequence: Synthetic oligonucleotide
  Antisense strand to SEQ ID NO: 2223190
ugaccgauaaauuagaaca

SEQ ID NO: 2223192 - RNA, 19 nt, Artificial Sequence
  Description of Artificial Sequence: Synthetic oligonucleotide
  Sense strand starting at position 916 of SEQ ID NO: 1883878
ccuguuaaagauuauuagu

SEQ ID NO: 2223193 - RNA, 19 nt, Artificial Sequence
  Description of Artificial Sequence: Synthetic oligonucleotide
  Antisense strand to SEQ ID NO: 2223192
acuaauaaucuuuaacagg

SEQ ID NO: 2223194 - RNA, 19 nt, Artificial Sequence
  Description of Artificial Sequence: Synthetic oligonucleotide
  Sense strand starting at position 1047 of SEQ ID NO: 1883878
gaggucacauguccaagaa

SEQ ID NO: 2223195 - RNA, 19 nt, Artificial Sequence
  Description of Artificial Sequence: Synthetic oligonucleotide
  Antisense strand to SEQ ID NO: 2223194
uucuuggacaugugaccuc

SEQ ID NO: 2223196 - RNA, 19 nt, Artificial Sequence
  Description of Artificial Sequence: Synthetic oligonucleotide
  Sense strand starting at position 583 of SEQ ID NO: 1883878
augaauuaaucagugcaaa

SEQ ID NO: 2223197 - RNA, 19 nt, Artificial Sequence
  Description of Artificial Sequence: Synthetic oligonucleotide
  Antisense strand to SEQ ID NO: 2223196
uuugcacugauuaauucau

SEQ ID NO: 2223198 - RNA, 19 nt, Artificial Sequence
  Description of Artificial Sequence: Synthetic oligonucleotide
  Sense strand starting at position 1137 of SEQ ID NO: 1883878
aggagauucugauugcuga

SEQ ID NO: 2223199 - RNA, 19 nt, Artificial Sequence
  Description of Artificial Sequence: Synthetic oligonucleotide
  Antisense strand to SEQ ID NO: 2223198
ucagcaaucagaaucuccu

SEQ ID NO: 2223200 - RNA, 19 nt, Artificial Sequence
  Description of Artificial Sequence: Synthetic oligonucleotide
  Sense strand starting at position 2127 of SEQ ID NO: 1883878
cugagaucauaucucacga

SEQ ID NO: 2223201 - RNA, 19 nt, Artificial Sequence
  Description of Artificial Sequence: Synthetic oligonucleotide
  Antisense strand to SEQ ID NO: 2223200
ucgugagauaugaucucag

SEQ ID NO: 2223202 - RNA, 19 nt, Artificial Sequence
  Description of Artificial Sequence: Synthetic oligonucleotide
  Sense strand starting at position 712 of SEQ ID NO: 1883878
aguuucgguguuaguauga

SEQ ID NO: 2223203 - RNA, 19 nt, Artificial Sequence
  Description of Artificial Sequence: Synthetic oligonucleotide
  Antisense strand to SEQ ID NO: 2223202
ucauacuaacaccgaaacu

SEQ ID NO: 2223204 - RNA, 19 nt, Artificial Sequence
  Description of Artificial Sequence: Synthetic oligonucleotide
  Sense strand starting at position 1138 of SEQ ID NO: 1883878
ggagauucugauugcugaa

SEQ ID NO: 2223205 - RNA, 19 nt, Artificial Sequence
  Description of Artificial Sequence: Synthetic oligonucleotide
  Antisense strand to SEQ ID NO: 2223204
uucagcaaucagaaucucc

SEQ ID NO: 2223206 - RNA, 19 nt, Artificial Sequence
  Description of Artificial Sequence: Synthetic oligonucleotide
  Sense strand starting at position 1985 of SEQ ID NO: 1883878
gcggccuuucugagugaga

SEQ ID NO: 2223207 - RNA, 19 nt, Artificial Sequence
  Description of Artificial Sequence: Synthetic oligonucleotide
  Antisense strand to SEQ ID NO: 2223206
ucucacucagaaaggccgc

SEQ ID NO: 2223208 - RNA, 19 nt, Artificial Sequence
  Description of Artificial Sequence: Synthetic oligonucleotide
  Sense strand starting at position 710 of SEQ ID NO: 1883878
gcaguuucgguguuaguau

SEQ ID NO: 2223209 - RNA, 19 nt, Artificial Sequence
  Description of Artificial Sequence: Synthetic oligonucleotide
  Antisense strand to SEQ ID NO: 2223208
auacuaacaccgaaacugc

SEQ ID NO: 2223210 - RNA, 19 nt, Artificial Sequence
  Description of Artificial Sequence: Synthetic oligonucleotide
  Sense strand starting at position 709 of SEQ ID NO: 1883878
ugcaguuucgguguuagua

SEQ ID NO: 2223211 - RNA, 19 nt, Artificial Sequence
  Description of Artificial Sequence: Synthetic oligonucleotide
  Antisense strand to SEQ ID NO: 2223210
uacuaacaccgaaacugca

SEQ ID NO: 2223212 - RNA, 19 nt, Artificial Sequence
  Description of Artificial Sequence: Synthetic oligonucleotide
  Sense strand starting at position 772 of SEQ ID NO: 1883878
acuacaucuggcugauaaa

SEQ ID NO: 2223213 - RNA, 19 nt, Artificial Sequence
  Description of Artificial Sequence: Synthetic oligonucleotide
  Antisense strand to SEQ ID NO: 2223212
uuuaucagccagauguagu

SEQ ID NO: 2223214 - RNA, 19 nt, Artificial Sequence
  Description of Artificial Sequence: Synthetic oligonucleotide
  Sense strand starting at position 328 of SEQ ID NO: 1883878
uguauaguaccaugaaaua

SEQ ID NO: 2223215 - RNA, 19 nt, Artificial Sequence
  Description of Artificial Sequence: Synthetic oligonucleotide
  Antisense strand to SEQ ID NO: 2223214
uauuucaugguacuauaca

SEQ ID NO: 2223216 - RNA, 19 nt, Artificial Sequence
  Description of Artificial Sequence: Synthetic oligonucleotide
  Sense strand starting at position 1255 of SEQ ID NO: 1883878
acucuaauuguugaaagcu

SEQ ID NO: 2223217 - RNA, 19 nt, Artificial Sequence
  Description of Artificial Sequence: Synthetic oligonucleotide
  Antisense strand to SEQ ID NO: 2223216
agcuuucaacaauuagagu

SEQ ID NO: 2223218 - RNA, 19 nt, Artificial Sequence
  Description of Artificial Sequence: Synthetic oligonucleotide
  Sense strand starting at position 808 of SEQ ID NO: 1883878
uaaacugugcucgacaaag

SEQ ID NO: 2223219 - RNA, 19 nt, Artificial Sequence
  Description of Artificial Sequence: Synthetic oligonucleotide
  Antisense strand to SEQ ID NO: 2223218
cuuugucgagcacaguuua

SEQ ID NO: 2223220 - RNA, 19 nt, Artificial Sequence
  Description of Artificial Sequence: Synthetic oligonucleotide
  Sense strand starting at position 3024 of SEQ ID NO: 1883878
aucaaucuugcccagguga

SEQ ID NO: 2223221 - RNA, 19 nt, Artificial Sequence
  Description of Artificial Sequence: Synthetic oligonucleotide
  Antisense strand to SEQ ID NO: 2223220
ucaccugggcaagauugau

SEQ ID NO: 2223222 - RNA, 19 nt, Artificial Sequence
  Description of Artificial Sequence: Synthetic oligonucleotide
  Sense strand starting at position 584 of SEQ ID NO: 1883878
ugaauuaaucagugcaaau

SEQ ID NO: 2223223 - RNA, 19 nt, Artificial Sequence
  Description of Artificial Sequence: Synthetic oligonucleotide
  Antisense strand to SEQ ID NO: 2223222
auuugcacugauuaauuca

SEQ ID NO: 2223224 - RNA, 19 nt, Artificial Sequence
  Description of Artificial Sequence: Synthetic oligonucleotide
  Sense strand starting at position 12 of SEQ ID NO: 1883878
guaaacauuccaugaguac

SEQ ID NO: 2223225 - RNA, 19 nt, Artificial Sequence
  Description of Artificial Sequence: Synthetic oligonucleotide
  Antisense strand to SEQ ID NO: 2223224
guacucauggaauguuuac

SEQ ID NO: 2223226 - RNA, 19 nt, Artificial Sequence
  Description of Artificial Sequence: Synthetic oligonucleotide
  Sense strand starting at position 1126 of SEQ ID NO: 1883878
gauugcugaguaggagauu

SEQ ID NO: 2223227 - RNA, 19 nt, Artificial Sequence
  Description of Artificial Sequence: Synthetic oligonucleotide
  Antisense strand to SEQ ID NO: 2223226
aaucuccuacucagcaauc

SEQ ID NO: 2223228 - RNA, 19 nt, Artificial Sequence
  Description of Artificial Sequence: Synthetic oligonucleotide
  Sense strand starting at position 1308 of SEQ ID NO: 1883878
caacuaguucuagguauag

SEQ ID NO: 2223229 - RNA, 19 nt, Artificial Sequence
  Description of Artificial Sequence: Synthetic oligonucleotide
  Antisense strand to SEQ ID NO: 2223228
cuauaccuagaacuaguug

SEQ ID NO: 2223230 - RNA, 19 nt, Artificial Sequence
  Description of Artificial Sequence: Synthetic oligonucleotide
  Sense strand starting at position 2556 of SEQ ID NO: 1883878
ggcugauaugcauaagguu

SEQ ID NO: 2223231 - RNA, 19 nt, Artificial Sequence
  Description of Artificial Sequence: Synthetic oligonucleotide
  Antisense strand to SEQ ID NO: 2223230
aaccuuaugcauaucagcc

SEQ ID NO: 2223232 - RNA, 19 nt, Artificial Sequence
  Description of Artificial Sequence: Synthetic oligonucleotide
  Sense strand starting at position 2399 of SEQ ID NO: 1883878
aguagugccagucauagag

SEQ ID NO: 2223233 - RNA, 19 nt, Artificial Sequence
  Description of Artificial Sequence: Synthetic oligonucleotide
  Antisense strand to SEQ ID NO: 2223232
cucuaugacuggcacuacu

SEQ ID NO: 2223234 - RNA, 19 nt, Artificial Sequence
  Description of Artificial Sequence: Synthetic oligonucleotide
  Sense strand starting at position 2100 of SEQ ID NO: 1883878
ucuugucauccgggagaag

SEQ ID NO: 2223235 - RNA, 19 nt, Artificial Sequence
  Description of Artificial Sequence: Synthetic oligonucleotide
  Antisense strand to SEQ ID NO: 2223234
cuucucccggaugacaaga

SEQ ID NO: 2223236 - RNA, 19 nt, Artificial Sequence
  Description of Artificial Sequence: Synthetic oligonucleotide
  Sense strand starting at position 878 of SEQ ID NO: 1883878
ugaagaacugccugucaac

SEQ ID NO: 2223237 - RNA, 19 nt, Artificial Sequence
  Description of Artificial Sequence: Synthetic oligonucleotide
  Antisense strand to SEQ ID NO: 2223236
guugacaggcaguucuuca

SEQ ID NO: 2223238 - RNA, 19 nt, Artificial Sequence
  Description of Artificial Sequence: Synthetic oligonucleotide
  Sense strand starting at position 3026 of SEQ ID NO: 1883878
caaucuugcccaggugaaa

SEQ ID NO: 2223239 - RNA, 19 nt, Artificial Sequence
  Description of Artificial Sequence: Synthetic oligonucleotide
  Antisense strand to SEQ ID NO: 2223238
uuucaccugggcaagauug

SEQ ID NO: 2223240 - RNA, 19 nt, Artificial Sequence
  Description of Artificial Sequence: Synthetic oligonucleotide
  Sense strand starting at position 389 of SEQ ID NO: 1883878
ugaaacaugguggguugua

SEQ ID NO: 2223241 - RNA, 19 nt, Artificial Sequence
  Description of Artificial Sequence: Synthetic oligonucleotide
  Antisense strand to SEQ ID NO: 2223240
uacaacccaccauguuuca

SEQ ID NO: 2223242 - RNA, 19 nt, Artificial Sequence
  Description of Artificial Sequence: Synthetic oligonucleotide
  Sense strand starting at position 2383 of SEQ ID NO: 1883878
gguaacagugaguaguagu

SEQ ID NO: 2223243 - RNA, 19 nt, Artificial Sequence
  Description of Artificial Sequence: Synthetic oligonucleotide
  Antisense strand to SEQ ID NO: 2223242
acuacuacucacuguuacc

SEQ ID NO: 2223244 - RNA, 19 nt, Artificial Sequence
  Description of Artificial Sequence: Synthetic oligonucleotide
  Sense strand starting at position 206 of SEQ ID NO: 1883878
cgauuucucucugcugcua

SEQ ID NO: 2223245 - RNA, 19 nt, Artificial Sequence
  Description of Artificial Sequence: Synthetic oligonucleotide
  Antisense strand to SEQ ID NO: 2223244
uagcagcagagagaaaucg

SEQ ID NO: 2223246 - RNA, 19 nt, Artificial Sequence
  Description of Artificial Sequence: Synthetic oligonucleotide
  Sense strand starting at position 1250 of SEQ ID NO: 1883878
uggcaacucuaauuguuga

SEQ ID NO: 2223247 - RNA, 19 nt, Artificial Sequence
  Description of Artificial Sequence: Synthetic oligonucleotide
  Antisense strand to SEQ ID NO: 2223246
ucaacaauuagaguugcca

SEQ ID NO: 2223248 - RNA, 19 nt, Artificial Sequence
  Description of Artificial Sequence: Synthetic oligonucleotide
  Sense strand starting at position 864 of SEQ ID NO: 1883879
ucagauucuccugaaagca

SEQ ID NO: 2223249 - RNA, 19 nt, Artificial Sequence
  Description of Artificial Sequence: Synthetic oligonucleotide
  Antisense strand to SEQ ID NO: 2223248
ugcuuucaggagaaucuga

SEQ ID NO: 2223250 - RNA, 19 nt, Artificial Sequence
  Description of Artificial Sequence: Synthetic oligonucleotide
  Sense strand starting at position 2175 of SEQ ID NO: 1883879
augcuauuuaccgggcaaa

SEQ ID NO: 2223251 - RNA, 19 nt, Artificial Sequence
  Description of Artificial Sequence: Synthetic oligonucleotide
  Antisense strand to SEQ ID NO: 2223250
uuugcccgguaaauagcau

SEQ ID NO: 2223252 - RNA, 19 nt, Artificial Sequence
  Description of Artificial Sequence: Synthetic oligonucleotide
  Sense strand starting at position 594 of SEQ ID NO: 1883879
ggagaauccaaauguguaa

SEQ ID NO: 2223253 - RNA, 19 nt, Artificial Sequence
  Description of Artificial Sequence: Synthetic oligonucleotide
  Antisense strand to SEQ ID NO: 2223252
uuacacauuuggauucucc

SEQ ID NO: 2223254 - RNA, 19 nt, Artificial Sequence
  Description of Artificial Sequence: Synthetic oligonucleotide
  Sense strand starting at position 2738 of SEQ ID NO: 1883879
guuaauauaaguggagaau

SEQ ID NO: 2223255 - RNA, 19 nt, Artificial Sequence
  Description of Artificial Sequence: Synthetic oligonucleotide
  Antisense strand to SEQ ID NO: 2223254
auucuccacuuauauuaac

SEQ ID NO: 2223256 - RNA, 19 nt, Artificial Sequence
  Description of Artificial Sequence: Synthetic oligonucleotide
  Sense strand starting at position 2531 of SEQ ID NO: 1883879
agauuaacacuuugugaau

SEQ ID NO: 2223257 - RNA, 19 nt, Artificial Sequence
  Description of Artificial Sequence: Synthetic oligonucleotide
  Antisense strand to SEQ ID NO: 2223256
auucacaaaguguuaaucu

SEQ ID NO: 2223258 - RNA, 19 nt, Artificial Sequence
  Description of Artificial Sequence: Synthetic oligonucleotide
  Sense strand starting at position 355 of SEQ ID NO: 1883879
auguuccuucuugaugaca

SEQ ID NO: 2223259 - RNA, 19 nt, Artificial Sequence
  Description of Artificial Sequence: Synthetic oligonucleotide
  Antisense strand to SEQ ID NO: 2223258
ugucaucaagaaggaacau

SEQ ID NO: 2223260 - RNA, 19 nt, Artificial Sequence
  Description of Artificial Sequence: Synthetic oligonucleotide
  Sense strand starting at position 2947 of SEQ ID NO: 1883879
agcagcuacgagugaauuu

SEQ ID NO: 2223261 - RNA, 19 nt, Artificial Sequence
  Description of Artificial Sequence: Synthetic oligonucleotide
  Antisense strand to SEQ ID NO: 2223260
aaauucacucguagcugcu

SEQ ID NO: 2223262 - RNA, 19 nt, Artificial Sequence
  Description of Artificial Sequence: Synthetic oligonucleotide
  Sense strand starting at position 2513 of SEQ ID NO: 1883879
ucuggaauucuaggcaaca

SEQ ID NO: 2223263 - RNA, 19 nt, Artificial Sequence
  Description of Artificial Sequence: Synthetic oligonucleotide
  Antisense strand to SEQ ID NO: 2223262
uguugccuagaauuccaga

SEQ ID NO: 2223264 - RNA, 19 nt, Artificial Sequence
  Description of Artificial Sequence: Synthetic oligonucleotide
  Sense strand starting at position 2579 of SEQ ID NO: 1883879
ggaguuaaugcugauccuu

SEQ ID NO: 2223265 - RNA, 19 nt, Artificial Sequence
  Description of Artificial Sequence: Synthetic oligonucleotide
  Antisense strand to SEQ ID NO: 2223264
aaggaucagcauuaacucc

SEQ ID NO: 2223266 - RNA, 19 nt, Artificial Sequence
  Description of Artificial Sequence: Synthetic oligonucleotide
  Sense strand starting at position 2155 of SEQ ID NO: 1883879
gaaugacucguacgaagga

SEQ ID NO: 2223267 - RNA, 19 nt, Artificial Sequence
  Description of Artificial Sequence: Synthetic oligonucleotide
  Antisense strand to SEQ ID NO: 2223266
uccuucguacgagucauuc

SEQ ID NO: 2223268 - RNA, 19 nt, Artificial Sequence
  Description of Artificial Sequence: Synthetic oligonucleotide
  Sense strand starting at position 2800 of SEQ ID NO: 1883879
ucaaguugcccuuaauaug

SEQ ID NO: 2223269 - RNA, 19 nt, Artificial Sequence
  Description of Artificial Sequence: Synthetic oligonucleotide
  Antisense strand to SEQ ID NO: 2223268
cauauuaagggcaacuuga

SEQ ID NO: 2223270 - RNA, 19 nt, Artificial Sequence
  Description of Artificial Sequence: Synthetic oligonucleotide
  Sense strand starting at position 353 of SEQ ID NO: 1883879
agauguuccuucuugauga

SEQ ID NO: 2223271 - RNA, 19 nt, Artificial Sequence
  Description of Artificial Sequence: Synthetic oligonucleotide
  Antisense strand to SEQ ID NO: 2223270
ucaucaagaaggaacaucu

SEQ ID NO: 2223272 - RNA, 19 nt, Artificial Sequence
  Description of Artificial Sequence: Synthetic oligonucleotide
  Sense strand starting at position 3623 of SEQ ID NO: 1883879
uagcuuaaggccgagaauu

SEQ ID NO: 2223273 - RNA, 19 nt, Artificial Sequence
  Description of Artificial Sequence: Synthetic oligonucleotide
  Antisense strand to SEQ ID NO: 2223272
aauucucggccuuaagcua

SEQ ID NO: 2223274 - RNA, 19 nt, Artificial Sequence
  Description of Artificial Sequence: Synthetic oligonucleotide
  Sense strand starting at position 861 of SEQ ID NO: 1883879
ugcucagauucuccugaaa

SEQ ID NO: 2223275 - RNA, 19 nt, Artificial Sequence
  Description of Artificial Sequence: Synthetic oligonucleotide
  Antisense strand to SEQ ID NO: 2223274
uuucaggagaaucugagca

SEQ ID NO: 2223276 - RNA, 19 nt, Artificial Sequence
  Description of Artificial Sequence: Synthetic oligonucleotide
  Sense strand starting at position 2810 of SEQ ID NO: 1883879
cuuaauaugugauccgaua

SEQ ID NO: 2223277 - RNA, 19 nt, Artificial Sequence
  Description of Artificial Sequence: Synthetic oligonucleotide
  Antisense strand to SEQ ID NO: 2223276
uaucggaucacauauuaag

SEQ ID NO: 2223278 - RNA, 19 nt, Artificial Sequence
  Description of Artificial Sequence: Synthetic oligonucleotide
  Sense strand starting at position 2596 of SEQ ID NO: 1883879
uuuggaagucucugaaggu

SEQ ID NO: 2223279 - RNA, 19 nt, Artificial Sequence
  Description of Artificial Sequence: Synthetic oligonucleotide
  Antisense strand to SEQ ID NO: 2223278
accuucagagacuuccaaa

SEQ ID NO: 2223280 - RNA, 19 nt, Artificial Sequence
  Description of Artificial Sequence: Synthetic oligonucleotide
  Sense strand starting at position 3541 of SEQ ID NO: 1883879
ucccucugggccugauaaa

SEQ ID NO: 2223281 - RNA, 19 nt, Artificial Sequence
  Description of Artificial Sequence: Synthetic oligonucleotide
  Antisense strand to SEQ ID NO: 2223280
uuuaucaggcccagaggga

SEQ ID NO: 2223282 - RNA, 19 nt, Artificial Sequence
  Description of Artificial Sequence: Synthetic oligonucleotide
  Sense strand starting at position 2502 of SEQ ID NO: 1883879
gccuccaacucucuggaau

SEQ ID NO: 2223283 - RNA, 19 nt, Artificial Sequence
  Description of Artificial Sequence: Synthetic oligonucleotide
  Antisense strand to SEQ ID NO: 2223282
auuccagagaguuggaggc

SEQ ID NO: 2223284 - RNA, 19 nt, Artificial Sequence
  Description of Artificial Sequence: Synthetic oligonucleotide
  Sense strand starting at position 2164 of SEQ ID NO: 1883879
guacgaaggagaugcuauu

SEQ ID NO: 2223285 - RNA, 19 nt, Artificial Sequence
  Description of Artificial Sequence: Synthetic oligonucleotide
  Antisense strand to SEQ ID NO: 2223284
aauagcaucuccuucguac

SEQ ID NO: 2223286 - RNA, 19 nt, Artificial Sequence
  Description of Artificial Sequence: Synthetic oligonucleotide
  Sense strand starting at position 3622 of SEQ ID NO: 1883879
auagcuuaaggccgagaau

SEQ ID NO: 2223287 - RNA, 19 nt, Artificial Sequence
  Description of Artificial Sequence: Synthetic oligonucleotide
  Antisense strand to SEQ ID NO: 2223286
auucucggccuuaagcuau

SEQ ID NO: 2223288 - RNA, 19 nt, Artificial Sequence
  Description of Artificial Sequence: Synthetic oligonucleotide
  Sense strand starting at position 2603 of SEQ ID NO: 1883879
gucucugaagguugcaaga

SEQ ID NO: 2223289 - RNA, 19 nt, Artificial Sequence
  Description of Artificial Sequence: Synthetic oligonucleotide
  Antisense strand to SEQ ID NO: 2223288
ucuugcaaccuucagagac

SEQ ID NO: 2223290 - RNA, 19 nt, Artificial Sequence
  Description of Artificial Sequence: Synthetic oligonucleotide
  Sense strand starting at position 2841 of SEQ ID NO: 1883879
aacugaguucuuugucuug

SEQ ID NO: 2223291 - RNA, 19 nt, Artificial Sequence
  Description of Artificial Sequence: Synthetic oligonucleotide
  Antisense strand to SEQ ID NO: 2223290
caagacaaagaacucaguu

SEQ ID NO: 2223292 - RNA, 19 nt, Artificial Sequence
  Description of Artificial Sequence: Synthetic oligonucleotide
  Sense strand starting at position 885 of SEQ ID NO: 1883879
acgcuuuccuaaguauaca

SEQ ID NO: 2223293 - RNA, 19 nt, Artificial Sequence
  Description of Artificial Sequence: Synthetic oligonucleotide
  Antisense strand to SEQ ID NO: 2223292
uguauacuuaggaaagcgu

SEQ ID NO: 2223294 - RNA, 19 nt, Artificial Sequence
  Description of Artificial Sequence: Synthetic oligonucleotide
  Sense strand starting at position 2858 of SEQ ID NO: 1883879
ugugaagcuccaggcuuaa

SEQ ID NO: 2223295 - RNA, 19 nt, Artificial Sequence
  Description of Artificial Sequence: Synthetic oligonucleotide
  Antisense strand to SEQ ID NO: 2223294
uuaagccuggagcuucaca

SEQ ID NO: 2223296 - RNA, 19 nt, Artificial Sequence
  Description of Artificial Sequence: Synthetic oligonucleotide
  Sense strand starting at position 486 of SEQ ID NO: 1883879
uuaguaagcugcccugaca

SEQ ID NO: 2223297 - RNA, 19 nt, Artificial Sequence
  Description of Artificial Sequence: Synthetic oligonucleotide
  Antisense strand to SEQ ID NO: 2223296
ugucagggcagcuuacuaa

SEQ ID NO: 2223298 - RNA, 19 nt, Artificial Sequence
  Description of Artificial Sequence: Synthetic oligonucleotide
  Sense strand starting at position 2844 of SEQ ID NO: 1883879
ugaguucuuugucuuguga

SEQ ID NO: 2223299 - RNA, 19 nt, Artificial Sequence
  Description of Artificial Sequence: Synthetic oligonucleotide
  Antisense strand to SEQ ID NO: 2223298
ucacaagacaaagaacuca

SEQ ID NO: 2223300 - RNA, 19 nt, Artificial Sequence
  Description of Artificial Sequence: Synthetic oligonucleotide
  Sense strand starting at position 2396 of SEQ ID NO: 1883879
gcgggaaacgcguacuuga

SEQ ID NO: 2223301 - RNA, 19 nt, Artificial Sequence
  Description of Artificial Sequence: Synthetic oligonucleotide
  Antisense strand to SEQ ID NO: 2223300
ucaaguacgcguuucccgc

SEQ ID NO: 2223302 - RNA, 19 nt, Artificial Sequence
  Description of Artificial Sequence: Synthetic oligonucleotide
  Sense strand starting at position 2138 of SEQ ID NO: 1883879
ggcugcaucuauuauuuga

SEQ ID NO: 2223303 - RNA, 19 nt, Artificial Sequence
  Description of Artificial Sequence: Synthetic oligonucleotide
  Antisense strand to SEQ ID NO: 2223302
ucaaauaauagaugcagcc

SEQ ID NO: 2223304 - RNA, 19 nt, Artificial Sequence
  Description of Artificial Sequence: Synthetic oligonucleotide
  Sense strand starting at position 578 of SEQ ID NO: 1883879
caaaucugauugggaugga

SEQ ID NO: 2223305 - RNA, 19 nt, Artificial Sequence
  Description of Artificial Sequence: Synthetic oligonucleotide
  Antisense strand to SEQ ID NO: 2223304
uccaucccaaucagauuug

SEQ ID NO: 2223306 - RNA, 19 nt, Artificial Sequence
  Description of Artificial Sequence: Synthetic oligonucleotide
  Sense strand starting at position 1119 of SEQ ID NO: 1883879
acuaaugcagcccguaauu

SEQ ID NO: 2223307 - RNA, 19 nt, Artificial Sequence
  Description of Artificial Sequence: Synthetic oligonucleotide
  Antisense strand to SEQ ID NO: 2223306
aauuacgggcugcauuagu

SEQ ID NO: 2223308 - RNA, 19 nt, Artificial Sequence
  Description of Artificial Sequence: Synthetic oligonucleotide
  Sense strand starting at position 880 of SEQ ID NO: 1883879
gcauaacgcuuuccuaagu

SEQ ID NO: 2223309 - RNA, 19 nt, Artificial Sequence
  Description of Artificial Sequence: Synthetic oligonucleotide
  Antisense strand to SEQ ID NO: 2223308
acuuaggaaagcguuaugc

SEQ ID NO: 2223310 - RNA, 19 nt, Artificial Sequence
  Description of Artificial Sequence: Synthetic oligonucleotide
  Sense strand starting at position 9 of SEQ ID NO: 1883879
uuaagaaucucccaaguug

SEQ ID NO: 2223311 - RNA, 19 nt, Artificial Sequence
  Description of Artificial Sequence: Synthetic oligonucleotide
  Antisense strand to SEQ ID NO: 2223310
caacuugggagauucuuaa

SEQ ID NO: 2223312 - RNA, 19 nt, Artificial Sequence
  Description of Artificial Sequence: Synthetic oligonucleotide
  Sense strand starting at position 435 of SEQ ID NO: 1883879
auuggaaugugaugaauac

SEQ ID NO: 2223313 - RNA, 19 nt, Artificial Sequence
  Description of Artificial Sequence: Synthetic oligonucleotide
  Antisense strand to SEQ ID NO: 2223312
guauucaucacauuccaau

SEQ ID NO: 2223314 - RNA, 19 nt, Artificial Sequence
  Description of Artificial Sequence: Synthetic oligonucleotide
  Sense strand starting at position 3507 of SEQ ID NO: 1883879
augggauggugcuaacuga

SEQ ID NO: 2223315 - RNA, 19 nt, Artificial Sequence
  Description of Artificial Sequence: Synthetic oligonucleotide
  Antisense strand to SEQ ID NO: 2223314
ucaguuagcaccaucccau

SEQ ID NO: 2223316 - RNA, 19 nt, Artificial Sequence
  Description of Artificial Sequence: Synthetic oligonucleotide
  Sense strand starting at position 2568 of SEQ ID NO: 1883879
ugcuaaauauuggaguuaa

SEQ ID NO: 2223317 - RNA, 19 nt, Artificial Sequence
  Description of Artificial Sequence: Synthetic oligonucleotide
  Antisense strand to SEQ ID NO: 2223316
uuaacuccaauauuuagca

SEQ ID NO: 2223318 - RNA, 19 nt, Artificial Sequence
  Description of Artificial Sequence: Synthetic oligonucleotide
  Sense strand starting at position 2174 of SEQ ID NO: 1883879
gaugcuauuuaccgggcaa

SEQ ID NO: 2223319 - RNA, 19 nt, Artificial Sequence
  Description of Artificial Sequence: Synthetic oligonucleotide
  Antisense strand to SEQ ID NO: 2223318
uugcccgguaaauagcauc

SEQ ID NO: 2223320 - RNA, 19 nt, Artificial Sequence
  Description of Artificial Sequence: Synthetic oligonucleotide
  Sense strand starting at position 2597 of SEQ ID NO: 1883879
uuggaagucucugaagguu

SEQ ID NO: 2223321 - RNA, 19 nt, Artificial Sequence
  Description of Artificial Sequence: Synthetic oligonucleotide
  Antisense strand to SEQ ID NO: 2223320
aaccuucagagacuuccaa

SEQ ID NO: 2223322 - RNA, 19 nt, Artificial Sequence
  Description of Artificial Sequence: Synthetic oligonucleotide
  Sense strand starting at position 3631 of SEQ ID NO: 1883879
ggccgagaauucgaaacca

SEQ ID NO: 2223323 - RNA, 19 nt, Artificial Sequence
  Description of Artificial Sequence: Synthetic oligonucleotide
  Antisense strand to SEQ ID NO: 2223322
ugguuucgaauucucggcc

SEQ ID NO: 2223324 - RNA, 19 nt, Artificial Sequence
  Description of Artificial Sequence: Synthetic oligonucleotide
  Sense strand starting at position 2605 of SEQ ID NO: 1883879
cucugaagguugcaagauu

SEQ ID NO: 2223325 - RNA, 19 nt, Artificial Sequence
  Description of Artificial Sequence: Synthetic oligonucleotide
  Antisense strand to SEQ ID NO: 2223324
aaucuugcaaccuucagag

SEQ ID NO: 2223326 - RNA, 19 nt, Artificial Sequence
  Description of Artificial Sequence: Synthetic oligonucleotide
  Sense strand starting at position 2153 of SEQ ID NO: 1883879
uugaaugacucguacgaag

SEQ ID NO: 2223327 - RNA, 19 nt, Artificial Sequence
  Description of Artificial Sequence: Synthetic oligonucleotide
  Antisense strand to SEQ ID NO: 2223326
cuucguacgagucauucaa

SEQ ID NO: 2223328 - RNA, 19 nt, Artificial Sequence
  Description of Artificial Sequence: Synthetic oligonucleotide
  Sense strand starting at position 3776 of SEQ ID NO: 1883880
acauuagaucucuggaacu

SEQ ID NO: 2223329 - RNA, 19 nt, Artificial Sequence
  Description of Artificial Sequence: Synthetic oligonucleotide
  Antisense strand to SEQ ID NO: 2223328
aguuccagagaucuaaugu

SEQ ID NO: 2223330 - RNA, 19 nt, Artificial Sequence
  Description of Artificial Sequence: Synthetic oligonucleotide
  Sense strand starting at position 3358 of SEQ ID NO: 1883880
ugaacaaauguguaaugua

SEQ ID NO: 2223331 - RNA, 19 nt, Artificial Sequence
  Description of Artificial Sequence: Synthetic oligonucleotide
  Antisense strand to SEQ ID NO: 2223330
uacauuacacauuuguuca

SEQ ID NO: 2223332 - RNA, 19 nt, Artificial Sequence
  Description of Artificial Sequence: Synthetic oligonucleotide
  Sense strand starting at position 3287 of SEQ ID NO: 1883880
agaauacagugguuacuaa

SEQ ID NO: 2223333 - RNA, 19 nt, Artificial Sequence
  Description of Artificial Sequence: Synthetic oligonucleotide
  Antisense strand to SEQ ID NO: 2223332
uuaguaaccacuguauucu

SEQ ID NO: 2223334 - RNA, 19 nt, Artificial Sequence
  Description of Artificial Sequence: Synthetic oligonucleotide
  Sense strand starting at position 782 of SEQ ID NO: 1883880
cuguuagucugauuucucu

SEQ ID NO: 2223335 - RNA, 19 nt, Artificial Sequence
  Description of Artificial Sequence: Synthetic oligonucleotide
  Antisense strand to SEQ ID NO: 2223334
agagaaaucagacuaacag

SEQ ID NO: 2223336 - RNA, 19 nt, Artificial Sequence
  Description of Artificial Sequence: Synthetic oligonucleotide
  Sense strand starting at position 1119 of SEQ ID NO: 1883880
acgaacuguaacugacaga

SEQ ID NO: 2223337 - RNA, 19 nt, Artificial Sequence
  Description of Artificial Sequence: Synthetic oligonucleotide
  Antisense strand to SEQ ID NO: 2223336
ucugucaguuacaguucgu

SEQ ID NO: 2223338 - RNA, 19 nt, Artificial Sequence
  Description of Artificial Sequence: Synthetic oligonucleotide
  Sense strand starting at position 40 of SEQ ID NO: 1883880
ccgaauaacuggucagaga

SEQ ID NO: 2223339 - RNA, 19 nt, Artificial Sequence
  Description of Artificial Sequence: Synthetic oligonucleotide
  Antisense strand to SEQ ID NO: 2223338
ucucugaccaguuauucgg

SEQ ID NO: 2223340 - RNA, 19 nt, Artificial Sequence
  Description of Artificial Sequence: Synthetic oligonucleotide
  Sense strand starting at position 2285 of SEQ ID NO: 1883880
gcauuaccagaagagucuu

SEQ ID NO: 2223341 - RNA, 19 nt, Artificial Sequence
  Description of Artificial Sequence: Synthetic oligonucleotide
  Antisense strand to SEQ ID NO: 2223340
aagacucuucugguaaugc

SEQ ID NO: 2223342 - RNA, 19 nt, Artificial Sequence
  Description of Artificial Sequence: Synthetic oligonucleotide
  Sense strand starting at position 2375 of SEQ ID NO: 1883880
gugggucauguucaaggaa

SEQ ID NO: 2223343 - RNA, 19 nt, Artificial Sequence
  Description of Artificial Sequence: Synthetic oligonucleotide
  Antisense strand to SEQ ID NO: 2223342
uuccuugaacaugacccac

SEQ ID NO: 2223344 - RNA, 19 nt, Artificial Sequence
  Description of Artificial Sequence: Synthetic oligonucleotide
  Sense strand starting at position 983 of SEQ ID NO: 1883880
ugauuucuguagucaguuc

SEQ ID NO: 2223345 - RNA, 19 nt, Artificial Sequence
  Description of Artificial Sequence: Synthetic oligonucleotide
  Antisense strand to SEQ ID NO: 2223344
gaacugacuacagaaauca

SEQ ID NO: 2223346 - RNA, 19 nt, Artificial Sequence
  Description of Artificial Sequence: Synthetic oligonucleotide
  Sense strand starting at position 2424 of SEQ ID NO: 1883880
uagaguguuacgccaucgu

SEQ ID NO: 2223347 - RNA, 19 nt, Artificial Sequence
  Description of Artificial Sequence: Synthetic oligonucleotide
  Antisense strand to SEQ ID NO: 2223346
acgauggcguaacacucua

SEQ ID NO: 2223348 - RNA, 19 nt, Artificial Sequence
  Description of Artificial Sequence: Synthetic oligonucleotide
  Sense strand starting at position 1087 of SEQ ID NO: 1883880
cugaaaguuccauauguug

SEQ ID NO: 2223349 - RNA, 19 nt, Artificial Sequence
  Description of Artificial Sequence: Synthetic oligonucleotide
  Antisense strand to SEQ ID NO: 2223348
caacauauggaacuuucag

SEQ ID NO: 2223350 - RNA, 19 nt, Artificial Sequence
  Description of Artificial Sequence: Synthetic oligonucleotide
  Sense strand starting at position 3564 of SEQ ID NO: 1883880
aggaguucucacuauguug

SEQ ID NO: 2223351 - RNA, 19 nt, Artificial Sequence
  Description of Artificial Sequence: Synthetic oligonucleotide
  Antisense strand to SEQ ID NO: 2223350
caacauagugagaacuccu

SEQ ID NO: 2223352 - RNA, 19 nt, Artificial Sequence
  Description of Artificial Sequence: Synthetic oligonucleotide
  Sense strand starting at position 2282 of SEQ ID NO: 1883880
cgggcauuaccagaagagu

SEQ ID NO: 2223353 - RNA, 19 nt, Artificial Sequence
  Description of Artificial Sequence: Synthetic oligonucleotide
  Antisense strand to SEQ ID NO: 2223352
acucuucugguaaugcccg

SEQ ID NO: 2223354 - RNA, 19 nt, Artificial Sequence
  Description of Artificial Sequence: Synthetic oligonucleotide
  Sense strand starting at position 3485 of SEQ ID NO: 1883880
acuugauguugauuauuag

SEQ ID NO: 2223355 - RNA, 19 nt, Artificial Sequence
  Description of Artificial Sequence: Synthetic oligonucleotide
  Antisense strand to SEQ ID NO: 2223354
cuaauaaucaacaucaagu

SEQ ID NO: 2223356 - RNA, 19 nt, Artificial Sequence
  Description of Artificial Sequence: Synthetic oligonucleotide
  Sense strand starting at position 3034 of SEQ ID NO: 1883880
cuuagauaguguuuaggaa

SEQ ID NO: 2223357 - RNA, 19 nt, Artificial Sequence
  Description of Artificial Sequence: Synthetic oligonucleotide
  Antisense strand to SEQ ID NO: 2223356
uuccuaaacacuaucuaag

SEQ ID NO: 2223358 - RNA, 19 nt, Artificial Sequence
  Description of Artificial Sequence: Synthetic oligonucleotide
  Sense strand starting at position 3486 of SEQ ID NO: 1883880
cuugauguugauuauuagu

SEQ ID NO: 2223359 - RNA, 19 nt, Artificial Sequence
  Description of Artificial Sequence: Synthetic oligonucleotide
  Antisense strand to SEQ ID NO: 2223358
acuaauaaucaacaucaag

SEQ ID NO: 2223360 - RNA, 19 nt, Artificial Sequence
  Description of Artificial Sequence: Synthetic oligonucleotide
  Sense strand starting at position 74 of SEQ ID NO: 1883880
uuacgauuugccuguuaug

SEQ ID NO: 2223361 - RNA, 19 nt, Artificial Sequence
  Description of Artificial Sequence: Synthetic oligonucleotide
  Antisense strand to SEQ ID NO: 2223360
cauaacaggcaaaucguaa

SEQ ID NO: 2223362 - RNA, 19 nt, Artificial Sequence
  Description of Artificial Sequence: Synthetic oligonucleotide
  Sense strand starting at position 100 of SEQ ID NO: 1883880
ugguaugaucaaugaugua

SEQ ID NO: 2223363 - RNA, 19 nt, Artificial Sequence
  Description of Artificial Sequence: Synthetic oligonucleotide
  Antisense strand to SEQ ID NO: 2223362
uacaucauugaucauacca

SEQ ID NO: 2223364 - RNA, 19 nt, Artificial Sequence
  Description of Artificial Sequence: Synthetic oligonucleotide
  Sense strand starting at position 168 of SEQ ID NO: 1883880
ugaaguauuaacuggguca

SEQ ID NO: 2223365 - RNA, 19 nt, Artificial Sequence
  Description of Artificial Sequence: Synthetic oligonucleotide
  Antisense strand to SEQ ID NO: 2223364
ugacccaguuaauacuuca

SEQ ID NO: 2223366 - RNA, 19 nt, Artificial Sequence
  Description of Artificial Sequence: Synthetic oligonucleotide
  Sense strand starting at position 1113 of SEQ ID NO: 1883880
cugggaacgaacuguaacu

SEQ ID NO: 2223367 - RNA, 19 nt, Artificial Sequence
  Description of Artificial Sequence: Synthetic oligonucleotide
  Antisense strand to SEQ ID NO: 2223366
aguuacaguucguucccag

SEQ ID NO: 2223368 - RNA, 19 nt, Artificial Sequence
  Description of Artificial Sequence: Synthetic oligonucleotide
  Sense strand starting at position 2491 of SEQ ID NO: 1883880
cgaguugagaagcacucau

SEQ ID NO: 2223369 - RNA, 19 nt, Artificial Sequence
  Description of Artificial Sequence: Synthetic oligonucleotide
  Antisense strand to SEQ ID NO: 2223368
augagugcuucucaacucg

SEQ ID NO: 2223370 - RNA, 19 nt, Artificial Sequence
  Description of Artificial Sequence: Synthetic oligonucleotide
  Sense strand starting at position 223 of SEQ ID NO: 1883880
gacaaaguuaugugugaag

SEQ ID NO: 2223371 - RNA, 19 nt, Artificial Sequence
  Description of Artificial Sequence: Synthetic oligonucleotide
  Antisense strand to SEQ ID NO: 2223370
cuucacacauaacuuuguc

SEQ ID NO: 2223372 - RNA, 19 nt, Artificial Sequence
  Description of Artificial Sequence: Synthetic oligonucleotide
  Sense strand starting at position 225 of SEQ ID NO: 1883880
caaaguuaugugugaagga

SEQ ID NO: 2223373 - RNA, 19 nt, Artificial Sequence
  Description of Artificial Sequence: Synthetic oligonucleotide
  Antisense strand to SEQ ID NO: 2223372
uccuucacacauaacuuug

SEQ ID NO: 2223374 - RNA, 19 nt, Artificial Sequence
  Description of Artificial Sequence: Synthetic oligonucleotide
  Sense strand starting at position 114 of SEQ ID NO: 1883880
auguaaggugcugaguaaa

SEQ ID NO: 2223375 - RNA, 19 nt, Artificial Sequence
  Description of Artificial Sequence: Synthetic oligonucleotide
  Antisense strand to SEQ ID NO: 2223374
uuuacucagcaccuuacau

SEQ ID NO: 2223376 - RNA, 19 nt, Artificial Sequence
  Description of Artificial Sequence: Synthetic oligonucleotide
  Sense strand starting at position 3492 of SEQ ID NO: 1883880
guugauuauuagucaagau

SEQ ID NO: 2223377 - RNA, 19 nt, Artificial Sequence
  Description of Artificial Sequence: Synthetic oligonucleotide
  Antisense strand to SEQ ID NO: 2223376
aucuugacuaauaaucaac

SEQ ID NO: 2223378 - RNA, 19 nt, Artificial Sequence
  Description of Artificial Sequence: Synthetic oligonucleotide
  Sense strand starting at position 3491 of SEQ ID NO: 1883880
uguugauuauuagucaaga

SEQ ID NO: 2223379 - RNA, 19 nt, Artificial Sequence
  Description of Artificial Sequence: Synthetic oligonucleotide
  Antisense strand to SEQ ID NO: 2223378
ucuugacuaauaaucaaca

SEQ ID NO: 2223380 - RNA, 19 nt, Artificial Sequence
  Description of Artificial Sequence: Synthetic oligonucleotide
  Sense strand starting at position 2503 of SEQ ID NO: 1883880
cacucauugagugguggga

SEQ ID NO: 2223381 - RNA, 19 nt, Artificial Sequence
  Description of Artificial Sequence: Synthetic oligonucleotide
  Antisense strand to SEQ ID NO: 2223380
ucccaccacucaaugagug

SEQ ID NO: 2223382 - RNA, 19 nt, Artificial Sequence
  Description of Artificial Sequence: Synthetic oligonucleotide
  Sense strand starting at position 222 of SEQ ID NO: 1883880
ugacaaaguuaugugugaa

SEQ ID NO: 2223383 - RNA, 19 nt, Artificial Sequence
  Description of Artificial Sequence: Synthetic oligonucleotide
  Antisense strand to SEQ ID NO: 2223382
uucacacauaacuuuguca

SEQ ID NO: 2223384 - RNA, 19 nt, Artificial Sequence
  Description of Artificial Sequence: Synthetic oligonucleotide
  Sense strand starting at position 170 of SEQ ID NO: 1883880
aaguauuaacugggucauc

SEQ ID NO: 2223385 - RNA, 19 nt, Artificial Sequence
  Description of Artificial Sequence: Synthetic oligonucleotide
  Antisense strand to SEQ ID NO: 2223384
gaugacccaguuaauacuu

SEQ ID NO: 2223386 - RNA, 19 nt, Artificial Sequence
  Description of Artificial Sequence: Synthetic oligonucleotide
  Sense strand starting at position 38 of SEQ ID NO: 1883880
uuccgaauaacuggucaga

SEQ ID NO: 2223387 - RNA, 19 nt, Artificial Sequence
  Description of Artificial Sequence: Synthetic oligonucleotide
  Antisense strand to SEQ ID NO: 2223386
ucugaccaguuauucggaa

SEQ ID NO: 2223388 - RNA, 19 nt, Artificial Sequence
  Description of Artificial Sequence: Synthetic oligonucleotide
  Sense strand starting at position 185 of SEQ ID NO: 1883880
cauccauggcacgaguuaa

SEQ ID NO: 2223389 - RNA, 19 nt, Artificial Sequence
  Description of Artificial Sequence: Synthetic oligonucleotide
  Antisense strand to SEQ ID NO: 2223388
uuaacucgugccauggaug

SEQ ID NO: 2223390 - RNA, 19 nt, Artificial Sequence
  Description of Artificial Sequence: Synthetic oligonucleotide
  Sense strand starting at position 1180 of SEQ ID NO: 1883880
uuauuaugcccugagaguu

SEQ ID NO: 2223391 - RNA, 19 nt, Artificial Sequence
  Description of Artificial Sequence: Synthetic oligonucleotide
  Antisense strand to SEQ ID NO: 2223390
aacucucagggcauaauaa

SEQ ID NO: 2223392 - RNA, 19 nt, Artificial Sequence
  Description of Artificial Sequence: Synthetic oligonucleotide
  Sense strand starting at position 3284 of SEQ ID NO: 1883880
guaagaauacagugguuac

SEQ ID NO: 2223393 - RNA, 19 nt, Artificial Sequence
  Description of Artificial Sequence: Synthetic oligonucleotide
  Antisense strand to SEQ ID NO: 2223392
guaaccacuguauucuuac

SEQ ID NO: 2223394 - RNA, 19 nt, Artificial Sequence
  Description of Artificial Sequence: Synthetic oligonucleotide
  Sense strand starting at position 3026 of SEQ ID NO: 1883880
uaauuugacuuagauagug

SEQ ID NO: 2223395 - RNA, 19 nt, Artificial Sequence
  Description of Artificial Sequence: Synthetic oligonucleotide
  Antisense strand to SEQ ID NO: 2223394
cacuaucuaagucaaauua

SEQ ID NO: 2223396 - RNA, 19 nt, Artificial Sequence
  Description of Artificial Sequence: Synthetic oligonucleotide
  Sense strand starting at position 2378 of SEQ ID NO: 1883880
ggucauguucaaggaaagu

SEQ ID NO: 2223397 - RNA, 19 nt, Artificial Sequence
  Description of Artificial Sequence: Synthetic oligonucleotide
  Antisense strand to SEQ ID NO: 2223396
acuuuccuugaacaugacc

SEQ ID NO: 2223398 - RNA, 19 nt, Artificial Sequence
  Description of Artificial Sequence: Synthetic oligonucleotide
  Sense strand starting at position 2124 of SEQ ID NO: 1883880
uacauuucccagcgugcaa

SEQ ID NO: 2223399 - RNA, 19 nt, Artificial Sequence
  Description of Artificial Sequence: Synthetic oligonucleotide
  Antisense strand to SEQ ID NO: 2223398
uugcacgcugggaaaugua

SEQ ID NO: 2223400 - RNA, 19 nt, Artificial Sequence
  Description of Artificial Sequence: Synthetic oligonucleotide
  Sense strand starting at position 3488 of SEQ ID NO: 1883880
ugauguugauuauuaguca

SEQ ID NO: 2223401 - RNA, 19 nt, Artificial Sequence
  Description of Artificial Sequence: Synthetic oligonucleotide
  Antisense strand to SEQ ID NO: 2223400
ugacuaauaaucaacauca

SEQ ID NO: 2223402 - RNA, 19 nt, Artificial Sequence
  Description of Artificial Sequence: Synthetic oligonucleotide
  Sense strand starting at position 2805 of SEQ ID NO: 1883880
acucuaagcgccuaggaua

SEQ ID NO: 2223403 - RNA, 19 nt, Artificial Sequence
  Description of Artificial Sequence: Synthetic oligonucleotide
  Antisense strand to SEQ ID NO: 2223402
uauccuaggcgcuuagagu

SEQ ID NO: 2223404 - RNA, 19 nt, Artificial Sequence
  Description of Artificial Sequence: Synthetic oligonucleotide
  Sense strand starting at position 972 of SEQ ID NO: 1883880
cugaaauaguaugauuucu

SEQ ID NO: 2223405 - RNA, 19 nt, Artificial Sequence
  Description of Artificial Sequence: Synthetic oligonucleotide
  Antisense strand to SEQ ID NO: 2223404
agaaaucauacuauuucag

SEQ ID NO: 2223406 - RNA, 19 nt, Artificial Sequence
  Description of Artificial Sequence: Synthetic oligonucleotide
  Sense strand starting at position 627 of SEQ ID NO: 1883880
gaaugagauuaugaagaca

SEQ ID NO: 2223407 - RNA, 19 nt, Artificial Sequence
  Description of Artificial Sequence: Synthetic oligonucleotide
  Antisense strand to SEQ ID NO: 2223406
ugucuucauaaucucauuc

SEQ ID NO: 2223408 - RNA, 19 nt, Artificial Sequence
  Description of Artificial Sequence: Synthetic oligonucleotide
  Sense strand starting at position 521 of SEQ ID NO: 1883881
gggacuuaggccugagaaa

SEQ ID NO: 2223409 - RNA, 19 nt, Artificial Sequence
  Description of Artificial Sequence: Synthetic oligonucleotide
  Antisense strand to SEQ ID NO: 2223408
uuucucaggccuaaguccc

SEQ ID NO: 2223410 - RNA, 19 nt, Artificial Sequence
  Description of Artificial Sequence: Synthetic oligonucleotide
  Sense strand starting at position 3924 of SEQ ID NO: 1883881
gauaguggauucucacaag

SEQ ID NO: 2223411 - RNA, 19 nt, Artificial Sequence
  Description of Artificial Sequence: Synthetic oligonucleotide
  Antisense strand to SEQ ID NO: 2223410
cuugugagaauccacuauc

SEQ ID NO: 2223412 - RNA, 19 nt, Artificial Sequence
  Description of Artificial Sequence: Synthetic oligonucleotide
  Sense strand starting at position 2675 of SEQ ID NO: 1883881
uaugaauaagguugugaaa

SEQ ID NO: 2223413 - RNA, 19 nt, Artificial Sequence
  Description of Artificial Sequence: Synthetic oligonucleotide
  Antisense strand to SEQ ID NO: 2223412
uuucacaaccuuauucaua

SEQ ID NO: 2223414 - RNA, 19 nt, Artificial Sequence
  Description of Artificial Sequence: Synthetic oligonucleotide
  Sense strand starting at position 2087 of SEQ ID NO: 1883881
guccgaaggaaguacuaua

SEQ ID NO: 2223415 - RNA, 19 nt, Artificial Sequence
  Description of Artificial Sequence: Synthetic oligonucleotide
  Antisense strand to SEQ ID NO: 2223414
uauaguacuuccuucggac

SEQ ID NO: 2223416 - RNA, 19 nt, Artificial Sequence
  Description of Artificial Sequence: Synthetic oligonucleotide
  Sense strand starting at position 618 of SEQ ID NO: 1883881
agccaucagccacauagaa

SEQ ID NO: 2223417 - RNA, 19 nt, Artificial Sequence
  Description of Artificial Sequence: Synthetic oligonucleotide
  Antisense strand to SEQ ID NO: 2223416
uucuauguggcugauggcu

SEQ ID NO: 2223418 - RNA, 19 nt, Artificial Sequence
  Description of Artificial Sequence: Synthetic oligonucleotide
  Sense strand starting at position 1521 of SEQ ID NO: 1883881
gagaauaagugucucauaa

SEQ ID NO: 2223419 - RNA, 19 nt, Artificial Sequence
  Description of Artificial Sequence: Synthetic oligonucleotide
  Antisense strand to SEQ ID NO: 2223418
uuaugagacacuuauucuc

SEQ ID NO: 2223420 - RNA, 19 nt, Artificial Sequence
  Description of Artificial Sequence: Synthetic oligonucleotide
  Sense strand starting at position 314 of SEQ ID NO: 1883881
uggcaacaucacgaaaucu

SEQ ID NO: 2223421 - RNA, 19 nt, Artificial Sequence
  Description of Artificial Sequence: Synthetic oligonucleotide
  Antisense strand to SEQ ID NO: 2223420
agauuucgugauguugcca

SEQ ID NO: 2223422 - RNA, 19 nt, Artificial Sequence
  Description of Artificial Sequence: Synthetic oligonucleotide
  Sense strand starting at position 2271 of SEQ ID NO: 1883881
ugacuaucgacaggacauu

SEQ ID NO: 2223423 - RNA, 19 nt, Artificial Sequence
  Description of Artificial Sequence: Synthetic oligonucleotide
  Antisense strand to SEQ ID NO: 2223422
aauguccugucgauaguca

SEQ ID NO: 2223424 - RNA, 19 nt, Artificial Sequence
  Description of Artificial Sequence: Synthetic oligonucleotide
  Sense strand starting at position 2669 of SEQ ID NO: 1883881
uagcuuuaugaauaagguu

SEQ ID NO: 2223425 - RNA, 19 nt, Artificial Sequence
  Description of Artificial Sequence: Synthetic oligonucleotide
  Antisense strand to SEQ ID NO: 2223424
aaccuuauucauaaagcua

SEQ ID NO: 2223426 - RNA, 19 nt, Artificial Sequence
  Description of Artificial Sequence: Synthetic oligonucleotide
  Sense strand starting at position 2883 of SEQ ID NO: 1883881
ccaucugacuguuuaaaga

SEQ ID NO: 2223427 - RNA, 19 nt, Artificial Sequence
  Description of Artificial Sequence: Synthetic oligonucleotide
  Antisense strand to SEQ ID NO: 2223426
ucuuuaaacagucagaugg

SEQ ID NO: 2223428 - RNA, 19 nt, Artificial Sequence
  Description of Artificial Sequence: Synthetic oligonucleotide
  Sense strand starting at position 2196 of SEQ ID NO: 1883881
gcgaagcgugguucuugau

SEQ ID NO: 2223429 - RNA, 19 nt, Artificial Sequence
  Description of Artificial Sequence: Synthetic oligonucleotide
  Antisense strand to SEQ ID NO: 2223428
aucaagaaccacgcuucgc

SEQ ID NO: 2223430 - RNA, 19 nt, Artificial Sequence
  Description of Artificial Sequence: Synthetic oligonucleotide
  Sense strand starting at position 15 of SEQ ID NO: 1883881
ccucuacuacccggaaaga

SEQ ID NO: 2223431 - RNA, 19 nt, Artificial Sequence
  Description of Artificial Sequence: Synthetic oligonucleotide
  Antisense strand to SEQ ID NO: 2223430
ucuuuccggguaguagagg

SEQ ID NO: 2223432 - RNA, 19 nt, Artificial Sequence
  Description of Artificial Sequence: Synthetic oligonucleotide
  Sense strand starting at position 2469 of SEQ ID NO: 1883881
guuaaaucuguauaauacg

SEQ ID NO: 2223433 - RNA, 19 nt, Artificial Sequence
  Description of Artificial Sequence: Synthetic oligonucleotide
  Antisense strand to SEQ ID NO: 2223432
cguauuauacagauuuaac

SEQ ID NO: 2223434 - RNA, 19 nt, Artificial Sequence
  Description of Artificial Sequence: Synthetic oligonucleotide
  Sense strand starting at position 2720 of SEQ ID NO: 1883881
gaguaacaucugugaucag

SEQ ID NO: 2223435 - RNA, 19 nt, Artificial Sequence
  Description of Artificial Sequence: Synthetic oligonucleotide
  Antisense strand to SEQ ID NO: 2223434
cugaucacagauguuacuc

SEQ ID NO: 2223436 - RNA, 19 nt, Artificial Sequence
  Description of Artificial Sequence: Synthetic oligonucleotide
  Sense strand starting at position 2342 of SEQ ID NO: 1883881
aggacauuguucuuauauu

SEQ ID NO: 2223437 - RNA, 19 nt, Artificial Sequence
  Description of Artificial Sequence: Synthetic oligonucleotide
  Antisense strand to SEQ ID NO: 2223436
aauauaagaacaauguccu

SEQ ID NO: 2223438 - RNA, 19 nt, Artificial Sequence
  Description of Artificial Sequence: Synthetic oligonucleotide
  Sense strand starting at position 69 of SEQ ID NO: 1883881
ugaugaacacggugugaga

SEQ ID NO: 2223439 - RNA, 19 nt, Artificial Sequence
  Description of Artificial Sequence: Synthetic oligonucleotide
  Antisense strand to SEQ ID NO: 2223438
ucucacaccguguucauca

SEQ ID NO: 2223440 - RNA, 19 nt, Artificial Sequence
  Description of Artificial Sequence: Synthetic oligonucleotide
  Sense strand starting at position 1188 of SEQ ID NO: 1883881
cgacaaaucgcagaaugua

SEQ ID NO: 2223441 - RNA, 19 nt, Artificial Sequence
  Description of Artificial Sequence: Synthetic oligonucleotide
  Antisense strand to SEQ ID NO: 2223440
uacauucugcgauuugucg

SEQ ID NO: 2223442 - RNA, 19 nt, Artificial Sequence
  Description of Artificial Sequence: Synthetic oligonucleotide
  Sense strand starting at position 2480 of SEQ ID NO: 1883881
auaauacgugcuuaugaug

SEQ ID NO: 2223443 - RNA, 19 nt, Artificial Sequence
  Description of Artificial Sequence: Synthetic oligonucleotide
  Antisense strand to SEQ ID NO: 2223442
caucauaagcacguauuau

SEQ ID NO: 2223444 - RNA, 19 nt, Artificial Sequence
  Description of Artificial Sequence: Synthetic oligonucleotide
  Sense strand starting at position 2879 of SEQ ID NO: 1883881
auacccaucugacuguuua

SEQ ID NO: 2223445 - RNA, 19 nt, Artificial Sequence
  Description of Artificial Sequence: Synthetic oligonucleotide
  Antisense strand to SEQ ID NO: 2223444
uaaacagucagauggguau

SEQ ID NO: 2223446 - RNA, 19 nt, Artificial Sequence
  Description of Artificial Sequence: Synthetic oligonucleotide
  Sense strand starting at position 672 of SEQ ID NO: 1883881
ucgaauauuuaggaaguaa

SEQ ID NO: 2223447 - RNA, 19 nt, Artificial Sequence
  Description of Artificial Sequence: Synthetic oligonucleotide
  Antisense strand to SEQ ID NO: 2223446
uuacuuccuaaauauucga

SEQ ID NO: 2223448 - RNA, 19 nt, Artificial Sequence
  Description of Artificial Sequence: Synthetic oligonucleotide
  Sense strand starting at position 3755 of SEQ ID NO: 1883881
ccaccaaugcaaugaugua

SEQ ID NO: 2223449 - RNA, 19 nt, Artificial Sequence
  Description of Artificial Sequence: Synthetic oligonucleotide
  Antisense strand to SEQ ID NO: 2223448
uacaucauugcauuggugg

SEQ ID NO: 2223450 - RNA, 19 nt, Artificial Sequence
  Description of Artificial Sequence: Synthetic oligonucleotide
  Sense strand starting at position 2727 of SEQ ID NO: 1883881
aucugugaucagcaggguu

SEQ ID NO: 2223451 - RNA, 19 nt, Artificial Sequence
  Description of Artificial Sequence: Synthetic oligonucleotide
  Antisense strand to SEQ ID NO: 2223450
aacccugcugaucacagau

SEQ ID NO: 2223452 - RNA, 19 nt, Artificial Sequence
  Description of Artificial Sequence: Synthetic oligonucleotide
  Sense strand starting at position 3650 of SEQ ID NO: 1883881
auugcauuaguuuaguaca

SEQ ID NO: 2223453 - RNA, 19 nt, Artificial Sequence
  Description of Artificial Sequence: Synthetic oligonucleotide
  Antisense strand to SEQ ID NO: 2223452
uguacuaaacuaaugcaau

SEQ ID NO: 2223454 - RNA, 19 nt, Artificial Sequence
  Description of Artificial Sequence: Synthetic oligonucleotide
  Sense strand starting at position 2340 of SEQ ID NO: 1883881
guaggacauuguucuuaua

SEQ ID NO: 2223455 - RNA, 19 nt, Artificial Sequence
  Description of Artificial Sequence: Synthetic oligonucleotide
  Antisense strand to SEQ ID NO: 2223454
uauaagaacaauguccuac

SEQ ID NO: 2223456 - RNA, 19 nt, Artificial Sequence
  Description of Artificial Sequence: Synthetic oligonucleotide
  Sense strand starting at position 2324 of SEQ ID NO: 1883881
auaauagcuagacgaugua

SEQ ID NO: 2223457 - RNA, 19 nt, Artificial Sequence
  Description of Artificial Sequence: Synthetic oligonucleotide
  Antisense strand to SEQ ID NO: 2223456
uacaucgucuagcuauuau

SEQ ID NO: 2223458 - RNA, 19 nt, Artificial Sequence
  Description of Artificial Sequence: Synthetic oligonucleotide
  Sense strand starting at position 2393 of SEQ ID NO: 1883881
augcuuguaguuuaauuga

SEQ ID NO: 2223459 - RNA, 19 nt, Artificial Sequence
  Description of Artificial Sequence: Synthetic oligonucleotide
  Antisense strand to SEQ ID NO: 2223458
ucaauuaaacuacaagcau

SEQ ID NO: 2223460 - RNA, 19 nt, Artificial Sequence
  Description of Artificial Sequence: Synthetic oligonucleotide
  Sense strand starting at position 1216 of SEQ ID NO: 1883881
uggugagauucuguccaca

SEQ ID NO: 2223461 - RNA, 19 nt, Artificial Sequence
  Description of Artificial Sequence: Synthetic oligonucleotide
  Antisense strand to SEQ ID NO: 2223460
uguggacagaaucucacca

SEQ ID NO: 2223462 - RNA, 19 nt, Artificial Sequence
  Description of Artificial Sequence: Synthetic oligonucleotide
  Sense strand starting at position 423 of SEQ ID NO: 1883881
agaagaggucuccgucaua

SEQ ID NO: 2223463 - RNA, 19 nt, Artificial Sequence
  Description of Artificial Sequence: Synthetic oligonucleotide
  Antisense strand to SEQ ID NO: 2223462
uaugacggagaccucuucu

SEQ ID NO: 2223464 - RNA, 19 nt, Artificial Sequence
  Description of Artificial Sequence: Synthetic oligonucleotide
  Sense strand starting at position 2337 of SEQ ID NO: 1883881
gauguaggacauuguucuu

SEQ ID NO: 2223465 - RNA, 19 nt, Artificial Sequence
  Description of Artificial Sequence: Synthetic oligonucleotide
  Antisense strand to SEQ ID NO: 2223464
aagaacaauguccuacauc

SEQ ID NO: 2223466 - RNA, 19 nt, Artificial Sequence
  Description of Artificial Sequence: Synthetic oligonucleotide
  Sense strand starting at position 2719 of SEQ ID NO: 1883881
cgaguaacaucugugauca

SEQ ID NO: 2223467 - RNA, 19 nt, Artificial Sequence
  Description of Artificial Sequence: Synthetic oligonucleotide
  Antisense strand to SEQ ID NO: 2223466
ugaucacagauguuacucg

SEQ ID NO: 2223468 - RNA, 19 nt, Artificial Sequence
  Description of Artificial Sequence: Synthetic oligonucleotide
  Sense strand starting at position 2215 of SEQ ID NO: 1883881
gcgauccugguuggagaaa

SEQ ID NO: 2223469 - RNA, 19 nt, Artificial Sequence
  Description of Artificial Sequence: Synthetic oligonucleotide
  Antisense strand to SEQ ID NO: 2223468
uuucuccaaccaggaucgc

SEQ ID NO: 2223470 - RNA, 19 nt, Artificial Sequence
  Description of Artificial Sequence: Synthetic oligonucleotide
  Sense strand starting at position 1218 of SEQ ID NO: 1883881
gugagauucuguccacauu

SEQ ID NO: 2223471 - RNA, 19 nt, Artificial Sequence
  Description of Artificial Sequence: Synthetic oligonucleotide
  Antisense strand to SEQ ID NO: 2223470
aauguggacagaaucucac

SEQ ID NO: 2223472 - RNA, 19 nt, Artificial Sequence
  Description of Artificial Sequence: Synthetic oligonucleotide
  Sense strand starting at position 2718 of SEQ ID NO: 1883881
acgaguaacaucugugauc

SEQ ID NO: 2223473 - RNA, 19 nt, Artificial Sequence
  Description of Artificial Sequence: Synthetic oligonucleotide
  Antisense strand to SEQ ID NO: 2223472
gaucacagauguuacucgu

SEQ ID NO: 2223474 - RNA, 19 nt, Artificial Sequence
  Description of Artificial Sequence: Synthetic oligonucleotide
  Sense strand starting at position 1163 of SEQ ID NO: 1883881
ggagccucagccugaauca

SEQ ID NO: 2223475 - RNA, 19 nt, Artificial Sequence
  Description of Artificial Sequence: Synthetic oligonucleotide
  Antisense strand to SEQ ID NO: 2223474
ugauucaggcugaggcucc

SEQ ID NO: 2223476 - RNA, 19 nt, Artificial Sequence
  Description of Artificial Sequence: Synthetic oligonucleotide
  Sense strand starting at position 662 of SEQ ID NO: 1883881
gugcuacaagucgaauauu

SEQ ID NO: 2223477 - RNA, 19 nt, Artificial Sequence
  Description of Artificial Sequence: Synthetic oligonucleotide
  Antisense strand to SEQ ID NO: 2223476
aauauucgacuuguagcac

SEQ ID NO: 2223478 - RNA, 19 nt, Artificial Sequence
  Description of Artificial Sequence: Synthetic oligonucleotide
  Sense strand starting at position 2617 of SEQ ID NO: 1883881
gaaguaugccguuaaauuc

SEQ ID NO: 2223479 - RNA, 19 nt, Artificial Sequence
  Description of Artificial Sequence: Synthetic oligonucleotide
  Antisense strand to SEQ ID NO: 2223478
gaauuuaacggcauacuuc

SEQ ID NO: 2223480 - RNA, 19 nt, Artificial Sequence
  Description of Artificial Sequence: Synthetic oligonucleotide
  Sense strand starting at position 2158 of SEQ ID NO: 1883881
ucccaaauucccggagguu

SEQ ID NO: 2223481 - RNA, 19 nt, Artificial Sequence
  Description of Artificial Sequence: Synthetic oligonucleotide
  Antisense strand to SEQ ID NO: 2223480
aaccuccgggaauuuggga

SEQ ID NO: 2223482 - RNA, 19 nt, Artificial Sequence
  Description of Artificial Sequence: Synthetic oligonucleotide
  Sense strand starting at position 1529 of SEQ ID NO: 1883881
gugucucauaauugugaga

SEQ ID NO: 2223483 - RNA, 19 nt, Artificial Sequence
  Description of Artificial Sequence: Synthetic oligonucleotide
  Antisense strand to SEQ ID NO: 2223482
ucucacaauuaugagacac

SEQ ID NO: 2223484 - RNA, 19 nt, Artificial Sequence
  Description of Artificial Sequence: Synthetic oligonucleotide
  Sense strand starting at position 2039 of SEQ ID NO: 1883881
gcgguaggcgcguuaacau

SEQ ID NO: 2223485 - RNA, 19 nt, Artificial Sequence
  Description of Artificial Sequence: Synthetic oligonucleotide
  Antisense strand to SEQ ID NO: 2223484
auguuaacgcgccuaccgc

SEQ ID NO: 2223486 - RNA, 19 nt, Artificial Sequence
  Description of Artificial Sequence: Synthetic oligonucleotide
  Sense strand starting at position 2213 of SEQ ID NO: 1883881
augcgauccugguuggaga

SEQ ID NO: 2223487 - RNA, 19 nt, Artificial Sequence
  Description of Artificial Sequence: Synthetic oligonucleotide
  Antisense strand to SEQ ID NO: 2223486
ucuccaaccaggaucgcau

SEQ ID NO: 2223488 - RNA, 19 nt, Artificial Sequence
  Description of Artificial Sequence: Synthetic oligonucleotide
  Sense strand starting at position 67 of SEQ ID NO: 1883882
guguguauuagagauaagg

SEQ ID NO: 2223489 - RNA, 19 nt, Artificial Sequence
  Description of Artificial Sequence: Synthetic oligonucleotide
  Antisense strand to SEQ ID NO: 2223488
ccuuaucucuaauacacac

SEQ ID NO: 2223490 - RNA, 19 nt, Artificial Sequence
  Description of Artificial Sequence: Synthetic oligonucleotide
  Sense strand starting at position 69 of SEQ ID NO: 1883882
guguauuagagauaagguc

SEQ ID NO: 2223491 - RNA, 19 nt, Artificial Sequence
  Description of Artificial Sequence: Synthetic oligonucleotide
  Antisense strand to SEQ ID NO: 2223490
gaccuuaucucuaauacac

SEQ ID NO: 2223492 - RNA, 19 nt, Artificial Sequence
  Description of Artificial Sequence: Synthetic oligonucleotide
  Sense strand starting at position 525 of SEQ ID NO: 1883882
ugaucuaucugucuuugaa

SEQ ID NO: 2223493 - RNA, 19 nt, Artificial Sequence
  Description of Artificial Sequence: Synthetic oligonucleotide
  Antisense strand to SEQ ID NO: 2223492
uucaaagacagauagauca

SEQ ID NO: 2223494 - RNA, 19 nt, Artificial Sequence
  Description of Artificial Sequence: Synthetic oligonucleotide
  Sense strand starting at position 611 of SEQ ID NO: 1883882
agcaucaaucaucagguaa

SEQ ID NO: 2223495 - RNA, 19 nt, Artificial Sequence
  Description of Artificial Sequence: Synthetic oligonucleotide
  Antisense strand to SEQ ID NO: 2223494
uuaccugaugauugaugcu

SEQ ID NO: 2223496 - RNA, 19 nt, Artificial Sequence
  Description of Artificial Sequence: Synthetic oligonucleotide
  Sense strand starting at position 690 of SEQ ID NO: 1883882
cgcacuuuauaauugagga

SEQ ID NO: 2223497 - RNA, 19 nt, Artificial Sequence
  Description of Artificial Sequence: Synthetic oligonucleotide
  Antisense strand to SEQ ID NO: 2223496
uccucaauuauaaagugcg

SEQ ID NO: 2223498 - RNA, 19 nt, Artificial Sequence
  Description of Artificial Sequence: Synthetic oligonucleotide
  Sense strand starting at position 691 of SEQ ID NO: 1883882
gcacuuuauaauugaggag

SEQ ID NO: 2223499 - RNA, 19 nt, Artificial Sequence
  Description of Artificial Sequence: Synthetic oligonucleotide
  Antisense strand to SEQ ID NO: 2223498
cuccucaauuauaaagugc

SEQ ID NO: 2223500 - RNA, 19 nt, Artificial Sequence
  Description of Artificial Sequence: Synthetic oligonucleotide
  Sense strand starting at position 706 of SEQ ID NO: 1883882
ggagacagagauugcucua

SEQ ID NO: 2223501 - RNA, 19 nt, Artificial Sequence
  Description of Artificial Sequence: Synthetic oligonucleotide
  Antisense strand to SEQ ID NO: 2223500
uagagcaaucucugucucc

SEQ ID NO: 2223502 - RNA, 19 nt, Artificial Sequence
  Description of Artificial Sequence: Synthetic oligonucleotide
  Sense strand starting at position 709 of SEQ ID NO: 1883882
gacagagauugcucuagaa

SEQ ID NO: 2223503 - RNA, 19 nt, Artificial Sequence
  Description of Artificial Sequence: Synthetic oligonucleotide
  Antisense strand to SEQ ID NO: 2223502
uucuagagcaaucucuguc

SEQ ID NO: 2223504 - RNA, 19 nt, Artificial Sequence
  Description of Artificial Sequence: Synthetic oligonucleotide
  Sense strand starting at position 713 of SEQ ID NO: 1883882
gagauugcucuagaaaugc

SEQ ID NO: 2223505 - RNA, 19 nt, Artificial Sequence
  Description of Artificial Sequence: Synthetic oligonucleotide
  Antisense strand to SEQ ID NO: 2223504
gcauuucuagagcaaucuc

SEQ ID NO: 2223506 - RNA, 19 nt, Artificial Sequence
  Description of Artificial Sequence: Synthetic oligonucleotide
  Sense strand starting at position 1075 of SEQ ID NO: 1883882
uaauaagagcugggaugua

SEQ ID NO: 2223507 - RNA, 19 nt, Artificial Sequence
  Description of Artificial Sequence: Synthetic oligonucleotide
  Antisense strand to SEQ ID NO: 2223506
uacaucccagcucuuauua

SEQ ID NO: 2223508 - RNA, 19 nt, Artificial Sequence
  Description of Artificial Sequence: Synthetic oligonucleotide
  Sense strand starting at position 1156 of SEQ ID NO: 1883882
gcaacagcccugugaauuu

SEQ ID NO: 2223509 - RNA, 19 nt, Artificial Sequence
  Description of Artificial Sequence: Synthetic oligonucleotide
  Antisense strand to SEQ ID NO: 2223508
aaauucacagggcuguugc

SEQ ID NO: 2223510 - RNA, 19 nt, Artificial Sequence
  Description of Artificial Sequence: Synthetic oligonucleotide
  Sense strand starting at position 1584 of SEQ ID NO: 1883882
ggugauucuuauguacauc

SEQ ID NO: 2223511 - RNA, 19 nt, Artificial Sequence
  Description of Artificial Sequence: Synthetic oligonucleotide
  Antisense strand to SEQ ID NO: 2223510
gauguacauaagaaucacc

SEQ ID NO: 2223512 - RNA, 19 nt, Artificial Sequence
  Description of Artificial Sequence: Synthetic oligonucleotide
  Sense strand starting at position 1701 of SEQ ID NO: 1883882
uaaggauuagugugcagau

SEQ ID NO: 2223513 - RNA, 19 nt, Artificial Sequence
  Description of Artificial Sequence: Synthetic oligonucleotide
  Antisense strand to SEQ ID NO: 2223512
aucugcacacuaauccuua

SEQ ID NO: 2223514 - RNA, 19 nt, Artificial Sequence
  Description of Artificial Sequence: Synthetic oligonucleotide
  Sense strand starting at position 1702 of SEQ ID NO: 1883882
aaggauuagugugcagaua

SEQ ID NO: 2223515 - RNA, 19 nt, Artificial Sequence
  Description of Artificial Sequence: Synthetic oligonucleotide
  Antisense strand to SEQ ID NO: 2223514
uaucugcacacuaauccuu

SEQ ID NO: 2223516 - RNA, 19 nt, Artificial Sequence
  Description of Artificial Sequence: Synthetic oligonucleotide
  Sense strand starting at position 1703 of SEQ ID NO: 1883882
aggauuagugugcagauac

SEQ ID NO: 2223517 - RNA, 19 nt, Artificial Sequence
  Description of Artificial Sequence: Synthetic oligonucleotide
  Antisense strand to SEQ ID NO: 2223516
guaucugcacacuaauccu

SEQ ID NO: 2223518 - RNA, 19 nt, Artificial Sequence
  Description of Artificial Sequence: Synthetic oligonucleotide
  Sense strand starting at position 2011 of SEQ ID NO: 1883882
agucaucuaucaguaauuc

SEQ ID NO: 2223519 - RNA, 19 nt, Artificial Sequence
  Description of Artificial Sequence: Synthetic oligonucleotide
  Antisense strand to SEQ ID NO: 2223518
gaauuacugauagaugacu

SEQ ID NO: 2223520 - RNA, 19 nt, Artificial Sequence
  Description of Artificial Sequence: Synthetic oligonucleotide
  Sense strand starting at position 2044 of SEQ ID NO: 1883882
ugagaugcccagugacuua

SEQ ID NO: 2223521 - RNA, 19 nt, Artificial Sequence
  Description of Artificial Sequence: Synthetic oligonucleotide
  Antisense strand to SEQ ID NO: 2223520
uaagucacugggcaucuca

SEQ ID NO: 2223522 - RNA, 19 nt, Artificial Sequence
  Description of Artificial Sequence: Synthetic oligonucleotide
  Sense strand starting at position 2047 of SEQ ID NO: 1883882
gaugcccagugacuuaaua

SEQ ID NO: 2223523 - RNA, 19 nt, Artificial Sequence
  Description of Artificial Sequence: Synthetic oligonucleotide
  Antisense strand to SEQ ID NO: 2223522
uauuaagucacugggcauc

SEQ ID NO: 2223524 - RNA, 19 nt, Artificial Sequence
  Description of Artificial Sequence: Synthetic oligonucleotide
  Sense strand starting at position 2274 of SEQ ID NO: 1883882
cagcauggguuucuaauga

SEQ ID NO: 2223525 - RNA, 19 nt, Artificial Sequence
  Description of Artificial Sequence: Synthetic oligonucleotide
  Antisense strand to SEQ ID NO: 2223524
ucauuagaaacccaugcug

SEQ ID NO: 2223526 - RNA, 19 nt, Artificial Sequence
  Description of Artificial Sequence: Synthetic oligonucleotide
  Sense strand starting at position 2313 of SEQ ID NO: 1883882
ccauuacugugagcagaug

SEQ ID NO: 2223527 - RNA, 19 nt, Artificial Sequence
  Description of Artificial Sequence: Synthetic oligonucleotide
  Antisense strand to SEQ ID NO: 2223526
caucugcucacaguaaugg

SEQ ID NO: 2223528 - RNA, 19 nt, Artificial Sequence
  Description of Artificial Sequence: Synthetic oligonucleotide
  Sense strand starting at position 2666 of SEQ ID NO: 1883882
ugugguaucauuuguguag

SEQ ID NO: 2223529 - RNA, 19 nt, Artificial Sequence
  Description of Artificial Sequence: Synthetic oligonucleotide
  Antisense strand to SEQ ID NO: 2223528
cuacacaaaugauaccaca

SEQ ID NO: 2223530 - RNA, 19 nt, Artificial Sequence
  Description of Artificial Sequence: Synthetic oligonucleotide
  Sense strand starting at position 2669 of SEQ ID NO: 1883882
gguaucauuuguguagcua

SEQ ID NO: 2223531 - RNA, 19 nt, Artificial Sequence
  Description of Artificial Sequence: Synthetic oligonucleotide
  Antisense strand to SEQ ID NO: 2223530
uagcuacacaaaugauacc

SEQ ID NO: 2223532 - RNA, 19 nt, Artificial Sequence
  Description of Artificial Sequence: Synthetic oligonucleotide
  Sense strand starting at position 2670 of SEQ ID NO: 1883882
guaucauuuguguagcuag

SEQ ID NO: 2223533 - RNA, 19 nt, Artificial Sequence
  Description of Artificial Sequence: Synthetic oligonucleotide
  Antisense strand to SEQ ID NO: 2223532
cuagcuacacaaaugauac

SEQ ID NO: 2223534 - RNA, 19 nt, Artificial Sequence
  Description of Artificial Sequence: Synthetic oligonucleotide
  Sense strand starting at position 2886 of SEQ ID NO: 1883882
gagauaggguucuuccuuu

SEQ ID NO: 2223535 - RNA, 19 nt, Artificial Sequence
  Description of Artificial Sequence: Synthetic oligonucleotide
  Antisense strand to SEQ ID NO: 2223534
aaaggaagaacccuaucuc

SEQ ID NO: 2223536 - RNA, 19 nt, Artificial Sequence
  Description of Artificial Sequence: Synthetic oligonucleotide
  Sense strand starting at position 2913 of SEQ ID NO: 1883882
ugaaguaauguuuauuccu

SEQ ID NO: 2223537 - RNA, 19 nt, Artificial Sequence
  Description of Artificial Sequence: Synthetic oligonucleotide
  Antisense strand to SEQ ID NO: 2223536
aggaauaaacauuacuuca

SEQ ID NO: 2223538 - RNA, 19 nt, Artificial Sequence
  Description of Artificial Sequence: Synthetic oligonucleotide
  Sense strand starting at position 2920 of SEQ ID NO: 1883882
auguuuauuccugggagag

SEQ ID NO: 2223539 - RNA, 19 nt, Artificial Sequence
  Description of Artificial Sequence: Synthetic oligonucleotide
  Antisense strand to SEQ ID NO: 2223538
cucucccaggaauaaacau

SEQ ID NO: 2223540 - RNA, 19 nt, Artificial Sequence
  Description of Artificial Sequence: Synthetic oligonucleotide
  Sense strand starting at position 2941 of SEQ ID NO: 1883882
gagucaacuuaaguaaugu

SEQ ID NO: 2223541 - RNA, 19 nt, Artificial Sequence
  Description of Artificial Sequence: Synthetic oligonucleotide
  Antisense strand to SEQ ID NO: 2223540
acauuacuuaaguugacuc

SEQ ID NO: 2223542 - RNA, 19 nt, Artificial Sequence
  Description of Artificial Sequence: Synthetic oligonucleotide
  Sense strand starting at position 2949 of SEQ ID NO: 1883882
uuaaguaaugucugaagag

SEQ ID NO: 2223543 - RNA, 19 nt, Artificial Sequence
  Description of Artificial Sequence: Synthetic oligonucleotide
  Antisense strand to SEQ ID NO: 2223542
cucuucagacauuacuuaa

SEQ ID NO: 2223544 - RNA, 19 nt, Artificial Sequence
  Description of Artificial Sequence: Synthetic oligonucleotide
  Sense strand starting at position 2961 of SEQ ID NO: 1883882
ugaagagcacuaugagcua

SEQ ID NO: 2223545 - RNA, 19 nt, Artificial Sequence
  Description of Artificial Sequence: Synthetic oligonucleotide
  Antisense strand to SEQ ID NO: 2223544
uagcucauagugcucuuca

SEQ ID NO: 2223546 - RNA, 19 nt, Artificial Sequence
  Description of Artificial Sequence: Synthetic oligonucleotide
  Sense strand starting at position 3016 of SEQ ID NO: 1883882
agguucugccuggauggaa

SEQ ID NO: 2223547 - RNA, 19 nt, Artificial Sequence
  Description of Artificial Sequence: Synthetic oligonucleotide
  Antisense strand to SEQ ID NO: 2223546
uuccauccaggcagaaccu

SEQ ID NO: 2223548 - RNA, 19 nt, Artificial Sequence
  Description of Artificial Sequence: Synthetic oligonucleotide
  Sense strand starting at position 3166 of SEQ ID NO: 1883882
ggcugccucccugagaaga

SEQ ID NO: 2223549 - RNA, 19 nt, Artificial Sequence
  Description of Artificial Sequence: Synthetic oligonucleotide
  Antisense strand to SEQ ID NO: 2223548
ucuucucagggaggcagcc

SEQ ID NO: 2223550 - RNA, 19 nt, Artificial Sequence
  Description of Artificial Sequence: Synthetic oligonucleotide
  Sense strand starting at position 3179 of SEQ ID NO: 1883882
agaagauagugcuuaagca

SEQ ID NO: 2223551 - RNA, 19 nt, Artificial Sequence
  Description of Artificial Sequence: Synthetic oligonucleotide
  Antisense strand to SEQ ID NO: 2223550
ugcuuaagcacuaucuucu

SEQ ID NO: 2223552 - RNA, 19 nt, Artificial Sequence
  Description of Artificial Sequence: Synthetic oligonucleotide
  Sense strand starting at position 3180 of SEQ ID NO: 1883882
gaagauagugcuuaagcag

SEQ ID NO: 2223553 - RNA, 19 nt, Artificial Sequence
  Description of Artificial Sequence: Synthetic oligonucleotide
  Antisense strand to SEQ ID NO: 2223552
cugcuuaagcacuaucuuc

SEQ ID NO: 2223554 - RNA, 19 nt, Artificial Sequence
  Description of Artificial Sequence: Synthetic oligonucleotide
  Sense strand starting at position 3466 of SEQ ID NO: 1883882
agcaauguugcaugagaag

SEQ ID NO: 2223555 - RNA, 19 nt, Artificial Sequence
  Description of Artificial Sequence: Synthetic oligonucleotide
  Antisense strand to SEQ ID NO: 2223554
cuucucaugcaacauugcu

SEQ ID NO: 2223556 - RNA, 19 nt, Artificial Sequence
  Description of Artificial Sequence: Synthetic oligonucleotide
  Sense strand starting at position 3657 of SEQ ID NO: 1883882
cccagaauguccuccuuag

SEQ ID NO: 2223557 - RNA, 19 nt, Artificial Sequence
  Description of Artificial Sequence: Synthetic oligonucleotide
  Antisense strand to SEQ ID NO: 2223556
cuaaggaggacauucuggg

SEQ ID NO: 2223558 - RNA, 19 nt, Artificial Sequence
  Description of Artificial Sequence: Synthetic oligonucleotide
  Sense strand starting at position 3661 of SEQ ID NO: 1883882
gaauguccuccuuagagca

SEQ ID NO: 2223559 - RNA, 19 nt, Artificial Sequence
  Description of Artificial Sequence: Synthetic oligonucleotide
  Antisense strand to SEQ ID NO: 2223558
ugcucuaaggaggacauuc

SEQ ID NO: 2223560 - RNA, 19 nt, Artificial Sequence
  Description of Artificial Sequence: Synthetic oligonucleotide
  Sense strand starting at position 3718 of SEQ ID NO: 1883882
uuacuauuugucuggguuu

SEQ ID NO: 2223561 - RNA, 19 nt, Artificial Sequence
  Description of Artificial Sequence: Synthetic oligonucleotide
  Antisense strand to SEQ ID NO: 2223560
aaacccagacaaauaguaa

SEQ ID NO: 2223562 - RNA, 19 nt, Artificial Sequence
  Description of Artificial Sequence: Synthetic oligonucleotide
  Sense strand starting at position 3724 of SEQ ID NO: 1883882
uuugucuggguuugaaaca

SEQ ID NO: 2223563 - RNA, 19 nt, Artificial Sequence
  Description of Artificial Sequence: Synthetic oligonucleotide
  Antisense strand to SEQ ID NO: 2223562
uguuucaaacccagacaaa

SEQ ID NO: 2223564 - RNA, 19 nt, Artificial Sequence
  Description of Artificial Sequence: Synthetic oligonucleotide
  Sense strand starting at position 3842 of SEQ ID NO: 1883882
uuuccuuauccuuggagaa

SEQ ID NO: 2223565 - RNA, 19 nt, Artificial Sequence
  Description of Artificial Sequence: Synthetic oligonucleotide
  Antisense strand to SEQ ID NO: 2223564
uucuccaaggauaaggaaa

SEQ ID NO: 2223566 - RNA, 19 nt, Artificial Sequence
  Description of Artificial Sequence: Synthetic oligonucleotide
  Sense strand starting at position 3843 of SEQ ID NO: 1883882
uuccuuauccuuggagaaa

SEQ ID NO: 2223567 - RNA, 19 nt, Artificial Sequence
  Description of Artificial Sequence: Synthetic oligonucleotide
  Antisense strand to SEQ ID NO: 2223566
uuucuccaaggauaaggaa

SEQ ID NO: 2223568 - RNA, 19 nt, Artificial Sequence
  Description of Artificial Sequence: Synthetic oligonucleotide
  Sense strand starting at position 2 of SEQ ID NO: 1883883
ggugauauuucucauugau

SEQ ID NO: 2223569 - RNA, 19 nt, Artificial Sequence
  Description of Artificial Sequence: Synthetic oligonucleotide
  Antisense strand to SEQ ID NO: 2223568
aucaaugagaaauaucacc

SEQ ID NO: 2223570 - RNA, 19 nt, Artificial Sequence
  Description of Artificial Sequence: Synthetic oligonucleotide
  Sense strand starting at position 197 of SEQ ID NO: 1883883
uuaauuucggccugguuua

SEQ ID NO: 2223571 - RNA, 19 nt, Artificial Sequence
  Description of Artificial Sequence: Synthetic oligonucleotide
  Antisense strand to SEQ ID NO: 2223570
uaaaccaggccgaaauuaa

SEQ ID NO: 2223572 - RNA, 19 nt, Artificial Sequence
  Description of Artificial Sequence: Synthetic oligonucleotide
  Sense strand starting at position 2020 of SEQ ID NO: 1883883
ggcugagacccagagcaau

SEQ ID NO: 2223573 - RNA, 19 nt, Artificial Sequence
  Description of Artificial Sequence: Synthetic oligonucleotide
  Antisense strand to SEQ ID NO: 2223572
auugcucugggucucagcc

SEQ ID NO: 2223574 - RNA, 19 nt, Artificial Sequence
  Description of Artificial Sequence: Synthetic oligonucleotide
  Sense strand starting at position 2165 of SEQ ID NO: 1883883
gcccgccaugcuuggaaua

SEQ ID NO: 2223575 - RNA, 19 nt, Artificial Sequence
  Description of Artificial Sequence: Synthetic oligonucleotide
  Antisense strand to SEQ ID NO: 2223574
uauuccaagcauggcgggc

SEQ ID NO: 2223576 - RNA, 19 nt, Artificial Sequence
  Description of Artificial Sequence: Synthetic oligonucleotide
  Sense strand starting at position 3080 of SEQ ID NO: 1883883
gaaaguaaagcuuaggcua

SEQ ID NO: 2223577 - RNA, 19 nt, Artificial Sequence
  Description of Artificial Sequence: Synthetic oligonucleotide
  Antisense strand to SEQ ID NO: 2223576
uagccuaagcuuuacuuuc

SEQ ID NO: 2223578 - RNA, 19 nt, Artificial Sequence
  Description of Artificial Sequence: Synthetic oligonucleotide
  Sense strand starting at position 3088 of SEQ ID NO: 1883883
agcuuaggcuagucacgau

SEQ ID NO: 2223579 - RNA, 19 nt, Artificial Sequence
  Description of Artificial Sequence: Synthetic oligonucleotide
  Antisense strand to SEQ ID NO: 2223578
aucgugacuagccuaagcu

SEQ ID NO: 2223580 - RNA, 19 nt, Artificial Sequence
  Description of Artificial Sequence: Synthetic oligonucleotide
  Sense strand starting at position 3366 of SEQ ID NO: 1883883
cauuguguugaucgggcua

SEQ ID NO: 2223581 - RNA, 19 nt, Artificial Sequence
  Description of Artificial Sequence: Synthetic oligonucleotide
  Antisense strand to SEQ ID NO: 2223580
uagcccgaucaacacaaug

SEQ ID NO: 2223582 - RNA, 19 nt, Artificial Sequence
  Description of Artificial Sequence: Synthetic oligonucleotide
  Sense strand starting at position 3368 of SEQ ID NO: 1883883
uuguguugaucgggcuagu

SEQ ID NO: 2223583 - RNA, 19 nt, Artificial Sequence
  Description of Artificial Sequence: Synthetic oligonucleotide
  Antisense strand to SEQ ID NO: 2223582
acuagcccgaucaacacaa

SEQ ID NO: 2223584 - RNA, 19 nt, Artificial Sequence
  Description of Artificial Sequence: Synthetic oligonucleotide
  Sense strand starting at position 3562 of SEQ ID NO: 1883883
gcaguauuguuguaguuau

SEQ ID NO: 2223585 - RNA, 19 nt, Artificial Sequence
  Description of Artificial Sequence: Synthetic oligonucleotide
  Antisense strand to SEQ ID NO: 2223584
auaacuacaacaauacugc

SEQ ID NO: 2223586 - RNA, 19 nt, Artificial Sequence
  Description of Artificial Sequence: Synthetic oligonucleotide
  Sense strand starting at position 3569 of SEQ ID NO: 1883883
uguuguaguuauugccuau

SEQ ID NO: 2223587 - RNA, 19 nt, Artificial Sequence
  Description of Artificial Sequence: Synthetic oligonucleotide
  Antisense strand to SEQ ID NO: 2223586
auaggcaauaacuacaaca

SEQ ID NO: 2223588 - RNA, 19 nt, Artificial Sequence
  Description of Artificial Sequence: Synthetic oligonucleotide
  Sense strand starting at position 3572 of SEQ ID NO: 1883883
uguaguuauugccuauaau

SEQ ID NO: 2223589 - RNA, 19 nt, Artificial Sequence
  Description of Artificial Sequence: Synthetic oligonucleotide
  Antisense strand to SEQ ID NO: 2223588
auuauaggcaauaacuaca

SEQ ID NO: 2223590 - RNA, 19 nt, Artificial Sequence
  Description of Artificial Sequence: Synthetic oligonucleotide
  Sense strand starting at position 3573 of SEQ ID NO: 1883883
guaguuauugccuauaaua

SEQ ID NO: 2223591 - RNA, 19 nt, Artificial Sequence
  Description of Artificial Sequence: Synthetic oligonucleotide
  Antisense strand to SEQ ID NO: 2223590
uauuauaggcaauaacuac

SEQ ID NO: 2223592 - RNA, 19 nt, Artificial Sequence
  Description of Artificial Sequence: Synthetic oligonucleotide
  Sense strand starting at position 3718 of SEQ ID NO: 1883883
gcuguuuauuccuuauagg

SEQ ID NO: 2223593 - RNA, 19 nt, Artificial Sequence
  Description of Artificial Sequence: Synthetic oligonucleotide
  Antisense strand to SEQ ID NO: 2223592
ccuauaaggaauaaacagc

SEQ ID NO: 2223594 - RNA, 19 nt, Artificial Sequence
  Description of Artificial Sequence: Synthetic oligonucleotide
  Sense strand starting at position 3719 of SEQ ID NO: 1883883
cuguuuauuccuuauaggu

SEQ ID NO: 2223595 - RNA, 19 nt, Artificial Sequence
  Description of Artificial Sequence: Synthetic oligonucleotide
  Antisense strand to SEQ ID NO: 2223594
accuauaaggaauaaacag

SEQ ID NO: 2223596 - RNA, 19 nt, Artificial Sequence
  Description of Artificial Sequence: Synthetic oligonucleotide
  Sense strand starting at position 72 of SEQ ID NO: 1883884
agacaaguaacgugaaauu

SEQ ID NO: 2223597 - RNA, 19 nt, Artificial Sequence
  Description of Artificial Sequence: Synthetic oligonucleotide
  Antisense strand to SEQ ID NO: 2223596
aauuucacguuacuugucu

SEQ ID NO: 2223598 - RNA, 19 nt, Artificial Sequence
  Description of Artificial Sequence: Synthetic oligonucleotide
  Sense strand starting at position 213 of SEQ ID NO: 1883884
auaaguaacugcucauaga

SEQ ID NO: 2223599 - RNA, 19 nt, Artificial Sequence
  Description of Artificial Sequence: Synthetic oligonucleotide
  Antisense strand to SEQ ID NO: 2223598
ucuaugagcaguuacuuau

SEQ ID NO: 2223600 - RNA, 19 nt, Artificial Sequence
  Description of Artificial Sequence: Synthetic oligonucleotide
  Sense strand starting at position 241 of SEQ ID NO: 1883884
acugucagaucaguuacau

SEQ ID NO: 2223601 - RNA, 19 nt, Artificial Sequence
  Description of Artificial Sequence: Synthetic oligonucleotide
  Antisense strand to SEQ ID NO: 2223600
auguaacugaucugacagu

SEQ ID NO: 2223602 - RNA, 19 nt, Artificial Sequence
  Description of Artificial Sequence: Synthetic oligonucleotide
  Sense strand starting at position 328 of SEQ ID NO: 1883884
ggaacaguauuugauaugu

SEQ ID NO: 2223603 - RNA, 19 nt, Artificial Sequence
  Description of Artificial Sequence: Synthetic oligonucleotide
  Antisense strand to SEQ ID NO: 2223602
acauaucaaauacuguucc

SEQ ID NO: 2223604 - RNA, 19 nt, Artificial Sequence
  Description of Artificial Sequence: Synthetic oligonucleotide
  Sense strand starting at position 360 of SEQ ID NO: 1883884
uggguagaccagcaguuua

SEQ ID NO: 2223605 - RNA, 19 nt, Artificial Sequence
  Description of Artificial Sequence: Synthetic oligonucleotide
  Antisense strand to SEQ ID NO: 2223604
uaaacugcuggucuaccca

SEQ ID NO: 2223606 - RNA, 19 nt, Artificial Sequence
  Description of Artificial Sequence: Synthetic oligonucleotide
  Sense strand starting at position 588 of SEQ ID NO: 1883884
guuauugauggaggcagaa

SEQ ID NO: 2223607 - RNA, 19 nt, Artificial Sequence
  Description of Artificial Sequence: Synthetic oligonucleotide
  Antisense strand to SEQ ID NO: 2223606
uucugccuccaucaauaac

SEQ ID NO: 2223608 - RNA, 19 nt, Artificial Sequence
  Description of Artificial Sequence: Synthetic oligonucleotide
  Sense strand starting at position 612 of SEQ ID NO: 1883884
ugccucuuacugcacagau

SEQ ID NO: 2223609 - RNA, 19 nt, Artificial Sequence
  Description of Artificial Sequence: Synthetic oligonucleotide
  Antisense strand to SEQ ID NO: 2223608
aucugugcaguaagaggca

SEQ ID NO: 2223610 - RNA, 19 nt, Artificial Sequence
  Description of Artificial Sequence: Synthetic oligonucleotide
  Sense strand starting at position 629 of SEQ ID NO: 1883884
auauaucagccuggcauuu

SEQ ID NO: 2223611 - RNA, 19 nt, Artificial Sequence
  Description of Artificial Sequence: Synthetic oligonucleotide
  Antisense strand to SEQ ID NO: 2223610
aaaugccaggcugauauau

SEQ ID NO: 2223612 - RNA, 19 nt, Artificial Sequence
  Description of Artificial Sequence: Synthetic oligonucleotide
  Sense strand starting at position 718 of SEQ ID NO: 1883884
gugcauccagaaugauaaa

SEQ ID NO: 2223613 - RNA, 19 nt, Artificial Sequence
  Description of Artificial Sequence: Synthetic oligonucleotide
  Antisense strand to SEQ ID NO: 2223612
uuuaucauucuggaugcac

SEQ ID NO: 2223614 - RNA, 19 nt, Artificial Sequence
  Description of Artificial Sequence: Synthetic oligonucleotide
  Sense strand starting at position 876 of SEQ ID NO: 1883884
ucugaugagaugugugauc

SEQ ID NO: 2223615 - RNA, 19 nt, Artificial Sequence
  Description of Artificial Sequence: Synthetic oligonucleotide
  Antisense strand to SEQ ID NO: 2223614
gaucacacaucucaucaga

SEQ ID NO: 2223616 - RNA, 19 nt, Artificial Sequence
  Description of Artificial Sequence: Synthetic oligonucleotide
  Sense strand starting at position 878 of SEQ ID NO: 1883884
ugaugagaugugugaucaa

SEQ ID NO: 2223617 - RNA, 19 nt, Artificial Sequence
  Description of Artificial Sequence: Synthetic oligonucleotide
  Antisense strand to SEQ ID NO: 2223616
uugaucacacaucucauca

SEQ ID NO: 2223618 - RNA, 19 nt, Artificial Sequence
  Description of Artificial Sequence: Synthetic oligonucleotide
  Sense strand starting at position 881 of SEQ ID NO: 1883884
ugagaugugugaucaaacg

SEQ ID NO: 2223619 - RNA, 19 nt, Artificial Sequence
  Description of Artificial Sequence: Synthetic oligonucleotide
  Antisense strand to SEQ ID NO: 2223618
cguuugaucacacaucuca

SEQ ID NO: 2223620 - RNA, 19 nt, Artificial Sequence
  Description of Artificial Sequence: Synthetic oligonucleotide
  Sense strand starting at position 887 of SEQ ID NO: 1883884
gugugaucaaacggaagaa

SEQ ID NO: 2223621 - RNA, 19 nt, Artificial Sequence
  Description of Artificial Sequence: Synthetic oligonucleotide
  Antisense strand to SEQ ID NO: 2223620
uucuuccguuugaucacac

SEQ ID NO: 2223622 - RNA, 19 nt, Artificial Sequence
  Description of Artificial Sequence: Synthetic oligonucleotide
  Sense strand starting at position 988 of SEQ ID NO: 1883884
uccuguuauguauaucauc

SEQ ID NO: 2223623 - RNA, 19 nt, Artificial Sequence
  Description of Artificial Sequence: Synthetic oligonucleotide
  Antisense strand to SEQ ID NO: 2223622
gaugauauacauaacagga

SEQ ID NO: 2223624 - RNA, 19 nt, Artificial Sequence
  Description of Artificial Sequence: Synthetic oligonucleotide
  Sense strand starting at position 1005 of SEQ ID NO: 1883884
uccuguuauguauaucaag

SEQ ID NO: 2223625 - RNA, 19 nt, Artificial Sequence
  Description of Artificial Sequence: Synthetic oligonucleotide
  Antisense strand to SEQ ID NO: 2223624
cuugauauacauaacagga

SEQ ID NO: 2223626 - RNA, 19 nt, Artificial Sequence
  Description of Artificial Sequence: Synthetic oligonucleotide
  Sense strand starting at position 1051 of SEQ ID NO: 1883884
uccuguuauguauagcaag

SEQ ID NO: 2223627 - RNA, 19 nt, Artificial Sequence
  Description of Artificial Sequence: Synthetic oligonucleotide
  Antisense strand to SEQ ID NO: 2223626
cuugcuauacauaacagga

SEQ ID NO: 2223628 - RNA, 19 nt, Artificial Sequence
  Description of Artificial Sequence: Synthetic oligonucleotide
  Sense strand starting at position 1105 of SEQ ID NO: 1883884
ucauguuaagggcauugau

SEQ ID NO: 2223629 - RNA, 19 nt, Artificial Sequence
  Description of Artificial Sequence: Synthetic oligonucleotide
  Antisense strand to SEQ ID NO: 2223628
aucaaugcccuuaacauga

SEQ ID NO: 2223630 - RNA, 19 nt, Artificial Sequence
  Description of Artificial Sequence: Synthetic oligonucleotide
  Sense strand starting at position 1145 of SEQ ID NO: 1883884
uauuguguuugcuugauuu

SEQ ID NO: 2223631 - RNA, 19 nt, Artificial Sequence
  Description of Artificial Sequence: Synthetic oligonucleotide
  Antisense strand to SEQ ID NO: 2223630
aaaucaagcaaacacaaua

SEQ ID NO: 2223632 - RNA, 19 nt, Artificial Sequence
  Description of Artificial Sequence: Synthetic oligonucleotide
  Sense strand starting at position 1216 of SEQ ID NO: 1883884
gaguuacuacuguaagcaa

SEQ ID NO: 2223633 - RNA, 19 nt, Artificial Sequence
  Description of Artificial Sequence: Synthetic oligonucleotide
  Antisense strand to SEQ ID NO: 2223632
uugcuuacaguaguaacuc

SEQ ID NO: 2223634 - RNA, 19 nt, Artificial Sequence
  Description of Artificial Sequence: Synthetic oligonucleotide
  Sense strand starting at position 1309 of SEQ ID NO: 1883884
ggaugagaaugucucuaua

SEQ ID NO: 2223635 - RNA, 19 nt, Artificial Sequence
  Description of Artificial Sequence: Synthetic oligonucleotide
  Antisense strand to SEQ ID NO: 2223634
uauagagacauucucaucc

SEQ ID NO: 2223636 - RNA, 19 nt, Artificial Sequence
  Description of Artificial Sequence: Synthetic oligonucleotide
  Sense strand starting at position 1311 of SEQ ID NO: 1883884
augagaaugucucuauaag

SEQ ID NO: 2223637 - RNA, 19 nt, Artificial Sequence
  Description of Artificial Sequence: Synthetic oligonucleotide
  Antisense strand to SEQ ID NO: 2223636
cuuauagagacauucucau

SEQ ID NO: 2223638 - RNA, 19 nt, Artificial Sequence
  Description of Artificial Sequence: Synthetic oligonucleotide
  Sense strand starting at position 1364 of SEQ ID NO: 1883884
ucauaucguaaaugaggau

SEQ ID NO: 2223639 - RNA, 19 nt, Artificial Sequence
  Description of Artificial Sequence: Synthetic oligonucleotide
  Antisense strand to SEQ ID NO: 2223638
auccucauuuacgauauga

SEQ ID NO: 2223640 - RNA, 19 nt, Artificial Sequence
  Description of Artificial Sequence: Synthetic oligonucleotide
  Sense strand starting at position 1398 of SEQ ID NO: 1883884
agcaguucuccacaaggaa

SEQ ID NO: 2223641 - RNA, 19 nt, Artificial Sequence
  Description of Artificial Sequence: Synthetic oligonucleotide
  Antisense strand to SEQ ID NO: 2223640
uuccuuguggagaacugcu

SEQ ID NO: 2223642 - RNA, 19 nt, Artificial Sequence
  Description of Artificial Sequence: Synthetic oligonucleotide
  Sense strand starting at position 1523 of SEQ ID NO: 1883884
accaguuucuggguuaaag

SEQ ID NO: 2223643 - RNA, 19 nt, Artificial Sequence
  Description of Artificial Sequence: Synthetic oligonucleotide
  Antisense strand to SEQ ID NO: 2223642
cuuuaacccagaaacuggu

SEQ ID NO: 2223644 - RNA, 19 nt, Artificial Sequence
  Description of Artificial Sequence: Synthetic oligonucleotide
  Sense strand starting at position 1525 of SEQ ID NO: 1883884
caguuucuggguuaaagag

SEQ ID NO: 2223645 - RNA, 19 nt, Artificial Sequence
  Description of Artificial Sequence: Synthetic oligonucleotide
  Antisense strand to SEQ ID NO: 2223644
cucuuuaacccagaaacug

SEQ ID NO: 2223646 - RNA, 19 nt, Artificial Sequence
  Description of Artificial Sequence: Synthetic oligonucleotide
  Sense strand starting at position 1567 of SEQ ID NO: 1883884
uggucacuugguuaauauc

SEQ ID NO: 2223647 - RNA, 19 nt, Artificial Sequence
  Description of Artificial Sequence: Synthetic oligonucleotide
  Antisense strand to SEQ ID NO: 2223646
gauauuaaccaagugacca

SEQ ID NO: 2223648 - RNA, 19 nt, Artificial Sequence
  Description of Artificial Sequence: Synthetic oligonucleotide
  Sense strand starting at position 1637 of SEQ ID NO: 1883884
cagagcugugcacaaauaa

SEQ ID NO: 2223649 - RNA, 19 nt, Artificial Sequence
  Description of Artificial Sequence: Synthetic oligonucleotide
  Antisense strand to SEQ ID NO: 2223648
uuauuugugcacagcucug

SEQ ID NO: 2223650 - RNA, 19 nt, Artificial Sequence
  Description of Artificial Sequence: Synthetic oligonucleotide
  Sense strand starting at position 1708 of SEQ ID NO: 1883884
ggauguuucuaugccagga

SEQ ID NO: 2223651 - RNA, 19 nt, Artificial Sequence
  Description of Artificial Sequence: Synthetic oligonucleotide
  Antisense strand to SEQ ID NO: 2223650
uccuggcauagaaacaucc

SEQ ID NO: 2223652 - RNA, 19 nt, Artificial Sequence
  Description of Artificial Sequence: Synthetic oligonucleotide
  Sense strand starting at position 2156 of SEQ ID NO: 1883884
gauaaucgugagggaucca

SEQ ID NO: 2223653 - RNA, 19 nt, Artificial Sequence
  Description of Artificial Sequence: Synthetic oligonucleotide
  Antisense strand to SEQ ID NO: 2223652
uggaucccucacgauuauc

SEQ ID NO: 2223654 - RNA, 19 nt, Artificial Sequence
  Description of Artificial Sequence: Synthetic oligonucleotide
  Sense strand starting at position 3364 of SEQ ID NO: 1883884
gaaagaaaucuuuguguaa

SEQ ID NO: 2223655 - RNA, 19 nt, Artificial Sequence
  Description of Artificial Sequence: Synthetic oligonucleotide
  Antisense strand to SEQ ID NO: 2223654
uuacacaaagauuucuuuc

SEQ ID NO: 2223656 - RNA, 19 nt, Artificial Sequence
  Description of Artificial Sequence: Synthetic oligonucleotide
  Sense strand starting at position 3367 of SEQ ID NO: 1883884
agaaaucuuuguguaaccu

SEQ ID NO: 2223657 - RNA, 19 nt, Artificial Sequence
  Description of Artificial Sequence: Synthetic oligonucleotide
  Antisense strand to SEQ ID NO: 2223656
agguuacacaaagauuucu

SEQ ID NO: 2223658 - RNA, 19 nt, Artificial Sequence
  Description of Artificial Sequence: Synthetic oligonucleotide
  Sense strand starting at position 3656 of SEQ ID NO: 1883884
aagacauagcaguauguau

SEQ ID NO: 2223659 - RNA, 19 nt, Artificial Sequence
  Description of Artificial Sequence: Synthetic oligonucleotide
  Antisense strand to SEQ ID NO: 2223658
auacauacugcuaugucuu

SEQ ID NO: 2223660 - RNA, 19 nt, Artificial Sequence
  Description of Artificial Sequence: Synthetic oligonucleotide
  Sense strand starting at position 3663 of SEQ ID NO: 1883884
agcaguauguauuugugga

SEQ ID NO: 2223661 - RNA, 19 nt, Artificial Sequence
  Description of Artificial Sequence: Synthetic oligonucleotide
  Antisense strand to SEQ ID NO: 2223660
uccacaaauacauacugcu

SEQ ID NO: 2223662 - RNA, 19 nt, Artificial Sequence
  Description of Artificial Sequence: Synthetic oligonucleotide
  Sense strand starting at position 3664 of SEQ ID NO: 1883884
gcaguauguauuuguggau

SEQ ID NO: 2223663 - RNA, 19 nt, Artificial Sequence
  Description of Artificial Sequence: Synthetic oligonucleotide
  Antisense strand to SEQ ID NO: 2223662
auccacaaauacauacugc

SEQ ID NO: 2223664 - RNA, 19 nt, Artificial Sequence
  Description of Artificial Sequence: Synthetic oligonucleotide
  Sense strand starting at position 3766 of SEQ ID NO: 1883884
cuaguucuaggcuggaaau

SEQ ID NO: 2223665 - RNA, 19 nt, Artificial Sequence
  Description of Artificial Sequence: Synthetic oligonucleotide
  Antisense strand to SEQ ID NO: 2223664
auuuccagccuagaacuag

SEQ ID NO: 2223666 - RNA, 19 nt, Artificial Sequence
  Description of Artificial Sequence: Synthetic oligonucleotide
  Sense strand starting at position 3767 of SEQ ID NO: 1883884
uaguucuaggcuggaaaua

SEQ ID NO: 2223667 - RNA, 19 nt, Artificial Sequence
  Description of Artificial Sequence: Synthetic oligonucleotide
  Antisense strand to SEQ ID NO: 2223666
uauuuccagccuagaacua

SEQ ID NO: 2223668 - RNA, 19 nt, Artificial Sequence
  Description of Artificial Sequence: Synthetic oligonucleotide
  Sense strand starting at position 3939 of SEQ ID NO: 1883884
ggcugugcuguucucguaa

SEQ ID NO: 2223669 - RNA, 19 nt, Artificial Sequence
  Description of Artificial Sequence: Synthetic oligonucleotide
  Antisense strand to SEQ ID NO: 2223668
uuacgagaacagcacagcc

SEQ ID NO: 2223670 - RNA, 19 nt, Artificial Sequence
  Description of Artificial Sequence: Synthetic oligonucleotide
  Sense strand starting at position 3942 of SEQ ID NO: 1883884
ugugcuguucucguaauca

SEQ ID NO: 2223671 - RNA, 19 nt, Artificial Sequence
  Description of Artificial Sequence: Synthetic oligonucleotide
  Antisense strand to SEQ ID NO: 2223670
ugauuacgagaacagcaca

SEQ ID NO: 2223672 - RNA, 19 nt, Artificial Sequence
  Description of Artificial Sequence: Synthetic oligonucleotide
  Sense strand starting at position 3953 of SEQ ID NO: 1883884
cguaaucaaagguggagau

SEQ ID NO: 2223673 - RNA, 19 nt, Artificial Sequence
  Description of Artificial Sequence: Synthetic oligonucleotide
  Antisense strand to SEQ ID NO: 2223672
aucuccaccuuugauuacg

SEQ ID NO: 2223674 - RNA, 19 nt, Artificial Sequence
  Description of Artificial Sequence: Synthetic oligonucleotide
  Sense strand starting at position 3973 of SEQ ID NO: 1883884
aggaaagugucugccuaca

SEQ ID NO: 2223675 - RNA, 19 nt, Artificial Sequence
  Description of Artificial Sequence: Synthetic oligonucleotide
  Antisense strand to SEQ ID NO: 2223674
uguaggcagacacuuuccu

SEQ ID NO: 2223676 - RNA, 19 nt, Artificial Sequence
  Description of Artificial Sequence: Synthetic oligonucleotide
  Sense strand starting at position 98 of SEQ ID NO: 1883885
aaaugucaggcugagcauu

SEQ ID NO: 2223677 - RNA, 19 nt, Artificial Sequence
  Description of Artificial Sequence: Synthetic oligonucleotide
  Antisense strand to SEQ ID NO: 2223676
aaugcucagccugacauuu

SEQ ID NO: 2223678 - RNA, 19 nt, Artificial Sequence
  Description of Artificial Sequence: Synthetic oligonucleotide
  Sense strand starting at position 244 of SEQ ID NO: 1883885
gccuuaguccaguggagag

SEQ ID NO: 2223679 - RNA, 19 nt, Artificial Sequence
  Description of Artificial Sequence: Synthetic oligonucleotide
  Antisense strand to SEQ ID NO: 2223678
cucuccacuggacuaaggc

SEQ ID NO: 2223680 - RNA, 19 nt, Artificial Sequence
  Description of Artificial Sequence: Synthetic oligonucleotide
  Sense strand starting at position 269 of SEQ ID NO: 1883885
cgauaaaugcaucacaguu

SEQ ID NO: 2223681 - RNA, 19 nt, Artificial Sequence
  Description of Artificial Sequence: Synthetic oligonucleotide
  Antisense strand to SEQ ID NO: 2223680
aacugugaugcauuuaucg

SEQ ID NO: 2223682 - RNA, 19 nt, Artificial Sequence
  Description of Artificial Sequence: Synthetic oligonucleotide
  Sense strand starting at position 279 of SEQ ID NO: 1883885
aucacaguuugugucaaga

SEQ ID NO: 2223683 - RNA, 19 nt, Artificial Sequence
  Description of Artificial Sequence: Synthetic oligonucleotide
  Antisense strand to SEQ ID NO: 2223682
ucuugacacaaacugugau

SEQ ID NO: 2223684 - RNA, 19 nt, Artificial Sequence
  Description of Artificial Sequence: Synthetic oligonucleotide
  Sense strand starting at position 389 of SEQ ID NO: 1883885
gcggauggcgugagguauu

SEQ ID NO: 2223685 - RNA, 19 nt, Artificial Sequence
  Description of Artificial Sequence: Synthetic oligonucleotide
  Antisense strand to SEQ ID NO: 2223684
aauaccucacgccauccgc

SEQ ID NO: 2223686 - RNA, 19 nt, Artificial Sequence
  Description of Artificial Sequence: Synthetic oligonucleotide
  Sense strand starting at position 417 of SEQ ID NO: 1883885
cgagucugcagaugaggaa

SEQ ID NO: 2223687 - RNA, 19 nt, Artificial Sequence
  Description of Artificial Sequence: Synthetic oligonucleotide
  Antisense strand to SEQ ID NO: 2223686
uuccucaucugcagacucg

SEQ ID NO: 2223688 - RNA, 19 nt, Artificial Sequence
  Description of Artificial Sequence: Synthetic oligonucleotide
  Sense strand starting at position 567 of SEQ ID NO: 1883885
gugugcuugcaaguguacu

SEQ ID NO: 2223689 - RNA, 19 nt, Artificial Sequence
  Description of Artificial Sequence: Synthetic oligonucleotide
  Antisense strand to SEQ ID NO: 2223688
aguacacuugcaagcacac

SEQ ID NO: 2223690 - RNA, 19 nt, Artificial Sequence
  Description of Artificial Sequence: Synthetic oligonucleotide
  Sense strand starting at position 731 of SEQ ID NO: 1883885
cugcaauugcguguugcaa

SEQ ID NO: 2223691 - RNA, 19 nt, Artificial Sequence
  Description of Artificial Sequence: Synthetic oligonucleotide
  Antisense strand to SEQ ID NO: 2223690
uugcaacacgcaauugcag

SEQ ID NO: 2223692 - RNA, 19 nt, Artificial Sequence
  Description of Artificial Sequence: Synthetic oligonucleotide
  Sense strand starting at position 732 of SEQ ID NO: 1883885
ugcaauugcguguugcaaa

SEQ ID NO: 2223693 - RNA, 19 nt, Artificial Sequence
  Description of Artificial Sequence: Synthetic oligonucleotide
  Antisense strand to SEQ ID NO: 2223692
uuugcaacacgcaauugca

SEQ ID NO: 2223694 - RNA, 19 nt, Artificial Sequence
  Description of Artificial Sequence: Synthetic oligonucleotide
  Sense strand starting at position 1209 of SEQ ID NO: 1883885
cgcggauucgagcugcaca

SEQ ID NO: 2223695 - RNA, 19 nt, Artificial Sequence
  Description of Artificial Sequence: Synthetic oligonucleotide
  Antisense strand to SEQ ID NO: 2223694
ugugcagcucgaauccgcg

SEQ ID NO: 2223696 - RNA, 19 nt, Artificial Sequence
  Description of Artificial Sequence: Synthetic oligonucleotide
  Sense strand starting at position 2288 of SEQ ID NO: 1883885
gaccuuaagcccugaaggu

SEQ ID NO: 2223697 - RNA, 19 nt, Artificial Sequence
  Description of Artificial Sequence: Synthetic oligonucleotide
  Antisense strand to SEQ ID NO: 2223696
accuucagggcuuaagguc

SEQ ID NO: 2223698 - RNA, 19 nt, Artificial Sequence
  Description of Artificial Sequence: Synthetic oligonucleotide
  Sense strand starting at position 2417 of SEQ ID NO: 1883885
aguugaaaguguucaguca

SEQ ID NO: 2223699 - RNA, 19 nt, Artificial Sequence
  Description of Artificial Sequence: Synthetic oligonucleotide
  Antisense strand to SEQ ID NO: 2223698
ugacugaacacuuucaacu

SEQ ID NO: 2223700 - RNA, 19 nt, Artificial Sequence
  Description of Artificial Sequence: Synthetic oligonucleotide
  Sense strand starting at position 2418 of SEQ ID NO: 1883885
guugaaaguguucagucac

SEQ ID NO: 2223701 - RNA, 19 nt, Artificial Sequence
  Description of Artificial Sequence: Synthetic oligonucleotide
  Antisense strand to SEQ ID NO: 2223700
gugacugaacacuuucaac

SEQ ID NO: 2223702 - RNA, 19 nt, Artificial Sequence
  Description of Artificial Sequence: Synthetic oligonucleotide
  Sense strand starting at position 2606 of SEQ ID NO: 1883885
gcuauuauagcuuaggcaa

SEQ ID NO: 2223703 - RNA, 19 nt, Artificial Sequence
  Description of Artificial Sequence: Synthetic oligonucleotide
  Antisense strand to SEQ ID NO: 2223702
uugccuaagcuauaauagc

SEQ ID NO: 2223704 - RNA, 19 nt, Artificial Sequence
  Description of Artificial Sequence: Synthetic oligonucleotide
  Sense strand starting at position 2700 of SEQ ID NO: 1883885
gagauuuaauugcaaguag

SEQ ID NO: 2223705 - RNA, 19 nt, Artificial Sequence
  Description of Artificial Sequence: Synthetic oligonucleotide
  Antisense strand to SEQ ID NO: 2223704
cuacuugcaauuaaaucuc

SEQ ID NO: 2223706 - RNA, 19 nt, Artificial Sequence
  Description of Artificial Sequence: Synthetic oligonucleotide
  Sense strand starting at position 2764 of SEQ ID NO: 1883885
ggcacaugugcuguugcaa

SEQ ID NO: 2223707 - RNA, 19 nt, Artificial Sequence
  Description of Artificial Sequence: Synthetic oligonucleotide
  Antisense strand to SEQ ID NO: 2223706
uugcaacagcacaugugcc

SEQ ID NO: 2223708 - RNA, 19 nt, Artificial Sequence
  Description of Artificial Sequence: Synthetic oligonucleotide
  Sense strand starting at position 2765 of SEQ ID NO: 1883885
gcacaugugcuguugcaau

SEQ ID NO: 2223709 - RNA, 19 nt, Artificial Sequence
  Description of Artificial Sequence: Synthetic oligonucleotide
  Antisense strand to SEQ ID NO: 2223708
auugcaacagcacaugugc

SEQ ID NO: 2223710 - RNA, 19 nt, Artificial Sequence
  Description of Artificial Sequence: Synthetic oligonucleotide
  Sense strand starting at position 2778 of SEQ ID NO: 1883885
ugcaauuaaccugguagag

SEQ ID NO: 2223711 - RNA, 19 nt, Artificial Sequence
  Description of Artificial Sequence: Synthetic oligonucleotide
  Antisense strand to SEQ ID NO: 2223710
cucuaccagguuaauugca

SEQ ID NO: 2223712 - RNA, 19 nt, Artificial Sequence
  Description of Artificial Sequence: Synthetic oligonucleotide
  Sense strand starting at position 2823 of SEQ ID NO: 1883885
ggcuuugagggaggauuau

SEQ ID NO: 2223713 - RNA, 19 nt, Artificial Sequence
  Description of Artificial Sequence: Synthetic oligonucleotide
  Antisense strand to SEQ ID NO: 2223712
auaauccucccucaaagcc

SEQ ID NO: 2223714 - RNA, 19 nt, Artificial Sequence
  Description of Artificial Sequence: Synthetic oligonucleotide
  Sense strand starting at position 2832 of SEQ ID NO: 1883885
ggaggauuauaugcaaguu

SEQ ID NO: 2223715 - RNA, 19 nt, Artificial Sequence
  Description of Artificial Sequence: Synthetic oligonucleotide
  Antisense strand to SEQ ID NO: 2223714
aacuugcauauaauccucc

SEQ ID NO: 2223716 - RNA, 19 nt, Artificial Sequence
  Description of Artificial Sequence: Synthetic oligonucleotide
  Sense strand starting at position 2906 of SEQ ID NO: 1883885
gcaaguuuacguuaaauua

SEQ ID NO: 2223717 - RNA, 19 nt, Artificial Sequence
  Description of Artificial Sequence: Synthetic oligonucleotide
  Antisense strand to SEQ ID NO: 2223716
uaauuuaacguaaacuugc

SEQ ID NO: 2223718 - RNA, 19 nt, Artificial Sequence
  Description of Artificial Sequence: Synthetic oligonucleotide
  Sense strand starting at position 2992 of SEQ ID NO: 1883885
caggguacguuccuaauuu

SEQ ID NO: 2223719 - RNA, 19 nt, Artificial Sequence
  Description of Artificial Sequence: Synthetic oligonucleotide
  Antisense strand to SEQ ID NO: 2223718
aaauuaggaacguacccug

SEQ ID NO: 2223720 - RNA, 19 nt, Artificial Sequence
  Description of Artificial Sequence: Synthetic oligonucleotide
  Sense strand starting at position 3057 of SEQ ID NO: 1883885
auaagaguacagugcaauu

SEQ ID NO: 2223721 - RNA, 19 nt, Artificial Sequence
  Description of Artificial Sequence: Synthetic oligonucleotide
  Antisense strand to SEQ ID NO: 2223720
aauugcacuguacucuuau

SEQ ID NO: 2223722 - RNA, 19 nt, Artificial Sequence
  Description of Artificial Sequence: Synthetic oligonucleotide
  Sense strand starting at position 3087 of SEQ ID NO: 1883885
aguuaaauacuugacuguu

SEQ ID NO: 2223723 - RNA, 19 nt, Artificial Sequence
  Description of Artificial Sequence: Synthetic oligonucleotide
  Antisense strand to SEQ ID NO: 2223722
aacagucaaguauuuaacu

SEQ ID NO: 2223724 - RNA, 19 nt, Artificial Sequence
  Description of Artificial Sequence: Synthetic oligonucleotide
  Sense strand starting at position 3116 of SEQ ID NO: 1883885
guguaauuaaguuauggga

SEQ ID NO: 2223725 - RNA, 19 nt, Artificial Sequence
  Description of Artificial Sequence: Synthetic oligonucleotide
  Antisense strand to SEQ ID NO: 2223724
ucccauaacuuaauuacac

SEQ ID NO: 2223726 - RNA, 19 nt, Artificial Sequence
  Description of Artificial Sequence: Synthetic oligonucleotide
  Sense strand starting at position 3219 of SEQ ID NO: 1883885
cgaagucuccauuauauug

SEQ ID NO: 2223727 - RNA, 19 nt, Artificial Sequence
  Description of Artificial Sequence: Synthetic oligonucleotide
  Antisense strand to SEQ ID NO: 2223726
caauauaauggagacuucg

SEQ ID NO: 2223728 - RNA, 19 nt, Artificial Sequence
  Description of Artificial Sequence: Synthetic oligonucleotide
  Sense strand starting at position 3265 of SEQ ID NO: 1883885
gcuuaaauggagcagauua

SEQ ID NO: 2223729 - RNA, 19 nt, Artificial Sequence
  Description of Artificial Sequence: Synthetic oligonucleotide
  Antisense strand to SEQ ID NO: 2223728
uaaucugcuccauuuaagc

SEQ ID NO: 2223730 - RNA, 19 nt, Artificial Sequence
  Description of Artificial Sequence: Synthetic oligonucleotide
  Sense strand starting at position 3414 of SEQ ID NO: 1883885
aagaaacggguguaucuau

SEQ ID NO: 2223731 - RNA, 19 nt, Artificial Sequence
  Description of Artificial Sequence: Synthetic oligonucleotide
  Antisense strand to SEQ ID NO: 2223730
auagauacacccguuucuu

SEQ ID NO: 2223732 - RNA, 19 nt, Artificial Sequence
  Description of Artificial Sequence: Synthetic oligonucleotide
  Sense strand starting at position 3462 of SEQ ID NO: 1883885
ucuugagauaguugguuau

SEQ ID NO: 2223733 - RNA, 19 nt, Artificial Sequence
  Description of Artificial Sequence: Synthetic oligonucleotide
  Antisense strand to SEQ ID NO: 2223732
auaaccaacuaucucaaga

SEQ ID NO: 2223734 - RNA, 19 nt, Artificial Sequence
  Description of Artificial Sequence: Synthetic oligonucleotide
  Sense strand starting at position 3464 of SEQ ID NO: 1883885
uugagauaguugguuauga

SEQ ID NO: 2223735 - RNA, 19 nt, Artificial Sequence
  Description of Artificial Sequence: Synthetic oligonucleotide
  Antisense strand to SEQ ID NO: 2223734
ucauaaccaacuaucucaa

SEQ ID NO: 2223736 - RNA, 19 nt, Artificial Sequence
  Description of Artificial Sequence: Synthetic oligonucleotide
  Sense strand starting at position 3465 of SEQ ID NO: 1883885
ugagauaguugguuaugag

SEQ ID NO: 2223737 - RNA, 19 nt, Artificial Sequence
  Description of Artificial Sequence: Synthetic oligonucleotide
  Antisense strand to SEQ ID NO: 2223736
cucauaaccaacuaucuca

SEQ ID NO: 2223738 - RNA, 19 nt, Artificial Sequence
  Description of Artificial Sequence: Synthetic oligonucleotide
  Sense strand starting at position 3522 of SEQ ID NO: 1883885
aggaaauguuuggugaaca

SEQ ID NO: 2223739 - RNA, 19 nt, Artificial Sequence
  Description of Artificial Sequence: Synthetic oligonucleotide
  Antisense strand to SEQ ID NO: 2223738
uguucaccaaacauuuccu

SEQ ID NO: 2223740 - RNA, 19 nt, Artificial Sequence
  Description of Artificial Sequence: Synthetic oligonucleotide
  Sense strand starting at position 3534 of SEQ ID NO: 1883885
gugaacauuugacauaguu

SEQ ID NO: 2223741 - RNA, 19 nt, Artificial Sequence
  Description of Artificial Sequence: Synthetic oligonucleotide
  Antisense strand to SEQ ID NO: 2223740
aacuaugucaaauguucac

SEQ ID NO: 2223742 - RNA, 19 nt, Artificial Sequence
  Description of Artificial Sequence: Synthetic oligonucleotide
  Sense strand starting at position 3543 of SEQ ID NO: 1883885
ugacauaguugaucauaug

SEQ ID NO: 2223743 - RNA, 19 nt, Artificial Sequence
  Description of Artificial Sequence: Synthetic oligonucleotide
  Antisense strand to SEQ ID NO: 2223742
cauaugaucaacuauguca

SEQ ID NO: 2223744 - RNA, 19 nt, Artificial Sequence
  Description of Artificial Sequence: Synthetic oligonucleotide
  Sense strand starting at position 3682 of SEQ ID NO: 1883885
cuggcaugaaugugaauuc

SEQ ID NO: 2223745 - RNA, 19 nt, Artificial Sequence
  Description of Artificial Sequence: Synthetic oligonucleotide
  Antisense strand to SEQ ID NO: 2223744
gaauucacauucaugccag

SEQ ID NO: 2223746 - RNA, 19 nt, Artificial Sequence
  Description of Artificial Sequence: Synthetic oligonucleotide
  Sense strand starting at position 3692 of SEQ ID NO: 1883885
ugugaauucugccuaauua

SEQ ID NO: 2223747 - RNA, 19 nt, Artificial Sequence
  Description of Artificial Sequence: Synthetic oligonucleotide
  Antisense strand to SEQ ID NO: 2223746
uaauuaggcagaauucaca

SEQ ID NO: 2223748 - RNA, 19 nt, Artificial Sequence
  Description of Artificial Sequence: Synthetic oligonucleotide
  Sense strand starting at position 3693 of SEQ ID NO: 1883885
gugaauucugccuaauuau

SEQ ID NO: 2223749 - RNA, 19 nt, Artificial Sequence
  Description of Artificial Sequence: Synthetic oligonucleotide
  Antisense strand to SEQ ID NO: 2223748
auaauuaggcagaauucac

SEQ ID NO: 2223750 - RNA, 19 nt, Artificial Sequence
  Description of Artificial Sequence: Synthetic oligonucleotide
  Sense strand starting at position 3703 of SEQ ID NO: 1883885
ccuaauuauguuuaaagug

SEQ ID NO: 2223751 - RNA, 19 nt, Artificial Sequence
  Description of Artificial Sequence: Synthetic oligonucleotide
  Antisense strand to SEQ ID NO: 2223750
cacuuuaaacauaauuagg

SEQ ID NO: 2223752 - RNA, 19 nt, Artificial Sequence
  Description of Artificial Sequence: Synthetic oligonucleotide
  Sense strand starting at position 3968 of SEQ ID NO: 1883885
uaugcaugucaucagagua

SEQ ID NO: 2223753 - RNA, 19 nt, Artificial Sequence
  Description of Artificial Sequence: Synthetic oligonucleotide
  Antisense strand to SEQ ID NO: 2223752
uacucugaugacaugcaua

SEQ ID NO: 2223754 - RNA, 19 nt, Artificial Sequence
  Description of Artificial Sequence: Synthetic oligonucleotide
  Sense strand starting at position 3982 of SEQ ID NO: 1883885
gaguauaagaaguguuuga

SEQ ID NO: 2223755 - RNA, 19 nt, Artificial Sequence
  Description of Artificial Sequence: Synthetic oligonucleotide
  Antisense strand to SEQ ID NO: 2223754
ucaaacacuucuuauacuc

SEQ ID NO: 2223756 - RNA, 19 nt, Artificial Sequence
  Description of Artificial Sequence: Synthetic oligonucleotide
  Sense strand starting at position 695 of SEQ ID NO: 1883886
cuguuaaaguaagaacuuu

SEQ ID NO: 2223757 - RNA, 19 nt, Artificial Sequence
  Description of Artificial Sequence: Synthetic oligonucleotide
  Antisense strand to SEQ ID NO: 2223756
aaaguucuuacuuuaacag

SEQ ID NO: 2223758 - RNA, 19 nt, Artificial Sequence
  Description of Artificial Sequence: Synthetic oligonucleotide
  Sense strand starting at position 989 of SEQ ID NO: 1883886
uaggaacugucuugagauu

SEQ ID NO: 2223759 - RNA, 19 nt, Artificial Sequence
  Description of Artificial Sequence: Synthetic oligonucleotide
  Antisense strand to SEQ ID NO: 2223758
aaucucaagacaguuccua

SEQ ID NO: 2223760 - RNA, 19 nt, Artificial Sequence
  Description of Artificial Sequence: Synthetic oligonucleotide
  Sense strand starting at position 1235 of SEQ ID NO: 1883886
guaauauugugcuugcccu

SEQ ID NO: 2223761 - RNA, 19 nt, Artificial Sequence
  Description of Artificial Sequence: Synthetic oligonucleotide
  Antisense strand to SEQ ID NO: 2223760
agggcaagcacaauauuac

SEQ ID NO: 2223762 - RNA, 19 nt, Artificial Sequence
  Description of Artificial Sequence: Synthetic oligonucleotide
  Sense strand starting at position 1275 of SEQ ID NO: 1883886
acuccaaagcuauguguau

SEQ ID NO: 2223763 - RNA, 19 nt, Artificial Sequence
  Description of Artificial Sequence: Synthetic oligonucleotide
  Antisense strand to SEQ ID NO: 2223762
auacacauagcuuuggagu

SEQ ID NO: 2223764 - RNA, 19 nt, Artificial Sequence
  Description of Artificial Sequence: Synthetic oligonucleotide
  Sense strand starting at position 1276 of SEQ ID NO: 1883886
cuccaaagcuauguguaua

SEQ ID NO: 2223765 - RNA, 19 nt, Artificial Sequence
  Description of Artificial Sequence: Synthetic oligonucleotide
  Antisense strand to SEQ ID NO: 2223764
uauacacauagcuuuggag

SEQ ID NO: 2223766 - RNA, 19 nt, Artificial Sequence
  Description of Artificial Sequence: Synthetic oligonucleotide
  Sense strand starting at position 3208 of SEQ ID NO: 1883886
uagcaauauggcguuguuu

SEQ ID NO: 2223767 - RNA, 19 nt, Artificial Sequence
  Description of Artificial Sequence: Synthetic oligonucleotide
  Antisense strand to SEQ ID NO: 2223766
aaacaacgccauauugcua

SEQ ID NO: 2223768 - RNA, 19 nt, Artificial Sequence
  Description of Artificial Sequence: Synthetic oligonucleotide
  Sense strand starting at position 3247 of SEQ ID NO: 1883886
gcuguugcucccuguucua

SEQ ID NO: 2223769 - RNA, 19 nt, Artificial Sequence
  Description of Artificial Sequence: Synthetic oligonucleotide
  Antisense strand to SEQ ID NO: 2223768
uagaacagggagcaacagc

SEQ ID NO: 2223770 - RNA, 19 nt, Artificial Sequence
  Description of Artificial Sequence: Synthetic oligonucleotide
  Sense strand starting at position 3606 of SEQ ID NO: 1883886
aguguuagcgaggauggua

SEQ ID NO: 2223771 - RNA, 19 nt, Artificial Sequence
  Description of Artificial Sequence: Synthetic oligonucleotide
  Antisense strand to SEQ ID NO: 2223770
uaccauccucgcuaacacu

SEQ ID NO: 2223772 - RNA, 19 nt, Artificial Sequence
  Description of Artificial Sequence: Synthetic oligonucleotide
  Sense strand starting at position 3611 of SEQ ID NO: 1883886
uagcgaggaugguaucuau

SEQ ID NO: 2223773 - RNA, 19 nt, Artificial Sequence
  Description of Artificial Sequence: Synthetic oligonucleotide
  Antisense strand to SEQ ID NO: 2223772
auagauaccauccucgcua

SEQ ID NO: 2223774 - RNA, 19 nt, Artificial Sequence
  Description of Artificial Sequence: Synthetic oligonucleotide
  Sense strand starting at position 3700 of SEQ ID NO: 1883886
ggccuagaauuauuguuau

SEQ ID NO: 2223775 - RNA, 19 nt, Artificial Sequence
  Description of Artificial Sequence: Synthetic oligonucleotide
  Antisense strand to SEQ ID NO: 2223774
auaacaauaauucuaggcc

SEQ ID NO: 2223776 - RNA, 19 nt, Artificial Sequence
  Description of Artificial Sequence: Synthetic oligonucleotide
  Sense strand starting at position 3727 of SEQ ID NO: 1883886
ucaugucacucucaggagu

SEQ ID NO: 2223777 - RNA, 19 nt, Artificial Sequence
  Description of Artificial Sequence: Synthetic oligonucleotide
  Antisense strand to SEQ ID NO: 2223776
acuccugagagugacauga

SEQ ID NO: 2223778 - RNA, 19 nt, Artificial Sequence
  Description of Artificial Sequence: Synthetic oligonucleotide
  Sense strand starting at position 3729 of SEQ ID NO: 1883886
augucacucucaggaguaa

SEQ ID NO: 2223779 - RNA, 19 nt, Artificial Sequence
  Description of Artificial Sequence: Synthetic oligonucleotide
  Antisense strand to SEQ ID NO: 2223778
uuacuccugagagugacau

SEQ ID NO: 2223780 - RNA, 19 nt, Artificial Sequence
  Description of Artificial Sequence: Synthetic oligonucleotide
  Sense strand starting at position 3730 of SEQ ID NO: 1883886
ugucacucucaggaguaau

SEQ ID NO: 2223781 - RNA, 19 nt, Artificial Sequence
  Description of Artificial Sequence: Synthetic oligonucleotide
  Antisense strand to SEQ ID NO: 2223780
auuacuccugagagugaca

SEQ ID NO: 2223782 - RNA, 19 nt, Artificial Sequence
  Description of Artificial Sequence: Synthetic oligonucleotide
  Sense strand starting at position 3740 of SEQ ID NO: 1883886
aggaguaauuaggcaacuu

SEQ ID NO: 2223783 - RNA, 19 nt, Artificial Sequence
  Description of Artificial Sequence: Synthetic oligonucleotide
  Antisense strand to SEQ ID NO: 2223782
aaguugccuaauuacuccu

SEQ ID NO: 2223784 - RNA, 19 nt, Artificial Sequence
  Description of Artificial Sequence: Synthetic oligonucleotide
  Sense strand starting at position 3741 of SEQ ID NO: 1883886
ggaguaauuaggcaacuuc

SEQ ID NO: 2223785 - RNA, 19 nt, Artificial Sequence
  Description of Artificial Sequence: Synthetic oligonucleotide
  Antisense strand to SEQ ID NO: 2223784
gaaguugccuaauuacucc

SEQ ID NO: 2223786 - RNA, 19 nt, Artificial Sequence
  Description of Artificial Sequence: Synthetic oligonucleotide
  Sense strand starting at position 3933 of SEQ ID NO: 1883886
aggugugagugucccuuaa

SEQ ID NO: 2223787 - RNA, 19 nt, Artificial Sequence
  Description of Artificial Sequence: Synthetic oligonucleotide
  Antisense strand to SEQ ID NO: 2223786
uuaagggacacucacaccu

SEQ ID NO: 2223788 - RNA, 19 nt, Artificial Sequence
  Description of Artificial Sequence: Synthetic oligonucleotide
  Sense strand starting at position 3935 of SEQ ID NO: 1883886
gugugagugucccuuaaau

SEQ ID NO: 2223789 - RNA, 19 nt, Artificial Sequence
  Description of Artificial Sequence: Synthetic oligonucleotide
  Antisense strand to SEQ ID NO: 2223788
auuuaagggacacucacac

SEQ ID NO: 2223790 - RNA, 19 nt, Artificial Sequence
  Description of Artificial Sequence: Synthetic oligonucleotide
  Sense strand starting at position 3937 of SEQ ID NO: 1883886
gugagugucccuuaaaugc

SEQ ID NO: 2223791 - RNA, 19 nt, Artificial Sequence
  Description of Artificial Sequence: Synthetic oligonucleotide
  Antisense strand to SEQ ID NO: 2223790
gcauuuaagggacacucac

SEQ ID NO: 2223792 - RNA, 19 nt, Artificial Sequence
  Description of Artificial Sequence: Synthetic oligonucleotide
  Sense strand starting at position 3950 of SEQ ID NO: 1883886
aaaugcuucugcgaggcuu

SEQ ID NO: 2223793 - RNA, 19 nt, Artificial Sequence
  Description of Artificial Sequence: Synthetic oligonucleotide
  Antisense strand to SEQ ID NO: 2223792
aagccucgcagaagcauuu

SEQ ID NO: 2223794 - RNA, 19 nt, Artificial Sequence
  Description of Artificial Sequence: Synthetic oligonucleotide
  Sense strand starting at position 3967 of SEQ ID NO: 1883886
uuagcuuacuccugcaaug

SEQ ID NO: 2223795 - RNA, 19 nt, Artificial Sequence
  Description of Artificial Sequence: Synthetic oligonucleotide
  Antisense strand to SEQ ID NO: 2223794
cauugcaggaguaagcuaa

SEQ ID NO: 2223796 - RNA, 19 nt, Artificial Sequence
  Description of Artificial Sequence: Synthetic oligonucleotide
  Sense strand starting at position 3977 of SEQ ID NO: 1883886
ccugcaaugucugugccua

SEQ ID NO: 2223797 - RNA, 19 nt, Artificial Sequence
  Description of Artificial Sequence: Synthetic oligonucleotide
  Antisense strand to SEQ ID NO: 2223796
uaggcacagacauugcagg

SEQ ID NO: 2223798 - RNA, 19 nt, Artificial Sequence
  Description of Artificial Sequence: Synthetic oligonucleotide
  Sense strand starting at position 3978 of SEQ ID NO: 1883886
cugcaaugucugugccuau

SEQ ID NO: 2223799 - RNA, 19 nt, Artificial Sequence
  Description of Artificial Sequence: Synthetic oligonucleotide
  Antisense strand to SEQ ID NO: 2223798
auaggcacagacauugcag

SEQ ID NO: 2223800 - RNA, 19 nt, Artificial Sequence
  Description of Artificial Sequence: Synthetic oligonucleotide
  Sense strand starting at position 3979 of SEQ ID NO: 1883886
ugcaaugucugugccuauu

SEQ ID NO: 2223801 - RNA, 19 nt, Artificial Sequence
  Description of Artificial Sequence: Synthetic oligonucleotide
  Antisense strand to SEQ ID NO: 2223800
aauaggcacagacauugca

SEQ ID NO: 2223802 - RNA, 19 nt, Artificial Sequence
  Description of Artificial Sequence: Synthetic oligonucleotide
  Sense strand starting at position 3982 of SEQ ID NO: 1883886
aaugucugugccuauuagu

SEQ ID NO: 2223803 - RNA, 19 nt, Artificial Sequence
  Description of Artificial Sequence: Synthetic oligonucleotide
  Antisense strand to SEQ ID NO: 2223802
acuaauaggcacagacauu

SEQ ID NO: 2223804 - RNA, 19 nt, Artificial Sequence
  Description of Artificial Sequence: Synthetic oligonucleotide
  Sense strand starting at position 30 of SEQ ID NO: 1883887
gccauaaauccugaucgca

SEQ ID NO: 2223805 - RNA, 19 nt, Artificial Sequence
  Description of Artificial Sequence: Synthetic oligonucleotide
  Antisense strand to SEQ ID NO: 2223804
ugcgaucaggauuuauggc

SEQ ID NO: 2223806 - RNA, 19 nt, Artificial Sequence
  Description of Artificial Sequence: Synthetic oligonucleotide
  Sense strand starting at position 39 of SEQ ID NO: 1883887
ccugaucgcauagaaauga

SEQ ID NO: 2223807 - RNA, 19 nt, Artificial Sequence
  Description of Artificial Sequence: Synthetic oligonucleotide
  Antisense strand to SEQ ID NO: 2223806
ucauuucuaugcgaucagg

SEQ ID NO: 2223808 - RNA, 19 nt, Artificial Sequence
  Description of Artificial Sequence: Synthetic oligonucleotide
  Sense strand starting at position 177 of SEQ ID NO: 1883887
ccaguaacacuggagucua

SEQ ID NO: 2223809 - RNA, 19 nt, Artificial Sequence
  Description of Artificial Sequence: Synthetic oligonucleotide
  Antisense strand to SEQ ID NO: 2223808
uagacuccaguguuacugg

SEQ ID NO: 2223810 - RNA, 19 nt, Artificial Sequence
  Description of Artificial Sequence: Synthetic oligonucleotide
  Sense strand starting at position 185 of SEQ ID NO: 1883887
acuggagucuaauuacuau

SEQ ID NO: 2223811 - RNA, 19 nt, Artificial Sequence
  Description of Artificial Sequence: Synthetic oligonucleotide
  Antisense strand to SEQ ID NO: 2223810
auaguaauuagacuccagu

SEQ ID NO: 2223812 - RNA, 19 nt, Artificial Sequence
  Description of Artificial Sequence: Synthetic oligonucleotide
  Sense strand starting at position 191 of SEQ ID NO: 1883887
gucuaauuacuauagucua

SEQ ID NO: 2223813 - RNA, 19 nt, Artificial Sequence
  Description of Artificial Sequence: Synthetic oligonucleotide
  Antisense strand to SEQ ID NO: 2223812
uagacuauaguaauuagac

SEQ ID NO: 2223814 - RNA, 19 nt, Artificial Sequence
  Description of Artificial Sequence: Synthetic oligonucleotide
  Sense strand starting at position 239 of SEQ ID NO: 1883887
cuugcaaggccugagaagu

SEQ ID NO: 2223815 - RNA, 19 nt, Artificial Sequence
  Description of Artificial Sequence: Synthetic oligonucleotide
  Antisense strand to SEQ ID NO: 2223814
acuucucaggccuugcaag

SEQ ID NO: 2223816 - RNA, 19 nt, Artificial Sequence
  Description of Artificial Sequence: Synthetic oligonucleotide
  Sense strand starting at position 462 of SEQ ID NO: 1883887
uuuguuaagccaugaccaa

SEQ ID NO: 2223817 - RNA, 19 nt, Artificial Sequence
  Description of Artificial Sequence: Synthetic oligonucleotide
  Antisense strand to SEQ ID NO: 2223816
uuggucauggcuuaacaaa

SEQ ID NO: 2223818 - RNA, 19 nt, Artificial Sequence
  Description of Artificial Sequence: Synthetic oligonucleotide
  Sense strand starting at position 463 of SEQ ID NO: 1883887
uuguuaagccaugaccaaa

SEQ ID NO: 2223819 - RNA, 19 nt, Artificial Sequence
  Description of Artificial Sequence: Synthetic oligonucleotide
  Antisense strand to SEQ ID NO: 2223818
uuuggucauggcuuaacaa

SEQ ID NO: 2223820 - RNA, 19 nt, Artificial Sequence
  Description of Artificial Sequence: Synthetic oligonucleotide
  Sense strand starting at position 886 of SEQ ID NO: 1883887
accacaugucugcacuuau

SEQ ID NO: 2223821 - RNA, 19 nt, Artificial Sequence
  Description of Artificial Sequence: Synthetic oligonucleotide
  Antisense strand to SEQ ID NO: 2223820
auaagugcagacauguggu

SEQ ID NO: 2223822 - RNA, 19 nt, Artificial Sequence
  Description of Artificial Sequence: Synthetic oligonucleotide
  Sense strand starting at position 909 of SEQ ID NO: 1883887
gggagccauuuauagauau

SEQ ID NO: 2223823 - RNA, 19 nt, Artificial Sequence
  Description of Artificial Sequence: Synthetic oligonucleotide
  Antisense strand to SEQ ID NO: 2223822
auaucuauaaauggcuccc

SEQ ID NO: 2223824 - RNA, 19 nt, Artificial Sequence
  Description of Artificial Sequence: Synthetic oligonucleotide
  Sense strand starting at position 1654 of SEQ ID NO: 1883887
gcagaacaugguugcauuu

SEQ ID NO: 2223825 - RNA, 19 nt, Artificial Sequence
  Description of Artificial Sequence: Synthetic oligonucleotide
  Antisense strand to SEQ ID NO: 2223824
aaaugcaaccauguucugc

SEQ ID NO: 2223826 - RNA, 19 nt, Artificial Sequence
  Description of Artificial Sequence: Synthetic oligonucleotide
  Sense strand starting at position 1861 of SEQ ID NO: 1883887
aggaauauuuccugacauc

SEQ ID NO: 2223827 - RNA, 19 nt, Artificial Sequence
  Description of Artificial Sequence: Synthetic oligonucleotide
  Antisense strand to SEQ ID NO: 2223826
gaugucaggaaauauuccu

SEQ ID NO: 2223828 - RNA, 19 nt, Artificial Sequence
  Description of Artificial Sequence: Synthetic oligonucleotide
  Sense strand starting at position 1878 of SEQ ID NO: 1883887
uccagagaauuguuuccua

SEQ ID NO: 2223829 - RNA, 19 nt, Artificial Sequence
  Description of Artificial Sequence: Synthetic oligonucleotide
  Antisense strand to SEQ ID NO: 2223828
uaggaaacaauucucugga

SEQ ID NO: 2223830 - RNA, 19 nt, Artificial Sequence
  Description of Artificial Sequence: Synthetic oligonucleotide
  Sense strand starting at position 1881 of SEQ ID NO: 1883887
agagaauuguuuccuauaa

SEQ ID NO: 2223831 - RNA, 19 nt, Artificial Sequence
  Description of Artificial Sequence: Synthetic oligonucleotide
  Antisense strand to SEQ ID NO: 2223830
uuauaggaaacaauucucu

SEQ ID NO: 2223832 - RNA, 19 nt, Artificial Sequence
  Description of Artificial Sequence: Synthetic oligonucleotide
  Sense strand starting at position 1911 of SEQ ID NO: 1883887
ggugcuuaccucuaaguga

SEQ ID NO: 2223833 - RNA, 19 nt, Artificial Sequence
  Description of Artificial Sequence: Synthetic oligonucleotide
  Antisense strand to SEQ ID NO: 2223832
ucacuuagagguaagcacc

SEQ ID NO: 2223834 - RNA, 19 nt, Artificial Sequence
  Description of Artificial Sequence: Synthetic oligonucleotide
  Sense strand starting at position 1924 of SEQ ID NO: 1883887
aagugaugucuaggacaug

SEQ ID NO: 2223835 - RNA, 19 nt, Artificial Sequence
  Description of Artificial Sequence: Synthetic oligonucleotide
  Antisense strand to SEQ ID NO: 2223834
cauguccuagacaucacuu

SEQ ID NO: 2223836 - RNA, 19 nt, Artificial Sequence
  Description of Artificial Sequence: Synthetic oligonucleotide
  Sense strand starting at position 1988 of SEQ ID NO: 1883887
gggagaaaccauugcccuu

SEQ ID NO: 2223837 - RNA, 19 nt, Artificial Sequence
  Description of Artificial Sequence: Synthetic oligonucleotide
  Antisense strand to SEQ ID NO: 2223836
aagggcaaugguuucuccc

SEQ ID NO: 2223838 - RNA, 19 nt, Artificial Sequence
  Description of Artificial Sequence: Synthetic oligonucleotide
  Sense strand starting at position 2319 of SEQ ID NO: 1883887
guagcccuuccugaaaugu

SEQ ID NO: 2223839 - RNA, 19 nt, Artificial Sequence
  Description of Artificial Sequence: Synthetic oligonucleotide
  Antisense strand to SEQ ID NO: 2223838
acauuucaggaagggcuac

SEQ ID NO: 2223840 - RNA, 19 nt, Artificial Sequence
  Description of Artificial Sequence: Synthetic oligonucleotide
  Sense strand starting at position 2374 of SEQ ID NO: 1883887
agugucugaaucugauaug

SEQ ID NO: 2223841 - RNA, 19 nt, Artificial Sequence
  Description of Artificial Sequence: Synthetic oligonucleotide
  Antisense strand to SEQ ID NO: 2223840
cauaucagauucagacacu

SEQ ID NO: 2223842 - RNA, 19 nt, Artificial Sequence
  Description of Artificial Sequence: Synthetic oligonucleotide
  Sense strand starting at position 2600 of SEQ ID NO: 1883887
aaaucugguccguauacaa

SEQ ID NO: 2223843 - RNA, 19 nt, Artificial Sequence
  Description of Artificial Sequence: Synthetic oligonucleotide
  Antisense strand to SEQ ID NO: 2223842
uuguauacggaccagauuu

SEQ ID NO: 2223844 - RNA, 19 nt, Artificial Sequence
  Description of Artificial Sequence: Synthetic oligonucleotide
  Sense strand starting at position 2607 of SEQ ID NO: 1883887
guccguauacaacacgaaa

SEQ ID NO: 2223845 - RNA, 19 nt, Artificial Sequence
  Description of Artificial Sequence: Synthetic oligonucleotide
  Antisense strand to SEQ ID NO: 2223844
uuucguguuguauacggac

SEQ ID NO: 2223846 - RNA, 19 nt, Artificial Sequence
  Description of Artificial Sequence: Synthetic oligonucleotide
  Sense strand starting at position 2869 of SEQ ID NO: 1883887
ggcuuaauaccugcgcgau

SEQ ID NO: 2223847 - RNA, 19 nt, Artificial Sequence
  Description of Artificial Sequence: Synthetic oligonucleotide
  Antisense strand to SEQ ID NO: 2223846
aucgcgcagguauuaagcc

SEQ ID NO: 2223848 - RNA, 19 nt, Artificial Sequence
  Description of Artificial Sequence: Synthetic oligonucleotide
  Sense strand starting at position 2873 of SEQ ID NO: 1883887
uaauaccugcgcgaugaaa

SEQ ID NO: 2223849 - RNA, 19 nt, Artificial Sequence
  Description of Artificial Sequence: Synthetic oligonucleotide
  Antisense strand to SEQ ID NO: 2223848
uuucaucgcgcagguauua

SEQ ID NO: 2223850 - RNA, 19 nt, Artificial Sequence
  Description of Artificial Sequence: Synthetic oligonucleotide
  Sense strand starting at position 3030 of SEQ ID NO: 1883887
acauguaucuuaguaugaa

SEQ ID NO: 2223851 - RNA, 19 nt, Artificial Sequence
  Description of Artificial Sequence: Synthetic oligonucleotide
  Antisense strand to SEQ ID NO: 2223850
uucauacuaagauacaugu

SEQ ID NO: 2223852 - RNA, 19 nt, Artificial Sequence
  Description of Artificial Sequence: Synthetic oligonucleotide
  Sense strand starting at position 3033 of SEQ ID NO: 1883887
uguaucuuaguaugaauca

SEQ ID NO: 2223853 - RNA, 19 nt, Artificial Sequence
  Description of Artificial Sequence: Synthetic oligonucleotide
  Antisense strand to SEQ ID NO: 2223852
ugauucauacuaagauaca

SEQ ID NO: 2223854 - RNA, 19 nt, Artificial Sequence
  Description of Artificial Sequence: Synthetic oligonucleotide
  Sense strand starting at position 3115 of SEQ ID NO: 1883887
gagcgaguccucugaagag

SEQ ID NO: 2223855 - RNA, 19 nt, Artificial Sequence
  Description of Artificial Sequence: Synthetic oligonucleotide
  Antisense strand to SEQ ID NO: 2223854
cucuucagaggacucgcuc

SEQ ID NO: 2223856 - RNA, 19 nt, Artificial Sequence
  Description of Artificial Sequence: Synthetic oligonucleotide
  Sense strand starting at position 3119 of SEQ ID NO: 1883887
gaguccucugaagaguguu

SEQ ID NO: 2223857 - RNA, 19 nt, Artificial Sequence
  Description of Artificial Sequence: Synthetic oligonucleotide
  Antisense strand to SEQ ID NO: 2223856
aacacucuucagaggacuc

SEQ ID NO: 2223858 - RNA, 19 nt, Artificial Sequence
  Description of Artificial Sequence: Synthetic oligonucleotide
  Sense strand starting at position 3199 of SEQ ID NO: 1883887
gaugaagcauugucggacu

SEQ ID NO: 2223859 - RNA, 19 nt, Artificial Sequence
  Description of Artificial Sequence: Synthetic oligonucleotide
  Antisense strand to SEQ ID NO: 2223858
aguccgacaaugcuucauc

SEQ ID NO: 2223860 - RNA, 19 nt, Artificial Sequence
  Description of Artificial Sequence: Synthetic oligonucleotide
  Sense strand starting at position 3230 of SEQ ID NO: 1883887
cgaggcucucuuuagggaa

SEQ ID NO: 2223861 - RNA, 19 nt, Artificial Sequence
  Description of Artificial Sequence: Synthetic oligonucleotide
  Antisense strand to SEQ ID NO: 2223860
uucccuaaagagagccucg

SEQ ID NO: 2223862 - RNA, 19 nt, Artificial Sequence
  Description of Artificial Sequence: Synthetic oligonucleotide
  Sense strand starting at position 3293 of SEQ ID NO: 1883887
cacaguuacucagugauug

SEQ ID NO: 2223863 - RNA, 19 nt, Artificial Sequence
  Description of Artificial Sequence: Synthetic oligonucleotide
  Antisense strand to SEQ ID NO: 2223862
caaucacugaguaacugug

SEQ ID NO: 2223864 - RNA, 19 nt, Artificial Sequence
  Description of Artificial Sequence: Synthetic oligonucleotide
  Sense strand starting at position 3301 of SEQ ID NO: 1883887
cucagugauugcccaucaa

SEQ ID NO: 2223865 - RNA, 19 nt, Artificial Sequence
  Description of Artificial Sequence: Synthetic oligonucleotide
  Antisense strand to SEQ ID NO: 2223864
uugaugggcaaucacugag

SEQ ID NO: 2223866 - RNA, 19 nt, Artificial Sequence
  Description of Artificial Sequence: Synthetic oligonucleotide
  Sense strand starting at position 3305 of SEQ ID NO: 1883887
gugauugcccaucaagauu

SEQ ID NO: 2223867 - RNA, 19 nt, Artificial Sequence
  Description of Artificial Sequence: Synthetic oligonucleotide
  Antisense strand to SEQ ID NO: 2223866
aaucuugaugggcaaucac

SEQ ID NO: 2223868 - RNA, 19 nt, Artificial Sequence
  Description of Artificial Sequence: Synthetic oligonucleotide
  Sense strand starting at position 3338 of SEQ ID NO: 1883887
ggauucuauuagguaauau

SEQ ID NO: 2223869 - RNA, 19 nt, Artificial Sequence
  Description of Artificial Sequence: Synthetic oligonucleotide
  Antisense strand to SEQ ID NO: 2223868
auauuaccuaauagaaucc

SEQ ID NO: 2223870 - RNA, 19 nt, Artificial Sequence
  Description of Artificial Sequence: Synthetic oligonucleotide
  Sense strand starting at position 3387 of SEQ ID NO: 1883887
caguguaauugagcuauag

SEQ ID NO: 2223871 - RNA, 19 nt, Artificial Sequence
  Description of Artificial Sequence: Synthetic oligonucleotide
  Antisense strand to SEQ ID NO: 2223870
cuauagcucaauuacacug

SEQ ID NO: 2223872 - RNA, 19 nt, Artificial Sequence
  Description of Artificial Sequence: Synthetic oligonucleotide
  Sense strand starting at position 3429 of SEQ ID NO: 1883887
ucagguuuaucaucaguua

SEQ ID NO: 2223873 - RNA, 19 nt, Artificial Sequence
  Description of Artificial Sequence: Synthetic oligonucleotide
  Antisense strand to SEQ ID NO: 2223872
uaacugaugauaaaccuga

SEQ ID NO: 2223874 - RNA, 19 nt, Artificial Sequence
  Description of Artificial Sequence: Synthetic oligonucleotide
  Sense strand starting at position 3584 of SEQ ID NO: 1883887
ccuccaaagcuugaguuua

SEQ ID NO: 2223875 - RNA, 19 nt, Artificial Sequence
  Description of Artificial Sequence: Synthetic oligonucleotide
  Antisense strand to SEQ ID NO: 2223874
uaaacucaagcuuuggagg

SEQ ID NO: 2223876 - RNA, 19 nt, Artificial Sequence
  Description of Artificial Sequence: Synthetic oligonucleotide
  Sense strand starting at position 3586 of SEQ ID NO: 1883887
uccaaagcuugaguuuaua

SEQ ID NO: 2223877 - RNA, 19 nt, Artificial Sequence
  Description of Artificial Sequence: Synthetic oligonucleotide
  Antisense strand to SEQ ID NO: 2223876
uauaaacucaagcuuugga

SEQ ID NO: 2223878 - RNA, 19 nt, Artificial Sequence
  Description of Artificial Sequence: Synthetic oligonucleotide
  Sense strand starting at position 3589 of SEQ ID NO: 1883887
aaagcuugaguuuauaugu

SEQ ID NO: 2223879 - RNA, 19 nt, Artificial Sequence
  Description of Artificial Sequence: Synthetic oligonucleotide
  Antisense strand to SEQ ID NO: 2223878
acauauaaacucaagcuuu

SEQ ID NO: 2223880 - RNA, 19 nt, Artificial Sequence
  Description of Artificial Sequence: Synthetic oligonucleotide
  Sense strand starting at position 3805 of SEQ ID NO: 1883887
aguagugucauagaggaca

SEQ ID NO: 2223881 - RNA, 19 nt, Artificial Sequence
  Description of Artificial Sequence: Synthetic oligonucleotide
  Antisense strand to SEQ ID NO: 2223880
uguccucuaugacacuacu

SEQ ID NO: 2223882 - RNA, 19 nt, Artificial Sequence
  Description of Artificial Sequence: Synthetic oligonucleotide
  Sense strand starting at position 3917 of SEQ ID NO: 1883887
uuguguugugaccaggaaa

SEQ ID NO: 2223883 - RNA, 19 nt, Artificial Sequence
  Description of Artificial Sequence: Synthetic oligonucleotide
  Antisense strand to SEQ ID NO: 2223882
uuuccuggucacaacacaa

SEQ ID NO: 2223884 - RNA, 19 nt, Artificial Sequence
  Description of Artificial Sequence: Synthetic oligonucleotide
  Sense strand starting at position 101 of SEQ ID NO: 1883888
uccagagguugcuuuauuu

SEQ ID NO: 2223885 - RNA, 19 nt, Artificial Sequence
  Description of Artificial Sequence: Synthetic oligonucleotide
  Antisense strand to SEQ ID NO: 2223884
aaauaaagcaaccucugga

SEQ ID NO: 2223886 - RNA, 19 nt, Artificial Sequence
  Description of Artificial Sequence: Synthetic oligonucleotide
  Sense strand starting at position 194 of SEQ ID NO: 1883888
accaauuaucaggacguau

SEQ ID NO: 2223887 - RNA, 19 nt, Artificial Sequence
  Description of Artificial Sequence: Synthetic oligonucleotide
  Antisense strand to SEQ ID NO: 2223886
auacguccugauaauuggu

SEQ ID NO: 2223888 - RNA, 19 nt, Artificial Sequence
  Description of Artificial Sequence: Synthetic oligonucleotide
  Sense strand starting at position 196 of SEQ ID NO: 1883888
caauuaucaggacguauca

SEQ ID NO: 2223889 - RNA, 19 nt, Artificial Sequence
  Description of Artificial Sequence: Synthetic oligonucleotide
  Antisense strand to SEQ ID NO: 2223888
ugauacguccugauaauug

SEQ ID NO: 2223890 - RNA, 19 nt, Artificial Sequence
  Description of Artificial Sequence: Synthetic oligonucleotide
  Sense strand starting at position 525 of SEQ ID NO: 1883888
uagagugaguucuugguaa

SEQ ID NO: 2223891 - RNA, 19 nt, Artificial Sequence
  Description of Artificial Sequence: Synthetic oligonucleotide
  Antisense strand to SEQ ID NO: 2223890
uuaccaagaacucacucua

SEQ ID NO: 2223892 - RNA, 19 nt, Artificial Sequence
  Description of Artificial Sequence: Synthetic oligonucleotide
  Sense strand starting at position 664 of SEQ ID NO: 1883888
guccuuuaugccuaagaca

SEQ ID NO: 2223893 - RNA, 19 nt, Artificial Sequence
  Description of Artificial Sequence: Synthetic oligonucleotide
  Antisense strand to SEQ ID NO: 2223892
ugucuuaggcauaaaggac

SEQ ID NO: 2223894 - RNA, 19 nt, Artificial Sequence
  Description of Artificial Sequence: Synthetic oligonucleotide
  Sense strand starting at position 739 of SEQ ID NO: 1883888
uuguguaaccaacagacuu

SEQ ID NO: 2223895 - RNA, 19 nt, Artificial Sequence
  Description of Artificial Sequence: Synthetic oligonucleotide
  Antisense strand to SEQ ID NO: 2223894
aagucuguugguuacacaa

SEQ ID NO: 2223896 - RNA, 19 nt, Artificial Sequence
  Description of Artificial Sequence: Synthetic oligonucleotide
  Sense strand starting at position 842 of SEQ ID NO: 1883888
acauguggaccgugagaug

SEQ ID NO: 2223897 - RNA, 19 nt, Artificial Sequence
  Description of Artificial Sequence: Synthetic oligonucleotide
  Antisense strand to SEQ ID NO: 2223896
caucucacgguccacaugu

SEQ ID NO: 2223898 - RNA, 19 nt, Artificial Sequence
  Description of Artificial Sequence: Synthetic oligonucleotide
  Sense strand starting at position 931 of SEQ ID NO: 1883888
acuccugauuggucccaga

SEQ ID NO: 2223899 - RNA, 19 nt, Artificial Sequence
  Description of Artificial Sequence: Synthetic oligonucleotide
  Antisense strand to SEQ ID NO: 2223898
ucugggaccaaucaggagu

SEQ ID NO: 2223900 - RNA, 19 nt, Artificial Sequence
  Description of Artificial Sequence: Synthetic oligonucleotide
  Sense strand starting at position 1217 of SEQ ID NO: 1883888
cauugaugagacuguaaca

SEQ ID NO: 2223901 - RNA, 19 nt, Artificial Sequence
  Description of Artificial Sequence: Synthetic oligonucleotide
  Antisense strand to SEQ ID NO: 2223900
uguuacagucucaucaaug

SEQ ID NO: 2223902 - RNA, 19 nt, Artificial Sequence
  Description of Artificial Sequence: Synthetic oligonucleotide
  Sense strand starting at position 1264 of SEQ ID NO: 1883888
aaguuuggaugguugaaac

SEQ ID NO: 2223903 - RNA, 19 nt, Artificial Sequence
  Description of Artificial Sequence: Synthetic oligonucleotide
  Antisense strand to SEQ ID NO: 2223902
guuucaaccauccaaacuu

SEQ ID NO: 2223904 - RNA, 19 nt, Artificial Sequence
  Description of Artificial Sequence: Synthetic oligonucleotide
  Sense strand starting at position 1274 of SEQ ID NO: 1883888
gguugaaacucucuggcaa

SEQ ID NO: 2223905 - RNA, 19 nt, Artificial Sequence
  Description of Artificial Sequence: Synthetic oligonucleotide
  Antisense strand to SEQ ID NO: 2223904
uugccagagaguuucaacc

SEQ ID NO: 2223906 - RNA, 19 nt, Artificial Sequence
  Description of Artificial Sequence: Synthetic oligonucleotide
  Sense strand starting at position 1275 of SEQ ID NO: 1883888
guugaaacucucuggcaaa

SEQ ID NO: 2223907 - RNA, 19 nt, Artificial Sequence
  Description of Artificial Sequence: Synthetic oligonucleotide
  Antisense strand to SEQ ID NO: 2223906
uuugccagagaguuucaac

SEQ ID NO: 2223908 - RNA, 19 nt, Artificial Sequence
  Description of Artificial Sequence: Synthetic oligonucleotide
  Sense strand starting at position 1401 of SEQ ID NO: 1883888
uggcucugaccagagcaaa

SEQ ID NO: 2223909 - RNA, 19 nt, Artificial Sequence
  Description of Artificial Sequence: Synthetic oligonucleotide
  Antisense strand to SEQ ID NO: 2223908
uuugcucuggucagagcca

SEQ ID NO: 2223910 - RNA, 19 nt, Artificial Sequence
  Description of Artificial Sequence: Synthetic oligonucleotide
  Sense strand starting at position 1422 of SEQ ID NO: 1883888
augagaacagucugagcuu

SEQ ID NO: 2223911 - RNA, 19 nt, Artificial Sequence
  Description of Artificial Sequence: Synthetic oligonucleotide
  Antisense strand to SEQ ID NO: 2223910
aagcucagacuguucucau

SEQ ID NO: 2223912 - RNA, 19 nt, Artificial Sequence
  Description of Artificial Sequence: Synthetic oligonucleotide
  Sense strand starting at position 1536 of SEQ ID NO: 1883888
uggaaagcauuugauauau

SEQ ID NO: 2223913 - RNA, 19 nt, Artificial Sequence
  Description of Artificial Sequence: Synthetic oligonucleotide
  Antisense strand to SEQ ID NO: 2223912
auauaucaaaugcuuucca

SEQ ID NO: 2223914 - RNA, 19 nt, Artificial Sequence
  Description of Artificial Sequence: Synthetic oligonucleotide
  Sense strand starting at position 1682 of SEQ ID NO: 1883888
gagcaaguuagagacaguu

SEQ ID NO: 2223915 - RNA, 19 nt, Artificial Sequence
  Description of Artificial Sequence: Synthetic oligonucleotide
  Antisense strand to SEQ ID NO: 2223914
aacugucucuaacuugcuc

SEQ ID NO: 2223916 - RNA, 19 nt, Artificial Sequence
  Description of Artificial Sequence: Synthetic oligonucleotide
  Sense strand starting at position 1684 of SEQ ID NO: 1883888
gcaaguuagagacaguuaa

SEQ ID NO: 2223917 - RNA, 19 nt, Artificial Sequence
  Description of Artificial Sequence: Synthetic oligonucleotide
  Antisense strand to SEQ ID NO: 2223916
uuaacugucucuaacuugc

SEQ ID NO: 2223918 - RNA, 19 nt, Artificial Sequence
  Description of Artificial Sequence: Synthetic oligonucleotide
  Sense strand starting at position 1860 of SEQ ID NO: 1883888
gcaugaaggguccaucauu

SEQ ID NO: 2223919 - RNA, 19 nt, Artificial Sequence
  Description of Artificial Sequence: Synthetic oligonucleotide
  Antisense strand to SEQ ID NO: 2223918
aaugauggacccuucaugc

SEQ ID NO: 2223920 - RNA, 19 nt, Artificial Sequence
  Description of Artificial Sequence: Synthetic oligonucleotide
  Sense strand starting at position 1973 of SEQ ID NO: 1883888
ggcuccugcguucuuuauu

SEQ ID NO: 2223921 - RNA, 19 nt, Artificial Sequence
  Description of Artificial Sequence: Synthetic oligonucleotide
  Antisense strand to SEQ ID NO: 2223920
aauaaagaacgcaggagcc

SEQ ID NO: 2223922 - RNA, 19 nt, Artificial Sequence
  Description of Artificial Sequence: Synthetic oligonucleotide
  Sense strand starting at position 2018 of SEQ ID NO: 1883888
ggagaugacagcugccaau

SEQ ID NO: 2223923 - RNA, 19 nt, Artificial Sequence
  Description of Artificial Sequence: Synthetic oligonucleotide
  Antisense strand to SEQ ID NO: 2223922
auuggcagcugucaucucc

SEQ ID NO: 2223924 - RNA, 19 nt, Artificial Sequence
  Description of Artificial Sequence: Synthetic oligonucleotide
  Sense strand starting at position 2129 of SEQ ID NO: 1883888
cugugaaugccagaggacu

SEQ ID NO: 2223925 - RNA, 19 nt, Artificial Sequence
  Description of Artificial Sequence: Synthetic oligonucleotide
  Antisense strand to SEQ ID NO: 2223924
aguccucuggcauucacag

SEQ ID NO: 2223926 - RNA, 19 nt, Artificial Sequence
  Description of Artificial Sequence: Synthetic oligonucleotide
  Sense strand starting at position 2131 of SEQ ID NO: 1883888
gugaaugccagaggacuuu

SEQ ID NO: 2223927 - RNA, 19 nt, Artificial Sequence
  Description of Artificial Sequence: Synthetic oligonucleotide
  Antisense strand to SEQ ID NO: 2223926
aaaguccucuggcauucac

SEQ ID NO: 2223928 - RNA, 19 nt, Artificial Sequence
  Description of Artificial Sequence: Synthetic oligonucleotide
  Sense strand starting at position 2175 of SEQ ID NO: 1883888
cuugauuccuuaguugaaa

SEQ ID NO: 2223929 - RNA, 19 nt, Artificial Sequence
  Description of Artificial Sequence: Synthetic oligonucleotide
  Antisense strand to SEQ ID NO: 2223928
uuucaacuaaggaaucaag

SEQ ID NO: 2223930 - RNA, 19 nt, Artificial Sequence
  Description of Artificial Sequence: Synthetic oligonucleotide
  Sense strand starting at position 2245 of SEQ ID NO: 1883888
gaggcaaaguuauuauuag

SEQ ID NO: 2223931 - RNA, 19 nt, Artificial Sequence
  Description of Artificial Sequence: Synthetic oligonucleotide
  Antisense strand to SEQ ID NO: 2223930
cuaauaauaacuuugccuc

SEQ ID NO: 2223932 - RNA, 19 nt, Artificial Sequence
  Description of Artificial Sequence: Synthetic oligonucleotide
  Sense strand starting at position 2254 of SEQ ID NO: 1883888
uuauuauuaggguggucau

SEQ ID NO: 2223933 - RNA, 19 nt, Artificial Sequence
  Description of Artificial Sequence: Synthetic oligonucleotide
  Antisense strand to SEQ ID NO: 2223932
augaccacccuaauaauaa

SEQ ID NO: 2223934 - RNA, 19 nt, Artificial Sequence
  Description of Artificial Sequence: Synthetic oligonucleotide
  Sense strand starting at position 2255 of SEQ ID NO: 1883888
uauuauuaggguggucauu

SEQ ID NO: 2223935 - RNA, 19 nt, Artificial Sequence
  Description of Artificial Sequence: Synthetic oligonucleotide
  Antisense strand to SEQ ID NO: 2223934
aaugaccacccuaauaaua

SEQ ID NO: 2223936 - RNA, 19 nt, Artificial Sequence
  Description of Artificial Sequence: Synthetic oligonucleotide
  Sense strand starting at position 2475 of SEQ ID NO: 1883888
ucugacuuguuuccuugaa

SEQ ID NO: 2223937 - RNA, 19 nt, Artificial Sequence
  Description of Artificial Sequence: Synthetic oligonucleotide
  Antisense strand to SEQ ID NO: 2223936
uucaaggaaacaagucaga

SEQ ID NO: 2223938 - RNA, 19 nt, Artificial Sequence
  Description of Artificial Sequence: Synthetic oligonucleotide
  Sense strand starting at position 2513 of SEQ ID NO: 1883888
gucugagaucauggauaca

SEQ ID NO: 2223939 - RNA, 19 nt, Artificial Sequence
  Description of Artificial Sequence: Synthetic oligonucleotide
  Antisense strand to SEQ ID NO: 2223938
uguauccaugaucucagac

SEQ ID NO: 2223940 - RNA, 19 nt, Artificial Sequence
  Description of Artificial Sequence: Synthetic oligonucleotide
  Sense strand starting at position 2753 of SEQ ID NO: 1883888
uuggaauuccagggccuaa

SEQ ID NO: 2223941 - RNA, 19 nt, Artificial Sequence
  Description of Artificial Sequence: Synthetic oligonucleotide
  Antisense strand to SEQ ID NO: 2223940
uuaggcccuggaauuccaa

SEQ ID NO: 2223942 - RNA, 19 nt, Artificial Sequence
  Description of Artificial Sequence: Synthetic oligonucleotide
  Sense strand starting at position 2942 of SEQ ID NO: 1883888
uaccuuaaaugguucgaaa

SEQ ID NO: 2223943 - RNA, 19 nt, Artificial Sequence
  Description of Artificial Sequence: Synthetic oligonucleotide
  Antisense strand to SEQ ID NO: 2223942
uuucgaaccauuuaaggua

SEQ ID NO: 2223944 - RNA, 19 nt, Artificial Sequence
  Description of Artificial Sequence: Synthetic oligonucleotide
  Sense strand starting at position 2944 of SEQ ID NO: 1883888
ccuuaaaugguucgaaaua

SEQ ID NO: 2223945 - RNA, 19 nt, Artificial Sequence
  Description of Artificial Sequence: Synthetic oligonucleotide
  Antisense strand to SEQ ID NO: 2223944
uauuucgaaccauuuaagg

SEQ ID NO: 2223946 - RNA, 19 nt, Artificial Sequence
  Description of Artificial Sequence: Synthetic oligonucleotide
  Sense strand starting at position 3304 of SEQ ID NO: 1883888
aggguaaccaguuauugcu

SEQ ID NO: 2223947 - RNA, 19 nt, Artificial Sequence
  Description of Artificial Sequence: Synthetic oligonucleotide
  Antisense strand to SEQ ID NO: 2223946
agcaauaacugguuacccu

SEQ ID NO: 2223948 - RNA, 19 nt, Artificial Sequence
  Description of Artificial Sequence: Synthetic oligonucleotide
  Sense strand starting at position 3482 of SEQ ID NO: 1883888
uucuaugaagcaggucaaa

SEQ ID NO: 2223949 - RNA, 19 nt, Artificial Sequence
  Description of Artificial Sequence: Synthetic oligonucleotide
  Antisense strand to SEQ ID NO: 2223948
uuugaccugcuucauagaa

SEQ ID NO: 2223950 - RNA, 19 nt, Artificial Sequence
  Description of Artificial Sequence: Synthetic oligonucleotide
  Sense strand starting at position 3540 of SEQ ID NO: 1883888
gagcuucugcuagauaaga

SEQ ID NO: 2223951 - RNA, 19 nt, Artificial Sequence
  Description of Artificial Sequence: Synthetic oligonucleotide
  Antisense strand to SEQ ID NO: 2223950
ucuuaucuagcagaagcuc

SEQ ID NO: 2223952 - RNA, 19 nt, Artificial Sequence
  Description of Artificial Sequence: Synthetic oligonucleotide
  Sense strand starting at position 3542 of SEQ ID NO: 1883888
gcuucugcuagauaagaug

SEQ ID NO: 2223953 - RNA, 19 nt, Artificial Sequence
  Description of Artificial Sequence: Synthetic oligonucleotide
  Antisense strand to SEQ ID NO: 2223952
caucuuaucuagcagaagc

SEQ ID NO: 2223954 - RNA, 19 nt, Artificial Sequence
  Description of Artificial Sequence: Synthetic oligonucleotide
  Sense strand starting at position 3626 of SEQ ID NO: 1883888
ugguaucuuagaggcaauc

SEQ ID NO: 2223955 - RNA, 19 nt, Artificial Sequence
  Description of Artificial Sequence: Synthetic oligonucleotide
  Antisense strand to SEQ ID NO: 2223954
gauugccucuaagauacca

SEQ ID NO: 2223956 - RNA, 19 nt, Artificial Sequence
  Description of Artificial Sequence: Synthetic oligonucleotide
  Sense strand starting at position 3656 of SEQ ID NO: 1883888
cguugucauuuaucuuauu

SEQ ID NO: 2223957 - RNA, 19 nt, Artificial Sequence
  Description of Artificial Sequence: Synthetic oligonucleotide
  Antisense strand to SEQ ID NO: 2223956
aauaagauaaaugacaacg

SEQ ID NO: 2223958 - RNA, 19 nt, Artificial Sequence
  Description of Artificial Sequence: Synthetic oligonucleotide
  Sense strand starting at position 3705 of SEQ ID NO: 1883888
cgaauucugccugauucug

SEQ ID NO: 2223959 - RNA, 19 nt, Artificial Sequence
  Description of Artificial Sequence: Synthetic oligonucleotide
  Antisense strand to SEQ ID NO: 2223958
cagaaucaggcagaauucg

SEQ ID NO: 2223960 - RNA, 19 nt, Artificial Sequence
  Description of Artificial Sequence: Synthetic oligonucleotide
  Sense strand starting at position 3720 of SEQ ID NO: 1883888
ucugauucccuguaguuua

SEQ ID NO: 2223961 - RNA, 19 nt, Artificial Sequence
  Description of Artificial Sequence: Synthetic oligonucleotide
  Antisense strand to SEQ ID NO: 2223960
uaaacuacagggaaucaga

SEQ ID NO: 2223962 - RNA, 19 nt, Artificial Sequence
  Description of Artificial Sequence: Synthetic oligonucleotide
  Sense strand starting at position 3725 of SEQ ID NO: 1883888
uucccuguaguuuauaauu

SEQ ID NO: 2223963 - RNA, 19 nt, Artificial Sequence
  Description of Artificial Sequence: Synthetic oligonucleotide
  Antisense strand to SEQ ID NO: 2223962
aauuauaaacuacagggaa

SEQ ID NO: 2223964 - RNA, 19 nt, Artificial Sequence
  Description of Artificial Sequence: Synthetic oligonucleotide
  Sense strand starting at position 52 of SEQ ID NO: 1883889
uggccauugaugcagcauu

SEQ ID NO: 2223965 - RNA, 19 nt, Artificial Sequence
  Description of Artificial Sequence: Synthetic oligonucleotide
  Antisense strand to SEQ ID NO: 2223964
aaugcugcaucaauggcca

SEQ ID NO: 2223966 - RNA, 19 nt, Artificial Sequence
  Description of Artificial Sequence: Synthetic oligonucleotide
  Sense strand starting at position 86 of SEQ ID NO: 1883889
aacggauaggucugugaug

SEQ ID NO: 2223967 - RNA, 19 nt, Artificial Sequence
  Description of Artificial Sequence: Synthetic oligonucleotide
  Antisense strand to SEQ ID NO: 2223966
caucacagaccuauccguu

SEQ ID NO: 2223968 - RNA, 19 nt, Artificial Sequence
  Description of Artificial Sequence: Synthetic oligonucleotide
  Sense strand starting at position 87 of SEQ ID NO: 1883889
acggauaggucugugaugu

SEQ ID NO: 2223969 - RNA, 19 nt, Artificial Sequence
  Description of Artificial Sequence: Synthetic oligonucleotide
  Antisense strand to SEQ ID NO: 2223968
acaucacagaccuauccgu

SEQ ID NO: 2223970 - RNA, 19 nt, Artificial Sequence
  Description of Artificial Sequence: Synthetic oligonucleotide
  Sense strand starting at position 88 of SEQ ID NO: 1883889
cggauaggucugugauguu

SEQ ID NO: 2223971 - RNA, 19 nt, Artificial Sequence
  Description of Artificial Sequence: Synthetic oligonucleotide
  Antisense strand to SEQ ID NO: 2223970
aacaucacagaccuauccg

SEQ ID NO: 2223972 - RNA, 19 nt, Artificial Sequence
  Description of Artificial Sequence: Synthetic oligonucleotide
  Sense strand starting at position 152 of SEQ ID NO: 1883889
accagugaugagugauuau

SEQ ID NO: 2223973 - RNA, 19 nt, Artificial Sequence
  Description of Artificial Sequence: Synthetic oligonucleotide
  Antisense strand to SEQ ID NO: 2223972
auaaucacucaucacuggu

SEQ ID NO: 2223974 - RNA, 19 nt, Artificial Sequence
  Description of Artificial Sequence: Synthetic oligonucleotide
  Sense strand starting at position 155 of SEQ ID NO: 1883889
agugaugagugauuaugau

SEQ ID NO: 2223975 - RNA, 19 nt, Artificial Sequence
  Description of Artificial Sequence: Synthetic oligonucleotide
  Antisense strand to SEQ ID NO: 2223974
aucauaaucacucaucacu

SEQ ID NO: 2223976 - RNA, 19 nt, Artificial Sequence
  Description of Artificial Sequence: Synthetic oligonucleotide
  Sense strand starting at position 161 of SEQ ID NO: 1883889
gagugauuaugauuaaucc

SEQ ID NO: 2223977 - RNA, 19 nt, Artificial Sequence
  Description of Artificial Sequence: Synthetic oligonucleotide
  Antisense strand to SEQ ID NO: 2223976
ggauuaaucauaaucacuc

SEQ ID NO: 2223978 - RNA, 19 nt, Artificial Sequence
  Description of Artificial Sequence: Synthetic oligonucleotide
  Sense strand starting at position 188 of SEQ ID NO: 1883889
gcaccugcaguccaagaaa

SEQ ID NO: 2223979 - RNA, 19 nt, Artificial Sequence
  Description of Artificial Sequence: Synthetic oligonucleotide
  Antisense strand to SEQ ID NO: 2223978
uuucuuggacugcaggugc

SEQ ID NO: 2223980 - RNA, 19 nt, Artificial Sequence
  Description of Artificial Sequence: Synthetic oligonucleotide
  Sense strand starting at position 257 of SEQ ID NO: 1883889
uuauccugugugcacgaaa

SEQ ID NO: 2223981 - RNA, 19 nt, Artificial Sequence
  Description of Artificial Sequence: Synthetic oligonucleotide
  Antisense strand to SEQ ID NO: 2223980
uuucgugcacacaggauaa

SEQ ID NO: 2223982 - RNA, 19 nt, Artificial Sequence
  Description of Artificial Sequence: Synthetic oligonucleotide
  Sense strand starting at position 277 of SEQ ID NO: 1883889
ucuggacuccugcaccaaa

SEQ ID NO: 2223983 - RNA, 19 nt, Artificial Sequence
  Description of Artificial Sequence: Synthetic oligonucleotide
  Antisense strand to SEQ ID NO: 2223982
uuuggugcaggaguccaga

SEQ ID NO: 2223984 - RNA, 19 nt, Artificial Sequence
  Description of Artificial Sequence: Synthetic oligonucleotide
  Sense strand starting at position 332 of SEQ ID NO: 1883889
guuuaauccaucgagugcu

SEQ ID NO: 2223985 - RNA, 19 nt, Artificial Sequence
  Description of Artificial Sequence: Synthetic oligonucleotide
  Antisense strand to SEQ ID NO: 2223984
agcacucgauggauuaaac

SEQ ID NO: 2223986 - RNA, 19 nt, Artificial Sequence
  Description of Artificial Sequence: Synthetic oligonucleotide
  Sense strand starting at position 419 of SEQ ID NO: 1883889
acuccuagccucuaagagu

SEQ ID NO: 2223987 - RNA, 19 nt, Artificial Sequence
  Description of Artificial Sequence: Synthetic oligonucleotide
  Antisense strand to SEQ ID NO: 2223986
acucuuagaggcuaggagu

SEQ ID NO: 2223988 - RNA, 19 nt, Artificial Sequence
  Description of Artificial Sequence: Synthetic oligonucleotide
  Sense strand starting at position 426 of SEQ ID NO: 1883889
gccucuaagaguugguaag

SEQ ID NO: 2223989 - RNA, 19 nt, Artificial Sequence
  Description of Artificial Sequence: Synthetic oligonucleotide
  Antisense strand to SEQ ID NO: 2223988
cuuaccaacucuuagaggc

SEQ ID NO: 2223990 - RNA, 19 nt, Artificial Sequence
  Description of Artificial Sequence: Synthetic oligonucleotide
  Sense strand starting at position 428 of SEQ ID NO: 1883889
cucuaagaguugguaagca

SEQ ID NO: 2223991 - RNA, 19 nt, Artificial Sequence
  Description of Artificial Sequence: Synthetic oligonucleotide
  Antisense strand to SEQ ID NO: 2223990
ugcuuaccaacucuuagag

SEQ ID NO: 2223992 - RNA, 19 nt, Artificial Sequence
  Description of Artificial Sequence: Synthetic oligonucleotide
  Sense strand starting at position 477 of SEQ ID NO: 1883889
augagcaggccuugaacau

SEQ ID NO: 2223993 - RNA, 19 nt, Artificial Sequence
  Description of Artificial Sequence: Synthetic oligonucleotide
  Antisense strand to SEQ ID NO: 2223992
auguucaaggccugcucau

SEQ ID NO: 2223994 - RNA, 19 nt, Artificial Sequence
  Description of Artificial Sequence: Synthetic oligonucleotide
  Sense strand starting at position 478 of SEQ ID NO: 1883889
ugagcaggccuugaacauu

SEQ ID NO: 2223995 - RNA, 19 nt, Artificial Sequence
  Description of Artificial Sequence: Synthetic oligonucleotide
  Antisense strand to SEQ ID NO: 2223994
aauguucaaggccugcuca

SEQ ID NO: 2223996 - RNA, 19 nt, Artificial Sequence
  Description of Artificial Sequence: Synthetic oligonucleotide
  Sense strand starting at position 788 of SEQ ID NO: 1883889
cuaggaugccaacagucaa

SEQ ID NO: 2223997 - RNA, 19 nt, Artificial Sequence
  Description of Artificial Sequence: Synthetic oligonucleotide
  Antisense strand to SEQ ID NO: 2223996
uugacuguuggcauccuag

SEQ ID NO: 2223998 - RNA, 19 nt, Artificial Sequence
  Description of Artificial Sequence: Synthetic oligonucleotide
  Sense strand starting at position 870 of SEQ ID NO: 1883889
aauaauaacugagagaggu

SEQ ID NO: 2223999 - RNA, 19 nt, Artificial Sequence
  Description of Artificial Sequence: Synthetic oligonucleotide
  Antisense strand to SEQ ID NO: 2223998
accucucucaguuauuauu

SEQ ID NO: 2224000 - RNA, 19 nt, Artificial Sequence
  Description of Artificial Sequence: Synthetic oligonucleotide
  Sense strand starting at position 974 of SEQ ID NO: 1883889
gagcgauuauaugucucag

SEQ ID NO: 2224001 - RNA, 19 nt, Artificial Sequence
  Description of Artificial Sequence: Synthetic oligonucleotide
  Antisense strand to SEQ ID NO: 2224000
cugagacauauaaucgcuc

SEQ ID NO: 2224002 - RNA, 19 nt, Artificial Sequence
  Description of Artificial Sequence: Synthetic oligonucleotide
  Sense strand starting at position 998 of SEQ ID NO: 1883889
agggcagguugcuucuaaa

SEQ ID NO: 2224003 - RNA, 19 nt, Artificial Sequence
  Description of Artificial Sequence: Synthetic oligonucleotide
  Antisense strand to SEQ ID NO: 2224002
uuuagaagcaaccugcccu

SEQ ID NO: 2224004 - RNA, 19 nt, Artificial Sequence
  Description of Artificial Sequence: Synthetic oligonucleotide
  Sense strand starting at position 1397 of SEQ ID NO: 1883889
cucucuuugcuggagagga

SEQ ID NO: 2224005 - RNA, 19 nt, Artificial Sequence
  Description of Artificial Sequence: Synthetic oligonucleotide
  Antisense strand to SEQ ID NO: 2224004
uccucuccagcaaagagag

SEQ ID NO: 2224006 - RNA, 19 nt, Artificial Sequence
  Description of Artificial Sequence: Synthetic oligonucleotide
  Sense strand starting at position 1480 of SEQ ID NO: 1883889
uccaguucugaguaacuuc

SEQ ID NO: 2224007 - RNA, 19 nt, Artificial Sequence
  Description of Artificial Sequence: Synthetic oligonucleotide
  Antisense strand to SEQ ID NO: 2224006
gaaguuacucagaacugga

SEQ ID NO: 2224008 - RNA, 19 nt, Artificial Sequence
  Description of Artificial Sequence: Synthetic oligonucleotide
  Sense strand starting at position 2324 of SEQ ID NO: 1883889
cuagguugaugggcagaga

SEQ ID NO: 2224009 - RNA, 19 nt, Artificial Sequence
  Description of Artificial Sequence: Synthetic oligonucleotide
  Antisense strand to SEQ ID NO: 2224008
ucucugcccaucaaccuag

SEQ ID NO: 2224010 - RNA, 19 nt, Artificial Sequence
  Description of Artificial Sequence: Synthetic oligonucleotide
  Sense strand starting at position 2335 of SEQ ID NO: 1883889
ggcagagagucuucaccgu

SEQ ID NO: 2224011 - RNA, 19 nt, Artificial Sequence
  Description of Artificial Sequence: Synthetic oligonucleotide
  Antisense strand to SEQ ID NO: 2224010
acggugaagacucucugcc

SEQ ID NO: 2224012 - RNA, 19 nt, Artificial Sequence
  Description of Artificial Sequence: Synthetic oligonucleotide
  Sense strand starting at position 2801 of SEQ ID NO: 1883889
cuuaucucuccuggagcuu

SEQ ID NO: 2224013 - RNA, 19 nt, Artificial Sequence
  Description of Artificial Sequence: Synthetic oligonucleotide
  Antisense strand to SEQ ID NO: 2224012
aagcuccaggagagauaag

SEQ ID NO: 2224014 - RNA, 19 nt, Artificial Sequence
  Description of Artificial Sequence: Synthetic oligonucleotide
  Sense strand starting at position 2802 of SEQ ID NO: 1883889
uuaucucuccuggagcuua

SEQ ID NO: 2224015 - RNA, 19 nt, Artificial Sequence
  Description of Artificial Sequence: Synthetic oligonucleotide
  Antisense strand to SEQ ID NO: 2224014
uaagcuccaggagagauaa

SEQ ID NO: 2224016 - RNA, 19 nt, Artificial Sequence
  Description of Artificial Sequence: Synthetic oligonucleotide
  Sense strand starting at position 2856 of SEQ ID NO: 1883889
guccuacugccuugaggac

SEQ ID NO: 2224017 - RNA, 19 nt, Artificial Sequence
  Description of Artificial Sequence: Synthetic oligonucleotide
  Antisense strand to SEQ ID NO: 2224016
guccucaaggcaguaggac

SEQ ID NO: 2224018 - RNA, 19 nt, Artificial Sequence
  Description of Artificial Sequence: Synthetic oligonucleotide
  Sense strand starting at position 2885 of SEQ ID NO: 1883889
agaugagggcuuuguuucu

SEQ ID NO: 2224019 - RNA, 19 nt, Artificial Sequence
  Description of Artificial Sequence: Synthetic oligonucleotide
  Antisense strand to SEQ ID NO: 2224018
agaaacaaagcccucaucu

SEQ ID NO: 2224020 - RNA, 19 nt, Artificial Sequence
  Description of Artificial Sequence: Synthetic oligonucleotide
  Sense strand starting at position 3208 of SEQ ID NO: 1883889
gcucaccaucuguaggaau

SEQ ID NO: 2224021 - RNA, 19 nt, Artificial Sequence
  Description of Artificial Sequence: Synthetic oligonucleotide
  Antisense strand to SEQ ID NO: 2224020
auuccuacagauggugagc

SEQ ID NO: 2224022 - RNA, 19 nt, Artificial Sequence
  Description of Artificial Sequence: Synthetic oligonucleotide
  Sense strand starting at position 3210 of SEQ ID NO: 1883889
ucaccaucuguaggaauga

SEQ ID NO: 2224023 - RNA, 19 nt, Artificial Sequence
  Description of Artificial Sequence: Synthetic oligonucleotide
  Antisense strand to SEQ ID NO: 2224022
ucauuccuacagaugguga

SEQ ID NO: 2224024 - RNA, 19 nt, Artificial Sequence
  Description of Artificial Sequence: Synthetic oligonucleotide
  Sense strand starting at position 3446 of SEQ ID NO: 1883889
acugcaaucguguaucaug

SEQ ID NO: 2224025 - RNA, 19 nt, Artificial Sequence
  Description of Artificial Sequence: Synthetic oligonucleotide
  Antisense strand to SEQ ID NO: 2224024
caugauacacgauugcagu

SEQ ID NO: 2224026 - RNA, 19 nt, Artificial Sequence
  Description of Artificial Sequence: Synthetic oligonucleotide
  Sense strand starting at position 3489 of SEQ ID NO: 1883889
uccauaagucuaugacguu

SEQ ID NO: 2224027 - RNA, 19 nt, Artificial Sequence
  Description of Artificial Sequence: Synthetic oligonucleotide
  Antisense strand to SEQ ID NO: 2224026
aacgucauagacuuaugga

SEQ ID NO: 2224028 - RNA, 19 nt, Artificial Sequence
  Description of Artificial Sequence: Synthetic oligonucleotide
  Sense strand starting at position 3495 of SEQ ID NO: 1883889
agucuaugacguugagcau

SEQ ID NO: 2224029 - RNA, 19 nt, Artificial Sequence
  Description of Artificial Sequence: Synthetic oligonucleotide
  Antisense strand to SEQ ID NO: 2224028
augcucaacgucauagacu

SEQ ID NO: 2224030 - RNA, 19 nt, Artificial Sequence
  Description of Artificial Sequence: Synthetic oligonucleotide
  Sense strand starting at position 3525 of SEQ ID NO: 1883889
cuucuuugcuaucuguaua

SEQ ID NO: 2224031 - RNA, 19 nt, Artificial Sequence
  Description of Artificial Sequence: Synthetic oligonucleotide
  Antisense strand to SEQ ID NO: 2224030
uauacagauagcaaagaag

SEQ ID NO: 2224032 - RNA, 19 nt, Artificial Sequence
  Description of Artificial Sequence: Synthetic oligonucleotide
  Sense strand starting at position 3536 of SEQ ID NO: 1883889
ucuguauaucuuugauaag

SEQ ID NO: 2224033 - RNA, 19 nt, Artificial Sequence
  Description of Artificial Sequence: Synthetic oligonucleotide
  Antisense strand to SEQ ID NO: 2224032
cuuaucaaagauauacaga

SEQ ID NO: 2224034 - RNA, 19 nt, Artificial Sequence
  Description of Artificial Sequence: Synthetic oligonucleotide
  Sense strand starting at position 3643 of SEQ ID NO: 1883889
aagaguccuuuauuagaug

SEQ ID NO: 2224035 - RNA, 19 nt, Artificial Sequence
  Description of Artificial Sequence: Synthetic oligonucleotide
  Antisense strand to SEQ ID NO: 2224034
caucuaauaaaggacucuu

SEQ ID NO: 2224036 - RNA, 19 nt, Artificial Sequence
  Description of Artificial Sequence: Synthetic oligonucleotide
  Sense strand starting at position 3655 of SEQ ID NO: 1883889
uuagaugugucuuuguaaa

SEQ ID NO: 2224037 - RNA, 19 nt, Artificial Sequence
  Description of Artificial Sequence: Synthetic oligonucleotide
  Antisense strand to SEQ ID NO: 2224036
uuuacaaagacacaucuaa

SEQ ID NO: 2224038 - RNA, 19 nt, Artificial Sequence
  Description of Artificial Sequence: Synthetic oligonucleotide
  Sense strand starting at position 3715 of SEQ ID NO: 1883889
uugacauugucuuuagcaa

SEQ ID NO: 2224039 - RNA, 19 nt, Artificial Sequence
  Description of Artificial Sequence: Synthetic oligonucleotide
  Antisense strand to SEQ ID NO: 2224038
uugcuaaagacaaugucaa

SEQ ID NO: 2224040 - RNA, 19 nt, Artificial Sequence
  Description of Artificial Sequence: Synthetic oligonucleotide
  Sense strand starting at position 3716 of SEQ ID NO: 1883889
ugacauugucuuuagcaaa

SEQ ID NO: 2224041 - RNA, 19 nt, Artificial Sequence
  Description of Artificial Sequence: Synthetic oligonucleotide
  Antisense strand to SEQ ID NO: 2224040
uuugcuaaagacaauguca

SEQ ID NO: 2224042 - RNA, 19 nt, Artificial Sequence
  Description of Artificial Sequence: Synthetic oligonucleotide
  Sense strand starting at position 3786 of SEQ ID NO: 1883889
ggcucaucccuuugauguu

SEQ ID NO: 2224043 - RNA, 19 nt, Artificial Sequence
  Description of Artificial Sequence: Synthetic oligonucleotide
  Antisense strand to SEQ ID NO: 2224042
aacaucaaagggaugagcc

SEQ ID NO: 2224044 - RNA, 19 nt, Artificial Sequence
  Description of Artificial Sequence: Synthetic oligonucleotide
  Sense strand starting at position 237 of SEQ ID NO: 1883890
aggugugacaaagauuagu

SEQ ID NO: 2224045 - RNA, 19 nt, Artificial Sequence
  Description of Artificial Sequence: Synthetic oligonucleotide
  Antisense strand to SEQ ID NO: 2224044
acuaaucuuugucacaccu

SEQ ID NO: 2224046 - RNA, 19 nt, Artificial Sequence
  Description of Artificial Sequence: Synthetic oligonucleotide
  Sense strand starting at position 279 of SEQ ID NO: 1883890
caguuacaggcuuaguaaa

SEQ ID NO: 2224047 - RNA, 19 nt, Artificial Sequence
  Description of Artificial Sequence: Synthetic oligonucleotide
  Antisense strand to SEQ ID NO: 2224046
uuuacuaagccuguaacug

SEQ ID NO: 2224048 - RNA, 19 nt, Artificial Sequence
  Description of Artificial Sequence: Synthetic oligonucleotide
  Sense strand starting at position 281 of SEQ ID NO: 1883890
guuacaggcuuaguaaaca

SEQ ID NO: 2224049 - RNA, 19 nt, Artificial Sequence
  Description of Artificial Sequence: Synthetic oligonucleotide
  Antisense strand to SEQ ID NO: 2224048
uguuuacuaagccuguaac

SEQ ID NO: 2224050 - RNA, 19 nt, Artificial Sequence
  Description of Artificial Sequence: Synthetic oligonucleotide
  Sense strand starting at position 324 of SEQ ID NO: 1883890
gucauuaacggagaguuac

SEQ ID NO: 2224051 - RNA, 19 nt, Artificial Sequence
  Description of Artificial Sequence: Synthetic oligonucleotide
  Antisense strand to SEQ ID NO: 2224050
guaacucuccguuaaugac

SEQ ID NO: 2224052 - RNA, 19 nt, Artificial Sequence
  Description of Artificial Sequence: Synthetic oligonucleotide
  Sense strand starting at position 988 of SEQ ID NO: 1883890
aaaggucaugcaggagaua

SEQ ID NO: 2224053 - RNA, 19 nt, Artificial Sequence
  Description of Artificial Sequence: Synthetic oligonucleotide
  Antisense strand to SEQ ID NO: 2224052
uaucuccugcaugaccuuu

SEQ ID NO: 2224054 - RNA, 19 nt, Artificial Sequence
  Description of Artificial Sequence: Synthetic oligonucleotide
  Sense strand starting at position 1015 of SEQ ID NO: 1883890
cugugucaugaguauugga

SEQ ID NO: 2224055 - RNA, 19 nt, Artificial Sequence
  Description of Artificial Sequence: Synthetic oligonucleotide
  Antisense strand to SEQ ID NO: 2224054
uccaauacucaugacacag

SEQ ID NO: 2224056 - RNA, 19 nt, Artificial Sequence
  Description of Artificial Sequence: Synthetic oligonucleotide
  Sense strand starting at position 1025 of SEQ ID NO: 1883890
aguauuggaucauuaugga

SEQ ID NO: 2224057 - RNA, 19 nt, Artificial Sequence
  Description of Artificial Sequence: Synthetic oligonucleotide
  Antisense strand to SEQ ID NO: 2224056
uccauaaugauccaauacu

SEQ ID NO: 2224058 - RNA, 19 nt, Artificial Sequence
  Description of Artificial Sequence: Synthetic oligonucleotide
  Sense strand starting at position 1054 of SEQ ID NO: 1883890
ucucauugugcagaucuau

SEQ ID NO: 2224059 - RNA, 19 nt, Artificial Sequence
  Description of Artificial Sequence: Synthetic oligonucleotide
  Antisense strand to SEQ ID NO: 2224058
auagaucugcacaaugaga

SEQ ID NO: 2224060 - RNA, 19 nt, Artificial Sequence
  Description of Artificial Sequence: Synthetic oligonucleotide
  Sense strand starting at position 1152 of SEQ ID NO: 1883890
ugaaguauccugggacuug

SEQ ID NO: 2224061 - RNA, 19 nt, Artificial Sequence
  Description of Artificial Sequence: Synthetic oligonucleotide
  Antisense strand to SEQ ID NO: 2224060
caagucccaggauacuuca

SEQ ID NO: 2224062 - RNA, 19 nt, Artificial Sequence
  Description of Artificial Sequence: Synthetic oligonucleotide
  Sense strand starting at position 1224 of SEQ ID NO: 1883890
augcuuuguggacacagau

SEQ ID NO: 2224063 - RNA, 19 nt, Artificial Sequence
  Description of Artificial Sequence: Synthetic oligonucleotide
  Antisense strand to SEQ ID NO: 2224062
aucuguguccacaaagcau

SEQ ID NO: 2224064 - RNA, 19 nt, Artificial Sequence
  Description of Artificial Sequence: Synthetic oligonucleotide
  Sense strand starting at position 1245 of SEQ ID NO: 1883890
cuguguccgagcuaagaug

SEQ ID NO: 2224065 - RNA, 19 nt, Artificial Sequence
  Description of Artificial Sequence: Synthetic oligonucleotide
  Antisense strand to SEQ ID NO: 2224064
caucuuagcucggacacag

SEQ ID NO: 2224066 - RNA, 19 nt, Artificial Sequence
  Description of Artificial Sequence: Synthetic oligonucleotide
  Sense strand starting at position 1254 of SEQ ID NO: 1883890
agcuaagaugcuuaaacau

SEQ ID NO: 2224067 - RNA, 19 nt, Artificial Sequence
  Description of Artificial Sequence: Synthetic oligonucleotide
  Antisense strand to SEQ ID NO: 2224066
auguuuaagcaucuuagcu

SEQ ID NO: 2224068 - RNA, 19 nt, Artificial Sequence
  Description of Artificial Sequence: Synthetic oligonucleotide
  Sense strand starting at position 2062 of SEQ ID NO: 1883890
agaggaauuccggguccuc

SEQ ID NO: 2224069 - RNA, 19 nt, Artificial Sequence
  Description of Artificial Sequence: Synthetic oligonucleotide
  Antisense strand to SEQ ID NO: 2224068
gaggacccggaauuccucu

SEQ ID NO: 2224070 - RNA, 19 nt, Artificial Sequence
  Description of Artificial Sequence: Synthetic oligonucleotide
  Sense strand starting at position 2216 of SEQ ID NO: 1883890
caggguuaaguugguuauu

SEQ ID NO: 2224071 - RNA, 19 nt, Artificial Sequence
  Description of Artificial Sequence: Synthetic oligonucleotide
  Antisense strand to SEQ ID NO: 2224070
aauaaccaacuuaacccug

SEQ ID NO: 2224072 - RNA, 19 nt, Artificial Sequence
  Description of Artificial Sequence: Synthetic oligonucleotide
  Sense strand starting at position 2219 of SEQ ID NO: 1883890
gguuaaguugguuauuccu

SEQ ID NO: 2224073 - RNA, 19 nt, Artificial Sequence
  Description of Artificial Sequence: Synthetic oligonucleotide
  Antisense strand to SEQ ID NO: 2224072
aggaauaaccaacuuaacc

SEQ ID NO: 2224074 - RNA, 19 nt, Artificial Sequence
  Description of Artificial Sequence: Synthetic oligonucleotide
  Sense strand starting at position 2271 of SEQ ID NO: 1883890
ccauguaggacagguagau

SEQ ID NO: 2224075 - RNA, 19 nt, Artificial Sequence
  Description of Artificial Sequence: Synthetic oligonucleotide
  Antisense strand to SEQ ID NO: 2224074
aucuaccuguccuacaugg

SEQ ID NO: 2224076 - RNA, 19 nt, Artificial Sequence
  Description of Artificial Sequence: Synthetic oligonucleotide
  Sense strand starting at position 2461 of SEQ ID NO: 1883890
ugugaugucaucgaguauu

SEQ ID NO: 2224077 - RNA, 19 nt, Artificial Sequence
  Description of Artificial Sequence: Synthetic oligonucleotide
  Antisense strand to SEQ ID NO: 2224076
aauacucgaugacaucaca

SEQ ID NO: 2224078 - RNA, 19 nt, Artificial Sequence
  Description of Artificial Sequence: Synthetic oligonucleotide
  Sense strand starting at position 2469 of SEQ ID NO: 1883890
caucgaguauugcuaauga

SEQ ID NO: 2224079 - RNA, 19 nt, Artificial Sequence
  Description of Artificial Sequence: Synthetic oligonucleotide
  Antisense strand to SEQ ID NO: 2224078
ucauuagcaauacucgaug

SEQ ID NO: 2224080 - RNA, 19 nt, Artificial Sequence
  Description of Artificial Sequence: Synthetic oligonucleotide
  Sense strand starting at position 2526 of SEQ ID NO: 1883890
uguuguuauuucucacgaa

SEQ ID NO: 2224081 - RNA, 19 nt, Artificial Sequence
  Description of Artificial Sequence: Synthetic oligonucleotide
  Antisense strand to SEQ ID NO: 2224080
uucgugagaaauaacaaca

SEQ ID NO: 2224082 - RNA, 19 nt, Artificial Sequence
  Description of Artificial Sequence: Synthetic oligonucleotide
  Sense strand starting at position 2539 of SEQ ID NO: 1883890
cacgaaaccucuucuuggu

SEQ ID NO: 2224083 - RNA, 19 nt, Artificial Sequence
  Description of Artificial Sequence: Synthetic oligonucleotide
  Antisense strand to SEQ ID NO: 2224082
accaagaagagguuucgug

SEQ ID NO: 2224084 - RNA, 19 nt, Artificial Sequence
  Description of Artificial Sequence: Synthetic oligonucleotide
  Sense strand starting at position 2875 of SEQ ID NO: 1883890
ccacguuggcuugaacauu

SEQ ID NO: 2224085 - RNA, 19 nt, Artificial Sequence
  Description of Artificial Sequence: Synthetic oligonucleotide
  Antisense strand to SEQ ID NO: 2224084
aauguucaagccaacgugg

SEQ ID NO: 2224086 - RNA, 19 nt, Artificial Sequence
  Description of Artificial Sequence: Synthetic oligonucleotide
  Sense strand starting at position 2881 of SEQ ID NO: 1883890
uggcuugaacauuagugua

SEQ ID NO: 2224087 - RNA, 19 nt, Artificial Sequence
  Description of Artificial Sequence: Synthetic oligonucleotide
  Antisense strand to SEQ ID NO: 2224086
uacacuaauguucaagcca

SEQ ID NO: 2224088 - RNA, 19 nt, Artificial Sequence
  Description of Artificial Sequence: Synthetic oligonucleotide
  Sense strand starting at position 2964 of SEQ ID NO: 1883890
gcuguacgugguaggaaua

SEQ ID NO: 2224089 - RNA, 19 nt, Artificial Sequence
  Description of Artificial Sequence: Synthetic oligonucleotide
  Antisense strand to SEQ ID NO: 2224088
uauuccuaccacguacagc

SEQ ID NO: 2224090 - RNA, 19 nt, Artificial Sequence
  Description of Artificial Sequence: Synthetic oligonucleotide
  Sense strand starting at position 2974 of SEQ ID NO: 1883890
guaggaauauugguugaau

SEQ ID NO: 2224091 - RNA, 19 nt, Artificial Sequence
  Description of Artificial Sequence: Synthetic oligonucleotide
  Antisense strand to SEQ ID NO: 2224090
auucaaccaauauuccuac

SEQ ID NO: 2224092 - RNA, 19 nt, Artificial Sequence
  Description of Artificial Sequence: Synthetic oligonucleotide
  Sense strand starting at position 2975 of SEQ ID NO: 1883890
uaggaauauugguugaauu

SEQ ID NO: 2224093 - RNA, 19 nt, Artificial Sequence
  Description of Artificial Sequence: Synthetic oligonucleotide
  Antisense strand to SEQ ID NO: 2224092
aauucaaccaauauuccua

SEQ ID NO: 2224094 - RNA, 19 nt, Artificial Sequence
  Description of Artificial Sequence: Synthetic oligonucleotide
  Sense strand starting at position 2999 of SEQ ID NO: 1883890
ucagcuagccuguaaggaa

SEQ ID NO: 2224095 - RNA, 19 nt, Artificial Sequence
  Description of Artificial Sequence: Synthetic oligonucleotide
  Antisense strand to SEQ ID NO: 2224094
uuccuuacaggcuagcuga

SEQ ID NO: 2224096 - RNA, 19 nt, Artificial Sequence
  Description of Artificial Sequence: Synthetic oligonucleotide
  Sense strand starting at position 3074 of SEQ ID NO: 1883890
cagugagcgaugugcauuu

SEQ ID NO: 2224097 - RNA, 19 nt, Artificial Sequence
  Description of Artificial Sequence: Synthetic oligonucleotide
  Antisense strand to SEQ ID NO: 2224096
aaaugcacaucgcucacug

SEQ ID NO: 2224098 - RNA, 19 nt, Artificial Sequence
  Description of Artificial Sequence: Synthetic oligonucleotide
  Sense strand starting at position 3144 of SEQ ID NO: 1883890
gucugagaaccauauuggu

SEQ ID NO: 2224099 - RNA, 19 nt, Artificial Sequence
  Description of Artificial Sequence: Synthetic oligonucleotide
  Antisense strand to SEQ ID NO: 2224098
accaauaugguucucagac

SEQ ID NO: 2224100 - RNA, 19 nt, Artificial Sequence
  Description of Artificial Sequence: Synthetic oligonucleotide
  Sense strand starting at position 3149 of SEQ ID NO: 1883890
agaaccauauugguuaagu

SEQ ID NO: 2224101 - RNA, 19 nt, Artificial Sequence
  Description of Artificial Sequence: Synthetic oligonucleotide
  Antisense strand to SEQ ID NO: 2224100
acuuaaccaauaugguucu

SEQ ID NO: 2224102 - RNA, 19 nt, Artificial Sequence
  Description of Artificial Sequence: Synthetic oligonucleotide
  Sense strand starting at position 3150 of SEQ ID NO: 1883890
gaaccauauugguuaaguu

SEQ ID NO: 2224103 - RNA, 19 nt, Artificial Sequence
  Description of Artificial Sequence: Synthetic oligonucleotide
  Antisense strand to SEQ ID NO: 2224102
aacuuaaccaauaugguuc

SEQ ID NO: 2224104 - RNA, 19 nt, Artificial Sequence
  Description of Artificial Sequence: Synthetic oligonucleotide
  Sense strand starting at position 3175 of SEQ ID NO: 1883890
uuaacugugcuuuaacaga

SEQ ID NO: 2224105 - RNA, 19 nt, Artificial Sequence
  Description of Artificial Sequence: Synthetic oligonucleotide
  Antisense strand to SEQ ID NO: 2224104
ucuguuaaagcacaguuaa

SEQ ID NO: 2224106 - RNA, 19 nt, Artificial Sequence
  Description of Artificial Sequence: Synthetic oligonucleotide
  Sense strand starting at position 3198 of SEQ ID NO: 1883890
uggaacugauuguuuggua

SEQ ID NO: 2224107 - RNA, 19 nt, Artificial Sequence
  Description of Artificial Sequence: Synthetic oligonucleotide
  Antisense strand to SEQ ID NO: 2224106
uaccaaacaaucaguucca

SEQ ID NO: 2224108 - RNA, 19 nt, Artificial Sequence
  Description of Artificial Sequence: Synthetic oligonucleotide
  Sense strand starting at position 3199 of SEQ ID NO: 1883890
ggaacugauuguuugguau

SEQ ID NO: 2224109 - RNA, 19 nt, Artificial Sequence
  Description of Artificial Sequence: Synthetic oligonucleotide
  Antisense strand to SEQ ID NO: 2224108
auaccaaacaaucaguucc

SEQ ID NO: 2224110 - RNA, 19 nt, Artificial Sequence
  Description of Artificial Sequence: Synthetic oligonucleotide
  Sense strand starting at position 3202 of SEQ ID NO: 1883890
acugauuguuugguaugaa

SEQ ID NO: 2224111 - RNA, 19 nt, Artificial Sequence
  Description of Artificial Sequence: Synthetic oligonucleotide
  Antisense strand to SEQ ID NO: 2224110
uucauaccaaacaaucagu

SEQ ID NO: 2224112 - RNA, 19 nt, Artificial Sequence
  Description of Artificial Sequence: Synthetic oligonucleotide
  Sense strand starting at position 3264 of SEQ ID NO: 1883890
gaugguuaaguguauuaaa

SEQ ID NO: 2224113 - RNA, 19 nt, Artificial Sequence
  Description of Artificial Sequence: Synthetic oligonucleotide
  Antisense strand to SEQ ID NO: 2224112
uuuaauacacuuaaccauc

SEQ ID NO: 2224114 - RNA, 19 nt, Artificial Sequence
  Description of Artificial Sequence: Synthetic oligonucleotide
  Sense strand starting at position 3632 of SEQ ID NO: 1883890
aagagauauugugcaaaug

SEQ ID NO: 2224115 - RNA, 19 nt, Artificial Sequence
  Description of Artificial Sequence: Synthetic oligonucleotide
  Antisense strand to SEQ ID NO: 2224114
cauuugcacaauaucucuu

SEQ ID NO: 2224116 - RNA, 19 nt, Artificial Sequence
  Description of Artificial Sequence: Synthetic oligonucleotide
  Sense strand starting at position 3640 of SEQ ID NO: 1883890
uugugcaaaugguuagaua

SEQ ID NO: 2224117 - RNA, 19 nt, Artificial Sequence
  Description of Artificial Sequence: Synthetic oligonucleotide
  Antisense strand to SEQ ID NO: 2224116
uaucuaaccauuugcacaa

SEQ ID NO: 2224118 - RNA, 19 nt, Artificial Sequence
  Description of Artificial Sequence: Synthetic oligonucleotide
  Sense strand starting at position 3641 of SEQ ID NO: 1883890
ugugcaaaugguuagauaa

SEQ ID NO: 2224119 - RNA, 19 nt, Artificial Sequence
  Description of Artificial Sequence: Synthetic oligonucleotide
  Antisense strand to SEQ ID NO: 2224118
uuaucuaaccauuugcaca

SEQ ID NO: 2224120 - RNA, 19 nt, Artificial Sequence
  Description of Artificial Sequence: Synthetic oligonucleotide
  Sense strand starting at position 3652 of SEQ ID NO: 1883890
uuagauaaccacugaaguu

SEQ ID NO: 2224121 - RNA, 19 nt, Artificial Sequence
  Description of Artificial Sequence: Synthetic oligonucleotide
  Antisense strand to SEQ ID NO: 2224120
aacuucagugguuaucuaa

SEQ ID NO: 2224122 - RNA, 19 nt, Artificial Sequence
  Description of Artificial Sequence: Synthetic oligonucleotide
  Sense strand starting at position 3741 of SEQ ID NO: 1883890
uguuuauauacgggcauuu

SEQ ID NO: 2224123 - RNA, 19 nt, Artificial Sequence
  Description of Artificial Sequence: Synthetic oligonucleotide
  Antisense strand to SEQ ID NO: 2224122
aaaugcccguauauaaaca

SEQ ID NO: 2224124 - RNA, 19 nt, Artificial Sequence
  Description of Artificial Sequence: Synthetic oligonucleotide
  Sense strand starting at position 64 of SEQ ID NO: 1883891
ggugcaaacucagcuuaau

SEQ ID NO: 2224125 - RNA, 19 nt, Artificial Sequence
  Description of Artificial Sequence: Synthetic oligonucleotide
  Antisense strand to SEQ ID NO: 2224124
auuaagcugaguuugcacc

SEQ ID NO: 2224126 - RNA, 19 nt, Artificial Sequence
  Description of Artificial Sequence: Synthetic oligonucleotide
  Sense strand starting at position 67 of SEQ ID NO: 1883891
gcaaacucagcuuaaugca

SEQ ID NO: 2224127 - RNA, 19 nt, Artificial Sequence
  Description of Artificial Sequence: Synthetic oligonucleotide
  Antisense strand to SEQ ID NO: 2224126
ugcauuaagcugaguuugc

SEQ ID NO: 2224128 - RNA, 19 nt, Artificial Sequence
  Description of Artificial Sequence: Synthetic oligonucleotide
  Sense strand starting at position 447 of SEQ ID NO: 1883891
ucuccaauauggucauguu

SEQ ID NO: 2224129 - RNA, 19 nt, Artificial Sequence
  Description of Artificial Sequence: Synthetic oligonucleotide
  Antisense strand to SEQ ID NO: 2224128
aacaugaccauauuggaga

SEQ ID NO: 2224130 - RNA, 19 nt, Artificial Sequence
  Description of Artificial Sequence: Synthetic oligonucleotide
  Sense strand starting at position 448 of SEQ ID NO: 1883891
cuccaauauggucauguuu

SEQ ID NO: 2224131 - RNA, 19 nt, Artificial Sequence
  Description of Artificial Sequence: Synthetic oligonucleotide
  Antisense strand to SEQ ID NO: 2224130
aaacaugaccauauuggag

SEQ ID NO: 2224132 - RNA, 19 nt, Artificial Sequence
  Description of Artificial Sequence: Synthetic oligonucleotide
  Sense strand starting at position 461 of SEQ ID NO: 1883891
auguuuaaacugugacaca

SEQ ID NO: 2224133 - RNA, 19 nt, Artificial Sequence
  Description of Artificial Sequence: Synthetic oligonucleotide
  Antisense strand to SEQ ID NO: 2224132
ugugucacaguuuaaacau

SEQ ID NO: 2224134 - RNA, 19 nt, Artificial Sequence
  Description of Artificial Sequence: Synthetic oligonucleotide
  Sense strand starting at position 557 of SEQ ID NO: 1883891
ggcugugacuugagaggaa

SEQ ID NO: 2224135 - RNA, 19 nt, Artificial Sequence
  Description of Artificial Sequence: Synthetic oligonucleotide
  Antisense strand to SEQ ID NO: 2224134
uuccucucaagucacagcc

SEQ ID NO: 2224136 - RNA, 19 nt, Artificial Sequence
  Description of Artificial Sequence: Synthetic oligonucleotide
  Sense strand starting at position 701 of SEQ ID NO: 1883891
gagguuauuccagguacag

SEQ ID NO: 2224137 - RNA, 19 nt, Artificial Sequence
  Description of Artificial Sequence: Synthetic oligonucleotide
  Antisense strand to SEQ ID NO: 2224136
cuguaccuggaauaaccuc

SEQ ID NO: 2224138 - RNA, 19 nt, Artificial Sequence
  Description of Artificial Sequence: Synthetic oligonucleotide
  Sense strand starting at position 703 of SEQ ID NO: 1883891
gguuauuccagguacagug

SEQ ID NO: 2224139 - RNA, 19 nt, Artificial Sequence
  Description of Artificial Sequence: Synthetic oligonucleotide
  Antisense strand to SEQ ID NO: 2224138
cacuguaccuggaauaacc

SEQ ID NO: 2224140 - RNA, 19 nt, Artificial Sequence
  Description of Artificial Sequence: Synthetic oligonucleotide
  Sense strand starting at position 1021 of SEQ ID NO: 1883891
gggucaaacaaguggauga

SEQ ID NO: 2224141 - RNA, 19 nt, Artificial Sequence
  Description of Artificial Sequence: Synthetic oligonucleotide
  Antisense strand to SEQ ID NO: 2224140
ucauccacuuguuugaccc

SEQ ID NO: 2224142 - RNA, 19 nt, Artificial Sequence
  Description of Artificial Sequence: Synthetic oligonucleotide
  Sense strand starting at position 1556 of SEQ ID NO: 1883891
ugggaagcccaagauuguu

SEQ ID NO: 2224143 - RNA, 19 nt, Artificial Sequence
  Description of Artificial Sequence: Synthetic oligonucleotide
  Antisense strand to SEQ ID NO: 2224142
aacaaucuugggcuuccca

SEQ ID NO: 2224144 - RNA, 19 nt, Artificial Sequence
  Description of Artificial Sequence: Synthetic oligonucleotide
  Sense strand starting at position 1711 of SEQ ID NO: 1883891
aucuaauguugccucugau

SEQ ID NO: 2224145 - RNA, 19 nt, Artificial Sequence
  Description of Artificial Sequence: Synthetic oligonucleotide
  Antisense strand to SEQ ID NO: 2224144
aucagaggcaacauuagau

SEQ ID NO: 2224146 - RNA, 19 nt, Artificial Sequence
  Description of Artificial Sequence: Synthetic oligonucleotide
  Sense strand starting at position 1714 of SEQ ID NO: 1883891
uaauguugccucugaucug

SEQ ID NO: 2224147 - RNA, 19 nt, Artificial Sequence
  Description of Artificial Sequence: Synthetic oligonucleotide
  Antisense strand to SEQ ID NO: 2224146
cagaucagaggcaacauua

SEQ ID NO: 2224148 - RNA, 19 nt, Artificial Sequence
  Description of Artificial Sequence: Synthetic oligonucleotide
  Sense strand starting at position 2004 of SEQ ID NO: 1883891
ugaggucacuuccuauaaa

SEQ ID NO: 2224149 - RNA, 19 nt, Artificial Sequence
  Description of Artificial Sequence: Synthetic oligonucleotide
  Antisense strand to SEQ ID NO: 2224148
uuuauaggaagugaccuca

SEQ ID NO: 2224150 - RNA, 19 nt, Artificial Sequence
  Description of Artificial Sequence: Synthetic oligonucleotide
  Sense strand starting at position 2288 of SEQ ID NO: 1883891
uauggaaagcacugauguu

SEQ ID NO: 2224151 - RNA, 19 nt, Artificial Sequence
  Description of Artificial Sequence: Synthetic oligonucleotide
  Antisense strand to SEQ ID NO: 2224150
aacaucagugcuuuccaua

SEQ ID NO: 2224152 - RNA, 19 nt, Artificial Sequence
  Description of Artificial Sequence: Synthetic oligonucleotide
  Sense strand starting at position 2289 of SEQ ID NO: 1883891
auggaaagcacugauguuu

SEQ ID NO: 2224153 - RNA, 19 nt, Artificial Sequence
  Description of Artificial Sequence: Synthetic oligonucleotide
  Antisense strand to SEQ ID NO: 2224152
aaacaucagugcuuuccau

SEQ ID NO: 2224154 - RNA, 19 nt, Artificial Sequence
  Description of Artificial Sequence: Synthetic oligonucleotide
  Sense strand starting at position 2626 of SEQ ID NO: 1883891
ggaagcauuuauuauguau

SEQ ID NO: 2224155 - RNA, 19 nt, Artificial Sequence
  Description of Artificial Sequence: Synthetic oligonucleotide
  Antisense strand to SEQ ID NO: 2224154
auacauaauaaaugcuucc

SEQ ID NO: 2224156 - RNA, 19 nt, Artificial Sequence
  Description of Artificial Sequence: Synthetic oligonucleotide
  Sense strand starting at position 2641 of SEQ ID NO: 1883891
guauuuauaugccaggaau

SEQ ID NO: 2224157 - RNA, 19 nt, Artificial Sequence
  Description of Artificial Sequence: Synthetic oligonucleotide
  Antisense strand to SEQ ID NO: 2224156
auuccuggcauauaaauac

SEQ ID NO: 2224158 - RNA, 19 nt, Artificial Sequence
  Description of Artificial Sequence: Synthetic oligonucleotide
  Sense strand starting at position 2782 of SEQ ID NO: 1883891
augaucuugucacuagguu

SEQ ID NO: 2224159 - RNA, 19 nt, Artificial Sequence
  Description of Artificial Sequence: Synthetic oligonucleotide
  Antisense strand to SEQ ID NO: 2224158
aaccuagugacaagaucau

SEQ ID NO: 2224160 - RNA, 19 nt, Artificial Sequence
  Description of Artificial Sequence: Synthetic oligonucleotide
  Sense strand starting at position 2783 of SEQ ID NO: 1883891
ugaucuugucacuagguua

SEQ ID NO: 2224161 - RNA, 19 nt, Artificial Sequence
  Description of Artificial Sequence: Synthetic oligonucleotide
  Antisense strand to SEQ ID NO: 2224160
uaaccuagugacaagauca

SEQ ID NO: 2224162 - RNA, 19 nt, Artificial Sequence
  Description of Artificial Sequence: Synthetic oligonucleotide
  Sense strand starting at position 2986 of SEQ ID NO: 1883891
cauugagugguagguugua

SEQ ID NO: 2224163 - RNA, 19 nt, Artificial Sequence
  Description of Artificial Sequence: Synthetic oligonucleotide
  Antisense strand to SEQ ID NO: 2224162
uacaaccuaccacucaaug

SEQ ID NO: 2224164 - RNA, 19 nt, Artificial Sequence
  Description of Artificial Sequence: Synthetic oligonucleotide
  Sense strand starting at position 2996 of SEQ ID NO: 1883891
uagguuguauuacucauga

SEQ ID NO: 2224165 - RNA, 19 nt, Artificial Sequence
  Description of Artificial Sequence: Synthetic oligonucleotide
  Antisense strand to SEQ ID NO: 2224164
ucaugaguaauacaaccua

SEQ ID NO: 2224166 - RNA, 19 nt, Artificial Sequence
  Description of Artificial Sequence: Synthetic oligonucleotide
  Sense strand starting at position 2998 of SEQ ID NO: 1883891
gguuguauuacucaugaug

SEQ ID NO: 2224167 - RNA, 19 nt, Artificial Sequence
  Description of Artificial Sequence: Synthetic oligonucleotide
  Antisense strand to SEQ ID NO: 2224166
caucaugaguaauacaacc

SEQ ID NO: 2224168 - RNA, 19 nt, Artificial Sequence
  Description of Artificial Sequence: Synthetic oligonucleotide
  Sense strand starting at position 3096 of SEQ ID NO: 1883891
aguuaaaguucugcauauc

SEQ ID NO: 2224169 - RNA, 19 nt, Artificial Sequence
  Description of Artificial Sequence: Synthetic oligonucleotide
  Antisense strand to SEQ ID NO: 2224168
gauaugcagaacuuuaacu

SEQ ID NO: 2224170 - RNA, 19 nt, Artificial Sequence
  Description of Artificial Sequence: Synthetic oligonucleotide
  Sense strand starting at position 3097 of SEQ ID NO: 1883891
guuaaaguucugcauauca

SEQ ID NO: 2224171 - RNA, 19 nt, Artificial Sequence
  Description of Artificial Sequence: Synthetic oligonucleotide
  Antisense strand to SEQ ID NO: 2224170
ugauaugcagaacuuuaac

SEQ ID NO: 2224172 - RNA, 19 nt, Artificial Sequence
  Description of Artificial Sequence: Synthetic oligonucleotide
  Sense strand starting at position 3211 of SEQ ID NO: 1883891
aggugagcauuugauauau

SEQ ID NO: 2224173 - RNA, 19 nt, Artificial Sequence
  Description of Artificial Sequence: Synthetic oligonucleotide
  Antisense strand to SEQ ID NO: 2224172
auauaucaaaugcucaccu

SEQ ID NO: 2224174 - RNA, 19 nt, Artificial Sequence
  Description of Artificial Sequence: Synthetic oligonucleotide
  Sense strand starting at position 3213 of SEQ ID NO: 1883891
gugagcauuugauauauac

SEQ ID NO: 2224175 - RNA, 19 nt, Artificial Sequence
  Description of Artificial Sequence: Synthetic oligonucleotide
  Antisense strand to SEQ ID NO: 2224174
guauauaucaaaugcucac

SEQ ID NO: 2224176 - RNA, 19 nt, Artificial Sequence
  Description of Artificial Sequence: Synthetic oligonucleotide
  Sense strand starting at position 3289 of SEQ ID NO: 1883891
aggauagaauaguauuaag

SEQ ID NO: 2224177 - RNA, 19 nt, Artificial Sequence
  Description of Artificial Sequence: Synthetic oligonucleotide
  Antisense strand to SEQ ID NO: 2224176
cuuaauacuauucuauccu

SEQ ID NO: 2224178 - RNA, 19 nt, Artificial Sequence
  Description of Artificial Sequence: Synthetic oligonucleotide
  Sense strand starting at position 3332 of SEQ ID NO: 1883891
cgucaacucagugaugcau

SEQ ID NO: 2224179 - RNA, 19 nt, Artificial Sequence
  Description of Artificial Sequence: Synthetic oligonucleotide
  Antisense strand to SEQ ID NO: 2224178
augcaucacugaguugacg

SEQ ID NO: 2224180 - RNA, 19 nt, Artificial Sequence
  Description of Artificial Sequence: Synthetic oligonucleotide
  Sense strand starting at position 3374 of SEQ ID NO: 1883891
gggcauccuggugaauacu

SEQ ID NO: 2224181 - RNA, 19 nt, Artificial Sequence
  Description of Artificial Sequence: Synthetic oligonucleotide
  Antisense strand to SEQ ID NO: 2224180
aguauucaccaggaugccc

SEQ ID NO: 2224182 - RNA, 19 nt, Artificial Sequence
  Description of Artificial Sequence: Synthetic oligonucleotide
  Sense strand starting at position 3449 of SEQ ID NO: 1883891
cucuguaauccagggcuuu

SEQ ID NO: 2224183 - RNA, 19 nt, Artificial Sequence
  Description of Artificial Sequence: Synthetic oligonucleotide
  Antisense strand to SEQ ID NO: 2224182
aaagcccuggauuacagag

SEQ ID NO: 2224184 - RNA, 19 nt, Artificial Sequence
  Description of Artificial Sequence: Synthetic oligonucleotide
  Sense strand starting at position 3523 of SEQ ID NO: 1883891
gcuagcugauaauuaagga

SEQ ID NO: 2224185 - RNA, 19 nt, Artificial Sequence
  Description of Artificial Sequence: Synthetic oligonucleotide
  Antisense strand to SEQ ID NO: 2224184
uccuuaauuaucagcuagc

SEQ ID NO: 2224186 - RNA, 19 nt, Artificial Sequence
  Description of Artificial Sequence: Synthetic oligonucleotide
  Sense strand starting at position 3556 of SEQ ID NO: 1883891
uuagcuuugcaguaaucua

SEQ ID NO: 2224187 - RNA, 19 nt, Artificial Sequence
  Description of Artificial Sequence: Synthetic oligonucleotide
  Antisense strand to SEQ ID NO: 2224186
uagauuacugcaaagcuaa

SEQ ID NO: 2224188 - RNA, 19 nt, Artificial Sequence
  Description of Artificial Sequence: Synthetic oligonucleotide
  Sense strand starting at position 3586 of SEQ ID NO: 1883891
uguuucuaguacuuagaca

SEQ ID NO: 2224189 - RNA, 19 nt, Artificial Sequence
  Description of Artificial Sequence: Synthetic oligonucleotide
  Antisense strand to SEQ ID NO: 2224188
ugucuaaguacuagaaaca

SEQ ID NO: 2224190 - RNA, 19 nt, Artificial Sequence
  Description of Artificial Sequence: Synthetic oligonucleotide
  Sense strand starting at position 3635 of SEQ ID NO: 1883891
guguaaggaugacucgauu

SEQ ID NO: 2224191 - RNA, 19 nt, Artificial Sequence
  Description of Artificial Sequence: Synthetic oligonucleotide
  Antisense strand to SEQ ID NO: 2224190
aaucgagucauccuuacac

SEQ ID NO: 2224192 - RNA, 19 nt, Artificial Sequence
  Description of Artificial Sequence: Synthetic oligonucleotide
  Sense strand starting at position 3698 of SEQ ID NO: 1883891
guaacuccacuguguaaau

SEQ ID NO: 2224193 - RNA, 19 nt, Artificial Sequence
  Description of Artificial Sequence: Synthetic oligonucleotide
  Antisense strand to SEQ ID NO: 2224192
auuuacacaguggaguuac

SEQ ID NO: 2224194 - RNA, 19 nt, Artificial Sequence
  Description of Artificial Sequence: Synthetic oligonucleotide
  Sense strand starting at position 3707 of SEQ ID NO: 1883891
cuguguaaaugcucaugaa

SEQ ID NO: 2224195 - RNA, 19 nt, Artificial Sequence
  Description of Artificial Sequence: Synthetic oligonucleotide
  Antisense strand to SEQ ID NO: 2224194
uucaugagcauuuacacag

SEQ ID NO: 2224196 - RNA, 19 nt, Artificial Sequence
  Description of Artificial Sequence: Synthetic oligonucleotide
  Sense strand starting at position 3784 of SEQ ID NO: 1883891
ucaauuguuuacguagaua

SEQ ID NO: 2224197 - RNA, 19 nt, Artificial Sequence
  Description of Artificial Sequence: Synthetic oligonucleotide
  Antisense strand to SEQ ID NO: 2224196
uaucuacguaaacaauuga

SEQ ID NO: 2224198 - RNA, 19 nt, Artificial Sequence
  Description of Artificial Sequence: Synthetic oligonucleotide
  Sense strand starting at position 3787 of SEQ ID NO: 1883891
auuguuuacguagauaagu

SEQ ID NO: 2224199 - RNA, 19 nt, Artificial Sequence
  Description of Artificial Sequence: Synthetic oligonucleotide
  Antisense strand to SEQ ID NO: 2224198
acuuaucuacguaaacaau

SEQ ID NO: 2224200 - RNA, 19 nt, Artificial Sequence
  Description of Artificial Sequence: Synthetic oligonucleotide
  Sense strand starting at position 3843 of SEQ ID NO: 1883891
guugauucucaguaauagg

SEQ ID NO: 2224201 - RNA, 19 nt, Artificial Sequence
  Description of Artificial Sequence: Synthetic oligonucleotide
  Antisense strand to SEQ ID NO: 2224200
ccuauuacugagaaucaac

SEQ ID NO: 2224202 - RNA, 19 nt, Artificial Sequence
  Description of Artificial Sequence: Synthetic oligonucleotide
  Sense strand starting at position 3854 of SEQ ID NO: 1883891
guaauaggucccuauguca

SEQ ID NO: 2224203 - RNA, 19 nt, Artificial Sequence
  Description of Artificial Sequence: Synthetic oligonucleotide
  Antisense strand to SEQ ID NO: 2224202
ugacauagggaccuauuac

SEQ ID NO: 2224204 - RNA, 19 nt, Artificial Sequence
  Description of Artificial Sequence: Synthetic oligonucleotide
  Sense strand starting at position 1057 of SEQ ID NO: 1883892
caagacaggucuuugacau

SEQ ID NO: 2224205 - RNA, 19 nt, Artificial Sequence
  Description of Artificial Sequence: Synthetic oligonucleotide
  Antisense strand to SEQ ID NO: 2224204
augucaaagaccugucuug

SEQ ID NO: 2224206 - RNA, 19 nt, Artificial Sequence
  Description of Artificial Sequence: Synthetic oligonucleotide
  Sense strand starting at position 1058 of SEQ ID NO: 1883892
aagacaggucuuugacaug

SEQ ID NO: 2224207 - RNA, 19 nt, Artificial Sequence
  Description of Artificial Sequence: Synthetic oligonucleotide
  Antisense strand to SEQ ID NO: 2224206
caugucaaagaccugucuu

SEQ ID NO: 2224208 - RNA, 19 nt, Artificial Sequence
  Description of Artificial Sequence: Synthetic oligonucleotide
  Sense strand starting at position 1063 of SEQ ID NO: 1883892
aggucuuugacaugaggug

SEQ ID NO: 2224209 - RNA, 19 nt, Artificial Sequence
  Description of Artificial Sequence: Synthetic oligonucleotide
  Antisense strand to SEQ ID NO: 2224208
caccucaugucaaagaccu

SEQ ID NO: 2224210 - RNA, 19 nt, Artificial Sequence
  Description of Artificial Sequence: Synthetic oligonucleotide
  Sense strand starting at position 1112 of SEQ ID NO: 1883892
gagugagcuucuggccaca

SEQ ID NO: 2224211 - RNA, 19 nt, Artificial Sequence
  Description of Artificial Sequence: Synthetic oligonucleotide
  Antisense strand to SEQ ID NO: 2224210
uguggccagaagcucacuc

SEQ ID NO: 2224212 - RNA, 19 nt, Artificial Sequence
  Description of Artificial Sequence: Synthetic oligonucleotide
  Sense strand starting at position 1434 of SEQ ID NO: 1883892
cugguuuaguaggauuuau

SEQ ID NO: 2224213 - RNA, 19 nt, Artificial Sequence
  Description of Artificial Sequence: Synthetic oligonucleotide
  Antisense strand to SEQ ID NO: 2224212
auaaauccuacuaaaccag

SEQ ID NO: 2224214 - RNA, 19 nt, Artificial Sequence
  Description of Artificial Sequence: Synthetic oligonucleotide
  Sense strand starting at position 1459 of SEQ ID NO: 1883892
ugcugucauuucugcagua

SEQ ID NO: 2224215 - RNA, 19 nt, Artificial Sequence
  Description of Artificial Sequence: Synthetic oligonucleotide
  Antisense strand to SEQ ID NO: 2224214
uacugcagaaaugacagca

SEQ ID NO: 2224216 - RNA, 19 nt, Artificial Sequence
  Description of Artificial Sequence: Synthetic oligonucleotide
  Sense strand starting at position 1461 of SEQ ID NO: 1883892
cugucauuucugcaguagu

SEQ ID NO: 2224217 - RNA, 19 nt, Artificial Sequence
  Description of Artificial Sequence: Synthetic oligonucleotide
  Antisense strand to SEQ ID NO: 2224216
acuacugcagaaaugacag

SEQ ID NO: 2224218 - RNA, 19 nt, Artificial Sequence
  Description of Artificial Sequence: Synthetic oligonucleotide
  Sense strand starting at position 1593 of SEQ ID NO: 1883892
cuauauuggugccugguua

SEQ ID NO: 2224219 - RNA, 19 nt, Artificial Sequence
  Description of Artificial Sequence: Synthetic oligonucleotide
  Antisense strand to SEQ ID NO: 2224218
uaaccaggcaccaauauag

SEQ ID NO: 2224220 - RNA, 19 nt, Artificial Sequence
  Description of Artificial Sequence: Synthetic oligonucleotide
  Sense strand starting at position 1594 of SEQ ID NO: 1883892
uauauuggugccugguuaa

SEQ ID NO: 2224221 - RNA, 19 nt, Artificial Sequence
  Description of Artificial Sequence: Synthetic oligonucleotide
  Antisense strand to SEQ ID NO: 2224220
uuaaccaggcaccaauaua

SEQ ID NO: 2224222 - RNA, 19 nt, Artificial Sequence
  Description of Artificial Sequence: Synthetic oligonucleotide
  Sense strand starting at position 1645 of SEQ ID NO: 1883892
cagccauacccacgguaua

SEQ ID NO: 2224223 - RNA, 19 nt, Artificial Sequence
  Description of Artificial Sequence: Synthetic oligonucleotide
  Antisense strand to SEQ ID NO: 2224222
uauaccguggguauggcug

SEQ ID NO: 2224224 - RNA, 19 nt, Artificial Sequence
  Description of Artificial Sequence: Synthetic oligonucleotide
  Sense strand starting at position 1646 of SEQ ID NO: 1883892
agccauacccacgguauaa

SEQ ID NO: 2224225 - RNA, 19 nt, Artificial Sequence
  Description of Artificial Sequence: Synthetic oligonucleotide
  Antisense strand to SEQ ID NO: 2224224
uuauaccguggguauggcu

SEQ ID NO: 2224226 - RNA, 19 nt, Artificial Sequence
  Description of Artificial Sequence: Synthetic oligonucleotide
  Sense strand starting at position 1648 of SEQ ID NO: 1883892
ccauacccacgguauaaau

SEQ ID NO: 2224227 - RNA, 19 nt, Artificial Sequence
  Description of Artificial Sequence: Synthetic oligonucleotide
  Antisense strand to SEQ ID NO: 2224226
auuuauaccguggguaugg

SEQ ID NO: 2224228 - RNA, 19 nt, Artificial Sequence
  Description of Artificial Sequence: Synthetic oligonucleotide
  Sense strand starting at position 1749 of SEQ ID NO: 1883892
gcugauaaauacgaacuga

SEQ ID NO: 2224229 - RNA, 19 nt, Artificial Sequence
  Description of Artificial Sequence: Synthetic oligonucleotide
  Antisense strand to SEQ ID NO: 2224228
ucaguucguauuuaucagc

SEQ ID NO: 2224230 - RNA, 19 nt, Artificial Sequence
  Description of Artificial Sequence: Synthetic oligonucleotide
  Sense strand starting at position 1776 of SEQ ID NO: 1883892
cuuugagaguguccaaaga

SEQ ID NO: 2224231 - RNA, 19 nt, Artificial Sequence
  Description of Artificial Sequence: Synthetic oligonucleotide
  Antisense strand to SEQ ID NO: 2224230
ucuuuggacacucucaaag

SEQ ID NO: 2224232 - RNA, 19 nt, Artificial Sequence
  Description of Artificial Sequence: Synthetic oligonucleotide
  Sense strand starting at position 1785 of SEQ ID NO: 1883892
uguccaaagauggauguuu

SEQ ID NO: 2224233 - RNA, 19 nt, Artificial Sequence
  Description of Artificial Sequence: Synthetic oligonucleotide
  Antisense strand to SEQ ID NO: 2224232
aaacauccaucuuuggaca

SEQ ID NO: 2224234 - RNA, 19 nt, Artificial Sequence
  Description of Artificial Sequence: Synthetic oligonucleotide
  Sense strand starting at position 1803 of SEQ ID NO: 1883892
ucaucauuguuccaucagu

SEQ ID NO: 2224235 - RNA, 19 nt, Artificial Sequence
  Description of Artificial Sequence: Synthetic oligonucleotide
  Antisense strand to SEQ ID NO: 2224234
acugauggaacaaugauga

SEQ ID NO: 2224236 - RNA, 19 nt, Artificial Sequence
  Description of Artificial Sequence: Synthetic oligonucleotide
  Sense strand starting at position 1838 of SEQ ID NO: 1883892
cuggaaaccuugucaucug

SEQ ID NO: 2224237 - RNA, 19 nt, Artificial Sequence
  Description of Artificial Sequence: Synthetic oligonucleotide
  Antisense strand to SEQ ID NO: 2224236
cagaugacaagguuuccag

SEQ ID NO: 2224238 - RNA, 19 nt, Artificial Sequence
  Description of Artificial Sequence: Synthetic oligonucleotide
  Sense strand starting at position 1845 of SEQ ID NO: 1883892
ccuugucaucugcaggaga

SEQ ID NO: 2224239 - RNA, 19 nt, Artificial Sequence
  Description of Artificial Sequence: Synthetic oligonucleotide
  Antisense strand to SEQ ID NO: 2224238
ucuccugcagaugacaagg

SEQ ID NO: 2224240 - RNA, 19 nt, Artificial Sequence
  Description of Artificial Sequence: Synthetic oligonucleotide
  Sense strand starting at position 1847 of SEQ ID NO: 1883892
uugucaucugcaggagaag

SEQ ID NO: 2224241 - RNA, 19 nt, Artificial Sequence
  Description of Artificial Sequence: Synthetic oligonucleotide
  Antisense strand to SEQ ID NO: 2224240
cuucuccugcagaugacaa

SEQ ID NO: 2224242 - RNA, 19 nt, Artificial Sequence
  Description of Artificial Sequence: Synthetic oligonucleotide
  Sense strand starting at position 1912 of SEQ ID NO: 1883892
guuccuguauugggagaaa

SEQ ID NO: 2224243 - RNA, 19 nt, Artificial Sequence
  Description of Artificial Sequence: Synthetic oligonucleotide
  Antisense strand to SEQ ID NO: 2224242
uuucucccaauacaggaac

SEQ ID NO: 2224244 - RNA, 19 nt, Artificial Sequence
  Description of Artificial Sequence: Synthetic oligonucleotide
  Sense strand starting at position 2001 of SEQ ID NO: 1883892
gcacuuccguuaucucaag

SEQ ID NO: 2224245 - RNA, 19 nt, Artificial Sequence
  Description of Artificial Sequence: Synthetic oligonucleotide
  Antisense strand to SEQ ID NO: 2224244
cuugagauaacggaagugc

SEQ ID NO: 2224246 - RNA, 19 nt, Artificial Sequence
  Description of Artificial Sequence: Synthetic oligonucleotide
  Sense strand starting at position 2222 of SEQ ID NO: 1883892
ucaucacucccacgauaug

SEQ ID NO: 2224247 - RNA, 19 nt, Artificial Sequence
  Description of Artificial Sequence: Synthetic oligonucleotide
  Antisense strand to SEQ ID NO: 2224246
cauaucgugggagugauga

SEQ ID NO: 2224248 - RNA, 19 nt, Artificial Sequence
  Description of Artificial Sequence: Synthetic oligonucleotide
  Sense strand starting at position 2239 of SEQ ID NO: 1883892
ugguguugggucugauuag

SEQ ID NO: 2224249 - RNA, 19 nt, Artificial Sequence
  Description of Artificial Sequence: Synthetic oligonucleotide
  Antisense strand to SEQ ID NO: 2224248
cuaaucagacccaacacca

SEQ ID NO: 2224250 - RNA, 19 nt, Artificial Sequence
  Description of Artificial Sequence: Synthetic oligonucleotide
  Sense strand starting at position 2246 of SEQ ID NO: 1883892
gggucugauuagcccaaca

SEQ ID NO: 2224251 - RNA, 19 nt, Artificial Sequence
  Description of Artificial Sequence: Synthetic oligonucleotide
  Antisense strand to SEQ ID NO: 2224250
uguugggcuaaucagaccc

SEQ ID NO: 2224252 - RNA, 19 nt, Artificial Sequence
  Description of Artificial Sequence: Synthetic oligonucleotide
  Sense strand starting at position 2248 of SEQ ID NO: 1883892
gucugauuagcccaacacu

SEQ ID NO: 2224253 - RNA, 19 nt, Artificial Sequence
  Description of Artificial Sequence: Synthetic oligonucleotide
  Antisense strand to SEQ ID NO: 2224252
aguguugggcuaaucagac

SEQ ID NO: 2224254 - RNA, 19 nt, Artificial Sequence
  Description of Artificial Sequence: Synthetic oligonucleotide
  Sense strand starting at position 2919 of SEQ ID NO: 1883892
caggguuaucagcaccaga

SEQ ID NO: 2224255 - RNA, 19 nt, Artificial Sequence
  Description of Artificial Sequence: Synthetic oligonucleotide
  Antisense strand to SEQ ID NO: 2224254
ucuggugcugauaacccug

SEQ ID NO: 2224256 - RNA, 19 nt, Artificial Sequence
  Description of Artificial Sequence: Synthetic oligonucleotide
  Sense strand starting at position 2922 of SEQ ID NO: 1883892
gguuaucagcaccagaacu

SEQ ID NO: 2224257 - RNA, 19 nt, Artificial Sequence
  Description of Artificial Sequence: Synthetic oligonucleotide
  Antisense strand to SEQ ID NO: 2224256
aguucuggugcugauaacc

SEQ ID NO: 2224258 - RNA, 19 nt, Artificial Sequence
  Description of Artificial Sequence: Synthetic oligonucleotide
  Sense strand starting at position 3210 of SEQ ID NO: 1883892
aauauugagccuggacagu

SEQ ID NO: 2224259 - RNA, 19 nt, Artificial Sequence
  Description of Artificial Sequence: Synthetic oligonucleotide
  Antisense strand to SEQ ID NO: 2224258
acuguccaggcucaauauu

SEQ ID NO: 2224260 - RNA, 19 nt, Artificial Sequence
  Description of Artificial Sequence: Synthetic oligonucleotide
  Sense strand starting at position 3345 of SEQ ID NO: 1883892
uucugaaguuugucgagac

SEQ ID NO: 2224261 - RNA, 19 nt, Artificial Sequence
  Description of Artificial Sequence: Synthetic oligonucleotide
  Antisense strand to SEQ ID NO: 2224260
gucucgacaaacuucagaa

SEQ ID NO: 2224262 - RNA, 19 nt, Artificial Sequence
  Description of Artificial Sequence: Synthetic oligonucleotide
  Sense strand starting at position 3399 of SEQ ID NO: 1883892
agugguugacguggaaaga

SEQ ID NO: 2224263 - RNA, 19 nt, Artificial Sequence
  Description of Artificial Sequence: Synthetic oligonucleotide
  Antisense strand to SEQ ID NO: 2224262
ucuuuccacgucaaccacu

SEQ ID NO: 2224264 - RNA, 19 nt, Artificial Sequence
  Description of Artificial Sequence: Synthetic oligonucleotide
  Sense strand starting at position 3528 of SEQ ID NO: 1883892
uacugugacguugaccaua

SEQ ID NO: 2224265 - RNA, 19 nt, Artificial Sequence
  Description of Artificial Sequence: Synthetic oligonucleotide
  Antisense strand to SEQ ID NO: 2224264
uauggucaacgucacagua

SEQ ID NO: 2224266 - RNA, 19 nt, Artificial Sequence
  Description of Artificial Sequence: Synthetic oligonucleotide
  Sense strand starting at position 3530 of SEQ ID NO: 1883892
cugugacguugaccauaga

SEQ ID NO: 2224267 - RNA, 19 nt, Artificial Sequence
  Description of Artificial Sequence: Synthetic oligonucleotide
  Antisense strand to SEQ ID NO: 2224266
ucuauggucaacgucacag

SEQ ID NO: 2224268 - RNA, 19 nt, Artificial Sequence
  Description of Artificial Sequence: Synthetic oligonucleotide
  Sense strand starting at position 3531 of SEQ ID NO: 1883892
ugugacguugaccauagau

SEQ ID NO: 2224269 - RNA, 19 nt, Artificial Sequence
  Description of Artificial Sequence: Synthetic oligonucleotide
  Antisense strand to SEQ ID NO: 2224268
aucuauggucaacgucaca

SEQ ID NO: 2224270 - RNA, 19 nt, Artificial Sequence
  Description of Artificial Sequence: Synthetic oligonucleotide
  Sense strand starting at position 3563 of SEQ ID NO: 1883892
aucucauccuaguuccaga

SEQ ID NO: 2224271 - RNA, 19 nt, Artificial Sequence
  Description of Artificial Sequence: Synthetic oligonucleotide
  Antisense strand to SEQ ID NO: 2224270
ucuggaacuaggaugagau

SEQ ID NO: 2224272 - RNA, 19 nt, Artificial Sequence
  Description of Artificial Sequence: Synthetic oligonucleotide
  Sense strand starting at position 3566 of SEQ ID NO: 1883892
ucauccuaguuccagagaa

SEQ ID NO: 2224273 - RNA, 19 nt, Artificial Sequence
  Description of Artificial Sequence: Synthetic oligonucleotide
  Antisense strand to SEQ ID NO: 2224272
uucucuggaacuaggauga

SEQ ID NO: 2224274 - RNA, 19 nt, Artificial Sequence
  Description of Artificial Sequence: Synthetic oligonucleotide
  Sense strand starting at position 3637 of SEQ ID NO: 1883892
gugggagcuucccauggau

SEQ ID NO: 2224275 - RNA, 19 nt, Artificial Sequence
  Description of Artificial Sequence: Synthetic oligonucleotide
  Antisense strand to SEQ ID NO: 2224274
auccaugggaagcucccac

SEQ ID NO: 2224276 - RNA, 19 nt, Artificial Sequence
  Description of Artificial Sequence: Synthetic oligonucleotide
  Sense strand starting at position 3639 of SEQ ID NO: 1883892
gggagcuucccauggauga

SEQ ID NO: 2224277 - RNA, 19 nt, Artificial Sequence
  Description of Artificial Sequence: Synthetic oligonucleotide
  Antisense strand to SEQ ID NO: 2224276
ucauccaugggaagcuccc

SEQ ID NO: 2224278 - RNA, 19 nt, Artificial Sequence
  Description of Artificial Sequence: Synthetic oligonucleotide
  Sense strand starting at position 3685 of SEQ ID NO: 1883892
ggccgauauuccuaacccu

SEQ ID NO: 2224279 - RNA, 19 nt, Artificial Sequence
  Description of Artificial Sequence: Synthetic oligonucleotide
  Antisense strand to SEQ ID NO: 2224278
aggguuaggaauaucggcc

SEQ ID NO: 2224280 - RNA, 19 nt, Artificial Sequence
  Description of Artificial Sequence: Synthetic oligonucleotide
  Sense strand starting at position 3735 of SEQ ID NO: 1883892
gagagucagucacugacaa

SEQ ID NO: 2224281 - RNA, 19 nt, Artificial Sequence
  Description of Artificial Sequence: Synthetic oligonucleotide
  Antisense strand to SEQ ID NO: 2224280
uugucagugacugacucuc

SEQ ID NO: 2224282 - RNA, 19 nt, Artificial Sequence
  Description of Artificial Sequence: Synthetic oligonucleotide
  Sense strand starting at position 3736 of SEQ ID NO: 1883892
agagucagucacugacaau

SEQ ID NO: 2224283 - RNA, 19 nt, Artificial Sequence
  Description of Artificial Sequence: Synthetic oligonucleotide
  Antisense strand to SEQ ID NO: 2224282
auugucagugacugacucu

SEQ ID NO: 2224284 - RNA, 19 nt, Artificial Sequence
  Description of Artificial Sequence: Synthetic oligonucleotide
  Sense strand starting at position 231 of SEQ ID NO: 1883893
aguauuauguuaucaucag

SEQ ID NO: 2224285 - RNA, 19 nt, Artificial Sequence
  Description of Artificial Sequence: Synthetic oligonucleotide
  Antisense strand to SEQ ID NO: 2224284
cugaugauaacauaauacu

SEQ ID NO: 2224286 - RNA, 19 nt, Artificial Sequence
  Description of Artificial Sequence: Synthetic oligonucleotide
  Sense strand starting at position 235 of SEQ ID NO: 1883893
uuauguuaucaucaggauu

SEQ ID NO: 2224287 - RNA, 19 nt, Artificial Sequence
  Description of Artificial Sequence: Synthetic oligonucleotide
  Antisense strand to SEQ ID NO: 2224286
aauccugaugauaacauaa

SEQ ID NO: 2224288 - RNA, 19 nt, Artificial Sequence
  Description of Artificial Sequence: Synthetic oligonucleotide
  Sense strand starting at position 367 of SEQ ID NO: 1883893
gauagaauuugucaagguu

SEQ ID NO: 2224289 - RNA, 19 nt, Artificial Sequence
  Description of Artificial Sequence: Synthetic oligonucleotide
  Antisense strand to SEQ ID NO: 2224288
aaccuugacaaauucuauc

SEQ ID NO: 2224290 - RNA, 19 nt, Artificial Sequence
  Description of Artificial Sequence: Synthetic oligonucleotide
  Sense strand starting at position 376 of SEQ ID NO: 1883893
ugucaagguuuccuugaag

SEQ ID NO: 2224291 - RNA, 19 nt, Artificial Sequence
  Description of Artificial Sequence: Synthetic oligonucleotide
  Antisense strand to SEQ ID NO: 2224290
cuucaaggaaaccuugaca

SEQ ID NO: 2224292 - RNA, 19 nt, Artificial Sequence
  Description of Artificial Sequence: Synthetic oligonucleotide
  Sense strand starting at position 410 of SEQ ID NO: 1883893
ugacuuguucuacagauac

SEQ ID NO: 2224293 - RNA, 19 nt, Artificial Sequence
  Description of Artificial Sequence: Synthetic oligonucleotide
  Antisense strand to SEQ ID NO: 2224292
guaucuguagaacaaguca

SEQ ID NO: 2224294 - RNA, 19 nt, Artificial Sequence
  Description of Artificial Sequence: Synthetic oligonucleotide
  Sense strand starting at position 526 of SEQ ID NO: 1883893
ucaaaugugagucauguca

SEQ ID NO: 2224295 - RNA, 19 nt, Artificial Sequence
  Description of Artificial Sequence: Synthetic oligonucleotide
  Antisense strand to SEQ ID NO: 2224294
ugacaugacucacauuuga

SEQ ID NO: 2224296 - RNA, 19 nt, Artificial Sequence
  Description of Artificial Sequence: Synthetic oligonucleotide
  Sense strand starting at position 2038 of SEQ ID NO: 1883893
agcacugaucauuaaguuu

SEQ ID NO: 2224297 - RNA, 19 nt, Artificial Sequence
  Description of Artificial Sequence: Synthetic oligonucleotide
  Antisense strand to SEQ ID NO: 2224296
aaacuuaaugaucagugcu

SEQ ID NO: 2224298 - RNA, 19 nt, Artificial Sequence
  Description of Artificial Sequence: Synthetic oligonucleotide
  Sense strand starting at position 2374 of SEQ ID NO: 1883893
ugcaccuggccugaucaua

SEQ ID NO: 2224299 - RNA, 19 nt, Artificial Sequence
  Description of Artificial Sequence: Synthetic oligonucleotide
  Antisense strand to SEQ ID NO: 2224298
uaugaucaggccaggugca

SEQ ID NO: 2224300 - RNA, 19 nt, Artificial Sequence
  Description of Artificial Sequence: Synthetic oligonucleotide
  Sense strand starting at position 2403 of SEQ ID NO: 1883893
guaagcuuuggucauaaag

SEQ ID NO: 2224301 - RNA, 19 nt, Artificial Sequence
  Description of Artificial Sequence: Synthetic oligonucleotide
  Antisense strand to SEQ ID NO: 2224300
cuuuaugaccaaagcuuac

SEQ ID NO: 2224302 - RNA, 19 nt, Artificial Sequence
  Description of Artificial Sequence: Synthetic oligonucleotide
  Sense strand starting at position 2562 of SEQ ID NO: 1883893
aggaaauuggcauguacag

SEQ ID NO: 2224303 - RNA, 19 nt, Artificial Sequence
  Description of Artificial Sequence: Synthetic oligonucleotide
  Antisense strand to SEQ ID NO: 2224302
cuguacaugccaauuuccu

SEQ ID NO: 2224304 - RNA, 19 nt, Artificial Sequence
  Description of Artificial Sequence: Synthetic oligonucleotide
  Sense strand starting at position 2847 of SEQ ID NO: 1883893
ugaacucagaaacguguaa

SEQ ID NO: 2224305 - RNA, 19 nt, Artificial Sequence
  Description of Artificial Sequence: Synthetic oligonucleotide
  Antisense strand to SEQ ID NO: 2224304
uuacacguuucugaguuca

SEQ ID NO: 2224306 - RNA, 19 nt, Artificial Sequence
  Description of Artificial Sequence: Synthetic oligonucleotide
  Sense strand starting at position 2851 of SEQ ID NO: 1883893
cucagaaacguguaagaau

SEQ ID NO: 2224307 - RNA, 19 nt, Artificial Sequence
  Description of Artificial Sequence: Synthetic oligonucleotide
  Antisense strand to SEQ ID NO: 2224306
auucuuacacguuucugag

SEQ ID NO: 2224308 - RNA, 19 nt, Artificial Sequence
  Description of Artificial Sequence: Synthetic oligonucleotide
  Sense strand starting at position 3123 of SEQ ID NO: 1883893
gaaugauuccauugaguua

SEQ ID NO: 2224309 - RNA, 19 nt, Artificial Sequence
  Description of Artificial Sequence: Synthetic oligonucleotide
  Antisense strand to SEQ ID NO: 2224308
uaacucaauggaaucauuc

SEQ ID NO: 2224310 - RNA, 19 nt, Artificial Sequence
  Description of Artificial Sequence: Synthetic oligonucleotide
  Sense strand starting at position 3126 of SEQ ID NO: 1883893
ugauuccauugaguuauca

SEQ ID NO: 2224311 - RNA, 19 nt, Artificial Sequence
  Description of Artificial Sequence: Synthetic oligonucleotide
  Antisense strand to SEQ ID NO: 2224310
ugauaacucaauggaauca

SEQ ID NO: 2224312 - RNA, 19 nt, Artificial Sequence
  Description of Artificial Sequence: Synthetic oligonucleotide
  Sense strand starting at position 3130 of SEQ ID NO: 1883893
uccauugaguuaucauucu

SEQ ID NO: 2224313 - RNA, 19 nt, Artificial Sequence
  Description of Artificial Sequence: Synthetic oligonucleotide
  Antisense strand to SEQ ID NO: 2224312
agaaugauaacucaaugga

SEQ ID NO: 2224314 - RNA, 19 nt, Artificial Sequence
  Description of Artificial Sequence: Synthetic oligonucleotide
  Sense strand starting at position 3137 of SEQ ID NO: 1883893
aguuaucauucuuuaggua

SEQ ID NO: 2224315 - RNA, 19 nt, Artificial Sequence
  Description of Artificial Sequence: Synthetic oligonucleotide
  Antisense strand to SEQ ID NO: 2224314
uaccuaaagaaugauaacu

SEQ ID NO: 2224316 - RNA, 19 nt, Artificial Sequence
  Description of Artificial Sequence: Synthetic oligonucleotide
  Sense strand starting at position 3138 of SEQ ID NO: 1883893
guuaucauucuuuagguag

SEQ ID NO: 2224317 - RNA, 19 nt, Artificial Sequence
  Description of Artificial Sequence: Synthetic oligonucleotide
  Antisense strand to SEQ ID NO: 2224316
cuaccuaaagaaugauaac

SEQ ID NO: 2224318 - RNA, 19 nt, Artificial Sequence
  Description of Artificial Sequence: Synthetic oligonucleotide
  Sense strand starting at position 3141 of SEQ ID NO: 1883893
aucauucuuuagguaguaa

SEQ ID NO: 2224319 - RNA, 19 nt, Artificial Sequence
  Description of Artificial Sequence: Synthetic oligonucleotide
  Antisense strand to SEQ ID NO: 2224318
uuacuaccuaaagaaugau

SEQ ID NO: 2224320 - RNA, 19 nt, Artificial Sequence
  Description of Artificial Sequence: Synthetic oligonucleotide
  Sense strand starting at position 3165 of SEQ ID NO: 1883893
caaagaaagugagugguua

SEQ ID NO: 2224321 - RNA, 19 nt, Artificial Sequence
  Description of Artificial Sequence: Synthetic oligonucleotide
  Antisense strand to SEQ ID NO: 2224320
uaaccacucacuuucuuug

SEQ ID NO: 2224322 - RNA, 19 nt, Artificial Sequence
  Description of Artificial Sequence: Synthetic oligonucleotide
  Sense strand starting at position 3166 of SEQ ID NO: 1883893
aaagaaagugagugguuau

SEQ ID NO: 2224323 - RNA, 19 nt, Artificial Sequence
  Description of Artificial Sequence: Synthetic oligonucleotide
  Antisense strand to SEQ ID NO: 2224322
auaaccacucacuuucuuu

SEQ ID NO: 2224324 - RNA, 19 nt, Artificial Sequence
  Description of Artificial Sequence: Synthetic oligonucleotide
  Sense strand starting at position 3167 of SEQ ID NO: 1883893
aagaaagugagugguuauu

SEQ ID NO: 2224325 - RNA, 19 nt, Artificial Sequence
  Description of Artificial Sequence: Synthetic oligonucleotide
  Antisense strand to SEQ ID NO: 2224324
aauaaccacucacuuucuu

SEQ ID NO: 2224326 - RNA, 19 nt, Artificial Sequence
  Description of Artificial Sequence: Synthetic oligonucleotide
  Sense strand starting at position 3169 of SEQ ID NO: 1883893
gaaagugagugguuauuac

SEQ ID NO: 2224327 - RNA, 19 nt, Artificial Sequence
  Description of Artificial Sequence: Synthetic oligonucleotide
  Antisense strand to SEQ ID NO: 2224326
guaauaaccacucacuuuc

SEQ ID NO: 2224328 - RNA, 19 nt, Artificial Sequence
  Description of Artificial Sequence: Synthetic oligonucleotide
  Sense strand starting at position 3176 of SEQ ID NO: 1883893
agugguuauuaccuuuaca

SEQ ID NO: 2224329 - RNA, 19 nt, Artificial Sequence
  Description of Artificial Sequence: Synthetic oligonucleotide
  Antisense strand to SEQ ID NO: 2224328
uguaaagguaauaaccacu

SEQ ID NO: 2224330 - RNA, 19 nt, Artificial Sequence
  Description of Artificial Sequence: Synthetic oligonucleotide
  Sense strand starting at position 3179 of SEQ ID NO: 1883893
gguuauuaccuuuacauug

SEQ ID NO: 2224331 - RNA, 19 nt, Artificial Sequence
  Description of Artificial Sequence: Synthetic oligonucleotide
  Antisense strand to SEQ ID NO: 2224330
caauguaaagguaauaacc

SEQ ID NO: 2224332 - RNA, 19 nt, Artificial Sequence
  Description of Artificial Sequence: Synthetic oligonucleotide
  Sense strand starting at position 3184 of SEQ ID NO: 1883893
uuaccuuuacauugaggau

SEQ ID NO: 2224333 - RNA, 19 nt, Artificial Sequence
  Description of Artificial Sequence: Synthetic oligonucleotide
  Antisense strand to SEQ ID NO: 2224332
auccucaauguaaagguaa

SEQ ID NO: 2224334 - RNA, 19 nt, Artificial Sequence
  Description of Artificial Sequence: Synthetic oligonucleotide
  Sense strand starting at position 3196 of SEQ ID NO: 1883893
ugaggauagugauugccuu

SEQ ID NO: 2224335 - RNA, 19 nt, Artificial Sequence
  Description of Artificial Sequence: Synthetic oligonucleotide
  Antisense strand to SEQ ID NO: 2224334
aaggcaaucacuauccuca

SEQ ID NO: 2224336 - RNA, 19 nt, Artificial Sequence
  Description of Artificial Sequence: Synthetic oligonucleotide
  Sense strand starting at position 3197 of SEQ ID NO: 1883893
gaggauagugauugccuuu

SEQ ID NO: 2224337 - RNA, 19 nt, Artificial Sequence
  Description of Artificial Sequence: Synthetic oligonucleotide
  Antisense strand to SEQ ID NO: 2224336
aaaggcaaucacuauccuc

SEQ ID NO: 2224338 - RNA, 19 nt, Artificial Sequence
  Description of Artificial Sequence: Synthetic oligonucleotide
  Sense strand starting at position 3200 of SEQ ID NO: 1883893
gauagugauugccuuuaga

SEQ ID NO: 2224339 - RNA, 19 nt, Artificial Sequence
  Description of Artificial Sequence: Synthetic oligonucleotide
  Antisense strand to SEQ ID NO: 2224338
ucuaaaggcaaucacuauc

SEQ ID NO: 2224340 - RNA, 19 nt, Artificial Sequence
  Description of Artificial Sequence: Synthetic oligonucleotide
  Sense strand starting at position 3203 of SEQ ID NO: 1883893
agugauugccuuuagaaga

SEQ ID NO: 2224341 - RNA, 19 nt, Artificial Sequence
  Description of Artificial Sequence: Synthetic oligonucleotide
  Antisense strand to SEQ ID NO: 2224340
ucuucuaaaggcaaucacu

SEQ ID NO: 2224342 - RNA, 19 nt, Artificial Sequence
  Description of Artificial Sequence: Synthetic oligonucleotide
  Sense strand starting at position 3222 of SEQ ID NO: 1883893
aauggaccaguuugugauu

SEQ ID NO: 2224343 - RNA, 19 nt, Artificial Sequence
  Description of Artificial Sequence: Synthetic oligonucleotide
  Antisense strand to SEQ ID NO: 2224342
aaucacaaacugguccauu

SEQ ID NO: 2224344 - RNA, 19 nt, Artificial Sequence
  Description of Artificial Sequence: Synthetic oligonucleotide
  Sense strand starting at position 3273 of SEQ ID NO: 1883893
acaucuugaccuugaaagu

SEQ ID NO: 2224345 - RNA, 19 nt, Artificial Sequence
  Description of Artificial Sequence: Synthetic oligonucleotide
  Antisense strand to SEQ ID NO: 2224344
acuuucaaggucaagaugu

SEQ ID NO: 2224346 - RNA, 19 nt, Artificial Sequence
  Description of Artificial Sequence: Synthetic oligonucleotide
  Sense strand starting at position 3279 of SEQ ID NO: 1883893
ugaccuugaaagugguuau

SEQ ID NO: 2224347 - RNA, 19 nt, Artificial Sequence
  Description of Artificial Sequence: Synthetic oligonucleotide
  Antisense strand to SEQ ID NO: 2224346
auaaccacuuucaagguca

SEQ ID NO: 2224348 - RNA, 19 nt, Artificial Sequence
  Description of Artificial Sequence: Synthetic oligonucleotide
  Sense strand starting at position 3282 of SEQ ID NO: 1883893
ccuugaaagugguuauaga

SEQ ID NO: 2224349 - RNA, 19 nt, Artificial Sequence
  Description of Artificial Sequence: Synthetic oligonucleotide
  Antisense strand to SEQ ID NO: 2224348
ucuauaaccacuuucaagg

SEQ ID NO: 2224350 - RNA, 19 nt, Artificial Sequence
  Description of Artificial Sequence: Synthetic oligonucleotide
  Sense strand starting at position 3291 of SEQ ID NO: 1883893
ugguuauagagguguuaac

SEQ ID NO: 2224351 - RNA, 19 nt, Artificial Sequence
  Description of Artificial Sequence: Synthetic oligonucleotide
  Antisense strand to SEQ ID NO: 2224350
guuaacaccucuauaacca

SEQ ID NO: 2224352 - RNA, 19 nt, Artificial Sequence
  Description of Artificial Sequence: Synthetic oligonucleotide
  Sense strand starting at position 3597 of SEQ ID NO: 1883893
ggucauguuuaaccagacu

SEQ ID NO: 2224353 - RNA, 19 nt, Artificial Sequence
  Description of Artificial Sequence: Synthetic oligonucleotide
  Antisense strand to SEQ ID NO: 2224352
agucugguuaaacaugacc

SEQ ID NO: 2224354 - RNA, 19 nt, Artificial Sequence
  Description of Artificial Sequence: Synthetic oligonucleotide
  Sense strand starting at position 3733 of SEQ ID NO: 1883893
gguaacaaguuauugaaua

SEQ ID NO: 2224355 - RNA, 19 nt, Artificial Sequence
  Description of Artificial Sequence: Synthetic oligonucleotide
  Antisense strand to SEQ ID NO: 2224354
uauucaauaacuuguuacc

SEQ ID NO: 2224356 - RNA, 19 nt, Artificial Sequence
  Description of Artificial Sequence: Synthetic oligonucleotide
  Sense strand starting at position 3759 of SEQ ID NO: 1883893
agaaauagugcuggauaga

SEQ ID NO: 2224357 - RNA, 19 nt, Artificial Sequence
  Description of Artificial Sequence: Synthetic oligonucleotide
  Antisense strand to SEQ ID NO: 2224356
ucuauccagcacuauuucu

SEQ ID NO: 2224358 - RNA, 19 nt, Artificial Sequence
  Description of Artificial Sequence: Synthetic oligonucleotide
  Sense strand starting at position 3839 of SEQ ID NO: 1883893
cuguuucuggaauauucua

SEQ ID NO: 2224359 - RNA, 19 nt, Artificial Sequence
  Description of Artificial Sequence: Synthetic oligonucleotide
  Antisense strand to SEQ ID NO: 2224358
uagaauauuccagaaacag

SEQ ID NO: 2224360 - RNA, 19 nt, Artificial Sequence
  Description of Artificial Sequence: Synthetic oligonucleotide
  Sense strand starting at position 3847 of SEQ ID NO: 1883893
ggaauauucuaaccacgag

SEQ ID NO: 2224361 - RNA, 19 nt, Artificial Sequence
  Description of Artificial Sequence: Synthetic oligonucleotide
  Antisense strand to SEQ ID NO: 2224360
cucgugguuagaauauucc

SEQ ID NO: 2224362 - RNA, 19 nt, Artificial Sequence
  Description of Artificial Sequence: Synthetic oligonucleotide
  Sense strand starting at position 3850 of SEQ ID NO: 1883893
auauucuaaccacgagaua

SEQ ID NO: 2224363 - RNA, 19 nt, Artificial Sequence
  Description of Artificial Sequence: Synthetic oligonucleotide
  Antisense strand to SEQ ID NO: 2224362
uaucucgugguuagaauau

SEQ ID NO: 2224364 - RNA, 19 nt, Artificial Sequence
  Description of Artificial Sequence: Synthetic oligonucleotide
  Sense strand starting at position 988 of SEQ ID NO: 1883894
aguuauuaguuucccaaga

SEQ ID NO: 2224365 - RNA, 19 nt, Artificial Sequence
  Description of Artificial Sequence: Synthetic oligonucleotide
  Antisense strand to SEQ ID NO: 2224364
ucuugggaaacuaauaacu

SEQ ID NO: 2224366 - RNA, 19 nt, Artificial Sequence
  Description of Artificial Sequence: Synthetic oligonucleotide
  Sense strand starting at position 989 of SEQ ID NO: 1883894
guuauuaguuucccaagau

SEQ ID NO: 2224367 - RNA, 19 nt, Artificial Sequence
  Description of Artificial Sequence: Synthetic oligonucleotide
  Antisense strand to SEQ ID NO: 2224366
aucuugggaaacuaauaac

SEQ ID NO: 2224368 - RNA, 19 nt, Artificial Sequence
  Description of Artificial Sequence: Synthetic oligonucleotide
  Sense strand starting at position 998 of SEQ ID NO: 1883894
uucccaagauucuuggaau

SEQ ID NO: 2224369 - RNA, 19 nt, Artificial Sequence
  Description of Artificial Sequence: Synthetic oligonucleotide
  Antisense strand to SEQ ID NO: 2224368
auuccaagaaucuugggaa

SEQ ID NO: 2224370 - RNA, 19 nt, Artificial Sequence
  Description of Artificial Sequence: Synthetic oligonucleotide
  Sense strand starting at position 1011 of SEQ ID NO: 1883894
uggaaucucuuauucggua

SEQ ID NO: 2224371 - RNA, 19 nt, Artificial Sequence
  Description of Artificial Sequence: Synthetic oligonucleotide
  Antisense strand to SEQ ID NO: 2224370
uaccgaauaagagauucca

SEQ ID NO: 2224372 - RNA, 19 nt, Artificial Sequence
  Description of Artificial Sequence: Synthetic oligonucleotide
  Sense strand starting at position 1015 of SEQ ID NO: 1883894
aucucuuauucgguacaaa

SEQ ID NO: 2224373 - RNA, 19 nt, Artificial Sequence
  Description of Artificial Sequence: Synthetic oligonucleotide
  Antisense strand to SEQ ID NO: 2224372
uuuguaccgaauaagagau

SEQ ID NO: 2224374 - RNA, 19 nt, Artificial Sequence
  Description of Artificial Sequence: Synthetic oligonucleotide
  Sense strand starting at position 1016 of SEQ ID NO: 1883894
ucucuuauucgguacaaau

SEQ ID NO: 2224375 - RNA, 19 nt, Artificial Sequence
  Description of Artificial Sequence: Synthetic oligonucleotide
  Antisense strand to SEQ ID NO: 2224374
auuuguaccgaauaagaga

SEQ ID NO: 2224376 - RNA, 19 nt, Artificial Sequence
  Description of Artificial Sequence: Synthetic oligonucleotide
  Sense strand starting at position 1067 of SEQ ID NO: 1883894
cugaguuacacugaggcaa

SEQ ID NO: 2224377 - RNA, 19 nt, Artificial Sequence
  Description of Artificial Sequence: Synthetic oligonucleotide
  Antisense strand to SEQ ID NO: 2224376
uugccucaguguaacucag

SEQ ID NO: 2224378 - RNA, 19 nt, Artificial Sequence
  Description of Artificial Sequence: Synthetic oligonucleotide
  Sense strand starting at position 1165 of SEQ ID NO: 1883894
gcaacaccaccucgaaauu

SEQ ID NO: 2224379 - RNA, 19 nt, Artificial Sequence
  Description of Artificial Sequence: Synthetic oligonucleotide
  Antisense strand to SEQ ID NO: 2224378
aauuucgaggugguguugc

SEQ ID NO: 2224380 - RNA, 19 nt, Artificial Sequence
  Description of Artificial Sequence: Synthetic oligonucleotide
  Sense strand starting at position 1174 of SEQ ID NO: 1883894
ccucgaaauucucuccuga

SEQ ID NO: 2224381 - RNA, 19 nt, Artificial Sequence
  Description of Artificial Sequence: Synthetic oligonucleotide
  Antisense strand to SEQ ID NO: 2224380
ucaggagagaauuucgagg

SEQ ID NO: 2224382 - RNA, 19 nt, Artificial Sequence
  Description of Artificial Sequence: Synthetic oligonucleotide
  Sense strand starting at position 1176 of SEQ ID NO: 1883894
ucgaaauucucuccugaaa

SEQ ID NO: 2224383 - RNA, 19 nt, Artificial Sequence
  Description of Artificial Sequence: Synthetic oligonucleotide
  Antisense strand to SEQ ID NO: 2224382
uuucaggagagaauuucga

SEQ ID NO: 2224384 - RNA, 19 nt, Artificial Sequence
  Description of Artificial Sequence: Synthetic oligonucleotide
  Sense strand starting at position 1247 of SEQ ID NO: 1883894
ucaugauguccuggacuac

SEQ ID NO: 2224385 - RNA, 19 nt, Artificial Sequence
  Description of Artificial Sequence: Synthetic oligonucleotide
  Antisense strand to SEQ ID NO: 2224384
guaguccaggacaucauga

SEQ ID NO: 2224386 - RNA, 19 nt, Artificial Sequence
  Description of Artificial Sequence: Synthetic oligonucleotide
  Sense strand starting at position 1291 of SEQ ID NO: 1883894
gcuguucuacuaggaagaa

SEQ ID NO: 2224387 - RNA, 19 nt, Artificial Sequence
  Description of Artificial Sequence: Synthetic oligonucleotide
  Antisense strand to SEQ ID NO: 2224386
uucuuccuaguagaacagc

SEQ ID NO: 2224388 - RNA, 19 nt, Artificial Sequence
  Description of Artificial Sequence: Synthetic oligonucleotide
  Sense strand starting at position 1312 of SEQ ID NO: 1883894
aaaucuauugcguagaguu

SEQ ID NO: 2224389 - RNA, 19 nt, Artificial Sequence
  Description of Artificial Sequence: Synthetic oligonucleotide
  Antisense strand to SEQ ID NO: 2224388
aacucuacgcaauagauuu

SEQ ID NO: 2224390 - RNA, 19 nt, Artificial Sequence
  Description of Artificial Sequence: Synthetic oligonucleotide
  Sense strand starting at position 1331 of SEQ ID NO: 1883894
gucauuaucggcuaaacuc

SEQ ID NO: 2224391 - RNA, 19 nt, Artificial Sequence
  Description of Artificial Sequence: Synthetic oligonucleotide
  Antisense strand to SEQ ID NO: 2224390
gaguuuagccgauaaugac

SEQ ID NO: 2224392 - RNA, 19 nt, Artificial Sequence
  Description of Artificial Sequence: Synthetic oligonucleotide
  Sense strand starting at position 1358 of SEQ ID NO: 1883894
cuuuaaauggauugucuua

SEQ ID NO: 2224393 - RNA, 19 nt, Artificial Sequence
  Description of Artificial Sequence: Synthetic oligonucleotide
  Antisense strand to SEQ ID NO: 2224392
uaagacaauccauuuaaag

SEQ ID NO: 2224394 - RNA, 19 nt, Artificial Sequence
  Description of Artificial Sequence: Synthetic oligonucleotide
  Sense strand starting at position 1434 of SEQ ID NO: 1883894
gaagucgagagagguuuaa

SEQ ID NO: 2224395 - RNA, 19 nt, Artificial Sequence
  Description of Artificial Sequence: Synthetic oligonucleotide
  Antisense strand to SEQ ID NO: 2224394
uuaaaccucucucgacuuc

SEQ ID NO: 2224396 - RNA, 19 nt, Artificial Sequence
  Description of Artificial Sequence: Synthetic oligonucleotide
  Sense strand starting at position 1517 of SEQ ID NO: 1883894
cacaaagugccucggagaa

SEQ ID NO: 2224397 - RNA, 19 nt, Artificial Sequence
  Description of Artificial Sequence: Synthetic oligonucleotide
  Antisense strand to SEQ ID NO: 2224396
uucuccgaggcacuuugug

SEQ ID NO: 2224398 - RNA, 19 nt, Artificial Sequence
  Description of Artificial Sequence: Synthetic oligonucleotide
  Sense strand starting at position 1549 of SEQ ID NO: 1883894
gugugcaacagugaggaau

SEQ ID NO: 2224399 - RNA, 19 nt, Artificial Sequence
  Description of Artificial Sequence: Synthetic oligonucleotide
  Antisense strand to SEQ ID NO: 2224398
auuccucacuguugcacac

SEQ ID NO: 2224400 - RNA, 19 nt, Artificial Sequence
  Description of Artificial Sequence: Synthetic oligonucleotide
  Sense strand starting at position 1560 of SEQ ID NO: 1883894
ugaggaauucgcuaaccag

SEQ ID NO: 2224401 - RNA, 19 nt, Artificial Sequence
  Description of Artificial Sequence: Synthetic oligonucleotide
  Antisense strand to SEQ ID NO: 2224400
cugguuagcgaauuccuca

SEQ ID NO: 2224402 - RNA, 19 nt, Artificial Sequence
  Description of Artificial Sequence: Synthetic oligonucleotide
  Sense strand starting at position 2071 of SEQ ID NO: 1883894
accugaaccguuuaauaua

SEQ ID NO: 2224403 - RNA, 19 nt, Artificial Sequence
  Description of Artificial Sequence: Synthetic oligonucleotide
  Antisense strand to SEQ ID NO: 2224402
uauauuaaacgguucaggu

SEQ ID NO: 2224404 - RNA, 19 nt, Artificial Sequence
  Description of Artificial Sequence: Synthetic oligonucleotide
  Sense strand starting at position 2248 of SEQ ID NO: 1883894
gucagaaaucaccagccua

SEQ ID NO: 2224405 - RNA, 19 nt, Artificial Sequence
  Description of Artificial Sequence: Synthetic oligonucleotide
  Antisense strand to SEQ ID NO: 2224404
uaggcuggugauuucugac

SEQ ID NO: 2224406 - RNA, 19 nt, Artificial Sequence
  Description of Artificial Sequence: Synthetic oligonucleotide
  Sense strand starting at position 2317 of SEQ ID NO: 1883894
cuuugaaagugacucauca

SEQ ID NO: 2224407 - RNA, 19 nt, Artificial Sequence
  Description of Artificial Sequence: Synthetic oligonucleotide
  Antisense strand to SEQ ID NO: 2224406
ugaugagucacuuucaaag

SEQ ID NO: 2224408 - RNA, 19 nt, Artificial Sequence
  Description of Artificial Sequence: Synthetic oligonucleotide
  Sense strand starting at position 2324 of SEQ ID NO: 1883894
agugacucaucacuuucua

SEQ ID NO: 2224409 - RNA, 19 nt, Artificial Sequence
  Description of Artificial Sequence: Synthetic oligonucleotide
  Antisense strand to SEQ ID NO: 2224408
uagaaagugaugagucacu

SEQ ID NO: 2224410 - RNA, 19 nt, Artificial Sequence
  Description of Artificial Sequence: Synthetic oligonucleotide
  Sense strand starting at position 2765 of SEQ ID NO: 1883894
agccauaggucauuucuuu

SEQ ID NO: 2224411 - RNA, 19 nt, Artificial Sequence
  Description of Artificial Sequence: Synthetic oligonucleotide
  Antisense strand to SEQ ID NO: 2224410
aaagaaaugaccuauggcu

SEQ ID NO: 2224412 - RNA, 19 nt, Artificial Sequence
  Description of Artificial Sequence: Synthetic oligonucleotide
  Sense strand starting at position 2772 of SEQ ID NO: 1883894
ggucauuucuuucuuccuu

SEQ ID NO: 2224413 - RNA, 19 nt, Artificial Sequence
  Description of Artificial Sequence: Synthetic oligonucleotide
  Antisense strand to SEQ ID NO: 2224412
aaggaagaaagaaaugacc

SEQ ID NO: 2224414 - RNA, 19 nt, Artificial Sequence
  Description of Artificial Sequence: Synthetic oligonucleotide
  Sense strand starting at position 2934 of SEQ ID NO: 1883894
gcuggagucggucauuucu

SEQ ID NO: 2224415 - RNA, 19 nt, Artificial Sequence
  Description of Artificial Sequence: Synthetic oligonucleotide
  Antisense strand to SEQ ID NO: 2224414
agaaaugaccgacuccagc

SEQ ID NO: 2224416 - RNA, 19 nt, Artificial Sequence
  Description of Artificial Sequence: Synthetic oligonucleotide
  Sense strand starting at position 3035 of SEQ ID NO: 1883894
gcaugacuuugucccaaac

SEQ ID NO: 2224417 - RNA, 19 nt, Artificial Sequence
  Description of Artificial Sequence: Synthetic oligonucleotide
  Antisense strand to SEQ ID NO: 2224416
guuugggacaaagucaugc

SEQ ID NO: 2224418 - RNA, 19 nt, Artificial Sequence
  Description of Artificial Sequence: Synthetic oligonucleotide
  Sense strand starting at position 3064 of SEQ ID NO: 1883894
uccucaaugguaggaauaa

SEQ ID NO: 2224419 - RNA, 19 nt, Artificial Sequence
  Description of Artificial Sequence: Synthetic oligonucleotide
  Antisense strand to SEQ ID NO: 2224418
uuauuccuaccauugagga

SEQ ID NO: 2224420 - RNA, 19 nt, Artificial Sequence
  Description of Artificial Sequence: Synthetic oligonucleotide
  Sense strand starting at position 3113 of SEQ ID NO: 1883894
acacuucuccuagggauua

SEQ ID NO: 2224421 - RNA, 19 nt, Artificial Sequence
  Description of Artificial Sequence: Synthetic oligonucleotide
  Antisense strand to SEQ ID NO: 2224420
uaaucccuaggagaagugu

SEQ ID NO: 2224422 - RNA, 19 nt, Artificial Sequence
  Description of Artificial Sequence: Synthetic oligonucleotide
  Sense strand starting at position 3134 of SEQ ID NO: 1883894
ugaggcaacauaugugaga

SEQ ID NO: 2224423 - RNA, 19 nt, Artificial Sequence
  Description of Artificial Sequence: Synthetic oligonucleotide
  Antisense strand to SEQ ID NO: 2224422
ucucacauauguugccuca

SEQ ID NO: 2224424 - RNA, 19 nt, Artificial Sequence
  Description of Artificial Sequence: Synthetic oligonucleotide
  Sense strand starting at position 3135 of SEQ ID NO: 1883894
gaggcaacauaugugagaa

SEQ ID NO: 2224425 - RNA, 19 nt, Artificial Sequence
  Description of Artificial Sequence: Synthetic oligonucleotide
  Antisense strand to SEQ ID NO: 2224424
uucucacauauguugccuc

SEQ ID NO: 2224426 - RNA, 19 nt, Artificial Sequence
  Description of Artificial Sequence: Synthetic oligonucleotide
  Sense strand starting at position 3145 of SEQ ID NO: 1883894
augugagaacauuguaaau

SEQ ID NO: 2224427 - RNA, 19 nt, Artificial Sequence
  Description of Artificial Sequence: Synthetic oligonucleotide
  Antisense strand to SEQ ID NO: 2224426
auuuacaauguucucacau

SEQ ID NO: 2224428 - RNA, 19 nt, Artificial Sequence
  Description of Artificial Sequence: Synthetic oligonucleotide
  Sense strand starting at position 3147 of SEQ ID NO: 1883894
gugagaacauuguaaauuu

SEQ ID NO: 2224429 - RNA, 19 nt, Artificial Sequence
  Description of Artificial Sequence: Synthetic oligonucleotide
  Antisense strand to SEQ ID NO: 2224428
aaauuuacaauguucucac

SEQ ID NO: 2224430 - RNA, 19 nt, Artificial Sequence
  Description of Artificial Sequence: Synthetic oligonucleotide
  Sense strand starting at position 3229 of SEQ ID NO: 1883894
cuguauugauccuucugau

SEQ ID NO: 2224431 - RNA, 19 nt, Artificial Sequence
  Description of Artificial Sequence: Synthetic oligonucleotide
  Antisense strand to SEQ ID NO: 2224430
aucagaaggaucaauacag

SEQ ID NO: 2224432 - RNA, 19 nt, Artificial Sequence
  Description of Artificial Sequence: Synthetic oligonucleotide
  Sense strand starting at position 3404 of SEQ ID NO: 1883894
augucacuggcucaaagau

SEQ ID NO: 2224433 - RNA, 19 nt, Artificial Sequence
  Description of Artificial Sequence: Synthetic oligonucleotide
  Antisense strand to SEQ ID NO: 2224432
aucuuugagccagugacau

SEQ ID NO: 2224434 - RNA, 19 nt, Artificial Sequence
  Description of Artificial Sequence: Synthetic oligonucleotide
  Sense strand starting at position 3413 of SEQ ID NO: 1883894
gcucaaagaucuuccauga

SEQ ID NO: 2224435 - RNA, 19 nt, Artificial Sequence
  Description of Artificial Sequence: Synthetic oligonucleotide
  Antisense strand to SEQ ID NO: 2224434
ucauggaagaucuuugagc

SEQ ID NO: 2224436 - RNA, 19 nt, Artificial Sequence
  Description of Artificial Sequence: Synthetic oligonucleotide
  Sense strand starting at position 3522 of SEQ ID NO: 1883894
uagucauuugugugacuau

SEQ ID NO: 2224437 - RNA, 19 nt, Artificial Sequence
  Description of Artificial Sequence: Synthetic oligonucleotide
  Antisense strand to SEQ ID NO: 2224436
auagucacacaaaugacua

SEQ ID NO: 2224438 - RNA, 19 nt, Artificial Sequence
  Description of Artificial Sequence: Synthetic oligonucleotide
  Sense strand starting at position 3925 of SEQ ID NO: 1883894
uuugauaaauguguccaaa

SEQ ID NO: 2224439 - RNA, 19 nt, Artificial Sequence
  Description of Artificial Sequence: Synthetic oligonucleotide
  Antisense strand to SEQ ID NO: 2224438
uuuggacacauuuaucaaa

SEQ ID NO: 2224440 - RNA, 19 nt, Artificial Sequence
  Description of Artificial Sequence: Synthetic oligonucleotide
  Sense strand starting at position 3927 of SEQ ID NO: 1883894
ugauaaauguguccaaaua

SEQ ID NO: 2224441 - RNA, 19 nt, Artificial Sequence
  Description of Artificial Sequence: Synthetic oligonucleotide
  Antisense strand to SEQ ID NO: 2224440
uauuuggacacauuuauca

SEQ ID NO: 2224442 - RNA, 19 nt, Artificial Sequence
  Description of Artificial Sequence: Synthetic oligonucleotide
  Sense strand starting at position 3949 of SEQ ID NO: 1883894
uugcauuuaguuugauguu

SEQ ID NO: 2224443 - RNA, 19 nt, Artificial Sequence
  Description of Artificial Sequence: Synthetic oligonucleotide
  Antisense strand to SEQ ID NO: 2224442
aacaucaaacuaaaugcaa

SEQ ID NO: 2224444 - RNA, 19 nt, Artificial Sequence
  Description of Artificial Sequence: Synthetic oligonucleotide
  Sense strand starting at position 196 of SEQ ID NO: 1883895
caaugugcugauuggcuaa

SEQ ID NO: 2224445 - RNA, 19 nt, Artificial Sequence
  Description of Artificial Sequence: Synthetic oligonucleotide
  Antisense strand to SEQ ID NO: 2224444
uuagccaaucagcacauug

SEQ ID NO: 2224446 - RNA, 19 nt, Artificial Sequence
  Description of Artificial Sequence: Synthetic oligonucleotide
  Sense strand starting at position 224 of SEQ ID NO: 1883895
ggucucaucccaggaauag

SEQ ID NO: 2224447 - RNA, 19 nt, Artificial Sequence
  Description of Artificial Sequence: Synthetic oligonucleotide
  Antisense strand to SEQ ID NO: 2224446
cuauuccugggaugagacc

SEQ ID NO: 2224448 - RNA, 19 nt, Artificial Sequence
  Description of Artificial Sequence: Synthetic oligonucleotide
  Sense strand starting at position 421 of SEQ ID NO: 1883895
aagugugugcuguaugaga

SEQ ID NO: 2224449 - RNA, 19 nt, Artificial Sequence
  Description of Artificial Sequence: Synthetic oligonucleotide
  Antisense strand to SEQ ID NO: 2224448
ucucauacagcacacacuu

SEQ ID NO: 2224450 - RNA, 19 nt, Artificial Sequence
  Description of Artificial Sequence: Synthetic oligonucleotide
  Sense strand starting at position 428 of SEQ ID NO: 1883895
ugcuguaugagaggagaga

SEQ ID NO: 2224451 - RNA, 19 nt, Artificial Sequence
  Description of Artificial Sequence: Synthetic oligonucleotide
  Antisense strand to SEQ ID NO: 2224450
ucucuccucucauacagca

SEQ ID NO: 2224452 - RNA, 19 nt, Artificial Sequence
  Description of Artificial Sequence: Synthetic oligonucleotide
  Sense strand starting at position 479 of SEQ ID NO: 1883895
guuaguuccucuccuugga

SEQ ID NO: 2224453 - RNA, 19 nt, Artificial Sequence
  Description of Artificial Sequence: Synthetic oligonucleotide
  Antisense strand to SEQ ID NO: 2224452
uccaaggagaggaacuaac

SEQ ID NO: 2224454 - RNA, 19 nt, Artificial Sequence
  Description of Artificial Sequence: Synthetic oligonucleotide
  Sense strand starting at position 494 of SEQ ID NO: 1883895
uggacaugcugauuacuuu

SEQ ID NO: 2224455 - RNA, 19 nt, Artificial Sequence
  Description of Artificial Sequence: Synthetic oligonucleotide
  Antisense strand to SEQ ID NO: 2224454
aaaguaaucagcaugucca

SEQ ID NO: 2224456 - RNA, 19 nt, Artificial Sequence
  Description of Artificial Sequence: Synthetic oligonucleotide
  Sense strand starting at position 1021 of SEQ ID NO: 1883895
ucaggagaccucugguuag

SEQ ID NO: 2224457 - RNA, 19 nt, Artificial Sequence
  Description of Artificial Sequence: Synthetic oligonucleotide
  Antisense strand to SEQ ID NO: 2224456
cuaaccagaggucuccuga

SEQ ID NO: 2224458 - RNA, 19 nt, Artificial Sequence
  Description of Artificial Sequence: Synthetic oligonucleotide
  Sense strand starting at position 1024 of SEQ ID NO: 1883895
ggagaccucugguuaggga

SEQ ID NO: 2224459 - RNA, 19 nt, Artificial Sequence
  Description of Artificial Sequence: Synthetic oligonucleotide
  Antisense strand to SEQ ID NO: 2224458
ucccuaaccagaggucucc

SEQ ID NO: 2224460 - RNA, 19 nt, Artificial Sequence
  Description of Artificial Sequence: Synthetic oligonucleotide
  Sense strand starting at position 1112 of SEQ ID NO: 1883895
gugggccucuccuuuggaa

SEQ ID NO: 2224461 - RNA, 19 nt, Artificial Sequence
  Description of Artificial Sequence: Synthetic oligonucleotide
  Antisense strand to SEQ ID NO: 2224460
uuccaaaggagaggcccac

SEQ ID NO: 2224462 - RNA, 19 nt, Artificial Sequence
  Description of Artificial Sequence: Synthetic oligonucleotide
  Sense strand starting at position 1129 of SEQ ID NO: 1883895
aaggcuuugggacagaguu

SEQ ID NO: 2224463 - RNA, 19 nt, Artificial Sequence
  Description of Artificial Sequence: Synthetic oligonucleotide
  Antisense strand to SEQ ID NO: 2224462
aacucugucccaaagccuu

SEQ ID NO: 2224464 - RNA, 19 nt, Artificial Sequence
  Description of Artificial Sequence: Synthetic oligonucleotide
  Sense strand starting at position 1443 of SEQ ID NO: 1883895
gaggccaggucuucuggaa

SEQ ID NO: 2224465 - RNA, 19 nt, Artificial Sequence
  Description of Artificial Sequence: Synthetic oligonucleotide
  Antisense strand to SEQ ID NO: 2224464
uuccagaagaccuggccuc

SEQ ID NO: 2224466 - RNA, 19 nt, Artificial Sequence
  Description of Artificial Sequence: Synthetic oligonucleotide
  Sense strand starting at position 1581 of SEQ ID NO: 1883895
ugggcaucacggugggauu

SEQ ID NO: 2224467 - RNA, 19 nt, Artificial Sequence
  Description of Artificial Sequence: Synthetic oligonucleotide
  Antisense strand to SEQ ID NO: 2224466
aaucccaccgugaugccca

SEQ ID NO: 2224468 - RNA, 19 nt, Artificial Sequence
  Description of Artificial Sequence: Synthetic oligonucleotide
  Sense strand starting at position 2338 of SEQ ID NO: 1883895
cugagucuuccucggagca

SEQ ID NO: 2224469 - RNA, 19 nt, Artificial Sequence
  Description of Artificial Sequence: Synthetic oligonucleotide
  Antisense strand to SEQ ID NO: 2224468
ugcuccgaggaagacucag

SEQ ID NO: 2224470 - RNA, 19 nt, Artificial Sequence
  Description of Artificial Sequence: Synthetic oligonucleotide
  Sense strand starting at position 2356 of SEQ ID NO: 1883895
aggugaauucugcauagcu

SEQ ID NO: 2224471 - RNA, 19 nt, Artificial Sequence
  Description of Artificial Sequence: Synthetic oligonucleotide
  Antisense strand to SEQ ID NO: 2224470
agcuaugcagaauucaccu

SEQ ID NO: 2224472 - RNA, 19 nt, Artificial Sequence
  Description of Artificial Sequence: Synthetic oligonucleotide
  Sense strand starting at position 2631 of SEQ ID NO: 1883895
cuguguugggcagagagau

SEQ ID NO: 2224473 - RNA, 19 nt, Artificial Sequence
  Description of Artificial Sequence: Synthetic oligonucleotide
  Antisense strand to SEQ ID NO: 2224472
aucucucugcccaacacag

SEQ ID NO: 2224474 - RNA, 19 nt, Artificial Sequence
  Description of Artificial Sequence: Synthetic oligonucleotide
  Sense strand starting at position 2718 of SEQ ID NO: 1883895
gcacucuuguccuugacca

SEQ ID NO: 2224475 - RNA, 19 nt, Artificial Sequence
  Description of Artificial Sequence: Synthetic oligonucleotide
  Antisense strand to SEQ ID NO: 2224474
uggucaaggacaagagugc

SEQ ID NO: 2224476 - RNA, 19 nt, Artificial Sequence
  Description of Artificial Sequence: Synthetic oligonucleotide
  Sense strand starting at position 2757 of SEQ ID NO: 1883895
ggcugauagccuuggagag

SEQ ID NO: 2224477 - RNA, 19 nt, Artificial Sequence
  Description of Artificial Sequence: Synthetic oligonucleotide
  Antisense strand to SEQ ID NO: 2224476
cucuccaaggcuaucagcc

SEQ ID NO: 2224478 - RNA, 19 nt, Artificial Sequence
  Description of Artificial Sequence: Synthetic oligonucleotide
  Sense strand starting at position 3106 of SEQ ID NO: 1883895
gcacgaacuucgguggaaa

SEQ ID NO: 2224479 - RNA, 19 nt, Artificial Sequence
  Description of Artificial Sequence: Synthetic oligonucleotide
  Antisense strand to SEQ ID NO: 2224478
uuuccaccgaaguucgugc

SEQ ID NO: 2224480 - RNA, 19 nt, Artificial Sequence
  Description of Artificial Sequence: Synthetic oligonucleotide
  Sense strand starting at position 3108 of SEQ ID NO: 1883895
acgaacuucgguggaaaga

SEQ ID NO: 2224481 - RNA, 19 nt, Artificial Sequence
  Description of Artificial Sequence: Synthetic oligonucleotide
  Antisense strand to SEQ ID NO: 2224480
ucuuuccaccgaaguucgu

SEQ ID NO: 2224482 - RNA, 19 nt, Artificial Sequence
  Description of Artificial Sequence: Synthetic oligonucleotide
  Sense strand starting at position 3109 of SEQ ID NO: 1883895
cgaacuucgguggaaagaa

SEQ ID NO: 2224483 - RNA, 19 nt, Artificial Sequence
  Description of Artificial Sequence: Synthetic oligonucleotide
  Antisense strand to SEQ ID NO: 2224482
uucuuuccaccgaaguucg

SEQ ID NO: 2224484 - RNA, 19 nt, Artificial Sequence
  Description of Artificial Sequence: Synthetic oligonucleotide
  Sense strand starting at position 3254 of SEQ ID NO: 1883895
aaucccugggucuguuaga

SEQ ID NO: 2224485 - RNA, 19 nt, Artificial Sequence
  Description of Artificial Sequence: Synthetic oligonucleotide
  Antisense strand to SEQ ID NO: 2224484
ucuaacagacccagggauu

SEQ ID NO: 2224486 - RNA, 19 nt, Artificial Sequence
  Description of Artificial Sequence: Synthetic oligonucleotide
  Sense strand starting at position 3358 of SEQ ID NO: 1883895
ugguguguuccagcugcaa

SEQ ID NO: 2224487 - RNA, 19 nt, Artificial Sequence
  Description of Artificial Sequence: Synthetic oligonucleotide
  Antisense strand to SEQ ID NO: 2224486
uugcagcuggaacacacca

SEQ ID NO: 2224488 - RNA, 19 nt, Artificial Sequence
  Description of Artificial Sequence: Synthetic oligonucleotide
  Sense strand starting at position 3481 of SEQ ID NO: 1883895
auugaaagauauucugcau

SEQ ID NO: 2224489 - RNA, 19 nt, Artificial Sequence
  Description of Artificial Sequence: Synthetic oligonucleotide
  Antisense strand to SEQ ID NO: 2224488
augcagaauaucuuucaau

SEQ ID NO: 2224490 - RNA, 19 nt, Artificial Sequence
  Description of Artificial Sequence: Synthetic oligonucleotide
  Sense strand starting at position 3522 of SEQ ID NO: 1883895
aauauaagccauugggaug

SEQ ID NO: 2224491 - RNA, 19 nt, Artificial Sequence
  Description of Artificial Sequence: Synthetic oligonucleotide
  Antisense strand to SEQ ID NO: 2224490
caucccaauggcuuauauu

SEQ ID NO: 2224492 - RNA, 19 nt, Artificial Sequence
  Description of Artificial Sequence: Synthetic oligonucleotide
  Sense strand starting at position 3568 of SEQ ID NO: 1883895
ugaccuagugccugaguuu

SEQ ID NO: 2224493 - RNA, 19 nt, Artificial Sequence
  Description of Artificial Sequence: Synthetic oligonucleotide
  Antisense strand to SEQ ID NO: 2224492
aaacucaggcacuagguca

SEQ ID NO: 2224494 - RNA, 19 nt, Artificial Sequence
  Description of Artificial Sequence: Synthetic oligonucleotide
  Sense strand starting at position 3569 of SEQ ID NO: 1883895
gaccuagugccugaguuua

SEQ ID NO: 2224495 - RNA, 19 nt, Artificial Sequence
  Description of Artificial Sequence: Synthetic oligonucleotide
  Antisense strand to SEQ ID NO: 2224494
uaaacucaggcacuagguc

SEQ ID NO: 2224496 - RNA, 19 nt, Artificial Sequence
  Description of Artificial Sequence: Synthetic oligonucleotide
  Sense strand starting at position 3579 of SEQ ID NO: 1883895
cugaguuuaccugaguguu

SEQ ID NO: 2224497 - RNA, 19 nt, Artificial Sequence
  Description of Artificial Sequence: Synthetic oligonucleotide
  Antisense strand to SEQ ID NO: 2224496
aacacucagguaaacucag

SEQ ID NO: 2224498 - RNA, 19 nt, Artificial Sequence
  Description of Artificial Sequence: Synthetic oligonucleotide
  Sense strand starting at position 3581 of SEQ ID NO: 1883895
gaguuuaccugaguguuua

SEQ ID NO: 2224499 - RNA, 19 nt, Artificial Sequence
  Description of Artificial Sequence: Synthetic oligonucleotide
  Antisense strand to SEQ ID NO: 2224498
uaaacacucagguaaacuc

SEQ ID NO: 2224500 - RNA, 19 nt, Artificial Sequence
  Description of Artificial Sequence: Synthetic oligonucleotide
  Sense strand starting at position 3582 of SEQ ID NO: 1883895
aguuuaccugaguguuuaa

SEQ ID NO: 2224501 - RNA, 19 nt, Artificial Sequence
  Description of Artificial Sequence: Synthetic oligonucleotide
  Antisense strand to SEQ ID NO: 2224500
uuaaacacucagguaaacu

SEQ ID NO: 2224502 - RNA, 19 nt, Artificial Sequence
  Description of Artificial Sequence: Synthetic oligonucleotide
  Sense strand starting at position 3740 of SEQ ID NO: 1883895
cuagucagcaguugggaau

SEQ ID NO: 2224503 - RNA, 19 nt, Artificial Sequence
  Description of Artificial Sequence: Synthetic oligonucleotide
  Antisense strand to SEQ ID NO: 2224502
auucccaacugcugacuag

SEQ ID NO: 2224504 - RNA, 19 nt, Artificial Sequence
  Description of Artificial Sequence: Synthetic oligonucleotide
  Sense strand starting at position 3779 of SEQ ID NO: 1883895
ccuggcuuccaugaaacua

SEQ ID NO: 2224505 - RNA, 19 nt, Artificial Sequence
  Description of Artificial Sequence: Synthetic oligonucleotide
  Antisense strand to SEQ ID NO: 2224504
uaguuucauggaagccagg

SEQ ID NO: 2224506 - RNA, 19 nt, Artificial Sequence
  Description of Artificial Sequence: Synthetic oligonucleotide
  Sense strand starting at position 3796 of SEQ ID NO: 1883895
uagggucgugucuagggau

SEQ ID NO: 2224507 - RNA, 19 nt, Artificial Sequence
  Description of Artificial Sequence: Synthetic oligonucleotide
  Antisense strand to SEQ ID NO: 2224506
aucccuagacacgacccua

SEQ ID NO: 2224508 - RNA, 19 nt, Artificial Sequence
  Description of Artificial Sequence: Synthetic oligonucleotide
  Sense strand starting at position 3804 of SEQ ID NO: 1883895
ugucuagggaucuaguguu

SEQ ID NO: 2224509 - RNA, 19 nt, Artificial Sequence
  Description of Artificial Sequence: Synthetic oligonucleotide
  Antisense strand to SEQ ID NO: 2224508
aacacuagaucccuagaca

SEQ ID NO: 2224510 - RNA, 19 nt, Artificial Sequence
  Description of Artificial Sequence: Synthetic oligonucleotide
  Sense strand starting at position 3849 of SEQ ID NO: 1883895
ccaagagggucuucuggaa

SEQ ID NO: 2224511 - RNA, 19 nt, Artificial Sequence
  Description of Artificial Sequence: Synthetic oligonucleotide
  Antisense strand to SEQ ID NO: 2224510
uuccagaagacccucuugg

SEQ ID NO: 2224512 - RNA, 19 nt, Artificial Sequence
  Description of Artificial Sequence: Synthetic oligonucleotide
  Sense strand starting at position 3862 of SEQ ID NO: 1883895
cuggaaaucuccgcucacu

SEQ ID NO: 2224513 - RNA, 19 nt, Artificial Sequence
  Description of Artificial Sequence: Synthetic oligonucleotide
  Antisense strand to SEQ ID NO: 2224512
agugagcggagauuuccag

SEQ ID NO: 2224514 - RNA, 19 nt, Artificial Sequence
  Description of Artificial Sequence: Synthetic oligonucleotide
  Sense strand starting at position 3901 of SEQ ID NO: 1883895
uggucaaauucugccagaa

SEQ ID NO: 2224515 - RNA, 19 nt, Artificial Sequence
  Description of Artificial Sequence: Synthetic oligonucleotide
  Antisense strand to SEQ ID NO: 2224514
uucuggcagaauuugacca

SEQ ID NO: 2224516 - RNA, 19 nt, Artificial Sequence
  Description of Artificial Sequence: Synthetic oligonucleotide
  Sense strand starting at position 3926 of SEQ ID NO: 1883895
ugcagaucauguuuaauua

SEQ ID NO: 2224517 - RNA, 19 nt, Artificial Sequence
  Description of Artificial Sequence: Synthetic oligonucleotide
  Antisense strand to SEQ ID NO: 2224516
uaauuaaacaugaucugca

SEQ ID NO: 2224518 - RNA, 19 nt, Artificial Sequence
  Description of Artificial Sequence: Synthetic oligonucleotide
  Sense strand starting at position 3927 of SEQ ID NO: 1883895
gcagaucauguuuaauuag

SEQ ID NO: 2224519 - RNA, 19 nt, Artificial Sequence
  Description of Artificial Sequence: Synthetic oligonucleotide
  Antisense strand to SEQ ID NO: 2224518
cuaauuaaacaugaucugc

SEQ ID NO: 2224520 - RNA, 19 nt, Artificial Sequence
  Description of Artificial Sequence: Synthetic oligonucleotide
  Sense strand starting at position 3930 of SEQ ID NO: 1883895
gaucauguuuaauuagagu

SEQ ID NO: 2224521 - RNA, 19 nt, Artificial Sequence
  Description of Artificial Sequence: Synthetic oligonucleotide
  Antisense strand to SEQ ID NO: 2224520
acucuaauuaaacaugauc

SEQ ID NO: 2224522 - RNA, 19 nt, Artificial Sequence
  Description of Artificial Sequence: Synthetic oligonucleotide
  Sense strand starting at position 3939 of SEQ ID NO: 1883895
uaauuagaguucuuagggu

SEQ ID NO: 2224523 - RNA, 19 nt, Artificial Sequence
  Description of Artificial Sequence: Synthetic oligonucleotide
  Antisense strand to SEQ ID NO: 2224522
acccuaagaacucuaauua

SEQ ID NO: 2224524 - RNA, 19 nt, Artificial Sequence
  Description of Artificial Sequence: Synthetic oligonucleotide
  Sense strand starting at position 531 of SEQ ID NO: 1883896
gcauuacaggcaugagaga

SEQ ID NO: 2224525 - RNA, 19 nt, Artificial Sequence
  Description of Artificial Sequence: Synthetic oligonucleotide
  Antisense strand to SEQ ID NO: 2224524
ucucucaugccuguaaugc

SEQ ID NO: 2224526 - RNA, 19 nt, Artificial Sequence
  Description of Artificial Sequence: Synthetic oligonucleotide
  Sense strand starting at position 599 of SEQ ID NO: 1883896
uccagaauuugaggucaga

SEQ ID NO: 2224527 - RNA, 19 nt, Artificial Sequence
  Description of Artificial Sequence: Synthetic oligonucleotide
  Antisense strand to SEQ ID NO: 2224526
ucugaccucaaauucugga

SEQ ID NO: 2224528 - RNA, 19 nt, Artificial Sequence
  Description of Artificial Sequence: Synthetic oligonucleotide
  Sense strand starting at position 662 of SEQ ID NO: 1883896
cuggaauggcaguauuguu

SEQ ID NO: 2224529 - RNA, 19 nt, Artificial Sequence
  Description of Artificial Sequence: Synthetic oligonucleotide
  Antisense strand to SEQ ID NO: 2224528
aacaauacugccauuccag

SEQ ID NO: 2224530 - RNA, 19 nt, Artificial Sequence
  Description of Artificial Sequence: Synthetic oligonucleotide
  Sense strand starting at position 924 of SEQ ID NO: 1883896
aagcuucugccguuagcua

SEQ ID NO: 2224531 - RNA, 19 nt, Artificial Sequence
  Description of Artificial Sequence: Synthetic oligonucleotide
  Antisense strand to SEQ ID NO: 2224530
uagcuaacggcagaagcuu

SEQ ID NO: 2224532 - RNA, 19 nt, Artificial Sequence
  Description of Artificial Sequence: Synthetic oligonucleotide
  Sense strand starting at position 1057 of SEQ ID NO: 1883896
gaucaugucaaaggugguu

SEQ ID NO: 2224533 - RNA, 19 nt, Artificial Sequence
  Description of Artificial Sequence: Synthetic oligonucleotide
  Antisense strand to SEQ ID NO: 2224532
aaccaccuuugacaugauc

SEQ ID NO: 2224534 - RNA, 19 nt, Artificial Sequence
  Description of Artificial Sequence: Synthetic oligonucleotide
  Sense strand starting at position 1059 of SEQ ID NO: 1883896
ucaugucaaaggugguuau

SEQ ID NO: 2224535 - RNA, 19 nt, Artificial Sequence
  Description of Artificial Sequence: Synthetic oligonucleotide
  Antisense strand to SEQ ID NO: 2224534
auaaccaccuuugacauga

SEQ ID NO: 2224536 - RNA, 19 nt, Artificial Sequence
  Description of Artificial Sequence: Synthetic oligonucleotide
  Sense strand starting at position 1060 of SEQ ID NO: 1883896
caugucaaaggugguuauu

SEQ ID NO: 2224537 - RNA, 19 nt, Artificial Sequence
  Description of Artificial Sequence: Synthetic oligonucleotide
  Antisense strand to SEQ ID NO: 2224536
aauaaccaccuuugacaug

SEQ ID NO: 2224538 - RNA, 19 nt, Artificial Sequence
  Description of Artificial Sequence: Synthetic oligonucleotide
  Sense strand starting at position 1186 of SEQ ID NO: 1883896
ggaugaauaugcuuuagau

SEQ ID NO: 2224539 - RNA, 19 nt, Artificial Sequence
  Description of Artificial Sequence: Synthetic oligonucleotide
  Antisense strand to SEQ ID NO: 2224538
aucuaaagcauauucaucc

SEQ ID NO: 2224540 - RNA, 19 nt, Artificial Sequence
  Description of Artificial Sequence: Synthetic oligonucleotide
  Sense strand starting at position 1634 of SEQ ID NO: 1883896
guggguuugcgguugcgaa

SEQ ID NO: 2224541 - RNA, 19 nt, Artificial Sequence
  Description of Artificial Sequence: Synthetic oligonucleotide
  Antisense strand to SEQ ID NO: 2224540
uucgcaaccgcaaacccac

SEQ ID NO: 2224542 - RNA, 19 nt, Artificial Sequence
  Description of Artificial Sequence: Synthetic oligonucleotide
  Sense strand starting at position 2066 of SEQ ID NO: 1883896
gaccgagccgggaguugua

SEQ ID NO: 2224543 - RNA, 19 nt, Artificial Sequence
  Description of Artificial Sequence: Synthetic oligonucleotide
  Antisense strand to SEQ ID NO: 2224542
uacaacucccggcucgguc

SEQ ID NO: 2224544 - RNA, 19 nt, Artificial Sequence
  Description of Artificial Sequence: Synthetic oligonucleotide
  Sense strand starting at position 2183 of SEQ ID NO: 1883896
gugugcuugcaucugcaaa

SEQ ID NO: 2224545 - RNA, 19 nt, Artificial Sequence
  Description of Artificial Sequence: Synthetic oligonucleotide
  Antisense strand to SEQ ID NO: 2224544
uuugcagaugcaagcacac

SEQ ID NO: 2224546 - RNA, 19 nt, Artificial Sequence
  Description of Artificial Sequence: Synthetic oligonucleotide
  Sense strand starting at position 2251 of SEQ ID NO: 1883896
acuuguccuauguaaacgu

SEQ ID NO: 2224547 - RNA, 19 nt, Artificial Sequence
  Description of Artificial Sequence: Synthetic oligonucleotide
  Antisense strand to SEQ ID NO: 2224546
acguuuacauaggacaagu

SEQ ID NO: 2224548 - RNA, 19 nt, Artificial Sequence
  Description of Artificial Sequence: Synthetic oligonucleotide
  Sense strand starting at position 2318 of SEQ ID NO: 1883896
acaugcguccguguguaaa

SEQ ID NO: 2224549 - RNA, 19 nt, Artificial Sequence
  Description of Artificial Sequence: Synthetic oligonucleotide
  Antisense strand to SEQ ID NO: 2224548
uuuacacacggacgcaugu

SEQ ID NO: 2224550 - RNA, 19 nt, Artificial Sequence
  Description of Artificial Sequence: Synthetic oligonucleotide
  Sense strand starting at position 2332 of SEQ ID NO: 1883896
guaaacuuguauccauugu

SEQ ID NO: 2224551 - RNA, 19 nt, Artificial Sequence
  Description of Artificial Sequence: Synthetic oligonucleotide
  Antisense strand to SEQ ID NO: 2224550
acaauggauacaaguuuac

SEQ ID NO: 2224552 - RNA, 19 nt, Artificial Sequence
  Description of Artificial Sequence: Synthetic oligonucleotide
  Sense strand starting at position 2371 of SEQ ID NO: 1883896
cuuugcaaagcauggauau

SEQ ID NO: 2224553 - RNA, 19 nt, Artificial Sequence
  Description of Artificial Sequence: Synthetic oligonucleotide
  Antisense strand to SEQ ID NO: 2224552
auauccaugcuuugcaaag

SEQ ID NO: 2224554 - RNA, 19 nt, Artificial Sequence
  Description of Artificial Sequence: Synthetic oligonucleotide
  Sense strand starting at position 2382 of SEQ ID NO: 1883896
auggauauguguuuccaug

SEQ ID NO: 2224555 - RNA, 19 nt, Artificial Sequence
  Description of Artificial Sequence: Synthetic oligonucleotide
  Antisense strand to SEQ ID NO: 2224554
cauggaaacacauauccau

SEQ ID NO: 2224556 - RNA, 19 nt, Artificial Sequence
  Description of Artificial Sequence: Synthetic oligonucleotide
  Sense strand starting at position 2384 of SEQ ID NO: 1883896
ggauauguguuuccaugug

SEQ ID NO: 2224557 - RNA, 19 nt, Artificial Sequence
  Description of Artificial Sequence: Synthetic oligonucleotide
  Antisense strand to SEQ ID NO: 2224556
cacauggaaacacauaucc

SEQ ID NO: 2224558 - RNA, 19 nt, Artificial Sequence
  Description of Artificial Sequence: Synthetic oligonucleotide
  Sense strand starting at position 2511 of SEQ ID NO: 1883896
ugcaaauguguccugugca

SEQ ID NO: 2224559 - RNA, 19 nt, Artificial Sequence
  Description of Artificial Sequence: Synthetic oligonucleotide
  Antisense strand to SEQ ID NO: 2224558
ugcacaggacacauuugca

SEQ ID NO: 2224560 - RNA, 19 nt, Artificial Sequence
  Description of Artificial Sequence: Synthetic oligonucleotide
  Sense strand starting at position 2537 of SEQ ID NO: 1883896
gucuguguccacgugcaaa

SEQ ID NO: 2224561 - RNA, 19 nt, Artificial Sequence
  Description of Artificial Sequence: Synthetic oligonucleotide
  Antisense strand to SEQ ID NO: 2224560
uuugcacguggacacagac

SEQ ID NO: 2224562 - RNA, 19 nt, Artificial Sequence
  Description of Artificial Sequence: Synthetic oligonucleotide
  Sense strand starting at position 2600 of SEQ ID NO: 1883896
gaugaugcuccagaguacu

SEQ ID NO: 2224563 - RNA, 19 nt, Artificial Sequence
  Description of Artificial Sequence: Synthetic oligonucleotide
  Antisense strand to SEQ ID NO: 2224562
aguacucuggagcaucauc

SEQ ID NO: 2224564 - RNA, 19 nt, Artificial Sequence
  Description of Artificial Sequence: Synthetic oligonucleotide
  Sense strand starting at position 2774 of SEQ ID NO: 1883896
cccuaagcugcuuagcaaa

SEQ ID NO: 2224565 - RNA, 19 nt, Artificial Sequence
  Description of Artificial Sequence: Synthetic oligonucleotide
  Antisense strand to SEQ ID NO: 2224564
uuugcuaagcagcuuaggg

SEQ ID NO: 2224566 - RNA, 19 nt, Artificial Sequence
  Description of Artificial Sequence: Synthetic oligonucleotide
  Sense strand starting at position 2842 of SEQ ID NO: 1883896
ccggaauaauacccaguca

SEQ ID NO: 2224567 - RNA, 19 nt, Artificial Sequence
  Description of Artificial Sequence: Synthetic oligonucleotide
  Antisense strand to SEQ ID NO: 2224566
ugacuggguauuauuccgg

SEQ ID NO: 2224568 - RNA, 19 nt, Artificial Sequence
  Description of Artificial Sequence: Synthetic oligonucleotide
  Sense strand starting at position 2861 of SEQ ID NO: 1883896
acaauugaguaagggauuu

SEQ ID NO: 2224569 - RNA, 19 nt, Artificial Sequence
  Description of Artificial Sequence: Synthetic oligonucleotide
  Antisense strand to SEQ ID NO: 2224568
aaaucccuuacucaauugu

SEQ ID NO: 2224570 - RNA, 19 nt, Artificial Sequence
  Description of Artificial Sequence: Synthetic oligonucleotide
  Sense strand starting at position 2914 of SEQ ID NO: 1883896
ccaaguuuagaagguuuaa

SEQ ID NO: 2224571 - RNA, 19 nt, Artificial Sequence
  Description of Artificial Sequence: Synthetic oligonucleotide
  Antisense strand to SEQ ID NO: 2224570
uuaaaccuucuaaacuugg

SEQ ID NO: 2224572 - RNA, 19 nt, Artificial Sequence
  Description of Artificial Sequence: Synthetic oligonucleotide
  Sense strand starting at position 2924 of SEQ ID NO: 1883896
aagguuuaaccuugugaaa

SEQ ID NO: 2224573 - RNA, 19 nt, Artificial Sequence
  Description of Artificial Sequence: Synthetic oligonucleotide
  Antisense strand to SEQ ID NO: 2224572
uuucacaagguuaaaccuu

SEQ ID NO: 2224574 - RNA, 19 nt, Artificial Sequence
  Description of Artificial Sequence: Synthetic oligonucleotide
  Sense strand starting at position 2959 of SEQ ID NO: 1883896
ucaggagauucgucacuca

SEQ ID NO: 2224575 - RNA, 19 nt, Artificial Sequence
  Description of Artificial Sequence: Synthetic oligonucleotide
  Antisense strand to SEQ ID NO: 2224574
ugagugacgaaucuccuga

SEQ ID NO: 2224576 - RNA, 19 nt, Artificial Sequence
  Description of Artificial Sequence: Synthetic oligonucleotide
  Sense strand starting at position 2962 of SEQ ID NO: 1883896
ggagauucgucacucaccu

SEQ ID NO: 2224577 - RNA, 19 nt, Artificial Sequence
  Description of Artificial Sequence: Synthetic oligonucleotide
  Antisense strand to SEQ ID NO: 2224576
aggugagugacgaaucucc

SEQ ID NO: 2224578 - RNA, 19 nt, Artificial Sequence
  Description of Artificial Sequence: Synthetic oligonucleotide
  Sense strand starting at position 2975 of SEQ ID NO: 1883896
ucaccugaccuguacugaa

SEQ ID NO: 2224579 - RNA, 19 nt, Artificial Sequence
  Description of Artificial Sequence: Synthetic oligonucleotide
  Antisense strand to SEQ ID NO: 2224578
uucaguacaggucagguga

SEQ ID NO: 2224580 - RNA, 19 nt, Artificial Sequence
  Description of Artificial Sequence: Synthetic oligonucleotide
  Sense strand starting at position 3005 of SEQ ID NO: 1883896
aaguuaguuugggcucaaa

SEQ ID NO: 2224581 - RNA, 19 nt, Artificial Sequence
  Description of Artificial Sequence: Synthetic oligonucleotide
  Antisense strand to SEQ ID NO: 2224580
uuugagcccaaacuaacuu

SEQ ID NO: 2224582 - RNA, 19 nt, Artificial Sequence
  Description of Artificial Sequence: Synthetic oligonucleotide
  Sense strand starting at position 3079 of SEQ ID NO: 1883896
ccaguuugaucucucacac

SEQ ID NO: 2224583 - RNA, 19 nt, Artificial Sequence
  Description of Artificial Sequence: Synthetic oligonucleotide
  Antisense strand to SEQ ID NO: 2224582
gugugagagaucaaacugg

SEQ ID NO: 2224584 - RNA, 19 nt, Artificial Sequence
  Description of Artificial Sequence: Synthetic oligonucleotide
  Sense strand starting at position 3385 of SEQ ID NO: 1883896
uggcaaugucguguuugua

SEQ ID NO: 2224585 - RNA, 19 nt, Artificial Sequence
  Description of Artificial Sequence: Synthetic oligonucleotide
  Antisense strand to SEQ ID NO: 2224584
uacaaacacgacauugcca

SEQ ID NO: 2224586 - RNA, 19 nt, Artificial Sequence
  Description of Artificial Sequence: Synthetic oligonucleotide
  Sense strand starting at position 3386 of SEQ ID NO: 1883896
ggcaaugucguguuuguau

SEQ ID NO: 2224587 - RNA, 19 nt, Artificial Sequence
  Description of Artificial Sequence: Synthetic oligonucleotide
  Antisense strand to SEQ ID NO: 2224586
auacaaacacgacauugcc

SEQ ID NO: 2224588 - RNA, 19 nt, Artificial Sequence
  Description of Artificial Sequence: Synthetic oligonucleotide
  Sense strand starting at position 3391 of SEQ ID NO: 1883896
ugucguguuuguaugauug

SEQ ID NO: 2224589 - RNA, 19 nt, Artificial Sequence
  Description of Artificial Sequence: Synthetic oligonucleotide
  Antisense strand to SEQ ID NO: 2224588
caaucauacaaacacgaca

SEQ ID NO: 2224590 - RNA, 19 nt, Artificial Sequence
  Description of Artificial Sequence: Synthetic oligonucleotide
  Sense strand starting at position 3434 of SEQ ID NO: 1883896
gacgaagugucaucuaaau

SEQ ID NO: 2224591 - RNA, 19 nt, Artificial Sequence
  Description of Artificial Sequence: Synthetic oligonucleotide
  Antisense strand to SEQ ID NO: 2224590
auuuagaugacacuucguc

SEQ ID NO: 2224592 - RNA, 19 nt, Artificial Sequence
  Description of Artificial Sequence: Synthetic oligonucleotide
  Sense strand starting at position 3519 of SEQ ID NO: 1883896
uuauccaaguguuuccuaa

SEQ ID NO: 2224593 - RNA, 19 nt, Artificial Sequence
  Description of Artificial Sequence: Synthetic oligonucleotide
  Antisense strand to SEQ ID NO: 2224592
uuaggaaacacuuggauaa

SEQ ID NO: 2224594 - RNA, 19 nt, Artificial Sequence
  Description of Artificial Sequence: Synthetic oligonucleotide
  Sense strand starting at position 3521 of SEQ ID NO: 1883896
auccaaguguuuccuaaac

SEQ ID NO: 2224595 - RNA, 19 nt, Artificial Sequence
  Description of Artificial Sequence: Synthetic oligonucleotide
  Antisense strand to SEQ ID NO: 2224594
guuuaggaaacacuuggau

SEQ ID NO: 2224596 - RNA, 19 nt, Artificial Sequence
  Description of Artificial Sequence: Synthetic oligonucleotide
  Sense strand starting at position 3550 of SEQ ID NO: 1883896
gcaaguauuugcuuauuau

SEQ ID NO: 2224597 - RNA, 19 nt, Artificial Sequence
  Description of Artificial Sequence: Synthetic oligonucleotide
  Antisense strand to SEQ ID NO: 2224596
auaauaagcaaauacuugc

SEQ ID NO: 2224598 - RNA, 19 nt, Artificial Sequence
  Description of Artificial Sequence: Synthetic oligonucleotide
  Sense strand starting at position 3654 of SEQ ID NO: 1883896
agaaaugcauucccugaaa

SEQ ID NO: 2224599 - RNA, 19 nt, Artificial Sequence
  Description of Artificial Sequence: Synthetic oligonucleotide
  Antisense strand to SEQ ID NO: 2224598
uuucagggaaugcauuucu

SEQ ID NO: 2224600 - RNA, 19 nt, Artificial Sequence
  Description of Artificial Sequence: Synthetic oligonucleotide
  Sense strand starting at position 3761 of SEQ ID NO: 1883896
cuaagucuuugagucccau

SEQ ID NO: 2224601 - RNA, 19 nt, Artificial Sequence
  Description of Artificial Sequence: Synthetic oligonucleotide
  Antisense strand to SEQ ID NO: 2224600
augggacucaaagacuuag

SEQ ID NO: 2224602 - RNA, 19 nt, Artificial Sequence
  Description of Artificial Sequence: Synthetic oligonucleotide
  Sense strand starting at position 3790 of SEQ ID NO: 1883896
cugcaauguguagaaugaa

SEQ ID NO: 2224603 - RNA, 19 nt, Artificial Sequence
  Description of Artificial Sequence: Synthetic oligonucleotide
  Antisense strand to SEQ ID NO: 2224602
uucauucuacacauugcag

SEQ ID NO: 2224604 - RNA, 19 nt, Artificial Sequence
  Description of Artificial Sequence: Synthetic oligonucleotide
  Sense strand starting at position 314 of SEQ ID NO: 1883897
agaagagguuucgugagaa

SEQ ID NO: 2224605 - RNA, 19 nt, Artificial Sequence
  Description of Artificial Sequence: Synthetic oligonucleotide
  Antisense strand to SEQ ID NO: 2224604
uucucacgaaaccucuucu

SEQ ID NO: 2224606 - RNA, 19 nt, Artificial Sequence
  Description of Artificial Sequence: Synthetic oligonucleotide
  Sense strand starting at position 372 of SEQ ID NO: 1883897
agggcacaucauuagcaau

SEQ ID NO: 2224607 - RNA, 19 nt, Artificial Sequence
  Description of Artificial Sequence: Synthetic oligonucleotide
  Antisense strand to SEQ ID NO: 2224606
auugcuaaugaugugcccu

SEQ ID NO: 2224608 - RNA, 19 nt, Artificial Sequence
  Description of Artificial Sequence: Synthetic oligonucleotide
  Sense strand starting at position 383 of SEQ ID NO: 1883897
uuagcaauacucgaugaca

SEQ ID NO: 2224609 - RNA, 19 nt, Artificial Sequence
  Description of Artificial Sequence: Synthetic oligonucleotide
  Antisense strand to SEQ ID NO: 2224608
ugucaucgaguauugcuaa

SEQ ID NO: 2224610 - RNA, 19 nt, Artificial Sequence
  Description of Artificial Sequence: Synthetic oligonucleotide
  Sense strand starting at position 385 of SEQ ID NO: 1883897
agcaauacucgaugacauc

SEQ ID NO: 2224611 - RNA, 19 nt, Artificial Sequence
  Description of Artificial Sequence: Synthetic oligonucleotide
  Antisense strand to SEQ ID NO: 2224610
gaugucaucgaguauugcu

SEQ ID NO: 2224612 - RNA, 19 nt, Artificial Sequence
  Description of Artificial Sequence: Synthetic oligonucleotide
  Sense strand starting at position 386 of SEQ ID NO: 1883897
gcaauacucgaugacauca

SEQ ID NO: 2224613 - RNA, 19 nt, Artificial Sequence
  Description of Artificial Sequence: Synthetic oligonucleotide
  Antisense strand to SEQ ID NO: 2224612
ugaugucaucgaguauugc

SEQ ID NO: 2224614 - RNA, 19 nt, Artificial Sequence
  Description of Artificial Sequence: Synthetic oligonucleotide
  Sense strand starting at position 430 of SEQ ID NO: 1883897
ccucuaaaguucucaacga

SEQ ID NO: 2224615 - RNA, 19 nt, Artificial Sequence
  Description of Artificial Sequence: Synthetic oligonucleotide
  Antisense strand to SEQ ID NO: 2224614
ucguugagaacuuuagagg

SEQ ID NO: 2224616 - RNA, 19 nt, Artificial Sequence
  Description of Artificial Sequence: Synthetic oligonucleotide
  Sense strand starting at position 606 of SEQ ID NO: 1883897
acgagacugcucggaagga

SEQ ID NO: 2224617 - RNA, 19 nt, Artificial Sequence
  Description of Artificial Sequence: Synthetic oligonucleotide
  Antisense strand to SEQ ID NO: 2224616
uccuuccgagcagucucgu

SEQ ID NO: 2224618 - RNA, 19 nt, Artificial Sequence
  Description of Artificial Sequence: Synthetic oligonucleotide
  Sense strand starting at position 693 of SEQ ID NO: 1883897
cugcaauaucgugagggaa

SEQ ID NO: 2224619 - RNA, 19 nt, Artificial Sequence
  Description of Artificial Sequence: Synthetic oligonucleotide
  Antisense strand to SEQ ID NO: 2224618
uucccucacgauauugcag

SEQ ID NO: 2224620 - RNA, 19 nt, Artificial Sequence
  Description of Artificial Sequence: Synthetic oligonucleotide
  Sense strand starting at position 711 of SEQ ID NO: 1883897
agccgaggcccugaaucau

SEQ ID NO: 2224621 - RNA, 19 nt, Artificial Sequence
  Description of Artificial Sequence: Synthetic oligonucleotide
  Antisense strand to SEQ ID NO: 2224620
augauucagggccucggcu

SEQ ID NO: 2224622 - RNA, 19 nt, Artificial Sequence
  Description of Artificial Sequence: Synthetic oligonucleotide
  Sense strand starting at position 717 of SEQ ID NO: 1883897
ggcccugaaucaucaaaga

SEQ ID NO: 2224623 - RNA, 19 nt, Artificial Sequence
  Description of Artificial Sequence: Synthetic oligonucleotide
  Antisense strand to SEQ ID NO: 2224622
ucuuugaugauucagggcc

SEQ ID NO: 2224624 - RNA, 19 nt, Artificial Sequence
  Description of Artificial Sequence: Synthetic oligonucleotide
  Sense strand starting at position 1374 of SEQ ID NO: 1883897
gcaucuauuugguuugggu

SEQ ID NO: 2224625 - RNA, 19 nt, Artificial Sequence
  Description of Artificial Sequence: Synthetic oligonucleotide
  Antisense strand to SEQ ID NO: 2224624
acccaaaccaaauagaugc

SEQ ID NO: 2224626 - RNA, 19 nt, Artificial Sequence
  Description of Artificial Sequence: Synthetic oligonucleotide
  Sense strand starting at position 1451 of SEQ ID NO: 1883897
uguaauaauuugccuuugu

SEQ ID NO: 2224627 - RNA, 19 nt, Artificial Sequence
  Description of Artificial Sequence: Synthetic oligonucleotide
  Antisense strand to SEQ ID NO: 2224626
acaaaggcaaauuauuaca

SEQ ID NO: 2224628 - RNA, 19 nt, Artificial Sequence
  Description of Artificial Sequence: Synthetic oligonucleotide
  Sense strand starting at position 1452 of SEQ ID NO: 1883897
guaauaauuugccuuugua

SEQ ID NO: 2224629 - RNA, 19 nt, Artificial Sequence
  Description of Artificial Sequence: Synthetic oligonucleotide
  Antisense strand to SEQ ID NO: 2224628
uacaaaggcaaauuauuac

SEQ ID NO: 2224630 - RNA, 19 nt, Artificial Sequence
  Description of Artificial Sequence: Synthetic oligonucleotide
  Sense strand starting at position 1513 of SEQ ID NO: 1883897
aggcauauaucuguuagaa

SEQ ID NO: 2224631 - RNA, 19 nt, Artificial Sequence
  Description of Artificial Sequence: Synthetic oligonucleotide
  Antisense strand to SEQ ID NO: 2224630
uucuaacagauauaugccu

SEQ ID NO: 2224632 - RNA, 19 nt, Artificial Sequence
  Description of Artificial Sequence: Synthetic oligonucleotide
  Sense strand starting at position 1587 of SEQ ID NO: 1883897
ugaaguaaauguuuaagca

SEQ ID NO: 2224633 - RNA, 19 nt, Artificial Sequence
  Description of Artificial Sequence: Synthetic oligonucleotide
  Antisense strand to SEQ ID NO: 2224632
ugcuuaaacauuuacuuca

SEQ ID NO: 2224634 - RNA, 19 nt, Artificial Sequence
  Description of Artificial Sequence: Synthetic oligonucleotide
  Sense strand starting at position 1588 of SEQ ID NO: 1883897
gaaguaaauguuuaagcau

SEQ ID NO: 2224635 - RNA, 19 nt, Artificial Sequence
  Description of Artificial Sequence: Synthetic oligonucleotide
  Antisense strand to SEQ ID NO: 2224634
augcuuaaacauuuacuuc

SEQ ID NO: 2224636 - RNA, 19 nt, Artificial Sequence
  Description of Artificial Sequence: Synthetic oligonucleotide
  Sense strand starting at position 1622 of SEQ ID NO: 1883897
gcaaucuguguccacaaag

SEQ ID NO: 2224637 - RNA, 19 nt, Artificial Sequence
  Description of Artificial Sequence: Synthetic oligonucleotide
  Antisense strand to SEQ ID NO: 2224636
cuuuguggacacagauugc

SEQ ID NO: 2224638 - RNA, 19 nt, Artificial Sequence
  Description of Artificial Sequence: Synthetic oligonucleotide
  Sense strand starting at position 1694 of SEQ ID NO: 1883897
ggccaagucccaggauacu

SEQ ID NO: 2224639 - RNA, 19 nt, Artificial Sequence
  Description of Artificial Sequence: Synthetic oligonucleotide
  Antisense strand to SEQ ID NO: 2224638
aguauccugggacuuggcc

SEQ ID NO: 2224640 - RNA, 19 nt, Artificial Sequence
  Description of Artificial Sequence: Synthetic oligonucleotide
  Sense strand starting at position 1763 of SEQ ID NO: 1883897
cuggcaaacugguugaaga

SEQ ID NO: 2224641 - RNA, 19 nt, Artificial Sequence
  Description of Artificial Sequence: Synthetic oligonucleotide
  Antisense strand to SEQ ID NO: 2224640
ucuucaaccaguuugccag

SEQ ID NO: 2224642 - RNA, 19 nt, Artificial Sequence
  Description of Artificial Sequence: Synthetic oligonucleotide
  Sense strand starting at position 1764 of SEQ ID NO: 1883897
uggcaaacugguugaagau

SEQ ID NO: 2224643 - RNA, 19 nt, Artificial Sequence
  Description of Artificial Sequence: Synthetic oligonucleotide
  Antisense strand to SEQ ID NO: 2224642
aucuucaaccaguuugcca

SEQ ID NO: 2224644 - RNA, 19 nt, Artificial Sequence
  Description of Artificial Sequence: Synthetic oligonucleotide
  Sense strand starting at position 1792 of SEQ ID NO: 1883897
cgaauagaucugcacaaug

SEQ ID NO: 2224645 - RNA, 19 nt, Artificial Sequence
  Description of Artificial Sequence: Synthetic oligonucleotide
  Antisense strand to SEQ ID NO: 2224644
cauugugcagaucuauucg

SEQ ID NO: 2224646 - RNA, 19 nt, Artificial Sequence
  Description of Artificial Sequence: Synthetic oligonucleotide
  Sense strand starting at position 2360 of SEQ ID NO: 1883897
guguaaagugcuuaauaga

SEQ ID NO: 2224647 - RNA, 19 nt, Artificial Sequence
  Description of Artificial Sequence: Synthetic oligonucleotide
  Antisense strand to SEQ ID NO: 2224646
ucuauuaagcacuuuacac

SEQ ID NO: 2224648 - RNA, 19 nt, Artificial Sequence
  Description of Artificial Sequence: Synthetic oligonucleotide
  Sense strand starting at position 2525 of SEQ ID NO: 1883897
guaacucuccguuaaugac

SEQ ID NO: 2224649 - RNA, 19 nt, Artificial Sequence
  Description of Artificial Sequence: Synthetic oligonucleotide
  Antisense strand to SEQ ID NO: 2224648
gucauuaacggagaguuac

SEQ ID NO: 2224650 - RNA, 19 nt, Artificial Sequence
  Description of Artificial Sequence: Synthetic oligonucleotide
  Sense strand starting at position 2531 of SEQ ID NO: 1883897
cuccguuaaugacuuugaa

SEQ ID NO: 2224651 - RNA, 19 nt, Artificial Sequence
  Description of Artificial Sequence: Synthetic oligonucleotide
  Antisense strand to SEQ ID NO: 2224650
uucaaagucauuaacggag

SEQ ID NO: 2224652 - RNA, 19 nt, Artificial Sequence
  Description of Artificial Sequence: Synthetic oligonucleotide
  Sense strand starting at position 2534 of SEQ ID NO: 1883897
cguuaaugacuuugaauag

SEQ ID NO: 2224653 - RNA, 19 nt, Artificial Sequence
  Description of Artificial Sequence: Synthetic oligonucleotide
  Antisense strand to SEQ ID NO: 2224652
cuauucaaagucauuaacg

SEQ ID NO: 2224654 - RNA, 19 nt, Artificial Sequence
  Description of Artificial Sequence: Synthetic oligonucleotide
  Sense strand starting at position 2725 of SEQ ID NO: 1883897
ggucaaaggaaaugcuaau

SEQ ID NO: 2224655 - RNA, 19 nt, Artificial Sequence
  Description of Artificial Sequence: Synthetic oligonucleotide
  Antisense strand to SEQ ID NO: 2224654
auuagcauuuccuuugacc

SEQ ID NO: 2224656 - RNA, 19 nt, Artificial Sequence
  Description of Artificial Sequence: Synthetic oligonucleotide
  Sense strand starting at position 2778 of SEQ ID NO: 1883897
gaggcuuaaucauuaagua

SEQ ID NO: 2224657 - RNA, 19 nt, Artificial Sequence
  Description of Artificial Sequence: Synthetic oligonucleotide
  Antisense strand to SEQ ID NO: 2224656
uacuuaaugauuaagccuc

SEQ ID NO: 2224658 - RNA, 19 nt, Artificial Sequence
  Description of Artificial Sequence: Synthetic oligonucleotide
  Sense strand starting at position 2779 of SEQ ID NO: 1883897
aggcuuaaucauuaaguau

SEQ ID NO: 2224659 - RNA, 19 nt, Artificial Sequence
  Description of Artificial Sequence: Synthetic oligonucleotide
  Antisense strand to SEQ ID NO: 2224658
auacuuaaugauuaagccu

SEQ ID NO: 2224660 - RNA, 19 nt, Artificial Sequence
  Description of Artificial Sequence: Synthetic oligonucleotide
  Sense strand starting at position 3209 of SEQ ID NO: 1883897
aaaugauguguccacaguc

SEQ ID NO: 2224661 - RNA, 19 nt, Artificial Sequence
  Description of Artificial Sequence: Synthetic oligonucleotide
  Antisense strand to SEQ ID NO: 2224660
gacuguggacacaucauuu

SEQ ID NO: 2224662 - RNA, 19 nt, Artificial Sequence
  Description of Artificial Sequence: Synthetic oligonucleotide
  Sense strand starting at position 3222 of SEQ ID NO: 1883897
acagucaugcagcaaguaa

SEQ ID NO: 2224663 - RNA, 19 nt, Artificial Sequence
  Description of Artificial Sequence: Synthetic oligonucleotide
  Antisense strand to SEQ ID NO: 2224662
uuacuugcugcaugacugu

SEQ ID NO: 2224664 - RNA, 19 nt, Artificial Sequence
  Description of Artificial Sequence: Synthetic oligonucleotide
  Sense strand starting at position 3294 of SEQ ID NO: 1883897
uacguugcacaugacaaau

SEQ ID NO: 2224665 - RNA, 19 nt, Artificial Sequence
  Description of Artificial Sequence: Synthetic oligonucleotide
  Antisense strand to SEQ ID NO: 2224664
auuugucaugugcaacgua

SEQ ID NO: 2224666 - RNA, 19 nt, Artificial Sequence
  Description of Artificial Sequence: Synthetic oligonucleotide
  Sense strand starting at position 3411 of SEQ ID NO: 1883897
uggguuagaugaccuuuaa

SEQ ID NO: 2224667 - RNA, 19 nt, Artificial Sequence
  Description of Artificial Sequence: Synthetic oligonucleotide
  Antisense strand to SEQ ID NO: 2224666
uuaaaggucaucuaaccca

SEQ ID NO: 2224668 - RNA, 19 nt, Artificial Sequence
  Description of Artificial Sequence: Synthetic oligonucleotide
  Sense strand starting at position 3424 of SEQ ID NO: 1883897
cuuuaaggaaucugugguu

SEQ ID NO: 2224669 - RNA, 19 nt, Artificial Sequence
  Description of Artificial Sequence: Synthetic oligonucleotide
  Antisense strand to SEQ ID NO: 2224668
aaccacagauuccuuaaag

SEQ ID NO: 2224670 - RNA, 19 nt, Artificial Sequence
  Description of Artificial Sequence: Synthetic oligonucleotide
  Sense strand starting at position 3524 of SEQ ID NO: 1883897
gguucuggugaucaguuaa

SEQ ID NO: 2224671 - RNA, 19 nt, Artificial Sequence
  Description of Artificial Sequence: Synthetic oligonucleotide
  Antisense strand to SEQ ID NO: 2224670
uuaacugaucaccagaacc

SEQ ID NO: 2224672 - RNA, 19 nt, Artificial Sequence
  Description of Artificial Sequence: Synthetic oligonucleotide
  Sense strand starting at position 3557 of SEQ ID NO: 1883897
gcaguuaccaucuaggguu

SEQ ID NO: 2224673 - RNA, 19 nt, Artificial Sequence
  Description of Artificial Sequence: Synthetic oligonucleotide
  Antisense strand to SEQ ID NO: 2224672
aacccuagaugguaacugc

SEQ ID NO: 2224674 - RNA, 19 nt, Artificial Sequence
  Description of Artificial Sequence: Synthetic oligonucleotide
  Sense strand starting at position 3564 of SEQ ID NO: 1883897
ccaucuaggguuuauuagu

SEQ ID NO: 2224675 - RNA, 19 nt, Artificial Sequence
  Description of Artificial Sequence: Synthetic oligonucleotide
  Antisense strand to SEQ ID NO: 2224674
acuaauaaacccuagaugg

SEQ ID NO: 2224676 - RNA, 19 nt, Artificial Sequence
  Description of Artificial Sequence: Synthetic oligonucleotide
  Sense strand starting at position 3644 of SEQ ID NO: 1883897
gcuagaaauuacuuaggua

SEQ ID NO: 2224677 - RNA, 19 nt, Artificial Sequence
  Description of Artificial Sequence: Synthetic oligonucleotide
  Antisense strand to SEQ ID NO: 2224676
uaccuaaguaauuucuagc

SEQ ID NO: 2224678 - RNA, 19 nt, Artificial Sequence
  Description of Artificial Sequence: Synthetic oligonucleotide
  Sense strand starting at position 3710 of SEQ ID NO: 1883897
gcuaauucugugcuccagu

SEQ ID NO: 2224679 - RNA, 19 nt, Artificial Sequence
  Description of Artificial Sequence: Synthetic oligonucleotide
  Antisense strand to SEQ ID NO: 2224678
acuggagcacagaauuagc

SEQ ID NO: 2224680 - RNA, 19 nt, Artificial Sequence
  Description of Artificial Sequence: Synthetic oligonucleotide
  Sense strand starting at position 3755 of SEQ ID NO: 1883897
gaacgauaguaguucugag

SEQ ID NO: 2224681 - RNA, 19 nt, Artificial Sequence
  Description of Artificial Sequence: Synthetic oligonucleotide
  Antisense strand to SEQ ID NO: 2224680
cucagaacuacuaucguuc

SEQ ID NO: 2224682 - RNA, 19 nt, Artificial Sequence
  Description of Artificial Sequence: Synthetic oligonucleotide
  Sense strand starting at position 3975 of SEQ ID NO: 1883897
uuuaaaucuuaggugagau

SEQ ID NO: 2224683 - RNA, 19 nt, Artificial Sequence
  Description of Artificial Sequence: Synthetic oligonucleotide
  Antisense strand to SEQ ID NO: 2224682
aucucaccuaagauuuaaa

SEQ ID NO: 2224684 - RNA, 19 nt, Artificial Sequence
  Description of Artificial Sequence: Synthetic oligonucleotide
  Sense strand starting at position 73 of SEQ ID NO: 1883898
acuucuaacgauugcauaa

SEQ ID NO: 2224685 - RNA, 19 nt, Artificial Sequence
  Description of Artificial Sequence: Synthetic oligonucleotide
  Antisense strand to SEQ ID NO: 2224684
uuaugcaaucguuagaagu

SEQ ID NO: 2224686 - RNA, 19 nt, Artificial Sequence
  Description of Artificial Sequence: Synthetic oligonucleotide
  Sense strand starting at position 162 of SEQ ID NO: 1883898
accguuaucgaccaaauca

SEQ ID NO: 2224687 - RNA, 19 nt, Artificial Sequence
  Description of Artificial Sequence: Synthetic oligonucleotide
  Antisense strand to SEQ ID NO: 2224686
ugauuuggucgauaacggu

SEQ ID NO: 2224688 - RNA, 19 nt, Artificial Sequence
  Description of Artificial Sequence: Synthetic oligonucleotide
  Sense strand starting at position 248 of SEQ ID NO: 1883898
gcuagacuguucuauuaaa

SEQ ID NO: 2224689 - RNA, 19 nt, Artificial Sequence
  Description of Artificial Sequence: Synthetic oligonucleotide
  Antisense strand to SEQ ID NO: 2224688
uuuaauagaacagucuagc

SEQ ID NO: 2224690 - RNA, 19 nt, Artificial Sequence
  Description of Artificial Sequence: Synthetic oligonucleotide
  Sense strand starting at position 292 of SEQ ID NO: 1883898
gcaaaugcauggcaagaga

SEQ ID NO: 2224691 - RNA, 19 nt, Artificial Sequence
  Description of Artificial Sequence: Synthetic oligonucleotide
  Antisense strand to SEQ ID NO: 2224690
ucucuugccaugcauuugc

SEQ ID NO: 2224692 - RNA, 19 nt, Artificial Sequence
  Description of Artificial Sequence: Synthetic oligonucleotide
  Sense strand starting at position 359 of SEQ ID NO: 1883898
aaaucugaaucacgaugga

SEQ ID NO: 2224693 - RNA, 19 nt, Artificial Sequence
  Description of Artificial Sequence: Synthetic oligonucleotide
  Antisense strand to SEQ ID NO: 2224692
uccaucgugauucagauuu

SEQ ID NO: 2224694 - RNA, 19 nt, Artificial Sequence
  Description of Artificial Sequence: Synthetic oligonucleotide
  Sense strand starting at position 571 of SEQ ID NO: 1883898
ggcucauccuuccuguaca

SEQ ID NO: 2224695 - RNA, 19 nt, Artificial Sequence
  Description of Artificial Sequence: Synthetic oligonucleotide
  Antisense strand to SEQ ID NO: 2224694
uguacaggaaggaugagcc

SEQ ID NO: 2224696 - RNA, 19 nt, Artificial Sequence
  Description of Artificial Sequence: Synthetic oligonucleotide
  Sense strand starting at position 584 of SEQ ID NO: 1883898
uguacauucguccagggaa

SEQ ID NO: 2224697 - RNA, 19 nt, Artificial Sequence
  Description of Artificial Sequence: Synthetic oligonucleotide
  Antisense strand to SEQ ID NO: 2224696
uucccuggacgaauguaca

SEQ ID NO: 2224698 - RNA, 19 nt, Artificial Sequence
  Description of Artificial Sequence: Synthetic oligonucleotide
  Sense strand starting at position 586 of SEQ ID NO: 1883898
uacauucguccagggaagu

SEQ ID NO: 2224699 - RNA, 19 nt, Artificial Sequence
  Description of Artificial Sequence: Synthetic oligonucleotide
  Antisense strand to SEQ ID NO: 2224698
acuucccuggacgaaugua

SEQ ID NO: 2224700 - RNA, 19 nt, Artificial Sequence
  Description of Artificial Sequence: Synthetic oligonucleotide
  Sense strand starting at position 815 of SEQ ID NO: 1883898
ccaccacgauuucgagagu

SEQ ID NO: 2224701 - RNA, 19 nt, Artificial Sequence
  Description of Artificial Sequence: Synthetic oligonucleotide
  Antisense strand to SEQ ID NO: 2224700
acucucgaaaucguggugg

SEQ ID NO: 2224702 - RNA, 19 nt, Artificial Sequence
  Description of Artificial Sequence: Synthetic oligonucleotide
  Sense strand starting at position 816 of SEQ ID NO: 1883898
caccacgauuucgagagua

SEQ ID NO: 2224703 - RNA, 19 nt, Artificial Sequence
  Description of Artificial Sequence: Synthetic oligonucleotide
  Antisense strand to SEQ ID NO: 2224702
uacucucgaaaucguggug

SEQ ID NO: 2224704 - RNA, 19 nt, Artificial Sequence
  Description of Artificial Sequence: Synthetic oligonucleotide
  Sense strand starting at position 1083 of SEQ ID NO: 1883898
gcgguagaaguccucgcua

SEQ ID NO: 2224705 - RNA, 19 nt, Artificial Sequence
  Description of Artificial Sequence: Synthetic oligonucleotide
  Antisense strand to SEQ ID NO: 2224704
uagcgaggacuucuaccgc

SEQ ID NO: 2224706 - RNA, 19 nt, Artificial Sequence
  Description of Artificial Sequence: Synthetic oligonucleotide
  Sense strand starting at position 1088 of SEQ ID NO: 1883898
agaaguccucgcuagggaa

SEQ ID NO: 2224707 - RNA, 19 nt, Artificial Sequence
  Description of Artificial Sequence: Synthetic oligonucleotide
  Antisense strand to SEQ ID NO: 2224706
uucccuagcgaggacuucu

SEQ ID NO: 2224708 - RNA, 19 nt, Artificial Sequence
  Description of Artificial Sequence: Synthetic oligonucleotide
  Sense strand starting at position 1090 of SEQ ID NO: 1883898
aaguccucgcuagggaaau

SEQ ID NO: 2224709 - RNA, 19 nt, Artificial Sequence
  Description of Artificial Sequence: Synthetic oligonucleotide
  Antisense strand to SEQ ID NO: 2224708
auuucccuagcgaggacuu

SEQ ID NO: 2224710 - RNA, 19 nt, Artificial Sequence
  Description of Artificial Sequence: Synthetic oligonucleotide
  Sense strand starting at position 1103 of SEQ ID NO: 1883898
ggaaauaguccacgacgcu

SEQ ID NO: 2224711 - RNA, 19 nt, Artificial Sequence
  Description of Artificial Sequence: Synthetic oligonucleotide
  Antisense strand to SEQ ID NO: 2224710
agcgucguggacuauuucc

SEQ ID NO: 2224712 - RNA, 19 nt, Artificial Sequence
  Description of Artificial Sequence: Synthetic oligonucleotide
  Sense strand starting at position 1333 of SEQ ID NO: 1883898
agggcagcuuuccacuauu

SEQ ID NO: 2224713 - RNA, 19 nt, Artificial Sequence
  Description of Artificial Sequence: Synthetic oligonucleotide
  Antisense strand to SEQ ID NO: 2224712
aauaguggaaagcugcccu

SEQ ID NO: 2224714 - RNA, 19 nt, Artificial Sequence
  Description of Artificial Sequence: Synthetic oligonucleotide
  Sense strand starting at position 1852 of SEQ ID NO: 1883898
ggagguugugauuauccca

SEQ ID NO: 2224715 - RNA, 19 nt, Artificial Sequence
  Description of Artificial Sequence: Synthetic oligonucleotide
  Antisense strand to SEQ ID NO: 2224714
ugggauaaucacaaccucc

SEQ ID NO: 2224716 - RNA, 19 nt, Artificial Sequence
  Description of Artificial Sequence: Synthetic oligonucleotide
  Sense strand starting at position 1855 of SEQ ID NO: 1883898
gguugugauuaucccaaag

SEQ ID NO: 2224717 - RNA, 19 nt, Artificial Sequence
  Description of Artificial Sequence: Synthetic oligonucleotide
  Antisense strand to SEQ ID NO: 2224716
cuuugggauaaucacaacc

SEQ ID NO: 2224718 - RNA, 19 nt, Artificial Sequence
  Description of Artificial Sequence: Synthetic oligonucleotide
  Sense strand starting at position 1857 of SEQ ID NO: 1883898
uugugauuaucccaaaguc

SEQ ID NO: 2224719 - RNA, 19 nt, Artificial Sequence
  Description of Artificial Sequence: Synthetic oligonucleotide
  Antisense strand to SEQ ID NO: 2224718
gacuuugggauaaucacaa

SEQ ID NO: 2224720 - RNA, 19 nt, Artificial Sequence
  Description of Artificial Sequence: Synthetic oligonucleotide
  Sense strand starting at position 1884 of SEQ ID NO: 1883898
cgggucucggauugaaagu

SEQ ID NO: 2224721 - RNA, 19 nt, Artificial Sequence
  Description of Artificial Sequence: Synthetic oligonucleotide
  Antisense strand to SEQ ID NO: 2224720
acuuucaauccgagacccg

SEQ ID NO: 2224722 - RNA, 19 nt, Artificial Sequence
  Description of Artificial Sequence: Synthetic oligonucleotide
  Sense strand starting at position 1995 of SEQ ID NO: 1883898
gcagguauuccgugaaugg

SEQ ID NO: 2224723 - RNA, 19 nt, Artificial Sequence
  Description of Artificial Sequence: Synthetic oligonucleotide
  Antisense strand to SEQ ID NO: 2224722
ccauucacggaauaccugc

SEQ ID NO: 2224724 - RNA, 19 nt, Artificial Sequence
  Description of Artificial Sequence: Synthetic oligonucleotide
  Sense strand starting at position 2011 of SEQ ID NO: 1883898
uggcgaggguucgcaaauu

SEQ ID NO: 2224725 - RNA, 19 nt, Artificial Sequence
  Description of Artificial Sequence: Synthetic oligonucleotide
  Antisense strand to SEQ ID NO: 2224724
aauuugcgaacccucgcca

SEQ ID NO: 2224726 - RNA, 19 nt, Artificial Sequence
  Description of Artificial Sequence: Synthetic oligonucleotide
  Sense strand starting at position 2017 of SEQ ID NO: 1883898
ggguucgcaaauuaaagaa

SEQ ID NO: 2224727 - RNA, 19 nt, Artificial Sequence
  Description of Artificial Sequence: Synthetic oligonucleotide
  Antisense strand to SEQ ID NO: 2224726
uucuuuaauuugcgaaccc

SEQ ID NO: 2224728 - RNA, 19 nt, Artificial Sequence
  Description of Artificial Sequence: Synthetic oligonucleotide
  Sense strand starting at position 2074 of SEQ ID NO: 1883898
gacaguugcugucuuguac

SEQ ID NO: 2224729 - RNA, 19 nt, Artificial Sequence
  Description of Artificial Sequence: Synthetic oligonucleotide
  Antisense strand to SEQ ID NO: 2224728
guacaagacagcaacuguc

SEQ ID NO: 2224730 - RNA, 19 nt, Artificial Sequence
  Description of Artificial Sequence: Synthetic oligonucleotide
  Sense strand starting at position 2878 of SEQ ID NO: 1883898
gaguuccaacaagguaaua

SEQ ID NO: 2224731 - RNA, 19 nt, Artificial Sequence
  Description of Artificial Sequence: Synthetic oligonucleotide
  Antisense strand to SEQ ID NO: 2224730
uauuaccuuguuggaacuc

SEQ ID NO: 2224732 - RNA, 19 nt, Artificial Sequence
  Description of Artificial Sequence: Synthetic oligonucleotide
  Sense strand starting at position 2890 of SEQ ID NO: 1883898
gguaauaugccuuaucuuu

SEQ ID NO: 2224733 - RNA, 19 nt, Artificial Sequence
  Description of Artificial Sequence: Synthetic oligonucleotide
  Antisense strand to SEQ ID NO: 2224732
aaagauaaggcauauuacc

SEQ ID NO: 2224734 - RNA, 19 nt, Artificial Sequence
  Description of Artificial Sequence: Synthetic oligonucleotide
  Sense strand starting at position 2934 of SEQ ID NO: 1883898
gccugucuguccucauagu

SEQ ID NO: 2224735 - RNA, 19 nt, Artificial Sequence
  Description of Artificial Sequence: Synthetic oligonucleotide
  Antisense strand to SEQ ID NO: 2224734
acuaugaggacagacaggc

SEQ ID NO: 2224736 - RNA, 19 nt, Artificial Sequence
  Description of Artificial Sequence: Synthetic oligonucleotide
  Sense strand starting at position 2935 of SEQ ID NO: 1883898
ccugucuguccucauaguu

SEQ ID NO: 2224737 - RNA, 19 nt, Artificial Sequence
  Description of Artificial Sequence: Synthetic oligonucleotide
  Antisense strand to SEQ ID NO: 2224736
aacuaugaggacagacagg

SEQ ID NO: 2224738 - RNA, 19 nt, Artificial Sequence
  Description of Artificial Sequence: Synthetic oligonucleotide
  Sense strand starting at position 3073 of SEQ ID NO: 1883898
aagggccuguguuagauau

SEQ ID NO: 2224739 - RNA, 19 nt, Artificial Sequence
  Description of Artificial Sequence: Synthetic oligonucleotide
  Antisense strand to SEQ ID NO: 2224738
auaucuaacacaggcccuu

SEQ ID NO: 2224740 - RNA, 19 nt, Artificial Sequence
  Description of Artificial Sequence: Synthetic oligonucleotide
  Sense strand starting at position 3077 of SEQ ID NO: 1883898
gccuguguuagauauguac

SEQ ID NO: 2224741 - RNA, 19 nt, Artificial Sequence
  Description of Artificial Sequence: Synthetic oligonucleotide
  Antisense strand to SEQ ID NO: 2224740
guacauaucuaacacaggc

SEQ ID NO: 2224742 - RNA, 19 nt, Artificial Sequence
  Description of Artificial Sequence: Synthetic oligonucleotide
  Sense strand starting at position 3079 of SEQ ID NO: 1883898
cuguguuagauauguaccu

SEQ ID NO: 2224743 - RNA, 19 nt, Artificial Sequence
  Description of Artificial Sequence: Synthetic oligonucleotide
  Antisense strand to SEQ ID NO: 2224742
agguacauaucuaacacag

SEQ ID NO: 2224744 - RNA, 19 nt, Artificial Sequence
  Description of Artificial Sequence: Synthetic oligonucleotide
  Sense strand starting at position 3080 of SEQ ID NO: 1883898
uguguuagauauguaccua

SEQ ID NO: 2224745 - RNA, 19 nt, Artificial Sequence
  Description of Artificial Sequence: Synthetic oligonucleotide
  Antisense strand to SEQ ID NO: 2224744
uagguacauaucuaacaca

SEQ ID NO: 2224746 - RNA, 19 nt, Artificial Sequence
  Description of Artificial Sequence: Synthetic oligonucleotide
  Sense strand starting at position 3081 of SEQ ID NO: 1883898
guguuagauauguaccuag

SEQ ID NO: 2224747 - RNA, 19 nt, Artificial Sequence
  Description of Artificial Sequence: Synthetic oligonucleotide
  Antisense strand to SEQ ID NO: 2224746
cuagguacauaucuaacac

SEQ ID NO: 2224748 - RNA, 19 nt, Artificial Sequence
  Description of Artificial Sequence: Synthetic oligonucleotide
  Sense strand starting at position 3453 of SEQ ID NO: 1883898
ccagauuuaugucuggcuu

SEQ ID NO: 2224749 - RNA, 19 nt, Artificial Sequence
  Description of Artificial Sequence: Synthetic oligonucleotide
  Antisense strand to SEQ ID NO: 2224748
aagccagacauaaaucugg

SEQ ID NO: 2224750 - RNA, 19 nt, Artificial Sequence
  Description of Artificial Sequence: Synthetic oligonucleotide
  Sense strand starting at position 3454 of SEQ ID NO: 1883898
cagauuuaugucuggcuuu

SEQ ID NO: 2224751 - RNA, 19 nt, Artificial Sequence
  Description of Artificial Sequence: Synthetic oligonucleotide
  Antisense strand to SEQ ID NO: 2224750
aaagccagacauaaaucug

SEQ ID NO: 2224752 - RNA, 19 nt, Artificial Sequence
  Description of Artificial Sequence: Synthetic oligonucleotide
  Sense strand starting at position 3455 of SEQ ID NO: 1883898
agauuuaugucuggcuuua

SEQ ID NO: 2224753 - RNA, 19 nt, Artificial Sequence
  Description of Artificial Sequence: Synthetic oligonucleotide
  Antisense strand to SEQ ID NO: 2224752
uaaagccagacauaaaucu

SEQ ID NO: 2224754 - RNA, 19 nt, Artificial Sequence
  Description of Artificial Sequence: Synthetic oligonucleotide
  Sense strand starting at position 3457 of SEQ ID NO: 1883898
auuuaugucuggcuuuaca

SEQ ID NO: 2224755 - RNA, 19 nt, Artificial Sequence
  Description of Artificial Sequence: Synthetic oligonucleotide
  Antisense strand to SEQ ID NO: 2224754
uguaaagccagacauaaau

SEQ ID NO: 2224756 - RNA, 19 nt, Artificial Sequence
  Description of Artificial Sequence: Synthetic oligonucleotide
  Sense strand starting at position 3557 of SEQ ID NO: 1883898
guaaauagaacguaugauc

SEQ ID NO: 2224757 - RNA, 19 nt, Artificial Sequence
  Description of Artificial Sequence: Synthetic oligonucleotide
  Antisense strand to SEQ ID NO: 2224756
gaucauacguucuauuuac

SEQ ID NO: 2224758 - RNA, 19 nt, Artificial Sequence
  Description of Artificial Sequence: Synthetic oligonucleotide
  Sense strand starting at position 3562 of SEQ ID NO: 1883898
uagaacguaugaucgaguu

SEQ ID NO: 2224759 - RNA, 19 nt, Artificial Sequence
  Description of Artificial Sequence: Synthetic oligonucleotide
  Antisense strand to SEQ ID NO: 2224758
aacucgaucauacguucua

SEQ ID NO: 2224760 - RNA, 19 nt, Artificial Sequence
  Description of Artificial Sequence: Synthetic oligonucleotide
  Sense strand starting at position 3815 of SEQ ID NO: 1883898
ugcauugugucccuggaua

SEQ ID NO: 2224761 - RNA, 19 nt, Artificial Sequence
  Description of Artificial Sequence: Synthetic oligonucleotide
  Antisense strand to SEQ ID NO: 2224760
uauccagggacacaaugca

SEQ ID NO: 2224762 - RNA, 19 nt, Artificial Sequence
  Description of Artificial Sequence: Synthetic oligonucleotide
  Sense strand starting at position 3817 of SEQ ID NO: 1883898
cauugugucccuggauacu

SEQ ID NO: 2224763 - RNA, 19 nt, Artificial Sequence
  Description of Artificial Sequence: Synthetic oligonucleotide
  Antisense strand to SEQ ID NO: 2224762
aguauccagggacacaaug

SEQ ID NO: 2224764 - RNA, 19 nt, Artificial Sequence
  Description of Artificial Sequence: Synthetic oligonucleotide
  Sense strand starting at position 476 of SEQ ID NO: 1883899
uuucuauuucucugaguuu

SEQ ID NO: 2224765 - RNA, 19 nt, Artificial Sequence
  Description of Artificial Sequence: Synthetic oligonucleotide
  Antisense strand to SEQ ID NO: 2224764
aaacucagagaaauagaaa

SEQ ID NO: 2224766 - RNA, 19 nt, Artificial Sequence
  Description of Artificial Sequence: Synthetic oligonucleotide
  Sense strand starting at position 527 of SEQ ID NO: 1883899
auuguaucaucagcuuuau

SEQ ID NO: 2224767 - RNA, 19 nt, Artificial Sequence
  Description of Artificial Sequence: Synthetic oligonucleotide
  Antisense strand to SEQ ID NO: 2224766
auaaagcugaugauacaau

SEQ ID NO: 2224768 - RNA, 19 nt, Artificial Sequence
  Description of Artificial Sequence: Synthetic oligonucleotide
  Sense strand starting at position 533 of SEQ ID NO: 1883899
ucaucagcuuuauuguuga

SEQ ID NO: 2224769 - RNA, 19 nt, Artificial Sequence
  Description of Artificial Sequence: Synthetic oligonucleotide
  Antisense strand to SEQ ID NO: 2224768
ucaacaauaaagcugauga

SEQ ID NO: 2224770 - RNA, 19 nt, Artificial Sequence
  Description of Artificial Sequence: Synthetic oligonucleotide
  Sense strand starting at position 540 of SEQ ID NO: 1883899
cuuuauuguugacugggaa

SEQ ID NO: 2224771 - RNA, 19 nt, Artificial Sequence
  Description of Artificial Sequence: Synthetic oligonucleotide
  Antisense strand to SEQ ID NO: 2224770
uucccagucaacaauaaag

SEQ ID NO: 2224772 - RNA, 19 nt, Artificial Sequence
  Description of Artificial Sequence: Synthetic oligonucleotide
  Sense strand starting at position 541 of SEQ ID NO: 1883899
uuuauuguugacugggaaa

SEQ ID NO: 2224773 - RNA, 19 nt, Artificial Sequence
  Description of Artificial Sequence: Synthetic oligonucleotide
  Antisense strand to SEQ ID NO: 2224772
uuucccagucaacaauaaa

SEQ ID NO: 2224774 - RNA, 19 nt, Artificial Sequence
  Description of Artificial Sequence: Synthetic oligonucleotide
  Sense strand starting at position 612 of SEQ ID NO: 1883899
ggcauauuaccuuguugga

SEQ ID NO: 2224775 - RNA, 19 nt, Artificial Sequence
  Description of Artificial Sequence: Synthetic oligonucleotide
  Antisense strand to SEQ ID NO: 2224774
uccaacaagguaauaugcc

SEQ ID NO: 2224776 - RNA, 19 nt, Artificial Sequence
  Description of Artificial Sequence: Synthetic oligonucleotide
  Sense strand starting at position 1331 of SEQ ID NO: 1883899
uuguuuggacuguagaguu

SEQ ID NO: 2224777 - RNA, 19 nt, Artificial Sequence
  Description of Artificial Sequence: Synthetic oligonucleotide
  Antisense strand to SEQ ID NO: 2224776
aacucuacaguccaaacaa

SEQ ID NO: 2224778 - RNA, 19 nt, Artificial Sequence
  Description of Artificial Sequence: Synthetic oligonucleotide
  Sense strand starting at position 1396 of SEQ ID NO: 1883899
guaugaggcaccggacuua

SEQ ID NO: 2224779 - RNA, 19 nt, Artificial Sequence
  Description of Artificial Sequence: Synthetic oligonucleotide
  Antisense strand to SEQ ID NO: 2224778
uaaguccggugccucauac

SEQ ID NO: 2224780 - RNA, 19 nt, Artificial Sequence
  Description of Artificial Sequence: Synthetic oligonucleotide
  Sense strand starting at position 1407 of SEQ ID NO: 1883899
cggacuuauagugguacaa

SEQ ID NO: 2224781 - RNA, 19 nt, Artificial Sequence
  Description of Artificial Sequence: Synthetic oligonucleotide
  Antisense strand to SEQ ID NO: 2224780
uuguaccacuauaaguccg

SEQ ID NO: 2224782 - RNA, 19 nt, Artificial Sequence
  Description of Artificial Sequence: Synthetic oligonucleotide
  Sense strand starting at position 1468 of SEQ ID NO: 1883899
cguuaagaguucuuuaauu

SEQ ID NO: 2224783 - RNA, 19 nt, Artificial Sequence
  Description of Artificial Sequence: Synthetic oligonucleotide
  Antisense strand to SEQ ID NO: 2224782
aauuaaagaacucuuaacg

SEQ ID NO: 2224784 - RNA, 19 nt, Artificial Sequence
  Description of Artificial Sequence: Synthetic oligonucleotide
  Sense strand starting at position 1473 of SEQ ID NO: 1883899
agaguucuuuaauuugcga

SEQ ID NO: 2224785 - RNA, 19 nt, Artificial Sequence
  Description of Artificial Sequence: Synthetic oligonucleotide
  Antisense strand to SEQ ID NO: 2224784
ucgcaaauuaaagaacucu

SEQ ID NO: 2224786 - RNA, 19 nt, Artificial Sequence
  Description of Artificial Sequence: Synthetic oligonucleotide
  Sense strand starting at position 1630 of SEQ ID NO: 1883899
cgggaaugacuuugggaua

SEQ ID NO: 2224787 - RNA, 19 nt, Artificial Sequence
  Description of Artificial Sequence: Synthetic oligonucleotide
  Antisense strand to SEQ ID NO: 2224786
uaucccaaagucauucccg

SEQ ID NO: 2224788 - RNA, 19 nt, Artificial Sequence
  Description of Artificial Sequence: Synthetic oligonucleotide
  Sense strand starting at position 2642 of SEQ ID NO: 1883899
gugccuguucugcaggaaa

SEQ ID NO: 2224789 - RNA, 19 nt, Artificial Sequence
  Description of Artificial Sequence: Synthetic oligonucleotide
  Antisense strand to SEQ ID NO: 2224788
uuuccugcagaacaggcac

SEQ ID NO: 2224790 - RNA, 19 nt, Artificial Sequence
  Description of Artificial Sequence: Synthetic oligonucleotide
  Sense strand starting at position 2671 of SEQ ID NO: 1883899
gugcccguacucucgaaau

SEQ ID NO: 2224791 - RNA, 19 nt, Artificial Sequence
  Description of Artificial Sequence: Synthetic oligonucleotide
  Antisense strand to SEQ ID NO: 2224790
auuucgagaguacgggcac

SEQ ID NO: 2224792 - RNA, 19 nt, Artificial Sequence
  Description of Artificial Sequence: Synthetic oligonucleotide
  Sense strand starting at position 2736 of SEQ ID NO: 1883899
gauugugugaggugaagga

SEQ ID NO: 2224793 - RNA, 19 nt, Artificial Sequence
  Description of Artificial Sequence: Synthetic oligonucleotide
  Antisense strand to SEQ ID NO: 2224792
uccuucaccucacacaauc

SEQ ID NO: 2224794 - RNA, 19 nt, Artificial Sequence
  Description of Artificial Sequence: Synthetic oligonucleotide
  Sense strand starting at position 2903 of SEQ ID NO: 1883899
aucagacuucccuggacga

SEQ ID NO: 2224795 - RNA, 19 nt, Artificial Sequence
  Description of Artificial Sequence: Synthetic oligonucleotide
  Antisense strand to SEQ ID NO: 2224794
ucguccagggaagucugau

SEQ ID NO: 2224796 - RNA, 19 nt, Artificial Sequence
  Description of Artificial Sequence: Synthetic oligonucleotide
  Sense strand starting at position 2904 of SEQ ID NO: 1883899
ucagacuucccuggacgaa

SEQ ID NO: 2224797 - RNA, 19 nt, Artificial Sequence
  Description of Artificial Sequence: Synthetic oligonucleotide
  Antisense strand to SEQ ID NO: 2224796
uucguccagggaagucuga

SEQ ID NO: 2224798 - RNA, 19 nt, Artificial Sequence
  Description of Artificial Sequence: Synthetic oligonucleotide
  Sense strand starting at position 2943 of SEQ ID NO: 1883899
uuugcaucucuggguuaaa

SEQ ID NO: 2224799 - RNA, 19 nt, Artificial Sequence
  Description of Artificial Sequence: Synthetic oligonucleotide
  Antisense strand to SEQ ID NO: 2224798
uuuaacccagagaugcaaa

SEQ ID NO: 2224800 - RNA, 19 nt, Artificial Sequence
  Description of Artificial Sequence: Synthetic oligonucleotide
  Sense strand starting at position 3020 of SEQ ID NO: 1883899
gagggauucuguuuguccu

SEQ ID NO: 2224801 - RNA, 19 nt, Artificial Sequence
  Description of Artificial Sequence: Synthetic oligonucleotide
  Antisense strand to SEQ ID NO: 2224800
aggacaaacagaaucccuc

SEQ ID NO: 2224802 - RNA, 19 nt, Artificial Sequence
  Description of Artificial Sequence: Synthetic oligonucleotide
  Sense strand starting at position 3022 of SEQ ID NO: 1883899
gggauucuguuuguccuga

SEQ ID NO: 2224803 - RNA, 19 nt, Artificial Sequence
  Description of Artificial Sequence: Synthetic oligonucleotide
  Antisense strand to SEQ ID NO: 2224802
ucaggacaaacagaauccc

SEQ ID NO: 2224804 - RNA, 19 nt, Artificial Sequence
  Description of Artificial Sequence: Synthetic oligonucleotide
  Sense strand starting at position 3023 of SEQ ID NO: 1883899
ggauucuguuuguccugau

SEQ ID NO: 2224805 - RNA, 19 nt, Artificial Sequence
  Description of Artificial Sequence: Synthetic oligonucleotide
  Antisense strand to SEQ ID NO: 2224804
aucaggacaaacagaaucc

SEQ ID NO: 2224806 - RNA, 19 nt, Artificial Sequence
  Description of Artificial Sequence: Synthetic oligonucleotide
  Sense strand starting at position 3032 of SEQ ID NO: 1883899
uuguccugaucuguuugaa

SEQ ID NO: 2224807 - RNA, 19 nt, Artificial Sequence
  Description of Artificial Sequence: Synthetic oligonucleotide
  Antisense strand to SEQ ID NO: 2224806
uucaaacagaucaggacaa

SEQ ID NO: 2224808 - RNA, 19 nt, Artificial Sequence
  Description of Artificial Sequence: Synthetic oligonucleotide
  Sense strand starting at position 3035 of SEQ ID NO: 1883899
uccugaucuguuugaaauu

SEQ ID NO: 2224809 - RNA, 19 nt, Artificial Sequence
  Description of Artificial Sequence: Synthetic oligonucleotide
  Antisense strand to SEQ ID NO: 2224808
aauuucaaacagaucagga

SEQ ID NO: 2224810 - RNA, 19 nt, Artificial Sequence
  Description of Artificial Sequence: Synthetic oligonucleotide
  Sense strand starting at position 3036 of SEQ ID NO: 1883899
ccugaucuguuugaaauuu

SEQ ID NO: 2224811 - RNA, 19 nt, Artificial Sequence
  Description of Artificial Sequence: Synthetic oligonucleotide
  Antisense strand to SEQ ID NO: 2224810
aaauuucaaacagaucagg

SEQ ID NO: 2224812 - RNA, 19 nt, Artificial Sequence
  Description of Artificial Sequence: Synthetic oligonucleotide
  Sense strand starting at position 3063 of SEQ ID NO: 1883899
ugcuuauaugccgugucuu

SEQ ID NO: 2224813 - RNA, 19 nt, Artificial Sequence
  Description of Artificial Sequence: Synthetic oligonucleotide
  Antisense strand to SEQ ID NO: 2224812
aagacacggcauauaagca

SEQ ID NO: 2224814 - RNA, 19 nt, Artificial Sequence
  Description of Artificial Sequence: Synthetic oligonucleotide
  Sense strand starting at position 3190 of SEQ ID NO: 1883899
guguuuauuuccucucuug

SEQ ID NO: 2224815 - RNA, 19 nt, Artificial Sequence
  Description of Artificial Sequence: Synthetic oligonucleotide
  Antisense strand to SEQ ID NO: 2224814
caagagaggaaauaaacac

SEQ ID NO: 2224816 - RNA, 19 nt, Artificial Sequence
  Description of Artificial Sequence: Synthetic oligonucleotide
  Sense strand starting at position 3207 of SEQ ID NO: 1883899
ugccaugcauuugccaaua

SEQ ID NO: 2224817 - RNA, 19 nt, Artificial Sequence
  Description of Artificial Sequence: Synthetic oligonucleotide
  Antisense strand to SEQ ID NO: 2224816
uauuggcaaaugcauggca

SEQ ID NO: 2224818 - RNA, 19 nt, Artificial Sequence
  Description of Artificial Sequence: Synthetic oligonucleotide
  Sense strand starting at position 3255 of SEQ ID NO: 1883899
acagucuagcuuuguggaa

SEQ ID NO: 2224819 - RNA, 19 nt, Artificial Sequence
  Description of Artificial Sequence: Synthetic oligonucleotide
  Antisense strand to SEQ ID NO: 2224818
uuccacaaagcuagacugu

SEQ ID NO: 2224820 - RNA, 19 nt, Artificial Sequence
  Description of Artificial Sequence: Synthetic oligonucleotide
  Sense strand starting at position 3256 of SEQ ID NO: 1883899
cagucuagcuuuguggaaa

SEQ ID NO: 2224821 - RNA, 19 nt, Artificial Sequence
  Description of Artificial Sequence: Synthetic oligonucleotide
  Antisense strand to SEQ ID NO: 2224820
uuuccacaaagcuagacug

SEQ ID NO: 2224822 - RNA, 19 nt, Artificial Sequence
  Description of Artificial Sequence: Synthetic oligonucleotide
  Sense strand starting at position 3410 of SEQ ID NO: 1883899
ugaguagacaguuaugcaa

SEQ ID NO: 2224823 - RNA, 19 nt, Artificial Sequence
  Description of Artificial Sequence: Synthetic oligonucleotide
  Antisense strand to SEQ ID NO: 2224822
uugcauaacugucuacuca

SEQ ID NO: 2224824 - RNA, 19 nt, Artificial Sequence
  Description of Artificial Sequence: Synthetic oligonucleotide
  Sense strand starting at position 3421 of SEQ ID NO: 1883899
uuaugcaaucguuagaagu

SEQ ID NO: 2224825 - RNA, 19 nt, Artificial Sequence
  Description of Artificial Sequence: Synthetic oligonucleotide
  Antisense strand to SEQ ID NO: 2224824
acuucuaacgauugcauaa

SEQ ID NO: 2224826 - RNA, 19 nt, Artificial Sequence
  Description of Artificial Sequence: Synthetic oligonucleotide
  Sense strand starting at position 3427 of SEQ ID NO: 1883899
aaucguuagaagugaggau

SEQ ID NO: 2224827 - RNA, 19 nt, Artificial Sequence
  Description of Artificial Sequence: Synthetic oligonucleotide
  Antisense strand to SEQ ID NO: 2224826
auccucacuucuaacgauu

SEQ ID NO: 2224828 - RNA, 19 nt, Artificial Sequence
  Description of Artificial Sequence: Synthetic oligonucleotide
  Sense strand starting at position 3428 of SEQ ID NO: 1883899
aucguuagaagugaggauu

SEQ ID NO: 2224829 - RNA, 19 nt, Artificial Sequence
  Description of Artificial Sequence: Synthetic oligonucleotide
  Antisense strand to SEQ ID NO: 2224828
aauccucacuucuaacgau

SEQ ID NO: 2224830 - RNA, 19 nt, Artificial Sequence
  Description of Artificial Sequence: Synthetic oligonucleotide
  Sense strand starting at position 3505 of SEQ ID NO: 1883899
augcaaauggcuuaugcga

SEQ ID NO: 2224831 - RNA, 19 nt, Artificial Sequence
  Description of Artificial Sequence: Synthetic oligonucleotide
  Antisense strand to SEQ ID NO: 2224830
ucgcauaagccauuugcau

SEQ ID NO: 2224832 - RNA, 19 nt, Artificial Sequence
  Description of Artificial Sequence: Synthetic oligonucleotide
  Sense strand starting at position 3512 of SEQ ID NO: 1883899
uggcuuaugcgacaugauu

SEQ ID NO: 2224833 - RNA, 19 nt, Artificial Sequence
  Description of Artificial Sequence: Synthetic oligonucleotide
  Antisense strand to SEQ ID NO: 2224832
aaucaugucgcauaagcca

SEQ ID NO: 2224834 - RNA, 19 nt, Artificial Sequence
  Description of Artificial Sequence: Synthetic oligonucleotide
  Sense strand starting at position 3518 of SEQ ID NO: 1883899
augcgacaugauuacaguu

SEQ ID NO: 2224835 - RNA, 19 nt, Artificial Sequence
  Description of Artificial Sequence: Synthetic oligonucleotide
  Antisense strand to SEQ ID NO: 2224834
aacuguaaucaugucgcau

SEQ ID NO: 2224836 - RNA, 19 nt, Artificial Sequence
  Description of Artificial Sequence: Synthetic oligonucleotide
  Sense strand starting at position 3567 of SEQ ID NO: 1883899
aaucgugacagugguaaua

SEQ ID NO: 2224837 - RNA, 19 nt, Artificial Sequence
  Description of Artificial Sequence: Synthetic oligonucleotide
  Antisense strand to SEQ ID NO: 2224836
uauuaccacugucacgauu

SEQ ID NO: 2224838 - RNA, 19 nt, Artificial Sequence
  Description of Artificial Sequence: Synthetic oligonucleotide
  Sense strand starting at position 3577 of SEQ ID NO: 1883899
gugguaauauggccuuaga

SEQ ID NO: 2224839 - RNA, 19 nt, Artificial Sequence
  Description of Artificial Sequence: Synthetic oligonucleotide
  Antisense strand to SEQ ID NO: 2224838
ucuaaggccauauuaccac

SEQ ID NO: 2224840 - RNA, 19 nt, Artificial Sequence
  Description of Artificial Sequence: Synthetic oligonucleotide
  Sense strand starting at position 3580 of SEQ ID NO: 1883899
guaauauggccuuagagua

SEQ ID NO: 2224841 - RNA, 19 nt, Artificial Sequence
  Description of Artificial Sequence: Synthetic oligonucleotide
  Antisense strand to SEQ ID NO: 2224840
uacucuaaggccauauuac

SEQ ID NO: 2224842 - RNA, 19 nt, Artificial Sequence
  Description of Artificial Sequence: Synthetic oligonucleotide
  Sense strand starting at position 3923 of SEQ ID NO: 1883899
aauugaggcuuauugggua

SEQ ID NO: 2224843 - RNA, 19 nt, Artificial Sequence
  Description of Artificial Sequence: Synthetic oligonucleotide
  Antisense strand to SEQ ID NO: 2224842
uacccaauaagccucaauu

SEQ ID NO: 2224844 - RNA, 19 nt, Artificial Sequence
  Description of Artificial Sequence: Synthetic oligonucleotide
  Sense strand starting at position 7 of SEQ ID NO: 1883900
gaaaguaugcuguguuuaa

SEQ ID NO: 2224845 - RNA, 19 nt, Artificial Sequence
  Description of Artificial Sequence: Synthetic oligonucleotide
  Antisense strand to SEQ ID NO: 2224844
uuaaacacagcauacuuuc

SEQ ID NO: 2224846 - RNA, 19 nt, Artificial Sequence
  Description of Artificial Sequence: Synthetic oligonucleotide
  Sense strand starting at position 8 of SEQ ID NO: 1883900
aaaguaugcuguguuuaaa

SEQ ID NO: 2224847 - RNA, 19 nt, Artificial Sequence
  Description of Artificial Sequence: Synthetic oligonucleotide
  Antisense strand to SEQ ID NO: 2224846
uuuaaacacagcauacuuu

SEQ ID NO: 2224848 - RNA, 19 nt, Artificial Sequence
  Description of Artificial Sequence: Synthetic oligonucleotide
  Sense strand starting at position 32 of SEQ ID NO: 1883900
aggaaauuguccuagaaua

SEQ ID NO: 2224849 - RNA, 19 nt, Artificial Sequence
  Description of Artificial Sequence: Synthetic oligonucleotide
  Antisense strand to SEQ ID NO: 2224848
uauucuaggacaauuuccu

SEQ ID NO: 2224850 - RNA, 19 nt, Artificial Sequence
  Description of Artificial Sequence: Synthetic oligonucleotide
  Sense strand starting at position 114 of SEQ ID NO: 1883900
uggcuaucagccuaacaau

SEQ ID NO: 2224851 - RNA, 19 nt, Artificial Sequence
  Description of Artificial Sequence: Synthetic oligonucleotide
  Antisense strand to SEQ ID NO: 2224850
auuguuaggcugauagcca

SEQ ID NO: 2224852 - RNA, 19 nt, Artificial Sequence
  Description of Artificial Sequence: Synthetic oligonucleotide
  Sense strand starting at position 200 of SEQ ID NO: 1883900
cuaagaagcugacuuucuu

SEQ ID NO: 2224853 - RNA, 19 nt, Artificial Sequence
  Description of Artificial Sequence: Synthetic oligonucleotide
  Antisense strand to SEQ ID NO: 2224852
aagaaagucagcuucuuag

SEQ ID NO: 2224854 - RNA, 19 nt, Artificial Sequence
  Description of Artificial Sequence: Synthetic oligonucleotide
  Sense strand starting at position 602 of SEQ ID NO: 1883900
ccagcugauuuggaaucau

SEQ ID NO: 2224855 - RNA, 19 nt, Artificial Sequence
  Description of Artificial Sequence: Synthetic oligonucleotide
  Antisense strand to SEQ ID NO: 2224854
augauuccaaaucagcugg

SEQ ID NO: 2224856 - RNA, 19 nt, Artificial Sequence
  Description of Artificial Sequence: Synthetic oligonucleotide
  Sense strand starting at position 628 of SEQ ID NO: 1883900
cccuuacuacuguguaauc

SEQ ID NO: 2224857 - RNA, 19 nt, Artificial Sequence
  Description of Artificial Sequence: Synthetic oligonucleotide
  Antisense strand to SEQ ID NO: 2224856
gauuacacaguaguaaggg

SEQ ID NO: 2224858 - RNA, 19 nt, Artificial Sequence
  Description of Artificial Sequence: Synthetic oligonucleotide
  Sense strand starting at position 640 of SEQ ID NO: 1883900
uguaauccuggccaaguua

SEQ ID NO: 2224859 - RNA, 19 nt, Artificial Sequence
  Description of Artificial Sequence: Synthetic oligonucleotide
  Antisense strand to SEQ ID NO: 2224858
uaacuuggccaggauuaca

SEQ ID NO: 2224860 - RNA, 19 nt, Artificial Sequence
  Description of Artificial Sequence: Synthetic oligonucleotide
  Sense strand starting at position 663 of SEQ ID NO: 1883900
aauguaucgccucgauuuc

SEQ ID NO: 2224861 - RNA, 19 nt, Artificial Sequence
  Description of Artificial Sequence: Synthetic oligonucleotide
  Antisense strand to SEQ ID NO: 2224860
gaaaucgaggcgauacauu

SEQ ID NO: 2224862 - RNA, 19 nt, Artificial Sequence
  Description of Artificial Sequence: Synthetic oligonucleotide
  Sense strand starting at position 673 of SEQ ID NO: 1883900
cucgauuucucuccguaaa

SEQ ID NO: 2224863 - RNA, 19 nt, Artificial Sequence
  Description of Artificial Sequence: Synthetic oligonucleotide
  Antisense strand to SEQ ID NO: 2224862
uuuacggagagaaaucgag

SEQ ID NO: 2224864 - RNA, 19 nt, Artificial Sequence
  Description of Artificial Sequence: Synthetic oligonucleotide
  Sense strand starting at position 674 of SEQ ID NO: 1883900
ucgauuucucuccguaaau

SEQ ID NO: 2224865 - RNA, 19 nt, Artificial Sequence
  Description of Artificial Sequence: Synthetic oligonucleotide
  Antisense strand to SEQ ID NO: 2224864
auuuacggagagaaaucga

SEQ ID NO: 2224866 - RNA, 19 nt, Artificial Sequence
  Description of Artificial Sequence: Synthetic oligonucleotide
  Sense strand starting at position 675 of SEQ ID NO: 1883900
cgauuucucuccguaaauc

SEQ ID NO: 2224867 - RNA, 19 nt, Artificial Sequence
  Description of Artificial Sequence: Synthetic oligonucleotide
  Antisense strand to SEQ ID NO: 2224866
gauuuacggagagaaaucg

SEQ ID NO: 2224868 - RNA, 19 nt, Artificial Sequence
  Description of Artificial Sequence: Synthetic oligonucleotide
  Sense strand starting at position 685 of SEQ ID NO: 1883900
ccguaaauccagcauaaua

SEQ ID NO: 2224869 - RNA, 19 nt, Artificial Sequence
  Description of Artificial Sequence: Synthetic oligonucleotide
  Antisense strand to SEQ ID NO: 2224868
uauuaugcuggauuuacgg

SEQ ID NO: 2224870 - RNA, 19 nt, Artificial Sequence
  Description of Artificial Sequence: Synthetic oligonucleotide
  Sense strand starting at position 719 of SEQ ID NO: 1883900
agaguuguuguagggaaua

SEQ ID NO: 2224871 - RNA, 19 nt, Artificial Sequence
  Description of Artificial Sequence: Synthetic oligonucleotide
  Antisense strand to SEQ ID NO: 2224870
uauucccuacaacaacucu

SEQ ID NO: 2224872 - RNA, 19 nt, Artificial Sequence
  Description of Artificial Sequence: Synthetic oligonucleotide
  Sense strand starting at position 751 of SEQ ID NO: 1883900
acauaaagcgcuuagaaga

SEQ ID NO: 2224873 - RNA, 19 nt, Artificial Sequence
  Description of Artificial Sequence: Synthetic oligonucleotide
  Antisense strand to SEQ ID NO: 2224872
ucuucuaagcgcuuuaugu

SEQ ID NO: 2224874 - RNA, 19 nt, Artificial Sequence
  Description of Artificial Sequence: Synthetic oligonucleotide
  Sense strand starting at position 928 of SEQ ID NO: 1883900
ucacaaugcgcauguauuu

SEQ ID NO: 2224875 - RNA, 19 nt, Artificial Sequence
  Description of Artificial Sequence: Synthetic oligonucleotide
  Antisense strand to SEQ ID NO: 2224874
aaauacaugcgcauuguga

SEQ ID NO: 2224876 - RNA, 19 nt, Artificial Sequence
  Description of Artificial Sequence: Synthetic oligonucleotide
  Sense strand starting at position 1003 of SEQ ID NO: 1883900
gggcaucauaacugauugu

SEQ ID NO: 2224877 - RNA, 19 nt, Artificial Sequence
  Description of Artificial Sequence: Synthetic oligonucleotide
  Antisense strand to SEQ ID NO: 2224876
acaaucaguuaugaugccc

SEQ ID NO: 2224878 - RNA, 19 nt, Artificial Sequence
  Description of Artificial Sequence: Synthetic oligonucleotide
  Sense strand starting at position 1066 of SEQ ID NO: 1883900
ucuggaacgcucgagaaau

SEQ ID NO: 2224879 - RNA, 19 nt, Artificial Sequence
  Description of Artificial Sequence: Synthetic oligonucleotide
  Antisense strand to SEQ ID NO: 2224878
auuucucgagcguuccaga

SEQ ID NO: 2224880 - RNA, 19 nt, Artificial Sequence
  Description of Artificial Sequence: Synthetic oligonucleotide
  Sense strand starting at position 2759 of SEQ ID NO: 1883900
cauugcugccucgggaaua

SEQ ID NO: 2224881 - RNA, 19 nt, Artificial Sequence
  Description of Artificial Sequence: Synthetic oligonucleotide
  Antisense strand to SEQ ID NO: 2224880
uauucccgaggcagcaaug

SEQ ID NO: 2224882 - RNA, 19 nt, Artificial Sequence
  Description of Artificial Sequence: Synthetic oligonucleotide
  Sense strand starting at position 2895 of SEQ ID NO: 1883900
cuccaucugggacgauauu

SEQ ID NO: 2224883 - RNA, 19 nt, Artificial Sequence
  Description of Artificial Sequence: Synthetic oligonucleotide
  Antisense strand to SEQ ID NO: 2224882
aauaucgucccagauggag

SEQ ID NO: 2224884 - RNA, 19 nt, Artificial Sequence
  Description of Artificial Sequence: Synthetic oligonucleotide
  Sense strand starting at position 2904 of SEQ ID NO: 1883900
ggacgauauucugccuuga

SEQ ID NO: 2224885 - RNA, 19 nt, Artificial Sequence
  Description of Artificial Sequence: Synthetic oligonucleotide
  Antisense strand to SEQ ID NO: 2224884
ucaaggcagaauaucgucc

SEQ ID NO: 2224886 - RNA, 19 nt, Artificial Sequence
  Description of Artificial Sequence: Synthetic oligonucleotide
  Sense strand starting at position 2906 of SEQ ID NO: 1883900
acgauauucugccuugaaa

SEQ ID NO: 2224887 - RNA, 19 nt, Artificial Sequence
  Description of Artificial Sequence: Synthetic oligonucleotide
  Antisense strand to SEQ ID NO: 2224886
uuucaaggcagaauaucgu

SEQ ID NO: 2224888 - RNA, 19 nt, Artificial Sequence
  Description of Artificial Sequence: Synthetic oligonucleotide
  Sense strand starting at position 3027 of SEQ ID NO: 1883900
ccaagauuggcuggcauau

SEQ ID NO: 2224889 - RNA, 19 nt, Artificial Sequence
  Description of Artificial Sequence: Synthetic oligonucleotide
  Antisense strand to SEQ ID NO: 2224888
auaugccagccaaucuugg

SEQ ID NO: 2224890 - RNA, 19 nt, Artificial Sequence
  Description of Artificial Sequence: Synthetic oligonucleotide
  Sense strand starting at position 3137 of SEQ ID NO: 1883900
agccauauauccucgaguu

SEQ ID NO: 2224891 - RNA, 19 nt, Artificial Sequence
  Description of Artificial Sequence: Synthetic oligonucleotide
  Antisense strand to SEQ ID NO: 2224890
aacucgaggauauauggcu

SEQ ID NO: 2224892 - RNA, 19 nt, Artificial Sequence
  Description of Artificial Sequence: Synthetic oligonucleotide
  Sense strand starting at position 3138 of SEQ ID NO: 1883900
gccauauauccucgaguua

SEQ ID NO: 2224893 - RNA, 19 nt, Artificial Sequence
  Description of Artificial Sequence: Synthetic oligonucleotide
  Antisense strand to SEQ ID NO: 2224892
uaacucgaggauauauggc

SEQ ID NO: 2224894 - RNA, 19 nt, Artificial Sequence
  Description of Artificial Sequence: Synthetic oligonucleotide
  Sense strand starting at position 3139 of SEQ ID NO: 1883900
ccauauauccucgaguuac

SEQ ID NO: 2224895 - RNA, 19 nt, Artificial Sequence
  Description of Artificial Sequence: Synthetic oligonucleotide
  Antisense strand to SEQ ID NO: 2224894
guaacucgaggauauaugg

SEQ ID NO: 2224896 - RNA, 19 nt, Artificial Sequence
  Description of Artificial Sequence: Synthetic oligonucleotide
  Sense strand starting at position 3261 of SEQ ID NO: 1883900
guuuguuguaacuacauag

SEQ ID NO: 2224897 - RNA, 19 nt, Artificial Sequence
  Description of Artificial Sequence: Synthetic oligonucleotide
  Antisense strand to SEQ ID NO: 2224896
cuauguaguuacaacaaac

SEQ ID NO: 2224898 - RNA, 19 nt, Artificial Sequence
  Description of Artificial Sequence: Synthetic oligonucleotide
  Sense strand starting at position 3397 of SEQ ID NO: 1883900
gcaacucagaaagguugaa

SEQ ID NO: 2224899 - RNA, 19 nt, Artificial Sequence
  Description of Artificial Sequence: Synthetic oligonucleotide
  Antisense strand to SEQ ID NO: 2224898
uucaaccuuucugaguugc

SEQ ID NO: 2224900 - RNA, 19 nt, Artificial Sequence
  Description of Artificial Sequence: Synthetic oligonucleotide
  Sense strand starting at position 3409 of SEQ ID NO: 1883900
gguugaaauauuggccaau

SEQ ID NO: 2224901 - RNA, 19 nt, Artificial Sequence
  Description of Artificial Sequence: Synthetic oligonucleotide
  Antisense strand to SEQ ID NO: 2224900
auuggccaauauuucaacc

SEQ ID NO: 2224902 - RNA, 19 nt, Artificial Sequence
  Description of Artificial Sequence: Synthetic oligonucleotide
  Sense strand starting at position 3410 of SEQ ID NO: 1883900
guugaaauauuggccaaug

SEQ ID NO: 2224903 - RNA, 19 nt, Artificial Sequence
  Description of Artificial Sequence: Synthetic oligonucleotide
  Antisense strand to SEQ ID NO: 2224902
cauuggccaauauuucaac

SEQ ID NO: 2224904 - RNA, 19 nt, Artificial Sequence
  Description of Artificial Sequence: Synthetic oligonucleotide
  Sense strand starting at position 3429 of SEQ ID NO: 1883900
gcagguuaggaguaaugaa

SEQ ID NO: 2224905 - RNA, 19 nt, Artificial Sequence
  Description of Artificial Sequence: Synthetic oligonucleotide
  Antisense strand to SEQ ID NO: 2224904
uucauuacuccuaaccugc

SEQ ID NO: 2224906 - RNA, 19 nt, Artificial Sequence
  Description of Artificial Sequence: Synthetic oligonucleotide
  Sense strand starting at position 3437 of SEQ ID NO: 1883900
ggaguaaugaacugagcuu

SEQ ID NO: 2224907 - RNA, 19 nt, Artificial Sequence
  Description of Artificial Sequence: Synthetic oligonucleotide
  Antisense strand to SEQ ID NO: 2224906
aagcucaguucauuacucc

SEQ ID NO: 2224908 - RNA, 19 nt, Artificial Sequence
  Description of Artificial Sequence: Synthetic oligonucleotide
  Sense strand starting at position 3494 of SEQ ID NO: 1883900
cuucuauuagcagaugcuu

SEQ ID NO: 2224909 - RNA, 19 nt, Artificial Sequence
  Description of Artificial Sequence: Synthetic oligonucleotide
  Antisense strand to SEQ ID NO: 2224908
aagcaucugcuaauagaag

SEQ ID NO: 2224910 - RNA, 19 nt, Artificial Sequence
  Description of Artificial Sequence: Synthetic oligonucleotide
  Sense strand starting at position 3514 of SEQ ID NO: 1883900
guucuuccuucggugaaua

SEQ ID NO: 2224911 - RNA, 19 nt, Artificial Sequence
  Description of Artificial Sequence: Synthetic oligonucleotide
  Antisense strand to SEQ ID NO: 2224910
uauucaccgaaggaagaac

SEQ ID NO: 2224912 - RNA, 19 nt, Artificial Sequence
  Description of Artificial Sequence: Synthetic oligonucleotide
  Sense strand starting at position 3515 of SEQ ID NO: 1883900
uucuuccuucggugaauaa

SEQ ID NO: 2224913 - RNA, 19 nt, Artificial Sequence
  Description of Artificial Sequence: Synthetic oligonucleotide
  Antisense strand to SEQ ID NO: 2224912
uuauucaccgaaggaagaa

SEQ ID NO: 2224914 - RNA, 19 nt, Artificial Sequence
  Description of Artificial Sequence: Synthetic oligonucleotide
  Sense strand starting at position 3516 of SEQ ID NO: 1883900
ucuuccuucggugaauaaa

SEQ ID NO: 2224915 - RNA, 19 nt, Artificial Sequence
  Description of Artificial Sequence: Synthetic oligonucleotide
  Antisense strand to SEQ ID NO: 2224914
uuuauucaccgaaggaaga

SEQ ID NO: 2224916 - RNA, 19 nt, Artificial Sequence
  Description of Artificial Sequence: Synthetic oligonucleotide
  Sense strand starting at position 3560 of SEQ ID NO: 1883900
auaccucagcagugacuua

SEQ ID NO: 2224917 - RNA, 19 nt, Artificial Sequence
  Description of Artificial Sequence: Synthetic oligonucleotide
  Antisense strand to SEQ ID NO: 2224916
uaagucacugcugagguau

SEQ ID NO: 2224918 - RNA, 19 nt, Artificial Sequence
  Description of Artificial Sequence: Synthetic oligonucleotide
  Sense strand starting at position 3851 of SEQ ID NO: 1883900
ggaagauccuguucuggau

SEQ ID NO: 2224919 - RNA, 19 nt, Artificial Sequence
  Description of Artificial Sequence: Synthetic oligonucleotide
  Antisense strand to SEQ ID NO: 2224918
auccagaacaggaucuucc

SEQ ID NO: 2224920 - RNA, 19 nt, Artificial Sequence
  Description of Artificial Sequence: Synthetic oligonucleotide
  Sense strand starting at position 3855 of SEQ ID NO: 1883900
gauccuguucuggaucaca

SEQ ID NO: 2224921 - RNA, 19 nt, Artificial Sequence
  Description of Artificial Sequence: Synthetic oligonucleotide
  Antisense strand to SEQ ID NO: 2224920
ugugauccagaacaggauc

SEQ ID NO: 2224922 - RNA, 19 nt, Artificial Sequence
  Description of Artificial Sequence: Synthetic oligonucleotide
  Sense strand starting at position 3903 of SEQ ID NO: 1883900
gaagaauucuuucuagugu

SEQ ID NO: 2224923 - RNA, 19 nt, Artificial Sequence
  Description of Artificial Sequence: Synthetic oligonucleotide
  Antisense strand to SEQ ID NO: 2224922
acacuagaaagaauucuuc

SEQ ID NO: 2224924 - RNA, 19 nt, Artificial Sequence
  Description of Artificial Sequence: Synthetic oligonucleotide
  Sense strand starting at position 2177 of SEQ ID NO: 1883901
agaggucucucauuguguu

SEQ ID NO: 2224925 - RNA, 19 nt, Artificial Sequence
  Description of Artificial Sequence: Synthetic oligonucleotide
  Antisense strand to SEQ ID NO: 2224924
aacacaaugagagaccucu

SEQ ID NO: 2224926 - RNA, 19 nt, Artificial Sequence
  Description of Artificial Sequence: Synthetic oligonucleotide
  Sense strand starting at position 2187 of SEQ ID NO: 1883901
cauuguguugcccagacaa

SEQ ID NO: 2224927 - RNA, 19 nt, Artificial Sequence
  Description of Artificial Sequence: Synthetic oligonucleotide
  Antisense strand to SEQ ID NO: 2224926
uugucugggcaacacaaug

SEQ ID NO: 2224928 - RNA, 19 nt, Artificial Sequence
  Description of Artificial Sequence: Synthetic oligonucleotide
  Sense strand starting at position 2189 of SEQ ID NO: 1883901
uuguguugcccagacaagu

SEQ ID NO: 2224929 - RNA, 19 nt, Artificial Sequence
  Description of Artificial Sequence: Synthetic oligonucleotide
  Antisense strand to SEQ ID NO: 2224928
acuugucugggcaacacaa

SEQ ID NO: 2224930 - RNA, 19 nt, Artificial Sequence
  Description of Artificial Sequence: Synthetic oligonucleotide
  Sense strand starting at position 2756 of SEQ ID NO: 1883901
cgagcucucuauucuguuu

SEQ ID NO: 2224931 - RNA, 19 nt, Artificial Sequence
  Description of Artificial Sequence: Synthetic oligonucleotide
  Antisense strand to SEQ ID NO: 2224930
aaacagaauagagagcucg

SEQ ID NO: 2224932 - RNA, 19 nt, Artificial Sequence
  Description of Artificial Sequence: Synthetic oligonucleotide
  Sense strand starting at position 3131 of SEQ ID NO: 1883901
agggauugcauaugauaug

SEQ ID NO: 2224933 - RNA, 19 nt, Artificial Sequence
  Description of Artificial Sequence: Synthetic oligonucleotide
  Antisense strand to SEQ ID NO: 2224932
cauaucauaugcaaucccu

SEQ ID NO: 2224934 - RNA, 19 nt, Artificial Sequence
  Description of Artificial Sequence: Synthetic oligonucleotide
  Sense strand starting at position 3132 of SEQ ID NO: 1883901
gggauugcauaugauaugu

SEQ ID NO: 2224935 - RNA, 19 nt, Artificial Sequence
  Description of Artificial Sequence: Synthetic oligonucleotide
  Antisense strand to SEQ ID NO: 2224934
acauaucauaugcaauccc

SEQ ID NO: 2224936 - RNA, 19 nt, Artificial Sequence
  Description of Artificial Sequence: Synthetic oligonucleotide
  Sense strand starting at position 3134 of SEQ ID NO: 1883901
gauugcauaugauauguua

SEQ ID NO: 2224937 - RNA, 19 nt, Artificial Sequence
  Description of Artificial Sequence: Synthetic oligonucleotide
  Antisense strand to SEQ ID NO: 2224936
uaacauaucauaugcaauc

SEQ ID NO: 2224938 - RNA, 19 nt, Artificial Sequence
  Description of Artificial Sequence: Synthetic oligonucleotide
  Sense strand starting at position 3137 of SEQ ID NO: 1883901
ugcauaugauauguuacau

SEQ ID NO: 2224939 - RNA, 19 nt, Artificial Sequence
  Description of Artificial Sequence: Synthetic oligonucleotide
  Antisense strand to SEQ ID NO: 2224938
auguaacauaucauaugca

SEQ ID NO: 2224940 - RNA, 19 nt, Artificial Sequence
  Description of Artificial Sequence: Synthetic oligonucleotide
  Sense strand starting at position 3294 of SEQ ID NO: 1883901
uuauucuugugucacuauu

SEQ ID NO: 2224941 - RNA, 19 nt, Artificial Sequence
  Description of Artificial Sequence: Synthetic oligonucleotide
  Antisense strand to SEQ ID NO: 2224940
aauagugacacaagaauaa

SEQ ID NO: 2224942 - RNA, 19 nt, Artificial Sequence
  Description of Artificial Sequence: Synthetic oligonucleotide
  Sense strand starting at position 3296 of SEQ ID NO: 1883901
auucuugugucacuauuaa

SEQ ID NO: 2224943 - RNA, 19 nt, Artificial Sequence
  Description of Artificial Sequence: Synthetic oligonucleotide
  Antisense strand to SEQ ID NO: 2224942
uuaauagugacacaagaau

SEQ ID NO: 2224944 - RNA, 19 nt, Artificial Sequence
  Description of Artificial Sequence: Synthetic oligonucleotide
  Sense strand starting at position 3300 of SEQ ID NO: 1883901
uugugucacuauuaaugau

SEQ ID NO: 2224945 - RNA, 19 nt, Artificial Sequence
  Description of Artificial Sequence: Synthetic oligonucleotide
  Antisense strand to SEQ ID NO: 2224944
aucauuaauagugacacaa

SEQ ID NO: 2224946 - RNA, 19 nt, Artificial Sequence
  Description of Artificial Sequence: Synthetic oligonucleotide
  Sense strand starting at position 3481 of SEQ ID NO: 1883901
augcauaaucaugguauau

SEQ ID NO: 2224947 - RNA, 19 nt, Artificial Sequence
  Description of Artificial Sequence: Synthetic oligonucleotide
  Antisense strand to SEQ ID NO: 2224946
auauaccaugauuaugcau

SEQ ID NO: 2224948 - RNA, 19 nt, Artificial Sequence
  Description of Artificial Sequence: Synthetic oligonucleotide
  Sense strand starting at position 41 of SEQ ID NO: 1883902
ggaugcuuggguuacuuaa

SEQ ID NO: 2224949 - RNA, 19 nt, Artificial Sequence
  Description of Artificial Sequence: Synthetic oligonucleotide
  Antisense strand to SEQ ID NO: 2224948
uuaaguaacccaagcaucc

SEQ ID NO: 2224950 - RNA, 19 nt, Artificial Sequence
  Description of Artificial Sequence: Synthetic oligonucleotide
  Sense strand starting at position 281 of SEQ ID NO: 1883902
uaguuucugcuggacagaa

SEQ ID NO: 2224951 - RNA, 19 nt, Artificial Sequence
  Description of Artificial Sequence: Synthetic oligonucleotide
  Antisense strand to SEQ ID NO: 2224950
uucuguccagcagaaacua

SEQ ID NO: 2224952 - RNA, 19 nt, Artificial Sequence
  Description of Artificial Sequence: Synthetic oligonucleotide
  Sense strand starting at position 348 of SEQ ID NO: 1883902
agugacagccucuguauuu

SEQ ID NO: 2224953 - RNA, 19 nt, Artificial Sequence
  Description of Artificial Sequence: Synthetic oligonucleotide
  Antisense strand to SEQ ID NO: 2224952
aaauacagaggcugucacu

SEQ ID NO: 2224954 - RNA, 19 nt, Artificial Sequence
  Description of Artificial Sequence: Synthetic oligonucleotide
  Sense strand starting at position 632 of SEQ ID NO: 1883902
auguucuugaaaugguuga

SEQ ID NO: 2224955 - RNA, 19 nt, Artificial Sequence
  Description of Artificial Sequence: Synthetic oligonucleotide
  Antisense strand to SEQ ID NO: 2224954
ucaaccauuucaagaacau

SEQ ID NO: 2224956 - RNA, 19 nt, Artificial Sequence
  Description of Artificial Sequence: Synthetic oligonucleotide
  Sense strand starting at position 633 of SEQ ID NO: 1883902
uguucuugaaaugguugaa

SEQ ID NO: 2224957 - RNA, 19 nt, Artificial Sequence
  Description of Artificial Sequence: Synthetic oligonucleotide
  Antisense strand to SEQ ID NO: 2224956
uucaaccauuucaagaaca

SEQ ID NO: 2224958 - RNA, 19 nt, Artificial Sequence
  Description of Artificial Sequence: Synthetic oligonucleotide
  Sense strand starting at position 636 of SEQ ID NO: 1883902
ucuugaaaugguugaacac

SEQ ID NO: 2224959 - RNA, 19 nt, Artificial Sequence
  Description of Artificial Sequence: Synthetic oligonucleotide
  Antisense strand to SEQ ID NO: 2224958
guguucaaccauuucaaga

SEQ ID NO: 2224960 - RNA, 19 nt, Artificial Sequence
  Description of Artificial Sequence: Synthetic oligonucleotide
  Sense strand starting at position 673 of SEQ ID NO: 1883902
aucccagaucauugaugca

SEQ ID NO: 2224961 - RNA, 19 nt, Artificial Sequence
  Description of Artificial Sequence: Synthetic oligonucleotide
  Antisense strand to SEQ ID NO: 2224960
ugcaucaaugaucugggau

SEQ ID NO: 2224962 - RNA, 19 nt, Artificial Sequence
  Description of Artificial Sequence: Synthetic oligonucleotide
  Sense strand starting at position 724 of SEQ ID NO: 1883902
gcauaagaccuguauucua

SEQ ID NO: 2224963 - RNA, 19 nt, Artificial Sequence
  Description of Artificial Sequence: Synthetic oligonucleotide
  Antisense strand to SEQ ID NO: 2224962
uagaauacaggucuuaugc

SEQ ID NO: 2224964 - RNA, 19 nt, Artificial Sequence
  Description of Artificial Sequence: Synthetic oligonucleotide
  Sense strand starting at position 881 of SEQ ID NO: 1883902
ucuaauauguagucagaau

SEQ ID NO: 2224965 - RNA, 19 nt, Artificial Sequence
  Description of Artificial Sequence: Synthetic oligonucleotide
  Antisense strand to SEQ ID NO: 2224964
auucugacuacauauuaga

SEQ ID NO: 2224966 - RNA, 19 nt, Artificial Sequence
  Description of Artificial Sequence: Synthetic oligonucleotide
  Sense strand starting at position 1173 of SEQ ID NO: 1883902
ccaugaugccauuacaaug

SEQ ID NO: 2224967 - RNA, 19 nt, Artificial Sequence
  Description of Artificial Sequence: Synthetic oligonucleotide
  Antisense strand to SEQ ID NO: 2224966
cauuguaauggcaucaugg

SEQ ID NO: 2224968 - RNA, 19 nt, Artificial Sequence
  Description of Artificial Sequence: Synthetic oligonucleotide
  Sense strand starting at position 1178 of SEQ ID NO: 1883902
augccauuacaaugagaca

SEQ ID NO: 2224969 - RNA, 19 nt, Artificial Sequence
  Description of Artificial Sequence: Synthetic oligonucleotide
  Antisense strand to SEQ ID NO: 2224968
ugucucauuguaauggcau

SEQ ID NO: 2224970 - RNA, 19 nt, Artificial Sequence
  Description of Artificial Sequence: Synthetic oligonucleotide
  Sense strand starting at position 1289 of SEQ ID NO: 1883902
uugagaggcuuguuaugga

SEQ ID NO: 2224971 - RNA, 19 nt, Artificial Sequence
  Description of Artificial Sequence: Synthetic oligonucleotide
  Antisense strand to SEQ ID NO: 2224970
uccauaacaagccucucaa

SEQ ID NO: 2224972 - RNA, 19 nt, Artificial Sequence
  Description of Artificial Sequence: Synthetic oligonucleotide
  Sense strand starting at position 1578 of SEQ ID NO: 1883902
agcuuuacacuuuauugua

SEQ ID NO: 2224973 - RNA, 19 nt, Artificial Sequence
  Description of Artificial Sequence: Synthetic oligonucleotide
  Antisense strand to SEQ ID NO: 2224972
uacaauaaaguguaaagcu

SEQ ID NO: 2224974 - RNA, 19 nt, Artificial Sequence
  Description of Artificial Sequence: Synthetic oligonucleotide
  Sense strand starting at position 1698 of SEQ ID NO: 1883902
aguccacuucccuauagua

SEQ ID NO: 2224975 - RNA, 19 nt, Artificial Sequence
  Description of Artificial Sequence: Synthetic oligonucleotide
  Antisense strand to SEQ ID NO: 2224974
uacuauagggaaguggacu

SEQ ID NO: 2224976 - RNA, 19 nt, Artificial Sequence
  Description of Artificial Sequence: Synthetic oligonucleotide
  Sense strand starting at position 1895 of SEQ ID NO: 1883902
uuguaagagacacgaauaa

SEQ ID NO: 2224977 - RNA, 19 nt, Artificial Sequence
  Description of Artificial Sequence: Synthetic oligonucleotide
  Antisense strand to SEQ ID NO: 2224976
uuauucgugucucuuacaa

SEQ ID NO: 2224978 - RNA, 19 nt, Artificial Sequence
  Description of Artificial Sequence: Synthetic oligonucleotide
  Sense strand starting at position 1907 of SEQ ID NO: 1883902
cgaauaacuguccaguggu

SEQ ID NO: 2224979 - RNA, 19 nt, Artificial Sequence
  Description of Artificial Sequence: Synthetic oligonucleotide
  Antisense strand to SEQ ID NO: 2224978
accacuggacaguuauucg

SEQ ID NO: 2224980 - RNA, 19 nt, Artificial Sequence
  Description of Artificial Sequence: Synthetic oligonucleotide
  Sense strand starting at position 2094 of SEQ ID NO: 1883902
auaaucaugugaucuggau

SEQ ID NO: 2224981 - RNA, 19 nt, Artificial Sequence
  Description of Artificial Sequence: Synthetic oligonucleotide
  Antisense strand to SEQ ID NO: 2224980
auccagaucacaugauuau

SEQ ID NO: 2224982 - RNA, 19 nt, Artificial Sequence
  Description of Artificial Sequence: Synthetic oligonucleotide
  Sense strand starting at position 2125 of SEQ ID NO: 1883902
uggugauuacuccacuuug

SEQ ID NO: 2224983 - RNA, 19 nt, Artificial Sequence
  Description of Artificial Sequence: Synthetic oligonucleotide
  Antisense strand to SEQ ID NO: 2224982
caaaguggaguaaucacca

SEQ ID NO: 2224984 - RNA, 19 nt, Artificial Sequence
  Description of Artificial Sequence: Synthetic oligonucleotide
  Sense strand starting at position 2134 of SEQ ID NO: 1883902
cuccacuuuguguaaacuu

SEQ ID NO: 2224985 - RNA, 19 nt, Artificial Sequence
  Description of Artificial Sequence: Synthetic oligonucleotide
  Antisense strand to SEQ ID NO: 2224984
aaguuuacacaaaguggag

SEQ ID NO: 2224986 - RNA, 19 nt, Artificial Sequence
  Description of Artificial Sequence: Synthetic oligonucleotide
  Sense strand starting at position 2163 of SEQ ID NO: 1883902
accuauugggcaggcaaau

SEQ ID NO: 2224987 - RNA, 19 nt, Artificial Sequence
  Description of Artificial Sequence: Synthetic oligonucleotide
  Antisense strand to SEQ ID NO: 2224986
auuugccugcccaauaggu

SEQ ID NO: 2224988 - RNA, 19 nt, Artificial Sequence
  Description of Artificial Sequence: Synthetic oligonucleotide
  Sense strand starting at position 2297 of SEQ ID NO: 1883902
augcuauaacugggaacuu

SEQ ID NO: 2224989 - RNA, 19 nt, Artificial Sequence
  Description of Artificial Sequence: Synthetic oligonucleotide
  Antisense strand to SEQ ID NO: 2224988
aaguucccaguuauagcau

SEQ ID NO: 2224990 - RNA, 19 nt, Artificial Sequence
  Description of Artificial Sequence: Synthetic oligonucleotide
  Sense strand starting at position 2308 of SEQ ID NO: 1883902
gggaacuuccugggcucaa

SEQ ID NO: 2224991 - RNA, 19 nt, Artificial Sequence
  Description of Artificial Sequence: Synthetic oligonucleotide
  Antisense strand to SEQ ID NO: 2224990
uugagcccaggaaguuccc

SEQ ID NO: 2224992 - RNA, 19 nt, Artificial Sequence
  Description of Artificial Sequence: Synthetic oligonucleotide
  Sense strand starting at position 2387 of SEQ ID NO: 1883902
uaaaguuauggauaagcuu

SEQ ID NO: 2224993 - RNA, 19 nt, Artificial Sequence
  Description of Artificial Sequence: Synthetic oligonucleotide
  Antisense strand to SEQ ID NO: 2224992
aagcuuauccauaacuuua

SEQ ID NO: 2224994 - RNA, 19 nt, Artificial Sequence
  Description of Artificial Sequence: Synthetic oligonucleotide
  Sense strand starting at position 2515 of SEQ ID NO: 1883902
guaacaguuuacucagaga

SEQ ID NO: 2224995 - RNA, 19 nt, Artificial Sequence
  Description of Artificial Sequence: Synthetic oligonucleotide
  Antisense strand to SEQ ID NO: 2224994
ucucugaguaaacuguuac

SEQ ID NO: 2224996 - RNA, 19 nt, Artificial Sequence
  Description of Artificial Sequence: Synthetic oligonucleotide
  Sense strand starting at position 2625 of SEQ ID NO: 1883902
ggagaugaacucuaucguc

SEQ ID NO: 2224997 - RNA, 19 nt, Artificial Sequence
  Description of Artificial Sequence: Synthetic oligonucleotide
  Antisense strand to SEQ ID NO: 2224996
gacgauagaguucaucucc

SEQ ID NO: 2224998 - RNA, 19 nt, Artificial Sequence
  Description of Artificial Sequence: Synthetic oligonucleotide
  Sense strand starting at position 2630 of SEQ ID NO: 1883902
ugaacucuaucgucagaug

SEQ ID NO: 2224999 - RNA, 19 nt, Artificial Sequence
  Description of Artificial Sequence: Synthetic oligonucleotide
  Antisense strand to SEQ ID NO: 2224998
caucugacgauagaguuca

SEQ ID NO: 2225000 - RNA, 19 nt, Artificial Sequence
  Description of Artificial Sequence: Synthetic oligonucleotide
  Sense strand starting at position 2631 of SEQ ID NO: 1883902
gaacucuaucgucagaugu

SEQ ID NO: 2225001 - RNA, 19 nt, Artificial Sequence
  Description of Artificial Sequence: Synthetic oligonucleotide
  Antisense strand to SEQ ID NO: 2225000
acaucugacgauagaguuc

SEQ ID NO: 2225002 - RNA, 19 nt, Artificial Sequence
  Description of Artificial Sequence: Synthetic oligonucleotide
  Sense strand starting at position 2656 of SEQ ID NO: 1883902
uccuuauugccugauagag

SEQ ID NO: 2225003 - RNA, 19 nt, Artificial Sequence
  Description of Artificial Sequence: Synthetic oligonucleotide
  Antisense strand to SEQ ID NO: 2225002
cucuaucaggcaauaagga

SEQ ID NO: 2225004 - RNA, 19 nt, Artificial Sequence
  Description of Artificial Sequence: Synthetic oligonucleotide
  Sense strand starting at position 2664 of SEQ ID NO: 1883902
gccugauagagucaggagu

SEQ ID NO: 2225005 - RNA, 19 nt, Artificial Sequence
  Description of Artificial Sequence: Synthetic oligonucleotide
  Antisense strand to SEQ ID NO: 2225004
acuccugacucuaucaggc

SEQ ID NO: 2225006 - RNA, 19 nt, Artificial Sequence
  Description of Artificial Sequence: Synthetic oligonucleotide
  Sense strand starting at position 2890 of SEQ ID NO: 1883902
aggccaucucaaggucaga

SEQ ID NO: 2225007 - RNA, 19 nt, Artificial Sequence
  Description of Artificial Sequence: Synthetic oligonucleotide
  Antisense strand to SEQ ID NO: 2225006
ucugaccuugagauggccu

SEQ ID NO: 2225008 - RNA, 19 nt, Artificial Sequence
  Description of Artificial Sequence: Synthetic oligonucleotide
  Sense strand starting at position 3028 of SEQ ID NO: 1883902
uuuaccuguuguuuaaaga

SEQ ID NO: 2225009 - RNA, 19 nt, Artificial Sequence
  Description of Artificial Sequence: Synthetic oligonucleotide
  Antisense strand to SEQ ID NO: 2225008
ucuuuaaacaacagguaaa

SEQ ID NO: 2225010 - RNA, 19 nt, Artificial Sequence
  Description of Artificial Sequence: Synthetic oligonucleotide
  Sense strand starting at position 3170 of SEQ ID NO: 1883902
uccaacauuuaucaaggga

SEQ ID NO: 2225011 - RNA, 19 nt, Artificial Sequence
  Description of Artificial Sequence: Synthetic oligonucleotide
  Antisense strand to SEQ ID NO: 2225010
ucccuugauaaauguugga

SEQ ID NO: 2225012 - RNA, 19 nt, Artificial Sequence
  Description of Artificial Sequence: Synthetic oligonucleotide
  Sense strand starting at position 3195 of SEQ ID NO: 1883902
cuucuccugggucagaaua

SEQ ID NO: 2225013 - RNA, 19 nt, Artificial Sequence
  Description of Artificial Sequence: Synthetic oligonucleotide
  Antisense strand to SEQ ID NO: 2225012
uauucugacccaggagaag

SEQ ID NO: 2225014 - RNA, 19 nt, Artificial Sequence
  Description of Artificial Sequence: Synthetic oligonucleotide
  Sense strand starting at position 3263 of SEQ ID NO: 1883902
ccaagaucuggcugaagac

SEQ ID NO: 2225015 - RNA, 19 nt, Artificial Sequence
  Description of Artificial Sequence: Synthetic oligonucleotide
  Antisense strand to SEQ ID NO: 2225014
gucuucagccagaucuugg

SEQ ID NO: 2225016 - RNA, 19 nt, Artificial Sequence
  Description of Artificial Sequence: Synthetic oligonucleotide
  Sense strand starting at position 3432 of SEQ ID NO: 1883902
guggaaaccguggauggau

SEQ ID NO: 2225017 - RNA, 19 nt, Artificial Sequence
  Description of Artificial Sequence: Synthetic oligonucleotide
  Antisense strand to SEQ ID NO: 2225016
auccauccacgguuuccac

SEQ ID NO: 2225018 - RNA, 19 nt, Artificial Sequence
  Description of Artificial Sequence: Synthetic oligonucleotide
  Sense strand starting at position 3501 of SEQ ID NO: 1883902
ccagguaaccuugauuauu

SEQ ID NO: 2225019 - RNA, 19 nt, Artificial Sequence
  Description of Artificial Sequence: Synthetic oligonucleotide
  Antisense strand to SEQ ID NO: 2225018
aauaaucaagguuaccugg

SEQ ID NO: 2225020 - RNA, 19 nt, Artificial Sequence
  Description of Artificial Sequence: Synthetic oligonucleotide
  Sense strand starting at position 3533 of SEQ ID NO: 1883902
gccuaugaauuucugguuu

SEQ ID NO: 2225021 - RNA, 19 nt, Artificial Sequence
  Description of Artificial Sequence: Synthetic oligonucleotide
  Antisense strand to SEQ ID NO: 2225020
aaaccagaaauucauaggc

SEQ ID NO: 2225022 - RNA, 19 nt, Artificial Sequence
  Description of Artificial Sequence: Synthetic oligonucleotide
  Sense strand starting at position 3545 of SEQ ID NO: 1883902
cugguuugaccagauguuu

SEQ ID NO: 2225023 - RNA, 19 nt, Artificial Sequence
  Description of Artificial Sequence: Synthetic oligonucleotide
  Antisense strand to SEQ ID NO: 2225022
aaacaucuggucaaaccag

SEQ ID NO: 2225024 - RNA, 19 nt, Artificial Sequence
  Description of Artificial Sequence: Synthetic oligonucleotide
  Sense strand starting at position 3559 of SEQ ID NO: 1883902
uguuuaggagcagaaucuu

SEQ ID NO: 2225025 - RNA, 19 nt, Artificial Sequence
  Description of Artificial Sequence: Synthetic oligonucleotide
  Antisense strand to SEQ ID NO: 2225024
aagauucugcuccuaaaca

SEQ ID NO: 2225026 - RNA, 19 nt, Artificial Sequence
  Description of Artificial Sequence: Synthetic oligonucleotide
  Sense strand starting at position 3648 of SEQ ID NO: 1883902
gacaauguugcaugagaaa

SEQ ID NO: 2225027 - RNA, 19 nt, Artificial Sequence
  Description of Artificial Sequence: Synthetic oligonucleotide
  Antisense strand to SEQ ID NO: 2225026
uuucucaugcaacauuguc

SEQ ID NO: 2225028 - RNA, 19 nt, Artificial Sequence
  Description of Artificial Sequence: Synthetic oligonucleotide
  Sense strand starting at position 203 of SEQ ID NO: 1883903
guagaaacugcuuaacccu

SEQ ID NO: 2225029 - RNA, 19 nt, Artificial Sequence
  Description of Artificial Sequence: Synthetic oligonucleotide
  Antisense strand to SEQ ID NO: 2225028
aggguuaagcaguuucuac

SEQ ID NO: 2225030 - RNA, 19 nt, Artificial Sequence
  Description of Artificial Sequence: Synthetic oligonucleotide
  Sense strand starting at position 232 of SEQ ID NO: 1883903
auuuaucucuguuaugcua

SEQ ID NO: 2225031 - RNA, 19 nt, Artificial Sequence
  Description of Artificial Sequence: Synthetic oligonucleotide
  Antisense strand to SEQ ID NO: 2225030
uagcauaacagagauaaau

SEQ ID NO: 2225032 - RNA, 19 nt, Artificial Sequence
  Description of Artificial Sequence: Synthetic oligonucleotide
  Sense strand starting at position 317 of SEQ ID NO: 1883903
gugucaacaucagcaguau

SEQ ID NO: 2225033 - RNA, 19 nt, Artificial Sequence
  Description of Artificial Sequence: Synthetic oligonucleotide
  Antisense strand to SEQ ID NO: 2225032
auacugcugauguugacac

SEQ ID NO: 2225034 - RNA, 19 nt, Artificial Sequence
  Description of Artificial Sequence: Synthetic oligonucleotide
  Sense strand starting at position 527 of SEQ ID NO: 1883903
ugaagugguuuccuaacuu

SEQ ID NO: 2225035 - RNA, 19 nt, Artificial Sequence
  Description of Artificial Sequence: Synthetic oligonucleotide
  Antisense strand to SEQ ID NO: 2225034
aaguuaggaaaccacuuca

SEQ ID NO: 2225036 - RNA, 19 nt, Artificial Sequence
  Description of Artificial Sequence: Synthetic oligonucleotide
  Sense strand starting at position 1041 of SEQ ID NO: 1883903
guaugugugagacaugacu

SEQ ID NO: 2225037 - RNA, 19 nt, Artificial Sequence
  Description of Artificial Sequence: Synthetic oligonucleotide
  Antisense strand to SEQ ID NO: 2225036
agucaugucucacacauac

SEQ ID NO: 2225038 - RNA, 19 nt, Artificial Sequence
  Description of Artificial Sequence: Synthetic oligonucleotide
  Sense strand starting at position 1047 of SEQ ID NO: 1883903
gugagacaugacuaguucu

SEQ ID NO: 2225039 - RNA, 19 nt, Artificial Sequence
  Description of Artificial Sequence: Synthetic oligonucleotide
  Antisense strand to SEQ ID NO: 2225038
agaacuagucaugucucac

SEQ ID NO: 2225040 - RNA, 19 nt, Artificial Sequence
  Description of Artificial Sequence: Synthetic oligonucleotide
  Sense strand starting at position 1050 of SEQ ID NO: 1883903
agacaugacuaguucuaga

SEQ ID NO: 2225041 - RNA, 19 nt, Artificial Sequence
  Description of Artificial Sequence: Synthetic oligonucleotide
  Antisense strand to SEQ ID NO: 2225040
ucuagaacuagucaugucu

SEQ ID NO: 2225042 - RNA, 19 nt, Artificial Sequence
  Description of Artificial Sequence: Synthetic oligonucleotide
  Sense strand starting at position 1053 of SEQ ID NO: 1883903
caugacuaguucuagauga

SEQ ID NO: 2225043 - RNA, 19 nt, Artificial Sequence
  Description of Artificial Sequence: Synthetic oligonucleotide
  Antisense strand to SEQ ID NO: 2225042
ucaucuagaacuagucaug

SEQ ID NO: 2225044 - RNA, 19 nt, Artificial Sequence
  Description of Artificial Sequence: Synthetic oligonucleotide
  Sense strand starting at position 1063 of SEQ ID NO: 1883903
ucuagaugaugccuggaga

SEQ ID NO: 2225045 - RNA, 19 nt, Artificial Sequence
  Description of Artificial Sequence: Synthetic oligonucleotide
  Antisense strand to SEQ ID NO: 2225044
ucuccaggcaucaucuaga

SEQ ID NO: 2225046 - RNA, 19 nt, Artificial Sequence
  Description of Artificial Sequence: Synthetic oligonucleotide
  Sense strand starting at position 1138 of SEQ ID NO: 1883903
gccaauaaauugguaauca

SEQ ID NO: 2225047 - RNA, 19 nt, Artificial Sequence
  Description of Artificial Sequence: Synthetic oligonucleotide
  Antisense strand to SEQ ID NO: 2225046
ugauuaccaauuuauuggc

SEQ ID NO: 2225048 - RNA, 19 nt, Artificial Sequence
  Description of Artificial Sequence: Synthetic oligonucleotide
  Sense strand starting at position 1146 of SEQ ID NO: 1883903
auugguaaucacugaauua

SEQ ID NO: 2225049 - RNA, 19 nt, Artificial Sequence
  Description of Artificial Sequence: Synthetic oligonucleotide
  Antisense strand to SEQ ID NO: 2225048
uaauucagugauuaccaau

SEQ ID NO: 2225050 - RNA, 19 nt, Artificial Sequence
  Description of Artificial Sequence: Synthetic oligonucleotide
  Sense strand starting at position 1199 of SEQ ID NO: 1883903
cugacagcuugauuggaaa

SEQ ID NO: 2225051 - RNA, 19 nt, Artificial Sequence
  Description of Artificial Sequence: Synthetic oligonucleotide
  Antisense strand to SEQ ID NO: 2225050
uuuccaaucaagcugucag

SEQ ID NO: 2225052 - RNA, 19 nt, Artificial Sequence
  Description of Artificial Sequence: Synthetic oligonucleotide
  Sense strand starting at position 1266 of SEQ ID NO: 1883903
ccguuuaguaaauguuugu

SEQ ID NO: 2225053 - RNA, 19 nt, Artificial Sequence
  Description of Artificial Sequence: Synthetic oligonucleotide
  Antisense strand to SEQ ID NO: 2225052
acaaacauuuacuaaacgg

SEQ ID NO: 2225054 - RNA, 19 nt, Artificial Sequence
  Description of Artificial Sequence: Synthetic oligonucleotide
  Sense strand starting at position 1270 of SEQ ID NO: 1883903
uuaguaaauguuugugucu

SEQ ID NO: 2225055 - RNA, 19 nt, Artificial Sequence
  Description of Artificial Sequence: Synthetic oligonucleotide
  Antisense strand to SEQ ID NO: 2225054
agacacaaacauuuacuaa

SEQ ID NO: 2225056 - RNA, 19 nt, Artificial Sequence
  Description of Artificial Sequence: Synthetic oligonucleotide
  Sense strand starting at position 1310 of SEQ ID NO: 1883903
gugccaguaaauggauaua

SEQ ID NO: 2225057 - RNA, 19 nt, Artificial Sequence
  Description of Artificial Sequence: Synthetic oligonucleotide
  Antisense strand to SEQ ID NO: 2225056
uauauccauuuacuggcac

SEQ ID NO: 2225058 - RNA, 19 nt, Artificial Sequence
  Description of Artificial Sequence: Synthetic oligonucleotide
  Sense strand starting at position 1321 of SEQ ID NO: 1883903
uggauauagcuaugaucug

SEQ ID NO: 2225059 - RNA, 19 nt, Artificial Sequence
  Description of Artificial Sequence: Synthetic oligonucleotide
  Antisense strand to SEQ ID NO: 2225058
cagaucauagcuauaucca

SEQ ID NO: 2225060 - RNA, 19 nt, Artificial Sequence
  Description of Artificial Sequence: Synthetic oligonucleotide
  Sense strand starting at position 1322 of SEQ ID NO: 1883903
ggauauagcuaugaucuga

SEQ ID NO: 2225061 - RNA, 19 nt, Artificial Sequence
  Description of Artificial Sequence: Synthetic oligonucleotide
  Antisense strand to SEQ ID NO: 2225060
ucagaucauagcuauaucc

SEQ ID NO: 2225062 - RNA, 19 nt, Artificial Sequence
  Description of Artificial Sequence: Synthetic oligonucleotide
  Sense strand starting at position 1333 of SEQ ID NO: 1883903
ugaucugacuugcagagga

SEQ ID NO: 2225063 - RNA, 19 nt, Artificial Sequence
  Description of Artificial Sequence: Synthetic oligonucleotide
  Antisense strand to SEQ ID NO: 2225062
uccucugcaagucagauca

SEQ ID NO: 2225064 - RNA, 19 nt, Artificial Sequence
  Description of Artificial Sequence: Synthetic oligonucleotide
  Sense strand starting at position 1337 of SEQ ID NO: 1883903
cugacuugcagaggaaauc

SEQ ID NO: 2225065 - RNA, 19 nt, Artificial Sequence
  Description of Artificial Sequence: Synthetic oligonucleotide
  Antisense strand to SEQ ID NO: 2225064
gauuuccucugcaagucag

SEQ ID NO: 2225066 - RNA, 19 nt, Artificial Sequence
  Description of Artificial Sequence: Synthetic oligonucleotide
  Sense strand starting at position 1434 of SEQ ID NO: 1883903
gucagaggcuucccacaga

SEQ ID NO: 2225067 - RNA, 19 nt, Artificial Sequence
  Description of Artificial Sequence: Synthetic oligonucleotide
  Antisense strand to SEQ ID NO: 2225066
ucugugggaagccucugac

SEQ ID NO: 2225068 - RNA, 19 nt, Artificial Sequence
  Description of Artificial Sequence: Synthetic oligonucleotide
  Sense strand starting at position 1551 of SEQ ID NO: 1883903
accgaacagcugugugauu

SEQ ID NO: 2225069 - RNA, 19 nt, Artificial Sequence
  Description of Artificial Sequence: Synthetic oligonucleotide
  Antisense strand to SEQ ID NO: 2225068
aaucacacagcuguucggu

SEQ ID NO: 2225070 - RNA, 19 nt, Artificial Sequence
  Description of Artificial Sequence: Synthetic oligonucleotide
  Sense strand starting at position 1552 of SEQ ID NO: 1883903
ccgaacagcugugugauuu

SEQ ID NO: 2225071 - RNA, 19 nt, Artificial Sequence
  Description of Artificial Sequence: Synthetic oligonucleotide
  Antisense strand to SEQ ID NO: 2225070
aaaucacacagcuguucgg

SEQ ID NO: 2225072 - RNA, 19 nt, Artificial Sequence
  Description of Artificial Sequence: Synthetic oligonucleotide
  Sense strand starting at position 1563 of SEQ ID NO: 1883903
ugugauuuccgagguuaug

SEQ ID NO: 2225073 - RNA, 19 nt, Artificial Sequence
  Description of Artificial Sequence: Synthetic oligonucleotide
  Antisense strand to SEQ ID NO: 2225072
cauaaccucggaaaucaca

SEQ ID NO: 2225074 - RNA, 19 nt, Artificial Sequence
  Description of Artificial Sequence: Synthetic oligonucleotide
  Sense strand starting at position 1573 of SEQ ID NO: 1883903
gagguuauguugcuucucu

SEQ ID NO: 2225075 - RNA, 19 nt, Artificial Sequence
  Description of Artificial Sequence: Synthetic oligonucleotide
  Antisense strand to SEQ ID NO: 2225074
agagaagcaacauaaccuc

SEQ ID NO: 2225076 - RNA, 19 nt, Artificial Sequence
  Description of Artificial Sequence: Synthetic oligonucleotide
  Sense strand starting at position 1574 of SEQ ID NO: 1883903
agguuauguugcuucucua

SEQ ID NO: 2225077 - RNA, 19 nt, Artificial Sequence
  Description of Artificial Sequence: Synthetic oligonucleotide
  Antisense strand to SEQ ID NO: 2225076
uagagaagcaacauaaccu

SEQ ID NO: 2225078 - RNA, 19 nt, Artificial Sequence
  Description of Artificial Sequence: Synthetic oligonucleotide
  Sense strand starting at position 1577 of SEQ ID NO: 1883903
uuauguugcuucucuacua

SEQ ID NO: 2225079 - RNA, 19 nt, Artificial Sequence
  Description of Artificial Sequence: Synthetic oligonucleotide
  Antisense strand to SEQ ID NO: 2225078
uaguagagaagcaacauaa

SEQ ID NO: 2225080 - RNA, 19 nt, Artificial Sequence
  Description of Artificial Sequence: Synthetic oligonucleotide
  Sense strand starting at position 2145 of SEQ ID NO: 1883903
guccguaucccucccgauu

SEQ ID NO: 2225081 - RNA, 19 nt, Artificial Sequence
  Description of Artificial Sequence: Synthetic oligonucleotide
  Antisense strand to SEQ ID NO: 2225080
aaucgggagggauacggac

SEQ ID NO: 2225082 - RNA, 19 nt, Artificial Sequence
  Description of Artificial Sequence: Synthetic oligonucleotide
  Sense strand starting at position 2485 of SEQ ID NO: 1883903
gguguucugacauaugagc

SEQ ID NO: 2225083 - RNA, 19 nt, Artificial Sequence
  Description of Artificial Sequence: Synthetic oligonucleotide
  Antisense strand to SEQ ID NO: 2225082
gcucauaugucagaacacc

SEQ ID NO: 2225084 - RNA, 19 nt, Artificial Sequence
  Description of Artificial Sequence: Synthetic oligonucleotide
  Sense strand starting at position 2519 of SEQ ID NO: 1883903
uggacauagcuugggugua

SEQ ID NO: 2225085 - RNA, 19 nt, Artificial Sequence
  Description of Artificial Sequence: Synthetic oligonucleotide
  Antisense strand to SEQ ID NO: 2225084
uacacccaagcuaugucca

SEQ ID NO: 2225086 - RNA, 19 nt, Artificial Sequence
  Description of Artificial Sequence: Synthetic oligonucleotide
  Sense strand starting at position 2521 of SEQ ID NO: 1883903
gacauagcuuggguguaaa

SEQ ID NO: 2225087 - RNA, 19 nt, Artificial Sequence
  Description of Artificial Sequence: Synthetic oligonucleotide
  Antisense strand to SEQ ID NO: 2225086
uuuacacccaagcuauguc

SEQ ID NO: 2225088 - RNA, 19 nt, Artificial Sequence
  Description of Artificial Sequence: Synthetic oligonucleotide
  Sense strand starting at position 2578 of SEQ ID NO: 1883903
uuugaaacuuacugaaguu

SEQ ID NO: 2225089 - RNA, 19 nt, Artificial Sequence
  Description of Artificial Sequence: Synthetic oligonucleotide
  Antisense strand to SEQ ID NO: 2225088
aacuucaguaaguuucaaa

SEQ ID NO: 2225090 - RNA, 19 nt, Artificial Sequence
  Description of Artificial Sequence: Synthetic oligonucleotide
  Sense strand starting at position 2585 of SEQ ID NO: 1883903
cuuacugaaguuuguucua

SEQ ID NO: 2225091 - RNA, 19 nt, Artificial Sequence
  Description of Artificial Sequence: Synthetic oligonucleotide
  Antisense strand to SEQ ID NO: 2225090
uagaacaaacuucaguaag

SEQ ID NO: 2225092 - RNA, 19 nt, Artificial Sequence
  Description of Artificial Sequence: Synthetic oligonucleotide
  Sense strand starting at position 2588 of SEQ ID NO: 1883903
acugaaguuuguucuaaau

SEQ ID NO: 2225093 - RNA, 19 nt, Artificial Sequence
  Description of Artificial Sequence: Synthetic oligonucleotide
  Antisense strand to SEQ ID NO: 2225092
auuuagaacaaacuucagu

SEQ ID NO: 2225094 - RNA, 19 nt, Artificial Sequence
  Description of Artificial Sequence: Synthetic oligonucleotide
  Sense strand starting at position 2738 of SEQ ID NO: 1883903
guugguaagugaucgccuu

SEQ ID NO: 2225095 - RNA, 19 nt, Artificial Sequence
  Description of Artificial Sequence: Synthetic oligonucleotide
  Antisense strand to SEQ ID NO: 2225094
aaggcgaucacuuaccaac

SEQ ID NO: 2225096 - RNA, 19 nt, Artificial Sequence
  Description of Artificial Sequence: Synthetic oligonucleotide
  Sense strand starting at position 2739 of SEQ ID NO: 1883903
uugguaagugaucgccuuu

SEQ ID NO: 2225097 - RNA, 19 nt, Artificial Sequence
  Description of Artificial Sequence: Synthetic oligonucleotide
  Antisense strand to SEQ ID NO: 2225096
aaaggcgaucacuuaccaa

SEQ ID NO: 2225098 - RNA, 19 nt, Artificial Sequence
  Description of Artificial Sequence: Synthetic oligonucleotide
  Sense strand starting at position 2795 of SEQ ID NO: 1883903
cucacaugguuacuguuaa

SEQ ID NO: 2225099 - RNA, 19 nt, Artificial Sequence
  Description of Artificial Sequence: Synthetic oligonucleotide
  Antisense strand to SEQ ID NO: 2225098
uuaacaguaaccaugugag

SEQ ID NO: 2225100 - RNA, 19 nt, Artificial Sequence
  Description of Artificial Sequence: Synthetic oligonucleotide
  Sense strand starting at position 2799 of SEQ ID NO: 1883903
caugguuacuguuaagaug

SEQ ID NO: 2225101 - RNA, 19 nt, Artificial Sequence
  Description of Artificial Sequence: Synthetic oligonucleotide
  Antisense strand to SEQ ID NO: 2225100
caucuuaacaguaaccaug

SEQ ID NO: 2225102 - RNA, 19 nt, Artificial Sequence
  Description of Artificial Sequence: Synthetic oligonucleotide
  Sense strand starting at position 2937 of SEQ ID NO: 1883903
auaggagcuuauugaauuu

SEQ ID NO: 2225103 - RNA, 19 nt, Artificial Sequence
  Description of Artificial Sequence: Synthetic oligonucleotide
  Antisense strand to SEQ ID NO: 2225102
aaauucaauaagcuccuau

SEQ ID NO: 2225104 - RNA, 19 nt, Artificial Sequence
  Description of Artificial Sequence: Synthetic oligonucleotide
  Sense strand starting at position 3009 of SEQ ID NO: 1883903
auuauaguagaaggauagu

SEQ ID NO: 2225105 - RNA, 19 nt, Artificial Sequence
  Description of Artificial Sequence: Synthetic oligonucleotide
  Antisense strand to SEQ ID NO: 2225104
acuauccuucuacuauaau

SEQ ID NO: 2225106 - RNA, 19 nt, Artificial Sequence
  Description of Artificial Sequence: Synthetic oligonucleotide
  Sense strand starting at position 3015 of SEQ ID NO: 1883903
guagaaggauaguaaauaa

SEQ ID NO: 2225107 - RNA, 19 nt, Artificial Sequence
  Description of Artificial Sequence: Synthetic oligonucleotide
  Antisense strand to SEQ ID NO: 2225106
uuauuuacuauccuucuac

SEQ ID NO: 2225108 - RNA, 19 nt, Artificial Sequence
  Description of Artificial Sequence: Synthetic oligonucleotide
  Sense strand starting at position 527 of SEQ ID NO: 1883904
augaguuaccucugcuaag

SEQ ID NO: 2225109 - RNA, 19 nt, Artificial Sequence
  Description of Artificial Sequence: Synthetic oligonucleotide
  Antisense strand to SEQ ID NO: 2225108
cuuagcagagguaacucau

SEQ ID NO: 2225110 - RNA, 19 nt, Artificial Sequence
  Description of Artificial Sequence: Synthetic oligonucleotide
  Sense strand starting at position 545 of SEQ ID NO: 1883904
gguuacauucuaugguuaa

SEQ ID NO: 2225111 - RNA, 19 nt, Artificial Sequence
  Description of Artificial Sequence: Synthetic oligonucleotide
  Antisense strand to SEQ ID NO: 2225110
uuaaccauagaauguaacc

SEQ ID NO: 2225112 - RNA, 19 nt, Artificial Sequence
  Description of Artificial Sequence: Synthetic oligonucleotide
  Sense strand starting at position 549 of SEQ ID NO: 1883904
acauucuaugguuaaguua

SEQ ID NO: 2225113 - RNA, 19 nt, Artificial Sequence
  Description of Artificial Sequence: Synthetic oligonucleotide
  Antisense strand to SEQ ID NO: 2225112
uaacuuaaccauagaaugu

SEQ ID NO: 2225114 - RNA, 19 nt, Artificial Sequence
  Description of Artificial Sequence: Synthetic oligonucleotide
  Sense strand starting at position 662 of SEQ ID NO: 1883904
gccacaugugguuacuuaa

SEQ ID NO: 2225115 - RNA, 19 nt, Artificial Sequence
  Description of Artificial Sequence: Synthetic oligonucleotide
  Antisense strand to SEQ ID NO: 2225114
uuaaguaaccacauguggc

SEQ ID NO: 2225116 - RNA, 19 nt, Artificial Sequence
  Description of Artificial Sequence: Synthetic oligonucleotide
  Sense strand starting at position 776 of SEQ ID NO: 1883904
cuagacaucgacuggacua

SEQ ID NO: 2225117 - RNA, 19 nt, Artificial Sequence
  Description of Artificial Sequence: Synthetic oligonucleotide
  Antisense strand to SEQ ID NO: 2225116
uaguccagucgaugucuag

SEQ ID NO: 2225118 - RNA, 19 nt, Artificial Sequence
  Description of Artificial Sequence: Synthetic oligonucleotide
  Sense strand starting at position 796 of SEQ ID NO: 1883904
cgaagugguuuccuaacuu

SEQ ID NO: 2225119 - RNA, 19 nt, Artificial Sequence
  Description of Artificial Sequence: Synthetic oligonucleotide
  Antisense strand to SEQ ID NO: 2225118
aaguuaggaaaccacuucg

SEQ ID NO: 2225120 - RNA, 19 nt, Artificial Sequence
  Description of Artificial Sequence: Synthetic oligonucleotide
  Sense strand starting at position 890 of SEQ ID NO: 1883904
aguaccuguugacucuaaa

SEQ ID NO: 2225121 - RNA, 19 nt, Artificial Sequence
  Description of Artificial Sequence: Synthetic oligonucleotide
  Antisense strand to SEQ ID NO: 2225120
uuuagagucaacagguacu

SEQ ID NO: 2225122 - RNA, 19 nt, Artificial Sequence
  Description of Artificial Sequence: Synthetic oligonucleotide
  Sense strand starting at position 947 of SEQ ID NO: 1883904
uagcaauaucuguaugugu

SEQ ID NO: 2225123 - RNA, 19 nt, Artificial Sequence
  Description of Artificial Sequence: Synthetic oligonucleotide
  Antisense strand to SEQ ID NO: 2225122
acacauacagauauugcua

SEQ ID NO: 2225124 - RNA, 19 nt, Artificial Sequence
  Description of Artificial Sequence: Synthetic oligonucleotide
  Sense strand starting at position 952 of SEQ ID NO: 1883904
auaucuguaugugugagau

SEQ ID NO: 2225125 - RNA, 19 nt, Artificial Sequence
  Description of Artificial Sequence: Synthetic oligonucleotide
  Antisense strand to SEQ ID NO: 2225124
aucucacacauacagauau

SEQ ID NO: 2225126 - RNA, 19 nt, Artificial Sequence
  Description of Artificial Sequence: Synthetic oligonucleotide
  Sense strand starting at position 967 of SEQ ID NO: 1883904
agauaugacugguucuaga

SEQ ID NO: 2225127 - RNA, 19 nt, Artificial Sequence
  Description of Artificial Sequence: Synthetic oligonucleotide
  Antisense strand to SEQ ID NO: 2225126
ucuagaaccagucauaucu

SEQ ID NO: 2225128 - RNA, 19 nt, Artificial Sequence
  Description of Artificial Sequence: Synthetic oligonucleotide
  Sense strand starting at position 1055 of SEQ ID NO: 1883904
gccaauaaauugguaguca

SEQ ID NO: 2225129 - RNA, 19 nt, Artificial Sequence
  Description of Artificial Sequence: Synthetic oligonucleotide
  Antisense strand to SEQ ID NO: 2225128
ugacuaccaauuuauuggc

SEQ ID NO: 2225130 - RNA, 19 nt, Artificial Sequence
  Description of Artificial Sequence: Synthetic oligonucleotide
  Sense strand starting at position 1059 of SEQ ID NO: 1883904
auaaauugguagucacuga

SEQ ID NO: 2225131 - RNA, 19 nt, Artificial Sequence
  Description of Artificial Sequence: Synthetic oligonucleotide
  Antisense strand to SEQ ID NO: 2225130
ucagugacuaccaauuuau

SEQ ID NO: 2225132 - RNA, 19 nt, Artificial Sequence
  Description of Artificial Sequence: Synthetic oligonucleotide
  Sense strand starting at position 1063 of SEQ ID NO: 1883904
auugguagucacugaaucu

SEQ ID NO: 2225133 - RNA, 19 nt, Artificial Sequence
  Description of Artificial Sequence: Synthetic oligonucleotide
  Antisense strand to SEQ ID NO: 2225132
agauucagugacuaccaau

SEQ ID NO: 2225134 - RNA, 19 nt, Artificial Sequence
  Description of Artificial Sequence: Synthetic oligonucleotide
  Sense strand starting at position 1070 of SEQ ID NO: 1883904
gucacugaaucugugaguu

SEQ ID NO: 2225135 - RNA, 19 nt, Artificial Sequence
  Description of Artificial Sequence: Synthetic oligonucleotide
  Antisense strand to SEQ ID NO: 2225134
aacucacagauucagugac

SEQ ID NO: 2225136 - RNA, 19 nt, Artificial Sequence
  Description of Artificial Sequence: Synthetic oligonucleotide
  Sense strand starting at position 1094 of SEQ ID NO: 1883904
ggaauaucgggcugcauaa

SEQ ID NO: 2225137 - RNA, 19 nt, Artificial Sequence
  Description of Artificial Sequence: Synthetic oligonucleotide
  Antisense strand to SEQ ID NO: 2225136
uuaugcagcccgauauucc

SEQ ID NO: 2225138 - RNA, 19 nt, Artificial Sequence
  Description of Artificial Sequence: Synthetic oligonucleotide
  Sense strand starting at position 1116 of SEQ ID NO: 1883904
cugacagcuugauugagaa

SEQ ID NO: 2225139 - RNA, 19 nt, Artificial Sequence
  Description of Artificial Sequence: Synthetic oligonucleotide
  Antisense strand to SEQ ID NO: 2225138
uucucaaucaagcugucag

SEQ ID NO: 2225140 - RNA, 19 nt, Artificial Sequence
  Description of Artificial Sequence: Synthetic oligonucleotide
  Sense strand starting at position 1243 of SEQ ID NO: 1883904
auagcuauggucugauuga

SEQ ID NO: 2225141 - RNA, 19 nt, Artificial Sequence
  Description of Artificial Sequence: Synthetic oligonucleotide
  Antisense strand to SEQ ID NO: 2225140
ucaaucagaccauagcuau

SEQ ID NO: 2225142 - RNA, 19 nt, Artificial Sequence
  Description of Artificial Sequence: Synthetic oligonucleotide
  Sense strand starting at position 1280 of SEQ ID NO: 1883904
guaucuuccgugccaugca

SEQ ID NO: 2225143 - RNA, 19 nt, Artificial Sequence
  Description of Artificial Sequence: Synthetic oligonucleotide
  Antisense strand to SEQ ID NO: 2225142
ugcauggcacggaagauac

SEQ ID NO: 2225144 - RNA, 19 nt, Artificial Sequence
  Description of Artificial Sequence: Synthetic oligonucleotide
  Sense strand starting at position 1351 of SEQ ID NO: 1883904
gucaaaggcuucccacaga

SEQ ID NO: 2225145 - RNA, 19 nt, Artificial Sequence
  Description of Artificial Sequence: Synthetic oligonucleotide
  Antisense strand to SEQ ID NO: 2225144
ucugugggaagccuuugac

SEQ ID NO: 2225146 - RNA, 19 nt, Artificial Sequence
  Description of Artificial Sequence: Synthetic oligonucleotide
  Sense strand starting at position 1418 of SEQ ID NO: 1883904
gaacacuggccgggaguua

SEQ ID NO: 2225147 - RNA, 19 nt, Artificial Sequence
  Description of Artificial Sequence: Synthetic oligonucleotide
  Antisense strand to SEQ ID NO: 2225146
uaacucccggccaguguuc

SEQ ID NO: 2225148 - RNA, 19 nt, Artificial Sequence
  Description of Artificial Sequence: Synthetic oligonucleotide
  Sense strand starting at position 1468 of SEQ ID NO: 1883904
ugaauagcugugugauuuc

SEQ ID NO: 2225149 - RNA, 19 nt, Artificial Sequence
  Description of Artificial Sequence: Synthetic oligonucleotide
  Antisense strand to SEQ ID NO: 2225148
gaaaucacacagcuauuca

SEQ ID NO: 2225150 - RNA, 19 nt, Artificial Sequence
  Description of Artificial Sequence: Synthetic oligonucleotide
  Sense strand starting at position 1492 of SEQ ID NO: 1883904
uuauauugcuugucuacua

SEQ ID NO: 2225151 - RNA, 19 nt, Artificial Sequence
  Description of Artificial Sequence: Synthetic oligonucleotide
  Antisense strand to SEQ ID NO: 2225150
uaguagacaagcaauauaa

SEQ ID NO: 2225152 - RNA, 19 nt, Artificial Sequence
  Description of Artificial Sequence: Synthetic oligonucleotide
  Sense strand starting at position 2910 of SEQ ID NO: 1883904
cagagacuacauugucaga

SEQ ID NO: 2225153 - RNA, 19 nt, Artificial Sequence
  Description of Artificial Sequence: Synthetic oligonucleotide
  Antisense strand to SEQ ID NO: 2225152
ucugacaauguagucucug

SEQ ID NO: 2225154 - RNA, 19 nt, Artificial Sequence
  Description of Artificial Sequence: Synthetic oligonucleotide
  Sense strand starting at position 2927 of SEQ ID NO: 1883904
gaggaugcaucuuccucua

SEQ ID NO: 2225155 - RNA, 19 nt, Artificial Sequence
  Description of Artificial Sequence: Synthetic oligonucleotide
  Antisense strand to SEQ ID NO: 2225154
uagaggaagaugcauccuc

SEQ ID NO: 2225156 - RNA, 19 nt, Artificial Sequence
  Description of Artificial Sequence: Synthetic oligonucleotide
  Sense strand starting at position 3209 of SEQ ID NO: 1883904
cucuuacuucuuggagaug

SEQ ID NO: 2225157 - RNA, 19 nt, Artificial Sequence
  Description of Artificial Sequence: Synthetic oligonucleotide
  Antisense strand to SEQ ID NO: 2225156
caucuccaagaaguaagag

SEQ ID NO: 2225158 - RNA, 19 nt, Artificial Sequence
  Description of Artificial Sequence: Synthetic oligonucleotide
  Sense strand starting at position 3212 of SEQ ID NO: 1883904
uuacuucuuggagauguca

SEQ ID NO: 2225159 - RNA, 19 nt, Artificial Sequence
  Description of Artificial Sequence: Synthetic oligonucleotide
  Antisense strand to SEQ ID NO: 2225158
ugacaucuccaagaaguaa

SEQ ID NO: 2225160 - RNA, 19 nt, Artificial Sequence
  Description of Artificial Sequence: Synthetic oligonucleotide
  Sense strand starting at position 3214 of SEQ ID NO: 1883904
acuucuuggagaugucagu

SEQ ID NO: 2225161 - RNA, 19 nt, Artificial Sequence
  Description of Artificial Sequence: Synthetic oligonucleotide
  Antisense strand to SEQ ID NO: 2225160
acugacaucuccaagaagu

SEQ ID NO: 2225162 - RNA, 19 nt, Artificial Sequence
  Description of Artificial Sequence: Synthetic oligonucleotide
  Sense strand starting at position 3224 of SEQ ID NO: 1883904
gaugucaguaucuggguaa

SEQ ID NO: 2225163 - RNA, 19 nt, Artificial Sequence
  Description of Artificial Sequence: Synthetic oligonucleotide
  Antisense strand to SEQ ID NO: 2225162
uuacccagauacugacauc

SEQ ID NO: 2225164 - RNA, 19 nt, Artificial Sequence
  Description of Artificial Sequence: Synthetic oligonucleotide
  Sense strand starting at position 3227 of SEQ ID NO: 1883904
gucaguaucuggguaaaua

SEQ ID NO: 2225165 - RNA, 19 nt, Artificial Sequence
  Description of Artificial Sequence: Synthetic oligonucleotide
  Antisense strand to SEQ ID NO: 2225164
uauuuacccagauacugac

SEQ ID NO: 2225166 - RNA, 19 nt, Artificial Sequence
  Description of Artificial Sequence: Synthetic oligonucleotide
  Sense strand starting at position 3408 of SEQ ID NO: 1883904
agagacuuuguaggugaaa

SEQ ID NO: 2225167 - RNA, 19 nt, Artificial Sequence
  Description of Artificial Sequence: Synthetic oligonucleotide
  Antisense strand to SEQ ID NO: 2225166
uuucaccuacaaagucucu

SEQ ID NO: 2225168 - RNA, 19 nt, Artificial Sequence
  Description of Artificial Sequence: Synthetic oligonucleotide
  Sense strand starting at position 3409 of SEQ ID NO: 1883904
gagacuuuguaggugaaag

SEQ ID NO: 2225169 - RNA, 19 nt, Artificial Sequence
  Description of Artificial Sequence: Synthetic oligonucleotide
  Antisense strand to SEQ ID NO: 2225168
cuuucaccuacaaagucuc

SEQ ID NO: 2225170 - RNA, 19 nt, Artificial Sequence
  Description of Artificial Sequence: Synthetic oligonucleotide
  Sense strand starting at position 3555 of SEQ ID NO: 1883904
uagaguaacucuucugaga

SEQ ID NO: 2225171 - RNA, 19 nt, Artificial Sequence
  Description of Artificial Sequence: Synthetic oligonucleotide
  Antisense strand to SEQ ID NO: 2225170
ucucagaagaguuacucua

SEQ ID NO: 2225172 - RNA, 19 nt, Artificial Sequence
  Description of Artificial Sequence: Synthetic oligonucleotide
  Sense strand starting at position 3632 of SEQ ID NO: 1883904
aucggugacucuccugaca

SEQ ID NO: 2225173 - RNA, 19 nt, Artificial Sequence
  Description of Artificial Sequence: Synthetic oligonucleotide
  Antisense strand to SEQ ID NO: 2225172
ugucaggagagucaccgau

SEQ ID NO: 2225174 - RNA, 19 nt, Artificial Sequence
  Description of Artificial Sequence: Synthetic oligonucleotide
  Sense strand starting at position 3709 of SEQ ID NO: 1883904
gaggacucuccugaguucu

SEQ ID NO: 2225175 - RNA, 19 nt, Artificial Sequence
  Description of Artificial Sequence: Synthetic oligonucleotide
  Antisense strand to SEQ ID NO: 2225174
agaacucaggagaguccuc

SEQ ID NO: 2225176 - RNA, 19 nt, Artificial Sequence
  Description of Artificial Sequence: Synthetic oligonucleotide
  Sense strand starting at position 3717 of SEQ ID NO: 1883904
uccugaguucucuaccuga

SEQ ID NO: 2225177 - RNA, 19 nt, Artificial Sequence
  Description of Artificial Sequence: Synthetic oligonucleotide
  Antisense strand to SEQ ID NO: 2225176
ucagguagagaacucagga

SEQ ID NO: 2225178 - RNA, 19 nt, Artificial Sequence
  Description of Artificial Sequence: Synthetic oligonucleotide
  Sense strand starting at position 3728 of SEQ ID NO: 1883904
cuaccugagcccuagacua

SEQ ID NO: 2225179 - RNA, 19 nt, Artificial Sequence
  Description of Artificial Sequence: Synthetic oligonucleotide
  Antisense strand to SEQ ID NO: 2225178
uagucuagggcucagguag

SEQ ID NO: 2225180 - RNA, 19 nt, Artificial Sequence
  Description of Artificial Sequence: Synthetic oligonucleotide
  Sense strand starting at position 3877 of SEQ ID NO: 1883904
ugaccaauacgcuaucauu

SEQ ID NO: 2225181 - RNA, 19 nt, Artificial Sequence
  Description of Artificial Sequence: Synthetic oligonucleotide
  Antisense strand to SEQ ID NO: 2225180
aaugauagcguauugguca

SEQ ID NO: 2225182 - RNA, 19 nt, Artificial Sequence
  Description of Artificial Sequence: Synthetic oligonucleotide
  Sense strand starting at position 3885 of SEQ ID NO: 1883904
acgcuaucauuugccaaca

SEQ ID NO: 2225183 - RNA, 19 nt, Artificial Sequence
  Description of Artificial Sequence: Synthetic oligonucleotide
  Antisense strand to SEQ ID NO: 2225182
uguuggcaaaugauagcgu

SEQ ID NO: 2225184 - RNA, 19 nt, Artificial Sequence
  Description of Artificial Sequence: Synthetic oligonucleotide
  Sense strand starting at position 3886 of SEQ ID NO: 1883904
cgcuaucauuugccaacaa

SEQ ID NO: 2225185 - RNA, 19 nt, Artificial Sequence
  Description of Artificial Sequence: Synthetic oligonucleotide
  Antisense strand to SEQ ID NO: 2225184
uuguuggcaaaugauagcg

SEQ ID NO: 2225186 - RNA, 19 nt, Artificial Sequence
  Description of Artificial Sequence: Synthetic oligonucleotide
  Sense strand starting at position 3949 of SEQ ID NO: 1883904
agcugccuccaugagauau

SEQ ID NO: 2225187 - RNA, 19 nt, Artificial Sequence
  Description of Artificial Sequence: Synthetic oligonucleotide
  Antisense strand to SEQ ID NO: 2225186
auaucucauggaggcagcu

SEQ ID NO: 2225188 - RNA, 19 nt, Artificial Sequence
  Description of Artificial Sequence: Synthetic oligonucleotide
  Sense strand starting at position 557 of SEQ ID NO: 1883905
gguagaaacugcuuaacca

SEQ ID NO: 2225189 - RNA, 19 nt, Artificial Sequence
  Description of Artificial Sequence: Synthetic oligonucleotide
  Antisense strand to SEQ ID NO: 2225188
ugguuaagcaguuucuacc

SEQ ID NO: 2225190 - RNA, 19 nt, Artificial Sequence
  Description of Artificial Sequence: Synthetic oligonucleotide
  Sense strand starting at position 558 of SEQ ID NO: 1883905
guagaaacugcuuaaccau

SEQ ID NO: 2225191 - RNA, 19 nt, Artificial Sequence
  Description of Artificial Sequence: Synthetic oligonucleotide
  Antisense strand to SEQ ID NO: 2225190
augguuaagcaguuucuac

SEQ ID NO: 2225192 - RNA, 19 nt, Artificial Sequence
  Description of Artificial Sequence: Synthetic oligonucleotide
  Sense strand starting at position 632 of SEQ ID NO: 1883905
gguuacauucuaugguuaa

SEQ ID NO: 2225193 - RNA, 19 nt, Artificial Sequence
  Description of Artificial Sequence: Synthetic oligonucleotide
  Antisense strand to SEQ ID NO: 2225192
uuaaccauagaauguaacc

SEQ ID NO: 2225194 - RNA, 19 nt, Artificial Sequence
  Description of Artificial Sequence: Synthetic oligonucleotide
  Sense strand starting at position 636 of SEQ ID NO: 1883905
acauucuaugguuaaguua

SEQ ID NO: 2225195 - RNA, 19 nt, Artificial Sequence
  Description of Artificial Sequence: Synthetic oligonucleotide
  Antisense strand to SEQ ID NO: 2225194
uaacuuaaccauagaaugu

SEQ ID NO: 2225196 - RNA, 19 nt, Artificial Sequence
  Description of Artificial Sequence: Synthetic oligonucleotide
  Sense strand starting at position 863 of SEQ ID NO: 1883905
cuagacaucgacuggacua

SEQ ID NO: 2225197 - RNA, 19 nt, Artificial Sequence
  Description of Artificial Sequence: Synthetic oligonucleotide
  Antisense strand to SEQ ID NO: 2225196
uaguccagucgaugucuag

SEQ ID NO: 2225198 - RNA, 19 nt, Artificial Sequence
  Description of Artificial Sequence: Synthetic oligonucleotide
  Sense strand starting at position 883 of SEQ ID NO: 1883905
cgaagugguuuccuaacuu

SEQ ID NO: 2225199 - RNA, 19 nt, Artificial Sequence
  Description of Artificial Sequence: Synthetic oligonucleotide
  Antisense strand to SEQ ID NO: 2225198
aaguuaggaaaccacuucg

SEQ ID NO: 2225200 - RNA, 19 nt, Artificial Sequence
  Description of Artificial Sequence: Synthetic oligonucleotide
  Sense strand starting at position 955 of SEQ ID NO: 1883905
auaggaucgcaguauuacu

SEQ ID NO: 2225201 - RNA, 19 nt, Artificial Sequence
  Description of Artificial Sequence: Synthetic oligonucleotide
  Antisense strand to SEQ ID NO: 2225200
aguaauacugcgauccuau

SEQ ID NO: 2225202 - RNA, 19 nt, Artificial Sequence
  Description of Artificial Sequence: Synthetic oligonucleotide
  Sense strand starting at position 977 of SEQ ID NO: 1883905
aguaccuguugacucuaaa

SEQ ID NO: 2225203 - RNA, 19 nt, Artificial Sequence
  Description of Artificial Sequence: Synthetic oligonucleotide
  Antisense strand to SEQ ID NO: 2225202
uuuagagucaacagguacu

SEQ ID NO: 2225204 - RNA, 19 nt, Artificial Sequence
  Description of Artificial Sequence: Synthetic oligonucleotide
  Sense strand starting at position 1045 of SEQ ID NO: 1883905
guaugugugagauaugacu

SEQ ID NO: 2225205 - RNA, 19 nt, Artificial Sequence
  Description of Artificial Sequence: Synthetic oligonucleotide
  Antisense strand to SEQ ID NO: 2225204
agucauaucucacacauac

SEQ ID NO: 2225206 - RNA, 19 nt, Artificial Sequence
  Description of Artificial Sequence: Synthetic oligonucleotide
  Sense strand starting at position 1067 of SEQ ID NO: 1883905
uuuagaugaugccuggaga

SEQ ID NO: 2225207 - RNA, 19 nt, Artificial Sequence
  Description of Artificial Sequence: Synthetic oligonucleotide
  Antisense strand to SEQ ID NO: 2225206
ucuccaggcaucaucuaaa

SEQ ID NO: 2225208 - RNA, 19 nt, Artificial Sequence
  Description of Artificial Sequence: Synthetic oligonucleotide
  Sense strand starting at position 1142 of SEQ ID NO: 1883905
gccaauaaauugguaguca

SEQ ID NO: 2225209 - RNA, 19 nt, Artificial Sequence
  Description of Artificial Sequence: Synthetic oligonucleotide
  Antisense strand to SEQ ID NO: 2225208
ugacuaccaauuuauuggc

SEQ ID NO: 2225210 - RNA, 19 nt, Artificial Sequence
  Description of Artificial Sequence: Synthetic oligonucleotide
  Sense strand starting at position 1146 of SEQ ID NO: 1883905
auaaauugguagucacuga

SEQ ID NO: 2225211 - RNA, 19 nt, Artificial Sequence
  Description of Artificial Sequence: Synthetic oligonucleotide
  Antisense strand to SEQ ID NO: 2225210
ucagugacuaccaauuuau

SEQ ID NO: 2225212 - RNA, 19 nt, Artificial Sequence
  Description of Artificial Sequence: Synthetic oligonucleotide
  Sense strand starting at position 1150 of SEQ ID NO: 1883905
auugguagucacugaaucu

SEQ ID NO: 2225213 - RNA, 19 nt, Artificial Sequence
  Description of Artificial Sequence: Synthetic oligonucleotide
  Antisense strand to SEQ ID NO: 2225212
agauucagugacuaccaau

SEQ ID NO: 2225214 - RNA, 19 nt, Artificial Sequence
  Description of Artificial Sequence: Synthetic oligonucleotide
  Sense strand starting at position 1156 of SEQ ID NO: 1883905
agucacugaaucugugagu

SEQ ID NO: 2225215 - RNA, 19 nt, Artificial Sequence
  Description of Artificial Sequence: Synthetic oligonucleotide
  Antisense strand to SEQ ID NO: 2225214
acucacagauucagugacu

SEQ ID NO: 2225216 - RNA, 19 nt, Artificial Sequence
  Description of Artificial Sequence: Synthetic oligonucleotide
  Sense strand starting at position 1157 of SEQ ID NO: 1883905
gucacugaaucugugaguu

SEQ ID NO: 2225217 - RNA, 19 nt, Artificial Sequence
  Description of Artificial Sequence: Synthetic oligonucleotide
  Antisense strand to SEQ ID NO: 2225216
aacucacagauucagugac

SEQ ID NO: 2225218 - RNA, 19 nt, Artificial Sequence
  Description of Artificial Sequence: Synthetic oligonucleotide
  Sense strand starting at position 1181 of SEQ ID NO: 1883905
ggaauaucgggcugcauaa

SEQ ID NO: 2225219 - RNA, 19 nt, Artificial Sequence
  Description of Artificial Sequence: Synthetic oligonucleotide
  Antisense strand to SEQ ID NO: 2225218
uuaugcagcccgauauucc

SEQ ID NO: 2225220 - RNA, 19 nt, Artificial Sequence
  Description of Artificial Sequence: Synthetic oligonucleotide
  Sense strand starting at position 1203 of SEQ ID NO: 1883905
cugacagcuugauugagaa

SEQ ID NO: 2225221 - RNA, 19 nt, Artificial Sequence
  Description of Artificial Sequence: Synthetic oligonucleotide
  Antisense strand to SEQ ID NO: 2225220
uucucaaucaagcugucag

SEQ ID NO: 2225222 - RNA, 19 nt, Artificial Sequence
  Description of Artificial Sequence: Synthetic oligonucleotide
  Sense strand starting at position 1438 of SEQ ID NO: 1883905
gucagaggcuucucacaga

SEQ ID NO: 2225223 - RNA, 19 nt, Artificial Sequence
  Description of Artificial Sequence: Synthetic oligonucleotide
  Antisense strand to SEQ ID NO: 2225222
ucugugagaagccucugac

SEQ ID NO: 2225224 - RNA, 19 nt, Artificial Sequence
  Description of Artificial Sequence: Synthetic oligonucleotide
  Sense strand starting at position 1539 of SEQ ID NO: 1883905
cuaggaacgcuuugaaacu

SEQ ID NO: 2225225 - RNA, 19 nt, Artificial Sequence
  Description of Artificial Sequence: Synthetic oligonucleotide
  Antisense strand to SEQ ID NO: 2225224
aguuucaaagcguuccuag

SEQ ID NO: 2225226 - RNA, 19 nt, Artificial Sequence
  Description of Artificial Sequence: Synthetic oligonucleotide
  Sense strand starting at position 1557 of SEQ ID NO: 1883905
ugaauagcugugugauuuc

SEQ ID NO: 2225227 - RNA, 19 nt, Artificial Sequence
  Description of Artificial Sequence: Synthetic oligonucleotide
  Antisense strand to SEQ ID NO: 2225226
gaaaucacacagcuauuca

SEQ ID NO: 2225228 - RNA, 19 nt, Artificial Sequence
  Description of Artificial Sequence: Synthetic oligonucleotide
  Sense strand starting at position 1577 of SEQ ID NO: 1883905
gagguuauauugcuucucu

SEQ ID NO: 2225229 - RNA, 19 nt, Artificial Sequence
  Description of Artificial Sequence: Synthetic oligonucleotide
  Antisense strand to SEQ ID NO: 2225228
agagaagcaauauaaccuc

SEQ ID NO: 2225230 - RNA, 19 nt, Artificial Sequence
  Description of Artificial Sequence: Synthetic oligonucleotide
  Sense strand starting at position 1578 of SEQ ID NO: 1883905
agguuauauugcuucucua

SEQ ID NO: 2225231 - RNA, 19 nt, Artificial Sequence
  Description of Artificial Sequence: Synthetic oligonucleotide
  Antisense strand to SEQ ID NO: 2225230
uagagaagcaauauaaccu

SEQ ID NO: 2225232 - RNA, 19 nt, Artificial Sequence
  Description of Artificial Sequence: Synthetic oligonucleotide
  Sense strand starting at position 3048 of SEQ ID NO: 1883905
cagagacuacauugucaga

SEQ ID NO: 2225233 - RNA, 19 nt, Artificial Sequence
  Description of Artificial Sequence: Synthetic oligonucleotide
  Antisense strand to SEQ ID NO: 2225232
ucugacaauguagucucug

SEQ ID NO: 2225234 - RNA, 19 nt, Artificial Sequence
  Description of Artificial Sequence: Synthetic oligonucleotide
  Sense strand starting at position 3051 of SEQ ID NO: 1883905
agacuacauugucagagga

SEQ ID NO: 2225235 - RNA, 19 nt, Artificial Sequence
  Description of Artificial Sequence: Synthetic oligonucleotide
  Antisense strand to SEQ ID NO: 2225234
uccucugacaauguagucu

SEQ ID NO: 2225236 - RNA, 19 nt, Artificial Sequence
  Description of Artificial Sequence: Synthetic oligonucleotide
  Sense strand starting at position 3065 of SEQ ID NO: 1883905
gaggaugcaucuuccucua

SEQ ID NO: 2225237 - RNA, 19 nt, Artificial Sequence
  Description of Artificial Sequence: Synthetic oligonucleotide
  Antisense strand to SEQ ID NO: 2225236
uagaggaagaugcauccuc

SEQ ID NO: 2225238 - RNA, 19 nt, Artificial Sequence
  Description of Artificial Sequence: Synthetic oligonucleotide
  Sense strand starting at position 3067 of SEQ ID NO: 1883905
ggaugcaucuuccucuagu

SEQ ID NO: 2225239 - RNA, 19 nt, Artificial Sequence
  Description of Artificial Sequence: Synthetic oligonucleotide
  Antisense strand to SEQ ID NO: 2225238
acuagaggaagaugcaucc

SEQ ID NO: 2225240 - RNA, 19 nt, Artificial Sequence
  Description of Artificial Sequence: Synthetic oligonucleotide
  Sense strand starting at position 3297 of SEQ ID NO: 1883905
uucccuuaucccugaagag

SEQ ID NO: 2225241 - RNA, 19 nt, Artificial Sequence
  Description of Artificial Sequence: Synthetic oligonucleotide
  Antisense strand to SEQ ID NO: 2225240
cucuucagggauaagggaa

SEQ ID NO: 2225242 - RNA, 19 nt, Artificial Sequence
  Description of Artificial Sequence: Synthetic oligonucleotide
  Sense strand starting at position 3345 of SEQ ID NO: 1883905
gccucuuacuucuuggaga

SEQ ID NO: 2225243 - RNA, 19 nt, Artificial Sequence
  Description of Artificial Sequence: Synthetic oligonucleotide
  Antisense strand to SEQ ID NO: 2225242
ucuccaagaaguaagaggc

SEQ ID NO: 2225244 - RNA, 19 nt, Artificial Sequence
  Description of Artificial Sequence: Synthetic oligonucleotide
  Sense strand starting at position 3347 of SEQ ID NO: 1883905
cucuuacuucuuggagaug

SEQ ID NO: 2225245 - RNA, 19 nt, Artificial Sequence
  Description of Artificial Sequence: Synthetic oligonucleotide
  Antisense strand to SEQ ID NO: 2225244
caucuccaagaaguaagag

SEQ ID NO: 2225246 - RNA, 19 nt, Artificial Sequence
  Description of Artificial Sequence: Synthetic oligonucleotide
  Sense strand starting at position 3350 of SEQ ID NO: 1883905
uuacuucuuggagauguca

SEQ ID NO: 2225247 - RNA, 19 nt, Artificial Sequence
  Description of Artificial Sequence: Synthetic oligonucleotide
  Antisense strand to SEQ ID NO: 2225246
ugacaucuccaagaaguaa

SEQ ID NO: 2225248 - RNA, 19 nt, Artificial Sequence
  Description of Artificial Sequence: Synthetic oligonucleotide
  Sense strand starting at position 3352 of SEQ ID NO: 1883905
acuucuuggagaugucagu

SEQ ID NO: 2225249 - RNA, 19 nt, Artificial Sequence
  Description of Artificial Sequence: Synthetic oligonucleotide
  Antisense strand to SEQ ID NO: 2225248
acugacaucuccaagaagu

SEQ ID NO: 2225250 - RNA, 19 nt, Artificial Sequence
  Description of Artificial Sequence: Synthetic oligonucleotide
  Sense strand starting at position 3366 of SEQ ID NO: 1883905
ucaguagccggguaaauaa

SEQ ID NO: 2225251 - RNA, 19 nt, Artificial Sequence
  Description of Artificial Sequence: Synthetic oligonucleotide
  Antisense strand to SEQ ID NO: 2225250
uuauuuacccggcuacuga

SEQ ID NO: 2225252 - RNA, 19 nt, Artificial Sequence
  Description of Artificial Sequence: Synthetic oligonucleotide
  Sense strand starting at position 3546 of SEQ ID NO: 1883905
agagacuuuguaggugaaa

SEQ ID NO: 2225253 - RNA, 19 nt, Artificial Sequence
  Description of Artificial Sequence: Synthetic oligonucleotide
  Antisense strand to SEQ ID NO: 2225252
uuucaccuacaaagucucu

SEQ ID NO: 2225254 - RNA, 19 nt, Artificial Sequence
  Description of Artificial Sequence: Synthetic oligonucleotide
  Sense strand starting at position 3547 of SEQ ID NO: 1883905
gagacuuuguaggugaaag

SEQ ID NO: 2225255 - RNA, 19 nt, Artificial Sequence
  Description of Artificial Sequence: Synthetic oligonucleotide
  Antisense strand to SEQ ID NO: 2225254
cuuucaccuacaaagucuc

SEQ ID NO: 2225256 - RNA, 19 nt, Artificial Sequence
  Description of Artificial Sequence: Synthetic oligonucleotide
  Sense strand starting at position 3693 of SEQ ID NO: 1883905
uagaguaacucuucugaga

SEQ ID NO: 2225257 - RNA, 19 nt, Artificial Sequence
  Description of Artificial Sequence: Synthetic oligonucleotide
  Antisense strand to SEQ ID NO: 2225256
ucucagaagaguuacucua

SEQ ID NO: 2225258 - RNA, 19 nt, Artificial Sequence
  Description of Artificial Sequence: Synthetic oligonucleotide
  Sense strand starting at position 3750 of SEQ ID NO: 1883905
guaaguuccagugguauag

SEQ ID NO: 2225259 - RNA, 19 nt, Artificial Sequence
  Description of Artificial Sequence: Synthetic oligonucleotide
  Antisense strand to SEQ ID NO: 2225258
cuauaccacuggaacuuac

SEQ ID NO: 2225260 - RNA, 19 nt, Artificial Sequence
  Description of Artificial Sequence: Synthetic oligonucleotide
  Sense strand starting at position 3770 of SEQ ID NO: 1883905
aucggugacucuccugaca

SEQ ID NO: 2225261 - RNA, 19 nt, Artificial Sequence
  Description of Artificial Sequence: Synthetic oligonucleotide
  Antisense strand to SEQ ID NO: 2225260
ugucaggagagucaccgau

SEQ ID NO: 2225262 - RNA, 19 nt, Artificial Sequence
  Description of Artificial Sequence: Synthetic oligonucleotide
  Sense strand starting at position 3847 of SEQ ID NO: 1883905
gaggacucuccugaguucu

SEQ ID NO: 2225263 - RNA, 19 nt, Artificial Sequence
  Description of Artificial Sequence: Synthetic oligonucleotide
  Antisense strand to SEQ ID NO: 2225262
agaacucaggagaguccuc

SEQ ID NO: 2225264 - RNA, 19 nt, Artificial Sequence
  Description of Artificial Sequence: Synthetic oligonucleotide
  Sense strand starting at position 3855 of SEQ ID NO: 1883905
uccugaguucucuaccuga

SEQ ID NO: 2225265 - RNA, 19 nt, Artificial Sequence
  Description of Artificial Sequence: Synthetic oligonucleotide
  Antisense strand to SEQ ID NO: 2225264
ucagguagagaacucagga

SEQ ID NO: 2225266 - RNA, 19 nt, Artificial Sequence
  Description of Artificial Sequence: Synthetic oligonucleotide
  Sense strand starting at position 3866 of SEQ ID NO: 1883905
cuaccugagcccuagacua

SEQ ID NO: 2225267 - RNA, 19 nt, Artificial Sequence
  Description of Artificial Sequence: Synthetic oligonucleotide
  Antisense strand to SEQ ID NO: 2225266
uagucuagggcucagguag

SEQ ID NO: 2225268 - RNA, 19 nt, Artificial Sequence
  Description of Artificial Sequence: Synthetic oligonucleotide
  Sense strand starting at position 114 of SEQ ID NO: 1883906
auccaucuuuauguagaca

SEQ ID NO: 2225269 - RNA, 19 nt, Artificial Sequence
  Description of Artificial Sequence: Synthetic oligonucleotide
  Antisense strand to SEQ ID NO: 2225268
ugucuacauaaagauggau

SEQ ID NO: 2225270 - RNA, 19 nt, Artificial Sequence
  Description of Artificial Sequence: Synthetic oligonucleotide
  Sense strand starting at position 126 of SEQ ID NO: 1883906
guagacauuaaaggaguua

SEQ ID NO: 2225271 - RNA, 19 nt, Artificial Sequence
  Description of Artificial Sequence: Synthetic oligonucleotide
  Antisense strand to SEQ ID NO: 2225270
uaacuccuuuaaugucuac

SEQ ID NO: 2225272 - RNA, 19 nt, Artificial Sequence
  Description of Artificial Sequence: Synthetic oligonucleotide
  Sense strand starting at position 362 of SEQ ID NO: 1883906
cucauuucuucuguguuau

SEQ ID NO: 2225273 - RNA, 19 nt, Artificial Sequence
  Description of Artificial Sequence: Synthetic oligonucleotide
  Antisense strand to SEQ ID NO: 2225272
auaacacagaagaaaugag

SEQ ID NO: 2225274 - RNA, 19 nt, Artificial Sequence
  Description of Artificial Sequence: Synthetic oligonucleotide
  Sense strand starting at position 363 of SEQ ID NO: 1883906
ucauuucuucuguguuaua

SEQ ID NO: 2225275 - RNA, 19 nt, Artificial Sequence
  Description of Artificial Sequence: Synthetic oligonucleotide
  Antisense strand to SEQ ID NO: 2225274
uauaacacagaagaaauga

SEQ ID NO: 2225276 - RNA, 19 nt, Artificial Sequence
  Description of Artificial Sequence: Synthetic oligonucleotide
  Sense strand starting at position 420 of SEQ ID NO: 1883906
ugcaauaguccagauacuc

SEQ ID NO: 2225277 - RNA, 19 nt, Artificial Sequence
  Description of Artificial Sequence: Synthetic oligonucleotide
  Antisense strand to SEQ ID NO: 2225276
gaguaucuggacuauugca

SEQ ID NO: 2225278 - RNA, 19 nt, Artificial Sequence
  Description of Artificial Sequence: Synthetic oligonucleotide
  Sense strand starting at position 457 of SEQ ID NO: 1883906
cuucuuuguccagaccuca

SEQ ID NO: 2225279 - RNA, 19 nt, Artificial Sequence
  Description of Artificial Sequence: Synthetic oligonucleotide
  Antisense strand to SEQ ID NO: 2225278
ugaggucuggacaaagaag

SEQ ID NO: 2225280 - RNA, 19 nt, Artificial Sequence
  Description of Artificial Sequence: Synthetic oligonucleotide
  Sense strand starting at position 764 of SEQ ID NO: 1883906
gucuguucccugcugagca

SEQ ID NO: 2225281 - RNA, 19 nt, Artificial Sequence
  Description of Artificial Sequence: Synthetic oligonucleotide
  Antisense strand to SEQ ID NO: 2225280
ugcucagcagggaacagac

SEQ ID NO: 2225282 - RNA, 19 nt, Artificial Sequence
  Description of Artificial Sequence: Synthetic oligonucleotide
  Sense strand starting at position 860 of SEQ ID NO: 1883906
uuggcuuugcucuaauaag

SEQ ID NO: 2225283 - RNA, 19 nt, Artificial Sequence
  Description of Artificial Sequence: Synthetic oligonucleotide
  Antisense strand to SEQ ID NO: 2225282
cuuauuagagcaaagccaa

SEQ ID NO: 2225284 - RNA, 19 nt, Artificial Sequence
  Description of Artificial Sequence: Synthetic oligonucleotide
  Sense strand starting at position 868 of SEQ ID NO: 1883906
gcucuaauaaguugggaag

SEQ ID NO: 2225285 - RNA, 19 nt, Artificial Sequence
  Description of Artificial Sequence: Synthetic oligonucleotide
  Antisense strand to SEQ ID NO: 2225284
cuucccaacuuauuagagc

SEQ ID NO: 2225286 - RNA, 19 nt, Artificial Sequence
  Description of Artificial Sequence: Synthetic oligonucleotide
  Sense strand starting at position 918 of SEQ ID NO: 1883906
gaucuaacuuagguuuaag

SEQ ID NO: 2225287 - RNA, 19 nt, Artificial Sequence
  Description of Artificial Sequence: Synthetic oligonucleotide
  Antisense strand to SEQ ID NO: 2225286
cuuaaaccuaaguuagauc

SEQ ID NO: 2225288 - RNA, 19 nt, Artificial Sequence
  Description of Artificial Sequence: Synthetic oligonucleotide
  Sense strand starting at position 975 of SEQ ID NO: 1883906
ccgucuggaagccaauaua

SEQ ID NO: 2225289 - RNA, 19 nt, Artificial Sequence
  Description of Artificial Sequence: Synthetic oligonucleotide
  Antisense strand to SEQ ID NO: 2225288
uauauuggcuuccagacgg

SEQ ID NO: 2225290 - RNA, 19 nt, Artificial Sequence
  Description of Artificial Sequence: Synthetic oligonucleotide
  Sense strand starting at position 1045 of SEQ ID NO: 1883906
uugaaaguggcuugauaau

SEQ ID NO: 2225291 - RNA, 19 nt, Artificial Sequence
  Description of Artificial Sequence: Synthetic oligonucleotide
  Antisense strand to SEQ ID NO: 2225290
auuaucaagccacuuucaa

SEQ ID NO: 2225292 - RNA, 19 nt, Artificial Sequence
  Description of Artificial Sequence: Synthetic oligonucleotide
  Sense strand starting at position 1077 of SEQ ID NO: 1883906
cgaugaagccgacagaauu

SEQ ID NO: 2225293 - RNA, 19 nt, Artificial Sequence
  Description of Artificial Sequence: Synthetic oligonucleotide
  Antisense strand to SEQ ID NO: 2225292
aauucugucggcuucaucg

SEQ ID NO: 2225294 - RNA, 19 nt, Artificial Sequence
  Description of Artificial Sequence: Synthetic oligonucleotide
  Sense strand starting at position 1087 of SEQ ID NO: 1883906
gacagaauuuguggauaaa

SEQ ID NO: 2225295 - RNA, 19 nt, Artificial Sequence
  Description of Artificial Sequence: Synthetic oligonucleotide
  Antisense strand to SEQ ID NO: 2225294
uuuauccacaaauucuguc

SEQ ID NO: 2225296 - RNA, 19 nt, Artificial Sequence
  Description of Artificial Sequence: Synthetic oligonucleotide
  Sense strand starting at position 1266 of SEQ ID NO: 1883906
uuagguuugggauguccau

SEQ ID NO: 2225297 - RNA, 19 nt, Artificial Sequence
  Description of Artificial Sequence: Synthetic oligonucleotide
  Antisense strand to SEQ ID NO: 2225296
auggacaucccaaaccuaa

SEQ ID NO: 2225298 - RNA, 19 nt, Artificial Sequence
  Description of Artificial Sequence: Synthetic oligonucleotide
  Sense strand starting at position 1295 of SEQ ID NO: 1883906
aaugcagcucuugaguaau

SEQ ID NO: 2225299 - RNA, 19 nt, Artificial Sequence
  Description of Artificial Sequence: Synthetic oligonucleotide
  Antisense strand to SEQ ID NO: 2225298
auuacucaagagcugcauu

SEQ ID NO: 2225300 - RNA, 19 nt, Artificial Sequence
  Description of Artificial Sequence: Synthetic oligonucleotide
  Sense strand starting at position 1298 of SEQ ID NO: 1883906
gcagcucuugaguaaucag

SEQ ID NO: 2225301 - RNA, 19 nt, Artificial Sequence
  Description of Artificial Sequence: Synthetic oligonucleotide
  Antisense strand to SEQ ID NO: 2225300
cugauuacucaagagcugc

SEQ ID NO: 2225302 - RNA, 19 nt, Artificial Sequence
  Description of Artificial Sequence: Synthetic oligonucleotide
  Sense strand starting at position 1307 of SEQ ID NO: 1883906
gaguaaucaguucgauaua

SEQ ID NO: 2225303 - RNA, 19 nt, Artificial Sequence
  Description of Artificial Sequence: Synthetic oligonucleotide
  Antisense strand to SEQ ID NO: 2225302
uauaucgaacugauuacuc

SEQ ID NO: 2225304 - RNA, 19 nt, Artificial Sequence
  Description of Artificial Sequence: Synthetic oligonucleotide
  Sense strand starting at position 1558 of SEQ ID NO: 1883906
guguguugaaaucagacuu

SEQ ID NO: 2225305 - RNA, 19 nt, Artificial Sequence
  Description of Artificial Sequence: Synthetic oligonucleotide
  Antisense strand to SEQ ID NO: 2225304
aagucugauuucaacacac

SEQ ID NO: 2225306 - RNA, 19 nt, Artificial Sequence
  Description of Artificial Sequence: Synthetic oligonucleotide
  Sense strand starting at position 2406 of SEQ ID NO: 1883906
ggagcguucgaggacuaga

SEQ ID NO: 2225307 - RNA, 19 nt, Artificial Sequence
  Description of Artificial Sequence: Synthetic oligonucleotide
  Antisense strand to SEQ ID NO: 2225306
ucuaguccucgaacgcucc

SEQ ID NO: 2225308 - RNA, 19 nt, Artificial Sequence
  Description of Artificial Sequence: Synthetic oligonucleotide
  Sense strand starting at position 2417 of SEQ ID NO: 1883906
ggacuagauacguggaaca

SEQ ID NO: 2225309 - RNA, 19 nt, Artificial Sequence
  Description of Artificial Sequence: Synthetic oligonucleotide
  Antisense strand to SEQ ID NO: 2225308
uguuccacguaucuagucc

SEQ ID NO: 2225310 - RNA, 19 nt, Artificial Sequence
  Description of Artificial Sequence: Synthetic oligonucleotide
  Sense strand starting at position 2898 of SEQ ID NO: 1883906
cugaguuucugacuagauc

SEQ ID NO: 2225311 - RNA, 19 nt, Artificial Sequence
  Description of Artificial Sequence: Synthetic oligonucleotide
  Antisense strand to SEQ ID NO: 2225310
gaucuagucagaaacucag

SEQ ID NO: 2225312 - RNA, 19 nt, Artificial Sequence
  Description of Artificial Sequence: Synthetic oligonucleotide
  Sense strand starting at position 2899 of SEQ ID NO: 1883906
ugaguuucugacuagaucu

SEQ ID NO: 2225313 - RNA, 19 nt, Artificial Sequence
  Description of Artificial Sequence: Synthetic oligonucleotide
  Antisense strand to SEQ ID NO: 2225312
agaucuagucagaaacuca

SEQ ID NO: 2225314 - RNA, 19 nt, Artificial Sequence
  Description of Artificial Sequence: Synthetic oligonucleotide
  Sense strand starting at position 2915 of SEQ ID NO: 1883906
ucugacuuccauuguauua

SEQ ID NO: 2225315 - RNA, 19 nt, Artificial Sequence
  Description of Artificial Sequence: Synthetic oligonucleotide
  Antisense strand to SEQ ID NO: 2225314
uaauacaauggaagucaga

SEQ ID NO: 2225316 - RNA, 19 nt, Artificial Sequence
  Description of Artificial Sequence: Synthetic oligonucleotide
  Sense strand starting at position 2929 of SEQ ID NO: 1883906
uauuaaaugcgugugcuuu

SEQ ID NO: 2225317 - RNA, 19 nt, Artificial Sequence
  Description of Artificial Sequence: Synthetic oligonucleotide
  Antisense strand to SEQ ID NO: 2225316
aaagcacacgcauuuaaua

SEQ ID NO: 2225318 - RNA, 19 nt, Artificial Sequence
  Description of Artificial Sequence: Synthetic oligonucleotide
  Sense strand starting at position 3029 of SEQ ID NO: 1883906
gguagauguucuguaaaua

SEQ ID NO: 2225319 - RNA, 19 nt, Artificial Sequence
  Description of Artificial Sequence: Synthetic oligonucleotide
  Antisense strand to SEQ ID NO: 2225318
uauuuacagaacaucuacc

SEQ ID NO: 2225320 - RNA, 19 nt, Artificial Sequence
  Description of Artificial Sequence: Synthetic oligonucleotide
  Sense strand starting at position 3089 of SEQ ID NO: 1883906
guguuauaugcggcuuacu

SEQ ID NO: 2225321 - RNA, 19 nt, Artificial Sequence
  Description of Artificial Sequence: Synthetic oligonucleotide
  Antisense strand to SEQ ID NO: 2225320
aguaagccgcauauaacac

SEQ ID NO: 2225322 - RNA, 19 nt, Artificial Sequence
  Description of Artificial Sequence: Synthetic oligonucleotide
  Sense strand starting at position 3091 of SEQ ID NO: 1883906
guuauaugcggcuuacucu

SEQ ID NO: 2225323 - RNA, 19 nt, Artificial Sequence
  Description of Artificial Sequence: Synthetic oligonucleotide
  Antisense strand to SEQ ID NO: 2225322
agaguaagccgcauauaac

SEQ ID NO: 2225324 - RNA, 19 nt, Artificial Sequence
  Description of Artificial Sequence: Synthetic oligonucleotide
  Sense strand starting at position 3120 of SEQ ID NO: 1883906
auaauuacagcugauguaa

SEQ ID NO: 2225325 - RNA, 19 nt, Artificial Sequence
  Description of Artificial Sequence: Synthetic oligonucleotide
  Antisense strand to SEQ ID NO: 2225324
uuacaucagcuguaauuau

SEQ ID NO: 2225326 - RNA, 19 nt, Artificial Sequence
  Description of Artificial Sequence: Synthetic oligonucleotide
  Sense strand starting at position 3152 of SEQ ID NO: 1883906
agauaaaguccuggaccua

SEQ ID NO: 2225327 - RNA, 19 nt, Artificial Sequence
  Description of Artificial Sequence: Synthetic oligonucleotide
  Antisense strand to SEQ ID NO: 2225326
uagguccaggacuuuaucu

SEQ ID NO: 2225328 - RNA, 19 nt, Artificial Sequence
  Description of Artificial Sequence: Synthetic oligonucleotide
  Sense strand starting at position 3242 of SEQ ID NO: 1883906
auauguuuguaugcaaaga

SEQ ID NO: 2225329 - RNA, 19 nt, Artificial Sequence
  Description of Artificial Sequence: Synthetic oligonucleotide
  Antisense strand to SEQ ID NO: 2225328
ucuuugcauacaaacauau

SEQ ID NO: 2225330 - RNA, 19 nt, Artificial Sequence
  Description of Artificial Sequence: Synthetic oligonucleotide
  Sense strand starting at position 3661 of SEQ ID NO: 1883906
acaaauugcuuucuuggau

SEQ ID NO: 2225331 - RNA, 19 nt, Artificial Sequence
  Description of Artificial Sequence: Synthetic oligonucleotide
  Antisense strand to SEQ ID NO: 2225330
auccaagaaagcaauuugu

SEQ ID NO: 2225332 - RNA, 19 nt, Artificial Sequence
  Description of Artificial Sequence: Synthetic oligonucleotide
  Sense strand starting at position 3670 of SEQ ID NO: 1883906
uuucuuggaucauuaggau

SEQ ID NO: 2225333 - RNA, 19 nt, Artificial Sequence
  Description of Artificial Sequence: Synthetic oligonucleotide
  Antisense strand to SEQ ID NO: 2225332
auccuaaugauccaagaaa

SEQ ID NO: 2225334 - RNA, 19 nt, Artificial Sequence
  Description of Artificial Sequence: Synthetic oligonucleotide
  Sense strand starting at position 3792 of SEQ ID NO: 1883906
gcuaaacugucaucuagag

SEQ ID NO: 2225335 - RNA, 19 nt, Artificial Sequence
  Description of Artificial Sequence: Synthetic oligonucleotide
  Antisense strand to SEQ ID NO: 2225334
cucuagaugacaguuuagc

SEQ ID NO: 2225336 - RNA, 19 nt, Artificial Sequence
  Description of Artificial Sequence: Synthetic oligonucleotide
  Sense strand starting at position 3800 of SEQ ID NO: 1883906
gucaucuagagcuauggaa

SEQ ID NO: 2225337 - RNA, 19 nt, Artificial Sequence
  Description of Artificial Sequence: Synthetic oligonucleotide
  Antisense strand to SEQ ID NO: 2225336
uuccauagcucuagaugac

SEQ ID NO: 2225338 - RNA, 19 nt, Artificial Sequence
  Description of Artificial Sequence: Synthetic oligonucleotide
  Sense strand starting at position 3813 of SEQ ID NO: 1883906
auggaaaucgaaugcuaaa

SEQ ID NO: 2225339 - RNA, 19 nt, Artificial Sequence
  Description of Artificial Sequence: Synthetic oligonucleotide
  Antisense strand to SEQ ID NO: 2225338
uuuagcauucgauuuccau

SEQ ID NO: 2225340 - RNA, 19 nt, Artificial Sequence
  Description of Artificial Sequence: Synthetic oligonucleotide
  Sense strand starting at position 3841 of SEQ ID NO: 1883906
acaggaauauaucauaaag

SEQ ID NO: 2225341 - RNA, 19 nt, Artificial Sequence
  Description of Artificial Sequence: Synthetic oligonucleotide
  Antisense strand to SEQ ID NO: 2225340
cuuuaugauauauuccugu

SEQ ID NO: 2225342 - RNA, 19 nt, Artificial Sequence
  Description of Artificial Sequence: Synthetic oligonucleotide
  Sense strand starting at position 3858 of SEQ ID NO: 1883906
aguaguguaauuugucauu

SEQ ID NO: 2225343 - RNA, 19 nt, Artificial Sequence
  Description of Artificial Sequence: Synthetic oligonucleotide
  Antisense strand to SEQ ID NO: 2225342
aaugacaaauuacacuacu

SEQ ID NO: 2225344 - RNA, 19 nt, Artificial Sequence
  Description of Artificial Sequence: Synthetic oligonucleotide
  Sense strand starting at position 3861 of SEQ ID NO: 1883906
aguguaauuugucauuucu

SEQ ID NO: 2225345 - RNA, 19 nt, Artificial Sequence
  Description of Artificial Sequence: Synthetic oligonucleotide
  Antisense strand to SEQ ID NO: 2225344
agaaaugacaaauuacacu

SEQ ID NO: 2225346 - RNA, 19 nt, Artificial Sequence
  Description of Artificial Sequence: Synthetic oligonucleotide
  Sense strand starting at position 3900 of SEQ ID NO: 1883906
gcaguuacuaguuaguaga

SEQ ID NO: 2225347 - RNA, 19 nt, Artificial Sequence
  Description of Artificial Sequence: Synthetic oligonucleotide
  Antisense strand to SEQ ID NO: 2225346
ucuacuaacuaguaacugc

SEQ ID NO: 2225348 - RNA, 19 nt, Artificial Sequence
  Description of Artificial Sequence: Synthetic oligonucleotide
  Sense strand starting at position 28 of SEQ ID NO: 1883907
gagacaagccuaugaguca

SEQ ID NO: 2225349 - RNA, 19 nt, Artificial Sequence
  Description of Artificial Sequence: Synthetic oligonucleotide
  Antisense strand to SEQ ID NO: 2225348
ugacucauaggcuugucuc

SEQ ID NO: 2225350 - RNA, 19 nt, Artificial Sequence
  Description of Artificial Sequence: Synthetic oligonucleotide
  Sense strand starting at position 29 of SEQ ID NO: 1883907
agacaagccuaugagucau

SEQ ID NO: 2225351 - RNA, 19 nt, Artificial Sequence
  Description of Artificial Sequence: Synthetic oligonucleotide
  Antisense strand to SEQ ID NO: 2225350
augacucauaggcuugucu

SEQ ID NO: 2225352 - RNA, 19 nt, Artificial Sequence
  Description of Artificial Sequence: Synthetic oligonucleotide
  Sense strand starting at position 31 of SEQ ID NO: 1883907
acaagccuaugagucauaa

SEQ ID NO: 2225353 - RNA, 19 nt, Artificial Sequence
  Description of Artificial Sequence: Synthetic oligonucleotide
  Antisense strand to SEQ ID NO: 2225352
uuaugacucauaggcuugu

SEQ ID NO: 2225354 - RNA, 19 nt, Artificial Sequence
  Description of Artificial Sequence: Synthetic oligonucleotide
  Sense strand starting at position 53 of SEQ ID NO: 1883907
cucauuaugcugugggcaa

SEQ ID NO: 2225355 - RNA, 19 nt, Artificial Sequence
  Description of Artificial Sequence: Synthetic oligonucleotide
  Antisense strand to SEQ ID NO: 2225354
uugcccacagcauaaugag

SEQ ID NO: 2225356 - RNA, 19 nt, Artificial Sequence
  Description of Artificial Sequence: Synthetic oligonucleotide
  Sense strand starting at position 55 of SEQ ID NO: 1883907
cauuaugcugugggcaaau

SEQ ID NO: 2225357 - RNA, 19 nt, Artificial Sequence
  Description of Artificial Sequence: Synthetic oligonucleotide
  Antisense strand to SEQ ID NO: 2225356
auuugcccacagcauaaug

SEQ ID NO: 2225358 - RNA, 19 nt, Artificial Sequence
  Description of Artificial Sequence: Synthetic oligonucleotide
  Sense strand starting at position 66 of SEQ ID NO: 1883907
gggcaaaugucaguguguu

SEQ ID NO: 2225359 - RNA, 19 nt, Artificial Sequence
  Description of Artificial Sequence: Synthetic oligonucleotide
  Antisense strand to SEQ ID NO: 2225358
aacacacugacauuugccc

SEQ ID NO: 2225360 - RNA, 19 nt, Artificial Sequence
  Description of Artificial Sequence: Synthetic oligonucleotide
  Sense strand starting at position 67 of SEQ ID NO: 1883907
ggcaaaugucaguguguuu

SEQ ID NO: 2225361 - RNA, 19 nt, Artificial Sequence
  Description of Artificial Sequence: Synthetic oligonucleotide
  Antisense strand to SEQ ID NO: 2225360
aaacacacugacauuugcc

SEQ ID NO: 2225362 - RNA, 19 nt, Artificial Sequence
  Description of Artificial Sequence: Synthetic oligonucleotide
  Sense strand starting at position 76 of SEQ ID NO: 1883907
caguguguuucuccucaca

SEQ ID NO: 2225363 - RNA, 19 nt, Artificial Sequence
  Description of Artificial Sequence: Synthetic oligonucleotide
  Antisense strand to SEQ ID NO: 2225362
ugugaggagaaacacacug

SEQ ID NO: 2225364 - RNA, 19 nt, Artificial Sequence
  Description of Artificial Sequence: Synthetic oligonucleotide
  Sense strand starting at position 118 of SEQ ID NO: 1883907
cccugaucaucuguuuaag

SEQ ID NO: 2225365 - RNA, 19 nt, Artificial Sequence
  Description of Artificial Sequence: Synthetic oligonucleotide
  Antisense strand to SEQ ID NO: 2225364
cuuaaacagaugaucaggg

SEQ ID NO: 2225366 - RNA, 19 nt, Artificial Sequence
  Description of Artificial Sequence: Synthetic oligonucleotide
  Sense strand starting at position 120 of SEQ ID NO: 1883907
cugaucaucuguuuaagau

SEQ ID NO: 2225367 - RNA, 19 nt, Artificial Sequence
  Description of Artificial Sequence: Synthetic oligonucleotide
  Antisense strand to SEQ ID NO: 2225366
aucuuaaacagaugaucag

SEQ ID NO: 2225368 - RNA, 19 nt, Artificial Sequence
  Description of Artificial Sequence: Synthetic oligonucleotide
  Sense strand starting at position 121 of SEQ ID NO: 1883907
ugaucaucuguuuaagauu

SEQ ID NO: 2225369 - RNA, 19 nt, Artificial Sequence
  Description of Artificial Sequence: Synthetic oligonucleotide
  Antisense strand to SEQ ID NO: 2225368
aaucuuaaacagaugauca

SEQ ID NO: 2225370 - RNA, 19 nt, Artificial Sequence
  Description of Artificial Sequence: Synthetic oligonucleotide
  Sense strand starting at position 603 of SEQ ID NO: 1883907
uuguuuauuccguguaccu

SEQ ID NO: 2225371 - RNA, 19 nt, Artificial Sequence
  Description of Artificial Sequence: Synthetic oligonucleotide
  Antisense strand to SEQ ID NO: 2225370
agguacacggaauaaacaa

SEQ ID NO: 2225372 - RNA, 19 nt, Artificial Sequence
  Description of Artificial Sequence: Synthetic oligonucleotide
  Sense strand starting at position 605 of SEQ ID NO: 1883907
guuuauuccguguaccuag

SEQ ID NO: 2225373 - RNA, 19 nt, Artificial Sequence
  Description of Artificial Sequence: Synthetic oligonucleotide
  Antisense strand to SEQ ID NO: 2225372
cuagguacacggaauaaac

SEQ ID NO: 2225374 - RNA, 19 nt, Artificial Sequence
  Description of Artificial Sequence: Synthetic oligonucleotide
  Sense strand starting at position 642 of SEQ ID NO: 1883907
gcagacacccaauaaguau

SEQ ID NO: 2225375 - RNA, 19 nt, Artificial Sequence
  Description of Artificial Sequence: Synthetic oligonucleotide
  Antisense strand to SEQ ID NO: 2225374
auacuuauugggugucugc

SEQ ID NO: 2225376 - RNA, 19 nt, Artificial Sequence
  Description of Artificial Sequence: Synthetic oligonucleotide
  Sense strand starting at position 664 of SEQ ID NO: 1883907
uuaaaugaauacuguggaa

SEQ ID NO: 2225377 - RNA, 19 nt, Artificial Sequence
  Description of Artificial Sequence: Synthetic oligonucleotide
  Antisense strand to SEQ ID NO: 2225376
uuccacaguauucauuuaa

SEQ ID NO: 2225378 - RNA, 19 nt, Artificial Sequence
  Description of Artificial Sequence: Synthetic oligonucleotide
  Sense strand starting at position 667 of SEQ ID NO: 1883907
aaugaauacuguggaauga

SEQ ID NO: 2225379 - RNA, 19 nt, Artificial Sequence
  Description of Artificial Sequence: Synthetic oligonucleotide
  Antisense strand to SEQ ID NO: 2225378
ucauuccacaguauucauu

SEQ ID NO: 2225380 - RNA, 19 nt, Artificial Sequence
  Description of Artificial Sequence: Synthetic oligonucleotide
  Sense strand starting at position 671 of SEQ ID NO: 1883907
aauacuguggaaugaguuu

SEQ ID NO: 2225381 - RNA, 19 nt, Artificial Sequence
  Description of Artificial Sequence: Synthetic oligonucleotide
  Antisense strand to SEQ ID NO: 2225380
aaacucauuccacaguauu

SEQ ID NO: 2225382 - RNA, 19 nt, Artificial Sequence
  Description of Artificial Sequence: Synthetic oligonucleotide
  Sense strand starting at position 730 of SEQ ID NO: 1883907
uguggagacugcucaagaa

SEQ ID NO: 2225383 - RNA, 19 nt, Artificial Sequence
  Description of Artificial Sequence: Synthetic oligonucleotide
  Antisense strand to SEQ ID NO: 2225382
uucuugagcagucuccaca

SEQ ID NO: 2225384 - RNA, 19 nt, Artificial Sequence
  Description of Artificial Sequence: Synthetic oligonucleotide
  Sense strand starting at position 1111 of SEQ ID NO: 1883907
gacaacagugucuagcaua

SEQ ID NO: 2225385 - RNA, 19 nt, Artificial Sequence
  Description of Artificial Sequence: Synthetic oligonucleotide
  Antisense strand to SEQ ID NO: 2225384
uaugcuagacacuguuguc

SEQ ID NO: 2225386 - RNA, 19 nt, Artificial Sequence
  Description of Artificial Sequence: Synthetic oligonucleotide
  Sense strand starting at position 1179 of SEQ ID NO: 1883907
uuuacaggugguuaacuau

SEQ ID NO: 2225387 - RNA, 19 nt, Artificial Sequence
  Description of Artificial Sequence: Synthetic oligonucleotide
  Antisense strand to SEQ ID NO: 2225386
auaguuaaccaccuguaaa

SEQ ID NO: 2225388 - RNA, 19 nt, Artificial Sequence
  Description of Artificial Sequence: Synthetic oligonucleotide
  Sense strand starting at position 1182 of SEQ ID NO: 1883907
acaggugguuaacuauaaa

SEQ ID NO: 2225389 - RNA, 19 nt, Artificial Sequence
  Description of Artificial Sequence: Synthetic oligonucleotide
  Antisense strand to SEQ ID NO: 2225388
uuuauaguuaaccaccugu

SEQ ID NO: 2225390 - RNA, 19 nt, Artificial Sequence
  Description of Artificial Sequence: Synthetic oligonucleotide
  Sense strand starting at position 1485 of SEQ ID NO: 1883907
uugucaggcuaguuucgaa

SEQ ID NO: 2225391 - RNA, 19 nt, Artificial Sequence
  Description of Artificial Sequence: Synthetic oligonucleotide
  Antisense strand to SEQ ID NO: 2225390
uucgaaacuagccugacaa

SEQ ID NO: 2225392 - RNA, 19 nt, Artificial Sequence
  Description of Artificial Sequence: Synthetic oligonucleotide
  Sense strand starting at position 1748 of SEQ ID NO: 1883907
ggacuaucaggccgggaga

SEQ ID NO: 2225393 - RNA, 19 nt, Artificial Sequence
  Description of Artificial Sequence: Synthetic oligonucleotide
  Antisense strand to SEQ ID NO: 2225392
ucucccggccugauagucc

SEQ ID NO: 2225394 - RNA, 19 nt, Artificial Sequence
  Description of Artificial Sequence: Synthetic oligonucleotide
  Sense strand starting at position 2005 of SEQ ID NO: 1883907
ucucuuccuccaugggaaa

SEQ ID NO: 2225395 - RNA, 19 nt, Artificial Sequence
  Description of Artificial Sequence: Synthetic oligonucleotide
  Antisense strand to SEQ ID NO: 2225394
uuucccauggaggaagaga

SEQ ID NO: 2225396 - RNA, 19 nt, Artificial Sequence
  Description of Artificial Sequence: Synthetic oligonucleotide
  Sense strand starting at position 2050 of SEQ ID NO: 1883907
gguugaccuuugcucacua

SEQ ID NO: 2225397 - RNA, 19 nt, Artificial Sequence
  Description of Artificial Sequence: Synthetic oligonucleotide
  Antisense strand to SEQ ID NO: 2225396
uagugagcaaaggucaacc

SEQ ID NO: 2225398 - RNA, 19 nt, Artificial Sequence
  Description of Artificial Sequence: Synthetic oligonucleotide
  Sense strand starting at position 2051 of SEQ ID NO: 1883907
guugaccuuugcucacuaa

SEQ ID NO: 2225399 - RNA, 19 nt, Artificial Sequence
  Description of Artificial Sequence: Synthetic oligonucleotide
  Antisense strand to SEQ ID NO: 2225398
uuagugagcaaaggucaac

SEQ ID NO: 2225400 - RNA, 19 nt, Artificial Sequence
  Description of Artificial Sequence: Synthetic oligonucleotide
  Sense strand starting at position 2392 of SEQ ID NO: 1883907
gcugcaaauuacucagcuu

SEQ ID NO: 2225401 - RNA, 19 nt, Artificial Sequence
  Description of Artificial Sequence: Synthetic oligonucleotide
  Antisense strand to SEQ ID NO: 2225400
aagcugaguaauuugcagc

SEQ ID NO: 2225402 - RNA, 19 nt, Artificial Sequence
  Description of Artificial Sequence: Synthetic oligonucleotide
  Sense strand starting at position 2403 of SEQ ID NO: 1883907
cucagcuucugucuuauau

SEQ ID NO: 2225403 - RNA, 19 nt, Artificial Sequence
  Description of Artificial Sequence: Synthetic oligonucleotide
  Antisense strand to SEQ ID NO: 2225402
auauaagacagaagcugag

SEQ ID NO: 2225404 - RNA, 19 nt, Artificial Sequence
  Description of Artificial Sequence: Synthetic oligonucleotide
  Sense strand starting at position 2413 of SEQ ID NO: 1883907
gucuuauauuccucaucug

SEQ ID NO: 2225405 - RNA, 19 nt, Artificial Sequence
  Description of Artificial Sequence: Synthetic oligonucleotide
  Antisense strand to SEQ ID NO: 2225404
cagaugaggaauauaagac

SEQ ID NO: 2225406 - RNA, 19 nt, Artificial Sequence
  Description of Artificial Sequence: Synthetic oligonucleotide
  Sense strand starting at position 3252 of SEQ ID NO: 1883907
aguucuugucucuguggaa

SEQ ID NO: 2225407 - RNA, 19 nt, Artificial Sequence
  Description of Artificial Sequence: Synthetic oligonucleotide
  Antisense strand to SEQ ID NO: 2225406
uuccacagagacaagaacu

SEQ ID NO: 2225408 - RNA, 19 nt, Artificial Sequence
  Description of Artificial Sequence: Synthetic oligonucleotide
  Sense strand starting at position 3286 of SEQ ID NO: 1883907
ggcagauaggccuguaaac

SEQ ID NO: 2225409 - RNA, 19 nt, Artificial Sequence
  Description of Artificial Sequence: Synthetic oligonucleotide
  Antisense strand to SEQ ID NO: 2225408
guuuacaggccuaucugcc

SEQ ID NO: 2225410 - RNA, 19 nt, Artificial Sequence
  Description of Artificial Sequence: Synthetic oligonucleotide
  Sense strand starting at position 3376 of SEQ ID NO: 1883907
ucaacuggcugauaaaugu

SEQ ID NO: 2225411 - RNA, 19 nt, Artificial Sequence
  Description of Artificial Sequence: Synthetic oligonucleotide
  Antisense strand to SEQ ID NO: 2225410
acauuuaucagccaguuga

SEQ ID NO: 2225412 - RNA, 19 nt, Artificial Sequence
  Description of Artificial Sequence: Synthetic oligonucleotide
  Sense strand starting at position 3380 of SEQ ID NO: 1883907
cuggcugauaaaugugaaa

SEQ ID NO: 2225413 - RNA, 19 nt, Artificial Sequence
  Description of Artificial Sequence: Synthetic oligonucleotide
  Antisense strand to SEQ ID NO: 2225412
uuucacauuuaucagccag

SEQ ID NO: 2225414 - RNA, 19 nt, Artificial Sequence
  Description of Artificial Sequence: Synthetic oligonucleotide
  Sense strand starting at position 3461 of SEQ ID NO: 1883907
ugguaaccaccuuguaagu

SEQ ID NO: 2225415 - RNA, 19 nt, Artificial Sequence
  Description of Artificial Sequence: Synthetic oligonucleotide
  Antisense strand to SEQ ID NO: 2225414
acuuacaaggugguuacca

SEQ ID NO: 2225416 - RNA, 19 nt, Artificial Sequence
  Description of Artificial Sequence: Synthetic oligonucleotide
  Sense strand starting at position 3466 of SEQ ID NO: 1883907
accaccuuguaagugaauu

SEQ ID NO: 2225417 - RNA, 19 nt, Artificial Sequence
  Description of Artificial Sequence: Synthetic oligonucleotide
  Antisense strand to SEQ ID NO: 2225416
aauucacuuacaagguggu

SEQ ID NO: 2225418 - RNA, 19 nt, Artificial Sequence
  Description of Artificial Sequence: Synthetic oligonucleotide
  Sense strand starting at position 3843 of SEQ ID NO: 1883907
augugagaauguuauugua

SEQ ID NO: 2225419 - RNA, 19 nt, Artificial Sequence
  Description of Artificial Sequence: Synthetic oligonucleotide
  Antisense strand to SEQ ID NO: 2225418
uacaauaacauucucacau

SEQ ID NO: 2225420 - RNA, 19 nt, Artificial Sequence
  Description of Artificial Sequence: Synthetic oligonucleotide
  Sense strand starting at position 3845 of SEQ ID NO: 1883907
gugagaauguuauuguauu

SEQ ID NO: 2225421 - RNA, 19 nt, Artificial Sequence
  Description of Artificial Sequence: Synthetic oligonucleotide
  Antisense strand to SEQ ID NO: 2225420
aauacaauaacauucucac

SEQ ID NO: 2225422 - RNA, 19 nt, Artificial Sequence
  Description of Artificial Sequence: Synthetic oligonucleotide
  Sense strand starting at position 3911 of SEQ ID NO: 1883907
ucuuccaagugucuagauu

SEQ ID NO: 2225423 - RNA, 19 nt, Artificial Sequence
  Description of Artificial Sequence: Synthetic oligonucleotide
  Antisense strand to SEQ ID NO: 2225422
aaucuagacacuuggaaga

SEQ ID NO: 2225424 - RNA, 19 nt, Artificial Sequence
  Description of Artificial Sequence: Synthetic oligonucleotide
  Sense strand starting at position 3929 of SEQ ID NO: 1883907
ucauaugucuccguugaau

SEQ ID NO: 2225425 - RNA, 19 nt, Artificial Sequence
  Description of Artificial Sequence: Synthetic oligonucleotide
  Antisense strand to SEQ ID NO: 2225424
auucaacggagacauauga

SEQ ID NO: 2225426 - RNA, 19 nt, Artificial Sequence
  Description of Artificial Sequence: Synthetic oligonucleotide
  Sense strand starting at position 3931 of SEQ ID NO: 1883907
auaugucuccguugaaucu

SEQ ID NO: 2225427 - RNA, 19 nt, Artificial Sequence
  Description of Artificial Sequence: Synthetic oligonucleotide
  Antisense strand to SEQ ID NO: 2225426
agauucaacggagacauau

SEQ ID NO: 2225428 - RNA, 19 nt, Artificial Sequence
  Description of Artificial Sequence: Synthetic oligonucleotide
  Sense strand starting at position 69 of SEQ ID NO: 1883908
ugcugaugucauugacaaa

SEQ ID NO: 2225429 - RNA, 19 nt, Artificial Sequence
  Description of Artificial Sequence: Synthetic oligonucleotide
  Antisense strand to SEQ ID NO: 2225428
uuugucaaugacaucagca

SEQ ID NO: 2225430 - RNA, 19 nt, Artificial Sequence
  Description of Artificial Sequence: Synthetic oligonucleotide
  Sense strand starting at position 70 of SEQ ID NO: 1883908
gcugaugucauugacaaag

SEQ ID NO: 2225431 - RNA, 19 nt, Artificial Sequence
  Description of Artificial Sequence: Synthetic oligonucleotide
  Antisense strand to SEQ ID NO: 2225430
cuuugucaaugacaucagc

SEQ ID NO: 2225432 - RNA, 19 nt, Artificial Sequence
  Description of Artificial Sequence: Synthetic oligonucleotide
  Sense strand starting at position 236 of SEQ ID NO: 1883908
gcucuccaccugugaagaa

SEQ ID NO: 2225433 - RNA, 19 nt, Artificial Sequence
  Description of Artificial Sequence: Synthetic oligonucleotide
  Antisense strand to SEQ ID NO: 2225432
uucuucacagguggagagc

SEQ ID NO: 2225434 - RNA, 19 nt, Artificial Sequence
  Description of Artificial Sequence: Synthetic oligonucleotide
  Sense strand starting at position 609 of SEQ ID NO: 1883908
uguugauacagaugguuga

SEQ ID NO: 2225435 - RNA, 19 nt, Artificial Sequence
  Description of Artificial Sequence: Synthetic oligonucleotide
  Antisense strand to SEQ ID NO: 2225434
ucaaccaucuguaucaaca

SEQ ID NO: 2225436 - RNA, 19 nt, Artificial Sequence
  Description of Artificial Sequence: Synthetic oligonucleotide
  Sense strand starting at position 620 of SEQ ID NO: 1883908
augguugagguguagcaaa

SEQ ID NO: 2225437 - RNA, 19 nt, Artificial Sequence
  Description of Artificial Sequence: Synthetic oligonucleotide
  Antisense strand to SEQ ID NO: 2225436
uuugcuacaccucaaccau

SEQ ID NO: 2225438 - RNA, 19 nt, Artificial Sequence
  Description of Artificial Sequence: Synthetic oligonucleotide
  Sense strand starting at position 680 of SEQ ID NO: 1883908
gaagcuuugcaauagacga

SEQ ID NO: 2225439 - RNA, 19 nt, Artificial Sequence
  Description of Artificial Sequence: Synthetic oligonucleotide
  Antisense strand to SEQ ID NO: 2225438
ucgucuauugcaaagcuuc

SEQ ID NO: 2225440 - RNA, 19 nt, Artificial Sequence
  Description of Artificial Sequence: Synthetic oligonucleotide
  Sense strand starting at position 758 of SEQ ID NO: 1883908
ccacuuuagagauggguaa

SEQ ID NO: 2225441 - RNA, 19 nt, Artificial Sequence
  Description of Artificial Sequence: Synthetic oligonucleotide
  Antisense strand to SEQ ID NO: 2225440
uuacccaucucuaaagugg

SEQ ID NO: 2225442 - RNA, 19 nt, Artificial Sequence
  Description of Artificial Sequence: Synthetic oligonucleotide
  Sense strand starting at position 790 of SEQ ID NO: 1883908
aaggguaaguaugugacau

SEQ ID NO: 2225443 - RNA, 19 nt, Artificial Sequence
  Description of Artificial Sequence: Synthetic oligonucleotide
  Antisense strand to SEQ ID NO: 2225442
augucacauacuuacccuu

SEQ ID NO: 2225444 - RNA, 19 nt, Artificial Sequence
  Description of Artificial Sequence: Synthetic oligonucleotide
  Sense strand starting at position 791 of SEQ ID NO: 1883908
aggguaaguaugugacaug

SEQ ID NO: 2225445 - RNA, 19 nt, Artificial Sequence
  Description of Artificial Sequence: Synthetic oligonucleotide
  Antisense strand to SEQ ID NO: 2225444
caugucacauacuuacccu

SEQ ID NO: 2225446 - RNA, 19 nt, Artificial Sequence
  Description of Artificial Sequence: Synthetic oligonucleotide
  Sense strand starting at position 1149 of SEQ ID NO: 1883908
cuuugugacuugguuuaga

SEQ ID NO: 2225447 - RNA, 19 nt, Artificial Sequence
  Description of Artificial Sequence: Synthetic oligonucleotide
  Antisense strand to SEQ ID NO: 2225446
ucuaaaccaagucacaaag

SEQ ID NO: 2225448 - RNA, 19 nt, Artificial Sequence
  Description of Artificial Sequence: Synthetic oligonucleotide
  Sense strand starting at position 1382 of SEQ ID NO: 1883908
gggccagucaucuccgcuu

SEQ ID NO: 2225449 - RNA, 19 nt, Artificial Sequence
  Description of Artificial Sequence: Synthetic oligonucleotide
  Antisense strand to SEQ ID NO: 2225448
aagcggagaugacuggccc

SEQ ID NO: 2225450 - RNA, 19 nt, Artificial Sequence
  Description of Artificial Sequence: Synthetic oligonucleotide
  Sense strand starting at position 1407 of SEQ ID NO: 1883908
gccacagucagggaagcau

SEQ ID NO: 2225451 - RNA, 19 nt, Artificial Sequence
  Description of Artificial Sequence: Synthetic oligonucleotide
  Antisense strand to SEQ ID NO: 2225450
augcuucccugacuguggc

SEQ ID NO: 2225452 - RNA, 19 nt, Artificial Sequence
  Description of Artificial Sequence: Synthetic oligonucleotide
  Sense strand starting at position 1871 of SEQ ID NO: 1883908
gcagauuauucugcuccaa

SEQ ID NO: 2225453 - RNA, 19 nt, Artificial Sequence
  Description of Artificial Sequence: Synthetic oligonucleotide
  Antisense strand to SEQ ID NO: 2225452
uuggagcagaauaaucugc

SEQ ID NO: 2225454 - RNA, 19 nt, Artificial Sequence
  Description of Artificial Sequence: Synthetic oligonucleotide
  Sense strand starting at position 1906 of SEQ ID NO: 1883908
ggcuccuuacucgaggaau

SEQ ID NO: 2225455 - RNA, 19 nt, Artificial Sequence
  Description of Artificial Sequence: Synthetic oligonucleotide
  Antisense strand to SEQ ID NO: 2225454
auuccucgaguaaggagcc

SEQ ID NO: 2225456 - RNA, 19 nt, Artificial Sequence
  Description of Artificial Sequence: Synthetic oligonucleotide
  Sense strand starting at position 1948 of SEQ ID NO: 1883908
gaugaugaaacgggcuauu

SEQ ID NO: 2225457 - RNA, 19 nt, Artificial Sequence
  Description of Artificial Sequence: Synthetic oligonucleotide
  Antisense strand to SEQ ID NO: 2225456
aauagcccguuucaucauc

SEQ ID NO: 2225458 - RNA, 19 nt, Artificial Sequence
  Description of Artificial Sequence: Synthetic oligonucleotide
  Sense strand starting at position 2092 of SEQ ID NO: 1883908
cuggaauagcuuuagcaau

SEQ ID NO: 2225459 - RNA, 19 nt, Artificial Sequence
  Description of Artificial Sequence: Synthetic oligonucleotide
  Antisense strand to SEQ ID NO: 2225458
auugcuaaagcuauuccag

SEQ ID NO: 2225460 - RNA, 19 nt, Artificial Sequence
  Description of Artificial Sequence: Synthetic oligonucleotide
  Sense strand starting at position 2094 of SEQ ID NO: 1883908
ggaauagcuuuagcaauca

SEQ ID NO: 2225461 - RNA, 19 nt, Artificial Sequence
  Description of Artificial Sequence: Synthetic oligonucleotide
  Antisense strand to SEQ ID NO: 2225460
ugauugcuaaagcuauucc

SEQ ID NO: 2225462 - RNA, 19 nt, Artificial Sequence
  Description of Artificial Sequence: Synthetic oligonucleotide
  Sense strand starting at position 2109 of SEQ ID NO: 1883908
aucauucuggauugaaguu

SEQ ID NO: 2225463 - RNA, 19 nt, Artificial Sequence
  Description of Artificial Sequence: Synthetic oligonucleotide
  Antisense strand to SEQ ID NO: 2225462
aacuucaauccagaaugau

SEQ ID NO: 2225464 - RNA, 19 nt, Artificial Sequence
  Description of Artificial Sequence: Synthetic oligonucleotide
  Sense strand starting at position 2185 of SEQ ID NO: 1883908
uguuacucguggcugauuu

SEQ ID NO: 2225465 - RNA, 19 nt, Artificial Sequence
  Description of Artificial Sequence: Synthetic oligonucleotide
  Antisense strand to SEQ ID NO: 2225464
aaaucagccacgaguaaca

SEQ ID NO: 2225466 - RNA, 19 nt, Artificial Sequence
  Description of Artificial Sequence: Synthetic oligonucleotide
  Sense strand starting at position 2232 of SEQ ID NO: 1883908
uguuuaaucugacuguuac

SEQ ID NO: 2225467 - RNA, 19 nt, Artificial Sequence
  Description of Artificial Sequence: Synthetic oligonucleotide
  Antisense strand to SEQ ID NO: 2225466
guaacagucagauuaaaca

SEQ ID NO: 2225468 - RNA, 19 nt, Artificial Sequence
  Description of Artificial Sequence: Synthetic oligonucleotide
  Sense strand starting at position 2233 of SEQ ID NO: 1883908
guuuaaucugacuguuacu

SEQ ID NO: 2225469 - RNA, 19 nt, Artificial Sequence
  Description of Artificial Sequence: Synthetic oligonucleotide
  Antisense strand to SEQ ID NO: 2225468
aguaacagucagauuaaac

SEQ ID NO: 2225470 - RNA, 19 nt, Artificial Sequence
  Description of Artificial Sequence: Synthetic oligonucleotide
  Sense strand starting at position 2403 of SEQ ID NO: 1883908
agguuugugagcuagagga

SEQ ID NO: 2225471 - RNA, 19 nt, Artificial Sequence
  Description of Artificial Sequence: Synthetic oligonucleotide
  Antisense strand to SEQ ID NO: 2225470
uccucuagcucacaaaccu

SEQ ID NO: 2225472 - RNA, 19 nt, Artificial Sequence
  Description of Artificial Sequence: Synthetic oligonucleotide
  Sense strand starting at position 2788 of SEQ ID NO: 1883908
ugacuuuguccuuaggugu

SEQ ID NO: 2225473 - RNA, 19 nt, Artificial Sequence
  Description of Artificial Sequence: Synthetic oligonucleotide
  Antisense strand to SEQ ID NO: 2225472
acaccuaaggacaaaguca

SEQ ID NO: 2225474 - RNA, 19 nt, Artificial Sequence
  Description of Artificial Sequence: Synthetic oligonucleotide
  Sense strand starting at position 2815 of SEQ ID NO: 1883908
agggaucucugcucccaca

SEQ ID NO: 2225475 - RNA, 19 nt, Artificial Sequence
  Description of Artificial Sequence: Synthetic oligonucleotide
  Antisense strand to SEQ ID NO: 2225474
ugugggagcagagaucccu

SEQ ID NO: 2225476 - RNA, 19 nt, Artificial Sequence
  Description of Artificial Sequence: Synthetic oligonucleotide
  Sense strand starting at position 2858 of SEQ ID NO: 1883908
ggccacugcgcugucaaau

SEQ ID NO: 2225477 - RNA, 19 nt, Artificial Sequence
  Description of Artificial Sequence: Synthetic oligonucleotide
  Antisense strand to SEQ ID NO: 2225476
auuugacagcgcaguggcc

SEQ ID NO: 2225478 - RNA, 19 nt, Artificial Sequence
  Description of Artificial Sequence: Synthetic oligonucleotide
  Sense strand starting at position 2859 of SEQ ID NO: 1883908
gccacugcgcugucaaaug

SEQ ID NO: 2225479 - RNA, 19 nt, Artificial Sequence
  Description of Artificial Sequence: Synthetic oligonucleotide
  Antisense strand to SEQ ID NO: 2225478
cauuugacagcgcaguggc

SEQ ID NO: 2225480 - RNA, 19 nt, Artificial Sequence
  Description of Artificial Sequence: Synthetic oligonucleotide
  Sense strand starting at position 3110 of SEQ ID NO: 1883908
guaugcuugacugagucua

SEQ ID NO: 2225481 - RNA, 19 nt, Artificial Sequence
  Description of Artificial Sequence: Synthetic oligonucleotide
  Antisense strand to SEQ ID NO: 2225480
uagacucagucaagcauac

SEQ ID NO: 2225482 - RNA, 19 nt, Artificial Sequence
  Description of Artificial Sequence: Synthetic oligonucleotide
  Sense strand starting at position 3112 of SEQ ID NO: 1883908
augcuugacugagucuaaa

SEQ ID NO: 2225483 - RNA, 19 nt, Artificial Sequence
  Description of Artificial Sequence: Synthetic oligonucleotide
  Antisense strand to SEQ ID NO: 2225482
uuuagacucagucaagcau

SEQ ID NO: 2225484 - RNA, 19 nt, Artificial Sequence
  Description of Artificial Sequence: Synthetic oligonucleotide
  Sense strand starting at position 3201 of SEQ ID NO: 1883908
gcuagauagccuuaagaaa

SEQ ID NO: 2225485 - RNA, 19 nt, Artificial Sequence
  Description of Artificial Sequence: Synthetic oligonucleotide
  Antisense strand to SEQ ID NO: 2225484
uuucuuaaggcuaucuagc

SEQ ID NO: 2225486 - RNA, 19 nt, Artificial Sequence
  Description of Artificial Sequence: Synthetic oligonucleotide
  Sense strand starting at position 3239 of SEQ ID NO: 1883908
cagguagcucccuaaguau

SEQ ID NO: 2225487 - RNA, 19 nt, Artificial Sequence
  Description of Artificial Sequence: Synthetic oligonucleotide
  Antisense strand to SEQ ID NO: 2225486
auacuuagggagcuaccug

SEQ ID NO: 2225488 - RNA, 19 nt, Artificial Sequence
  Description of Artificial Sequence: Synthetic oligonucleotide
  Sense strand starting at position 3271 of SEQ ID NO: 1883908
gcagauuaaacagaugugu

SEQ ID NO: 2225489 - RNA, 19 nt, Artificial Sequence
  Description of Artificial Sequence: Synthetic oligonucleotide
  Antisense strand to SEQ ID NO: 2225488
acacaucuguuuaaucugc

SEQ ID NO: 2225490 - RNA, 19 nt, Artificial Sequence
  Description of Artificial Sequence: Synthetic oligonucleotide
  Sense strand starting at position 3273 of SEQ ID NO: 1883908
agauuaaacagaugugugu

SEQ ID NO: 2225491 - RNA, 19 nt, Artificial Sequence
  Description of Artificial Sequence: Synthetic oligonucleotide
  Antisense strand to SEQ ID NO: 2225490
acacacaucuguuuaaucu

SEQ ID NO: 2225492 - RNA, 19 nt, Artificial Sequence
  Description of Artificial Sequence: Synthetic oligonucleotide
  Sense strand starting at position 3277 of SEQ ID NO: 1883908
uaaacagauguguguagua

SEQ ID NO: 2225493 - RNA, 19 nt, Artificial Sequence
  Description of Artificial Sequence: Synthetic oligonucleotide
  Antisense strand to SEQ ID NO: 2225492
uacuacacacaucuguuua

SEQ ID NO: 2225494 - RNA, 19 nt, Artificial Sequence
  Description of Artificial Sequence: Synthetic oligonucleotide
  Sense strand starting at position 3279 of SEQ ID NO: 1883908
aacagauguguguaguaaa

SEQ ID NO: 2225495 - RNA, 19 nt, Artificial Sequence
  Description of Artificial Sequence: Synthetic oligonucleotide
  Antisense strand to SEQ ID NO: 2225494
uuuacuacacacaucuguu

SEQ ID NO: 2225496 - RNA, 19 nt, Artificial Sequence
  Description of Artificial Sequence: Synthetic oligonucleotide
  Sense strand starting at position 3419 of SEQ ID NO: 1883908
uugcauauugucuaaagcu

SEQ ID NO: 2225497 - RNA, 19 nt, Artificial Sequence
  Description of Artificial Sequence: Synthetic oligonucleotide
  Antisense strand to SEQ ID NO: 2225496
agcuuuagacaauaugcaa

SEQ ID NO: 2225498 - RNA, 19 nt, Artificial Sequence
  Description of Artificial Sequence: Synthetic oligonucleotide
  Sense strand starting at position 3542 of SEQ ID NO: 1883908
acaucuugagaugggucaa

SEQ ID NO: 2225499 - RNA, 19 nt, Artificial Sequence
  Description of Artificial Sequence: Synthetic oligonucleotide
  Antisense strand to SEQ ID NO: 2225498
uugacccaucucaagaugu

SEQ ID NO: 2225500 - RNA, 19 nt, Artificial Sequence
  Description of Artificial Sequence: Synthetic oligonucleotide
  Sense strand starting at position 3604 of SEQ ID NO: 1883908
cuguuagaauaguuuguaa

SEQ ID NO: 2225501 - RNA, 19 nt, Artificial Sequence
  Description of Artificial Sequence: Synthetic oligonucleotide
  Antisense strand to SEQ ID NO: 2225500
uuacaaacuauucuaacag

SEQ ID NO: 2225502 - RNA, 19 nt, Artificial Sequence
  Description of Artificial Sequence: Synthetic oligonucleotide
  Sense strand starting at position 3743 of SEQ ID NO: 1883908
uuagcuuagcaguagaauc

SEQ ID NO: 2225503 - RNA, 19 nt, Artificial Sequence
  Description of Artificial Sequence: Synthetic oligonucleotide
  Antisense strand to SEQ ID NO: 2225502
gauucuacugcuaagcuaa

SEQ ID NO: 2225504 - RNA, 19 nt, Artificial Sequence
  Description of Artificial Sequence: Synthetic oligonucleotide
  Sense strand starting at position 3751 of SEQ ID NO: 1883908
gcaguagaaucaccagaca

SEQ ID NO: 2225505 - RNA, 19 nt, Artificial Sequence
  Description of Artificial Sequence: Synthetic oligonucleotide
  Antisense strand to SEQ ID NO: 2225504
ugucuggugauucuacugc

SEQ ID NO: 2225506 - RNA, 19 nt, Artificial Sequence
  Description of Artificial Sequence: Synthetic oligonucleotide
  Sense strand starting at position 3878 of SEQ ID NO: 1883908
ggucucugggaacaaguuu

SEQ ID NO: 2225507 - RNA, 19 nt, Artificial Sequence
  Description of Artificial Sequence: Synthetic oligonucleotide
  Antisense strand to SEQ ID NO: 2225506
aaacuuguucccagagacc

SEQ ID NO: 2225508 - RNA, 19 nt, Artificial Sequence
  Description of Artificial Sequence: Synthetic oligonucleotide
  Sense strand starting at position 189 of SEQ ID NO: 1883909
agugaguguccggguggau

SEQ ID NO: 2225509 - RNA, 19 nt, Artificial Sequence
  Description of Artificial Sequence: Synthetic oligonucleotide
  Antisense strand to SEQ ID NO: 2225508
auccacccggacacucacu

SEQ ID NO: 2225510 - RNA, 19 nt, Artificial Sequence
  Description of Artificial Sequence: Synthetic oligonucleotide
  Sense strand starting at position 191 of SEQ ID NO: 1883909
ugaguguccggguggauaa

SEQ ID NO: 2225511 - RNA, 19 nt, Artificial Sequence
  Description of Artificial Sequence: Synthetic oligonucleotide
  Antisense strand to SEQ ID NO: 2225510
uuauccacccggacacuca

SEQ ID NO: 2225512 - RNA, 19 nt, Artificial Sequence
  Description of Artificial Sequence: Synthetic oligonucleotide
  Sense strand starting at position 260 of SEQ ID NO: 1883909
gccagaaucccuggaguuc

SEQ ID NO: 2225513 - RNA, 19 nt, Artificial Sequence
  Description of Artificial Sequence: Synthetic oligonucleotide
  Antisense strand to SEQ ID NO: 2225512
gaacuccagggauucuggc

SEQ ID NO: 2225514 - RNA, 19 nt, Artificial Sequence
  Description of Artificial Sequence: Synthetic oligonucleotide
  Sense strand starting at position 271 of SEQ ID NO: 1883909
uggaguucgcaaggacauu

SEQ ID NO: 2225515 - RNA, 19 nt, Artificial Sequence
  Description of Artificial Sequence: Synthetic oligonucleotide
  Antisense strand to SEQ ID NO: 2225514
aauguccuugcgaacucca

SEQ ID NO: 2225516 - RNA, 19 nt, Artificial Sequence
  Description of Artificial Sequence: Synthetic oligonucleotide
  Sense strand starting at position 272 of SEQ ID NO: 1883909
ggaguucgcaaggacauua

SEQ ID NO: 2225517 - RNA, 19 nt, Artificial Sequence
  Description of Artificial Sequence: Synthetic oligonucleotide
  Antisense strand to SEQ ID NO: 2225516
uaauguccuugcgaacucc

SEQ ID NO: 2225518 - RNA, 19 nt, Artificial Sequence
  Description of Artificial Sequence: Synthetic oligonucleotide
  Sense strand starting at position 277 of SEQ ID NO: 1883909
ucgcaaggacauuaucuuu

SEQ ID NO: 2225519 - RNA, 19 nt, Artificial Sequence
  Description of Artificial Sequence: Synthetic oligonucleotide
  Antisense strand to SEQ ID NO: 2225518
aaagauaauguccuugcga

SEQ ID NO: 2225520 - RNA, 19 nt, Artificial Sequence
  Description of Artificial Sequence: Synthetic oligonucleotide
  Sense strand starting at position 340 of SEQ ID NO: 1883909
gccucagauuccucaucag

SEQ ID NO: 2225521 - RNA, 19 nt, Artificial Sequence
  Description of Artificial Sequence: Synthetic oligonucleotide
  Antisense strand to SEQ ID NO: 2225520
cugaugaggaaucugaggc

SEQ ID NO: 2225522 - RNA, 19 nt, Artificial Sequence
  Description of Artificial Sequence: Synthetic oligonucleotide
  Sense strand starting at position 343 of SEQ ID NO: 1883909
ucagauuccucaucaguga

SEQ ID NO: 2225523 - RNA, 19 nt, Artificial Sequence
  Description of Artificial Sequence: Synthetic oligonucleotide
  Antisense strand to SEQ ID NO: 2225522
ucacugaugaggaaucuga

SEQ ID NO: 2225524 - RNA, 19 nt, Artificial Sequence
  Description of Artificial Sequence: Synthetic oligonucleotide
  Sense strand starting at position 387 of SEQ ID NO: 1883909
ugcucuuuccuagggaugu

SEQ ID NO: 2225525 - RNA, 19 nt, Artificial Sequence
  Description of Artificial Sequence: Synthetic oligonucleotide
  Antisense strand to SEQ ID NO: 2225524
acaucccuaggaaagagca

SEQ ID NO: 2225526 - RNA, 19 nt, Artificial Sequence
  Description of Artificial Sequence: Synthetic oligonucleotide
  Sense strand starting at position 447 of SEQ ID NO: 1883909
gcgugaaacucuccaucuc

SEQ ID NO: 2225527 - RNA, 19 nt, Artificial Sequence
  Description of Artificial Sequence: Synthetic oligonucleotide
  Antisense strand to SEQ ID NO: 2225526
gagauggagaguuucacgc

SEQ ID NO: 2225528 - RNA, 19 nt, Artificial Sequence
  Description of Artificial Sequence: Synthetic oligonucleotide
  Sense strand starting at position 448 of SEQ ID NO: 1883909
cgugaaacucuccaucucu

SEQ ID NO: 2225529 - RNA, 19 nt, Artificial Sequence
  Description of Artificial Sequence: Synthetic oligonucleotide
  Antisense strand to SEQ ID NO: 2225528
agagauggagaguuucacg

SEQ ID NO: 2225530 - RNA, 19 nt, Artificial Sequence
  Description of Artificial Sequence: Synthetic oligonucleotide
  Sense strand starting at position 496 of SEQ ID NO: 1883909
cgauucuccugccugcaaa

SEQ ID NO: 2225531 - RNA, 19 nt, Artificial Sequence
  Description of Artificial Sequence: Synthetic oligonucleotide
  Antisense strand to SEQ ID NO: 2225530
uuugcaggcaggagaaucg

SEQ ID NO: 2225532 - RNA, 19 nt, Artificial Sequence
  Description of Artificial Sequence: Synthetic oligonucleotide
  Sense strand starting at position 499 of SEQ ID NO: 1883909
uucuccugccugcaaagau

SEQ ID NO: 2225533 - RNA, 19 nt, Artificial Sequence
  Description of Artificial Sequence: Synthetic oligonucleotide
  Antisense strand to SEQ ID NO: 2225532
aucuuugcaggcaggagaa

SEQ ID NO: 2225534 - RNA, 19 nt, Artificial Sequence
  Description of Artificial Sequence: Synthetic oligonucleotide
  Sense strand starting at position 540 of SEQ ID NO: 1883909
gauaaagugccuugcugag

SEQ ID NO: 2225535 - RNA, 19 nt, Artificial Sequence
  Description of Artificial Sequence: Synthetic oligonucleotide
  Antisense strand to SEQ ID NO: 2225534
cucagcaaggcacuuuauc

SEQ ID NO: 2225536 - RNA, 19 nt, Artificial Sequence
  Description of Artificial Sequence: Synthetic oligonucleotide
  Sense strand starting at position 620 of SEQ ID NO: 1883909
aguggauaagggugauucu

SEQ ID NO: 2225537 - RNA, 19 nt, Artificial Sequence
  Description of Artificial Sequence: Synthetic oligonucleotide
  Antisense strand to SEQ ID NO: 2225536
agaaucacccuuauccacu

SEQ ID NO: 2225538 - RNA, 19 nt, Artificial Sequence
  Description of Artificial Sequence: Synthetic oligonucleotide
  Sense strand starting at position 623 of SEQ ID NO: 1883909
ggauaagggugauucugca

SEQ ID NO: 2225539 - RNA, 19 nt, Artificial Sequence
  Description of Artificial Sequence: Synthetic oligonucleotide
  Antisense strand to SEQ ID NO: 2225538
ugcagaaucacccuuaucc

SEQ ID NO: 2225540 - RNA, 19 nt, Artificial Sequence
  Description of Artificial Sequence: Synthetic oligonucleotide
  Sense strand starting at position 627 of SEQ ID NO: 1883909
aagggugauucugcacuaa

SEQ ID NO: 2225541 - RNA, 19 nt, Artificial Sequence
  Description of Artificial Sequence: Synthetic oligonucleotide
  Antisense strand to SEQ ID NO: 2225540
uuagugcagaaucacccuu

SEQ ID NO: 2225542 - RNA, 19 nt, Artificial Sequence
  Description of Artificial Sequence: Synthetic oligonucleotide
  Sense strand starting at position 631 of SEQ ID NO: 1883909
gugauucugcacuaaguga

SEQ ID NO: 2225543 - RNA, 19 nt, Artificial Sequence
  Description of Artificial Sequence: Synthetic oligonucleotide
  Antisense strand to SEQ ID NO: 2225542
ucacuuagugcagaaucac

SEQ ID NO: 2225544 - RNA, 19 nt, Artificial Sequence
  Description of Artificial Sequence: Synthetic oligonucleotide
  Sense strand starting at position 826 of SEQ ID NO: 1883909
ccagcucauccggagauua

SEQ ID NO: 2225545 - RNA, 19 nt, Artificial Sequence
  Description of Artificial Sequence: Synthetic oligonucleotide
  Antisense strand to SEQ ID NO: 2225544
uaaucuccggaugagcugg

SEQ ID NO: 2225546 - RNA, 19 nt, Artificial Sequence
  Description of Artificial Sequence: Synthetic oligonucleotide
  Sense strand starting at position 828 of SEQ ID NO: 1883909
agcucauccggagauuauu

SEQ ID NO: 2225547 - RNA, 19 nt, Artificial Sequence
  Description of Artificial Sequence: Synthetic oligonucleotide
  Antisense strand to SEQ ID NO: 2225546
aauaaucuccggaugagcu

SEQ ID NO: 2225548 - RNA, 19 nt, Artificial Sequence
  Description of Artificial Sequence: Synthetic oligonucleotide
  Sense strand starting at position 1412 of SEQ ID NO: 1883909
cuaauuagcucccugugga

SEQ ID NO: 2225549 - RNA, 19 nt, Artificial Sequence
  Description of Artificial Sequence: Synthetic oligonucleotide
  Antisense strand to SEQ ID NO: 2225548
uccacagggagcuaauuag

SEQ ID NO: 2225550 - RNA, 19 nt, Artificial Sequence
  Description of Artificial Sequence: Synthetic oligonucleotide
  Sense strand starting at position 2145 of SEQ ID NO: 1883909
ggccaugcuccacaccaau

SEQ ID NO: 2225551 - RNA, 19 nt, Artificial Sequence
  Description of Artificial Sequence: Synthetic oligonucleotide
  Antisense strand to SEQ ID NO: 2225550
auugguguggagcauggcc

SEQ ID NO: 2225552 - RNA, 19 nt, Artificial Sequence
  Description of Artificial Sequence: Synthetic oligonucleotide
  Sense strand starting at position 2377 of SEQ ID NO: 1883909
gcccuucucccucagaguu

SEQ ID NO: 2225553 - RNA, 19 nt, Artificial Sequence
  Description of Artificial Sequence: Synthetic oligonucleotide
  Antisense strand to SEQ ID NO: 2225552
aacucugagggagaagggc

SEQ ID NO: 2225554 - RNA, 19 nt, Artificial Sequence
  Description of Artificial Sequence: Synthetic oligonucleotide
  Sense strand starting at position 2387 of SEQ ID NO: 1883909
cucagaguuguccauugac

SEQ ID NO: 2225555 - RNA, 19 nt, Artificial Sequence
  Description of Artificial Sequence: Synthetic oligonucleotide
  Antisense strand to SEQ ID NO: 2225554
gucaauggacaacucugag

SEQ ID NO: 2225556 - RNA, 19 nt, Artificial Sequence
  Description of Artificial Sequence: Synthetic oligonucleotide
  Sense strand starting at position 2538 of SEQ ID NO: 1883909
ccaacuggugggugaaagu

SEQ ID NO: 2225557 - RNA, 19 nt, Artificial Sequence
  Description of Artificial Sequence: Synthetic oligonucleotide
  Antisense strand to SEQ ID NO: 2225556
acuuucacccaccaguugg

SEQ ID NO: 2225558 - RNA, 19 nt, Artificial Sequence
  Description of Artificial Sequence: Synthetic oligonucleotide
  Sense strand starting at position 2577 of SEQ ID NO: 1883909
aaggaagcccuguguaaua

SEQ ID NO: 2225559 - RNA, 19 nt, Artificial Sequence
  Description of Artificial Sequence: Synthetic oligonucleotide
  Antisense strand to SEQ ID NO: 2225558
uauuacacagggcuuccuu

SEQ ID NO: 2225560 - RNA, 19 nt, Artificial Sequence
  Description of Artificial Sequence: Synthetic oligonucleotide
  Sense strand starting at position 2579 of SEQ ID NO: 1883909
ggaagcccuguguaauaau

SEQ ID NO: 2225561 - RNA, 19 nt, Artificial Sequence
  Description of Artificial Sequence: Synthetic oligonucleotide
  Antisense strand to SEQ ID NO: 2225560
auuauuacacagggcuucc

SEQ ID NO: 2225562 - RNA, 19 nt, Artificial Sequence
  Description of Artificial Sequence: Synthetic oligonucleotide
  Sense strand starting at position 2689 of SEQ ID NO: 1883909
cuagaugacccuuagcaug

SEQ ID NO: 2225563 - RNA, 19 nt, Artificial Sequence
  Description of Artificial Sequence: Synthetic oligonucleotide
  Antisense strand to SEQ ID NO: 2225562
caugcuaagggucaucuag

SEQ ID NO: 2225564 - RNA, 19 nt, Artificial Sequence
  Description of Artificial Sequence: Synthetic oligonucleotide
  Sense strand starting at position 2802 of SEQ ID NO: 1883909
gcuugaccauauguacgaa

SEQ ID NO: 2225565 - RNA, 19 nt, Artificial Sequence
  Description of Artificial Sequence: Synthetic oligonucleotide
  Antisense strand to SEQ ID NO: 2225564
uucguacauauggucaagc

SEQ ID NO: 2225566 - RNA, 19 nt, Artificial Sequence
  Description of Artificial Sequence: Synthetic oligonucleotide
  Sense strand starting at position 2805 of SEQ ID NO: 1883909
ugaccauauguacgaagga

SEQ ID NO: 2225567 - RNA, 19 nt, Artificial Sequence
  Description of Artificial Sequence: Synthetic oligonucleotide
  Antisense strand to SEQ ID NO: 2225566
uccuucguacauaugguca

SEQ ID NO: 2225568 - RNA, 19 nt, Artificial Sequence
  Description of Artificial Sequence: Synthetic oligonucleotide
  Sense strand starting at position 2806 of SEQ ID NO: 1883909
gaccauauguacgaaggaa

SEQ ID NO: 2225569 - RNA, 19 nt, Artificial Sequence
  Description of Artificial Sequence: Synthetic oligonucleotide
  Antisense strand to SEQ ID NO: 2225568
uuccuucguacauaugguc

SEQ ID NO: 2225570 - RNA, 19 nt, Artificial Sequence
  Description of Artificial Sequence: Synthetic oligonucleotide
  Sense strand starting at position 3154 of SEQ ID NO: 1883909
ccaagcaggucuucuaaua

SEQ ID NO: 2225571 - RNA, 19 nt, Artificial Sequence
  Description of Artificial Sequence: Synthetic oligonucleotide
  Antisense strand to SEQ ID NO: 2225570
uauuagaagaccugcuugg

SEQ ID NO: 2225572 - RNA, 19 nt, Artificial Sequence
  Description of Artificial Sequence: Synthetic oligonucleotide
  Sense strand starting at position 3656 of SEQ ID NO: 1883909
cgaguguuuguguugcugu

SEQ ID NO: 2225573 - RNA, 19 nt, Artificial Sequence
  Description of Artificial Sequence: Synthetic oligonucleotide
  Antisense strand to SEQ ID NO: 2225572
acagcaacacaaacacucg

SEQ ID NO: 2225574 - RNA, 19 nt, Artificial Sequence
  Description of Artificial Sequence: Synthetic oligonucleotide
  Sense strand starting at position 3698 of SEQ ID NO: 1883909
gaaggaaguccuuagguuc

SEQ ID NO: 2225575 - RNA, 19 nt, Artificial Sequence
  Description of Artificial Sequence: Synthetic oligonucleotide
  Antisense strand to SEQ ID NO: 2225574
gaaccuaaggacuuccuuc

SEQ ID NO: 2225576 - RNA, 19 nt, Artificial Sequence
  Description of Artificial Sequence: Synthetic oligonucleotide
  Sense strand starting at position 3701 of SEQ ID NO: 1883909
ggaaguccuuagguucaga

SEQ ID NO: 2225577 - RNA, 19 nt, Artificial Sequence
  Description of Artificial Sequence: Synthetic oligonucleotide
  Antisense strand to SEQ ID NO: 2225576
ucugaaccuaaggacuucc

SEQ ID NO: 2225578 - RNA, 19 nt, Artificial Sequence
  Description of Artificial Sequence: Synthetic oligonucleotide
  Sense strand starting at position 3810 of SEQ ID NO: 1883909
gggccucauccucauugua

SEQ ID NO: 2225579 - RNA, 19 nt, Artificial Sequence
  Description of Artificial Sequence: Synthetic oligonucleotide
  Antisense strand to SEQ ID NO: 2225578
uacaaugaggaugaggccc

SEQ ID NO: 2225580 - RNA, 19 nt, Artificial Sequence
  Description of Artificial Sequence: Synthetic oligonucleotide
  Sense strand starting at position 3812 of SEQ ID NO: 1883909
gccucauccucauuguaua

SEQ ID NO: 2225581 - RNA, 19 nt, Artificial Sequence
  Description of Artificial Sequence: Synthetic oligonucleotide
  Antisense strand to SEQ ID NO: 2225580
uauacaaugaggaugaggc

SEQ ID NO: 2225582 - RNA, 19 nt, Artificial Sequence
  Description of Artificial Sequence: Synthetic oligonucleotide
  Sense strand starting at position 3877 of SEQ ID NO: 1883909
aggguuugugagugguaga

SEQ ID NO: 2225583 - RNA, 19 nt, Artificial Sequence
  Description of Artificial Sequence: Synthetic oligonucleotide
  Antisense strand to SEQ ID NO: 2225582
ucuaccacucacaaacccu

SEQ ID NO: 2225584 - RNA, 19 nt, Artificial Sequence
  Description of Artificial Sequence: Synthetic oligonucleotide
  Sense strand starting at position 3878 of SEQ ID NO: 1883909
ggguuugugagugguagag

SEQ ID NO: 2225585 - RNA, 19 nt, Artificial Sequence
  Description of Artificial Sequence: Synthetic oligonucleotide
  Antisense strand to SEQ ID NO: 2225584
cucuaccacucacaaaccc

SEQ ID NO: 2225586 - RNA, 19 nt, Artificial Sequence
  Description of Artificial Sequence: Synthetic oligonucleotide
  Sense strand starting at position 3924 of SEQ ID NO: 1883909
ucuggaaucugagcugcuu

SEQ ID NO: 2225587 - RNA, 19 nt, Artificial Sequence
  Description of Artificial Sequence: Synthetic oligonucleotide
  Antisense strand to SEQ ID NO: 2225586
aagcagcucagauuccaga

SEQ ID NO: 2225588 - RNA, 19 nt, Artificial Sequence
  Description of Artificial Sequence: Synthetic oligonucleotide
  Sense strand starting at position 40 of SEQ ID NO: 1883910
uuugcauuccucgaucagu

SEQ ID NO: 2225589 - RNA, 19 nt, Artificial Sequence
  Description of Artificial Sequence: Synthetic oligonucleotide
  Antisense strand to SEQ ID NO: 2225588
acugaucgaggaaugcaaa

SEQ ID NO: 2225590 - RNA, 19 nt, Artificial Sequence
  Description of Artificial Sequence: Synthetic oligonucleotide
  Sense strand starting at position 43 of SEQ ID NO: 1883910
gcauuccucgaucaguuga

SEQ ID NO: 2225591 - RNA, 19 nt, Artificial Sequence
  Description of Artificial Sequence: Synthetic oligonucleotide
  Antisense strand to SEQ ID NO: 2225590
ucaacugaucgaggaaugc

SEQ ID NO: 2225592 - RNA, 19 nt, Artificial Sequence
  Description of Artificial Sequence: Synthetic oligonucleotide
  Sense strand starting at position 54 of SEQ ID NO: 1883910
ucaguugaccugcaaacua

SEQ ID NO: 2225593 - RNA, 19 nt, Artificial Sequence
  Description of Artificial Sequence: Synthetic oligonucleotide
  Antisense strand to SEQ ID NO: 2225592
uaguuugcaggucaacuga

SEQ ID NO: 2225594 - RNA, 19 nt, Artificial Sequence
  Description of Artificial Sequence: Synthetic oligonucleotide
  Sense strand starting at position 70 of SEQ ID NO: 1883910
cuagcugucuugcuaguua

SEQ ID NO: 2225595 - RNA, 19 nt, Artificial Sequence
  Description of Artificial Sequence: Synthetic oligonucleotide
  Antisense strand to SEQ ID NO: 2225594
uaacuagcaagacagcuag

SEQ ID NO: 2225596 - RNA, 19 nt, Artificial Sequence
  Description of Artificial Sequence: Synthetic oligonucleotide
  Sense strand starting at position 163 of SEQ ID NO: 1883910
gcacucaaauaucugugaa

SEQ ID NO: 2225597 - RNA, 19 nt, Artificial Sequence
  Description of Artificial Sequence: Synthetic oligonucleotide
  Antisense strand to SEQ ID NO: 2225596
uucacagauauuugagugc

SEQ ID NO: 2225598 - RNA, 19 nt, Artificial Sequence
  Description of Artificial Sequence: Synthetic oligonucleotide
  Sense strand starting at position 166 of SEQ ID NO: 1883910
cucaaauaucugugaaagg

SEQ ID NO: 2225599 - RNA, 19 nt, Artificial Sequence
  Description of Artificial Sequence: Synthetic oligonucleotide
  Antisense strand to SEQ ID NO: 2225598
ccuuucacagauauuugag

SEQ ID NO: 2225600 - RNA, 19 nt, Artificial Sequence
  Description of Artificial Sequence: Synthetic oligonucleotide
  Sense strand starting at position 191 of SEQ ID NO: 1883910
gagugaauggguuggagga

SEQ ID NO: 2225601 - RNA, 19 nt, Artificial Sequence
  Description of Artificial Sequence: Synthetic oligonucleotide
  Antisense strand to SEQ ID NO: 2225600
uccuccaacccauucacuc

SEQ ID NO: 2225602 - RNA, 19 nt, Artificial Sequence
  Description of Artificial Sequence: Synthetic oligonucleotide
  Sense strand starting at position 193 of SEQ ID NO: 1883910
gugaauggguuggaggaaa

SEQ ID NO: 2225603 - RNA, 19 nt, Artificial Sequence
  Description of Artificial Sequence: Synthetic oligonucleotide
  Antisense strand to SEQ ID NO: 2225602
uuuccuccaacccauucac

SEQ ID NO: 2225604 - RNA, 19 nt, Artificial Sequence
  Description of Artificial Sequence: Synthetic oligonucleotide
  Sense strand starting at position 395 of SEQ ID NO: 1883910
uggaguuuauugaguggga

SEQ ID NO: 2225605 - RNA, 19 nt, Artificial Sequence
  Description of Artificial Sequence: Synthetic oligonucleotide
  Antisense strand to SEQ ID NO: 2225604
ucccacucaauaaacucca

SEQ ID NO: 2225606 - RNA, 19 nt, Artificial Sequence
  Description of Artificial Sequence: Synthetic oligonucleotide
  Sense strand starting at position 398 of SEQ ID NO: 1883910
aguuuauugagugggagac

SEQ ID NO: 2225607 - RNA, 19 nt, Artificial Sequence
  Description of Artificial Sequence: Synthetic oligonucleotide
  Antisense strand to SEQ ID NO: 2225606
gucucccacucaauaaacu

SEQ ID NO: 2225608 - RNA, 19 nt, Artificial Sequence
  Description of Artificial Sequence: Synthetic oligonucleotide
  Sense strand starting at position 399 of SEQ ID NO: 1883910
guuuauugagugggagaca

SEQ ID NO: 2225609 - RNA, 19 nt, Artificial Sequence
  Description of Artificial Sequence: Synthetic oligonucleotide
  Antisense strand to SEQ ID NO: 2225608
ugucucccacucaauaaac

SEQ ID NO: 2225610 - RNA, 19 nt, Artificial Sequence
  Description of Artificial Sequence: Synthetic oligonucleotide
  Sense strand starting at position 467 of SEQ ID NO: 1883910
gaaggaguccagcguggau

SEQ ID NO: 2225611 - RNA, 19 nt, Artificial Sequence
  Description of Artificial Sequence: Synthetic oligonucleotide
  Antisense strand to SEQ ID NO: 2225610
auccacgcuggacuccuuc

SEQ ID NO: 2225612 - RNA, 19 nt, Artificial Sequence
  Description of Artificial Sequence: Synthetic oligonucleotide
  Sense strand starting at position 476 of SEQ ID NO: 1883910
cagcguggauugcuccaaa

SEQ ID NO: 2225613 - RNA, 19 nt, Artificial Sequence
  Description of Artificial Sequence: Synthetic oligonucleotide
  Antisense strand to SEQ ID NO: 2225612
uuuggagcaauccacgcug

SEQ ID NO: 2225614 - RNA, 19 nt, Artificial Sequence
  Description of Artificial Sequence: Synthetic oligonucleotide
  Sense strand starting at position 479 of SEQ ID NO: 1883910
cguggauugcuccaaagcu

SEQ ID NO: 2225615 - RNA, 19 nt, Artificial Sequence
  Description of Artificial Sequence: Synthetic oligonucleotide
  Antisense strand to SEQ ID NO: 2225614
agcuuuggagcaauccacg

SEQ ID NO: 2225616 - RNA, 19 nt, Artificial Sequence
  Description of Artificial Sequence: Synthetic oligonucleotide
  Sense strand starting at position 510 of SEQ ID NO: 1883910
ccugacugcaggugugauu

SEQ ID NO: 2225617 - RNA, 19 nt, Artificial Sequence
  Description of Artificial Sequence: Synthetic oligonucleotide
  Antisense strand to SEQ ID NO: 2225616
aaucacaccugcagucagg

SEQ ID NO: 2225618 - RNA, 19 nt, Artificial Sequence
  Description of Artificial Sequence: Synthetic oligonucleotide
  Sense strand starting at position 604 of SEQ ID NO: 1883910
cuggacuccugucuaaaca

SEQ ID NO: 2225619 - RNA, 19 nt, Artificial Sequence
  Description of Artificial Sequence: Synthetic oligonucleotide
  Antisense strand to SEQ ID NO: 2225618
uguuuagacaggaguccag

SEQ ID NO: 2225620 - RNA, 19 nt, Artificial Sequence
  Description of Artificial Sequence: Synthetic oligonucleotide
  Sense strand starting at position 2036 of SEQ ID NO: 1883910
uuugguuuccauggaaaug

SEQ ID NO: 2225621 - RNA, 19 nt, Artificial Sequence
  Description of Artificial Sequence: Synthetic oligonucleotide
  Antisense strand to SEQ ID NO: 2225620
cauuuccauggaaaccaaa

SEQ ID NO: 2225622 - RNA, 19 nt, Artificial Sequence
  Description of Artificial Sequence: Synthetic oligonucleotide
  Sense strand starting at position 2048 of SEQ ID NO: 1883910
ggaaaugauccuuguuaaa

SEQ ID NO: 2225623 - RNA, 19 nt, Artificial Sequence
  Description of Artificial Sequence: Synthetic oligonucleotide
  Antisense strand to SEQ ID NO: 2225622
uuuaacaaggaucauuucc

SEQ ID NO: 2225624 - RNA, 19 nt, Artificial Sequence
  Description of Artificial Sequence: Synthetic oligonucleotide
  Sense strand starting at position 2166 of SEQ ID NO: 1883910
aagucuggaugagggaaau

SEQ ID NO: 2225625 - RNA, 19 nt, Artificial Sequence
  Description of Artificial Sequence: Synthetic oligonucleotide
  Antisense strand to SEQ ID NO: 2225624
auuucccucauccagacuu

SEQ ID NO: 2225626 - RNA, 19 nt, Artificial Sequence
  Description of Artificial Sequence: Synthetic oligonucleotide
  Sense strand starting at position 2215 of SEQ ID NO: 1883910
ggcagcaaagagugguuaa

SEQ ID NO: 2225627 - RNA, 19 nt, Artificial Sequence
  Description of Artificial Sequence: Synthetic oligonucleotide
  Antisense strand to SEQ ID NO: 2225626
uuaaccacucuuugcugcc

SEQ ID NO: 2225628 - RNA, 19 nt, Artificial Sequence
  Description of Artificial Sequence: Synthetic oligonucleotide
  Sense strand starting at position 2216 of SEQ ID NO: 1883910
gcagcaaagagugguuaaa

SEQ ID NO: 2225629 - RNA, 19 nt, Artificial Sequence
  Description of Artificial Sequence: Synthetic oligonucleotide
  Antisense strand to SEQ ID NO: 2225628
uuuaaccacucuuugcugc

SEQ ID NO: 2225630 - RNA, 19 nt, Artificial Sequence
  Description of Artificial Sequence: Synthetic oligonucleotide
  Sense strand starting at position 2260 of SEQ ID NO: 1883910
aguccauuacguugagaag

SEQ ID NO: 2225631 - RNA, 19 nt, Artificial Sequence
  Description of Artificial Sequence: Synthetic oligonucleotide
  Antisense strand to SEQ ID NO: 2225630
cuucucaacguaauggacu

SEQ ID NO: 2225632 - RNA, 19 nt, Artificial Sequence
  Description of Artificial Sequence: Synthetic oligonucleotide
  Sense strand starting at position 2282 of SEQ ID NO: 1883910
ccugcugauugcuuugauu

SEQ ID NO: 2225633 - RNA, 19 nt, Artificial Sequence
  Description of Artificial Sequence: Synthetic oligonucleotide
  Antisense strand to SEQ ID NO: 2225632
aaucaaagcaaucagcagg

SEQ ID NO: 2225634 - RNA, 19 nt, Artificial Sequence
  Description of Artificial Sequence: Synthetic oligonucleotide
  Sense strand starting at position 2311 of SEQ ID NO: 1883910
agugcucccugguugugaa

SEQ ID NO: 2225635 - RNA, 19 nt, Artificial Sequence
  Description of Artificial Sequence: Synthetic oligonucleotide
  Antisense strand to SEQ ID NO: 2225634
uucacaaccagggagcacu

SEQ ID NO: 2225636 - RNA, 19 nt, Artificial Sequence
  Description of Artificial Sequence: Synthetic oligonucleotide
  Sense strand starting at position 2481 of SEQ ID NO: 1883910
ucuaaagggagguauguuu

SEQ ID NO: 2225637 - RNA, 19 nt, Artificial Sequence
  Description of Artificial Sequence: Synthetic oligonucleotide
  Antisense strand to SEQ ID NO: 2225636
aaacauaccucccuuuaga

SEQ ID NO: 2225638 - RNA, 19 nt, Artificial Sequence
  Description of Artificial Sequence: Synthetic oligonucleotide
  Sense strand starting at position 2591 of SEQ ID NO: 1883910
aguguuuccuccuuuguaa

SEQ ID NO: 2225639 - RNA, 19 nt, Artificial Sequence
  Description of Artificial Sequence: Synthetic oligonucleotide
  Antisense strand to SEQ ID NO: 2225638
uuacaaaggaggaaacacu

SEQ ID NO: 2225640 - RNA, 19 nt, Artificial Sequence
  Description of Artificial Sequence: Synthetic oligonucleotide
  Sense strand starting at position 2862 of SEQ ID NO: 1883910
ggauuucagucaggucugu

SEQ ID NO: 2225641 - RNA, 19 nt, Artificial Sequence
  Description of Artificial Sequence: Synthetic oligonucleotide
  Antisense strand to SEQ ID NO: 2225640
acagaccugacugaaaucc

SEQ ID NO: 2225642 - RNA, 19 nt, Artificial Sequence
  Description of Artificial Sequence: Synthetic oligonucleotide
  Sense strand starting at position 3000 of SEQ ID NO: 1883910
guaguaggugcuuaauaau

SEQ ID NO: 2225643 - RNA, 19 nt, Artificial Sequence
  Description of Artificial Sequence: Synthetic oligonucleotide
  Antisense strand to SEQ ID NO: 2225642
auuauuaagcaccuacuac

SEQ ID NO: 2225644 - RNA, 19 nt, Artificial Sequence
  Description of Artificial Sequence: Synthetic oligonucleotide
  Sense strand starting at position 3057 of SEQ ID NO: 1883910
gcucuaauacugcaagacu

SEQ ID NO: 2225645 - RNA, 19 nt, Artificial Sequence
  Description of Artificial Sequence: Synthetic oligonucleotide
  Antisense strand to SEQ ID NO: 2225644
agucuugcaguauuagagc

SEQ ID NO: 2225646 - RNA, 19 nt, Artificial Sequence
  Description of Artificial Sequence: Synthetic oligonucleotide
  Sense strand starting at position 3094 of SEQ ID NO: 1883910
ucuccauagcucgagaaca

SEQ ID NO: 2225647 - RNA, 19 nt, Artificial Sequence
  Description of Artificial Sequence: Synthetic oligonucleotide
  Antisense strand to SEQ ID NO: 2225646
uguucucgagcuauggaga

SEQ ID NO: 2225648 - RNA, 19 nt, Artificial Sequence
  Description of Artificial Sequence: Synthetic oligonucleotide
  Sense strand starting at position 3096 of SEQ ID NO: 1883910
uccauagcucgagaacaag

SEQ ID NO: 2225649 - RNA, 19 nt, Artificial Sequence
  Description of Artificial Sequence: Synthetic oligonucleotide
  Antisense strand to SEQ ID NO: 2225648
cuuguucucgagcuaugga

SEQ ID NO: 2225650 - RNA, 19 nt, Artificial Sequence
  Description of Artificial Sequence: Synthetic oligonucleotide
  Sense strand starting at position 3503 of SEQ ID NO: 1883910
uuuguagaaugucuccuaa

SEQ ID NO: 2225651 - RNA, 19 nt, Artificial Sequence
  Description of Artificial Sequence: Synthetic oligonucleotide
  Antisense strand to SEQ ID NO: 2225650
uuaggagacauucuacaaa

SEQ ID NO: 2225652 - RNA, 19 nt, Artificial Sequence
  Description of Artificial Sequence: Synthetic oligonucleotide
  Sense strand starting at position 3505 of SEQ ID NO: 1883910
uguagaaugucuccuaaau

SEQ ID NO: 2225653 - RNA, 19 nt, Artificial Sequence
  Description of Artificial Sequence: Synthetic oligonucleotide
  Antisense strand to SEQ ID NO: 2225652
auuuaggagacauucuaca

SEQ ID NO: 2225654 - RNA, 19 nt, Artificial Sequence
  Description of Artificial Sequence: Synthetic oligonucleotide
  Sense strand starting at position 3515 of SEQ ID NO: 1883910
cuccuaaauucugcaggaa

SEQ ID NO: 2225655 - RNA, 19 nt, Artificial Sequence
  Description of Artificial Sequence: Synthetic oligonucleotide
  Antisense strand to SEQ ID NO: 2225654
uuccugcagaauuuaggag

SEQ ID NO: 2225656 - RNA, 19 nt, Artificial Sequence
  Description of Artificial Sequence: Synthetic oligonucleotide
  Sense strand starting at position 3518 of SEQ ID NO: 1883910
cuaaauucugcaggaagga

SEQ ID NO: 2225657 - RNA, 19 nt, Artificial Sequence
  Description of Artificial Sequence: Synthetic oligonucleotide
  Antisense strand to SEQ ID NO: 2225656
uccuuccugcagaauuuag

SEQ ID NO: 2225658 - RNA, 19 nt, Artificial Sequence
  Description of Artificial Sequence: Synthetic oligonucleotide
  Sense strand starting at position 3563 of SEQ ID NO: 1883910
gcaucuuuguagucacugu

SEQ ID NO: 2225659 - RNA, 19 nt, Artificial Sequence
  Description of Artificial Sequence: Synthetic oligonucleotide
  Antisense strand to SEQ ID NO: 2225658
acagugacuacaaagaugc

SEQ ID NO: 2225660 - RNA, 19 nt, Artificial Sequence
  Description of Artificial Sequence: Synthetic oligonucleotide
  Sense strand starting at position 3567 of SEQ ID NO: 1883910
cuuuguagucacugucaua

SEQ ID NO: 2225661 - RNA, 19 nt, Artificial Sequence
  Description of Artificial Sequence: Synthetic oligonucleotide
  Antisense strand to SEQ ID NO: 2225660
uaugacagugacuacaaag

SEQ ID NO: 2225662 - RNA, 19 nt, Artificial Sequence
  Description of Artificial Sequence: Synthetic oligonucleotide
  Sense strand starting at position 3578 of SEQ ID NO: 1883910
cugucauacacguggcuga

SEQ ID NO: 2225663 - RNA, 19 nt, Artificial Sequence
  Description of Artificial Sequence: Synthetic oligonucleotide
  Antisense strand to SEQ ID NO: 2225662
ucagccacguguaugacag

SEQ ID NO: 2225664 - RNA, 19 nt, Artificial Sequence
  Description of Artificial Sequence: Synthetic oligonucleotide
  Sense strand starting at position 3828 of SEQ ID NO: 1883910
agcucuuugugcucaggca

SEQ ID NO: 2225665 - RNA, 19 nt, Artificial Sequence
  Description of Artificial Sequence: Synthetic oligonucleotide
  Antisense strand to SEQ ID NO: 2225664
ugccugagcacaaagagcu

SEQ ID NO: 2225666 - RNA, 19 nt, Artificial Sequence
  Description of Artificial Sequence: Synthetic oligonucleotide
  Sense strand starting at position 3878 of SEQ ID NO: 1883910
cugcucucagcuuagaacu

SEQ ID NO: 2225667 - RNA, 19 nt, Artificial Sequence
  Description of Artificial Sequence: Synthetic oligonucleotide
  Antisense strand to SEQ ID NO: 2225666
aguucuaagcugagagcag

SEQ ID NO: 2225668 - RNA, 19 nt, Artificial Sequence
  Description of Artificial Sequence: Synthetic oligonucleotide
  Sense strand starting at position 208 of SEQ ID NO: 1883911
aaauuuaggugcuacagaa

SEQ ID NO: 2225669 - RNA, 19 nt, Artificial Sequence
  Description of Artificial Sequence: Synthetic oligonucleotide
  Antisense strand to SEQ ID NO: 2225668
uucuguagcaccuaaauuu

SEQ ID NO: 2225670 - RNA, 19 nt, Artificial Sequence
  Description of Artificial Sequence: Synthetic oligonucleotide
  Sense strand starting at position 229 of SEQ ID NO: 1883911
agagguuaguaauuccaau

SEQ ID NO: 2225671 - RNA, 19 nt, Artificial Sequence
  Description of Artificial Sequence: Synthetic oligonucleotide
  Antisense strand to SEQ ID NO: 2225670
auuggaauuacuaaccucu

SEQ ID NO: 2225672 - RNA, 19 nt, Artificial Sequence
  Description of Artificial Sequence: Synthetic oligonucleotide
  Sense strand starting at position 261 of SEQ ID NO: 1883911
ccuuuagaguauucucuga

SEQ ID NO: 2225673 - RNA, 19 nt, Artificial Sequence
  Description of Artificial Sequence: Synthetic oligonucleotide
  Antisense strand to SEQ ID NO: 2225672
ucagagaauacucuaaagg

SEQ ID NO: 2225674 - RNA, 19 nt, Artificial Sequence
  Description of Artificial Sequence: Synthetic oligonucleotide
  Sense strand starting at position 265 of SEQ ID NO: 1883911
uagaguauucucugaguug

SEQ ID NO: 2225675 - RNA, 19 nt, Artificial Sequence
  Description of Artificial Sequence: Synthetic oligonucleotide
  Antisense strand to SEQ ID NO: 2225674
caacucagagaauacucua

SEQ ID NO: 2225676 - RNA, 19 nt, Artificial Sequence
  Description of Artificial Sequence: Synthetic oligonucleotide
  Sense strand starting at position 331 of SEQ ID NO: 1883911
uacccuagagauggcuaua

SEQ ID NO: 2225677 - RNA, 19 nt, Artificial Sequence
  Description of Artificial Sequence: Synthetic oligonucleotide
  Antisense strand to SEQ ID NO: 2225676
uauagccaucucuagggua

SEQ ID NO: 2225678 - RNA, 19 nt, Artificial Sequence
  Description of Artificial Sequence: Synthetic oligonucleotide
  Sense strand starting at position 583 of SEQ ID NO: 1883911
cuuagagauccuggugaaa

SEQ ID NO: 2225679 - RNA, 19 nt, Artificial Sequence
  Description of Artificial Sequence: Synthetic oligonucleotide
  Antisense strand to SEQ ID NO: 2225678
uuucaccaggaucucuaag

SEQ ID NO: 2225680 - RNA, 19 nt, Artificial Sequence
  Description of Artificial Sequence: Synthetic oligonucleotide
  Sense strand starting at position 679 of SEQ ID NO: 1883911
cugggauccagaugcuaua

SEQ ID NO: 2225681 - RNA, 19 nt, Artificial Sequence
  Description of Artificial Sequence: Synthetic oligonucleotide
  Antisense strand to SEQ ID NO: 2225680
uauagcaucuggaucccag

SEQ ID NO: 2225682 - RNA, 19 nt, Artificial Sequence
  Description of Artificial Sequence: Synthetic oligonucleotide
  Sense strand starting at position 692 of SEQ ID NO: 1883911
gcuauauucgcaguacgau

SEQ ID NO: 2225683 - RNA, 19 nt, Artificial Sequence
  Description of Artificial Sequence: Synthetic oligonucleotide
  Antisense strand to SEQ ID NO: 2225682
aucguacugcgaauauagc

SEQ ID NO: 2225684 - RNA, 19 nt, Artificial Sequence
  Description of Artificial Sequence: Synthetic oligonucleotide
  Sense strand starting at position 747 of SEQ ID NO: 1883911
cacugucucccagggauga

SEQ ID NO: 2225685 - RNA, 19 nt, Artificial Sequence
  Description of Artificial Sequence: Synthetic oligonucleotide
  Antisense strand to SEQ ID NO: 2225684
ucaucccugggagacagug

SEQ ID NO: 2225686 - RNA, 19 nt, Artificial Sequence
  Description of Artificial Sequence: Synthetic oligonucleotide
  Sense strand starting at position 748 of SEQ ID NO: 1883911
acugucucccagggaugaa

SEQ ID NO: 2225687 - RNA, 19 nt, Artificial Sequence
  Description of Artificial Sequence: Synthetic oligonucleotide
  Antisense strand to SEQ ID NO: 2225686
uucaucccugggagacagu

SEQ ID NO: 2225688 - RNA, 19 nt, Artificial Sequence
  Description of Artificial Sequence: Synthetic oligonucleotide
  Sense strand starting at position 1002 of SEQ ID NO: 1883911
gaauuuccuugggaaggua

SEQ ID NO: 2225689 - RNA, 19 nt, Artificial Sequence
  Description of Artificial Sequence: Synthetic oligonucleotide
  Antisense strand to SEQ ID NO: 2225688
uaccuucccaaggaaauuc

SEQ ID NO: 2225690 - RNA, 19 nt, Artificial Sequence
  Description of Artificial Sequence: Synthetic oligonucleotide
  Sense strand starting at position 1093 of SEQ ID NO: 1883911
aggagauuuaugugccgca

SEQ ID NO: 2225691 - RNA, 19 nt, Artificial Sequence
  Description of Artificial Sequence: Synthetic oligonucleotide
  Antisense strand to SEQ ID NO: 2225690
ugcggcacauaaaucuccu

SEQ ID NO: 2225692 - RNA, 19 nt, Artificial Sequence
  Description of Artificial Sequence: Synthetic oligonucleotide
  Sense strand starting at position 1094 of SEQ ID NO: 1883911
ggagauuuaugugccgcau

SEQ ID NO: 2225693 - RNA, 19 nt, Artificial Sequence
  Description of Artificial Sequence: Synthetic oligonucleotide
  Antisense strand to SEQ ID NO: 2225692
augcggcacauaaaucucc

SEQ ID NO: 2225694 - RNA, 19 nt, Artificial Sequence
  Description of Artificial Sequence: Synthetic oligonucleotide
  Sense strand starting at position 1105 of SEQ ID NO: 1883911
ugccgcauugugcuaggaa

SEQ ID NO: 2225695 - RNA, 19 nt, Artificial Sequence
  Description of Artificial Sequence: Synthetic oligonucleotide
  Antisense strand to SEQ ID NO: 2225694
uuccuagcacaaugcggca

SEQ ID NO: 2225696 - RNA, 19 nt, Artificial Sequence
  Description of Artificial Sequence: Synthetic oligonucleotide
  Sense strand starting at position 1119 of SEQ ID NO: 1883911
aggaaaggcacauguauua

SEQ ID NO: 2225697 - RNA, 19 nt, Artificial Sequence
  Description of Artificial Sequence: Synthetic oligonucleotide
  Antisense strand to SEQ ID NO: 2225696
uaauacaugugccuuuccu

SEQ ID NO: 2225698 - RNA, 19 nt, Artificial Sequence
  Description of Artificial Sequence: Synthetic oligonucleotide
  Sense strand starting at position 1165 of SEQ ID NO: 1883911
gggcauggucuccacauga

SEQ ID NO: 2225699 - RNA, 19 nt, Artificial Sequence
  Description of Artificial Sequence: Synthetic oligonucleotide
  Antisense strand to SEQ ID NO: 2225698
ucauguggagaccaugccc

SEQ ID NO: 2225700 - RNA, 19 nt, Artificial Sequence
  Description of Artificial Sequence: Synthetic oligonucleotide
  Sense strand starting at position 1254 of SEQ ID NO: 1883911
gagucuuagacaugaggua

SEQ ID NO: 2225701 - RNA, 19 nt, Artificial Sequence
  Description of Artificial Sequence: Synthetic oligonucleotide
  Antisense strand to SEQ ID NO: 2225700
uaccucaugucuaagacuc

SEQ ID NO: 2225702 - RNA, 19 nt, Artificial Sequence
  Description of Artificial Sequence: Synthetic oligonucleotide
  Sense strand starting at position 1314 of SEQ ID NO: 1883911
ggugaaaugacucggccaa

SEQ ID NO: 2225703 - RNA, 19 nt, Artificial Sequence
  Description of Artificial Sequence: Synthetic oligonucleotide
  Antisense strand to SEQ ID NO: 2225702
uuggccgagucauuucacc

SEQ ID NO: 2225704 - RNA, 19 nt, Artificial Sequence
  Description of Artificial Sequence: Synthetic oligonucleotide
  Sense strand starting at position 2117 of SEQ ID NO: 1883911
gagggagagguuugcgaga

SEQ ID NO: 2225705 - RNA, 19 nt, Artificial Sequence
  Description of Artificial Sequence: Synthetic oligonucleotide
  Antisense strand to SEQ ID NO: 2225704
ucucgcaaaccucucccuc

SEQ ID NO: 2225706 - RNA, 19 nt, Artificial Sequence
  Description of Artificial Sequence: Synthetic oligonucleotide
  Sense strand starting at position 2443 of SEQ ID NO: 1883911
uguguuucuccagacgaaa

SEQ ID NO: 2225707 - RNA, 19 nt, Artificial Sequence
  Description of Artificial Sequence: Synthetic oligonucleotide
  Antisense strand to SEQ ID NO: 2225706
uuucgucuggagaaacaca

SEQ ID NO: 2225708 - RNA, 19 nt, Artificial Sequence
  Description of Artificial Sequence: Synthetic oligonucleotide
  Sense strand starting at position 2566 of SEQ ID NO: 1883911
guccuuaggaugcagugau

SEQ ID NO: 2225709 - RNA, 19 nt, Artificial Sequence
  Description of Artificial Sequence: Synthetic oligonucleotide
  Antisense strand to SEQ ID NO: 2225708
aucacugcauccuaaggac

SEQ ID NO: 2225710 - RNA, 19 nt, Artificial Sequence
  Description of Artificial Sequence: Synthetic oligonucleotide
  Sense strand starting at position 3074 of SEQ ID NO: 1883911
cuuggaaauuauccguaua

SEQ ID NO: 2225711 - RNA, 19 nt, Artificial Sequence
  Description of Artificial Sequence: Synthetic oligonucleotide
  Antisense strand to SEQ ID NO: 2225710
uauacggauaauuuccaag

SEQ ID NO: 2225712 - RNA, 19 nt, Artificial Sequence
  Description of Artificial Sequence: Synthetic oligonucleotide
  Sense strand starting at position 3076 of SEQ ID NO: 1883911
uggaaauuauccguauacu

SEQ ID NO: 2225713 - RNA, 19 nt, Artificial Sequence
  Description of Artificial Sequence: Synthetic oligonucleotide
  Antisense strand to SEQ ID NO: 2225712
aguauacggauaauuucca

SEQ ID NO: 2225714 - RNA, 19 nt, Artificial Sequence
  Description of Artificial Sequence: Synthetic oligonucleotide
  Sense strand starting at position 3077 of SEQ ID NO: 1883911
ggaaauuauccguauacuu

SEQ ID NO: 2225715 - RNA, 19 nt, Artificial Sequence
  Description of Artificial Sequence: Synthetic oligonucleotide
  Antisense strand to SEQ ID NO: 2225714
aaguauacggauaauuucc

SEQ ID NO: 2225716 - RNA, 19 nt, Artificial Sequence
  Description of Artificial Sequence: Synthetic oligonucleotide
  Sense strand starting at position 3113 of SEQ ID NO: 1883911
auugaaauaugauccaguu

SEQ ID NO: 2225717 - RNA, 19 nt, Artificial Sequence
  Description of Artificial Sequence: Synthetic oligonucleotide
  Antisense strand to SEQ ID NO: 2225716
aacuggaucauauuucaau

SEQ ID NO: 2225718 - RNA, 19 nt, Artificial Sequence
  Description of Artificial Sequence: Synthetic oligonucleotide
  Sense strand starting at position 3165 of SEQ ID NO: 1883911
aguagcacucgugaugaaa

SEQ ID NO: 2225719 - RNA, 19 nt, Artificial Sequence
  Description of Artificial Sequence: Synthetic oligonucleotide
  Antisense strand to SEQ ID NO: 2225718
uuucaucacgagugcuacu

SEQ ID NO: 2225720 - RNA, 19 nt, Artificial Sequence
  Description of Artificial Sequence: Synthetic oligonucleotide
  Sense strand starting at position 3168 of SEQ ID NO: 1883911
agcacucgugaugaaauau

SEQ ID NO: 2225721 - RNA, 19 nt, Artificial Sequence
  Description of Artificial Sequence: Synthetic oligonucleotide
  Antisense strand to SEQ ID NO: 2225720
auauuucaucacgagugcu

SEQ ID NO: 2225722 - RNA, 19 nt, Artificial Sequence
  Description of Artificial Sequence: Synthetic oligonucleotide
  Sense strand starting at position 3224 of SEQ ID NO: 1883911
uguuaaacaucugucaaau

SEQ ID NO: 2225723 - RNA, 19 nt, Artificial Sequence
  Description of Artificial Sequence: Synthetic oligonucleotide
  Antisense strand to SEQ ID NO: 2225722
auuugacagauguuuaaca

SEQ ID NO: 2225724 - RNA, 19 nt, Artificial Sequence
  Description of Artificial Sequence: Synthetic oligonucleotide
  Sense strand starting at position 3371 of SEQ ID NO: 1883911
aauggaagaugagaaauua

SEQ ID NO: 2225725 - RNA, 19 nt, Artificial Sequence
  Description of Artificial Sequence: Synthetic oligonucleotide
  Antisense strand to SEQ ID NO: 2225724
uaauuucucaucuuccauu

SEQ ID NO: 2225726 - RNA, 19 nt, Artificial Sequence
  Description of Artificial Sequence: Synthetic oligonucleotide
  Sense strand starting at position 3405 of SEQ ID NO: 1883911
uguugaugugucgcacuuu

SEQ ID NO: 2225727 - RNA, 19 nt, Artificial Sequence
  Description of Artificial Sequence: Synthetic oligonucleotide
  Antisense strand to SEQ ID NO: 2225726
aaagugcgacacaucaaca

SEQ ID NO: 2225728 - RNA, 19 nt, Artificial Sequence
  Description of Artificial Sequence: Synthetic oligonucleotide
  Sense strand starting at position 3408 of SEQ ID NO: 1883911
ugaugugucgcacuuugua

SEQ ID NO: 2225729 - RNA, 19 nt, Artificial Sequence
  Description of Artificial Sequence: Synthetic oligonucleotide
  Antisense strand to SEQ ID NO: 2225728
uacaaagugcgacacauca

SEQ ID NO: 2225730 - RNA, 19 nt, Artificial Sequence
  Description of Artificial Sequence: Synthetic oligonucleotide
  Sense strand starting at position 3536 of SEQ ID NO: 1883911
ggagucuauaccuguuaga

SEQ ID NO: 2225731 - RNA, 19 nt, Artificial Sequence
  Description of Artificial Sequence: Synthetic oligonucleotide
  Antisense strand to SEQ ID NO: 2225730
ucuaacagguauagacucc

SEQ ID NO: 2225732 - RNA, 19 nt, Artificial Sequence
  Description of Artificial Sequence: Synthetic oligonucleotide
  Sense strand starting at position 3624 of SEQ ID NO: 1883911
uugcaauuacaucagaguu

SEQ ID NO: 2225733 - RNA, 19 nt, Artificial Sequence
  Description of Artificial Sequence: Synthetic oligonucleotide
  Antisense strand to SEQ ID NO: 2225732
aacucugauguaauugcaa

SEQ ID NO: 2225734 - RNA, 19 nt, Artificial Sequence
  Description of Artificial Sequence: Synthetic oligonucleotide
  Sense strand starting at position 3632 of SEQ ID NO: 1883911
acaucagaguuauuguauu

SEQ ID NO: 2225735 - RNA, 19 nt, Artificial Sequence
  Description of Artificial Sequence: Synthetic oligonucleotide
  Antisense strand to SEQ ID NO: 2225734
aauacaauaacucugaugu

SEQ ID NO: 2225736 - RNA, 19 nt, Artificial Sequence
  Description of Artificial Sequence: Synthetic oligonucleotide
  Sense strand starting at position 3668 of SEQ ID NO: 1883911
agcuauuguguuuagacca

SEQ ID NO: 2225737 - RNA, 19 nt, Artificial Sequence
  Description of Artificial Sequence: Synthetic oligonucleotide
  Antisense strand to SEQ ID NO: 2225736
uggucuaaacacaauagcu

SEQ ID NO: 2225738 - RNA, 19 nt, Artificial Sequence
  Description of Artificial Sequence: Synthetic oligonucleotide
  Sense strand starting at position 3673 of SEQ ID NO: 1883911
uuguguuuagaccauauua

SEQ ID NO: 2225739 - RNA, 19 nt, Artificial Sequence
  Description of Artificial Sequence: Synthetic oligonucleotide
  Antisense strand to SEQ ID NO: 2225738
uaauauggucuaaacacaa

SEQ ID NO: 2225740 - RNA, 19 nt, Artificial Sequence
  Description of Artificial Sequence: Synthetic oligonucleotide
  Sense strand starting at position 3675 of SEQ ID NO: 1883911
guguuuagaccauauuaaa

SEQ ID NO: 2225741 - RNA, 19 nt, Artificial Sequence
  Description of Artificial Sequence: Synthetic oligonucleotide
  Antisense strand to SEQ ID NO: 2225740
uuuaauauggucuaaacac

SEQ ID NO: 2225742 - RNA, 19 nt, Artificial Sequence
  Description of Artificial Sequence: Synthetic oligonucleotide
  Sense strand starting at position 3687 of SEQ ID NO: 1883911
uauuaaaugcuguaggaug

SEQ ID NO: 2225743 - RNA, 19 nt, Artificial Sequence
  Description of Artificial Sequence: Synthetic oligonucleotide
  Antisense strand to SEQ ID NO: 2225742
cauccuacagcauuuaaua

SEQ ID NO: 2225744 - RNA, 19 nt, Artificial Sequence
  Description of Artificial Sequence: Synthetic oligonucleotide
  Sense strand starting at position 3827 of SEQ ID NO: 1883911
cuaggauauugugucuuaa

SEQ ID NO: 2225745 - RNA, 19 nt, Artificial Sequence
  Description of Artificial Sequence: Synthetic oligonucleotide
  Antisense strand to SEQ ID NO: 2225744
uuaagacacaauauccuag

SEQ ID NO: 2225746 - RNA, 19 nt, Artificial Sequence
  Description of Artificial Sequence: Synthetic oligonucleotide
  Sense strand starting at position 3829 of SEQ ID NO: 1883911
aggauauugugucuuaaau

SEQ ID NO: 2225747 - RNA, 19 nt, Artificial Sequence
  Description of Artificial Sequence: Synthetic oligonucleotide
  Antisense strand to SEQ ID NO: 2225746
auuuaagacacaauauccu

SEQ ID NO: 2225748 - RNA, 19 nt, Artificial Sequence
  Description of Artificial Sequence: Synthetic oligonucleotide
  Sense strand starting at position 71 of SEQ ID NO: 1883912
uguccaaacuacuauguaa

SEQ ID NO: 2225749 - RNA, 19 nt, Artificial Sequence
  Description of Artificial Sequence: Synthetic oligonucleotide
  Antisense strand to SEQ ID NO: 2225748
uuacauaguaguuuggaca

SEQ ID NO: 2225750 - RNA, 19 nt, Artificial Sequence
  Description of Artificial Sequence: Synthetic oligonucleotide
  Sense strand starting at position 133 of SEQ ID NO: 1883912
agagaaaguuaaugaauuc

SEQ ID NO: 2225751 - RNA, 19 nt, Artificial Sequence
  Description of Artificial Sequence: Synthetic oligonucleotide
  Antisense strand to SEQ ID NO: 2225750
gaauucauuaacuuucucu

SEQ ID NO: 2225752 - RNA, 19 nt, Artificial Sequence
  Description of Artificial Sequence: Synthetic oligonucleotide
  Sense strand starting at position 561 of SEQ ID NO: 1883912
gccugaccuggcugugaua

SEQ ID NO: 2225753 - RNA, 19 nt, Artificial Sequence
  Description of Artificial Sequence: Synthetic oligonucleotide
  Antisense strand to SEQ ID NO: 2225752
uaucacagccaggucaggc

SEQ ID NO: 2225754 - RNA, 19 nt, Artificial Sequence
  Description of Artificial Sequence: Synthetic oligonucleotide
  Sense strand starting at position 563 of SEQ ID NO: 1883912
cugaccuggcugugauacu

SEQ ID NO: 2225755 - RNA, 19 nt, Artificial Sequence
  Description of Artificial Sequence: Synthetic oligonucleotide
  Antisense strand to SEQ ID NO: 2225754
aguaucacagccaggucag

SEQ ID NO: 2225756 - RNA, 19 nt, Artificial Sequence
  Description of Artificial Sequence: Synthetic oligonucleotide
  Sense strand starting at position 768 of SEQ ID NO: 1883912
uguuuaaugugucgaggac

SEQ ID NO: 2225757 - RNA, 19 nt, Artificial Sequence
  Description of Artificial Sequence: Synthetic oligonucleotide
  Antisense strand to SEQ ID NO: 2225756
guccucgacacauuaaaca

SEQ ID NO: 2225758 - RNA, 19 nt, Artificial Sequence
  Description of Artificial Sequence: Synthetic oligonucleotide
  Sense strand starting at position 770 of SEQ ID NO: 1883912
uuuaaugugucgaggacgu

SEQ ID NO: 2225759 - RNA, 19 nt, Artificial Sequence
  Description of Artificial Sequence: Synthetic oligonucleotide
  Antisense strand to SEQ ID NO: 2225758
acguccucgacacauuaaa

SEQ ID NO: 2225760 - RNA, 19 nt, Artificial Sequence
  Description of Artificial Sequence: Synthetic oligonucleotide
  Sense strand starting at position 780 of SEQ ID NO: 1883912
cgaggacgucuucgcagau

SEQ ID NO: 2225761 - RNA, 19 nt, Artificial Sequence
  Description of Artificial Sequence: Synthetic oligonucleotide
  Antisense strand to SEQ ID NO: 2225760
aucugcgaagacguccucg

SEQ ID NO: 2225762 - RNA, 19 nt, Artificial Sequence
  Description of Artificial Sequence: Synthetic oligonucleotide
  Sense strand starting at position 781 of SEQ ID NO: 1883912
gaggacgucuucgcagauu

SEQ ID NO: 2225763 - RNA, 19 nt, Artificial Sequence
  Description of Artificial Sequence: Synthetic oligonucleotide
  Antisense strand to SEQ ID NO: 2225762
aaucugcgaagacguccuc

SEQ ID NO: 2225764 - RNA, 19 nt, Artificial Sequence
  Description of Artificial Sequence: Synthetic oligonucleotide
  Sense strand starting at position 934 of SEQ ID NO: 1883912
gcacuccuuucugggacua

SEQ ID NO: 2225765 - RNA, 19 nt, Artificial Sequence
  Description of Artificial Sequence: Synthetic oligonucleotide
  Antisense strand to SEQ ID NO: 2225764
uagucccagaaaggagugc

SEQ ID NO: 2225766 - RNA, 19 nt, Artificial Sequence
  Description of Artificial Sequence: Synthetic oligonucleotide
  Sense strand starting at position 936 of SEQ ID NO: 1883912
acuccuuucugggacuaca

SEQ ID NO: 2225767 - RNA, 19 nt, Artificial Sequence
  Description of Artificial Sequence: Synthetic oligonucleotide
  Antisense strand to SEQ ID NO: 2225766
uguagucccagaaaggagu

SEQ ID NO: 2225768 - RNA, 19 nt, Artificial Sequence
  Description of Artificial Sequence: Synthetic oligonucleotide
  Sense strand starting at position 946 of SEQ ID NO: 1883912
gggacuacaaguugucaca

SEQ ID NO: 2225769 - RNA, 19 nt, Artificial Sequence
  Description of Artificial Sequence: Synthetic oligonucleotide
  Antisense strand to SEQ ID NO: 2225768
ugugacaacuuguaguccc

SEQ ID NO: 2225770 - RNA, 19 nt, Artificial Sequence
  Description of Artificial Sequence: Synthetic oligonucleotide
  Sense strand starting at position 949 of SEQ ID NO: 1883912
acuacaaguugucacauuu

SEQ ID NO: 2225771 - RNA, 19 nt, Artificial Sequence
  Description of Artificial Sequence: Synthetic oligonucleotide
  Antisense strand to SEQ ID NO: 2225770
aaaugugacaacuuguagu

SEQ ID NO: 2225772 - RNA, 19 nt, Artificial Sequence
  Description of Artificial Sequence: Synthetic oligonucleotide
  Sense strand starting at position 1043 of SEQ ID NO: 1883912
cugcguguuucuucuggca

SEQ ID NO: 2225773 - RNA, 19 nt, Artificial Sequence
  Description of Artificial Sequence: Synthetic oligonucleotide
  Antisense strand to SEQ ID NO: 2225772
ugccagaagaaacacgcag

SEQ ID NO: 2225774 - RNA, 19 nt, Artificial Sequence
  Description of Artificial Sequence: Synthetic oligonucleotide
  Sense strand starting at position 1045 of SEQ ID NO: 1883912
gcguguuucuucuggcaau

SEQ ID NO: 2225775 - RNA, 19 nt, Artificial Sequence
  Description of Artificial Sequence: Synthetic oligonucleotide
  Antisense strand to SEQ ID NO: 2225774
auugccagaagaaacacgc

SEQ ID NO: 2225776 - RNA, 19 nt, Artificial Sequence
  Description of Artificial Sequence: Synthetic oligonucleotide
  Sense strand starting at position 1046 of SEQ ID NO: 1883912
cguguuucuucuggcaaug

SEQ ID NO: 2225777 - RNA, 19 nt, Artificial Sequence
  Description of Artificial Sequence: Synthetic oligonucleotide
  Antisense strand to SEQ ID NO: 2225776
cauugccagaagaaacacg

SEQ ID NO: 2225778 - RNA, 19 nt, Artificial Sequence
  Description of Artificial Sequence: Synthetic oligonucleotide
  Sense strand starting at position 1071 of SEQ ID NO: 1883912
ggagugaggccaggguaau

SEQ ID NO: 2225779 - RNA, 19 nt, Artificial Sequence
  Description of Artificial Sequence: Synthetic oligonucleotide
  Antisense strand to SEQ ID NO: 2225778
auuacccuggccucacucc

SEQ ID NO: 2225780 - RNA, 19 nt, Artificial Sequence
  Description of Artificial Sequence: Synthetic oligonucleotide
  Sense strand starting at position 1077 of SEQ ID NO: 1883912
aggccaggguaauguuaaa

SEQ ID NO: 2225781 - RNA, 19 nt, Artificial Sequence
  Description of Artificial Sequence: Synthetic oligonucleotide
  Antisense strand to SEQ ID NO: 2225780
uuuaacauuacccuggccu

SEQ ID NO: 2225782 - RNA, 19 nt, Artificial Sequence
  Description of Artificial Sequence: Synthetic oligonucleotide
  Sense strand starting at position 1240 of SEQ ID NO: 1883912
gauaauggaugucccuuaa

SEQ ID NO: 2225783 - RNA, 19 nt, Artificial Sequence
  Description of Artificial Sequence: Synthetic oligonucleotide
  Antisense strand to SEQ ID NO: 2225782
uuaagggacauccauuauc

SEQ ID NO: 2225784 - RNA, 19 nt, Artificial Sequence
  Description of Artificial Sequence: Synthetic oligonucleotide
  Sense strand starting at position 1782 of SEQ ID NO: 1883912
ggcccuuccacagauucga

SEQ ID NO: 2225785 - RNA, 19 nt, Artificial Sequence
  Description of Artificial Sequence: Synthetic oligonucleotide
  Antisense strand to SEQ ID NO: 2225784
ucgaaucuguggaagggcc

SEQ ID NO: 2225786 - RNA, 19 nt, Artificial Sequence
  Description of Artificial Sequence: Synthetic oligonucleotide
  Sense strand starting at position 1797 of SEQ ID NO: 1883912
ucgacaagauguuaagaga

SEQ ID NO: 2225787 - RNA, 19 nt, Artificial Sequence
  Description of Artificial Sequence: Synthetic oligonucleotide
  Antisense strand to SEQ ID NO: 2225786
ucucuuaacaucuugucga

SEQ ID NO: 2225788 - RNA, 19 nt, Artificial Sequence
  Description of Artificial Sequence: Synthetic oligonucleotide
  Sense strand starting at position 2034 of SEQ ID NO: 1883912
uggcccuuucgcuacgaaa

SEQ ID NO: 2225789 - RNA, 19 nt, Artificial Sequence
  Description of Artificial Sequence: Synthetic oligonucleotide
  Antisense strand to SEQ ID NO: 2225788
uuucguagcgaaagggcca

SEQ ID NO: 2225790 - RNA, 19 nt, Artificial Sequence
  Description of Artificial Sequence: Synthetic oligonucleotide
  Sense strand starting at position 2081 of SEQ ID NO: 1883912
cuuggccucgcuuaacaau

SEQ ID NO: 2225791 - RNA, 19 nt, Artificial Sequence
  Description of Artificial Sequence: Synthetic oligonucleotide
  Antisense strand to SEQ ID NO: 2225790
auuguuaagcgaggccaag

SEQ ID NO: 2225792 - RNA, 19 nt, Artificial Sequence
  Description of Artificial Sequence: Synthetic oligonucleotide
  Sense strand starting at position 2117 of SEQ ID NO: 1883912
uugcgcuugcucugaagga

SEQ ID NO: 2225793 - RNA, 19 nt, Artificial Sequence
  Description of Artificial Sequence: Synthetic oligonucleotide
  Antisense strand to SEQ ID NO: 2225792
uccuucagagcaagcgcaa

SEQ ID NO: 2225794 - RNA, 19 nt, Artificial Sequence
  Description of Artificial Sequence: Synthetic oligonucleotide
  Sense strand starting at position 2118 of SEQ ID NO: 1883912
ugcgcuugcucugaaggaa

SEQ ID NO: 2225795 - RNA, 19 nt, Artificial Sequence
  Description of Artificial Sequence: Synthetic oligonucleotide
  Antisense strand to SEQ ID NO: 2225794
uuccuucagagcaagcgca

SEQ ID NO: 2225796 - RNA, 19 nt, Artificial Sequence
  Description of Artificial Sequence: Synthetic oligonucleotide
  Sense strand starting at position 2231 of SEQ ID NO: 1883912
guuccauuauuugagagaa

SEQ ID NO: 2225797 - RNA, 19 nt, Artificial Sequence
  Description of Artificial Sequence: Synthetic oligonucleotide
  Antisense strand to SEQ ID NO: 2225796
uucucucaaauaauggaac

SEQ ID NO: 2225798 - RNA, 19 nt, Artificial Sequence
  Description of Artificial Sequence: Synthetic oligonucleotide
  Sense strand starting at position 2378 of SEQ ID NO: 1883912
ucgucauuuacaugacgua

SEQ ID NO: 2225799 - RNA, 19 nt, Artificial Sequence
  Description of Artificial Sequence: Synthetic oligonucleotide
  Antisense strand to SEQ ID NO: 2225798
uacgucauguaaaugacga

SEQ ID NO: 2225800 - RNA, 19 nt, Artificial Sequence
  Description of Artificial Sequence: Synthetic oligonucleotide
  Sense strand starting at position 2390 of SEQ ID NO: 1883912
ugacguaucucuccuaaug

SEQ ID NO: 2225801 - RNA, 19 nt, Artificial Sequence
  Description of Artificial Sequence: Synthetic oligonucleotide
  Antisense strand to SEQ ID NO: 2225800
cauuaggagagauacguca

SEQ ID NO: 2225802 - RNA, 19 nt, Artificial Sequence
  Description of Artificial Sequence: Synthetic oligonucleotide
  Sense strand starting at position 2530 of SEQ ID NO: 1883912
cuguccuugcgauacuuua

SEQ ID NO: 2225803 - RNA, 19 nt, Artificial Sequence
  Description of Artificial Sequence: Synthetic oligonucleotide
  Antisense strand to SEQ ID NO: 2225802
uaaaguaucgcaaggacag

SEQ ID NO: 2225804 - RNA, 19 nt, Artificial Sequence
  Description of Artificial Sequence: Synthetic oligonucleotide
  Sense strand starting at position 2537 of SEQ ID NO: 1883912
ugcgauacuuuacucagaa

SEQ ID NO: 2225805 - RNA, 19 nt, Artificial Sequence
  Description of Artificial Sequence: Synthetic oligonucleotide
  Antisense strand to SEQ ID NO: 2225804
uucugaguaaaguaucgca

SEQ ID NO: 2225806 - RNA, 19 nt, Artificial Sequence
  Description of Artificial Sequence: Synthetic oligonucleotide
  Sense strand starting at position 2538 of SEQ ID NO: 1883912
gcgauacuuuacucagaau

SEQ ID NO: 2225807 - RNA, 19 nt, Artificial Sequence
  Description of Artificial Sequence: Synthetic oligonucleotide
  Antisense strand to SEQ ID NO: 2225806
auucugaguaaaguaucgc

SEQ ID NO: 2225808 - RNA, 19 nt, Artificial Sequence
  Description of Artificial Sequence: Synthetic oligonucleotide
  Sense strand starting at position 2989 of SEQ ID NO: 1883912
uuggguuaguuccaagacu

SEQ ID NO: 2225809 - RNA, 19 nt, Artificial Sequence
  Description of Artificial Sequence: Synthetic oligonucleotide
  Antisense strand to SEQ ID NO: 2225808
agucuuggaacuaacccaa

SEQ ID NO: 2225810 - RNA, 19 nt, Artificial Sequence
  Description of Artificial Sequence: Synthetic oligonucleotide
  Sense strand starting at position 3015 of SEQ ID NO: 1883912
uguggauagugccacuaua

SEQ ID NO: 2225811 - RNA, 19 nt, Artificial Sequence
  Description of Artificial Sequence: Synthetic oligonucleotide
  Antisense strand to SEQ ID NO: 2225810
uauaguggcacuauccaca

SEQ ID NO: 2225812 - RNA, 19 nt, Artificial Sequence
  Description of Artificial Sequence: Synthetic oligonucleotide
  Sense strand starting at position 3176 of SEQ ID NO: 1883912
cuaguuauacccuguaaca

SEQ ID NO: 2225813 - RNA, 19 nt, Artificial Sequence
  Description of Artificial Sequence: Synthetic oligonucleotide
  Antisense strand to SEQ ID NO: 2225812
uguuacaggguauaacuag

SEQ ID NO: 2225814 - RNA, 19 nt, Artificial Sequence
  Description of Artificial Sequence: Synthetic oligonucleotide
  Sense strand starting at position 3178 of SEQ ID NO: 1883912
aguuauacccuguaacauu

SEQ ID NO: 2225815 - RNA, 19 nt, Artificial Sequence
  Description of Artificial Sequence: Synthetic oligonucleotide
  Antisense strand to SEQ ID NO: 2225814
aauguuacaggguauaacu

SEQ ID NO: 2225816 - RNA, 19 nt, Artificial Sequence
  Description of Artificial Sequence: Synthetic oligonucleotide
  Sense strand starting at position 3583 of SEQ ID NO: 1883912
uuaguauagucauaagguu

SEQ ID NO: 2225817 - RNA, 19 nt, Artificial Sequence
  Description of Artificial Sequence: Synthetic oligonucleotide
  Antisense strand to SEQ ID NO: 2225816
aaccuuaugacuauacuaa

SEQ ID NO: 2225818 - RNA, 19 nt, Artificial Sequence
  Description of Artificial Sequence: Synthetic oligonucleotide
  Sense strand starting at position 3589 of SEQ ID NO: 1883912
uagucauaagguugugcaa

SEQ ID NO: 2225819 - RNA, 19 nt, Artificial Sequence
  Description of Artificial Sequence: Synthetic oligonucleotide
  Antisense strand to SEQ ID NO: 2225818
uugcacaaccuuaugacua

SEQ ID NO: 2225820 - RNA, 19 nt, Artificial Sequence
  Description of Artificial Sequence: Synthetic oligonucleotide
  Sense strand starting at position 3714 of SEQ ID NO: 1883912
cuaacauuucugugucuua

SEQ ID NO: 2225821 - RNA, 19 nt, Artificial Sequence
  Description of Artificial Sequence: Synthetic oligonucleotide
  Antisense strand to SEQ ID NO: 2225820
uaagacacagaaauguuag

SEQ ID NO: 2225822 - RNA, 19 nt, Artificial Sequence
  Description of Artificial Sequence: Synthetic oligonucleotide
  Sense strand starting at position 3719 of SEQ ID NO: 1883912
auuucugugucuuagacau

SEQ ID NO: 2225823 - RNA, 19 nt, Artificial Sequence
  Description of Artificial Sequence: Synthetic oligonucleotide
  Antisense strand to SEQ ID NO: 2225822
augucuaagacacagaaau

SEQ ID NO: 2225824 - RNA, 19 nt, Artificial Sequence
  Description of Artificial Sequence: Synthetic oligonucleotide
  Sense strand starting at position 3721 of SEQ ID NO: 1883912
uucugugucuuagacauuu

SEQ ID NO: 2225825 - RNA, 19 nt, Artificial Sequence
  Description of Artificial Sequence: Synthetic oligonucleotide
  Antisense strand to SEQ ID NO: 2225824
aaaugucuaagacacagaa

SEQ ID NO: 2225826 - RNA, 19 nt, Artificial Sequence
  Description of Artificial Sequence: Synthetic oligonucleotide
  Sense strand starting at position 3827 of SEQ ID NO: 1883912
uggcauguaucagaacuca

SEQ ID NO: 2225827 - RNA, 19 nt, Artificial Sequence
  Description of Artificial Sequence: Synthetic oligonucleotide
  Antisense strand to SEQ ID NO: 2225826
ugaguucugauacaugcca

SEQ ID NO: 2225828 - RNA, 19 nt, Artificial Sequence
  Description of Artificial Sequence: Synthetic oligonucleotide
  Sense strand starting at position 4 of SEQ ID NO: 1883913
gauuguuugacauggguug

SEQ ID NO: 2225829 - RNA, 19 nt, Artificial Sequence
  Description of Artificial Sequence: Synthetic oligonucleotide
  Antisense strand to SEQ ID NO: 2225828
caacccaugucaaacaauc

SEQ ID NO: 2225830 - RNA, 19 nt, Artificial Sequence
  Description of Artificial Sequence: Synthetic oligonucleotide
  Sense strand starting at position 11 of SEQ ID NO: 1883913
ugacauggguuguuggaaa

SEQ ID NO: 2225831 - RNA, 19 nt, Artificial Sequence
  Description of Artificial Sequence: Synthetic oligonucleotide
  Antisense strand to SEQ ID NO: 2225830
uuuccaacaacccauguca

SEQ ID NO: 2225832 - RNA, 19 nt, Artificial Sequence
  Description of Artificial Sequence: Synthetic oligonucleotide
  Sense strand starting at position 272 of SEQ ID NO: 1883913
ggacuauuguucccuuaaa

SEQ ID NO: 2225833 - RNA, 19 nt, Artificial Sequence
  Description of Artificial Sequence: Synthetic oligonucleotide
  Antisense strand to SEQ ID NO: 2225832
uuuaagggaacaauagucc

SEQ ID NO: 2225834 - RNA, 19 nt, Artificial Sequence
  Description of Artificial Sequence: Synthetic oligonucleotide
  Sense strand starting at position 304 of SEQ ID NO: 1883913
aguuucuagucuucuaaag

SEQ ID NO: 2225835 - RNA, 19 nt, Artificial Sequence
  Description of Artificial Sequence: Synthetic oligonucleotide
  Antisense strand to SEQ ID NO: 2225834
cuuuagaagacuagaaacu

SEQ ID NO: 2225836 - RNA, 19 nt, Artificial Sequence
  Description of Artificial Sequence: Synthetic oligonucleotide
  Sense strand starting at position 313 of SEQ ID NO: 1883913
ucuucuaaagcagauugau

SEQ ID NO: 2225837 - RNA, 19 nt, Artificial Sequence
  Description of Artificial Sequence: Synthetic oligonucleotide
  Antisense strand to SEQ ID NO: 2225836
aucaaucugcuuuagaaga

SEQ ID NO: 2225838 - RNA, 19 nt, Artificial Sequence
  Description of Artificial Sequence: Synthetic oligonucleotide
  Sense strand starting at position 323 of SEQ ID NO: 1883913
cagauugauguccaggcuu

SEQ ID NO: 2225839 - RNA, 19 nt, Artificial Sequence
  Description of Artificial Sequence: Synthetic oligonucleotide
  Antisense strand to SEQ ID NO: 2225838
aagccuggacaucaaucug

SEQ ID NO: 2225840 - RNA, 19 nt, Artificial Sequence
  Description of Artificial Sequence: Synthetic oligonucleotide
  Sense strand starting at position 331 of SEQ ID NO: 1883913
uguccaggcuucucaaaga

SEQ ID NO: 2225841 - RNA, 19 nt, Artificial Sequence
  Description of Artificial Sequence: Synthetic oligonucleotide
  Antisense strand to SEQ ID NO: 2225840
ucuuugagaagccuggaca

SEQ ID NO: 2225842 - RNA, 19 nt, Artificial Sequence
  Description of Artificial Sequence: Synthetic oligonucleotide
  Sense strand starting at position 426 of SEQ ID NO: 1883913
gggaaucucaaguagccua

SEQ ID NO: 2225843 - RNA, 19 nt, Artificial Sequence
  Description of Artificial Sequence: Synthetic oligonucleotide
  Antisense strand to SEQ ID NO: 2225842
uaggcuacuugagauuccc

SEQ ID NO: 2225844 - RNA, 19 nt, Artificial Sequence
  Description of Artificial Sequence: Synthetic oligonucleotide
  Sense strand starting at position 431 of SEQ ID NO: 1883913
ucucaaguagccuaugaau

SEQ ID NO: 2225845 - RNA, 19 nt, Artificial Sequence
  Description of Artificial Sequence: Synthetic oligonucleotide
  Antisense strand to SEQ ID NO: 2225844
auucauaggcuacuugaga

SEQ ID NO: 2225846 - RNA, 19 nt, Artificial Sequence
  Description of Artificial Sequence: Synthetic oligonucleotide
  Sense strand starting at position 433 of SEQ ID NO: 1883913
ucaaguagccuaugaaugu

SEQ ID NO: 2225847 - RNA, 19 nt, Artificial Sequence
  Description of Artificial Sequence: Synthetic oligonucleotide
  Antisense strand to SEQ ID NO: 2225846
acauucauaggcuacuuga

SEQ ID NO: 2225848 - RNA, 19 nt, Artificial Sequence
  Description of Artificial Sequence: Synthetic oligonucleotide
  Sense strand starting at position 437 of SEQ ID NO: 1883913
guagccuaugaauguauaa

SEQ ID NO: 2225849 - RNA, 19 nt, Artificial Sequence
  Description of Artificial Sequence: Synthetic oligonucleotide
  Antisense strand to SEQ ID NO: 2225848
uuauacauucauaggcuac

SEQ ID NO: 2225850 - RNA, 19 nt, Artificial Sequence
  Description of Artificial Sequence: Synthetic oligonucleotide
  Sense strand starting at position 476 of SEQ ID NO: 1883913
cuaguaguuagagaaguga

SEQ ID NO: 2225851 - RNA, 19 nt, Artificial Sequence
  Description of Artificial Sequence: Synthetic oligonucleotide
  Antisense strand to SEQ ID NO: 2225850
ucacuucucuaacuacuag

SEQ ID NO: 2225852 - RNA, 19 nt, Artificial Sequence
  Description of Artificial Sequence: Synthetic oligonucleotide
  Sense strand starting at position 614 of SEQ ID NO: 1883913
acacuuuaugaguguuuaa

SEQ ID NO: 2225853 - RNA, 19 nt, Artificial Sequence
  Description of Artificial Sequence: Synthetic oligonucleotide
  Antisense strand to SEQ ID NO: 2225852
uuaaacacucauaaagugu

SEQ ID NO: 2225854 - RNA, 19 nt, Artificial Sequence
  Description of Artificial Sequence: Synthetic oligonucleotide
  Sense strand starting at position 665 of SEQ ID NO: 1883913
gauggaaguguuggaugga

SEQ ID NO: 2225855 - RNA, 19 nt, Artificial Sequence
  Description of Artificial Sequence: Synthetic oligonucleotide
  Antisense strand to SEQ ID NO: 2225854
uccauccaacacuuccauc

SEQ ID NO: 2225856 - RNA, 19 nt, Artificial Sequence
  Description of Artificial Sequence: Synthetic oligonucleotide
  Sense strand starting at position 668 of SEQ ID NO: 1883913
ggaaguguuggauggaaac

SEQ ID NO: 2225857 - RNA, 19 nt, Artificial Sequence
  Description of Artificial Sequence: Synthetic oligonucleotide
  Antisense strand to SEQ ID NO: 2225856
guuuccauccaacacuucc

SEQ ID NO: 2225858 - RNA, 19 nt, Artificial Sequence
  Description of Artificial Sequence: Synthetic oligonucleotide
  Sense strand starting at position 729 of SEQ ID NO: 1883913
aucuuaaagugcuugguaa

SEQ ID NO: 2225859 - RNA, 19 nt, Artificial Sequence
  Description of Artificial Sequence: Synthetic oligonucleotide
  Antisense strand to SEQ ID NO: 2225858
uuaccaagcacuuuaagau

SEQ ID NO: 2225860 - RNA, 19 nt, Artificial Sequence
  Description of Artificial Sequence: Synthetic oligonucleotide
  Sense strand starting at position 730 of SEQ ID NO: 1883913
ucuuaaagugcuugguaag

SEQ ID NO: 2225861 - RNA, 19 nt, Artificial Sequence
  Description of Artificial Sequence: Synthetic oligonucleotide
  Antisense strand to SEQ ID NO: 2225860
cuuaccaagcacuuuaaga

SEQ ID NO: 2225862 - RNA, 19 nt, Artificial Sequence
  Description of Artificial Sequence: Synthetic oligonucleotide
  Sense strand starting at position 1113 of SEQ ID NO: 1883913
agacgaucauggcuguauu

SEQ ID NO: 2225863 - RNA, 19 nt, Artificial Sequence
  Description of Artificial Sequence: Synthetic oligonucleotide
  Antisense strand to SEQ ID NO: 2225862
aauacagccaugaucgucu

SEQ ID NO: 2225864 - RNA, 19 nt, Artificial Sequence
  Description of Artificial Sequence: Synthetic oligonucleotide
  Sense strand starting at position 1116 of SEQ ID NO: 1883913
cgaucauggcuguauuacu

SEQ ID NO: 2225865 - RNA, 19 nt, Artificial Sequence
  Description of Artificial Sequence: Synthetic oligonucleotide
  Antisense strand to SEQ ID NO: 2225864
aguaauacagccaugaucg

SEQ ID NO: 2225866 - RNA, 19 nt, Artificial Sequence
  Description of Artificial Sequence: Synthetic oligonucleotide
  Sense strand starting at position 1124 of SEQ ID NO: 1883913
gcuguauuacuugauguau

SEQ ID NO: 2225867 - RNA, 19 nt, Artificial Sequence
  Description of Artificial Sequence: Synthetic oligonucleotide
  Antisense strand to SEQ ID NO: 2225866
auacaucaaguaauacagc

SEQ ID NO: 2225868 - RNA, 19 nt, Artificial Sequence
  Description of Artificial Sequence: Synthetic oligonucleotide
  Sense strand starting at position 1132 of SEQ ID NO: 1883913
acuugauguauuggagaau

SEQ ID NO: 2225869 - RNA, 19 nt, Artificial Sequence
  Description of Artificial Sequence: Synthetic oligonucleotide
  Antisense strand to SEQ ID NO: 2225868
auucuccaauacaucaagu

SEQ ID NO: 2225870 - RNA, 19 nt, Artificial Sequence
  Description of Artificial Sequence: Synthetic oligonucleotide
  Sense strand starting at position 1183 of SEQ ID NO: 1883913
auggaagugaaguguggua

SEQ ID NO: 2225871 - RNA, 19 nt, Artificial Sequence
  Description of Artificial Sequence: Synthetic oligonucleotide
  Antisense strand to SEQ ID NO: 2225870
uaccacacuucacuuccau

SEQ ID NO: 2225872 - RNA, 19 nt, Artificial Sequence
  Description of Artificial Sequence: Synthetic oligonucleotide
  Sense strand starting at position 1185 of SEQ ID NO: 1883913
ggaagugaagugugguaga

SEQ ID NO: 2225873 - RNA, 19 nt, Artificial Sequence
  Description of Artificial Sequence: Synthetic oligonucleotide
  Antisense strand to SEQ ID NO: 2225872
ucuaccacacuucacuucc

SEQ ID NO: 2225874 - RNA, 19 nt, Artificial Sequence
  Description of Artificial Sequence: Synthetic oligonucleotide
  Sense strand starting at position 1241 of SEQ ID NO: 1883913
ugaacuauaugcuugccaa

SEQ ID NO: 2225875 - RNA, 19 nt, Artificial Sequence
  Description of Artificial Sequence: Synthetic oligonucleotide
  Antisense strand to SEQ ID NO: 2225874
uuggcaagcauauaguuca

SEQ ID NO: 2225876 - RNA, 19 nt, Artificial Sequence
  Description of Artificial Sequence: Synthetic oligonucleotide
  Sense strand starting at position 1322 of SEQ ID NO: 1883913
uccaaaguccaguagcauu

SEQ ID NO: 2225877 - RNA, 19 nt, Artificial Sequence
  Description of Artificial Sequence: Synthetic oligonucleotide
  Antisense strand to SEQ ID NO: 2225876
aaugcuacuggacuuugga

SEQ ID NO: 2225878 - RNA, 19 nt, Artificial Sequence
  Description of Artificial Sequence: Synthetic oligonucleotide
  Sense strand starting at position 1486 of SEQ ID NO: 1883913
agaggagucuuacacauuu

SEQ ID NO: 2225879 - RNA, 19 nt, Artificial Sequence
  Description of Artificial Sequence: Synthetic oligonucleotide
  Antisense strand to SEQ ID NO: 2225878
aaauguguaagacuccucu

SEQ ID NO: 2225880 - RNA, 19 nt, Artificial Sequence
  Description of Artificial Sequence: Synthetic oligonucleotide
  Sense strand starting at position 1628 of SEQ ID NO: 1883913
cgcgauguggcgcuacaua

SEQ ID NO: 2225881 - RNA, 19 nt, Artificial Sequence
  Description of Artificial Sequence: Synthetic oligonucleotide
  Antisense strand to SEQ ID NO: 2225880
uauguagcgccacaucgcg

SEQ ID NO: 2225882 - RNA, 19 nt, Artificial Sequence
  Description of Artificial Sequence: Synthetic oligonucleotide
  Sense strand starting at position 1800 of SEQ ID NO: 1883913
aagugagauuauuccucgu

SEQ ID NO: 2225883 - RNA, 19 nt, Artificial Sequence
  Description of Artificial Sequence: Synthetic oligonucleotide
  Antisense strand to SEQ ID NO: 2225882
acgaggaauaaucucacuu

SEQ ID NO: 2225884 - RNA, 19 nt, Artificial Sequence
  Description of Artificial Sequence: Synthetic oligonucleotide
  Sense strand starting at position 1816 of SEQ ID NO: 1883913
cguugucucggaaggcaga

SEQ ID NO: 2225885 - RNA, 19 nt, Artificial Sequence
  Description of Artificial Sequence: Synthetic oligonucleotide
  Antisense strand to SEQ ID NO: 2225884
ucugccuuccgagacaacg

SEQ ID NO: 2225886 - RNA, 19 nt, Artificial Sequence
  Description of Artificial Sequence: Synthetic oligonucleotide
  Sense strand starting at position 1862 of SEQ ID NO: 1883913
ggaaccuucugguccacau

SEQ ID NO: 2225887 - RNA, 19 nt, Artificial Sequence
  Description of Artificial Sequence: Synthetic oligonucleotide
  Antisense strand to SEQ ID NO: 2225886
auguggaccagaagguucc

SEQ ID NO: 2225888 - RNA, 19 nt, Artificial Sequence
  Description of Artificial Sequence: Synthetic oligonucleotide
  Sense strand starting at position 2078 of SEQ ID NO: 1883913
gcauauuucucugaggaac

SEQ ID NO: 2225889 - RNA, 19 nt, Artificial Sequence
  Description of Artificial Sequence: Synthetic oligonucleotide
  Antisense strand to SEQ ID NO: 2225888
guuccucagagaaauaugc

SEQ ID NO: 2225890 - RNA, 19 nt, Artificial Sequence
  Description of Artificial Sequence: Synthetic oligonucleotide
  Sense strand starting at position 2389 of SEQ ID NO: 1883913
ccuacugacgauugucaca

SEQ ID NO: 2225891 - RNA, 19 nt, Artificial Sequence
  Description of Artificial Sequence: Synthetic oligonucleotide
  Antisense strand to SEQ ID NO: 2225890
ugugacaaucgucaguagg

SEQ ID NO: 2225892 - RNA, 19 nt, Artificial Sequence
  Description of Artificial Sequence: Synthetic oligonucleotide
  Sense strand starting at position 2391 of SEQ ID NO: 1883913
uacugacgauugucacaaa

SEQ ID NO: 2225893 - RNA, 19 nt, Artificial Sequence
  Description of Artificial Sequence: Synthetic oligonucleotide
  Antisense strand to SEQ ID NO: 2225892
uuugugacaaucgucagua

SEQ ID NO: 2225894 - RNA, 19 nt, Artificial Sequence
  Description of Artificial Sequence: Synthetic oligonucleotide
  Sense strand starting at position 2398 of SEQ ID NO: 1883913
gauugucacaaacggugau

SEQ ID NO: 2225895 - RNA, 19 nt, Artificial Sequence
  Description of Artificial Sequence: Synthetic oligonucleotide
  Antisense strand to SEQ ID NO: 2225894
aucaccguuugugacaauc

SEQ ID NO: 2225896 - RNA, 19 nt, Artificial Sequence
  Description of Artificial Sequence: Synthetic oligonucleotide
  Sense strand starting at position 2404 of SEQ ID NO: 1883913
cacaaacggugauuccaau

SEQ ID NO: 2225897 - RNA, 19 nt, Artificial Sequence
  Description of Artificial Sequence: Synthetic oligonucleotide
  Antisense strand to SEQ ID NO: 2225896
auuggaaucaccguuugug

SEQ ID NO: 2225898 - RNA, 19 nt, Artificial Sequence
  Description of Artificial Sequence: Synthetic oligonucleotide
  Sense strand starting at position 2589 of SEQ ID NO: 1883913
uucugaaauccacacguga

SEQ ID NO: 2225899 - RNA, 19 nt, Artificial Sequence
  Description of Artificial Sequence: Synthetic oligonucleotide
  Antisense strand to SEQ ID NO: 2225898
ucacguguggauuucagaa

SEQ ID NO: 2225900 - RNA, 19 nt, Artificial Sequence
  Description of Artificial Sequence: Synthetic oligonucleotide
  Sense strand starting at position 2674 of SEQ ID NO: 1883913
ggagaugucuuaucucaca

SEQ ID NO: 2225901 - RNA, 19 nt, Artificial Sequence
  Description of Artificial Sequence: Synthetic oligonucleotide
  Antisense strand to SEQ ID NO: 2225900
ugugagauaagacaucucc

SEQ ID NO: 2225902 - RNA, 19 nt, Artificial Sequence
  Description of Artificial Sequence: Synthetic oligonucleotide
  Sense strand starting at position 2767 of SEQ ID NO: 1883913
cugauuuccuaacauguga

SEQ ID NO: 2225903 - RNA, 19 nt, Artificial Sequence
  Description of Artificial Sequence: Synthetic oligonucleotide
  Antisense strand to SEQ ID NO: 2225902
ucacauguuaggaaaucag

SEQ ID NO: 2225904 - RNA, 19 nt, Artificial Sequence
  Description of Artificial Sequence: Synthetic oligonucleotide
  Sense strand starting at position 2848 of SEQ ID NO: 1883913
auugacuccuguguuaaca

SEQ ID NO: 2225905 - RNA, 19 nt, Artificial Sequence
  Description of Artificial Sequence: Synthetic oligonucleotide
  Antisense strand to SEQ ID NO: 2225904
uguuaacacaggagucaau

SEQ ID NO: 2225906 - RNA, 19 nt, Artificial Sequence
  Description of Artificial Sequence: Synthetic oligonucleotide
  Sense strand starting at position 3425 of SEQ ID NO: 1883913
cgucuucccguggucaaca

SEQ ID NO: 2225907 - RNA, 19 nt, Artificial Sequence
  Description of Artificial Sequence: Synthetic oligonucleotide
  Antisense strand to SEQ ID NO: 2225906
uguugaccacgggaagacg

SEQ ID NO: 2225908 - RNA, 19 nt, Artificial Sequence
  Description of Artificial Sequence: Synthetic oligonucleotide
  Sense strand starting at position 75 of SEQ ID NO: 1883914
acacaaugcucucuuggaa

SEQ ID NO: 2225909 - RNA, 19 nt, Artificial Sequence
  Description of Artificial Sequence: Synthetic oligonucleotide
  Antisense strand to SEQ ID NO: 2225908
uuccaagagagcauugugu

SEQ ID NO: 2225910 - RNA, 19 nt, Artificial Sequence
  Description of Artificial Sequence: Synthetic oligonucleotide
  Sense strand starting at position 90 of SEQ ID NO: 1883914
ggaaauuacugaugauaau

SEQ ID NO: 2225911 - RNA, 19 nt, Artificial Sequence
  Description of Artificial Sequence: Synthetic oligonucleotide
  Antisense strand to SEQ ID NO: 2225910
auuaucaucaguaauuucc

SEQ ID NO: 2225912 - RNA, 19 nt, Artificial Sequence
  Description of Artificial Sequence: Synthetic oligonucleotide
  Sense strand starting at position 480 of SEQ ID NO: 1883914
ucucaugccgauugugaca

SEQ ID NO: 2225913 - RNA, 19 nt, Artificial Sequence
  Description of Artificial Sequence: Synthetic oligonucleotide
  Antisense strand to SEQ ID NO: 2225912
ugucacaaucggcaugaga

SEQ ID NO: 2225914 - RNA, 19 nt, Artificial Sequence
  Description of Artificial Sequence: Synthetic oligonucleotide
  Sense strand starting at position 774 of SEQ ID NO: 1883914
agugaugaacuacgucaaa

SEQ ID NO: 2225915 - RNA, 19 nt, Artificial Sequence
  Description of Artificial Sequence: Synthetic oligonucleotide
  Antisense strand to SEQ ID NO: 2225914
uuugacguaguucaucacu

SEQ ID NO: 2225916 - RNA, 19 nt, Artificial Sequence
  Description of Artificial Sequence: Synthetic oligonucleotide
  Sense strand starting at position 785 of SEQ ID NO: 1883914
acgucaaaugcugagucaa

SEQ ID NO: 2225917 - RNA, 19 nt, Artificial Sequence
  Description of Artificial Sequence: Synthetic oligonucleotide
  Antisense strand to SEQ ID NO: 2225916
uugacucagcauuugacgu

SEQ ID NO: 2225918 - RNA, 19 nt, Artificial Sequence
  Description of Artificial Sequence: Synthetic oligonucleotide
  Sense strand starting at position 787 of SEQ ID NO: 1883914
gucaaaugcugagucaagu

SEQ ID NO: 2225919 - RNA, 19 nt, Artificial Sequence
  Description of Artificial Sequence: Synthetic oligonucleotide
  Antisense strand to SEQ ID NO: 2225918
acuugacucagcauuugac

SEQ ID NO: 2225920 - RNA, 19 nt, Artificial Sequence
  Description of Artificial Sequence: Synthetic oligonucleotide
  Sense strand starting at position 886 of SEQ ID NO: 1883914
uagaaugaucgagguaaau

SEQ ID NO: 2225921 - RNA, 19 nt, Artificial Sequence
  Description of Artificial Sequence: Synthetic oligonucleotide
  Antisense strand to SEQ ID NO: 2225920
auuuaccucgaucauucua

SEQ ID NO: 2225922 - RNA, 19 nt, Artificial Sequence
  Description of Artificial Sequence: Synthetic oligonucleotide
  Sense strand starting at position 895 of SEQ ID NO: 1883914
cgagguaaauaucugacuu

SEQ ID NO: 2225923 - RNA, 19 nt, Artificial Sequence
  Description of Artificial Sequence: Synthetic oligonucleotide
  Antisense strand to SEQ ID NO: 2225922
aagucagauauuuaccucg

SEQ ID NO: 2225924 - RNA, 19 nt, Artificial Sequence
  Description of Artificial Sequence: Synthetic oligonucleotide
  Sense strand starting at position 949 of SEQ ID NO: 1883914
gaauauaagcacuguagag

SEQ ID NO: 2225925 - RNA, 19 nt, Artificial Sequence
  Description of Artificial Sequence: Synthetic oligonucleotide
  Antisense strand to SEQ ID NO: 2225924
cucuacagugcuuauauuc

SEQ ID NO: 2225926 - RNA, 19 nt, Artificial Sequence
  Description of Artificial Sequence: Synthetic oligonucleotide
  Sense strand starting at position 1026 of SEQ ID NO: 1883914
agaggaaaguucgauggaa

SEQ ID NO: 2225927 - RNA, 19 nt, Artificial Sequence
  Description of Artificial Sequence: Synthetic oligonucleotide
  Antisense strand to SEQ ID NO: 2225926
uuccaucgaacuuuccucu

SEQ ID NO: 2225928 - RNA, 19 nt, Artificial Sequence
  Description of Artificial Sequence: Synthetic oligonucleotide
  Sense strand starting at position 1230 of SEQ ID NO: 1883914
ugacaaaugcuccgaugaa

SEQ ID NO: 2225929 - RNA, 19 nt, Artificial Sequence
  Description of Artificial Sequence: Synthetic oligonucleotide
  Antisense strand to SEQ ID NO: 2225928
uucaucggagcauuuguca

SEQ ID NO: 2225930 - RNA, 19 nt, Artificial Sequence
  Description of Artificial Sequence: Synthetic oligonucleotide
  Sense strand starting at position 1276 of SEQ ID NO: 1883914
cgcaaugaauacucguauu

SEQ ID NO: 2225931 - RNA, 19 nt, Artificial Sequence
  Description of Artificial Sequence: Synthetic oligonucleotide
  Antisense strand to SEQ ID NO: 2225930
aauacgaguauucauugcg

SEQ ID NO: 2225932 - RNA, 19 nt, Artificial Sequence
  Description of Artificial Sequence: Synthetic oligonucleotide
  Sense strand starting at position 1300 of SEQ ID NO: 1883914
gcaaauauuuaaggacuuu

SEQ ID NO: 2225933 - RNA, 19 nt, Artificial Sequence
  Description of Artificial Sequence: Synthetic oligonucleotide
  Antisense strand to SEQ ID NO: 2225932
aaaguccuuaaauauuugc

SEQ ID NO: 2225934 - RNA, 19 nt, Artificial Sequence
  Description of Artificial Sequence: Synthetic oligonucleotide
  Sense strand starting at position 1358 of SEQ ID NO: 1883914
aguggaugucagcauuacu

SEQ ID NO: 2225935 - RNA, 19 nt, Artificial Sequence
  Description of Artificial Sequence: Synthetic oligonucleotide
  Antisense strand to SEQ ID NO: 2225934
aguaaugcugacauccacu

SEQ ID NO: 2225936 - RNA, 19 nt, Artificial Sequence
  Description of Artificial Sequence: Synthetic oligonucleotide
  Sense strand starting at position 2342 of SEQ ID NO: 1883914
ccagcuucgugaucuuaaa

SEQ ID NO: 2225937 - RNA, 19 nt, Artificial Sequence
  Description of Artificial Sequence: Synthetic oligonucleotide
  Antisense strand to SEQ ID NO: 2225936
uuuaagaucacgaagcugg

SEQ ID NO: 2225938 - RNA, 19 nt, Artificial Sequence
  Description of Artificial Sequence: Synthetic oligonucleotide
  Sense strand starting at position 2414 of SEQ ID NO: 1883914
uuaagugguuucuugccau

SEQ ID NO: 2225939 - RNA, 19 nt, Artificial Sequence
  Description of Artificial Sequence: Synthetic oligonucleotide
  Antisense strand to SEQ ID NO: 2225938
auggcaagaaaccacuuaa

SEQ ID NO: 2225940 - RNA, 19 nt, Artificial Sequence
  Description of Artificial Sequence: Synthetic oligonucleotide
  Sense strand starting at position 2440 of SEQ ID NO: 1883914
cacgcacugcuuuaagaug

SEQ ID NO: 2225941 - RNA, 19 nt, Artificial Sequence
  Description of Artificial Sequence: Synthetic oligonucleotide
  Antisense strand to SEQ ID NO: 2225940
caucuuaaagcagugcgug

SEQ ID NO: 2225942 - RNA, 19 nt, Artificial Sequence
  Description of Artificial Sequence: Synthetic oligonucleotide
  Sense strand starting at position 2514 of SEQ ID NO: 1883914
uugucuuuaaguugaacga

SEQ ID NO: 2225943 - RNA, 19 nt, Artificial Sequence
  Description of Artificial Sequence: Synthetic oligonucleotide
  Antisense strand to SEQ ID NO: 2225942
ucguucaacuuaaagacaa

SEQ ID NO: 2225944 - RNA, 19 nt, Artificial Sequence
  Description of Artificial Sequence: Synthetic oligonucleotide
  Sense strand starting at position 2515 of SEQ ID NO: 1883914
ugucuuuaaguugaacgaa

SEQ ID NO: 2225945 - RNA, 19 nt, Artificial Sequence
  Description of Artificial Sequence: Synthetic oligonucleotide
  Antisense strand to SEQ ID NO: 2225944
uucguucaacuuaaagaca

SEQ ID NO: 2225946 - RNA, 19 nt, Artificial Sequence
  Description of Artificial Sequence: Synthetic oligonucleotide
  Sense strand starting at position 2518 of SEQ ID NO: 1883914
cuuuaaguugaacgaagua

SEQ ID NO: 2225947 - RNA, 19 nt, Artificial Sequence
  Description of Artificial Sequence: Synthetic oligonucleotide
  Antisense strand to SEQ ID NO: 2225946
uacuucguucaacuuaaag

SEQ ID NO: 2225948 - RNA, 19 nt, Artificial Sequence
  Description of Artificial Sequence: Synthetic oligonucleotide
  Sense strand starting at position 2583 of SEQ ID NO: 1883914
uaauaaugccuguguguaa

SEQ ID NO: 2225949 - RNA, 19 nt, Artificial Sequence
  Description of Artificial Sequence: Synthetic oligonucleotide
  Antisense strand to SEQ ID NO: 2225948
uuacacacaggcauuauua

SEQ ID NO: 2225950 - RNA, 19 nt, Artificial Sequence
  Description of Artificial Sequence: Synthetic oligonucleotide
  Sense strand starting at position 2584 of SEQ ID NO: 1883914
aauaaugccuguguguaaa

SEQ ID NO: 2225951 - RNA, 19 nt, Artificial Sequence
  Description of Artificial Sequence: Synthetic oligonucleotide
  Antisense strand to SEQ ID NO: 2225950
uuuacacacaggcauuauu

SEQ ID NO: 2225952 - RNA, 19 nt, Artificial Sequence
  Description of Artificial Sequence: Synthetic oligonucleotide
  Sense strand starting at position 2587 of SEQ ID NO: 1883914
aaugccuguguguaaauga

SEQ ID NO: 2225953 - RNA, 19 nt, Artificial Sequence
  Description of Artificial Sequence: Synthetic oligonucleotide
  Antisense strand to SEQ ID NO: 2225952
ucauuuacacacaggcauu

SEQ ID NO: 2225954 - RNA, 19 nt, Artificial Sequence
  Description of Artificial Sequence: Synthetic oligonucleotide
  Sense strand starting at position 2866 of SEQ ID NO: 1883914
ucugguguaccagaaaugu

SEQ ID NO: 2225955 - RNA, 19 nt, Artificial Sequence
  Description of Artificial Sequence: Synthetic oligonucleotide
  Antisense strand to SEQ ID NO: 2225954
acauuucugguacaccaga

SEQ ID NO: 2225956 - RNA, 19 nt, Artificial Sequence
  Description of Artificial Sequence: Synthetic oligonucleotide
  Sense strand starting at position 3240 of SEQ ID NO: 1883914
gcauaugcuuauuuaugca

SEQ ID NO: 2225957 - RNA, 19 nt, Artificial Sequence
  Description of Artificial Sequence: Synthetic oligonucleotide
  Antisense strand to SEQ ID NO: 2225956
ugcauaaauaagcauaugc

SEQ ID NO: 2225958 - RNA, 19 nt, Artificial Sequence
  Description of Artificial Sequence: Synthetic oligonucleotide
  Sense strand starting at position 3374 of SEQ ID NO: 1883914
gaaaguaguuuagaaagaa

SEQ ID NO: 2225959 - RNA, 19 nt, Artificial Sequence
  Description of Artificial Sequence: Synthetic oligonucleotide
  Antisense strand to SEQ ID NO: 2225958
uucuuucuaaacuacuuuc

SEQ ID NO: 2225960 - RNA, 19 nt, Artificial Sequence
  Description of Artificial Sequence: Synthetic oligonucleotide
  Sense strand starting at position 3614 of SEQ ID NO: 1883914
ucagcaugagucuagccaa

SEQ ID NO: 2225961 - RNA, 19 nt, Artificial Sequence
  Description of Artificial Sequence: Synthetic oligonucleotide
  Antisense strand to SEQ ID NO: 2225960
uuggcuagacucaugcuga

SEQ ID NO: 2225962 - RNA, 19 nt, Artificial Sequence
  Description of Artificial Sequence: Synthetic oligonucleotide
  Sense strand starting at position 3644 of SEQ ID NO: 1883914
ucauaucuguggccuuaau

SEQ ID NO: 2225963 - RNA, 19 nt, Artificial Sequence
  Description of Artificial Sequence: Synthetic oligonucleotide
  Antisense strand to SEQ ID NO: 2225962
auuaaggccacagauauga

SEQ ID NO: 2225964 - RNA, 19 nt, Artificial Sequence
  Description of Artificial Sequence: Synthetic oligonucleotide
  Sense strand starting at position 3655 of SEQ ID NO: 1883914
gccuuaauagcacagcuaa

SEQ ID NO: 2225965 - RNA, 19 nt, Artificial Sequence
  Description of Artificial Sequence: Synthetic oligonucleotide
  Antisense strand to SEQ ID NO: 2225964
uuagcugugcuauuaaggc

SEQ ID NO: 2225966 - RNA, 19 nt, Artificial Sequence
  Description of Artificial Sequence: Synthetic oligonucleotide
  Sense strand starting at position 3687 of SEQ ID NO: 1883914
guuaucagugcugacaaug

SEQ ID NO: 2225967 - RNA, 19 nt, Artificial Sequence
  Description of Artificial Sequence: Synthetic oligonucleotide
  Antisense strand to SEQ ID NO: 2225966
cauugucagcacugauaac

SEQ ID NO: 2225968 - RNA, 19 nt, Artificial Sequence
  Description of Artificial Sequence: Synthetic oligonucleotide
  Sense strand starting at position 3763 of SEQ ID NO: 1883914
gugguuugagucugugaca

SEQ ID NO: 2225969 - RNA, 19 nt, Artificial Sequence
  Description of Artificial Sequence: Synthetic oligonucleotide
  Antisense strand to SEQ ID NO: 2225968
ugucacagacucaaaccac

SEQ ID NO: 2225970 - RNA, 19 nt, Artificial Sequence
  Description of Artificial Sequence: Synthetic oligonucleotide
  Sense strand starting at position 3764 of SEQ ID NO: 1883914
ugguuugagucugugacau

SEQ ID NO: 2225971 - RNA, 19 nt, Artificial Sequence
  Description of Artificial Sequence: Synthetic oligonucleotide
  Antisense strand to SEQ ID NO: 2225970
augucacagacucaaacca

SEQ ID NO: 2225972 - RNA, 19 nt, Artificial Sequence
  Description of Artificial Sequence: Synthetic oligonucleotide
  Sense strand starting at position 3775 of SEQ ID NO: 1883914
ugugacaugaaucgauuau

SEQ ID NO: 2225973 - RNA, 19 nt, Artificial Sequence
  Description of Artificial Sequence: Synthetic oligonucleotide
  Antisense strand to SEQ ID NO: 2225972
auaaucgauucaugucaca

SEQ ID NO: 2225974 - RNA, 19 nt, Artificial Sequence
  Description of Artificial Sequence: Synthetic oligonucleotide
  Sense strand starting at position 3776 of SEQ ID NO: 1883914
gugacaugaaucgauuauu

SEQ ID NO: 2225975 - RNA, 19 nt, Artificial Sequence
  Description of Artificial Sequence: Synthetic oligonucleotide
  Antisense strand to SEQ ID NO: 2225974
aauaaucgauucaugucac

SEQ ID NO: 2225976 - RNA, 19 nt, Artificial Sequence
  Description of Artificial Sequence: Synthetic oligonucleotide
  Sense strand starting at position 3782 of SEQ ID NO: 1883914
ugaaucgauuauucuuuga

SEQ ID NO: 2225977 - RNA, 19 nt, Artificial Sequence
  Description of Artificial Sequence: Synthetic oligonucleotide
  Antisense strand to SEQ ID NO: 2225976
ucaaagaauaaucgauuca

SEQ ID NO: 2225978 - RNA, 19 nt, Artificial Sequence
  Description of Artificial Sequence: Synthetic oligonucleotide
  Sense strand starting at position 3846 of SEQ ID NO: 1883914
aaggacaucugugaacuau

SEQ ID NO: 2225979 - RNA, 19 nt, Artificial Sequence
  Description of Artificial Sequence: Synthetic oligonucleotide
  Antisense strand to SEQ ID NO: 2225978
auaguucacagauguccuu

SEQ ID NO: 2225980 - RNA, 19 nt, Artificial Sequence
  Description of Artificial Sequence: Synthetic oligonucleotide
  Sense strand starting at position 3855 of SEQ ID NO: 1883914
ugugaacuaucuccagcua

SEQ ID NO: 2225981 - RNA, 19 nt, Artificial Sequence
  Description of Artificial Sequence: Synthetic oligonucleotide
  Antisense strand to SEQ ID NO: 2225980
uagcuggagauaguucaca

SEQ ID NO: 2225982 - RNA, 19 nt, Artificial Sequence
  Description of Artificial Sequence: Synthetic oligonucleotide
  Sense strand starting at position 3856 of SEQ ID NO: 1883914
gugaacuaucuccagcuaa

SEQ ID NO: 2225983 - RNA, 19 nt, Artificial Sequence
  Description of Artificial Sequence: Synthetic oligonucleotide
  Antisense strand to SEQ ID NO: 2225982
uuagcuggagauaguucac

SEQ ID NO: 2225984 - RNA, 19 nt, Artificial Sequence
  Description of Artificial Sequence: Synthetic oligonucleotide
  Sense strand starting at position 3955 of SEQ ID NO: 1883914
aguauuauacuggaggucu

SEQ ID NO: 2225985 - RNA, 19 nt, Artificial Sequence
  Description of Artificial Sequence: Synthetic oligonucleotide
  Antisense strand to SEQ ID NO: 2225984
agaccuccaguauaauacu

SEQ ID NO: 2225986 - RNA, 19 nt, Artificial Sequence
  Description of Artificial Sequence: Synthetic oligonucleotide
  Sense strand starting at position 3957 of SEQ ID NO: 1883914
uauuauacuggaggucuua

SEQ ID NO: 2225987 - RNA, 19 nt, Artificial Sequence
  Description of Artificial Sequence: Synthetic oligonucleotide
  Antisense strand to SEQ ID NO: 2225986
uaagaccuccaguauaaua

SEQ ID NO: 2225988 - RNA, 19 nt, Artificial Sequence
  Description of Artificial Sequence: Synthetic oligonucleotide
  Sense strand starting at position 104 of SEQ ID NO: 1883915
auaagucuacagugggaaa

SEQ ID NO: 2225989 - RNA, 19 nt, Artificial Sequence
  Description of Artificial Sequence: Synthetic oligonucleotide
  Antisense strand to SEQ ID NO: 2225988
uuucccacuguagacuuau

SEQ ID NO: 2225990 - RNA, 19 nt, Artificial Sequence
  Description of Artificial Sequence: Synthetic oligonucleotide
  Sense strand starting at position 507 of SEQ ID NO: 1883915
gacaauguuucuguuaaug

SEQ ID NO: 2225991 - RNA, 19 nt, Artificial Sequence
  Description of Artificial Sequence: Synthetic oligonucleotide
  Antisense strand to SEQ ID NO: 2225990
cauuaacagaaacauuguc

SEQ ID NO: 2225992 - RNA, 19 nt, Artificial Sequence
  Description of Artificial Sequence: Synthetic oligonucleotide
  Sense strand starting at position 592 of SEQ ID NO: 1883915
augaaacuguuugcuauca

SEQ ID NO: 2225993 - RNA, 19 nt, Artificial Sequence
  Description of Artificial Sequence: Synthetic oligonucleotide
  Antisense strand to SEQ ID NO: 2225992
ugauagcaaacaguuucau

SEQ ID NO: 2225994 - RNA, 19 nt, Artificial Sequence
  Description of Artificial Sequence: Synthetic oligonucleotide
  Sense strand starting at position 613 of SEQ ID NO: 1883915
gcaugcuaagaugaaagua

SEQ ID NO: 2225995 - RNA, 19 nt, Artificial Sequence
  Description of Artificial Sequence: Synthetic oligonucleotide
  Antisense strand to SEQ ID NO: 2225994
uacuuucaucuuagcaugc

SEQ ID NO: 2225996 - RNA, 19 nt, Artificial Sequence
  Description of Artificial Sequence: Synthetic oligonucleotide
  Sense strand starting at position 658 of SEQ ID NO: 1883915
cuauauuguuaaguggaaa

SEQ ID NO: 2225997 - RNA, 19 nt, Artificial Sequence
  Description of Artificial Sequence: Synthetic oligonucleotide
  Antisense strand to SEQ ID NO: 2225996
uuuccacuuaacaauauag

SEQ ID NO: 2225998 - RNA, 19 nt, Artificial Sequence
  Description of Artificial Sequence: Synthetic oligonucleotide
  Sense strand starting at position 879 of SEQ ID NO: 1883915
auaauaugagcaugcagaa

SEQ ID NO: 2225999 - RNA, 19 nt, Artificial Sequence
  Description of Artificial Sequence: Synthetic oligonucleotide
  Antisense strand to SEQ ID NO: 2225998
uucugcaugcucauauuau

SEQ ID NO: 2226000 - RNA, 19 nt, Artificial Sequence
  Description of Artificial Sequence: Synthetic oligonucleotide
  Sense strand starting at position 1178 of SEQ ID NO: 1883915
agaauaaacucaguggugu

SEQ ID NO: 2226001 - RNA, 19 nt, Artificial Sequence
  Description of Artificial Sequence: Synthetic oligonucleotide
  Antisense strand to SEQ ID NO: 2226000
acaccacugaguuuauucu

SEQ ID NO: 2226002 - RNA, 19 nt, Artificial Sequence
  Description of Artificial Sequence: Synthetic oligonucleotide
  Sense strand starting at position 1179 of SEQ ID NO: 1883915
gaauaaacucagugguguu

SEQ ID NO: 2226003 - RNA, 19 nt, Artificial Sequence
  Description of Artificial Sequence: Synthetic oligonucleotide
  Antisense strand to SEQ ID NO: 2226002
aacaccacugaguuuauuc

SEQ ID NO: 2226004 - RNA, 19 nt, Artificial Sequence
  Description of Artificial Sequence: Synthetic oligonucleotide
  Sense strand starting at position 1191 of SEQ ID NO: 1883915
ugguguuagaguggaauca

SEQ ID NO: 2226005 - RNA, 19 nt, Artificial Sequence
  Description of Artificial Sequence: Synthetic oligonucleotide
  Antisense strand to SEQ ID NO: 2226004
ugauuccacucuaacacca

SEQ ID NO: 2226006 - RNA, 19 nt, Artificial Sequence
  Description of Artificial Sequence: Synthetic oligonucleotide
  Sense strand starting at position 1258 of SEQ ID NO: 1883915
acagucagauagguauaga

SEQ ID NO: 2226007 - RNA, 19 nt, Artificial Sequence
  Description of Artificial Sequence: Synthetic oligonucleotide
  Antisense strand to SEQ ID NO: 2226006
ucuauaccuaucugacugu

SEQ ID NO: 2226008 - RNA, 19 nt, Artificial Sequence
  Description of Artificial Sequence: Synthetic oligonucleotide
  Sense strand starting at position 1275 of SEQ ID NO: 1883915
gacaaaugucaaugcaugu

SEQ ID NO: 2226009 - RNA, 19 nt, Artificial Sequence
  Description of Artificial Sequence: Synthetic oligonucleotide
  Antisense strand to SEQ ID NO: 2226008
acaugcauugacauuuguc

SEQ ID NO: 2226010 - RNA, 19 nt, Artificial Sequence
  Description of Artificial Sequence: Synthetic oligonucleotide
  Sense strand starting at position 1292 of SEQ ID NO: 1883915
gugugaguacaccaacaua

SEQ ID NO: 2226011 - RNA, 19 nt, Artificial Sequence
  Description of Artificial Sequence: Synthetic oligonucleotide
  Antisense strand to SEQ ID NO: 2226010
uauguugguguacucacac

SEQ ID NO: 2226012 - RNA, 19 nt, Artificial Sequence
  Description of Artificial Sequence: Synthetic oligonucleotide
  Sense strand starting at position 1319 of SEQ ID NO: 1883915
agcucugucaauggagaga

SEQ ID NO: 2226013 - RNA, 19 nt, Artificial Sequence
  Description of Artificial Sequence: Synthetic oligonucleotide
  Antisense strand to SEQ ID NO: 2226012
ucucuccauugacagagcu

SEQ ID NO: 2226014 - RNA, 19 nt, Artificial Sequence
  Description of Artificial Sequence: Synthetic oligonucleotide
  Sense strand starting at position 1349 of SEQ ID NO: 1883915
augacauuccagugcuaau

SEQ ID NO: 2226015 - RNA, 19 nt, Artificial Sequence
  Description of Artificial Sequence: Synthetic oligonucleotide
  Antisense strand to SEQ ID NO: 2226014
auuagcacuggaaugucau

SEQ ID NO: 2226016 - RNA, 19 nt, Artificial Sequence
  Description of Artificial Sequence: Synthetic oligonucleotide
  Sense strand starting at position 1372 of SEQ ID NO: 1883915
acaccuagugcucagauca

SEQ ID NO: 2226017 - RNA, 19 nt, Artificial Sequence
  Description of Artificial Sequence: Synthetic oligonucleotide
  Antisense strand to SEQ ID NO: 2226016
ugaucugagcacuaggugu

SEQ ID NO: 2226018 - RNA, 19 nt, Artificial Sequence
  Description of Artificial Sequence: Synthetic oligonucleotide
  Sense strand starting at position 1382 of SEQ ID NO: 1883915
cucagaucaugguuucuag

SEQ ID NO: 2226019 - RNA, 19 nt, Artificial Sequence
  Description of Artificial Sequence: Synthetic oligonucleotide
  Antisense strand to SEQ ID NO: 2226018
cuagaaaccaugaucugag

SEQ ID NO: 2226020 - RNA, 19 nt, Artificial Sequence
  Description of Artificial Sequence: Synthetic oligonucleotide
  Sense strand starting at position 1399 of SEQ ID NO: 1883915
aguaccauucuccaguuaa

SEQ ID NO: 2226021 - RNA, 19 nt, Artificial Sequence
  Description of Artificial Sequence: Synthetic oligonucleotide
  Antisense strand to SEQ ID NO: 2226020
uuaacuggagaaugguacu

SEQ ID NO: 2226022 - RNA, 19 nt, Artificial Sequence
  Description of Artificial Sequence: Synthetic oligonucleotide
  Sense strand starting at position 1476 of SEQ ID NO: 1883915
gcaugauaagccuggaaca

SEQ ID NO: 2226023 - RNA, 19 nt, Artificial Sequence
  Description of Artificial Sequence: Synthetic oligonucleotide
  Antisense strand to SEQ ID NO: 2226022
uguuccaggcuuaucaugc

SEQ ID NO: 2226024 - RNA, 19 nt, Artificial Sequence
  Description of Artificial Sequence: Synthetic oligonucleotide
  Sense strand starting at position 1486 of SEQ ID NO: 1883915
ccuggaacacuuugugaug

SEQ ID NO: 2226025 - RNA, 19 nt, Artificial Sequence
  Description of Artificial Sequence: Synthetic oligonucleotide
  Antisense strand to SEQ ID NO: 2226024
caucacaaaguguuccagg

SEQ ID NO: 2226026 - RNA, 19 nt, Artificial Sequence
  Description of Artificial Sequence: Synthetic oligonucleotide
  Sense strand starting at position 1998 of SEQ ID NO: 1883915
gucugaucacuccaacagu

SEQ ID NO: 2226027 - RNA, 19 nt, Artificial Sequence
  Description of Artificial Sequence: Synthetic oligonucleotide
  Antisense strand to SEQ ID NO: 2226026
acuguuggagugaucagac

SEQ ID NO: 2226028 - RNA, 19 nt, Artificial Sequence
  Description of Artificial Sequence: Synthetic oligonucleotide
  Sense strand starting at position 2047 of SEQ ID NO: 1883915
uuagcauuggaucauaauc

SEQ ID NO: 2226029 - RNA, 19 nt, Artificial Sequence
  Description of Artificial Sequence: Synthetic oligonucleotide
  Antisense strand to SEQ ID NO: 2226028
gauuaugauccaaugcuaa

SEQ ID NO: 2226030 - RNA, 19 nt, Artificial Sequence
  Description of Artificial Sequence: Synthetic oligonucleotide
  Sense strand starting at position 2112 of SEQ ID NO: 1883915
ugaauaaauaaguggugua

SEQ ID NO: 2226031 - RNA, 19 nt, Artificial Sequence
  Description of Artificial Sequence: Synthetic oligonucleotide
  Antisense strand to SEQ ID NO: 2226030
uacaccacuuauuuauuca

SEQ ID NO: 2226032 - RNA, 19 nt, Artificial Sequence
  Description of Artificial Sequence: Synthetic oligonucleotide
  Sense strand starting at position 2119 of SEQ ID NO: 1883915
auaagugguguagaagcaa

SEQ ID NO: 2226033 - RNA, 19 nt, Artificial Sequence
  Description of Artificial Sequence: Synthetic oligonucleotide
  Antisense strand to SEQ ID NO: 2226032
uugcuucuacaccacuuau

SEQ ID NO: 2226034 - RNA, 19 nt, Artificial Sequence
  Description of Artificial Sequence: Synthetic oligonucleotide
  Sense strand starting at position 2281 of SEQ ID NO: 1883915
acaggauauuuguauaucu

SEQ ID NO: 2226035 - RNA, 19 nt, Artificial Sequence
  Description of Artificial Sequence: Synthetic oligonucleotide
  Antisense strand to SEQ ID NO: 2226034
agauauacaaauauccugu

SEQ ID NO: 2226036 - RNA, 19 nt, Artificial Sequence
  Description of Artificial Sequence: Synthetic oligonucleotide
  Sense strand starting at position 2416 of SEQ ID NO: 1883915
ugcccugagaaguauguaa

SEQ ID NO: 2226037 - RNA, 19 nt, Artificial Sequence
  Description of Artificial Sequence: Synthetic oligonucleotide
  Antisense strand to SEQ ID NO: 2226036
uuacauacuucucagggca

SEQ ID NO: 2226038 - RNA, 19 nt, Artificial Sequence
  Description of Artificial Sequence: Synthetic oligonucleotide
  Sense strand starting at position 2418 of SEQ ID NO: 1883915
cccugagaaguauguaaca

SEQ ID NO: 2226039 - RNA, 19 nt, Artificial Sequence
  Description of Artificial Sequence: Synthetic oligonucleotide
  Antisense strand to SEQ ID NO: 2226038
uguuacauacuucucaggg

SEQ ID NO: 2226040 - RNA, 19 nt, Artificial Sequence
  Description of Artificial Sequence: Synthetic oligonucleotide
  Sense strand starting at position 2618 of SEQ ID NO: 1883915
guaucaaggccaugaauac

SEQ ID NO: 2226041 - RNA, 19 nt, Artificial Sequence
  Description of Artificial Sequence: Synthetic oligonucleotide
  Antisense strand to SEQ ID NO: 2226040
guauucauggccuugauac

SEQ ID NO: 2226042 - RNA, 19 nt, Artificial Sequence
  Description of Artificial Sequence: Synthetic oligonucleotide
  Sense strand starting at position 2746 of SEQ ID NO: 1883915
ugaacauuaguugacugua

SEQ ID NO: 2226043 - RNA, 19 nt, Artificial Sequence
  Description of Artificial Sequence: Synthetic oligonucleotide
  Antisense strand to SEQ ID NO: 2226042
uacagucaacuaauguuca

SEQ ID NO: 2226044 - RNA, 19 nt, Artificial Sequence
  Description of Artificial Sequence: Synthetic oligonucleotide
  Sense strand starting at position 2764 of SEQ ID NO: 1883915
acugacucaguaugaguuu

SEQ ID NO: 2226045 - RNA, 19 nt, Artificial Sequence
  Description of Artificial Sequence: Synthetic oligonucleotide
  Antisense strand to SEQ ID NO: 2226044
aaacucauacugagucagu

SEQ ID NO: 2226046 - RNA, 19 nt, Artificial Sequence
  Description of Artificial Sequence: Synthetic oligonucleotide
  Sense strand starting at position 2797 of SEQ ID NO: 1883915
uuguucuaugauuaugcua

SEQ ID NO: 2226047 - RNA, 19 nt, Artificial Sequence
  Description of Artificial Sequence: Synthetic oligonucleotide
  Antisense strand to SEQ ID NO: 2226046
uagcauaaucauagaacaa

SEQ ID NO: 2226048 - RNA, 19 nt, Artificial Sequence
  Description of Artificial Sequence: Synthetic oligonucleotide
  Sense strand starting at position 3018 of SEQ ID NO: 1883915
gacugucaccuugggauau

SEQ ID NO: 2226049 - RNA, 19 nt, Artificial Sequence
  Description of Artificial Sequence: Synthetic oligonucleotide
  Antisense strand to SEQ ID NO: 2226048
auaucccaaggugacaguc

SEQ ID NO: 2226050 - RNA, 19 nt, Artificial Sequence
  Description of Artificial Sequence: Synthetic oligonucleotide
  Sense strand starting at position 3321 of SEQ ID NO: 1883915
ccugcugagguauaauaua

SEQ ID NO: 2226051 - RNA, 19 nt, Artificial Sequence
  Description of Artificial Sequence: Synthetic oligonucleotide
  Antisense strand to SEQ ID NO: 2226050
uauauuauaccucagcagg

SEQ ID NO: 2226052 - RNA, 19 nt, Artificial Sequence
  Description of Artificial Sequence: Synthetic oligonucleotide
  Sense strand starting at position 3479 of SEQ ID NO: 1883915
ugugcuuguauauaugaga

SEQ ID NO: 2226053 - RNA, 19 nt, Artificial Sequence
  Description of Artificial Sequence: Synthetic oligonucleotide
  Antisense strand to SEQ ID NO: 2226052
ucucauauauacaagcaca

SEQ ID NO: 2226054 - RNA, 19 nt, Artificial Sequence
  Description of Artificial Sequence: Synthetic oligonucleotide
  Sense strand starting at position 3543 of SEQ ID NO: 1883915
aggaucucccuguacuagu

SEQ ID NO: 2226055 - RNA, 19 nt, Artificial Sequence
  Description of Artificial Sequence: Synthetic oligonucleotide
  Antisense strand to SEQ ID NO: 2226054
acuaguacagggagauccu

SEQ ID NO: 2226056 - RNA, 19 nt, Artificial Sequence
  Description of Artificial Sequence: Synthetic oligonucleotide
  Sense strand starting at position 3585 of SEQ ID NO: 1883915
ggagucauccagcaacuuu

SEQ ID NO: 2226057 - RNA, 19 nt, Artificial Sequence
  Description of Artificial Sequence: Synthetic oligonucleotide
  Antisense strand to SEQ ID NO: 2226056
aaaguugcuggaugacucc

SEQ ID NO: 2226058 - RNA, 19 nt, Artificial Sequence
  Description of Artificial Sequence: Synthetic oligonucleotide
  Sense strand starting at position 3672 of SEQ ID NO: 1883915
cgaccucugcagcaugaga

SEQ ID NO: 2226059 - RNA, 19 nt, Artificial Sequence
  Description of Artificial Sequence: Synthetic oligonucleotide
  Antisense strand to SEQ ID NO: 2226058
ucucaugcugcagaggucg

SEQ ID NO: 2226060 - RNA, 19 nt, Artificial Sequence
  Description of Artificial Sequence: Synthetic oligonucleotide
  Sense strand starting at position 3721 of SEQ ID NO: 1883915
caggguuacguuuaaacaa

SEQ ID NO: 2226061 - RNA, 19 nt, Artificial Sequence
  Description of Artificial Sequence: Synthetic oligonucleotide
  Antisense strand to SEQ ID NO: 2226060
uuguuuaaacguaacccug

SEQ ID NO: 2226062 - RNA, 19 nt, Artificial Sequence
  Description of Artificial Sequence: Synthetic oligonucleotide
  Sense strand starting at position 3795 of SEQ ID NO: 1883915
ugacuuuaauugcuuaaag

SEQ ID NO: 2226063 - RNA, 19 nt, Artificial Sequence
  Description of Artificial Sequence: Synthetic oligonucleotide
  Antisense strand to SEQ ID NO: 2226062
cuuuaagcaauuaaaguca

SEQ ID NO: 2226064 - RNA, 19 nt, Artificial Sequence
  Description of Artificial Sequence: Synthetic oligonucleotide
  Sense strand starting at position 3894 of SEQ ID NO: 1883915
agaggaaugugaaagucgu

SEQ ID NO: 2226065 - RNA, 19 nt, Artificial Sequence
  Description of Artificial Sequence: Synthetic oligonucleotide
  Antisense strand to SEQ ID NO: 2226064
acgacuuucacauuccucu

SEQ ID NO: 2226066 - RNA, 19 nt, Artificial Sequence
  Description of Artificial Sequence: Synthetic oligonucleotide
  Sense strand starting at position 3966 of SEQ ID NO: 1883915
uugaaugcccacgaguuua

SEQ ID NO: 2226067 - RNA, 19 nt, Artificial Sequence
  Description of Artificial Sequence: Synthetic oligonucleotide
  Antisense strand to SEQ ID NO: 2226066
uaaacucgugggcauucaa

SEQ ID NO: 2226068 - RNA, 19 nt, Artificial Sequence
  Description of Artificial Sequence: Synthetic oligonucleotide
  Sense strand starting at position 42 of SEQ ID NO: 1883916
ggacguuaacaucgggagu

SEQ ID NO: 2226069 - RNA, 19 nt, Artificial Sequence
  Description of Artificial Sequence: Synthetic oligonucleotide
  Antisense strand to SEQ ID NO: 2226068
acucccgauguuaacgucc

SEQ ID NO: 2226070 - RNA, 19 nt, Artificial Sequence
  Description of Artificial Sequence: Synthetic oligonucleotide
  Sense strand starting at position 45 of SEQ ID NO: 1883916
cguuaacaucgggaguuaa

SEQ ID NO: 2226071 - RNA, 19 nt, Artificial Sequence
  Description of Artificial Sequence: Synthetic oligonucleotide
  Antisense strand to SEQ ID NO: 2226070
uuaacucccgauguuaacg

SEQ ID NO: 2226072 - RNA, 19 nt, Artificial Sequence
  Description of Artificial Sequence: Synthetic oligonucleotide
  Sense strand starting at position 126 of SEQ ID NO: 1883916
ggaugccugggaugucuau

SEQ ID NO: 2226073 - RNA, 19 nt, Artificial Sequence
  Description of Artificial Sequence: Synthetic oligonucleotide
  Antisense strand to SEQ ID NO: 2226072
auagacaucccaggcaucc

SEQ ID NO: 2226074 - RNA, 19 nt, Artificial Sequence
  Description of Artificial Sequence: Synthetic oligonucleotide
  Sense strand starting at position 138 of SEQ ID NO: 1883916
ugucuauccaaaggagaug

SEQ ID NO: 2226075 - RNA, 19 nt, Artificial Sequence
  Description of Artificial Sequence: Synthetic oligonucleotide
  Antisense strand to SEQ ID NO: 2226074
caucuccuuuggauagaca

SEQ ID NO: 2226076 - RNA, 19 nt, Artificial Sequence
  Description of Artificial Sequence: Synthetic oligonucleotide
  Sense strand starting at position 156 of SEQ ID NO: 1883916
gguuuaguccguucucucu

SEQ ID NO: 2226077 - RNA, 19 nt, Artificial Sequence
  Description of Artificial Sequence: Synthetic oligonucleotide
  Antisense strand to SEQ ID NO: 2226076
agagagaacggacuaaacc

SEQ ID NO: 2226078 - RNA, 19 nt, Artificial Sequence
  Description of Artificial Sequence: Synthetic oligonucleotide
  Sense strand starting at position 237 of SEQ ID NO: 1883916
ggccacuugacaugggaau

SEQ ID NO: 2226079 - RNA, 19 nt, Artificial Sequence
  Description of Artificial Sequence: Synthetic oligonucleotide
  Antisense strand to SEQ ID NO: 2226078
auucccaugucaaguggcc

SEQ ID NO: 2226080 - RNA, 19 nt, Artificial Sequence
  Description of Artificial Sequence: Synthetic oligonucleotide
  Sense strand starting at position 238 of SEQ ID NO: 1883916
gccacuugacaugggaaua

SEQ ID NO: 2226081 - RNA, 19 nt, Artificial Sequence
  Description of Artificial Sequence: Synthetic oligonucleotide
  Antisense strand to SEQ ID NO: 2226080
uauucccaugucaaguggc

SEQ ID NO: 2226082 - RNA, 19 nt, Artificial Sequence
  Description of Artificial Sequence: Synthetic oligonucleotide
  Sense strand starting at position 423 of SEQ ID NO: 1883916
augcauucuggucagcaaa

SEQ ID NO: 2226083 - RNA, 19 nt, Artificial Sequence
  Description of Artificial Sequence: Synthetic oligonucleotide
  Antisense strand to SEQ ID NO: 2226082
uuugcugaccagaaugcau

SEQ ID NO: 2226084 - RNA, 19 nt, Artificial Sequence
  Description of Artificial Sequence: Synthetic oligonucleotide
  Sense strand starting at position 500 of SEQ ID NO: 1883916
ucaggauggcugcaacaaa

SEQ ID NO: 2226085 - RNA, 19 nt, Artificial Sequence
  Description of Artificial Sequence: Synthetic oligonucleotide
  Antisense strand to SEQ ID NO: 2226084
uuuguugcagccauccuga

SEQ ID NO: 2226086 - RNA, 19 nt, Artificial Sequence
  Description of Artificial Sequence: Synthetic oligonucleotide
  Sense strand starting at position 545 of SEQ ID NO: 1883916
cugugauucuuuccaucuc

SEQ ID NO: 2226087 - RNA, 19 nt, Artificial Sequence
  Description of Artificial Sequence: Synthetic oligonucleotide
  Antisense strand to SEQ ID NO: 2226086
gagauggaaagaaucacag

SEQ ID NO: 2226088 - RNA, 19 nt, Artificial Sequence
  Description of Artificial Sequence: Synthetic oligonucleotide
  Sense strand starting at position 575 of SEQ ID NO: 1883916
gcagaaucuccagguagua

SEQ ID NO: 2226089 - RNA, 19 nt, Artificial Sequence
  Description of Artificial Sequence: Synthetic oligonucleotide
  Antisense strand to SEQ ID NO: 2226088
uacuaccuggagauucugc

SEQ ID NO: 2226090 - RNA, 19 nt, Artificial Sequence
  Description of Artificial Sequence: Synthetic oligonucleotide
  Sense strand starting at position 588 of SEQ ID NO: 1883916
guaguauuagcucaccuaa

SEQ ID NO: 2226091 - RNA, 19 nt, Artificial Sequence
  Description of Artificial Sequence: Synthetic oligonucleotide
  Antisense strand to SEQ ID NO: 2226090
uuaggugagcuaauacuac

SEQ ID NO: 2226092 - RNA, 19 nt, Artificial Sequence
  Description of Artificial Sequence: Synthetic oligonucleotide
  Sense strand starting at position 747 of SEQ ID NO: 1883916
uagugugacccugaaauac

SEQ ID NO: 2226093 - RNA, 19 nt, Artificial Sequence
  Description of Artificial Sequence: Synthetic oligonucleotide
  Antisense strand to SEQ ID NO: 2226092
guauuucagggucacacua

SEQ ID NO: 2226094 - RNA, 19 nt, Artificial Sequence
  Description of Artificial Sequence: Synthetic oligonucleotide
  Sense strand starting at position 824 of SEQ ID NO: 1883916
gcuggagacacuugagcau

SEQ ID NO: 2226095 - RNA, 19 nt, Artificial Sequence
  Description of Artificial Sequence: Synthetic oligonucleotide
  Antisense strand to SEQ ID NO: 2226094
augcucaagugucuccagc

SEQ ID NO: 2226096 - RNA, 19 nt, Artificial Sequence
  Description of Artificial Sequence: Synthetic oligonucleotide
  Sense strand starting at position 872 of SEQ ID NO: 1883916
aguguugugccaccucgau

SEQ ID NO: 2226097 - RNA, 19 nt, Artificial Sequence
  Description of Artificial Sequence: Synthetic oligonucleotide
  Antisense strand to SEQ ID NO: 2226096
aucgagguggcacaacacu

SEQ ID NO: 2226098 - RNA, 19 nt, Artificial Sequence
  Description of Artificial Sequence: Synthetic oligonucleotide
  Sense strand starting at position 1081 of SEQ ID NO: 1883916
ccuucuuggcaaggugauu

SEQ ID NO: 2226099 - RNA, 19 nt, Artificial Sequence
  Description of Artificial Sequence: Synthetic oligonucleotide
  Antisense strand to SEQ ID NO: 2226098
aaucaccuugccaagaagg

SEQ ID NO: 2226100 - RNA, 19 nt, Artificial Sequence
  Description of Artificial Sequence: Synthetic oligonucleotide
  Sense strand starting at position 1277 of SEQ ID NO: 1883916
cccagugaaguaggcauua

SEQ ID NO: 2226101 - RNA, 19 nt, Artificial Sequence
  Description of Artificial Sequence: Synthetic oligonucleotide
  Antisense strand to SEQ ID NO: 2226100
uaaugccuacuucacuggg

SEQ ID NO: 2226102 - RNA, 19 nt, Artificial Sequence
  Description of Artificial Sequence: Synthetic oligonucleotide
  Sense strand starting at position 1319 of SEQ ID NO: 1883916
cggguucagaugugaagua

SEQ ID NO: 2226103 - RNA, 19 nt, Artificial Sequence
  Description of Artificial Sequence: Synthetic oligonucleotide
  Antisense strand to SEQ ID NO: 2226102
uacuucacaucugaacccg

SEQ ID NO: 2226104 - RNA, 19 nt, Artificial Sequence
  Description of Artificial Sequence: Synthetic oligonucleotide
  Sense strand starting at position 1328 of SEQ ID NO: 1883916
augugaaguaucggucuaa

SEQ ID NO: 2226105 - RNA, 19 nt, Artificial Sequence
  Description of Artificial Sequence: Synthetic oligonucleotide
  Antisense strand to SEQ ID NO: 2226104
uuagaccgauacuucacau

SEQ ID NO: 2226106 - RNA, 19 nt, Artificial Sequence
  Description of Artificial Sequence: Synthetic oligonucleotide
  Sense strand starting at position 1329 of SEQ ID NO: 1883916
ugugaaguaucggucuaaa

SEQ ID NO: 2226107 - RNA, 19 nt, Artificial Sequence
  Description of Artificial Sequence: Synthetic oligonucleotide
  Antisense strand to SEQ ID NO: 2226106
uuuagaccgauacuucaca

SEQ ID NO: 2226108 - RNA, 19 nt, Artificial Sequence
  Description of Artificial Sequence: Synthetic oligonucleotide
  Sense strand starting at position 1369 of SEQ ID NO: 1883916
acggcauaagcguuacguu

SEQ ID NO: 2226109 - RNA, 19 nt, Artificial Sequence
  Description of Artificial Sequence: Synthetic oligonucleotide
  Antisense strand to SEQ ID NO: 2226108
aacguaacgcuuaugccgu

SEQ ID NO: 2226110 - RNA, 19 nt, Artificial Sequence
  Description of Artificial Sequence: Synthetic oligonucleotide
  Sense strand starting at position 1488 of SEQ ID NO: 1883916
cugucaggucgaugggaaa

SEQ ID NO: 2226111 - RNA, 19 nt, Artificial Sequence
  Description of Artificial Sequence: Synthetic oligonucleotide
  Antisense strand to SEQ ID NO: 2226110
uuucccaucgaccugacag

SEQ ID NO: 2226112 - RNA, 19 nt, Artificial Sequence
  Description of Artificial Sequence: Synthetic oligonucleotide
  Sense strand starting at position 2443 of SEQ ID NO: 1883916
agcauuugguccuucggau

SEQ ID NO: 2226113 - RNA, 19 nt, Artificial Sequence
  Description of Artificial Sequence: Synthetic oligonucleotide
  Antisense strand to SEQ ID NO: 2226112
auccgaaggaccaaaugcu

SEQ ID NO: 2226114 - RNA, 19 nt, Artificial Sequence
  Description of Artificial Sequence: Synthetic oligonucleotide
  Sense strand starting at position 2561 of SEQ ID NO: 1883916
caugcauuacuugggacau

SEQ ID NO: 2226115 - RNA, 19 nt, Artificial Sequence
  Description of Artificial Sequence: Synthetic oligonucleotide
  Antisense strand to SEQ ID NO: 2226114
augucccaaguaaugcaug

SEQ ID NO: 2226116 - RNA, 19 nt, Artificial Sequence
  Description of Artificial Sequence: Synthetic oligonucleotide
  Sense strand starting at position 2648 of SEQ ID NO: 1883916
uggcaauccuacuuuggga

SEQ ID NO: 2226117 - RNA, 19 nt, Artificial Sequence
  Description of Artificial Sequence: Synthetic oligonucleotide
  Antisense strand to SEQ ID NO: 2226116
ucccaaaguaggauugcca

SEQ ID NO: 2226118 - RNA, 19 nt, Artificial Sequence
  Description of Artificial Sequence: Synthetic oligonucleotide
  Sense strand starting at position 2650 of SEQ ID NO: 1883916
gcaauccuacuuugggaaa

SEQ ID NO: 2226119 - RNA, 19 nt, Artificial Sequence
  Description of Artificial Sequence: Synthetic oligonucleotide
  Antisense strand to SEQ ID NO: 2226118
uuucccaaaguaggauugc

SEQ ID NO: 2226120 - RNA, 19 nt, Artificial Sequence
  Description of Artificial Sequence: Synthetic oligonucleotide
  Sense strand starting at position 2734 of SEQ ID NO: 1883916
cugggagguaagugaucuu

SEQ ID NO: 2226121 - RNA, 19 nt, Artificial Sequence
  Description of Artificial Sequence: Synthetic oligonucleotide
  Antisense strand to SEQ ID NO: 2226120
aagaucacuuaccucccag

SEQ ID NO: 2226122 - RNA, 19 nt, Artificial Sequence
  Description of Artificial Sequence: Synthetic oligonucleotide
  Sense strand starting at position 2737 of SEQ ID NO: 1883916
ggagguaagugaucuugau

SEQ ID NO: 2226123 - RNA, 19 nt, Artificial Sequence
  Description of Artificial Sequence: Synthetic oligonucleotide
  Antisense strand to SEQ ID NO: 2226122
aucaagaucacuuaccucc

SEQ ID NO: 2226124 - RNA, 19 nt, Artificial Sequence
  Description of Artificial Sequence: Synthetic oligonucleotide
  Sense strand starting at position 2972 of SEQ ID NO: 1883916
guuugacuuuguccaggaa

SEQ ID NO: 2226125 - RNA, 19 nt, Artificial Sequence
  Description of Artificial Sequence: Synthetic oligonucleotide
  Antisense strand to SEQ ID NO: 2226124
uuccuggacaaagucaaac

SEQ ID NO: 2226126 - RNA, 19 nt, Artificial Sequence
  Description of Artificial Sequence: Synthetic oligonucleotide
  Sense strand starting at position 2975 of SEQ ID NO: 1883916
ugacuuuguccaggaaaga

SEQ ID NO: 2226127 - RNA, 19 nt, Artificial Sequence
  Description of Artificial Sequence: Synthetic oligonucleotide
  Antisense strand to SEQ ID NO: 2226126
ucuuuccuggacaaaguca

SEQ ID NO: 2226128 - RNA, 19 nt, Artificial Sequence
  Description of Artificial Sequence: Synthetic oligonucleotide
  Sense strand starting at position 3150 of SEQ ID NO: 1883916
aggguuggguuauucagaa

SEQ ID NO: 2226129 - RNA, 19 nt, Artificial Sequence
  Description of Artificial Sequence: Synthetic oligonucleotide
  Antisense strand to SEQ ID NO: 2226128
uucugaauaacccaacccu

SEQ ID NO: 2226130 - RNA, 19 nt, Artificial Sequence
  Description of Artificial Sequence: Synthetic oligonucleotide
  Sense strand starting at position 3182 of SEQ ID NO: 1883916
aggaaauaacuucgaguca

SEQ ID NO: 2226131 - RNA, 19 nt, Artificial Sequence
  Description of Artificial Sequence: Synthetic oligonucleotide
  Antisense strand to SEQ ID NO: 2226130
ugacucgaaguuauuuccu

SEQ ID NO: 2226132 - RNA, 19 nt, Artificial Sequence
  Description of Artificial Sequence: Synthetic oligonucleotide
  Sense strand starting at position 3195 of SEQ ID NO: 1883916
gagucacugccuuggaaag

SEQ ID NO: 2226133 - RNA, 19 nt, Artificial Sequence
  Description of Artificial Sequence: Synthetic oligonucleotide
  Antisense strand to SEQ ID NO: 2226132
cuuuccaaggcagugacuc

SEQ ID NO: 2226134 - RNA, 19 nt, Artificial Sequence
  Description of Artificial Sequence: Synthetic oligonucleotide
  Sense strand starting at position 3275 of SEQ ID NO: 1883916
gucuuaugugaaugagcaa

SEQ ID NO: 2226135 - RNA, 19 nt, Artificial Sequence
  Description of Artificial Sequence: Synthetic oligonucleotide
  Antisense strand to SEQ ID NO: 2226134
uugcucauucacauaagac

SEQ ID NO: 2226136 - RNA, 19 nt, Artificial Sequence
  Description of Artificial Sequence: Synthetic oligonucleotide
  Sense strand starting at position 3457 of SEQ ID NO: 1883916
agaggucuuucuucuguaa

SEQ ID NO: 2226137 - RNA, 19 nt, Artificial Sequence
  Description of Artificial Sequence: Synthetic oligonucleotide
  Antisense strand to SEQ ID NO: 2226136
uuacagaagaaagaccucu

SEQ ID NO: 2226138 - RNA, 19 nt, Artificial Sequence
  Description of Artificial Sequence: Synthetic oligonucleotide
  Sense strand starting at position 3510 of SEQ ID NO: 1883916
ccuaguguuggaggaguaa

SEQ ID NO: 2226139 - RNA, 19 nt, Artificial Sequence
  Description of Artificial Sequence: Synthetic oligonucleotide
  Antisense strand to SEQ ID NO: 2226138
uuacuccuccaacacuagg

SEQ ID NO: 2226140 - RNA, 19 nt, Artificial Sequence
  Description of Artificial Sequence: Synthetic oligonucleotide
  Sense strand starting at position 3552 of SEQ ID NO: 1883916
gcccuauggaaggauguuu

SEQ ID NO: 2226141 - RNA, 19 nt, Artificial Sequence
  Description of Artificial Sequence: Synthetic oligonucleotide
  Antisense strand to SEQ ID NO: 2226140
aaacauccuuccauagggc

SEQ ID NO: 2226142 - RNA, 19 nt, Artificial Sequence
  Description of Artificial Sequence: Synthetic oligonucleotide
  Sense strand starting at position 3557 of SEQ ID NO: 1883916
auggaaggauguuuguauu

SEQ ID NO: 2226143 - RNA, 19 nt, Artificial Sequence
  Description of Artificial Sequence: Synthetic oligonucleotide
  Antisense strand to SEQ ID NO: 2226142
aauacaaacauccuuccau

SEQ ID NO: 2226144 - RNA, 19 nt, Artificial Sequence
  Description of Artificial Sequence: Synthetic oligonucleotide
  Sense strand starting at position 3636 of SEQ ID NO: 1883916
ugucauagucuagaaggca

SEQ ID NO: 2226145 - RNA, 19 nt, Artificial Sequence
  Description of Artificial Sequence: Synthetic oligonucleotide
  Antisense strand to SEQ ID NO: 2226144
ugccuucuagacuaugaca

SEQ ID NO: 2226146 - RNA, 19 nt, Artificial Sequence
  Description of Artificial Sequence: Synthetic oligonucleotide
  Sense strand starting at position 3977 of SEQ ID NO: 1883916
gaaguuaagcaagggucaa

SEQ ID NO: 2226147 - RNA, 19 nt, Artificial Sequence
  Description of Artificial Sequence: Synthetic oligonucleotide
  Antisense strand to SEQ ID NO: 2226146
uugacccuugcuuaacuuc

SEQ ID NO: 2226148 - RNA, 19 nt, Artificial Sequence
  Description of Artificial Sequence: Synthetic oligonucleotide
  Sense strand starting at position 94 of SEQ ID NO: 1883917
acaguaccuuucucagaag

SEQ ID NO: 2226149 - RNA, 19 nt, Artificial Sequence
  Description of Artificial Sequence: Synthetic oligonucleotide
  Antisense strand to SEQ ID NO: 2226148
cuucugagaaagguacugu

SEQ ID NO: 2226150 - RNA, 19 nt, Artificial Sequence
  Description of Artificial Sequence: Synthetic oligonucleotide
  Sense strand starting at position 106 of SEQ ID NO: 1883917
ucagaaggucgucaugauu

SEQ ID NO: 2226151 - RNA, 19 nt, Artificial Sequence
  Description of Artificial Sequence: Synthetic oligonucleotide
  Antisense strand to SEQ ID NO: 2226150
aaucaugacgaccuucuga

SEQ ID NO: 2226152 - RNA, 19 nt, Artificial Sequence
  Description of Artificial Sequence: Synthetic oligonucleotide
  Sense strand starting at position 109 of SEQ ID NO: 1883917
gaaggucgucaugauuauc

SEQ ID NO: 2226153 - RNA, 19 nt, Artificial Sequence
  Description of Artificial Sequence: Synthetic oligonucleotide
  Antisense strand to SEQ ID NO: 2226152
gauaaucaugacgaccuuc

SEQ ID NO: 2226154 - RNA, 19 nt, Artificial Sequence
  Description of Artificial Sequence: Synthetic oligonucleotide
  Sense strand starting at position 181 of SEQ ID NO: 1883917
ucauguuugauuuguuguu

SEQ ID NO: 2226155 - RNA, 19 nt, Artificial Sequence
  Description of Artificial Sequence: Synthetic oligonucleotide
  Antisense strand to SEQ ID NO: 2226154
aacaacaaaucaaacauga

SEQ ID NO: 2226156 - RNA, 19 nt, Artificial Sequence
  Description of Artificial Sequence: Synthetic oligonucleotide
  Sense strand starting at position 231 of SEQ ID NO: 1883917
ccucaagauugaguucuga

SEQ ID NO: 2226157 - RNA, 19 nt, Artificial Sequence
  Description of Artificial Sequence: Synthetic oligonucleotide
  Antisense strand to SEQ ID NO: 2226156
ucagaacucaaucuugagg

SEQ ID NO: 2226158 - RNA, 19 nt, Artificial Sequence
  Description of Artificial Sequence: Synthetic oligonucleotide
  Sense strand starting at position 260 of SEQ ID NO: 1883917
guaguagaaguccaguaaa

SEQ ID NO: 2226159 - RNA, 19 nt, Artificial Sequence
  Description of Artificial Sequence: Synthetic oligonucleotide
  Antisense strand to SEQ ID NO: 2226158
uuuacuggacuucuacuac

SEQ ID NO: 2226160 - RNA, 19 nt, Artificial Sequence
  Description of Artificial Sequence: Synthetic oligonucleotide
  Sense strand starting at position 263 of SEQ ID NO: 1883917
guagaaguccaguaaauac

SEQ ID NO: 2226161 - RNA, 19 nt, Artificial Sequence
  Description of Artificial Sequence: Synthetic oligonucleotide
  Antisense strand to SEQ ID NO: 2226160
guauuuacuggacuucuac

SEQ ID NO: 2226162 - RNA, 19 nt, Artificial Sequence
  Description of Artificial Sequence: Synthetic oligonucleotide
  Sense strand starting at position 292 of SEQ ID NO: 1883917
ccuaacaagugggugaauu

SEQ ID NO: 2226163 - RNA, 19 nt, Artificial Sequence
  Description of Artificial Sequence: Synthetic oligonucleotide
  Antisense strand to SEQ ID NO: 2226162
aauucacccacuuguuagg

SEQ ID NO: 2226164 - RNA, 19 nt, Artificial Sequence
  Description of Artificial Sequence: Synthetic oligonucleotide
  Sense strand starting at position 303 of SEQ ID NO: 1883917
ggugaauucguauauagau

SEQ ID NO: 2226165 - RNA, 19 nt, Artificial Sequence
  Description of Artificial Sequence: Synthetic oligonucleotide
  Antisense strand to SEQ ID NO: 2226164
aucuauauacgaauucacc

SEQ ID NO: 2226166 - RNA, 19 nt, Artificial Sequence
  Description of Artificial Sequence: Synthetic oligonucleotide
  Sense strand starting at position 305 of SEQ ID NO: 1883917
ugaauucguauauagaugu

SEQ ID NO: 2226167 - RNA, 19 nt, Artificial Sequence
  Description of Artificial Sequence: Synthetic oligonucleotide
  Antisense strand to SEQ ID NO: 2226166
acaucuauauacgaauuca

SEQ ID NO: 2226168 - RNA, 19 nt, Artificial Sequence
  Description of Artificial Sequence: Synthetic oligonucleotide
  Sense strand starting at position 311 of SEQ ID NO: 1883917
cguauauagauguaguuag

SEQ ID NO: 2226169 - RNA, 19 nt, Artificial Sequence
  Description of Artificial Sequence: Synthetic oligonucleotide
  Antisense strand to SEQ ID NO: 2226168
cuaacuacaucuauauacg

SEQ ID NO: 2226170 - RNA, 19 nt, Artificial Sequence
  Description of Artificial Sequence: Synthetic oligonucleotide
  Sense strand starting at position 347 of SEQ ID NO: 1883917
aguagaaacucuucugaga

SEQ ID NO: 2226171 - RNA, 19 nt, Artificial Sequence
  Description of Artificial Sequence: Synthetic oligonucleotide
  Antisense strand to SEQ ID NO: 2226170
ucucagaagaguuucuacu

SEQ ID NO: 2226172 - RNA, 19 nt, Artificial Sequence
  Description of Artificial Sequence: Synthetic oligonucleotide
  Sense strand starting at position 367 of SEQ ID NO: 1883917
augauacuguuacugggau

SEQ ID NO: 2226173 - RNA, 19 nt, Artificial Sequence
  Description of Artificial Sequence: Synthetic oligonucleotide
  Antisense strand to SEQ ID NO: 2226172
aucccaguaacaguaucau

SEQ ID NO: 2226174 - RNA, 19 nt, Artificial Sequence
  Description of Artificial Sequence: Synthetic oligonucleotide
  Sense strand starting at position 486 of SEQ ID NO: 1883917
uauuuauggucaguucugu

SEQ ID NO: 2226175 - RNA, 19 nt, Artificial Sequence
  Description of Artificial Sequence: Synthetic oligonucleotide
  Antisense strand to SEQ ID NO: 2226174
acagaacugaccauaaaua

SEQ ID NO: 2226176 - RNA, 19 nt, Artificial Sequence
  Description of Artificial Sequence: Synthetic oligonucleotide
  Sense strand starting at position 571 of SEQ ID NO: 1883917
aguauuuggucuccagcau

SEQ ID NO: 2226177 - RNA, 19 nt, Artificial Sequence
  Description of Artificial Sequence: Synthetic oligonucleotide
  Antisense strand to SEQ ID NO: 2226176
augcuggagaccaaauacu

SEQ ID NO: 2226178 - RNA, 19 nt, Artificial Sequence
  Description of Artificial Sequence: Synthetic oligonucleotide
  Sense strand starting at position 655 of SEQ ID NO: 1883917
ugucaaauuguacaagucu

SEQ ID NO: 2226179 - RNA, 19 nt, Artificial Sequence
  Description of Artificial Sequence: Synthetic oligonucleotide
  Antisense strand to SEQ ID NO: 2226178
agacuuguacaauuugaca

SEQ ID NO: 2226180 - RNA, 19 nt, Artificial Sequence
  Description of Artificial Sequence: Synthetic oligonucleotide
  Sense strand starting at position 671 of SEQ ID NO: 1883917
ucuauauauuuggaggaag

SEQ ID NO: 2226181 - RNA, 19 nt, Artificial Sequence
  Description of Artificial Sequence: Synthetic oligonucleotide
  Antisense strand to SEQ ID NO: 2226180
cuuccuccaaauauauaga

SEQ ID NO: 2226182 - RNA, 19 nt, Artificial Sequence
  Description of Artificial Sequence: Synthetic oligonucleotide
  Sense strand starting at position 698 of SEQ ID NO: 1883917
uaaagaauguuagccugau

SEQ ID NO: 2226183 - RNA, 19 nt, Artificial Sequence
  Description of Artificial Sequence: Synthetic oligonucleotide
  Antisense strand to SEQ ID NO: 2226182
aucaggcuaacauucuuua

SEQ ID NO: 2226184 - RNA, 19 nt, Artificial Sequence
  Description of Artificial Sequence: Synthetic oligonucleotide
  Sense strand starting at position 699 of SEQ ID NO: 1883917
aaagaauguuagccugaug

SEQ ID NO: 2226185 - RNA, 19 nt, Artificial Sequence
  Description of Artificial Sequence: Synthetic oligonucleotide
  Antisense strand to SEQ ID NO: 2226184
caucaggcuaacauucuuu

SEQ ID NO: 2226186 - RNA, 19 nt, Artificial Sequence
  Description of Artificial Sequence: Synthetic oligonucleotide
  Sense strand starting at position 702 of SEQ ID NO: 1883917
gaauguuagccugauguau

SEQ ID NO: 2226187 - RNA, 19 nt, Artificial Sequence
  Description of Artificial Sequence: Synthetic oligonucleotide
  Antisense strand to SEQ ID NO: 2226186
auacaucaggcuaacauuc

SEQ ID NO: 2226188 - RNA, 19 nt, Artificial Sequence
  Description of Artificial Sequence: Synthetic oligonucleotide
  Sense strand starting at position 780 of SEQ ID NO: 1883917
ucuaucaggugaucaaacu

SEQ ID NO: 2226189 - RNA, 19 nt, Artificial Sequence
  Description of Artificial Sequence: Synthetic oligonucleotide
  Antisense strand to SEQ ID NO: 2226188
aguuugaucaccugauaga

SEQ ID NO: 2226190 - RNA, 19 nt, Artificial Sequence
  Description of Artificial Sequence: Synthetic oligonucleotide
  Sense strand starting at position 823 of SEQ ID NO: 1883917
uucgacuuccagcaaauga

SEQ ID NO: 2226191 - RNA, 19 nt, Artificial Sequence
  Description of Artificial Sequence: Synthetic oligonucleotide
  Antisense strand to SEQ ID NO: 2226190
ucauuugcuggaagucgaa

SEQ ID NO: 2226192 - RNA, 19 nt, Artificial Sequence
  Description of Artificial Sequence: Synthetic oligonucleotide
  Sense strand starting at position 1416 of SEQ ID NO: 1883917
ugaccucuugagugugaaa

SEQ ID NO: 2226193 - RNA, 19 nt, Artificial Sequence
  Description of Artificial Sequence: Synthetic oligonucleotide
  Antisense strand to SEQ ID NO: 2226192
uuucacacucaagagguca

SEQ ID NO: 2226194 - RNA, 19 nt, Artificial Sequence
  Description of Artificial Sequence: Synthetic oligonucleotide
  Sense strand starting at position 1459 of SEQ ID NO: 1883917
auuacaguuguguaaucac

SEQ ID NO: 2226195 - RNA, 19 nt, Artificial Sequence
  Description of Artificial Sequence: Synthetic oligonucleotide
  Antisense strand to SEQ ID NO: 2226194
gugauuacacaacuguaau

SEQ ID NO: 2226196 - RNA, 19 nt, Artificial Sequence
  Description of Artificial Sequence: Synthetic oligonucleotide
  Sense strand starting at position 1470 of SEQ ID NO: 1883917
guaaucaccuucucugaag

SEQ ID NO: 2226197 - RNA, 19 nt, Artificial Sequence
  Description of Artificial Sequence: Synthetic oligonucleotide
  Antisense strand to SEQ ID NO: 2226196
cuucagagaaggugauuac

SEQ ID NO: 2226198 - RNA, 19 nt, Artificial Sequence
  Description of Artificial Sequence: Synthetic oligonucleotide
  Sense strand starting at position 1614 of SEQ ID NO: 1883917
uggguuauccgaugggaaa

SEQ ID NO: 2226199 - RNA, 19 nt, Artificial Sequence
  Description of Artificial Sequence: Synthetic oligonucleotide
  Antisense strand to SEQ ID NO: 2226198
uuucccaucggauaaccca

SEQ ID NO: 2226200 - RNA, 19 nt, Artificial Sequence
  Description of Artificial Sequence: Synthetic oligonucleotide
  Sense strand starting at position 1615 of SEQ ID NO: 1883917
ggguuauccgaugggaaau

SEQ ID NO: 2226201 - RNA, 19 nt, Artificial Sequence
  Description of Artificial Sequence: Synthetic oligonucleotide
  Antisense strand to SEQ ID NO: 2226200
auuucccaucggauaaccc

SEQ ID NO: 2226202 - RNA, 19 nt, Artificial Sequence
  Description of Artificial Sequence: Synthetic oligonucleotide
  Sense strand starting at position 1616 of SEQ ID NO: 1883917
gguuauccgaugggaaaua

SEQ ID NO: 2226203 - RNA, 19 nt, Artificial Sequence
  Description of Artificial Sequence: Synthetic oligonucleotide
  Antisense strand to SEQ ID NO: 2226202
uauuucccaucggauaacc

SEQ ID NO: 2226204 - RNA, 19 nt, Artificial Sequence
  Description of Artificial Sequence: Synthetic oligonucleotide
  Sense strand starting at position 1849 of SEQ ID NO: 1883917
ucauccguagaauggaaua

SEQ ID NO: 2226205 - RNA, 19 nt, Artificial Sequence
  Description of Artificial Sequence: Synthetic oligonucleotide
  Antisense strand to SEQ ID NO: 2226204
uauuccauucuacggauga

SEQ ID NO: 2226206 - RNA, 19 nt, Artificial Sequence
  Description of Artificial Sequence: Synthetic oligonucleotide
  Sense strand starting at position 1976 of SEQ ID NO: 1883917
cuuacccuuccagaagagu

SEQ ID NO: 2226207 - RNA, 19 nt, Artificial Sequence
  Description of Artificial Sequence: Synthetic oligonucleotide
  Antisense strand to SEQ ID NO: 2226206
acucuucuggaaggguaag

SEQ ID NO: 2226208 - RNA, 19 nt, Artificial Sequence
  Description of Artificial Sequence: Synthetic oligonucleotide
  Sense strand starting at position 1989 of SEQ ID NO: 1883917
aagaguuggccaugacuug

SEQ ID NO: 2226209 - RNA, 19 nt, Artificial Sequence
  Description of Artificial Sequence: Synthetic oligonucleotide
  Antisense strand to SEQ ID NO: 2226208
caagucauggccaacucuu

SEQ ID NO: 2226210 - RNA, 19 nt, Artificial Sequence
  Description of Artificial Sequence: Synthetic oligonucleotide
  Sense strand starting at position 1995 of SEQ ID NO: 1883917
uggccaugacuugauuauc

SEQ ID NO: 2226211 - RNA, 19 nt, Artificial Sequence
  Description of Artificial Sequence: Synthetic oligonucleotide
  Antisense strand to SEQ ID NO: 2226210
gauaaucaagucauggcca

SEQ ID NO: 2226212 - RNA, 19 nt, Artificial Sequence
  Description of Artificial Sequence: Synthetic oligonucleotide
  Sense strand starting at position 2024 of SEQ ID NO: 1883917
cagugacuccuagaugugu

SEQ ID NO: 2226213 - RNA, 19 nt, Artificial Sequence
  Description of Artificial Sequence: Synthetic oligonucleotide
  Antisense strand to SEQ ID NO: 2226212
acacaucuaggagucacug

SEQ ID NO: 2226214 - RNA, 19 nt, Artificial Sequence
  Description of Artificial Sequence: Synthetic oligonucleotide
  Sense strand starting at position 2328 of SEQ ID NO: 1883917
gauagagauucugcuccag

SEQ ID NO: 2226215 - RNA, 19 nt, Artificial Sequence
  Description of Artificial Sequence: Synthetic oligonucleotide
  Antisense strand to SEQ ID NO: 2226214
cuggagcagaaucucuauc

SEQ ID NO: 2226216 - RNA, 19 nt, Artificial Sequence
  Description of Artificial Sequence: Synthetic oligonucleotide
  Sense strand starting at position 2456 of SEQ ID NO: 1883917
uagagauucuuuguaauga

SEQ ID NO: 2226217 - RNA, 19 nt, Artificial Sequence
  Description of Artificial Sequence: Synthetic oligonucleotide
  Antisense strand to SEQ ID NO: 2226216
ucauuacaaagaaucucua

SEQ ID NO: 2226218 - RNA, 19 nt, Artificial Sequence
  Description of Artificial Sequence: Synthetic oligonucleotide
  Sense strand starting at position 2590 of SEQ ID NO: 1883917
auggccucauuaucagaua

SEQ ID NO: 2226219 - RNA, 19 nt, Artificial Sequence
  Description of Artificial Sequence: Synthetic oligonucleotide
  Antisense strand to SEQ ID NO: 2226218
uaucugauaaugaggccau

SEQ ID NO: 2226220 - RNA, 19 nt, Artificial Sequence
  Description of Artificial Sequence: Synthetic oligonucleotide
  Sense strand starting at position 2598 of SEQ ID NO: 1883917
auuaucagauaugucuuga

SEQ ID NO: 2226221 - RNA, 19 nt, Artificial Sequence
  Description of Artificial Sequence: Synthetic oligonucleotide
  Antisense strand to SEQ ID NO: 2226220
ucaagacauaucugauaau

SEQ ID NO: 2226222 - RNA, 19 nt, Artificial Sequence
  Description of Artificial Sequence: Synthetic oligonucleotide
  Sense strand starting at position 2675 of SEQ ID NO: 1883917
cccagaacuuggucaucuu

SEQ ID NO: 2226223 - RNA, 19 nt, Artificial Sequence
  Description of Artificial Sequence: Synthetic oligonucleotide
  Antisense strand to SEQ ID NO: 2226222
aagaugaccaaguucuggg

SEQ ID NO: 2226224 - RNA, 19 nt, Artificial Sequence
  Description of Artificial Sequence: Synthetic oligonucleotide
  Sense strand starting at position 3144 of SEQ ID NO: 1883917
guggaauucccugagcauu

SEQ ID NO: 2226225 - RNA, 19 nt, Artificial Sequence
  Description of Artificial Sequence: Synthetic oligonucleotide
  Antisense strand to SEQ ID NO: 2226224
aaugcucagggaauuccac

SEQ ID NO: 2226226 - RNA, 19 nt, Artificial Sequence
  Description of Artificial Sequence: Synthetic oligonucleotide
  Sense strand starting at position 3296 of SEQ ID NO: 1883917
gcaguugugguucuguuua

SEQ ID NO: 2226227 - RNA, 19 nt, Artificial Sequence
  Description of Artificial Sequence: Synthetic oligonucleotide
  Antisense strand to SEQ ID NO: 2226226
uaaacagaaccacaacugc

SEQ ID NO: 2226228 - RNA, 19 nt, Artificial Sequence
  Description of Artificial Sequence: Synthetic oligonucleotide
  Sense strand starting at position 125 of SEQ ID NO: 1883918
ucagcuugggaucauccaa

SEQ ID NO: 2226229 - RNA, 19 nt, Artificial Sequence
  Description of Artificial Sequence: Synthetic oligonucleotide
  Antisense strand to SEQ ID NO: 2226228
uuggaugaucccaagcuga

SEQ ID NO: 2226230 - RNA, 19 nt, Artificial Sequence
  Description of Artificial Sequence: Synthetic oligonucleotide
  Sense strand starting at position 150 of SEQ ID NO: 1883918
aguggagagucucuugaaa

SEQ ID NO: 2226231 - RNA, 19 nt, Artificial Sequence
  Description of Artificial Sequence: Synthetic oligonucleotide
  Antisense strand to SEQ ID NO: 2226230
uuucaagagacucuccacu

SEQ ID NO: 2226232 - RNA, 19 nt, Artificial Sequence
  Description of Artificial Sequence: Synthetic oligonucleotide
  Sense strand starting at position 269 of SEQ ID NO: 1883918
ggucuaucucucuaaauag

SEQ ID NO: 2226233 - RNA, 19 nt, Artificial Sequence
  Description of Artificial Sequence: Synthetic oligonucleotide
  Antisense strand to SEQ ID NO: 2226232
cuauuuagagagauagacc

SEQ ID NO: 2226234 - RNA, 19 nt, Artificial Sequence
  Description of Artificial Sequence: Synthetic oligonucleotide
  Sense strand starting at position 276 of SEQ ID NO: 1883918
cucucuaaauagucuagua

SEQ ID NO: 2226235 - RNA, 19 nt, Artificial Sequence
  Description of Artificial Sequence: Synthetic oligonucleotide
  Antisense strand to SEQ ID NO: 2226234
uacuagacuauuuagagag

SEQ ID NO: 2226236 - RNA, 19 nt, Artificial Sequence
  Description of Artificial Sequence: Synthetic oligonucleotide
  Sense strand starting at position 278 of SEQ ID NO: 1883918
cucuaaauagucuaguaau

SEQ ID NO: 2226237 - RNA, 19 nt, Artificial Sequence
  Description of Artificial Sequence: Synthetic oligonucleotide
  Antisense strand to SEQ ID NO: 2226236
auuacuagacuauuuagag

SEQ ID NO: 2226238 - RNA, 19 nt, Artificial Sequence
  Description of Artificial Sequence: Synthetic oligonucleotide
  Sense strand starting at position 284 of SEQ ID NO: 1883918
auagucuaguaaucccaaa

SEQ ID NO: 2226239 - RNA, 19 nt, Artificial Sequence
  Description of Artificial Sequence: Synthetic oligonucleotide
  Antisense strand to SEQ ID NO: 2226238
uuugggauuacuagacuau

SEQ ID NO: 2226240 - RNA, 19 nt, Artificial Sequence
  Description of Artificial Sequence: Synthetic oligonucleotide
  Sense strand starting at position 401 of SEQ ID NO: 1883918
ucugauuccuguccaugaa

SEQ ID NO: 2226241 - RNA, 19 nt, Artificial Sequence
  Description of Artificial Sequence: Synthetic oligonucleotide
  Antisense strand to SEQ ID NO: 2226240
uucauggacaggaaucaga

SEQ ID NO: 2226242 - RNA, 19 nt, Artificial Sequence
  Description of Artificial Sequence: Synthetic oligonucleotide
  Sense strand starting at position 402 of SEQ ID NO: 1883918
cugauuccuguccaugaac

SEQ ID NO: 2226243 - RNA, 19 nt, Artificial Sequence
  Description of Artificial Sequence: Synthetic oligonucleotide
  Antisense strand to SEQ ID NO: 2226242
guucauggacaggaaucag

SEQ ID NO: 2226244 - RNA, 19 nt, Artificial Sequence
  Description of Artificial Sequence: Synthetic oligonucleotide
  Sense strand starting at position 561 of SEQ ID NO: 1883918
aaguacaagguaugaauua

SEQ ID NO: 2226245 - RNA, 19 nt, Artificial Sequence
  Description of Artificial Sequence: Synthetic oligonucleotide
  Antisense strand to SEQ ID NO: 2226244
uaauucauaccuuguacuu

SEQ ID NO: 2226246 - RNA, 19 nt, Artificial Sequence
  Description of Artificial Sequence: Synthetic oligonucleotide
  Sense strand starting at position 725 of SEQ ID NO: 1883918
uauuuagguuaugcaugua

SEQ ID NO: 2226247 - RNA, 19 nt, Artificial Sequence
  Description of Artificial Sequence: Synthetic oligonucleotide
  Antisense strand to SEQ ID NO: 2226246
uacaugcauaaccuaaaua

SEQ ID NO: 2226248 - RNA, 19 nt, Artificial Sequence
  Description of Artificial Sequence: Synthetic oligonucleotide
  Sense strand starting at position 773 of SEQ ID NO: 1883918
agcagacauuaacuaggua

SEQ ID NO: 2226249 - RNA, 19 nt, Artificial Sequence
  Description of Artificial Sequence: Synthetic oligonucleotide
  Antisense strand to SEQ ID NO: 2226248
uaccuaguuaaugucugcu

SEQ ID NO: 2226250 - RNA, 19 nt, Artificial Sequence
  Description of Artificial Sequence: Synthetic oligonucleotide
  Sense strand starting at position 811 of SEQ ID NO: 1883918
acaaguuuguaacuaguaa

SEQ ID NO: 2226251 - RNA, 19 nt, Artificial Sequence
  Description of Artificial Sequence: Synthetic oligonucleotide
  Antisense strand to SEQ ID NO: 2226250
uuacuaguuacaaacuugu

SEQ ID NO: 2226252 - RNA, 19 nt, Artificial Sequence
  Description of Artificial Sequence: Synthetic oligonucleotide
  Sense strand starting at position 825 of SEQ ID NO: 1883918
aguaacauucguuaacaau

SEQ ID NO: 2226253 - RNA, 19 nt, Artificial Sequence
  Description of Artificial Sequence: Synthetic oligonucleotide
  Antisense strand to SEQ ID NO: 2226252
auuguuaacgaauguuacu

SEQ ID NO: 2226254 - RNA, 19 nt, Artificial Sequence
  Description of Artificial Sequence: Synthetic oligonucleotide
  Sense strand starting at position 1173 of SEQ ID NO: 1883918
ugcagaauucuuuagccau

SEQ ID NO: 2226255 - RNA, 19 nt, Artificial Sequence
  Description of Artificial Sequence: Synthetic oligonucleotide
  Antisense strand to SEQ ID NO: 2226254
auggcuaaagaauucugca

SEQ ID NO: 2226256 - RNA, 19 nt, Artificial Sequence
  Description of Artificial Sequence: Synthetic oligonucleotide
  Sense strand starting at position 1192 of SEQ ID NO: 1883918
caaagaugaugccucaagu

SEQ ID NO: 2226257 - RNA, 19 nt, Artificial Sequence
  Description of Artificial Sequence: Synthetic oligonucleotide
  Antisense strand to SEQ ID NO: 2226256
acuugaggcaucaucuuug

SEQ ID NO: 2226258 - RNA, 19 nt, Artificial Sequence
  Description of Artificial Sequence: Synthetic oligonucleotide
  Sense strand starting at position 1505 of SEQ ID NO: 1883918
guggcgugggcugcuaaau

SEQ ID NO: 2226259 - RNA, 19 nt, Artificial Sequence
  Description of Artificial Sequence: Synthetic oligonucleotide
  Antisense strand to SEQ ID NO: 2226258
auuuagcagcccacgccac

SEQ ID NO: 2226260 - RNA, 19 nt, Artificial Sequence
  Description of Artificial Sequence: Synthetic oligonucleotide
  Sense strand starting at position 1590 of SEQ ID NO: 1883918
gugagcucacccgagaauu

SEQ ID NO: 2226261 - RNA, 19 nt, Artificial Sequence
  Description of Artificial Sequence: Synthetic oligonucleotide
  Antisense strand to SEQ ID NO: 2226260
aauucucgggugagcucac

SEQ ID NO: 2226262 - RNA, 19 nt, Artificial Sequence
  Description of Artificial Sequence: Synthetic oligonucleotide
  Sense strand starting at position 1592 of SEQ ID NO: 1883918
gagcucacccgagaauuga

SEQ ID NO: 2226263 - RNA, 19 nt, Artificial Sequence
  Description of Artificial Sequence: Synthetic oligonucleotide
  Antisense strand to SEQ ID NO: 2226262
ucaauucucgggugagcuc

SEQ ID NO: 2226264 - RNA, 19 nt, Artificial Sequence
  Description of Artificial Sequence: Synthetic oligonucleotide
  Sense strand starting at position 1771 of SEQ ID NO: 1883918
caagaaggcugcccgauuu

SEQ ID NO: 2226265 - RNA, 19 nt, Artificial Sequence
  Description of Artificial Sequence: Synthetic oligonucleotide
  Antisense strand to SEQ ID NO: 2226264
aaaucgggcagccuucuug

SEQ ID NO: 2226266 - RNA, 19 nt, Artificial Sequence
  Description of Artificial Sequence: Synthetic oligonucleotide
  Sense strand starting at position 1934 of SEQ ID NO: 1883918
guagcuuaagcagacauca

SEQ ID NO: 2226267 - RNA, 19 nt, Artificial Sequence
  Description of Artificial Sequence: Synthetic oligonucleotide
  Antisense strand to SEQ ID NO: 2226266
ugaugucugcuuaagcuac

SEQ ID NO: 2226268 - RNA, 19 nt, Artificial Sequence
  Description of Artificial Sequence: Synthetic oligonucleotide
  Sense strand starting at position 1947 of SEQ ID NO: 1883918
acaucaggugcgcgaauuu

SEQ ID NO: 2226269 - RNA, 19 nt, Artificial Sequence
  Description of Artificial Sequence: Synthetic oligonucleotide
  Antisense strand to SEQ ID NO: 2226268
aaauucgcgcaccugaugu

SEQ ID NO: 2226270 - RNA, 19 nt, Artificial Sequence
  Description of Artificial Sequence: Synthetic oligonucleotide
  Sense strand starting at position 2301 of SEQ ID NO: 1883918
gcccuuaguaucuagagga

SEQ ID NO: 2226271 - RNA, 19 nt, Artificial Sequence
  Description of Artificial Sequence: Synthetic oligonucleotide
  Antisense strand to SEQ ID NO: 2226270
uccucuagauacuaagggc

SEQ ID NO: 2226272 - RNA, 19 nt, Artificial Sequence
  Description of Artificial Sequence: Synthetic oligonucleotide
  Sense strand starting at position 2457 of SEQ ID NO: 1883918
gaggucgucccggaagacu

SEQ ID NO: 2226273 - RNA, 19 nt, Artificial Sequence
  Description of Artificial Sequence: Synthetic oligonucleotide
  Antisense strand to SEQ ID NO: 2226272
agucuuccgggacgaccuc

SEQ ID NO: 2226274 - RNA, 19 nt, Artificial Sequence
  Description of Artificial Sequence: Synthetic oligonucleotide
  Sense strand starting at position 2773 of SEQ ID NO: 1883918
cuaugaaugcuauacaugu

SEQ ID NO: 2226275 - RNA, 19 nt, Artificial Sequence
  Description of Artificial Sequence: Synthetic oligonucleotide
  Antisense strand to SEQ ID NO: 2226274
acauguauagcauucauag

SEQ ID NO: 2226276 - RNA, 19 nt, Artificial Sequence
  Description of Artificial Sequence: Synthetic oligonucleotide
  Sense strand starting at position 2798 of SEQ ID NO: 1883918
auugcucauagaugaggua

SEQ ID NO: 2226277 - RNA, 19 nt, Artificial Sequence
  Description of Artificial Sequence: Synthetic oligonucleotide
  Antisense strand to SEQ ID NO: 2226276
uaccucaucuaugagcaau

SEQ ID NO: 2226278 - RNA, 19 nt, Artificial Sequence
  Description of Artificial Sequence: Synthetic oligonucleotide
  Sense strand starting at position 3110 of SEQ ID NO: 1883918
augaaugauacaugagugu

SEQ ID NO: 2226279 - RNA, 19 nt, Artificial Sequence
  Description of Artificial Sequence: Synthetic oligonucleotide
  Antisense strand to SEQ ID NO: 2226278
acacucauguaucauucau

SEQ ID NO: 2226280 - RNA, 19 nt, Artificial Sequence
  Description of Artificial Sequence: Synthetic oligonucleotide
  Sense strand starting at position 3113 of SEQ ID NO: 1883918
aaugauacaugaguguaca

SEQ ID NO: 2226281 - RNA, 19 nt, Artificial Sequence
  Description of Artificial Sequence: Synthetic oligonucleotide
  Antisense strand to SEQ ID NO: 2226280
uguacacucauguaucauu

SEQ ID NO: 2226282 - RNA, 19 nt, Artificial Sequence
  Description of Artificial Sequence: Synthetic oligonucleotide
  Sense strand starting at position 3114 of SEQ ID NO: 1883918
augauacaugaguguacaa

SEQ ID NO: 2226283 - RNA, 19 nt, Artificial Sequence
  Description of Artificial Sequence: Synthetic oligonucleotide
  Antisense strand to SEQ ID NO: 2226282
uuguacacucauguaucau

SEQ ID NO: 2226284 - RNA, 19 nt, Artificial Sequence
  Description of Artificial Sequence: Synthetic oligonucleotide
  Sense strand starting at position 3323 of SEQ ID NO: 1883918
uguuacuaucuugaugacu

SEQ ID NO: 2226285 - RNA, 19 nt, Artificial Sequence
  Description of Artificial Sequence: Synthetic oligonucleotide
  Antisense strand to SEQ ID NO: 2226284
agucaucaagauaguaaca

SEQ ID NO: 2226286 - RNA, 19 nt, Artificial Sequence
  Description of Artificial Sequence: Synthetic oligonucleotide
  Sense strand starting at position 3328 of SEQ ID NO: 1883918
cuaucuugaugacugggau

SEQ ID NO: 2226287 - RNA, 19 nt, Artificial Sequence
  Description of Artificial Sequence: Synthetic oligonucleotide
  Antisense strand to SEQ ID NO: 2226286
aucccagucaucaagauag

SEQ ID NO: 2226288 - RNA, 19 nt, Artificial Sequence
  Description of Artificial Sequence: Synthetic oligonucleotide
  Sense strand starting at position 3394 of SEQ ID NO: 1883918
guagaugacuugguuggua

SEQ ID NO: 2226289 - RNA, 19 nt, Artificial Sequence
  Description of Artificial Sequence: Synthetic oligonucleotide
  Antisense strand to SEQ ID NO: 2226288
uaccaaccaagucaucuac

SEQ ID NO: 2226290 - RNA, 19 nt, Artificial Sequence
  Description of Artificial Sequence: Synthetic oligonucleotide
  Sense strand starting at position 3675 of SEQ ID NO: 1883918
ugguuuguuccaugaagag

SEQ ID NO: 2226291 - RNA, 19 nt, Artificial Sequence
  Description of Artificial Sequence: Synthetic oligonucleotide
  Antisense strand to SEQ ID NO: 2226290
cucuucauggaacaaacca

SEQ ID NO: 2226292 - RNA, 19 nt, Artificial Sequence
  Description of Artificial Sequence: Synthetic oligonucleotide
  Sense strand starting at position 3748 of SEQ ID NO: 1883918
aauauaauagccggacagu

SEQ ID NO: 2226293 - RNA, 19 nt, Artificial Sequence
  Description of Artificial Sequence: Synthetic oligonucleotide
  Antisense strand to SEQ ID NO: 2226292
acuguccggcuauuauauu

SEQ ID NO: 2226294 - RNA, 19 nt, Artificial Sequence
  Description of Artificial Sequence: Synthetic oligonucleotide
  Sense strand starting at position 3772 of SEQ ID NO: 1883918
cuuugaaugaaguggugau

SEQ ID NO: 2226295 - RNA, 19 nt, Artificial Sequence
  Description of Artificial Sequence: Synthetic oligonucleotide
  Antisense strand to SEQ ID NO: 2226294
aucaccacuucauucaaag

SEQ ID NO: 2226296 - RNA, 19 nt, Artificial Sequence
  Description of Artificial Sequence: Synthetic oligonucleotide
  Sense strand starting at position 3773 of SEQ ID NO: 1883918
uuugaaugaaguggugaua

SEQ ID NO: 2226297 - RNA, 19 nt, Artificial Sequence
  Description of Artificial Sequence: Synthetic oligonucleotide
  Antisense strand to SEQ ID NO: 2226296
uaucaccacuucauucaaa

SEQ ID NO: 2226298 - RNA, 19 nt, Artificial Sequence
  Description of Artificial Sequence: Synthetic oligonucleotide
  Sense strand starting at position 3822 of SEQ ID NO: 1883918
gugggcgucauauauagau

SEQ ID NO: 2226299 - RNA, 19 nt, Artificial Sequence
  Description of Artificial Sequence: Synthetic oligonucleotide
  Antisense strand to SEQ ID NO: 2226298
aucuauauaugacgcccac

SEQ ID NO: 2226300 - RNA, 19 nt, Artificial Sequence
  Description of Artificial Sequence: Synthetic oligonucleotide
  Sense strand starting at position 3824 of SEQ ID NO: 1883918
gggcgucauauauagaugu

SEQ ID NO: 2226301 - RNA, 19 nt, Artificial Sequence
  Description of Artificial Sequence: Synthetic oligonucleotide
  Antisense strand to SEQ ID NO: 2226300
acaucuauauaugacgccc

SEQ ID NO: 2226302 - RNA, 19 nt, Artificial Sequence
  Description of Artificial Sequence: Synthetic oligonucleotide
  Sense strand starting at position 3969 of SEQ ID NO: 1883918
auggcuccuaguggagaaa

SEQ ID NO: 2226303 - RNA, 19 nt, Artificial Sequence
  Description of Artificial Sequence: Synthetic oligonucleotide
  Antisense strand to SEQ ID NO: 2226302
uuucuccacuaggagccau

SEQ ID NO: 2226304 - RNA, 19 nt, Artificial Sequence
  Description of Artificial Sequence: Synthetic oligonucleotide
  Sense strand starting at position 3970 of SEQ ID NO: 1883918
uggcuccuaguggagaaau

SEQ ID NO: 2226305 - RNA, 19 nt, Artificial Sequence
  Description of Artificial Sequence: Synthetic oligonucleotide
  Antisense strand to SEQ ID NO: 2226304
auuucuccacuaggagcca

SEQ ID NO: 2226306 - RNA, 19 nt, Artificial Sequence
  Description of Artificial Sequence: Synthetic oligonucleotide
  Sense strand starting at position 3972 of SEQ ID NO: 1883918
gcuccuaguggagaaaugu

SEQ ID NO: 2226307 - RNA, 19 nt, Artificial Sequence
  Description of Artificial Sequence: Synthetic oligonucleotide
  Antisense strand to SEQ ID NO: 2226306
acauuucuccacuaggagc

SEQ ID NO: 2226308 - RNA, 19 nt, Artificial Sequence
  Description of Artificial Sequence: Synthetic oligonucleotide
  Sense strand starting at position 524 of SEQ ID NO: 1883920
agcacugauucuguaagaa

SEQ ID NO: 2226309 - RNA, 19 nt, Artificial Sequence
  Description of Artificial Sequence: Synthetic oligonucleotide
  Antisense strand to SEQ ID NO: 2226308
uucuuacagaaucagugcu

SEQ ID NO: 2226310 - RNA, 19 nt, Artificial Sequence
  Description of Artificial Sequence: Synthetic oligonucleotide
  Sense strand starting at position 664 of SEQ ID NO: 1883920
aucaaucauguguagcauu

SEQ ID NO: 2226311 - RNA, 19 nt, Artificial Sequence
  Description of Artificial Sequence: Synthetic oligonucleotide
  Antisense strand to SEQ ID NO: 2226310
aaugcuacacaugauugau

SEQ ID NO: 2226312 - RNA, 19 nt, Artificial Sequence
  Description of Artificial Sequence: Synthetic oligonucleotide
  Sense strand starting at position 1078 of SEQ ID NO: 1883920
ugagucuuaugcuuagaca

SEQ ID NO: 2226313 - RNA, 19 nt, Artificial Sequence
  Description of Artificial Sequence: Synthetic oligonucleotide
  Antisense strand to SEQ ID NO: 2226312
ugucuaagcauaagacuca

SEQ ID NO: 2226314 - RNA, 19 nt, Artificial Sequence
  Description of Artificial Sequence: Synthetic oligonucleotide
  Sense strand starting at position 1079 of SEQ ID NO: 1883920
gagucuuaugcuuagacaa

SEQ ID NO: 2226315 - RNA, 19 nt, Artificial Sequence
  Description of Artificial Sequence: Synthetic oligonucleotide
  Antisense strand to SEQ ID NO: 2226314
uugucuaagcauaagacuc

SEQ ID NO: 2226316 - RNA, 19 nt, Artificial Sequence
  Description of Artificial Sequence: Synthetic oligonucleotide
  Sense strand starting at position 1114 of SEQ ID NO: 1883920
gaaugaaaggcuugguaaa

SEQ ID NO: 2226317 - RNA, 19 nt, Artificial Sequence
  Description of Artificial Sequence: Synthetic oligonucleotide
  Antisense strand to SEQ ID NO: 2226316
uuuaccaagccuuucauuc

SEQ ID NO: 2226318 - RNA, 19 nt, Artificial Sequence
  Description of Artificial Sequence: Synthetic oligonucleotide
  Sense strand starting at position 1115 of SEQ ID NO: 1883920
aaugaaaggcuugguaaag

SEQ ID NO: 2226319 - RNA, 19 nt, Artificial Sequence
  Description of Artificial Sequence: Synthetic oligonucleotide
  Antisense strand to SEQ ID NO: 2226318
cuuuaccaagccuuucauu

SEQ ID NO: 2226320 - RNA, 19 nt, Artificial Sequence
  Description of Artificial Sequence: Synthetic oligonucleotide
  Sense strand starting at position 1116 of SEQ ID NO: 1883920
augaaaggcuugguaaaga

SEQ ID NO: 2226321 - RNA, 19 nt, Artificial Sequence
  Description of Artificial Sequence: Synthetic oligonucleotide
  Antisense strand to SEQ ID NO: 2226320
ucuuuaccaagccuuucau

SEQ ID NO: 2226322 - RNA, 19 nt, Artificial Sequence
  Description of Artificial Sequence: Synthetic oligonucleotide
  Sense strand starting at position 1199 of SEQ ID NO: 1883920
uaugacaugcaguguuuga

SEQ ID NO: 2226323 - RNA, 19 nt, Artificial Sequence
  Description of Artificial Sequence: Synthetic oligonucleotide
  Antisense strand to SEQ ID NO: 2226322
ucaaacacugcaugucaua

SEQ ID NO: 2226324 - RNA, 19 nt, Artificial Sequence
  Description of Artificial Sequence: Synthetic oligonucleotide
  Sense strand starting at position 1314 of SEQ ID NO: 1883920
auaguuccucaagacaguu

SEQ ID NO: 2226325 - RNA, 19 nt, Artificial Sequence
  Description of Artificial Sequence: Synthetic oligonucleotide
  Antisense strand to SEQ ID NO: 2226324
aacugucuugaggaacuau

SEQ ID NO: 2226326 - RNA, 19 nt, Artificial Sequence
  Description of Artificial Sequence: Synthetic oligonucleotide
  Sense strand starting at position 1408 of SEQ ID NO: 1883920
auuaacuucgaagagcuaa

SEQ ID NO: 2226327 - RNA, 19 nt, Artificial Sequence
  Description of Artificial Sequence: Synthetic oligonucleotide
  Antisense strand to SEQ ID NO: 2226326
uuagcucuucgaaguuaau

SEQ ID NO: 2226328 - RNA, 19 nt, Artificial Sequence
  Description of Artificial Sequence: Synthetic oligonucleotide
  Sense strand starting at position 1517 of SEQ ID NO: 1883920
acacaaagguuauuaguaa

SEQ ID NO: 2226329 - RNA, 19 nt, Artificial Sequence
  Description of Artificial Sequence: Synthetic oligonucleotide
  Antisense strand to SEQ ID NO: 2226328
uuacuaauaaccuuugugu

SEQ ID NO: 2226330 - RNA, 19 nt, Artificial Sequence
  Description of Artificial Sequence: Synthetic oligonucleotide
  Sense strand starting at position 1524 of SEQ ID NO: 1883920
gguuauuaguaacuaaguc

SEQ ID NO: 2226331 - RNA, 19 nt, Artificial Sequence
  Description of Artificial Sequence: Synthetic oligonucleotide
  Antisense strand to SEQ ID NO: 2226330
gacuuaguuacuaauaacc

SEQ ID NO: 2226332 - RNA, 19 nt, Artificial Sequence
  Description of Artificial Sequence: Synthetic oligonucleotide
  Sense strand starting at position 1642 of SEQ ID NO: 1883920
gcacuucccugacugaaca

SEQ ID NO: 2226333 - RNA, 19 nt, Artificial Sequence
  Description of Artificial Sequence: Synthetic oligonucleotide
  Antisense strand to SEQ ID NO: 2226332
uguucagucagggaagugc

SEQ ID NO: 2226334 - RNA, 19 nt, Artificial Sequence
  Description of Artificial Sequence: Synthetic oligonucleotide
  Sense strand starting at position 1675 of SEQ ID NO: 1883920
aaucgcaaguuccuauaga

SEQ ID NO: 2226335 - RNA, 19 nt, Artificial Sequence
  Description of Artificial Sequence: Synthetic oligonucleotide
  Antisense strand to SEQ ID NO: 2226334
ucuauaggaacuugcgauu

SEQ ID NO: 2226336 - RNA, 19 nt, Artificial Sequence
  Description of Artificial Sequence: Synthetic oligonucleotide
  Sense strand starting at position 1682 of SEQ ID NO: 1883920
aguuccuauagauggagua

SEQ ID NO: 2226337 - RNA, 19 nt, Artificial Sequence
  Description of Artificial Sequence: Synthetic oligonucleotide
  Antisense strand to SEQ ID NO: 2226336
uacuccaucuauaggaacu

SEQ ID NO: 2226338 - RNA, 19 nt, Artificial Sequence
  Description of Artificial Sequence: Synthetic oligonucleotide
  Sense strand starting at position 1683 of SEQ ID NO: 1883920
guuccuauagauggaguaa

SEQ ID NO: 2226339 - RNA, 19 nt, Artificial Sequence
  Description of Artificial Sequence: Synthetic oligonucleotide
  Antisense strand to SEQ ID NO: 2226338
uuacuccaucuauaggaac

SEQ ID NO: 2226340 - RNA, 19 nt, Artificial Sequence
  Description of Artificial Sequence: Synthetic oligonucleotide
  Sense strand starting at position 2235 of SEQ ID NO: 1883920
gcugcauuuguccacagua

SEQ ID NO: 2226341 - RNA, 19 nt, Artificial Sequence
  Description of Artificial Sequence: Synthetic oligonucleotide
  Antisense strand to SEQ ID NO: 2226340
uacuguggacaaaugcagc

SEQ ID NO: 2226342 - RNA, 19 nt, Artificial Sequence
  Description of Artificial Sequence: Synthetic oligonucleotide
  Sense strand starting at position 2260 of SEQ ID NO: 1883920
ucagaacaugaacgguaua

SEQ ID NO: 2226343 - RNA, 19 nt, Artificial Sequence
  Description of Artificial Sequence: Synthetic oligonucleotide
  Antisense strand to SEQ ID NO: 2226342
uauaccguucauguucuga

SEQ ID NO: 2226344 - RNA, 19 nt, Artificial Sequence
  Description of Artificial Sequence: Synthetic oligonucleotide
  Sense strand starting at position 2272 of SEQ ID NO: 1883920
cgguauauacuguauguuu

SEQ ID NO: 2226345 - RNA, 19 nt, Artificial Sequence
  Description of Artificial Sequence: Synthetic oligonucleotide
  Antisense strand to SEQ ID NO: 2226344
aaacauacaguauauaccg

SEQ ID NO: 2226346 - RNA, 19 nt, Artificial Sequence
  Description of Artificial Sequence: Synthetic oligonucleotide
  Sense strand starting at position 2313 of SEQ ID NO: 1883920
gcaacagguugccuaugaa

SEQ ID NO: 2226347 - RNA, 19 nt, Artificial Sequence
  Description of Artificial Sequence: Synthetic oligonucleotide
  Antisense strand to SEQ ID NO: 2226346
uucauaggcaaccuguugc

SEQ ID NO: 2226348 - RNA, 19 nt, Artificial Sequence
  Description of Artificial Sequence: Synthetic oligonucleotide
  Sense strand starting at position 2316 of SEQ ID NO: 1883920
acagguugccuaugaagua

SEQ ID NO: 2226349 - RNA, 19 nt, Artificial Sequence
  Description of Artificial Sequence: Synthetic oligonucleotide
  Antisense strand to SEQ ID NO: 2226348
uacuucauaggcaaccugu

SEQ ID NO: 2226350 - RNA, 19 nt, Artificial Sequence
  Description of Artificial Sequence: Synthetic oligonucleotide
  Sense strand starting at position 2352 of SEQ ID NO: 1883920
ggcagaaugguaugcauau

SEQ ID NO: 2226351 - RNA, 19 nt, Artificial Sequence
  Description of Artificial Sequence: Synthetic oligonucleotide
  Antisense strand to SEQ ID NO: 2226350
auaugcauaccauucugcc

SEQ ID NO: 2226352 - RNA, 19 nt, Artificial Sequence
  Description of Artificial Sequence: Synthetic oligonucleotide
  Sense strand starting at position 2353 of SEQ ID NO: 1883920
gcagaaugguaugcauaug

SEQ ID NO: 2226353 - RNA, 19 nt, Artificial Sequence
  Description of Artificial Sequence: Synthetic oligonucleotide
  Antisense strand to SEQ ID NO: 2226352
cauaugcauaccauucugc

SEQ ID NO: 2226354 - RNA, 19 nt, Artificial Sequence
  Description of Artificial Sequence: Synthetic oligonucleotide
  Sense strand starting at position 2358 of SEQ ID NO: 1883920
augguaugcauaugaaaga

SEQ ID NO: 2226355 - RNA, 19 nt, Artificial Sequence
  Description of Artificial Sequence: Synthetic oligonucleotide
  Antisense strand to SEQ ID NO: 2226354
ucuuucauaugcauaccau

SEQ ID NO: 2226356 - RNA, 19 nt, Artificial Sequence
  Description of Artificial Sequence: Synthetic oligonucleotide
  Sense strand starting at position 2458 of SEQ ID NO: 1883920
gaggauuagugccucaguc

SEQ ID NO: 2226357 - RNA, 19 nt, Artificial Sequence
  Description of Artificial Sequence: Synthetic oligonucleotide
  Antisense strand to SEQ ID NO: 2226356
gacugaggcacuaauccuc

SEQ ID NO: 2226358 - RNA, 19 nt, Artificial Sequence
  Description of Artificial Sequence: Synthetic oligonucleotide
  Sense strand starting at position 2460 of SEQ ID NO: 1883920
ggauuagugccucagucaa

SEQ ID NO: 2226359 - RNA, 19 nt, Artificial Sequence
  Description of Artificial Sequence: Synthetic oligonucleotide
  Antisense strand to SEQ ID NO: 2226358
uugacugaggcacuaaucc

SEQ ID NO: 2226360 - RNA, 19 nt, Artificial Sequence
  Description of Artificial Sequence: Synthetic oligonucleotide
  Sense strand starting at position 2525 of SEQ ID NO: 1883920
cuaacaaagugagcugaau

SEQ ID NO: 2226361 - RNA, 19 nt, Artificial Sequence
  Description of Artificial Sequence: Synthetic oligonucleotide
  Antisense strand to SEQ ID NO: 2226360
auucagcucacuuuguuag

SEQ ID NO: 2226362 - RNA, 19 nt, Artificial Sequence
  Description of Artificial Sequence: Synthetic oligonucleotide
  Sense strand starting at position 2608 of SEQ ID NO: 1883920
acacucagauguuccugaa

SEQ ID NO: 2226363 - RNA, 19 nt, Artificial Sequence
  Description of Artificial Sequence: Synthetic oligonucleotide
  Antisense strand to SEQ ID NO: 2226362
uucaggaacaucugagugu

SEQ ID NO: 2226364 - RNA, 19 nt, Artificial Sequence
  Description of Artificial Sequence: Synthetic oligonucleotide
  Sense strand starting at position 2612 of SEQ ID NO: 1883920
ucagauguuccugaauacu

SEQ ID NO: 2226365 - RNA, 19 nt, Artificial Sequence
  Description of Artificial Sequence: Synthetic oligonucleotide
  Antisense strand to SEQ ID NO: 2226364
aguauucaggaacaucuga

SEQ ID NO: 2226366 - RNA, 19 nt, Artificial Sequence
  Description of Artificial Sequence: Synthetic oligonucleotide
  Sense strand starting at position 2945 of SEQ ID NO: 1883920
auagaaaucuguuugaggu

SEQ ID NO: 2226367 - RNA, 19 nt, Artificial Sequence
  Description of Artificial Sequence: Synthetic oligonucleotide
  Antisense strand to SEQ ID NO: 2226366
accucaaacagauuucuau

SEQ ID NO: 2226368 - RNA, 19 nt, Artificial Sequence
  Description of Artificial Sequence: Synthetic oligonucleotide
  Sense strand starting at position 2946 of SEQ ID NO: 1883920
uagaaaucuguuugaggug

SEQ ID NO: 2226369 - RNA, 19 nt, Artificial Sequence
  Description of Artificial Sequence: Synthetic oligonucleotide
  Antisense strand to SEQ ID NO: 2226368
caccucaaacagauuucua

SEQ ID NO: 2226370 - RNA, 19 nt, Artificial Sequence
  Description of Artificial Sequence: Synthetic oligonucleotide
  Sense strand starting at position 2958 of SEQ ID NO: 1883920
ugaggugggcucuagcaaa

SEQ ID NO: 2226371 - RNA, 19 nt, Artificial Sequence
  Description of Artificial Sequence: Synthetic oligonucleotide
  Antisense strand to SEQ ID NO: 2226370
uuugcuagagcccaccuca

SEQ ID NO: 2226372 - RNA, 19 nt, Artificial Sequence
  Description of Artificial Sequence: Synthetic oligonucleotide
  Sense strand starting at position 3024 of SEQ ID NO: 1883920
acaugauuguaucuuacag

SEQ ID NO: 2226373 - RNA, 19 nt, Artificial Sequence
  Description of Artificial Sequence: Synthetic oligonucleotide
  Antisense strand to SEQ ID NO: 2226372
cuguaagauacaaucaugu

SEQ ID NO: 2226374 - RNA, 19 nt, Artificial Sequence
  Description of Artificial Sequence: Synthetic oligonucleotide
  Sense strand starting at position 3069 of SEQ ID NO: 1883920
caaggcuucuagguaaacu

SEQ ID NO: 2226375 - RNA, 19 nt, Artificial Sequence
  Description of Artificial Sequence: Synthetic oligonucleotide
  Antisense strand to SEQ ID NO: 2226374
aguuuaccuagaagccuug

SEQ ID NO: 2226376 - RNA, 19 nt, Artificial Sequence
  Description of Artificial Sequence: Synthetic oligonucleotide
  Sense strand starting at position 3366 of SEQ ID NO: 1883920
gugccaauggagcaaguau

SEQ ID NO: 2226377 - RNA, 19 nt, Artificial Sequence
  Description of Artificial Sequence: Synthetic oligonucleotide
  Antisense strand to SEQ ID NO: 2226376
auacuugcuccauuggcac

SEQ ID NO: 2226378 - RNA, 19 nt, Artificial Sequence
  Description of Artificial Sequence: Synthetic oligonucleotide
  Sense strand starting at position 3377 of SEQ ID NO: 1883920
gcaaguauuauguaguauu

SEQ ID NO: 2226379 - RNA, 19 nt, Artificial Sequence
  Description of Artificial Sequence: Synthetic oligonucleotide
  Antisense strand to SEQ ID NO: 2226378
aauacuacauaauacuugc

SEQ ID NO: 2226380 - RNA, 19 nt, Artificial Sequence
  Description of Artificial Sequence: Synthetic oligonucleotide
  Sense strand starting at position 3423 of SEQ ID NO: 1883920
ugaacuugcugauauuuga

SEQ ID NO: 2226381 - RNA, 19 nt, Artificial Sequence
  Description of Artificial Sequence: Synthetic oligonucleotide
  Antisense strand to SEQ ID NO: 2226380
ucaaauaucagcaaguuca

SEQ ID NO: 2226382 - RNA, 19 nt, Artificial Sequence
  Description of Artificial Sequence: Synthetic oligonucleotide
  Sense strand starting at position 3439 of SEQ ID NO: 1883920
ugaacuuucuggccuacaa

SEQ ID NO: 2226383 - RNA, 19 nt, Artificial Sequence
  Description of Artificial Sequence: Synthetic oligonucleotide
  Antisense strand to SEQ ID NO: 2226382
uuguaggccagaaaguuca

SEQ ID NO: 2226384 - RNA, 19 nt, Artificial Sequence
  Description of Artificial Sequence: Synthetic oligonucleotide
  Sense strand starting at position 3607 of SEQ ID NO: 1883920
uaaugaaggcuuggcacau

SEQ ID NO: 2226385 - RNA, 19 nt, Artificial Sequence
  Description of Artificial Sequence: Synthetic oligonucleotide
  Antisense strand to SEQ ID NO: 2226384
augugccaagccuucauua

SEQ ID NO: 2226386 - RNA, 19 nt, Artificial Sequence
  Description of Artificial Sequence: Synthetic oligonucleotide
  Sense strand starting at position 3608 of SEQ ID NO: 1883920
aaugaaggcuuggcacaua

SEQ ID NO: 2226387 - RNA, 19 nt, Artificial Sequence
  Description of Artificial Sequence: Synthetic oligonucleotide
  Antisense strand to SEQ ID NO: 2226386
uaugugccaagccuucauu

SEQ ID NO: 2226388 - RNA, 19 nt, Artificial Sequence
  Description of Artificial Sequence: Synthetic oligonucleotide
  Sense strand starting at position 462 of SEQ ID NO: 1883919
cccucaucugcccggcaaa

SEQ ID NO: 2226389 - RNA, 19 nt, Artificial Sequence
  Description of Artificial Sequence: Synthetic oligonucleotide
  Antisense strand to SEQ ID NO: 2226388
uuugccgggcagaugaggg

SEQ ID NO: 2226390 - RNA, 19 nt, Artificial Sequence
  Description of Artificial Sequence: Synthetic oligonucleotide
  Sense strand starting at position 463 of SEQ ID NO: 1883919
ccucaucugcccggcaaau

SEQ ID NO: 2226391 - RNA, 19 nt, Artificial Sequence
  Description of Artificial Sequence: Synthetic oligonucleotide
  Antisense strand to SEQ ID NO: 2226390
auuugccgggcagaugagg

SEQ ID NO: 2226392 - RNA, 19 nt, Artificial Sequence
  Description of Artificial Sequence: Synthetic oligonucleotide
  Sense strand starting at position 465 of SEQ ID NO: 1883919
ucaucugcccggcaaauua

SEQ ID NO: 2226393 - RNA, 19 nt, Artificial Sequence
  Description of Artificial Sequence: Synthetic oligonucleotide
  Antisense strand to SEQ ID NO: 2226392
uaauuugccgggcagauga

SEQ ID NO: 2226394 - RNA, 19 nt, Artificial Sequence
  Description of Artificial Sequence: Synthetic oligonucleotide
  Sense strand starting at position 473 of SEQ ID NO: 1883919
ccggcaaauuaaguagaaa

SEQ ID NO: 2226395 - RNA, 19 nt, Artificial Sequence
  Description of Artificial Sequence: Synthetic oligonucleotide
  Antisense strand to SEQ ID NO: 2226394
uuucuacuuaauuugccgg

SEQ ID NO: 2226396 - RNA, 19 nt, Artificial Sequence
  Description of Artificial Sequence: Synthetic oligonucleotide
  Sense strand starting at position 495 of SEQ ID NO: 1883919
aacugagucacguacguaa

SEQ ID NO: 2226397 - RNA, 19 nt, Artificial Sequence
  Description of Artificial Sequence: Synthetic oligonucleotide
  Antisense strand to SEQ ID NO: 2226396
uuacguacgugacucaguu

SEQ ID NO: 2226398 - RNA, 19 nt, Artificial Sequence
  Description of Artificial Sequence: Synthetic oligonucleotide
  Sense strand starting at position 506 of SEQ ID NO: 1883919
guacguaagccacaguguu

SEQ ID NO: 2226399 - RNA, 19 nt, Artificial Sequence
  Description of Artificial Sequence: Synthetic oligonucleotide
  Antisense strand to SEQ ID NO: 2226398
aacacuguggcuuacguac

SEQ ID NO: 2226400 - RNA, 19 nt, Artificial Sequence
  Description of Artificial Sequence: Synthetic oligonucleotide
  Sense strand starting at position 555 of SEQ ID NO: 1883919
ugagacuggcccuguaagu

SEQ ID NO: 2226401 - RNA, 19 nt, Artificial Sequence
  Description of Artificial Sequence: Synthetic oligonucleotide
  Antisense strand to SEQ ID NO: 2226400
acuuacagggccagucuca

SEQ ID NO: 2226402 - RNA, 19 nt, Artificial Sequence
  Description of Artificial Sequence: Synthetic oligonucleotide
  Sense strand starting at position 654 of SEQ ID NO: 1883919
ucagguaucugauauacaa

SEQ ID NO: 2226403 - RNA, 19 nt, Artificial Sequence
  Description of Artificial Sequence: Synthetic oligonucleotide
  Antisense strand to SEQ ID NO: 2226402
uuguauaucagauaccuga

SEQ ID NO: 2226404 - RNA, 19 nt, Artificial Sequence
  Description of Artificial Sequence: Synthetic oligonucleotide
  Sense strand starting at position 1202 of SEQ ID NO: 1883919
guccgcuuucgucuaaacu

SEQ ID NO: 2226405 - RNA, 19 nt, Artificial Sequence
  Description of Artificial Sequence: Synthetic oligonucleotide
  Antisense strand to SEQ ID NO: 2226404
aguuuagacgaaagcggac

SEQ ID NO: 2226406 - RNA, 19 nt, Artificial Sequence
  Description of Artificial Sequence: Synthetic oligonucleotide
  Sense strand starting at position 1212 of SEQ ID NO: 1883919
gucuaaacugcgcucguaa

SEQ ID NO: 2226407 - RNA, 19 nt, Artificial Sequence
  Description of Artificial Sequence: Synthetic oligonucleotide
  Antisense strand to SEQ ID NO: 2226406
uuacgagcgcaguuuagac

SEQ ID NO: 2226408 - RNA, 19 nt, Artificial Sequence
  Description of Artificial Sequence: Synthetic oligonucleotide
  Sense strand starting at position 1215 of SEQ ID NO: 1883919
uaaacugcgcucguaaagu

SEQ ID NO: 2226409 - RNA, 19 nt, Artificial Sequence
  Description of Artificial Sequence: Synthetic oligonucleotide
  Antisense strand to SEQ ID NO: 2226408
acuuuacgagcgcaguuua

SEQ ID NO: 2226410 - RNA, 19 nt, Artificial Sequence
  Description of Artificial Sequence: Synthetic oligonucleotide
  Sense strand starting at position 2183 of SEQ ID NO: 1883919
uccaaugacuugucagcca

SEQ ID NO: 2226411 - RNA, 19 nt, Artificial Sequence
  Description of Artificial Sequence: Synthetic oligonucleotide
  Antisense strand to SEQ ID NO: 2226410
uggcugacaagucauugga

SEQ ID NO: 2226412 - RNA, 19 nt, Artificial Sequence
  Description of Artificial Sequence: Synthetic oligonucleotide
  Sense strand starting at position 2188 of SEQ ID NO: 1883919
ugacuugucagccagagua

SEQ ID NO: 2226413 - RNA, 19 nt, Artificial Sequence
  Description of Artificial Sequence: Synthetic oligonucleotide
  Antisense strand to SEQ ID NO: 2226412
uacucuggcugacaaguca

SEQ ID NO: 2226414 - RNA, 19 nt, Artificial Sequence
  Description of Artificial Sequence: Synthetic oligonucleotide
  Sense strand starting at position 2190 of SEQ ID NO: 1883919
acuugucagccagaguaac

SEQ ID NO: 2226415 - RNA, 19 nt, Artificial Sequence
  Description of Artificial Sequence: Synthetic oligonucleotide
  Antisense strand to SEQ ID NO: 2226414
guuacucuggcugacaagu

SEQ ID NO: 2226416 - RNA, 19 nt, Artificial Sequence
  Description of Artificial Sequence: Synthetic oligonucleotide
  Sense strand starting at position 2235 of SEQ ID NO: 1883919
gaggucgguuucuuccuaa

SEQ ID NO: 2226417 - RNA, 19 nt, Artificial Sequence
  Description of Artificial Sequence: Synthetic oligonucleotide
  Antisense strand to SEQ ID NO: 2226416
uuaggaagaaaccgaccuc

SEQ ID NO: 2226418 - RNA, 19 nt, Artificial Sequence
  Description of Artificial Sequence: Synthetic oligonucleotide
  Sense strand starting at position 2429 of SEQ ID NO: 1883919
ucuacauaccuugacuagu

SEQ ID NO: 2226419 - RNA, 19 nt, Artificial Sequence
  Description of Artificial Sequence: Synthetic oligonucleotide
  Antisense strand to SEQ ID NO: 2226418
acuagucaagguauguaga

SEQ ID NO: 2226420 - RNA, 19 nt, Artificial Sequence
  Description of Artificial Sequence: Synthetic oligonucleotide
  Sense strand starting at position 2482 of SEQ ID NO: 1883919
cugguugaguccuucucca

SEQ ID NO: 2226421 - RNA, 19 nt, Artificial Sequence
  Description of Artificial Sequence: Synthetic oligonucleotide
  Antisense strand to SEQ ID NO: 2226420
uggagaaggacucaaccag

SEQ ID NO: 2226422 - RNA, 19 nt, Artificial Sequence
  Description of Artificial Sequence: Synthetic oligonucleotide
  Sense strand starting at position 2507 of SEQ ID NO: 1883919
gcuugagcuccugagacaa

SEQ ID NO: 2226423 - RNA, 19 nt, Artificial Sequence
  Description of Artificial Sequence: Synthetic oligonucleotide
  Antisense strand to SEQ ID NO: 2226422
uugucucaggagcucaagc

SEQ ID NO: 2226424 - RNA, 19 nt, Artificial Sequence
  Description of Artificial Sequence: Synthetic oligonucleotide
  Sense strand starting at position 2575 of SEQ ID NO: 1883919
uggaaaugguccgcaugcu

SEQ ID NO: 2226425 - RNA, 19 nt, Artificial Sequence
  Description of Artificial Sequence: Synthetic oligonucleotide
  Antisense strand to SEQ ID NO: 2226424
agcaugcggaccauuucca

SEQ ID NO: 2226426 - RNA, 19 nt, Artificial Sequence
  Description of Artificial Sequence: Synthetic oligonucleotide
  Sense strand starting at position 3029 of SEQ ID NO: 1883919
agaauagcagcaugguuau

SEQ ID NO: 2226427 - RNA, 19 nt, Artificial Sequence
  Description of Artificial Sequence: Synthetic oligonucleotide
  Antisense strand to SEQ ID NO: 2226426
auaaccaugcugcuauucu

SEQ ID NO: 2226428 - RNA, 19 nt, Artificial Sequence
  Description of Artificial Sequence: Synthetic oligonucleotide
  Sense strand starting at position 3032 of SEQ ID NO: 1883919
auagcagcaugguuauaga

SEQ ID NO: 2226429 - RNA, 19 nt, Artificial Sequence
  Description of Artificial Sequence: Synthetic oligonucleotide
  Antisense strand to SEQ ID NO: 2226428
ucuauaaccaugcugcuau

SEQ ID NO: 2226430 - RNA, 19 nt, Artificial Sequence
  Description of Artificial Sequence: Synthetic oligonucleotide
  Sense strand starting at position 3040 of SEQ ID NO: 1883919
augguuauagaguacagua

SEQ ID NO: 2226431 - RNA, 19 nt, Artificial Sequence
  Description of Artificial Sequence: Synthetic oligonucleotide
  Antisense strand to SEQ ID NO: 2226430
uacuguacucuauaaccau

SEQ ID NO: 2226432 - RNA, 19 nt, Artificial Sequence
  Description of Artificial Sequence: Synthetic oligonucleotide
  Sense strand starting at position 3053 of SEQ ID NO: 1883919
acaguagguccucacuuaa

SEQ ID NO: 2226433 - RNA, 19 nt, Artificial Sequence
  Description of Artificial Sequence: Synthetic oligonucleotide
  Antisense strand to SEQ ID NO: 2226432
uuaagugaggaccuacugu

SEQ ID NO: 2226434 - RNA, 19 nt, Artificial Sequence
  Description of Artificial Sequence: Synthetic oligonucleotide
  Sense strand starting at position 3066 of SEQ ID NO: 1883919
acuuaacgauagguucuua

SEQ ID NO: 2226435 - RNA, 19 nt, Artificial Sequence
  Description of Artificial Sequence: Synthetic oligonucleotide
  Antisense strand to SEQ ID NO: 2226434
uaagaaccuaucguuaagu

SEQ ID NO: 2226436 - RNA, 19 nt, Artificial Sequence
  Description of Artificial Sequence: Synthetic oligonucleotide
  Sense strand starting at position 3070 of SEQ ID NO: 1883919
aacgauagguucuuagaaa

SEQ ID NO: 2226437 - RNA, 19 nt, Artificial Sequence
  Description of Artificial Sequence: Synthetic oligonucleotide
  Antisense strand to SEQ ID NO: 2226436
uuucuaagaaccuaucguu

SEQ ID NO: 2226438 - RNA, 19 nt, Artificial Sequence
  Description of Artificial Sequence: Synthetic oligonucleotide
  Sense strand starting at position 3081 of SEQ ID NO: 1883919
cuuagaaaucauggcuuua

SEQ ID NO: 2226439 - RNA, 19 nt, Artificial Sequence
  Description of Artificial Sequence: Synthetic oligonucleotide
  Antisense strand to SEQ ID NO: 2226438
uaaagccaugauuucuaag

SEQ ID NO: 2226440 - RNA, 19 nt, Artificial Sequence
  Description of Artificial Sequence: Synthetic oligonucleotide
  Sense strand starting at position 3228 of SEQ ID NO: 1883919
agcuauugacaauguuaag

SEQ ID NO: 2226441 - RNA, 19 nt, Artificial Sequence
  Description of Artificial Sequence: Synthetic oligonucleotide
  Antisense strand to SEQ ID NO: 2226440
cuuaacauugucaauagcu

SEQ ID NO: 2226442 - RNA, 19 nt, Artificial Sequence
  Description of Artificial Sequence: Synthetic oligonucleotide
  Sense strand starting at position 3384 of SEQ ID NO: 1883919
acaauugucucuguaacag

SEQ ID NO: 2226443 - RNA, 19 nt, Artificial Sequence
  Description of Artificial Sequence: Synthetic oligonucleotide
  Antisense strand to SEQ ID NO: 2226442
cuguuacagagacaauugu

SEQ ID NO: 2226444 - RNA, 19 nt, Artificial Sequence
  Description of Artificial Sequence: Synthetic oligonucleotide
  Sense strand starting at position 3454 of SEQ ID NO: 1883919
aaguauuugcucuacgguu

SEQ ID NO: 2226445 - RNA, 19 nt, Artificial Sequence
  Description of Artificial Sequence: Synthetic oligonucleotide
  Antisense strand to SEQ ID NO: 2226444
aaccguagagcaaauacuu

SEQ ID NO: 2226446 - RNA, 19 nt, Artificial Sequence
  Description of Artificial Sequence: Synthetic oligonucleotide
  Sense strand starting at position 3639 of SEQ ID NO: 1883919
ugcuguaagauguaauaga

SEQ ID NO: 2226447 - RNA, 19 nt, Artificial Sequence
  Description of Artificial Sequence: Synthetic oligonucleotide
  Antisense strand to SEQ ID NO: 2226446
ucuauuacaucuuacagca

SEQ ID NO: 2226448 - RNA, 19 nt, Artificial Sequence
  Description of Artificial Sequence: Synthetic oligonucleotide
  Sense strand starting at position 3675 of SEQ ID NO: 1883919
uggaucuggguuuaaaugu

SEQ ID NO: 2226449 - RNA, 19 nt, Artificial Sequence
  Description of Artificial Sequence: Synthetic oligonucleotide
  Antisense strand to SEQ ID NO: 2226448
acauuuaaacccagaucca

SEQ ID NO: 2226450 - RNA, 19 nt, Artificial Sequence
  Description of Artificial Sequence: Synthetic oligonucleotide
  Sense strand starting at position 3681 of SEQ ID NO: 1883919
uggguuuaaauguaugcuu

SEQ ID NO: 2226451 - RNA, 19 nt, Artificial Sequence
  Description of Artificial Sequence: Synthetic oligonucleotide
  Antisense strand to SEQ ID NO: 2226450
aagcauacauuuaaaccca

SEQ ID NO: 2226452 - RNA, 19 nt, Artificial Sequence
  Description of Artificial Sequence: Synthetic oligonucleotide
  Sense strand starting at position 3683 of SEQ ID NO: 1883919
gguuuaaauguaugcuugu

SEQ ID NO: 2226453 - RNA, 19 nt, Artificial Sequence
  Description of Artificial Sequence: Synthetic oligonucleotide
  Antisense strand to SEQ ID NO: 2226452
acaagcauacauuuaaacc

SEQ ID NO: 2226454 - RNA, 19 nt, Artificial Sequence
  Description of Artificial Sequence: Synthetic oligonucleotide
  Sense strand starting at position 3684 of SEQ ID NO: 1883919
guuuaaauguaugcuuguu

SEQ ID NO: 2226455 - RNA, 19 nt, Artificial Sequence
  Description of Artificial Sequence: Synthetic oligonucleotide
  Antisense strand to SEQ ID NO: 2226454
aacaagcauacauuuaaac

SEQ ID NO: 2226456 - RNA, 19 nt, Artificial Sequence
  Description of Artificial Sequence: Synthetic oligonucleotide
  Sense strand starting at position 3773 of SEQ ID NO: 1883919
accuguuaggauuauugua

SEQ ID NO: 2226457 - RNA, 19 nt, Artificial Sequence
  Description of Artificial Sequence: Synthetic oligonucleotide
  Antisense strand to SEQ ID NO: 2226456
uacaauaauccuaacaggu

SEQ ID NO: 2226458 - RNA, 19 nt, Artificial Sequence
  Description of Artificial Sequence: Synthetic oligonucleotide
  Sense strand starting at position 3775 of SEQ ID NO: 1883919
cuguuaggauuauuguaga

SEQ ID NO: 2226459 - RNA, 19 nt, Artificial Sequence
  Description of Artificial Sequence: Synthetic oligonucleotide
  Antisense strand to SEQ ID NO: 2226458
ucuacaauaauccuaacag

SEQ ID NO: 2226460 - RNA, 19 nt, Artificial Sequence
  Description of Artificial Sequence: Synthetic oligonucleotide
  Sense strand starting at position 3832 of SEQ ID NO: 1883919
ccuacucauguuuacguua

SEQ ID NO: 2226461 - RNA, 19 nt, Artificial Sequence
  Description of Artificial Sequence: Synthetic oligonucleotide
  Antisense strand to SEQ ID NO: 2226460
uaacguaaacaugaguagg

SEQ ID NO: 2226462 - RNA, 19 nt, Artificial Sequence
  Description of Artificial Sequence: Synthetic oligonucleotide
  Sense strand starting at position 3837 of SEQ ID NO: 1883919
ucauguuuacguuagucca

SEQ ID NO: 2226463 - RNA, 19 nt, Artificial Sequence
  Description of Artificial Sequence: Synthetic oligonucleotide
  Antisense strand to SEQ ID NO: 2226462
uggacuaacguaaacauga

SEQ ID NO: 2226464 - RNA, 19 nt, Artificial Sequence
  Description of Artificial Sequence: Synthetic oligonucleotide
  Sense strand starting at position 3872 of SEQ ID NO: 1883919
gcuccucaccuaggugaua

SEQ ID NO: 2226465 - RNA, 19 nt, Artificial Sequence
  Description of Artificial Sequence: Synthetic oligonucleotide
  Antisense strand to SEQ ID NO: 2226464
uaucaccuaggugaggagc

SEQ ID NO: 2226466 - RNA, 19 nt, Artificial Sequence
  Description of Artificial Sequence: Synthetic oligonucleotide
  Sense strand starting at position 3887 of SEQ ID NO: 1883919
gauaguuaauucucuguug

SEQ ID NO: 2226467 - RNA, 19 nt, Artificial Sequence
  Description of Artificial Sequence: Synthetic oligonucleotide
  Antisense strand to SEQ ID NO: 2226466
caacagagaauuaacuauc

SEQ ID NO: 2226468 - RNA, 19 nt, Artificial Sequence
  Description of Artificial Sequence: Synthetic oligonucleotide
  Sense strand starting at position 2560 of SEQ ID NO: 1883921
ccuggauuaucugaauuua

SEQ ID NO: 2226469 - RNA, 19 nt, Artificial Sequence
  Description of Artificial Sequence: Synthetic oligonucleotide
  Antisense strand to SEQ ID NO: 2226468
uaaauucagauaauccagg

SEQ ID NO: 2226470 - RNA, 19 nt, Artificial Sequence
  Description of Artificial Sequence: Synthetic oligonucleotide
  Sense strand starting at position 2637 of SEQ ID NO: 1883921
ggguaauuaacuggccuaa

SEQ ID NO: 2226471 - RNA, 19 nt, Artificial Sequence
  Description of Artificial Sequence: Synthetic oligonucleotide
  Antisense strand to SEQ ID NO: 2226470
uuaggccaguuaauuaccc

SEQ ID NO: 2226472 - RNA, 19 nt, Artificial Sequence
  Description of Artificial Sequence: Synthetic oligonucleotide
  Sense strand starting at position 2673 of SEQ ID NO: 1883921
augguagaacuaggucuua

SEQ ID NO: 2226473 - RNA, 19 nt, Artificial Sequence
  Description of Artificial Sequence: Synthetic oligonucleotide
  Antisense strand to SEQ ID NO: 2226472
uaagaccuaguucuaccau

SEQ ID NO: 2226474 - RNA, 19 nt, Artificial Sequence
  Description of Artificial Sequence: Synthetic oligonucleotide
  Sense strand starting at position 2749 of SEQ ID NO: 1883921
ccauguggcauuuguggaa

SEQ ID NO: 2226475 - RNA, 19 nt, Artificial Sequence
  Description of Artificial Sequence: Synthetic oligonucleotide
  Antisense strand to SEQ ID NO: 2226474
uuccacaaaugccacaugg

SEQ ID NO: 2226476 - RNA, 19 nt, Artificial Sequence
  Description of Artificial Sequence: Synthetic oligonucleotide
  Sense strand starting at position 2752 of SEQ ID NO: 1883921
uguggcauuuguggaacua

SEQ ID NO: 2226477 - RNA, 19 nt, Artificial Sequence
  Description of Artificial Sequence: Synthetic oligonucleotide
  Antisense strand to SEQ ID NO: 2226476
uaguuccacaaaugccaca

SEQ ID NO: 2226478 - RNA, 19 nt, Artificial Sequence
  Description of Artificial Sequence: Synthetic oligonucleotide
  Sense strand starting at position 3111 of SEQ ID NO: 1883921
guccuaaauuggcuaucau

SEQ ID NO: 2226479 - RNA, 19 nt, Artificial Sequence
  Description of Artificial Sequence: Synthetic oligonucleotide
  Antisense strand to SEQ ID NO: 2226478
augauagccaauuuaggac

SEQ ID NO: 2226480 - RNA, 19 nt, Artificial Sequence
  Description of Artificial Sequence: Synthetic oligonucleotide
  Sense strand starting at position 3174 of SEQ ID NO: 1883921
gccagaggucauuauugau

SEQ ID NO: 2226481 - RNA, 19 nt, Artificial Sequence
  Description of Artificial Sequence: Synthetic oligonucleotide
  Antisense strand to SEQ ID NO: 2226480
aucaauaaugaccucuggc

SEQ ID NO: 2226482 - RNA, 19 nt, Artificial Sequence
  Description of Artificial Sequence: Synthetic oligonucleotide
  Sense strand starting at position 3180 of SEQ ID NO: 1883921
ggucauuauugaucagagc

SEQ ID NO: 2226483 - RNA, 19 nt, Artificial Sequence
  Description of Artificial Sequence: Synthetic oligonucleotide
  Antisense strand to SEQ ID NO: 2226482
gcucugaucaauaaugacc

SEQ ID NO: 2226484 - RNA, 19 nt, Artificial Sequence
  Description of Artificial Sequence: Synthetic oligonucleotide
  Sense strand starting at position 3233 of SEQ ID NO: 1883921
gaucuaucagguuggaauu

SEQ ID NO: 2226485 - RNA, 19 nt, Artificial Sequence
  Description of Artificial Sequence: Synthetic oligonucleotide
  Antisense strand to SEQ ID NO: 2226484
aauuccaaccugauagauc

SEQ ID NO: 2226486 - RNA, 19 nt, Artificial Sequence
  Description of Artificial Sequence: Synthetic oligonucleotide
  Sense strand starting at position 3280 of SEQ ID NO: 1883921
gcaauacuucuugacuguu

SEQ ID NO: 2226487 - RNA, 19 nt, Artificial Sequence
  Description of Artificial Sequence: Synthetic oligonucleotide
  Antisense strand to SEQ ID NO: 2226486
aacagucaagaaguauugc

SEQ ID NO: 2226488 - RNA, 19 nt, Artificial Sequence
  Description of Artificial Sequence: Synthetic oligonucleotide
  Sense strand starting at position 3288 of SEQ ID NO: 1883921
ucuugacuguuaccaaaga

SEQ ID NO: 2226489 - RNA, 19 nt, Artificial Sequence
  Description of Artificial Sequence: Synthetic oligonucleotide
  Antisense strand to SEQ ID NO: 2226488
ucuuugguaacagucaaga

SEQ ID NO: 2226490 - RNA, 19 nt, Artificial Sequence
  Description of Artificial Sequence: Synthetic oligonucleotide
  Sense strand starting at position 3289 of SEQ ID NO: 1883921
cuugacuguuaccaaagaa

SEQ ID NO: 2226491 - RNA, 19 nt, Artificial Sequence
  Description of Artificial Sequence: Synthetic oligonucleotide
  Antisense strand to SEQ ID NO: 2226490
uucuuugguaacagucaag

SEQ ID NO: 2226492 - RNA, 19 nt, Artificial Sequence
  Description of Artificial Sequence: Synthetic oligonucleotide
  Sense strand starting at position 3308 of SEQ ID NO: 1883921
uaaugaguuggguaucuua

SEQ ID NO: 2226493 - RNA, 19 nt, Artificial Sequence
  Description of Artificial Sequence: Synthetic oligonucleotide
  Antisense strand to SEQ ID NO: 2226492
uaagauacccaacucauua

SEQ ID NO: 2226494 - RNA, 19 nt, Artificial Sequence
  Description of Artificial Sequence: Synthetic oligonucleotide
  Sense strand starting at position 3315 of SEQ ID NO: 1883921
uuggguaucuuauuggcau

SEQ ID NO: 2226495 - RNA, 19 nt, Artificial Sequence
  Description of Artificial Sequence: Synthetic oligonucleotide
  Antisense strand to SEQ ID NO: 2226494
augccaauaagauacccaa

SEQ ID NO: 2226496 - RNA, 19 nt, Artificial Sequence
  Description of Artificial Sequence: Synthetic oligonucleotide
  Sense strand starting at position 3321 of SEQ ID NO: 1883921
aucuuauuggcauggugua

SEQ ID NO: 2226497 - RNA, 19 nt, Artificial Sequence
  Description of Artificial Sequence: Synthetic oligonucleotide
  Antisense strand to SEQ ID NO: 2226496
uacaccaugccaauaagau

SEQ ID NO: 2226498 - RNA, 19 nt, Artificial Sequence
  Description of Artificial Sequence: Synthetic oligonucleotide
  Sense strand starting at position 3322 of SEQ ID NO: 1883921
ucuuauuggcaugguguau

SEQ ID NO: 2226499 - RNA, 19 nt, Artificial Sequence
  Description of Artificial Sequence: Synthetic oligonucleotide
  Antisense strand to SEQ ID NO: 2226498
auacaccaugccaauaaga

SEQ ID NO: 2226500 - RNA, 19 nt, Artificial Sequence
  Description of Artificial Sequence: Synthetic oligonucleotide
  Sense strand starting at position 3333 of SEQ ID NO: 1883921
ugguguauauugccucuua

SEQ ID NO: 2226501 - RNA, 19 nt, Artificial Sequence
  Description of Artificial Sequence: Synthetic oligonucleotide
  Antisense strand to SEQ ID NO: 2226500
uaagaggcaauauacacca

SEQ ID NO: 2226502 - RNA, 19 nt, Artificial Sequence
  Description of Artificial Sequence: Synthetic oligonucleotide
  Sense strand starting at position 3334 of SEQ ID NO: 1883921
gguguauauugccucuuaa

SEQ ID NO: 2226503 - RNA, 19 nt, Artificial Sequence
  Description of Artificial Sequence: Synthetic oligonucleotide
  Antisense strand to SEQ ID NO: 2226502
uuaagaggcaauauacacc

SEQ ID NO: 2226504 - RNA, 19 nt, Artificial Sequence
  Description of Artificial Sequence: Synthetic oligonucleotide
  Sense strand starting at position 3344 of SEQ ID NO: 1883921
gccucuuaauuugauaaag

SEQ ID NO: 2226505 - RNA, 19 nt, Artificial Sequence
  Description of Artificial Sequence: Synthetic oligonucleotide
  Antisense strand to SEQ ID NO: 2226504
cuuuaucaaauuaagaggc

SEQ ID NO: 2226506 - RNA, 19 nt, Artificial Sequence
  Description of Artificial Sequence: Synthetic oligonucleotide
  Sense strand starting at position 3372 of SEQ ID NO: 1883921
uguuguauuguguccuagu

SEQ ID NO: 2226507 - RNA, 19 nt, Artificial Sequence
  Description of Artificial Sequence: Synthetic oligonucleotide
  Antisense strand to SEQ ID NO: 2226506
acuaggacacaauacaaca

SEQ ID NO: 2226508 - RNA, 19 nt, Artificial Sequence
  Description of Artificial Sequence: Synthetic oligonucleotide
  Sense strand starting at position 3381 of SEQ ID NO: 1883921
guguccuagucuuugauuu

SEQ ID NO: 2226509 - RNA, 19 nt, Artificial Sequence
  Description of Artificial Sequence: Synthetic oligonucleotide
  Antisense strand to SEQ ID NO: 2226508
aaaucaaagacuaggacac

SEQ ID NO: 2226510 - RNA, 19 nt, Artificial Sequence
  Description of Artificial Sequence: Synthetic oligonucleotide
  Sense strand starting at position 3382 of SEQ ID NO: 1883921
uguccuagucuuugauuua

SEQ ID NO: 2226511 - RNA, 19 nt, Artificial Sequence
  Description of Artificial Sequence: Synthetic oligonucleotide
  Antisense strand to SEQ ID NO: 2226510
uaaaucaaagacuaggaca

SEQ ID NO: 2226512 - RNA, 19 nt, Artificial Sequence
  Description of Artificial Sequence: Synthetic oligonucleotide
  Sense strand starting at position 3383 of SEQ ID NO: 1883921
guccuagucuuugauuuaa

SEQ ID NO: 2226513 - RNA, 19 nt, Artificial Sequence
  Description of Artificial Sequence: Synthetic oligonucleotide
  Antisense strand to SEQ ID NO: 2226512
uuaaaucaaagacuaggac

SEQ ID NO: 2226514 - RNA, 19 nt, Artificial Sequence
  Description of Artificial Sequence: Synthetic oligonucleotide
  Sense strand starting at position 3497 of SEQ ID NO: 1883921
gaauuugguuacugaggaa

SEQ ID NO: 2226515 - RNA, 19 nt, Artificial Sequence
  Description of Artificial Sequence: Synthetic oligonucleotide
  Antisense strand to SEQ ID NO: 2226514
uuccucaguaaccaaauuc

SEQ ID NO: 2226516 - RNA, 19 nt, Artificial Sequence
  Description of Artificial Sequence: Synthetic oligonucleotide
  Sense strand starting at position 3514 of SEQ ID NO: 1883921
aacgguaacuaguuucuua

SEQ ID NO: 2226517 - RNA, 19 nt, Artificial Sequence
  Description of Artificial Sequence: Synthetic oligonucleotide
  Antisense strand to SEQ ID NO: 2226516
uaagaaacuaguuaccguu

SEQ ID NO: 2226518 - RNA, 19 nt, Artificial Sequence
  Description of Artificial Sequence: Synthetic oligonucleotide
  Sense strand starting at position 3517 of SEQ ID NO: 1883921
gguaacuaguuucuuacuu

SEQ ID NO: 2226519 - RNA, 19 nt, Artificial Sequence
  Description of Artificial Sequence: Synthetic oligonucleotide
  Antisense strand to SEQ ID NO: 2226518
aaguaagaaacuaguuacc

SEQ ID NO: 2226520 - RNA, 19 nt, Artificial Sequence
  Description of Artificial Sequence: Synthetic oligonucleotide
  Sense strand starting at position 3552 of SEQ ID NO: 1883921
ggcucuguacucugcacau

SEQ ID NO: 2226521 - RNA, 19 nt, Artificial Sequence
  Description of Artificial Sequence: Synthetic oligonucleotide
  Antisense strand to SEQ ID NO: 2226520
augugcagaguacagagcc

SEQ ID NO: 2226522 - RNA, 19 nt, Artificial Sequence
  Description of Artificial Sequence: Synthetic oligonucleotide
  Sense strand starting at position 3606 of SEQ ID NO: 1883921
ggacccaucucuguaguga

SEQ ID NO: 2226523 - RNA, 19 nt, Artificial Sequence
  Description of Artificial Sequence: Synthetic oligonucleotide
  Antisense strand to SEQ ID NO: 2226522
ucacuacagagaugggucc

SEQ ID NO: 2226524 - RNA, 19 nt, Artificial Sequence
  Description of Artificial Sequence: Synthetic oligonucleotide
  Sense strand starting at position 3620 of SEQ ID NO: 1883921
agugacuuugcaggugauu

SEQ ID NO: 2226525 - RNA, 19 nt, Artificial Sequence
  Description of Artificial Sequence: Synthetic oligonucleotide
  Antisense strand to SEQ ID NO: 2226524
aaucaccugcaaagucacu

SEQ ID NO: 2226526 - RNA, 19 nt, Artificial Sequence
  Description of Artificial Sequence: Synthetic oligonucleotide
  Sense strand starting at position 3622 of SEQ ID NO: 1883921
ugacuuugcaggugauucu

SEQ ID NO: 2226527 - RNA, 19 nt, Artificial Sequence
  Description of Artificial Sequence: Synthetic oligonucleotide
  Antisense strand to SEQ ID NO: 2226526
agaaucaccugcaaaguca

SEQ ID NO: 2226528 - RNA, 19 nt, Artificial Sequence
  Description of Artificial Sequence: Synthetic oligonucleotide
  Sense strand starting at position 3669 of SEQ ID NO: 1883921
cugugaugcgagugucuua

SEQ ID NO: 2226529 - RNA, 19 nt, Artificial Sequence
  Description of Artificial Sequence: Synthetic oligonucleotide
  Antisense strand to SEQ ID NO: 2226528
uaagacacucgcaucacag

SEQ ID NO: 2226530 - RNA, 19 nt, Artificial Sequence
  Description of Artificial Sequence: Synthetic oligonucleotide
  Sense strand starting at position 3672 of SEQ ID NO: 1883921
ugaugcgagugucuuauca

SEQ ID NO: 2226531 - RNA, 19 nt, Artificial Sequence
  Description of Artificial Sequence: Synthetic oligonucleotide
  Antisense strand to SEQ ID NO: 2226530
ugauaagacacucgcauca

SEQ ID NO: 2226532 - RNA, 19 nt, Artificial Sequence
  Description of Artificial Sequence: Synthetic oligonucleotide
  Sense strand starting at position 3680 of SEQ ID NO: 1883921
gugucuuaucacugugcau

SEQ ID NO: 2226533 - RNA, 19 nt, Artificial Sequence
  Description of Artificial Sequence: Synthetic oligonucleotide
  Antisense strand to SEQ ID NO: 2226532
augcacagugauaagacac

SEQ ID NO: 2226534 - RNA, 19 nt, Artificial Sequence
  Description of Artificial Sequence: Synthetic oligonucleotide
  Sense strand starting at position 3682 of SEQ ID NO: 1883921
gucuuaucacugugcauuu

SEQ ID NO: 2226535 - RNA, 19 nt, Artificial Sequence
  Description of Artificial Sequence: Synthetic oligonucleotide
  Antisense strand to SEQ ID NO: 2226534
aaaugcacagugauaagac

SEQ ID NO: 2226536 - RNA, 19 nt, Artificial Sequence
  Description of Artificial Sequence: Synthetic oligonucleotide
  Sense strand starting at position 3722 of SEQ ID NO: 1883921
cguggucacaugugucaua

SEQ ID NO: 2226537 - RNA, 19 nt, Artificial Sequence
  Description of Artificial Sequence: Synthetic oligonucleotide
  Antisense strand to SEQ ID NO: 2226536
uaugacacaugugaccacg

SEQ ID NO: 2226538 - RNA, 19 nt, Artificial Sequence
  Description of Artificial Sequence: Synthetic oligonucleotide
  Sense strand starting at position 3741 of SEQ ID NO: 1883921
guucaaugacaguaguguu

SEQ ID NO: 2226539 - RNA, 19 nt, Artificial Sequence
  Description of Artificial Sequence: Synthetic oligonucleotide
  Antisense strand to SEQ ID NO: 2226538
aacacuacugucauugaac

SEQ ID NO: 2226540 - RNA, 19 nt, Artificial Sequence
  Description of Artificial Sequence: Synthetic oligonucleotide
  Sense strand starting at position 3765 of SEQ ID NO: 1883921
guuuccauugggcagacau

SEQ ID NO: 2226541 - RNA, 19 nt, Artificial Sequence
  Description of Artificial Sequence: Synthetic oligonucleotide
  Antisense strand to SEQ ID NO: 2226540
augucugcccaauggaaac

SEQ ID NO: 2226542 - RNA, 19 nt, Artificial Sequence
  Description of Artificial Sequence: Synthetic oligonucleotide
  Sense strand starting at position 3865 of SEQ ID NO: 1883921
acguuuauccugcaacuca

SEQ ID NO: 2226543 - RNA, 19 nt, Artificial Sequence
  Description of Artificial Sequence: Synthetic oligonucleotide
  Antisense strand to SEQ ID NO: 2226542
ugaguugcaggauaaacgu

SEQ ID NO: 2226544 - RNA, 19 nt, Artificial Sequence
  Description of Artificial Sequence: Synthetic oligonucleotide
  Sense strand starting at position 3887 of SEQ ID NO: 1883921
ugaggcuuacucugcaacu

SEQ ID NO: 2226545 - RNA, 19 nt, Artificial Sequence
  Description of Artificial Sequence: Synthetic oligonucleotide
  Antisense strand to SEQ ID NO: 2226544
aguugcagaguaagccuca

SEQ ID NO: 2226546 - RNA, 19 nt, Artificial Sequence
  Description of Artificial Sequence: Synthetic oligonucleotide
  Sense strand starting at position 3975 of SEQ ID NO: 1883921
auugaaaguugccugccua

SEQ ID NO: 2226547 - RNA, 19 nt, Artificial Sequence
  Description of Artificial Sequence: Synthetic oligonucleotide
  Antisense strand to SEQ ID NO: 2226546
uaggcaggcaacuuucaau

SEQ ID NO: 2226548 - RNA, 19 nt, Artificial Sequence
  Description of Artificial Sequence: Synthetic oligonucleotide
  Sense strand starting at position 1852 of SEQ ID NO: 1883922
gcuacugccucauagaucu

SEQ ID NO: 2226549 - RNA, 19 nt, Artificial Sequence
  Description of Artificial Sequence: Synthetic oligonucleotide
  Antisense strand to SEQ ID NO: 2226548
agaucuaugaggcaguagc

SEQ ID NO: 2226550 - RNA, 19 nt, Artificial Sequence
  Description of Artificial Sequence: Synthetic oligonucleotide
  Sense strand starting at position 2600 of SEQ ID NO: 1883922
gccagcuuccucuaugagu

SEQ ID NO: 2226551 - RNA, 19 nt, Artificial Sequence
  Description of Artificial Sequence: Synthetic oligonucleotide
  Antisense strand to SEQ ID NO: 2226550
acucauagaggaagcuggc

SEQ ID NO: 2226552 - RNA, 19 nt, Artificial Sequence
  Description of Artificial Sequence: Synthetic oligonucleotide
  Sense strand starting at position 2623 of SEQ ID NO: 1883922
cauaaagccucaguagagu

SEQ ID NO: 2226553 - RNA, 19 nt, Artificial Sequence
  Description of Artificial Sequence: Synthetic oligonucleotide
  Antisense strand to SEQ ID NO: 2226552
acucuacugaggcuuuaug

SEQ ID NO: 2226554 - RNA, 19 nt, Artificial Sequence
  Description of Artificial Sequence: Synthetic oligonucleotide
  Sense strand starting at position 3801 of SEQ ID NO: 1883922
ggcacucuugccuggacaa

SEQ ID NO: 2226555 - RNA, 19 nt, Artificial Sequence
  Description of Artificial Sequence: Synthetic oligonucleotide
  Antisense strand to SEQ ID NO: 2226554
uuguccaggcaagagugcc

SEQ ID NO: 2226556 - RNA, 19 nt, Artificial Sequence
  Description of Artificial Sequence: Synthetic oligonucleotide
  Sense strand starting at position 3828 of SEQ ID NO: 1883922
gccucuaucccaggaaaca

SEQ ID NO: 2226557 - RNA, 19 nt, Artificial Sequence
  Description of Artificial Sequence: Synthetic oligonucleotide
  Antisense strand to SEQ ID NO: 2226556
uguuuccugggauagaggc

SEQ ID NO: 2226558 - RNA, 19 nt, Artificial Sequence
  Description of Artificial Sequence: Synthetic oligonucleotide
  Sense strand starting at position 36 of SEQ ID NO: 1883923
uuaccaugucuccaaaggu

SEQ ID NO: 2226559 - RNA, 19 nt, Artificial Sequence
  Description of Artificial Sequence: Synthetic oligonucleotide
  Antisense strand to SEQ ID NO: 2226558
accuuuggagacaugguaa

SEQ ID NO: 2226560 - RNA, 19 nt, Artificial Sequence
  Description of Artificial Sequence: Synthetic oligonucleotide
  Sense strand starting at position 99 of SEQ ID NO: 1883923
gauugugcugcucagucau

SEQ ID NO: 2226561 - RNA, 19 nt, Artificial Sequence
  Description of Artificial Sequence: Synthetic oligonucleotide
  Antisense strand to SEQ ID NO: 2226560
augacugagcagcacaauc

SEQ ID NO: 2226562 - RNA, 19 nt, Artificial Sequence
  Description of Artificial Sequence: Synthetic oligonucleotide
  Sense strand starting at position 102 of SEQ ID NO: 1883923
ugugcugcucagucaucuu

SEQ ID NO: 2226563 - RNA, 19 nt, Artificial Sequence
  Description of Artificial Sequence: Synthetic oligonucleotide
  Antisense strand to SEQ ID NO: 2226562
aagaugacugagcagcaca

SEQ ID NO: 2226564 - RNA, 19 nt, Artificial Sequence
  Description of Artificial Sequence: Synthetic oligonucleotide
  Sense strand starting at position 170 of SEQ ID NO: 1883923
acauguaacugauguucuu

SEQ ID NO: 2226565 - RNA, 19 nt, Artificial Sequence
  Description of Artificial Sequence: Synthetic oligonucleotide
  Antisense strand to SEQ ID NO: 2226564
aagaacaucaguuacaugu

SEQ ID NO: 2226566 - RNA, 19 nt, Artificial Sequence
  Description of Artificial Sequence: Synthetic oligonucleotide
  Sense strand starting at position 648 of SEQ ID NO: 1883923
gugcuauuaaguuauugug

SEQ ID NO: 2226567 - RNA, 19 nt, Artificial Sequence
  Description of Artificial Sequence: Synthetic oligonucleotide
  Antisense strand to SEQ ID NO: 2226566
cacaauaacuuaauagcac

SEQ ID NO: 2226568 - RNA, 19 nt, Artificial Sequence
  Description of Artificial Sequence: Synthetic oligonucleotide
  Sense strand starting at position 650 of SEQ ID NO: 1883923
gcuauuaaguuauuguguu

SEQ ID NO: 2226569 - RNA, 19 nt, Artificial Sequence
  Description of Artificial Sequence: Synthetic oligonucleotide
  Antisense strand to SEQ ID NO: 2226568
aacacaauaacuuaauagc

SEQ ID NO: 2226570 - RNA, 19 nt, Artificial Sequence
  Description of Artificial Sequence: Synthetic oligonucleotide
  Sense strand starting at position 654 of SEQ ID NO: 1883923
uuaaguuauuguguuagcu

SEQ ID NO: 2226571 - RNA, 19 nt, Artificial Sequence
  Description of Artificial Sequence: Synthetic oligonucleotide
  Antisense strand to SEQ ID NO: 2226570
agcuaacacaauaacuuaa

SEQ ID NO: 2226572 - RNA, 19 nt, Artificial Sequence
  Description of Artificial Sequence: Synthetic oligonucleotide
  Sense strand starting at position 656 of SEQ ID NO: 1883923
aaguuauuguguuagcuua

SEQ ID NO: 2226573 - RNA, 19 nt, Artificial Sequence
  Description of Artificial Sequence: Synthetic oligonucleotide
  Antisense strand to SEQ ID NO: 2226572
uaagcuaacacaauaacuu

SEQ ID NO: 2226574 - RNA, 19 nt, Artificial Sequence
  Description of Artificial Sequence: Synthetic oligonucleotide
  Sense strand starting at position 658 of SEQ ID NO: 1883923
guuauuguguuagcuuauu

SEQ ID NO: 2226575 - RNA, 19 nt, Artificial Sequence
  Description of Artificial Sequence: Synthetic oligonucleotide
  Antisense strand to SEQ ID NO: 2226574
aauaagcuaacacaauaac

SEQ ID NO: 2226576 - RNA, 19 nt, Artificial Sequence
  Description of Artificial Sequence: Synthetic oligonucleotide
  Sense strand starting at position 813 of SEQ ID NO: 1883923
gguccauugugcgucuaga

SEQ ID NO: 2226577 - RNA, 19 nt, Artificial Sequence
  Description of Artificial Sequence: Synthetic oligonucleotide
  Antisense strand to SEQ ID NO: 2226576
ucuagacgcacaauggacc

SEQ ID NO: 2226578 - RNA, 19 nt, Artificial Sequence
  Description of Artificial Sequence: Synthetic oligonucleotide
  Sense strand starting at position 814 of SEQ ID NO: 1883923
guccauugugcgucuagac

SEQ ID NO: 2226579 - RNA, 19 nt, Artificial Sequence
  Description of Artificial Sequence: Synthetic oligonucleotide
  Antisense strand to SEQ ID NO: 2226578
gucuagacgcacaauggac

SEQ ID NO: 2226580 - RNA, 19 nt, Artificial Sequence
  Description of Artificial Sequence: Synthetic oligonucleotide
  Sense strand starting at position 2356 of SEQ ID NO: 1883923
gagccagaggacuguaauc

SEQ ID NO: 2226581 - RNA, 19 nt, Artificial Sequence
  Description of Artificial Sequence: Synthetic oligonucleotide
  Antisense strand to SEQ ID NO: 2226580
gauuacaguccucuggcuc

SEQ ID NO: 2226582 - RNA, 19 nt, Artificial Sequence
  Description of Artificial Sequence: Synthetic oligonucleotide
  Sense strand starting at position 2358 of SEQ ID NO: 1883923
gccagaggacuguaaucca

SEQ ID NO: 2226583 - RNA, 19 nt, Artificial Sequence
  Description of Artificial Sequence: Synthetic oligonucleotide
  Antisense strand to SEQ ID NO: 2226582
uggauuacaguccucuggc

SEQ ID NO: 2226584 - RNA, 19 nt, Artificial Sequence
  Description of Artificial Sequence: Synthetic oligonucleotide
  Sense strand starting at position 2367 of SEQ ID NO: 1883923
cuguaauccagugguuccu

SEQ ID NO: 2226585 - RNA, 19 nt, Artificial Sequence
  Description of Artificial Sequence: Synthetic oligonucleotide
  Antisense strand to SEQ ID NO: 2226584
aggaaccacuggauuacag

SEQ ID NO: 2226586 - RNA, 19 nt, Artificial Sequence
  Description of Artificial Sequence: Synthetic oligonucleotide
  Sense strand starting at position 3959 of SEQ ID NO: 1883923
uguuauuucuucugguauc

SEQ ID NO: 2226587 - RNA, 19 nt, Artificial Sequence
  Description of Artificial Sequence: Synthetic oligonucleotide
  Antisense strand to SEQ ID NO: 2226586
gauaccagaagaaauaaca

SEQ ID NO: 2226588 - RNA, 19 nt, Artificial Sequence
  Description of Artificial Sequence: Synthetic oligonucleotide
  Sense strand starting at position 3960 of SEQ ID NO: 1883923
guuauuucuucugguaucu

SEQ ID NO: 2226589 - RNA, 19 nt, Artificial Sequence
  Description of Artificial Sequence: Synthetic oligonucleotide
  Antisense strand to SEQ ID NO: 2226588
agauaccagaagaaauaac

SEQ ID NO: 2226590 - RNA, 19 nt, Artificial Sequence
  Description of Artificial Sequence: Synthetic oligonucleotide
  Sense strand starting at position 3969 of SEQ ID NO: 1883923
ucugguaucuuagcaauga

SEQ ID NO: 2226591 - RNA, 19 nt, Artificial Sequence
  Description of Artificial Sequence: Synthetic oligonucleotide
  Antisense strand to SEQ ID NO: 2226590
ucauugcuaagauaccaga

SEQ ID NO: 2226592 - RNA, 19 nt, Artificial Sequence
  Description of Artificial Sequence: Synthetic oligonucleotide
  Sense strand starting at position 3970 of SEQ ID NO: 1883923
cugguaucuuagcaaugau

SEQ ID NO: 2226593 - RNA, 19 nt, Artificial Sequence
  Description of Artificial Sequence: Synthetic oligonucleotide
  Antisense strand to SEQ ID NO: 2226592
aucauugcuaagauaccag

SEQ ID NO: 2226594 - RNA, 19 nt, Artificial Sequence
  Description of Artificial Sequence: Synthetic oligonucleotide
  Sense strand starting at position 3973 of SEQ ID NO: 1883923
guaucuuagcaaugauucu

SEQ ID NO: 2226595 - RNA, 19 nt, Artificial Sequence
  Description of Artificial Sequence: Synthetic oligonucleotide
  Antisense strand to SEQ ID NO: 2226594
agaaucauugcuaagauac

SEQ ID NO: 2226596 - RNA, 19 nt, Artificial Sequence
  Description of Artificial Sequence: Synthetic oligonucleotide
  Sense strand starting at position 149 of SEQ ID NO: 1883924
ucaugcugagccugagaca

SEQ ID NO: 2226597 - RNA, 19 nt, Artificial Sequence
  Description of Artificial Sequence: Synthetic oligonucleotide
  Antisense strand to SEQ ID NO: 2226596
ugucucaggcucagcauga

SEQ ID NO: 2226598 - RNA, 19 nt, Artificial Sequence
  Description of Artificial Sequence: Synthetic oligonucleotide
  Sense strand starting at position 280 of SEQ ID NO: 1883924
augguauguuaaucauauc

SEQ ID NO: 2226599 - RNA, 19 nt, Artificial Sequence
  Description of Artificial Sequence: Synthetic oligonucleotide
  Antisense strand to SEQ ID NO: 2226598
gauaugauuaacauaccau

SEQ ID NO: 2226600 - RNA, 19 nt, Artificial Sequence
  Description of Artificial Sequence: Synthetic oligonucleotide
  Sense strand starting at position 382 of SEQ ID NO: 1883924
gcuguuagcagugaaauua

SEQ ID NO: 2226601 - RNA, 19 nt, Artificial Sequence
  Description of Artificial Sequence: Synthetic oligonucleotide
  Antisense strand to SEQ ID NO: 2226600
uaauuucacugcuaacagc

SEQ ID NO: 2226602 - RNA, 19 nt, Artificial Sequence
  Description of Artificial Sequence: Synthetic oligonucleotide
  Sense strand starting at position 390 of SEQ ID NO: 1883924
cagugaaauuacccgguaa

SEQ ID NO: 2226603 - RNA, 19 nt, Artificial Sequence
  Description of Artificial Sequence: Synthetic oligonucleotide
  Antisense strand to SEQ ID NO: 2226602
uuaccggguaauuucacug

SEQ ID NO: 2226604 - RNA, 19 nt, Artificial Sequence
  Description of Artificial Sequence: Synthetic oligonucleotide
  Sense strand starting at position 391 of SEQ ID NO: 1883924
agugaaauuacccgguaag

SEQ ID NO: 2226605 - RNA, 19 nt, Artificial Sequence
  Description of Artificial Sequence: Synthetic oligonucleotide
  Antisense strand to SEQ ID NO: 2226604
cuuaccggguaauuucacu

SEQ ID NO: 2226606 - RNA, 19 nt, Artificial Sequence
  Description of Artificial Sequence: Synthetic oligonucleotide
  Sense strand starting at position 392 of SEQ ID NO: 1883924
gugaaauuacccgguaagg

SEQ ID NO: 2226607 - RNA, 19 nt, Artificial Sequence
  Description of Artificial Sequence: Synthetic oligonucleotide
  Antisense strand to SEQ ID NO: 2226606
ccuuaccggguaauuucac

SEQ ID NO: 2226608 - RNA, 19 nt, Artificial Sequence
  Description of Artificial Sequence: Synthetic oligonucleotide
  Sense strand starting at position 740 of SEQ ID NO: 1883924
ugguguaaauucuuccacu

SEQ ID NO: 2226609 - RNA, 19 nt, Artificial Sequence
  Description of Artificial Sequence: Synthetic oligonucleotide
  Antisense strand to SEQ ID NO: 2226608
aguggaagaauuuacacca

SEQ ID NO: 2226610 - RNA, 19 nt, Artificial Sequence
  Description of Artificial Sequence: Synthetic oligonucleotide
  Sense strand starting at position 741 of SEQ ID NO: 1883924
gguguaaauucuuccacuc

SEQ ID NO: 2226611 - RNA, 19 nt, Artificial Sequence
  Description of Artificial Sequence: Synthetic oligonucleotide
  Antisense strand to SEQ ID NO: 2226610
gaguggaagaauuuacacc

SEQ ID NO: 2226612 - RNA, 19 nt, Artificial Sequence
  Description of Artificial Sequence: Synthetic oligonucleotide
  Sense strand starting at position 871 of SEQ ID NO: 1883924
guggucuauggacacauua

SEQ ID NO: 2226613 - RNA, 19 nt, Artificial Sequence
  Description of Artificial Sequence: Synthetic oligonucleotide
  Antisense strand to SEQ ID NO: 2226612
uaauguguccauagaccac

SEQ ID NO: 2226614 - RNA, 19 nt, Artificial Sequence
  Description of Artificial Sequence: Synthetic oligonucleotide
  Sense strand starting at position 1283 of SEQ ID NO: 1883924
acaauuauguaagugcaca

SEQ ID NO: 2226615 - RNA, 19 nt, Artificial Sequence
  Description of Artificial Sequence: Synthetic oligonucleotide
  Antisense strand to SEQ ID NO: 2226614
ugugcacuuacauaauugu

SEQ ID NO: 2226616 - RNA, 19 nt, Artificial Sequence
  Description of Artificial Sequence: Synthetic oligonucleotide
  Sense strand starting at position 1358 of SEQ ID NO: 1883924
agcaguaaauuacucagua

SEQ ID NO: 2226617 - RNA, 19 nt, Artificial Sequence
  Description of Artificial Sequence: Synthetic oligonucleotide
  Antisense strand to SEQ ID NO: 2226616
uacugaguaauuuacugcu

SEQ ID NO: 2226618 - RNA, 19 nt, Artificial Sequence
  Description of Artificial Sequence: Synthetic oligonucleotide
  Sense strand starting at position 1359 of SEQ ID NO: 1883924
gcaguaaauuacucaguaa

SEQ ID NO: 2226619 - RNA, 19 nt, Artificial Sequence
  Description of Artificial Sequence: Synthetic oligonucleotide
  Antisense strand to SEQ ID NO: 2226618
uuacugaguaauuuacugc

SEQ ID NO: 2226620 - RNA, 19 nt, Artificial Sequence
  Description of Artificial Sequence: Synthetic oligonucleotide
  Sense strand starting at position 1453 of SEQ ID NO: 1883924
cuccaagagcauuagagua

SEQ ID NO: 2226621 - RNA, 19 nt, Artificial Sequence
  Description of Artificial Sequence: Synthetic oligonucleotide
  Antisense strand to SEQ ID NO: 2226620
uacucuaaugcucuuggag

SEQ ID NO: 2226622 - RNA, 19 nt, Artificial Sequence
  Description of Artificial Sequence: Synthetic oligonucleotide
  Sense strand starting at position 1644 of SEQ ID NO: 1883924
gcaugagccuucuuacaag

SEQ ID NO: 2226623 - RNA, 19 nt, Artificial Sequence
  Description of Artificial Sequence: Synthetic oligonucleotide
  Antisense strand to SEQ ID NO: 2226622
cuuguaagaaggcucaugc

SEQ ID NO: 2226624 - RNA, 19 nt, Artificial Sequence
  Description of Artificial Sequence: Synthetic oligonucleotide
  Sense strand starting at position 1881 of SEQ ID NO: 1883924
ggaagcucucuguagggau

SEQ ID NO: 2226625 - RNA, 19 nt, Artificial Sequence
  Description of Artificial Sequence: Synthetic oligonucleotide
  Antisense strand to SEQ ID NO: 2226624
aucccuacagagagcuucc

SEQ ID NO: 2226626 - RNA, 19 nt, Artificial Sequence
  Description of Artificial Sequence: Synthetic oligonucleotide
  Sense strand starting at position 1916 of SEQ ID NO: 1883924
ccagcaggcacugaguuau

SEQ ID NO: 2226627 - RNA, 19 nt, Artificial Sequence
  Description of Artificial Sequence: Synthetic oligonucleotide
  Antisense strand to SEQ ID NO: 2226626
auaacucagugccugcugg

SEQ ID NO: 2226628 - RNA, 19 nt, Artificial Sequence
  Description of Artificial Sequence: Synthetic oligonucleotide
  Sense strand starting at position 2022 of SEQ ID NO: 1883924
agggcucugcuuugagaag

SEQ ID NO: 2226629 - RNA, 19 nt, Artificial Sequence
  Description of Artificial Sequence: Synthetic oligonucleotide
  Antisense strand to SEQ ID NO: 2226628
cuucucaaagcagagcccu

SEQ ID NO: 2226630 - RNA, 19 nt, Artificial Sequence
  Description of Artificial Sequence: Synthetic oligonucleotide
  Sense strand starting at position 2223 of SEQ ID NO: 1883924
accaguuaugucuggagag

SEQ ID NO: 2226631 - RNA, 19 nt, Artificial Sequence
  Description of Artificial Sequence: Synthetic oligonucleotide
  Antisense strand to SEQ ID NO: 2226630
cucuccagacauaacuggu

SEQ ID NO: 2226632 - RNA, 19 nt, Artificial Sequence
  Description of Artificial Sequence: Synthetic oligonucleotide
  Sense strand starting at position 2225 of SEQ ID NO: 1883924
caguuaugucuggagagac

SEQ ID NO: 2226633 - RNA, 19 nt, Artificial Sequence
  Description of Artificial Sequence: Synthetic oligonucleotide
  Antisense strand to SEQ ID NO: 2226632
gucucuccagacauaacug

SEQ ID NO: 2226634 - RNA, 19 nt, Artificial Sequence
  Description of Artificial Sequence: Synthetic oligonucleotide
  Sense strand starting at position 2302 of SEQ ID NO: 1883924
uaguguccacauugagauu

SEQ ID NO: 2226635 - RNA, 19 nt, Artificial Sequence
  Description of Artificial Sequence: Synthetic oligonucleotide
  Antisense strand to SEQ ID NO: 2226634
aaucucaauguggacacua

SEQ ID NO: 2226636 - RNA, 19 nt, Artificial Sequence
  Description of Artificial Sequence: Synthetic oligonucleotide
  Sense strand starting at position 2371 of SEQ ID NO: 1883924
gucaguaaacauuacuuau

SEQ ID NO: 2226637 - RNA, 19 nt, Artificial Sequence
  Description of Artificial Sequence: Synthetic oligonucleotide
  Antisense strand to SEQ ID NO: 2226636
auaaguaauguuuacugac

SEQ ID NO: 2226638 - RNA, 19 nt, Artificial Sequence
  Description of Artificial Sequence: Synthetic oligonucleotide
  Sense strand starting at position 2385 of SEQ ID NO: 1883924
cuuauugaucuagggccua

SEQ ID NO: 2226639 - RNA, 19 nt, Artificial Sequence
  Description of Artificial Sequence: Synthetic oligonucleotide
  Antisense strand to SEQ ID NO: 2226638
uaggcccuagaucaauaag

SEQ ID NO: 2226640 - RNA, 19 nt, Artificial Sequence
  Description of Artificial Sequence: Synthetic oligonucleotide
  Sense strand starting at position 2446 of SEQ ID NO: 1883924
ugaaacuuguauucuaagu

SEQ ID NO: 2226641 - RNA, 19 nt, Artificial Sequence
  Description of Artificial Sequence: Synthetic oligonucleotide
  Antisense strand to SEQ ID NO: 2226640
acuuagaauacaaguuuca

SEQ ID NO: 2226642 - RNA, 19 nt, Artificial Sequence
  Description of Artificial Sequence: Synthetic oligonucleotide
  Sense strand starting at position 2451 of SEQ ID NO: 1883924
cuuguauucuaaguggaga

SEQ ID NO: 2226643 - RNA, 19 nt, Artificial Sequence
  Description of Artificial Sequence: Synthetic oligonucleotide
  Antisense strand to SEQ ID NO: 2226642
ucuccacuuagaauacaag

SEQ ID NO: 2226644 - RNA, 19 nt, Artificial Sequence
  Description of Artificial Sequence: Synthetic oligonucleotide
  Sense strand starting at position 2452 of SEQ ID NO: 1883924
uuguauucuaaguggagag

SEQ ID NO: 2226645 - RNA, 19 nt, Artificial Sequence
  Description of Artificial Sequence: Synthetic oligonucleotide
  Antisense strand to SEQ ID NO: 2226644
cucuccacuuagaauacaa

SEQ ID NO: 2226646 - RNA, 19 nt, Artificial Sequence
  Description of Artificial Sequence: Synthetic oligonucleotide
  Sense strand starting at position 2453 of SEQ ID NO: 1883924
uguauucuaaguggagagu

SEQ ID NO: 2226647 - RNA, 19 nt, Artificial Sequence
  Description of Artificial Sequence: Synthetic oligonucleotide
  Antisense strand to SEQ ID NO: 2226646
acucuccacuuagaauaca

SEQ ID NO: 2226648 - RNA, 19 nt, Artificial Sequence
  Description of Artificial Sequence: Synthetic oligonucleotide
  Sense strand starting at position 2454 of SEQ ID NO: 1883924
guauucuaaguggagaguu

SEQ ID NO: 2226649 - RNA, 19 nt, Artificial Sequence
  Description of Artificial Sequence: Synthetic oligonucleotide
  Antisense strand to SEQ ID NO: 2226648
aacucuccacuuagaauac

SEQ ID NO: 2226650 - RNA, 19 nt, Artificial Sequence
  Description of Artificial Sequence: Synthetic oligonucleotide
  Sense strand starting at position 2638 of SEQ ID NO: 1883924
ggaggcauucaugggugau

SEQ ID NO: 2226651 - RNA, 19 nt, Artificial Sequence
  Description of Artificial Sequence: Synthetic oligonucleotide
  Antisense strand to SEQ ID NO: 2226650
aucacccaugaaugccucc

SEQ ID NO: 2226652 - RNA, 19 nt, Artificial Sequence
  Description of Artificial Sequence: Synthetic oligonucleotide
  Sense strand starting at position 2641 of SEQ ID NO: 1883924
ggcauucaugggugaucug

SEQ ID NO: 2226653 - RNA, 19 nt, Artificial Sequence
  Description of Artificial Sequence: Synthetic oligonucleotide
  Antisense strand to SEQ ID NO: 2226652
cagaucacccaugaaugcc

SEQ ID NO: 2226654 - RNA, 19 nt, Artificial Sequence
  Description of Artificial Sequence: Synthetic oligonucleotide
  Sense strand starting at position 2642 of SEQ ID NO: 1883924
gcauucaugggugaucuga

SEQ ID NO: 2226655 - RNA, 19 nt, Artificial Sequence
  Description of Artificial Sequence: Synthetic oligonucleotide
  Antisense strand to SEQ ID NO: 2226654
ucagaucacccaugaaugc

SEQ ID NO: 2226656 - RNA, 19 nt, Artificial Sequence
  Description of Artificial Sequence: Synthetic oligonucleotide
  Sense strand starting at position 2907 of SEQ ID NO: 1883924
acuggcuacuuucugaaga

SEQ ID NO: 2226657 - RNA, 19 nt, Artificial Sequence
  Description of Artificial Sequence: Synthetic oligonucleotide
  Antisense strand to SEQ ID NO: 2226656
ucuucagaaaguagccagu

SEQ ID NO: 2226658 - RNA, 19 nt, Artificial Sequence
  Description of Artificial Sequence: Synthetic oligonucleotide
  Sense strand starting at position 2945 of SEQ ID NO: 1883924
gaggucugacgcucgugua

SEQ ID NO: 2226659 - RNA, 19 nt, Artificial Sequence
  Description of Artificial Sequence: Synthetic oligonucleotide
  Antisense strand to SEQ ID NO: 2226658
uacacgagcgucagaccuc

SEQ ID NO: 2226660 - RNA, 19 nt, Artificial Sequence
  Description of Artificial Sequence: Synthetic oligonucleotide
  Sense strand starting at position 2966 of SEQ ID NO: 1883924
cuaagucuccuagggugaa

SEQ ID NO: 2226661 - RNA, 19 nt, Artificial Sequence
  Description of Artificial Sequence: Synthetic oligonucleotide
  Antisense strand to SEQ ID NO: 2226660
uucacccuaggagacuuag

SEQ ID NO: 2226662 - RNA, 19 nt, Artificial Sequence
  Description of Artificial Sequence: Synthetic oligonucleotide
  Sense strand starting at position 3082 of SEQ ID NO: 1883924
ggauccauuccucguugga

SEQ ID NO: 2226663 - RNA, 19 nt, Artificial Sequence
  Description of Artificial Sequence: Synthetic oligonucleotide
  Antisense strand to SEQ ID NO: 2226662
uccaacgaggaauggaucc

SEQ ID NO: 2226664 - RNA, 19 nt, Artificial Sequence
  Description of Artificial Sequence: Synthetic oligonucleotide
  Sense strand starting at position 3244 of SEQ ID NO: 1883924
ggccacagguguuugagau

SEQ ID NO: 2226665 - RNA, 19 nt, Artificial Sequence
  Description of Artificial Sequence: Synthetic oligonucleotide
  Antisense strand to SEQ ID NO: 2226664
aucucaaacaccuguggcc

SEQ ID NO: 2226666 - RNA, 19 nt, Artificial Sequence
  Description of Artificial Sequence: Synthetic oligonucleotide
  Sense strand starting at position 3266 of SEQ ID NO: 1883924
ggacccuucugguuacuaa

SEQ ID NO: 2226667 - RNA, 19 nt, Artificial Sequence
  Description of Artificial Sequence: Synthetic oligonucleotide
  Antisense strand to SEQ ID NO: 2226666
uuaguaaccagaagggucc

SEQ ID NO: 2226668 - RNA, 19 nt, Artificial Sequence
  Description of Artificial Sequence: Synthetic oligonucleotide
  Sense strand starting at position 3704 of SEQ ID NO: 1883924
ggguguccugaagaccuuu

SEQ ID NO: 2226669 - RNA, 19 nt, Artificial Sequence
  Description of Artificial Sequence: Synthetic oligonucleotide
  Antisense strand to SEQ ID NO: 2226668
aaaggucuucaggacaccc

SEQ ID NO: 2226670 - RNA, 19 nt, Artificial Sequence
  Description of Artificial Sequence: Synthetic oligonucleotide
  Sense strand starting at position 3842 of SEQ ID NO: 1883924
gggauuuguaugugcucca

SEQ ID NO: 2226671 - RNA, 19 nt, Artificial Sequence
  Description of Artificial Sequence: Synthetic oligonucleotide
  Antisense strand to SEQ ID NO: 2226670
uggagcacauacaaauccc

SEQ ID NO: 2226672 - RNA, 19 nt, Artificial Sequence
  Description of Artificial Sequence: Synthetic oligonucleotide
  Sense strand starting at position 3843 of SEQ ID NO: 1883924
ggauuuguaugugcuccau

SEQ ID NO: 2226673 - RNA, 19 nt, Artificial Sequence
  Description of Artificial Sequence: Synthetic oligonucleotide
  Antisense strand to SEQ ID NO: 2226672
auggagcacauacaaaucc

SEQ ID NO: 2226674 - RNA, 19 nt, Artificial Sequence
  Description of Artificial Sequence: Synthetic oligonucleotide
  Sense strand starting at position 3845 of SEQ ID NO: 1883924
auuuguaugugcuccaucu

SEQ ID NO: 2226675 - RNA, 19 nt, Artificial Sequence
  Description of Artificial Sequence: Synthetic oligonucleotide
  Antisense strand to SEQ ID NO: 2226674
agauggagcacauacaaau

SEQ ID NO: 2226676 - RNA, 19 nt, Artificial Sequence
  Description of Artificial Sequence: Synthetic oligonucleotide
  Sense strand starting at position 207 of SEQ ID NO: 1883925
ccaacuacuugagcagaga

SEQ ID NO: 2226677 - RNA, 19 nt, Artificial Sequence
  Description of Artificial Sequence: Synthetic oligonucleotide
  Antisense strand to SEQ ID NO: 2226676
ucucugcucaaguaguugg

SEQ ID NO: 2226678 - RNA, 19 nt, Artificial Sequence
  Description of Artificial Sequence: Synthetic oligonucleotide
  Sense strand starting at position 368 of SEQ ID NO: 1883925
agagaaaucacugguggcu

SEQ ID NO: 2226679 - RNA, 19 nt, Artificial Sequence
  Description of Artificial Sequence: Synthetic oligonucleotide
  Antisense strand to SEQ ID NO: 2226678
agccaccagugauuucucu

SEQ ID NO: 2226680 - RNA, 19 nt, Artificial Sequence
  Description of Artificial Sequence: Synthetic oligonucleotide
  Sense strand starting at position 377 of SEQ ID NO: 1883925
acugguggcuuuguggaaa

SEQ ID NO: 2226681 - RNA, 19 nt, Artificial Sequence
  Description of Artificial Sequence: Synthetic oligonucleotide
  Antisense strand to SEQ ID NO: 2226680
uuuccacaaagccaccagu

SEQ ID NO: 2226682 - RNA, 19 nt, Artificial Sequence
  Description of Artificial Sequence: Synthetic oligonucleotide
  Sense strand starting at position 445 of SEQ ID NO: 1883925
ccaagugauugauuccaca

SEQ ID NO: 2226683 - RNA, 19 nt, Artificial Sequence
  Description of Artificial Sequence: Synthetic oligonucleotide
  Antisense strand to SEQ ID NO: 2226682
uguggaaucaaucacuugg

SEQ ID NO: 2226684 - RNA, 19 nt, Artificial Sequence
  Description of Artificial Sequence: Synthetic oligonucleotide
  Sense strand starting at position 488 of SEQ ID NO: 1883925
acaccaacccugugaggaa

SEQ ID NO: 2226685 - RNA, 19 nt, Artificial Sequence
  Description of Artificial Sequence: Synthetic oligonucleotide
  Antisense strand to SEQ ID NO: 2226684
uuccucacaggguuggugu

SEQ ID NO: 2226686 - RNA, 19 nt, Artificial Sequence
  Description of Artificial Sequence: Synthetic oligonucleotide
  Sense strand starting at position 657 of SEQ ID NO: 1883925
agugauuccguuuaucauu

SEQ ID NO: 2226687 - RNA, 19 nt, Artificial Sequence
  Description of Artificial Sequence: Synthetic oligonucleotide
  Antisense strand to SEQ ID NO: 2226686
aaugauaaacggaaucacu

SEQ ID NO: 2226688 - RNA, 19 nt, Artificial Sequence
  Description of Artificial Sequence: Synthetic oligonucleotide
  Sense strand starting at position 689 of SEQ ID NO: 1883925
acuaauggcugggcgaauu

SEQ ID NO: 2226689 - RNA, 19 nt, Artificial Sequence
  Description of Artificial Sequence: Synthetic oligonucleotide
  Antisense strand to SEQ ID NO: 2226688
aauucgcccagccauuagu

SEQ ID NO: 2226690 - RNA, 19 nt, Artificial Sequence
  Description of Artificial Sequence: Synthetic oligonucleotide
  Sense strand starting at position 700 of SEQ ID NO: 1883925
ggcgaauuagcacaaugag

SEQ ID NO: 2226691 - RNA, 19 nt, Artificial Sequence
  Description of Artificial Sequence: Synthetic oligonucleotide
  Antisense strand to SEQ ID NO: 2226690
cucauugugcuaauucgcc

SEQ ID NO: 2226692 - RNA, 19 nt, Artificial Sequence
  Description of Artificial Sequence: Synthetic oligonucleotide
  Sense strand starting at position 748 of SEQ ID NO: 1883925
agugacuuguuagcacaau

SEQ ID NO: 2226693 - RNA, 19 nt, Artificial Sequence
  Description of Artificial Sequence: Synthetic oligonucleotide
  Antisense strand to SEQ ID NO: 2226692
auugugcuaacaagucacu

SEQ ID NO: 2226694 - RNA, 19 nt, Artificial Sequence
  Description of Artificial Sequence: Synthetic oligonucleotide
  Sense strand starting at position 754 of SEQ ID NO: 1883925
uuguuagcacaauagaagu

SEQ ID NO: 2226695 - RNA, 19 nt, Artificial Sequence
  Description of Artificial Sequence: Synthetic oligonucleotide
  Antisense strand to SEQ ID NO: 2226694
acuucuauugugcuaacaa

SEQ ID NO: 2226696 - RNA, 19 nt, Artificial Sequence
  Description of Artificial Sequence: Synthetic oligonucleotide
  Sense strand starting at position 776 of SEQ ID NO: 1883925
aaugaacaaugguugucaa

SEQ ID NO: 2226697 - RNA, 19 nt, Artificial Sequence
  Description of Artificial Sequence: Synthetic oligonucleotide
  Antisense strand to SEQ ID NO: 2226696
uugacaaccauuguucauu

SEQ ID NO: 2226698 - RNA, 19 nt, Artificial Sequence
  Description of Artificial Sequence: Synthetic oligonucleotide
  Sense strand starting at position 779 of SEQ ID NO: 1883925
gaacaaugguugucaaguu

SEQ ID NO: 2226699 - RNA, 19 nt, Artificial Sequence
  Description of Artificial Sequence: Synthetic oligonucleotide
  Antisense strand to SEQ ID NO: 2226698
aacuugacaaccauuguuc

SEQ ID NO: 2226700 - RNA, 19 nt, Artificial Sequence
  Description of Artificial Sequence: Synthetic oligonucleotide
  Sense strand starting at position 786 of SEQ ID NO: 1883925
gguugucaaguuagcggua

SEQ ID NO: 2226701 - RNA, 19 nt, Artificial Sequence
  Description of Artificial Sequence: Synthetic oligonucleotide
  Antisense strand to SEQ ID NO: 2226700
uaccgcuaacuugacaacc

SEQ ID NO: 2226702 - RNA, 19 nt, Artificial Sequence
  Description of Artificial Sequence: Synthetic oligonucleotide
  Sense strand starting at position 789 of SEQ ID NO: 1883925
ugucaaguuagcgguauuu

SEQ ID NO: 2226703 - RNA, 19 nt, Artificial Sequence
  Description of Artificial Sequence: Synthetic oligonucleotide
  Antisense strand to SEQ ID NO: 2226702
aaauaccgcuaacuugaca

SEQ ID NO: 2226704 - RNA, 19 nt, Artificial Sequence
  Description of Artificial Sequence: Synthetic oligonucleotide
  Sense strand starting at position 848 of SEQ ID NO: 1883925
gcgacacucuaaccuuaau

SEQ ID NO: 2226705 - RNA, 19 nt, Artificial Sequence
  Description of Artificial Sequence: Synthetic oligonucleotide
  Antisense strand to SEQ ID NO: 2226704
auuaagguuagagugucgc

SEQ ID NO: 2226706 - RNA, 19 nt, Artificial Sequence
  Description of Artificial Sequence: Synthetic oligonucleotide
  Sense strand starting at position 890 of SEQ ID NO: 1883925
aggauccagcugugaaauc

SEQ ID NO: 2226707 - RNA, 19 nt, Artificial Sequence
  Description of Artificial Sequence: Synthetic oligonucleotide
  Antisense strand to SEQ ID NO: 2226706
gauuucacagcuggauccu

SEQ ID NO: 2226708 - RNA, 19 nt, Artificial Sequence
  Description of Artificial Sequence: Synthetic oligonucleotide
  Sense strand starting at position 1047 of SEQ ID NO: 1883925
ggcuguuccacaguugugu

SEQ ID NO: 2226709 - RNA, 19 nt, Artificial Sequence
  Description of Artificial Sequence: Synthetic oligonucleotide
  Antisense strand to SEQ ID NO: 2226708
acacaacuguggaacagcc

SEQ ID NO: 2226710 - RNA, 19 nt, Artificial Sequence
  Description of Artificial Sequence: Synthetic oligonucleotide
  Sense strand starting at position 1084 of SEQ ID NO: 1883925
cuugcugaccaauguuuga

SEQ ID NO: 2226711 - RNA, 19 nt, Artificial Sequence
  Description of Artificial Sequence: Synthetic oligonucleotide
  Antisense strand to SEQ ID NO: 2226710
ucaaacauuggucagcaag

SEQ ID NO: 2226712 - RNA, 19 nt, Artificial Sequence
  Description of Artificial Sequence: Synthetic oligonucleotide
  Sense strand starting at position 1301 of SEQ ID NO: 1883925
agaugaagccuuugagagg

SEQ ID NO: 2226713 - RNA, 19 nt, Artificial Sequence
  Description of Artificial Sequence: Synthetic oligonucleotide
  Antisense strand to SEQ ID NO: 2226712
ccucucaaaggcuucaucu

SEQ ID NO: 2226714 - RNA, 19 nt, Artificial Sequence
  Description of Artificial Sequence: Synthetic oligonucleotide
  Sense strand starting at position 1506 of SEQ ID NO: 1883925
ucagguucucccuaucgaa

SEQ ID NO: 2226715 - RNA, 19 nt, Artificial Sequence
  Description of Artificial Sequence: Synthetic oligonucleotide
  Antisense strand to SEQ ID NO: 2226714
uucgauagggagaaccuga

SEQ ID NO: 2226716 - RNA, 19 nt, Artificial Sequence
  Description of Artificial Sequence: Synthetic oligonucleotide
  Sense strand starting at position 1525 of SEQ ID NO: 1883925
gcggucuauggagauaguu

SEQ ID NO: 2226717 - RNA, 19 nt, Artificial Sequence
  Description of Artificial Sequence: Synthetic oligonucleotide
  Antisense strand to SEQ ID NO: 2226716
aacuaucuccauagaccgc

SEQ ID NO: 2226718 - RNA, 19 nt, Artificial Sequence
  Description of Artificial Sequence: Synthetic oligonucleotide
  Sense strand starting at position 1770 of SEQ ID NO: 1883925
gcugcuuggguuuaaauca

SEQ ID NO: 2226719 - RNA, 19 nt, Artificial Sequence
  Description of Artificial Sequence: Synthetic oligonucleotide
  Antisense strand to SEQ ID NO: 2226718
ugauuuaaacccaagcagc

SEQ ID NO: 2226720 - RNA, 19 nt, Artificial Sequence
  Description of Artificial Sequence: Synthetic oligonucleotide
  Sense strand starting at position 1968 of SEQ ID NO: 1883925
cggaacugcgcuuagaaau

SEQ ID NO: 2226721 - RNA, 19 nt, Artificial Sequence
  Description of Artificial Sequence: Synthetic oligonucleotide
  Antisense strand to SEQ ID NO: 2226720
auuucuaagcgcaguuccg

SEQ ID NO: 2226722 - RNA, 19 nt, Artificial Sequence
  Description of Artificial Sequence: Synthetic oligonucleotide
  Sense strand starting at position 2081 of SEQ ID NO: 1883925
ugggauuaccgugaggguu

SEQ ID NO: 2226723 - RNA, 19 nt, Artificial Sequence
  Description of Artificial Sequence: Synthetic oligonucleotide
  Antisense strand to SEQ ID NO: 2226722
aacccucacgguaauccca

SEQ ID NO: 2226724 - RNA, 19 nt, Artificial Sequence
  Description of Artificial Sequence: Synthetic oligonucleotide
  Sense strand starting at position 2106 of SEQ ID NO: 1883925
gaaaguuuguaucugacuc

SEQ ID NO: 2226725 - RNA, 19 nt, Artificial Sequence
  Description of Artificial Sequence: Synthetic oligonucleotide
  Antisense strand to SEQ ID NO: 2226724
gagucagauacaaacuuuc

SEQ ID NO: 2226726 - RNA, 19 nt, Artificial Sequence
  Description of Artificial Sequence: Synthetic oligonucleotide
  Sense strand starting at position 2486 of SEQ ID NO: 1883925
agaacacuuucgcuuuauu

SEQ ID NO: 2226727 - RNA, 19 nt, Artificial Sequence
  Description of Artificial Sequence: Synthetic oligonucleotide
  Antisense strand to SEQ ID NO: 2226726
aauaaagcgaaaguguucu

SEQ ID NO: 2226728 - RNA, 19 nt, Artificial Sequence
  Description of Artificial Sequence: Synthetic oligonucleotide
  Sense strand starting at position 2840 of SEQ ID NO: 1883925
caaaccuucggguagcauu

SEQ ID NO: 2226729 - RNA, 19 nt, Artificial Sequence
  Description of Artificial Sequence: Synthetic oligonucleotide
  Antisense strand to SEQ ID NO: 2226728
aaugcuacccgaagguuug

SEQ ID NO: 2226730 - RNA, 19 nt, Artificial Sequence
  Description of Artificial Sequence: Synthetic oligonucleotide
  Sense strand starting at position 2871 of SEQ ID NO: 1883925
cgacaacauguuugcagaa

SEQ ID NO: 2226731 - RNA, 19 nt, Artificial Sequence
  Description of Artificial Sequence: Synthetic oligonucleotide
  Antisense strand to SEQ ID NO: 2226730
uucugcaaacauguugucg

SEQ ID NO: 2226732 - RNA, 19 nt, Artificial Sequence
  Description of Artificial Sequence: Synthetic oligonucleotide
  Sense strand starting at position 2872 of SEQ ID NO: 1883925
gacaacauguuugcagaau

SEQ ID NO: 2226733 - RNA, 19 nt, Artificial Sequence
  Description of Artificial Sequence: Synthetic oligonucleotide
  Antisense strand to SEQ ID NO: 2226732
auucugcaaacauguuguc

SEQ ID NO: 2226734 - RNA, 19 nt, Artificial Sequence
  Description of Artificial Sequence: Synthetic oligonucleotide
  Sense strand starting at position 3320 of SEQ ID NO: 1883925
uagccaugauacucagagu

SEQ ID NO: 2226735 - RNA, 19 nt, Artificial Sequence
  Description of Artificial Sequence: Synthetic oligonucleotide
  Antisense strand to SEQ ID NO: 2226734
acucugaguaucauggcua

SEQ ID NO: 2226736 - RNA, 19 nt, Artificial Sequence
  Description of Artificial Sequence: Synthetic oligonucleotide
  Sense strand starting at position 3462 of SEQ ID NO: 1883925
uuugaugguuugucuuaga

SEQ ID NO: 2226737 - RNA, 19 nt, Artificial Sequence
  Description of Artificial Sequence: Synthetic oligonucleotide
  Antisense strand to SEQ ID NO: 2226736
ucuaagacaaaccaucaaa

SEQ ID NO: 2226738 - RNA, 19 nt, Artificial Sequence
  Description of Artificial Sequence: Synthetic oligonucleotide
  Sense strand starting at position 3522 of SEQ ID NO: 1883925
acaacaaauucugcuguga

SEQ ID NO: 2226739 - RNA, 19 nt, Artificial Sequence
  Description of Artificial Sequence: Synthetic oligonucleotide
  Antisense strand to SEQ ID NO: 2226738
ucacagcagaauuuguugu

SEQ ID NO: 2226740 - RNA, 19 nt, Artificial Sequence
  Description of Artificial Sequence: Synthetic oligonucleotide
  Sense strand starting at position 3539 of SEQ ID NO: 1883925
gagucuaguguccgaagaa

SEQ ID NO: 2226741 - RNA, 19 nt, Artificial Sequence
  Description of Artificial Sequence: Synthetic oligonucleotide
  Antisense strand to SEQ ID NO: 2226740
uucuucggacacuagacuc

SEQ ID NO: 2226742 - RNA, 19 nt, Artificial Sequence
  Description of Artificial Sequence: Synthetic oligonucleotide
  Sense strand starting at position 3552 of SEQ ID NO: 1883925
gaagaaucucacgguagag

SEQ ID NO: 2226743 - RNA, 19 nt, Artificial Sequence
  Description of Artificial Sequence: Synthetic oligonucleotide
  Antisense strand to SEQ ID NO: 2226742
cucuaccgugagauucuuc

SEQ ID NO: 2226744 - RNA, 19 nt, Artificial Sequence
  Description of Artificial Sequence: Synthetic oligonucleotide
  Sense strand starting at position 3562 of SEQ ID NO: 1883925
acgguagagcuccaggaaa

SEQ ID NO: 2226745 - RNA, 19 nt, Artificial Sequence
  Description of Artificial Sequence: Synthetic oligonucleotide
  Antisense strand to SEQ ID NO: 2226744
uuuccuggagcucuaccgu

SEQ ID NO: 2226746 - RNA, 19 nt, Artificial Sequence
  Description of Artificial Sequence: Synthetic oligonucleotide
  Sense strand starting at position 3599 of SEQ ID NO: 1883925
ucgugaucuuauguauuug

SEQ ID NO: 2226747 - RNA, 19 nt, Artificial Sequence
  Description of Artificial Sequence: Synthetic oligonucleotide
  Antisense strand to SEQ ID NO: 2226746
caaauacauaagaucacga

SEQ ID NO: 2226748 - RNA, 19 nt, Artificial Sequence
  Description of Artificial Sequence: Synthetic oligonucleotide
  Sense strand starting at position 3607 of SEQ ID NO: 1883925
uuauguauuugcucacuua

SEQ ID NO: 2226749 - RNA, 19 nt, Artificial Sequence
  Description of Artificial Sequence: Synthetic oligonucleotide
  Antisense strand to SEQ ID NO: 2226748
uaagugagcaaauacauaa

SEQ ID NO: 2226750 - RNA, 19 nt, Artificial Sequence
  Description of Artificial Sequence: Synthetic oligonucleotide
  Sense strand starting at position 3710 of SEQ ID NO: 1883925
aggcaagauagguaagcau

SEQ ID NO: 2226751 - RNA, 19 nt, Artificial Sequence
  Description of Artificial Sequence: Synthetic oligonucleotide
  Antisense strand to SEQ ID NO: 2226750
augcuuaccuaucuugccu

SEQ ID NO: 2226752 - RNA, 19 nt, Artificial Sequence
  Description of Artificial Sequence: Synthetic oligonucleotide
  Sense strand starting at position 3793 of SEQ ID NO: 1883925
acacaccuucuaggugauu

SEQ ID NO: 2226753 - RNA, 19 nt, Artificial Sequence
  Description of Artificial Sequence: Synthetic oligonucleotide
  Antisense strand to SEQ ID NO: 2226752
aaucaccuagaaggugugu

SEQ ID NO: 2226754 - RNA, 19 nt, Artificial Sequence
  Description of Artificial Sequence: Synthetic oligonucleotide
  Sense strand starting at position 3818 of SEQ ID NO: 1883925
gacccuaaaguuugagaac

SEQ ID NO: 2226755 - RNA, 19 nt, Artificial Sequence
  Description of Artificial Sequence: Synthetic oligonucleotide
  Antisense strand to SEQ ID NO: 2226754
guucucaaacuuuaggguc

SEQ ID NO: 2226756 - RNA, 19 nt, Artificial Sequence
  Description of Artificial Sequence: Synthetic oligonucleotide
  Sense strand starting at position 2781 of SEQ ID NO: 1883926
cgccguucgcugugaacaa

SEQ ID NO: 2226757 - RNA, 19 nt, Artificial Sequence
  Description of Artificial Sequence: Synthetic oligonucleotide
  Antisense strand to SEQ ID NO: 2226756
uuguucacagcgaacggcg

SEQ ID NO: 2226758 - RNA, 19 nt, Artificial Sequence
  Description of Artificial Sequence: Synthetic oligonucleotide
  Sense strand starting at position 2782 of SEQ ID NO: 1883926
gccguucgcugugaacaau

SEQ ID NO: 2226759 - RNA, 19 nt, Artificial Sequence
  Description of Artificial Sequence: Synthetic oligonucleotide
  Antisense strand to SEQ ID NO: 2226758
auuguucacagcgaacggc

SEQ ID NO: 2226760 - RNA, 19 nt, Artificial Sequence
  Description of Artificial Sequence: Synthetic oligonucleotide
  Sense strand starting at position 2948 of SEQ ID NO: 1883926
ugugcuagccuuuaaccaa

SEQ ID NO: 2226761 - RNA, 19 nt, Artificial Sequence
  Description of Artificial Sequence: Synthetic oligonucleotide
  Antisense strand to SEQ ID NO: 2226760
uugguuaaaggcuagcaca

SEQ ID NO: 2226762 - RNA, 19 nt, Artificial Sequence
  Description of Artificial Sequence: Synthetic oligonucleotide
  Sense strand starting at position 2965 of SEQ ID NO: 1883926
aaggguaccguccagaaga

SEQ ID NO: 2226763 - RNA, 19 nt, Artificial Sequence
  Description of Artificial Sequence: Synthetic oligonucleotide
  Antisense strand to SEQ ID NO: 2226762
ucuucuggacgguacccuu

SEQ ID NO: 2226764 - RNA, 19 nt, Artificial Sequence
  Description of Artificial Sequence: Synthetic oligonucleotide
  Sense strand starting at position 2967 of SEQ ID NO: 1883926
ggguaccguccagaagaau

SEQ ID NO: 2226765 - RNA, 19 nt, Artificial Sequence
  Description of Artificial Sequence: Synthetic oligonucleotide
  Antisense strand to SEQ ID NO: 2226764
auucuucuggacgguaccc

SEQ ID NO: 2226766 - RNA, 19 nt, Artificial Sequence
  Description of Artificial Sequence: Synthetic oligonucleotide
  Sense strand starting at position 3143 of SEQ ID NO: 1883926
cuggguuucuuuggaaacu

SEQ ID NO: 2226767 - RNA, 19 nt, Artificial Sequence
  Description of Artificial Sequence: Synthetic oligonucleotide
  Antisense strand to SEQ ID NO: 2226766
aguuuccaaagaaacccag

SEQ ID NO: 2226768 - RNA, 19 nt, Artificial Sequence
  Description of Artificial Sequence: Synthetic oligonucleotide
  Sense strand starting at position 3185 of SEQ ID NO: 1883926
ugcauugcaccaugggaaa

SEQ ID NO: 2226769 - RNA, 19 nt, Artificial Sequence
  Description of Artificial Sequence: Synthetic oligonucleotide
  Antisense strand to SEQ ID NO: 2226768
uuucccauggugcaaugca

SEQ ID NO: 2226770 - RNA, 19 nt, Artificial Sequence
  Description of Artificial Sequence: Synthetic oligonucleotide
  Sense strand starting at position 3227 of SEQ ID NO: 1883926
uaaguucucucccugagag

SEQ ID NO: 2226771 - RNA, 19 nt, Artificial Sequence
  Description of Artificial Sequence: Synthetic oligonucleotide
  Antisense strand to SEQ ID NO: 2226770
cucucagggagagaacuua

SEQ ID NO: 2226772 - RNA, 19 nt, Artificial Sequence
  Description of Artificial Sequence: Synthetic oligonucleotide
  Sense strand starting at position 3228 of SEQ ID NO: 1883926
aaguucucucccugagagc

SEQ ID NO: 2226773 - RNA, 19 nt, Artificial Sequence
  Description of Artificial Sequence: Synthetic oligonucleotide
  Antisense strand to SEQ ID NO: 2226772
gcucucagggagagaacuu

SEQ ID NO: 2226774 - RNA, 19 nt, Artificial Sequence
  Description of Artificial Sequence: Synthetic oligonucleotide
  Sense strand starting at position 3229 of SEQ ID NO: 1883926
aguucucucccugagagca

SEQ ID NO: 2226775 - RNA, 19 nt, Artificial Sequence
  Description of Artificial Sequence: Synthetic oligonucleotide
  Antisense strand to SEQ ID NO: 2226774
ugcucucagggagagaacu

SEQ ID NO: 2226776 - RNA, 19 nt, Artificial Sequence
  Description of Artificial Sequence: Synthetic oligonucleotide
  Sense strand starting at position 3373 of SEQ ID NO: 1883926
gcgggaguuucugacaagu

SEQ ID NO: 2226777 - RNA, 19 nt, Artificial Sequence
  Description of Artificial Sequence: Synthetic oligonucleotide
  Antisense strand to SEQ ID NO: 2226776
acuugucagaaacucccgc

SEQ ID NO: 2226778 - RNA, 19 nt, Artificial Sequence
  Description of Artificial Sequence: Synthetic oligonucleotide
  Sense strand starting at position 3375 of SEQ ID NO: 1883926
gggaguuucugacaagugg

SEQ ID NO: 2226779 - RNA, 19 nt, Artificial Sequence
  Description of Artificial Sequence: Synthetic oligonucleotide
  Antisense strand to SEQ ID NO: 2226778
ccacuugucagaaacuccc

SEQ ID NO: 2226780 - RNA, 19 nt, Artificial Sequence
  Description of Artificial Sequence: Synthetic oligonucleotide
  Sense strand starting at position 3541 of SEQ ID NO: 1883926
ucaguugucguugccacua

SEQ ID NO: 2226781 - RNA, 19 nt, Artificial Sequence
  Description of Artificial Sequence: Synthetic oligonucleotide
  Antisense strand to SEQ ID NO: 2226780
uaguggcaacgacaacuga

SEQ ID NO: 2226782 - RNA, 19 nt, Artificial Sequence
  Description of Artificial Sequence: Synthetic oligonucleotide
  Sense strand starting at position 3546 of SEQ ID NO: 1883926
ugucguugccacuauguga

SEQ ID NO: 2226783 - RNA, 19 nt, Artificial Sequence
  Description of Artificial Sequence: Synthetic oligonucleotide
  Antisense strand to SEQ ID NO: 2226782
ucacauaguggcaacgaca

SEQ ID NO: 2226784 - RNA, 19 nt, Artificial Sequence
  Description of Artificial Sequence: Synthetic oligonucleotide
  Sense strand starting at position 3559 of SEQ ID NO: 1883926
augugagcuuucuguuauu

SEQ ID NO: 2226785 - RNA, 19 nt, Artificial Sequence
  Description of Artificial Sequence: Synthetic oligonucleotide
  Antisense strand to SEQ ID NO: 2226784
aauaacagaaagcucacau

SEQ ID NO: 2226786 - RNA, 19 nt, Artificial Sequence
  Description of Artificial Sequence: Synthetic oligonucleotide
  Sense strand starting at position 3562 of SEQ ID NO: 1883926
ugagcuuucuguuauucuu

SEQ ID NO: 2226787 - RNA, 19 nt, Artificial Sequence
  Description of Artificial Sequence: Synthetic oligonucleotide
  Antisense strand to SEQ ID NO: 2226786
aagaauaacagaaagcuca

SEQ ID NO: 2226788 - RNA, 19 nt, Artificial Sequence
  Description of Artificial Sequence: Synthetic oligonucleotide
  Sense strand starting at position 3569 of SEQ ID NO: 1883926
ucuguuauucuuugccaga

SEQ ID NO: 2226789 - RNA, 19 nt, Artificial Sequence
  Description of Artificial Sequence: Synthetic oligonucleotide
  Antisense strand to SEQ ID NO: 2226788
ucuggcaaagaauaacaga

SEQ ID NO: 2226790 - RNA, 19 nt, Artificial Sequence
  Description of Artificial Sequence: Synthetic oligonucleotide
  Sense strand starting at position 3570 of SEQ ID NO: 1883926
cuguuauucuuugccagag

SEQ ID NO: 2226791 - RNA, 19 nt, Artificial Sequence
  Description of Artificial Sequence: Synthetic oligonucleotide
  Antisense strand to SEQ ID NO: 2226790
cucuggcaaagaauaacag

SEQ ID NO: 2226792 - RNA, 19 nt, Artificial Sequence
  Description of Artificial Sequence: Synthetic oligonucleotide
  Sense strand starting at position 3571 of SEQ ID NO: 1883926
uguuauucuuugccagaga

SEQ ID NO: 2226793 - RNA, 19 nt, Artificial Sequence
  Description of Artificial Sequence: Synthetic oligonucleotide
  Antisense strand to SEQ ID NO: 2226792
ucucuggcaaagaauaaca

SEQ ID NO: 2226794 - RNA, 19 nt, Artificial Sequence
  Description of Artificial Sequence: Synthetic oligonucleotide
  Sense strand starting at position 3572 of SEQ ID NO: 1883926
guuauucuuugccagagag

SEQ ID NO: 2226795 - RNA, 19 nt, Artificial Sequence
  Description of Artificial Sequence: Synthetic oligonucleotide
  Antisense strand to SEQ ID NO: 2226794
cucucuggcaaagaauaac

SEQ ID NO: 2226796 - RNA, 19 nt, Artificial Sequence
  Description of Artificial Sequence: Synthetic oligonucleotide
  Sense strand starting at position 3596 of SEQ ID NO: 1883926
ucuggcuuggagugguuaa

SEQ ID NO: 2226797 - RNA, 19 nt, Artificial Sequence
  Description of Artificial Sequence: Synthetic oligonucleotide
  Antisense strand to SEQ ID NO: 2226796
uuaaccacuccaagccaga

SEQ ID NO: 2226798 - RNA, 19 nt, Artificial Sequence
  Description of Artificial Sequence: Synthetic oligonucleotide
  Sense strand starting at position 3597 of SEQ ID NO: 1883926
cuggcuuggagugguuaaa

SEQ ID NO: 2226799 - RNA, 19 nt, Artificial Sequence
  Description of Artificial Sequence: Synthetic oligonucleotide
  Antisense strand to SEQ ID NO: 2226798
uuuaaccacuccaagccag

SEQ ID NO: 2226800 - RNA, 19 nt, Artificial Sequence
  Description of Artificial Sequence: Synthetic oligonucleotide
  Sense strand starting at position 3733 of SEQ ID NO: 1883926
ugaaucgauagguacagua

SEQ ID NO: 2226801 - RNA, 19 nt, Artificial Sequence
  Description of Artificial Sequence: Synthetic oligonucleotide
  Antisense strand to SEQ ID NO: 2226800
uacuguaccuaucgauuca

SEQ ID NO: 2226802 - RNA, 19 nt, Artificial Sequence
  Description of Artificial Sequence: Synthetic oligonucleotide
  Sense strand starting at position 3896 of SEQ ID NO: 1883926
uaaggcauuccugguaaca

SEQ ID NO: 2226803 - RNA, 19 nt, Artificial Sequence
  Description of Artificial Sequence: Synthetic oligonucleotide
  Antisense strand to SEQ ID NO: 2226802
uguuaccaggaaugccuua

SEQ ID NO: 2226804 - RNA, 19 nt, Artificial Sequence
  Description of Artificial Sequence: Synthetic oligonucleotide
  Sense strand starting at position 79 of SEQ ID NO: 1883927
cucacuacaggauguauua

SEQ ID NO: 2226805 - RNA, 19 nt, Artificial Sequence
  Description of Artificial Sequence: Synthetic oligonucleotide
  Antisense strand to SEQ ID NO: 2226804
uaauacauccuguagugag

SEQ ID NO: 2226806 - RNA, 19 nt, Artificial Sequence
  Description of Artificial Sequence: Synthetic oligonucleotide
  Sense strand starting at position 88 of SEQ ID NO: 1883927
ggauguauuaaagguaguc

SEQ ID NO: 2226807 - RNA, 19 nt, Artificial Sequence
  Description of Artificial Sequence: Synthetic oligonucleotide
  Antisense strand to SEQ ID NO: 2226806
gacuaccuuuaauacaucc

SEQ ID NO: 2226808 - RNA, 19 nt, Artificial Sequence
  Description of Artificial Sequence: Synthetic oligonucleotide
  Sense strand starting at position 90 of SEQ ID NO: 1883927
auguauuaaagguagucuu

SEQ ID NO: 2226809 - RNA, 19 nt, Artificial Sequence
  Description of Artificial Sequence: Synthetic oligonucleotide
  Antisense strand to SEQ ID NO: 2226808
aagacuaccuuuaauacau

SEQ ID NO: 2226810 - RNA, 19 nt, Artificial Sequence
  Description of Artificial Sequence: Synthetic oligonucleotide
  Sense strand starting at position 311 of SEQ ID NO: 1883927
auaucacaaugguagauuu

SEQ ID NO: 2226811 - RNA, 19 nt, Artificial Sequence
  Description of Artificial Sequence: Synthetic oligonucleotide
  Antisense strand to SEQ ID NO: 2226810
aaaucuaccauugugauau

SEQ ID NO: 2226812 - RNA, 19 nt, Artificial Sequence
  Description of Artificial Sequence: Synthetic oligonucleotide
  Sense strand starting at position 329 of SEQ ID NO: 1883927
uaaacuuaacaguggugau

SEQ ID NO: 2226813 - RNA, 19 nt, Artificial Sequence
  Description of Artificial Sequence: Synthetic oligonucleotide
  Antisense strand to SEQ ID NO: 2226812
aucaccacuguuaaguuua

SEQ ID NO: 2226814 - RNA, 19 nt, Artificial Sequence
  Description of Artificial Sequence: Synthetic oligonucleotide
  Sense strand starting at position 494 of SEQ ID NO: 1883927
gaauuauaagacugugggu

SEQ ID NO: 2226815 - RNA, 19 nt, Artificial Sequence
  Description of Artificial Sequence: Synthetic oligonucleotide
  Antisense strand to SEQ ID NO: 2226814
acccacagucuuauaauuc

SEQ ID NO: 2226816 - RNA, 19 nt, Artificial Sequence
  Description of Artificial Sequence: Synthetic oligonucleotide
  Sense strand starting at position 691 of SEQ ID NO: 1883927
accaauaaaccaugugagu

SEQ ID NO: 2226817 - RNA, 19 nt, Artificial Sequence
  Description of Artificial Sequence: Synthetic oligonucleotide
  Antisense strand to SEQ ID NO: 2226816
acucacaugguuuauuggu

SEQ ID NO: 2226818 - RNA, 19 nt, Artificial Sequence
  Description of Artificial Sequence: Synthetic oligonucleotide
  Sense strand starting at position 911 of SEQ ID NO: 1883927
ucugccagucaucauauua

SEQ ID NO: 2226819 - RNA, 19 nt, Artificial Sequence
  Description of Artificial Sequence: Synthetic oligonucleotide
  Antisense strand to SEQ ID NO: 2226818
uaauaugaugacuggcaga

SEQ ID NO: 2226820 - RNA, 19 nt, Artificial Sequence
  Description of Artificial Sequence: Synthetic oligonucleotide
  Sense strand starting at position 1089 of SEQ ID NO: 1883927
ggcugaaaugaguggauca

SEQ ID NO: 2226821 - RNA, 19 nt, Artificial Sequence
  Description of Artificial Sequence: Synthetic oligonucleotide
  Antisense strand to SEQ ID NO: 2226820
ugauccacucauuucagcc

SEQ ID NO: 2226822 - RNA, 19 nt, Artificial Sequence
  Description of Artificial Sequence: Synthetic oligonucleotide
  Sense strand starting at position 1390 of SEQ ID NO: 1883927
cgugcuauccuggcuuaug

SEQ ID NO: 2226823 - RNA, 19 nt, Artificial Sequence
  Description of Artificial Sequence: Synthetic oligonucleotide
  Antisense strand to SEQ ID NO: 2226822
cauaagccaggauagcacg

SEQ ID NO: 2226824 - RNA, 19 nt, Artificial Sequence
  Description of Artificial Sequence: Synthetic oligonucleotide
  Sense strand starting at position 1609 of SEQ ID NO: 1883927
cauuaaguauuauucgaag

SEQ ID NO: 2226825 - RNA, 19 nt, Artificial Sequence
  Description of Artificial Sequence: Synthetic oligonucleotide
  Antisense strand to SEQ ID NO: 2226824
cuucgaauaauacuuaaug

SEQ ID NO: 2226826 - RNA, 19 nt, Artificial Sequence
  Description of Artificial Sequence: Synthetic oligonucleotide
  Sense strand starting at position 1637 of SEQ ID NO: 1883927
agaagugacuucuuguuaa

SEQ ID NO: 2226827 - RNA, 19 nt, Artificial Sequence
  Description of Artificial Sequence: Synthetic oligonucleotide
  Antisense strand to SEQ ID NO: 2226826
uuaacaagaagucacuucu

SEQ ID NO: 2226828 - RNA, 19 nt, Artificial Sequence
  Description of Artificial Sequence: Synthetic oligonucleotide
  Sense strand starting at position 1640 of SEQ ID NO: 1883927
agugacuucuuguuaagaa

SEQ ID NO: 2226829 - RNA, 19 nt, Artificial Sequence
  Description of Artificial Sequence: Synthetic oligonucleotide
  Antisense strand to SEQ ID NO: 2226828
uucuuaacaagaagucacu

SEQ ID NO: 2226830 - RNA, 19 nt, Artificial Sequence
  Description of Artificial Sequence: Synthetic oligonucleotide
  Sense strand starting at position 2038 of SEQ ID NO: 1883927
aggacauugccuuagucuu

SEQ ID NO: 2226831 - RNA, 19 nt, Artificial Sequence
  Description of Artificial Sequence: Synthetic oligonucleotide
  Antisense strand to SEQ ID NO: 2226830
aagacuaaggcaauguccu

SEQ ID NO: 2226832 - RNA, 19 nt, Artificial Sequence
  Description of Artificial Sequence: Synthetic oligonucleotide
  Sense strand starting at position 2069 of SEQ ID NO: 1883927
ugauauauugcugauguca

SEQ ID NO: 2226833 - RNA, 19 nt, Artificial Sequence
  Description of Artificial Sequence: Synthetic oligonucleotide
  Antisense strand to SEQ ID NO: 2226832
ugacaucagcaauauauca

SEQ ID NO: 2226834 - RNA, 19 nt, Artificial Sequence
  Description of Artificial Sequence: Synthetic oligonucleotide
  Sense strand starting at position 2330 of SEQ ID NO: 1883927
ggcaaugugaauuggaacu

SEQ ID NO: 2226835 - RNA, 19 nt, Artificial Sequence
  Description of Artificial Sequence: Synthetic oligonucleotide
  Antisense strand to SEQ ID NO: 2226834
aguuccaauucacauugcc

SEQ ID NO: 2226836 - RNA, 19 nt, Artificial Sequence
  Description of Artificial Sequence: Synthetic oligonucleotide
  Sense strand starting at position 2343 of SEQ ID NO: 1883927
ggaacuggguaguuugauu

SEQ ID NO: 2226837 - RNA, 19 nt, Artificial Sequence
  Description of Artificial Sequence: Synthetic oligonucleotide
  Antisense strand to SEQ ID NO: 2226836
aaucaaacuacccaguucc

SEQ ID NO: 2226838 - RNA, 19 nt, Artificial Sequence
  Description of Artificial Sequence: Synthetic oligonucleotide
  Sense strand starting at position 2375 of SEQ ID NO: 1883927
gcuuucuaaggccagugaa

SEQ ID NO: 2226839 - RNA, 19 nt, Artificial Sequence
  Description of Artificial Sequence: Synthetic oligonucleotide
  Antisense strand to SEQ ID NO: 2226838
uucacuggccuuagaaagc

SEQ ID NO: 2226840 - RNA, 19 nt, Artificial Sequence
  Description of Artificial Sequence: Synthetic oligonucleotide
  Sense strand starting at position 2405 of SEQ ID NO: 1883927
guauuucccucccugaagu

SEQ ID NO: 2226841 - RNA, 19 nt, Artificial Sequence
  Description of Artificial Sequence: Synthetic oligonucleotide
  Antisense strand to SEQ ID NO: 2226840
acuucagggagggaaauac

SEQ ID NO: 2226842 - RNA, 19 nt, Artificial Sequence
  Description of Artificial Sequence: Synthetic oligonucleotide
  Sense strand starting at position 2476 of SEQ ID NO: 1883927
agaguagagagcugauaua

SEQ ID NO: 2226843 - RNA, 19 nt, Artificial Sequence
  Description of Artificial Sequence: Synthetic oligonucleotide
  Antisense strand to SEQ ID NO: 2226842
uauaucagcucucuacucu

SEQ ID NO: 2226844 - RNA, 19 nt, Artificial Sequence
  Description of Artificial Sequence: Synthetic oligonucleotide
  Sense strand starting at position 2488 of SEQ ID NO: 1883927
ugauauagccuguaggaug

SEQ ID NO: 2226845 - RNA, 19 nt, Artificial Sequence
  Description of Artificial Sequence: Synthetic oligonucleotide
  Antisense strand to SEQ ID NO: 2226844
cauccuacaggcuauauca

SEQ ID NO: 2226846 - RNA, 19 nt, Artificial Sequence
  Description of Artificial Sequence: Synthetic oligonucleotide
  Sense strand starting at position 2556 of SEQ ID NO: 1883927
gagggagagaagugcuuau

SEQ ID NO: 2226847 - RNA, 19 nt, Artificial Sequence
  Description of Artificial Sequence: Synthetic oligonucleotide
  Antisense strand to SEQ ID NO: 2226846
auaagcacuucucucccuc

SEQ ID NO: 2226848 - RNA, 19 nt, Artificial Sequence
  Description of Artificial Sequence: Synthetic oligonucleotide
  Sense strand starting at position 2560 of SEQ ID NO: 1883927
gagagaagugcuuauucua

SEQ ID NO: 2226849 - RNA, 19 nt, Artificial Sequence
  Description of Artificial Sequence: Synthetic oligonucleotide
  Antisense strand to SEQ ID NO: 2226848
uagaauaagcacuucucuc

SEQ ID NO: 2226850 - RNA, 19 nt, Artificial Sequence
  Description of Artificial Sequence: Synthetic oligonucleotide
  Sense strand starting at position 2621 of SEQ ID NO: 1883927
gacagaaauuucuaugggu

SEQ ID NO: 2226851 - RNA, 19 nt, Artificial Sequence
  Description of Artificial Sequence: Synthetic oligonucleotide
  Antisense strand to SEQ ID NO: 2226850
acccauagaaauuucuguc

SEQ ID NO: 2226852 - RNA, 19 nt, Artificial Sequence
  Description of Artificial Sequence: Synthetic oligonucleotide
  Sense strand starting at position 2730 of SEQ ID NO: 1883927
gagguaaugcuagaucccu

SEQ ID NO: 2226853 - RNA, 19 nt, Artificial Sequence
  Description of Artificial Sequence: Synthetic oligonucleotide
  Antisense strand to SEQ ID NO: 2226852
agggaucuagcauuaccuc

SEQ ID NO: 2226854 - RNA, 19 nt, Artificial Sequence
  Description of Artificial Sequence: Synthetic oligonucleotide
  Sense strand starting at position 2867 of SEQ ID NO: 1883927
uguggaagucgccuugcua

SEQ ID NO: 2226855 - RNA, 19 nt, Artificial Sequence
  Description of Artificial Sequence: Synthetic oligonucleotide
  Antisense strand to SEQ ID NO: 2226854
uagcaaggcgacuuccaca

SEQ ID NO: 2226856 - RNA, 19 nt, Artificial Sequence
  Description of Artificial Sequence: Synthetic oligonucleotide
  Sense strand starting at position 2868 of SEQ ID NO: 1883927
guggaagucgccuugcuau

SEQ ID NO: 2226857 - RNA, 19 nt, Artificial Sequence
  Description of Artificial Sequence: Synthetic oligonucleotide
  Antisense strand to SEQ ID NO: 2226856
auagcaaggcgacuuccac

SEQ ID NO: 2226858 - RNA, 19 nt, Artificial Sequence
  Description of Artificial Sequence: Synthetic oligonucleotide
  Sense strand starting at position 3042 of SEQ ID NO: 1883927
gggcuuuaaucagugauag

SEQ ID NO: 2226859 - RNA, 19 nt, Artificial Sequence
  Description of Artificial Sequence: Synthetic oligonucleotide
  Antisense strand to SEQ ID NO: 2226858
cuaucacugauuaaagccc

SEQ ID NO: 2226860 - RNA, 19 nt, Artificial Sequence
  Description of Artificial Sequence: Synthetic oligonucleotide
  Sense strand starting at position 3043 of SEQ ID NO: 1883927
ggcuuuaaucagugauagg

SEQ ID NO: 2226861 - RNA, 19 nt, Artificial Sequence
  Description of Artificial Sequence: Synthetic oligonucleotide
  Antisense strand to SEQ ID NO: 2226860
ccuaucacugauuaaagcc

SEQ ID NO: 2226862 - RNA, 19 nt, Artificial Sequence
  Description of Artificial Sequence: Synthetic oligonucleotide
  Sense strand starting at position 3044 of SEQ ID NO: 1883927
gcuuuaaucagugauagga

SEQ ID NO: 2226863 - RNA, 19 nt, Artificial Sequence
  Description of Artificial Sequence: Synthetic oligonucleotide
  Antisense strand to SEQ ID NO: 2226862
uccuaucacugauuaaagc

SEQ ID NO: 2226864 - RNA, 19 nt, Artificial Sequence
  Description of Artificial Sequence: Synthetic oligonucleotide
  Sense strand starting at position 3171 of SEQ ID NO: 1883927
cagugcccugaucaugaua

SEQ ID NO: 2226865 - RNA, 19 nt, Artificial Sequence
  Description of Artificial Sequence: Synthetic oligonucleotide
  Antisense strand to SEQ ID NO: 2226864
uaucaugaucagggcacug

SEQ ID NO: 2226866 - RNA, 19 nt, Artificial Sequence
  Description of Artificial Sequence: Synthetic oligonucleotide
  Sense strand starting at position 3198 of SEQ ID NO: 1883927
gacauucuguguucuagaa

SEQ ID NO: 2226867 - RNA, 19 nt, Artificial Sequence
  Description of Artificial Sequence: Synthetic oligonucleotide
  Antisense strand to SEQ ID NO: 2226866
uucuagaacacagaauguc

SEQ ID NO: 2226868 - RNA, 19 nt, Artificial Sequence
  Description of Artificial Sequence: Synthetic oligonucleotide
  Sense strand starting at position 3363 of SEQ ID NO: 1883927
gugguaguacaauacaaua

SEQ ID NO: 2226869 - RNA, 19 nt, Artificial Sequence
  Description of Artificial Sequence: Synthetic oligonucleotide
  Antisense strand to SEQ ID NO: 2226868
uauuguauuguacuaccac

SEQ ID NO: 2226870 - RNA, 19 nt, Artificial Sequence
  Description of Artificial Sequence: Synthetic oligonucleotide
  Sense strand starting at position 3484 of SEQ ID NO: 1883927
aguggaaaugugagucguu

SEQ ID NO: 2226871 - RNA, 19 nt, Artificial Sequence
  Description of Artificial Sequence: Synthetic oligonucleotide
  Antisense strand to SEQ ID NO: 2226870
aacgacucacauuuccacu

SEQ ID NO: 2226872 - RNA, 19 nt, Artificial Sequence
  Description of Artificial Sequence: Synthetic oligonucleotide
  Sense strand starting at position 3498 of SEQ ID NO: 1883927
ucguuaugauaaucauaag

SEQ ID NO: 2226873 - RNA, 19 nt, Artificial Sequence
  Description of Artificial Sequence: Synthetic oligonucleotide
  Antisense strand to SEQ ID NO: 2226872
cuuaugauuaucauaacga

SEQ ID NO: 2226874 - RNA, 19 nt, Artificial Sequence
  Description of Artificial Sequence: Synthetic oligonucleotide
  Sense strand starting at position 3513 of SEQ ID NO: 1883927
uaaguagauuaugcucaga

SEQ ID NO: 2226875 - RNA, 19 nt, Artificial Sequence
  Description of Artificial Sequence: Synthetic oligonucleotide
  Antisense strand to SEQ ID NO: 2226874
ucugagcauaaucuacuua

SEQ ID NO: 2226876 - RNA, 19 nt, Artificial Sequence
  Description of Artificial Sequence: Synthetic oligonucleotide
  Sense strand starting at position 3515 of SEQ ID NO: 1883927
aguagauuaugcucagaag

SEQ ID NO: 2226877 - RNA, 19 nt, Artificial Sequence
  Description of Artificial Sequence: Synthetic oligonucleotide
  Antisense strand to SEQ ID NO: 2226876
cuucugagcauaaucuacu

SEQ ID NO: 2226878 - RNA, 19 nt, Artificial Sequence
  Description of Artificial Sequence: Synthetic oligonucleotide
  Sense strand starting at position 3551 of SEQ ID NO: 1883927
gagagauucuaggucaauc

SEQ ID NO: 2226879 - RNA, 19 nt, Artificial Sequence
  Description of Artificial Sequence: Synthetic oligonucleotide
  Antisense strand to SEQ ID NO: 2226878
gauugaccuagaaucucuc

SEQ ID NO: 2226880 - RNA, 19 nt, Artificial Sequence
  Description of Artificial Sequence: Synthetic oligonucleotide
  Sense strand starting at position 3942 of SEQ ID NO: 1883927
auucuuccucccgaaaugu

SEQ ID NO: 2226881 - RNA, 19 nt, Artificial Sequence
  Description of Artificial Sequence: Synthetic oligonucleotide
  Antisense strand to SEQ ID NO: 2226880
acauuucgggaggaagaau

SEQ ID NO: 2226882 - RNA, 19 nt, Artificial Sequence
  Description of Artificial Sequence: Synthetic oligonucleotide
  Sense strand starting at position 3983 of SEQ ID NO: 1883927
gggucugcacguguucauu

SEQ ID NO: 2226883 - RNA, 19 nt, Artificial Sequence
  Description of Artificial Sequence: Synthetic oligonucleotide
  Antisense strand to SEQ ID NO: 2226882
aaugaacacgugcagaccc

SEQ ID NO: 2226884 - RNA, 19 nt, Artificial Sequence
  Description of Artificial Sequence: Synthetic oligonucleotide
  Sense strand starting at position 134 of SEQ ID NO: 1883928
cuagguuucuuucuucuga

SEQ ID NO: 2226885 - RNA, 19 nt, Artificial Sequence
  Description of Artificial Sequence: Synthetic oligonucleotide
  Antisense strand to SEQ ID NO: 2226884
ucagaagaaagaaaccuag

SEQ ID NO: 2226886 - RNA, 19 nt, Artificial Sequence
  Description of Artificial Sequence: Synthetic oligonucleotide
  Sense strand starting at position 136 of SEQ ID NO: 1883928
agguuucuuucuucugaaa

SEQ ID NO: 2226887 - RNA, 19 nt, Artificial Sequence
  Description of Artificial Sequence: Synthetic oligonucleotide
  Antisense strand to SEQ ID NO: 2226886
uuucagaagaaagaaaccu

SEQ ID NO: 2226888 - RNA, 19 nt, Artificial Sequence
  Description of Artificial Sequence: Synthetic oligonucleotide
  Sense strand starting at position 155 of SEQ ID NO: 1883928
agcuuauugcaaugacauu

SEQ ID NO: 2226889 - RNA, 19 nt, Artificial Sequence
  Description of Artificial Sequence: Synthetic oligonucleotide
  Antisense strand to SEQ ID NO: 2226888
aaugucauugcaauaagcu

SEQ ID NO: 2226890 - RNA, 19 nt, Artificial Sequence
  Description of Artificial Sequence: Synthetic oligonucleotide
  Sense strand starting at position 260 of SEQ ID NO: 1883928
ugcucaugauaugagauuu

SEQ ID NO: 2226891 - RNA, 19 nt, Artificial Sequence
  Description of Artificial Sequence: Synthetic oligonucleotide
  Antisense strand to SEQ ID NO: 2226890
aaaucucauaucaugagca

SEQ ID NO: 2226892 - RNA, 19 nt, Artificial Sequence
  Description of Artificial Sequence: Synthetic oligonucleotide
  Sense strand starting at position 306 of SEQ ID NO: 1883928
gugggacacucauuacaau

SEQ ID NO: 2226893 - RNA, 19 nt, Artificial Sequence
  Description of Artificial Sequence: Synthetic oligonucleotide
  Antisense strand to SEQ ID NO: 2226892
auuguaaugagugucccac

SEQ ID NO: 2226894 - RNA, 19 nt, Artificial Sequence
  Description of Artificial Sequence: Synthetic oligonucleotide
  Sense strand starting at position 435 of SEQ ID NO: 1883928
gugagauacgaucaugcua

SEQ ID NO: 2226895 - RNA, 19 nt, Artificial Sequence
  Description of Artificial Sequence: Synthetic oligonucleotide
  Antisense strand to SEQ ID NO: 2226894
uagcaugaucguaucucac

SEQ ID NO: 2226896 - RNA, 19 nt, Artificial Sequence
  Description of Artificial Sequence: Synthetic oligonucleotide
  Sense strand starting at position 540 of SEQ ID NO: 1883928
agaaauuucuaccacuggu

SEQ ID NO: 2226897 - RNA, 19 nt, Artificial Sequence
  Description of Artificial Sequence: Synthetic oligonucleotide
  Antisense strand to SEQ ID NO: 2226896
accagugguagaaauuucu

SEQ ID NO: 2226898 - RNA, 19 nt, Artificial Sequence
  Description of Artificial Sequence: Synthetic oligonucleotide
  Sense strand starting at position 718 of SEQ ID NO: 1883928
uaaaguaaugccggaaauc

SEQ ID NO: 2226899 - RNA, 19 nt, Artificial Sequence
  Description of Artificial Sequence: Synthetic oligonucleotide
  Antisense strand to SEQ ID NO: 2226898
gauuuccggcauuacuuua

SEQ ID NO: 2226900 - RNA, 19 nt, Artificial Sequence
  Description of Artificial Sequence: Synthetic oligonucleotide
  Sense strand starting at position 719 of SEQ ID NO: 1883928
aaaguaaugccggaaaucu

SEQ ID NO: 2226901 - RNA, 19 nt, Artificial Sequence
  Description of Artificial Sequence: Synthetic oligonucleotide
  Antisense strand to SEQ ID NO: 2226900
agauuuccggcauuacuuu

SEQ ID NO: 2226902 - RNA, 19 nt, Artificial Sequence
  Description of Artificial Sequence: Synthetic oligonucleotide
  Sense strand starting at position 787 of SEQ ID NO: 1883928
agcucaauccuuuacagag

SEQ ID NO: 2226903 - RNA, 19 nt, Artificial Sequence
  Description of Artificial Sequence: Synthetic oligonucleotide
  Antisense strand to SEQ ID NO: 2226902
cucuguaaaggauugagcu

SEQ ID NO: 2226904 - RNA, 19 nt, Artificial Sequence
  Description of Artificial Sequence: Synthetic oligonucleotide
  Sense strand starting at position 832 of SEQ ID NO: 1883928
uauaguggguaagucaauu

SEQ ID NO: 2226905 - RNA, 19 nt, Artificial Sequence
  Description of Artificial Sequence: Synthetic oligonucleotide
  Antisense strand to SEQ ID NO: 2226904
aauugacuuacccacuaua

SEQ ID NO: 2226906 - RNA, 19 nt, Artificial Sequence
  Description of Artificial Sequence: Synthetic oligonucleotide
  Sense strand starting at position 956 of SEQ ID NO: 1883928
guuugacugaggcaucagu

SEQ ID NO: 2226907 - RNA, 19 nt, Artificial Sequence
  Description of Artificial Sequence: Synthetic oligonucleotide
  Antisense strand to SEQ ID NO: 2226906
acugaugccucagucaaac

SEQ ID NO: 2226908 - RNA, 19 nt, Artificial Sequence
  Description of Artificial Sequence: Synthetic oligonucleotide
  Sense strand starting at position 998 of SEQ ID NO: 1883928
gucauuaccucuccaguga

SEQ ID NO: 2226909 - RNA, 19 nt, Artificial Sequence
  Description of Artificial Sequence: Synthetic oligonucleotide
  Antisense strand to SEQ ID NO: 2226908
ucacuggagagguaaugac

SEQ ID NO: 2226910 - RNA, 19 nt, Artificial Sequence
  Description of Artificial Sequence: Synthetic oligonucleotide
  Sense strand starting at position 1142 of SEQ ID NO: 1883928
uggcuaugaugccuuaaag

SEQ ID NO: 2226911 - RNA, 19 nt, Artificial Sequence
  Description of Artificial Sequence: Synthetic oligonucleotide
  Antisense strand to SEQ ID NO: 2226910
cuuuaaggcaucauagcca

SEQ ID NO: 2226912 - RNA, 19 nt, Artificial Sequence
  Description of Artificial Sequence: Synthetic oligonucleotide
  Sense strand starting at position 1254 of SEQ ID NO: 1883928
acauuaugaccgugguuaa

SEQ ID NO: 2226913 - RNA, 19 nt, Artificial Sequence
  Description of Artificial Sequence: Synthetic oligonucleotide
  Antisense strand to SEQ ID NO: 2226912
uuaaccacggucauaaugu

SEQ ID NO: 2226914 - RNA, 19 nt, Artificial Sequence
  Description of Artificial Sequence: Synthetic oligonucleotide
  Sense strand starting at position 1255 of SEQ ID NO: 1883928
cauuaugaccgugguuaac

SEQ ID NO: 2226915 - RNA, 19 nt, Artificial Sequence
  Description of Artificial Sequence: Synthetic oligonucleotide
  Antisense strand to SEQ ID NO: 2226914
guuaaccacggucauaaug

SEQ ID NO: 2226916 - RNA, 19 nt, Artificial Sequence
  Description of Artificial Sequence: Synthetic oligonucleotide
  Sense strand starting at position 1265 of SEQ ID NO: 1883928
gugguuaacuuccucugau

SEQ ID NO: 2226917 - RNA, 19 nt, Artificial Sequence
  Description of Artificial Sequence: Synthetic oligonucleotide
  Antisense strand to SEQ ID NO: 2226916
aucagaggaaguuaaccac

SEQ ID NO: 2226918 - RNA, 19 nt, Artificial Sequence
  Description of Artificial Sequence: Synthetic oligonucleotide
  Sense strand starting at position 1266 of SEQ ID NO: 1883928
ugguuaacuuccucugauc

SEQ ID NO: 2226919 - RNA, 19 nt, Artificial Sequence
  Description of Artificial Sequence: Synthetic oligonucleotide
  Antisense strand to SEQ ID NO: 2226918
gaucagaggaaguuaacca

SEQ ID NO: 2226920 - RNA, 19 nt, Artificial Sequence
  Description of Artificial Sequence: Synthetic oligonucleotide
  Sense strand starting at position 1365 of SEQ ID NO: 1883928
gguugcaauuuccuauuau

SEQ ID NO: 2226921 - RNA, 19 nt, Artificial Sequence
  Description of Artificial Sequence: Synthetic oligonucleotide
  Antisense strand to SEQ ID NO: 2226920
auaauaggaaauugcaacc

SEQ ID NO: 2226922 - RNA, 19 nt, Artificial Sequence
  Description of Artificial Sequence: Synthetic oligonucleotide
  Sense strand starting at position 1398 of SEQ ID NO: 1883928
ggccgaaacuccucaacuu

SEQ ID NO: 2226923 - RNA, 19 nt, Artificial Sequence
  Description of Artificial Sequence: Synthetic oligonucleotide
  Antisense strand to SEQ ID NO: 2226922
aaguugaggaguuucggcc

SEQ ID NO: 2226924 - RNA, 19 nt, Artificial Sequence
  Description of Artificial Sequence: Synthetic oligonucleotide
  Sense strand starting at position 1399 of SEQ ID NO: 1883928
gccgaaacuccucaacuua

SEQ ID NO: 2226925 - RNA, 19 nt, Artificial Sequence
  Description of Artificial Sequence: Synthetic oligonucleotide
  Antisense strand to SEQ ID NO: 2226924
uaaguugaggaguuucggc

SEQ ID NO: 2226926 - RNA, 19 nt, Artificial Sequence
  Description of Artificial Sequence: Synthetic oligonucleotide
  Sense strand starting at position 1957 of SEQ ID NO: 1883928
gccuuugcucccuugcuua

SEQ ID NO: 2226927 - RNA, 19 nt, Artificial Sequence
  Description of Artificial Sequence: Synthetic oligonucleotide
  Antisense strand to SEQ ID NO: 2226926
uaagcaagggagcaaaggc

SEQ ID NO: 2226928 - RNA, 19 nt, Artificial Sequence
  Description of Artificial Sequence: Synthetic oligonucleotide
  Sense strand starting at position 1968 of SEQ ID NO: 1883928
cuugcuuaggacugggaau

SEQ ID NO: 2226929 - RNA, 19 nt, Artificial Sequence
  Description of Artificial Sequence: Synthetic oligonucleotide
  Antisense strand to SEQ ID NO: 2226928
auucccaguccuaagcaag

SEQ ID NO: 2226930 - RNA, 19 nt, Artificial Sequence
  Description of Artificial Sequence: Synthetic oligonucleotide
  Sense strand starting at position 1969 of SEQ ID NO: 1883928
uugcuuaggacugggaaua

SEQ ID NO: 2226931 - RNA, 19 nt, Artificial Sequence
  Description of Artificial Sequence: Synthetic oligonucleotide
  Antisense strand to SEQ ID NO: 2226930
uauucccaguccuaagcaa

SEQ ID NO: 2226932 - RNA, 19 nt, Artificial Sequence
  Description of Artificial Sequence: Synthetic oligonucleotide
  Sense strand starting at position 2216 of SEQ ID NO: 1883928
uugugcacucccugggaaa

SEQ ID NO: 2226933 - RNA, 19 nt, Artificial Sequence
  Description of Artificial Sequence: Synthetic oligonucleotide
  Antisense strand to SEQ ID NO: 2226932
uuucccagggagugcacaa

SEQ ID NO: 2226934 - RNA, 19 nt, Artificial Sequence
  Description of Artificial Sequence: Synthetic oligonucleotide
  Sense strand starting at position 2218 of SEQ ID NO: 1883928
gugcacucccugggaaaca

SEQ ID NO: 2226935 - RNA, 19 nt, Artificial Sequence
  Description of Artificial Sequence: Synthetic oligonucleotide
  Antisense strand to SEQ ID NO: 2226934
uguuucccagggagugcac

SEQ ID NO: 2226936 - RNA, 19 nt, Artificial Sequence
  Description of Artificial Sequence: Synthetic oligonucleotide
  Sense strand starting at position 2287 of SEQ ID NO: 1883928
auaggaacuccuugaucau

SEQ ID NO: 2226937 - RNA, 19 nt, Artificial Sequence
  Description of Artificial Sequence: Synthetic oligonucleotide
  Antisense strand to SEQ ID NO: 2226936
augaucaaggaguuccuau

SEQ ID NO: 2226938 - RNA, 19 nt, Artificial Sequence
  Description of Artificial Sequence: Synthetic oligonucleotide
  Sense strand starting at position 2794 of SEQ ID NO: 1883928
ucacuauuggauugagccu

SEQ ID NO: 2226939 - RNA, 19 nt, Artificial Sequence
  Description of Artificial Sequence: Synthetic oligonucleotide
  Antisense strand to SEQ ID NO: 2226938
aggcucaauccaauaguga

SEQ ID NO: 2226940 - RNA, 19 nt, Artificial Sequence
  Description of Artificial Sequence: Synthetic oligonucleotide
  Sense strand starting at position 2938 of SEQ ID NO: 1883928
uguuaaauaucagugguau

SEQ ID NO: 2226941 - RNA, 19 nt, Artificial Sequence
  Description of Artificial Sequence: Synthetic oligonucleotide
  Antisense strand to SEQ ID NO: 2226940
auaccacugauauuuaaca

SEQ ID NO: 2226942 - RNA, 19 nt, Artificial Sequence
  Description of Artificial Sequence: Synthetic oligonucleotide
  Sense strand starting at position 2939 of SEQ ID NO: 1883928
guuaaauaucagugguaua

SEQ ID NO: 2226943 - RNA, 19 nt, Artificial Sequence
  Description of Artificial Sequence: Synthetic oligonucleotide
  Antisense strand to SEQ ID NO: 2226942
uauaccacugauauuuaac

SEQ ID NO: 2226944 - RNA, 19 nt, Artificial Sequence
  Description of Artificial Sequence: Synthetic oligonucleotide
  Sense strand starting at position 2944 of SEQ ID NO: 1883928
auaucagugguauaacugu

SEQ ID NO: 2226945 - RNA, 19 nt, Artificial Sequence
  Description of Artificial Sequence: Synthetic oligonucleotide
  Antisense strand to SEQ ID NO: 2226944
acaguuauaccacugauau

SEQ ID NO: 2226946 - RNA, 19 nt, Artificial Sequence
  Description of Artificial Sequence: Synthetic oligonucleotide
  Sense strand starting at position 2953 of SEQ ID NO: 1883928
guauaacuguuauccugau

SEQ ID NO: 2226947 - RNA, 19 nt, Artificial Sequence
  Description of Artificial Sequence: Synthetic oligonucleotide
  Antisense strand to SEQ ID NO: 2226946
aucaggauaacaguuauac

SEQ ID NO: 2226948 - RNA, 19 nt, Artificial Sequence
  Description of Artificial Sequence: Synthetic oligonucleotide
  Sense strand starting at position 3269 of SEQ ID NO: 1883928
aagagugacucagucuaaa

SEQ ID NO: 2226949 - RNA, 19 nt, Artificial Sequence
  Description of Artificial Sequence: Synthetic oligonucleotide
  Antisense strand to SEQ ID NO: 2226948
uuuagacugagucacucuu

SEQ ID NO: 2226950 - RNA, 19 nt, Artificial Sequence
  Description of Artificial Sequence: Synthetic oligonucleotide
  Sense strand starting at position 3421 of SEQ ID NO: 1883928
gugauauaacaucacggua

SEQ ID NO: 2226951 - RNA, 19 nt, Artificial Sequence
  Description of Artificial Sequence: Synthetic oligonucleotide
  Antisense strand to SEQ ID NO: 2226950
uaccgugauguuauaucac

SEQ ID NO: 2226952 - RNA, 19 nt, Artificial Sequence
  Description of Artificial Sequence: Synthetic oligonucleotide
  Sense strand starting at position 3501 of SEQ ID NO: 1883928
augagugucaacgacacau

SEQ ID NO: 2226953 - RNA, 19 nt, Artificial Sequence
  Description of Artificial Sequence: Synthetic oligonucleotide
  Antisense strand to SEQ ID NO: 2226952
augugucguugacacucau

SEQ ID NO: 2226954 - RNA, 19 nt, Artificial Sequence
  Description of Artificial Sequence: Synthetic oligonucleotide
  Sense strand starting at position 3503 of SEQ ID NO: 1883928
gagugucaacgacacauaa

SEQ ID NO: 2226955 - RNA, 19 nt, Artificial Sequence
  Description of Artificial Sequence: Synthetic oligonucleotide
  Antisense strand to SEQ ID NO: 2226954
uuaugugucguugacacuc

SEQ ID NO: 2226956 - RNA, 19 nt, Artificial Sequence
  Description of Artificial Sequence: Synthetic oligonucleotide
  Sense strand starting at position 3505 of SEQ ID NO: 1883928
gugucaacgacacauaaga

SEQ ID NO: 2226957 - RNA, 19 nt, Artificial Sequence
  Description of Artificial Sequence: Synthetic oligonucleotide
  Antisense strand to SEQ ID NO: 2226956
ucuuaugugucguugacac

SEQ ID NO: 2226958 - RNA, 19 nt, Artificial Sequence
  Description of Artificial Sequence: Synthetic oligonucleotide
  Sense strand starting at position 3746 of SEQ ID NO: 1883928
ggguuacagugagcaagau

SEQ ID NO: 2226959 - RNA, 19 nt, Artificial Sequence
  Description of Artificial Sequence: Synthetic oligonucleotide
  Antisense strand to SEQ ID NO: 2226958
aucuugcucacuguaaccc

SEQ ID NO: 2226960 - RNA, 19 nt, Artificial Sequence
  Description of Artificial Sequence: Synthetic oligonucleotide
  Sense strand starting at position 3827 of SEQ ID NO: 1883928
uaugaauugggauguguuc

SEQ ID NO: 2226961 - RNA, 19 nt, Artificial Sequence
  Description of Artificial Sequence: Synthetic oligonucleotide
  Antisense strand to SEQ ID NO: 2226960
gaacacaucccaauucaua

SEQ ID NO: 2226962 - RNA, 19 nt, Artificial Sequence
  Description of Artificial Sequence: Synthetic oligonucleotide
  Sense strand starting at position 3845 of SEQ ID NO: 1883928
cuggucauuguuggaaagu

SEQ ID NO: 2226963 - RNA, 19 nt, Artificial Sequence
  Description of Artificial Sequence: Synthetic oligonucleotide
  Antisense strand to SEQ ID NO: 2226962
acuuuccaacaaugaccag

SEQ ID NO: 2226964 - RNA, 19 nt, Artificial Sequence
  Description of Artificial Sequence: Synthetic oligonucleotide
  Sense strand starting at position 3 of SEQ ID NO: 1883929
aguauacuuuaguucuacu

SEQ ID NO: 2226965 - RNA, 19 nt, Artificial Sequence
  Description of Artificial Sequence: Synthetic oligonucleotide
  Antisense strand to SEQ ID NO: 2226964
aguagaacuaaaguauacu

SEQ ID NO: 2226966 - RNA, 19 nt, Artificial Sequence
  Description of Artificial Sequence: Synthetic oligonucleotide
  Sense strand starting at position 501 of SEQ ID NO: 1883929
aggauauuucagugugcga

SEQ ID NO: 2226967 - RNA, 19 nt, Artificial Sequence
  Description of Artificial Sequence: Synthetic oligonucleotide
  Antisense strand to SEQ ID NO: 2226966
ucgcacacugaaauauccu

SEQ ID NO: 2226968 - RNA, 19 nt, Artificial Sequence
  Description of Artificial Sequence: Synthetic oligonucleotide
  Sense strand starting at position 730 of SEQ ID NO: 1883929
ggccuagagguggaaacuu

SEQ ID NO: 2226969 - RNA, 19 nt, Artificial Sequence
  Description of Artificial Sequence: Synthetic oligonucleotide
  Antisense strand to SEQ ID NO: 2226968
aaguuuccaccucuaggcc

SEQ ID NO: 2226970 - RNA, 19 nt, Artificial Sequence
  Description of Artificial Sequence: Synthetic oligonucleotide
  Sense strand starting at position 739 of SEQ ID NO: 1883929
guggaaacuugcccaguga

SEQ ID NO: 2226971 - RNA, 19 nt, Artificial Sequence
  Description of Artificial Sequence: Synthetic oligonucleotide
  Antisense strand to SEQ ID NO: 2226970
ucacugggcaaguuuccac

SEQ ID NO: 2226972 - RNA, 19 nt, Artificial Sequence
  Description of Artificial Sequence: Synthetic oligonucleotide
  Sense strand starting at position 740 of SEQ ID NO: 1883929
uggaaacuugcccagugau

SEQ ID NO: 2226973 - RNA, 19 nt, Artificial Sequence
  Description of Artificial Sequence: Synthetic oligonucleotide
  Antisense strand to SEQ ID NO: 2226972
aucacugggcaaguuucca

SEQ ID NO: 2226974 - RNA, 19 nt, Artificial Sequence
  Description of Artificial Sequence: Synthetic oligonucleotide
  Sense strand starting at position 748 of SEQ ID NO: 1883929
ugcccagugauguaagauu

SEQ ID NO: 2226975 - RNA, 19 nt, Artificial Sequence
  Description of Artificial Sequence: Synthetic oligonucleotide
  Antisense strand to SEQ ID NO: 2226974
aaucuuacaucacugggca

SEQ ID NO: 2226976 - RNA, 19 nt, Artificial Sequence
  Description of Artificial Sequence: Synthetic oligonucleotide
  Sense strand starting at position 806 of SEQ ID NO: 1883929
auauuauguuguccauaga

SEQ ID NO: 2226977 - RNA, 19 nt, Artificial Sequence
  Description of Artificial Sequence: Synthetic oligonucleotide
  Antisense strand to SEQ ID NO: 2226976
ucuauggacaacauaauau

SEQ ID NO: 2226978 - RNA, 19 nt, Artificial Sequence
  Description of Artificial Sequence: Synthetic oligonucleotide
  Sense strand starting at position 807 of SEQ ID NO: 1883929
uauuauguuguccauagag

SEQ ID NO: 2226979 - RNA, 19 nt, Artificial Sequence
  Description of Artificial Sequence: Synthetic oligonucleotide
  Antisense strand to SEQ ID NO: 2226978
cucuauggacaacauaaua

SEQ ID NO: 2226980 - RNA, 19 nt, Artificial Sequence
  Description of Artificial Sequence: Synthetic oligonucleotide
  Sense strand starting at position 907 of SEQ ID NO: 1883929
ugccgacuuacuuuguguu

SEQ ID NO: 2226981 - RNA, 19 nt, Artificial Sequence
  Description of Artificial Sequence: Synthetic oligonucleotide
  Antisense strand to SEQ ID NO: 2226980
aacacaaaguaagucggca

SEQ ID NO: 2226982 - RNA, 19 nt, Artificial Sequence
  Description of Artificial Sequence: Synthetic oligonucleotide
  Sense strand starting at position 1151 of SEQ ID NO: 1883929
ugaggcuuugcagaaacuu

SEQ ID NO: 2226983 - RNA, 19 nt, Artificial Sequence
  Description of Artificial Sequence: Synthetic oligonucleotide
  Antisense strand to SEQ ID NO: 2226982
aaguuucugcaaagccuca

SEQ ID NO: 2226984 - RNA, 19 nt, Artificial Sequence
  Description of Artificial Sequence: Synthetic oligonucleotide
  Sense strand starting at position 1165 of SEQ ID NO: 1883929
aacuuauuggcagagcaga

SEQ ID NO: 2226985 - RNA, 19 nt, Artificial Sequence
  Description of Artificial Sequence: Synthetic oligonucleotide
  Antisense strand to SEQ ID NO: 2226984
ucugcucugccaauaaguu

SEQ ID NO: 2226986 - RNA, 19 nt, Artificial Sequence
  Description of Artificial Sequence: Synthetic oligonucleotide
  Sense strand starting at position 1285 of SEQ ID NO: 1883929
acacauacuuccucuguga

SEQ ID NO: 2226987 - RNA, 19 nt, Artificial Sequence
  Description of Artificial Sequence: Synthetic oligonucleotide
  Antisense strand to SEQ ID NO: 2226986
ucacagaggaaguaugugu

SEQ ID NO: 2226988 - RNA, 19 nt, Artificial Sequence
  Description of Artificial Sequence: Synthetic oligonucleotide
  Sense strand starting at position 1300 of SEQ ID NO: 1883929
gugaguuuacccuacuaac

SEQ ID NO: 2226989 - RNA, 19 nt, Artificial Sequence
  Description of Artificial Sequence: Synthetic oligonucleotide
  Antisense strand to SEQ ID NO: 2226988
guuaguaggguaaacucac

SEQ ID NO: 2226990 - RNA, 19 nt, Artificial Sequence
  Description of Artificial Sequence: Synthetic oligonucleotide
  Sense strand starting at position 1371 of SEQ ID NO: 1883929
ucaccaucucuuggaugau

SEQ ID NO: 2226991 - RNA, 19 nt, Artificial Sequence
  Description of Artificial Sequence: Synthetic oligonucleotide
  Antisense strand to SEQ ID NO: 2226990
aucauccaagagaugguga

SEQ ID NO: 2226992 - RNA, 19 nt, Artificial Sequence
  Description of Artificial Sequence: Synthetic oligonucleotide
  Sense strand starting at position 1492 of SEQ ID NO: 1883929
guuauuaagacggaggcuu

SEQ ID NO: 2226993 - RNA, 19 nt, Artificial Sequence
  Description of Artificial Sequence: Synthetic oligonucleotide
  Antisense strand to SEQ ID NO: 2226992
aagccuccgucuuaauaac

SEQ ID NO: 2226994 - RNA, 19 nt, Artificial Sequence
  Description of Artificial Sequence: Synthetic oligonucleotide
  Sense strand starting at position 1503 of SEQ ID NO: 1883929
ggaggcuugggucauguua

SEQ ID NO: 2226995 - RNA, 19 nt, Artificial Sequence
  Description of Artificial Sequence: Synthetic oligonucleotide
  Antisense strand to SEQ ID NO: 2226994
uaacaugacccaagccucc

SEQ ID NO: 2226996 - RNA, 19 nt, Artificial Sequence
  Description of Artificial Sequence: Synthetic oligonucleotide
  Sense strand starting at position 1533 of SEQ ID NO: 1883929
caauguguaaggugaaagu

SEQ ID NO: 2226997 - RNA, 19 nt, Artificial Sequence
  Description of Artificial Sequence: Synthetic oligonucleotide
  Antisense strand to SEQ ID NO: 2226996
acuuucaccuuacacauug

SEQ ID NO: 2226998 - RNA, 19 nt, Artificial Sequence
  Description of Artificial Sequence: Synthetic oligonucleotide
  Sense strand starting at position 1549 of SEQ ID NO: 1883929
aguccuauuagguaagagu

SEQ ID NO: 2226999 - RNA, 19 nt, Artificial Sequence
  Description of Artificial Sequence: Synthetic oligonucleotide
  Antisense strand to SEQ ID NO: 2226998
acucuuaccuaauaggacu

SEQ ID NO: 2227000 - RNA, 19 nt, Artificial Sequence
  Description of Artificial Sequence: Synthetic oligonucleotide
  Sense strand starting at position 1680 of SEQ ID NO: 1883929
ggucuacagcuuuaccuau

SEQ ID NO: 2227001 - RNA, 19 nt, Artificial Sequence
  Description of Artificial Sequence: Synthetic oligonucleotide
  Antisense strand to SEQ ID NO: 2227000
auagguaaagcuguagacc

SEQ ID NO: 2227002 - RNA, 19 nt, Artificial Sequence
  Description of Artificial Sequence: Synthetic oligonucleotide
  Sense strand starting at position 1728 of SEQ ID NO: 1883929
aucuguuaaguugaaccau

SEQ ID NO: 2227003 - RNA, 19 nt, Artificial Sequence
  Description of Artificial Sequence: Synthetic oligonucleotide
  Antisense strand to SEQ ID NO: 2227002
augguucaacuuaacagau

SEQ ID NO: 2227004 - RNA, 19 nt, Artificial Sequence
  Description of Artificial Sequence: Synthetic oligonucleotide
  Sense strand starting at position 1734 of SEQ ID NO: 1883929
uaaguugaaccauguguaa

SEQ ID NO: 2227005 - RNA, 19 nt, Artificial Sequence
  Description of Artificial Sequence: Synthetic oligonucleotide
  Antisense strand to SEQ ID NO: 2227004
uuacacaugguucaacuua

SEQ ID NO: 2227006 - RNA, 19 nt, Artificial Sequence
  Description of Artificial Sequence: Synthetic oligonucleotide
  Sense strand starting at position 1840 of SEQ ID NO: 1883929
aaaguuguucuuggacacu

SEQ ID NO: 2227007 - RNA, 19 nt, Artificial Sequence
  Description of Artificial Sequence: Synthetic oligonucleotide
  Antisense strand to SEQ ID NO: 2227006
aguguccaagaacaacuuu

SEQ ID NO: 2227008 - RNA, 19 nt, Artificial Sequence
  Description of Artificial Sequence: Synthetic oligonucleotide
  Sense strand starting at position 1843 of SEQ ID NO: 1883929
guuguucuuggacacuaaa

SEQ ID NO: 2227009 - RNA, 19 nt, Artificial Sequence
  Description of Artificial Sequence: Synthetic oligonucleotide
  Antisense strand to SEQ ID NO: 2227008
uuuaguguccaagaacaac

SEQ ID NO: 2227010 - RNA, 19 nt, Artificial Sequence
  Description of Artificial Sequence: Synthetic oligonucleotide
  Sense strand starting at position 2191 of SEQ ID NO: 1883929
gaccuuugcgaggaagugu

SEQ ID NO: 2227011 - RNA, 19 nt, Artificial Sequence
  Description of Artificial Sequence: Synthetic oligonucleotide
  Antisense strand to SEQ ID NO: 2227010
acacuuccucgcaaagguc

SEQ ID NO: 2227012 - RNA, 19 nt, Artificial Sequence
  Description of Artificial Sequence: Synthetic oligonucleotide
  Sense strand starting at position 2693 of SEQ ID NO: 1883929
ggagguuucuuugugacug

SEQ ID NO: 2227013 - RNA, 19 nt, Artificial Sequence
  Description of Artificial Sequence: Synthetic oligonucleotide
  Antisense strand to SEQ ID NO: 2227012
cagucacaaagaaaccucc

SEQ ID NO: 2227014 - RNA, 19 nt, Artificial Sequence
  Description of Artificial Sequence: Synthetic oligonucleotide
  Sense strand starting at position 2739 of SEQ ID NO: 1883929
auugacugccucuaagauc

SEQ ID NO: 2227015 - RNA, 19 nt, Artificial Sequence
  Description of Artificial Sequence: Synthetic oligonucleotide
  Antisense strand to SEQ ID NO: 2227014
gaucuuagaggcagucaau

SEQ ID NO: 2227016 - RNA, 19 nt, Artificial Sequence
  Description of Artificial Sequence: Synthetic oligonucleotide
  Sense strand starting at position 2795 of SEQ ID NO: 1883929
ugaguuuggccuugaaaua

SEQ ID NO: 2227017 - RNA, 19 nt, Artificial Sequence
  Description of Artificial Sequence: Synthetic oligonucleotide
  Antisense strand to SEQ ID NO: 2227016
uauuucaaggccaaacuca

SEQ ID NO: 2227018 - RNA, 19 nt, Artificial Sequence
  Description of Artificial Sequence: Synthetic oligonucleotide
  Sense strand starting at position 2796 of SEQ ID NO: 1883929
gaguuuggccuugaaauac

SEQ ID NO: 2227019 - RNA, 19 nt, Artificial Sequence
  Description of Artificial Sequence: Synthetic oligonucleotide
  Antisense strand to SEQ ID NO: 2227018
guauuucaaggccaaacuc

SEQ ID NO: 2227020 - RNA, 19 nt, Artificial Sequence
  Description of Artificial Sequence: Synthetic oligonucleotide
  Sense strand starting at position 2840 of SEQ ID NO: 1883929
ggcuuuaaauuuccuguua

SEQ ID NO: 2227021 - RNA, 19 nt, Artificial Sequence
  Description of Artificial Sequence: Synthetic oligonucleotide
  Antisense strand to SEQ ID NO: 2227020
uaacaggaaauuuaaagcc

SEQ ID NO: 2227022 - RNA, 19 nt, Artificial Sequence
  Description of Artificial Sequence: Synthetic oligonucleotide
  Sense strand starting at position 3040 of SEQ ID NO: 1883929
ggagaagcuuaggcauaga

SEQ ID NO: 2227023 - RNA, 19 nt, Artificial Sequence
  Description of Artificial Sequence: Synthetic oligonucleotide
  Antisense strand to SEQ ID NO: 2227022
ucuaugccuaagcuucucc

SEQ ID NO: 2227024 - RNA, 19 nt, Artificial Sequence
  Description of Artificial Sequence: Synthetic oligonucleotide
  Sense strand starting at position 3399 of SEQ ID NO: 1883929
gccuuugucaaagaaucga

SEQ ID NO: 2227025 - RNA, 19 nt, Artificial Sequence
  Description of Artificial Sequence: Synthetic oligonucleotide
  Antisense strand to SEQ ID NO: 2227024
ucgauucuuugacaaaggc

SEQ ID NO: 2227026 - RNA, 19 nt, Artificial Sequence
  Description of Artificial Sequence: Synthetic oligonucleotide
  Sense strand starting at position 3550 of SEQ ID NO: 1883929
uaggguuaacuuggucuau

SEQ ID NO: 2227027 - RNA, 19 nt, Artificial Sequence
  Description of Artificial Sequence: Synthetic oligonucleotide
  Antisense strand to SEQ ID NO: 2227026
auagaccaaguuaacccua

SEQ ID NO: 2227028 - RNA, 19 nt, Artificial Sequence
  Description of Artificial Sequence: Synthetic oligonucleotide
  Sense strand starting at position 3551 of SEQ ID NO: 1883929
aggguuaacuuggucuaua

SEQ ID NO: 2227029 - RNA, 19 nt, Artificial Sequence
  Description of Artificial Sequence: Synthetic oligonucleotide
  Antisense strand to SEQ ID NO: 2227028
uauagaccaaguuaacccu

SEQ ID NO: 2227030 - RNA, 19 nt, Artificial Sequence
  Description of Artificial Sequence: Synthetic oligonucleotide
  Sense strand starting at position 3552 of SEQ ID NO: 1883929
ggguuaacuuggucuauag

SEQ ID NO: 2227031 - RNA, 19 nt, Artificial Sequence
  Description of Artificial Sequence: Synthetic oligonucleotide
  Antisense strand to SEQ ID NO: 2227030
cuauagaccaaguuaaccc

SEQ ID NO: 2227032 - RNA, 19 nt, Artificial Sequence
  Description of Artificial Sequence: Synthetic oligonucleotide
  Sense strand starting at position 3554 of SEQ ID NO: 1883929
guuaacuuggucuauaguu

SEQ ID NO: 2227033 - RNA, 19 nt, Artificial Sequence
  Description of Artificial Sequence: Synthetic oligonucleotide
  Antisense strand to SEQ ID NO: 2227032
aacuauagaccaaguuaac

SEQ ID NO: 2227034 - RNA, 19 nt, Artificial Sequence
  Description of Artificial Sequence: Synthetic oligonucleotide
  Sense strand starting at position 3625 of SEQ ID NO: 1883929
uguugugcucaagaugauu

SEQ ID NO: 2227035 - RNA, 19 nt, Artificial Sequence
  Description of Artificial Sequence: Synthetic oligonucleotide
  Antisense strand to SEQ ID NO: 2227034
aaucaucuugagcacaaca

SEQ ID NO: 2227036 - RNA, 19 nt, Artificial Sequence
  Description of Artificial Sequence: Synthetic oligonucleotide
  Sense strand starting at position 3717 of SEQ ID NO: 1883929
uguagcauuccugaggcau

SEQ ID NO: 2227037 - RNA, 19 nt, Artificial Sequence
  Description of Artificial Sequence: Synthetic oligonucleotide
  Antisense strand to SEQ ID NO: 2227036
augccucaggaaugcuaca

SEQ ID NO: 2227038 - RNA, 19 nt, Artificial Sequence
  Description of Artificial Sequence: Synthetic oligonucleotide
  Sense strand starting at position 3868 of SEQ ID NO: 1883929
uuugauucuugaguuggau

SEQ ID NO: 2227039 - RNA, 19 nt, Artificial Sequence
  Description of Artificial Sequence: Synthetic oligonucleotide
  Antisense strand to SEQ ID NO: 2227038
auccaacucaagaaucaaa

SEQ ID NO: 2227040 - RNA, 19 nt, Artificial Sequence
  Description of Artificial Sequence: Synthetic oligonucleotide
  Sense strand starting at position 3870 of SEQ ID NO: 1883929
ugauucuugaguuggauac

SEQ ID NO: 2227041 - RNA, 19 nt, Artificial Sequence
  Description of Artificial Sequence: Synthetic oligonucleotide
  Antisense strand to SEQ ID NO: 2227040
guauccaacucaagaauca

SEQ ID NO: 2227042 - RNA, 19 nt, Artificial Sequence
  Description of Artificial Sequence: Synthetic oligonucleotide
  Sense strand starting at position 3871 of SEQ ID NO: 1883929
gauucuugaguuggauaca

SEQ ID NO: 2227043 - RNA, 19 nt, Artificial Sequence
  Description of Artificial Sequence: Synthetic oligonucleotide
  Antisense strand to SEQ ID NO: 2227042
uguauccaacucaagaauc

SEQ ID NO: 2227044 - RNA, 19 nt, Artificial Sequence
  Description of Artificial Sequence: Synthetic oligonucleotide
  Sense strand starting at position 471 of SEQ ID NO: 1883930
agugaaugaugaguacuga

SEQ ID NO: 2227045 - RNA, 19 nt, Artificial Sequence
  Description of Artificial Sequence: Synthetic oligonucleotide
  Antisense strand to SEQ ID NO: 2227044
ucaguacucaucauucacu

SEQ ID NO: 2227046 - RNA, 19 nt, Artificial Sequence
  Description of Artificial Sequence: Synthetic oligonucleotide
  Sense strand starting at position 552 of SEQ ID NO: 1883930
aacuacguugucugugaaa

SEQ ID NO: 2227047 - RNA, 19 nt, Artificial Sequence
  Description of Artificial Sequence: Synthetic oligonucleotide
  Antisense strand to SEQ ID NO: 2227046
uuucacagacaacguaguu

SEQ ID NO: 2227048 - RNA, 19 nt, Artificial Sequence
  Description of Artificial Sequence: Synthetic oligonucleotide
  Sense strand starting at position 568 of SEQ ID NO: 1883930
aaaugagaauauuaggagu

SEQ ID NO: 2227049 - RNA, 19 nt, Artificial Sequence
  Description of Artificial Sequence: Synthetic oligonucleotide
  Antisense strand to SEQ ID NO: 2227048
acuccuaauauucucauuu

SEQ ID NO: 2227050 - RNA, 19 nt, Artificial Sequence
  Description of Artificial Sequence: Synthetic oligonucleotide
  Sense strand starting at position 639 of SEQ ID NO: 1883930
ucucauaagugagcuuuau

SEQ ID NO: 2227051 - RNA, 19 nt, Artificial Sequence
  Description of Artificial Sequence: Synthetic oligonucleotide
  Antisense strand to SEQ ID NO: 2227050
auaaagcucacuuaugaga

SEQ ID NO: 2227052 - RNA, 19 nt, Artificial Sequence
  Description of Artificial Sequence: Synthetic oligonucleotide
  Sense strand starting at position 795 of SEQ ID NO: 1883930
agguuagucagagaaugug

SEQ ID NO: 2227053 - RNA, 19 nt, Artificial Sequence
  Description of Artificial Sequence: Synthetic oligonucleotide
  Antisense strand to SEQ ID NO: 2227052
cacauucucugacuaaccu

SEQ ID NO: 2227054 - RNA, 19 nt, Artificial Sequence
  Description of Artificial Sequence: Synthetic oligonucleotide
  Sense strand starting at position 798 of SEQ ID NO: 1883930
uuagucagagaaugugaau

SEQ ID NO: 2227055 - RNA, 19 nt, Artificial Sequence
  Description of Artificial Sequence: Synthetic oligonucleotide
  Antisense strand to SEQ ID NO: 2227054
auucacauucucugacuaa

SEQ ID NO: 2227056 - RNA, 19 nt, Artificial Sequence
  Description of Artificial Sequence: Synthetic oligonucleotide
  Sense strand starting at position 891 of SEQ ID NO: 1883930
gcugguuagauuuguacua

SEQ ID NO: 2227057 - RNA, 19 nt, Artificial Sequence
  Description of Artificial Sequence: Synthetic oligonucleotide
  Antisense strand to SEQ ID NO: 2227056
uaguacaaaucuaaccagc

SEQ ID NO: 2227058 - RNA, 19 nt, Artificial Sequence
  Description of Artificial Sequence: Synthetic oligonucleotide
  Sense strand starting at position 1196 of SEQ ID NO: 1883930
aagucugauucugugauuc

SEQ ID NO: 2227059 - RNA, 19 nt, Artificial Sequence
  Description of Artificial Sequence: Synthetic oligonucleotide
  Antisense strand to SEQ ID NO: 2227058
gaaucacagaaucagacuu

SEQ ID NO: 2227060 - RNA, 19 nt, Artificial Sequence
  Description of Artificial Sequence: Synthetic oligonucleotide
  Sense strand starting at position 1200 of SEQ ID NO: 1883930
cugauucugugauucuuua

SEQ ID NO: 2227061 - RNA, 19 nt, Artificial Sequence
  Description of Artificial Sequence: Synthetic oligonucleotide
  Antisense strand to SEQ ID NO: 2227060
uaaagaaucacagaaucag

SEQ ID NO: 2227062 - RNA, 19 nt, Artificial Sequence
  Description of Artificial Sequence: Synthetic oligonucleotide
  Sense strand starting at position 1268 of SEQ ID NO: 1883930
uggugaacuuuguuuccua

SEQ ID NO: 2227063 - RNA, 19 nt, Artificial Sequence
  Description of Artificial Sequence: Synthetic oligonucleotide
  Antisense strand to SEQ ID NO: 2227062
uaggaaacaaaguucacca

SEQ ID NO: 2227064 - RNA, 19 nt, Artificial Sequence
  Description of Artificial Sequence: Synthetic oligonucleotide
  Sense strand starting at position 1269 of SEQ ID NO: 1883930
ggugaacuuuguuuccuau

SEQ ID NO: 2227065 - RNA, 19 nt, Artificial Sequence
  Description of Artificial Sequence: Synthetic oligonucleotide
  Antisense strand to SEQ ID NO: 2227064
auaggaaacaaaguucacc

SEQ ID NO: 2227066 - RNA, 19 nt, Artificial Sequence
  Description of Artificial Sequence: Synthetic oligonucleotide
  Sense strand starting at position 1282 of SEQ ID NO: 1883930
uccuauguuuaguuccuua

SEQ ID NO: 2227067 - RNA, 19 nt, Artificial Sequence
  Description of Artificial Sequence: Synthetic oligonucleotide
  Antisense strand to SEQ ID NO: 2227066
uaaggaacuaaacauagga

SEQ ID NO: 2227068 - RNA, 19 nt, Artificial Sequence
  Description of Artificial Sequence: Synthetic oligonucleotide
  Sense strand starting at position 1287 of SEQ ID NO: 1883930
uguuuaguuccuuauugua

SEQ ID NO: 2227069 - RNA, 19 nt, Artificial Sequence
  Description of Artificial Sequence: Synthetic oligonucleotide
  Antisense strand to SEQ ID NO: 2227068
uacaauaaggaacuaaaca

SEQ ID NO: 2227070 - RNA, 19 nt, Artificial Sequence
  Description of Artificial Sequence: Synthetic oligonucleotide
  Sense strand starting at position 1321 of SEQ ID NO: 1883930
guaaucaaaguguguuuau

SEQ ID NO: 2227071 - RNA, 19 nt, Artificial Sequence
  Description of Artificial Sequence: Synthetic oligonucleotide
  Antisense strand to SEQ ID NO: 2227070
auaaacacacuuugauuac

SEQ ID NO: 2227072 - RNA, 19 nt, Artificial Sequence
  Description of Artificial Sequence: Synthetic oligonucleotide
  Sense strand starting at position 1324 of SEQ ID NO: 1883930
aucaaaguguguuuauucu

SEQ ID NO: 2227073 - RNA, 19 nt, Artificial Sequence
  Description of Artificial Sequence: Synthetic oligonucleotide
  Antisense strand to SEQ ID NO: 2227072
agaauaaacacacuuugau

SEQ ID NO: 2227074 - RNA, 19 nt, Artificial Sequence
  Description of Artificial Sequence: Synthetic oligonucleotide
  Sense strand starting at position 1334 of SEQ ID NO: 1883930
guuuauucuguuugacuua

SEQ ID NO: 2227075 - RNA, 19 nt, Artificial Sequence
  Description of Artificial Sequence: Synthetic oligonucleotide
  Antisense strand to SEQ ID NO: 2227074
uaagucaaacagaauaaac

SEQ ID NO: 2227076 - RNA, 19 nt, Artificial Sequence
  Description of Artificial Sequence: Synthetic oligonucleotide
  Sense strand starting at position 1450 of SEQ ID NO: 1883930
cucucuuuaucuuugagga

SEQ ID NO: 2227077 - RNA, 19 nt, Artificial Sequence
  Description of Artificial Sequence: Synthetic oligonucleotide
  Antisense strand to SEQ ID NO: 2227076
uccucaaagauaaagagag

SEQ ID NO: 2227078 - RNA, 19 nt, Artificial Sequence
  Description of Artificial Sequence: Synthetic oligonucleotide
  Sense strand starting at position 1451 of SEQ ID NO: 1883930
ucucuuuaucuuugaggac

SEQ ID NO: 2227079 - RNA, 19 nt, Artificial Sequence
  Description of Artificial Sequence: Synthetic oligonucleotide
  Antisense strand to SEQ ID NO: 2227078
guccucaaagauaaagaga

SEQ ID NO: 2227080 - RNA, 19 nt, Artificial Sequence
  Description of Artificial Sequence: Synthetic oligonucleotide
  Sense strand starting at position 1625 of SEQ ID NO: 1883930
aagggaacacuguguaauu

SEQ ID NO: 2227081 - RNA, 19 nt, Artificial Sequence
  Description of Artificial Sequence: Synthetic oligonucleotide
  Antisense strand to SEQ ID NO: 2227080
aauuacacaguguucccuu

SEQ ID NO: 2227082 - RNA, 19 nt, Artificial Sequence
  Description of Artificial Sequence: Synthetic oligonucleotide
  Sense strand starting at position 1626 of SEQ ID NO: 1883930
agggaacacuguguaauua

SEQ ID NO: 2227083 - RNA, 19 nt, Artificial Sequence
  Description of Artificial Sequence: Synthetic oligonucleotide
  Antisense strand to SEQ ID NO: 2227082
uaauuacacaguguucccu

SEQ ID NO: 2227084 - RNA, 19 nt, Artificial Sequence
  Description of Artificial Sequence: Synthetic oligonucleotide
  Sense strand starting at position 1786 of SEQ ID NO: 1883930
cucucauaaugagauagaa

SEQ ID NO: 2227085 - RNA, 19 nt, Artificial Sequence
  Description of Artificial Sequence: Synthetic oligonucleotide
  Antisense strand to SEQ ID NO: 2227084
uucuaucucauuaugagag

SEQ ID NO: 2227086 - RNA, 19 nt, Artificial Sequence
  Description of Artificial Sequence: Synthetic oligonucleotide
  Sense strand starting at position 1815 of SEQ ID NO: 1883930
gucacauauccggaacaua

SEQ ID NO: 2227087 - RNA, 19 nt, Artificial Sequence
  Description of Artificial Sequence: Synthetic oligonucleotide
  Antisense strand to SEQ ID NO: 2227086
uauguuccggauaugugac

SEQ ID NO: 2227088 - RNA, 19 nt, Artificial Sequence
  Description of Artificial Sequence: Synthetic oligonucleotide
  Sense strand starting at position 1849 of SEQ ID NO: 1883930
uggccauuucuuuguguuu

SEQ ID NO: 2227089 - RNA, 19 nt, Artificial Sequence
  Description of Artificial Sequence: Synthetic oligonucleotide
  Antisense strand to SEQ ID NO: 2227088
aaacacaaagaaauggcca

SEQ ID NO: 2227090 - RNA, 19 nt, Artificial Sequence
  Description of Artificial Sequence: Synthetic oligonucleotide
  Sense strand starting at position 1995 of SEQ ID NO: 1883930
caaguuugauugucuaagu

SEQ ID NO: 2227091 - RNA, 19 nt, Artificial Sequence
  Description of Artificial Sequence: Synthetic oligonucleotide
  Antisense strand to SEQ ID NO: 2227090
acuuagacaaucaaacuug

SEQ ID NO: 2227092 - RNA, 19 nt, Artificial Sequence
  Description of Artificial Sequence: Synthetic oligonucleotide
  Sense strand starting at position 1996 of SEQ ID NO: 1883930
aaguuugauugucuaagug

SEQ ID NO: 2227093 - RNA, 19 nt, Artificial Sequence
  Description of Artificial Sequence: Synthetic oligonucleotide
  Antisense strand to SEQ ID NO: 2227092
cacuuagacaaucaaacuu

SEQ ID NO: 2227094 - RNA, 19 nt, Artificial Sequence
  Description of Artificial Sequence: Synthetic oligonucleotide
  Sense strand starting at position 2000 of SEQ ID NO: 1883930
uugauugucuaaguggaau

SEQ ID NO: 2227095 - RNA, 19 nt, Artificial Sequence
  Description of Artificial Sequence: Synthetic oligonucleotide
  Antisense strand to SEQ ID NO: 2227094
auuccacuuagacaaucaa

SEQ ID NO: 2227096 - RNA, 19 nt, Artificial Sequence
  Description of Artificial Sequence: Synthetic oligonucleotide
  Sense strand starting at position 2002 of SEQ ID NO: 1883930
gauugucuaaguggaaugu

SEQ ID NO: 2227097 - RNA, 19 nt, Artificial Sequence
  Description of Artificial Sequence: Synthetic oligonucleotide
  Antisense strand to SEQ ID NO: 2227096
acauuccacuuagacaauc

SEQ ID NO: 2227098 - RNA, 19 nt, Artificial Sequence
  Description of Artificial Sequence: Synthetic oligonucleotide
  Sense strand starting at position 2586 of SEQ ID NO: 1883930
ugcucagcccaguaagauu

SEQ ID NO: 2227099 - RNA, 19 nt, Artificial Sequence
  Description of Artificial Sequence: Synthetic oligonucleotide
  Antisense strand to SEQ ID NO: 2227098
aaucuuacugggcugagca

SEQ ID NO: 2227100 - RNA, 19 nt, Artificial Sequence
  Description of Artificial Sequence: Synthetic oligonucleotide
  Sense strand starting at position 2631 of SEQ ID NO: 1883930
uuuauuucccggcguccua

SEQ ID NO: 2227101 - RNA, 19 nt, Artificial Sequence
  Description of Artificial Sequence: Synthetic oligonucleotide
  Antisense strand to SEQ ID NO: 2227100
uaggacgccgggaaauaaa

SEQ ID NO: 2227102 - RNA, 19 nt, Artificial Sequence
  Description of Artificial Sequence: Synthetic oligonucleotide
  Sense strand starting at position 2964 of SEQ ID NO: 1883930
uaguuauaaguagggagau

SEQ ID NO: 2227103 - RNA, 19 nt, Artificial Sequence
  Description of Artificial Sequence: Synthetic oligonucleotide
  Antisense strand to SEQ ID NO: 2227102
aucucccuacuuauaacua

SEQ ID NO: 2227104 - RNA, 19 nt, Artificial Sequence
  Description of Artificial Sequence: Synthetic oligonucleotide
  Sense strand starting at position 3075 of SEQ ID NO: 1883930
gggaccugguguuucaaau

SEQ ID NO: 2227105 - RNA, 19 nt, Artificial Sequence
  Description of Artificial Sequence: Synthetic oligonucleotide
  Antisense strand to SEQ ID NO: 2227104
auuugaaacaccagguccc

SEQ ID NO: 2227106 - RNA, 19 nt, Artificial Sequence
  Description of Artificial Sequence: Synthetic oligonucleotide
  Sense strand starting at position 3233 of SEQ ID NO: 1883930
ggagccucuuauguuauua

SEQ ID NO: 2227107 - RNA, 19 nt, Artificial Sequence
  Description of Artificial Sequence: Synthetic oligonucleotide
  Antisense strand to SEQ ID NO: 2227106
uaauaacauaagaggcucc

SEQ ID NO: 2227108 - RNA, 19 nt, Artificial Sequence
  Description of Artificial Sequence: Synthetic oligonucleotide
  Sense strand starting at position 3389 of SEQ ID NO: 1883930
acuacauucuauguaguaa

SEQ ID NO: 2227109 - RNA, 19 nt, Artificial Sequence
  Description of Artificial Sequence: Synthetic oligonucleotide
  Antisense strand to SEQ ID NO: 2227108
uuacuacauagaauguagu

SEQ ID NO: 2227110 - RNA, 19 nt, Artificial Sequence
  Description of Artificial Sequence: Synthetic oligonucleotide
  Sense strand starting at position 3439 of SEQ ID NO: 1883930
uguguauagacauaaaugu

SEQ ID NO: 2227111 - RNA, 19 nt, Artificial Sequence
  Description of Artificial Sequence: Synthetic oligonucleotide
  Antisense strand to SEQ ID NO: 2227110
acauuuaugucuauacaca

SEQ ID NO: 2227112 - RNA, 19 nt, Artificial Sequence
  Description of Artificial Sequence: Synthetic oligonucleotide
  Sense strand starting at position 3456 of SEQ ID NO: 1883930
guauuauguaaaugugagu

SEQ ID NO: 2227113 - RNA, 19 nt, Artificial Sequence
  Description of Artificial Sequence: Synthetic oligonucleotide
  Antisense strand to SEQ ID NO: 2227112
acucacauuuacauaauac

SEQ ID NO: 2227114 - RNA, 19 nt, Artificial Sequence
  Description of Artificial Sequence: Synthetic oligonucleotide
  Sense strand starting at position 3461 of SEQ ID NO: 1883930
auguaaaugugaguuacag

SEQ ID NO: 2227115 - RNA, 19 nt, Artificial Sequence
  Description of Artificial Sequence: Synthetic oligonucleotide
  Antisense strand to SEQ ID NO: 2227114
cuguaacucacauuuacau

SEQ ID NO: 2227116 - RNA, 19 nt, Artificial Sequence
  Description of Artificial Sequence: Synthetic oligonucleotide
  Sense strand starting at position 3470 of SEQ ID NO: 1883930
ugaguuacagccuaaagug

SEQ ID NO: 2227117 - RNA, 19 nt, Artificial Sequence
  Description of Artificial Sequence: Synthetic oligonucleotide
  Antisense strand to SEQ ID NO: 2227116
cacuuuaggcuguaacuca

SEQ ID NO: 2227118 - RNA, 19 nt, Artificial Sequence
  Description of Artificial Sequence: Synthetic oligonucleotide
  Sense strand starting at position 3796 of SEQ ID NO: 1883930
uaaagugugggucacagua

SEQ ID NO: 2227119 - RNA, 19 nt, Artificial Sequence
  Description of Artificial Sequence: Synthetic oligonucleotide
  Antisense strand to SEQ ID NO: 2227118
uacugugacccacacuuua

SEQ ID NO: 2227120 - RNA, 19 nt, Artificial Sequence
  Description of Artificial Sequence: Synthetic oligonucleotide
  Sense strand starting at position 3883 of SEQ ID NO: 1883930
auugaaauguguuuccaag

SEQ ID NO: 2227121 - RNA, 19 nt, Artificial Sequence
  Description of Artificial Sequence: Synthetic oligonucleotide
  Antisense strand to SEQ ID NO: 2227120
cuuggaaacacauuucaau

SEQ ID NO: 2227122 - RNA, 19 nt, Artificial Sequence
  Description of Artificial Sequence: Synthetic oligonucleotide
  Sense strand starting at position 3889 of SEQ ID NO: 1883930
auguguuuccaagguaacu

SEQ ID NO: 2227123 - RNA, 19 nt, Artificial Sequence
  Description of Artificial Sequence: Synthetic oligonucleotide
  Antisense strand to SEQ ID NO: 2227122
aguuaccuuggaaacacau

SEQ ID NO: 2227124 - RNA, 19 nt, Artificial Sequence
  Description of Artificial Sequence: Synthetic oligonucleotide
  Sense strand starting at position 442 of SEQ ID NO: 1883931
aguaauuccucuucucagu

SEQ ID NO: 2227125 - RNA, 19 nt, Artificial Sequence
  Description of Artificial Sequence: Synthetic oligonucleotide
  Antisense strand to SEQ ID NO: 2227124
acugagaagaggaauuacu

SEQ ID NO: 2227126 - RNA, 19 nt, Artificial Sequence
  Description of Artificial Sequence: Synthetic oligonucleotide
  Sense strand starting at position 557 of SEQ ID NO: 1883931
acauaaaugucugucagug

SEQ ID NO: 2227127 - RNA, 19 nt, Artificial Sequence
  Description of Artificial Sequence: Synthetic oligonucleotide
  Antisense strand to SEQ ID NO: 2227126
cacugacagacauuuaugu

SEQ ID NO: 2227128 - RNA, 19 nt, Artificial Sequence
  Description of Artificial Sequence: Synthetic oligonucleotide
  Sense strand starting at position 588 of SEQ ID NO: 1883931
aagaaauugugagcugauc

SEQ ID NO: 2227129 - RNA, 19 nt, Artificial Sequence
  Description of Artificial Sequence: Synthetic oligonucleotide
  Antisense strand to SEQ ID NO: 2227128
gaucagcucacaauuucuu

SEQ ID NO: 2227130 - RNA, 19 nt, Artificial Sequence
  Description of Artificial Sequence: Synthetic oligonucleotide
  Sense strand starting at position 724 of SEQ ID NO: 1883931
uguauaaauuauccaggca

SEQ ID NO: 2227131 - RNA, 19 nt, Artificial Sequence
  Description of Artificial Sequence: Synthetic oligonucleotide
  Antisense strand to SEQ ID NO: 2227130
ugccuggauaauuuauaca

SEQ ID NO: 2227132 - RNA, 19 nt, Artificial Sequence
  Description of Artificial Sequence: Synthetic oligonucleotide
  Sense strand starting at position 891 of SEQ ID NO: 1883931
ucucauguauaucuuguau

SEQ ID NO: 2227133 - RNA, 19 nt, Artificial Sequence
  Description of Artificial Sequence: Synthetic oligonucleotide
  Antisense strand to SEQ ID NO: 2227132
auacaagauauacaugaga

SEQ ID NO: 2227134 - RNA, 19 nt, Artificial Sequence
  Description of Artificial Sequence: Synthetic oligonucleotide
  Sense strand starting at position 1066 of SEQ ID NO: 1883931
acaugcugucuauguagaa

SEQ ID NO: 2227135 - RNA, 19 nt, Artificial Sequence
  Description of Artificial Sequence: Synthetic oligonucleotide
  Antisense strand to SEQ ID NO: 2227134
uucuacauagacagcaugu

SEQ ID NO: 2227136 - RNA, 19 nt, Artificial Sequence
  Description of Artificial Sequence: Synthetic oligonucleotide
  Sense strand starting at position 1067 of SEQ ID NO: 1883931
caugcugucuauguagaaa

SEQ ID NO: 2227137 - RNA, 19 nt, Artificial Sequence
  Description of Artificial Sequence: Synthetic oligonucleotide
  Antisense strand to SEQ ID NO: 2227136
uuucuacauagacagcaug

SEQ ID NO: 2227138 - RNA, 19 nt, Artificial Sequence
  Description of Artificial Sequence: Synthetic oligonucleotide
  Sense strand starting at position 1070 of SEQ ID NO: 1883931
gcugucuauguagaaaucu

SEQ ID NO: 2227139 - RNA, 19 nt, Artificial Sequence
  Description of Artificial Sequence: Synthetic oligonucleotide
  Antisense strand to SEQ ID NO: 2227138
agauuucuacauagacagc

SEQ ID NO: 2227140 - RNA, 19 nt, Artificial Sequence
  Description of Artificial Sequence: Synthetic oligonucleotide
  Sense strand starting at position 1202 of SEQ ID NO: 1883931
auugcaauuguguaguaug

SEQ ID NO: 2227141 - RNA, 19 nt, Artificial Sequence
  Description of Artificial Sequence: Synthetic oligonucleotide
  Antisense strand to SEQ ID NO: 2227140
cauacuacacaauugcaau

SEQ ID NO: 2227142 - RNA, 19 nt, Artificial Sequence
  Description of Artificial Sequence: Synthetic oligonucleotide
  Sense strand starting at position 1259 of SEQ ID NO: 1883931
agccaauaagauuguauug

SEQ ID NO: 2227143 - RNA, 19 nt, Artificial Sequence
  Description of Artificial Sequence: Synthetic oligonucleotide
  Antisense strand to SEQ ID NO: 2227142
caauacaaucuuauuggcu

SEQ ID NO: 2227144 - RNA, 19 nt, Artificial Sequence
  Description of Artificial Sequence: Synthetic oligonucleotide
  Sense strand starting at position 1268 of SEQ ID NO: 1883931
gauuguauuguguacugga

SEQ ID NO: 2227145 - RNA, 19 nt, Artificial Sequence
  Description of Artificial Sequence: Synthetic oligonucleotide
  Antisense strand to SEQ ID NO: 2227144
uccaguacacaauacaauc

SEQ ID NO: 2227146 - RNA, 19 nt, Artificial Sequence
  Description of Artificial Sequence: Synthetic oligonucleotide
  Sense strand starting at position 1337 of SEQ ID NO: 1883931
gucuaagaugauggauauu

SEQ ID NO: 2227147 - RNA, 19 nt, Artificial Sequence
  Description of Artificial Sequence: Synthetic oligonucleotide
  Antisense strand to SEQ ID NO: 2227146
aauauccaucaucuuagac

SEQ ID NO: 2227148 - RNA, 19 nt, Artificial Sequence
  Description of Artificial Sequence: Synthetic oligonucleotide
  Sense strand starting at position 1353 of SEQ ID NO: 1883931
auugaaauugcuuaccugu

SEQ ID NO: 2227149 - RNA, 19 nt, Artificial Sequence
  Description of Artificial Sequence: Synthetic oligonucleotide
  Antisense strand to SEQ ID NO: 2227148
acagguaagcaauuucaau

SEQ ID NO: 2227150 - RNA, 19 nt, Artificial Sequence
  Description of Artificial Sequence: Synthetic oligonucleotide
  Sense strand starting at position 1470 of SEQ ID NO: 1883931
acuguuaagccauggaacu

SEQ ID NO: 2227151 - RNA, 19 nt, Artificial Sequence
  Description of Artificial Sequence: Synthetic oligonucleotide
  Antisense strand to SEQ ID NO: 2227150
aguuccauggcuuaacagu

SEQ ID NO: 2227152 - RNA, 19 nt, Artificial Sequence
  Description of Artificial Sequence: Synthetic oligonucleotide
  Sense strand starting at position 1543 of SEQ ID NO: 1883931
cagaauugaugguccaguu

SEQ ID NO: 2227153 - RNA, 19 nt, Artificial Sequence
  Description of Artificial Sequence: Synthetic oligonucleotide
  Antisense strand to SEQ ID NO: 2227152
aacuggaccaucaauucug

SEQ ID NO: 2227154 - RNA, 19 nt, Artificial Sequence
  Description of Artificial Sequence: Synthetic oligonucleotide
  Sense strand starting at position 1558 of SEQ ID NO: 1883931
aguuuacaagagugaauga

SEQ ID NO: 2227155 - RNA, 19 nt, Artificial Sequence
  Description of Artificial Sequence: Synthetic oligonucleotide
  Antisense strand to SEQ ID NO: 2227154
ucauucacucuuguaaacu

SEQ ID NO: 2227156 - RNA, 19 nt, Artificial Sequence
  Description of Artificial Sequence: Synthetic oligonucleotide
  Sense strand starting at position 1571 of SEQ ID NO: 1883931
gaaugaaggucacuguuga

SEQ ID NO: 2227157 - RNA, 19 nt, Artificial Sequence
  Description of Artificial Sequence: Synthetic oligonucleotide
  Antisense strand to SEQ ID NO: 2227156
ucaacagugaccuucauuc

SEQ ID NO: 2227158 - RNA, 19 nt, Artificial Sequence
  Description of Artificial Sequence: Synthetic oligonucleotide
  Sense strand starting at position 1586 of SEQ ID NO: 1883931
uugacacugcuggaucaau

SEQ ID NO: 2227159 - RNA, 19 nt, Artificial Sequence
  Description of Artificial Sequence: Synthetic oligonucleotide
  Antisense strand to SEQ ID NO: 2227158
auugauccagcagugucaa

SEQ ID NO: 2227160 - RNA, 19 nt, Artificial Sequence
  Description of Artificial Sequence: Synthetic oligonucleotide
  Sense strand starting at position 1639 of SEQ ID NO: 1883931
gcugcuguugaguaauaug

SEQ ID NO: 2227161 - RNA, 19 nt, Artificial Sequence
  Description of Artificial Sequence: Synthetic oligonucleotide
  Antisense strand to SEQ ID NO: 2227160
cauauuacucaacagcagc

SEQ ID NO: 2227162 - RNA, 19 nt, Artificial Sequence
  Description of Artificial Sequence: Synthetic oligonucleotide
  Sense strand starting at position 1644 of SEQ ID NO: 1883931
uguugaguaauaugaugaa

SEQ ID NO: 2227163 - RNA, 19 nt, Artificial Sequence
  Description of Artificial Sequence: Synthetic oligonucleotide
  Antisense strand to SEQ ID NO: 2227162
uucaucauauuacucaaca

SEQ ID NO: 2227164 - RNA, 19 nt, Artificial Sequence
  Description of Artificial Sequence: Synthetic oligonucleotide
  Sense strand starting at position 1659 of SEQ ID NO: 1883931
ugaacacuucccggcuuua

SEQ ID NO: 2227165 - RNA, 19 nt, Artificial Sequence
  Description of Artificial Sequence: Synthetic oligonucleotide
  Antisense strand to SEQ ID NO: 2227164
uaaagccgggaaguguuca

SEQ ID NO: 2227166 - RNA, 19 nt, Artificial Sequence
  Description of Artificial Sequence: Synthetic oligonucleotide
  Sense strand starting at position 1688 of SEQ ID NO: 1883931
ucucaugagcuuuguaaau

SEQ ID NO: 2227167 - RNA, 19 nt, Artificial Sequence
  Description of Artificial Sequence: Synthetic oligonucleotide
  Antisense strand to SEQ ID NO: 2227166
auuuacaaagcucaugaga

SEQ ID NO: 2227168 - RNA, 19 nt, Artificial Sequence
  Description of Artificial Sequence: Synthetic oligonucleotide
  Sense strand starting at position 1744 of SEQ ID NO: 1883931
uuaucacugucagcuauga

SEQ ID NO: 2227169 - RNA, 19 nt, Artificial Sequence
  Description of Artificial Sequence: Synthetic oligonucleotide
  Antisense strand to SEQ ID NO: 2227168
ucauagcugacagugauaa

SEQ ID NO: 2227170 - RNA, 19 nt, Artificial Sequence
  Description of Artificial Sequence: Synthetic oligonucleotide
  Sense strand starting at position 1788 of SEQ ID NO: 1883931
guuguauugaaucaguguu

SEQ ID NO: 2227171 - RNA, 19 nt, Artificial Sequence
  Description of Artificial Sequence: Synthetic oligonucleotide
  Antisense strand to SEQ ID NO: 2227170
aacacugauucaauacaac

SEQ ID NO: 2227172 - RNA, 19 nt, Artificial Sequence
  Description of Artificial Sequence: Synthetic oligonucleotide
  Sense strand starting at position 1794 of SEQ ID NO: 1883931
uugaaucaguguuucuaca

SEQ ID NO: 2227173 - RNA, 19 nt, Artificial Sequence
  Description of Artificial Sequence: Synthetic oligonucleotide
  Antisense strand to SEQ ID NO: 2227172
uguagaaacacugauucaa

SEQ ID NO: 2227174 - RNA, 19 nt, Artificial Sequence
  Description of Artificial Sequence: Synthetic oligonucleotide
  Sense strand starting at position 1836 of SEQ ID NO: 1883931
guaauuguuccaugaagac

SEQ ID NO: 2227175 - RNA, 19 nt, Artificial Sequence
  Description of Artificial Sequence: Synthetic oligonucleotide
  Antisense strand to SEQ ID NO: 2227174
gucuucauggaacaauuac

SEQ ID NO: 2227176 - RNA, 19 nt, Artificial Sequence
  Description of Artificial Sequence: Synthetic oligonucleotide
  Sense strand starting at position 2291 of SEQ ID NO: 1883931
gggaacaucugucugcuua

SEQ ID NO: 2227177 - RNA, 19 nt, Artificial Sequence
  Description of Artificial Sequence: Synthetic oligonucleotide
  Antisense strand to SEQ ID NO: 2227176
uaagcagacagauguuccc

SEQ ID NO: 2227178 - RNA, 19 nt, Artificial Sequence
  Description of Artificial Sequence: Synthetic oligonucleotide
  Sense strand starting at position 2292 of SEQ ID NO: 1883931
ggaacaucugucugcuuau

SEQ ID NO: 2227179 - RNA, 19 nt, Artificial Sequence
  Description of Artificial Sequence: Synthetic oligonucleotide
  Antisense strand to SEQ ID NO: 2227178
auaagcagacagauguucc

SEQ ID NO: 2227180 - RNA, 19 nt, Artificial Sequence
  Description of Artificial Sequence: Synthetic oligonucleotide
  Sense strand starting at position 2333 of SEQ ID NO: 1883931
agaaucaugugccuuguua

SEQ ID NO: 2227181 - RNA, 19 nt, Artificial Sequence
  Description of Artificial Sequence: Synthetic oligonucleotide
  Antisense strand to SEQ ID NO: 2227180
uaacaaggcacaugauucu

SEQ ID NO: 2227182 - RNA, 19 nt, Artificial Sequence
  Description of Artificial Sequence: Synthetic oligonucleotide
  Sense strand starting at position 2344 of SEQ ID NO: 1883931
ccuuguuauuaguugacua

SEQ ID NO: 2227183 - RNA, 19 nt, Artificial Sequence
  Description of Artificial Sequence: Synthetic oligonucleotide
  Antisense strand to SEQ ID NO: 2227182
uagucaacuaauaacaagg

SEQ ID NO: 2227184 - RNA, 19 nt, Artificial Sequence
  Description of Artificial Sequence: Synthetic oligonucleotide
  Sense strand starting at position 2346 of SEQ ID NO: 1883931
uuguuauuaguugacuacu

SEQ ID NO: 2227185 - RNA, 19 nt, Artificial Sequence
  Description of Artificial Sequence: Synthetic oligonucleotide
  Antisense strand to SEQ ID NO: 2227184
aguagucaacuaauaacaa

SEQ ID NO: 2227186 - RNA, 19 nt, Artificial Sequence
  Description of Artificial Sequence: Synthetic oligonucleotide
  Sense strand starting at position 2348 of SEQ ID NO: 1883931
guuauuaguugacuacuga

SEQ ID NO: 2227187 - RNA, 19 nt, Artificial Sequence
  Description of Artificial Sequence: Synthetic oligonucleotide
  Antisense strand to SEQ ID NO: 2227186
ucaguagucaacuaauaac

SEQ ID NO: 2227188 - RNA, 19 nt, Artificial Sequence
  Description of Artificial Sequence: Synthetic oligonucleotide
  Sense strand starting at position 2349 of SEQ ID NO: 1883931
uuauuaguugacuacugau

SEQ ID NO: 2227189 - RNA, 19 nt, Artificial Sequence
  Description of Artificial Sequence: Synthetic oligonucleotide
  Antisense strand to SEQ ID NO: 2227188
aucaguagucaacuaauaa

SEQ ID NO: 2227190 - RNA, 19 nt, Artificial Sequence
  Description of Artificial Sequence: Synthetic oligonucleotide
  Sense strand starting at position 2495 of SEQ ID NO: 1883931
ugguaaauaucuuuccuug

SEQ ID NO: 2227191 - RNA, 19 nt, Artificial Sequence
  Description of Artificial Sequence: Synthetic oligonucleotide
  Antisense strand to SEQ ID NO: 2227190
caaggaaagauauuuacca

SEQ ID NO: 2227192 - RNA, 19 nt, Artificial Sequence
  Description of Artificial Sequence: Synthetic oligonucleotide
  Sense strand starting at position 3446 of SEQ ID NO: 1883931
gcucguagacaauacguaa

SEQ ID NO: 2227193 - RNA, 19 nt, Artificial Sequence
  Description of Artificial Sequence: Synthetic oligonucleotide
  Antisense strand to SEQ ID NO: 2227192
uuacguauugucuacgagc

SEQ ID NO: 2227194 - RNA, 19 nt, Artificial Sequence
  Description of Artificial Sequence: Synthetic oligonucleotide
  Sense strand starting at position 3492 of SEQ ID NO: 1883931
aagcuuuaaggaugcugaa

SEQ ID NO: 2227195 - RNA, 19 nt, Artificial Sequence
  Description of Artificial Sequence: Synthetic oligonucleotide
  Antisense strand to SEQ ID NO: 2227194
uucagcauccuuaaagcuu

SEQ ID NO: 2227196 - RNA, 19 nt, Artificial Sequence
  Description of Artificial Sequence: Synthetic oligonucleotide
  Sense strand starting at position 3658 of SEQ ID NO: 1883931
ccuauucuagugugacaga

SEQ ID NO: 2227197 - RNA, 19 nt, Artificial Sequence
  Description of Artificial Sequence: Synthetic oligonucleotide
  Antisense strand to SEQ ID NO: 2227196
ucugucacacuagaauagg

SEQ ID NO: 2227198 - RNA, 19 nt, Artificial Sequence
  Description of Artificial Sequence: Synthetic oligonucleotide
  Sense strand starting at position 3673 of SEQ ID NO: 1883931
cagauaugcugaguuggga

SEQ ID NO: 2227199 - RNA, 19 nt, Artificial Sequence
  Description of Artificial Sequence: Synthetic oligonucleotide
  Antisense strand to SEQ ID NO: 2227198
ucccaacucagcauaucug

SEQ ID NO: 2227200 - RNA, 19 nt, Artificial Sequence
  Description of Artificial Sequence: Synthetic oligonucleotide
  Sense strand starting at position 3692 of SEQ ID NO: 1883931
gcaaauauauuguugguua

SEQ ID NO: 2227201 - RNA, 19 nt, Artificial Sequence
  Description of Artificial Sequence: Synthetic oligonucleotide
  Antisense strand to SEQ ID NO: 2227200
uaaccaacaauauauuugc

SEQ ID NO: 2227202 - RNA, 19 nt, Artificial Sequence
  Description of Artificial Sequence: Synthetic oligonucleotide
  Sense strand starting at position 3699 of SEQ ID NO: 1883931
uauuguugguuaguaauga

SEQ ID NO: 2227203 - RNA, 19 nt, Artificial Sequence
  Description of Artificial Sequence: Synthetic oligonucleotide
  Antisense strand to SEQ ID NO: 2227202
ucauuacuaaccaacaaua

SEQ ID NO: 2227204 - RNA, 19 nt, Artificial Sequence
  Description of Artificial Sequence: Synthetic oligonucleotide
  Sense strand starting at position 424 of SEQ ID NO: 1883932
gaugcuaucuuauuguagu

SEQ ID NO: 2227205 - RNA, 19 nt, Artificial Sequence
  Description of Artificial Sequence: Synthetic oligonucleotide
  Antisense strand to SEQ ID NO: 2227204
acuacaauaagauagcauc

SEQ ID NO: 2227206 - RNA, 19 nt, Artificial Sequence
  Description of Artificial Sequence: Synthetic oligonucleotide
  Sense strand starting at position 565 of SEQ ID NO: 1883932
uuagacugcuuccuagaga

SEQ ID NO: 2227207 - RNA, 19 nt, Artificial Sequence
  Description of Artificial Sequence: Synthetic oligonucleotide
  Antisense strand to SEQ ID NO: 2227206
ucucuaggaagcagucuaa

SEQ ID NO: 2227208 - RNA, 19 nt, Artificial Sequence
  Description of Artificial Sequence: Synthetic oligonucleotide
  Sense strand starting at position 568 of SEQ ID NO: 1883932
gacugcuuccuagagaguu

SEQ ID NO: 2227209 - RNA, 19 nt, Artificial Sequence
  Description of Artificial Sequence: Synthetic oligonucleotide
  Antisense strand to SEQ ID NO: 2227208
aacucucuaggaagcaguc

SEQ ID NO: 2227210 - RNA, 19 nt, Artificial Sequence
  Description of Artificial Sequence: Synthetic oligonucleotide
  Sense strand starting at position 758 of SEQ ID NO: 1883932
cuguuugugagguauuacu

SEQ ID NO: 2227211 - RNA, 19 nt, Artificial Sequence
  Description of Artificial Sequence: Synthetic oligonucleotide
  Antisense strand to SEQ ID NO: 2227210
aguaauaccucacaaacag

SEQ ID NO: 2227212 - RNA, 19 nt, Artificial Sequence
  Description of Artificial Sequence: Synthetic oligonucleotide
  Sense strand starting at position 779 of SEQ ID NO: 1883932
ggaaaucuuugcccacucu

SEQ ID NO: 2227213 - RNA, 19 nt, Artificial Sequence
  Description of Artificial Sequence: Synthetic oligonucleotide
  Antisense strand to SEQ ID NO: 2227212
agagugggcaaagauuucc

SEQ ID NO: 2227214 - RNA, 19 nt, Artificial Sequence
  Description of Artificial Sequence: Synthetic oligonucleotide
  Sense strand starting at position 928 of SEQ ID NO: 1883932
ucugcauacggguaucagu

SEQ ID NO: 2227215 - RNA, 19 nt, Artificial Sequence
  Description of Artificial Sequence: Synthetic oligonucleotide
  Antisense strand to SEQ ID NO: 2227214
acugauacccguaugcaga

SEQ ID NO: 2227216 - RNA, 19 nt, Artificial Sequence
  Description of Artificial Sequence: Synthetic oligonucleotide
  Sense strand starting at position 996 of SEQ ID NO: 1883932
uuugguaccuuugcugaaa

SEQ ID NO: 2227217 - RNA, 19 nt, Artificial Sequence
  Description of Artificial Sequence: Synthetic oligonucleotide
  Antisense strand to SEQ ID NO: 2227216
uuucagcaaagguaccaaa

SEQ ID NO: 2227218 - RNA, 19 nt, Artificial Sequence
  Description of Artificial Sequence: Synthetic oligonucleotide
  Sense strand starting at position 1097 of SEQ ID NO: 1883932
uuacuauaacucuguugua

SEQ ID NO: 2227219 - RNA, 19 nt, Artificial Sequence
  Description of Artificial Sequence: Synthetic oligonucleotide
  Antisense strand to SEQ ID NO: 2227218
uacaacagaguuauaguaa

SEQ ID NO: 2227220 - RNA, 19 nt, Artificial Sequence
  Description of Artificial Sequence: Synthetic oligonucleotide
  Sense strand starting at position 1116 of SEQ ID NO: 1883932
uaaucugaagucggguaau

SEQ ID NO: 2227221 - RNA, 19 nt, Artificial Sequence
  Description of Artificial Sequence: Synthetic oligonucleotide
  Antisense strand to SEQ ID NO: 2227220
auuacccgacuucagauua

SEQ ID NO: 2227222 - RNA, 19 nt, Artificial Sequence
  Description of Artificial Sequence: Synthetic oligonucleotide
  Sense strand starting at position 1229 of SEQ ID NO: 1883932
gacugugaagaaugucacu

SEQ ID NO: 2227223 - RNA, 19 nt, Artificial Sequence
  Description of Artificial Sequence: Synthetic oligonucleotide
  Antisense strand to SEQ ID NO: 2227222
agugacauucuucacaguc

SEQ ID NO: 2227224 - RNA, 19 nt, Artificial Sequence
  Description of Artificial Sequence: Synthetic oligonucleotide
  Sense strand starting at position 1259 of SEQ ID NO: 1883932
ggagguugcauugauaccu

SEQ ID NO: 2227225 - RNA, 19 nt, Artificial Sequence
  Description of Artificial Sequence: Synthetic oligonucleotide
  Antisense strand to SEQ ID NO: 2227224
agguaucaaugcaaccucc

SEQ ID NO: 2227226 - RNA, 19 nt, Artificial Sequence
  Description of Artificial Sequence: Synthetic oligonucleotide
  Sense strand starting at position 1334 of SEQ ID NO: 1883932
agaguacuaguuuauucuu

SEQ ID NO: 2227227 - RNA, 19 nt, Artificial Sequence
  Description of Artificial Sequence: Synthetic oligonucleotide
  Antisense strand to SEQ ID NO: 2227226
aagaauaaacuaguacucu

SEQ ID NO: 2227228 - RNA, 19 nt, Artificial Sequence
  Description of Artificial Sequence: Synthetic oligonucleotide
  Sense strand starting at position 1357 of SEQ ID NO: 1883932
ccaggugaugcuugguaaa

SEQ ID NO: 2227229 - RNA, 19 nt, Artificial Sequence
  Description of Artificial Sequence: Synthetic oligonucleotide
  Antisense strand to SEQ ID NO: 2227228
uuuaccaagcaucaccugg

SEQ ID NO: 2227230 - RNA, 19 nt, Artificial Sequence
  Description of Artificial Sequence: Synthetic oligonucleotide
  Sense strand starting at position 1359 of SEQ ID NO: 1883932
aggugaugcuugguaaaga

SEQ ID NO: 2227231 - RNA, 19 nt, Artificial Sequence
  Description of Artificial Sequence: Synthetic oligonucleotide
  Antisense strand to SEQ ID NO: 2227230
ucuuuaccaagcaucaccu

SEQ ID NO: 2227232 - RNA, 19 nt, Artificial Sequence
  Description of Artificial Sequence: Synthetic oligonucleotide
  Sense strand starting at position 1376 of SEQ ID NO: 1883932
gaaagaaauggcgguggau

SEQ ID NO: 2227233 - RNA, 19 nt, Artificial Sequence
  Description of Artificial Sequence: Synthetic oligonucleotide
  Antisense strand to SEQ ID NO: 2227232
auccaccgccauuucuuuc

SEQ ID NO: 2227234 - RNA, 19 nt, Artificial Sequence
  Description of Artificial Sequence: Synthetic oligonucleotide
  Sense strand starting at position 1435 of SEQ ID NO: 1883932
cuaagagacucguaaggaa

SEQ ID NO: 2227235 - RNA, 19 nt, Artificial Sequence
  Description of Artificial Sequence: Synthetic oligonucleotide
  Antisense strand to SEQ ID NO: 2227234
uuccuuacgagucucuuag

SEQ ID NO: 2227236 - RNA, 19 nt, Artificial Sequence
  Description of Artificial Sequence: Synthetic oligonucleotide
  Sense strand starting at position 1582 of SEQ ID NO: 1883932
agaauuuggugucagaacu

SEQ ID NO: 2227237 - RNA, 19 nt, Artificial Sequence
  Description of Artificial Sequence: Synthetic oligonucleotide
  Antisense strand to SEQ ID NO: 2227236
aguucugacaccaaauucu

SEQ ID NO: 2227238 - RNA, 19 nt, Artificial Sequence
  Description of Artificial Sequence: Synthetic oligonucleotide
  Sense strand starting at position 1605 of SEQ ID NO: 1883932
gggacucuaugaucacuca

SEQ ID NO: 2227239 - RNA, 19 nt, Artificial Sequence
  Description of Artificial Sequence: Synthetic oligonucleotide
  Antisense strand to SEQ ID NO: 2227238
ugagugaucauagaguccc

SEQ ID NO: 2227240 - RNA, 19 nt, Artificial Sequence
  Description of Artificial Sequence: Synthetic oligonucleotide
  Sense strand starting at position 1623 of SEQ ID NO: 1883932
aggcuaauaccucacugua

SEQ ID NO: 2227241 - RNA, 19 nt, Artificial Sequence
  Description of Artificial Sequence: Synthetic oligonucleotide
  Antisense strand to SEQ ID NO: 2227240
uacagugagguauuagccu

SEQ ID NO: 2227242 - RNA, 19 nt, Artificial Sequence
  Description of Artificial Sequence: Synthetic oligonucleotide
  Sense strand starting at position 1916 of SEQ ID NO: 1883932
cggaaauccugagagaaag

SEQ ID NO: 2227243 - RNA, 19 nt, Artificial Sequence
  Description of Artificial Sequence: Synthetic oligonucleotide
  Antisense strand to SEQ ID NO: 2227242
cuuucucucaggauuuccg

SEQ ID NO: 2227244 - RNA, 19 nt, Artificial Sequence
  Description of Artificial Sequence: Synthetic oligonucleotide
  Sense strand starting at position 2279 of SEQ ID NO: 1883932
agagcuuggagcugugagu

SEQ ID NO: 2227245 - RNA, 19 nt, Artificial Sequence
  Description of Artificial Sequence: Synthetic oligonucleotide
  Antisense strand to SEQ ID NO: 2227244
acucacagcuccaagcucu

SEQ ID NO: 2227246 - RNA, 19 nt, Artificial Sequence
  Description of Artificial Sequence: Synthetic oligonucleotide
  Sense strand starting at position 2404 of SEQ ID NO: 1883932
ucggaauucucuccucuca

SEQ ID NO: 2227247 - RNA, 19 nt, Artificial Sequence
  Description of Artificial Sequence: Synthetic oligonucleotide
  Antisense strand to SEQ ID NO: 2227246
ugagaggagagaauuccga

SEQ ID NO: 2227248 - RNA, 19 nt, Artificial Sequence
  Description of Artificial Sequence: Synthetic oligonucleotide
  Sense strand starting at position 2471 of SEQ ID NO: 1883932
gucgcccuucgucugaaau

SEQ ID NO: 2227249 - RNA, 19 nt, Artificial Sequence
  Description of Artificial Sequence: Synthetic oligonucleotide
  Antisense strand to SEQ ID NO: 2227248
auuucagacgaagggcgac

SEQ ID NO: 2227250 - RNA, 19 nt, Artificial Sequence
  Description of Artificial Sequence: Synthetic oligonucleotide
  Sense strand starting at position 2512 of SEQ ID NO: 1883932
ugcugaagcauuuguagca

SEQ ID NO: 2227251 - RNA, 19 nt, Artificial Sequence
  Description of Artificial Sequence: Synthetic oligonucleotide
  Antisense strand to SEQ ID NO: 2227250
ugcuacaaaugcuucagca

SEQ ID NO: 2227252 - RNA, 19 nt, Artificial Sequence
  Description of Artificial Sequence: Synthetic oligonucleotide
  Sense strand starting at position 2513 of SEQ ID NO: 1883932
gcugaagcauuuguagcau

SEQ ID NO: 2227253 - RNA, 19 nt, Artificial Sequence
  Description of Artificial Sequence: Synthetic oligonucleotide
  Antisense strand to SEQ ID NO: 2227252
augcuacaaaugcuucagc

SEQ ID NO: 2227254 - RNA, 19 nt, Artificial Sequence
  Description of Artificial Sequence: Synthetic oligonucleotide
  Sense strand starting at position 2551 of SEQ ID NO: 1883932
auuguuaauggccauggua

SEQ ID NO: 2227255 - RNA, 19 nt, Artificial Sequence
  Description of Artificial Sequence: Synthetic oligonucleotide
  Antisense strand to SEQ ID NO: 2227254
uaccauggccauuaacaau

SEQ ID NO: 2227256 - RNA, 19 nt, Artificial Sequence
  Description of Artificial Sequence: Synthetic oligonucleotide
  Sense strand starting at position 2564 of SEQ ID NO: 1883932
augguagcucgagaaguua

SEQ ID NO: 2227257 - RNA, 19 nt, Artificial Sequence
  Description of Artificial Sequence: Synthetic oligonucleotide
  Antisense strand to SEQ ID NO: 2227256
uaacuucucgagcuaccau

SEQ ID NO: 2227258 - RNA, 19 nt, Artificial Sequence
  Description of Artificial Sequence: Synthetic oligonucleotide
  Sense strand starting at position 2604 of SEQ ID NO: 1883932
caggaaagugcucacuuga

SEQ ID NO: 2227259 - RNA, 19 nt, Artificial Sequence
  Description of Artificial Sequence: Synthetic oligonucleotide
  Antisense strand to SEQ ID NO: 2227258
ucaagugagcacuuuccug

SEQ ID NO: 2227260 - RNA, 19 nt, Artificial Sequence
  Description of Artificial Sequence: Synthetic oligonucleotide
  Sense strand starting at position 2667 of SEQ ID NO: 1883932
gauaucagauugggaacau

SEQ ID NO: 2227261 - RNA, 19 nt, Artificial Sequence
  Description of Artificial Sequence: Synthetic oligonucleotide
  Antisense strand to SEQ ID NO: 2227260
auguucccaaucugauauc

SEQ ID NO: 2227262 - RNA, 19 nt, Artificial Sequence
  Description of Artificial Sequence: Synthetic oligonucleotide
  Sense strand starting at position 2668 of SEQ ID NO: 1883932
auaucagauugggaacauu

SEQ ID NO: 2227263 - RNA, 19 nt, Artificial Sequence
  Description of Artificial Sequence: Synthetic oligonucleotide
  Antisense strand to SEQ ID NO: 2227262
aauguucccaaucugauau

SEQ ID NO: 2227264 - RNA, 19 nt, Artificial Sequence
  Description of Artificial Sequence: Synthetic oligonucleotide
  Sense strand starting at position 2703 of SEQ ID NO: 1883932
agauaaagaucccagaauu

SEQ ID NO: 2227265 - RNA, 19 nt, Artificial Sequence
  Description of Artificial Sequence: Synthetic oligonucleotide
  Antisense strand to SEQ ID NO: 2227264
aauucugggaucuuuaucu

SEQ ID NO: 2227266 - RNA, 19 nt, Artificial Sequence
  Description of Artificial Sequence: Synthetic oligonucleotide
  Sense strand starting at position 2716 of SEQ ID NO: 1883932
agaauuaaagauuguagca

SEQ ID NO: 2227267 - RNA, 19 nt, Artificial Sequence
  Description of Artificial Sequence: Synthetic oligonucleotide
  Antisense strand to SEQ ID NO: 2227266
ugcuacaaucuuuaauucu

SEQ ID NO: 2227268 - RNA, 19 nt, Artificial Sequence
  Description of Artificial Sequence: Synthetic oligonucleotide
  Sense strand starting at position 2723 of SEQ ID NO: 1883932
aagauuguagcaugccaaa

SEQ ID NO: 2227269 - RNA, 19 nt, Artificial Sequence
  Description of Artificial Sequence: Synthetic oligonucleotide
  Antisense strand to SEQ ID NO: 2227268
uuuggcaugcuacaaucuu

SEQ ID NO: 2227270 - RNA, 19 nt, Artificial Sequence
  Description of Artificial Sequence: Synthetic oligonucleotide
  Sense strand starting at position 2798 of SEQ ID NO: 1883932
uuccgaagccuguggucau

SEQ ID NO: 2227271 - RNA, 19 nt, Artificial Sequence
  Description of Artificial Sequence: Synthetic oligonucleotide
  Antisense strand to SEQ ID NO: 2227270
augaccacaggcuucggaa

SEQ ID NO: 2227272 - RNA, 19 nt, Artificial Sequence
  Description of Artificial Sequence: Synthetic oligonucleotide
  Sense strand starting at position 2847 of SEQ ID NO: 1883932
gcaauuaagcaccagaauc

SEQ ID NO: 2227273 - RNA, 19 nt, Artificial Sequence
  Description of Artificial Sequence: Synthetic oligonucleotide
  Antisense strand to SEQ ID NO: 2227272
gauucuggugcuuaauugc

SEQ ID NO: 2227274 - RNA, 19 nt, Artificial Sequence
  Description of Artificial Sequence: Synthetic oligonucleotide
  Sense strand starting at position 3282 of SEQ ID NO: 1883932
accgaagugguguauaaua

SEQ ID NO: 2227275 - RNA, 19 nt, Artificial Sequence
  Description of Artificial Sequence: Synthetic oligonucleotide
  Antisense strand to SEQ ID NO: 2227274
uauuauacaccacuucggu

SEQ ID NO: 2227276 - RNA, 19 nt, Artificial Sequence
  Description of Artificial Sequence: Synthetic oligonucleotide
  Sense strand starting at position 3284 of SEQ ID NO: 1883932
cgaagugguguauaauaau

SEQ ID NO: 2227277 - RNA, 19 nt, Artificial Sequence
  Description of Artificial Sequence: Synthetic oligonucleotide
  Antisense strand to SEQ ID NO: 2227276
auuauuauacaccacuucg

SEQ ID NO: 2227278 - RNA, 19 nt, Artificial Sequence
  Description of Artificial Sequence: Synthetic oligonucleotide
  Sense strand starting at position 3677 of SEQ ID NO: 1883932
uuaacaacucuguaaagug

SEQ ID NO: 2227279 - RNA, 19 nt, Artificial Sequence
  Description of Artificial Sequence: Synthetic oligonucleotide
  Antisense strand to SEQ ID NO: 2227278
cacuuuacagaguuguuaa

SEQ ID NO: 2227280 - RNA, 19 nt, Artificial Sequence
  Description of Artificial Sequence: Synthetic oligonucleotide
  Sense strand starting at position 3686 of SEQ ID NO: 1883932
cuguaaaguggguaugauu

SEQ ID NO: 2227281 - RNA, 19 nt, Artificial Sequence
  Description of Artificial Sequence: Synthetic oligonucleotide
  Antisense strand to SEQ ID NO: 2227280
aaucauacccacuuuacag

SEQ ID NO: 2227282 - RNA, 19 nt, Artificial Sequence
  Description of Artificial Sequence: Synthetic oligonucleotide
  Sense strand starting at position 3780 of SEQ ID NO: 1883932
aguugagcuugggcuuuaa

SEQ ID NO: 2227283 - RNA, 19 nt, Artificial Sequence
  Description of Artificial Sequence: Synthetic oligonucleotide
  Antisense strand to SEQ ID NO: 2227282
uuaaagcccaagcucaacu

SEQ ID NO: 2227284 - RNA, 19 nt, Artificial Sequence
  Description of Artificial Sequence: Synthetic oligonucleotide
  Sense strand starting at position 12 of SEQ ID NO: 1883933
guuaauaggcauuacaaac

SEQ ID NO: 2227285 - RNA, 19 nt, Artificial Sequence
  Description of Artificial Sequence: Synthetic oligonucleotide
  Antisense strand to SEQ ID NO: 2227284
guuuguaaugccuauuaac

SEQ ID NO: 2227286 - RNA, 19 nt, Artificial Sequence
  Description of Artificial Sequence: Synthetic oligonucleotide
  Sense strand starting at position 314 of SEQ ID NO: 1883933
uaauuaacacauuggguga

SEQ ID NO: 2227287 - RNA, 19 nt, Artificial Sequence
  Description of Artificial Sequence: Synthetic oligonucleotide
  Antisense strand to SEQ ID NO: 2227286
ucacccaauguguuaauua

SEQ ID NO: 2227288 - RNA, 19 nt, Artificial Sequence
  Description of Artificial Sequence: Synthetic oligonucleotide
  Sense strand starting at position 316 of SEQ ID NO: 1883933
auuaacacauugggugaaa

SEQ ID NO: 2227289 - RNA, 19 nt, Artificial Sequence
  Description of Artificial Sequence: Synthetic oligonucleotide
  Antisense strand to SEQ ID NO: 2227288
uuucacccaauguguuaau

SEQ ID NO: 2227290 - RNA, 19 nt, Artificial Sequence
  Description of Artificial Sequence: Synthetic oligonucleotide
  Sense strand starting at position 318 of SEQ ID NO: 1883933
uaacacauugggugaaacu

SEQ ID NO: 2227291 - RNA, 19 nt, Artificial Sequence
  Description of Artificial Sequence: Synthetic oligonucleotide
  Antisense strand to SEQ ID NO: 2227290
aguuucacccaauguguua

SEQ ID NO: 2227292 - RNA, 19 nt, Artificial Sequence
  Description of Artificial Sequence: Synthetic oligonucleotide
  Sense strand starting at position 415 of SEQ ID NO: 1883933
gaacguaugccacauguua

SEQ ID NO: 2227293 - RNA, 19 nt, Artificial Sequence
  Description of Artificial Sequence: Synthetic oligonucleotide
  Antisense strand to SEQ ID NO: 2227292
uaacauguggcauacguuc

SEQ ID NO: 2227294 - RNA, 19 nt, Artificial Sequence
  Description of Artificial Sequence: Synthetic oligonucleotide
  Sense strand starting at position 455 of SEQ ID NO: 1883933
gagcauaaaugguaacauu

SEQ ID NO: 2227295 - RNA, 19 nt, Artificial Sequence
  Description of Artificial Sequence: Synthetic oligonucleotide
  Antisense strand to SEQ ID NO: 2227294
aauguuaccauuuaugcuc

SEQ ID NO: 2227296 - RNA, 19 nt, Artificial Sequence
  Description of Artificial Sequence: Synthetic oligonucleotide
  Sense strand starting at position 519 of SEQ ID NO: 1883933
ggaguaugaugguuauggu

SEQ ID NO: 2227297 - RNA, 19 nt, Artificial Sequence
  Description of Artificial Sequence: Synthetic oligonucleotide
  Antisense strand to SEQ ID NO: 2227296
accauaaccaucauacucc

SEQ ID NO: 2227298 - RNA, 19 nt, Artificial Sequence
  Description of Artificial Sequence: Synthetic oligonucleotide
  Sense strand starting at position 520 of SEQ ID NO: 1883933
gaguaugaugguuaugguu

SEQ ID NO: 2227299 - RNA, 19 nt, Artificial Sequence
  Description of Artificial Sequence: Synthetic oligonucleotide
  Antisense strand to SEQ ID NO: 2227298
aaccauaaccaucauacuc

SEQ ID NO: 2227300 - RNA, 19 nt, Artificial Sequence
  Description of Artificial Sequence: Synthetic oligonucleotide
  Sense strand starting at position 528 of SEQ ID NO: 1883933
ugguuaugguuaucagcua

SEQ ID NO: 2227301 - RNA, 19 nt, Artificial Sequence
  Description of Artificial Sequence: Synthetic oligonucleotide
  Antisense strand to SEQ ID NO: 2227300
uagcugauaaccauaacca

SEQ ID NO: 2227302 - RNA, 19 nt, Artificial Sequence
  Description of Artificial Sequence: Synthetic oligonucleotide
  Sense strand starting at position 622 of SEQ ID NO: 1883933
guaucauguuaacuagaug

SEQ ID NO: 2227303 - RNA, 19 nt, Artificial Sequence
  Description of Artificial Sequence: Synthetic oligonucleotide
  Antisense strand to SEQ ID NO: 2227302
caucuaguuaacaugauac

SEQ ID NO: 2227304 - RNA, 19 nt, Artificial Sequence
  Description of Artificial Sequence: Synthetic oligonucleotide
  Sense strand starting at position 625 of SEQ ID NO: 1883933
ucauguuaacuagaugcaa

SEQ ID NO: 2227305 - RNA, 19 nt, Artificial Sequence
  Description of Artificial Sequence: Synthetic oligonucleotide
  Antisense strand to SEQ ID NO: 2227304
uugcaucuaguuaacauga

SEQ ID NO: 2227306 - RNA, 19 nt, Artificial Sequence
  Description of Artificial Sequence: Synthetic oligonucleotide
  Sense strand starting at position 1064 of SEQ ID NO: 1883933
gcaaauauuuaguaaucga

SEQ ID NO: 2227307 - RNA, 19 nt, Artificial Sequence
  Description of Artificial Sequence: Synthetic oligonucleotide
  Antisense strand to SEQ ID NO: 2227306
ucgauuacuaaauauuugc

SEQ ID NO: 2227308 - RNA, 19 nt, Artificial Sequence
  Description of Artificial Sequence: Synthetic oligonucleotide
  Sense strand starting at position 1080 of SEQ ID NO: 1883933
cgaugcaucgguucaugca

SEQ ID NO: 2227309 - RNA, 19 nt, Artificial Sequence
  Description of Artificial Sequence: Synthetic oligonucleotide
  Antisense strand to SEQ ID NO: 2227308
ugcaugaaccgaugcaucg

SEQ ID NO: 2227310 - RNA, 19 nt, Artificial Sequence
  Description of Artificial Sequence: Synthetic oligonucleotide
  Sense strand starting at position 1199 of SEQ ID NO: 1883933
ggcgucuggguucaauauu

SEQ ID NO: 2227311 - RNA, 19 nt, Artificial Sequence
  Description of Artificial Sequence: Synthetic oligonucleotide
  Antisense strand to SEQ ID NO: 2227310
aauauugaacccagacgcc

SEQ ID NO: 2227312 - RNA, 19 nt, Artificial Sequence
  Description of Artificial Sequence: Synthetic oligonucleotide
  Sense strand starting at position 1235 of SEQ ID NO: 1883933
accucuucugcauggcaaa

SEQ ID NO: 2227313 - RNA, 19 nt, Artificial Sequence
  Description of Artificial Sequence: Synthetic oligonucleotide
  Antisense strand to SEQ ID NO: 2227312
uuugccaugcagaagaggu

SEQ ID NO: 2227314 - RNA, 19 nt, Artificial Sequence
  Description of Artificial Sequence: Synthetic oligonucleotide
  Sense strand starting at position 1270 of SEQ ID NO: 1883933
ugaauuaguucggucucau

SEQ ID NO: 2227315 - RNA, 19 nt, Artificial Sequence
  Description of Artificial Sequence: Synthetic oligonucleotide
  Antisense strand to SEQ ID NO: 2227314
augagaccgaacuaauuca

SEQ ID NO: 2227316 - RNA, 19 nt, Artificial Sequence
  Description of Artificial Sequence: Synthetic oligonucleotide
  Sense strand starting at position 1384 of SEQ ID NO: 1883933
gaggaaagaucguaucuaa

SEQ ID NO: 2227317 - RNA, 19 nt, Artificial Sequence
  Description of Artificial Sequence: Synthetic oligonucleotide
  Antisense strand to SEQ ID NO: 2227316
uuagauacgaucuuuccuc

SEQ ID NO: 2227318 - RNA, 19 nt, Artificial Sequence
  Description of Artificial Sequence: Synthetic oligonucleotide
  Sense strand starting at position 1387 of SEQ ID NO: 1883933
gaaagaucguaucuaauuc

SEQ ID NO: 2227319 - RNA, 19 nt, Artificial Sequence
  Description of Artificial Sequence: Synthetic oligonucleotide
  Antisense strand to SEQ ID NO: 2227318
gaauuagauacgaucuuuc

SEQ ID NO: 2227320 - RNA, 19 nt, Artificial Sequence
  Description of Artificial Sequence: Synthetic oligonucleotide
  Sense strand starting at position 1592 of SEQ ID NO: 1883933
aggacucaccugugcagaa

SEQ ID NO: 2227321 - RNA, 19 nt, Artificial Sequence
  Description of Artificial Sequence: Synthetic oligonucleotide
  Antisense strand to SEQ ID NO: 2227320
uucugcacaggugaguccu

SEQ ID NO: 2227322 - RNA, 19 nt, Artificial Sequence
  Description of Artificial Sequence: Synthetic oligonucleotide
  Sense strand starting at position 1596 of SEQ ID NO: 1883933
cucaccugugcagaagauu

SEQ ID NO: 2227323 - RNA, 19 nt, Artificial Sequence
  Description of Artificial Sequence: Synthetic oligonucleotide
  Antisense strand to SEQ ID NO: 2227322
aaucuucugcacaggugag

SEQ ID NO: 2227324 - RNA, 19 nt, Artificial Sequence
  Description of Artificial Sequence: Synthetic oligonucleotide
  Sense strand starting at position 2050 of SEQ ID NO: 1883933
augucuuuguuggcaaaca

SEQ ID NO: 2227325 - RNA, 19 nt, Artificial Sequence
  Description of Artificial Sequence: Synthetic oligonucleotide
  Antisense strand to SEQ ID NO: 2227324
uguuugccaacaaagacau

SEQ ID NO: 2227326 - RNA, 19 nt, Artificial Sequence
  Description of Artificial Sequence: Synthetic oligonucleotide
  Sense strand starting at position 2151 of SEQ ID NO: 1883933
acgugaauuagugagaggu

SEQ ID NO: 2227327 - RNA, 19 nt, Artificial Sequence
  Description of Artificial Sequence: Synthetic oligonucleotide
  Antisense strand to SEQ ID NO: 2227326
accucucacuaauucacgu

SEQ ID NO: 2227328 - RNA, 19 nt, Artificial Sequence
  Description of Artificial Sequence: Synthetic oligonucleotide
  Sense strand starting at position 2501 of SEQ ID NO: 1883933
ucuggauggguccgagacu

SEQ ID NO: 2227329 - RNA, 19 nt, Artificial Sequence
  Description of Artificial Sequence: Synthetic oligonucleotide
  Antisense strand to SEQ ID NO: 2227328
agucucggacccauccaga

SEQ ID NO: 2227330 - RNA, 19 nt, Artificial Sequence
  Description of Artificial Sequence: Synthetic oligonucleotide
  Sense strand starting at position 2528 of SEQ ID NO: 1883933
cucacagguucccaggaaa

SEQ ID NO: 2227331 - RNA, 19 nt, Artificial Sequence
  Description of Artificial Sequence: Synthetic oligonucleotide
  Antisense strand to SEQ ID NO: 2227330
uuuccugggaaccugugag

SEQ ID NO: 2227332 - RNA, 19 nt, Artificial Sequence
  Description of Artificial Sequence: Synthetic oligonucleotide
  Sense strand starting at position 2548 of SEQ ID NO: 1883933
gaugccagcgcuuugagua

SEQ ID NO: 2227333 - RNA, 19 nt, Artificial Sequence
  Description of Artificial Sequence: Synthetic oligonucleotide
  Antisense strand to SEQ ID NO: 2227332
uacucaaagcgcuggcauc

SEQ ID NO: 2227334 - RNA, 19 nt, Artificial Sequence
  Description of Artificial Sequence: Synthetic oligonucleotide
  Sense strand starting at position 2553 of SEQ ID NO: 1883933
cagcgcuuugaguagcgaa

SEQ ID NO: 2227335 - RNA, 19 nt, Artificial Sequence
  Description of Artificial Sequence: Synthetic oligonucleotide
  Antisense strand to SEQ ID NO: 2227334
uucgcuacucaaagcgcug

SEQ ID NO: 2227336 - RNA, 19 nt, Artificial Sequence
  Description of Artificial Sequence: Synthetic oligonucleotide
  Sense strand starting at position 2555 of SEQ ID NO: 1883933
gcgcuuugaguagcgaaga

SEQ ID NO: 2227337 - RNA, 19 nt, Artificial Sequence
  Description of Artificial Sequence: Synthetic oligonucleotide
  Antisense strand to SEQ ID NO: 2227336
ucuucgcuacucaaagcgc

SEQ ID NO: 2227338 - RNA, 19 nt, Artificial Sequence
  Description of Artificial Sequence: Synthetic oligonucleotide
  Sense strand starting at position 2591 of SEQ ID NO: 1883933
ggccguuugcaagcuuuga

SEQ ID NO: 2227339 - RNA, 19 nt, Artificial Sequence
  Description of Artificial Sequence: Synthetic oligonucleotide
  Antisense strand to SEQ ID NO: 2227338
ucaaagcuugcaaacggcc

SEQ ID NO: 2227340 - RNA, 19 nt, Artificial Sequence
  Description of Artificial Sequence: Synthetic oligonucleotide
  Sense strand starting at position 2592 of SEQ ID NO: 1883933
gccguuugcaagcuuugaa

SEQ ID NO: 2227341 - RNA, 19 nt, Artificial Sequence
  Description of Artificial Sequence: Synthetic oligonucleotide
  Antisense strand to SEQ ID NO: 2227340
uucaaagcuugcaaacggc

SEQ ID NO: 2227342 - RNA, 19 nt, Artificial Sequence
  Description of Artificial Sequence: Synthetic oligonucleotide
  Sense strand starting at position 2595 of SEQ ID NO: 1883933
guuugcaagcuuugaaggu

SEQ ID NO: 2227343 - RNA, 19 nt, Artificial Sequence
  Description of Artificial Sequence: Synthetic oligonucleotide
  Antisense strand to SEQ ID NO: 2227342
accuucaaagcuugcaaac

SEQ ID NO: 2227344 - RNA, 19 nt, Artificial Sequence
  Description of Artificial Sequence: Synthetic oligonucleotide
  Sense strand starting at position 2632 of SEQ ID NO: 1883933
uccucagugucaucucaaa

SEQ ID NO: 2227345 - RNA, 19 nt, Artificial Sequence
  Description of Artificial Sequence: Synthetic oligonucleotide
  Antisense strand to SEQ ID NO: 2227344
uuugagaugacacugagga

SEQ ID NO: 2227346 - RNA, 19 nt, Artificial Sequence
  Description of Artificial Sequence: Synthetic oligonucleotide
  Sense strand starting at position 2662 of SEQ ID NO: 1883933
agccacauccguuauacaa

SEQ ID NO: 2227347 - RNA, 19 nt, Artificial Sequence
  Description of Artificial Sequence: Synthetic oligonucleotide
  Antisense strand to SEQ ID NO: 2227346
uuguauaacggauguggcu

SEQ ID NO: 2227348 - RNA, 19 nt, Artificial Sequence
  Description of Artificial Sequence: Synthetic oligonucleotide
  Sense strand starting at position 2669 of SEQ ID NO: 1883933
uccguuauacaauacaugu

SEQ ID NO: 2227349 - RNA, 19 nt, Artificial Sequence
  Description of Artificial Sequence: Synthetic oligonucleotide
  Antisense strand to SEQ ID NO: 2227348
acauguauuguauaacgga

SEQ ID NO: 2227350 - RNA, 19 nt, Artificial Sequence
  Description of Artificial Sequence: Synthetic oligonucleotide
  Sense strand starting at position 2704 of SEQ ID NO: 1883933
uuuguugugccguaagaua

SEQ ID NO: 2227351 - RNA, 19 nt, Artificial Sequence
  Description of Artificial Sequence: Synthetic oligonucleotide
  Antisense strand to SEQ ID NO: 2227350
uaucuuacggcacaacaaa

SEQ ID NO: 2227352 - RNA, 19 nt, Artificial Sequence
  Description of Artificial Sequence: Synthetic oligonucleotide
  Sense strand starting at position 2754 of SEQ ID NO: 1883933
uugcaauuuggcugucuca

SEQ ID NO: 2227353 - RNA, 19 nt, Artificial Sequence
  Description of Artificial Sequence: Synthetic oligonucleotide
  Antisense strand to SEQ ID NO: 2227352
ugagacagccaaauugcaa

SEQ ID NO: 2227354 - RNA, 19 nt, Artificial Sequence
  Description of Artificial Sequence: Synthetic oligonucleotide
  Sense strand starting at position 2828 of SEQ ID NO: 1883933
gcuccugaugaguaagcau

SEQ ID NO: 2227355 - RNA, 19 nt, Artificial Sequence
  Description of Artificial Sequence: Synthetic oligonucleotide
  Antisense strand to SEQ ID NO: 2227354
augcuuacucaucaggagc

SEQ ID NO: 2227356 - RNA, 19 nt, Artificial Sequence
  Description of Artificial Sequence: Synthetic oligonucleotide
  Sense strand starting at position 3288 of SEQ ID NO: 1883933
auuugaauauugcagccaa

SEQ ID NO: 2227357 - RNA, 19 nt, Artificial Sequence
  Description of Artificial Sequence: Synthetic oligonucleotide
  Antisense strand to SEQ ID NO: 2227356
uuggcugcaauauucaaau

SEQ ID NO: 2227358 - RNA, 19 nt, Artificial Sequence
  Description of Artificial Sequence: Synthetic oligonucleotide
  Sense strand starting at position 3818 of SEQ ID NO: 1883933
gccaaugugcaauaugauc

SEQ ID NO: 2227359 - RNA, 19 nt, Artificial Sequence
  Description of Artificial Sequence: Synthetic oligonucleotide
  Antisense strand to SEQ ID NO: 2227358
gaucauauugcacauuggc

SEQ ID NO: 2227360 - RNA, 19 nt, Artificial Sequence
  Description of Artificial Sequence: Synthetic oligonucleotide
  Sense strand starting at position 3823 of SEQ ID NO: 1883933
ugugcaauaugaucuuaau

SEQ ID NO: 2227361 - RNA, 19 nt, Artificial Sequence
  Description of Artificial Sequence: Synthetic oligonucleotide
  Antisense strand to SEQ ID NO: 2227360
auuaagaucauauugcaca

SEQ ID NO: 2227362 - RNA, 19 nt, Artificial Sequence
  Description of Artificial Sequence: Synthetic oligonucleotide
  Sense strand starting at position 3861 of SEQ ID NO: 1883933
cugucucuguguccacaaa

SEQ ID NO: 2227363 - RNA, 19 nt, Artificial Sequence
  Description of Artificial Sequence: Synthetic oligonucleotide
  Antisense strand to SEQ ID NO: 2227362
uuuguggacacagagacag

SEQ ID NO: 2227364 - RNA, 19 nt, Artificial Sequence
  Description of Artificial Sequence: Synthetic oligonucleotide
  Sense strand starting at position 237 of SEQ ID NO: 1883934
gaccgaggucaagauaagu

SEQ ID NO: 2227365 - RNA, 19 nt, Artificial Sequence
  Description of Artificial Sequence: Synthetic oligonucleotide
  Antisense strand to SEQ ID NO: 2227364
acuuaucuugaccucgguc

SEQ ID NO: 2227366 - RNA, 19 nt, Artificial Sequence
  Description of Artificial Sequence: Synthetic oligonucleotide
  Sense strand starting at position 245 of SEQ ID NO: 1883934
ucaagauaagucgggagau

SEQ ID NO: 2227367 - RNA, 19 nt, Artificial Sequence
  Description of Artificial Sequence: Synthetic oligonucleotide
  Antisense strand to SEQ ID NO: 2227366
aucucccgacuuaucuuga

SEQ ID NO: 2227368 - RNA, 19 nt, Artificial Sequence
  Description of Artificial Sequence: Synthetic oligonucleotide
  Sense strand starting at position 652 of SEQ ID NO: 1883934
gggaauguauuaccuaucu

SEQ ID NO: 2227369 - RNA, 19 nt, Artificial Sequence
  Description of Artificial Sequence: Synthetic oligonucleotide
  Antisense strand to SEQ ID NO: 2227368
agauagguaauacauuccc

SEQ ID NO: 2227370 - RNA, 19 nt, Artificial Sequence
  Description of Artificial Sequence: Synthetic oligonucleotide
  Sense strand starting at position 740 of SEQ ID NO: 1883934
gugggacagucaccagaau

SEQ ID NO: 2227371 - RNA, 19 nt, Artificial Sequence
  Description of Artificial Sequence: Synthetic oligonucleotide
  Antisense strand to SEQ ID NO: 2227370
auucuggugacugucccac

SEQ ID NO: 2227372 - RNA, 19 nt, Artificial Sequence
  Description of Artificial Sequence: Synthetic oligonucleotide
  Sense strand starting at position 769 of SEQ ID NO: 1883934
ucuuuaugugaggaagguu

SEQ ID NO: 2227373 - RNA, 19 nt, Artificial Sequence
  Description of Artificial Sequence: Synthetic oligonucleotide
  Antisense strand to SEQ ID NO: 2227372
aaccuuccucacauaaaga

SEQ ID NO: 2227374 - RNA, 19 nt, Artificial Sequence
  Description of Artificial Sequence: Synthetic oligonucleotide
  Sense strand starting at position 836 of SEQ ID NO: 1883934
auguuugaauuccuuagaa

SEQ ID NO: 2227375 - RNA, 19 nt, Artificial Sequence
  Description of Artificial Sequence: Synthetic oligonucleotide
  Antisense strand to SEQ ID NO: 2227374
uucuaaggaauucaaacau

SEQ ID NO: 2227376 - RNA, 19 nt, Artificial Sequence
  Description of Artificial Sequence: Synthetic oligonucleotide
  Sense strand starting at position 846 of SEQ ID NO: 1883934
uccuuagaaugaucaagca

SEQ ID NO: 2227377 - RNA, 19 nt, Artificial Sequence
  Description of Artificial Sequence: Synthetic oligonucleotide
  Antisense strand to SEQ ID NO: 2227376
ugcuugaucauucuaagga

SEQ ID NO: 2227378 - RNA, 19 nt, Artificial Sequence
  Description of Artificial Sequence: Synthetic oligonucleotide
  Sense strand starting at position 1135 of SEQ ID NO: 1883934
ucccaaagugcuggaagau

SEQ ID NO: 2227379 - RNA, 19 nt, Artificial Sequence
  Description of Artificial Sequence: Synthetic oligonucleotide
  Antisense strand to SEQ ID NO: 2227378
aucuuccagcacuuuggga

SEQ ID NO: 2227380 - RNA, 19 nt, Artificial Sequence
  Description of Artificial Sequence: Synthetic oligonucleotide
  Sense strand starting at position 1172 of SEQ ID NO: 1883934
agaugauaaguguguuuaa

SEQ ID NO: 2227381 - RNA, 19 nt, Artificial Sequence
  Description of Artificial Sequence: Synthetic oligonucleotide
  Antisense strand to SEQ ID NO: 2227380
uuaaacacacuuaucaucu

SEQ ID NO: 2227382 - RNA, 19 nt, Artificial Sequence
  Description of Artificial Sequence: Synthetic oligonucleotide
  Sense strand starting at position 1213 of SEQ ID NO: 1883934
uacugugaguacuuuagaa

SEQ ID NO: 2227383 - RNA, 19 nt, Artificial Sequence
  Description of Artificial Sequence: Synthetic oligonucleotide
  Antisense strand to SEQ ID NO: 2227382
uucuaaaguacucacagua

SEQ ID NO: 2227384 - RNA, 19 nt, Artificial Sequence
  Description of Artificial Sequence: Synthetic oligonucleotide
  Sense strand starting at position 1506 of SEQ ID NO: 1883934
aagagaauagguuguuuag

SEQ ID NO: 2227385 - RNA, 19 nt, Artificial Sequence
  Description of Artificial Sequence: Synthetic oligonucleotide
  Antisense strand to SEQ ID NO: 2227384
cuaaacaaccuauucucuu

SEQ ID NO: 2227386 - RNA, 19 nt, Artificial Sequence
  Description of Artificial Sequence: Synthetic oligonucleotide
  Sense strand starting at position 1508 of SEQ ID NO: 1883934
gagaauagguuguuuagaa

SEQ ID NO: 2227387 - RNA, 19 nt, Artificial Sequence
  Description of Artificial Sequence: Synthetic oligonucleotide
  Antisense strand to SEQ ID NO: 2227386
uucuaaacaaccuauucuc

SEQ ID NO: 2227388 - RNA, 19 nt, Artificial Sequence
  Description of Artificial Sequence: Synthetic oligonucleotide
  Sense strand starting at position 1509 of SEQ ID NO: 1883934
agaauagguuguuuagaaa

SEQ ID NO: 2227389 - RNA, 19 nt, Artificial Sequence
  Description of Artificial Sequence: Synthetic oligonucleotide
  Antisense strand to SEQ ID NO: 2227388
uuucuaaacaaccuauucu

SEQ ID NO: 2227390 - RNA, 19 nt, Artificial Sequence
  Description of Artificial Sequence: Synthetic oligonucleotide
  Sense strand starting at position 1521 of SEQ ID NO: 1883934
uuagaaagugugggauuau

SEQ ID NO: 2227391 - RNA, 19 nt, Artificial Sequence
  Description of Artificial Sequence: Synthetic oligonucleotide
  Antisense strand to SEQ ID NO: 2227390
auaaucccacacuuucuaa

SEQ ID NO: 2227392 - RNA, 19 nt, Artificial Sequence
  Description of Artificial Sequence: Synthetic oligonucleotide
  Sense strand starting at position 1530 of SEQ ID NO: 1883934
gugggauuauacuucuaaa

SEQ ID NO: 2227393 - RNA, 19 nt, Artificial Sequence
  Description of Artificial Sequence: Synthetic oligonucleotide
  Antisense strand to SEQ ID NO: 2227392
uuuagaaguauaaucccac

SEQ ID NO: 2227394 - RNA, 19 nt, Artificial Sequence
  Description of Artificial Sequence: Synthetic oligonucleotide
  Sense strand starting at position 1601 of SEQ ID NO: 1883934
agaccauugucacuucuca

SEQ ID NO: 2227395 - RNA, 19 nt, Artificial Sequence
  Description of Artificial Sequence: Synthetic oligonucleotide
  Antisense strand to SEQ ID NO: 2227394
ugagaagugacaauggucu

SEQ ID NO: 2227396 - RNA, 19 nt, Artificial Sequence
  Description of Artificial Sequence: Synthetic oligonucleotide
  Sense strand starting at position 1665 of SEQ ID NO: 1883934
uugagaauuugcuaaagga

SEQ ID NO: 2227397 - RNA, 19 nt, Artificial Sequence
  Description of Artificial Sequence: Synthetic oligonucleotide
  Antisense strand to SEQ ID NO: 2227396
uccuuuagcaaauucucaa

SEQ ID NO: 2227398 - RNA, 19 nt, Artificial Sequence
  Description of Artificial Sequence: Synthetic oligonucleotide
  Sense strand starting at position 1780 of SEQ ID NO: 1883934
ggcagaguccuggagaguu

SEQ ID NO: 2227399 - RNA, 19 nt, Artificial Sequence
  Description of Artificial Sequence: Synthetic oligonucleotide
  Antisense strand to SEQ ID NO: 2227398
aacucuccaggacucugcc

SEQ ID NO: 2227400 - RNA, 19 nt, Artificial Sequence
  Description of Artificial Sequence: Synthetic oligonucleotide
  Sense strand starting at position 1950 of SEQ ID NO: 1883934
auuggaacuuggucagaua

SEQ ID NO: 2227401 - RNA, 19 nt, Artificial Sequence
  Description of Artificial Sequence: Synthetic oligonucleotide
  Antisense strand to SEQ ID NO: 2227400
uaucugaccaaguuccaau

SEQ ID NO: 2227402 - RNA, 19 nt, Artificial Sequence
  Description of Artificial Sequence: Synthetic oligonucleotide
  Sense strand starting at position 1959 of SEQ ID NO: 1883934
uggucagauagacaugguu

SEQ ID NO: 2227403 - RNA, 19 nt, Artificial Sequence
  Description of Artificial Sequence: Synthetic oligonucleotide
  Antisense strand to SEQ ID NO: 2227402
aaccaugucuaucugacca

SEQ ID NO: 2227404 - RNA, 19 nt, Artificial Sequence
  Description of Artificial Sequence: Synthetic oligonucleotide
  Sense strand starting at position 1961 of SEQ ID NO: 1883934
gucagauagacaugguuga

SEQ ID NO: 2227405 - RNA, 19 nt, Artificial Sequence
  Description of Artificial Sequence: Synthetic oligonucleotide
  Antisense strand to SEQ ID NO: 2227404
ucaaccaugucuaucugac

SEQ ID NO: 2227406 - RNA, 19 nt, Artificial Sequence
  Description of Artificial Sequence: Synthetic oligonucleotide
  Sense strand starting at position 2053 of SEQ ID NO: 1883934
aguaaaucccauuguuagg

SEQ ID NO: 2227407 - RNA, 19 nt, Artificial Sequence
  Description of Artificial Sequence: Synthetic oligonucleotide
  Antisense strand to SEQ ID NO: 2227406
ccuaacaaugggauuuacu

SEQ ID NO: 2227408 - RNA, 19 nt, Artificial Sequence
  Description of Artificial Sequence: Synthetic oligonucleotide
  Sense strand starting at position 2335 of SEQ ID NO: 1883934
ccugccuuugaacagagau

SEQ ID NO: 2227409 - RNA, 19 nt, Artificial Sequence
  Description of Artificial Sequence: Synthetic oligonucleotide
  Antisense strand to SEQ ID NO: 2227408
aucucuguucaaaggcagg

SEQ ID NO: 2227410 - RNA, 19 nt, Artificial Sequence
  Description of Artificial Sequence: Synthetic oligonucleotide
  Sense strand starting at position 2337 of SEQ ID NO: 1883934
ugccuuugaacagagaugu

SEQ ID NO: 2227411 - RNA, 19 nt, Artificial Sequence
  Description of Artificial Sequence: Synthetic oligonucleotide
  Antisense strand to SEQ ID NO: 2227410
acaucucuguucaaaggca

SEQ ID NO: 2227412 - RNA, 19 nt, Artificial Sequence
  Description of Artificial Sequence: Synthetic oligonucleotide
  Sense strand starting at position 2385 of SEQ ID NO: 1883934
auacuaagugcuuauguga

SEQ ID NO: 2227413 - RNA, 19 nt, Artificial Sequence
  Description of Artificial Sequence: Synthetic oligonucleotide
  Antisense strand to SEQ ID NO: 2227412
ucacauaagcacuuaguau

SEQ ID NO: 2227414 - RNA, 19 nt, Artificial Sequence
  Description of Artificial Sequence: Synthetic oligonucleotide
  Sense strand starting at position 2544 of SEQ ID NO: 1883934
auuuauugcuuuguccaga

SEQ ID NO: 2227415 - RNA, 19 nt, Artificial Sequence
  Description of Artificial Sequence: Synthetic oligonucleotide
  Antisense strand to SEQ ID NO: 2227414
ucuggacaaagcaauaaau

SEQ ID NO: 2227416 - RNA, 19 nt, Artificial Sequence
  Description of Artificial Sequence: Synthetic oligonucleotide
  Sense strand starting at position 2677 of SEQ ID NO: 1883934
aacauuagauggguuucua

SEQ ID NO: 2227417 - RNA, 19 nt, Artificial Sequence
  Description of Artificial Sequence: Synthetic oligonucleotide
  Antisense strand to SEQ ID NO: 2227416
uagaaacccaucuaauguu

SEQ ID NO: 2227418 - RNA, 19 nt, Artificial Sequence
  Description of Artificial Sequence: Synthetic oligonucleotide
  Sense strand starting at position 2681 of SEQ ID NO: 1883934
uuagauggguuucuagauu

SEQ ID NO: 2227419 - RNA, 19 nt, Artificial Sequence
  Description of Artificial Sequence: Synthetic oligonucleotide
  Antisense strand to SEQ ID NO: 2227418
aaucuagaaacccaucuaa

SEQ ID NO: 2227420 - RNA, 19 nt, Artificial Sequence
  Description of Artificial Sequence: Synthetic oligonucleotide
  Sense strand starting at position 2899 of SEQ ID NO: 1883934
cuacauggugaauguauau

SEQ ID NO: 2227421 - RNA, 19 nt, Artificial Sequence
  Description of Artificial Sequence: Synthetic oligonucleotide
  Antisense strand to SEQ ID NO: 2227420
auauacauucaccauguag

SEQ ID NO: 2227422 - RNA, 19 nt, Artificial Sequence
  Description of Artificial Sequence: Synthetic oligonucleotide
  Sense strand starting at position 2905 of SEQ ID NO: 1883934
ggugaauguauauagugga

SEQ ID NO: 2227423 - RNA, 19 nt, Artificial Sequence
  Description of Artificial Sequence: Synthetic oligonucleotide
  Antisense strand to SEQ ID NO: 2227422
uccacuauauacauucacc

SEQ ID NO: 2227424 - RNA, 19 nt, Artificial Sequence
  Description of Artificial Sequence: Synthetic oligonucleotide
  Sense strand starting at position 3002 of SEQ ID NO: 1883934
uuguuauauuugccuggua

SEQ ID NO: 2227425 - RNA, 19 nt, Artificial Sequence
  Description of Artificial Sequence: Synthetic oligonucleotide
  Antisense strand to SEQ ID NO: 2227424
uaccaggcaaauauaacaa

SEQ ID NO: 2227426 - RNA, 19 nt, Artificial Sequence
  Description of Artificial Sequence: Synthetic oligonucleotide
  Sense strand starting at position 3003 of SEQ ID NO: 1883934
uguuauauuugccugguau

SEQ ID NO: 2227427 - RNA, 19 nt, Artificial Sequence
  Description of Artificial Sequence: Synthetic oligonucleotide
  Antisense strand to SEQ ID NO: 2227426
auaccaggcaaauauaaca

SEQ ID NO: 2227428 - RNA, 19 nt, Artificial Sequence
  Description of Artificial Sequence: Synthetic oligonucleotide
  Sense strand starting at position 3004 of SEQ ID NO: 1883934
guuauauuugccugguauu

SEQ ID NO: 2227429 - RNA, 19 nt, Artificial Sequence
  Description of Artificial Sequence: Synthetic oligonucleotide
  Antisense strand to SEQ ID NO: 2227428
aauaccaggcaaauauaac

SEQ ID NO: 2227430 - RNA, 19 nt, Artificial Sequence
  Description of Artificial Sequence: Synthetic oligonucleotide
  Sense strand starting at position 3005 of SEQ ID NO: 1883934
uuauauuugccugguauuc

SEQ ID NO: 2227431 - RNA, 19 nt, Artificial Sequence
  Description of Artificial Sequence: Synthetic oligonucleotide
  Antisense strand to SEQ ID NO: 2227430
gaauaccaggcaaauauaa

SEQ ID NO: 2227432 - RNA, 19 nt, Artificial Sequence
  Description of Artificial Sequence: Synthetic oligonucleotide
  Sense strand starting at position 3207 of SEQ ID NO: 1883934
ggagcaguugaauggugaa

SEQ ID NO: 2227433 - RNA, 19 nt, Artificial Sequence
  Description of Artificial Sequence: Synthetic oligonucleotide
  Antisense strand to SEQ ID NO: 2227432
uucaccauucaacugcucc

SEQ ID NO: 2227434 - RNA, 19 nt, Artificial Sequence
  Description of Artificial Sequence: Synthetic oligonucleotide
  Sense strand starting at position 3569 of SEQ ID NO: 1883934
cuugguacgauaugaaacu

SEQ ID NO: 2227435 - RNA, 19 nt, Artificial Sequence
  Description of Artificial Sequence: Synthetic oligonucleotide
  Antisense strand to SEQ ID NO: 2227434
aguuucauaucguaccaag

SEQ ID NO: 2227436 - RNA, 19 nt, Artificial Sequence
  Description of Artificial Sequence: Synthetic oligonucleotide
  Sense strand starting at position 3583 of SEQ ID NO: 1883934
aaacuacaguuguuggaua

SEQ ID NO: 2227437 - RNA, 19 nt, Artificial Sequence
  Description of Artificial Sequence: Synthetic oligonucleotide
  Antisense strand to SEQ ID NO: 2227436
uauccaacaacuguaguuu

SEQ ID NO: 2227438 - RNA, 19 nt, Artificial Sequence
  Description of Artificial Sequence: Synthetic oligonucleotide
  Sense strand starting at position 3783 of SEQ ID NO: 1883934
aagguaaauuaagugguua

SEQ ID NO: 2227439 - RNA, 19 nt, Artificial Sequence
  Description of Artificial Sequence: Synthetic oligonucleotide
  Antisense strand to SEQ ID NO: 2227438
uaaccacuuaauuuaccuu

SEQ ID NO: 2227440 - RNA, 19 nt, Artificial Sequence
  Description of Artificial Sequence: Synthetic oligonucleotide
  Sense strand starting at position 3784 of SEQ ID NO: 1883934
agguaaauuaagugguuau

SEQ ID NO: 2227441 - RNA, 19 nt, Artificial Sequence
  Description of Artificial Sequence: Synthetic oligonucleotide
  Antisense strand to SEQ ID NO: 2227440
auaaccacuuaauuuaccu

SEQ ID NO: 2227442 - RNA, 19 nt, Artificial Sequence
  Description of Artificial Sequence: Synthetic oligonucleotide
  Sense strand starting at position 3797 of SEQ ID NO: 1883934
gguuauuuguaggaauuuc

SEQ ID NO: 2227443 - RNA, 19 nt, Artificial Sequence
  Description of Artificial Sequence: Synthetic oligonucleotide
  Antisense strand to SEQ ID NO: 2227442
gaaauuccuacaaauaacc

SEQ ID NO: 2227444 - RNA, 19 nt, Artificial Sequence
  Description of Artificial Sequence: Synthetic oligonucleotide
  Sense strand starting at position 1333 of SEQ ID NO: 1883935
uggucaggaaacugucuua

SEQ ID NO: 2227445 - RNA, 19 nt, Artificial Sequence
  Description of Artificial Sequence: Synthetic oligonucleotide
  Antisense strand to SEQ ID NO: 2227444
uaagacaguuuccugacca

SEQ ID NO: 2227446 - RNA, 19 nt, Artificial Sequence
  Description of Artificial Sequence: Synthetic oligonucleotide
  Sense strand starting at position 1336 of SEQ ID NO: 1883935
ucaggaaacugucuuagag

SEQ ID NO: 2227447 - RNA, 19 nt, Artificial Sequence
  Description of Artificial Sequence: Synthetic oligonucleotide
  Antisense strand to SEQ ID NO: 2227446
cucuaagacaguuuccuga

SEQ ID NO: 2227448 - RNA, 19 nt, Artificial Sequence
  Description of Artificial Sequence: Synthetic oligonucleotide
  Sense strand starting at position 1340 of SEQ ID NO: 1883935
gaaacugucuuagagggaa

SEQ ID NO: 2227449 - RNA, 19 nt, Artificial Sequence
  Description of Artificial Sequence: Synthetic oligonucleotide
  Antisense strand to SEQ ID NO: 2227448
uucccucuaagacaguuuc

SEQ ID NO: 2227450 - RNA, 19 nt, Artificial Sequence
  Description of Artificial Sequence: Synthetic oligonucleotide
  Sense strand starting at position 1353 of SEQ ID NO: 1883935
agggaaauaucuguucgug

SEQ ID NO: 2227451 - RNA, 19 nt, Artificial Sequence
  Description of Artificial Sequence: Synthetic oligonucleotide
  Antisense strand to SEQ ID NO: 2227450
cacgaacagauauuucccu

SEQ ID NO: 2227452 - RNA, 19 nt, Artificial Sequence
  Description of Artificial Sequence: Synthetic oligonucleotide
  Sense strand starting at position 1355 of SEQ ID NO: 1883935
ggaaauaucuguucgugug

SEQ ID NO: 2227453 - RNA, 19 nt, Artificial Sequence
  Description of Artificial Sequence: Synthetic oligonucleotide
  Antisense strand to SEQ ID NO: 2227452
cacacgaacagauauuucc

SEQ ID NO: 2227454 - RNA, 19 nt, Artificial Sequence
  Description of Artificial Sequence: Synthetic oligonucleotide
  Sense strand starting at position 1356 of SEQ ID NO: 1883935
gaaauaucuguucgugugu

SEQ ID NO: 2227455 - RNA, 19 nt, Artificial Sequence
  Description of Artificial Sequence: Synthetic oligonucleotide
  Antisense strand to SEQ ID NO: 2227454
acacacgaacagauauuuc

SEQ ID NO: 2227456 - RNA, 19 nt, Artificial Sequence
  Description of Artificial Sequence: Synthetic oligonucleotide
  Sense strand starting at position 1357 of SEQ ID NO: 1883935
aaauaucuguucguguguu

SEQ ID NO: 2227457 - RNA, 19 nt, Artificial Sequence
  Description of Artificial Sequence: Synthetic oligonucleotide
  Antisense strand to SEQ ID NO: 2227456
aacacacgaacagauauuu

SEQ ID NO: 2227458 - RNA, 19 nt, Artificial Sequence
  Description of Artificial Sequence: Synthetic oligonucleotide
  Sense strand starting at position 1458 of SEQ ID NO: 1883935
gaguaauuaguuuacggau

SEQ ID NO: 2227459 - RNA, 19 nt, Artificial Sequence
  Description of Artificial Sequence: Synthetic oligonucleotide
  Antisense strand to SEQ ID NO: 2227458
auccguaaacuaauuacuc

SEQ ID NO: 2227460 - RNA, 19 nt, Artificial Sequence
  Description of Artificial Sequence: Synthetic oligonucleotide
  Sense strand starting at position 1471 of SEQ ID NO: 1883935
acggauuggagucaguaaa

SEQ ID NO: 2227461 - RNA, 19 nt, Artificial Sequence
  Description of Artificial Sequence: Synthetic oligonucleotide
  Antisense strand to SEQ ID NO: 2227460
uuuacugacuccaauccgu

SEQ ID NO: 2227462 - RNA, 19 nt, Artificial Sequence
  Description of Artificial Sequence: Synthetic oligonucleotide
  Sense strand starting at position 1512 of SEQ ID NO: 1883935
gaucaauacuccgcggcuu

SEQ ID NO: 2227463 - RNA, 19 nt, Artificial Sequence
  Description of Artificial Sequence: Synthetic oligonucleotide
  Antisense strand to SEQ ID NO: 2227462
aagccgcggaguauugauc

SEQ ID NO: 2227464 - RNA, 19 nt, Artificial Sequence
  Description of Artificial Sequence: Synthetic oligonucleotide
  Sense strand starting at position 1565 of SEQ ID NO: 1883935
ccuagaaucggguagaugu

SEQ ID NO: 2227465 - RNA, 19 nt, Artificial Sequence
  Description of Artificial Sequence: Synthetic oligonucleotide
  Antisense strand to SEQ ID NO: 2227464
acaucuacccgauucuagg

SEQ ID NO: 2227466 - RNA, 19 nt, Artificial Sequence
  Description of Artificial Sequence: Synthetic oligonucleotide
  Sense strand starting at position 1724 of SEQ ID NO: 1883935
ucgauuuccuaugcuaaug

SEQ ID NO: 2227467 - RNA, 19 nt, Artificial Sequence
  Description of Artificial Sequence: Synthetic oligonucleotide
  Antisense strand to SEQ ID NO: 2227466
cauuagcauaggaaaucga

SEQ ID NO: 2227468 - RNA, 19 nt, Artificial Sequence
  Description of Artificial Sequence: Synthetic oligonucleotide
  Sense strand starting at position 1756 of SEQ ID NO: 1883935
cucugaggcuuugcuugaa

SEQ ID NO: 2227469 - RNA, 19 nt, Artificial Sequence
  Description of Artificial Sequence: Synthetic oligonucleotide
  Antisense strand to SEQ ID NO: 2227468
uucaagcaaagccucagag

SEQ ID NO: 2227470 - RNA, 19 nt, Artificial Sequence
  Description of Artificial Sequence: Synthetic oligonucleotide
  Sense strand starting at position 1791 of SEQ ID NO: 1883935
uuccucauucgcuaucagu

SEQ ID NO: 2227471 - RNA, 19 nt, Artificial Sequence
  Description of Artificial Sequence: Synthetic oligonucleotide
  Antisense strand to SEQ ID NO: 2227470
acugauagcgaaugaggaa

SEQ ID NO: 2227472 - RNA, 19 nt, Artificial Sequence
  Description of Artificial Sequence: Synthetic oligonucleotide
  Sense strand starting at position 1846 of SEQ ID NO: 1883935
gggaucuuccugcguuaca

SEQ ID NO: 2227473 - RNA, 19 nt, Artificial Sequence
  Description of Artificial Sequence: Synthetic oligonucleotide
  Antisense strand to SEQ ID NO: 2227472
uguaacgcaggaagauccc

SEQ ID NO: 2227474 - RNA, 19 nt, Artificial Sequence
  Description of Artificial Sequence: Synthetic oligonucleotide
  Sense strand starting at position 1877 of SEQ ID NO: 1883935
ggugucugcaagucgguaa

SEQ ID NO: 2227475 - RNA, 19 nt, Artificial Sequence
  Description of Artificial Sequence: Synthetic oligonucleotide
  Antisense strand to SEQ ID NO: 2227474
uuaccgacuugcagacacc

SEQ ID NO: 2227476 - RNA, 19 nt, Artificial Sequence
  Description of Artificial Sequence: Synthetic oligonucleotide
  Sense strand starting at position 2010 of SEQ ID NO: 1883935
ccagauuucugucccgauc

SEQ ID NO: 2227477 - RNA, 19 nt, Artificial Sequence
  Description of Artificial Sequence: Synthetic oligonucleotide
  Antisense strand to SEQ ID NO: 2227476
gaucgggacagaaaucugg

SEQ ID NO: 2227478 - RNA, 19 nt, Artificial Sequence
  Description of Artificial Sequence: Synthetic oligonucleotide
  Sense strand starting at position 2176 of SEQ ID NO: 1883935
gaaaguaguuucuucgggu

SEQ ID NO: 2227479 - RNA, 19 nt, Artificial Sequence
  Description of Artificial Sequence: Synthetic oligonucleotide
  Antisense strand to SEQ ID NO: 2227478
acccgaagaaacuacuuuc

SEQ ID NO: 2227480 - RNA, 19 nt, Artificial Sequence
  Description of Artificial Sequence: Synthetic oligonucleotide
  Sense strand starting at position 2177 of SEQ ID NO: 1883935
aaaguaguuucuucggguu

SEQ ID NO: 2227481 - RNA, 19 nt, Artificial Sequence
  Description of Artificial Sequence: Synthetic oligonucleotide
  Antisense strand to SEQ ID NO: 2227480
aacccgaagaaacuacuuu

SEQ ID NO: 2227482 - RNA, 19 nt, Artificial Sequence
  Description of Artificial Sequence: Synthetic oligonucleotide
  Sense strand starting at position 2972 of SEQ ID NO: 1883935
cgccgaguuguuucucugu

SEQ ID NO: 2227483 - RNA, 19 nt, Artificial Sequence
  Description of Artificial Sequence: Synthetic oligonucleotide
  Antisense strand to SEQ ID NO: 2227482
acagagaaacaacucggcg

SEQ ID NO: 2227484 - RNA, 19 nt, Artificial Sequence
  Description of Artificial Sequence: Synthetic oligonucleotide
  Sense strand starting at position 2975 of SEQ ID NO: 1883935
cgaguuguuucucugucca

SEQ ID NO: 2227485 - RNA, 19 nt, Artificial Sequence
  Description of Artificial Sequence: Synthetic oligonucleotide
  Antisense strand to SEQ ID NO: 2227484
uggacagagaaacaacucg

SEQ ID NO: 2227486 - RNA, 19 nt, Artificial Sequence
  Description of Artificial Sequence: Synthetic oligonucleotide
  Sense strand starting at position 2977 of SEQ ID NO: 1883935
aguuguuucucuguccagu

SEQ ID NO: 2227487 - RNA, 19 nt, Artificial Sequence
  Description of Artificial Sequence: Synthetic oligonucleotide
  Antisense strand to SEQ ID NO: 2227486
acuggacagagaaacaacu

SEQ ID NO: 2227488 - RNA, 19 nt, Artificial Sequence
  Description of Artificial Sequence: Synthetic oligonucleotide
  Sense strand starting at position 2978 of SEQ ID NO: 1883935
guuguuucucuguccaguu

SEQ ID NO: 2227489 - RNA, 19 nt, Artificial Sequence
  Description of Artificial Sequence: Synthetic oligonucleotide
  Antisense strand to SEQ ID NO: 2227488
aacuggacagagaaacaac

SEQ ID NO: 2227490 - RNA, 19 nt, Artificial Sequence
  Description of Artificial Sequence: Synthetic oligonucleotide
  Sense strand starting at position 2999 of SEQ ID NO: 1883935
gcauguccuggcuaagaca

SEQ ID NO: 2227491 - RNA, 19 nt, Artificial Sequence
  Description of Artificial Sequence: Synthetic oligonucleotide
  Antisense strand to SEQ ID NO: 2227490
ugucuuagccaggacaugc

SEQ ID NO: 2227492 - RNA, 19 nt, Artificial Sequence
  Description of Artificial Sequence: Synthetic oligonucleotide
  Sense strand starting at position 3019 of SEQ ID NO: 1883935
cccugcauuucuggugaga

SEQ ID NO: 2227493 - RNA, 19 nt, Artificial Sequence
  Description of Artificial Sequence: Synthetic oligonucleotide
  Antisense strand to SEQ ID NO: 2227492
ucucaccagaaaugcaggg

SEQ ID NO: 2227494 - RNA, 19 nt, Artificial Sequence
  Description of Artificial Sequence: Synthetic oligonucleotide
  Sense strand starting at position 3021 of SEQ ID NO: 1883935
cugcauuucuggugagacu

SEQ ID NO: 2227495 - RNA, 19 nt, Artificial Sequence
  Description of Artificial Sequence: Synthetic oligonucleotide
  Antisense strand to SEQ ID NO: 2227494
agucucaccagaaaugcag

SEQ ID NO: 2227496 - RNA, 19 nt, Artificial Sequence
  Description of Artificial Sequence: Synthetic oligonucleotide
  Sense strand starting at position 3134 of SEQ ID NO: 1883935
ggauguggguuaaagauga

SEQ ID NO: 2227497 - RNA, 19 nt, Artificial Sequence
  Description of Artificial Sequence: Synthetic oligonucleotide
  Antisense strand to SEQ ID NO: 2227496
ucaucuuuaacccacaucc

SEQ ID NO: 2227498 - RNA, 19 nt, Artificial Sequence
  Description of Artificial Sequence: Synthetic oligonucleotide
  Sense strand starting at position 3138 of SEQ ID NO: 1883935
guggguuaaagaugaguuc

SEQ ID NO: 2227499 - RNA, 19 nt, Artificial Sequence
  Description of Artificial Sequence: Synthetic oligonucleotide
  Antisense strand to SEQ ID NO: 2227498
gaacucaucuuuaacccac

SEQ ID NO: 2227500 - RNA, 19 nt, Artificial Sequence
  Description of Artificial Sequence: Synthetic oligonucleotide
  Sense strand starting at position 3141 of SEQ ID NO: 1883935
gguuaaagaugaguucuga

SEQ ID NO: 2227501 - RNA, 19 nt, Artificial Sequence
  Description of Artificial Sequence: Synthetic oligonucleotide
  Antisense strand to SEQ ID NO: 2227500
ucagaacucaucuuuaacc

SEQ ID NO: 2227502 - RNA, 19 nt, Artificial Sequence
  Description of Artificial Sequence: Synthetic oligonucleotide
  Sense strand starting at position 3149 of SEQ ID NO: 1883935
augaguucugagcgacugu

SEQ ID NO: 2227503 - RNA, 19 nt, Artificial Sequence
  Description of Artificial Sequence: Synthetic oligonucleotide
  Antisense strand to SEQ ID NO: 2227502
acagucgcucagaacucau

SEQ ID NO: 2227504 - RNA, 19 nt, Artificial Sequence
  Description of Artificial Sequence: Synthetic oligonucleotide
  Sense strand starting at position 3194 of SEQ ID NO: 1883935
cagugacuucccugaagga

SEQ ID NO: 2227505 - RNA, 19 nt, Artificial Sequence
  Description of Artificial Sequence: Synthetic oligonucleotide
  Antisense strand to SEQ ID NO: 2227504
uccuucagggaagucacug

SEQ ID NO: 2227506 - RNA, 19 nt, Artificial Sequence
  Description of Artificial Sequence: Synthetic oligonucleotide
  Sense strand starting at position 3243 of SEQ ID NO: 1883935
uccuguguguacccuauau

SEQ ID NO: 2227507 - RNA, 19 nt, Artificial Sequence
  Description of Artificial Sequence: Synthetic oligonucleotide
  Antisense strand to SEQ ID NO: 2227506
auauaggguacacacagga

SEQ ID NO: 2227508 - RNA, 19 nt, Artificial Sequence
  Description of Artificial Sequence: Synthetic oligonucleotide
  Sense strand starting at position 3245 of SEQ ID NO: 1883935
cuguguguacccuauauca

SEQ ID NO: 2227509 - RNA, 19 nt, Artificial Sequence
  Description of Artificial Sequence: Synthetic oligonucleotide
  Antisense strand to SEQ ID NO: 2227508
ugauauaggguacacacag

SEQ ID NO: 2227510 - RNA, 19 nt, Artificial Sequence
  Description of Artificial Sequence: Synthetic oligonucleotide
  Sense strand starting at position 3247 of SEQ ID NO: 1883935
guguguacccuauaucaga

SEQ ID NO: 2227511 - RNA, 19 nt, Artificial Sequence
  Description of Artificial Sequence: Synthetic oligonucleotide
  Antisense strand to SEQ ID NO: 2227510
ucugauauaggguacacac

SEQ ID NO: 2227512 - RNA, 19 nt, Artificial Sequence
  Description of Artificial Sequence: Synthetic oligonucleotide
  Sense strand starting at position 3420 of SEQ ID NO: 1883935
gggucaaaguucccagcaa

SEQ ID NO: 2227513 - RNA, 19 nt, Artificial Sequence
  Description of Artificial Sequence: Synthetic oligonucleotide
  Antisense strand to SEQ ID NO: 2227512
uugcugggaacuuugaccc

SEQ ID NO: 2227514 - RNA, 19 nt, Artificial Sequence
  Description of Artificial Sequence: Synthetic oligonucleotide
  Sense strand starting at position 3454 of SEQ ID NO: 1883935
ugggcagacuaaguuguaa

SEQ ID NO: 2227515 - RNA, 19 nt, Artificial Sequence
  Description of Artificial Sequence: Synthetic oligonucleotide
  Antisense strand to SEQ ID NO: 2227514
uuacaacuuagucugccca

SEQ ID NO: 2227516 - RNA, 19 nt, Artificial Sequence
  Description of Artificial Sequence: Synthetic oligonucleotide
  Sense strand starting at position 3456 of SEQ ID NO: 1883935
ggcagacuaaguuguaaca

SEQ ID NO: 2227517 - RNA, 19 nt, Artificial Sequence
  Description of Artificial Sequence: Synthetic oligonucleotide
  Antisense strand to SEQ ID NO: 2227516
uguuacaacuuagucugcc

SEQ ID NO: 2227518 - RNA, 19 nt, Artificial Sequence
  Description of Artificial Sequence: Synthetic oligonucleotide
  Sense strand starting at position 3589 of SEQ ID NO: 1883935
gcugauuucuccuggacag

SEQ ID NO: 2227519 - RNA, 19 nt, Artificial Sequence
  Description of Artificial Sequence: Synthetic oligonucleotide
  Antisense strand to SEQ ID NO: 2227518
cuguccaggagaaaucagc

SEQ ID NO: 2227520 - RNA, 19 nt, Artificial Sequence
  Description of Artificial Sequence: Synthetic oligonucleotide
  Sense strand starting at position 3814 of SEQ ID NO: 1883935
guggcuuuccgggagagca

SEQ ID NO: 2227521 - RNA, 19 nt, Artificial Sequence
  Description of Artificial Sequence: Synthetic oligonucleotide
  Antisense strand to SEQ ID NO: 2227520
ugcucucccggaaagccac

SEQ ID NO: 2227522 - RNA, 19 nt, Artificial Sequence
  Description of Artificial Sequence: Synthetic oligonucleotide
  Sense strand starting at position 3908 of SEQ ID NO: 1883935
ggguacucuuauccagaua

SEQ ID NO: 2227523 - RNA, 19 nt, Artificial Sequence
  Description of Artificial Sequence: Synthetic oligonucleotide
  Antisense strand to SEQ ID NO: 2227522
uaucuggauaagaguaccc

SEQ ID NO: 2227524 - RNA, 19 nt, Artificial Sequence
  Description of Artificial Sequence: Synthetic oligonucleotide
  Sense strand starting at position 119 of SEQ ID NO: 1883936
gaaucuugccaguguaaau

SEQ ID NO: 2227525 - RNA, 19 nt, Artificial Sequence
  Description of Artificial Sequence: Synthetic oligonucleotide
  Antisense strand to SEQ ID NO: 2227524
auuuacacuggcaagauuc

SEQ ID NO: 2227526 - RNA, 19 nt, Artificial Sequence
  Description of Artificial Sequence: Synthetic oligonucleotide
  Sense strand starting at position 129 of SEQ ID NO: 1883936
aguguaaauugacuuuaac

SEQ ID NO: 2227527 - RNA, 19 nt, Artificial Sequence
  Description of Artificial Sequence: Synthetic oligonucleotide
  Antisense strand to SEQ ID NO: 2227526
guuaaagucaauuuacacu

SEQ ID NO: 2227528 - RNA, 19 nt, Artificial Sequence
  Description of Artificial Sequence: Synthetic oligonucleotide
  Sense strand starting at position 237 of SEQ ID NO: 1883936
aaccaagaagucugugcua

SEQ ID NO: 2227529 - RNA, 19 nt, Artificial Sequence
  Description of Artificial Sequence: Synthetic oligonucleotide
  Antisense strand to SEQ ID NO: 2227528
uagcacagacuucuugguu

SEQ ID NO: 2227530 - RNA, 19 nt, Artificial Sequence
  Description of Artificial Sequence: Synthetic oligonucleotide
  Sense strand starting at position 240 of SEQ ID NO: 1883936
caagaagucugugcuauca

SEQ ID NO: 2227531 - RNA, 19 nt, Artificial Sequence
  Description of Artificial Sequence: Synthetic oligonucleotide
  Antisense strand to SEQ ID NO: 2227530
ugauagcacagacuucuug

SEQ ID NO: 2227532 - RNA, 19 nt, Artificial Sequence
  Description of Artificial Sequence: Synthetic oligonucleotide
  Sense strand starting at position 375 of SEQ ID NO: 1883936
aucgucuagaugcaguaaa

SEQ ID NO: 2227533 - RNA, 19 nt, Artificial Sequence
  Description of Artificial Sequence: Synthetic oligonucleotide
  Antisense strand to SEQ ID NO: 2227532
uuuacugcaucuagacgau

SEQ ID NO: 2227534 - RNA, 19 nt, Artificial Sequence
  Description of Artificial Sequence: Synthetic oligonucleotide
  Sense strand starting at position 477 of SEQ ID NO: 1883936
aucuguuauagaggaguuu

SEQ ID NO: 2227535 - RNA, 19 nt, Artificial Sequence
  Description of Artificial Sequence: Synthetic oligonucleotide
  Antisense strand to SEQ ID NO: 2227534
aaacuccucuauaacagau

SEQ ID NO: 2227536 - RNA, 19 nt, Artificial Sequence
  Description of Artificial Sequence: Synthetic oligonucleotide
  Sense strand starting at position 567 of SEQ ID NO: 1883936
gcaacugugccauaacuua

SEQ ID NO: 2227537 - RNA, 19 nt, Artificial Sequence
  Description of Artificial Sequence: Synthetic oligonucleotide
  Antisense strand to SEQ ID NO: 2227536
uaaguuauggcacaguugc

SEQ ID NO: 2227538 - RNA, 19 nt, Artificial Sequence
  Description of Artificial Sequence: Synthetic oligonucleotide
  Sense strand starting at position 622 of SEQ ID NO: 1883936
ugcuaauggagauguaaua

SEQ ID NO: 2227539 - RNA, 19 nt, Artificial Sequence
  Description of Artificial Sequence: Synthetic oligonucleotide
  Antisense strand to SEQ ID NO: 2227538
uauuacaucuccauuagca

SEQ ID NO: 2227540 - RNA, 19 nt, Artificial Sequence
  Description of Artificial Sequence: Synthetic oligonucleotide
  Sense strand starting at position 686 of SEQ ID NO: 1883936
ugccuacuuguugaagcua

SEQ ID NO: 2227541 - RNA, 19 nt, Artificial Sequence
  Description of Artificial Sequence: Synthetic oligonucleotide
  Antisense strand to SEQ ID NO: 2227540
uagcuucaacaaguaggca

SEQ ID NO: 2227542 - RNA, 19 nt, Artificial Sequence
  Description of Artificial Sequence: Synthetic oligonucleotide
  Sense strand starting at position 768 of SEQ ID NO: 1883936
guacauuuaucucacagau

SEQ ID NO: 2227543 - RNA, 19 nt, Artificial Sequence
  Description of Artificial Sequence: Synthetic oligonucleotide
  Antisense strand to SEQ ID NO: 2227542
aucugugagauaaauguac

SEQ ID NO: 2227544 - RNA, 19 nt, Artificial Sequence
  Description of Artificial Sequence: Synthetic oligonucleotide
  Sense strand starting at position 1166 of SEQ ID NO: 1883936
uuagaaacugccuaauagu

SEQ ID NO: 2227545 - RNA, 19 nt, Artificial Sequence
  Description of Artificial Sequence: Synthetic oligonucleotide
  Antisense strand to SEQ ID NO: 2227544
acuauuaggcaguuucuaa

SEQ ID NO: 2227546 - RNA, 19 nt, Artificial Sequence
  Description of Artificial Sequence: Synthetic oligonucleotide
  Sense strand starting at position 1182 of SEQ ID NO: 1883936
agugguagauauuucguuu

SEQ ID NO: 2227547 - RNA, 19 nt, Artificial Sequence
  Description of Artificial Sequence: Synthetic oligonucleotide
  Antisense strand to SEQ ID NO: 2227546
aaacgaaauaucuaccacu

SEQ ID NO: 2227548 - RNA, 19 nt, Artificial Sequence
  Description of Artificial Sequence: Synthetic oligonucleotide
  Sense strand starting at position 1450 of SEQ ID NO: 1883936
guauuaauaagagguuaag

SEQ ID NO: 2227549 - RNA, 19 nt, Artificial Sequence
  Description of Artificial Sequence: Synthetic oligonucleotide
  Antisense strand to SEQ ID NO: 2227548
cuuaaccucuuauuaauac

SEQ ID NO: 2227550 - RNA, 19 nt, Artificial Sequence
  Description of Artificial Sequence: Synthetic oligonucleotide
  Sense strand starting at position 1453 of SEQ ID NO: 1883936
uuaauaagagguuaagugu

SEQ ID NO: 2227551 - RNA, 19 nt, Artificial Sequence
  Description of Artificial Sequence: Synthetic oligonucleotide
  Antisense strand to SEQ ID NO: 2227550
acacuuaaccucuuauuaa

SEQ ID NO: 2227552 - RNA, 19 nt, Artificial Sequence
  Description of Artificial Sequence: Synthetic oligonucleotide
  Sense strand starting at position 1456 of SEQ ID NO: 1883936
auaagagguuaaguguaau

SEQ ID NO: 2227553 - RNA, 19 nt, Artificial Sequence
  Description of Artificial Sequence: Synthetic oligonucleotide
  Antisense strand to SEQ ID NO: 2227552
auuacacuuaaccucuuau

SEQ ID NO: 2227554 - RNA, 19 nt, Artificial Sequence
  Description of Artificial Sequence: Synthetic oligonucleotide
  Sense strand starting at position 1941 of SEQ ID NO: 1883936
caguccucucucgggaaga

SEQ ID NO: 2227555 - RNA, 19 nt, Artificial Sequence
  Description of Artificial Sequence: Synthetic oligonucleotide
  Antisense strand to SEQ ID NO: 2227554
ucuucccgagagaggacug

SEQ ID NO: 2227556 - RNA, 19 nt, Artificial Sequence
  Description of Artificial Sequence: Synthetic oligonucleotide
  Sense strand starting at position 1943 of SEQ ID NO: 1883936
guccucucucgggaagaaa

SEQ ID NO: 2227557 - RNA, 19 nt, Artificial Sequence
  Description of Artificial Sequence: Synthetic oligonucleotide
  Antisense strand to SEQ ID NO: 2227556
uuucuucccgagagaggac

SEQ ID NO: 2227558 - RNA, 19 nt, Artificial Sequence
  Description of Artificial Sequence: Synthetic oligonucleotide
  Sense strand starting at position 1980 of SEQ ID NO: 1883936
gauugcuaagcgucguuga

SEQ ID NO: 2227559 - RNA, 19 nt, Artificial Sequence
  Description of Artificial Sequence: Synthetic oligonucleotide
  Antisense strand to SEQ ID NO: 2227558
ucaacgacgcuuagcaauc

SEQ ID NO: 2227560 - RNA, 19 nt, Artificial Sequence
  Description of Artificial Sequence: Synthetic oligonucleotide
  Sense strand starting at position 2257 of SEQ ID NO: 1883936
ggcgucacccaauaagguu

SEQ ID NO: 2227561 - RNA, 19 nt, Artificial Sequence
  Description of Artificial Sequence: Synthetic oligonucleotide
  Antisense strand to SEQ ID NO: 2227560
aaccuuauugggugacgcc

SEQ ID NO: 2227562 - RNA, 19 nt, Artificial Sequence
  Description of Artificial Sequence: Synthetic oligonucleotide
  Sense strand starting at position 2632 of SEQ ID NO: 1883936
uggugaguuauuggaggag

SEQ ID NO: 2227563 - RNA, 19 nt, Artificial Sequence
  Description of Artificial Sequence: Synthetic oligonucleotide
  Antisense strand to SEQ ID NO: 2227562
cuccuccaauaacucacca

SEQ ID NO: 2227564 - RNA, 19 nt, Artificial Sequence
  Description of Artificial Sequence: Synthetic oligonucleotide
  Sense strand starting at position 2634 of SEQ ID NO: 1883936
gugaguuauuggaggagaa

SEQ ID NO: 2227565 - RNA, 19 nt, Artificial Sequence
  Description of Artificial Sequence: Synthetic oligonucleotide
  Antisense strand to SEQ ID NO: 2227564
uucuccuccaauaacucac

SEQ ID NO: 2227566 - RNA, 19 nt, Artificial Sequence
  Description of Artificial Sequence: Synthetic oligonucleotide
  Sense strand starting at position 2974 of SEQ ID NO: 1883936
uggaccugcucuuuguaaa

SEQ ID NO: 2227567 - RNA, 19 nt, Artificial Sequence
  Description of Artificial Sequence: Synthetic oligonucleotide
  Antisense strand to SEQ ID NO: 2227566
uuuacaaagagcaggucca

SEQ ID NO: 2227568 - RNA, 19 nt, Artificial Sequence
  Description of Artificial Sequence: Synthetic oligonucleotide
  Sense strand starting at position 2975 of SEQ ID NO: 1883936
ggaccugcucuuuguaaau

SEQ ID NO: 2227569 - RNA, 19 nt, Artificial Sequence
  Description of Artificial Sequence: Synthetic oligonucleotide
  Antisense strand to SEQ ID NO: 2227568
auuuacaaagagcaggucc

SEQ ID NO: 2227570 - RNA, 19 nt, Artificial Sequence
  Description of Artificial Sequence: Synthetic oligonucleotide
  Sense strand starting at position 3113 of SEQ ID NO: 1883936
ccuggucacccguaaaucu

SEQ ID NO: 2227571 - RNA, 19 nt, Artificial Sequence
  Description of Artificial Sequence: Synthetic oligonucleotide
  Antisense strand to SEQ ID NO: 2227570
agauuuacgggugaccagg

SEQ ID NO: 2227572 - RNA, 19 nt, Artificial Sequence
  Description of Artificial Sequence: Synthetic oligonucleotide
  Sense strand starting at position 3217 of SEQ ID NO: 1883936
gaagauggaugccucugaa

SEQ ID NO: 2227573 - RNA, 19 nt, Artificial Sequence
  Description of Artificial Sequence: Synthetic oligonucleotide
  Antisense strand to SEQ ID NO: 2227572
uucagaggcauccaucuuc

SEQ ID NO: 2227574 - RNA, 19 nt, Artificial Sequence
  Description of Artificial Sequence: Synthetic oligonucleotide
  Sense strand starting at position 3220 of SEQ ID NO: 1883936
gauggaugccucugaacca

SEQ ID NO: 2227575 - RNA, 19 nt, Artificial Sequence
  Description of Artificial Sequence: Synthetic oligonucleotide
  Antisense strand to SEQ ID NO: 2227574
ugguucagaggcauccauc

SEQ ID NO: 2227576 - RNA, 19 nt, Artificial Sequence
  Description of Artificial Sequence: Synthetic oligonucleotide
  Sense strand starting at position 3267 of SEQ ID NO: 1883936
aaauaaagcuucccggaga

SEQ ID NO: 2227577 - RNA, 19 nt, Artificial Sequence
  Description of Artificial Sequence: Synthetic oligonucleotide
  Antisense strand to SEQ ID NO: 2227576
ucuccgggaagcuuuauuu

SEQ ID NO: 2227578 - RNA, 19 nt, Artificial Sequence
  Description of Artificial Sequence: Synthetic oligonucleotide
  Sense strand starting at position 3326 of SEQ ID NO: 1883936
guuggcuggcggagugauu

SEQ ID NO: 2227579 - RNA, 19 nt, Artificial Sequence
  Description of Artificial Sequence: Synthetic oligonucleotide
  Antisense strand to SEQ ID NO: 2227578
aaucacuccgccagccaac

SEQ ID NO: 2227580 - RNA, 19 nt, Artificial Sequence
  Description of Artificial Sequence: Synthetic oligonucleotide
  Sense strand starting at position 3350 of SEQ ID NO: 1883936
aacacaauggccuggugaa

SEQ ID NO: 2227581 - RNA, 19 nt, Artificial Sequence
  Description of Artificial Sequence: Synthetic oligonucleotide
  Antisense strand to SEQ ID NO: 2227580
uucaccaggccauuguguu

SEQ ID NO: 2227582 - RNA, 19 nt, Artificial Sequence
  Description of Artificial Sequence: Synthetic oligonucleotide
  Sense strand starting at position 3442 of SEQ ID NO: 1883936
acauaagaauacguuaagu

SEQ ID NO: 2227583 - RNA, 19 nt, Artificial Sequence
  Description of Artificial Sequence: Synthetic oligonucleotide
  Antisense strand to SEQ ID NO: 2227582
acuuaacguauucuuaugu

SEQ ID NO: 2227584 - RNA, 19 nt, Artificial Sequence
  Description of Artificial Sequence: Synthetic oligonucleotide
  Sense strand starting at position 3569 of SEQ ID NO: 1883936
auagauggaucuguagauc

SEQ ID NO: 2227585 - RNA, 19 nt, Artificial Sequence
  Description of Artificial Sequence: Synthetic oligonucleotide
  Antisense strand to SEQ ID NO: 2227584
gaucuacagauccaucuau

SEQ ID NO: 2227586 - RNA, 19 nt, Artificial Sequence
  Description of Artificial Sequence: Synthetic oligonucleotide
  Sense strand starting at position 3660 of SEQ ID NO: 1883936
gauuucuguuuagcaagua

SEQ ID NO: 2227587 - RNA, 19 nt, Artificial Sequence
  Description of Artificial Sequence: Synthetic oligonucleotide
  Antisense strand to SEQ ID NO: 2227586
uacuugcuaaacagaaauc

SEQ ID NO: 2227588 - RNA, 19 nt, Artificial Sequence
  Description of Artificial Sequence: Synthetic oligonucleotide
  Sense strand starting at position 3665 of SEQ ID NO: 1883936
cuguuuagcaaguauagag

SEQ ID NO: 2227589 - RNA, 19 nt, Artificial Sequence
  Description of Artificial Sequence: Synthetic oligonucleotide
  Antisense strand to SEQ ID NO: 2227588
cucuauacuugcuaaacag

SEQ ID NO: 2227590 - RNA, 19 nt, Artificial Sequence
  Description of Artificial Sequence: Synthetic oligonucleotide
  Sense strand starting at position 3697 of SEQ ID NO: 1883936
ggaaaccuccuguauguac

SEQ ID NO: 2227591 - RNA, 19 nt, Artificial Sequence
  Description of Artificial Sequence: Synthetic oligonucleotide
  Antisense strand to SEQ ID NO: 2227590
guacauacaggagguuucc

SEQ ID NO: 2227592 - RNA, 19 nt, Artificial Sequence
  Description of Artificial Sequence: Synthetic oligonucleotide
  Sense strand starting at position 3740 of SEQ ID NO: 1883936
gaaugauaacgccauuagc

SEQ ID NO: 2227593 - RNA, 19 nt, Artificial Sequence
  Description of Artificial Sequence: Synthetic oligonucleotide
  Antisense strand to SEQ ID NO: 2227592
gcuaauggcguuaucauuc

SEQ ID NO: 2227594 - RNA, 19 nt, Artificial Sequence
  Description of Artificial Sequence: Synthetic oligonucleotide
  Sense strand starting at position 3761 of SEQ ID NO: 1883936
aguggauagucacuggcua

SEQ ID NO: 2227595 - RNA, 19 nt, Artificial Sequence
  Description of Artificial Sequence: Synthetic oligonucleotide
  Antisense strand to SEQ ID NO: 2227594
uagccagugacuauccacu

SEQ ID NO: 2227596 - RNA, 19 nt, Artificial Sequence
  Description of Artificial Sequence: Synthetic oligonucleotide
  Sense strand starting at position 3762 of SEQ ID NO: 1883936
guggauagucacuggcuaa

SEQ ID NO: 2227597 - RNA, 19 nt, Artificial Sequence
  Description of Artificial Sequence: Synthetic oligonucleotide
  Antisense strand to SEQ ID NO: 2227596
uuagccagugacuauccac

SEQ ID NO: 2227598 - RNA, 19 nt, Artificial Sequence
  Description of Artificial Sequence: Synthetic oligonucleotide
  Sense strand starting at position 3763 of SEQ ID NO: 1883936
uggauagucacuggcuaaa

SEQ ID NO: 2227599 - RNA, 19 nt, Artificial Sequence
  Description of Artificial Sequence: Synthetic oligonucleotide
  Antisense strand to SEQ ID NO: 2227598
uuuagccagugacuaucca

SEQ ID NO: 2227600 - RNA, 19 nt, Artificial Sequence
  Description of Artificial Sequence: Synthetic oligonucleotide
  Sense strand starting at position 3773 of SEQ ID NO: 1883936
cuggcuaaagcuuaugaau

SEQ ID NO: 2227601 - RNA, 19 nt, Artificial Sequence
  Description of Artificial Sequence: Synthetic oligonucleotide
  Antisense strand to SEQ ID NO: 2227600
auucauaagcuuuagccag

SEQ ID NO: 2227602 - RNA, 19 nt, Artificial Sequence
  Description of Artificial Sequence: Synthetic oligonucleotide
  Sense strand starting at position 3827 of SEQ ID NO: 1883936
guuaaucaguuccugaaau

SEQ ID NO: 2227603 - RNA, 19 nt, Artificial Sequence
  Description of Artificial Sequence: Synthetic oligonucleotide
  Antisense strand to SEQ ID NO: 2227602
auuucaggaacugauuaac

SEQ ID NO: 2227604 - RNA, 19 nt, Artificial Sequence
  Description of Artificial Sequence: Synthetic oligonucleotide
  Sense strand starting at position 237 of SEQ ID NO: 1883937
acaguacugcuguaagcau

SEQ ID NO: 2227605 - RNA, 19 nt, Artificial Sequence
  Description of Artificial Sequence: Synthetic oligonucleotide
  Antisense strand to SEQ ID NO: 2227604
augcuuacagcaguacugu

SEQ ID NO: 2227606 - RNA, 19 nt, Artificial Sequence
  Description of Artificial Sequence: Synthetic oligonucleotide
  Sense strand starting at position 396 of SEQ ID NO: 1883937
uaaauaaacuggucaagug

SEQ ID NO: 2227607 - RNA, 19 nt, Artificial Sequence
  Description of Artificial Sequence: Synthetic oligonucleotide
  Antisense strand to SEQ ID NO: 2227606
cacuugaccaguuuauuua

SEQ ID NO: 2227608 - RNA, 19 nt, Artificial Sequence
  Description of Artificial Sequence: Synthetic oligonucleotide
  Sense strand starting at position 405 of SEQ ID NO: 1883937
uggucaaguguuugaagug

SEQ ID NO: 2227609 - RNA, 19 nt, Artificial Sequence
  Description of Artificial Sequence: Synthetic oligonucleotide
  Antisense strand to SEQ ID NO: 2227608
cacuucaaacacuugacca

SEQ ID NO: 2227610 - RNA, 19 nt, Artificial Sequence
  Description of Artificial Sequence: Synthetic oligonucleotide
  Sense strand starting at position 411 of SEQ ID NO: 1883937
aguguuugaagugauaaau

SEQ ID NO: 2227611 - RNA, 19 nt, Artificial Sequence
  Description of Artificial Sequence: Synthetic oligonucleotide
  Antisense strand to SEQ ID NO: 2227610
auuuaucacuucaaacacu

SEQ ID NO: 2227612 - RNA, 19 nt, Artificial Sequence
  Description of Artificial Sequence: Synthetic oligonucleotide
  Sense strand starting at position 531 of SEQ ID NO: 1883937
uggcaugacgaucaaauua

SEQ ID NO: 2227613 - RNA, 19 nt, Artificial Sequence
  Description of Artificial Sequence: Synthetic oligonucleotide
  Antisense strand to SEQ ID NO: 2227612
uaauuugaucgucaugcca

SEQ ID NO: 2227614 - RNA, 19 nt, Artificial Sequence
  Description of Artificial Sequence: Synthetic oligonucleotide
  Sense strand starting at position 677 of SEQ ID NO: 1883937
ugaggaacuugauaacaau

SEQ ID NO: 2227615 - RNA, 19 nt, Artificial Sequence
  Description of Artificial Sequence: Synthetic oligonucleotide
  Antisense strand to SEQ ID NO: 2227614
auuguuaucaaguuccuca

SEQ ID NO: 2227616 - RNA, 19 nt, Artificial Sequence
  Description of Artificial Sequence: Synthetic oligonucleotide
  Sense strand starting at position 769 of SEQ ID NO: 1883937
uaggucagcucuucugauu

SEQ ID NO: 2227617 - RNA, 19 nt, Artificial Sequence
  Description of Artificial Sequence: Synthetic oligonucleotide
  Antisense strand to SEQ ID NO: 2227616
aaucagaagagcugaccua

SEQ ID NO: 2227618 - RNA, 19 nt, Artificial Sequence
  Description of Artificial Sequence: Synthetic oligonucleotide
  Sense strand starting at position 1122 of SEQ ID NO: 1883937
agcuucugguaaucaaaga

SEQ ID NO: 2227619 - RNA, 19 nt, Artificial Sequence
  Description of Artificial Sequence: Synthetic oligonucleotide
  Antisense strand to SEQ ID NO: 2227618
ucuuugauuaccagaagcu

SEQ ID NO: 2227620 - RNA, 19 nt, Artificial Sequence
  Description of Artificial Sequence: Synthetic oligonucleotide
  Sense strand starting at position 1299 of SEQ ID NO: 1883937
auaugugaacucugccuau

SEQ ID NO: 2227621 - RNA, 19 nt, Artificial Sequence
  Description of Artificial Sequence: Synthetic oligonucleotide
  Antisense strand to SEQ ID NO: 2227620
auaggcagaguucacauau

SEQ ID NO: 2227622 - RNA, 19 nt, Artificial Sequence
  Description of Artificial Sequence: Synthetic oligonucleotide
  Sense strand starting at position 1302 of SEQ ID NO: 1883937
ugugaacucugccuauuaa

SEQ ID NO: 2227623 - RNA, 19 nt, Artificial Sequence
  Description of Artificial Sequence: Synthetic oligonucleotide
  Antisense strand to SEQ ID NO: 2227622
uuaauaggcagaguucaca

SEQ ID NO: 2227624 - RNA, 19 nt, Artificial Sequence
  Description of Artificial Sequence: Synthetic oligonucleotide
  Sense strand starting at position 1303 of SEQ ID NO: 1883937
gugaacucugccuauuaau

SEQ ID NO: 2227625 - RNA, 19 nt, Artificial Sequence
  Description of Artificial Sequence: Synthetic oligonucleotide
  Antisense strand to SEQ ID NO: 2227624
auuaauaggcagaguucac

SEQ ID NO: 2227626 - RNA, 19 nt, Artificial Sequence
  Description of Artificial Sequence: Synthetic oligonucleotide
  Sense strand starting at position 1342 of SEQ ID NO: 1883937
uuugcuuauguuugagacu

SEQ ID NO: 2227627 - RNA, 19 nt, Artificial Sequence
  Description of Artificial Sequence: Synthetic oligonucleotide
  Antisense strand to SEQ ID NO: 2227626
agucucaaacauaagcaaa

SEQ ID NO: 2227628 - RNA, 19 nt, Artificial Sequence
  Description of Artificial Sequence: Synthetic oligonucleotide
  Sense strand starting at position 1963 of SEQ ID NO: 1883937
guugcuuccggauauauug

SEQ ID NO: 2227629 - RNA, 19 nt, Artificial Sequence
  Description of Artificial Sequence: Synthetic oligonucleotide
  Antisense strand to SEQ ID NO: 2227628
caauauauccggaagcaac

SEQ ID NO: 2227630 - RNA, 19 nt, Artificial Sequence
  Description of Artificial Sequence: Synthetic oligonucleotide
  Sense strand starting at position 1965 of SEQ ID NO: 1883937
ugcuuccggauauauugaa

SEQ ID NO: 2227631 - RNA, 19 nt, Artificial Sequence
  Description of Artificial Sequence: Synthetic oligonucleotide
  Antisense strand to SEQ ID NO: 2227630
uucaauauauccggaagca

SEQ ID NO: 2227632 - RNA, 19 nt, Artificial Sequence
  Description of Artificial Sequence: Synthetic oligonucleotide
  Sense strand starting at position 2022 of SEQ ID NO: 1883937
gagggauccgcguucggca

SEQ ID NO: 2227633 - RNA, 19 nt, Artificial Sequence
  Description of Artificial Sequence: Synthetic oligonucleotide
  Antisense strand to SEQ ID NO: 2227632
ugccgaacgcggaucccuc

SEQ ID NO: 2227634 - RNA, 19 nt, Artificial Sequence
  Description of Artificial Sequence: Synthetic oligonucleotide
  Sense strand starting at position 2468 of SEQ ID NO: 1883937
gcucuuuauggugaacaca

SEQ ID NO: 2227635 - RNA, 19 nt, Artificial Sequence
  Description of Artificial Sequence: Synthetic oligonucleotide
  Antisense strand to SEQ ID NO: 2227634
uguguucaccauaaagagc

SEQ ID NO: 2227636 - RNA, 19 nt, Artificial Sequence
  Description of Artificial Sequence: Synthetic oligonucleotide
  Sense strand starting at position 2698 of SEQ ID NO: 1883937
ucuagcuggccuuaacaga

SEQ ID NO: 2227637 - RNA, 19 nt, Artificial Sequence
  Description of Artificial Sequence: Synthetic oligonucleotide
  Antisense strand to SEQ ID NO: 2227636
ucuguuaaggccagcuaga

SEQ ID NO: 2227638 - RNA, 19 nt, Artificial Sequence
  Description of Artificial Sequence: Synthetic oligonucleotide
  Sense strand starting at position 2758 of SEQ ID NO: 1883937
guuuguuuggcuucuguuu

SEQ ID NO: 2227639 - RNA, 19 nt, Artificial Sequence
  Description of Artificial Sequence: Synthetic oligonucleotide
  Antisense strand to SEQ ID NO: 2227638
aaacagaagccaaacaaac

SEQ ID NO: 2227640 - RNA, 19 nt, Artificial Sequence
  Description of Artificial Sequence: Synthetic oligonucleotide
  Sense strand starting at position 2766 of SEQ ID NO: 1883937
ggcuucuguuucuuuagaa

SEQ ID NO: 2227641 - RNA, 19 nt, Artificial Sequence
  Description of Artificial Sequence: Synthetic oligonucleotide
  Antisense strand to SEQ ID NO: 2227640
uucuaaagaaacagaagcc

SEQ ID NO: 2227642 - RNA, 19 nt, Artificial Sequence
  Description of Artificial Sequence: Synthetic oligonucleotide
  Sense strand starting at position 2773 of SEQ ID NO: 1883937
guuucuuuagaauaugacu

SEQ ID NO: 2227643 - RNA, 19 nt, Artificial Sequence
  Description of Artificial Sequence: Synthetic oligonucleotide
  Antisense strand to SEQ ID NO: 2227642
agucauauucuaaagaaac

SEQ ID NO: 2227644 - RNA, 19 nt, Artificial Sequence
  Description of Artificial Sequence: Synthetic oligonucleotide
  Sense strand starting at position 2829 of SEQ ID NO: 1883937
auugaccaguacucacaua

SEQ ID NO: 2227645 - RNA, 19 nt, Artificial Sequence
  Description of Artificial Sequence: Synthetic oligonucleotide
  Antisense strand to SEQ ID NO: 2227644
uaugugaguacuggucaau

SEQ ID NO: 2227646 - RNA, 19 nt, Artificial Sequence
  Description of Artificial Sequence: Synthetic oligonucleotide
  Sense strand starting at position 2931 of SEQ ID NO: 1883937
cagugauaguguuugaaua

SEQ ID NO: 2227647 - RNA, 19 nt, Artificial Sequence
  Description of Artificial Sequence: Synthetic oligonucleotide
  Antisense strand to SEQ ID NO: 2227646
uauucaaacacuaucacug

SEQ ID NO: 2227648 - RNA, 19 nt, Artificial Sequence
  Description of Artificial Sequence: Synthetic oligonucleotide
  Sense strand starting at position 2932 of SEQ ID NO: 1883937
agugauaguguuugaauag

SEQ ID NO: 2227649 - RNA, 19 nt, Artificial Sequence
  Description of Artificial Sequence: Synthetic oligonucleotide
  Antisense strand to SEQ ID NO: 2227648
cuauucaaacacuaucacu

SEQ ID NO: 2227650 - RNA, 19 nt, Artificial Sequence
  Description of Artificial Sequence: Synthetic oligonucleotide
  Sense strand starting at position 3027 of SEQ ID NO: 1883937
gcaaacuggcuaugguaaa

SEQ ID NO: 2227651 - RNA, 19 nt, Artificial Sequence
  Description of Artificial Sequence: Synthetic oligonucleotide
  Antisense strand to SEQ ID NO: 2227650
uuuaccauagccaguuugc

SEQ ID NO: 2227652 - RNA, 19 nt, Artificial Sequence
  Description of Artificial Sequence: Synthetic oligonucleotide
  Sense strand starting at position 3099 of SEQ ID NO: 1883937
uugauaaaugaccguccuu

SEQ ID NO: 2227653 - RNA, 19 nt, Artificial Sequence
  Description of Artificial Sequence: Synthetic oligonucleotide
  Antisense strand to SEQ ID NO: 2227652
aaggacggucauuuaucaa

SEQ ID NO: 2227654 - RNA, 19 nt, Artificial Sequence
  Description of Artificial Sequence: Synthetic oligonucleotide
  Sense strand starting at position 3104 of SEQ ID NO: 1883937
aaaugaccguccuugauac

SEQ ID NO: 2227655 - RNA, 19 nt, Artificial Sequence
  Description of Artificial Sequence: Synthetic oligonucleotide
  Antisense strand to SEQ ID NO: 2227654
guaucaaggacggucauuu

SEQ ID NO: 2227656 - RNA, 19 nt, Artificial Sequence
  Description of Artificial Sequence: Synthetic oligonucleotide
  Sense strand starting at position 3105 of SEQ ID NO: 1883937
aaugaccguccuugauaca

SEQ ID NO: 2227657 - RNA, 19 nt, Artificial Sequence
  Description of Artificial Sequence: Synthetic oligonucleotide
  Antisense strand to SEQ ID NO: 2227656
uguaucaaggacggucauu

SEQ ID NO: 2227658 - RNA, 19 nt, Artificial Sequence
  Description of Artificial Sequence: Synthetic oligonucleotide
  Sense strand starting at position 3106 of SEQ ID NO: 1883937
augaccguccuugauacaa

SEQ ID NO: 2227659 - RNA, 19 nt, Artificial Sequence
  Description of Artificial Sequence: Synthetic oligonucleotide
  Antisense strand to SEQ ID NO: 2227658
uuguaucaaggacggucau

SEQ ID NO: 2227660 - RNA, 19 nt, Artificial Sequence
  Description of Artificial Sequence: Synthetic oligonucleotide
  Sense strand starting at position 3133 of SEQ ID NO: 1883937
gagaaauccuguuugacua

SEQ ID NO: 2227661 - RNA, 19 nt, Artificial Sequence
  Description of Artificial Sequence: Synthetic oligonucleotide
  Antisense strand to SEQ ID NO: 2227660
uagucaaacaggauuucuc

SEQ ID NO: 2227662 - RNA, 19 nt, Artificial Sequence
  Description of Artificial Sequence: Synthetic oligonucleotide
  Sense strand starting at position 3134 of SEQ ID NO: 1883937
agaaauccuguuugacuag

SEQ ID NO: 2227663 - RNA, 19 nt, Artificial Sequence
  Description of Artificial Sequence: Synthetic oligonucleotide
  Antisense strand to SEQ ID NO: 2227662
cuagucaaacaggauuucu

SEQ ID NO: 2227664 - RNA, 19 nt, Artificial Sequence
  Description of Artificial Sequence: Synthetic oligonucleotide
  Sense strand starting at position 3172 of SEQ ID NO: 1883937
gagucaguguauucucaaa

SEQ ID NO: 2227665 - RNA, 19 nt, Artificial Sequence
  Description of Artificial Sequence: Synthetic oligonucleotide
  Antisense strand to SEQ ID NO: 2227664
uuugagaauacacugacuc

SEQ ID NO: 2227666 - RNA, 19 nt, Artificial Sequence
  Description of Artificial Sequence: Synthetic oligonucleotide
  Sense strand starting at position 3260 of SEQ ID NO: 1883937
cacacuuucguaugagagu

SEQ ID NO: 2227667 - RNA, 19 nt, Artificial Sequence
  Description of Artificial Sequence: Synthetic oligonucleotide
  Antisense strand to SEQ ID NO: 2227666
acucucauacgaaagugug

SEQ ID NO: 2227668 - RNA, 19 nt, Artificial Sequence
  Description of Artificial Sequence: Synthetic oligonucleotide
  Sense strand starting at position 3266 of SEQ ID NO: 1883937
uucguaugagaguaugcua

SEQ ID NO: 2227669 - RNA, 19 nt, Artificial Sequence
  Description of Artificial Sequence: Synthetic oligonucleotide
  Antisense strand to SEQ ID NO: 2227668
uagcauacucucauacgaa

SEQ ID NO: 2227670 - RNA, 19 nt, Artificial Sequence
  Description of Artificial Sequence: Synthetic oligonucleotide
  Sense strand starting at position 3335 of SEQ ID NO: 1883937
gcguuuggauacuugaaau

SEQ ID NO: 2227671 - RNA, 19 nt, Artificial Sequence
  Description of Artificial Sequence: Synthetic oligonucleotide
  Antisense strand to SEQ ID NO: 2227670
auuucaaguauccaaacgc

SEQ ID NO: 2227672 - RNA, 19 nt, Artificial Sequence
  Description of Artificial Sequence: Synthetic oligonucleotide
  Sense strand starting at position 3469 of SEQ ID NO: 1883937
cccacuauugcuuauuagu

SEQ ID NO: 2227673 - RNA, 19 nt, Artificial Sequence
  Description of Artificial Sequence: Synthetic oligonucleotide
  Antisense strand to SEQ ID NO: 2227672
acuaauaagcaauaguggg

SEQ ID NO: 2227674 - RNA, 19 nt, Artificial Sequence
  Description of Artificial Sequence: Synthetic oligonucleotide
  Sense strand starting at position 3478 of SEQ ID NO: 1883937
gcuuauuagugacuucuaa

SEQ ID NO: 2227675 - RNA, 19 nt, Artificial Sequence
  Description of Artificial Sequence: Synthetic oligonucleotide
  Antisense strand to SEQ ID NO: 2227674
uuagaagucacuaauaagc

SEQ ID NO: 2227676 - RNA, 19 nt, Artificial Sequence
  Description of Artificial Sequence: Synthetic oligonucleotide
  Sense strand starting at position 3490 of SEQ ID NO: 1883937
cuucuaaagcagugacaaa

SEQ ID NO: 2227677 - RNA, 19 nt, Artificial Sequence
  Description of Artificial Sequence: Synthetic oligonucleotide
  Antisense strand to SEQ ID NO: 2227676
uuugucacugcuuuagaag

SEQ ID NO: 2227678 - RNA, 19 nt, Artificial Sequence
  Description of Artificial Sequence: Synthetic oligonucleotide
  Sense strand starting at position 3690 of SEQ ID NO: 1883937
ugauguuccugcucacaua

SEQ ID NO: 2227679 - RNA, 19 nt, Artificial Sequence
  Description of Artificial Sequence: Synthetic oligonucleotide
  Antisense strand to SEQ ID NO: 2227678
uaugugagcaggaacauca

SEQ ID NO: 2227680 - RNA, 19 nt, Artificial Sequence
  Description of Artificial Sequence: Synthetic oligonucleotide
  Sense strand starting at position 3873 of SEQ ID NO: 1883937
ugguuaguaguauaacuau

SEQ ID NO: 2227681 - RNA, 19 nt, Artificial Sequence
  Description of Artificial Sequence: Synthetic oligonucleotide
  Antisense strand to SEQ ID NO: 2227680
auaguuauacuacuaacca

SEQ ID NO: 2227682 - RNA, 19 nt, Artificial Sequence
  Description of Artificial Sequence: Synthetic oligonucleotide
  Sense strand starting at position 3943 of SEQ ID NO: 1883937
aagugaggugcugacaaga

SEQ ID NO: 2227683 - RNA, 19 nt, Artificial Sequence
  Description of Artificial Sequence: Synthetic oligonucleotide
  Antisense strand to SEQ ID NO: 2227682
ucuugucagcaccucacuu

SEQ ID NO: 2227684 - RNA, 19 nt, Artificial Sequence
  Description of Artificial Sequence: Synthetic oligonucleotide
  Sense strand starting at position 6 of SEQ ID NO: 1883938
augagacaaugugcugaaa

SEQ ID NO: 2227685 - RNA, 19 nt, Artificial Sequence
  Description of Artificial Sequence: Synthetic oligonucleotide
  Antisense strand to SEQ ID NO: 2227684
uuucagcacauugucucau

SEQ ID NO: 2227686 - RNA, 19 nt, Artificial Sequence
  Description of Artificial Sequence: Synthetic oligonucleotide
  Sense strand starting at position 9 of SEQ ID NO: 1883938
agacaaugugcugaaaguc

SEQ ID NO: 2227687 - RNA, 19 nt, Artificial Sequence
  Description of Artificial Sequence: Synthetic oligonucleotide
  Antisense strand to SEQ ID NO: 2227686
gacuuucagcacauugucu

SEQ ID NO: 2227688 - RNA, 19 nt, Artificial Sequence
  Description of Artificial Sequence: Synthetic oligonucleotide
  Sense strand starting at position 21 of SEQ ID NO: 1883938
gaaagucagugcccaacua

SEQ ID NO: 2227689 - RNA, 19 nt, Artificial Sequence
  Description of Artificial Sequence: Synthetic oligonucleotide
  Antisense strand to SEQ ID NO: 2227688
uaguugggcacugacuuuc

SEQ ID NO: 2227690 - RNA, 19 nt, Artificial Sequence
  Description of Artificial Sequence: Synthetic oligonucleotide
  Sense strand starting at position 60 of SEQ ID NO: 1883938
acacuuggcuuaucuguaa

SEQ ID NO: 2227691 - RNA, 19 nt, Artificial Sequence
  Description of Artificial Sequence: Synthetic oligonucleotide
  Antisense strand to SEQ ID NO: 2227690
uuacagauaagccaagugu

SEQ ID NO: 2227692 - RNA, 19 nt, Artificial Sequence
  Description of Artificial Sequence: Synthetic oligonucleotide
  Sense strand starting at position 64 of SEQ ID NO: 1883938
uuggcuuaucuguaaaguu

SEQ ID NO: 2227693 - RNA, 19 nt, Artificial Sequence
  Description of Artificial Sequence: Synthetic oligonucleotide
  Antisense strand to SEQ ID NO: 2227692
aacuuuacagauaagccaa

SEQ ID NO: 2227694 - RNA, 19 nt, Artificial Sequence
  Description of Artificial Sequence: Synthetic oligonucleotide
  Sense strand starting at position 357 of SEQ ID NO: 1883938
guaugcaauuccuuaggau

SEQ ID NO: 2227695 - RNA, 19 nt, Artificial Sequence
  Description of Artificial Sequence: Synthetic oligonucleotide
  Antisense strand to SEQ ID NO: 2227694
auccuaaggaauugcauac

SEQ ID NO: 2227696 - RNA, 19 nt, Artificial Sequence
  Description of Artificial Sequence: Synthetic oligonucleotide
  Sense strand starting at position 470 of SEQ ID NO: 1883938
aagccacagcgaugguaaa

SEQ ID NO: 2227697 - RNA, 19 nt, Artificial Sequence
  Description of Artificial Sequence: Synthetic oligonucleotide
  Antisense strand to SEQ ID NO: 2227696
uuuaccaucgcuguggcuu

SEQ ID NO: 2227698 - RNA, 19 nt, Artificial Sequence
  Description of Artificial Sequence: Synthetic oligonucleotide
  Sense strand starting at position 560 of SEQ ID NO: 1883938
ugaaucaagucacuuaguu

SEQ ID NO: 2227699 - RNA, 19 nt, Artificial Sequence
  Description of Artificial Sequence: Synthetic oligonucleotide
  Antisense strand to SEQ ID NO: 2227698
aacuaagugacuugauuca

SEQ ID NO: 2227700 - RNA, 19 nt, Artificial Sequence
  Description of Artificial Sequence: Synthetic oligonucleotide
  Sense strand starting at position 601 of SEQ ID NO: 1883938
aggauccuccuucgaaauu

SEQ ID NO: 2227701 - RNA, 19 nt, Artificial Sequence
  Description of Artificial Sequence: Synthetic oligonucleotide
  Antisense strand to SEQ ID NO: 2227700
aauuucgaaggaggauccu

SEQ ID NO: 2227702 - RNA, 19 nt, Artificial Sequence
  Description of Artificial Sequence: Synthetic oligonucleotide
  Sense strand starting at position 610 of SEQ ID NO: 1883938
cuucgaaauuuagaucuau

SEQ ID NO: 2227703 - RNA, 19 nt, Artificial Sequence
  Description of Artificial Sequence: Synthetic oligonucleotide
  Antisense strand to SEQ ID NO: 2227702
auagaucuaaauuucgaag

SEQ ID NO: 2227704 - RNA, 19 nt, Artificial Sequence
  Description of Artificial Sequence: Synthetic oligonucleotide
  Sense strand starting at position 759 of SEQ ID NO: 1883938
agauauucgcaaggaucac

SEQ ID NO: 2227705 - RNA, 19 nt, Artificial Sequence
  Description of Artificial Sequence: Synthetic oligonucleotide
  Antisense strand to SEQ ID NO: 2227704
gugauccuugcgaauaucu

SEQ ID NO: 2227706 - RNA, 19 nt, Artificial Sequence
  Description of Artificial Sequence: Synthetic oligonucleotide
  Sense strand starting at position 787 of SEQ ID NO: 1883938
cagggauagugguuuauua

SEQ ID NO: 2227707 - RNA, 19 nt, Artificial Sequence
  Description of Artificial Sequence: Synthetic oligonucleotide
  Antisense strand to SEQ ID NO: 2227706
uaauaaaccacuaucccug

SEQ ID NO: 2227708 - RNA, 19 nt, Artificial Sequence
  Description of Artificial Sequence: Synthetic oligonucleotide
  Sense strand starting at position 789 of SEQ ID NO: 1883938
gggauagugguuuauuauc

SEQ ID NO: 2227709 - RNA, 19 nt, Artificial Sequence
  Description of Artificial Sequence: Synthetic oligonucleotide
  Antisense strand to SEQ ID NO: 2227708
gauaauaaaccacuauccc

SEQ ID NO: 2227710 - RNA, 19 nt, Artificial Sequence
  Description of Artificial Sequence: Synthetic oligonucleotide
  Sense strand starting at position 791 of SEQ ID NO: 1883938
gauagugguuuauuauccu

SEQ ID NO: 2227711 - RNA, 19 nt, Artificial Sequence
  Description of Artificial Sequence: Synthetic oligonucleotide
  Antisense strand to SEQ ID NO: 2227710
aggauaauaaaccacuauc

SEQ ID NO: 2227712 - RNA, 19 nt, Artificial Sequence
  Description of Artificial Sequence: Synthetic oligonucleotide
  Sense strand starting at position 920 of SEQ ID NO: 1883938
cucgacauuuccuugcaga

SEQ ID NO: 2227713 - RNA, 19 nt, Artificial Sequence
  Description of Artificial Sequence: Synthetic oligonucleotide
  Antisense strand to SEQ ID NO: 2227712
ucugcaaggaaaugucgag

SEQ ID NO: 2227714 - RNA, 19 nt, Artificial Sequence
  Description of Artificial Sequence: Synthetic oligonucleotide
  Sense strand starting at position 1591 of SEQ ID NO: 1883938
cuguuuaucgaggcguauu

SEQ ID NO: 2227715 - RNA, 19 nt, Artificial Sequence
  Description of Artificial Sequence: Synthetic oligonucleotide
  Antisense strand to SEQ ID NO: 2227714
aauacgccucgauaaacag

SEQ ID NO: 2227716 - RNA, 19 nt, Artificial Sequence
  Description of Artificial Sequence: Synthetic oligonucleotide
  Sense strand starting at position 2492 of SEQ ID NO: 1883938
gcgccuuaggucuuuacga

SEQ ID NO: 2227717 - RNA, 19 nt, Artificial Sequence
  Description of Artificial Sequence: Synthetic oligonucleotide
  Antisense strand to SEQ ID NO: 2227716
ucguaaagaccuaaggcgc

SEQ ID NO: 2227718 - RNA, 19 nt, Artificial Sequence
  Description of Artificial Sequence: Synthetic oligonucleotide
  Sense strand starting at position 2494 of SEQ ID NO: 1883938
gccuuaggucuuuacgaua

SEQ ID NO: 2227719 - RNA, 19 nt, Artificial Sequence
  Description of Artificial Sequence: Synthetic oligonucleotide
  Antisense strand to SEQ ID NO: 2227718
uaucguaaagaccuaaggc

SEQ ID NO: 2227720 - RNA, 19 nt, Artificial Sequence
  Description of Artificial Sequence: Synthetic oligonucleotide
  Sense strand starting at position 2538 of SEQ ID NO: 1883938
augcuacuuugaguaaacu

SEQ ID NO: 2227721 - RNA, 19 nt, Artificial Sequence
  Description of Artificial Sequence: Synthetic oligonucleotide
  Antisense strand to SEQ ID NO: 2227720
aguuuacucaaaguagcau

SEQ ID NO: 2227722 - RNA, 19 nt, Artificial Sequence
  Description of Artificial Sequence: Synthetic oligonucleotide
  Sense strand starting at position 2539 of SEQ ID NO: 1883938
ugcuacuuugaguaaacuu

SEQ ID NO: 2227723 - RNA, 19 nt, Artificial Sequence
  Description of Artificial Sequence: Synthetic oligonucleotide
  Antisense strand to SEQ ID NO: 2227722
aaguuuacucaaaguagca

SEQ ID NO: 2227724 - RNA, 19 nt, Artificial Sequence
  Description of Artificial Sequence: Synthetic oligonucleotide
  Sense strand starting at position 2643 of SEQ ID NO: 1883938
acgcauugggcuuaauaua

SEQ ID NO: 2227725 - RNA, 19 nt, Artificial Sequence
  Description of Artificial Sequence: Synthetic oligonucleotide
  Antisense strand to SEQ ID NO: 2227724
uauauuaagcccaaugcgu

SEQ ID NO: 2227726 - RNA, 19 nt, Artificial Sequence
  Description of Artificial Sequence: Synthetic oligonucleotide
  Sense strand starting at position 2961 of SEQ ID NO: 1883938
gcugaauuauuagauuuag

SEQ ID NO: 2227727 - RNA, 19 nt, Artificial Sequence
  Description of Artificial Sequence: Synthetic oligonucleotide
  Antisense strand to SEQ ID NO: 2227726
cuaaaucuaauaauucagc

SEQ ID NO: 2227728 - RNA, 19 nt, Artificial Sequence
  Description of Artificial Sequence: Synthetic oligonucleotide
  Sense strand starting at position 3124 of SEQ ID NO: 1883938
auuuguaucuuagugcaca

SEQ ID NO: 2227729 - RNA, 19 nt, Artificial Sequence
  Description of Artificial Sequence: Synthetic oligonucleotide
  Antisense strand to SEQ ID NO: 2227728
ugugcacuaagauacaaau

SEQ ID NO: 2227730 - RNA, 19 nt, Artificial Sequence
  Description of Artificial Sequence: Synthetic oligonucleotide
  Sense strand starting at position 3127 of SEQ ID NO: 1883938
uguaucuuagugcacaauu

SEQ ID NO: 2227731 - RNA, 19 nt, Artificial Sequence
  Description of Artificial Sequence: Synthetic oligonucleotide
  Antisense strand to SEQ ID NO: 2227730
aauugugcacuaagauaca

SEQ ID NO: 2227732 - RNA, 19 nt, Artificial Sequence
  Description of Artificial Sequence: Synthetic oligonucleotide
  Sense strand starting at position 3205 of SEQ ID NO: 1883938
cugggaacuacguaguaaa

SEQ ID NO: 2227733 - RNA, 19 nt, Artificial Sequence
  Description of Artificial Sequence: Synthetic oligonucleotide
  Antisense strand to SEQ ID NO: 2227732
uuuacuacguaguucccag

SEQ ID NO: 2227734 - RNA, 19 nt, Artificial Sequence
  Description of Artificial Sequence: Synthetic oligonucleotide
  Sense strand starting at position 3237 of SEQ ID NO: 1883938
cuuaaauacugggcuugau

SEQ ID NO: 2227735 - RNA, 19 nt, Artificial Sequence
  Description of Artificial Sequence: Synthetic oligonucleotide
  Antisense strand to SEQ ID NO: 2227734
aucaagcccaguauuuaag

SEQ ID NO: 2227736 - RNA, 19 nt, Artificial Sequence
  Description of Artificial Sequence: Synthetic oligonucleotide
  Sense strand starting at position 3256 of SEQ ID NO: 1883938
augagcugucacuagcuua

SEQ ID NO: 2227737 - RNA, 19 nt, Artificial Sequence
  Description of Artificial Sequence: Synthetic oligonucleotide
  Antisense strand to SEQ ID NO: 2227736
uaagcuagugacagcucau

SEQ ID NO: 2227738 - RNA, 19 nt, Artificial Sequence
  Description of Artificial Sequence: Synthetic oligonucleotide
  Sense strand starting at position 3643 of SEQ ID NO: 1883938
ccaggagaguaguucuaau

SEQ ID NO: 2227739 - RNA, 19 nt, Artificial Sequence
  Description of Artificial Sequence: Synthetic oligonucleotide
  Antisense strand to SEQ ID NO: 2227738
auuagaacuacucuccugg

SEQ ID NO: 2227740 - RNA, 19 nt, Artificial Sequence
  Description of Artificial Sequence: Synthetic oligonucleotide
  Sense strand starting at position 3654 of SEQ ID NO: 1883938
guucuaaugaaguagcaag

SEQ ID NO: 2227741 - RNA, 19 nt, Artificial Sequence
  Description of Artificial Sequence: Synthetic oligonucleotide
  Antisense strand to SEQ ID NO: 2227740
cuugcuacuucauuagaac

SEQ ID NO: 2227742 - RNA, 19 nt, Artificial Sequence
  Description of Artificial Sequence: Synthetic oligonucleotide
  Sense strand starting at position 3713 of SEQ ID NO: 1883938
guaggauaaguguggguua

SEQ ID NO: 2227743 - RNA, 19 nt, Artificial Sequence
  Description of Artificial Sequence: Synthetic oligonucleotide
  Antisense strand to SEQ ID NO: 2227742
uaacccacacuuauccuac

SEQ ID NO: 2227744 - RNA, 19 nt, Artificial Sequence
  Description of Artificial Sequence: Synthetic oligonucleotide
  Sense strand starting at position 3715 of SEQ ID NO: 1883938
aggauaaguguggguuaac

SEQ ID NO: 2227745 - RNA, 19 nt, Artificial Sequence
  Description of Artificial Sequence: Synthetic oligonucleotide
  Antisense strand to SEQ ID NO: 2227744
guuaacccacacuuauccu

SEQ ID NO: 2227746 - RNA, 19 nt, Artificial Sequence
  Description of Artificial Sequence: Synthetic oligonucleotide
  Sense strand starting at position 3716 of SEQ ID NO: 1883938
ggauaaguguggguuaacu

SEQ ID NO: 2227747 - RNA, 19 nt, Artificial Sequence
  Description of Artificial Sequence: Synthetic oligonucleotide
  Antisense strand to SEQ ID NO: 2227746
aguuaacccacacuuaucc

SEQ ID NO: 2227748 - RNA, 19 nt, Artificial Sequence
  Description of Artificial Sequence: Synthetic oligonucleotide
  Sense strand starting at position 3718 of SEQ ID NO: 1883938
auaaguguggguuaacuuu

SEQ ID NO: 2227749 - RNA, 19 nt, Artificial Sequence
  Description of Artificial Sequence: Synthetic oligonucleotide
  Antisense strand to SEQ ID NO: 2227748
aaaguuaacccacacuuau

SEQ ID NO: 2227750 - RNA, 19 nt, Artificial Sequence
  Description of Artificial Sequence: Synthetic oligonucleotide
  Sense strand starting at position 3794 of SEQ ID NO: 1883938
uccacaagcugagucauua

SEQ ID NO: 2227751 - RNA, 19 nt, Artificial Sequence
  Description of Artificial Sequence: Synthetic oligonucleotide
  Antisense strand to SEQ ID NO: 2227750
uaaugacucagcuugugga

SEQ ID NO: 2227752 - RNA, 19 nt, Artificial Sequence
  Description of Artificial Sequence: Synthetic oligonucleotide
  Sense strand starting at position 3798 of SEQ ID NO: 1883938
caagcugagucauuagaua

SEQ ID NO: 2227753 - RNA, 19 nt, Artificial Sequence
  Description of Artificial Sequence: Synthetic oligonucleotide
  Antisense strand to SEQ ID NO: 2227752
uaucuaaugacucagcuug

SEQ ID NO: 2227754 - RNA, 19 nt, Artificial Sequence
  Description of Artificial Sequence: Synthetic oligonucleotide
  Sense strand starting at position 3803 of SEQ ID NO: 1883938
ugagucauuagauagcagu

SEQ ID NO: 2227755 - RNA, 19 nt, Artificial Sequence
  Description of Artificial Sequence: Synthetic oligonucleotide
  Antisense strand to SEQ ID NO: 2227754
acugcuaucuaaugacuca

SEQ ID NO: 2227756 - RNA, 19 nt, Artificial Sequence
  Description of Artificial Sequence: Synthetic oligonucleotide
  Sense strand starting at position 3859 of SEQ ID NO: 1883938
uggaaugacaccuguuuag

SEQ ID NO: 2227757 - RNA, 19 nt, Artificial Sequence
  Description of Artificial Sequence: Synthetic oligonucleotide
  Antisense strand to SEQ ID NO: 2227756
cuaaacaggugucauucca

SEQ ID NO: 2227758 - RNA, 19 nt, Artificial Sequence
  Description of Artificial Sequence: Synthetic oligonucleotide
  Sense strand starting at position 3904 of SEQ ID NO: 1883938
ggcugaauauuauucugac

SEQ ID NO: 2227759 - RNA, 19 nt, Artificial Sequence
  Description of Artificial Sequence: Synthetic oligonucleotide
  Antisense strand to SEQ ID NO: 2227758
gucagaauaauauucagcc

SEQ ID NO: 2227760 - RNA, 19 nt, Artificial Sequence
  Description of Artificial Sequence: Synthetic oligonucleotide
  Sense strand starting at position 3905 of SEQ ID NO: 1883938
gcugaauauuauucugaca

SEQ ID NO: 2227761 - RNA, 19 nt, Artificial Sequence
  Description of Artificial Sequence: Synthetic oligonucleotide
  Antisense strand to SEQ ID NO: 2227760
ugucagaauaauauucagc

SEQ ID NO: 2227762 - RNA, 19 nt, Artificial Sequence
  Description of Artificial Sequence: Synthetic oligonucleotide
  Sense strand starting at position 3940 of SEQ ID NO: 1883938
aacauuagguuccugaaag

SEQ ID NO: 2227763 - RNA, 19 nt, Artificial Sequence
  Description of Artificial Sequence: Synthetic oligonucleotide
  Antisense strand to SEQ ID NO: 2227762
cuuucaggaaccuaauguu

SEQ ID NO: 2227764 - RNA, 19 nt, Artificial Sequence
  Description of Artificial Sequence: Synthetic oligonucleotide
  Sense strand starting at position 1990 of SEQ ID NO: 1883939
guuagaucuuggcucacuc

SEQ ID NO: 2227765 - RNA, 19 nt, Artificial Sequence
  Description of Artificial Sequence: Synthetic oligonucleotide
  Antisense strand to SEQ ID NO: 2227764
gagugagccaagaucuaac

SEQ ID NO: 2227766 - RNA, 19 nt, Artificial Sequence
  Description of Artificial Sequence: Synthetic oligonucleotide
  Sense strand starting at position 2090 of SEQ ID NO: 1883939
auuaucgagucagauaauc

SEQ ID NO: 2227767 - RNA, 19 nt, Artificial Sequence
  Description of Artificial Sequence: Synthetic oligonucleotide
  Antisense strand to SEQ ID NO: 2227766
gauuaucugacucgauaau

SEQ ID NO: 2227768 - RNA, 19 nt, Artificial Sequence
  Description of Artificial Sequence: Synthetic oligonucleotide
  Sense strand starting at position 2108 of SEQ ID NO: 1883939
ccuguauuguugccacuau

SEQ ID NO: 2227769 - RNA, 19 nt, Artificial Sequence
  Description of Artificial Sequence: Synthetic oligonucleotide
  Antisense strand to SEQ ID NO: 2227768
auaguggcaacaauacagg

SEQ ID NO: 2227770 - RNA, 19 nt, Artificial Sequence
  Description of Artificial Sequence: Synthetic oligonucleotide
  Sense strand starting at position 2223 of SEQ ID NO: 1883939
uccugagaggccugauaga

SEQ ID NO: 2227771 - RNA, 19 nt, Artificial Sequence
  Description of Artificial Sequence: Synthetic oligonucleotide
  Antisense strand to SEQ ID NO: 2227770
ucuaucaggccucucagga

SEQ ID NO: 2227772 - RNA, 19 nt, Artificial Sequence
  Description of Artificial Sequence: Synthetic oligonucleotide
  Sense strand starting at position 2233 of SEQ ID NO: 1883939
ccugauagaugucccugaa

SEQ ID NO: 2227773 - RNA, 19 nt, Artificial Sequence
  Description of Artificial Sequence: Synthetic oligonucleotide
  Antisense strand to SEQ ID NO: 2227772
uucagggacaucuaucagg

SEQ ID NO: 2227774 - RNA, 19 nt, Artificial Sequence
  Description of Artificial Sequence: Synthetic oligonucleotide
  Sense strand starting at position 2236 of SEQ ID NO: 1883939
gauagaugucccugaauuc

SEQ ID NO: 2227775 - RNA, 19 nt, Artificial Sequence
  Description of Artificial Sequence: Synthetic oligonucleotide
  Antisense strand to SEQ ID NO: 2227774
gaauucagggacaucuauc

SEQ ID NO: 2227776 - RNA, 19 nt, Artificial Sequence
  Description of Artificial Sequence: Synthetic oligonucleotide
  Sense strand starting at position 2237 of SEQ ID NO: 1883939
auagaugucccugaauucu

SEQ ID NO: 2227777 - RNA, 19 nt, Artificial Sequence
  Description of Artificial Sequence: Synthetic oligonucleotide
  Antisense strand to SEQ ID NO: 2227776
agaauucagggacaucuau

SEQ ID NO: 2227778 - RNA, 19 nt, Artificial Sequence
  Description of Artificial Sequence: Synthetic oligonucleotide
  Sense strand starting at position 2246 of SEQ ID NO: 1883939
ccugaauucuguccagcca

SEQ ID NO: 2227779 - RNA, 19 nt, Artificial Sequence
  Description of Artificial Sequence: Synthetic oligonucleotide
  Antisense strand to SEQ ID NO: 2227778
uggcuggacagaauucagg

SEQ ID NO: 2227780 - RNA, 19 nt, Artificial Sequence
  Description of Artificial Sequence: Synthetic oligonucleotide
  Sense strand starting at position 2247 of SEQ ID NO: 1883939
cugaauucuguccagccau

SEQ ID NO: 2227781 - RNA, 19 nt, Artificial Sequence
  Description of Artificial Sequence: Synthetic oligonucleotide
  Antisense strand to SEQ ID NO: 2227780
auggcuggacagaauucag

SEQ ID NO: 2227782 - RNA, 19 nt, Artificial Sequence
  Description of Artificial Sequence: Synthetic oligonucleotide
  Sense strand starting at position 2265 of SEQ ID NO: 1883939
ugccaugacugacagaaca

SEQ ID NO: 2227783 - RNA, 19 nt, Artificial Sequence
  Description of Artificial Sequence: Synthetic oligonucleotide
  Antisense strand to SEQ ID NO: 2227782
uguucugucagucauggca

SEQ ID NO: 2227784 - RNA, 19 nt, Artificial Sequence
  Description of Artificial Sequence: Synthetic oligonucleotide
  Sense strand starting at position 2301 of SEQ ID NO: 1883939
ucacacacgguuugagaaa

SEQ ID NO: 2227785 - RNA, 19 nt, Artificial Sequence
  Description of Artificial Sequence: Synthetic oligonucleotide
  Antisense strand to SEQ ID NO: 2227784
uuucucaaaccguguguga

SEQ ID NO: 2227786 - RNA, 19 nt, Artificial Sequence
  Description of Artificial Sequence: Synthetic oligonucleotide
  Sense strand starting at position 2391 of SEQ ID NO: 1883939
ucagaaaccuuaggaauug

SEQ ID NO: 2227787 - RNA, 19 nt, Artificial Sequence
  Description of Artificial Sequence: Synthetic oligonucleotide
  Antisense strand to SEQ ID NO: 2227786
caauuccuaagguuucuga

SEQ ID NO: 2227788 - RNA, 19 nt, Artificial Sequence
  Description of Artificial Sequence: Synthetic oligonucleotide
  Sense strand starting at position 2401 of SEQ ID NO: 1883939
uaggaauugucacaguuac

SEQ ID NO: 2227789 - RNA, 19 nt, Artificial Sequence
  Description of Artificial Sequence: Synthetic oligonucleotide
  Antisense strand to SEQ ID NO: 2227788
guaacugugacaauuccua

SEQ ID NO: 2227790 - RNA, 19 nt, Artificial Sequence
  Description of Artificial Sequence: Synthetic oligonucleotide
  Sense strand starting at position 2524 of SEQ ID NO: 1883939
gugaaacacucauggagaa

SEQ ID NO: 2227791 - RNA, 19 nt, Artificial Sequence
  Description of Artificial Sequence: Synthetic oligonucleotide
  Antisense strand to SEQ ID NO: 2227790
uucuccaugaguguuucac

SEQ ID NO: 2227792 - RNA, 19 nt, Artificial Sequence
  Description of Artificial Sequence: Synthetic oligonucleotide
  Sense strand starting at position 2695 of SEQ ID NO: 1883939
ucccuucuguagucagacu

SEQ ID NO: 2227793 - RNA, 19 nt, Artificial Sequence
  Description of Artificial Sequence: Synthetic oligonucleotide
  Antisense strand to SEQ ID NO: 2227792
agucugacuacagaaggga

SEQ ID NO: 2227794 - RNA, 19 nt, Artificial Sequence
  Description of Artificial Sequence: Synthetic oligonucleotide
  Sense strand starting at position 2770 of SEQ ID NO: 1883939
ggcugcaugaaauguucua

SEQ ID NO: 2227795 - RNA, 19 nt, Artificial Sequence
  Description of Artificial Sequence: Synthetic oligonucleotide
  Antisense strand to SEQ ID NO: 2227794
uagaacauuucaugcagcc

SEQ ID NO: 2227796 - RNA, 19 nt, Artificial Sequence
  Description of Artificial Sequence: Synthetic oligonucleotide
  Sense strand starting at position 2789 of SEQ ID NO: 1883939
acgggaauccagugcuaug

SEQ ID NO: 2227797 - RNA, 19 nt, Artificial Sequence
  Description of Artificial Sequence: Synthetic oligonucleotide
  Antisense strand to SEQ ID NO: 2227796
cauagcacuggauucccgu

SEQ ID NO: 2227798 - RNA, 19 nt, Artificial Sequence
  Description of Artificial Sequence: Synthetic oligonucleotide
  Sense strand starting at position 2792 of SEQ ID NO: 1883939
ggaauccagugcuaugaag

SEQ ID NO: 2227799 - RNA, 19 nt, Artificial Sequence
  Description of Artificial Sequence: Synthetic oligonucleotide
  Antisense strand to SEQ ID NO: 2227798
cuucauagcacuggauucc

SEQ ID NO: 2227800 - RNA, 19 nt, Artificial Sequence
  Description of Artificial Sequence: Synthetic oligonucleotide
  Sense strand starting at position 2818 of SEQ ID NO: 1883939
ggauucuaaugggaaucca

SEQ ID NO: 2227801 - RNA, 19 nt, Artificial Sequence
  Description of Artificial Sequence: Synthetic oligonucleotide
  Antisense strand to SEQ ID NO: 2227800
uggauucccauuagaaucc

SEQ ID NO: 2227802 - RNA, 19 nt, Artificial Sequence
  Description of Artificial Sequence: Synthetic oligonucleotide
  Sense strand starting at position 2826 of SEQ ID NO: 1883939
augggaauccagugcuaug

SEQ ID NO: 2227803 - RNA, 19 nt, Artificial Sequence
  Description of Artificial Sequence: Synthetic oligonucleotide
  Antisense strand to SEQ ID NO: 2227802
cauagcacuggauucccau

SEQ ID NO: 2227804 - RNA, 19 nt, Artificial Sequence
  Description of Artificial Sequence: Synthetic oligonucleotide
  Sense strand starting at position 2837 of SEQ ID NO: 1883939
gugcuaugcuauccugaua

SEQ ID NO: 2227805 - RNA, 19 nt, Artificial Sequence
  Description of Artificial Sequence: Synthetic oligonucleotide
  Antisense strand to SEQ ID NO: 2227804
uaucaggauagcauagcac

SEQ ID NO: 2227806 - RNA, 19 nt, Artificial Sequence
  Description of Artificial Sequence: Synthetic oligonucleotide
  Sense strand starting at position 2842 of SEQ ID NO: 1883939
augcuauccugauaauaag

SEQ ID NO: 2227807 - RNA, 19 nt, Artificial Sequence
  Description of Artificial Sequence: Synthetic oligonucleotide
  Antisense strand to SEQ ID NO: 2227806
cuuauuaucaggauagcau

SEQ ID NO: 2227808 - RNA, 19 nt, Artificial Sequence
  Description of Artificial Sequence: Synthetic oligonucleotide
  Sense strand starting at position 2934 of SEQ ID NO: 1883939
ggcugucuucugcagggua

SEQ ID NO: 2227809 - RNA, 19 nt, Artificial Sequence
  Description of Artificial Sequence: Synthetic oligonucleotide
  Antisense strand to SEQ ID NO: 2227808
uacccugcagaagacagcc

SEQ ID NO: 2227810 - RNA, 19 nt, Artificial Sequence
  Description of Artificial Sequence: Synthetic oligonucleotide
  Sense strand starting at position 3042 of SEQ ID NO: 1883939
gccaaaugaucccugugga

SEQ ID NO: 2227811 - RNA, 19 nt, Artificial Sequence
  Description of Artificial Sequence: Synthetic oligonucleotide
  Antisense strand to SEQ ID NO: 2227810
uccacagggaucauuuggc

SEQ ID NO: 2227812 - RNA, 19 nt, Artificial Sequence
  Description of Artificial Sequence: Synthetic oligonucleotide
  Sense strand starting at position 3043 of SEQ ID NO: 1883939
ccaaaugaucccuguggaa

SEQ ID NO: 2227813 - RNA, 19 nt, Artificial Sequence
  Description of Artificial Sequence: Synthetic oligonucleotide
  Antisense strand to SEQ ID NO: 2227812
uuccacagggaucauuugg

SEQ ID NO: 2227814 - RNA, 19 nt, Artificial Sequence
  Description of Artificial Sequence: Synthetic oligonucleotide
  Sense strand starting at position 3045 of SEQ ID NO: 1883939
aaaugaucccuguggaaua

SEQ ID NO: 2227815 - RNA, 19 nt, Artificial Sequence
  Description of Artificial Sequence: Synthetic oligonucleotide
  Antisense strand to SEQ ID NO: 2227814
uauuccacagggaucauuu

SEQ ID NO: 2227816 - RNA, 19 nt, Artificial Sequence
  Description of Artificial Sequence: Synthetic oligonucleotide
  Sense strand starting at position 3238 of SEQ ID NO: 1883939
aaagucaggugaggaauua

SEQ ID NO: 2227817 - RNA, 19 nt, Artificial Sequence
  Description of Artificial Sequence: Synthetic oligonucleotide
  Antisense strand to SEQ ID NO: 2227816
uaauuccucaccugacuuu

SEQ ID NO: 2227818 - RNA, 19 nt, Artificial Sequence
  Description of Artificial Sequence: Synthetic oligonucleotide
  Sense strand starting at position 3302 of SEQ ID NO: 1883939
guagcuuaagucugaguuu

SEQ ID NO: 2227819 - RNA, 19 nt, Artificial Sequence
  Description of Artificial Sequence: Synthetic oligonucleotide
  Antisense strand to SEQ ID NO: 2227818
aaacucagacuuaagcuac

SEQ ID NO: 2227820 - RNA, 19 nt, Artificial Sequence
  Description of Artificial Sequence: Synthetic oligonucleotide
  Sense strand starting at position 3388 of SEQ ID NO: 1883939
ugugcuugcuucuuacaga

SEQ ID NO: 2227821 - RNA, 19 nt, Artificial Sequence
  Description of Artificial Sequence: Synthetic oligonucleotide
  Antisense strand to SEQ ID NO: 2227820
ucuguaagaagcaagcaca

SEQ ID NO: 2227822 - RNA, 19 nt, Artificial Sequence
  Description of Artificial Sequence: Synthetic oligonucleotide
  Sense strand starting at position 3410 of SEQ ID NO: 1883939
gacagauuaccgugucuug

SEQ ID NO: 2227823 - RNA, 19 nt, Artificial Sequence
  Description of Artificial Sequence: Synthetic oligonucleotide
  Antisense strand to SEQ ID NO: 2227822
caagacacgguaaucuguc

SEQ ID NO: 2227824 - RNA, 19 nt, Artificial Sequence
  Description of Artificial Sequence: Synthetic oligonucleotide
  Sense strand starting at position 3413 of SEQ ID NO: 1883939
agauuaccgugucuugaau

SEQ ID NO: 2227825 - RNA, 19 nt, Artificial Sequence
  Description of Artificial Sequence: Synthetic oligonucleotide
  Antisense strand to SEQ ID NO: 2227824
auucaagacacgguaaucu

SEQ ID NO: 2227826 - RNA, 19 nt, Artificial Sequence
  Description of Artificial Sequence: Synthetic oligonucleotide
  Sense strand starting at position 3415 of SEQ ID NO: 1883939
auuaccgugucuugaauuu

SEQ ID NO: 2227827 - RNA, 19 nt, Artificial Sequence
  Description of Artificial Sequence: Synthetic oligonucleotide
  Antisense strand to SEQ ID NO: 2227826
aaauucaagacacgguaau

SEQ ID NO: 2227828 - RNA, 19 nt, Artificial Sequence
  Description of Artificial Sequence: Synthetic oligonucleotide
  Sense strand starting at position 3583 of SEQ ID NO: 1883939
acaggcaucuauuauaaug

SEQ ID NO: 2227829 - RNA, 19 nt, Artificial Sequence
  Description of Artificial Sequence: Synthetic oligonucleotide
  Antisense strand to SEQ ID NO: 2227828
cauuauaauagaugccugu

SEQ ID NO: 2227830 - RNA, 19 nt, Artificial Sequence
  Description of Artificial Sequence: Synthetic oligonucleotide
  Sense strand starting at position 3684 of SEQ ID NO: 1883939
aagggauccugggauguca

SEQ ID NO: 2227831 - RNA, 19 nt, Artificial Sequence
  Description of Artificial Sequence: Synthetic oligonucleotide
  Antisense strand to SEQ ID NO: 2227830
ugacaucccaggaucccuu

SEQ ID NO: 2227832 - RNA, 19 nt, Artificial Sequence
  Description of Artificial Sequence: Synthetic oligonucleotide
  Sense strand starting at position 3726 of SEQ ID NO: 1883939
gcaucuguucuggaaacag

SEQ ID NO: 2227833 - RNA, 19 nt, Artificial Sequence
  Description of Artificial Sequence: Synthetic oligonucleotide
  Antisense strand to SEQ ID NO: 2227832
cuguuuccagaacagaugc

SEQ ID NO: 2227834 - RNA, 19 nt, Artificial Sequence
  Description of Artificial Sequence: Synthetic oligonucleotide
  Sense strand starting at position 3845 of SEQ ID NO: 1883939
ugaauaacuggguguguuu

SEQ ID NO: 2227835 - RNA, 19 nt, Artificial Sequence
  Description of Artificial Sequence: Synthetic oligonucleotide
  Antisense strand to SEQ ID NO: 2227834
aaacacacccaguuauuca

SEQ ID NO: 2227836 - RNA, 19 nt, Artificial Sequence
  Description of Artificial Sequence: Synthetic oligonucleotide
  Sense strand starting at position 3866 of SEQ ID NO: 1883939
cuguuuaauuuaggcauuu

SEQ ID NO: 2227837 - RNA, 19 nt, Artificial Sequence
  Description of Artificial Sequence: Synthetic oligonucleotide
  Antisense strand to SEQ ID NO: 2227836
aaaugccuaaauuaaacag

SEQ ID NO: 2227838 - RNA, 19 nt, Artificial Sequence
  Description of Artificial Sequence: Synthetic oligonucleotide
  Sense strand starting at position 3919 of SEQ ID NO: 1883939
ucugauuguuucuuaagag

SEQ ID NO: 2227839 - RNA, 19 nt, Artificial Sequence
  Description of Artificial Sequence: Synthetic oligonucleotide
  Antisense strand to SEQ ID NO: 2227838
cucuuaagaaacaaucaga

SEQ ID NO: 2227840 - RNA, 19 nt, Artificial Sequence
  Description of Artificial Sequence: Synthetic oligonucleotide
  Sense strand starting at position 3920 of SEQ ID NO: 1883939
cugauuguuucuuaagaga

SEQ ID NO: 2227841 - RNA, 19 nt, Artificial Sequence
  Description of Artificial Sequence: Synthetic oligonucleotide
  Antisense strand to SEQ ID NO: 2227840
ucucuuaagaaacaaucag

SEQ ID NO: 2227842 - RNA, 19 nt, Artificial Sequence
  Description of Artificial Sequence: Synthetic oligonucleotide
  Sense strand starting at position 3971 of SEQ ID NO: 1883939
aguuauucuugaccauaua

SEQ ID NO: 2227843 - RNA, 19 nt, Artificial Sequence
  Description of Artificial Sequence: Synthetic oligonucleotide
  Antisense strand to SEQ ID NO: 2227842
uauauggucaagaauaacu

SEQ ID NO: 2227844 - RNA, 19 nt, Artificial Sequence
  Description of Artificial Sequence: Synthetic oligonucleotide
  Sense strand starting at position 105 of SEQ ID NO: 1883940
ugcacuuauggucaguuga

SEQ ID NO: 2227845 - RNA, 19 nt, Artificial Sequence
  Description of Artificial Sequence: Synthetic oligonucleotide
  Antisense strand to SEQ ID NO: 2227844
ucaacugaccauaagugca

SEQ ID NO: 2227846 - RNA, 19 nt, Artificial Sequence
  Description of Artificial Sequence: Synthetic oligonucleotide
  Sense strand starting at position 107 of SEQ ID NO: 1883940
cacuuauggucaguugauu

SEQ ID NO: 2227847 - RNA, 19 nt, Artificial Sequence
  Description of Artificial Sequence: Synthetic oligonucleotide
  Antisense strand to SEQ ID NO: 2227846
aaucaacugaccauaagug

SEQ ID NO: 2227848 - RNA, 19 nt, Artificial Sequence
  Description of Artificial Sequence: Synthetic oligonucleotide
  Sense strand starting at position 174 of SEQ ID NO: 1883940
gcaaauugugcugggacaa

SEQ ID NO: 2227849 - RNA, 19 nt, Artificial Sequence
  Description of Artificial Sequence: Synthetic oligonucleotide
  Antisense strand to SEQ ID NO: 2227848
uugucccagcacaauuugc

SEQ ID NO: 2227850 - RNA, 19 nt, Artificial Sequence
  Description of Artificial Sequence: Synthetic oligonucleotide
  Sense strand starting at position 270 of SEQ ID NO: 1883940
aagacuuaacuguaguagu

SEQ ID NO: 2227851 - RNA, 19 nt, Artificial Sequence
  Description of Artificial Sequence: Synthetic oligonucleotide
  Antisense strand to SEQ ID NO: 2227850
acuacuacaguuaagucuu

SEQ ID NO: 2227852 - RNA, 19 nt, Artificial Sequence
  Description of Artificial Sequence: Synthetic oligonucleotide
  Sense strand starting at position 433 of SEQ ID NO: 1883940
ccuacauguuuaucagaug

SEQ ID NO: 2227853 - RNA, 19 nt, Artificial Sequence
  Description of Artificial Sequence: Synthetic oligonucleotide
  Antisense strand to SEQ ID NO: 2227852
caucugauaaacauguagg

SEQ ID NO: 2227854 - RNA, 19 nt, Artificial Sequence
  Description of Artificial Sequence: Synthetic oligonucleotide
  Sense strand starting at position 524 of SEQ ID NO: 1883940
ccauguuauauacggauga

SEQ ID NO: 2227855 - RNA, 19 nt, Artificial Sequence
  Description of Artificial Sequence: Synthetic oligonucleotide
  Antisense strand to SEQ ID NO: 2227854
ucauccguauauaacaugg

SEQ ID NO: 2227856 - RNA, 19 nt, Artificial Sequence
  Description of Artificial Sequence: Synthetic oligonucleotide
  Sense strand starting at position 528 of SEQ ID NO: 1883940
guuauauacggaugaaccu

SEQ ID NO: 2227857 - RNA, 19 nt, Artificial Sequence
  Description of Artificial Sequence: Synthetic oligonucleotide
  Antisense strand to SEQ ID NO: 2227856
agguucauccguauauaac

SEQ ID NO: 2227858 - RNA, 19 nt, Artificial Sequence
  Description of Artificial Sequence: Synthetic oligonucleotide
  Sense strand starting at position 712 of SEQ ID NO: 1883940
gggauuucuucuuagggug

SEQ ID NO: 2227859 - RNA, 19 nt, Artificial Sequence
  Description of Artificial Sequence: Synthetic oligonucleotide
  Antisense strand to SEQ ID NO: 2227858
cacccuaagaagaaauccc

SEQ ID NO: 2227860 - RNA, 19 nt, Artificial Sequence
  Description of Artificial Sequence: Synthetic oligonucleotide
  Sense strand starting at position 769 of SEQ ID NO: 1883940
cuuugugaauaugccauaa

SEQ ID NO: 2227861 - RNA, 19 nt, Artificial Sequence
  Description of Artificial Sequence: Synthetic oligonucleotide
  Antisense strand to SEQ ID NO: 2227860
uuauggcauauucacaaag

SEQ ID NO: 2227862 - RNA, 19 nt, Artificial Sequence
  Description of Artificial Sequence: Synthetic oligonucleotide
  Sense strand starting at position 773 of SEQ ID NO: 1883940
gugaauaugccauaaacca

SEQ ID NO: 2227863 - RNA, 19 nt, Artificial Sequence
  Description of Artificial Sequence: Synthetic oligonucleotide
  Antisense strand to SEQ ID NO: 2227862
ugguuuauggcauauucac

SEQ ID NO: 2227864 - RNA, 19 nt, Artificial Sequence
  Description of Artificial Sequence: Synthetic oligonucleotide
  Sense strand starting at position 781 of SEQ ID NO: 1883940
gccauaaaccacugaauug

SEQ ID NO: 2227865 - RNA, 19 nt, Artificial Sequence
  Description of Artificial Sequence: Synthetic oligonucleotide
  Antisense strand to SEQ ID NO: 2227864
caauucagugguuuauggc

SEQ ID NO: 2227866 - RNA, 19 nt, Artificial Sequence
  Description of Artificial Sequence: Synthetic oligonucleotide
  Sense strand starting at position 793 of SEQ ID NO: 1883940
ugaauuguaguaugugaau

SEQ ID NO: 2227867 - RNA, 19 nt, Artificial Sequence
  Description of Artificial Sequence: Synthetic oligonucleotide
  Antisense strand to SEQ ID NO: 2227866
auucacauacuacaauuca

SEQ ID NO: 2227868 - RNA, 19 nt, Artificial Sequence
  Description of Artificial Sequence: Synthetic oligonucleotide
  Sense strand starting at position 869 of SEQ ID NO: 1883940
cuuagaaacuaagaauaag

SEQ ID NO: 2227869 - RNA, 19 nt, Artificial Sequence
  Description of Artificial Sequence: Synthetic oligonucleotide
  Antisense strand to SEQ ID NO: 2227868
cuuauucuuaguuucuaag

SEQ ID NO: 2227870 - RNA, 19 nt, Artificial Sequence
  Description of Artificial Sequence: Synthetic oligonucleotide
  Sense strand starting at position 992 of SEQ ID NO: 1883940
gacauuguucuagaaguua

SEQ ID NO: 2227871 - RNA, 19 nt, Artificial Sequence
  Description of Artificial Sequence: Synthetic oligonucleotide
  Antisense strand to SEQ ID NO: 2227870
uaacuucuagaacaauguc

SEQ ID NO: 2227872 - RNA, 19 nt, Artificial Sequence
  Description of Artificial Sequence: Synthetic oligonucleotide
  Sense strand starting at position 1028 of SEQ ID NO: 1883940
gugaaacagaaauguugua

SEQ ID NO: 2227873 - RNA, 19 nt, Artificial Sequence
  Description of Artificial Sequence: Synthetic oligonucleotide
  Antisense strand to SEQ ID NO: 2227872
uacaacauuucuguuucac

SEQ ID NO: 2227874 - RNA, 19 nt, Artificial Sequence
  Description of Artificial Sequence: Synthetic oligonucleotide
  Sense strand starting at position 1222 of SEQ ID NO: 1883940
cuagauaaguagcuauuaa

SEQ ID NO: 2227875 - RNA, 19 nt, Artificial Sequence
  Description of Artificial Sequence: Synthetic oligonucleotide
  Antisense strand to SEQ ID NO: 2227874
uuaauagcuacuuaucuag

SEQ ID NO: 2227876 - RNA, 19 nt, Artificial Sequence
  Description of Artificial Sequence: Synthetic oligonucleotide
  Sense strand starting at position 1995 of SEQ ID NO: 1883940
augcuuugaccugaaaugu

SEQ ID NO: 2227877 - RNA, 19 nt, Artificial Sequence
  Description of Artificial Sequence: Synthetic oligonucleotide
  Antisense strand to SEQ ID NO: 2227876
acauuucaggucaaagcau

SEQ ID NO: 2227878 - RNA, 19 nt, Artificial Sequence
  Description of Artificial Sequence: Synthetic oligonucleotide
  Sense strand starting at position 2098 of SEQ ID NO: 1883940
ugagaauuucuguggugcu

SEQ ID NO: 2227879 - RNA, 19 nt, Artificial Sequence
  Description of Artificial Sequence: Synthetic oligonucleotide
  Antisense strand to SEQ ID NO: 2227878
agcaccacagaaauucuca

SEQ ID NO: 2227880 - RNA, 19 nt, Artificial Sequence
  Description of Artificial Sequence: Synthetic oligonucleotide
  Sense strand starting at position 2113 of SEQ ID NO: 1883940
ugcucaguaauggguuaaa

SEQ ID NO: 2227881 - RNA, 19 nt, Artificial Sequence
  Description of Artificial Sequence: Synthetic oligonucleotide
  Antisense strand to SEQ ID NO: 2227880
uuuaacccauuacugagca

SEQ ID NO: 2227882 - RNA, 19 nt, Artificial Sequence
  Description of Artificial Sequence: Synthetic oligonucleotide
  Sense strand starting at position 2530 of SEQ ID NO: 1883940
gggagugccuaauccaaua

SEQ ID NO: 2227883 - RNA, 19 nt, Artificial Sequence
  Description of Artificial Sequence: Synthetic oligonucleotide
  Antisense strand to SEQ ID NO: 2227882
uauuggauuaggcacuccc

SEQ ID NO: 2227884 - RNA, 19 nt, Artificial Sequence
  Description of Artificial Sequence: Synthetic oligonucleotide
  Sense strand starting at position 2549 of SEQ ID NO: 1883940
ugaccagagucuuuauaag

SEQ ID NO: 2227885 - RNA, 19 nt, Artificial Sequence
  Description of Artificial Sequence: Synthetic oligonucleotide
  Antisense strand to SEQ ID NO: 2227884
cuuauaaagacucugguca

SEQ ID NO: 2227886 - RNA, 19 nt, Artificial Sequence
  Description of Artificial Sequence: Synthetic oligonucleotide
  Sense strand starting at position 2630 of SEQ ID NO: 1883940
uggcaucugugaguggaaa

SEQ ID NO: 2227887 - RNA, 19 nt, Artificial Sequence
  Description of Artificial Sequence: Synthetic oligonucleotide
  Antisense strand to SEQ ID NO: 2227886
uuuccacucacagaugcca

SEQ ID NO: 2227888 - RNA, 19 nt, Artificial Sequence
  Description of Artificial Sequence: Synthetic oligonucleotide
  Sense strand starting at position 2675 of SEQ ID NO: 1883940
gugacaccuugaucuccaa

SEQ ID NO: 2227889 - RNA, 19 nt, Artificial Sequence
  Description of Artificial Sequence: Synthetic oligonucleotide
  Antisense strand to SEQ ID NO: 2227888
uuggagaucaaggugucac

SEQ ID NO: 2227890 - RNA, 19 nt, Artificial Sequence
  Description of Artificial Sequence: Synthetic oligonucleotide
  Sense strand starting at position 2696 of SEQ ID NO: 1883940
gugucacagaacugugaga

SEQ ID NO: 2227891 - RNA, 19 nt, Artificial Sequence
  Description of Artificial Sequence: Synthetic oligonucleotide
  Antisense strand to SEQ ID NO: 2227890
ucucacaguucugugacac

SEQ ID NO: 2227892 - RNA, 19 nt, Artificial Sequence
  Description of Artificial Sequence: Synthetic oligonucleotide
  Sense strand starting at position 2698 of SEQ ID NO: 1883940
gucacagaacugugagaca

SEQ ID NO: 2227893 - RNA, 19 nt, Artificial Sequence
  Description of Artificial Sequence: Synthetic oligonucleotide
  Antisense strand to SEQ ID NO: 2227892
ugucucacaguucugugac

SEQ ID NO: 2227894 - RNA, 19 nt, Artificial Sequence
  Description of Artificial Sequence: Synthetic oligonucleotide
  Sense strand starting at position 2920 of SEQ ID NO: 1883940
gauguaaaugcugguaaua

SEQ ID NO: 2227895 - RNA, 19 nt, Artificial Sequence
  Description of Artificial Sequence: Synthetic oligonucleotide
  Antisense strand to SEQ ID NO: 2227894
uauuaccagcauuuacauc

SEQ ID NO: 2227896 - RNA, 19 nt, Artificial Sequence
  Description of Artificial Sequence: Synthetic oligonucleotide
  Sense strand starting at position 2930 of SEQ ID NO: 1883940
cugguaauagcauaaauac

SEQ ID NO: 2227897 - RNA, 19 nt, Artificial Sequence
  Description of Artificial Sequence: Synthetic oligonucleotide
  Antisense strand to SEQ ID NO: 2227896
guauuuaugcuauuaccag

SEQ ID NO: 2227898 - RNA, 19 nt, Artificial Sequence
  Description of Artificial Sequence: Synthetic oligonucleotide
  Sense strand starting at position 3146 of SEQ ID NO: 1883940
agaggaugugcugagcuuu

SEQ ID NO: 2227899 - RNA, 19 nt, Artificial Sequence
  Description of Artificial Sequence: Synthetic oligonucleotide
  Antisense strand to SEQ ID NO: 2227898
aaagcucagcacauccucu

SEQ ID NO: 2227900 - RNA, 19 nt, Artificial Sequence
  Description of Artificial Sequence: Synthetic oligonucleotide
  Sense strand starting at position 3499 of SEQ ID NO: 1883940
gugagaauucccuaaagca

SEQ ID NO: 2227901 - RNA, 19 nt, Artificial Sequence
  Description of Artificial Sequence: Synthetic oligonucleotide
  Antisense strand to SEQ ID NO: 2227900
ugcuuuagggaauucucac

SEQ ID NO: 2227902 - RNA, 19 nt, Artificial Sequence
  Description of Artificial Sequence: Synthetic oligonucleotide
  Sense strand starting at position 3523 of SEQ ID NO: 1883940
uggcaaacuugacuacuau

SEQ ID NO: 2227903 - RNA, 19 nt, Artificial Sequence
  Description of Artificial Sequence: Synthetic oligonucleotide
  Antisense strand to SEQ ID NO: 2227902
auaguagucaaguuugcca

SEQ ID NO: 2227904 - RNA, 19 nt, Artificial Sequence
  Description of Artificial Sequence: Synthetic oligonucleotide
  Sense strand starting at position 3524 of SEQ ID NO: 1883940
ggcaaacuugacuacuauu

SEQ ID NO: 2227905 - RNA, 19 nt, Artificial Sequence
  Description of Artificial Sequence: Synthetic oligonucleotide
  Antisense strand to SEQ ID NO: 2227904
aauaguagucaaguuugcc

SEQ ID NO: 2227906 - RNA, 19 nt, Artificial Sequence
  Description of Artificial Sequence: Synthetic oligonucleotide
  Sense strand starting at position 3588 of SEQ ID NO: 1883940
caguuauugcuguggaaau

SEQ ID NO: 2227907 - RNA, 19 nt, Artificial Sequence
  Description of Artificial Sequence: Synthetic oligonucleotide
  Antisense strand to SEQ ID NO: 2227906
auuuccacagcaauaacug

SEQ ID NO: 2227908 - RNA, 19 nt, Artificial Sequence
  Description of Artificial Sequence: Synthetic oligonucleotide
  Sense strand starting at position 3590 of SEQ ID NO: 1883940
guuauugcuguggaaauaa

SEQ ID NO: 2227909 - RNA, 19 nt, Artificial Sequence
  Description of Artificial Sequence: Synthetic oligonucleotide
  Antisense strand to SEQ ID NO: 2227908
uuauuuccacagcaauaac

SEQ ID NO: 2227910 - RNA, 19 nt, Artificial Sequence
  Description of Artificial Sequence: Synthetic oligonucleotide
  Sense strand starting at position 3725 of SEQ ID NO: 1883940
guuuaaugugacuaugggu

SEQ ID NO: 2227911 - RNA, 19 nt, Artificial Sequence
  Description of Artificial Sequence: Synthetic oligonucleotide
  Antisense strand to SEQ ID NO: 2227910
acccauagucacauuaaac

SEQ ID NO: 2227912 - RNA, 19 nt, Artificial Sequence
  Description of Artificial Sequence: Synthetic oligonucleotide
  Sense strand starting at position 3734 of SEQ ID NO: 1883940
gacuauggguguuugugaa

SEQ ID NO: 2227913 - RNA, 19 nt, Artificial Sequence
  Description of Artificial Sequence: Synthetic oligonucleotide
  Antisense strand to SEQ ID NO: 2227912
uucacaaacacccauaguc

SEQ ID NO: 2227914 - RNA, 19 nt, Artificial Sequence
  Description of Artificial Sequence: Synthetic oligonucleotide
  Sense strand starting at position 3755 of SEQ ID NO: 1883940
cgauuugccucuucuguga

SEQ ID NO: 2227915 - RNA, 19 nt, Artificial Sequence
  Description of Artificial Sequence: Synthetic oligonucleotide
  Antisense strand to SEQ ID NO: 2227914
ucacagaagaggcaaaucg

SEQ ID NO: 2227916 - RNA, 19 nt, Artificial Sequence
  Description of Artificial Sequence: Synthetic oligonucleotide
  Sense strand starting at position 3793 of SEQ ID NO: 1883940
ucagauucuccugaugggu

SEQ ID NO: 2227917 - RNA, 19 nt, Artificial Sequence
  Description of Artificial Sequence: Synthetic oligonucleotide
  Antisense strand to SEQ ID NO: 2227916
acccaucaggagaaucuga

SEQ ID NO: 2227918 - RNA, 19 nt, Artificial Sequence
  Description of Artificial Sequence: Synthetic oligonucleotide
  Sense strand starting at position 3796 of SEQ ID NO: 1883940
gauucuccugaugggugau

SEQ ID NO: 2227919 - RNA, 19 nt, Artificial Sequence
  Description of Artificial Sequence: Synthetic oligonucleotide
  Antisense strand to SEQ ID NO: 2227918
aucacccaucaggagaauc

SEQ ID NO: 2227920 - RNA, 19 nt, Artificial Sequence
  Description of Artificial Sequence: Synthetic oligonucleotide
  Sense strand starting at position 3934 of SEQ ID NO: 1883940
acuagacuuugguuacaau

SEQ ID NO: 2227921 - RNA, 19 nt, Artificial Sequence
  Description of Artificial Sequence: Synthetic oligonucleotide
  Antisense strand to SEQ ID NO: 2227920
auuguaaccaaagucuagu

SEQ ID NO: 2227922 - RNA, 19 nt, Artificial Sequence
  Description of Artificial Sequence: Synthetic oligonucleotide
  Sense strand starting at position 3935 of SEQ ID NO: 1883940
cuagacuuugguuacaauc

SEQ ID NO: 2227923 - RNA, 19 nt, Artificial Sequence
  Description of Artificial Sequence: Synthetic oligonucleotide
  Antisense strand to SEQ ID NO: 2227922
gauuguaaccaaagucuag

SEQ ID NO: 2227924 - RNA, 19 nt, Artificial Sequence
  Description of Artificial Sequence: Synthetic oligonucleotide
  Sense strand starting at position 632 of SEQ ID NO: 1883941
uggagcgacucauucucau

SEQ ID NO: 2227925 - RNA, 19 nt, Artificial Sequence
  Description of Artificial Sequence: Synthetic oligonucleotide
  Antisense strand to SEQ ID NO: 2227924
augagaaugagucgcucca

SEQ ID NO: 2227926 - RNA, 19 nt, Artificial Sequence
  Description of Artificial Sequence: Synthetic oligonucleotide
  Sense strand starting at position 635 of SEQ ID NO: 1883941
agcgacucauucucauuau

SEQ ID NO: 2227927 - RNA, 19 nt, Artificial Sequence
  Description of Artificial Sequence: Synthetic oligonucleotide
  Antisense strand to SEQ ID NO: 2227926
auaaugagaaugagucgcu

SEQ ID NO: 2227928 - RNA, 19 nt, Artificial Sequence
  Description of Artificial Sequence: Synthetic oligonucleotide
  Sense strand starting at position 636 of SEQ ID NO: 1883941
gcgacucauucucauuaua

SEQ ID NO: 2227929 - RNA, 19 nt, Artificial Sequence
  Description of Artificial Sequence: Synthetic oligonucleotide
  Antisense strand to SEQ ID NO: 2227928
uauaaugagaaugagucgc

SEQ ID NO: 2227930 - RNA, 19 nt, Artificial Sequence
  Description of Artificial Sequence: Synthetic oligonucleotide
  Sense strand starting at position 641 of SEQ ID NO: 1883941
ucauucucauuauagagua

SEQ ID NO: 2227931 - RNA, 19 nt, Artificial Sequence
  Description of Artificial Sequence: Synthetic oligonucleotide
  Antisense strand to SEQ ID NO: 2227930
uacucuauaaugagaauga

SEQ ID NO: 2227932 - RNA, 19 nt, Artificial Sequence
  Description of Artificial Sequence: Synthetic oligonucleotide
  Sense strand starting at position 853 of SEQ ID NO: 1883941
cuugucaucuucugcgaau

SEQ ID NO: 2227933 - RNA, 19 nt, Artificial Sequence
  Description of Artificial Sequence: Synthetic oligonucleotide
  Antisense strand to SEQ ID NO: 2227932
auucgcagaagaugacaag

SEQ ID NO: 2227934 - RNA, 19 nt, Artificial Sequence
  Description of Artificial Sequence: Synthetic oligonucleotide
  Sense strand starting at position 854 of SEQ ID NO: 1883941
uugucaucuucugcgaauc

SEQ ID NO: 2227935 - RNA, 19 nt, Artificial Sequence
  Description of Artificial Sequence: Synthetic oligonucleotide
  Antisense strand to SEQ ID NO: 2227934
gauucgcagaagaugacaa

SEQ ID NO: 2227936 - RNA, 19 nt, Artificial Sequence
  Description of Artificial Sequence: Synthetic oligonucleotide
  Sense strand starting at position 856 of SEQ ID NO: 1883941
gucaucuucugcgaaucua

SEQ ID NO: 2227937 - RNA, 19 nt, Artificial Sequence
  Description of Artificial Sequence: Synthetic oligonucleotide
  Antisense strand to SEQ ID NO: 2227936
uagauucgcagaagaugac

SEQ ID NO: 2227938 - RNA, 19 nt, Artificial Sequence
  Description of Artificial Sequence: Synthetic oligonucleotide
  Sense strand starting at position 916 of SEQ ID NO: 1883941
gucagucauuccgaaauuc

SEQ ID NO: 2227939 - RNA, 19 nt, Artificial Sequence
  Description of Artificial Sequence: Synthetic oligonucleotide
  Antisense strand to SEQ ID NO: 2227938
gaauuucggaaugacugac

SEQ ID NO: 2227940 - RNA, 19 nt, Artificial Sequence
  Description of Artificial Sequence: Synthetic oligonucleotide
  Sense strand starting at position 924 of SEQ ID NO: 1883941
uuccgaaauucccaaagau

SEQ ID NO: 2227941 - RNA, 19 nt, Artificial Sequence
  Description of Artificial Sequence: Synthetic oligonucleotide
  Antisense strand to SEQ ID NO: 2227940
aucuuugggaauuucggaa

SEQ ID NO: 2227942 - RNA, 19 nt, Artificial Sequence
  Description of Artificial Sequence: Synthetic oligonucleotide
  Sense strand starting at position 1151 of SEQ ID NO: 1883941
uuaagcuguacuugggaua

SEQ ID NO: 2227943 - RNA, 19 nt, Artificial Sequence
  Description of Artificial Sequence: Synthetic oligonucleotide
  Antisense strand to SEQ ID NO: 2227942
uaucccaaguacagcuuaa

SEQ ID NO: 2227944 - RNA, 19 nt, Artificial Sequence
  Description of Artificial Sequence: Synthetic oligonucleotide
  Sense strand starting at position 1152 of SEQ ID NO: 1883941
uaagcuguacuugggauaa

SEQ ID NO: 2227945 - RNA, 19 nt, Artificial Sequence
  Description of Artificial Sequence: Synthetic oligonucleotide
  Antisense strand to SEQ ID NO: 2227944
uuaucccaaguacagcuua

SEQ ID NO: 2227946 - RNA, 19 nt, Artificial Sequence
  Description of Artificial Sequence: Synthetic oligonucleotide
  Sense strand starting at position 1154 of SEQ ID NO: 1883941
agcuguacuugggauaauc

SEQ ID NO: 2227947 - RNA, 19 nt, Artificial Sequence
  Description of Artificial Sequence: Synthetic oligonucleotide
  Antisense strand to SEQ ID NO: 2227946
gauuaucccaaguacagcu

SEQ ID NO: 2227948 - RNA, 19 nt, Artificial Sequence
  Description of Artificial Sequence: Synthetic oligonucleotide
  Sense strand starting at position 1162 of SEQ ID NO: 1883941
uugggauaaucagguuauu

SEQ ID NO: 2227949 - RNA, 19 nt, Artificial Sequence
  Description of Artificial Sequence: Synthetic oligonucleotide
  Antisense strand to SEQ ID NO: 2227948
aauaaccugauuaucccaa

SEQ ID NO: 2227950 - RNA, 19 nt, Artificial Sequence
  Description of Artificial Sequence: Synthetic oligonucleotide
  Sense strand starting at position 1580 of SEQ ID NO: 1883941
ccuugaacuugagggcaau

SEQ ID NO: 2227951 - RNA, 19 nt, Artificial Sequence
  Description of Artificial Sequence: Synthetic oligonucleotide
  Antisense strand to SEQ ID NO: 2227950
auugcccucaaguucaagg

SEQ ID NO: 2227952 - RNA, 19 nt, Artificial Sequence
  Description of Artificial Sequence: Synthetic oligonucleotide
  Sense strand starting at position 1685 of SEQ ID NO: 1883941
gggauucucuaucuacaga

SEQ ID NO: 2227953 - RNA, 19 nt, Artificial Sequence
  Description of Artificial Sequence: Synthetic oligonucleotide
  Antisense strand to SEQ ID NO: 2227952
ucuguagauagagaauccc

SEQ ID NO: 2227954 - RNA, 19 nt, Artificial Sequence
  Description of Artificial Sequence: Synthetic oligonucleotide
  Sense strand starting at position 3896 of SEQ ID NO: 1883941
guucauugagaaugugagu

SEQ ID NO: 2227955 - RNA, 19 nt, Artificial Sequence
  Description of Artificial Sequence: Synthetic oligonucleotide
  Antisense strand to SEQ ID NO: 2227954
acucacauucucaaugaac

SEQ ID NO: 2227956 - RNA, 19 nt, Artificial Sequence
  Description of Artificial Sequence: Synthetic oligonucleotide
  Sense strand starting at position 3899 of SEQ ID NO: 1883941
cauugagaaugugaguuau

SEQ ID NO: 2227957 - RNA, 19 nt, Artificial Sequence
  Description of Artificial Sequence: Synthetic oligonucleotide
  Antisense strand to SEQ ID NO: 2227956
auaacucacauucucaaug

SEQ ID NO: 2227958 - RNA, 19 nt, Artificial Sequence
  Description of Artificial Sequence: Synthetic oligonucleotide
  Sense strand starting at position 208 of SEQ ID NO: 1883942
ccuguuauacugugauaga

SEQ ID NO: 2227959 - RNA, 19 nt, Artificial Sequence
  Description of Artificial Sequence: Synthetic oligonucleotide
  Antisense strand to SEQ ID NO: 2227958
ucuaucacaguauaacagg

SEQ ID NO: 2227960 - RNA, 19 nt, Artificial Sequence
  Description of Artificial Sequence: Synthetic oligonucleotide
  Sense strand starting at position 324 of SEQ ID NO: 1883942
uguacagaugguugggaaa

SEQ ID NO: 2227961 - RNA, 19 nt, Artificial Sequence
  Description of Artificial Sequence: Synthetic oligonucleotide
  Antisense strand to SEQ ID NO: 2227960
uuucccaaccaucuguaca

SEQ ID NO: 2227962 - RNA, 19 nt, Artificial Sequence
  Description of Artificial Sequence: Synthetic oligonucleotide
  Sense strand starting at position 350 of SEQ ID NO: 1883942
ugagaauuauuugguaaag

SEQ ID NO: 2227963 - RNA, 19 nt, Artificial Sequence
  Description of Artificial Sequence: Synthetic oligonucleotide
  Antisense strand to SEQ ID NO: 2227962
cuuuaccaaauaauucuca

SEQ ID NO: 2227964 - RNA, 19 nt, Artificial Sequence
  Description of Artificial Sequence: Synthetic oligonucleotide
  Sense strand starting at position 360 of SEQ ID NO: 1883942
uugguaaagcuccauacca

SEQ ID NO: 2227965 - RNA, 19 nt, Artificial Sequence
  Description of Artificial Sequence: Synthetic oligonucleotide
  Antisense strand to SEQ ID NO: 2227964
ugguauggagcuuuaccaa

SEQ ID NO: 2227966 - RNA, 19 nt, Artificial Sequence
  Description of Artificial Sequence: Synthetic oligonucleotide
  Sense strand starting at position 362 of SEQ ID NO: 1883942
gguaaagcuccauaccaga

SEQ ID NO: 2227967 - RNA, 19 nt, Artificial Sequence
  Description of Artificial Sequence: Synthetic oligonucleotide
  Antisense strand to SEQ ID NO: 2227966
ucugguauggagcuuuacc

SEQ ID NO: 2227968 - RNA, 19 nt, Artificial Sequence
  Description of Artificial Sequence: Synthetic oligonucleotide
  Sense strand starting at position 457 of SEQ ID NO: 1883942
ugugcuuggcacuaaauga

SEQ ID NO: 2227969 - RNA, 19 nt, Artificial Sequence
  Description of Artificial Sequence: Synthetic oligonucleotide
  Antisense strand to SEQ ID NO: 2227968
ucauuuagugccaagcaca

SEQ ID NO: 2227970 - RNA, 19 nt, Artificial Sequence
  Description of Artificial Sequence: Synthetic oligonucleotide
  Sense strand starting at position 591 of SEQ ID NO: 1883942
ccuguuaagaaguaauggu

SEQ ID NO: 2227971 - RNA, 19 nt, Artificial Sequence
  Description of Artificial Sequence: Synthetic oligonucleotide
  Antisense strand to SEQ ID NO: 2227970
accauuacuucuuaacagg

SEQ ID NO: 2227972 - RNA, 19 nt, Artificial Sequence
  Description of Artificial Sequence: Synthetic oligonucleotide
  Sense strand starting at position 905 of SEQ ID NO: 1883942
aguaauggugauggugauu

SEQ ID NO: 2227973 - RNA, 19 nt, Artificial Sequence
  Description of Artificial Sequence: Synthetic oligonucleotide
  Antisense strand to SEQ ID NO: 2227972
aaucaccaucaccauuacu

SEQ ID NO: 2227974 - RNA, 19 nt, Artificial Sequence
  Description of Artificial Sequence: Synthetic oligonucleotide
  Sense strand starting at position 926 of SEQ ID NO: 1883942
gucagaaagcaucaagcau

SEQ ID NO: 2227975 - RNA, 19 nt, Artificial Sequence
  Description of Artificial Sequence: Synthetic oligonucleotide
  Antisense strand to SEQ ID NO: 2227974
augcuugaugcuuucugac

SEQ ID NO: 2227976 - RNA, 19 nt, Artificial Sequence
  Description of Artificial Sequence: Synthetic oligonucleotide
  Sense strand starting at position 1035 of SEQ ID NO: 1883942
aauuguuccgaugaaagcu

SEQ ID NO: 2227977 - RNA, 19 nt, Artificial Sequence
  Description of Artificial Sequence: Synthetic oligonucleotide
  Antisense strand to SEQ ID NO: 2227976
agcuuucaucggaacaauu

SEQ ID NO: 2227978 - RNA, 19 nt, Artificial Sequence
  Description of Artificial Sequence: Synthetic oligonucleotide
  Sense strand starting at position 1041 of SEQ ID NO: 1883942
uccgaugaaagcuaguauu

SEQ ID NO: 2227979 - RNA, 19 nt, Artificial Sequence
  Description of Artificial Sequence: Synthetic oligonucleotide
  Antisense strand to SEQ ID NO: 2227978
aauacuagcuuucaucgga

SEQ ID NO: 2227980 - RNA, 19 nt, Artificial Sequence
  Description of Artificial Sequence: Synthetic oligonucleotide
  Sense strand starting at position 1234 of SEQ ID NO: 1883942
gaucuugcucaugaaguuu

SEQ ID NO: 2227981 - RNA, 19 nt, Artificial Sequence
  Description of Artificial Sequence: Synthetic oligonucleotide
  Antisense strand to SEQ ID NO: 2227980
aaacuucaugagcaagauc

SEQ ID NO: 2227982 - RNA, 19 nt, Artificial Sequence
  Description of Artificial Sequence: Synthetic oligonucleotide
  Sense strand starting at position 1356 of SEQ ID NO: 1883942
ggaagucugguguacacaa

SEQ ID NO: 2227983 - RNA, 19 nt, Artificial Sequence
  Description of Artificial Sequence: Synthetic oligonucleotide
  Antisense strand to SEQ ID NO: 2227982
uuguguacaccagacuucc

SEQ ID NO: 2227984 - RNA, 19 nt, Artificial Sequence
  Description of Artificial Sequence: Synthetic oligonucleotide
  Sense strand starting at position 1376 of SEQ ID NO: 1883942
uuagaaugcaucuggagua

SEQ ID NO: 2227985 - RNA, 19 nt, Artificial Sequence
  Description of Artificial Sequence: Synthetic oligonucleotide
  Antisense strand to SEQ ID NO: 2227984
uacuccagaugcauucuaa

SEQ ID NO: 2227986 - RNA, 19 nt, Artificial Sequence
  Description of Artificial Sequence: Synthetic oligonucleotide
  Sense strand starting at position 1479 of SEQ ID NO: 1883942
cugggaucuuucucaaccu

SEQ ID NO: 2227987 - RNA, 19 nt, Artificial Sequence
  Description of Artificial Sequence: Synthetic oligonucleotide
  Antisense strand to SEQ ID NO: 2227986
agguugagaaagaucccag

SEQ ID NO: 2227988 - RNA, 19 nt, Artificial Sequence
  Description of Artificial Sequence: Synthetic oligonucleotide
  Sense strand starting at position 1647 of SEQ ID NO: 1883942
cgagaauguguaugagaga

SEQ ID NO: 2227989 - RNA, 19 nt, Artificial Sequence
  Description of Artificial Sequence: Synthetic oligonucleotide
  Antisense strand to SEQ ID NO: 2227988
ucucucauacacauucucg

SEQ ID NO: 2227990 - RNA, 19 nt, Artificial Sequence
  Description of Artificial Sequence: Synthetic oligonucleotide
  Sense strand starting at position 1772 of SEQ ID NO: 1883942
gcguccacucgggaaagaa

SEQ ID NO: 2227991 - RNA, 19 nt, Artificial Sequence
  Description of Artificial Sequence: Synthetic oligonucleotide
  Antisense strand to SEQ ID NO: 2227990
uucuuucccgaguggacgc

SEQ ID NO: 2227992 - RNA, 19 nt, Artificial Sequence
  Description of Artificial Sequence: Synthetic oligonucleotide
  Sense strand starting at position 2586 of SEQ ID NO: 1883942
gugaccaggacuuggaauu

SEQ ID NO: 2227993 - RNA, 19 nt, Artificial Sequence
  Description of Artificial Sequence: Synthetic oligonucleotide
  Antisense strand to SEQ ID NO: 2227992
aauuccaaguccuggucac

SEQ ID NO: 2227994 - RNA, 19 nt, Artificial Sequence
  Description of Artificial Sequence: Synthetic oligonucleotide
  Sense strand starting at position 2758 of SEQ ID NO: 1883942
agauacacuuugucuucua

SEQ ID NO: 2227995 - RNA, 19 nt, Artificial Sequence
  Description of Artificial Sequence: Synthetic oligonucleotide
  Antisense strand to SEQ ID NO: 2227994
uagaagacaaaguguaucu

SEQ ID NO: 2227996 - RNA, 19 nt, Artificial Sequence
  Description of Artificial Sequence: Synthetic oligonucleotide
  Sense strand starting at position 2804 of SEQ ID NO: 1883942
acaguagguguccaguaau

SEQ ID NO: 2227997 - RNA, 19 nt, Artificial Sequence
  Description of Artificial Sequence: Synthetic oligonucleotide
  Antisense strand to SEQ ID NO: 2227996
auuacuggacaccuacugu

SEQ ID NO: 2227998 - RNA, 19 nt, Artificial Sequence
  Description of Artificial Sequence: Synthetic oligonucleotide
  Sense strand starting at position 2815 of SEQ ID NO: 1883942
ccaguaauguauccgagaa

SEQ ID NO: 2227999 - RNA, 19 nt, Artificial Sequence
  Description of Artificial Sequence: Synthetic oligonucleotide
  Antisense strand to SEQ ID NO: 2227998
uucucggauacauuacugg

SEQ ID NO: 2228000 - RNA, 19 nt, Artificial Sequence
  Description of Artificial Sequence: Synthetic oligonucleotide
  Sense strand starting at position 2846 of SEQ ID NO: 1883942
gacugaguagaacguugau

SEQ ID NO: 2228001 - RNA, 19 nt, Artificial Sequence
  Description of Artificial Sequence: Synthetic oligonucleotide
  Antisense strand to SEQ ID NO: 2228000
aucaacguucuacucaguc

SEQ ID NO: 2228002 - RNA, 19 nt, Artificial Sequence
  Description of Artificial Sequence: Synthetic oligonucleotide
  Sense strand starting at position 2849 of SEQ ID NO: 1883942
ugaguagaacguugaugau

SEQ ID NO: 2228003 - RNA, 19 nt, Artificial Sequence
  Description of Artificial Sequence: Synthetic oligonucleotide
  Antisense strand to SEQ ID NO: 2228002
aucaucaacguucuacuca

SEQ ID NO: 2228004 - RNA, 19 nt, Artificial Sequence
  Description of Artificial Sequence: Synthetic oligonucleotide
  Sense strand starting at position 2855 of SEQ ID NO: 1883942
gaacguugaugauugagga

SEQ ID NO: 2228005 - RNA, 19 nt, Artificial Sequence
  Description of Artificial Sequence: Synthetic oligonucleotide
  Antisense strand to SEQ ID NO: 2228004
uccucaaucaucaacguuc

SEQ ID NO: 2228006 - RNA, 19 nt, Artificial Sequence
  Description of Artificial Sequence: Synthetic oligonucleotide
  Sense strand starting at position 2856 of SEQ ID NO: 1883942
aacguugaugauugaggaa

SEQ ID NO: 2228007 - RNA, 19 nt, Artificial Sequence
  Description of Artificial Sequence: Synthetic oligonucleotide
  Antisense strand to SEQ ID NO: 2228006
uuccucaaucaucaacguu

SEQ ID NO: 2228008 - RNA, 19 nt, Artificial Sequence
  Description of Artificial Sequence: Synthetic oligonucleotide
  Sense strand starting at position 2933 of SEQ ID NO: 1883942
gagcauuuguuagaauaaa

SEQ ID NO: 2228009 - RNA, 19 nt, Artificial Sequence
  Description of Artificial Sequence: Synthetic oligonucleotide
  Antisense strand to SEQ ID NO: 2228008
uuuauucuaacaaaugcuc

SEQ ID NO: 2228010 - RNA, 19 nt, Artificial Sequence
  Description of Artificial Sequence: Synthetic oligonucleotide
  Sense strand starting at position 2989 of SEQ ID NO: 1883942
gaaacuauacugugugaug

SEQ ID NO: 2228011 - RNA, 19 nt, Artificial Sequence
  Description of Artificial Sequence: Synthetic oligonucleotide
  Antisense strand to SEQ ID NO: 2228010
caucacacaguauaguuuc

SEQ ID NO: 2228012 - RNA, 19 nt, Artificial Sequence
  Description of Artificial Sequence: Synthetic oligonucleotide
  Sense strand starting at position 3238 of SEQ ID NO: 1883942
gugacuuguacacgggaaa

SEQ ID NO: 2228013 - RNA, 19 nt, Artificial Sequence
  Description of Artificial Sequence: Synthetic oligonucleotide
  Antisense strand to SEQ ID NO: 2228012
uuucccguguacaagucac

SEQ ID NO: 2228014 - RNA, 19 nt, Artificial Sequence
  Description of Artificial Sequence: Synthetic oligonucleotide
  Sense strand starting at position 3239 of SEQ ID NO: 1883942
ugacuuguacacgggaaag

SEQ ID NO: 2228015 - RNA, 19 nt, Artificial Sequence
  Description of Artificial Sequence: Synthetic oligonucleotide
  Antisense strand to SEQ ID NO: 2228014
cuuucccguguacaaguca

SEQ ID NO: 2228016 - RNA, 19 nt, Artificial Sequence
  Description of Artificial Sequence: Synthetic oligonucleotide
  Sense strand starting at position 3251 of SEQ ID NO: 1883942
gggaaaguguucuccugaa

SEQ ID NO: 2228017 - RNA, 19 nt, Artificial Sequence
  Description of Artificial Sequence: Synthetic oligonucleotide
  Antisense strand to SEQ ID NO: 2228016
uucaggagaacacuuuccc

SEQ ID NO: 2228018 - RNA, 19 nt, Artificial Sequence
  Description of Artificial Sequence: Synthetic oligonucleotide
  Sense strand starting at position 3303 of SEQ ID NO: 1883942
uugauugacucucugacau

SEQ ID NO: 2228019 - RNA, 19 nt, Artificial Sequence
  Description of Artificial Sequence: Synthetic oligonucleotide
  Antisense strand to SEQ ID NO: 2228018
augucagagagucaaucaa

SEQ ID NO: 2228020 - RNA, 19 nt, Artificial Sequence
  Description of Artificial Sequence: Synthetic oligonucleotide
  Sense strand starting at position 3310 of SEQ ID NO: 1883942
acucucugacauugauguu

SEQ ID NO: 2228021 - RNA, 19 nt, Artificial Sequence
  Description of Artificial Sequence: Synthetic oligonucleotide
  Antisense strand to SEQ ID NO: 2228020
aacaucaaugucagagagu

SEQ ID NO: 2228022 - RNA, 19 nt, Artificial Sequence
  Description of Artificial Sequence: Synthetic oligonucleotide
  Sense strand starting at position 3316 of SEQ ID NO: 1883942
ugacauugauguuuacauu

SEQ ID NO: 2228023 - RNA, 19 nt, Artificial Sequence
  Description of Artificial Sequence: Synthetic oligonucleotide
  Antisense strand to SEQ ID NO: 2228022
aauguaaacaucaauguca

SEQ ID NO: 2228024 - RNA, 19 nt, Artificial Sequence
  Description of Artificial Sequence: Synthetic oligonucleotide
  Sense strand starting at position 3471 of SEQ ID NO: 1883942
gggucauacuaguuaaagu

SEQ ID NO: 2228025 - RNA, 19 nt, Artificial Sequence
  Description of Artificial Sequence: Synthetic oligonucleotide
  Antisense strand to SEQ ID NO: 2228024
acuuuaacuaguaugaccc

SEQ ID NO: 2228026 - RNA, 19 nt, Artificial Sequence
  Description of Artificial Sequence: Synthetic oligonucleotide
  Sense strand starting at position 3472 of SEQ ID NO: 1883942
ggucauacuaguuaaagug

SEQ ID NO: 2228027 - RNA, 19 nt, Artificial Sequence
  Description of Artificial Sequence: Synthetic oligonucleotide
  Antisense strand to SEQ ID NO: 2228026
cacuuuaacuaguaugacc

SEQ ID NO: 2228028 - RNA, 19 nt, Artificial Sequence
  Description of Artificial Sequence: Synthetic oligonucleotide
  Sense strand starting at position 3481 of SEQ ID NO: 1883942
aguuaaaguguccaggcaa

SEQ ID NO: 2228029 - RNA, 19 nt, Artificial Sequence
  Description of Artificial Sequence: Synthetic oligonucleotide
  Antisense strand to SEQ ID NO: 2228028
uugccuggacacuuuaacu

SEQ ID NO: 2228030 - RNA, 19 nt, Artificial Sequence
  Description of Artificial Sequence: Synthetic oligonucleotide
  Sense strand starting at position 3683 of SEQ ID NO: 1883942
ucccuagucccuuauagga

SEQ ID NO: 2228031 - RNA, 19 nt, Artificial Sequence
  Description of Artificial Sequence: Synthetic oligonucleotide
  Antisense strand to SEQ ID NO: 2228030
uccuauaagggacuaggga

SEQ ID NO: 2228032 - RNA, 19 nt, Artificial Sequence
  Description of Artificial Sequence: Synthetic oligonucleotide
  Sense strand starting at position 3752 of SEQ ID NO: 1883942
acauauugugcauauugga

SEQ ID NO: 2228033 - RNA, 19 nt, Artificial Sequence
  Description of Artificial Sequence: Synthetic oligonucleotide
  Antisense strand to SEQ ID NO: 2228032
uccaauaugcacaauaugu

SEQ ID NO: 2228034 - RNA, 19 nt, Artificial Sequence
  Description of Artificial Sequence: Synthetic oligonucleotide
  Sense strand starting at position 3790 of SEQ ID NO: 1883942
aggguuauugaccagguca

SEQ ID NO: 2228035 - RNA, 19 nt, Artificial Sequence
  Description of Artificial Sequence: Synthetic oligonucleotide
  Antisense strand to SEQ ID NO: 2228034
ugaccuggucaauaacccu

SEQ ID NO: 2228036 - RNA, 19 nt, Artificial Sequence
  Description of Artificial Sequence: Synthetic oligonucleotide
  Sense strand starting at position 3792 of SEQ ID NO: 1883942
gguuauugaccaggucacu

SEQ ID NO: 2228037 - RNA, 19 nt, Artificial Sequence
  Description of Artificial Sequence: Synthetic oligonucleotide
  Antisense strand to SEQ ID NO: 2228036
agugaccuggucaauaacc

SEQ ID NO: 2228038 - RNA, 19 nt, Artificial Sequence
  Description of Artificial Sequence: Synthetic oligonucleotide
  Sense strand starting at position 208 of SEQ ID NO: 1883943
ccuguuauacugugauaga

SEQ ID NO: 2228039 - RNA, 19 nt, Artificial Sequence
  Description of Artificial Sequence: Synthetic oligonucleotide
  Antisense strand to SEQ ID NO: 2228038
ucuaucacaguauaacagg

SEQ ID NO: 2228040 - RNA, 19 nt, Artificial Sequence
  Description of Artificial Sequence: Synthetic oligonucleotide
  Sense strand starting at position 324 of SEQ ID NO: 1883943
uguacagaugguugggaaa

SEQ ID NO: 2228041 - RNA, 19 nt, Artificial Sequence
  Description of Artificial Sequence: Synthetic oligonucleotide
  Antisense strand to SEQ ID NO: 2228040
uuucccaaccaucuguaca

SEQ ID NO: 2228042 - RNA, 19 nt, Artificial Sequence
  Description of Artificial Sequence: Synthetic oligonucleotide
  Sense strand starting at position 350 of SEQ ID NO: 1883943
ugagaauuauuugguaaag

SEQ ID NO: 2228043 - RNA, 19 nt, Artificial Sequence
  Description of Artificial Sequence: Synthetic oligonucleotide
  Antisense strand to SEQ ID NO: 2228042
cuuuaccaaauaauucuca

SEQ ID NO: 2228044 - RNA, 19 nt, Artificial Sequence
  Description of Artificial Sequence: Synthetic oligonucleotide
  Sense strand starting at position 360 of SEQ ID NO: 1883943
uugguaaagcuccauacca

SEQ ID NO: 2228045 - RNA, 19 nt, Artificial Sequence
  Description of Artificial Sequence: Synthetic oligonucleotide
  Antisense strand to SEQ ID NO: 2228044
ugguauggagcuuuaccaa

SEQ ID NO: 2228046 - RNA, 19 nt, Artificial Sequence
  Description of Artificial Sequence: Synthetic oligonucleotide
  Sense strand starting at position 362 of SEQ ID NO: 1883943
gguaaagcuccauaccaga

SEQ ID NO: 2228047 - RNA, 19 nt, Artificial Sequence
  Description of Artificial Sequence: Synthetic oligonucleotide
  Antisense strand to SEQ ID NO: 2228046
ucugguauggagcuuuacc

SEQ ID NO: 2228048 - RNA, 19 nt, Artificial Sequence
  Description of Artificial Sequence: Synthetic oligonucleotide
  Sense strand starting at position 457 of SEQ ID NO: 1883943
ugugcuuggcacuaaauga

SEQ ID NO: 2228049 - RNA, 19 nt, Artificial Sequence
  Description of Artificial Sequence: Synthetic oligonucleotide
  Antisense strand to SEQ ID NO: 2228048
ucauuuagugccaagcaca

SEQ ID NO: 2228050 - RNA, 19 nt, Artificial Sequence
  Description of Artificial Sequence: Synthetic oligonucleotide
  Sense strand starting at position 591 of SEQ ID NO: 1883943
ccuguuaagaaguaauggu

SEQ ID NO: 2228051 - RNA, 19 nt, Artificial Sequence
  Description of Artificial Sequence: Synthetic oligonucleotide
  Antisense strand to SEQ ID NO: 2228050
accauuacuucuuaacagg

SEQ ID NO: 2228052 - RNA, 19 nt, Artificial Sequence
  Description of Artificial Sequence: Synthetic oligonucleotide
  Sense strand starting at position 905 of SEQ ID NO: 1883943
aguaauggugauggugauu

SEQ ID NO: 2228053 - RNA, 19 nt, Artificial Sequence
  Description of Artificial Sequence: Synthetic oligonucleotide
  Antisense strand to SEQ ID NO: 2228052
aaucaccaucaccauuacu

SEQ ID NO: 2228054 - RNA, 19 nt, Artificial Sequence
  Description of Artificial Sequence: Synthetic oligonucleotide
  Sense strand starting at position 926 of SEQ ID NO: 1883943
gucagaaagcaucaagcau

SEQ ID NO: 2228055 - RNA, 19 nt, Artificial Sequence
  Description of Artificial Sequence: Synthetic oligonucleotide
  Antisense strand to SEQ ID NO: 2228054
augcuugaugcuuucugac

SEQ ID NO: 2228056 - RNA, 19 nt, Artificial Sequence
  Description of Artificial Sequence: Synthetic oligonucleotide
  Sense strand starting at position 1035 of SEQ ID NO: 1883943
aauuguuccgaugaaagcu

SEQ ID NO: 2228057 - RNA, 19 nt, Artificial Sequence
  Description of Artificial Sequence: Synthetic oligonucleotide
  Antisense strand to SEQ ID NO: 2228056
agcuuucaucggaacaauu

SEQ ID NO: 2228058 - RNA, 19 nt, Artificial Sequence
  Description of Artificial Sequence: Synthetic oligonucleotide
  Sense strand starting at position 1041 of SEQ ID NO: 1883943
uccgaugaaagcuaguauu

SEQ ID NO: 2228059 - RNA, 19 nt, Artificial Sequence
  Description of Artificial Sequence: Synthetic oligonucleotide
  Antisense strand to SEQ ID NO: 2228058
aauacuagcuuucaucgga

SEQ ID NO: 2228060 - RNA, 19 nt, Artificial Sequence
  Description of Artificial Sequence: Synthetic oligonucleotide
  Sense strand starting at position 1234 of SEQ ID NO: 1883943
gaucuugcucaugaaguuu

SEQ ID NO: 2228061 - RNA, 19 nt, Artificial Sequence
  Description of Artificial Sequence: Synthetic oligonucleotide
  Antisense strand to SEQ ID NO: 2228060
aaacuucaugagcaagauc

SEQ ID NO: 2228062 - RNA, 19 nt, Artificial Sequence
  Description of Artificial Sequence: Synthetic oligonucleotide
  Sense strand starting at position 1356 of SEQ ID NO: 1883943
ggaagucugguguacacaa

SEQ ID NO: 2228063 - RNA, 19 nt, Artificial Sequence
  Description of Artificial Sequence: Synthetic oligonucleotide
  Antisense strand to SEQ ID NO: 2228062
uuguguacaccagacuucc

SEQ ID NO: 2228064 - RNA, 19 nt, Artificial Sequence
  Description of Artificial Sequence: Synthetic oligonucleotide
  Sense strand starting at position 1376 of SEQ ID NO: 1883943
uuagaaugcaucuggagua

SEQ ID NO: 2228065 - RNA, 19 nt, Artificial Sequence
  Description of Artificial Sequence: Synthetic oligonucleotide
  Antisense strand to SEQ ID NO: 2228064
uacuccagaugcauucuaa

SEQ ID NO: 2228066 - RNA, 19 nt, Artificial Sequence
  Description of Artificial Sequence: Synthetic oligonucleotide
  Sense strand starting at position 1479 of SEQ ID NO: 1883943
cugggaucuuucucaaccu

SEQ ID NO: 2228067 - RNA, 19 nt, Artificial Sequence
  Description of Artificial Sequence: Synthetic oligonucleotide
  Antisense strand to SEQ ID NO: 2228066
agguugagaaagaucccag

SEQ ID NO: 2228068 - RNA, 19 nt, Artificial Sequence
  Description of Artificial Sequence: Synthetic oligonucleotide
  Sense strand starting at position 1647 of SEQ ID NO: 1883943
cgagaauguguaugagaga

SEQ ID NO: 2228069 - RNA, 19 nt, Artificial Sequence
  Description of Artificial Sequence: Synthetic oligonucleotide
  Antisense strand to SEQ ID NO: 2228068
ucucucauacacauucucg

SEQ ID NO: 2228070 - RNA, 19 nt, Artificial Sequence
  Description of Artificial Sequence: Synthetic oligonucleotide
  Sense strand starting at position 1772 of SEQ ID NO: 1883943
gcguccacucgggaaagaa

SEQ ID NO: 2228071 - RNA, 19 nt, Artificial Sequence
  Description of Artificial Sequence: Synthetic oligonucleotide
  Antisense strand to SEQ ID NO: 2228070
uucuuucccgaguggacgc

SEQ ID NO: 2228072 - RNA, 19 nt, Artificial Sequence
  Description of Artificial Sequence: Synthetic oligonucleotide
  Sense strand starting at position 2586 of SEQ ID NO: 1883943
gugaccaggacuuggaauu

SEQ ID NO: 2228073 - RNA, 19 nt, Artificial Sequence
  Description of Artificial Sequence: Synthetic oligonucleotide
  Antisense strand to SEQ ID NO: 2228072
aauuccaaguccuggucac

SEQ ID NO: 2228074 - RNA, 19 nt, Artificial Sequence
  Description of Artificial Sequence: Synthetic oligonucleotide
  Sense strand starting at position 2758 of SEQ ID NO: 1883943
agauacacuuugucuucua

SEQ ID NO: 2228075 - RNA, 19 nt, Artificial Sequence
  Description of Artificial Sequence: Synthetic oligonucleotide
  Antisense strand to SEQ ID NO: 2228074
uagaagacaaaguguaucu

SEQ ID NO: 2228076 - RNA, 19 nt, Artificial Sequence
  Description of Artificial Sequence: Synthetic oligonucleotide
  Sense strand starting at position 2804 of SEQ ID NO: 1883943
acaguagguguccaguaau

SEQ ID NO: 2228077 - RNA, 19 nt, Artificial Sequence
  Description of Artificial Sequence: Synthetic oligonucleotide
  Antisense strand to SEQ ID NO: 2228076
auuacuggacaccuacugu

SEQ ID NO: 2228078 - RNA, 19 nt, Artificial Sequence
  Description of Artificial Sequence: Synthetic oligonucleotide
  Sense strand starting at position 2815 of SEQ ID NO: 1883943
ccaguaauguauccgagaa

SEQ ID NO: 2228079 - RNA, 19 nt, Artificial Sequence
  Description of Artificial Sequence: Synthetic oligonucleotide
  Antisense strand to SEQ ID NO: 2228078
uucucggauacauuacugg

SEQ ID NO: 2228080 - RNA, 19 nt, Artificial Sequence
  Description of Artificial Sequence: Synthetic oligonucleotide
  Sense strand starting at position 2846 of SEQ ID NO: 1883943
gacugaguagaacguugau

SEQ ID NO: 2228081 - RNA, 19 nt, Artificial Sequence
  Description of Artificial Sequence: Synthetic oligonucleotide
  Antisense strand to SEQ ID NO: 2228080
aucaacguucuacucaguc

SEQ ID NO: 2228082 - RNA, 19 nt, Artificial Sequence
  Description of Artificial Sequence: Synthetic oligonucleotide
  Sense strand starting at position 2849 of SEQ ID NO: 1883943
ugaguagaacguugaugau

SEQ ID NO: 2228083 - RNA, 19 nt, Artificial Sequence
  Description of Artificial Sequence: Synthetic oligonucleotide
  Antisense strand to SEQ ID NO: 2228082
aucaucaacguucuacuca

SEQ ID NO: 2228084 - RNA, 19 nt, Artificial Sequence
  Description of Artificial Sequence: Synthetic oligonucleotide
  Sense strand starting at position 2855 of SEQ ID NO: 1883943
gaacguugaugauugagga

SEQ ID NO: 2228085 - RNA, 19 nt, Artificial Sequence
  Description of Artificial Sequence: Synthetic oligonucleotide
  Antisense strand to SEQ ID NO: 2228084
uccucaaucaucaacguuc

SEQ ID NO: 2228086 - RNA, 19 nt, Artificial Sequence
  Description of Artificial Sequence: Synthetic oligonucleotide
  Sense strand starting at position 2856 of SEQ ID NO: 1883943
aacguugaugauugaggaa

SEQ ID NO: 2228087 - RNA, 19 nt, Artificial Sequence
  Description of Artificial Sequence: Synthetic oligonucleotide
  Antisense strand to SEQ ID NO: 2228086
uuccucaaucaucaacguu

SEQ ID NO: 2228088 - RNA, 19 nt, Artificial Sequence
  Description of Artificial Sequence: Synthetic oligonucleotide
  Sense strand starting at position 2933 of SEQ ID NO: 1883943
gagcauuuguuagaauaaa

SEQ ID NO: 2228089 - RNA, 19 nt, Artificial Sequence
  Description of Artificial Sequence: Synthetic oligonucleotide
  Antisense strand to SEQ ID NO: 2228088
uuuauucuaacaaaugcuc

SEQ ID NO: 2228090 - RNA, 19 nt, Artificial Sequence
  Description of Artificial Sequence: Synthetic oligonucleotide
  Sense strand starting at position 2989 of SEQ ID NO: 1883943
gaaacuauacugugugaug

SEQ ID NO: 2228091 - RNA, 19 nt, Artificial Sequence
  Description of Artificial Sequence: Synthetic oligonucleotide
  Antisense strand to SEQ ID NO: 2228090
caucacacaguauaguuuc

SEQ ID NO: 2228092 - RNA, 19 nt, Artificial Sequence
  Description of Artificial Sequence: Synthetic oligonucleotide
  Sense strand starting at position 3238 of SEQ ID NO: 1883943
gugacuuguacacgggaaa

SEQ ID NO: 2228093 - RNA, 19 nt, Artificial Sequence
  Description of Artificial Sequence: Synthetic oligonucleotide
  Antisense strand to SEQ ID NO: 2228092
uuucccguguacaagucac

SEQ ID NO: 2228094 - RNA, 19 nt, Artificial Sequence
  Description of Artificial Sequence: Synthetic oligonucleotide
  Sense strand starting at position 3239 of SEQ ID NO: 1883943
ugacuuguacacgggaaag

SEQ ID NO: 2228095 - RNA, 19 nt, Artificial Sequence
  Description of Artificial Sequence: Synthetic oligonucleotide
  Antisense strand to SEQ ID NO: 2228094
cuuucccguguacaaguca

SEQ ID NO: 2228096 - RNA, 19 nt, Artificial Sequence
  Description of Artificial Sequence: Synthetic oligonucleotide
  Sense strand starting at position 3251 of SEQ ID NO: 1883943
gggaaaguguucuccugaa

SEQ ID NO: 2228097 - RNA, 19 nt, Artificial Sequence
  Description of Artificial Sequence: Synthetic oligonucleotide
  Antisense strand to SEQ ID NO: 2228096
uucaggagaacacuuuccc

SEQ ID NO: 2228098 - RNA, 19 nt, Artificial Sequence
  Description of Artificial Sequence: Synthetic oligonucleotide
  Sense strand starting at position 3303 of SEQ ID NO: 1883943
uugauugacucucugacau

SEQ ID NO: 2228099 - RNA, 19 nt, Artificial Sequence
  Description of Artificial Sequence: Synthetic oligonucleotide
  Antisense strand to SEQ ID NO: 2228098
augucagagagucaaucaa

SEQ ID NO: 2228100 - RNA, 19 nt, Artificial Sequence
  Description of Artificial Sequence: Synthetic oligonucleotide
  Sense strand starting at position 3310 of SEQ ID NO: 1883943
acucucugacauugauguu

SEQ ID NO: 2228101 - RNA, 19 nt, Artificial Sequence
  Description of Artificial Sequence: Synthetic oligonucleotide
  Antisense strand to SEQ ID NO: 2228100
aacaucaaugucagagagu

SEQ ID NO: 2228102 - RNA, 19 nt, Artificial Sequence
  Description of Artificial Sequence: Synthetic oligonucleotide
  Sense strand starting at position 3316 of SEQ ID NO: 1883943
ugacauugauguuuacauu

SEQ ID NO: 2228103 - RNA, 19 nt, Artificial Sequence
  Description of Artificial Sequence: Synthetic oligonucleotide
  Antisense strand to SEQ ID NO: 2228102
aauguaaacaucaauguca

SEQ ID NO: 2228104 - RNA, 19 nt, Artificial Sequence
  Description of Artificial Sequence: Synthetic oligonucleotide
  Sense strand starting at position 3471 of SEQ ID NO: 1883943
gggucauacuaguuaaagu

SEQ ID NO: 2228105 - RNA, 19 nt, Artificial Sequence
  Description of Artificial Sequence: Synthetic oligonucleotide
  Antisense strand to SEQ ID NO: 2228104
acuuuaacuaguaugaccc

SEQ ID NO: 2228106 - RNA, 19 nt, Artificial Sequence
  Description of Artificial Sequence: Synthetic oligonucleotide
  Sense strand starting at position 3472 of SEQ ID NO: 1883943
ggucauacuaguuaaagug

SEQ ID NO: 2228107 - RNA, 19 nt, Artificial Sequence
  Description of Artificial Sequence: Synthetic oligonucleotide
  Antisense strand to SEQ ID NO: 2228106
cacuuuaacuaguaugacc

SEQ ID NO: 2228108 - RNA, 19 nt, Artificial Sequence
  Description of Artificial Sequence: Synthetic oligonucleotide
  Sense strand starting at position 3481 of SEQ ID NO: 1883943
aguuaaaguguccaggcaa

SEQ ID NO: 2228109 - RNA, 19 nt, Artificial Sequence
  Description of Artificial Sequence: Synthetic oligonucleotide
  Antisense strand to SEQ ID NO: 2228108
uugccuggacacuuuaacu

SEQ ID NO: 2228110 - RNA, 19 nt, Artificial Sequence
  Description of Artificial Sequence: Synthetic oligonucleotide
  Sense strand starting at position 3683 of SEQ ID NO: 1883943
ucccuagucccuuauagga

SEQ ID NO: 2228111 - RNA, 19 nt, Artificial Sequence
  Description of Artificial Sequence: Synthetic oligonucleotide
  Antisense strand to SEQ ID NO: 2228110
uccuauaagggacuaggga

SEQ ID NO: 2228112 - RNA, 19 nt, Artificial Sequence
  Description of Artificial Sequence: Synthetic oligonucleotide
  Sense strand starting at position 3752 of SEQ ID NO: 1883943
acauauugugcauauugga

SEQ ID NO: 2228113 - RNA, 19 nt, Artificial Sequence
  Description of Artificial Sequence: Synthetic oligonucleotide
  Antisense strand to SEQ ID NO: 2228112
uccaauaugcacaauaugu

SEQ ID NO: 2228114 - RNA, 19 nt, Artificial Sequence
  Description of Artificial Sequence: Synthetic oligonucleotide
  Sense strand starting at position 3790 of SEQ ID NO: 1883943
aggguuauugaccagguca

SEQ ID NO: 2228115 - RNA, 19 nt, Artificial Sequence
  Description of Artificial Sequence: Synthetic oligonucleotide
  Antisense strand to SEQ ID NO: 2228114
ugaccuggucaauaacccu

SEQ ID NO: 2228116 - RNA, 19 nt, Artificial Sequence
  Description of Artificial Sequence: Synthetic oligonucleotide
  Sense strand starting at position 3792 of SEQ ID NO: 1883943
gguuauugaccaggucacu

SEQ ID NO: 2228117 - RNA, 19 nt, Artificial Sequence
  Description of Artificial Sequence: Synthetic oligonucleotide
  Antisense strand to SEQ ID NO: 2228116
agugaccuggucaauaacc

SEQ ID NO: 2228118 - RNA, 19 nt, Artificial Sequence
  Description of Artificial Sequence: Synthetic oligonucleotide
  Sense strand starting at position 109 of SEQ ID NO: 1883944
ggcuuauccucacaacaga

SEQ ID NO: 2228119 - RNA, 19 nt, Artificial Sequence
  Description of Artificial Sequence: Synthetic oligonucleotide
  Antisense strand to SEQ ID NO: 2228118
ucuguugugaggauaagcc

SEQ ID NO: 2228120 - RNA, 19 nt, Artificial Sequence
  Description of Artificial Sequence: Synthetic oligonucleotide
  Sense strand starting at position 128 of SEQ ID NO: 1883944
ccuauacaucccugggcau

SEQ ID NO: 2228121 - RNA, 19 nt, Artificial Sequence
  Description of Artificial Sequence: Synthetic oligonucleotide
  Antisense strand to SEQ ID NO: 2228120
augcccagggauguauagg

SEQ ID NO: 2228122 - RNA, 19 nt, Artificial Sequence
  Description of Artificial Sequence: Synthetic oligonucleotide
  Sense strand starting at position 339 of SEQ ID NO: 1883944
agucuugccagcugagaca

SEQ ID NO: 2228123 - RNA, 19 nt, Artificial Sequence
  Description of Artificial Sequence: Synthetic oligonucleotide
  Antisense strand to SEQ ID NO: 2228122
ugucucagcuggcaagacu

SEQ ID NO: 2228124 - RNA, 19 nt, Artificial Sequence
  Description of Artificial Sequence: Synthetic oligonucleotide
  Sense strand starting at position 484 of SEQ ID NO: 1883944
acggaauucucugccuacu

SEQ ID NO: 2228125 - RNA, 19 nt, Artificial Sequence
  Description of Artificial Sequence: Synthetic oligonucleotide
  Antisense strand to SEQ ID NO: 2228124
aguaggcagagaauuccgu

SEQ ID NO: 2228126 - RNA, 19 nt, Artificial Sequence
  Description of Artificial Sequence: Synthetic oligonucleotide
  Sense strand starting at position 522 of SEQ ID NO: 1883944
gggugguagugugcuagaa

SEQ ID NO: 2228127 - RNA, 19 nt, Artificial Sequence
  Description of Artificial Sequence: Synthetic oligonucleotide
  Antisense strand to SEQ ID NO: 2228126
uucuagcacacuaccaccc

SEQ ID NO: 2228128 - RNA, 19 nt, Artificial Sequence
  Description of Artificial Sequence: Synthetic oligonucleotide
  Sense strand starting at position 524 of SEQ ID NO: 1883944
gugguagugugcuagaacu

SEQ ID NO: 2228129 - RNA, 19 nt, Artificial Sequence
  Description of Artificial Sequence: Synthetic oligonucleotide
  Antisense strand to SEQ ID NO: 2228128
aguucuagcacacuaccac

SEQ ID NO: 2228130 - RNA, 19 nt, Artificial Sequence
  Description of Artificial Sequence: Synthetic oligonucleotide
  Sense strand starting at position 526 of SEQ ID NO: 1883944
gguagugugcuagaacuga

SEQ ID NO: 2228131 - RNA, 19 nt, Artificial Sequence
  Description of Artificial Sequence: Synthetic oligonucleotide
  Antisense strand to SEQ ID NO: 2228130
ucaguucuagcacacuacc

SEQ ID NO: 2228132 - RNA, 19 nt, Artificial Sequence
  Description of Artificial Sequence: Synthetic oligonucleotide
  Sense strand starting at position 530 of SEQ ID NO: 1883944
gugugcuagaacugaagga

SEQ ID NO: 2228133 - RNA, 19 nt, Artificial Sequence
  Description of Artificial Sequence: Synthetic oligonucleotide
  Antisense strand to SEQ ID NO: 2228132
uccuucaguucuagcacac

SEQ ID NO: 2228134 - RNA, 19 nt, Artificial Sequence
  Description of Artificial Sequence: Synthetic oligonucleotide
  Sense strand starting at position 618 of SEQ ID NO: 1883944
augggaaucuguugggaug

SEQ ID NO: 2228135 - RNA, 19 nt, Artificial Sequence
  Description of Artificial Sequence: Synthetic oligonucleotide
  Antisense strand to SEQ ID NO: 2228134
caucccaacagauucccau

SEQ ID NO: 2228136 - RNA, 19 nt, Artificial Sequence
  Description of Artificial Sequence: Synthetic oligonucleotide
  Sense strand starting at position 619 of SEQ ID NO: 1883944
ugggaaucuguugggauga

SEQ ID NO: 2228137 - RNA, 19 nt, Artificial Sequence
  Description of Artificial Sequence: Synthetic oligonucleotide
  Antisense strand to SEQ ID NO: 2228136
ucaucccaacagauuccca

SEQ ID NO: 2228138 - RNA, 19 nt, Artificial Sequence
  Description of Artificial Sequence: Synthetic oligonucleotide
  Sense strand starting at position 620 of SEQ ID NO: 1883944
gggaaucuguugggaugau

SEQ ID NO: 2228139 - RNA, 19 nt, Artificial Sequence
  Description of Artificial Sequence: Synthetic oligonucleotide
  Antisense strand to SEQ ID NO: 2228138
aucaucccaacagauuccc

SEQ ID NO: 2228140 - RNA, 19 nt, Artificial Sequence
  Description of Artificial Sequence: Synthetic oligonucleotide
  Sense strand starting at position 728 of SEQ ID NO: 1883944
gcgcuaucgcgagugugga

SEQ ID NO: 2228141 - RNA, 19 nt, Artificial Sequence
  Description of Artificial Sequence: Synthetic oligonucleotide
  Antisense strand to SEQ ID NO: 2228140
uccacacucgcgauagcgc

SEQ ID NO: 2228142 - RNA, 19 nt, Artificial Sequence
  Description of Artificial Sequence: Synthetic oligonucleotide
  Sense strand starting at position 778 of SEQ ID NO: 1883944
cgcuauuuauuggugaucu

SEQ ID NO: 2228143 - RNA, 19 nt, Artificial Sequence
  Description of Artificial Sequence: Synthetic oligonucleotide
  Antisense strand to SEQ ID NO: 2228142
agaucaccaauaaauagcg

SEQ ID NO: 2228144 - RNA, 19 nt, Artificial Sequence
  Description of Artificial Sequence: Synthetic oligonucleotide
  Sense strand starting at position 832 of SEQ ID NO: 1883944
aaggcaacaguguaucaaa

SEQ ID NO: 2228145 - RNA, 19 nt, Artificial Sequence
  Description of Artificial Sequence: Synthetic oligonucleotide
  Antisense strand to SEQ ID NO: 2228144
uuugauacacuguugccuu

SEQ ID NO: 2228146 - RNA, 19 nt, Artificial Sequence
  Description of Artificial Sequence: Synthetic oligonucleotide
  Sense strand starting at position 835 of SEQ ID NO: 1883944
gcaacaguguaucaaauga

SEQ ID NO: 2228147 - RNA, 19 nt, Artificial Sequence
  Description of Artificial Sequence: Synthetic oligonucleotide
  Antisense strand to SEQ ID NO: 2228146
ucauuugauacacuguugc

SEQ ID NO: 2228148 - RNA, 19 nt, Artificial Sequence
  Description of Artificial Sequence: Synthetic oligonucleotide
  Sense strand starting at position 846 of SEQ ID NO: 1883944
ucaaaugaaugagaaacau

SEQ ID NO: 2228149 - RNA, 19 nt, Artificial Sequence
  Description of Artificial Sequence: Synthetic oligonucleotide
  Antisense strand to SEQ ID NO: 2228148
auguuucucauucauuuga

SEQ ID NO: 2228150 - RNA, 19 nt, Artificial Sequence
  Description of Artificial Sequence: Synthetic oligonucleotide
  Sense strand starting at position 876 of SEQ ID NO: 1883944
agagaauggcagugcuaga

SEQ ID NO: 2228151 - RNA, 19 nt, Artificial Sequence
  Description of Artificial Sequence: Synthetic oligonucleotide
  Antisense strand to SEQ ID NO: 2228150
ucuagcacugccauucucu

SEQ ID NO: 2228152 - RNA, 19 nt, Artificial Sequence
  Description of Artificial Sequence: Synthetic oligonucleotide
  Sense strand starting at position 1532 of SEQ ID NO: 1883944
cagacuuggugacuuguua

SEQ ID NO: 2228153 - RNA, 19 nt, Artificial Sequence
  Description of Artificial Sequence: Synthetic oligonucleotide
  Antisense strand to SEQ ID NO: 2228152
uaacaagucaccaagucug

SEQ ID NO: 2228154 - RNA, 19 nt, Artificial Sequence
  Description of Artificial Sequence: Synthetic oligonucleotide
  Sense strand starting at position 1540 of SEQ ID NO: 1883944
gugacuuguuaagaaaucu

SEQ ID NO: 2228155 - RNA, 19 nt, Artificial Sequence
  Description of Artificial Sequence: Synthetic oligonucleotide
  Antisense strand to SEQ ID NO: 2228154
agauuucuuaacaagucac

SEQ ID NO: 2228156 - RNA, 19 nt, Artificial Sequence
  Description of Artificial Sequence: Synthetic oligonucleotide
  Sense strand starting at position 2182 of SEQ ID NO: 1883944
gcaugaggcuucuguaacc

SEQ ID NO: 2228157 - RNA, 19 nt, Artificial Sequence
  Description of Artificial Sequence: Synthetic oligonucleotide
  Antisense strand to SEQ ID NO: 2228156
gguuacagaagccucaugc

SEQ ID NO: 2228158 - RNA, 19 nt, Artificial Sequence
  Description of Artificial Sequence: Synthetic oligonucleotide
  Sense strand starting at position 2260 of SEQ ID NO: 1883944
ggacaugcuucuuccuuga

SEQ ID NO: 2228159 - RNA, 19 nt, Artificial Sequence
  Description of Artificial Sequence: Synthetic oligonucleotide
  Antisense strand to SEQ ID NO: 2228158
ucaaggaagaagcaugucc

SEQ ID NO: 2228160 - RNA, 19 nt, Artificial Sequence
  Description of Artificial Sequence: Synthetic oligonucleotide
  Sense strand starting at position 2264 of SEQ ID NO: 1883944
augcuucuuccuugaggca

SEQ ID NO: 2228161 - RNA, 19 nt, Artificial Sequence
  Description of Artificial Sequence: Synthetic oligonucleotide
  Antisense strand to SEQ ID NO: 2228160
ugccucaaggaagaagcau

SEQ ID NO: 2228162 - RNA, 19 nt, Artificial Sequence
  Description of Artificial Sequence: Synthetic oligonucleotide
  Sense strand starting at position 2779 of SEQ ID NO: 1883944
ggugcaucgcaugaggagu

SEQ ID NO: 2228163 - RNA, 19 nt, Artificial Sequence
  Description of Artificial Sequence: Synthetic oligonucleotide
  Antisense strand to SEQ ID NO: 2228162
acuccucaugcgaugcacc

SEQ ID NO: 2228164 - RNA, 19 nt, Artificial Sequence
  Description of Artificial Sequence: Synthetic oligonucleotide
  Sense strand starting at position 3227 of SEQ ID NO: 1883944
gugucagggccugauuagu

SEQ ID NO: 2228165 - RNA, 19 nt, Artificial Sequence
  Description of Artificial Sequence: Synthetic oligonucleotide
  Antisense strand to SEQ ID NO: 2228164
acuaaucaggcccugacac

SEQ ID NO: 2228166 - RNA, 19 nt, Artificial Sequence
  Description of Artificial Sequence: Synthetic oligonucleotide
  Sense strand starting at position 3613 of SEQ ID NO: 1883944
gccagaguccaggaugcuu

SEQ ID NO: 2228167 - RNA, 19 nt, Artificial Sequence
  Description of Artificial Sequence: Synthetic oligonucleotide
  Antisense strand to SEQ ID NO: 2228166
aagcauccuggacucuggc

SEQ ID NO: 2228168 - RNA, 19 nt, Artificial Sequence
  Description of Artificial Sequence: Synthetic oligonucleotide
  Sense strand starting at position 314 of SEQ ID NO: 1883945
gagagcaaugcagaugcaa

SEQ ID NO: 2228169 - RNA, 19 nt, Artificial Sequence
  Description of Artificial Sequence: Synthetic oligonucleotide
  Antisense strand to SEQ ID NO: 2228168
uugcaucugcauugcucuc

SEQ ID NO: 2228170 - RNA, 19 nt, Artificial Sequence
  Description of Artificial Sequence: Synthetic oligonucleotide
  Sense strand starting at position 340 of SEQ ID NO: 1883945
aucaauuaugcugagcuca

SEQ ID NO: 2228171 - RNA, 19 nt, Artificial Sequence
  Description of Artificial Sequence: Synthetic oligonucleotide
  Antisense strand to SEQ ID NO: 2228170
ugagcucagcauaauugau

SEQ ID NO: 2228172 - RNA, 19 nt, Artificial Sequence
  Description of Artificial Sequence: Synthetic oligonucleotide
  Sense strand starting at position 345 of SEQ ID NO: 1883945
uuaugcugagcucagaaga

SEQ ID NO: 2228173 - RNA, 19 nt, Artificial Sequence
  Description of Artificial Sequence: Synthetic oligonucleotide
  Antisense strand to SEQ ID NO: 2228172
ucuucugagcucagcauaa

SEQ ID NO: 2228174 - RNA, 19 nt, Artificial Sequence
  Description of Artificial Sequence: Synthetic oligonucleotide
  Sense strand starting at position 462 of SEQ ID NO: 1883945
ugaccucacccgugaguaa

SEQ ID NO: 2228175 - RNA, 19 nt, Artificial Sequence
  Description of Artificial Sequence: Synthetic oligonucleotide
  Antisense strand to SEQ ID NO: 2228174
uuacucacgggugagguca

SEQ ID NO: 2228176 - RNA, 19 nt, Artificial Sequence
  Description of Artificial Sequence: Synthetic oligonucleotide
  Sense strand starting at position 463 of SEQ ID NO: 1883945
gaccucacccgugaguaaa

SEQ ID NO: 2228177 - RNA, 19 nt, Artificial Sequence
  Description of Artificial Sequence: Synthetic oligonucleotide
  Antisense strand to SEQ ID NO: 2228176
uuuacucacgggugagguc

SEQ ID NO: 2228178 - RNA, 19 nt, Artificial Sequence
  Description of Artificial Sequence: Synthetic oligonucleotide
  Sense strand starting at position 518 of SEQ ID NO: 1883945
gcugcaguccuccacagaa

SEQ ID NO: 2228179 - RNA, 19 nt, Artificial Sequence
  Description of Artificial Sequence: Synthetic oligonucleotide
  Antisense strand to SEQ ID NO: 2228178
uucuguggaggacugcagc

SEQ ID NO: 2228180 - RNA, 19 nt, Artificial Sequence
  Description of Artificial Sequence: Synthetic oligonucleotide
  Sense strand starting at position 540 of SEQ ID NO: 1883945
ccuucuucuuaguuucuga

SEQ ID NO: 2228181 - RNA, 19 nt, Artificial Sequence
  Description of Artificial Sequence: Synthetic oligonucleotide
  Antisense strand to SEQ ID NO: 2228180
ucagaaacuaagaagaagg

SEQ ID NO: 2228182 - RNA, 19 nt, Artificial Sequence
  Description of Artificial Sequence: Synthetic oligonucleotide
  Sense strand starting at position 547 of SEQ ID NO: 1883945
cuuaguuucugauugauca

SEQ ID NO: 2228183 - RNA, 19 nt, Artificial Sequence
  Description of Artificial Sequence: Synthetic oligonucleotide
  Antisense strand to SEQ ID NO: 2228182
ugaucaaucagaaacuaag

SEQ ID NO: 2228184 - RNA, 19 nt, Artificial Sequence
  Description of Artificial Sequence: Synthetic oligonucleotide
  Sense strand starting at position 548 of SEQ ID NO: 1883945
uuaguuucugauugaucac

SEQ ID NO: 2228185 - RNA, 19 nt, Artificial Sequence
  Description of Artificial Sequence: Synthetic oligonucleotide
  Antisense strand to SEQ ID NO: 2228184
gugaucaaucagaaacuaa

SEQ ID NO: 2228186 - RNA, 19 nt, Artificial Sequence
  Description of Artificial Sequence: Synthetic oligonucleotide
  Sense strand starting at position 551 of SEQ ID NO: 1883945
guuucugauugaucacuua

SEQ ID NO: 2228187 - RNA, 19 nt, Artificial Sequence
  Description of Artificial Sequence: Synthetic oligonucleotide
  Antisense strand to SEQ ID NO: 2228186
uaagugaucaaucagaaac

SEQ ID NO: 2228188 - RNA, 19 nt, Artificial Sequence
  Description of Artificial Sequence: Synthetic oligonucleotide
  Sense strand starting at position 884 of SEQ ID NO: 1883945
gguauuuaguugggaacac

SEQ ID NO: 2228189 - RNA, 19 nt, Artificial Sequence
  Description of Artificial Sequence: Synthetic oligonucleotide
  Antisense strand to SEQ ID NO: 2228188
guguucccaacuaaauacc

SEQ ID NO: 2228190 - RNA, 19 nt, Artificial Sequence
  Description of Artificial Sequence: Synthetic oligonucleotide
  Sense strand starting at position 975 of SEQ ID NO: 1883945
ugagauccuguauguucuu

SEQ ID NO: 2228191 - RNA, 19 nt, Artificial Sequence
  Description of Artificial Sequence: Synthetic oligonucleotide
  Antisense strand to SEQ ID NO: 2228190
aagaacauacaggaucuca

SEQ ID NO: 2228192 - RNA, 19 nt, Artificial Sequence
  Description of Artificial Sequence: Synthetic oligonucleotide
  Sense strand starting at position 993 of SEQ ID NO: 1883945
ucaagaccuuuaucagagu

SEQ ID NO: 2228193 - RNA, 19 nt, Artificial Sequence
  Description of Artificial Sequence: Synthetic oligonucleotide
  Antisense strand to SEQ ID NO: 2228192
acucugauaaaggucuuga

SEQ ID NO: 2228194 - RNA, 19 nt, Artificial Sequence
  Description of Artificial Sequence: Synthetic oligonucleotide
  Sense strand starting at position 1001 of SEQ ID NO: 1883945
uuuaucagaguuuauguga

SEQ ID NO: 2228195 - RNA, 19 nt, Artificial Sequence
  Description of Artificial Sequence: Synthetic oligonucleotide
  Antisense strand to SEQ ID NO: 2228194
ucacauaaacucugauaaa

SEQ ID NO: 2228196 - RNA, 19 nt, Artificial Sequence
  Description of Artificial Sequence: Synthetic oligonucleotide
  Sense strand starting at position 1004 of SEQ ID NO: 1883945
aucagaguuuaugugaaug

SEQ ID NO: 2228197 - RNA, 19 nt, Artificial Sequence
  Description of Artificial Sequence: Synthetic oligonucleotide
  Antisense strand to SEQ ID NO: 2228196
cauucacauaaacucugau

SEQ ID NO: 2228198 - RNA, 19 nt, Artificial Sequence
  Description of Artificial Sequence: Synthetic oligonucleotide
  Sense strand starting at position 1064 of SEQ ID NO: 1883945
aagggaauaugcuugguuu

SEQ ID NO: 2228199 - RNA, 19 nt, Artificial Sequence
  Description of Artificial Sequence: Synthetic oligonucleotide
  Antisense strand to SEQ ID NO: 2228198
aaaccaagcauauucccuu

SEQ ID NO: 2228200 - RNA, 19 nt, Artificial Sequence
  Description of Artificial Sequence: Synthetic oligonucleotide
  Sense strand starting at position 1244 of SEQ ID NO: 1883945
ccuggcuggagguaauuau

SEQ ID NO: 2228201 - RNA, 19 nt, Artificial Sequence
  Description of Artificial Sequence: Synthetic oligonucleotide
  Antisense strand to SEQ ID NO: 2228200
auaauuaccuccagccagg

SEQ ID NO: 2228202 - RNA, 19 nt, Artificial Sequence
  Description of Artificial Sequence: Synthetic oligonucleotide
  Sense strand starting at position 1267 of SEQ ID NO: 1883945
agaaauucuuuaucaguug

SEQ ID NO: 2228203 - RNA, 19 nt, Artificial Sequence
  Description of Artificial Sequence: Synthetic oligonucleotide
  Antisense strand to SEQ ID NO: 2228202
caacugauaaagaauuucu

SEQ ID NO: 2228204 - RNA, 19 nt, Artificial Sequence
  Description of Artificial Sequence: Synthetic oligonucleotide
  Sense strand starting at position 1335 of SEQ ID NO: 1883945
aucuacugaguucgaggaa

SEQ ID NO: 2228205 - RNA, 19 nt, Artificial Sequence
  Description of Artificial Sequence: Synthetic oligonucleotide
  Antisense strand to SEQ ID NO: 2228204
uuccucgaacucaguagau

SEQ ID NO: 2228206 - RNA, 19 nt, Artificial Sequence
  Description of Artificial Sequence: Synthetic oligonucleotide
  Sense strand starting at position 1381 of SEQ ID NO: 1883945
ucaugauauucuguuggca

SEQ ID NO: 2228207 - RNA, 19 nt, Artificial Sequence
  Description of Artificial Sequence: Synthetic oligonucleotide
  Antisense strand to SEQ ID NO: 2228206
ugccaacagaauaucauga

SEQ ID NO: 2228208 - RNA, 19 nt, Artificial Sequence
  Description of Artificial Sequence: Synthetic oligonucleotide
  Sense strand starting at position 1385 of SEQ ID NO: 1883945
gauauucuguuggcacaca

SEQ ID NO: 2228209 - RNA, 19 nt, Artificial Sequence
  Description of Artificial Sequence: Synthetic oligonucleotide
  Antisense strand to SEQ ID NO: 2228208
ugugugccaacagaauauc

SEQ ID NO: 2228210 - RNA, 19 nt, Artificial Sequence
  Description of Artificial Sequence: Synthetic oligonucleotide
  Sense strand starting at position 1518 of SEQ ID NO: 1883945
acauauaucuggcugaugu

SEQ ID NO: 2228211 - RNA, 19 nt, Artificial Sequence
  Description of Artificial Sequence: Synthetic oligonucleotide
  Antisense strand to SEQ ID NO: 2228210
acaucagccagauauaugu

SEQ ID NO: 2228212 - RNA, 19 nt, Artificial Sequence
  Description of Artificial Sequence: Synthetic oligonucleotide
  Sense strand starting at position 1519 of SEQ ID NO: 1883945
cauauaucuggcugauguu

SEQ ID NO: 2228213 - RNA, 19 nt, Artificial Sequence
  Description of Artificial Sequence: Synthetic oligonucleotide
  Antisense strand to SEQ ID NO: 2228212
aacaucagccagauauaug

SEQ ID NO: 2228214 - RNA, 19 nt, Artificial Sequence
  Description of Artificial Sequence: Synthetic oligonucleotide
  Sense strand starting at position 1520 of SEQ ID NO: 1883945
auauaucuggcugauguuu

SEQ ID NO: 2228215 - RNA, 19 nt, Artificial Sequence
  Description of Artificial Sequence: Synthetic oligonucleotide
  Antisense strand to SEQ ID NO: 2228214
aaacaucagccagauauau

SEQ ID NO: 2228216 - RNA, 19 nt, Artificial Sequence
  Description of Artificial Sequence: Synthetic oligonucleotide
  Sense strand starting at position 1594 of SEQ ID NO: 1883945
cgguuaaaugcggaacugu

SEQ ID NO: 2228217 - RNA, 19 nt, Artificial Sequence
  Description of Artificial Sequence: Synthetic oligonucleotide
  Antisense strand to SEQ ID NO: 2228216
acaguuccgcauuuaaccg

SEQ ID NO: 2228218 - RNA, 19 nt, Artificial Sequence
  Description of Artificial Sequence: Synthetic oligonucleotide
  Sense strand starting at position 1644 of SEQ ID NO: 1883945
cuaguuaugucacucaguc

SEQ ID NO: 2228219 - RNA, 19 nt, Artificial Sequence
  Description of Artificial Sequence: Synthetic oligonucleotide
  Antisense strand to SEQ ID NO: 2228218
gacugagugacauaacuag

SEQ ID NO: 2228220 - RNA, 19 nt, Artificial Sequence
  Description of Artificial Sequence: Synthetic oligonucleotide
  Sense strand starting at position 1648 of SEQ ID NO: 1883945
uuaugucacucagucuaga

SEQ ID NO: 2228221 - RNA, 19 nt, Artificial Sequence
  Description of Artificial Sequence: Synthetic oligonucleotide
  Antisense strand to SEQ ID NO: 2228220
ucuagacugagugacauaa

SEQ ID NO: 2228222 - RNA, 19 nt, Artificial Sequence
  Description of Artificial Sequence: Synthetic oligonucleotide
  Sense strand starting at position 1659 of SEQ ID NO: 1883945
agucuagaggagugaaucu

SEQ ID NO: 2228223 - RNA, 19 nt, Artificial Sequence
  Description of Artificial Sequence: Synthetic oligonucleotide
  Antisense strand to SEQ ID NO: 2228222
agauucacuccucuagacu

SEQ ID NO: 2228224 - RNA, 19 nt, Artificial Sequence
  Description of Artificial Sequence: Synthetic oligonucleotide
  Sense strand starting at position 1670 of SEQ ID NO: 1883945
gugaaucuucugggauucu

SEQ ID NO: 2228225 - RNA, 19 nt, Artificial Sequence
  Description of Artificial Sequence: Synthetic oligonucleotide
  Antisense strand to SEQ ID NO: 2228224
agaaucccagaagauucac

SEQ ID NO: 2228226 - RNA, 19 nt, Artificial Sequence
  Description of Artificial Sequence: Synthetic oligonucleotide
  Sense strand starting at position 1747 of SEQ ID NO: 1883945
ucauacaguuugcuaagaa

SEQ ID NO: 2228227 - RNA, 19 nt, Artificial Sequence
  Description of Artificial Sequence: Synthetic oligonucleotide
  Antisense strand to SEQ ID NO: 2228226
uucuuagcaaacuguauga

SEQ ID NO: 2228228 - RNA, 19 nt, Artificial Sequence
  Description of Artificial Sequence: Synthetic oligonucleotide
  Sense strand starting at position 1770 of SEQ ID NO: 1883945
ccacaaagaucuggagaac

SEQ ID NO: 2228229 - RNA, 19 nt, Artificial Sequence
  Description of Artificial Sequence: Synthetic oligonucleotide
  Antisense strand to SEQ ID NO: 2228228
guucuccagaucuuugugg

SEQ ID NO: 2228230 - RNA, 19 nt, Artificial Sequence
  Description of Artificial Sequence: Synthetic oligonucleotide
  Sense strand starting at position 1851 of SEQ ID NO: 1883945
aaagaauguugacuguaua

SEQ ID NO: 2228231 - RNA, 19 nt, Artificial Sequence
  Description of Artificial Sequence: Synthetic oligonucleotide
  Antisense strand to SEQ ID NO: 2228230
uauacagucaacauucuuu

SEQ ID NO: 2228232 - RNA, 19 nt, Artificial Sequence
  Description of Artificial Sequence: Synthetic oligonucleotide
  Sense strand starting at position 1852 of SEQ ID NO: 1883945
aagaauguugacuguauaa

SEQ ID NO: 2228233 - RNA, 19 nt, Artificial Sequence
  Description of Artificial Sequence: Synthetic oligonucleotide
  Antisense strand to SEQ ID NO: 2228232
uuauacagucaacauucuu

SEQ ID NO: 2228234 - RNA, 19 nt, Artificial Sequence
  Description of Artificial Sequence: Synthetic oligonucleotide
  Sense strand starting at position 1911 of SEQ ID NO: 1883945
gaagcugugucuucugaua

SEQ ID NO: 2228235 - RNA, 19 nt, Artificial Sequence
  Description of Artificial Sequence: Synthetic oligonucleotide
  Antisense strand to SEQ ID NO: 2228234
uaucagaagacacagcuuc

SEQ ID NO: 2228236 - RNA, 19 nt, Artificial Sequence
  Description of Artificial Sequence: Synthetic oligonucleotide
  Sense strand starting at position 2044 of SEQ ID NO: 1883945
uuugcauauggauauuaac

SEQ ID NO: 2228237 - RNA, 19 nt, Artificial Sequence
  Description of Artificial Sequence: Synthetic oligonucleotide
  Antisense strand to SEQ ID NO: 2228236
guuaauauccauaugcaaa

SEQ ID NO: 2228238 - RNA, 19 nt, Artificial Sequence
  Description of Artificial Sequence: Synthetic oligonucleotide
  Sense strand starting at position 2162 of SEQ ID NO: 1883945
acaagaaauuauuaaggag

SEQ ID NO: 2228239 - RNA, 19 nt, Artificial Sequence
  Description of Artificial Sequence: Synthetic oligonucleotide
  Antisense strand to SEQ ID NO: 2228238
cuccuuaauaauuucuugu

SEQ ID NO: 2228240 - RNA, 19 nt, Artificial Sequence
  Description of Artificial Sequence: Synthetic oligonucleotide
  Sense strand starting at position 2323 of SEQ ID NO: 1883945
gcgugaaacgccgucuaua

SEQ ID NO: 2228241 - RNA, 19 nt, Artificial Sequence
  Description of Artificial Sequence: Synthetic oligonucleotide
  Antisense strand to SEQ ID NO: 2228240
uauagacggcguuucacgc

SEQ ID NO: 2228242 - RNA, 19 nt, Artificial Sequence
  Description of Artificial Sequence: Synthetic oligonucleotide
  Sense strand starting at position 2579 of SEQ ID NO: 1883945
uguuucauuugagauggag

SEQ ID NO: 2228243 - RNA, 19 nt, Artificial Sequence
  Description of Artificial Sequence: Synthetic oligonucleotide
  Antisense strand to SEQ ID NO: 2228242
cuccaucucaaaugaaaca

SEQ ID NO: 2228244 - RNA, 19 nt, Artificial Sequence
  Description of Artificial Sequence: Synthetic oligonucleotide
  Sense strand starting at position 2868 of SEQ ID NO: 1883945
ccuguuucuuauguuguaa

SEQ ID NO: 2228245 - RNA, 19 nt, Artificial Sequence
  Description of Artificial Sequence: Synthetic oligonucleotide
  Antisense strand to SEQ ID NO: 2228244
uuacaacauaagaaacagg

SEQ ID NO: 2228246 - RNA, 19 nt, Artificial Sequence
  Description of Artificial Sequence: Synthetic oligonucleotide
  Sense strand starting at position 3975 of SEQ ID NO: 1883945
aggaauaacugguauauua

SEQ ID NO: 2228247 - RNA, 19 nt, Artificial Sequence
  Description of Artificial Sequence: Synthetic oligonucleotide
  Antisense strand to SEQ ID NO: 2228246
uaauauaccaguuauuccu

SEQ ID NO: 2228248 - RNA, 19 nt, Artificial Sequence
  Description of Artificial Sequence: Synthetic oligonucleotide
  Sense strand starting at position 316 of SEQ ID NO: 1883946
gagagcaaugcagaugcaa

SEQ ID NO: 2228249 - RNA, 19 nt, Artificial Sequence
  Description of Artificial Sequence: Synthetic oligonucleotide
  Antisense strand to SEQ ID NO: 2228248
uugcaucugcauugcucuc

SEQ ID NO: 2228250 - RNA, 19 nt, Artificial Sequence
  Description of Artificial Sequence: Synthetic oligonucleotide
  Sense strand starting at position 342 of SEQ ID NO: 1883946
aucaauuaugcugagcuca

SEQ ID NO: 2228251 - RNA, 19 nt, Artificial Sequence
  Description of Artificial Sequence: Synthetic oligonucleotide
  Antisense strand to SEQ ID NO: 2228250
ugagcucagcauaauugau

SEQ ID NO: 2228252 - RNA, 19 nt, Artificial Sequence
  Description of Artificial Sequence: Synthetic oligonucleotide
  Sense strand starting at position 347 of SEQ ID NO: 1883946
uuaugcugagcucagaaga

SEQ ID NO: 2228253 - RNA, 19 nt, Artificial Sequence
  Description of Artificial Sequence: Synthetic oligonucleotide
  Antisense strand to SEQ ID NO: 2228252
ucuucugagcucagcauaa

SEQ ID NO: 2228254 - RNA, 19 nt, Artificial Sequence
  Description of Artificial Sequence: Synthetic oligonucleotide
  Sense strand starting at position 463 of SEQ ID NO: 1883946
ugaccucacccgugaguaa

SEQ ID NO: 2228255 - RNA, 19 nt, Artificial Sequence
  Description of Artificial Sequence: Synthetic oligonucleotide
  Antisense strand to SEQ ID NO: 2228254
uuacucacgggugagguca

SEQ ID NO: 2228256 - RNA, 19 nt, Artificial Sequence
  Description of Artificial Sequence: Synthetic oligonucleotide
  Sense strand starting at position 464 of SEQ ID NO: 1883946
gaccucacccgugaguaaa

SEQ ID NO: 2228257 - RNA, 19 nt, Artificial Sequence
  Description of Artificial Sequence: Synthetic oligonucleotide
  Antisense strand to SEQ ID NO: 2228256
uuuacucacgggugagguc

SEQ ID NO: 2228258 - RNA, 19 nt, Artificial Sequence
  Description of Artificial Sequence: Synthetic oligonucleotide
  Sense strand starting at position 2867 of SEQ ID NO: 1883946
gccuguuucuuauguugua

SEQ ID NO: 2228259 - RNA, 19 nt, Artificial Sequence
  Description of Artificial Sequence: Synthetic oligonucleotide
  Antisense strand to SEQ ID NO: 2228258
uacaacauaagaaacaggc

SEQ ID NO: 2228260 - RNA, 19 nt, Artificial Sequence
  Description of Artificial Sequence: Synthetic oligonucleotide
  Sense strand starting at position 2868 of SEQ ID NO: 1883946
ccuguuucuuauguuguaa

SEQ ID NO: 2228261 - RNA, 19 nt, Artificial Sequence
  Description of Artificial Sequence: Synthetic oligonucleotide
  Antisense strand to SEQ ID NO: 2228260
uuacaacauaagaaacagg

SEQ ID NO: 2228262 - RNA, 19 nt, Artificial Sequence
  Description of Artificial Sequence: Synthetic oligonucleotide
  Sense strand starting at position 3445 of SEQ ID NO: 1883946
uggacauagugguggaaca

SEQ ID NO: 2228263 - RNA, 19 nt, Artificial Sequence
  Description of Artificial Sequence: Synthetic oligonucleotide
  Antisense strand to SEQ ID NO: 2228262
uguuccaccacuaugucca

SEQ ID NO: 2228264 - RNA, 19 nt, Artificial Sequence
  Description of Artificial Sequence: Synthetic oligonucleotide
  Sense strand starting at position 94 of SEQ ID NO: 1883947
ucagaacucucugcagcuu

SEQ ID NO: 2228265 - RNA, 19 nt, Artificial Sequence
  Description of Artificial Sequence: Synthetic oligonucleotide
  Antisense strand to SEQ ID NO: 2228264
aagcugcagagaguucuga

SEQ ID NO: 2228266 - RNA, 19 nt, Artificial Sequence
  Description of Artificial Sequence: Synthetic oligonucleotide
  Sense strand starting at position 107 of SEQ ID NO: 1883947
cagcuuccgugaucaggaa

SEQ ID NO: 2228267 - RNA, 19 nt, Artificial Sequence
  Description of Artificial Sequence: Synthetic oligonucleotide
  Antisense strand to SEQ ID NO: 2228266
uuccugaucacggaagcug

SEQ ID NO: 2228268 - RNA, 19 nt, Artificial Sequence
  Description of Artificial Sequence: Synthetic oligonucleotide
  Sense strand starting at position 302 of SEQ ID NO: 1883947
caccgagaucuguauucuu

SEQ ID NO: 2228269 - RNA, 19 nt, Artificial Sequence
  Description of Artificial Sequence: Synthetic oligonucleotide
  Antisense strand to SEQ ID NO: 2228268
aagaauacagaucucggug

SEQ ID NO: 2228270 - RNA, 19 nt, Artificial Sequence
  Description of Artificial Sequence: Synthetic oligonucleotide
  Sense strand starting at position 408 of SEQ ID NO: 1883947
acuccucacccuugagaag

SEQ ID NO: 2228271 - RNA, 19 nt, Artificial Sequence
  Description of Artificial Sequence: Synthetic oligonucleotide
  Antisense strand to SEQ ID NO: 2228270
cuucucaagggugaggagu

SEQ ID NO: 2228272 - RNA, 19 nt, Artificial Sequence
  Description of Artificial Sequence: Synthetic oligonucleotide
  Sense strand starting at position 449 of SEQ ID NO: 1883947
ucuggagagcugugaauac

SEQ ID NO: 2228273 - RNA, 19 nt, Artificial Sequence
  Description of Artificial Sequence: Synthetic oligonucleotide
  Antisense strand to SEQ ID NO: 2228272
guauucacagcucuccaga

SEQ ID NO: 2228274 - RNA, 19 nt, Artificial Sequence
  Description of Artificial Sequence: Synthetic oligonucleotide
  Sense strand starting at position 458 of SEQ ID NO: 1883947
cugugaauacagugacacu

SEQ ID NO: 2228275 - RNA, 19 nt, Artificial Sequence
  Description of Artificial Sequence: Synthetic oligonucleotide
  Antisense strand to SEQ ID NO: 2228274
agugucacuguauucacag

SEQ ID NO: 2228276 - RNA, 19 nt, Artificial Sequence
  Description of Artificial Sequence: Synthetic oligonucleotide
  Sense strand starting at position 989 of SEQ ID NO: 1883947
uguguuugcucgauggcag

SEQ ID NO: 2228277 - RNA, 19 nt, Artificial Sequence
  Description of Artificial Sequence: Synthetic oligonucleotide
  Antisense strand to SEQ ID NO: 2228276
cugccaucgagcaaacaca

SEQ ID NO: 2228278 - RNA, 19 nt, Artificial Sequence
  Description of Artificial Sequence: Synthetic oligonucleotide
  Sense strand starting at position 1082 of SEQ ID NO: 1883947
ucacauuugcugugugaug

SEQ ID NO: 2228279 - RNA, 19 nt, Artificial Sequence
  Description of Artificial Sequence: Synthetic oligonucleotide
  Antisense strand to SEQ ID NO: 2228278
caucacacagcaaauguga

SEQ ID NO: 2228280 - RNA, 19 nt, Artificial Sequence
  Description of Artificial Sequence: Synthetic oligonucleotide
  Sense strand starting at position 1083 of SEQ ID NO: 1883947
cacauuugcugugugaugu

SEQ ID NO: 2228281 - RNA, 19 nt, Artificial Sequence
  Description of Artificial Sequence: Synthetic oligonucleotide
  Antisense strand to SEQ ID NO: 2228280
acaucacacagcaaaugug

SEQ ID NO: 2228282 - RNA, 19 nt, Artificial Sequence
  Description of Artificial Sequence: Synthetic oligonucleotide
  Sense strand starting at position 1093 of SEQ ID NO: 1883947
gugugaugugauuacuucu

SEQ ID NO: 2228283 - RNA, 19 nt, Artificial Sequence
  Description of Artificial Sequence: Synthetic oligonucleotide
  Antisense strand to SEQ ID NO: 2228282
agaaguaaucacaucacac

SEQ ID NO: 2228284 - RNA, 19 nt, Artificial Sequence
  Description of Artificial Sequence: Synthetic oligonucleotide
  Sense strand starting at position 1099 of SEQ ID NO: 1883947
ugugauuacuucucaccag

SEQ ID NO: 2228285 - RNA, 19 nt, Artificial Sequence
  Description of Artificial Sequence: Synthetic oligonucleotide
  Antisense strand to SEQ ID NO: 2228284
cuggugagaaguaaucaca

SEQ ID NO: 2228286 - RNA, 19 nt, Artificial Sequence
  Description of Artificial Sequence: Synthetic oligonucleotide
  Sense strand starting at position 1282 of SEQ ID NO: 1883947
acugaaugcuuagcaaaca

SEQ ID NO: 2228287 - RNA, 19 nt, Artificial Sequence
  Description of Artificial Sequence: Synthetic oligonucleotide
  Antisense strand to SEQ ID NO: 2228286
uguuugcuaagcauucagu

SEQ ID NO: 2228288 - RNA, 19 nt, Artificial Sequence
  Description of Artificial Sequence: Synthetic oligonucleotide
  Sense strand starting at position 1619 of SEQ ID NO: 1883947
uaaacaugucccuguggau

SEQ ID NO: 2228289 - RNA, 19 nt, Artificial Sequence
  Description of Artificial Sequence: Synthetic oligonucleotide
  Antisense strand to SEQ ID NO: 2228288
auccacagggacauguuua

SEQ ID NO: 2228290 - RNA, 19 nt, Artificial Sequence
  Description of Artificial Sequence: Synthetic oligonucleotide
  Sense strand starting at position 1639 of SEQ ID NO: 1883947
uugaccgaguccuuauacu

SEQ ID NO: 2228291 - RNA, 19 nt, Artificial Sequence
  Description of Artificial Sequence: Synthetic oligonucleotide
  Antisense strand to SEQ ID NO: 2228290
aguauaaggacucggucaa

SEQ ID NO: 2228292 - RNA, 19 nt, Artificial Sequence
  Description of Artificial Sequence: Synthetic oligonucleotide
  Sense strand starting at position 1681 of SEQ ID NO: 1883947
gaggaugucucucuuacuu

SEQ ID NO: 2228293 - RNA, 19 nt, Artificial Sequence
  Description of Artificial Sequence: Synthetic oligonucleotide
  Antisense strand to SEQ ID NO: 2228292
aaguaagagagacauccuc

SEQ ID NO: 2228294 - RNA, 19 nt, Artificial Sequence
  Description of Artificial Sequence: Synthetic oligonucleotide
  Sense strand starting at position 1689 of SEQ ID NO: 1883947
cucucuuacuuguuguuga

SEQ ID NO: 2228295 - RNA, 19 nt, Artificial Sequence
  Description of Artificial Sequence: Synthetic oligonucleotide
  Antisense strand to SEQ ID NO: 2228294
ucaacaacaaguaagagag

SEQ ID NO: 2228296 - RNA, 19 nt, Artificial Sequence
  Description of Artificial Sequence: Synthetic oligonucleotide
  Sense strand starting at position 2001 of SEQ ID NO: 1883947
ugguguuggcuucagaguu

SEQ ID NO: 2228297 - RNA, 19 nt, Artificial Sequence
  Description of Artificial Sequence: Synthetic oligonucleotide
  Antisense strand to SEQ ID NO: 2228296
aacucugaagccaacacca

SEQ ID NO: 2228298 - RNA, 19 nt, Artificial Sequence
  Description of Artificial Sequence: Synthetic oligonucleotide
  Sense strand starting at position 2049 of SEQ ID NO: 1883947
cugagcugcucuuccaaga

SEQ ID NO: 2228299 - RNA, 19 nt, Artificial Sequence
  Description of Artificial Sequence: Synthetic oligonucleotide
  Antisense strand to SEQ ID NO: 2228298
ucuuggaagagcagcucag

SEQ ID NO: 2228300 - RNA, 19 nt, Artificial Sequence
  Description of Artificial Sequence: Synthetic oligonucleotide
  Sense strand starting at position 2168 of SEQ ID NO: 1883947
cggcuuugcuggaagggau

SEQ ID NO: 2228301 - RNA, 19 nt, Artificial Sequence
  Description of Artificial Sequence: Synthetic oligonucleotide
  Antisense strand to SEQ ID NO: 2228300
aucccuuccagcaaagccg

SEQ ID NO: 2228302 - RNA, 19 nt, Artificial Sequence
  Description of Artificial Sequence: Synthetic oligonucleotide
  Sense strand starting at position 2182 of SEQ ID NO: 1883947
gggauucuaccauguguuc

SEQ ID NO: 2228303 - RNA, 19 nt, Artificial Sequence
  Description of Artificial Sequence: Synthetic oligonucleotide
  Antisense strand to SEQ ID NO: 2228302
gaacacaugguagaauccc

SEQ ID NO: 2228304 - RNA, 19 nt, Artificial Sequence
  Description of Artificial Sequence: Synthetic oligonucleotide
  Sense strand starting at position 2215 of SEQ ID NO: 1883947
agauuagaaucugugcuuu

SEQ ID NO: 2228305 - RNA, 19 nt, Artificial Sequence
  Description of Artificial Sequence: Synthetic oligonucleotide
  Antisense strand to SEQ ID NO: 2228304
aaagcacagauucuaaucu

SEQ ID NO: 2228306 - RNA, 19 nt, Artificial Sequence
  Description of Artificial Sequence: Synthetic oligonucleotide
  Sense strand starting at position 2217 of SEQ ID NO: 1883947
auuagaaucugugcuuucu

SEQ ID NO: 2228307 - RNA, 19 nt, Artificial Sequence
  Description of Artificial Sequence: Synthetic oligonucleotide
  Antisense strand to SEQ ID NO: 2228306
agaaagcacagauucuaau

SEQ ID NO: 2228308 - RNA, 19 nt, Artificial Sequence
  Description of Artificial Sequence: Synthetic oligonucleotide
  Sense strand starting at position 2245 of SEQ ID NO: 1883947
cuccuugcuuuguuggaaa

SEQ ID NO: 2228309 - RNA, 19 nt, Artificial Sequence
  Description of Artificial Sequence: Synthetic oligonucleotide
  Antisense strand to SEQ ID NO: 2228308
uuuccaacaaagcaaggag

SEQ ID NO: 2228310 - RNA, 19 nt, Artificial Sequence
  Description of Artificial Sequence: Synthetic oligonucleotide
  Sense strand starting at position 2247 of SEQ ID NO: 1883947
ccuugcuuuguuggaaagu

SEQ ID NO: 2228311 - RNA, 19 nt, Artificial Sequence
  Description of Artificial Sequence: Synthetic oligonucleotide
  Antisense strand to SEQ ID NO: 2228310
acuuuccaacaaagcaagg

SEQ ID NO: 2228312 - RNA, 19 nt, Artificial Sequence
  Description of Artificial Sequence: Synthetic oligonucleotide
  Sense strand starting at position 2256 of SEQ ID NO: 1883947
guuggaaaguauccuucuu

SEQ ID NO: 2228313 - RNA, 19 nt, Artificial Sequence
  Description of Artificial Sequence: Synthetic oligonucleotide
  Antisense strand to SEQ ID NO: 2228312
aagaaggauacuuuccaac

SEQ ID NO: 2228314 - RNA, 19 nt, Artificial Sequence
  Description of Artificial Sequence: Synthetic oligonucleotide
  Sense strand starting at position 2258 of SEQ ID NO: 1883947
uggaaaguauccuucuuuc

SEQ ID NO: 2228315 - RNA, 19 nt, Artificial Sequence
  Description of Artificial Sequence: Synthetic oligonucleotide
  Antisense strand to SEQ ID NO: 2228314
gaaagaaggauacuuucca

SEQ ID NO: 2228316 - RNA, 19 nt, Artificial Sequence
  Description of Artificial Sequence: Synthetic oligonucleotide
  Sense strand starting at position 2380 of SEQ ID NO: 1883947
agaugagaggucuguugug

SEQ ID NO: 2228317 - RNA, 19 nt, Artificial Sequence
  Description of Artificial Sequence: Synthetic oligonucleotide
  Antisense strand to SEQ ID NO: 2228316
cacaacagaccucucaucu

SEQ ID NO: 2228318 - RNA, 19 nt, Artificial Sequence
  Description of Artificial Sequence: Synthetic oligonucleotide
  Sense strand starting at position 2441 of SEQ ID NO: 1883947
ugcuuaugcgcccagaaca

SEQ ID NO: 2228319 - RNA, 19 nt, Artificial Sequence
  Description of Artificial Sequence: Synthetic oligonucleotide
  Antisense strand to SEQ ID NO: 2228318
uguucugggcgcauaagca

SEQ ID NO: 2228320 - RNA, 19 nt, Artificial Sequence
  Description of Artificial Sequence: Synthetic oligonucleotide
  Sense strand starting at position 2558 of SEQ ID NO: 1883947
ggucuugggaaguguguua

SEQ ID NO: 2228321 - RNA, 19 nt, Artificial Sequence
  Description of Artificial Sequence: Synthetic oligonucleotide
  Antisense strand to SEQ ID NO: 2228320
uaacacacuucccaagacc

SEQ ID NO: 2228322 - RNA, 19 nt, Artificial Sequence
  Description of Artificial Sequence: Synthetic oligonucleotide
  Sense strand starting at position 2565 of SEQ ID NO: 1883947
ggaaguguguuaguucaua

SEQ ID NO: 2228323 - RNA, 19 nt, Artificial Sequence
  Description of Artificial Sequence: Synthetic oligonucleotide
  Antisense strand to SEQ ID NO: 2228322
uaugaacuaacacacuucc

SEQ ID NO: 2228324 - RNA, 19 nt, Artificial Sequence
  Description of Artificial Sequence: Synthetic oligonucleotide
  Sense strand starting at position 2661 of SEQ ID NO: 1883947
cuguauaagaaguauggca

SEQ ID NO: 2228325 - RNA, 19 nt, Artificial Sequence
  Description of Artificial Sequence: Synthetic oligonucleotide
  Antisense strand to SEQ ID NO: 2228324
ugccauacuucuuauacag

SEQ ID NO: 2228326 - RNA, 19 nt, Artificial Sequence
  Description of Artificial Sequence: Synthetic oligonucleotide
  Sense strand starting at position 3047 of SEQ ID NO: 1883947
gagaauaagugugucacga

SEQ ID NO: 2228327 - RNA, 19 nt, Artificial Sequence
  Description of Artificial Sequence: Synthetic oligonucleotide
  Antisense strand to SEQ ID NO: 2228326
ucgugacacacuuauucuc

SEQ ID NO: 2228328 - RNA, 19 nt, Artificial Sequence
  Description of Artificial Sequence: Synthetic oligonucleotide
  Sense strand starting at position 3054 of SEQ ID NO: 1883947
agugugucacgaggugaga

SEQ ID NO: 2228329 - RNA, 19 nt, Artificial Sequence
  Description of Artificial Sequence: Synthetic oligonucleotide
  Antisense strand to SEQ ID NO: 2228328
ucucaccucgugacacacu

SEQ ID NO: 2228330 - RNA, 19 nt, Artificial Sequence
  Description of Artificial Sequence: Synthetic oligonucleotide
  Sense strand starting at position 3096 of SEQ ID NO: 1883947
aggugccagaccuguuaaa

SEQ ID NO: 2228331 - RNA, 19 nt, Artificial Sequence
  Description of Artificial Sequence: Synthetic oligonucleotide
  Antisense strand to SEQ ID NO: 2228330
uuuaacaggucuggcaccu

SEQ ID NO: 2228332 - RNA, 19 nt, Artificial Sequence
  Description of Artificial Sequence: Synthetic oligonucleotide
  Sense strand starting at position 3534 of SEQ ID NO: 1883947
agagacacacgauguaaau

SEQ ID NO: 2228333 - RNA, 19 nt, Artificial Sequence
  Description of Artificial Sequence: Synthetic oligonucleotide
  Antisense strand to SEQ ID NO: 2228332
auuuacaucgugugucucu

SEQ ID NO: 2228334 - RNA, 19 nt, Artificial Sequence
  Description of Artificial Sequence: Synthetic oligonucleotide
  Sense strand starting at position 3572 of SEQ ID NO: 1883947
auaaucuuagucuagugau

SEQ ID NO: 2228335 - RNA, 19 nt, Artificial Sequence
  Description of Artificial Sequence: Synthetic oligonucleotide
  Antisense strand to SEQ ID NO: 2228334
aucacuagacuaagauuau

SEQ ID NO: 2228336 - RNA, 19 nt, Artificial Sequence
  Description of Artificial Sequence: Synthetic oligonucleotide
  Sense strand starting at position 3587 of SEQ ID NO: 1883947
ugaugacauccacgggaca

SEQ ID NO: 2228337 - RNA, 19 nt, Artificial Sequence
  Description of Artificial Sequence: Synthetic oligonucleotide
  Antisense strand to SEQ ID NO: 2228336
ugucccguggaugucauca

SEQ ID NO: 2228338 - RNA, 19 nt, Artificial Sequence
  Description of Artificial Sequence: Synthetic oligonucleotide
  Sense strand starting at position 3599 of SEQ ID NO: 1883947
cgggacagaaugugagaua

SEQ ID NO: 2228339 - RNA, 19 nt, Artificial Sequence
  Description of Artificial Sequence: Synthetic oligonucleotide
  Antisense strand to SEQ ID NO: 2228338
uaucucacauucugucccg

SEQ ID NO: 2228340 - RNA, 19 nt, Artificial Sequence
  Description of Artificial Sequence: Synthetic oligonucleotide
  Sense strand starting at position 3600 of SEQ ID NO: 1883947
gggacagaaugugagauaa

SEQ ID NO: 2228341 - RNA, 19 nt, Artificial Sequence
  Description of Artificial Sequence: Synthetic oligonucleotide
  Antisense strand to SEQ ID NO: 2228340
uuaucucacauucuguccc

SEQ ID NO: 2228342 - RNA, 19 nt, Artificial Sequence
  Description of Artificial Sequence: Synthetic oligonucleotide
  Sense strand starting at position 3610 of SEQ ID NO: 1883947
gugagauaagcugaugcua

SEQ ID NO: 2228343 - RNA, 19 nt, Artificial Sequence
  Description of Artificial Sequence: Synthetic oligonucleotide
  Antisense strand to SEQ ID NO: 2228342
uagcaucagcuuaucucac

SEQ ID NO: 2228344 - RNA, 19 nt, Artificial Sequence
  Description of Artificial Sequence: Synthetic oligonucleotide
  Sense strand starting at position 11 of SEQ ID NO: 1883948
gcaaguaaacaucagucaa

SEQ ID NO: 2228345 - RNA, 19 nt, Artificial Sequence
  Description of Artificial Sequence: Synthetic oligonucleotide
  Antisense strand to SEQ ID NO: 2228344
uugacugauguuuacuugc

SEQ ID NO: 2228346 - RNA, 19 nt, Artificial Sequence
  Description of Artificial Sequence: Synthetic oligonucleotide
  Sense strand starting at position 719 of SEQ ID NO: 1883948
acuucugagccagauuauc

SEQ ID NO: 2228347 - RNA, 19 nt, Artificial Sequence
  Description of Artificial Sequence: Synthetic oligonucleotide
  Antisense strand to SEQ ID NO: 2228346
gauaaucuggcucagaagu

SEQ ID NO: 2228348 - RNA, 19 nt, Artificial Sequence
  Description of Artificial Sequence: Synthetic oligonucleotide
  Sense strand starting at position 759 of SEQ ID NO: 1883948
ccaguuauuucugugugac

SEQ ID NO: 2228349 - RNA, 19 nt, Artificial Sequence
  Description of Artificial Sequence: Synthetic oligonucleotide
  Antisense strand to SEQ ID NO: 2228348
gucacacagaaauaacugg

SEQ ID NO: 2228350 - RNA, 19 nt, Artificial Sequence
  Description of Artificial Sequence: Synthetic oligonucleotide
  Sense strand starting at position 760 of SEQ ID NO: 1883948
caguuauuucugugugacc

SEQ ID NO: 2228351 - RNA, 19 nt, Artificial Sequence
  Description of Artificial Sequence: Synthetic oligonucleotide
  Antisense strand to SEQ ID NO: 2228350
ggucacacagaaauaacug

SEQ ID NO: 2228352 - RNA, 19 nt, Artificial Sequence
  Description of Artificial Sequence: Synthetic oligonucleotide
  Sense strand starting at position 761 of SEQ ID NO: 1883948
aguuauuucugugugaccu

SEQ ID NO: 2228353 - RNA, 19 nt, Artificial Sequence
  Description of Artificial Sequence: Synthetic oligonucleotide
  Antisense strand to SEQ ID NO: 2228352
aggucacacagaaauaacu

SEQ ID NO: 2228354 - RNA, 19 nt, Artificial Sequence
  Description of Artificial Sequence: Synthetic oligonucleotide
  Sense strand starting at position 762 of SEQ ID NO: 1883948
guuauuucugugugaccuu

SEQ ID NO: 2228355 - RNA, 19 nt, Artificial Sequence
  Description of Artificial Sequence: Synthetic oligonucleotide
  Antisense strand to SEQ ID NO: 2228354
aaggucacacagaaauaac

SEQ ID NO: 2228356 - RNA, 19 nt, Artificial Sequence
  Description of Artificial Sequence: Synthetic oligonucleotide
  Sense strand starting at position 845 of SEQ ID NO: 1883948
agcauauagaguuggugaa

SEQ ID NO: 2228357 - RNA, 19 nt, Artificial Sequence
  Description of Artificial Sequence: Synthetic oligonucleotide
  Antisense strand to SEQ ID NO: 2228356
uucaccaacucuauaugcu

SEQ ID NO: 2228358 - RNA, 19 nt, Artificial Sequence
  Description of Artificial Sequence: Synthetic oligonucleotide
  Sense strand starting at position 846 of SEQ ID NO: 1883948
gcauauagaguuggugaag

SEQ ID NO: 2228359 - RNA, 19 nt, Artificial Sequence
  Description of Artificial Sequence: Synthetic oligonucleotide
  Antisense strand to SEQ ID NO: 2228358
cuucaccaacucuauaugc

SEQ ID NO: 2228360 - RNA, 19 nt, Artificial Sequence
  Description of Artificial Sequence: Synthetic oligonucleotide
  Sense strand starting at position 847 of SEQ ID NO: 1883948
cauauagaguuggugaagu

SEQ ID NO: 2228361 - RNA, 19 nt, Artificial Sequence
  Description of Artificial Sequence: Synthetic oligonucleotide
  Antisense strand to SEQ ID NO: 2228360
acuucaccaacucuauaug

SEQ ID NO: 2228362 - RNA, 19 nt, Artificial Sequence
  Description of Artificial Sequence: Synthetic oligonucleotide
  Sense strand starting at position 849 of SEQ ID NO: 1883948
uauagaguuggugaaguua

SEQ ID NO: 2228363 - RNA, 19 nt, Artificial Sequence
  Description of Artificial Sequence: Synthetic oligonucleotide
  Antisense strand to SEQ ID NO: 2228362
uaacuucaccaacucuaua

SEQ ID NO: 2228364 - RNA, 19 nt, Artificial Sequence
  Description of Artificial Sequence: Synthetic oligonucleotide
  Sense strand starting at position 860 of SEQ ID NO: 1883948
ugaaguuaaauguggugaa

SEQ ID NO: 2228365 - RNA, 19 nt, Artificial Sequence
  Description of Artificial Sequence: Synthetic oligonucleotide
  Antisense strand to SEQ ID NO: 2228364
uucaccacauuuaacuuca

SEQ ID NO: 2228366 - RNA, 19 nt, Artificial Sequence
  Description of Artificial Sequence: Synthetic oligonucleotide
  Sense strand starting at position 864 of SEQ ID NO: 1883948
guuaaauguggugaaaguu

SEQ ID NO: 2228367 - RNA, 19 nt, Artificial Sequence
  Description of Artificial Sequence: Synthetic oligonucleotide
  Antisense strand to SEQ ID NO: 2228366
aacuuucaccacauuuaac

SEQ ID NO: 2228368 - RNA, 19 nt, Artificial Sequence
  Description of Artificial Sequence: Synthetic oligonucleotide
  Sense strand starting at position 932 of SEQ ID NO: 1883948
cauauaaguguugccgcau

SEQ ID NO: 2228369 - RNA, 19 nt, Artificial Sequence
  Description of Artificial Sequence: Synthetic oligonucleotide
  Antisense strand to SEQ ID NO: 2228368
augcggcaacacuuauaug

SEQ ID NO: 2228370 - RNA, 19 nt, Artificial Sequence
  Description of Artificial Sequence: Synthetic oligonucleotide
  Sense strand starting at position 983 of SEQ ID NO: 1883948
ccauuucugucggcucuua

SEQ ID NO: 2228371 - RNA, 19 nt, Artificial Sequence
  Description of Artificial Sequence: Synthetic oligonucleotide
  Antisense strand to SEQ ID NO: 2228370
uaagagccgacagaaaugg

SEQ ID NO: 2228372 - RNA, 19 nt, Artificial Sequence
  Description of Artificial Sequence: Synthetic oligonucleotide
  Sense strand starting at position 1060 of SEQ ID NO: 1883948
gcuagucaccuguaaauau

SEQ ID NO: 2228373 - RNA, 19 nt, Artificial Sequence
  Description of Artificial Sequence: Synthetic oligonucleotide
  Antisense strand to SEQ ID NO: 2228372
auauuuacaggugacuagc

SEQ ID NO: 2228374 - RNA, 19 nt, Artificial Sequence
  Description of Artificial Sequence: Synthetic oligonucleotide
  Sense strand starting at position 1166 of SEQ ID NO: 1883948
guagaaaguauauggguua

SEQ ID NO: 2228375 - RNA, 19 nt, Artificial Sequence
  Description of Artificial Sequence: Synthetic oligonucleotide
  Antisense strand to SEQ ID NO: 2228374
uaacccauauacuuucuac

SEQ ID NO: 2228376 - RNA, 19 nt, Artificial Sequence
  Description of Artificial Sequence: Synthetic oligonucleotide
  Sense strand starting at position 1169 of SEQ ID NO: 1883948
gaaaguauauggguuaaua

SEQ ID NO: 2228377 - RNA, 19 nt, Artificial Sequence
  Description of Artificial Sequence: Synthetic oligonucleotide
  Antisense strand to SEQ ID NO: 2228376
uauuaacccauauacuuuc

SEQ ID NO: 2228378 - RNA, 19 nt, Artificial Sequence
  Description of Artificial Sequence: Synthetic oligonucleotide
  Sense strand starting at position 1210 of SEQ ID NO: 1883948
gucaaauuacucuagguug

SEQ ID NO: 2228379 - RNA, 19 nt, Artificial Sequence
  Description of Artificial Sequence: Synthetic oligonucleotide
  Antisense strand to SEQ ID NO: 2228378
caaccuagaguaauuugac

SEQ ID NO: 2228380 - RNA, 19 nt, Artificial Sequence
  Description of Artificial Sequence: Synthetic oligonucleotide
  Sense strand starting at position 1290 of SEQ ID NO: 1883948
acuagcucuuaccugauga

SEQ ID NO: 2228381 - RNA, 19 nt, Artificial Sequence
  Description of Artificial Sequence: Synthetic oligonucleotide
  Antisense strand to SEQ ID NO: 2228380
ucaucagguaagagcuagu

SEQ ID NO: 2228382 - RNA, 19 nt, Artificial Sequence
  Description of Artificial Sequence: Synthetic oligonucleotide
  Sense strand starting at position 1467 of SEQ ID NO: 1883948
uggcauuucugagcaacgu

SEQ ID NO: 2228383 - RNA, 19 nt, Artificial Sequence
  Description of Artificial Sequence: Synthetic oligonucleotide
  Antisense strand to SEQ ID NO: 2228382
acguugcucagaaaugcca

SEQ ID NO: 2228384 - RNA, 19 nt, Artificial Sequence
  Description of Artificial Sequence: Synthetic oligonucleotide
  Sense strand starting at position 1491 of SEQ ID NO: 1883948
guaguugugugauuuggca

SEQ ID NO: 2228385 - RNA, 19 nt, Artificial Sequence
  Description of Artificial Sequence: Synthetic oligonucleotide
  Antisense strand to SEQ ID NO: 2228384
ugccaaaucacacaacuac

SEQ ID NO: 2228386 - RNA, 19 nt, Artificial Sequence
  Description of Artificial Sequence: Synthetic oligonucleotide
  Sense strand starting at position 1564 of SEQ ID NO: 1883948
uaaggcuuccuuggagaga

SEQ ID NO: 2228387 - RNA, 19 nt, Artificial Sequence
  Description of Artificial Sequence: Synthetic oligonucleotide
  Antisense strand to SEQ ID NO: 2228386
ucucuccaaggaagccuua

SEQ ID NO: 2228388 - RNA, 19 nt, Artificial Sequence
  Description of Artificial Sequence: Synthetic oligonucleotide
  Sense strand starting at position 1718 of SEQ ID NO: 1883948
gggugauggcuagaaguga

SEQ ID NO: 2228389 - RNA, 19 nt, Artificial Sequence
  Description of Artificial Sequence: Synthetic oligonucleotide
  Antisense strand to SEQ ID NO: 2228388
ucacuucuagccaucaccc

SEQ ID NO: 2228390 - RNA, 19 nt, Artificial Sequence
  Description of Artificial Sequence: Synthetic oligonucleotide
  Sense strand starting at position 1832 of SEQ ID NO: 1883948
ggagaucucucauuaugua

SEQ ID NO: 2228391 - RNA, 19 nt, Artificial Sequence
  Description of Artificial Sequence: Synthetic oligonucleotide
  Antisense strand to SEQ ID NO: 2228390
uacauaaugagagaucucc

SEQ ID NO: 2228392 - RNA, 19 nt, Artificial Sequence
  Description of Artificial Sequence: Synthetic oligonucleotide
  Sense strand starting at position 1996 of SEQ ID NO: 1883948
guaggauucuaggcuggau

SEQ ID NO: 2228393 - RNA, 19 nt, Artificial Sequence
  Description of Artificial Sequence: Synthetic oligonucleotide
  Antisense strand to SEQ ID NO: 2228392
auccagccuagaauccuac

SEQ ID NO: 2228394 - RNA, 19 nt, Artificial Sequence
  Description of Artificial Sequence: Synthetic oligonucleotide
  Sense strand starting at position 2128 of SEQ ID NO: 1883948
cacugaugucgugauacaa

SEQ ID NO: 2228395 - RNA, 19 nt, Artificial Sequence
  Description of Artificial Sequence: Synthetic oligonucleotide
  Antisense strand to SEQ ID NO: 2228394
uuguaucacgacaucagug

SEQ ID NO: 2228396 - RNA, 19 nt, Artificial Sequence
  Description of Artificial Sequence: Synthetic oligonucleotide
  Sense strand starting at position 2153 of SEQ ID NO: 1883948
gaagaugugagucauugug

SEQ ID NO: 2228397 - RNA, 19 nt, Artificial Sequence
  Description of Artificial Sequence: Synthetic oligonucleotide
  Antisense strand to SEQ ID NO: 2228396
cacaaugacucacaucuuc

SEQ ID NO: 2228398 - RNA, 19 nt, Artificial Sequence
  Description of Artificial Sequence: Synthetic oligonucleotide
  Sense strand starting at position 2254 of SEQ ID NO: 1883948
acauguaucccucaguauc

SEQ ID NO: 2228399 - RNA, 19 nt, Artificial Sequence
  Description of Artificial Sequence: Synthetic oligonucleotide
  Antisense strand to SEQ ID NO: 2228398
gauacugagggauacaugu

SEQ ID NO: 2228400 - RNA, 19 nt, Artificial Sequence
  Description of Artificial Sequence: Synthetic oligonucleotide
  Sense strand starting at position 2281 of SEQ ID NO: 1883948
ugaaauugguuucucuaag

SEQ ID NO: 2228401 - RNA, 19 nt, Artificial Sequence
  Description of Artificial Sequence: Synthetic oligonucleotide
  Antisense strand to SEQ ID NO: 2228400
cuuagagaaaccaauuuca

SEQ ID NO: 2228402 - RNA, 19 nt, Artificial Sequence
  Description of Artificial Sequence: Synthetic oligonucleotide
  Sense strand starting at position 2282 of SEQ ID NO: 1883948
gaaauugguuucucuaaga

SEQ ID NO: 2228403 - RNA, 19 nt, Artificial Sequence
  Description of Artificial Sequence: Synthetic oligonucleotide
  Antisense strand to SEQ ID NO: 2228402
ucuuagagaaaccaauuuc

SEQ ID NO: 2228404 - RNA, 19 nt, Artificial Sequence
  Description of Artificial Sequence: Synthetic oligonucleotide
  Sense strand starting at position 2310 of SEQ ID NO: 1883948
ggcccauaaggguaaugua

SEQ ID NO: 2228405 - RNA, 19 nt, Artificial Sequence
  Description of Artificial Sequence: Synthetic oligonucleotide
  Antisense strand to SEQ ID NO: 2228404
uacauuacccuuaugggcc

SEQ ID NO: 2228406 - RNA, 19 nt, Artificial Sequence
  Description of Artificial Sequence: Synthetic oligonucleotide
  Sense strand starting at position 2679 of SEQ ID NO: 1883948
ugaauugaucuauguugau

SEQ ID NO: 2228407 - RNA, 19 nt, Artificial Sequence
  Description of Artificial Sequence: Synthetic oligonucleotide
  Antisense strand to SEQ ID NO: 2228406
aucaacauagaucaauuca

SEQ ID NO: 2228408 - RNA, 19 nt, Artificial Sequence
  Description of Artificial Sequence: Synthetic oligonucleotide
  Sense strand starting at position 2733 of SEQ ID NO: 1883948
uuaguuguuguauaggauu

SEQ ID NO: 2228409 - RNA, 19 nt, Artificial Sequence
  Description of Artificial Sequence: Synthetic oligonucleotide
  Antisense strand to SEQ ID NO: 2228408
aauccuauacaacaacuaa

SEQ ID NO: 2228410 - RNA, 19 nt, Artificial Sequence
  Description of Artificial Sequence: Synthetic oligonucleotide
  Sense strand starting at position 3125 of SEQ ID NO: 1883948
uuaaaugaacaaugcagua

SEQ ID NO: 2228411 - RNA, 19 nt, Artificial Sequence
  Description of Artificial Sequence: Synthetic oligonucleotide
  Antisense strand to SEQ ID NO: 2228410
uacugcauuguucauuuaa

SEQ ID NO: 2228412 - RNA, 19 nt, Artificial Sequence
  Description of Artificial Sequence: Synthetic oligonucleotide
  Sense strand starting at position 3130 of SEQ ID NO: 1883948
ugaacaaugcaguaaaucu

SEQ ID NO: 2228413 - RNA, 19 nt, Artificial Sequence
  Description of Artificial Sequence: Synthetic oligonucleotide
  Antisense strand to SEQ ID NO: 2228412
agauuuacugcauuguuca

SEQ ID NO: 2228414 - RNA, 19 nt, Artificial Sequence
  Description of Artificial Sequence: Synthetic oligonucleotide
  Sense strand starting at position 3267 of SEQ ID NO: 1883948
agaacaauugcaugcuaca

SEQ ID NO: 2228415 - RNA, 19 nt, Artificial Sequence
  Description of Artificial Sequence: Synthetic oligonucleotide
  Antisense strand to SEQ ID NO: 2228414
uguagcaugcaauuguucu

SEQ ID NO: 2228416 - RNA, 19 nt, Artificial Sequence
  Description of Artificial Sequence: Synthetic oligonucleotide
  Sense strand starting at position 3488 of SEQ ID NO: 1883948
uuauaaaugggucaucuuu

SEQ ID NO: 2228417 - RNA, 19 nt, Artificial Sequence
  Description of Artificial Sequence: Synthetic oligonucleotide
  Antisense strand to SEQ ID NO: 2228416
aaagaugacccauuuauaa

SEQ ID NO: 2228418 - RNA, 19 nt, Artificial Sequence
  Description of Artificial Sequence: Synthetic oligonucleotide
  Sense strand starting at position 3546 of SEQ ID NO: 1883948
guccuaugugucuuugugu

SEQ ID NO: 2228419 - RNA, 19 nt, Artificial Sequence
  Description of Artificial Sequence: Synthetic oligonucleotide
  Antisense strand to SEQ ID NO: 2228418
acacaaagacacauaggac

SEQ ID NO: 2228420 - RNA, 19 nt, Artificial Sequence
  Description of Artificial Sequence: Synthetic oligonucleotide
  Sense strand starting at position 3636 of SEQ ID NO: 1883948
auaugagucacaggaguuu

SEQ ID NO: 2228421 - RNA, 19 nt, Artificial Sequence
  Description of Artificial Sequence: Synthetic oligonucleotide
  Antisense strand to SEQ ID NO: 2228420
aaacuccugugacucauau

SEQ ID NO: 2228422 - RNA, 19 nt, Artificial Sequence
  Description of Artificial Sequence: Synthetic oligonucleotide
  Sense strand starting at position 3840 of SEQ ID NO: 1883948
ugcauuagauugcuaaaga

SEQ ID NO: 2228423 - RNA, 19 nt, Artificial Sequence
  Description of Artificial Sequence: Synthetic oligonucleotide
  Antisense strand to SEQ ID NO: 2228422
ucuuuagcaaucuaaugca

SEQ ID NO: 2228424 - RNA, 19 nt, Artificial Sequence
  Description of Artificial Sequence: Synthetic oligonucleotide
  Sense strand starting at position 81 of SEQ ID NO: 1883949
agcuccaagcuuugacaau

SEQ ID NO: 2228425 - RNA, 19 nt, Artificial Sequence
  Description of Artificial Sequence: Synthetic oligonucleotide
  Antisense strand to SEQ ID NO: 2228424
auugucaaagcuuggagcu

SEQ ID NO: 2228426 - RNA, 19 nt, Artificial Sequence
  Description of Artificial Sequence: Synthetic oligonucleotide
  Sense strand starting at position 350 of SEQ ID NO: 1883949
cuugguguaaucuggauau

SEQ ID NO: 2228427 - RNA, 19 nt, Artificial Sequence
  Description of Artificial Sequence: Synthetic oligonucleotide
  Antisense strand to SEQ ID NO: 2228426
auauccagauuacaccaag

SEQ ID NO: 2228428 - RNA, 19 nt, Artificial Sequence
  Description of Artificial Sequence: Synthetic oligonucleotide
  Sense strand starting at position 352 of SEQ ID NO: 1883949
ugguguaaucuggauauca

SEQ ID NO: 2228429 - RNA, 19 nt, Artificial Sequence
  Description of Artificial Sequence: Synthetic oligonucleotide
  Antisense strand to SEQ ID NO: 2228428
ugauauccagauuacacca

SEQ ID NO: 2228430 - RNA, 19 nt, Artificial Sequence
  Description of Artificial Sequence: Synthetic oligonucleotide
  Sense strand starting at position 398 of SEQ ID NO: 1883949
uggaauuagaucugaguuc

SEQ ID NO: 2228431 - RNA, 19 nt, Artificial Sequence
  Description of Artificial Sequence: Synthetic oligonucleotide
  Antisense strand to SEQ ID NO: 2228430
gaacucagaucuaauucca

SEQ ID NO: 2228432 - RNA, 19 nt, Artificial Sequence
  Description of Artificial Sequence: Synthetic oligonucleotide
  Sense strand starting at position 444 of SEQ ID NO: 1883949
ugugaucuuggcugaauua

SEQ ID NO: 2228433 - RNA, 19 nt, Artificial Sequence
  Description of Artificial Sequence: Synthetic oligonucleotide
  Antisense strand to SEQ ID NO: 2228432
uaauucagccaagaucaca

SEQ ID NO: 2228434 - RNA, 19 nt, Artificial Sequence
  Description of Artificial Sequence: Synthetic oligonucleotide
  Sense strand starting at position 445 of SEQ ID NO: 1883949
gugaucuuggcugaauuac

SEQ ID NO: 2228435 - RNA, 19 nt, Artificial Sequence
  Description of Artificial Sequence: Synthetic oligonucleotide
  Antisense strand to SEQ ID NO: 2228434
guaauucagccaagaucac

SEQ ID NO: 2228436 - RNA, 19 nt, Artificial Sequence
  Description of Artificial Sequence: Synthetic oligonucleotide
  Sense strand starting at position 526 of SEQ ID NO: 1883949
cauggcucucgugagaauc

SEQ ID NO: 2228437 - RNA, 19 nt, Artificial Sequence
  Description of Artificial Sequence: Synthetic oligonucleotide
  Antisense strand to SEQ ID NO: 2228436
gauucucacgagagccaug

SEQ ID NO: 2228438 - RNA, 19 nt, Artificial Sequence
  Description of Artificial Sequence: Synthetic oligonucleotide
  Sense strand starting at position 537 of SEQ ID NO: 1883949
ugagaauccgcggagauca

SEQ ID NO: 2228439 - RNA, 19 nt, Artificial Sequence
  Description of Artificial Sequence: Synthetic oligonucleotide
  Antisense strand to SEQ ID NO: 2228438
ugaucuccgcggauucuca

SEQ ID NO: 2228440 - RNA, 19 nt, Artificial Sequence
  Description of Artificial Sequence: Synthetic oligonucleotide
  Sense strand starting at position 730 of SEQ ID NO: 1883949
ucaaguuucuuggccaaua

SEQ ID NO: 2228441 - RNA, 19 nt, Artificial Sequence
  Description of Artificial Sequence: Synthetic oligonucleotide
  Antisense strand to SEQ ID NO: 2228440
uauuggccaagaaacuuga

SEQ ID NO: 2228442 - RNA, 19 nt, Artificial Sequence
  Description of Artificial Sequence: Synthetic oligonucleotide
  Sense strand starting at position 821 of SEQ ID NO: 1883949
gggagugcaagcuaagaaa

SEQ ID NO: 2228443 - RNA, 19 nt, Artificial Sequence
  Description of Artificial Sequence: Synthetic oligonucleotide
  Antisense strand to SEQ ID NO: 2228442
uuucuuagcuugcacuccc

SEQ ID NO: 2228444 - RNA, 19 nt, Artificial Sequence
  Description of Artificial Sequence: Synthetic oligonucleotide
  Sense strand starting at position 1071 of SEQ ID NO: 1883949
ggugcugacuuauuuccua

SEQ ID NO: 2228445 - RNA, 19 nt, Artificial Sequence
  Description of Artificial Sequence: Synthetic oligonucleotide
  Antisense strand to SEQ ID NO: 2228444
uaggaaauaagucagcacc

SEQ ID NO: 2228446 - RNA, 19 nt, Artificial Sequence
  Description of Artificial Sequence: Synthetic oligonucleotide
  Sense strand starting at position 1078 of SEQ ID NO: 1883949
acuuauuuccuacgucuga

SEQ ID NO: 2228447 - RNA, 19 nt, Artificial Sequence
  Description of Artificial Sequence: Synthetic oligonucleotide
  Antisense strand to SEQ ID NO: 2228446
ucagacguaggaaauaagu

SEQ ID NO: 2228448 - RNA, 19 nt, Artificial Sequence
  Description of Artificial Sequence: Synthetic oligonucleotide
  Sense strand starting at position 1111 of SEQ ID NO: 1883949
ugagcaauaucuguucuga

SEQ ID NO: 2228449 - RNA, 19 nt, Artificial Sequence
  Description of Artificial Sequence: Synthetic oligonucleotide
  Antisense strand to SEQ ID NO: 2228448
ucagaacagauauugcuca

SEQ ID NO: 2228450 - RNA, 19 nt, Artificial Sequence
  Description of Artificial Sequence: Synthetic oligonucleotide
  Sense strand starting at position 1113 of SEQ ID NO: 1883949
agcaauaucuguucugaag

SEQ ID NO: 2228451 - RNA, 19 nt, Artificial Sequence
  Description of Artificial Sequence: Synthetic oligonucleotide
  Antisense strand to SEQ ID NO: 2228450
cuucagaacagauauugcu

SEQ ID NO: 2228452 - RNA, 19 nt, Artificial Sequence
  Description of Artificial Sequence: Synthetic oligonucleotide
  Sense strand starting at position 2150 of SEQ ID NO: 1883949
guaguucaaccugggaagu

SEQ ID NO: 2228453 - RNA, 19 nt, Artificial Sequence
  Description of Artificial Sequence: Synthetic oligonucleotide
  Antisense strand to SEQ ID NO: 2228452
acuucccagguugaacuac

SEQ ID NO: 2228454 - RNA, 19 nt, Artificial Sequence
  Description of Artificial Sequence: Synthetic oligonucleotide
  Sense strand starting at position 2222 of SEQ ID NO: 1883949
acaggagccuuggcuaauu

SEQ ID NO: 2228455 - RNA, 19 nt, Artificial Sequence
  Description of Artificial Sequence: Synthetic oligonucleotide
  Antisense strand to SEQ ID NO: 2228454
aauuagccaaggcuccugu

SEQ ID NO: 2228456 - RNA, 19 nt, Artificial Sequence
  Description of Artificial Sequence: Synthetic oligonucleotide
  Sense strand starting at position 2233 of SEQ ID NO: 1883949
ggcuaauugcuggagucac

SEQ ID NO: 2228457 - RNA, 19 nt, Artificial Sequence
  Description of Artificial Sequence: Synthetic oligonucleotide
  Antisense strand to SEQ ID NO: 2228456
gugacuccagcaauuagcc

SEQ ID NO: 2228458 - RNA, 19 nt, Artificial Sequence
  Description of Artificial Sequence: Synthetic oligonucleotide
  Sense strand starting at position 2492 of SEQ ID NO: 1883949
cuucguuacucauuauuuc

SEQ ID NO: 2228459 - RNA, 19 nt, Artificial Sequence
  Description of Artificial Sequence: Synthetic oligonucleotide
  Antisense strand to SEQ ID NO: 2228458
gaaauaaugaguaacgaag

SEQ ID NO: 2228460 - RNA, 19 nt, Artificial Sequence
  Description of Artificial Sequence: Synthetic oligonucleotide
  Sense strand starting at position 2537 of SEQ ID NO: 1883949
cuuguaauucuuucgugcu

SEQ ID NO: 2228461 - RNA, 19 nt, Artificial Sequence
  Description of Artificial Sequence: Synthetic oligonucleotide
  Antisense strand to SEQ ID NO: 2228460
agcacgaaagaauuacaag

SEQ ID NO: 2228462 - RNA, 19 nt, Artificial Sequence
  Description of Artificial Sequence: Synthetic oligonucleotide
  Sense strand starting at position 2574 of SEQ ID NO: 1883949
agucacuauugcuuuggaa

SEQ ID NO: 2228463 - RNA, 19 nt, Artificial Sequence
  Description of Artificial Sequence: Synthetic oligonucleotide
  Antisense strand to SEQ ID NO: 2228462
uuccaaagcaauagugacu

SEQ ID NO: 2228464 - RNA, 19 nt, Artificial Sequence
  Description of Artificial Sequence: Synthetic oligonucleotide
  Sense strand starting at position 2581 of SEQ ID NO: 1883949
auugcuuuggaacgguaga

SEQ ID NO: 2228465 - RNA, 19 nt, Artificial Sequence
  Description of Artificial Sequence: Synthetic oligonucleotide
  Antisense strand to SEQ ID NO: 2228464
ucuaccguuccaaagcaau

SEQ ID NO: 2228466 - RNA, 19 nt, Artificial Sequence
  Description of Artificial Sequence: Synthetic oligonucleotide
  Sense strand starting at position 2606 of SEQ ID NO: 1883949
uuagguaguuuagcaugaa

SEQ ID NO: 2228467 - RNA, 19 nt, Artificial Sequence
  Description of Artificial Sequence: Synthetic oligonucleotide
  Antisense strand to SEQ ID NO: 2228466
uucaugcuaaacuaccuaa

SEQ ID NO: 2228468 - RNA, 19 nt, Artificial Sequence
  Description of Artificial Sequence: Synthetic oligonucleotide
  Sense strand starting at position 2879 of SEQ ID NO: 1883949
ccucaaaucuagguuaggu

SEQ ID NO: 2228469 - RNA, 19 nt, Artificial Sequence
  Description of Artificial Sequence: Synthetic oligonucleotide
  Antisense strand to SEQ ID NO: 2228468
accuaaccuagauuugagg

SEQ ID NO: 2228470 - RNA, 19 nt, Artificial Sequence
  Description of Artificial Sequence: Synthetic oligonucleotide
  Sense strand starting at position 2881 of SEQ ID NO: 1883949
ucaaaucuagguuagguua

SEQ ID NO: 2228471 - RNA, 19 nt, Artificial Sequence
  Description of Artificial Sequence: Synthetic oligonucleotide
  Antisense strand to SEQ ID NO: 2228470
uaaccuaaccuagauuuga

SEQ ID NO: 2228472 - RNA, 19 nt, Artificial Sequence
  Description of Artificial Sequence: Synthetic oligonucleotide
  Sense strand starting at position 3005 of SEQ ID NO: 1883949
cuguuagugccaugaggaa

SEQ ID NO: 2228473 - RNA, 19 nt, Artificial Sequence
  Description of Artificial Sequence: Synthetic oligonucleotide
  Antisense strand to SEQ ID NO: 2228472
uuccucauggcacuaacag

SEQ ID NO: 2228474 - RNA, 19 nt, Artificial Sequence
  Description of Artificial Sequence: Synthetic oligonucleotide
  Sense strand starting at position 3106 of SEQ ID NO: 1883949
gggcauucucuguauuauc

SEQ ID NO: 2228475 - RNA, 19 nt, Artificial Sequence
  Description of Artificial Sequence: Synthetic oligonucleotide
  Antisense strand to SEQ ID NO: 2228474
gauaauacagagaaugccc

SEQ ID NO: 2228476 - RNA, 19 nt, Artificial Sequence
  Description of Artificial Sequence: Synthetic oligonucleotide
  Sense strand starting at position 3298 of SEQ ID NO: 1883949
aguaucucuugagugugaa

SEQ ID NO: 2228477 - RNA, 19 nt, Artificial Sequence
  Description of Artificial Sequence: Synthetic oligonucleotide
  Antisense strand to SEQ ID NO: 2228476
uucacacucaagagauacu

SEQ ID NO: 2228478 - RNA, 19 nt, Artificial Sequence
  Description of Artificial Sequence: Synthetic oligonucleotide
  Sense strand starting at position 3339 of SEQ ID NO: 1883949
uguggaucuuccuuacuua

SEQ ID NO: 2228479 - RNA, 19 nt, Artificial Sequence
  Description of Artificial Sequence: Synthetic oligonucleotide
  Antisense strand to SEQ ID NO: 2228478
uaaguaaggaagauccaca

SEQ ID NO: 2228480 - RNA, 19 nt, Artificial Sequence
  Description of Artificial Sequence: Synthetic oligonucleotide
  Sense strand starting at position 3340 of SEQ ID NO: 1883949
guggaucuuccuuacuuaa

SEQ ID NO: 2228481 - RNA, 19 nt, Artificial Sequence
  Description of Artificial Sequence: Synthetic oligonucleotide
  Antisense strand to SEQ ID NO: 2228480
uuaaguaaggaagauccac

SEQ ID NO: 2228482 - RNA, 19 nt, Artificial Sequence
  Description of Artificial Sequence: Synthetic oligonucleotide
  Sense strand starting at position 3367 of SEQ ID NO: 1883949
auuauagcccagugagaug

SEQ ID NO: 2228483 - RNA, 19 nt, Artificial Sequence
  Description of Artificial Sequence: Synthetic oligonucleotide
  Antisense strand to SEQ ID NO: 2228482
caucucacugggcuauaau

SEQ ID NO: 2228484 - RNA, 19 nt, Artificial Sequence
  Description of Artificial Sequence: Synthetic oligonucleotide
  Sense strand starting at position 3376 of SEQ ID NO: 1883949
cagugagaugagugauuau

SEQ ID NO: 2228485 - RNA, 19 nt, Artificial Sequence
  Description of Artificial Sequence: Synthetic oligonucleotide
  Antisense strand to SEQ ID NO: 2228484
auaaucacucaucucacug

SEQ ID NO: 2228486 - RNA, 19 nt, Artificial Sequence
  Description of Artificial Sequence: Synthetic oligonucleotide
  Sense strand starting at position 3447 of SEQ ID NO: 1883949
ggcaaagaugguuaguuaa

SEQ ID NO: 2228487 - RNA, 19 nt, Artificial Sequence
  Description of Artificial Sequence: Synthetic oligonucleotide
  Antisense strand to SEQ ID NO: 2228486
uuaacuaaccaucuuugcc

SEQ ID NO: 2228488 - RNA, 19 nt, Artificial Sequence
  Description of Artificial Sequence: Synthetic oligonucleotide
  Sense strand starting at position 3449 of SEQ ID NO: 1883949
caaagaugguuaguuaaua

SEQ ID NO: 2228489 - RNA, 19 nt, Artificial Sequence
  Description of Artificial Sequence: Synthetic oligonucleotide
  Antisense strand to SEQ ID NO: 2228488
uauuaacuaaccaucuuug

SEQ ID NO: 2228490 - RNA, 19 nt, Artificial Sequence
  Description of Artificial Sequence: Synthetic oligonucleotide
  Sense strand starting at position 3493 of SEQ ID NO: 1883949
agauauucuugcucccaag

SEQ ID NO: 2228491 - RNA, 19 nt, Artificial Sequence
  Description of Artificial Sequence: Synthetic oligonucleotide
  Antisense strand to SEQ ID NO: 2228490
cuugggagcaagaauaucu

SEQ ID NO: 2228492 - RNA, 19 nt, Artificial Sequence
  Description of Artificial Sequence: Synthetic oligonucleotide
  Sense strand starting at position 3552 of SEQ ID NO: 1883949
ugcccacguacgucuaauu

SEQ ID NO: 2228493 - RNA, 19 nt, Artificial Sequence
  Description of Artificial Sequence: Synthetic oligonucleotide
  Antisense strand to SEQ ID NO: 2228492
aauuagacguacgugggca

SEQ ID NO: 2228494 - RNA, 19 nt, Artificial Sequence
  Description of Artificial Sequence: Synthetic oligonucleotide
  Sense strand starting at position 3563 of SEQ ID NO: 1883949
gucuaauuauccucaaguu

SEQ ID NO: 2228495 - RNA, 19 nt, Artificial Sequence
  Description of Artificial Sequence: Synthetic oligonucleotide
  Antisense strand to SEQ ID NO: 2228494
aacuugaggauaauuagac

SEQ ID NO: 2228496 - RNA, 19 nt, Artificial Sequence
  Description of Artificial Sequence: Synthetic oligonucleotide
  Sense strand starting at position 3711 of SEQ ID NO: 1883949
augucaaaggguuggguaa

SEQ ID NO: 2228497 - RNA, 19 nt, Artificial Sequence
  Description of Artificial Sequence: Synthetic oligonucleotide
  Antisense strand to SEQ ID NO: 2228496
uuacccaacccuuugacau

SEQ ID NO: 2228498 - RNA, 19 nt, Artificial Sequence
  Description of Artificial Sequence: Synthetic oligonucleotide
  Sense strand starting at position 3712 of SEQ ID NO: 1883949
ugucaaaggguuggguaau

SEQ ID NO: 2228499 - RNA, 19 nt, Artificial Sequence
  Description of Artificial Sequence: Synthetic oligonucleotide
  Antisense strand to SEQ ID NO: 2228498
auuacccaacccuuugaca

SEQ ID NO: 2228500 - RNA, 19 nt, Artificial Sequence
  Description of Artificial Sequence: Synthetic oligonucleotide
  Sense strand starting at position 3718 of SEQ ID NO: 1883949
aggguuggguaauuauaua

SEQ ID NO: 2228501 - RNA, 19 nt, Artificial Sequence
  Description of Artificial Sequence: Synthetic oligonucleotide
  Antisense strand to SEQ ID NO: 2228500
uauauaauuacccaacccu

SEQ ID NO: 2228502 - RNA, 19 nt, Artificial Sequence
  Description of Artificial Sequence: Synthetic oligonucleotide
  Sense strand starting at position 3860 of SEQ ID NO: 1883949
cagcauauuccugagaguc

SEQ ID NO: 2228503 - RNA, 19 nt, Artificial Sequence
  Description of Artificial Sequence: Synthetic oligonucleotide
  Antisense strand to SEQ ID NO: 2228502
gacucucaggaauaugcug

SEQ ID NO: 2228504 - RNA, 19 nt, Artificial Sequence
  Description of Artificial Sequence: Synthetic oligonucleotide
  Sense strand starting at position 456 of SEQ ID NO: 1883950
aguucucagacguaggaaa

SEQ ID NO: 2228505 - RNA, 19 nt, Artificial Sequence
  Description of Artificial Sequence: Synthetic oligonucleotide
  Antisense strand to SEQ ID NO: 2228504
uuuccuacgucugagaacu

SEQ ID NO: 2228506 - RNA, 19 nt, Artificial Sequence
  Description of Artificial Sequence: Synthetic oligonucleotide
  Sense strand starting at position 458 of SEQ ID NO: 1883950
uucucagacguaggaaaua

SEQ ID NO: 2228507 - RNA, 19 nt, Artificial Sequence
  Description of Artificial Sequence: Synthetic oligonucleotide
  Antisense strand to SEQ ID NO: 2228506
uauuuccuacgucugagaa

SEQ ID NO: 2228508 - RNA, 19 nt, Artificial Sequence
  Description of Artificial Sequence: Synthetic oligonucleotide
  Sense strand starting at position 470 of SEQ ID NO: 1883950
ggaaauaagucagcaccga

SEQ ID NO: 2228509 - RNA, 19 nt, Artificial Sequence
  Description of Artificial Sequence: Synthetic oligonucleotide
  Antisense strand to SEQ ID NO: 2228508
ucggugcugacuuauuucc

SEQ ID NO: 2228510 - RNA, 19 nt, Artificial Sequence
  Description of Artificial Sequence: Synthetic oligonucleotide
  Sense strand starting at position 471 of SEQ ID NO: 1883950
gaaauaagucagcaccgaa

SEQ ID NO: 2228511 - RNA, 19 nt, Artificial Sequence
  Description of Artificial Sequence: Synthetic oligonucleotide
  Antisense strand to SEQ ID NO: 2228510
uucggugcugacuuauuuc

SEQ ID NO: 2228512 - RNA, 19 nt, Artificial Sequence
  Description of Artificial Sequence: Synthetic oligonucleotide
  Sense strand starting at position 630 of SEQ ID NO: 1883950
cgggaauucucucuuuaag

SEQ ID NO: 2228513 - RNA, 19 nt, Artificial Sequence
  Description of Artificial Sequence: Synthetic oligonucleotide
  Antisense strand to SEQ ID NO: 2228512
cuuaaagagagaauucccg

SEQ ID NO: 2228514 - RNA, 19 nt, Artificial Sequence
  Description of Artificial Sequence: Synthetic oligonucleotide
  Sense strand starting at position 632 of SEQ ID NO: 1883950
ggaauucucucuuuaagac

SEQ ID NO: 2228515 - RNA, 19 nt, Artificial Sequence
  Description of Artificial Sequence: Synthetic oligonucleotide
  Antisense strand to SEQ ID NO: 2228514
gucuuaaagagagaauucc

SEQ ID NO: 2228516 - RNA, 19 nt, Artificial Sequence
  Description of Artificial Sequence: Synthetic oligonucleotide
  Sense strand starting at position 739 of SEQ ID NO: 1883950
ggugauuucugcuuggucu

SEQ ID NO: 2228517 - RNA, 19 nt, Artificial Sequence
  Description of Artificial Sequence: Synthetic oligonucleotide
  Antisense strand to SEQ ID NO: 2228516
agaccaagcagaaaucacc

SEQ ID NO: 2228518 - RNA, 19 nt, Artificial Sequence
  Description of Artificial Sequence: Synthetic oligonucleotide
  Sense strand starting at position 740 of SEQ ID NO: 1883950
gugauuucugcuuggucuc

SEQ ID NO: 2228519 - RNA, 19 nt, Artificial Sequence
  Description of Artificial Sequence: Synthetic oligonucleotide
  Antisense strand to SEQ ID NO: 2228518
gagaccaagcagaaaucac

SEQ ID NO: 2228520 - RNA, 19 nt, Artificial Sequence
  Description of Artificial Sequence: Synthetic oligonucleotide
  Sense strand starting at position 867 of SEQ ID NO: 1883950
cuugcagauggcuaaucaa

SEQ ID NO: 2228521 - RNA, 19 nt, Artificial Sequence
  Description of Artificial Sequence: Synthetic oligonucleotide
  Antisense strand to SEQ ID NO: 2228520
uugauuagccaucugcaag

SEQ ID NO: 2228522 - RNA, 19 nt, Artificial Sequence
  Description of Artificial Sequence: Synthetic oligonucleotide
  Sense strand starting at position 870 of SEQ ID NO: 1883950
gcagauggcuaaucaaaga

SEQ ID NO: 2228523 - RNA, 19 nt, Artificial Sequence
  Description of Artificial Sequence: Synthetic oligonucleotide
  Antisense strand to SEQ ID NO: 2228522
ucuuugauuagccaucugc

SEQ ID NO: 2228524 - RNA, 19 nt, Artificial Sequence
  Description of Artificial Sequence: Synthetic oligonucleotide
  Sense strand starting at position 972 of SEQ ID NO: 1883950
caggcauagcgagagaagu

SEQ ID NO: 2228525 - RNA, 19 nt, Artificial Sequence
  Description of Artificial Sequence: Synthetic oligonucleotide
  Antisense strand to SEQ ID NO: 2228524
acuucucucgcuaugccug

SEQ ID NO: 2228526 - RNA, 19 nt, Artificial Sequence
  Description of Artificial Sequence: Synthetic oligonucleotide
  Sense strand starting at position 1012 of SEQ ID NO: 1883950
ggauucucacgagagccau

SEQ ID NO: 2228527 - RNA, 19 nt, Artificial Sequence
  Description of Artificial Sequence: Synthetic oligonucleotide
  Antisense strand to SEQ ID NO: 2228526
auggcucucgugagaaucc

SEQ ID NO: 2228528 - RNA, 19 nt, Artificial Sequence
  Description of Artificial Sequence: Synthetic oligonucleotide
  Sense strand starting at position 1181 of SEQ ID NO: 1883950
ugcaucugauauccagauu

SEQ ID NO: 2228529 - RNA, 19 nt, Artificial Sequence
  Description of Artificial Sequence: Synthetic oligonucleotide
  Antisense strand to SEQ ID NO: 2228528
aaucuggauaucagaugca

SEQ ID NO: 2228530 - RNA, 19 nt, Artificial Sequence
  Description of Artificial Sequence: Synthetic oligonucleotide
  Sense strand starting at position 1263 of SEQ ID NO: 1883950
agaaauagugugcacuauu

SEQ ID NO: 2228531 - RNA, 19 nt, Artificial Sequence
  Description of Artificial Sequence: Synthetic oligonucleotide
  Antisense strand to SEQ ID NO: 2228530
aauagugcacacuauuucu

SEQ ID NO: 2228532 - RNA, 19 nt, Artificial Sequence
  Description of Artificial Sequence: Synthetic oligonucleotide
  Sense strand starting at position 1270 of SEQ ID NO: 1883950
gugugcacuauuugggauu

SEQ ID NO: 2228533 - RNA, 19 nt, Artificial Sequence
  Description of Artificial Sequence: Synthetic oligonucleotide
  Antisense strand to SEQ ID NO: 2228532
aaucccaaauagugcacac

SEQ ID NO: 2228534 - RNA, 19 nt, Artificial Sequence
  Description of Artificial Sequence: Synthetic oligonucleotide
  Sense strand starting at position 1524 of SEQ ID NO: 1883950
uguuuaaagcccgaagaaa

SEQ ID NO: 2228535 - RNA, 19 nt, Artificial Sequence
  Description of Artificial Sequence: Synthetic oligonucleotide
  Antisense strand to SEQ ID NO: 2228534
uuucuucgggcuuuaaaca

SEQ ID NO: 2228536 - RNA, 19 nt, Artificial Sequence
  Description of Artificial Sequence: Synthetic oligonucleotide
  Sense strand starting at position 1623 of SEQ ID NO: 1883950
ccuauaaguuagguauaac

SEQ ID NO: 2228537 - RNA, 19 nt, Artificial Sequence
  Description of Artificial Sequence: Synthetic oligonucleotide
  Antisense strand to SEQ ID NO: 2228536
guuauaccuaacuuauagg

SEQ ID NO: 2228538 - RNA, 19 nt, Artificial Sequence
  Description of Artificial Sequence: Synthetic oligonucleotide
  Sense strand starting at position 1653 of SEQ ID NO: 1883950
uaugauauauggccuagga

SEQ ID NO: 2228539 - RNA, 19 nt, Artificial Sequence
  Description of Artificial Sequence: Synthetic oligonucleotide
  Antisense strand to SEQ ID NO: 2228538
uccuaggccauauaucaua

SEQ ID NO: 2228540 - RNA, 19 nt, Artificial Sequence
  Description of Artificial Sequence: Synthetic oligonucleotide
  Sense strand starting at position 1694 of SEQ ID NO: 1883950
uuuauaaaugcagaugagu

SEQ ID NO: 2228541 - RNA, 19 nt, Artificial Sequence
  Description of Artificial Sequence: Synthetic oligonucleotide
  Antisense strand to SEQ ID NO: 2228540
acucaucugcauuuauaaa

SEQ ID NO: 2228542 - RNA, 19 nt, Artificial Sequence
  Description of Artificial Sequence: Synthetic oligonucleotide
  Sense strand starting at position 1699 of SEQ ID NO: 1883950
aaaugcagaugagucaaau

SEQ ID NO: 2228543 - RNA, 19 nt, Artificial Sequence
  Description of Artificial Sequence: Synthetic oligonucleotide
  Antisense strand to SEQ ID NO: 2228542
auuugacucaucugcauuu

SEQ ID NO: 2228544 - RNA, 19 nt, Artificial Sequence
  Description of Artificial Sequence: Synthetic oligonucleotide
  Sense strand starting at position 1767 of SEQ ID NO: 1883950
ugcaguuuaucuuccauuu

SEQ ID NO: 2228545 - RNA, 19 nt, Artificial Sequence
  Description of Artificial Sequence: Synthetic oligonucleotide
  Antisense strand to SEQ ID NO: 2228544
aaauggaagauaaacugca

SEQ ID NO: 2228546 - RNA, 19 nt, Artificial Sequence
  Description of Artificial Sequence: Synthetic oligonucleotide
  Sense strand starting at position 1859 of SEQ ID NO: 1883950
aggccuuuauccuuaaaga

SEQ ID NO: 2228547 - RNA, 19 nt, Artificial Sequence
  Description of Artificial Sequence: Synthetic oligonucleotide
  Antisense strand to SEQ ID NO: 2228546
ucuuuaaggauaaaggccu

SEQ ID NO: 2228548 - RNA, 19 nt, Artificial Sequence
  Description of Artificial Sequence: Synthetic oligonucleotide
  Sense strand starting at position 1860 of SEQ ID NO: 1883950
ggccuuuauccuuaaagaa

SEQ ID NO: 2228549 - RNA, 19 nt, Artificial Sequence
  Description of Artificial Sequence: Synthetic oligonucleotide
  Antisense strand to SEQ ID NO: 2228548
uucuuuaaggauaaaggcc

SEQ ID NO: 2228550 - RNA, 19 nt, Artificial Sequence
  Description of Artificial Sequence: Synthetic oligonucleotide
  Sense strand starting at position 1898 of SEQ ID NO: 1883950
accucaugugucuacagaa

SEQ ID NO: 2228551 - RNA, 19 nt, Artificial Sequence
  Description of Artificial Sequence: Synthetic oligonucleotide
  Antisense strand to SEQ ID NO: 2228550
uucuguagacacaugaggu

SEQ ID NO: 2228552 - RNA, 19 nt, Artificial Sequence
  Description of Artificial Sequence: Synthetic oligonucleotide
  Sense strand starting at position 1983 of SEQ ID NO: 1883950
agugcuaauuacuuggaau

SEQ ID NO: 2228553 - RNA, 19 nt, Artificial Sequence
  Description of Artificial Sequence: Synthetic oligonucleotide
  Antisense strand to SEQ ID NO: 2228552
auuccaaguaauuagcacu

SEQ ID NO: 2228554 - RNA, 19 nt, Artificial Sequence
  Description of Artificial Sequence: Synthetic oligonucleotide
  Sense strand starting at position 1985 of SEQ ID NO: 1883950
ugcuaauuacuuggaauac

SEQ ID NO: 2228555 - RNA, 19 nt, Artificial Sequence
  Description of Artificial Sequence: Synthetic oligonucleotide
  Antisense strand to SEQ ID NO: 2228554
guauuccaaguaauuagca

SEQ ID NO: 2228556 - RNA, 19 nt, Artificial Sequence
  Description of Artificial Sequence: Synthetic oligonucleotide
  Sense strand starting at position 2021 of SEQ ID NO: 1883950
cuauuaaugggcuggacau

SEQ ID NO: 2228557 - RNA, 19 nt, Artificial Sequence
  Description of Artificial Sequence: Synthetic oligonucleotide
  Antisense strand to SEQ ID NO: 2228556
auguccagcccauuaauag

SEQ ID NO: 2228558 - RNA, 19 nt, Artificial Sequence
  Description of Artificial Sequence: Synthetic oligonucleotide
  Sense strand starting at position 2022 of SEQ ID NO: 1883950
uauuaaugggcuggacaua

SEQ ID NO: 2228559 - RNA, 19 nt, Artificial Sequence
  Description of Artificial Sequence: Synthetic oligonucleotide
  Antisense strand to SEQ ID NO: 2228558
uauguccagcccauuaaua

SEQ ID NO: 2228560 - RNA, 19 nt, Artificial Sequence
  Description of Artificial Sequence: Synthetic oligonucleotide
  Sense strand starting at position 2087 of SEQ ID NO: 1883950
ucugacucuggugauaacu

SEQ ID NO: 2228561 - RNA, 19 nt, Artificial Sequence
  Description of Artificial Sequence: Synthetic oligonucleotide
  Antisense strand to SEQ ID NO: 2228560
aguuaucaccagagucaga

SEQ ID NO: 2228562 - RNA, 19 nt, Artificial Sequence
  Description of Artificial Sequence: Synthetic oligonucleotide
  Sense strand starting at position 2253 of SEQ ID NO: 1883950
uugacaaauuucuaaagga

SEQ ID NO: 2228563 - RNA, 19 nt, Artificial Sequence
  Description of Artificial Sequence: Synthetic oligonucleotide
  Antisense strand to SEQ ID NO: 2228562
uccuuuagaaauuugucaa

SEQ ID NO: 2228564 - RNA, 19 nt, Artificial Sequence
  Description of Artificial Sequence: Synthetic oligonucleotide
  Sense strand starting at position 2355 of SEQ ID NO: 1883950
ccuguuauuggccaagaaa

SEQ ID NO: 2228565 - RNA, 19 nt, Artificial Sequence
  Description of Artificial Sequence: Synthetic oligonucleotide
  Antisense strand to SEQ ID NO: 2228564
uuucuuggccaauaacagg

SEQ ID NO: 2228566 - RNA, 19 nt, Artificial Sequence
  Description of Artificial Sequence: Synthetic oligonucleotide
  Sense strand starting at position 2358 of SEQ ID NO: 1883950
guuauuggccaagaaacuu

SEQ ID NO: 2228567 - RNA, 19 nt, Artificial Sequence
  Description of Artificial Sequence: Synthetic oligonucleotide
  Antisense strand to SEQ ID NO: 2228566
aaguuucuuggccaauaac

SEQ ID NO: 2228568 - RNA, 19 nt, Artificial Sequence
  Description of Artificial Sequence: Synthetic oligonucleotide
  Sense strand starting at position 2394 of SEQ ID NO: 1883950
aagucccucgcucagaaau

SEQ ID NO: 2228569 - RNA, 19 nt, Artificial Sequence
  Description of Artificial Sequence: Synthetic oligonucleotide
  Antisense strand to SEQ ID NO: 2228568
auuucugagcgagggacuu

SEQ ID NO: 2228570 - RNA, 19 nt, Artificial Sequence
  Description of Artificial Sequence: Synthetic oligonucleotide
  Sense strand starting at position 2583 of SEQ ID NO: 1883950
guagaaugguuaucuuaug

SEQ ID NO: 2228571 - RNA, 19 nt, Artificial Sequence
  Description of Artificial Sequence: Synthetic oligonucleotide
  Antisense strand to SEQ ID NO: 2228570
cauaagauaaccauucuac

SEQ ID NO: 2228572 - RNA, 19 nt, Artificial Sequence
  Description of Artificial Sequence: Synthetic oligonucleotide
  Sense strand starting at position 3121 of SEQ ID NO: 1883950
ugaguaagcucuuugagac

SEQ ID NO: 2228573 - RNA, 19 nt, Artificial Sequence
  Description of Artificial Sequence: Synthetic oligonucleotide
  Antisense strand to SEQ ID NO: 2228572
gucucaaagagcuuacuca

SEQ ID NO: 2228574 - RNA, 19 nt, Artificial Sequence
  Description of Artificial Sequence: Synthetic oligonucleotide
  Sense strand starting at position 3122 of SEQ ID NO: 1883950
gaguaagcucuuugagaca

SEQ ID NO: 2228575 - RNA, 19 nt, Artificial Sequence
  Description of Artificial Sequence: Synthetic oligonucleotide
  Antisense strand to SEQ ID NO: 2228574
ugucucaaagagcuuacuc

SEQ ID NO: 2228576 - RNA, 19 nt, Artificial Sequence
  Description of Artificial Sequence: Synthetic oligonucleotide
  Sense strand starting at position 3287 of SEQ ID NO: 1883950
uucuuaagagauggucuga

SEQ ID NO: 2228577 - RNA, 19 nt, Artificial Sequence
  Description of Artificial Sequence: Synthetic oligonucleotide
  Antisense strand to SEQ ID NO: 2228576
ucagaccaucucuuaagaa

SEQ ID NO: 2228578 - RNA, 19 nt, Artificial Sequence
  Description of Artificial Sequence: Synthetic oligonucleotide
  Sense strand starting at position 3388 of SEQ ID NO: 1883950
ccuugaugagcacauguuu

SEQ ID NO: 2228579 - RNA, 19 nt, Artificial Sequence
  Description of Artificial Sequence: Synthetic oligonucleotide
  Antisense strand to SEQ ID NO: 2228578
aaacaugugcucaucaagg

SEQ ID NO: 2228580 - RNA, 19 nt, Artificial Sequence
  Description of Artificial Sequence: Synthetic oligonucleotide
  Sense strand starting at position 3808 of SEQ ID NO: 1883950
auuaaaugagcugggauua

SEQ ID NO: 2228581 - RNA, 19 nt, Artificial Sequence
  Description of Artificial Sequence: Synthetic oligonucleotide
  Antisense strand to SEQ ID NO: 2228580
uaaucccagcucauuuaau

SEQ ID NO: 2228582 - RNA, 19 nt, Artificial Sequence
  Description of Artificial Sequence: Synthetic oligonucleotide
  Sense strand starting at position 3898 of SEQ ID NO: 1883950
uuaaauguacugggauaca

SEQ ID NO: 2228583 - RNA, 19 nt, Artificial Sequence
  Description of Artificial Sequence: Synthetic oligonucleotide
  Antisense strand to SEQ ID NO: 2228582
uguaucccaguacauuuaa

SEQ ID NO: 2228584 - RNA, 19 nt, Artificial Sequence
  Description of Artificial Sequence: Synthetic oligonucleotide
  Sense strand starting at position 9 of SEQ ID NO: 1883951
cugggaucaccugguguuu

SEQ ID NO: 2228585 - RNA, 19 nt, Artificial Sequence
  Description of Artificial Sequence: Synthetic oligonucleotide
  Antisense strand to SEQ ID NO: 2228584
aaacaccaggugaucccag

SEQ ID NO: 2228586 - RNA, 19 nt, Artificial Sequence
  Description of Artificial Sequence: Synthetic oligonucleotide
  Sense strand starting at position 86 of SEQ ID NO: 1883951
agacccaucucuucgcuua

SEQ ID NO: 2228587 - RNA, 19 nt, Artificial Sequence
  Description of Artificial Sequence: Synthetic oligonucleotide
  Antisense strand to SEQ ID NO: 2228586
uaagcgaagagaugggucu

SEQ ID NO: 2228588 - RNA, 19 nt, Artificial Sequence
  Description of Artificial Sequence: Synthetic oligonucleotide
  Sense strand starting at position 234 of SEQ ID NO: 1883951
gguuuaaugcuugcgucca

SEQ ID NO: 2228589 - RNA, 19 nt, Artificial Sequence
  Description of Artificial Sequence: Synthetic oligonucleotide
  Antisense strand to SEQ ID NO: 2228588
uggacgcaagcauuaaacc

SEQ ID NO: 2228590 - RNA, 19 nt, Artificial Sequence
  Description of Artificial Sequence: Synthetic oligonucleotide
  Sense strand starting at position 236 of SEQ ID NO: 1883951
uuuaaugcuugcguccaau

SEQ ID NO: 2228591 - RNA, 19 nt, Artificial Sequence
  Description of Artificial Sequence: Synthetic oligonucleotide
  Antisense strand to SEQ ID NO: 2228590
auuggacgcaagcauuaaa

SEQ ID NO: 2228592 - RNA, 19 nt, Artificial Sequence
  Description of Artificial Sequence: Synthetic oligonucleotide
  Sense strand starting at position 318 of SEQ ID NO: 1883951
ucauuuguuugccugaaau

SEQ ID NO: 2228593 - RNA, 19 nt, Artificial Sequence
  Description of Artificial Sequence: Synthetic oligonucleotide
  Antisense strand to SEQ ID NO: 2228592
auuucaggcaaacaaauga

SEQ ID NO: 2228594 - RNA, 19 nt, Artificial Sequence
  Description of Artificial Sequence: Synthetic oligonucleotide
  Sense strand starting at position 364 of SEQ ID NO: 1883951
cgcuaaagagcucagagaa

SEQ ID NO: 2228595 - RNA, 19 nt, Artificial Sequence
  Description of Artificial Sequence: Synthetic oligonucleotide
  Antisense strand to SEQ ID NO: 2228594
uucucugagcucuuuagcg

SEQ ID NO: 2228596 - RNA, 19 nt, Artificial Sequence
  Description of Artificial Sequence: Synthetic oligonucleotide
  Sense strand starting at position 484 of SEQ ID NO: 1883951
guggaagauuuacagggau

SEQ ID NO: 2228597 - RNA, 19 nt, Artificial Sequence
  Description of Artificial Sequence: Synthetic oligonucleotide
  Antisense strand to SEQ ID NO: 2228596
aucccuguaaaucuuccac

SEQ ID NO: 2228598 - RNA, 19 nt, Artificial Sequence
  Description of Artificial Sequence: Synthetic oligonucleotide
  Sense strand starting at position 527 of SEQ ID NO: 1883951
uuuaaauguugauagcguu

SEQ ID NO: 2228599 - RNA, 19 nt, Artificial Sequence
  Description of Artificial Sequence: Synthetic oligonucleotide
  Antisense strand to SEQ ID NO: 2228598
aacgcuaucaacauuuaaa

SEQ ID NO: 2228600 - RNA, 19 nt, Artificial Sequence
  Description of Artificial Sequence: Synthetic oligonucleotide
  Sense strand starting at position 580 of SEQ ID NO: 1883951
aaagcagguuugccuuuaa

SEQ ID NO: 2228601 - RNA, 19 nt, Artificial Sequence
  Description of Artificial Sequence: Synthetic oligonucleotide
  Antisense strand to SEQ ID NO: 2228600
uuaaaggcaaaccugcuuu

SEQ ID NO: 2228602 - RNA, 19 nt, Artificial Sequence
  Description of Artificial Sequence: Synthetic oligonucleotide
  Sense strand starting at position 607 of SEQ ID NO: 1883951
uuuauugaauugggagaaa

SEQ ID NO: 2228603 - RNA, 19 nt, Artificial Sequence
  Description of Artificial Sequence: Synthetic oligonucleotide
  Antisense strand to SEQ ID NO: 2228602
uuucucccaauucaauaaa

SEQ ID NO: 2228604 - RNA, 19 nt, Artificial Sequence
  Description of Artificial Sequence: Synthetic oligonucleotide
  Sense strand starting at position 825 of SEQ ID NO: 1883951
gcgcuuucgacaucuccca

SEQ ID NO: 2228605 - RNA, 19 nt, Artificial Sequence
  Description of Artificial Sequence: Synthetic oligonucleotide
  Antisense strand to SEQ ID NO: 2228604
ugggagaugucgaaagcgc

SEQ ID NO: 2228606 - RNA, 19 nt, Artificial Sequence
  Description of Artificial Sequence: Synthetic oligonucleotide
  Sense strand starting at position 1484 of SEQ ID NO: 1883951
gcgucuugcgcggcgauua

SEQ ID NO: 2228607 - RNA, 19 nt, Artificial Sequence
  Description of Artificial Sequence: Synthetic oligonucleotide
  Antisense strand to SEQ ID NO: 2228606
uaaucgccgcgcaagacgc

SEQ ID NO: 2228608 - RNA, 19 nt, Artificial Sequence
  Description of Artificial Sequence: Synthetic oligonucleotide
  Sense strand starting at position 1492 of SEQ ID NO: 1883951
cgcggcgauuaccuugaau

SEQ ID NO: 2228609 - RNA, 19 nt, Artificial Sequence
  Description of Artificial Sequence: Synthetic oligonucleotide
  Antisense strand to SEQ ID NO: 2228608
auucaagguaaucgccgcg

SEQ ID NO: 2228610 - RNA, 19 nt, Artificial Sequence
  Description of Artificial Sequence: Synthetic oligonucleotide
  Sense strand starting at position 1611 of SEQ ID NO: 1883951
aagagugguccuugggucu

SEQ ID NO: 2228611 - RNA, 19 nt, Artificial Sequence
  Description of Artificial Sequence: Synthetic oligonucleotide
  Antisense strand to SEQ ID NO: 2228610
agacccaaggaccacucuu

SEQ ID NO: 2228612 - RNA, 19 nt, Artificial Sequence
  Description of Artificial Sequence: Synthetic oligonucleotide
  Sense strand starting at position 1761 of SEQ ID NO: 1883951
ccaaacuuugcucgcgagu

SEQ ID NO: 2228613 - RNA, 19 nt, Artificial Sequence
  Description of Artificial Sequence: Synthetic oligonucleotide
  Antisense strand to SEQ ID NO: 2228612
acucgcgagcaaaguuugg

SEQ ID NO: 2228614 - RNA, 19 nt, Artificial Sequence
  Description of Artificial Sequence: Synthetic oligonucleotide
  Sense strand starting at position 1762 of SEQ ID NO: 1883951
caaacuuugcucgcgaguu

SEQ ID NO: 2228615 - RNA, 19 nt, Artificial Sequence
  Description of Artificial Sequence: Synthetic oligonucleotide
  Antisense strand to SEQ ID NO: 2228614
aacucgcgagcaaaguuug

SEQ ID NO: 2228616 - RNA, 19 nt, Artificial Sequence
  Description of Artificial Sequence: Synthetic oligonucleotide
  Sense strand starting at position 2452 of SEQ ID NO: 1883951
cuuggaaauguucgcagga

SEQ ID NO: 2228617 - RNA, 19 nt, Artificial Sequence
  Description of Artificial Sequence: Synthetic oligonucleotide
  Antisense strand to SEQ ID NO: 2228616
uccugcgaacauuuccaag

SEQ ID NO: 2228618 - RNA, 19 nt, Artificial Sequence
  Description of Artificial Sequence: Synthetic oligonucleotide
  Sense strand starting at position 2454 of SEQ ID NO: 1883951
uggaaauguucgcaggaca

SEQ ID NO: 2228619 - RNA, 19 nt, Artificial Sequence
  Description of Artificial Sequence: Synthetic oligonucleotide
  Antisense strand to SEQ ID NO: 2228618
uguccugcgaacauuucca

SEQ ID NO: 2228620 - RNA, 19 nt, Artificial Sequence
  Description of Artificial Sequence: Synthetic oligonucleotide
  Sense strand starting at position 2475 of SEQ ID NO: 1883951
gcauguuucuguccuucua

SEQ ID NO: 2228621 - RNA, 19 nt, Artificial Sequence
  Description of Artificial Sequence: Synthetic oligonucleotide
  Antisense strand to SEQ ID NO: 2228620
uagaaggacagaaacaugc

SEQ ID NO: 2228622 - RNA, 19 nt, Artificial Sequence
  Description of Artificial Sequence: Synthetic oligonucleotide
  Sense strand starting at position 2556 of SEQ ID NO: 1883951
cuacauaggugauucuauu

SEQ ID NO: 2228623 - RNA, 19 nt, Artificial Sequence
  Description of Artificial Sequence: Synthetic oligonucleotide
  Antisense strand to SEQ ID NO: 2228622
aauagaaucaccuauguag

SEQ ID NO: 2228624 - RNA, 19 nt, Artificial Sequence
  Description of Artificial Sequence: Synthetic oligonucleotide
  Sense strand starting at position 2596 of SEQ ID NO: 1883951
agaguacuauucccaguuu

SEQ ID NO: 2228625 - RNA, 19 nt, Artificial Sequence
  Description of Artificial Sequence: Synthetic oligonucleotide
  Antisense strand to SEQ ID NO: 2228624
aaacugggaauaguacucu

SEQ ID NO: 2228626 - RNA, 19 nt, Artificial Sequence
  Description of Artificial Sequence: Synthetic oligonucleotide
  Sense strand starting at position 2607 of SEQ ID NO: 1883951
cccaguuucugauaaggaa

SEQ ID NO: 2228627 - RNA, 19 nt, Artificial Sequence
  Description of Artificial Sequence: Synthetic oligonucleotide
  Antisense strand to SEQ ID NO: 2228626
uuccuuaucagaaacuggg

SEQ ID NO: 2228628 - RNA, 19 nt, Artificial Sequence
  Description of Artificial Sequence: Synthetic oligonucleotide
  Sense strand starting at position 2610 of SEQ ID NO: 1883951
aguuucugauaaggaaaca

SEQ ID NO: 2228629 - RNA, 19 nt, Artificial Sequence
  Description of Artificial Sequence: Synthetic oligonucleotide
  Antisense strand to SEQ ID NO: 2228628
uguuuccuuaucagaaacu

SEQ ID NO: 2228630 - RNA, 19 nt, Artificial Sequence
  Description of Artificial Sequence: Synthetic oligonucleotide
  Sense strand starting at position 2693 of SEQ ID NO: 1883951
gaauguggcucucucagaa

SEQ ID NO: 2228631 - RNA, 19 nt, Artificial Sequence
  Description of Artificial Sequence: Synthetic oligonucleotide
  Antisense strand to SEQ ID NO: 2228630
uucugagagagccacauuc

SEQ ID NO: 2228632 - RNA, 19 nt, Artificial Sequence
  Description of Artificial Sequence: Synthetic oligonucleotide
  Sense strand starting at position 2894 of SEQ ID NO: 1883951
agcuguaacugguuaaagu

SEQ ID NO: 2228633 - RNA, 19 nt, Artificial Sequence
  Description of Artificial Sequence: Synthetic oligonucleotide
  Antisense strand to SEQ ID NO: 2228632
acuuuaaccaguuacagcu

SEQ ID NO: 2228634 - RNA, 19 nt, Artificial Sequence
  Description of Artificial Sequence: Synthetic oligonucleotide
  Sense strand starting at position 2895 of SEQ ID NO: 1883951
gcuguaacugguuaaaguu

SEQ ID NO: 2228635 - RNA, 19 nt, Artificial Sequence
  Description of Artificial Sequence: Synthetic oligonucleotide
  Antisense strand to SEQ ID NO: 2228634
aacuuuaaccaguuacagc

SEQ ID NO: 2228636 - RNA, 19 nt, Artificial Sequence
  Description of Artificial Sequence: Synthetic oligonucleotide
  Sense strand starting at position 2937 of SEQ ID NO: 1883951
uaagccgugucuucggaau

SEQ ID NO: 2228637 - RNA, 19 nt, Artificial Sequence
  Description of Artificial Sequence: Synthetic oligonucleotide
  Antisense strand to SEQ ID NO: 2228636
auuccgaagacacggcuua

SEQ ID NO: 2228638 - RNA, 19 nt, Artificial Sequence
  Description of Artificial Sequence: Synthetic oligonucleotide
  Sense strand starting at position 3180 of SEQ ID NO: 1883951
gcaccugugucacuaacau

SEQ ID NO: 2228639 - RNA, 19 nt, Artificial Sequence
  Description of Artificial Sequence: Synthetic oligonucleotide
  Antisense strand to SEQ ID NO: 2228638
auguuagugacacaggugc

SEQ ID NO: 2228640 - RNA, 19 nt, Artificial Sequence
  Description of Artificial Sequence: Synthetic oligonucleotide
  Sense strand starting at position 3366 of SEQ ID NO: 1883951
uuggaaauuugauagcaac

SEQ ID NO: 2228641 - RNA, 19 nt, Artificial Sequence
  Description of Artificial Sequence: Synthetic oligonucleotide
  Antisense strand to SEQ ID NO: 2228640
guugcuaucaaauuuccaa

SEQ ID NO: 2228642 - RNA, 19 nt, Artificial Sequence
  Description of Artificial Sequence: Synthetic oligonucleotide
  Sense strand starting at position 3418 of SEQ ID NO: 1883951
cucuauaugcuugguggga

SEQ ID NO: 2228643 - RNA, 19 nt, Artificial Sequence
  Description of Artificial Sequence: Synthetic oligonucleotide
  Antisense strand to SEQ ID NO: 2228642
ucccaccaagcauauagag

SEQ ID NO: 2228644 - RNA, 19 nt, Artificial Sequence
  Description of Artificial Sequence: Synthetic oligonucleotide
  Sense strand starting at position 3449 of SEQ ID NO: 1883951
ggucaaguccucuaaccug

SEQ ID NO: 2228645 - RNA, 19 nt, Artificial Sequence
  Description of Artificial Sequence: Synthetic oligonucleotide
  Antisense strand to SEQ ID NO: 2228644
cagguuagaggacuugacc

SEQ ID NO: 2228646 - RNA, 19 nt, Artificial Sequence
  Description of Artificial Sequence: Synthetic oligonucleotide
  Sense strand starting at position 3479 of SEQ ID NO: 1883951
gagccuauacauuaacgga

SEQ ID NO: 2228647 - RNA, 19 nt, Artificial Sequence
  Description of Artificial Sequence: Synthetic oligonucleotide
  Antisense strand to SEQ ID NO: 2228646
uccguuaauguauaggcuc

SEQ ID NO: 2228648 - RNA, 19 nt, Artificial Sequence
  Description of Artificial Sequence: Synthetic oligonucleotide
  Sense strand starting at position 3537 of SEQ ID NO: 1883951
acggguuguucugauagca

SEQ ID NO: 2228649 - RNA, 19 nt, Artificial Sequence
  Description of Artificial Sequence: Synthetic oligonucleotide
  Antisense strand to SEQ ID NO: 2228648
ugcuaucagaacaacccgu

SEQ ID NO: 2228650 - RNA, 19 nt, Artificial Sequence
  Description of Artificial Sequence: Synthetic oligonucleotide
  Sense strand starting at position 3545 of SEQ ID NO: 1883951
uucugauagcaguauguuu

SEQ ID NO: 2228651 - RNA, 19 nt, Artificial Sequence
  Description of Artificial Sequence: Synthetic oligonucleotide
  Antisense strand to SEQ ID NO: 2228650
aaacauacugcuaucagaa

SEQ ID NO: 2228652 - RNA, 19 nt, Artificial Sequence
  Description of Artificial Sequence: Synthetic oligonucleotide
  Sense strand starting at position 3646 of SEQ ID NO: 1883951
gggaaacucgagugucuca

SEQ ID NO: 2228653 - RNA, 19 nt, Artificial Sequence
  Description of Artificial Sequence: Synthetic oligonucleotide
  Antisense strand to SEQ ID NO: 2228652
ugagacacucgaguuuccc

SEQ ID NO: 2228654 - RNA, 19 nt, Artificial Sequence
  Description of Artificial Sequence: Synthetic oligonucleotide
  Sense strand starting at position 3651 of SEQ ID NO: 1883951
acucgagugucucaggaca

SEQ ID NO: 2228655 - RNA, 19 nt, Artificial Sequence
  Description of Artificial Sequence: Synthetic oligonucleotide
  Antisense strand to SEQ ID NO: 2228654
uguccugagacacucgagu

SEQ ID NO: 2228656 - RNA, 19 nt, Artificial Sequence
  Description of Artificial Sequence: Synthetic oligonucleotide
  Sense strand starting at position 3780 of SEQ ID NO: 1883951
uagcuuuaugcauguugaa

SEQ ID NO: 2228657 - RNA, 19 nt, Artificial Sequence
  Description of Artificial Sequence: Synthetic oligonucleotide
  Antisense strand to SEQ ID NO: 2228656
uucaacaugcauaaagcua

SEQ ID NO: 2228658 - RNA, 19 nt, Artificial Sequence
  Description of Artificial Sequence: Synthetic oligonucleotide
  Sense strand starting at position 3787 of SEQ ID NO: 1883951
augcauguugaauggaaag

SEQ ID NO: 2228659 - RNA, 19 nt, Artificial Sequence
  Description of Artificial Sequence: Synthetic oligonucleotide
  Antisense strand to SEQ ID NO: 2228658
cuuuccauucaacaugcau

SEQ ID NO: 2228660 - RNA, 19 nt, Artificial Sequence
  Description of Artificial Sequence: Synthetic oligonucleotide
  Sense strand starting at position 3803 of SEQ ID NO: 1883951
aaggaagcuuuccgcugaa

SEQ ID NO: 2228661 - RNA, 19 nt, Artificial Sequence
  Description of Artificial Sequence: Synthetic oligonucleotide
  Antisense strand to SEQ ID NO: 2228660
uucagcggaaagcuuccuu

SEQ ID NO: 2228662 - RNA, 19 nt, Artificial Sequence
  Description of Artificial Sequence: Synthetic oligonucleotide
  Sense strand starting at position 3859 of SEQ ID NO: 1883951
caguuugcagaauguauuu

SEQ ID NO: 2228663 - RNA, 19 nt, Artificial Sequence
  Description of Artificial Sequence: Synthetic oligonucleotide
  Antisense strand to SEQ ID NO: 2228662
aaauacauucugcaaacug

SEQ ID NO: 2228664 - RNA, 19 nt, Artificial Sequence
  Description of Artificial Sequence: Synthetic oligonucleotide
  Sense strand starting at position 583 of SEQ ID NO: 1883952
acaaguuuaugguugcaca

SEQ ID NO: 2228665 - RNA, 19 nt, Artificial Sequence
  Description of Artificial Sequence: Synthetic oligonucleotide
  Antisense strand to SEQ ID NO: 2228664
ugugcaaccauaaacuugu

SEQ ID NO: 2228666 - RNA, 19 nt, Artificial Sequence
  Description of Artificial Sequence: Synthetic oligonucleotide
  Sense strand starting at position 629 of SEQ ID NO: 1883952
ugacuauccuccuccuagu

SEQ ID NO: 2228667 - RNA, 19 nt, Artificial Sequence
  Description of Artificial Sequence: Synthetic oligonucleotide
  Antisense strand to SEQ ID NO: 2228666
acuaggaggaggauaguca

SEQ ID NO: 2228668 - RNA, 19 nt, Artificial Sequence
  Description of Artificial Sequence: Synthetic oligonucleotide
  Sense strand starting at position 710 of SEQ ID NO: 1883952
agaauuauuggcugcaaua

SEQ ID NO: 2228669 - RNA, 19 nt, Artificial Sequence
  Description of Artificial Sequence: Synthetic oligonucleotide
  Antisense strand to SEQ ID NO: 2228668
uauugcagccaauaauucu

SEQ ID NO: 2228670 - RNA, 19 nt, Artificial Sequence
  Description of Artificial Sequence: Synthetic oligonucleotide
  Sense strand starting at position 766 of SEQ ID NO: 1883952
ugaaguaaaugucuacaaa

SEQ ID NO: 2228671 - RNA, 19 nt, Artificial Sequence
  Description of Artificial Sequence: Synthetic oligonucleotide
  Antisense strand to SEQ ID NO: 2228670
uuuguagacauuuacuuca

SEQ ID NO: 2228672 - RNA, 19 nt, Artificial Sequence
  Description of Artificial Sequence: Synthetic oligonucleotide
  Sense strand starting at position 1145 of SEQ ID NO: 1883952
uuuguuacauuugaaagca

SEQ ID NO: 2228673 - RNA, 19 nt, Artificial Sequence
  Description of Artificial Sequence: Synthetic oligonucleotide
  Antisense strand to SEQ ID NO: 2228672
ugcuuucaaauguaacaaa

SEQ ID NO: 2228674 - RNA, 19 nt, Artificial Sequence
  Description of Artificial Sequence: Synthetic oligonucleotide
  Sense strand starting at position 1158 of SEQ ID NO: 1883952
aaagcaauuugugaguuga

SEQ ID NO: 2228675 - RNA, 19 nt, Artificial Sequence
  Description of Artificial Sequence: Synthetic oligonucleotide
  Antisense strand to SEQ ID NO: 2228674
ucaacucacaaauugcuuu

SEQ ID NO: 2228676 - RNA, 19 nt, Artificial Sequence
  Description of Artificial Sequence: Synthetic oligonucleotide
  Sense strand starting at position 1166 of SEQ ID NO: 1883952
uugugaguugaaugcuuac

SEQ ID NO: 2228677 - RNA, 19 nt, Artificial Sequence
  Description of Artificial Sequence: Synthetic oligonucleotide
  Antisense strand to SEQ ID NO: 2228676
guaagcauucaacucacaa

SEQ ID NO: 2228678 - RNA, 19 nt, Artificial Sequence
  Description of Artificial Sequence: Synthetic oligonucleotide
  Sense strand starting at position 1169 of SEQ ID NO: 1883952
ugaguugaaugcuuacuca

SEQ ID NO: 2228679 - RNA, 19 nt, Artificial Sequence
  Description of Artificial Sequence: Synthetic oligonucleotide
  Antisense strand to SEQ ID NO: 2228678
ugaguaagcauucaacuca

SEQ ID NO: 2228680 - RNA, 19 nt, Artificial Sequence
  Description of Artificial Sequence: Synthetic oligonucleotide
  Sense strand starting at position 1172 of SEQ ID NO: 1883952
guugaaugcuuacucauca

SEQ ID NO: 2228681 - RNA, 19 nt, Artificial Sequence
  Description of Artificial Sequence: Synthetic oligonucleotide
  Antisense strand to SEQ ID NO: 2228680
ugaugaguaagcauucaac

SEQ ID NO: 2228682 - RNA, 19 nt, Artificial Sequence
  Description of Artificial Sequence: Synthetic oligonucleotide
  Sense strand starting at position 1180 of SEQ ID NO: 1883952
cuuacucaucaggagcauu

SEQ ID NO: 2228683 - RNA, 19 nt, Artificial Sequence
  Description of Artificial Sequence: Synthetic oligonucleotide
  Antisense strand to SEQ ID NO: 2228682
aaugcuccugaugaguaag

SEQ ID NO: 2228684 - RNA, 19 nt, Artificial Sequence
  Description of Artificial Sequence: Synthetic oligonucleotide
  Sense strand starting at position 1210 of SEQ ID NO: 1883952
acaggacagugaguuguaa

SEQ ID NO: 2228685 - RNA, 19 nt, Artificial Sequence
  Description of Artificial Sequence: Synthetic oligonucleotide
  Antisense strand to SEQ ID NO: 2228684
uuacaacucacuguccugu

SEQ ID NO: 2228686 - RNA, 19 nt, Artificial Sequence
  Description of Artificial Sequence: Synthetic oligonucleotide
  Sense strand starting at position 1212 of SEQ ID NO: 1883952
aggacagugaguuguaaga

SEQ ID NO: 2228687 - RNA, 19 nt, Artificial Sequence
  Description of Artificial Sequence: Synthetic oligonucleotide
  Antisense strand to SEQ ID NO: 2228686
ucuuacaacucacuguccu

SEQ ID NO: 2228688 - RNA, 19 nt, Artificial Sequence
  Description of Artificial Sequence: Synthetic oligonucleotide
  Sense strand starting at position 1221 of SEQ ID NO: 1883952
aguuguaagagccaaacgu

SEQ ID NO: 2228689 - RNA, 19 nt, Artificial Sequence
  Description of Artificial Sequence: Synthetic oligonucleotide
  Antisense strand to SEQ ID NO: 2228688
acguuuggcucuuacaacu

SEQ ID NO: 2228690 - RNA, 19 nt, Artificial Sequence
  Description of Artificial Sequence: Synthetic oligonucleotide
  Sense strand starting at position 1225 of SEQ ID NO: 1883952
guaagagccaaacgugaau

SEQ ID NO: 2228691 - RNA, 19 nt, Artificial Sequence
  Description of Artificial Sequence: Synthetic oligonucleotide
  Antisense strand to SEQ ID NO: 2228690
auucacguuuggcucuuac

SEQ ID NO: 2228692 - RNA, 19 nt, Artificial Sequence
  Description of Artificial Sequence: Synthetic oligonucleotide
  Sense strand starting at position 1299 of SEQ ID NO: 1883952
uguaucuuacggcacaaca

SEQ ID NO: 2228693 - RNA, 19 nt, Artificial Sequence
  Description of Artificial Sequence: Synthetic oligonucleotide
  Antisense strand to SEQ ID NO: 2228692
uguugugccguaagauaca

SEQ ID NO: 2228694 - RNA, 19 nt, Artificial Sequence
  Description of Artificial Sequence: Synthetic oligonucleotide
  Sense strand starting at position 1336 of SEQ ID NO: 1883952
acauguauuguauaacgga

SEQ ID NO: 2228695 - RNA, 19 nt, Artificial Sequence
  Description of Artificial Sequence: Synthetic oligonucleotide
  Antisense strand to SEQ ID NO: 2228694
uccguuauacaauacaugu

SEQ ID NO: 2228696 - RNA, 19 nt, Artificial Sequence
  Description of Artificial Sequence: Synthetic oligonucleotide
  Sense strand starting at position 1383 of SEQ ID NO: 1883952
cacugaggagugugaaaga

SEQ ID NO: 2228697 - RNA, 19 nt, Artificial Sequence
  Description of Artificial Sequence: Synthetic oligonucleotide
  Antisense strand to SEQ ID NO: 2228696
ucuuucacacuccucagug

SEQ ID NO: 2228698 - RNA, 19 nt, Artificial Sequence
  Description of Artificial Sequence: Synthetic oligonucleotide
  Sense strand starting at position 1472 of SEQ ID NO: 1883952
caucguuuccugggaaccu

SEQ ID NO: 2228699 - RNA, 19 nt, Artificial Sequence
  Description of Artificial Sequence: Synthetic oligonucleotide
  Antisense strand to SEQ ID NO: 2228698
agguucccaggaaacgaug

SEQ ID NO: 2228700 - RNA, 19 nt, Artificial Sequence
  Description of Artificial Sequence: Synthetic oligonucleotide
  Sense strand starting at position 1530 of SEQ ID NO: 1883952
aauggaaaccuaggcguua

SEQ ID NO: 2228701 - RNA, 19 nt, Artificial Sequence
  Description of Artificial Sequence: Synthetic oligonucleotide
  Antisense strand to SEQ ID NO: 2228700
uaacgccuagguuuccauu

SEQ ID NO: 2228702 - RNA, 19 nt, Artificial Sequence
  Description of Artificial Sequence: Synthetic oligonucleotide
  Sense strand starting at position 1948 of SEQ ID NO: 1883952
ccagaacuguuugccaaca

SEQ ID NO: 2228703 - RNA, 19 nt, Artificial Sequence
  Description of Artificial Sequence: Synthetic oligonucleotide
  Antisense strand to SEQ ID NO: 2228702
uguuggcaaacaguucugg

SEQ ID NO: 2228704 - RNA, 19 nt, Artificial Sequence
  Description of Artificial Sequence: Synthetic oligonucleotide
  Sense strand starting at position 2408 of SEQ ID NO: 1883952
gaaucuucugcacagguga

SEQ ID NO: 2228705 - RNA, 19 nt, Artificial Sequence
  Description of Artificial Sequence: Synthetic oligonucleotide
  Antisense strand to SEQ ID NO: 2228704
ucaccugugcagaagauuc

SEQ ID NO: 2228706 - RNA, 19 nt, Artificial Sequence
  Description of Artificial Sequence: Synthetic oligonucleotide
  Sense strand starting at position 2521 of SEQ ID NO: 1883952
ucuccauguuucccugaca

SEQ ID NO: 2228707 - RNA, 19 nt, Artificial Sequence
  Description of Artificial Sequence: Synthetic oligonucleotide
  Antisense strand to SEQ ID NO: 2228706
ugucagggaaacauggaga

SEQ ID NO: 2228708 - RNA, 19 nt, Artificial Sequence
  Description of Artificial Sequence: Synthetic oligonucleotide
  Sense strand starting at position 2605 of SEQ ID NO: 1883952
guagccgacaggugaauua

SEQ ID NO: 2228709 - RNA, 19 nt, Artificial Sequence
  Description of Artificial Sequence: Synthetic oligonucleotide
  Antisense strand to SEQ ID NO: 2228708
uaauucaccugucggcuac

SEQ ID NO: 2228710 - RNA, 19 nt, Artificial Sequence
  Description of Artificial Sequence: Synthetic oligonucleotide
  Sense strand starting at position 2616 of SEQ ID NO: 1883952
gugaauuagauacgaucuu

SEQ ID NO: 2228711 - RNA, 19 nt, Artificial Sequence
  Description of Artificial Sequence: Synthetic oligonucleotide
  Antisense strand to SEQ ID NO: 2228710
aagaucguaucuaauucac

SEQ ID NO: 2228712 - RNA, 19 nt, Artificial Sequence
  Description of Artificial Sequence: Synthetic oligonucleotide
  Sense strand starting at position 2655 of SEQ ID NO: 1883952
guaaauaugucguuccaaa

SEQ ID NO: 2228713 - RNA, 19 nt, Artificial Sequence
  Description of Artificial Sequence: Synthetic oligonucleotide
  Antisense strand to SEQ ID NO: 2228712
uuuggaacgacauauuuac

SEQ ID NO: 2228714 - RNA, 19 nt, Artificial Sequence
  Description of Artificial Sequence: Synthetic oligonucleotide
  Sense strand starting at position 2719 of SEQ ID NO: 1883952
uagugacucgccgagaaug

SEQ ID NO: 2228715 - RNA, 19 nt, Artificial Sequence
  Description of Artificial Sequence: Synthetic oligonucleotide
  Antisense strand to SEQ ID NO: 2228714
cauucucggcgagucacua

SEQ ID NO: 2228716 - RNA, 19 nt, Artificial Sequence
  Description of Artificial Sequence: Synthetic oligonucleotide
  Sense strand starting at position 2730 of SEQ ID NO: 1883952
cgagaaugagaccgaacua

SEQ ID NO: 2228717 - RNA, 19 nt, Artificial Sequence
  Description of Artificial Sequence: Synthetic oligonucleotide
  Antisense strand to SEQ ID NO: 2228716
uaguucggucucauucucg

SEQ ID NO: 2228718 - RNA, 19 nt, Artificial Sequence
  Description of Artificial Sequence: Synthetic oligonucleotide
  Sense strand starting at position 2765 of SEQ ID NO: 1883952
aaauguuugccaugcagaa

SEQ ID NO: 2228719 - RNA, 19 nt, Artificial Sequence
  Description of Artificial Sequence: Synthetic oligonucleotide
  Antisense strand to SEQ ID NO: 2228718
uucugcauggcaaacauuu

SEQ ID NO: 2228720 - RNA, 19 nt, Artificial Sequence
  Description of Artificial Sequence: Synthetic oligonucleotide
  Sense strand starting at position 2767 of SEQ ID NO: 1883952
auguuugccaugcagaaga

SEQ ID NO: 2228721 - RNA, 19 nt, Artificial Sequence
  Description of Artificial Sequence: Synthetic oligonucleotide
  Antisense strand to SEQ ID NO: 2228720
ucuucugcauggcaaacau

SEQ ID NO: 2228722 - RNA, 19 nt, Artificial Sequence
  Description of Artificial Sequence: Synthetic oligonucleotide
  Sense strand starting at position 2784 of SEQ ID NO: 1883952
gagguacugcgugaaaggu

SEQ ID NO: 2228723 - RNA, 19 nt, Artificial Sequence
  Description of Artificial Sequence: Synthetic oligonucleotide
  Antisense strand to SEQ ID NO: 2228722
accuuucacgcaguaccuc

SEQ ID NO: 2228724 - RNA, 19 nt, Artificial Sequence
  Description of Artificial Sequence: Synthetic oligonucleotide
  Sense strand starting at position 2899 of SEQ ID NO: 1883952
ucaagaguauuugaaccau

SEQ ID NO: 2228725 - RNA, 19 nt, Artificial Sequence
  Description of Artificial Sequence: Synthetic oligonucleotide
  Antisense strand to SEQ ID NO: 2228724
augguucaaauacucuuga

SEQ ID NO: 2228726 - RNA, 19 nt, Artificial Sequence
  Description of Artificial Sequence: Synthetic oligonucleotide
  Sense strand starting at position 2934 of SEQ ID NO: 1883952
cgaugcaucgauuacuaaa

SEQ ID NO: 2228727 - RNA, 19 nt, Artificial Sequence
  Description of Artificial Sequence: Synthetic oligonucleotide
  Antisense strand to SEQ ID NO: 2228726
uuuaguaaucgaugcaucg

SEQ ID NO: 2228728 - RNA, 19 nt, Artificial Sequence
  Description of Artificial Sequence: Synthetic oligonucleotide
  Sense strand starting at position 2936 of SEQ ID NO: 1883952
augcaucgauuacuaaaua

SEQ ID NO: 2228729 - RNA, 19 nt, Artificial Sequence
  Description of Artificial Sequence: Synthetic oligonucleotide
  Antisense strand to SEQ ID NO: 2228728
uauuuaguaaucgaugcau

SEQ ID NO: 2228730 - RNA, 19 nt, Artificial Sequence
  Description of Artificial Sequence: Synthetic oligonucleotide
  Sense strand starting at position 3393 of SEQ ID NO: 1883952
acaugauaccauugagucu

SEQ ID NO: 2228731 - RNA, 19 nt, Artificial Sequence
  Description of Artificial Sequence: Synthetic oligonucleotide
  Antisense strand to SEQ ID NO: 2228730
agacucaaugguaucaugu

SEQ ID NO: 2228732 - RNA, 19 nt, Artificial Sequence
  Description of Artificial Sequence: Synthetic oligonucleotide
  Sense strand starting at position 3402 of SEQ ID NO: 1883952
cauugagucuccuugguuu

SEQ ID NO: 2228733 - RNA, 19 nt, Artificial Sequence
  Description of Artificial Sequence: Synthetic oligonucleotide
  Antisense strand to SEQ ID NO: 2228732
aaaccaaggagacucaaug

SEQ ID NO: 2228734 - RNA, 19 nt, Artificial Sequence
  Description of Artificial Sequence: Synthetic oligonucleotide
  Sense strand starting at position 3453 of SEQ ID NO: 1883952
aagagauguggguggucca

SEQ ID NO: 2228735 - RNA, 19 nt, Artificial Sequence
  Description of Artificial Sequence: Synthetic oligonucleotide
  Antisense strand to SEQ ID NO: 2228734
uggaccacccacaucucuu

SEQ ID NO: 2228736 - RNA, 19 nt, Artificial Sequence
  Description of Artificial Sequence: Synthetic oligonucleotide
  Sense strand starting at position 3454 of SEQ ID NO: 1883952
agagaugugggugguccau

SEQ ID NO: 2228737 - RNA, 19 nt, Artificial Sequence
  Description of Artificial Sequence: Synthetic oligonucleotide
  Antisense strand to SEQ ID NO: 2228736
auggaccacccacaucucu

SEQ ID NO: 2228738 - RNA, 19 nt, Artificial Sequence
  Description of Artificial Sequence: Synthetic oligonucleotide
  Sense strand starting at position 3519 of SEQ ID NO: 1883952
uucuuugaaguugguguaa

SEQ ID NO: 2228739 - RNA, 19 nt, Artificial Sequence
  Description of Artificial Sequence: Synthetic oligonucleotide
  Antisense strand to SEQ ID NO: 2228738
uuacaccaacuucaaagaa

SEQ ID NO: 2228740 - RNA, 19 nt, Artificial Sequence
  Description of Artificial Sequence: Synthetic oligonucleotide
  Sense strand starting at position 3585 of SEQ ID NO: 1883952
guuaguaacauguggcaua

SEQ ID NO: 2228741 - RNA, 19 nt, Artificial Sequence
  Description of Artificial Sequence: Synthetic oligonucleotide
  Antisense strand to SEQ ID NO: 2228740
uaugccacauguuacuaac

SEQ ID NO: 2228742 - RNA, 19 nt, Artificial Sequence
  Description of Artificial Sequence: Synthetic oligonucleotide
  Sense strand starting at position 3703 of SEQ ID NO: 1883952
uuaauuagggaucagcuuu

SEQ ID NO: 2228743 - RNA, 19 nt, Artificial Sequence
  Description of Artificial Sequence: Synthetic oligonucleotide
  Antisense strand to SEQ ID NO: 2228742
aaagcugaucccuaauuaa

SEQ ID NO: 2228744 - RNA, 19 nt, Artificial Sequence
  Description of Artificial Sequence: Synthetic oligonucleotide
  Sense strand starting at position 156 of SEQ ID NO: 1883953
auucgaguuguucugccuu

SEQ ID NO: 2228745 - RNA, 19 nt, Artificial Sequence
  Description of Artificial Sequence: Synthetic oligonucleotide
  Antisense strand to SEQ ID NO: 2228744
aaggcagaacaacucgaau

SEQ ID NO: 2228746 - RNA, 19 nt, Artificial Sequence
  Description of Artificial Sequence: Synthetic oligonucleotide
  Sense strand starting at position 414 of SEQ ID NO: 1883953
ucuaguaaauaauugggua

SEQ ID NO: 2228747 - RNA, 19 nt, Artificial Sequence
  Description of Artificial Sequence: Synthetic oligonucleotide
  Antisense strand to SEQ ID NO: 2228746
uacccaauuauuuacuaga

SEQ ID NO: 2228748 - RNA, 19 nt, Artificial Sequence
  Description of Artificial Sequence: Synthetic oligonucleotide
  Sense strand starting at position 418 of SEQ ID NO: 1883953
guaaauaauuggguauuac

SEQ ID NO: 2228749 - RNA, 19 nt, Artificial Sequence
  Description of Artificial Sequence: Synthetic oligonucleotide
  Antisense strand to SEQ ID NO: 2228748
guaauacccaauuauuuac

SEQ ID NO: 2228750 - RNA, 19 nt, Artificial Sequence
  Description of Artificial Sequence: Synthetic oligonucleotide
  Sense strand starting at position 426 of SEQ ID NO: 1883953
uuggguauuacguggaaua

SEQ ID NO: 2228751 - RNA, 19 nt, Artificial Sequence
  Description of Artificial Sequence: Synthetic oligonucleotide
  Antisense strand to SEQ ID NO: 2228750
uauuccacguaauacccaa

SEQ ID NO: 2228752 - RNA, 19 nt, Artificial Sequence
  Description of Artificial Sequence: Synthetic oligonucleotide
  Sense strand starting at position 427 of SEQ ID NO: 1883953
uggguauuacguggaauac

SEQ ID NO: 2228753 - RNA, 19 nt, Artificial Sequence
  Description of Artificial Sequence: Synthetic oligonucleotide
  Antisense strand to SEQ ID NO: 2228752
guauuccacguaauaccca

SEQ ID NO: 2228754 - RNA, 19 nt, Artificial Sequence
  Description of Artificial Sequence: Synthetic oligonucleotide
  Sense strand starting at position 437 of SEQ ID NO: 1883953
guggaauaccugggugaca

SEQ ID NO: 2228755 - RNA, 19 nt, Artificial Sequence
  Description of Artificial Sequence: Synthetic oligonucleotide
  Antisense strand to SEQ ID NO: 2228754
ugucacccagguauuccac

SEQ ID NO: 2228756 - RNA, 19 nt, Artificial Sequence
  Description of Artificial Sequence: Synthetic oligonucleotide
  Sense strand starting at position 718 of SEQ ID NO: 1883953
cacuguacagcuggguaaa

SEQ ID NO: 2228757 - RNA, 19 nt, Artificial Sequence
  Description of Artificial Sequence: Synthetic oligonucleotide
  Antisense strand to SEQ ID NO: 2228756
uuuacccagcuguacagug

SEQ ID NO: 2228758 - RNA, 19 nt, Artificial Sequence
  Description of Artificial Sequence: Synthetic oligonucleotide
  Sense strand starting at position 897 of SEQ ID NO: 1883953
uuuguucuacuggaauguu

SEQ ID NO: 2228759 - RNA, 19 nt, Artificial Sequence
  Description of Artificial Sequence: Synthetic oligonucleotide
  Antisense strand to SEQ ID NO: 2228758
aacauuccaguagaacaaa

SEQ ID NO: 2228760 - RNA, 19 nt, Artificial Sequence
  Description of Artificial Sequence: Synthetic oligonucleotide
  Sense strand starting at position 1065 of SEQ ID NO: 1883953
ucaaguugacucugaagaa

SEQ ID NO: 2228761 - RNA, 19 nt, Artificial Sequence
  Description of Artificial Sequence: Synthetic oligonucleotide
  Antisense strand to SEQ ID NO: 2228760
uucuucagagucaacuuga

SEQ ID NO: 2228762 - RNA, 19 nt, Artificial Sequence
  Description of Artificial Sequence: Synthetic oligonucleotide
  Sense strand starting at position 1176 of SEQ ID NO: 1883953
gggaucucauagccuaaua

SEQ ID NO: 2228763 - RNA, 19 nt, Artificial Sequence
  Description of Artificial Sequence: Synthetic oligonucleotide
  Antisense strand to SEQ ID NO: 2228762
uauuaggcuaugagauccc

SEQ ID NO: 2228764 - RNA, 19 nt, Artificial Sequence
  Description of Artificial Sequence: Synthetic oligonucleotide
  Sense strand starting at position 1646 of SEQ ID NO: 1883953
gggcaacuauucuuauaau

SEQ ID NO: 2228765 - RNA, 19 nt, Artificial Sequence
  Description of Artificial Sequence: Synthetic oligonucleotide
  Antisense strand to SEQ ID NO: 2228764
auuauaagaauaguugccc

SEQ ID NO: 2228766 - RNA, 19 nt, Artificial Sequence
  Description of Artificial Sequence: Synthetic oligonucleotide
  Sense strand starting at position 1882 of SEQ ID NO: 1883953
guugucucauuucuugauu

SEQ ID NO: 2228767 - RNA, 19 nt, Artificial Sequence
  Description of Artificial Sequence: Synthetic oligonucleotide
  Antisense strand to SEQ ID NO: 2228766
aaucaagaaaugagacaac

SEQ ID NO: 2228768 - RNA, 19 nt, Artificial Sequence
  Description of Artificial Sequence: Synthetic oligonucleotide
  Sense strand starting at position 1884 of SEQ ID NO: 1883953
ugucucauuucuugauuug

SEQ ID NO: 2228769 - RNA, 19 nt, Artificial Sequence
  Description of Artificial Sequence: Synthetic oligonucleotide
  Antisense strand to SEQ ID NO: 2228768
caaaucaagaaaugagaca

SEQ ID NO: 2228770 - RNA, 19 nt, Artificial Sequence
  Description of Artificial Sequence: Synthetic oligonucleotide
  Sense strand starting at position 2191 of SEQ ID NO: 1883953
ccuuccauggccuggaaua

SEQ ID NO: 2228771 - RNA, 19 nt, Artificial Sequence
  Description of Artificial Sequence: Synthetic oligonucleotide
  Antisense strand to SEQ ID NO: 2228770
uauuccaggccauggaagg

SEQ ID NO: 2228772 - RNA, 19 nt, Artificial Sequence
  Description of Artificial Sequence: Synthetic oligonucleotide
  Sense strand starting at position 2204 of SEQ ID NO: 1883953
ggaauagccuccuccugua

SEQ ID NO: 2228773 - RNA, 19 nt, Artificial Sequence
  Description of Artificial Sequence: Synthetic oligonucleotide
  Antisense strand to SEQ ID NO: 2228772
uacaggaggaggcuauucc

SEQ ID NO: 2228774 - RNA, 19 nt, Artificial Sequence
  Description of Artificial Sequence: Synthetic oligonucleotide
  Sense strand starting at position 2270 of SEQ ID NO: 1883953
acgaaaucuucccuaguag

SEQ ID NO: 2228775 - RNA, 19 nt, Artificial Sequence
  Description of Artificial Sequence: Synthetic oligonucleotide
  Antisense strand to SEQ ID NO: 2228774
cuacuagggaagauuucgu

SEQ ID NO: 2228776 - RNA, 19 nt, Artificial Sequence
  Description of Artificial Sequence: Synthetic oligonucleotide
  Sense strand starting at position 2271 of SEQ ID NO: 1883953
cgaaaucuucccuaguaga

SEQ ID NO: 2228777 - RNA, 19 nt, Artificial Sequence
  Description of Artificial Sequence: Synthetic oligonucleotide
  Antisense strand to SEQ ID NO: 2228776
ucuacuagggaagauuucg

SEQ ID NO: 2228778 - RNA, 19 nt, Artificial Sequence
  Description of Artificial Sequence: Synthetic oligonucleotide
  Sense strand starting at position 2518 of SEQ ID NO: 1883953
auaaguggcugggcuuaua

SEQ ID NO: 2228779 - RNA, 19 nt, Artificial Sequence
  Description of Artificial Sequence: Synthetic oligonucleotide
  Antisense strand to SEQ ID NO: 2228778
uauaagcccagccacuuau

SEQ ID NO: 2228780 - RNA, 19 nt, Artificial Sequence
  Description of Artificial Sequence: Synthetic oligonucleotide
  Sense strand starting at position 2635 of SEQ ID NO: 1883953
uugaaauacuuugcauaug

SEQ ID NO: 2228781 - RNA, 19 nt, Artificial Sequence
  Description of Artificial Sequence: Synthetic oligonucleotide
  Antisense strand to SEQ ID NO: 2228780
cauaugcaaaguauuucaa

SEQ ID NO: 2228782 - RNA, 19 nt, Artificial Sequence
  Description of Artificial Sequence: Synthetic oligonucleotide
  Sense strand starting at position 2712 of SEQ ID NO: 1883953
agugccauucuagauguau

SEQ ID NO: 2228783 - RNA, 19 nt, Artificial Sequence
  Description of Artificial Sequence: Synthetic oligonucleotide
  Antisense strand to SEQ ID NO: 2228782
auacaucuagaauggcacu

SEQ ID NO: 2228784 - RNA, 19 nt, Artificial Sequence
  Description of Artificial Sequence: Synthetic oligonucleotide
  Sense strand starting at position 2764 of SEQ ID NO: 1883953
gccuaaaggcauuagggau

SEQ ID NO: 2228785 - RNA, 19 nt, Artificial Sequence
  Description of Artificial Sequence: Synthetic oligonucleotide
  Antisense strand to SEQ ID NO: 2228784
aucccuaaugccuuuaggc

SEQ ID NO: 2228786 - RNA, 19 nt, Artificial Sequence
  Description of Artificial Sequence: Synthetic oligonucleotide
  Sense strand starting at position 2771 of SEQ ID NO: 1883953
ggcauuagggauuaauugu

SEQ ID NO: 2228787 - RNA, 19 nt, Artificial Sequence
  Description of Artificial Sequence: Synthetic oligonucleotide
  Antisense strand to SEQ ID NO: 2228786
acaauuaaucccuaaugcc

SEQ ID NO: 2228788 - RNA, 19 nt, Artificial Sequence
  Description of Artificial Sequence: Synthetic oligonucleotide
  Sense strand starting at position 2777 of SEQ ID NO: 1883953
agggauuaauugucucuug

SEQ ID NO: 2228789 - RNA, 19 nt, Artificial Sequence
  Description of Artificial Sequence: Synthetic oligonucleotide
  Antisense strand to SEQ ID NO: 2228788
caagagacaauuaaucccu

SEQ ID NO: 2228790 - RNA, 19 nt, Artificial Sequence
  Description of Artificial Sequence: Synthetic oligonucleotide
  Sense strand starting at position 2778 of SEQ ID NO: 1883953
gggauuaauugucucuuga

SEQ ID NO: 2228791 - RNA, 19 nt, Artificial Sequence
  Description of Artificial Sequence: Synthetic oligonucleotide
  Antisense strand to SEQ ID NO: 2228790
ucaagagacaauuaauccc

SEQ ID NO: 2228792 - RNA, 19 nt, Artificial Sequence
  Description of Artificial Sequence: Synthetic oligonucleotide
  Sense strand starting at position 2792 of SEQ ID NO: 1883953
cuugaaaucccagguugag

SEQ ID NO: 2228793 - RNA, 19 nt, Artificial Sequence
  Description of Artificial Sequence: Synthetic oligonucleotide
  Antisense strand to SEQ ID NO: 2228792
cucaaccugggauuucaag

SEQ ID NO: 2228794 - RNA, 19 nt, Artificial Sequence
  Description of Artificial Sequence: Synthetic oligonucleotide
  Sense strand starting at position 2852 of SEQ ID NO: 1883953
gguagagacaucugucacu

SEQ ID NO: 2228795 - RNA, 19 nt, Artificial Sequence
  Description of Artificial Sequence: Synthetic oligonucleotide
  Antisense strand to SEQ ID NO: 2228794
agugacagaugucucuacc

SEQ ID NO: 2228796 - RNA, 19 nt, Artificial Sequence
  Description of Artificial Sequence: Synthetic oligonucleotide
  Sense strand starting at position 2857 of SEQ ID NO: 1883953
agacaucugucacuuagug

SEQ ID NO: 2228797 - RNA, 19 nt, Artificial Sequence
  Description of Artificial Sequence: Synthetic oligonucleotide
  Antisense strand to SEQ ID NO: 2228796
cacuaagugacagaugucu

SEQ ID NO: 2228798 - RNA, 19 nt, Artificial Sequence
  Description of Artificial Sequence: Synthetic oligonucleotide
  Sense strand starting at position 3040 of SEQ ID NO: 1883953
ggguguuggauccaaacuu

SEQ ID NO: 2228799 - RNA, 19 nt, Artificial Sequence
  Description of Artificial Sequence: Synthetic oligonucleotide
  Antisense strand to SEQ ID NO: 2228798
aaguuuggauccaacaccc

SEQ ID NO: 2228800 - RNA, 19 nt, Artificial Sequence
  Description of Artificial Sequence: Synthetic oligonucleotide
  Sense strand starting at position 3214 of SEQ ID NO: 1883953
acuucuauuuaguagauac

SEQ ID NO: 2228801 - RNA, 19 nt, Artificial Sequence
  Description of Artificial Sequence: Synthetic oligonucleotide
  Antisense strand to SEQ ID NO: 2228800
guaucuacuaaauagaagu

SEQ ID NO: 2228802 - RNA, 19 nt, Artificial Sequence
  Description of Artificial Sequence: Synthetic oligonucleotide
  Sense strand starting at position 3273 of SEQ ID NO: 1883953
uucuauuaauuggcuguaa

SEQ ID NO: 2228803 - RNA, 19 nt, Artificial Sequence
  Description of Artificial Sequence: Synthetic oligonucleotide
  Antisense strand to SEQ ID NO: 2228802
uuacagccaauuaauagaa

SEQ ID NO: 2228804 - RNA, 19 nt, Artificial Sequence
  Description of Artificial Sequence: Synthetic oligonucleotide
  Sense strand starting at position 3275 of SEQ ID NO: 1883953
cuauuaauuggcuguaaca

SEQ ID NO: 2228805 - RNA, 19 nt, Artificial Sequence
  Description of Artificial Sequence: Synthetic oligonucleotide
  Antisense strand to SEQ ID NO: 2228804
uguuacagccaauuaauag

SEQ ID NO: 2228806 - RNA, 19 nt, Artificial Sequence
  Description of Artificial Sequence: Synthetic oligonucleotide
  Sense strand starting at position 3277 of SEQ ID NO: 1883953
auuaauuggcuguaacaac

SEQ ID NO: 2228807 - RNA, 19 nt, Artificial Sequence
  Description of Artificial Sequence: Synthetic oligonucleotide
  Antisense strand to SEQ ID NO: 2228806
guuguuacagccaauuaau

SEQ ID NO: 2228808 - RNA, 19 nt, Artificial Sequence
  Description of Artificial Sequence: Synthetic oligonucleotide
  Sense strand starting at position 3348 of SEQ ID NO: 1883953
agaauacuaccuggcauaa

SEQ ID NO: 2228809 - RNA, 19 nt, Artificial Sequence
  Description of Artificial Sequence: Synthetic oligonucleotide
  Antisense strand to SEQ ID NO: 2228808
uuaugccagguaguauucu

SEQ ID NO: 2228810 - RNA, 19 nt, Artificial Sequence
  Description of Artificial Sequence: Synthetic oligonucleotide
  Sense strand starting at position 3558 of SEQ ID NO: 1883953
gcagcuggugcugaaauga

SEQ ID NO: 2228811 - RNA, 19 nt, Artificial Sequence
  Description of Artificial Sequence: Synthetic oligonucleotide
  Antisense strand to SEQ ID NO: 2228810
ucauuucagcaccagcugc

SEQ ID NO: 2228812 - RNA, 19 nt, Artificial Sequence
  Description of Artificial Sequence: Synthetic oligonucleotide
  Sense strand starting at position 3722 of SEQ ID NO: 1883953
cuaguuucuccaggagauu

SEQ ID NO: 2228813 - RNA, 19 nt, Artificial Sequence
  Description of Artificial Sequence: Synthetic oligonucleotide
  Antisense strand to SEQ ID NO: 2228812
aaucuccuggagaaacuag

SEQ ID NO: 2228814 - RNA, 19 nt, Artificial Sequence
  Description of Artificial Sequence: Synthetic oligonucleotide
  Sense strand starting at position 3794 of SEQ ID NO: 1883953
cugguuauccaguaagcau

SEQ ID NO: 2228815 - RNA, 19 nt, Artificial Sequence
  Description of Artificial Sequence: Synthetic oligonucleotide
  Antisense strand to SEQ ID NO: 2228814
augcuuacuggauaaccag

SEQ ID NO: 2228816 - RNA, 19 nt, Artificial Sequence
  Description of Artificial Sequence: Synthetic oligonucleotide
  Sense strand starting at position 3948 of SEQ ID NO: 1883953
uauugauuugcuugucuug

SEQ ID NO: 2228817 - RNA, 19 nt, Artificial Sequence
  Description of Artificial Sequence: Synthetic oligonucleotide
  Antisense strand to SEQ ID NO: 2228816
caagacaagcaaaucaaua

SEQ ID NO: 2228818 - RNA, 19 nt, Artificial Sequence
  Description of Artificial Sequence: Synthetic oligonucleotide
  Sense strand starting at position 3962 of SEQ ID NO: 1883953
ucuuguguuagagagucau

SEQ ID NO: 2228819 - RNA, 19 nt, Artificial Sequence
  Description of Artificial Sequence: Synthetic oligonucleotide
  Antisense strand to SEQ ID NO: 2228818
augacucucuaacacaaga

SEQ ID NO: 2228820 - RNA, 19 nt, Artificial Sequence
  Description of Artificial Sequence: Synthetic oligonucleotide
  Sense strand starting at position 3966 of SEQ ID NO: 1883953
guguuagagagucauugag

SEQ ID NO: 2228821 - RNA, 19 nt, Artificial Sequence
  Description of Artificial Sequence: Synthetic oligonucleotide
  Antisense strand to SEQ ID NO: 2228820
cucaaugacucucuaacac

SEQ ID NO: 2228822 - RNA, 19 nt, Artificial Sequence
  Description of Artificial Sequence: Synthetic oligonucleotide
  Sense strand starting at position 3968 of SEQ ID NO: 1883953
guuagagagucauugagga

SEQ ID NO: 2228823 - RNA, 19 nt, Artificial Sequence
  Description of Artificial Sequence: Synthetic oligonucleotide
  Antisense strand to SEQ ID NO: 2228822
uccucaaugacucucuaac

SEQ ID NO: 2228824 - RNA, 19 nt, Artificial Sequence
  Description of Artificial Sequence: Synthetic oligonucleotide
  Sense strand starting at position 48 of SEQ ID NO: 1883954
ccagauuucucagugcuua

SEQ ID NO: 2228825 - RNA, 19 nt, Artificial Sequence
  Description of Artificial Sequence: Synthetic oligonucleotide
  Antisense strand to SEQ ID NO: 2228824
uaagcacugagaaaucugg

SEQ ID NO: 2228826 - RNA, 19 nt, Artificial Sequence
  Description of Artificial Sequence: Synthetic oligonucleotide
  Sense strand starting at position 53 of SEQ ID NO: 1883954
uuucucagugcuuauuaga

SEQ ID NO: 2228827 - RNA, 19 nt, Artificial Sequence
  Description of Artificial Sequence: Synthetic oligonucleotide
  Antisense strand to SEQ ID NO: 2228826
ucuaauaagcacugagaaa

SEQ ID NO: 2228828 - RNA, 19 nt, Artificial Sequence
  Description of Artificial Sequence: Synthetic oligonucleotide
  Sense strand starting at position 252 of SEQ ID NO: 1883954
cccaucugguuucuaagau

SEQ ID NO: 2228829 - RNA, 19 nt, Artificial Sequence
  Description of Artificial Sequence: Synthetic oligonucleotide
  Antisense strand to SEQ ID NO: 2228828
aucuuagaaaccagauggg

SEQ ID NO: 2228830 - RNA, 19 nt, Artificial Sequence
  Description of Artificial Sequence: Synthetic oligonucleotide
  Sense strand starting at position 258 of SEQ ID NO: 1883954
ugguuucuaagaugugaac

SEQ ID NO: 2228831 - RNA, 19 nt, Artificial Sequence
  Description of Artificial Sequence: Synthetic oligonucleotide
  Antisense strand to SEQ ID NO: 2228830
guucacaucuuagaaacca

SEQ ID NO: 2228832 - RNA, 19 nt, Artificial Sequence
  Description of Artificial Sequence: Synthetic oligonucleotide
  Sense strand starting at position 420 of SEQ ID NO: 1883954
cugccagugaauuggucua

SEQ ID NO: 2228833 - RNA, 19 nt, Artificial Sequence
  Description of Artificial Sequence: Synthetic oligonucleotide
  Antisense strand to SEQ ID NO: 2228832
uagaccaauucacuggcag

SEQ ID NO: 2228834 - RNA, 19 nt, Artificial Sequence
  Description of Artificial Sequence: Synthetic oligonucleotide
  Sense strand starting at position 422 of SEQ ID NO: 1883954
gccagugaauuggucuaag

SEQ ID NO: 2228835 - RNA, 19 nt, Artificial Sequence
  Description of Artificial Sequence: Synthetic oligonucleotide
  Antisense strand to SEQ ID NO: 2228834
cuuagaccaauucacuggc

SEQ ID NO: 2228836 - RNA, 19 nt, Artificial Sequence
  Description of Artificial Sequence: Synthetic oligonucleotide
  Sense strand starting at position 638 of SEQ ID NO: 1883954
ccuggaagcuucucagaaa

SEQ ID NO: 2228837 - RNA, 19 nt, Artificial Sequence
  Description of Artificial Sequence: Synthetic oligonucleotide
  Antisense strand to SEQ ID NO: 2228836
uuucugagaagcuuccagg

SEQ ID NO: 2228838 - RNA, 19 nt, Artificial Sequence
  Description of Artificial Sequence: Synthetic oligonucleotide
  Sense strand starting at position 805 of SEQ ID NO: 1883954
uuagcaaaggucuaaauau

SEQ ID NO: 2228839 - RNA, 19 nt, Artificial Sequence
  Description of Artificial Sequence: Synthetic oligonucleotide
  Antisense strand to SEQ ID NO: 2228838
auauuuagaccuuugcuaa

SEQ ID NO: 2228840 - RNA, 19 nt, Artificial Sequence
  Description of Artificial Sequence: Synthetic oligonucleotide
  Sense strand starting at position 843 of SEQ ID NO: 1883954
auggcucuguucucaagau

SEQ ID NO: 2228841 - RNA, 19 nt, Artificial Sequence
  Description of Artificial Sequence: Synthetic oligonucleotide
  Antisense strand to SEQ ID NO: 2228840
aucuugagaacagagccau

SEQ ID NO: 2228842 - RNA, 19 nt, Artificial Sequence
  Description of Artificial Sequence: Synthetic oligonucleotide
  Sense strand starting at position 847 of SEQ ID NO: 1883954
cucuguucucaagauaggu

SEQ ID NO: 2228843 - RNA, 19 nt, Artificial Sequence
  Description of Artificial Sequence: Synthetic oligonucleotide
  Antisense strand to SEQ ID NO: 2228842
accuaucuugagaacagag

SEQ ID NO: 2228844 - RNA, 19 nt, Artificial Sequence
  Description of Artificial Sequence: Synthetic oligonucleotide
  Sense strand starting at position 1094 of SEQ ID NO: 1883954
gugggauaacaucgaguca

SEQ ID NO: 2228845 - RNA, 19 nt, Artificial Sequence
  Description of Artificial Sequence: Synthetic oligonucleotide
  Antisense strand to SEQ ID NO: 2228844
ugacucgauguuaucccac

SEQ ID NO: 2228846 - RNA, 19 nt, Artificial Sequence
  Description of Artificial Sequence: Synthetic oligonucleotide
  Sense strand starting at position 1144 of SEQ ID NO: 1883954
gaugaauggcucuguucuu

SEQ ID NO: 2228847 - RNA, 19 nt, Artificial Sequence
  Description of Artificial Sequence: Synthetic oligonucleotide
  Antisense strand to SEQ ID NO: 2228846
aagaacagagccauucauc

SEQ ID NO: 2228848 - RNA, 19 nt, Artificial Sequence
  Description of Artificial Sequence: Synthetic oligonucleotide
  Sense strand starting at position 2087 of SEQ ID NO: 1883954
uuuauaucuccaggaugua

SEQ ID NO: 2228849 - RNA, 19 nt, Artificial Sequence
  Description of Artificial Sequence: Synthetic oligonucleotide
  Antisense strand to SEQ ID NO: 2228848
uacauccuggagauauaaa

SEQ ID NO: 2228850 - RNA, 19 nt, Artificial Sequence
  Description of Artificial Sequence: Synthetic oligonucleotide
  Sense strand starting at position 2088 of SEQ ID NO: 1883954
uuauaucuccaggauguau

SEQ ID NO: 2228851 - RNA, 19 nt, Artificial Sequence
  Description of Artificial Sequence: Synthetic oligonucleotide
  Antisense strand to SEQ ID NO: 2228850
auacauccuggagauauaa

SEQ ID NO: 2228852 - RNA, 19 nt, Artificial Sequence
  Description of Artificial Sequence: Synthetic oligonucleotide
  Sense strand starting at position 2176 of SEQ ID NO: 1883954
ggagauaaguaagauccua

SEQ ID NO: 2228853 - RNA, 19 nt, Artificial Sequence
  Description of Artificial Sequence: Synthetic oligonucleotide
  Antisense strand to SEQ ID NO: 2228852
uaggaucuuacuuaucucc

SEQ ID NO: 2228854 - RNA, 19 nt, Artificial Sequence
  Description of Artificial Sequence: Synthetic oligonucleotide
  Sense strand starting at position 2305 of SEQ ID NO: 1883954
cccggaugugcgagugagu

SEQ ID NO: 2228855 - RNA, 19 nt, Artificial Sequence
  Description of Artificial Sequence: Synthetic oligonucleotide
  Antisense strand to SEQ ID NO: 2228854
acucacucgcacauccggg

SEQ ID NO: 2228856 - RNA, 19 nt, Artificial Sequence
  Description of Artificial Sequence: Synthetic oligonucleotide
  Sense strand starting at position 2306 of SEQ ID NO: 1883954
ccggaugugcgagugaguu

SEQ ID NO: 2228857 - RNA, 19 nt, Artificial Sequence
  Description of Artificial Sequence: Synthetic oligonucleotide
  Antisense strand to SEQ ID NO: 2228856
aacucacucgcacauccgg

SEQ ID NO: 2228858 - RNA, 19 nt, Artificial Sequence
  Description of Artificial Sequence: Synthetic oligonucleotide
  Sense strand starting at position 2308 of SEQ ID NO: 1883954
ggaugugcgagugaguuua

SEQ ID NO: 2228859 - RNA, 19 nt, Artificial Sequence
  Description of Artificial Sequence: Synthetic oligonucleotide
  Antisense strand to SEQ ID NO: 2228858
uaaacucacucgcacaucc

SEQ ID NO: 2228860 - RNA, 19 nt, Artificial Sequence
  Description of Artificial Sequence: Synthetic oligonucleotide
  Sense strand starting at position 2312 of SEQ ID NO: 1883954
gugcgagugaguuuaccga

SEQ ID NO: 2228861 - RNA, 19 nt, Artificial Sequence
  Description of Artificial Sequence: Synthetic oligonucleotide
  Antisense strand to SEQ ID NO: 2228860
ucgguaaacucacucgcac

SEQ ID NO: 2228862 - RNA, 19 nt, Artificial Sequence
  Description of Artificial Sequence: Synthetic oligonucleotide
  Sense strand starting at position 2488 of SEQ ID NO: 1883954
accuccuuuccaggugaga

SEQ ID NO: 2228863 - RNA, 19 nt, Artificial Sequence
  Description of Artificial Sequence: Synthetic oligonucleotide
  Antisense strand to SEQ ID NO: 2228862
ucucaccuggaaaggaggu

SEQ ID NO: 2228864 - RNA, 19 nt, Artificial Sequence
  Description of Artificial Sequence: Synthetic oligonucleotide
  Sense strand starting at position 2614 of SEQ ID NO: 1883954
cagaguucccaaugaggac

SEQ ID NO: 2228865 - RNA, 19 nt, Artificial Sequence
  Description of Artificial Sequence: Synthetic oligonucleotide
  Antisense strand to SEQ ID NO: 2228864
guccucauugggaacucug

SEQ ID NO: 2228866 - RNA, 19 nt, Artificial Sequence
  Description of Artificial Sequence: Synthetic oligonucleotide
  Sense strand starting at position 2882 of SEQ ID NO: 1883954
ucaccuguuuguuuagauu

SEQ ID NO: 2228867 - RNA, 19 nt, Artificial Sequence
  Description of Artificial Sequence: Synthetic oligonucleotide
  Antisense strand to SEQ ID NO: 2228866
aaucuaaacaaacagguga

SEQ ID NO: 2228868 - RNA, 19 nt, Artificial Sequence
  Description of Artificial Sequence: Synthetic oligonucleotide
  Sense strand starting at position 2897 of SEQ ID NO: 1883954
gauuguauucuccacugag

SEQ ID NO: 2228869 - RNA, 19 nt, Artificial Sequence
  Description of Artificial Sequence: Synthetic oligonucleotide
  Antisense strand to SEQ ID NO: 2228868
cucaguggagaauacaauc

SEQ ID NO: 2228870 - RNA, 19 nt, Artificial Sequence
  Description of Artificial Sequence: Synthetic oligonucleotide
  Sense strand starting at position 2900 of SEQ ID NO: 1883954
uguauucuccacugagcaa

SEQ ID NO: 2228871 - RNA, 19 nt, Artificial Sequence
  Description of Artificial Sequence: Synthetic oligonucleotide
  Antisense strand to SEQ ID NO: 2228870
uugcucaguggagaauaca

SEQ ID NO: 2228872 - RNA, 19 nt, Artificial Sequence
  Description of Artificial Sequence: Synthetic oligonucleotide
  Sense strand starting at position 2913 of SEQ ID NO: 1883954
gagcaauaagauuaggugu

SEQ ID NO: 2228873 - RNA, 19 nt, Artificial Sequence
  Description of Artificial Sequence: Synthetic oligonucleotide
  Antisense strand to SEQ ID NO: 2228872
acaccuaaucuuauugcuc

SEQ ID NO: 2228874 - RNA, 19 nt, Artificial Sequence
  Description of Artificial Sequence: Synthetic oligonucleotide
  Sense strand starting at position 2946 of SEQ ID NO: 1883954
auagcaacuaugugagaga

SEQ ID NO: 2228875 - RNA, 19 nt, Artificial Sequence
  Description of Artificial Sequence: Synthetic oligonucleotide
  Antisense strand to SEQ ID NO: 2228874
ucucucacauaguugcuau

SEQ ID NO: 2228876 - RNA, 19 nt, Artificial Sequence
  Description of Artificial Sequence: Synthetic oligonucleotide
  Sense strand starting at position 2955 of SEQ ID NO: 1883954
augugagagaucugggcau

SEQ ID NO: 2228877 - RNA, 19 nt, Artificial Sequence
  Description of Artificial Sequence: Synthetic oligonucleotide
  Antisense strand to SEQ ID NO: 2228876
augcccagaucucucacau

SEQ ID NO: 2228878 - RNA, 19 nt, Artificial Sequence
  Description of Artificial Sequence: Synthetic oligonucleotide
  Sense strand starting at position 3033 of SEQ ID NO: 1883954
ccacuaucucuauauaggu

SEQ ID NO: 2228879 - RNA, 19 nt, Artificial Sequence
  Description of Artificial Sequence: Synthetic oligonucleotide
  Antisense strand to SEQ ID NO: 2228878
accuauauagagauagugg

SEQ ID NO: 2228880 - RNA, 19 nt, Artificial Sequence
  Description of Artificial Sequence: Synthetic oligonucleotide
  Sense strand starting at position 3103 of SEQ ID NO: 1883954
acgucuugugugcuuugau

SEQ ID NO: 2228881 - RNA, 19 nt, Artificial Sequence
  Description of Artificial Sequence: Synthetic oligonucleotide
  Antisense strand to SEQ ID NO: 2228880
aucaaagcacacaagacgu

SEQ ID NO: 2228882 - RNA, 19 nt, Artificial Sequence
  Description of Artificial Sequence: Synthetic oligonucleotide
  Sense strand starting at position 3123 of SEQ ID NO: 1883954
ggccaaaggauaugugcau

SEQ ID NO: 2228883 - RNA, 19 nt, Artificial Sequence
  Description of Artificial Sequence: Synthetic oligonucleotide
  Antisense strand to SEQ ID NO: 2228882
augcacauauccuuuggcc

SEQ ID NO: 2228884 - RNA, 19 nt, Artificial Sequence
  Description of Artificial Sequence: Synthetic oligonucleotide
  Sense strand starting at position 3124 of SEQ ID NO: 1883954
gccaaaggauaugugcauu

SEQ ID NO: 2228885 - RNA, 19 nt, Artificial Sequence
  Description of Artificial Sequence: Synthetic oligonucleotide
  Antisense strand to SEQ ID NO: 2228884
aaugcacauauccuuuggc

SEQ ID NO: 2228886 - RNA, 19 nt, Artificial Sequence
  Description of Artificial Sequence: Synthetic oligonucleotide
  Sense strand starting at position 3167 of SEQ ID NO: 1883954
auugcaucccuaugugaau

SEQ ID NO: 2228887 - RNA, 19 nt, Artificial Sequence
  Description of Artificial Sequence: Synthetic oligonucleotide
  Antisense strand to SEQ ID NO: 2228886
auucacauagggaugcaau

SEQ ID NO: 2228888 - RNA, 19 nt, Artificial Sequence
  Description of Artificial Sequence: Synthetic oligonucleotide
  Sense strand starting at position 3168 of SEQ ID NO: 1883954
uugcaucccuaugugaaua

SEQ ID NO: 2228889 - RNA, 19 nt, Artificial Sequence
  Description of Artificial Sequence: Synthetic oligonucleotide
  Antisense strand to SEQ ID NO: 2228888
uauucacauagggaugcaa

SEQ ID NO: 2228890 - RNA, 19 nt, Artificial Sequence
  Description of Artificial Sequence: Synthetic oligonucleotide
  Sense strand starting at position 3210 of SEQ ID NO: 1883954
accagcuuuguaugacagu

SEQ ID NO: 2228891 - RNA, 19 nt, Artificial Sequence
  Description of Artificial Sequence: Synthetic oligonucleotide
  Antisense strand to SEQ ID NO: 2228890
acugucauacaaagcuggu

SEQ ID NO: 2228892 - RNA, 19 nt, Artificial Sequence
  Description of Artificial Sequence: Synthetic oligonucleotide
  Sense strand starting at position 3216 of SEQ ID NO: 1883954
uuuguaugacaguaccauu

SEQ ID NO: 2228893 - RNA, 19 nt, Artificial Sequence
  Description of Artificial Sequence: Synthetic oligonucleotide
  Antisense strand to SEQ ID NO: 2228892
aaugguacugucauacaaa

SEQ ID NO: 2228894 - RNA, 19 nt, Artificial Sequence
  Description of Artificial Sequence: Synthetic oligonucleotide
  Sense strand starting at position 3522 of SEQ ID NO: 1883954
uauguuuggugucugauaa

SEQ ID NO: 2228895 - RNA, 19 nt, Artificial Sequence
  Description of Artificial Sequence: Synthetic oligonucleotide
  Antisense strand to SEQ ID NO: 2228894
uuaucagacaccaaacaua

SEQ ID NO: 2228896 - RNA, 19 nt, Artificial Sequence
  Description of Artificial Sequence: Synthetic oligonucleotide
  Sense strand starting at position 3523 of SEQ ID NO: 1883954
auguuuggugucugauaag

SEQ ID NO: 2228897 - RNA, 19 nt, Artificial Sequence
  Description of Artificial Sequence: Synthetic oligonucleotide
  Antisense strand to SEQ ID NO: 2228896
cuuaucagacaccaaacau

SEQ ID NO: 2228898 - RNA, 19 nt, Artificial Sequence
  Description of Artificial Sequence: Synthetic oligonucleotide
  Sense strand starting at position 3712 of SEQ ID NO: 1883954
gguacauagcauuaucaca

SEQ ID NO: 2228899 - RNA, 19 nt, Artificial Sequence
  Description of Artificial Sequence: Synthetic oligonucleotide
  Antisense strand to SEQ ID NO: 2228898
ugugauaaugcuauguacc

SEQ ID NO: 2228900 - RNA, 19 nt, Artificial Sequence
  Description of Artificial Sequence: Synthetic oligonucleotide
  Sense strand starting at position 3806 of SEQ ID NO: 1883954
ccuuacuuuggugggagau

SEQ ID NO: 2228901 - RNA, 19 nt, Artificial Sequence
  Description of Artificial Sequence: Synthetic oligonucleotide
  Antisense strand to SEQ ID NO: 2228900
aucucccaccaaaguaagg

SEQ ID NO: 2228902 - RNA, 19 nt, Artificial Sequence
  Description of Artificial Sequence: Synthetic oligonucleotide
  Sense strand starting at position 3879 of SEQ ID NO: 1883954
gacccauuccagggucuga

SEQ ID NO: 2228903 - RNA, 19 nt, Artificial Sequence
  Description of Artificial Sequence: Synthetic oligonucleotide
  Antisense strand to SEQ ID NO: 2228902
ucagacccuggaauggguc

SEQ ID NO: 2228904 - RNA, 19 nt, Artificial Sequence
  Description of Artificial Sequence: Synthetic oligonucleotide
  Sense strand starting at position 87 of SEQ ID NO: 1883959
ggcugcuccuugggaggaa

SEQ ID NO: 2228905 - RNA, 19 nt, Artificial Sequence
  Description of Artificial Sequence: Synthetic oligonucleotide
  Antisense strand to SEQ ID NO: 2228904
uuccucccaaggagcagcc

SEQ ID NO: 2228906 - RNA, 19 nt, Artificial Sequence
  Description of Artificial Sequence: Synthetic oligonucleotide
  Sense strand starting at position 609 of SEQ ID NO: 1883959
ccaauuacccacugucagu

SEQ ID NO: 2228907 - RNA, 19 nt, Artificial Sequence
  Description of Artificial Sequence: Synthetic oligonucleotide
  Antisense strand to SEQ ID NO: 2228906
acugacaguggguaauugg

SEQ ID NO: 2228908 - RNA, 19 nt, Artificial Sequence
  Description of Artificial Sequence: Synthetic oligonucleotide
  Sense strand starting at position 652 of SEQ ID NO: 1883959
ggaauuaaaugcuaaauac

SEQ ID NO: 2228909 - RNA, 19 nt, Artificial Sequence
  Description of Artificial Sequence: Synthetic oligonucleotide
  Antisense strand to SEQ ID NO: 2228908
guauuuagcauuuaauucc

SEQ ID NO: 2228910 - RNA, 19 nt, Artificial Sequence
  Description of Artificial Sequence: Synthetic oligonucleotide
  Sense strand starting at position 684 of SEQ ID NO: 1883959
gcuccauuacccgggacau

SEQ ID NO: 2228911 - RNA, 19 nt, Artificial Sequence
  Description of Artificial Sequence: Synthetic oligonucleotide
  Antisense strand to SEQ ID NO: 2228910
augucccggguaauggagc

SEQ ID NO: 2228912 - RNA, 19 nt, Artificial Sequence
  Description of Artificial Sequence: Synthetic oligonucleotide
  Sense strand starting at position 821 of SEQ ID NO: 1883959
cgacuuggugcucgcgauu

SEQ ID NO: 2228913 - RNA, 19 nt, Artificial Sequence
  Description of Artificial Sequence: Synthetic oligonucleotide
  Antisense strand to SEQ ID NO: 2228912
aaucgcgagcaccaagucg

SEQ ID NO: 2228914 - RNA, 19 nt, Artificial Sequence
  Description of Artificial Sequence: Synthetic oligonucleotide
  Sense strand starting at position 824 of SEQ ID NO: 1883959
cuuggugcucgcgauugaa

SEQ ID NO: 2228915 - RNA, 19 nt, Artificial Sequence
  Description of Artificial Sequence: Synthetic oligonucleotide
  Antisense strand to SEQ ID NO: 2228914
uucaaucgcgagcaccaag

SEQ ID NO: 2228916 - RNA, 19 nt, Artificial Sequence
  Description of Artificial Sequence: Synthetic oligonucleotide
  Sense strand starting at position 826 of SEQ ID NO: 1883959
uggugcucgcgauugaauu

SEQ ID NO: 2228917 - RNA, 19 nt, Artificial Sequence
  Description of Artificial Sequence: Synthetic oligonucleotide
  Antisense strand to SEQ ID NO: 2228916
aauucaaucgcgagcacca

SEQ ID NO: 2228918 - RNA, 19 nt, Artificial Sequence
  Description of Artificial Sequence: Synthetic oligonucleotide
  Sense strand starting at position 827 of SEQ ID NO: 1883959
ggugcucgcgauugaauuu

SEQ ID NO: 2228919 - RNA, 19 nt, Artificial Sequence
  Description of Artificial Sequence: Synthetic oligonucleotide
  Antisense strand to SEQ ID NO: 2228918
aaauucaaucgcgagcacc

SEQ ID NO: 2228920 - RNA, 19 nt, Artificial Sequence
  Description of Artificial Sequence: Synthetic oligonucleotide
  Sense strand starting at position 828 of SEQ ID NO: 1883959
gugcucgcgauugaauuua

SEQ ID NO: 2228921 - RNA, 19 nt, Artificial Sequence
  Description of Artificial Sequence: Synthetic oligonucleotide
  Antisense strand to SEQ ID NO: 2228920
uaaauucaaucgcgagcac

SEQ ID NO: 2228922 - RNA, 19 nt, Artificial Sequence
  Description of Artificial Sequence: Synthetic oligonucleotide
  Sense strand starting at position 944 of SEQ ID NO: 1883959
uucuuagccucagaaguca

SEQ ID NO: 2228923 - RNA, 19 nt, Artificial Sequence
  Description of Artificial Sequence: Synthetic oligonucleotide
  Antisense strand to SEQ ID NO: 2228922
ugacuucugaggcuaagaa

SEQ ID NO: 2228924 - RNA, 19 nt, Artificial Sequence
  Description of Artificial Sequence: Synthetic oligonucleotide
  Sense strand starting at position 1109 of SEQ ID NO: 1883959
ucgauugacgcgcggagaa

SEQ ID NO: 2228925 - RNA, 19 nt, Artificial Sequence
  Description of Artificial Sequence: Synthetic oligonucleotide
  Antisense strand to SEQ ID NO: 2228924
uucuccgcgcgucaaucga

SEQ ID NO: 2228926 - RNA, 19 nt, Artificial Sequence
  Description of Artificial Sequence: Synthetic oligonucleotide
  Sense strand starting at position 1201 of SEQ ID NO: 1883959
auucguuucuccuuguuua

SEQ ID NO: 2228927 - RNA, 19 nt, Artificial Sequence
  Description of Artificial Sequence: Synthetic oligonucleotide
  Antisense strand to SEQ ID NO: 2228926
uaaacaaggagaaacgaau

SEQ ID NO: 2228928 - RNA, 19 nt, Artificial Sequence
  Description of Artificial Sequence: Synthetic oligonucleotide
  Sense strand starting at position 1202 of SEQ ID NO: 1883959
uucguuucuccuuguuuau

SEQ ID NO: 2228929 - RNA, 19 nt, Artificial Sequence
  Description of Artificial Sequence: Synthetic oligonucleotide
  Antisense strand to SEQ ID NO: 2228928
auaaacaaggagaaacgaa

SEQ ID NO: 2228930 - RNA, 19 nt, Artificial Sequence
  Description of Artificial Sequence: Synthetic oligonucleotide
  Sense strand starting at position 1212 of SEQ ID NO: 1883959
cuuguuuauggagagguuu

SEQ ID NO: 2228931 - RNA, 19 nt, Artificial Sequence
  Description of Artificial Sequence: Synthetic oligonucleotide
  Antisense strand to SEQ ID NO: 2228930
aaaccucuccauaaacaag

SEQ ID NO: 2228932 - RNA, 19 nt, Artificial Sequence
  Description of Artificial Sequence: Synthetic oligonucleotide
  Sense strand starting at position 1220 of SEQ ID NO: 1883959
uggagagguuuccggugaa

SEQ ID NO: 2228933 - RNA, 19 nt, Artificial Sequence
  Description of Artificial Sequence: Synthetic oligonucleotide
  Antisense strand to SEQ ID NO: 2228932
uucaccggaaaccucucca

SEQ ID NO: 2228934 - RNA, 19 nt, Artificial Sequence
  Description of Artificial Sequence: Synthetic oligonucleotide
  Sense strand starting at position 1221 of SEQ ID NO: 1883959
ggagagguuuccggugaau

SEQ ID NO: 2228935 - RNA, 19 nt, Artificial Sequence
  Description of Artificial Sequence: Synthetic oligonucleotide
  Antisense strand to SEQ ID NO: 2228934
auucaccggaaaccucucc

SEQ ID NO: 2228936 - RNA, 19 nt, Artificial Sequence
  Description of Artificial Sequence: Synthetic oligonucleotide
  Sense strand starting at position 1223 of SEQ ID NO: 1883959
agagguuuccggugaaugu

SEQ ID NO: 2228937 - RNA, 19 nt, Artificial Sequence
  Description of Artificial Sequence: Synthetic oligonucleotide
  Antisense strand to SEQ ID NO: 2228936
acauucaccggaaaccucu

SEQ ID NO: 2228938 - RNA, 19 nt, Artificial Sequence
  Description of Artificial Sequence: Synthetic oligonucleotide
  Sense strand starting at position 1224 of SEQ ID NO: 1883959
gagguuuccggugaauguu

SEQ ID NO: 2228939 - RNA, 19 nt, Artificial Sequence
  Description of Artificial Sequence: Synthetic oligonucleotide
  Antisense strand to SEQ ID NO: 2228938
aacauucaccggaaaccuc

SEQ ID NO: 2228940 - RNA, 19 nt, Artificial Sequence
  Description of Artificial Sequence: Synthetic oligonucleotide
  Sense strand starting at position 1227 of SEQ ID NO: 1883959
guuuccggugaauguuaga

SEQ ID NO: 2228941 - RNA, 19 nt, Artificial Sequence
  Description of Artificial Sequence: Synthetic oligonucleotide
  Antisense strand to SEQ ID NO: 2228940
ucuaacauucaccggaaac

SEQ ID NO: 2228942 - RNA, 19 nt, Artificial Sequence
  Description of Artificial Sequence: Synthetic oligonucleotide
  Sense strand starting at position 1232 of SEQ ID NO: 1883959
cggugaauguuagacagca

SEQ ID NO: 2228943 - RNA, 19 nt, Artificial Sequence
  Description of Artificial Sequence: Synthetic oligonucleotide
  Antisense strand to SEQ ID NO: 2228942
ugcugucuaacauucaccg

SEQ ID NO: 2228944 - RNA, 19 nt, Artificial Sequence
  Description of Artificial Sequence: Synthetic oligonucleotide
  Sense strand starting at position 1234 of SEQ ID NO: 1883959
gugaauguuagacagcaac

SEQ ID NO: 2228945 - RNA, 19 nt, Artificial Sequence
  Description of Artificial Sequence: Synthetic oligonucleotide
  Antisense strand to SEQ ID NO: 2228944
guugcugucuaacauucac

SEQ ID NO: 2228946 - RNA, 19 nt, Artificial Sequence
  Description of Artificial Sequence: Synthetic oligonucleotide
  Sense strand starting at position 1320 of SEQ ID NO: 1883959
agagacgaguggucagaga

SEQ ID NO: 2228947 - RNA, 19 nt, Artificial Sequence
  Description of Artificial Sequence: Synthetic oligonucleotide
  Antisense strand to SEQ ID NO: 2228946
ucucugaccacucgucucu

SEQ ID NO: 2228948 - RNA, 19 nt, Artificial Sequence
  Description of Artificial Sequence: Synthetic oligonucleotide
  Sense strand starting at position 1459 of SEQ ID NO: 1883959
uguccuauauauggaaauu

SEQ ID NO: 2228949 - RNA, 19 nt, Artificial Sequence
  Description of Artificial Sequence: Synthetic oligonucleotide
  Antisense strand to SEQ ID NO: 2228948
aauuuccauauauaggaca

SEQ ID NO: 2228950 - RNA, 19 nt, Artificial Sequence
  Description of Artificial Sequence: Synthetic oligonucleotide
  Sense strand starting at position 1538 of SEQ ID NO: 1883959
acgcgagaccaggaagauu

SEQ ID NO: 2228951 - RNA, 19 nt, Artificial Sequence
  Description of Artificial Sequence: Synthetic oligonucleotide
  Antisense strand to SEQ ID NO: 2228950
aaucuuccuggucucgcgu

SEQ ID NO: 2228952 - RNA, 19 nt, Artificial Sequence
  Description of Artificial Sequence: Synthetic oligonucleotide
  Sense strand starting at position 1592 of SEQ ID NO: 1883959
aucuuucuacagggauagu

SEQ ID NO: 2228953 - RNA, 19 nt, Artificial Sequence
  Description of Artificial Sequence: Synthetic oligonucleotide
  Antisense strand to SEQ ID NO: 2228952
acuaucccuguagaaagau

SEQ ID NO: 2228954 - RNA, 19 nt, Artificial Sequence
  Description of Artificial Sequence: Synthetic oligonucleotide
  Sense strand starting at position 1642 of SEQ ID NO: 1883959
ggugaaguugaauauuguu

SEQ ID NO: 2228955 - RNA, 19 nt, Artificial Sequence
  Description of Artificial Sequence: Synthetic oligonucleotide
  Antisense strand to SEQ ID NO: 2228954
aacaauauucaacuucacc

SEQ ID NO: 2228956 - RNA, 19 nt, Artificial Sequence
  Description of Artificial Sequence: Synthetic oligonucleotide
  Sense strand starting at position 1712 of SEQ ID NO: 1883959
ggcuucuucuaucucgaau

SEQ ID NO: 2228957 - RNA, 19 nt, Artificial Sequence
  Description of Artificial Sequence: Synthetic oligonucleotide
  Antisense strand to SEQ ID NO: 2228956
auucgagauagaagaagcc

SEQ ID NO: 2228958 - RNA, 19 nt, Artificial Sequence
  Description of Artificial Sequence: Synthetic oligonucleotide
  Sense strand starting at position 1733 of SEQ ID NO: 1883959
uugcauuuguagggaauuu

SEQ ID NO: 2228959 - RNA, 19 nt, Artificial Sequence
  Description of Artificial Sequence: Synthetic oligonucleotide
  Antisense strand to SEQ ID NO: 2228958
aaauucccuacaaaugcaa

SEQ ID NO: 2228960 - RNA, 19 nt, Artificial Sequence
  Description of Artificial Sequence: Synthetic oligonucleotide
  Sense strand starting at position 1772 of SEQ ID NO: 1883959
agggaacaaugucuccaau

SEQ ID NO: 2228961 - RNA, 19 nt, Artificial Sequence
  Description of Artificial Sequence: Synthetic oligonucleotide
  Antisense strand to SEQ ID NO: 2228960
auuggagacauuguucccu

SEQ ID NO: 2228962 - RNA, 19 nt, Artificial Sequence
  Description of Artificial Sequence: Synthetic oligonucleotide
  Sense strand starting at position 1774 of SEQ ID NO: 1883959
ggaacaaugucuccaauuc

SEQ ID NO: 2228963 - RNA, 19 nt, Artificial Sequence
  Description of Artificial Sequence: Synthetic oligonucleotide
  Antisense strand to SEQ ID NO: 2228962
gaauuggagacauuguucc

SEQ ID NO: 2228964 - RNA, 19 nt, Artificial Sequence
  Description of Artificial Sequence: Synthetic oligonucleotide
  Sense strand starting at position 2260 of SEQ ID NO: 1883959
uuuccuugacugugggaga

SEQ ID NO: 2228965 - RNA, 19 nt, Artificial Sequence
  Description of Artificial Sequence: Synthetic oligonucleotide
  Antisense strand to SEQ ID NO: 2228964
ucucccacagucaaggaaa

SEQ ID NO: 2228966 - RNA, 19 nt, Artificial Sequence
  Description of Artificial Sequence: Synthetic oligonucleotide
  Sense strand starting at position 2261 of SEQ ID NO: 1883959
uuccuugacugugggagaa

SEQ ID NO: 2228967 - RNA, 19 nt, Artificial Sequence
  Description of Artificial Sequence: Synthetic oligonucleotide
  Antisense strand to SEQ ID NO: 2228966
uucucccacagucaaggaa

SEQ ID NO: 2228968 - RNA, 19 nt, Artificial Sequence
  Description of Artificial Sequence: Synthetic oligonucleotide
  Sense strand starting at position 2325 of SEQ ID NO: 1883959
aaaguugggucccuagagu

SEQ ID NO: 2228969 - RNA, 19 nt, Artificial Sequence
  Description of Artificial Sequence: Synthetic oligonucleotide
  Antisense strand to SEQ ID NO: 2228968
acucuagggacccaacuuu

SEQ ID NO: 2228970 - RNA, 19 nt, Artificial Sequence
  Description of Artificial Sequence: Synthetic oligonucleotide
  Sense strand starting at position 2352 of SEQ ID NO: 1883959
aguucuuucuguccgucua

SEQ ID NO: 2228971 - RNA, 19 nt, Artificial Sequence
  Description of Artificial Sequence: Synthetic oligonucleotide
  Antisense strand to SEQ ID NO: 2228970
uagacggacagaaagaacu

SEQ ID NO: 2228972 - RNA, 19 nt, Artificial Sequence
  Description of Artificial Sequence: Synthetic oligonucleotide
  Sense strand starting at position 2475 of SEQ ID NO: 1883959
aauauuaggucuggaaagg

SEQ ID NO: 2228973 - RNA, 19 nt, Artificial Sequence
  Description of Artificial Sequence: Synthetic oligonucleotide
  Antisense strand to SEQ ID NO: 2228972
ccuuuccagaccuaauauu

SEQ ID NO: 2228974 - RNA, 19 nt, Artificial Sequence
  Description of Artificial Sequence: Synthetic oligonucleotide
  Sense strand starting at position 2537 of SEQ ID NO: 1883959
gcgcagaaggcucgggaaa

SEQ ID NO: 2228975 - RNA, 19 nt, Artificial Sequence
  Description of Artificial Sequence: Synthetic oligonucleotide
  Antisense strand to SEQ ID NO: 2228974
uuucccgagccuucugcgc

SEQ ID NO: 2228976 - RNA, 19 nt, Artificial Sequence
  Description of Artificial Sequence: Synthetic oligonucleotide
  Sense strand starting at position 2539 of SEQ ID NO: 1883959
gcagaaggcucgggaaaga

SEQ ID NO: 2228977 - RNA, 19 nt, Artificial Sequence
  Description of Artificial Sequence: Synthetic oligonucleotide
  Antisense strand to SEQ ID NO: 2228976
ucuuucccgagccuucugc

SEQ ID NO: 2228978 - RNA, 19 nt, Artificial Sequence
  Description of Artificial Sequence: Synthetic oligonucleotide
  Sense strand starting at position 2548 of SEQ ID NO: 1883959
ucgggaaagaggugacaau

SEQ ID NO: 2228979 - RNA, 19 nt, Artificial Sequence
  Description of Artificial Sequence: Synthetic oligonucleotide
  Antisense strand to SEQ ID NO: 2228978
auugucaccucuuucccga

SEQ ID NO: 2228980 - RNA, 19 nt, Artificial Sequence
  Description of Artificial Sequence: Synthetic oligonucleotide
  Sense strand starting at position 2581 of SEQ ID NO: 1883959
cgcggacgcuccagucaaa

SEQ ID NO: 2228981 - RNA, 19 nt, Artificial Sequence
  Description of Artificial Sequence: Synthetic oligonucleotide
  Antisense strand to SEQ ID NO: 2228980
uuugacuggagcguccgcg

SEQ ID NO: 2228982 - RNA, 19 nt, Artificial Sequence
  Description of Artificial Sequence: Synthetic oligonucleotide
  Sense strand starting at position 2608 of SEQ ID NO: 1883959
cccuuuauccgaugacuca

SEQ ID NO: 2228983 - RNA, 19 nt, Artificial Sequence
  Description of Artificial Sequence: Synthetic oligonucleotide
  Antisense strand to SEQ ID NO: 2228982
ugagucaucggauaaaggg

SEQ ID NO: 2228984 - RNA, 19 nt, Artificial Sequence
  Description of Artificial Sequence: Synthetic oligonucleotide
  Sense strand starting at position 122 of SEQ ID NO: 1883958
ggcugcuccuugggaggaa

SEQ ID NO: 2228985 - RNA, 19 nt, Artificial Sequence
  Description of Artificial Sequence: Synthetic oligonucleotide
  Antisense strand to SEQ ID NO: 2228984
uuccucccaaggagcagcc

SEQ ID NO: 2228986 - RNA, 19 nt, Artificial Sequence
  Description of Artificial Sequence: Synthetic oligonucleotide
  Sense strand starting at position 644 of SEQ ID NO: 1883958
ccaauuacccacugucagu

SEQ ID NO: 2228987 - RNA, 19 nt, Artificial Sequence
  Description of Artificial Sequence: Synthetic oligonucleotide
  Antisense strand to SEQ ID NO: 2228986
acugacaguggguaauugg

SEQ ID NO: 2228988 - RNA, 19 nt, Artificial Sequence
  Description of Artificial Sequence: Synthetic oligonucleotide
  Sense strand starting at position 687 of SEQ ID NO: 1883958
ggaauuaaaugcuaaauac

SEQ ID NO: 2228989 - RNA, 19 nt, Artificial Sequence
  Description of Artificial Sequence: Synthetic oligonucleotide
  Antisense strand to SEQ ID NO: 2228988
guauuuagcauuuaauucc

SEQ ID NO: 2228990 - RNA, 19 nt, Artificial Sequence
  Description of Artificial Sequence: Synthetic oligonucleotide
  Sense strand starting at position 719 of SEQ ID NO: 1883958
gcuccauuacccgggacau

SEQ ID NO: 2228991 - RNA, 19 nt, Artificial Sequence
  Description of Artificial Sequence: Synthetic oligonucleotide
  Antisense strand to SEQ ID NO: 2228990
augucccggguaauggagc

SEQ ID NO: 2228992 - RNA, 19 nt, Artificial Sequence
  Description of Artificial Sequence: Synthetic oligonucleotide
  Sense strand starting at position 856 of SEQ ID NO: 1883958
cgacuuggugcucgcgauu

SEQ ID NO: 2228993 - RNA, 19 nt, Artificial Sequence
  Description of Artificial Sequence: Synthetic oligonucleotide
  Antisense strand to SEQ ID NO: 2228992
aaucgcgagcaccaagucg

SEQ ID NO: 2228994 - RNA, 19 nt, Artificial Sequence
  Description of Artificial Sequence: Synthetic oligonucleotide
  Sense strand starting at position 859 of SEQ ID NO: 1883958
cuuggugcucgcgauugaa

SEQ ID NO: 2228995 - RNA, 19 nt, Artificial Sequence
  Description of Artificial Sequence: Synthetic oligonucleotide
  Antisense strand to SEQ ID NO: 2228994
uucaaucgcgagcaccaag

SEQ ID NO: 2228996 - RNA, 19 nt, Artificial Sequence
  Description of Artificial Sequence: Synthetic oligonucleotide
  Sense strand starting at position 861 of SEQ ID NO: 1883958
uggugcucgcgauugaauu

SEQ ID NO: 2228997 - RNA, 19 nt, Artificial Sequence
  Description of Artificial Sequence: Synthetic oligonucleotide
  Antisense strand to SEQ ID NO: 2228996
aauucaaucgcgagcacca

SEQ ID NO: 2228998 - RNA, 19 nt, Artificial Sequence
  Description of Artificial Sequence: Synthetic oligonucleotide
  Sense strand starting at position 862 of SEQ ID NO: 1883958
ggugcucgcgauugaauuu

SEQ ID NO: 2228999 - RNA, 19 nt, Artificial Sequence
  Description of Artificial Sequence: Synthetic oligonucleotide
  Antisense strand to SEQ ID NO: 2228998
aaauucaaucgcgagcacc

SEQ ID NO: 2229000 - RNA, 19 nt, Artificial Sequence
  Description of Artificial Sequence: Synthetic oligonucleotide
  Sense strand starting at position 863 of SEQ ID NO: 1883958
gugcucgcgauugaauuua

SEQ ID NO: 2229001 - RNA, 19 nt, Artificial Sequence
  Description of Artificial Sequence: Synthetic oligonucleotide
  Antisense strand to SEQ ID NO: 2229000
uaaauucaaucgcgagcac

SEQ ID NO: 2229002 - RNA, 19 nt, Artificial Sequence
  Description of Artificial Sequence: Synthetic oligonucleotide
  Sense strand starting at position 979 of SEQ ID NO: 1883958
uucuuagccucagaaguca

SEQ ID NO: 2229003 - RNA, 19 nt, Artificial Sequence
  Description of Artificial Sequence: Synthetic oligonucleotide
  Antisense strand to SEQ ID NO: 2229002
ugacuucugaggcuaagaa

SEQ ID NO: 2229004 - RNA, 19 nt, Artificial Sequence
  Description of Artificial Sequence: Synthetic oligonucleotide
  Sense strand starting at position 1144 of SEQ ID NO: 1883958
ucgauugacgcgcggagaa

SEQ ID NO: 2229005 - RNA, 19 nt, Artificial Sequence
  Description of Artificial Sequence: Synthetic oligonucleotide
  Antisense strand to SEQ ID NO: 2229004
uucuccgcgcgucaaucga

SEQ ID NO: 2229006 - RNA, 19 nt, Artificial Sequence
  Description of Artificial Sequence: Synthetic oligonucleotide
  Sense strand starting at position 1236 of SEQ ID NO: 1883958
auucguuucuccuuguuua

SEQ ID NO: 2229007 - RNA, 19 nt, Artificial Sequence
  Description of Artificial Sequence: Synthetic oligonucleotide
  Antisense strand to SEQ ID NO: 2229006
uaaacaaggagaaacgaau

SEQ ID NO: 2229008 - RNA, 19 nt, Artificial Sequence
  Description of Artificial Sequence: Synthetic oligonucleotide
  Sense strand starting at position 1237 of SEQ ID NO: 1883958
uucguuucuccuuguuuau

SEQ ID NO: 2229009 - RNA, 19 nt, Artificial Sequence
  Description of Artificial Sequence: Synthetic oligonucleotide
  Antisense strand to SEQ ID NO: 2229008
auaaacaaggagaaacgaa

SEQ ID NO: 2229010 - RNA, 19 nt, Artificial Sequence
  Description of Artificial Sequence: Synthetic oligonucleotide
  Sense strand starting at position 1247 of SEQ ID NO: 1883958
cuuguuuauggagagguuu

SEQ ID NO: 2229011 - RNA, 19 nt, Artificial Sequence
  Description of Artificial Sequence: Synthetic oligonucleotide
  Antisense strand to SEQ ID NO: 2229010
aaaccucuccauaaacaag

SEQ ID NO: 2229012 - RNA, 19 nt, Artificial Sequence
  Description of Artificial Sequence: Synthetic oligonucleotide
  Sense strand starting at position 1255 of SEQ ID NO: 1883958
uggagagguuuccggugaa

SEQ ID NO: 2229013 - RNA, 19 nt, Artificial Sequence
  Description of Artificial Sequence: Synthetic oligonucleotide
  Antisense strand to SEQ ID NO: 2229012
uucaccggaaaccucucca

SEQ ID NO: 2229014 - RNA, 19 nt, Artificial Sequence
  Description of Artificial Sequence: Synthetic oligonucleotide
  Sense strand starting at position 1256 of SEQ ID NO: 1883958
ggagagguuuccggugaau

SEQ ID NO: 2229015 - RNA, 19 nt, Artificial Sequence
  Description of Artificial Sequence: Synthetic oligonucleotide
  Antisense strand to SEQ ID NO: 2229014
auucaccggaaaccucucc

SEQ ID NO: 2229016 - RNA, 19 nt, Artificial Sequence
  Description of Artificial Sequence: Synthetic oligonucleotide
  Sense strand starting at position 1258 of SEQ ID NO: 1883958
agagguuuccggugaaugu

SEQ ID NO: 2229017 - RNA, 19 nt, Artificial Sequence
  Description of Artificial Sequence: Synthetic oligonucleotide
  Antisense strand to SEQ ID NO: 2229016
acauucaccggaaaccucu

SEQ ID NO: 2229018 - RNA, 19 nt, Artificial Sequence
  Description of Artificial Sequence: Synthetic oligonucleotide
  Sense strand starting at position 1259 of SEQ ID NO: 1883958
gagguuuccggugaauguu

SEQ ID NO: 2229019 - RNA, 19 nt, Artificial Sequence
  Description of Artificial Sequence: Synthetic oligonucleotide
  Antisense strand to SEQ ID NO: 2229018
aacauucaccggaaaccuc

SEQ ID NO: 2229020 - RNA, 19 nt, Artificial Sequence
  Description of Artificial Sequence: Synthetic oligonucleotide
  Sense strand starting at position 1262 of SEQ ID NO: 1883958
guuuccggugaauguuaga

SEQ ID NO: 2229021 - RNA, 19 nt, Artificial Sequence
  Description of Artificial Sequence: Synthetic oligonucleotide
  Antisense strand to SEQ ID NO: 2229020
ucuaacauucaccggaaac

SEQ ID NO: 2229022 - RNA, 19 nt, Artificial Sequence
  Description of Artificial Sequence: Synthetic oligonucleotide
  Sense strand starting at position 1267 of SEQ ID NO: 1883958
cggugaauguuagacagca

SEQ ID NO: 2229023 - RNA, 19 nt, Artificial Sequence
  Description of Artificial Sequence: Synthetic oligonucleotide
  Antisense strand to SEQ ID NO: 2229022
ugcugucuaacauucaccg

SEQ ID NO: 2229024 - RNA, 19 nt, Artificial Sequence
  Description of Artificial Sequence: Synthetic oligonucleotide
  Sense strand starting at position 1269 of SEQ ID NO: 1883958
gugaauguuagacagcaac

SEQ ID NO: 2229025 - RNA, 19 nt, Artificial Sequence
  Description of Artificial Sequence: Synthetic oligonucleotide
  Antisense strand to SEQ ID NO: 2229024
guugcugucuaacauucac

SEQ ID NO: 2229026 - RNA, 19 nt, Artificial Sequence
  Description of Artificial Sequence: Synthetic oligonucleotide
  Sense strand starting at position 1355 of SEQ ID NO: 1883958
agagacgaguggucagaga

SEQ ID NO: 2229027 - RNA, 19 nt, Artificial Sequence
  Description of Artificial Sequence: Synthetic oligonucleotide
  Antisense strand to SEQ ID NO: 2229026
ucucugaccacucgucucu

SEQ ID NO: 2229028 - RNA, 19 nt, Artificial Sequence
  Description of Artificial Sequence: Synthetic oligonucleotide
  Sense strand starting at position 1494 of SEQ ID NO: 1883958
uguccuauauauggaaauu

SEQ ID NO: 2229029 - RNA, 19 nt, Artificial Sequence
  Description of Artificial Sequence: Synthetic oligonucleotide
  Antisense strand to SEQ ID NO: 2229028
aauuuccauauauaggaca

SEQ ID NO: 2229030 - RNA, 19 nt, Artificial Sequence
  Description of Artificial Sequence: Synthetic oligonucleotide
  Sense strand starting at position 1573 of SEQ ID NO: 1883958
acgcgagaccaggaagauu

SEQ ID NO: 2229031 - RNA, 19 nt, Artificial Sequence
  Description of Artificial Sequence: Synthetic oligonucleotide
  Antisense strand to SEQ ID NO: 2229030
aaucuuccuggucucgcgu

SEQ ID NO: 2229032 - RNA, 19 nt, Artificial Sequence
  Description of Artificial Sequence: Synthetic oligonucleotide
  Sense strand starting at position 1627 of SEQ ID NO: 1883958
aucuuucuacagggauagu

SEQ ID NO: 2229033 - RNA, 19 nt, Artificial Sequence
  Description of Artificial Sequence: Synthetic oligonucleotide
  Antisense strand to SEQ ID NO: 2229032
acuaucccuguagaaagau

SEQ ID NO: 2229034 - RNA, 19 nt, Artificial Sequence
  Description of Artificial Sequence: Synthetic oligonucleotide
  Sense strand starting at position 1677 of SEQ ID NO: 1883958
ggugaaguugaauauuguu

SEQ ID NO: 2229035 - RNA, 19 nt, Artificial Sequence
  Description of Artificial Sequence: Synthetic oligonucleotide
  Antisense strand to SEQ ID NO: 2229034
aacaauauucaacuucacc

SEQ ID NO: 2229036 - RNA, 19 nt, Artificial Sequence
  Description of Artificial Sequence: Synthetic oligonucleotide
  Sense strand starting at position 1747 of SEQ ID NO: 1883958
ggcuucuucuaucucgaau

SEQ ID NO: 2229037 - RNA, 19 nt, Artificial Sequence
  Description of Artificial Sequence: Synthetic oligonucleotide
  Antisense strand to SEQ ID NO: 2229036
auucgagauagaagaagcc

SEQ ID NO: 2229038 - RNA, 19 nt, Artificial Sequence
  Description of Artificial Sequence: Synthetic oligonucleotide
  Sense strand starting at position 1768 of SEQ ID NO: 1883958
uugcauuuguagggaauuu

SEQ ID NO: 2229039 - RNA, 19 nt, Artificial Sequence
  Description of Artificial Sequence: Synthetic oligonucleotide
  Antisense strand to SEQ ID NO: 2229038
aaauucccuacaaaugcaa

SEQ ID NO: 2229040 - RNA, 19 nt, Artificial Sequence
  Description of Artificial Sequence: Synthetic oligonucleotide
  Sense strand starting at position 1807 of SEQ ID NO: 1883958
agggaacaaugucuccaau

SEQ ID NO: 2229041 - RNA, 19 nt, Artificial Sequence
  Description of Artificial Sequence: Synthetic oligonucleotide
  Antisense strand to SEQ ID NO: 2229040
auuggagacauuguucccu

SEQ ID NO: 2229042 - RNA, 19 nt, Artificial Sequence
  Description of Artificial Sequence: Synthetic oligonucleotide
  Sense strand starting at position 1809 of SEQ ID NO: 1883958
ggaacaaugucuccaauuc

SEQ ID NO: 2229043 - RNA, 19 nt, Artificial Sequence
  Description of Artificial Sequence: Synthetic oligonucleotide
  Antisense strand to SEQ ID NO: 2229042
gaauuggagacauuguucc

SEQ ID NO: 2229044 - RNA, 19 nt, Artificial Sequence
  Description of Artificial Sequence: Synthetic oligonucleotide
  Sense strand starting at position 2295 of SEQ ID NO: 1883958
uuuccuugacugugggaga

SEQ ID NO: 2229045 - RNA, 19 nt, Artificial Sequence
  Description of Artificial Sequence: Synthetic oligonucleotide
  Antisense strand to SEQ ID NO: 2229044
ucucccacagucaaggaaa

SEQ ID NO: 2229046 - RNA, 19 nt, Artificial Sequence
  Description of Artificial Sequence: Synthetic oligonucleotide
  Sense strand starting at position 2296 of SEQ ID NO: 1883958
uuccuugacugugggagaa

SEQ ID NO: 2229047 - RNA, 19 nt, Artificial Sequence
  Description of Artificial Sequence: Synthetic oligonucleotide
  Antisense strand to SEQ ID NO: 2229046
uucucccacagucaaggaa

SEQ ID NO: 2229048 - RNA, 19 nt, Artificial Sequence
  Description of Artificial Sequence: Synthetic oligonucleotide
  Sense strand starting at position 2360 of SEQ ID NO: 1883958
aaaguugggucccuagagu

SEQ ID NO: 2229049 - RNA, 19 nt, Artificial Sequence
  Description of Artificial Sequence: Synthetic oligonucleotide
  Antisense strand to SEQ ID NO: 2229048
acucuagggacccaacuuu

SEQ ID NO: 2229050 - RNA, 19 nt, Artificial Sequence
  Description of Artificial Sequence: Synthetic oligonucleotide
  Sense strand starting at position 2387 of SEQ ID NO: 1883958
aguucuuucuguccgucua

SEQ ID NO: 2229051 - RNA, 19 nt, Artificial Sequence
  Description of Artificial Sequence: Synthetic oligonucleotide
  Antisense strand to SEQ ID NO: 2229050
uagacggacagaaagaacu

SEQ ID NO: 2229052 - RNA, 19 nt, Artificial Sequence
  Description of Artificial Sequence: Synthetic oligonucleotide
  Sense strand starting at position 2510 of SEQ ID NO: 1883958
aauauuaggucuggaaagg

SEQ ID NO: 2229053 - RNA, 19 nt, Artificial Sequence
  Description of Artificial Sequence: Synthetic oligonucleotide
  Antisense strand to SEQ ID NO: 2229052
ccuuuccagaccuaauauu

SEQ ID NO: 2229054 - RNA, 19 nt, Artificial Sequence
  Description of Artificial Sequence: Synthetic oligonucleotide
  Sense strand starting at position 2572 of SEQ ID NO: 1883958
gcgcagaaggcucgggaaa

SEQ ID NO: 2229055 - RNA, 19 nt, Artificial Sequence
  Description of Artificial Sequence: Synthetic oligonucleotide
  Antisense strand to SEQ ID NO: 2229054
uuucccgagccuucugcgc

SEQ ID NO: 2229056 - RNA, 19 nt, Artificial Sequence
  Description of Artificial Sequence: Synthetic oligonucleotide
  Sense strand starting at position 2574 of SEQ ID NO: 1883958
gcagaaggcucgggaaaga

SEQ ID NO: 2229057 - RNA, 19 nt, Artificial Sequence
  Description of Artificial Sequence: Synthetic oligonucleotide
  Antisense strand to SEQ ID NO: 2229056
ucuuucccgagccuucugc

SEQ ID NO: 2229058 - RNA, 19 nt, Artificial Sequence
  Description of Artificial Sequence: Synthetic oligonucleotide
  Sense strand starting at position 2583 of SEQ ID NO: 1883958
ucgggaaagaggugacaau

SEQ ID NO: 2229059 - RNA, 19 nt, Artificial Sequence
  Description of Artificial Sequence: Synthetic oligonucleotide
  Antisense strand to SEQ ID NO: 2229058
auugucaccucuuucccga

SEQ ID NO: 2229060 - RNA, 19 nt, Artificial Sequence
  Description of Artificial Sequence: Synthetic oligonucleotide
  Sense strand starting at position 2616 of SEQ ID NO: 1883958
cgcggacgcuccagucaaa

SEQ ID NO: 2229061 - RNA, 19 nt, Artificial Sequence
  Description of Artificial Sequence: Synthetic oligonucleotide
  Antisense strand to SEQ ID NO: 2229060
uuugacuggagcguccgcg

SEQ ID NO: 2229062 - RNA, 19 nt, Artificial Sequence
  Description of Artificial Sequence: Synthetic oligonucleotide
  Sense strand starting at position 2643 of SEQ ID NO: 1883958
cccuuuauccgaugacuca

SEQ ID NO: 2229063 - RNA, 19 nt, Artificial Sequence
  Description of Artificial Sequence: Synthetic oligonucleotide
  Antisense strand to SEQ ID NO: 2229062
ugagucaucggauaaaggg

SEQ ID NO: 2229064 - RNA, 19 nt, Artificial Sequence
  Description of Artificial Sequence: Synthetic oligonucleotide
  Sense strand starting at position 110 of SEQ ID NO: 1883956
cgcagauucccggcuucuu

SEQ ID NO: 2229065 - RNA, 19 nt, Artificial Sequence
  Description of Artificial Sequence: Synthetic oligonucleotide
  Antisense strand to SEQ ID NO: 2229064
aagaagccgggaaucugcg

SEQ ID NO: 2229066 - RNA, 19 nt, Artificial Sequence
  Description of Artificial Sequence: Synthetic oligonucleotide
  Sense strand starting at position 239 of SEQ ID NO: 1883956
uuugcugccucgcuggaaa

SEQ ID NO: 2229067 - RNA, 19 nt, Artificial Sequence
  Description of Artificial Sequence: Synthetic oligonucleotide
  Antisense strand to SEQ ID NO: 2229066
uuuccagcgaggcagcaaa

SEQ ID NO: 2229068 - RNA, 19 nt, Artificial Sequence
  Description of Artificial Sequence: Synthetic oligonucleotide
  Sense strand starting at position 282 of SEQ ID NO: 1883956
cuugcaaagucuuuaagua

SEQ ID NO: 2229069 - RNA, 19 nt, Artificial Sequence
  Description of Artificial Sequence: Synthetic oligonucleotide
  Antisense strand to SEQ ID NO: 2229068
uacuuaaagacuuugcaag

SEQ ID NO: 2229070 - RNA, 19 nt, Artificial Sequence
  Description of Artificial Sequence: Synthetic oligonucleotide
  Sense strand starting at position 283 of SEQ ID NO: 1883956
uugcaaagucuuuaaguaa

SEQ ID NO: 2229071 - RNA, 19 nt, Artificial Sequence
  Description of Artificial Sequence: Synthetic oligonucleotide
  Antisense strand to SEQ ID NO: 2229070
uuacuuaaagacuuugcaa

SEQ ID NO: 2229072 - RNA, 19 nt, Artificial Sequence
  Description of Artificial Sequence: Synthetic oligonucleotide
  Sense strand starting at position 917 of SEQ ID NO: 1883956
gcgggaugcuugcucccaa

SEQ ID NO: 2229073 - RNA, 19 nt, Artificial Sequence
  Description of Artificial Sequence: Synthetic oligonucleotide
  Antisense strand to SEQ ID NO: 2229072
uugggagcaagcaucccgc

SEQ ID NO: 2229074 - RNA, 19 nt, Artificial Sequence
  Description of Artificial Sequence: Synthetic oligonucleotide
  Sense strand starting at position 1598 of SEQ ID NO: 1883956
ccaauuacccacugucagu

SEQ ID NO: 2229075 - RNA, 19 nt, Artificial Sequence
  Description of Artificial Sequence: Synthetic oligonucleotide
  Antisense strand to SEQ ID NO: 2229074
acugacaguggguaauugg

SEQ ID NO: 2229076 - RNA, 19 nt, Artificial Sequence
  Description of Artificial Sequence: Synthetic oligonucleotide
  Sense strand starting at position 1641 of SEQ ID NO: 1883956
ggaauuaaaugcuaaauac

SEQ ID NO: 2229077 - RNA, 19 nt, Artificial Sequence
  Description of Artificial Sequence: Synthetic oligonucleotide
  Antisense strand to SEQ ID NO: 2229076
guauuuagcauuuaauucc

SEQ ID NO: 2229078 - RNA, 19 nt, Artificial Sequence
  Description of Artificial Sequence: Synthetic oligonucleotide
  Sense strand starting at position 1673 of SEQ ID NO: 1883956
gcuccauuacccgggacau

SEQ ID NO: 2229079 - RNA, 19 nt, Artificial Sequence
  Description of Artificial Sequence: Synthetic oligonucleotide
  Antisense strand to SEQ ID NO: 2229078
augucccggguaauggagc

SEQ ID NO: 2229080 - RNA, 19 nt, Artificial Sequence
  Description of Artificial Sequence: Synthetic oligonucleotide
  Sense strand starting at position 1813 of SEQ ID NO: 1883956
cuuggugcucgcgauugaa

SEQ ID NO: 2229081 - RNA, 19 nt, Artificial Sequence
  Description of Artificial Sequence: Synthetic oligonucleotide
  Antisense strand to SEQ ID NO: 2229080
uucaaucgcgagcaccaag

SEQ ID NO: 2229082 - RNA, 19 nt, Artificial Sequence
  Description of Artificial Sequence: Synthetic oligonucleotide
  Sense strand starting at position 1815 of SEQ ID NO: 1883956
uggugcucgcgauugaauu

SEQ ID NO: 2229083 - RNA, 19 nt, Artificial Sequence
  Description of Artificial Sequence: Synthetic oligonucleotide
  Antisense strand to SEQ ID NO: 2229082
aauucaaucgcgagcacca

SEQ ID NO: 2229084 - RNA, 19 nt, Artificial Sequence
  Description of Artificial Sequence: Synthetic oligonucleotide
  Sense strand starting at position 1816 of SEQ ID NO: 1883956
ggugcucgcgauugaauuu

SEQ ID NO: 2229085 - RNA, 19 nt, Artificial Sequence
  Description of Artificial Sequence: Synthetic oligonucleotide
  Antisense strand to SEQ ID NO: 2229084
aaauucaaucgcgagcacc

SEQ ID NO: 2229086 - RNA, 19 nt, Artificial Sequence
  Description of Artificial Sequence: Synthetic oligonucleotide
  Sense strand starting at position 1817 of SEQ ID NO: 1883956
gugcucgcgauugaauuua

SEQ ID NO: 2229087 - RNA, 19 nt, Artificial Sequence
  Description of Artificial Sequence: Synthetic oligonucleotide
  Antisense strand to SEQ ID NO: 2229086
uaaauucaaucgcgagcac

SEQ ID NO: 2229088 - RNA, 19 nt, Artificial Sequence
  Description of Artificial Sequence: Synthetic oligonucleotide
  Sense strand starting at position 1933 of SEQ ID NO: 1883956
uucuuagccucagaaguca

SEQ ID NO: 2229089 - RNA, 19 nt, Artificial Sequence
  Description of Artificial Sequence: Synthetic oligonucleotide
  Antisense strand to SEQ ID NO: 2229088
ugacuucugaggcuaagaa

SEQ ID NO: 2229090 - RNA, 19 nt, Artificial Sequence
  Description of Artificial Sequence: Synthetic oligonucleotide
  Sense strand starting at position 2098 of SEQ ID NO: 1883956
ucgauugacgcgcggagaa

SEQ ID NO: 2229091 - RNA, 19 nt, Artificial Sequence
  Description of Artificial Sequence: Synthetic oligonucleotide
  Antisense strand to SEQ ID NO: 2229090
uucuccgcgcgucaaucga

SEQ ID NO: 2229092 - RNA, 19 nt, Artificial Sequence
  Description of Artificial Sequence: Synthetic oligonucleotide
  Sense strand starting at position 2190 of SEQ ID NO: 1883956
auucguuucuccuuguuua

SEQ ID NO: 2229093 - RNA, 19 nt, Artificial Sequence
  Description of Artificial Sequence: Synthetic oligonucleotide
  Antisense strand to SEQ ID NO: 2229092
uaaacaaggagaaacgaau

SEQ ID NO: 2229094 - RNA, 19 nt, Artificial Sequence
  Description of Artificial Sequence: Synthetic oligonucleotide
  Sense strand starting at position 2191 of SEQ ID NO: 1883956
uucguuucuccuuguuuau

SEQ ID NO: 2229095 - RNA, 19 nt, Artificial Sequence
  Description of Artificial Sequence: Synthetic oligonucleotide
  Antisense strand to SEQ ID NO: 2229094
auaaacaaggagaaacgaa

SEQ ID NO: 2229096 - RNA, 19 nt, Artificial Sequence
  Description of Artificial Sequence: Synthetic oligonucleotide
  Sense strand starting at position 2201 of SEQ ID NO: 1883956
cuuguuuauggagagguuu

SEQ ID NO: 2229097 - RNA, 19 nt, Artificial Sequence
  Description of Artificial Sequence: Synthetic oligonucleotide
  Antisense strand to SEQ ID NO: 2229096
aaaccucuccauaaacaag

SEQ ID NO: 2229098 - RNA, 19 nt, Artificial Sequence
  Description of Artificial Sequence: Synthetic oligonucleotide
  Sense strand starting at position 2212 of SEQ ID NO: 1883956
agagguuuccggugaaugu

SEQ ID NO: 2229099 - RNA, 19 nt, Artificial Sequence
  Description of Artificial Sequence: Synthetic oligonucleotide
  Antisense strand to SEQ ID NO: 2229098
acauucaccggaaaccucu

SEQ ID NO: 2229100 - RNA, 19 nt, Artificial Sequence
  Description of Artificial Sequence: Synthetic oligonucleotide
  Sense strand starting at position 2213 of SEQ ID NO: 1883956
gagguuuccggugaauguu

SEQ ID NO: 2229101 - RNA, 19 nt, Artificial Sequence
  Description of Artificial Sequence: Synthetic oligonucleotide
  Antisense strand to SEQ ID NO: 2229100
aacauucaccggaaaccuc

SEQ ID NO: 2229102 - RNA, 19 nt, Artificial Sequence
  Description of Artificial Sequence: Synthetic oligonucleotide
  Sense strand starting at position 2216 of SEQ ID NO: 1883956
guuuccggugaauguuaga

SEQ ID NO: 2229103 - RNA, 19 nt, Artificial Sequence
  Description of Artificial Sequence: Synthetic oligonucleotide
  Antisense strand to SEQ ID NO: 2229102
ucuaacauucaccggaaac

SEQ ID NO: 2229104 - RNA, 19 nt, Artificial Sequence
  Description of Artificial Sequence: Synthetic oligonucleotide
  Sense strand starting at position 2221 of SEQ ID NO: 1883956
cggugaauguuagacagca

SEQ ID NO: 2229105 - RNA, 19 nt, Artificial Sequence
  Description of Artificial Sequence: Synthetic oligonucleotide
  Antisense strand to SEQ ID NO: 2229104
ugcugucuaacauucaccg

SEQ ID NO: 2229106 - RNA, 19 nt, Artificial Sequence
  Description of Artificial Sequence: Synthetic oligonucleotide
  Sense strand starting at position 2223 of SEQ ID NO: 1883956
gugaauguuagacagcaac

SEQ ID NO: 2229107 - RNA, 19 nt, Artificial Sequence
  Description of Artificial Sequence: Synthetic oligonucleotide
  Antisense strand to SEQ ID NO: 2229106
guugcugucuaacauucac

SEQ ID NO: 2229108 - RNA, 19 nt, Artificial Sequence
  Description of Artificial Sequence: Synthetic oligonucleotide
  Sense strand starting at position 2309 of SEQ ID NO: 1883956
agagacgaguggucagaga

SEQ ID NO: 2229109 - RNA, 19 nt, Artificial Sequence
  Description of Artificial Sequence: Synthetic oligonucleotide
  Antisense strand to SEQ ID NO: 2229108
ucucugaccacucgucucu

SEQ ID NO: 2229110 - RNA, 19 nt, Artificial Sequence
  Description of Artificial Sequence: Synthetic oligonucleotide
  Sense strand starting at position 2448 of SEQ ID NO: 1883956
uguccuauauauggaaauu

SEQ ID NO: 2229111 - RNA, 19 nt, Artificial Sequence
  Description of Artificial Sequence: Synthetic oligonucleotide
  Antisense strand to SEQ ID NO: 2229110
aauuuccauauauaggaca

SEQ ID NO: 2229112 - RNA, 19 nt, Artificial Sequence
  Description of Artificial Sequence: Synthetic oligonucleotide
  Sense strand starting at position 2527 of SEQ ID NO: 1883956
acgcgagaccaggaagauu

SEQ ID NO: 2229113 - RNA, 19 nt, Artificial Sequence
  Description of Artificial Sequence: Synthetic oligonucleotide
  Antisense strand to SEQ ID NO: 2229112
aaucuuccuggucucgcgu

SEQ ID NO: 2229114 - RNA, 19 nt, Artificial Sequence
  Description of Artificial Sequence: Synthetic oligonucleotide
  Sense strand starting at position 2581 of SEQ ID NO: 1883956
aucuuucuacagggauagu

SEQ ID NO: 2229115 - RNA, 19 nt, Artificial Sequence
  Description of Artificial Sequence: Synthetic oligonucleotide
  Antisense strand to SEQ ID NO: 2229114
acuaucccuguagaaagau

SEQ ID NO: 2229116 - RNA, 19 nt, Artificial Sequence
  Description of Artificial Sequence: Synthetic oligonucleotide
  Sense strand starting at position 2631 of SEQ ID NO: 1883956
ggugaaguugaauauuguu

SEQ ID NO: 2229117 - RNA, 19 nt, Artificial Sequence
  Description of Artificial Sequence: Synthetic oligonucleotide
  Antisense strand to SEQ ID NO: 2229116
aacaauauucaacuucacc

SEQ ID NO: 2229118 - RNA, 19 nt, Artificial Sequence
  Description of Artificial Sequence: Synthetic oligonucleotide
  Sense strand starting at position 2701 of SEQ ID NO: 1883956
ggcuucuucuaucucgaau

SEQ ID NO: 2229119 - RNA, 19 nt, Artificial Sequence
  Description of Artificial Sequence: Synthetic oligonucleotide
  Antisense strand to SEQ ID NO: 2229118
auucgagauagaagaagcc

SEQ ID NO: 2229120 - RNA, 19 nt, Artificial Sequence
  Description of Artificial Sequence: Synthetic oligonucleotide
  Sense strand starting at position 2722 of SEQ ID NO: 1883956
uugcauuuguagggaauuu

SEQ ID NO: 2229121 - RNA, 19 nt, Artificial Sequence
  Description of Artificial Sequence: Synthetic oligonucleotide
  Antisense strand to SEQ ID NO: 2229120
aaauucccuacaaaugcaa

SEQ ID NO: 2229122 - RNA, 19 nt, Artificial Sequence
  Description of Artificial Sequence: Synthetic oligonucleotide
  Sense strand starting at position 2761 of SEQ ID NO: 1883956
agggaacaaugucuccaau

SEQ ID NO: 2229123 - RNA, 19 nt, Artificial Sequence
  Description of Artificial Sequence: Synthetic oligonucleotide
  Antisense strand to SEQ ID NO: 2229122
auuggagacauuguucccu

SEQ ID NO: 2229124 - RNA, 19 nt, Artificial Sequence
  Description of Artificial Sequence: Synthetic oligonucleotide
  Sense strand starting at position 2763 of SEQ ID NO: 1883956
ggaacaaugucuccaauuc

SEQ ID NO: 2229125 - RNA, 19 nt, Artificial Sequence
  Description of Artificial Sequence: Synthetic oligonucleotide
  Antisense strand to SEQ ID NO: 2229124
gaauuggagacauuguucc

SEQ ID NO: 2229126 - RNA, 19 nt, Artificial Sequence
  Description of Artificial Sequence: Synthetic oligonucleotide
  Sense strand starting at position 3249 of SEQ ID NO: 1883956
uuuccuugacugugggaga

SEQ ID NO: 2229127 - RNA, 19 nt, Artificial Sequence
  Description of Artificial Sequence: Synthetic oligonucleotide
  Antisense strand to SEQ ID NO: 2229126
ucucccacagucaaggaaa

SEQ ID NO: 2229128 - RNA, 19 nt, Artificial Sequence
  Description of Artificial Sequence: Synthetic oligonucleotide
  Sense strand starting at position 3250 of SEQ ID NO: 1883956
uuccuugacugugggagaa

SEQ ID NO: 2229129 - RNA, 19 nt, Artificial Sequence
  Description of Artificial Sequence: Synthetic oligonucleotide
  Antisense strand to SEQ ID NO: 2229128
uucucccacagucaaggaa

SEQ ID NO: 2229130 - RNA, 19 nt, Artificial Sequence
  Description of Artificial Sequence: Synthetic oligonucleotide
  Sense strand starting at position 3314 of SEQ ID NO: 1883956
aaaguugggucccuagagu

SEQ ID NO: 2229131 - RNA, 19 nt, Artificial Sequence
  Description of Artificial Sequence: Synthetic oligonucleotide
  Antisense strand to SEQ ID NO: 2229130
acucuagggacccaacuuu

SEQ ID NO: 2229132 - RNA, 19 nt, Artificial Sequence
  Description of Artificial Sequence: Synthetic oligonucleotide
  Sense strand starting at position 3341 of SEQ ID NO: 1883956
aguucuuucuguccgucua

SEQ ID NO: 2229133 - RNA, 19 nt, Artificial Sequence
  Description of Artificial Sequence: Synthetic oligonucleotide
  Antisense strand to SEQ ID NO: 2229132
uagacggacagaaagaacu

SEQ ID NO: 2229134 - RNA, 19 nt, Artificial Sequence
  Description of Artificial Sequence: Synthetic oligonucleotide
  Sense strand starting at position 3464 of SEQ ID NO: 1883956
aauauuaggucuggaaagg

SEQ ID NO: 2229135 - RNA, 19 nt, Artificial Sequence
  Description of Artificial Sequence: Synthetic oligonucleotide
  Antisense strand to SEQ ID NO: 2229134
ccuuuccagaccuaauauu

SEQ ID NO: 2229136 - RNA, 19 nt, Artificial Sequence
  Description of Artificial Sequence: Synthetic oligonucleotide
  Sense strand starting at position 3526 of SEQ ID NO: 1883956
gcgcagaaggcucgggaaa

SEQ ID NO: 2229137 - RNA, 19 nt, Artificial Sequence
  Description of Artificial Sequence: Synthetic oligonucleotide
  Antisense strand to SEQ ID NO: 2229136
uuucccgagccuucugcgc

SEQ ID NO: 2229138 - RNA, 19 nt, Artificial Sequence
  Description of Artificial Sequence: Synthetic oligonucleotide
  Sense strand starting at position 3528 of SEQ ID NO: 1883956
gcagaaggcucgggaaaga

SEQ ID NO: 2229139 - RNA, 19 nt, Artificial Sequence
  Description of Artificial Sequence: Synthetic oligonucleotide
  Antisense strand to SEQ ID NO: 2229138
ucuuucccgagccuucugc

SEQ ID NO: 2229140 - RNA, 19 nt, Artificial Sequence
  Description of Artificial Sequence: Synthetic oligonucleotide
  Sense strand starting at position 3537 of SEQ ID NO: 1883956
ucgggaaagaggugacaau

SEQ ID NO: 2229141 - RNA, 19 nt, Artificial Sequence
  Description of Artificial Sequence: Synthetic oligonucleotide
  Antisense strand to SEQ ID NO: 2229140
auugucaccucuuucccga

SEQ ID NO: 2229142 - RNA, 19 nt, Artificial Sequence
  Description of Artificial Sequence: Synthetic oligonucleotide
  Sense strand starting at position 3597 of SEQ ID NO: 1883956
cccuuuauccgaugacuca

SEQ ID NO: 2229143 - RNA, 19 nt, Artificial Sequence
  Description of Artificial Sequence: Synthetic oligonucleotide
  Antisense strand to SEQ ID NO: 2229142
ugagucaucggauaaaggg

SEQ ID NO: 2229144 - RNA, 19 nt, Artificial Sequence
  Description of Artificial Sequence: Synthetic oligonucleotide
  Sense strand starting at position 1 of SEQ ID NO: 1883955
gauugaucgagcuggaaug

SEQ ID NO: 2229145 - RNA, 19 nt, Artificial Sequence
  Description of Artificial Sequence: Synthetic oligonucleotide
  Antisense strand to SEQ ID NO: 2229144
cauuccagcucgaucaauc

SEQ ID NO: 2229146 - RNA, 19 nt, Artificial Sequence
  Description of Artificial Sequence: Synthetic oligonucleotide
  Sense strand starting at position 114 of SEQ ID NO: 1883955
cgcagauucccggcuucuu

SEQ ID NO: 2229147 - RNA, 19 nt, Artificial Sequence
  Description of Artificial Sequence: Synthetic oligonucleotide
  Antisense strand to SEQ ID NO: 2229146
aagaagccgggaaucugcg

SEQ ID NO: 2229148 - RNA, 19 nt, Artificial Sequence
  Description of Artificial Sequence: Synthetic oligonucleotide
  Sense strand starting at position 243 of SEQ ID NO: 1883955
uuugcugccucgcuggaaa

SEQ ID NO: 2229149 - RNA, 19 nt, Artificial Sequence
  Description of Artificial Sequence: Synthetic oligonucleotide
  Antisense strand to SEQ ID NO: 2229148
uuuccagcgaggcagcaaa

SEQ ID NO: 2229150 - RNA, 19 nt, Artificial Sequence
  Description of Artificial Sequence: Synthetic oligonucleotide
  Sense strand starting at position 286 of SEQ ID NO: 1883955
cuugcaaagucuuuaagua

SEQ ID NO: 2229151 - RNA, 19 nt, Artificial Sequence
  Description of Artificial Sequence: Synthetic oligonucleotide
  Antisense strand to SEQ ID NO: 2229150
uacuuaaagacuuugcaag

SEQ ID NO: 2229152 - RNA, 19 nt, Artificial Sequence
  Description of Artificial Sequence: Synthetic oligonucleotide
  Sense strand starting at position 287 of SEQ ID NO: 1883955
uugcaaagucuuuaaguaa

SEQ ID NO: 2229153 - RNA, 19 nt, Artificial Sequence
  Description of Artificial Sequence: Synthetic oligonucleotide
  Antisense strand to SEQ ID NO: 2229152
uuacuuaaagacuuugcaa

SEQ ID NO: 2229154 - RNA, 19 nt, Artificial Sequence
  Description of Artificial Sequence: Synthetic oligonucleotide
  Sense strand starting at position 921 of SEQ ID NO: 1883955
gcgggaugcuugcucccaa

SEQ ID NO: 2229155 - RNA, 19 nt, Artificial Sequence
  Description of Artificial Sequence: Synthetic oligonucleotide
  Antisense strand to SEQ ID NO: 2229154
uugggagcaagcaucccgc

SEQ ID NO: 2229156 - RNA, 19 nt, Artificial Sequence
  Description of Artificial Sequence: Synthetic oligonucleotide
  Sense strand starting at position 1602 of SEQ ID NO: 1883955
ccaauuacccacugucagu

SEQ ID NO: 2229157 - RNA, 19 nt, Artificial Sequence
  Description of Artificial Sequence: Synthetic oligonucleotide
  Antisense strand to SEQ ID NO: 2229156
acugacaguggguaauugg

SEQ ID NO: 2229158 - RNA, 19 nt, Artificial Sequence
  Description of Artificial Sequence: Synthetic oligonucleotide
  Sense strand starting at position 1645 of SEQ ID NO: 1883955
ggaauuaaaugcuaaauac

SEQ ID NO: 2229159 - RNA, 19 nt, Artificial Sequence
  Description of Artificial Sequence: Synthetic oligonucleotide
  Antisense strand to SEQ ID NO: 2229158
guauuuagcauuuaauucc

SEQ ID NO: 2229160 - RNA, 19 nt, Artificial Sequence
  Description of Artificial Sequence: Synthetic oligonucleotide
  Sense strand starting at position 1677 of SEQ ID NO: 1883955
gcuccauuacccgggacau

SEQ ID NO: 2229161 - RNA, 19 nt, Artificial Sequence
  Description of Artificial Sequence: Synthetic oligonucleotide
  Antisense strand to SEQ ID NO: 2229160
augucccggguaauggagc

SEQ ID NO: 2229162 - RNA, 19 nt, Artificial Sequence
  Description of Artificial Sequence: Synthetic oligonucleotide
  Sense strand starting at position 1817 of SEQ ID NO: 1883955
cuuggugcucgcgauugaa

SEQ ID NO: 2229163 - RNA, 19 nt, Artificial Sequence
  Description of Artificial Sequence: Synthetic oligonucleotide
  Antisense strand to SEQ ID NO: 2229162
uucaaucgcgagcaccaag

SEQ ID NO: 2229164 - RNA, 19 nt, Artificial Sequence
  Description of Artificial Sequence: Synthetic oligonucleotide
  Sense strand starting at position 1819 of SEQ ID NO: 1883955
uggugcucgcgauugaauu

SEQ ID NO: 2229165 - RNA, 19 nt, Artificial Sequence
  Description of Artificial Sequence: Synthetic oligonucleotide
  Antisense strand to SEQ ID NO: 2229164
aauucaaucgcgagcacca

SEQ ID NO: 2229166 - RNA, 19 nt, Artificial Sequence
  Description of Artificial Sequence: Synthetic oligonucleotide
  Sense strand starting at position 1820 of SEQ ID NO: 1883955
ggugcucgcgauugaauuu

SEQ ID NO: 2229167 - RNA, 19 nt, Artificial Sequence
  Description of Artificial Sequence: Synthetic oligonucleotide
  Antisense strand to SEQ ID NO: 2229166
aaauucaaucgcgagcacc

SEQ ID NO: 2229168 - RNA, 19 nt, Artificial Sequence
  Description of Artificial Sequence: Synthetic oligonucleotide
  Sense strand starting at position 1821 of SEQ ID NO: 1883955
gugcucgcgauugaauuua

SEQ ID NO: 2229169 - RNA, 19 nt, Artificial Sequence
  Description of Artificial Sequence: Synthetic oligonucleotide
  Antisense strand to SEQ ID NO: 2229168
uaaauucaaucgcgagcac

SEQ ID NO: 2229170 - RNA, 19 nt, Artificial Sequence
  Description of Artificial Sequence: Synthetic oligonucleotide
  Sense strand starting at position 1937 of SEQ ID NO: 1883955
uucuuagccucagaaguca

SEQ ID NO: 2229171 - RNA, 19 nt, Artificial Sequence
  Description of Artificial Sequence: Synthetic oligonucleotide
  Antisense strand to SEQ ID NO: 2229170
ugacuucugaggcuaagaa

SEQ ID NO: 2229172 - RNA, 19 nt, Artificial Sequence
  Description of Artificial Sequence: Synthetic oligonucleotide
  Sense strand starting at position 2102 of SEQ ID NO: 1883955
ucgauugacgcgcggagaa

SEQ ID NO: 2229173 - RNA, 19 nt, Artificial Sequence
  Description of Artificial Sequence: Synthetic oligonucleotide
  Antisense strand to SEQ ID NO: 2229172
uucuccgcgcgucaaucga

SEQ ID NO: 2229174 - RNA, 19 nt, Artificial Sequence
  Description of Artificial Sequence: Synthetic oligonucleotide
  Sense strand starting at position 2194 of SEQ ID NO: 1883955
auucguuucuccuuguuua

SEQ ID NO: 2229175 - RNA, 19 nt, Artificial Sequence
  Description of Artificial Sequence: Synthetic oligonucleotide
  Antisense strand to SEQ ID NO: 2229174
uaaacaaggagaaacgaau

SEQ ID NO: 2229176 - RNA, 19 nt, Artificial Sequence
  Description of Artificial Sequence: Synthetic oligonucleotide
  Sense strand starting at position 2195 of SEQ ID NO: 1883955
uucguuucuccuuguuuau

SEQ ID NO: 2229177 - RNA, 19 nt, Artificial Sequence
  Description of Artificial Sequence: Synthetic oligonucleotide
  Antisense strand to SEQ ID NO: 2229176
auaaacaaggagaaacgaa

SEQ ID NO: 2229178 - RNA, 19 nt, Artificial Sequence
  Description of Artificial Sequence: Synthetic oligonucleotide
  Sense strand starting at position 2205 of SEQ ID NO: 1883955
cuuguuuauggagagguuu

SEQ ID NO: 2229179 - RNA, 19 nt, Artificial Sequence
  Description of Artificial Sequence: Synthetic oligonucleotide
  Antisense strand to SEQ ID NO: 2229178
aaaccucuccauaaacaag

SEQ ID NO: 2229180 - RNA, 19 nt, Artificial Sequence
  Description of Artificial Sequence: Synthetic oligonucleotide
  Sense strand starting at position 2216 of SEQ ID NO: 1883955
agagguuuccggugaaugu

SEQ ID NO: 2229181 - RNA, 19 nt, Artificial Sequence
  Description of Artificial Sequence: Synthetic oligonucleotide
  Antisense strand to SEQ ID NO: 2229180
acauucaccggaaaccucu

SEQ ID NO: 2229182 - RNA, 19 nt, Artificial Sequence
  Description of Artificial Sequence: Synthetic oligonucleotide
  Sense strand starting at position 2217 of SEQ ID NO: 1883955
gagguuuccggugaauguu

SEQ ID NO: 2229183 - RNA, 19 nt, Artificial Sequence
  Description of Artificial Sequence: Synthetic oligonucleotide
  Antisense strand to SEQ ID NO: 2229182
aacauucaccggaaaccuc

SEQ ID NO: 2229184 - RNA, 19 nt, Artificial Sequence
  Description of Artificial Sequence: Synthetic oligonucleotide
  Sense strand starting at position 2220 of SEQ ID NO: 1883955
guuuccggugaauguuaga

SEQ ID NO: 2229185 - RNA, 19 nt, Artificial Sequence
  Description of Artificial Sequence: Synthetic oligonucleotide
  Antisense strand to SEQ ID NO: 2229184
ucuaacauucaccggaaac

SEQ ID NO: 2229186 - RNA, 19 nt, Artificial Sequence
  Description of Artificial Sequence: Synthetic oligonucleotide
  Sense strand starting at position 2227 of SEQ ID NO: 1883955
gugaauguuagacagcaac

SEQ ID NO: 2229187 - RNA, 19 nt, Artificial Sequence
  Description of Artificial Sequence: Synthetic oligonucleotide
  Antisense strand to SEQ ID NO: 2229186
guugcugucuaacauucac

SEQ ID NO: 2229188 - RNA, 19 nt, Artificial Sequence
  Description of Artificial Sequence: Synthetic oligonucleotide
  Sense strand starting at position 2313 of SEQ ID NO: 1883955
agagacgaguggucagaga

SEQ ID NO: 2229189 - RNA, 19 nt, Artificial Sequence
  Description of Artificial Sequence: Synthetic oligonucleotide
  Antisense strand to SEQ ID NO: 2229188
ucucugaccacucgucucu

SEQ ID NO: 2229190 - RNA, 19 nt, Artificial Sequence
  Description of Artificial Sequence: Synthetic oligonucleotide
  Sense strand starting at position 2452 of SEQ ID NO: 1883955
uguccuauauauggaaauu

SEQ ID NO: 2229191 - RNA, 19 nt, Artificial Sequence
  Description of Artificial Sequence: Synthetic oligonucleotide
  Antisense strand to SEQ ID NO: 2229190
aauuuccauauauaggaca

SEQ ID NO: 2229192 - RNA, 19 nt, Artificial Sequence
  Description of Artificial Sequence: Synthetic oligonucleotide
  Sense strand starting at position 2531 of SEQ ID NO: 1883955
acgcgagaccaggaagauu

SEQ ID NO: 2229193 - RNA, 19 nt, Artificial Sequence
  Description of Artificial Sequence: Synthetic oligonucleotide
  Antisense strand to SEQ ID NO: 2229192
aaucuuccuggucucgcgu

SEQ ID NO: 2229194 - RNA, 19 nt, Artificial Sequence
  Description of Artificial Sequence: Synthetic oligonucleotide
  Sense strand starting at position 2585 of SEQ ID NO: 1883955
aucuuucuacagggauagu

SEQ ID NO: 2229195 - RNA, 19 nt, Artificial Sequence
  Description of Artificial Sequence: Synthetic oligonucleotide
  Antisense strand to SEQ ID NO: 2229194
acuaucccuguagaaagau

SEQ ID NO: 2229196 - RNA, 19 nt, Artificial Sequence
  Description of Artificial Sequence: Synthetic oligonucleotide
  Sense strand starting at position 2635 of SEQ ID NO: 1883955
ggugaaguugaauauuguu

SEQ ID NO: 2229197 - RNA, 19 nt, Artificial Sequence
  Description of Artificial Sequence: Synthetic oligonucleotide
  Antisense strand to SEQ ID NO: 2229196
aacaauauucaacuucacc

SEQ ID NO: 2229198 - RNA, 19 nt, Artificial Sequence
  Description of Artificial Sequence: Synthetic oligonucleotide
  Sense strand starting at position 2705 of SEQ ID NO: 1883955
ggcuucuucuaucucgaau

SEQ ID NO: 2229199 - RNA, 19 nt, Artificial Sequence
  Description of Artificial Sequence: Synthetic oligonucleotide
  Antisense strand to SEQ ID NO: 2229198
auucgagauagaagaagcc

SEQ ID NO: 2229200 - RNA, 19 nt, Artificial Sequence
  Description of Artificial Sequence: Synthetic oligonucleotide
  Sense strand starting at position 2726 of SEQ ID NO: 1883955
uugcauuuguagggaauuu

SEQ ID NO: 2229201 - RNA, 19 nt, Artificial Sequence
  Description of Artificial Sequence: Synthetic oligonucleotide
  Antisense strand to SEQ ID NO: 2229200
aaauucccuacaaaugcaa

SEQ ID NO: 2229202 - RNA, 19 nt, Artificial Sequence
  Description of Artificial Sequence: Synthetic oligonucleotide
  Sense strand starting at position 2765 of SEQ ID NO: 1883955
agggaacaaugucuccaau

SEQ ID NO: 2229203 - RNA, 19 nt, Artificial Sequence
  Description of Artificial Sequence: Synthetic oligonucleotide
  Antisense strand to SEQ ID NO: 2229202
auuggagacauuguucccu

SEQ ID NO: 2229204 - RNA, 19 nt, Artificial Sequence
  Description of Artificial Sequence: Synthetic oligonucleotide
  Sense strand starting at position 2767 of SEQ ID NO: 1883955
ggaacaaugucuccaauuc

SEQ ID NO: 2229205 - RNA, 19 nt, Artificial Sequence
  Description of Artificial Sequence: Synthetic oligonucleotide
  Antisense strand to SEQ ID NO: 2229204
gaauuggagacauuguucc

SEQ ID NO: 2229206 - RNA, 19 nt, Artificial Sequence
  Description of Artificial Sequence: Synthetic oligonucleotide
  Sense strand starting at position 3253 of SEQ ID NO: 1883955
uuuccuugacugugggaga

SEQ ID NO: 2229207 - RNA, 19 nt, Artificial Sequence
  Description of Artificial Sequence: Synthetic oligonucleotide
  Antisense strand to SEQ ID NO: 2229206
ucucccacagucaaggaaa

SEQ ID NO: 2229208 - RNA, 19 nt, Artificial Sequence
  Description of Artificial Sequence: Synthetic oligonucleotide
  Sense strand starting at position 3254 of SEQ ID NO: 1883955
uuccuugacugugggagaa

SEQ ID NO: 2229209 - RNA, 19 nt, Artificial Sequence
  Description of Artificial Sequence: Synthetic oligonucleotide
  Antisense strand to SEQ ID NO: 2229208
uucucccacagucaaggaa

SEQ ID NO: 2229210 - RNA, 19 nt, Artificial Sequence
  Description of Artificial Sequence: Synthetic oligonucleotide
  Sense strand starting at position 3318 of SEQ ID NO: 1883955
aaaguugggucccuagagu

SEQ ID NO: 2229211 - RNA, 19 nt, Artificial Sequence
  Description of Artificial Sequence: Synthetic oligonucleotide
  Antisense strand to SEQ ID NO: 2229210
acucuagggacccaacuuu

SEQ ID NO: 2229212 - RNA, 19 nt, Artificial Sequence
  Description of Artificial Sequence: Synthetic oligonucleotide
  Sense strand starting at position 3345 of SEQ ID NO: 1883955
aguucuuucuguccgucua

SEQ ID NO: 2229213 - RNA, 19 nt, Artificial Sequence
  Description of Artificial Sequence: Synthetic oligonucleotide
  Antisense strand to SEQ ID NO: 2229212
uagacggacagaaagaacu

SEQ ID NO: 2229214 - RNA, 19 nt, Artificial Sequence
  Description of Artificial Sequence: Synthetic oligonucleotide
  Sense strand starting at position 3468 of SEQ ID NO: 1883955
aauauuaggucuggaaagg

SEQ ID NO: 2229215 - RNA, 19 nt, Artificial Sequence
  Description of Artificial Sequence: Synthetic oligonucleotide
  Antisense strand to SEQ ID NO: 2229214
ccuuuccagaccuaauauu

SEQ ID NO: 2229216 - RNA, 19 nt, Artificial Sequence
  Description of Artificial Sequence: Synthetic oligonucleotide
  Sense strand starting at position 3530 of SEQ ID NO: 1883955
gcgcagaaggcucgggaaa

SEQ ID NO: 2229217 - RNA, 19 nt, Artificial Sequence
  Description of Artificial Sequence: Synthetic oligonucleotide
  Antisense strand to SEQ ID NO: 2229216
uuucccgagccuucugcgc

SEQ ID NO: 2229218 - RNA, 19 nt, Artificial Sequence
  Description of Artificial Sequence: Synthetic oligonucleotide
  Sense strand starting at position 3532 of SEQ ID NO: 1883955
gcagaaggcucgggaaaga

SEQ ID NO: 2229219 - RNA, 19 nt, Artificial Sequence
  Description of Artificial Sequence: Synthetic oligonucleotide
  Antisense strand to SEQ ID NO: 2229218
ucuuucccgagccuucugc

SEQ ID NO: 2229220 - RNA, 19 nt, Artificial Sequence
  Description of Artificial Sequence: Synthetic oligonucleotide
  Sense strand starting at position 3541 of SEQ ID NO: 1883955
ucgggaaagaggugacaau

SEQ ID NO: 2229221 - RNA, 19 nt, Artificial Sequence
  Description of Artificial Sequence: Synthetic oligonucleotide
  Antisense strand to SEQ ID NO: 2229220
auugucaccucuuucccga

SEQ ID NO: 2229222 - RNA, 19 nt, Artificial Sequence
  Description of Artificial Sequence: Synthetic oligonucleotide
  Sense strand starting at position 3601 of SEQ ID NO: 1883955
cccuuuauccgaugacuca

SEQ ID NO: 2229223 - RNA, 19 nt, Artificial Sequence
  Description of Artificial Sequence: Synthetic oligonucleotide
  Antisense strand to SEQ ID NO: 2229222
ugagucaucggauaaaggg

SEQ ID NO: 2229224 - RNA, 19 nt, Artificial Sequence
  Description of Artificial Sequence: Synthetic oligonucleotide
  Sense strand starting at position 149 of SEQ ID NO: 1883957
ggcugcuccuugggaggaa

SEQ ID NO: 2229225 - RNA, 19 nt, Artificial Sequence
  Description of Artificial Sequence: Synthetic oligonucleotide
  Antisense strand to SEQ ID NO: 2229224
uuccucccaaggagcagcc

SEQ ID NO: 2229226 - RNA, 19 nt, Artificial Sequence
  Description of Artificial Sequence: Synthetic oligonucleotide
  Sense strand starting at position 671 of SEQ ID NO: 1883957
ccaauuacccacugucagu

SEQ ID NO: 2229227 - RNA, 19 nt, Artificial Sequence
  Description of Artificial Sequence: Synthetic oligonucleotide
  Antisense strand to SEQ ID NO: 2229226
acugacaguggguaauugg

SEQ ID NO: 2229228 - RNA, 19 nt, Artificial Sequence
  Description of Artificial Sequence: Synthetic oligonucleotide
  Sense strand starting at position 714 of SEQ ID NO: 1883957
ggaauuaaaugcuaaauac

SEQ ID NO: 2229229 - RNA, 19 nt, Artificial Sequence
  Description of Artificial Sequence: Synthetic oligonucleotide
  Antisense strand to SEQ ID NO: 2229228
guauuuagcauuuaauucc

SEQ ID NO: 2229230 - RNA, 19 nt, Artificial Sequence
  Description of Artificial Sequence: Synthetic oligonucleotide
  Sense strand starting at position 746 of SEQ ID NO: 1883957
gcuccauuacccgggacau

SEQ ID NO: 2229231 - RNA, 19 nt, Artificial Sequence
  Description of Artificial Sequence: Synthetic oligonucleotide
  Antisense strand to SEQ ID NO: 2229230
augucccggguaauggagc

SEQ ID NO: 2229232 - RNA, 19 nt, Artificial Sequence
  Description of Artificial Sequence: Synthetic oligonucleotide
  Sense strand starting at position 883 of SEQ ID NO: 1883957
cgacuuggugcucgcgauu

SEQ ID NO: 2229233 - RNA, 19 nt, Artificial Sequence
  Description of Artificial Sequence: Synthetic oligonucleotide
  Antisense strand to SEQ ID NO: 2229232
aaucgcgagcaccaagucg

SEQ ID NO: 2229234 - RNA, 19 nt, Artificial Sequence
  Description of Artificial Sequence: Synthetic oligonucleotide
  Sense strand starting at position 886 of SEQ ID NO: 1883957
cuuggugcucgcgauugaa

SEQ ID NO: 2229235 - RNA, 19 nt, Artificial Sequence
  Description of Artificial Sequence: Synthetic oligonucleotide
  Antisense strand to SEQ ID NO: 2229234
uucaaucgcgagcaccaag

SEQ ID NO: 2229236 - RNA, 19 nt, Artificial Sequence
  Description of Artificial Sequence: Synthetic oligonucleotide
  Sense strand starting at position 888 of SEQ ID NO: 1883957
uggugcucgcgauugaauu

SEQ ID NO: 2229237 - RNA, 19 nt, Artificial Sequence
  Description of Artificial Sequence: Synthetic oligonucleotide
  Antisense strand to SEQ ID NO: 2229236
aauucaaucgcgagcacca

SEQ ID NO: 2229238 - RNA, 19 nt, Artificial Sequence
  Description of Artificial Sequence: Synthetic oligonucleotide
  Sense strand starting at position 889 of SEQ ID NO: 1883957
ggugcucgcgauugaauuu

SEQ ID NO: 2229239 - RNA, 19 nt, Artificial Sequence
  Description of Artificial Sequence: Synthetic oligonucleotide
  Antisense strand to SEQ ID NO: 2229238
aaauucaaucgcgagcacc

SEQ ID NO: 2229240 - RNA, 19 nt, Artificial Sequence
  Description of Artificial Sequence: Synthetic oligonucleotide
  Sense strand starting at position 890 of SEQ ID NO: 1883957
gugcucgcgauugaauuua

SEQ ID NO: 2229241 - RNA, 19 nt, Artificial Sequence
  Description of Artificial Sequence: Synthetic oligonucleotide
  Antisense strand to SEQ ID NO: 2229240
uaaauucaaucgcgagcac

SEQ ID NO: 2229242 - RNA, 19 nt, Artificial Sequence
  Description of Artificial Sequence: Synthetic oligonucleotide
  Sense strand starting at position 1006 of SEQ ID NO: 1883957
uucuuagccucagaaguca

SEQ ID NO: 2229243 - RNA, 19 nt, Artificial Sequence
  Description of Artificial Sequence: Synthetic oligonucleotide
  Antisense strand to SEQ ID NO: 2229242
ugacuucugaggcuaagaa

SEQ ID NO: 2229244 - RNA, 19 nt, Artificial Sequence
  Description of Artificial Sequence: Synthetic oligonucleotide
  Sense strand starting at position 1171 of SEQ ID NO: 1883957
ucgauugacgcgcggagaa

SEQ ID NO: 2229245 - RNA, 19 nt, Artificial Sequence
  Description of Artificial Sequence: Synthetic oligonucleotide
  Antisense strand to SEQ ID NO: 2229244
uucuccgcgcgucaaucga

SEQ ID NO: 2229246 - RNA, 19 nt, Artificial Sequence
  Description of Artificial Sequence: Synthetic oligonucleotide
  Sense strand starting at position 1263 of SEQ ID NO: 1883957
auucguuucuccuuguuua

SEQ ID NO: 2229247 - RNA, 19 nt, Artificial Sequence
  Description of Artificial Sequence: Synthetic oligonucleotide
  Antisense strand to SEQ ID NO: 2229246
uaaacaaggagaaacgaau

SEQ ID NO: 2229248 - RNA, 19 nt, Artificial Sequence
  Description of Artificial Sequence: Synthetic oligonucleotide
  Sense strand starting at position 1264 of SEQ ID NO: 1883957
uucguuucuccuuguuuau

SEQ ID NO: 2229249 - RNA, 19 nt, Artificial Sequence
  Description of Artificial Sequence: Synthetic oligonucleotide
  Antisense strand to SEQ ID NO: 2229248
auaaacaaggagaaacgaa

SEQ ID NO: 2229250 - RNA, 19 nt, Artificial Sequence
  Description of Artificial Sequence: Synthetic oligonucleotide
  Sense strand starting at position 1274 of SEQ ID NO: 1883957
cuuguuuauggagagguuu

SEQ ID NO: 2229251 - RNA, 19 nt, Artificial Sequence
  Description of Artificial Sequence: Synthetic oligonucleotide
  Antisense strand to SEQ ID NO: 2229250
aaaccucuccauaaacaag

SEQ ID NO: 2229252 - RNA, 19 nt, Artificial Sequence
  Description of Artificial Sequence: Synthetic oligonucleotide
  Sense strand starting at position 1282 of SEQ ID NO: 1883957
uggagagguuuccggugaa

SEQ ID NO: 2229253 - RNA, 19 nt, Artificial Sequence
  Description of Artificial Sequence: Synthetic oligonucleotide
  Antisense strand to SEQ ID NO: 2229252
uucaccggaaaccucucca

SEQ ID NO: 2229254 - RNA, 19 nt, Artificial Sequence
  Description of Artificial Sequence: Synthetic oligonucleotide
  Sense strand starting at position 1283 of SEQ ID NO: 1883957
ggagagguuuccggugaau

SEQ ID NO: 2229255 - RNA, 19 nt, Artificial Sequence
  Description of Artificial Sequence: Synthetic oligonucleotide
  Antisense strand to SEQ ID NO: 2229254
auucaccggaaaccucucc

SEQ ID NO: 2229256 - RNA, 19 nt, Artificial Sequence
  Description of Artificial Sequence: Synthetic oligonucleotide
  Sense strand starting at position 1285 of SEQ ID NO: 1883957
agagguuuccggugaaugu

SEQ ID NO: 2229257 - RNA, 19 nt, Artificial Sequence
  Description of Artificial Sequence: Synthetic oligonucleotide
  Antisense strand to SEQ ID NO: 2229256
acauucaccggaaaccucu

SEQ ID NO: 2229258 - RNA, 19 nt, Artificial Sequence
  Description of Artificial Sequence: Synthetic oligonucleotide
  Sense strand starting at position 1286 of SEQ ID NO: 1883957
gagguuuccggugaauguu

SEQ ID NO: 2229259 - RNA, 19 nt, Artificial Sequence
  Description of Artificial Sequence: Synthetic oligonucleotide
  Antisense strand to SEQ ID NO: 2229258
aacauucaccggaaaccuc

SEQ ID NO: 2229260 - RNA, 19 nt, Artificial Sequence
  Description of Artificial Sequence: Synthetic oligonucleotide
  Sense strand starting at position 1289 of SEQ ID NO: 1883957
guuuccggugaauguuaga

SEQ ID NO: 2229261 - RNA, 19 nt, Artificial Sequence
  Description of Artificial Sequence: Synthetic oligonucleotide
  Antisense strand to SEQ ID NO: 2229260
ucuaacauucaccggaaac

SEQ ID NO: 2229262 - RNA, 19 nt, Artificial Sequence
  Description of Artificial Sequence: Synthetic oligonucleotide
  Sense strand starting at position 1294 of SEQ ID NO: 1883957
cggugaauguuagacagca

SEQ ID NO: 2229263 - RNA, 19 nt, Artificial Sequence
  Description of Artificial Sequence: Synthetic oligonucleotide
  Antisense strand to SEQ ID NO: 2229262
ugcugucuaacauucaccg

SEQ ID NO: 2229264 - RNA, 19 nt, Artificial Sequence
  Description of Artificial Sequence: Synthetic oligonucleotide
  Sense strand starting at position 1296 of SEQ ID NO: 1883957
gugaauguuagacagcaac

SEQ ID NO: 2229265 - RNA, 19 nt, Artificial Sequence
  Description of Artificial Sequence: Synthetic oligonucleotide
  Antisense strand to SEQ ID NO: 2229264
guugcugucuaacauucac

SEQ ID NO: 2229266 - RNA, 19 nt, Artificial Sequence
  Description of Artificial Sequence: Synthetic oligonucleotide
  Sense strand starting at position 1382 of SEQ ID NO: 1883957
agagacgaguggucagaga

SEQ ID NO: 2229267 - RNA, 19 nt, Artificial Sequence
  Description of Artificial Sequence: Synthetic oligonucleotide
  Antisense strand to SEQ ID NO: 2229266
ucucugaccacucgucucu

SEQ ID NO: 2229268 - RNA, 19 nt, Artificial Sequence
  Description of Artificial Sequence: Synthetic oligonucleotide
  Sense strand starting at position 1521 of SEQ ID NO: 1883957
uguccuauauauggaaauu

SEQ ID NO: 2229269 - RNA, 19 nt, Artificial Sequence
  Description of Artificial Sequence: Synthetic oligonucleotide
  Antisense strand to SEQ ID NO: 2229268
aauuuccauauauaggaca

SEQ ID NO: 2229270 - RNA, 19 nt, Artificial Sequence
  Description of Artificial Sequence: Synthetic oligonucleotide
  Sense strand starting at position 1600 of SEQ ID NO: 1883957
acgcgagaccaggaagauu

SEQ ID NO: 2229271 - RNA, 19 nt, Artificial Sequence
  Description of Artificial Sequence: Synthetic oligonucleotide
  Antisense strand to SEQ ID NO: 2229270
aaucuuccuggucucgcgu

SEQ ID NO: 2229272 - RNA, 19 nt, Artificial Sequence
  Description of Artificial Sequence: Synthetic oligonucleotide
  Sense strand starting at position 1654 of SEQ ID NO: 1883957
aucuuucuacagggauagu

SEQ ID NO: 2229273 - RNA, 19 nt, Artificial Sequence
  Description of Artificial Sequence: Synthetic oligonucleotide
  Antisense strand to SEQ ID NO: 2229272
acuaucccuguagaaagau

SEQ ID NO: 2229274 - RNA, 19 nt, Artificial Sequence
  Description of Artificial Sequence: Synthetic oligonucleotide
  Sense strand starting at position 1704 of SEQ ID NO: 1883957
ggugaaguugaauauuguu

SEQ ID NO: 2229275 - RNA, 19 nt, Artificial Sequence
  Description of Artificial Sequence: Synthetic oligonucleotide
  Antisense strand to SEQ ID NO: 2229274
aacaauauucaacuucacc

SEQ ID NO: 2229276 - RNA, 19 nt, Artificial Sequence
  Description of Artificial Sequence: Synthetic oligonucleotide
  Sense strand starting at position 1774 of SEQ ID NO: 1883957
ggcuucuucuaucucgaau

SEQ ID NO: 2229277 - RNA, 19 nt, Artificial Sequence
  Description of Artificial Sequence: Synthetic oligonucleotide
  Antisense strand to SEQ ID NO: 2229276
auucgagauagaagaagcc

SEQ ID NO: 2229278 - RNA, 19 nt, Artificial Sequence
  Description of Artificial Sequence: Synthetic oligonucleotide
  Sense strand starting at position 1795 of SEQ ID NO: 1883957
uugcauuuguagggaauuu

SEQ ID NO: 2229279 - RNA, 19 nt, Artificial Sequence
  Description of Artificial Sequence: Synthetic oligonucleotide
  Antisense strand to SEQ ID NO: 2229278
aaauucccuacaaaugcaa

SEQ ID NO: 2229280 - RNA, 19 nt, Artificial Sequence
  Description of Artificial Sequence: Synthetic oligonucleotide
  Sense strand starting at position 1834 of SEQ ID NO: 1883957
agggaacaaugucuccaau

SEQ ID NO: 2229281 - RNA, 19 nt, Artificial Sequence
  Description of Artificial Sequence: Synthetic oligonucleotide
  Antisense strand to SEQ ID NO: 2229280
auuggagacauuguucccu

SEQ ID NO: 2229282 - RNA, 19 nt, Artificial Sequence
  Description of Artificial Sequence: Synthetic oligonucleotide
  Sense strand starting at position 1836 of SEQ ID NO: 1883957
ggaacaaugucuccaauuc

SEQ ID NO: 2229283 - RNA, 19 nt, Artificial Sequence
  Description of Artificial Sequence: Synthetic oligonucleotide
  Antisense strand to SEQ ID NO: 2229282
gaauuggagacauuguucc

SEQ ID NO: 2229284 - RNA, 19 nt, Artificial Sequence
  Description of Artificial Sequence: Synthetic oligonucleotide
  Sense strand starting at position 2322 of SEQ ID NO: 1883957
uuuccuugacugugggaga

SEQ ID NO: 2229285 - RNA, 19 nt, Artificial Sequence
  Description of Artificial Sequence: Synthetic oligonucleotide
  Antisense strand to SEQ ID NO: 2229284
ucucccacagucaaggaaa

SEQ ID NO: 2229286 - RNA, 19 nt, Artificial Sequence
  Description of Artificial Sequence: Synthetic oligonucleotide
  Sense strand starting at position 2323 of SEQ ID NO: 1883957
uuccuugacugugggagaa

SEQ ID NO: 2229287 - RNA, 19 nt, Artificial Sequence
  Description of Artificial Sequence: Synthetic oligonucleotide
  Antisense strand to SEQ ID NO: 2229286
uucucccacagucaaggaa

SEQ ID NO: 2229288 - RNA, 19 nt, Artificial Sequence
  Description of Artificial Sequence: Synthetic oligonucleotide
  Sense strand starting at position 2387 of SEQ ID NO: 1883957
aaaguugggucccuagagu

SEQ ID NO: 2229289 - RNA, 19 nt, Artificial Sequence
  Description of Artificial Sequence: Synthetic oligonucleotide
  Antisense strand to SEQ ID NO: 2229288
acucuagggacccaacuuu

SEQ ID NO: 2229290 - RNA, 19 nt, Artificial Sequence
  Description of Artificial Sequence: Synthetic oligonucleotide
  Sense strand starting at position 2414 of SEQ ID NO: 1883957
aguucuuucuguccgucua

SEQ ID NO: 2229291 - RNA, 19 nt, Artificial Sequence
  Description of Artificial Sequence: Synthetic oligonucleotide
  Antisense strand to SEQ ID NO: 2229290
uagacggacagaaagaacu

SEQ ID NO: 2229292 - RNA, 19 nt, Artificial Sequence
  Description of Artificial Sequence: Synthetic oligonucleotide
  Sense strand starting at position 2537 of SEQ ID NO: 1883957
aauauuaggucuggaaagg

SEQ ID NO: 2229293 - RNA, 19 nt, Artificial Sequence
  Description of Artificial Sequence: Synthetic oligonucleotide
  Antisense strand to SEQ ID NO: 2229292
ccuuuccagaccuaauauu

SEQ ID NO: 2229294 - RNA, 19 nt, Artificial Sequence
  Description of Artificial Sequence: Synthetic oligonucleotide
  Sense strand starting at position 2599 of SEQ ID NO: 1883957
gcgcagaaggcucgggaaa

SEQ ID NO: 2229295 - RNA, 19 nt, Artificial Sequence
  Description of Artificial Sequence: Synthetic oligonucleotide
  Antisense strand to SEQ ID NO: 2229294
uuucccgagccuucugcgc

SEQ ID NO: 2229296 - RNA, 19 nt, Artificial Sequence
  Description of Artificial Sequence: Synthetic oligonucleotide
  Sense strand starting at position 2601 of SEQ ID NO: 1883957
gcagaaggcucgggaaaga

SEQ ID NO: 2229297 - RNA, 19 nt, Artificial Sequence
  Description of Artificial Sequence: Synthetic oligonucleotide
  Antisense strand to SEQ ID NO: 2229296
ucuuucccgagccuucugc

SEQ ID NO: 2229298 - RNA, 19 nt, Artificial Sequence
  Description of Artificial Sequence: Synthetic oligonucleotide
  Sense strand starting at position 2610 of SEQ ID NO: 1883957
ucgggaaagaggugacaau

SEQ ID NO: 2229299 - RNA, 19 nt, Artificial Sequence
  Description of Artificial Sequence: Synthetic oligonucleotide
  Antisense strand to SEQ ID NO: 2229298
auugucaccucuuucccga

SEQ ID NO: 2229300 - RNA, 19 nt, Artificial Sequence
  Description of Artificial Sequence: Synthetic oligonucleotide
  Sense strand starting at position 2643 of SEQ ID NO: 1883957
cgcggacgcuccagucaaa

SEQ ID NO: 2229301 - RNA, 19 nt, Artificial Sequence
  Description of Artificial Sequence: Synthetic oligonucleotide
  Antisense strand to SEQ ID NO: 2229300
uuugacuggagcguccgcg

SEQ ID NO: 2229302 - RNA, 19 nt, Artificial Sequence
  Description of Artificial Sequence: Synthetic oligonucleotide
  Sense strand starting at position 2670 of SEQ ID NO: 1883957
cccuuuauccgaugacuca

SEQ ID NO: 2229303 - RNA, 19 nt, Artificial Sequence
  Description of Artificial Sequence: Synthetic oligonucleotide
  Antisense strand to SEQ ID NO: 2229302
ugagucaucggauaaaggg

SEQ ID NO: 2229304 - RNA, 19 nt, Artificial Sequence
  Description of Artificial Sequence: Synthetic oligonucleotide
  Sense strand starting at position 2184 of SEQ ID NO: 1883960
caguucugauaagguauau

SEQ ID NO: 2229305 - RNA, 19 nt, Artificial Sequence
  Description of Artificial Sequence: Synthetic oligonucleotide
  Antisense strand to SEQ ID NO: 2229304
auauaccuuaucagaacug

SEQ ID NO: 2229306 - RNA, 19 nt, Artificial Sequence
  Description of Artificial Sequence: Synthetic oligonucleotide
  Sense strand starting at position 2219 of SEQ ID NO: 1883960
caguaaccaugugaguaaa

SEQ ID NO: 2229307 - RNA, 19 nt, Artificial Sequence
  Description of Artificial Sequence: Synthetic oligonucleotide
  Antisense strand to SEQ ID NO: 2229306
uuuacucacaugguuacug

SEQ ID NO: 2229308 - RNA, 19 nt, Artificial Sequence
  Description of Artificial Sequence: Synthetic oligonucleotide
  Sense strand starting at position 2221 of SEQ ID NO: 1883960
guaaccaugugaguaaaca

SEQ ID NO: 2229309 - RNA, 19 nt, Artificial Sequence
  Description of Artificial Sequence: Synthetic oligonucleotide
  Antisense strand to SEQ ID NO: 2229308
uguuuacucacaugguuac

SEQ ID NO: 2229310 - RNA, 19 nt, Artificial Sequence
  Description of Artificial Sequence: Synthetic oligonucleotide
  Sense strand starting at position 2344 of SEQ ID NO: 1883960
ucacaucaaugcuguaaug

SEQ ID NO: 2229311 - RNA, 19 nt, Artificial Sequence
  Description of Artificial Sequence: Synthetic oligonucleotide
  Antisense strand to SEQ ID NO: 2229310
cauuacagcauugauguga

SEQ ID NO: 2229312 - RNA, 19 nt, Artificial Sequence
  Description of Artificial Sequence: Synthetic oligonucleotide
  Sense strand starting at position 2346 of SEQ ID NO: 1883960
acaucaaugcuguaaugga

SEQ ID NO: 2229313 - RNA, 19 nt, Artificial Sequence
  Description of Artificial Sequence: Synthetic oligonucleotide
  Antisense strand to SEQ ID NO: 2229312
uccauuacagcauugaugu

SEQ ID NO: 2229314 - RNA, 19 nt, Artificial Sequence
  Description of Artificial Sequence: Synthetic oligonucleotide
  Sense strand starting at position 2360 of SEQ ID NO: 1883960
auggauauuuggugguguu

SEQ ID NO: 2229315 - RNA, 19 nt, Artificial Sequence
  Description of Artificial Sequence: Synthetic oligonucleotide
  Antisense strand to SEQ ID NO: 2229314
aacaccaccaaauauccau

SEQ ID NO: 2229316 - RNA, 19 nt, Artificial Sequence
  Description of Artificial Sequence: Synthetic oligonucleotide
  Sense strand starting at position 2361 of SEQ ID NO: 1883960
uggauauuuggugguguuu

SEQ ID NO: 2229317 - RNA, 19 nt, Artificial Sequence
  Description of Artificial Sequence: Synthetic oligonucleotide
  Antisense strand to SEQ ID NO: 2229316
aaacaccaccaaauaucca

SEQ ID NO: 2229318 - RNA, 19 nt, Artificial Sequence
  Description of Artificial Sequence: Synthetic oligonucleotide
  Sense strand starting at position 2518 of SEQ ID NO: 1883960
ugaagcagcucauauguca

SEQ ID NO: 2229319 - RNA, 19 nt, Artificial Sequence
  Description of Artificial Sequence: Synthetic oligonucleotide
  Antisense strand to SEQ ID NO: 2229318
ugacauaugagcugcuuca

SEQ ID NO: 2229320 - RNA, 19 nt, Artificial Sequence
  Description of Artificial Sequence: Synthetic oligonucleotide
  Sense strand starting at position 2920 of SEQ ID NO: 1883960
gcacucagcuguugacagu

SEQ ID NO: 2229321 - RNA, 19 nt, Artificial Sequence
  Description of Artificial Sequence: Synthetic oligonucleotide
  Antisense strand to SEQ ID NO: 2229320
acugucaacagcugagugc

SEQ ID NO: 2229322 - RNA, 19 nt, Artificial Sequence
  Description of Artificial Sequence: Synthetic oligonucleotide
  Sense strand starting at position 2997 of SEQ ID NO: 1883960
uuguuucccuccggagagu

SEQ ID NO: 2229323 - RNA, 19 nt, Artificial Sequence
  Description of Artificial Sequence: Synthetic oligonucleotide
  Antisense strand to SEQ ID NO: 2229322
acucuccggagggaaacaa

SEQ ID NO: 2229324 - RNA, 19 nt, Artificial Sequence
  Description of Artificial Sequence: Synthetic oligonucleotide
  Sense strand starting at position 3065 of SEQ ID NO: 1883960
gagucacaguugugagcaa

SEQ ID NO: 2229325 - RNA, 19 nt, Artificial Sequence
  Description of Artificial Sequence: Synthetic oligonucleotide
  Antisense strand to SEQ ID NO: 2229324
uugcucacaacugugacuc

SEQ ID NO: 2229326 - RNA, 19 nt, Artificial Sequence
  Description of Artificial Sequence: Synthetic oligonucleotide
  Sense strand starting at position 3178 of SEQ ID NO: 1883960
gggucaucuuuccuccuga

SEQ ID NO: 2229327 - RNA, 19 nt, Artificial Sequence
  Description of Artificial Sequence: Synthetic oligonucleotide
  Antisense strand to SEQ ID NO: 2229326
ucaggaggaaagaugaccc

SEQ ID NO: 2229328 - RNA, 19 nt, Artificial Sequence
  Description of Artificial Sequence: Synthetic oligonucleotide
  Sense strand starting at position 3252 of SEQ ID NO: 1883960
cgggaugaauugcugcaga

SEQ ID NO: 2229329 - RNA, 19 nt, Artificial Sequence
  Description of Artificial Sequence: Synthetic oligonucleotide
  Antisense strand to SEQ ID NO: 2229328
ucugcagcaauucaucccg

SEQ ID NO: 2229330 - RNA, 19 nt, Artificial Sequence
  Description of Artificial Sequence: Synthetic oligonucleotide
  Sense strand starting at position 3255 of SEQ ID NO: 1883960
gaugaauugcugcagagag

SEQ ID NO: 2229331 - RNA, 19 nt, Artificial Sequence
  Description of Artificial Sequence: Synthetic oligonucleotide
  Antisense strand to SEQ ID NO: 2229330
cucucugcagcaauucauc

SEQ ID NO: 2229332 - RNA, 19 nt, Artificial Sequence
  Description of Artificial Sequence: Synthetic oligonucleotide
  Sense strand starting at position 3400 of SEQ ID NO: 1883960
gagaaacauuaguacaagu

SEQ ID NO: 2229333 - RNA, 19 nt, Artificial Sequence
  Description of Artificial Sequence: Synthetic oligonucleotide
  Antisense strand to SEQ ID NO: 2229332
acuuguacuaauguuucuc

SEQ ID NO: 2229334 - RNA, 19 nt, Artificial Sequence
  Description of Artificial Sequence: Synthetic oligonucleotide
  Sense strand starting at position 3410 of SEQ ID NO: 1883960
aguacaaguucggaacuaa

SEQ ID NO: 2229335 - RNA, 19 nt, Artificial Sequence
  Description of Artificial Sequence: Synthetic oligonucleotide
  Antisense strand to SEQ ID NO: 2229334
uuaguuccgaacuuguacu

SEQ ID NO: 2229336 - RNA, 19 nt, Artificial Sequence
  Description of Artificial Sequence: Synthetic oligonucleotide
  Sense strand starting at position 3443 of SEQ ID NO: 1883960
gcaacauaaccucggaaau

SEQ ID NO: 2229337 - RNA, 19 nt, Artificial Sequence
  Description of Artificial Sequence: Synthetic oligonucleotide
  Antisense strand to SEQ ID NO: 2229336
auuuccgagguuauguugc

SEQ ID NO: 2229338 - RNA, 19 nt, Artificial Sequence
  Description of Artificial Sequence: Synthetic oligonucleotide
  Sense strand starting at position 3579 of SEQ ID NO: 1883960
gugggaagccucugacuca

SEQ ID NO: 2229339 - RNA, 19 nt, Artificial Sequence
  Description of Artificial Sequence: Synthetic oligonucleotide
  Antisense strand to SEQ ID NO: 2229338
ugagucagaggcuucccac

SEQ ID NO: 2229340 - RNA, 19 nt, Artificial Sequence
  Description of Artificial Sequence: Synthetic oligonucleotide
  Sense strand starting at position 3670 of SEQ ID NO: 1883960
uuggauuuccucugcaagu

SEQ ID NO: 2229341 - RNA, 19 nt, Artificial Sequence
  Description of Artificial Sequence: Synthetic oligonucleotide
  Antisense strand to SEQ ID NO: 2229340
acuugcagaggaaauccaa

SEQ ID NO: 2229342 - RNA, 19 nt, Artificial Sequence
  Description of Artificial Sequence: Synthetic oligonucleotide
  Sense strand starting at position 3671 of SEQ ID NO: 1883960
uggauuuccucugcaaguc

SEQ ID NO: 2229343 - RNA, 19 nt, Artificial Sequence
  Description of Artificial Sequence: Synthetic oligonucleotide
  Antisense strand to SEQ ID NO: 2229342
gacuugcagaggaaaucca

SEQ ID NO: 2229344 - RNA, 19 nt, Artificial Sequence
  Description of Artificial Sequence: Synthetic oligonucleotide
  Sense strand starting at position 3679 of SEQ ID NO: 1883960
cucugcaagucagaucaua

SEQ ID NO: 2229345 - RNA, 19 nt, Artificial Sequence
  Description of Artificial Sequence: Synthetic oligonucleotide
  Antisense strand to SEQ ID NO: 2229344
uaugaucugacuugcagag

SEQ ID NO: 2229346 - RNA, 19 nt, Artificial Sequence
  Description of Artificial Sequence: Synthetic oligonucleotide
  Sense strand starting at position 3687 of SEQ ID NO: 1883960
gucagaucauagcuauauc

SEQ ID NO: 2229347 - RNA, 19 nt, Artificial Sequence
  Description of Artificial Sequence: Synthetic oligonucleotide
  Antisense strand to SEQ ID NO: 2229346
gauauagcuaugaucugac

SEQ ID NO: 2229348 - RNA, 19 nt, Artificial Sequence
  Description of Artificial Sequence: Synthetic oligonucleotide
  Sense strand starting at position 3837 of SEQ ID NO: 1883960
gcagcuggauauccuuaaa

SEQ ID NO: 2229349 - RNA, 19 nt, Artificial Sequence
  Description of Artificial Sequence: Synthetic oligonucleotide
  Antisense strand to SEQ ID NO: 2229348
uuuaaggauauccagcugc

SEQ ID NO: 2229350 - RNA, 19 nt, Artificial Sequence
  Description of Artificial Sequence: Synthetic oligonucleotide
  Sense strand starting at position 3967 of SEQ ID NO: 1883960
cuagucaugucucacacau

SEQ ID NO: 2229351 - RNA, 19 nt, Artificial Sequence
  Description of Artificial Sequence: Synthetic oligonucleotide
  Antisense strand to SEQ ID NO: 2229350
augugugagacaugacuag

SEQ ID NO: 2229352 - RNA, 19 nt, Artificial Sequence
  Description of Artificial Sequence: Synthetic oligonucleotide
  Sense strand starting at position 3969 of SEQ ID NO: 1883960
agucaugucucacacauac

SEQ ID NO: 2229353 - RNA, 19 nt, Artificial Sequence
  Description of Artificial Sequence: Synthetic oligonucleotide
  Antisense strand to SEQ ID NO: 2229352
guaugugugagacaugacu

SEQ ID NO: 2229354 - RNA, 19 nt, Artificial Sequence
  Description of Artificial Sequence: Synthetic oligonucleotide
  Sense strand starting at position 28 of SEQ ID NO: 1883961
agaggucugagucacugau

SEQ ID NO: 2229355 - RNA, 19 nt, Artificial Sequence
  Description of Artificial Sequence: Synthetic oligonucleotide
  Antisense strand to SEQ ID NO: 2229354
aucagugacucagaccucu

SEQ ID NO: 2229356 - RNA, 19 nt, Artificial Sequence
  Description of Artificial Sequence: Synthetic oligonucleotide
  Sense strand starting at position 30 of SEQ ID NO: 1883961
aggucugagucacugauaa

SEQ ID NO: 2229357 - RNA, 19 nt, Artificial Sequence
  Description of Artificial Sequence: Synthetic oligonucleotide
  Antisense strand to SEQ ID NO: 2229356
uuaucagugacucagaccu

SEQ ID NO: 2229358 - RNA, 19 nt, Artificial Sequence
  Description of Artificial Sequence: Synthetic oligonucleotide
  Sense strand starting at position 74 of SEQ ID NO: 1883961
uagcguauuggucagaguc

SEQ ID NO: 2229359 - RNA, 19 nt, Artificial Sequence
  Description of Artificial Sequence: Synthetic oligonucleotide
  Antisense strand to SEQ ID NO: 2229358
gacucugaccaauacgcua

SEQ ID NO: 2229360 - RNA, 19 nt, Artificial Sequence
  Description of Artificial Sequence: Synthetic oligonucleotide
  Sense strand starting at position 77 of SEQ ID NO: 1883961
cguauuggucagaguccga

SEQ ID NO: 2229361 - RNA, 19 nt, Artificial Sequence
  Description of Artificial Sequence: Synthetic oligonucleotide
  Antisense strand to SEQ ID NO: 2229360
ucggacucugaccaauacg

SEQ ID NO: 2229362 - RNA, 19 nt, Artificial Sequence
  Description of Artificial Sequence: Synthetic oligonucleotide
  Sense strand starting at position 144 of SEQ ID NO: 1883961
gggaauuguuaauugcaac

SEQ ID NO: 2229363 - RNA, 19 nt, Artificial Sequence
  Description of Artificial Sequence: Synthetic oligonucleotide
  Antisense strand to SEQ ID NO: 2229362
guugcaauuaacaauuccc

SEQ ID NO: 2229364 - RNA, 19 nt, Artificial Sequence
  Description of Artificial Sequence: Synthetic oligonucleotide
  Sense strand starting at position 318 of SEQ ID NO: 1883961
aggagagucaccgaugcua

SEQ ID NO: 2229365 - RNA, 19 nt, Artificial Sequence
  Description of Artificial Sequence: Synthetic oligonucleotide
  Antisense strand to SEQ ID NO: 2229364
uagcaucggugacucuccu

SEQ ID NO: 2229366 - RNA, 19 nt, Artificial Sequence
  Description of Artificial Sequence: Synthetic oligonucleotide
  Sense strand starting at position 320 of SEQ ID NO: 1883961
gagagucaccgaugcuaua

SEQ ID NO: 2229367 - RNA, 19 nt, Artificial Sequence
  Description of Artificial Sequence: Synthetic oligonucleotide
  Antisense strand to SEQ ID NO: 2229366
uauagcaucggugacucuc

SEQ ID NO: 2229368 - RNA, 19 nt, Artificial Sequence
  Description of Artificial Sequence: Synthetic oligonucleotide
  Sense strand starting at position 331 of SEQ ID NO: 1883961
augcuauaccacuggaacu

SEQ ID NO: 2229369 - RNA, 19 nt, Artificial Sequence
  Description of Artificial Sequence: Synthetic oligonucleotide
  Antisense strand to SEQ ID NO: 2229368
aguuccagugguauagcau

SEQ ID NO: 2229370 - RNA, 19 nt, Artificial Sequence
  Description of Artificial Sequence: Synthetic oligonucleotide
  Sense strand starting at position 354 of SEQ ID NO: 1883961
agaaauacuuccuuaggug

SEQ ID NO: 2229371 - RNA, 19 nt, Artificial Sequence
  Description of Artificial Sequence: Synthetic oligonucleotide
  Antisense strand to SEQ ID NO: 2229370
caccuaaggaaguauuucu

SEQ ID NO: 2229372 - RNA, 19 nt, Artificial Sequence
  Description of Artificial Sequence: Synthetic oligonucleotide
  Sense strand starting at position 462 of SEQ ID NO: 1883961
cacugugucccuggugaag

SEQ ID NO: 2229373 - RNA, 19 nt, Artificial Sequence
  Description of Artificial Sequence: Synthetic oligonucleotide
  Antisense strand to SEQ ID NO: 2229372
cuucaccagggacacagug

SEQ ID NO: 2229374 - RNA, 19 nt, Artificial Sequence
  Description of Artificial Sequence: Synthetic oligonucleotide
  Sense strand starting at position 554 of SEQ ID NO: 1883961
ucuccauugcucuagauag

SEQ ID NO: 2229375 - RNA, 19 nt, Artificial Sequence
  Description of Artificial Sequence: Synthetic oligonucleotide
  Antisense strand to SEQ ID NO: 2229374
cuaucuagagcaauggaga

SEQ ID NO: 2229376 - RNA, 19 nt, Artificial Sequence
  Description of Artificial Sequence: Synthetic oligonucleotide
  Sense strand starting at position 556 of SEQ ID NO: 1883961
uccauugcucuagauagga

SEQ ID NO: 2229377 - RNA, 19 nt, Artificial Sequence
  Description of Artificial Sequence: Synthetic oligonucleotide
  Antisense strand to SEQ ID NO: 2229376
uccuaucuagagcaaugga

SEQ ID NO: 2229378 - RNA, 19 nt, Artificial Sequence
  Description of Artificial Sequence: Synthetic oligonucleotide
  Sense strand starting at position 577 of SEQ ID NO: 1883961
ugguggucagagugggaua

SEQ ID NO: 2229379 - RNA, 19 nt, Artificial Sequence
  Description of Artificial Sequence: Synthetic oligonucleotide
  Antisense strand to SEQ ID NO: 2229378
uaucccacucugaccacca

SEQ ID NO: 2229380 - RNA, 19 nt, Artificial Sequence
  Description of Artificial Sequence: Synthetic oligonucleotide
  Sense strand starting at position 885 of SEQ ID NO: 1883961
gggugauaacaaggucacu

SEQ ID NO: 2229381 - RNA, 19 nt, Artificial Sequence
  Description of Artificial Sequence: Synthetic oligonucleotide
  Antisense strand to SEQ ID NO: 2229380
agugaccuuguuaucaccc

SEQ ID NO: 2229382 - RNA, 19 nt, Artificial Sequence
  Description of Artificial Sequence: Synthetic oligonucleotide
  Sense strand starting at position 891 of SEQ ID NO: 1883961
uaacaaggucacugugaca

SEQ ID NO: 2229383 - RNA, 19 nt, Artificial Sequence
  Description of Artificial Sequence: Synthetic oligonucleotide
  Antisense strand to SEQ ID NO: 2229382
ugucacagugaccuuguua

SEQ ID NO: 2229384 - RNA, 19 nt, Artificial Sequence
  Description of Artificial Sequence: Synthetic oligonucleotide
  Sense strand starting at position 1079 of SEQ ID NO: 1883961
gggauuagaugggcuccaa

SEQ ID NO: 2229385 - RNA, 19 nt, Artificial Sequence
  Description of Artificial Sequence: Synthetic oligonucleotide
  Antisense strand to SEQ ID NO: 2229384
uuggagcccaucuaauccc

SEQ ID NO: 2229386 - RNA, 19 nt, Artificial Sequence
  Description of Artificial Sequence: Synthetic oligonucleotide
  Sense strand starting at position 1501 of SEQ ID NO: 1883961
gacguagccucccuauguu

SEQ ID NO: 2229387 - RNA, 19 nt, Artificial Sequence
  Description of Artificial Sequence: Synthetic oligonucleotide
  Antisense strand to SEQ ID NO: 2229386
aacauagggaggcuacguc

SEQ ID NO: 2229388 - RNA, 19 nt, Artificial Sequence
  Description of Artificial Sequence: Synthetic oligonucleotide
  Sense strand starting at position 1658 of SEQ ID NO: 1883961
gucugucaucuuuacagag

SEQ ID NO: 2229389 - RNA, 19 nt, Artificial Sequence
  Description of Artificial Sequence: Synthetic oligonucleotide
  Antisense strand to SEQ ID NO: 2229388
cucuguaaagaugacagac

SEQ ID NO: 2229390 - RNA, 19 nt, Artificial Sequence
  Description of Artificial Sequence: Synthetic oligonucleotide
  Sense strand starting at position 2276 of SEQ ID NO: 1883961
cgggaugaaucccugcaga

SEQ ID NO: 2229391 - RNA, 19 nt, Artificial Sequence
  Description of Artificial Sequence: Synthetic oligonucleotide
  Antisense strand to SEQ ID NO: 2229390
ucugcagggauucaucccg

SEQ ID NO: 2229392 - RNA, 19 nt, Artificial Sequence
  Description of Artificial Sequence: Synthetic oligonucleotide
  Sense strand starting at position 2431 of SEQ ID NO: 1883961
aguacaaguucggcaguaa

SEQ ID NO: 2229393 - RNA, 19 nt, Artificial Sequence
  Description of Artificial Sequence: Synthetic oligonucleotide
  Antisense strand to SEQ ID NO: 2229392
uuacugccgaacuuguacu

SEQ ID NO: 2229394 - RNA, 19 nt, Artificial Sequence
  Description of Artificial Sequence: Synthetic oligonucleotide
  Sense strand starting at position 2432 of SEQ ID NO: 1883961
guacaaguucggcaguaaa

SEQ ID NO: 2229395 - RNA, 19 nt, Artificial Sequence
  Description of Artificial Sequence: Synthetic oligonucleotide
  Antisense strand to SEQ ID NO: 2229394
uuuacugccgaacuuguac

SEQ ID NO: 2229396 - RNA, 19 nt, Artificial Sequence
  Description of Artificial Sequence: Synthetic oligonucleotide
  Sense strand starting at position 2535 of SEQ ID NO: 1883961
cggccaguguuccuugaca

SEQ ID NO: 2229397 - RNA, 19 nt, Artificial Sequence
  Description of Artificial Sequence: Synthetic oligonucleotide
  Antisense strand to SEQ ID NO: 2229396
ugucaaggaacacuggccg

SEQ ID NO: 2229398 - RNA, 19 nt, Artificial Sequence
  Description of Artificial Sequence: Synthetic oligonucleotide
  Sense strand starting at position 2537 of SEQ ID NO: 1883961
gccaguguuccuugacaua

SEQ ID NO: 2229399 - RNA, 19 nt, Artificial Sequence
  Description of Artificial Sequence: Synthetic oligonucleotide
  Antisense strand to SEQ ID NO: 2229398
uaugucaaggaacacuggc

SEQ ID NO: 2229400 - RNA, 19 nt, Artificial Sequence
  Description of Artificial Sequence: Synthetic oligonucleotide
  Sense strand starting at position 2550 of SEQ ID NO: 1883961
gacauauggugauauauaa

SEQ ID NO: 2229401 - RNA, 19 nt, Artificial Sequence
  Description of Artificial Sequence: Synthetic oligonucleotide
  Antisense strand to SEQ ID NO: 2229400
uuauauaucaccauauguc

SEQ ID NO: 2229402 - RNA, 19 nt, Artificial Sequence
  Description of Artificial Sequence: Synthetic oligonucleotide
  Sense strand starting at position 2598 of SEQ ID NO: 1883961
gugggaagccuuugacuca

SEQ ID NO: 2229403 - RNA, 19 nt, Artificial Sequence
  Description of Artificial Sequence: Synthetic oligonucleotide
  Antisense strand to SEQ ID NO: 2229402
ugagucaaaggcuucccac

SEQ ID NO: 2229404 - RNA, 19 nt, Artificial Sequence
  Description of Artificial Sequence: Synthetic oligonucleotide
  Sense strand starting at position 2647 of SEQ ID NO: 1883961
cuugcaauguagcucuuau

SEQ ID NO: 2229405 - RNA, 19 nt, Artificial Sequence
  Description of Artificial Sequence: Synthetic oligonucleotide
  Antisense strand to SEQ ID NO: 2229404
auaagagcuacauugcaag

SEQ ID NO: 2229406 - RNA, 19 nt, Artificial Sequence
  Description of Artificial Sequence: Synthetic oligonucleotide
  Sense strand starting at position 2665 of SEQ ID NO: 1883961
uugcauggcacggaagaua

SEQ ID NO: 2229407 - RNA, 19 nt, Artificial Sequence
  Description of Artificial Sequence: Synthetic oligonucleotide
  Antisense strand to SEQ ID NO: 2229406
uaucuuccgugccaugcaa

SEQ ID NO: 2229408 - RNA, 19 nt, Artificial Sequence
  Description of Artificial Sequence: Synthetic oligonucleotide
  Sense strand starting at position 2768 of SEQ ID NO: 1883961
cguuuauuaaacggaauga

SEQ ID NO: 2229409 - RNA, 19 nt, Artificial Sequence
  Description of Artificial Sequence: Synthetic oligonucleotide
  Antisense strand to SEQ ID NO: 2229408
ucauuccguuuaauaaacg

SEQ ID NO: 2229410 - RNA, 19 nt, Artificial Sequence
  Description of Artificial Sequence: Synthetic oligonucleotide
  Sense strand starting at position 3028 of SEQ ID NO: 1883961
guauguagaugagcuguaa

SEQ ID NO: 2229411 - RNA, 19 nt, Artificial Sequence
  Description of Artificial Sequence: Synthetic oligonucleotide
  Antisense strand to SEQ ID NO: 2229410
uuacagcucaucuacauac

SEQ ID NO: 2229412 - RNA, 19 nt, Artificial Sequence
  Description of Artificial Sequence: Synthetic oligonucleotide
  Sense strand starting at position 3039 of SEQ ID NO: 1883961
agcuguaauuuagaaguuu

SEQ ID NO: 2229413 - RNA, 19 nt, Artificial Sequence
  Description of Artificial Sequence: Synthetic oligonucleotide
  Antisense strand to SEQ ID NO: 2229412
aaacuucuaaauuacagcu

SEQ ID NO: 2229414 - RNA, 19 nt, Artificial Sequence
  Description of Artificial Sequence: Synthetic oligonucleotide
  Sense strand starting at position 3137 of SEQ ID NO: 1883961
uaaguucugguuuaaguua

SEQ ID NO: 2229415 - RNA, 19 nt, Artificial Sequence
  Description of Artificial Sequence: Synthetic oligonucleotide
  Antisense strand to SEQ ID NO: 2229414
uaacuuaaaccagaacuua

SEQ ID NO: 2229416 - RNA, 19 nt, Artificial Sequence
  Description of Artificial Sequence: Synthetic oligonucleotide
  Sense strand starting at position 3155 of SEQ ID NO: 1883961
aggaaaccacuucguuagu

SEQ ID NO: 2229417 - RNA, 19 nt, Artificial Sequence
  Description of Artificial Sequence: Synthetic oligonucleotide
  Antisense strand to SEQ ID NO: 2229416
acuaacgaagugguuuccu

SEQ ID NO: 2229418 - RNA, 19 nt, Artificial Sequence
  Description of Artificial Sequence: Synthetic oligonucleotide
  Sense strand starting at position 3166 of SEQ ID NO: 1883961
ucguuaguccagucgaugu

SEQ ID NO: 2229419 - RNA, 19 nt, Artificial Sequence
  Description of Artificial Sequence: Synthetic oligonucleotide
  Antisense strand to SEQ ID NO: 2229418
acaucgacuggacuaacga

SEQ ID NO: 2229420 - RNA, 19 nt, Artificial Sequence
  Description of Artificial Sequence: Synthetic oligonucleotide
  Sense strand starting at position 3176 of SEQ ID NO: 1883961
agucgaugucuaggucuga

SEQ ID NO: 2229421 - RNA, 19 nt, Artificial Sequence
  Description of Artificial Sequence: Synthetic oligonucleotide
  Antisense strand to SEQ ID NO: 2229420
ucagaccuagacaucgacu

SEQ ID NO: 2229422 - RNA, 19 nt, Artificial Sequence
  Description of Artificial Sequence: Synthetic oligonucleotide
  Sense strand starting at position 3354 of SEQ ID NO: 1883961
gaaauagguacuggugaug

SEQ ID NO: 2229423 - RNA, 19 nt, Artificial Sequence
  Description of Artificial Sequence: Synthetic oligonucleotide
  Antisense strand to SEQ ID NO: 2229422
caucaccaguaccuauuuc

SEQ ID NO: 2229424 - RNA, 19 nt, Artificial Sequence
  Description of Artificial Sequence: Synthetic oligonucleotide
  Sense strand starting at position 3374 of SEQ ID NO: 1883961
ugacacuugagacgaguaa

SEQ ID NO: 2229425 - RNA, 19 nt, Artificial Sequence
  Description of Artificial Sequence: Synthetic oligonucleotide
  Antisense strand to SEQ ID NO: 2229424
uuacucgucucaaguguca

SEQ ID NO: 2229426 - RNA, 19 nt, Artificial Sequence
  Description of Artificial Sequence: Synthetic oligonucleotide
  Sense strand starting at position 3414 of SEQ ID NO: 1883961
guaaccuuagcagagguaa

SEQ ID NO: 2229427 - RNA, 19 nt, Artificial Sequence
  Description of Artificial Sequence: Synthetic oligonucleotide
  Antisense strand to SEQ ID NO: 2229426
uuaccucugcuaagguuac

SEQ ID NO: 2229428 - RNA, 19 nt, Artificial Sequence
  Description of Artificial Sequence: Synthetic oligonucleotide
  Sense strand starting at position 3829 of SEQ ID NO: 1883961
agguguguuuagcuacagu

SEQ ID NO: 2229429 - RNA, 19 nt, Artificial Sequence
  Description of Artificial Sequence: Synthetic oligonucleotide
  Antisense strand to SEQ ID NO: 2229428
acuguagcuaaacacaccu

SEQ ID NO: 2229430 - RNA, 19 nt, Artificial Sequence
  Description of Artificial Sequence: Synthetic oligonucleotide
  Sense strand starting at position 3846 of SEQ ID NO: 1883961
gucugaugguucuuccauu

SEQ ID NO: 2229431 - RNA, 19 nt, Artificial Sequence
  Description of Artificial Sequence: Synthetic oligonucleotide
  Antisense strand to SEQ ID NO: 2229430
aauggaagaaccaucagac

SEQ ID NO: 2229432 - RNA, 19 nt, Artificial Sequence
  Description of Artificial Sequence: Synthetic oligonucleotide
  Sense strand starting at position 3852 of SEQ ID NO: 1883961
ugguucuuccauugaaucu

SEQ ID NO: 2229433 - RNA, 19 nt, Artificial Sequence
  Description of Artificial Sequence: Synthetic oligonucleotide
  Antisense strand to SEQ ID NO: 2229432
agauucaauggaagaacca

SEQ ID NO: 2229434 - RNA, 19 nt, Artificial Sequence
  Description of Artificial Sequence: Synthetic oligonucleotide
  Sense strand starting at position 42 of SEQ ID NO: 1883962
augagacaguuacuaugau

SEQ ID NO: 2229435 - RNA, 19 nt, Artificial Sequence
  Description of Artificial Sequence: Synthetic oligonucleotide
  Antisense strand to SEQ ID NO: 2229434
aucauaguaacugucucau

SEQ ID NO: 2229436 - RNA, 19 nt, Artificial Sequence
  Description of Artificial Sequence: Synthetic oligonucleotide
  Sense strand starting at position 75 of SEQ ID NO: 1883962
guauuagaguuacuauuag

SEQ ID NO: 2229437 - RNA, 19 nt, Artificial Sequence
  Description of Artificial Sequence: Synthetic oligonucleotide
  Antisense strand to SEQ ID NO: 2229436
cuaauaguaacucuaauac

SEQ ID NO: 2229438 - RNA, 19 nt, Artificial Sequence
  Description of Artificial Sequence: Synthetic oligonucleotide
  Sense strand starting at position 79 of SEQ ID NO: 1883962
uagaguuacuauuagagua

SEQ ID NO: 2229439 - RNA, 19 nt, Artificial Sequence
  Description of Artificial Sequence: Synthetic oligonucleotide
  Antisense strand to SEQ ID NO: 2229438
uacucuaauaguaacucua

SEQ ID NO: 2229440 - RNA, 19 nt, Artificial Sequence
  Description of Artificial Sequence: Synthetic oligonucleotide
  Sense strand starting at position 112 of SEQ ID NO: 1883962
auuaguauuagagguuaag

SEQ ID NO: 2229441 - RNA, 19 nt, Artificial Sequence
  Description of Artificial Sequence: Synthetic oligonucleotide
  Antisense strand to SEQ ID NO: 2229440
cuuaaccucuaauacuaau

SEQ ID NO: 2229442 - RNA, 19 nt, Artificial Sequence
  Description of Artificial Sequence: Synthetic oligonucleotide
  Sense strand starting at position 164 of SEQ ID NO: 1883962
uuugaauacccaggucuau

SEQ ID NO: 2229443 - RNA, 19 nt, Artificial Sequence
  Description of Artificial Sequence: Synthetic oligonucleotide
  Antisense strand to SEQ ID NO: 2229442
auagaccuggguauucaaa

SEQ ID NO: 2229444 - RNA, 19 nt, Artificial Sequence
  Description of Artificial Sequence: Synthetic oligonucleotide
  Sense strand starting at position 329 of SEQ ID NO: 1883962
ccuguugcucucugcugaa

SEQ ID NO: 2229445 - RNA, 19 nt, Artificial Sequence
  Description of Artificial Sequence: Synthetic oligonucleotide
  Antisense strand to SEQ ID NO: 2229444
uucagcagagagcaacagg

SEQ ID NO: 2229446 - RNA, 19 nt, Artificial Sequence
  Description of Artificial Sequence: Synthetic oligonucleotide
  Sense strand starting at position 502 of SEQ ID NO: 1883962
ggacuuugucaaggccaca

SEQ ID NO: 2229447 - RNA, 19 nt, Artificial Sequence
  Description of Artificial Sequence: Synthetic oligonucleotide
  Antisense strand to SEQ ID NO: 2229446
uguggccuugacaaagucc

SEQ ID NO: 2229448 - RNA, 19 nt, Artificial Sequence
  Description of Artificial Sequence: Synthetic oligonucleotide
  Sense strand starting at position 850 of SEQ ID NO: 1883962
caggauuggcaguguggaa

SEQ ID NO: 2229449 - RNA, 19 nt, Artificial Sequence
  Description of Artificial Sequence: Synthetic oligonucleotide
  Antisense strand to SEQ ID NO: 2229448
uuccacacugccaauccug

SEQ ID NO: 2229450 - RNA, 19 nt, Artificial Sequence
  Description of Artificial Sequence: Synthetic oligonucleotide
  Sense strand starting at position 881 of SEQ ID NO: 1883962
acuggacucuuagcaauga

SEQ ID NO: 2229451 - RNA, 19 nt, Artificial Sequence
  Description of Artificial Sequence: Synthetic oligonucleotide
  Antisense strand to SEQ ID NO: 2229450
ucauugcuaagaguccagu

SEQ ID NO: 2229452 - RNA, 19 nt, Artificial Sequence
  Description of Artificial Sequence: Synthetic oligonucleotide
  Sense strand starting at position 890 of SEQ ID NO: 1883962
uuagcaaugacucgguguu

SEQ ID NO: 2229453 - RNA, 19 nt, Artificial Sequence
  Description of Artificial Sequence: Synthetic oligonucleotide
  Antisense strand to SEQ ID NO: 2229452
aacaccgagucauugcuaa

SEQ ID NO: 2229454 - RNA, 19 nt, Artificial Sequence
  Description of Artificial Sequence: Synthetic oligonucleotide
  Sense strand starting at position 891 of SEQ ID NO: 1883962
uagcaaugacucgguguuu

SEQ ID NO: 2229455 - RNA, 19 nt, Artificial Sequence
  Description of Artificial Sequence: Synthetic oligonucleotide
  Antisense strand to SEQ ID NO: 2229454
aaacaccgagucauugcua

SEQ ID NO: 2229456 - RNA, 19 nt, Artificial Sequence
  Description of Artificial Sequence: Synthetic oligonucleotide
  Sense strand starting at position 917 of SEQ ID NO: 1883962
guugauugauuguugugga

SEQ ID NO: 2229457 - RNA, 19 nt, Artificial Sequence
  Description of Artificial Sequence: Synthetic oligonucleotide
  Antisense strand to SEQ ID NO: 2229456
uccacaacaaucaaucaac

SEQ ID NO: 2229458 - RNA, 19 nt, Artificial Sequence
  Description of Artificial Sequence: Synthetic oligonucleotide
  Sense strand starting at position 1238 of SEQ ID NO: 1883962
caguuauggcuauggagaa

SEQ ID NO: 2229459 - RNA, 19 nt, Artificial Sequence
  Description of Artificial Sequence: Synthetic oligonucleotide
  Antisense strand to SEQ ID NO: 2229458
uucuccauagccauaacug

SEQ ID NO: 2229460 - RNA, 19 nt, Artificial Sequence
  Description of Artificial Sequence: Synthetic oligonucleotide
  Sense strand starting at position 1425 of SEQ ID NO: 1883962
gaugcaugucuguaaucug

SEQ ID NO: 2229461 - RNA, 19 nt, Artificial Sequence
  Description of Artificial Sequence: Synthetic oligonucleotide
  Antisense strand to SEQ ID NO: 2229460
cagauuacagacaugcauc

SEQ ID NO: 2229462 - RNA, 19 nt, Artificial Sequence
  Description of Artificial Sequence: Synthetic oligonucleotide
  Sense strand starting at position 1433 of SEQ ID NO: 1883962
ucuguaaucugagcuacug

SEQ ID NO: 2229463 - RNA, 19 nt, Artificial Sequence
  Description of Artificial Sequence: Synthetic oligonucleotide
  Antisense strand to SEQ ID NO: 2229462
caguagcucagauuacaga

SEQ ID NO: 2229464 - RNA, 19 nt, Artificial Sequence
  Description of Artificial Sequence: Synthetic oligonucleotide
  Sense strand starting at position 1518 of SEQ ID NO: 1883962
cauugcacuccaggagaga

SEQ ID NO: 2229465 - RNA, 19 nt, Artificial Sequence
  Description of Artificial Sequence: Synthetic oligonucleotide
  Antisense strand to SEQ ID NO: 2229464
ucucuccuggagugcaaug

SEQ ID NO: 2229466 - RNA, 19 nt, Artificial Sequence
  Description of Artificial Sequence: Synthetic oligonucleotide
  Sense strand starting at position 1703 of SEQ ID NO: 1883962
gauacucagcugcaggauu

SEQ ID NO: 2229467 - RNA, 19 nt, Artificial Sequence
  Description of Artificial Sequence: Synthetic oligonucleotide
  Antisense strand to SEQ ID NO: 2229466
aauccugcagcugaguauc

SEQ ID NO: 2229468 - RNA, 19 nt, Artificial Sequence
  Description of Artificial Sequence: Synthetic oligonucleotide
  Sense strand starting at position 1811 of SEQ ID NO: 1883962
uggguuaacaggugugaug

SEQ ID NO: 2229469 - RNA, 19 nt, Artificial Sequence
  Description of Artificial Sequence: Synthetic oligonucleotide
  Antisense strand to SEQ ID NO: 2229468
caucacaccuguuaaccca

SEQ ID NO: 2229470 - RNA, 19 nt, Artificial Sequence
  Description of Artificial Sequence: Synthetic oligonucleotide
  Sense strand starting at position 1954 of SEQ ID NO: 1883962
guuagauacggaggaaaug

SEQ ID NO: 2229471 - RNA, 19 nt, Artificial Sequence
  Description of Artificial Sequence: Synthetic oligonucleotide
  Antisense strand to SEQ ID NO: 2229470
cauuuccuccguaucuaac

SEQ ID NO: 2229472 - RNA, 19 nt, Artificial Sequence
  Description of Artificial Sequence: Synthetic oligonucleotide
  Sense strand starting at position 2036 of SEQ ID NO: 1883962
agcucuuugugcuccugaa

SEQ ID NO: 2229473 - RNA, 19 nt, Artificial Sequence
  Description of Artificial Sequence: Synthetic oligonucleotide
  Antisense strand to SEQ ID NO: 2229472
uucaggagcacaaagagcu

SEQ ID NO: 2229474 - RNA, 19 nt, Artificial Sequence
  Description of Artificial Sequence: Synthetic oligonucleotide
  Sense strand starting at position 2040 of SEQ ID NO: 1883962
cuuugugcuccugaaaggu

SEQ ID NO: 2229475 - RNA, 19 nt, Artificial Sequence
  Description of Artificial Sequence: Synthetic oligonucleotide
  Antisense strand to SEQ ID NO: 2229474
accuuucaggagcacaaag

SEQ ID NO: 2229476 - RNA, 19 nt, Artificial Sequence
  Description of Artificial Sequence: Synthetic oligonucleotide
  Sense strand starting at position 2046 of SEQ ID NO: 1883962
gcuccugaaaggugcucua

SEQ ID NO: 2229477 - RNA, 19 nt, Artificial Sequence
  Description of Artificial Sequence: Synthetic oligonucleotide
  Antisense strand to SEQ ID NO: 2229476
uagagcaccuuucaggagc

SEQ ID NO: 2229478 - RNA, 19 nt, Artificial Sequence
  Description of Artificial Sequence: Synthetic oligonucleotide
  Sense strand starting at position 2049 of SEQ ID NO: 1883962
ccugaaaggugcucuauga

SEQ ID NO: 2229479 - RNA, 19 nt, Artificial Sequence
  Description of Artificial Sequence: Synthetic oligonucleotide
  Antisense strand to SEQ ID NO: 2229478
ucauagagcaccuuucagg

SEQ ID NO: 2229480 - RNA, 19 nt, Artificial Sequence
  Description of Artificial Sequence: Synthetic oligonucleotide
  Sense strand starting at position 2053 of SEQ ID NO: 1883962
aaaggugcucuaugaguuc

SEQ ID NO: 2229481 - RNA, 19 nt, Artificial Sequence
  Description of Artificial Sequence: Synthetic oligonucleotide
  Antisense strand to SEQ ID NO: 2229480
gaacucauagagcaccuuu

SEQ ID NO: 2229482 - RNA, 19 nt, Artificial Sequence
  Description of Artificial Sequence: Synthetic oligonucleotide
  Sense strand starting at position 2124 of SEQ ID NO: 1883962
ggaugaauguuacccaccu

SEQ ID NO: 2229483 - RNA, 19 nt, Artificial Sequence
  Description of Artificial Sequence: Synthetic oligonucleotide
  Antisense strand to SEQ ID NO: 2229482
agguggguaacauucaucc

SEQ ID NO: 2229484 - RNA, 19 nt, Artificial Sequence
  Description of Artificial Sequence: Synthetic oligonucleotide
  Sense strand starting at position 2389 of SEQ ID NO: 1883962
uggucuuagucacucaucu

SEQ ID NO: 2229485 - RNA, 19 nt, Artificial Sequence
  Description of Artificial Sequence: Synthetic oligonucleotide
  Antisense strand to SEQ ID NO: 2229484
agaugagugacuaagacca

SEQ ID NO: 2229486 - RNA, 19 nt, Artificial Sequence
  Description of Artificial Sequence: Synthetic oligonucleotide
  Sense strand starting at position 2393 of SEQ ID NO: 1883962
cuuagucacucaucuguuu

SEQ ID NO: 2229487 - RNA, 19 nt, Artificial Sequence
  Description of Artificial Sequence: Synthetic oligonucleotide
  Antisense strand to SEQ ID NO: 2229486
aaacagaugagugacuaag

SEQ ID NO: 2229488 - RNA, 19 nt, Artificial Sequence
  Description of Artificial Sequence: Synthetic oligonucleotide
  Sense strand starting at position 2554 of SEQ ID NO: 1883962
uuauguggucuauagaucu

SEQ ID NO: 2229489 - RNA, 19 nt, Artificial Sequence
  Description of Artificial Sequence: Synthetic oligonucleotide
  Antisense strand to SEQ ID NO: 2229488
agaucuauagaccacauaa

SEQ ID NO: 2229490 - RNA, 19 nt, Artificial Sequence
  Description of Artificial Sequence: Synthetic oligonucleotide
  Sense strand starting at position 2561 of SEQ ID NO: 1883962
gucuauagaucuuugccuu

SEQ ID NO: 2229491 - RNA, 19 nt, Artificial Sequence
  Description of Artificial Sequence: Synthetic oligonucleotide
  Antisense strand to SEQ ID NO: 2229490
aaggcaaagaucuauagac

SEQ ID NO: 2229492 - RNA, 19 nt, Artificial Sequence
  Description of Artificial Sequence: Synthetic oligonucleotide
  Sense strand starting at position 2568 of SEQ ID NO: 1883962
gaucuuugccuuuaggaca

SEQ ID NO: 2229493 - RNA, 19 nt, Artificial Sequence
  Description of Artificial Sequence: Synthetic oligonucleotide
  Antisense strand to SEQ ID NO: 2229492
uguccuaaaggcaaagauc

SEQ ID NO: 2229494 - RNA, 19 nt, Artificial Sequence
  Description of Artificial Sequence: Synthetic oligonucleotide
  Sense strand starting at position 2620 of SEQ ID NO: 1883962
ucucucuuagucugagagu

SEQ ID NO: 2229495 - RNA, 19 nt, Artificial Sequence
  Description of Artificial Sequence: Synthetic oligonucleotide
  Antisense strand to SEQ ID NO: 2229494
acucucagacuaagagaga

SEQ ID NO: 2229496 - RNA, 19 nt, Artificial Sequence
  Description of Artificial Sequence: Synthetic oligonucleotide
  Sense strand starting at position 2798 of SEQ ID NO: 1883962
gaaacauuaguugggcgua

SEQ ID NO: 2229497 - RNA, 19 nt, Artificial Sequence
  Description of Artificial Sequence: Synthetic oligonucleotide
  Antisense strand to SEQ ID NO: 2229496
uacgcccaacuaauguuuc

SEQ ID NO: 2229498 - RNA, 19 nt, Artificial Sequence
  Description of Artificial Sequence: Synthetic oligonucleotide
  Sense strand starting at position 3517 of SEQ ID NO: 1883962
gagucuccugagcaaugca

SEQ ID NO: 2229499 - RNA, 19 nt, Artificial Sequence
  Description of Artificial Sequence: Synthetic oligonucleotide
  Antisense strand to SEQ ID NO: 2229498
ugcauugcucaggagacuc

SEQ ID NO: 2229500 - RNA, 19 nt, Artificial Sequence
  Description of Artificial Sequence: Synthetic oligonucleotide
  Sense strand starting at position 3611 of SEQ ID NO: 1883962
gggcgaugaaucuaguaga

SEQ ID NO: 2229501 - RNA, 19 nt, Artificial Sequence
  Description of Artificial Sequence: Synthetic oligonucleotide
  Antisense strand to SEQ ID NO: 2229500
ucuacuagauucaucgccc

SEQ ID NO: 2229502 - RNA, 19 nt, Artificial Sequence
  Description of Artificial Sequence: Synthetic oligonucleotide
  Sense strand starting at position 3612 of SEQ ID NO: 1883962
ggcgaugaaucuaguagag

SEQ ID NO: 2229503 - RNA, 19 nt, Artificial Sequence
  Description of Artificial Sequence: Synthetic oligonucleotide
  Antisense strand to SEQ ID NO: 2229502
cucuacuagauucaucgcc

SEQ ID NO: 2229504 - RNA, 19 nt, Artificial Sequence
  Description of Artificial Sequence: Synthetic oligonucleotide
  Sense strand starting at position 3790 of SEQ ID NO: 1883962
uucuguggucaccgagcaa

SEQ ID NO: 2229505 - RNA, 19 nt, Artificial Sequence
  Description of Artificial Sequence: Synthetic oligonucleotide
  Antisense strand to SEQ ID NO: 2229504
uugcucggugaccacagaa

SEQ ID NO: 2229506 - RNA, 19 nt, Artificial Sequence
  Description of Artificial Sequence: Synthetic oligonucleotide
  Sense strand starting at position 3803 of SEQ ID NO: 1883962
gagcaaucugguggcaagu

SEQ ID NO: 2229507 - RNA, 19 nt, Artificial Sequence
  Description of Artificial Sequence: Synthetic oligonucleotide
  Antisense strand to SEQ ID NO: 2229506
acuugccaccagauugcuc

SEQ ID NO: 2229508 - RNA, 19 nt, Artificial Sequence
  Description of Artificial Sequence: Synthetic oligonucleotide
  Sense strand starting at position 3816 of SEQ ID NO: 1883962
gcaaguuaguucuucucuu

SEQ ID NO: 2229509 - RNA, 19 nt, Artificial Sequence
  Description of Artificial Sequence: Synthetic oligonucleotide
  Antisense strand to SEQ ID NO: 2229508
aagagaagaacuaacuugc

SEQ ID NO: 2229510 - RNA, 19 nt, Artificial Sequence
  Description of Artificial Sequence: Synthetic oligonucleotide
  Sense strand starting at position 3820 of SEQ ID NO: 1883962
guuaguucuucucuuaauu

SEQ ID NO: 2229511 - RNA, 19 nt, Artificial Sequence
  Description of Artificial Sequence: Synthetic oligonucleotide
  Antisense strand to SEQ ID NO: 2229510
aauuaagagaagaacuaac

SEQ ID NO: 2229512 - RNA, 19 nt, Artificial Sequence
  Description of Artificial Sequence: Synthetic oligonucleotide
  Sense strand starting at position 3930 of SEQ ID NO: 1883962
cuggcuucccguugagacu

SEQ ID NO: 2229513 - RNA, 19 nt, Artificial Sequence
  Description of Artificial Sequence: Synthetic oligonucleotide
  Antisense strand to SEQ ID NO: 2229512
agucucaacgggaagccag

SEQ ID NO: 2229514 - RNA, 19 nt, Artificial Sequence
  Description of Artificial Sequence: Synthetic oligonucleotide
  Sense strand starting at position 40 of SEQ ID NO: 1883963
uggaguugcugcugagaaa

SEQ ID NO: 2229515 - RNA, 19 nt, Artificial Sequence
  Description of Artificial Sequence: Synthetic oligonucleotide
  Antisense strand to SEQ ID NO: 2229514
uuucucagcagcaacucca

SEQ ID NO: 2229516 - RNA, 19 nt, Artificial Sequence
  Description of Artificial Sequence: Synthetic oligonucleotide
  Sense strand starting at position 41 of SEQ ID NO: 1883963
ggaguugcugcugagaaag

SEQ ID NO: 2229517 - RNA, 19 nt, Artificial Sequence
  Description of Artificial Sequence: Synthetic oligonucleotide
  Antisense strand to SEQ ID NO: 2229516
cuuucucagcagcaacucc

SEQ ID NO: 2229518 - RNA, 19 nt, Artificial Sequence
  Description of Artificial Sequence: Synthetic oligonucleotide
  Sense strand starting at position 233 of SEQ ID NO: 1883963
gccgcuuccucacuguaaa

SEQ ID NO: 2229519 - RNA, 19 nt, Artificial Sequence
  Description of Artificial Sequence: Synthetic oligonucleotide
  Antisense strand to SEQ ID NO: 2229518
uuuacagugaggaagcggc

SEQ ID NO: 2229520 - RNA, 19 nt, Artificial Sequence
  Description of Artificial Sequence: Synthetic oligonucleotide
  Sense strand starting at position 234 of SEQ ID NO: 1883963
ccgcuuccucacuguaaag

SEQ ID NO: 2229521 - RNA, 19 nt, Artificial Sequence
  Description of Artificial Sequence: Synthetic oligonucleotide
  Antisense strand to SEQ ID NO: 2229520
cuuuacagugaggaagcgg

SEQ ID NO: 2229522 - RNA, 19 nt, Artificial Sequence
  Description of Artificial Sequence: Synthetic oligonucleotide
  Sense strand starting at position 236 of SEQ ID NO: 1883963
gcuuccucacuguaaagcu

SEQ ID NO: 2229523 - RNA, 19 nt, Artificial Sequence
  Description of Artificial Sequence: Synthetic oligonucleotide
  Antisense strand to SEQ ID NO: 2229522
agcuuuacagugaggaagc

SEQ ID NO: 2229524 - RNA, 19 nt, Artificial Sequence
  Description of Artificial Sequence: Synthetic oligonucleotide
  Sense strand starting at position 261 of SEQ ID NO: 1883963
cuauguaacuauguaucaa

SEQ ID NO: 2229525 - RNA, 19 nt, Artificial Sequence
  Description of Artificial Sequence: Synthetic oligonucleotide
  Antisense strand to SEQ ID NO: 2229524
uugauacauaguuacauag

SEQ ID NO: 2229526 - RNA, 19 nt, Artificial Sequence
  Description of Artificial Sequence: Synthetic oligonucleotide
  Sense strand starting at position 265 of SEQ ID NO: 1883963
guaacuauguaucaaugua

SEQ ID NO: 2229527 - RNA, 19 nt, Artificial Sequence
  Description of Artificial Sequence: Synthetic oligonucleotide
  Antisense strand to SEQ ID NO: 2229526
uacauugauacauaguuac

SEQ ID NO: 2229528 - RNA, 19 nt, Artificial Sequence
  Description of Artificial Sequence: Synthetic oligonucleotide
  Sense strand starting at position 304 of SEQ ID NO: 1883963
cucugcaucucuggugaau

SEQ ID NO: 2229529 - RNA, 19 nt, Artificial Sequence
  Description of Artificial Sequence: Synthetic oligonucleotide
  Antisense strand to SEQ ID NO: 2229528
auucaccagagaugcagag

SEQ ID NO: 2229530 - RNA, 19 nt, Artificial Sequence
  Description of Artificial Sequence: Synthetic oligonucleotide
  Sense strand starting at position 326 of SEQ ID NO: 1883963
ggcgauacguggugagaca

SEQ ID NO: 2229531 - RNA, 19 nt, Artificial Sequence
  Description of Artificial Sequence: Synthetic oligonucleotide
  Antisense strand to SEQ ID NO: 2229530
ugucucaccacguaucgcc

SEQ ID NO: 2229532 - RNA, 19 nt, Artificial Sequence
  Description of Artificial Sequence: Synthetic oligonucleotide
  Sense strand starting at position 424 of SEQ ID NO: 1883963
ggaauucugucuuucucac

SEQ ID NO: 2229533 - RNA, 19 nt, Artificial Sequence
  Description of Artificial Sequence: Synthetic oligonucleotide
  Antisense strand to SEQ ID NO: 2229532
gugagaaagacagaauucc

SEQ ID NO: 2229534 - RNA, 19 nt, Artificial Sequence
  Description of Artificial Sequence: Synthetic oligonucleotide
  Sense strand starting at position 431 of SEQ ID NO: 1883963
ugucuuucucaccacgaga

SEQ ID NO: 2229535 - RNA, 19 nt, Artificial Sequence
  Description of Artificial Sequence: Synthetic oligonucleotide
  Antisense strand to SEQ ID NO: 2229534
ucucguggugagaaagaca

SEQ ID NO: 2229536 - RNA, 19 nt, Artificial Sequence
  Description of Artificial Sequence: Synthetic oligonucleotide
  Sense strand starting at position 526 of SEQ ID NO: 1883963
uuuccauuuccuggucuua

SEQ ID NO: 2229537 - RNA, 19 nt, Artificial Sequence
  Description of Artificial Sequence: Synthetic oligonucleotide
  Antisense strand to SEQ ID NO: 2229536
uaagaccaggaaauggaaa

SEQ ID NO: 2229538 - RNA, 19 nt, Artificial Sequence
  Description of Artificial Sequence: Synthetic oligonucleotide
  Sense strand starting at position 902 of SEQ ID NO: 1883963
cccggagacuucuggaaca

SEQ ID NO: 2229539 - RNA, 19 nt, Artificial Sequence
  Description of Artificial Sequence: Synthetic oligonucleotide
  Antisense strand to SEQ ID NO: 2229538
uguuccagaagucuccggg

SEQ ID NO: 2229540 - RNA, 19 nt, Artificial Sequence
  Description of Artificial Sequence: Synthetic oligonucleotide
  Sense strand starting at position 1019 of SEQ ID NO: 1883963
ugggacuguucaggagaca

SEQ ID NO: 2229541 - RNA, 19 nt, Artificial Sequence
  Description of Artificial Sequence: Synthetic oligonucleotide
  Antisense strand to SEQ ID NO: 2229540
ugucuccugaacaguccca

SEQ ID NO: 2229542 - RNA, 19 nt, Artificial Sequence
  Description of Artificial Sequence: Synthetic oligonucleotide
  Sense strand starting at position 1272 of SEQ ID NO: 1883963
cuagguuaucacuaggugu

SEQ ID NO: 2229543 - RNA, 19 nt, Artificial Sequence
  Description of Artificial Sequence: Synthetic oligonucleotide
  Antisense strand to SEQ ID NO: 2229542
acaccuagugauaaccuag

SEQ ID NO: 2229544 - RNA, 19 nt, Artificial Sequence
  Description of Artificial Sequence: Synthetic oligonucleotide
  Sense strand starting at position 1275 of SEQ ID NO: 1883963
gguuaucacuaggugugga

SEQ ID NO: 2229545 - RNA, 19 nt, Artificial Sequence
  Description of Artificial Sequence: Synthetic oligonucleotide
  Antisense strand to SEQ ID NO: 2229544
uccacaccuagugauaacc

SEQ ID NO: 2229546 - RNA, 19 nt, Artificial Sequence
  Description of Artificial Sequence: Synthetic oligonucleotide
  Sense strand starting at position 1276 of SEQ ID NO: 1883963
guuaucacuagguguggaa

SEQ ID NO: 2229547 - RNA, 19 nt, Artificial Sequence
  Description of Artificial Sequence: Synthetic oligonucleotide
  Antisense strand to SEQ ID NO: 2229546
uuccacaccuagugauaac

SEQ ID NO: 2229548 - RNA, 19 nt, Artificial Sequence
  Description of Artificial Sequence: Synthetic oligonucleotide
  Sense strand starting at position 1367 of SEQ ID NO: 1883963
ggaccugucugccucaagu

SEQ ID NO: 2229549 - RNA, 19 nt, Artificial Sequence
  Description of Artificial Sequence: Synthetic oligonucleotide
  Antisense strand to SEQ ID NO: 2229548
acuugaggcagacaggucc

SEQ ID NO: 2229550 - RNA, 19 nt, Artificial Sequence
  Description of Artificial Sequence: Synthetic oligonucleotide
  Sense strand starting at position 1416 of SEQ ID NO: 1883963
uagccuucuguguguccua

SEQ ID NO: 2229551 - RNA, 19 nt, Artificial Sequence
  Description of Artificial Sequence: Synthetic oligonucleotide
  Antisense strand to SEQ ID NO: 2229550
uaggacacacagaaggcua

SEQ ID NO: 2229552 - RNA, 19 nt, Artificial Sequence
  Description of Artificial Sequence: Synthetic oligonucleotide
  Sense strand starting at position 1455 of SEQ ID NO: 1883963
agggcuuucccuuggacaa

SEQ ID NO: 2229553 - RNA, 19 nt, Artificial Sequence
  Description of Artificial Sequence: Synthetic oligonucleotide
  Antisense strand to SEQ ID NO: 2229552
uuguccaagggaaagcccu

SEQ ID NO: 2229554 - RNA, 19 nt, Artificial Sequence
  Description of Artificial Sequence: Synthetic oligonucleotide
  Sense strand starting at position 1456 of SEQ ID NO: 1883963
gggcuuucccuuggacaac

SEQ ID NO: 2229555 - RNA, 19 nt, Artificial Sequence
  Description of Artificial Sequence: Synthetic oligonucleotide
  Antisense strand to SEQ ID NO: 2229554
guuguccaagggaaagccc

SEQ ID NO: 2229556 - RNA, 19 nt, Artificial Sequence
  Description of Artificial Sequence: Synthetic oligonucleotide
  Sense strand starting at position 1766 of SEQ ID NO: 1883963
accugugcucaguguggua

SEQ ID NO: 2229557 - RNA, 19 nt, Artificial Sequence
  Description of Artificial Sequence: Synthetic oligonucleotide
  Antisense strand to SEQ ID NO: 2229556
uaccacacugagcacaggu

SEQ ID NO: 2229558 - RNA, 19 nt, Artificial Sequence
  Description of Artificial Sequence: Synthetic oligonucleotide
  Sense strand starting at position 2219 of SEQ ID NO: 1883963
uaauucugccucugugagu

SEQ ID NO: 2229559 - RNA, 19 nt, Artificial Sequence
  Description of Artificial Sequence: Synthetic oligonucleotide
  Antisense strand to SEQ ID NO: 2229558
acucacagaggcagaauua

SEQ ID NO: 2229560 - RNA, 19 nt, Artificial Sequence
  Description of Artificial Sequence: Synthetic oligonucleotide
  Sense strand starting at position 2340 of SEQ ID NO: 1883963
ggcagaaguagccaugcaa

SEQ ID NO: 2229561 - RNA, 19 nt, Artificial Sequence
  Description of Artificial Sequence: Synthetic oligonucleotide
  Antisense strand to SEQ ID NO: 2229560
uugcauggcuacuucugcc

SEQ ID NO: 2229562 - RNA, 19 nt, Artificial Sequence
  Description of Artificial Sequence: Synthetic oligonucleotide
  Sense strand starting at position 2486 of SEQ ID NO: 1883963
cagggcaguuccugagacu

SEQ ID NO: 2229563 - RNA, 19 nt, Artificial Sequence
  Description of Artificial Sequence: Synthetic oligonucleotide
  Antisense strand to SEQ ID NO: 2229562
agucucaggaacugcccug

SEQ ID NO: 2229564 - RNA, 19 nt, Artificial Sequence
  Description of Artificial Sequence: Synthetic oligonucleotide
  Sense strand starting at position 2544 of SEQ ID NO: 1883963
aacggaguuugugacgaaa

SEQ ID NO: 2229565 - RNA, 19 nt, Artificial Sequence
  Description of Artificial Sequence: Synthetic oligonucleotide
  Antisense strand to SEQ ID NO: 2229564
uuucgucacaaacuccguu

SEQ ID NO: 2229566 - RNA, 19 nt, Artificial Sequence
  Description of Artificial Sequence: Synthetic oligonucleotide
  Sense strand starting at position 2869 of SEQ ID NO: 1883963
cuggcauaucuggacuuga

SEQ ID NO: 2229567 - RNA, 19 nt, Artificial Sequence
  Description of Artificial Sequence: Synthetic oligonucleotide
  Antisense strand to SEQ ID NO: 2229566
ucaaguccagauaugccag

SEQ ID NO: 2229568 - RNA, 19 nt, Artificial Sequence
  Description of Artificial Sequence: Synthetic oligonucleotide
  Sense strand starting at position 2933 of SEQ ID NO: 1883963
uguguauauuucuguuccu

SEQ ID NO: 2229569 - RNA, 19 nt, Artificial Sequence
  Description of Artificial Sequence: Synthetic oligonucleotide
  Antisense strand to SEQ ID NO: 2229568
aggaacagaaauauacaca

SEQ ID NO: 2229570 - RNA, 19 nt, Artificial Sequence
  Description of Artificial Sequence: Synthetic oligonucleotide
  Sense strand starting at position 2968 of SEQ ID NO: 1883963
uggagauugucuuugggaa

SEQ ID NO: 2229571 - RNA, 19 nt, Artificial Sequence
  Description of Artificial Sequence: Synthetic oligonucleotide
  Antisense strand to SEQ ID NO: 2229570
uucccaaagacaaucucca

SEQ ID NO: 2229572 - RNA, 19 nt, Artificial Sequence
  Description of Artificial Sequence: Synthetic oligonucleotide
  Sense strand starting at position 2969 of SEQ ID NO: 1883963
ggagauugucuuugggaau

SEQ ID NO: 2229573 - RNA, 19 nt, Artificial Sequence
  Description of Artificial Sequence: Synthetic oligonucleotide
  Antisense strand to SEQ ID NO: 2229572
auucccaaagacaaucucc

SEQ ID NO: 2229574 - RNA, 19 nt, Artificial Sequence
  Description of Artificial Sequence: Synthetic oligonucleotide
  Sense strand starting at position 2970 of SEQ ID NO: 1883963
gagauugucuuugggaaua

SEQ ID NO: 2229575 - RNA, 19 nt, Artificial Sequence
  Description of Artificial Sequence: Synthetic oligonucleotide
  Antisense strand to SEQ ID NO: 2229574
uauucccaaagacaaucuc

SEQ ID NO: 2229576 - RNA, 19 nt, Artificial Sequence
  Description of Artificial Sequence: Synthetic oligonucleotide
  Sense strand starting at position 2972 of SEQ ID NO: 1883963
gauugucuuugggaauaac

SEQ ID NO: 2229577 - RNA, 19 nt, Artificial Sequence
  Description of Artificial Sequence: Synthetic oligonucleotide
  Antisense strand to SEQ ID NO: 2229576
guuauucccaaagacaauc

SEQ ID NO: 2229578 - RNA, 19 nt, Artificial Sequence
  Description of Artificial Sequence: Synthetic oligonucleotide
  Sense strand starting at position 3059 of SEQ ID NO: 1883963
cgaggugucucuuuaaaua

SEQ ID NO: 2229579 - RNA, 19 nt, Artificial Sequence
  Description of Artificial Sequence: Synthetic oligonucleotide
  Antisense strand to SEQ ID NO: 2229578
uauuuaaagagacaccucg

SEQ ID NO: 2229580 - RNA, 19 nt, Artificial Sequence
  Description of Artificial Sequence: Synthetic oligonucleotide
  Sense strand starting at position 3302 of SEQ ID NO: 1883963
cccgcaaucuguugauaac

SEQ ID NO: 2229581 - RNA, 19 nt, Artificial Sequence
  Description of Artificial Sequence: Synthetic oligonucleotide
  Antisense strand to SEQ ID NO: 2229580
guuaucaacagauugcggg

SEQ ID NO: 2229582 - RNA, 19 nt, Artificial Sequence
  Description of Artificial Sequence: Synthetic oligonucleotide
  Sense strand starting at position 3303 of SEQ ID NO: 1883963
ccgcaaucuguugauaacu

SEQ ID NO: 2229583 - RNA, 19 nt, Artificial Sequence
  Description of Artificial Sequence: Synthetic oligonucleotide
  Antisense strand to SEQ ID NO: 2229582
aguuaucaacagauugcgg

SEQ ID NO: 2229584 - RNA, 19 nt, Artificial Sequence
  Description of Artificial Sequence: Synthetic oligonucleotide
  Sense strand starting at position 3539 of SEQ ID NO: 1883963
agcagcuccgaguaacuuu

SEQ ID NO: 2229585 - RNA, 19 nt, Artificial Sequence
  Description of Artificial Sequence: Synthetic oligonucleotide
  Antisense strand to SEQ ID NO: 2229584
aaaguuacucggagcugcu

SEQ ID NO: 2229586 - RNA, 19 nt, Artificial Sequence
  Description of Artificial Sequence: Synthetic oligonucleotide
  Sense strand starting at position 3733 of SEQ ID NO: 1883963
gcccgagaugguugaguuu

SEQ ID NO: 2229587 - RNA, 19 nt, Artificial Sequence
  Description of Artificial Sequence: Synthetic oligonucleotide
  Antisense strand to SEQ ID NO: 2229586
aaacucaaccaucucgggc

SEQ ID NO: 2229588 - RNA, 19 nt, Artificial Sequence
  Description of Artificial Sequence: Synthetic oligonucleotide
  Sense strand starting at position 3742 of SEQ ID NO: 1883963
gguugaguuuggcuccgga

SEQ ID NO: 2229589 - RNA, 19 nt, Artificial Sequence
  Description of Artificial Sequence: Synthetic oligonucleotide
  Antisense strand to SEQ ID NO: 2229588
uccggagccaaacucaacc

SEQ ID NO: 2229590 - RNA, 19 nt, Artificial Sequence
  Description of Artificial Sequence: Synthetic oligonucleotide
  Sense strand starting at position 54 of SEQ ID NO: 1883964
ugucccuucugucuaauuu

SEQ ID NO: 2229591 - RNA, 19 nt, Artificial Sequence
  Description of Artificial Sequence: Synthetic oligonucleotide
  Antisense strand to SEQ ID NO: 2229590
aaauuagacagaagggaca

SEQ ID NO: 2229592 - RNA, 19 nt, Artificial Sequence
  Description of Artificial Sequence: Synthetic oligonucleotide
  Sense strand starting at position 126 of SEQ ID NO: 1883964
uuuaacuaagcaugcaaga

SEQ ID NO: 2229593 - RNA, 19 nt, Artificial Sequence
  Description of Artificial Sequence: Synthetic oligonucleotide
  Antisense strand to SEQ ID NO: 2229592
ucuugcaugcuuaguuaaa

SEQ ID NO: 2229594 - RNA, 19 nt, Artificial Sequence
  Description of Artificial Sequence: Synthetic oligonucleotide
  Sense strand starting at position 172 of SEQ ID NO: 1883964
caaguuuccuucgcucuga

SEQ ID NO: 2229595 - RNA, 19 nt, Artificial Sequence
  Description of Artificial Sequence: Synthetic oligonucleotide
  Antisense strand to SEQ ID NO: 2229594
ucagagcgaaggaaacuug

SEQ ID NO: 2229596 - RNA, 19 nt, Artificial Sequence
  Description of Artificial Sequence: Synthetic oligonucleotide
  Sense strand starting at position 247 of SEQ ID NO: 1883964
guuuccgagucauccggaa

SEQ ID NO: 2229597 - RNA, 19 nt, Artificial Sequence
  Description of Artificial Sequence: Synthetic oligonucleotide
  Antisense strand to SEQ ID NO: 2229596
uuccggaugacucggaaac

SEQ ID NO: 2229598 - RNA, 19 nt, Artificial Sequence
  Description of Artificial Sequence: Synthetic oligonucleotide
  Sense strand starting at position 252 of SEQ ID NO: 1883964
cgagucauccggaacgcga

SEQ ID NO: 2229599 - RNA, 19 nt, Artificial Sequence
  Description of Artificial Sequence: Synthetic oligonucleotide
  Antisense strand to SEQ ID NO: 2229598
ucgcguuccggaugacucg

SEQ ID NO: 2229600 - RNA, 19 nt, Artificial Sequence
  Description of Artificial Sequence: Synthetic oligonucleotide
  Sense strand starting at position 948 of SEQ ID NO: 1883964
acuugauuucugcgacggu

SEQ ID NO: 2229601 - RNA, 19 nt, Artificial Sequence
  Description of Artificial Sequence: Synthetic oligonucleotide
  Antisense strand to SEQ ID NO: 2229600
accgucgcagaaaucaagu

SEQ ID NO: 2229602 - RNA, 19 nt, Artificial Sequence
  Description of Artificial Sequence: Synthetic oligonucleotide
  Sense strand starting at position 1021 of SEQ ID NO: 1883964
cugggugccaucuggagaa

SEQ ID NO: 2229603 - RNA, 19 nt, Artificial Sequence
  Description of Artificial Sequence: Synthetic oligonucleotide
  Antisense strand to SEQ ID NO: 2229602
uucuccagauggcacccag

SEQ ID NO: 2229604 - RNA, 19 nt, Artificial Sequence
  Description of Artificial Sequence: Synthetic oligonucleotide
  Sense strand starting at position 2152 of SEQ ID NO: 1883964
gcuucucacccucagagua

SEQ ID NO: 2229605 - RNA, 19 nt, Artificial Sequence
  Description of Artificial Sequence: Synthetic oligonucleotide
  Antisense strand to SEQ ID NO: 2229604
uacucugagggugagaagc

SEQ ID NO: 2229606 - RNA, 19 nt, Artificial Sequence
  Description of Artificial Sequence: Synthetic oligonucleotide
  Sense strand starting at position 2354 of SEQ ID NO: 1883964
uccaauuguccggagagca

SEQ ID NO: 2229607 - RNA, 19 nt, Artificial Sequence
  Description of Artificial Sequence: Synthetic oligonucleotide
  Antisense strand to SEQ ID NO: 2229606
ugcucuccggacaauugga

SEQ ID NO: 2229608 - RNA, 19 nt, Artificial Sequence
  Description of Artificial Sequence: Synthetic oligonucleotide
  Sense strand starting at position 2477 of SEQ ID NO: 1883964
aacagagaguuccuuguuu

SEQ ID NO: 2229609 - RNA, 19 nt, Artificial Sequence
  Description of Artificial Sequence: Synthetic oligonucleotide
  Antisense strand to SEQ ID NO: 2229608
aaacaaggaacucucuguu

SEQ ID NO: 2229610 - RNA, 19 nt, Artificial Sequence
  Description of Artificial Sequence: Synthetic oligonucleotide
  Sense strand starting at position 2549 of SEQ ID NO: 1883964
cggucuguuguuagucaga

SEQ ID NO: 2229611 - RNA, 19 nt, Artificial Sequence
  Description of Artificial Sequence: Synthetic oligonucleotide
  Antisense strand to SEQ ID NO: 2229610
ucugacuaacaacagaccg

SEQ ID NO: 2229612 - RNA, 19 nt, Artificial Sequence
  Description of Artificial Sequence: Synthetic oligonucleotide
  Sense strand starting at position 2559 of SEQ ID NO: 1883964
uuagucagagcuuauaauu

SEQ ID NO: 2229613 - RNA, 19 nt, Artificial Sequence
  Description of Artificial Sequence: Synthetic oligonucleotide
  Antisense strand to SEQ ID NO: 2229612
aauuauaagcucugacuaa

SEQ ID NO: 2229614 - RNA, 19 nt, Artificial Sequence
  Description of Artificial Sequence: Synthetic oligonucleotide
  Sense strand starting at position 2748 of SEQ ID NO: 1883964
cugucuuaggcauacuuaa

SEQ ID NO: 2229615 - RNA, 19 nt, Artificial Sequence
  Description of Artificial Sequence: Synthetic oligonucleotide
  Antisense strand to SEQ ID NO: 2229614
uuaaguaugccuaagacag

SEQ ID NO: 2229616 - RNA, 19 nt, Artificial Sequence
  Description of Artificial Sequence: Synthetic oligonucleotide
  Sense strand starting at position 2828 of SEQ ID NO: 1883964
ggaggcaucaguugugacu

SEQ ID NO: 2229617 - RNA, 19 nt, Artificial Sequence
  Description of Artificial Sequence: Synthetic oligonucleotide
  Antisense strand to SEQ ID NO: 2229616
agucacaacugaugccucc

SEQ ID NO: 2229618 - RNA, 19 nt, Artificial Sequence
  Description of Artificial Sequence: Synthetic oligonucleotide
  Sense strand starting at position 2834 of SEQ ID NO: 1883964
aucaguugugacugaauuc

SEQ ID NO: 2229619 - RNA, 19 nt, Artificial Sequence
  Description of Artificial Sequence: Synthetic oligonucleotide
  Antisense strand to SEQ ID NO: 2229618
gaauucagucacaacugau

SEQ ID NO: 2229620 - RNA, 19 nt, Artificial Sequence
  Description of Artificial Sequence: Synthetic oligonucleotide
  Sense strand starting at position 2886 of SEQ ID NO: 1883964
uguacuuccugucucaaac

SEQ ID NO: 2229621 - RNA, 19 nt, Artificial Sequence
  Description of Artificial Sequence: Synthetic oligonucleotide
  Antisense strand to SEQ ID NO: 2229620
guuugagacaggaaguaca

SEQ ID NO: 2229622 - RNA, 19 nt, Artificial Sequence
  Description of Artificial Sequence: Synthetic oligonucleotide
  Sense strand starting at position 2903 of SEQ ID NO: 1883964
acuauagcauuugagggaa

SEQ ID NO: 2229623 - RNA, 19 nt, Artificial Sequence
  Description of Artificial Sequence: Synthetic oligonucleotide
  Antisense strand to SEQ ID NO: 2229622
uucccucaaaugcuauagu

SEQ ID NO: 2229624 - RNA, 19 nt, Artificial Sequence
  Description of Artificial Sequence: Synthetic oligonucleotide
  Sense strand starting at position 2947 of SEQ ID NO: 1883964
uuuaacuucugccugggaa

SEQ ID NO: 2229625 - RNA, 19 nt, Artificial Sequence
  Description of Artificial Sequence: Synthetic oligonucleotide
  Antisense strand to SEQ ID NO: 2229624
uucccaggcagaaguuaaa

SEQ ID NO: 2229626 - RNA, 19 nt, Artificial Sequence
  Description of Artificial Sequence: Synthetic oligonucleotide
  Sense strand starting at position 2948 of SEQ ID NO: 1883964
uuaacuucugccugggaag

SEQ ID NO: 2229627 - RNA, 19 nt, Artificial Sequence
  Description of Artificial Sequence: Synthetic oligonucleotide
  Antisense strand to SEQ ID NO: 2229626
cuucccaggcagaaguuaa

SEQ ID NO: 2229628 - RNA, 19 nt, Artificial Sequence
  Description of Artificial Sequence: Synthetic oligonucleotide
  Sense strand starting at position 2949 of SEQ ID NO: 1883964
uaacuucugccugggaagu

SEQ ID NO: 2229629 - RNA, 19 nt, Artificial Sequence
  Description of Artificial Sequence: Synthetic oligonucleotide
  Antisense strand to SEQ ID NO: 2229628
acuucccaggcagaaguua

SEQ ID NO: 2229630 - RNA, 19 nt, Artificial Sequence
  Description of Artificial Sequence: Synthetic oligonucleotide
  Sense strand starting at position 3080 of SEQ ID NO: 1883964
cugagaucuucccuuaguc

SEQ ID NO: 2229631 - RNA, 19 nt, Artificial Sequence
  Description of Artificial Sequence: Synthetic oligonucleotide
  Antisense strand to SEQ ID NO: 2229630
gacuaagggaagaucucag

SEQ ID NO: 2229632 - RNA, 19 nt, Artificial Sequence
  Description of Artificial Sequence: Synthetic oligonucleotide
  Sense strand starting at position 3090 of SEQ ID NO: 1883964
cccuuagucccaugaggga

SEQ ID NO: 2229633 - RNA, 19 nt, Artificial Sequence
  Description of Artificial Sequence: Synthetic oligonucleotide
  Antisense strand to SEQ ID NO: 2229632
ucccucaugggacuaaggg

SEQ ID NO: 2229634 - RNA, 19 nt, Artificial Sequence
  Description of Artificial Sequence: Synthetic oligonucleotide
  Sense strand starting at position 3104 of SEQ ID NO: 1883964
agggaaggcucuggaaaga

SEQ ID NO: 2229635 - RNA, 19 nt, Artificial Sequence
  Description of Artificial Sequence: Synthetic oligonucleotide
  Antisense strand to SEQ ID NO: 2229634
ucuuuccagagccuucccu

SEQ ID NO: 2229636 - RNA, 19 nt, Artificial Sequence
  Description of Artificial Sequence: Synthetic oligonucleotide
  Sense strand starting at position 3174 of SEQ ID NO: 1883964
cugagaaaccuuugugugu

SEQ ID NO: 2229637 - RNA, 19 nt, Artificial Sequence
  Description of Artificial Sequence: Synthetic oligonucleotide
  Antisense strand to SEQ ID NO: 2229636
acacacaaagguuucucag

SEQ ID NO: 2229638 - RNA, 19 nt, Artificial Sequence
  Description of Artificial Sequence: Synthetic oligonucleotide
  Sense strand starting at position 3239 of SEQ ID NO: 1883964
ugcugaccugcugaaagau

SEQ ID NO: 2229639 - RNA, 19 nt, Artificial Sequence
  Description of Artificial Sequence: Synthetic oligonucleotide
  Antisense strand to SEQ ID NO: 2229638
aucuuucagcaggucagca

SEQ ID NO: 2229640 - RNA, 19 nt, Artificial Sequence
  Description of Artificial Sequence: Synthetic oligonucleotide
  Sense strand starting at position 3298 of SEQ ID NO: 1883964
aggcuuguuugucuuggua

SEQ ID NO: 2229641 - RNA, 19 nt, Artificial Sequence
  Description of Artificial Sequence: Synthetic oligonucleotide
  Antisense strand to SEQ ID NO: 2229640
uaccaagacaaacaagccu

SEQ ID NO: 2229642 - RNA, 19 nt, Artificial Sequence
  Description of Artificial Sequence: Synthetic oligonucleotide
  Sense strand starting at position 3373 of SEQ ID NO: 1883964
cuacuuaucuguccaguga

SEQ ID NO: 2229643 - RNA, 19 nt, Artificial Sequence
  Description of Artificial Sequence: Synthetic oligonucleotide
  Antisense strand to SEQ ID NO: 2229642
ucacuggacagauaaguag

SEQ ID NO: 2229644 - RNA, 19 nt, Artificial Sequence
  Description of Artificial Sequence: Synthetic oligonucleotide
  Sense strand starting at position 3377 of SEQ ID NO: 1883964
uuaucuguccagugaggga

SEQ ID NO: 2229645 - RNA, 19 nt, Artificial Sequence
  Description of Artificial Sequence: Synthetic oligonucleotide
  Antisense strand to SEQ ID NO: 2229644
ucccucacuggacagauaa

SEQ ID NO: 2229646 - RNA, 19 nt, Artificial Sequence
  Description of Artificial Sequence: Synthetic oligonucleotide
  Sense strand starting at position 3386 of SEQ ID NO: 1883964
cagugagggaguugaacua

SEQ ID NO: 2229647 - RNA, 19 nt, Artificial Sequence
  Description of Artificial Sequence: Synthetic oligonucleotide
  Antisense strand to SEQ ID NO: 2229646
uaguucaacucccucacug

SEQ ID NO: 2229648 - RNA, 19 nt, Artificial Sequence
  Description of Artificial Sequence: Synthetic oligonucleotide
  Sense strand starting at position 3420 of SEQ ID NO: 1883964
gccauccaguuaucaaguu

SEQ ID NO: 2229649 - RNA, 19 nt, Artificial Sequence
  Description of Artificial Sequence: Synthetic oligonucleotide
  Antisense strand to SEQ ID NO: 2229648
aacuugauaacuggauggc

SEQ ID NO: 2229650 - RNA, 19 nt, Artificial Sequence
  Description of Artificial Sequence: Synthetic oligonucleotide
  Sense strand starting at position 3497 of SEQ ID NO: 1883964
ucugauucuguaugaccau

SEQ ID NO: 2229651 - RNA, 19 nt, Artificial Sequence
  Description of Artificial Sequence: Synthetic oligonucleotide
  Antisense strand to SEQ ID NO: 2229650
auggucauacagaaucaga

SEQ ID NO: 2229652 - RNA, 19 nt, Artificial Sequence
  Description of Artificial Sequence: Synthetic oligonucleotide
  Sense strand starting at position 3620 of SEQ ID NO: 1883964
uccuaauuccugcaggauc

SEQ ID NO: 2229653 - RNA, 19 nt, Artificial Sequence
  Description of Artificial Sequence: Synthetic oligonucleotide
  Antisense strand to SEQ ID NO: 2229652
gauccugcaggaauuagga

SEQ ID NO: 2229654 - RNA, 19 nt, Artificial Sequence
  Description of Artificial Sequence: Synthetic oligonucleotide
  Sense strand starting at position 3660 of SEQ ID NO: 1883964
agcuuugaaucuuugccau

SEQ ID NO: 2229655 - RNA, 19 nt, Artificial Sequence
  Description of Artificial Sequence: Synthetic oligonucleotide
  Antisense strand to SEQ ID NO: 2229654
auggcaaagauucaaagcu

SEQ ID NO: 2229656 - RNA, 19 nt, Artificial Sequence
  Description of Artificial Sequence: Synthetic oligonucleotide
  Sense strand starting at position 3674 of SEQ ID NO: 1883964
gccauacuguuugcucaga

SEQ ID NO: 2229657 - RNA, 19 nt, Artificial Sequence
  Description of Artificial Sequence: Synthetic oligonucleotide
  Antisense strand to SEQ ID NO: 2229656
ucugagcaaacaguauggc

SEQ ID NO: 2229658 - RNA, 19 nt, Artificial Sequence
  Description of Artificial Sequence: Synthetic oligonucleotide
  Sense strand starting at position 3725 of SEQ ID NO: 1883964
agcaaacuguagccuuuaa

SEQ ID NO: 2229659 - RNA, 19 nt, Artificial Sequence
  Description of Artificial Sequence: Synthetic oligonucleotide
  Antisense strand to SEQ ID NO: 2229658
uuaaaggcuacaguuugcu

SEQ ID NO: 2229660 - RNA, 19 nt, Artificial Sequence
  Description of Artificial Sequence: Synthetic oligonucleotide
  Sense strand starting at position 3793 of SEQ ID NO: 1883964
aucuaacauucgcuuuaug

SEQ ID NO: 2229661 - RNA, 19 nt, Artificial Sequence
  Description of Artificial Sequence: Synthetic oligonucleotide
  Antisense strand to SEQ ID NO: 2229660
cauaaagcgaauguuagau

SEQ ID NO: 2229662 - RNA, 19 nt, Artificial Sequence
  Description of Artificial Sequence: Synthetic oligonucleotide
  Sense strand starting at position 3804 of SEQ ID NO: 1883964
gcuuuaugucaggcucugu

SEQ ID NO: 2229663 - RNA, 19 nt, Artificial Sequence
  Description of Artificial Sequence: Synthetic oligonucleotide
  Antisense strand to SEQ ID NO: 2229662
acagagccugacauaaagc

SEQ ID NO: 2229664 - RNA, 19 nt, Artificial Sequence
  Description of Artificial Sequence: Synthetic oligonucleotide
  Sense strand starting at position 3835 of SEQ ID NO: 1883964
gcaugcguugucuugauua

SEQ ID NO: 2229665 - RNA, 19 nt, Artificial Sequence
  Description of Artificial Sequence: Synthetic oligonucleotide
  Antisense strand to SEQ ID NO: 2229664
uaaucaagacaacgcaugc

SEQ ID NO: 2229666 - RNA, 19 nt, Artificial Sequence
  Description of Artificial Sequence: Synthetic oligonucleotide
  Sense strand starting at position 3932 of SEQ ID NO: 1883964
ucagcuucuugccuaagau

SEQ ID NO: 2229667 - RNA, 19 nt, Artificial Sequence
  Description of Artificial Sequence: Synthetic oligonucleotide
  Antisense strand to SEQ ID NO: 2229666
aucuuaggcaagaagcuga

SEQ ID NO: 2229668 - RNA, 19 nt, Artificial Sequence
  Description of Artificial Sequence: Synthetic oligonucleotide
  Sense strand starting at position 3946 of SEQ ID NO: 1883964
aagauugcacagcaguaaa

SEQ ID NO: 2229669 - RNA, 19 nt, Artificial Sequence
  Description of Artificial Sequence: Synthetic oligonucleotide
  Antisense strand to SEQ ID NO: 2229668
uuuacugcugugcaaucuu

SEQ ID NO: 2229670 - RNA, 19 nt, Artificial Sequence
  Description of Artificial Sequence: Synthetic oligonucleotide
  Sense strand starting at position 26 of SEQ ID NO: 1883965
uugagaacaucagauuaac

SEQ ID NO: 2229671 - RNA, 19 nt, Artificial Sequence
  Description of Artificial Sequence: Synthetic oligonucleotide
  Antisense strand to SEQ ID NO: 2229670
guuaaucugauguucucaa

SEQ ID NO: 2229672 - RNA, 19 nt, Artificial Sequence
  Description of Artificial Sequence: Synthetic oligonucleotide
  Sense strand starting at position 70 of SEQ ID NO: 1883965
caaucaauugaagguguua

SEQ ID NO: 2229673 - RNA, 19 nt, Artificial Sequence
  Description of Artificial Sequence: Synthetic oligonucleotide
  Antisense strand to SEQ ID NO: 2229672
uaacaccuucaauugauug

SEQ ID NO: 2229674 - RNA, 19 nt, Artificial Sequence
  Description of Artificial Sequence: Synthetic oligonucleotide
  Sense strand starting at position 72 of SEQ ID NO: 1883965
aucaauugaagguguuaag

SEQ ID NO: 2229675 - RNA, 19 nt, Artificial Sequence
  Description of Artificial Sequence: Synthetic oligonucleotide
  Antisense strand to SEQ ID NO: 2229674
cuuaacaccuucaauugau

SEQ ID NO: 2229676 - RNA, 19 nt, Artificial Sequence
  Description of Artificial Sequence: Synthetic oligonucleotide
  Sense strand starting at position 394 of SEQ ID NO: 1883965
agagaacacugauaaauaa

SEQ ID NO: 2229677 - RNA, 19 nt, Artificial Sequence
  Description of Artificial Sequence: Synthetic oligonucleotide
  Antisense strand to SEQ ID NO: 2229676
uuauuuaucaguguucucu

SEQ ID NO: 2229678 - RNA, 19 nt, Artificial Sequence
  Description of Artificial Sequence: Synthetic oligonucleotide
  Sense strand starting at position 470 of SEQ ID NO: 1883965
gcccaagaauuugaaggau

SEQ ID NO: 2229679 - RNA, 19 nt, Artificial Sequence
  Description of Artificial Sequence: Synthetic oligonucleotide
  Antisense strand to SEQ ID NO: 2229678
auccuucaaauucuugggc

SEQ ID NO: 2229680 - RNA, 19 nt, Artificial Sequence
  Description of Artificial Sequence: Synthetic oligonucleotide
  Sense strand starting at position 484 of SEQ ID NO: 1883965
aggauaagcuguuuaaauu

SEQ ID NO: 2229681 - RNA, 19 nt, Artificial Sequence
  Description of Artificial Sequence: Synthetic oligonucleotide
  Antisense strand to SEQ ID NO: 2229680
aauuuaaacagcuuauccu

SEQ ID NO: 2229682 - RNA, 19 nt, Artificial Sequence
  Description of Artificial Sequence: Synthetic oligonucleotide
  Sense strand starting at position 485 of SEQ ID NO: 1883965
ggauaagcuguuuaaauua

SEQ ID NO: 2229683 - RNA, 19 nt, Artificial Sequence
  Description of Artificial Sequence: Synthetic oligonucleotide
  Antisense strand to SEQ ID NO: 2229682
uaauuuaaacagcuuaucc

SEQ ID NO: 2229684 - RNA, 19 nt, Artificial Sequence
  Description of Artificial Sequence: Synthetic oligonucleotide
  Sense strand starting at position 516 of SEQ ID NO: 1883965
gggaguagcccaggaaaga

SEQ ID NO: 2229685 - RNA, 19 nt, Artificial Sequence
  Description of Artificial Sequence: Synthetic oligonucleotide
  Antisense strand to SEQ ID NO: 2229684
ucuuuccugggcuacuccc

SEQ ID NO: 2229686 - RNA, 19 nt, Artificial Sequence
  Description of Artificial Sequence: Synthetic oligonucleotide
  Sense strand starting at position 728 of SEQ ID NO: 1883965
uggagugcaggugaugaaa

SEQ ID NO: 2229687 - RNA, 19 nt, Artificial Sequence
  Description of Artificial Sequence: Synthetic oligonucleotide
  Antisense strand to SEQ ID NO: 2229686
uuucaucaccugcacucca

SEQ ID NO: 2229688 - RNA, 19 nt, Artificial Sequence
  Description of Artificial Sequence: Synthetic oligonucleotide
  Sense strand starting at position 791 of SEQ ID NO: 1883965
guugccaaucucuaagaga

SEQ ID NO: 2229689 - RNA, 19 nt, Artificial Sequence
  Description of Artificial Sequence: Synthetic oligonucleotide
  Antisense strand to SEQ ID NO: 2229688
ucucuuagagauuggcaac

SEQ ID NO: 2229690 - RNA, 19 nt, Artificial Sequence
  Description of Artificial Sequence: Synthetic oligonucleotide
  Sense strand starting at position 1026 of SEQ ID NO: 1883965
gaaguuguagcauaauauc

SEQ ID NO: 2229691 - RNA, 19 nt, Artificial Sequence
  Description of Artificial Sequence: Synthetic oligonucleotide
  Antisense strand to SEQ ID NO: 2229690
gauauuaugcuacaacuuc

SEQ ID NO: 2229692 - RNA, 19 nt, Artificial Sequence
  Description of Artificial Sequence: Synthetic oligonucleotide
  Sense strand starting at position 1405 of SEQ ID NO: 1883965
aguagacuuucuucuggga

SEQ ID NO: 2229693 - RNA, 19 nt, Artificial Sequence
  Description of Artificial Sequence: Synthetic oligonucleotide
  Antisense strand to SEQ ID NO: 2229692
ucccagaagaaagucuacu

SEQ ID NO: 2229694 - RNA, 19 nt, Artificial Sequence
  Description of Artificial Sequence: Synthetic oligonucleotide
  Sense strand starting at position 1465 of SEQ ID NO: 1883965
cuuacuuucccaggagcaa

SEQ ID NO: 2229695 - RNA, 19 nt, Artificial Sequence
  Description of Artificial Sequence: Synthetic oligonucleotide
  Antisense strand to SEQ ID NO: 2229694
uugcuccugggaaaguaag

SEQ ID NO: 2229696 - RNA, 19 nt, Artificial Sequence
  Description of Artificial Sequence: Synthetic oligonucleotide
  Sense strand starting at position 1466 of SEQ ID NO: 1883965
uuacuuucccaggagcaau

SEQ ID NO: 2229697 - RNA, 19 nt, Artificial Sequence
  Description of Artificial Sequence: Synthetic oligonucleotide
  Antisense strand to SEQ ID NO: 2229696
auugcuccugggaaaguaa

SEQ ID NO: 2229698 - RNA, 19 nt, Artificial Sequence
  Description of Artificial Sequence: Synthetic oligonucleotide
  Sense strand starting at position 1786 of SEQ ID NO: 1883965
accuuugguccugauaauc

SEQ ID NO: 2229699 - RNA, 19 nt, Artificial Sequence
  Description of Artificial Sequence: Synthetic oligonucleotide
  Antisense strand to SEQ ID NO: 2229698
gauuaucaggaccaaaggu

SEQ ID NO: 2229700 - RNA, 19 nt, Artificial Sequence
  Description of Artificial Sequence: Synthetic oligonucleotide
  Sense strand starting at position 1829 of SEQ ID NO: 1883965
cuuaccuugucuuccauga

SEQ ID NO: 2229701 - RNA, 19 nt, Artificial Sequence
  Description of Artificial Sequence: Synthetic oligonucleotide
  Antisense strand to SEQ ID NO: 2229700
ucauggaagacaagguaag

SEQ ID NO: 2229702 - RNA, 19 nt, Artificial Sequence
  Description of Artificial Sequence: Synthetic oligonucleotide
  Sense strand starting at position 2075 of SEQ ID NO: 1883965
aucaucuuccucugaguuu

SEQ ID NO: 2229703 - RNA, 19 nt, Artificial Sequence
  Description of Artificial Sequence: Synthetic oligonucleotide
  Antisense strand to SEQ ID NO: 2229702
aaacucagaggaagaugau

SEQ ID NO: 2229704 - RNA, 19 nt, Artificial Sequence
  Description of Artificial Sequence: Synthetic oligonucleotide
  Sense strand starting at position 2106 of SEQ ID NO: 1883965
ccauaucucuucuuggaag

SEQ ID NO: 2229705 - RNA, 19 nt, Artificial Sequence
  Description of Artificial Sequence: Synthetic oligonucleotide
  Antisense strand to SEQ ID NO: 2229704
cuuccaagaagagauaugg

SEQ ID NO: 2229706 - RNA, 19 nt, Artificial Sequence
  Description of Artificial Sequence: Synthetic oligonucleotide
  Sense strand starting at position 2124 of SEQ ID NO: 1883965
ggcugaaagucccugcaaa

SEQ ID NO: 2229707 - RNA, 19 nt, Artificial Sequence
  Description of Artificial Sequence: Synthetic oligonucleotide
  Antisense strand to SEQ ID NO: 2229706
uuugcagggacuuucagcc

SEQ ID NO: 2229708 - RNA, 19 nt, Artificial Sequence
  Description of Artificial Sequence: Synthetic oligonucleotide
  Sense strand starting at position 2125 of SEQ ID NO: 1883965
gcugaaagucccugcaaac

SEQ ID NO: 2229709 - RNA, 19 nt, Artificial Sequence
  Description of Artificial Sequence: Synthetic oligonucleotide
  Antisense strand to SEQ ID NO: 2229708
guuugcagggacuuucagc

SEQ ID NO: 2229710 - RNA, 19 nt, Artificial Sequence
  Description of Artificial Sequence: Synthetic oligonucleotide
  Sense strand starting at position 2182 of SEQ ID NO: 1883965
ugcuguccuccaucgcaua

SEQ ID NO: 2229711 - RNA, 19 nt, Artificial Sequence
  Description of Artificial Sequence: Synthetic oligonucleotide
  Antisense strand to SEQ ID NO: 2229710
uaugcgauggaggacagca

SEQ ID NO: 2229712 - RNA, 19 nt, Artificial Sequence
  Description of Artificial Sequence: Synthetic oligonucleotide
  Sense strand starting at position 2216 of SEQ ID NO: 1883965
ucuccaagucagugaagga

SEQ ID NO: 2229713 - RNA, 19 nt, Artificial Sequence
  Description of Artificial Sequence: Synthetic oligonucleotide
  Antisense strand to SEQ ID NO: 2229712
uccuucacugacuuggaga

SEQ ID NO: 2229714 - RNA, 19 nt, Artificial Sequence
  Description of Artificial Sequence: Synthetic oligonucleotide
  Sense strand starting at position 2544 of SEQ ID NO: 1883965
ugcugaauaucugcaaaug

SEQ ID NO: 2229715 - RNA, 19 nt, Artificial Sequence
  Description of Artificial Sequence: Synthetic oligonucleotide
  Antisense strand to SEQ ID NO: 2229714
cauuugcagauauucagca

SEQ ID NO: 2229716 - RNA, 19 nt, Artificial Sequence
  Description of Artificial Sequence: Synthetic oligonucleotide
  Sense strand starting at position 2599 of SEQ ID NO: 1883965
agacauagcuccuuuaugu

SEQ ID NO: 2229717 - RNA, 19 nt, Artificial Sequence
  Description of Artificial Sequence: Synthetic oligonucleotide
  Antisense strand to SEQ ID NO: 2229716
acauaaaggagcuaugucu

SEQ ID NO: 2229718 - RNA, 19 nt, Artificial Sequence
  Description of Artificial Sequence: Synthetic oligonucleotide
  Sense strand starting at position 2891 of SEQ ID NO: 1883965
uggucaugucccuacagua

SEQ ID NO: 2229719 - RNA, 19 nt, Artificial Sequence
  Description of Artificial Sequence: Synthetic oligonucleotide
  Antisense strand to SEQ ID NO: 2229718
uacuguagggacaugacca

SEQ ID NO: 2229720 - RNA, 19 nt, Artificial Sequence
  Description of Artificial Sequence: Synthetic oligonucleotide
  Sense strand starting at position 3015 of SEQ ID NO: 1883965
cucacagggucauuauguu

SEQ ID NO: 2229721 - RNA, 19 nt, Artificial Sequence
  Description of Artificial Sequence: Synthetic oligonucleotide
  Antisense strand to SEQ ID NO: 2229720
aacauaaugacccugugag

SEQ ID NO: 2229722 - RNA, 19 nt, Artificial Sequence
  Description of Artificial Sequence: Synthetic oligonucleotide
  Sense strand starting at position 3056 of SEQ ID NO: 1883965
ggcacugugcauuauuaca

SEQ ID NO: 2229723 - RNA, 19 nt, Artificial Sequence
  Description of Artificial Sequence: Synthetic oligonucleotide
  Antisense strand to SEQ ID NO: 2229722
uguaauaaugcacagugcc

SEQ ID NO: 2229724 - RNA, 19 nt, Artificial Sequence
  Description of Artificial Sequence: Synthetic oligonucleotide
  Sense strand starting at position 3143 of SEQ ID NO: 1883965
uuaaaucagugggauuuaa

SEQ ID NO: 2229725 - RNA, 19 nt, Artificial Sequence
  Description of Artificial Sequence: Synthetic oligonucleotide
  Antisense strand to SEQ ID NO: 2229724
uuaaaucccacugauuuaa

SEQ ID NO: 2229726 - RNA, 19 nt, Artificial Sequence
  Description of Artificial Sequence: Synthetic oligonucleotide
  Sense strand starting at position 3163 of SEQ ID NO: 1883965
aucaauugggcauauguau

SEQ ID NO: 2229727 - RNA, 19 nt, Artificial Sequence
  Description of Artificial Sequence: Synthetic oligonucleotide
  Antisense strand to SEQ ID NO: 2229726
auacauaugcccaauugau

SEQ ID NO: 2229728 - RNA, 19 nt, Artificial Sequence
  Description of Artificial Sequence: Synthetic oligonucleotide
  Sense strand starting at position 3366 of SEQ ID NO: 1883965
agguuucuaccuuggguaa

SEQ ID NO: 2229729 - RNA, 19 nt, Artificial Sequence
  Description of Artificial Sequence: Synthetic oligonucleotide
  Antisense strand to SEQ ID NO: 2229728
uuacccaagguagaaaccu

SEQ ID NO: 2229730 - RNA, 19 nt, Artificial Sequence
  Description of Artificial Sequence: Synthetic oligonucleotide
  Sense strand starting at position 3367 of SEQ ID NO: 1883965
gguuucuaccuuggguaau

SEQ ID NO: 2229731 - RNA, 19 nt, Artificial Sequence
  Description of Artificial Sequence: Synthetic oligonucleotide
  Antisense strand to SEQ ID NO: 2229730
auuacccaagguagaaacc

SEQ ID NO: 2229732 - RNA, 19 nt, Artificial Sequence
  Description of Artificial Sequence: Synthetic oligonucleotide
  Sense strand starting at position 3443 of SEQ ID NO: 1883965
ggaggagccuggguuuauu

SEQ ID NO: 2229733 - RNA, 19 nt, Artificial Sequence
  Description of Artificial Sequence: Synthetic oligonucleotide
  Antisense strand to SEQ ID NO: 2229732
aauaaacccaggcuccucc

SEQ ID NO: 2229734 - RNA, 19 nt, Artificial Sequence
  Description of Artificial Sequence: Synthetic oligonucleotide
  Sense strand starting at position 3454 of SEQ ID NO: 1883965
gguuuauuucuuggcacau

SEQ ID NO: 2229735 - RNA, 19 nt, Artificial Sequence
  Description of Artificial Sequence: Synthetic oligonucleotide
  Antisense strand to SEQ ID NO: 2229734
augugccaagaaauaaacc

SEQ ID NO: 2229736 - RNA, 19 nt, Artificial Sequence
  Description of Artificial Sequence: Synthetic oligonucleotide
  Sense strand starting at position 3455 of SEQ ID NO: 1883965
guuuauuucuuggcacauc

SEQ ID NO: 2229737 - RNA, 19 nt, Artificial Sequence
  Description of Artificial Sequence: Synthetic oligonucleotide
  Antisense strand to SEQ ID NO: 2229736
gaugugccaagaaauaaac

SEQ ID NO: 2229738 - RNA, 19 nt, Artificial Sequence
  Description of Artificial Sequence: Synthetic oligonucleotide
  Sense strand starting at position 3654 of SEQ ID NO: 1883965
acauuaagaguguguuauc

SEQ ID NO: 2229739 - RNA, 19 nt, Artificial Sequence
  Description of Artificial Sequence: Synthetic oligonucleotide
  Antisense strand to SEQ ID NO: 2229738
gauaacacacucuuaaugu

SEQ ID NO: 2229740 - RNA, 19 nt, Artificial Sequence
  Description of Artificial Sequence: Synthetic oligonucleotide
  Sense strand starting at position 3655 of SEQ ID NO: 1883965
cauuaagaguguguuauca

SEQ ID NO: 2229741 - RNA, 19 nt, Artificial Sequence
  Description of Artificial Sequence: Synthetic oligonucleotide
  Antisense strand to SEQ ID NO: 2229740
ugauaacacacucuuaaug

SEQ ID NO: 2229742 - RNA, 19 nt, Artificial Sequence
  Description of Artificial Sequence: Synthetic oligonucleotide
  Sense strand starting at position 3659 of SEQ ID NO: 1883965
aagaguguguuaucacaga

SEQ ID NO: 2229743 - RNA, 19 nt, Artificial Sequence
  Description of Artificial Sequence: Synthetic oligonucleotide
  Antisense strand to SEQ ID NO: 2229742
ucugugauaacacacucuu

SEQ ID NO: 2229744 - RNA, 19 nt, Artificial Sequence
  Description of Artificial Sequence: Synthetic oligonucleotide
  Sense strand starting at position 3705 of SEQ ID NO: 1883965
gagguaugauaagcacuau

SEQ ID NO: 2229745 - RNA, 19 nt, Artificial Sequence
  Description of Artificial Sequence: Synthetic oligonucleotide
  Antisense strand to SEQ ID NO: 2229744
auagugcuuaucauaccuc

SEQ ID NO: 2229746 - RNA, 19 nt, Artificial Sequence
  Description of Artificial Sequence: Synthetic oligonucleotide
  Sense strand starting at position 3912 of SEQ ID NO: 1883965
aucugaaaucuuggcaaca

SEQ ID NO: 2229747 - RNA, 19 nt, Artificial Sequence
  Description of Artificial Sequence: Synthetic oligonucleotide
  Antisense strand to SEQ ID NO: 2229746
uguugccaagauuucagau

SEQ ID NO: 2229748 - RNA, 19 nt, Artificial Sequence
  Description of Artificial Sequence: Synthetic oligonucleotide
  Sense strand starting at position 3913 of SEQ ID NO: 1883965
ucugaaaucuuggcaacag

SEQ ID NO: 2229749 - RNA, 19 nt, Artificial Sequence
  Description of Artificial Sequence: Synthetic oligonucleotide
  Antisense strand to SEQ ID NO: 2229748
cuguugccaagauuucaga

SEQ ID NO: 2229750 - RNA, 19 nt, Artificial Sequence
  Description of Artificial Sequence: Synthetic oligonucleotide
  Sense strand starting at position 34 of SEQ ID NO: 1883966
uggagaccuugcucuugaa

SEQ ID NO: 2229751 - RNA, 19 nt, Artificial Sequence
  Description of Artificial Sequence: Synthetic oligonucleotide
  Antisense strand to SEQ ID NO: 2229750
uucaagagcaaggucucca

SEQ ID NO: 2229752 - RNA, 19 nt, Artificial Sequence
  Description of Artificial Sequence: Synthetic oligonucleotide
  Sense strand starting at position 54 of SEQ ID NO: 1883966
gagcucaugguuuauuaca

SEQ ID NO: 2229753 - RNA, 19 nt, Artificial Sequence
  Description of Artificial Sequence: Synthetic oligonucleotide
  Antisense strand to SEQ ID NO: 2229752
uguaauaaaccaugagcuc

SEQ ID NO: 2229754 - RNA, 19 nt, Artificial Sequence
  Description of Artificial Sequence: Synthetic oligonucleotide
  Sense strand starting at position 158 of SEQ ID NO: 1883966
guaaacaauuacuuucgau

SEQ ID NO: 2229755 - RNA, 19 nt, Artificial Sequence
  Description of Artificial Sequence: Synthetic oligonucleotide
  Antisense strand to SEQ ID NO: 2229754
aucgaaaguaauuguuuac

SEQ ID NO: 2229756 - RNA, 19 nt, Artificial Sequence
  Description of Artificial Sequence: Synthetic oligonucleotide
  Sense strand starting at position 350 of SEQ ID NO: 1883966
augauaguucugcaacauu

SEQ ID NO: 2229757 - RNA, 19 nt, Artificial Sequence
  Description of Artificial Sequence: Synthetic oligonucleotide
  Antisense strand to SEQ ID NO: 2229756
aauguugcagaacuaucau

SEQ ID NO: 2229758 - RNA, 19 nt, Artificial Sequence
  Description of Artificial Sequence: Synthetic oligonucleotide
  Sense strand starting at position 360 of SEQ ID NO: 1883966
ugcaacauuguugagagua

SEQ ID NO: 2229759 - RNA, 19 nt, Artificial Sequence
  Description of Artificial Sequence: Synthetic oligonucleotide
  Antisense strand to SEQ ID NO: 2229758
uacucucaacaauguugca

SEQ ID NO: 2229760 - RNA, 19 nt, Artificial Sequence
  Description of Artificial Sequence: Synthetic oligonucleotide
  Sense strand starting at position 550 of SEQ ID NO: 1883966
ugacuugcauuaucacuga

SEQ ID NO: 2229761 - RNA, 19 nt, Artificial Sequence
  Description of Artificial Sequence: Synthetic oligonucleotide
  Antisense strand to SEQ ID NO: 2229760
ucagugauaaugcaaguca

SEQ ID NO: 2229762 - RNA, 19 nt, Artificial Sequence
  Description of Artificial Sequence: Synthetic oligonucleotide
  Sense strand starting at position 1321 of SEQ ID NO: 1883966
auggaagaaucgcuuaaac

SEQ ID NO: 2229763 - RNA, 19 nt, Artificial Sequence
  Description of Artificial Sequence: Synthetic oligonucleotide
  Antisense strand to SEQ ID NO: 2229762
guuuaagcgauucuuccau

SEQ ID NO: 2229764 - RNA, 19 nt, Artificial Sequence
  Description of Artificial Sequence: Synthetic oligonucleotide
  Sense strand starting at position 1323 of SEQ ID NO: 1883966
ggaagaaucgcuuaaacuu

SEQ ID NO: 2229765 - RNA, 19 nt, Artificial Sequence
  Description of Artificial Sequence: Synthetic oligonucleotide
  Antisense strand to SEQ ID NO: 2229764
aaguuuaagcgauucuucc

SEQ ID NO: 2229766 - RNA, 19 nt, Artificial Sequence
  Description of Artificial Sequence: Synthetic oligonucleotide
  Sense strand starting at position 1442 of SEQ ID NO: 1883966
agagaauguuaacucuucu

SEQ ID NO: 2229767 - RNA, 19 nt, Artificial Sequence
  Description of Artificial Sequence: Synthetic oligonucleotide
  Antisense strand to SEQ ID NO: 2229766
agaagaguuaacauucucu

SEQ ID NO: 2229768 - RNA, 19 nt, Artificial Sequence
  Description of Artificial Sequence: Synthetic oligonucleotide
  Sense strand starting at position 1817 of SEQ ID NO: 1883966
ugcugaauggaugggagau

SEQ ID NO: 2229769 - RNA, 19 nt, Artificial Sequence
  Description of Artificial Sequence: Synthetic oligonucleotide
  Antisense strand to SEQ ID NO: 2229768
aucucccauccauucagca

SEQ ID NO: 2229770 - RNA, 19 nt, Artificial Sequence
  Description of Artificial Sequence: Synthetic oligonucleotide
  Sense strand starting at position 2125 of SEQ ID NO: 1883966
gccauuaauuaaccgaaac

SEQ ID NO: 2229771 - RNA, 19 nt, Artificial Sequence
  Description of Artificial Sequence: Synthetic oligonucleotide
  Antisense strand to SEQ ID NO: 2229770
guuucgguuaauuaauggc

SEQ ID NO: 2229772 - RNA, 19 nt, Artificial Sequence
  Description of Artificial Sequence: Synthetic oligonucleotide
  Sense strand starting at position 2220 of SEQ ID NO: 1883966
caggguccuggugauugau

SEQ ID NO: 2229773 - RNA, 19 nt, Artificial Sequence
  Description of Artificial Sequence: Synthetic oligonucleotide
  Antisense strand to SEQ ID NO: 2229772
aucaaucaccaggacccug

SEQ ID NO: 2229774 - RNA, 19 nt, Artificial Sequence
  Description of Artificial Sequence: Synthetic oligonucleotide
  Sense strand starting at position 2228 of SEQ ID NO: 1883966
uggugauugauccagugac

SEQ ID NO: 2229775 - RNA, 19 nt, Artificial Sequence
  Description of Artificial Sequence: Synthetic oligonucleotide
  Antisense strand to SEQ ID NO: 2229774
gucacuggaucaaucacca

SEQ ID NO: 2229776 - RNA, 19 nt, Artificial Sequence
  Description of Artificial Sequence: Synthetic oligonucleotide
  Sense strand starting at position 2356 of SEQ ID NO: 1883966
cuggaauucugacuccauc

SEQ ID NO: 2229777 - RNA, 19 nt, Artificial Sequence
  Description of Artificial Sequence: Synthetic oligonucleotide
  Antisense strand to SEQ ID NO: 2229776
gauggagucagaauuccag

SEQ ID NO: 2229778 - RNA, 19 nt, Artificial Sequence
  Description of Artificial Sequence: Synthetic oligonucleotide
  Sense strand starting at position 2377 of SEQ ID NO: 1883966
acauuaguugagugaccua

SEQ ID NO: 2229779 - RNA, 19 nt, Artificial Sequence
  Description of Artificial Sequence: Synthetic oligonucleotide
  Antisense strand to SEQ ID NO: 2229778
uaggucacucaacuaaugu

SEQ ID NO: 2229780 - RNA, 19 nt, Artificial Sequence
  Description of Artificial Sequence: Synthetic oligonucleotide
  Sense strand starting at position 2380 of SEQ ID NO: 1883966
uuaguugagugaccuagaa

SEQ ID NO: 2229781 - RNA, 19 nt, Artificial Sequence
  Description of Artificial Sequence: Synthetic oligonucleotide
  Antisense strand to SEQ ID NO: 2229780
uucuaggucacucaacuaa

SEQ ID NO: 2229782 - RNA, 19 nt, Artificial Sequence
  Description of Artificial Sequence: Synthetic oligonucleotide
  Sense strand starting at position 2545 of SEQ ID NO: 1883966
ccaguccaucaguauuaga

SEQ ID NO: 2229783 - RNA, 19 nt, Artificial Sequence
  Description of Artificial Sequence: Synthetic oligonucleotide
  Antisense strand to SEQ ID NO: 2229782
ucuaauacugauggacugg

SEQ ID NO: 2229784 - RNA, 19 nt, Artificial Sequence
  Description of Artificial Sequence: Synthetic oligonucleotide
  Sense strand starting at position 2555 of SEQ ID NO: 1883966
aguauuagauuugacaaug

SEQ ID NO: 2229785 - RNA, 19 nt, Artificial Sequence
  Description of Artificial Sequence: Synthetic oligonucleotide
  Antisense strand to SEQ ID NO: 2229784
cauugucaaaucuaauacu

SEQ ID NO: 2229786 - RNA, 19 nt, Artificial Sequence
  Description of Artificial Sequence: Synthetic oligonucleotide
  Sense strand starting at position 2587 of SEQ ID NO: 1883966
ugaugaucccaguaauagu

SEQ ID NO: 2229787 - RNA, 19 nt, Artificial Sequence
  Description of Artificial Sequence: Synthetic oligonucleotide
  Antisense strand to SEQ ID NO: 2229786
acuauuacugggaucauca

SEQ ID NO: 2229788 - RNA, 19 nt, Artificial Sequence
  Description of Artificial Sequence: Synthetic oligonucleotide
  Sense strand starting at position 2624 of SEQ ID NO: 1883966
cugauuccaucuucuagga

SEQ ID NO: 2229789 - RNA, 19 nt, Artificial Sequence
  Description of Artificial Sequence: Synthetic oligonucleotide
  Antisense strand to SEQ ID NO: 2229788
uccuagaagauggaaucag

SEQ ID NO: 2229790 - RNA, 19 nt, Artificial Sequence
  Description of Artificial Sequence: Synthetic oligonucleotide
  Sense strand starting at position 2669 of SEQ ID NO: 1883966
ggcuauaagguuuacugaa

SEQ ID NO: 2229791 - RNA, 19 nt, Artificial Sequence
  Description of Artificial Sequence: Synthetic oligonucleotide
  Antisense strand to SEQ ID NO: 2229790
uucaguaaaccuuauagcc

SEQ ID NO: 2229792 - RNA, 19 nt, Artificial Sequence
  Description of Artificial Sequence: Synthetic oligonucleotide
  Sense strand starting at position 2671 of SEQ ID NO: 1883966
cuauaagguuuacugaaag

SEQ ID NO: 2229793 - RNA, 19 nt, Artificial Sequence
  Description of Artificial Sequence: Synthetic oligonucleotide
  Antisense strand to SEQ ID NO: 2229792
cuuucaguaaaccuuauag

SEQ ID NO: 2229794 - RNA, 19 nt, Artificial Sequence
  Description of Artificial Sequence: Synthetic oligonucleotide
  Sense strand starting at position 2738 of SEQ ID NO: 1883966
ugguuauugaugcaugaaa

SEQ ID NO: 2229795 - RNA, 19 nt, Artificial Sequence
  Description of Artificial Sequence: Synthetic oligonucleotide
  Antisense strand to SEQ ID NO: 2229794
uuucaugcaucaauaacca

SEQ ID NO: 2229796 - RNA, 19 nt, Artificial Sequence
  Description of Artificial Sequence: Synthetic oligonucleotide
  Sense strand starting at position 2740 of SEQ ID NO: 1883966
guuauugaugcaugaaaua

SEQ ID NO: 2229797 - RNA, 19 nt, Artificial Sequence
  Description of Artificial Sequence: Synthetic oligonucleotide
  Antisense strand to SEQ ID NO: 2229796
uauuucaugcaucaauaac

SEQ ID NO: 2229798 - RNA, 19 nt, Artificial Sequence
  Description of Artificial Sequence: Synthetic oligonucleotide
  Sense strand starting at position 2855 of SEQ ID NO: 1883966
gcuacugccaaguaagaug

SEQ ID NO: 2229799 - RNA, 19 nt, Artificial Sequence
  Description of Artificial Sequence: Synthetic oligonucleotide
  Antisense strand to SEQ ID NO: 2229798
caucuuacuuggcaguagc

SEQ ID NO: 2229800 - RNA, 19 nt, Artificial Sequence
  Description of Artificial Sequence: Synthetic oligonucleotide
  Sense strand starting at position 2911 of SEQ ID NO: 1883966
aggguugaauucccaccua

SEQ ID NO: 2229801 - RNA, 19 nt, Artificial Sequence
  Description of Artificial Sequence: Synthetic oligonucleotide
  Antisense strand to SEQ ID NO: 2229800
uaggugggaauucaacccu

SEQ ID NO: 2229802 - RNA, 19 nt, Artificial Sequence
  Description of Artificial Sequence: Synthetic oligonucleotide
  Sense strand starting at position 3022 of SEQ ID NO: 1883966
gucucaagucuugaucuaa

SEQ ID NO: 2229803 - RNA, 19 nt, Artificial Sequence
  Description of Artificial Sequence: Synthetic oligonucleotide
  Antisense strand to SEQ ID NO: 2229802
uuagaucaagacuugagac

SEQ ID NO: 2229804 - RNA, 19 nt, Artificial Sequence
  Description of Artificial Sequence: Synthetic oligonucleotide
  Sense strand starting at position 3058 of SEQ ID NO: 1883966
cucuccugaugguuagaaa

SEQ ID NO: 2229805 - RNA, 19 nt, Artificial Sequence
  Description of Artificial Sequence: Synthetic oligonucleotide
  Antisense strand to SEQ ID NO: 2229804
uuucuaaccaucaggagag

SEQ ID NO: 2229806 - RNA, 19 nt, Artificial Sequence
  Description of Artificial Sequence: Synthetic oligonucleotide
  Sense strand starting at position 3135 of SEQ ID NO: 1883966
gggaauccauguuuaacag

SEQ ID NO: 2229807 - RNA, 19 nt, Artificial Sequence
  Description of Artificial Sequence: Synthetic oligonucleotide
  Antisense strand to SEQ ID NO: 2229806
cuguuaaacauggauuccc

SEQ ID NO: 2229808 - RNA, 19 nt, Artificial Sequence
  Description of Artificial Sequence: Synthetic oligonucleotide
  Sense strand starting at position 3244 of SEQ ID NO: 1883966
acuuaucuuccuugaggag

SEQ ID NO: 2229809 - RNA, 19 nt, Artificial Sequence
  Description of Artificial Sequence: Synthetic oligonucleotide
  Antisense strand to SEQ ID NO: 2229808
cuccucaaggaagauaagu

SEQ ID NO: 2229810 - RNA, 19 nt, Artificial Sequence
  Description of Artificial Sequence: Synthetic oligonucleotide
  Sense strand starting at position 3496 of SEQ ID NO: 1883966
ggcucagaugcuuacauga

SEQ ID NO: 2229811 - RNA, 19 nt, Artificial Sequence
  Description of Artificial Sequence: Synthetic oligonucleotide
  Antisense strand to SEQ ID NO: 2229810
ucauguaagcaucugagcc

SEQ ID NO: 2229812 - RNA, 19 nt, Artificial Sequence
  Description of Artificial Sequence: Synthetic oligonucleotide
  Sense strand starting at position 3517 of SEQ ID NO: 1883966
uuggacaagucaguuaaau

SEQ ID NO: 2229813 - RNA, 19 nt, Artificial Sequence
  Description of Artificial Sequence: Synthetic oligonucleotide
  Antisense strand to SEQ ID NO: 2229812
auuuaacugacuuguccaa

SEQ ID NO: 2229814 - RNA, 19 nt, Artificial Sequence
  Description of Artificial Sequence: Synthetic oligonucleotide
  Sense strand starting at position 3608 of SEQ ID NO: 1883966
gugagauugcaugauuacu

SEQ ID NO: 2229815 - RNA, 19 nt, Artificial Sequence
  Description of Artificial Sequence: Synthetic oligonucleotide
  Antisense strand to SEQ ID NO: 2229814
aguaaucaugcaaucucac

SEQ ID NO: 2229816 - RNA, 19 nt, Artificial Sequence
  Description of Artificial Sequence: Synthetic oligonucleotide
  Sense strand starting at position 3610 of SEQ ID NO: 1883966
gagauugcaugauuacuua

SEQ ID NO: 2229817 - RNA, 19 nt, Artificial Sequence
  Description of Artificial Sequence: Synthetic oligonucleotide
  Antisense strand to SEQ ID NO: 2229816
uaaguaaucaugcaaucuc

SEQ ID NO: 2229818 - RNA, 19 nt, Artificial Sequence
  Description of Artificial Sequence: Synthetic oligonucleotide
  Sense strand starting at position 3613 of SEQ ID NO: 1883966
auugcaugauuacuuagaa

SEQ ID NO: 2229819 - RNA, 19 nt, Artificial Sequence
  Description of Artificial Sequence: Synthetic oligonucleotide
  Antisense strand to SEQ ID NO: 2229818
uucuaaguaaucaugcaau

SEQ ID NO: 2229820 - RNA, 19 nt, Artificial Sequence
  Description of Artificial Sequence: Synthetic oligonucleotide
  Sense strand starting at position 3614 of SEQ ID NO: 1883966
uugcaugauuacuuagaau

SEQ ID NO: 2229821 - RNA, 19 nt, Artificial Sequence
  Description of Artificial Sequence: Synthetic oligonucleotide
  Antisense strand to SEQ ID NO: 2229820
auucuaaguaaucaugcaa

SEQ ID NO: 2229822 - RNA, 19 nt, Artificial Sequence
  Description of Artificial Sequence: Synthetic oligonucleotide
  Sense strand starting at position 3636 of SEQ ID NO: 1883966
gccucacaauuauuaggaa

SEQ ID NO: 2229823 - RNA, 19 nt, Artificial Sequence
  Description of Artificial Sequence: Synthetic oligonucleotide
  Antisense strand to SEQ ID NO: 2229822
uuccuaauaauugugaggc

SEQ ID NO: 2229824 - RNA, 19 nt, Artificial Sequence
  Description of Artificial Sequence: Synthetic oligonucleotide
  Sense strand starting at position 3815 of SEQ ID NO: 1883966
auucuuuguguuuacagau

SEQ ID NO: 2229825 - RNA, 19 nt, Artificial Sequence
  Description of Artificial Sequence: Synthetic oligonucleotide
  Antisense strand to SEQ ID NO: 2229824
aucuguaaacacaaagaau

SEQ ID NO: 2229826 - RNA, 19 nt, Artificial Sequence
  Description of Artificial Sequence: Synthetic oligonucleotide
  Sense strand starting at position 3846 of SEQ ID NO: 1883966
gagaaucuuugagccaggu

SEQ ID NO: 2229827 - RNA, 19 nt, Artificial Sequence
  Description of Artificial Sequence: Synthetic oligonucleotide
  Antisense strand to SEQ ID NO: 2229826
accuggcucaaagauucuc

SEQ ID NO: 2229828 - RNA, 19 nt, Artificial Sequence
  Description of Artificial Sequence: Synthetic oligonucleotide
  Sense strand starting at position 3904 of SEQ ID NO: 1883966
guauuaggccucuagacaa

SEQ ID NO: 2229829 - RNA, 19 nt, Artificial Sequence
  Description of Artificial Sequence: Synthetic oligonucleotide
  Antisense strand to SEQ ID NO: 2229828
uugucuagaggccuaauac

SEQ ID NO: 2229830 - RNA, 19 nt, Artificial Sequence
  Description of Artificial Sequence: Synthetic oligonucleotide
  Sense strand starting at position 105 of SEQ ID NO: 1883967
aguuauuaagaugguugau

SEQ ID NO: 2229831 - RNA, 19 nt, Artificial Sequence
  Description of Artificial Sequence: Synthetic oligonucleotide
  Antisense strand to SEQ ID NO: 2229830
aucaaccaucuuaauaacu

SEQ ID NO: 2229832 - RNA, 19 nt, Artificial Sequence
  Description of Artificial Sequence: Synthetic oligonucleotide
  Sense strand starting at position 108 of SEQ ID NO: 1883967
uauuaagaugguugauuag

SEQ ID NO: 2229833 - RNA, 19 nt, Artificial Sequence
  Description of Artificial Sequence: Synthetic oligonucleotide
  Antisense strand to SEQ ID NO: 2229832
cuaaucaaccaucuuaaua

SEQ ID NO: 2229834 - RNA, 19 nt, Artificial Sequence
  Description of Artificial Sequence: Synthetic oligonucleotide
  Sense strand starting at position 141 of SEQ ID NO: 1883967
gaccuuacuguggguauua

SEQ ID NO: 2229835 - RNA, 19 nt, Artificial Sequence
  Description of Artificial Sequence: Synthetic oligonucleotide
  Antisense strand to SEQ ID NO: 2229834
uaauacccacaguaagguc

SEQ ID NO: 2229836 - RNA, 19 nt, Artificial Sequence
  Description of Artificial Sequence: Synthetic oligonucleotide
  Sense strand starting at position 142 of SEQ ID NO: 1883967
accuuacuguggguauuaa

SEQ ID NO: 2229837 - RNA, 19 nt, Artificial Sequence
  Description of Artificial Sequence: Synthetic oligonucleotide
  Antisense strand to SEQ ID NO: 2229836
uuaauacccacaguaaggu

SEQ ID NO: 2229838 - RNA, 19 nt, Artificial Sequence
  Description of Artificial Sequence: Synthetic oligonucleotide
  Sense strand starting at position 143 of SEQ ID NO: 1883967
ccuuacuguggguauuaaa

SEQ ID NO: 2229839 - RNA, 19 nt, Artificial Sequence
  Description of Artificial Sequence: Synthetic oligonucleotide
  Antisense strand to SEQ ID NO: 2229838
uuuaauacccacaguaagg

SEQ ID NO: 2229840 - RNA, 19 nt, Artificial Sequence
  Description of Artificial Sequence: Synthetic oligonucleotide
  Sense strand starting at position 229 of SEQ ID NO: 1883967
guagacuuguauccacacu

SEQ ID NO: 2229841 - RNA, 19 nt, Artificial Sequence
  Description of Artificial Sequence: Synthetic oligonucleotide
  Antisense strand to SEQ ID NO: 2229840
aguguggauacaagucuac

SEQ ID NO: 2229842 - RNA, 19 nt, Artificial Sequence
  Description of Artificial Sequence: Synthetic oligonucleotide
  Sense strand starting at position 337 of SEQ ID NO: 1883967
cuguuucuauaaguacaua

SEQ ID NO: 2229843 - RNA, 19 nt, Artificial Sequence
  Description of Artificial Sequence: Synthetic oligonucleotide
  Antisense strand to SEQ ID NO: 2229842
uauguacuuauagaaacag

SEQ ID NO: 2229844 - RNA, 19 nt, Artificial Sequence
  Description of Artificial Sequence: Synthetic oligonucleotide
  Sense strand starting at position 502 of SEQ ID NO: 1883967
uuucuaggguaaucccuaa

SEQ ID NO: 2229845 - RNA, 19 nt, Artificial Sequence
  Description of Artificial Sequence: Synthetic oligonucleotide
  Antisense strand to SEQ ID NO: 2229844
uuagggauuacccuagaaa

SEQ ID NO: 2229846 - RNA, 19 nt, Artificial Sequence
  Description of Artificial Sequence: Synthetic oligonucleotide
  Sense strand starting at position 570 of SEQ ID NO: 1883967
ucauuacuguucgcaauuu

SEQ ID NO: 2229847 - RNA, 19 nt, Artificial Sequence
  Description of Artificial Sequence: Synthetic oligonucleotide
  Antisense strand to SEQ ID NO: 2229846
aaauugcgaacaguaauga

SEQ ID NO: 2229848 - RNA, 19 nt, Artificial Sequence
  Description of Artificial Sequence: Synthetic oligonucleotide
  Sense strand starting at position 581 of SEQ ID NO: 1883967
cgcaauuugcugcauugau

SEQ ID NO: 2229849 - RNA, 19 nt, Artificial Sequence
  Description of Artificial Sequence: Synthetic oligonucleotide
  Antisense strand to SEQ ID NO: 2229848
aucaaugcagcaaauugcg

SEQ ID NO: 2229850 - RNA, 19 nt, Artificial Sequence
  Description of Artificial Sequence: Synthetic oligonucleotide
  Sense strand starting at position 692 of SEQ ID NO: 1883967
acaguacuuaacgaagagu

SEQ ID NO: 2229851 - RNA, 19 nt, Artificial Sequence
  Description of Artificial Sequence: Synthetic oligonucleotide
  Antisense strand to SEQ ID NO: 2229850
acucuucguuaaguacugu

SEQ ID NO: 2229852 - RNA, 19 nt, Artificial Sequence
  Description of Artificial Sequence: Synthetic oligonucleotide
  Sense strand starting at position 722 of SEQ ID NO: 1883967
guaaguucuuagucauuua

SEQ ID NO: 2229853 - RNA, 19 nt, Artificial Sequence
  Description of Artificial Sequence: Synthetic oligonucleotide
  Antisense strand to SEQ ID NO: 2229852
uaaaugacuaagaacuuac

SEQ ID NO: 2229854 - RNA, 19 nt, Artificial Sequence
  Description of Artificial Sequence: Synthetic oligonucleotide
  Sense strand starting at position 1013 of SEQ ID NO: 1883967
ggcaauauguaguuugaag

SEQ ID NO: 2229855 - RNA, 19 nt, Artificial Sequence
  Description of Artificial Sequence: Synthetic oligonucleotide
  Antisense strand to SEQ ID NO: 2229854
cuucaaacuacauauugcc

SEQ ID NO: 2229856 - RNA, 19 nt, Artificial Sequence
  Description of Artificial Sequence: Synthetic oligonucleotide
  Sense strand starting at position 1060 of SEQ ID NO: 1883967
cgaagauacagcugggaaa

SEQ ID NO: 2229857 - RNA, 19 nt, Artificial Sequence
  Description of Artificial Sequence: Synthetic oligonucleotide
  Antisense strand to SEQ ID NO: 2229856
uuucccagcuguaucuucg

SEQ ID NO: 2229858 - RNA, 19 nt, Artificial Sequence
  Description of Artificial Sequence: Synthetic oligonucleotide
  Sense strand starting at position 1073 of SEQ ID NO: 1883967
gggaaaucaucccugucaa

SEQ ID NO: 2229859 - RNA, 19 nt, Artificial Sequence
  Description of Artificial Sequence: Synthetic oligonucleotide
  Antisense strand to SEQ ID NO: 2229858
uugacagggaugauuuccc

SEQ ID NO: 2229860 - RNA, 19 nt, Artificial Sequence
  Description of Artificial Sequence: Synthetic oligonucleotide
  Sense strand starting at position 1074 of SEQ ID NO: 1883967
ggaaaucaucccugucaag

SEQ ID NO: 2229861 - RNA, 19 nt, Artificial Sequence
  Description of Artificial Sequence: Synthetic oligonucleotide
  Antisense strand to SEQ ID NO: 2229860
cuugacagggaugauuucc

SEQ ID NO: 2229862 - RNA, 19 nt, Artificial Sequence
  Description of Artificial Sequence: Synthetic oligonucleotide
  Sense strand starting at position 1083 of SEQ ID NO: 1883967
cccugucaagcuuagauaa

SEQ ID NO: 2229863 - RNA, 19 nt, Artificial Sequence
  Description of Artificial Sequence: Synthetic oligonucleotide
  Antisense strand to SEQ ID NO: 2229862
uuaucuaagcuugacaggg

SEQ ID NO: 2229864 - RNA, 19 nt, Artificial Sequence
  Description of Artificial Sequence: Synthetic oligonucleotide
  Sense strand starting at position 1093 of SEQ ID NO: 1883967
cuuagauaacuuggguuua

SEQ ID NO: 2229865 - RNA, 19 nt, Artificial Sequence
  Description of Artificial Sequence: Synthetic oligonucleotide
  Antisense strand to SEQ ID NO: 2229864
uaaacccaaguuaucuaag

SEQ ID NO: 2229866 - RNA, 19 nt, Artificial Sequence
  Description of Artificial Sequence: Synthetic oligonucleotide
  Sense strand starting at position 1095 of SEQ ID NO: 1883967
uagauaacuuggguuuaaa

SEQ ID NO: 2229867 - RNA, 19 nt, Artificial Sequence
  Description of Artificial Sequence: Synthetic oligonucleotide
  Antisense strand to SEQ ID NO: 2229866
uuuaaacccaaguuaucua

SEQ ID NO: 2229868 - RNA, 19 nt, Artificial Sequence
  Description of Artificial Sequence: Synthetic oligonucleotide
  Sense strand starting at position 1145 of SEQ ID NO: 1883967
gucacaugucuguaccaua

SEQ ID NO: 2229869 - RNA, 19 nt, Artificial Sequence
  Description of Artificial Sequence: Synthetic oligonucleotide
  Antisense strand to SEQ ID NO: 2229868
uaugguacagacaugugac

SEQ ID NO: 2229870 - RNA, 19 nt, Artificial Sequence
  Description of Artificial Sequence: Synthetic oligonucleotide
  Sense strand starting at position 1150 of SEQ ID NO: 1883967
augucuguaccauaugaaa

SEQ ID NO: 2229871 - RNA, 19 nt, Artificial Sequence
  Description of Artificial Sequence: Synthetic oligonucleotide
  Antisense strand to SEQ ID NO: 2229870
uuucauaugguacagacau

SEQ ID NO: 2229872 - RNA, 19 nt, Artificial Sequence
  Description of Artificial Sequence: Synthetic oligonucleotide
  Sense strand starting at position 1222 of SEQ ID NO: 1883967
ggucacaauuaaguggaaa

SEQ ID NO: 2229873 - RNA, 19 nt, Artificial Sequence
  Description of Artificial Sequence: Synthetic oligonucleotide
  Antisense strand to SEQ ID NO: 2229872
uuuccacuuaauugugacc

SEQ ID NO: 2229874 - RNA, 19 nt, Artificial Sequence
  Description of Artificial Sequence: Synthetic oligonucleotide
  Sense strand starting at position 1244 of SEQ ID NO: 1883967
gccgcagagccuguuuaau

SEQ ID NO: 2229875 - RNA, 19 nt, Artificial Sequence
  Description of Artificial Sequence: Synthetic oligonucleotide
  Antisense strand to SEQ ID NO: 2229874
auuaaacaggcucugcggc

SEQ ID NO: 2229876 - RNA, 19 nt, Artificial Sequence
  Description of Artificial Sequence: Synthetic oligonucleotide
  Sense strand starting at position 1250 of SEQ ID NO: 1883967
gagccuguuuaaucugaag

SEQ ID NO: 2229877 - RNA, 19 nt, Artificial Sequence
  Description of Artificial Sequence: Synthetic oligonucleotide
  Antisense strand to SEQ ID NO: 2229876
cuucagauuaaacaggcuc

SEQ ID NO: 2229878 - RNA, 19 nt, Artificial Sequence
  Description of Artificial Sequence: Synthetic oligonucleotide
  Sense strand starting at position 1387 of SEQ ID NO: 1883967
acagaucaugccgacucaa

SEQ ID NO: 2229879 - RNA, 19 nt, Artificial Sequence
  Description of Artificial Sequence: Synthetic oligonucleotide
  Antisense strand to SEQ ID NO: 2229878
uugagucggcaugaucugu

SEQ ID NO: 2229880 - RNA, 19 nt, Artificial Sequence
  Description of Artificial Sequence: Synthetic oligonucleotide
  Sense strand starting at position 1400 of SEQ ID NO: 1883967
acucaagaugcaggucauu

SEQ ID NO: 2229881 - RNA, 19 nt, Artificial Sequence
  Description of Artificial Sequence: Synthetic oligonucleotide
  Antisense strand to SEQ ID NO: 2229880
aaugaccugcaucuugagu

SEQ ID NO: 2229882 - RNA, 19 nt, Artificial Sequence
  Description of Artificial Sequence: Synthetic oligonucleotide
  Sense strand starting at position 2209 of SEQ ID NO: 1883967
gcagagugucgcccgagau

SEQ ID NO: 2229883 - RNA, 19 nt, Artificial Sequence
  Description of Artificial Sequence: Synthetic oligonucleotide
  Antisense strand to SEQ ID NO: 2229882
aucucgggcgacacucugc

SEQ ID NO: 2229884 - RNA, 19 nt, Artificial Sequence
  Description of Artificial Sequence: Synthetic oligonucleotide
  Sense strand starting at position 2832 of SEQ ID NO: 1883967
guuccuuuccguuuauguu

SEQ ID NO: 2229885 - RNA, 19 nt, Artificial Sequence
  Description of Artificial Sequence: Synthetic oligonucleotide
  Antisense strand to SEQ ID NO: 2229884
aacauaaacggaaaggaac

SEQ ID NO: 2229886 - RNA, 19 nt, Artificial Sequence
  Description of Artificial Sequence: Synthetic oligonucleotide
  Sense strand starting at position 2842 of SEQ ID NO: 1883967
guuuauguuagagauguac

SEQ ID NO: 2229887 - RNA, 19 nt, Artificial Sequence
  Description of Artificial Sequence: Synthetic oligonucleotide
  Antisense strand to SEQ ID NO: 2229886
guacaucucuaacauaaac

SEQ ID NO: 2229888 - RNA, 19 nt, Artificial Sequence
  Description of Artificial Sequence: Synthetic oligonucleotide
  Sense strand starting at position 3059 of SEQ ID NO: 1883967
ccugcugaucuaggagaaa

SEQ ID NO: 2229889 - RNA, 19 nt, Artificial Sequence
  Description of Artificial Sequence: Synthetic oligonucleotide
  Antisense strand to SEQ ID NO: 2229888
uuucuccuagaucagcagg

SEQ ID NO: 2229890 - RNA, 19 nt, Artificial Sequence
  Description of Artificial Sequence: Synthetic oligonucleotide
  Sense strand starting at position 3169 of SEQ ID NO: 1883967
auuggagguugagugaauu

SEQ ID NO: 2229891 - RNA, 19 nt, Artificial Sequence
  Description of Artificial Sequence: Synthetic oligonucleotide
  Antisense strand to SEQ ID NO: 2229890
aauucacucaaccuccaau

SEQ ID NO: 2229892 - RNA, 19 nt, Artificial Sequence
  Description of Artificial Sequence: Synthetic oligonucleotide
  Sense strand starting at position 3262 of SEQ ID NO: 1883967
gguaucuauuguuuacaua

SEQ ID NO: 2229893 - RNA, 19 nt, Artificial Sequence
  Description of Artificial Sequence: Synthetic oligonucleotide
  Antisense strand to SEQ ID NO: 2229892
uauguaaacaauagauacc

SEQ ID NO: 2229894 - RNA, 19 nt, Artificial Sequence
  Description of Artificial Sequence: Synthetic oligonucleotide
  Sense strand starting at position 3300 of SEQ ID NO: 1883967
acuaaauacuaguuauggu

SEQ ID NO: 2229895 - RNA, 19 nt, Artificial Sequence
  Description of Artificial Sequence: Synthetic oligonucleotide
  Antisense strand to SEQ ID NO: 2229894
accauaacuaguauuuagu

SEQ ID NO: 2229896 - RNA, 19 nt, Artificial Sequence
  Description of Artificial Sequence: Synthetic oligonucleotide
  Sense strand starting at position 3324 of SEQ ID NO: 1883967
augagauaagguugcaugu

SEQ ID NO: 2229897 - RNA, 19 nt, Artificial Sequence
  Description of Artificial Sequence: Synthetic oligonucleotide
  Antisense strand to SEQ ID NO: 2229896
acaugcaaccuuaucucau

SEQ ID NO: 2229898 - RNA, 19 nt, Artificial Sequence
  Description of Artificial Sequence: Synthetic oligonucleotide
  Sense strand starting at position 3457 of SEQ ID NO: 1883967
gccaccuauuuacuuguua

SEQ ID NO: 2229899 - RNA, 19 nt, Artificial Sequence
  Description of Artificial Sequence: Synthetic oligonucleotide
  Antisense strand to SEQ ID NO: 2229898
uaacaaguaaauagguggc

SEQ ID NO: 2229900 - RNA, 19 nt, Artificial Sequence
  Description of Artificial Sequence: Synthetic oligonucleotide
  Sense strand starting at position 3492 of SEQ ID NO: 1883967
gaauaagugccauauaguc

SEQ ID NO: 2229901 - RNA, 19 nt, Artificial Sequence
  Description of Artificial Sequence: Synthetic oligonucleotide
  Antisense strand to SEQ ID NO: 2229900
gacuauauggcacuuauuc

SEQ ID NO: 2229902 - RNA, 19 nt, Artificial Sequence
  Description of Artificial Sequence: Synthetic oligonucleotide
  Sense strand starting at position 3529 of SEQ ID NO: 1883967
gcuaauagccuuggaggga

SEQ ID NO: 2229903 - RNA, 19 nt, Artificial Sequence
  Description of Artificial Sequence: Synthetic oligonucleotide
  Antisense strand to SEQ ID NO: 2229902
ucccuccaaggcuauuagc

SEQ ID NO: 2229904 - RNA, 19 nt, Artificial Sequence
  Description of Artificial Sequence: Synthetic oligonucleotide
  Sense strand starting at position 3698 of SEQ ID NO: 1883967
cuguaugcugaucauggau

SEQ ID NO: 2229905 - RNA, 19 nt, Artificial Sequence
  Description of Artificial Sequence: Synthetic oligonucleotide
  Antisense strand to SEQ ID NO: 2229904
auccaugaucagcauacag

SEQ ID NO: 2229906 - RNA, 19 nt, Artificial Sequence
  Description of Artificial Sequence: Synthetic oligonucleotide
  Sense strand starting at position 3701 of SEQ ID NO: 1883967
uaugcugaucauggauaca

SEQ ID NO: 2229907 - RNA, 19 nt, Artificial Sequence
  Description of Artificial Sequence: Synthetic oligonucleotide
  Antisense strand to SEQ ID NO: 2229906
uguauccaugaucagcaua

SEQ ID NO: 2229908 - RNA, 19 nt, Artificial Sequence
  Description of Artificial Sequence: Synthetic oligonucleotide
  Sense strand starting at position 3787 of SEQ ID NO: 1883967
cuaagucuagguugauaga

SEQ ID NO: 2229909 - RNA, 19 nt, Artificial Sequence
  Description of Artificial Sequence: Synthetic oligonucleotide
  Antisense strand to SEQ ID NO: 2229908
ucuaucaaccuagacuuag

SEQ ID NO: 2229910 - RNA, 19 nt, Artificial Sequence
  Description of Artificial Sequence: Synthetic oligonucleotide
  Sense strand starting at position 117 of SEQ ID NO: 1883968
ugguuugagccacauuauc

SEQ ID NO: 2229911 - RNA, 19 nt, Artificial Sequence
  Description of Artificial Sequence: Synthetic oligonucleotide
  Antisense strand to SEQ ID NO: 2229910
gauaauguggcucaaacca

SEQ ID NO: 2229912 - RNA, 19 nt, Artificial Sequence
  Description of Artificial Sequence: Synthetic oligonucleotide
  Sense strand starting at position 583 of SEQ ID NO: 1883968
ucauguugucaucacaaau

SEQ ID NO: 2229913 - RNA, 19 nt, Artificial Sequence
  Description of Artificial Sequence: Synthetic oligonucleotide
  Antisense strand to SEQ ID NO: 2229912
auuugugaugacaacauga

SEQ ID NO: 2229914 - RNA, 19 nt, Artificial Sequence
  Description of Artificial Sequence: Synthetic oligonucleotide
  Sense strand starting at position 901 of SEQ ID NO: 1883968
guacaagaguucccuuuaa

SEQ ID NO: 2229915 - RNA, 19 nt, Artificial Sequence
  Description of Artificial Sequence: Synthetic oligonucleotide
  Antisense strand to SEQ ID NO: 2229914
uuaaagggaacucuuguac

SEQ ID NO: 2229916 - RNA, 19 nt, Artificial Sequence
  Description of Artificial Sequence: Synthetic oligonucleotide
  Sense strand starting at position 980 of SEQ ID NO: 1883968
augaucaaggcaugucaga

SEQ ID NO: 2229917 - RNA, 19 nt, Artificial Sequence
  Description of Artificial Sequence: Synthetic oligonucleotide
  Antisense strand to SEQ ID NO: 2229916
ucugacaugccuugaucau

SEQ ID NO: 2229918 - RNA, 19 nt, Artificial Sequence
  Description of Artificial Sequence: Synthetic oligonucleotide
  Sense strand starting at position 987 of SEQ ID NO: 1883968
aggcaugucagaggaggaa

SEQ ID NO: 2229919 - RNA, 19 nt, Artificial Sequence
  Description of Artificial Sequence: Synthetic oligonucleotide
  Antisense strand to SEQ ID NO: 2229918
uuccuccucugacaugccu

SEQ ID NO: 2229920 - RNA, 19 nt, Artificial Sequence
  Description of Artificial Sequence: Synthetic oligonucleotide
  Sense strand starting at position 1272 of SEQ ID NO: 1883968
acuccauacuagguaaagu

SEQ ID NO: 2229921 - RNA, 19 nt, Artificial Sequence
  Description of Artificial Sequence: Synthetic oligonucleotide
  Antisense strand to SEQ ID NO: 2229920
acuuuaccuaguauggagu

SEQ ID NO: 2229922 - RNA, 19 nt, Artificial Sequence
  Description of Artificial Sequence: Synthetic oligonucleotide
  Sense strand starting at position 1389 of SEQ ID NO: 1883968
ggaccaauuugccaagaag

SEQ ID NO: 2229923 - RNA, 19 nt, Artificial Sequence
  Description of Artificial Sequence: Synthetic oligonucleotide
  Antisense strand to SEQ ID NO: 2229922
cuucuuggcaaauuggucc

SEQ ID NO: 2229924 - RNA, 19 nt, Artificial Sequence
  Description of Artificial Sequence: Synthetic oligonucleotide
  Sense strand starting at position 1462 of SEQ ID NO: 1883968
uugacuugcuaugucaaau

SEQ ID NO: 2229925 - RNA, 19 nt, Artificial Sequence
  Description of Artificial Sequence: Synthetic oligonucleotide
  Antisense strand to SEQ ID NO: 2229924
auuugacauagcaagucaa

SEQ ID NO: 2229926 - RNA, 19 nt, Artificial Sequence
  Description of Artificial Sequence: Synthetic oligonucleotide
  Sense strand starting at position 1551 of SEQ ID NO: 1883968
caguuuagucaagaccagu

SEQ ID NO: 2229927 - RNA, 19 nt, Artificial Sequence
  Description of Artificial Sequence: Synthetic oligonucleotide
  Antisense strand to SEQ ID NO: 2229926
acuggucuugacuaaacug

SEQ ID NO: 2229928 - RNA, 19 nt, Artificial Sequence
  Description of Artificial Sequence: Synthetic oligonucleotide
  Sense strand starting at position 1554 of SEQ ID NO: 1883968
uuuagucaagaccaguuua

SEQ ID NO: 2229929 - RNA, 19 nt, Artificial Sequence
  Description of Artificial Sequence: Synthetic oligonucleotide
  Antisense strand to SEQ ID NO: 2229928
uaaacuggucuugacuaaa

SEQ ID NO: 2229930 - RNA, 19 nt, Artificial Sequence
  Description of Artificial Sequence: Synthetic oligonucleotide
  Sense strand starting at position 1803 of SEQ ID NO: 1883968
aacucuuguugcuuggaga

SEQ ID NO: 2229931 - RNA, 19 nt, Artificial Sequence
  Description of Artificial Sequence: Synthetic oligonucleotide
  Antisense strand to SEQ ID NO: 2229930
ucuccaagcaacaagaguu

SEQ ID NO: 2229932 - RNA, 19 nt, Artificial Sequence
  Description of Artificial Sequence: Synthetic oligonucleotide
  Sense strand starting at position 2056 of SEQ ID NO: 1883968
augucuagccaguaaacau

SEQ ID NO: 2229933 - RNA, 19 nt, Artificial Sequence
  Description of Artificial Sequence: Synthetic oligonucleotide
  Antisense strand to SEQ ID NO: 2229932
auguuuacuggcuagacau

SEQ ID NO: 2229934 - RNA, 19 nt, Artificial Sequence
  Description of Artificial Sequence: Synthetic oligonucleotide
  Sense strand starting at position 2063 of SEQ ID NO: 1883968
gccaguaaacaugacauua

SEQ ID NO: 2229935 - RNA, 19 nt, Artificial Sequence
  Description of Artificial Sequence: Synthetic oligonucleotide
  Antisense strand to SEQ ID NO: 2229934
uaaugucauguuuacuggc

SEQ ID NO: 2229936 - RNA, 19 nt, Artificial Sequence
  Description of Artificial Sequence: Synthetic oligonucleotide
  Sense strand starting at position 2105 of SEQ ID NO: 1883968
ucuccuuuggcuuggagga

SEQ ID NO: 2229937 - RNA, 19 nt, Artificial Sequence
  Description of Artificial Sequence: Synthetic oligonucleotide
  Antisense strand to SEQ ID NO: 2229936
uccuccaagccaaaggaga

SEQ ID NO: 2229938 - RNA, 19 nt, Artificial Sequence
  Description of Artificial Sequence: Synthetic oligonucleotide
  Sense strand starting at position 2152 of SEQ ID NO: 1883968
cugggaauaugcucacaag

SEQ ID NO: 2229939 - RNA, 19 nt, Artificial Sequence
  Description of Artificial Sequence: Synthetic oligonucleotide
  Antisense strand to SEQ ID NO: 2229938
cuugugagcauauucccag

SEQ ID NO: 2229940 - RNA, 19 nt, Artificial Sequence
  Description of Artificial Sequence: Synthetic oligonucleotide
  Sense strand starting at position 2412 of SEQ ID NO: 1883968
auagaauucuaauugugag

SEQ ID NO: 2229941 - RNA, 19 nt, Artificial Sequence
  Description of Artificial Sequence: Synthetic oligonucleotide
  Antisense strand to SEQ ID NO: 2229940
cucacaauuagaauucuau

SEQ ID NO: 2229942 - RNA, 19 nt, Artificial Sequence
  Description of Artificial Sequence: Synthetic oligonucleotide
  Sense strand starting at position 2420 of SEQ ID NO: 1883968
cuaauugugagauguguga

SEQ ID NO: 2229943 - RNA, 19 nt, Artificial Sequence
  Description of Artificial Sequence: Synthetic oligonucleotide
  Antisense strand to SEQ ID NO: 2229942
ucacacaucucacaauuag

SEQ ID NO: 2229944 - RNA, 19 nt, Artificial Sequence
  Description of Artificial Sequence: Synthetic oligonucleotide
  Sense strand starting at position 2422 of SEQ ID NO: 1883968
aauugugagaugugugaga

SEQ ID NO: 2229945 - RNA, 19 nt, Artificial Sequence
  Description of Artificial Sequence: Synthetic oligonucleotide
  Antisense strand to SEQ ID NO: 2229944
ucucacacaucucacaauu

SEQ ID NO: 2229946 - RNA, 19 nt, Artificial Sequence
  Description of Artificial Sequence: Synthetic oligonucleotide
  Sense strand starting at position 2424 of SEQ ID NO: 1883968
uugugagaugugugagaaa

SEQ ID NO: 2229947 - RNA, 19 nt, Artificial Sequence
  Description of Artificial Sequence: Synthetic oligonucleotide
  Antisense strand to SEQ ID NO: 2229946
uuucucacacaucucacaa

SEQ ID NO: 2229948 - RNA, 19 nt, Artificial Sequence
  Description of Artificial Sequence: Synthetic oligonucleotide
  Sense strand starting at position 2455 of SEQ ID NO: 1883968
ggugcuaugagaggaaaug

SEQ ID NO: 2229949 - RNA, 19 nt, Artificial Sequence
  Description of Artificial Sequence: Synthetic oligonucleotide
  Antisense strand to SEQ ID NO: 2229948
cauuuccucucauagcacc

SEQ ID NO: 2229950 - RNA, 19 nt, Artificial Sequence
  Description of Artificial Sequence: Synthetic oligonucleotide
  Sense strand starting at position 2670 of SEQ ID NO: 1883968
auaaaugcucaguaaacgu

SEQ ID NO: 2229951 - RNA, 19 nt, Artificial Sequence
  Description of Artificial Sequence: Synthetic oligonucleotide
  Antisense strand to SEQ ID NO: 2229950
acguuuacugagcauuuau

SEQ ID NO: 2229952 - RNA, 19 nt, Artificial Sequence
  Description of Artificial Sequence: Synthetic oligonucleotide
  Sense strand starting at position 2685 of SEQ ID NO: 1883968
acguaaguucccugaggga

SEQ ID NO: 2229953 - RNA, 19 nt, Artificial Sequence
  Description of Artificial Sequence: Synthetic oligonucleotide
  Antisense strand to SEQ ID NO: 2229952
ucccucagggaacuuacgu

SEQ ID NO: 2229954 - RNA, 19 nt, Artificial Sequence
  Description of Artificial Sequence: Synthetic oligonucleotide
  Sense strand starting at position 3332 of SEQ ID NO: 1883968
gcuaacaagggccauauua

SEQ ID NO: 2229955 - RNA, 19 nt, Artificial Sequence
  Description of Artificial Sequence: Synthetic oligonucleotide
  Antisense strand to SEQ ID NO: 2229954
uaauauggcccuuguuagc

SEQ ID NO: 2229956 - RNA, 19 nt, Artificial Sequence
  Description of Artificial Sequence: Synthetic oligonucleotide
  Sense strand starting at position 3346 of SEQ ID NO: 1883968
uauuauguguaguuugaga

SEQ ID NO: 2229957 - RNA, 19 nt, Artificial Sequence
  Description of Artificial Sequence: Synthetic oligonucleotide
  Antisense strand to SEQ ID NO: 2229956
ucucaaacuacacauaaua

SEQ ID NO: 2229958 - RNA, 19 nt, Artificial Sequence
  Description of Artificial Sequence: Synthetic oligonucleotide
  Sense strand starting at position 3374 of SEQ ID NO: 1883968
gcaggaauauaucuuacuu

SEQ ID NO: 2229959 - RNA, 19 nt, Artificial Sequence
  Description of Artificial Sequence: Synthetic oligonucleotide
  Antisense strand to SEQ ID NO: 2229958
aaguaagauauauuccugc

SEQ ID NO: 2229960 - RNA, 19 nt, Artificial Sequence
  Description of Artificial Sequence: Synthetic oligonucleotide
  Sense strand starting at position 3384 of SEQ ID NO: 1883968
aucuuacuucuguagauuc

SEQ ID NO: 2229961 - RNA, 19 nt, Artificial Sequence
  Description of Artificial Sequence: Synthetic oligonucleotide
  Antisense strand to SEQ ID NO: 2229960
gaaucuacagaaguaagau

SEQ ID NO: 2229962 - RNA, 19 nt, Artificial Sequence
  Description of Artificial Sequence: Synthetic oligonucleotide
  Sense strand starting at position 3415 of SEQ ID NO: 1883968
guaguagaagcucagucaa

SEQ ID NO: 2229963 - RNA, 19 nt, Artificial Sequence
  Description of Artificial Sequence: Synthetic oligonucleotide
  Antisense strand to SEQ ID NO: 2229962
uugacugagcuucuacuac

SEQ ID NO: 2229964 - RNA, 19 nt, Artificial Sequence
  Description of Artificial Sequence: Synthetic oligonucleotide
  Sense strand starting at position 3417 of SEQ ID NO: 1883968
aguagaagcucagucaauc

SEQ ID NO: 2229965 - RNA, 19 nt, Artificial Sequence
  Description of Artificial Sequence: Synthetic oligonucleotide
  Antisense strand to SEQ ID NO: 2229964
gauugacugagcuucuacu

SEQ ID NO: 2229966 - RNA, 19 nt, Artificial Sequence
  Description of Artificial Sequence: Synthetic oligonucleotide
  Sense strand starting at position 3717 of SEQ ID NO: 1883968
ugacauagaugauaagaca

SEQ ID NO: 2229967 - RNA, 19 nt, Artificial Sequence
  Description of Artificial Sequence: Synthetic oligonucleotide
  Antisense strand to SEQ ID NO: 2229966
ugucuuaucaucuauguca

SEQ ID NO: 2229968 - RNA, 19 nt, Artificial Sequence
  Description of Artificial Sequence: Synthetic oligonucleotide
  Sense strand starting at position 3733 of SEQ ID NO: 1883968
acagaagucagcugaagag

SEQ ID NO: 2229969 - RNA, 19 nt, Artificial Sequence
  Description of Artificial Sequence: Synthetic oligonucleotide
  Antisense strand to SEQ ID NO: 2229968
cucuucagcugacuucugu

SEQ ID NO: 2229970 - RNA, 19 nt, Artificial Sequence
  Description of Artificial Sequence: Synthetic oligonucleotide
  Sense strand starting at position 3757 of SEQ ID NO: 1883968
ggaucauauugcccuggaa

SEQ ID NO: 2229971 - RNA, 19 nt, Artificial Sequence
  Description of Artificial Sequence: Synthetic oligonucleotide
  Antisense strand to SEQ ID NO: 2229970
uuccagggcaauaugaucc

SEQ ID NO: 2229972 - RNA, 19 nt, Artificial Sequence
  Description of Artificial Sequence: Synthetic oligonucleotide
  Sense strand starting at position 3759 of SEQ ID NO: 1883968
aucauauugcccuggaauc

SEQ ID NO: 2229973 - RNA, 19 nt, Artificial Sequence
  Description of Artificial Sequence: Synthetic oligonucleotide
  Antisense strand to SEQ ID NO: 2229972
gauuccagggcaauaugau

SEQ ID NO: 2229974 - RNA, 19 nt, Artificial Sequence
  Description of Artificial Sequence: Synthetic oligonucleotide
  Sense strand starting at position 3760 of SEQ ID NO: 1883968
ucauauugcccuggaauca

SEQ ID NO: 2229975 - RNA, 19 nt, Artificial Sequence
  Description of Artificial Sequence: Synthetic oligonucleotide
  Antisense strand to SEQ ID NO: 2229974
ugauuccagggcaauauga

SEQ ID NO: 2229976 - RNA, 19 nt, Artificial Sequence
  Description of Artificial Sequence: Synthetic oligonucleotide
  Sense strand starting at position 3772 of SEQ ID NO: 1883968
ggaaucagauuacagaaua

SEQ ID NO: 2229977 - RNA, 19 nt, Artificial Sequence
  Description of Artificial Sequence: Synthetic oligonucleotide
  Antisense strand to SEQ ID NO: 2229976
uauucuguaaucugauucc

SEQ ID NO: 2229978 - RNA, 19 nt, Artificial Sequence
  Description of Artificial Sequence: Synthetic oligonucleotide
  Sense strand starting at position 3827 of SEQ ID NO: 1883968
guauaaauacaggguuaua

SEQ ID NO: 2229979 - RNA, 19 nt, Artificial Sequence
  Description of Artificial Sequence: Synthetic oligonucleotide
  Antisense strand to SEQ ID NO: 2229978
uauaacccuguauuuauac

SEQ ID NO: 2229980 - RNA, 19 nt, Artificial Sequence
  Description of Artificial Sequence: Synthetic oligonucleotide
  Sense strand starting at position 3846 of SEQ ID NO: 1883968
agauauuauucccucugga

SEQ ID NO: 2229981 - RNA, 19 nt, Artificial Sequence
  Description of Artificial Sequence: Synthetic oligonucleotide
  Antisense strand to SEQ ID NO: 2229980
uccagagggaauaauaucu

SEQ ID NO: 2229982 - RNA, 19 nt, Artificial Sequence
  Description of Artificial Sequence: Synthetic oligonucleotide
  Sense strand starting at position 3861 of SEQ ID NO: 1883968
uggaccaaagauugucaua

SEQ ID NO: 2229983 - RNA, 19 nt, Artificial Sequence
  Description of Artificial Sequence: Synthetic oligonucleotide
  Antisense strand to SEQ ID NO: 2229982
uaugacaaucuuuggucca

SEQ ID NO: 2229984 - RNA, 19 nt, Artificial Sequence
  Description of Artificial Sequence: Synthetic oligonucleotide
  Sense strand starting at position 3888 of SEQ ID NO: 1883968
gagccaaaguccuccagau

SEQ ID NO: 2229985 - RNA, 19 nt, Artificial Sequence
  Description of Artificial Sequence: Synthetic oligonucleotide
  Antisense strand to SEQ ID NO: 2229984
aucuggaggacuuuggcuc

SEQ ID NO: 2229986 - RNA, 19 nt, Artificial Sequence
  Description of Artificial Sequence: Synthetic oligonucleotide
  Sense strand starting at position 3890 of SEQ ID NO: 1883968
gccaaaguccuccagauac

SEQ ID NO: 2229987 - RNA, 19 nt, Artificial Sequence
  Description of Artificial Sequence: Synthetic oligonucleotide
  Antisense strand to SEQ ID NO: 2229986
guaucuggaggacuuuggc

SEQ ID NO: 2229988 - RNA, 19 nt, Artificial Sequence
  Description of Artificial Sequence: Synthetic oligonucleotide
  Sense strand starting at position 3938 of SEQ ID NO: 1883968
ugcaguuauuugccaccaa

SEQ ID NO: 2229989 - RNA, 19 nt, Artificial Sequence
  Description of Artificial Sequence: Synthetic oligonucleotide
  Antisense strand to SEQ ID NO: 2229988
uugguggcaaauaacugca

SEQ ID NO: 2229990 - RNA, 19 nt, Artificial Sequence
  Description of Artificial Sequence: Synthetic oligonucleotide
  Sense strand starting at position 48 of SEQ ID NO: 1883969
uugauuuaagcaggcgagu

SEQ ID NO: 2229991 - RNA, 19 nt, Artificial Sequence
  Description of Artificial Sequence: Synthetic oligonucleotide
  Antisense strand to SEQ ID NO: 2229990
acucgccugcuuaaaucaa

SEQ ID NO: 2229992 - RNA, 19 nt, Artificial Sequence
  Description of Artificial Sequence: Synthetic oligonucleotide
  Sense strand starting at position 50 of SEQ ID NO: 1883969
gauuuaagcaggcgaguuu

SEQ ID NO: 2229993 - RNA, 19 nt, Artificial Sequence
  Description of Artificial Sequence: Synthetic oligonucleotide
  Antisense strand to SEQ ID NO: 2229992
aaacucgccugcuuaaauc

SEQ ID NO: 2229994 - RNA, 19 nt, Artificial Sequence
  Description of Artificial Sequence: Synthetic oligonucleotide
  Sense strand starting at position 110 of SEQ ID NO: 1883969
ugugacauagcagguuaaa

SEQ ID NO: 2229995 - RNA, 19 nt, Artificial Sequence
  Description of Artificial Sequence: Synthetic oligonucleotide
  Antisense strand to SEQ ID NO: 2229994
uuuaaccugcuaugucaca

SEQ ID NO: 2229996 - RNA, 19 nt, Artificial Sequence
  Description of Artificial Sequence: Synthetic oligonucleotide
  Sense strand starting at position 182 of SEQ ID NO: 1883969
gcauaacuugcauaugaau

SEQ ID NO: 2229997 - RNA, 19 nt, Artificial Sequence
  Description of Artificial Sequence: Synthetic oligonucleotide
  Antisense strand to SEQ ID NO: 2229996
auucauaugcaaguuaugc

SEQ ID NO: 2229998 - RNA, 19 nt, Artificial Sequence
  Description of Artificial Sequence: Synthetic oligonucleotide
  Sense strand starting at position 188 of SEQ ID NO: 1883969
cuugcauaugaaugaagau

SEQ ID NO: 2229999 - RNA, 19 nt, Artificial Sequence
  Description of Artificial Sequence: Synthetic oligonucleotide
  Antisense strand to SEQ ID NO: 2229998
aucuucauucauaugcaag

SEQ ID NO: 2230000 - RNA, 19 nt, Artificial Sequence
  Description of Artificial Sequence: Synthetic oligonucleotide
  Sense strand starting at position 467 of SEQ ID NO: 1883969
agaggcaacuucuuguaaa

SEQ ID NO: 2230001 - RNA, 19 nt, Artificial Sequence
  Description of Artificial Sequence: Synthetic oligonucleotide
  Antisense strand to SEQ ID NO: 2230000
uuuacaagaaguugccucu

SEQ ID NO: 2230002 - RNA, 19 nt, Artificial Sequence
  Description of Artificial Sequence: Synthetic oligonucleotide
  Sense strand starting at position 1180 of SEQ ID NO: 1883969
cagcgucaugaucagacua

SEQ ID NO: 2230003 - RNA, 19 nt, Artificial Sequence
  Description of Artificial Sequence: Synthetic oligonucleotide
  Antisense strand to SEQ ID NO: 2230002
uagucugaucaugacgcug

SEQ ID NO: 2230004 - RNA, 19 nt, Artificial Sequence
  Description of Artificial Sequence: Synthetic oligonucleotide
  Sense strand starting at position 1433 of SEQ ID NO: 1883969
ugucguaaccuguagauuc

SEQ ID NO: 2230005 - RNA, 19 nt, Artificial Sequence
  Description of Artificial Sequence: Synthetic oligonucleotide
  Antisense strand to SEQ ID NO: 2230004
gaaucuacagguuacgaca

SEQ ID NO: 2230006 - RNA, 19 nt, Artificial Sequence
  Description of Artificial Sequence: Synthetic oligonucleotide
  Sense strand starting at position 1441 of SEQ ID NO: 1883969
ccuguagauucccugucau

SEQ ID NO: 2230007 - RNA, 19 nt, Artificial Sequence
  Description of Artificial Sequence: Synthetic oligonucleotide
  Antisense strand to SEQ ID NO: 2230006
augacagggaaucuacagg

SEQ ID NO: 2230008 - RNA, 19 nt, Artificial Sequence
  Description of Artificial Sequence: Synthetic oligonucleotide
  Sense strand starting at position 2110 of SEQ ID NO: 1883969
aaaguaauuguuggcacau

SEQ ID NO: 2230009 - RNA, 19 nt, Artificial Sequence
  Description of Artificial Sequence: Synthetic oligonucleotide
  Antisense strand to SEQ ID NO: 2230008
augugccaacaauuacuuu

SEQ ID NO: 2230010 - RNA, 19 nt, Artificial Sequence
  Description of Artificial Sequence: Synthetic oligonucleotide
  Sense strand starting at position 2111 of SEQ ID NO: 1883969
aaguaauuguuggcacauc

SEQ ID NO: 2230011 - RNA, 19 nt, Artificial Sequence
  Description of Artificial Sequence: Synthetic oligonucleotide
  Antisense strand to SEQ ID NO: 2230010
gaugugccaacaauuacuu

SEQ ID NO: 2230012 - RNA, 19 nt, Artificial Sequence
  Description of Artificial Sequence: Synthetic oligonucleotide
  Sense strand starting at position 2121 of SEQ ID NO: 1883969
uggcacauccuauguaaca

SEQ ID NO: 2230013 - RNA, 19 nt, Artificial Sequence
  Description of Artificial Sequence: Synthetic oligonucleotide
  Antisense strand to SEQ ID NO: 2230012
uguuacauaggaugugcca

SEQ ID NO: 2230014 - RNA, 19 nt, Artificial Sequence
  Description of Artificial Sequence: Synthetic oligonucleotide
  Sense strand starting at position 2122 of SEQ ID NO: 1883969
ggcacauccuauguaacau

SEQ ID NO: 2230015 - RNA, 19 nt, Artificial Sequence
  Description of Artificial Sequence: Synthetic oligonucleotide
  Antisense strand to SEQ ID NO: 2230014
auguuacauaggaugugcc

SEQ ID NO: 2230016 - RNA, 19 nt, Artificial Sequence
  Description of Artificial Sequence: Synthetic oligonucleotide
  Sense strand starting at position 2341 of SEQ ID NO: 1883969
aaagaucgugcaggagaaa

SEQ ID NO: 2230017 - RNA, 19 nt, Artificial Sequence
  Description of Artificial Sequence: Synthetic oligonucleotide
  Antisense strand to SEQ ID NO: 2230016
uuucuccugcacgaucuuu

SEQ ID NO: 2230018 - RNA, 19 nt, Artificial Sequence
  Description of Artificial Sequence: Synthetic oligonucleotide
  Sense strand starting at position 2400 of SEQ ID NO: 1883969
gagagaucaagcuguggug

SEQ ID NO: 2230019 - RNA, 19 nt, Artificial Sequence
  Description of Artificial Sequence: Synthetic oligonucleotide
  Antisense strand to SEQ ID NO: 2230018
caccacagcuugaucucuc

SEQ ID NO: 2230020 - RNA, 19 nt, Artificial Sequence
  Description of Artificial Sequence: Synthetic oligonucleotide
  Sense strand starting at position 2431 of SEQ ID NO: 1883969
gcuaguccugcucacugaa

SEQ ID NO: 2230021 - RNA, 19 nt, Artificial Sequence
  Description of Artificial Sequence: Synthetic oligonucleotide
  Antisense strand to SEQ ID NO: 2230020
uucagugagcaggacuagc

SEQ ID NO: 2230022 - RNA, 19 nt, Artificial Sequence
  Description of Artificial Sequence: Synthetic oligonucleotide
  Sense strand starting at position 2569 of SEQ ID NO: 1883969
agaugagaauuagcacgua

SEQ ID NO: 2230023 - RNA, 19 nt, Artificial Sequence
  Description of Artificial Sequence: Synthetic oligonucleotide
  Antisense strand to SEQ ID NO: 2230022
uacgugcuaauucucaucu

SEQ ID NO: 2230024 - RNA, 19 nt, Artificial Sequence
  Description of Artificial Sequence: Synthetic oligonucleotide
  Sense strand starting at position 2645 of SEQ ID NO: 1883969
ugcuuagagcaccacaaau

SEQ ID NO: 2230025 - RNA, 19 nt, Artificial Sequence
  Description of Artificial Sequence: Synthetic oligonucleotide
  Antisense strand to SEQ ID NO: 2230024
auuuguggugcucuaagca

SEQ ID NO: 2230026 - RNA, 19 nt, Artificial Sequence
  Description of Artificial Sequence: Synthetic oligonucleotide
  Sense strand starting at position 2745 of SEQ ID NO: 1883969
ggcggcuguguucccauaa

SEQ ID NO: 2230027 - RNA, 19 nt, Artificial Sequence
  Description of Artificial Sequence: Synthetic oligonucleotide
  Antisense strand to SEQ ID NO: 2230026
uuaugggaacacagccgcc

SEQ ID NO: 2230028 - RNA, 19 nt, Artificial Sequence
  Description of Artificial Sequence: Synthetic oligonucleotide
  Sense strand starting at position 3145 of SEQ ID NO: 1883969
ugaacccugucuuccagaa

SEQ ID NO: 2230029 - RNA, 19 nt, Artificial Sequence
  Description of Artificial Sequence: Synthetic oligonucleotide
  Antisense strand to SEQ ID NO: 2230028
uucuggaagacaggguuca

SEQ ID NO: 2230030 - RNA, 19 nt, Artificial Sequence
  Description of Artificial Sequence: Synthetic oligonucleotide
  Sense strand starting at position 3149 of SEQ ID NO: 1883969
cccugucuuccagaaaugu

SEQ ID NO: 2230031 - RNA, 19 nt, Artificial Sequence
  Description of Artificial Sequence: Synthetic oligonucleotide
  Antisense strand to SEQ ID NO: 2230030
acauuucuggaagacaggg

SEQ ID NO: 2230032 - RNA, 19 nt, Artificial Sequence
  Description of Artificial Sequence: Synthetic oligonucleotide
  Sense strand starting at position 3155 of SEQ ID NO: 1883969
cuuccagaaauguguugga

SEQ ID NO: 2230033 - RNA, 19 nt, Artificial Sequence
  Description of Artificial Sequence: Synthetic oligonucleotide
  Antisense strand to SEQ ID NO: 2230032
uccaacacauuucuggaag

SEQ ID NO: 2230034 - RNA, 19 nt, Artificial Sequence
  Description of Artificial Sequence: Synthetic oligonucleotide
  Sense strand starting at position 3159 of SEQ ID NO: 1883969
cagaaauguguuggacucu

SEQ ID NO: 2230035 - RNA, 19 nt, Artificial Sequence
  Description of Artificial Sequence: Synthetic oligonucleotide
  Antisense strand to SEQ ID NO: 2230034
agaguccaacacauuucug

SEQ ID NO: 2230036 - RNA, 19 nt, Artificial Sequence
  Description of Artificial Sequence: Synthetic oligonucleotide
  Sense strand starting at position 3168 of SEQ ID NO: 1883969
guuggacucucauccauua

SEQ ID NO: 2230037 - RNA, 19 nt, Artificial Sequence
  Description of Artificial Sequence: Synthetic oligonucleotide
  Antisense strand to SEQ ID NO: 2230036
uaauggaugagaguccaac

SEQ ID NO: 2230038 - RNA, 19 nt, Artificial Sequence
  Description of Artificial Sequence: Synthetic oligonucleotide
  Sense strand starting at position 3264 of SEQ ID NO: 1883969
cagugaugaugucuuagga

SEQ ID NO: 2230039 - RNA, 19 nt, Artificial Sequence
  Description of Artificial Sequence: Synthetic oligonucleotide
  Antisense strand to SEQ ID NO: 2230038
uccuaagacaucaucacug

SEQ ID NO: 2230040 - RNA, 19 nt, Artificial Sequence
  Description of Artificial Sequence: Synthetic oligonucleotide
  Sense strand starting at position 3379 of SEQ ID NO: 1883969
ucugguaaaccuggugaau

SEQ ID NO: 2230041 - RNA, 19 nt, Artificial Sequence
  Description of Artificial Sequence: Synthetic oligonucleotide
  Antisense strand to SEQ ID NO: 2230040
auucaccagguuuaccaga

SEQ ID NO: 2230042 - RNA, 19 nt, Artificial Sequence
  Description of Artificial Sequence: Synthetic oligonucleotide
  Sense strand starting at position 3390 of SEQ ID NO: 1883969
uggugaaugguggguuaac

SEQ ID NO: 2230043 - RNA, 19 nt, Artificial Sequence
  Description of Artificial Sequence: Synthetic oligonucleotide
  Antisense strand to SEQ ID NO: 2230042
guuaacccaccauucacca

SEQ ID NO: 2230044 - RNA, 19 nt, Artificial Sequence
  Description of Artificial Sequence: Synthetic oligonucleotide
  Sense strand starting at position 3391 of SEQ ID NO: 1883969
ggugaaugguggguuaaca

SEQ ID NO: 2230045 - RNA, 19 nt, Artificial Sequence
  Description of Artificial Sequence: Synthetic oligonucleotide
  Antisense strand to SEQ ID NO: 2230044
uguuaacccaccauucacc

SEQ ID NO: 2230046 - RNA, 19 nt, Artificial Sequence
  Description of Artificial Sequence: Synthetic oligonucleotide
  Sense strand starting at position 3601 of SEQ ID NO: 1883969
gcuuguggcacugaagaau

SEQ ID NO: 2230047 - RNA, 19 nt, Artificial Sequence
  Description of Artificial Sequence: Synthetic oligonucleotide
  Antisense strand to SEQ ID NO: 2230046
auucuucagugccacaagc

SEQ ID NO: 2230048 - RNA, 19 nt, Artificial Sequence
  Description of Artificial Sequence: Synthetic oligonucleotide
  Sense strand starting at position 3607 of SEQ ID NO: 1883969
ggcacugaagaauguucua

SEQ ID NO: 2230049 - RNA, 19 nt, Artificial Sequence
  Description of Artificial Sequence: Synthetic oligonucleotide
  Antisense strand to SEQ ID NO: 2230048
uagaacauucuucagugcc

SEQ ID NO: 2230050 - RNA, 19 nt, Artificial Sequence
  Description of Artificial Sequence: Synthetic oligonucleotide
  Sense strand starting at position 3795 of SEQ ID NO: 1883969
gcacuuuguguauaucuau

SEQ ID NO: 2230051 - RNA, 19 nt, Artificial Sequence
  Description of Artificial Sequence: Synthetic oligonucleotide
  Antisense strand to SEQ ID NO: 2230050
auagauauacacaaagugc

SEQ ID NO: 2230052 - RNA, 19 nt, Artificial Sequence
  Description of Artificial Sequence: Synthetic oligonucleotide
  Sense strand starting at position 3814 of SEQ ID NO: 1883969
auaagugaugcgcaauuac

SEQ ID NO: 2230053 - RNA, 19 nt, Artificial Sequence
  Description of Artificial Sequence: Synthetic oligonucleotide
  Antisense strand to SEQ ID NO: 2230052
guaauugcgcaucacuuau

SEQ ID NO: 2230054 - RNA, 19 nt, Artificial Sequence
  Description of Artificial Sequence: Synthetic oligonucleotide
  Sense strand starting at position 3823 of SEQ ID NO: 1883969
gcgcaauuacuauauaaca

SEQ ID NO: 2230055 - RNA, 19 nt, Artificial Sequence
  Description of Artificial Sequence: Synthetic oligonucleotide
  Antisense strand to SEQ ID NO: 2230054
uguuauauaguaauugcgc

SEQ ID NO: 2230056 - RNA, 19 nt, Artificial Sequence
  Description of Artificial Sequence: Synthetic oligonucleotide
  Sense strand starting at position 3846 of SEQ ID NO: 1883969
acuagcugaccugacauua

SEQ ID NO: 2230057 - RNA, 19 nt, Artificial Sequence
  Description of Artificial Sequence: Synthetic oligonucleotide
  Antisense strand to SEQ ID NO: 2230056
uaaugucaggucagcuagu

SEQ ID NO: 2230058 - RNA, 19 nt, Artificial Sequence
  Description of Artificial Sequence: Synthetic oligonucleotide
  Sense strand starting at position 3876 of SEQ ID NO: 1883969
uaggcaugugacuaauugu

SEQ ID NO: 2230059 - RNA, 19 nt, Artificial Sequence
  Description of Artificial Sequence: Synthetic oligonucleotide
  Antisense strand to SEQ ID NO: 2230058
acaauuagucacaugccua

SEQ ID NO: 2230060 - RNA, 19 nt, Artificial Sequence
  Description of Artificial Sequence: Synthetic oligonucleotide
  Sense strand starting at position 3885 of SEQ ID NO: 1883969
gacuaauuguaggugugua

SEQ ID NO: 2230061 - RNA, 19 nt, Artificial Sequence
  Description of Artificial Sequence: Synthetic oligonucleotide
  Antisense strand to SEQ ID NO: 2230060
uacacaccuacaauuaguc

SEQ ID NO: 2230062 - RNA, 19 nt, Artificial Sequence
  Description of Artificial Sequence: Synthetic oligonucleotide
  Sense strand starting at position 3886 of SEQ ID NO: 1883969
acuaauuguagguguguaa

SEQ ID NO: 2230063 - RNA, 19 nt, Artificial Sequence
  Description of Artificial Sequence: Synthetic oligonucleotide
  Antisense strand to SEQ ID NO: 2230062
uuacacaccuacaauuagu

SEQ ID NO: 2230064 - RNA, 19 nt, Artificial Sequence
  Description of Artificial Sequence: Synthetic oligonucleotide
  Sense strand starting at position 3889 of SEQ ID NO: 1883969
aauuguagguguguaauga

SEQ ID NO: 2230065 - RNA, 19 nt, Artificial Sequence
  Description of Artificial Sequence: Synthetic oligonucleotide
  Antisense strand to SEQ ID NO: 2230064
ucauuacacaccuacaauu

SEQ ID NO: 2230066 - RNA, 19 nt, Artificial Sequence
  Description of Artificial Sequence: Synthetic oligonucleotide
  Sense strand starting at position 3890 of SEQ ID NO: 1883969
auuguagguguguaaugaa

SEQ ID NO: 2230067 - RNA, 19 nt, Artificial Sequence
  Description of Artificial Sequence: Synthetic oligonucleotide
  Antisense strand to SEQ ID NO: 2230066
uucauuacacaccuacaau

SEQ ID NO: 2230068 - RNA, 19 nt, Artificial Sequence
  Description of Artificial Sequence: Synthetic oligonucleotide
  Sense strand starting at position 3971 of SEQ ID NO: 1883969
uggaacugccaguauguuu

SEQ ID NO: 2230069 - RNA, 19 nt, Artificial Sequence
  Description of Artificial Sequence: Synthetic oligonucleotide
  Antisense strand to SEQ ID NO: 2230068
aaacauacuggcaguucca

SEQ ID NO: 2230070 - RNA, 19 nt, Artificial Sequence
  Description of Artificial Sequence: Synthetic oligonucleotide
  Sense strand starting at position 207 of SEQ ID NO: 1883970
aucuguucucuccacaugu

SEQ ID NO: 2230071 - RNA, 19 nt, Artificial Sequence
  Description of Artificial Sequence: Synthetic oligonucleotide
  Antisense strand to SEQ ID NO: 2230070
acauguggagagaacagau

SEQ ID NO: 2230072 - RNA, 19 nt, Artificial Sequence
  Description of Artificial Sequence: Synthetic oligonucleotide
  Sense strand starting at position 237 of SEQ ID NO: 1883970
cauaucaugguuuggaaau

SEQ ID NO: 2230073 - RNA, 19 nt, Artificial Sequence
  Description of Artificial Sequence: Synthetic oligonucleotide
  Antisense strand to SEQ ID NO: 2230072
auuuccaaaccaugauaug

SEQ ID NO: 2230074 - RNA, 19 nt, Artificial Sequence
  Description of Artificial Sequence: Synthetic oligonucleotide
  Sense strand starting at position 347 of SEQ ID NO: 1883970
ugaucuucuuuacuuguua

SEQ ID NO: 2230075 - RNA, 19 nt, Artificial Sequence
  Description of Artificial Sequence: Synthetic oligonucleotide
  Antisense strand to SEQ ID NO: 2230074
uaacaaguaaagaagauca

SEQ ID NO: 2230076 - RNA, 19 nt, Artificial Sequence
  Description of Artificial Sequence: Synthetic oligonucleotide
  Sense strand starting at position 590 of SEQ ID NO: 1883970
gcuacauugcauuaaucga

SEQ ID NO: 2230077 - RNA, 19 nt, Artificial Sequence
  Description of Artificial Sequence: Synthetic oligonucleotide
  Antisense strand to SEQ ID NO: 2230076
ucgauuaaugcaauguagc

SEQ ID NO: 2230078 - RNA, 19 nt, Artificial Sequence
  Description of Artificial Sequence: Synthetic oligonucleotide
  Sense strand starting at position 623 of SEQ ID NO: 1883970
gcaaacuguggcuaugaca

SEQ ID NO: 2230079 - RNA, 19 nt, Artificial Sequence
  Description of Artificial Sequence: Synthetic oligonucleotide
  Antisense strand to SEQ ID NO: 2230078
ugucauagccacaguuugc

SEQ ID NO: 2230080 - RNA, 19 nt, Artificial Sequence
  Description of Artificial Sequence: Synthetic oligonucleotide
  Sense strand starting at position 686 of SEQ ID NO: 1883970
cugauuauggaucaucguu

SEQ ID NO: 2230081 - RNA, 19 nt, Artificial Sequence
  Description of Artificial Sequence: Synthetic oligonucleotide
  Antisense strand to SEQ ID NO: 2230080
aacgaugauccauaaucag

SEQ ID NO: 2230082 - RNA, 19 nt, Artificial Sequence
  Description of Artificial Sequence: Synthetic oligonucleotide
  Sense strand starting at position 764 of SEQ ID NO: 1883970
accuguagcuuuccugaca

SEQ ID NO: 2230083 - RNA, 19 nt, Artificial Sequence
  Description of Artificial Sequence: Synthetic oligonucleotide
  Antisense strand to SEQ ID NO: 2230082
ugucaggaaagcuacaggu

SEQ ID NO: 2230084 - RNA, 19 nt, Artificial Sequence
  Description of Artificial Sequence: Synthetic oligonucleotide
  Sense strand starting at position 765 of SEQ ID NO: 1883970
ccuguagcuuuccugacaa

SEQ ID NO: 2230085 - RNA, 19 nt, Artificial Sequence
  Description of Artificial Sequence: Synthetic oligonucleotide
  Antisense strand to SEQ ID NO: 2230084
uugucaggaaagcuacagg

SEQ ID NO: 2230086 - RNA, 19 nt, Artificial Sequence
  Description of Artificial Sequence: Synthetic oligonucleotide
  Sense strand starting at position 767 of SEQ ID NO: 1883970
uguagcuuuccugacaacu

SEQ ID NO: 2230087 - RNA, 19 nt, Artificial Sequence
  Description of Artificial Sequence: Synthetic oligonucleotide
  Antisense strand to SEQ ID NO: 2230086
aguugucaggaaagcuaca

SEQ ID NO: 2230088 - RNA, 19 nt, Artificial Sequence
  Description of Artificial Sequence: Synthetic oligonucleotide
  Sense strand starting at position 1278 of SEQ ID NO: 1883970
uccaaaguuuccucuguga

SEQ ID NO: 2230089 - RNA, 19 nt, Artificial Sequence
  Description of Artificial Sequence: Synthetic oligonucleotide
  Antisense strand to SEQ ID NO: 2230088
ucacagaggaaacuuugga

SEQ ID NO: 2230090 - RNA, 19 nt, Artificial Sequence
  Description of Artificial Sequence: Synthetic oligonucleotide
  Sense strand starting at position 1775 of SEQ ID NO: 1883970
ccagacaaucugugagugu

SEQ ID NO: 2230091 - RNA, 19 nt, Artificial Sequence
  Description of Artificial Sequence: Synthetic oligonucleotide
  Antisense strand to SEQ ID NO: 2230090
acacucacagauugucugg

SEQ ID NO: 2230092 - RNA, 19 nt, Artificial Sequence
  Description of Artificial Sequence: Synthetic oligonucleotide
  Sense strand starting at position 2046 of SEQ ID NO: 1883970
ggcaacucugccuggauca

SEQ ID NO: 2230093 - RNA, 19 nt, Artificial Sequence
  Description of Artificial Sequence: Synthetic oligonucleotide
  Antisense strand to SEQ ID NO: 2230092
ugauccaggcagaguugcc

SEQ ID NO: 2230094 - RNA, 19 nt, Artificial Sequence
  Description of Artificial Sequence: Synthetic oligonucleotide
  Sense strand starting at position 2255 of SEQ ID NO: 1883970
agaugagaguugcugguaa

SEQ ID NO: 2230095 - RNA, 19 nt, Artificial Sequence
  Description of Artificial Sequence: Synthetic oligonucleotide
  Antisense strand to SEQ ID NO: 2230094
uuaccagcaacucucaucu

SEQ ID NO: 2230096 - RNA, 19 nt, Artificial Sequence
  Description of Artificial Sequence: Synthetic oligonucleotide
  Sense strand starting at position 2257 of SEQ ID NO: 1883970
augagaguugcugguaauu

SEQ ID NO: 2230097 - RNA, 19 nt, Artificial Sequence
  Description of Artificial Sequence: Synthetic oligonucleotide
  Antisense strand to SEQ ID NO: 2230096
aauuaccagcaacucucau

SEQ ID NO: 2230098 - RNA, 19 nt, Artificial Sequence
  Description of Artificial Sequence: Synthetic oligonucleotide
  Sense strand starting at position 2318 of SEQ ID NO: 1883970
cagggaugcugguuggaaa

SEQ ID NO: 2230099 - RNA, 19 nt, Artificial Sequence
  Description of Artificial Sequence: Synthetic oligonucleotide
  Antisense strand to SEQ ID NO: 2230098
uuuccaaccagcaucccug

SEQ ID NO: 2230100 - RNA, 19 nt, Artificial Sequence
  Description of Artificial Sequence: Synthetic oligonucleotide
  Sense strand starting at position 2343 of SEQ ID NO: 1883970
uuuccugagcuguggacau

SEQ ID NO: 2230101 - RNA, 19 nt, Artificial Sequence
  Description of Artificial Sequence: Synthetic oligonucleotide
  Antisense strand to SEQ ID NO: 2230100
auguccacagcucaggaaa

SEQ ID NO: 2230102 - RNA, 19 nt, Artificial Sequence
  Description of Artificial Sequence: Synthetic oligonucleotide
  Sense strand starting at position 2394 of SEQ ID NO: 1883970
uuugguuguucuuugaaca

SEQ ID NO: 2230103 - RNA, 19 nt, Artificial Sequence
  Description of Artificial Sequence: Synthetic oligonucleotide
  Antisense strand to SEQ ID NO: 2230102
uguucaaagaacaaccaaa

SEQ ID NO: 2230104 - RNA, 19 nt, Artificial Sequence
  Description of Artificial Sequence: Synthetic oligonucleotide
  Sense strand starting at position 2395 of SEQ ID NO: 1883970
uugguuguucuuugaacau

SEQ ID NO: 2230105 - RNA, 19 nt, Artificial Sequence
  Description of Artificial Sequence: Synthetic oligonucleotide
  Antisense strand to SEQ ID NO: 2230104
auguucaaagaacaaccaa

SEQ ID NO: 2230106 - RNA, 19 nt, Artificial Sequence
  Description of Artificial Sequence: Synthetic oligonucleotide
  Sense strand starting at position 2609 of SEQ ID NO: 1883970
gaaggcuggcaucauuauu

SEQ ID NO: 2230107 - RNA, 19 nt, Artificial Sequence
  Description of Artificial Sequence: Synthetic oligonucleotide
  Antisense strand to SEQ ID NO: 2230106
aauaaugaugccagccuuc

SEQ ID NO: 2230108 - RNA, 19 nt, Artificial Sequence
  Description of Artificial Sequence: Synthetic oligonucleotide
  Sense strand starting at position 2622 of SEQ ID NO: 1883970
auuauucuucucugacugu

SEQ ID NO: 2230109 - RNA, 19 nt, Artificial Sequence
  Description of Artificial Sequence: Synthetic oligonucleotide
  Antisense strand to SEQ ID NO: 2230108
acagucagagaagaauaau

SEQ ID NO: 2230110 - RNA, 19 nt, Artificial Sequence
  Description of Artificial Sequence: Synthetic oligonucleotide
  Sense strand starting at position 2682 of SEQ ID NO: 1883970
ucaugugugcuugaacaga

SEQ ID NO: 2230111 - RNA, 19 nt, Artificial Sequence
  Description of Artificial Sequence: Synthetic oligonucleotide
  Antisense strand to SEQ ID NO: 2230110
ucuguucaagcacacauga

SEQ ID NO: 2230112 - RNA, 19 nt, Artificial Sequence
  Description of Artificial Sequence: Synthetic oligonucleotide
  Sense strand starting at position 2761 of SEQ ID NO: 1883970
gcaggauugcauugagauc

SEQ ID NO: 2230113 - RNA, 19 nt, Artificial Sequence
  Description of Artificial Sequence: Synthetic oligonucleotide
  Antisense strand to SEQ ID NO: 2230112
gaucucaaugcaauccugc

SEQ ID NO: 2230114 - RNA, 19 nt, Artificial Sequence
  Description of Artificial Sequence: Synthetic oligonucleotide
  Sense strand starting at position 2770 of SEQ ID NO: 1883970
cauugagaucccuggaguu

SEQ ID NO: 2230115 - RNA, 19 nt, Artificial Sequence
  Description of Artificial Sequence: Synthetic oligonucleotide
  Antisense strand to SEQ ID NO: 2230114
aacuccagggaucucaaug

SEQ ID NO: 2230116 - RNA, 19 nt, Artificial Sequence
  Description of Artificial Sequence: Synthetic oligonucleotide
  Sense strand starting at position 2772 of SEQ ID NO: 1883970
uugagaucccuggaguugu

SEQ ID NO: 2230117 - RNA, 19 nt, Artificial Sequence
  Description of Artificial Sequence: Synthetic oligonucleotide
  Antisense strand to SEQ ID NO: 2230116
acaacuccagggaucucaa

SEQ ID NO: 2230118 - RNA, 19 nt, Artificial Sequence
  Description of Artificial Sequence: Synthetic oligonucleotide
  Sense strand starting at position 2815 of SEQ ID NO: 1883970
ccaagagaaccuugguuaa

SEQ ID NO: 2230119 - RNA, 19 nt, Artificial Sequence
  Description of Artificial Sequence: Synthetic oligonucleotide
  Antisense strand to SEQ ID NO: 2230118
uuaaccaagguucucuugg

SEQ ID NO: 2230120 - RNA, 19 nt, Artificial Sequence
  Description of Artificial Sequence: Synthetic oligonucleotide
  Sense strand starting at position 2900 of SEQ ID NO: 1883970
ugugaauugcucugacuug

SEQ ID NO: 2230121 - RNA, 19 nt, Artificial Sequence
  Description of Artificial Sequence: Synthetic oligonucleotide
  Antisense strand to SEQ ID NO: 2230120
caagucagagcaauucaca

SEQ ID NO: 2230122 - RNA, 19 nt, Artificial Sequence
  Description of Artificial Sequence: Synthetic oligonucleotide
  Sense strand starting at position 2909 of SEQ ID NO: 1883970
cucugacuugcugaauuga

SEQ ID NO: 2230123 - RNA, 19 nt, Artificial Sequence
  Description of Artificial Sequence: Synthetic oligonucleotide
  Antisense strand to SEQ ID NO: 2230122
ucaauucagcaagucagag

SEQ ID NO: 2230124 - RNA, 19 nt, Artificial Sequence
  Description of Artificial Sequence: Synthetic oligonucleotide
  Sense strand starting at position 3023 of SEQ ID NO: 1883970
acacaaugguuauccagga

SEQ ID NO: 2230125 - RNA, 19 nt, Artificial Sequence
  Description of Artificial Sequence: Synthetic oligonucleotide
  Antisense strand to SEQ ID NO: 2230124
uccuggauaaccauugugu

SEQ ID NO: 2230126 - RNA, 19 nt, Artificial Sequence
  Description of Artificial Sequence: Synthetic oligonucleotide
  Sense strand starting at position 3028 of SEQ ID NO: 1883970
augguuauccaggacucgu

SEQ ID NO: 2230127 - RNA, 19 nt, Artificial Sequence
  Description of Artificial Sequence: Synthetic oligonucleotide
  Antisense strand to SEQ ID NO: 2230126
acgaguccuggauaaccau

SEQ ID NO: 2230128 - RNA, 19 nt, Artificial Sequence
  Description of Artificial Sequence: Synthetic oligonucleotide
  Sense strand starting at position 3051 of SEQ ID NO: 1883970
uuccuaguuugaguuacuu

SEQ ID NO: 2230129 - RNA, 19 nt, Artificial Sequence
  Description of Artificial Sequence: Synthetic oligonucleotide
  Antisense strand to SEQ ID NO: 2230128
aaguaacucaaacuaggaa

SEQ ID NO: 2230130 - RNA, 19 nt, Artificial Sequence
  Description of Artificial Sequence: Synthetic oligonucleotide
  Sense strand starting at position 3148 of SEQ ID NO: 1883970
cucagauggucgcuugaga

SEQ ID NO: 2230131 - RNA, 19 nt, Artificial Sequence
  Description of Artificial Sequence: Synthetic oligonucleotide
  Antisense strand to SEQ ID NO: 2230130
ucucaagcgaccaucugag

SEQ ID NO: 2230132 - RNA, 19 nt, Artificial Sequence
  Description of Artificial Sequence: Synthetic oligonucleotide
  Sense strand starting at position 3226 of SEQ ID NO: 1883970
uugucauuaguugauuaca

SEQ ID NO: 2230133 - RNA, 19 nt, Artificial Sequence
  Description of Artificial Sequence: Synthetic oligonucleotide
  Antisense strand to SEQ ID NO: 2230132
uguaaucaacuaaugacaa

SEQ ID NO: 2230134 - RNA, 19 nt, Artificial Sequence
  Description of Artificial Sequence: Synthetic oligonucleotide
  Sense strand starting at position 3228 of SEQ ID NO: 1883970
gucauuaguugauuacaua

SEQ ID NO: 2230135 - RNA, 19 nt, Artificial Sequence
  Description of Artificial Sequence: Synthetic oligonucleotide
  Antisense strand to SEQ ID NO: 2230134
uauguaaucaacuaaugac

SEQ ID NO: 2230136 - RNA, 19 nt, Artificial Sequence
  Description of Artificial Sequence: Synthetic oligonucleotide
  Sense strand starting at position 3565 of SEQ ID NO: 1883970
aguugugugccugagugaa

SEQ ID NO: 2230137 - RNA, 19 nt, Artificial Sequence
  Description of Artificial Sequence: Synthetic oligonucleotide
  Antisense strand to SEQ ID NO: 2230136
uucacucaggcacacaacu

SEQ ID NO: 2230138 - RNA, 19 nt, Artificial Sequence
  Description of Artificial Sequence: Synthetic oligonucleotide
  Sense strand starting at position 3776 of SEQ ID NO: 1883970
auuuacuuaugugugucaa

SEQ ID NO: 2230139 - RNA, 19 nt, Artificial Sequence
  Description of Artificial Sequence: Synthetic oligonucleotide
  Antisense strand to SEQ ID NO: 2230138
uugacacacauaaguaaau

SEQ ID NO: 2230140 - RNA, 19 nt, Artificial Sequence
  Description of Artificial Sequence: Synthetic oligonucleotide
  Sense strand starting at position 3818 of SEQ ID NO: 1883970
uccuuuguucuggagauau

SEQ ID NO: 2230141 - RNA, 19 nt, Artificial Sequence
  Description of Artificial Sequence: Synthetic oligonucleotide
  Antisense strand to SEQ ID NO: 2230140
auaucuccagaacaaagga

SEQ ID NO: 2230142 - RNA, 19 nt, Artificial Sequence
  Description of Artificial Sequence: Synthetic oligonucleotide
  Sense strand starting at position 3820 of SEQ ID NO: 1883970
cuuuguucuggagauauca

SEQ ID NO: 2230143 - RNA, 19 nt, Artificial Sequence
  Description of Artificial Sequence: Synthetic oligonucleotide
  Antisense strand to SEQ ID NO: 2230142
ugauaucuccagaacaaag

SEQ ID NO: 2230144 - RNA, 19 nt, Artificial Sequence
  Description of Artificial Sequence: Synthetic oligonucleotide
  Sense strand starting at position 3833 of SEQ ID NO: 1883970
auaucauucugggaauaaa

SEQ ID NO: 2230145 - RNA, 19 nt, Artificial Sequence
  Description of Artificial Sequence: Synthetic oligonucleotide
  Antisense strand to SEQ ID NO: 2230144
uuuauucccagaaugauau

SEQ ID NO: 2230146 - RNA, 19 nt, Artificial Sequence
  Description of Artificial Sequence: Synthetic oligonucleotide
  Sense strand starting at position 3877 of SEQ ID NO: 1883970
gugugugggauggaaagua

SEQ ID NO: 2230147 - RNA, 19 nt, Artificial Sequence
  Description of Artificial Sequence: Synthetic oligonucleotide
  Antisense strand to SEQ ID NO: 2230146
uacuuuccaucccacacac

SEQ ID NO: 2230148 - RNA, 19 nt, Artificial Sequence
  Description of Artificial Sequence: Synthetic oligonucleotide
  Sense strand starting at position 3885 of SEQ ID NO: 1883970
gauggaaaguaucagacaa

SEQ ID NO: 2230149 - RNA, 19 nt, Artificial Sequence
  Description of Artificial Sequence: Synthetic oligonucleotide
  Antisense strand to SEQ ID NO: 2230148
uugucugauacuuuccauc

SEQ ID NO: 2230150 - RNA, 19 nt, Artificial Sequence
  Description of Artificial Sequence: Synthetic oligonucleotide
  Sense strand starting at position 151 of SEQ ID NO: 1883971
gugucaacuugaccuccaa

SEQ ID NO: 2230151 - RNA, 19 nt, Artificial Sequence
  Description of Artificial Sequence: Synthetic oligonucleotide
  Antisense strand to SEQ ID NO: 2230150
uuggaggucaaguugacac

SEQ ID NO: 2230152 - RNA, 19 nt, Artificial Sequence
  Description of Artificial Sequence: Synthetic oligonucleotide
  Sense strand starting at position 505 of SEQ ID NO: 1883971
accaccuauugguaucaua

SEQ ID NO: 2230153 - RNA, 19 nt, Artificial Sequence
  Description of Artificial Sequence: Synthetic oligonucleotide
  Antisense strand to SEQ ID NO: 2230152
uaugauaccaauagguggu

SEQ ID NO: 2230154 - RNA, 19 nt, Artificial Sequence
  Description of Artificial Sequence: Synthetic oligonucleotide
  Sense strand starting at position 779 of SEQ ID NO: 1883971
cuggcugauagcgaugaaa

SEQ ID NO: 2230155 - RNA, 19 nt, Artificial Sequence
  Description of Artificial Sequence: Synthetic oligonucleotide
  Antisense strand to SEQ ID NO: 2230154
uuucaucgcuaucagccag

SEQ ID NO: 2230156 - RNA, 19 nt, Artificial Sequence
  Description of Artificial Sequence: Synthetic oligonucleotide
  Sense strand starting at position 1113 of SEQ ID NO: 1883971
uggcuuaguuaauaugcau

SEQ ID NO: 2230157 - RNA, 19 nt, Artificial Sequence
  Description of Artificial Sequence: Synthetic oligonucleotide
  Antisense strand to SEQ ID NO: 2230156
augcauauuaacuaagcca

SEQ ID NO: 2230158 - RNA, 19 nt, Artificial Sequence
  Description of Artificial Sequence: Synthetic oligonucleotide
  Sense strand starting at position 1119 of SEQ ID NO: 1883971
aguuaauaugcaugugguu

SEQ ID NO: 2230159 - RNA, 19 nt, Artificial Sequence
  Description of Artificial Sequence: Synthetic oligonucleotide
  Antisense strand to SEQ ID NO: 2230158
aaccacaugcauauuaacu

SEQ ID NO: 2230160 - RNA, 19 nt, Artificial Sequence
  Description of Artificial Sequence: Synthetic oligonucleotide
  Sense strand starting at position 1124 of SEQ ID NO: 1883971
auaugcaugugguuaaaua

SEQ ID NO: 2230161 - RNA, 19 nt, Artificial Sequence
  Description of Artificial Sequence: Synthetic oligonucleotide
  Antisense strand to SEQ ID NO: 2230160
uauuuaaccacaugcauau

SEQ ID NO: 2230162 - RNA, 19 nt, Artificial Sequence
  Description of Artificial Sequence: Synthetic oligonucleotide
  Sense strand starting at position 1125 of SEQ ID NO: 1883971
uaugcaugugguuaaauaa

SEQ ID NO: 2230163 - RNA, 19 nt, Artificial Sequence
  Description of Artificial Sequence: Synthetic oligonucleotide
  Antisense strand to SEQ ID NO: 2230162
uuauuuaaccacaugcaua

SEQ ID NO: 2230164 - RNA, 19 nt, Artificial Sequence
  Description of Artificial Sequence: Synthetic oligonucleotide
  Sense strand starting at position 1476 of SEQ ID NO: 1883971
uguccaaauuuguaggcaa

SEQ ID NO: 2230165 - RNA, 19 nt, Artificial Sequence
  Description of Artificial Sequence: Synthetic oligonucleotide
  Antisense strand to SEQ ID NO: 2230164
uugccuacaaauuuggaca

SEQ ID NO: 2230166 - RNA, 19 nt, Artificial Sequence
  Description of Artificial Sequence: Synthetic oligonucleotide
  Sense strand starting at position 2408 of SEQ ID NO: 1883971
uugggcgauuauuaucuaa

SEQ ID NO: 2230167 - RNA, 19 nt, Artificial Sequence
  Description of Artificial Sequence: Synthetic oligonucleotide
  Antisense strand to SEQ ID NO: 2230166
uuagauaauaaucgcccaa

SEQ ID NO: 2230168 - RNA, 19 nt, Artificial Sequence
  Description of Artificial Sequence: Synthetic oligonucleotide
  Sense strand starting at position 2410 of SEQ ID NO: 1883971
gggcgauuauuaucuaauu

SEQ ID NO: 2230169 - RNA, 19 nt, Artificial Sequence
  Description of Artificial Sequence: Synthetic oligonucleotide
  Antisense strand to SEQ ID NO: 2230168
aauuagauaauaaucgccc

SEQ ID NO: 2230170 - RNA, 19 nt, Artificial Sequence
  Description of Artificial Sequence: Synthetic oligonucleotide
  Sense strand starting at position 2630 of SEQ ID NO: 1883971
cgccgaaguacugagaaug

SEQ ID NO: 2230171 - RNA, 19 nt, Artificial Sequence
  Description of Artificial Sequence: Synthetic oligonucleotide
  Antisense strand to SEQ ID NO: 2230170
cauucucaguacuucggcg

SEQ ID NO: 2230172 - RNA, 19 nt, Artificial Sequence
  Description of Artificial Sequence: Synthetic oligonucleotide
  Sense strand starting at position 2937 of SEQ ID NO: 1883971
uagggaaucugagaccagu

SEQ ID NO: 2230173 - RNA, 19 nt, Artificial Sequence
  Description of Artificial Sequence: Synthetic oligonucleotide
  Antisense strand to SEQ ID NO: 2230172
acuggucucagauucccua

SEQ ID NO: 2230174 - RNA, 19 nt, Artificial Sequence
  Description of Artificial Sequence: Synthetic oligonucleotide
  Sense strand starting at position 3284 of SEQ ID NO: 1883971
uuauauaccuucuaagcga

SEQ ID NO: 2230175 - RNA, 19 nt, Artificial Sequence
  Description of Artificial Sequence: Synthetic oligonucleotide
  Antisense strand to SEQ ID NO: 2230174
ucgcuuagaagguauauaa

SEQ ID NO: 2230176 - RNA, 19 nt, Artificial Sequence
  Description of Artificial Sequence: Synthetic oligonucleotide
  Sense strand starting at position 3297 of SEQ ID NO: 1883971
aagcgaacugucuacgugu

SEQ ID NO: 2230177 - RNA, 19 nt, Artificial Sequence
  Description of Artificial Sequence: Synthetic oligonucleotide
  Antisense strand to SEQ ID NO: 2230176
acacguagacaguucgcuu

SEQ ID NO: 2230178 - RNA, 19 nt, Artificial Sequence
  Description of Artificial Sequence: Synthetic oligonucleotide
  Sense strand starting at position 3299 of SEQ ID NO: 1883971
gcgaacugucuacguguaa

SEQ ID NO: 2230179 - RNA, 19 nt, Artificial Sequence
  Description of Artificial Sequence: Synthetic oligonucleotide
  Antisense strand to SEQ ID NO: 2230178
uuacacguagacaguucgc

SEQ ID NO: 2230180 - RNA, 19 nt, Artificial Sequence
  Description of Artificial Sequence: Synthetic oligonucleotide
  Sense strand starting at position 3300 of SEQ ID NO: 1883971
cgaacugucuacguguaag

SEQ ID NO: 2230181 - RNA, 19 nt, Artificial Sequence
  Description of Artificial Sequence: Synthetic oligonucleotide
  Antisense strand to SEQ ID NO: 2230180
cuuacacguagacaguucg

SEQ ID NO: 2230182 - RNA, 19 nt, Artificial Sequence
  Description of Artificial Sequence: Synthetic oligonucleotide
  Sense strand starting at position 3441 of SEQ ID NO: 1883971
gggugauuauccuuguauu

SEQ ID NO: 2230183 - RNA, 19 nt, Artificial Sequence
  Description of Artificial Sequence: Synthetic oligonucleotide
  Antisense strand to SEQ ID NO: 2230182
aauacaaggauaaucaccc

SEQ ID NO: 2230184 - RNA, 19 nt, Artificial Sequence
  Description of Artificial Sequence: Synthetic oligonucleotide
  Sense strand starting at position 3442 of SEQ ID NO: 1883971
ggugauuauccuuguauuc

SEQ ID NO: 2230185 - RNA, 19 nt, Artificial Sequence
  Description of Artificial Sequence: Synthetic oligonucleotide
  Antisense strand to SEQ ID NO: 2230184
gaauacaaggauaaucacc

SEQ ID NO: 2230186 - RNA, 19 nt, Artificial Sequence
  Description of Artificial Sequence: Synthetic oligonucleotide
  Sense strand starting at position 3444 of SEQ ID NO: 1883971
ugauuauccuuguauucuc

SEQ ID NO: 2230187 - RNA, 19 nt, Artificial Sequence
  Description of Artificial Sequence: Synthetic oligonucleotide
  Antisense strand to SEQ ID NO: 2230186
gagaauacaaggauaauca

SEQ ID NO: 2230188 - RNA, 19 nt, Artificial Sequence
  Description of Artificial Sequence: Synthetic oligonucleotide
  Sense strand starting at position 272 of SEQ ID NO: 1883972
cgaaauacauagucucauu

SEQ ID NO: 2230189 - RNA, 19 nt, Artificial Sequence
  Description of Artificial Sequence: Synthetic oligonucleotide
  Antisense strand to SEQ ID NO: 2230188
aaugagacuauguauuucg

SEQ ID NO: 2230190 - RNA, 19 nt, Artificial Sequence
  Description of Artificial Sequence: Synthetic oligonucleotide
  Sense strand starting at position 306 of SEQ ID NO: 1883972
ugugcauuugugcaccagu

SEQ ID NO: 2230191 - RNA, 19 nt, Artificial Sequence
  Description of Artificial Sequence: Synthetic oligonucleotide
  Antisense strand to SEQ ID NO: 2230190
acuggugcacaaaugcaca

SEQ ID NO: 2230192 - RNA, 19 nt, Artificial Sequence
  Description of Artificial Sequence: Synthetic oligonucleotide
  Sense strand starting at position 309 of SEQ ID NO: 1883972
gcauuugugcaccaguguu

SEQ ID NO: 2230193 - RNA, 19 nt, Artificial Sequence
  Description of Artificial Sequence: Synthetic oligonucleotide
  Antisense strand to SEQ ID NO: 2230192
aacacuggugcacaaaugc

SEQ ID NO: 2230194 - RNA, 19 nt, Artificial Sequence
  Description of Artificial Sequence: Synthetic oligonucleotide
  Sense strand starting at position 325 of SEQ ID NO: 1883972
guuacuuugccaucugugu

SEQ ID NO: 2230195 - RNA, 19 nt, Artificial Sequence
  Description of Artificial Sequence: Synthetic oligonucleotide
  Antisense strand to SEQ ID NO: 2230194
acacagauggcaaaguaac

SEQ ID NO: 2230196 - RNA, 19 nt, Artificial Sequence
  Description of Artificial Sequence: Synthetic oligonucleotide
  Sense strand starting at position 333 of SEQ ID NO: 1883972
gccaucuguguggaaagaa

SEQ ID NO: 2230197 - RNA, 19 nt, Artificial Sequence
  Description of Artificial Sequence: Synthetic oligonucleotide
  Antisense strand to SEQ ID NO: 2230196
uucuuuccacacagauggc

SEQ ID NO: 2230198 - RNA, 19 nt, Artificial Sequence
  Description of Artificial Sequence: Synthetic oligonucleotide
  Sense strand starting at position 434 of SEQ ID NO: 1883972
gaagaacugccucauguuu

SEQ ID NO: 2230199 - RNA, 19 nt, Artificial Sequence
  Description of Artificial Sequence: Synthetic oligonucleotide
  Antisense strand to SEQ ID NO: 2230198
aaacaugaggcaguucuuc

SEQ ID NO: 2230200 - RNA, 19 nt, Artificial Sequence
  Description of Artificial Sequence: Synthetic oligonucleotide
  Sense strand starting at position 463 of SEQ ID NO: 1883972
cugcaaagucaacaauuga

SEQ ID NO: 2230201 - RNA, 19 nt, Artificial Sequence
  Description of Artificial Sequence: Synthetic oligonucleotide
  Antisense strand to SEQ ID NO: 2230200
ucaauuguugacuuugcag

SEQ ID NO: 2230202 - RNA, 19 nt, Artificial Sequence
  Description of Artificial Sequence: Synthetic oligonucleotide
  Sense strand starting at position 522 of SEQ ID NO: 1883972
cuauuauuacguuaccuuu

SEQ ID NO: 2230203 - RNA, 19 nt, Artificial Sequence
  Description of Artificial Sequence: Synthetic oligonucleotide
  Antisense strand to SEQ ID NO: 2230202
aaagguaacguaauaauag

SEQ ID NO: 2230204 - RNA, 19 nt, Artificial Sequence
  Description of Artificial Sequence: Synthetic oligonucleotide
  Sense strand starting at position 957 of SEQ ID NO: 1883972
ggcaacggaguucaugauu

SEQ ID NO: 2230205 - RNA, 19 nt, Artificial Sequence
  Description of Artificial Sequence: Synthetic oligonucleotide
  Antisense strand to SEQ ID NO: 2230204
aaucaugaacuccguugcc

SEQ ID NO: 2230206 - RNA, 19 nt, Artificial Sequence
  Description of Artificial Sequence: Synthetic oligonucleotide
  Sense strand starting at position 963 of SEQ ID NO: 1883972
ggaguucaugauuaucguu

SEQ ID NO: 2230207 - RNA, 19 nt, Artificial Sequence
  Description of Artificial Sequence: Synthetic oligonucleotide
  Antisense strand to SEQ ID NO: 2230206
aacgauaaucaugaacucc

SEQ ID NO: 2230208 - RNA, 19 nt, Artificial Sequence
  Description of Artificial Sequence: Synthetic oligonucleotide
  Sense strand starting at position 1509 of SEQ ID NO: 1883972
gacgacuuuccggaggaau

SEQ ID NO: 2230209 - RNA, 19 nt, Artificial Sequence
  Description of Artificial Sequence: Synthetic oligonucleotide
  Antisense strand to SEQ ID NO: 2230208
auuccuccggaaagucguc

SEQ ID NO: 2230210 - RNA, 19 nt, Artificial Sequence
  Description of Artificial Sequence: Synthetic oligonucleotide
  Sense strand starting at position 1566 of SEQ ID NO: 1883972
cggaguguccucgcggcaa

SEQ ID NO: 2230211 - RNA, 19 nt, Artificial Sequence
  Description of Artificial Sequence: Synthetic oligonucleotide
  Antisense strand to SEQ ID NO: 2230210
uugccgcgaggacacuccg

SEQ ID NO: 2230212 - RNA, 19 nt, Artificial Sequence
  Description of Artificial Sequence: Synthetic oligonucleotide
  Sense strand starting at position 2094 of SEQ ID NO: 1883972
gucauuuguccuggcaacu

SEQ ID NO: 2230213 - RNA, 19 nt, Artificial Sequence
  Description of Artificial Sequence: Synthetic oligonucleotide
  Antisense strand to SEQ ID NO: 2230212
aguugccaggacaaaugac

SEQ ID NO: 2230214 - RNA, 19 nt, Artificial Sequence
  Description of Artificial Sequence: Synthetic oligonucleotide
  Sense strand starting at position 2114 of SEQ ID NO: 1883972
cuggcagauucuuuccaac

SEQ ID NO: 2230215 - RNA, 19 nt, Artificial Sequence
  Description of Artificial Sequence: Synthetic oligonucleotide
  Antisense strand to SEQ ID NO: 2230214
guuggaaagaaucugccag

SEQ ID NO: 2230216 - RNA, 19 nt, Artificial Sequence
  Description of Artificial Sequence: Synthetic oligonucleotide
  Sense strand starting at position 2116 of SEQ ID NO: 1883972
ggcagauucuuuccaaccu

SEQ ID NO: 2230217 - RNA, 19 nt, Artificial Sequence
  Description of Artificial Sequence: Synthetic oligonucleotide
  Antisense strand to SEQ ID NO: 2230216
agguuggaaagaaucugcc

SEQ ID NO: 2230218 - RNA, 19 nt, Artificial Sequence
  Description of Artificial Sequence: Synthetic oligonucleotide
  Sense strand starting at position 2405 of SEQ ID NO: 1883972
uggcccuggcuauaaauaa

SEQ ID NO: 2230219 - RNA, 19 nt, Artificial Sequence
  Description of Artificial Sequence: Synthetic oligonucleotide
  Antisense strand to SEQ ID NO: 2230218
uuauuuauagccagggcca

SEQ ID NO: 2230220 - RNA, 19 nt, Artificial Sequence
  Description of Artificial Sequence: Synthetic oligonucleotide
  Sense strand starting at position 2569 of SEQ ID NO: 1883972
guggguuuguauuuggauu

SEQ ID NO: 2230221 - RNA, 19 nt, Artificial Sequence
  Description of Artificial Sequence: Synthetic oligonucleotide
  Antisense strand to SEQ ID NO: 2230220
aauccaaauacaaacccac

SEQ ID NO: 2230222 - RNA, 19 nt, Artificial Sequence
  Description of Artificial Sequence: Synthetic oligonucleotide
  Sense strand starting at position 2582 of SEQ ID NO: 1883972
uggauuagaguuugugcaa

SEQ ID NO: 2230223 - RNA, 19 nt, Artificial Sequence
  Description of Artificial Sequence: Synthetic oligonucleotide
  Antisense strand to SEQ ID NO: 2230222
uugcacaaacucuaaucca

SEQ ID NO: 2230224 - RNA, 19 nt, Artificial Sequence
  Description of Artificial Sequence: Synthetic oligonucleotide
  Sense strand starting at position 2583 of SEQ ID NO: 1883972
ggauuagaguuugugcaaa

SEQ ID NO: 2230225 - RNA, 19 nt, Artificial Sequence
  Description of Artificial Sequence: Synthetic oligonucleotide
  Antisense strand to SEQ ID NO: 2230224
uuugcacaaacucuaaucc

SEQ ID NO: 2230226 - RNA, 19 nt, Artificial Sequence
  Description of Artificial Sequence: Synthetic oligonucleotide
  Sense strand starting at position 2585 of SEQ ID NO: 1883972
auuagaguuugugcaaaga

SEQ ID NO: 2230227 - RNA, 19 nt, Artificial Sequence
  Description of Artificial Sequence: Synthetic oligonucleotide
  Antisense strand to SEQ ID NO: 2230226
ucuuugcacaaacucuaau

SEQ ID NO: 2230228 - RNA, 19 nt, Artificial Sequence
  Description of Artificial Sequence: Synthetic oligonucleotide
  Sense strand starting at position 2645 of SEQ ID NO: 1883972
gcuuccaaccagcaagauu

SEQ ID NO: 2230229 - RNA, 19 nt, Artificial Sequence
  Description of Artificial Sequence: Synthetic oligonucleotide
  Antisense strand to SEQ ID NO: 2230228
aaucuugcugguuggaagc

SEQ ID NO: 2230230 - RNA, 19 nt, Artificial Sequence
  Description of Artificial Sequence: Synthetic oligonucleotide
  Sense strand starting at position 2738 of SEQ ID NO: 1883972
cauugaguugaguagcuua

SEQ ID NO: 2230231 - RNA, 19 nt, Artificial Sequence
  Description of Artificial Sequence: Synthetic oligonucleotide
  Antisense strand to SEQ ID NO: 2230230
uaagcuacucaacucaaug

SEQ ID NO: 2230232 - RNA, 19 nt, Artificial Sequence
  Description of Artificial Sequence: Synthetic oligonucleotide
  Sense strand starting at position 2741 of SEQ ID NO: 1883972
ugaguugaguagcuuaaau

SEQ ID NO: 2230233 - RNA, 19 nt, Artificial Sequence
  Description of Artificial Sequence: Synthetic oligonucleotide
  Antisense strand to SEQ ID NO: 2230232
auuuaagcuacucaacuca

SEQ ID NO: 2230234 - RNA, 19 nt, Artificial Sequence
  Description of Artificial Sequence: Synthetic oligonucleotide
  Sense strand starting at position 2743 of SEQ ID NO: 1883972
aguugaguagcuuaaauca

SEQ ID NO: 2230235 - RNA, 19 nt, Artificial Sequence
  Description of Artificial Sequence: Synthetic oligonucleotide
  Antisense strand to SEQ ID NO: 2230234
ugauuuaagcuacucaacu

SEQ ID NO: 2230236 - RNA, 19 nt, Artificial Sequence
  Description of Artificial Sequence: Synthetic oligonucleotide
  Sense strand starting at position 2783 of SEQ ID NO: 1883972
uaggacucuguaggugaaa

SEQ ID NO: 2230237 - RNA, 19 nt, Artificial Sequence
  Description of Artificial Sequence: Synthetic oligonucleotide
  Antisense strand to SEQ ID NO: 2230236
uuucaccuacagaguccua

SEQ ID NO: 2230238 - RNA, 19 nt, Artificial Sequence
  Description of Artificial Sequence: Synthetic oligonucleotide
  Sense strand starting at position 2888 of SEQ ID NO: 1883972
ugaacucgcagucagaaua

SEQ ID NO: 2230239 - RNA, 19 nt, Artificial Sequence
  Description of Artificial Sequence: Synthetic oligonucleotide
  Antisense strand to SEQ ID NO: 2230238
uauucugacugcgaguuca

SEQ ID NO: 2230240 - RNA, 19 nt, Artificial Sequence
  Description of Artificial Sequence: Synthetic oligonucleotide
  Sense strand starting at position 3003 of SEQ ID NO: 1883972
aagguaaguggcuaugcua

SEQ ID NO: 2230241 - RNA, 19 nt, Artificial Sequence
  Description of Artificial Sequence: Synthetic oligonucleotide
  Antisense strand to SEQ ID NO: 2230240
uagcauagccacuuaccuu

SEQ ID NO: 2230242 - RNA, 19 nt, Artificial Sequence
  Description of Artificial Sequence: Synthetic oligonucleotide
  Sense strand starting at position 3152 of SEQ ID NO: 1883972
gagugaauggauggguaua

SEQ ID NO: 2230243 - RNA, 19 nt, Artificial Sequence
  Description of Artificial Sequence: Synthetic oligonucleotide
  Antisense strand to SEQ ID NO: 2230242
uauacccauccauucacuc

SEQ ID NO: 2230244 - RNA, 19 nt, Artificial Sequence
  Description of Artificial Sequence: Synthetic oligonucleotide
  Sense strand starting at position 3543 of SEQ ID NO: 1883972
cuaugagcucugcaauaau

SEQ ID NO: 2230245 - RNA, 19 nt, Artificial Sequence
  Description of Artificial Sequence: Synthetic oligonucleotide
  Antisense strand to SEQ ID NO: 2230244
auuauugcagagcucauag

SEQ ID NO: 2230246 - RNA, 19 nt, Artificial Sequence
  Description of Artificial Sequence: Synthetic oligonucleotide
  Sense strand starting at position 3546 of SEQ ID NO: 1883972
ugagcucugcaauaauuaa

SEQ ID NO: 2230247 - RNA, 19 nt, Artificial Sequence
  Description of Artificial Sequence: Synthetic oligonucleotide
  Antisense strand to SEQ ID NO: 2230246
uuaauuauugcagagcuca

SEQ ID NO: 2230248 - RNA, 19 nt, Artificial Sequence
  Description of Artificial Sequence: Synthetic oligonucleotide
  Sense strand starting at position 3592 of SEQ ID NO: 1883972
acauguuauuacucgauau

SEQ ID NO: 2230249 - RNA, 19 nt, Artificial Sequence
  Description of Artificial Sequence: Synthetic oligonucleotide
  Antisense strand to SEQ ID NO: 2230248
auaucgaguaauaacaugu

SEQ ID NO: 2230250 - RNA, 19 nt, Artificial Sequence
  Description of Artificial Sequence: Synthetic oligonucleotide
  Sense strand starting at position 3596 of SEQ ID NO: 1883972
guuauuacucgauauaaag

SEQ ID NO: 2230251 - RNA, 19 nt, Artificial Sequence
  Description of Artificial Sequence: Synthetic oligonucleotide
  Antisense strand to SEQ ID NO: 2230250
cuuuauaucgaguaauaac

SEQ ID NO: 2230252 - RNA, 19 nt, Artificial Sequence
  Description of Artificial Sequence: Synthetic oligonucleotide
  Sense strand starting at position 3614 of SEQ ID NO: 1883972
gauauuuguuuagcuaagu

SEQ ID NO: 2230253 - RNA, 19 nt, Artificial Sequence
  Description of Artificial Sequence: Synthetic oligonucleotide
  Antisense strand to SEQ ID NO: 2230252
acuuagcuaaacaaauauc

SEQ ID NO: 2230254 - RNA, 19 nt, Artificial Sequence
  Description of Artificial Sequence: Synthetic oligonucleotide
  Sense strand starting at position 3655 of SEQ ID NO: 1883972
cuauaauuguguccuauac

SEQ ID NO: 2230255 - RNA, 19 nt, Artificial Sequence
  Description of Artificial Sequence: Synthetic oligonucleotide
  Antisense strand to SEQ ID NO: 2230254
guauaggacacaauuauag

SEQ ID NO: 2230256 - RNA, 19 nt, Artificial Sequence
  Description of Artificial Sequence: Synthetic oligonucleotide
  Sense strand starting at position 3751 of SEQ ID NO: 1883972
agagacagcaucuggauua

SEQ ID NO: 2230257 - RNA, 19 nt, Artificial Sequence
  Description of Artificial Sequence: Synthetic oligonucleotide
  Antisense strand to SEQ ID NO: 2230256
uaauccagaugcugucucu

SEQ ID NO: 2230258 - RNA, 19 nt, Artificial Sequence
  Description of Artificial Sequence: Synthetic oligonucleotide
  Sense strand starting at position 3822 of SEQ ID NO: 1883972
auuauugcaugucugacua

SEQ ID NO: 2230259 - RNA, 19 nt, Artificial Sequence
  Description of Artificial Sequence: Synthetic oligonucleotide
  Antisense strand to SEQ ID NO: 2230258
uagucagacaugcaauaau

SEQ ID NO: 2230260 - RNA, 19 nt, Artificial Sequence
  Description of Artificial Sequence: Synthetic oligonucleotide
  Sense strand starting at position 3866 of SEQ ID NO: 1883972
gguaaagaagcuuguguaa

SEQ ID NO: 2230261 - RNA, 19 nt, Artificial Sequence
  Description of Artificial Sequence: Synthetic oligonucleotide
  Antisense strand to SEQ ID NO: 2230260
uuacacaagcuucuuuacc

SEQ ID NO: 2230262 - RNA, 19 nt, Artificial Sequence
  Description of Artificial Sequence: Synthetic oligonucleotide
  Sense strand starting at position 3878 of SEQ ID NO: 1883972
uguguaaucgcagaggaag

SEQ ID NO: 2230263 - RNA, 19 nt, Artificial Sequence
  Description of Artificial Sequence: Synthetic oligonucleotide
  Antisense strand to SEQ ID NO: 2230262
cuuccucugcgauuacaca

SEQ ID NO: 2230264 - RNA, 19 nt, Artificial Sequence
  Description of Artificial Sequence: Synthetic oligonucleotide
  Sense strand starting at position 3942 of SEQ ID NO: 1883972
ucuauuacugcuuaugagu

SEQ ID NO: 2230265 - RNA, 19 nt, Artificial Sequence
  Description of Artificial Sequence: Synthetic oligonucleotide
  Antisense strand to SEQ ID NO: 2230264
acucauaagcaguaauaga

SEQ ID NO: 2230266 - RNA, 19 nt, Artificial Sequence
  Description of Artificial Sequence: Synthetic oligonucleotide
  Sense strand starting at position 3948 of SEQ ID NO: 1883972
acugcuuaugagugauccu

SEQ ID NO: 2230267 - RNA, 19 nt, Artificial Sequence
  Description of Artificial Sequence: Synthetic oligonucleotide
  Antisense strand to SEQ ID NO: 2230266
aggaucacucauaagcagu

SEQ ID NO: 2230268 - RNA, 19 nt, Artificial Sequence
  Description of Artificial Sequence: Synthetic oligonucleotide
  Sense strand starting at position 24 of SEQ ID NO: 1883973
ggaauugccaucugaacga

SEQ ID NO: 2230269 - RNA, 19 nt, Artificial Sequence
  Description of Artificial Sequence: Synthetic oligonucleotide
  Antisense strand to SEQ ID NO: 2230268
ucguucagauggcaauucc

SEQ ID NO: 2230270 - RNA, 19 nt, Artificial Sequence
  Description of Artificial Sequence: Synthetic oligonucleotide
  Sense strand starting at position 311 of SEQ ID NO: 1883973
agaauucuaccagguuguu

SEQ ID NO: 2230271 - RNA, 19 nt, Artificial Sequence
  Description of Artificial Sequence: Synthetic oligonucleotide
  Antisense strand to SEQ ID NO: 2230270
aacaaccugguagaauucu

SEQ ID NO: 2230272 - RNA, 19 nt, Artificial Sequence
  Description of Artificial Sequence: Synthetic oligonucleotide
  Sense strand starting at position 331 of SEQ ID NO: 1883973
uagcgagaacccugaccuu

SEQ ID NO: 2230273 - RNA, 19 nt, Artificial Sequence
  Description of Artificial Sequence: Synthetic oligonucleotide
  Antisense strand to SEQ ID NO: 2230272
aaggucaggguucucgcua

SEQ ID NO: 2230274 - RNA, 19 nt, Artificial Sequence
  Description of Artificial Sequence: Synthetic oligonucleotide
  Sense strand starting at position 347 of SEQ ID NO: 1883973
cuuggcaucugauuaaauu

SEQ ID NO: 2230275 - RNA, 19 nt, Artificial Sequence
  Description of Artificial Sequence: Synthetic oligonucleotide
  Antisense strand to SEQ ID NO: 2230274
aauuuaaucagaugccaag

SEQ ID NO: 2230276 - RNA, 19 nt, Artificial Sequence
  Description of Artificial Sequence: Synthetic oligonucleotide
  Sense strand starting at position 348 of SEQ ID NO: 1883973
uuggcaucugauuaaauuc

SEQ ID NO: 2230277 - RNA, 19 nt, Artificial Sequence
  Description of Artificial Sequence: Synthetic oligonucleotide
  Antisense strand to SEQ ID NO: 2230276
gaauuuaaucagaugccaa

SEQ ID NO: 2230278 - RNA, 19 nt, Artificial Sequence
  Description of Artificial Sequence: Synthetic oligonucleotide
  Sense strand starting at position 559 of SEQ ID NO: 1883973
uugaaaugguucucaguaa

SEQ ID NO: 2230279 - RNA, 19 nt, Artificial Sequence
  Description of Artificial Sequence: Synthetic oligonucleotide
  Antisense strand to SEQ ID NO: 2230278
uuacugagaaccauuucaa

SEQ ID NO: 2230280 - RNA, 19 nt, Artificial Sequence
  Description of Artificial Sequence: Synthetic oligonucleotide
  Sense strand starting at position 563 of SEQ ID NO: 1883973
aaugguucucaguaaaguc

SEQ ID NO: 2230281 - RNA, 19 nt, Artificial Sequence
  Description of Artificial Sequence: Synthetic oligonucleotide
  Antisense strand to SEQ ID NO: 2230280
gacuuuacugagaaccauu

SEQ ID NO: 2230282 - RNA, 19 nt, Artificial Sequence
  Description of Artificial Sequence: Synthetic oligonucleotide
  Sense strand starting at position 721 of SEQ ID NO: 1883973
guuugauaccaccauguca

SEQ ID NO: 2230283 - RNA, 19 nt, Artificial Sequence
  Description of Artificial Sequence: Synthetic oligonucleotide
  Antisense strand to SEQ ID NO: 2230282
ugacauggugguaucaaac

SEQ ID NO: 2230284 - RNA, 19 nt, Artificial Sequence
  Description of Artificial Sequence: Synthetic oligonucleotide
  Sense strand starting at position 732 of SEQ ID NO: 1883973
ccaugucaugcauaaugau

SEQ ID NO: 2230285 - RNA, 19 nt, Artificial Sequence
  Description of Artificial Sequence: Synthetic oligonucleotide
  Antisense strand to SEQ ID NO: 2230284
aucauuaugcaugacaugg

SEQ ID NO: 2230286 - RNA, 19 nt, Artificial Sequence
  Description of Artificial Sequence: Synthetic oligonucleotide
  Sense strand starting at position 825 of SEQ ID NO: 1883973
cuguucuagccacauugaa

SEQ ID NO: 2230287 - RNA, 19 nt, Artificial Sequence
  Description of Artificial Sequence: Synthetic oligonucleotide
  Antisense strand to SEQ ID NO: 2230286
uucaauguggcuagaacag

SEQ ID NO: 2230288 - RNA, 19 nt, Artificial Sequence
  Description of Artificial Sequence: Synthetic oligonucleotide
  Sense strand starting at position 909 of SEQ ID NO: 1883973
uucucuaucgcgguauguu

SEQ ID NO: 2230289 - RNA, 19 nt, Artificial Sequence
  Description of Artificial Sequence: Synthetic oligonucleotide
  Antisense strand to SEQ ID NO: 2230288
aacauaccgcgauagagaa

SEQ ID NO: 2230290 - RNA, 19 nt, Artificial Sequence
  Description of Artificial Sequence: Synthetic oligonucleotide
  Sense strand starting at position 981 of SEQ ID NO: 1883973
uggugucuagcauuguguu

SEQ ID NO: 2230291 - RNA, 19 nt, Artificial Sequence
  Description of Artificial Sequence: Synthetic oligonucleotide
  Antisense strand to SEQ ID NO: 2230290
aacacaaugcuagacacca

SEQ ID NO: 2230292 - RNA, 19 nt, Artificial Sequence
  Description of Artificial Sequence: Synthetic oligonucleotide
  Sense strand starting at position 1486 of SEQ ID NO: 1883973
guaucuaacccucauguuu

SEQ ID NO: 2230293 - RNA, 19 nt, Artificial Sequence
  Description of Artificial Sequence: Synthetic oligonucleotide
  Antisense strand to SEQ ID NO: 2230292
aaacaugaggguuagauac

SEQ ID NO: 2230294 - RNA, 19 nt, Artificial Sequence
  Description of Artificial Sequence: Synthetic oligonucleotide
  Sense strand starting at position 1526 of SEQ ID NO: 1883973
gacacagguugaucucaua

SEQ ID NO: 2230295 - RNA, 19 nt, Artificial Sequence
  Description of Artificial Sequence: Synthetic oligonucleotide
  Antisense strand to SEQ ID NO: 2230294
uaugagaucaaccuguguc

SEQ ID NO: 2230296 - RNA, 19 nt, Artificial Sequence
  Description of Artificial Sequence: Synthetic oligonucleotide
  Sense strand starting at position 1584 of SEQ ID NO: 1883973
ugcgauaucucucugauag

SEQ ID NO: 2230297 - RNA, 19 nt, Artificial Sequence
  Description of Artificial Sequence: Synthetic oligonucleotide
  Antisense strand to SEQ ID NO: 2230296
cuaucagagagauaucgca

SEQ ID NO: 2230298 - RNA, 19 nt, Artificial Sequence
  Description of Artificial Sequence: Synthetic oligonucleotide
  Sense strand starting at position 1585 of SEQ ID NO: 1883973
gcgauaucucucugauaga

SEQ ID NO: 2230299 - RNA, 19 nt, Artificial Sequence
  Description of Artificial Sequence: Synthetic oligonucleotide
  Antisense strand to SEQ ID NO: 2230298
ucuaucagagagauaucgc

SEQ ID NO: 2230300 - RNA, 19 nt, Artificial Sequence
  Description of Artificial Sequence: Synthetic oligonucleotide
  Sense strand starting at position 1596 of SEQ ID NO: 1883973
cugauagacugaucucuuu

SEQ ID NO: 2230301 - RNA, 19 nt, Artificial Sequence
  Description of Artificial Sequence: Synthetic oligonucleotide
  Antisense strand to SEQ ID NO: 2230300
aaagagaucagucuaucag

SEQ ID NO: 2230302 - RNA, 19 nt, Artificial Sequence
  Description of Artificial Sequence: Synthetic oligonucleotide
  Sense strand starting at position 1621 of SEQ ID NO: 1883973
ggauauuugcccugguagu

SEQ ID NO: 2230303 - RNA, 19 nt, Artificial Sequence
  Description of Artificial Sequence: Synthetic oligonucleotide
  Antisense strand to SEQ ID NO: 2230302
acuaccagggcaaauaucc

SEQ ID NO: 2230304 - RNA, 19 nt, Artificial Sequence
  Description of Artificial Sequence: Synthetic oligonucleotide
  Sense strand starting at position 1622 of SEQ ID NO: 1883973
gauauuugcccugguagug

SEQ ID NO: 2230305 - RNA, 19 nt, Artificial Sequence
  Description of Artificial Sequence: Synthetic oligonucleotide
  Antisense strand to SEQ ID NO: 2230304
cacuaccagggcaaauauc

SEQ ID NO: 2230306 - RNA, 19 nt, Artificial Sequence
  Description of Artificial Sequence: Synthetic oligonucleotide
  Sense strand starting at position 1650 of SEQ ID NO: 1883973
ggucaucugguagaucuau

SEQ ID NO: 2230307 - RNA, 19 nt, Artificial Sequence
  Description of Artificial Sequence: Synthetic oligonucleotide
  Antisense strand to SEQ ID NO: 2230306
auagaucuaccagaugacc

SEQ ID NO: 2230308 - RNA, 19 nt, Artificial Sequence
  Description of Artificial Sequence: Synthetic oligonucleotide
  Sense strand starting at position 1686 of SEQ ID NO: 1883973
uucuaauccgcugagauuc

SEQ ID NO: 2230309 - RNA, 19 nt, Artificial Sequence
  Description of Artificial Sequence: Synthetic oligonucleotide
  Antisense strand to SEQ ID NO: 2230308
gaaucucagcggauuagaa

SEQ ID NO: 2230310 - RNA, 19 nt, Artificial Sequence
  Description of Artificial Sequence: Synthetic oligonucleotide
  Sense strand starting at position 1999 of SEQ ID NO: 1883973
ugugacuugaccggaggaa

SEQ ID NO: 2230311 - RNA, 19 nt, Artificial Sequence
  Description of Artificial Sequence: Synthetic oligonucleotide
  Antisense strand to SEQ ID NO: 2230310
uuccuccggucaagucaca

SEQ ID NO: 2230312 - RNA, 19 nt, Artificial Sequence
  Description of Artificial Sequence: Synthetic oligonucleotide
  Sense strand starting at position 2011 of SEQ ID NO: 1883973
ggaggaaucugggacagga

SEQ ID NO: 2230313 - RNA, 19 nt, Artificial Sequence
  Description of Artificial Sequence: Synthetic oligonucleotide
  Antisense strand to SEQ ID NO: 2230312
uccugucccagauuccucc

SEQ ID NO: 2230314 - RNA, 19 nt, Artificial Sequence
  Description of Artificial Sequence: Synthetic oligonucleotide
  Sense strand starting at position 2104 of SEQ ID NO: 1883973
gcuaauuaugcugauagcu

SEQ ID NO: 2230315 - RNA, 19 nt, Artificial Sequence
  Description of Artificial Sequence: Synthetic oligonucleotide
  Antisense strand to SEQ ID NO: 2230314
agcuaucagcauaauuagc

SEQ ID NO: 2230316 - RNA, 19 nt, Artificial Sequence
  Description of Artificial Sequence: Synthetic oligonucleotide
  Sense strand starting at position 2163 of SEQ ID NO: 1883973
cuauaugaguuucuggguu

SEQ ID NO: 2230317 - RNA, 19 nt, Artificial Sequence
  Description of Artificial Sequence: Synthetic oligonucleotide
  Antisense strand to SEQ ID NO: 2230316
aacccagaaacucauauag

SEQ ID NO: 2230318 - RNA, 19 nt, Artificial Sequence
  Description of Artificial Sequence: Synthetic oligonucleotide
  Sense strand starting at position 2226 of SEQ ID NO: 1883973
agaggaauuuaucaaccua

SEQ ID NO: 2230319 - RNA, 19 nt, Artificial Sequence
  Description of Artificial Sequence: Synthetic oligonucleotide
  Antisense strand to SEQ ID NO: 2230318
uagguugauaaauuccucu

SEQ ID NO: 2230320 - RNA, 19 nt, Artificial Sequence
  Description of Artificial Sequence: Synthetic oligonucleotide
  Sense strand starting at position 2682 of SEQ ID NO: 1883973
cagcauuuacgucaauugu

SEQ ID NO: 2230321 - RNA, 19 nt, Artificial Sequence
  Description of Artificial Sequence: Synthetic oligonucleotide
  Antisense strand to SEQ ID NO: 2230320
acaauugacguaaaugcug

SEQ ID NO: 2230322 - RNA, 19 nt, Artificial Sequence
  Description of Artificial Sequence: Synthetic oligonucleotide
  Sense strand starting at position 2691 of SEQ ID NO: 1883973
cgucaauuguggucauuua

SEQ ID NO: 2230323 - RNA, 19 nt, Artificial Sequence
  Description of Artificial Sequence: Synthetic oligonucleotide
  Antisense strand to SEQ ID NO: 2230322
uaaaugaccacaauugacg

SEQ ID NO: 2230324 - RNA, 19 nt, Artificial Sequence
  Description of Artificial Sequence: Synthetic oligonucleotide
  Sense strand starting at position 2963 of SEQ ID NO: 1883973
gagggucaacuguaguaca

SEQ ID NO: 2230325 - RNA, 19 nt, Artificial Sequence
  Description of Artificial Sequence: Synthetic oligonucleotide
  Antisense strand to SEQ ID NO: 2230324
uguacuacaguugacccuc

SEQ ID NO: 2230326 - RNA, 19 nt, Artificial Sequence
  Description of Artificial Sequence: Synthetic oligonucleotide
  Sense strand starting at position 2974 of SEQ ID NO: 1883973
guaguacauagucaacagu

SEQ ID NO: 2230327 - RNA, 19 nt, Artificial Sequence
  Description of Artificial Sequence: Synthetic oligonucleotide
  Antisense strand to SEQ ID NO: 2230326
acuguugacuauguacuac

SEQ ID NO: 2230328 - RNA, 19 nt, Artificial Sequence
  Description of Artificial Sequence: Synthetic oligonucleotide
  Sense strand starting at position 2983 of SEQ ID NO: 1883973
agucaacaguuugcaaaua

SEQ ID NO: 2230329 - RNA, 19 nt, Artificial Sequence
  Description of Artificial Sequence: Synthetic oligonucleotide
  Antisense strand to SEQ ID NO: 2230328
uauuugcaaacuguugacu

SEQ ID NO: 2230330 - RNA, 19 nt, Artificial Sequence
  Description of Artificial Sequence: Synthetic oligonucleotide
  Sense strand starting at position 3169 of SEQ ID NO: 1883973
gagauuuacugaggagagu

SEQ ID NO: 2230331 - RNA, 19 nt, Artificial Sequence
  Description of Artificial Sequence: Synthetic oligonucleotide
  Antisense strand to SEQ ID NO: 2230330
acucuccucaguaaaucuc

SEQ ID NO: 2230332 - RNA, 19 nt, Artificial Sequence
  Description of Artificial Sequence: Synthetic oligonucleotide
  Sense strand starting at position 3203 of SEQ ID NO: 1883973
agcgcuauugcuguuacuu

SEQ ID NO: 2230333 - RNA, 19 nt, Artificial Sequence
  Description of Artificial Sequence: Synthetic oligonucleotide
  Antisense strand to SEQ ID NO: 2230332
aaguaacagcaauagcgcu

SEQ ID NO: 2230334 - RNA, 19 nt, Artificial Sequence
  Description of Artificial Sequence: Synthetic oligonucleotide
  Sense strand starting at position 3204 of SEQ ID NO: 1883973
gcgcuauugcuguuacuug

SEQ ID NO: 2230335 - RNA, 19 nt, Artificial Sequence
  Description of Artificial Sequence: Synthetic oligonucleotide
  Antisense strand to SEQ ID NO: 2230334
caaguaacagcaauagcgc

SEQ ID NO: 2230336 - RNA, 19 nt, Artificial Sequence
  Description of Artificial Sequence: Synthetic oligonucleotide
  Sense strand starting at position 3213 of SEQ ID NO: 1883973
cuguuacuuggguaaauua

SEQ ID NO: 2230337 - RNA, 19 nt, Artificial Sequence
  Description of Artificial Sequence: Synthetic oligonucleotide
  Antisense strand to SEQ ID NO: 2230336
uaauuuacccaaguaacag

SEQ ID NO: 2230338 - RNA, 19 nt, Artificial Sequence
  Description of Artificial Sequence: Synthetic oligonucleotide
  Sense strand starting at position 3258 of SEQ ID NO: 1883973
ggucaaagguauuccagca

SEQ ID NO: 2230339 - RNA, 19 nt, Artificial Sequence
  Description of Artificial Sequence: Synthetic oligonucleotide
  Antisense strand to SEQ ID NO: 2230338
ugcuggaauaccuuugacc

SEQ ID NO: 2230340 - RNA, 19 nt, Artificial Sequence
  Description of Artificial Sequence: Synthetic oligonucleotide
  Sense strand starting at position 3263 of SEQ ID NO: 1883973
aagguauuccagcagucuu

SEQ ID NO: 2230341 - RNA, 19 nt, Artificial Sequence
  Description of Artificial Sequence: Synthetic oligonucleotide
  Antisense strand to SEQ ID NO: 2230340
aagacugcuggaauaccuu

SEQ ID NO: 2230342 - RNA, 19 nt, Artificial Sequence
  Description of Artificial Sequence: Synthetic oligonucleotide
  Sense strand starting at position 3285 of SEQ ID NO: 1883973
gugaaaccaugcucacuga

SEQ ID NO: 2230343 - RNA, 19 nt, Artificial Sequence
  Description of Artificial Sequence: Synthetic oligonucleotide
  Antisense strand to SEQ ID NO: 2230342
ucagugagcaugguuucac

SEQ ID NO: 2230344 - RNA, 19 nt, Artificial Sequence
  Description of Artificial Sequence: Synthetic oligonucleotide
  Sense strand starting at position 3403 of SEQ ID NO: 1883973
gguccucuguggguacaaa

SEQ ID NO: 2230345 - RNA, 19 nt, Artificial Sequence
  Description of Artificial Sequence: Synthetic oligonucleotide
  Antisense strand to SEQ ID NO: 2230344
uuuguacccacagaggacc

SEQ ID NO: 2230346 - RNA, 19 nt, Artificial Sequence
  Description of Artificial Sequence: Synthetic oligonucleotide
  Sense strand starting at position 3582 of SEQ ID NO: 1883973
gcgagugcugcucugagag

SEQ ID NO: 2230347 - RNA, 19 nt, Artificial Sequence
  Description of Artificial Sequence: Synthetic oligonucleotide
  Antisense strand to SEQ ID NO: 2230346
cucucagagcagcacucgc

SEQ ID NO: 2230348 - RNA, 19 nt, Artificial Sequence
  Description of Artificial Sequence: Synthetic oligonucleotide
  Sense strand starting at position 242 of SEQ ID NO: 1883974
gaaauuuacuucggagaua

SEQ ID NO: 2230349 - RNA, 19 nt, Artificial Sequence
  Description of Artificial Sequence: Synthetic oligonucleotide
  Antisense strand to SEQ ID NO: 2230348
uaucuccgaaguaaauuuc

SEQ ID NO: 2230350 - RNA, 19 nt, Artificial Sequence
  Description of Artificial Sequence: Synthetic oligonucleotide
  Sense strand starting at position 316 of SEQ ID NO: 1883974
cauacagaggucugcauaa

SEQ ID NO: 2230351 - RNA, 19 nt, Artificial Sequence
  Description of Artificial Sequence: Synthetic oligonucleotide
  Antisense strand to SEQ ID NO: 2230350
uuaugcagaccucuguaug

SEQ ID NO: 2230352 - RNA, 19 nt, Artificial Sequence
  Description of Artificial Sequence: Synthetic oligonucleotide
  Sense strand starting at position 386 of SEQ ID NO: 1883974
gcaucuacagguugaauga

SEQ ID NO: 2230353 - RNA, 19 nt, Artificial Sequence
  Description of Artificial Sequence: Synthetic oligonucleotide
  Antisense strand to SEQ ID NO: 2230352
ucauucaaccuguagaugc

SEQ ID NO: 2230354 - RNA, 19 nt, Artificial Sequence
  Description of Artificial Sequence: Synthetic oligonucleotide
  Sense strand starting at position 393 of SEQ ID NO: 1883974
cagguugaaugagcuagua

SEQ ID NO: 2230355 - RNA, 19 nt, Artificial Sequence
  Description of Artificial Sequence: Synthetic oligonucleotide
  Antisense strand to SEQ ID NO: 2230354
uacuagcucauucaaccug

SEQ ID NO: 2230356 - RNA, 19 nt, Artificial Sequence
  Description of Artificial Sequence: Synthetic oligonucleotide
  Sense strand starting at position 395 of SEQ ID NO: 1883974
gguugaaugagcuaguaac

SEQ ID NO: 2230357 - RNA, 19 nt, Artificial Sequence
  Description of Artificial Sequence: Synthetic oligonucleotide
  Antisense strand to SEQ ID NO: 2230356
guuacuagcucauucaacc

SEQ ID NO: 2230358 - RNA, 19 nt, Artificial Sequence
  Description of Artificial Sequence: Synthetic oligonucleotide
  Sense strand starting at position 522 of SEQ ID NO: 1883974
gaauaacuggugugacuac

SEQ ID NO: 2230359 - RNA, 19 nt, Artificial Sequence
  Description of Artificial Sequence: Synthetic oligonucleotide
  Antisense strand to SEQ ID NO: 2230358
guagucacaccaguuauuc

SEQ ID NO: 2230360 - RNA, 19 nt, Artificial Sequence
  Description of Artificial Sequence: Synthetic oligonucleotide
  Sense strand starting at position 706 of SEQ ID NO: 1883974
uaguccuaaguagggaaau

SEQ ID NO: 2230361 - RNA, 19 nt, Artificial Sequence
  Description of Artificial Sequence: Synthetic oligonucleotide
  Antisense strand to SEQ ID NO: 2230360
auuucccuacuuaggacua

SEQ ID NO: 2230362 - RNA, 19 nt, Artificial Sequence
  Description of Artificial Sequence: Synthetic oligonucleotide
  Sense strand starting at position 1064 of SEQ ID NO: 1883974
ugucuucuuccgcuuguca

SEQ ID NO: 2230363 - RNA, 19 nt, Artificial Sequence
  Description of Artificial Sequence: Synthetic oligonucleotide
  Antisense strand to SEQ ID NO: 2230362
ugacaagcggaagaagaca

SEQ ID NO: 2230364 - RNA, 19 nt, Artificial Sequence
  Description of Artificial Sequence: Synthetic oligonucleotide
  Sense strand starting at position 1139 of SEQ ID NO: 1883974
uaguguuugcuagaacuug

SEQ ID NO: 2230365 - RNA, 19 nt, Artificial Sequence
  Description of Artificial Sequence: Synthetic oligonucleotide
  Antisense strand to SEQ ID NO: 2230364
caaguucuagcaaacacua

SEQ ID NO: 2230366 - RNA, 19 nt, Artificial Sequence
  Description of Artificial Sequence: Synthetic oligonucleotide
  Sense strand starting at position 1327 of SEQ ID NO: 1883974
cgggcaggaucauuagaua

SEQ ID NO: 2230367 - RNA, 19 nt, Artificial Sequence
  Description of Artificial Sequence: Synthetic oligonucleotide
  Antisense strand to SEQ ID NO: 2230366
uaucuaaugauccugcccg

SEQ ID NO: 2230368 - RNA, 19 nt, Artificial Sequence
  Description of Artificial Sequence: Synthetic oligonucleotide
  Sense strand starting at position 1348 of SEQ ID NO: 1883974
auacgaaggcuuuaaacgu

SEQ ID NO: 2230369 - RNA, 19 nt, Artificial Sequence
  Description of Artificial Sequence: Synthetic oligonucleotide
  Antisense strand to SEQ ID NO: 2230368
acguuuaaagccuucguau

SEQ ID NO: 2230370 - RNA, 19 nt, Artificial Sequence
  Description of Artificial Sequence: Synthetic oligonucleotide
  Sense strand starting at position 1428 of SEQ ID NO: 1883974
cgacauccucgccaggauu

SEQ ID NO: 2230371 - RNA, 19 nt, Artificial Sequence
  Description of Artificial Sequence: Synthetic oligonucleotide
  Antisense strand to SEQ ID NO: 2230370
aauccuggcgaggaugucg

SEQ ID NO: 2230372 - RNA, 19 nt, Artificial Sequence
  Description of Artificial Sequence: Synthetic oligonucleotide
  Sense strand starting at position 1847 of SEQ ID NO: 1883974
cugacaacugcauggagua

SEQ ID NO: 2230373 - RNA, 19 nt, Artificial Sequence
  Description of Artificial Sequence: Synthetic oligonucleotide
  Antisense strand to SEQ ID NO: 2230372
uacuccaugcaguugucag

SEQ ID NO: 2230374 - RNA, 19 nt, Artificial Sequence
  Description of Artificial Sequence: Synthetic oligonucleotide
  Sense strand starting at position 1848 of SEQ ID NO: 1883974
ugacaacugcauggaguaa

SEQ ID NO: 2230375 - RNA, 19 nt, Artificial Sequence
  Description of Artificial Sequence: Synthetic oligonucleotide
  Antisense strand to SEQ ID NO: 2230374
uuacuccaugcaguuguca

SEQ ID NO: 2230376 - RNA, 19 nt, Artificial Sequence
  Description of Artificial Sequence: Synthetic oligonucleotide
  Sense strand starting at position 2442 of SEQ ID NO: 1883974
cugcuuuggcggagcaagu

SEQ ID NO: 2230377 - RNA, 19 nt, Artificial Sequence
  Description of Artificial Sequence: Synthetic oligonucleotide
  Antisense strand to SEQ ID NO: 2230376
acuugcuccgccaaagcag

SEQ ID NO: 2230378 - RNA, 19 nt, Artificial Sequence
  Description of Artificial Sequence: Synthetic oligonucleotide
  Sense strand starting at position 2542 of SEQ ID NO: 1883974
ucuggaucucuggaugcau

SEQ ID NO: 2230379 - RNA, 19 nt, Artificial Sequence
  Description of Artificial Sequence: Synthetic oligonucleotide
  Antisense strand to SEQ ID NO: 2230378
augcauccagagauccaga

SEQ ID NO: 2230380 - RNA, 19 nt, Artificial Sequence
  Description of Artificial Sequence: Synthetic oligonucleotide
  Sense strand starting at position 2596 of SEQ ID NO: 1883974
accuuucccgagugauuac

SEQ ID NO: 2230381 - RNA, 19 nt, Artificial Sequence
  Description of Artificial Sequence: Synthetic oligonucleotide
  Antisense strand to SEQ ID NO: 2230380
guaaucacucgggaaaggu

SEQ ID NO: 2230382 - RNA, 19 nt, Artificial Sequence
  Description of Artificial Sequence: Synthetic oligonucleotide
  Sense strand starting at position 2599 of SEQ ID NO: 1883974
uuucccgagugauuacauu

SEQ ID NO: 2230383 - RNA, 19 nt, Artificial Sequence
  Description of Artificial Sequence: Synthetic oligonucleotide
  Antisense strand to SEQ ID NO: 2230382
aauguaaucacucgggaaa

SEQ ID NO: 2230384 - RNA, 19 nt, Artificial Sequence
  Description of Artificial Sequence: Synthetic oligonucleotide
  Sense strand starting at position 2797 of SEQ ID NO: 1883974
gguaucuuccguggauaga

SEQ ID NO: 2230385 - RNA, 19 nt, Artificial Sequence
  Description of Artificial Sequence: Synthetic oligonucleotide
  Antisense strand to SEQ ID NO: 2230384
ucuauccacggaagauacc

SEQ ID NO: 2230386 - RNA, 19 nt, Artificial Sequence
  Description of Artificial Sequence: Synthetic oligonucleotide
  Sense strand starting at position 2798 of SEQ ID NO: 1883974
guaucuuccguggauagac

SEQ ID NO: 2230387 - RNA, 19 nt, Artificial Sequence
  Description of Artificial Sequence: Synthetic oligonucleotide
  Antisense strand to SEQ ID NO: 2230386
gucuauccacggaagauac

SEQ ID NO: 2230388 - RNA, 19 nt, Artificial Sequence
  Description of Artificial Sequence: Synthetic oligonucleotide
  Sense strand starting at position 2860 of SEQ ID NO: 1883974
ccaugaacuuaagcugaaa

SEQ ID NO: 2230389 - RNA, 19 nt, Artificial Sequence
  Description of Artificial Sequence: Synthetic oligonucleotide
  Antisense strand to SEQ ID NO: 2230388
uuucagcuuaaguucaugg

SEQ ID NO: 2230390 - RNA, 19 nt, Artificial Sequence
  Description of Artificial Sequence: Synthetic oligonucleotide
  Sense strand starting at position 3012 of SEQ ID NO: 1883974
acacuuguauuugucagua

SEQ ID NO: 2230391 - RNA, 19 nt, Artificial Sequence
  Description of Artificial Sequence: Synthetic oligonucleotide
  Antisense strand to SEQ ID NO: 2230390
uacugacaaauacaagugu

SEQ ID NO: 2230392 - RNA, 19 nt, Artificial Sequence
  Description of Artificial Sequence: Synthetic oligonucleotide
  Sense strand starting at position 3016 of SEQ ID NO: 1883974
uuguauuugucaguacacu

SEQ ID NO: 2230393 - RNA, 19 nt, Artificial Sequence
  Description of Artificial Sequence: Synthetic oligonucleotide
  Antisense strand to SEQ ID NO: 2230392
aguguacugacaaauacaa

SEQ ID NO: 2230394 - RNA, 19 nt, Artificial Sequence
  Description of Artificial Sequence: Synthetic oligonucleotide
  Sense strand starting at position 3089 of SEQ ID NO: 1883974
gcuuuaaugaguuaggcuu

SEQ ID NO: 2230395 - RNA, 19 nt, Artificial Sequence
  Description of Artificial Sequence: Synthetic oligonucleotide
  Antisense strand to SEQ ID NO: 2230394
aagccuaacucauuaaagc

SEQ ID NO: 2230396 - RNA, 19 nt, Artificial Sequence
  Description of Artificial Sequence: Synthetic oligonucleotide
  Sense strand starting at position 3097 of SEQ ID NO: 1883974
gaguuaggcuuuccaacug

SEQ ID NO: 2230397 - RNA, 19 nt, Artificial Sequence
  Description of Artificial Sequence: Synthetic oligonucleotide
  Antisense strand to SEQ ID NO: 2230396
caguuggaaagccuaacuc

SEQ ID NO: 2230398 - RNA, 19 nt, Artificial Sequence
  Description of Artificial Sequence: Synthetic oligonucleotide
  Sense strand starting at position 3196 of SEQ ID NO: 1883974
aggccugaagugcaauaaa

SEQ ID NO: 2230399 - RNA, 19 nt, Artificial Sequence
  Description of Artificial Sequence: Synthetic oligonucleotide
  Antisense strand to SEQ ID NO: 2230398
uuuauugcacuucaggccu

SEQ ID NO: 2230400 - RNA, 19 nt, Artificial Sequence
  Description of Artificial Sequence: Synthetic oligonucleotide
  Sense strand starting at position 3216 of SEQ ID NO: 1883974
aacaguaagugauuauugu

SEQ ID NO: 2230401 - RNA, 19 nt, Artificial Sequence
  Description of Artificial Sequence: Synthetic oligonucleotide
  Antisense strand to SEQ ID NO: 2230400
acaauaaucacuuacuguu

SEQ ID NO: 2230402 - RNA, 19 nt, Artificial Sequence
  Description of Artificial Sequence: Synthetic oligonucleotide
  Sense strand starting at position 3217 of SEQ ID NO: 1883974
acaguaagugauuauuguu

SEQ ID NO: 2230403 - RNA, 19 nt, Artificial Sequence
  Description of Artificial Sequence: Synthetic oligonucleotide
  Antisense strand to SEQ ID NO: 2230402
aacaauaaucacuuacugu

SEQ ID NO: 2230404 - RNA, 19 nt, Artificial Sequence
  Description of Artificial Sequence: Synthetic oligonucleotide
  Sense strand starting at position 3257 of SEQ ID NO: 1883974
guuaauaacuuagcaaaga

SEQ ID NO: 2230405 - RNA, 19 nt, Artificial Sequence
  Description of Artificial Sequence: Synthetic oligonucleotide
  Antisense strand to SEQ ID NO: 2230404
ucuuugcuaaguuauuaac

SEQ ID NO: 2230406 - RNA, 19 nt, Artificial Sequence
  Description of Artificial Sequence: Synthetic oligonucleotide
  Sense strand starting at position 3452 of SEQ ID NO: 1883974
agggauagagcugguggua

SEQ ID NO: 2230407 - RNA, 19 nt, Artificial Sequence
  Description of Artificial Sequence: Synthetic oligonucleotide
  Antisense strand to SEQ ID NO: 2230406
uaccaccagcucuaucccu

SEQ ID NO: 2230408 - RNA, 19 nt, Artificial Sequence
  Description of Artificial Sequence: Synthetic oligonucleotide
  Sense strand starting at position 3573 of SEQ ID NO: 1883974
ggcuuauaguccuuuauag

SEQ ID NO: 2230409 - RNA, 19 nt, Artificial Sequence
  Description of Artificial Sequence: Synthetic oligonucleotide
  Antisense strand to SEQ ID NO: 2230408
cuauaaaggacuauaagcc

SEQ ID NO: 2230410 - RNA, 19 nt, Artificial Sequence
  Description of Artificial Sequence: Synthetic oligonucleotide
  Sense strand starting at position 3575 of SEQ ID NO: 1883974
cuuauaguccuuuauaguu

SEQ ID NO: 2230411 - RNA, 19 nt, Artificial Sequence
  Description of Artificial Sequence: Synthetic oligonucleotide
  Antisense strand to SEQ ID NO: 2230410
aacuauaaaggacuauaag

SEQ ID NO: 2230412 - RNA, 19 nt, Artificial Sequence
  Description of Artificial Sequence: Synthetic oligonucleotide
  Sense strand starting at position 3617 of SEQ ID NO: 1883974
agcuaaauugauugaacau

SEQ ID NO: 2230413 - RNA, 19 nt, Artificial Sequence
  Description of Artificial Sequence: Synthetic oligonucleotide
  Antisense strand to SEQ ID NO: 2230412
auguucaaucaauuuagcu

SEQ ID NO: 2230414 - RNA, 19 nt, Artificial Sequence
  Description of Artificial Sequence: Synthetic oligonucleotide
  Sense strand starting at position 3630 of SEQ ID NO: 1883974
gaacaucgacuguagcaua

SEQ ID NO: 2230415 - RNA, 19 nt, Artificial Sequence
  Description of Artificial Sequence: Synthetic oligonucleotide
  Antisense strand to SEQ ID NO: 2230414
uaugcuacagucgauguuc

SEQ ID NO: 2230416 - RNA, 19 nt, Artificial Sequence
  Description of Artificial Sequence: Synthetic oligonucleotide
  Sense strand starting at position 3776 of SEQ ID NO: 1883974
aauaauugugcguauucca

SEQ ID NO: 2230417 - RNA, 19 nt, Artificial Sequence
  Description of Artificial Sequence: Synthetic oligonucleotide
  Antisense strand to SEQ ID NO: 2230416
uggaauacgcacaauuauu

SEQ ID NO: 2230418 - RNA, 19 nt, Artificial Sequence
  Description of Artificial Sequence: Synthetic oligonucleotide
  Sense strand starting at position 3809 of SEQ ID NO: 1883974
auuaaaugagcucauaugu

SEQ ID NO: 2230419 - RNA, 19 nt, Artificial Sequence
  Description of Artificial Sequence: Synthetic oligonucleotide
  Antisense strand to SEQ ID NO: 2230418
acauaugagcucauuuaau

SEQ ID NO: 2230420 - RNA, 19 nt, Artificial Sequence
  Description of Artificial Sequence: Synthetic oligonucleotide
  Sense strand starting at position 3841 of SEQ ID NO: 1883974
uuagaauagugcucggaau

SEQ ID NO: 2230421 - RNA, 19 nt, Artificial Sequence
  Description of Artificial Sequence: Synthetic oligonucleotide
  Antisense strand to SEQ ID NO: 2230420
auuccgagcacuauucuaa

SEQ ID NO: 2230422 - RNA, 19 nt, Artificial Sequence
  Description of Artificial Sequence: Synthetic oligonucleotide
  Sense strand starting at position 3842 of SEQ ID NO: 1883974
uagaauagugcucggaaug

SEQ ID NO: 2230423 - RNA, 19 nt, Artificial Sequence
  Description of Artificial Sequence: Synthetic oligonucleotide
  Antisense strand to SEQ ID NO: 2230422
cauuccgagcacuauucua

SEQ ID NO: 2230424 - RNA, 19 nt, Artificial Sequence
  Description of Artificial Sequence: Synthetic oligonucleotide
  Sense strand starting at position 3977 of SEQ ID NO: 1883974
agguuagaacuaugugcaa

SEQ ID NO: 2230425 - RNA, 19 nt, Artificial Sequence
  Description of Artificial Sequence: Synthetic oligonucleotide
  Antisense strand to SEQ ID NO: 2230424
uugcacauaguucuaaccu

SEQ ID NO: 2230426 - RNA, 19 nt, Artificial Sequence
  Description of Artificial Sequence: Synthetic oligonucleotide
  Sense strand starting at position 3980 of SEQ ID NO: 1883974
uuagaacuaugugcaacua

SEQ ID NO: 2230427 - RNA, 19 nt, Artificial Sequence
  Description of Artificial Sequence: Synthetic oligonucleotide
  Antisense strand to SEQ ID NO: 2230426
uaguugcacauaguucuaa

SEQ ID NO: 2230428 - RNA, 19 nt, Artificial Sequence
  Description of Artificial Sequence: Synthetic oligonucleotide
  Sense strand starting at position 180 of SEQ ID NO: 1883975
cccgacuggauguaaauua

SEQ ID NO: 2230429 - RNA, 19 nt, Artificial Sequence
  Description of Artificial Sequence: Synthetic oligonucleotide
  Antisense strand to SEQ ID NO: 2230428
uaauuuacauccagucggg

SEQ ID NO: 2230430 - RNA, 19 nt, Artificial Sequence
  Description of Artificial Sequence: Synthetic oligonucleotide
  Sense strand starting at position 221 of SEQ ID NO: 1883975
cacacagaucauggcguua

SEQ ID NO: 2230431 - RNA, 19 nt, Artificial Sequence
  Description of Artificial Sequence: Synthetic oligonucleotide
  Antisense strand to SEQ ID NO: 2230430
uaacgccaugaucugugug

SEQ ID NO: 2230432 - RNA, 19 nt, Artificial Sequence
  Description of Artificial Sequence: Synthetic oligonucleotide
  Sense strand starting at position 226 of SEQ ID NO: 1883975
agaucauggcguuacuaau

SEQ ID NO: 2230433 - RNA, 19 nt, Artificial Sequence
  Description of Artificial Sequence: Synthetic oligonucleotide
  Antisense strand to SEQ ID NO: 2230432
auuaguaacgccaugaucu

SEQ ID NO: 2230434 - RNA, 19 nt, Artificial Sequence
  Description of Artificial Sequence: Synthetic oligonucleotide
  Sense strand starting at position 232 of SEQ ID NO: 1883975
uggcguuacuaauuccuau

SEQ ID NO: 2230435 - RNA, 19 nt, Artificial Sequence
  Description of Artificial Sequence: Synthetic oligonucleotide
  Antisense strand to SEQ ID NO: 2230434
auaggaauuaguaacgcca

SEQ ID NO: 2230436 - RNA, 19 nt, Artificial Sequence
  Description of Artificial Sequence: Synthetic oligonucleotide
  Sense strand starting at position 235 of SEQ ID NO: 1883975
cguuacuaauuccuauaga

SEQ ID NO: 2230437 - RNA, 19 nt, Artificial Sequence
  Description of Artificial Sequence: Synthetic oligonucleotide
  Antisense strand to SEQ ID NO: 2230436
ucuauaggaauuaguaacg

SEQ ID NO: 2230438 - RNA, 19 nt, Artificial Sequence
  Description of Artificial Sequence: Synthetic oligonucleotide
  Sense strand starting at position 371 of SEQ ID NO: 1883975
ccaagagcucccugacuau

SEQ ID NO: 2230439 - RNA, 19 nt, Artificial Sequence
  Description of Artificial Sequence: Synthetic oligonucleotide
  Antisense strand to SEQ ID NO: 2230438
auagucagggagcucuugg

SEQ ID NO: 2230440 - RNA, 19 nt, Artificial Sequence
  Description of Artificial Sequence: Synthetic oligonucleotide
  Sense strand starting at position 374 of SEQ ID NO: 1883975
agagcucccugacuauaaa

SEQ ID NO: 2230441 - RNA, 19 nt, Artificial Sequence
  Description of Artificial Sequence: Synthetic oligonucleotide
  Antisense strand to SEQ ID NO: 2230440
uuuauagucagggagcucu

SEQ ID NO: 2230442 - RNA, 19 nt, Artificial Sequence
  Description of Artificial Sequence: Synthetic oligonucleotide
  Sense strand starting at position 523 of SEQ ID NO: 1883975
cgcuuucuucucgaauaca

SEQ ID NO: 2230443 - RNA, 19 nt, Artificial Sequence
  Description of Artificial Sequence: Synthetic oligonucleotide
  Antisense strand to SEQ ID NO: 2230442
uguauucgagaagaaagcg

SEQ ID NO: 2230444 - RNA, 19 nt, Artificial Sequence
  Description of Artificial Sequence: Synthetic oligonucleotide
  Sense strand starting at position 636 of SEQ ID NO: 1883975
cugguuuccugaucgcuua

SEQ ID NO: 2230445 - RNA, 19 nt, Artificial Sequence
  Description of Artificial Sequence: Synthetic oligonucleotide
  Antisense strand to SEQ ID NO: 2230444
uaagcgaucaggaaaccag

SEQ ID NO: 2230446 - RNA, 19 nt, Artificial Sequence
  Description of Artificial Sequence: Synthetic oligonucleotide
  Sense strand starting at position 637 of SEQ ID NO: 1883975
ugguuuccugaucgcuuaa

SEQ ID NO: 2230447 - RNA, 19 nt, Artificial Sequence
  Description of Artificial Sequence: Synthetic oligonucleotide
  Antisense strand to SEQ ID NO: 2230446
uuaagcgaucaggaaacca

SEQ ID NO: 2230448 - RNA, 19 nt, Artificial Sequence
  Description of Artificial Sequence: Synthetic oligonucleotide
  Sense strand starting at position 639 of SEQ ID NO: 1883975
guuuccugaucgcuuaaga

SEQ ID NO: 2230449 - RNA, 19 nt, Artificial Sequence
  Description of Artificial Sequence: Synthetic oligonucleotide
  Antisense strand to SEQ ID NO: 2230448
ucuuaagcgaucaggaaac

SEQ ID NO: 2230450 - RNA, 19 nt, Artificial Sequence
  Description of Artificial Sequence: Synthetic oligonucleotide
  Sense strand starting at position 648 of SEQ ID NO: 1883975
ucgcuuaagaauuggaagu

SEQ ID NO: 2230451 - RNA, 19 nt, Artificial Sequence
  Description of Artificial Sequence: Synthetic oligonucleotide
  Antisense strand to SEQ ID NO: 2230450
acuuccaauucuuaagcga

SEQ ID NO: 2230452 - RNA, 19 nt, Artificial Sequence
  Description of Artificial Sequence: Synthetic oligonucleotide
  Sense strand starting at position 649 of SEQ ID NO: 1883975
cgcuuaagaauuggaaguu

SEQ ID NO: 2230453 - RNA, 19 nt, Artificial Sequence
  Description of Artificial Sequence: Synthetic oligonucleotide
  Antisense strand to SEQ ID NO: 2230452
aacuuccaauucuuaagcg

SEQ ID NO: 2230454 - RNA, 19 nt, Artificial Sequence
  Description of Artificial Sequence: Synthetic oligonucleotide
  Sense strand starting at position 781 of SEQ ID NO: 1883975
ggaguaguuucucccggac

SEQ ID NO: 2230455 - RNA, 19 nt, Artificial Sequence
  Description of Artificial Sequence: Synthetic oligonucleotide
  Antisense strand to SEQ ID NO: 2230454
guccgggagaaacuacucc

SEQ ID NO: 2230456 - RNA, 19 nt, Artificial Sequence
  Description of Artificial Sequence: Synthetic oligonucleotide
  Sense strand starting at position 1451 of SEQ ID NO: 1883975
gugcaaagcggugacagau

SEQ ID NO: 2230457 - RNA, 19 nt, Artificial Sequence
  Description of Artificial Sequence: Synthetic oligonucleotide
  Antisense strand to SEQ ID NO: 2230456
aucugucaccgcuuugcac

SEQ ID NO: 2230458 - RNA, 19 nt, Artificial Sequence
  Description of Artificial Sequence: Synthetic oligonucleotide
  Sense strand starting at position 1459 of SEQ ID NO: 1883975
cggugacagauccgugacu

SEQ ID NO: 2230459 - RNA, 19 nt, Artificial Sequence
  Description of Artificial Sequence: Synthetic oligonucleotide
  Antisense strand to SEQ ID NO: 2230458
agucacggaucugucaccg

SEQ ID NO: 2230460 - RNA, 19 nt, Artificial Sequence
  Description of Artificial Sequence: Synthetic oligonucleotide
  Sense strand starting at position 1461 of SEQ ID NO: 1883975
gugacagauccgugacuca

SEQ ID NO: 2230461 - RNA, 19 nt, Artificial Sequence
  Description of Artificial Sequence: Synthetic oligonucleotide
  Antisense strand to SEQ ID NO: 2230460
ugagucacggaucugucac

SEQ ID NO: 2230462 - RNA, 19 nt, Artificial Sequence
  Description of Artificial Sequence: Synthetic oligonucleotide
  Sense strand starting at position 1684 of SEQ ID NO: 1883975
ugggcaaagucaucggaga

SEQ ID NO: 2230463 - RNA, 19 nt, Artificial Sequence
  Description of Artificial Sequence: Synthetic oligonucleotide
  Antisense strand to SEQ ID NO: 2230462
ucuccgaugacuuugccca

SEQ ID NO: 2230464 - RNA, 19 nt, Artificial Sequence
  Description of Artificial Sequence: Synthetic oligonucleotide
  Sense strand starting at position 1685 of SEQ ID NO: 1883975
gggcaaagucaucggagag

SEQ ID NO: 2230465 - RNA, 19 nt, Artificial Sequence
  Description of Artificial Sequence: Synthetic oligonucleotide
  Antisense strand to SEQ ID NO: 2230464
cucuccgaugacuuugccc

SEQ ID NO: 2230466 - RNA, 19 nt, Artificial Sequence
  Description of Artificial Sequence: Synthetic oligonucleotide
  Sense strand starting at position 2210 of SEQ ID NO: 1883975
caggucuagcggugacauu

SEQ ID NO: 2230467 - RNA, 19 nt, Artificial Sequence
  Description of Artificial Sequence: Synthetic oligonucleotide
  Antisense strand to SEQ ID NO: 2230466
aaugucaccgcuagaccug

SEQ ID NO: 2230468 - RNA, 19 nt, Artificial Sequence
  Description of Artificial Sequence: Synthetic oligonucleotide
  Sense strand starting at position 2236 of SEQ ID NO: 1883975
acgagacaucuccaagccu

SEQ ID NO: 2230469 - RNA, 19 nt, Artificial Sequence
  Description of Artificial Sequence: Synthetic oligonucleotide
  Antisense strand to SEQ ID NO: 2230468
aggcuuggagaugucucgu

SEQ ID NO: 2230470 - RNA, 19 nt, Artificial Sequence
  Description of Artificial Sequence: Synthetic oligonucleotide
  Sense strand starting at position 2253 of SEQ ID NO: 1883975
cucggucauugccucuuaa

SEQ ID NO: 2230471 - RNA, 19 nt, Artificial Sequence
  Description of Artificial Sequence: Synthetic oligonucleotide
  Antisense strand to SEQ ID NO: 2230470
uuaagaggcaaugaccgag

SEQ ID NO: 2230472 - RNA, 19 nt, Artificial Sequence
  Description of Artificial Sequence: Synthetic oligonucleotide
  Sense strand starting at position 2694 of SEQ ID NO: 1883975
gccaguuccugucucuuaa

SEQ ID NO: 2230473 - RNA, 19 nt, Artificial Sequence
  Description of Artificial Sequence: Synthetic oligonucleotide
  Antisense strand to SEQ ID NO: 2230472
uuaagagacaggaacuggc

SEQ ID NO: 2230474 - RNA, 19 nt, Artificial Sequence
  Description of Artificial Sequence: Synthetic oligonucleotide
  Sense strand starting at position 2866 of SEQ ID NO: 1883975
ucaagaugauaagaucaaa

SEQ ID NO: 2230475 - RNA, 19 nt, Artificial Sequence
  Description of Artificial Sequence: Synthetic oligonucleotide
  Antisense strand to SEQ ID NO: 2230474
uuugaucuuaucaucuuga

SEQ ID NO: 2230476 - RNA, 19 nt, Artificial Sequence
  Description of Artificial Sequence: Synthetic oligonucleotide
  Sense strand starting at position 2955 of SEQ ID NO: 1883975
gcauguauacaauagagca

SEQ ID NO: 2230477 - RNA, 19 nt, Artificial Sequence
  Description of Artificial Sequence: Synthetic oligonucleotide
  Antisense strand to SEQ ID NO: 2230476
ugcucuauuguauacaugc

SEQ ID NO: 2230478 - RNA, 19 nt, Artificial Sequence
  Description of Artificial Sequence: Synthetic oligonucleotide
  Sense strand starting at position 2984 of SEQ ID NO: 1883975
uauggacauuuaugaagua

SEQ ID NO: 2230479 - RNA, 19 nt, Artificial Sequence
  Description of Artificial Sequence: Synthetic oligonucleotide
  Antisense strand to SEQ ID NO: 2230478
uacuucauaaauguccaua

SEQ ID NO: 2230480 - RNA, 19 nt, Artificial Sequence
  Description of Artificial Sequence: Synthetic oligonucleotide
  Sense strand starting at position 3046 of SEQ ID NO: 1883975
ggcugcaaauuaucauagu

SEQ ID NO: 2230481 - RNA, 19 nt, Artificial Sequence
  Description of Artificial Sequence: Synthetic oligonucleotide
  Antisense strand to SEQ ID NO: 2230480
acuaugauaauuugcagcc

SEQ ID NO: 2230482 - RNA, 19 nt, Artificial Sequence
  Description of Artificial Sequence: Synthetic oligonucleotide
  Sense strand starting at position 3104 of SEQ ID NO: 1883975
ugucauaaaugucuuucua

SEQ ID NO: 2230483 - RNA, 19 nt, Artificial Sequence
  Description of Artificial Sequence: Synthetic oligonucleotide
  Antisense strand to SEQ ID NO: 2230482
uagaaagacauuuaugaca

SEQ ID NO: 2230484 - RNA, 19 nt, Artificial Sequence
  Description of Artificial Sequence: Synthetic oligonucleotide
  Sense strand starting at position 3130 of SEQ ID NO: 1883975
uugugaauuuaagaucgcu

SEQ ID NO: 2230485 - RNA, 19 nt, Artificial Sequence
  Description of Artificial Sequence: Synthetic oligonucleotide
  Antisense strand to SEQ ID NO: 2230484
agcgaucuuaaauucacaa

SEQ ID NO: 2230486 - RNA, 19 nt, Artificial Sequence
  Description of Artificial Sequence: Synthetic oligonucleotide
  Sense strand starting at position 3168 of SEQ ID NO: 1883975
uggaacuauugagucaacu

SEQ ID NO: 2230487 - RNA, 19 nt, Artificial Sequence
  Description of Artificial Sequence: Synthetic oligonucleotide
  Antisense strand to SEQ ID NO: 2230486
aguugacucaauaguucca

SEQ ID NO: 2230488 - RNA, 19 nt, Artificial Sequence
  Description of Artificial Sequence: Synthetic oligonucleotide
  Sense strand starting at position 3179 of SEQ ID NO: 1883975
agucaacugguagggaaua

SEQ ID NO: 2230489 - RNA, 19 nt, Artificial Sequence
  Description of Artificial Sequence: Synthetic oligonucleotide
  Antisense strand to SEQ ID NO: 2230488
uauucccuaccaguugacu

SEQ ID NO: 2230490 - RNA, 19 nt, Artificial Sequence
  Description of Artificial Sequence: Synthetic oligonucleotide
  Sense strand starting at position 3274 of SEQ ID NO: 1883975
acuagcauugauuguguua

SEQ ID NO: 2230491 - RNA, 19 nt, Artificial Sequence
  Description of Artificial Sequence: Synthetic oligonucleotide
  Antisense strand to SEQ ID NO: 2230490
uaacacaaucaaugcuagu

SEQ ID NO: 2230492 - RNA, 19 nt, Artificial Sequence
  Description of Artificial Sequence: Synthetic oligonucleotide
  Sense strand starting at position 3277 of SEQ ID NO: 1883975
agcauugauuguguuaaag

SEQ ID NO: 2230493 - RNA, 19 nt, Artificial Sequence
  Description of Artificial Sequence: Synthetic oligonucleotide
  Antisense strand to SEQ ID NO: 2230492
cuuuaacacaaucaaugcu

SEQ ID NO: 2230494 - RNA, 19 nt, Artificial Sequence
  Description of Artificial Sequence: Synthetic oligonucleotide
  Sense strand starting at position 3455 of SEQ ID NO: 1883975
aguggauauccaugagccu

SEQ ID NO: 2230495 - RNA, 19 nt, Artificial Sequence
  Description of Artificial Sequence: Synthetic oligonucleotide
  Antisense strand to SEQ ID NO: 2230494
aggcucauggauauccacu

SEQ ID NO: 2230496 - RNA, 19 nt, Artificial Sequence
  Description of Artificial Sequence: Synthetic oligonucleotide
  Sense strand starting at position 3456 of SEQ ID NO: 1883975
guggauauccaugagccua

SEQ ID NO: 2230497 - RNA, 19 nt, Artificial Sequence
  Description of Artificial Sequence: Synthetic oligonucleotide
  Antisense strand to SEQ ID NO: 2230496
uaggcucauggauauccac

SEQ ID NO: 2230498 - RNA, 19 nt, Artificial Sequence
  Description of Artificial Sequence: Synthetic oligonucleotide
  Sense strand starting at position 3602 of SEQ ID NO: 1883975
cacuuucucgcagguaaau

SEQ ID NO: 2230499 - RNA, 19 nt, Artificial Sequence
  Description of Artificial Sequence: Synthetic oligonucleotide
  Antisense strand to SEQ ID NO: 2230498
auuuaccugcgagaaagug

SEQ ID NO: 2230500 - RNA, 19 nt, Artificial Sequence
  Description of Artificial Sequence: Synthetic oligonucleotide
  Sense strand starting at position 3604 of SEQ ID NO: 1883975
cuuucucgcagguaaaugu

SEQ ID NO: 2230501 - RNA, 19 nt, Artificial Sequence
  Description of Artificial Sequence: Synthetic oligonucleotide
  Antisense strand to SEQ ID NO: 2230500
acauuuaccugcgagaaag

SEQ ID NO: 2230502 - RNA, 19 nt, Artificial Sequence
  Description of Artificial Sequence: Synthetic oligonucleotide
  Sense strand starting at position 3611 of SEQ ID NO: 1883975
gcagguaaauguuucuuga

SEQ ID NO: 2230503 - RNA, 19 nt, Artificial Sequence
  Description of Artificial Sequence: Synthetic oligonucleotide
  Antisense strand to SEQ ID NO: 2230502
ucaagaaacauuuaccugc

SEQ ID NO: 2230504 - RNA, 19 nt, Artificial Sequence
  Description of Artificial Sequence: Synthetic oligonucleotide
  Sense strand starting at position 3613 of SEQ ID NO: 1883975
agguaaauguuucuugaaa

SEQ ID NO: 2230505 - RNA, 19 nt, Artificial Sequence
  Description of Artificial Sequence: Synthetic oligonucleotide
  Antisense strand to SEQ ID NO: 2230504
uuucaagaaacauuuaccu

SEQ ID NO: 2230506 - RNA, 19 nt, Artificial Sequence
  Description of Artificial Sequence: Synthetic oligonucleotide
  Sense strand starting at position 3614 of SEQ ID NO: 1883975
gguaaauguuucuugaaac

SEQ ID NO: 2230507 - RNA, 19 nt, Artificial Sequence
  Description of Artificial Sequence: Synthetic oligonucleotide
  Antisense strand to SEQ ID NO: 2230506
guuucaagaaacauuuacc

SEQ ID NO: 2230508 - RNA, 19 nt, Artificial Sequence
  Description of Artificial Sequence: Synthetic oligonucleotide
  Sense strand starting at position 192 of SEQ ID NO: 1883976
acuguaaacucuguuaacu

SEQ ID NO: 2230509 - RNA, 19 nt, Artificial Sequence
  Description of Artificial Sequence: Synthetic oligonucleotide
  Antisense strand to SEQ ID NO: 2230508
aguuaacagaguuuacagu

SEQ ID NO: 2230510 - RNA, 19 nt, Artificial Sequence
  Description of Artificial Sequence: Synthetic oligonucleotide
  Sense strand starting at position 288 of SEQ ID NO: 1883976
uauaaagggugccugaaau

SEQ ID NO: 2230511 - RNA, 19 nt, Artificial Sequence
  Description of Artificial Sequence: Synthetic oligonucleotide
  Antisense strand to SEQ ID NO: 2230510
auuucaggcacccuuuaua

SEQ ID NO: 2230512 - RNA, 19 nt, Artificial Sequence
  Description of Artificial Sequence: Synthetic oligonucleotide
  Sense strand starting at position 306 of SEQ ID NO: 1883976
ucgaacugcucacugacau

SEQ ID NO: 2230513 - RNA, 19 nt, Artificial Sequence
  Description of Artificial Sequence: Synthetic oligonucleotide
  Antisense strand to SEQ ID NO: 2230512
augucagugagcaguucga

SEQ ID NO: 2230514 - RNA, 19 nt, Artificial Sequence
  Description of Artificial Sequence: Synthetic oligonucleotide
  Sense strand starting at position 366 of SEQ ID NO: 1883976
aagagugauuguuccaagu

SEQ ID NO: 2230515 - RNA, 19 nt, Artificial Sequence
  Description of Artificial Sequence: Synthetic oligonucleotide
  Antisense strand to SEQ ID NO: 2230514
acuuggaacaaucacucuu

SEQ ID NO: 2230516 - RNA, 19 nt, Artificial Sequence
  Description of Artificial Sequence: Synthetic oligonucleotide
  Sense strand starting at position 448 of SEQ ID NO: 1883976
cuugaauugugauuggcua

SEQ ID NO: 2230517 - RNA, 19 nt, Artificial Sequence
  Description of Artificial Sequence: Synthetic oligonucleotide
  Antisense strand to SEQ ID NO: 2230516
uagccaaucacaauucaag

SEQ ID NO: 2230518 - RNA, 19 nt, Artificial Sequence
  Description of Artificial Sequence: Synthetic oligonucleotide
  Sense strand starting at position 584 of SEQ ID NO: 1883976
cagacacgguuugugaaau

SEQ ID NO: 2230519 - RNA, 19 nt, Artificial Sequence
  Description of Artificial Sequence: Synthetic oligonucleotide
  Antisense strand to SEQ ID NO: 2230518
auuucacaaaccgugucug

SEQ ID NO: 2230520 - RNA, 19 nt, Artificial Sequence
  Description of Artificial Sequence: Synthetic oligonucleotide
  Sense strand starting at position 632 of SEQ ID NO: 1883976
agcauuugcuguucuuaua

SEQ ID NO: 2230521 - RNA, 19 nt, Artificial Sequence
  Description of Artificial Sequence: Synthetic oligonucleotide
  Antisense strand to SEQ ID NO: 2230520
uauaagaacagcaaaugcu

SEQ ID NO: 2230522 - RNA, 19 nt, Artificial Sequence
  Description of Artificial Sequence: Synthetic oligonucleotide
  Sense strand starting at position 648 of SEQ ID NO: 1883976
auaauaaagcagugacgaa

SEQ ID NO: 2230523 - RNA, 19 nt, Artificial Sequence
  Description of Artificial Sequence: Synthetic oligonucleotide
  Antisense strand to SEQ ID NO: 2230522
uucgucacugcuuuauuau

SEQ ID NO: 2230524 - RNA, 19 nt, Artificial Sequence
  Description of Artificial Sequence: Synthetic oligonucleotide
  Sense strand starting at position 2325 of SEQ ID NO: 1883976
gcuuucuaaccguaaagga

SEQ ID NO: 2230525 - RNA, 19 nt, Artificial Sequence
  Description of Artificial Sequence: Synthetic oligonucleotide
  Antisense strand to SEQ ID NO: 2230524
uccuuuacgguuagaaagc

SEQ ID NO: 2230526 - RNA, 19 nt, Artificial Sequence
  Description of Artificial Sequence: Synthetic oligonucleotide
  Sense strand starting at position 2368 of SEQ ID NO: 1883976
aggguaaucucucuuucug

SEQ ID NO: 2230527 - RNA, 19 nt, Artificial Sequence
  Description of Artificial Sequence: Synthetic oligonucleotide
  Antisense strand to SEQ ID NO: 2230526
cagaaagagagauuacccu

SEQ ID NO: 2230528 - RNA, 19 nt, Artificial Sequence
  Description of Artificial Sequence: Synthetic oligonucleotide
  Sense strand starting at position 2402 of SEQ ID NO: 1883976
ucuuguuagaaagguauag

SEQ ID NO: 2230529 - RNA, 19 nt, Artificial Sequence
  Description of Artificial Sequence: Synthetic oligonucleotide
  Antisense strand to SEQ ID NO: 2230528
cuauaccuuucuaacaaga

SEQ ID NO: 2230530 - RNA, 19 nt, Artificial Sequence
  Description of Artificial Sequence: Synthetic oligonucleotide
  Sense strand starting at position 2404 of SEQ ID NO: 1883976
uuguuagaaagguauaguu

SEQ ID NO: 2230531 - RNA, 19 nt, Artificial Sequence
  Description of Artificial Sequence: Synthetic oligonucleotide
  Antisense strand to SEQ ID NO: 2230530
aacuauaccuuucuaacaa

SEQ ID NO: 2230532 - RNA, 19 nt, Artificial Sequence
  Description of Artificial Sequence: Synthetic oligonucleotide
  Sense strand starting at position 2406 of SEQ ID NO: 1883976
guuagaaagguauaguucu

SEQ ID NO: 2230533 - RNA, 19 nt, Artificial Sequence
  Description of Artificial Sequence: Synthetic oligonucleotide
  Antisense strand to SEQ ID NO: 2230532
agaacuauaccuuucuaac

SEQ ID NO: 2230534 - RNA, 19 nt, Artificial Sequence
  Description of Artificial Sequence: Synthetic oligonucleotide
  Sense strand starting at position 2412 of SEQ ID NO: 1883976
aagguauaguucuuuggag

SEQ ID NO: 2230535 - RNA, 19 nt, Artificial Sequence
  Description of Artificial Sequence: Synthetic oligonucleotide
  Antisense strand to SEQ ID NO: 2230534
cuccaaagaacuauaccuu

SEQ ID NO: 2230536 - RNA, 19 nt, Artificial Sequence
  Description of Artificial Sequence: Synthetic oligonucleotide
  Sense strand starting at position 2503 of SEQ ID NO: 1883976
ugcagaauugauuaucuuu

SEQ ID NO: 2230537 - RNA, 19 nt, Artificial Sequence
  Description of Artificial Sequence: Synthetic oligonucleotide
  Antisense strand to SEQ ID NO: 2230536
aaagauaaucaauucugca

SEQ ID NO: 2230538 - RNA, 19 nt, Artificial Sequence
  Description of Artificial Sequence: Synthetic oligonucleotide
  Sense strand starting at position 2588 of SEQ ID NO: 1883976
gauauugagcuguaauaug

SEQ ID NO: 2230539 - RNA, 19 nt, Artificial Sequence
  Description of Artificial Sequence: Synthetic oligonucleotide
  Antisense strand to SEQ ID NO: 2230538
cauauuacagcucaauauc

SEQ ID NO: 2230540 - RNA, 19 nt, Artificial Sequence
  Description of Artificial Sequence: Synthetic oligonucleotide
  Sense strand starting at position 2623 of SEQ ID NO: 1883976
guacauucucacugaggga

SEQ ID NO: 2230541 - RNA, 19 nt, Artificial Sequence
  Description of Artificial Sequence: Synthetic oligonucleotide
  Antisense strand to SEQ ID NO: 2230540
ucccucagugagaauguac

SEQ ID NO: 2230542 - RNA, 19 nt, Artificial Sequence
  Description of Artificial Sequence: Synthetic oligonucleotide
  Sense strand starting at position 2693 of SEQ ID NO: 1883976
aagguugauuuaugaauac

SEQ ID NO: 2230543 - RNA, 19 nt, Artificial Sequence
  Description of Artificial Sequence: Synthetic oligonucleotide
  Antisense strand to SEQ ID NO: 2230542
guauucauaaaucaaccuu

SEQ ID NO: 2230544 - RNA, 19 nt, Artificial Sequence
  Description of Artificial Sequence: Synthetic oligonucleotide
  Sense strand starting at position 2704 of SEQ ID NO: 1883976
augaauacguaaucuguga

SEQ ID NO: 2230545 - RNA, 19 nt, Artificial Sequence
  Description of Artificial Sequence: Synthetic oligonucleotide
  Antisense strand to SEQ ID NO: 2230544
ucacagauuacguauucau

SEQ ID NO: 2230546 - RNA, 19 nt, Artificial Sequence
  Description of Artificial Sequence: Synthetic oligonucleotide
  Sense strand starting at position 2708 of SEQ ID NO: 1883976
auacguaaucugugaaauu

SEQ ID NO: 2230547 - RNA, 19 nt, Artificial Sequence
  Description of Artificial Sequence: Synthetic oligonucleotide
  Antisense strand to SEQ ID NO: 2230546
aauuucacagauuacguau

SEQ ID NO: 2230548 - RNA, 19 nt, Artificial Sequence
  Description of Artificial Sequence: Synthetic oligonucleotide
  Sense strand starting at position 2789 of SEQ ID NO: 1883976
ucccuuugugugcaugaaa

SEQ ID NO: 2230549 - RNA, 19 nt, Artificial Sequence
  Description of Artificial Sequence: Synthetic oligonucleotide
  Antisense strand to SEQ ID NO: 2230548
uuucaugcacacaaaggga

SEQ ID NO: 2230550 - RNA, 19 nt, Artificial Sequence
  Description of Artificial Sequence: Synthetic oligonucleotide
  Sense strand starting at position 2913 of SEQ ID NO: 1883976
uccucacuguagucaauga

SEQ ID NO: 2230551 - RNA, 19 nt, Artificial Sequence
  Description of Artificial Sequence: Synthetic oligonucleotide
  Antisense strand to SEQ ID NO: 2230550
ucauugacuacagugagga

SEQ ID NO: 2230552 - RNA, 19 nt, Artificial Sequence
  Description of Artificial Sequence: Synthetic oligonucleotide
  Sense strand starting at position 2917 of SEQ ID NO: 1883976
cacuguagucaaugauaug

SEQ ID NO: 2230553 - RNA, 19 nt, Artificial Sequence
  Description of Artificial Sequence: Synthetic oligonucleotide
  Antisense strand to SEQ ID NO: 2230552
cauaucauugacuacagug

SEQ ID NO: 2230554 - RNA, 19 nt, Artificial Sequence
  Description of Artificial Sequence: Synthetic oligonucleotide
  Sense strand starting at position 3086 of SEQ ID NO: 1883976
ugauguuagugguucuaaa

SEQ ID NO: 2230555 - RNA, 19 nt, Artificial Sequence
  Description of Artificial Sequence: Synthetic oligonucleotide
  Antisense strand to SEQ ID NO: 2230554
uuuagaaccacuaacauca

SEQ ID NO: 2230556 - RNA, 19 nt, Artificial Sequence
  Description of Artificial Sequence: Synthetic oligonucleotide
  Sense strand starting at position 3167 of SEQ ID NO: 1883976
gcuagagcccaggacuuau

SEQ ID NO: 2230557 - RNA, 19 nt, Artificial Sequence
  Description of Artificial Sequence: Synthetic oligonucleotide
  Antisense strand to SEQ ID NO: 2230556
auaaguccugggcucuagc

SEQ ID NO: 2230558 - RNA, 19 nt, Artificial Sequence
  Description of Artificial Sequence: Synthetic oligonucleotide
  Sense strand starting at position 3301 of SEQ ID NO: 1883976
aagaguuaaguuugcauau

SEQ ID NO: 2230559 - RNA, 19 nt, Artificial Sequence
  Description of Artificial Sequence: Synthetic oligonucleotide
  Antisense strand to SEQ ID NO: 2230558
auaugcaaacuuaacucuu

SEQ ID NO: 2230560 - RNA, 19 nt, Artificial Sequence
  Description of Artificial Sequence: Synthetic oligonucleotide
  Sense strand starting at position 3302 of SEQ ID NO: 1883976
agaguuaaguuugcauaug

SEQ ID NO: 2230561 - RNA, 19 nt, Artificial Sequence
  Description of Artificial Sequence: Synthetic oligonucleotide
  Antisense strand to SEQ ID NO: 2230560
cauaugcaaacuuaacucu

SEQ ID NO: 2230562 - RNA, 19 nt, Artificial Sequence
  Description of Artificial Sequence: Synthetic oligonucleotide
  Sense strand starting at position 3318 of SEQ ID NO: 1883976
auguuaguaagguauuaag

SEQ ID NO: 2230563 - RNA, 19 nt, Artificial Sequence
  Description of Artificial Sequence: Synthetic oligonucleotide
  Antisense strand to SEQ ID NO: 2230562
cuuaauaccuuacuaacau

SEQ ID NO: 2230564 - RNA, 19 nt, Artificial Sequence
  Description of Artificial Sequence: Synthetic oligonucleotide
  Sense strand starting at position 3327 of SEQ ID NO: 1883976
agguauuaagcuggauauu

SEQ ID NO: 2230565 - RNA, 19 nt, Artificial Sequence
  Description of Artificial Sequence: Synthetic oligonucleotide
  Antisense strand to SEQ ID NO: 2230564
aauauccagcuuaauaccu

SEQ ID NO: 2230566 - RNA, 19 nt, Artificial Sequence
  Description of Artificial Sequence: Synthetic oligonucleotide
  Sense strand starting at position 3328 of SEQ ID NO: 1883976
gguauuaagcuggauauua

SEQ ID NO: 2230567 - RNA, 19 nt, Artificial Sequence
  Description of Artificial Sequence: Synthetic oligonucleotide
  Antisense strand to SEQ ID NO: 2230566
uaauauccagcuuaauacc

SEQ ID NO: 2230568 - RNA, 19 nt, Artificial Sequence
  Description of Artificial Sequence: Synthetic oligonucleotide
  Sense strand starting at position 3355 of SEQ ID NO: 1883976
auuaucuauggaugguaga

SEQ ID NO: 2230569 - RNA, 19 nt, Artificial Sequence
  Description of Artificial Sequence: Synthetic oligonucleotide
  Antisense strand to SEQ ID NO: 2230568
ucuaccauccauagauaau

SEQ ID NO: 2230570 - RNA, 19 nt, Artificial Sequence
  Description of Artificial Sequence: Synthetic oligonucleotide
  Sense strand starting at position 3389 of SEQ ID NO: 1883976
auaggaguuucuucaggug

SEQ ID NO: 2230571 - RNA, 19 nt, Artificial Sequence
  Description of Artificial Sequence: Synthetic oligonucleotide
  Antisense strand to SEQ ID NO: 2230570
caccugaagaaacuccuau

SEQ ID NO: 2230572 - RNA, 19 nt, Artificial Sequence
  Description of Artificial Sequence: Synthetic oligonucleotide
  Sense strand starting at position 3416 of SEQ ID NO: 1883976
guuuccuauccugauuguu

SEQ ID NO: 2230573 - RNA, 19 nt, Artificial Sequence
  Description of Artificial Sequence: Synthetic oligonucleotide
  Antisense strand to SEQ ID NO: 2230572
aacaaucaggauaggaaac

SEQ ID NO: 2230574 - RNA, 19 nt, Artificial Sequence
  Description of Artificial Sequence: Synthetic oligonucleotide
  Sense strand starting at position 3425 of SEQ ID NO: 1883976
ccugauuguugguuacaca

SEQ ID NO: 2230575 - RNA, 19 nt, Artificial Sequence
  Description of Artificial Sequence: Synthetic oligonucleotide
  Antisense strand to SEQ ID NO: 2230574
uguguaaccaacaaucagg

SEQ ID NO: 2230576 - RNA, 19 nt, Artificial Sequence
  Description of Artificial Sequence: Synthetic oligonucleotide
  Sense strand starting at position 3545 of SEQ ID NO: 1883976
augugaacccuugaugagu

SEQ ID NO: 2230577 - RNA, 19 nt, Artificial Sequence
  Description of Artificial Sequence: Synthetic oligonucleotide
  Antisense strand to SEQ ID NO: 2230576
acucaucaaggguucacau

SEQ ID NO: 2230578 - RNA, 19 nt, Artificial Sequence
  Description of Artificial Sequence: Synthetic oligonucleotide
  Sense strand starting at position 3679 of SEQ ID NO: 1883976
cuuggaacaguuuagcauu

SEQ ID NO: 2230579 - RNA, 19 nt, Artificial Sequence
  Description of Artificial Sequence: Synthetic oligonucleotide
  Antisense strand to SEQ ID NO: 2230578
aaugcuaaacuguuccaag

SEQ ID NO: 2230580 - RNA, 19 nt, Artificial Sequence
  Description of Artificial Sequence: Synthetic oligonucleotide
  Sense strand starting at position 3681 of SEQ ID NO: 1883976
uggaacaguuuagcauuaa

SEQ ID NO: 2230581 - RNA, 19 nt, Artificial Sequence
  Description of Artificial Sequence: Synthetic oligonucleotide
  Antisense strand to SEQ ID NO: 2230580
uuaaugcuaaacuguucca

SEQ ID NO: 2230582 - RNA, 19 nt, Artificial Sequence
  Description of Artificial Sequence: Synthetic oligonucleotide
  Sense strand starting at position 3720 of SEQ ID NO: 1883976
cgacuuugauuacugcaga

SEQ ID NO: 2230583 - RNA, 19 nt, Artificial Sequence
  Description of Artificial Sequence: Synthetic oligonucleotide
  Antisense strand to SEQ ID NO: 2230582
ucugcaguaaucaaagucg

SEQ ID NO: 2230584 - RNA, 19 nt, Artificial Sequence
  Description of Artificial Sequence: Synthetic oligonucleotide
  Sense strand starting at position 3723 of SEQ ID NO: 1883976
cuuugauuacugcagagua

SEQ ID NO: 2230585 - RNA, 19 nt, Artificial Sequence
  Description of Artificial Sequence: Synthetic oligonucleotide
  Antisense strand to SEQ ID NO: 2230584
uacucugcaguaaucaaag

SEQ ID NO: 2230586 - RNA, 19 nt, Artificial Sequence
  Description of Artificial Sequence: Synthetic oligonucleotide
  Sense strand starting at position 3725 of SEQ ID NO: 1883976
uugauuacugcagaguaga

SEQ ID NO: 2230587 - RNA, 19 nt, Artificial Sequence
  Description of Artificial Sequence: Synthetic oligonucleotide
  Antisense strand to SEQ ID NO: 2230586
ucuacucugcaguaaucaa

SEQ ID NO: 2230588 - RNA, 19 nt, Artificial Sequence
  Description of Artificial Sequence: Synthetic oligonucleotide
  Sense strand starting at position 119 of SEQ ID NO: 1883977
ccggcugauucugucauuu

SEQ ID NO: 2230589 - RNA, 19 nt, Artificial Sequence
  Description of Artificial Sequence: Synthetic oligonucleotide
  Antisense strand to SEQ ID NO: 2230588
aaaugacagaaucagccgg

SEQ ID NO: 2230590 - RNA, 19 nt, Artificial Sequence
  Description of Artificial Sequence: Synthetic oligonucleotide
  Sense strand starting at position 617 of SEQ ID NO: 1883977
aaagacugggucuggcaau

SEQ ID NO: 2230591 - RNA, 19 nt, Artificial Sequence
  Description of Artificial Sequence: Synthetic oligonucleotide
  Antisense strand to SEQ ID NO: 2230590
auugccagacccagucuuu

SEQ ID NO: 2230592 - RNA, 19 nt, Artificial Sequence
  Description of Artificial Sequence: Synthetic oligonucleotide
  Sense strand starting at position 675 of SEQ ID NO: 1883977
ccaucugggccugauaauu

SEQ ID NO: 2230593 - RNA, 19 nt, Artificial Sequence
  Description of Artificial Sequence: Synthetic oligonucleotide
  Antisense strand to SEQ ID NO: 2230592
aauuaucaggcccagaugg

SEQ ID NO: 2230594 - RNA, 19 nt, Artificial Sequence
  Description of Artificial Sequence: Synthetic oligonucleotide
  Sense strand starting at position 699 of SEQ ID NO: 1883977
ggacucucauuccucagau

SEQ ID NO: 2230595 - RNA, 19 nt, Artificial Sequence
  Description of Artificial Sequence: Synthetic oligonucleotide
  Antisense strand to SEQ ID NO: 2230594
aucugaggaaugagagucc

SEQ ID NO: 2230596 - RNA, 19 nt, Artificial Sequence
  Description of Artificial Sequence: Synthetic oligonucleotide
  Sense strand starting at position 947 of SEQ ID NO: 1883977
ggaauucgauacuuaagcu

SEQ ID NO: 2230597 - RNA, 19 nt, Artificial Sequence
  Description of Artificial Sequence: Synthetic oligonucleotide
  Antisense strand to SEQ ID NO: 2230596
agcuuaaguaucgaauucc

SEQ ID NO: 2230598 - RNA, 19 nt, Artificial Sequence
  Description of Artificial Sequence: Synthetic oligonucleotide
  Sense strand starting at position 951 of SEQ ID NO: 1883977
uucgauacuuaagcuauga

SEQ ID NO: 2230599 - RNA, 19 nt, Artificial Sequence
  Description of Artificial Sequence: Synthetic oligonucleotide
  Antisense strand to SEQ ID NO: 2230598
ucauagcuuaaguaucgaa

SEQ ID NO: 2230600 - RNA, 19 nt, Artificial Sequence
  Description of Artificial Sequence: Synthetic oligonucleotide
  Sense strand starting at position 1481 of SEQ ID NO: 1883977
ccaugaaagucccugaaac

SEQ ID NO: 2230601 - RNA, 19 nt, Artificial Sequence
  Description of Artificial Sequence: Synthetic oligonucleotide
  Antisense strand to SEQ ID NO: 2230600
guuucagggacuuucaugg

SEQ ID NO: 2230602 - RNA, 19 nt, Artificial Sequence
  Description of Artificial Sequence: Synthetic oligonucleotide
  Sense strand starting at position 1532 of SEQ ID NO: 1883977
aucagacugaaguguaaga

SEQ ID NO: 2230603 - RNA, 19 nt, Artificial Sequence
  Description of Artificial Sequence: Synthetic oligonucleotide
  Antisense strand to SEQ ID NO: 2230602
ucuuacacuucagucugau

SEQ ID NO: 2230604 - RNA, 19 nt, Artificial Sequence
  Description of Artificial Sequence: Synthetic oligonucleotide
  Sense strand starting at position 1539 of SEQ ID NO: 1883977
ugaaguguaagauggacau

SEQ ID NO: 2230605 - RNA, 19 nt, Artificial Sequence
  Description of Artificial Sequence: Synthetic oligonucleotide
  Antisense strand to SEQ ID NO: 2230604
auguccaucuuacacuuca

SEQ ID NO: 2230606 - RNA, 19 nt, Artificial Sequence
  Description of Artificial Sequence: Synthetic oligonucleotide
  Sense strand starting at position 1552 of SEQ ID NO: 1883977
ggacauuacuaagucuuaa

SEQ ID NO: 2230607 - RNA, 19 nt, Artificial Sequence
  Description of Artificial Sequence: Synthetic oligonucleotide
  Antisense strand to SEQ ID NO: 2230606
uuaagacuuaguaaugucc

SEQ ID NO: 2230608 - RNA, 19 nt, Artificial Sequence
  Description of Artificial Sequence: Synthetic oligonucleotide
  Sense strand starting at position 1581 of SEQ ID NO: 1883977
auguuuauaccucacaggu

SEQ ID NO: 2230609 - RNA, 19 nt, Artificial Sequence
  Description of Artificial Sequence: Synthetic oligonucleotide
  Antisense strand to SEQ ID NO: 2230608
accugugagguauaaacau

SEQ ID NO: 2230610 - RNA, 19 nt, Artificial Sequence
  Description of Artificial Sequence: Synthetic oligonucleotide
  Sense strand starting at position 1588 of SEQ ID NO: 1883977
uaccucacagguugagaua

SEQ ID NO: 2230611 - RNA, 19 nt, Artificial Sequence
  Description of Artificial Sequence: Synthetic oligonucleotide
  Antisense strand to SEQ ID NO: 2230610
uaucucaaccugugaggua

SEQ ID NO: 2230612 - RNA, 19 nt, Artificial Sequence
  Description of Artificial Sequence: Synthetic oligonucleotide
  Sense strand starting at position 1627 of SEQ ID NO: 1883977
uguaaagugcauuagggua

SEQ ID NO: 2230613 - RNA, 19 nt, Artificial Sequence
  Description of Artificial Sequence: Synthetic oligonucleotide
  Antisense strand to SEQ ID NO: 2230612
uacccuaaugcacuuuaca

SEQ ID NO: 2230614 - RNA, 19 nt, Artificial Sequence
  Description of Artificial Sequence: Synthetic oligonucleotide
  Sense strand starting at position 2073 of SEQ ID NO: 1883977
cgaggcaagcucuauagau

SEQ ID NO: 2230615 - RNA, 19 nt, Artificial Sequence
  Description of Artificial Sequence: Synthetic oligonucleotide
  Antisense strand to SEQ ID NO: 2230614
aucuauagagcuugccucg

SEQ ID NO: 2230616 - RNA, 19 nt, Artificial Sequence
  Description of Artificial Sequence: Synthetic oligonucleotide
  Sense strand starting at position 2075 of SEQ ID NO: 1883977
aggcaagcucuauagaugu

SEQ ID NO: 2230617 - RNA, 19 nt, Artificial Sequence
  Description of Artificial Sequence: Synthetic oligonucleotide
  Antisense strand to SEQ ID NO: 2230616
acaucuauagagcuugccu

SEQ ID NO: 2230618 - RNA, 19 nt, Artificial Sequence
  Description of Artificial Sequence: Synthetic oligonucleotide
  Sense strand starting at position 2082 of SEQ ID NO: 1883977
cucuauagaugucuacuga

SEQ ID NO: 2230619 - RNA, 19 nt, Artificial Sequence
  Description of Artificial Sequence: Synthetic oligonucleotide
  Antisense strand to SEQ ID NO: 2230618
ucaguagacaucuauagag

SEQ ID NO: 2230620 - RNA, 19 nt, Artificial Sequence
  Description of Artificial Sequence: Synthetic oligonucleotide
  Sense strand starting at position 2187 of SEQ ID NO: 1883977
ggugucuuuaccgaaccaa

SEQ ID NO: 2230621 - RNA, 19 nt, Artificial Sequence
  Description of Artificial Sequence: Synthetic oligonucleotide
  Antisense strand to SEQ ID NO: 2230620
uugguucgguaaagacacc

SEQ ID NO: 2230622 - RNA, 19 nt, Artificial Sequence
  Description of Artificial Sequence: Synthetic oligonucleotide
  Sense strand starting at position 2208 of SEQ ID NO: 1883977
cuggguuaggcagauguaa

SEQ ID NO: 2230623 - RNA, 19 nt, Artificial Sequence
  Description of Artificial Sequence: Synthetic oligonucleotide
  Antisense strand to SEQ ID NO: 2230622
uuacaucugccuaacccag

SEQ ID NO: 2230624 - RNA, 19 nt, Artificial Sequence
  Description of Artificial Sequence: Synthetic oligonucleotide
  Sense strand starting at position 2210 of SEQ ID NO: 1883977
ggguuaggcagauguaaug

SEQ ID NO: 2230625 - RNA, 19 nt, Artificial Sequence
  Description of Artificial Sequence: Synthetic oligonucleotide
  Antisense strand to SEQ ID NO: 2230624
cauuacaucugccuaaccc

SEQ ID NO: 2230626 - RNA, 19 nt, Artificial Sequence
  Description of Artificial Sequence: Synthetic oligonucleotide
  Sense strand starting at position 2221 of SEQ ID NO: 1883977
auguaaugagcccaccuau

SEQ ID NO: 2230627 - RNA, 19 nt, Artificial Sequence
  Description of Artificial Sequence: Synthetic oligonucleotide
  Antisense strand to SEQ ID NO: 2230626
auaggugggcucauuacau

SEQ ID NO: 2230628 - RNA, 19 nt, Artificial Sequence
  Description of Artificial Sequence: Synthetic oligonucleotide
  Sense strand starting at position 2313 of SEQ ID NO: 1883977
ugcgcacugagagaauaaa

SEQ ID NO: 2230629 - RNA, 19 nt, Artificial Sequence
  Description of Artificial Sequence: Synthetic oligonucleotide
  Antisense strand to SEQ ID NO: 2230628
uuuauucucucagugcgca

SEQ ID NO: 2230630 - RNA, 19 nt, Artificial Sequence
  Description of Artificial Sequence: Synthetic oligonucleotide
  Sense strand starting at position 2455 of SEQ ID NO: 1883977
gaggguggcaagcagaaau

SEQ ID NO: 2230631 - RNA, 19 nt, Artificial Sequence
  Description of Artificial Sequence: Synthetic oligonucleotide
  Antisense strand to SEQ ID NO: 2230630
auuucugcuugccacccuc

SEQ ID NO: 2230632 - RNA, 19 nt, Artificial Sequence
  Description of Artificial Sequence: Synthetic oligonucleotide
  Sense strand starting at position 2466 of SEQ ID NO: 1883977
gcagaaaugguacauucca

SEQ ID NO: 2230633 - RNA, 19 nt, Artificial Sequence
  Description of Artificial Sequence: Synthetic oligonucleotide
  Antisense strand to SEQ ID NO: 2230632
uggaauguaccauuucugc

SEQ ID NO: 2230634 - RNA, 19 nt, Artificial Sequence
  Description of Artificial Sequence: Synthetic oligonucleotide
  Sense strand starting at position 2508 of SEQ ID NO: 1883977
ucgcgucuccuguucuauu

SEQ ID NO: 2230635 - RNA, 19 nt, Artificial Sequence
  Description of Artificial Sequence: Synthetic oligonucleotide
  Antisense strand to SEQ ID NO: 2230634
aauagaacaggagacgcga

SEQ ID NO: 2230636 - RNA, 19 nt, Artificial Sequence
  Description of Artificial Sequence: Synthetic oligonucleotide
  Sense strand starting at position 2756 of SEQ ID NO: 1883977
gucuucuuccagggaacga

SEQ ID NO: 2230637 - RNA, 19 nt, Artificial Sequence
  Description of Artificial Sequence: Synthetic oligonucleotide
  Antisense strand to SEQ ID NO: 2230636
ucguucccuggaagaagac

SEQ ID NO: 2230638 - RNA, 19 nt, Artificial Sequence
  Description of Artificial Sequence: Synthetic oligonucleotide
  Sense strand starting at position 3562 of SEQ ID NO: 1883977
ggaucuuauucccuagggu

SEQ ID NO: 2230639 - RNA, 19 nt, Artificial Sequence
  Description of Artificial Sequence: Synthetic oligonucleotide
  Antisense strand to SEQ ID NO: 2230638
acccuagggaauaagaucc

SEQ ID NO: 2230640 - RNA, 19 nt, Artificial Sequence
  Description of Artificial Sequence: Synthetic oligonucleotide
  Sense strand starting at position 3563 of SEQ ID NO: 1883977
gaucuuauucccuaggguu

SEQ ID NO: 2230641 - RNA, 19 nt, Artificial Sequence
  Description of Artificial Sequence: Synthetic oligonucleotide
  Antisense strand to SEQ ID NO: 2230640
aacccuagggaauaagauc

SEQ ID NO: 2230642 - RNA, 19 nt, Artificial Sequence
  Description of Artificial Sequence: Synthetic oligonucleotide
  Sense strand starting at position 3603 of SEQ ID NO: 1883977
auguguagugcuucuguca

SEQ ID NO: 2230643 - RNA, 19 nt, Artificial Sequence
  Description of Artificial Sequence: Synthetic oligonucleotide
  Antisense strand to SEQ ID NO: 2230642
ugacagaagcacuacacau

SEQ ID NO: 2230644 - RNA, 19 nt, Artificial Sequence
  Description of Artificial Sequence: Synthetic oligonucleotide
  Sense strand starting at position 3657 of SEQ ID NO: 1883977
cuuguacuucuggagugaa

SEQ ID NO: 2230645 - RNA, 19 nt, Artificial Sequence
  Description of Artificial Sequence: Synthetic oligonucleotide
  Antisense strand to SEQ ID NO: 2230644
uucacuccagaaguacaag

SEQ ID NO: 2230646 - RNA, 19 nt, Artificial Sequence
  Description of Artificial Sequence: Synthetic oligonucleotide
  Sense strand starting at position 3660 of SEQ ID NO: 1883977
guacuucuggagugaagag

SEQ ID NO: 2230647 - RNA, 19 nt, Artificial Sequence
  Description of Artificial Sequence: Synthetic oligonucleotide
  Antisense strand to SEQ ID NO: 2230646
cucuucacuccagaaguac

SEQ ID NO: 2230648 - RNA, 19 nt, Artificial Sequence
  Description of Artificial Sequence: Synthetic oligonucleotide
  Sense strand starting at position 3705 of SEQ ID NO: 1883977
aguuccacuuggcuuagaa

SEQ ID NO: 2230649 - RNA, 19 nt, Artificial Sequence
  Description of Artificial Sequence: Synthetic oligonucleotide
  Antisense strand to SEQ ID NO: 2230648
uucuaagccaaguggaacu

SEQ ID NO: 2230650 - RNA, 19 nt, Artificial Sequence
  Description of Artificial Sequence: Synthetic oligonucleotide
  Sense strand starting at position 3707 of SEQ ID NO: 1883977
uuccacuuggcuuagaaua

SEQ ID NO: 2230651 - RNA, 19 nt, Artificial Sequence
  Description of Artificial Sequence: Synthetic oligonucleotide
  Antisense strand to SEQ ID NO: 2230650
uauucuaagccaaguggaa

SEQ ID NO: 2230652 - RNA, 19 nt, Artificial Sequence
  Description of Artificial Sequence: Synthetic oligonucleotide
  Sense strand starting at position 3799 of SEQ ID NO: 1883977
uacuuugcucucgagggau

SEQ ID NO: 2230653 - RNA, 19 nt, Artificial Sequence
  Description of Artificial Sequence: Synthetic oligonucleotide
  Antisense strand to SEQ ID NO: 2230652
aucccucgagagcaaagua

SEQ ID NO: 2230654 - RNA, 19 nt, Artificial Sequence
  Description of Artificial Sequence: Synthetic oligonucleotide
  Sense strand starting at position 3802 of SEQ ID NO: 1883977
uuugcucucgagggaugaa

SEQ ID NO: 2230655 - RNA, 19 nt, Artificial Sequence
  Description of Artificial Sequence: Synthetic oligonucleotide
  Antisense strand to SEQ ID NO: 2230654
uucaucccucgagagcaaa

SEQ ID NO: 2230656 - RNA, 19 nt, Artificial Sequence
  Description of Artificial Sequence: Synthetic oligonucleotide
  Sense strand starting at position 3803 of SEQ ID NO: 1883977
uugcucucgagggaugaaa

SEQ ID NO: 2230657 - RNA, 19 nt, Artificial Sequence
  Description of Artificial Sequence: Synthetic oligonucleotide
  Antisense strand to SEQ ID NO: 2230656
uuucaucccucgagagcaa

SEQ ID NO: 2230658 - RNA, 19 nt, Artificial Sequence
  Description of Artificial Sequence: Synthetic oligonucleotide
  Sense strand starting at position 3805 of SEQ ID NO: 1883977
gcucucgagggaugaaacu

SEQ ID NO: 2230659 - RNA, 19 nt, Artificial Sequence
  Description of Artificial Sequence: Synthetic oligonucleotide
  Antisense strand to SEQ ID NO: 2230658
aguuucaucccucgagagc

SEQ ID NO: 2230660 - RNA, 19 nt, Artificial Sequence
  Description of Artificial Sequence: Synthetic oligonucleotide
  Sense strand starting at position 3816 of SEQ ID NO: 1883977
augaaacuuuggcuuuaau

SEQ ID NO: 2230661 - RNA, 19 nt, Artificial Sequence
  Description of Artificial Sequence: Synthetic oligonucleotide
  Antisense strand to SEQ ID NO: 2230660
auuaaagccaaaguuucau

SEQ ID NO: 2230662 - RNA, 19 nt, Artificial Sequence
  Description of Artificial Sequence: Synthetic oligonucleotide
  Sense strand starting at position 3838 of SEQ ID NO: 1883977
agauucucgaaguaucuga

SEQ ID NO: 2230663 - RNA, 19 nt, Artificial Sequence
  Description of Artificial Sequence: Synthetic oligonucleotide
  Antisense strand to SEQ ID NO: 2230662
ucagauacuucgagaaucu

SEQ ID NO: 2230664 - RNA, 19 nt, Artificial Sequence
  Description of Artificial Sequence: Synthetic oligonucleotide
  Sense strand starting at position 3842 of SEQ ID NO: 1883977
ucucgaaguaucugagaug

SEQ ID NO: 2230665 - RNA, 19 nt, Artificial Sequence
  Description of Artificial Sequence: Synthetic oligonucleotide
  Antisense strand to SEQ ID NO: 2230664
caucucagauacuucgaga

SEQ ID NO: 2230666 - RNA, 19 nt, Artificial Sequence
  Description of Artificial Sequence: Synthetic oligonucleotide
  Sense strand starting at position 3854 of SEQ ID NO: 1883977
ugagaugcguaauuggaau

SEQ ID NO: 2230667 - RNA, 19 nt, Artificial Sequence
  Description of Artificial Sequence: Synthetic oligonucleotide
  Antisense strand to SEQ ID NO: 2230666
auuccaauuacgcaucuca

SEQ ID NO: 2230668 - RNA, 19 nt, Artificial Sequence
  Description of Artificial Sequence: Synthetic oligonucleotide
  Sense strand starting at position 150 of SEQ ID NO: 1883978
aucugagaccaucaagcuu

SEQ ID NO: 2230669 - RNA, 19 nt, Artificial Sequence
  Description of Artificial Sequence: Synthetic oligonucleotide
  Antisense strand to SEQ ID NO: 2230668
aagcuugauggucucagau

SEQ ID NO: 2230670 - RNA, 19 nt, Artificial Sequence
  Description of Artificial Sequence: Synthetic oligonucleotide
  Sense strand starting at position 190 of SEQ ID NO: 1883978
ggagaagcauaaucuccuu

SEQ ID NO: 2230671 - RNA, 19 nt, Artificial Sequence
  Description of Artificial Sequence: Synthetic oligonucleotide
  Antisense strand to SEQ ID NO: 2230670
aaggagauuaugcuucucc

SEQ ID NO: 2230672 - RNA, 19 nt, Artificial Sequence
  Description of Artificial Sequence: Synthetic oligonucleotide
  Sense strand starting at position 196 of SEQ ID NO: 1883978
gcauaaucuccuuagagcu

SEQ ID NO: 2230673 - RNA, 19 nt, Artificial Sequence
  Description of Artificial Sequence: Synthetic oligonucleotide
  Antisense strand to SEQ ID NO: 2230672
agcucuaaggagauuaugc

SEQ ID NO: 2230674 - RNA, 19 nt, Artificial Sequence
  Description of Artificial Sequence: Synthetic oligonucleotide
  Sense strand starting at position 551 of SEQ ID NO: 1883978
cugagagaugcucaccuca

SEQ ID NO: 2230675 - RNA, 19 nt, Artificial Sequence
  Description of Artificial Sequence: Synthetic oligonucleotide
  Antisense strand to SEQ ID NO: 2230674
ugaggugagcaucucucag

SEQ ID NO: 2230676 - RNA, 19 nt, Artificial Sequence
  Description of Artificial Sequence: Synthetic oligonucleotide
  Sense strand starting at position 584 of SEQ ID NO: 1883978
ugcacaaagaggugaguau

SEQ ID NO: 2230677 - RNA, 19 nt, Artificial Sequence
  Description of Artificial Sequence: Synthetic oligonucleotide
  Antisense strand to SEQ ID NO: 2230676
auacucaccucuuugugca

SEQ ID NO: 2230678 - RNA, 19 nt, Artificial Sequence
  Description of Artificial Sequence: Synthetic oligonucleotide
  Sense strand starting at position 585 of SEQ ID NO: 1883978
gcacaaagaggugaguauu

SEQ ID NO: 2230679 - RNA, 19 nt, Artificial Sequence
  Description of Artificial Sequence: Synthetic oligonucleotide
  Antisense strand to SEQ ID NO: 2230678
aauacucaccucuuugugc

SEQ ID NO: 2230680 - RNA, 19 nt, Artificial Sequence
  Description of Artificial Sequence: Synthetic oligonucleotide
  Sense strand starting at position 593 of SEQ ID NO: 1883978
aggugaguauugguuucaa

SEQ ID NO: 2230681 - RNA, 19 nt, Artificial Sequence
  Description of Artificial Sequence: Synthetic oligonucleotide
  Antisense strand to SEQ ID NO: 2230680
uugaaaccaauacucaccu

SEQ ID NO: 2230682 - RNA, 19 nt, Artificial Sequence
  Description of Artificial Sequence: Synthetic oligonucleotide
  Sense strand starting at position 670 of SEQ ID NO: 1883978
aggcaaaggucuguauaca

SEQ ID NO: 2230683 - RNA, 19 nt, Artificial Sequence
  Description of Artificial Sequence: Synthetic oligonucleotide
  Antisense strand to SEQ ID NO: 2230682
uguauacagaccuuugccu

SEQ ID NO: 2230684 - RNA, 19 nt, Artificial Sequence
  Description of Artificial Sequence: Synthetic oligonucleotide
  Sense strand starting at position 671 of SEQ ID NO: 1883978
ggcaaaggucuguauacau

SEQ ID NO: 2230685 - RNA, 19 nt, Artificial Sequence
  Description of Artificial Sequence: Synthetic oligonucleotide
  Antisense strand to SEQ ID NO: 2230684
auguauacagaccuuugcc

SEQ ID NO: 2230686 - RNA, 19 nt, Artificial Sequence
  Description of Artificial Sequence: Synthetic oligonucleotide
  Sense strand starting at position 889 of SEQ ID NO: 1883978
aggauaacaucuguuggua

SEQ ID NO: 2230687 - RNA, 19 nt, Artificial Sequence
  Description of Artificial Sequence: Synthetic oligonucleotide
  Antisense strand to SEQ ID NO: 2230686
uaccaacagauguuauccu

SEQ ID NO: 2230688 - RNA, 19 nt, Artificial Sequence
  Description of Artificial Sequence: Synthetic oligonucleotide
  Sense strand starting at position 929 of SEQ ID NO: 1883978
auugcuaguguuuaagaua

SEQ ID NO: 2230689 - RNA, 19 nt, Artificial Sequence
  Description of Artificial Sequence: Synthetic oligonucleotide
  Antisense strand to SEQ ID NO: 2230688
uaucuuaaacacuagcaau

SEQ ID NO: 2230690 - RNA, 19 nt, Artificial Sequence
  Description of Artificial Sequence: Synthetic oligonucleotide
  Sense strand starting at position 1264 of SEQ ID NO: 1883978
uaagauaagugguucuucu

SEQ ID NO: 2230691 - RNA, 19 nt, Artificial Sequence
  Description of Artificial Sequence: Synthetic oligonucleotide
  Antisense strand to SEQ ID NO: 2230690
agaagaaccacuuaucuua

SEQ ID NO: 2230692 - RNA, 19 nt, Artificial Sequence
  Description of Artificial Sequence: Synthetic oligonucleotide
  Sense strand starting at position 1482 of SEQ ID NO: 1883978
uuaccaagaucagugaguu

SEQ ID NO: 2230693 - RNA, 19 nt, Artificial Sequence
  Description of Artificial Sequence: Synthetic oligonucleotide
  Antisense strand to SEQ ID NO: 2230692
aacucacugaucuugguaa

SEQ ID NO: 2230694 - RNA, 19 nt, Artificial Sequence
  Description of Artificial Sequence: Synthetic oligonucleotide
  Sense strand starting at position 1483 of SEQ ID NO: 1883978
uaccaagaucagugaguuu

SEQ ID NO: 2230695 - RNA, 19 nt, Artificial Sequence
  Description of Artificial Sequence: Synthetic oligonucleotide
  Antisense strand to SEQ ID NO: 2230694
aaacucacugaucuuggua

SEQ ID NO: 2230696 - RNA, 19 nt, Artificial Sequence
  Description of Artificial Sequence: Synthetic oligonucleotide
  Sense strand starting at position 1520 of SEQ ID NO: 1883978
aacagugcugcagagacaa

SEQ ID NO: 2230697 - RNA, 19 nt, Artificial Sequence
  Description of Artificial Sequence: Synthetic oligonucleotide
  Antisense strand to SEQ ID NO: 2230696
uugucucugcagcacuguu

SEQ ID NO: 2230698 - RNA, 19 nt, Artificial Sequence
  Description of Artificial Sequence: Synthetic oligonucleotide
  Sense strand starting at position 1691 of SEQ ID NO: 1883978
aguguauagccagaauuga

SEQ ID NO: 2230699 - RNA, 19 nt, Artificial Sequence
  Description of Artificial Sequence: Synthetic oligonucleotide
  Antisense strand to SEQ ID NO: 2230698
ucaauucuggcuauacacu

SEQ ID NO: 2230700 - RNA, 19 nt, Artificial Sequence
  Description of Artificial Sequence: Synthetic oligonucleotide
  Sense strand starting at position 1993 of SEQ ID NO: 1883978
caaaguagugcugauaagu

SEQ ID NO: 2230701 - RNA, 19 nt, Artificial Sequence
  Description of Artificial Sequence: Synthetic oligonucleotide
  Antisense strand to SEQ ID NO: 2230700
acuuaucagcacuacuuug

SEQ ID NO: 2230702 - RNA, 19 nt, Artificial Sequence
  Description of Artificial Sequence: Synthetic oligonucleotide
  Sense strand starting at position 2003 of SEQ ID NO: 1883978
cugauaaguaggcagguuu

SEQ ID NO: 2230703 - RNA, 19 nt, Artificial Sequence
  Description of Artificial Sequence: Synthetic oligonucleotide
  Antisense strand to SEQ ID NO: 2230702
aaaccugccuacuuaucag

SEQ ID NO: 2230704 - RNA, 19 nt, Artificial Sequence
  Description of Artificial Sequence: Synthetic oligonucleotide
  Sense strand starting at position 2085 of SEQ ID NO: 1883978
gguaaagagcgagaauagu

SEQ ID NO: 2230705 - RNA, 19 nt, Artificial Sequence
  Description of Artificial Sequence: Synthetic oligonucleotide
  Antisense strand to SEQ ID NO: 2230704
acuauucucgcucuuuacc

SEQ ID NO: 2230706 - RNA, 19 nt, Artificial Sequence
  Description of Artificial Sequence: Synthetic oligonucleotide
  Sense strand starting at position 2093 of SEQ ID NO: 1883978
gcgagaauagucuaaggag

SEQ ID NO: 2230707 - RNA, 19 nt, Artificial Sequence
  Description of Artificial Sequence: Synthetic oligonucleotide
  Antisense strand to SEQ ID NO: 2230706
cuccuuagacuauucucgc

SEQ ID NO: 2230708 - RNA, 19 nt, Artificial Sequence
  Description of Artificial Sequence: Synthetic oligonucleotide
  Sense strand starting at position 2112 of SEQ ID NO: 1883978
acacucugucaugguaaac

SEQ ID NO: 2230709 - RNA, 19 nt, Artificial Sequence
  Description of Artificial Sequence: Synthetic oligonucleotide
  Antisense strand to SEQ ID NO: 2230708
guuuaccaugacagagugu

SEQ ID NO: 2230710 - RNA, 19 nt, Artificial Sequence
  Description of Artificial Sequence: Synthetic oligonucleotide
  Sense strand starting at position 2139 of SEQ ID NO: 1883978
ugugauguauaucugggau

SEQ ID NO: 2230711 - RNA, 19 nt, Artificial Sequence
  Description of Artificial Sequence: Synthetic oligonucleotide
  Antisense strand to SEQ ID NO: 2230710
aucccagauauacaucaca

SEQ ID NO: 2230712 - RNA, 19 nt, Artificial Sequence
  Description of Artificial Sequence: Synthetic oligonucleotide
  Sense strand starting at position 2142 of SEQ ID NO: 1883978
gauguauaucugggauugu

SEQ ID NO: 2230713 - RNA, 19 nt, Artificial Sequence
  Description of Artificial Sequence: Synthetic oligonucleotide
  Antisense strand to SEQ ID NO: 2230712
acaaucccagauauacauc

SEQ ID NO: 2230714 - RNA, 19 nt, Artificial Sequence
  Description of Artificial Sequence: Synthetic oligonucleotide
  Sense strand starting at position 2225 of SEQ ID NO: 1883978
aagugacuuugaccuugua

SEQ ID NO: 2230715 - RNA, 19 nt, Artificial Sequence
  Description of Artificial Sequence: Synthetic oligonucleotide
  Antisense strand to SEQ ID NO: 2230714
uacaaggucaaagucacuu

SEQ ID NO: 2230716 - RNA, 19 nt, Artificial Sequence
  Description of Artificial Sequence: Synthetic oligonucleotide
  Sense strand starting at position 2228 of SEQ ID NO: 1883978
ugacuuugaccuuguauag

SEQ ID NO: 2230717 - RNA, 19 nt, Artificial Sequence
  Description of Artificial Sequence: Synthetic oligonucleotide
  Antisense strand to SEQ ID NO: 2230716
cuauacaaggucaaaguca

SEQ ID NO: 2230718 - RNA, 19 nt, Artificial Sequence
  Description of Artificial Sequence: Synthetic oligonucleotide
  Sense strand starting at position 2353 of SEQ ID NO: 1883978
agaggaaguuuccauuuaa

SEQ ID NO: 2230719 - RNA, 19 nt, Artificial Sequence
  Description of Artificial Sequence: Synthetic oligonucleotide
  Antisense strand to SEQ ID NO: 2230718
uuaaauggaaacuuccucu

SEQ ID NO: 2230720 - RNA, 19 nt, Artificial Sequence
  Description of Artificial Sequence: Synthetic oligonucleotide
  Sense strand starting at position 2406 of SEQ ID NO: 1883978
aggagugcaucuuccagau

SEQ ID NO: 2230721 - RNA, 19 nt, Artificial Sequence
  Description of Artificial Sequence: Synthetic oligonucleotide
  Antisense strand to SEQ ID NO: 2230720
aucuggaagaugcacuccu

SEQ ID NO: 2230722 - RNA, 19 nt, Artificial Sequence
  Description of Artificial Sequence: Synthetic oligonucleotide
  Sense strand starting at position 2427 of SEQ ID NO: 1883978
ucugaaaguccugaguaac

SEQ ID NO: 2230723 - RNA, 19 nt, Artificial Sequence
  Description of Artificial Sequence: Synthetic oligonucleotide
  Antisense strand to SEQ ID NO: 2230722
guuacucaggacuuucaga

SEQ ID NO: 2230724 - RNA, 19 nt, Artificial Sequence
  Description of Artificial Sequence: Synthetic oligonucleotide
  Sense strand starting at position 2470 of SEQ ID NO: 1883978
agaguugaauucuuuacuc

SEQ ID NO: 2230725 - RNA, 19 nt, Artificial Sequence
  Description of Artificial Sequence: Synthetic oligonucleotide
  Antisense strand to SEQ ID NO: 2230724
gaguaaagaauucaacucu

SEQ ID NO: 2230726 - RNA, 19 nt, Artificial Sequence
  Description of Artificial Sequence: Synthetic oligonucleotide
  Sense strand starting at position 2472 of SEQ ID NO: 1883978
aguugaauucuuuacucag

SEQ ID NO: 2230727 - RNA, 19 nt, Artificial Sequence
  Description of Artificial Sequence: Synthetic oligonucleotide
  Antisense strand to SEQ ID NO: 2230726
cugaguaaagaauucaacu

SEQ ID NO: 2230728 - RNA, 19 nt, Artificial Sequence
  Description of Artificial Sequence: Synthetic oligonucleotide
  Sense strand starting at position 2526 of SEQ ID NO: 1883978
ccagguaugucaucaccaa

SEQ ID NO: 2230729 - RNA, 19 nt, Artificial Sequence
  Description of Artificial Sequence: Synthetic oligonucleotide
  Antisense strand to SEQ ID NO: 2230728
uuggugaugacauaccugg

SEQ ID NO: 2230730 - RNA, 19 nt, Artificial Sequence
  Description of Artificial Sequence: Synthetic oligonucleotide
  Sense strand starting at position 2731 of SEQ ID NO: 1883978
cagggagucccgggacaaa

SEQ ID NO: 2230731 - RNA, 19 nt, Artificial Sequence
  Description of Artificial Sequence: Synthetic oligonucleotide
  Antisense strand to SEQ ID NO: 2230730
uuugucccgggacucccug

SEQ ID NO: 2230732 - RNA, 19 nt, Artificial Sequence
  Description of Artificial Sequence: Synthetic oligonucleotide
  Sense strand starting at position 2834 of SEQ ID NO: 1883978
ugguguuuccaacaaagua

SEQ ID NO: 2230733 - RNA, 19 nt, Artificial Sequence
  Description of Artificial Sequence: Synthetic oligonucleotide
  Antisense strand to SEQ ID NO: 2230732
uacuuuguuggaaacacca

SEQ ID NO: 2230734 - RNA, 19 nt, Artificial Sequence
  Description of Artificial Sequence: Synthetic oligonucleotide
  Sense strand starting at position 3028 of SEQ ID NO: 1883978
aggcaugcuccagacauaa

SEQ ID NO: 2230735 - RNA, 19 nt, Artificial Sequence
  Description of Artificial Sequence: Synthetic oligonucleotide
  Antisense strand to SEQ ID NO: 2230734
uuaugucuggagcaugccu

SEQ ID NO: 2230736 - RNA, 19 nt, Artificial Sequence
  Description of Artificial Sequence: Synthetic oligonucleotide
  Sense strand starting at position 3346 of SEQ ID NO: 1883978
uuguguagaugauuaugaa

SEQ ID NO: 2230737 - RNA, 19 nt, Artificial Sequence
  Description of Artificial Sequence: Synthetic oligonucleotide
  Antisense strand to SEQ ID NO: 2230736
uucauaaucaucuacacaa

SEQ ID NO: 2230738 - RNA, 19 nt, Artificial Sequence
  Description of Artificial Sequence: Synthetic oligonucleotide
  Sense strand starting at position 3495 of SEQ ID NO: 1883978
uccaaucauggauguauca

SEQ ID NO: 2230739 - RNA, 19 nt, Artificial Sequence
  Description of Artificial Sequence: Synthetic oligonucleotide
  Antisense strand to SEQ ID NO: 2230738
ugauacauccaugauugga

SEQ ID NO: 2230740 - RNA, 19 nt, Artificial Sequence
  Description of Artificial Sequence: Synthetic oligonucleotide
  Sense strand starting at position 3518 of SEQ ID NO: 1883978
cuagucauuuaguuuaagu

SEQ ID NO: 2230741 - RNA, 19 nt, Artificial Sequence
  Description of Artificial Sequence: Synthetic oligonucleotide
  Antisense strand to SEQ ID NO: 2230740
acuuaaacuaaaugacuag

SEQ ID NO: 2230742 - RNA, 19 nt, Artificial Sequence
  Description of Artificial Sequence: Synthetic oligonucleotide
  Sense strand starting at position 3584 of SEQ ID NO: 1883978
uugccauaugaauagcuau

SEQ ID NO: 2230743 - RNA, 19 nt, Artificial Sequence
  Description of Artificial Sequence: Synthetic oligonucleotide
  Antisense strand to SEQ ID NO: 2230742
auagcuauucauauggcaa

SEQ ID NO: 2230744 - RNA, 19 nt, Artificial Sequence
  Description of Artificial Sequence: Synthetic oligonucleotide
  Sense strand starting at position 3618 of SEQ ID NO: 1883978
uuugacauuugggaugaaa

SEQ ID NO: 2230745 - RNA, 19 nt, Artificial Sequence
  Description of Artificial Sequence: Synthetic oligonucleotide
  Antisense strand to SEQ ID NO: 2230744
uuucaucccaaaugucaaa

SEQ ID NO: 2230746 - RNA, 19 nt, Artificial Sequence
  Description of Artificial Sequence: Synthetic oligonucleotide
  Sense strand starting at position 3711 of SEQ ID NO: 1883978
gugaauuacuuaccuuaug

SEQ ID NO: 2230747 - RNA, 19 nt, Artificial Sequence
  Description of Artificial Sequence: Synthetic oligonucleotide
  Antisense strand to SEQ ID NO: 2230746
cauaagguaaguaauucac

SEQ ID NO: 2230748 - RNA, 19 nt, Artificial Sequence
  Description of Artificial Sequence: Synthetic oligonucleotide
  Sense strand starting at position 106 of SEQ ID NO: 1883979
gacaacuuuagguguugga

SEQ ID NO: 2230749 - RNA, 19 nt, Artificial Sequence
  Description of Artificial Sequence: Synthetic oligonucleotide
  Antisense strand to SEQ ID NO: 2230748
uccaacaccuaaaguuguc

SEQ ID NO: 2230750 - RNA, 19 nt, Artificial Sequence
  Description of Artificial Sequence: Synthetic oligonucleotide
  Sense strand starting at position 123 of SEQ ID NO: 1883979
gagaguuaguuucucacca

SEQ ID NO: 2230751 - RNA, 19 nt, Artificial Sequence
  Description of Artificial Sequence: Synthetic oligonucleotide
  Antisense strand to SEQ ID NO: 2230750
uggugagaaacuaacucuc

SEQ ID NO: 2230752 - RNA, 19 nt, Artificial Sequence
  Description of Artificial Sequence: Synthetic oligonucleotide
  Sense strand starting at position 124 of SEQ ID NO: 1883979
agaguuaguuucucaccaa

SEQ ID NO: 2230753 - RNA, 19 nt, Artificial Sequence
  Description of Artificial Sequence: Synthetic oligonucleotide
  Antisense strand to SEQ ID NO: 2230752
uuggugagaaacuaacucu

SEQ ID NO: 2230754 - RNA, 19 nt, Artificial Sequence
  Description of Artificial Sequence: Synthetic oligonucleotide
  Sense strand starting at position 203 of SEQ ID NO: 1883979
caagauauucgucaugcug

SEQ ID NO: 2230755 - RNA, 19 nt, Artificial Sequence
  Description of Artificial Sequence: Synthetic oligonucleotide
  Antisense strand to SEQ ID NO: 2230754
cagcaugacgaauaucuug

SEQ ID NO: 2230756 - RNA, 19 nt, Artificial Sequence
  Description of Artificial Sequence: Synthetic oligonucleotide
  Sense strand starting at position 275 of SEQ ID NO: 1883979
gcuacuauaucauuaggau

SEQ ID NO: 2230757 - RNA, 19 nt, Artificial Sequence
  Description of Artificial Sequence: Synthetic oligonucleotide
  Antisense strand to SEQ ID NO: 2230756
auccuaaugauauaguagc

SEQ ID NO: 2230758 - RNA, 19 nt, Artificial Sequence
  Description of Artificial Sequence: Synthetic oligonucleotide
  Sense strand starting at position 317 of SEQ ID NO: 1883979
ugcguauguaugucacauu

SEQ ID NO: 2230759 - RNA, 19 nt, Artificial Sequence
  Description of Artificial Sequence: Synthetic oligonucleotide
  Antisense strand to SEQ ID NO: 2230758
aaugugacauacauacgca

SEQ ID NO: 2230760 - RNA, 19 nt, Artificial Sequence
  Description of Artificial Sequence: Synthetic oligonucleotide
  Sense strand starting at position 777 of SEQ ID NO: 1883979
ccaaauuguuaauuacagu

SEQ ID NO: 2230761 - RNA, 19 nt, Artificial Sequence
  Description of Artificial Sequence: Synthetic oligonucleotide
  Antisense strand to SEQ ID NO: 2230760
acuguaauuaacaauuugg

SEQ ID NO: 2230762 - RNA, 19 nt, Artificial Sequence
  Description of Artificial Sequence: Synthetic oligonucleotide
  Sense strand starting at position 850 of SEQ ID NO: 1883979
uugugcauuguuccuguua

SEQ ID NO: 2230763 - RNA, 19 nt, Artificial Sequence
  Description of Artificial Sequence: Synthetic oligonucleotide
  Antisense strand to SEQ ID NO: 2230762
uaacaggaacaaugcacaa

SEQ ID NO: 2230764 - RNA, 19 nt, Artificial Sequence
  Description of Artificial Sequence: Synthetic oligonucleotide
  Sense strand starting at position 896 of SEQ ID NO: 1883979
acgcuuggcacauaauaga

SEQ ID NO: 2230765 - RNA, 19 nt, Artificial Sequence
  Description of Artificial Sequence: Synthetic oligonucleotide
  Antisense strand to SEQ ID NO: 2230764
ucuauuaugugccaagcgu

SEQ ID NO: 2230766 - RNA, 19 nt, Artificial Sequence
  Description of Artificial Sequence: Synthetic oligonucleotide
  Sense strand starting at position 929 of SEQ ID NO: 1883979
uggucaggugaaugaacua

SEQ ID NO: 2230767 - RNA, 19 nt, Artificial Sequence
  Description of Artificial Sequence: Synthetic oligonucleotide
  Antisense strand to SEQ ID NO: 2230766
uaguucauucaccugacca

SEQ ID NO: 2230768 - RNA, 19 nt, Artificial Sequence
  Description of Artificial Sequence: Synthetic oligonucleotide
  Sense strand starting at position 960 of SEQ ID NO: 1883979
aagaaauguuaugcuuuga

SEQ ID NO: 2230769 - RNA, 19 nt, Artificial Sequence
  Description of Artificial Sequence: Synthetic oligonucleotide
  Antisense strand to SEQ ID NO: 2230768
ucaaagcauaacauuucuu

SEQ ID NO: 2230770 - RNA, 19 nt, Artificial Sequence
  Description of Artificial Sequence: Synthetic oligonucleotide
  Sense strand starting at position 1057 of SEQ ID NO: 1883979
caacuuguggaauguggau

SEQ ID NO: 2230771 - RNA, 19 nt, Artificial Sequence
  Description of Artificial Sequence: Synthetic oligonucleotide
  Antisense strand to SEQ ID NO: 2230770
auccacauuccacaaguug

SEQ ID NO: 2230772 - RNA, 19 nt, Artificial Sequence
  Description of Artificial Sequence: Synthetic oligonucleotide
  Sense strand starting at position 1059 of SEQ ID NO: 1883979
acuuguggaauguggauau

SEQ ID NO: 2230773 - RNA, 19 nt, Artificial Sequence
  Description of Artificial Sequence: Synthetic oligonucleotide
  Antisense strand to SEQ ID NO: 2230772
auauccacauuccacaagu

SEQ ID NO: 2230774 - RNA, 19 nt, Artificial Sequence
  Description of Artificial Sequence: Synthetic oligonucleotide
  Sense strand starting at position 1238 of SEQ ID NO: 1883979
aguucugaaagcuggacau

SEQ ID NO: 2230775 - RNA, 19 nt, Artificial Sequence
  Description of Artificial Sequence: Synthetic oligonucleotide
  Antisense strand to SEQ ID NO: 2230774
auguccagcuuucagaacu

SEQ ID NO: 2230776 - RNA, 19 nt, Artificial Sequence
  Description of Artificial Sequence: Synthetic oligonucleotide
  Sense strand starting at position 1255 of SEQ ID NO: 1883979
aucugagaucagcauucca

SEQ ID NO: 2230777 - RNA, 19 nt, Artificial Sequence
  Description of Artificial Sequence: Synthetic oligonucleotide
  Antisense strand to SEQ ID NO: 2230776
uggaaugcugaucucagau

SEQ ID NO: 2230778 - RNA, 19 nt, Artificial Sequence
  Description of Artificial Sequence: Synthetic oligonucleotide
  Sense strand starting at position 1485 of SEQ ID NO: 1883979
ggguuugggcuucaaccua

SEQ ID NO: 2230779 - RNA, 19 nt, Artificial Sequence
  Description of Artificial Sequence: Synthetic oligonucleotide
  Antisense strand to SEQ ID NO: 2230778
uagguugaagcccaaaccc

SEQ ID NO: 2230780 - RNA, 19 nt, Artificial Sequence
  Description of Artificial Sequence: Synthetic oligonucleotide
  Sense strand starting at position 1529 of SEQ ID NO: 1883979
uaauguagccuguaacaga

SEQ ID NO: 2230781 - RNA, 19 nt, Artificial Sequence
  Description of Artificial Sequence: Synthetic oligonucleotide
  Antisense strand to SEQ ID NO: 2230780
ucuguuacaggcuacauua

SEQ ID NO: 2230782 - RNA, 19 nt, Artificial Sequence
  Description of Artificial Sequence: Synthetic oligonucleotide
  Sense strand starting at position 1706 of SEQ ID NO: 1883979
agcagaggauuugcguauu

SEQ ID NO: 2230783 - RNA, 19 nt, Artificial Sequence
  Description of Artificial Sequence: Synthetic oligonucleotide
  Antisense strand to SEQ ID NO: 2230782
aauacgcaaauccucugcu

SEQ ID NO: 2230784 - RNA, 19 nt, Artificial Sequence
  Description of Artificial Sequence: Synthetic oligonucleotide
  Sense strand starting at position 1718 of SEQ ID NO: 1883979
gcguauuuggguuauguua

SEQ ID NO: 2230785 - RNA, 19 nt, Artificial Sequence
  Description of Artificial Sequence: Synthetic oligonucleotide
  Antisense strand to SEQ ID NO: 2230784
uaacauaacccaaauacgc

SEQ ID NO: 2230786 - RNA, 19 nt, Artificial Sequence
  Description of Artificial Sequence: Synthetic oligonucleotide
  Sense strand starting at position 1836 of SEQ ID NO: 1883979
guuguuaagcaggauuacu

SEQ ID NO: 2230787 - RNA, 19 nt, Artificial Sequence
  Description of Artificial Sequence: Synthetic oligonucleotide
  Antisense strand to SEQ ID NO: 2230786
aguaauccugcuuaacaac

SEQ ID NO: 2230788 - RNA, 19 nt, Artificial Sequence
  Description of Artificial Sequence: Synthetic oligonucleotide
  Sense strand starting at position 1915 of SEQ ID NO: 1883979
accacuugauuugaggaau

SEQ ID NO: 2230789 - RNA, 19 nt, Artificial Sequence
  Description of Artificial Sequence: Synthetic oligonucleotide
  Antisense strand to SEQ ID NO: 2230788
auuccucaaaucaaguggu

SEQ ID NO: 2230790 - RNA, 19 nt, Artificial Sequence
  Description of Artificial Sequence: Synthetic oligonucleotide
  Sense strand starting at position 1986 of SEQ ID NO: 1883979
gguuauuuccagcgugaag

SEQ ID NO: 2230791 - RNA, 19 nt, Artificial Sequence
  Description of Artificial Sequence: Synthetic oligonucleotide
  Antisense strand to SEQ ID NO: 2230790
cuucacgcuggaaauaacc

SEQ ID NO: 2230792 - RNA, 19 nt, Artificial Sequence
  Description of Artificial Sequence: Synthetic oligonucleotide
  Sense strand starting at position 1988 of SEQ ID NO: 1883979
uuauuuccagcgugaagcu

SEQ ID NO: 2230793 - RNA, 19 nt, Artificial Sequence
  Description of Artificial Sequence: Synthetic oligonucleotide
  Antisense strand to SEQ ID NO: 2230792
agcuucacgcuggaaauaa

SEQ ID NO: 2230794 - RNA, 19 nt, Artificial Sequence
  Description of Artificial Sequence: Synthetic oligonucleotide
  Sense strand starting at position 2248 of SEQ ID NO: 1883979
caggucuuuccagagcauu

SEQ ID NO: 2230795 - RNA, 19 nt, Artificial Sequence
  Description of Artificial Sequence: Synthetic oligonucleotide
  Antisense strand to SEQ ID NO: 2230794
aaugcucuggaaagaccug

SEQ ID NO: 2230796 - RNA, 19 nt, Artificial Sequence
  Description of Artificial Sequence: Synthetic oligonucleotide
  Sense strand starting at position 2776 of SEQ ID NO: 1883979
gaauguuauugagcuauua

SEQ ID NO: 2230797 - RNA, 19 nt, Artificial Sequence
  Description of Artificial Sequence: Synthetic oligonucleotide
  Antisense strand to SEQ ID NO: 2230796
uaauagcucaauaacauuc

SEQ ID NO: 2230798 - RNA, 19 nt, Artificial Sequence
  Description of Artificial Sequence: Synthetic oligonucleotide
  Sense strand starting at position 2943 of SEQ ID NO: 1883979
gugcgaguuguggcucauu

SEQ ID NO: 2230799 - RNA, 19 nt, Artificial Sequence
  Description of Artificial Sequence: Synthetic oligonucleotide
  Antisense strand to SEQ ID NO: 2230798
aaugagccacaacucgcac

SEQ ID NO: 2230800 - RNA, 19 nt, Artificial Sequence
  Description of Artificial Sequence: Synthetic oligonucleotide
  Sense strand starting at position 3022 of SEQ ID NO: 1883979
auucuuacccagcagagau

SEQ ID NO: 2230801 - RNA, 19 nt, Artificial Sequence
  Description of Artificial Sequence: Synthetic oligonucleotide
  Antisense strand to SEQ ID NO: 2230800
aucucugcuggguaagaau

SEQ ID NO: 2230802 - RNA, 19 nt, Artificial Sequence
  Description of Artificial Sequence: Synthetic oligonucleotide
  Sense strand starting at position 3089 of SEQ ID NO: 1883979
auaggcauuuggcuuuauu

SEQ ID NO: 2230803 - RNA, 19 nt, Artificial Sequence
  Description of Artificial Sequence: Synthetic oligonucleotide
  Antisense strand to SEQ ID NO: 2230802
aauaaagccaaaugccuau

SEQ ID NO: 2230804 - RNA, 19 nt, Artificial Sequence
  Description of Artificial Sequence: Synthetic oligonucleotide
  Sense strand starting at position 3099 of SEQ ID NO: 1883979
ggcuuuauuuaggcaucca

SEQ ID NO: 2230805 - RNA, 19 nt, Artificial Sequence
  Description of Artificial Sequence: Synthetic oligonucleotide
  Antisense strand to SEQ ID NO: 2230804
uggaugccuaaauaaagcc

SEQ ID NO: 2230806 - RNA, 19 nt, Artificial Sequence
  Description of Artificial Sequence: Synthetic oligonucleotide
  Sense strand starting at position 3254 of SEQ ID NO: 1883979
uuugaaaccuaguuuagga

SEQ ID NO: 2230807 - RNA, 19 nt, Artificial Sequence
  Description of Artificial Sequence: Synthetic oligonucleotide
  Antisense strand to SEQ ID NO: 2230806
uccuaaacuagguuucaaa

SEQ ID NO: 2230808 - RNA, 19 nt, Artificial Sequence
  Description of Artificial Sequence: Synthetic oligonucleotide
  Sense strand starting at position 3313 of SEQ ID NO: 1883979
uguaauugugccuaacaaa

SEQ ID NO: 2230809 - RNA, 19 nt, Artificial Sequence
  Description of Artificial Sequence: Synthetic oligonucleotide
  Antisense strand to SEQ ID NO: 2230808
uuuguuaggcacaauuaca

SEQ ID NO: 2230810 - RNA, 19 nt, Artificial Sequence
  Description of Artificial Sequence: Synthetic oligonucleotide
  Sense strand starting at position 3404 of SEQ ID NO: 1883979
agcugaaaugccuggaauc

SEQ ID NO: 2230811 - RNA, 19 nt, Artificial Sequence
  Description of Artificial Sequence: Synthetic oligonucleotide
  Antisense strand to SEQ ID NO: 2230810
gauuccaggcauuucagcu

SEQ ID NO: 2230812 - RNA, 19 nt, Artificial Sequence
  Description of Artificial Sequence: Synthetic oligonucleotide
  Sense strand starting at position 3452 of SEQ ID NO: 1883979
cuagaauuagcuggccaga

SEQ ID NO: 2230813 - RNA, 19 nt, Artificial Sequence
  Description of Artificial Sequence: Synthetic oligonucleotide
  Antisense strand to SEQ ID NO: 2230812
ucuggccagcuaauucuag

SEQ ID NO: 2230814 - RNA, 19 nt, Artificial Sequence
  Description of Artificial Sequence: Synthetic oligonucleotide
  Sense strand starting at position 3454 of SEQ ID NO: 1883979
agaauuagcuggccagauu

SEQ ID NO: 2230815 - RNA, 19 nt, Artificial Sequence
  Description of Artificial Sequence: Synthetic oligonucleotide
  Antisense strand to SEQ ID NO: 2230814
aaucuggccagcuaauucu

SEQ ID NO: 2230816 - RNA, 19 nt, Artificial Sequence
  Description of Artificial Sequence: Synthetic oligonucleotide
  Sense strand starting at position 3522 of SEQ ID NO: 1883979
acaucuggccuuggagaga

SEQ ID NO: 2230817 - RNA, 19 nt, Artificial Sequence
  Description of Artificial Sequence: Synthetic oligonucleotide
  Antisense strand to SEQ ID NO: 2230816
ucucuccaaggccagaugu

SEQ ID NO: 2230818 - RNA, 19 nt, Artificial Sequence
  Description of Artificial Sequence: Synthetic oligonucleotide
  Sense strand starting at position 3621 of SEQ ID NO: 1883979
aacguugaauaauugagua

SEQ ID NO: 2230819 - RNA, 19 nt, Artificial Sequence
  Description of Artificial Sequence: Synthetic oligonucleotide
  Antisense strand to SEQ ID NO: 2230818
uacucaauuauucaacguu

SEQ ID NO: 2230820 - RNA, 19 nt, Artificial Sequence
  Description of Artificial Sequence: Synthetic oligonucleotide
  Sense strand starting at position 3623 of SEQ ID NO: 1883979
cguugaauaauugaguaaa

SEQ ID NO: 2230821 - RNA, 19 nt, Artificial Sequence
  Description of Artificial Sequence: Synthetic oligonucleotide
  Antisense strand to SEQ ID NO: 2230820
uuuacucaauuauucaacg

SEQ ID NO: 2230822 - RNA, 19 nt, Artificial Sequence
  Description of Artificial Sequence: Synthetic oligonucleotide
  Sense strand starting at position 3647 of SEQ ID NO: 1883979
ggguuuaacuuaguaucca

SEQ ID NO: 2230823 - RNA, 19 nt, Artificial Sequence
  Description of Artificial Sequence: Synthetic oligonucleotide
  Antisense strand to SEQ ID NO: 2230822
uggauacuaaguuaaaccc

SEQ ID NO: 2230824 - RNA, 19 nt, Artificial Sequence
  Description of Artificial Sequence: Synthetic oligonucleotide
  Sense strand starting at position 3720 of SEQ ID NO: 1883979
gugaguacucacuauguac

SEQ ID NO: 2230825 - RNA, 19 nt, Artificial Sequence
  Description of Artificial Sequence: Synthetic oligonucleotide
  Antisense strand to SEQ ID NO: 2230824
guacauagugaguacucac

SEQ ID NO: 2230826 - RNA, 19 nt, Artificial Sequence
  Description of Artificial Sequence: Synthetic oligonucleotide
  Sense strand starting at position 3740 of SEQ ID NO: 1883979
agucaucacuguucuagaa

SEQ ID NO: 2230827 - RNA, 19 nt, Artificial Sequence
  Description of Artificial Sequence: Synthetic oligonucleotide
  Antisense strand to SEQ ID NO: 2230826
uucuagaacagugaugacu

SEQ ID NO: 2230828 - RNA, 19 nt, Artificial Sequence
  Description of Artificial Sequence: Synthetic oligonucleotide
  Sense strand starting at position 39 of SEQ ID NO: 1883980
ucauccucucccuaguaga

SEQ ID NO: 2230829 - RNA, 19 nt, Artificial Sequence
  Description of Artificial Sequence: Synthetic oligonucleotide
  Antisense strand to SEQ ID NO: 2230828
ucuacuagggagaggauga

SEQ ID NO: 2230830 - RNA, 19 nt, Artificial Sequence
  Description of Artificial Sequence: Synthetic oligonucleotide
  Sense strand starting at position 53 of SEQ ID NO: 1883980
guagauguucuacaguacu

SEQ ID NO: 2230831 - RNA, 19 nt, Artificial Sequence
  Description of Artificial Sequence: Synthetic oligonucleotide
  Antisense strand to SEQ ID NO: 2230830
aguacuguagaacaucuac

SEQ ID NO: 2230832 - RNA, 19 nt, Artificial Sequence
  Description of Artificial Sequence: Synthetic oligonucleotide
  Sense strand starting at position 377 of SEQ ID NO: 1883980
uugaguacucaauagccau

SEQ ID NO: 2230833 - RNA, 19 nt, Artificial Sequence
  Description of Artificial Sequence: Synthetic oligonucleotide
  Antisense strand to SEQ ID NO: 2230832
auggcuauugaguacucaa

SEQ ID NO: 2230834 - RNA, 19 nt, Artificial Sequence
  Description of Artificial Sequence: Synthetic oligonucleotide
  Sense strand starting at position 576 of SEQ ID NO: 1883980
gcauguauuuccucuguga

SEQ ID NO: 2230835 - RNA, 19 nt, Artificial Sequence
  Description of Artificial Sequence: Synthetic oligonucleotide
  Antisense strand to SEQ ID NO: 2230834
ucacagaggaaauacaugc

SEQ ID NO: 2230836 - RNA, 19 nt, Artificial Sequence
  Description of Artificial Sequence: Synthetic oligonucleotide
  Sense strand starting at position 578 of SEQ ID NO: 1883980
auguauuuccucugugauu

SEQ ID NO: 2230837 - RNA, 19 nt, Artificial Sequence
  Description of Artificial Sequence: Synthetic oligonucleotide
  Antisense strand to SEQ ID NO: 2230836
aaucacagaggaaauacau

SEQ ID NO: 2230838 - RNA, 19 nt, Artificial Sequence
  Description of Artificial Sequence: Synthetic oligonucleotide
  Sense strand starting at position 659 of SEQ ID NO: 1883980
caaugaaaguaggauauuu

SEQ ID NO: 2230839 - RNA, 19 nt, Artificial Sequence
  Description of Artificial Sequence: Synthetic oligonucleotide
  Antisense strand to SEQ ID NO: 2230838
aaauauccuacuuucauug

SEQ ID NO: 2230840 - RNA, 19 nt, Artificial Sequence
  Description of Artificial Sequence: Synthetic oligonucleotide
  Sense strand starting at position 812 of SEQ ID NO: 1883980
uuguguuuaagagagaagu

SEQ ID NO: 2230841 - RNA, 19 nt, Artificial Sequence
  Description of Artificial Sequence: Synthetic oligonucleotide
  Antisense strand to SEQ ID NO: 2230840
acuucucucuuaaacacaa

SEQ ID NO: 2230842 - RNA, 19 nt, Artificial Sequence
  Description of Artificial Sequence: Synthetic oligonucleotide
  Sense strand starting at position 814 of SEQ ID NO: 1883980
guguuuaagagagaaguuc

SEQ ID NO: 2230843 - RNA, 19 nt, Artificial Sequence
  Description of Artificial Sequence: Synthetic oligonucleotide
  Antisense strand to SEQ ID NO: 2230842
gaacuucucucuuaaacac

SEQ ID NO: 2230844 - RNA, 19 nt, Artificial Sequence
  Description of Artificial Sequence: Synthetic oligonucleotide
  Sense strand starting at position 942 of SEQ ID NO: 1883980
gagccagucuacuugagga

SEQ ID NO: 2230845 - RNA, 19 nt, Artificial Sequence
  Description of Artificial Sequence: Synthetic oligonucleotide
  Antisense strand to SEQ ID NO: 2230844
uccucaaguagacuggcuc

SEQ ID NO: 2230846 - RNA, 19 nt, Artificial Sequence
  Description of Artificial Sequence: Synthetic oligonucleotide
  Sense strand starting at position 944 of SEQ ID NO: 1883980
gccagucuacuugaggaca

SEQ ID NO: 2230847 - RNA, 19 nt, Artificial Sequence
  Description of Artificial Sequence: Synthetic oligonucleotide
  Antisense strand to SEQ ID NO: 2230846
uguccucaaguagacuggc

SEQ ID NO: 2230848 - RNA, 19 nt, Artificial Sequence
  Description of Artificial Sequence: Synthetic oligonucleotide
  Sense strand starting at position 1065 of SEQ ID NO: 1883980
guuaaauaucaauggguua

SEQ ID NO: 2230849 - RNA, 19 nt, Artificial Sequence
  Description of Artificial Sequence: Synthetic oligonucleotide
  Antisense strand to SEQ ID NO: 2230848
uaacccauugauauuuaac

SEQ ID NO: 2230850 - RNA, 19 nt, Artificial Sequence
  Description of Artificial Sequence: Synthetic oligonucleotide
  Sense strand starting at position 1077 of SEQ ID NO: 1883980
uggguuacucaaugguaau

SEQ ID NO: 2230851 - RNA, 19 nt, Artificial Sequence
  Description of Artificial Sequence: Synthetic oligonucleotide
  Antisense strand to SEQ ID NO: 2230850
auuaccauugaguaaccca

SEQ ID NO: 2230852 - RNA, 19 nt, Artificial Sequence
  Description of Artificial Sequence: Synthetic oligonucleotide
  Sense strand starting at position 1078 of SEQ ID NO: 1883980
ggguuacucaaugguaaua

SEQ ID NO: 2230853 - RNA, 19 nt, Artificial Sequence
  Description of Artificial Sequence: Synthetic oligonucleotide
  Antisense strand to SEQ ID NO: 2230852
uauuaccauugaguaaccc

SEQ ID NO: 2230854 - RNA, 19 nt, Artificial Sequence
  Description of Artificial Sequence: Synthetic oligonucleotide
  Sense strand starting at position 1106 of SEQ ID NO: 1883980
agaugaacauuguuacaug

SEQ ID NO: 2230855 - RNA, 19 nt, Artificial Sequence
  Description of Artificial Sequence: Synthetic oligonucleotide
  Antisense strand to SEQ ID NO: 2230854
cauguaacaauguucaucu

SEQ ID NO: 2230856 - RNA, 19 nt, Artificial Sequence
  Description of Artificial Sequence: Synthetic oligonucleotide
  Sense strand starting at position 1269 of SEQ ID NO: 1883980
aggauaacauugguuaucu

SEQ ID NO: 2230857 - RNA, 19 nt, Artificial Sequence
  Description of Artificial Sequence: Synthetic oligonucleotide
  Antisense strand to SEQ ID NO: 2230856
agauaaccaauguuauccu

SEQ ID NO: 2230858 - RNA, 19 nt, Artificial Sequence
  Description of Artificial Sequence: Synthetic oligonucleotide
  Sense strand starting at position 1270 of SEQ ID NO: 1883980
ggauaacauugguuaucug

SEQ ID NO: 2230859 - RNA, 19 nt, Artificial Sequence
  Description of Artificial Sequence: Synthetic oligonucleotide
  Antisense strand to SEQ ID NO: 2230858
cagauaaccaauguuaucc

SEQ ID NO: 2230860 - RNA, 19 nt, Artificial Sequence
  Description of Artificial Sequence: Synthetic oligonucleotide
  Sense strand starting at position 1512 of SEQ ID NO: 1883980
cagaaauucugguuuccag

SEQ ID NO: 2230861 - RNA, 19 nt, Artificial Sequence
  Description of Artificial Sequence: Synthetic oligonucleotide
  Antisense strand to SEQ ID NO: 2230860
cuggaaaccagaauuucug

SEQ ID NO: 2230862 - RNA, 19 nt, Artificial Sequence
  Description of Artificial Sequence: Synthetic oligonucleotide
  Sense strand starting at position 1515 of SEQ ID NO: 1883980
aaauucugguuuccagaag

SEQ ID NO: 2230863 - RNA, 19 nt, Artificial Sequence
  Description of Artificial Sequence: Synthetic oligonucleotide
  Antisense strand to SEQ ID NO: 2230862
cuucuggaaaccagaauuu

SEQ ID NO: 2230864 - RNA, 19 nt, Artificial Sequence
  Description of Artificial Sequence: Synthetic oligonucleotide
  Sense strand starting at position 1853 of SEQ ID NO: 1883980
augacaucuuggcuagacu

SEQ ID NO: 2230865 - RNA, 19 nt, Artificial Sequence
  Description of Artificial Sequence: Synthetic oligonucleotide
  Antisense strand to SEQ ID NO: 2230864
agucuagccaagaugucau

SEQ ID NO: 2230866 - RNA, 19 nt, Artificial Sequence
  Description of Artificial Sequence: Synthetic oligonucleotide
  Sense strand starting at position 1861 of SEQ ID NO: 1883980
uuggcuagacuccaacaua

SEQ ID NO: 2230867 - RNA, 19 nt, Artificial Sequence
  Description of Artificial Sequence: Synthetic oligonucleotide
  Antisense strand to SEQ ID NO: 2230866
uauguuggagucuagccaa

SEQ ID NO: 2230868 - RNA, 19 nt, Artificial Sequence
  Description of Artificial Sequence: Synthetic oligonucleotide
  Sense strand starting at position 1978 of SEQ ID NO: 1883980
ugagucaaccacugaguca

SEQ ID NO: 2230869 - RNA, 19 nt, Artificial Sequence
  Description of Artificial Sequence: Synthetic oligonucleotide
  Antisense strand to SEQ ID NO: 2230868
ugacucagugguugacuca

SEQ ID NO: 2230870 - RNA, 19 nt, Artificial Sequence
  Description of Artificial Sequence: Synthetic oligonucleotide
  Sense strand starting at position 2045 of SEQ ID NO: 1883980
ucauaaucaccaggcauga

SEQ ID NO: 2230871 - RNA, 19 nt, Artificial Sequence
  Description of Artificial Sequence: Synthetic oligonucleotide
  Antisense strand to SEQ ID NO: 2230870
ucaugccuggugauuauga

SEQ ID NO: 2230872 - RNA, 19 nt, Artificial Sequence
  Description of Artificial Sequence: Synthetic oligonucleotide
  Sense strand starting at position 2069 of SEQ ID NO: 1883980
aggucaucacagugaauug

SEQ ID NO: 2230873 - RNA, 19 nt, Artificial Sequence
  Description of Artificial Sequence: Synthetic oligonucleotide
  Antisense strand to SEQ ID NO: 2230872
caauucacugugaugaccu

SEQ ID NO: 2230874 - RNA, 19 nt, Artificial Sequence
  Description of Artificial Sequence: Synthetic oligonucleotide
  Sense strand starting at position 2148 of SEQ ID NO: 1883980
auaugaggauggucuguga

SEQ ID NO: 2230875 - RNA, 19 nt, Artificial Sequence
  Description of Artificial Sequence: Synthetic oligonucleotide
  Antisense strand to SEQ ID NO: 2230874
ucacagaccauccucauau

SEQ ID NO: 2230876 - RNA, 19 nt, Artificial Sequence
  Description of Artificial Sequence: Synthetic oligonucleotide
  Sense strand starting at position 2151 of SEQ ID NO: 1883980
ugaggauggucugugauga

SEQ ID NO: 2230877 - RNA, 19 nt, Artificial Sequence
  Description of Artificial Sequence: Synthetic oligonucleotide
  Antisense strand to SEQ ID NO: 2230876
ucaucacagaccauccuca

SEQ ID NO: 2230878 - RNA, 19 nt, Artificial Sequence
  Description of Artificial Sequence: Synthetic oligonucleotide
  Sense strand starting at position 2152 of SEQ ID NO: 1883980
gaggauggucugugaugau

SEQ ID NO: 2230879 - RNA, 19 nt, Artificial Sequence
  Description of Artificial Sequence: Synthetic oligonucleotide
  Antisense strand to SEQ ID NO: 2230878
aucaucacagaccauccuc

SEQ ID NO: 2230880 - RNA, 19 nt, Artificial Sequence
  Description of Artificial Sequence: Synthetic oligonucleotide
  Sense strand starting at position 2187 of SEQ ID NO: 1883980
ggacuuauccaaggucccu

SEQ ID NO: 2230881 - RNA, 19 nt, Artificial Sequence
  Description of Artificial Sequence: Synthetic oligonucleotide
  Antisense strand to SEQ ID NO: 2230880
agggaccuuggauaagucc

SEQ ID NO: 2230882 - RNA, 19 nt, Artificial Sequence
  Description of Artificial Sequence: Synthetic oligonucleotide
  Sense strand starting at position 2193 of SEQ ID NO: 1883980
auccaaggucccugauaga

SEQ ID NO: 2230883 - RNA, 19 nt, Artificial Sequence
  Description of Artificial Sequence: Synthetic oligonucleotide
  Antisense strand to SEQ ID NO: 2230882
ucuaucagggaccuuggau

SEQ ID NO: 2230884 - RNA, 19 nt, Artificial Sequence
  Description of Artificial Sequence: Synthetic oligonucleotide
  Sense strand starting at position 2290 of SEQ ID NO: 1883980
uuucuuuggccacauuaga

SEQ ID NO: 2230885 - RNA, 19 nt, Artificial Sequence
  Description of Artificial Sequence: Synthetic oligonucleotide
  Antisense strand to SEQ ID NO: 2230884
ucuaauguggccaaagaaa

SEQ ID NO: 2230886 - RNA, 19 nt, Artificial Sequence
  Description of Artificial Sequence: Synthetic oligonucleotide
  Sense strand starting at position 2379 of SEQ ID NO: 1883980
ugaagacuggcaggagauu

SEQ ID NO: 2230887 - RNA, 19 nt, Artificial Sequence
  Description of Artificial Sequence: Synthetic oligonucleotide
  Antisense strand to SEQ ID NO: 2230886
aaucuccugccagucuuca

SEQ ID NO: 2230888 - RNA, 19 nt, Artificial Sequence
  Description of Artificial Sequence: Synthetic oligonucleotide
  Sense strand starting at position 2560 of SEQ ID NO: 1883980
ugcauuugauucuugcaca

SEQ ID NO: 2230889 - RNA, 19 nt, Artificial Sequence
  Description of Artificial Sequence: Synthetic oligonucleotide
  Antisense strand to SEQ ID NO: 2230888
ugugcaagaaucaaaugca

SEQ ID NO: 2230890 - RNA, 19 nt, Artificial Sequence
  Description of Artificial Sequence: Synthetic oligonucleotide
  Sense strand starting at position 2646 of SEQ ID NO: 1883980
aguauucuugccuaugaaa

SEQ ID NO: 2230891 - RNA, 19 nt, Artificial Sequence
  Description of Artificial Sequence: Synthetic oligonucleotide
  Antisense strand to SEQ ID NO: 2230890
uuucauaggcaagaauacu

SEQ ID NO: 2230892 - RNA, 19 nt, Artificial Sequence
  Description of Artificial Sequence: Synthetic oligonucleotide
  Sense strand starting at position 3098 of SEQ ID NO: 1883980
uggcuucucagagacaguu

SEQ ID NO: 2230893 - RNA, 19 nt, Artificial Sequence
  Description of Artificial Sequence: Synthetic oligonucleotide
  Antisense strand to SEQ ID NO: 2230892
aacugucucugagaagcca

SEQ ID NO: 2230894 - RNA, 19 nt, Artificial Sequence
  Description of Artificial Sequence: Synthetic oligonucleotide
  Sense strand starting at position 3246 of SEQ ID NO: 1883980
cugauaaguuucuuauagg

SEQ ID NO: 2230895 - RNA, 19 nt, Artificial Sequence
  Description of Artificial Sequence: Synthetic oligonucleotide
  Antisense strand to SEQ ID NO: 2230894
ccuauaagaaacuuaucag

SEQ ID NO: 2230896 - RNA, 19 nt, Artificial Sequence
  Description of Artificial Sequence: Synthetic oligonucleotide
  Sense strand starting at position 3442 of SEQ ID NO: 1883980
ucuguuuggccugcuguaa

SEQ ID NO: 2230897 - RNA, 19 nt, Artificial Sequence
  Description of Artificial Sequence: Synthetic oligonucleotide
  Antisense strand to SEQ ID NO: 2230896
uuacagcaggccaaacaga

SEQ ID NO: 2230898 - RNA, 19 nt, Artificial Sequence
  Description of Artificial Sequence: Synthetic oligonucleotide
  Sense strand starting at position 3567 of SEQ ID NO: 1883980
gcccgcugucugguucaua

SEQ ID NO: 2230899 - RNA, 19 nt, Artificial Sequence
  Description of Artificial Sequence: Synthetic oligonucleotide
  Antisense strand to SEQ ID NO: 2230898
uaugaaccagacagcgggc

SEQ ID NO: 2230900 - RNA, 19 nt, Artificial Sequence
  Description of Artificial Sequence: Synthetic oligonucleotide
  Sense strand starting at position 3788 of SEQ ID NO: 1883980
agagcauagcaaggagaau

SEQ ID NO: 2230901 - RNA, 19 nt, Artificial Sequence
  Description of Artificial Sequence: Synthetic oligonucleotide
  Antisense strand to SEQ ID NO: 2230900
auucuccuugcuaugcucu

SEQ ID NO: 2230902 - RNA, 19 nt, Artificial Sequence
  Description of Artificial Sequence: Synthetic oligonucleotide
  Sense strand starting at position 3825 of SEQ ID NO: 1883980
aaguaaguugcugagcaaa

SEQ ID NO: 2230903 - RNA, 19 nt, Artificial Sequence
  Description of Artificial Sequence: Synthetic oligonucleotide
  Antisense strand to SEQ ID NO: 2230902
uuugcucagcaacuuacuu

SEQ ID NO: 2230904 - RNA, 19 nt, Artificial Sequence
  Description of Artificial Sequence: Synthetic oligonucleotide
  Sense strand starting at position 3916 of SEQ ID NO: 1883980
caaggaauuuggcacuaga

SEQ ID NO: 2230905 - RNA, 19 nt, Artificial Sequence
  Description of Artificial Sequence: Synthetic oligonucleotide
  Antisense strand to SEQ ID NO: 2230904
ucuagugccaaauuccuug

SEQ ID NO: 2230906 - RNA, 19 nt, Artificial Sequence
  Description of Artificial Sequence: Synthetic oligonucleotide
  Sense strand starting at position 3938 of SEQ ID NO: 1883980
uagauuugcucagagaaag

SEQ ID NO: 2230907 - RNA, 19 nt, Artificial Sequence
  Description of Artificial Sequence: Synthetic oligonucleotide
  Antisense strand to SEQ ID NO: 2230906
cuuucucugagcaaaucua

SEQ ID NO: 2230908 - RNA, 19 nt, Artificial Sequence
  Description of Artificial Sequence: Synthetic oligonucleotide
  Sense strand starting at position 218 of SEQ ID NO: 1883981
uguauuagaugauaaagag

SEQ ID NO: 2230909 - RNA, 19 nt, Artificial Sequence
  Description of Artificial Sequence: Synthetic oligonucleotide
  Antisense strand to SEQ ID NO: 2230908
cucuuuaucaucuaauaca

SEQ ID NO: 2230910 - RNA, 19 nt, Artificial Sequence
  Description of Artificial Sequence: Synthetic oligonucleotide
  Sense strand starting at position 250 of SEQ ID NO: 1883981
uuguguuauguugaugaca

SEQ ID NO: 2230911 - RNA, 19 nt, Artificial Sequence
  Description of Artificial Sequence: Synthetic oligonucleotide
  Antisense strand to SEQ ID NO: 2230910
ugucaucaacauaacacaa

SEQ ID NO: 2230912 - RNA, 19 nt, Artificial Sequence
  Description of Artificial Sequence: Synthetic oligonucleotide
  Sense strand starting at position 264 of SEQ ID NO: 1883981
ugacauauacuaugguuau

SEQ ID NO: 2230913 - RNA, 19 nt, Artificial Sequence
  Description of Artificial Sequence: Synthetic oligonucleotide
  Antisense strand to SEQ ID NO: 2230912
auaaccauaguauauguca

SEQ ID NO: 2230914 - RNA, 19 nt, Artificial Sequence
  Description of Artificial Sequence: Synthetic oligonucleotide
  Sense strand starting at position 340 of SEQ ID NO: 1883981
uccugauauugguauuuac

SEQ ID NO: 2230915 - RNA, 19 nt, Artificial Sequence
  Description of Artificial Sequence: Synthetic oligonucleotide
  Antisense strand to SEQ ID NO: 2230914
guaaauaccaauaucagga

SEQ ID NO: 2230916 - RNA, 19 nt, Artificial Sequence
  Description of Artificial Sequence: Synthetic oligonucleotide
  Sense strand starting at position 513 of SEQ ID NO: 1883981
ggauuuagaugaggucaca

SEQ ID NO: 2230917 - RNA, 19 nt, Artificial Sequence
  Description of Artificial Sequence: Synthetic oligonucleotide
  Antisense strand to SEQ ID NO: 2230916
ugugaccucaucuaaaucc

SEQ ID NO: 2230918 - RNA, 19 nt, Artificial Sequence
  Description of Artificial Sequence: Synthetic oligonucleotide
  Sense strand starting at position 917 of SEQ ID NO: 1883981
uuccaauugccucaguguu

SEQ ID NO: 2230919 - RNA, 19 nt, Artificial Sequence
  Description of Artificial Sequence: Synthetic oligonucleotide
  Antisense strand to SEQ ID NO: 2230918
aacacugaggcaauuggaa

SEQ ID NO: 2230920 - RNA, 19 nt, Artificial Sequence
  Description of Artificial Sequence: Synthetic oligonucleotide
  Sense strand starting at position 955 of SEQ ID NO: 1883981
caguccaaucuccggagaa

SEQ ID NO: 2230921 - RNA, 19 nt, Artificial Sequence
  Description of Artificial Sequence: Synthetic oligonucleotide
  Antisense strand to SEQ ID NO: 2230920
uucuccggagauuggacug

SEQ ID NO: 2230922 - RNA, 19 nt, Artificial Sequence
  Description of Artificial Sequence: Synthetic oligonucleotide
  Sense strand starting at position 1035 of SEQ ID NO: 1883981
guguaaauuccauagugua

SEQ ID NO: 2230923 - RNA, 19 nt, Artificial Sequence
  Description of Artificial Sequence: Synthetic oligonucleotide
  Antisense strand to SEQ ID NO: 2230922
uacacuauggaauuuacac

SEQ ID NO: 2230924 - RNA, 19 nt, Artificial Sequence
  Description of Artificial Sequence: Synthetic oligonucleotide
  Sense strand starting at position 1043 of SEQ ID NO: 1883981
uccauaguguagccauaua

SEQ ID NO: 2230925 - RNA, 19 nt, Artificial Sequence
  Description of Artificial Sequence: Synthetic oligonucleotide
  Antisense strand to SEQ ID NO: 2230924
uauauggcuacacuaugga

SEQ ID NO: 2230926 - RNA, 19 nt, Artificial Sequence
  Description of Artificial Sequence: Synthetic oligonucleotide
  Sense strand starting at position 1128 of SEQ ID NO: 1883981
gcgacaauccuacaaguag

SEQ ID NO: 2230927 - RNA, 19 nt, Artificial Sequence
  Description of Artificial Sequence: Synthetic oligonucleotide
  Antisense strand to SEQ ID NO: 2230926
cuacuuguaggauugucgc

SEQ ID NO: 2230928 - RNA, 19 nt, Artificial Sequence
  Description of Artificial Sequence: Synthetic oligonucleotide
  Sense strand starting at position 1229 of SEQ ID NO: 1883981
ggcccugcuugacuuuaaa

SEQ ID NO: 2230929 - RNA, 19 nt, Artificial Sequence
  Description of Artificial Sequence: Synthetic oligonucleotide
  Antisense strand to SEQ ID NO: 2230928
uuuaaagucaagcagggcc

SEQ ID NO: 2230930 - RNA, 19 nt, Artificial Sequence
  Description of Artificial Sequence: Synthetic oligonucleotide
  Sense strand starting at position 1349 of SEQ ID NO: 1883981
agaugaguaguguggaaga

SEQ ID NO: 2230931 - RNA, 19 nt, Artificial Sequence
  Description of Artificial Sequence: Synthetic oligonucleotide
  Antisense strand to SEQ ID NO: 2230930
ucuuccacacuacucaucu

SEQ ID NO: 2230932 - RNA, 19 nt, Artificial Sequence
  Description of Artificial Sequence: Synthetic oligonucleotide
  Sense strand starting at position 1354 of SEQ ID NO: 1883981
aguaguguggaagagcuua

SEQ ID NO: 2230933 - RNA, 19 nt, Artificial Sequence
  Description of Artificial Sequence: Synthetic oligonucleotide
  Antisense strand to SEQ ID NO: 2230932
uaagcucuuccacacuacu

SEQ ID NO: 2230934 - RNA, 19 nt, Artificial Sequence
  Description of Artificial Sequence: Synthetic oligonucleotide
  Sense strand starting at position 1446 of SEQ ID NO: 1883981
guaagagcugaugacuguu

SEQ ID NO: 2230935 - RNA, 19 nt, Artificial Sequence
  Description of Artificial Sequence: Synthetic oligonucleotide
  Antisense strand to SEQ ID NO: 2230934
aacagucaucagcucuuac

SEQ ID NO: 2230936 - RNA, 19 nt, Artificial Sequence
  Description of Artificial Sequence: Synthetic oligonucleotide
  Sense strand starting at position 1449 of SEQ ID NO: 1883981
agagcugaugacuguuacu

SEQ ID NO: 2230937 - RNA, 19 nt, Artificial Sequence
  Description of Artificial Sequence: Synthetic oligonucleotide
  Antisense strand to SEQ ID NO: 2230936
aguaacagucaucagcucu

SEQ ID NO: 2230938 - RNA, 19 nt, Artificial Sequence
  Description of Artificial Sequence: Synthetic oligonucleotide
  Sense strand starting at position 1454 of SEQ ID NO: 1883981
ugaugacuguuacuggcau

SEQ ID NO: 2230939 - RNA, 19 nt, Artificial Sequence
  Description of Artificial Sequence: Synthetic oligonucleotide
  Antisense strand to SEQ ID NO: 2230938
augccaguaacagucauca

SEQ ID NO: 2230940 - RNA, 19 nt, Artificial Sequence
  Description of Artificial Sequence: Synthetic oligonucleotide
  Sense strand starting at position 1480 of SEQ ID NO: 1883981
gcgucuaguauugcaguau

SEQ ID NO: 2230941 - RNA, 19 nt, Artificial Sequence
  Description of Artificial Sequence: Synthetic oligonucleotide
  Antisense strand to SEQ ID NO: 2230940
auacugcaauacuagacgc

SEQ ID NO: 2230942 - RNA, 19 nt, Artificial Sequence
  Description of Artificial Sequence: Synthetic oligonucleotide
  Sense strand starting at position 1628 of SEQ ID NO: 1883981
ggcucucgugcgcugagua

SEQ ID NO: 2230943 - RNA, 19 nt, Artificial Sequence
  Description of Artificial Sequence: Synthetic oligonucleotide
  Antisense strand to SEQ ID NO: 2230942
uacucagcgcacgagagcc

SEQ ID NO: 2230944 - RNA, 19 nt, Artificial Sequence
  Description of Artificial Sequence: Synthetic oligonucleotide
  Sense strand starting at position 2532 of SEQ ID NO: 1883981
ugaguucccucagcuaauc

SEQ ID NO: 2230945 - RNA, 19 nt, Artificial Sequence
  Description of Artificial Sequence: Synthetic oligonucleotide
  Antisense strand to SEQ ID NO: 2230944
gauuagcugagggaacuca

SEQ ID NO: 2230946 - RNA, 19 nt, Artificial Sequence
  Description of Artificial Sequence: Synthetic oligonucleotide
  Sense strand starting at position 2681 of SEQ ID NO: 1883981
cccuguagugcuggacaga

SEQ ID NO: 2230947 - RNA, 19 nt, Artificial Sequence
  Description of Artificial Sequence: Synthetic oligonucleotide
  Antisense strand to SEQ ID NO: 2230946
ucuguccagcacuacaggg

SEQ ID NO: 2230948 - RNA, 19 nt, Artificial Sequence
  Description of Artificial Sequence: Synthetic oligonucleotide
  Sense strand starting at position 2704 of SEQ ID NO: 1883981
cccuuuaagauucgaucga

SEQ ID NO: 2230949 - RNA, 19 nt, Artificial Sequence
  Description of Artificial Sequence: Synthetic oligonucleotide
  Antisense strand to SEQ ID NO: 2230948
ucgaucgaaucuuaaaggg

SEQ ID NO: 2230950 - RNA, 19 nt, Artificial Sequence
  Description of Artificial Sequence: Synthetic oligonucleotide
  Sense strand starting at position 2708 of SEQ ID NO: 1883981
uuaagauucgaucgaguca

SEQ ID NO: 2230951 - RNA, 19 nt, Artificial Sequence
  Description of Artificial Sequence: Synthetic oligonucleotide
  Antisense strand to SEQ ID NO: 2230950
ugacucgaucgaaucuuaa

SEQ ID NO: 2230952 - RNA, 19 nt, Artificial Sequence
  Description of Artificial Sequence: Synthetic oligonucleotide
  Sense strand starting at position 2799 of SEQ ID NO: 1883981
ccuagaugccucugagggu

SEQ ID NO: 2230953 - RNA, 19 nt, Artificial Sequence
  Description of Artificial Sequence: Synthetic oligonucleotide
  Antisense strand to SEQ ID NO: 2230952
acccucagaggcaucuagg

SEQ ID NO: 2230954 - RNA, 19 nt, Artificial Sequence
  Description of Artificial Sequence: Synthetic oligonucleotide
  Sense strand starting at position 3183 of SEQ ID NO: 1883981
ggcugugucguagcaauuc

SEQ ID NO: 2230955 - RNA, 19 nt, Artificial Sequence
  Description of Artificial Sequence: Synthetic oligonucleotide
  Antisense strand to SEQ ID NO: 2230954
gaauugcuacgacacagcc

SEQ ID NO: 2230956 - RNA, 19 nt, Artificial Sequence
  Description of Artificial Sequence: Synthetic oligonucleotide
  Sense strand starting at position 3222 of SEQ ID NO: 1883981
ggauuucuaaggcgcuaca

SEQ ID NO: 2230957 - RNA, 19 nt, Artificial Sequence
  Description of Artificial Sequence: Synthetic oligonucleotide
  Antisense strand to SEQ ID NO: 2230956
uguagcgccuuagaaaucc

SEQ ID NO: 2230958 - RNA, 19 nt, Artificial Sequence
  Description of Artificial Sequence: Synthetic oligonucleotide
  Sense strand starting at position 3263 of SEQ ID NO: 1883981
ccuaauuuauaugaaggga

SEQ ID NO: 2230959 - RNA, 19 nt, Artificial Sequence
  Description of Artificial Sequence: Synthetic oligonucleotide
  Antisense strand to SEQ ID NO: 2230958
ucccuucauauaaauuagg

SEQ ID NO: 2230960 - RNA, 19 nt, Artificial Sequence
  Description of Artificial Sequence: Synthetic oligonucleotide
  Sense strand starting at position 3281 of SEQ ID NO: 1883981
accauaaagcauuaguuga

SEQ ID NO: 2230961 - RNA, 19 nt, Artificial Sequence
  Description of Artificial Sequence: Synthetic oligonucleotide
  Antisense strand to SEQ ID NO: 2230960
ucaacuaaugcuuuauggu

SEQ ID NO: 2230962 - RNA, 19 nt, Artificial Sequence
  Description of Artificial Sequence: Synthetic oligonucleotide
  Sense strand starting at position 3351 of SEQ ID NO: 1883981
ucagaaugauaucugaugu

SEQ ID NO: 2230963 - RNA, 19 nt, Artificial Sequence
  Description of Artificial Sequence: Synthetic oligonucleotide
  Antisense strand to SEQ ID NO: 2230962
acaucagauaucauucuga

SEQ ID NO: 2230964 - RNA, 19 nt, Artificial Sequence
  Description of Artificial Sequence: Synthetic oligonucleotide
  Sense strand starting at position 3364 of SEQ ID NO: 1883981
ugaugugaauuagccacau

SEQ ID NO: 2230965 - RNA, 19 nt, Artificial Sequence
  Description of Artificial Sequence: Synthetic oligonucleotide
  Antisense strand to SEQ ID NO: 2230964
auguggcuaauucacauca

SEQ ID NO: 2230966 - RNA, 19 nt, Artificial Sequence
  Description of Artificial Sequence: Synthetic oligonucleotide
  Sense strand starting at position 3461 of SEQ ID NO: 1883981
aggucacuguaguugaauu

SEQ ID NO: 2230967 - RNA, 19 nt, Artificial Sequence
  Description of Artificial Sequence: Synthetic oligonucleotide
  Antisense strand to SEQ ID NO: 2230966
aauucaacuacagugaccu

SEQ ID NO: 2230968 - RNA, 19 nt, Artificial Sequence
  Description of Artificial Sequence: Synthetic oligonucleotide
  Sense strand starting at position 3469 of SEQ ID NO: 1883981
guaguugaauucucaguug

SEQ ID NO: 2230969 - RNA, 19 nt, Artificial Sequence
  Description of Artificial Sequence: Synthetic oligonucleotide
  Antisense strand to SEQ ID NO: 2230968
caacugagaauucaacuac

SEQ ID NO: 2230970 - RNA, 19 nt, Artificial Sequence
  Description of Artificial Sequence: Synthetic oligonucleotide
  Sense strand starting at position 3472 of SEQ ID NO: 1883981
guugaauucucaguuguau

SEQ ID NO: 2230971 - RNA, 19 nt, Artificial Sequence
  Description of Artificial Sequence: Synthetic oligonucleotide
  Antisense strand to SEQ ID NO: 2230970
auacaacugagaauucaac

SEQ ID NO: 2230972 - RNA, 19 nt, Artificial Sequence
  Description of Artificial Sequence: Synthetic oligonucleotide
  Sense strand starting at position 3483 of SEQ ID NO: 1883981
aguuguauagauuguccca

SEQ ID NO: 2230973 - RNA, 19 nt, Artificial Sequence
  Description of Artificial Sequence: Synthetic oligonucleotide
  Antisense strand to SEQ ID NO: 2230972
ugggacaaucuauacaacu

SEQ ID NO: 2230974 - RNA, 19 nt, Artificial Sequence
  Description of Artificial Sequence: Synthetic oligonucleotide
  Sense strand starting at position 3486 of SEQ ID NO: 1883981
uguauagauugucccacuu

SEQ ID NO: 2230975 - RNA, 19 nt, Artificial Sequence
  Description of Artificial Sequence: Synthetic oligonucleotide
  Antisense strand to SEQ ID NO: 2230974
aagugggacaaucuauaca

SEQ ID NO: 2230976 - RNA, 19 nt, Artificial Sequence
  Description of Artificial Sequence: Synthetic oligonucleotide
  Sense strand starting at position 3572 of SEQ ID NO: 1883981
augugauggugagcaaaua

SEQ ID NO: 2230977 - RNA, 19 nt, Artificial Sequence
  Description of Artificial Sequence: Synthetic oligonucleotide
  Antisense strand to SEQ ID NO: 2230976
uauuugcucaccaucacau

SEQ ID NO: 2230978 - RNA, 19 nt, Artificial Sequence
  Description of Artificial Sequence: Synthetic oligonucleotide
  Sense strand starting at position 3603 of SEQ ID NO: 1883981
gucaguuuccugggacagu

SEQ ID NO: 2230979 - RNA, 19 nt, Artificial Sequence
  Description of Artificial Sequence: Synthetic oligonucleotide
  Antisense strand to SEQ ID NO: 2230978
acugucccaggaaacugac

SEQ ID NO: 2230980 - RNA, 19 nt, Artificial Sequence
  Description of Artificial Sequence: Synthetic oligonucleotide
  Sense strand starting at position 3630 of SEQ ID NO: 1883981
ugcaguggugcucugcgaa

SEQ ID NO: 2230981 - RNA, 19 nt, Artificial Sequence
  Description of Artificial Sequence: Synthetic oligonucleotide
  Antisense strand to SEQ ID NO: 2230980
uucgcagagcaccacugca

SEQ ID NO: 2230982 - RNA, 19 nt, Artificial Sequence
  Description of Artificial Sequence: Synthetic oligonucleotide
  Sense strand starting at position 3713 of SEQ ID NO: 1883981
cuuaguuucuaaguugauc

SEQ ID NO: 2230983 - RNA, 19 nt, Artificial Sequence
  Description of Artificial Sequence: Synthetic oligonucleotide
  Antisense strand to SEQ ID NO: 2230982
gaucaacuuagaaacuaag

SEQ ID NO: 2230984 - RNA, 19 nt, Artificial Sequence
  Description of Artificial Sequence: Synthetic oligonucleotide
  Sense strand starting at position 3920 of SEQ ID NO: 1883981
gguccuaauccugaccuua

SEQ ID NO: 2230985 - RNA, 19 nt, Artificial Sequence
  Description of Artificial Sequence: Synthetic oligonucleotide
  Antisense strand to SEQ ID NO: 2230984
uaaggucaggauuaggacc

SEQ ID NO: 2230986 - RNA, 19 nt, Artificial Sequence
  Description of Artificial Sequence: Synthetic oligonucleotide
  Sense strand starting at position 3931 of SEQ ID NO: 1883981
ugaccuuaaucccuuugga

SEQ ID NO: 2230987 - RNA, 19 nt, Artificial Sequence
  Description of Artificial Sequence: Synthetic oligonucleotide
  Antisense strand to SEQ ID NO: 2230986
uccaaagggauuaagguca

SEQ ID NO: 2230988 - RNA, 19 nt, Artificial Sequence
  Description of Artificial Sequence: Synthetic oligonucleotide
  Sense strand starting at position 82 of SEQ ID NO: 1883982
uccauauaagguugucuau

SEQ ID NO: 2230989 - RNA, 19 nt, Artificial Sequence
  Description of Artificial Sequence: Synthetic oligonucleotide
  Antisense strand to SEQ ID NO: 2230988
auagacaaccuuauaugga

SEQ ID NO: 2230990 - RNA, 19 nt, Artificial Sequence
  Description of Artificial Sequence: Synthetic oligonucleotide
  Sense strand starting at position 85 of SEQ ID NO: 1883982
auauaagguugucuauacu

SEQ ID NO: 2230991 - RNA, 19 nt, Artificial Sequence
  Description of Artificial Sequence: Synthetic oligonucleotide
  Antisense strand to SEQ ID NO: 2230990
aguauagacaaccuuauau

SEQ ID NO: 2230992 - RNA, 19 nt, Artificial Sequence
  Description of Artificial Sequence: Synthetic oligonucleotide
  Sense strand starting at position 324 of SEQ ID NO: 1883982
aaaccaggcgucugaguua

SEQ ID NO: 2230993 - RNA, 19 nt, Artificial Sequence
  Description of Artificial Sequence: Synthetic oligonucleotide
  Antisense strand to SEQ ID NO: 2230992
uaacucagacgccugguuu

SEQ ID NO: 2230994 - RNA, 19 nt, Artificial Sequence
  Description of Artificial Sequence: Synthetic oligonucleotide
  Sense strand starting at position 329 of SEQ ID NO: 1883982
aggcgucugaguuacaaug

SEQ ID NO: 2230995 - RNA, 19 nt, Artificial Sequence
  Description of Artificial Sequence: Synthetic oligonucleotide
  Antisense strand to SEQ ID NO: 2230994
cauuguaacucagacgccu

SEQ ID NO: 2230996 - RNA, 19 nt, Artificial Sequence
  Description of Artificial Sequence: Synthetic oligonucleotide
  Sense strand starting at position 500 of SEQ ID NO: 1883982
cgaagcucucggagaguuu

SEQ ID NO: 2230997 - RNA, 19 nt, Artificial Sequence
  Description of Artificial Sequence: Synthetic oligonucleotide
  Antisense strand to SEQ ID NO: 2230996
aaacucuccgagagcuucg

SEQ ID NO: 2230998 - RNA, 19 nt, Artificial Sequence
  Description of Artificial Sequence: Synthetic oligonucleotide
  Sense strand starting at position 501 of SEQ ID NO: 1883982
gaagcucucggagaguuua

SEQ ID NO: 2230999 - RNA, 19 nt, Artificial Sequence
  Description of Artificial Sequence: Synthetic oligonucleotide
  Antisense strand to SEQ ID NO: 2230998
uaaacucuccgagagcuuc

SEQ ID NO: 2231000 - RNA, 19 nt, Artificial Sequence
  Description of Artificial Sequence: Synthetic oligonucleotide
  Sense strand starting at position 582 of SEQ ID NO: 1883982
ggaaacuacuuagaucaau

SEQ ID NO: 2231001 - RNA, 19 nt, Artificial Sequence
  Description of Artificial Sequence: Synthetic oligonucleotide
  Antisense strand to SEQ ID NO: 2231000
auugaucuaaguaguuucc

SEQ ID NO: 2231002 - RNA, 19 nt, Artificial Sequence
  Description of Artificial Sequence: Synthetic oligonucleotide
  Sense strand starting at position 617 of SEQ ID NO: 1883982
ggagcagcuucuuugagga

SEQ ID NO: 2231003 - RNA, 19 nt, Artificial Sequence
  Description of Artificial Sequence: Synthetic oligonucleotide
  Antisense strand to SEQ ID NO: 2231002
uccucaaagaagcugcucc

SEQ ID NO: 2231004 - RNA, 19 nt, Artificial Sequence
  Description of Artificial Sequence: Synthetic oligonucleotide
  Sense strand starting at position 761 of SEQ ID NO: 1883982
gccucuauuugaucuggca

SEQ ID NO: 2231005 - RNA, 19 nt, Artificial Sequence
  Description of Artificial Sequence: Synthetic oligonucleotide
  Antisense strand to SEQ ID NO: 2231004
ugccagaucaaauagaggc

SEQ ID NO: 2231006 - RNA, 19 nt, Artificial Sequence
  Description of Artificial Sequence: Synthetic oligonucleotide
  Sense strand starting at position 889 of SEQ ID NO: 1883982
gggcgaugcuaccuauaag

SEQ ID NO: 2231007 - RNA, 19 nt, Artificial Sequence
  Description of Artificial Sequence: Synthetic oligonucleotide
  Antisense strand to SEQ ID NO: 2231006
cuuauagguagcaucgccc

SEQ ID NO: 2231008 - RNA, 19 nt, Artificial Sequence
  Description of Artificial Sequence: Synthetic oligonucleotide
  Sense strand starting at position 916 of SEQ ID NO: 1883982
ccugguaaguuucuuaaau

SEQ ID NO: 2231009 - RNA, 19 nt, Artificial Sequence
  Description of Artificial Sequence: Synthetic oligonucleotide
  Antisense strand to SEQ ID NO: 2231008
auuuaagaaacuuaccagg

SEQ ID NO: 2231010 - RNA, 19 nt, Artificial Sequence
  Description of Artificial Sequence: Synthetic oligonucleotide
  Sense strand starting at position 917 of SEQ ID NO: 1883982
cugguaaguuucuuaaauu

SEQ ID NO: 2231011 - RNA, 19 nt, Artificial Sequence
  Description of Artificial Sequence: Synthetic oligonucleotide
  Antisense strand to SEQ ID NO: 2231010
aauuuaagaaacuuaccag

SEQ ID NO: 2231012 - RNA, 19 nt, Artificial Sequence
  Description of Artificial Sequence: Synthetic oligonucleotide
  Sense strand starting at position 950 of SEQ ID NO: 1883982
auuccaguucuacgacaau

SEQ ID NO: 2231013 - RNA, 19 nt, Artificial Sequence
  Description of Artificial Sequence: Synthetic oligonucleotide
  Antisense strand to SEQ ID NO: 2231012
auugucguagaacuggaau

SEQ ID NO: 2231014 - RNA, 19 nt, Artificial Sequence
  Description of Artificial Sequence: Synthetic oligonucleotide
  Sense strand starting at position 978 of SEQ ID NO: 1883982
cgagguccuucuuuccaaa

SEQ ID NO: 2231015 - RNA, 19 nt, Artificial Sequence
  Description of Artificial Sequence: Synthetic oligonucleotide
  Antisense strand to SEQ ID NO: 2231014
uuuggaaagaaggaccucg

SEQ ID NO: 2231016 - RNA, 19 nt, Artificial Sequence
  Description of Artificial Sequence: Synthetic oligonucleotide
  Sense strand starting at position 1126 of SEQ ID NO: 1883982
ggaaauguuaggcauucca

SEQ ID NO: 2231017 - RNA, 19 nt, Artificial Sequence
  Description of Artificial Sequence: Synthetic oligonucleotide
  Antisense strand to SEQ ID NO: 2231016
uggaaugccuaacauuucc

SEQ ID NO: 2231018 - RNA, 19 nt, Artificial Sequence
  Description of Artificial Sequence: Synthetic oligonucleotide
  Sense strand starting at position 1161 of SEQ ID NO: 1883982
uuggaaauggucuacaguu

SEQ ID NO: 2231019 - RNA, 19 nt, Artificial Sequence
  Description of Artificial Sequence: Synthetic oligonucleotide
  Antisense strand to SEQ ID NO: 2231018
aacuguagaccauuuccaa

SEQ ID NO: 2231020 - RNA, 19 nt, Artificial Sequence
  Description of Artificial Sequence: Synthetic oligonucleotide
  Sense strand starting at position 1638 of SEQ ID NO: 1883982
ccaguacuccuccagagac

SEQ ID NO: 2231021 - RNA, 19 nt, Artificial Sequence
  Description of Artificial Sequence: Synthetic oligonucleotide
  Antisense strand to SEQ ID NO: 2231020
gucucuggaggaguacugg

SEQ ID NO: 2231022 - RNA, 19 nt, Artificial Sequence
  Description of Artificial Sequence: Synthetic oligonucleotide
  Sense strand starting at position 1691 of SEQ ID NO: 1883982
ucuggagcuccuggaagau

SEQ ID NO: 2231023 - RNA, 19 nt, Artificial Sequence
  Description of Artificial Sequence: Synthetic oligonucleotide
  Antisense strand to SEQ ID NO: 2231022
aucuuccaggagcuccaga

SEQ ID NO: 2231024 - RNA, 19 nt, Artificial Sequence
  Description of Artificial Sequence: Synthetic oligonucleotide
  Sense strand starting at position 2197 of SEQ ID NO: 1883982
gcucguucugauuggaaag

SEQ ID NO: 2231025 - RNA, 19 nt, Artificial Sequence
  Description of Artificial Sequence: Synthetic oligonucleotide
  Antisense strand to SEQ ID NO: 2231024
cuuuccaaucagaacgagc

SEQ ID NO: 2231026 - RNA, 19 nt, Artificial Sequence
  Description of Artificial Sequence: Synthetic oligonucleotide
  Sense strand starting at position 2198 of SEQ ID NO: 1883982
cucguucugauuggaaagu

SEQ ID NO: 2231027 - RNA, 19 nt, Artificial Sequence
  Description of Artificial Sequence: Synthetic oligonucleotide
  Antisense strand to SEQ ID NO: 2231026
acuuuccaaucagaacgag

SEQ ID NO: 2231028 - RNA, 19 nt, Artificial Sequence
  Description of Artificial Sequence: Synthetic oligonucleotide
  Sense strand starting at position 2270 of SEQ ID NO: 1883982
ggaggaguccgcgcuguga

SEQ ID NO: 2231029 - RNA, 19 nt, Artificial Sequence
  Description of Artificial Sequence: Synthetic oligonucleotide
  Antisense strand to SEQ ID NO: 2231028
ucacagcgcggacuccucc

SEQ ID NO: 2231030 - RNA, 19 nt, Artificial Sequence
  Description of Artificial Sequence: Synthetic oligonucleotide
  Sense strand starting at position 2851 of SEQ ID NO: 1883982
uugggagaaacguguuuau

SEQ ID NO: 2231031 - RNA, 19 nt, Artificial Sequence
  Description of Artificial Sequence: Synthetic oligonucleotide
  Antisense strand to SEQ ID NO: 2231030
auaaacacguuucucccaa

SEQ ID NO: 2231032 - RNA, 19 nt, Artificial Sequence
  Description of Artificial Sequence: Synthetic oligonucleotide
  Sense strand starting at position 2854 of SEQ ID NO: 1883982
ggagaaacguguuuaucuu

SEQ ID NO: 2231033 - RNA, 19 nt, Artificial Sequence
  Description of Artificial Sequence: Synthetic oligonucleotide
  Antisense strand to SEQ ID NO: 2231032
aagauaaacacguuucucc

SEQ ID NO: 2231034 - RNA, 19 nt, Artificial Sequence
  Description of Artificial Sequence: Synthetic oligonucleotide
  Sense strand starting at position 2855 of SEQ ID NO: 1883982
gagaaacguguuuaucuug

SEQ ID NO: 2231035 - RNA, 19 nt, Artificial Sequence
  Description of Artificial Sequence: Synthetic oligonucleotide
  Antisense strand to SEQ ID NO: 2231034
caagauaaacacguuucuc

SEQ ID NO: 2231036 - RNA, 19 nt, Artificial Sequence
  Description of Artificial Sequence: Synthetic oligonucleotide
  Sense strand starting at position 2870 of SEQ ID NO: 1883982
cuuguagagggcgaucuua

SEQ ID NO: 2231037 - RNA, 19 nt, Artificial Sequence
  Description of Artificial Sequence: Synthetic oligonucleotide
  Antisense strand to SEQ ID NO: 2231036
uaagaucgcccucuacaag

SEQ ID NO: 2231038 - RNA, 19 nt, Artificial Sequence
  Description of Artificial Sequence: Synthetic oligonucleotide
  Sense strand starting at position 3069 of SEQ ID NO: 1883982
acugaauuguaacuguauu

SEQ ID NO: 2231039 - RNA, 19 nt, Artificial Sequence
  Description of Artificial Sequence: Synthetic oligonucleotide
  Antisense strand to SEQ ID NO: 2231038
aauacaguuacaauucagu

SEQ ID NO: 2231040 - RNA, 19 nt, Artificial Sequence
  Description of Artificial Sequence: Synthetic oligonucleotide
  Sense strand starting at position 3196 of SEQ ID NO: 1883982
gaagcauguggcuguaaga

SEQ ID NO: 2231041 - RNA, 19 nt, Artificial Sequence
  Description of Artificial Sequence: Synthetic oligonucleotide
  Antisense strand to SEQ ID NO: 2231040
ucuuacagccacaugcuuc

SEQ ID NO: 2231042 - RNA, 19 nt, Artificial Sequence
  Description of Artificial Sequence: Synthetic oligonucleotide
  Sense strand starting at position 3231 of SEQ ID NO: 1883982
gugagucuggaguggagaa

SEQ ID NO: 2231043 - RNA, 19 nt, Artificial Sequence
  Description of Artificial Sequence: Synthetic oligonucleotide
  Antisense strand to SEQ ID NO: 2231042
uucuccacuccagacucac

SEQ ID NO: 2231044 - RNA, 19 nt, Artificial Sequence
  Description of Artificial Sequence: Synthetic oligonucleotide
  Sense strand starting at position 3248 of SEQ ID NO: 1883982
aaaggagguuugucuugua

SEQ ID NO: 2231045 - RNA, 19 nt, Artificial Sequence
  Description of Artificial Sequence: Synthetic oligonucleotide
  Antisense strand to SEQ ID NO: 2231044
uacaagacaaaccuccuuu

SEQ ID NO: 2231046 - RNA, 19 nt, Artificial Sequence
  Description of Artificial Sequence: Synthetic oligonucleotide
  Sense strand starting at position 3283 of SEQ ID NO: 1883982
ggugaagguuaugcagagu

SEQ ID NO: 2231047 - RNA, 19 nt, Artificial Sequence
  Description of Artificial Sequence: Synthetic oligonucleotide
  Antisense strand to SEQ ID NO: 2231046
acucugcauaaccuucacc

SEQ ID NO: 2231048 - RNA, 19 nt, Artificial Sequence
  Description of Artificial Sequence: Synthetic oligonucleotide
  Sense strand starting at position 3286 of SEQ ID NO: 1883982
gaagguuaugcagagugaa

SEQ ID NO: 2231049 - RNA, 19 nt, Artificial Sequence
  Description of Artificial Sequence: Synthetic oligonucleotide
  Antisense strand to SEQ ID NO: 2231048
uucacucugcauaaccuuc

SEQ ID NO: 2231050 - RNA, 19 nt, Artificial Sequence
  Description of Artificial Sequence: Synthetic oligonucleotide
  Sense strand starting at position 3294 of SEQ ID NO: 1883982
ugcagagugaauugacagu

SEQ ID NO: 2231051 - RNA, 19 nt, Artificial Sequence
  Description of Artificial Sequence: Synthetic oligonucleotide
  Antisense strand to SEQ ID NO: 2231050
acugucaauucacucugca

SEQ ID NO: 2231052 - RNA, 19 nt, Artificial Sequence
  Description of Artificial Sequence: Synthetic oligonucleotide
  Sense strand starting at position 3300 of SEQ ID NO: 1883982
gugaauugacaguguucuu

SEQ ID NO: 2231053 - RNA, 19 nt, Artificial Sequence
  Description of Artificial Sequence: Synthetic oligonucleotide
  Antisense strand to SEQ ID NO: 2231052
aagaacacugucaauucac

SEQ ID NO: 2231054 - RNA, 19 nt, Artificial Sequence
  Description of Artificial Sequence: Synthetic oligonucleotide
  Sense strand starting at position 3387 of SEQ ID NO: 1883982
uuaacucuguuuccaggaa

SEQ ID NO: 2231055 - RNA, 19 nt, Artificial Sequence
  Description of Artificial Sequence: Synthetic oligonucleotide
  Antisense strand to SEQ ID NO: 2231054
uuccuggaaacagaguuaa

SEQ ID NO: 2231056 - RNA, 19 nt, Artificial Sequence
  Description of Artificial Sequence: Synthetic oligonucleotide
  Sense strand starting at position 3391 of SEQ ID NO: 1883982
cucuguuuccaggaaugca

SEQ ID NO: 2231057 - RNA, 19 nt, Artificial Sequence
  Description of Artificial Sequence: Synthetic oligonucleotide
  Antisense strand to SEQ ID NO: 2231056
ugcauuccuggaaacagag

SEQ ID NO: 2231058 - RNA, 19 nt, Artificial Sequence
  Description of Artificial Sequence: Synthetic oligonucleotide
  Sense strand starting at position 3513 of SEQ ID NO: 1883982
aggguucucucaguaauua

SEQ ID NO: 2231059 - RNA, 19 nt, Artificial Sequence
  Description of Artificial Sequence: Synthetic oligonucleotide
  Antisense strand to SEQ ID NO: 2231058
uaauuacugagagaacccu

SEQ ID NO: 2231060 - RNA, 19 nt, Artificial Sequence
  Description of Artificial Sequence: Synthetic oligonucleotide
  Sense strand starting at position 3514 of SEQ ID NO: 1883982
ggguucucucaguaauuag

SEQ ID NO: 2231061 - RNA, 19 nt, Artificial Sequence
  Description of Artificial Sequence: Synthetic oligonucleotide
  Antisense strand to SEQ ID NO: 2231060
cuaauuacugagagaaccc

SEQ ID NO: 2231062 - RNA, 19 nt, Artificial Sequence
  Description of Artificial Sequence: Synthetic oligonucleotide
  Sense strand starting at position 3815 of SEQ ID NO: 1883982
cggcacuaugaagauuaua

SEQ ID NO: 2231063 - RNA, 19 nt, Artificial Sequence
  Description of Artificial Sequence: Synthetic oligonucleotide
  Antisense strand to SEQ ID NO: 2231062
uauaaucuucauagugccg

SEQ ID NO: 2231064 - RNA, 19 nt, Artificial Sequence
  Description of Artificial Sequence: Synthetic oligonucleotide
  Sense strand starting at position 3853 of SEQ ID NO: 1883982
ggaaccugauuagucauaa

SEQ ID NO: 2231065 - RNA, 19 nt, Artificial Sequence
  Description of Artificial Sequence: Synthetic oligonucleotide
  Antisense strand to SEQ ID NO: 2231064
uuaugacuaaucagguucc

SEQ ID NO: 2231066 - RNA, 19 nt, Artificial Sequence
  Description of Artificial Sequence: Synthetic oligonucleotide
  Sense strand starting at position 3982 of SEQ ID NO: 1883982
gcgcucauugaccauugaa

SEQ ID NO: 2231067 - RNA, 19 nt, Artificial Sequence
  Description of Artificial Sequence: Synthetic oligonucleotide
  Antisense strand to SEQ ID NO: 2231066
uucaauggucaaugagcgc

SEQ ID NO: 2231068 - RNA, 19 nt, Artificial Sequence
  Description of Artificial Sequence: Synthetic oligonucleotide
  Sense strand starting at position 227 of SEQ ID NO: 1883983
cucugagggaacugugauu

SEQ ID NO: 2231069 - RNA, 19 nt, Artificial Sequence
  Description of Artificial Sequence: Synthetic oligonucleotide
  Antisense strand to SEQ ID NO: 2231068
aaucacaguucccucagag

SEQ ID NO: 2231070 - RNA, 19 nt, Artificial Sequence
  Description of Artificial Sequence: Synthetic oligonucleotide
  Sense strand starting at position 232 of SEQ ID NO: 1883983
agggaacugugauucccau

SEQ ID NO: 2231071 - RNA, 19 nt, Artificial Sequence
  Description of Artificial Sequence: Synthetic oligonucleotide
  Antisense strand to SEQ ID NO: 2231070
augggaaucacaguucccu

SEQ ID NO: 2231072 - RNA, 19 nt, Artificial Sequence
  Description of Artificial Sequence: Synthetic oligonucleotide
  Sense strand starting at position 314 of SEQ ID NO: 1883983
gcaggacaaagaugaguua

SEQ ID NO: 2231073 - RNA, 19 nt, Artificial Sequence
  Description of Artificial Sequence: Synthetic oligonucleotide
  Antisense strand to SEQ ID NO: 2231072
uaacucaucuuuguccugc

SEQ ID NO: 2231074 - RNA, 19 nt, Artificial Sequence
  Description of Artificial Sequence: Synthetic oligonucleotide
  Sense strand starting at position 321 of SEQ ID NO: 1883983
aaagaugaguuagagggua

SEQ ID NO: 2231075 - RNA, 19 nt, Artificial Sequence
  Description of Artificial Sequence: Synthetic oligonucleotide
  Antisense strand to SEQ ID NO: 2231074
uacccucuaacucaucuuu

SEQ ID NO: 2231076 - RNA, 19 nt, Artificial Sequence
  Description of Artificial Sequence: Synthetic oligonucleotide
  Sense strand starting at position 496 of SEQ ID NO: 1883983
cgcugaggcauccagagaa

SEQ ID NO: 2231077 - RNA, 19 nt, Artificial Sequence
  Description of Artificial Sequence: Synthetic oligonucleotide
  Antisense strand to SEQ ID NO: 2231076
uucucuggaugccucagcg

SEQ ID NO: 2231078 - RNA, 19 nt, Artificial Sequence
  Description of Artificial Sequence: Synthetic oligonucleotide
  Sense strand starting at position 906 of SEQ ID NO: 1883983
uggaaugccucagggaaau

SEQ ID NO: 2231079 - RNA, 19 nt, Artificial Sequence
  Description of Artificial Sequence: Synthetic oligonucleotide
  Antisense strand to SEQ ID NO: 2231078
auuucccugaggcauucca

SEQ ID NO: 2231080 - RNA, 19 nt, Artificial Sequence
  Description of Artificial Sequence: Synthetic oligonucleotide
  Sense strand starting at position 983 of SEQ ID NO: 1883983
caaauauacgcauggagaa

SEQ ID NO: 2231081 - RNA, 19 nt, Artificial Sequence
  Description of Artificial Sequence: Synthetic oligonucleotide
  Antisense strand to SEQ ID NO: 2231080
uucuccaugcguauauuug

SEQ ID NO: 2231082 - RNA, 19 nt, Artificial Sequence
  Description of Artificial Sequence: Synthetic oligonucleotide
  Sense strand starting at position 984 of SEQ ID NO: 1883983
aaauauacgcauggagaaa

SEQ ID NO: 2231083 - RNA, 19 nt, Artificial Sequence
  Description of Artificial Sequence: Synthetic oligonucleotide
  Antisense strand to SEQ ID NO: 2231082
uuucuccaugcguauauuu

SEQ ID NO: 2231084 - RNA, 19 nt, Artificial Sequence
  Description of Artificial Sequence: Synthetic oligonucleotide
  Sense strand starting at position 1054 of SEQ ID NO: 1883983
acaacauguucucccgaua

SEQ ID NO: 2231085 - RNA, 19 nt, Artificial Sequence
  Description of Artificial Sequence: Synthetic oligonucleotide
  Antisense strand to SEQ ID NO: 2231084
uaucgggagaacauguugu

SEQ ID NO: 2231086 - RNA, 19 nt, Artificial Sequence
  Description of Artificial Sequence: Synthetic oligonucleotide
  Sense strand starting at position 1057 of SEQ ID NO: 1883983
acauguucucccgauauuc

SEQ ID NO: 2231087 - RNA, 19 nt, Artificial Sequence
  Description of Artificial Sequence: Synthetic oligonucleotide
  Antisense strand to SEQ ID NO: 2231086
gaauaucgggagaacaugu

SEQ ID NO: 2231088 - RNA, 19 nt, Artificial Sequence
  Description of Artificial Sequence: Synthetic oligonucleotide
  Sense strand starting at position 1131 of SEQ ID NO: 1883983
cugcgaguuccugagagca

SEQ ID NO: 2231089 - RNA, 19 nt, Artificial Sequence
  Description of Artificial Sequence: Synthetic oligonucleotide
  Antisense strand to SEQ ID NO: 2231088
ugcucucaggaacucgcag

SEQ ID NO: 2231090 - RNA, 19 nt, Artificial Sequence
  Description of Artificial Sequence: Synthetic oligonucleotide
  Sense strand starting at position 1133 of SEQ ID NO: 1883983
gcgaguuccugagagcaaa

SEQ ID NO: 2231091 - RNA, 19 nt, Artificial Sequence
  Description of Artificial Sequence: Synthetic oligonucleotide
  Antisense strand to SEQ ID NO: 2231090
uuugcucucaggaacucgc

SEQ ID NO: 2231092 - RNA, 19 nt, Artificial Sequence
  Description of Artificial Sequence: Synthetic oligonucleotide
  Sense strand starting at position 1498 of SEQ ID NO: 1883983
cgccucuccgcguggagaa

SEQ ID NO: 2231093 - RNA, 19 nt, Artificial Sequence
  Description of Artificial Sequence: Synthetic oligonucleotide
  Antisense strand to SEQ ID NO: 2231092
uucuccacgcggagaggcg

SEQ ID NO: 2231094 - RNA, 19 nt, Artificial Sequence
  Description of Artificial Sequence: Synthetic oligonucleotide
  Sense strand starting at position 1987 of SEQ ID NO: 1883983
aggagcagcuaauguaauu

SEQ ID NO: 2231095 - RNA, 19 nt, Artificial Sequence
  Description of Artificial Sequence: Synthetic oligonucleotide
  Antisense strand to SEQ ID NO: 2231094
aauuacauuagcugcuccu

SEQ ID NO: 2231096 - RNA, 19 nt, Artificial Sequence
  Description of Artificial Sequence: Synthetic oligonucleotide
  Sense strand starting at position 2051 of SEQ ID NO: 1883983
gcgcauuaggcaggcuaau

SEQ ID NO: 2231097 - RNA, 19 nt, Artificial Sequence
  Description of Artificial Sequence: Synthetic oligonucleotide
  Antisense strand to SEQ ID NO: 2231096
auuagccugccuaaugcgc

SEQ ID NO: 2231098 - RNA, 19 nt, Artificial Sequence
  Description of Artificial Sequence: Synthetic oligonucleotide
  Sense strand starting at position 2309 of SEQ ID NO: 1883983
cgcugcagauaauugauua

SEQ ID NO: 2231099 - RNA, 19 nt, Artificial Sequence
  Description of Artificial Sequence: Synthetic oligonucleotide
  Antisense strand to SEQ ID NO: 2231098
uaaucaauuaucugcagcg

SEQ ID NO: 2231100 - RNA, 19 nt, Artificial Sequence
  Description of Artificial Sequence: Synthetic oligonucleotide
  Sense strand starting at position 2319 of SEQ ID NO: 1883983
aauugauuacaccgcgauc

SEQ ID NO: 2231101 - RNA, 19 nt, Artificial Sequence
  Description of Artificial Sequence: Synthetic oligonucleotide
  Antisense strand to SEQ ID NO: 2231100
gaucgcgguguaaucaauu

SEQ ID NO: 2231102 - RNA, 19 nt, Artificial Sequence
  Description of Artificial Sequence: Synthetic oligonucleotide
  Sense strand starting at position 2321 of SEQ ID NO: 1883983
uugauuacaccgcgaucaa

SEQ ID NO: 2231103 - RNA, 19 nt, Artificial Sequence
  Description of Artificial Sequence: Synthetic oligonucleotide
  Antisense strand to SEQ ID NO: 2231102
uugaucgcgguguaaucaa

SEQ ID NO: 2231104 - RNA, 19 nt, Artificial Sequence
  Description of Artificial Sequence: Synthetic oligonucleotide
  Sense strand starting at position 2322 of SEQ ID NO: 1883983
ugauuacaccgcgaucaag

SEQ ID NO: 2231105 - RNA, 19 nt, Artificial Sequence
  Description of Artificial Sequence: Synthetic oligonucleotide
  Antisense strand to SEQ ID NO: 2231104
cuugaucgcgguguaauca

SEQ ID NO: 2231106 - RNA, 19 nt, Artificial Sequence
  Description of Artificial Sequence: Synthetic oligonucleotide
  Sense strand starting at position 2334 of SEQ ID NO: 1883983
gaucaaggcuaacuuguua

SEQ ID NO: 2231107 - RNA, 19 nt, Artificial Sequence
  Description of Artificial Sequence: Synthetic oligonucleotide
  Antisense strand to SEQ ID NO: 2231106
uaacaaguuagccuugauc

SEQ ID NO: 2231108 - RNA, 19 nt, Artificial Sequence
  Description of Artificial Sequence: Synthetic oligonucleotide
  Sense strand starting at position 2339 of SEQ ID NO: 1883983
aggcuaacuuguuagcaau

SEQ ID NO: 2231109 - RNA, 19 nt, Artificial Sequence
  Description of Artificial Sequence: Synthetic oligonucleotide
  Antisense strand to SEQ ID NO: 2231108
auugcuaacaaguuagccu

SEQ ID NO: 2231110 - RNA, 19 nt, Artificial Sequence
  Description of Artificial Sequence: Synthetic oligonucleotide
  Sense strand starting at position 2342 of SEQ ID NO: 1883983
cuaacuuguuagcaauagu

SEQ ID NO: 2231111 - RNA, 19 nt, Artificial Sequence
  Description of Artificial Sequence: Synthetic oligonucleotide
  Antisense strand to SEQ ID NO: 2231110
acuauugcuaacaaguuag

SEQ ID NO: 2231112 - RNA, 19 nt, Artificial Sequence
  Description of Artificial Sequence: Synthetic oligonucleotide
  Sense strand starting at position 2345 of SEQ ID NO: 1883983
acuuguuagcaauagucaa

SEQ ID NO: 2231113 - RNA, 19 nt, Artificial Sequence
  Description of Artificial Sequence: Synthetic oligonucleotide
  Antisense strand to SEQ ID NO: 2231112
uugacuauugcuaacaagu

SEQ ID NO: 2231114 - RNA, 19 nt, Artificial Sequence
  Description of Artificial Sequence: Synthetic oligonucleotide
  Sense strand starting at position 2911 of SEQ ID NO: 1883983
gccgucugugcggagaagu

SEQ ID NO: 2231115 - RNA, 19 nt, Artificial Sequence
  Description of Artificial Sequence: Synthetic oligonucleotide
  Antisense strand to SEQ ID NO: 2231114
acuucuccgcacagacggc

SEQ ID NO: 2231116 - RNA, 19 nt, Artificial Sequence
  Description of Artificial Sequence: Synthetic oligonucleotide
  Sense strand starting at position 2912 of SEQ ID NO: 1883983
ccgucugugcggagaaguu

SEQ ID NO: 2231117 - RNA, 19 nt, Artificial Sequence
  Description of Artificial Sequence: Synthetic oligonucleotide
  Antisense strand to SEQ ID NO: 2231116
aacuucuccgcacagacgg

SEQ ID NO: 2231118 - RNA, 19 nt, Artificial Sequence
  Description of Artificial Sequence: Synthetic oligonucleotide
  Sense strand starting at position 2913 of SEQ ID NO: 1883983
cgucugugcggagaaguua

SEQ ID NO: 2231119 - RNA, 19 nt, Artificial Sequence
  Description of Artificial Sequence: Synthetic oligonucleotide
  Antisense strand to SEQ ID NO: 2231118
uaacuucuccgcacagacg

SEQ ID NO: 2231120 - RNA, 19 nt, Artificial Sequence
  Description of Artificial Sequence: Synthetic oligonucleotide
  Sense strand starting at position 2921 of SEQ ID NO: 1883983
cggagaaguuacucgcugu

SEQ ID NO: 2231121 - RNA, 19 nt, Artificial Sequence
  Description of Artificial Sequence: Synthetic oligonucleotide
  Antisense strand to SEQ ID NO: 2231120
acagcgaguaacuucuccg

SEQ ID NO: 2231122 - RNA, 19 nt, Artificial Sequence
  Description of Artificial Sequence: Synthetic oligonucleotide
  Sense strand starting at position 2922 of SEQ ID NO: 1883983
ggagaaguuacucgcugug

SEQ ID NO: 2231123 - RNA, 19 nt, Artificial Sequence
  Description of Artificial Sequence: Synthetic oligonucleotide
  Antisense strand to SEQ ID NO: 2231122
cacagcgaguaacuucucc

SEQ ID NO: 2231124 - RNA, 19 nt, Artificial Sequence
  Description of Artificial Sequence: Synthetic oligonucleotide
  Sense strand starting at position 3230 of SEQ ID NO: 1883983
ugcuuaugggagugaagau

SEQ ID NO: 2231125 - RNA, 19 nt, Artificial Sequence
  Description of Artificial Sequence: Synthetic oligonucleotide
  Antisense strand to SEQ ID NO: 2231124
aucuucacucccauaagca

SEQ ID NO: 2231126 - RNA, 19 nt, Artificial Sequence
  Description of Artificial Sequence: Synthetic oligonucleotide
  Sense strand starting at position 3450 of SEQ ID NO: 1883983
aggguagaguugaagugau

SEQ ID NO: 2231127 - RNA, 19 nt, Artificial Sequence
  Description of Artificial Sequence: Synthetic oligonucleotide
  Antisense strand to SEQ ID NO: 2231126
aucacuucaacucuacccu

SEQ ID NO: 2231128 - RNA, 19 nt, Artificial Sequence
  Description of Artificial Sequence: Synthetic oligonucleotide
  Sense strand starting at position 3457 of SEQ ID NO: 1883983
aguugaagugauugggaag

SEQ ID NO: 2231129 - RNA, 19 nt, Artificial Sequence
  Description of Artificial Sequence: Synthetic oligonucleotide
  Antisense strand to SEQ ID NO: 2231128
cuucccaaucacuucaacu

SEQ ID NO: 2231130 - RNA, 19 nt, Artificial Sequence
  Description of Artificial Sequence: Synthetic oligonucleotide
  Sense strand starting at position 3460 of SEQ ID NO: 1883983
ugaagugauugggaaggga

SEQ ID NO: 2231131 - RNA, 19 nt, Artificial Sequence
  Description of Artificial Sequence: Synthetic oligonucleotide
  Antisense strand to SEQ ID NO: 2231130
ucccuucccaaucacuuca

SEQ ID NO: 2231132 - RNA, 19 nt, Artificial Sequence
  Description of Artificial Sequence: Synthetic oligonucleotide
  Sense strand starting at position 3535 of SEQ ID NO: 1883983
cuuagagacuuugggucuu

SEQ ID NO: 2231133 - RNA, 19 nt, Artificial Sequence
  Description of Artificial Sequence: Synthetic oligonucleotide
  Antisense strand to SEQ ID NO: 2231132
aagacccaaagucucuaag

SEQ ID NO: 2231134 - RNA, 19 nt, Artificial Sequence
  Description of Artificial Sequence: Synthetic oligonucleotide
  Sense strand starting at position 3629 of SEQ ID NO: 1883983
gaugguuugccauagccaa

SEQ ID NO: 2231135 - RNA, 19 nt, Artificial Sequence
  Description of Artificial Sequence: Synthetic oligonucleotide
  Antisense strand to SEQ ID NO: 2231134
uuggcuauggcaaaccauc

SEQ ID NO: 2231136 - RNA, 19 nt, Artificial Sequence
  Description of Artificial Sequence: Synthetic oligonucleotide
  Sense strand starting at position 3658 of SEQ ID NO: 1883983
gguccuggaggcugaauua

SEQ ID NO: 2231137 - RNA, 19 nt, Artificial Sequence
  Description of Artificial Sequence: Synthetic oligonucleotide
  Antisense strand to SEQ ID NO: 2231136
uaauucagccuccaggacc

SEQ ID NO: 2231138 - RNA, 19 nt, Artificial Sequence
  Description of Artificial Sequence: Synthetic oligonucleotide
  Sense strand starting at position 3670 of SEQ ID NO: 1883983
ugaauuaaaucugagaagg

SEQ ID NO: 2231139 - RNA, 19 nt, Artificial Sequence
  Description of Artificial Sequence: Synthetic oligonucleotide
  Antisense strand to SEQ ID NO: 2231138
ccuucucagauuuaauuca

SEQ ID NO: 2231140 - RNA, 19 nt, Artificial Sequence
  Description of Artificial Sequence: Synthetic oligonucleotide
  Sense strand starting at position 3672 of SEQ ID NO: 1883983
aauuaaaucugagaaggga

SEQ ID NO: 2231141 - RNA, 19 nt, Artificial Sequence
  Description of Artificial Sequence: Synthetic oligonucleotide
  Antisense strand to SEQ ID NO: 2231140
ucccuucucagauuuaauu

SEQ ID NO: 2231142 - RNA, 19 nt, Artificial Sequence
  Description of Artificial Sequence: Synthetic oligonucleotide
  Sense strand starting at position 3881 of SEQ ID NO: 1883983
ccaccagaucuaugaauug

SEQ ID NO: 2231143 - RNA, 19 nt, Artificial Sequence
  Description of Artificial Sequence: Synthetic oligonucleotide
  Antisense strand to SEQ ID NO: 2231142
caauucauagaucuggugg

SEQ ID NO: 2231144 - RNA, 19 nt, Artificial Sequence
  Description of Artificial Sequence: Synthetic oligonucleotide
  Sense strand starting at position 3906 of SEQ ID NO: 1883983
cgcuuucuauaccagaagu

SEQ ID NO: 2231145 - RNA, 19 nt, Artificial Sequence
  Description of Artificial Sequence: Synthetic oligonucleotide
  Antisense strand to SEQ ID NO: 2231144
acuucugguauagaaagcg

SEQ ID NO: 2231146 - RNA, 19 nt, Artificial Sequence
  Description of Artificial Sequence: Synthetic oligonucleotide
  Sense strand starting at position 526 of SEQ ID NO: 1883984
gggcccucaucuuuaaaga

SEQ ID NO: 2231147 - RNA, 19 nt, Artificial Sequence
  Description of Artificial Sequence: Synthetic oligonucleotide
  Antisense strand to SEQ ID NO: 2231146
ucuuuaaagaugagggccc

SEQ ID NO: 2231148 - RNA, 19 nt, Artificial Sequence
  Description of Artificial Sequence: Synthetic oligonucleotide
  Sense strand starting at position 527 of SEQ ID NO: 1883984
ggcccucaucuuuaaagau

SEQ ID NO: 2231149 - RNA, 19 nt, Artificial Sequence
  Description of Artificial Sequence: Synthetic oligonucleotide
  Antisense strand to SEQ ID NO: 2231148
aucuuuaaagaugagggcc

SEQ ID NO: 2231150 - RNA, 19 nt, Artificial Sequence
  Description of Artificial Sequence: Synthetic oligonucleotide
  Sense strand starting at position 561 of SEQ ID NO: 1883984
caggccuuaucgcucauua

SEQ ID NO: 2231151 - RNA, 19 nt, Artificial Sequence
  Description of Artificial Sequence: Synthetic oligonucleotide
  Antisense strand to SEQ ID NO: 2231150
uaaugagcgauaaggccug

SEQ ID NO: 2231152 - RNA, 19 nt, Artificial Sequence
  Description of Artificial Sequence: Synthetic oligonucleotide
  Sense strand starting at position 565 of SEQ ID NO: 1883984
ccuuaucgcucauuagcua

SEQ ID NO: 2231153 - RNA, 19 nt, Artificial Sequence
  Description of Artificial Sequence: Synthetic oligonucleotide
  Antisense strand to SEQ ID NO: 2231152
uagcuaaugagcgauaagg

SEQ ID NO: 2231154 - RNA, 19 nt, Artificial Sequence
  Description of Artificial Sequence: Synthetic oligonucleotide
  Sense strand starting at position 591 of SEQ ID NO: 1883984
agaugcaacugcucuggaa

SEQ ID NO: 2231155 - RNA, 19 nt, Artificial Sequence
  Description of Artificial Sequence: Synthetic oligonucleotide
  Antisense strand to SEQ ID NO: 2231154
uuccagagcaguugcaucu

SEQ ID NO: 2231156 - RNA, 19 nt, Artificial Sequence
  Description of Artificial Sequence: Synthetic oligonucleotide
  Sense strand starting at position 595 of SEQ ID NO: 1883984
gcaacugcucuggaagcaa

SEQ ID NO: 2231157 - RNA, 19 nt, Artificial Sequence
  Description of Artificial Sequence: Synthetic oligonucleotide
  Antisense strand to SEQ ID NO: 2231156
uugcuuccagagcaguugc

SEQ ID NO: 2231158 - RNA, 19 nt, Artificial Sequence
  Description of Artificial Sequence: Synthetic oligonucleotide
  Sense strand starting at position 712 of SEQ ID NO: 1883984
gcugguaguguugauuuca

SEQ ID NO: 2231159 - RNA, 19 nt, Artificial Sequence
  Description of Artificial Sequence: Synthetic oligonucleotide
  Antisense strand to SEQ ID NO: 2231158
ugaaaucaacacuaccagc

SEQ ID NO: 2231160 - RNA, 19 nt, Artificial Sequence
  Description of Artificial Sequence: Synthetic oligonucleotide
  Sense strand starting at position 745 of SEQ ID NO: 1883984
uuggguucucucggaaagu

SEQ ID NO: 2231161 - RNA, 19 nt, Artificial Sequence
  Description of Artificial Sequence: Synthetic oligonucleotide
  Antisense strand to SEQ ID NO: 2231160
acuuuccgagagaacccaa

SEQ ID NO: 2231162 - RNA, 19 nt, Artificial Sequence
  Description of Artificial Sequence: Synthetic oligonucleotide
  Sense strand starting at position 755 of SEQ ID NO: 1883984
ucggaaagucucugagcca

SEQ ID NO: 2231163 - RNA, 19 nt, Artificial Sequence
  Description of Artificial Sequence: Synthetic oligonucleotide
  Antisense strand to SEQ ID NO: 2231162
uggcucagagacuuuccga

SEQ ID NO: 2231164 - RNA, 19 nt, Artificial Sequence
  Description of Artificial Sequence: Synthetic oligonucleotide
  Sense strand starting at position 758 of SEQ ID NO: 1883984
gaaagucucugagccaaag

SEQ ID NO: 2231165 - RNA, 19 nt, Artificial Sequence
  Description of Artificial Sequence: Synthetic oligonucleotide
  Antisense strand to SEQ ID NO: 2231164
cuuuggcucagagacuuuc

SEQ ID NO: 2231166 - RNA, 19 nt, Artificial Sequence
  Description of Artificial Sequence: Synthetic oligonucleotide
  Sense strand starting at position 788 of SEQ ID NO: 1883984
gguaauuuauuaggcacuu

SEQ ID NO: 2231167 - RNA, 19 nt, Artificial Sequence
  Description of Artificial Sequence: Synthetic oligonucleotide
  Antisense strand to SEQ ID NO: 2231166
aagugccuaauaaauuacc

SEQ ID NO: 2231168 - RNA, 19 nt, Artificial Sequence
  Description of Artificial Sequence: Synthetic oligonucleotide
  Sense strand starting at position 868 of SEQ ID NO: 1883984
agcauuguccucgcagcua

SEQ ID NO: 2231169 - RNA, 19 nt, Artificial Sequence
  Description of Artificial Sequence: Synthetic oligonucleotide
  Antisense strand to SEQ ID NO: 2231168
uagcugcgaggacaaugcu

SEQ ID NO: 2231170 - RNA, 19 nt, Artificial Sequence
  Description of Artificial Sequence: Synthetic oligonucleotide
  Sense strand starting at position 1122 of SEQ ID NO: 1883984
ccgucccuaccugaaauau

SEQ ID NO: 2231171 - RNA, 19 nt, Artificial Sequence
  Description of Artificial Sequence: Synthetic oligonucleotide
  Antisense strand to SEQ ID NO: 2231170
auauuucagguagggacgg

SEQ ID NO: 2231172 - RNA, 19 nt, Artificial Sequence
  Description of Artificial Sequence: Synthetic oligonucleotide
  Sense strand starting at position 1278 of SEQ ID NO: 1883984
ggagaucauuuccagacuu

SEQ ID NO: 2231173 - RNA, 19 nt, Artificial Sequence
  Description of Artificial Sequence: Synthetic oligonucleotide
  Antisense strand to SEQ ID NO: 2231172
aagucuggaaaugaucucc

SEQ ID NO: 2231174 - RNA, 19 nt, Artificial Sequence
  Description of Artificial Sequence: Synthetic oligonucleotide
  Sense strand starting at position 1337 of SEQ ID NO: 1883984
uuagcaugccuauaaguca

SEQ ID NO: 2231175 - RNA, 19 nt, Artificial Sequence
  Description of Artificial Sequence: Synthetic oligonucleotide
  Antisense strand to SEQ ID NO: 2231174
ugacuuauaggcaugcuaa

SEQ ID NO: 2231176 - RNA, 19 nt, Artificial Sequence
  Description of Artificial Sequence: Synthetic oligonucleotide
  Sense strand starting at position 1396 of SEQ ID NO: 1883984
ccgggcuugugacuuacau

SEQ ID NO: 2231177 - RNA, 19 nt, Artificial Sequence
  Description of Artificial Sequence: Synthetic oligonucleotide
  Antisense strand to SEQ ID NO: 2231176
auguaagucacaagcccgg

SEQ ID NO: 2231178 - RNA, 19 nt, Artificial Sequence
  Description of Artificial Sequence: Synthetic oligonucleotide
  Sense strand starting at position 1398 of SEQ ID NO: 1883984
gggcuugugacuuacauca

SEQ ID NO: 2231179 - RNA, 19 nt, Artificial Sequence
  Description of Artificial Sequence: Synthetic oligonucleotide
  Antisense strand to SEQ ID NO: 2231178
ugauguaagucacaagccc

SEQ ID NO: 2231180 - RNA, 19 nt, Artificial Sequence
  Description of Artificial Sequence: Synthetic oligonucleotide
  Sense strand starting at position 1422 of SEQ ID NO: 1883984
ugcugaaaugcugacgaca

SEQ ID NO: 2231181 - RNA, 19 nt, Artificial Sequence
  Description of Artificial Sequence: Synthetic oligonucleotide
  Antisense strand to SEQ ID NO: 2231180
ugucgucagcauuucagca

SEQ ID NO: 2231182 - RNA, 19 nt, Artificial Sequence
  Description of Artificial Sequence: Synthetic oligonucleotide
  Sense strand starting at position 1571 of SEQ ID NO: 1883984
ugacuuagggucugucaaa

SEQ ID NO: 2231183 - RNA, 19 nt, Artificial Sequence
  Description of Artificial Sequence: Synthetic oligonucleotide
  Antisense strand to SEQ ID NO: 2231182
uuugacagacccuaaguca

SEQ ID NO: 2231184 - RNA, 19 nt, Artificial Sequence
  Description of Artificial Sequence: Synthetic oligonucleotide
  Sense strand starting at position 1651 of SEQ ID NO: 1883984
agaccugaaucacagguau

SEQ ID NO: 2231185 - RNA, 19 nt, Artificial Sequence
  Description of Artificial Sequence: Synthetic oligonucleotide
  Antisense strand to SEQ ID NO: 2231184
auaccugugauucaggucu

SEQ ID NO: 2231186 - RNA, 19 nt, Artificial Sequence
  Description of Artificial Sequence: Synthetic oligonucleotide
  Sense strand starting at position 1663 of SEQ ID NO: 1883984
cagguaucuuuggaaacug

SEQ ID NO: 2231187 - RNA, 19 nt, Artificial Sequence
  Description of Artificial Sequence: Synthetic oligonucleotide
  Antisense strand to SEQ ID NO: 2231186
caguuuccaaagauaccug

SEQ ID NO: 2231188 - RNA, 19 nt, Artificial Sequence
  Description of Artificial Sequence: Synthetic oligonucleotide
  Sense strand starting at position 1690 of SEQ ID NO: 1883984
cuuccuagcucagcugaaa

SEQ ID NO: 2231189 - RNA, 19 nt, Artificial Sequence
  Description of Artificial Sequence: Synthetic oligonucleotide
  Antisense strand to SEQ ID NO: 2231188
uuucagcugagcuaggaag

SEQ ID NO: 2231190 - RNA, 19 nt, Artificial Sequence
  Description of Artificial Sequence: Synthetic oligonucleotide
  Sense strand starting at position 2176 of SEQ ID NO: 1883984
gauguugucuccuggauuu

SEQ ID NO: 2231191 - RNA, 19 nt, Artificial Sequence
  Description of Artificial Sequence: Synthetic oligonucleotide
  Antisense strand to SEQ ID NO: 2231190
aaauccaggagacaacauc

SEQ ID NO: 2231192 - RNA, 19 nt, Artificial Sequence
  Description of Artificial Sequence: Synthetic oligonucleotide
  Sense strand starting at position 2528 of SEQ ID NO: 1883984
gcagcuggauguuucgaaa

SEQ ID NO: 2231193 - RNA, 19 nt, Artificial Sequence
  Description of Artificial Sequence: Synthetic oligonucleotide
  Antisense strand to SEQ ID NO: 2231192
uuucgaaacauccagcugc

SEQ ID NO: 2231194 - RNA, 19 nt, Artificial Sequence
  Description of Artificial Sequence: Synthetic oligonucleotide
  Sense strand starting at position 2540 of SEQ ID NO: 1883984
uucgaaauucgcccgcuuu

SEQ ID NO: 2231195 - RNA, 19 nt, Artificial Sequence
  Description of Artificial Sequence: Synthetic oligonucleotide
  Antisense strand to SEQ ID NO: 2231194
aaagcgggcgaauuucgaa

SEQ ID NO: 2231196 - RNA, 19 nt, Artificial Sequence
  Description of Artificial Sequence: Synthetic oligonucleotide
  Sense strand starting at position 2551 of SEQ ID NO: 1883984
cccgcuuuggaaugauaca

SEQ ID NO: 2231197 - RNA, 19 nt, Artificial Sequence
  Description of Artificial Sequence: Synthetic oligonucleotide
  Antisense strand to SEQ ID NO: 2231196
uguaucauuccaaagcggg

SEQ ID NO: 2231198 - RNA, 19 nt, Artificial Sequence
  Description of Artificial Sequence: Synthetic oligonucleotide
  Sense strand starting at position 2749 of SEQ ID NO: 1883984
ucugcuugccagcauagaa

SEQ ID NO: 2231199 - RNA, 19 nt, Artificial Sequence
  Description of Artificial Sequence: Synthetic oligonucleotide
  Antisense strand to SEQ ID NO: 2231198
uucuaugcuggcaagcaga

SEQ ID NO: 2231200 - RNA, 19 nt, Artificial Sequence
  Description of Artificial Sequence: Synthetic oligonucleotide
  Sense strand starting at position 2795 of SEQ ID NO: 1883984
ugguuaauggauugaauug

SEQ ID NO: 2231201 - RNA, 19 nt, Artificial Sequence
  Description of Artificial Sequence: Synthetic oligonucleotide
  Antisense strand to SEQ ID NO: 2231200
caauucaauccauuaacca

SEQ ID NO: 2231202 - RNA, 19 nt, Artificial Sequence
  Description of Artificial Sequence: Synthetic oligonucleotide
  Sense strand starting at position 2834 of SEQ ID NO: 1883984
uuugaaacaucacuggagu

SEQ ID NO: 2231203 - RNA, 19 nt, Artificial Sequence
  Description of Artificial Sequence: Synthetic oligonucleotide
  Antisense strand to SEQ ID NO: 2231202
acuccagugauguuucaaa

SEQ ID NO: 2231204 - RNA, 19 nt, Artificial Sequence
  Description of Artificial Sequence: Synthetic oligonucleotide
  Sense strand starting at position 2835 of SEQ ID NO: 1883984
uugaaacaucacuggaguu

SEQ ID NO: 2231205 - RNA, 19 nt, Artificial Sequence
  Description of Artificial Sequence: Synthetic oligonucleotide
  Antisense strand to SEQ ID NO: 2231204
aacuccagugauguuucaa

SEQ ID NO: 2231206 - RNA, 19 nt, Artificial Sequence
  Description of Artificial Sequence: Synthetic oligonucleotide
  Sense strand starting at position 2967 of SEQ ID NO: 1883984
gugagcucccaguguacau

SEQ ID NO: 2231207 - RNA, 19 nt, Artificial Sequence
  Description of Artificial Sequence: Synthetic oligonucleotide
  Antisense strand to SEQ ID NO: 2231206
auguacacugggagcucac

SEQ ID NO: 2231208 - RNA, 19 nt, Artificial Sequence
  Description of Artificial Sequence: Synthetic oligonucleotide
  Sense strand starting at position 3524 of SEQ ID NO: 1883984
cccugcuuucgaugacugu

SEQ ID NO: 2231209 - RNA, 19 nt, Artificial Sequence
  Description of Artificial Sequence: Synthetic oligonucleotide
  Antisense strand to SEQ ID NO: 2231208
acagucaucgaaagcaggg

SEQ ID NO: 2231210 - RNA, 19 nt, Artificial Sequence
  Description of Artificial Sequence: Synthetic oligonucleotide
  Sense strand starting at position 3525 of SEQ ID NO: 1883984
ccugcuuucgaugacuguu

SEQ ID NO: 2231211 - RNA, 19 nt, Artificial Sequence
  Description of Artificial Sequence: Synthetic oligonucleotide
  Antisense strand to SEQ ID NO: 2231210
aacagucaucgaaagcagg

SEQ ID NO: 2231212 - RNA, 19 nt, Artificial Sequence
  Description of Artificial Sequence: Synthetic oligonucleotide
  Sense strand starting at position 3528 of SEQ ID NO: 1883984
gcuuucgaugacuguugga

SEQ ID NO: 2231213 - RNA, 19 nt, Artificial Sequence
  Description of Artificial Sequence: Synthetic oligonucleotide
  Antisense strand to SEQ ID NO: 2231212
uccaacagucaucgaaagc

SEQ ID NO: 2231214 - RNA, 19 nt, Artificial Sequence
  Description of Artificial Sequence: Synthetic oligonucleotide
  Sense strand starting at position 3533 of SEQ ID NO: 1883984
cgaugacuguuggaggaaa

SEQ ID NO: 2231215 - RNA, 19 nt, Artificial Sequence
  Description of Artificial Sequence: Synthetic oligonucleotide
  Antisense strand to SEQ ID NO: 2231214
uuuccuccaacagucaucg

SEQ ID NO: 2231216 - RNA, 19 nt, Artificial Sequence
  Description of Artificial Sequence: Synthetic oligonucleotide
  Sense strand starting at position 3556 of SEQ ID NO: 1883984
agccacgucccucauagau

SEQ ID NO: 2231217 - RNA, 19 nt, Artificial Sequence
  Description of Artificial Sequence: Synthetic oligonucleotide
  Antisense strand to SEQ ID NO: 2231216
aucuaugagggacguggcu

SEQ ID NO: 2231218 - RNA, 19 nt, Artificial Sequence
  Description of Artificial Sequence: Synthetic oligonucleotide
  Sense strand starting at position 3563 of SEQ ID NO: 1883984
ucccucauagauuggaaau

SEQ ID NO: 2231219 - RNA, 19 nt, Artificial Sequence
  Description of Artificial Sequence: Synthetic oligonucleotide
  Antisense strand to SEQ ID NO: 2231218
auuuccaaucuaugaggga

SEQ ID NO: 2231220 - RNA, 19 nt, Artificial Sequence
  Description of Artificial Sequence: Synthetic oligonucleotide
  Sense strand starting at position 3565 of SEQ ID NO: 1883984
ccucauagauuggaaaucu

SEQ ID NO: 2231221 - RNA, 19 nt, Artificial Sequence
  Description of Artificial Sequence: Synthetic oligonucleotide
  Antisense strand to SEQ ID NO: 2231220
agauuuccaaucuaugagg

SEQ ID NO: 2231222 - RNA, 19 nt, Artificial Sequence
  Description of Artificial Sequence: Synthetic oligonucleotide
  Sense strand starting at position 3672 of SEQ ID NO: 1883984
ugcagucaucauugauucu

SEQ ID NO: 2231223 - RNA, 19 nt, Artificial Sequence
  Description of Artificial Sequence: Synthetic oligonucleotide
  Antisense strand to SEQ ID NO: 2231222
agaaucaaugaugacugca

SEQ ID NO: 2231224 - RNA, 19 nt, Artificial Sequence
  Description of Artificial Sequence: Synthetic oligonucleotide
  Sense strand starting at position 3818 of SEQ ID NO: 1883984
gguucuuccucagaaauaa

SEQ ID NO: 2231225 - RNA, 19 nt, Artificial Sequence
  Description of Artificial Sequence: Synthetic oligonucleotide
  Antisense strand to SEQ ID NO: 2231224
uuauuucugaggaagaacc

SEQ ID NO: 2231226 - RNA, 19 nt, Artificial Sequence
  Description of Artificial Sequence: Synthetic oligonucleotide
  Sense strand starting at position 96 of SEQ ID NO: 1883985
gggccagaaucuccugcau

SEQ ID NO: 2231227 - RNA, 19 nt, Artificial Sequence
  Description of Artificial Sequence: Synthetic oligonucleotide
  Antisense strand to SEQ ID NO: 2231226
augcaggagauucuggccc

SEQ ID NO: 2231228 - RNA, 19 nt, Artificial Sequence
  Description of Artificial Sequence: Synthetic oligonucleotide
  Sense strand starting at position 241 of SEQ ID NO: 1883985
agaaguuccgagggaucau

SEQ ID NO: 2231229 - RNA, 19 nt, Artificial Sequence
  Description of Artificial Sequence: Synthetic oligonucleotide
  Antisense strand to SEQ ID NO: 2231228
augaucccucggaacuucu

SEQ ID NO: 2231230 - RNA, 19 nt, Artificial Sequence
  Description of Artificial Sequence: Synthetic oligonucleotide
  Sense strand starting at position 242 of SEQ ID NO: 1883985
gaaguuccgagggaucauc

SEQ ID NO: 2231231 - RNA, 19 nt, Artificial Sequence
  Description of Artificial Sequence: Synthetic oligonucleotide
  Antisense strand to SEQ ID NO: 2231230
gaugaucccucggaacuuc

SEQ ID NO: 2231232 - RNA, 19 nt, Artificial Sequence
  Description of Artificial Sequence: Synthetic oligonucleotide
  Sense strand starting at position 429 of SEQ ID NO: 1883985
acucuauaauguccaguca

SEQ ID NO: 2231233 - RNA, 19 nt, Artificial Sequence
  Description of Artificial Sequence: Synthetic oligonucleotide
  Antisense strand to SEQ ID NO: 2231232
ugacuggacauuauagagu

SEQ ID NO: 2231234 - RNA, 19 nt, Artificial Sequence
  Description of Artificial Sequence: Synthetic oligonucleotide
  Sense strand starting at position 430 of SEQ ID NO: 1883985
cucuauaauguccagucau

SEQ ID NO: 2231235 - RNA, 19 nt, Artificial Sequence
  Description of Artificial Sequence: Synthetic oligonucleotide
  Antisense strand to SEQ ID NO: 2231234
augacuggacauuauagag

SEQ ID NO: 2231236 - RNA, 19 nt, Artificial Sequence
  Description of Artificial Sequence: Synthetic oligonucleotide
  Sense strand starting at position 720 of SEQ ID NO: 1883985
caaggaacgcauugugaac

SEQ ID NO: 2231237 - RNA, 19 nt, Artificial Sequence
  Description of Artificial Sequence: Synthetic oligonucleotide
  Antisense strand to SEQ ID NO: 2231236
guucacaaugcguuccuug

SEQ ID NO: 2231238 - RNA, 19 nt, Artificial Sequence
  Description of Artificial Sequence: Synthetic oligonucleotide
  Sense strand starting at position 744 of SEQ ID NO: 1883985
ugugacuuugaugaucuau

SEQ ID NO: 2231239 - RNA, 19 nt, Artificial Sequence
  Description of Artificial Sequence: Synthetic oligonucleotide
  Antisense strand to SEQ ID NO: 2231238
auagaucaucaaagucaca

SEQ ID NO: 2231240 - RNA, 19 nt, Artificial Sequence
  Description of Artificial Sequence: Synthetic oligonucleotide
  Sense strand starting at position 788 of SEQ ID NO: 1883985
ucgucuaagaaauaugagu

SEQ ID NO: 2231241 - RNA, 19 nt, Artificial Sequence
  Description of Artificial Sequence: Synthetic oligonucleotide
  Antisense strand to SEQ ID NO: 2231240
acucauauuucuuagacga

SEQ ID NO: 2231242 - RNA, 19 nt, Artificial Sequence
  Description of Artificial Sequence: Synthetic oligonucleotide
  Sense strand starting at position 816 of SEQ ID NO: 1883985
uuuauaaacuggcucugaa

SEQ ID NO: 2231243 - RNA, 19 nt, Artificial Sequence
  Description of Artificial Sequence: Synthetic oligonucleotide
  Antisense strand to SEQ ID NO: 2231242
uucagagccaguuuauaaa

SEQ ID NO: 2231244 - RNA, 19 nt, Artificial Sequence
  Description of Artificial Sequence: Synthetic oligonucleotide
  Sense strand starting at position 1011 of SEQ ID NO: 1883985
aagcacaucguuuacagau

SEQ ID NO: 2231245 - RNA, 19 nt, Artificial Sequence
  Description of Artificial Sequence: Synthetic oligonucleotide
  Antisense strand to SEQ ID NO: 2231244
aucuguaaacgaugugcuu

SEQ ID NO: 2231246 - RNA, 19 nt, Artificial Sequence
  Description of Artificial Sequence: Synthetic oligonucleotide
  Sense strand starting at position 1017 of SEQ ID NO: 1883985
aucguuuacagaugagaaa

SEQ ID NO: 2231247 - RNA, 19 nt, Artificial Sequence
  Description of Artificial Sequence: Synthetic oligonucleotide
  Antisense strand to SEQ ID NO: 2231246
uuucucaucuguaaacgau

SEQ ID NO: 2231248 - RNA, 19 nt, Artificial Sequence
  Description of Artificial Sequence: Synthetic oligonucleotide
  Sense strand starting at position 1072 of SEQ ID NO: 1883985
cagcaauggcuagaggagu

SEQ ID NO: 2231249 - RNA, 19 nt, Artificial Sequence
  Description of Artificial Sequence: Synthetic oligonucleotide
  Antisense strand to SEQ ID NO: 2231248
acuccucuagccauugcug

SEQ ID NO: 2231250 - RNA, 19 nt, Artificial Sequence
  Description of Artificial Sequence: Synthetic oligonucleotide
  Sense strand starting at position 1317 of SEQ ID NO: 1883985
gugccucugcuccuguaua

SEQ ID NO: 2231251 - RNA, 19 nt, Artificial Sequence
  Description of Artificial Sequence: Synthetic oligonucleotide
  Antisense strand to SEQ ID NO: 2231250
uauacaggagcagaggcac

SEQ ID NO: 2231252 - RNA, 19 nt, Artificial Sequence
  Description of Artificial Sequence: Synthetic oligonucleotide
  Sense strand starting at position 2063 of SEQ ID NO: 1883985
ucagguuucucauugugaa

SEQ ID NO: 2231253 - RNA, 19 nt, Artificial Sequence
  Description of Artificial Sequence: Synthetic oligonucleotide
  Antisense strand to SEQ ID NO: 2231252
uucacaaugagaaaccuga

SEQ ID NO: 2231254 - RNA, 19 nt, Artificial Sequence
  Description of Artificial Sequence: Synthetic oligonucleotide
  Sense strand starting at position 2134 of SEQ ID NO: 1883985
ccaaaucugccucacgcaa

SEQ ID NO: 2231255 - RNA, 19 nt, Artificial Sequence
  Description of Artificial Sequence: Synthetic oligonucleotide
  Antisense strand to SEQ ID NO: 2231254
uugcgugaggcagauuugg

SEQ ID NO: 2231256 - RNA, 19 nt, Artificial Sequence
  Description of Artificial Sequence: Synthetic oligonucleotide
  Sense strand starting at position 2145 of SEQ ID NO: 1883985
ucacgcaaucucugaaaca

SEQ ID NO: 2231257 - RNA, 19 nt, Artificial Sequence
  Description of Artificial Sequence: Synthetic oligonucleotide
  Antisense strand to SEQ ID NO: 2231256
uguuucagagauugcguga

SEQ ID NO: 2231258 - RNA, 19 nt, Artificial Sequence
  Description of Artificial Sequence: Synthetic oligonucleotide
  Sense strand starting at position 2184 of SEQ ID NO: 1883985
gagauuucugcaggugcuu

SEQ ID NO: 2231259 - RNA, 19 nt, Artificial Sequence
  Description of Artificial Sequence: Synthetic oligonucleotide
  Antisense strand to SEQ ID NO: 2231258
aagcaccugcagaaaucuc

SEQ ID NO: 2231260 - RNA, 19 nt, Artificial Sequence
  Description of Artificial Sequence: Synthetic oligonucleotide
  Sense strand starting at position 2210 of SEQ ID NO: 1883985
acaacauugccaugagcua

SEQ ID NO: 2231261 - RNA, 19 nt, Artificial Sequence
  Description of Artificial Sequence: Synthetic oligonucleotide
  Antisense strand to SEQ ID NO: 2231260
uagcucauggcaauguugu

SEQ ID NO: 2231262 - RNA, 19 nt, Artificial Sequence
  Description of Artificial Sequence: Synthetic oligonucleotide
  Sense strand starting at position 2406 of SEQ ID NO: 1883985
gauagagcagcuuagaauc

SEQ ID NO: 2231263 - RNA, 19 nt, Artificial Sequence
  Description of Artificial Sequence: Synthetic oligonucleotide
  Antisense strand to SEQ ID NO: 2231262
gauucuaagcugcucuauc

SEQ ID NO: 2231264 - RNA, 19 nt, Artificial Sequence
  Description of Artificial Sequence: Synthetic oligonucleotide
  Sense strand starting at position 2438 of SEQ ID NO: 1883985
aagcaagaagcuuacguaa

SEQ ID NO: 2231265 - RNA, 19 nt, Artificial Sequence
  Description of Artificial Sequence: Synthetic oligonucleotide
  Antisense strand to SEQ ID NO: 2231264
uuacguaagcuucuugcuu

SEQ ID NO: 2231266 - RNA, 19 nt, Artificial Sequence
  Description of Artificial Sequence: Synthetic oligonucleotide
  Sense strand starting at position 2501 of SEQ ID NO: 1883985
ugcuacuguuaacuagaaa

SEQ ID NO: 2231267 - RNA, 19 nt, Artificial Sequence
  Description of Artificial Sequence: Synthetic oligonucleotide
  Antisense strand to SEQ ID NO: 2231266
uuucuaguuaacaguagca

SEQ ID NO: 2231268 - RNA, 19 nt, Artificial Sequence
  Description of Artificial Sequence: Synthetic oligonucleotide
  Sense strand starting at position 2663 of SEQ ID NO: 1883985
gaaagauaaucuuccucgu

SEQ ID NO: 2231269 - RNA, 19 nt, Artificial Sequence
  Description of Artificial Sequence: Synthetic oligonucleotide
  Antisense strand to SEQ ID NO: 2231268
acgaggaagauuaucuuuc

SEQ ID NO: 2231270 - RNA, 19 nt, Artificial Sequence
  Description of Artificial Sequence: Synthetic oligonucleotide
  Sense strand starting at position 2666 of SEQ ID NO: 1883985
agauaaucuuccucgucca

SEQ ID NO: 2231271 - RNA, 19 nt, Artificial Sequence
  Description of Artificial Sequence: Synthetic oligonucleotide
  Antisense strand to SEQ ID NO: 2231270
uggacgaggaagauuaucu

SEQ ID NO: 2231272 - RNA, 19 nt, Artificial Sequence
  Description of Artificial Sequence: Synthetic oligonucleotide
  Sense strand starting at position 2706 of SEQ ID NO: 1883985
uguagacauuguguccaga

SEQ ID NO: 2231273 - RNA, 19 nt, Artificial Sequence
  Description of Artificial Sequence: Synthetic oligonucleotide
  Antisense strand to SEQ ID NO: 2231272
ucuggacacaaugucuaca

SEQ ID NO: 2231274 - RNA, 19 nt, Artificial Sequence
  Description of Artificial Sequence: Synthetic oligonucleotide
  Sense strand starting at position 2708 of SEQ ID NO: 1883985
uagacauuguguccagacu

SEQ ID NO: 2231275 - RNA, 19 nt, Artificial Sequence
  Description of Artificial Sequence: Synthetic oligonucleotide
  Antisense strand to SEQ ID NO: 2231274
agucuggacacaaugucua

SEQ ID NO: 2231276 - RNA, 19 nt, Artificial Sequence
  Description of Artificial Sequence: Synthetic oligonucleotide
  Sense strand starting at position 2709 of SEQ ID NO: 1883985
agacauuguguccagacuu

SEQ ID NO: 2231277 - RNA, 19 nt, Artificial Sequence
  Description of Artificial Sequence: Synthetic oligonucleotide
  Antisense strand to SEQ ID NO: 2231276
aagucuggacacaaugucu

SEQ ID NO: 2231278 - RNA, 19 nt, Artificial Sequence
  Description of Artificial Sequence: Synthetic oligonucleotide
  Sense strand starting at position 2900 of SEQ ID NO: 1883985
gagugauggaagugguauu

SEQ ID NO: 2231279 - RNA, 19 nt, Artificial Sequence
  Description of Artificial Sequence: Synthetic oligonucleotide
  Antisense strand to SEQ ID NO: 2231278
aauaccacuuccaucacuc

SEQ ID NO: 2231280 - RNA, 19 nt, Artificial Sequence
  Description of Artificial Sequence: Synthetic oligonucleotide
  Sense strand starting at position 2951 of SEQ ID NO: 1883985
gcguguuaaggaggaccaa

SEQ ID NO: 2231281 - RNA, 19 nt, Artificial Sequence
  Description of Artificial Sequence: Synthetic oligonucleotide
  Antisense strand to SEQ ID NO: 2231280
uugguccuccuuaacacgc

SEQ ID NO: 2231282 - RNA, 19 nt, Artificial Sequence
  Description of Artificial Sequence: Synthetic oligonucleotide
  Sense strand starting at position 3115 of SEQ ID NO: 1883985
ugaugaggaaucugcauau

SEQ ID NO: 2231283 - RNA, 19 nt, Artificial Sequence
  Description of Artificial Sequence: Synthetic oligonucleotide
  Antisense strand to SEQ ID NO: 2231282
auaugcagauuccucauca

SEQ ID NO: 2231284 - RNA, 19 nt, Artificial Sequence
  Description of Artificial Sequence: Synthetic oligonucleotide
  Sense strand starting at position 3160 of SEQ ID NO: 1883985
agguguggugaucacgaaa

SEQ ID NO: 2231285 - RNA, 19 nt, Artificial Sequence
  Description of Artificial Sequence: Synthetic oligonucleotide
  Antisense strand to SEQ ID NO: 2231284
uuucgugaucaccacaccu

SEQ ID NO: 2231286 - RNA, 19 nt, Artificial Sequence
  Description of Artificial Sequence: Synthetic oligonucleotide
  Sense strand starting at position 3163 of SEQ ID NO: 1883985
uguggugaucacgaaauga

SEQ ID NO: 2231287 - RNA, 19 nt, Artificial Sequence
  Description of Artificial Sequence: Synthetic oligonucleotide
  Antisense strand to SEQ ID NO: 2231286
ucauuucgugaucaccaca

SEQ ID NO: 2231288 - RNA, 19 nt, Artificial Sequence
  Description of Artificial Sequence: Synthetic oligonucleotide
  Sense strand starting at position 3167 of SEQ ID NO: 1883985
gugaucacgaaaugaaauu

SEQ ID NO: 2231289 - RNA, 19 nt, Artificial Sequence
  Description of Artificial Sequence: Synthetic oligonucleotide
  Antisense strand to SEQ ID NO: 2231288
aauuucauuucgugaucac

SEQ ID NO: 2231290 - RNA, 19 nt, Artificial Sequence
  Description of Artificial Sequence: Synthetic oligonucleotide
  Sense strand starting at position 3195 of SEQ ID NO: 1883985
auauguuacuaagugugaa

SEQ ID NO: 2231291 - RNA, 19 nt, Artificial Sequence
  Description of Artificial Sequence: Synthetic oligonucleotide
  Antisense strand to SEQ ID NO: 2231290
uucacacuuaguaacauau

SEQ ID NO: 2231292 - RNA, 19 nt, Artificial Sequence
  Description of Artificial Sequence: Synthetic oligonucleotide
  Sense strand starting at position 3284 of SEQ ID NO: 1883985
gcagaaagauuuggaacua

SEQ ID NO: 2231293 - RNA, 19 nt, Artificial Sequence
  Description of Artificial Sequence: Synthetic oligonucleotide
  Antisense strand to SEQ ID NO: 2231292
uaguuccaaaucuuucugc

SEQ ID NO: 2231294 - RNA, 19 nt, Artificial Sequence
  Description of Artificial Sequence: Synthetic oligonucleotide
  Sense strand starting at position 3425 of SEQ ID NO: 1883985
acgugagugaaucacuuga

SEQ ID NO: 2231295 - RNA, 19 nt, Artificial Sequence
  Description of Artificial Sequence: Synthetic oligonucleotide
  Antisense strand to SEQ ID NO: 2231294
ucaagugauucacucacgu

SEQ ID NO: 2231296 - RNA, 19 nt, Artificial Sequence
  Description of Artificial Sequence: Synthetic oligonucleotide
  Sense strand starting at position 3563 of SEQ ID NO: 1883985
agagcucugcucuagaacu

SEQ ID NO: 2231297 - RNA, 19 nt, Artificial Sequence
  Description of Artificial Sequence: Synthetic oligonucleotide
  Antisense strand to SEQ ID NO: 2231296
aguucuagagcagagcucu

SEQ ID NO: 2231298 - RNA, 19 nt, Artificial Sequence
  Description of Artificial Sequence: Synthetic oligonucleotide
  Sense strand starting at position 3565 of SEQ ID NO: 1883985
agcucugcucuagaacuca

SEQ ID NO: 2231299 - RNA, 19 nt, Artificial Sequence
  Description of Artificial Sequence: Synthetic oligonucleotide
  Antisense strand to SEQ ID NO: 2231298
ugaguucuagagcagagcu

SEQ ID NO: 2231300 - RNA, 19 nt, Artificial Sequence
  Description of Artificial Sequence: Synthetic oligonucleotide
  Sense strand starting at position 3645 of SEQ ID NO: 1883985
uuuccucuaccguaaugaa

SEQ ID NO: 2231301 - RNA, 19 nt, Artificial Sequence
  Description of Artificial Sequence: Synthetic oligonucleotide
  Antisense strand to SEQ ID NO: 2231300
uucauuacgguagaggaaa

SEQ ID NO: 2231302 - RNA, 19 nt, Artificial Sequence
  Description of Artificial Sequence: Synthetic oligonucleotide
  Sense strand starting at position 3657 of SEQ ID NO: 1883985
uaaugaaaucuguggcauc

SEQ ID NO: 2231303 - RNA, 19 nt, Artificial Sequence
  Description of Artificial Sequence: Synthetic oligonucleotide
  Antisense strand to SEQ ID NO: 2231302
gaugccacagauuucauua

SEQ ID NO: 2231304 - RNA, 19 nt, Artificial Sequence
  Description of Artificial Sequence: Synthetic oligonucleotide
  Sense strand starting at position 3972 of SEQ ID NO: 1883985
cuagucaugucuccugaau

SEQ ID NO: 2231305 - RNA, 19 nt, Artificial Sequence
  Description of Artificial Sequence: Synthetic oligonucleotide
  Antisense strand to SEQ ID NO: 2231304
auucaggagacaugacuag

SEQ ID NO: 2231306 - RNA, 19 nt, Artificial Sequence
  Description of Artificial Sequence: Synthetic oligonucleotide
  Sense strand starting at position 2056 of SEQ ID NO: 1883986
uuccguuuaugacguggaa

SEQ ID NO: 2231307 - RNA, 19 nt, Artificial Sequence
  Description of Artificial Sequence: Synthetic oligonucleotide
  Antisense strand to SEQ ID NO: 2231306
uuccacgucauaaacggaa

SEQ ID NO: 2231308 - RNA, 19 nt, Artificial Sequence
  Description of Artificial Sequence: Synthetic oligonucleotide
  Sense strand starting at position 2058 of SEQ ID NO: 1883986
ccguuuaugacguggaagu

SEQ ID NO: 2231309 - RNA, 19 nt, Artificial Sequence
  Description of Artificial Sequence: Synthetic oligonucleotide
  Antisense strand to SEQ ID NO: 2231308
acuuccacgucauaaacgg

SEQ ID NO: 2231310 - RNA, 19 nt, Artificial Sequence
  Description of Artificial Sequence: Synthetic oligonucleotide
  Sense strand starting at position 2229 of SEQ ID NO: 1883986
gaauaugaauuaugcgcaa

SEQ ID NO: 2231311 - RNA, 19 nt, Artificial Sequence
  Description of Artificial Sequence: Synthetic oligonucleotide
  Antisense strand to SEQ ID NO: 2231310
uugcgcauaauucauauuc

SEQ ID NO: 2231312 - RNA, 19 nt, Artificial Sequence
  Description of Artificial Sequence: Synthetic oligonucleotide
  Sense strand starting at position 2233 of SEQ ID NO: 1883986
augaauuaugcgcaaauua

SEQ ID NO: 2231313 - RNA, 19 nt, Artificial Sequence
  Description of Artificial Sequence: Synthetic oligonucleotide
  Antisense strand to SEQ ID NO: 2231312
uaauuugcgcauaauucau

SEQ ID NO: 2231314 - RNA, 19 nt, Artificial Sequence
  Description of Artificial Sequence: Synthetic oligonucleotide
  Sense strand starting at position 2243 of SEQ ID NO: 1883986
cgcaaauuacuguacacua

SEQ ID NO: 2231315 - RNA, 19 nt, Artificial Sequence
  Description of Artificial Sequence: Synthetic oligonucleotide
  Antisense strand to SEQ ID NO: 2231314
uaguguacaguaauuugcg

SEQ ID NO: 2231316 - RNA, 19 nt, Artificial Sequence
  Description of Artificial Sequence: Synthetic oligonucleotide
  Sense strand starting at position 2383 of SEQ ID NO: 1883986
agcugagauuacuguauga

SEQ ID NO: 2231317 - RNA, 19 nt, Artificial Sequence
  Description of Artificial Sequence: Synthetic oligonucleotide
  Antisense strand to SEQ ID NO: 2231316
ucauacaguaaucucagcu

SEQ ID NO: 2231318 - RNA, 19 nt, Artificial Sequence
  Description of Artificial Sequence: Synthetic oligonucleotide
  Sense strand starting at position 2387 of SEQ ID NO: 1883986
gagauuacuguaugauguc

SEQ ID NO: 2231319 - RNA, 19 nt, Artificial Sequence
  Description of Artificial Sequence: Synthetic oligonucleotide
  Antisense strand to SEQ ID NO: 2231318
gacaucauacaguaaucuc

SEQ ID NO: 2231320 - RNA, 19 nt, Artificial Sequence
  Description of Artificial Sequence: Synthetic oligonucleotide
  Sense strand starting at position 2388 of SEQ ID NO: 1883986
agauuacuguaugauguca

SEQ ID NO: 2231321 - RNA, 19 nt, Artificial Sequence
  Description of Artificial Sequence: Synthetic oligonucleotide
  Antisense strand to SEQ ID NO: 2231320
ugacaucauacaguaaucu

SEQ ID NO: 2231322 - RNA, 19 nt, Artificial Sequence
  Description of Artificial Sequence: Synthetic oligonucleotide
  Sense strand starting at position 2393 of SEQ ID NO: 1883986
acuguaugaugucaagucu

SEQ ID NO: 2231323 - RNA, 19 nt, Artificial Sequence
  Description of Artificial Sequence: Synthetic oligonucleotide
  Antisense strand to SEQ ID NO: 2231322
agacuugacaucauacagu

SEQ ID NO: 2231324 - RNA, 19 nt, Artificial Sequence
  Description of Artificial Sequence: Synthetic oligonucleotide
  Sense strand starting at position 2665 of SEQ ID NO: 1883986
guaaauauauugugaacug

SEQ ID NO: 2231325 - RNA, 19 nt, Artificial Sequence
  Description of Artificial Sequence: Synthetic oligonucleotide
  Antisense strand to SEQ ID NO: 2231324
caguucacaauauauuuac

SEQ ID NO: 2231326 - RNA, 19 nt, Artificial Sequence
  Description of Artificial Sequence: Synthetic oligonucleotide
  Sense strand starting at position 2710 of SEQ ID NO: 1883986
acuuguugguccuuugauu

SEQ ID NO: 2231327 - RNA, 19 nt, Artificial Sequence
  Description of Artificial Sequence: Synthetic oligonucleotide
  Antisense strand to SEQ ID NO: 2231326
aaucaaaggaccaacaagu

SEQ ID NO: 2231328 - RNA, 19 nt, Artificial Sequence
  Description of Artificial Sequence: Synthetic oligonucleotide
  Sense strand starting at position 2716 of SEQ ID NO: 1883986
ugguccuuugauuaucuua

SEQ ID NO: 2231329 - RNA, 19 nt, Artificial Sequence
  Description of Artificial Sequence: Synthetic oligonucleotide
  Antisense strand to SEQ ID NO: 2231328
uaagauaaucaaaggacca

SEQ ID NO: 2231330 - RNA, 19 nt, Artificial Sequence
  Description of Artificial Sequence: Synthetic oligonucleotide
  Sense strand starting at position 2831 of SEQ ID NO: 1883986
aaggcauuguguccagauu

SEQ ID NO: 2231331 - RNA, 19 nt, Artificial Sequence
  Description of Artificial Sequence: Synthetic oligonucleotide
  Antisense strand to SEQ ID NO: 2231330
aaucuggacacaaugccuu

SEQ ID NO: 2231332 - RNA, 19 nt, Artificial Sequence
  Description of Artificial Sequence: Synthetic oligonucleotide
  Sense strand starting at position 3010 of SEQ ID NO: 1883986
aucacuuuguagugagugu

SEQ ID NO: 2231333 - RNA, 19 nt, Artificial Sequence
  Description of Artificial Sequence: Synthetic oligonucleotide
  Antisense strand to SEQ ID NO: 2231332
acacucacuacaaagugau

SEQ ID NO: 2231334 - RNA, 19 nt, Artificial Sequence
  Description of Artificial Sequence: Synthetic oligonucleotide
  Sense strand starting at position 3011 of SEQ ID NO: 1883986
ucacuuuguagugaguguu

SEQ ID NO: 2231335 - RNA, 19 nt, Artificial Sequence
  Description of Artificial Sequence: Synthetic oligonucleotide
  Antisense strand to SEQ ID NO: 2231334
aacacucacuacaaaguga

SEQ ID NO: 2231336 - RNA, 19 nt, Artificial Sequence
  Description of Artificial Sequence: Synthetic oligonucleotide
  Sense strand starting at position 3014 of SEQ ID NO: 1883986
cuuuguagugaguguugga

SEQ ID NO: 2231337 - RNA, 19 nt, Artificial Sequence
  Description of Artificial Sequence: Synthetic oligonucleotide
  Antisense strand to SEQ ID NO: 2231336
uccaacacucacuacaaag

SEQ ID NO: 2231338 - RNA, 19 nt, Artificial Sequence
  Description of Artificial Sequence: Synthetic oligonucleotide
  Sense strand starting at position 3017 of SEQ ID NO: 1883986
uguagugaguguuggaacu

SEQ ID NO: 2231339 - RNA, 19 nt, Artificial Sequence
  Description of Artificial Sequence: Synthetic oligonucleotide
  Antisense strand to SEQ ID NO: 2231338
aguuccaacacucacuaca

SEQ ID NO: 2231340 - RNA, 19 nt, Artificial Sequence
  Description of Artificial Sequence: Synthetic oligonucleotide
  Sense strand starting at position 3023 of SEQ ID NO: 1883986
gaguguuggaacugggauu

SEQ ID NO: 2231341 - RNA, 19 nt, Artificial Sequence
  Description of Artificial Sequence: Synthetic oligonucleotide
  Antisense strand to SEQ ID NO: 2231340
aaucccaguuccaacacuc

SEQ ID NO: 2231342 - RNA, 19 nt, Artificial Sequence
  Description of Artificial Sequence: Synthetic oligonucleotide
  Sense strand starting at position 3140 of SEQ ID NO: 1883986
cugccuucuuaugggugaa

SEQ ID NO: 2231343 - RNA, 19 nt, Artificial Sequence
  Description of Artificial Sequence: Synthetic oligonucleotide
  Antisense strand to SEQ ID NO: 2231342
uucacccauaagaaggcag

SEQ ID NO: 2231344 - RNA, 19 nt, Artificial Sequence
  Description of Artificial Sequence: Synthetic oligonucleotide
  Sense strand starting at position 3141 of SEQ ID NO: 1883986
ugccuucuuaugggugaau

SEQ ID NO: 2231345 - RNA, 19 nt, Artificial Sequence
  Description of Artificial Sequence: Synthetic oligonucleotide
  Antisense strand to SEQ ID NO: 2231344
auucacccauaagaaggca

SEQ ID NO: 2231346 - RNA, 19 nt, Artificial Sequence
  Description of Artificial Sequence: Synthetic oligonucleotide
  Sense strand starting at position 3142 of SEQ ID NO: 1883986
gccuucuuaugggugaauu

SEQ ID NO: 2231347 - RNA, 19 nt, Artificial Sequence
  Description of Artificial Sequence: Synthetic oligonucleotide
  Antisense strand to SEQ ID NO: 2231346
aauucacccauaagaaggc

SEQ ID NO: 2231348 - RNA, 19 nt, Artificial Sequence
  Description of Artificial Sequence: Synthetic oligonucleotide
  Sense strand starting at position 3317 of SEQ ID NO: 1883986
uuagguuacuaacugugaa

SEQ ID NO: 2231349 - RNA, 19 nt, Artificial Sequence
  Description of Artificial Sequence: Synthetic oligonucleotide
  Antisense strand to SEQ ID NO: 2231348
uucacaguuaguaaccuaa

SEQ ID NO: 2231350 - RNA, 19 nt, Artificial Sequence
  Description of Artificial Sequence: Synthetic oligonucleotide
  Sense strand starting at position 3320 of SEQ ID NO: 1883986
gguuacuaacugugaauug

SEQ ID NO: 2231351 - RNA, 19 nt, Artificial Sequence
  Description of Artificial Sequence: Synthetic oligonucleotide
  Antisense strand to SEQ ID NO: 2231350
caauucacaguuaguaacc

SEQ ID NO: 2231352 - RNA, 19 nt, Artificial Sequence
  Description of Artificial Sequence: Synthetic oligonucleotide
  Sense strand starting at position 3327 of SEQ ID NO: 1883986
aacugugaauugucuagcu

SEQ ID NO: 2231353 - RNA, 19 nt, Artificial Sequence
  Description of Artificial Sequence: Synthetic oligonucleotide
  Antisense strand to SEQ ID NO: 2231352
agcuagacaauucacaguu

SEQ ID NO: 2231354 - RNA, 19 nt, Artificial Sequence
  Description of Artificial Sequence: Synthetic oligonucleotide
  Sense strand starting at position 3339 of SEQ ID NO: 1883986
ucuagcuucucugcaguaa

SEQ ID NO: 2231355 - RNA, 19 nt, Artificial Sequence
  Description of Artificial Sequence: Synthetic oligonucleotide
  Antisense strand to SEQ ID NO: 2231354
uuacugcagagaagcuaga

SEQ ID NO: 2231356 - RNA, 19 nt, Artificial Sequence
  Description of Artificial Sequence: Synthetic oligonucleotide
  Sense strand starting at position 3340 of SEQ ID NO: 1883986
cuagcuucucugcaguaaa

SEQ ID NO: 2231357 - RNA, 19 nt, Artificial Sequence
  Description of Artificial Sequence: Synthetic oligonucleotide
  Antisense strand to SEQ ID NO: 2231356
uuuacugcagagaagcuag

SEQ ID NO: 2231358 - RNA, 19 nt, Artificial Sequence
  Description of Artificial Sequence: Synthetic oligonucleotide
  Sense strand starting at position 3343 of SEQ ID NO: 1883986
gcuucucugcaguaaacaa

SEQ ID NO: 2231359 - RNA, 19 nt, Artificial Sequence
  Description of Artificial Sequence: Synthetic oligonucleotide
  Antisense strand to SEQ ID NO: 2231358
uuguuuacugcagagaagc

SEQ ID NO: 2231360 - RNA, 19 nt, Artificial Sequence
  Description of Artificial Sequence: Synthetic oligonucleotide
  Sense strand starting at position 3383 of SEQ ID NO: 1883986
aucacaggauuguguagaa

SEQ ID NO: 2231361 - RNA, 19 nt, Artificial Sequence
  Description of Artificial Sequence: Synthetic oligonucleotide
  Antisense strand to SEQ ID NO: 2231360
uucuacacaauccugugau

SEQ ID NO: 2231362 - RNA, 19 nt, Artificial Sequence
  Description of Artificial Sequence: Synthetic oligonucleotide
  Sense strand starting at position 3387 of SEQ ID NO: 1883986
caggauuguguagaaaggu

SEQ ID NO: 2231363 - RNA, 19 nt, Artificial Sequence
  Description of Artificial Sequence: Synthetic oligonucleotide
  Antisense strand to SEQ ID NO: 2231362
accuuucuacacaauccug

SEQ ID NO: 2231364 - RNA, 19 nt, Artificial Sequence
  Description of Artificial Sequence: Synthetic oligonucleotide
  Sense strand starting at position 3397 of SEQ ID NO: 1883986
uagaaagguuuggaaccau

SEQ ID NO: 2231365 - RNA, 19 nt, Artificial Sequence
  Description of Artificial Sequence: Synthetic oligonucleotide
  Antisense strand to SEQ ID NO: 2231364
augguuccaaaccuuucua

SEQ ID NO: 2231366 - RNA, 19 nt, Artificial Sequence
  Description of Artificial Sequence: Synthetic oligonucleotide
  Sense strand starting at position 3436 of SEQ ID NO: 1883986
acagcugugcaggaagauu

SEQ ID NO: 2231367 - RNA, 19 nt, Artificial Sequence
  Description of Artificial Sequence: Synthetic oligonucleotide
  Antisense strand to SEQ ID NO: 2231366
aaucuuccugcacagcugu

SEQ ID NO: 2231368 - RNA, 19 nt, Artificial Sequence
  Description of Artificial Sequence: Synthetic oligonucleotide
  Sense strand starting at position 3498 of SEQ ID NO: 1883986
gguaguuccugcuuaucau

SEQ ID NO: 2231369 - RNA, 19 nt, Artificial Sequence
  Description of Artificial Sequence: Synthetic oligonucleotide
  Antisense strand to SEQ ID NO: 2231368
augauaagcaggaacuacc

SEQ ID NO: 2231370 - RNA, 19 nt, Artificial Sequence
  Description of Artificial Sequence: Synthetic oligonucleotide
  Sense strand starting at position 3507 of SEQ ID NO: 1883986
ugcuuaucaugccagcaaa

SEQ ID NO: 2231371 - RNA, 19 nt, Artificial Sequence
  Description of Artificial Sequence: Synthetic oligonucleotide
  Antisense strand to SEQ ID NO: 2231370
uuugcuggcaugauaagca

SEQ ID NO: 2231372 - RNA, 19 nt, Artificial Sequence
  Description of Artificial Sequence: Synthetic oligonucleotide
  Sense strand starting at position 3653 of SEQ ID NO: 1883986
cucugacauugcuuuagga

SEQ ID NO: 2231373 - RNA, 19 nt, Artificial Sequence
  Description of Artificial Sequence: Synthetic oligonucleotide
  Antisense strand to SEQ ID NO: 2231372
uccuaaagcaaugucagag

SEQ ID NO: 2231374 - RNA, 19 nt, Artificial Sequence
  Description of Artificial Sequence: Synthetic oligonucleotide
  Sense strand starting at position 3657 of SEQ ID NO: 1883986
gacauugcuuuaggagaga

SEQ ID NO: 2231375 - RNA, 19 nt, Artificial Sequence
  Description of Artificial Sequence: Synthetic oligonucleotide
  Antisense strand to SEQ ID NO: 2231374
ucucuccuaaagcaauguc

SEQ ID NO: 2231376 - RNA, 19 nt, Artificial Sequence
  Description of Artificial Sequence: Synthetic oligonucleotide
  Sense strand starting at position 3670 of SEQ ID NO: 1883986
gagagagggcucuggucua

SEQ ID NO: 2231377 - RNA, 19 nt, Artificial Sequence
  Description of Artificial Sequence: Synthetic oligonucleotide
  Antisense strand to SEQ ID NO: 2231376
uagaccagagcccucucuc

SEQ ID NO: 2231378 - RNA, 19 nt, Artificial Sequence
  Description of Artificial Sequence: Synthetic oligonucleotide
  Sense strand starting at position 3675 of SEQ ID NO: 1883986
agggcucuggucuagaacu

SEQ ID NO: 2231379 - RNA, 19 nt, Artificial Sequence
  Description of Artificial Sequence: Synthetic oligonucleotide
  Antisense strand to SEQ ID NO: 2231378
aguucuagaccagagcccu

SEQ ID NO: 2231380 - RNA, 19 nt, Artificial Sequence
  Description of Artificial Sequence: Synthetic oligonucleotide
  Sense strand starting at position 3677 of SEQ ID NO: 1883986
ggcucuggucuagaacuca

SEQ ID NO: 2231381 - RNA, 19 nt, Artificial Sequence
  Description of Artificial Sequence: Synthetic oligonucleotide
  Antisense strand to SEQ ID NO: 2231380
ugaguucuagaccagagcc

SEQ ID NO: 2231382 - RNA, 19 nt, Artificial Sequence
  Description of Artificial Sequence: Synthetic oligonucleotide
  Sense strand starting at position 3946 of SEQ ID NO: 1883986
gaggccugggcuuaggaua

SEQ ID NO: 2231383 - RNA, 19 nt, Artificial Sequence
  Description of Artificial Sequence: Synthetic oligonucleotide
  Antisense strand to SEQ ID NO: 2231382
uauccuaagcccaggccuc

SEQ ID NO: 2231384 - RNA, 19 nt, Artificial Sequence
  Description of Artificial Sequence: Synthetic oligonucleotide
  Sense strand starting at position 3954 of SEQ ID NO: 1883986
ggcuuaggauagcaaacua

SEQ ID NO: 2231385 - RNA, 19 nt, Artificial Sequence
  Description of Artificial Sequence: Synthetic oligonucleotide
  Antisense strand to SEQ ID NO: 2231384
uaguuugcuauccuaagcc

SEQ ID NO: 2231386 - RNA, 19 nt, Artificial Sequence
  Description of Artificial Sequence: Synthetic oligonucleotide
  Sense strand starting at position 115 of SEQ ID NO: 1883987
uuucuauuacaguaucgua

SEQ ID NO: 2231387 - RNA, 19 nt, Artificial Sequence
  Description of Artificial Sequence: Synthetic oligonucleotide
  Antisense strand to SEQ ID NO: 2231386
uacgauacuguaauagaaa

SEQ ID NO: 2231388 - RNA, 19 nt, Artificial Sequence
  Description of Artificial Sequence: Synthetic oligonucleotide
  Sense strand starting at position 162 of SEQ ID NO: 1883987
uucugauacuucuuugucu

SEQ ID NO: 2231389 - RNA, 19 nt, Artificial Sequence
  Description of Artificial Sequence: Synthetic oligonucleotide
  Antisense strand to SEQ ID NO: 2231388
agacaaagaaguaucagaa

SEQ ID NO: 2231390 - RNA, 19 nt, Artificial Sequence
  Description of Artificial Sequence: Synthetic oligonucleotide
  Sense strand starting at position 164 of SEQ ID NO: 1883987
cugauacuucuuugucugu

SEQ ID NO: 2231391 - RNA, 19 nt, Artificial Sequence
  Description of Artificial Sequence: Synthetic oligonucleotide
  Antisense strand to SEQ ID NO: 2231390
acagacaaagaaguaucag

SEQ ID NO: 2231392 - RNA, 19 nt, Artificial Sequence
  Description of Artificial Sequence: Synthetic oligonucleotide
  Sense strand starting at position 327 of SEQ ID NO: 1883987
ucucgagaagcuggaauua

SEQ ID NO: 2231393 - RNA, 19 nt, Artificial Sequence
  Description of Artificial Sequence: Synthetic oligonucleotide
  Antisense strand to SEQ ID NO: 2231392
uaauuccagcuucucgaga

SEQ ID NO: 2231394 - RNA, 19 nt, Artificial Sequence
  Description of Artificial Sequence: Synthetic oligonucleotide
  Sense strand starting at position 454 of SEQ ID NO: 1883987
guccaaagugcugggauca

SEQ ID NO: 2231395 - RNA, 19 nt, Artificial Sequence
  Description of Artificial Sequence: Synthetic oligonucleotide
  Antisense strand to SEQ ID NO: 2231394
ugaucccagcacuuuggac

SEQ ID NO: 2231396 - RNA, 19 nt, Artificial Sequence
  Description of Artificial Sequence: Synthetic oligonucleotide
  Sense strand starting at position 965 of SEQ ID NO: 1883987
aacugucuacuggguauua

SEQ ID NO: 2231397 - RNA, 19 nt, Artificial Sequence
  Description of Artificial Sequence: Synthetic oligonucleotide
  Antisense strand to SEQ ID NO: 2231396
uaauacccaguagacaguu

SEQ ID NO: 2231398 - RNA, 19 nt, Artificial Sequence
  Description of Artificial Sequence: Synthetic oligonucleotide
  Sense strand starting at position 967 of SEQ ID NO: 1883987
cugucuacuggguauuaca

SEQ ID NO: 2231399 - RNA, 19 nt, Artificial Sequence
  Description of Artificial Sequence: Synthetic oligonucleotide
  Antisense strand to SEQ ID NO: 2231398
uguaauacccaguagacag

SEQ ID NO: 2231400 - RNA, 19 nt, Artificial Sequence
  Description of Artificial Sequence: Synthetic oligonucleotide
  Sense strand starting at position 1157 of SEQ ID NO: 1883987
ucugauugcuguccucacu

SEQ ID NO: 2231401 - RNA, 19 nt, Artificial Sequence
  Description of Artificial Sequence: Synthetic oligonucleotide
  Antisense strand to SEQ ID NO: 2231400
agugaggacagcaaucaga

SEQ ID NO: 2231402 - RNA, 19 nt, Artificial Sequence
  Description of Artificial Sequence: Synthetic oligonucleotide
  Sense strand starting at position 1355 of SEQ ID NO: 1883987
cucuguugccaugagaguu

SEQ ID NO: 2231403 - RNA, 19 nt, Artificial Sequence
  Description of Artificial Sequence: Synthetic oligonucleotide
  Antisense strand to SEQ ID NO: 2231402
aacucucauggcaacagag

SEQ ID NO: 2231404 - RNA, 19 nt, Artificial Sequence
  Description of Artificial Sequence: Synthetic oligonucleotide
  Sense strand starting at position 1367 of SEQ ID NO: 1883987
gagaguuaacuuugcgaaa

SEQ ID NO: 2231405 - RNA, 19 nt, Artificial Sequence
  Description of Artificial Sequence: Synthetic oligonucleotide
  Antisense strand to SEQ ID NO: 2231404
uuucgcaaaguuaacucuc

SEQ ID NO: 2231406 - RNA, 19 nt, Artificial Sequence
  Description of Artificial Sequence: Synthetic oligonucleotide
  Sense strand starting at position 1368 of SEQ ID NO: 1883987
agaguuaacuuugcgaaac

SEQ ID NO: 2231407 - RNA, 19 nt, Artificial Sequence
  Description of Artificial Sequence: Synthetic oligonucleotide
  Antisense strand to SEQ ID NO: 2231406
guuucgcaaaguuaacucu

SEQ ID NO: 2231408 - RNA, 19 nt, Artificial Sequence
  Description of Artificial Sequence: Synthetic oligonucleotide
  Sense strand starting at position 1450 of SEQ ID NO: 1883987
agucuaaacuuuccacugu

SEQ ID NO: 2231409 - RNA, 19 nt, Artificial Sequence
  Description of Artificial Sequence: Synthetic oligonucleotide
  Antisense strand to SEQ ID NO: 2231408
acaguggaaaguuuagacu

SEQ ID NO: 2231410 - RNA, 19 nt, Artificial Sequence
  Description of Artificial Sequence: Synthetic oligonucleotide
  Sense strand starting at position 2135 of SEQ ID NO: 1883987
ggcuguuguagguguaaau

SEQ ID NO: 2231411 - RNA, 19 nt, Artificial Sequence
  Description of Artificial Sequence: Synthetic oligonucleotide
  Antisense strand to SEQ ID NO: 2231410
auuuacaccuacaacagcc

SEQ ID NO: 2231412 - RNA, 19 nt, Artificial Sequence
  Description of Artificial Sequence: Synthetic oligonucleotide
  Sense strand starting at position 2144 of SEQ ID NO: 1883987
agguguaaauagcucuuga

SEQ ID NO: 2231413 - RNA, 19 nt, Artificial Sequence
  Description of Artificial Sequence: Synthetic oligonucleotide
  Antisense strand to SEQ ID NO: 2231412
ucaagagcuauuuacaccu

SEQ ID NO: 2231414 - RNA, 19 nt, Artificial Sequence
  Description of Artificial Sequence: Synthetic oligonucleotide
  Sense strand starting at position 2298 of SEQ ID NO: 1883987
cgaugggugucuucggaga

SEQ ID NO: 2231415 - RNA, 19 nt, Artificial Sequence
  Description of Artificial Sequence: Synthetic oligonucleotide
  Antisense strand to SEQ ID NO: 2231414
ucuccgaagacacccaucg

SEQ ID NO: 2231416 - RNA, 19 nt, Artificial Sequence
  Description of Artificial Sequence: Synthetic oligonucleotide
  Sense strand starting at position 2303 of SEQ ID NO: 1883987
ggugucuucggagaucuua

SEQ ID NO: 2231417 - RNA, 19 nt, Artificial Sequence
  Description of Artificial Sequence: Synthetic oligonucleotide
  Antisense strand to SEQ ID NO: 2231416
uaagaucuccgaagacacc

SEQ ID NO: 2231418 - RNA, 19 nt, Artificial Sequence
  Description of Artificial Sequence: Synthetic oligonucleotide
  Sense strand starting at position 2316 of SEQ ID NO: 1883987
aucuuaagcugggcugaaa

SEQ ID NO: 2231419 - RNA, 19 nt, Artificial Sequence
  Description of Artificial Sequence: Synthetic oligonucleotide
  Antisense strand to SEQ ID NO: 2231418
uuucagcccagcuuaagau

SEQ ID NO: 2231420 - RNA, 19 nt, Artificial Sequence
  Description of Artificial Sequence: Synthetic oligonucleotide
  Sense strand starting at position 2392 of SEQ ID NO: 1883987
uccuaucugugacuguuga

SEQ ID NO: 2231421 - RNA, 19 nt, Artificial Sequence
  Description of Artificial Sequence: Synthetic oligonucleotide
  Antisense strand to SEQ ID NO: 2231420
ucaacagucacagauagga

SEQ ID NO: 2231422 - RNA, 19 nt, Artificial Sequence
  Description of Artificial Sequence: Synthetic oligonucleotide
  Sense strand starting at position 2393 of SEQ ID NO: 1883987
ccuaucugugacuguugaa

SEQ ID NO: 2231423 - RNA, 19 nt, Artificial Sequence
  Description of Artificial Sequence: Synthetic oligonucleotide
  Antisense strand to SEQ ID NO: 2231422
uucaacagucacagauagg

SEQ ID NO: 2231424 - RNA, 19 nt, Artificial Sequence
  Description of Artificial Sequence: Synthetic oligonucleotide
  Sense strand starting at position 2421 of SEQ ID NO: 1883987
gugauguucugggugagga

SEQ ID NO: 2231425 - RNA, 19 nt, Artificial Sequence
  Description of Artificial Sequence: Synthetic oligonucleotide
  Antisense strand to SEQ ID NO: 2231424
uccucacccagaacaucac

SEQ ID NO: 2231426 - RNA, 19 nt, Artificial Sequence
  Description of Artificial Sequence: Synthetic oligonucleotide
  Sense strand starting at position 2422 of SEQ ID NO: 1883987
ugauguucugggugaggac

SEQ ID NO: 2231427 - RNA, 19 nt, Artificial Sequence
  Description of Artificial Sequence: Synthetic oligonucleotide
  Antisense strand to SEQ ID NO: 2231426
guccucacccagaacauca

SEQ ID NO: 2231428 - RNA, 19 nt, Artificial Sequence
  Description of Artificial Sequence: Synthetic oligonucleotide
  Sense strand starting at position 2499 of SEQ ID NO: 1883987
ggguguaccuuagugacca

SEQ ID NO: 2231429 - RNA, 19 nt, Artificial Sequence
  Description of Artificial Sequence: Synthetic oligonucleotide
  Antisense strand to SEQ ID NO: 2231428
uggucacuaagguacaccc

SEQ ID NO: 2231430 - RNA, 19 nt, Artificial Sequence
  Description of Artificial Sequence: Synthetic oligonucleotide
  Sense strand starting at position 2555 of SEQ ID NO: 1883987
accguauucuauuugcgga

SEQ ID NO: 2231431 - RNA, 19 nt, Artificial Sequence
  Description of Artificial Sequence: Synthetic oligonucleotide
  Antisense strand to SEQ ID NO: 2231430
uccgcaaauagaauacggu

SEQ ID NO: 2231432 - RNA, 19 nt, Artificial Sequence
  Description of Artificial Sequence: Synthetic oligonucleotide
  Sense strand starting at position 2556 of SEQ ID NO: 1883987
ccguauucuauuugcggaa

SEQ ID NO: 2231433 - RNA, 19 nt, Artificial Sequence
  Description of Artificial Sequence: Synthetic oligonucleotide
  Antisense strand to SEQ ID NO: 2231432
uuccgcaaauagaauacgg

SEQ ID NO: 2231434 - RNA, 19 nt, Artificial Sequence
  Description of Artificial Sequence: Synthetic oligonucleotide
  Sense strand starting at position 2557 of SEQ ID NO: 1883987
cguauucuauuugcggaaa

SEQ ID NO: 2231435 - RNA, 19 nt, Artificial Sequence
  Description of Artificial Sequence: Synthetic oligonucleotide
  Antisense strand to SEQ ID NO: 2231434
uuuccgcaaauagaauacg

SEQ ID NO: 2231436 - RNA, 19 nt, Artificial Sequence
  Description of Artificial Sequence: Synthetic oligonucleotide
  Sense strand starting at position 2591 of SEQ ID NO: 1883987
cuuggauagucuuucuacu

SEQ ID NO: 2231437 - RNA, 19 nt, Artificial Sequence
  Description of Artificial Sequence: Synthetic oligonucleotide
  Antisense strand to SEQ ID NO: 2231436
aguagaaagacuauccaag

SEQ ID NO: 2231438 - RNA, 19 nt, Artificial Sequence
  Description of Artificial Sequence: Synthetic oligonucleotide
  Sense strand starting at position 2593 of SEQ ID NO: 1883987
uggauagucuuucuacuag

SEQ ID NO: 2231439 - RNA, 19 nt, Artificial Sequence
  Description of Artificial Sequence: Synthetic oligonucleotide
  Antisense strand to SEQ ID NO: 2231438
cuaguagaaagacuaucca

SEQ ID NO: 2231440 - RNA, 19 nt, Artificial Sequence
  Description of Artificial Sequence: Synthetic oligonucleotide
  Sense strand starting at position 2697 of SEQ ID NO: 1883987
gacaaauggguacacguua

SEQ ID NO: 2231441 - RNA, 19 nt, Artificial Sequence
  Description of Artificial Sequence: Synthetic oligonucleotide
  Antisense strand to SEQ ID NO: 2231440
uaacguguacccauuuguc

SEQ ID NO: 2231442 - RNA, 19 nt, Artificial Sequence
  Description of Artificial Sequence: Synthetic oligonucleotide
  Sense strand starting at position 2860 of SEQ ID NO: 1883987
auuauaaacggguacucau

SEQ ID NO: 2231443 - RNA, 19 nt, Artificial Sequence
  Description of Artificial Sequence: Synthetic oligonucleotide
  Antisense strand to SEQ ID NO: 2231442
augaguacccguuuauaau

SEQ ID NO: 2231444 - RNA, 19 nt, Artificial Sequence
  Description of Artificial Sequence: Synthetic oligonucleotide
  Sense strand starting at position 2863 of SEQ ID NO: 1883987
auaaacggguacucauauu

SEQ ID NO: 2231445 - RNA, 19 nt, Artificial Sequence
  Description of Artificial Sequence: Synthetic oligonucleotide
  Antisense strand to SEQ ID NO: 2231444
aauaugaguacccguuuau

SEQ ID NO: 2231446 - RNA, 19 nt, Artificial Sequence
  Description of Artificial Sequence: Synthetic oligonucleotide
  Sense strand starting at position 3025 of SEQ ID NO: 1883987
acugauauaugcuccaaug

SEQ ID NO: 2231447 - RNA, 19 nt, Artificial Sequence
  Description of Artificial Sequence: Synthetic oligonucleotide
  Antisense strand to SEQ ID NO: 2231446
cauuggagcauauaucagu

SEQ ID NO: 2231448 - RNA, 19 nt, Artificial Sequence
  Description of Artificial Sequence: Synthetic oligonucleotide
  Sense strand starting at position 3056 of SEQ ID NO: 1883987
gaaagauuaugccaagaga

SEQ ID NO: 2231449 - RNA, 19 nt, Artificial Sequence
  Description of Artificial Sequence: Synthetic oligonucleotide
  Antisense strand to SEQ ID NO: 2231448
ucucuuggcauaaucuuuc

SEQ ID NO: 2231450 - RNA, 19 nt, Artificial Sequence
  Description of Artificial Sequence: Synthetic oligonucleotide
  Sense strand starting at position 3086 of SEQ ID NO: 1883987
cacagaaggucauauauug

SEQ ID NO: 2231451 - RNA, 19 nt, Artificial Sequence
  Description of Artificial Sequence: Synthetic oligonucleotide
  Antisense strand to SEQ ID NO: 2231450
caauauaugaccuucugug

SEQ ID NO: 2231452 - RNA, 19 nt, Artificial Sequence
  Description of Artificial Sequence: Synthetic oligonucleotide
  Sense strand starting at position 3110 of SEQ ID NO: 1883987
uuccauguauaggaaauau

SEQ ID NO: 2231453 - RNA, 19 nt, Artificial Sequence
  Description of Artificial Sequence: Synthetic oligonucleotide
  Antisense strand to SEQ ID NO: 2231452
auauuuccuauacauggaa

SEQ ID NO: 2231454 - RNA, 19 nt, Artificial Sequence
  Description of Artificial Sequence: Synthetic oligonucleotide
  Sense strand starting at position 3212 of SEQ ID NO: 1883987
guugaauggguucaaguuu

SEQ ID NO: 2231455 - RNA, 19 nt, Artificial Sequence
  Description of Artificial Sequence: Synthetic oligonucleotide
  Antisense strand to SEQ ID NO: 2231454
aaacuugaacccauucaac

SEQ ID NO: 2231456 - RNA, 19 nt, Artificial Sequence
  Description of Artificial Sequence: Synthetic oligonucleotide
  Sense strand starting at position 3259 of SEQ ID NO: 1883987
aaagguaguguuugcacaa

SEQ ID NO: 2231457 - RNA, 19 nt, Artificial Sequence
  Description of Artificial Sequence: Synthetic oligonucleotide
  Antisense strand to SEQ ID NO: 2231456
uugugcaaacacuaccuuu

SEQ ID NO: 2231458 - RNA, 19 nt, Artificial Sequence
  Description of Artificial Sequence: Synthetic oligonucleotide
  Sense strand starting at position 3260 of SEQ ID NO: 1883987
aagguaguguuugcacaau

SEQ ID NO: 2231459 - RNA, 19 nt, Artificial Sequence
  Description of Artificial Sequence: Synthetic oligonucleotide
  Antisense strand to SEQ ID NO: 2231458
auugugcaaacacuaccuu

SEQ ID NO: 2231460 - RNA, 19 nt, Artificial Sequence
  Description of Artificial Sequence: Synthetic oligonucleotide
  Sense strand starting at position 3266 of SEQ ID NO: 1883987
guguuugcacaauguuaug

SEQ ID NO: 2231461 - RNA, 19 nt, Artificial Sequence
  Description of Artificial Sequence: Synthetic oligonucleotide
  Antisense strand to SEQ ID NO: 2231460
cauaacauugugcaaacac

SEQ ID NO: 2231462 - RNA, 19 nt, Artificial Sequence
  Description of Artificial Sequence: Synthetic oligonucleotide
  Sense strand starting at position 3811 of SEQ ID NO: 1883987
uugugugaauugucucuca

SEQ ID NO: 2231463 - RNA, 19 nt, Artificial Sequence
  Description of Artificial Sequence: Synthetic oligonucleotide
  Antisense strand to SEQ ID NO: 2231462
ugagagacaauucacacaa

SEQ ID NO: 2231464 - RNA, 19 nt, Artificial Sequence
  Description of Artificial Sequence: Synthetic oligonucleotide
  Sense strand starting at position 3814 of SEQ ID NO: 1883987
ugugaauugucucucaauu

SEQ ID NO: 2231465 - RNA, 19 nt, Artificial Sequence
  Description of Artificial Sequence: Synthetic oligonucleotide
  Antisense strand to SEQ ID NO: 2231464
aauugagagacaauucaca

SEQ ID NO: 2231466 - RNA, 19 nt, Artificial Sequence
  Description of Artificial Sequence: Synthetic oligonucleotide
  Sense strand starting at position 72 of SEQ ID NO: 1883988
gucuuuaucuaucauguag

SEQ ID NO: 2231467 - RNA, 19 nt, Artificial Sequence
  Description of Artificial Sequence: Synthetic oligonucleotide
  Antisense strand to SEQ ID NO: 2231466
cuacaugauagauaaagac

SEQ ID NO: 2231468 - RNA, 19 nt, Artificial Sequence
  Description of Artificial Sequence: Synthetic oligonucleotide
  Sense strand starting at position 363 of SEQ ID NO: 1883988
agagcaguuauuggaacaa

SEQ ID NO: 2231469 - RNA, 19 nt, Artificial Sequence
  Description of Artificial Sequence: Synthetic oligonucleotide
  Antisense strand to SEQ ID NO: 2231468
uuguuccaauaacugcucu

SEQ ID NO: 2231470 - RNA, 19 nt, Artificial Sequence
  Description of Artificial Sequence: Synthetic oligonucleotide
  Sense strand starting at position 376 of SEQ ID NO: 1883988
gaacaaugcgaaugguuga

SEQ ID NO: 2231471 - RNA, 19 nt, Artificial Sequence
  Description of Artificial Sequence: Synthetic oligonucleotide
  Antisense strand to SEQ ID NO: 2231470
ucaaccauucgcauuguuc

SEQ ID NO: 2231472 - RNA, 19 nt, Artificial Sequence
  Description of Artificial Sequence: Synthetic oligonucleotide
  Sense strand starting at position 379 of SEQ ID NO: 1883988
caaugcgaaugguugagaa

SEQ ID NO: 2231473 - RNA, 19 nt, Artificial Sequence
  Description of Artificial Sequence: Synthetic oligonucleotide
  Antisense strand to SEQ ID NO: 2231472
uucucaaccauucgcauug

SEQ ID NO: 2231474 - RNA, 19 nt, Artificial Sequence
  Description of Artificial Sequence: Synthetic oligonucleotide
  Sense strand starting at position 381 of SEQ ID NO: 1883988
augcgaaugguugagaaca

SEQ ID NO: 2231475 - RNA, 19 nt, Artificial Sequence
  Description of Artificial Sequence: Synthetic oligonucleotide
  Antisense strand to SEQ ID NO: 2231474
uguucucaaccauucgcau

SEQ ID NO: 2231476 - RNA, 19 nt, Artificial Sequence
  Description of Artificial Sequence: Synthetic oligonucleotide
  Sense strand starting at position 383 of SEQ ID NO: 1883988
gcgaaugguugagaacaug

SEQ ID NO: 2231477 - RNA, 19 nt, Artificial Sequence
  Description of Artificial Sequence: Synthetic oligonucleotide
  Antisense strand to SEQ ID NO: 2231476
cauguucucaaccauucgc

SEQ ID NO: 2231478 - RNA, 19 nt, Artificial Sequence
  Description of Artificial Sequence: Synthetic oligonucleotide
  Sense strand starting at position 845 of SEQ ID NO: 1883988
ugaggagggucuggauuaa

SEQ ID NO: 2231479 - RNA, 19 nt, Artificial Sequence
  Description of Artificial Sequence: Synthetic oligonucleotide
  Antisense strand to SEQ ID NO: 2231478
uuaauccagacccuccuca

SEQ ID NO: 2231480 - RNA, 19 nt, Artificial Sequence
  Description of Artificial Sequence: Synthetic oligonucleotide
  Sense strand starting at position 1317 of SEQ ID NO: 1883988
gggcaagacuuagucuuaa

SEQ ID NO: 2231481 - RNA, 19 nt, Artificial Sequence
  Description of Artificial Sequence: Synthetic oligonucleotide
  Antisense strand to SEQ ID NO: 2231480
uuaagacuaagucuugccc

SEQ ID NO: 2231482 - RNA, 19 nt, Artificial Sequence
  Description of Artificial Sequence: Synthetic oligonucleotide
  Sense strand starting at position 1498 of SEQ ID NO: 1883988
aaguccugguauuaugauu

SEQ ID NO: 2231483 - RNA, 19 nt, Artificial Sequence
  Description of Artificial Sequence: Synthetic oligonucleotide
  Antisense strand to SEQ ID NO: 2231482
aaucauaauaccaggacuu

SEQ ID NO: 2231484 - RNA, 19 nt, Artificial Sequence
  Description of Artificial Sequence: Synthetic oligonucleotide
  Sense strand starting at position 2447 of SEQ ID NO: 1883988
gcacaucuaucaugaggcu

SEQ ID NO: 2231485 - RNA, 19 nt, Artificial Sequence
  Description of Artificial Sequence: Synthetic oligonucleotide
  Antisense strand to SEQ ID NO: 2231484
agccucaugauagaugugc

SEQ ID NO: 2231486 - RNA, 19 nt, Artificial Sequence
  Description of Artificial Sequence: Synthetic oligonucleotide
  Sense strand starting at position 2543 of SEQ ID NO: 1883988
caaugaaaucuguagcaug

SEQ ID NO: 2231487 - RNA, 19 nt, Artificial Sequence
  Description of Artificial Sequence: Synthetic oligonucleotide
  Antisense strand to SEQ ID NO: 2231486
caugcuacagauuucauug

SEQ ID NO: 2231488 - RNA, 19 nt, Artificial Sequence
  Description of Artificial Sequence: Synthetic oligonucleotide
  Sense strand starting at position 2791 of SEQ ID NO: 1883988
ggaaccuugggugagcaau

SEQ ID NO: 2231489 - RNA, 19 nt, Artificial Sequence
  Description of Artificial Sequence: Synthetic oligonucleotide
  Antisense strand to SEQ ID NO: 2231488
auugcucacccaagguucc

SEQ ID NO: 2231490 - RNA, 19 nt, Artificial Sequence
  Description of Artificial Sequence: Synthetic oligonucleotide
  Sense strand starting at position 2935 of SEQ ID NO: 1883988
gcgguggaguccugugcua

SEQ ID NO: 2231491 - RNA, 19 nt, Artificial Sequence
  Description of Artificial Sequence: Synthetic oligonucleotide
  Antisense strand to SEQ ID NO: 2231490
uagcacaggacuccaccgc

SEQ ID NO: 2231492 - RNA, 19 nt, Artificial Sequence
  Description of Artificial Sequence: Synthetic oligonucleotide
  Sense strand starting at position 2937 of SEQ ID NO: 1883988
gguggaguccugugcuacu

SEQ ID NO: 2231493 - RNA, 19 nt, Artificial Sequence
  Description of Artificial Sequence: Synthetic oligonucleotide
  Antisense strand to SEQ ID NO: 2231492
aguagcacaggacuccacc

SEQ ID NO: 2231494 - RNA, 19 nt, Artificial Sequence
  Description of Artificial Sequence: Synthetic oligonucleotide
  Sense strand starting at position 3071 of SEQ ID NO: 1883988
uguauaucgugucgugugu

SEQ ID NO: 2231495 - RNA, 19 nt, Artificial Sequence
  Description of Artificial Sequence: Synthetic oligonucleotide
  Antisense strand to SEQ ID NO: 2231494
acacacgacacgauauaca

SEQ ID NO: 2231496 - RNA, 19 nt, Artificial Sequence
  Description of Artificial Sequence: Synthetic oligonucleotide
  Sense strand starting at position 3085 of SEQ ID NO: 1883988
ugugucuuugcugucugua

SEQ ID NO: 2231497 - RNA, 19 nt, Artificial Sequence
  Description of Artificial Sequence: Synthetic oligonucleotide
  Antisense strand to SEQ ID NO: 2231496
uacagacagcaaagacaca

SEQ ID NO: 2231498 - RNA, 19 nt, Artificial Sequence
  Description of Artificial Sequence: Synthetic oligonucleotide
  Sense strand starting at position 3098 of SEQ ID NO: 1883988
ucuguacgcugguagacau

SEQ ID NO: 2231499 - RNA, 19 nt, Artificial Sequence
  Description of Artificial Sequence: Synthetic oligonucleotide
  Antisense strand to SEQ ID NO: 2231498
augucuaccagcguacaga

SEQ ID NO: 2231500 - RNA, 19 nt, Artificial Sequence
  Description of Artificial Sequence: Synthetic oligonucleotide
  Sense strand starting at position 3144 of SEQ ID NO: 1883988
ccuugugccggccaugauu

SEQ ID NO: 2231501 - RNA, 19 nt, Artificial Sequence
  Description of Artificial Sequence: Synthetic oligonucleotide
  Antisense strand to SEQ ID NO: 2231500
aaucauggccggcacaagg

SEQ ID NO: 2231502 - RNA, 19 nt, Artificial Sequence
  Description of Artificial Sequence: Synthetic oligonucleotide
  Sense strand starting at position 3184 of SEQ ID NO: 1883988
gcaagaguucagugugguc

SEQ ID NO: 2231503 - RNA, 19 nt, Artificial Sequence
  Description of Artificial Sequence: Synthetic oligonucleotide
  Antisense strand to SEQ ID NO: 2231502
gaccacacugaacucuugc

SEQ ID NO: 2231504 - RNA, 19 nt, Artificial Sequence
  Description of Artificial Sequence: Synthetic oligonucleotide
  Sense strand starting at position 3403 of SEQ ID NO: 1883988
ugccaacuuguccgguuua

SEQ ID NO: 2231505 - RNA, 19 nt, Artificial Sequence
  Description of Artificial Sequence: Synthetic oligonucleotide
  Antisense strand to SEQ ID NO: 2231504
uaaaccggacaaguuggca

SEQ ID NO: 2231506 - RNA, 19 nt, Artificial Sequence
  Description of Artificial Sequence: Synthetic oligonucleotide
  Sense strand starting at position 3404 of SEQ ID NO: 1883988
gccaacuuguccgguuuau

SEQ ID NO: 2231507 - RNA, 19 nt, Artificial Sequence
  Description of Artificial Sequence: Synthetic oligonucleotide
  Antisense strand to SEQ ID NO: 2231506
auaaaccggacaaguuggc

SEQ ID NO: 2231508 - RNA, 19 nt, Artificial Sequence
  Description of Artificial Sequence: Synthetic oligonucleotide
  Sense strand starting at position 3644 of SEQ ID NO: 1883988
ccagaacacauccggguua

SEQ ID NO: 2231509 - RNA, 19 nt, Artificial Sequence
  Description of Artificial Sequence: Synthetic oligonucleotide
  Antisense strand to SEQ ID NO: 2231508
uaacccggauguguucugg

SEQ ID NO: 2231510 - RNA, 19 nt, Artificial Sequence
  Description of Artificial Sequence: Synthetic oligonucleotide
  Sense strand starting at position 3646 of SEQ ID NO: 1883988
agaacacauccggguuaga

SEQ ID NO: 2231511 - RNA, 19 nt, Artificial Sequence
  Description of Artificial Sequence: Synthetic oligonucleotide
  Antisense strand to SEQ ID NO: 2231510
ucuaacccggauguguucu

SEQ ID NO: 2231512 - RNA, 19 nt, Artificial Sequence
  Description of Artificial Sequence: Synthetic oligonucleotide
  Sense strand starting at position 3676 of SEQ ID NO: 1883988
ggcccagaauccuuugcau

SEQ ID NO: 2231513 - RNA, 19 nt, Artificial Sequence
  Description of Artificial Sequence: Synthetic oligonucleotide
  Antisense strand to SEQ ID NO: 2231512
augcaaaggauucugggcc

SEQ ID NO: 2231514 - RNA, 19 nt, Artificial Sequence
  Description of Artificial Sequence: Synthetic oligonucleotide
  Sense strand starting at position 3678 of SEQ ID NO: 1883988
cccagaauccuuugcaugu

SEQ ID NO: 2231515 - RNA, 19 nt, Artificial Sequence
  Description of Artificial Sequence: Synthetic oligonucleotide
  Antisense strand to SEQ ID NO: 2231514
acaugcaaaggauucuggg

SEQ ID NO: 2231516 - RNA, 19 nt, Artificial Sequence
  Description of Artificial Sequence: Synthetic oligonucleotide
  Sense strand starting at position 3679 of SEQ ID NO: 1883988
ccagaauccuuugcaugug

SEQ ID NO: 2231517 - RNA, 19 nt, Artificial Sequence
  Description of Artificial Sequence: Synthetic oligonucleotide
  Antisense strand to SEQ ID NO: 2231516
cacaugcaaaggauucugg

SEQ ID NO: 2231518 - RNA, 19 nt, Artificial Sequence
  Description of Artificial Sequence: Synthetic oligonucleotide
  Sense strand starting at position 3802 of SEQ ID NO: 1883988
ucauguugcucagugugau

SEQ ID NO: 2231519 - RNA, 19 nt, Artificial Sequence
  Description of Artificial Sequence: Synthetic oligonucleotide
  Antisense strand to SEQ ID NO: 2231518
aucacacugagcaacauga

SEQ ID NO: 2231520 - RNA, 19 nt, Artificial Sequence
  Description of Artificial Sequence: Synthetic oligonucleotide
  Sense strand starting at position 3803 of SEQ ID NO: 1883988
cauguugcucagugugaug

SEQ ID NO: 2231521 - RNA, 19 nt, Artificial Sequence
  Description of Artificial Sequence: Synthetic oligonucleotide
  Antisense strand to SEQ ID NO: 2231520
caucacacugagcaacaug

SEQ ID NO: 2231522 - RNA, 19 nt, Artificial Sequence
  Description of Artificial Sequence: Synthetic oligonucleotide
  Sense strand starting at position 3805 of SEQ ID NO: 1883988
uguugcucagugugaugaa

SEQ ID NO: 2231523 - RNA, 19 nt, Artificial Sequence
  Description of Artificial Sequence: Synthetic oligonucleotide
  Antisense strand to SEQ ID NO: 2231522
uucaucacacugagcaaca

SEQ ID NO: 2231524 - RNA, 19 nt, Artificial Sequence
  Description of Artificial Sequence: Synthetic oligonucleotide
  Sense strand starting at position 3808 of SEQ ID NO: 1883988
ugcucagugugaugaaguu

SEQ ID NO: 2231525 - RNA, 19 nt, Artificial Sequence
  Description of Artificial Sequence: Synthetic oligonucleotide
  Antisense strand to SEQ ID NO: 2231524
aacuucaucacacugagca

SEQ ID NO: 2231526 - RNA, 19 nt, Artificial Sequence
  Description of Artificial Sequence: Synthetic oligonucleotide
  Sense strand starting at position 3982 of SEQ ID NO: 1883988
acgagcuacgaguaauaga

SEQ ID NO: 2231527 - RNA, 19 nt, Artificial Sequence
  Description of Artificial Sequence: Synthetic oligonucleotide
  Antisense strand to SEQ ID NO: 2231526
ucuauuacucguagcucgu

SEQ ID NO: 2231528 - RNA, 19 nt, Artificial Sequence
  Description of Artificial Sequence: Synthetic oligonucleotide
  Sense strand starting at position 289 of SEQ ID NO: 1883989
ccggauaccuggguuuauc

SEQ ID NO: 2231529 - RNA, 19 nt, Artificial Sequence
  Description of Artificial Sequence: Synthetic oligonucleotide
  Antisense strand to SEQ ID NO: 2231528
gauaaacccagguauccgg

SEQ ID NO: 2231530 - RNA, 19 nt, Artificial Sequence
  Description of Artificial Sequence: Synthetic oligonucleotide
  Sense strand starting at position 292 of SEQ ID NO: 1883989
gauaccuggguuuaucagu

SEQ ID NO: 2231531 - RNA, 19 nt, Artificial Sequence
  Description of Artificial Sequence: Synthetic oligonucleotide
  Antisense strand to SEQ ID NO: 2231530
acugauaaacccagguauc

SEQ ID NO: 2231532 - RNA, 19 nt, Artificial Sequence
  Description of Artificial Sequence: Synthetic oligonucleotide
  Sense strand starting at position 300 of SEQ ID NO: 1883989
gguuuaucagugcucugcu

SEQ ID NO: 2231533 - RNA, 19 nt, Artificial Sequence
  Description of Artificial Sequence: Synthetic oligonucleotide
  Antisense strand to SEQ ID NO: 2231532
agcagagcacugauaaacc

SEQ ID NO: 2231534 - RNA, 19 nt, Artificial Sequence
  Description of Artificial Sequence: Synthetic oligonucleotide
  Sense strand starting at position 380 of SEQ ID NO: 1883989
guugcuagagaugaguaga

SEQ ID NO: 2231535 - RNA, 19 nt, Artificial Sequence
  Description of Artificial Sequence: Synthetic oligonucleotide
  Antisense strand to SEQ ID NO: 2231534
ucuacucaucucuagcaac

SEQ ID NO: 2231536 - RNA, 19 nt, Artificial Sequence
  Description of Artificial Sequence: Synthetic oligonucleotide
  Sense strand starting at position 474 of SEQ ID NO: 1883989
ugacaauguccuugcauuu

SEQ ID NO: 2231537 - RNA, 19 nt, Artificial Sequence
  Description of Artificial Sequence: Synthetic oligonucleotide
  Antisense strand to SEQ ID NO: 2231536
aaaugcaaggacauuguca

SEQ ID NO: 2231538 - RNA, 19 nt, Artificial Sequence
  Description of Artificial Sequence: Synthetic oligonucleotide
  Sense strand starting at position 521 of SEQ ID NO: 1883989
ccagcuucuugaguggaaa

SEQ ID NO: 2231539 - RNA, 19 nt, Artificial Sequence
  Description of Artificial Sequence: Synthetic oligonucleotide
  Antisense strand to SEQ ID NO: 2231538
uuuccacucaagaagcugg

SEQ ID NO: 2231540 - RNA, 19 nt, Artificial Sequence
  Description of Artificial Sequence: Synthetic oligonucleotide
  Sense strand starting at position 648 of SEQ ID NO: 1883989
ggaggaggcaucugguuga

SEQ ID NO: 2231541 - RNA, 19 nt, Artificial Sequence
  Description of Artificial Sequence: Synthetic oligonucleotide
  Antisense strand to SEQ ID NO: 2231540
ucaaccagaugccuccucc

SEQ ID NO: 2231542 - RNA, 19 nt, Artificial Sequence
  Description of Artificial Sequence: Synthetic oligonucleotide
  Sense strand starting at position 651 of SEQ ID NO: 1883989
ggaggcaucugguugauag

SEQ ID NO: 2231543 - RNA, 19 nt, Artificial Sequence
  Description of Artificial Sequence: Synthetic oligonucleotide
  Antisense strand to SEQ ID NO: 2231542
cuaucaaccagaugccucc

SEQ ID NO: 2231544 - RNA, 19 nt, Artificial Sequence
  Description of Artificial Sequence: Synthetic oligonucleotide
  Sense strand starting at position 1125 of SEQ ID NO: 1883989
uucucagaugaaugaguaa

SEQ ID NO: 2231545 - RNA, 19 nt, Artificial Sequence
  Description of Artificial Sequence: Synthetic oligonucleotide
  Antisense strand to SEQ ID NO: 2231544
uuacucauucaucugagaa

SEQ ID NO: 2231546 - RNA, 19 nt, Artificial Sequence
  Description of Artificial Sequence: Synthetic oligonucleotide
  Sense strand starting at position 1350 of SEQ ID NO: 1883989
caaaccuguccaggagacu

SEQ ID NO: 2231547 - RNA, 19 nt, Artificial Sequence
  Description of Artificial Sequence: Synthetic oligonucleotide
  Antisense strand to SEQ ID NO: 2231546
agucuccuggacagguuug

SEQ ID NO: 2231548 - RNA, 19 nt, Artificial Sequence
  Description of Artificial Sequence: Synthetic oligonucleotide
  Sense strand starting at position 1402 of SEQ ID NO: 1883989
uagaauaggcccuggaaua

SEQ ID NO: 2231549 - RNA, 19 nt, Artificial Sequence
  Description of Artificial Sequence: Synthetic oligonucleotide
  Antisense strand to SEQ ID NO: 2231548
uauuccagggccuauucua

SEQ ID NO: 2231550 - RNA, 19 nt, Artificial Sequence
  Description of Artificial Sequence: Synthetic oligonucleotide
  Sense strand starting at position 1486 of SEQ ID NO: 1883989
uguuauuggcaagaaucau

SEQ ID NO: 2231551 - RNA, 19 nt, Artificial Sequence
  Description of Artificial Sequence: Synthetic oligonucleotide
  Antisense strand to SEQ ID NO: 2231550
augauucuugccaauaaca

SEQ ID NO: 2231552 - RNA, 19 nt, Artificial Sequence
  Description of Artificial Sequence: Synthetic oligonucleotide
  Sense strand starting at position 1506 of SEQ ID NO: 1883989
guucuuauccuaugaagau

SEQ ID NO: 2231553 - RNA, 19 nt, Artificial Sequence
  Description of Artificial Sequence: Synthetic oligonucleotide
  Antisense strand to SEQ ID NO: 2231552
aucuucauaggauaagaac

SEQ ID NO: 2231554 - RNA, 19 nt, Artificial Sequence
  Description of Artificial Sequence: Synthetic oligonucleotide
  Sense strand starting at position 1710 of SEQ ID NO: 1883989
guagucuuacuauaucauc

SEQ ID NO: 2231555 - RNA, 19 nt, Artificial Sequence
  Description of Artificial Sequence: Synthetic oligonucleotide
  Antisense strand to SEQ ID NO: 2231554
gaugauauaguaagacuac

SEQ ID NO: 2231556 - RNA, 19 nt, Artificial Sequence
  Description of Artificial Sequence: Synthetic oligonucleotide
  Sense strand starting at position 1726 of SEQ ID NO: 1883989
aucacagagucuuugcuau

SEQ ID NO: 2231557 - RNA, 19 nt, Artificial Sequence
  Description of Artificial Sequence: Synthetic oligonucleotide
  Antisense strand to SEQ ID NO: 2231556
auagcaaagacucugugau

SEQ ID NO: 2231558 - RNA, 19 nt, Artificial Sequence
  Description of Artificial Sequence: Synthetic oligonucleotide
  Sense strand starting at position 1788 of SEQ ID NO: 1883989
gugagugggacuuaguaac

SEQ ID NO: 2231559 - RNA, 19 nt, Artificial Sequence
  Description of Artificial Sequence: Synthetic oligonucleotide
  Antisense strand to SEQ ID NO: 2231558
guuacuaagucccacucac

SEQ ID NO: 2231560 - RNA, 19 nt, Artificial Sequence
  Description of Artificial Sequence: Synthetic oligonucleotide
  Sense strand starting at position 1802 of SEQ ID NO: 1883989
guaacucacuuucuaaugu

SEQ ID NO: 2231561 - RNA, 19 nt, Artificial Sequence
  Description of Artificial Sequence: Synthetic oligonucleotide
  Antisense strand to SEQ ID NO: 2231560
acauuagaaagugaguuac

SEQ ID NO: 2231562 - RNA, 19 nt, Artificial Sequence
  Description of Artificial Sequence: Synthetic oligonucleotide
  Sense strand starting at position 2011 of SEQ ID NO: 1883989
gagagugagccaugcugga

SEQ ID NO: 2231563 - RNA, 19 nt, Artificial Sequence
  Description of Artificial Sequence: Synthetic oligonucleotide
  Antisense strand to SEQ ID NO: 2231562
uccagcauggcucacucuc

SEQ ID NO: 2231564 - RNA, 19 nt, Artificial Sequence
  Description of Artificial Sequence: Synthetic oligonucleotide
  Sense strand starting at position 2113 of SEQ ID NO: 1883989
ggcagagucaccgaguuaa

SEQ ID NO: 2231565 - RNA, 19 nt, Artificial Sequence
  Description of Artificial Sequence: Synthetic oligonucleotide
  Antisense strand to SEQ ID NO: 2231564
uuaacucggugacucugcc

SEQ ID NO: 2231566 - RNA, 19 nt, Artificial Sequence
  Description of Artificial Sequence: Synthetic oligonucleotide
  Sense strand starting at position 2211 of SEQ ID NO: 1883989
uagaguaauuugcugugca

SEQ ID NO: 2231567 - RNA, 19 nt, Artificial Sequence
  Description of Artificial Sequence: Synthetic oligonucleotide
  Antisense strand to SEQ ID NO: 2231566
ugcacagcaaauuacucua

SEQ ID NO: 2231568 - RNA, 19 nt, Artificial Sequence
  Description of Artificial Sequence: Synthetic oligonucleotide
  Sense strand starting at position 2214 of SEQ ID NO: 1883989
aguaauuugcugugcagca

SEQ ID NO: 2231569 - RNA, 19 nt, Artificial Sequence
  Description of Artificial Sequence: Synthetic oligonucleotide
  Antisense strand to SEQ ID NO: 2231568
ugcugcacagcaaauuacu

SEQ ID NO: 2231570 - RNA, 19 nt, Artificial Sequence
  Description of Artificial Sequence: Synthetic oligonucleotide
  Sense strand starting at position 2216 of SEQ ID NO: 1883989
uaauuugcugugcagcaau

SEQ ID NO: 2231571 - RNA, 19 nt, Artificial Sequence
  Description of Artificial Sequence: Synthetic oligonucleotide
  Antisense strand to SEQ ID NO: 2231570
auugcugcacagcaaauua

SEQ ID NO: 2231572 - RNA, 19 nt, Artificial Sequence
  Description of Artificial Sequence: Synthetic oligonucleotide
  Sense strand starting at position 2302 of SEQ ID NO: 1883989
gauguauaccuuuauguug

SEQ ID NO: 2231573 - RNA, 19 nt, Artificial Sequence
  Description of Artificial Sequence: Synthetic oligonucleotide
  Antisense strand to SEQ ID NO: 2231572
caacauaaagguauacauc

SEQ ID NO: 2231574 - RNA, 19 nt, Artificial Sequence
  Description of Artificial Sequence: Synthetic oligonucleotide
  Sense strand starting at position 2305 of SEQ ID NO: 1883989
guauaccuuuauguugaau

SEQ ID NO: 2231575 - RNA, 19 nt, Artificial Sequence
  Description of Artificial Sequence: Synthetic oligonucleotide
  Antisense strand to SEQ ID NO: 2231574
auucaacauaaagguauac

SEQ ID NO: 2231576 - RNA, 19 nt, Artificial Sequence
  Description of Artificial Sequence: Synthetic oligonucleotide
  Sense strand starting at position 2311 of SEQ ID NO: 1883989
cuuuauguugaauggucau

SEQ ID NO: 2231577 - RNA, 19 nt, Artificial Sequence
  Description of Artificial Sequence: Synthetic oligonucleotide
  Antisense strand to SEQ ID NO: 2231576
augaccauucaacauaaag

SEQ ID NO: 2231578 - RNA, 19 nt, Artificial Sequence
  Description of Artificial Sequence: Synthetic oligonucleotide
  Sense strand starting at position 2419 of SEQ ID NO: 1883989
ccagacauguuccuagaca

SEQ ID NO: 2231579 - RNA, 19 nt, Artificial Sequence
  Description of Artificial Sequence: Synthetic oligonucleotide
  Antisense strand to SEQ ID NO: 2231578
ugucuaggaacaugucugg

SEQ ID NO: 2231580 - RNA, 19 nt, Artificial Sequence
  Description of Artificial Sequence: Synthetic oligonucleotide
  Sense strand starting at position 2469 of SEQ ID NO: 1883989
cggauuacuugaguaaaca

SEQ ID NO: 2231581 - RNA, 19 nt, Artificial Sequence
  Description of Artificial Sequence: Synthetic oligonucleotide
  Antisense strand to SEQ ID NO: 2231580
uguuuacucaaguaauccg

SEQ ID NO: 2231582 - RNA, 19 nt, Artificial Sequence
  Description of Artificial Sequence: Synthetic oligonucleotide
  Sense strand starting at position 2570 of SEQ ID NO: 1883989
gcaugcaaauucuuugaca

SEQ ID NO: 2231583 - RNA, 19 nt, Artificial Sequence
  Description of Artificial Sequence: Synthetic oligonucleotide
  Antisense strand to SEQ ID NO: 2231582
ugucaaagaauuugcaugc

SEQ ID NO: 2231584 - RNA, 19 nt, Artificial Sequence
  Description of Artificial Sequence: Synthetic oligonucleotide
  Sense strand starting at position 2615 of SEQ ID NO: 1883989
cugaccucucccugggaau

SEQ ID NO: 2231585 - RNA, 19 nt, Artificial Sequence
  Description of Artificial Sequence: Synthetic oligonucleotide
  Antisense strand to SEQ ID NO: 2231584
auucccagggagaggucag

SEQ ID NO: 2231586 - RNA, 19 nt, Artificial Sequence
  Description of Artificial Sequence: Synthetic oligonucleotide
  Sense strand starting at position 2646 of SEQ ID NO: 1883989
uagugacaugauuguaaug

SEQ ID NO: 2231587 - RNA, 19 nt, Artificial Sequence
  Description of Artificial Sequence: Synthetic oligonucleotide
  Antisense strand to SEQ ID NO: 2231586
cauuacaaucaugucacua

SEQ ID NO: 2231588 - RNA, 19 nt, Artificial Sequence
  Description of Artificial Sequence: Synthetic oligonucleotide
  Sense strand starting at position 2662 of SEQ ID NO: 1883989
augaguagaugacucugua

SEQ ID NO: 2231589 - RNA, 19 nt, Artificial Sequence
  Description of Artificial Sequence: Synthetic oligonucleotide
  Antisense strand to SEQ ID NO: 2231588
uacagagucaucuacucau

SEQ ID NO: 2231590 - RNA, 19 nt, Artificial Sequence
  Description of Artificial Sequence: Synthetic oligonucleotide
  Sense strand starting at position 2665 of SEQ ID NO: 1883989
aguagaugacucuguagac

SEQ ID NO: 2231591 - RNA, 19 nt, Artificial Sequence
  Description of Artificial Sequence: Synthetic oligonucleotide
  Antisense strand to SEQ ID NO: 2231590
gucuacagagucaucuacu

SEQ ID NO: 2231592 - RNA, 19 nt, Artificial Sequence
  Description of Artificial Sequence: Synthetic oligonucleotide
  Sense strand starting at position 2666 of SEQ ID NO: 1883989
guagaugacucuguagaca

SEQ ID NO: 2231593 - RNA, 19 nt, Artificial Sequence
  Description of Artificial Sequence: Synthetic oligonucleotide
  Antisense strand to SEQ ID NO: 2231592
ugucuacagagucaucuac

SEQ ID NO: 2231594 - RNA, 19 nt, Artificial Sequence
  Description of Artificial Sequence: Synthetic oligonucleotide
  Sense strand starting at position 2761 of SEQ ID NO: 1883989
gcucucagucaucaaguaa

SEQ ID NO: 2231595 - RNA, 19 nt, Artificial Sequence
  Description of Artificial Sequence: Synthetic oligonucleotide
  Antisense strand to SEQ ID NO: 2231594
uuacuugaugacugagagc

SEQ ID NO: 2231596 - RNA, 19 nt, Artificial Sequence
  Description of Artificial Sequence: Synthetic oligonucleotide
  Sense strand starting at position 2851 of SEQ ID NO: 1883989
acuguauucuguccaaauu

SEQ ID NO: 2231597 - RNA, 19 nt, Artificial Sequence
  Description of Artificial Sequence: Synthetic oligonucleotide
  Antisense strand to SEQ ID NO: 2231596
aauuuggacagaauacagu

SEQ ID NO: 2231598 - RNA, 19 nt, Artificial Sequence
  Description of Artificial Sequence: Synthetic oligonucleotide
  Sense strand starting at position 2852 of SEQ ID NO: 1883989
cuguauucuguccaaauuc

SEQ ID NO: 2231599 - RNA, 19 nt, Artificial Sequence
  Description of Artificial Sequence: Synthetic oligonucleotide
  Antisense strand to SEQ ID NO: 2231598
gaauuuggacagaauacag

SEQ ID NO: 2231600 - RNA, 19 nt, Artificial Sequence
  Description of Artificial Sequence: Synthetic oligonucleotide
  Sense strand starting at position 3084 of SEQ ID NO: 1883989
auguaagguucaguagaag

SEQ ID NO: 2231601 - RNA, 19 nt, Artificial Sequence
  Description of Artificial Sequence: Synthetic oligonucleotide
  Antisense strand to SEQ ID NO: 2231600
cuucuacugaaccuuacau

SEQ ID NO: 2231602 - RNA, 19 nt, Artificial Sequence
  Description of Artificial Sequence: Synthetic oligonucleotide
  Sense strand starting at position 3127 of SEQ ID NO: 1883989
gagagacauccguaugguu

SEQ ID NO: 2231603 - RNA, 19 nt, Artificial Sequence
  Description of Artificial Sequence: Synthetic oligonucleotide
  Antisense strand to SEQ ID NO: 2231602
aaccauacggaugucucuc

SEQ ID NO: 2231604 - RNA, 19 nt, Artificial Sequence
  Description of Artificial Sequence: Synthetic oligonucleotide
  Sense strand starting at position 3174 of SEQ ID NO: 1883989
auugcauaucucugagaac

SEQ ID NO: 2231605 - RNA, 19 nt, Artificial Sequence
  Description of Artificial Sequence: Synthetic oligonucleotide
  Antisense strand to SEQ ID NO: 2231604
guucucagagauaugcaau

SEQ ID NO: 2231606 - RNA, 19 nt, Artificial Sequence
  Description of Artificial Sequence: Synthetic oligonucleotide
  Sense strand starting at position 3807 of SEQ ID NO: 1883989
agccacuauccugaaguua

SEQ ID NO: 2231607 - RNA, 19 nt, Artificial Sequence
  Description of Artificial Sequence: Synthetic oligonucleotide
  Antisense strand to SEQ ID NO: 2231606
uaacuucaggauaguggcu

SEQ ID NO: 2231608 - RNA, 19 nt, Artificial Sequence
  Description of Artificial Sequence: Synthetic oligonucleotide
  Sense strand starting at position 44 of SEQ ID NO: 1883990
gguguagcauuucaaggaa

SEQ ID NO: 2231609 - RNA, 19 nt, Artificial Sequence
  Description of Artificial Sequence: Synthetic oligonucleotide
  Antisense strand to SEQ ID NO: 2231608
uuccuugaaaugcuacacc

SEQ ID NO: 2231610 - RNA, 19 nt, Artificial Sequence
  Description of Artificial Sequence: Synthetic oligonucleotide
  Sense strand starting at position 75 of SEQ ID NO: 1883990
auagcuuaugccuggagca

SEQ ID NO: 2231611 - RNA, 19 nt, Artificial Sequence
  Description of Artificial Sequence: Synthetic oligonucleotide
  Antisense strand to SEQ ID NO: 2231610
ugcuccaggcauaagcuau

SEQ ID NO: 2231612 - RNA, 19 nt, Artificial Sequence
  Description of Artificial Sequence: Synthetic oligonucleotide
  Sense strand starting at position 77 of SEQ ID NO: 1883990
agcuuaugccuggagcaca

SEQ ID NO: 2231613 - RNA, 19 nt, Artificial Sequence
  Description of Artificial Sequence: Synthetic oligonucleotide
  Antisense strand to SEQ ID NO: 2231612
ugugcuccaggcauaagcu

SEQ ID NO: 2231614 - RNA, 19 nt, Artificial Sequence
  Description of Artificial Sequence: Synthetic oligonucleotide
  Sense strand starting at position 407 of SEQ ID NO: 1883990
ucucgugguaguggugaua

SEQ ID NO: 2231615 - RNA, 19 nt, Artificial Sequence
  Description of Artificial Sequence: Synthetic oligonucleotide
  Antisense strand to SEQ ID NO: 2231614
uaucaccacuaccacgaga

SEQ ID NO: 2231616 - RNA, 19 nt, Artificial Sequence
  Description of Artificial Sequence: Synthetic oligonucleotide
  Sense strand starting at position 435 of SEQ ID NO: 1883990
ucuuaugagaucugagggu

SEQ ID NO: 2231617 - RNA, 19 nt, Artificial Sequence
  Description of Artificial Sequence: Synthetic oligonucleotide
  Antisense strand to SEQ ID NO: 2231616
acccucagaucucauaaga

SEQ ID NO: 2231618 - RNA, 19 nt, Artificial Sequence
  Description of Artificial Sequence: Synthetic oligonucleotide
  Sense strand starting at position 721 of SEQ ID NO: 1883990
ggcagacgccaugaucaaa

SEQ ID NO: 2231619 - RNA, 19 nt, Artificial Sequence
  Description of Artificial Sequence: Synthetic oligonucleotide
  Antisense strand to SEQ ID NO: 2231618
uuugaucauggcgucugcc

SEQ ID NO: 2231620 - RNA, 19 nt, Artificial Sequence
  Description of Artificial Sequence: Synthetic oligonucleotide
  Sense strand starting at position 753 of SEQ ID NO: 1883990
gcauuaugcuaccuaaggu

SEQ ID NO: 2231621 - RNA, 19 nt, Artificial Sequence
  Description of Artificial Sequence: Synthetic oligonucleotide
  Antisense strand to SEQ ID NO: 2231620
accuuagguagcauaaugc

SEQ ID NO: 2231622 - RNA, 19 nt, Artificial Sequence
  Description of Artificial Sequence: Synthetic oligonucleotide
  Sense strand starting at position 854 of SEQ ID NO: 1883990
acacuagcccaaugagaug

SEQ ID NO: 2231623 - RNA, 19 nt, Artificial Sequence
  Description of Artificial Sequence: Synthetic oligonucleotide
  Antisense strand to SEQ ID NO: 2231622
caucucauugggcuagugu

SEQ ID NO: 2231624 - RNA, 19 nt, Artificial Sequence
  Description of Artificial Sequence: Synthetic oligonucleotide
  Sense strand starting at position 914 of SEQ ID NO: 1883990
cuuugagaaagcugguuau

SEQ ID NO: 2231625 - RNA, 19 nt, Artificial Sequence
  Description of Artificial Sequence: Synthetic oligonucleotide
  Antisense strand to SEQ ID NO: 2231624
auaaccagcuuucucaaag

SEQ ID NO: 2231626 - RNA, 19 nt, Artificial Sequence
  Description of Artificial Sequence: Synthetic oligonucleotide
  Sense strand starting at position 920 of SEQ ID NO: 1883990
gaaagcugguuauuggcaa

SEQ ID NO: 2231627 - RNA, 19 nt, Artificial Sequence
  Description of Artificial Sequence: Synthetic oligonucleotide
  Antisense strand to SEQ ID NO: 2231626
uugccaauaaccagcuuuc

SEQ ID NO: 2231628 - RNA, 19 nt, Artificial Sequence
  Description of Artificial Sequence: Synthetic oligonucleotide
  Sense strand starting at position 966 of SEQ ID NO: 1883990
agcuuaugugcuuaacaua

SEQ ID NO: 2231629 - RNA, 19 nt, Artificial Sequence
  Description of Artificial Sequence: Synthetic oligonucleotide
  Antisense strand to SEQ ID NO: 2231628
uauguuaagcacauaagcu

SEQ ID NO: 2231630 - RNA, 19 nt, Artificial Sequence
  Description of Artificial Sequence: Synthetic oligonucleotide
  Sense strand starting at position 1007 of SEQ ID NO: 1883990
agccuugagcccuacagaa

SEQ ID NO: 2231631 - RNA, 19 nt, Artificial Sequence
  Description of Artificial Sequence: Synthetic oligonucleotide
  Antisense strand to SEQ ID NO: 2231630
uucuguagggcucaaggcu

SEQ ID NO: 2231632 - RNA, 19 nt, Artificial Sequence
  Description of Artificial Sequence: Synthetic oligonucleotide
  Sense strand starting at position 1416 of SEQ ID NO: 1883990
gggcuuuggaagcaacuua

SEQ ID NO: 2231633 - RNA, 19 nt, Artificial Sequence
  Description of Artificial Sequence: Synthetic oligonucleotide
  Antisense strand to SEQ ID NO: 2231632
uaaguugcuuccaaagccc

SEQ ID NO: 2231634 - RNA, 19 nt, Artificial Sequence
  Description of Artificial Sequence: Synthetic oligonucleotide
  Sense strand starting at position 1563 of SEQ ID NO: 1883990
ccgugagccucugucugau

SEQ ID NO: 2231635 - RNA, 19 nt, Artificial Sequence
  Description of Artificial Sequence: Synthetic oligonucleotide
  Antisense strand to SEQ ID NO: 2231634
aucagacagaggcucacgg

SEQ ID NO: 2231636 - RNA, 19 nt, Artificial Sequence
  Description of Artificial Sequence: Synthetic oligonucleotide
  Sense strand starting at position 1573 of SEQ ID NO: 1883990
cugucugauccauggugca

SEQ ID NO: 2231637 - RNA, 19 nt, Artificial Sequence
  Description of Artificial Sequence: Synthetic oligonucleotide
  Antisense strand to SEQ ID NO: 2231636
ugcaccauggaucagacag

SEQ ID NO: 2231638 - RNA, 19 nt, Artificial Sequence
  Description of Artificial Sequence: Synthetic oligonucleotide
  Sense strand starting at position 1720 of SEQ ID NO: 1883990
guggcaguuaggcagauaa

SEQ ID NO: 2231639 - RNA, 19 nt, Artificial Sequence
  Description of Artificial Sequence: Synthetic oligonucleotide
  Antisense strand to SEQ ID NO: 2231638
uuaucugccuaacugccac

SEQ ID NO: 2231640 - RNA, 19 nt, Artificial Sequence
  Description of Artificial Sequence: Synthetic oligonucleotide
  Sense strand starting at position 1722 of SEQ ID NO: 1883990
ggcaguuaggcagauaaau

SEQ ID NO: 2231641 - RNA, 19 nt, Artificial Sequence
  Description of Artificial Sequence: Synthetic oligonucleotide
  Antisense strand to SEQ ID NO: 2231640
auuuaucugccuaacugcc

SEQ ID NO: 2231642 - RNA, 19 nt, Artificial Sequence
  Description of Artificial Sequence: Synthetic oligonucleotide
  Sense strand starting at position 2043 of SEQ ID NO: 1883990
uaauuagaauccuggguua

SEQ ID NO: 2231643 - RNA, 19 nt, Artificial Sequence
  Description of Artificial Sequence: Synthetic oligonucleotide
  Antisense strand to SEQ ID NO: 2231642
uaacccaggauucuaauua

SEQ ID NO: 2231644 - RNA, 19 nt, Artificial Sequence
  Description of Artificial Sequence: Synthetic oligonucleotide
  Sense strand starting at position 2046 of SEQ ID NO: 1883990
uuagaauccuggguuaaua

SEQ ID NO: 2231645 - RNA, 19 nt, Artificial Sequence
  Description of Artificial Sequence: Synthetic oligonucleotide
  Antisense strand to SEQ ID NO: 2231644
uauuaacccaggauucuaa

SEQ ID NO: 2231646 - RNA, 19 nt, Artificial Sequence
  Description of Artificial Sequence: Synthetic oligonucleotide
  Sense strand starting at position 2102 of SEQ ID NO: 1883990
ccagcuguuuaucuugaga

SEQ ID NO: 2231647 - RNA, 19 nt, Artificial Sequence
  Description of Artificial Sequence: Synthetic oligonucleotide
  Antisense strand to SEQ ID NO: 2231646
ucucaagauaaacagcugg

SEQ ID NO: 2231648 - RNA, 19 nt, Artificial Sequence
  Description of Artificial Sequence: Synthetic oligonucleotide
  Sense strand starting at position 2113 of SEQ ID NO: 1883990
ucuugagaucgcugcugaa

SEQ ID NO: 2231649 - RNA, 19 nt, Artificial Sequence
  Description of Artificial Sequence: Synthetic oligonucleotide
  Antisense strand to SEQ ID NO: 2231648
uucagcagcgaucucaaga

SEQ ID NO: 2231650 - RNA, 19 nt, Artificial Sequence
  Description of Artificial Sequence: Synthetic oligonucleotide
  Sense strand starting at position 2394 of SEQ ID NO: 1883990
acuagauacccuggaguga

SEQ ID NO: 2231651 - RNA, 19 nt, Artificial Sequence
  Description of Artificial Sequence: Synthetic oligonucleotide
  Antisense strand to SEQ ID NO: 2231650
ucacuccaggguaucuagu

SEQ ID NO: 2231652 - RNA, 19 nt, Artificial Sequence
  Description of Artificial Sequence: Synthetic oligonucleotide
  Sense strand starting at position 2417 of SEQ ID NO: 1883990
ggacucuuaucuccugaga

SEQ ID NO: 2231653 - RNA, 19 nt, Artificial Sequence
  Description of Artificial Sequence: Synthetic oligonucleotide
  Antisense strand to SEQ ID NO: 2231652
ucucaggagauaagagucc

SEQ ID NO: 2231654 - RNA, 19 nt, Artificial Sequence
  Description of Artificial Sequence: Synthetic oligonucleotide
  Sense strand starting at position 2419 of SEQ ID NO: 1883990
acucuuaucuccugagagg

SEQ ID NO: 2231655 - RNA, 19 nt, Artificial Sequence
  Description of Artificial Sequence: Synthetic oligonucleotide
  Antisense strand to SEQ ID NO: 2231654
ccucucaggagauaagagu

SEQ ID NO: 2231656 - RNA, 19 nt, Artificial Sequence
  Description of Artificial Sequence: Synthetic oligonucleotide
  Sense strand starting at position 2991 of SEQ ID NO: 1883990
ugccauguccagggaaauu

SEQ ID NO: 2231657 - RNA, 19 nt, Artificial Sequence
  Description of Artificial Sequence: Synthetic oligonucleotide
  Antisense strand to SEQ ID NO: 2231656
aauuucccuggacauggca

SEQ ID NO: 2231658 - RNA, 19 nt, Artificial Sequence
  Description of Artificial Sequence: Synthetic oligonucleotide
  Sense strand starting at position 3290 of SEQ ID NO: 1883990
agcucauagucugaagaag

SEQ ID NO: 2231659 - RNA, 19 nt, Artificial Sequence
  Description of Artificial Sequence: Synthetic oligonucleotide
  Antisense strand to SEQ ID NO: 2231658
cuucuucagacuaugagcu

SEQ ID NO: 2231660 - RNA, 19 nt, Artificial Sequence
  Description of Artificial Sequence: Synthetic oligonucleotide
  Sense strand starting at position 3460 of SEQ ID NO: 1883990
cugugaacuccuggcagca

SEQ ID NO: 2231661 - RNA, 19 nt, Artificial Sequence
  Description of Artificial Sequence: Synthetic oligonucleotide
  Antisense strand to SEQ ID NO: 2231660
ugcugccaggaguucacag

SEQ ID NO: 2231662 - RNA, 19 nt, Artificial Sequence
  Description of Artificial Sequence: Synthetic oligonucleotide
  Sense strand starting at position 3598 of SEQ ID NO: 1883990
gaggaaaucggaugucuau

SEQ ID NO: 2231663 - RNA, 19 nt, Artificial Sequence
  Description of Artificial Sequence: Synthetic oligonucleotide
  Antisense strand to SEQ ID NO: 2231662
auagacauccgauuuccuc

SEQ ID NO: 2231664 - RNA, 19 nt, Artificial Sequence
  Description of Artificial Sequence: Synthetic oligonucleotide
  Sense strand starting at position 3714 of SEQ ID NO: 1883990
caguucugguguuuacuga

SEQ ID NO: 2231665 - RNA, 19 nt, Artificial Sequence
  Description of Artificial Sequence: Synthetic oligonucleotide
  Antisense strand to SEQ ID NO: 2231664
ucaguaaacaccagaacug

SEQ ID NO: 2231666 - RNA, 19 nt, Artificial Sequence
  Description of Artificial Sequence: Synthetic oligonucleotide
  Sense strand starting at position 3715 of SEQ ID NO: 1883990
aguucugguguuuacugaa

SEQ ID NO: 2231667 - RNA, 19 nt, Artificial Sequence
  Description of Artificial Sequence: Synthetic oligonucleotide
  Antisense strand to SEQ ID NO: 2231666
uucaguaaacaccagaacu

SEQ ID NO: 2231668 - RNA, 19 nt, Artificial Sequence
  Description of Artificial Sequence: Synthetic oligonucleotide
  Sense strand starting at position 3738 of SEQ ID NO: 1883990
aggaaauguuacugacaca

SEQ ID NO: 2231669 - RNA, 19 nt, Artificial Sequence
  Description of Artificial Sequence: Synthetic oligonucleotide
  Antisense strand to SEQ ID NO: 2231668
ugugucaguaacauuuccu

SEQ ID NO: 2231670 - RNA, 19 nt, Artificial Sequence
  Description of Artificial Sequence: Synthetic oligonucleotide
  Sense strand starting at position 3798 of SEQ ID NO: 1883990
aaaugugauuccucagugu

SEQ ID NO: 2231671 - RNA, 19 nt, Artificial Sequence
  Description of Artificial Sequence: Synthetic oligonucleotide
  Antisense strand to SEQ ID NO: 2231670
acacugaggaaucacauuu

SEQ ID NO: 2231672 - RNA, 19 nt, Artificial Sequence
  Description of Artificial Sequence: Synthetic oligonucleotide
  Sense strand starting at position 3802 of SEQ ID NO: 1883990
gugauuccucaguguugga

SEQ ID NO: 2231673 - RNA, 19 nt, Artificial Sequence
  Description of Artificial Sequence: Synthetic oligonucleotide
  Antisense strand to SEQ ID NO: 2231672
uccaacacugaggaaucac

SEQ ID NO: 2231674 - RNA, 19 nt, Artificial Sequence
  Description of Artificial Sequence: Synthetic oligonucleotide
  Sense strand starting at position 3831 of SEQ ID NO: 1883990
gugggaauuguuuggacca

SEQ ID NO: 2231675 - RNA, 19 nt, Artificial Sequence
  Description of Artificial Sequence: Synthetic oligonucleotide
  Antisense strand to SEQ ID NO: 2231674
ugguccaaacaauucccac

SEQ ID NO: 2231676 - RNA, 19 nt, Artificial Sequence
  Description of Artificial Sequence: Synthetic oligonucleotide
  Sense strand starting at position 3833 of SEQ ID NO: 1883990
gggaauuguuuggaccaua

SEQ ID NO: 2231677 - RNA, 19 nt, Artificial Sequence
  Description of Artificial Sequence: Synthetic oligonucleotide
  Antisense strand to SEQ ID NO: 2231676
uaugguccaaacaauuccc

SEQ ID NO: 2231678 - RNA, 19 nt, Artificial Sequence
  Description of Artificial Sequence: Synthetic oligonucleotide
  Sense strand starting at position 3877 of SEQ ID NO: 1883990
ggugccguucuugagguaa

SEQ ID NO: 2231679 - RNA, 19 nt, Artificial Sequence
  Description of Artificial Sequence: Synthetic oligonucleotide
  Antisense strand to SEQ ID NO: 2231678
uuaccucaagaacggcacc

SEQ ID NO: 2231680 - RNA, 19 nt, Artificial Sequence
  Description of Artificial Sequence: Synthetic oligonucleotide
  Sense strand starting at position 3891 of SEQ ID NO: 1883990
gguaaugaguguucucaau

SEQ ID NO: 2231681 - RNA, 19 nt, Artificial Sequence
  Description of Artificial Sequence: Synthetic oligonucleotide
  Antisense strand to SEQ ID NO: 2231680
auugagaacacucauuacc

SEQ ID NO: 2231682 - RNA, 19 nt, Artificial Sequence
  Description of Artificial Sequence: Synthetic oligonucleotide
  Sense strand starting at position 3899 of SEQ ID NO: 1883990
guguucucaaucuguuagu

SEQ ID NO: 2231683 - RNA, 19 nt, Artificial Sequence
  Description of Artificial Sequence: Synthetic oligonucleotide
  Antisense strand to SEQ ID NO: 2231682
acuaacagauugagaacac

SEQ ID NO: 2231684 - RNA, 19 nt, Artificial Sequence
  Description of Artificial Sequence: Synthetic oligonucleotide
  Sense strand starting at position 3900 of SEQ ID NO: 1883990
uguucucaaucuguuaguu

SEQ ID NO: 2231685 - RNA, 19 nt, Artificial Sequence
  Description of Artificial Sequence: Synthetic oligonucleotide
  Antisense strand to SEQ ID NO: 2231684
aacuaacagauugagaaca

SEQ ID NO: 2231686 - RNA, 19 nt, Artificial Sequence
  Description of Artificial Sequence: Synthetic oligonucleotide
  Sense strand starting at position 3924 of SEQ ID NO: 1883990
aagagaugguguguuuaaa

SEQ ID NO: 2231687 - RNA, 19 nt, Artificial Sequence
  Description of Artificial Sequence: Synthetic oligonucleotide
  Antisense strand to SEQ ID NO: 2231686
uuuaaacacaccaucucuu

SEQ ID NO: 2231688 - RNA, 19 nt, Artificial Sequence
  Description of Artificial Sequence: Synthetic oligonucleotide
  Sense strand starting at position 283 of SEQ ID NO: 1883991
cuagaaauauuggugucca

SEQ ID NO: 2231689 - RNA, 19 nt, Artificial Sequence
  Description of Artificial Sequence: Synthetic oligonucleotide
  Antisense strand to SEQ ID NO: 2231688
uggacaccaauauuucuag

SEQ ID NO: 2231690 - RNA, 19 nt, Artificial Sequence
  Description of Artificial Sequence: Synthetic oligonucleotide
  Sense strand starting at position 364 of SEQ ID NO: 1883991
uuguuaauacaaugucaca

SEQ ID NO: 2231691 - RNA, 19 nt, Artificial Sequence
  Description of Artificial Sequence: Synthetic oligonucleotide
  Antisense strand to SEQ ID NO: 2231690
ugugacauuguauuaacaa

SEQ ID NO: 2231692 - RNA, 19 nt, Artificial Sequence
  Description of Artificial Sequence: Synthetic oligonucleotide
  Sense strand starting at position 609 of SEQ ID NO: 1883991
caacguguacccguuaagu

SEQ ID NO: 2231693 - RNA, 19 nt, Artificial Sequence
  Description of Artificial Sequence: Synthetic oligonucleotide
  Antisense strand to SEQ ID NO: 2231692
acuuaacggguacacguug

SEQ ID NO: 2231694 - RNA, 19 nt, Artificial Sequence
  Description of Artificial Sequence: Synthetic oligonucleotide
  Sense strand starting at position 658 of SEQ ID NO: 1883991
gugugauaacaucagccaa

SEQ ID NO: 2231695 - RNA, 19 nt, Artificial Sequence
  Description of Artificial Sequence: Synthetic oligonucleotide
  Antisense strand to SEQ ID NO: 2231694
uuggcugauguuaucacac

SEQ ID NO: 2231696 - RNA, 19 nt, Artificial Sequence
  Description of Artificial Sequence: Synthetic oligonucleotide
  Sense strand starting at position 660 of SEQ ID NO: 1883991
gugauaacaucagccaaga

SEQ ID NO: 2231697 - RNA, 19 nt, Artificial Sequence
  Description of Artificial Sequence: Synthetic oligonucleotide
  Antisense strand to SEQ ID NO: 2231696
ucuuggcugauguuaucac

SEQ ID NO: 2231698 - RNA, 19 nt, Artificial Sequence
  Description of Artificial Sequence: Synthetic oligonucleotide
  Sense strand starting at position 707 of SEQ ID NO: 1883991
guggguuuauuucuuuauc

SEQ ID NO: 2231699 - RNA, 19 nt, Artificial Sequence
  Description of Artificial Sequence: Synthetic oligonucleotide
  Antisense strand to SEQ ID NO: 2231698
gauaaagaaauaaacccac

SEQ ID NO: 2231700 - RNA, 19 nt, Artificial Sequence
  Description of Artificial Sequence: Synthetic oligonucleotide
  Sense strand starting at position 798 of SEQ ID NO: 1883991
guuggcuuugaugaaagga

SEQ ID NO: 2231701 - RNA, 19 nt, Artificial Sequence
  Description of Artificial Sequence: Synthetic oligonucleotide
  Antisense strand to SEQ ID NO: 2231700
uccuuucaucaaagccaac

SEQ ID NO: 2231702 - RNA, 19 nt, Artificial Sequence
  Description of Artificial Sequence: Synthetic oligonucleotide
  Sense strand starting at position 825 of SEQ ID NO: 1883991
agcguauggaguuaacaca

SEQ ID NO: 2231703 - RNA, 19 nt, Artificial Sequence
  Description of Artificial Sequence: Synthetic oligonucleotide
  Antisense strand to SEQ ID NO: 2231702
uguguuaacuccauacgcu

SEQ ID NO: 2231704 - RNA, 19 nt, Artificial Sequence
  Description of Artificial Sequence: Synthetic oligonucleotide
  Sense strand starting at position 832 of SEQ ID NO: 1883991
ggaguuaacacaggugaca

SEQ ID NO: 2231705 - RNA, 19 nt, Artificial Sequence
  Description of Artificial Sequence: Synthetic oligonucleotide
  Antisense strand to SEQ ID NO: 2231704
ugucaccuguguuaacucc

SEQ ID NO: 2231706 - RNA, 19 nt, Artificial Sequence
  Description of Artificial Sequence: Synthetic oligonucleotide
  Sense strand starting at position 841 of SEQ ID NO: 1883991
acaggugacaguuguaaua

SEQ ID NO: 2231707 - RNA, 19 nt, Artificial Sequence
  Description of Artificial Sequence: Synthetic oligonucleotide
  Antisense strand to SEQ ID NO: 2231706
uauuacaacugucaccugu

SEQ ID NO: 2231708 - RNA, 19 nt, Artificial Sequence
  Description of Artificial Sequence: Synthetic oligonucleotide
  Sense strand starting at position 898 of SEQ ID NO: 1883991
caggcaugucgggaaagua

SEQ ID NO: 2231709 - RNA, 19 nt, Artificial Sequence
  Description of Artificial Sequence: Synthetic oligonucleotide
  Antisense strand to SEQ ID NO: 2231708
uacuuucccgacaugccug

SEQ ID NO: 2231710 - RNA, 19 nt, Artificial Sequence
  Description of Artificial Sequence: Synthetic oligonucleotide
  Sense strand starting at position 907 of SEQ ID NO: 1883991
cgggaaaguagagauguuu

SEQ ID NO: 2231711 - RNA, 19 nt, Artificial Sequence
  Description of Artificial Sequence: Synthetic oligonucleotide
  Antisense strand to SEQ ID NO: 2231710
aaacaucucuacuuucccg

SEQ ID NO: 2231712 - RNA, 19 nt, Artificial Sequence
  Description of Artificial Sequence: Synthetic oligonucleotide
  Sense strand starting at position 1253 of SEQ ID NO: 1883991
gcggaaaccuucucagaga

SEQ ID NO: 2231713 - RNA, 19 nt, Artificial Sequence
  Description of Artificial Sequence: Synthetic oligonucleotide
  Antisense strand to SEQ ID NO: 2231712
ucucugagaagguuuccgc

SEQ ID NO: 2231714 - RNA, 19 nt, Artificial Sequence
  Description of Artificial Sequence: Synthetic oligonucleotide
  Sense strand starting at position 1374 of SEQ ID NO: 1883991
ggcaauugacccgacuuga

SEQ ID NO: 2231715 - RNA, 19 nt, Artificial Sequence
  Description of Artificial Sequence: Synthetic oligonucleotide
  Antisense strand to SEQ ID NO: 2231714
ucaagucgggucaauugcc

SEQ ID NO: 2231716 - RNA, 19 nt, Artificial Sequence
  Description of Artificial Sequence: Synthetic oligonucleotide
  Sense strand starting at position 1422 of SEQ ID NO: 1883991
gccaaagucguggcuccau

SEQ ID NO: 2231717 - RNA, 19 nt, Artificial Sequence
  Description of Artificial Sequence: Synthetic oligonucleotide
  Antisense strand to SEQ ID NO: 2231716
auggagccacgacuuuggc

SEQ ID NO: 2231718 - RNA, 19 nt, Artificial Sequence
  Description of Artificial Sequence: Synthetic oligonucleotide
  Sense strand starting at position 1440 of SEQ ID NO: 1883991
uuccauguggcugaaacau

SEQ ID NO: 2231719 - RNA, 19 nt, Artificial Sequence
  Description of Artificial Sequence: Synthetic oligonucleotide
  Antisense strand to SEQ ID NO: 2231718
auguuucagccacauggaa

SEQ ID NO: 2231720 - RNA, 19 nt, Artificial Sequence
  Description of Artificial Sequence: Synthetic oligonucleotide
  Sense strand starting at position 1453 of SEQ ID NO: 1883991
aaacaucugcgugaguaga

SEQ ID NO: 2231721 - RNA, 19 nt, Artificial Sequence
  Description of Artificial Sequence: Synthetic oligonucleotide
  Antisense strand to SEQ ID NO: 2231720
ucuacucacgcagauguuu

SEQ ID NO: 2231722 - RNA, 19 nt, Artificial Sequence
  Description of Artificial Sequence: Synthetic oligonucleotide
  Sense strand starting at position 1694 of SEQ ID NO: 1883991
cuagacauucgugaguaau

SEQ ID NO: 2231723 - RNA, 19 nt, Artificial Sequence
  Description of Artificial Sequence: Synthetic oligonucleotide
  Antisense strand to SEQ ID NO: 2231722
auuacucacgaaugucuag

SEQ ID NO: 2231724 - RNA, 19 nt, Artificial Sequence
  Description of Artificial Sequence: Synthetic oligonucleotide
  Sense strand starting at position 1696 of SEQ ID NO: 1883991
agacauucgugaguaauua

SEQ ID NO: 2231725 - RNA, 19 nt, Artificial Sequence
  Description of Artificial Sequence: Synthetic oligonucleotide
  Antisense strand to SEQ ID NO: 2231724
uaauuacucacgaaugucu

SEQ ID NO: 2231726 - RNA, 19 nt, Artificial Sequence
  Description of Artificial Sequence: Synthetic oligonucleotide
  Sense strand starting at position 1697 of SEQ ID NO: 1883991
gacauucgugaguaauuau

SEQ ID NO: 2231727 - RNA, 19 nt, Artificial Sequence
  Description of Artificial Sequence: Synthetic oligonucleotide
  Antisense strand to SEQ ID NO: 2231726
auaauuacucacgaauguc

SEQ ID NO: 2231728 - RNA, 19 nt, Artificial Sequence
  Description of Artificial Sequence: Synthetic oligonucleotide
  Sense strand starting at position 1863 of SEQ ID NO: 1883991
guguguuauuuccugaacc

SEQ ID NO: 2231729 - RNA, 19 nt, Artificial Sequence
  Description of Artificial Sequence: Synthetic oligonucleotide
  Antisense strand to SEQ ID NO: 2231728
gguucaggaaauaacacac

SEQ ID NO: 2231730 - RNA, 19 nt, Artificial Sequence
  Description of Artificial Sequence: Synthetic oligonucleotide
  Sense strand starting at position 1977 of SEQ ID NO: 1883991
gaccguuggucauuugaug

SEQ ID NO: 2231731 - RNA, 19 nt, Artificial Sequence
  Description of Artificial Sequence: Synthetic oligonucleotide
  Antisense strand to SEQ ID NO: 2231730
caucaaaugaccaacgguc

SEQ ID NO: 2231732 - RNA, 19 nt, Artificial Sequence
  Description of Artificial Sequence: Synthetic oligonucleotide
  Sense strand starting at position 2366 of SEQ ID NO: 1883991
uuggucuaagcucaugaau

SEQ ID NO: 2231733 - RNA, 19 nt, Artificial Sequence
  Description of Artificial Sequence: Synthetic oligonucleotide
  Antisense strand to SEQ ID NO: 2231732
auucaugagcuuagaccaa

SEQ ID NO: 2231734 - RNA, 19 nt, Artificial Sequence
  Description of Artificial Sequence: Synthetic oligonucleotide
  Sense strand starting at position 2369 of SEQ ID NO: 1883991
gucuaagcucaugaauauc

SEQ ID NO: 2231735 - RNA, 19 nt, Artificial Sequence
  Description of Artificial Sequence: Synthetic oligonucleotide
  Antisense strand to SEQ ID NO: 2231734
gauauucaugagcuuagac

SEQ ID NO: 2231736 - RNA, 19 nt, Artificial Sequence
  Description of Artificial Sequence: Synthetic oligonucleotide
  Sense strand starting at position 2413 of SEQ ID NO: 1883991
ccagcuguaucauugaaga

SEQ ID NO: 2231737 - RNA, 19 nt, Artificial Sequence
  Description of Artificial Sequence: Synthetic oligonucleotide
  Antisense strand to SEQ ID NO: 2231736
ucuucaaugauacagcugg

SEQ ID NO: 2231738 - RNA, 19 nt, Artificial Sequence
  Description of Artificial Sequence: Synthetic oligonucleotide
  Sense strand starting at position 2418 of SEQ ID NO: 1883991
uguaucauugaagaauugu

SEQ ID NO: 2231739 - RNA, 19 nt, Artificial Sequence
  Description of Artificial Sequence: Synthetic oligonucleotide
  Antisense strand to SEQ ID NO: 2231738
acaauucuucaaugauaca

SEQ ID NO: 2231740 - RNA, 19 nt, Artificial Sequence
  Description of Artificial Sequence: Synthetic oligonucleotide
  Sense strand starting at position 2501 of SEQ ID NO: 1883991
ugaaguuacaacgguaaau

SEQ ID NO: 2231741 - RNA, 19 nt, Artificial Sequence
  Description of Artificial Sequence: Synthetic oligonucleotide
  Antisense strand to SEQ ID NO: 2231740
auuuaccguuguaacuuca

SEQ ID NO: 2231742 - RNA, 19 nt, Artificial Sequence
  Description of Artificial Sequence: Synthetic oligonucleotide
  Sense strand starting at position 2503 of SEQ ID NO: 1883991
aaguuacaacgguaaauuc

SEQ ID NO: 2231743 - RNA, 19 nt, Artificial Sequence
  Description of Artificial Sequence: Synthetic oligonucleotide
  Antisense strand to SEQ ID NO: 2231742
gaauuuaccguuguaacuu

SEQ ID NO: 2231744 - RNA, 19 nt, Artificial Sequence
  Description of Artificial Sequence: Synthetic oligonucleotide
  Sense strand starting at position 2542 of SEQ ID NO: 1883991
cucaaaguauucccugaag

SEQ ID NO: 2231745 - RNA, 19 nt, Artificial Sequence
  Description of Artificial Sequence: Synthetic oligonucleotide
  Antisense strand to SEQ ID NO: 2231744
cuucagggaauacuuugag

SEQ ID NO: 2231746 - RNA, 19 nt, Artificial Sequence
  Description of Artificial Sequence: Synthetic oligonucleotide
  Sense strand starting at position 3038 of SEQ ID NO: 1883991
gaagguuggcuccaucuaa

SEQ ID NO: 2231747 - RNA, 19 nt, Artificial Sequence
  Description of Artificial Sequence: Synthetic oligonucleotide
  Antisense strand to SEQ ID NO: 2231746
uuagauggagccaaccuuc

SEQ ID NO: 2231748 - RNA, 19 nt, Artificial Sequence
  Description of Artificial Sequence: Synthetic oligonucleotide
  Sense strand starting at position 3124 of SEQ ID NO: 1883991
gggcccugaguuuaaauga

SEQ ID NO: 2231749 - RNA, 19 nt, Artificial Sequence
  Description of Artificial Sequence: Synthetic oligonucleotide
  Antisense strand to SEQ ID NO: 2231748
ucauuuaaacucagggccc

SEQ ID NO: 2231750 - RNA, 19 nt, Artificial Sequence
  Description of Artificial Sequence: Synthetic oligonucleotide
  Sense strand starting at position 3287 of SEQ ID NO: 1883991
ggcauaagccaccauacau

SEQ ID NO: 2231751 - RNA, 19 nt, Artificial Sequence
  Description of Artificial Sequence: Synthetic oligonucleotide
  Antisense strand to SEQ ID NO: 2231750
auguaugguggcuuaugcc

SEQ ID NO: 2231752 - RNA, 19 nt, Artificial Sequence
  Description of Artificial Sequence: Synthetic oligonucleotide
  Sense strand starting at position 3314 of SEQ ID NO: 1883991
gcaggaucuuuaucuggga

SEQ ID NO: 2231753 - RNA, 19 nt, Artificial Sequence
  Description of Artificial Sequence: Synthetic oligonucleotide
  Antisense strand to SEQ ID NO: 2231752
ucccagauaaagauccugc

SEQ ID NO: 2231754 - RNA, 19 nt, Artificial Sequence
  Description of Artificial Sequence: Synthetic oligonucleotide
  Sense strand starting at position 3329 of SEQ ID NO: 1883991
gggaaagacuguccuuaac

SEQ ID NO: 2231755 - RNA, 19 nt, Artificial Sequence
  Description of Artificial Sequence: Synthetic oligonucleotide
  Antisense strand to SEQ ID NO: 2231754
guuaaggacagucuuuccc

SEQ ID NO: 2231756 - RNA, 19 nt, Artificial Sequence
  Description of Artificial Sequence: Synthetic oligonucleotide
  Sense strand starting at position 3411 of SEQ ID NO: 1883991
guguaacauccuggaagag

SEQ ID NO: 2231757 - RNA, 19 nt, Artificial Sequence
  Description of Artificial Sequence: Synthetic oligonucleotide
  Antisense strand to SEQ ID NO: 2231756
cucuuccaggauguuacac

SEQ ID NO: 2231758 - RNA, 19 nt, Artificial Sequence
  Description of Artificial Sequence: Synthetic oligonucleotide
  Sense strand starting at position 3539 of SEQ ID NO: 1883991
cuuauuuauguuggcugau

SEQ ID NO: 2231759 - RNA, 19 nt, Artificial Sequence
  Description of Artificial Sequence: Synthetic oligonucleotide
  Antisense strand to SEQ ID NO: 2231758
aucagccaacauaaauaag

SEQ ID NO: 2231760 - RNA, 19 nt, Artificial Sequence
  Description of Artificial Sequence: Synthetic oligonucleotide
  Sense strand starting at position 3540 of SEQ ID NO: 1883991
uuauuuauguuggcugauu

SEQ ID NO: 2231761 - RNA, 19 nt, Artificial Sequence
  Description of Artificial Sequence: Synthetic oligonucleotide
  Antisense strand to SEQ ID NO: 2231760
aaucagccaacauaaauaa

SEQ ID NO: 2231762 - RNA, 19 nt, Artificial Sequence
  Description of Artificial Sequence: Synthetic oligonucleotide
  Sense strand starting at position 3713 of SEQ ID NO: 1883991
guguguuuaauuuaggcua

SEQ ID NO: 2231763 - RNA, 19 nt, Artificial Sequence
  Description of Artificial Sequence: Synthetic oligonucleotide
  Antisense strand to SEQ ID NO: 2231762
uagccuaaauuaaacacac

SEQ ID NO: 2231764 - RNA, 19 nt, Artificial Sequence
  Description of Artificial Sequence: Synthetic oligonucleotide
  Sense strand starting at position 3859 of SEQ ID NO: 1883991
gccagauauugauuauauu

SEQ ID NO: 2231765 - RNA, 19 nt, Artificial Sequence
  Description of Artificial Sequence: Synthetic oligonucleotide
  Antisense strand to SEQ ID NO: 2231764
aauauaaucaauaucuggc

SEQ ID NO: 2231766 - RNA, 19 nt, Artificial Sequence
  Description of Artificial Sequence: Synthetic oligonucleotide
  Sense strand starting at position 3971 of SEQ ID NO: 1883991
aggcuuugucaguagagag

SEQ ID NO: 2231767 - RNA, 19 nt, Artificial Sequence
  Description of Artificial Sequence: Synthetic oligonucleotide
  Antisense strand to SEQ ID NO: 2231766
cucucuacugacaaagccu

SEQ ID NO: 2231768 - RNA, 19 nt, Artificial Sequence
  Description of Artificial Sequence: Synthetic oligonucleotide
  Sense strand starting at position 5 of SEQ ID NO: 1883992
augaguugccaguaauuaa

SEQ ID NO: 2231769 - RNA, 19 nt, Artificial Sequence
  Description of Artificial Sequence: Synthetic oligonucleotide
  Antisense strand to SEQ ID NO: 2231768
uuaauuacuggcaacucau

SEQ ID NO: 2231770 - RNA, 19 nt, Artificial Sequence
  Description of Artificial Sequence: Synthetic oligonucleotide
  Sense strand starting at position 118 of SEQ ID NO: 1883992
guuuaaaugaaggguuuga

SEQ ID NO: 2231771 - RNA, 19 nt, Artificial Sequence
  Description of Artificial Sequence: Synthetic oligonucleotide
  Antisense strand to SEQ ID NO: 2231770
ucaaacccuucauuuaaac

SEQ ID NO: 2231772 - RNA, 19 nt, Artificial Sequence
  Description of Artificial Sequence: Synthetic oligonucleotide
  Sense strand starting at position 187 of SEQ ID NO: 1883992
gggcuuccagcucagauau

SEQ ID NO: 2231773 - RNA, 19 nt, Artificial Sequence
  Description of Artificial Sequence: Synthetic oligonucleotide
  Antisense strand to SEQ ID NO: 2231772
auaucugagcuggaagccc

SEQ ID NO: 2231774 - RNA, 19 nt, Artificial Sequence
  Description of Artificial Sequence: Synthetic oligonucleotide
  Sense strand starting at position 292 of SEQ ID NO: 1883992
uccuauugucugcagcaaa

SEQ ID NO: 2231775 - RNA, 19 nt, Artificial Sequence
  Description of Artificial Sequence: Synthetic oligonucleotide
  Antisense strand to SEQ ID NO: 2231774
uuugcugcagacaauagga

SEQ ID NO: 2231776 - RNA, 19 nt, Artificial Sequence
  Description of Artificial Sequence: Synthetic oligonucleotide
  Sense strand starting at position 450 of SEQ ID NO: 1883992
ggaugcucaucucccagau

SEQ ID NO: 2231777 - RNA, 19 nt, Artificial Sequence
  Description of Artificial Sequence: Synthetic oligonucleotide
  Antisense strand to SEQ ID NO: 2231776
aucugggagaugagcaucc

SEQ ID NO: 2231778 - RNA, 19 nt, Artificial Sequence
  Description of Artificial Sequence: Synthetic oligonucleotide
  Sense strand starting at position 557 of SEQ ID NO: 1883992
uggaaaugauuugagagca

SEQ ID NO: 2231779 - RNA, 19 nt, Artificial Sequence
  Description of Artificial Sequence: Synthetic oligonucleotide
  Antisense strand to SEQ ID NO: 2231778
ugcucucaaaucauuucca

SEQ ID NO: 2231780 - RNA, 19 nt, Artificial Sequence
  Description of Artificial Sequence: Synthetic oligonucleotide
  Sense strand starting at position 885 of SEQ ID NO: 1883992
cucccugcucuaggaauga

SEQ ID NO: 2231781 - RNA, 19 nt, Artificial Sequence
  Description of Artificial Sequence: Synthetic oligonucleotide
  Antisense strand to SEQ ID NO: 2231780
ucauuccuagagcagggag

SEQ ID NO: 2231782 - RNA, 19 nt, Artificial Sequence
  Description of Artificial Sequence: Synthetic oligonucleotide
  Sense strand starting at position 1048 of SEQ ID NO: 1883992
ggucaaaucaaaggucaag

SEQ ID NO: 2231783 - RNA, 19 nt, Artificial Sequence
  Description of Artificial Sequence: Synthetic oligonucleotide
  Antisense strand to SEQ ID NO: 2231782
cuugaccuuugauuugacc

SEQ ID NO: 2231784 - RNA, 19 nt, Artificial Sequence
  Description of Artificial Sequence: Synthetic oligonucleotide
  Sense strand starting at position 1060 of SEQ ID NO: 1883992
ggucaagaggcacaucauu

SEQ ID NO: 2231785 - RNA, 19 nt, Artificial Sequence
  Description of Artificial Sequence: Synthetic oligonucleotide
  Antisense strand to SEQ ID NO: 2231784
aaugaugugccucuugacc

SEQ ID NO: 2231786 - RNA, 19 nt, Artificial Sequence
  Description of Artificial Sequence: Synthetic oligonucleotide
  Sense strand starting at position 1184 of SEQ ID NO: 1883992
uaguuugccgaauaaauuc

SEQ ID NO: 2231787 - RNA, 19 nt, Artificial Sequence
  Description of Artificial Sequence: Synthetic oligonucleotide
  Antisense strand to SEQ ID NO: 2231786
gaauuuauucggcaaacua

SEQ ID NO: 2231788 - RNA, 19 nt, Artificial Sequence
  Description of Artificial Sequence: Synthetic oligonucleotide
  Sense strand starting at position 1267 of SEQ ID NO: 1883992
uauggaagcuuauuauguu

SEQ ID NO: 2231789 - RNA, 19 nt, Artificial Sequence
  Description of Artificial Sequence: Synthetic oligonucleotide
  Antisense strand to SEQ ID NO: 2231788
aacauaauaagcuuccaua

SEQ ID NO: 2231790 - RNA, 19 nt, Artificial Sequence
  Description of Artificial Sequence: Synthetic oligonucleotide
  Sense strand starting at position 1696 of SEQ ID NO: 1883992
ugcacauaccuguggaacu

SEQ ID NO: 2231791 - RNA, 19 nt, Artificial Sequence
  Description of Artificial Sequence: Synthetic oligonucleotide
  Antisense strand to SEQ ID NO: 2231790
aguuccacagguaugugca

SEQ ID NO: 2231792 - RNA, 19 nt, Artificial Sequence
  Description of Artificial Sequence: Synthetic oligonucleotide
  Sense strand starting at position 2047 of SEQ ID NO: 1883992
cccucaugauucucuggau

SEQ ID NO: 2231793 - RNA, 19 nt, Artificial Sequence
  Description of Artificial Sequence: Synthetic oligonucleotide
  Antisense strand to SEQ ID NO: 2231792
auccagagaaucaugaggg

SEQ ID NO: 2231794 - RNA, 19 nt, Artificial Sequence
  Description of Artificial Sequence: Synthetic oligonucleotide
  Sense strand starting at position 2096 of SEQ ID NO: 1883992
gccacuuaaugaccucaga

SEQ ID NO: 2231795 - RNA, 19 nt, Artificial Sequence
  Description of Artificial Sequence: Synthetic oligonucleotide
  Antisense strand to SEQ ID NO: 2231794
ucugaggucauuaaguggc

SEQ ID NO: 2231796 - RNA, 19 nt, Artificial Sequence
  Description of Artificial Sequence: Synthetic oligonucleotide
  Sense strand starting at position 2198 of SEQ ID NO: 1883992
ucuaguuauuugguuucuu

SEQ ID NO: 2231797 - RNA, 19 nt, Artificial Sequence
  Description of Artificial Sequence: Synthetic oligonucleotide
  Antisense strand to SEQ ID NO: 2231796
aagaaaccaaauaacuaga

SEQ ID NO: 2231798 - RNA, 19 nt, Artificial Sequence
  Description of Artificial Sequence: Synthetic oligonucleotide
  Sense strand starting at position 2199 of SEQ ID NO: 1883992
cuaguuauuugguuucuuu

SEQ ID NO: 2231799 - RNA, 19 nt, Artificial Sequence
  Description of Artificial Sequence: Synthetic oligonucleotide
  Antisense strand to SEQ ID NO: 2231798
aaagaaaccaaauaacuag

SEQ ID NO: 2231800 - RNA, 19 nt, Artificial Sequence
  Description of Artificial Sequence: Synthetic oligonucleotide
  Sense strand starting at position 2289 of SEQ ID NO: 1883992
cugugauauucuuccgaac

SEQ ID NO: 2231801 - RNA, 19 nt, Artificial Sequence
  Description of Artificial Sequence: Synthetic oligonucleotide
  Antisense strand to SEQ ID NO: 2231800
guucggaagaauaucacag

SEQ ID NO: 2231802 - RNA, 19 nt, Artificial Sequence
  Description of Artificial Sequence: Synthetic oligonucleotide
  Sense strand starting at position 2295 of SEQ ID NO: 1883992
uauucuuccgaacaguguu

SEQ ID NO: 2231803 - RNA, 19 nt, Artificial Sequence
  Description of Artificial Sequence: Synthetic oligonucleotide
  Antisense strand to SEQ ID NO: 2231802
aacacuguucggaagaaua

SEQ ID NO: 2231804 - RNA, 19 nt, Artificial Sequence
  Description of Artificial Sequence: Synthetic oligonucleotide
  Sense strand starting at position 2395 of SEQ ID NO: 1883992
cuguacuaauggcuggaaa

SEQ ID NO: 2231805 - RNA, 19 nt, Artificial Sequence
  Description of Artificial Sequence: Synthetic oligonucleotide
  Antisense strand to SEQ ID NO: 2231804
uuuccagccauuaguacag

SEQ ID NO: 2231806 - RNA, 19 nt, Artificial Sequence
  Description of Artificial Sequence: Synthetic oligonucleotide
  Sense strand starting at position 2486 of SEQ ID NO: 1883992
ggcuaauauguauacaugu

SEQ ID NO: 2231807 - RNA, 19 nt, Artificial Sequence
  Description of Artificial Sequence: Synthetic oligonucleotide
  Antisense strand to SEQ ID NO: 2231806
acauguauacauauuagcc

SEQ ID NO: 2231808 - RNA, 19 nt, Artificial Sequence
  Description of Artificial Sequence: Synthetic oligonucleotide
  Sense strand starting at position 2536 of SEQ ID NO: 1883992
aaggauaauucuguuguuu

SEQ ID NO: 2231809 - RNA, 19 nt, Artificial Sequence
  Description of Artificial Sequence: Synthetic oligonucleotide
  Antisense strand to SEQ ID NO: 2231808
aaacaacagaauuauccuu

SEQ ID NO: 2231810 - RNA, 19 nt, Artificial Sequence
  Description of Artificial Sequence: Synthetic oligonucleotide
  Sense strand starting at position 2597 of SEQ ID NO: 1883992
uuugucaugcuguauuaac

SEQ ID NO: 2231811 - RNA, 19 nt, Artificial Sequence
  Description of Artificial Sequence: Synthetic oligonucleotide
  Antisense strand to SEQ ID NO: 2231810
guuaauacagcaugacaaa

SEQ ID NO: 2231812 - RNA, 19 nt, Artificial Sequence
  Description of Artificial Sequence: Synthetic oligonucleotide
  Sense strand starting at position 2606 of SEQ ID NO: 1883992
cuguauuaacugugaaagu

SEQ ID NO: 2231813 - RNA, 19 nt, Artificial Sequence
  Description of Artificial Sequence: Synthetic oligonucleotide
  Antisense strand to SEQ ID NO: 2231812
acuuucacaguuaauacag

SEQ ID NO: 2231814 - RNA, 19 nt, Artificial Sequence
  Description of Artificial Sequence: Synthetic oligonucleotide
  Sense strand starting at position 2678 of SEQ ID NO: 1883992
cuauaauuauaauccggau

SEQ ID NO: 2231815 - RNA, 19 nt, Artificial Sequence
  Description of Artificial Sequence: Synthetic oligonucleotide
  Antisense strand to SEQ ID NO: 2231814
auccggauuauaauuauag

SEQ ID NO: 2231816 - RNA, 19 nt, Artificial Sequence
  Description of Artificial Sequence: Synthetic oligonucleotide
  Sense strand starting at position 2743 of SEQ ID NO: 1883992
gcaggaucucccugaguug

SEQ ID NO: 2231817 - RNA, 19 nt, Artificial Sequence
  Description of Artificial Sequence: Synthetic oligonucleotide
  Antisense strand to SEQ ID NO: 2231816
caacucagggagauccugc

SEQ ID NO: 2231818 - RNA, 19 nt, Artificial Sequence
  Description of Artificial Sequence: Synthetic oligonucleotide
  Sense strand starting at position 2841 of SEQ ID NO: 1883992
cuugcaaacccucgagaau

SEQ ID NO: 2231819 - RNA, 19 nt, Artificial Sequence
  Description of Artificial Sequence: Synthetic oligonucleotide
  Antisense strand to SEQ ID NO: 2231818
auucucgaggguuugcaag

SEQ ID NO: 2231820 - RNA, 19 nt, Artificial Sequence
  Description of Artificial Sequence: Synthetic oligonucleotide
  Sense strand starting at position 2842 of SEQ ID NO: 1883992
uugcaaacccucgagaaug

SEQ ID NO: 2231821 - RNA, 19 nt, Artificial Sequence
  Description of Artificial Sequence: Synthetic oligonucleotide
  Antisense strand to SEQ ID NO: 2231820
cauucucgaggguuugcaa

SEQ ID NO: 2231822 - RNA, 19 nt, Artificial Sequence
  Description of Artificial Sequence: Synthetic oligonucleotide
  Sense strand starting at position 2852 of SEQ ID NO: 1883992
ucgagaaugucaucaucua

SEQ ID NO: 2231823 - RNA, 19 nt, Artificial Sequence
  Description of Artificial Sequence: Synthetic oligonucleotide
  Antisense strand to SEQ ID NO: 2231822
uagaugaugacauucucga

SEQ ID NO: 2231824 - RNA, 19 nt, Artificial Sequence
  Description of Artificial Sequence: Synthetic oligonucleotide
  Sense strand starting at position 2853 of SEQ ID NO: 1883992
cgagaaugucaucaucuac

SEQ ID NO: 2231825 - RNA, 19 nt, Artificial Sequence
  Description of Artificial Sequence: Synthetic oligonucleotide
  Antisense strand to SEQ ID NO: 2231824
guagaugaugacauucucg

SEQ ID NO: 2231826 - RNA, 19 nt, Artificial Sequence
  Description of Artificial Sequence: Synthetic oligonucleotide
  Sense strand starting at position 2924 of SEQ ID NO: 1883992
cauggaauucugugaguuu

SEQ ID NO: 2231827 - RNA, 19 nt, Artificial Sequence
  Description of Artificial Sequence: Synthetic oligonucleotide
  Antisense strand to SEQ ID NO: 2231826
aaacucacagaauuccaug

SEQ ID NO: 2231828 - RNA, 19 nt, Artificial Sequence
  Description of Artificial Sequence: Synthetic oligonucleotide
  Sense strand starting at position 2982 of SEQ ID NO: 1883992
uggugagaugcagaugguu

SEQ ID NO: 2231829 - RNA, 19 nt, Artificial Sequence
  Description of Artificial Sequence: Synthetic oligonucleotide
  Antisense strand to SEQ ID NO: 2231828
aaccaucugcaucucacca

SEQ ID NO: 2231830 - RNA, 19 nt, Artificial Sequence
  Description of Artificial Sequence: Synthetic oligonucleotide
  Sense strand starting at position 3216 of SEQ ID NO: 1883992
gcacauuugcucuggagug

SEQ ID NO: 2231831 - RNA, 19 nt, Artificial Sequence
  Description of Artificial Sequence: Synthetic oligonucleotide
  Antisense strand to SEQ ID NO: 2231830
cacuccagagcaaaugugc

SEQ ID NO: 2231832 - RNA, 19 nt, Artificial Sequence
  Description of Artificial Sequence: Synthetic oligonucleotide
  Sense strand starting at position 3241 of SEQ ID NO: 1883992
ccagaacugcacgauguau

SEQ ID NO: 2231833 - RNA, 19 nt, Artificial Sequence
  Description of Artificial Sequence: Synthetic oligonucleotide
  Antisense strand to SEQ ID NO: 2231832
auacaucgugcaguucugg

SEQ ID NO: 2231834 - RNA, 19 nt, Artificial Sequence
  Description of Artificial Sequence: Synthetic oligonucleotide
  Sense strand starting at position 3249 of SEQ ID NO: 1883992
gcacgauguauggaacuga

SEQ ID NO: 2231835 - RNA, 19 nt, Artificial Sequence
  Description of Artificial Sequence: Synthetic oligonucleotide
  Antisense strand to SEQ ID NO: 2231834
ucaguuccauacaucgugc

SEQ ID NO: 2231836 - RNA, 19 nt, Artificial Sequence
  Description of Artificial Sequence: Synthetic oligonucleotide
  Sense strand starting at position 3363 of SEQ ID NO: 1883992
ugacuuguagagcaucaaa

SEQ ID NO: 2231837 - RNA, 19 nt, Artificial Sequence
  Description of Artificial Sequence: Synthetic oligonucleotide
  Antisense strand to SEQ ID NO: 2231836
uuugaugcucuacaaguca

SEQ ID NO: 2231838 - RNA, 19 nt, Artificial Sequence
  Description of Artificial Sequence: Synthetic oligonucleotide
  Sense strand starting at position 3523 of SEQ ID NO: 1883992
caaagaaucuguguccaga

SEQ ID NO: 2231839 - RNA, 19 nt, Artificial Sequence
  Description of Artificial Sequence: Synthetic oligonucleotide
  Antisense strand to SEQ ID NO: 2231838
ucuggacacagauucuuug

SEQ ID NO: 2231840 - RNA, 19 nt, Artificial Sequence
  Description of Artificial Sequence: Synthetic oligonucleotide
  Sense strand starting at position 3525 of SEQ ID NO: 1883992
aagaaucuguguccagaag

SEQ ID NO: 2231841 - RNA, 19 nt, Artificial Sequence
  Description of Artificial Sequence: Synthetic oligonucleotide
  Antisense strand to SEQ ID NO: 2231840
cuucuggacacagauucuu

SEQ ID NO: 2231842 - RNA, 19 nt, Artificial Sequence
  Description of Artificial Sequence: Synthetic oligonucleotide
  Sense strand starting at position 3540 of SEQ ID NO: 1883992
gaagcucuugugcauggau

SEQ ID NO: 2231843 - RNA, 19 nt, Artificial Sequence
  Description of Artificial Sequence: Synthetic oligonucleotide
  Antisense strand to SEQ ID NO: 2231842
auccaugcacaagagcuuc

SEQ ID NO: 2231844 - RNA, 19 nt, Artificial Sequence
  Description of Artificial Sequence: Synthetic oligonucleotide
  Sense strand starting at position 3895 of SEQ ID NO: 1883992
cagcauccagcuugagaca

SEQ ID NO: 2231845 - RNA, 19 nt, Artificial Sequence
  Description of Artificial Sequence: Synthetic oligonucleotide
  Antisense strand to SEQ ID NO: 2231844
ugucucaagcuggaugcug

SEQ ID NO: 2231846 - RNA, 19 nt, Artificial Sequence
  Description of Artificial Sequence: Synthetic oligonucleotide
  Sense strand starting at position 3904 of SEQ ID NO: 1883992
gcuugagacacaugugacu

SEQ ID NO: 2231847 - RNA, 19 nt, Artificial Sequence
  Description of Artificial Sequence: Synthetic oligonucleotide
  Antisense strand to SEQ ID NO: 2231846
agucacaugugucucaagc

SEQ ID NO: 2231848 - RNA, 19 nt, Artificial Sequence
  Description of Artificial Sequence: Synthetic oligonucleotide
  Sense strand starting at position 212 of SEQ ID NO: 1883993
ugagcccugcuggaaauau

SEQ ID NO: 2231849 - RNA, 19 nt, Artificial Sequence
  Description of Artificial Sequence: Synthetic oligonucleotide
  Antisense strand to SEQ ID NO: 2231848
auauuuccagcagggcuca

SEQ ID NO: 2231850 - RNA, 19 nt, Artificial Sequence
  Description of Artificial Sequence: Synthetic oligonucleotide
  Sense strand starting at position 220 of SEQ ID NO: 1883993
gcuggaaauaugggcuuau

SEQ ID NO: 2231851 - RNA, 19 nt, Artificial Sequence
  Description of Artificial Sequence: Synthetic oligonucleotide
  Antisense strand to SEQ ID NO: 2231850
auaagcccauauuuccagc

SEQ ID NO: 2231852 - RNA, 19 nt, Artificial Sequence
  Description of Artificial Sequence: Synthetic oligonucleotide
  Sense strand starting at position 221 of SEQ ID NO: 1883993
cuggaaauaugggcuuauu

SEQ ID NO: 2231853 - RNA, 19 nt, Artificial Sequence
  Description of Artificial Sequence: Synthetic oligonucleotide
  Antisense strand to SEQ ID NO: 2231852
aauaagcccauauuuccag

SEQ ID NO: 2231854 - RNA, 19 nt, Artificial Sequence
  Description of Artificial Sequence: Synthetic oligonucleotide
  Sense strand starting at position 232 of SEQ ID NO: 1883993
ggcuuauucuaagcaauag

SEQ ID NO: 2231855 - RNA, 19 nt, Artificial Sequence
  Description of Artificial Sequence: Synthetic oligonucleotide
  Antisense strand to SEQ ID NO: 2231854
cuauugcuuagaauaagcc

SEQ ID NO: 2231856 - RNA, 19 nt, Artificial Sequence
  Description of Artificial Sequence: Synthetic oligonucleotide
  Sense strand starting at position 310 of SEQ ID NO: 1883993
auuauuggaucuguuacuu

SEQ ID NO: 2231857 - RNA, 19 nt, Artificial Sequence
  Description of Artificial Sequence: Synthetic oligonucleotide
  Antisense strand to SEQ ID NO: 2231856
aaguaacagauccaauaau

SEQ ID NO: 2231858 - RNA, 19 nt, Artificial Sequence
  Description of Artificial Sequence: Synthetic oligonucleotide
  Sense strand starting at position 322 of SEQ ID NO: 1883993
guuacuuuauuugugcauu

SEQ ID NO: 2231859 - RNA, 19 nt, Artificial Sequence
  Description of Artificial Sequence: Synthetic oligonucleotide
  Antisense strand to SEQ ID NO: 2231858
aaugcacaaauaaaguaac

SEQ ID NO: 2231860 - RNA, 19 nt, Artificial Sequence
  Description of Artificial Sequence: Synthetic oligonucleotide
  Sense strand starting at position 325 of SEQ ID NO: 1883993
acuuuauuugugcauugca

SEQ ID NO: 2231861 - RNA, 19 nt, Artificial Sequence
  Description of Artificial Sequence: Synthetic oligonucleotide
  Antisense strand to SEQ ID NO: 2231860
ugcaaugcacaaauaaagu

SEQ ID NO: 2231862 - RNA, 19 nt, Artificial Sequence
  Description of Artificial Sequence: Synthetic oligonucleotide
  Sense strand starting at position 328 of SEQ ID NO: 1883993
uuauuugugcauugcauua

SEQ ID NO: 2231863 - RNA, 19 nt, Artificial Sequence
  Description of Artificial Sequence: Synthetic oligonucleotide
  Antisense strand to SEQ ID NO: 2231862
uaaugcaaugcacaaauaa

SEQ ID NO: 2231864 - RNA, 19 nt, Artificial Sequence
  Description of Artificial Sequence: Synthetic oligonucleotide
  Sense strand starting at position 644 of SEQ ID NO: 1883993
acugauaggcucgaaguaa

SEQ ID NO: 2231865 - RNA, 19 nt, Artificial Sequence
  Description of Artificial Sequence: Synthetic oligonucleotide
  Antisense strand to SEQ ID NO: 2231864
uuacuucgagccuaucagu

SEQ ID NO: 2231866 - RNA, 19 nt, Artificial Sequence
  Description of Artificial Sequence: Synthetic oligonucleotide
  Sense strand starting at position 708 of SEQ ID NO: 1883993
aguuguauuucugcuggaa

SEQ ID NO: 2231867 - RNA, 19 nt, Artificial Sequence
  Description of Artificial Sequence: Synthetic oligonucleotide
  Antisense strand to SEQ ID NO: 2231866
uuccagcagaaauacaacu

SEQ ID NO: 2231868 - RNA, 19 nt, Artificial Sequence
  Description of Artificial Sequence: Synthetic oligonucleotide
  Sense strand starting at position 749 of SEQ ID NO: 1883993
ugaauaauacagugcuaua

SEQ ID NO: 2231869 - RNA, 19 nt, Artificial Sequence
  Description of Artificial Sequence: Synthetic oligonucleotide
  Antisense strand to SEQ ID NO: 2231868
uauagcacuguauuauuca

SEQ ID NO: 2231870 - RNA, 19 nt, Artificial Sequence
  Description of Artificial Sequence: Synthetic oligonucleotide
  Sense strand starting at position 917 of SEQ ID NO: 1883993
ucugaaauucucgagacuc

SEQ ID NO: 2231871 - RNA, 19 nt, Artificial Sequence
  Description of Artificial Sequence: Synthetic oligonucleotide
  Antisense strand to SEQ ID NO: 2231870
gagucucgagaauuucaga

SEQ ID NO: 2231872 - RNA, 19 nt, Artificial Sequence
  Description of Artificial Sequence: Synthetic oligonucleotide
  Sense strand starting at position 1092 of SEQ ID NO: 1883993
uuggaucugcugcaacaau

SEQ ID NO: 2231873 - RNA, 19 nt, Artificial Sequence
  Description of Artificial Sequence: Synthetic oligonucleotide
  Antisense strand to SEQ ID NO: 2231872
auuguugcagcagauccaa

SEQ ID NO: 2231874 - RNA, 19 nt, Artificial Sequence
  Description of Artificial Sequence: Synthetic oligonucleotide
  Sense strand starting at position 1227 of SEQ ID NO: 1883993
aggaaaugguagcuuguaa

SEQ ID NO: 2231875 - RNA, 19 nt, Artificial Sequence
  Description of Artificial Sequence: Synthetic oligonucleotide
  Antisense strand to SEQ ID NO: 2231874
uuacaagcuaccauuuccu

SEQ ID NO: 2231876 - RNA, 19 nt, Artificial Sequence
  Description of Artificial Sequence: Synthetic oligonucleotide
  Sense strand starting at position 1388 of SEQ ID NO: 1883993
gagucauaggcagaugucu

SEQ ID NO: 2231877 - RNA, 19 nt, Artificial Sequence
  Description of Artificial Sequence: Synthetic oligonucleotide
  Antisense strand to SEQ ID NO: 2231876
agacaucugccuaugacuc

SEQ ID NO: 2231878 - RNA, 19 nt, Artificial Sequence
  Description of Artificial Sequence: Synthetic oligonucleotide
  Sense strand starting at position 1401 of SEQ ID NO: 1883993
augucucuauugguaugaa

SEQ ID NO: 2231879 - RNA, 19 nt, Artificial Sequence
  Description of Artificial Sequence: Synthetic oligonucleotide
  Antisense strand to SEQ ID NO: 2231878
uucauaccaauagagacau

SEQ ID NO: 2231880 - RNA, 19 nt, Artificial Sequence
  Description of Artificial Sequence: Synthetic oligonucleotide
  Sense strand starting at position 1413 of SEQ ID NO: 1883993
guaugaaaugcaugggaga

SEQ ID NO: 2231881 - RNA, 19 nt, Artificial Sequence
  Description of Artificial Sequence: Synthetic oligonucleotide
  Antisense strand to SEQ ID NO: 2231880
ucucccaugcauuucauac

SEQ ID NO: 2231882 - RNA, 19 nt, Artificial Sequence
  Description of Artificial Sequence: Synthetic oligonucleotide
  Sense strand starting at position 1439 of SEQ ID NO: 1883993
gaccuuauuuguguuuguu

SEQ ID NO: 2231883 - RNA, 19 nt, Artificial Sequence
  Description of Artificial Sequence: Synthetic oligonucleotide
  Antisense strand to SEQ ID NO: 2231882
aacaaacacaaauaagguc

SEQ ID NO: 2231884 - RNA, 19 nt, Artificial Sequence
  Description of Artificial Sequence: Synthetic oligonucleotide
  Sense strand starting at position 1441 of SEQ ID NO: 1883993
ccuuauuuguguuuguuua

SEQ ID NO: 2231885 - RNA, 19 nt, Artificial Sequence
  Description of Artificial Sequence: Synthetic oligonucleotide
  Antisense strand to SEQ ID NO: 2231884
uaaacaaacacaaauaagg

SEQ ID NO: 2231886 - RNA, 19 nt, Artificial Sequence
  Description of Artificial Sequence: Synthetic oligonucleotide
  Sense strand starting at position 1445 of SEQ ID NO: 1883993
auuuguguuuguuuaguag

SEQ ID NO: 2231887 - RNA, 19 nt, Artificial Sequence
  Description of Artificial Sequence: Synthetic oligonucleotide
  Antisense strand to SEQ ID NO: 2231886
cuacuaaacaaacacaaau

SEQ ID NO: 2231888 - RNA, 19 nt, Artificial Sequence
  Description of Artificial Sequence: Synthetic oligonucleotide
  Sense strand starting at position 1643 of SEQ ID NO: 1883993
gaaggugauuaggcucuga

SEQ ID NO: 2231889 - RNA, 19 nt, Artificial Sequence
  Description of Artificial Sequence: Synthetic oligonucleotide
  Antisense strand to SEQ ID NO: 2231888
ucagagccuaaucaccuuc

SEQ ID NO: 2231890 - RNA, 19 nt, Artificial Sequence
  Description of Artificial Sequence: Synthetic oligonucleotide
  Sense strand starting at position 1779 of SEQ ID NO: 1883993
guucuuaccagacacggaa

SEQ ID NO: 2231891 - RNA, 19 nt, Artificial Sequence
  Description of Artificial Sequence: Synthetic oligonucleotide
  Antisense strand to SEQ ID NO: 2231890
uuccgugucugguaagaac

SEQ ID NO: 2231892 - RNA, 19 nt, Artificial Sequence
  Description of Artificial Sequence: Synthetic oligonucleotide
  Sense strand starting at position 2104 of SEQ ID NO: 1883993
cagaaaguccggcaagcua

SEQ ID NO: 2231893 - RNA, 19 nt, Artificial Sequence
  Description of Artificial Sequence: Synthetic oligonucleotide
  Antisense strand to SEQ ID NO: 2231892
uagcuugccggacuuucug

SEQ ID NO: 2231894 - RNA, 19 nt, Artificial Sequence
  Description of Artificial Sequence: Synthetic oligonucleotide
  Sense strand starting at position 2191 of SEQ ID NO: 1883993
agauguucugaguaaagcu

SEQ ID NO: 2231895 - RNA, 19 nt, Artificial Sequence
  Description of Artificial Sequence: Synthetic oligonucleotide
  Antisense strand to SEQ ID NO: 2231894
agcuuuacucagaacaucu

SEQ ID NO: 2231896 - RNA, 19 nt, Artificial Sequence
  Description of Artificial Sequence: Synthetic oligonucleotide
  Sense strand starting at position 2210 of SEQ ID NO: 1883993
guccuucguaaauaaagag

SEQ ID NO: 2231897 - RNA, 19 nt, Artificial Sequence
  Description of Artificial Sequence: Synthetic oligonucleotide
  Antisense strand to SEQ ID NO: 2231896
cucuuuauuuacgaaggac

SEQ ID NO: 2231898 - RNA, 19 nt, Artificial Sequence
  Description of Artificial Sequence: Synthetic oligonucleotide
  Sense strand starting at position 2249 of SEQ ID NO: 1883993
aguccuguuuauuugaagu

SEQ ID NO: 2231899 - RNA, 19 nt, Artificial Sequence
  Description of Artificial Sequence: Synthetic oligonucleotide
  Antisense strand to SEQ ID NO: 2231898
acuucaaauaaacaggacu

SEQ ID NO: 2231900 - RNA, 19 nt, Artificial Sequence
  Description of Artificial Sequence: Synthetic oligonucleotide
  Sense strand starting at position 2306 of SEQ ID NO: 1883993
acucuaaaccagugagcaa

SEQ ID NO: 2231901 - RNA, 19 nt, Artificial Sequence
  Description of Artificial Sequence: Synthetic oligonucleotide
  Antisense strand to SEQ ID NO: 2231900
uugcucacugguuuagagu

SEQ ID NO: 2231902 - RNA, 19 nt, Artificial Sequence
  Description of Artificial Sequence: Synthetic oligonucleotide
  Sense strand starting at position 2418 of SEQ ID NO: 1883993
cggcauuuccaguaagguc

SEQ ID NO: 2231903 - RNA, 19 nt, Artificial Sequence
  Description of Artificial Sequence: Synthetic oligonucleotide
  Antisense strand to SEQ ID NO: 2231902
gaccuuacuggaaaugccg

SEQ ID NO: 2231904 - RNA, 19 nt, Artificial Sequence
  Description of Artificial Sequence: Synthetic oligonucleotide
  Sense strand starting at position 2425 of SEQ ID NO: 1883993
uccaguaagguccagucau

SEQ ID NO: 2231905 - RNA, 19 nt, Artificial Sequence
  Description of Artificial Sequence: Synthetic oligonucleotide
  Antisense strand to SEQ ID NO: 2231904
augacuggaccuuacugga

SEQ ID NO: 2231906 - RNA, 19 nt, Artificial Sequence
  Description of Artificial Sequence: Synthetic oligonucleotide
  Sense strand starting at position 3325 of SEQ ID NO: 1883993
gcuggaggugaucacugaa

SEQ ID NO: 2231907 - RNA, 19 nt, Artificial Sequence
  Description of Artificial Sequence: Synthetic oligonucleotide
  Antisense strand to SEQ ID NO: 2231906
uucagugaucaccuccagc

SEQ ID NO: 2231908 - RNA, 19 nt, Artificial Sequence
  Description of Artificial Sequence: Synthetic oligonucleotide
  Sense strand starting at position 3328 of SEQ ID NO: 1883993
ggaggugaucacugaagcu

SEQ ID NO: 2231909 - RNA, 19 nt, Artificial Sequence
  Description of Artificial Sequence: Synthetic oligonucleotide
  Antisense strand to SEQ ID NO: 2231908
agcuucagugaucaccucc

SEQ ID NO: 2231910 - RNA, 19 nt, Artificial Sequence
  Description of Artificial Sequence: Synthetic oligonucleotide
  Sense strand starting at position 3351 of SEQ ID NO: 1883993
gucuauuugcuguguagag

SEQ ID NO: 2231911 - RNA, 19 nt, Artificial Sequence
  Description of Artificial Sequence: Synthetic oligonucleotide
  Antisense strand to SEQ ID NO: 2231910
cucuacacagcaaauagac

SEQ ID NO: 2231912 - RNA, 19 nt, Artificial Sequence
  Description of Artificial Sequence: Synthetic oligonucleotide
  Sense strand starting at position 3352 of SEQ ID NO: 1883993
ucuauuugcuguguagaga

SEQ ID NO: 2231913 - RNA, 19 nt, Artificial Sequence
  Description of Artificial Sequence: Synthetic oligonucleotide
  Antisense strand to SEQ ID NO: 2231912
ucucuacacagcaaauaga

SEQ ID NO: 2231914 - RNA, 19 nt, Artificial Sequence
  Description of Artificial Sequence: Synthetic oligonucleotide
  Sense strand starting at position 3490 of SEQ ID NO: 1883993
ucucuaggucccuggaaua

SEQ ID NO: 2231915 - RNA, 19 nt, Artificial Sequence
  Description of Artificial Sequence: Synthetic oligonucleotide
  Antisense strand to SEQ ID NO: 2231914
uauuccagggaccuagaga

SEQ ID NO: 2231916 - RNA, 19 nt, Artificial Sequence
  Description of Artificial Sequence: Synthetic oligonucleotide
  Sense strand starting at position 3517 of SEQ ID NO: 1883993
uacagagaucauugauggu

SEQ ID NO: 2231917 - RNA, 19 nt, Artificial Sequence
  Description of Artificial Sequence: Synthetic oligonucleotide
  Antisense strand to SEQ ID NO: 2231916
accaucaaugaucucugua

SEQ ID NO: 2231918 - RNA, 19 nt, Artificial Sequence
  Description of Artificial Sequence: Synthetic oligonucleotide
  Sense strand starting at position 3573 of SEQ ID NO: 1883993
uuuccaguauagucuaaca

SEQ ID NO: 2231919 - RNA, 19 nt, Artificial Sequence
  Description of Artificial Sequence: Synthetic oligonucleotide
  Antisense strand to SEQ ID NO: 2231918
uguuagacuauacuggaaa

SEQ ID NO: 2231920 - RNA, 19 nt, Artificial Sequence
  Description of Artificial Sequence: Synthetic oligonucleotide
  Sense strand starting at position 3746 of SEQ ID NO: 1883993
uuaguaauagaaggauugu

SEQ ID NO: 2231921 - RNA, 19 nt, Artificial Sequence
  Description of Artificial Sequence: Synthetic oligonucleotide
  Antisense strand to SEQ ID NO: 2231920
acaauccuucuauuacuaa

SEQ ID NO: 2231922 - RNA, 19 nt, Artificial Sequence
  Description of Artificial Sequence: Synthetic oligonucleotide
  Sense strand starting at position 3788 of SEQ ID NO: 1883993
aaugauguauguucugaug

SEQ ID NO: 2231923 - RNA, 19 nt, Artificial Sequence
  Description of Artificial Sequence: Synthetic oligonucleotide
  Antisense strand to SEQ ID NO: 2231922
caucagaacauacaucauu

SEQ ID NO: 2231924 - RNA, 19 nt, Artificial Sequence
  Description of Artificial Sequence: Synthetic oligonucleotide
  Sense strand starting at position 3794 of SEQ ID NO: 1883993
guauguucugauggaauca

SEQ ID NO: 2231925 - RNA, 19 nt, Artificial Sequence
  Description of Artificial Sequence: Synthetic oligonucleotide
  Antisense strand to SEQ ID NO: 2231924
ugauuccaucagaacauac

SEQ ID NO: 2231926 - RNA, 19 nt, Artificial Sequence
  Description of Artificial Sequence: Synthetic oligonucleotide
  Sense strand starting at position 3967 of SEQ ID NO: 1883993
gcaagaauacaguggauaa

SEQ ID NO: 2231927 - RNA, 19 nt, Artificial Sequence
  Description of Artificial Sequence: Synthetic oligonucleotide
  Antisense strand to SEQ ID NO: 2231926
uuauccacuguauucuugc

SEQ ID NO: 2231928 - RNA, 19 nt, Artificial Sequence
  Description of Artificial Sequence: Synthetic oligonucleotide
  Sense strand starting at position 52 of SEQ ID NO: 1883994
caaaguugugaugauggca

SEQ ID NO: 2231929 - RNA, 19 nt, Artificial Sequence
  Description of Artificial Sequence: Synthetic oligonucleotide
  Antisense strand to SEQ ID NO: 2231928
ugccaucaucacaacuuug

SEQ ID NO: 2231930 - RNA, 19 nt, Artificial Sequence
  Description of Artificial Sequence: Synthetic oligonucleotide
  Sense strand starting at position 326 of SEQ ID NO: 1883994
ugcuuaugagauuguggga

SEQ ID NO: 2231931 - RNA, 19 nt, Artificial Sequence
  Description of Artificial Sequence: Synthetic oligonucleotide
  Antisense strand to SEQ ID NO: 2231930
ucccacaaucucauaagca

SEQ ID NO: 2231932 - RNA, 19 nt, Artificial Sequence
  Description of Artificial Sequence: Synthetic oligonucleotide
  Sense strand starting at position 386 of SEQ ID NO: 1883994
aaggguaggcuuuaguuaa

SEQ ID NO: 2231933 - RNA, 19 nt, Artificial Sequence
  Description of Artificial Sequence: Synthetic oligonucleotide
  Antisense strand to SEQ ID NO: 2231932
uuaacuaaagccuacccuu

SEQ ID NO: 2231934 - RNA, 19 nt, Artificial Sequence
  Description of Artificial Sequence: Synthetic oligonucleotide
  Sense strand starting at position 717 of SEQ ID NO: 1883994
guuccaaagugcuuaagaa

SEQ ID NO: 2231935 - RNA, 19 nt, Artificial Sequence
  Description of Artificial Sequence: Synthetic oligonucleotide
  Antisense strand to SEQ ID NO: 2231934
uucuuaagcacuuuggaac

SEQ ID NO: 2231936 - RNA, 19 nt, Artificial Sequence
  Description of Artificial Sequence: Synthetic oligonucleotide
  Sense strand starting at position 718 of SEQ ID NO: 1883994
uuccaaagugcuuaagaau

SEQ ID NO: 2231937 - RNA, 19 nt, Artificial Sequence
  Description of Artificial Sequence: Synthetic oligonucleotide
  Antisense strand to SEQ ID NO: 2231936
auucuuaagcacuuuggaa

SEQ ID NO: 2231938 - RNA, 19 nt, Artificial Sequence
  Description of Artificial Sequence: Synthetic oligonucleotide
  Sense strand starting at position 814 of SEQ ID NO: 1883994
ccucuuaauuggcugauga

SEQ ID NO: 2231939 - RNA, 19 nt, Artificial Sequence
  Description of Artificial Sequence: Synthetic oligonucleotide
  Antisense strand to SEQ ID NO: 2231938
ucaucagccaauuaagagg

SEQ ID NO: 2231940 - RNA, 19 nt, Artificial Sequence
  Description of Artificial Sequence: Synthetic oligonucleotide
  Sense strand starting at position 815 of SEQ ID NO: 1883994
cucuuaauuggcugaugaa

SEQ ID NO: 2231941 - RNA, 19 nt, Artificial Sequence
  Description of Artificial Sequence: Synthetic oligonucleotide
  Antisense strand to SEQ ID NO: 2231940
uucaucagccaauuaagag

SEQ ID NO: 2231942 - RNA, 19 nt, Artificial Sequence
  Description of Artificial Sequence: Synthetic oligonucleotide
  Sense strand starting at position 816 of SEQ ID NO: 1883994
ucuuaauuggcugaugaac

SEQ ID NO: 2231943 - RNA, 19 nt, Artificial Sequence
  Description of Artificial Sequence: Synthetic oligonucleotide
  Antisense strand to SEQ ID NO: 2231942
guucaucagccaauuaaga

SEQ ID NO: 2231944 - RNA, 19 nt, Artificial Sequence
  Description of Artificial Sequence: Synthetic oligonucleotide
  Sense strand starting at position 1267 of SEQ ID NO: 1883994
agaauugggaguugugagu

SEQ ID NO: 2231945 - RNA, 19 nt, Artificial Sequence
  Description of Artificial Sequence: Synthetic oligonucleotide
  Antisense strand to SEQ ID NO: 2231944
acucacaacucccaauucu

SEQ ID NO: 2231946 - RNA, 19 nt, Artificial Sequence
  Description of Artificial Sequence: Synthetic oligonucleotide
  Sense strand starting at position 1392 of SEQ ID NO: 1883994
acagaucgauuggacauuu

SEQ ID NO: 2231947 - RNA, 19 nt, Artificial Sequence
  Description of Artificial Sequence: Synthetic oligonucleotide
  Antisense strand to SEQ ID NO: 2231946
aaauguccaaucgaucugu

SEQ ID NO: 2231948 - RNA, 19 nt, Artificial Sequence
  Description of Artificial Sequence: Synthetic oligonucleotide
  Sense strand starting at position 1405 of SEQ ID NO: 1883994
acauuuauuugagguagug

SEQ ID NO: 2231949 - RNA, 19 nt, Artificial Sequence
  Description of Artificial Sequence: Synthetic oligonucleotide
  Antisense strand to SEQ ID NO: 2231948
cacuaccucaaauaaaugu

SEQ ID NO: 2231950 - RNA, 19 nt, Artificial Sequence
  Description of Artificial Sequence: Synthetic oligonucleotide
  Sense strand starting at position 1414 of SEQ ID NO: 1883994
ugagguagugcauaauaau

SEQ ID NO: 2231951 - RNA, 19 nt, Artificial Sequence
  Description of Artificial Sequence: Synthetic oligonucleotide
  Antisense strand to SEQ ID NO: 2231950
auuauuaugcacuaccuca

SEQ ID NO: 2231952 - RNA, 19 nt, Artificial Sequence
  Description of Artificial Sequence: Synthetic oligonucleotide
  Sense strand starting at position 1538 of SEQ ID NO: 1883994
gugauauuggucgggauca

SEQ ID NO: 2231953 - RNA, 19 nt, Artificial Sequence
  Description of Artificial Sequence: Synthetic oligonucleotide
  Antisense strand to SEQ ID NO: 2231952
ugaucccgaccaauaucac

SEQ ID NO: 2231954 - RNA, 19 nt, Artificial Sequence
  Description of Artificial Sequence: Synthetic oligonucleotide
  Sense strand starting at position 1540 of SEQ ID NO: 1883994
gauauuggucgggaucaca

SEQ ID NO: 2231955 - RNA, 19 nt, Artificial Sequence
  Description of Artificial Sequence: Synthetic oligonucleotide
  Antisense strand to SEQ ID NO: 2231954
ugugaucccgaccaauauc

SEQ ID NO: 2231956 - RNA, 19 nt, Artificial Sequence
  Description of Artificial Sequence: Synthetic oligonucleotide
  Sense strand starting at position 1578 of SEQ ID NO: 1883994
ucagaaugguaggucaguu

SEQ ID NO: 2231957 - RNA, 19 nt, Artificial Sequence
  Description of Artificial Sequence: Synthetic oligonucleotide
  Antisense strand to SEQ ID NO: 2231956
aacugaccuaccauucuga

SEQ ID NO: 2231958 - RNA, 19 nt, Artificial Sequence
  Description of Artificial Sequence: Synthetic oligonucleotide
  Sense strand starting at position 1582 of SEQ ID NO: 1883994
aaugguaggucaguuauau

SEQ ID NO: 2231959 - RNA, 19 nt, Artificial Sequence
  Description of Artificial Sequence: Synthetic oligonucleotide
  Antisense strand to SEQ ID NO: 2231958
auauaacugaccuaccauu

SEQ ID NO: 2231960 - RNA, 19 nt, Artificial Sequence
  Description of Artificial Sequence: Synthetic oligonucleotide
  Sense strand starting at position 1630 of SEQ ID NO: 1883994
agcguaguuccagaaagua

SEQ ID NO: 2231961 - RNA, 19 nt, Artificial Sequence
  Description of Artificial Sequence: Synthetic oligonucleotide
  Antisense strand to SEQ ID NO: 2231960
uacuuucuggaacuacgcu

SEQ ID NO: 2231962 - RNA, 19 nt, Artificial Sequence
  Description of Artificial Sequence: Synthetic oligonucleotide
  Sense strand starting at position 1716 of SEQ ID NO: 1883994
aggagaaaucugcagcuca

SEQ ID NO: 2231963 - RNA, 19 nt, Artificial Sequence
  Description of Artificial Sequence: Synthetic oligonucleotide
  Antisense strand to SEQ ID NO: 2231962
ugagcugcagauuucuccu

SEQ ID NO: 2231964 - RNA, 19 nt, Artificial Sequence
  Description of Artificial Sequence: Synthetic oligonucleotide
  Sense strand starting at position 1926 of SEQ ID NO: 1883994
cugguuaaauuagcuagaa

SEQ ID NO: 2231965 - RNA, 19 nt, Artificial Sequence
  Description of Artificial Sequence: Synthetic oligonucleotide
  Antisense strand to SEQ ID NO: 2231964
uucuagcuaauuuaaccag

SEQ ID NO: 2231966 - RNA, 19 nt, Artificial Sequence
  Description of Artificial Sequence: Synthetic oligonucleotide
  Sense strand starting at position 2356 of SEQ ID NO: 1883994
gcgagugguauugaaugaa

SEQ ID NO: 2231967 - RNA, 19 nt, Artificial Sequence
  Description of Artificial Sequence: Synthetic oligonucleotide
  Antisense strand to SEQ ID NO: 2231966
uucauucaauaccacucgc

SEQ ID NO: 2231968 - RNA, 19 nt, Artificial Sequence
  Description of Artificial Sequence: Synthetic oligonucleotide
  Sense strand starting at position 2359 of SEQ ID NO: 1883994
agugguauugaaugaagcu

SEQ ID NO: 2231969 - RNA, 19 nt, Artificial Sequence
  Description of Artificial Sequence: Synthetic oligonucleotide
  Antisense strand to SEQ ID NO: 2231968
agcuucauucaauaccacu

SEQ ID NO: 2231970 - RNA, 19 nt, Artificial Sequence
  Description of Artificial Sequence: Synthetic oligonucleotide
  Sense strand starting at position 2411 of SEQ ID NO: 1883994
ccaggagugaguugacuag

SEQ ID NO: 2231971 - RNA, 19 nt, Artificial Sequence
  Description of Artificial Sequence: Synthetic oligonucleotide
  Antisense strand to SEQ ID NO: 2231970
cuagucaacucacuccugg

SEQ ID NO: 2231972 - RNA, 19 nt, Artificial Sequence
  Description of Artificial Sequence: Synthetic oligonucleotide
  Sense strand starting at position 2417 of SEQ ID NO: 1883994
gugaguugacuagacaggu

SEQ ID NO: 2231973 - RNA, 19 nt, Artificial Sequence
  Description of Artificial Sequence: Synthetic oligonucleotide
  Antisense strand to SEQ ID NO: 2231972
accugucuagucaacucac

SEQ ID NO: 2231974 - RNA, 19 nt, Artificial Sequence
  Description of Artificial Sequence: Synthetic oligonucleotide
  Sense strand starting at position 2425 of SEQ ID NO: 1883994
acuagacagguguguugau

SEQ ID NO: 2231975 - RNA, 19 nt, Artificial Sequence
  Description of Artificial Sequence: Synthetic oligonucleotide
  Antisense strand to SEQ ID NO: 2231974
aucaacacaccugucuagu

SEQ ID NO: 2231976 - RNA, 19 nt, Artificial Sequence
  Description of Artificial Sequence: Synthetic oligonucleotide
  Sense strand starting at position 2494 of SEQ ID NO: 1883994
gcuuauuacuuaucgacag

SEQ ID NO: 2231977 - RNA, 19 nt, Artificial Sequence
  Description of Artificial Sequence: Synthetic oligonucleotide
  Antisense strand to SEQ ID NO: 2231976
cugucgauaaguaauaagc

SEQ ID NO: 2231978 - RNA, 19 nt, Artificial Sequence
  Description of Artificial Sequence: Synthetic oligonucleotide
  Sense strand starting at position 2546 of SEQ ID NO: 1883994
gugaguggucugcugcuca

SEQ ID NO: 2231979 - RNA, 19 nt, Artificial Sequence
  Description of Artificial Sequence: Synthetic oligonucleotide
  Antisense strand to SEQ ID NO: 2231978
ugagcagcagaccacucac

SEQ ID NO: 2231980 - RNA, 19 nt, Artificial Sequence
  Description of Artificial Sequence: Synthetic oligonucleotide
  Sense strand starting at position 2735 of SEQ ID NO: 1883994
acagaauucgucuaagguu

SEQ ID NO: 2231981 - RNA, 19 nt, Artificial Sequence
  Description of Artificial Sequence: Synthetic oligonucleotide
  Antisense strand to SEQ ID NO: 2231980
aaccuuagacgaauucugu

SEQ ID NO: 2231982 - RNA, 19 nt, Artificial Sequence
  Description of Artificial Sequence: Synthetic oligonucleotide
  Sense strand starting at position 3058 of SEQ ID NO: 1883994
acaaauuagccgcaagauu

SEQ ID NO: 2231983 - RNA, 19 nt, Artificial Sequence
  Description of Artificial Sequence: Synthetic oligonucleotide
  Antisense strand to SEQ ID NO: 2231982
aaucuugcggcuaauuugu

SEQ ID NO: 2231984 - RNA, 19 nt, Artificial Sequence
  Description of Artificial Sequence: Synthetic oligonucleotide
  Sense strand starting at position 3070 of SEQ ID NO: 1883994
caagauuaguaauuauggu

SEQ ID NO: 2231985 - RNA, 19 nt, Artificial Sequence
  Description of Artificial Sequence: Synthetic oligonucleotide
  Antisense strand to SEQ ID NO: 2231984
accauaauuacuaaucuug

SEQ ID NO: 2231986 - RNA, 19 nt, Artificial Sequence
  Description of Artificial Sequence: Synthetic oligonucleotide
  Sense strand starting at position 3246 of SEQ ID NO: 1883994
acugacucugcacgagaaa

SEQ ID NO: 2231987 - RNA, 19 nt, Artificial Sequence
  Description of Artificial Sequence: Synthetic oligonucleotide
  Antisense strand to SEQ ID NO: 2231986
uuucucgugcagagucagu

SEQ ID NO: 2231988 - RNA, 19 nt, Artificial Sequence
  Description of Artificial Sequence: Synthetic oligonucleotide
  Sense strand starting at position 3379 of SEQ ID NO: 1883994
cagggaaucugaucugagu

SEQ ID NO: 2231989 - RNA, 19 nt, Artificial Sequence
  Description of Artificial Sequence: Synthetic oligonucleotide
  Antisense strand to SEQ ID NO: 2231988
acucagaucagauucccug

SEQ ID NO: 2231990 - RNA, 19 nt, Artificial Sequence
  Description of Artificial Sequence: Synthetic oligonucleotide
  Sense strand starting at position 3381 of SEQ ID NO: 1883994
gggaaucugaucugaguca

SEQ ID NO: 2231991 - RNA, 19 nt, Artificial Sequence
  Description of Artificial Sequence: Synthetic oligonucleotide
  Antisense strand to SEQ ID NO: 2231990
ugacucagaucagauuccc

SEQ ID NO: 2231992 - RNA, 19 nt, Artificial Sequence
  Description of Artificial Sequence: Synthetic oligonucleotide
  Sense strand starting at position 3470 of SEQ ID NO: 1883994
cuugauaaauuggcugagu

SEQ ID NO: 2231993 - RNA, 19 nt, Artificial Sequence
  Description of Artificial Sequence: Synthetic oligonucleotide
  Antisense strand to SEQ ID NO: 2231992
acucagccaauuuaucaag

SEQ ID NO: 2231994 - RNA, 19 nt, Artificial Sequence
  Description of Artificial Sequence: Synthetic oligonucleotide
  Sense strand starting at position 3473 of SEQ ID NO: 1883994
gauaaauuggcugagucca

SEQ ID NO: 2231995 - RNA, 19 nt, Artificial Sequence
  Description of Artificial Sequence: Synthetic oligonucleotide
  Antisense strand to SEQ ID NO: 2231994
uggacucagccaauuuauc

SEQ ID NO: 2231996 - RNA, 19 nt, Artificial Sequence
  Description of Artificial Sequence: Synthetic oligonucleotide
  Sense strand starting at position 3555 of SEQ ID NO: 1883994
agccuacguccauggaaga

SEQ ID NO: 2231997 - RNA, 19 nt, Artificial Sequence
  Description of Artificial Sequence: Synthetic oligonucleotide
  Antisense strand to SEQ ID NO: 2231996
ucuuccauggacguaggcu

SEQ ID NO: 2231998 - RNA, 19 nt, Artificial Sequence
  Description of Artificial Sequence: Synthetic oligonucleotide
  Sense strand starting at position 3582 of SEQ ID NO: 1883994
ccgucauggaauugugaau

SEQ ID NO: 2231999 - RNA, 19 nt, Artificial Sequence
  Description of Artificial Sequence: Synthetic oligonucleotide
  Antisense strand to SEQ ID NO: 2231998
auucacaauuccaugacgg

SEQ ID NO: 2232000 - RNA, 19 nt, Artificial Sequence
  Description of Artificial Sequence: Synthetic oligonucleotide
  Sense strand starting at position 3666 of SEQ ID NO: 1883994
gucuguauugcugucuuau

SEQ ID NO: 2232001 - RNA, 19 nt, Artificial Sequence
  Description of Artificial Sequence: Synthetic oligonucleotide
  Antisense strand to SEQ ID NO: 2232000
auaagacagcaauacagac

SEQ ID NO: 2232002 - RNA, 19 nt, Artificial Sequence
  Description of Artificial Sequence: Synthetic oligonucleotide
  Sense strand starting at position 3808 of SEQ ID NO: 1883994
cuggcacaguucuuuauaa

SEQ ID NO: 2232003 - RNA, 19 nt, Artificial Sequence
  Description of Artificial Sequence: Synthetic oligonucleotide
  Antisense strand to SEQ ID NO: 2232002
uuauaaagaacugugccag

SEQ ID NO: 2232004 - RNA, 19 nt, Artificial Sequence
  Description of Artificial Sequence: Synthetic oligonucleotide
  Sense strand starting at position 3809 of SEQ ID NO: 1883994
uggcacaguucuuuauaaa

SEQ ID NO: 2232005 - RNA, 19 nt, Artificial Sequence
  Description of Artificial Sequence: Synthetic oligonucleotide
  Antisense strand to SEQ ID NO: 2232004
uuuauaaagaacugugcca

SEQ ID NO: 2232006 - RNA, 19 nt, Artificial Sequence
  Description of Artificial Sequence: Synthetic oligonucleotide
  Sense strand starting at position 3810 of SEQ ID NO: 1883994
ggcacaguucuuuauaaac

SEQ ID NO: 2232007 - RNA, 19 nt, Artificial Sequence
  Description of Artificial Sequence: Synthetic oligonucleotide
  Antisense strand to SEQ ID NO: 2232006
guuuauaaagaacugugcc

SEQ ID NO: 2232008 - RNA, 19 nt, Artificial Sequence
  Description of Artificial Sequence: Synthetic oligonucleotide
  Sense strand starting at position 81 of SEQ ID NO: 1883995
gguuuauuccugucucgcu

SEQ ID NO: 2232009 - RNA, 19 nt, Artificial Sequence
  Description of Artificial Sequence: Synthetic oligonucleotide
  Antisense strand to SEQ ID NO: 2232008
agcgagacaggaauaaacc

SEQ ID NO: 2232010 - RNA, 19 nt, Artificial Sequence
  Description of Artificial Sequence: Synthetic oligonucleotide
  Sense strand starting at position 164 of SEQ ID NO: 1883995
gggagccuuugugcauuua

SEQ ID NO: 2232011 - RNA, 19 nt, Artificial Sequence
  Description of Artificial Sequence: Synthetic oligonucleotide
  Antisense strand to SEQ ID NO: 2232010
uaaaugcacaaaggcuccc

SEQ ID NO: 2232012 - RNA, 19 nt, Artificial Sequence
  Description of Artificial Sequence: Synthetic oligonucleotide
  Sense strand starting at position 226 of SEQ ID NO: 1883995
cuucccacugaguaaguua

SEQ ID NO: 2232013 - RNA, 19 nt, Artificial Sequence
  Description of Artificial Sequence: Synthetic oligonucleotide
  Antisense strand to SEQ ID NO: 2232012
uaacuuacucagugggaag

SEQ ID NO: 2232014 - RNA, 19 nt, Artificial Sequence
  Description of Artificial Sequence: Synthetic oligonucleotide
  Sense strand starting at position 290 of SEQ ID NO: 1883995
ccuugauuacuugaauugu

SEQ ID NO: 2232015 - RNA, 19 nt, Artificial Sequence
  Description of Artificial Sequence: Synthetic oligonucleotide
  Antisense strand to SEQ ID NO: 2232014
acaauucaaguaaucaagg

SEQ ID NO: 2232016 - RNA, 19 nt, Artificial Sequence
  Description of Artificial Sequence: Synthetic oligonucleotide
  Sense strand starting at position 361 of SEQ ID NO: 1883995
ggaaaucauuuggaaucca

SEQ ID NO: 2232017 - RNA, 19 nt, Artificial Sequence
  Description of Artificial Sequence: Synthetic oligonucleotide
  Antisense strand to SEQ ID NO: 2232016
uggauuccaaaugauuucc

SEQ ID NO: 2232018 - RNA, 19 nt, Artificial Sequence
  Description of Artificial Sequence: Synthetic oligonucleotide
  Sense strand starting at position 377 of SEQ ID NO: 1883995
ccaggauuaucacuuauug

SEQ ID NO: 2232019 - RNA, 19 nt, Artificial Sequence
  Description of Artificial Sequence: Synthetic oligonucleotide
  Antisense strand to SEQ ID NO: 2232018
caauaagugauaauccugg

SEQ ID NO: 2232020 - RNA, 19 nt, Artificial Sequence
  Description of Artificial Sequence: Synthetic oligonucleotide
  Sense strand starting at position 514 of SEQ ID NO: 1883995
agaugaagugcugaacucu

SEQ ID NO: 2232021 - RNA, 19 nt, Artificial Sequence
  Description of Artificial Sequence: Synthetic oligonucleotide
  Antisense strand to SEQ ID NO: 2232020
agaguucagcacuucaucu

SEQ ID NO: 2232022 - RNA, 19 nt, Artificial Sequence
  Description of Artificial Sequence: Synthetic oligonucleotide
  Sense strand starting at position 826 of SEQ ID NO: 1883995
aaguuaaagcuugaauguu

SEQ ID NO: 2232023 - RNA, 19 nt, Artificial Sequence
  Description of Artificial Sequence: Synthetic oligonucleotide
  Antisense strand to SEQ ID NO: 2232022
aacauucaagcuuuaacuu

SEQ ID NO: 2232024 - RNA, 19 nt, Artificial Sequence
  Description of Artificial Sequence: Synthetic oligonucleotide
  Sense strand starting at position 968 of SEQ ID NO: 1883995
caggaagaugggugcuuaa

SEQ ID NO: 2232025 - RNA, 19 nt, Artificial Sequence
  Description of Artificial Sequence: Synthetic oligonucleotide
  Antisense strand to SEQ ID NO: 2232024
uuaagcacccaucuuccug

SEQ ID NO: 2232026 - RNA, 19 nt, Artificial Sequence
  Description of Artificial Sequence: Synthetic oligonucleotide
  Sense strand starting at position 1070 of SEQ ID NO: 1883995
gggcccugucacuaaugaa

SEQ ID NO: 2232027 - RNA, 19 nt, Artificial Sequence
  Description of Artificial Sequence: Synthetic oligonucleotide
  Antisense strand to SEQ ID NO: 2232026
uucauuagugacagggccc

SEQ ID NO: 2232028 - RNA, 19 nt, Artificial Sequence
  Description of Artificial Sequence: Synthetic oligonucleotide
  Sense strand starting at position 1235 of SEQ ID NO: 1883995
uacacaugaggucaauguu

SEQ ID NO: 2232029 - RNA, 19 nt, Artificial Sequence
  Description of Artificial Sequence: Synthetic oligonucleotide
  Antisense strand to SEQ ID NO: 2232028
aacauugaccucaugugua

SEQ ID NO: 2232030 - RNA, 19 nt, Artificial Sequence
  Description of Artificial Sequence: Synthetic oligonucleotide
  Sense strand starting at position 1579 of SEQ ID NO: 1883995
guagaauucuuaccugaag

SEQ ID NO: 2232031 - RNA, 19 nt, Artificial Sequence
  Description of Artificial Sequence: Synthetic oligonucleotide
  Antisense strand to SEQ ID NO: 2232030
cuucagguaagaauucuac

SEQ ID NO: 2232032 - RNA, 19 nt, Artificial Sequence
  Description of Artificial Sequence: Synthetic oligonucleotide
  Sense strand starting at position 1605 of SEQ ID NO: 1883995
aggagauuccaacgugaau

SEQ ID NO: 2232033 - RNA, 19 nt, Artificial Sequence
  Description of Artificial Sequence: Synthetic oligonucleotide
  Antisense strand to SEQ ID NO: 2232032
auucacguuggaaucuccu

SEQ ID NO: 2232034 - RNA, 19 nt, Artificial Sequence
  Description of Artificial Sequence: Synthetic oligonucleotide
  Sense strand starting at position 1804 of SEQ ID NO: 1883995
gagauagagcaaugguaua

SEQ ID NO: 2232035 - RNA, 19 nt, Artificial Sequence
  Description of Artificial Sequence: Synthetic oligonucleotide
  Antisense strand to SEQ ID NO: 2232034
uauaccauugcucuaucuc

SEQ ID NO: 2232036 - RNA, 19 nt, Artificial Sequence
  Description of Artificial Sequence: Synthetic oligonucleotide
  Sense strand starting at position 1816 of SEQ ID NO: 1883995
ugguauaauugauugaaug

SEQ ID NO: 2232037 - RNA, 19 nt, Artificial Sequence
  Description of Artificial Sequence: Synthetic oligonucleotide
  Antisense strand to SEQ ID NO: 2232036
cauucaaucaauuauacca

SEQ ID NO: 2232038 - RNA, 19 nt, Artificial Sequence
  Description of Artificial Sequence: Synthetic oligonucleotide
  Sense strand starting at position 1817 of SEQ ID NO: 1883995
gguauaauugauugaaugu

SEQ ID NO: 2232039 - RNA, 19 nt, Artificial Sequence
  Description of Artificial Sequence: Synthetic oligonucleotide
  Antisense strand to SEQ ID NO: 2232038
acauucaaucaauuauacc

SEQ ID NO: 2232040 - RNA, 19 nt, Artificial Sequence
  Description of Artificial Sequence: Synthetic oligonucleotide
  Sense strand starting at position 1896 of SEQ ID NO: 1883995
guuaguaauccucaccaag

SEQ ID NO: 2232041 - RNA, 19 nt, Artificial Sequence
  Description of Artificial Sequence: Synthetic oligonucleotide
  Antisense strand to SEQ ID NO: 2232040
cuuggugaggauuacuaac

SEQ ID NO: 2232042 - RNA, 19 nt, Artificial Sequence
  Description of Artificial Sequence: Synthetic oligonucleotide
  Sense strand starting at position 1899 of SEQ ID NO: 1883995
aguaauccucaccaaguuu

SEQ ID NO: 2232043 - RNA, 19 nt, Artificial Sequence
  Description of Artificial Sequence: Synthetic oligonucleotide
  Antisense strand to SEQ ID NO: 2232042
aaacuuggugaggauuacu

SEQ ID NO: 2232044 - RNA, 19 nt, Artificial Sequence
  Description of Artificial Sequence: Synthetic oligonucleotide
  Sense strand starting at position 1910 of SEQ ID NO: 1883995
ccaaguuuggaagguuaga

SEQ ID NO: 2232045 - RNA, 19 nt, Artificial Sequence
  Description of Artificial Sequence: Synthetic oligonucleotide
  Antisense strand to SEQ ID NO: 2232044
ucuaaccuuccaaacuugg

SEQ ID NO: 2232046 - RNA, 19 nt, Artificial Sequence
  Description of Artificial Sequence: Synthetic oligonucleotide
  Sense strand starting at position 1919 of SEQ ID NO: 1883995
gaagguuagaggugacuca

SEQ ID NO: 2232047 - RNA, 19 nt, Artificial Sequence
  Description of Artificial Sequence: Synthetic oligonucleotide
  Antisense strand to SEQ ID NO: 2232046
ugagucaccucuaaccuuc

SEQ ID NO: 2232048 - RNA, 19 nt, Artificial Sequence
  Description of Artificial Sequence: Synthetic oligonucleotide
  Sense strand starting at position 1931 of SEQ ID NO: 1883995
ugacucagccuccaugaau

SEQ ID NO: 2232049 - RNA, 19 nt, Artificial Sequence
  Description of Artificial Sequence: Synthetic oligonucleotide
  Antisense strand to SEQ ID NO: 2232048
auucauggaggcugaguca

SEQ ID NO: 2232050 - RNA, 19 nt, Artificial Sequence
  Description of Artificial Sequence: Synthetic oligonucleotide
  Sense strand starting at position 2136 of SEQ ID NO: 1883995
uguaauguagccuagaaug

SEQ ID NO: 2232051 - RNA, 19 nt, Artificial Sequence
  Description of Artificial Sequence: Synthetic oligonucleotide
  Antisense strand to SEQ ID NO: 2232050
cauucuaggcuacauuaca

SEQ ID NO: 2232052 - RNA, 19 nt, Artificial Sequence
  Description of Artificial Sequence: Synthetic oligonucleotide
  Sense strand starting at position 2138 of SEQ ID NO: 1883995
uaauguagccuagaaugua

SEQ ID NO: 2232053 - RNA, 19 nt, Artificial Sequence
  Description of Artificial Sequence: Synthetic oligonucleotide
  Antisense strand to SEQ ID NO: 2232052
uacauucuaggcuacauua

SEQ ID NO: 2232054 - RNA, 19 nt, Artificial Sequence
  Description of Artificial Sequence: Synthetic oligonucleotide
  Sense strand starting at position 2544 of SEQ ID NO: 1883995
gcuuacaauugaguaugaa

SEQ ID NO: 2232055 - RNA, 19 nt, Artificial Sequence
  Description of Artificial Sequence: Synthetic oligonucleotide
  Antisense strand to SEQ ID NO: 2232054
uucauacucaauuguaagc

SEQ ID NO: 2232056 - RNA, 19 nt, Artificial Sequence
  Description of Artificial Sequence: Synthetic oligonucleotide
  Sense strand starting at position 2675 of SEQ ID NO: 1883995
auguuauaccaagaacguu

SEQ ID NO: 2232057 - RNA, 19 nt, Artificial Sequence
  Description of Artificial Sequence: Synthetic oligonucleotide
  Antisense strand to SEQ ID NO: 2232056
aacguucuugguauaacau

SEQ ID NO: 2232058 - RNA, 19 nt, Artificial Sequence
  Description of Artificial Sequence: Synthetic oligonucleotide
  Sense strand starting at position 2742 of SEQ ID NO: 1883995
cagccaaccgauugagaaa

SEQ ID NO: 2232059 - RNA, 19 nt, Artificial Sequence
  Description of Artificial Sequence: Synthetic oligonucleotide
  Antisense strand to SEQ ID NO: 2232058
uuucucaaucgguuggcug

SEQ ID NO: 2232060 - RNA, 19 nt, Artificial Sequence
  Description of Artificial Sequence: Synthetic oligonucleotide
  Sense strand starting at position 2909 of SEQ ID NO: 1883995
ugauauuaauuggcagauc

SEQ ID NO: 2232061 - RNA, 19 nt, Artificial Sequence
  Description of Artificial Sequence: Synthetic oligonucleotide
  Antisense strand to SEQ ID NO: 2232060
gaucugccaauuaauauca

SEQ ID NO: 2232062 - RNA, 19 nt, Artificial Sequence
  Description of Artificial Sequence: Synthetic oligonucleotide
  Sense strand starting at position 2956 of SEQ ID NO: 1883995
ccaucacagguuugagacu

SEQ ID NO: 2232063 - RNA, 19 nt, Artificial Sequence
  Description of Artificial Sequence: Synthetic oligonucleotide
  Antisense strand to SEQ ID NO: 2232062
agucucaaaccugugaugg

SEQ ID NO: 2232064 - RNA, 19 nt, Artificial Sequence
  Description of Artificial Sequence: Synthetic oligonucleotide
  Sense strand starting at position 2963 of SEQ ID NO: 1883995
agguuugagacuugaguca

SEQ ID NO: 2232065 - RNA, 19 nt, Artificial Sequence
  Description of Artificial Sequence: Synthetic oligonucleotide
  Antisense strand to SEQ ID NO: 2232064
ugacucaagucucaaaccu

SEQ ID NO: 2232066 - RNA, 19 nt, Artificial Sequence
  Description of Artificial Sequence: Synthetic oligonucleotide
  Sense strand starting at position 2977 of SEQ ID NO: 1883995
agucaacucuaggucuaaa

SEQ ID NO: 2232067 - RNA, 19 nt, Artificial Sequence
  Description of Artificial Sequence: Synthetic oligonucleotide
  Antisense strand to SEQ ID NO: 2232066
uuuagaccuagaguugacu

SEQ ID NO: 2232068 - RNA, 19 nt, Artificial Sequence
  Description of Artificial Sequence: Synthetic oligonucleotide
  Sense strand starting at position 3065 of SEQ ID NO: 1883995
gguggugggcauuagagau

SEQ ID NO: 2232069 - RNA, 19 nt, Artificial Sequence
  Description of Artificial Sequence: Synthetic oligonucleotide
  Antisense strand to SEQ ID NO: 2232068
aucucuaaugcccaccacc

SEQ ID NO: 2232070 - RNA, 19 nt, Artificial Sequence
  Description of Artificial Sequence: Synthetic oligonucleotide
  Sense strand starting at position 3069 of SEQ ID NO: 1883995
gugggcauuagagauucuu

SEQ ID NO: 2232071 - RNA, 19 nt, Artificial Sequence
  Description of Artificial Sequence: Synthetic oligonucleotide
  Antisense strand to SEQ ID NO: 2232070
aagaaucucuaaugcccac

SEQ ID NO: 2232072 - RNA, 19 nt, Artificial Sequence
  Description of Artificial Sequence: Synthetic oligonucleotide
  Sense strand starting at position 3099 of SEQ ID NO: 1883995
agacuaacuuccucaggca

SEQ ID NO: 2232073 - RNA, 19 nt, Artificial Sequence
  Description of Artificial Sequence: Synthetic oligonucleotide
  Antisense strand to SEQ ID NO: 2232072
ugccugaggaaguuagucu

SEQ ID NO: 2232074 - RNA, 19 nt, Artificial Sequence
  Description of Artificial Sequence: Synthetic oligonucleotide
  Sense strand starting at position 3166 of SEQ ID NO: 1883995
aauuaagggcucuagguuu

SEQ ID NO: 2232075 - RNA, 19 nt, Artificial Sequence
  Description of Artificial Sequence: Synthetic oligonucleotide
  Antisense strand to SEQ ID NO: 2232074
aaaccuagagcccuuaauu

SEQ ID NO: 2232076 - RNA, 19 nt, Artificial Sequence
  Description of Artificial Sequence: Synthetic oligonucleotide
  Sense strand starting at position 3237 of SEQ ID NO: 1883995
acuccuucccaguaaaugu

SEQ ID NO: 2232077 - RNA, 19 nt, Artificial Sequence
  Description of Artificial Sequence: Synthetic oligonucleotide
  Antisense strand to SEQ ID NO: 2232076
acauuuacugggaaggagu

SEQ ID NO: 2232078 - RNA, 19 nt, Artificial Sequence
  Description of Artificial Sequence: Synthetic oligonucleotide
  Sense strand starting at position 3276 of SEQ ID NO: 1883995
cucuaugagguuuggaauu

SEQ ID NO: 2232079 - RNA, 19 nt, Artificial Sequence
  Description of Artificial Sequence: Synthetic oligonucleotide
  Antisense strand to SEQ ID NO: 2232078
aauuccaaaccucauagag

SEQ ID NO: 2232080 - RNA, 19 nt, Artificial Sequence
  Description of Artificial Sequence: Synthetic oligonucleotide
  Sense strand starting at position 3449 of SEQ ID NO: 1883995
cccugaauuucuccagugu

SEQ ID NO: 2232081 - RNA, 19 nt, Artificial Sequence
  Description of Artificial Sequence: Synthetic oligonucleotide
  Antisense strand to SEQ ID NO: 2232080
acacuggagaaauucaggg

SEQ ID NO: 2232082 - RNA, 19 nt, Artificial Sequence
  Description of Artificial Sequence: Synthetic oligonucleotide
  Sense strand starting at position 3453 of SEQ ID NO: 1883995
gaauuucuccaguguaguu

SEQ ID NO: 2232083 - RNA, 19 nt, Artificial Sequence
  Description of Artificial Sequence: Synthetic oligonucleotide
  Antisense strand to SEQ ID NO: 2232082
aacuacacuggagaaauuc

SEQ ID NO: 2232084 - RNA, 19 nt, Artificial Sequence
  Description of Artificial Sequence: Synthetic oligonucleotide
  Sense strand starting at position 3567 of SEQ ID NO: 1883995
auguguaaaggugauaauu

SEQ ID NO: 2232085 - RNA, 19 nt, Artificial Sequence
  Description of Artificial Sequence: Synthetic oligonucleotide
  Antisense strand to SEQ ID NO: 2232084
aauuaucaccuuuacacau

SEQ ID NO: 2232086 - RNA, 19 nt, Artificial Sequence
  Description of Artificial Sequence: Synthetic oligonucleotide
  Sense strand starting at position 3934 of SEQ ID NO: 1883995
guaagucagguuuaaacca

SEQ ID NO: 2232087 - RNA, 19 nt, Artificial Sequence
  Description of Artificial Sequence: Synthetic oligonucleotide
  Antisense strand to SEQ ID NO: 2232086
ugguuuaaaccugacuuac

SEQ ID NO: 2232088 - RNA, 19 nt, Artificial Sequence
  Description of Artificial Sequence: Synthetic oligonucleotide
  Sense strand starting at position 81 of SEQ ID NO: 1883996
acuauaucugauggugaug

SEQ ID NO: 2232089 - RNA, 19 nt, Artificial Sequence
  Description of Artificial Sequence: Synthetic oligonucleotide
  Antisense strand to SEQ ID NO: 2232088
caucaccaucagauauagu

SEQ ID NO: 2232090 - RNA, 19 nt, Artificial Sequence
  Description of Artificial Sequence: Synthetic oligonucleotide
  Sense strand starting at position 135 of SEQ ID NO: 1883996
ggcacaacagcaugauaau

SEQ ID NO: 2232091 - RNA, 19 nt, Artificial Sequence
  Description of Artificial Sequence: Synthetic oligonucleotide
  Antisense strand to SEQ ID NO: 2232090
auuaucaugcuguugugcc

SEQ ID NO: 2232092 - RNA, 19 nt, Artificial Sequence
  Description of Artificial Sequence: Synthetic oligonucleotide
  Sense strand starting at position 144 of SEQ ID NO: 1883996
gcaugauaauaguuaccuu

SEQ ID NO: 2232093 - RNA, 19 nt, Artificial Sequence
  Description of Artificial Sequence: Synthetic oligonucleotide
  Antisense strand to SEQ ID NO: 2232092
aagguaacuauuaucaugc

SEQ ID NO: 2232094 - RNA, 19 nt, Artificial Sequence
  Description of Artificial Sequence: Synthetic oligonucleotide
  Sense strand starting at position 433 of SEQ ID NO: 1883996
agugcacggcugcuuaaau

SEQ ID NO: 2232095 - RNA, 19 nt, Artificial Sequence
  Description of Artificial Sequence: Synthetic oligonucleotide
  Antisense strand to SEQ ID NO: 2232094
auuuaagcagccgugcacu

SEQ ID NO: 2232096 - RNA, 19 nt, Artificial Sequence
  Description of Artificial Sequence: Synthetic oligonucleotide
  Sense strand starting at position 583 of SEQ ID NO: 1883996
agucaagaguuuccacauc

SEQ ID NO: 2232097 - RNA, 19 nt, Artificial Sequence
  Description of Artificial Sequence: Synthetic oligonucleotide
  Antisense strand to SEQ ID NO: 2232096
gauguggaaacucuugacu

SEQ ID NO: 2232098 - RNA, 19 nt, Artificial Sequence
  Description of Artificial Sequence: Synthetic oligonucleotide
  Sense strand starting at position 662 of SEQ ID NO: 1883996
cagguagauugacugugau

SEQ ID NO: 2232099 - RNA, 19 nt, Artificial Sequence
  Description of Artificial Sequence: Synthetic oligonucleotide
  Antisense strand to SEQ ID NO: 2232098
aucacagucaaucuaccug

SEQ ID NO: 2232100 - RNA, 19 nt, Artificial Sequence
  Description of Artificial Sequence: Synthetic oligonucleotide
  Sense strand starting at position 665 of SEQ ID NO: 1883996
guagauugacugugauaga

SEQ ID NO: 2232101 - RNA, 19 nt, Artificial Sequence
  Description of Artificial Sequence: Synthetic oligonucleotide
  Antisense strand to SEQ ID NO: 2232100
ucuaucacagucaaucuac

SEQ ID NO: 2232102 - RNA, 19 nt, Artificial Sequence
  Description of Artificial Sequence: Synthetic oligonucleotide
  Sense strand starting at position 797 of SEQ ID NO: 1883996
agguguugccaugggaaca

SEQ ID NO: 2232103 - RNA, 19 nt, Artificial Sequence
  Description of Artificial Sequence: Synthetic oligonucleotide
  Antisense strand to SEQ ID NO: 2232102
uguucccauggcaacaccu

SEQ ID NO: 2232104 - RNA, 19 nt, Artificial Sequence
  Description of Artificial Sequence: Synthetic oligonucleotide
  Sense strand starting at position 978 of SEQ ID NO: 1883996
gucaccaucugauccacau

SEQ ID NO: 2232105 - RNA, 19 nt, Artificial Sequence
  Description of Artificial Sequence: Synthetic oligonucleotide
  Antisense strand to SEQ ID NO: 2232104
auguggaucagauggugac

SEQ ID NO: 2232106 - RNA, 19 nt, Artificial Sequence
  Description of Artificial Sequence: Synthetic oligonucleotide
  Sense strand starting at position 1022 of SEQ ID NO: 1883996
cggcguuuccuugccucua

SEQ ID NO: 2232107 - RNA, 19 nt, Artificial Sequence
  Description of Artificial Sequence: Synthetic oligonucleotide
  Antisense strand to SEQ ID NO: 2232106
uagaggcaaggaaacgccg

SEQ ID NO: 2232108 - RNA, 19 nt, Artificial Sequence
  Description of Artificial Sequence: Synthetic oligonucleotide
  Sense strand starting at position 1081 of SEQ ID NO: 1883996
agcauauuggccuaacaga

SEQ ID NO: 2232109 - RNA, 19 nt, Artificial Sequence
  Description of Artificial Sequence: Synthetic oligonucleotide
  Antisense strand to SEQ ID NO: 2232108
ucuguuaggccaauaugcu

SEQ ID NO: 2232110 - RNA, 19 nt, Artificial Sequence
  Description of Artificial Sequence: Synthetic oligonucleotide
  Sense strand starting at position 1192 of SEQ ID NO: 1883996
gcuucuaaccucugggaga

SEQ ID NO: 2232111 - RNA, 19 nt, Artificial Sequence
  Description of Artificial Sequence: Synthetic oligonucleotide
  Antisense strand to SEQ ID NO: 2232110
ucucccagagguuagaagc

SEQ ID NO: 2232112 - RNA, 19 nt, Artificial Sequence
  Description of Artificial Sequence: Synthetic oligonucleotide
  Sense strand starting at position 1194 of SEQ ID NO: 1883996
uucuaaccucugggagaug

SEQ ID NO: 2232113 - RNA, 19 nt, Artificial Sequence
  Description of Artificial Sequence: Synthetic oligonucleotide
  Antisense strand to SEQ ID NO: 2232112
caucucccagagguuagaa

SEQ ID NO: 2232114 - RNA, 19 nt, Artificial Sequence
  Description of Artificial Sequence: Synthetic oligonucleotide
  Sense strand starting at position 1212 of SEQ ID NO: 1883996
gggaaaucaugagucucau

SEQ ID NO: 2232115 - RNA, 19 nt, Artificial Sequence
  Description of Artificial Sequence: Synthetic oligonucleotide
  Antisense strand to SEQ ID NO: 2232114
augagacucaugauuuccc

SEQ ID NO: 2232116 - RNA, 19 nt, Artificial Sequence
  Description of Artificial Sequence: Synthetic oligonucleotide
  Sense strand starting at position 1455 of SEQ ID NO: 1883996
gugcuaaguggacaucauu

SEQ ID NO: 2232117 - RNA, 19 nt, Artificial Sequence
  Description of Artificial Sequence: Synthetic oligonucleotide
  Antisense strand to SEQ ID NO: 2232116
aaugauguccacuuagcac

SEQ ID NO: 2232118 - RNA, 19 nt, Artificial Sequence
  Description of Artificial Sequence: Synthetic oligonucleotide
  Sense strand starting at position 1464 of SEQ ID NO: 1883996
ggacaucauucguuuccua

SEQ ID NO: 2232119 - RNA, 19 nt, Artificial Sequence
  Description of Artificial Sequence: Synthetic oligonucleotide
  Antisense strand to SEQ ID NO: 2232118
uaggaaacgaaugaugucc

SEQ ID NO: 2232120 - RNA, 19 nt, Artificial Sequence
  Description of Artificial Sequence: Synthetic oligonucleotide
  Sense strand starting at position 1491 of SEQ ID NO: 1883996
gucuuuccuguugacaaau

SEQ ID NO: 2232121 - RNA, 19 nt, Artificial Sequence
  Description of Artificial Sequence: Synthetic oligonucleotide
  Antisense strand to SEQ ID NO: 2232120
auuugucaacaggaaagac

SEQ ID NO: 2232122 - RNA, 19 nt, Artificial Sequence
  Description of Artificial Sequence: Synthetic oligonucleotide
  Sense strand starting at position 1500 of SEQ ID NO: 1883996
guugacaaauaccuguuua

SEQ ID NO: 2232123 - RNA, 19 nt, Artificial Sequence
  Description of Artificial Sequence: Synthetic oligonucleotide
  Antisense strand to SEQ ID NO: 2232122
uaaacagguauuugucaac

SEQ ID NO: 2232124 - RNA, 19 nt, Artificial Sequence
  Description of Artificial Sequence: Synthetic oligonucleotide
  Sense strand starting at position 1575 of SEQ ID NO: 1883996
acaguucuagcauaugauc

SEQ ID NO: 2232125 - RNA, 19 nt, Artificial Sequence
  Description of Artificial Sequence: Synthetic oligonucleotide
  Antisense strand to SEQ ID NO: 2232124
gaucauaugcuagaacugu

SEQ ID NO: 2232126 - RNA, 19 nt, Artificial Sequence
  Description of Artificial Sequence: Synthetic oligonucleotide
  Sense strand starting at position 1598 of SEQ ID NO: 1883996
guaaauuaacagcagcaaa

SEQ ID NO: 2232127 - RNA, 19 nt, Artificial Sequence
  Description of Artificial Sequence: Synthetic oligonucleotide
  Antisense strand to SEQ ID NO: 2232126
uuugcugcuguuaauuuac

SEQ ID NO: 2232128 - RNA, 19 nt, Artificial Sequence
  Description of Artificial Sequence: Synthetic oligonucleotide
  Sense strand starting at position 1997 of SEQ ID NO: 1883996
acauuaaggcuuugagucu

SEQ ID NO: 2232129 - RNA, 19 nt, Artificial Sequence
  Description of Artificial Sequence: Synthetic oligonucleotide
  Antisense strand to SEQ ID NO: 2232128
agacucaaagccuuaaugu

SEQ ID NO: 2232130 - RNA, 19 nt, Artificial Sequence
  Description of Artificial Sequence: Synthetic oligonucleotide
  Sense strand starting at position 2168 of SEQ ID NO: 1883996
caggaaauccgucgacuug

SEQ ID NO: 2232131 - RNA, 19 nt, Artificial Sequence
  Description of Artificial Sequence: Synthetic oligonucleotide
  Antisense strand to SEQ ID NO: 2232130
caagucgacggauuuccug

SEQ ID NO: 2232132 - RNA, 19 nt, Artificial Sequence
  Description of Artificial Sequence: Synthetic oligonucleotide
  Sense strand starting at position 2198 of SEQ ID NO: 1883996
ccuuuacaguuaguuacua

SEQ ID NO: 2232133 - RNA, 19 nt, Artificial Sequence
  Description of Artificial Sequence: Synthetic oligonucleotide
  Antisense strand to SEQ ID NO: 2232132
uaguaacuaacuguaaagg

SEQ ID NO: 2232134 - RNA, 19 nt, Artificial Sequence
  Description of Artificial Sequence: Synthetic oligonucleotide
  Sense strand starting at position 2352 of SEQ ID NO: 1883996
uuagaaaugccagauuccu

SEQ ID NO: 2232135 - RNA, 19 nt, Artificial Sequence
  Description of Artificial Sequence: Synthetic oligonucleotide
  Antisense strand to SEQ ID NO: 2232134
aggaaucuggcauuucuaa

SEQ ID NO: 2232136 - RNA, 19 nt, Artificial Sequence
  Description of Artificial Sequence: Synthetic oligonucleotide
  Sense strand starting at position 2580 of SEQ ID NO: 1883996
ccuggcuuugaccaaauua

SEQ ID NO: 2232137 - RNA, 19 nt, Artificial Sequence
  Description of Artificial Sequence: Synthetic oligonucleotide
  Antisense strand to SEQ ID NO: 2232136
uaauuuggucaaagccagg

SEQ ID NO: 2232138 - RNA, 19 nt, Artificial Sequence
  Description of Artificial Sequence: Synthetic oligonucleotide
  Sense strand starting at position 2843 of SEQ ID NO: 1883996
uuauaauacguguacugau

SEQ ID NO: 2232139 - RNA, 19 nt, Artificial Sequence
  Description of Artificial Sequence: Synthetic oligonucleotide
  Antisense strand to SEQ ID NO: 2232138
aucaguacacguauuauaa

SEQ ID NO: 2232140 - RNA, 19 nt, Artificial Sequence
  Description of Artificial Sequence: Synthetic oligonucleotide
  Sense strand starting at position 2973 of SEQ ID NO: 1883996
auguguguuaucuaugaua

SEQ ID NO: 2232141 - RNA, 19 nt, Artificial Sequence
  Description of Artificial Sequence: Synthetic oligonucleotide
  Antisense strand to SEQ ID NO: 2232140
uaucauagauaacacacau

SEQ ID NO: 2232142 - RNA, 19 nt, Artificial Sequence
  Description of Artificial Sequence: Synthetic oligonucleotide
  Sense strand starting at position 3040 of SEQ ID NO: 1883996
auaaaucuacuguguuaug

SEQ ID NO: 2232143 - RNA, 19 nt, Artificial Sequence
  Description of Artificial Sequence: Synthetic oligonucleotide
  Antisense strand to SEQ ID NO: 2232142
cauaacacaguagauuuau

SEQ ID NO: 2232144 - RNA, 19 nt, Artificial Sequence
  Description of Artificial Sequence: Synthetic oligonucleotide
  Sense strand starting at position 3051 of SEQ ID NO: 1883996
guguuaugauuauuucucu

SEQ ID NO: 2232145 - RNA, 19 nt, Artificial Sequence
  Description of Artificial Sequence: Synthetic oligonucleotide
  Antisense strand to SEQ ID NO: 2232144
agagaaauaaucauaacac

SEQ ID NO: 2232146 - RNA, 19 nt, Artificial Sequence
  Description of Artificial Sequence: Synthetic oligonucleotide
  Sense strand starting at position 3079 of SEQ ID NO: 1883996
guaacuaaugaacgauuaa

SEQ ID NO: 2232147 - RNA, 19 nt, Artificial Sequence
  Description of Artificial Sequence: Synthetic oligonucleotide
  Antisense strand to SEQ ID NO: 2232146
uuaaucguucauuaguuac

SEQ ID NO: 2232148 - RNA, 19 nt, Artificial Sequence
  Description of Artificial Sequence: Synthetic oligonucleotide
  Sense strand starting at position 3090 of SEQ ID NO: 1883996
acgauuaauccaugacaau

SEQ ID NO: 2232149 - RNA, 19 nt, Artificial Sequence
  Description of Artificial Sequence: Synthetic oligonucleotide
  Antisense strand to SEQ ID NO: 2232148
auugucauggauuaaucgu

SEQ ID NO: 2232150 - RNA, 19 nt, Artificial Sequence
  Description of Artificial Sequence: Synthetic oligonucleotide
  Sense strand starting at position 3102 of SEQ ID NO: 1883996
ugacaauugguccagcauu

SEQ ID NO: 2232151 - RNA, 19 nt, Artificial Sequence
  Description of Artificial Sequence: Synthetic oligonucleotide
  Antisense strand to SEQ ID NO: 2232150
aaugcuggaccaauuguca

SEQ ID NO: 2232152 - RNA, 19 nt, Artificial Sequence
  Description of Artificial Sequence: Synthetic oligonucleotide
  Sense strand starting at position 3161 of SEQ ID NO: 1883996
caaauacauggcugagaug

SEQ ID NO: 2232153 - RNA, 19 nt, Artificial Sequence
  Description of Artificial Sequence: Synthetic oligonucleotide
  Antisense strand to SEQ ID NO: 2232152
caucucagccauguauuug

SEQ ID NO: 2232154 - RNA, 19 nt, Artificial Sequence
  Description of Artificial Sequence: Synthetic oligonucleotide
  Sense strand starting at position 3170 of SEQ ID NO: 1883996
ggcugagaugcccagaguu

SEQ ID NO: 2232155 - RNA, 19 nt, Artificial Sequence
  Description of Artificial Sequence: Synthetic oligonucleotide
  Antisense strand to SEQ ID NO: 2232154
aacucugggcaucucagcc

SEQ ID NO: 2232156 - RNA, 19 nt, Artificial Sequence
  Description of Artificial Sequence: Synthetic oligonucleotide
  Sense strand starting at position 3196 of SEQ ID NO: 1883996
cucccuagggaaugucaaa

SEQ ID NO: 2232157 - RNA, 19 nt, Artificial Sequence
  Description of Artificial Sequence: Synthetic oligonucleotide
  Antisense strand to SEQ ID NO: 2232156
uuugacauucccuagggag

SEQ ID NO: 2232158 - RNA, 19 nt, Artificial Sequence
  Description of Artificial Sequence: Synthetic oligonucleotide
  Sense strand starting at position 3299 of SEQ ID NO: 1883996
guaauagcaguugaaucaa

SEQ ID NO: 2232159 - RNA, 19 nt, Artificial Sequence
  Description of Artificial Sequence: Synthetic oligonucleotide
  Antisense strand to SEQ ID NO: 2232158
uugauucaacugcuauuac

SEQ ID NO: 2232160 - RNA, 19 nt, Artificial Sequence
  Description of Artificial Sequence: Synthetic oligonucleotide
  Sense strand starting at position 3566 of SEQ ID NO: 1883996
gagguuacaucacuuguca

SEQ ID NO: 2232161 - RNA, 19 nt, Artificial Sequence
  Description of Artificial Sequence: Synthetic oligonucleotide
  Antisense strand to SEQ ID NO: 2232160
ugacaagugauguaaccuc

SEQ ID NO: 2232162 - RNA, 19 nt, Artificial Sequence
  Description of Artificial Sequence: Synthetic oligonucleotide
  Sense strand starting at position 3581 of SEQ ID NO: 1883996
gucacaagguguguaaaug

SEQ ID NO: 2232163 - RNA, 19 nt, Artificial Sequence
  Description of Artificial Sequence: Synthetic oligonucleotide
  Antisense strand to SEQ ID NO: 2232162
cauuuacacaccuugugac

SEQ ID NO: 2232164 - RNA, 19 nt, Artificial Sequence
  Description of Artificial Sequence: Synthetic oligonucleotide
  Sense strand starting at position 3587 of SEQ ID NO: 1883996
agguguguaaauggagaau

SEQ ID NO: 2232165 - RNA, 19 nt, Artificial Sequence
  Description of Artificial Sequence: Synthetic oligonucleotide
  Antisense strand to SEQ ID NO: 2232164
auucuccauuuacacaccu

SEQ ID NO: 2232166 - RNA, 19 nt, Artificial Sequence
  Description of Artificial Sequence: Synthetic oligonucleotide
  Sense strand starting at position 3767 of SEQ ID NO: 1883996
uuaguugcagccuuguauu

SEQ ID NO: 2232167 - RNA, 19 nt, Artificial Sequence
  Description of Artificial Sequence: Synthetic oligonucleotide
  Antisense strand to SEQ ID NO: 2232166
aauacaaggcugcaacuaa

SEQ ID NO: 2232168 - RNA, 19 nt, Artificial Sequence
  Description of Artificial Sequence: Synthetic oligonucleotide
  Sense strand starting at position 7 of SEQ ID NO: 1883997
cuuccucaucuauggagaa

SEQ ID NO: 2232169 - RNA, 19 nt, Artificial Sequence
  Description of Artificial Sequence: Synthetic oligonucleotide
  Antisense strand to SEQ ID NO: 2232168
uucuccauagaugaggaag

SEQ ID NO: 2232170 - RNA, 19 nt, Artificial Sequence
  Description of Artificial Sequence: Synthetic oligonucleotide
  Sense strand starting at position 183 of SEQ ID NO: 1883997
auuaaaguacuaggguauu

SEQ ID NO: 2232171 - RNA, 19 nt, Artificial Sequence
  Description of Artificial Sequence: Synthetic oligonucleotide
  Antisense strand to SEQ ID NO: 2232170
aauacccuaguacuuuaau

SEQ ID NO: 2232172 - RNA, 19 nt, Artificial Sequence
  Description of Artificial Sequence: Synthetic oligonucleotide
  Sense strand starting at position 308 of SEQ ID NO: 1883997
guccucauuguuuauauaa

SEQ ID NO: 2232173 - RNA, 19 nt, Artificial Sequence
  Description of Artificial Sequence: Synthetic oligonucleotide
  Antisense strand to SEQ ID NO: 2232172
uuauauaaacaaugaggac

SEQ ID NO: 2232174 - RNA, 19 nt, Artificial Sequence
  Description of Artificial Sequence: Synthetic oligonucleotide
  Sense strand starting at position 449 of SEQ ID NO: 1883997
gguauauuccuugagucau

SEQ ID NO: 2232175 - RNA, 19 nt, Artificial Sequence
  Description of Artificial Sequence: Synthetic oligonucleotide
  Antisense strand to SEQ ID NO: 2232174
augacucaaggaauauacc

SEQ ID NO: 2232176 - RNA, 19 nt, Artificial Sequence
  Description of Artificial Sequence: Synthetic oligonucleotide
  Sense strand starting at position 466 of SEQ ID NO: 1883997
auguuaauaagaggaaguu

SEQ ID NO: 2232177 - RNA, 19 nt, Artificial Sequence
  Description of Artificial Sequence: Synthetic oligonucleotide
  Antisense strand to SEQ ID NO: 2232176
aacuuccucuuauuaacau

SEQ ID NO: 2232178 - RNA, 19 nt, Artificial Sequence
  Description of Artificial Sequence: Synthetic oligonucleotide
  Sense strand starting at position 599 of SEQ ID NO: 1883997
aaggauaugguuugagguu

SEQ ID NO: 2232179 - RNA, 19 nt, Artificial Sequence
  Description of Artificial Sequence: Synthetic oligonucleotide
  Antisense strand to SEQ ID NO: 2232178
aaccucaaaccauauccuu

SEQ ID NO: 2232180 - RNA, 19 nt, Artificial Sequence
  Description of Artificial Sequence: Synthetic oligonucleotide
  Sense strand starting at position 606 of SEQ ID NO: 1883997
ugguuugagguuuauaaag

SEQ ID NO: 2232181 - RNA, 19 nt, Artificial Sequence
  Description of Artificial Sequence: Synthetic oligonucleotide
  Antisense strand to SEQ ID NO: 2232180
cuuuauaaaccucaaacca

SEQ ID NO: 2232182 - RNA, 19 nt, Artificial Sequence
  Description of Artificial Sequence: Synthetic oligonucleotide
  Sense strand starting at position 639 of SEQ ID NO: 1883997
guugguugugacuaauaaa

SEQ ID NO: 2232183 - RNA, 19 nt, Artificial Sequence
  Description of Artificial Sequence: Synthetic oligonucleotide
  Antisense strand to SEQ ID NO: 2232182
uuuauuagucacaaccaac

SEQ ID NO: 2232184 - RNA, 19 nt, Artificial Sequence
  Description of Artificial Sequence: Synthetic oligonucleotide
  Sense strand starting at position 953 of SEQ ID NO: 1883997
guacucagauacucuggua

SEQ ID NO: 2232185 - RNA, 19 nt, Artificial Sequence
  Description of Artificial Sequence: Synthetic oligonucleotide
  Antisense strand to SEQ ID NO: 2232184
uaccagaguaucugaguac

SEQ ID NO: 2232186 - RNA, 19 nt, Artificial Sequence
  Description of Artificial Sequence: Synthetic oligonucleotide
  Sense strand starting at position 1060 of SEQ ID NO: 1883997
gagaccuagucauuauaug

SEQ ID NO: 2232187 - RNA, 19 nt, Artificial Sequence
  Description of Artificial Sequence: Synthetic oligonucleotide
  Antisense strand to SEQ ID NO: 2232186
cauauaaugacuaggucuc

SEQ ID NO: 2232188 - RNA, 19 nt, Artificial Sequence
  Description of Artificial Sequence: Synthetic oligonucleotide
  Sense strand starting at position 1175 of SEQ ID NO: 1883997
cugaaucuuguauguacaa

SEQ ID NO: 2232189 - RNA, 19 nt, Artificial Sequence
  Description of Artificial Sequence: Synthetic oligonucleotide
  Antisense strand to SEQ ID NO: 2232188
uuguacauacaagauucag

SEQ ID NO: 2232190 - RNA, 19 nt, Artificial Sequence
  Description of Artificial Sequence: Synthetic oligonucleotide
  Sense strand starting at position 1176 of SEQ ID NO: 1883997
ugaaucuuguauguacaau

SEQ ID NO: 2232191 - RNA, 19 nt, Artificial Sequence
  Description of Artificial Sequence: Synthetic oligonucleotide
  Antisense strand to SEQ ID NO: 2232190
auuguacauacaagauuca

SEQ ID NO: 2232192 - RNA, 19 nt, Artificial Sequence
  Description of Artificial Sequence: Synthetic oligonucleotide
  Sense strand starting at position 1645 of SEQ ID NO: 1883997
agcuuugauggcugauaaa

SEQ ID NO: 2232193 - RNA, 19 nt, Artificial Sequence
  Description of Artificial Sequence: Synthetic oligonucleotide
  Antisense strand to SEQ ID NO: 2232192
uuuaucagccaucaaagcu

SEQ ID NO: 2232194 - RNA, 19 nt, Artificial Sequence
  Description of Artificial Sequence: Synthetic oligonucleotide
  Sense strand starting at position 1657 of SEQ ID NO: 1883997
ugauaaaugcuaggugaaa

SEQ ID NO: 2232195 - RNA, 19 nt, Artificial Sequence
  Description of Artificial Sequence: Synthetic oligonucleotide
  Antisense strand to SEQ ID NO: 2232194
uuucaccuagcauuuauca

SEQ ID NO: 2232196 - RNA, 19 nt, Artificial Sequence
  Description of Artificial Sequence: Synthetic oligonucleotide
  Sense strand starting at position 1658 of SEQ ID NO: 1883997
gauaaaugcuaggugaaac

SEQ ID NO: 2232197 - RNA, 19 nt, Artificial Sequence
  Description of Artificial Sequence: Synthetic oligonucleotide
  Antisense strand to SEQ ID NO: 2232196
guuucaccuagcauuuauc

SEQ ID NO: 2232198 - RNA, 19 nt, Artificial Sequence
  Description of Artificial Sequence: Synthetic oligonucleotide
  Sense strand starting at position 1752 of SEQ ID NO: 1883997
guguauguuauagaagaug

SEQ ID NO: 2232199 - RNA, 19 nt, Artificial Sequence
  Description of Artificial Sequence: Synthetic oligonucleotide
  Antisense strand to SEQ ID NO: 2232198
caucuucuauaacauacac

SEQ ID NO: 2232200 - RNA, 19 nt, Artificial Sequence
  Description of Artificial Sequence: Synthetic oligonucleotide
  Sense strand starting at position 1768 of SEQ ID NO: 1883997
augacaguaagugguagaa

SEQ ID NO: 2232201 - RNA, 19 nt, Artificial Sequence
  Description of Artificial Sequence: Synthetic oligonucleotide
  Antisense strand to SEQ ID NO: 2232200
uucuaccacuuacugucau

SEQ ID NO: 2232202 - RNA, 19 nt, Artificial Sequence
  Description of Artificial Sequence: Synthetic oligonucleotide
  Sense strand starting at position 1831 of SEQ ID NO: 1883997
gugugucuacaauaauaca

SEQ ID NO: 2232203 - RNA, 19 nt, Artificial Sequence
  Description of Artificial Sequence: Synthetic oligonucleotide
  Antisense strand to SEQ ID NO: 2232202
uguauuauuguagacacac

SEQ ID NO: 2232204 - RNA, 19 nt, Artificial Sequence
  Description of Artificial Sequence: Synthetic oligonucleotide
  Sense strand starting at position 2044 of SEQ ID NO: 1883997
ugugaaaguucuuugacau

SEQ ID NO: 2232205 - RNA, 19 nt, Artificial Sequence
  Description of Artificial Sequence: Synthetic oligonucleotide
  Antisense strand to SEQ ID NO: 2232204
augucaaagaacuuucaca

SEQ ID NO: 2232206 - RNA, 19 nt, Artificial Sequence
  Description of Artificial Sequence: Synthetic oligonucleotide
  Sense strand starting at position 2051 of SEQ ID NO: 1883997
guucuuugacaucacaaug

SEQ ID NO: 2232207 - RNA, 19 nt, Artificial Sequence
  Description of Artificial Sequence: Synthetic oligonucleotide
  Antisense strand to SEQ ID NO: 2232206
cauugugaugucaaagaac

SEQ ID NO: 2232208 - RNA, 19 nt, Artificial Sequence
  Description of Artificial Sequence: Synthetic oligonucleotide
  Sense strand starting at position 2056 of SEQ ID NO: 1883997
uugacaucacaaugugaug

SEQ ID NO: 2232209 - RNA, 19 nt, Artificial Sequence
  Description of Artificial Sequence: Synthetic oligonucleotide
  Antisense strand to SEQ ID NO: 2232208
caucacauugugaugucaa

SEQ ID NO: 2232210 - RNA, 19 nt, Artificial Sequence
  Description of Artificial Sequence: Synthetic oligonucleotide
  Sense strand starting at position 2274 of SEQ ID NO: 1883997
acgugcugaaaggaauaua

SEQ ID NO: 2232211 - RNA, 19 nt, Artificial Sequence
  Description of Artificial Sequence: Synthetic oligonucleotide
  Antisense strand to SEQ ID NO: 2232210
uauauuccuuucagcacgu

SEQ ID NO: 2232212 - RNA, 19 nt, Artificial Sequence
  Description of Artificial Sequence: Synthetic oligonucleotide
  Sense strand starting at position 2301 of SEQ ID NO: 1883997
gggaaucuaguaugucaac

SEQ ID NO: 2232213 - RNA, 19 nt, Artificial Sequence
  Description of Artificial Sequence: Synthetic oligonucleotide
  Antisense strand to SEQ ID NO: 2232212
guugacauacuagauuccc

SEQ ID NO: 2232214 - RNA, 19 nt, Artificial Sequence
  Description of Artificial Sequence: Synthetic oligonucleotide
  Sense strand starting at position 2302 of SEQ ID NO: 1883997
ggaaucuaguaugucaaca

SEQ ID NO: 2232215 - RNA, 19 nt, Artificial Sequence
  Description of Artificial Sequence: Synthetic oligonucleotide
  Antisense strand to SEQ ID NO: 2232214
uguugacauacuagauucc

SEQ ID NO: 2232216 - RNA, 19 nt, Artificial Sequence
  Description of Artificial Sequence: Synthetic oligonucleotide
  Sense strand starting at position 2425 of SEQ ID NO: 1883997
guguguaaagcuuagagaa

SEQ ID NO: 2232217 - RNA, 19 nt, Artificial Sequence
  Description of Artificial Sequence: Synthetic oligonucleotide
  Antisense strand to SEQ ID NO: 2232216
uucucuaagcuuuacacac

SEQ ID NO: 2232218 - RNA, 19 nt, Artificial Sequence
  Description of Artificial Sequence: Synthetic oligonucleotide
  Sense strand starting at position 2498 of SEQ ID NO: 1883997
agcugugaaggucacuaua

SEQ ID NO: 2232219 - RNA, 19 nt, Artificial Sequence
  Description of Artificial Sequence: Synthetic oligonucleotide
  Antisense strand to SEQ ID NO: 2232218
uauagugaccuucacagcu

SEQ ID NO: 2232220 - RNA, 19 nt, Artificial Sequence
  Description of Artificial Sequence: Synthetic oligonucleotide
  Sense strand starting at position 2925 of SEQ ID NO: 1883997
gcaacuguggguuacauua

SEQ ID NO: 2232221 - RNA, 19 nt, Artificial Sequence
  Description of Artificial Sequence: Synthetic oligonucleotide
  Antisense strand to SEQ ID NO: 2232220
uaauguaacccacaguugc

SEQ ID NO: 2232222 - RNA, 19 nt, Artificial Sequence
  Description of Artificial Sequence: Synthetic oligonucleotide
  Sense strand starting at position 3120 of SEQ ID NO: 1883997
uuuccucuacaaggguaua

SEQ ID NO: 2232223 - RNA, 19 nt, Artificial Sequence
  Description of Artificial Sequence: Synthetic oligonucleotide
  Antisense strand to SEQ ID NO: 2232222
uauacccuuguagaggaaa

SEQ ID NO: 2232224 - RNA, 19 nt, Artificial Sequence
  Description of Artificial Sequence: Synthetic oligonucleotide
  Sense strand starting at position 3200 of SEQ ID NO: 1883997
aacaguauguuccuugaug

SEQ ID NO: 2232225 - RNA, 19 nt, Artificial Sequence
  Description of Artificial Sequence: Synthetic oligonucleotide
  Antisense strand to SEQ ID NO: 2232224
caucaaggaacauacuguu

SEQ ID NO: 2232226 - RNA, 19 nt, Artificial Sequence
  Description of Artificial Sequence: Synthetic oligonucleotide
  Sense strand starting at position 3362 of SEQ ID NO: 1883997
accugauuaucuguuacug

SEQ ID NO: 2232227 - RNA, 19 nt, Artificial Sequence
  Description of Artificial Sequence: Synthetic oligonucleotide
  Antisense strand to SEQ ID NO: 2232226
caguaacagauaaucaggu

SEQ ID NO: 2232228 - RNA, 19 nt, Artificial Sequence
  Description of Artificial Sequence: Synthetic oligonucleotide
  Sense strand starting at position 3456 of SEQ ID NO: 1883997
ugcucuucuccuuucgcaa

SEQ ID NO: 2232229 - RNA, 19 nt, Artificial Sequence
  Description of Artificial Sequence: Synthetic oligonucleotide
  Antisense strand to SEQ ID NO: 2232228
uugcgaaaggagaagagca

SEQ ID NO: 2232230 - RNA, 19 nt, Artificial Sequence
  Description of Artificial Sequence: Synthetic oligonucleotide
  Sense strand starting at position 3506 of SEQ ID NO: 1883997
gugcauauagaauacuauu

SEQ ID NO: 2232231 - RNA, 19 nt, Artificial Sequence
  Description of Artificial Sequence: Synthetic oligonucleotide
  Antisense strand to SEQ ID NO: 2232230
aauaguauucuauaugcac

SEQ ID NO: 2232232 - RNA, 19 nt, Artificial Sequence
  Description of Artificial Sequence: Synthetic oligonucleotide
  Sense strand starting at position 3605 of SEQ ID NO: 1883997
uugauauacuugucauuga

SEQ ID NO: 2232233 - RNA, 19 nt, Artificial Sequence
  Description of Artificial Sequence: Synthetic oligonucleotide
  Antisense strand to SEQ ID NO: 2232232
ucaaugacaaguauaucaa

SEQ ID NO: 2232234 - RNA, 19 nt, Artificial Sequence
  Description of Artificial Sequence: Synthetic oligonucleotide
  Sense strand starting at position 3657 of SEQ ID NO: 1883997
cuauucuauuaugugaaga

SEQ ID NO: 2232235 - RNA, 19 nt, Artificial Sequence
  Description of Artificial Sequence: Synthetic oligonucleotide
  Antisense strand to SEQ ID NO: 2232234
ucuucacauaauagaauag

SEQ ID NO: 2232236 - RNA, 19 nt, Artificial Sequence
  Description of Artificial Sequence: Synthetic oligonucleotide
  Sense strand starting at position 3673 of SEQ ID NO: 1883997
agagaccacgauugguuua

SEQ ID NO: 2232237 - RNA, 19 nt, Artificial Sequence
  Description of Artificial Sequence: Synthetic oligonucleotide
  Antisense strand to SEQ ID NO: 2232236
uaaaccaaucguggucucu

SEQ ID NO: 2232238 - RNA, 19 nt, Artificial Sequence
  Description of Artificial Sequence: Synthetic oligonucleotide
  Sense strand starting at position 3678 of SEQ ID NO: 1883997
ccacgauugguuuaucuau

SEQ ID NO: 2232239 - RNA, 19 nt, Artificial Sequence
  Description of Artificial Sequence: Synthetic oligonucleotide
  Antisense strand to SEQ ID NO: 2232238
auagauaaaccaaucgugg

SEQ ID NO: 2232240 - RNA, 19 nt, Artificial Sequence
  Description of Artificial Sequence: Synthetic oligonucleotide
  Sense strand starting at position 3815 of SEQ ID NO: 1883997
agccuuuauugacugaauu

SEQ ID NO: 2232241 - RNA, 19 nt, Artificial Sequence
  Description of Artificial Sequence: Synthetic oligonucleotide
  Antisense strand to SEQ ID NO: 2232240
aauucagucaauaaaggcu

SEQ ID NO: 2232242 - RNA, 19 nt, Artificial Sequence
  Description of Artificial Sequence: Synthetic oligonucleotide
  Sense strand starting at position 3864 of SEQ ID NO: 1883997
gagguagaauuguugagua

SEQ ID NO: 2232243 - RNA, 19 nt, Artificial Sequence
  Description of Artificial Sequence: Synthetic oligonucleotide
  Antisense strand to SEQ ID NO: 2232242
uacucaacaauucuaccuc

SEQ ID NO: 2232244 - RNA, 19 nt, Artificial Sequence
  Description of Artificial Sequence: Synthetic oligonucleotide
  Sense strand starting at position 3866 of SEQ ID NO: 1883997
gguagaauuguugaguaau

SEQ ID NO: 2232245 - RNA, 19 nt, Artificial Sequence
  Description of Artificial Sequence: Synthetic oligonucleotide
  Antisense strand to SEQ ID NO: 2232244
auuacucaacaauucuacc

SEQ ID NO: 2232246 - RNA, 19 nt, Artificial Sequence
  Description of Artificial Sequence: Synthetic oligonucleotide
  Sense strand starting at position 3869 of SEQ ID NO: 1883997
agaauuguugaguaaugua

SEQ ID NO: 2232247 - RNA, 19 nt, Artificial Sequence
  Description of Artificial Sequence: Synthetic oligonucleotide
  Antisense strand to SEQ ID NO: 2232246
uacauuacucaacaauucu

SEQ ID NO: 2232248 - RNA, 19 nt, Artificial Sequence
  Description of Artificial Sequence: Synthetic oligonucleotide
  Sense strand starting at position 197 of SEQ ID NO: 1883998
uuuacaguucuguggauga

SEQ ID NO: 2232249 - RNA, 19 nt, Artificial Sequence
  Description of Artificial Sequence: Synthetic oligonucleotide
  Antisense strand to SEQ ID NO: 2232248
ucauccacagaacuguaaa

SEQ ID NO: 2232250 - RNA, 19 nt, Artificial Sequence
  Description of Artificial Sequence: Synthetic oligonucleotide
  Sense strand starting at position 199 of SEQ ID NO: 1883998
uacaguucuguggaugaag

SEQ ID NO: 2232251 - RNA, 19 nt, Artificial Sequence
  Description of Artificial Sequence: Synthetic oligonucleotide
  Antisense strand to SEQ ID NO: 2232250
cuucauccacagaacugua

SEQ ID NO: 2232252 - RNA, 19 nt, Artificial Sequence
  Description of Artificial Sequence: Synthetic oligonucleotide
  Sense strand starting at position 329 of SEQ ID NO: 1883998
agaguuaacgcuuaaaugg

SEQ ID NO: 2232253 - RNA, 19 nt, Artificial Sequence
  Description of Artificial Sequence: Synthetic oligonucleotide
  Antisense strand to SEQ ID NO: 2232252
ccauuuaagcguuaacucu

SEQ ID NO: 2232254 - RNA, 19 nt, Artificial Sequence
  Description of Artificial Sequence: Synthetic oligonucleotide
  Sense strand starting at position 336 of SEQ ID NO: 1883998
acgcuuaaauggguuaaga

SEQ ID NO: 2232255 - RNA, 19 nt, Artificial Sequence
  Description of Artificial Sequence: Synthetic oligonucleotide
  Antisense strand to SEQ ID NO: 2232254
ucuuaacccauuuaagcgu

SEQ ID NO: 2232256 - RNA, 19 nt, Artificial Sequence
  Description of Artificial Sequence: Synthetic oligonucleotide
  Sense strand starting at position 419 of SEQ ID NO: 1883998
uggaguuuacuggguuaau

SEQ ID NO: 2232257 - RNA, 19 nt, Artificial Sequence
  Description of Artificial Sequence: Synthetic oligonucleotide
  Antisense strand to SEQ ID NO: 2232256
auuaacccaguaaacucca

SEQ ID NO: 2232258 - RNA, 19 nt, Artificial Sequence
  Description of Artificial Sequence: Synthetic oligonucleotide
  Sense strand starting at position 420 of SEQ ID NO: 1883998
ggaguuuacuggguuaauu

SEQ ID NO: 2232259 - RNA, 19 nt, Artificial Sequence
  Description of Artificial Sequence: Synthetic oligonucleotide
  Antisense strand to SEQ ID NO: 2232258
aauuaacccaguaaacucc

SEQ ID NO: 2232260 - RNA, 19 nt, Artificial Sequence
  Description of Artificial Sequence: Synthetic oligonucleotide
  Sense strand starting at position 422 of SEQ ID NO: 1883998
aguuuacuggguuaauuag

SEQ ID NO: 2232261 - RNA, 19 nt, Artificial Sequence
  Description of Artificial Sequence: Synthetic oligonucleotide
  Antisense strand to SEQ ID NO: 2232260
cuaauuaacccaguaaacu

SEQ ID NO: 2232262 - RNA, 19 nt, Artificial Sequence
  Description of Artificial Sequence: Synthetic oligonucleotide
  Sense strand starting at position 520 of SEQ ID NO: 1883998
cagauuuaaugaugaggua

SEQ ID NO: 2232263 - RNA, 19 nt, Artificial Sequence
  Description of Artificial Sequence: Synthetic oligonucleotide
  Antisense strand to SEQ ID NO: 2232262
uaccucaucauuaaaucug

SEQ ID NO: 2232264 - RNA, 19 nt, Artificial Sequence
  Description of Artificial Sequence: Synthetic oligonucleotide
  Sense strand starting at position 969 of SEQ ID NO: 1883998
gucagaaagcuuuauggug

SEQ ID NO: 2232265 - RNA, 19 nt, Artificial Sequence
  Description of Artificial Sequence: Synthetic oligonucleotide
  Antisense strand to SEQ ID NO: 2232264
caccauaaagcuuucugac

SEQ ID NO: 2232266 - RNA, 19 nt, Artificial Sequence
  Description of Artificial Sequence: Synthetic oligonucleotide
  Sense strand starting at position 985 of SEQ ID NO: 1883998
gugccagaucaauauacaa

SEQ ID NO: 2232267 - RNA, 19 nt, Artificial Sequence
  Description of Artificial Sequence: Synthetic oligonucleotide
  Antisense strand to SEQ ID NO: 2232266
uuguauauugaucuggcac

SEQ ID NO: 2232268 - RNA, 19 nt, Artificial Sequence
  Description of Artificial Sequence: Synthetic oligonucleotide
  Sense strand starting at position 1332 of SEQ ID NO: 1883998
uauuaagaguuagccuaag

SEQ ID NO: 2232269 - RNA, 19 nt, Artificial Sequence
  Description of Artificial Sequence: Synthetic oligonucleotide
  Antisense strand to SEQ ID NO: 2232268
cuuaggcuaacucuuaaua

SEQ ID NO: 2232270 - RNA, 19 nt, Artificial Sequence
  Description of Artificial Sequence: Synthetic oligonucleotide
  Sense strand starting at position 1355 of SEQ ID NO: 1883998
ccgggacucaaugguauca

SEQ ID NO: 2232271 - RNA, 19 nt, Artificial Sequence
  Description of Artificial Sequence: Synthetic oligonucleotide
  Antisense strand to SEQ ID NO: 2232270
ugauaccauugagucccgg

SEQ ID NO: 2232272 - RNA, 19 nt, Artificial Sequence
  Description of Artificial Sequence: Synthetic oligonucleotide
  Sense strand starting at position 1480 of SEQ ID NO: 1883998
uuuaaauccuuguuuagag

SEQ ID NO: 2232273 - RNA, 19 nt, Artificial Sequence
  Description of Artificial Sequence: Synthetic oligonucleotide
  Antisense strand to SEQ ID NO: 2232272
cucuaaacaaggauuuaaa

SEQ ID NO: 2232274 - RNA, 19 nt, Artificial Sequence
  Description of Artificial Sequence: Synthetic oligonucleotide
  Sense strand starting at position 1523 of SEQ ID NO: 1883998
ugugaagcuccauaaucau

SEQ ID NO: 2232275 - RNA, 19 nt, Artificial Sequence
  Description of Artificial Sequence: Synthetic oligonucleotide
  Antisense strand to SEQ ID NO: 2232274
augauuauggagcuucaca

SEQ ID NO: 2232276 - RNA, 19 nt, Artificial Sequence
  Description of Artificial Sequence: Synthetic oligonucleotide
  Sense strand starting at position 1549 of SEQ ID NO: 1883998
uguuaagugguugaggaaa

SEQ ID NO: 2232277 - RNA, 19 nt, Artificial Sequence
  Description of Artificial Sequence: Synthetic oligonucleotide
  Antisense strand to SEQ ID NO: 2232276
uuuccucaaccacuuaaca

SEQ ID NO: 2232278 - RNA, 19 nt, Artificial Sequence
  Description of Artificial Sequence: Synthetic oligonucleotide
  Sense strand starting at position 1566 of SEQ ID NO: 1883998
aaauaucaggcuggugaga

SEQ ID NO: 2232279 - RNA, 19 nt, Artificial Sequence
  Description of Artificial Sequence: Synthetic oligonucleotide
  Antisense strand to SEQ ID NO: 2232278
ucucaccagccugauauuu

SEQ ID NO: 2232280 - RNA, 19 nt, Artificial Sequence
  Description of Artificial Sequence: Synthetic oligonucleotide
  Sense strand starting at position 1579 of SEQ ID NO: 1883998
gugagauguuaauuauagg

SEQ ID NO: 2232281 - RNA, 19 nt, Artificial Sequence
  Description of Artificial Sequence: Synthetic oligonucleotide
  Antisense strand to SEQ ID NO: 2232280
ccuauaauuaacaucucac

SEQ ID NO: 2232282 - RNA, 19 nt, Artificial Sequence
  Description of Artificial Sequence: Synthetic oligonucleotide
  Sense strand starting at position 1634 of SEQ ID NO: 1883998
guccaaaguucuguaaaca

SEQ ID NO: 2232283 - RNA, 19 nt, Artificial Sequence
  Description of Artificial Sequence: Synthetic oligonucleotide
  Antisense strand to SEQ ID NO: 2232282
uguuuacagaacuuuggac

SEQ ID NO: 2232284 - RNA, 19 nt, Artificial Sequence
  Description of Artificial Sequence: Synthetic oligonucleotide
  Sense strand starting at position 1925 of SEQ ID NO: 1883998
gucaauauaguauggauau

SEQ ID NO: 2232285 - RNA, 19 nt, Artificial Sequence
  Description of Artificial Sequence: Synthetic oligonucleotide
  Antisense strand to SEQ ID NO: 2232284
auauccauacuauauugac

SEQ ID NO: 2232286 - RNA, 19 nt, Artificial Sequence
  Description of Artificial Sequence: Synthetic oligonucleotide
  Sense strand starting at position 2041 of SEQ ID NO: 1883998
gaauguagauacuuaaugu

SEQ ID NO: 2232287 - RNA, 19 nt, Artificial Sequence
  Description of Artificial Sequence: Synthetic oligonucleotide
  Antisense strand to SEQ ID NO: 2232286
acauuaaguaucuacauuc

SEQ ID NO: 2232288 - RNA, 19 nt, Artificial Sequence
  Description of Artificial Sequence: Synthetic oligonucleotide
  Sense strand starting at position 2070 of SEQ ID NO: 1883998
ggaaaucugaaugguacga

SEQ ID NO: 2232289 - RNA, 19 nt, Artificial Sequence
  Description of Artificial Sequence: Synthetic oligonucleotide
  Antisense strand to SEQ ID NO: 2232288
ucguaccauucagauuucc

SEQ ID NO: 2232290 - RNA, 19 nt, Artificial Sequence
  Description of Artificial Sequence: Synthetic oligonucleotide
  Sense strand starting at position 2074 of SEQ ID NO: 1883998
aucugaaugguacgaaaca

SEQ ID NO: 2232291 - RNA, 19 nt, Artificial Sequence
  Description of Artificial Sequence: Synthetic oligonucleotide
  Antisense strand to SEQ ID NO: 2232290
uguuucguaccauucagau

SEQ ID NO: 2232292 - RNA, 19 nt, Artificial Sequence
  Description of Artificial Sequence: Synthetic oligonucleotide
  Sense strand starting at position 2144 of SEQ ID NO: 1883998
ggaagugaauguuccugaa

SEQ ID NO: 2232293 - RNA, 19 nt, Artificial Sequence
  Description of Artificial Sequence: Synthetic oligonucleotide
  Antisense strand to SEQ ID NO: 2232292
uucaggaacauucacuucc

SEQ ID NO: 2232294 - RNA, 19 nt, Artificial Sequence
  Description of Artificial Sequence: Synthetic oligonucleotide
  Sense strand starting at position 2146 of SEQ ID NO: 1883998
aagugaauguuccugaagu

SEQ ID NO: 2232295 - RNA, 19 nt, Artificial Sequence
  Description of Artificial Sequence: Synthetic oligonucleotide
  Antisense strand to SEQ ID NO: 2232294
acuucaggaacauucacuu

SEQ ID NO: 2232296 - RNA, 19 nt, Artificial Sequence
  Description of Artificial Sequence: Synthetic oligonucleotide
  Sense strand starting at position 2148 of SEQ ID NO: 1883998
gugaauguuccugaaguag

SEQ ID NO: 2232297 - RNA, 19 nt, Artificial Sequence
  Description of Artificial Sequence: Synthetic oligonucleotide
  Antisense strand to SEQ ID NO: 2232296
cuacuucaggaacauucac

SEQ ID NO: 2232298 - RNA, 19 nt, Artificial Sequence
  Description of Artificial Sequence: Synthetic oligonucleotide
  Sense strand starting at position 2227 of SEQ ID NO: 1883998
gcaagucugccacagauga

SEQ ID NO: 2232299 - RNA, 19 nt, Artificial Sequence
  Description of Artificial Sequence: Synthetic oligonucleotide
  Antisense strand to SEQ ID NO: 2232298
ucaucuguggcagacuugc

SEQ ID NO: 2232300 - RNA, 19 nt, Artificial Sequence
  Description of Artificial Sequence: Synthetic oligonucleotide
  Sense strand starting at position 2255 of SEQ ID NO: 1883998
guggaauucuuacucaaac

SEQ ID NO: 2232301 - RNA, 19 nt, Artificial Sequence
  Description of Artificial Sequence: Synthetic oligonucleotide
  Antisense strand to SEQ ID NO: 2232300
guuugaguaagaauuccac

SEQ ID NO: 2232302 - RNA, 19 nt, Artificial Sequence
  Description of Artificial Sequence: Synthetic oligonucleotide
  Sense strand starting at position 2389 of SEQ ID NO: 1883998
aacgacucuccacgagaau

SEQ ID NO: 2232303 - RNA, 19 nt, Artificial Sequence
  Description of Artificial Sequence: Synthetic oligonucleotide
  Antisense strand to SEQ ID NO: 2232302
auucucguggagagucguu

SEQ ID NO: 2232304 - RNA, 19 nt, Artificial Sequence
  Description of Artificial Sequence: Synthetic oligonucleotide
  Sense strand starting at position 2611 of SEQ ID NO: 1883998
uguuaugauaacggaacua

SEQ ID NO: 2232305 - RNA, 19 nt, Artificial Sequence
  Description of Artificial Sequence: Synthetic oligonucleotide
  Antisense strand to SEQ ID NO: 2232304
uaguuccguuaucauaaca

SEQ ID NO: 2232306 - RNA, 19 nt, Artificial Sequence
  Description of Artificial Sequence: Synthetic oligonucleotide
  Sense strand starting at position 2638 of SEQ ID NO: 1883998
ccaggauggagacguuaca

SEQ ID NO: 2232307 - RNA, 19 nt, Artificial Sequence
  Description of Artificial Sequence: Synthetic oligonucleotide
  Antisense strand to SEQ ID NO: 2232306
uguaacgucuccauccugg

SEQ ID NO: 2232308 - RNA, 19 nt, Artificial Sequence
  Description of Artificial Sequence: Synthetic oligonucleotide
  Sense strand starting at position 2771 of SEQ ID NO: 1883998
agggcaggaagcuguaaau

SEQ ID NO: 2232309 - RNA, 19 nt, Artificial Sequence
  Description of Artificial Sequence: Synthetic oligonucleotide
  Antisense strand to SEQ ID NO: 2232308
auuuacagcuuccugcccu

SEQ ID NO: 2232310 - RNA, 19 nt, Artificial Sequence
  Description of Artificial Sequence: Synthetic oligonucleotide
  Sense strand starting at position 2797 of SEQ ID NO: 1883998
auggcucacguggauuaaa

SEQ ID NO: 2232311 - RNA, 19 nt, Artificial Sequence
  Description of Artificial Sequence: Synthetic oligonucleotide
  Antisense strand to SEQ ID NO: 2232310
uuuaauccacgugagccau

SEQ ID NO: 2232312 - RNA, 19 nt, Artificial Sequence
  Description of Artificial Sequence: Synthetic oligonucleotide
  Sense strand starting at position 2816 of SEQ ID NO: 1883998
cuccuaugguuccuagaga

SEQ ID NO: 2232313 - RNA, 19 nt, Artificial Sequence
  Description of Artificial Sequence: Synthetic oligonucleotide
  Antisense strand to SEQ ID NO: 2232312
ucucuaggaaccauaggag

SEQ ID NO: 2232314 - RNA, 19 nt, Artificial Sequence
  Description of Artificial Sequence: Synthetic oligonucleotide
  Sense strand starting at position 2953 of SEQ ID NO: 1883998
aaagauaaaucagucgucu

SEQ ID NO: 2232315 - RNA, 19 nt, Artificial Sequence
  Description of Artificial Sequence: Synthetic oligonucleotide
  Antisense strand to SEQ ID NO: 2232314
agacgacugauuuaucuuu

SEQ ID NO: 2232316 - RNA, 19 nt, Artificial Sequence
  Description of Artificial Sequence: Synthetic oligonucleotide
  Sense strand starting at position 3165 of SEQ ID NO: 1883998
cagauucuacuggguauga

SEQ ID NO: 2232317 - RNA, 19 nt, Artificial Sequence
  Description of Artificial Sequence: Synthetic oligonucleotide
  Antisense strand to SEQ ID NO: 2232316
ucauacccaguagaaucug

SEQ ID NO: 2232318 - RNA, 19 nt, Artificial Sequence
  Description of Artificial Sequence: Synthetic oligonucleotide
  Sense strand starting at position 3166 of SEQ ID NO: 1883998
agauucuacuggguaugaa

SEQ ID NO: 2232319 - RNA, 19 nt, Artificial Sequence
  Description of Artificial Sequence: Synthetic oligonucleotide
  Antisense strand to SEQ ID NO: 2232318
uucauacccaguagaaucu

SEQ ID NO: 2232320 - RNA, 19 nt, Artificial Sequence
  Description of Artificial Sequence: Synthetic oligonucleotide
  Sense strand starting at position 3169 of SEQ ID NO: 1883998
uucuacuggguaugaaaca

SEQ ID NO: 2232321 - RNA, 19 nt, Artificial Sequence
  Description of Artificial Sequence: Synthetic oligonucleotide
  Antisense strand to SEQ ID NO: 2232320
uguuucauacccaguagaa

SEQ ID NO: 2232322 - RNA, 19 nt, Artificial Sequence
  Description of Artificial Sequence: Synthetic oligonucleotide
  Sense strand starting at position 3598 of SEQ ID NO: 1883998
gcaauuuguucuuugcuca

SEQ ID NO: 2232323 - RNA, 19 nt, Artificial Sequence
  Description of Artificial Sequence: Synthetic oligonucleotide
  Antisense strand to SEQ ID NO: 2232322
ugagcaaagaacaaauugc

SEQ ID NO: 2232324 - RNA, 19 nt, Artificial Sequence
  Description of Artificial Sequence: Synthetic oligonucleotide
  Sense strand starting at position 3964 of SEQ ID NO: 1883998
gcuuguuuccuugcuuagu

SEQ ID NO: 2232325 - RNA, 19 nt, Artificial Sequence
  Description of Artificial Sequence: Synthetic oligonucleotide
  Antisense strand to SEQ ID NO: 2232324
acuaagcaaggaaacaagc

SEQ ID NO: 2232326 - RNA, 19 nt, Artificial Sequence
  Description of Artificial Sequence: Synthetic oligonucleotide
  Sense strand starting at position 3983 of SEQ ID NO: 1883998
auucucugauagccaaaga

SEQ ID NO: 2232327 - RNA, 19 nt, Artificial Sequence
  Description of Artificial Sequence: Synthetic oligonucleotide
  Antisense strand to SEQ ID NO: 2232326
ucuuuggcuaucagagaau

SEQ ID NO: 2232328 - RNA, 19 nt, Artificial Sequence
  Description of Artificial Sequence: Synthetic oligonucleotide
  Sense strand starting at position 111 of SEQ ID NO: 1883999
gcaagaaauguagguggaa

SEQ ID NO: 2232329 - RNA, 19 nt, Artificial Sequence
  Description of Artificial Sequence: Synthetic oligonucleotide
  Antisense strand to SEQ ID NO: 2232328
uuccaccuacauuucuugc

SEQ ID NO: 2232330 - RNA, 19 nt, Artificial Sequence
  Description of Artificial Sequence: Synthetic oligonucleotide
  Sense strand starting at position 225 of SEQ ID NO: 1883999
acaauauaagagcgcuuau

SEQ ID NO: 2232331 - RNA, 19 nt, Artificial Sequence
  Description of Artificial Sequence: Synthetic oligonucleotide
  Antisense strand to SEQ ID NO: 2232330
auaagcgcucuuauauugu

SEQ ID NO: 2232332 - RNA, 19 nt, Artificial Sequence
  Description of Artificial Sequence: Synthetic oligonucleotide
  Sense strand starting at position 236 of SEQ ID NO: 1883999
gcgcuuauagaauacggau

SEQ ID NO: 2232333 - RNA, 19 nt, Artificial Sequence
  Description of Artificial Sequence: Synthetic oligonucleotide
  Antisense strand to SEQ ID NO: 2232332
auccguauucuauaagcgc

SEQ ID NO: 2232334 - RNA, 19 nt, Artificial Sequence
  Description of Artificial Sequence: Synthetic oligonucleotide
  Sense strand starting at position 305 of SEQ ID NO: 1883999
aguggaguguaauuacaag

SEQ ID NO: 2232335 - RNA, 19 nt, Artificial Sequence
  Description of Artificial Sequence: Synthetic oligonucleotide
  Antisense strand to SEQ ID NO: 2232334
cuuguaauuacacuccacu

SEQ ID NO: 2232336 - RNA, 19 nt, Artificial Sequence
  Description of Artificial Sequence: Synthetic oligonucleotide
  Sense strand starting at position 311 of SEQ ID NO: 1883999
guguaauuacaagagucag

SEQ ID NO: 2232337 - RNA, 19 nt, Artificial Sequence
  Description of Artificial Sequence: Synthetic oligonucleotide
  Antisense strand to SEQ ID NO: 2232336
cugacucuuguaauuacac

SEQ ID NO: 2232338 - RNA, 19 nt, Artificial Sequence
  Description of Artificial Sequence: Synthetic oligonucleotide
  Sense strand starting at position 557 of SEQ ID NO: 1883999
gugaguguccuacacaggu

SEQ ID NO: 2232339 - RNA, 19 nt, Artificial Sequence
  Description of Artificial Sequence: Synthetic oligonucleotide
  Antisense strand to SEQ ID NO: 2232338
accuguguaggacacucac

SEQ ID NO: 2232340 - RNA, 19 nt, Artificial Sequence
  Description of Artificial Sequence: Synthetic oligonucleotide
  Sense strand starting at position 1120 of SEQ ID NO: 1883999
gaaaucucguugccaauuu

SEQ ID NO: 2232341 - RNA, 19 nt, Artificial Sequence
  Description of Artificial Sequence: Synthetic oligonucleotide
  Antisense strand to SEQ ID NO: 2232340
aaauuggcaacgagauuuc

SEQ ID NO: 2232342 - RNA, 19 nt, Artificial Sequence
  Description of Artificial Sequence: Synthetic oligonucleotide
  Sense strand starting at position 1129 of SEQ ID NO: 1883999
uugccaauuuguguuucua

SEQ ID NO: 2232343 - RNA, 19 nt, Artificial Sequence
  Description of Artificial Sequence: Synthetic oligonucleotide
  Antisense strand to SEQ ID NO: 2232342
uagaaacacaaauuggcaa

SEQ ID NO: 2232344 - RNA, 19 nt, Artificial Sequence
  Description of Artificial Sequence: Synthetic oligonucleotide
  Sense strand starting at position 1175 of SEQ ID NO: 1883999
uuauuacuauagcugugau

SEQ ID NO: 2232345 - RNA, 19 nt, Artificial Sequence
  Description of Artificial Sequence: Synthetic oligonucleotide
  Antisense strand to SEQ ID NO: 2232344
aucacagcuauaguaauaa

SEQ ID NO: 2232346 - RNA, 19 nt, Artificial Sequence
  Description of Artificial Sequence: Synthetic oligonucleotide
  Sense strand starting at position 1187 of SEQ ID NO: 1883999
cugugaucacgucauguaa

SEQ ID NO: 2232347 - RNA, 19 nt, Artificial Sequence
  Description of Artificial Sequence: Synthetic oligonucleotide
  Antisense strand to SEQ ID NO: 2232346
uuacaugacgugaucacag

SEQ ID NO: 2232348 - RNA, 19 nt, Artificial Sequence
  Description of Artificial Sequence: Synthetic oligonucleotide
  Sense strand starting at position 1214 of SEQ ID NO: 1883999
ugaugauguuucucacagu

SEQ ID NO: 2232349 - RNA, 19 nt, Artificial Sequence
  Description of Artificial Sequence: Synthetic oligonucleotide
  Antisense strand to SEQ ID NO: 2232348
acugugagaaacaucauca

SEQ ID NO: 2232350 - RNA, 19 nt, Artificial Sequence
  Description of Artificial Sequence: Synthetic oligonucleotide
  Sense strand starting at position 1220 of SEQ ID NO: 1883999
uguuucucacaguauaguu

SEQ ID NO: 2232351 - RNA, 19 nt, Artificial Sequence
  Description of Artificial Sequence: Synthetic oligonucleotide
  Antisense strand to SEQ ID NO: 2232350
aacuauacugugagaaaca

SEQ ID NO: 2232352 - RNA, 19 nt, Artificial Sequence
  Description of Artificial Sequence: Synthetic oligonucleotide
  Sense strand starting at position 1243 of SEQ ID NO: 1883999
gguauccagccucagauua

SEQ ID NO: 2232353 - RNA, 19 nt, Artificial Sequence
  Description of Artificial Sequence: Synthetic oligonucleotide
  Antisense strand to SEQ ID NO: 2232352
uaaucugaggcuggauacc

SEQ ID NO: 2232354 - RNA, 19 nt, Artificial Sequence
  Description of Artificial Sequence: Synthetic oligonucleotide
  Sense strand starting at position 1251 of SEQ ID NO: 1883999
gccucagauuaucugagga

SEQ ID NO: 2232355 - RNA, 19 nt, Artificial Sequence
  Description of Artificial Sequence: Synthetic oligonucleotide
  Antisense strand to SEQ ID NO: 2232354
uccucagauaaucugaggc

SEQ ID NO: 2232356 - RNA, 19 nt, Artificial Sequence
  Description of Artificial Sequence: Synthetic oligonucleotide
  Sense strand starting at position 1301 of SEQ ID NO: 1883999
gcaagcuucccaggagauu

SEQ ID NO: 2232357 - RNA, 19 nt, Artificial Sequence
  Description of Artificial Sequence: Synthetic oligonucleotide
  Antisense strand to SEQ ID NO: 2232356
aaucuccugggaagcuugc

SEQ ID NO: 2232358 - RNA, 19 nt, Artificial Sequence
  Description of Artificial Sequence: Synthetic oligonucleotide
  Sense strand starting at position 1452 of SEQ ID NO: 1883999
cagguauguucugcauuua

SEQ ID NO: 2232359 - RNA, 19 nt, Artificial Sequence
  Description of Artificial Sequence: Synthetic oligonucleotide
  Antisense strand to SEQ ID NO: 2232358
uaaaugcagaacauaccug

SEQ ID NO: 2232360 - RNA, 19 nt, Artificial Sequence
  Description of Artificial Sequence: Synthetic oligonucleotide
  Sense strand starting at position 2157 of SEQ ID NO: 1883999
uugagaugucgaagcacgu

SEQ ID NO: 2232361 - RNA, 19 nt, Artificial Sequence
  Description of Artificial Sequence: Synthetic oligonucleotide
  Antisense strand to SEQ ID NO: 2232360
acgugcuucgacaucucaa

SEQ ID NO: 2232362 - RNA, 19 nt, Artificial Sequence
  Description of Artificial Sequence: Synthetic oligonucleotide
  Sense strand starting at position 2406 of SEQ ID NO: 1883999
gggagugcuagguauugaa

SEQ ID NO: 2232363 - RNA, 19 nt, Artificial Sequence
  Description of Artificial Sequence: Synthetic oligonucleotide
  Antisense strand to SEQ ID NO: 2232362
uucaauaccuagcacuccc

SEQ ID NO: 2232364 - RNA, 19 nt, Artificial Sequence
  Description of Artificial Sequence: Synthetic oligonucleotide
  Sense strand starting at position 2491 of SEQ ID NO: 1883999
gaaugagggcucuguucuc

SEQ ID NO: 2232365 - RNA, 19 nt, Artificial Sequence
  Description of Artificial Sequence: Synthetic oligonucleotide
  Antisense strand to SEQ ID NO: 2232364
gagaacagagcccucauuc

SEQ ID NO: 2232366 - RNA, 19 nt, Artificial Sequence
  Description of Artificial Sequence: Synthetic oligonucleotide
  Sense strand starting at position 2500 of SEQ ID NO: 1883999
cucuguucucaugacggga

SEQ ID NO: 2232367 - RNA, 19 nt, Artificial Sequence
  Description of Artificial Sequence: Synthetic oligonucleotide
  Antisense strand to SEQ ID NO: 2232366
ucccgucaugagaacagag

SEQ ID NO: 2232368 - RNA, 19 nt, Artificial Sequence
  Description of Artificial Sequence: Synthetic oligonucleotide
  Sense strand starting at position 2504 of SEQ ID NO: 1883999
guucucaugacgggaugaa

SEQ ID NO: 2232369 - RNA, 19 nt, Artificial Sequence
  Description of Artificial Sequence: Synthetic oligonucleotide
  Antisense strand to SEQ ID NO: 2232368
uucaucccgucaugagaac

SEQ ID NO: 2232370 - RNA, 19 nt, Artificial Sequence
  Description of Artificial Sequence: Synthetic oligonucleotide
  Sense strand starting at position 2684 of SEQ ID NO: 1883999
ccucuagaacuaugagcua

SEQ ID NO: 2232371 - RNA, 19 nt, Artificial Sequence
  Description of Artificial Sequence: Synthetic oligonucleotide
  Antisense strand to SEQ ID NO: 2232370
uagcucauaguucuagagg

SEQ ID NO: 2232372 - RNA, 19 nt, Artificial Sequence
  Description of Artificial Sequence: Synthetic oligonucleotide
  Sense strand starting at position 2687 of SEQ ID NO: 1883999
cuagaacuaugagcuaaau

SEQ ID NO: 2232373 - RNA, 19 nt, Artificial Sequence
  Description of Artificial Sequence: Synthetic oligonucleotide
  Antisense strand to SEQ ID NO: 2232372
auuuagcucauaguucuag

SEQ ID NO: 2232374 - RNA, 19 nt, Artificial Sequence
  Description of Artificial Sequence: Synthetic oligonucleotide
  Sense strand starting at position 2761 of SEQ ID NO: 1883999
gcaauaagaccgggagguu

SEQ ID NO: 2232375 - RNA, 19 nt, Artificial Sequence
  Description of Artificial Sequence: Synthetic oligonucleotide
  Antisense strand to SEQ ID NO: 2232374
aaccucccggucuuauugc

SEQ ID NO: 2232376 - RNA, 19 nt, Artificial Sequence
  Description of Artificial Sequence: Synthetic oligonucleotide
  Sense strand starting at position 2836 of SEQ ID NO: 1883999
ccuagauacugccuuggaa

SEQ ID NO: 2232377 - RNA, 19 nt, Artificial Sequence
  Description of Artificial Sequence: Synthetic oligonucleotide
  Antisense strand to SEQ ID NO: 2232376
uuccaaggcaguaucuagg

SEQ ID NO: 2232378 - RNA, 19 nt, Artificial Sequence
  Description of Artificial Sequence: Synthetic oligonucleotide
  Sense strand starting at position 2838 of SEQ ID NO: 1883999
uagauacugccuuggaaug

SEQ ID NO: 2232379 - RNA, 19 nt, Artificial Sequence
  Description of Artificial Sequence: Synthetic oligonucleotide
  Antisense strand to SEQ ID NO: 2232378
cauuccaaggcaguaucua

SEQ ID NO: 2232380 - RNA, 19 nt, Artificial Sequence
  Description of Artificial Sequence: Synthetic oligonucleotide
  Sense strand starting at position 2839 of SEQ ID NO: 1883999
agauacugccuuggaaugu

SEQ ID NO: 2232381 - RNA, 19 nt, Artificial Sequence
  Description of Artificial Sequence: Synthetic oligonucleotide
  Antisense strand to SEQ ID NO: 2232380
acauuccaaggcaguaucu

SEQ ID NO: 2232382 - RNA, 19 nt, Artificial Sequence
  Description of Artificial Sequence: Synthetic oligonucleotide
  Sense strand starting at position 2849 of SEQ ID NO: 1883999
uuggaauguuacucuugga

SEQ ID NO: 2232383 - RNA, 19 nt, Artificial Sequence
  Description of Artificial Sequence: Synthetic oligonucleotide
  Antisense strand to SEQ ID NO: 2232382
uccaagaguaacauuccaa

SEQ ID NO: 2232384 - RNA, 19 nt, Artificial Sequence
  Description of Artificial Sequence: Synthetic oligonucleotide
  Sense strand starting at position 2978 of SEQ ID NO: 1883999
gggagcaaggaguauaguu

SEQ ID NO: 2232385 - RNA, 19 nt, Artificial Sequence
  Description of Artificial Sequence: Synthetic oligonucleotide
  Antisense strand to SEQ ID NO: 2232384
aacuauacuccuugcuccc

SEQ ID NO: 2232386 - RNA, 19 nt, Artificial Sequence
  Description of Artificial Sequence: Synthetic oligonucleotide
  Sense strand starting at position 3074 of SEQ ID NO: 1883999
uaauuaucgggccaguuaa

SEQ ID NO: 2232387 - RNA, 19 nt, Artificial Sequence
  Description of Artificial Sequence: Synthetic oligonucleotide
  Antisense strand to SEQ ID NO: 2232386
uuaacuggcccgauaauua

SEQ ID NO: 2232388 - RNA, 19 nt, Artificial Sequence
  Description of Artificial Sequence: Synthetic oligonucleotide
  Sense strand starting at position 3124 of SEQ ID NO: 1883999
ucagauuuguccuagggau

SEQ ID NO: 2232389 - RNA, 19 nt, Artificial Sequence
  Description of Artificial Sequence: Synthetic oligonucleotide
  Antisense strand to SEQ ID NO: 2232388
aucccuaggacaaaucuga

SEQ ID NO: 2232390 - RNA, 19 nt, Artificial Sequence
  Description of Artificial Sequence: Synthetic oligonucleotide
  Sense strand starting at position 3204 of SEQ ID NO: 1883999
ucaauauuccugggaaguu

SEQ ID NO: 2232391 - RNA, 19 nt, Artificial Sequence
  Description of Artificial Sequence: Synthetic oligonucleotide
  Antisense strand to SEQ ID NO: 2232390
aacuucccaggaauauuga

SEQ ID NO: 2232392 - RNA, 19 nt, Artificial Sequence
  Description of Artificial Sequence: Synthetic oligonucleotide
  Sense strand starting at position 3345 of SEQ ID NO: 1883999
ucuuuaggucugugaagga

SEQ ID NO: 2232393 - RNA, 19 nt, Artificial Sequence
  Description of Artificial Sequence: Synthetic oligonucleotide
  Antisense strand to SEQ ID NO: 2232392
uccuucacagaccuaaaga

SEQ ID NO: 2232394 - RNA, 19 nt, Artificial Sequence
  Description of Artificial Sequence: Synthetic oligonucleotide
  Sense strand starting at position 3349 of SEQ ID NO: 1883999
uaggucugugaaggagaaa

SEQ ID NO: 2232395 - RNA, 19 nt, Artificial Sequence
  Description of Artificial Sequence: Synthetic oligonucleotide
  Antisense strand to SEQ ID NO: 2232394
uuucuccuucacagaccua

SEQ ID NO: 2232396 - RNA, 19 nt, Artificial Sequence
  Description of Artificial Sequence: Synthetic oligonucleotide
  Sense strand starting at position 3445 of SEQ ID NO: 1883999
gaaacacuugaccgaaugu

SEQ ID NO: 2232397 - RNA, 19 nt, Artificial Sequence
  Description of Artificial Sequence: Synthetic oligonucleotide
  Antisense strand to SEQ ID NO: 2232396
acauucggucaaguguuuc

SEQ ID NO: 2232398 - RNA, 19 nt, Artificial Sequence
  Description of Artificial Sequence: Synthetic oligonucleotide
  Sense strand starting at position 3503 of SEQ ID NO: 1883999
acagauugacagugcauau

SEQ ID NO: 2232399 - RNA, 19 nt, Artificial Sequence
  Description of Artificial Sequence: Synthetic oligonucleotide
  Antisense strand to SEQ ID NO: 2232398
auaugcacugucaaucugu

SEQ ID NO: 2232400 - RNA, 19 nt, Artificial Sequence
  Description of Artificial Sequence: Synthetic oligonucleotide
  Sense strand starting at position 3748 of SEQ ID NO: 1883999
ggucauaaacuggagcgua

SEQ ID NO: 2232401 - RNA, 19 nt, Artificial Sequence
  Description of Artificial Sequence: Synthetic oligonucleotide
  Antisense strand to SEQ ID NO: 2232400
uacgcuccaguuuaugacc

SEQ ID NO: 2232402 - RNA, 19 nt, Artificial Sequence
  Description of Artificial Sequence: Synthetic oligonucleotide
  Sense strand starting at position 3751 of SEQ ID NO: 1883999
cauaaacuggagcguauua

SEQ ID NO: 2232403 - RNA, 19 nt, Artificial Sequence
  Description of Artificial Sequence: Synthetic oligonucleotide
  Antisense strand to SEQ ID NO: 2232402
uaauacgcuccaguuuaug

SEQ ID NO: 2232404 - RNA, 19 nt, Artificial Sequence
  Description of Artificial Sequence: Synthetic oligonucleotide
  Sense strand starting at position 3753 of SEQ ID NO: 1883999
uaaacuggagcguauuauu

SEQ ID NO: 2232405 - RNA, 19 nt, Artificial Sequence
  Description of Artificial Sequence: Synthetic oligonucleotide
  Antisense strand to SEQ ID NO: 2232404
aauaauacgcuccaguuua

SEQ ID NO: 2232406 - RNA, 19 nt, Artificial Sequence
  Description of Artificial Sequence: Synthetic oligonucleotide
  Sense strand starting at position 3811 of SEQ ID NO: 1883999
gucuuagucucucuaacaa

SEQ ID NO: 2232407 - RNA, 19 nt, Artificial Sequence
  Description of Artificial Sequence: Synthetic oligonucleotide
  Antisense strand to SEQ ID NO: 2232406
uuguuagagagacuaagac

SEQ ID NO: 2232408 - RNA, 19 nt, Artificial Sequence
  Description of Artificial Sequence: Synthetic oligonucleotide
  Sense strand starting at position 535 of SEQ ID NO: 1884000
gagacugggucguuuagaa

SEQ ID NO: 2232409 - RNA, 19 nt, Artificial Sequence
  Description of Artificial Sequence: Synthetic oligonucleotide
  Antisense strand to SEQ ID NO: 2232408
uucuaaacgacccagucuc

SEQ ID NO: 2232410 - RNA, 19 nt, Artificial Sequence
  Description of Artificial Sequence: Synthetic oligonucleotide
  Sense strand starting at position 724 of SEQ ID NO: 1884000
ccuacucuugagggaacua

SEQ ID NO: 2232411 - RNA, 19 nt, Artificial Sequence
  Description of Artificial Sequence: Synthetic oligonucleotide
  Antisense strand to SEQ ID NO: 2232410
uaguucccucaagaguagg

SEQ ID NO: 2232412 - RNA, 19 nt, Artificial Sequence
  Description of Artificial Sequence: Synthetic oligonucleotide
  Sense strand starting at position 765 of SEQ ID NO: 1884000
ccagucuugcaagaguaag

SEQ ID NO: 2232413 - RNA, 19 nt, Artificial Sequence
  Description of Artificial Sequence: Synthetic oligonucleotide
  Antisense strand to SEQ ID NO: 2232412
cuuacucuugcaagacugg

SEQ ID NO: 2232414 - RNA, 19 nt, Artificial Sequence
  Description of Artificial Sequence: Synthetic oligonucleotide
  Sense strand starting at position 976 of SEQ ID NO: 1884000
ggauauacaugacuuuguu

SEQ ID NO: 2232415 - RNA, 19 nt, Artificial Sequence
  Description of Artificial Sequence: Synthetic oligonucleotide
  Antisense strand to SEQ ID NO: 2232414
aacaaagucauguauaucc

SEQ ID NO: 2232416 - RNA, 19 nt, Artificial Sequence
  Description of Artificial Sequence: Synthetic oligonucleotide
  Sense strand starting at position 1024 of SEQ ID NO: 1884000
aacgaugcucuugagucua

SEQ ID NO: 2232417 - RNA, 19 nt, Artificial Sequence
  Description of Artificial Sequence: Synthetic oligonucleotide
  Antisense strand to SEQ ID NO: 2232416
uagacucaagagcaucguu

SEQ ID NO: 2232418 - RNA, 19 nt, Artificial Sequence
  Description of Artificial Sequence: Synthetic oligonucleotide
  Sense strand starting at position 1195 of SEQ ID NO: 1884000
aucagauuggauuguucuu

SEQ ID NO: 2232419 - RNA, 19 nt, Artificial Sequence
  Description of Artificial Sequence: Synthetic oligonucleotide
  Antisense strand to SEQ ID NO: 2232418
aagaacaauccaaucugau

SEQ ID NO: 2232420 - RNA, 19 nt, Artificial Sequence
  Description of Artificial Sequence: Synthetic oligonucleotide
  Sense strand starting at position 1273 of SEQ ID NO: 1884000
cuguaagcauuucugucau

SEQ ID NO: 2232421 - RNA, 19 nt, Artificial Sequence
  Description of Artificial Sequence: Synthetic oligonucleotide
  Antisense strand to SEQ ID NO: 2232420
augacagaaaugcuuacag

SEQ ID NO: 2232422 - RNA, 19 nt, Artificial Sequence
  Description of Artificial Sequence: Synthetic oligonucleotide
  Sense strand starting at position 1304 of SEQ ID NO: 1884000
uugagacucaccugugaga

SEQ ID NO: 2232423 - RNA, 19 nt, Artificial Sequence
  Description of Artificial Sequence: Synthetic oligonucleotide
  Antisense strand to SEQ ID NO: 2232422
ucucacaggugagucucaa

SEQ ID NO: 2232424 - RNA, 19 nt, Artificial Sequence
  Description of Artificial Sequence: Synthetic oligonucleotide
  Sense strand starting at position 1378 of SEQ ID NO: 1884000
guguuccaccuuuaguaaa

SEQ ID NO: 2232425 - RNA, 19 nt, Artificial Sequence
  Description of Artificial Sequence: Synthetic oligonucleotide
  Antisense strand to SEQ ID NO: 2232424
uuuacuaaagguggaacac

SEQ ID NO: 2232426 - RNA, 19 nt, Artificial Sequence
  Description of Artificial Sequence: Synthetic oligonucleotide
  Sense strand starting at position 1439 of SEQ ID NO: 1884000
cuuaacaagcaaugguuaa

SEQ ID NO: 2232427 - RNA, 19 nt, Artificial Sequence
  Description of Artificial Sequence: Synthetic oligonucleotide
  Antisense strand to SEQ ID NO: 2232426
uuaaccauugcuuguuaag

SEQ ID NO: 2232428 - RNA, 19 nt, Artificial Sequence
  Description of Artificial Sequence: Synthetic oligonucleotide
  Sense strand starting at position 1903 of SEQ ID NO: 1884000
aaccguuaggcaggaauua

SEQ ID NO: 2232429 - RNA, 19 nt, Artificial Sequence
  Description of Artificial Sequence: Synthetic oligonucleotide
  Antisense strand to SEQ ID NO: 2232428
uaauuccugccuaacgguu

SEQ ID NO: 2232430 - RNA, 19 nt, Artificial Sequence
  Description of Artificial Sequence: Synthetic oligonucleotide
  Sense strand starting at position 1983 of SEQ ID NO: 1884000
aaauguuguugggugaaug

SEQ ID NO: 2232431 - RNA, 19 nt, Artificial Sequence
  Description of Artificial Sequence: Synthetic oligonucleotide
  Antisense strand to SEQ ID NO: 2232430
cauucacccaacaacauuu

SEQ ID NO: 2232432 - RNA, 19 nt, Artificial Sequence
  Description of Artificial Sequence: Synthetic oligonucleotide
  Sense strand starting at position 2095 of SEQ ID NO: 1884000
augccaagucaugacagua

SEQ ID NO: 2232433 - RNA, 19 nt, Artificial Sequence
  Description of Artificial Sequence: Synthetic oligonucleotide
  Antisense strand to SEQ ID NO: 2232432
uacugucaugacuuggcau

SEQ ID NO: 2232434 - RNA, 19 nt, Artificial Sequence
  Description of Artificial Sequence: Synthetic oligonucleotide
  Sense strand starting at position 2100 of SEQ ID NO: 1884000
aagucaugacaguagcauu

SEQ ID NO: 2232435 - RNA, 19 nt, Artificial Sequence
  Description of Artificial Sequence: Synthetic oligonucleotide
  Antisense strand to SEQ ID NO: 2232434
aaugcuacugucaugacuu

SEQ ID NO: 2232436 - RNA, 19 nt, Artificial Sequence
  Description of Artificial Sequence: Synthetic oligonucleotide
  Sense strand starting at position 2227 of SEQ ID NO: 1884000
uuugcuuacuauuugugau

SEQ ID NO: 2232437 - RNA, 19 nt, Artificial Sequence
  Description of Artificial Sequence: Synthetic oligonucleotide
  Antisense strand to SEQ ID NO: 2232436
aucacaaauaguaagcaaa

SEQ ID NO: 2232438 - RNA, 19 nt, Artificial Sequence
  Description of Artificial Sequence: Synthetic oligonucleotide
  Sense strand starting at position 2763 of SEQ ID NO: 1884000
ccuguccuucuagagaaug

SEQ ID NO: 2232439 - RNA, 19 nt, Artificial Sequence
  Description of Artificial Sequence: Synthetic oligonucleotide
  Antisense strand to SEQ ID NO: 2232438
cauucucuagaaggacagg

SEQ ID NO: 2232440 - RNA, 19 nt, Artificial Sequence
  Description of Artificial Sequence: Synthetic oligonucleotide
  Sense strand starting at position 2768 of SEQ ID NO: 1884000
ccuucuagagaaugcuaau

SEQ ID NO: 2232441 - RNA, 19 nt, Artificial Sequence
  Description of Artificial Sequence: Synthetic oligonucleotide
  Antisense strand to SEQ ID NO: 2232440
auuagcauucucuagaagg

SEQ ID NO: 2232442 - RNA, 19 nt, Artificial Sequence
  Description of Artificial Sequence: Synthetic oligonucleotide
  Sense strand starting at position 2847 of SEQ ID NO: 1884000
augcaagagaacgguuuau

SEQ ID NO: 2232443 - RNA, 19 nt, Artificial Sequence
  Description of Artificial Sequence: Synthetic oligonucleotide
  Antisense strand to SEQ ID NO: 2232442
auaaaccguucucuugcau

SEQ ID NO: 2232444 - RNA, 19 nt, Artificial Sequence
  Description of Artificial Sequence: Synthetic oligonucleotide
  Sense strand starting at position 3076 of SEQ ID NO: 1884000
agaagaagauugguuuagu

SEQ ID NO: 2232445 - RNA, 19 nt, Artificial Sequence
  Description of Artificial Sequence: Synthetic oligonucleotide
  Antisense strand to SEQ ID NO: 2232444
acuaaaccaaucuucuucu

SEQ ID NO: 2232446 - RNA, 19 nt, Artificial Sequence
  Description of Artificial Sequence: Synthetic oligonucleotide
  Sense strand starting at position 3077 of SEQ ID NO: 1884000
gaagaagauugguuuagug

SEQ ID NO: 2232447 - RNA, 19 nt, Artificial Sequence
  Description of Artificial Sequence: Synthetic oligonucleotide
  Antisense strand to SEQ ID NO: 2232446
cacuaaaccaaucuucuuc

SEQ ID NO: 2232448 - RNA, 19 nt, Artificial Sequence
  Description of Artificial Sequence: Synthetic oligonucleotide
  Sense strand starting at position 3079 of SEQ ID NO: 1884000
agaagauugguuuaguguu

SEQ ID NO: 2232449 - RNA, 19 nt, Artificial Sequence
  Description of Artificial Sequence: Synthetic oligonucleotide
  Antisense strand to SEQ ID NO: 2232448
aacacuaaaccaaucuucu

SEQ ID NO: 2232450 - RNA, 19 nt, Artificial Sequence
  Description of Artificial Sequence: Synthetic oligonucleotide
  Sense strand starting at position 3101 of SEQ ID NO: 1884000
guccuucuaugaccuugaa

SEQ ID NO: 2232451 - RNA, 19 nt, Artificial Sequence
  Description of Artificial Sequence: Synthetic oligonucleotide
  Antisense strand to SEQ ID NO: 2232450
uucaaggucauagaaggac

SEQ ID NO: 2232452 - RNA, 19 nt, Artificial Sequence
  Description of Artificial Sequence: Synthetic oligonucleotide
  Sense strand starting at position 3104 of SEQ ID NO: 1884000
cuucuaugaccuugaagaa

SEQ ID NO: 2232453 - RNA, 19 nt, Artificial Sequence
  Description of Artificial Sequence: Synthetic oligonucleotide
  Antisense strand to SEQ ID NO: 2232452
uucuucaaggucauagaag

SEQ ID NO: 2232454 - RNA, 19 nt, Artificial Sequence
  Description of Artificial Sequence: Synthetic oligonucleotide
  Sense strand starting at position 3200 of SEQ ID NO: 1884000
guaguauacucauuccuaa

SEQ ID NO: 2232455 - RNA, 19 nt, Artificial Sequence
  Description of Artificial Sequence: Synthetic oligonucleotide
  Antisense strand to SEQ ID NO: 2232454
uuaggaaugaguauacuac

SEQ ID NO: 2232456 - RNA, 19 nt, Artificial Sequence
  Description of Artificial Sequence: Synthetic oligonucleotide
  Sense strand starting at position 3335 of SEQ ID NO: 1884000
gagagaaucuagguuuccu

SEQ ID NO: 2232457 - RNA, 19 nt, Artificial Sequence
  Description of Artificial Sequence: Synthetic oligonucleotide
  Antisense strand to SEQ ID NO: 2232456
aggaaaccuagauucucuc

SEQ ID NO: 2232458 - RNA, 19 nt, Artificial Sequence
  Description of Artificial Sequence: Synthetic oligonucleotide
  Sense strand starting at position 3339 of SEQ ID NO: 1884000
gaaucuagguuuccugaca

SEQ ID NO: 2232459 - RNA, 19 nt, Artificial Sequence
  Description of Artificial Sequence: Synthetic oligonucleotide
  Antisense strand to SEQ ID NO: 2232458
ugucaggaaaccuagauuc

SEQ ID NO: 2232460 - RNA, 19 nt, Artificial Sequence
  Description of Artificial Sequence: Synthetic oligonucleotide
  Sense strand starting at position 3347 of SEQ ID NO: 1884000
guuuccugacaauguaaau

SEQ ID NO: 2232461 - RNA, 19 nt, Artificial Sequence
  Description of Artificial Sequence: Synthetic oligonucleotide
  Antisense strand to SEQ ID NO: 2232460
auuuacauugucaggaaac

SEQ ID NO: 2232462 - RNA, 19 nt, Artificial Sequence
  Description of Artificial Sequence: Synthetic oligonucleotide
  Sense strand starting at position 3366 of SEQ ID NO: 1884000
uacaucuuaguaugagaag

SEQ ID NO: 2232463 - RNA, 19 nt, Artificial Sequence
  Description of Artificial Sequence: Synthetic oligonucleotide
  Antisense strand to SEQ ID NO: 2232462
cuucucauacuaagaugua

SEQ ID NO: 2232464 - RNA, 19 nt, Artificial Sequence
  Description of Artificial Sequence: Synthetic oligonucleotide
  Sense strand starting at position 3585 of SEQ ID NO: 1884000
uuaucuuauuuggagaaag

SEQ ID NO: 2232465 - RNA, 19 nt, Artificial Sequence
  Description of Artificial Sequence: Synthetic oligonucleotide
  Antisense strand to SEQ ID NO: 2232464
cuuucuccaaauaagauaa

SEQ ID NO: 2232466 - RNA, 19 nt, Artificial Sequence
  Description of Artificial Sequence: Synthetic oligonucleotide
  Sense strand starting at position 3611 of SEQ ID NO: 1884000
uugauuaugcuuuaaguga

SEQ ID NO: 2232467 - RNA, 19 nt, Artificial Sequence
  Description of Artificial Sequence: Synthetic oligonucleotide
  Antisense strand to SEQ ID NO: 2232466
ucacuuaaagcauaaucaa

SEQ ID NO: 2232468 - RNA, 19 nt, Artificial Sequence
  Description of Artificial Sequence: Synthetic oligonucleotide
  Sense strand starting at position 3633 of SEQ ID NO: 1884000
gugggaagcgauugaugau

SEQ ID NO: 2232469 - RNA, 19 nt, Artificial Sequence
  Description of Artificial Sequence: Synthetic oligonucleotide
  Antisense strand to SEQ ID NO: 2232468
aucaucaaucgcuucccac

SEQ ID NO: 2232470 - RNA, 19 nt, Artificial Sequence
  Description of Artificial Sequence: Synthetic oligonucleotide
  Sense strand starting at position 3634 of SEQ ID NO: 1884000
ugggaagcgauugaugauu

SEQ ID NO: 2232471 - RNA, 19 nt, Artificial Sequence
  Description of Artificial Sequence: Synthetic oligonucleotide
  Antisense strand to SEQ ID NO: 2232470
aaucaucaaucgcuuccca

SEQ ID NO: 2232472 - RNA, 19 nt, Artificial Sequence
  Description of Artificial Sequence: Synthetic oligonucleotide
  Sense strand starting at position 3691 of SEQ ID NO: 1884000
ggcagugcugcagcagauu

SEQ ID NO: 2232473 - RNA, 19 nt, Artificial Sequence
  Description of Artificial Sequence: Synthetic oligonucleotide
  Antisense strand to SEQ ID NO: 2232472
aaucugcugcagcacugcc

SEQ ID NO: 2232474 - RNA, 19 nt, Artificial Sequence
  Description of Artificial Sequence: Synthetic oligonucleotide
  Sense strand starting at position 3705 of SEQ ID NO: 1884000
agauuugagucgucuguua

SEQ ID NO: 2232475 - RNA, 19 nt, Artificial Sequence
  Description of Artificial Sequence: Synthetic oligonucleotide
  Antisense strand to SEQ ID NO: 2232474
uaacagacgacucaaaucu

SEQ ID NO: 2232476 - RNA, 19 nt, Artificial Sequence
  Description of Artificial Sequence: Synthetic oligonucleotide
  Sense strand starting at position 3707 of SEQ ID NO: 1884000
auuugagucgucuguuaag

SEQ ID NO: 2232477 - RNA, 19 nt, Artificial Sequence
  Description of Artificial Sequence: Synthetic oligonucleotide
  Antisense strand to SEQ ID NO: 2232476
cuuaacagacgacucaaau

SEQ ID NO: 2232478 - RNA, 19 nt, Artificial Sequence
  Description of Artificial Sequence: Synthetic oligonucleotide
  Sense strand starting at position 3737 of SEQ ID NO: 1884000
gccacaugccaugacaaau

SEQ ID NO: 2232479 - RNA, 19 nt, Artificial Sequence
  Description of Artificial Sequence: Synthetic oligonucleotide
  Antisense strand to SEQ ID NO: 2232478
auuugucauggcauguggc

SEQ ID NO: 2232480 - RNA, 19 nt, Artificial Sequence
  Description of Artificial Sequence: Synthetic oligonucleotide
  Sense strand starting at position 3804 of SEQ ID NO: 1884000
ggauccucuucccuggaua

SEQ ID NO: 2232481 - RNA, 19 nt, Artificial Sequence
  Description of Artificial Sequence: Synthetic oligonucleotide
  Antisense strand to SEQ ID NO: 2232480
uauccagggaagaggaucc

SEQ ID NO: 2232482 - RNA, 19 nt, Artificial Sequence
  Description of Artificial Sequence: Synthetic oligonucleotide
  Sense strand starting at position 3957 of SEQ ID NO: 1884000
uauggcauauuguuuagaa

SEQ ID NO: 2232483 - RNA, 19 nt, Artificial Sequence
  Description of Artificial Sequence: Synthetic oligonucleotide
  Antisense strand to SEQ ID NO: 2232482
uucuaaacaauaugccaua

SEQ ID NO: 2232484 - RNA, 19 nt, Artificial Sequence
  Description of Artificial Sequence: Synthetic oligonucleotide
  Sense strand starting at position 3958 of SEQ ID NO: 1884000
auggcauauuguuuagaag

SEQ ID NO: 2232485 - RNA, 19 nt, Artificial Sequence
  Description of Artificial Sequence: Synthetic oligonucleotide
  Antisense strand to SEQ ID NO: 2232484
cuucuaaacaauaugccau

SEQ ID NO: 2232486 - RNA, 19 nt, Artificial Sequence
  Description of Artificial Sequence: Synthetic oligonucleotide
  Sense strand starting at position 3959 of SEQ ID NO: 1884000
uggcauauuguuuagaagu

SEQ ID NO: 2232487 - RNA, 19 nt, Artificial Sequence
  Description of Artificial Sequence: Synthetic oligonucleotide
  Antisense strand to SEQ ID NO: 2232486
acuucuaaacaauaugcca

SEQ ID NO: 2232488 - RNA, 19 nt, Artificial Sequence
  Description of Artificial Sequence: Synthetic oligonucleotide
  Sense strand starting at position 290 of SEQ ID NO: 1884001
auguaccugccagagauau

SEQ ID NO: 2232489 - RNA, 19 nt, Artificial Sequence
  Description of Artificial Sequence: Synthetic oligonucleotide
  Antisense strand to SEQ ID NO: 2232488
auaucucuggcagguacau

SEQ ID NO: 2232490 - RNA, 19 nt, Artificial Sequence
  Description of Artificial Sequence: Synthetic oligonucleotide
  Sense strand starting at position 292 of SEQ ID NO: 1884001
guaccugccagagauauga

SEQ ID NO: 2232491 - RNA, 19 nt, Artificial Sequence
  Description of Artificial Sequence: Synthetic oligonucleotide
  Antisense strand to SEQ ID NO: 2232490
ucauaucucuggcagguac

SEQ ID NO: 2232492 - RNA, 19 nt, Artificial Sequence
  Description of Artificial Sequence: Synthetic oligonucleotide
  Sense strand starting at position 323 of SEQ ID NO: 1884001
ccgugucaaccucaacaga

SEQ ID NO: 2232493 - RNA, 19 nt, Artificial Sequence
  Description of Artificial Sequence: Synthetic oligonucleotide
  Antisense strand to SEQ ID NO: 2232492
ucuguugagguugacacgg

SEQ ID NO: 2232494 - RNA, 19 nt, Artificial Sequence
  Description of Artificial Sequence: Synthetic oligonucleotide
  Sense strand starting at position 429 of SEQ ID NO: 1884001
gggcaauguccuuacuucu

SEQ ID NO: 2232495 - RNA, 19 nt, Artificial Sequence
  Description of Artificial Sequence: Synthetic oligonucleotide
  Antisense strand to SEQ ID NO: 2232494
agaaguaaggacauugccc

SEQ ID NO: 2232496 - RNA, 19 nt, Artificial Sequence
  Description of Artificial Sequence: Synthetic oligonucleotide
  Sense strand starting at position 661 of SEQ ID NO: 1884001
uggauuugucauggcaugu

SEQ ID NO: 2232497 - RNA, 19 nt, Artificial Sequence
  Description of Artificial Sequence: Synthetic oligonucleotide
  Antisense strand to SEQ ID NO: 2232496
acaugccaugacaaaucca

SEQ ID NO: 2232498 - RNA, 19 nt, Artificial Sequence
  Description of Artificial Sequence: Synthetic oligonucleotide
  Sense strand starting at position 871 of SEQ ID NO: 1884001
auuuauuucuuguaccagu

SEQ ID NO: 2232499 - RNA, 19 nt, Artificial Sequence
  Description of Artificial Sequence: Synthetic oligonucleotide
  Antisense strand to SEQ ID NO: 2232498
acugguacaagaaauaaau

SEQ ID NO: 2232500 - RNA, 19 nt, Artificial Sequence
  Description of Artificial Sequence: Synthetic oligonucleotide
  Sense strand starting at position 879 of SEQ ID NO: 1884001
cuuguaccaguuuauaaac

SEQ ID NO: 2232501 - RNA, 19 nt, Artificial Sequence
  Description of Artificial Sequence: Synthetic oligonucleotide
  Antisense strand to SEQ ID NO: 2232500
guuuauaaacugguacaag

SEQ ID NO: 2232502 - RNA, 19 nt, Artificial Sequence
  Description of Artificial Sequence: Synthetic oligonucleotide
  Sense strand starting at position 944 of SEQ ID NO: 1884001
uccugugaugaucaacagu

SEQ ID NO: 2232503 - RNA, 19 nt, Artificial Sequence
  Description of Artificial Sequence: Synthetic oligonucleotide
  Antisense strand to SEQ ID NO: 2232502
acuguugaucaucacagga

SEQ ID NO: 2232504 - RNA, 19 nt, Artificial Sequence
  Description of Artificial Sequence: Synthetic oligonucleotide
  Sense strand starting at position 953 of SEQ ID NO: 1884001
gaucaacaguccuugaaag

SEQ ID NO: 2232505 - RNA, 19 nt, Artificial Sequence
  Description of Artificial Sequence: Synthetic oligonucleotide
  Antisense strand to SEQ ID NO: 2232504
cuuucaaggacuguugauc

SEQ ID NO: 2232506 - RNA, 19 nt, Artificial Sequence
  Description of Artificial Sequence: Synthetic oligonucleotide
  Sense strand starting at position 976 of SEQ ID NO: 1884001
aggacuuaccacuguggau

SEQ ID NO: 2232507 - RNA, 19 nt, Artificial Sequence
  Description of Artificial Sequence: Synthetic oligonucleotide
  Antisense strand to SEQ ID NO: 2232506
auccacagugguaaguccu

SEQ ID NO: 2232508 - RNA, 19 nt, Artificial Sequence
  Description of Artificial Sequence: Synthetic oligonucleotide
  Sense strand starting at position 1114 of SEQ ID NO: 1884001
cuucucugugugcaaauga

SEQ ID NO: 2232509 - RNA, 19 nt, Artificial Sequence
  Description of Artificial Sequence: Synthetic oligonucleotide
  Antisense strand to SEQ ID NO: 2232508
ucauuugcacacagagaag

SEQ ID NO: 2232510 - RNA, 19 nt, Artificial Sequence
  Description of Artificial Sequence: Synthetic oligonucleotide
  Sense strand starting at position 1196 of SEQ ID NO: 1884001
cuuaauuaggaaugaguau

SEQ ID NO: 2232511 - RNA, 19 nt, Artificial Sequence
  Description of Artificial Sequence: Synthetic oligonucleotide
  Antisense strand to SEQ ID NO: 2232510
auacucauuccuaauuaag

SEQ ID NO: 2232512 - RNA, 19 nt, Artificial Sequence
  Description of Artificial Sequence: Synthetic oligonucleotide
  Sense strand starting at position 1367 of SEQ ID NO: 1884001
guucuuggcaacuaugagu

SEQ ID NO: 2232513 - RNA, 19 nt, Artificial Sequence
  Description of Artificial Sequence: Synthetic oligonucleotide
  Antisense strand to SEQ ID NO: 2232512
acucauaguugccaagaac

SEQ ID NO: 2232514 - RNA, 19 nt, Artificial Sequence
  Description of Artificial Sequence: Synthetic oligonucleotide
  Sense strand starting at position 1394 of SEQ ID NO: 1884001
gccucaaagcccuaagaug

SEQ ID NO: 2232515 - RNA, 19 nt, Artificial Sequence
  Description of Artificial Sequence: Synthetic oligonucleotide
  Antisense strand to SEQ ID NO: 2232514
caucuuagggcuuugaggc

SEQ ID NO: 2232516 - RNA, 19 nt, Artificial Sequence
  Description of Artificial Sequence: Synthetic oligonucleotide
  Sense strand starting at position 1456 of SEQ ID NO: 1884001
cagauucuggaaggcuuaa

SEQ ID NO: 2232517 - RNA, 19 nt, Artificial Sequence
  Description of Artificial Sequence: Synthetic oligonucleotide
  Antisense strand to SEQ ID NO: 2232516
uuaagccuuccagaaucug

SEQ ID NO: 2232518 - RNA, 19 nt, Artificial Sequence
  Description of Artificial Sequence: Synthetic oligonucleotide
  Sense strand starting at position 1476 of SEQ ID NO: 1884001
aaagucagugcuggauaaa

SEQ ID NO: 2232519 - RNA, 19 nt, Artificial Sequence
  Description of Artificial Sequence: Synthetic oligonucleotide
  Antisense strand to SEQ ID NO: 2232518
uuuauccagcacugacuuu

SEQ ID NO: 2232520 - RNA, 19 nt, Artificial Sequence
  Description of Artificial Sequence: Synthetic oligonucleotide
  Sense strand starting at position 1477 of SEQ ID NO: 1884001
aagucagugcuggauaaag

SEQ ID NO: 2232521 - RNA, 19 nt, Artificial Sequence
  Description of Artificial Sequence: Synthetic oligonucleotide
  Antisense strand to SEQ ID NO: 2232520
cuuuauccagcacugacuu

SEQ ID NO: 2232522 - RNA, 19 nt, Artificial Sequence
  Description of Artificial Sequence: Synthetic oligonucleotide
  Sense strand starting at position 1531 of SEQ ID NO: 1884001
guugguuauggccaauaau

SEQ ID NO: 2232523 - RNA, 19 nt, Artificial Sequence
  Description of Artificial Sequence: Synthetic oligonucleotide
  Antisense strand to SEQ ID NO: 2232522
auuauuggccauaaccaac

SEQ ID NO: 2232524 - RNA, 19 nt, Artificial Sequence
  Description of Artificial Sequence: Synthetic oligonucleotide
  Sense strand starting at position 1534 of SEQ ID NO: 1884001
gguuauggccaauaauuaa

SEQ ID NO: 2232525 - RNA, 19 nt, Artificial Sequence
  Description of Artificial Sequence: Synthetic oligonucleotide
  Antisense strand to SEQ ID NO: 2232524
uuaauuauuggccauaacc

SEQ ID NO: 2232526 - RNA, 19 nt, Artificial Sequence
  Description of Artificial Sequence: Synthetic oligonucleotide
  Sense strand starting at position 1568 of SEQ ID NO: 1884001
ugcauuuaagccugacuua

SEQ ID NO: 2232527 - RNA, 19 nt, Artificial Sequence
  Description of Artificial Sequence: Synthetic oligonucleotide
  Antisense strand to SEQ ID NO: 2232526
uaagucaggcuuaaaugca

SEQ ID NO: 2232528 - RNA, 19 nt, Artificial Sequence
  Description of Artificial Sequence: Synthetic oligonucleotide
  Sense strand starting at position 1631 of SEQ ID NO: 1884001
guauuagcauucucuagaa

SEQ ID NO: 2232529 - RNA, 19 nt, Artificial Sequence
  Description of Artificial Sequence: Synthetic oligonucleotide
  Antisense strand to SEQ ID NO: 2232528
uucuagagaaugcuaauac

SEQ ID NO: 2232530 - RNA, 19 nt, Artificial Sequence
  Description of Artificial Sequence: Synthetic oligonucleotide
  Sense strand starting at position 2308 of SEQ ID NO: 1884001
cugucaugacuuggcauga

SEQ ID NO: 2232531 - RNA, 19 nt, Artificial Sequence
  Description of Artificial Sequence: Synthetic oligonucleotide
  Antisense strand to SEQ ID NO: 2232530
ucaugccaagucaugacag

SEQ ID NO: 2232532 - RNA, 19 nt, Artificial Sequence
  Description of Artificial Sequence: Synthetic oligonucleotide
  Sense strand starting at position 2309 of SEQ ID NO: 1884001
ugucaugacuuggcaugaa

SEQ ID NO: 2232533 - RNA, 19 nt, Artificial Sequence
  Description of Artificial Sequence: Synthetic oligonucleotide
  Antisense strand to SEQ ID NO: 2232532
uucaugccaagucaugaca

SEQ ID NO: 2232534 - RNA, 19 nt, Artificial Sequence
  Description of Artificial Sequence: Synthetic oligonucleotide
  Sense strand starting at position 2473 of SEQ ID NO: 1884001
ugcaaaccugaguaaggua

SEQ ID NO: 2232535 - RNA, 19 nt, Artificial Sequence
  Description of Artificial Sequence: Synthetic oligonucleotide
  Antisense strand to SEQ ID NO: 2232534
uaccuuacucagguuugca

SEQ ID NO: 2232536 - RNA, 19 nt, Artificial Sequence
  Description of Artificial Sequence: Synthetic oligonucleotide
  Sense strand starting at position 3044 of SEQ ID NO: 1884001
gggugaaucguuuagggca

SEQ ID NO: 2232537 - RNA, 19 nt, Artificial Sequence
  Description of Artificial Sequence: Synthetic oligonucleotide
  Antisense strand to SEQ ID NO: 2232536
ugcccuaaacgauucaccc

SEQ ID NO: 2232538 - RNA, 19 nt, Artificial Sequence
  Description of Artificial Sequence: Synthetic oligonucleotide
  Sense strand starting at position 3049 of SEQ ID NO: 1884001
aaucguuuagggcaacuaa

SEQ ID NO: 2232539 - RNA, 19 nt, Artificial Sequence
  Description of Artificial Sequence: Synthetic oligonucleotide
  Antisense strand to SEQ ID NO: 2232538
uuaguugcccuaaacgauu

SEQ ID NO: 2232540 - RNA, 19 nt, Artificial Sequence
  Description of Artificial Sequence: Synthetic oligonucleotide
  Sense strand starting at position 3070 of SEQ ID NO: 1884001
guaugugggagagguugau

SEQ ID NO: 2232541 - RNA, 19 nt, Artificial Sequence
  Description of Artificial Sequence: Synthetic oligonucleotide
  Antisense strand to SEQ ID NO: 2232540
aucaaccucucccacauac

SEQ ID NO: 2232542 - RNA, 19 nt, Artificial Sequence
  Description of Artificial Sequence: Synthetic oligonucleotide
  Sense strand starting at position 3109 of SEQ ID NO: 1884001
gucucaagccuccaaggaa

SEQ ID NO: 2232543 - RNA, 19 nt, Artificial Sequence
  Description of Artificial Sequence: Synthetic oligonucleotide
  Antisense strand to SEQ ID NO: 2232542
uuccuuggaggcuugagac

SEQ ID NO: 2232544 - RNA, 19 nt, Artificial Sequence
  Description of Artificial Sequence: Synthetic oligonucleotide
  Sense strand starting at position 3262 of SEQ ID NO: 1884001
agugaugaaccuggccuua

SEQ ID NO: 2232545 - RNA, 19 nt, Artificial Sequence
  Description of Artificial Sequence: Synthetic oligonucleotide
  Antisense strand to SEQ ID NO: 2232544
uaaggccagguucaucacu

SEQ ID NO: 2232546 - RNA, 19 nt, Artificial Sequence
  Description of Artificial Sequence: Synthetic oligonucleotide
  Sense strand starting at position 3292 of SEQ ID NO: 1884001
gggugagcccauuagagau

SEQ ID NO: 2232547 - RNA, 19 nt, Artificial Sequence
  Description of Artificial Sequence: Synthetic oligonucleotide
  Antisense strand to SEQ ID NO: 2232546
aucucuaaugggcucaccc

SEQ ID NO: 2232548 - RNA, 19 nt, Artificial Sequence
  Description of Artificial Sequence: Synthetic oligonucleotide
  Sense strand starting at position 3518 of SEQ ID NO: 1884001
guggaaguuucauugcaag

SEQ ID NO: 2232549 - RNA, 19 nt, Artificial Sequence
  Description of Artificial Sequence: Synthetic oligonucleotide
  Antisense strand to SEQ ID NO: 2232548
cuugcaaugaaacuuccac

SEQ ID NO: 2232550 - RNA, 19 nt, Artificial Sequence
  Description of Artificial Sequence: Synthetic oligonucleotide
  Sense strand starting at position 3642 of SEQ ID NO: 1884001
cuugcaagacuggauuagu

SEQ ID NO: 2232551 - RNA, 19 nt, Artificial Sequence
  Description of Artificial Sequence: Synthetic oligonucleotide
  Antisense strand to SEQ ID NO: 2232550
acuaauccagucuugcaag

SEQ ID NO: 2232552 - RNA, 19 nt, Artificial Sequence
  Description of Artificial Sequence: Synthetic oligonucleotide
  Sense strand starting at position 3651 of SEQ ID NO: 1884001
cuggauuaguucuugcaga

SEQ ID NO: 2232553 - RNA, 19 nt, Artificial Sequence
  Description of Artificial Sequence: Synthetic oligonucleotide
  Antisense strand to SEQ ID NO: 2232552
ucugcaagaacuaauccag

SEQ ID NO: 2232554 - RNA, 19 nt, Artificial Sequence
  Description of Artificial Sequence: Synthetic oligonucleotide
  Sense strand starting at position 3658 of SEQ ID NO: 1884001
aguucuugcagagauggau

SEQ ID NO: 2232555 - RNA, 19 nt, Artificial Sequence
  Description of Artificial Sequence: Synthetic oligonucleotide
  Antisense strand to SEQ ID NO: 2232554
auccaucucugcaagaacu

SEQ ID NO: 2232556 - RNA, 19 nt, Artificial Sequence
  Description of Artificial Sequence: Synthetic oligonucleotide
  Sense strand starting at position 3685 of SEQ ID NO: 1884001
ucaagaguagguugguaua

SEQ ID NO: 2232557 - RNA, 19 nt, Artificial Sequence
  Description of Artificial Sequence: Synthetic oligonucleotide
  Antisense strand to SEQ ID NO: 2232556
uauaccaaccuacucuuga

SEQ ID NO: 2232558 - RNA, 19 nt, Artificial Sequence
  Description of Artificial Sequence: Synthetic oligonucleotide
  Sense strand starting at position 3687 of SEQ ID NO: 1884001
aagaguagguugguauaaa

SEQ ID NO: 2232559 - RNA, 19 nt, Artificial Sequence
  Description of Artificial Sequence: Synthetic oligonucleotide
  Antisense strand to SEQ ID NO: 2232558
uuuauaccaaccuacucuu

SEQ ID NO: 2232560 - RNA, 19 nt, Artificial Sequence
  Description of Artificial Sequence: Synthetic oligonucleotide
  Sense strand starting at position 3808 of SEQ ID NO: 1884001
cgccaugcccuugaaauuu

SEQ ID NO: 2232561 - RNA, 19 nt, Artificial Sequence
  Description of Artificial Sequence: Synthetic oligonucleotide
  Antisense strand to SEQ ID NO: 2232560
aaauuucaagggcauggcg

SEQ ID NO: 2232562 - RNA, 19 nt, Artificial Sequence
  Description of Artificial Sequence: Synthetic oligonucleotide
  Sense strand starting at position 3834 of SEQ ID NO: 1884001
gcagaaccaugagcucaau

SEQ ID NO: 2232563 - RNA, 19 nt, Artificial Sequence
  Description of Artificial Sequence: Synthetic oligonucleotide
  Antisense strand to SEQ ID NO: 2232562
auugagcucaugguucugc

SEQ ID NO: 2232564 - RNA, 19 nt, Artificial Sequence
  Description of Artificial Sequence: Synthetic oligonucleotide
  Sense strand starting at position 3840 of SEQ ID NO: 1884001
ccaugagcucaauagaccu

SEQ ID NO: 2232565 - RNA, 19 nt, Artificial Sequence
  Description of Artificial Sequence: Synthetic oligonucleotide
  Antisense strand to SEQ ID NO: 2232564
aggucuauugagcucaugg

SEQ ID NO: 2232566 - RNA, 19 nt, Artificial Sequence
  Description of Artificial Sequence: Synthetic oligonucleotide
  Sense strand starting at position 3912 of SEQ ID NO: 1884001
ugacuaagacaguguuauu

SEQ ID NO: 2232567 - RNA, 19 nt, Artificial Sequence
  Description of Artificial Sequence: Synthetic oligonucleotide
  Antisense strand to SEQ ID NO: 2232566
aauaacacugucuuaguca

SEQ ID NO: 2232568 - RNA, 19 nt, Artificial Sequence
  Description of Artificial Sequence: Synthetic oligonucleotide
  Sense strand starting at position 6 of SEQ ID NO: 1884002
ucauguccugaauauaugu

SEQ ID NO: 2232569 - RNA, 19 nt, Artificial Sequence
  Description of Artificial Sequence: Synthetic oligonucleotide
  Antisense strand to SEQ ID NO: 2232568
acauauauucaggacauga

SEQ ID NO: 2232570 - RNA, 19 nt, Artificial Sequence
  Description of Artificial Sequence: Synthetic oligonucleotide
  Sense strand starting at position 11 of SEQ ID NO: 1884002
uccugaauauauguuugaa

SEQ ID NO: 2232571 - RNA, 19 nt, Artificial Sequence
  Description of Artificial Sequence: Synthetic oligonucleotide
  Antisense strand to SEQ ID NO: 2232570
uucaaacauauauucagga

SEQ ID NO: 2232572 - RNA, 19 nt, Artificial Sequence
  Description of Artificial Sequence: Synthetic oligonucleotide
  Sense strand starting at position 14 of SEQ ID NO: 1884002
ugaauauauguuugaacca

SEQ ID NO: 2232573 - RNA, 19 nt, Artificial Sequence
  Description of Artificial Sequence: Synthetic oligonucleotide
  Antisense strand to SEQ ID NO: 2232572
ugguucaaacauauauuca

SEQ ID NO: 2232574 - RNA, 19 nt, Artificial Sequence
  Description of Artificial Sequence: Synthetic oligonucleotide
  Sense strand starting at position 59 of SEQ ID NO: 1884002
uuuagaugucaguauaggu

SEQ ID NO: 2232575 - RNA, 19 nt, Artificial Sequence
  Description of Artificial Sequence: Synthetic oligonucleotide
  Antisense strand to SEQ ID NO: 2232574
accuauacugacaucuaaa

SEQ ID NO: 2232576 - RNA, 19 nt, Artificial Sequence
  Description of Artificial Sequence: Synthetic oligonucleotide
  Sense strand starting at position 63 of SEQ ID NO: 1884002
gaugucaguauagguagau

SEQ ID NO: 2232577 - RNA, 19 nt, Artificial Sequence
  Description of Artificial Sequence: Synthetic oligonucleotide
  Antisense strand to SEQ ID NO: 2232576
aucuaccuauacugacauc

SEQ ID NO: 2232578 - RNA, 19 nt, Artificial Sequence
  Description of Artificial Sequence: Synthetic oligonucleotide
  Sense strand starting at position 64 of SEQ ID NO: 1884002
augucaguauagguagauu

SEQ ID NO: 2232579 - RNA, 19 nt, Artificial Sequence
  Description of Artificial Sequence: Synthetic oligonucleotide
  Antisense strand to SEQ ID NO: 2232578
aaucuaccuauacugacau

SEQ ID NO: 2232580 - RNA, 19 nt, Artificial Sequence
  Description of Artificial Sequence: Synthetic oligonucleotide
  Sense strand starting at position 270 of SEQ ID NO: 1884002
aaggcuuugguacauuauu

SEQ ID NO: 2232581 - RNA, 19 nt, Artificial Sequence
  Description of Artificial Sequence: Synthetic oligonucleotide
  Antisense strand to SEQ ID NO: 2232580
aauaauguaccaaagccuu

SEQ ID NO: 2232582 - RNA, 19 nt, Artificial Sequence
  Description of Artificial Sequence: Synthetic oligonucleotide
  Sense strand starting at position 386 of SEQ ID NO: 1884002
gcuucaguucuggaaacga

SEQ ID NO: 2232583 - RNA, 19 nt, Artificial Sequence
  Description of Artificial Sequence: Synthetic oligonucleotide
  Antisense strand to SEQ ID NO: 2232582
ucguuuccagaacugaagc

SEQ ID NO: 2232584 - RNA, 19 nt, Artificial Sequence
  Description of Artificial Sequence: Synthetic oligonucleotide
  Sense strand starting at position 550 of SEQ ID NO: 1884002
gggaaucgauucuuuagaa

SEQ ID NO: 2232585 - RNA, 19 nt, Artificial Sequence
  Description of Artificial Sequence: Synthetic oligonucleotide
  Antisense strand to SEQ ID NO: 2232584
uucuaaagaaucgauuccc

SEQ ID NO: 2232586 - RNA, 19 nt, Artificial Sequence
  Description of Artificial Sequence: Synthetic oligonucleotide
  Sense strand starting at position 551 of SEQ ID NO: 1884002
ggaaucgauucuuuagaaa

SEQ ID NO: 2232587 - RNA, 19 nt, Artificial Sequence
  Description of Artificial Sequence: Synthetic oligonucleotide
  Antisense strand to SEQ ID NO: 2232586
uuucuaaagaaucgauucc

SEQ ID NO: 2232588 - RNA, 19 nt, Artificial Sequence
  Description of Artificial Sequence: Synthetic oligonucleotide
  Sense strand starting at position 753 of SEQ ID NO: 1884002
aggcaaauacccugagguu

SEQ ID NO: 2232589 - RNA, 19 nt, Artificial Sequence
  Description of Artificial Sequence: Synthetic oligonucleotide
  Antisense strand to SEQ ID NO: 2232588
aaccucaggguauuugccu

SEQ ID NO: 2232590 - RNA, 19 nt, Artificial Sequence
  Description of Artificial Sequence: Synthetic oligonucleotide
  Sense strand starting at position 754 of SEQ ID NO: 1884002
ggcaaauacccugagguua

SEQ ID NO: 2232591 - RNA, 19 nt, Artificial Sequence
  Description of Artificial Sequence: Synthetic oligonucleotide
  Antisense strand to SEQ ID NO: 2232590
uaaccucaggguauuugcc

SEQ ID NO: 2232592 - RNA, 19 nt, Artificial Sequence
  Description of Artificial Sequence: Synthetic oligonucleotide
  Sense strand starting at position 827 of SEQ ID NO: 1884002
augggauuauagcuggaua

SEQ ID NO: 2232593 - RNA, 19 nt, Artificial Sequence
  Description of Artificial Sequence: Synthetic oligonucleotide
  Antisense strand to SEQ ID NO: 2232592
uauccagcuauaaucccau

SEQ ID NO: 2232594 - RNA, 19 nt, Artificial Sequence
  Description of Artificial Sequence: Synthetic oligonucleotide
  Sense strand starting at position 840 of SEQ ID NO: 1884002
uggauaaacucauuguaag

SEQ ID NO: 2232595 - RNA, 19 nt, Artificial Sequence
  Description of Artificial Sequence: Synthetic oligonucleotide
  Antisense strand to SEQ ID NO: 2232594
cuuacaaugaguuuaucca

SEQ ID NO: 2232596 - RNA, 19 nt, Artificial Sequence
  Description of Artificial Sequence: Synthetic oligonucleotide
  Sense strand starting at position 841 of SEQ ID NO: 1884002
ggauaaacucauuguaagu

SEQ ID NO: 2232597 - RNA, 19 nt, Artificial Sequence
  Description of Artificial Sequence: Synthetic oligonucleotide
  Antisense strand to SEQ ID NO: 2232596
acuuacaaugaguuuaucc

SEQ ID NO: 2232598 - RNA, 19 nt, Artificial Sequence
  Description of Artificial Sequence: Synthetic oligonucleotide
  Sense strand starting at position 846 of SEQ ID NO: 1884002
aacucauuguaaguuggaa

SEQ ID NO: 2232599 - RNA, 19 nt, Artificial Sequence
  Description of Artificial Sequence: Synthetic oligonucleotide
  Antisense strand to SEQ ID NO: 2232598
uuccaacuuacaaugaguu

SEQ ID NO: 2232600 - RNA, 19 nt, Artificial Sequence
  Description of Artificial Sequence: Synthetic oligonucleotide
  Sense strand starting at position 869 of SEQ ID NO: 1884002
acugaauacguguaaccua

SEQ ID NO: 2232601 - RNA, 19 nt, Artificial Sequence
  Description of Artificial Sequence: Synthetic oligonucleotide
  Antisense strand to SEQ ID NO: 2232600
uagguuacacguauucagu

SEQ ID NO: 2232602 - RNA, 19 nt, Artificial Sequence
  Description of Artificial Sequence: Synthetic oligonucleotide
  Sense strand starting at position 872 of SEQ ID NO: 1884002
gaauacguguaaccuacua

SEQ ID NO: 2232603 - RNA, 19 nt, Artificial Sequence
  Description of Artificial Sequence: Synthetic oligonucleotide
  Antisense strand to SEQ ID NO: 2232602
uaguagguuacacguauuc

SEQ ID NO: 2232604 - RNA, 19 nt, Artificial Sequence
  Description of Artificial Sequence: Synthetic oligonucleotide
  Sense strand starting at position 884 of SEQ ID NO: 1884002
ccuacuaaacaguauaguu

SEQ ID NO: 2232605 - RNA, 19 nt, Artificial Sequence
  Description of Artificial Sequence: Synthetic oligonucleotide
  Antisense strand to SEQ ID NO: 2232604
aacuauacuguuuaguagg

SEQ ID NO: 2232606 - RNA, 19 nt, Artificial Sequence
  Description of Artificial Sequence: Synthetic oligonucleotide
  Sense strand starting at position 940 of SEQ ID NO: 1884002
ccuacaguugggcaacaua

SEQ ID NO: 2232607 - RNA, 19 nt, Artificial Sequence
  Description of Artificial Sequence: Synthetic oligonucleotide
  Antisense strand to SEQ ID NO: 2232606
uauguugcccaacuguagg

SEQ ID NO: 2232608 - RNA, 19 nt, Artificial Sequence
  Description of Artificial Sequence: Synthetic oligonucleotide
  Sense strand starting at position 1038 of SEQ ID NO: 1884002
agaauuguuguauggauac

SEQ ID NO: 2232609 - RNA, 19 nt, Artificial Sequence
  Description of Artificial Sequence: Synthetic oligonucleotide
  Antisense strand to SEQ ID NO: 2232608
guauccauacaacaauucu

SEQ ID NO: 2232610 - RNA, 19 nt, Artificial Sequence
  Description of Artificial Sequence: Synthetic oligonucleotide
  Sense strand starting at position 1118 of SEQ ID NO: 1884002
aagucaaaccauggaaagu

SEQ ID NO: 2232611 - RNA, 19 nt, Artificial Sequence
  Description of Artificial Sequence: Synthetic oligonucleotide
  Antisense strand to SEQ ID NO: 2232610
acuuuccaugguuugacuu

SEQ ID NO: 2232612 - RNA, 19 nt, Artificial Sequence
  Description of Artificial Sequence: Synthetic oligonucleotide
  Sense strand starting at position 1162 of SEQ ID NO: 1884002
uuugaauuggccuaggucu

SEQ ID NO: 2232613 - RNA, 19 nt, Artificial Sequence
  Description of Artificial Sequence: Synthetic oligonucleotide
  Antisense strand to SEQ ID NO: 2232612
agaccuaggccaauucaaa

SEQ ID NO: 2232614 - RNA, 19 nt, Artificial Sequence
  Description of Artificial Sequence: Synthetic oligonucleotide
  Sense strand starting at position 1176 of SEQ ID NO: 1884002
ggucuuagcauuuguaguu

SEQ ID NO: 2232615 - RNA, 19 nt, Artificial Sequence
  Description of Artificial Sequence: Synthetic oligonucleotide
  Antisense strand to SEQ ID NO: 2232614
aacuacaaaugcuaagacc

SEQ ID NO: 2232616 - RNA, 19 nt, Artificial Sequence
  Description of Artificial Sequence: Synthetic oligonucleotide
  Sense strand starting at position 1177 of SEQ ID NO: 1884002
gucuuagcauuuguaguuu

SEQ ID NO: 2232617 - RNA, 19 nt, Artificial Sequence
  Description of Artificial Sequence: Synthetic oligonucleotide
  Antisense strand to SEQ ID NO: 2232616
aaacuacaaaugcuaagac

SEQ ID NO: 2232618 - RNA, 19 nt, Artificial Sequence
  Description of Artificial Sequence: Synthetic oligonucleotide
  Sense strand starting at position 1181 of SEQ ID NO: 1884002
uagcauuuguaguuugaua

SEQ ID NO: 2232619 - RNA, 19 nt, Artificial Sequence
  Description of Artificial Sequence: Synthetic oligonucleotide
  Antisense strand to SEQ ID NO: 2232618
uaucaaacuacaaaugcua

SEQ ID NO: 2232620 - RNA, 19 nt, Artificial Sequence
  Description of Artificial Sequence: Synthetic oligonucleotide
  Sense strand starting at position 1183 of SEQ ID NO: 1884002
gcauuuguaguuugauaug

SEQ ID NO: 2232621 - RNA, 19 nt, Artificial Sequence
  Description of Artificial Sequence: Synthetic oligonucleotide
  Antisense strand to SEQ ID NO: 2232620
cauaucaaacuacaaaugc

SEQ ID NO: 2232622 - RNA, 19 nt, Artificial Sequence
  Description of Artificial Sequence: Synthetic oligonucleotide
  Sense strand starting at position 1306 of SEQ ID NO: 1884002
agaagcaaaguuugguaau

SEQ ID NO: 2232623 - RNA, 19 nt, Artificial Sequence
  Description of Artificial Sequence: Synthetic oligonucleotide
  Antisense strand to SEQ ID NO: 2232622
auuaccaaacuuugcuucu

SEQ ID NO: 2232624 - RNA, 19 nt, Artificial Sequence
  Description of Artificial Sequence: Synthetic oligonucleotide
  Sense strand starting at position 1318 of SEQ ID NO: 1884002
ugguaauccaguugagaca

SEQ ID NO: 2232625 - RNA, 19 nt, Artificial Sequence
  Description of Artificial Sequence: Synthetic oligonucleotide
  Antisense strand to SEQ ID NO: 2232624
ugucucaacuggauuacca

SEQ ID NO: 2232626 - RNA, 19 nt, Artificial Sequence
  Description of Artificial Sequence: Synthetic oligonucleotide
  Sense strand starting at position 1999 of SEQ ID NO: 1884002
acacaauaucaugacgcau

SEQ ID NO: 2232627 - RNA, 19 nt, Artificial Sequence
  Description of Artificial Sequence: Synthetic oligonucleotide
  Antisense strand to SEQ ID NO: 2232626
augcgucaugauauugugu

SEQ ID NO: 2232628 - RNA, 19 nt, Artificial Sequence
  Description of Artificial Sequence: Synthetic oligonucleotide
  Sense strand starting at position 2044 of SEQ ID NO: 1884002
gacagaauauuugauguca

SEQ ID NO: 2232629 - RNA, 19 nt, Artificial Sequence
  Description of Artificial Sequence: Synthetic oligonucleotide
  Antisense strand to SEQ ID NO: 2232628
ugacaucaaauauucuguc

SEQ ID NO: 2232630 - RNA, 19 nt, Artificial Sequence
  Description of Artificial Sequence: Synthetic oligonucleotide
  Sense strand starting at position 2057 of SEQ ID NO: 1884002
augucauuagaucaaugcu

SEQ ID NO: 2232631 - RNA, 19 nt, Artificial Sequence
  Description of Artificial Sequence: Synthetic oligonucleotide
  Antisense strand to SEQ ID NO: 2232630
agcauugaucuaaugacau

SEQ ID NO: 2232632 - RNA, 19 nt, Artificial Sequence
  Description of Artificial Sequence: Synthetic oligonucleotide
  Sense strand starting at position 2078 of SEQ ID NO: 1884002
auucucauugccuggaaua

SEQ ID NO: 2232633 - RNA, 19 nt, Artificial Sequence
  Description of Artificial Sequence: Synthetic oligonucleotide
  Antisense strand to SEQ ID NO: 2232632
uauuccaggcaaugagaau

SEQ ID NO: 2232634 - RNA, 19 nt, Artificial Sequence
  Description of Artificial Sequence: Synthetic oligonucleotide
  Sense strand starting at position 2079 of SEQ ID NO: 1884002
uucucauugccuggaauag

SEQ ID NO: 2232635 - RNA, 19 nt, Artificial Sequence
  Description of Artificial Sequence: Synthetic oligonucleotide
  Antisense strand to SEQ ID NO: 2232634
cuauuccaggcaaugagaa

SEQ ID NO: 2232636 - RNA, 19 nt, Artificial Sequence
  Description of Artificial Sequence: Synthetic oligonucleotide
  Sense strand starting at position 2080 of SEQ ID NO: 1884002
ucucauugccuggaauagu

SEQ ID NO: 2232637 - RNA, 19 nt, Artificial Sequence
  Description of Artificial Sequence: Synthetic oligonucleotide
  Antisense strand to SEQ ID NO: 2232636
acuauuccaggcaaugaga

SEQ ID NO: 2232638 - RNA, 19 nt, Artificial Sequence
  Description of Artificial Sequence: Synthetic oligonucleotide
  Sense strand starting at position 2090 of SEQ ID NO: 1884002
uggaauagugccugacacu

SEQ ID NO: 2232639 - RNA, 19 nt, Artificial Sequence
  Description of Artificial Sequence: Synthetic oligonucleotide
  Antisense strand to SEQ ID NO: 2232638
agugucaggcacuauucca

SEQ ID NO: 2232640 - RNA, 19 nt, Artificial Sequence
  Description of Artificial Sequence: Synthetic oligonucleotide
  Sense strand starting at position 2091 of SEQ ID NO: 1884002
ggaauagugccugacacug

SEQ ID NO: 2232641 - RNA, 19 nt, Artificial Sequence
  Description of Artificial Sequence: Synthetic oligonucleotide
  Antisense strand to SEQ ID NO: 2232640
cagugucaggcacuauucc

SEQ ID NO: 2232642 - RNA, 19 nt, Artificial Sequence
  Description of Artificial Sequence: Synthetic oligonucleotide
  Sense strand starting at position 2096 of SEQ ID NO: 1884002
agugccugacacugauuaa

SEQ ID NO: 2232643 - RNA, 19 nt, Artificial Sequence
  Description of Artificial Sequence: Synthetic oligonucleotide
  Antisense strand to SEQ ID NO: 2232642
uuaaucagugucaggcacu

SEQ ID NO: 2232644 - RNA, 19 nt, Artificial Sequence
  Description of Artificial Sequence: Synthetic oligonucleotide
  Sense strand starting at position 2097 of SEQ ID NO: 1884002
gugccugacacugauuaag

SEQ ID NO: 2232645 - RNA, 19 nt, Artificial Sequence
  Description of Artificial Sequence: Synthetic oligonucleotide
  Antisense strand to SEQ ID NO: 2232644
cuuaaucagugucaggcac

SEQ ID NO: 2232646 - RNA, 19 nt, Artificial Sequence
  Description of Artificial Sequence: Synthetic oligonucleotide
  Sense strand starting at position 2099 of SEQ ID NO: 1884002
gccugacacugauuaagca

SEQ ID NO: 2232647 - RNA, 19 nt, Artificial Sequence
  Description of Artificial Sequence: Synthetic oligonucleotide
  Antisense strand to SEQ ID NO: 2232646
ugcuuaaucagugucaggc

SEQ ID NO: 2232648 - RNA, 19 nt, Artificial Sequence
  Description of Artificial Sequence: Synthetic oligonucleotide
  Sense strand starting at position 117 of SEQ ID NO: 1884003
caugcuguucugcagaaau

SEQ ID NO: 2232649 - RNA, 19 nt, Artificial Sequence
  Description of Artificial Sequence: Synthetic oligonucleotide
  Antisense strand to SEQ ID NO: 2232648
auuucugcagaacagcaug

SEQ ID NO: 2232650 - RNA, 19 nt, Artificial Sequence
  Description of Artificial Sequence: Synthetic oligonucleotide
  Sense strand starting at position 119 of SEQ ID NO: 1884003
ugcuguucugcagaaauca

SEQ ID NO: 2232651 - RNA, 19 nt, Artificial Sequence
  Description of Artificial Sequence: Synthetic oligonucleotide
  Antisense strand to SEQ ID NO: 2232650
ugauuucugcagaacagca

SEQ ID NO: 2232652 - RNA, 19 nt, Artificial Sequence
  Description of Artificial Sequence: Synthetic oligonucleotide
  Sense strand starting at position 167 of SEQ ID NO: 1884003
cuguguuacuuccuacaga

SEQ ID NO: 2232653 - RNA, 19 nt, Artificial Sequence
  Description of Artificial Sequence: Synthetic oligonucleotide
  Antisense strand to SEQ ID NO: 2232652
ucuguaggaaguaacacag

SEQ ID NO: 2232654 - RNA, 19 nt, Artificial Sequence
  Description of Artificial Sequence: Synthetic oligonucleotide
  Sense strand starting at position 170 of SEQ ID NO: 1884003
uguuacuuccuacagaucu

SEQ ID NO: 2232655 - RNA, 19 nt, Artificial Sequence
  Description of Artificial Sequence: Synthetic oligonucleotide
  Antisense strand to SEQ ID NO: 2232654
agaucuguaggaaguaaca

SEQ ID NO: 2232656 - RNA, 19 nt, Artificial Sequence
  Description of Artificial Sequence: Synthetic oligonucleotide
  Sense strand starting at position 177 of SEQ ID NO: 1884003
uccuacagaucuguuacau

SEQ ID NO: 2232657 - RNA, 19 nt, Artificial Sequence
  Description of Artificial Sequence: Synthetic oligonucleotide
  Antisense strand to SEQ ID NO: 2232656
auguaacagaucuguagga

SEQ ID NO: 2232658 - RNA, 19 nt, Artificial Sequence
  Description of Artificial Sequence: Synthetic oligonucleotide
  Sense strand starting at position 427 of SEQ ID NO: 1884003
auagcauuacucuaugagu

SEQ ID NO: 2232659 - RNA, 19 nt, Artificial Sequence
  Description of Artificial Sequence: Synthetic oligonucleotide
  Antisense strand to SEQ ID NO: 2232658
acucauagaguaaugcuau

SEQ ID NO: 2232660 - RNA, 19 nt, Artificial Sequence
  Description of Artificial Sequence: Synthetic oligonucleotide
  Sense strand starting at position 429 of SEQ ID NO: 1884003
agcauuacucuaugaguaa

SEQ ID NO: 2232661 - RNA, 19 nt, Artificial Sequence
  Description of Artificial Sequence: Synthetic oligonucleotide
  Antisense strand to SEQ ID NO: 2232660
uuacucauagaguaaugcu

SEQ ID NO: 2232662 - RNA, 19 nt, Artificial Sequence
  Description of Artificial Sequence: Synthetic oligonucleotide
  Sense strand starting at position 453 of SEQ ID NO: 1884003
auucuauucuuugugacau

SEQ ID NO: 2232663 - RNA, 19 nt, Artificial Sequence
  Description of Artificial Sequence: Synthetic oligonucleotide
  Antisense strand to SEQ ID NO: 2232662
augucacaaagaauagaau

SEQ ID NO: 2232664 - RNA, 19 nt, Artificial Sequence
  Description of Artificial Sequence: Synthetic oligonucleotide
  Sense strand starting at position 463 of SEQ ID NO: 1884003
uugugacaugcuuaauauu

SEQ ID NO: 2232665 - RNA, 19 nt, Artificial Sequence
  Description of Artificial Sequence: Synthetic oligonucleotide
  Antisense strand to SEQ ID NO: 2232664
aauauuaagcaugucacaa

SEQ ID NO: 2232666 - RNA, 19 nt, Artificial Sequence
  Description of Artificial Sequence: Synthetic oligonucleotide
  Sense strand starting at position 515 of SEQ ID NO: 1884003
uggcuagaagcaugaucuu

SEQ ID NO: 2232667 - RNA, 19 nt, Artificial Sequence
  Description of Artificial Sequence: Synthetic oligonucleotide
  Antisense strand to SEQ ID NO: 2232666
aagaucaugcuucuagcca

SEQ ID NO: 2232668 - RNA, 19 nt, Artificial Sequence
  Description of Artificial Sequence: Synthetic oligonucleotide
  Sense strand starting at position 518 of SEQ ID NO: 1884003
cuagaagcaugaucuuauu

SEQ ID NO: 2232669 - RNA, 19 nt, Artificial Sequence
  Description of Artificial Sequence: Synthetic oligonucleotide
  Antisense strand to SEQ ID NO: 2232668
aauaagaucaugcuucuag

SEQ ID NO: 2232670 - RNA, 19 nt, Artificial Sequence
  Description of Artificial Sequence: Synthetic oligonucleotide
  Sense strand starting at position 881 of SEQ ID NO: 1884003
uauauuaauuagucgugga

SEQ ID NO: 2232671 - RNA, 19 nt, Artificial Sequence
  Description of Artificial Sequence: Synthetic oligonucleotide
  Antisense strand to SEQ ID NO: 2232670
uccacgacuaauuaauaua

SEQ ID NO: 2232672 - RNA, 19 nt, Artificial Sequence
  Description of Artificial Sequence: Synthetic oligonucleotide
  Sense strand starting at position 882 of SEQ ID NO: 1884003
auauuaauuagucguggag

SEQ ID NO: 2232673 - RNA, 19 nt, Artificial Sequence
  Description of Artificial Sequence: Synthetic oligonucleotide
  Antisense strand to SEQ ID NO: 2232672
cuccacgacuaauuaauau

SEQ ID NO: 2232674 - RNA, 19 nt, Artificial Sequence
  Description of Artificial Sequence: Synthetic oligonucleotide
  Sense strand starting at position 894 of SEQ ID NO: 1884003
cguggagucccuuggaaau

SEQ ID NO: 2232675 - RNA, 19 nt, Artificial Sequence
  Description of Artificial Sequence: Synthetic oligonucleotide
  Antisense strand to SEQ ID NO: 2232674
auuuccaagggacuccacg

SEQ ID NO: 2232676 - RNA, 19 nt, Artificial Sequence
  Description of Artificial Sequence: Synthetic oligonucleotide
  Sense strand starting at position 928 of SEQ ID NO: 1884003
cccuauuaccaauguggau

SEQ ID NO: 2232677 - RNA, 19 nt, Artificial Sequence
  Description of Artificial Sequence: Synthetic oligonucleotide
  Antisense strand to SEQ ID NO: 2232676
auccacauugguaauaggg

SEQ ID NO: 2232678 - RNA, 19 nt, Artificial Sequence
  Description of Artificial Sequence: Synthetic oligonucleotide
  Sense strand starting at position 964 of SEQ ID NO: 1884003
uuauuaauaucagugucca

SEQ ID NO: 2232679 - RNA, 19 nt, Artificial Sequence
  Description of Artificial Sequence: Synthetic oligonucleotide
  Antisense strand to SEQ ID NO: 2232678
uggacacugauauuaauaa

SEQ ID NO: 2232680 - RNA, 19 nt, Artificial Sequence
  Description of Artificial Sequence: Synthetic oligonucleotide
  Sense strand starting at position 983 of SEQ ID NO: 1884003
ugugguucuagugaaaguu

SEQ ID NO: 2232681 - RNA, 19 nt, Artificial Sequence
  Description of Artificial Sequence: Synthetic oligonucleotide
  Antisense strand to SEQ ID NO: 2232680
aacuuucacuagaaccaca

SEQ ID NO: 2232682 - RNA, 19 nt, Artificial Sequence
  Description of Artificial Sequence: Synthetic oligonucleotide
  Sense strand starting at position 1242 of SEQ ID NO: 1884003
ucagucaaggcauauuaua

SEQ ID NO: 2232683 - RNA, 19 nt, Artificial Sequence
  Description of Artificial Sequence: Synthetic oligonucleotide
  Antisense strand to SEQ ID NO: 2232682
uauaauaugccuugacuga

SEQ ID NO: 2232684 - RNA, 19 nt, Artificial Sequence
  Description of Artificial Sequence: Synthetic oligonucleotide
  Sense strand starting at position 1266 of SEQ ID NO: 1884003
guuaguaauagcuaguuau

SEQ ID NO: 2232685 - RNA, 19 nt, Artificial Sequence
  Description of Artificial Sequence: Synthetic oligonucleotide
  Antisense strand to SEQ ID NO: 2232684
auaacuagcuauuacuaac

SEQ ID NO: 2232686 - RNA, 19 nt, Artificial Sequence
  Description of Artificial Sequence: Synthetic oligonucleotide
  Sense strand starting at position 1449 of SEQ ID NO: 1884003
uauuguaagccagaugcua

SEQ ID NO: 2232687 - RNA, 19 nt, Artificial Sequence
  Description of Artificial Sequence: Synthetic oligonucleotide
  Antisense strand to SEQ ID NO: 2232686
uagcaucuggcuuacaaua

SEQ ID NO: 2232688 - RNA, 19 nt, Artificial Sequence
  Description of Artificial Sequence: Synthetic oligonucleotide
  Sense strand starting at position 1477 of SEQ ID NO: 1884003
uuauauguacguuaaucca

SEQ ID NO: 2232689 - RNA, 19 nt, Artificial Sequence
  Description of Artificial Sequence: Synthetic oligonucleotide
  Antisense strand to SEQ ID NO: 2232688
uggauuaacguacauauaa

SEQ ID NO: 2232690 - RNA, 19 nt, Artificial Sequence
  Description of Artificial Sequence: Synthetic oligonucleotide
  Sense strand starting at position 1748 of SEQ ID NO: 1884003
acuuacuugauccggagua

SEQ ID NO: 2232691 - RNA, 19 nt, Artificial Sequence
  Description of Artificial Sequence: Synthetic oligonucleotide
  Antisense strand to SEQ ID NO: 2232690
uacuccggaucaaguaagu

SEQ ID NO: 2232692 - RNA, 19 nt, Artificial Sequence
  Description of Artificial Sequence: Synthetic oligonucleotide
  Sense strand starting at position 2024 of SEQ ID NO: 1884003
ccuggagagcuuugguuua

SEQ ID NO: 2232693 - RNA, 19 nt, Artificial Sequence
  Description of Artificial Sequence: Synthetic oligonucleotide
  Antisense strand to SEQ ID NO: 2232692
uaaaccaaagcucuccagg

SEQ ID NO: 2232694 - RNA, 19 nt, Artificial Sequence
  Description of Artificial Sequence: Synthetic oligonucleotide
  Sense strand starting at position 2026 of SEQ ID NO: 1884003
uggagagcuuugguuuaaa

SEQ ID NO: 2232695 - RNA, 19 nt, Artificial Sequence
  Description of Artificial Sequence: Synthetic oligonucleotide
  Antisense strand to SEQ ID NO: 2232694
uuuaaaccaaagcucucca

SEQ ID NO: 2232696 - RNA, 19 nt, Artificial Sequence
  Description of Artificial Sequence: Synthetic oligonucleotide
  Sense strand starting at position 2029 of SEQ ID NO: 1884003
agagcuuugguuuaaagua

SEQ ID NO: 2232697 - RNA, 19 nt, Artificial Sequence
  Description of Artificial Sequence: Synthetic oligonucleotide
  Antisense strand to SEQ ID NO: 2232696
uacuuuaaaccaaagcucu

SEQ ID NO: 2232698 - RNA, 19 nt, Artificial Sequence
  Description of Artificial Sequence: Synthetic oligonucleotide
  Sense strand starting at position 2063 of SEQ ID NO: 1884003
uacguaaugggagguugaa

SEQ ID NO: 2232699 - RNA, 19 nt, Artificial Sequence
  Description of Artificial Sequence: Synthetic oligonucleotide
  Antisense strand to SEQ ID NO: 2232698
uucaaccucccauuacgua

SEQ ID NO: 2232700 - RNA, 19 nt, Artificial Sequence
  Description of Artificial Sequence: Synthetic oligonucleotide
  Sense strand starting at position 2114 of SEQ ID NO: 1884003
ucagcuaaccucuagguuu

SEQ ID NO: 2232701 - RNA, 19 nt, Artificial Sequence
  Description of Artificial Sequence: Synthetic oligonucleotide
  Antisense strand to SEQ ID NO: 2232700
aaaccuagagguuagcuga

SEQ ID NO: 2232702 - RNA, 19 nt, Artificial Sequence
  Description of Artificial Sequence: Synthetic oligonucleotide
  Sense strand starting at position 2248 of SEQ ID NO: 1884003
ggugguugaugggucauga

SEQ ID NO: 2232703 - RNA, 19 nt, Artificial Sequence
  Description of Artificial Sequence: Synthetic oligonucleotide
  Antisense strand to SEQ ID NO: 2232702
ucaugacccaucaaccacc

SEQ ID NO: 2232704 - RNA, 19 nt, Artificial Sequence
  Description of Artificial Sequence: Synthetic oligonucleotide
  Sense strand starting at position 2267 of SEQ ID NO: 1884003
cauggaacauuguccugaa

SEQ ID NO: 2232705 - RNA, 19 nt, Artificial Sequence
  Description of Artificial Sequence: Synthetic oligonucleotide
  Antisense strand to SEQ ID NO: 2232704
uucaggacaauguuccaug

SEQ ID NO: 2232706 - RNA, 19 nt, Artificial Sequence
  Description of Artificial Sequence: Synthetic oligonucleotide
  Sense strand starting at position 2268 of SEQ ID NO: 1884003
auggaacauuguccugaaa

SEQ ID NO: 2232707 - RNA, 19 nt, Artificial Sequence
  Description of Artificial Sequence: Synthetic oligonucleotide
  Antisense strand to SEQ ID NO: 2232706
uuucaggacaauguuccau

SEQ ID NO: 2232708 - RNA, 19 nt, Artificial Sequence
  Description of Artificial Sequence: Synthetic oligonucleotide
  Sense strand starting at position 2438 of SEQ ID NO: 1884003
gcuaacauugaguagcuuu

SEQ ID NO: 2232709 - RNA, 19 nt, Artificial Sequence
  Description of Artificial Sequence: Synthetic oligonucleotide
  Antisense strand to SEQ ID NO: 2232708
aaagcuacucaauguuagc

SEQ ID NO: 2232710 - RNA, 19 nt, Artificial Sequence
  Description of Artificial Sequence: Synthetic oligonucleotide
  Sense strand starting at position 2491 of SEQ ID NO: 1884003
ugggauaauuuccaauaga

SEQ ID NO: 2232711 - RNA, 19 nt, Artificial Sequence
  Description of Artificial Sequence: Synthetic oligonucleotide
  Antisense strand to SEQ ID NO: 2232710
ucuauuggaaauuauccca

SEQ ID NO: 2232712 - RNA, 19 nt, Artificial Sequence
  Description of Artificial Sequence: Synthetic oligonucleotide
  Sense strand starting at position 2509 of SEQ ID NO: 1884003
auaaauggauuuggaaacu

SEQ ID NO: 2232713 - RNA, 19 nt, Artificial Sequence
  Description of Artificial Sequence: Synthetic oligonucleotide
  Antisense strand to SEQ ID NO: 2232712
aguuuccaaauccauuuau

SEQ ID NO: 2232714 - RNA, 19 nt, Artificial Sequence
  Description of Artificial Sequence: Synthetic oligonucleotide
  Sense strand starting at position 2522 of SEQ ID NO: 1884003
gaaacuugauagucagcuu

SEQ ID NO: 2232715 - RNA, 19 nt, Artificial Sequence
  Description of Artificial Sequence: Synthetic oligonucleotide
  Antisense strand to SEQ ID NO: 2232714
aagcugacuaucaaguuuc

SEQ ID NO: 2232716 - RNA, 19 nt, Artificial Sequence
  Description of Artificial Sequence: Synthetic oligonucleotide
  Sense strand starting at position 2525 of SEQ ID NO: 1884003
acuugauagucagcuuaaa

SEQ ID NO: 2232717 - RNA, 19 nt, Artificial Sequence
  Description of Artificial Sequence: Synthetic oligonucleotide
  Antisense strand to SEQ ID NO: 2232716
uuuaagcugacuaucaagu

SEQ ID NO: 2232718 - RNA, 19 nt, Artificial Sequence
  Description of Artificial Sequence: Synthetic oligonucleotide
  Sense strand starting at position 2572 of SEQ ID NO: 1884003
uguauugauguaugauuga

SEQ ID NO: 2232719 - RNA, 19 nt, Artificial Sequence
  Description of Artificial Sequence: Synthetic oligonucleotide
  Antisense strand to SEQ ID NO: 2232718
ucaaucauacaucaauaca

SEQ ID NO: 2232720 - RNA, 19 nt, Artificial Sequence
  Description of Artificial Sequence: Synthetic oligonucleotide
  Sense strand starting at position 2676 of SEQ ID NO: 1884003
augcaauaagcguauccau

SEQ ID NO: 2232721 - RNA, 19 nt, Artificial Sequence
  Description of Artificial Sequence: Synthetic oligonucleotide
  Antisense strand to SEQ ID NO: 2232720
auggauacgcuuauugcau

SEQ ID NO: 2232722 - RNA, 19 nt, Artificial Sequence
  Description of Artificial Sequence: Synthetic oligonucleotide
  Sense strand starting at position 3141 of SEQ ID NO: 1884003
aggcaucuugcauagcuga

SEQ ID NO: 2232723 - RNA, 19 nt, Artificial Sequence
  Description of Artificial Sequence: Synthetic oligonucleotide
  Antisense strand to SEQ ID NO: 2232722
ucagcuaugcaagaugccu

SEQ ID NO: 2232724 - RNA, 19 nt, Artificial Sequence
  Description of Artificial Sequence: Synthetic oligonucleotide
  Sense strand starting at position 3299 of SEQ ID NO: 1884003
ugaugaauguacuccaggu

SEQ ID NO: 2232725 - RNA, 19 nt, Artificial Sequence
  Description of Artificial Sequence: Synthetic oligonucleotide
  Antisense strand to SEQ ID NO: 2232724
accuggaguacauucauca

SEQ ID NO: 2232726 - RNA, 19 nt, Artificial Sequence
  Description of Artificial Sequence: Synthetic oligonucleotide
  Sense strand starting at position 3399 of SEQ ID NO: 1884003
gggaaucugugcccuaaau

SEQ ID NO: 2232727 - RNA, 19 nt, Artificial Sequence
  Description of Artificial Sequence: Synthetic oligonucleotide
  Antisense strand to SEQ ID NO: 2232726
auuuagggcacagauuccc

SEQ ID NO: 2232728 - RNA, 19 nt, Artificial Sequence
  Description of Artificial Sequence: Synthetic oligonucleotide
  Sense strand starting at position 9 of SEQ ID NO: 1884004
ggaaguuugcacugggaaa

SEQ ID NO: 2232729 - RNA, 19 nt, Artificial Sequence
  Description of Artificial Sequence: Synthetic oligonucleotide
  Antisense strand to SEQ ID NO: 2232728
uuucccagugcaaacuucc

SEQ ID NO: 2232730 - RNA, 19 nt, Artificial Sequence
  Description of Artificial Sequence: Synthetic oligonucleotide
  Sense strand starting at position 10 of SEQ ID NO: 1884004
gaaguuugcacugggaaag

SEQ ID NO: 2232731 - RNA, 19 nt, Artificial Sequence
  Description of Artificial Sequence: Synthetic oligonucleotide
  Antisense strand to SEQ ID NO: 2232730
cuuucccagugcaaacuuc

SEQ ID NO: 2232732 - RNA, 19 nt, Artificial Sequence
  Description of Artificial Sequence: Synthetic oligonucleotide
  Sense strand starting at position 213 of SEQ ID NO: 1884004
gcuccaaagagucaggauu

SEQ ID NO: 2232733 - RNA, 19 nt, Artificial Sequence
  Description of Artificial Sequence: Synthetic oligonucleotide
  Antisense strand to SEQ ID NO: 2232732
aauccugacucuuuggagc

SEQ ID NO: 2232734 - RNA, 19 nt, Artificial Sequence
  Description of Artificial Sequence: Synthetic oligonucleotide
  Sense strand starting at position 285 of SEQ ID NO: 1884004
gugauaacugcaggaggaa

SEQ ID NO: 2232735 - RNA, 19 nt, Artificial Sequence
  Description of Artificial Sequence: Synthetic oligonucleotide
  Antisense strand to SEQ ID NO: 2232734
uuccuccugcaguuaucac

SEQ ID NO: 2232736 - RNA, 19 nt, Artificial Sequence
  Description of Artificial Sequence: Synthetic oligonucleotide
  Sense strand starting at position 387 of SEQ ID NO: 1884004
ugccucacucagggacaua

SEQ ID NO: 2232737 - RNA, 19 nt, Artificial Sequence
  Description of Artificial Sequence: Synthetic oligonucleotide
  Antisense strand to SEQ ID NO: 2232736
uaugucccugagugaggca

SEQ ID NO: 2232738 - RNA, 19 nt, Artificial Sequence
  Description of Artificial Sequence: Synthetic oligonucleotide
  Sense strand starting at position 495 of SEQ ID NO: 1884004
uuggaaauuagauaucguu

SEQ ID NO: 2232739 - RNA, 19 nt, Artificial Sequence
  Description of Artificial Sequence: Synthetic oligonucleotide
  Antisense strand to SEQ ID NO: 2232738
aacgauaucuaauuuccaa

SEQ ID NO: 2232740 - RNA, 19 nt, Artificial Sequence
  Description of Artificial Sequence: Synthetic oligonucleotide
  Sense strand starting at position 596 of SEQ ID NO: 1884004
caguuaaagugucuaagac

SEQ ID NO: 2232741 - RNA, 19 nt, Artificial Sequence
  Description of Artificial Sequence: Synthetic oligonucleotide
  Antisense strand to SEQ ID NO: 2232740
gucuuagacacuuuaacug

SEQ ID NO: 2232742 - RNA, 19 nt, Artificial Sequence
  Description of Artificial Sequence: Synthetic oligonucleotide
  Sense strand starting at position 597 of SEQ ID NO: 1884004
aguuaaagugucuaagaca

SEQ ID NO: 2232743 - RNA, 19 nt, Artificial Sequence
  Description of Artificial Sequence: Synthetic oligonucleotide
  Antisense strand to SEQ ID NO: 2232742
ugucuuagacacuuuaacu

SEQ ID NO: 2232744 - RNA, 19 nt, Artificial Sequence
  Description of Artificial Sequence: Synthetic oligonucleotide
  Sense strand starting at position 763 of SEQ ID NO: 1884004
uaagaacagucagauuuga

SEQ ID NO: 2232745 - RNA, 19 nt, Artificial Sequence
  Description of Artificial Sequence: Synthetic oligonucleotide
  Antisense strand to SEQ ID NO: 2232744
ucaaaucugacuguucuua

SEQ ID NO: 2232746 - RNA, 19 nt, Artificial Sequence
  Description of Artificial Sequence: Synthetic oligonucleotide
  Sense strand starting at position 794 of SEQ ID NO: 1884004
guguauguuguagugguua

SEQ ID NO: 2232747 - RNA, 19 nt, Artificial Sequence
  Description of Artificial Sequence: Synthetic oligonucleotide
  Antisense strand to SEQ ID NO: 2232746
uaaccacuacaacauacac

SEQ ID NO: 2232748 - RNA, 19 nt, Artificial Sequence
  Description of Artificial Sequence: Synthetic oligonucleotide
  Sense strand starting at position 818 of SEQ ID NO: 1884004
ucaugauaggacuguggua

SEQ ID NO: 2232749 - RNA, 19 nt, Artificial Sequence
  Description of Artificial Sequence: Synthetic oligonucleotide
  Antisense strand to SEQ ID NO: 2232748
uaccacaguccuaucauga

SEQ ID NO: 2232750 - RNA, 19 nt, Artificial Sequence
  Description of Artificial Sequence: Synthetic oligonucleotide
  Sense strand starting at position 1507 of SEQ ID NO: 1884004
gagccagcccuugaguaaa

SEQ ID NO: 2232751 - RNA, 19 nt, Artificial Sequence
  Description of Artificial Sequence: Synthetic oligonucleotide
  Antisense strand to SEQ ID NO: 2232750
uuuacucaagggcuggcuc

SEQ ID NO: 2232752 - RNA, 19 nt, Artificial Sequence
  Description of Artificial Sequence: Synthetic oligonucleotide
  Sense strand starting at position 1510 of SEQ ID NO: 1884004
ccagcccuugaguaaagaa

SEQ ID NO: 2232753 - RNA, 19 nt, Artificial Sequence
  Description of Artificial Sequence: Synthetic oligonucleotide
  Antisense strand to SEQ ID NO: 2232752
uucuuuacucaagggcugg

SEQ ID NO: 2232754 - RNA, 19 nt, Artificial Sequence
  Description of Artificial Sequence: Synthetic oligonucleotide
  Sense strand starting at position 1720 of SEQ ID NO: 1884004
ugugaagagaccuguggau

SEQ ID NO: 2232755 - RNA, 19 nt, Artificial Sequence
  Description of Artificial Sequence: Synthetic oligonucleotide
  Antisense strand to SEQ ID NO: 2232754
auccacaggucucuucaca

SEQ ID NO: 2232756 - RNA, 19 nt, Artificial Sequence
  Description of Artificial Sequence: Synthetic oligonucleotide
  Sense strand starting at position 1839 of SEQ ID NO: 1884004
uggacucuaugaucccaga

SEQ ID NO: 2232757 - RNA, 19 nt, Artificial Sequence
  Description of Artificial Sequence: Synthetic oligonucleotide
  Antisense strand to SEQ ID NO: 2232756
ucugggaucauagagucca

SEQ ID NO: 2232758 - RNA, 19 nt, Artificial Sequence
  Description of Artificial Sequence: Synthetic oligonucleotide
  Sense strand starting at position 2008 of SEQ ID NO: 1884004
gggaauuauuaugccagca

SEQ ID NO: 2232759 - RNA, 19 nt, Artificial Sequence
  Description of Artificial Sequence: Synthetic oligonucleotide
  Antisense strand to SEQ ID NO: 2232758
ugcuggcauaauaauuccc

SEQ ID NO: 2232760 - RNA, 19 nt, Artificial Sequence
  Description of Artificial Sequence: Synthetic oligonucleotide
  Sense strand starting at position 2037 of SEQ ID NO: 1884004
gguuguacgaucuaagaaa

SEQ ID NO: 2232761 - RNA, 19 nt, Artificial Sequence
  Description of Artificial Sequence: Synthetic oligonucleotide
  Antisense strand to SEQ ID NO: 2232760
uuucuuagaucguacaacc

SEQ ID NO: 2232762 - RNA, 19 nt, Artificial Sequence
  Description of Artificial Sequence: Synthetic oligonucleotide
  Sense strand starting at position 2131 of SEQ ID NO: 1884004
cucugugauccagaccaac

SEQ ID NO: 2232763 - RNA, 19 nt, Artificial Sequence
  Description of Artificial Sequence: Synthetic oligonucleotide
  Antisense strand to SEQ ID NO: 2232762
guuggucuggaucacagag

SEQ ID NO: 2232764 - RNA, 19 nt, Artificial Sequence
  Description of Artificial Sequence: Synthetic oligonucleotide
  Sense strand starting at position 2458 of SEQ ID NO: 1884004
ugugucuaucuacauauau

SEQ ID NO: 2232765 - RNA, 19 nt, Artificial Sequence
  Description of Artificial Sequence: Synthetic oligonucleotide
  Antisense strand to SEQ ID NO: 2232764
auauauguagauagacaca

SEQ ID NO: 2232766 - RNA, 19 nt, Artificial Sequence
  Description of Artificial Sequence: Synthetic oligonucleotide
  Sense strand starting at position 2494 of SEQ ID NO: 1884004
augaguaugagauggucca

SEQ ID NO: 2232767 - RNA, 19 nt, Artificial Sequence
  Description of Artificial Sequence: Synthetic oligonucleotide
  Antisense strand to SEQ ID NO: 2232766
uggaccaucucauacucau

SEQ ID NO: 2232768 - RNA, 19 nt, Artificial Sequence
  Description of Artificial Sequence: Synthetic oligonucleotide
  Sense strand starting at position 2495 of SEQ ID NO: 1884004
ugaguaugagaugguccaa

SEQ ID NO: 2232769 - RNA, 19 nt, Artificial Sequence
  Description of Artificial Sequence: Synthetic oligonucleotide
  Antisense strand to SEQ ID NO: 2232768
uuggaccaucucauacuca

SEQ ID NO: 2232770 - RNA, 19 nt, Artificial Sequence
  Description of Artificial Sequence: Synthetic oligonucleotide
  Sense strand starting at position 2602 of SEQ ID NO: 1884004
ggccaauggccuuauagga

SEQ ID NO: 2232771 - RNA, 19 nt, Artificial Sequence
  Description of Artificial Sequence: Synthetic oligonucleotide
  Antisense strand to SEQ ID NO: 2232770
uccuauaaggccauuggcc

SEQ ID NO: 2232772 - RNA, 19 nt, Artificial Sequence
  Description of Artificial Sequence: Synthetic oligonucleotide
  Sense strand starting at position 2615 of SEQ ID NO: 1884004
auaggagagaaguguaguu

SEQ ID NO: 2232773 - RNA, 19 nt, Artificial Sequence
  Description of Artificial Sequence: Synthetic oligonucleotide
  Antisense strand to SEQ ID NO: 2232772
aacuacacuucucuccuau

SEQ ID NO: 2232774 - RNA, 19 nt, Artificial Sequence
  Description of Artificial Sequence: Synthetic oligonucleotide
  Sense strand starting at position 2664 of SEQ ID NO: 1884004
auaaaugaugccugacugu

SEQ ID NO: 2232775 - RNA, 19 nt, Artificial Sequence
  Description of Artificial Sequence: Synthetic oligonucleotide
  Antisense strand to SEQ ID NO: 2232774
acagucaggcaucauuuau

SEQ ID NO: 2232776 - RNA, 19 nt, Artificial Sequence
  Description of Artificial Sequence: Synthetic oligonucleotide
  Sense strand starting at position 2692 of SEQ ID NO: 1884004
uuugguccauauguaauua

SEQ ID NO: 2232777 - RNA, 19 nt, Artificial Sequence
  Description of Artificial Sequence: Synthetic oligonucleotide
  Antisense strand to SEQ ID NO: 2232776
uaauuacauauggaccaaa

SEQ ID NO: 2232778 - RNA, 19 nt, Artificial Sequence
  Description of Artificial Sequence: Synthetic oligonucleotide
  Sense strand starting at position 2890 of SEQ ID NO: 1884004
augcaaugcucaucaugga

SEQ ID NO: 2232779 - RNA, 19 nt, Artificial Sequence
  Description of Artificial Sequence: Synthetic oligonucleotide
  Antisense strand to SEQ ID NO: 2232778
uccaugaugagcauugcau

SEQ ID NO: 2232780 - RNA, 19 nt, Artificial Sequence
  Description of Artificial Sequence: Synthetic oligonucleotide
  Sense strand starting at position 2891 of SEQ ID NO: 1884004
ugcaaugcucaucauggau

SEQ ID NO: 2232781 - RNA, 19 nt, Artificial Sequence
  Description of Artificial Sequence: Synthetic oligonucleotide
  Antisense strand to SEQ ID NO: 2232780
auccaugaugagcauugca

SEQ ID NO: 2232782 - RNA, 19 nt, Artificial Sequence
  Description of Artificial Sequence: Synthetic oligonucleotide
  Sense strand starting at position 3060 of SEQ ID NO: 1884004
aagagaauuccguggcaag

SEQ ID NO: 2232783 - RNA, 19 nt, Artificial Sequence
  Description of Artificial Sequence: Synthetic oligonucleotide
  Antisense strand to SEQ ID NO: 2232782
cuugccacggaauucucuu

SEQ ID NO: 2232784 - RNA, 19 nt, Artificial Sequence
  Description of Artificial Sequence: Synthetic oligonucleotide
  Sense strand starting at position 3061 of SEQ ID NO: 1884004
agagaauuccguggcaagg

SEQ ID NO: 2232785 - RNA, 19 nt, Artificial Sequence
  Description of Artificial Sequence: Synthetic oligonucleotide
  Antisense strand to SEQ ID NO: 2232784
ccuugccacggaauucucu

SEQ ID NO: 2232786 - RNA, 19 nt, Artificial Sequence
  Description of Artificial Sequence: Synthetic oligonucleotide
  Sense strand starting at position 3187 of SEQ ID NO: 1884004
uuugguaaaugagugacaa

SEQ ID NO: 2232787 - RNA, 19 nt, Artificial Sequence
  Description of Artificial Sequence: Synthetic oligonucleotide
  Antisense strand to SEQ ID NO: 2232786
uugucacucauuuaccaaa

SEQ ID NO: 2232788 - RNA, 19 nt, Artificial Sequence
  Description of Artificial Sequence: Synthetic oligonucleotide
  Sense strand starting at position 3188 of SEQ ID NO: 1884004
uugguaaaugagugacaac

SEQ ID NO: 2232789 - RNA, 19 nt, Artificial Sequence
  Description of Artificial Sequence: Synthetic oligonucleotide
  Antisense strand to SEQ ID NO: 2232788
guugucacucauuuaccaa

SEQ ID NO: 2232790 - RNA, 19 nt, Artificial Sequence
  Description of Artificial Sequence: Synthetic oligonucleotide
  Sense strand starting at position 3222 of SEQ ID NO: 1884004
gaagaauauugagugugcu

SEQ ID NO: 2232791 - RNA, 19 nt, Artificial Sequence
  Description of Artificial Sequence: Synthetic oligonucleotide
  Antisense strand to SEQ ID NO: 2232790
agcacacucaauauucuuc

SEQ ID NO: 2232792 - RNA, 19 nt, Artificial Sequence
  Description of Artificial Sequence: Synthetic oligonucleotide
  Sense strand starting at position 3264 of SEQ ID NO: 1884004
ugcugaaguuaucuaacaa

SEQ ID NO: 2232793 - RNA, 19 nt, Artificial Sequence
  Description of Artificial Sequence: Synthetic oligonucleotide
  Antisense strand to SEQ ID NO: 2232792
uuguuagauaacuucagca

SEQ ID NO: 2232794 - RNA, 19 nt, Artificial Sequence
  Description of Artificial Sequence: Synthetic oligonucleotide
  Sense strand starting at position 3600 of SEQ ID NO: 1884004
gagaaauucugcuuggcaa

SEQ ID NO: 2232795 - RNA, 19 nt, Artificial Sequence
  Description of Artificial Sequence: Synthetic oligonucleotide
  Antisense strand to SEQ ID NO: 2232794
uugccaagcagaauuucuc

SEQ ID NO: 2232796 - RNA, 19 nt, Artificial Sequence
  Description of Artificial Sequence: Synthetic oligonucleotide
  Sense strand starting at position 3601 of SEQ ID NO: 1884004
agaaauucugcuuggcaaa

SEQ ID NO: 2232797 - RNA, 19 nt, Artificial Sequence
  Description of Artificial Sequence: Synthetic oligonucleotide
  Antisense strand to SEQ ID NO: 2232796
uuugccaagcagaauuucu

SEQ ID NO: 2232798 - RNA, 19 nt, Artificial Sequence
  Description of Artificial Sequence: Synthetic oligonucleotide
  Sense strand starting at position 3726 of SEQ ID NO: 1884004
uauaucaaggguugauaca

SEQ ID NO: 2232799 - RNA, 19 nt, Artificial Sequence
  Description of Artificial Sequence: Synthetic oligonucleotide
  Antisense strand to SEQ ID NO: 2232798
uguaucaacccuugauaua

SEQ ID NO: 2232800 - RNA, 19 nt, Artificial Sequence
  Description of Artificial Sequence: Synthetic oligonucleotide
  Sense strand starting at position 3883 of SEQ ID NO: 1884004
auuaaacuccaucgugaua

SEQ ID NO: 2232801 - RNA, 19 nt, Artificial Sequence
  Description of Artificial Sequence: Synthetic oligonucleotide
  Antisense strand to SEQ ID NO: 2232800
uaucacgauggaguuuaau

SEQ ID NO: 2232802 - RNA, 19 nt, Artificial Sequence
  Description of Artificial Sequence: Synthetic oligonucleotide
  Sense strand starting at position 3910 of SEQ ID NO: 1884004
ugaugaucagauuggcaaa

SEQ ID NO: 2232803 - RNA, 19 nt, Artificial Sequence
  Description of Artificial Sequence: Synthetic oligonucleotide
  Antisense strand to SEQ ID NO: 2232802
uuugccaaucugaucauca

SEQ ID NO: 2232804 - RNA, 19 nt, Artificial Sequence
  Description of Artificial Sequence: Synthetic oligonucleotide
  Sense strand starting at position 3940 of SEQ ID NO: 1884004
uugacaacagauuguguaa

SEQ ID NO: 2232805 - RNA, 19 nt, Artificial Sequence
  Description of Artificial Sequence: Synthetic oligonucleotide
  Antisense strand to SEQ ID NO: 2232804
uuacacaaucuguugucaa

SEQ ID NO: 2232806 - RNA, 19 nt, Artificial Sequence
  Description of Artificial Sequence: Synthetic oligonucleotide
  Sense strand starting at position 3943 of SEQ ID NO: 1884004
acaacagauuguguaaaug

SEQ ID NO: 2232807 - RNA, 19 nt, Artificial Sequence
  Description of Artificial Sequence: Synthetic oligonucleotide
  Antisense strand to SEQ ID NO: 2232806
cauuuacacaaucuguugu

SEQ ID NO: 2232808 - RNA, 19 nt, Artificial Sequence
  Description of Artificial Sequence: Synthetic oligonucleotide
  Sense strand starting at position 223 of SEQ ID NO: 1884005
aggucaauucuccaugucu

SEQ ID NO: 2232809 - RNA, 19 nt, Artificial Sequence
  Description of Artificial Sequence: Synthetic oligonucleotide
  Antisense strand to SEQ ID NO: 2232808
agacauggagaauugaccu

SEQ ID NO: 2232810 - RNA, 19 nt, Artificial Sequence
  Description of Artificial Sequence: Synthetic oligonucleotide
  Sense strand starting at position 608 of SEQ ID NO: 1884005
ggaccaugagcucaucauu

SEQ ID NO: 2232811 - RNA, 19 nt, Artificial Sequence
  Description of Artificial Sequence: Synthetic oligonucleotide
  Antisense strand to SEQ ID NO: 2232810
aaugaugagcucauggucc

SEQ ID NO: 2232812 - RNA, 19 nt, Artificial Sequence
  Description of Artificial Sequence: Synthetic oligonucleotide
  Sense strand starting at position 614 of SEQ ID NO: 1884005
ugagcucaucauuaucaag

SEQ ID NO: 2232813 - RNA, 19 nt, Artificial Sequence
  Description of Artificial Sequence: Synthetic oligonucleotide
  Antisense strand to SEQ ID NO: 2232812
cuugauaaugaugagcuca

SEQ ID NO: 2232814 - RNA, 19 nt, Artificial Sequence
  Description of Artificial Sequence: Synthetic oligonucleotide
  Sense strand starting at position 616 of SEQ ID NO: 1884005
agcucaucauuaucaagga

SEQ ID NO: 2232815 - RNA, 19 nt, Artificial Sequence
  Description of Artificial Sequence: Synthetic oligonucleotide
  Antisense strand to SEQ ID NO: 2232814
uccuugauaaugaugagcu

SEQ ID NO: 2232816 - RNA, 19 nt, Artificial Sequence
  Description of Artificial Sequence: Synthetic oligonucleotide
  Sense strand starting at position 844 of SEQ ID NO: 1884005
ccuagugaugggcagagau

SEQ ID NO: 2232817 - RNA, 19 nt, Artificial Sequence
  Description of Artificial Sequence: Synthetic oligonucleotide
  Antisense strand to SEQ ID NO: 2232816
aucucugcccaucacuagg

SEQ ID NO: 2232818 - RNA, 19 nt, Artificial Sequence
  Description of Artificial Sequence: Synthetic oligonucleotide
  Sense strand starting at position 854 of SEQ ID NO: 1884005
ggcagagauggugguggaa

SEQ ID NO: 2232819 - RNA, 19 nt, Artificial Sequence
  Description of Artificial Sequence: Synthetic oligonucleotide
  Antisense strand to SEQ ID NO: 2232818
uuccaccaccaucucugcc

SEQ ID NO: 2232820 - RNA, 19 nt, Artificial Sequence
  Description of Artificial Sequence: Synthetic oligonucleotide
  Sense strand starting at position 866 of SEQ ID NO: 1884005
gguggaaucuuauuacagc

SEQ ID NO: 2232821 - RNA, 19 nt, Artificial Sequence
  Description of Artificial Sequence: Synthetic oligonucleotide
  Antisense strand to SEQ ID NO: 2232820
gcuguaauaagauuccacc

SEQ ID NO: 2232822 - RNA, 19 nt, Artificial Sequence
  Description of Artificial Sequence: Synthetic oligonucleotide
  Sense strand starting at position 1310 of SEQ ID NO: 1884005
acucuuguccaagauugac

SEQ ID NO: 2232823 - RNA, 19 nt, Artificial Sequence
  Description of Artificial Sequence: Synthetic oligonucleotide
  Antisense strand to SEQ ID NO: 2232822
gucaaucuuggacaagagu

SEQ ID NO: 2232824 - RNA, 19 nt, Artificial Sequence
  Description of Artificial Sequence: Synthetic oligonucleotide
  Sense strand starting at position 1318 of SEQ ID NO: 1884005
ccaagauugacuggccagu

SEQ ID NO: 2232825 - RNA, 19 nt, Artificial Sequence
  Description of Artificial Sequence: Synthetic oligonucleotide
  Antisense strand to SEQ ID NO: 2232824
acuggccagucaaucuugg

SEQ ID NO: 2232826 - RNA, 19 nt, Artificial Sequence
  Description of Artificial Sequence: Synthetic oligonucleotide
  Sense strand starting at position 1491 of SEQ ID NO: 1884005
gcaucauaaugaucuugau

SEQ ID NO: 2232827 - RNA, 19 nt, Artificial Sequence
  Description of Artificial Sequence: Synthetic oligonucleotide
  Antisense strand to SEQ ID NO: 2232826
aucaagaucauuaugaugc

SEQ ID NO: 2232828 - RNA, 19 nt, Artificial Sequence
  Description of Artificial Sequence: Synthetic oligonucleotide
  Sense strand starting at position 1559 of SEQ ID NO: 1884005
caauaauuagagugugaaa

SEQ ID NO: 2232829 - RNA, 19 nt, Artificial Sequence
  Description of Artificial Sequence: Synthetic oligonucleotide
  Antisense strand to SEQ ID NO: 2232828
uuucacacucuaauuauug

SEQ ID NO: 2232830 - RNA, 19 nt, Artificial Sequence
  Description of Artificial Sequence: Synthetic oligonucleotide
  Sense strand starting at position 1568 of SEQ ID NO: 1884005
gagugugaaagagguaaga

SEQ ID NO: 2232831 - RNA, 19 nt, Artificial Sequence
  Description of Artificial Sequence: Synthetic oligonucleotide
  Antisense strand to SEQ ID NO: 2232830
ucuuaccucuuucacacuc

SEQ ID NO: 2232832 - RNA, 19 nt, Artificial Sequence
  Description of Artificial Sequence: Synthetic oligonucleotide
  Sense strand starting at position 1589 of SEQ ID NO: 1884005
aaguucugagagugauaua

SEQ ID NO: 2232833 - RNA, 19 nt, Artificial Sequence
  Description of Artificial Sequence: Synthetic oligonucleotide
  Antisense strand to SEQ ID NO: 2232832
uauaucacucucagaacuu

SEQ ID NO: 2232834 - RNA, 19 nt, Artificial Sequence
  Description of Artificial Sequence: Synthetic oligonucleotide
  Sense strand starting at position 1814 of SEQ ID NO: 1884005
gcuaguguauauguaauuu

SEQ ID NO: 2232835 - RNA, 19 nt, Artificial Sequence
  Description of Artificial Sequence: Synthetic oligonucleotide
  Antisense strand to SEQ ID NO: 2232834
aaauuacauauacacuagc

SEQ ID NO: 2232836 - RNA, 19 nt, Artificial Sequence
  Description of Artificial Sequence: Synthetic oligonucleotide
  Sense strand starting at position 1839 of SEQ ID NO: 1884005
ugcuauuuaucagcuguau

SEQ ID NO: 2232837 - RNA, 19 nt, Artificial Sequence
  Description of Artificial Sequence: Synthetic oligonucleotide
  Antisense strand to SEQ ID NO: 2232836
auacagcugauaaauagca

SEQ ID NO: 2232838 - RNA, 19 nt, Artificial Sequence
  Description of Artificial Sequence: Synthetic oligonucleotide
  Sense strand starting at position 1905 of SEQ ID NO: 1884005
aggacauaccucugaaugu

SEQ ID NO: 2232839 - RNA, 19 nt, Artificial Sequence
  Description of Artificial Sequence: Synthetic oligonucleotide
  Antisense strand to SEQ ID NO: 2232838
acauucagagguauguccu

SEQ ID NO: 2232840 - RNA, 19 nt, Artificial Sequence
  Description of Artificial Sequence: Synthetic oligonucleotide
  Sense strand starting at position 1988 of SEQ ID NO: 1884005
gcugaauaguaucucauga

SEQ ID NO: 2232841 - RNA, 19 nt, Artificial Sequence
  Description of Artificial Sequence: Synthetic oligonucleotide
  Antisense strand to SEQ ID NO: 2232840
ucaugagauacuauucagc

SEQ ID NO: 2232842 - RNA, 19 nt, Artificial Sequence
  Description of Artificial Sequence: Synthetic oligonucleotide
  Sense strand starting at position 2069 of SEQ ID NO: 1884005
gacugacugcugcagaaau

SEQ ID NO: 2232843 - RNA, 19 nt, Artificial Sequence
  Description of Artificial Sequence: Synthetic oligonucleotide
  Antisense strand to SEQ ID NO: 2232842
auuucugcagcagucaguc

SEQ ID NO: 2232844 - RNA, 19 nt, Artificial Sequence
  Description of Artificial Sequence: Synthetic oligonucleotide
  Sense strand starting at position 2071 of SEQ ID NO: 1884005
cugacugcugcagaaauau

SEQ ID NO: 2232845 - RNA, 19 nt, Artificial Sequence
  Description of Artificial Sequence: Synthetic oligonucleotide
  Antisense strand to SEQ ID NO: 2232844
auauuucugcagcagucag

SEQ ID NO: 2232846 - RNA, 19 nt, Artificial Sequence
  Description of Artificial Sequence: Synthetic oligonucleotide
  Sense strand starting at position 2162 of SEQ ID NO: 1884005
uggaguuaauguccuauag

SEQ ID NO: 2232847 - RNA, 19 nt, Artificial Sequence
  Description of Artificial Sequence: Synthetic oligonucleotide
  Antisense strand to SEQ ID NO: 2232846
cuauaggacauuaacucca

SEQ ID NO: 2232848 - RNA, 19 nt, Artificial Sequence
  Description of Artificial Sequence: Synthetic oligonucleotide
  Sense strand starting at position 2166 of SEQ ID NO: 1884005
guuaauguccuauagguac

SEQ ID NO: 2232849 - RNA, 19 nt, Artificial Sequence
  Description of Artificial Sequence: Synthetic oligonucleotide
  Antisense strand to SEQ ID NO: 2232848
guaccuauaggacauuaac

SEQ ID NO: 2232850 - RNA, 19 nt, Artificial Sequence
  Description of Artificial Sequence: Synthetic oligonucleotide
  Sense strand starting at position 2174 of SEQ ID NO: 1884005
ccuauagguacuugaggau

SEQ ID NO: 2232851 - RNA, 19 nt, Artificial Sequence
  Description of Artificial Sequence: Synthetic oligonucleotide
  Antisense strand to SEQ ID NO: 2232850
auccucaaguaccuauagg

SEQ ID NO: 2232852 - RNA, 19 nt, Artificial Sequence
  Description of Artificial Sequence: Synthetic oligonucleotide
  Sense strand starting at position 2286 of SEQ ID NO: 1884005
gucuaugaguaaucaaaug

SEQ ID NO: 2232853 - RNA, 19 nt, Artificial Sequence
  Description of Artificial Sequence: Synthetic oligonucleotide
  Antisense strand to SEQ ID NO: 2232852
cauuugauuacucauagac

SEQ ID NO: 2232854 - RNA, 19 nt, Artificial Sequence
  Description of Artificial Sequence: Synthetic oligonucleotide
  Sense strand starting at position 2291 of SEQ ID NO: 1884005
ugaguaaucaaaugugagu

SEQ ID NO: 2232855 - RNA, 19 nt, Artificial Sequence
  Description of Artificial Sequence: Synthetic oligonucleotide
  Antisense strand to SEQ ID NO: 2232854
acucacauuugauuacuca

SEQ ID NO: 2232856 - RNA, 19 nt, Artificial Sequence
  Description of Artificial Sequence: Synthetic oligonucleotide
  Sense strand starting at position 2293 of SEQ ID NO: 1884005
aguaaucaaaugugaguga

SEQ ID NO: 2232857 - RNA, 19 nt, Artificial Sequence
  Description of Artificial Sequence: Synthetic oligonucleotide
  Antisense strand to SEQ ID NO: 2232856
ucacucacauuugauuacu

SEQ ID NO: 2232858 - RNA, 19 nt, Artificial Sequence
  Description of Artificial Sequence: Synthetic oligonucleotide
  Sense strand starting at position 2297 of SEQ ID NO: 1884005
aucaaaugugagugacaga

SEQ ID NO: 2232859 - RNA, 19 nt, Artificial Sequence
  Description of Artificial Sequence: Synthetic oligonucleotide
  Antisense strand to SEQ ID NO: 2232858
ucugucacucacauuugau

SEQ ID NO: 2232860 - RNA, 19 nt, Artificial Sequence
  Description of Artificial Sequence: Synthetic oligonucleotide
  Sense strand starting at position 2311 of SEQ ID NO: 1884005
acagaaggguaaccuuauu

SEQ ID NO: 2232861 - RNA, 19 nt, Artificial Sequence
  Description of Artificial Sequence: Synthetic oligonucleotide
  Antisense strand to SEQ ID NO: 2232860
aauaagguuacccuucugu

SEQ ID NO: 2232862 - RNA, 19 nt, Artificial Sequence
  Description of Artificial Sequence: Synthetic oligonucleotide
  Sense strand starting at position 2316 of SEQ ID NO: 1884005
aggguaaccuuauuccagu

SEQ ID NO: 2232863 - RNA, 19 nt, Artificial Sequence
  Description of Artificial Sequence: Synthetic oligonucleotide
  Antisense strand to SEQ ID NO: 2232862
acuggaauaagguuacccu

SEQ ID NO: 2232864 - RNA, 19 nt, Artificial Sequence
  Description of Artificial Sequence: Synthetic oligonucleotide
  Sense strand starting at position 2317 of SEQ ID NO: 1884005
ggguaaccuuauuccagua

SEQ ID NO: 2232865 - RNA, 19 nt, Artificial Sequence
  Description of Artificial Sequence: Synthetic oligonucleotide
  Antisense strand to SEQ ID NO: 2232864
uacuggaauaagguuaccc

SEQ ID NO: 2232866 - RNA, 19 nt, Artificial Sequence
  Description of Artificial Sequence: Synthetic oligonucleotide
  Sense strand starting at position 2322 of SEQ ID NO: 1884005
accuuauuccaguaauguc

SEQ ID NO: 2232867 - RNA, 19 nt, Artificial Sequence
  Description of Artificial Sequence: Synthetic oligonucleotide
  Antisense strand to SEQ ID NO: 2232866
gacauuacuggaauaaggu

SEQ ID NO: 2232868 - RNA, 19 nt, Artificial Sequence
  Description of Artificial Sequence: Synthetic oligonucleotide
  Sense strand starting at position 3091 of SEQ ID NO: 1884005
cauguuuacuucucagagg

SEQ ID NO: 2232869 - RNA, 19 nt, Artificial Sequence
  Description of Artificial Sequence: Synthetic oligonucleotide
  Antisense strand to SEQ ID NO: 2232868
ccucugagaaguaaacaug

SEQ ID NO: 2232870 - RNA, 19 nt, Artificial Sequence
  Description of Artificial Sequence: Synthetic oligonucleotide
  Sense strand starting at position 3199 of SEQ ID NO: 1884005
auaagagucuuggugaaca

SEQ ID NO: 2232871 - RNA, 19 nt, Artificial Sequence
  Description of Artificial Sequence: Synthetic oligonucleotide
  Antisense strand to SEQ ID NO: 2232870
uguucaccaagacucuuau

SEQ ID NO: 2232872 - RNA, 19 nt, Artificial Sequence
  Description of Artificial Sequence: Synthetic oligonucleotide
  Sense strand starting at position 3302 of SEQ ID NO: 1884005
uagguuauuaacuggugga

SEQ ID NO: 2232873 - RNA, 19 nt, Artificial Sequence
  Description of Artificial Sequence: Synthetic oligonucleotide
  Antisense strand to SEQ ID NO: 2232872
uccaccaguuaauaaccua

SEQ ID NO: 2232874 - RNA, 19 nt, Artificial Sequence
  Description of Artificial Sequence: Synthetic oligonucleotide
  Sense strand starting at position 3303 of SEQ ID NO: 1884005
agguuauuaacugguggau

SEQ ID NO: 2232875 - RNA, 19 nt, Artificial Sequence
  Description of Artificial Sequence: Synthetic oligonucleotide
  Antisense strand to SEQ ID NO: 2232874
auccaccaguuaauaaccu

SEQ ID NO: 2232876 - RNA, 19 nt, Artificial Sequence
  Description of Artificial Sequence: Synthetic oligonucleotide
  Sense strand starting at position 3656 of SEQ ID NO: 1884005
ggauuauggacaugagcua

SEQ ID NO: 2232877 - RNA, 19 nt, Artificial Sequence
  Description of Artificial Sequence: Synthetic oligonucleotide
  Antisense strand to SEQ ID NO: 2232876
uagcucauguccauaaucc

SEQ ID NO: 2232878 - RNA, 19 nt, Artificial Sequence
  Description of Artificial Sequence: Synthetic oligonucleotide
  Sense strand starting at position 3673 of SEQ ID NO: 1884005
uacuguguccagcaugaaa

SEQ ID NO: 2232879 - RNA, 19 nt, Artificial Sequence
  Description of Artificial Sequence: Synthetic oligonucleotide
  Antisense strand to SEQ ID NO: 2232878
uuucaugcuggacacagua

SEQ ID NO: 2232880 - RNA, 19 nt, Artificial Sequence
  Description of Artificial Sequence: Synthetic oligonucleotide
  Sense strand starting at position 3696 of SEQ ID NO: 1884005
uuaugauguguugaccauu

SEQ ID NO: 2232881 - RNA, 19 nt, Artificial Sequence
  Description of Artificial Sequence: Synthetic oligonucleotide
  Antisense strand to SEQ ID NO: 2232880
aauggucaacacaucauaa

SEQ ID NO: 2232882 - RNA, 19 nt, Artificial Sequence
  Description of Artificial Sequence: Synthetic oligonucleotide
  Sense strand starting at position 3750 of SEQ ID NO: 1884005
cugugaauuuaucaagacc

SEQ ID NO: 2232883 - RNA, 19 nt, Artificial Sequence
  Description of Artificial Sequence: Synthetic oligonucleotide
  Antisense strand to SEQ ID NO: 2232882
ggucuugauaaauucacag

SEQ ID NO: 2232884 - RNA, 19 nt, Artificial Sequence
  Description of Artificial Sequence: Synthetic oligonucleotide
  Sense strand starting at position 3873 of SEQ ID NO: 1884005
cuuaguugucaccacaaug

SEQ ID NO: 2232885 - RNA, 19 nt, Artificial Sequence
  Description of Artificial Sequence: Synthetic oligonucleotide
  Antisense strand to SEQ ID NO: 2232884
cauuguggugacaacuaag

SEQ ID NO: 2232886 - RNA, 19 nt, Artificial Sequence
  Description of Artificial Sequence: Synthetic oligonucleotide
  Sense strand starting at position 3940 of SEQ ID NO: 1884005
agucuagaagaaugcacaa

SEQ ID NO: 2232887 - RNA, 19 nt, Artificial Sequence
  Description of Artificial Sequence: Synthetic oligonucleotide
  Antisense strand to SEQ ID NO: 2232886
uugugcauucuucuagacu

SEQ ID NO: 2232888 - RNA, 19 nt, Artificial Sequence
  Description of Artificial Sequence: Synthetic oligonucleotide
  Sense strand starting at position 533 of SEQ ID NO: 1884006
caaguuugcccugaguuau

SEQ ID NO: 2232889 - RNA, 19 nt, Artificial Sequence
  Description of Artificial Sequence: Synthetic oligonucleotide
  Antisense strand to SEQ ID NO: 2232888
auaacucagggcaaacuug

SEQ ID NO: 2232890 - RNA, 19 nt, Artificial Sequence
  Description of Artificial Sequence: Synthetic oligonucleotide
  Sense strand starting at position 663 of SEQ ID NO: 1884006
guaccuguccuauaggaau

SEQ ID NO: 2232891 - RNA, 19 nt, Artificial Sequence
  Description of Artificial Sequence: Synthetic oligonucleotide
  Antisense strand to SEQ ID NO: 2232890
auuccuauaggacagguac

SEQ ID NO: 2232892 - RNA, 19 nt, Artificial Sequence
  Description of Artificial Sequence: Synthetic oligonucleotide
  Sense strand starting at position 715 of SEQ ID NO: 1884006
gcaagacaguccucuaagu

SEQ ID NO: 2232893 - RNA, 19 nt, Artificial Sequence
  Description of Artificial Sequence: Synthetic oligonucleotide
  Antisense strand to SEQ ID NO: 2232892
acuuagaggacugucuugc

SEQ ID NO: 2232894 - RNA, 19 nt, Artificial Sequence
  Description of Artificial Sequence: Synthetic oligonucleotide
  Sense strand starting at position 775 of SEQ ID NO: 1884006
uguaguugcccaggauaaa

SEQ ID NO: 2232895 - RNA, 19 nt, Artificial Sequence
  Description of Artificial Sequence: Synthetic oligonucleotide
  Antisense strand to SEQ ID NO: 2232894
uuuauccugggcaacuaca

SEQ ID NO: 2232896 - RNA, 19 nt, Artificial Sequence
  Description of Artificial Sequence: Synthetic oligonucleotide
  Sense strand starting at position 776 of SEQ ID NO: 1884006
guaguugcccaggauaaag

SEQ ID NO: 2232897 - RNA, 19 nt, Artificial Sequence
  Description of Artificial Sequence: Synthetic oligonucleotide
  Antisense strand to SEQ ID NO: 2232896
cuuuauccugggcaacuac

SEQ ID NO: 2232898 - RNA, 19 nt, Artificial Sequence
  Description of Artificial Sequence: Synthetic oligonucleotide
  Sense strand starting at position 1057 of SEQ ID NO: 1884006
ccugaugcaugaucaagua

SEQ ID NO: 2232899 - RNA, 19 nt, Artificial Sequence
  Description of Artificial Sequence: Synthetic oligonucleotide
  Antisense strand to SEQ ID NO: 2232898
uacuugaucaugcaucagg

SEQ ID NO: 2232900 - RNA, 19 nt, Artificial Sequence
  Description of Artificial Sequence: Synthetic oligonucleotide
  Sense strand starting at position 1140 of SEQ ID NO: 1884006
ugaauccucuauguuguua

SEQ ID NO: 2232901 - RNA, 19 nt, Artificial Sequence
  Description of Artificial Sequence: Synthetic oligonucleotide
  Antisense strand to SEQ ID NO: 2232900
uaacaacauagaggauuca

SEQ ID NO: 2232902 - RNA, 19 nt, Artificial Sequence
  Description of Artificial Sequence: Synthetic oligonucleotide
  Sense strand starting at position 1384 of SEQ ID NO: 1884006
acagcaggguuucucaauu

SEQ ID NO: 2232903 - RNA, 19 nt, Artificial Sequence
  Description of Artificial Sequence: Synthetic oligonucleotide
  Antisense strand to SEQ ID NO: 2232902
aauugagaaacccugcugu

SEQ ID NO: 2232904 - RNA, 19 nt, Artificial Sequence
  Description of Artificial Sequence: Synthetic oligonucleotide
  Sense strand starting at position 1493 of SEQ ID NO: 1884006
cauggaugucaguagcacu

SEQ ID NO: 2232905 - RNA, 19 nt, Artificial Sequence
  Description of Artificial Sequence: Synthetic oligonucleotide
  Antisense strand to SEQ ID NO: 2232904
agugcuacugacauccaug

SEQ ID NO: 2232906 - RNA, 19 nt, Artificial Sequence
  Description of Artificial Sequence: Synthetic oligonucleotide
  Sense strand starting at position 1549 of SEQ ID NO: 1884006
gucucuagacuuugacaaa

SEQ ID NO: 2232907 - RNA, 19 nt, Artificial Sequence
  Description of Artificial Sequence: Synthetic oligonucleotide
  Antisense strand to SEQ ID NO: 2232906
uuugucaaagucuagagac

SEQ ID NO: 2232908 - RNA, 19 nt, Artificial Sequence
  Description of Artificial Sequence: Synthetic oligonucleotide
  Sense strand starting at position 1561 of SEQ ID NO: 1884006
ugacaaauguucccuggaa

SEQ ID NO: 2232909 - RNA, 19 nt, Artificial Sequence
  Description of Artificial Sequence: Synthetic oligonucleotide
  Antisense strand to SEQ ID NO: 2232908
uuccagggaacauuuguca

SEQ ID NO: 2232910 - RNA, 19 nt, Artificial Sequence
  Description of Artificial Sequence: Synthetic oligonucleotide
  Sense strand starting at position 1562 of SEQ ID NO: 1884006
gacaaauguucccuggaag

SEQ ID NO: 2232911 - RNA, 19 nt, Artificial Sequence
  Description of Artificial Sequence: Synthetic oligonucleotide
  Antisense strand to SEQ ID NO: 2232910
cuuccagggaacauuuguc

SEQ ID NO: 2232912 - RNA, 19 nt, Artificial Sequence
  Description of Artificial Sequence: Synthetic oligonucleotide
  Sense strand starting at position 1565 of SEQ ID NO: 1884006
aaauguucccuggaaggca

SEQ ID NO: 2232913 - RNA, 19 nt, Artificial Sequence
  Description of Artificial Sequence: Synthetic oligonucleotide
  Antisense strand to SEQ ID NO: 2232912
ugccuuccagggaacauuu

SEQ ID NO: 2232914 - RNA, 19 nt, Artificial Sequence
  Description of Artificial Sequence: Synthetic oligonucleotide
  Sense strand starting at position 1764 of SEQ ID NO: 1884006
ccuugauuagguggaccaa

SEQ ID NO: 2232915 - RNA, 19 nt, Artificial Sequence
  Description of Artificial Sequence: Synthetic oligonucleotide
  Antisense strand to SEQ ID NO: 2232914
uugguccaccuaaucaagg

SEQ ID NO: 2232916 - RNA, 19 nt, Artificial Sequence
  Description of Artificial Sequence: Synthetic oligonucleotide
  Sense strand starting at position 2018 of SEQ ID NO: 1884006
gaauguuauggccaggauu

SEQ ID NO: 2232917 - RNA, 19 nt, Artificial Sequence
  Description of Artificial Sequence: Synthetic oligonucleotide
  Antisense strand to SEQ ID NO: 2232916
aauccuggccauaacauuc

SEQ ID NO: 2232918 - RNA, 19 nt, Artificial Sequence
  Description of Artificial Sequence: Synthetic oligonucleotide
  Sense strand starting at position 2020 of SEQ ID NO: 1884006
auguuauggccaggauuga

SEQ ID NO: 2232919 - RNA, 19 nt, Artificial Sequence
  Description of Artificial Sequence: Synthetic oligonucleotide
  Antisense strand to SEQ ID NO: 2232918
ucaauccuggccauaacau

SEQ ID NO: 2232920 - RNA, 19 nt, Artificial Sequence
  Description of Artificial Sequence: Synthetic oligonucleotide
  Sense strand starting at position 2021 of SEQ ID NO: 1884006
uguuauggccaggauugaa

SEQ ID NO: 2232921 - RNA, 19 nt, Artificial Sequence
  Description of Artificial Sequence: Synthetic oligonucleotide
  Antisense strand to SEQ ID NO: 2232920
uucaauccuggccauaaca

SEQ ID NO: 2232922 - RNA, 19 nt, Artificial Sequence
  Description of Artificial Sequence: Synthetic oligonucleotide
  Sense strand starting at position 2060 of SEQ ID NO: 1884006
gucucauucuaauugguua

SEQ ID NO: 2232923 - RNA, 19 nt, Artificial Sequence
  Description of Artificial Sequence: Synthetic oligonucleotide
  Antisense strand to SEQ ID NO: 2232922
uaaccaauuagaaugagac

SEQ ID NO: 2232924 - RNA, 19 nt, Artificial Sequence
  Description of Artificial Sequence: Synthetic oligonucleotide
  Sense strand starting at position 2063 of SEQ ID NO: 1884006
ucauucuaauugguuagaa

SEQ ID NO: 2232925 - RNA, 19 nt, Artificial Sequence
  Description of Artificial Sequence: Synthetic oligonucleotide
  Antisense strand to SEQ ID NO: 2232924
uucuaaccaauuagaauga

SEQ ID NO: 2232926 - RNA, 19 nt, Artificial Sequence
  Description of Artificial Sequence: Synthetic oligonucleotide
  Sense strand starting at position 2127 of SEQ ID NO: 1884006
guuuaacugcgugcuuaga

SEQ ID NO: 2232927 - RNA, 19 nt, Artificial Sequence
  Description of Artificial Sequence: Synthetic oligonucleotide
  Antisense strand to SEQ ID NO: 2232926
ucuaagcacgcaguuaaac

SEQ ID NO: 2232928 - RNA, 19 nt, Artificial Sequence
  Description of Artificial Sequence: Synthetic oligonucleotide
  Sense strand starting at position 2242 of SEQ ID NO: 1884006
augucacuccuaggauuau

SEQ ID NO: 2232929 - RNA, 19 nt, Artificial Sequence
  Description of Artificial Sequence: Synthetic oligonucleotide
  Antisense strand to SEQ ID NO: 2232928
auaauccuaggagugacau

SEQ ID NO: 2232930 - RNA, 19 nt, Artificial Sequence
  Description of Artificial Sequence: Synthetic oligonucleotide
  Sense strand starting at position 2254 of SEQ ID NO: 1884006
ggauuauaaauucgaaugu

SEQ ID NO: 2232931 - RNA, 19 nt, Artificial Sequence
  Description of Artificial Sequence: Synthetic oligonucleotide
  Antisense strand to SEQ ID NO: 2232930
acauucgaauuuauaaucc

SEQ ID NO: 2232932 - RNA, 19 nt, Artificial Sequence
  Description of Artificial Sequence: Synthetic oligonucleotide
  Sense strand starting at position 2312 of SEQ ID NO: 1884006
ugcauauuacgguaugauu

SEQ ID NO: 2232933 - RNA, 19 nt, Artificial Sequence
  Description of Artificial Sequence: Synthetic oligonucleotide
  Antisense strand to SEQ ID NO: 2232932
aaucauaccguaauaugca

SEQ ID NO: 2232934 - RNA, 19 nt, Artificial Sequence
  Description of Artificial Sequence: Synthetic oligonucleotide
  Sense strand starting at position 2314 of SEQ ID NO: 1884006
cauauuacgguaugauuag

SEQ ID NO: 2232935 - RNA, 19 nt, Artificial Sequence
  Description of Artificial Sequence: Synthetic oligonucleotide
  Antisense strand to SEQ ID NO: 2232934
cuaaucauaccguaauaug

SEQ ID NO: 2232936 - RNA, 19 nt, Artificial Sequence
  Description of Artificial Sequence: Synthetic oligonucleotide
  Sense strand starting at position 2360 of SEQ ID NO: 1884006
aucaauuucugggacaguu

SEQ ID NO: 2232937 - RNA, 19 nt, Artificial Sequence
  Description of Artificial Sequence: Synthetic oligonucleotide
  Antisense strand to SEQ ID NO: 2232936
aacugucccagaaauugau

SEQ ID NO: 2232938 - RNA, 19 nt, Artificial Sequence
  Description of Artificial Sequence: Synthetic oligonucleotide
  Sense strand starting at position 2370 of SEQ ID NO: 1884006
gggacaguuccugguaggu

SEQ ID NO: 2232939 - RNA, 19 nt, Artificial Sequence
  Description of Artificial Sequence: Synthetic oligonucleotide
  Antisense strand to SEQ ID NO: 2232938
accuaccaggaacuguccc

SEQ ID NO: 2232940 - RNA, 19 nt, Artificial Sequence
  Description of Artificial Sequence: Synthetic oligonucleotide
  Sense strand starting at position 2382 of SEQ ID NO: 1884006
gguaggugguggguauaua

SEQ ID NO: 2232941 - RNA, 19 nt, Artificial Sequence
  Description of Artificial Sequence: Synthetic oligonucleotide
  Antisense strand to SEQ ID NO: 2232940
uauauacccaccaccuacc

SEQ ID NO: 2232942 - RNA, 19 nt, Artificial Sequence
  Description of Artificial Sequence: Synthetic oligonucleotide
  Sense strand starting at position 2383 of SEQ ID NO: 1884006
guaggugguggguauauau

SEQ ID NO: 2232943 - RNA, 19 nt, Artificial Sequence
  Description of Artificial Sequence: Synthetic oligonucleotide
  Antisense strand to SEQ ID NO: 2232942
auauauacccaccaccuac

SEQ ID NO: 2232944 - RNA, 19 nt, Artificial Sequence
  Description of Artificial Sequence: Synthetic oligonucleotide
  Sense strand starting at position 2571 of SEQ ID NO: 1884006
ggacucuagcaucaucuga

SEQ ID NO: 2232945 - RNA, 19 nt, Artificial Sequence
  Description of Artificial Sequence: Synthetic oligonucleotide
  Antisense strand to SEQ ID NO: 2232944
ucagaugaugcuagagucc

SEQ ID NO: 2232946 - RNA, 19 nt, Artificial Sequence
  Description of Artificial Sequence: Synthetic oligonucleotide
  Sense strand starting at position 2929 of SEQ ID NO: 1884006
gcguggugacggguacuua

SEQ ID NO: 2232947 - RNA, 19 nt, Artificial Sequence
  Description of Artificial Sequence: Synthetic oligonucleotide
  Antisense strand to SEQ ID NO: 2232946
uaaguacccgucaccacgc

SEQ ID NO: 2232948 - RNA, 19 nt, Artificial Sequence
  Description of Artificial Sequence: Synthetic oligonucleotide
  Sense strand starting at position 3111 of SEQ ID NO: 1884006
ugaggaaucacuggcuagu

SEQ ID NO: 2232949 - RNA, 19 nt, Artificial Sequence
  Description of Artificial Sequence: Synthetic oligonucleotide
  Antisense strand to SEQ ID NO: 2232948
acuagccagugauuccuca

SEQ ID NO: 2232950 - RNA, 19 nt, Artificial Sequence
  Description of Artificial Sequence: Synthetic oligonucleotide
  Sense strand starting at position 3113 of SEQ ID NO: 1884006
aggaaucacuggcuaguua

SEQ ID NO: 2232951 - RNA, 19 nt, Artificial Sequence
  Description of Artificial Sequence: Synthetic oligonucleotide
  Antisense strand to SEQ ID NO: 2232950
uaacuagccagugauuccu

SEQ ID NO: 2232952 - RNA, 19 nt, Artificial Sequence
  Description of Artificial Sequence: Synthetic oligonucleotide
  Sense strand starting at position 3122 of SEQ ID NO: 1884006
uggcuaguuaguuauauug

SEQ ID NO: 2232953 - RNA, 19 nt, Artificial Sequence
  Description of Artificial Sequence: Synthetic oligonucleotide
  Antisense strand to SEQ ID NO: 2232952
caauauaacuaacuagcca

SEQ ID NO: 2232954 - RNA, 19 nt, Artificial Sequence
  Description of Artificial Sequence: Synthetic oligonucleotide
  Sense strand starting at position 3128 of SEQ ID NO: 1884006
guuaguuauauugggaaag

SEQ ID NO: 2232955 - RNA, 19 nt, Artificial Sequence
  Description of Artificial Sequence: Synthetic oligonucleotide
  Antisense strand to SEQ ID NO: 2232954
cuuucccaauauaacuaac

SEQ ID NO: 2232956 - RNA, 19 nt, Artificial Sequence
  Description of Artificial Sequence: Synthetic oligonucleotide
  Sense strand starting at position 3217 of SEQ ID NO: 1884006
gucugauguggugacucau

SEQ ID NO: 2232957 - RNA, 19 nt, Artificial Sequence
  Description of Artificial Sequence: Synthetic oligonucleotide
  Antisense strand to SEQ ID NO: 2232956
augagucaccacaucagac

SEQ ID NO: 2232958 - RNA, 19 nt, Artificial Sequence
  Description of Artificial Sequence: Synthetic oligonucleotide
  Sense strand starting at position 3229 of SEQ ID NO: 1884006
gacucaugcguauaaucug

SEQ ID NO: 2232959 - RNA, 19 nt, Artificial Sequence
  Description of Artificial Sequence: Synthetic oligonucleotide
  Antisense strand to SEQ ID NO: 2232958
cagauuauacgcaugaguc

SEQ ID NO: 2232960 - RNA, 19 nt, Artificial Sequence
  Description of Artificial Sequence: Synthetic oligonucleotide
  Sense strand starting at position 3442 of SEQ ID NO: 1884006
gcauuucccuaggaaacaa

SEQ ID NO: 2232961 - RNA, 19 nt, Artificial Sequence
  Description of Artificial Sequence: Synthetic oligonucleotide
  Antisense strand to SEQ ID NO: 2232960
uuguuuccuagggaaaugc

SEQ ID NO: 2232962 - RNA, 19 nt, Artificial Sequence
  Description of Artificial Sequence: Synthetic oligonucleotide
  Sense strand starting at position 3532 of SEQ ID NO: 1884006
cugggugccauggauuaua

SEQ ID NO: 2232963 - RNA, 19 nt, Artificial Sequence
  Description of Artificial Sequence: Synthetic oligonucleotide
  Antisense strand to SEQ ID NO: 2232962
uauaauccauggcacccag

SEQ ID NO: 2232964 - RNA, 19 nt, Artificial Sequence
  Description of Artificial Sequence: Synthetic oligonucleotide
  Sense strand starting at position 3540 of SEQ ID NO: 1884006
cauggauuauagcuguaau

SEQ ID NO: 2232965 - RNA, 19 nt, Artificial Sequence
  Description of Artificial Sequence: Synthetic oligonucleotide
  Antisense strand to SEQ ID NO: 2232964
auuacagcuauaauccaug

SEQ ID NO: 2232966 - RNA, 19 nt, Artificial Sequence
  Description of Artificial Sequence: Synthetic oligonucleotide
  Sense strand starting at position 3888 of SEQ ID NO: 1884006
uuggaacucuggcuauauc

SEQ ID NO: 2232967 - RNA, 19 nt, Artificial Sequence
  Description of Artificial Sequence: Synthetic oligonucleotide
  Antisense strand to SEQ ID NO: 2232966
gauauagccagaguuccaa

SEQ ID NO: 2232968 - RNA, 19 nt, Artificial Sequence
  Description of Artificial Sequence: Synthetic oligonucleotide
  Sense strand starting at position 92 of SEQ ID NO: 1884007
ugcauuuauuaggaaauga

SEQ ID NO: 2232969 - RNA, 19 nt, Artificial Sequence
  Description of Artificial Sequence: Synthetic oligonucleotide
  Antisense strand to SEQ ID NO: 2232968
ucauuuccuaauaaaugca

SEQ ID NO: 2232970 - RNA, 19 nt, Artificial Sequence
  Description of Artificial Sequence: Synthetic oligonucleotide
  Sense strand starting at position 377 of SEQ ID NO: 1884007
gcaggaaaguuauucuaau

SEQ ID NO: 2232971 - RNA, 19 nt, Artificial Sequence
  Description of Artificial Sequence: Synthetic oligonucleotide
  Antisense strand to SEQ ID NO: 2232970
auuagaauaacuuuccugc

SEQ ID NO: 2232972 - RNA, 19 nt, Artificial Sequence
  Description of Artificial Sequence: Synthetic oligonucleotide
  Sense strand starting at position 500 of SEQ ID NO: 1884007
aaauaauugugaguuguag

SEQ ID NO: 2232973 - RNA, 19 nt, Artificial Sequence
  Description of Artificial Sequence: Synthetic oligonucleotide
  Antisense strand to SEQ ID NO: 2232972
cuacaacucacaauuauuu

SEQ ID NO: 2232974 - RNA, 19 nt, Artificial Sequence
  Description of Artificial Sequence: Synthetic oligonucleotide
  Sense strand starting at position 508 of SEQ ID NO: 1884007
gugaguuguagugacuaaa

SEQ ID NO: 2232975 - RNA, 19 nt, Artificial Sequence
  Description of Artificial Sequence: Synthetic oligonucleotide
  Antisense strand to SEQ ID NO: 2232974
uuuagucacuacaacucac

SEQ ID NO: 2232976 - RNA, 19 nt, Artificial Sequence
  Description of Artificial Sequence: Synthetic oligonucleotide
  Sense strand starting at position 770 of SEQ ID NO: 1884007
aggccauaugaggacguau

SEQ ID NO: 2232977 - RNA, 19 nt, Artificial Sequence
  Description of Artificial Sequence: Synthetic oligonucleotide
  Antisense strand to SEQ ID NO: 2232976
auacguccucauauggccu

SEQ ID NO: 2232978 - RNA, 19 nt, Artificial Sequence
  Description of Artificial Sequence: Synthetic oligonucleotide
  Sense strand starting at position 772 of SEQ ID NO: 1884007
gccauaugaggacguauua

SEQ ID NO: 2232979 - RNA, 19 nt, Artificial Sequence
  Description of Artificial Sequence: Synthetic oligonucleotide
  Antisense strand to SEQ ID NO: 2232978
uaauacguccucauauggc

SEQ ID NO: 2232980 - RNA, 19 nt, Artificial Sequence
  Description of Artificial Sequence: Synthetic oligonucleotide
  Sense strand starting at position 865 of SEQ ID NO: 1884007
ucccuauaccuuuggaaga

SEQ ID NO: 2232981 - RNA, 19 nt, Artificial Sequence
  Description of Artificial Sequence: Synthetic oligonucleotide
  Antisense strand to SEQ ID NO: 2232980
ucuuccaaagguauaggga

SEQ ID NO: 2232982 - RNA, 19 nt, Artificial Sequence
  Description of Artificial Sequence: Synthetic oligonucleotide
  Sense strand starting at position 1016 of SEQ ID NO: 1884007
gugcauuccgaggagguca

SEQ ID NO: 2232983 - RNA, 19 nt, Artificial Sequence
  Description of Artificial Sequence: Synthetic oligonucleotide
  Antisense strand to SEQ ID NO: 2232982
ugaccuccucggaaugcac

SEQ ID NO: 2232984 - RNA, 19 nt, Artificial Sequence
  Description of Artificial Sequence: Synthetic oligonucleotide
  Sense strand starting at position 1083 of SEQ ID NO: 1884007
ucacaaagaccuugcugua

SEQ ID NO: 2232985 - RNA, 19 nt, Artificial Sequence
  Description of Artificial Sequence: Synthetic oligonucleotide
  Antisense strand to SEQ ID NO: 2232984
uacagcaaggucuuuguga

SEQ ID NO: 2232986 - RNA, 19 nt, Artificial Sequence
  Description of Artificial Sequence: Synthetic oligonucleotide
  Sense strand starting at position 1113 of SEQ ID NO: 1884007
aauaaagaaguccgucaaa

SEQ ID NO: 2232987 - RNA, 19 nt, Artificial Sequence
  Description of Artificial Sequence: Synthetic oligonucleotide
  Antisense strand to SEQ ID NO: 2232986
uuugacggacuucuuuauu

SEQ ID NO: 2232988 - RNA, 19 nt, Artificial Sequence
  Description of Artificial Sequence: Synthetic oligonucleotide
  Sense strand starting at position 1170 of SEQ ID NO: 1884007
guaguccucguugcuuauu

SEQ ID NO: 2232989 - RNA, 19 nt, Artificial Sequence
  Description of Artificial Sequence: Synthetic oligonucleotide
  Antisense strand to SEQ ID NO: 2232988
aauaagcaacgaggacuac

SEQ ID NO: 2232990 - RNA, 19 nt, Artificial Sequence
  Description of Artificial Sequence: Synthetic oligonucleotide
  Sense strand starting at position 1325 of SEQ ID NO: 1884007
cccacccguuucucagaaa

SEQ ID NO: 2232991 - RNA, 19 nt, Artificial Sequence
  Description of Artificial Sequence: Synthetic oligonucleotide
  Antisense strand to SEQ ID NO: 2232990
uuucugagaaacggguggg

SEQ ID NO: 2232992 - RNA, 19 nt, Artificial Sequence
  Description of Artificial Sequence: Synthetic oligonucleotide
  Sense strand starting at position 1697 of SEQ ID NO: 1884007
uucucaaacgccuagauaa

SEQ ID NO: 2232993 - RNA, 19 nt, Artificial Sequence
  Description of Artificial Sequence: Synthetic oligonucleotide
  Antisense strand to SEQ ID NO: 2232992
uuaucuaggcguuugagaa

SEQ ID NO: 2232994 - RNA, 19 nt, Artificial Sequence
  Description of Artificial Sequence: Synthetic oligonucleotide
  Sense strand starting at position 1709 of SEQ ID NO: 1884007
uagauaaugguuugccuca

SEQ ID NO: 2232995 - RNA, 19 nt, Artificial Sequence
  Description of Artificial Sequence: Synthetic oligonucleotide
  Antisense strand to SEQ ID NO: 2232994
ugaggcaaaccauuaucua

SEQ ID NO: 2232996 - RNA, 19 nt, Artificial Sequence
  Description of Artificial Sequence: Synthetic oligonucleotide
  Sense strand starting at position 1710 of SEQ ID NO: 1884007
agauaaugguuugccucau

SEQ ID NO: 2232997 - RNA, 19 nt, Artificial Sequence
  Description of Artificial Sequence: Synthetic oligonucleotide
  Antisense strand to SEQ ID NO: 2232996
augaggcaaaccauuaucu

SEQ ID NO: 2232998 - RNA, 19 nt, Artificial Sequence
  Description of Artificial Sequence: Synthetic oligonucleotide
  Sense strand starting at position 1711 of SEQ ID NO: 1884007
gauaaugguuugccucaua

SEQ ID NO: 2232999 - RNA, 19 nt, Artificial Sequence
  Description of Artificial Sequence: Synthetic oligonucleotide
  Antisense strand to SEQ ID NO: 2232998
uaugaggcaaaccauuauc

SEQ ID NO: 2233000 - RNA, 19 nt, Artificial Sequence
  Description of Artificial Sequence: Synthetic oligonucleotide
  Sense strand starting at position 1714 of SEQ ID NO: 1884007
aaugguuugccucauaggu

SEQ ID NO: 2233001 - RNA, 19 nt, Artificial Sequence
  Description of Artificial Sequence: Synthetic oligonucleotide
  Antisense strand to SEQ ID NO: 2233000
accuaugaggcaaaccauu

SEQ ID NO: 2233002 - RNA, 19 nt, Artificial Sequence
  Description of Artificial Sequence: Synthetic oligonucleotide
  Sense strand starting at position 1737 of SEQ ID NO: 1884007
guacacugguagguagaaa

SEQ ID NO: 2233003 - RNA, 19 nt, Artificial Sequence
  Description of Artificial Sequence: Synthetic oligonucleotide
  Antisense strand to SEQ ID NO: 2233002
uuucuaccuaccaguguac

SEQ ID NO: 2233004 - RNA, 19 nt, Artificial Sequence
  Description of Artificial Sequence: Synthetic oligonucleotide
  Sense strand starting at position 1860 of SEQ ID NO: 1884007
acaaacagugcuugaaauu

SEQ ID NO: 2233005 - RNA, 19 nt, Artificial Sequence
  Description of Artificial Sequence: Synthetic oligonucleotide
  Antisense strand to SEQ ID NO: 2233004
aauuucaagcacuguuugu

SEQ ID NO: 2233006 - RNA, 19 nt, Artificial Sequence
  Description of Artificial Sequence: Synthetic oligonucleotide
  Sense strand starting at position 1861 of SEQ ID NO: 1884007
caaacagugcuugaaauug

SEQ ID NO: 2233007 - RNA, 19 nt, Artificial Sequence
  Description of Artificial Sequence: Synthetic oligonucleotide
  Antisense strand to SEQ ID NO: 2233006
caauuucaagcacuguuug

SEQ ID NO: 2233008 - RNA, 19 nt, Artificial Sequence
  Description of Artificial Sequence: Synthetic oligonucleotide
  Sense strand starting at position 1943 of SEQ ID NO: 1884007
ccgucucugcuguuacgau

SEQ ID NO: 2233009 - RNA, 19 nt, Artificial Sequence
  Description of Artificial Sequence: Synthetic oligonucleotide
  Antisense strand to SEQ ID NO: 2233008
aucguaacagcagagacgg

SEQ ID NO: 2233010 - RNA, 19 nt, Artificial Sequence
  Description of Artificial Sequence: Synthetic oligonucleotide
  Sense strand starting at position 2247 of SEQ ID NO: 1884007
gguaauuugcucgggugca

SEQ ID NO: 2233011 - RNA, 19 nt, Artificial Sequence
  Description of Artificial Sequence: Synthetic oligonucleotide
  Antisense strand to SEQ ID NO: 2233010
ugcacccgagcaaauuacc

SEQ ID NO: 2233012 - RNA, 19 nt, Artificial Sequence
  Description of Artificial Sequence: Synthetic oligonucleotide
  Sense strand starting at position 2323 of SEQ ID NO: 1884007
uugugaccauuauugacuu

SEQ ID NO: 2233013 - RNA, 19 nt, Artificial Sequence
  Description of Artificial Sequence: Synthetic oligonucleotide
  Antisense strand to SEQ ID NO: 2233012
aagucaauaauggucacaa

SEQ ID NO: 2233014 - RNA, 19 nt, Artificial Sequence
  Description of Artificial Sequence: Synthetic oligonucleotide
  Sense strand starting at position 2472 of SEQ ID NO: 1884007
ggcacauuuccuugcuaac

SEQ ID NO: 2233015 - RNA, 19 nt, Artificial Sequence
  Description of Artificial Sequence: Synthetic oligonucleotide
  Antisense strand to SEQ ID NO: 2233014
guuagcaaggaaaugugcc

SEQ ID NO: 2233016 - RNA, 19 nt, Artificial Sequence
  Description of Artificial Sequence: Synthetic oligonucleotide
  Sense strand starting at position 2551 of SEQ ID NO: 1884007
uccucuuguuaagugacau

SEQ ID NO: 2233017 - RNA, 19 nt, Artificial Sequence
  Description of Artificial Sequence: Synthetic oligonucleotide
  Antisense strand to SEQ ID NO: 2233016
augucacuuaacaagagga

SEQ ID NO: 2233018 - RNA, 19 nt, Artificial Sequence
  Description of Artificial Sequence: Synthetic oligonucleotide
  Sense strand starting at position 2689 of SEQ ID NO: 1884007
uucagaugagucugaguug

SEQ ID NO: 2233019 - RNA, 19 nt, Artificial Sequence
  Description of Artificial Sequence: Synthetic oligonucleotide
  Antisense strand to SEQ ID NO: 2233018
caacucagacucaucugaa

SEQ ID NO: 2233020 - RNA, 19 nt, Artificial Sequence
  Description of Artificial Sequence: Synthetic oligonucleotide
  Sense strand starting at position 2698 of SEQ ID NO: 1884007
gucugaguugggcaggaau

SEQ ID NO: 2233021 - RNA, 19 nt, Artificial Sequence
  Description of Artificial Sequence: Synthetic oligonucleotide
  Antisense strand to SEQ ID NO: 2233020
auuccugcccaacucagac

SEQ ID NO: 2233022 - RNA, 19 nt, Artificial Sequence
  Description of Artificial Sequence: Synthetic oligonucleotide
  Sense strand starting at position 3027 of SEQ ID NO: 1884007
uccugucuugguuaugacu

SEQ ID NO: 2233023 - RNA, 19 nt, Artificial Sequence
  Description of Artificial Sequence: Synthetic oligonucleotide
  Antisense strand to SEQ ID NO: 2233022
agucauaaccaagacagga

SEQ ID NO: 2233024 - RNA, 19 nt, Artificial Sequence
  Description of Artificial Sequence: Synthetic oligonucleotide
  Sense strand starting at position 3036 of SEQ ID NO: 1884007
gguuaugacuuggucagga

SEQ ID NO: 2233025 - RNA, 19 nt, Artificial Sequence
  Description of Artificial Sequence: Synthetic oligonucleotide
  Antisense strand to SEQ ID NO: 2233024
uccugaccaagucauaacc

SEQ ID NO: 2233026 - RNA, 19 nt, Artificial Sequence
  Description of Artificial Sequence: Synthetic oligonucleotide
  Sense strand starting at position 3144 of SEQ ID NO: 1884007
cucucacggagaugucuau

SEQ ID NO: 2233027 - RNA, 19 nt, Artificial Sequence
  Description of Artificial Sequence: Synthetic oligonucleotide
  Antisense strand to SEQ ID NO: 2233026
auagacaucuccgugagag

SEQ ID NO: 2233028 - RNA, 19 nt, Artificial Sequence
  Description of Artificial Sequence: Synthetic oligonucleotide
  Sense strand starting at position 3148 of SEQ ID NO: 1884007
cacggagaugucuauggau

SEQ ID NO: 2233029 - RNA, 19 nt, Artificial Sequence
  Description of Artificial Sequence: Synthetic oligonucleotide
  Antisense strand to SEQ ID NO: 2233028
auccauagacaucuccgug

SEQ ID NO: 2233030 - RNA, 19 nt, Artificial Sequence
  Description of Artificial Sequence: Synthetic oligonucleotide
  Sense strand starting at position 3150 of SEQ ID NO: 1884007
cggagaugucuauggauag

SEQ ID NO: 2233031 - RNA, 19 nt, Artificial Sequence
  Description of Artificial Sequence: Synthetic oligonucleotide
  Antisense strand to SEQ ID NO: 2233030
cuauccauagacaucuccg

SEQ ID NO: 2233032 - RNA, 19 nt, Artificial Sequence
  Description of Artificial Sequence: Synthetic oligonucleotide
  Sense strand starting at position 3518 of SEQ ID NO: 1884007
ggaacacaucgccggaaga

SEQ ID NO: 2233033 - RNA, 19 nt, Artificial Sequence
  Description of Artificial Sequence: Synthetic oligonucleotide
  Antisense strand to SEQ ID NO: 2233032
ucuuccggcgauguguucc

SEQ ID NO: 2233034 - RNA, 19 nt, Artificial Sequence
  Description of Artificial Sequence: Synthetic oligonucleotide
  Sense strand starting at position 3519 of SEQ ID NO: 1884007
gaacacaucgccggaagaa

SEQ ID NO: 2233035 - RNA, 19 nt, Artificial Sequence
  Description of Artificial Sequence: Synthetic oligonucleotide
  Antisense strand to SEQ ID NO: 2233034
uucuuccggcgauguguuc

SEQ ID NO: 2233036 - RNA, 19 nt, Artificial Sequence
  Description of Artificial Sequence: Synthetic oligonucleotide
  Sense strand starting at position 3621 of SEQ ID NO: 1884007
agcacaaugaugcagaguu

SEQ ID NO: 2233037 - RNA, 19 nt, Artificial Sequence
  Description of Artificial Sequence: Synthetic oligonucleotide
  Antisense strand to SEQ ID NO: 2233036
aacucugcaucauugugcu

SEQ ID NO: 2233038 - RNA, 19 nt, Artificial Sequence
  Description of Artificial Sequence: Synthetic oligonucleotide
  Sense strand starting at position 3634 of SEQ ID NO: 1884007
agaguuuggccugaguggu

SEQ ID NO: 2233039 - RNA, 19 nt, Artificial Sequence
  Description of Artificial Sequence: Synthetic oligonucleotide
  Antisense strand to SEQ ID NO: 2233038
accacucaggccaaacucu

SEQ ID NO: 2233040 - RNA, 19 nt, Artificial Sequence
  Description of Artificial Sequence: Synthetic oligonucleotide
  Sense strand starting at position 3645 of SEQ ID NO: 1884007
ugaguggucggagaagagu

SEQ ID NO: 2233041 - RNA, 19 nt, Artificial Sequence
  Description of Artificial Sequence: Synthetic oligonucleotide
  Antisense strand to SEQ ID NO: 2233040
acucuucuccgaccacuca

SEQ ID NO: 2233042 - RNA, 19 nt, Artificial Sequence
  Description of Artificial Sequence: Synthetic oligonucleotide
  Sense strand starting at position 3731 of SEQ ID NO: 1884007
gccacuuccgcucaauaaa

SEQ ID NO: 2233043 - RNA, 19 nt, Artificial Sequence
  Description of Artificial Sequence: Synthetic oligonucleotide
  Antisense strand to SEQ ID NO: 2233042
uuuauugagcggaaguggc

SEQ ID NO: 2233044 - RNA, 19 nt, Artificial Sequence
  Description of Artificial Sequence: Synthetic oligonucleotide
  Sense strand starting at position 3913 of SEQ ID NO: 1884007
aagagcacucuguauguaa

SEQ ID NO: 2233045 - RNA, 19 nt, Artificial Sequence
  Description of Artificial Sequence: Synthetic oligonucleotide
  Antisense strand to SEQ ID NO: 2233044
uuacauacagagugcucuu

SEQ ID NO: 2233046 - RNA, 19 nt, Artificial Sequence
  Description of Artificial Sequence: Synthetic oligonucleotide
  Sense strand starting at position 3915 of SEQ ID NO: 1884007
gagcacucuguauguaaca

SEQ ID NO: 2233047 - RNA, 19 nt, Artificial Sequence
  Description of Artificial Sequence: Synthetic oligonucleotide
  Antisense strand to SEQ ID NO: 2233046
uguuacauacagagugcuc

SEQ ID NO: 2233048 - RNA, 19 nt, Artificial Sequence
  Description of Artificial Sequence: Synthetic oligonucleotide
  Sense strand starting at position 264 of SEQ ID NO: 1884008
ugaccaguaucagaaucaa

SEQ ID NO: 2233049 - RNA, 19 nt, Artificial Sequence
  Description of Artificial Sequence: Synthetic oligonucleotide
  Antisense strand to SEQ ID NO: 2233048
uugauucugauacugguca

SEQ ID NO: 2233050 - RNA, 19 nt, Artificial Sequence
  Description of Artificial Sequence: Synthetic oligonucleotide
  Sense strand starting at position 311 of SEQ ID NO: 1884008
acaagauaaucagagaauu

SEQ ID NO: 2233051 - RNA, 19 nt, Artificial Sequence
  Description of Artificial Sequence: Synthetic oligonucleotide
  Antisense strand to SEQ ID NO: 2233050
aauucucugauuaucuugu

SEQ ID NO: 2233052 - RNA, 19 nt, Artificial Sequence
  Description of Artificial Sequence: Synthetic oligonucleotide
  Sense strand starting at position 609 of SEQ ID NO: 1884008
ucaauuuguuucgagaagc

SEQ ID NO: 2233053 - RNA, 19 nt, Artificial Sequence
  Description of Artificial Sequence: Synthetic oligonucleotide
  Antisense strand to SEQ ID NO: 2233052
gcuucucgaaacaaauuga

SEQ ID NO: 2233054 - RNA, 19 nt, Artificial Sequence
  Description of Artificial Sequence: Synthetic oligonucleotide
  Sense strand starting at position 619 of SEQ ID NO: 1884008
ucgagaagccagcauuaca

SEQ ID NO: 2233055 - RNA, 19 nt, Artificial Sequence
  Description of Artificial Sequence: Synthetic oligonucleotide
  Antisense strand to SEQ ID NO: 2233054
uguaaugcuggcuucucga

SEQ ID NO: 2233056 - RNA, 19 nt, Artificial Sequence
  Description of Artificial Sequence: Synthetic oligonucleotide
  Sense strand starting at position 834 of SEQ ID NO: 1884008
ucucuaaagugucuuuaaa

SEQ ID NO: 2233057 - RNA, 19 nt, Artificial Sequence
  Description of Artificial Sequence: Synthetic oligonucleotide
  Antisense strand to SEQ ID NO: 2233056
uuuaaagacacuuuagaga

SEQ ID NO: 2233058 - RNA, 19 nt, Artificial Sequence
  Description of Artificial Sequence: Synthetic oligonucleotide
  Sense strand starting at position 926 of SEQ ID NO: 1884008
gggugcaugggcgaauaaa

SEQ ID NO: 2233059 - RNA, 19 nt, Artificial Sequence
  Description of Artificial Sequence: Synthetic oligonucleotide
  Antisense strand to SEQ ID NO: 2233058
uuuauucgcccaugcaccc

SEQ ID NO: 2233060 - RNA, 19 nt, Artificial Sequence
  Description of Artificial Sequence: Synthetic oligonucleotide
  Sense strand starting at position 958 of SEQ ID NO: 1884008
guacuaugaagaggguuau

SEQ ID NO: 2233061 - RNA, 19 nt, Artificial Sequence
  Description of Artificial Sequence: Synthetic oligonucleotide
  Antisense strand to SEQ ID NO: 2233060
auaacccucuucauaguac

SEQ ID NO: 2233062 - RNA, 19 nt, Artificial Sequence
  Description of Artificial Sequence: Synthetic oligonucleotide
  Sense strand starting at position 959 of SEQ ID NO: 1884008
uacuaugaagaggguuauu

SEQ ID NO: 2233063 - RNA, 19 nt, Artificial Sequence
  Description of Artificial Sequence: Synthetic oligonucleotide
  Antisense strand to SEQ ID NO: 2233062
aauaacccucuucauagua

SEQ ID NO: 2233064 - RNA, 19 nt, Artificial Sequence
  Description of Artificial Sequence: Synthetic oligonucleotide
  Sense strand starting at position 978 of SEQ ID NO: 1884008
uccaguuccagaugagaga

SEQ ID NO: 2233065 - RNA, 19 nt, Artificial Sequence
  Description of Artificial Sequence: Synthetic oligonucleotide
  Antisense strand to SEQ ID NO: 2233064
ucucucaucuggaacugga

SEQ ID NO: 2233066 - RNA, 19 nt, Artificial Sequence
  Description of Artificial Sequence: Synthetic oligonucleotide
  Sense strand starting at position 1051 of SEQ ID NO: 1884008
gacagagauccuggcagug

SEQ ID NO: 2233067 - RNA, 19 nt, Artificial Sequence
  Description of Artificial Sequence: Synthetic oligonucleotide
  Antisense strand to SEQ ID NO: 2233066
cacugccaggaucucuguc

SEQ ID NO: 2233068 - RNA, 19 nt, Artificial Sequence
  Description of Artificial Sequence: Synthetic oligonucleotide
  Sense strand starting at position 1993 of SEQ ID NO: 1884008
cuagauauccuguaaggca

SEQ ID NO: 2233069 - RNA, 19 nt, Artificial Sequence
  Description of Artificial Sequence: Synthetic oligonucleotide
  Antisense strand to SEQ ID NO: 2233068
ugccuuacaggauaucuag

SEQ ID NO: 2233070 - RNA, 19 nt, Artificial Sequence
  Description of Artificial Sequence: Synthetic oligonucleotide
  Sense strand starting at position 2009 of SEQ ID NO: 1884008
gcauguucggauuggauga

SEQ ID NO: 2233071 - RNA, 19 nt, Artificial Sequence
  Description of Artificial Sequence: Synthetic oligonucleotide
  Antisense strand to SEQ ID NO: 2233070
ucauccaauccgaacaugc

SEQ ID NO: 2233072 - RNA, 19 nt, Artificial Sequence
  Description of Artificial Sequence: Synthetic oligonucleotide
  Sense strand starting at position 2081 of SEQ ID NO: 1884008
cugaaauguuccuucucgu

SEQ ID NO: 2233073 - RNA, 19 nt, Artificial Sequence
  Description of Artificial Sequence: Synthetic oligonucleotide
  Antisense strand to SEQ ID NO: 2233072
acgagaaggaacauuucag

SEQ ID NO: 2233074 - RNA, 19 nt, Artificial Sequence
  Description of Artificial Sequence: Synthetic oligonucleotide
  Sense strand starting at position 2526 of SEQ ID NO: 1884008
agagcacuggcaugaauca

SEQ ID NO: 2233075 - RNA, 19 nt, Artificial Sequence
  Description of Artificial Sequence: Synthetic oligonucleotide
  Antisense strand to SEQ ID NO: 2233074
ugauucaugccagugcucu

SEQ ID NO: 2233076 - RNA, 19 nt, Artificial Sequence
  Description of Artificial Sequence: Synthetic oligonucleotide
  Sense strand starting at position 2661 of SEQ ID NO: 1884008
cccuguuuccuggaguuua

SEQ ID NO: 2233077 - RNA, 19 nt, Artificial Sequence
  Description of Artificial Sequence: Synthetic oligonucleotide
  Antisense strand to SEQ ID NO: 2233076
uaaacuccaggaaacaggg

SEQ ID NO: 2233078 - RNA, 19 nt, Artificial Sequence
  Description of Artificial Sequence: Synthetic oligonucleotide
  Sense strand starting at position 2669 of SEQ ID NO: 1884008
ccuggaguuuacuuacauu

SEQ ID NO: 2233079 - RNA, 19 nt, Artificial Sequence
  Description of Artificial Sequence: Synthetic oligonucleotide
  Antisense strand to SEQ ID NO: 2233078
aauguaaguaaacuccagg

SEQ ID NO: 2233080 - RNA, 19 nt, Artificial Sequence
  Description of Artificial Sequence: Synthetic oligonucleotide
  Sense strand starting at position 2738 of SEQ ID NO: 1884008
aagagaaaccugcagucuu

SEQ ID NO: 2233081 - RNA, 19 nt, Artificial Sequence
  Description of Artificial Sequence: Synthetic oligonucleotide
  Antisense strand to SEQ ID NO: 2233080
aagacugcagguuucucuu

SEQ ID NO: 2233082 - RNA, 19 nt, Artificial Sequence
  Description of Artificial Sequence: Synthetic oligonucleotide
  Sense strand starting at position 2783 of SEQ ID NO: 1884008
ucuugugugcgguccacau

SEQ ID NO: 2233083 - RNA, 19 nt, Artificial Sequence
  Description of Artificial Sequence: Synthetic oligonucleotide
  Antisense strand to SEQ ID NO: 2233082
auguggaccgcacacaaga

SEQ ID NO: 2233084 - RNA, 19 nt, Artificial Sequence
  Description of Artificial Sequence: Synthetic oligonucleotide
  Sense strand starting at position 2858 of SEQ ID NO: 1884008
cacccaaucguguauaguu

SEQ ID NO: 2233085 - RNA, 19 nt, Artificial Sequence
  Description of Artificial Sequence: Synthetic oligonucleotide
  Antisense strand to SEQ ID NO: 2233084
aacuauacacgauugggug

SEQ ID NO: 2233086 - RNA, 19 nt, Artificial Sequence
  Description of Artificial Sequence: Synthetic oligonucleotide
  Sense strand starting at position 2860 of SEQ ID NO: 1884008
cccaaucguguauaguuaa

SEQ ID NO: 2233087 - RNA, 19 nt, Artificial Sequence
  Description of Artificial Sequence: Synthetic oligonucleotide
  Antisense strand to SEQ ID NO: 2233086
uuaacuauacacgauuggg

SEQ ID NO: 2233088 - RNA, 19 nt, Artificial Sequence
  Description of Artificial Sequence: Synthetic oligonucleotide
  Sense strand starting at position 2863 of SEQ ID NO: 1884008
aaucguguauaguuaaacu

SEQ ID NO: 2233089 - RNA, 19 nt, Artificial Sequence
  Description of Artificial Sequence: Synthetic oligonucleotide
  Antisense strand to SEQ ID NO: 2233088
aguuuaacuauacacgauu

SEQ ID NO: 2233090 - RNA, 19 nt, Artificial Sequence
  Description of Artificial Sequence: Synthetic oligonucleotide
  Sense strand starting at position 2904 of SEQ ID NO: 1884008
cucccaucuccagguguuu

SEQ ID NO: 2233091 - RNA, 19 nt, Artificial Sequence
  Description of Artificial Sequence: Synthetic oligonucleotide
  Antisense strand to SEQ ID NO: 2233090
aaacaccuggagaugggag

SEQ ID NO: 2233092 - RNA, 19 nt, Artificial Sequence
  Description of Artificial Sequence: Synthetic oligonucleotide
  Sense strand starting at position 2915 of SEQ ID NO: 1884008
agguguuuaacaggaauug

SEQ ID NO: 2233093 - RNA, 19 nt, Artificial Sequence
  Description of Artificial Sequence: Synthetic oligonucleotide
  Antisense strand to SEQ ID NO: 2233092
caauuccuguuaaacaccu

SEQ ID NO: 2233094 - RNA, 19 nt, Artificial Sequence
  Description of Artificial Sequence: Synthetic oligonucleotide
  Sense strand starting at position 2933 of SEQ ID NO: 1884008
ggauacugagcaugugaua

SEQ ID NO: 2233095 - RNA, 19 nt, Artificial Sequence
  Description of Artificial Sequence: Synthetic oligonucleotide
  Antisense strand to SEQ ID NO: 2233094
uaucacaugcucaguaucc

SEQ ID NO: 2233096 - RNA, 19 nt, Artificial Sequence
  Description of Artificial Sequence: Synthetic oligonucleotide
  Sense strand starting at position 2936 of SEQ ID NO: 1884008
uacugagcaugugauauuu

SEQ ID NO: 2233097 - RNA, 19 nt, Artificial Sequence
  Description of Artificial Sequence: Synthetic oligonucleotide
  Antisense strand to SEQ ID NO: 2233096
aaauaucacaugcucagua

SEQ ID NO: 2233098 - RNA, 19 nt, Artificial Sequence
  Description of Artificial Sequence: Synthetic oligonucleotide
  Sense strand starting at position 3094 of SEQ ID NO: 1884008
uuaaauaucucaguucugu

SEQ ID NO: 2233099 - RNA, 19 nt, Artificial Sequence
  Description of Artificial Sequence: Synthetic oligonucleotide
  Antisense strand to SEQ ID NO: 2233098
acagaacugagauauuuaa

SEQ ID NO: 2233100 - RNA, 19 nt, Artificial Sequence
  Description of Artificial Sequence: Synthetic oligonucleotide
  Sense strand starting at position 3197 of SEQ ID NO: 1884008
acuaaugagcuaugagugu

SEQ ID NO: 2233101 - RNA, 19 nt, Artificial Sequence
  Description of Artificial Sequence: Synthetic oligonucleotide
  Antisense strand to SEQ ID NO: 2233100
acacucauagcucauuagu

SEQ ID NO: 2233102 - RNA, 19 nt, Artificial Sequence
  Description of Artificial Sequence: Synthetic oligonucleotide
  Sense strand starting at position 3208 of SEQ ID NO: 1884008
augaguguuuacccuccua

SEQ ID NO: 2233103 - RNA, 19 nt, Artificial Sequence
  Description of Artificial Sequence: Synthetic oligonucleotide
  Antisense strand to SEQ ID NO: 2233102
uaggaggguaaacacucau

SEQ ID NO: 2233104 - RNA, 19 nt, Artificial Sequence
  Description of Artificial Sequence: Synthetic oligonucleotide
  Sense strand starting at position 3265 of SEQ ID NO: 1884008
aauuaaacucgugggcauu

SEQ ID NO: 2233105 - RNA, 19 nt, Artificial Sequence
  Description of Artificial Sequence: Synthetic oligonucleotide
  Antisense strand to SEQ ID NO: 2233104
aaugcccacgaguuuaauu

SEQ ID NO: 2233106 - RNA, 19 nt, Artificial Sequence
  Description of Artificial Sequence: Synthetic oligonucleotide
  Sense strand starting at position 3347 of SEQ ID NO: 1884008
ucacauuccucuguugaua

SEQ ID NO: 2233107 - RNA, 19 nt, Artificial Sequence
  Description of Artificial Sequence: Synthetic oligonucleotide
  Antisense strand to SEQ ID NO: 2233106
uaucaacagaggaauguga

SEQ ID NO: 2233108 - RNA, 19 nt, Artificial Sequence
  Description of Artificial Sequence: Synthetic oligonucleotide
  Sense strand starting at position 3417 of SEQ ID NO: 1884008
aacuucguguuuccaggaa

SEQ ID NO: 2233109 - RNA, 19 nt, Artificial Sequence
  Description of Artificial Sequence: Synthetic oligonucleotide
  Antisense strand to SEQ ID NO: 2233108
uuccuggaaacacgaaguu

SEQ ID NO: 2233110 - RNA, 19 nt, Artificial Sequence
  Description of Artificial Sequence: Synthetic oligonucleotide
  Sense strand starting at position 3421 of SEQ ID NO: 1884008
ucguguuuccaggaaauac

SEQ ID NO: 2233111 - RNA, 19 nt, Artificial Sequence
  Description of Artificial Sequence: Synthetic oligonucleotide
  Antisense strand to SEQ ID NO: 2233110
guauuuccuggaaacacga

SEQ ID NO: 2233112 - RNA, 19 nt, Artificial Sequence
  Description of Artificial Sequence: Synthetic oligonucleotide
  Sense strand starting at position 3578 of SEQ ID NO: 1884008
ucgaguagaauauggaaua

SEQ ID NO: 2233113 - RNA, 19 nt, Artificial Sequence
  Description of Artificial Sequence: Synthetic oligonucleotide
  Antisense strand to SEQ ID NO: 2233112
uauuccauauucuacucga

SEQ ID NO: 2233114 - RNA, 19 nt, Artificial Sequence
  Description of Artificial Sequence: Synthetic oligonucleotide
  Sense strand starting at position 3664 of SEQ ID NO: 1884008
cuccuaaucuaguugaaug

SEQ ID NO: 2233115 - RNA, 19 nt, Artificial Sequence
  Description of Artificial Sequence: Synthetic oligonucleotide
  Antisense strand to SEQ ID NO: 2233114
cauucaacuagauuaggag

SEQ ID NO: 2233116 - RNA, 19 nt, Artificial Sequence
  Description of Artificial Sequence: Synthetic oligonucleotide
  Sense strand starting at position 3674 of SEQ ID NO: 1884008
aguugaaugucuguguuac

SEQ ID NO: 2233117 - RNA, 19 nt, Artificial Sequence
  Description of Artificial Sequence: Synthetic oligonucleotide
  Antisense strand to SEQ ID NO: 2233116
guaacacagacauucaacu

SEQ ID NO: 2233118 - RNA, 19 nt, Artificial Sequence
  Description of Artificial Sequence: Synthetic oligonucleotide
  Sense strand starting at position 3676 of SEQ ID NO: 1884008
uugaaugucuguguuacua

SEQ ID NO: 2233119 - RNA, 19 nt, Artificial Sequence
  Description of Artificial Sequence: Synthetic oligonucleotide
  Antisense strand to SEQ ID NO: 2233118
uaguaacacagacauucaa

SEQ ID NO: 2233120 - RNA, 19 nt, Artificial Sequence
  Description of Artificial Sequence: Synthetic oligonucleotide
  Sense strand starting at position 3688 of SEQ ID NO: 1884008
guuacuaguacagggagau

SEQ ID NO: 2233121 - RNA, 19 nt, Artificial Sequence
  Description of Artificial Sequence: Synthetic oligonucleotide
  Antisense strand to SEQ ID NO: 2233120
aucucccuguacuaguaac

SEQ ID NO: 2233122 - RNA, 19 nt, Artificial Sequence
  Description of Artificial Sequence: Synthetic oligonucleotide
  Sense strand starting at position 3700 of SEQ ID NO: 1884008
gggagauccuugccagcca

SEQ ID NO: 2233123 - RNA, 19 nt, Artificial Sequence
  Description of Artificial Sequence: Synthetic oligonucleotide
  Antisense strand to SEQ ID NO: 2233122
uggcuggcaaggaucuccc

SEQ ID NO: 2233124 - RNA, 19 nt, Artificial Sequence
  Description of Artificial Sequence: Synthetic oligonucleotide
  Sense strand starting at position 3816 of SEQ ID NO: 1884008
guuugcucccuguaacuuu

SEQ ID NO: 2233125 - RNA, 19 nt, Artificial Sequence
  Description of Artificial Sequence: Synthetic oligonucleotide
  Antisense strand to SEQ ID NO: 2233124
aaaguuacagggagcaaac

SEQ ID NO: 2233126 - RNA, 19 nt, Artificial Sequence
  Description of Artificial Sequence: Synthetic oligonucleotide
  Sense strand starting at position 3831 of SEQ ID NO: 1884008
cuuugaguggcucaacuau

SEQ ID NO: 2233127 - RNA, 19 nt, Artificial Sequence
  Description of Artificial Sequence: Synthetic oligonucleotide
  Antisense strand to SEQ ID NO: 2233126
auaguugagccacucaaag

SEQ ID NO: 2233128 - RNA, 19 nt, Artificial Sequence
  Description of Artificial Sequence: Synthetic oligonucleotide
  Sense strand starting at position 223 of SEQ ID NO: 1884009
aaguaagaauagcuaagua

SEQ ID NO: 2233129 - RNA, 19 nt, Artificial Sequence
  Description of Artificial Sequence: Synthetic oligonucleotide
  Antisense strand to SEQ ID NO: 2233128
uacuuagcuauucuuacuu

SEQ ID NO: 2233130 - RNA, 19 nt, Artificial Sequence
  Description of Artificial Sequence: Synthetic oligonucleotide
  Sense strand starting at position 350 of SEQ ID NO: 1884009
agugaugacacccgggaau

SEQ ID NO: 2233131 - RNA, 19 nt, Artificial Sequence
  Description of Artificial Sequence: Synthetic oligonucleotide
  Antisense strand to SEQ ID NO: 2233130
auucccgggugucaucacu

SEQ ID NO: 2233132 - RNA, 19 nt, Artificial Sequence
  Description of Artificial Sequence: Synthetic oligonucleotide
  Sense strand starting at position 432 of SEQ ID NO: 1884009
aagcuuucucaucacggga

SEQ ID NO: 2233133 - RNA, 19 nt, Artificial Sequence
  Description of Artificial Sequence: Synthetic oligonucleotide
  Antisense strand to SEQ ID NO: 2233132
ucccgugaugagaaagcuu

SEQ ID NO: 2233134 - RNA, 19 nt, Artificial Sequence
  Description of Artificial Sequence: Synthetic oligonucleotide
  Sense strand starting at position 435 of SEQ ID NO: 1884009
cuuucucaucacgggagau

SEQ ID NO: 2233135 - RNA, 19 nt, Artificial Sequence
  Description of Artificial Sequence: Synthetic oligonucleotide
  Antisense strand to SEQ ID NO: 2233134
aucucccgugaugagaaag

SEQ ID NO: 2233136 - RNA, 19 nt, Artificial Sequence
  Description of Artificial Sequence: Synthetic oligonucleotide
  Sense strand starting at position 436 of SEQ ID NO: 1884009
uuucucaucacgggagaua

SEQ ID NO: 2233137 - RNA, 19 nt, Artificial Sequence
  Description of Artificial Sequence: Synthetic oligonucleotide
  Antisense strand to SEQ ID NO: 2233136
uaucucccgugaugagaaa

SEQ ID NO: 2233138 - RNA, 19 nt, Artificial Sequence
  Description of Artificial Sequence: Synthetic oligonucleotide
  Sense strand starting at position 500 of SEQ ID NO: 1884009
ccaggaauauaccacagaa

SEQ ID NO: 2233139 - RNA, 19 nt, Artificial Sequence
  Description of Artificial Sequence: Synthetic oligonucleotide
  Antisense strand to SEQ ID NO: 2233138
uucugugguauauuccugg

SEQ ID NO: 2233140 - RNA, 19 nt, Artificial Sequence
  Description of Artificial Sequence: Synthetic oligonucleotide
  Sense strand starting at position 758 of SEQ ID NO: 1884009
guauaaagacagugaauau

SEQ ID NO: 2233141 - RNA, 19 nt, Artificial Sequence
  Description of Artificial Sequence: Synthetic oligonucleotide
  Antisense strand to SEQ ID NO: 2233140
auauucacugucuuuauac

SEQ ID NO: 2233142 - RNA, 19 nt, Artificial Sequence
  Description of Artificial Sequence: Synthetic oligonucleotide
  Sense strand starting at position 771 of SEQ ID NO: 1884009
gaauauguauaagggaaca

SEQ ID NO: 2233143 - RNA, 19 nt, Artificial Sequence
  Description of Artificial Sequence: Synthetic oligonucleotide
  Antisense strand to SEQ ID NO: 2233142
uguucccuuauacauauuc

SEQ ID NO: 2233144 - RNA, 19 nt, Artificial Sequence
  Description of Artificial Sequence: Synthetic oligonucleotide
  Sense strand starting at position 1032 of SEQ ID NO: 1884009
uaagcaaagguuugucuua

SEQ ID NO: 2233145 - RNA, 19 nt, Artificial Sequence
  Description of Artificial Sequence: Synthetic oligonucleotide
  Antisense strand to SEQ ID NO: 2233144
uaagacaaaccuuugcuua

SEQ ID NO: 2233146 - RNA, 19 nt, Artificial Sequence
  Description of Artificial Sequence: Synthetic oligonucleotide
  Sense strand starting at position 1039 of SEQ ID NO: 1884009
agguuugucuuaccuacaa

SEQ ID NO: 2233147 - RNA, 19 nt, Artificial Sequence
  Description of Artificial Sequence: Synthetic oligonucleotide
  Antisense strand to SEQ ID NO: 2233146
uuguagguaagacaaaccu

SEQ ID NO: 2233148 - RNA, 19 nt, Artificial Sequence
  Description of Artificial Sequence: Synthetic oligonucleotide
  Sense strand starting at position 1043 of SEQ ID NO: 1884009
uugucuuaccuacaacagu

SEQ ID NO: 2233149 - RNA, 19 nt, Artificial Sequence
  Description of Artificial Sequence: Synthetic oligonucleotide
  Antisense strand to SEQ ID NO: 2233148
acuguuguagguaagacaa

SEQ ID NO: 2233150 - RNA, 19 nt, Artificial Sequence
  Description of Artificial Sequence: Synthetic oligonucleotide
  Sense strand starting at position 2281 of SEQ ID NO: 1884009
aggaacagaucaggaaaua

SEQ ID NO: 2233151 - RNA, 19 nt, Artificial Sequence
  Description of Artificial Sequence: Synthetic oligonucleotide
  Antisense strand to SEQ ID NO: 2233150
uauuuccugaucuguuccu

SEQ ID NO: 2233152 - RNA, 19 nt, Artificial Sequence
  Description of Artificial Sequence: Synthetic oligonucleotide
  Sense strand starting at position 2357 of SEQ ID NO: 1884009
aggagaaucuugguuacgu

SEQ ID NO: 2233153 - RNA, 19 nt, Artificial Sequence
  Description of Artificial Sequence: Synthetic oligonucleotide
  Antisense strand to SEQ ID NO: 2233152
acguaaccaagauucuccu

SEQ ID NO: 2233154 - RNA, 19 nt, Artificial Sequence
  Description of Artificial Sequence: Synthetic oligonucleotide
  Sense strand starting at position 2358 of SEQ ID NO: 1884009
ggagaaucuugguuacguu

SEQ ID NO: 2233155 - RNA, 19 nt, Artificial Sequence
  Description of Artificial Sequence: Synthetic oligonucleotide
  Antisense strand to SEQ ID NO: 2233154
aacguaaccaagauucucc

SEQ ID NO: 2233156 - RNA, 19 nt, Artificial Sequence
  Description of Artificial Sequence: Synthetic oligonucleotide
  Sense strand starting at position 2359 of SEQ ID NO: 1884009
gagaaucuugguuacguuu

SEQ ID NO: 2233157 - RNA, 19 nt, Artificial Sequence
  Description of Artificial Sequence: Synthetic oligonucleotide
  Antisense strand to SEQ ID NO: 2233156
aaacguaaccaagauucuc

SEQ ID NO: 2233158 - RNA, 19 nt, Artificial Sequence
  Description of Artificial Sequence: Synthetic oligonucleotide
  Sense strand starting at position 2371 of SEQ ID NO: 1884009
uacguuugcuuaccaggau

SEQ ID NO: 2233159 - RNA, 19 nt, Artificial Sequence
  Description of Artificial Sequence: Synthetic oligonucleotide
  Antisense strand to SEQ ID NO: 2233158
auccugguaagcaaacgua

SEQ ID NO: 2233160 - RNA, 19 nt, Artificial Sequence
  Description of Artificial Sequence: Synthetic oligonucleotide
  Sense strand starting at position 2393 of SEQ ID NO: 1884009
ccuccuguggguuaaucaa

SEQ ID NO: 2233161 - RNA, 19 nt, Artificial Sequence
  Description of Artificial Sequence: Synthetic oligonucleotide
  Antisense strand to SEQ ID NO: 2233160
uugauuaacccacaggagg

SEQ ID NO: 2233162 - RNA, 19 nt, Artificial Sequence
  Description of Artificial Sequence: Synthetic oligonucleotide
  Sense strand starting at position 2530 of SEQ ID NO: 1884009
gucuaaagagcucaaaguu

SEQ ID NO: 2233163 - RNA, 19 nt, Artificial Sequence
  Description of Artificial Sequence: Synthetic oligonucleotide
  Antisense strand to SEQ ID NO: 2233162
aacuuugagcucuuuagac

SEQ ID NO: 2233164 - RNA, 19 nt, Artificial Sequence
  Description of Artificial Sequence: Synthetic oligonucleotide
  Sense strand starting at position 2633 of SEQ ID NO: 1884009
ucuacuuguucucugagca

SEQ ID NO: 2233165 - RNA, 19 nt, Artificial Sequence
  Description of Artificial Sequence: Synthetic oligonucleotide
  Antisense strand to SEQ ID NO: 2233164
ugcucagagaacaaguaga

SEQ ID NO: 2233166 - RNA, 19 nt, Artificial Sequence
  Description of Artificial Sequence: Synthetic oligonucleotide
  Sense strand starting at position 2730 of SEQ ID NO: 1884009
ggagcaauauuggaaccua

SEQ ID NO: 2233167 - RNA, 19 nt, Artificial Sequence
  Description of Artificial Sequence: Synthetic oligonucleotide
  Antisense strand to SEQ ID NO: 2233166
uagguuccaauauugcucc

SEQ ID NO: 2233168 - RNA, 19 nt, Artificial Sequence
  Description of Artificial Sequence: Synthetic oligonucleotide
  Sense strand starting at position 2780 of SEQ ID NO: 1884009
aagagauucuggcaggaaa

SEQ ID NO: 2233169 - RNA, 19 nt, Artificial Sequence
  Description of Artificial Sequence: Synthetic oligonucleotide
  Antisense strand to SEQ ID NO: 2233168
uuuccugccagaaucucuu

SEQ ID NO: 2233170 - RNA, 19 nt, Artificial Sequence
  Description of Artificial Sequence: Synthetic oligonucleotide
  Sense strand starting at position 2857 of SEQ ID NO: 1884009
aaaugugguccucaucaug

SEQ ID NO: 2233171 - RNA, 19 nt, Artificial Sequence
  Description of Artificial Sequence: Synthetic oligonucleotide
  Antisense strand to SEQ ID NO: 2233170
caugaugaggaccacauuu

SEQ ID NO: 2233172 - RNA, 19 nt, Artificial Sequence
  Description of Artificial Sequence: Synthetic oligonucleotide
  Sense strand starting at position 2892 of SEQ ID NO: 1884009
gugugugcugccugauuug

SEQ ID NO: 2233173 - RNA, 19 nt, Artificial Sequence
  Description of Artificial Sequence: Synthetic oligonucleotide
  Antisense strand to SEQ ID NO: 2233172
caaaucaggcagcacacac

SEQ ID NO: 2233174 - RNA, 19 nt, Artificial Sequence
  Description of Artificial Sequence: Synthetic oligonucleotide
  Sense strand starting at position 3036 of SEQ ID NO: 1884009
aacugauggccauguuucu

SEQ ID NO: 2233175 - RNA, 19 nt, Artificial Sequence
  Description of Artificial Sequence: Synthetic oligonucleotide
  Antisense strand to SEQ ID NO: 2233174
agaaacauggccaucaguu

SEQ ID NO: 2233176 - RNA, 19 nt, Artificial Sequence
  Description of Artificial Sequence: Synthetic oligonucleotide
  Sense strand starting at position 3042 of SEQ ID NO: 1884009
uggccauguuucucagugu

SEQ ID NO: 2233177 - RNA, 19 nt, Artificial Sequence
  Description of Artificial Sequence: Synthetic oligonucleotide
  Antisense strand to SEQ ID NO: 2233176
acacugagaaacauggcca

SEQ ID NO: 2233178 - RNA, 19 nt, Artificial Sequence
  Description of Artificial Sequence: Synthetic oligonucleotide
  Sense strand starting at position 3193 of SEQ ID NO: 1884009
auaagugccuuucuccaga

SEQ ID NO: 2233179 - RNA, 19 nt, Artificial Sequence
  Description of Artificial Sequence: Synthetic oligonucleotide
  Antisense strand to SEQ ID NO: 2233178
ucuggagaaaggcacuuau

SEQ ID NO: 2233180 - RNA, 19 nt, Artificial Sequence
  Description of Artificial Sequence: Synthetic oligonucleotide
  Sense strand starting at position 3198 of SEQ ID NO: 1884009
ugccuuucuccagaaagcu

SEQ ID NO: 2233181 - RNA, 19 nt, Artificial Sequence
  Description of Artificial Sequence: Synthetic oligonucleotide
  Antisense strand to SEQ ID NO: 2233180
agcuuucuggagaaaggca

SEQ ID NO: 2233182 - RNA, 19 nt, Artificial Sequence
  Description of Artificial Sequence: Synthetic oligonucleotide
  Sense strand starting at position 3230 of SEQ ID NO: 1884009
agaaauguuucccuucgga

SEQ ID NO: 2233183 - RNA, 19 nt, Artificial Sequence
  Description of Artificial Sequence: Synthetic oligonucleotide
  Antisense strand to SEQ ID NO: 2233182
uccgaagggaaacauuucu

SEQ ID NO: 2233184 - RNA, 19 nt, Artificial Sequence
  Description of Artificial Sequence: Synthetic oligonucleotide
  Sense strand starting at position 3233 of SEQ ID NO: 1884009
aauguuucccuucggauca

SEQ ID NO: 2233185 - RNA, 19 nt, Artificial Sequence
  Description of Artificial Sequence: Synthetic oligonucleotide
  Antisense strand to SEQ ID NO: 2233184
ugauccgaagggaaacauu

SEQ ID NO: 2233186 - RNA, 19 nt, Artificial Sequence
  Description of Artificial Sequence: Synthetic oligonucleotide
  Sense strand starting at position 3331 of SEQ ID NO: 1884009
gcagauggcuucgacauuu

SEQ ID NO: 2233187 - RNA, 19 nt, Artificial Sequence
  Description of Artificial Sequence: Synthetic oligonucleotide
  Antisense strand to SEQ ID NO: 2233186
aaaugucgaagccaucugc

SEQ ID NO: 2233188 - RNA, 19 nt, Artificial Sequence
  Description of Artificial Sequence: Synthetic oligonucleotide
  Sense strand starting at position 3397 of SEQ ID NO: 1884009
aaauguuugcuuuagaagg

SEQ ID NO: 2233189 - RNA, 19 nt, Artificial Sequence
  Description of Artificial Sequence: Synthetic oligonucleotide
  Antisense strand to SEQ ID NO: 2233188
ccuucuaaagcaaacauuu

SEQ ID NO: 2233190 - RNA, 19 nt, Artificial Sequence
  Description of Artificial Sequence: Synthetic oligonucleotide
  Sense strand starting at position 3402 of SEQ ID NO: 1884009
uuugcuuuagaaggaauua

SEQ ID NO: 2233191 - RNA, 19 nt, Artificial Sequence
  Description of Artificial Sequence: Synthetic oligonucleotide
  Antisense strand to SEQ ID NO: 2233190
uaauuccuucuaaagcaaa

SEQ ID NO: 2233192 - RNA, 19 nt, Artificial Sequence
  Description of Artificial Sequence: Synthetic oligonucleotide
  Sense strand starting at position 3617 of SEQ ID NO: 1884009
ugcaucugugcgcuuacau

SEQ ID NO: 2233193 - RNA, 19 nt, Artificial Sequence
  Description of Artificial Sequence: Synthetic oligonucleotide
  Antisense strand to SEQ ID NO: 2233192
auguaagcgcacagaugca

SEQ ID NO: 2233194 - RNA, 19 nt, Artificial Sequence
  Description of Artificial Sequence: Synthetic oligonucleotide
  Sense strand starting at position 3618 of SEQ ID NO: 1884009
gcaucugugcgcuuacaug

SEQ ID NO: 2233195 - RNA, 19 nt, Artificial Sequence
  Description of Artificial Sequence: Synthetic oligonucleotide
  Antisense strand to SEQ ID NO: 2233194
cauguaagcgcacagaugc

SEQ ID NO: 2233196 - RNA, 19 nt, Artificial Sequence
  Description of Artificial Sequence: Synthetic oligonucleotide
  Sense strand starting at position 3667 of SEQ ID NO: 1884009
ugcuguuaugauugagaua

SEQ ID NO: 2233197 - RNA, 19 nt, Artificial Sequence
  Description of Artificial Sequence: Synthetic oligonucleotide
  Antisense strand to SEQ ID NO: 2233196
uaucucaaucauaacagca

SEQ ID NO: 2233198 - RNA, 19 nt, Artificial Sequence
  Description of Artificial Sequence: Synthetic oligonucleotide
  Sense strand starting at position 3668 of SEQ ID NO: 1884009
gcuguuaugauugagauaa

SEQ ID NO: 2233199 - RNA, 19 nt, Artificial Sequence
  Description of Artificial Sequence: Synthetic oligonucleotide
  Antisense strand to SEQ ID NO: 2233198
uuaucucaaucauaacagc

SEQ ID NO: 2233200 - RNA, 19 nt, Artificial Sequence
  Description of Artificial Sequence: Synthetic oligonucleotide
  Sense strand starting at position 3679 of SEQ ID NO: 1884009
ugagauaaaucagcuuugu

SEQ ID NO: 2233201 - RNA, 19 nt, Artificial Sequence
  Description of Artificial Sequence: Synthetic oligonucleotide
  Antisense strand to SEQ ID NO: 2233200
acaaagcugauuuaucuca

SEQ ID NO: 2233202 - RNA, 19 nt, Artificial Sequence
  Description of Artificial Sequence: Synthetic oligonucleotide
  Sense strand starting at position 3739 of SEQ ID NO: 1884009
uuugcugccuggucuuaaa

SEQ ID NO: 2233203 - RNA, 19 nt, Artificial Sequence
  Description of Artificial Sequence: Synthetic oligonucleotide
  Antisense strand to SEQ ID NO: 2233202
uuuaagaccaggcagcaaa

SEQ ID NO: 2233204 - RNA, 19 nt, Artificial Sequence
  Description of Artificial Sequence: Synthetic oligonucleotide
  Sense strand starting at position 3766 of SEQ ID NO: 1884009
aauacagucuggucgauga

SEQ ID NO: 2233205 - RNA, 19 nt, Artificial Sequence
  Description of Artificial Sequence: Synthetic oligonucleotide
  Antisense strand to SEQ ID NO: 2233204
ucaucgaccagacuguauu

SEQ ID NO: 2233206 - RNA, 19 nt, Artificial Sequence
  Description of Artificial Sequence: Synthetic oligonucleotide
  Sense strand starting at position 3770 of SEQ ID NO: 1884009
cagucuggucgaugaagca

SEQ ID NO: 2233207 - RNA, 19 nt, Artificial Sequence
  Description of Artificial Sequence: Synthetic oligonucleotide
  Antisense strand to SEQ ID NO: 2233206
ugcuucaucgaccagacug

SEQ ID NO: 2233208 - RNA, 19 nt, Artificial Sequence
  Description of Artificial Sequence: Synthetic oligonucleotide
  Sense strand starting at position 69 of SEQ ID NO: 1884010
cuagaauguuagguaagua

SEQ ID NO: 2233209 - RNA, 19 nt, Artificial Sequence
  Description of Artificial Sequence: Synthetic oligonucleotide
  Antisense strand to SEQ ID NO: 2233208
uacuuaccuaacauucuag

SEQ ID NO: 2233210 - RNA, 19 nt, Artificial Sequence
  Description of Artificial Sequence: Synthetic oligonucleotide
  Sense strand starting at position 157 of SEQ ID NO: 1884010
guggccauccacuagagau

SEQ ID NO: 2233211 - RNA, 19 nt, Artificial Sequence
  Description of Artificial Sequence: Synthetic oligonucleotide
  Antisense strand to SEQ ID NO: 2233210
aucucuaguggauggccac

SEQ ID NO: 2233212 - RNA, 19 nt, Artificial Sequence
  Description of Artificial Sequence: Synthetic oligonucleotide
  Sense strand starting at position 188 of SEQ ID NO: 1884010
agaaacagucaauguuuaa

SEQ ID NO: 2233213 - RNA, 19 nt, Artificial Sequence
  Description of Artificial Sequence: Synthetic oligonucleotide
  Antisense strand to SEQ ID NO: 2233212
uuaaacauugacuguuucu

SEQ ID NO: 2233214 - RNA, 19 nt, Artificial Sequence
  Description of Artificial Sequence: Synthetic oligonucleotide
  Sense strand starting at position 192 of SEQ ID NO: 1884010
acagucaauguuuaacauu

SEQ ID NO: 2233215 - RNA, 19 nt, Artificial Sequence
  Description of Artificial Sequence: Synthetic oligonucleotide
  Antisense strand to SEQ ID NO: 2233214
aauguuaaacauugacugu

SEQ ID NO: 2233216 - RNA, 19 nt, Artificial Sequence
  Description of Artificial Sequence: Synthetic oligonucleotide
  Sense strand starting at position 353 of SEQ ID NO: 1884010
gggaucucauccuuagguu

SEQ ID NO: 2233217 - RNA, 19 nt, Artificial Sequence
  Description of Artificial Sequence: Synthetic oligonucleotide
  Antisense strand to SEQ ID NO: 2233216
aaccuaaggaugagauccc

SEQ ID NO: 2233218 - RNA, 19 nt, Artificial Sequence
  Description of Artificial Sequence: Synthetic oligonucleotide
  Sense strand starting at position 354 of SEQ ID NO: 1884010
ggaucucauccuuagguuu

SEQ ID NO: 2233219 - RNA, 19 nt, Artificial Sequence
  Description of Artificial Sequence: Synthetic oligonucleotide
  Antisense strand to SEQ ID NO: 2233218
aaaccuaaggaugagaucc

SEQ ID NO: 2233220 - RNA, 19 nt, Artificial Sequence
  Description of Artificial Sequence: Synthetic oligonucleotide
  Sense strand starting at position 524 of SEQ ID NO: 1884010
uuaaucuugcuguaaagag

SEQ ID NO: 2233221 - RNA, 19 nt, Artificial Sequence
  Description of Artificial Sequence: Synthetic oligonucleotide
  Antisense strand to SEQ ID NO: 2233220
cucuuuacagcaagauuaa

SEQ ID NO: 2233222 - RNA, 19 nt, Artificial Sequence
  Description of Artificial Sequence: Synthetic oligonucleotide
  Sense strand starting at position 718 of SEQ ID NO: 1884010
auagcuaauuucguuaagu

SEQ ID NO: 2233223 - RNA, 19 nt, Artificial Sequence
  Description of Artificial Sequence: Synthetic oligonucleotide
  Antisense strand to SEQ ID NO: 2233222
acuuaacgaaauuagcuau

SEQ ID NO: 2233224 - RNA, 19 nt, Artificial Sequence
  Description of Artificial Sequence: Synthetic oligonucleotide
  Sense strand starting at position 719 of SEQ ID NO: 1884010
uagcuaauuucguuaagug

SEQ ID NO: 2233225 - RNA, 19 nt, Artificial Sequence
  Description of Artificial Sequence: Synthetic oligonucleotide
  Antisense strand to SEQ ID NO: 2233224
cacuuaacgaaauuagcua

SEQ ID NO: 2233226 - RNA, 19 nt, Artificial Sequence
  Description of Artificial Sequence: Synthetic oligonucleotide
  Sense strand starting at position 720 of SEQ ID NO: 1884010
agcuaauuucguuaagugu

SEQ ID NO: 2233227 - RNA, 19 nt, Artificial Sequence
  Description of Artificial Sequence: Synthetic oligonucleotide
  Antisense strand to SEQ ID NO: 2233226
acacuuaacgaaauuagcu

SEQ ID NO: 2233228 - RNA, 19 nt, Artificial Sequence
  Description of Artificial Sequence: Synthetic oligonucleotide
  Sense strand starting at position 845 of SEQ ID NO: 1884010
accagcuuucccgaaauag

SEQ ID NO: 2233229 - RNA, 19 nt, Artificial Sequence
  Description of Artificial Sequence: Synthetic oligonucleotide
  Antisense strand to SEQ ID NO: 2233228
cuauuucgggaaagcuggu

SEQ ID NO: 2233230 - RNA, 19 nt, Artificial Sequence
  Description of Artificial Sequence: Synthetic oligonucleotide
  Sense strand starting at position 926 of SEQ ID NO: 1884010
cgcccagauuacuuuauuu

SEQ ID NO: 2233231 - RNA, 19 nt, Artificial Sequence
  Description of Artificial Sequence: Synthetic oligonucleotide
  Antisense strand to SEQ ID NO: 2233230
aaauaaaguaaucugggcg

SEQ ID NO: 2233232 - RNA, 19 nt, Artificial Sequence
  Description of Artificial Sequence: Synthetic oligonucleotide
  Sense strand starting at position 987 of SEQ ID NO: 1884010
caccauguggaaugaaauc

SEQ ID NO: 2233233 - RNA, 19 nt, Artificial Sequence
  Description of Artificial Sequence: Synthetic oligonucleotide
  Antisense strand to SEQ ID NO: 2233232
gauuucauuccacauggug

SEQ ID NO: 2233234 - RNA, 19 nt, Artificial Sequence
  Description of Artificial Sequence: Synthetic oligonucleotide
  Sense strand starting at position 1058 of SEQ ID NO: 1884010
aagauuguguauguaugga

SEQ ID NO: 2233235 - RNA, 19 nt, Artificial Sequence
  Description of Artificial Sequence: Synthetic oligonucleotide
  Antisense strand to SEQ ID NO: 2233234
uccauacauacacaaucuu

SEQ ID NO: 2233236 - RNA, 19 nt, Artificial Sequence
  Description of Artificial Sequence: Synthetic oligonucleotide
  Sense strand starting at position 1106 of SEQ ID NO: 1884010
ggacuccauucugugacaa

SEQ ID NO: 2233237 - RNA, 19 nt, Artificial Sequence
  Description of Artificial Sequence: Synthetic oligonucleotide
  Antisense strand to SEQ ID NO: 2233236
uugucacagaauggagucc

SEQ ID NO: 2233238 - RNA, 19 nt, Artificial Sequence
  Description of Artificial Sequence: Synthetic oligonucleotide
  Sense strand starting at position 1107 of SEQ ID NO: 1884010
gacuccauucugugacaag

SEQ ID NO: 2233239 - RNA, 19 nt, Artificial Sequence
  Description of Artificial Sequence: Synthetic oligonucleotide
  Antisense strand to SEQ ID NO: 2233238
cuugucacagaauggaguc

SEQ ID NO: 2233240 - RNA, 19 nt, Artificial Sequence
  Description of Artificial Sequence: Synthetic oligonucleotide
  Sense strand starting at position 1274 of SEQ ID NO: 1884010
gccgaaucacauuagaaug

SEQ ID NO: 2233241 - RNA, 19 nt, Artificial Sequence
  Description of Artificial Sequence: Synthetic oligonucleotide
  Antisense strand to SEQ ID NO: 2233240
cauucuaaugugauucggc

SEQ ID NO: 2233242 - RNA, 19 nt, Artificial Sequence
  Description of Artificial Sequence: Synthetic oligonucleotide
  Sense strand starting at position 1541 of SEQ ID NO: 1884010
ucagcauguuuaguauuua

SEQ ID NO: 2233243 - RNA, 19 nt, Artificial Sequence
  Description of Artificial Sequence: Synthetic oligonucleotide
  Antisense strand to SEQ ID NO: 2233242
uaaauacuaaacaugcuga

SEQ ID NO: 2233244 - RNA, 19 nt, Artificial Sequence
  Description of Artificial Sequence: Synthetic oligonucleotide
  Sense strand starting at position 1557 of SEQ ID NO: 1884010
uuaagauacuuuguacagu

SEQ ID NO: 2233245 - RNA, 19 nt, Artificial Sequence
  Description of Artificial Sequence: Synthetic oligonucleotide
  Antisense strand to SEQ ID NO: 2233244
acuguacaaaguaucuuaa

SEQ ID NO: 2233246 - RNA, 19 nt, Artificial Sequence
  Description of Artificial Sequence: Synthetic oligonucleotide
  Sense strand starting at position 1563 of SEQ ID NO: 1884010
uacuuuguacagugaagaa

SEQ ID NO: 2233247 - RNA, 19 nt, Artificial Sequence
  Description of Artificial Sequence: Synthetic oligonucleotide
  Antisense strand to SEQ ID NO: 2233246
uucuucacuguacaaagua

SEQ ID NO: 2233248 - RNA, 19 nt, Artificial Sequence
  Description of Artificial Sequence: Synthetic oligonucleotide
  Sense strand starting at position 1779 of SEQ ID NO: 1884010
gaguaagagucagugaaag

SEQ ID NO: 2233249 - RNA, 19 nt, Artificial Sequence
  Description of Artificial Sequence: Synthetic oligonucleotide
  Antisense strand to SEQ ID NO: 2233248
cuuucacugacucuuacuc

SEQ ID NO: 2233250 - RNA, 19 nt, Artificial Sequence
  Description of Artificial Sequence: Synthetic oligonucleotide
  Sense strand starting at position 1781 of SEQ ID NO: 1884010
guaagagucagugaaaguc

SEQ ID NO: 2233251 - RNA, 19 nt, Artificial Sequence
  Description of Artificial Sequence: Synthetic oligonucleotide
  Antisense strand to SEQ ID NO: 2233250
gacuuucacugacucuuac

SEQ ID NO: 2233252 - RNA, 19 nt, Artificial Sequence
  Description of Artificial Sequence: Synthetic oligonucleotide
  Sense strand starting at position 1858 of SEQ ID NO: 1884010
uuggcugaggcucaacaau

SEQ ID NO: 2233253 - RNA, 19 nt, Artificial Sequence
  Description of Artificial Sequence: Synthetic oligonucleotide
  Antisense strand to SEQ ID NO: 2233252
auuguugagccucagccaa

SEQ ID NO: 2233254 - RNA, 19 nt, Artificial Sequence
  Description of Artificial Sequence: Synthetic oligonucleotide
  Sense strand starting at position 1905 of SEQ ID NO: 1884010
ggagucaggagaugguaua

SEQ ID NO: 2233255 - RNA, 19 nt, Artificial Sequence
  Description of Artificial Sequence: Synthetic oligonucleotide
  Antisense strand to SEQ ID NO: 2233254
uauaccaucuccugacucc

SEQ ID NO: 2233256 - RNA, 19 nt, Artificial Sequence
  Description of Artificial Sequence: Synthetic oligonucleotide
  Sense strand starting at position 1906 of SEQ ID NO: 1884010
gagucaggagaugguauau

SEQ ID NO: 2233257 - RNA, 19 nt, Artificial Sequence
  Description of Artificial Sequence: Synthetic oligonucleotide
  Antisense strand to SEQ ID NO: 2233256
auauaccaucuccugacuc

SEQ ID NO: 2233258 - RNA, 19 nt, Artificial Sequence
  Description of Artificial Sequence: Synthetic oligonucleotide
  Sense strand starting at position 2174 of SEQ ID NO: 1884010
augaucaauuuguagauca

SEQ ID NO: 2233259 - RNA, 19 nt, Artificial Sequence
  Description of Artificial Sequence: Synthetic oligonucleotide
  Antisense strand to SEQ ID NO: 2233258
ugaucuacaaauugaucau

SEQ ID NO: 2233260 - RNA, 19 nt, Artificial Sequence
  Description of Artificial Sequence: Synthetic oligonucleotide
  Sense strand starting at position 2185 of SEQ ID NO: 1884010
guagaucaauauucuaagu

SEQ ID NO: 2233261 - RNA, 19 nt, Artificial Sequence
  Description of Artificial Sequence: Synthetic oligonucleotide
  Antisense strand to SEQ ID NO: 2233260
acuuagaauauugaucuac

SEQ ID NO: 2233262 - RNA, 19 nt, Artificial Sequence
  Description of Artificial Sequence: Synthetic oligonucleotide
  Sense strand starting at position 2287 of SEQ ID NO: 1884010
ccacgugauuucuugcaac

SEQ ID NO: 2233263 - RNA, 19 nt, Artificial Sequence
  Description of Artificial Sequence: Synthetic oligonucleotide
  Antisense strand to SEQ ID NO: 2233262
guugcaagaaaucacgugg

SEQ ID NO: 2233264 - RNA, 19 nt, Artificial Sequence
  Description of Artificial Sequence: Synthetic oligonucleotide
  Sense strand starting at position 2310 of SEQ ID NO: 1884010
guuuguuaacauuacuaca

SEQ ID NO: 2233265 - RNA, 19 nt, Artificial Sequence
  Description of Artificial Sequence: Synthetic oligonucleotide
  Antisense strand to SEQ ID NO: 2233264
uguaguaauguuaacaaac

SEQ ID NO: 2233266 - RNA, 19 nt, Artificial Sequence
  Description of Artificial Sequence: Synthetic oligonucleotide
  Sense strand starting at position 2565 of SEQ ID NO: 1884010
uuuggauuaacuggguaca

SEQ ID NO: 2233267 - RNA, 19 nt, Artificial Sequence
  Description of Artificial Sequence: Synthetic oligonucleotide
  Antisense strand to SEQ ID NO: 2233266
uguacccaguuaauccaaa

SEQ ID NO: 2233268 - RNA, 19 nt, Artificial Sequence
  Description of Artificial Sequence: Synthetic oligonucleotide
  Sense strand starting at position 2567 of SEQ ID NO: 1884010
uggauuaacuggguacacu

SEQ ID NO: 2233269 - RNA, 19 nt, Artificial Sequence
  Description of Artificial Sequence: Synthetic oligonucleotide
  Antisense strand to SEQ ID NO: 2233268
aguguacccaguuaaucca

SEQ ID NO: 2233270 - RNA, 19 nt, Artificial Sequence
  Description of Artificial Sequence: Synthetic oligonucleotide
  Sense strand starting at position 2818 of SEQ ID NO: 1884010
auaaguaugcacuggaauc

SEQ ID NO: 2233271 - RNA, 19 nt, Artificial Sequence
  Description of Artificial Sequence: Synthetic oligonucleotide
  Antisense strand to SEQ ID NO: 2233270
gauuccagugcauacuuau

SEQ ID NO: 2233272 - RNA, 19 nt, Artificial Sequence
  Description of Artificial Sequence: Synthetic oligonucleotide
  Sense strand starting at position 2820 of SEQ ID NO: 1884010
aaguaugcacuggaaucua

SEQ ID NO: 2233273 - RNA, 19 nt, Artificial Sequence
  Description of Artificial Sequence: Synthetic oligonucleotide
  Antisense strand to SEQ ID NO: 2233272
uagauuccagugcauacuu

SEQ ID NO: 2233274 - RNA, 19 nt, Artificial Sequence
  Description of Artificial Sequence: Synthetic oligonucleotide
  Sense strand starting at position 3052 of SEQ ID NO: 1884010
cucugugugauaugaggaa

SEQ ID NO: 2233275 - RNA, 19 nt, Artificial Sequence
  Description of Artificial Sequence: Synthetic oligonucleotide
  Antisense strand to SEQ ID NO: 2233274
uuccucauaucacacagag

SEQ ID NO: 2233276 - RNA, 19 nt, Artificial Sequence
  Description of Artificial Sequence: Synthetic oligonucleotide
  Sense strand starting at position 3580 of SEQ ID NO: 1884010
acgcuucugguauaagaau

SEQ ID NO: 2233277 - RNA, 19 nt, Artificial Sequence
  Description of Artificial Sequence: Synthetic oligonucleotide
  Antisense strand to SEQ ID NO: 2233276
auucuuauaccagaagcgu

SEQ ID NO: 2233278 - RNA, 19 nt, Artificial Sequence
  Description of Artificial Sequence: Synthetic oligonucleotide
  Sense strand starting at position 3779 of SEQ ID NO: 1884010
auaaauuaucaggguaagu

SEQ ID NO: 2233279 - RNA, 19 nt, Artificial Sequence
  Description of Artificial Sequence: Synthetic oligonucleotide
  Antisense strand to SEQ ID NO: 2233278
acuuacccugauaauuuau

SEQ ID NO: 2233280 - RNA, 19 nt, Artificial Sequence
  Description of Artificial Sequence: Synthetic oligonucleotide
  Sense strand starting at position 3841 of SEQ ID NO: 1884010
agagucuuucuuuaacuug

SEQ ID NO: 2233281 - RNA, 19 nt, Artificial Sequence
  Description of Artificial Sequence: Synthetic oligonucleotide
  Antisense strand to SEQ ID NO: 2233280
caaguuaaagaaagacucu

SEQ ID NO: 2233282 - RNA, 19 nt, Artificial Sequence
  Description of Artificial Sequence: Synthetic oligonucleotide
  Sense strand starting at position 3904 of SEQ ID NO: 1884010
ggagguucuuucucuggaa

SEQ ID NO: 2233283 - RNA, 19 nt, Artificial Sequence
  Description of Artificial Sequence: Synthetic oligonucleotide
  Antisense strand to SEQ ID NO: 2233282
uuccagagaaagaaccucc

SEQ ID NO: 2233284 - RNA, 19 nt, Artificial Sequence
  Description of Artificial Sequence: Synthetic oligonucleotide
  Sense strand starting at position 3905 of SEQ ID NO: 1884010
gagguucuuucucuggaau

SEQ ID NO: 2233285 - RNA, 19 nt, Artificial Sequence
  Description of Artificial Sequence: Synthetic oligonucleotide
  Antisense strand to SEQ ID NO: 2233284
auuccagagaaagaaccuc

SEQ ID NO: 2233286 - RNA, 19 nt, Artificial Sequence
  Description of Artificial Sequence: Synthetic oligonucleotide
  Sense strand starting at position 3906 of SEQ ID NO: 1884010
agguucuuucucuggaaug

SEQ ID NO: 2233287 - RNA, 19 nt, Artificial Sequence
  Description of Artificial Sequence: Synthetic oligonucleotide
  Antisense strand to SEQ ID NO: 2233286
cauuccagagaaagaaccu

SEQ ID NO: 2233288 - RNA, 19 nt, Artificial Sequence
  Description of Artificial Sequence: Synthetic oligonucleotide
  Sense strand starting at position 80 of SEQ ID NO: 1884011
aucauagauugacaagaau

SEQ ID NO: 2233289 - RNA, 19 nt, Artificial Sequence
  Description of Artificial Sequence: Synthetic oligonucleotide
  Antisense strand to SEQ ID NO: 2233288
auucuugucaaucuaugau

SEQ ID NO: 2233290 - RNA, 19 nt, Artificial Sequence
  Description of Artificial Sequence: Synthetic oligonucleotide
  Sense strand starting at position 226 of SEQ ID NO: 1884011
auguguagauuccuguaac

SEQ ID NO: 2233291 - RNA, 19 nt, Artificial Sequence
  Description of Artificial Sequence: Synthetic oligonucleotide
  Antisense strand to SEQ ID NO: 2233290
guuacaggaaucuacacau

SEQ ID NO: 2233292 - RNA, 19 nt, Artificial Sequence
  Description of Artificial Sequence: Synthetic oligonucleotide
  Sense strand starting at position 229 of SEQ ID NO: 1884011
uguagauuccuguaaccac

SEQ ID NO: 2233293 - RNA, 19 nt, Artificial Sequence
  Description of Artificial Sequence: Synthetic oligonucleotide
  Antisense strand to SEQ ID NO: 2233292
gugguuacaggaaucuaca

SEQ ID NO: 2233294 - RNA, 19 nt, Artificial Sequence
  Description of Artificial Sequence: Synthetic oligonucleotide
  Sense strand starting at position 391 of SEQ ID NO: 1884011
agugaaaucguacaguaug

SEQ ID NO: 2233295 - RNA, 19 nt, Artificial Sequence
  Description of Artificial Sequence: Synthetic oligonucleotide
  Antisense strand to SEQ ID NO: 2233294
cauacuguacgauuucacu

SEQ ID NO: 2233296 - RNA, 19 nt, Artificial Sequence
  Description of Artificial Sequence: Synthetic oligonucleotide
  Sense strand starting at position 394 of SEQ ID NO: 1884011
gaaaucguacaguauguga

SEQ ID NO: 2233297 - RNA, 19 nt, Artificial Sequence
  Description of Artificial Sequence: Synthetic oligonucleotide
  Antisense strand to SEQ ID NO: 2233296
ucacauacuguacgauuuc

SEQ ID NO: 2233298 - RNA, 19 nt, Artificial Sequence
  Description of Artificial Sequence: Synthetic oligonucleotide
  Sense strand starting at position 499 of SEQ ID NO: 1884011
ugcugaauauuggcauaga

SEQ ID NO: 2233299 - RNA, 19 nt, Artificial Sequence
  Description of Artificial Sequence: Synthetic oligonucleotide
  Antisense strand to SEQ ID NO: 2233298
ucuaugccaauauucagca

SEQ ID NO: 2233300 - RNA, 19 nt, Artificial Sequence
  Description of Artificial Sequence: Synthetic oligonucleotide
  Sense strand starting at position 502 of SEQ ID NO: 1884011
ugaauauuggcauagaugu

SEQ ID NO: 2233301 - RNA, 19 nt, Artificial Sequence
  Description of Artificial Sequence: Synthetic oligonucleotide
  Antisense strand to SEQ ID NO: 2233300
acaucuaugccaauauuca

SEQ ID NO: 2233302 - RNA, 19 nt, Artificial Sequence
  Description of Artificial Sequence: Synthetic oligonucleotide
  Sense strand starting at position 513 of SEQ ID NO: 1884011
auagaugugucacuuaguu

SEQ ID NO: 2233303 - RNA, 19 nt, Artificial Sequence
  Description of Artificial Sequence: Synthetic oligonucleotide
  Antisense strand to SEQ ID NO: 2233302
aacuaagugacacaucuau

SEQ ID NO: 2233304 - RNA, 19 nt, Artificial Sequence
  Description of Artificial Sequence: Synthetic oligonucleotide
  Sense strand starting at position 515 of SEQ ID NO: 1884011
agaugugucacuuaguuua

SEQ ID NO: 2233305 - RNA, 19 nt, Artificial Sequence
  Description of Artificial Sequence: Synthetic oligonucleotide
  Antisense strand to SEQ ID NO: 2233304
uaaacuaagugacacaucu

SEQ ID NO: 2233306 - RNA, 19 nt, Artificial Sequence
  Description of Artificial Sequence: Synthetic oligonucleotide
  Sense strand starting at position 520 of SEQ ID NO: 1884011
ugucacuuaguuuaagcau

SEQ ID NO: 2233307 - RNA, 19 nt, Artificial Sequence
  Description of Artificial Sequence: Synthetic oligonucleotide
  Antisense strand to SEQ ID NO: 2233306
augcuuaaacuaagugaca

SEQ ID NO: 2233308 - RNA, 19 nt, Artificial Sequence
  Description of Artificial Sequence: Synthetic oligonucleotide
  Sense strand starting at position 539 of SEQ ID NO: 1884011
ucacuuagugagggacauu

SEQ ID NO: 2233309 - RNA, 19 nt, Artificial Sequence
  Description of Artificial Sequence: Synthetic oligonucleotide
  Antisense strand to SEQ ID NO: 2233308
aaugucccucacuaaguga

SEQ ID NO: 2233310 - RNA, 19 nt, Artificial Sequence
  Description of Artificial Sequence: Synthetic oligonucleotide
  Sense strand starting at position 569 of SEQ ID NO: 1884011
cuaguuucuggcuaugaua

SEQ ID NO: 2233311 - RNA, 19 nt, Artificial Sequence
  Description of Artificial Sequence: Synthetic oligonucleotide
  Antisense strand to SEQ ID NO: 2233310
uaucauagccagaaacuag

SEQ ID NO: 2233312 - RNA, 19 nt, Artificial Sequence
  Description of Artificial Sequence: Synthetic oligonucleotide
  Sense strand starting at position 621 of SEQ ID NO: 1884011
aguugaggaugaguucaua

SEQ ID NO: 2233313 - RNA, 19 nt, Artificial Sequence
  Description of Artificial Sequence: Synthetic oligonucleotide
  Antisense strand to SEQ ID NO: 2233312
uaugaacucauccucaacu

SEQ ID NO: 2233314 - RNA, 19 nt, Artificial Sequence
  Description of Artificial Sequence: Synthetic oligonucleotide
  Sense strand starting at position 898 of SEQ ID NO: 1884011
gucaaaucagcauguggaa

SEQ ID NO: 2233315 - RNA, 19 nt, Artificial Sequence
  Description of Artificial Sequence: Synthetic oligonucleotide
  Antisense strand to SEQ ID NO: 2233314
uuccacaugcugauuugac

SEQ ID NO: 2233316 - RNA, 19 nt, Artificial Sequence
  Description of Artificial Sequence: Synthetic oligonucleotide
  Sense strand starting at position 954 of SEQ ID NO: 1884011
uugagaucaugagaaauca

SEQ ID NO: 2233317 - RNA, 19 nt, Artificial Sequence
  Description of Artificial Sequence: Synthetic oligonucleotide
  Antisense strand to SEQ ID NO: 2233316
ugauuucucaugaucucaa

SEQ ID NO: 2233318 - RNA, 19 nt, Artificial Sequence
  Description of Artificial Sequence: Synthetic oligonucleotide
  Sense strand starting at position 1254 of SEQ ID NO: 1884011
gcagguaauuuacauacaa

SEQ ID NO: 2233319 - RNA, 19 nt, Artificial Sequence
  Description of Artificial Sequence: Synthetic oligonucleotide
  Antisense strand to SEQ ID NO: 2233318
uuguauguaaauuaccugc

SEQ ID NO: 2233320 - RNA, 19 nt, Artificial Sequence
  Description of Artificial Sequence: Synthetic oligonucleotide
  Sense strand starting at position 2211 of SEQ ID NO: 1884011
ccaagaucugucugcaagg

SEQ ID NO: 2233321 - RNA, 19 nt, Artificial Sequence
  Description of Artificial Sequence: Synthetic oligonucleotide
  Antisense strand to SEQ ID NO: 2233320
ccuugcagacagaucuugg

SEQ ID NO: 2233322 - RNA, 19 nt, Artificial Sequence
  Description of Artificial Sequence: Synthetic oligonucleotide
  Sense strand starting at position 2561 of SEQ ID NO: 1884011
ggaggaagccgugguuaca

SEQ ID NO: 2233323 - RNA, 19 nt, Artificial Sequence
  Description of Artificial Sequence: Synthetic oligonucleotide
  Antisense strand to SEQ ID NO: 2233322
uguaaccacggcuuccucc

SEQ ID NO: 2233324 - RNA, 19 nt, Artificial Sequence
  Description of Artificial Sequence: Synthetic oligonucleotide
  Sense strand starting at position 2669 of SEQ ID NO: 1884011
gucugagagaccugaugua

SEQ ID NO: 2233325 - RNA, 19 nt, Artificial Sequence
  Description of Artificial Sequence: Synthetic oligonucleotide
  Antisense strand to SEQ ID NO: 2233324
uacaucaggucucucagac

SEQ ID NO: 2233326 - RNA, 19 nt, Artificial Sequence
  Description of Artificial Sequence: Synthetic oligonucleotide
  Sense strand starting at position 2743 of SEQ ID NO: 1884011
cccagaauuccguggaaga

SEQ ID NO: 2233327 - RNA, 19 nt, Artificial Sequence
  Description of Artificial Sequence: Synthetic oligonucleotide
  Antisense strand to SEQ ID NO: 2233326
ucuuccacggaauucuggg

SEQ ID NO: 2233328 - RNA, 19 nt, Artificial Sequence
  Description of Artificial Sequence: Synthetic oligonucleotide
  Sense strand starting at position 2744 of SEQ ID NO: 1884011
ccagaauuccguggaagau

SEQ ID NO: 2233329 - RNA, 19 nt, Artificial Sequence
  Description of Artificial Sequence: Synthetic oligonucleotide
  Antisense strand to SEQ ID NO: 2233328
aucuuccacggaauucugg

SEQ ID NO: 2233330 - RNA, 19 nt, Artificial Sequence
  Description of Artificial Sequence: Synthetic oligonucleotide
  Sense strand starting at position 2913 of SEQ ID NO: 1884011
gcagauauuuguguucuca

SEQ ID NO: 2233331 - RNA, 19 nt, Artificial Sequence
  Description of Artificial Sequence: Synthetic oligonucleotide
  Antisense strand to SEQ ID NO: 2233330
ugagaacacaaauaucugc

SEQ ID NO: 2233332 - RNA, 19 nt, Artificial Sequence
  Description of Artificial Sequence: Synthetic oligonucleotide
  Sense strand starting at position 2917 of SEQ ID NO: 1884011
auauuuguguucucagagu

SEQ ID NO: 2233333 - RNA, 19 nt, Artificial Sequence
  Description of Artificial Sequence: Synthetic oligonucleotide
  Antisense strand to SEQ ID NO: 2233332
acucugagaacacaaauau

SEQ ID NO: 2233334 - RNA, 19 nt, Artificial Sequence
  Description of Artificial Sequence: Synthetic oligonucleotide
  Sense strand starting at position 3013 of SEQ ID NO: 1884011
aaacgauguccuuggucaa

SEQ ID NO: 2233335 - RNA, 19 nt, Artificial Sequence
  Description of Artificial Sequence: Synthetic oligonucleotide
  Antisense strand to SEQ ID NO: 2233334
uugaccaaggacaucguuu

SEQ ID NO: 2233336 - RNA, 19 nt, Artificial Sequence
  Description of Artificial Sequence: Synthetic oligonucleotide
  Sense strand starting at position 3016 of SEQ ID NO: 1884011
cgauguccuuggucaagga

SEQ ID NO: 2233337 - RNA, 19 nt, Artificial Sequence
  Description of Artificial Sequence: Synthetic oligonucleotide
  Antisense strand to SEQ ID NO: 2233336
uccuugaccaaggacaucg

SEQ ID NO: 2233338 - RNA, 19 nt, Artificial Sequence
  Description of Artificial Sequence: Synthetic oligonucleotide
  Sense strand starting at position 3020 of SEQ ID NO: 1884011
guccuuggucaaggacaga

SEQ ID NO: 2233339 - RNA, 19 nt, Artificial Sequence
  Description of Artificial Sequence: Synthetic oligonucleotide
  Antisense strand to SEQ ID NO: 2233338
ucuguccuugaccaaggac

SEQ ID NO: 2233340 - RNA, 19 nt, Artificial Sequence
  Description of Artificial Sequence: Synthetic oligonucleotide
  Sense strand starting at position 3052 of SEQ ID NO: 1884011
agccuucucccaggaaacu

SEQ ID NO: 2233341 - RNA, 19 nt, Artificial Sequence
  Description of Artificial Sequence: Synthetic oligonucleotide
  Antisense strand to SEQ ID NO: 2233340
aguuuccugggagaaggcu

SEQ ID NO: 2233342 - RNA, 19 nt, Artificial Sequence
  Description of Artificial Sequence: Synthetic oligonucleotide
  Sense strand starting at position 3053 of SEQ ID NO: 1884011
gccuucucccaggaaacua

SEQ ID NO: 2233343 - RNA, 19 nt, Artificial Sequence
  Description of Artificial Sequence: Synthetic oligonucleotide
  Antisense strand to SEQ ID NO: 2233342
uaguuuccugggagaaggc

SEQ ID NO: 2233344 - RNA, 19 nt, Artificial Sequence
  Description of Artificial Sequence: Synthetic oligonucleotide
  Sense strand starting at position 3107 of SEQ ID NO: 1884011
agggaauuggucuguaugu

SEQ ID NO: 2233345 - RNA, 19 nt, Artificial Sequence
  Description of Artificial Sequence: Synthetic oligonucleotide
  Antisense strand to SEQ ID NO: 2233344
acauacagaccaauucccu

SEQ ID NO: 2233346 - RNA, 19 nt, Artificial Sequence
  Description of Artificial Sequence: Synthetic oligonucleotide
  Sense strand starting at position 3108 of SEQ ID NO: 1884011
gggaauuggucuguauguc

SEQ ID NO: 2233347 - RNA, 19 nt, Artificial Sequence
  Description of Artificial Sequence: Synthetic oligonucleotide
  Antisense strand to SEQ ID NO: 2233346
gacauacagaccaauuccc

SEQ ID NO: 2233348 - RNA, 19 nt, Artificial Sequence
  Description of Artificial Sequence: Synthetic oligonucleotide
  Sense strand starting at position 3109 of SEQ ID NO: 1884011
ggaauuggucuguaugucu

SEQ ID NO: 2233349 - RNA, 19 nt, Artificial Sequence
  Description of Artificial Sequence: Synthetic oligonucleotide
  Antisense strand to SEQ ID NO: 2233348
agacauacagaccaauucc

SEQ ID NO: 2233350 - RNA, 19 nt, Artificial Sequence
  Description of Artificial Sequence: Synthetic oligonucleotide
  Sense strand starting at position 3121 of SEQ ID NO: 1884011
uaugucucccuauaguguu

SEQ ID NO: 2233351 - RNA, 19 nt, Artificial Sequence
  Description of Artificial Sequence: Synthetic oligonucleotide
  Antisense strand to SEQ ID NO: 2233350
aacacuauagggagacaua

SEQ ID NO: 2233352 - RNA, 19 nt, Artificial Sequence
  Description of Artificial Sequence: Synthetic oligonucleotide
  Sense strand starting at position 3429 of SEQ ID NO: 1884011
ccuggaauguucuuccuua

SEQ ID NO: 2233353 - RNA, 19 nt, Artificial Sequence
  Description of Artificial Sequence: Synthetic oligonucleotide
  Antisense strand to SEQ ID NO: 2233352
uaaggaagaacauuccagg

SEQ ID NO: 2233354 - RNA, 19 nt, Artificial Sequence
  Description of Artificial Sequence: Synthetic oligonucleotide
  Sense strand starting at position 3442 of SEQ ID NO: 1884011
uccuuaucugucuaccuga

SEQ ID NO: 2233355 - RNA, 19 nt, Artificial Sequence
  Description of Artificial Sequence: Synthetic oligonucleotide
  Antisense strand to SEQ ID NO: 2233354
ucagguagacagauaagga

SEQ ID NO: 2233356 - RNA, 19 nt, Artificial Sequence
  Description of Artificial Sequence: Synthetic oligonucleotide
  Sense strand starting at position 3456 of SEQ ID NO: 1884011
ccugauaagcacugaguca

SEQ ID NO: 2233357 - RNA, 19 nt, Artificial Sequence
  Description of Artificial Sequence: Synthetic oligonucleotide
  Antisense strand to SEQ ID NO: 2233356
ugacucagugcuuaucagg

SEQ ID NO: 2233358 - RNA, 19 nt, Artificial Sequence
  Description of Artificial Sequence: Synthetic oligonucleotide
  Sense strand starting at position 3560 of SEQ ID NO: 1884011
guggguugcugaccacaaa

SEQ ID NO: 2233359 - RNA, 19 nt, Artificial Sequence
  Description of Artificial Sequence: Synthetic oligonucleotide
  Antisense strand to SEQ ID NO: 2233358
uuuguggucagcaacccac

SEQ ID NO: 2233360 - RNA, 19 nt, Artificial Sequence
  Description of Artificial Sequence: Synthetic oligonucleotide
  Sense strand starting at position 3561 of SEQ ID NO: 1884011
uggguugcugaccacaaau

SEQ ID NO: 2233361 - RNA, 19 nt, Artificial Sequence
  Description of Artificial Sequence: Synthetic oligonucleotide
  Antisense strand to SEQ ID NO: 2233360
auuuguggucagcaaccca

SEQ ID NO: 2233362 - RNA, 19 nt, Artificial Sequence
  Description of Artificial Sequence: Synthetic oligonucleotide
  Sense strand starting at position 3922 of SEQ ID NO: 1884011
uuaggauugacuggguaag

SEQ ID NO: 2233363 - RNA, 19 nt, Artificial Sequence
  Description of Artificial Sequence: Synthetic oligonucleotide
  Antisense strand to SEQ ID NO: 2233362
cuuacccagucaauccuaa

SEQ ID NO: 2233364 - RNA, 19 nt, Artificial Sequence
  Description of Artificial Sequence: Synthetic oligonucleotide
  Sense strand starting at position 3934 of SEQ ID NO: 1884011
ggguaagcuuucuuccaca

SEQ ID NO: 2233365 - RNA, 19 nt, Artificial Sequence
  Description of Artificial Sequence: Synthetic oligonucleotide
  Antisense strand to SEQ ID NO: 2233364
uguggaagaaagcuuaccc

SEQ ID NO: 2233366 - RNA, 19 nt, Artificial Sequence
  Description of Artificial Sequence: Synthetic oligonucleotide
  Sense strand starting at position 3968 of SEQ ID NO: 1884011
cccagagauucuucucaga

SEQ ID NO: 2233367 - RNA, 19 nt, Artificial Sequence
  Description of Artificial Sequence: Synthetic oligonucleotide
  Antisense strand to SEQ ID NO: 2233366
ucugagaagaaucucuggg

SEQ ID NO: 2233368 - RNA, 19 nt, Artificial Sequence
  Description of Artificial Sequence: Synthetic oligonucleotide
  Sense strand starting at position 280 of SEQ ID NO: 1884012
uuccuauaggucugucaaa

SEQ ID NO: 2233369 - RNA, 19 nt, Artificial Sequence
  Description of Artificial Sequence: Synthetic oligonucleotide
  Antisense strand to SEQ ID NO: 2233368
uuugacagaccuauaggaa

SEQ ID NO: 2233370 - RNA, 19 nt, Artificial Sequence
  Description of Artificial Sequence: Synthetic oligonucleotide
  Sense strand starting at position 417 of SEQ ID NO: 1884012
auggaugaaucuuccgaag

SEQ ID NO: 2233371 - RNA, 19 nt, Artificial Sequence
  Description of Artificial Sequence: Synthetic oligonucleotide
  Antisense strand to SEQ ID NO: 2233370
cuucggaagauucauccau

SEQ ID NO: 2233372 - RNA, 19 nt, Artificial Sequence
  Description of Artificial Sequence: Synthetic oligonucleotide
  Sense strand starting at position 433 of SEQ ID NO: 1884012
aagugauguccuuggacaa

SEQ ID NO: 2233373 - RNA, 19 nt, Artificial Sequence
  Description of Artificial Sequence: Synthetic oligonucleotide
  Antisense strand to SEQ ID NO: 2233372
uuguccaaggacaucacuu

SEQ ID NO: 2233374 - RNA, 19 nt, Artificial Sequence
  Description of Artificial Sequence: Synthetic oligonucleotide
  Sense strand starting at position 434 of SEQ ID NO: 1884012
agugauguccuuggacaaa

SEQ ID NO: 2233375 - RNA, 19 nt, Artificial Sequence
  Description of Artificial Sequence: Synthetic oligonucleotide
  Antisense strand to SEQ ID NO: 2233374
uuuguccaaggacaucacu

SEQ ID NO: 2233376 - RNA, 19 nt, Artificial Sequence
  Description of Artificial Sequence: Synthetic oligonucleotide
  Sense strand starting at position 444 of SEQ ID NO: 1884012
uuggacaaauugccuaaau

SEQ ID NO: 2233377 - RNA, 19 nt, Artificial Sequence
  Description of Artificial Sequence: Synthetic oligonucleotide
  Antisense strand to SEQ ID NO: 2233376
auuuaggcaauuuguccaa

SEQ ID NO: 2233378 - RNA, 19 nt, Artificial Sequence
  Description of Artificial Sequence: Synthetic oligonucleotide
  Sense strand starting at position 445 of SEQ ID NO: 1884012
uggacaaauugccuaaauc

SEQ ID NO: 2233379 - RNA, 19 nt, Artificial Sequence
  Description of Artificial Sequence: Synthetic oligonucleotide
  Antisense strand to SEQ ID NO: 2233378
gauuuaggcaauuugucca

SEQ ID NO: 2233380 - RNA, 19 nt, Artificial Sequence
  Description of Artificial Sequence: Synthetic oligonucleotide
  Sense strand starting at position 679 of SEQ ID NO: 1884012
ggaagagcccuaggaucau

SEQ ID NO: 2233381 - RNA, 19 nt, Artificial Sequence
  Description of Artificial Sequence: Synthetic oligonucleotide
  Antisense strand to SEQ ID NO: 2233380
augauccuagggcucuucc

SEQ ID NO: 2233382 - RNA, 19 nt, Artificial Sequence
  Description of Artificial Sequence: Synthetic oligonucleotide
  Sense strand starting at position 697 of SEQ ID NO: 1884012
uuucuaauuuaggaaguga

SEQ ID NO: 2233383 - RNA, 19 nt, Artificial Sequence
  Description of Artificial Sequence: Synthetic oligonucleotide
  Antisense strand to SEQ ID NO: 2233382
ucacuuccuaaauuagaaa

SEQ ID NO: 2233384 - RNA, 19 nt, Artificial Sequence
  Description of Artificial Sequence: Synthetic oligonucleotide
  Sense strand starting at position 791 of SEQ ID NO: 1884012
aucuguuuccaggacaguu

SEQ ID NO: 2233385 - RNA, 19 nt, Artificial Sequence
  Description of Artificial Sequence: Synthetic oligonucleotide
  Antisense strand to SEQ ID NO: 2233384
aacuguccuggaaacagau

SEQ ID NO: 2233386 - RNA, 19 nt, Artificial Sequence
  Description of Artificial Sequence: Synthetic oligonucleotide
  Sense strand starting at position 801 of SEQ ID NO: 1884012
aggacaguuucuuucuuaa

SEQ ID NO: 2233387 - RNA, 19 nt, Artificial Sequence
  Description of Artificial Sequence: Synthetic oligonucleotide
  Antisense strand to SEQ ID NO: 2233386
uuaagaaagaaacuguccu

SEQ ID NO: 2233388 - RNA, 19 nt, Artificial Sequence
  Description of Artificial Sequence: Synthetic oligonucleotide
  Sense strand starting at position 855 of SEQ ID NO: 1884012
ccuaccaugccagggauua

SEQ ID NO: 2233389 - RNA, 19 nt, Artificial Sequence
  Description of Artificial Sequence: Synthetic oligonucleotide
  Antisense strand to SEQ ID NO: 2233388
uaaucccuggcaugguagg

SEQ ID NO: 2233390 - RNA, 19 nt, Artificial Sequence
  Description of Artificial Sequence: Synthetic oligonucleotide
  Sense strand starting at position 856 of SEQ ID NO: 1884012
cuaccaugccagggauuau

SEQ ID NO: 2233391 - RNA, 19 nt, Artificial Sequence
  Description of Artificial Sequence: Synthetic oligonucleotide
  Antisense strand to SEQ ID NO: 2233390
auaaucccuggcaugguag

SEQ ID NO: 2233392 - RNA, 19 nt, Artificial Sequence
  Description of Artificial Sequence: Synthetic oligonucleotide
  Sense strand starting at position 1160 of SEQ ID NO: 1884012
caggcuagucagggcuaau

SEQ ID NO: 2233393 - RNA, 19 nt, Artificial Sequence
  Description of Artificial Sequence: Synthetic oligonucleotide
  Antisense strand to SEQ ID NO: 2233392
auuagcccugacuagccug

SEQ ID NO: 2233394 - RNA, 19 nt, Artificial Sequence
  Description of Artificial Sequence: Synthetic oligonucleotide
  Sense strand starting at position 1329 of SEQ ID NO: 1884012
gagaccucuugaguagacu

SEQ ID NO: 2233395 - RNA, 19 nt, Artificial Sequence
  Description of Artificial Sequence: Synthetic oligonucleotide
  Antisense strand to SEQ ID NO: 2233394
agucuacucaagaggucuc

SEQ ID NO: 2233396 - RNA, 19 nt, Artificial Sequence
  Description of Artificial Sequence: Synthetic oligonucleotide
  Sense strand starting at position 1375 of SEQ ID NO: 1884012
aucccauggugcuuggaua

SEQ ID NO: 2233397 - RNA, 19 nt, Artificial Sequence
  Description of Artificial Sequence: Synthetic oligonucleotide
  Antisense strand to SEQ ID NO: 2233396
uauccaagcaccaugggau

SEQ ID NO: 2233398 - RNA, 19 nt, Artificial Sequence
  Description of Artificial Sequence: Synthetic oligonucleotide
  Sense strand starting at position 1457 of SEQ ID NO: 1884012
uucuacuagcuguauauau

SEQ ID NO: 2233399 - RNA, 19 nt, Artificial Sequence
  Description of Artificial Sequence: Synthetic oligonucleotide
  Antisense strand to SEQ ID NO: 2233398
auauauacagcuaguagaa

SEQ ID NO: 2233400 - RNA, 19 nt, Artificial Sequence
  Description of Artificial Sequence: Synthetic oligonucleotide
  Sense strand starting at position 1689 of SEQ ID NO: 1884012
ggcauuuaaucauagacug

SEQ ID NO: 2233401 - RNA, 19 nt, Artificial Sequence
  Description of Artificial Sequence: Synthetic oligonucleotide
  Antisense strand to SEQ ID NO: 2233400
cagucuaugauuaaaugcc

SEQ ID NO: 2233402 - RNA, 19 nt, Artificial Sequence
  Description of Artificial Sequence: Synthetic oligonucleotide
  Sense strand starting at position 1694 of SEQ ID NO: 1884012
uuaaucauagacuggucaa

SEQ ID NO: 2233403 - RNA, 19 nt, Artificial Sequence
  Description of Artificial Sequence: Synthetic oligonucleotide
  Antisense strand to SEQ ID NO: 2233402
uugaccagucuaugauuaa

SEQ ID NO: 2233404 - RNA, 19 nt, Artificial Sequence
  Description of Artificial Sequence: Synthetic oligonucleotide
  Sense strand starting at position 1697 of SEQ ID NO: 1884012
aucauagacuggucaaagu

SEQ ID NO: 2233405 - RNA, 19 nt, Artificial Sequence
  Description of Artificial Sequence: Synthetic oligonucleotide
  Antisense strand to SEQ ID NO: 2233404
acuuugaccagucuaugau

SEQ ID NO: 2233406 - RNA, 19 nt, Artificial Sequence
  Description of Artificial Sequence: Synthetic oligonucleotide
  Sense strand starting at position 2085 of SEQ ID NO: 1884012
agcuuuacgcuugcugauu

SEQ ID NO: 2233407 - RNA, 19 nt, Artificial Sequence
  Description of Artificial Sequence: Synthetic oligonucleotide
  Antisense strand to SEQ ID NO: 2233406
aaucagcaagcguaaagcu

SEQ ID NO: 2233408 - RNA, 19 nt, Artificial Sequence
  Description of Artificial Sequence: Synthetic oligonucleotide
  Sense strand starting at position 2090 of SEQ ID NO: 1884012
uacgcuugcugauuuacau

SEQ ID NO: 2233409 - RNA, 19 nt, Artificial Sequence
  Description of Artificial Sequence: Synthetic oligonucleotide
  Antisense strand to SEQ ID NO: 2233408
auguaaaucagcaagcgua

SEQ ID NO: 2233410 - RNA, 19 nt, Artificial Sequence
  Description of Artificial Sequence: Synthetic oligonucleotide
  Sense strand starting at position 2158 of SEQ ID NO: 1884012
ccagucagaucuuugccua

SEQ ID NO: 2233411 - RNA, 19 nt, Artificial Sequence
  Description of Artificial Sequence: Synthetic oligonucleotide
  Antisense strand to SEQ ID NO: 2233410
uaggcaaagaucugacugg

SEQ ID NO: 2233412 - RNA, 19 nt, Artificial Sequence
  Description of Artificial Sequence: Synthetic oligonucleotide
  Sense strand starting at position 2159 of SEQ ID NO: 1884012
cagucagaucuuugccuag

SEQ ID NO: 2233413 - RNA, 19 nt, Artificial Sequence
  Description of Artificial Sequence: Synthetic oligonucleotide
  Antisense strand to SEQ ID NO: 2233412
cuaggcaaagaucugacug

SEQ ID NO: 2233414 - RNA, 19 nt, Artificial Sequence
  Description of Artificial Sequence: Synthetic oligonucleotide
  Sense strand starting at position 2297 of SEQ ID NO: 1884012
gggagucuaugaucuagau

SEQ ID NO: 2233415 - RNA, 19 nt, Artificial Sequence
  Description of Artificial Sequence: Synthetic oligonucleotide
  Antisense strand to SEQ ID NO: 2233414
aucuagaucauagacuccc

SEQ ID NO: 2233416 - RNA, 19 nt, Artificial Sequence
  Description of Artificial Sequence: Synthetic oligonucleotide
  Sense strand starting at position 2375 of SEQ ID NO: 1884012
guaauccuaacguguagaa

SEQ ID NO: 2233417 - RNA, 19 nt, Artificial Sequence
  Description of Artificial Sequence: Synthetic oligonucleotide
  Antisense strand to SEQ ID NO: 2233416
uucuacacguuaggauuac

SEQ ID NO: 2233418 - RNA, 19 nt, Artificial Sequence
  Description of Artificial Sequence: Synthetic oligonucleotide
  Sense strand starting at position 2494 of SEQ ID NO: 1884012
agcuaaauuuggucuguau

SEQ ID NO: 2233419 - RNA, 19 nt, Artificial Sequence
  Description of Artificial Sequence: Synthetic oligonucleotide
  Antisense strand to SEQ ID NO: 2233418
auacagaccaaauuuagcu

SEQ ID NO: 2233420 - RNA, 19 nt, Artificial Sequence
  Description of Artificial Sequence: Synthetic oligonucleotide
  Sense strand starting at position 2532 of SEQ ID NO: 1884012
aacugauucuuggcuggca

SEQ ID NO: 2233421 - RNA, 19 nt, Artificial Sequence
  Description of Artificial Sequence: Synthetic oligonucleotide
  Antisense strand to SEQ ID NO: 2233420
ugccagccaagaaucaguu

SEQ ID NO: 2233422 - RNA, 19 nt, Artificial Sequence
  Description of Artificial Sequence: Synthetic oligonucleotide
  Sense strand starting at position 2810 of SEQ ID NO: 1884012
uugaucucuugagcucaua

SEQ ID NO: 2233423 - RNA, 19 nt, Artificial Sequence
  Description of Artificial Sequence: Synthetic oligonucleotide
  Antisense strand to SEQ ID NO: 2233422
uaugagcucaagagaucaa

SEQ ID NO: 2233424 - RNA, 19 nt, Artificial Sequence
  Description of Artificial Sequence: Synthetic oligonucleotide
  Sense strand starting at position 3075 of SEQ ID NO: 1884012
gcauguguccauguuggca

SEQ ID NO: 2233425 - RNA, 19 nt, Artificial Sequence
  Description of Artificial Sequence: Synthetic oligonucleotide
  Antisense strand to SEQ ID NO: 2233424
ugccaacauggacacaugc

SEQ ID NO: 2233426 - RNA, 19 nt, Artificial Sequence
  Description of Artificial Sequence: Synthetic oligonucleotide
  Sense strand starting at position 3125 of SEQ ID NO: 1884012
cucucaagguggucuuuaa

SEQ ID NO: 2233427 - RNA, 19 nt, Artificial Sequence
  Description of Artificial Sequence: Synthetic oligonucleotide
  Antisense strand to SEQ ID NO: 2233426
uuaaagaccaccuugagag

SEQ ID NO: 2233428 - RNA, 19 nt, Artificial Sequence
  Description of Artificial Sequence: Synthetic oligonucleotide
  Sense strand starting at position 3453 of SEQ ID NO: 1884012
guucuaauguacuuuaaug

SEQ ID NO: 2233429 - RNA, 19 nt, Artificial Sequence
  Description of Artificial Sequence: Synthetic oligonucleotide
  Antisense strand to SEQ ID NO: 2233428
cauuaaaguacauuagaac

SEQ ID NO: 2233430 - RNA, 19 nt, Artificial Sequence
  Description of Artificial Sequence: Synthetic oligonucleotide
  Sense strand starting at position 3569 of SEQ ID NO: 1884012
cuguaaaugucaucacuuu

SEQ ID NO: 2233431 - RNA, 19 nt, Artificial Sequence
  Description of Artificial Sequence: Synthetic oligonucleotide
  Antisense strand to SEQ ID NO: 2233430
aaagugaugacauuuacag

SEQ ID NO: 2233432 - RNA, 19 nt, Artificial Sequence
  Description of Artificial Sequence: Synthetic oligonucleotide
  Sense strand starting at position 3570 of SEQ ID NO: 1884012
uguaaaugucaucacuuua

SEQ ID NO: 2233433 - RNA, 19 nt, Artificial Sequence
  Description of Artificial Sequence: Synthetic oligonucleotide
  Antisense strand to SEQ ID NO: 2233432
uaaagugaugacauuuaca

SEQ ID NO: 2233434 - RNA, 19 nt, Artificial Sequence
  Description of Artificial Sequence: Synthetic oligonucleotide
  Sense strand starting at position 3642 of SEQ ID NO: 1884012
gcuggaacuucucuuaacu

SEQ ID NO: 2233435 - RNA, 19 nt, Artificial Sequence
  Description of Artificial Sequence: Synthetic oligonucleotide
  Antisense strand to SEQ ID NO: 2233434
aguuaagagaaguuccagc

SEQ ID NO: 2233436 - RNA, 19 nt, Artificial Sequence
  Description of Artificial Sequence: Synthetic oligonucleotide
  Sense strand starting at position 3666 of SEQ ID NO: 1884012
agggcucugcuuuggacaa

SEQ ID NO: 2233437 - RNA, 19 nt, Artificial Sequence
  Description of Artificial Sequence: Synthetic oligonucleotide
  Antisense strand to SEQ ID NO: 2233436
uuguccaaagcagagcccu

SEQ ID NO: 2233438 - RNA, 19 nt, Artificial Sequence
  Description of Artificial Sequence: Synthetic oligonucleotide
  Sense strand starting at position 3670 of SEQ ID NO: 1884012
cucugcuuuggacaaauua

SEQ ID NO: 2233439 - RNA, 19 nt, Artificial Sequence
  Description of Artificial Sequence: Synthetic oligonucleotide
  Antisense strand to SEQ ID NO: 2233438
uaauuuguccaaagcagag

SEQ ID NO: 2233440 - RNA, 19 nt, Artificial Sequence
  Description of Artificial Sequence: Synthetic oligonucleotide
  Sense strand starting at position 3740 of SEQ ID NO: 1884012
gaagaaauguggcucacau

SEQ ID NO: 2233441 - RNA, 19 nt, Artificial Sequence
  Description of Artificial Sequence: Synthetic oligonucleotide
  Antisense strand to SEQ ID NO: 2233440
augugagccacauuucuuc

SEQ ID NO: 2233442 - RNA, 19 nt, Artificial Sequence
  Description of Artificial Sequence: Synthetic oligonucleotide
  Sense strand starting at position 3742 of SEQ ID NO: 1884012
agaaauguggcucacaugu

SEQ ID NO: 2233443 - RNA, 19 nt, Artificial Sequence
  Description of Artificial Sequence: Synthetic oligonucleotide
  Antisense strand to SEQ ID NO: 2233442
acaugugagccacauuucu

SEQ ID NO: 2233444 - RNA, 19 nt, Artificial Sequence
  Description of Artificial Sequence: Synthetic oligonucleotide
  Sense strand starting at position 3832 of SEQ ID NO: 1884012
cugguauagucacuuauag

SEQ ID NO: 2233445 - RNA, 19 nt, Artificial Sequence
  Description of Artificial Sequence: Synthetic oligonucleotide
  Antisense strand to SEQ ID NO: 2233444
cuauaagugacuauaccag

SEQ ID NO: 2233446 - RNA, 19 nt, Artificial Sequence
  Description of Artificial Sequence: Synthetic oligonucleotide
  Sense strand starting at position 3935 of SEQ ID NO: 1884012
ucagaauguugugucaaca

SEQ ID NO: 2233447 - RNA, 19 nt, Artificial Sequence
  Description of Artificial Sequence: Synthetic oligonucleotide
  Antisense strand to SEQ ID NO: 2233446
uguugacacaacauucuga

SEQ ID NO: 2233448 - RNA, 19 nt, Artificial Sequence
  Description of Artificial Sequence: Synthetic oligonucleotide
  Sense strand starting at position 25 of SEQ ID NO: 1884013
cuuacuugagcucaaagau

SEQ ID NO: 2233449 - RNA, 19 nt, Artificial Sequence
  Description of Artificial Sequence: Synthetic oligonucleotide
  Antisense strand to SEQ ID NO: 2233448
aucuuugagcucaaguaag

SEQ ID NO: 2233450 - RNA, 19 nt, Artificial Sequence
  Description of Artificial Sequence: Synthetic oligonucleotide
  Sense strand starting at position 95 of SEQ ID NO: 1884013
gggaaauggcaauguucug

SEQ ID NO: 2233451 - RNA, 19 nt, Artificial Sequence
  Description of Artificial Sequence: Synthetic oligonucleotide
  Antisense strand to SEQ ID NO: 2233450
cagaacauugccauuuccc

SEQ ID NO: 2233452 - RNA, 19 nt, Artificial Sequence
  Description of Artificial Sequence: Synthetic oligonucleotide
  Sense strand starting at position 369 of SEQ ID NO: 1884013
agcugaagaacguaaguau

SEQ ID NO: 2233453 - RNA, 19 nt, Artificial Sequence
  Description of Artificial Sequence: Synthetic oligonucleotide
  Antisense strand to SEQ ID NO: 2233452
auacuuacguucuucagcu

SEQ ID NO: 2233454 - RNA, 19 nt, Artificial Sequence
  Description of Artificial Sequence: Synthetic oligonucleotide
  Sense strand starting at position 372 of SEQ ID NO: 1884013
ugaagaacguaaguauaau

SEQ ID NO: 2233455 - RNA, 19 nt, Artificial Sequence
  Description of Artificial Sequence: Synthetic oligonucleotide
  Antisense strand to SEQ ID NO: 2233454
auuauacuuacguucuuca

SEQ ID NO: 2233456 - RNA, 19 nt, Artificial Sequence
  Description of Artificial Sequence: Synthetic oligonucleotide
  Sense strand starting at position 484 of SEQ ID NO: 1884013
uccucaaguggccaauaau

SEQ ID NO: 2233457 - RNA, 19 nt, Artificial Sequence
  Description of Artificial Sequence: Synthetic oligonucleotide
  Antisense strand to SEQ ID NO: 2233456
auuauuggccacuugagga

SEQ ID NO: 2233458 - RNA, 19 nt, Artificial Sequence
  Description of Artificial Sequence: Synthetic oligonucleotide
  Sense strand starting at position 523 of SEQ ID NO: 1884013
cuuguaugcgugucaaacc

SEQ ID NO: 2233459 - RNA, 19 nt, Artificial Sequence
  Description of Artificial Sequence: Synthetic oligonucleotide
  Antisense strand to SEQ ID NO: 2233458
gguuugacacgcauacaag

SEQ ID NO: 2233460 - RNA, 19 nt, Artificial Sequence
  Description of Artificial Sequence: Synthetic oligonucleotide
  Sense strand starting at position 611 of SEQ ID NO: 1884013
agacauagcuagccuauau

SEQ ID NO: 2233461 - RNA, 19 nt, Artificial Sequence
  Description of Artificial Sequence: Synthetic oligonucleotide
  Antisense strand to SEQ ID NO: 2233460
auauaggcuagcuaugucu

SEQ ID NO: 2233462 - RNA, 19 nt, Artificial Sequence
  Description of Artificial Sequence: Synthetic oligonucleotide
  Sense strand starting at position 708 of SEQ ID NO: 1884013
ggcugaguucuguccggug

SEQ ID NO: 2233463 - RNA, 19 nt, Artificial Sequence
  Description of Artificial Sequence: Synthetic oligonucleotide
  Antisense strand to SEQ ID NO: 2233462
caccggacagaacucagcc

SEQ ID NO: 2233464 - RNA, 19 nt, Artificial Sequence
  Description of Artificial Sequence: Synthetic oligonucleotide
  Sense strand starting at position 1252 of SEQ ID NO: 1884013
cuuggauguguagguauuu

SEQ ID NO: 2233465 - RNA, 19 nt, Artificial Sequence
  Description of Artificial Sequence: Synthetic oligonucleotide
  Antisense strand to SEQ ID NO: 2233464
aaauaccuacacauccaag

SEQ ID NO: 2233466 - RNA, 19 nt, Artificial Sequence
  Description of Artificial Sequence: Synthetic oligonucleotide
  Sense strand starting at position 1287 of SEQ ID NO: 1884013
uuucgucuuaaggaagagu

SEQ ID NO: 2233467 - RNA, 19 nt, Artificial Sequence
  Description of Artificial Sequence: Synthetic oligonucleotide
  Antisense strand to SEQ ID NO: 2233466
acucuuccuuaagacgaaa

SEQ ID NO: 2233468 - RNA, 19 nt, Artificial Sequence
  Description of Artificial Sequence: Synthetic oligonucleotide
  Sense strand starting at position 1298 of SEQ ID NO: 1884013
ggaagaguuaguuaggguu

SEQ ID NO: 2233469 - RNA, 19 nt, Artificial Sequence
  Description of Artificial Sequence: Synthetic oligonucleotide
  Antisense strand to SEQ ID NO: 2233468
aacccuaacuaacucuucc

SEQ ID NO: 2233470 - RNA, 19 nt, Artificial Sequence
  Description of Artificial Sequence: Synthetic oligonucleotide
  Sense strand starting at position 1332 of SEQ ID NO: 1884013
gcaacugggaccugagauu

SEQ ID NO: 2233471 - RNA, 19 nt, Artificial Sequence
  Description of Artificial Sequence: Synthetic oligonucleotide
  Antisense strand to SEQ ID NO: 2233470
aaucucaggucccaguugc

SEQ ID NO: 2233472 - RNA, 19 nt, Artificial Sequence
  Description of Artificial Sequence: Synthetic oligonucleotide
  Sense strand starting at position 1404 of SEQ ID NO: 1884013
gauuaaagccuuuggagaa

SEQ ID NO: 2233473 - RNA, 19 nt, Artificial Sequence
  Description of Artificial Sequence: Synthetic oligonucleotide
  Antisense strand to SEQ ID NO: 2233472
uucuccaaaggcuuuaauc

SEQ ID NO: 2233474 - RNA, 19 nt, Artificial Sequence
  Description of Artificial Sequence: Synthetic oligonucleotide
  Sense strand starting at position 1420 of SEQ ID NO: 1884013
gaaccaagcccuggagaua

SEQ ID NO: 2233475 - RNA, 19 nt, Artificial Sequence
  Description of Artificial Sequence: Synthetic oligonucleotide
  Antisense strand to SEQ ID NO: 2233474
uaucuccagggcuugguuc

SEQ ID NO: 2233476 - RNA, 19 nt, Artificial Sequence
  Description of Artificial Sequence: Synthetic oligonucleotide
  Sense strand starting at position 1654 of SEQ ID NO: 1884013
gugccuauauaacuuagaa

SEQ ID NO: 2233477 - RNA, 19 nt, Artificial Sequence
  Description of Artificial Sequence: Synthetic oligonucleotide
  Antisense strand to SEQ ID NO: 2233476
uucuaaguuauauaggcac

SEQ ID NO: 2233478 - RNA, 19 nt, Artificial Sequence
  Description of Artificial Sequence: Synthetic oligonucleotide
  Sense strand starting at position 1757 of SEQ ID NO: 1884013
gaggauaguuuaccucaca

SEQ ID NO: 2233479 - RNA, 19 nt, Artificial Sequence
  Description of Artificial Sequence: Synthetic oligonucleotide
  Antisense strand to SEQ ID NO: 2233478
ugugagguaaacuauccuc

SEQ ID NO: 2233480 - RNA, 19 nt, Artificial Sequence
  Description of Artificial Sequence: Synthetic oligonucleotide
  Sense strand starting at position 1790 of SEQ ID NO: 1884013
ggcucuucuuaguuauuua

SEQ ID NO: 2233481 - RNA, 19 nt, Artificial Sequence
  Description of Artificial Sequence: Synthetic oligonucleotide
  Antisense strand to SEQ ID NO: 2233480
uaaauaacuaagaagagcc

SEQ ID NO: 2233482 - RNA, 19 nt, Artificial Sequence
  Description of Artificial Sequence: Synthetic oligonucleotide
  Sense strand starting at position 1797 of SEQ ID NO: 1884013
cuuaguuauuuagaacaag

SEQ ID NO: 2233483 - RNA, 19 nt, Artificial Sequence
  Description of Artificial Sequence: Synthetic oligonucleotide
  Antisense strand to SEQ ID NO: 2233482
cuuguucuaaauaacuaag

SEQ ID NO: 2233484 - RNA, 19 nt, Artificial Sequence
  Description of Artificial Sequence: Synthetic oligonucleotide
  Sense strand starting at position 1876 of SEQ ID NO: 1884013
uguagagaaucaguuucua

SEQ ID NO: 2233485 - RNA, 19 nt, Artificial Sequence
  Description of Artificial Sequence: Synthetic oligonucleotide
  Antisense strand to SEQ ID NO: 2233484
uagaaacugauucucuaca

SEQ ID NO: 2233486 - RNA, 19 nt, Artificial Sequence
  Description of Artificial Sequence: Synthetic oligonucleotide
  Sense strand starting at position 2119 of SEQ ID NO: 1884013
ucaggauucucaguguaaa

SEQ ID NO: 2233487 - RNA, 19 nt, Artificial Sequence
  Description of Artificial Sequence: Synthetic oligonucleotide
  Antisense strand to SEQ ID NO: 2233486
uuuacacugagaauccuga

SEQ ID NO: 2233488 - RNA, 19 nt, Artificial Sequence
  Description of Artificial Sequence: Synthetic oligonucleotide
  Sense strand starting at position 2120 of SEQ ID NO: 1884013
caggauucucaguguaaau

SEQ ID NO: 2233489 - RNA, 19 nt, Artificial Sequence
  Description of Artificial Sequence: Synthetic oligonucleotide
  Antisense strand to SEQ ID NO: 2233488
auuuacacugagaauccug

SEQ ID NO: 2233490 - RNA, 19 nt, Artificial Sequence
  Description of Artificial Sequence: Synthetic oligonucleotide
  Sense strand starting at position 2222 of SEQ ID NO: 1884013
gcaugugcugaacacuuaa

SEQ ID NO: 2233491 - RNA, 19 nt, Artificial Sequence
  Description of Artificial Sequence: Synthetic oligonucleotide
  Antisense strand to SEQ ID NO: 2233490
uuaaguguucagcacaugc

SEQ ID NO: 2233492 - RNA, 19 nt, Artificial Sequence
  Description of Artificial Sequence: Synthetic oligonucleotide
  Sense strand starting at position 2267 of SEQ ID NO: 1884013
accauagccugauugauga

SEQ ID NO: 2233493 - RNA, 19 nt, Artificial Sequence
  Description of Artificial Sequence: Synthetic oligonucleotide
  Antisense strand to SEQ ID NO: 2233492
ucaucaaucaggcuauggu

SEQ ID NO: 2233494 - RNA, 19 nt, Artificial Sequence
  Description of Artificial Sequence: Synthetic oligonucleotide
  Sense strand starting at position 2351 of SEQ ID NO: 1884013
aggauuugaucacagaucu

SEQ ID NO: 2233495 - RNA, 19 nt, Artificial Sequence
  Description of Artificial Sequence: Synthetic oligonucleotide
  Antisense strand to SEQ ID NO: 2233494
agaucugugaucaaauccu

SEQ ID NO: 2233496 - RNA, 19 nt, Artificial Sequence
  Description of Artificial Sequence: Synthetic oligonucleotide
  Sense strand starting at position 2814 of SEQ ID NO: 1884013
aguagauagaguuagaguu

SEQ ID NO: 2233497 - RNA, 19 nt, Artificial Sequence
  Description of Artificial Sequence: Synthetic oligonucleotide
  Antisense strand to SEQ ID NO: 2233496
aacucuaacucuaucuacu

SEQ ID NO: 2233498 - RNA, 19 nt, Artificial Sequence
  Description of Artificial Sequence: Synthetic oligonucleotide
  Sense strand starting at position 2849 of SEQ ID NO: 1884013
gccagcuaugcugagagaa

SEQ ID NO: 2233499 - RNA, 19 nt, Artificial Sequence
  Description of Artificial Sequence: Synthetic oligonucleotide
  Antisense strand to SEQ ID NO: 2233498
uucucucagcauagcuggc

SEQ ID NO: 2233500 - RNA, 19 nt, Artificial Sequence
  Description of Artificial Sequence: Synthetic oligonucleotide
  Sense strand starting at position 2910 of SEQ ID NO: 1884013
guggcauaacuguaacaua

SEQ ID NO: 2233501 - RNA, 19 nt, Artificial Sequence
  Description of Artificial Sequence: Synthetic oligonucleotide
  Antisense strand to SEQ ID NO: 2233500
uauguuacaguuaugccac

SEQ ID NO: 2233502 - RNA, 19 nt, Artificial Sequence
  Description of Artificial Sequence: Synthetic oligonucleotide
  Sense strand starting at position 2972 of SEQ ID NO: 1884013
aggcgcaagaaagauauua

SEQ ID NO: 2233503 - RNA, 19 nt, Artificial Sequence
  Description of Artificial Sequence: Synthetic oligonucleotide
  Antisense strand to SEQ ID NO: 2233502
uaauaucuuucuugcgccu

SEQ ID NO: 2233504 - RNA, 19 nt, Artificial Sequence
  Description of Artificial Sequence: Synthetic oligonucleotide
  Sense strand starting at position 3059 of SEQ ID NO: 1884013
cguucuauccuaggaaaua

SEQ ID NO: 2233505 - RNA, 19 nt, Artificial Sequence
  Description of Artificial Sequence: Synthetic oligonucleotide
  Antisense strand to SEQ ID NO: 2233504
uauuuccuaggauagaacg

SEQ ID NO: 2233506 - RNA, 19 nt, Artificial Sequence
  Description of Artificial Sequence: Synthetic oligonucleotide
  Sense strand starting at position 3203 of SEQ ID NO: 1884013
gcacucuaacauuaugguu

SEQ ID NO: 2233507 - RNA, 19 nt, Artificial Sequence
  Description of Artificial Sequence: Synthetic oligonucleotide
  Antisense strand to SEQ ID NO: 2233506
aaccauaauguuagagugc

SEQ ID NO: 2233508 - RNA, 19 nt, Artificial Sequence
  Description of Artificial Sequence: Synthetic oligonucleotide
  Sense strand starting at position 3232 of SEQ ID NO: 1884013
agguacucccugcaauaaa

SEQ ID NO: 2233509 - RNA, 19 nt, Artificial Sequence
  Description of Artificial Sequence: Synthetic oligonucleotide
  Antisense strand to SEQ ID NO: 2233508
uuuauugcagggaguaccu

SEQ ID NO: 2233510 - RNA, 19 nt, Artificial Sequence
  Description of Artificial Sequence: Synthetic oligonucleotide
  Sense strand starting at position 3533 of SEQ ID NO: 1884013
cucugagacuuuguuaaua

SEQ ID NO: 2233511 - RNA, 19 nt, Artificial Sequence
  Description of Artificial Sequence: Synthetic oligonucleotide
  Antisense strand to SEQ ID NO: 2233510
uauuaacaaagucucagag

SEQ ID NO: 2233512 - RNA, 19 nt, Artificial Sequence
  Description of Artificial Sequence: Synthetic oligonucleotide
  Sense strand starting at position 3558 of SEQ ID NO: 1884013
ugaaaugaaucuucugcac

SEQ ID NO: 2233513 - RNA, 19 nt, Artificial Sequence
  Description of Artificial Sequence: Synthetic oligonucleotide
  Antisense strand to SEQ ID NO: 2233512
gugcagaagauucauuuca

SEQ ID NO: 2233514 - RNA, 19 nt, Artificial Sequence
  Description of Artificial Sequence: Synthetic oligonucleotide
  Sense strand starting at position 3571 of SEQ ID NO: 1884013
cugcacaauccaugggaau

SEQ ID NO: 2233515 - RNA, 19 nt, Artificial Sequence
  Description of Artificial Sequence: Synthetic oligonucleotide
  Antisense strand to SEQ ID NO: 2233514
auucccauggauugugcag

SEQ ID NO: 2233516 - RNA, 19 nt, Artificial Sequence
  Description of Artificial Sequence: Synthetic oligonucleotide
  Sense strand starting at position 3572 of SEQ ID NO: 1884013
ugcacaauccaugggaauu

SEQ ID NO: 2233517 - RNA, 19 nt, Artificial Sequence
  Description of Artificial Sequence: Synthetic oligonucleotide
  Antisense strand to SEQ ID NO: 2233516
aauucccauggauugugca

SEQ ID NO: 2233518 - RNA, 19 nt, Artificial Sequence
  Description of Artificial Sequence: Synthetic oligonucleotide
  Sense strand starting at position 3585 of SEQ ID NO: 1884013
ggaauuugguuacagaauu

SEQ ID NO: 2233519 - RNA, 19 nt, Artificial Sequence
  Description of Artificial Sequence: Synthetic oligonucleotide
  Antisense strand to SEQ ID NO: 2233518
aauucuguaaccaaauucc

SEQ ID NO: 2233520 - RNA, 19 nt, Artificial Sequence
  Description of Artificial Sequence: Synthetic oligonucleotide
  Sense strand starting at position 3605 of SEQ ID NO: 1884013
acaagucaccuuuguaaca

SEQ ID NO: 2233521 - RNA, 19 nt, Artificial Sequence
  Description of Artificial Sequence: Synthetic oligonucleotide
  Antisense strand to SEQ ID NO: 2233520
uguuacaaaggugacuugu

SEQ ID NO: 2233522 - RNA, 19 nt, Artificial Sequence
  Description of Artificial Sequence: Synthetic oligonucleotide
  Sense strand starting at position 3794 of SEQ ID NO: 1884013
ggaauaucaugagaaauaa

SEQ ID NO: 2233523 - RNA, 19 nt, Artificial Sequence
  Description of Artificial Sequence: Synthetic oligonucleotide
  Antisense strand to SEQ ID NO: 2233522
uuauuucucaugauauucc

SEQ ID NO: 2233524 - RNA, 19 nt, Artificial Sequence
  Description of Artificial Sequence: Synthetic oligonucleotide
  Sense strand starting at position 3895 of SEQ ID NO: 1884013
aaauaugaguguccuagaa

SEQ ID NO: 2233525 - RNA, 19 nt, Artificial Sequence
  Description of Artificial Sequence: Synthetic oligonucleotide
  Antisense strand to SEQ ID NO: 2233524
uucuaggacacucauauuu

SEQ ID NO: 2233526 - RNA, 19 nt, Artificial Sequence
  Description of Artificial Sequence: Synthetic oligonucleotide
  Sense strand starting at position 3899 of SEQ ID NO: 1884013
augaguguccuagaaguaa

SEQ ID NO: 2233527 - RNA, 19 nt, Artificial Sequence
  Description of Artificial Sequence: Synthetic oligonucleotide
  Antisense strand to SEQ ID NO: 2233526
uuacuucuaggacacucau

SEQ ID NO: 2233528 - RNA, 19 nt, Artificial Sequence
  Description of Artificial Sequence: Synthetic oligonucleotide
  Sense strand starting at position 398 of SEQ ID NO: 1884014
cccaauuggcucuauguga

SEQ ID NO: 2233529 - RNA, 19 nt, Artificial Sequence
  Description of Artificial Sequence: Synthetic oligonucleotide
  Antisense strand to SEQ ID NO: 2233528
ucacauagagccaauuggg

SEQ ID NO: 2233530 - RNA, 19 nt, Artificial Sequence
  Description of Artificial Sequence: Synthetic oligonucleotide
  Sense strand starting at position 402 of SEQ ID NO: 1884014
auuggcucuaugugagaaa

SEQ ID NO: 2233531 - RNA, 19 nt, Artificial Sequence
  Description of Artificial Sequence: Synthetic oligonucleotide
  Antisense strand to SEQ ID NO: 2233530
uuucucacauagagccaau

SEQ ID NO: 2233532 - RNA, 19 nt, Artificial Sequence
  Description of Artificial Sequence: Synthetic oligonucleotide
  Sense strand starting at position 481 of SEQ ID NO: 1884014
guguauaguagguacucaa

SEQ ID NO: 2233533 - RNA, 19 nt, Artificial Sequence
  Description of Artificial Sequence: Synthetic oligonucleotide
  Antisense strand to SEQ ID NO: 2233532
uugaguaccuacuauacac

SEQ ID NO: 2233534 - RNA, 19 nt, Artificial Sequence
  Description of Artificial Sequence: Synthetic oligonucleotide
  Sense strand starting at position 507 of SEQ ID NO: 1884014
uuauuacaucaacgagcaa

SEQ ID NO: 2233535 - RNA, 19 nt, Artificial Sequence
  Description of Artificial Sequence: Synthetic oligonucleotide
  Antisense strand to SEQ ID NO: 2233534
uugcucguugauguaauaa

SEQ ID NO: 2233536 - RNA, 19 nt, Artificial Sequence
  Description of Artificial Sequence: Synthetic oligonucleotide
  Sense strand starting at position 534 of SEQ ID NO: 1884014
aguauaagccaggguuucu

SEQ ID NO: 2233537 - RNA, 19 nt, Artificial Sequence
  Description of Artificial Sequence: Synthetic oligonucleotide
  Antisense strand to SEQ ID NO: 2233536
agaaacccuggcuuauacu

SEQ ID NO: 2233538 - RNA, 19 nt, Artificial Sequence
  Description of Artificial Sequence: Synthetic oligonucleotide
  Sense strand starting at position 653 of SEQ ID NO: 1884014
guuagaugccagcaggacu

SEQ ID NO: 2233539 - RNA, 19 nt, Artificial Sequence
  Description of Artificial Sequence: Synthetic oligonucleotide
  Antisense strand to SEQ ID NO: 2233538
aguccugcuggcaucuaac

SEQ ID NO: 2233540 - RNA, 19 nt, Artificial Sequence
  Description of Artificial Sequence: Synthetic oligonucleotide
  Sense strand starting at position 666 of SEQ ID NO: 1884014
aggacucccuccucgaaau

SEQ ID NO: 2233541 - RNA, 19 nt, Artificial Sequence
  Description of Artificial Sequence: Synthetic oligonucleotide
  Antisense strand to SEQ ID NO: 2233540
auuucgaggagggaguccu

SEQ ID NO: 2233542 - RNA, 19 nt, Artificial Sequence
  Description of Artificial Sequence: Synthetic oligonucleotide
  Sense strand starting at position 667 of SEQ ID NO: 1884014
ggacucccuccucgaaaua

SEQ ID NO: 2233543 - RNA, 19 nt, Artificial Sequence
  Description of Artificial Sequence: Synthetic oligonucleotide
  Antisense strand to SEQ ID NO: 2233542
uauuucgaggagggagucc

SEQ ID NO: 2233544 - RNA, 19 nt, Artificial Sequence
  Description of Artificial Sequence: Synthetic oligonucleotide
  Sense strand starting at position 729 of SEQ ID NO: 1884014
gggaaugacuaauauaaac

SEQ ID NO: 2233545 - RNA, 19 nt, Artificial Sequence
  Description of Artificial Sequence: Synthetic oligonucleotide
  Antisense strand to SEQ ID NO: 2233544
guuuauauuagucauuccc

SEQ ID NO: 2233546 - RNA, 19 nt, Artificial Sequence
  Description of Artificial Sequence: Synthetic oligonucleotide
  Sense strand starting at position 746 of SEQ ID NO: 1884014
accaauauucuuggcuagu

SEQ ID NO: 2233547 - RNA, 19 nt, Artificial Sequence
  Description of Artificial Sequence: Synthetic oligonucleotide
  Antisense strand to SEQ ID NO: 2233546
acuagccaagaauauuggu

SEQ ID NO: 2233548 - RNA, 19 nt, Artificial Sequence
  Description of Artificial Sequence: Synthetic oligonucleotide
  Sense strand starting at position 747 of SEQ ID NO: 1884014
ccaauauucuuggcuagug

SEQ ID NO: 2233549 - RNA, 19 nt, Artificial Sequence
  Description of Artificial Sequence: Synthetic oligonucleotide
  Antisense strand to SEQ ID NO: 2233548
cacuagccaagaauauugg

SEQ ID NO: 2233550 - RNA, 19 nt, Artificial Sequence
  Description of Artificial Sequence: Synthetic oligonucleotide
  Sense strand starting at position 948 of SEQ ID NO: 1884014
ggcgauugugcugacuuua

SEQ ID NO: 2233551 - RNA, 19 nt, Artificial Sequence
  Description of Artificial Sequence: Synthetic oligonucleotide
  Antisense strand to SEQ ID NO: 2233550
uaaagucagcacaaucgcc

SEQ ID NO: 2233552 - RNA, 19 nt, Artificial Sequence
  Description of Artificial Sequence: Synthetic oligonucleotide
  Sense strand starting at position 953 of SEQ ID NO: 1884014
uugugcugacuuuaacaua

SEQ ID NO: 2233553 - RNA, 19 nt, Artificial Sequence
  Description of Artificial Sequence: Synthetic oligonucleotide
  Antisense strand to SEQ ID NO: 2233552
uauguuaaagucagcacaa

SEQ ID NO: 2233554 - RNA, 19 nt, Artificial Sequence
  Description of Artificial Sequence: Synthetic oligonucleotide
  Sense strand starting at position 1226 of SEQ ID NO: 1884014
caagguggucuuggcagau

SEQ ID NO: 2233555 - RNA, 19 nt, Artificial Sequence
  Description of Artificial Sequence: Synthetic oligonucleotide
  Antisense strand to SEQ ID NO: 2233554
aucugccaagaccaccuug

SEQ ID NO: 2233556 - RNA, 19 nt, Artificial Sequence
  Description of Artificial Sequence: Synthetic oligonucleotide
  Sense strand starting at position 1252 of SEQ ID NO: 1884014
gagggauuagaccgugaca

SEQ ID NO: 2233557 - RNA, 19 nt, Artificial Sequence
  Description of Artificial Sequence: Synthetic oligonucleotide
  Antisense strand to SEQ ID NO: 2233556
ugucacggucuaaucccuc

SEQ ID NO: 2233558 - RNA, 19 nt, Artificial Sequence
  Description of Artificial Sequence: Synthetic oligonucleotide
  Sense strand starting at position 1254 of SEQ ID NO: 1884014
gggauuagaccgugacauu

SEQ ID NO: 2233559 - RNA, 19 nt, Artificial Sequence
  Description of Artificial Sequence: Synthetic oligonucleotide
  Antisense strand to SEQ ID NO: 2233558
aaugucacggucuaauccc

SEQ ID NO: 2233560 - RNA, 19 nt, Artificial Sequence
  Description of Artificial Sequence: Synthetic oligonucleotide
  Sense strand starting at position 1327 of SEQ ID NO: 1884014
ugcgaacucugauuuguuu

SEQ ID NO: 2233561 - RNA, 19 nt, Artificial Sequence
  Description of Artificial Sequence: Synthetic oligonucleotide
  Antisense strand to SEQ ID NO: 2233560
aaacaaaucagaguucgca

SEQ ID NO: 2233562 - RNA, 19 nt, Artificial Sequence
  Description of Artificial Sequence: Synthetic oligonucleotide
  Sense strand starting at position 1356 of SEQ ID NO: 1884014
aacugucuccacgaagaca

SEQ ID NO: 2233563 - RNA, 19 nt, Artificial Sequence
  Description of Artificial Sequence: Synthetic oligonucleotide
  Antisense strand to SEQ ID NO: 2233562
ugucuucguggagacaguu

SEQ ID NO: 2233564 - RNA, 19 nt, Artificial Sequence
  Description of Artificial Sequence: Synthetic oligonucleotide
  Sense strand starting at position 1389 of SEQ ID NO: 1884014
gagagauagcacugacuca

SEQ ID NO: 2233565 - RNA, 19 nt, Artificial Sequence
  Description of Artificial Sequence: Synthetic oligonucleotide
  Antisense strand to SEQ ID NO: 2233564
ugagucagugcuaucucuc

SEQ ID NO: 2233566 - RNA, 19 nt, Artificial Sequence
  Description of Artificial Sequence: Synthetic oligonucleotide
  Sense strand starting at position 1456 of SEQ ID NO: 1884014
gcuucucuggaaugagauc

SEQ ID NO: 2233567 - RNA, 19 nt, Artificial Sequence
  Description of Artificial Sequence: Synthetic oligonucleotide
  Antisense strand to SEQ ID NO: 2233566
gaucucauuccagagaagc

SEQ ID NO: 2233568 - RNA, 19 nt, Artificial Sequence
  Description of Artificial Sequence: Synthetic oligonucleotide
  Sense strand starting at position 1480 of SEQ ID NO: 1884014
augaaucuucuugaugcua

SEQ ID NO: 2233569 - RNA, 19 nt, Artificial Sequence
  Description of Artificial Sequence: Synthetic oligonucleotide
  Antisense strand to SEQ ID NO: 2233568
uagcaucaagaagauucau

SEQ ID NO: 2233570 - RNA, 19 nt, Artificial Sequence
  Description of Artificial Sequence: Synthetic oligonucleotide
  Sense strand starting at position 2153 of SEQ ID NO: 1884014
guauguuaacaucauguuu

SEQ ID NO: 2233571 - RNA, 19 nt, Artificial Sequence
  Description of Artificial Sequence: Synthetic oligonucleotide
  Antisense strand to SEQ ID NO: 2233570
aaacaugauguuaacauac

SEQ ID NO: 2233572 - RNA, 19 nt, Artificial Sequence
  Description of Artificial Sequence: Synthetic oligonucleotide
  Sense strand starting at position 2159 of SEQ ID NO: 1884014
uaacaucauguuuguggaa

SEQ ID NO: 2233573 - RNA, 19 nt, Artificial Sequence
  Description of Artificial Sequence: Synthetic oligonucleotide
  Antisense strand to SEQ ID NO: 2233572
uuccacaaacaugauguua

SEQ ID NO: 2233574 - RNA, 19 nt, Artificial Sequence
  Description of Artificial Sequence: Synthetic oligonucleotide
  Sense strand starting at position 2160 of SEQ ID NO: 1884014
aacaucauguuuguggaau

SEQ ID NO: 2233575 - RNA, 19 nt, Artificial Sequence
  Description of Artificial Sequence: Synthetic oligonucleotide
  Antisense strand to SEQ ID NO: 2233574
auuccacaaacaugauguu

SEQ ID NO: 2233576 - RNA, 19 nt, Artificial Sequence
  Description of Artificial Sequence: Synthetic oligonucleotide
  Sense strand starting at position 2369 of SEQ ID NO: 1884014
auuccauuaugguuacuuu

SEQ ID NO: 2233577 - RNA, 19 nt, Artificial Sequence
  Description of Artificial Sequence: Synthetic oligonucleotide
  Antisense strand to SEQ ID NO: 2233576
aaaguaaccauaauggaau

SEQ ID NO: 2233578 - RNA, 19 nt, Artificial Sequence
  Description of Artificial Sequence: Synthetic oligonucleotide
  Sense strand starting at position 2548 of SEQ ID NO: 1884014
uugggaagugucuggauca

SEQ ID NO: 2233579 - RNA, 19 nt, Artificial Sequence
  Description of Artificial Sequence: Synthetic oligonucleotide
  Antisense strand to SEQ ID NO: 2233578
ugauccagacacuucccaa

SEQ ID NO: 2233580 - RNA, 19 nt, Artificial Sequence
  Description of Artificial Sequence: Synthetic oligonucleotide
  Sense strand starting at position 2558 of SEQ ID NO: 1884014
ucuggaucaggaugucaga

SEQ ID NO: 2233581 - RNA, 19 nt, Artificial Sequence
  Description of Artificial Sequence: Synthetic oligonucleotide
  Antisense strand to SEQ ID NO: 2233580
ucugacauccugauccaga

SEQ ID NO: 2233582 - RNA, 19 nt, Artificial Sequence
  Description of Artificial Sequence: Synthetic oligonucleotide
  Sense strand starting at position 2577 of SEQ ID NO: 1884014
agggccaacucagucauaa

SEQ ID NO: 2233583 - RNA, 19 nt, Artificial Sequence
  Description of Artificial Sequence: Synthetic oligonucleotide
  Antisense strand to SEQ ID NO: 2233582
uuaugacugaguuggcccu

SEQ ID NO: 2233584 - RNA, 19 nt, Artificial Sequence
  Description of Artificial Sequence: Synthetic oligonucleotide
  Sense strand starting at position 2789 of SEQ ID NO: 1884014
gggacacagucuuuauaac

SEQ ID NO: 2233585 - RNA, 19 nt, Artificial Sequence
  Description of Artificial Sequence: Synthetic oligonucleotide
  Antisense strand to SEQ ID NO: 2233584
guuauaaagacuguguccc

SEQ ID NO: 2233586 - RNA, 19 nt, Artificial Sequence
  Description of Artificial Sequence: Synthetic oligonucleotide
  Sense strand starting at position 3025 of SEQ ID NO: 1884014
ucaguucuaugucuaauau

SEQ ID NO: 2233587 - RNA, 19 nt, Artificial Sequence
  Description of Artificial Sequence: Synthetic oligonucleotide
  Antisense strand to SEQ ID NO: 2233586
auauuagacauagaacuga

SEQ ID NO: 2233588 - RNA, 19 nt, Artificial Sequence
  Description of Artificial Sequence: Synthetic oligonucleotide
  Sense strand starting at position 3088 of SEQ ID NO: 1884014
guacuugugcuguacacaa

SEQ ID NO: 2233589 - RNA, 19 nt, Artificial Sequence
  Description of Artificial Sequence: Synthetic oligonucleotide
  Antisense strand to SEQ ID NO: 2233588
uuguguacagcacaaguac

SEQ ID NO: 2233590 - RNA, 19 nt, Artificial Sequence
  Description of Artificial Sequence: Synthetic oligonucleotide
  Sense strand starting at position 3090 of SEQ ID NO: 1884014
acuugugcuguacacaaua

SEQ ID NO: 2233591 - RNA, 19 nt, Artificial Sequence
  Description of Artificial Sequence: Synthetic oligonucleotide
  Antisense strand to SEQ ID NO: 2233590
uauuguguacagcacaagu

SEQ ID NO: 2233592 - RNA, 19 nt, Artificial Sequence
  Description of Artificial Sequence: Synthetic oligonucleotide
  Sense strand starting at position 3185 of SEQ ID NO: 1884014
ccaucugugucuuuauauc

SEQ ID NO: 2233593 - RNA, 19 nt, Artificial Sequence
  Description of Artificial Sequence: Synthetic oligonucleotide
  Antisense strand to SEQ ID NO: 2233592
gauauaaagacacagaugg

SEQ ID NO: 2233594 - RNA, 19 nt, Artificial Sequence
  Description of Artificial Sequence: Synthetic oligonucleotide
  Sense strand starting at position 3219 of SEQ ID NO: 1884014
uucugaccaucugugaaag

SEQ ID NO: 2233595 - RNA, 19 nt, Artificial Sequence
  Description of Artificial Sequence: Synthetic oligonucleotide
  Antisense strand to SEQ ID NO: 2233594
cuuucacagauggucagaa

SEQ ID NO: 2233596 - RNA, 19 nt, Artificial Sequence
  Description of Artificial Sequence: Synthetic oligonucleotide
  Sense strand starting at position 3220 of SEQ ID NO: 1884014
ucugaccaucugugaaaga

SEQ ID NO: 2233597 - RNA, 19 nt, Artificial Sequence
  Description of Artificial Sequence: Synthetic oligonucleotide
  Antisense strand to SEQ ID NO: 2233596
ucuuucacagauggucaga

SEQ ID NO: 2233598 - RNA, 19 nt, Artificial Sequence
  Description of Artificial Sequence: Synthetic oligonucleotide
  Sense strand starting at position 3233 of SEQ ID NO: 1884014
gaaagagagguuugcuacu

SEQ ID NO: 2233599 - RNA, 19 nt, Artificial Sequence
  Description of Artificial Sequence: Synthetic oligonucleotide
  Antisense strand to SEQ ID NO: 2233598
aguagcaaaccucucuuuc

SEQ ID NO: 2233600 - RNA, 19 nt, Artificial Sequence
  Description of Artificial Sequence: Synthetic oligonucleotide
  Sense strand starting at position 3243 of SEQ ID NO: 1884014
uuugcuacuuggcugaaga

SEQ ID NO: 2233601 - RNA, 19 nt, Artificial Sequence
  Description of Artificial Sequence: Synthetic oligonucleotide
  Antisense strand to SEQ ID NO: 2233600
ucuucagccaaguagcaaa

SEQ ID NO: 2233602 - RNA, 19 nt, Artificial Sequence
  Description of Artificial Sequence: Synthetic oligonucleotide
  Sense strand starting at position 3244 of SEQ ID NO: 1884014
uugcuacuuggcugaagaa

SEQ ID NO: 2233603 - RNA, 19 nt, Artificial Sequence
  Description of Artificial Sequence: Synthetic oligonucleotide
  Antisense strand to SEQ ID NO: 2233602
uucuucagccaaguagcaa

SEQ ID NO: 2233604 - RNA, 19 nt, Artificial Sequence
  Description of Artificial Sequence: Synthetic oligonucleotide
  Sense strand starting at position 3245 of SEQ ID NO: 1884014
ugcuacuuggcugaagaau

SEQ ID NO: 2233605 - RNA, 19 nt, Artificial Sequence
  Description of Artificial Sequence: Synthetic oligonucleotide
  Antisense strand to SEQ ID NO: 2233604
auucuucagccaaguagca

SEQ ID NO: 2233606 - RNA, 19 nt, Artificial Sequence
  Description of Artificial Sequence: Synthetic oligonucleotide
  Sense strand starting at position 3602 of SEQ ID NO: 1884014
ugaauuauggcuugaggau

SEQ ID NO: 2233607 - RNA, 19 nt, Artificial Sequence
  Description of Artificial Sequence: Synthetic oligonucleotide
  Antisense strand to SEQ ID NO: 2233606
auccucaagccauaauuca

SEQ ID NO: 2233608 - RNA, 19 nt, Artificial Sequence
  Description of Artificial Sequence: Synthetic oligonucleotide
  Sense strand starting at position 98 of SEQ ID NO: 1884015
guauaagccuaauaauuug

SEQ ID NO: 2233609 - RNA, 19 nt, Artificial Sequence
  Description of Artificial Sequence: Synthetic oligonucleotide
  Antisense strand to SEQ ID NO: 2233608
caaauuauuaggcuuauac

SEQ ID NO: 2233610 - RNA, 19 nt, Artificial Sequence
  Description of Artificial Sequence: Synthetic oligonucleotide
  Sense strand starting at position 147 of SEQ ID NO: 1884015
gugguacauggcuguaaug

SEQ ID NO: 2233611 - RNA, 19 nt, Artificial Sequence
  Description of Artificial Sequence: Synthetic oligonucleotide
  Antisense strand to SEQ ID NO: 2233610
cauuacagccauguaccac

SEQ ID NO: 2233612 - RNA, 19 nt, Artificial Sequence
  Description of Artificial Sequence: Synthetic oligonucleotide
  Sense strand starting at position 349 of SEQ ID NO: 1884015
gggagaaauugacaaacua

SEQ ID NO: 2233613 - RNA, 19 nt, Artificial Sequence
  Description of Artificial Sequence: Synthetic oligonucleotide
  Antisense strand to SEQ ID NO: 2233612
uaguuugucaauuucuccc

SEQ ID NO: 2233614 - RNA, 19 nt, Artificial Sequence
  Description of Artificial Sequence: Synthetic oligonucleotide
  Sense strand starting at position 625 of SEQ ID NO: 1884015
gcauuaaaguuagagauca

SEQ ID NO: 2233615 - RNA, 19 nt, Artificial Sequence
  Description of Artificial Sequence: Synthetic oligonucleotide
  Antisense strand to SEQ ID NO: 2233614
ugaucucuaacuuuaaugc

SEQ ID NO: 2233616 - RNA, 19 nt, Artificial Sequence
  Description of Artificial Sequence: Synthetic oligonucleotide
  Sense strand starting at position 866 of SEQ ID NO: 1884015
acgucuaaauaauccauga

SEQ ID NO: 2233617 - RNA, 19 nt, Artificial Sequence
  Description of Artificial Sequence: Synthetic oligonucleotide
  Antisense strand to SEQ ID NO: 2233616
ucauggauuauuuagacgu

SEQ ID NO: 2233618 - RNA, 19 nt, Artificial Sequence
  Description of Artificial Sequence: Synthetic oligonucleotide
  Sense strand starting at position 1470 of SEQ ID NO: 1884015
cuucccuuaccuuguauga

SEQ ID NO: 2233619 - RNA, 19 nt, Artificial Sequence
  Description of Artificial Sequence: Synthetic oligonucleotide
  Antisense strand to SEQ ID NO: 2233618
ucauacaagguaagggaag

SEQ ID NO: 2233620 - RNA, 19 nt, Artificial Sequence
  Description of Artificial Sequence: Synthetic oligonucleotide
  Sense strand starting at position 2290 of SEQ ID NO: 1884015
uggagacuuuggccugagu

SEQ ID NO: 2233621 - RNA, 19 nt, Artificial Sequence
  Description of Artificial Sequence: Synthetic oligonucleotide
  Antisense strand to SEQ ID NO: 2233620
acucaggccaaagucucca

SEQ ID NO: 2233622 - RNA, 19 nt, Artificial Sequence
  Description of Artificial Sequence: Synthetic oligonucleotide
  Sense strand starting at position 2292 of SEQ ID NO: 1884015
gagacuuuggccugaguuu

SEQ ID NO: 2233623 - RNA, 19 nt, Artificial Sequence
  Description of Artificial Sequence: Synthetic oligonucleotide
  Antisense strand to SEQ ID NO: 2233622
aaacucaggccaaagucuc

SEQ ID NO: 2233624 - RNA, 19 nt, Artificial Sequence
  Description of Artificial Sequence: Synthetic oligonucleotide
  Sense strand starting at position 2882 of SEQ ID NO: 1884015
accagcagcuuguuuguaa

SEQ ID NO: 2233625 - RNA, 19 nt, Artificial Sequence
  Description of Artificial Sequence: Synthetic oligonucleotide
  Antisense strand to SEQ ID NO: 2233624
uuacaaacaagcugcuggu

SEQ ID NO: 2233626 - RNA, 19 nt, Artificial Sequence
  Description of Artificial Sequence: Synthetic oligonucleotide
  Sense strand starting at position 2889 of SEQ ID NO: 1884015
gcuuguuuguaacagccaa

SEQ ID NO: 2233627 - RNA, 19 nt, Artificial Sequence
  Description of Artificial Sequence: Synthetic oligonucleotide
  Antisense strand to SEQ ID NO: 2233626
uuggcuguuacaaacaagc

SEQ ID NO: 2233628 - RNA, 19 nt, Artificial Sequence
  Description of Artificial Sequence: Synthetic oligonucleotide
  Sense strand starting at position 2933 of SEQ ID NO: 1884015
ucaguaaggagcuagguaa

SEQ ID NO: 2233629 - RNA, 19 nt, Artificial Sequence
  Description of Artificial Sequence: Synthetic oligonucleotide
  Antisense strand to SEQ ID NO: 2233628
uuaccuagcuccuuacuga

SEQ ID NO: 2233630 - RNA, 19 nt, Artificial Sequence
  Description of Artificial Sequence: Synthetic oligonucleotide
  Sense strand starting at position 2940 of SEQ ID NO: 1884015
ggagcuagguaaugaagaa

SEQ ID NO: 2233631 - RNA, 19 nt, Artificial Sequence
  Description of Artificial Sequence: Synthetic oligonucleotide
  Antisense strand to SEQ ID NO: 2233630
uucuucauuaccuagcucc

SEQ ID NO: 2233632 - RNA, 19 nt, Artificial Sequence
  Description of Artificial Sequence: Synthetic oligonucleotide
  Sense strand starting at position 3017 of SEQ ID NO: 1884015
ggagcacuuguauggaaag

SEQ ID NO: 2233633 - RNA, 19 nt, Artificial Sequence
  Description of Artificial Sequence: Synthetic oligonucleotide
  Antisense strand to SEQ ID NO: 2233632
cuuuccauacaagugcucc

SEQ ID NO: 2233634 - RNA, 19 nt, Artificial Sequence
  Description of Artificial Sequence: Synthetic oligonucleotide
  Sense strand starting at position 3018 of SEQ ID NO: 1884015
gagcacuuguauggaaaga

SEQ ID NO: 2233635 - RNA, 19 nt, Artificial Sequence
  Description of Artificial Sequence: Synthetic oligonucleotide
  Antisense strand to SEQ ID NO: 2233634
ucuuuccauacaagugcuc

SEQ ID NO: 2233636 - RNA, 19 nt, Artificial Sequence
  Description of Artificial Sequence: Synthetic oligonucleotide
  Sense strand starting at position 3100 of SEQ ID NO: 1884015
acaauacguuuauguaaac

SEQ ID NO: 2233637 - RNA, 19 nt, Artificial Sequence
  Description of Artificial Sequence: Synthetic oligonucleotide
  Antisense strand to SEQ ID NO: 2233636
guuuacauaaacguauugu

SEQ ID NO: 2233638 - RNA, 19 nt, Artificial Sequence
  Description of Artificial Sequence: Synthetic oligonucleotide
  Sense strand starting at position 3387 of SEQ ID NO: 1884015
cauauauuaccugggugac

SEQ ID NO: 2233639 - RNA, 19 nt, Artificial Sequence
  Description of Artificial Sequence: Synthetic oligonucleotide
  Antisense strand to SEQ ID NO: 2233638
gucacccagguaauauaug

SEQ ID NO: 2233640 - RNA, 19 nt, Artificial Sequence
  Description of Artificial Sequence: Synthetic oligonucleotide
  Sense strand starting at position 3456 of SEQ ID NO: 1884015
gugugaauacagggaauuc

SEQ ID NO: 2233641 - RNA, 19 nt, Artificial Sequence
  Description of Artificial Sequence: Synthetic oligonucleotide
  Antisense strand to SEQ ID NO: 2233640
gaauucccuguauucacac

SEQ ID NO: 2233642 - RNA, 19 nt, Artificial Sequence
  Description of Artificial Sequence: Synthetic oligonucleotide
  Sense strand starting at position 3466 of SEQ ID NO: 1884015
agggaauucucauaaaccc

SEQ ID NO: 2233643 - RNA, 19 nt, Artificial Sequence
  Description of Artificial Sequence: Synthetic oligonucleotide
  Antisense strand to SEQ ID NO: 2233642
ggguuuaugagaauucccu

SEQ ID NO: 2233644 - RNA, 19 nt, Artificial Sequence
  Description of Artificial Sequence: Synthetic oligonucleotide
  Sense strand starting at position 3518 of SEQ ID NO: 1884015
uuuauaucuccguggguuc

SEQ ID NO: 2233645 - RNA, 19 nt, Artificial Sequence
  Description of Artificial Sequence: Synthetic oligonucleotide
  Antisense strand to SEQ ID NO: 2233644
gaacccacggagauauaaa

SEQ ID NO: 2233646 - RNA, 19 nt, Artificial Sequence
  Description of Artificial Sequence: Synthetic oligonucleotide
  Sense strand starting at position 3546 of SEQ ID NO: 1884015
gugacaguguccuagacuu

SEQ ID NO: 2233647 - RNA, 19 nt, Artificial Sequence
  Description of Artificial Sequence: Synthetic oligonucleotide
  Antisense strand to SEQ ID NO: 2233646
aagucuaggacacugucac

SEQ ID NO: 2233648 - RNA, 19 nt, Artificial Sequence
  Description of Artificial Sequence: Synthetic oligonucleotide
  Sense strand starting at position 3548 of SEQ ID NO: 1884015
gacaguguccuagacuuuc

SEQ ID NO: 2233649 - RNA, 19 nt, Artificial Sequence
  Description of Artificial Sequence: Synthetic oligonucleotide
  Antisense strand to SEQ ID NO: 2233648
gaaagucuaggacacuguc

SEQ ID NO: 2233650 - RNA, 19 nt, Artificial Sequence
  Description of Artificial Sequence: Synthetic oligonucleotide
  Sense strand starting at position 3597 of SEQ ID NO: 1884015
gaguacuggucauguauau

SEQ ID NO: 2233651 - RNA, 19 nt, Artificial Sequence
  Description of Artificial Sequence: Synthetic oligonucleotide
  Antisense strand to SEQ ID NO: 2233650
auauacaugaccaguacuc

SEQ ID NO: 2233652 - RNA, 19 nt, Artificial Sequence
  Description of Artificial Sequence: Synthetic oligonucleotide
  Sense strand starting at position 3626 of SEQ ID NO: 1884015
ucaauugauuugugauguu

SEQ ID NO: 2233653 - RNA, 19 nt, Artificial Sequence
  Description of Artificial Sequence: Synthetic oligonucleotide
  Antisense strand to SEQ ID NO: 2233652
aacaucacaaaucaauuga

SEQ ID NO: 2233654 - RNA, 19 nt, Artificial Sequence
  Description of Artificial Sequence: Synthetic oligonucleotide
  Sense strand starting at position 3666 of SEQ ID NO: 1884015
uuagguguucuugggagga

SEQ ID NO: 2233655 - RNA, 19 nt, Artificial Sequence
  Description of Artificial Sequence: Synthetic oligonucleotide
  Antisense strand to SEQ ID NO: 2233654
uccucccaagaacaccuaa

SEQ ID NO: 2233656 - RNA, 19 nt, Artificial Sequence
  Description of Artificial Sequence: Synthetic oligonucleotide
  Sense strand starting at position 3668 of SEQ ID NO: 1884015
agguguucuugggaggaag

SEQ ID NO: 2233657 - RNA, 19 nt, Artificial Sequence
  Description of Artificial Sequence: Synthetic oligonucleotide
  Antisense strand to SEQ ID NO: 2233656
cuuccucccaagaacaccu

SEQ ID NO: 2233658 - RNA, 19 nt, Artificial Sequence
  Description of Artificial Sequence: Synthetic oligonucleotide
  Sense strand starting at position 3699 of SEQ ID NO: 1884015
gcaugcaaucaguaugauu

SEQ ID NO: 2233659 - RNA, 19 nt, Artificial Sequence
  Description of Artificial Sequence: Synthetic oligonucleotide
  Antisense strand to SEQ ID NO: 2233658
aaucauacugauugcaugc

SEQ ID NO: 2233660 - RNA, 19 nt, Artificial Sequence
  Description of Artificial Sequence: Synthetic oligonucleotide
  Sense strand starting at position 3747 of SEQ ID NO: 1884015
ggugguuugucagguuucu

SEQ ID NO: 2233661 - RNA, 19 nt, Artificial Sequence
  Description of Artificial Sequence: Synthetic oligonucleotide
  Antisense strand to SEQ ID NO: 2233660
agaaaccugacaaaccacc

SEQ ID NO: 2233662 - RNA, 19 nt, Artificial Sequence
  Description of Artificial Sequence: Synthetic oligonucleotide
  Sense strand starting at position 3757 of SEQ ID NO: 1884015
cagguuucuccacgauagu

SEQ ID NO: 2233663 - RNA, 19 nt, Artificial Sequence
  Description of Artificial Sequence: Synthetic oligonucleotide
  Antisense strand to SEQ ID NO: 2233662
acuaucguggagaaaccug

SEQ ID NO: 2233664 - RNA, 19 nt, Artificial Sequence
  Description of Artificial Sequence: Synthetic oligonucleotide
  Sense strand starting at position 3758 of SEQ ID NO: 1884015
agguuucuccacgauaguc

SEQ ID NO: 2233665 - RNA, 19 nt, Artificial Sequence
  Description of Artificial Sequence: Synthetic oligonucleotide
  Antisense strand to SEQ ID NO: 2233664
gacuaucguggagaaaccu

SEQ ID NO: 2233666 - RNA, 19 nt, Artificial Sequence
  Description of Artificial Sequence: Synthetic oligonucleotide
  Sense strand starting at position 3829 of SEQ ID NO: 1884015
caccgaguguugcuauaaa

SEQ ID NO: 2233667 - RNA, 19 nt, Artificial Sequence
  Description of Artificial Sequence: Synthetic oligonucleotide
  Antisense strand to SEQ ID NO: 2233666
uuuauagcaacacucggug

SEQ ID NO: 2233668 - RNA, 19 nt, Artificial Sequence
  Description of Artificial Sequence: Synthetic oligonucleotide
  Sense strand starting at position 3847 of SEQ ID NO: 1884015
aggaaaugcguuugaccuu

SEQ ID NO: 2233669 - RNA, 19 nt, Artificial Sequence
  Description of Artificial Sequence: Synthetic oligonucleotide
  Antisense strand to SEQ ID NO: 2233668
aaggucaaacgcauuuccu

SEQ ID NO: 2233670 - RNA, 19 nt, Artificial Sequence
  Description of Artificial Sequence: Synthetic oligonucleotide
  Sense strand starting at position 3848 of SEQ ID NO: 1884015
ggaaaugcguuugaccuuu

SEQ ID NO: 2233671 - RNA, 19 nt, Artificial Sequence
  Description of Artificial Sequence: Synthetic oligonucleotide
  Antisense strand to SEQ ID NO: 2233670
aaaggucaaacgcauuucc

SEQ ID NO: 2233672 - RNA, 19 nt, Artificial Sequence
  Description of Artificial Sequence: Synthetic oligonucleotide
  Sense strand starting at position 2066 of SEQ ID NO: 1884016
acacuagcacuuugucaga

SEQ ID NO: 2233673 - RNA, 19 nt, Artificial Sequence
  Description of Artificial Sequence: Synthetic oligonucleotide
  Antisense strand to SEQ ID NO: 2233672
ucugacaaagugcuagugu

SEQ ID NO: 2233674 - RNA, 19 nt, Artificial Sequence
  Description of Artificial Sequence: Synthetic oligonucleotide
  Sense strand starting at position 2068 of SEQ ID NO: 1884016
acuagcacuuugucagaca

SEQ ID NO: 2233675 - RNA, 19 nt, Artificial Sequence
  Description of Artificial Sequence: Synthetic oligonucleotide
  Antisense strand to SEQ ID NO: 2233674
ugucugacaaagugcuagu

SEQ ID NO: 2233676 - RNA, 19 nt, Artificial Sequence
  Description of Artificial Sequence: Synthetic oligonucleotide
  Sense strand starting at position 2250 of SEQ ID NO: 1884016
gcccucuauucuguagauu

SEQ ID NO: 2233677 - RNA, 19 nt, Artificial Sequence
  Description of Artificial Sequence: Synthetic oligonucleotide
  Antisense strand to SEQ ID NO: 2233676
aaucuacagaauagagggc

SEQ ID NO: 2233678 - RNA, 19 nt, Artificial Sequence
  Description of Artificial Sequence: Synthetic oligonucleotide
  Sense strand starting at position 2348 of SEQ ID NO: 1884016
guauaagauguaggacaua

SEQ ID NO: 2233679 - RNA, 19 nt, Artificial Sequence
  Description of Artificial Sequence: Synthetic oligonucleotide
  Antisense strand to SEQ ID NO: 2233678
uauguccuacaucuuauac

SEQ ID NO: 2233680 - RNA, 19 nt, Artificial Sequence
  Description of Artificial Sequence: Synthetic oligonucleotide
  Sense strand starting at position 2361 of SEQ ID NO: 1884016
gacauaggucaagguuuau

SEQ ID NO: 2233681 - RNA, 19 nt, Artificial Sequence
  Description of Artificial Sequence: Synthetic oligonucleotide
  Antisense strand to SEQ ID NO: 2233680
auaaaccuugaccuauguc

SEQ ID NO: 2233682 - RNA, 19 nt, Artificial Sequence
  Description of Artificial Sequence: Synthetic oligonucleotide
  Sense strand starting at position 2413 of SEQ ID NO: 1884016
auuuccauuuguuggaaag

SEQ ID NO: 2233683 - RNA, 19 nt, Artificial Sequence
  Description of Artificial Sequence: Synthetic oligonucleotide
  Antisense strand to SEQ ID NO: 2233682
cuuuccaacaaauggaaau

SEQ ID NO: 2233684 - RNA, 19 nt, Artificial Sequence
  Description of Artificial Sequence: Synthetic oligonucleotide
  Sense strand starting at position 2415 of SEQ ID NO: 1884016
uuccauuuguuggaaagau

SEQ ID NO: 2233685 - RNA, 19 nt, Artificial Sequence
  Description of Artificial Sequence: Synthetic oligonucleotide
  Antisense strand to SEQ ID NO: 2233684
aucuuuccaacaaauggaa

SEQ ID NO: 2233686 - RNA, 19 nt, Artificial Sequence
  Description of Artificial Sequence: Synthetic oligonucleotide
  Sense strand starting at position 2522 of SEQ ID NO: 1884016
caccgaccugugugacuau

SEQ ID NO: 2233687 - RNA, 19 nt, Artificial Sequence
  Description of Artificial Sequence: Synthetic oligonucleotide
  Antisense strand to SEQ ID NO: 2233686
auagucacacaggucggug

SEQ ID NO: 2233688 - RNA, 19 nt, Artificial Sequence
  Description of Artificial Sequence: Synthetic oligonucleotide
  Sense strand starting at position 2570 of SEQ ID NO: 1884016
cguagcucugugucuuaaa

SEQ ID NO: 2233689 - RNA, 19 nt, Artificial Sequence
  Description of Artificial Sequence: Synthetic oligonucleotide
  Antisense strand to SEQ ID NO: 2233688
uuuaagacacagagcuacg

SEQ ID NO: 2233690 - RNA, 19 nt, Artificial Sequence
  Description of Artificial Sequence: Synthetic oligonucleotide
  Sense strand starting at position 2759 of SEQ ID NO: 1884016
auuuaacaguguugaauag

SEQ ID NO: 2233691 - RNA, 19 nt, Artificial Sequence
  Description of Artificial Sequence: Synthetic oligonucleotide
  Antisense strand to SEQ ID NO: 2233690
cuauucaacacuguuaaau

SEQ ID NO: 2233692 - RNA, 19 nt, Artificial Sequence
  Description of Artificial Sequence: Synthetic oligonucleotide
  Sense strand starting at position 2763 of SEQ ID NO: 1884016
aacaguguugaauagucua

SEQ ID NO: 2233693 - RNA, 19 nt, Artificial Sequence
  Description of Artificial Sequence: Synthetic oligonucleotide
  Antisense strand to SEQ ID NO: 2233692
uagacuauucaacacuguu

SEQ ID NO: 2233694 - RNA, 19 nt, Artificial Sequence
  Description of Artificial Sequence: Synthetic oligonucleotide
  Sense strand starting at position 2766 of SEQ ID NO: 1884016
aguguugaauagucuaguu

SEQ ID NO: 2233695 - RNA, 19 nt, Artificial Sequence
  Description of Artificial Sequence: Synthetic oligonucleotide
  Antisense strand to SEQ ID NO: 2233694
aacuagacuauucaacacu

SEQ ID NO: 2233696 - RNA, 19 nt, Artificial Sequence
  Description of Artificial Sequence: Synthetic oligonucleotide
  Sense strand starting at position 2809 of SEQ ID NO: 1884016
guauucggaucuucuuuga

SEQ ID NO: 2233697 - RNA, 19 nt, Artificial Sequence
  Description of Artificial Sequence: Synthetic oligonucleotide
  Antisense strand to SEQ ID NO: 2233696
ucaaagaagauccgaauac

SEQ ID NO: 2233698 - RNA, 19 nt, Artificial Sequence
  Description of Artificial Sequence: Synthetic oligonucleotide
  Sense strand starting at position 2886 of SEQ ID NO: 1884016
auuugcaucugaguaguua

SEQ ID NO: 2233699 - RNA, 19 nt, Artificial Sequence
  Description of Artificial Sequence: Synthetic oligonucleotide
  Antisense strand to SEQ ID NO: 2233698
uaacuacucagaugcaaau

SEQ ID NO: 2233700 - RNA, 19 nt, Artificial Sequence
  Description of Artificial Sequence: Synthetic oligonucleotide
  Sense strand starting at position 2887 of SEQ ID NO: 1884016
uuugcaucugaguaguuaa

SEQ ID NO: 2233701 - RNA, 19 nt, Artificial Sequence
  Description of Artificial Sequence: Synthetic oligonucleotide
  Antisense strand to SEQ ID NO: 2233700
uuaacuacucagaugcaaa

SEQ ID NO: 2233702 - RNA, 19 nt, Artificial Sequence
  Description of Artificial Sequence: Synthetic oligonucleotide
  Sense strand starting at position 2890 of SEQ ID NO: 1884016
gcaucugaguaguuaauuu

SEQ ID NO: 2233703 - RNA, 19 nt, Artificial Sequence
  Description of Artificial Sequence: Synthetic oligonucleotide
  Antisense strand to SEQ ID NO: 2233702
aaauuaacuacucagaugc

SEQ ID NO: 2233704 - RNA, 19 nt, Artificial Sequence
  Description of Artificial Sequence: Synthetic oligonucleotide
  Sense strand starting at position 2914 of SEQ ID NO: 1884016
gagcaauuauaagcgguau

SEQ ID NO: 2233705 - RNA, 19 nt, Artificial Sequence
  Description of Artificial Sequence: Synthetic oligonucleotide
  Antisense strand to SEQ ID NO: 2233704
auaccgcuuauaauugcuc

SEQ ID NO: 2233706 - RNA, 19 nt, Artificial Sequence
  Description of Artificial Sequence: Synthetic oligonucleotide
  Sense strand starting at position 2918 of SEQ ID NO: 1884016
aauuauaagcgguauugua

SEQ ID NO: 2233707 - RNA, 19 nt, Artificial Sequence
  Description of Artificial Sequence: Synthetic oligonucleotide
  Antisense strand to SEQ ID NO: 2233706
uacaauaccgcuuauaauu

SEQ ID NO: 2233708 - RNA, 19 nt, Artificial Sequence
  Description of Artificial Sequence: Synthetic oligonucleotide
  Sense strand starting at position 3008 of SEQ ID NO: 1884016
ugcauugauggugacuuaa

SEQ ID NO: 2233709 - RNA, 19 nt, Artificial Sequence
  Description of Artificial Sequence: Synthetic oligonucleotide
  Antisense strand to SEQ ID NO: 2233708
uuaagucaccaucaaugca

SEQ ID NO: 2233710 - RNA, 19 nt, Artificial Sequence
  Description of Artificial Sequence: Synthetic oligonucleotide
  Sense strand starting at position 3010 of SEQ ID NO: 1884016
cauugauggugacuuaauu

SEQ ID NO: 2233711 - RNA, 19 nt, Artificial Sequence
  Description of Artificial Sequence: Synthetic oligonucleotide
  Antisense strand to SEQ ID NO: 2233710
aauuaagucaccaucaaug

SEQ ID NO: 2233712 - RNA, 19 nt, Artificial Sequence
  Description of Artificial Sequence: Synthetic oligonucleotide
  Sense strand starting at position 3020 of SEQ ID NO: 1884016
gacuuaauucugggagcuu

SEQ ID NO: 2233713 - RNA, 19 nt, Artificial Sequence
  Description of Artificial Sequence: Synthetic oligonucleotide
  Antisense strand to SEQ ID NO: 2233712
aagcucccagaauuaaguc

SEQ ID NO: 2233714 - RNA, 19 nt, Artificial Sequence
  Description of Artificial Sequence: Synthetic oligonucleotide
  Sense strand starting at position 3032 of SEQ ID NO: 1884016
ggagcuuauuuguaagaug

SEQ ID NO: 2233715 - RNA, 19 nt, Artificial Sequence
  Description of Artificial Sequence: Synthetic oligonucleotide
  Antisense strand to SEQ ID NO: 2233714
caucuuacaaauaagcucc

SEQ ID NO: 2233716 - RNA, 19 nt, Artificial Sequence
  Description of Artificial Sequence: Synthetic oligonucleotide
  Sense strand starting at position 3040 of SEQ ID NO: 1884016
uuuguaagaugcuuuggga

SEQ ID NO: 2233717 - RNA, 19 nt, Artificial Sequence
  Description of Artificial Sequence: Synthetic oligonucleotide
  Antisense strand to SEQ ID NO: 2233716
ucccaaagcaucuuacaaa

SEQ ID NO: 2233718 - RNA, 19 nt, Artificial Sequence
  Description of Artificial Sequence: Synthetic oligonucleotide
  Sense strand starting at position 3075 of SEQ ID NO: 1884016
ccaugucaucugcaaagug

SEQ ID NO: 2233719 - RNA, 19 nt, Artificial Sequence
  Description of Artificial Sequence: Synthetic oligonucleotide
  Antisense strand to SEQ ID NO: 2233718
cacuuugcagaugacaugg

SEQ ID NO: 2233720 - RNA, 19 nt, Artificial Sequence
  Description of Artificial Sequence: Synthetic oligonucleotide
  Sense strand starting at position 3169 of SEQ ID NO: 1884016
auucuagcacuauguugaa

SEQ ID NO: 2233721 - RNA, 19 nt, Artificial Sequence
  Description of Artificial Sequence: Synthetic oligonucleotide
  Antisense strand to SEQ ID NO: 2233720
uucaacauagugcuagaau

SEQ ID NO: 2233722 - RNA, 19 nt, Artificial Sequence
  Description of Artificial Sequence: Synthetic oligonucleotide
  Sense strand starting at position 3258 of SEQ ID NO: 1884016
uaaguauguuagcuauaag

SEQ ID NO: 2233723 - RNA, 19 nt, Artificial Sequence
  Description of Artificial Sequence: Synthetic oligonucleotide
  Antisense strand to SEQ ID NO: 2233722
cuuauagcuaacauacuua

SEQ ID NO: 2233724 - RNA, 19 nt, Artificial Sequence
  Description of Artificial Sequence: Synthetic oligonucleotide
  Sense strand starting at position 3261 of SEQ ID NO: 1884016
guauguuagcuauaaguuu

SEQ ID NO: 2233725 - RNA, 19 nt, Artificial Sequence
  Description of Artificial Sequence: Synthetic oligonucleotide
  Antisense strand to SEQ ID NO: 2233724
aaacuuauagcuaacauac

SEQ ID NO: 2233726 - RNA, 19 nt, Artificial Sequence
  Description of Artificial Sequence: Synthetic oligonucleotide
  Sense strand starting at position 3418 of SEQ ID NO: 1884016
auguuaguaugaucgguua

SEQ ID NO: 2233727 - RNA, 19 nt, Artificial Sequence
  Description of Artificial Sequence: Synthetic oligonucleotide
  Antisense strand to SEQ ID NO: 2233726
uaaccgaucauacuaacau

SEQ ID NO: 2233728 - RNA, 19 nt, Artificial Sequence
  Description of Artificial Sequence: Synthetic oligonucleotide
  Sense strand starting at position 3420 of SEQ ID NO: 1884016
guuaguaugaucgguuaua

SEQ ID NO: 2233729 - RNA, 19 nt, Artificial Sequence
  Description of Artificial Sequence: Synthetic oligonucleotide
  Antisense strand to SEQ ID NO: 2233728
uauaaccgaucauacuaac

SEQ ID NO: 2233730 - RNA, 19 nt, Artificial Sequence
  Description of Artificial Sequence: Synthetic oligonucleotide
  Sense strand starting at position 3421 of SEQ ID NO: 1884016
uuaguaugaucgguuauaa

SEQ ID NO: 2233731 - RNA, 19 nt, Artificial Sequence
  Description of Artificial Sequence: Synthetic oligonucleotide
  Antisense strand to SEQ ID NO: 2233730
uuauaaccgaucauacuaa

SEQ ID NO: 2233732 - RNA, 19 nt, Artificial Sequence
  Description of Artificial Sequence: Synthetic oligonucleotide
  Sense strand starting at position 3467 of SEQ ID NO: 1884016
ccauguaucccugggaaua

SEQ ID NO: 2233733 - RNA, 19 nt, Artificial Sequence
  Description of Artificial Sequence: Synthetic oligonucleotide
  Antisense strand to SEQ ID NO: 2233732
uauucccagggauacaugg

SEQ ID NO: 2233734 - RNA, 19 nt, Artificial Sequence
  Description of Artificial Sequence: Synthetic oligonucleotide
  Sense strand starting at position 3468 of SEQ ID NO: 1884016
cauguaucccugggaauaa

SEQ ID NO: 2233735 - RNA, 19 nt, Artificial Sequence
  Description of Artificial Sequence: Synthetic oligonucleotide
  Antisense strand to SEQ ID NO: 2233734
uuauucccagggauacaug

SEQ ID NO: 2233736 - RNA, 19 nt, Artificial Sequence
  Description of Artificial Sequence: Synthetic oligonucleotide
  Sense strand starting at position 3479 of SEQ ID NO: 1884016
gggaauaaacccuguuuga

SEQ ID NO: 2233737 - RNA, 19 nt, Artificial Sequence
  Description of Artificial Sequence: Synthetic oligonucleotide
  Antisense strand to SEQ ID NO: 2233736
ucaaacaggguuuauuccc

SEQ ID NO: 2233738 - RNA, 19 nt, Artificial Sequence
  Description of Artificial Sequence: Synthetic oligonucleotide
  Sense strand starting at position 3490 of SEQ ID NO: 1884016
cuguuugaucaugguauau

SEQ ID NO: 2233739 - RNA, 19 nt, Artificial Sequence
  Description of Artificial Sequence: Synthetic oligonucleotide
  Antisense strand to SEQ ID NO: 2233738
auauaccaugaucaaacag

SEQ ID NO: 2233740 - RNA, 19 nt, Artificial Sequence
  Description of Artificial Sequence: Synthetic oligonucleotide
  Sense strand starting at position 3519 of SEQ ID NO: 1884016
guagguuguuaauuucuau

SEQ ID NO: 2233741 - RNA, 19 nt, Artificial Sequence
  Description of Artificial Sequence: Synthetic oligonucleotide
  Antisense strand to SEQ ID NO: 2233740
auagaaauuaacaaccuac

SEQ ID NO: 2233742 - RNA, 19 nt, Artificial Sequence
  Description of Artificial Sequence: Synthetic oligonucleotide
  Sense strand starting at position 3539 of SEQ ID NO: 1884016
ugauaauauucuguuaagg

SEQ ID NO: 2233743 - RNA, 19 nt, Artificial Sequence
  Description of Artificial Sequence: Synthetic oligonucleotide
  Antisense strand to SEQ ID NO: 2233742
ccuuaacagaauauuauca

SEQ ID NO: 2233744 - RNA, 19 nt, Artificial Sequence
  Description of Artificial Sequence: Synthetic oligonucleotide
  Sense strand starting at position 3608 of SEQ ID NO: 1884016
ugucauaucugguuugggu

SEQ ID NO: 2233745 - RNA, 19 nt, Artificial Sequence
  Description of Artificial Sequence: Synthetic oligonucleotide
  Antisense strand to SEQ ID NO: 2233744
acccaaaccagauaugaca

SEQ ID NO: 2233746 - RNA, 19 nt, Artificial Sequence
  Description of Artificial Sequence: Synthetic oligonucleotide
  Sense strand starting at position 3610 of SEQ ID NO: 1884016
ucauaucugguuuggguau

SEQ ID NO: 2233747 - RNA, 19 nt, Artificial Sequence
  Description of Artificial Sequence: Synthetic oligonucleotide
  Antisense strand to SEQ ID NO: 2233746
auacccaaaccagauauga

SEQ ID NO: 2233748 - RNA, 19 nt, Artificial Sequence
  Description of Artificial Sequence: Synthetic oligonucleotide
  Sense strand starting at position 3705 of SEQ ID NO: 1884016
auggguauuuguucuucuu

SEQ ID NO: 2233749 - RNA, 19 nt, Artificial Sequence
  Description of Artificial Sequence: Synthetic oligonucleotide
  Antisense strand to SEQ ID NO: 2233748
aagaagaacaaauacccau

SEQ ID NO: 2233750 - RNA, 19 nt, Artificial Sequence
  Description of Artificial Sequence: Synthetic oligonucleotide
  Sense strand starting at position 3707 of SEQ ID NO: 1884016
ggguauuuguucuucuuua

SEQ ID NO: 2233751 - RNA, 19 nt, Artificial Sequence
  Description of Artificial Sequence: Synthetic oligonucleotide
  Antisense strand to SEQ ID NO: 2233750
uaaagaagaacaaauaccc

SEQ ID NO: 2233752 - RNA, 19 nt, Artificial Sequence
  Description of Artificial Sequence: Synthetic oligonucleotide
  Sense strand starting at position 368 of SEQ ID NO: 1884017
cuaaccauauucggaagaa

SEQ ID NO: 2233753 - RNA, 19 nt, Artificial Sequence
  Description of Artificial Sequence: Synthetic oligonucleotide
  Antisense strand to SEQ ID NO: 2233752
uucuuccgaauaugguuag

SEQ ID NO: 2233754 - RNA, 19 nt, Artificial Sequence
  Description of Artificial Sequence: Synthetic oligonucleotide
  Sense strand starting at position 2142 of SEQ ID NO: 1884017
augguauaauuugaacgau

SEQ ID NO: 2233755 - RNA, 19 nt, Artificial Sequence
  Description of Artificial Sequence: Synthetic oligonucleotide
  Antisense strand to SEQ ID NO: 2233754
aucguucaaauuauaccau

SEQ ID NO: 2233756 - RNA, 19 nt, Artificial Sequence
  Description of Artificial Sequence: Synthetic oligonucleotide
  Sense strand starting at position 2210 of SEQ ID NO: 1884017
agagaaauacauugcucau

SEQ ID NO: 2233757 - RNA, 19 nt, Artificial Sequence
  Description of Artificial Sequence: Synthetic oligonucleotide
  Antisense strand to SEQ ID NO: 2233756
augagcaauguauuucucu

SEQ ID NO: 2233758 - RNA, 19 nt, Artificial Sequence
  Description of Artificial Sequence: Synthetic oligonucleotide
  Sense strand starting at position 2212 of SEQ ID NO: 1884017
agaaauacauugcucaugu

SEQ ID NO: 2233759 - RNA, 19 nt, Artificial Sequence
  Description of Artificial Sequence: Synthetic oligonucleotide
  Antisense strand to SEQ ID NO: 2233758
acaugagcaauguauuucu

SEQ ID NO: 2233760 - RNA, 19 nt, Artificial Sequence
  Description of Artificial Sequence: Synthetic oligonucleotide
  Sense strand starting at position 2216 of SEQ ID NO: 1884017
auacauugcucauguuaag

SEQ ID NO: 2233761 - RNA, 19 nt, Artificial Sequence
  Description of Artificial Sequence: Synthetic oligonucleotide
  Antisense strand to SEQ ID NO: 2233760
cuuaacaugagcaauguau

SEQ ID NO: 2233762 - RNA, 19 nt, Artificial Sequence
  Description of Artificial Sequence: Synthetic oligonucleotide
  Sense strand starting at position 2408 of SEQ ID NO: 1884017
cccuuugaaucgcugcgaa

SEQ ID NO: 2233763 - RNA, 19 nt, Artificial Sequence
  Description of Artificial Sequence: Synthetic oligonucleotide
  Antisense strand to SEQ ID NO: 2233762
uucgcagcgauucaaaggg

SEQ ID NO: 2233764 - RNA, 19 nt, Artificial Sequence
  Description of Artificial Sequence: Synthetic oligonucleotide
  Sense strand starting at position 2569 of SEQ ID NO: 1884017
auugcuuauugcuguguuu

SEQ ID NO: 2233765 - RNA, 19 nt, Artificial Sequence
  Description of Artificial Sequence: Synthetic oligonucleotide
  Antisense strand to SEQ ID NO: 2233764
aaacacagcaauaagcaau

SEQ ID NO: 2233766 - RNA, 19 nt, Artificial Sequence
  Description of Artificial Sequence: Synthetic oligonucleotide
  Sense strand starting at position 2663 of SEQ ID NO: 1884017
gcauacugagcucggaaua

SEQ ID NO: 2233767 - RNA, 19 nt, Artificial Sequence
  Description of Artificial Sequence: Synthetic oligonucleotide
  Antisense strand to SEQ ID NO: 2233766
uauuccgagcucaguaugc

SEQ ID NO: 2233768 - RNA, 19 nt, Artificial Sequence
  Description of Artificial Sequence: Synthetic oligonucleotide
  Sense strand starting at position 2664 of SEQ ID NO: 1884017
cauacugagcucggaauaa

SEQ ID NO: 2233769 - RNA, 19 nt, Artificial Sequence
  Description of Artificial Sequence: Synthetic oligonucleotide
  Antisense strand to SEQ ID NO: 2233768
uuauuccgagcucaguaug

SEQ ID NO: 2233770 - RNA, 19 nt, Artificial Sequence
  Description of Artificial Sequence: Synthetic oligonucleotide
  Sense strand starting at position 2737 of SEQ ID NO: 1884017
aaugcugucuauuggugaa

SEQ ID NO: 2233771 - RNA, 19 nt, Artificial Sequence
  Description of Artificial Sequence: Synthetic oligonucleotide
  Antisense strand to SEQ ID NO: 2233770
uucaccaauagacagcauu

SEQ ID NO: 2233772 - RNA, 19 nt, Artificial Sequence
  Description of Artificial Sequence: Synthetic oligonucleotide
  Sense strand starting at position 2739 of SEQ ID NO: 1884017
ugcugucuauuggugaaag

SEQ ID NO: 2233773 - RNA, 19 nt, Artificial Sequence
  Description of Artificial Sequence: Synthetic oligonucleotide
  Antisense strand to SEQ ID NO: 2233772
cuuucaccaauagacagca

SEQ ID NO: 2233774 - RNA, 19 nt, Artificial Sequence
  Description of Artificial Sequence: Synthetic oligonucleotide
  Sense strand starting at position 2740 of SEQ ID NO: 1884017
gcugucuauuggugaaaga

SEQ ID NO: 2233775 - RNA, 19 nt, Artificial Sequence
  Description of Artificial Sequence: Synthetic oligonucleotide
  Antisense strand to SEQ ID NO: 2233774
ucuuucaccaauagacagc

SEQ ID NO: 2233776 - RNA, 19 nt, Artificial Sequence
  Description of Artificial Sequence: Synthetic oligonucleotide
  Sense strand starting at position 2741 of SEQ ID NO: 1884017
cugucuauuggugaaagag

SEQ ID NO: 2233777 - RNA, 19 nt, Artificial Sequence
  Description of Artificial Sequence: Synthetic oligonucleotide
  Antisense strand to SEQ ID NO: 2233776
cucuuucaccaauagacag

SEQ ID NO: 2233778 - RNA, 19 nt, Artificial Sequence
  Description of Artificial Sequence: Synthetic oligonucleotide
  Sense strand starting at position 3161 of SEQ ID NO: 1884017
auguucuagugaguaacga

SEQ ID NO: 2233779 - RNA, 19 nt, Artificial Sequence
  Description of Artificial Sequence: Synthetic oligonucleotide
  Antisense strand to SEQ ID NO: 2233778
ucguuacucacuagaacau

SEQ ID NO: 2233780 - RNA, 19 nt, Artificial Sequence
  Description of Artificial Sequence: Synthetic oligonucleotide
  Sense strand starting at position 3178 of SEQ ID NO: 1884017
gagaguuaauaauacgacu

SEQ ID NO: 2233781 - RNA, 19 nt, Artificial Sequence
  Description of Artificial Sequence: Synthetic oligonucleotide
  Antisense strand to SEQ ID NO: 2233780
agucguauuauuaacucuc

SEQ ID NO: 2233782 - RNA, 19 nt, Artificial Sequence
  Description of Artificial Sequence: Synthetic oligonucleotide
  Sense strand starting at position 3258 of SEQ ID NO: 1884017
uuaucuggugguugaggaa

SEQ ID NO: 2233783 - RNA, 19 nt, Artificial Sequence
  Description of Artificial Sequence: Synthetic oligonucleotide
  Antisense strand to SEQ ID NO: 2233782
uuccucaaccaccagauaa

SEQ ID NO: 2233784 - RNA, 19 nt, Artificial Sequence
  Description of Artificial Sequence: Synthetic oligonucleotide
  Sense strand starting at position 3776 of SEQ ID NO: 1884017
auugguaguuaguaagaua

SEQ ID NO: 2233785 - RNA, 19 nt, Artificial Sequence
  Description of Artificial Sequence: Synthetic oligonucleotide
  Antisense strand to SEQ ID NO: 2233784
uaucuuacuaacuaccaau

SEQ ID NO: 2233786 - RNA, 19 nt, Artificial Sequence
  Description of Artificial Sequence: Synthetic oligonucleotide
  Sense strand starting at position 3779 of SEQ ID NO: 1884017
gguaguuaguaagauauau

SEQ ID NO: 2233787 - RNA, 19 nt, Artificial Sequence
  Description of Artificial Sequence: Synthetic oligonucleotide
  Antisense strand to SEQ ID NO: 2233786
auauaucuuacuaacuacc

SEQ ID NO: 2233788 - RNA, 19 nt, Artificial Sequence
  Description of Artificial Sequence: Synthetic oligonucleotide
  Sense strand starting at position 3862 of SEQ ID NO: 1884017
acuuuauucuaggaaugau

SEQ ID NO: 2233789 - RNA, 19 nt, Artificial Sequence
  Description of Artificial Sequence: Synthetic oligonucleotide
  Antisense strand to SEQ ID NO: 2233788
aucauuccuagaauaaagu

SEQ ID NO: 2233790 - RNA, 19 nt, Artificial Sequence
  Description of Artificial Sequence: Synthetic oligonucleotide
  Sense strand starting at position 3871 of SEQ ID NO: 1884017
uaggaaugaucugcaaggu

SEQ ID NO: 2233791 - RNA, 19 nt, Artificial Sequence
  Description of Artificial Sequence: Synthetic oligonucleotide
  Antisense strand to SEQ ID NO: 2233790
accuugcagaucauuccua

SEQ ID NO: 2233792 - RNA, 19 nt, Artificial Sequence
  Description of Artificial Sequence: Synthetic oligonucleotide
  Sense strand starting at position 3925 of SEQ ID NO: 1884017
guuauuugaucauaguguu

SEQ ID NO: 2233793 - RNA, 19 nt, Artificial Sequence
  Description of Artificial Sequence: Synthetic oligonucleotide
  Antisense strand to SEQ ID NO: 2233792
aacacuaugaucaaauaac

SEQ ID NO: 2233794 - RNA, 19 nt, Artificial Sequence
  Description of Artificial Sequence: Synthetic oligonucleotide
  Sense strand starting at position 3967 of SEQ ID NO: 1884017
uggaaagcuuuacagaaau

SEQ ID NO: 2233795 - RNA, 19 nt, Artificial Sequence
  Description of Artificial Sequence: Synthetic oligonucleotide
  Antisense strand to SEQ ID NO: 2233794
auuucuguaaagcuuucca

SEQ ID NO: 2233796 - RNA, 19 nt, Artificial Sequence
  Description of Artificial Sequence: Synthetic oligonucleotide
  Sense strand starting at position 31 of SEQ ID NO: 1884018
agaugugcucaugggacau

SEQ ID NO: 2233797 - RNA, 19 nt, Artificial Sequence
  Description of Artificial Sequence: Synthetic oligonucleotide
  Antisense strand to SEQ ID NO: 2233796
augucccaugagcacaucu

SEQ ID NO: 2233798 - RNA, 19 nt, Artificial Sequence
  Description of Artificial Sequence: Synthetic oligonucleotide
  Sense strand starting at position 197 of SEQ ID NO: 1884018
auauguuauagucaguaug

SEQ ID NO: 2233799 - RNA, 19 nt, Artificial Sequence
  Description of Artificial Sequence: Synthetic oligonucleotide
  Antisense strand to SEQ ID NO: 2233798
cauacugacuauaacauau

SEQ ID NO: 2233800 - RNA, 19 nt, Artificial Sequence
  Description of Artificial Sequence: Synthetic oligonucleotide
  Sense strand starting at position 199 of SEQ ID NO: 1884018
auguuauagucaguaugga

SEQ ID NO: 2233801 - RNA, 19 nt, Artificial Sequence
  Description of Artificial Sequence: Synthetic oligonucleotide
  Antisense strand to SEQ ID NO: 2233800
uccauacugacuauaacau

SEQ ID NO: 2233802 - RNA, 19 nt, Artificial Sequence
  Description of Artificial Sequence: Synthetic oligonucleotide
  Sense strand starting at position 200 of SEQ ID NO: 1884018
uguuauagucaguauggaa

SEQ ID NO: 2233803 - RNA, 19 nt, Artificial Sequence
  Description of Artificial Sequence: Synthetic oligonucleotide
  Antisense strand to SEQ ID NO: 2233802
uuccauacugacuauaaca

SEQ ID NO: 2233804 - RNA, 19 nt, Artificial Sequence
  Description of Artificial Sequence: Synthetic oligonucleotide
  Sense strand starting at position 495 of SEQ ID NO: 1884018
guagaugguugagugauau

SEQ ID NO: 2233805 - RNA, 19 nt, Artificial Sequence
  Description of Artificial Sequence: Synthetic oligonucleotide
  Antisense strand to SEQ ID NO: 2233804
auaucacucaaccaucuac

SEQ ID NO: 2233806 - RNA, 19 nt, Artificial Sequence
  Description of Artificial Sequence: Synthetic oligonucleotide
  Sense strand starting at position 712 of SEQ ID NO: 1884018
aagaguuaugaugagcagu

SEQ ID NO: 2233807 - RNA, 19 nt, Artificial Sequence
  Description of Artificial Sequence: Synthetic oligonucleotide
  Antisense strand to SEQ ID NO: 2233806
acugcucaucauaacucuu

SEQ ID NO: 2233808 - RNA, 19 nt, Artificial Sequence
  Description of Artificial Sequence: Synthetic oligonucleotide
  Sense strand starting at position 714 of SEQ ID NO: 1884018
gaguuaugaugagcaguga

SEQ ID NO: 2233809 - RNA, 19 nt, Artificial Sequence
  Description of Artificial Sequence: Synthetic oligonucleotide
  Antisense strand to SEQ ID NO: 2233808
ucacugcucaucauaacuc

SEQ ID NO: 2233810 - RNA, 19 nt, Artificial Sequence
  Description of Artificial Sequence: Synthetic oligonucleotide
  Sense strand starting at position 738 of SEQ ID NO: 1884018
gagguauaagcccaacacu

SEQ ID NO: 2233811 - RNA, 19 nt, Artificial Sequence
  Description of Artificial Sequence: Synthetic oligonucleotide
  Antisense strand to SEQ ID NO: 2233810
aguguugggcuuauaccuc

SEQ ID NO: 2233812 - RNA, 19 nt, Artificial Sequence
  Description of Artificial Sequence: Synthetic oligonucleotide
  Sense strand starting at position 770 of SEQ ID NO: 1884018
aaguguccugccuacagaa

SEQ ID NO: 2233813 - RNA, 19 nt, Artificial Sequence
  Description of Artificial Sequence: Synthetic oligonucleotide
  Antisense strand to SEQ ID NO: 2233812
uucuguaggcaggacacuu

SEQ ID NO: 2233814 - RNA, 19 nt, Artificial Sequence
  Description of Artificial Sequence: Synthetic oligonucleotide
  Sense strand starting at position 806 of SEQ ID NO: 1884018
cuuccuaucgacugacaua

SEQ ID NO: 2233815 - RNA, 19 nt, Artificial Sequence
  Description of Artificial Sequence: Synthetic oligonucleotide
  Antisense strand to SEQ ID NO: 2233814
uaugucagucgauaggaag

SEQ ID NO: 2233816 - RNA, 19 nt, Artificial Sequence
  Description of Artificial Sequence: Synthetic oligonucleotide
  Sense strand starting at position 921 of SEQ ID NO: 1884018
guuguucguguuucauauu

SEQ ID NO: 2233817 - RNA, 19 nt, Artificial Sequence
  Description of Artificial Sequence: Synthetic oligonucleotide
  Antisense strand to SEQ ID NO: 2233816
aauaugaaacacgaacaac

SEQ ID NO: 2233818 - RNA, 19 nt, Artificial Sequence
  Description of Artificial Sequence: Synthetic oligonucleotide
  Sense strand starting at position 1038 of SEQ ID NO: 1884018
cugggacuauagcuguaaa

SEQ ID NO: 2233819 - RNA, 19 nt, Artificial Sequence
  Description of Artificial Sequence: Synthetic oligonucleotide
  Antisense strand to SEQ ID NO: 2233818
uuuacagcuauagucccag

SEQ ID NO: 2233820 - RNA, 19 nt, Artificial Sequence
  Description of Artificial Sequence: Synthetic oligonucleotide
  Sense strand starting at position 1039 of SEQ ID NO: 1884018
ugggacuauagcuguaaac

SEQ ID NO: 2233821 - RNA, 19 nt, Artificial Sequence
  Description of Artificial Sequence: Synthetic oligonucleotide
  Antisense strand to SEQ ID NO: 2233820
guuuacagcuauaguccca

SEQ ID NO: 2233822 - RNA, 19 nt, Artificial Sequence
  Description of Artificial Sequence: Synthetic oligonucleotide
  Sense strand starting at position 1041 of SEQ ID NO: 1884018
ggacuauagcuguaaacua

SEQ ID NO: 2233823 - RNA, 19 nt, Artificial Sequence
  Description of Artificial Sequence: Synthetic oligonucleotide
  Antisense strand to SEQ ID NO: 2233822
uaguuuacagcuauagucc

SEQ ID NO: 2233824 - RNA, 19 nt, Artificial Sequence
  Description of Artificial Sequence: Synthetic oligonucleotide
  Sense strand starting at position 1066 of SEQ ID NO: 1884018
uggcuaccuccacagaguu

SEQ ID NO: 2233825 - RNA, 19 nt, Artificial Sequence
  Description of Artificial Sequence: Synthetic oligonucleotide
  Antisense strand to SEQ ID NO: 2233824
aacucuguggagguagcca

SEQ ID NO: 2233826 - RNA, 19 nt, Artificial Sequence
  Description of Artificial Sequence: Synthetic oligonucleotide
  Sense strand starting at position 1709 of SEQ ID NO: 1884018
accucucuccaaugaggau

SEQ ID NO: 2233827 - RNA, 19 nt, Artificial Sequence
  Description of Artificial Sequence: Synthetic oligonucleotide
  Antisense strand to SEQ ID NO: 2233826
auccucauuggagagaggu

SEQ ID NO: 2233828 - RNA, 19 nt, Artificial Sequence
  Description of Artificial Sequence: Synthetic oligonucleotide
  Sense strand starting at position 1727 of SEQ ID NO: 1884018
uaugaagucccguaggacu

SEQ ID NO: 2233829 - RNA, 19 nt, Artificial Sequence
  Description of Artificial Sequence: Synthetic oligonucleotide
  Antisense strand to SEQ ID NO: 2233828
aguccuacgggacuucaua

SEQ ID NO: 2233830 - RNA, 19 nt, Artificial Sequence
  Description of Artificial Sequence: Synthetic oligonucleotide
  Sense strand starting at position 1741 of SEQ ID NO: 1884018
ggacuuaccgcauagguca

SEQ ID NO: 2233831 - RNA, 19 nt, Artificial Sequence
  Description of Artificial Sequence: Synthetic oligonucleotide
  Antisense strand to SEQ ID NO: 2233830
ugaccuaugcgguaagucc

SEQ ID NO: 2233832 - RNA, 19 nt, Artificial Sequence
  Description of Artificial Sequence: Synthetic oligonucleotide
  Sense strand starting at position 2273 of SEQ ID NO: 1884018
gggaggguugcuugaguaa

SEQ ID NO: 2233833 - RNA, 19 nt, Artificial Sequence
  Description of Artificial Sequence: Synthetic oligonucleotide
  Antisense strand to SEQ ID NO: 2233832
uuacucaagcaacccuccc

SEQ ID NO: 2233834 - RNA, 19 nt, Artificial Sequence
  Description of Artificial Sequence: Synthetic oligonucleotide
  Sense strand starting at position 2793 of SEQ ID NO: 1884018
gcuugacacauugaguuga

SEQ ID NO: 2233835 - RNA, 19 nt, Artificial Sequence
  Description of Artificial Sequence: Synthetic oligonucleotide
  Antisense strand to SEQ ID NO: 2233834
ucaacucaaugugucaagc

SEQ ID NO: 2233836 - RNA, 19 nt, Artificial Sequence
  Description of Artificial Sequence: Synthetic oligonucleotide
  Sense strand starting at position 2795 of SEQ ID NO: 1884018
uugacacauugaguugaca

SEQ ID NO: 2233837 - RNA, 19 nt, Artificial Sequence
  Description of Artificial Sequence: Synthetic oligonucleotide
  Antisense strand to SEQ ID NO: 2233836
ugucaacucaaugugucaa

SEQ ID NO: 2233838 - RNA, 19 nt, Artificial Sequence
  Description of Artificial Sequence: Synthetic oligonucleotide
  Sense strand starting at position 2828 of SEQ ID NO: 1884018
caggcaucccgauauauug

SEQ ID NO: 2233839 - RNA, 19 nt, Artificial Sequence
  Description of Artificial Sequence: Synthetic oligonucleotide
  Antisense strand to SEQ ID NO: 2233838
caauauaucgggaugccug

SEQ ID NO: 2233840 - RNA, 19 nt, Artificial Sequence
  Description of Artificial Sequence: Synthetic oligonucleotide
  Sense strand starting at position 2856 of SEQ ID NO: 1884018
guagaaauugcugacaccu

SEQ ID NO: 2233841 - RNA, 19 nt, Artificial Sequence
  Description of Artificial Sequence: Synthetic oligonucleotide
  Antisense strand to SEQ ID NO: 2233840
aggugucagcaauuucuac

SEQ ID NO: 2233842 - RNA, 19 nt, Artificial Sequence
  Description of Artificial Sequence: Synthetic oligonucleotide
  Sense strand starting at position 2864 of SEQ ID NO: 1884018
ugcugacaccucuaugaaa

SEQ ID NO: 2233843 - RNA, 19 nt, Artificial Sequence
  Description of Artificial Sequence: Synthetic oligonucleotide
  Antisense strand to SEQ ID NO: 2233842
uuucauagaggugucagca

SEQ ID NO: 2233844 - RNA, 19 nt, Artificial Sequence
  Description of Artificial Sequence: Synthetic oligonucleotide
  Sense strand starting at position 3039 of SEQ ID NO: 1884018
aaugaaauacucugugaug

SEQ ID NO: 2233845 - RNA, 19 nt, Artificial Sequence
  Description of Artificial Sequence: Synthetic oligonucleotide
  Antisense strand to SEQ ID NO: 2233844
caucacagaguauuucauu

SEQ ID NO: 2233846 - RNA, 19 nt, Artificial Sequence
  Description of Artificial Sequence: Synthetic oligonucleotide
  Sense strand starting at position 3040 of SEQ ID NO: 1884018
augaaauacucugugauga

SEQ ID NO: 2233847 - RNA, 19 nt, Artificial Sequence
  Description of Artificial Sequence: Synthetic oligonucleotide
  Antisense strand to SEQ ID NO: 2233846
ucaucacagaguauuucau

SEQ ID NO: 2233848 - RNA, 19 nt, Artificial Sequence
  Description of Artificial Sequence: Synthetic oligonucleotide
  Sense strand starting at position 3041 of SEQ ID NO: 1884018
ugaaauacucugugaugau

SEQ ID NO: 2233849 - RNA, 19 nt, Artificial Sequence
  Description of Artificial Sequence: Synthetic oligonucleotide
  Antisense strand to SEQ ID NO: 2233848
aucaucacagaguauuuca

SEQ ID NO: 2233850 - RNA, 19 nt, Artificial Sequence
  Description of Artificial Sequence: Synthetic oligonucleotide
  Sense strand starting at position 3217 of SEQ ID NO: 1884018
auuccuauaugggcauaaa

SEQ ID NO: 2233851 - RNA, 19 nt, Artificial Sequence
  Description of Artificial Sequence: Synthetic oligonucleotide
  Antisense strand to SEQ ID NO: 2233850
uuuaugcccauauaggaau

SEQ ID NO: 2233852 - RNA, 19 nt, Artificial Sequence
  Description of Artificial Sequence: Synthetic oligonucleotide
  Sense strand starting at position 3372 of SEQ ID NO: 1884018
agguacuaccauugauugu

SEQ ID NO: 2233853 - RNA, 19 nt, Artificial Sequence
  Description of Artificial Sequence: Synthetic oligonucleotide
  Antisense strand to SEQ ID NO: 2233852
acaaucaaugguaguaccu

SEQ ID NO: 2233854 - RNA, 19 nt, Artificial Sequence
  Description of Artificial Sequence: Synthetic oligonucleotide
  Sense strand starting at position 3379 of SEQ ID NO: 1884018
accauugauugucucagaa

SEQ ID NO: 2233855 - RNA, 19 nt, Artificial Sequence
  Description of Artificial Sequence: Synthetic oligonucleotide
  Antisense strand to SEQ ID NO: 2233854
uucugagacaaucaauggu

SEQ ID NO: 2233856 - RNA, 19 nt, Artificial Sequence
  Description of Artificial Sequence: Synthetic oligonucleotide
  Sense strand starting at position 3586 of SEQ ID NO: 1884018
ccuguaguaaccuagagua

SEQ ID NO: 2233857 - RNA, 19 nt, Artificial Sequence
  Description of Artificial Sequence: Synthetic oligonucleotide
  Antisense strand to SEQ ID NO: 2233856
uacucuagguuacuacagg

SEQ ID NO: 2233858 - RNA, 19 nt, Artificial Sequence
  Description of Artificial Sequence: Synthetic oligonucleotide
  Sense strand starting at position 3588 of SEQ ID NO: 1884018
uguaguaaccuagaguaaa

SEQ ID NO: 2233859 - RNA, 19 nt, Artificial Sequence
  Description of Artificial Sequence: Synthetic oligonucleotide
  Antisense strand to SEQ ID NO: 2233858
uuuacucuagguuacuaca

SEQ ID NO: 2233860 - RNA, 19 nt, Artificial Sequence
  Description of Artificial Sequence: Synthetic oligonucleotide
  Sense strand starting at position 3808 of SEQ ID NO: 1884018
ggagguugaagucacguau

SEQ ID NO: 2233861 - RNA, 19 nt, Artificial Sequence
  Description of Artificial Sequence: Synthetic oligonucleotide
  Antisense strand to SEQ ID NO: 2233860
auacgugacuucaaccucc

SEQ ID NO: 2233862 - RNA, 19 nt, Artificial Sequence
  Description of Artificial Sequence: Synthetic oligonucleotide
  Sense strand starting at position 3812 of SEQ ID NO: 1884018
guugaagucacguauugac

SEQ ID NO: 2233863 - RNA, 19 nt, Artificial Sequence
  Description of Artificial Sequence: Synthetic oligonucleotide
  Antisense strand to SEQ ID NO: 2233862
gucaauacgugacuucaac

SEQ ID NO: 2233864 - RNA, 19 nt, Artificial Sequence
  Description of Artificial Sequence: Synthetic oligonucleotide
  Sense strand starting at position 3837 of SEQ ID NO: 1884018
gaaggaaucuggucccuaa

SEQ ID NO: 2233865 - RNA, 19 nt, Artificial Sequence
  Description of Artificial Sequence: Synthetic oligonucleotide
  Antisense strand to SEQ ID NO: 2233864
uuagggaccagauuccuuc

SEQ ID NO: 2233866 - RNA, 19 nt, Artificial Sequence
  Description of Artificial Sequence: Synthetic oligonucleotide
  Sense strand starting at position 3840 of SEQ ID NO: 1884018
ggaaucuggucccuaagaa

SEQ ID NO: 2233867 - RNA, 19 nt, Artificial Sequence
  Description of Artificial Sequence: Synthetic oligonucleotide
  Antisense strand to SEQ ID NO: 2233866
uucuuagggaccagauucc

SEQ ID NO: 2233868 - RNA, 19 nt, Artificial Sequence
  Description of Artificial Sequence: Synthetic oligonucleotide
  Sense strand starting at position 3873 of SEQ ID NO: 1884018
auugaauucuaggcuaugu

SEQ ID NO: 2233869 - RNA, 19 nt, Artificial Sequence
  Description of Artificial Sequence: Synthetic oligonucleotide
  Antisense strand to SEQ ID NO: 2233868
acauagccuagaauucaau

SEQ ID NO: 2233870 - RNA, 19 nt, Artificial Sequence
  Description of Artificial Sequence: Synthetic oligonucleotide
  Sense strand starting at position 3899 of SEQ ID NO: 1884018
ucaguuaugcgagagagga

SEQ ID NO: 2233871 - RNA, 19 nt, Artificial Sequence
  Description of Artificial Sequence: Synthetic oligonucleotide
  Antisense strand to SEQ ID NO: 2233870
uccucucucgcauaacuga

SEQ ID NO: 2233872 - RNA, 19 nt, Artificial Sequence
  Description of Artificial Sequence: Synthetic oligonucleotide
  Sense strand starting at position 3901 of SEQ ID NO: 1884018
aguuaugcgagagaggaau

SEQ ID NO: 2233873 - RNA, 19 nt, Artificial Sequence
  Description of Artificial Sequence: Synthetic oligonucleotide
  Antisense strand to SEQ ID NO: 2233872
auuccucucucgcauaacu

SEQ ID NO: 2233874 - RNA, 19 nt, Artificial Sequence
  Description of Artificial Sequence: Synthetic oligonucleotide
  Sense strand starting at position 3934 of SEQ ID NO: 1884018
gccacuguaauuuggaguu

SEQ ID NO: 2233875 - RNA, 19 nt, Artificial Sequence
  Description of Artificial Sequence: Synthetic oligonucleotide
  Antisense strand to SEQ ID NO: 2233874
aacuccaaauuacaguggc

SEQ ID NO: 2233876 - RNA, 19 nt, Artificial Sequence
  Description of Artificial Sequence: Synthetic oligonucleotide
  Sense strand starting at position 258 of SEQ ID NO: 1884019
cugauaaucuaggcaaaua

SEQ ID NO: 2233877 - RNA, 19 nt, Artificial Sequence
  Description of Artificial Sequence: Synthetic oligonucleotide
  Antisense strand to SEQ ID NO: 2233876
uauuugccuagauuaucag

SEQ ID NO: 2233878 - RNA, 19 nt, Artificial Sequence
  Description of Artificial Sequence: Synthetic oligonucleotide
  Sense strand starting at position 318 of SEQ ID NO: 1884019
aaagcaauuguuggagcua

SEQ ID NO: 2233879 - RNA, 19 nt, Artificial Sequence
  Description of Artificial Sequence: Synthetic oligonucleotide
  Antisense strand to SEQ ID NO: 2233878
uagcuccaacaauugcuuu

SEQ ID NO: 2233880 - RNA, 19 nt, Artificial Sequence
  Description of Artificial Sequence: Synthetic oligonucleotide
  Sense strand starting at position 331 of SEQ ID NO: 1884019
gagcuagguagauggcaua

SEQ ID NO: 2233881 - RNA, 19 nt, Artificial Sequence
  Description of Artificial Sequence: Synthetic oligonucleotide
  Antisense strand to SEQ ID NO: 2233880
uaugccaucuaccuagcuc

SEQ ID NO: 2233882 - RNA, 19 nt, Artificial Sequence
  Description of Artificial Sequence: Synthetic oligonucleotide
  Sense strand starting at position 494 of SEQ ID NO: 1884019
aagacaguugcucgagguu

SEQ ID NO: 2233883 - RNA, 19 nt, Artificial Sequence
  Description of Artificial Sequence: Synthetic oligonucleotide
  Antisense strand to SEQ ID NO: 2233882
aaccucgagcaacugucuu

SEQ ID NO: 2233884 - RNA, 19 nt, Artificial Sequence
  Description of Artificial Sequence: Synthetic oligonucleotide
  Sense strand starting at position 497 of SEQ ID NO: 1884019
acaguugcucgagguuaua

SEQ ID NO: 2233885 - RNA, 19 nt, Artificial Sequence
  Description of Artificial Sequence: Synthetic oligonucleotide
  Antisense strand to SEQ ID NO: 2233884
uauaaccucgagcaacugu

SEQ ID NO: 2233886 - RNA, 19 nt, Artificial Sequence
  Description of Artificial Sequence: Synthetic oligonucleotide
  Sense strand starting at position 638 of SEQ ID NO: 1884019
ggguauuauggguauguaa

SEQ ID NO: 2233887 - RNA, 19 nt, Artificial Sequence
  Description of Artificial Sequence: Synthetic oligonucleotide
  Antisense strand to SEQ ID NO: 2233886
uuacauacccauaauaccc

SEQ ID NO: 2233888 - RNA, 19 nt, Artificial Sequence
  Description of Artificial Sequence: Synthetic oligonucleotide
  Sense strand starting at position 1335 of SEQ ID NO: 1884019
guuggaauuuaugauguca

SEQ ID NO: 2233889 - RNA, 19 nt, Artificial Sequence
  Description of Artificial Sequence: Synthetic oligonucleotide
  Antisense strand to SEQ ID NO: 2233888
ugacaucauaaauuccaac

SEQ ID NO: 2233890 - RNA, 19 nt, Artificial Sequence
  Description of Artificial Sequence: Synthetic oligonucleotide
  Sense strand starting at position 1337 of SEQ ID NO: 1884019
uggaauuuaugaugucaaa

SEQ ID NO: 2233891 - RNA, 19 nt, Artificial Sequence
  Description of Artificial Sequence: Synthetic oligonucleotide
  Antisense strand to SEQ ID NO: 2233890
uuugacaucauaaauucca

SEQ ID NO: 2233892 - RNA, 19 nt, Artificial Sequence
  Description of Artificial Sequence: Synthetic oligonucleotide
  Sense strand starting at position 1453 of SEQ ID NO: 1884019
ugguggugcguguauguaa

SEQ ID NO: 2233893 - RNA, 19 nt, Artificial Sequence
  Description of Artificial Sequence: Synthetic oligonucleotide
  Antisense strand to SEQ ID NO: 2233892
uuacauacacgcaccacca

SEQ ID NO: 2233894 - RNA, 19 nt, Artificial Sequence
  Description of Artificial Sequence: Synthetic oligonucleotide
  Sense strand starting at position 1454 of SEQ ID NO: 1884019
gguggugcguguauguaaa

SEQ ID NO: 2233895 - RNA, 19 nt, Artificial Sequence
  Description of Artificial Sequence: Synthetic oligonucleotide
  Antisense strand to SEQ ID NO: 2233894
uuuacauacacgcaccacc

SEQ ID NO: 2233896 - RNA, 19 nt, Artificial Sequence
  Description of Artificial Sequence: Synthetic oligonucleotide
  Sense strand starting at position 1554 of SEQ ID NO: 1884019
ucuggagcugccugaaaga

SEQ ID NO: 2233897 - RNA, 19 nt, Artificial Sequence
  Description of Artificial Sequence: Synthetic oligonucleotide
  Antisense strand to SEQ ID NO: 2233896
ucuuucaggcagcuccaga

SEQ ID NO: 2233898 - RNA, 19 nt, Artificial Sequence
  Description of Artificial Sequence: Synthetic oligonucleotide
  Sense strand starting at position 1596 of SEQ ID NO: 1884019
aacgaaaugugggcacgua

SEQ ID NO: 2233899 - RNA, 19 nt, Artificial Sequence
  Description of Artificial Sequence: Synthetic oligonucleotide
  Antisense strand to SEQ ID NO: 2233898
uacgugcccacauuucguu

SEQ ID NO: 2233900 - RNA, 19 nt, Artificial Sequence
  Description of Artificial Sequence: Synthetic oligonucleotide
  Sense strand starting at position 1597 of SEQ ID NO: 1884019
acgaaaugugggcacguau

SEQ ID NO: 2233901 - RNA, 19 nt, Artificial Sequence
  Description of Artificial Sequence: Synthetic oligonucleotide
  Antisense strand to SEQ ID NO: 2233900
auacgugcccacauuucgu

SEQ ID NO: 2233902 - RNA, 19 nt, Artificial Sequence
  Description of Artificial Sequence: Synthetic oligonucleotide
  Sense strand starting at position 1625 of SEQ ID NO: 1884019
ggaaaugauucucugcggu

SEQ ID NO: 2233903 - RNA, 19 nt, Artificial Sequence
  Description of Artificial Sequence: Synthetic oligonucleotide
  Antisense strand to SEQ ID NO: 2233902
accgcagagaaucauuucc

SEQ ID NO: 2233904 - RNA, 19 nt, Artificial Sequence
  Description of Artificial Sequence: Synthetic oligonucleotide
  Sense strand starting at position 1643 of SEQ ID NO: 1884019
ucggcaggaucuuugucua

SEQ ID NO: 2233905 - RNA, 19 nt, Artificial Sequence
  Description of Artificial Sequence: Synthetic oligonucleotide
  Antisense strand to SEQ ID NO: 2233904
uagacaaagauccugccga

SEQ ID NO: 2233906 - RNA, 19 nt, Artificial Sequence
  Description of Artificial Sequence: Synthetic oligonucleotide
  Sense strand starting at position 1646 of SEQ ID NO: 1884019
gcaggaucuuugucuagcu

SEQ ID NO: 2233907 - RNA, 19 nt, Artificial Sequence
  Description of Artificial Sequence: Synthetic oligonucleotide
  Antisense strand to SEQ ID NO: 2233906
agcuagacaaagauccugc

SEQ ID NO: 2233908 - RNA, 19 nt, Artificial Sequence
  Description of Artificial Sequence: Synthetic oligonucleotide
  Sense strand starting at position 1647 of SEQ ID NO: 1884019
caggaucuuugucuagcua

SEQ ID NO: 2233909 - RNA, 19 nt, Artificial Sequence
  Description of Artificial Sequence: Synthetic oligonucleotide
  Antisense strand to SEQ ID NO: 2233908
uagcuagacaaagauccug

SEQ ID NO: 2233910 - RNA, 19 nt, Artificial Sequence
  Description of Artificial Sequence: Synthetic oligonucleotide
  Sense strand starting at position 1717 of SEQ ID NO: 1884019
aagccugacuguguguaua

SEQ ID NO: 2233911 - RNA, 19 nt, Artificial Sequence
  Description of Artificial Sequence: Synthetic oligonucleotide
  Antisense strand to SEQ ID NO: 2233910
uauacacacagucaggcuu

SEQ ID NO: 2233912 - RNA, 19 nt, Artificial Sequence
  Description of Artificial Sequence: Synthetic oligonucleotide
  Sense strand starting at position 2661 of SEQ ID NO: 1884019
gggcuuagugagggcucau

SEQ ID NO: 2233913 - RNA, 19 nt, Artificial Sequence
  Description of Artificial Sequence: Synthetic oligonucleotide
  Antisense strand to SEQ ID NO: 2233912
augagcccucacuaagccc

SEQ ID NO: 2233914 - RNA, 19 nt, Artificial Sequence
  Description of Artificial Sequence: Synthetic oligonucleotide
  Sense strand starting at position 2724 of SEQ ID NO: 1884019
caagcuguccgcgacacuu

SEQ ID NO: 2233915 - RNA, 19 nt, Artificial Sequence
  Description of Artificial Sequence: Synthetic oligonucleotide
  Antisense strand to SEQ ID NO: 2233914
aagugucgcggacagcuug

SEQ ID NO: 2233916 - RNA, 19 nt, Artificial Sequence
  Description of Artificial Sequence: Synthetic oligonucleotide
  Sense strand starting at position 2734 of SEQ ID NO: 1884019
gcgacacuuguuggcauua

SEQ ID NO: 2233917 - RNA, 19 nt, Artificial Sequence
  Description of Artificial Sequence: Synthetic oligonucleotide
  Antisense strand to SEQ ID NO: 2233916
uaaugccaacaagugucgc

SEQ ID NO: 2233918 - RNA, 19 nt, Artificial Sequence
  Description of Artificial Sequence: Synthetic oligonucleotide
  Sense strand starting at position 2818 of SEQ ID NO: 1884019
accgcuuuccuagaggguu

SEQ ID NO: 2233919 - RNA, 19 nt, Artificial Sequence
  Description of Artificial Sequence: Synthetic oligonucleotide
  Antisense strand to SEQ ID NO: 2233918
aacccucuaggaaagcggu

SEQ ID NO: 2233920 - RNA, 19 nt, Artificial Sequence
  Description of Artificial Sequence: Synthetic oligonucleotide
  Sense strand starting at position 3102 of SEQ ID NO: 1884019
cuccaucugaugggaguuu

SEQ ID NO: 2233921 - RNA, 19 nt, Artificial Sequence
  Description of Artificial Sequence: Synthetic oligonucleotide
  Antisense strand to SEQ ID NO: 2233920
aaacucccaucagauggag

SEQ ID NO: 2233922 - RNA, 19 nt, Artificial Sequence
  Description of Artificial Sequence: Synthetic oligonucleotide
  Sense strand starting at position 3136 of SEQ ID NO: 1884019
ugcacugauagguguguca

SEQ ID NO: 2233923 - RNA, 19 nt, Artificial Sequence
  Description of Artificial Sequence: Synthetic oligonucleotide
  Antisense strand to SEQ ID NO: 2233922
ugacacaccuaucagugca

SEQ ID NO: 2233924 - RNA, 19 nt, Artificial Sequence
  Description of Artificial Sequence: Synthetic oligonucleotide
  Sense strand starting at position 3199 of SEQ ID NO: 1884019
ggcagaaucuugguauaau

SEQ ID NO: 2233925 - RNA, 19 nt, Artificial Sequence
  Description of Artificial Sequence: Synthetic oligonucleotide
  Antisense strand to SEQ ID NO: 2233924
auuauaccaagauucugcc

SEQ ID NO: 2233926 - RNA, 19 nt, Artificial Sequence
  Description of Artificial Sequence: Synthetic oligonucleotide
  Sense strand starting at position 3208 of SEQ ID NO: 1884019
uugguauaaugcuugaggu

SEQ ID NO: 2233927 - RNA, 19 nt, Artificial Sequence
  Description of Artificial Sequence: Synthetic oligonucleotide
  Antisense strand to SEQ ID NO: 2233926
accucaagcauuauaccaa

SEQ ID NO: 2233928 - RNA, 19 nt, Artificial Sequence
  Description of Artificial Sequence: Synthetic oligonucleotide
  Sense strand starting at position 3209 of SEQ ID NO: 1884019
ugguauaaugcuugagguc

SEQ ID NO: 2233929 - RNA, 19 nt, Artificial Sequence
  Description of Artificial Sequence: Synthetic oligonucleotide
  Antisense strand to SEQ ID NO: 2233928
gaccucaagcauuauacca

SEQ ID NO: 2233930 - RNA, 19 nt, Artificial Sequence
  Description of Artificial Sequence: Synthetic oligonucleotide
  Sense strand starting at position 3215 of SEQ ID NO: 1884019
aaugcuugaggucgaggau

SEQ ID NO: 2233931 - RNA, 19 nt, Artificial Sequence
  Description of Artificial Sequence: Synthetic oligonucleotide
  Antisense strand to SEQ ID NO: 2233930
auccucgaccucaagcauu

SEQ ID NO: 2233932 - RNA, 19 nt, Artificial Sequence
  Description of Artificial Sequence: Synthetic oligonucleotide
  Sense strand starting at position 3216 of SEQ ID NO: 1884019
augcuugaggucgaggauu

SEQ ID NO: 2233933 - RNA, 19 nt, Artificial Sequence
  Description of Artificial Sequence: Synthetic oligonucleotide
  Antisense strand to SEQ ID NO: 2233932
aauccucgaccucaagcau

SEQ ID NO: 2233934 - RNA, 19 nt, Artificial Sequence
  Description of Artificial Sequence: Synthetic oligonucleotide
  Sense strand starting at position 3279 of SEQ ID NO: 1884019
gagggagauugggcucuuu

SEQ ID NO: 2233935 - RNA, 19 nt, Artificial Sequence
  Description of Artificial Sequence: Synthetic oligonucleotide
  Antisense strand to SEQ ID NO: 2233934
aaagagcccaaucucccuc

SEQ ID NO: 2233936 - RNA, 19 nt, Artificial Sequence
  Description of Artificial Sequence: Synthetic oligonucleotide
  Sense strand starting at position 3307 of SEQ ID NO: 1884019
cuuuauacaugauaaaggu

SEQ ID NO: 2233937 - RNA, 19 nt, Artificial Sequence
  Description of Artificial Sequence: Synthetic oligonucleotide
  Antisense strand to SEQ ID NO: 2233936
accuuuaucauguauaaag

SEQ ID NO: 2233938 - RNA, 19 nt, Artificial Sequence
  Description of Artificial Sequence: Synthetic oligonucleotide
  Sense strand starting at position 3344 of SEQ ID NO: 1884019
ggacuaauuugcuacucca

SEQ ID NO: 2233939 - RNA, 19 nt, Artificial Sequence
  Description of Artificial Sequence: Synthetic oligonucleotide
  Antisense strand to SEQ ID NO: 2233938
uggaguagcaaauuagucc

SEQ ID NO: 2233940 - RNA, 19 nt, Artificial Sequence
  Description of Artificial Sequence: Synthetic oligonucleotide
  Sense strand starting at position 3506 of SEQ ID NO: 1884019
agagcagaggccugugaau

SEQ ID NO: 2233941 - RNA, 19 nt, Artificial Sequence
  Description of Artificial Sequence: Synthetic oligonucleotide
  Antisense strand to SEQ ID NO: 2233940
auucacaggccucugcucu

SEQ ID NO: 2233942 - RNA, 19 nt, Artificial Sequence
  Description of Artificial Sequence: Synthetic oligonucleotide
  Sense strand starting at position 3508 of SEQ ID NO: 1884019
agcagaggccugugaauga

SEQ ID NO: 2233943 - RNA, 19 nt, Artificial Sequence
  Description of Artificial Sequence: Synthetic oligonucleotide
  Antisense strand to SEQ ID NO: 2233942
ucauucacaggccucugcu

SEQ ID NO: 2233944 - RNA, 19 nt, Artificial Sequence
  Description of Artificial Sequence: Synthetic oligonucleotide
  Sense strand starting at position 3552 of SEQ ID NO: 1884019
uggugagcagugugacauu

SEQ ID NO: 2233945 - RNA, 19 nt, Artificial Sequence
  Description of Artificial Sequence: Synthetic oligonucleotide
  Antisense strand to SEQ ID NO: 2233944
aaugucacacugcucacca

SEQ ID NO: 2233946 - RNA, 19 nt, Artificial Sequence
  Description of Artificial Sequence: Synthetic oligonucleotide
  Sense strand starting at position 3561 of SEQ ID NO: 1884019
gugugacauuaauaccaag

SEQ ID NO: 2233947 - RNA, 19 nt, Artificial Sequence
  Description of Artificial Sequence: Synthetic oligonucleotide
  Antisense strand to SEQ ID NO: 2233946
cuugguauuaaugucacac

SEQ ID NO: 2233948 - RNA, 19 nt, Artificial Sequence
  Description of Artificial Sequence: Synthetic oligonucleotide
  Sense strand starting at position 3564 of SEQ ID NO: 1884019
ugacauuaauaccaagugu

SEQ ID NO: 2233949 - RNA, 19 nt, Artificial Sequence
  Description of Artificial Sequence: Synthetic oligonucleotide
  Antisense strand to SEQ ID NO: 2233948
acacuugguauuaauguca

SEQ ID NO: 2233950 - RNA, 19 nt, Artificial Sequence
  Description of Artificial Sequence: Synthetic oligonucleotide
  Sense strand starting at position 3729 of SEQ ID NO: 1884019
ggagcuugguuucuagagu

SEQ ID NO: 2233951 - RNA, 19 nt, Artificial Sequence
  Description of Artificial Sequence: Synthetic oligonucleotide
  Antisense strand to SEQ ID NO: 2233950
acucuagaaaccaagcucc

SEQ ID NO: 2233952 - RNA, 19 nt, Artificial Sequence
  Description of Artificial Sequence: Synthetic oligonucleotide
  Sense strand starting at position 3862 of SEQ ID NO: 1884019
ggcugcuguguuggacaga

SEQ ID NO: 2233953 - RNA, 19 nt, Artificial Sequence
  Description of Artificial Sequence: Synthetic oligonucleotide
  Antisense strand to SEQ ID NO: 2233952
ucuguccaacacagcagcc

SEQ ID NO: 2233954 - RNA, 19 nt, Artificial Sequence
  Description of Artificial Sequence: Synthetic oligonucleotide
  Sense strand starting at position 3947 of SEQ ID NO: 1884019
ugcgaugugaucugacaga

SEQ ID NO: 2233955 - RNA, 19 nt, Artificial Sequence
  Description of Artificial Sequence: Synthetic oligonucleotide
  Antisense strand to SEQ ID NO: 2233954
ucugucagaucacaucgca

SEQ ID NO: 2233956 - RNA, 19 nt, Artificial Sequence
  Description of Artificial Sequence: Synthetic oligonucleotide
  Sense strand starting at position 350 of SEQ ID NO: 1884020
agcagcuuacaguaaucau

SEQ ID NO: 2233957 - RNA, 19 nt, Artificial Sequence
  Description of Artificial Sequence: Synthetic oligonucleotide
  Antisense strand to SEQ ID NO: 2233956
augauuacuguaagcugcu

SEQ ID NO: 2233958 - RNA, 19 nt, Artificial Sequence
  Description of Artificial Sequence: Synthetic oligonucleotide
  Sense strand starting at position 515 of SEQ ID NO: 1884020
aagucugaggauugucaga

SEQ ID NO: 2233959 - RNA, 19 nt, Artificial Sequence
  Description of Artificial Sequence: Synthetic oligonucleotide
  Antisense strand to SEQ ID NO: 2233958
ucugacaauccucagacuu

SEQ ID NO: 2233960 - RNA, 19 nt, Artificial Sequence
  Description of Artificial Sequence: Synthetic oligonucleotide
  Sense strand starting at position 517 of SEQ ID NO: 1884020
gucugaggauugucagaaa

SEQ ID NO: 2233961 - RNA, 19 nt, Artificial Sequence
  Description of Artificial Sequence: Synthetic oligonucleotide
  Antisense strand to SEQ ID NO: 2233960
uuucugacaauccucagac

SEQ ID NO: 2233962 - RNA, 19 nt, Artificial Sequence
  Description of Artificial Sequence: Synthetic oligonucleotide
  Sense strand starting at position 785 of SEQ ID NO: 1884020
gacgauuguguguacccaa

SEQ ID NO: 2233963 - RNA, 19 nt, Artificial Sequence
  Description of Artificial Sequence: Synthetic oligonucleotide
  Antisense strand to SEQ ID NO: 2233962
uuggguacacacaaucguc

SEQ ID NO: 2233964 - RNA, 19 nt, Artificial Sequence
  Description of Artificial Sequence: Synthetic oligonucleotide
  Sense strand starting at position 788 of SEQ ID NO: 1884020
gauuguguguacccaauuu

SEQ ID NO: 2233965 - RNA, 19 nt, Artificial Sequence
  Description of Artificial Sequence: Synthetic oligonucleotide
  Antisense strand to SEQ ID NO: 2233964
aaauuggguacacacaauc

SEQ ID NO: 2233966 - RNA, 19 nt, Artificial Sequence
  Description of Artificial Sequence: Synthetic oligonucleotide
  Sense strand starting at position 871 of SEQ ID NO: 1884020
ugggauaauuagcuuucuu

SEQ ID NO: 2233967 - RNA, 19 nt, Artificial Sequence
  Description of Artificial Sequence: Synthetic oligonucleotide
  Antisense strand to SEQ ID NO: 2233966
aagaaagcuaauuauccca

SEQ ID NO: 2233968 - RNA, 19 nt, Artificial Sequence
  Description of Artificial Sequence: Synthetic oligonucleotide
  Sense strand starting at position 927 of SEQ ID NO: 1884020
agggcauagcuccauuauc

SEQ ID NO: 2233969 - RNA, 19 nt, Artificial Sequence
  Description of Artificial Sequence: Synthetic oligonucleotide
  Antisense strand to SEQ ID NO: 2233968
gauaauggagcuaugcccu

SEQ ID NO: 2233970 - RNA, 19 nt, Artificial Sequence
  Description of Artificial Sequence: Synthetic oligonucleotide
  Sense strand starting at position 976 of SEQ ID NO: 1884020
cuuggacacuuuguguaaa

SEQ ID NO: 2233971 - RNA, 19 nt, Artificial Sequence
  Description of Artificial Sequence: Synthetic oligonucleotide
  Antisense strand to SEQ ID NO: 2233970
uuuacacaaaguguccaag

SEQ ID NO: 2233972 - RNA, 19 nt, Artificial Sequence
  Description of Artificial Sequence: Synthetic oligonucleotide
  Sense strand starting at position 978 of SEQ ID NO: 1884020
uggacacuuuguguaaauu

SEQ ID NO: 2233973 - RNA, 19 nt, Artificial Sequence
  Description of Artificial Sequence: Synthetic oligonucleotide
  Antisense strand to SEQ ID NO: 2233972
aauuuacacaaagugucca

SEQ ID NO: 2233974 - RNA, 19 nt, Artificial Sequence
  Description of Artificial Sequence: Synthetic oligonucleotide
  Sense strand starting at position 979 of SEQ ID NO: 1884020
ggacacuuuguguaaauua

SEQ ID NO: 2233975 - RNA, 19 nt, Artificial Sequence
  Description of Artificial Sequence: Synthetic oligonucleotide
  Antisense strand to SEQ ID NO: 2233974
uaauuuacacaaagugucc

SEQ ID NO: 2233976 - RNA, 19 nt, Artificial Sequence
  Description of Artificial Sequence: Synthetic oligonucleotide
  Sense strand starting at position 1133 of SEQ ID NO: 1884020
gccacagugagaugacuaa

SEQ ID NO: 2233977 - RNA, 19 nt, Artificial Sequence
  Description of Artificial Sequence: Synthetic oligonucleotide
  Antisense strand to SEQ ID NO: 2233976
uuagucaucucacuguggc

SEQ ID NO: 2233978 - RNA, 19 nt, Artificial Sequence
  Description of Artificial Sequence: Synthetic oligonucleotide
  Sense strand starting at position 1249 of SEQ ID NO: 1884020
agaguuacuuaccuauaag

SEQ ID NO: 2233979 - RNA, 19 nt, Artificial Sequence
  Description of Artificial Sequence: Synthetic oligonucleotide
  Antisense strand to SEQ ID NO: 2233978
cuuauagguaaguaacucu

SEQ ID NO: 2233980 - RNA, 19 nt, Artificial Sequence
  Description of Artificial Sequence: Synthetic oligonucleotide
  Sense strand starting at position 1252 of SEQ ID NO: 1884020
guuacuuaccuauaaguag

SEQ ID NO: 2233981 - RNA, 19 nt, Artificial Sequence
  Description of Artificial Sequence: Synthetic oligonucleotide
  Antisense strand to SEQ ID NO: 2233980
cuacuuauagguaaguaac

SEQ ID NO: 2233982 - RNA, 19 nt, Artificial Sequence
  Description of Artificial Sequence: Synthetic oligonucleotide
  Sense strand starting at position 1941 of SEQ ID NO: 1884020
gggugcuuaccucauuugu

SEQ ID NO: 2233983 - RNA, 19 nt, Artificial Sequence
  Description of Artificial Sequence: Synthetic oligonucleotide
  Antisense strand to SEQ ID NO: 2233982
acaaaugagguaagcaccc

SEQ ID NO: 2233984 - RNA, 19 nt, Artificial Sequence
  Description of Artificial Sequence: Synthetic oligonucleotide
  Sense strand starting at position 1943 of SEQ ID NO: 1884020
gugcuuaccucauuugucu

SEQ ID NO: 2233985 - RNA, 19 nt, Artificial Sequence
  Description of Artificial Sequence: Synthetic oligonucleotide
  Antisense strand to SEQ ID NO: 2233984
agacaaaugagguaagcac

SEQ ID NO: 2233986 - RNA, 19 nt, Artificial Sequence
  Description of Artificial Sequence: Synthetic oligonucleotide
  Sense strand starting at position 2006 of SEQ ID NO: 1884020
uucucuaaaguugagugau

SEQ ID NO: 2233987 - RNA, 19 nt, Artificial Sequence
  Description of Artificial Sequence: Synthetic oligonucleotide
  Antisense strand to SEQ ID NO: 2233986
aucacucaacuuuagagaa

SEQ ID NO: 2233988 - RNA, 19 nt, Artificial Sequence
  Description of Artificial Sequence: Synthetic oligonucleotide
  Sense strand starting at position 2359 of SEQ ID NO: 1884020
aucuaaacucugggagguu

SEQ ID NO: 2233989 - RNA, 19 nt, Artificial Sequence
  Description of Artificial Sequence: Synthetic oligonucleotide
  Antisense strand to SEQ ID NO: 2233988
aaccucccagaguuuagau

SEQ ID NO: 2233990 - RNA, 19 nt, Artificial Sequence
  Description of Artificial Sequence: Synthetic oligonucleotide
  Sense strand starting at position 2378 of SEQ ID NO: 1884020
aaguaacuugccugggaga

SEQ ID NO: 2233991 - RNA, 19 nt, Artificial Sequence
  Description of Artificial Sequence: Synthetic oligonucleotide
  Antisense strand to SEQ ID NO: 2233990
ucucccaggcaaguuacuu

SEQ ID NO: 2233992 - RNA, 19 nt, Artificial Sequence
  Description of Artificial Sequence: Synthetic oligonucleotide
  Sense strand starting at position 2379 of SEQ ID NO: 1884020
aguaacuugccugggagaa

SEQ ID NO: 2233993 - RNA, 19 nt, Artificial Sequence
  Description of Artificial Sequence: Synthetic oligonucleotide
  Antisense strand to SEQ ID NO: 2233992
uucucccaggcaaguuacu

SEQ ID NO: 2233994 - RNA, 19 nt, Artificial Sequence
  Description of Artificial Sequence: Synthetic oligonucleotide
  Sense strand starting at position 2380 of SEQ ID NO: 1884020
guaacuugccugggagaaa

SEQ ID NO: 2233995 - RNA, 19 nt, Artificial Sequence
  Description of Artificial Sequence: Synthetic oligonucleotide
  Antisense strand to SEQ ID NO: 2233994
uuucucccaggcaaguuac

SEQ ID NO: 2233996 - RNA, 19 nt, Artificial Sequence
  Description of Artificial Sequence: Synthetic oligonucleotide
  Sense strand starting at position 2516 of SEQ ID NO: 1884020
cuccuuagagauggauuau

SEQ ID NO: 2233997 - RNA, 19 nt, Artificial Sequence
  Description of Artificial Sequence: Synthetic oligonucleotide
  Antisense strand to SEQ ID NO: 2233996
auaauccaucucuaaggag

SEQ ID NO: 2233998 - RNA, 19 nt, Artificial Sequence
  Description of Artificial Sequence: Synthetic oligonucleotide
  Sense strand starting at position 2526 of SEQ ID NO: 1884020
auggauuauuuccaaaggu

SEQ ID NO: 2233999 - RNA, 19 nt, Artificial Sequence
  Description of Artificial Sequence: Synthetic oligonucleotide
  Antisense strand to SEQ ID NO: 2233998
accuuuggaaauaauccau

SEQ ID NO: 2234000 - RNA, 19 nt, Artificial Sequence
  Description of Artificial Sequence: Synthetic oligonucleotide
  Sense strand starting at position 2656 of SEQ ID NO: 1884020
uuugcuugaggagaguuua

SEQ ID NO: 2234001 - RNA, 19 nt, Artificial Sequence
  Description of Artificial Sequence: Synthetic oligonucleotide
  Antisense strand to SEQ ID NO: 2234000
uaaacucuccucaagcaaa

SEQ ID NO: 2234002 - RNA, 19 nt, Artificial Sequence
  Description of Artificial Sequence: Synthetic oligonucleotide
  Sense strand starting at position 2741 of SEQ ID NO: 1884020
uccagucuaugguuaagaa

SEQ ID NO: 2234003 - RNA, 19 nt, Artificial Sequence
  Description of Artificial Sequence: Synthetic oligonucleotide
  Antisense strand to SEQ ID NO: 2234002
uucuuaaccauagacugga

SEQ ID NO: 2234004 - RNA, 19 nt, Artificial Sequence
  Description of Artificial Sequence: Synthetic oligonucleotide
  Sense strand starting at position 2860 of SEQ ID NO: 1884020
ggucacuuacagcauuaca

SEQ ID NO: 2234005 - RNA, 19 nt, Artificial Sequence
  Description of Artificial Sequence: Synthetic oligonucleotide
  Antisense strand to SEQ ID NO: 2234004
uguaaugcuguaagugacc

SEQ ID NO: 2234006 - RNA, 19 nt, Artificial Sequence
  Description of Artificial Sequence: Synthetic oligonucleotide
  Sense strand starting at position 2896 of SEQ ID NO: 1884020
uggcaaaucccaugugaua

SEQ ID NO: 2234007 - RNA, 19 nt, Artificial Sequence
  Description of Artificial Sequence: Synthetic oligonucleotide
  Antisense strand to SEQ ID NO: 2234006
uaucacaugggauuugcca

SEQ ID NO: 2234008 - RNA, 19 nt, Artificial Sequence
  Description of Artificial Sequence: Synthetic oligonucleotide
  Sense strand starting at position 2995 of SEQ ID NO: 1884020
uugagcagccuacaauuaa

SEQ ID NO: 2234009 - RNA, 19 nt, Artificial Sequence
  Description of Artificial Sequence: Synthetic oligonucleotide
  Antisense strand to SEQ ID NO: 2234008
uuaauuguaggcugcucaa

SEQ ID NO: 2234010 - RNA, 19 nt, Artificial Sequence
  Description of Artificial Sequence: Synthetic oligonucleotide
  Sense strand starting at position 3036 of SEQ ID NO: 1884020
ccagauggauagcucuuaa

SEQ ID NO: 2234011 - RNA, 19 nt, Artificial Sequence
  Description of Artificial Sequence: Synthetic oligonucleotide
  Antisense strand to SEQ ID NO: 2234010
uuaagagcuauccaucugg

SEQ ID NO: 2234012 - RNA, 19 nt, Artificial Sequence
  Description of Artificial Sequence: Synthetic oligonucleotide
  Sense strand starting at position 3066 of SEQ ID NO: 1884020
acgcaaagugcuuuauguu

SEQ ID NO: 2234013 - RNA, 19 nt, Artificial Sequence
  Description of Artificial Sequence: Synthetic oligonucleotide
  Antisense strand to SEQ ID NO: 2234012
aacauaaagcacuuugcgu

SEQ ID NO: 2234014 - RNA, 19 nt, Artificial Sequence
  Description of Artificial Sequence: Synthetic oligonucleotide
  Sense strand starting at position 3127 of SEQ ID NO: 1884020
gcaucuucucuggaacaca

SEQ ID NO: 2234015 - RNA, 19 nt, Artificial Sequence
  Description of Artificial Sequence: Synthetic oligonucleotide
  Antisense strand to SEQ ID NO: 2234014
uguguuccagagaagaugc

SEQ ID NO: 2234016 - RNA, 19 nt, Artificial Sequence
  Description of Artificial Sequence: Synthetic oligonucleotide
  Sense strand starting at position 3469 of SEQ ID NO: 1884020
agaagauauuuagggacca

SEQ ID NO: 2234017 - RNA, 19 nt, Artificial Sequence
  Description of Artificial Sequence: Synthetic oligonucleotide
  Antisense strand to SEQ ID NO: 2234016
uggucccuaaauaucuucu

SEQ ID NO: 2234018 - RNA, 19 nt, Artificial Sequence
  Description of Artificial Sequence: Synthetic oligonucleotide
  Sense strand starting at position 3495 of SEQ ID NO: 1884020
guuccuggugaccaucaaa

SEQ ID NO: 2234019 - RNA, 19 nt, Artificial Sequence
  Description of Artificial Sequence: Synthetic oligonucleotide
  Antisense strand to SEQ ID NO: 2234018
uuugauggucaccaggaac

SEQ ID NO: 2234020 - RNA, 19 nt, Artificial Sequence
  Description of Artificial Sequence: Synthetic oligonucleotide
  Sense strand starting at position 3525 of SEQ ID NO: 1884020
ggcucaaaguucucaauug

SEQ ID NO: 2234021 - RNA, 19 nt, Artificial Sequence
  Description of Artificial Sequence: Synthetic oligonucleotide
  Antisense strand to SEQ ID NO: 2234020
caauugagaacuuugagcc

SEQ ID NO: 2234022 - RNA, 19 nt, Artificial Sequence
  Description of Artificial Sequence: Synthetic oligonucleotide
  Sense strand starting at position 3563 of SEQ ID NO: 1884020
agaacuguugaaugccaua

SEQ ID NO: 2234023 - RNA, 19 nt, Artificial Sequence
  Description of Artificial Sequence: Synthetic oligonucleotide
  Antisense strand to SEQ ID NO: 2234022
uauggcauucaacaguucu

SEQ ID NO: 2234024 - RNA, 19 nt, Artificial Sequence
  Description of Artificial Sequence: Synthetic oligonucleotide
  Sense strand starting at position 3568 of SEQ ID NO: 1884020
uguugaaugccauauggaa

SEQ ID NO: 2234025 - RNA, 19 nt, Artificial Sequence
  Description of Artificial Sequence: Synthetic oligonucleotide
  Antisense strand to SEQ ID NO: 2234024
uuccauauggcauucaaca

SEQ ID NO: 2234026 - RNA, 19 nt, Artificial Sequence
  Description of Artificial Sequence: Synthetic oligonucleotide
  Sense strand starting at position 3848 of SEQ ID NO: 1884020
ggaguuaggugauccuaga

SEQ ID NO: 2234027 - RNA, 19 nt, Artificial Sequence
  Description of Artificial Sequence: Synthetic oligonucleotide
  Antisense strand to SEQ ID NO: 2234026
ucuaggaucaccuaacucc

SEQ ID NO: 2234028 - RNA, 19 nt, Artificial Sequence
  Description of Artificial Sequence: Synthetic oligonucleotide
  Sense strand starting at position 3895 of SEQ ID NO: 1884020
cuaugcaaucaugagcaca

SEQ ID NO: 2234029 - RNA, 19 nt, Artificial Sequence
  Description of Artificial Sequence: Synthetic oligonucleotide
  Antisense strand to SEQ ID NO: 2234028
ugugcucaugauugcauag

SEQ ID NO: 2234030 - RNA, 19 nt, Artificial Sequence
  Description of Artificial Sequence: Synthetic oligonucleotide
  Sense strand starting at position 3897 of SEQ ID NO: 1884020
augcaaucaugagcacaua

SEQ ID NO: 2234031 - RNA, 19 nt, Artificial Sequence
  Description of Artificial Sequence: Synthetic oligonucleotide
  Antisense strand to SEQ ID NO: 2234030
uaugugcucaugauugcau

SEQ ID NO: 2234032 - RNA, 19 nt, Artificial Sequence
  Description of Artificial Sequence: Synthetic oligonucleotide
  Sense strand starting at position 3898 of SEQ ID NO: 1884020
ugcaaucaugagcacauaa

SEQ ID NO: 2234033 - RNA, 19 nt, Artificial Sequence
  Description of Artificial Sequence: Synthetic oligonucleotide
  Antisense strand to SEQ ID NO: 2234032
uuaugugcucaugauugca

SEQ ID NO: 2234034 - RNA, 19 nt, Artificial Sequence
  Description of Artificial Sequence: Synthetic oligonucleotide
  Sense strand starting at position 3969 of SEQ ID NO: 1884020
cacacaugguugucaugaa

SEQ ID NO: 2234035 - RNA, 19 nt, Artificial Sequence
  Description of Artificial Sequence: Synthetic oligonucleotide
  Antisense strand to SEQ ID NO: 2234034
uucaugacaaccaugugug

SEQ ID NO: 2234036 - RNA, 19 nt, Artificial Sequence
  Description of Artificial Sequence: Synthetic oligonucleotide
  Sense strand starting at position 262 of SEQ ID NO: 1884021
aguacugaaccaugaguaa

SEQ ID NO: 2234037 - RNA, 19 nt, Artificial Sequence
  Description of Artificial Sequence: Synthetic oligonucleotide
  Antisense strand to SEQ ID NO: 2234036
uuacucaugguucaguacu

SEQ ID NO: 2234038 - RNA, 19 nt, Artificial Sequence
  Description of Artificial Sequence: Synthetic oligonucleotide
  Sense strand starting at position 457 of SEQ ID NO: 1884021
cugucuuauccagacacac

SEQ ID NO: 2234039 - RNA, 19 nt, Artificial Sequence
  Description of Artificial Sequence: Synthetic oligonucleotide
  Antisense strand to SEQ ID NO: 2234038
gugugucuggauaagacag

SEQ ID NO: 2234040 - RNA, 19 nt, Artificial Sequence
  Description of Artificial Sequence: Synthetic oligonucleotide
  Sense strand starting at position 567 of SEQ ID NO: 1884021
agcacauacguuuauggaa

SEQ ID NO: 2234041 - RNA, 19 nt, Artificial Sequence
  Description of Artificial Sequence: Synthetic oligonucleotide
  Antisense strand to SEQ ID NO: 2234040
uuccauaaacguaugugcu

SEQ ID NO: 2234042 - RNA, 19 nt, Artificial Sequence
  Description of Artificial Sequence: Synthetic oligonucleotide
  Sense strand starting at position 575 of SEQ ID NO: 1884021
cguuuauggaaauaauagu

SEQ ID NO: 2234043 - RNA, 19 nt, Artificial Sequence
  Description of Artificial Sequence: Synthetic oligonucleotide
  Antisense strand to SEQ ID NO: 2234042
acuauuauuuccauaaacg

SEQ ID NO: 2234044 - RNA, 19 nt, Artificial Sequence
  Description of Artificial Sequence: Synthetic oligonucleotide
  Sense strand starting at position 623 of SEQ ID NO: 1884021
cucaucaucgcugaucuua

SEQ ID NO: 2234045 - RNA, 19 nt, Artificial Sequence
  Description of Artificial Sequence: Synthetic oligonucleotide
  Antisense strand to SEQ ID NO: 2234044
uaagaucagcgaugaugag

SEQ ID NO: 2234046 - RNA, 19 nt, Artificial Sequence
  Description of Artificial Sequence: Synthetic oligonucleotide
  Sense strand starting at position 634 of SEQ ID NO: 1884021
ugaucuuagcuguagacuu

SEQ ID NO: 2234047 - RNA, 19 nt, Artificial Sequence
  Description of Artificial Sequence: Synthetic oligonucleotide
  Antisense strand to SEQ ID NO: 2234046
aagucuacagcuaagauca

SEQ ID NO: 2234048 - RNA, 19 nt, Artificial Sequence
  Description of Artificial Sequence: Synthetic oligonucleotide
  Sense strand starting at position 636 of SEQ ID NO: 1884021
aucuuagcuguagacuuaa

SEQ ID NO: 2234049 - RNA, 19 nt, Artificial Sequence
  Description of Artificial Sequence: Synthetic oligonucleotide
  Antisense strand to SEQ ID NO: 2234048
uuaagucuacagcuaagau

SEQ ID NO: 2234050 - RNA, 19 nt, Artificial Sequence
  Description of Artificial Sequence: Synthetic oligonucleotide
  Sense strand starting at position 649 of SEQ ID NO: 1884021
acuuaaugucuugauugcu

SEQ ID NO: 2234051 - RNA, 19 nt, Artificial Sequence
  Description of Artificial Sequence: Synthetic oligonucleotide
  Antisense strand to SEQ ID NO: 2234050
agcaaucaagacauuaagu

SEQ ID NO: 2234052 - RNA, 19 nt, Artificial Sequence
  Description of Artificial Sequence: Synthetic oligonucleotide
  Sense strand starting at position 654 of SEQ ID NO: 1884021
augucuugauugcuaacaa

SEQ ID NO: 2234053 - RNA, 19 nt, Artificial Sequence
  Description of Artificial Sequence: Synthetic oligonucleotide
  Antisense strand to SEQ ID NO: 2234052
uuguuagcaaucaagacau

SEQ ID NO: 2234054 - RNA, 19 nt, Artificial Sequence
  Description of Artificial Sequence: Synthetic oligonucleotide
  Sense strand starting at position 699 of SEQ ID NO: 1884021
ucagcauuugcaugguuua

SEQ ID NO: 2234055 - RNA, 19 nt, Artificial Sequence
  Description of Artificial Sequence: Synthetic oligonucleotide
  Antisense strand to SEQ ID NO: 2234054
uaaaccaugcaaaugcuga

SEQ ID NO: 2234056 - RNA, 19 nt, Artificial Sequence
  Description of Artificial Sequence: Synthetic oligonucleotide
  Sense strand starting at position 829 of SEQ ID NO: 1884021
ggaaacaaaugagagauaa

SEQ ID NO: 2234057 - RNA, 19 nt, Artificial Sequence
  Description of Artificial Sequence: Synthetic oligonucleotide
  Antisense strand to SEQ ID NO: 2234056
uuaucucucauuuguuucc

SEQ ID NO: 2234058 - RNA, 19 nt, Artificial Sequence
  Description of Artificial Sequence: Synthetic oligonucleotide
  Sense strand starting at position 840 of SEQ ID NO: 1884021
agagauaauuaggaagauu

SEQ ID NO: 2234059 - RNA, 19 nt, Artificial Sequence
  Description of Artificial Sequence: Synthetic oligonucleotide
  Antisense strand to SEQ ID NO: 2234058
aaucuuccuaauuaucucu

SEQ ID NO: 2234060 - RNA, 19 nt, Artificial Sequence
  Description of Artificial Sequence: Synthetic oligonucleotide
  Sense strand starting at position 903 of SEQ ID NO: 1884021
agucacugucacuauacuu

SEQ ID NO: 2234061 - RNA, 19 nt, Artificial Sequence
  Description of Artificial Sequence: Synthetic oligonucleotide
  Antisense strand to SEQ ID NO: 2234060
aaguauagugacagugacu

SEQ ID NO: 2234062 - RNA, 19 nt, Artificial Sequence
  Description of Artificial Sequence: Synthetic oligonucleotide
  Sense strand starting at position 1013 of SEQ ID NO: 1884021
uugaguacuuucuuaggau

SEQ ID NO: 2234063 - RNA, 19 nt, Artificial Sequence
  Description of Artificial Sequence: Synthetic oligonucleotide
  Antisense strand to SEQ ID NO: 2234062
auccuaagaaaguacucaa

SEQ ID NO: 2234064 - RNA, 19 nt, Artificial Sequence
  Description of Artificial Sequence: Synthetic oligonucleotide
  Sense strand starting at position 1172 of SEQ ID NO: 1884021
agcagaaagcuauauuagu

SEQ ID NO: 2234065 - RNA, 19 nt, Artificial Sequence
  Description of Artificial Sequence: Synthetic oligonucleotide
  Antisense strand to SEQ ID NO: 2234064
acuaauauagcuuucugcu

SEQ ID NO: 2234066 - RNA, 19 nt, Artificial Sequence
  Description of Artificial Sequence: Synthetic oligonucleotide
  Sense strand starting at position 1189 of SEQ ID NO: 1884021
gucuguggucuugaagaag

SEQ ID NO: 2234067 - RNA, 19 nt, Artificial Sequence
  Description of Artificial Sequence: Synthetic oligonucleotide
  Antisense strand to SEQ ID NO: 2234066
cuucuucaagaccacagac

SEQ ID NO: 2234068 - RNA, 19 nt, Artificial Sequence
  Description of Artificial Sequence: Synthetic oligonucleotide
  Sense strand starting at position 1532 of SEQ ID NO: 1884021
cuuugaaaucacuggaauu

SEQ ID NO: 2234069 - RNA, 19 nt, Artificial Sequence
  Description of Artificial Sequence: Synthetic oligonucleotide
  Antisense strand to SEQ ID NO: 2234068
aauuccagugauuucaaag

SEQ ID NO: 2234070 - RNA, 19 nt, Artificial Sequence
  Description of Artificial Sequence: Synthetic oligonucleotide
  Sense strand starting at position 1545 of SEQ ID NO: 1884021
ggaauucuauuuggagaga

SEQ ID NO: 2234071 - RNA, 19 nt, Artificial Sequence
  Description of Artificial Sequence: Synthetic oligonucleotide
  Antisense strand to SEQ ID NO: 2234070
ucucuccaaauagaauucc

SEQ ID NO: 2234072 - RNA, 19 nt, Artificial Sequence
  Description of Artificial Sequence: Synthetic oligonucleotide
  Sense strand starting at position 1729 of SEQ ID NO: 1884021
agagaugcugcagggaaua

SEQ ID NO: 2234073 - RNA, 19 nt, Artificial Sequence
  Description of Artificial Sequence: Synthetic oligonucleotide
  Antisense strand to SEQ ID NO: 2234072
uauucccugcagcaucucu

SEQ ID NO: 2234074 - RNA, 19 nt, Artificial Sequence
  Description of Artificial Sequence: Synthetic oligonucleotide
  Sense strand starting at position 1756 of SEQ ID NO: 1884021
gcuuuaugagucuaaguga

SEQ ID NO: 2234075 - RNA, 19 nt, Artificial Sequence
  Description of Artificial Sequence: Synthetic oligonucleotide
  Antisense strand to SEQ ID NO: 2234074
ucacuuagacucauaaagc

SEQ ID NO: 2234076 - RNA, 19 nt, Artificial Sequence
  Description of Artificial Sequence: Synthetic oligonucleotide
  Sense strand starting at position 1759 of SEQ ID NO: 1884021
uuaugagucuaagugaauu

SEQ ID NO: 2234077 - RNA, 19 nt, Artificial Sequence
  Description of Artificial Sequence: Synthetic oligonucleotide
  Antisense strand to SEQ ID NO: 2234076
aauucacuuagacucauaa

SEQ ID NO: 2234078 - RNA, 19 nt, Artificial Sequence
  Description of Artificial Sequence: Synthetic oligonucleotide
  Sense strand starting at position 1788 of SEQ ID NO: 1884021
auguucucccucuaucaga

SEQ ID NO: 2234079 - RNA, 19 nt, Artificial Sequence
  Description of Artificial Sequence: Synthetic oligonucleotide
  Antisense strand to SEQ ID NO: 2234078
ucugauagagggagaacau

SEQ ID NO: 2234080 - RNA, 19 nt, Artificial Sequence
  Description of Artificial Sequence: Synthetic oligonucleotide
  Sense strand starting at position 2003 of SEQ ID NO: 1884021
acuggucuguuauuaauaa

SEQ ID NO: 2234081 - RNA, 19 nt, Artificial Sequence
  Description of Artificial Sequence: Synthetic oligonucleotide
  Antisense strand to SEQ ID NO: 2234080
uuauuaauaacagaccagu

SEQ ID NO: 2234082 - RNA, 19 nt, Artificial Sequence
  Description of Artificial Sequence: Synthetic oligonucleotide
  Sense strand starting at position 2024 of SEQ ID NO: 1884021
ggcuuagagcuuuaugaag

SEQ ID NO: 2234083 - RNA, 19 nt, Artificial Sequence
  Description of Artificial Sequence: Synthetic oligonucleotide
  Antisense strand to SEQ ID NO: 2234082
cuucauaaagcucuaagcc

SEQ ID NO: 2234084 - RNA, 19 nt, Artificial Sequence
  Description of Artificial Sequence: Synthetic oligonucleotide
  Sense strand starting at position 2163 of SEQ ID NO: 1884021
ggagaucaguuccuccaca

SEQ ID NO: 2234085 - RNA, 19 nt, Artificial Sequence
  Description of Artificial Sequence: Synthetic oligonucleotide
  Antisense strand to SEQ ID NO: 2234084
uguggaggaacugaucucc

SEQ ID NO: 2234086 - RNA, 19 nt, Artificial Sequence
  Description of Artificial Sequence: Synthetic oligonucleotide
  Sense strand starting at position 2235 of SEQ ID NO: 1884021
ccugaaugucggcagggaa

SEQ ID NO: 2234087 - RNA, 19 nt, Artificial Sequence
  Description of Artificial Sequence: Synthetic oligonucleotide
  Antisense strand to SEQ ID NO: 2234086
uucccugccgacauucagg

SEQ ID NO: 2234088 - RNA, 19 nt, Artificial Sequence
  Description of Artificial Sequence: Synthetic oligonucleotide
  Sense strand starting at position 2559 of SEQ ID NO: 1884021
uguuuauauugacuccuca

SEQ ID NO: 2234089 - RNA, 19 nt, Artificial Sequence
  Description of Artificial Sequence: Synthetic oligonucleotide
  Antisense strand to SEQ ID NO: 2234088
ugaggagucaauauaaaca

SEQ ID NO: 2234090 - RNA, 19 nt, Artificial Sequence
  Description of Artificial Sequence: Synthetic oligonucleotide
  Sense strand starting at position 2726 of SEQ ID NO: 1884021
ggaucuugggauuguauca

SEQ ID NO: 2234091 - RNA, 19 nt, Artificial Sequence
  Description of Artificial Sequence: Synthetic oligonucleotide
  Antisense strand to SEQ ID NO: 2234090
ugauacaaucccaagaucc

SEQ ID NO: 2234092 - RNA, 19 nt, Artificial Sequence
  Description of Artificial Sequence: Synthetic oligonucleotide
  Sense strand starting at position 2771 of SEQ ID NO: 1884021
agguguaaucaucacuuua

SEQ ID NO: 2234093 - RNA, 19 nt, Artificial Sequence
  Description of Artificial Sequence: Synthetic oligonucleotide
  Antisense strand to SEQ ID NO: 2234092
uaaagugaugauuacaccu

SEQ ID NO: 2234094 - RNA, 19 nt, Artificial Sequence
  Description of Artificial Sequence: Synthetic oligonucleotide
  Sense strand starting at position 2876 of SEQ ID NO: 1884021
ggcaucaaauuguuuauaa

SEQ ID NO: 2234095 - RNA, 19 nt, Artificial Sequence
  Description of Artificial Sequence: Synthetic oligonucleotide
  Antisense strand to SEQ ID NO: 2234094
uuauaaacaauuugaugcc

SEQ ID NO: 2234096 - RNA, 19 nt, Artificial Sequence
  Description of Artificial Sequence: Synthetic oligonucleotide
  Sense strand starting at position 2900 of SEQ ID NO: 1884021
acaguaugucuuuauaccu

SEQ ID NO: 2234097 - RNA, 19 nt, Artificial Sequence
  Description of Artificial Sequence: Synthetic oligonucleotide
  Antisense strand to SEQ ID NO: 2234096
agguauaaagacauacugu

SEQ ID NO: 2234098 - RNA, 19 nt, Artificial Sequence
  Description of Artificial Sequence: Synthetic oligonucleotide
  Sense strand starting at position 2929 of SEQ ID NO: 1884021
aacacugguucugucugaa

SEQ ID NO: 2234099 - RNA, 19 nt, Artificial Sequence
  Description of Artificial Sequence: Synthetic oligonucleotide
  Antisense strand to SEQ ID NO: 2234098
uucagacagaaccaguguu

SEQ ID NO: 2234100 - RNA, 19 nt, Artificial Sequence
  Description of Artificial Sequence: Synthetic oligonucleotide
  Sense strand starting at position 3726 of SEQ ID NO: 1884021
guggauaccucacuacaaa

SEQ ID NO: 2234101 - RNA, 19 nt, Artificial Sequence
  Description of Artificial Sequence: Synthetic oligonucleotide
  Antisense strand to SEQ ID NO: 2234100
uuuguagugagguauccac

SEQ ID NO: 2234102 - RNA, 19 nt, Artificial Sequence
  Description of Artificial Sequence: Synthetic oligonucleotide
  Sense strand starting at position 3748 of SEQ ID NO: 1884021
cacccaguggaauguuauu

SEQ ID NO: 2234103 - RNA, 19 nt, Artificial Sequence
  Description of Artificial Sequence: Synthetic oligonucleotide
  Antisense strand to SEQ ID NO: 2234102
aauaacauuccacugggug

SEQ ID NO: 2234104 - RNA, 19 nt, Artificial Sequence
  Description of Artificial Sequence: Synthetic oligonucleotide
  Sense strand starting at position 3753 of SEQ ID NO: 1884021
aguggaauguuauucuacu

SEQ ID NO: 2234105 - RNA, 19 nt, Artificial Sequence
  Description of Artificial Sequence: Synthetic oligonucleotide
  Antisense strand to SEQ ID NO: 2234104
aguagaauaacauuccacu

SEQ ID NO: 2234106 - RNA, 19 nt, Artificial Sequence
  Description of Artificial Sequence: Synthetic oligonucleotide
  Sense strand starting at position 3754 of SEQ ID NO: 1884021
guggaauguuauucuacug

SEQ ID NO: 2234107 - RNA, 19 nt, Artificial Sequence
  Description of Artificial Sequence: Synthetic oligonucleotide
  Antisense strand to SEQ ID NO: 2234106
caguagaauaacauuccac

SEQ ID NO: 2234108 - RNA, 19 nt, Artificial Sequence
  Description of Artificial Sequence: Synthetic oligonucleotide
  Sense strand starting at position 3807 of SEQ ID NO: 1884021
ugacgcucaguuuaauaga

SEQ ID NO: 2234109 - RNA, 19 nt, Artificial Sequence
  Description of Artificial Sequence: Synthetic oligonucleotide
  Antisense strand to SEQ ID NO: 2234108
ucuauuaaacugagcguca

SEQ ID NO: 2234110 - RNA, 19 nt, Artificial Sequence
  Description of Artificial Sequence: Synthetic oligonucleotide
  Sense strand starting at position 3817 of SEQ ID NO: 1884021
uuuaauagaugggagagaa

SEQ ID NO: 2234111 - RNA, 19 nt, Artificial Sequence
  Description of Artificial Sequence: Synthetic oligonucleotide
  Antisense strand to SEQ ID NO: 2234110
uucucucccaucuauuaaa

SEQ ID NO: 2234112 - RNA, 19 nt, Artificial Sequence
  Description of Artificial Sequence: Synthetic oligonucleotide
  Sense strand starting at position 3835 of SEQ ID NO: 1884021
aggaguggaauagguauau

SEQ ID NO: 2234113 - RNA, 19 nt, Artificial Sequence
  Description of Artificial Sequence: Synthetic oligonucleotide
  Antisense strand to SEQ ID NO: 2234112
auauaccuauuccacuccu

SEQ ID NO: 2234114 - RNA, 19 nt, Artificial Sequence
  Description of Artificial Sequence: Synthetic oligonucleotide
  Sense strand starting at position 3895 of SEQ ID NO: 1884021
uugaguacccacugaauau

SEQ ID NO: 2234115 - RNA, 19 nt, Artificial Sequence
  Description of Artificial Sequence: Synthetic oligonucleotide
  Antisense strand to SEQ ID NO: 2234114
auauucaguggguacucaa

SEQ ID NO: 2234116 - RNA, 19 nt, Artificial Sequence
  Description of Artificial Sequence: Synthetic oligonucleotide
  Sense strand starting at position 64 of SEQ ID NO: 1884022
uugccacgucuccacuaaa

SEQ ID NO: 2234117 - RNA, 19 nt, Artificial Sequence
  Description of Artificial Sequence: Synthetic oligonucleotide
  Antisense strand to SEQ ID NO: 2234116
uuuaguggagacguggcaa

SEQ ID NO: 2234118 - RNA, 19 nt, Artificial Sequence
  Description of Artificial Sequence: Synthetic oligonucleotide
  Sense strand starting at position 239 of SEQ ID NO: 1884022
ccacuccaucagugagacu

SEQ ID NO: 2234119 - RNA, 19 nt, Artificial Sequence
  Description of Artificial Sequence: Synthetic oligonucleotide
  Antisense strand to SEQ ID NO: 2234118
agucucacugauggagugg

SEQ ID NO: 2234120 - RNA, 19 nt, Artificial Sequence
  Description of Artificial Sequence: Synthetic oligonucleotide
  Sense strand starting at position 653 of SEQ ID NO: 1884022
cuguucugugcaggagaau

SEQ ID NO: 2234121 - RNA, 19 nt, Artificial Sequence
  Description of Artificial Sequence: Synthetic oligonucleotide
  Antisense strand to SEQ ID NO: 2234120
auucuccugcacagaacag

SEQ ID NO: 2234122 - RNA, 19 nt, Artificial Sequence
  Description of Artificial Sequence: Synthetic oligonucleotide
  Sense strand starting at position 654 of SEQ ID NO: 1884022
uguucugugcaggagaauc

SEQ ID NO: 2234123 - RNA, 19 nt, Artificial Sequence
  Description of Artificial Sequence: Synthetic oligonucleotide
  Antisense strand to SEQ ID NO: 2234122
gauucuccugcacagaaca

SEQ ID NO: 2234124 - RNA, 19 nt, Artificial Sequence
  Description of Artificial Sequence: Synthetic oligonucleotide
  Sense strand starting at position 705 of SEQ ID NO: 1884022
gaaggcucuugguuacaaa

SEQ ID NO: 2234125 - RNA, 19 nt, Artificial Sequence
  Description of Artificial Sequence: Synthetic oligonucleotide
  Antisense strand to SEQ ID NO: 2234124
uuuguaaccaagagccuuc

SEQ ID NO: 2234126 - RNA, 19 nt, Artificial Sequence
  Description of Artificial Sequence: Synthetic oligonucleotide
  Sense strand starting at position 923 of SEQ ID NO: 1884022
aggguagaaagcuagucau

SEQ ID NO: 2234127 - RNA, 19 nt, Artificial Sequence
  Description of Artificial Sequence: Synthetic oligonucleotide
  Antisense strand to SEQ ID NO: 2234126
augacuagcuuucuacccu

SEQ ID NO: 2234128 - RNA, 19 nt, Artificial Sequence
  Description of Artificial Sequence: Synthetic oligonucleotide
  Sense strand starting at position 935 of SEQ ID NO: 1884022
uagucauucccgcuacgca

SEQ ID NO: 2234129 - RNA, 19 nt, Artificial Sequence
  Description of Artificial Sequence: Synthetic oligonucleotide
  Antisense strand to SEQ ID NO: 2234128
ugcguagcgggaaugacua

SEQ ID NO: 2234130 - RNA, 19 nt, Artificial Sequence
  Description of Artificial Sequence: Synthetic oligonucleotide
  Sense strand starting at position 977 of SEQ ID NO: 1884022
gccuguauuaacugggaag

SEQ ID NO: 2234131 - RNA, 19 nt, Artificial Sequence
  Description of Artificial Sequence: Synthetic oligonucleotide
  Antisense strand to SEQ ID NO: 2234130
cuucccaguuaauacaggc

SEQ ID NO: 2234132 - RNA, 19 nt, Artificial Sequence
  Description of Artificial Sequence: Synthetic oligonucleotide
  Sense strand starting at position 979 of SEQ ID NO: 1884022
cuguauuaacugggaagac

SEQ ID NO: 2234133 - RNA, 19 nt, Artificial Sequence
  Description of Artificial Sequence: Synthetic oligonucleotide
  Antisense strand to SEQ ID NO: 2234132
gucuucccaguuaauacag

SEQ ID NO: 2234134 - RNA, 19 nt, Artificial Sequence
  Description of Artificial Sequence: Synthetic oligonucleotide
  Sense strand starting at position 1019 of SEQ ID NO: 1884022
uguguagcucuagaagaaa

SEQ ID NO: 2234135 - RNA, 19 nt, Artificial Sequence
  Description of Artificial Sequence: Synthetic oligonucleotide
  Antisense strand to SEQ ID NO: 2234134
uuucuucuagagcuacaca

SEQ ID NO: 2234136 - RNA, 19 nt, Artificial Sequence
  Description of Artificial Sequence: Synthetic oligonucleotide
  Sense strand starting at position 1092 of SEQ ID NO: 1884022
cuuugaaauaaacgagguu

SEQ ID NO: 2234137 - RNA, 19 nt, Artificial Sequence
  Description of Artificial Sequence: Synthetic oligonucleotide
  Antisense strand to SEQ ID NO: 2234136
aaccucguuuauuucaaag

SEQ ID NO: 2234138 - RNA, 19 nt, Artificial Sequence
  Description of Artificial Sequence: Synthetic oligonucleotide
  Sense strand starting at position 1101 of SEQ ID NO: 1884022
aaacgagguuaaguaagaa

SEQ ID NO: 2234139 - RNA, 19 nt, Artificial Sequence
  Description of Artificial Sequence: Synthetic oligonucleotide
  Antisense strand to SEQ ID NO: 2234138
uucuuacuuaaccucguuu

SEQ ID NO: 2234140 - RNA, 19 nt, Artificial Sequence
  Description of Artificial Sequence: Synthetic oligonucleotide
  Sense strand starting at position 1184 of SEQ ID NO: 1884022
gcuccaauccugcaguacu

SEQ ID NO: 2234141 - RNA, 19 nt, Artificial Sequence
  Description of Artificial Sequence: Synthetic oligonucleotide
  Antisense strand to SEQ ID NO: 2234140
aguacugcaggauuggagc

SEQ ID NO: 2234142 - RNA, 19 nt, Artificial Sequence
  Description of Artificial Sequence: Synthetic oligonucleotide
  Sense strand starting at position 1515 of SEQ ID NO: 1884022
ggaacagucagguguagac

SEQ ID NO: 2234143 - RNA, 19 nt, Artificial Sequence
  Description of Artificial Sequence: Synthetic oligonucleotide
  Antisense strand to SEQ ID NO: 2234142
gucuacaccugacuguucc

SEQ ID NO: 2234144 - RNA, 19 nt, Artificial Sequence
  Description of Artificial Sequence: Synthetic oligonucleotide
  Sense strand starting at position 2120 of SEQ ID NO: 1884022
agaccagagucuucugaga

SEQ ID NO: 2234145 - RNA, 19 nt, Artificial Sequence
  Description of Artificial Sequence: Synthetic oligonucleotide
  Antisense strand to SEQ ID NO: 2234144
ucucagaagacucuggucu

SEQ ID NO: 2234146 - RNA, 19 nt, Artificial Sequence
  Description of Artificial Sequence: Synthetic oligonucleotide
  Sense strand starting at position 2174 of SEQ ID NO: 1884022
aagucauuacuucgcagag

SEQ ID NO: 2234147 - RNA, 19 nt, Artificial Sequence
  Description of Artificial Sequence: Synthetic oligonucleotide
  Antisense strand to SEQ ID NO: 2234146
cucugcgaaguaaugacuu

SEQ ID NO: 2234148 - RNA, 19 nt, Artificial Sequence
  Description of Artificial Sequence: Synthetic oligonucleotide
  Sense strand starting at position 2175 of SEQ ID NO: 1884022
agucauuacuucgcagaga

SEQ ID NO: 2234149 - RNA, 19 nt, Artificial Sequence
  Description of Artificial Sequence: Synthetic oligonucleotide
  Antisense strand to SEQ ID NO: 2234148
ucucugcgaaguaaugacu

SEQ ID NO: 2234150 - RNA, 19 nt, Artificial Sequence
  Description of Artificial Sequence: Synthetic oligonucleotide
  Sense strand starting at position 2178 of SEQ ID NO: 1884022
cauuacuucgcagagaggu

SEQ ID NO: 2234151 - RNA, 19 nt, Artificial Sequence
  Description of Artificial Sequence: Synthetic oligonucleotide
  Antisense strand to SEQ ID NO: 2234150
accucucugcgaaguaaug

SEQ ID NO: 2234152 - RNA, 19 nt, Artificial Sequence
  Description of Artificial Sequence: Synthetic oligonucleotide
  Sense strand starting at position 2188 of SEQ ID NO: 1884022
cagagaggucccugcauau

SEQ ID NO: 2234153 - RNA, 19 nt, Artificial Sequence
  Description of Artificial Sequence: Synthetic oligonucleotide
  Antisense strand to SEQ ID NO: 2234152
auaugcagggaccucucug

SEQ ID NO: 2234154 - RNA, 19 nt, Artificial Sequence
  Description of Artificial Sequence: Synthetic oligonucleotide
  Sense strand starting at position 2267 of SEQ ID NO: 1884022
ucaggaucccgccaaacuu

SEQ ID NO: 2234155 - RNA, 19 nt, Artificial Sequence
  Description of Artificial Sequence: Synthetic oligonucleotide
  Antisense strand to SEQ ID NO: 2234154
aaguuuggcgggauccuga

SEQ ID NO: 2234156 - RNA, 19 nt, Artificial Sequence
  Description of Artificial Sequence: Synthetic oligonucleotide
  Sense strand starting at position 2430 of SEQ ID NO: 1884022
gguguuucugggaguugug

SEQ ID NO: 2234157 - RNA, 19 nt, Artificial Sequence
  Description of Artificial Sequence: Synthetic oligonucleotide
  Antisense strand to SEQ ID NO: 2234156
cacaacucccagaaacacc

SEQ ID NO: 2234158 - RNA, 19 nt, Artificial Sequence
  Description of Artificial Sequence: Synthetic oligonucleotide
  Sense strand starting at position 3045 of SEQ ID NO: 1884022
cgggaaagaucuucuaguu

SEQ ID NO: 2234159 - RNA, 19 nt, Artificial Sequence
  Description of Artificial Sequence: Synthetic oligonucleotide
  Antisense strand to SEQ ID NO: 2234158
aacuagaagaucuuucccg

SEQ ID NO: 2234160 - RNA, 19 nt, Artificial Sequence
  Description of Artificial Sequence: Synthetic oligonucleotide
  Sense strand starting at position 3254 of SEQ ID NO: 1884022
ugucgugucucugugauuu

SEQ ID NO: 2234161 - RNA, 19 nt, Artificial Sequence
  Description of Artificial Sequence: Synthetic oligonucleotide
  Antisense strand to SEQ ID NO: 2234160
aaaucacagagacacgaca

SEQ ID NO: 2234162 - RNA, 19 nt, Artificial Sequence
  Description of Artificial Sequence: Synthetic oligonucleotide
  Sense strand starting at position 3258 of SEQ ID NO: 1884022
gugucucugugauuugagu

SEQ ID NO: 2234163 - RNA, 19 nt, Artificial Sequence
  Description of Artificial Sequence: Synthetic oligonucleotide
  Antisense strand to SEQ ID NO: 2234162
acucaaaucacagagacac

SEQ ID NO: 2234164 - RNA, 19 nt, Artificial Sequence
  Description of Artificial Sequence: Synthetic oligonucleotide
  Sense strand starting at position 3292 of SEQ ID NO: 1884022
aguugaagguauccuuuga

SEQ ID NO: 2234165 - RNA, 19 nt, Artificial Sequence
  Description of Artificial Sequence: Synthetic oligonucleotide
  Antisense strand to SEQ ID NO: 2234164
ucaaaggauaccuucaacu

SEQ ID NO: 2234166 - RNA, 19 nt, Artificial Sequence
  Description of Artificial Sequence: Synthetic oligonucleotide
  Sense strand starting at position 3296 of SEQ ID NO: 1884022
gaagguauccuuugacaaa

SEQ ID NO: 2234167 - RNA, 19 nt, Artificial Sequence
  Description of Artificial Sequence: Synthetic oligonucleotide
  Antisense strand to SEQ ID NO: 2234166
uuugucaaaggauaccuuc

SEQ ID NO: 2234168 - RNA, 19 nt, Artificial Sequence
  Description of Artificial Sequence: Synthetic oligonucleotide
  Sense strand starting at position 3360 of SEQ ID NO: 1884022
ggcuauuugcugcaugauc

SEQ ID NO: 2234169 - RNA, 19 nt, Artificial Sequence
  Description of Artificial Sequence: Synthetic oligonucleotide
  Antisense strand to SEQ ID NO: 2234168
gaucaugcagcaaauagcc

SEQ ID NO: 2234170 - RNA, 19 nt, Artificial Sequence
  Description of Artificial Sequence: Synthetic oligonucleotide
  Sense strand starting at position 3369 of SEQ ID NO: 1884022
cugcaugauccucagcaaa

SEQ ID NO: 2234171 - RNA, 19 nt, Artificial Sequence
  Description of Artificial Sequence: Synthetic oligonucleotide
  Antisense strand to SEQ ID NO: 2234170
uuugcugaggaucaugcag

SEQ ID NO: 2234172 - RNA, 19 nt, Artificial Sequence
  Description of Artificial Sequence: Synthetic oligonucleotide
  Sense strand starting at position 3371 of SEQ ID NO: 1884022
gcaugauccucagcaaauu

SEQ ID NO: 2234173 - RNA, 19 nt, Artificial Sequence
  Description of Artificial Sequence: Synthetic oligonucleotide
  Antisense strand to SEQ ID NO: 2234172
aauuugcugaggaucaugc

SEQ ID NO: 2234174 - RNA, 19 nt, Artificial Sequence
  Description of Artificial Sequence: Synthetic oligonucleotide
  Sense strand starting at position 3420 of SEQ ID NO: 1884022
uauaaaggauaggaugaua

SEQ ID NO: 2234175 - RNA, 19 nt, Artificial Sequence
  Description of Artificial Sequence: Synthetic oligonucleotide
  Antisense strand to SEQ ID NO: 2234174
uaucauccuauccuuuaua

SEQ ID NO: 2234176 - RNA, 19 nt, Artificial Sequence
  Description of Artificial Sequence: Synthetic oligonucleotide
  Sense strand starting at position 3455 of SEQ ID NO: 1884022
aggauuacaugaggcauuu

SEQ ID NO: 2234177 - RNA, 19 nt, Artificial Sequence
  Description of Artificial Sequence: Synthetic oligonucleotide
  Antisense strand to SEQ ID NO: 2234176
aaaugccucauguaauccu

SEQ ID NO: 2234178 - RNA, 19 nt, Artificial Sequence
  Description of Artificial Sequence: Synthetic oligonucleotide
  Sense strand starting at position 3478 of SEQ ID NO: 1884022
agaagauacuuagaacaau

SEQ ID NO: 2234179 - RNA, 19 nt, Artificial Sequence
  Description of Artificial Sequence: Synthetic oligonucleotide
  Antisense strand to SEQ ID NO: 2234178
auuguucuaaguaucuucu

SEQ ID NO: 2234180 - RNA, 19 nt, Artificial Sequence
  Description of Artificial Sequence: Synthetic oligonucleotide
  Sense strand starting at position 3540 of SEQ ID NO: 1884022
auuaguuaguacuccuaag

SEQ ID NO: 2234181 - RNA, 19 nt, Artificial Sequence
  Description of Artificial Sequence: Synthetic oligonucleotide
  Antisense strand to SEQ ID NO: 2234180
cuuaggaguacuaacuaau

SEQ ID NO: 2234182 - RNA, 19 nt, Artificial Sequence
  Description of Artificial Sequence: Synthetic oligonucleotide
  Sense strand starting at position 3609 of SEQ ID NO: 1884022
ccagauguguuugugaaau

SEQ ID NO: 2234183 - RNA, 19 nt, Artificial Sequence
  Description of Artificial Sequence: Synthetic oligonucleotide
  Antisense strand to SEQ ID NO: 2234182
auuucacaaacacaucugg

SEQ ID NO: 2234184 - RNA, 19 nt, Artificial Sequence
  Description of Artificial Sequence: Synthetic oligonucleotide
  Sense strand starting at position 3680 of SEQ ID NO: 1884022
gucaaacaauguuucuaua

SEQ ID NO: 2234185 - RNA, 19 nt, Artificial Sequence
  Description of Artificial Sequence: Synthetic oligonucleotide
  Antisense strand to SEQ ID NO: 2234184
uauagaaacauuguuugac

SEQ ID NO: 2234186 - RNA, 19 nt, Artificial Sequence
  Description of Artificial Sequence: Synthetic oligonucleotide
  Sense strand starting at position 3690 of SEQ ID NO: 1884022
guuucuauagcagaaaugu

SEQ ID NO: 2234187 - RNA, 19 nt, Artificial Sequence
  Description of Artificial Sequence: Synthetic oligonucleotide
  Antisense strand to SEQ ID NO: 2234186
acauuucugcuauagaaac

SEQ ID NO: 2234188 - RNA, 19 nt, Artificial Sequence
  Description of Artificial Sequence: Synthetic oligonucleotide
  Sense strand starting at position 3696 of SEQ ID NO: 1884022
auagcagaaaugugugagu

SEQ ID NO: 2234189 - RNA, 19 nt, Artificial Sequence
  Description of Artificial Sequence: Synthetic oligonucleotide
  Antisense strand to SEQ ID NO: 2234188
acucacacauuucugcuau

SEQ ID NO: 2234190 - RNA, 19 nt, Artificial Sequence
  Description of Artificial Sequence: Synthetic oligonucleotide
  Sense strand starting at position 3698 of SEQ ID NO: 1884022
agcagaaaugugugaguau

SEQ ID NO: 2234191 - RNA, 19 nt, Artificial Sequence
  Description of Artificial Sequence: Synthetic oligonucleotide
  Antisense strand to SEQ ID NO: 2234190
auacucacacauuucugcu

SEQ ID NO: 2234192 - RNA, 19 nt, Artificial Sequence
  Description of Artificial Sequence: Synthetic oligonucleotide
  Sense strand starting at position 3727 of SEQ ID NO: 1884022
ucacccuaagugggauaua

SEQ ID NO: 2234193 - RNA, 19 nt, Artificial Sequence
  Description of Artificial Sequence: Synthetic oligonucleotide
  Antisense strand to SEQ ID NO: 2234192
uauaucccacuuaggguga

SEQ ID NO: 2234194 - RNA, 19 nt, Artificial Sequence
  Description of Artificial Sequence: Synthetic oligonucleotide
  Sense strand starting at position 3738 of SEQ ID NO: 1884022
gggauauauaaagguugua

SEQ ID NO: 2234195 - RNA, 19 nt, Artificial Sequence
  Description of Artificial Sequence: Synthetic oligonucleotide
  Antisense strand to SEQ ID NO: 2234194
uacaaccuuuauauauccc

SEQ ID NO: 2234196 - RNA, 19 nt, Artificial Sequence
  Description of Artificial Sequence: Synthetic oligonucleotide
  Sense strand starting at position 72 of SEQ ID NO: 1884023
auggaaauagcugaguucu

SEQ ID NO: 2234197 - RNA, 19 nt, Artificial Sequence
  Description of Artificial Sequence: Synthetic oligonucleotide
  Antisense strand to SEQ ID NO: 2234196
agaacucagcuauuuccau

SEQ ID NO: 2234198 - RNA, 19 nt, Artificial Sequence
  Description of Artificial Sequence: Synthetic oligonucleotide
  Sense strand starting at position 197 of SEQ ID NO: 1884023
gggaauaugcugugucaca

SEQ ID NO: 2234199 - RNA, 19 nt, Artificial Sequence
  Description of Artificial Sequence: Synthetic oligonucleotide
  Antisense strand to SEQ ID NO: 2234198
ugugacacagcauauuccc

SEQ ID NO: 2234200 - RNA, 19 nt, Artificial Sequence
  Description of Artificial Sequence: Synthetic oligonucleotide
  Sense strand starting at position 198 of SEQ ID NO: 1884023
ggaauaugcugugucacaa

SEQ ID NO: 2234201 - RNA, 19 nt, Artificial Sequence
  Description of Artificial Sequence: Synthetic oligonucleotide
  Antisense strand to SEQ ID NO: 2234200
uugugacacagcauauucc

SEQ ID NO: 2234202 - RNA, 19 nt, Artificial Sequence
  Description of Artificial Sequence: Synthetic oligonucleotide
  Sense strand starting at position 208 of SEQ ID NO: 1884023
gugucacaacuggacauau

SEQ ID NO: 2234203 - RNA, 19 nt, Artificial Sequence
  Description of Artificial Sequence: Synthetic oligonucleotide
  Antisense strand to SEQ ID NO: 2234202
auauguccaguugugacac

SEQ ID NO: 2234204 - RNA, 19 nt, Artificial Sequence
  Description of Artificial Sequence: Synthetic oligonucleotide
  Sense strand starting at position 217 of SEQ ID NO: 1884023
cuggacauaucaguugaaa

SEQ ID NO: 2234205 - RNA, 19 nt, Artificial Sequence
  Description of Artificial Sequence: Synthetic oligonucleotide
  Antisense strand to SEQ ID NO: 2234204
uuucaacugauauguccag

SEQ ID NO: 2234206 - RNA, 19 nt, Artificial Sequence
  Description of Artificial Sequence: Synthetic oligonucleotide
  Sense strand starting at position 263 of SEQ ID NO: 1884023
uacaguauauccguuagau

SEQ ID NO: 2234207 - RNA, 19 nt, Artificial Sequence
  Description of Artificial Sequence: Synthetic oligonucleotide
  Antisense strand to SEQ ID NO: 2234206
aucuaacggauauacugua

SEQ ID NO: 2234208 - RNA, 19 nt, Artificial Sequence
  Description of Artificial Sequence: Synthetic oligonucleotide
  Sense strand starting at position 265 of SEQ ID NO: 1884023
caguauauccguuagauua

SEQ ID NO: 2234209 - RNA, 19 nt, Artificial Sequence
  Description of Artificial Sequence: Synthetic oligonucleotide
  Antisense strand to SEQ ID NO: 2234208
uaaucuaacggauauacug

SEQ ID NO: 2234210 - RNA, 19 nt, Artificial Sequence
  Description of Artificial Sequence: Synthetic oligonucleotide
  Sense strand starting at position 325 of SEQ ID NO: 1884023
gguuaugacucugcuauuu

SEQ ID NO: 2234211 - RNA, 19 nt, Artificial Sequence
  Description of Artificial Sequence: Synthetic oligonucleotide
  Antisense strand to SEQ ID NO: 2234210
aaauagcagagucauaacc

SEQ ID NO: 2234212 - RNA, 19 nt, Artificial Sequence
  Description of Artificial Sequence: Synthetic oligonucleotide
  Sense strand starting at position 502 of SEQ ID NO: 1884023
caucauugguugucaagau

SEQ ID NO: 2234213 - RNA, 19 nt, Artificial Sequence
  Description of Artificial Sequence: Synthetic oligonucleotide
  Antisense strand to SEQ ID NO: 2234212
aucuugacaaccaaugaug

SEQ ID NO: 2234214 - RNA, 19 nt, Artificial Sequence
  Description of Artificial Sequence: Synthetic oligonucleotide
  Sense strand starting at position 577 of SEQ ID NO: 1884023
ucucaaugagugugggaga

SEQ ID NO: 2234215 - RNA, 19 nt, Artificial Sequence
  Description of Artificial Sequence: Synthetic oligonucleotide
  Antisense strand to SEQ ID NO: 2234214
ucucccacacucauugaga

SEQ ID NO: 2234216 - RNA, 19 nt, Artificial Sequence
  Description of Artificial Sequence: Synthetic oligonucleotide
  Sense strand starting at position 696 of SEQ ID NO: 1884023
agguaaagcugagcucaga

SEQ ID NO: 2234217 - RNA, 19 nt, Artificial Sequence
  Description of Artificial Sequence: Synthetic oligonucleotide
  Antisense strand to SEQ ID NO: 2234216
ucugagcucagcuuuaccu

SEQ ID NO: 2234218 - RNA, 19 nt, Artificial Sequence
  Description of Artificial Sequence: Synthetic oligonucleotide
  Sense strand starting at position 1294 of SEQ ID NO: 1884023
ugagcuaccucucuagaag

SEQ ID NO: 2234219 - RNA, 19 nt, Artificial Sequence
  Description of Artificial Sequence: Synthetic oligonucleotide
  Antisense strand to SEQ ID NO: 2234218
cuucuagagagguagcuca

SEQ ID NO: 2234220 - RNA, 19 nt, Artificial Sequence
  Description of Artificial Sequence: Synthetic oligonucleotide
  Sense strand starting at position 1297 of SEQ ID NO: 1884023
gcuaccucucuagaagaau

SEQ ID NO: 2234221 - RNA, 19 nt, Artificial Sequence
  Description of Artificial Sequence: Synthetic oligonucleotide
  Antisense strand to SEQ ID NO: 2234220
auucuucuagagagguagc

SEQ ID NO: 2234222 - RNA, 19 nt, Artificial Sequence
  Description of Artificial Sequence: Synthetic oligonucleotide
  Sense strand starting at position 1433 of SEQ ID NO: 1884023
ccauauuugugaucuuugu

SEQ ID NO: 2234223 - RNA, 19 nt, Artificial Sequence
  Description of Artificial Sequence: Synthetic oligonucleotide
  Antisense strand to SEQ ID NO: 2234222
acaaagaucacaaauaugg

SEQ ID NO: 2234224 - RNA, 19 nt, Artificial Sequence
  Description of Artificial Sequence: Synthetic oligonucleotide
  Sense strand starting at position 1442 of SEQ ID NO: 1884023
ugaucuuugugaucacaua

SEQ ID NO: 2234225 - RNA, 19 nt, Artificial Sequence
  Description of Artificial Sequence: Synthetic oligonucleotide
  Antisense strand to SEQ ID NO: 2234224
uaugugaucacaaagauca

SEQ ID NO: 2234226 - RNA, 19 nt, Artificial Sequence
  Description of Artificial Sequence: Synthetic oligonucleotide
  Sense strand starting at position 1483 of SEQ ID NO: 1884023
cgagauaaacuuugaguca

SEQ ID NO: 2234227 - RNA, 19 nt, Artificial Sequence
  Description of Artificial Sequence: Synthetic oligonucleotide
  Antisense strand to SEQ ID NO: 2234226
ugacucaaaguuuaucucg

SEQ ID NO: 2234228 - RNA, 19 nt, Artificial Sequence
  Description of Artificial Sequence: Synthetic oligonucleotide
  Sense strand starting at position 1807 of SEQ ID NO: 1884023
ucuauugcugucuguauuu

SEQ ID NO: 2234229 - RNA, 19 nt, Artificial Sequence
  Description of Artificial Sequence: Synthetic oligonucleotide
  Antisense strand to SEQ ID NO: 2234228
aaauacagacagcaauaga

SEQ ID NO: 2234230 - RNA, 19 nt, Artificial Sequence
  Description of Artificial Sequence: Synthetic oligonucleotide
  Sense strand starting at position 2101 of SEQ ID NO: 1884023
acagaagugacacguuuga

SEQ ID NO: 2234231 - RNA, 19 nt, Artificial Sequence
  Description of Artificial Sequence: Synthetic oligonucleotide
  Antisense strand to SEQ ID NO: 2234230
ucaaacgugucacuucugu

SEQ ID NO: 2234232 - RNA, 19 nt, Artificial Sequence
  Description of Artificial Sequence: Synthetic oligonucleotide
  Sense strand starting at position 2290 of SEQ ID NO: 1884023
ccuuccuucuaguuugaca

SEQ ID NO: 2234233 - RNA, 19 nt, Artificial Sequence
  Description of Artificial Sequence: Synthetic oligonucleotide
  Antisense strand to SEQ ID NO: 2234232
ugucaaacuagaaggaagg

SEQ ID NO: 2234234 - RNA, 19 nt, Artificial Sequence
  Description of Artificial Sequence: Synthetic oligonucleotide
  Sense strand starting at position 2356 of SEQ ID NO: 1884023
uuaggaugcuguccuaaau

SEQ ID NO: 2234235 - RNA, 19 nt, Artificial Sequence
  Description of Artificial Sequence: Synthetic oligonucleotide
  Antisense strand to SEQ ID NO: 2234234
auuuaggacagcauccuaa

SEQ ID NO: 2234236 - RNA, 19 nt, Artificial Sequence
  Description of Artificial Sequence: Synthetic oligonucleotide
  Sense strand starting at position 2513 of SEQ ID NO: 1884023
auagcuacuuggucaaauc

SEQ ID NO: 2234237 - RNA, 19 nt, Artificial Sequence
  Description of Artificial Sequence: Synthetic oligonucleotide
  Antisense strand to SEQ ID NO: 2234236
gauuugaccaaguagcuau

SEQ ID NO: 2234238 - RNA, 19 nt, Artificial Sequence
  Description of Artificial Sequence: Synthetic oligonucleotide
  Sense strand starting at position 2522 of SEQ ID NO: 1884023
uggucaaaucauggugaua

SEQ ID NO: 2234239 - RNA, 19 nt, Artificial Sequence
  Description of Artificial Sequence: Synthetic oligonucleotide
  Antisense strand to SEQ ID NO: 2234238
uaucaccaugauuugacca

SEQ ID NO: 2234240 - RNA, 19 nt, Artificial Sequence
  Description of Artificial Sequence: Synthetic oligonucleotide
  Sense strand starting at position 2575 of SEQ ID NO: 1884023
agcucuugccuuuaggaaa

SEQ ID NO: 2234241 - RNA, 19 nt, Artificial Sequence
  Description of Artificial Sequence: Synthetic oligonucleotide
  Antisense strand to SEQ ID NO: 2234240
uuuccuaaaggcaagagcu

SEQ ID NO: 2234242 - RNA, 19 nt, Artificial Sequence
  Description of Artificial Sequence: Synthetic oligonucleotide
  Sense strand starting at position 2604 of SEQ ID NO: 1884023
ugugguguaaucuacauua

SEQ ID NO: 2234243 - RNA, 19 nt, Artificial Sequence
  Description of Artificial Sequence: Synthetic oligonucleotide
  Antisense strand to SEQ ID NO: 2234242
uaauguagauuacaccaca

SEQ ID NO: 2234244 - RNA, 19 nt, Artificial Sequence
  Description of Artificial Sequence: Synthetic oligonucleotide
  Sense strand starting at position 2606 of SEQ ID NO: 1884023
ugguguaaucuacauuaca

SEQ ID NO: 2234245 - RNA, 19 nt, Artificial Sequence
  Description of Artificial Sequence: Synthetic oligonucleotide
  Antisense strand to SEQ ID NO: 2234244
uguaauguagauuacacca

SEQ ID NO: 2234246 - RNA, 19 nt, Artificial Sequence
  Description of Artificial Sequence: Synthetic oligonucleotide
  Sense strand starting at position 2829 of SEQ ID NO: 1884023
ucuggcacuggucauagau

SEQ ID NO: 2234247 - RNA, 19 nt, Artificial Sequence
  Description of Artificial Sequence: Synthetic oligonucleotide
  Antisense strand to SEQ ID NO: 2234246
aucuaugaccagugccaga

SEQ ID NO: 2234248 - RNA, 19 nt, Artificial Sequence
  Description of Artificial Sequence: Synthetic oligonucleotide
  Sense strand starting at position 2838 of SEQ ID NO: 1884023
ggucauagauagcuuggga

SEQ ID NO: 2234249 - RNA, 19 nt, Artificial Sequence
  Description of Artificial Sequence: Synthetic oligonucleotide
  Antisense strand to SEQ ID NO: 2234248
ucccaagcuaucuaugacc

SEQ ID NO: 2234250 - RNA, 19 nt, Artificial Sequence
  Description of Artificial Sequence: Synthetic oligonucleotide
  Sense strand starting at position 2841 of SEQ ID NO: 1884023
cauagauagcuugggagga

SEQ ID NO: 2234251 - RNA, 19 nt, Artificial Sequence
  Description of Artificial Sequence: Synthetic oligonucleotide
  Antisense strand to SEQ ID NO: 2234250
uccucccaagcuaucuaug

SEQ ID NO: 2234252 - RNA, 19 nt, Artificial Sequence
  Description of Artificial Sequence: Synthetic oligonucleotide
  Sense strand starting at position 2957 of SEQ ID NO: 1884023
gguauuuacucugaacaga

SEQ ID NO: 2234253 - RNA, 19 nt, Artificial Sequence
  Description of Artificial Sequence: Synthetic oligonucleotide
  Antisense strand to SEQ ID NO: 2234252
ucuguucagaguaaauacc

SEQ ID NO: 2234254 - RNA, 19 nt, Artificial Sequence
  Description of Artificial Sequence: Synthetic oligonucleotide
  Sense strand starting at position 3100 of SEQ ID NO: 1884023
ugacaaacccuuuguguuc

SEQ ID NO: 2234255 - RNA, 19 nt, Artificial Sequence
  Description of Artificial Sequence: Synthetic oligonucleotide
  Antisense strand to SEQ ID NO: 2234254
gaacacaaaggguuuguca

SEQ ID NO: 2234256 - RNA, 19 nt, Artificial Sequence
  Description of Artificial Sequence: Synthetic oligonucleotide
  Sense strand starting at position 3145 of SEQ ID NO: 1884023
accauuugaucuuacugga

SEQ ID NO: 2234257 - RNA, 19 nt, Artificial Sequence
  Description of Artificial Sequence: Synthetic oligonucleotide
  Antisense strand to SEQ ID NO: 2234256
uccaguaagaucaaauggu

SEQ ID NO: 2234258 - RNA, 19 nt, Artificial Sequence
  Description of Artificial Sequence: Synthetic oligonucleotide
  Sense strand starting at position 3148 of SEQ ID NO: 1884023
auuugaucuuacuggaaua

SEQ ID NO: 2234259 - RNA, 19 nt, Artificial Sequence
  Description of Artificial Sequence: Synthetic oligonucleotide
  Antisense strand to SEQ ID NO: 2234258
uauuccaguaagaucaaau

SEQ ID NO: 2234260 - RNA, 19 nt, Artificial Sequence
  Description of Artificial Sequence: Synthetic oligonucleotide
  Sense strand starting at position 3227 of SEQ ID NO: 1884023
ggccuaaugcaagauuaac

SEQ ID NO: 2234261 - RNA, 19 nt, Artificial Sequence
  Description of Artificial Sequence: Synthetic oligonucleotide
  Antisense strand to SEQ ID NO: 2234260
guuaaucuugcauuaggcc

SEQ ID NO: 2234262 - RNA, 19 nt, Artificial Sequence
  Description of Artificial Sequence: Synthetic oligonucleotide
  Sense strand starting at position 3665 of SEQ ID NO: 1884023
aggauuugcucuuugucuu

SEQ ID NO: 2234263 - RNA, 19 nt, Artificial Sequence
  Description of Artificial Sequence: Synthetic oligonucleotide
  Antisense strand to SEQ ID NO: 2234262
aagacaaagagcaaauccu

SEQ ID NO: 2234264 - RNA, 19 nt, Artificial Sequence
  Description of Artificial Sequence: Synthetic oligonucleotide
  Sense strand starting at position 3666 of SEQ ID NO: 1884023
ggauuugcucuuugucuua

SEQ ID NO: 2234265 - RNA, 19 nt, Artificial Sequence
  Description of Artificial Sequence: Synthetic oligonucleotide
  Antisense strand to SEQ ID NO: 2234264
uaagacaaagagcaaaucc

SEQ ID NO: 2234266 - RNA, 19 nt, Artificial Sequence
  Description of Artificial Sequence: Synthetic oligonucleotide
  Sense strand starting at position 3726 of SEQ ID NO: 1884023
cucaaacagugaguacauu

SEQ ID NO: 2234267 - RNA, 19 nt, Artificial Sequence
  Description of Artificial Sequence: Synthetic oligonucleotide
  Antisense strand to SEQ ID NO: 2234266
aauguacucacuguuugag

SEQ ID NO: 2234268 - RNA, 19 nt, Artificial Sequence
  Description of Artificial Sequence: Synthetic oligonucleotide
  Sense strand starting at position 3823 of SEQ ID NO: 1884023
augaaagugcuauacuauc

SEQ ID NO: 2234269 - RNA, 19 nt, Artificial Sequence
  Description of Artificial Sequence: Synthetic oligonucleotide
  Antisense strand to SEQ ID NO: 2234268
gauaguauagcacuuucau

SEQ ID NO: 2234270 - RNA, 19 nt, Artificial Sequence
  Description of Artificial Sequence: Synthetic oligonucleotide
  Sense strand starting at position 3905 of SEQ ID NO: 1884023
ugaacuucugugcagcaau

SEQ ID NO: 2234271 - RNA, 19 nt, Artificial Sequence
  Description of Artificial Sequence: Synthetic oligonucleotide
  Antisense strand to SEQ ID NO: 2234270
auugcugcacagaaguuca

SEQ ID NO: 2234272 - RNA, 19 nt, Artificial Sequence
  Description of Artificial Sequence: Synthetic oligonucleotide
  Sense strand starting at position 3908 of SEQ ID NO: 1884023
acuucugugcagcaauuaa

SEQ ID NO: 2234273 - RNA, 19 nt, Artificial Sequence
  Description of Artificial Sequence: Synthetic oligonucleotide
  Antisense strand to SEQ ID NO: 2234272
uuaauugcugcacagaagu

SEQ ID NO: 2234274 - RNA, 19 nt, Artificial Sequence
  Description of Artificial Sequence: Synthetic oligonucleotide
  Sense strand starting at position 3933 of SEQ ID NO: 1884023
auagaauuaucauagagag

SEQ ID NO: 2234275 - RNA, 19 nt, Artificial Sequence
  Description of Artificial Sequence: Synthetic oligonucleotide
  Antisense strand to SEQ ID NO: 2234274
cucucuaugauaauucuau

SEQ ID NO: 2234276 - RNA, 19 nt, Artificial Sequence
  Description of Artificial Sequence: Synthetic oligonucleotide
  Sense strand starting at position 526 of SEQ ID NO: 1884024
gucuauuaaggcugaaguc

SEQ ID NO: 2234277 - RNA, 19 nt, Artificial Sequence
  Description of Artificial Sequence: Synthetic oligonucleotide
  Antisense strand to SEQ ID NO: 2234276
gacuucagccuuaauagac

SEQ ID NO: 2234278 - RNA, 19 nt, Artificial Sequence
  Description of Artificial Sequence: Synthetic oligonucleotide
  Sense strand starting at position 527 of SEQ ID NO: 1884024
ucuauuaaggcugaaguca

SEQ ID NO: 2234279 - RNA, 19 nt, Artificial Sequence
  Description of Artificial Sequence: Synthetic oligonucleotide
  Antisense strand to SEQ ID NO: 2234278
ugacuucagccuuaauaga

SEQ ID NO: 2234280 - RNA, 19 nt, Artificial Sequence
  Description of Artificial Sequence: Synthetic oligonucleotide
  Sense strand starting at position 1198 of SEQ ID NO: 1884024
ccucuaaggucuuccagaa

SEQ ID NO: 2234281 - RNA, 19 nt, Artificial Sequence
  Description of Artificial Sequence: Synthetic oligonucleotide
  Antisense strand to SEQ ID NO: 2234280
uucuggaagaccuuagagg

SEQ ID NO: 2234282 - RNA, 19 nt, Artificial Sequence
  Description of Artificial Sequence: Synthetic oligonucleotide
  Sense strand starting at position 1216 of SEQ ID NO: 1884024
acugcagcaugguaagaau

SEQ ID NO: 2234283 - RNA, 19 nt, Artificial Sequence
  Description of Artificial Sequence: Synthetic oligonucleotide
  Antisense strand to SEQ ID NO: 2234282
auucuuaccaugcugcagu

SEQ ID NO: 2234284 - RNA, 19 nt, Artificial Sequence
  Description of Artificial Sequence: Synthetic oligonucleotide
  Sense strand starting at position 2238 of SEQ ID NO: 1884024
uuucuaaguuccgugaguu

SEQ ID NO: 2234285 - RNA, 19 nt, Artificial Sequence
  Description of Artificial Sequence: Synthetic oligonucleotide
  Antisense strand to SEQ ID NO: 2234284
aacucacggaacuuagaaa

SEQ ID NO: 2234286 - RNA, 19 nt, Artificial Sequence
  Description of Artificial Sequence: Synthetic oligonucleotide
  Sense strand starting at position 2239 of SEQ ID NO: 1884024
uucuaaguuccgugaguug

SEQ ID NO: 2234287 - RNA, 19 nt, Artificial Sequence
  Description of Artificial Sequence: Synthetic oligonucleotide
  Antisense strand to SEQ ID NO: 2234286
caacucacggaacuuagaa

SEQ ID NO: 2234288 - RNA, 19 nt, Artificial Sequence
  Description of Artificial Sequence: Synthetic oligonucleotide
  Sense strand starting at position 2244 of SEQ ID NO: 1884024
aguuccgugaguuguucua

SEQ ID NO: 2234289 - RNA, 19 nt, Artificial Sequence
  Description of Artificial Sequence: Synthetic oligonucleotide
  Antisense strand to SEQ ID NO: 2234288
uagaacaacucacggaacu

SEQ ID NO: 2234290 - RNA, 19 nt, Artificial Sequence
  Description of Artificial Sequence: Synthetic oligonucleotide
  Sense strand starting at position 2246 of SEQ ID NO: 1884024
uuccgugaguuguucuagu

SEQ ID NO: 2234291 - RNA, 19 nt, Artificial Sequence
  Description of Artificial Sequence: Synthetic oligonucleotide
  Antisense strand to SEQ ID NO: 2234290
acuagaacaacucacggaa

SEQ ID NO: 2234292 - RNA, 19 nt, Artificial Sequence
  Description of Artificial Sequence: Synthetic oligonucleotide
  Sense strand starting at position 2505 of SEQ ID NO: 1884024
gucagaagccugugaguag

SEQ ID NO: 2234293 - RNA, 19 nt, Artificial Sequence
  Description of Artificial Sequence: Synthetic oligonucleotide
  Antisense strand to SEQ ID NO: 2234292
cuacucacaggcuucugac

SEQ ID NO: 2234294 - RNA, 19 nt, Artificial Sequence
  Description of Artificial Sequence: Synthetic oligonucleotide
  Sense strand starting at position 2506 of SEQ ID NO: 1884024
ucagaagccugugaguaga

SEQ ID NO: 2234295 - RNA, 19 nt, Artificial Sequence
  Description of Artificial Sequence: Synthetic oligonucleotide
  Antisense strand to SEQ ID NO: 2234294
ucuacucacaggcuucuga

SEQ ID NO: 2234296 - RNA, 19 nt, Artificial Sequence
  Description of Artificial Sequence: Synthetic oligonucleotide
  Sense strand starting at position 2804 of SEQ ID NO: 1884024
cccgcaggacucugugaua

SEQ ID NO: 2234297 - RNA, 19 nt, Artificial Sequence
  Description of Artificial Sequence: Synthetic oligonucleotide
  Antisense strand to SEQ ID NO: 2234296
uaucacagaguccugcggg

SEQ ID NO: 2234298 - RNA, 19 nt, Artificial Sequence
  Description of Artificial Sequence: Synthetic oligonucleotide
  Sense strand starting at position 2807 of SEQ ID NO: 1884024
gcaggacucugugauaauu

SEQ ID NO: 2234299 - RNA, 19 nt, Artificial Sequence
  Description of Artificial Sequence: Synthetic oligonucleotide
  Antisense strand to SEQ ID NO: 2234298
aauuaucacagaguccugc

SEQ ID NO: 2234300 - RNA, 19 nt, Artificial Sequence
  Description of Artificial Sequence: Synthetic oligonucleotide
  Sense strand starting at position 2934 of SEQ ID NO: 1884024
gccugugggccgaguagaa

SEQ ID NO: 2234301 - RNA, 19 nt, Artificial Sequence
  Description of Artificial Sequence: Synthetic oligonucleotide
  Antisense strand to SEQ ID NO: 2234300
uucuacucggcccacaggc

SEQ ID NO: 2234302 - RNA, 19 nt, Artificial Sequence
  Description of Artificial Sequence: Synthetic oligonucleotide
  Sense strand starting at position 3114 of SEQ ID NO: 1884024
ugaaauaagcccugggcuu

SEQ ID NO: 2234303 - RNA, 19 nt, Artificial Sequence
  Description of Artificial Sequence: Synthetic oligonucleotide
  Antisense strand to SEQ ID NO: 2234302
aagcccagggcuuauuuca

SEQ ID NO: 2234304 - RNA, 19 nt, Artificial Sequence
  Description of Artificial Sequence: Synthetic oligonucleotide
  Sense strand starting at position 3221 of SEQ ID NO: 1884024
cuaagauguuaccaaugac

SEQ ID NO: 2234305 - RNA, 19 nt, Artificial Sequence
  Description of Artificial Sequence: Synthetic oligonucleotide
  Antisense strand to SEQ ID NO: 2234304
gucauugguaacaucuuag

SEQ ID NO: 2234306 - RNA, 19 nt, Artificial Sequence
  Description of Artificial Sequence: Synthetic oligonucleotide
  Sense strand starting at position 3939 of SEQ ID NO: 1884024
guaaauuacugucucuaca

SEQ ID NO: 2234307 - RNA, 19 nt, Artificial Sequence
  Description of Artificial Sequence: Synthetic oligonucleotide
  Antisense strand to SEQ ID NO: 2234306
uguagagacaguaauuuac

SEQ ID NO: 2234308 - RNA, 19 nt, Artificial Sequence
  Description of Artificial Sequence: Synthetic oligonucleotide
  Sense strand starting at position 118 of SEQ ID NO: 1884025
gcugaaacuccuuaaugcu

SEQ ID NO: 2234309 - RNA, 19 nt, Artificial Sequence
  Description of Artificial Sequence: Synthetic oligonucleotide
  Antisense strand to SEQ ID NO: 2234308
agcauuaaggaguuucagc

SEQ ID NO: 2234310 - RNA, 19 nt, Artificial Sequence
  Description of Artificial Sequence: Synthetic oligonucleotide
  Sense strand starting at position 128 of SEQ ID NO: 1884025
cuuaaugcugaggguuuau

SEQ ID NO: 2234311 - RNA, 19 nt, Artificial Sequence
  Description of Artificial Sequence: Synthetic oligonucleotide
  Antisense strand to SEQ ID NO: 2234310
auaaacccucagcauuaag

SEQ ID NO: 2234312 - RNA, 19 nt, Artificial Sequence
  Description of Artificial Sequence: Synthetic oligonucleotide
  Sense strand starting at position 256 of SEQ ID NO: 1884025
agggcucucuccucugaaa

SEQ ID NO: 2234313 - RNA, 19 nt, Artificial Sequence
  Description of Artificial Sequence: Synthetic oligonucleotide
  Antisense strand to SEQ ID NO: 2234312
uuucagaggagagagcccu

SEQ ID NO: 2234314 - RNA, 19 nt, Artificial Sequence
  Description of Artificial Sequence: Synthetic oligonucleotide
  Sense strand starting at position 282 of SEQ ID NO: 1884025
acagaauucuccuuggcaa

SEQ ID NO: 2234315 - RNA, 19 nt, Artificial Sequence
  Description of Artificial Sequence: Synthetic oligonucleotide
  Antisense strand to SEQ ID NO: 2234314
uugccaaggagaauucugu

SEQ ID NO: 2234316 - RNA, 19 nt, Artificial Sequence
  Description of Artificial Sequence: Synthetic oligonucleotide
  Sense strand starting at position 284 of SEQ ID NO: 1884025
agaauucuccuuggcaagu

SEQ ID NO: 2234317 - RNA, 19 nt, Artificial Sequence
  Description of Artificial Sequence: Synthetic oligonucleotide
  Antisense strand to SEQ ID NO: 2234316
acuugccaaggagaauucu

SEQ ID NO: 2234318 - RNA, 19 nt, Artificial Sequence
  Description of Artificial Sequence: Synthetic oligonucleotide
  Sense strand starting at position 323 of SEQ ID NO: 1884025
gcuaauaucguaugaauag

SEQ ID NO: 2234319 - RNA, 19 nt, Artificial Sequence
  Description of Artificial Sequence: Synthetic oligonucleotide
  Antisense strand to SEQ ID NO: 2234318
cuauucauacgauauuagc

SEQ ID NO: 2234320 - RNA, 19 nt, Artificial Sequence
  Description of Artificial Sequence: Synthetic oligonucleotide
  Sense strand starting at position 620 of SEQ ID NO: 1884025
ccagcuggucugcagauaa

SEQ ID NO: 2234321 - RNA, 19 nt, Artificial Sequence
  Description of Artificial Sequence: Synthetic oligonucleotide
  Antisense strand to SEQ ID NO: 2234320
uuaucugcagaccagcugg

SEQ ID NO: 2234322 - RNA, 19 nt, Artificial Sequence
  Description of Artificial Sequence: Synthetic oligonucleotide
  Sense strand starting at position 643 of SEQ ID NO: 1884025
gauugauaauuaguugcaa

SEQ ID NO: 2234323 - RNA, 19 nt, Artificial Sequence
  Description of Artificial Sequence: Synthetic oligonucleotide
  Antisense strand to SEQ ID NO: 2234322
uugcaacuaauuaucaauc

SEQ ID NO: 2234324 - RNA, 19 nt, Artificial Sequence
  Description of Artificial Sequence: Synthetic oligonucleotide
  Sense strand starting at position 710 of SEQ ID NO: 1884025
ucagauaugcagcacauau

SEQ ID NO: 2234325 - RNA, 19 nt, Artificial Sequence
  Description of Artificial Sequence: Synthetic oligonucleotide
  Antisense strand to SEQ ID NO: 2234324
auaugugcugcauaucuga

SEQ ID NO: 2234326 - RNA, 19 nt, Artificial Sequence
  Description of Artificial Sequence: Synthetic oligonucleotide
  Sense strand starting at position 1390 of SEQ ID NO: 1884025
gcguuuguccggagagccu

SEQ ID NO: 2234327 - RNA, 19 nt, Artificial Sequence
  Description of Artificial Sequence: Synthetic oligonucleotide
  Antisense strand to SEQ ID NO: 2234326
aggcucuccggacaaacgc

SEQ ID NO: 2234328 - RNA, 19 nt, Artificial Sequence
  Description of Artificial Sequence: Synthetic oligonucleotide
  Sense strand starting at position 1424 of SEQ ID NO: 1884025
gacggaaccuccucuaagu

SEQ ID NO: 2234329 - RNA, 19 nt, Artificial Sequence
  Description of Artificial Sequence: Synthetic oligonucleotide
  Antisense strand to SEQ ID NO: 2234328
acuuagaggagguuccguc

SEQ ID NO: 2234330 - RNA, 19 nt, Artificial Sequence
  Description of Artificial Sequence: Synthetic oligonucleotide
  Sense strand starting at position 1435 of SEQ ID NO: 1884025
cucuaagucccagagcgau

SEQ ID NO: 2234331 - RNA, 19 nt, Artificial Sequence
  Description of Artificial Sequence: Synthetic oligonucleotide
  Antisense strand to SEQ ID NO: 2234330
aucgcucugggacuuagag

SEQ ID NO: 2234332 - RNA, 19 nt, Artificial Sequence
  Description of Artificial Sequence: Synthetic oligonucleotide
  Sense strand starting at position 1466 of SEQ ID NO: 1884025
cccagagaccuggguuaag

SEQ ID NO: 2234333 - RNA, 19 nt, Artificial Sequence
  Description of Artificial Sequence: Synthetic oligonucleotide
  Antisense strand to SEQ ID NO: 2234332
cuuaacccaggucucuggg

SEQ ID NO: 2234334 - RNA, 19 nt, Artificial Sequence
  Description of Artificial Sequence: Synthetic oligonucleotide
  Sense strand starting at position 1663 of SEQ ID NO: 1884025
agcaaagaaugucuugaua

SEQ ID NO: 2234335 - RNA, 19 nt, Artificial Sequence
  Description of Artificial Sequence: Synthetic oligonucleotide
  Antisense strand to SEQ ID NO: 2234334
uaucaagacauucuuugcu

SEQ ID NO: 2234336 - RNA, 19 nt, Artificial Sequence
  Description of Artificial Sequence: Synthetic oligonucleotide
  Sense strand starting at position 1790 of SEQ ID NO: 1884025
ugguaauauucgguauucu

SEQ ID NO: 2234337 - RNA, 19 nt, Artificial Sequence
  Description of Artificial Sequence: Synthetic oligonucleotide
  Antisense strand to SEQ ID NO: 2234336
agaauaccgaauauuacca

SEQ ID NO: 2234338 - RNA, 19 nt, Artificial Sequence
  Description of Artificial Sequence: Synthetic oligonucleotide
  Sense strand starting at position 1791 of SEQ ID NO: 1884025
gguaauauucgguauucuc

SEQ ID NO: 2234339 - RNA, 19 nt, Artificial Sequence
  Description of Artificial Sequence: Synthetic oligonucleotide
  Antisense strand to SEQ ID NO: 2234338
gagaauaccgaauauuacc

SEQ ID NO: 2234340 - RNA, 19 nt, Artificial Sequence
  Description of Artificial Sequence: Synthetic oligonucleotide
  Sense strand starting at position 1914 of SEQ ID NO: 1884025
agacaaugcuaccuguguu

SEQ ID NO: 2234341 - RNA, 19 nt, Artificial Sequence
  Description of Artificial Sequence: Synthetic oligonucleotide
  Antisense strand to SEQ ID NO: 2234340
aacacagguagcauugucu

SEQ ID NO: 2234342 - RNA, 19 nt, Artificial Sequence
  Description of Artificial Sequence: Synthetic oligonucleotide
  Sense strand starting at position 2017 of SEQ ID NO: 1884025
gagugaacuugagugcauu

SEQ ID NO: 2234343 - RNA, 19 nt, Artificial Sequence
  Description of Artificial Sequence: Synthetic oligonucleotide
  Antisense strand to SEQ ID NO: 2234342
aaugcacucaaguucacuc

SEQ ID NO: 2234344 - RNA, 19 nt, Artificial Sequence
  Description of Artificial Sequence: Synthetic oligonucleotide
  Sense strand starting at position 2134 of SEQ ID NO: 1884025
gguuauuucuguuccugca

SEQ ID NO: 2234345 - RNA, 19 nt, Artificial Sequence
  Description of Artificial Sequence: Synthetic oligonucleotide
  Antisense strand to SEQ ID NO: 2234344
ugcaggaacagaaauaacc

SEQ ID NO: 2234346 - RNA, 19 nt, Artificial Sequence
  Description of Artificial Sequence: Synthetic oligonucleotide
  Sense strand starting at position 2194 of SEQ ID NO: 1884025
caaggaucauggucaguac

SEQ ID NO: 2234347 - RNA, 19 nt, Artificial Sequence
  Description of Artificial Sequence: Synthetic oligonucleotide
  Antisense strand to SEQ ID NO: 2234346
guacugaccaugauccuug

SEQ ID NO: 2234348 - RNA, 19 nt, Artificial Sequence
  Description of Artificial Sequence: Synthetic oligonucleotide
  Sense strand starting at position 2197 of SEQ ID NO: 1884025
ggaucauggucaguacauu

SEQ ID NO: 2234349 - RNA, 19 nt, Artificial Sequence
  Description of Artificial Sequence: Synthetic oligonucleotide
  Antisense strand to SEQ ID NO: 2234348
aauguacugaccaugaucc

SEQ ID NO: 2234350 - RNA, 19 nt, Artificial Sequence
  Description of Artificial Sequence: Synthetic oligonucleotide
  Sense strand starting at position 2198 of SEQ ID NO: 1884025
gaucauggucaguacauua

SEQ ID NO: 2234351 - RNA, 19 nt, Artificial Sequence
  Description of Artificial Sequence: Synthetic oligonucleotide
  Antisense strand to SEQ ID NO: 2234350
uaauguacugaccaugauc

SEQ ID NO: 2234352 - RNA, 19 nt, Artificial Sequence
  Description of Artificial Sequence: Synthetic oligonucleotide
  Sense strand starting at position 2208 of SEQ ID NO: 1884025
aguacauuaggcugaauau

SEQ ID NO: 2234353 - RNA, 19 nt, Artificial Sequence
  Description of Artificial Sequence: Synthetic oligonucleotide
  Antisense strand to SEQ ID NO: 2234352
auauucagccuaauguacu

SEQ ID NO: 2234354 - RNA, 19 nt, Artificial Sequence
  Description of Artificial Sequence: Synthetic oligonucleotide
  Sense strand starting at position 2209 of SEQ ID NO: 1884025
guacauuaggcugaauaua

SEQ ID NO: 2234355 - RNA, 19 nt, Artificial Sequence
  Description of Artificial Sequence: Synthetic oligonucleotide
  Antisense strand to SEQ ID NO: 2234354
uauauucagccuaauguac

SEQ ID NO: 2234356 - RNA, 19 nt, Artificial Sequence
  Description of Artificial Sequence: Synthetic oligonucleotide
  Sense strand starting at position 2265 of SEQ ID NO: 1884025
auacauuaggaacguaauu

SEQ ID NO: 2234357 - RNA, 19 nt, Artificial Sequence
  Description of Artificial Sequence: Synthetic oligonucleotide
  Antisense strand to SEQ ID NO: 2234356
aauuacguuccuaauguau

SEQ ID NO: 2234358 - RNA, 19 nt, Artificial Sequence
  Description of Artificial Sequence: Synthetic oligonucleotide
  Sense strand starting at position 2662 of SEQ ID NO: 1884025
uucuuugucccgcaaggga

SEQ ID NO: 2234359 - RNA, 19 nt, Artificial Sequence
  Description of Artificial Sequence: Synthetic oligonucleotide
  Antisense strand to SEQ ID NO: 2234358
ucccuugcgggacaaagaa

SEQ ID NO: 2234360 - RNA, 19 nt, Artificial Sequence
  Description of Artificial Sequence: Synthetic oligonucleotide
  Sense strand starting at position 2675 of SEQ ID NO: 1884025
aagggacuccucugaguac

SEQ ID NO: 2234361 - RNA, 19 nt, Artificial Sequence
  Description of Artificial Sequence: Synthetic oligonucleotide
  Antisense strand to SEQ ID NO: 2234360
guacucagaggagucccuu

SEQ ID NO: 2234362 - RNA, 19 nt, Artificial Sequence
  Description of Artificial Sequence: Synthetic oligonucleotide
  Sense strand starting at position 2911 of SEQ ID NO: 1884025
acuuuaucucagggcuguu

SEQ ID NO: 2234363 - RNA, 19 nt, Artificial Sequence
  Description of Artificial Sequence: Synthetic oligonucleotide
  Antisense strand to SEQ ID NO: 2234362
aacagcccugagauaaagu

SEQ ID NO: 2234364 - RNA, 19 nt, Artificial Sequence
  Description of Artificial Sequence: Synthetic oligonucleotide
  Sense strand starting at position 2936 of SEQ ID NO: 1884025
agccaugucuucuccaaga

SEQ ID NO: 2234365 - RNA, 19 nt, Artificial Sequence
  Description of Artificial Sequence: Synthetic oligonucleotide
  Antisense strand to SEQ ID NO: 2234364
ucuuggagaagacauggcu

SEQ ID NO: 2234366 - RNA, 19 nt, Artificial Sequence
  Description of Artificial Sequence: Synthetic oligonucleotide
  Sense strand starting at position 2941 of SEQ ID NO: 1884025
ugucuucuccaagagccaa

SEQ ID NO: 2234367 - RNA, 19 nt, Artificial Sequence
  Description of Artificial Sequence: Synthetic oligonucleotide
  Antisense strand to SEQ ID NO: 2234366
uuggcucuuggagaagaca

SEQ ID NO: 2234368 - RNA, 19 nt, Artificial Sequence
  Description of Artificial Sequence: Synthetic oligonucleotide
  Sense strand starting at position 3153 of SEQ ID NO: 1884025
gucccaugggcucagucau

SEQ ID NO: 2234369 - RNA, 19 nt, Artificial Sequence
  Description of Artificial Sequence: Synthetic oligonucleotide
  Antisense strand to SEQ ID NO: 2234368
augacugagcccaugggac

SEQ ID NO: 2234370 - RNA, 19 nt, Artificial Sequence
  Description of Artificial Sequence: Synthetic oligonucleotide
  Sense strand starting at position 3160 of SEQ ID NO: 1884025
gggcucagucauugagcaa

SEQ ID NO: 2234371 - RNA, 19 nt, Artificial Sequence
  Description of Artificial Sequence: Synthetic oligonucleotide
  Antisense strand to SEQ ID NO: 2234370
uugcucaaugacugagccc

SEQ ID NO: 2234372 - RNA, 19 nt, Artificial Sequence
  Description of Artificial Sequence: Synthetic oligonucleotide
  Sense strand starting at position 3161 of SEQ ID NO: 1884025
ggcucagucauugagcaaa

SEQ ID NO: 2234373 - RNA, 19 nt, Artificial Sequence
  Description of Artificial Sequence: Synthetic oligonucleotide
  Antisense strand to SEQ ID NO: 2234372
uuugcucaaugacugagcc

SEQ ID NO: 2234374 - RNA, 19 nt, Artificial Sequence
  Description of Artificial Sequence: Synthetic oligonucleotide
  Sense strand starting at position 3598 of SEQ ID NO: 1884025
uugucuauccuagaugaau

SEQ ID NO: 2234375 - RNA, 19 nt, Artificial Sequence
  Description of Artificial Sequence: Synthetic oligonucleotide
  Antisense strand to SEQ ID NO: 2234374
auucaucuaggauagacaa

SEQ ID NO: 2234376 - RNA, 19 nt, Artificial Sequence
  Description of Artificial Sequence: Synthetic oligonucleotide
  Sense strand starting at position 3607 of SEQ ID NO: 1884025
cuagaugaauccuuguuug

SEQ ID NO: 2234377 - RNA, 19 nt, Artificial Sequence
  Description of Artificial Sequence: Synthetic oligonucleotide
  Antisense strand to SEQ ID NO: 2234376
caaacaaggauucaucuag

SEQ ID NO: 2234378 - RNA, 19 nt, Artificial Sequence
  Description of Artificial Sequence: Synthetic oligonucleotide
  Sense strand starting at position 3610 of SEQ ID NO: 1884025
gaugaauccuuguuugaga

SEQ ID NO: 2234379 - RNA, 19 nt, Artificial Sequence
  Description of Artificial Sequence: Synthetic oligonucleotide
  Antisense strand to SEQ ID NO: 2234378
ucucaaacaaggauucauc

SEQ ID NO: 2234380 - RNA, 19 nt, Artificial Sequence
  Description of Artificial Sequence: Synthetic oligonucleotide
  Sense strand starting at position 3612 of SEQ ID NO: 1884025
ugaauccuuguuugagaag

SEQ ID NO: 2234381 - RNA, 19 nt, Artificial Sequence
  Description of Artificial Sequence: Synthetic oligonucleotide
  Antisense strand to SEQ ID NO: 2234380
cuucucaaacaaggauuca

SEQ ID NO: 2234382 - RNA, 19 nt, Artificial Sequence
  Description of Artificial Sequence: Synthetic oligonucleotide
  Sense strand starting at position 3712 of SEQ ID NO: 1884025
cuugaaagccagggucaaa

SEQ ID NO: 2234383 - RNA, 19 nt, Artificial Sequence
  Description of Artificial Sequence: Synthetic oligonucleotide
  Antisense strand to SEQ ID NO: 2234382
uuugacccuggcuuucaag

SEQ ID NO: 2234384 - RNA, 19 nt, Artificial Sequence
  Description of Artificial Sequence: Synthetic oligonucleotide
  Sense strand starting at position 3823 of SEQ ID NO: 1884025
caggcacaagucugucaua

SEQ ID NO: 2234385 - RNA, 19 nt, Artificial Sequence
  Description of Artificial Sequence: Synthetic oligonucleotide
  Antisense strand to SEQ ID NO: 2234384
uaugacagacuugugccug

SEQ ID NO: 2234386 - RNA, 19 nt, Artificial Sequence
  Description of Artificial Sequence: Synthetic oligonucleotide
  Sense strand starting at position 3824 of SEQ ID NO: 1884025
aggcacaagucugucauau

SEQ ID NO: 2234387 - RNA, 19 nt, Artificial Sequence
  Description of Artificial Sequence: Synthetic oligonucleotide
  Antisense strand to SEQ ID NO: 2234386
auaugacagacuugugccu

SEQ ID NO: 2234388 - RNA, 19 nt, Artificial Sequence
  Description of Artificial Sequence: Synthetic oligonucleotide
  Sense strand starting at position 121 of SEQ ID NO: 1884026
ccucacacuccagggauua

SEQ ID NO: 2234389 - RNA, 19 nt, Artificial Sequence
  Description of Artificial Sequence: Synthetic oligonucleotide
  Antisense strand to SEQ ID NO: 2234388
uaaucccuggagugugagg

SEQ ID NO: 2234390 - RNA, 19 nt, Artificial Sequence
  Description of Artificial Sequence: Synthetic oligonucleotide
  Sense strand starting at position 122 of SEQ ID NO: 1884026
cucacacuccagggauuau

SEQ ID NO: 2234391 - RNA, 19 nt, Artificial Sequence
  Description of Artificial Sequence: Synthetic oligonucleotide
  Antisense strand to SEQ ID NO: 2234390
auaaucccuggagugugag

SEQ ID NO: 2234392 - RNA, 19 nt, Artificial Sequence
  Description of Artificial Sequence: Synthetic oligonucleotide
  Sense strand starting at position 132 of SEQ ID NO: 1884026
agggauuauccagggugca

SEQ ID NO: 2234393 - RNA, 19 nt, Artificial Sequence
  Description of Artificial Sequence: Synthetic oligonucleotide
  Antisense strand to SEQ ID NO: 2234392
ugcacccuggauaaucccu

SEQ ID NO: 2234394 - RNA, 19 nt, Artificial Sequence
  Description of Artificial Sequence: Synthetic oligonucleotide
  Sense strand starting at position 133 of SEQ ID NO: 1884026
gggauuauccagggugcag

SEQ ID NO: 2234395 - RNA, 19 nt, Artificial Sequence
  Description of Artificial Sequence: Synthetic oligonucleotide
  Antisense strand to SEQ ID NO: 2234394
cugcacccuggauaauccc

SEQ ID NO: 2234396 - RNA, 19 nt, Artificial Sequence
  Description of Artificial Sequence: Synthetic oligonucleotide
  Sense strand starting at position 135 of SEQ ID NO: 1884026
gauuauccagggugcagaa

SEQ ID NO: 2234397 - RNA, 19 nt, Artificial Sequence
  Description of Artificial Sequence: Synthetic oligonucleotide
  Antisense strand to SEQ ID NO: 2234396
uucugcacccuggauaauc

SEQ ID NO: 2234398 - RNA, 19 nt, Artificial Sequence
  Description of Artificial Sequence: Synthetic oligonucleotide
  Sense strand starting at position 398 of SEQ ID NO: 1884026
uuaugcaagucuccaaaga

SEQ ID NO: 2234399 - RNA, 19 nt, Artificial Sequence
  Description of Artificial Sequence: Synthetic oligonucleotide
  Antisense strand to SEQ ID NO: 2234398
ucuuuggagacuugcauaa

SEQ ID NO: 2234400 - RNA, 19 nt, Artificial Sequence
  Description of Artificial Sequence: Synthetic oligonucleotide
  Sense strand starting at position 562 of SEQ ID NO: 1884026
ggauaagccaucugguauu

SEQ ID NO: 2234401 - RNA, 19 nt, Artificial Sequence
  Description of Artificial Sequence: Synthetic oligonucleotide
  Antisense strand to SEQ ID NO: 2234400
aauaccagauggcuuaucc

SEQ ID NO: 2234402 - RNA, 19 nt, Artificial Sequence
  Description of Artificial Sequence: Synthetic oligonucleotide
  Sense strand starting at position 1180 of SEQ ID NO: 1884026
uugcccacugcuuaugaga

SEQ ID NO: 2234403 - RNA, 19 nt, Artificial Sequence
  Description of Artificial Sequence: Synthetic oligonucleotide
  Antisense strand to SEQ ID NO: 2234402
ucucauaagcagugggcaa

SEQ ID NO: 2234404 - RNA, 19 nt, Artificial Sequence
  Description of Artificial Sequence: Synthetic oligonucleotide
  Sense strand starting at position 1352 of SEQ ID NO: 1884026
gagggugcaucagcaauau

SEQ ID NO: 2234405 - RNA, 19 nt, Artificial Sequence
  Description of Artificial Sequence: Synthetic oligonucleotide
  Antisense strand to SEQ ID NO: 2234404
auauugcugaugcacccuc

SEQ ID NO: 2234406 - RNA, 19 nt, Artificial Sequence
  Description of Artificial Sequence: Synthetic oligonucleotide
  Sense strand starting at position 1420 of SEQ ID NO: 1884026
uagaaagauuuaggaugua

SEQ ID NO: 2234407 - RNA, 19 nt, Artificial Sequence
  Description of Artificial Sequence: Synthetic oligonucleotide
  Antisense strand to SEQ ID NO: 2234406
uacauccuaaaucuuucua

SEQ ID NO: 2234408 - RNA, 19 nt, Artificial Sequence
  Description of Artificial Sequence: Synthetic oligonucleotide
  Sense strand starting at position 1634 of SEQ ID NO: 1884026
uuccucuugccugaauuga

SEQ ID NO: 2234409 - RNA, 19 nt, Artificial Sequence
  Description of Artificial Sequence: Synthetic oligonucleotide
  Antisense strand to SEQ ID NO: 2234408
ucaauucaggcaagaggaa

SEQ ID NO: 2234410 - RNA, 19 nt, Artificial Sequence
  Description of Artificial Sequence: Synthetic oligonucleotide
  Sense strand starting at position 1724 of SEQ ID NO: 1884026
ggauguaagacgcacauga

SEQ ID NO: 2234411 - RNA, 19 nt, Artificial Sequence
  Description of Artificial Sequence: Synthetic oligonucleotide
  Antisense strand to SEQ ID NO: 2234410
ucaugugcgucuuacaucc

SEQ ID NO: 2234412 - RNA, 19 nt, Artificial Sequence
  Description of Artificial Sequence: Synthetic oligonucleotide
  Sense strand starting at position 1726 of SEQ ID NO: 1884026
auguaagacgcacaugaua

SEQ ID NO: 2234413 - RNA, 19 nt, Artificial Sequence
  Description of Artificial Sequence: Synthetic oligonucleotide
  Antisense strand to SEQ ID NO: 2234412
uaucaugugcgucuuacau

SEQ ID NO: 2234414 - RNA, 19 nt, Artificial Sequence
  Description of Artificial Sequence: Synthetic oligonucleotide
  Sense strand starting at position 1728 of SEQ ID NO: 1884026
guaagacgcacaugauaga

SEQ ID NO: 2234415 - RNA, 19 nt, Artificial Sequence
  Description of Artificial Sequence: Synthetic oligonucleotide
  Antisense strand to SEQ ID NO: 2234414
ucuaucaugugcgucuuac

SEQ ID NO: 2234416 - RNA, 19 nt, Artificial Sequence
  Description of Artificial Sequence: Synthetic oligonucleotide
  Sense strand starting at position 1796 of SEQ ID NO: 1884026
uagaacaggcuggguuaua

SEQ ID NO: 2234417 - RNA, 19 nt, Artificial Sequence
  Description of Artificial Sequence: Synthetic oligonucleotide
  Antisense strand to SEQ ID NO: 2234416
uauaacccagccuguucua

SEQ ID NO: 2234418 - RNA, 19 nt, Artificial Sequence
  Description of Artificial Sequence: Synthetic oligonucleotide
  Sense strand starting at position 1805 of SEQ ID NO: 1884026
cuggguuauaccgaguaac

SEQ ID NO: 2234419 - RNA, 19 nt, Artificial Sequence
  Description of Artificial Sequence: Synthetic oligonucleotide
  Antisense strand to SEQ ID NO: 2234418
guuacucgguauaacccag

SEQ ID NO: 2234420 - RNA, 19 nt, Artificial Sequence
  Description of Artificial Sequence: Synthetic oligonucleotide
  Sense strand starting at position 1808 of SEQ ID NO: 1884026
gguuauaccgaguaacaaa

SEQ ID NO: 2234421 - RNA, 19 nt, Artificial Sequence
  Description of Artificial Sequence: Synthetic oligonucleotide
  Antisense strand to SEQ ID NO: 2234420
uuuguuacucgguauaacc

SEQ ID NO: 2234422 - RNA, 19 nt, Artificial Sequence
  Description of Artificial Sequence: Synthetic oligonucleotide
  Sense strand starting at position 1844 of SEQ ID NO: 1884026
ggcuucccuccacaaagau

SEQ ID NO: 2234423 - RNA, 19 nt, Artificial Sequence
  Description of Artificial Sequence: Synthetic oligonucleotide
  Antisense strand to SEQ ID NO: 2234422
aucuuuguggagggaagcc

SEQ ID NO: 2234424 - RNA, 19 nt, Artificial Sequence
  Description of Artificial Sequence: Synthetic oligonucleotide
  Sense strand starting at position 2074 of SEQ ID NO: 1884026
ugacacuuguacuugaauu

SEQ ID NO: 2234425 - RNA, 19 nt, Artificial Sequence
  Description of Artificial Sequence: Synthetic oligonucleotide
  Antisense strand to SEQ ID NO: 2234424
aauucaaguacaaguguca

SEQ ID NO: 2234426 - RNA, 19 nt, Artificial Sequence
  Description of Artificial Sequence: Synthetic oligonucleotide
  Sense strand starting at position 2139 of SEQ ID NO: 1884026
agggauguucagugagcaa

SEQ ID NO: 2234427 - RNA, 19 nt, Artificial Sequence
  Description of Artificial Sequence: Synthetic oligonucleotide
  Antisense strand to SEQ ID NO: 2234426
uugcucacugaacaucccu

SEQ ID NO: 2234428 - RNA, 19 nt, Artificial Sequence
  Description of Artificial Sequence: Synthetic oligonucleotide
  Sense strand starting at position 2153 of SEQ ID NO: 1884026
agcaaaucacccugagaac

SEQ ID NO: 2234429 - RNA, 19 nt, Artificial Sequence
  Description of Artificial Sequence: Synthetic oligonucleotide
  Antisense strand to SEQ ID NO: 2234428
guucucagggugauuugcu

SEQ ID NO: 2234430 - RNA, 19 nt, Artificial Sequence
  Description of Artificial Sequence: Synthetic oligonucleotide
  Sense strand starting at position 2423 of SEQ ID NO: 1884026
aguaaugaguucuuauccu

SEQ ID NO: 2234431 - RNA, 19 nt, Artificial Sequence
  Description of Artificial Sequence: Synthetic oligonucleotide
  Antisense strand to SEQ ID NO: 2234430
aggauaagaacucauuacu

SEQ ID NO: 2234432 - RNA, 19 nt, Artificial Sequence
  Description of Artificial Sequence: Synthetic oligonucleotide
  Sense strand starting at position 2427 of SEQ ID NO: 1884026
augaguucuuauccugacu

SEQ ID NO: 2234433 - RNA, 19 nt, Artificial Sequence
  Description of Artificial Sequence: Synthetic oligonucleotide
  Antisense strand to SEQ ID NO: 2234432
agucaggauaagaacucau

SEQ ID NO: 2234434 - RNA, 19 nt, Artificial Sequence
  Description of Artificial Sequence: Synthetic oligonucleotide
  Sense strand starting at position 2541 of SEQ ID NO: 1884026
uccuacagguuaucucuua

SEQ ID NO: 2234435 - RNA, 19 nt, Artificial Sequence
  Description of Artificial Sequence: Synthetic oligonucleotide
  Antisense strand to SEQ ID NO: 2234434
uaagagauaaccuguagga

SEQ ID NO: 2234436 - RNA, 19 nt, Artificial Sequence
  Description of Artificial Sequence: Synthetic oligonucleotide
  Sense strand starting at position 2542 of SEQ ID NO: 1884026
ccuacagguuaucucuuau

SEQ ID NO: 2234437 - RNA, 19 nt, Artificial Sequence
  Description of Artificial Sequence: Synthetic oligonucleotide
  Antisense strand to SEQ ID NO: 2234436
auaagagauaaccuguagg

SEQ ID NO: 2234438 - RNA, 19 nt, Artificial Sequence
  Description of Artificial Sequence: Synthetic oligonucleotide
  Sense strand starting at position 2617 of SEQ ID NO: 1884026
acacuuaaugguugagcau

SEQ ID NO: 2234439 - RNA, 19 nt, Artificial Sequence
  Description of Artificial Sequence: Synthetic oligonucleotide
  Antisense strand to SEQ ID NO: 2234438
augcucaaccauuaagugu

SEQ ID NO: 2234440 - RNA, 19 nt, Artificial Sequence
  Description of Artificial Sequence: Synthetic oligonucleotide
  Sense strand starting at position 2618 of SEQ ID NO: 1884026
cacuuaaugguugagcauu

SEQ ID NO: 2234441 - RNA, 19 nt, Artificial Sequence
  Description of Artificial Sequence: Synthetic oligonucleotide
  Antisense strand to SEQ ID NO: 2234440
aaugcucaaccauuaagug

SEQ ID NO: 2234442 - RNA, 19 nt, Artificial Sequence
  Description of Artificial Sequence: Synthetic oligonucleotide
  Sense strand starting at position 2806 of SEQ ID NO: 1884026
uuauauauuuccuuuccgu

SEQ ID NO: 2234443 - RNA, 19 nt, Artificial Sequence
  Description of Artificial Sequence: Synthetic oligonucleotide
  Antisense strand to SEQ ID NO: 2234442
acggaaaggaaauauauaa

SEQ ID NO: 2234444 - RNA, 19 nt, Artificial Sequence
  Description of Artificial Sequence: Synthetic oligonucleotide
  Sense strand starting at position 2842 of SEQ ID NO: 1884026
uuuggucaugccgacuuaa

SEQ ID NO: 2234445 - RNA, 19 nt, Artificial Sequence
  Description of Artificial Sequence: Synthetic oligonucleotide
  Antisense strand to SEQ ID NO: 2234444
uuaagucggcaugaccaaa

SEQ ID NO: 2234446 - RNA, 19 nt, Artificial Sequence
  Description of Artificial Sequence: Synthetic oligonucleotide
  Sense strand starting at position 2950 of SEQ ID NO: 1884026
gccuuuaauguggauuaca

SEQ ID NO: 2234447 - RNA, 19 nt, Artificial Sequence
  Description of Artificial Sequence: Synthetic oligonucleotide
  Antisense strand to SEQ ID NO: 2234446
uguaauccacauuaaaggc

SEQ ID NO: 2234448 - RNA, 19 nt, Artificial Sequence
  Description of Artificial Sequence: Synthetic oligonucleotide
  Sense strand starting at position 2987 of SEQ ID NO: 1884026
ugggccaucuuauuaucau

SEQ ID NO: 2234449 - RNA, 19 nt, Artificial Sequence
  Description of Artificial Sequence: Synthetic oligonucleotide
  Antisense strand to SEQ ID NO: 2234448
augauaauaagauggccca

SEQ ID NO: 2234450 - RNA, 19 nt, Artificial Sequence
  Description of Artificial Sequence: Synthetic oligonucleotide
  Sense strand starting at position 3044 of SEQ ID NO: 1884026
augcuaugauuaguaucau

SEQ ID NO: 2234451 - RNA, 19 nt, Artificial Sequence
  Description of Artificial Sequence: Synthetic oligonucleotide
  Antisense strand to SEQ ID NO: 2234450
augauacuaaucauagcau

SEQ ID NO: 2234452 - RNA, 19 nt, Artificial Sequence
  Description of Artificial Sequence: Synthetic oligonucleotide
  Sense strand starting at position 3425 of SEQ ID NO: 1884026
aagacugaacggugauuaa

SEQ ID NO: 2234453 - RNA, 19 nt, Artificial Sequence
  Description of Artificial Sequence: Synthetic oligonucleotide
  Antisense strand to SEQ ID NO: 2234452
uuaaucaccguucagucuu

SEQ ID NO: 2234454 - RNA, 19 nt, Artificial Sequence
  Description of Artificial Sequence: Synthetic oligonucleotide
  Sense strand starting at position 3428 of SEQ ID NO: 1884026
acugaacggugauuaaauu

SEQ ID NO: 2234455 - RNA, 19 nt, Artificial Sequence
  Description of Artificial Sequence: Synthetic oligonucleotide
  Antisense strand to SEQ ID NO: 2234454
aauuuaaucaccguucagu

SEQ ID NO: 2234456 - RNA, 19 nt, Artificial Sequence
  Description of Artificial Sequence: Synthetic oligonucleotide
  Sense strand starting at position 3488 of SEQ ID NO: 1884026
uaaagcuggcaguauauau

SEQ ID NO: 2234457 - RNA, 19 nt, Artificial Sequence
  Description of Artificial Sequence: Synthetic oligonucleotide
  Antisense strand to SEQ ID NO: 2234456
auauauacugccagcuuua

SEQ ID NO: 2234458 - RNA, 19 nt, Artificial Sequence
  Description of Artificial Sequence: Synthetic oligonucleotide
  Sense strand starting at position 3516 of SEQ ID NO: 1884026
cugagauauuugcauacau

SEQ ID NO: 2234459 - RNA, 19 nt, Artificial Sequence
  Description of Artificial Sequence: Synthetic oligonucleotide
  Antisense strand to SEQ ID NO: 2234458
auguaugcaaauaucucag

SEQ ID NO: 2234460 - RNA, 19 nt, Artificial Sequence
  Description of Artificial Sequence: Synthetic oligonucleotide
  Sense strand starting at position 3548 of SEQ ID NO: 1884026
accagacauuagcugaaau

SEQ ID NO: 2234461 - RNA, 19 nt, Artificial Sequence
  Description of Artificial Sequence: Synthetic oligonucleotide
  Antisense strand to SEQ ID NO: 2234460
auuucagcuaaugucuggu

SEQ ID NO: 2234462 - RNA, 19 nt, Artificial Sequence
  Description of Artificial Sequence: Synthetic oligonucleotide
  Sense strand starting at position 3672 of SEQ ID NO: 1884026
ucucuaauuuaggagcuga

SEQ ID NO: 2234463 - RNA, 19 nt, Artificial Sequence
  Description of Artificial Sequence: Synthetic oligonucleotide
  Antisense strand to SEQ ID NO: 2234462
ucagcuccuaaauuagaga

SEQ ID NO: 2234464 - RNA, 19 nt, Artificial Sequence
  Description of Artificial Sequence: Synthetic oligonucleotide
  Sense strand starting at position 3738 of SEQ ID NO: 1884026
aauagaaggugcucuuuga

SEQ ID NO: 2234465 - RNA, 19 nt, Artificial Sequence
  Description of Artificial Sequence: Synthetic oligonucleotide
  Antisense strand to SEQ ID NO: 2234464
ucaaagagcaccuucuauu

SEQ ID NO: 2234466 - RNA, 19 nt, Artificial Sequence
  Description of Artificial Sequence: Synthetic oligonucleotide
  Sense strand starting at position 3759 of SEQ ID NO: 1884026
cccagaucugcugguagaa

SEQ ID NO: 2234467 - RNA, 19 nt, Artificial Sequence
  Description of Artificial Sequence: Synthetic oligonucleotide
  Antisense strand to SEQ ID NO: 2234466
uucuaccagcagaucuggg

SEQ ID NO: 2234468 - RNA, 19 nt, Artificial Sequence
  Description of Artificial Sequence: Synthetic oligonucleotide
  Sense strand starting at position 122 of SEQ ID NO: 1884027
guuggaagcauuugcacau

SEQ ID NO: 2234469 - RNA, 19 nt, Artificial Sequence
  Description of Artificial Sequence: Synthetic oligonucleotide
  Antisense strand to SEQ ID NO: 2234468
augugcaaaugcuuccaac

SEQ ID NO: 2234470 - RNA, 19 nt, Artificial Sequence
  Description of Artificial Sequence: Synthetic oligonucleotide
  Sense strand starting at position 410 of SEQ ID NO: 1884027
uuaccuauggcuugagaau

SEQ ID NO: 2234471 - RNA, 19 nt, Artificial Sequence
  Description of Artificial Sequence: Synthetic oligonucleotide
  Antisense strand to SEQ ID NO: 2234470
auucucaagccauagguaa

SEQ ID NO: 2234472 - RNA, 19 nt, Artificial Sequence
  Description of Artificial Sequence: Synthetic oligonucleotide
  Sense strand starting at position 422 of SEQ ID NO: 1884027
ugagaauccaaguguggag

SEQ ID NO: 2234473 - RNA, 19 nt, Artificial Sequence
  Description of Artificial Sequence: Synthetic oligonucleotide
  Antisense strand to SEQ ID NO: 2234472
cuccacacuuggauucuca

SEQ ID NO: 2234474 - RNA, 19 nt, Artificial Sequence
  Description of Artificial Sequence: Synthetic oligonucleotide
  Sense strand starting at position 431 of SEQ ID NO: 1884027
aaguguggagucugggaaa

SEQ ID NO: 2234475 - RNA, 19 nt, Artificial Sequence
  Description of Artificial Sequence: Synthetic oligonucleotide
  Antisense strand to SEQ ID NO: 2234474
uuucccagacuccacacuu

SEQ ID NO: 2234476 - RNA, 19 nt, Artificial Sequence
  Description of Artificial Sequence: Synthetic oligonucleotide
  Sense strand starting at position 741 of SEQ ID NO: 1884027
gugccauguguacacaaga

SEQ ID NO: 2234477 - RNA, 19 nt, Artificial Sequence
  Description of Artificial Sequence: Synthetic oligonucleotide
  Antisense strand to SEQ ID NO: 2234476
ucuuguguacacauggcac

SEQ ID NO: 2234478 - RNA, 19 nt, Artificial Sequence
  Description of Artificial Sequence: Synthetic oligonucleotide
  Sense strand starting at position 777 of SEQ ID NO: 1884027
gugacauguaagcaugauc

SEQ ID NO: 2234479 - RNA, 19 nt, Artificial Sequence
  Description of Artificial Sequence: Synthetic oligonucleotide
  Antisense strand to SEQ ID NO: 2234478
gaucaugcuuacaugucac

SEQ ID NO: 2234480 - RNA, 19 nt, Artificial Sequence
  Description of Artificial Sequence: Synthetic oligonucleotide
  Sense strand starting at position 780 of SEQ ID NO: 1884027
acauguaagcaugaucaug

SEQ ID NO: 2234481 - RNA, 19 nt, Artificial Sequence
  Description of Artificial Sequence: Synthetic oligonucleotide
  Antisense strand to SEQ ID NO: 2234480
caugaucaugcuuacaugu

SEQ ID NO: 2234482 - RNA, 19 nt, Artificial Sequence
  Description of Artificial Sequence: Synthetic oligonucleotide
  Sense strand starting at position 812 of SEQ ID NO: 1884027
gucugagugugcaugugua

SEQ ID NO: 2234483 - RNA, 19 nt, Artificial Sequence
  Description of Artificial Sequence: Synthetic oligonucleotide
  Antisense strand to SEQ ID NO: 2234482
uacacaugcacacucagac

SEQ ID NO: 2234484 - RNA, 19 nt, Artificial Sequence
  Description of Artificial Sequence: Synthetic oligonucleotide
  Sense strand starting at position 864 of SEQ ID NO: 1884027
ggagcaggucucuaaucca

SEQ ID NO: 2234485 - RNA, 19 nt, Artificial Sequence
  Description of Artificial Sequence: Synthetic oligonucleotide
  Antisense strand to SEQ ID NO: 2234484
uggauuagagaccugcucc

SEQ ID NO: 2234486 - RNA, 19 nt, Artificial Sequence
  Description of Artificial Sequence: Synthetic oligonucleotide
  Sense strand starting at position 1875 of SEQ ID NO: 1884027
aggugauguguacauguau

SEQ ID NO: 2234487 - RNA, 19 nt, Artificial Sequence
  Description of Artificial Sequence: Synthetic oligonucleotide
  Antisense strand to SEQ ID NO: 2234486
auacauguacacaucaccu

SEQ ID NO: 2234488 - RNA, 19 nt, Artificial Sequence
  Description of Artificial Sequence: Synthetic oligonucleotide
  Sense strand starting at position 2136 of SEQ ID NO: 1884027
acuguauuugcauguuuau

SEQ ID NO: 2234489 - RNA, 19 nt, Artificial Sequence
  Description of Artificial Sequence: Synthetic oligonucleotide
  Antisense strand to SEQ ID NO: 2234488
auaaacaugcaaauacagu

SEQ ID NO: 2234490 - RNA, 19 nt, Artificial Sequence
  Description of Artificial Sequence: Synthetic oligonucleotide
  Sense strand starting at position 2169 of SEQ ID NO: 1884027
ugaaacaucuggucuaguu

SEQ ID NO: 2234491 - RNA, 19 nt, Artificial Sequence
  Description of Artificial Sequence: Synthetic oligonucleotide
  Antisense strand to SEQ ID NO: 2234490
aacuagaccagauguuuca

SEQ ID NO: 2234492 - RNA, 19 nt, Artificial Sequence
  Description of Artificial Sequence: Synthetic oligonucleotide
  Sense strand starting at position 2236 of SEQ ID NO: 1884027
uccgguacagguugauuua

SEQ ID NO: 2234493 - RNA, 19 nt, Artificial Sequence
  Description of Artificial Sequence: Synthetic oligonucleotide
  Antisense strand to SEQ ID NO: 2234492
uaaaucaaccuguaccgga

SEQ ID NO: 2234494 - RNA, 19 nt, Artificial Sequence
  Description of Artificial Sequence: Synthetic oligonucleotide
  Sense strand starting at position 2265 of SEQ ID NO: 1884027
ccguaagaccgugugucuu

SEQ ID NO: 2234495 - RNA, 19 nt, Artificial Sequence
  Description of Artificial Sequence: Synthetic oligonucleotide
  Antisense strand to SEQ ID NO: 2234494
aagacacacggucuuacgg

SEQ ID NO: 2234496 - RNA, 19 nt, Artificial Sequence
  Description of Artificial Sequence: Synthetic oligonucleotide
  Sense strand starting at position 2338 of SEQ ID NO: 1884027
ugcuaauacuaagaauuug

SEQ ID NO: 2234497 - RNA, 19 nt, Artificial Sequence
  Description of Artificial Sequence: Synthetic oligonucleotide
  Antisense strand to SEQ ID NO: 2234496
caaauucuuaguauuagca

SEQ ID NO: 2234498 - RNA, 19 nt, Artificial Sequence
  Description of Artificial Sequence: Synthetic oligonucleotide
  Sense strand starting at position 2346 of SEQ ID NO: 1884027
cuaagaauuugugccucga

SEQ ID NO: 2234499 - RNA, 19 nt, Artificial Sequence
  Description of Artificial Sequence: Synthetic oligonucleotide
  Antisense strand to SEQ ID NO: 2234498
ucgaggcacaaauucuuag

SEQ ID NO: 2234500 - RNA, 19 nt, Artificial Sequence
  Description of Artificial Sequence: Synthetic oligonucleotide
  Sense strand starting at position 2350 of SEQ ID NO: 1884027
gaauuugugccucgauauu

SEQ ID NO: 2234501 - RNA, 19 nt, Artificial Sequence
  Description of Artificial Sequence: Synthetic oligonucleotide
  Antisense strand to SEQ ID NO: 2234500
aauaucgaggcacaaauuc

SEQ ID NO: 2234502 - RNA, 19 nt, Artificial Sequence
  Description of Artificial Sequence: Synthetic oligonucleotide
  Sense strand starting at position 2375 of SEQ ID NO: 1884027
gaaggugauucugugauau

SEQ ID NO: 2234503 - RNA, 19 nt, Artificial Sequence
  Description of Artificial Sequence: Synthetic oligonucleotide
  Antisense strand to SEQ ID NO: 2234502
auaucacagaaucaccuuc

SEQ ID NO: 2234504 - RNA, 19 nt, Artificial Sequence
  Description of Artificial Sequence: Synthetic oligonucleotide
  Sense strand starting at position 2450 of SEQ ID NO: 1884027
auagcauuguaauuacaug

SEQ ID NO: 2234505 - RNA, 19 nt, Artificial Sequence
  Description of Artificial Sequence: Synthetic oligonucleotide
  Antisense strand to SEQ ID NO: 2234504
cauguaauuacaaugcuau

SEQ ID NO: 2234506 - RNA, 19 nt, Artificial Sequence
  Description of Artificial Sequence: Synthetic oligonucleotide
  Sense strand starting at position 2458 of SEQ ID NO: 1884027
guaauuacauguuccuuaa

SEQ ID NO: 2234507 - RNA, 19 nt, Artificial Sequence
  Description of Artificial Sequence: Synthetic oligonucleotide
  Antisense strand to SEQ ID NO: 2234506
uuaaggaacauguaauuac

SEQ ID NO: 2234508 - RNA, 19 nt, Artificial Sequence
  Description of Artificial Sequence: Synthetic oligonucleotide
  Sense strand starting at position 2474 of SEQ ID NO: 1884027
uaagguuugcgagaacuug

SEQ ID NO: 2234509 - RNA, 19 nt, Artificial Sequence
  Description of Artificial Sequence: Synthetic oligonucleotide
  Antisense strand to SEQ ID NO: 2234508
caaguucucgcaaaccuua

SEQ ID NO: 2234510 - RNA, 19 nt, Artificial Sequence
  Description of Artificial Sequence: Synthetic oligonucleotide
  Sense strand starting at position 2545 of SEQ ID NO: 1884027
guguggguacguuugugua

SEQ ID NO: 2234511 - RNA, 19 nt, Artificial Sequence
  Description of Artificial Sequence: Synthetic oligonucleotide
  Antisense strand to SEQ ID NO: 2234510
uacacaaacguacccacac

SEQ ID NO: 2234512 - RNA, 19 nt, Artificial Sequence
  Description of Artificial Sequence: Synthetic oligonucleotide
  Sense strand starting at position 2703 of SEQ ID NO: 1884027
uuguuuggucaugugugua

SEQ ID NO: 2234513 - RNA, 19 nt, Artificial Sequence
  Description of Artificial Sequence: Synthetic oligonucleotide
  Antisense strand to SEQ ID NO: 2234512
uacacacaugaccaaacaa

SEQ ID NO: 2234514 - RNA, 19 nt, Artificial Sequence
  Description of Artificial Sequence: Synthetic oligonucleotide
  Sense strand starting at position 2799 of SEQ ID NO: 1884027
ggauguauauguguagaug

SEQ ID NO: 2234515 - RNA, 19 nt, Artificial Sequence
  Description of Artificial Sequence: Synthetic oligonucleotide
  Antisense strand to SEQ ID NO: 2234514
caucuacacauauacaucc

SEQ ID NO: 2234516 - RNA, 19 nt, Artificial Sequence
  Description of Artificial Sequence: Synthetic oligonucleotide
  Sense strand starting at position 2805 of SEQ ID NO: 1884027
auauguguagauggagaua

SEQ ID NO: 2234517 - RNA, 19 nt, Artificial Sequence
  Description of Artificial Sequence: Synthetic oligonucleotide
  Antisense strand to SEQ ID NO: 2234516
uaucuccaucuacacauau

SEQ ID NO: 2234518 - RNA, 19 nt, Artificial Sequence
  Description of Artificial Sequence: Synthetic oligonucleotide
  Sense strand starting at position 2808 of SEQ ID NO: 1884027
uguguagauggagauaugu

SEQ ID NO: 2234519 - RNA, 19 nt, Artificial Sequence
  Description of Artificial Sequence: Synthetic oligonucleotide
  Antisense strand to SEQ ID NO: 2234518
acauaucuccaucuacaca

SEQ ID NO: 2234520 - RNA, 19 nt, Artificial Sequence
  Description of Artificial Sequence: Synthetic oligonucleotide
  Sense strand starting at position 2810 of SEQ ID NO: 1884027
uguagauggagauaugugu

SEQ ID NO: 2234521 - RNA, 19 nt, Artificial Sequence
  Description of Artificial Sequence: Synthetic oligonucleotide
  Antisense strand to SEQ ID NO: 2234520
acacauaucuccaucuaca

SEQ ID NO: 2234522 - RNA, 19 nt, Artificial Sequence
  Description of Artificial Sequence: Synthetic oligonucleotide
  Sense strand starting at position 2814 of SEQ ID NO: 1884027
gauggagauauguguauau

SEQ ID NO: 2234523 - RNA, 19 nt, Artificial Sequence
  Description of Artificial Sequence: Synthetic oligonucleotide
  Antisense strand to SEQ ID NO: 2234522
auauacacauaucuccauc

SEQ ID NO: 2234524 - RNA, 19 nt, Artificial Sequence
  Description of Artificial Sequence: Synthetic oligonucleotide
  Sense strand starting at position 2869 of SEQ ID NO: 1884027
gugugcauuuguguggaua

SEQ ID NO: 2234525 - RNA, 19 nt, Artificial Sequence
  Description of Artificial Sequence: Synthetic oligonucleotide
  Antisense strand to SEQ ID NO: 2234524
uauccacacaaaugcacac

SEQ ID NO: 2234526 - RNA, 19 nt, Artificial Sequence
  Description of Artificial Sequence: Synthetic oligonucleotide
  Sense strand starting at position 2870 of SEQ ID NO: 1884027
ugugcauuuguguggauau

SEQ ID NO: 2234527 - RNA, 19 nt, Artificial Sequence
  Description of Artificial Sequence: Synthetic oligonucleotide
  Antisense strand to SEQ ID NO: 2234526
auauccacacaaaugcaca

SEQ ID NO: 2234528 - RNA, 19 nt, Artificial Sequence
  Description of Artificial Sequence: Synthetic oligonucleotide
  Sense strand starting at position 2985 of SEQ ID NO: 1884027
uauguaugcguguuugagu

SEQ ID NO: 2234529 - RNA, 19 nt, Artificial Sequence
  Description of Artificial Sequence: Synthetic oligonucleotide
  Antisense strand to SEQ ID NO: 2234528
acucaaacacgcauacaua

SEQ ID NO: 2234530 - RNA, 19 nt, Artificial Sequence
  Description of Artificial Sequence: Synthetic oligonucleotide
  Sense strand starting at position 2992 of SEQ ID NO: 1884027
gcguguuugagugugcaag

SEQ ID NO: 2234531 - RNA, 19 nt, Artificial Sequence
  Description of Artificial Sequence: Synthetic oligonucleotide
  Antisense strand to SEQ ID NO: 2234530
cuugcacacucaaacacgc

SEQ ID NO: 2234532 - RNA, 19 nt, Artificial Sequence
  Description of Artificial Sequence: Synthetic oligonucleotide
  Sense strand starting at position 3076 of SEQ ID NO: 1884027
cacuuugugguguaaggau

SEQ ID NO: 2234533 - RNA, 19 nt, Artificial Sequence
  Description of Artificial Sequence: Synthetic oligonucleotide
  Antisense strand to SEQ ID NO: 2234532
auccuuacaccacaaagug

SEQ ID NO: 2234534 - RNA, 19 nt, Artificial Sequence
  Description of Artificial Sequence: Synthetic oligonucleotide
  Sense strand starting at position 3132 of SEQ ID NO: 1884027
ggaggaggcuuucuccaca

SEQ ID NO: 2234535 - RNA, 19 nt, Artificial Sequence
  Description of Artificial Sequence: Synthetic oligonucleotide
  Antisense strand to SEQ ID NO: 2234534
uguggagaaagccuccucc

SEQ ID NO: 2234536 - RNA, 19 nt, Artificial Sequence
  Description of Artificial Sequence: Synthetic oligonucleotide
  Sense strand starting at position 3334 of SEQ ID NO: 1884027
ccaguugcuggagaugaga

SEQ ID NO: 2234537 - RNA, 19 nt, Artificial Sequence
  Description of Artificial Sequence: Synthetic oligonucleotide
  Antisense strand to SEQ ID NO: 2234536
ucucaucuccagcaacugg

SEQ ID NO: 2234538 - RNA, 19 nt, Artificial Sequence
  Description of Artificial Sequence: Synthetic oligonucleotide
  Sense strand starting at position 3481 of SEQ ID NO: 1884027
ccuugauaagaugguuucu

SEQ ID NO: 2234539 - RNA, 19 nt, Artificial Sequence
  Description of Artificial Sequence: Synthetic oligonucleotide
  Antisense strand to SEQ ID NO: 2234538
agaaaccaucuuaucaagg

SEQ ID NO: 2234540 - RNA, 19 nt, Artificial Sequence
  Description of Artificial Sequence: Synthetic oligonucleotide
  Sense strand starting at position 3483 of SEQ ID NO: 1884027
uugauaagaugguuucuca

SEQ ID NO: 2234541 - RNA, 19 nt, Artificial Sequence
  Description of Artificial Sequence: Synthetic oligonucleotide
  Antisense strand to SEQ ID NO: 2234540
ugagaaaccaucuuaucaa

SEQ ID NO: 2234542 - RNA, 19 nt, Artificial Sequence
  Description of Artificial Sequence: Synthetic oligonucleotide
  Sense strand starting at position 3789 of SEQ ID NO: 1884027
augcauaguguugaacaaa

SEQ ID NO: 2234543 - RNA, 19 nt, Artificial Sequence
  Description of Artificial Sequence: Synthetic oligonucleotide
  Antisense strand to SEQ ID NO: 2234542
uuuguucaacacuaugcau

SEQ ID NO: 2234544 - RNA, 19 nt, Artificial Sequence
  Description of Artificial Sequence: Synthetic oligonucleotide
  Sense strand starting at position 3792 of SEQ ID NO: 1884027
cauaguguugaacaaagua

SEQ ID NO: 2234545 - RNA, 19 nt, Artificial Sequence
  Description of Artificial Sequence: Synthetic oligonucleotide
  Antisense strand to SEQ ID NO: 2234544
uacuuuguucaacacuaug

SEQ ID NO: 2234546 - RNA, 19 nt, Artificial Sequence
  Description of Artificial Sequence: Synthetic oligonucleotide
  Sense strand starting at position 3800 of SEQ ID NO: 1884027
ugaacaaaguagucuuauc

SEQ ID NO: 2234547 - RNA, 19 nt, Artificial Sequence
  Description of Artificial Sequence: Synthetic oligonucleotide
  Antisense strand to SEQ ID NO: 2234546
gauaagacuacuuuguuca

SEQ ID NO: 2234548 - RNA, 19 nt, Artificial Sequence
  Description of Artificial Sequence: Synthetic oligonucleotide
  Sense strand starting at position 485 of SEQ ID NO: 1884028
ggcggauuccugggcugca

SEQ ID NO: 2234549 - RNA, 19 nt, Artificial Sequence
  Description of Artificial Sequence: Synthetic oligonucleotide
  Antisense strand to SEQ ID NO: 2234548
ugcagcccaggaauccgcc

SEQ ID NO: 2234550 - RNA, 19 nt, Artificial Sequence
  Description of Artificial Sequence: Synthetic oligonucleotide
  Sense strand starting at position 734 of SEQ ID NO: 1884028
ccaagaugaucucaucaug

SEQ ID NO: 2234551 - RNA, 19 nt, Artificial Sequence
  Description of Artificial Sequence: Synthetic oligonucleotide
  Antisense strand to SEQ ID NO: 2234550
caugaugagaucaucuugg

SEQ ID NO: 2234552 - RNA, 19 nt, Artificial Sequence
  Description of Artificial Sequence: Synthetic oligonucleotide
  Sense strand starting at position 817 of SEQ ID NO: 1884028
gggcuuaggacucgaacau

SEQ ID NO: 2234553 - RNA, 19 nt, Artificial Sequence
  Description of Artificial Sequence: Synthetic oligonucleotide
  Antisense strand to SEQ ID NO: 2234552
auguucgaguccuaagccc

SEQ ID NO: 2234554 - RNA, 19 nt, Artificial Sequence
  Description of Artificial Sequence: Synthetic oligonucleotide
  Sense strand starting at position 818 of SEQ ID NO: 1884028
ggcuuaggacucgaacaua

SEQ ID NO: 2234555 - RNA, 19 nt, Artificial Sequence
  Description of Artificial Sequence: Synthetic oligonucleotide
  Antisense strand to SEQ ID NO: 2234554
uauguucgaguccuaagcc

SEQ ID NO: 2234556 - RNA, 19 nt, Artificial Sequence
  Description of Artificial Sequence: Synthetic oligonucleotide
  Sense strand starting at position 863 of SEQ ID NO: 1884028
ccaugagcauggguucaga

SEQ ID NO: 2234557 - RNA, 19 nt, Artificial Sequence
  Description of Artificial Sequence: Synthetic oligonucleotide
  Antisense strand to SEQ ID NO: 2234556
ucugaacccaugcucaugg

SEQ ID NO: 2234558 - RNA, 19 nt, Artificial Sequence
  Description of Artificial Sequence: Synthetic oligonucleotide
  Sense strand starting at position 894 of SEQ ID NO: 1884028
uagcacuaccgaggucuua

SEQ ID NO: 2234559 - RNA, 19 nt, Artificial Sequence
  Description of Artificial Sequence: Synthetic oligonucleotide
  Antisense strand to SEQ ID NO: 2234558
uaagaccucgguagugcua

SEQ ID NO: 2234560 - RNA, 19 nt, Artificial Sequence
  Description of Artificial Sequence: Synthetic oligonucleotide
  Sense strand starting at position 918 of SEQ ID NO: 1884028
agcuuccugucaggauuua

SEQ ID NO: 2234561 - RNA, 19 nt, Artificial Sequence
  Description of Artificial Sequence: Synthetic oligonucleotide
  Antisense strand to SEQ ID NO: 2234560
uaaauccugacaggaagcu

SEQ ID NO: 2234562 - RNA, 19 nt, Artificial Sequence
  Description of Artificial Sequence: Synthetic oligonucleotide
  Sense strand starting at position 965 of SEQ ID NO: 1884028
cucagaaaugcacgagcaa

SEQ ID NO: 2234563 - RNA, 19 nt, Artificial Sequence
  Description of Artificial Sequence: Synthetic oligonucleotide
  Antisense strand to SEQ ID NO: 2234562
uugcucgugcauuucugag

SEQ ID NO: 2234564 - RNA, 19 nt, Artificial Sequence
  Description of Artificial Sequence: Synthetic oligonucleotide
  Sense strand starting at position 1198 of SEQ ID NO: 1884028
augauaaggucagaaagaa

SEQ ID NO: 2234565 - RNA, 19 nt, Artificial Sequence
  Description of Artificial Sequence: Synthetic oligonucleotide
  Antisense strand to SEQ ID NO: 2234564
uucuuucugaccuuaucau

SEQ ID NO: 2234566 - RNA, 19 nt, Artificial Sequence
  Description of Artificial Sequence: Synthetic oligonucleotide
  Sense strand starting at position 1210 of SEQ ID NO: 1884028
gaaagaaccuuggcuuuag

SEQ ID NO: 2234567 - RNA, 19 nt, Artificial Sequence
  Description of Artificial Sequence: Synthetic oligonucleotide
  Antisense strand to SEQ ID NO: 2234566
cuaaagccaagguucuuuc

SEQ ID NO: 2234568 - RNA, 19 nt, Artificial Sequence
  Description of Artificial Sequence: Synthetic oligonucleotide
  Sense strand starting at position 1245 of SEQ ID NO: 1884028
ccaccuguucuguauguua

SEQ ID NO: 2234569 - RNA, 19 nt, Artificial Sequence
  Description of Artificial Sequence: Synthetic oligonucleotide
  Antisense strand to SEQ ID NO: 2234568
uaacauacagaacaggugg

SEQ ID NO: 2234570 - RNA, 19 nt, Artificial Sequence
  Description of Artificial Sequence: Synthetic oligonucleotide
  Sense strand starting at position 1247 of SEQ ID NO: 1884028
accuguucuguauguuaaa

SEQ ID NO: 2234571 - RNA, 19 nt, Artificial Sequence
  Description of Artificial Sequence: Synthetic oligonucleotide
  Antisense strand to SEQ ID NO: 2234570
uuuaacauacagaacaggu

SEQ ID NO: 2234572 - RNA, 19 nt, Artificial Sequence
  Description of Artificial Sequence: Synthetic oligonucleotide
  Sense strand starting at position 1435 of SEQ ID NO: 1884028
cggugagaaugguuaugag

SEQ ID NO: 2234573 - RNA, 19 nt, Artificial Sequence
  Description of Artificial Sequence: Synthetic oligonucleotide
  Antisense strand to SEQ ID NO: 2234572
cucauaaccauucucaccg

SEQ ID NO: 2234574 - RNA, 19 nt, Artificial Sequence
  Description of Artificial Sequence: Synthetic oligonucleotide
  Sense strand starting at position 1443 of SEQ ID NO: 1884028
augguuaugagucgcaaug

SEQ ID NO: 2234575 - RNA, 19 nt, Artificial Sequence
  Description of Artificial Sequence: Synthetic oligonucleotide
  Antisense strand to SEQ ID NO: 2234574
cauugcgacucauaaccau

SEQ ID NO: 2234576 - RNA, 19 nt, Artificial Sequence
  Description of Artificial Sequence: Synthetic oligonucleotide
  Sense strand starting at position 1681 of SEQ ID NO: 1884028
caccguuuggcgucuuuga

SEQ ID NO: 2234577 - RNA, 19 nt, Artificial Sequence
  Description of Artificial Sequence: Synthetic oligonucleotide
  Antisense strand to SEQ ID NO: 2234576
ucaaagacgccaaacggug

SEQ ID NO: 2234578 - RNA, 19 nt, Artificial Sequence
  Description of Artificial Sequence: Synthetic oligonucleotide
  Sense strand starting at position 1682 of SEQ ID NO: 1884028
accguuuggcgucuuugaa

SEQ ID NO: 2234579 - RNA, 19 nt, Artificial Sequence
  Description of Artificial Sequence: Synthetic oligonucleotide
  Antisense strand to SEQ ID NO: 2234578
uucaaagacgccaaacggu

SEQ ID NO: 2234580 - RNA, 19 nt, Artificial Sequence
  Description of Artificial Sequence: Synthetic oligonucleotide
  Sense strand starting at position 1683 of SEQ ID NO: 1884028
ccguuuggcgucuuugaag

SEQ ID NO: 2234581 - RNA, 19 nt, Artificial Sequence
  Description of Artificial Sequence: Synthetic oligonucleotide
  Antisense strand to SEQ ID NO: 2234580
cuucaaagacgccaaacgg

SEQ ID NO: 2234582 - RNA, 19 nt, Artificial Sequence
  Description of Artificial Sequence: Synthetic oligonucleotide
  Sense strand starting at position 1689 of SEQ ID NO: 1884028
ggcgucuuugaagacuguu

SEQ ID NO: 2234583 - RNA, 19 nt, Artificial Sequence
  Description of Artificial Sequence: Synthetic oligonucleotide
  Antisense strand to SEQ ID NO: 2234582
aacagucuucaaagacgcc

SEQ ID NO: 2234584 - RNA, 19 nt, Artificial Sequence
  Description of Artificial Sequence: Synthetic oligonucleotide
  Sense strand starting at position 1810 of SEQ ID NO: 1884028
ccauuagagccuuaggcga

SEQ ID NO: 2234585 - RNA, 19 nt, Artificial Sequence
  Description of Artificial Sequence: Synthetic oligonucleotide
  Antisense strand to SEQ ID NO: 2234584
ucgccuaaggcucuaaugg

SEQ ID NO: 2234586 - RNA, 19 nt, Artificial Sequence
  Description of Artificial Sequence: Synthetic oligonucleotide
  Sense strand starting at position 2656 of SEQ ID NO: 1884028
cuaaauaccucagcgugua

SEQ ID NO: 2234587 - RNA, 19 nt, Artificial Sequence
  Description of Artificial Sequence: Synthetic oligonucleotide
  Antisense strand to SEQ ID NO: 2234586
uacacgcugagguauuuag

SEQ ID NO: 2234588 - RNA, 19 nt, Artificial Sequence
  Description of Artificial Sequence: Synthetic oligonucleotide
  Sense strand starting at position 2669 of SEQ ID NO: 1884028
cguguacuuccugacaaag

SEQ ID NO: 2234589 - RNA, 19 nt, Artificial Sequence
  Description of Artificial Sequence: Synthetic oligonucleotide
  Antisense strand to SEQ ID NO: 2234588
cuuugucaggaaguacacg

SEQ ID NO: 2234590 - RNA, 19 nt, Artificial Sequence
  Description of Artificial Sequence: Synthetic oligonucleotide
  Sense strand starting at position 2671 of SEQ ID NO: 1884028
uguacuuccugacaaagac

SEQ ID NO: 2234591 - RNA, 19 nt, Artificial Sequence
  Description of Artificial Sequence: Synthetic oligonucleotide
  Antisense strand to SEQ ID NO: 2234590
gucuuugucaggaaguaca

SEQ ID NO: 2234592 - RNA, 19 nt, Artificial Sequence
  Description of Artificial Sequence: Synthetic oligonucleotide
  Sense strand starting at position 2892 of SEQ ID NO: 1884028
cuuguagccuuucuuugua

SEQ ID NO: 2234593 - RNA, 19 nt, Artificial Sequence
  Description of Artificial Sequence: Synthetic oligonucleotide
  Antisense strand to SEQ ID NO: 2234592
uacaaagaaaggcuacaag

SEQ ID NO: 2234594 - RNA, 19 nt, Artificial Sequence
  Description of Artificial Sequence: Synthetic oligonucleotide
  Sense strand starting at position 2894 of SEQ ID NO: 1884028
uguagccuuucuuuguauu

SEQ ID NO: 2234595 - RNA, 19 nt, Artificial Sequence
  Description of Artificial Sequence: Synthetic oligonucleotide
  Antisense strand to SEQ ID NO: 2234594
aauacaaagaaaggcuaca

SEQ ID NO: 2234596 - RNA, 19 nt, Artificial Sequence
  Description of Artificial Sequence: Synthetic oligonucleotide
  Sense strand starting at position 2895 of SEQ ID NO: 1884028
guagccuuucuuuguauuu

SEQ ID NO: 2234597 - RNA, 19 nt, Artificial Sequence
  Description of Artificial Sequence: Synthetic oligonucleotide
  Antisense strand to SEQ ID NO: 2234596
aaauacaaagaaaggcuac

SEQ ID NO: 2234598 - RNA, 19 nt, Artificial Sequence
  Description of Artificial Sequence: Synthetic oligonucleotide
  Sense strand starting at position 2904 of SEQ ID NO: 1884028
cuuuguauuucuugaccuu

SEQ ID NO: 2234599 - RNA, 19 nt, Artificial Sequence
  Description of Artificial Sequence: Synthetic oligonucleotide
  Antisense strand to SEQ ID NO: 2234598
aaggucaagaaauacaaag

SEQ ID NO: 2234600 - RNA, 19 nt, Artificial Sequence
  Description of Artificial Sequence: Synthetic oligonucleotide
  Sense strand starting at position 2934 of SEQ ID NO: 1884028
gaguguuugucagcgacuu

SEQ ID NO: 2234601 - RNA, 19 nt, Artificial Sequence
  Description of Artificial Sequence: Synthetic oligonucleotide
  Antisense strand to SEQ ID NO: 2234600
aagucgcugacaaacacuc

SEQ ID NO: 2234602 - RNA, 19 nt, Artificial Sequence
  Description of Artificial Sequence: Synthetic oligonucleotide
  Sense strand starting at position 2938 of SEQ ID NO: 1884028
guuugucagcgacuuugca

SEQ ID NO: 2234603 - RNA, 19 nt, Artificial Sequence
  Description of Artificial Sequence: Synthetic oligonucleotide
  Antisense strand to SEQ ID NO: 2234602
ugcaaagucgcugacaaac

SEQ ID NO: 2234604 - RNA, 19 nt, Artificial Sequence
  Description of Artificial Sequence: Synthetic oligonucleotide
  Sense strand starting at position 3061 of SEQ ID NO: 1884028
ccaaauguauuggcauaaa

SEQ ID NO: 2234605 - RNA, 19 nt, Artificial Sequence
  Description of Artificial Sequence: Synthetic oligonucleotide
  Antisense strand to SEQ ID NO: 2234604
uuuaugccaauacauuugg

SEQ ID NO: 2234606 - RNA, 19 nt, Artificial Sequence
  Description of Artificial Sequence: Synthetic oligonucleotide
  Sense strand starting at position 3064 of SEQ ID NO: 1884028
aauguauuggcauaaacug

SEQ ID NO: 2234607 - RNA, 19 nt, Artificial Sequence
  Description of Artificial Sequence: Synthetic oligonucleotide
  Antisense strand to SEQ ID NO: 2234606
caguuuaugccaauacauu

SEQ ID NO: 2234608 - RNA, 19 nt, Artificial Sequence
  Description of Artificial Sequence: Synthetic oligonucleotide
  Sense strand starting at position 3072 of SEQ ID NO: 1884028
ggcauaaacugguuuauca

SEQ ID NO: 2234609 - RNA, 19 nt, Artificial Sequence
  Description of Artificial Sequence: Synthetic oligonucleotide
  Antisense strand to SEQ ID NO: 2234608
ugauaaaccaguuuaugcc

SEQ ID NO: 2234610 - RNA, 19 nt, Artificial Sequence
  Description of Artificial Sequence: Synthetic oligonucleotide
  Sense strand starting at position 3082 of SEQ ID NO: 1884028
gguuuaucauguucccuga

SEQ ID NO: 2234611 - RNA, 19 nt, Artificial Sequence
  Description of Artificial Sequence: Synthetic oligonucleotide
  Antisense strand to SEQ ID NO: 2234610
ucagggaacaugauaaacc

SEQ ID NO: 2234612 - RNA, 19 nt, Artificial Sequence
  Description of Artificial Sequence: Synthetic oligonucleotide
  Sense strand starting at position 3084 of SEQ ID NO: 1884028
uuuaucauguucccugauu

SEQ ID NO: 2234613 - RNA, 19 nt, Artificial Sequence
  Description of Artificial Sequence: Synthetic oligonucleotide
  Antisense strand to SEQ ID NO: 2234612
aaucagggaacaugauaaa

SEQ ID NO: 2234614 - RNA, 19 nt, Artificial Sequence
  Description of Artificial Sequence: Synthetic oligonucleotide
  Sense strand starting at position 3362 of SEQ ID NO: 1884028
acaccuggcuacuuaaaga

SEQ ID NO: 2234615 - RNA, 19 nt, Artificial Sequence
  Description of Artificial Sequence: Synthetic oligonucleotide
  Antisense strand to SEQ ID NO: 2234614
ucuuuaaguagccaggugu

SEQ ID NO: 2234616 - RNA, 19 nt, Artificial Sequence
  Description of Artificial Sequence: Synthetic oligonucleotide
  Sense strand starting at position 3508 of SEQ ID NO: 1884028
gccuccugaucagucuuau

SEQ ID NO: 2234617 - RNA, 19 nt, Artificial Sequence
  Description of Artificial Sequence: Synthetic oligonucleotide
  Antisense strand to SEQ ID NO: 2234616
auaagacugaucaggaggc

SEQ ID NO: 2234618 - RNA, 19 nt, Artificial Sequence
  Description of Artificial Sequence: Synthetic oligonucleotide
  Sense strand starting at position 3816 of SEQ ID NO: 1884028
cggucuuaugaucagucuu

SEQ ID NO: 2234619 - RNA, 19 nt, Artificial Sequence
  Description of Artificial Sequence: Synthetic oligonucleotide
  Antisense strand to SEQ ID NO: 2234618
aagacugaucauaagaccg

SEQ ID NO: 2234620 - RNA, 19 nt, Artificial Sequence
  Description of Artificial Sequence: Synthetic oligonucleotide
  Sense strand starting at position 3818 of SEQ ID NO: 1884028
gucuuaugaucagucuuau

SEQ ID NO: 2234621 - RNA, 19 nt, Artificial Sequence
  Description of Artificial Sequence: Synthetic oligonucleotide
  Antisense strand to SEQ ID NO: 2234620
auaagacugaucauaagac

SEQ ID NO: 2234622 - RNA, 19 nt, Artificial Sequence
  Description of Artificial Sequence: Synthetic oligonucleotide
  Sense strand starting at position 3827 of SEQ ID NO: 1884028
ucagucuuauaagugaaau

SEQ ID NO: 2234623 - RNA, 19 nt, Artificial Sequence
  Description of Artificial Sequence: Synthetic oligonucleotide
  Antisense strand to SEQ ID NO: 2234622
auuucacuuauaagacuga

SEQ ID NO: 2234624 - RNA, 19 nt, Artificial Sequence
  Description of Artificial Sequence: Synthetic oligonucleotide
  Sense strand starting at position 3845 of SEQ ID NO: 1884028
ugggaaagguucccuuguu

SEQ ID NO: 2234625 - RNA, 19 nt, Artificial Sequence
  Description of Artificial Sequence: Synthetic oligonucleotide
  Antisense strand to SEQ ID NO: 2234624
aacaagggaaccuuuccca

SEQ ID NO: 2234626 - RNA, 19 nt, Artificial Sequence
  Description of Artificial Sequence: Synthetic oligonucleotide
  Sense strand starting at position 3846 of SEQ ID NO: 1884028
gggaaagguucccuuguuc

SEQ ID NO: 2234627 - RNA, 19 nt, Artificial Sequence
  Description of Artificial Sequence: Synthetic oligonucleotide
  Antisense strand to SEQ ID NO: 2234626
gaacaagggaaccuuuccc

SEQ ID NO: 2234628 - RNA, 19 nt, Artificial Sequence
  Description of Artificial Sequence: Synthetic oligonucleotide
  Sense strand starting at position 809 of SEQ ID NO: 1884029
gggcauucccucgacaggu

SEQ ID NO: 2234629 - RNA, 19 nt, Artificial Sequence
  Description of Artificial Sequence: Synthetic oligonucleotide
  Antisense strand to SEQ ID NO: 2234628
accugucgagggaaugccc

SEQ ID NO: 2234630 - RNA, 19 nt, Artificial Sequence
  Description of Artificial Sequence: Synthetic oligonucleotide
  Sense strand starting at position 825 of SEQ ID NO: 1884029
ggugacagcucuucccaaa

SEQ ID NO: 2234631 - RNA, 19 nt, Artificial Sequence
  Description of Artificial Sequence: Synthetic oligonucleotide
  Antisense strand to SEQ ID NO: 2234630
uuugggaagagcugucacc

SEQ ID NO: 2234632 - RNA, 19 nt, Artificial Sequence
  Description of Artificial Sequence: Synthetic oligonucleotide
  Sense strand starting at position 1010 of SEQ ID NO: 1884029
uuguaucuaugaguuaaca

SEQ ID NO: 2234633 - RNA, 19 nt, Artificial Sequence
  Description of Artificial Sequence: Synthetic oligonucleotide
  Antisense strand to SEQ ID NO: 2234632
uguuaacucauagauacaa

SEQ ID NO: 2234634 - RNA, 19 nt, Artificial Sequence
  Description of Artificial Sequence: Synthetic oligonucleotide
  Sense strand starting at position 1206 of SEQ ID NO: 1884029
ccggguuggcuguaauuua

SEQ ID NO: 2234635 - RNA, 19 nt, Artificial Sequence
  Description of Artificial Sequence: Synthetic oligonucleotide
  Antisense strand to SEQ ID NO: 2234634
uaaauuacagccaacccgg

SEQ ID NO: 2234636 - RNA, 19 nt, Artificial Sequence
  Description of Artificial Sequence: Synthetic oligonucleotide
  Sense strand starting at position 1225 of SEQ ID NO: 1884029
uuucuagaaguguaagcaa

SEQ ID NO: 2234637 - RNA, 19 nt, Artificial Sequence
  Description of Artificial Sequence: Synthetic oligonucleotide
  Antisense strand to SEQ ID NO: 2234636
uugcuuacacuucuagaaa

SEQ ID NO: 2234638 - RNA, 19 nt, Artificial Sequence
  Description of Artificial Sequence: Synthetic oligonucleotide
  Sense strand starting at position 1228 of SEQ ID NO: 1884029
cuagaaguguaagcaagaa

SEQ ID NO: 2234639 - RNA, 19 nt, Artificial Sequence
  Description of Artificial Sequence: Synthetic oligonucleotide
  Antisense strand to SEQ ID NO: 2234638
uucuugcuuacacuucuag

SEQ ID NO: 2234640 - RNA, 19 nt, Artificial Sequence
  Description of Artificial Sequence: Synthetic oligonucleotide
  Sense strand starting at position 1282 of SEQ ID NO: 1884029
acaucaagaucggcucaau

SEQ ID NO: 2234641 - RNA, 19 nt, Artificial Sequence
  Description of Artificial Sequence: Synthetic oligonucleotide
  Antisense strand to SEQ ID NO: 2234640
auugagccgaucuugaugu

SEQ ID NO: 2234642 - RNA, 19 nt, Artificial Sequence
  Description of Artificial Sequence: Synthetic oligonucleotide
  Sense strand starting at position 1675 of SEQ ID NO: 1884029
augugugagcaugaguuca

SEQ ID NO: 2234643 - RNA, 19 nt, Artificial Sequence
  Description of Artificial Sequence: Synthetic oligonucleotide
  Antisense strand to SEQ ID NO: 2234642
ugaacucaugcucacacau

SEQ ID NO: 2234644 - RNA, 19 nt, Artificial Sequence
  Description of Artificial Sequence: Synthetic oligonucleotide
  Sense strand starting at position 1895 of SEQ ID NO: 1884029
acagaaucacguugcugau

SEQ ID NO: 2234645 - RNA, 19 nt, Artificial Sequence
  Description of Artificial Sequence: Synthetic oligonucleotide
  Antisense strand to SEQ ID NO: 2234644
aucagcaacgugauucugu

SEQ ID NO: 2234646 - RNA, 19 nt, Artificial Sequence
  Description of Artificial Sequence: Synthetic oligonucleotide
  Sense strand starting at position 1942 of SEQ ID NO: 1884029
ccaucauucgagugagguu

SEQ ID NO: 2234647 - RNA, 19 nt, Artificial Sequence
  Description of Artificial Sequence: Synthetic oligonucleotide
  Antisense strand to SEQ ID NO: 2234646
aaccucacucgaaugaugg

SEQ ID NO: 2234648 - RNA, 19 nt, Artificial Sequence
  Description of Artificial Sequence: Synthetic oligonucleotide
  Sense strand starting at position 1943 of SEQ ID NO: 1884029
caucauucgagugagguuu

SEQ ID NO: 2234649 - RNA, 19 nt, Artificial Sequence
  Description of Artificial Sequence: Synthetic oligonucleotide
  Antisense strand to SEQ ID NO: 2234648
aaaccucacucgaaugaug

SEQ ID NO: 2234650 - RNA, 19 nt, Artificial Sequence
  Description of Artificial Sequence: Synthetic oligonucleotide
  Sense strand starting at position 1954 of SEQ ID NO: 1884029
ugagguuugaggugggagu

SEQ ID NO: 2234651 - RNA, 19 nt, Artificial Sequence
  Description of Artificial Sequence: Synthetic oligonucleotide
  Antisense strand to SEQ ID NO: 2234650
acucccaccucaaaccuca

SEQ ID NO: 2234652 - RNA, 19 nt, Artificial Sequence
  Description of Artificial Sequence: Synthetic oligonucleotide
  Sense strand starting at position 2059 of SEQ ID NO: 1884029
acccgagugccugucaguu

SEQ ID NO: 2234653 - RNA, 19 nt, Artificial Sequence
  Description of Artificial Sequence: Synthetic oligonucleotide
  Antisense strand to SEQ ID NO: 2234652
aacugacaggcacucgggu

SEQ ID NO: 2234654 - RNA, 19 nt, Artificial Sequence
  Description of Artificial Sequence: Synthetic oligonucleotide
  Sense strand starting at position 2115 of SEQ ID NO: 1884029
cuucuauggcaaugacuca

SEQ ID NO: 2234655 - RNA, 19 nt, Artificial Sequence
  Description of Artificial Sequence: Synthetic oligonucleotide
  Antisense strand to SEQ ID NO: 2234654
ugagucauugccauagaag

SEQ ID NO: 2234656 - RNA, 19 nt, Artificial Sequence
  Description of Artificial Sequence: Synthetic oligonucleotide
  Sense strand starting at position 2337 of SEQ ID NO: 1884029
ugcggcuugcccuugaauu

SEQ ID NO: 2234657 - RNA, 19 nt, Artificial Sequence
  Description of Artificial Sequence: Synthetic oligonucleotide
  Antisense strand to SEQ ID NO: 2234656
aauucaagggcaagccgca

SEQ ID NO: 2234658 - RNA, 19 nt, Artificial Sequence
  Description of Artificial Sequence: Synthetic oligonucleotide
  Sense strand starting at position 2349 of SEQ ID NO: 1884029
uugaauucccuccagggua

SEQ ID NO: 2234659 - RNA, 19 nt, Artificial Sequence
  Description of Artificial Sequence: Synthetic oligonucleotide
  Antisense strand to SEQ ID NO: 2234658
uacccuggagggaauucaa

SEQ ID NO: 2234660 - RNA, 19 nt, Artificial Sequence
  Description of Artificial Sequence: Synthetic oligonucleotide
  Sense strand starting at position 2351 of SEQ ID NO: 1884029
gaauucccuccaggguaaa

SEQ ID NO: 2234661 - RNA, 19 nt, Artificial Sequence
  Description of Artificial Sequence: Synthetic oligonucleotide
  Antisense strand to SEQ ID NO: 2234660
uuuacccuggagggaauuc

SEQ ID NO: 2234662 - RNA, 19 nt, Artificial Sequence
  Description of Artificial Sequence: Synthetic oligonucleotide
  Sense strand starting at position 2424 of SEQ ID NO: 1884029
cgaagucuuggauggguaa

SEQ ID NO: 2234663 - RNA, 19 nt, Artificial Sequence
  Description of Artificial Sequence: Synthetic oligonucleotide
  Antisense strand to SEQ ID NO: 2234662
uuacccauccaagacuucg

SEQ ID NO: 2234664 - RNA, 19 nt, Artificial Sequence
  Description of Artificial Sequence: Synthetic oligonucleotide
  Sense strand starting at position 2445 of SEQ ID NO: 1884029
ggaagaugccauugugaau

SEQ ID NO: 2234665 - RNA, 19 nt, Artificial Sequence
  Description of Artificial Sequence: Synthetic oligonucleotide
  Antisense strand to SEQ ID NO: 2234664
auucacaauggcaucuucc

SEQ ID NO: 2234666 - RNA, 19 nt, Artificial Sequence
  Description of Artificial Sequence: Synthetic oligonucleotide
  Sense strand starting at position 2468 of SEQ ID NO: 1884029
auauccuuucucgaugaau

SEQ ID NO: 2234667 - RNA, 19 nt, Artificial Sequence
  Description of Artificial Sequence: Synthetic oligonucleotide
  Antisense strand to SEQ ID NO: 2234666
auucaucgagaaaggauau

SEQ ID NO: 2234668 - RNA, 19 nt, Artificial Sequence
  Description of Artificial Sequence: Synthetic oligonucleotide
  Sense strand starting at position 2470 of SEQ ID NO: 1884029
auccuuucucgaugaauua

SEQ ID NO: 2234669 - RNA, 19 nt, Artificial Sequence
  Description of Artificial Sequence: Synthetic oligonucleotide
  Antisense strand to SEQ ID NO: 2234668
uaauucaucgagaaaggau

SEQ ID NO: 2234670 - RNA, 19 nt, Artificial Sequence
  Description of Artificial Sequence: Synthetic oligonucleotide
  Sense strand starting at position 2471 of SEQ ID NO: 1884029
uccuuucucgaugaauuag

SEQ ID NO: 2234671 - RNA, 19 nt, Artificial Sequence
  Description of Artificial Sequence: Synthetic oligonucleotide
  Antisense strand to SEQ ID NO: 2234670
cuaauucaucgagaaagga

SEQ ID NO: 2234672 - RNA, 19 nt, Artificial Sequence
  Description of Artificial Sequence: Synthetic oligonucleotide
  Sense strand starting at position 2575 of SEQ ID NO: 1884029
cccugccagccuuaugaua

SEQ ID NO: 2234673 - RNA, 19 nt, Artificial Sequence
  Description of Artificial Sequence: Synthetic oligonucleotide
  Antisense strand to SEQ ID NO: 2234672
uaucauaaggcuggcaggg

SEQ ID NO: 2234674 - RNA, 19 nt, Artificial Sequence
  Description of Artificial Sequence: Synthetic oligonucleotide
  Sense strand starting at position 2583 of SEQ ID NO: 1884029
gccuuaugauagucuucua

SEQ ID NO: 2234675 - RNA, 19 nt, Artificial Sequence
  Description of Artificial Sequence: Synthetic oligonucleotide
  Antisense strand to SEQ ID NO: 2234674
uagaagacuaucauaaggc

SEQ ID NO: 2234676 - RNA, 19 nt, Artificial Sequence
  Description of Artificial Sequence: Synthetic oligonucleotide
  Sense strand starting at position 2586 of SEQ ID NO: 1884029
uuaugauagucuucuaagg

SEQ ID NO: 2234677 - RNA, 19 nt, Artificial Sequence
  Description of Artificial Sequence: Synthetic oligonucleotide
  Antisense strand to SEQ ID NO: 2234676
ccuuagaagacuaucauaa

SEQ ID NO: 2234678 - RNA, 19 nt, Artificial Sequence
  Description of Artificial Sequence: Synthetic oligonucleotide
  Sense strand starting at position 2661 of SEQ ID NO: 1884029
uugcuuugugcuucguuau

SEQ ID NO: 2234679 - RNA, 19 nt, Artificial Sequence
  Description of Artificial Sequence: Synthetic oligonucleotide
  Antisense strand to SEQ ID NO: 2234678
auaacgaagcacaaagcaa

SEQ ID NO: 2234680 - RNA, 19 nt, Artificial Sequence
  Description of Artificial Sequence: Synthetic oligonucleotide
  Sense strand starting at position 2664 of SEQ ID NO: 1884029
cuuugugcuucguuauuua

SEQ ID NO: 2234681 - RNA, 19 nt, Artificial Sequence
  Description of Artificial Sequence: Synthetic oligonucleotide
  Antisense strand to SEQ ID NO: 2234680
uaaauaacgaagcacaaag

SEQ ID NO: 2234682 - RNA, 19 nt, Artificial Sequence
  Description of Artificial Sequence: Synthetic oligonucleotide
  Sense strand starting at position 2667 of SEQ ID NO: 1884029
ugugcuucguuauuuauua

SEQ ID NO: 2234683 - RNA, 19 nt, Artificial Sequence
  Description of Artificial Sequence: Synthetic oligonucleotide
  Antisense strand to SEQ ID NO: 2234682
uaauaaauaacgaagcaca

SEQ ID NO: 2234684 - RNA, 19 nt, Artificial Sequence
  Description of Artificial Sequence: Synthetic oligonucleotide
  Sense strand starting at position 2668 of SEQ ID NO: 1884029
gugcuucguuauuuauuaa

SEQ ID NO: 2234685 - RNA, 19 nt, Artificial Sequence
  Description of Artificial Sequence: Synthetic oligonucleotide
  Antisense strand to SEQ ID NO: 2234684
uuaauaaauaacgaagcac

SEQ ID NO: 2234686 - RNA, 19 nt, Artificial Sequence
  Description of Artificial Sequence: Synthetic oligonucleotide
  Sense strand starting at position 2671 of SEQ ID NO: 1884029
cuucguuauuuauuaagcu

SEQ ID NO: 2234687 - RNA, 19 nt, Artificial Sequence
  Description of Artificial Sequence: Synthetic oligonucleotide
  Antisense strand to SEQ ID NO: 2234686
agcuuaauaaauaacgaag

SEQ ID NO: 2234688 - RNA, 19 nt, Artificial Sequence
  Description of Artificial Sequence: Synthetic oligonucleotide
  Sense strand starting at position 2683 of SEQ ID NO: 1884029
uuaagcuugugacuuauuu

SEQ ID NO: 2234689 - RNA, 19 nt, Artificial Sequence
  Description of Artificial Sequence: Synthetic oligonucleotide
  Antisense strand to SEQ ID NO: 2234688
aaauaagucacaagcuuaa

SEQ ID NO: 2234690 - RNA, 19 nt, Artificial Sequence
  Description of Artificial Sequence: Synthetic oligonucleotide
  Sense strand starting at position 2793 of SEQ ID NO: 1884029
cgaagaccucccuguacaa

SEQ ID NO: 2234691 - RNA, 19 nt, Artificial Sequence
  Description of Artificial Sequence: Synthetic oligonucleotide
  Antisense strand to SEQ ID NO: 2234690
uuguacagggaggucuucg

SEQ ID NO: 2234692 - RNA, 19 nt, Artificial Sequence
  Description of Artificial Sequence: Synthetic oligonucleotide
  Sense strand starting at position 2811 of SEQ ID NO: 1884029
aagugaagcugaguaaaga

SEQ ID NO: 2234693 - RNA, 19 nt, Artificial Sequence
  Description of Artificial Sequence: Synthetic oligonucleotide
  Antisense strand to SEQ ID NO: 2234692
ucuuuacucagcuucacuu

SEQ ID NO: 2234694 - RNA, 19 nt, Artificial Sequence
  Description of Artificial Sequence: Synthetic oligonucleotide
  Sense strand starting at position 2865 of SEQ ID NO: 1884029
gggccuuugugacucauuu

SEQ ID NO: 2234695 - RNA, 19 nt, Artificial Sequence
  Description of Artificial Sequence: Synthetic oligonucleotide
  Antisense strand to SEQ ID NO: 2234694
aaaugagucacaaaggccc

SEQ ID NO: 2234696 - RNA, 19 nt, Artificial Sequence
  Description of Artificial Sequence: Synthetic oligonucleotide
  Sense strand starting at position 2924 of SEQ ID NO: 1884029
cucggagccugauuugcau

SEQ ID NO: 2234697 - RNA, 19 nt, Artificial Sequence
  Description of Artificial Sequence: Synthetic oligonucleotide
  Antisense strand to SEQ ID NO: 2234696
augcaaaucaggcuccgag

SEQ ID NO: 2234698 - RNA, 19 nt, Artificial Sequence
  Description of Artificial Sequence: Synthetic oligonucleotide
  Sense strand starting at position 3019 of SEQ ID NO: 1884029
ccaucuguccgucaacauc

SEQ ID NO: 2234699 - RNA, 19 nt, Artificial Sequence
  Description of Artificial Sequence: Synthetic oligonucleotide
  Antisense strand to SEQ ID NO: 2234698
gauguugacggacagaugg

SEQ ID NO: 2234700 - RNA, 19 nt, Artificial Sequence
  Description of Artificial Sequence: Synthetic oligonucleotide
  Sense strand starting at position 3869 of SEQ ID NO: 1884029
gggcuuaggacucgaacau

SEQ ID NO: 2234701 - RNA, 19 nt, Artificial Sequence
  Description of Artificial Sequence: Synthetic oligonucleotide
  Antisense strand to SEQ ID NO: 2234700
auguucgaguccuaagccc

SEQ ID NO: 2234702 - RNA, 19 nt, Artificial Sequence
  Description of Artificial Sequence: Synthetic oligonucleotide
  Sense strand starting at position 3870 of SEQ ID NO: 1884029
ggcuuaggacucgaacaua

SEQ ID NO: 2234703 - RNA, 19 nt, Artificial Sequence
  Description of Artificial Sequence: Synthetic oligonucleotide
  Antisense strand to SEQ ID NO: 2234702
uauguucgaguccuaagcc

SEQ ID NO: 2234704 - RNA, 19 nt, Artificial Sequence
  Description of Artificial Sequence: Synthetic oligonucleotide
  Sense strand starting at position 3915 of SEQ ID NO: 1884029
ccaugagcauggguucaga

SEQ ID NO: 2234705 - RNA, 19 nt, Artificial Sequence
  Description of Artificial Sequence: Synthetic oligonucleotide
  Antisense strand to SEQ ID NO: 2234704
ucugaacccaugcucaugg

SEQ ID NO: 2234706 - RNA, 19 nt, Artificial Sequence
  Description of Artificial Sequence: Synthetic oligonucleotide
  Sense strand starting at position 3946 of SEQ ID NO: 1884029
uagcacuaccgaggucuua

SEQ ID NO: 2234707 - RNA, 19 nt, Artificial Sequence
  Description of Artificial Sequence: Synthetic oligonucleotide
  Antisense strand to SEQ ID NO: 2234706
uaagaccucgguagugcua

SEQ ID NO: 2234708 - RNA, 19 nt, Artificial Sequence
  Description of Artificial Sequence: Synthetic oligonucleotide
  Sense strand starting at position 86 of SEQ ID NO: 1884030
ccagguuugauucgauucu

SEQ ID NO: 2234709 - RNA, 19 nt, Artificial Sequence
  Description of Artificial Sequence: Synthetic oligonucleotide
  Antisense strand to SEQ ID NO: 2234708
agaaucgaaucaaaccugg

SEQ ID NO: 2234710 - RNA, 19 nt, Artificial Sequence
  Description of Artificial Sequence: Synthetic oligonucleotide
  Sense strand starting at position 153 of SEQ ID NO: 1884030
ugcaacaaggucuaauuga

SEQ ID NO: 2234711 - RNA, 19 nt, Artificial Sequence
  Description of Artificial Sequence: Synthetic oligonucleotide
  Antisense strand to SEQ ID NO: 2234710
ucaauuagaccuuguugca

SEQ ID NO: 2234712 - RNA, 19 nt, Artificial Sequence
  Description of Artificial Sequence: Synthetic oligonucleotide
  Sense strand starting at position 162 of SEQ ID NO: 1884030
gucuaauugagcuggugaa

SEQ ID NO: 2234713 - RNA, 19 nt, Artificial Sequence
  Description of Artificial Sequence: Synthetic oligonucleotide
  Antisense strand to SEQ ID NO: 2234712
uucaccagcucaauuagac

SEQ ID NO: 2234714 - RNA, 19 nt, Artificial Sequence
  Description of Artificial Sequence: Synthetic oligonucleotide
  Sense strand starting at position 163 of SEQ ID NO: 1884030
ucuaauugagcuggugaac

SEQ ID NO: 2234715 - RNA, 19 nt, Artificial Sequence
  Description of Artificial Sequence: Synthetic oligonucleotide
  Antisense strand to SEQ ID NO: 2234714
guucaccagcucaauuaga

SEQ ID NO: 2234716 - RNA, 19 nt, Artificial Sequence
  Description of Artificial Sequence: Synthetic oligonucleotide
  Sense strand starting at position 414 of SEQ ID NO: 1884030
gacugaucauaagaccgau

SEQ ID NO: 2234717 - RNA, 19 nt, Artificial Sequence
  Description of Artificial Sequence: Synthetic oligonucleotide
  Antisense strand to SEQ ID NO: 2234716
aucggucuuaugaucaguc

SEQ ID NO: 2234718 - RNA, 19 nt, Artificial Sequence
  Description of Artificial Sequence: Synthetic oligonucleotide
  Sense strand starting at position 1172 of SEQ ID NO: 1884030
gccaauacauuuggcaauu

SEQ ID NO: 2234719 - RNA, 19 nt, Artificial Sequence
  Description of Artificial Sequence: Synthetic oligonucleotide
  Antisense strand to SEQ ID NO: 2234718
aauugccaaauguauuggc

SEQ ID NO: 2234720 - RNA, 19 nt, Artificial Sequence
  Description of Artificial Sequence: Synthetic oligonucleotide
  Sense strand starting at position 1183 of SEQ ID NO: 1884030
uggcaauuacaaugaaaug

SEQ ID NO: 2234721 - RNA, 19 nt, Artificial Sequence
  Description of Artificial Sequence: Synthetic oligonucleotide
  Antisense strand to SEQ ID NO: 2234720
cauuucauuguaauugcca

SEQ ID NO: 2234722 - RNA, 19 nt, Artificial Sequence
  Description of Artificial Sequence: Synthetic oligonucleotide
  Sense strand starting at position 1289 of SEQ ID NO: 1884030
cugcaaagucgcugacaaa

SEQ ID NO: 2234723 - RNA, 19 nt, Artificial Sequence
  Description of Artificial Sequence: Synthetic oligonucleotide
  Antisense strand to SEQ ID NO: 2234722
uuugucagcgacuuugcag

SEQ ID NO: 2234724 - RNA, 19 nt, Artificial Sequence
  Description of Artificial Sequence: Synthetic oligonucleotide
  Sense strand starting at position 1346 of SEQ ID NO: 1884030
ggcuacaagaacuguugaa

SEQ ID NO: 2234725 - RNA, 19 nt, Artificial Sequence
  Description of Artificial Sequence: Synthetic oligonucleotide
  Antisense strand to SEQ ID NO: 2234724
uucaacaguucuuguagcc

SEQ ID NO: 2234726 - RNA, 19 nt, Artificial Sequence
  Description of Artificial Sequence: Synthetic oligonucleotide
  Sense strand starting at position 1446 of SEQ ID NO: 1884030
agggauguuuaggcacaau

SEQ ID NO: 2234727 - RNA, 19 nt, Artificial Sequence
  Description of Artificial Sequence: Synthetic oligonucleotide
  Antisense strand to SEQ ID NO: 2234726
auugugccuaaacaucccu

SEQ ID NO: 2234728 - RNA, 19 nt, Artificial Sequence
  Description of Artificial Sequence: Synthetic oligonucleotide
  Sense strand starting at position 1449 of SEQ ID NO: 1884030
gauguuuaggcacaauuga

SEQ ID NO: 2234729 - RNA, 19 nt, Artificial Sequence
  Description of Artificial Sequence: Synthetic oligonucleotide
  Antisense strand to SEQ ID NO: 2234728
ucaauugugccuaaacauc

SEQ ID NO: 2234730 - RNA, 19 nt, Artificial Sequence
  Description of Artificial Sequence: Synthetic oligonucleotide
  Sense strand starting at position 1476 of SEQ ID NO: 1884030
gaguauggacucuggauua

SEQ ID NO: 2234731 - RNA, 19 nt, Artificial Sequence
  Description of Artificial Sequence: Synthetic oligonucleotide
  Antisense strand to SEQ ID NO: 2234730
uaauccagaguccauacuc

SEQ ID NO: 2234732 - RNA, 19 nt, Artificial Sequence
  Description of Artificial Sequence: Synthetic oligonucleotide
  Sense strand starting at position 1483 of SEQ ID NO: 1884030
gacucuggauuagauauuu

SEQ ID NO: 2234733 - RNA, 19 nt, Artificial Sequence
  Description of Artificial Sequence: Synthetic oligonucleotide
  Antisense strand to SEQ ID NO: 2234732
aaauaucuaauccagaguc

SEQ ID NO: 2234734 - RNA, 19 nt, Artificial Sequence
  Description of Artificial Sequence: Synthetic oligonucleotide
  Sense strand starting at position 1528 of SEQ ID NO: 1884030
acagcuauacugugguaau

SEQ ID NO: 2234735 - RNA, 19 nt, Artificial Sequence
  Description of Artificial Sequence: Synthetic oligonucleotide
  Antisense strand to SEQ ID NO: 2234734
auuaccacaguauagcugu

SEQ ID NO: 2234736 - RNA, 19 nt, Artificial Sequence
  Description of Artificial Sequence: Synthetic oligonucleotide
  Sense strand starting at position 1551 of SEQ ID NO: 1884030
agaagugucuuugucagga

SEQ ID NO: 2234737 - RNA, 19 nt, Artificial Sequence
  Description of Artificial Sequence: Synthetic oligonucleotide
  Antisense strand to SEQ ID NO: 2234736
uccugacaaagacacuucu

SEQ ID NO: 2234738 - RNA, 19 nt, Artificial Sequence
  Description of Artificial Sequence: Synthetic oligonucleotide
  Sense strand starting at position 1556 of SEQ ID NO: 1884030
ugucuuugucaggaaguac

SEQ ID NO: 2234739 - RNA, 19 nt, Artificial Sequence
  Description of Artificial Sequence: Synthetic oligonucleotide
  Antisense strand to SEQ ID NO: 2234738
guacuuccugacaaagaca

SEQ ID NO: 2234740 - RNA, 19 nt, Artificial Sequence
  Description of Artificial Sequence: Synthetic oligonucleotide
  Sense strand starting at position 1567 of SEQ ID NO: 1884030
ggaaguacacgcugaggua

SEQ ID NO: 2234741 - RNA, 19 nt, Artificial Sequence
  Description of Artificial Sequence: Synthetic oligonucleotide
  Antisense strand to SEQ ID NO: 2234740
uaccucagcguguacuucc

SEQ ID NO: 2234742 - RNA, 19 nt, Artificial Sequence
  Description of Artificial Sequence: Synthetic oligonucleotide
  Sense strand starting at position 1568 of SEQ ID NO: 1884030
gaaguacacgcugagguau

SEQ ID NO: 2234743 - RNA, 19 nt, Artificial Sequence
  Description of Artificial Sequence: Synthetic oligonucleotide
  Antisense strand to SEQ ID NO: 2234742
auaccucagcguguacuuc

SEQ ID NO: 2234744 - RNA, 19 nt, Artificial Sequence
  Description of Artificial Sequence: Synthetic oligonucleotide
  Sense strand starting at position 1576 of SEQ ID NO: 1884030
cgcugagguauuuagcagu

SEQ ID NO: 2234745 - RNA, 19 nt, Artificial Sequence
  Description of Artificial Sequence: Synthetic oligonucleotide
  Antisense strand to SEQ ID NO: 2234744
acugcuaaauaccucagcg

SEQ ID NO: 2234746 - RNA, 19 nt, Artificial Sequence
  Description of Artificial Sequence: Synthetic oligonucleotide
  Sense strand starting at position 1579 of SEQ ID NO: 1884030
ugagguauuuagcaguaaa

SEQ ID NO: 2234747 - RNA, 19 nt, Artificial Sequence
  Description of Artificial Sequence: Synthetic oligonucleotide
  Antisense strand to SEQ ID NO: 2234746
uuuacugcuaaauaccuca

SEQ ID NO: 2234748 - RNA, 19 nt, Artificial Sequence
  Description of Artificial Sequence: Synthetic oligonucleotide
  Sense strand starting at position 2399 of SEQ ID NO: 1884030
gugggaacaguuggugaau

SEQ ID NO: 2234749 - RNA, 19 nt, Artificial Sequence
  Description of Artificial Sequence: Synthetic oligonucleotide
  Antisense strand to SEQ ID NO: 2234748
auucaccaacuguucccac

SEQ ID NO: 2234750 - RNA, 19 nt, Artificial Sequence
  Description of Artificial Sequence: Synthetic oligonucleotide
  Sense strand starting at position 2400 of SEQ ID NO: 1884030
ugggaacaguuggugaauu

SEQ ID NO: 2234751 - RNA, 19 nt, Artificial Sequence
  Description of Artificial Sequence: Synthetic oligonucleotide
  Antisense strand to SEQ ID NO: 2234750
aauucaccaacuguuccca

SEQ ID NO: 2234752 - RNA, 19 nt, Artificial Sequence
  Description of Artificial Sequence: Synthetic oligonucleotide
  Sense strand starting at position 2411 of SEQ ID NO: 1884030
ggugaauucgccuaaggcu

SEQ ID NO: 2234753 - RNA, 19 nt, Artificial Sequence
  Description of Artificial Sequence: Synthetic oligonucleotide
  Antisense strand to SEQ ID NO: 2234752
agccuuaggcgaauucacc

SEQ ID NO: 2234754 - RNA, 19 nt, Artificial Sequence
  Description of Artificial Sequence: Synthetic oligonucleotide
  Sense strand starting at position 2463 of SEQ ID NO: 1884030
uuuacauauguuugacguu

SEQ ID NO: 2234755 - RNA, 19 nt, Artificial Sequence
  Description of Artificial Sequence: Synthetic oligonucleotide
  Antisense strand to SEQ ID NO: 2234754
aacgucaaacauauguaaa

SEQ ID NO: 2234756 - RNA, 19 nt, Artificial Sequence
  Description of Artificial Sequence: Synthetic oligonucleotide
  Sense strand starting at position 2469 of SEQ ID NO: 1884030
uauguuugacguuguauca

SEQ ID NO: 2234757 - RNA, 19 nt, Artificial Sequence
  Description of Artificial Sequence: Synthetic oligonucleotide
  Antisense strand to SEQ ID NO: 2234756
ugauacaacgucaaacaua

SEQ ID NO: 2234758 - RNA, 19 nt, Artificial Sequence
  Description of Artificial Sequence: Synthetic oligonucleotide
  Sense strand starting at position 3021 of SEQ ID NO: 1884030
aagccaagguucuuucuga

SEQ ID NO: 2234759 - RNA, 19 nt, Artificial Sequence
  Description of Artificial Sequence: Synthetic oligonucleotide
  Antisense strand to SEQ ID NO: 2234758
ucagaaagaaccuuggcuu

SEQ ID NO: 2234760 - RNA, 19 nt, Artificial Sequence
  Description of Artificial Sequence: Synthetic oligonucleotide
  Sense strand starting at position 3028 of SEQ ID NO: 1884030
gguucuuucugaccuuauc

SEQ ID NO: 2234761 - RNA, 19 nt, Artificial Sequence
  Description of Artificial Sequence: Synthetic oligonucleotide
  Antisense strand to SEQ ID NO: 2234760
gauaaggucagaaagaacc

SEQ ID NO: 2234762 - RNA, 19 nt, Artificial Sequence
  Description of Artificial Sequence: Synthetic oligonucleotide
  Sense strand starting at position 3113 of SEQ ID NO: 1884030
ggagcagaauggucaucau

SEQ ID NO: 2234763 - RNA, 19 nt, Artificial Sequence
  Description of Artificial Sequence: Synthetic oligonucleotide
  Antisense strand to SEQ ID NO: 2234762
augaugaccauucugcucc

SEQ ID NO: 2234764 - RNA, 19 nt, Artificial Sequence
  Description of Artificial Sequence: Synthetic oligonucleotide
  Sense strand starting at position 3116 of SEQ ID NO: 1884030
gcagaauggucaucaugga

SEQ ID NO: 2234765 - RNA, 19 nt, Artificial Sequence
  Description of Artificial Sequence: Synthetic oligonucleotide
  Antisense strand to SEQ ID NO: 2234764
uccaugaugaccauucugc

SEQ ID NO: 2234766 - RNA, 19 nt, Artificial Sequence
  Description of Artificial Sequence: Synthetic oligonucleotide
  Sense strand starting at position 3257 of SEQ ID NO: 1884030
caugucuugcucgugcauu

SEQ ID NO: 2234767 - RNA, 19 nt, Artificial Sequence
  Description of Artificial Sequence: Synthetic oligonucleotide
  Antisense strand to SEQ ID NO: 2234766
aaugcacgagcaagacaug

SEQ ID NO: 2234768 - RNA, 19 nt, Artificial Sequence
  Description of Artificial Sequence: Synthetic oligonucleotide
  Sense strand starting at position 3308 of SEQ ID NO: 1884030
auuaaauccugacaggaag

SEQ ID NO: 2234769 - RNA, 19 nt, Artificial Sequence
  Description of Artificial Sequence: Synthetic oligonucleotide
  Antisense strand to SEQ ID NO: 2234768
cuuccugucaggauuuaau

SEQ ID NO: 2234770 - RNA, 19 nt, Artificial Sequence
  Description of Artificial Sequence: Synthetic oligonucleotide
  Sense strand starting at position 3319 of SEQ ID NO: 1884030
acaggaagcuuggauuaag

SEQ ID NO: 2234771 - RNA, 19 nt, Artificial Sequence
  Description of Artificial Sequence: Synthetic oligonucleotide
  Antisense strand to SEQ ID NO: 2234770
cuuaauccaagcuuccugu

SEQ ID NO: 2234772 - RNA, 19 nt, Artificial Sequence
  Description of Artificial Sequence: Synthetic oligonucleotide
  Sense strand starting at position 3330 of SEQ ID NO: 1884030
ggauuaagaccucgguagu

SEQ ID NO: 2234773 - RNA, 19 nt, Artificial Sequence
  Description of Artificial Sequence: Synthetic oligonucleotide
  Antisense strand to SEQ ID NO: 2234772
acuaccgaggucuuaaucc

SEQ ID NO: 2234774 - RNA, 19 nt, Artificial Sequence
  Description of Artificial Sequence: Synthetic oligonucleotide
  Sense strand starting at position 3331 of SEQ ID NO: 1884030
gauuaagaccucgguagug

SEQ ID NO: 2234775 - RNA, 19 nt, Artificial Sequence
  Description of Artificial Sequence: Synthetic oligonucleotide
  Antisense strand to SEQ ID NO: 2234774
cacuaccgaggucuuaauc

SEQ ID NO: 2234776 - RNA, 19 nt, Artificial Sequence
  Description of Artificial Sequence: Synthetic oligonucleotide
  Sense strand starting at position 3487 of SEQ ID NO: 1884030
aggauaucaugaugagauc

SEQ ID NO: 2234777 - RNA, 19 nt, Artificial Sequence
  Description of Artificial Sequence: Synthetic oligonucleotide
  Antisense strand to SEQ ID NO: 2234776
gaucucaucaugauauccu

SEQ ID NO: 2234778 - RNA, 19 nt, Artificial Sequence
  Description of Artificial Sequence: Synthetic oligonucleotide
  Sense strand starting at position 3490 of SEQ ID NO: 1884030
auaucaugaugagaucauc

SEQ ID NO: 2234779 - RNA, 19 nt, Artificial Sequence
  Description of Artificial Sequence: Synthetic oligonucleotide
  Antisense strand to SEQ ID NO: 2234778
gaugaucucaucaugauau

SEQ ID NO: 2234780 - RNA, 19 nt, Artificial Sequence
  Description of Artificial Sequence: Synthetic oligonucleotide
  Sense strand starting at position 3515 of SEQ ID NO: 1884030
uuaguaugggccugaaauc

SEQ ID NO: 2234781 - RNA, 19 nt, Artificial Sequence
  Description of Artificial Sequence: Synthetic oligonucleotide
  Antisense strand to SEQ ID NO: 2234780
gauuucaggcccauacuaa

SEQ ID NO: 2234782 - RNA, 19 nt, Artificial Sequence
  Description of Artificial Sequence: Synthetic oligonucleotide
  Sense strand starting at position 3542 of SEQ ID NO: 1884030
ggcauccuuaugggagaaa

SEQ ID NO: 2234783 - RNA, 19 nt, Artificial Sequence
  Description of Artificial Sequence: Synthetic oligonucleotide
  Antisense strand to SEQ ID NO: 2234782
uuucucccauaaggaugcc

SEQ ID NO: 2234784 - RNA, 19 nt, Artificial Sequence
  Description of Artificial Sequence: Synthetic oligonucleotide
  Sense strand starting at position 3560 of SEQ ID NO: 1884030
aggagaggcuugcaaagau

SEQ ID NO: 2234785 - RNA, 19 nt, Artificial Sequence
  Description of Artificial Sequence: Synthetic oligonucleotide
  Antisense strand to SEQ ID NO: 2234784
aucuuugcaagccucuccu

SEQ ID NO: 2234786 - RNA, 19 nt, Artificial Sequence
  Description of Artificial Sequence: Synthetic oligonucleotide
  Sense strand starting at position 3719 of SEQ ID NO: 1884030
gggaacaagugucuuguuu

SEQ ID NO: 2234787 - RNA, 19 nt, Artificial Sequence
  Description of Artificial Sequence: Synthetic oligonucleotide
  Antisense strand to SEQ ID NO: 2234786
aaacaagacacuuguuccc

SEQ ID NO: 2234788 - RNA, 19 nt, Artificial Sequence
  Description of Artificial Sequence: Synthetic oligonucleotide
  Sense strand starting at position 15 of SEQ ID NO: 1884031
acagaacuguagccacaau

SEQ ID NO: 2234789 - RNA, 19 nt, Artificial Sequence
  Description of Artificial Sequence: Synthetic oligonucleotide
  Antisense strand to SEQ ID NO: 2234788
auuguggcuacaguucugu

SEQ ID NO: 2234790 - RNA, 19 nt, Artificial Sequence
  Description of Artificial Sequence: Synthetic oligonucleotide
  Sense strand starting at position 161 of SEQ ID NO: 1884031
uggucccaccaguaauuaa

SEQ ID NO: 2234791 - RNA, 19 nt, Artificial Sequence
  Description of Artificial Sequence: Synthetic oligonucleotide
  Antisense strand to SEQ ID NO: 2234790
uuaauuacuggugggacca

SEQ ID NO: 2234792 - RNA, 19 nt, Artificial Sequence
  Description of Artificial Sequence: Synthetic oligonucleotide
  Sense strand starting at position 242 of SEQ ID NO: 1884031
cugccauuagccgaguuga

SEQ ID NO: 2234793 - RNA, 19 nt, Artificial Sequence
  Description of Artificial Sequence: Synthetic oligonucleotide
  Antisense strand to SEQ ID NO: 2234792
ucaacucggcuaauggcag

SEQ ID NO: 2234794 - RNA, 19 nt, Artificial Sequence
  Description of Artificial Sequence: Synthetic oligonucleotide
  Sense strand starting at position 286 of SEQ ID NO: 1884031
uuggcaauaaguuggugua

SEQ ID NO: 2234795 - RNA, 19 nt, Artificial Sequence
  Description of Artificial Sequence: Synthetic oligonucleotide
  Antisense strand to SEQ ID NO: 2234794
uacaccaacuuauugccaa

SEQ ID NO: 2234796 - RNA, 19 nt, Artificial Sequence
  Description of Artificial Sequence: Synthetic oligonucleotide
  Sense strand starting at position 287 of SEQ ID NO: 1884031
uggcaauaaguugguguaa

SEQ ID NO: 2234797 - RNA, 19 nt, Artificial Sequence
  Description of Artificial Sequence: Synthetic oligonucleotide
  Antisense strand to SEQ ID NO: 2234796
uuacaccaacuuauugcca

SEQ ID NO: 2234798 - RNA, 19 nt, Artificial Sequence
  Description of Artificial Sequence: Synthetic oligonucleotide
  Sense strand starting at position 288 of SEQ ID NO: 1884031
ggcaauaaguugguguaau

SEQ ID NO: 2234799 - RNA, 19 nt, Artificial Sequence
  Description of Artificial Sequence: Synthetic oligonucleotide
  Antisense strand to SEQ ID NO: 2234798
auuacaccaacuuauugcc

SEQ ID NO: 2234800 - RNA, 19 nt, Artificial Sequence
  Description of Artificial Sequence: Synthetic oligonucleotide
  Sense strand starting at position 374 of SEQ ID NO: 1884031
uggacaagauuguuccagu

SEQ ID NO: 2234801 - RNA, 19 nt, Artificial Sequence
  Description of Artificial Sequence: Synthetic oligonucleotide
  Antisense strand to SEQ ID NO: 2234800
acuggaacaaucuugucca

SEQ ID NO: 2234802 - RNA, 19 nt, Artificial Sequence
  Description of Artificial Sequence: Synthetic oligonucleotide
  Sense strand starting at position 375 of SEQ ID NO: 1884031
ggacaagauuguuccagug

SEQ ID NO: 2234803 - RNA, 19 nt, Artificial Sequence
  Description of Artificial Sequence: Synthetic oligonucleotide
  Antisense strand to SEQ ID NO: 2234802
cacuggaacaaucuugucc

SEQ ID NO: 2234804 - RNA, 19 nt, Artificial Sequence
  Description of Artificial Sequence: Synthetic oligonucleotide
  Sense strand starting at position 382 of SEQ ID NO: 1884031
auuguuccagugugagaag

SEQ ID NO: 2234805 - RNA, 19 nt, Artificial Sequence
  Description of Artificial Sequence: Synthetic oligonucleotide
  Antisense strand to SEQ ID NO: 2234804
cuucucacacuggaacaau

SEQ ID NO: 2234806 - RNA, 19 nt, Artificial Sequence
  Description of Artificial Sequence: Synthetic oligonucleotide
  Sense strand starting at position 531 of SEQ ID NO: 1884031
agagucgugucucuaagug

SEQ ID NO: 2234807 - RNA, 19 nt, Artificial Sequence
  Description of Artificial Sequence: Synthetic oligonucleotide
  Antisense strand to SEQ ID NO: 2234806
cacuuagagacacgacucu

SEQ ID NO: 2234808 - RNA, 19 nt, Artificial Sequence
  Description of Artificial Sequence: Synthetic oligonucleotide
  Sense strand starting at position 557 of SEQ ID NO: 1884031
caagguugucauggccagu

SEQ ID NO: 2234809 - RNA, 19 nt, Artificial Sequence
  Description of Artificial Sequence: Synthetic oligonucleotide
  Antisense strand to SEQ ID NO: 2234808
acuggccaugacaaccuug

SEQ ID NO: 2234810 - RNA, 19 nt, Artificial Sequence
  Description of Artificial Sequence: Synthetic oligonucleotide
  Sense strand starting at position 584 of SEQ ID NO: 1884031
ggcucaaugguccaguaca

SEQ ID NO: 2234811 - RNA, 19 nt, Artificial Sequence
  Description of Artificial Sequence: Synthetic oligonucleotide
  Antisense strand to SEQ ID NO: 2234810
uguacuggaccauugagcc

SEQ ID NO: 2234812 - RNA, 19 nt, Artificial Sequence
  Description of Artificial Sequence: Synthetic oligonucleotide
  Sense strand starting at position 1230 of SEQ ID NO: 1884031
aagggugggcucugaaaga

SEQ ID NO: 2234813 - RNA, 19 nt, Artificial Sequence
  Description of Artificial Sequence: Synthetic oligonucleotide
  Antisense strand to SEQ ID NO: 2234812
ucuuucagagcccacccuu

SEQ ID NO: 2234814 - RNA, 19 nt, Artificial Sequence
  Description of Artificial Sequence: Synthetic oligonucleotide
  Sense strand starting at position 1344 of SEQ ID NO: 1884031
accaaacucgagugaaaua

SEQ ID NO: 2234815 - RNA, 19 nt, Artificial Sequence
  Description of Artificial Sequence: Synthetic oligonucleotide
  Antisense strand to SEQ ID NO: 2234814
uauuucacucgaguuuggu

SEQ ID NO: 2234816 - RNA, 19 nt, Artificial Sequence
  Description of Artificial Sequence: Synthetic oligonucleotide
  Sense strand starting at position 1374 of SEQ ID NO: 1884031
acaguugugcguccucaca

SEQ ID NO: 2234817 - RNA, 19 nt, Artificial Sequence
  Description of Artificial Sequence: Synthetic oligonucleotide
  Antisense strand to SEQ ID NO: 2234816
ugugaggacgcacaacugu

SEQ ID NO: 2234818 - RNA, 19 nt, Artificial Sequence
  Description of Artificial Sequence: Synthetic oligonucleotide
  Sense strand starting at position 1612 of SEQ ID NO: 1884031
ccacaaugcucaggaagga

SEQ ID NO: 2234819 - RNA, 19 nt, Artificial Sequence
  Description of Artificial Sequence: Synthetic oligonucleotide
  Antisense strand to SEQ ID NO: 2234818
uccuuccugagcauugugg

SEQ ID NO: 2234820 - RNA, 19 nt, Artificial Sequence
  Description of Artificial Sequence: Synthetic oligonucleotide
  Sense strand starting at position 1771 of SEQ ID NO: 1884031
agugucaugcucugguauu

SEQ ID NO: 2234821 - RNA, 19 nt, Artificial Sequence
  Description of Artificial Sequence: Synthetic oligonucleotide
  Antisense strand to SEQ ID NO: 2234820
aauaccagagcaugacacu

SEQ ID NO: 2234822 - RNA, 19 nt, Artificial Sequence
  Description of Artificial Sequence: Synthetic oligonucleotide
  Sense strand starting at position 1782 of SEQ ID NO: 1884031
cugguauucugugcuguga

SEQ ID NO: 2234823 - RNA, 19 nt, Artificial Sequence
  Description of Artificial Sequence: Synthetic oligonucleotide
  Antisense strand to SEQ ID NO: 2234822
ucacagcacagaauaccag

SEQ ID NO: 2234824 - RNA, 19 nt, Artificial Sequence
  Description of Artificial Sequence: Synthetic oligonucleotide
  Sense strand starting at position 2030 of SEQ ID NO: 1884031
cgaucuaucacguggccca

SEQ ID NO: 2234825 - RNA, 19 nt, Artificial Sequence
  Description of Artificial Sequence: Synthetic oligonucleotide
  Antisense strand to SEQ ID NO: 2234824
ugggccacgugauagaucg

SEQ ID NO: 2234826 - RNA, 19 nt, Artificial Sequence
  Description of Artificial Sequence: Synthetic oligonucleotide
  Sense strand starting at position 2031 of SEQ ID NO: 1884031
gaucuaucacguggcccau

SEQ ID NO: 2234827 - RNA, 19 nt, Artificial Sequence
  Description of Artificial Sequence: Synthetic oligonucleotide
  Antisense strand to SEQ ID NO: 2234826
augggccacgugauagauc

SEQ ID NO: 2234828 - RNA, 19 nt, Artificial Sequence
  Description of Artificial Sequence: Synthetic oligonucleotide
  Sense strand starting at position 2071 of SEQ ID NO: 1884031
agcagauauugaccgugau

SEQ ID NO: 2234829 - RNA, 19 nt, Artificial Sequence
  Description of Artificial Sequence: Synthetic oligonucleotide
  Antisense strand to SEQ ID NO: 2234828
aucacggucaauaucugcu

SEQ ID NO: 2234830 - RNA, 19 nt, Artificial Sequence
  Description of Artificial Sequence: Synthetic oligonucleotide
  Sense strand starting at position 2072 of SEQ ID NO: 1884031
gcagauauugaccgugauu

SEQ ID NO: 2234831 - RNA, 19 nt, Artificial Sequence
  Description of Artificial Sequence: Synthetic oligonucleotide
  Antisense strand to SEQ ID NO: 2234830
aaucacggucaauaucugc

SEQ ID NO: 2234832 - RNA, 19 nt, Artificial Sequence
  Description of Artificial Sequence: Synthetic oligonucleotide
  Sense strand starting at position 2074 of SEQ ID NO: 1884031
agauauugaccgugauucu

SEQ ID NO: 2234833 - RNA, 19 nt, Artificial Sequence
  Description of Artificial Sequence: Synthetic oligonucleotide
  Antisense strand to SEQ ID NO: 2234832
agaaucacggucaauaucu

SEQ ID NO: 2234834 - RNA, 19 nt, Artificial Sequence
  Description of Artificial Sequence: Synthetic oligonucleotide
  Sense strand starting at position 2075 of SEQ ID NO: 1884031
gauauugaccgugauucua

SEQ ID NO: 2234835 - RNA, 19 nt, Artificial Sequence
  Description of Artificial Sequence: Synthetic oligonucleotide
  Antisense strand to SEQ ID NO: 2234834
uagaaucacggucaauauc

SEQ ID NO: 2234836 - RNA, 19 nt, Artificial Sequence
  Description of Artificial Sequence: Synthetic oligonucleotide
  Sense strand starting at position 2077 of SEQ ID NO: 1884031
uauugaccgugauucuaau

SEQ ID NO: 2234837 - RNA, 19 nt, Artificial Sequence
  Description of Artificial Sequence: Synthetic oligonucleotide
  Antisense strand to SEQ ID NO: 2234836
auuagaaucacggucaaua

SEQ ID NO: 2234838 - RNA, 19 nt, Artificial Sequence
  Description of Artificial Sequence: Synthetic oligonucleotide
  Sense strand starting at position 2083 of SEQ ID NO: 1884031
ccgugauucuaaucgggug

SEQ ID NO: 2234839 - RNA, 19 nt, Artificial Sequence
  Description of Artificial Sequence: Synthetic oligonucleotide
  Antisense strand to SEQ ID NO: 2234838
cacccgauuagaaucacgg

SEQ ID NO: 2234840 - RNA, 19 nt, Artificial Sequence
  Description of Artificial Sequence: Synthetic oligonucleotide
  Sense strand starting at position 2084 of SEQ ID NO: 1884031
cgugauucuaaucggguga

SEQ ID NO: 2234841 - RNA, 19 nt, Artificial Sequence
  Description of Artificial Sequence: Synthetic oligonucleotide
  Antisense strand to SEQ ID NO: 2234840
ucacccgauuagaaucacg

SEQ ID NO: 2234842 - RNA, 19 nt, Artificial Sequence
  Description of Artificial Sequence: Synthetic oligonucleotide
  Sense strand starting at position 2135 of SEQ ID NO: 1884031
gccgacuuauggguucaga

SEQ ID NO: 2234843 - RNA, 19 nt, Artificial Sequence
  Description of Artificial Sequence: Synthetic oligonucleotide
  Antisense strand to SEQ ID NO: 2234842
ucugaacccauaagucggc

SEQ ID NO: 2234844 - RNA, 19 nt, Artificial Sequence
  Description of Artificial Sequence: Synthetic oligonucleotide
  Sense strand starting at position 2189 of SEQ ID NO: 1884031
agaacaugcccugggugau

SEQ ID NO: 2234845 - RNA, 19 nt, Artificial Sequence
  Description of Artificial Sequence: Synthetic oligonucleotide
  Antisense strand to SEQ ID NO: 2234844
aucacccagggcauguucu

SEQ ID NO: 2234846 - RNA, 19 nt, Artificial Sequence
  Description of Artificial Sequence: Synthetic oligonucleotide
  Sense strand starting at position 2190 of SEQ ID NO: 1884031
gaacaugcccugggugauu

SEQ ID NO: 2234847 - RNA, 19 nt, Artificial Sequence
  Description of Artificial Sequence: Synthetic oligonucleotide
  Antisense strand to SEQ ID NO: 2234846
aaucacccagggcauguuc

SEQ ID NO: 2234848 - RNA, 19 nt, Artificial Sequence
  Description of Artificial Sequence: Synthetic oligonucleotide
  Sense strand starting at position 2350 of SEQ ID NO: 1884031
ggauguauguccuugaauc

SEQ ID NO: 2234849 - RNA, 19 nt, Artificial Sequence
  Description of Artificial Sequence: Synthetic oligonucleotide
  Antisense strand to SEQ ID NO: 2234848
gauucaaggacauacaucc

SEQ ID NO: 2234850 - RNA, 19 nt, Artificial Sequence
  Description of Artificial Sequence: Synthetic oligonucleotide
  Sense strand starting at position 2351 of SEQ ID NO: 1884031
gauguauguccuugaaucc

SEQ ID NO: 2234851 - RNA, 19 nt, Artificial Sequence
  Description of Artificial Sequence: Synthetic oligonucleotide
  Antisense strand to SEQ ID NO: 2234850
ggauucaaggacauacauc

SEQ ID NO: 2234852 - RNA, 19 nt, Artificial Sequence
  Description of Artificial Sequence: Synthetic oligonucleotide
  Sense strand starting at position 2352 of SEQ ID NO: 1884031
auguauguccuugaaucca

SEQ ID NO: 2234853 - RNA, 19 nt, Artificial Sequence
  Description of Artificial Sequence: Synthetic oligonucleotide
  Antisense strand to SEQ ID NO: 2234852
uggauucaaggacauacau

SEQ ID NO: 2234854 - RNA, 19 nt, Artificial Sequence
  Description of Artificial Sequence: Synthetic oligonucleotide
  Sense strand starting at position 2551 of SEQ ID NO: 1884031
gacucugucccgugccaau

SEQ ID NO: 2234855 - RNA, 19 nt, Artificial Sequence
  Description of Artificial Sequence: Synthetic oligonucleotide
  Antisense strand to SEQ ID NO: 2234854
auuggcacgggacagaguc

SEQ ID NO: 2234856 - RNA, 19 nt, Artificial Sequence
  Description of Artificial Sequence: Synthetic oligonucleotide
  Sense strand starting at position 2753 of SEQ ID NO: 1884031
ccugcuacuugggucuaaa

SEQ ID NO: 2234857 - RNA, 19 nt, Artificial Sequence
  Description of Artificial Sequence: Synthetic oligonucleotide
  Antisense strand to SEQ ID NO: 2234856
uuuagacccaaguagcagg

SEQ ID NO: 2234858 - RNA, 19 nt, Artificial Sequence
  Description of Artificial Sequence: Synthetic oligonucleotide
  Sense strand starting at position 2861 of SEQ ID NO: 1884031
ggagacuacucuggagaac

SEQ ID NO: 2234859 - RNA, 19 nt, Artificial Sequence
  Description of Artificial Sequence: Synthetic oligonucleotide
  Antisense strand to SEQ ID NO: 2234858
guucuccagaguagucucc

SEQ ID NO: 2234860 - RNA, 19 nt, Artificial Sequence
  Description of Artificial Sequence: Synthetic oligonucleotide
  Sense strand starting at position 3678 of SEQ ID NO: 1884031
ucaccagguuccuuacauu

SEQ ID NO: 2234861 - RNA, 19 nt, Artificial Sequence
  Description of Artificial Sequence: Synthetic oligonucleotide
  Antisense strand to SEQ ID NO: 2234860
aauguaaggaaccugguga

SEQ ID NO: 2234862 - RNA, 19 nt, Artificial Sequence
  Description of Artificial Sequence: Synthetic oligonucleotide
  Sense strand starting at position 3725 of SEQ ID NO: 1884031
ugugccuucuguuuagaag

SEQ ID NO: 2234863 - RNA, 19 nt, Artificial Sequence
  Description of Artificial Sequence: Synthetic oligonucleotide
  Antisense strand to SEQ ID NO: 2234862
cuucuaaacagaaggcaca

SEQ ID NO: 2234864 - RNA, 19 nt, Artificial Sequence
  Description of Artificial Sequence: Synthetic oligonucleotide
  Sense strand starting at position 3856 of SEQ ID NO: 1884031
cgcacuuacccugagucaa

SEQ ID NO: 2234865 - RNA, 19 nt, Artificial Sequence
  Description of Artificial Sequence: Synthetic oligonucleotide
  Antisense strand to SEQ ID NO: 2234864
uugacucaggguaagugcg

SEQ ID NO: 2234866 - RNA, 19 nt, Artificial Sequence
  Description of Artificial Sequence: Synthetic oligonucleotide
  Sense strand starting at position 3924 of SEQ ID NO: 1884031
ggucucauccaccguuaca

SEQ ID NO: 2234867 - RNA, 19 nt, Artificial Sequence
  Description of Artificial Sequence: Synthetic oligonucleotide
  Antisense strand to SEQ ID NO: 2234866
uguaacgguggaugagacc

SEQ ID NO: 2234868 - RNA, 19 nt, Artificial Sequence
  Description of Artificial Sequence: Synthetic oligonucleotide
  Sense strand starting at position 215 of SEQ ID NO: 1884032
aauuuaguauugcugaguu

SEQ ID NO: 2234869 - RNA, 19 nt, Artificial Sequence
  Description of Artificial Sequence: Synthetic oligonucleotide
  Antisense strand to SEQ ID NO: 2234868
aacucagcaauacuaaauu

SEQ ID NO: 2234870 - RNA, 19 nt, Artificial Sequence
  Description of Artificial Sequence: Synthetic oligonucleotide
  Sense strand starting at position 259 of SEQ ID NO: 1884032
guggauauaucaucaaagu

SEQ ID NO: 2234871 - RNA, 19 nt, Artificial Sequence
  Description of Artificial Sequence: Synthetic oligonucleotide
  Antisense strand to SEQ ID NO: 2234870
acuuugaugauauauccac

SEQ ID NO: 2234872 - RNA, 19 nt, Artificial Sequence
  Description of Artificial Sequence: Synthetic oligonucleotide
  Sense strand starting at position 397 of SEQ ID NO: 1884032
uggaaagauuaguuuguca

SEQ ID NO: 2234873 - RNA, 19 nt, Artificial Sequence
  Description of Artificial Sequence: Synthetic oligonucleotide
  Antisense strand to SEQ ID NO: 2234872
ugacaaacuaaucuuucca

SEQ ID NO: 2234874 - RNA, 19 nt, Artificial Sequence
  Description of Artificial Sequence: Synthetic oligonucleotide
  Sense strand starting at position 399 of SEQ ID NO: 1884032
gaaagauuaguuugucaug

SEQ ID NO: 2234875 - RNA, 19 nt, Artificial Sequence
  Description of Artificial Sequence: Synthetic oligonucleotide
  Antisense strand to SEQ ID NO: 2234874
caugacaaacuaaucuuuc

SEQ ID NO: 2234876 - RNA, 19 nt, Artificial Sequence
  Description of Artificial Sequence: Synthetic oligonucleotide
  Sense strand starting at position 400 of SEQ ID NO: 1884032
aaagauuaguuugucauga

SEQ ID NO: 2234877 - RNA, 19 nt, Artificial Sequence
  Description of Artificial Sequence: Synthetic oligonucleotide
  Antisense strand to SEQ ID NO: 2234876
ucaugacaaacuaaucuuu

SEQ ID NO: 2234878 - RNA, 19 nt, Artificial Sequence
  Description of Artificial Sequence: Synthetic oligonucleotide
  Sense strand starting at position 401 of SEQ ID NO: 1884032
aagauuaguuugucaugau

SEQ ID NO: 2234879 - RNA, 19 nt, Artificial Sequence
  Description of Artificial Sequence: Synthetic oligonucleotide
  Antisense strand to SEQ ID NO: 2234878
aucaugacaaacuaaucuu

SEQ ID NO: 2234880 - RNA, 19 nt, Artificial Sequence
  Description of Artificial Sequence: Synthetic oligonucleotide
  Sense strand starting at position 405 of SEQ ID NO: 1884032
uuaguuugucaugauggaa

SEQ ID NO: 2234881 - RNA, 19 nt, Artificial Sequence
  Description of Artificial Sequence: Synthetic oligonucleotide
  Antisense strand to SEQ ID NO: 2234880
uuccaucaugacaaacuaa

SEQ ID NO: 2234882 - RNA, 19 nt, Artificial Sequence
  Description of Artificial Sequence: Synthetic oligonucleotide
  Sense strand starting at position 408 of SEQ ID NO: 1884032
guuugucaugauggaaaug

SEQ ID NO: 2234883 - RNA, 19 nt, Artificial Sequence
  Description of Artificial Sequence: Synthetic oligonucleotide
  Antisense strand to SEQ ID NO: 2234882
cauuuccaucaugacaaac

SEQ ID NO: 2234884 - RNA, 19 nt, Artificial Sequence
  Description of Artificial Sequence: Synthetic oligonucleotide
  Sense strand starting at position 465 of SEQ ID NO: 1884032
caaucugugagguagauug

SEQ ID NO: 2234885 - RNA, 19 nt, Artificial Sequence
  Description of Artificial Sequence: Synthetic oligonucleotide
  Antisense strand to SEQ ID NO: 2234884
caaucuaccucacagauug

SEQ ID NO: 2234886 - RNA, 19 nt, Artificial Sequence
  Description of Artificial Sequence: Synthetic oligonucleotide
  Sense strand starting at position 508 of SEQ ID NO: 1884032
cugugaacuccaugagagu

SEQ ID NO: 2234887 - RNA, 19 nt, Artificial Sequence
  Description of Artificial Sequence: Synthetic oligonucleotide
  Antisense strand to SEQ ID NO: 2234886
acucucauggaguucacag

SEQ ID NO: 2234888 - RNA, 19 nt, Artificial Sequence
  Description of Artificial Sequence: Synthetic oligonucleotide
  Sense strand starting at position 514 of SEQ ID NO: 1884032
acuccaugagagugucaga

SEQ ID NO: 2234889 - RNA, 19 nt, Artificial Sequence
  Description of Artificial Sequence: Synthetic oligonucleotide
  Antisense strand to SEQ ID NO: 2234888
ucugacacucucauggagu

SEQ ID NO: 2234890 - RNA, 19 nt, Artificial Sequence
  Description of Artificial Sequence: Synthetic oligonucleotide
  Sense strand starting at position 674 of SEQ ID NO: 1884032
aaggaaucccauuggguau

SEQ ID NO: 2234891 - RNA, 19 nt, Artificial Sequence
  Description of Artificial Sequence: Synthetic oligonucleotide
  Antisense strand to SEQ ID NO: 2234890
auacccaaugggauuccuu

SEQ ID NO: 2234892 - RNA, 19 nt, Artificial Sequence
  Description of Artificial Sequence: Synthetic oligonucleotide
  Sense strand starting at position 703 of SEQ ID NO: 1884032
guucuuagucaagauggua

SEQ ID NO: 2234893 - RNA, 19 nt, Artificial Sequence
  Description of Artificial Sequence: Synthetic oligonucleotide
  Antisense strand to SEQ ID NO: 2234892
uaccaucuugacuaagaac

SEQ ID NO: 2234894 - RNA, 19 nt, Artificial Sequence
  Description of Artificial Sequence: Synthetic oligonucleotide
  Sense strand starting at position 947 of SEQ ID NO: 1884032
ugcucuucuggauacacaa

SEQ ID NO: 2234895 - RNA, 19 nt, Artificial Sequence
  Description of Artificial Sequence: Synthetic oligonucleotide
  Antisense strand to SEQ ID NO: 2234894
uuguguauccagaagagca

SEQ ID NO: 2234896 - RNA, 19 nt, Artificial Sequence
  Description of Artificial Sequence: Synthetic oligonucleotide
  Sense strand starting at position 976 of SEQ ID NO: 1884032
cucuuugugggauguggaa

SEQ ID NO: 2234897 - RNA, 19 nt, Artificial Sequence
  Description of Artificial Sequence: Synthetic oligonucleotide
  Antisense strand to SEQ ID NO: 2234896
uuccacaucccacaaagag

SEQ ID NO: 2234898 - RNA, 19 nt, Artificial Sequence
  Description of Artificial Sequence: Synthetic oligonucleotide
  Sense strand starting at position 978 of SEQ ID NO: 1884032
cuuugugggauguggaaau

SEQ ID NO: 2234899 - RNA, 19 nt, Artificial Sequence
  Description of Artificial Sequence: Synthetic oligonucleotide
  Antisense strand to SEQ ID NO: 2234898
auuuccacaucccacaaag

SEQ ID NO: 2234900 - RNA, 19 nt, Artificial Sequence
  Description of Artificial Sequence: Synthetic oligonucleotide
  Sense strand starting at position 1095 of SEQ ID NO: 1884032
ucuaaaugucuagguauua

SEQ ID NO: 2234901 - RNA, 19 nt, Artificial Sequence
  Description of Artificial Sequence: Synthetic oligonucleotide
  Antisense strand to SEQ ID NO: 2234900
uaauaccuagacauuuaga

SEQ ID NO: 2234902 - RNA, 19 nt, Artificial Sequence
  Description of Artificial Sequence: Synthetic oligonucleotide
  Sense strand starting at position 1096 of SEQ ID NO: 1884032
cuaaaugucuagguauuag

SEQ ID NO: 2234903 - RNA, 19 nt, Artificial Sequence
  Description of Artificial Sequence: Synthetic oligonucleotide
  Antisense strand to SEQ ID NO: 2234902
cuaauaccuagacauuuag

SEQ ID NO: 2234904 - RNA, 19 nt, Artificial Sequence
  Description of Artificial Sequence: Synthetic oligonucleotide
  Sense strand starting at position 1199 of SEQ ID NO: 1884032
gagucagauuuauauacag

SEQ ID NO: 2234905 - RNA, 19 nt, Artificial Sequence
  Description of Artificial Sequence: Synthetic oligonucleotide
  Antisense strand to SEQ ID NO: 2234904
cuguauauaaaucugacuc

SEQ ID NO: 2234906 - RNA, 19 nt, Artificial Sequence
  Description of Artificial Sequence: Synthetic oligonucleotide
  Sense strand starting at position 1516 of SEQ ID NO: 1884032
guuaauacuuugucuacaa

SEQ ID NO: 2234907 - RNA, 19 nt, Artificial Sequence
  Description of Artificial Sequence: Synthetic oligonucleotide
  Antisense strand to SEQ ID NO: 2234906
uuguagacaaaguauuaac

SEQ ID NO: 2234908 - RNA, 19 nt, Artificial Sequence
  Description of Artificial Sequence: Synthetic oligonucleotide
  Sense strand starting at position 1887 of SEQ ID NO: 1884032
cuagcugagcaucacuaau

SEQ ID NO: 2234909 - RNA, 19 nt, Artificial Sequence
  Description of Artificial Sequence: Synthetic oligonucleotide
  Antisense strand to SEQ ID NO: 2234908
auuagugaugcucagcuag

SEQ ID NO: 2234910 - RNA, 19 nt, Artificial Sequence
  Description of Artificial Sequence: Synthetic oligonucleotide
  Sense strand starting at position 2150 of SEQ ID NO: 1884032
agggcugggcaguaaauau

SEQ ID NO: 2234911 - RNA, 19 nt, Artificial Sequence
  Description of Artificial Sequence: Synthetic oligonucleotide
  Antisense strand to SEQ ID NO: 2234910
auauuuacugcccagcccu

SEQ ID NO: 2234912 - RNA, 19 nt, Artificial Sequence
  Description of Artificial Sequence: Synthetic oligonucleotide
  Sense strand starting at position 2238 of SEQ ID NO: 1884032
cauagaugauguguaaaca

SEQ ID NO: 2234913 - RNA, 19 nt, Artificial Sequence
  Description of Artificial Sequence: Synthetic oligonucleotide
  Antisense strand to SEQ ID NO: 2234912
uguuuacacaucaucuaug

SEQ ID NO: 2234914 - RNA, 19 nt, Artificial Sequence
  Description of Artificial Sequence: Synthetic oligonucleotide
  Sense strand starting at position 2351 of SEQ ID NO: 1884032
uguggcauuagguacuaaa

SEQ ID NO: 2234915 - RNA, 19 nt, Artificial Sequence
  Description of Artificial Sequence: Synthetic oligonucleotide
  Antisense strand to SEQ ID NO: 2234914
uuuaguaccuaaugccaca

SEQ ID NO: 2234916 - RNA, 19 nt, Artificial Sequence
  Description of Artificial Sequence: Synthetic oligonucleotide
  Sense strand starting at position 2361 of SEQ ID NO: 1884032
gguacuaaaugucugacau

SEQ ID NO: 2234917 - RNA, 19 nt, Artificial Sequence
  Description of Artificial Sequence: Synthetic oligonucleotide
  Antisense strand to SEQ ID NO: 2234916
augucagacauuuaguacc

SEQ ID NO: 2234918 - RNA, 19 nt, Artificial Sequence
  Description of Artificial Sequence: Synthetic oligonucleotide
  Sense strand starting at position 2396 of SEQ ID NO: 1884032
ucagauguugucuauguag

SEQ ID NO: 2234919 - RNA, 19 nt, Artificial Sequence
  Description of Artificial Sequence: Synthetic oligonucleotide
  Antisense strand to SEQ ID NO: 2234918
cuacauagacaacaucuga

SEQ ID NO: 2234920 - RNA, 19 nt, Artificial Sequence
  Description of Artificial Sequence: Synthetic oligonucleotide
  Sense strand starting at position 2510 of SEQ ID NO: 1884032
uuucuuuaggugggauaau

SEQ ID NO: 2234921 - RNA, 19 nt, Artificial Sequence
  Description of Artificial Sequence: Synthetic oligonucleotide
  Antisense strand to SEQ ID NO: 2234920
auuaucccaccuaaagaaa

SEQ ID NO: 2234922 - RNA, 19 nt, Artificial Sequence
  Description of Artificial Sequence: Synthetic oligonucleotide
  Sense strand starting at position 2533 of SEQ ID NO: 1884032
ccauuuagauuagagucaa

SEQ ID NO: 2234923 - RNA, 19 nt, Artificial Sequence
  Description of Artificial Sequence: Synthetic oligonucleotide
  Antisense strand to SEQ ID NO: 2234922
uugacucuaaucuaaaugg

SEQ ID NO: 2234924 - RNA, 19 nt, Artificial Sequence
  Description of Artificial Sequence: Synthetic oligonucleotide
  Sense strand starting at position 2550 of SEQ ID NO: 1884032
aaauguuauugguuuagga

SEQ ID NO: 2234925 - RNA, 19 nt, Artificial Sequence
  Description of Artificial Sequence: Synthetic oligonucleotide
  Antisense strand to SEQ ID NO: 2234924
uccuaaaccaauaacauuu

SEQ ID NO: 2234926 - RNA, 19 nt, Artificial Sequence
  Description of Artificial Sequence: Synthetic oligonucleotide
  Sense strand starting at position 2690 of SEQ ID NO: 1884032
uccagagguuucuuauuau

SEQ ID NO: 2234927 - RNA, 19 nt, Artificial Sequence
  Description of Artificial Sequence: Synthetic oligonucleotide
  Antisense strand to SEQ ID NO: 2234926
auaauaagaaaccucugga

SEQ ID NO: 2234928 - RNA, 19 nt, Artificial Sequence
  Description of Artificial Sequence: Synthetic oligonucleotide
  Sense strand starting at position 2739 of SEQ ID NO: 1884032
acgguauggaucuagcgaa

SEQ ID NO: 2234929 - RNA, 19 nt, Artificial Sequence
  Description of Artificial Sequence: Synthetic oligonucleotide
  Antisense strand to SEQ ID NO: 2234928
uucgcuagauccauaccgu

SEQ ID NO: 2234930 - RNA, 19 nt, Artificial Sequence
  Description of Artificial Sequence: Synthetic oligonucleotide
  Sense strand starting at position 3229 of SEQ ID NO: 1884032
ugacuuauagugcaucuua

SEQ ID NO: 2234931 - RNA, 19 nt, Artificial Sequence
  Description of Artificial Sequence: Synthetic oligonucleotide
  Antisense strand to SEQ ID NO: 2234930
uaagaugcacuauaaguca

SEQ ID NO: 2234932 - RNA, 19 nt, Artificial Sequence
  Description of Artificial Sequence: Synthetic oligonucleotide
  Sense strand starting at position 3283 of SEQ ID NO: 1884032
gacaucucugaguggcaga

SEQ ID NO: 2234933 - RNA, 19 nt, Artificial Sequence
  Description of Artificial Sequence: Synthetic oligonucleotide
  Antisense strand to SEQ ID NO: 2234932
ucugccacucagagauguc

SEQ ID NO: 2234934 - RNA, 19 nt, Artificial Sequence
  Description of Artificial Sequence: Synthetic oligonucleotide
  Sense strand starting at position 3284 of SEQ ID NO: 1884032
acaucucugaguggcagaa

SEQ ID NO: 2234935 - RNA, 19 nt, Artificial Sequence
  Description of Artificial Sequence: Synthetic oligonucleotide
  Antisense strand to SEQ ID NO: 2234934
uucugccacucagagaugu

SEQ ID NO: 2234936 - RNA, 19 nt, Artificial Sequence
  Description of Artificial Sequence: Synthetic oligonucleotide
  Sense strand starting at position 3364 of SEQ ID NO: 1884032
uugcauagggcaugagaau

SEQ ID NO: 2234937 - RNA, 19 nt, Artificial Sequence
  Description of Artificial Sequence: Synthetic oligonucleotide
  Antisense strand to SEQ ID NO: 2234936
auucucaugcccuaugcaa

SEQ ID NO: 2234938 - RNA, 19 nt, Artificial Sequence
  Description of Artificial Sequence: Synthetic oligonucleotide
  Sense strand starting at position 3749 of SEQ ID NO: 1884032
gauauagaugaauguccuu

SEQ ID NO: 2234939 - RNA, 19 nt, Artificial Sequence
  Description of Artificial Sequence: Synthetic oligonucleotide
  Antisense strand to SEQ ID NO: 2234938
aaggacauucaucuauauc

SEQ ID NO: 2234940 - RNA, 19 nt, Artificial Sequence
  Description of Artificial Sequence: Synthetic oligonucleotide
  Sense strand starting at position 3754 of SEQ ID NO: 1884032
agaugaauguccuuuguga

SEQ ID NO: 2234941 - RNA, 19 nt, Artificial Sequence
  Description of Artificial Sequence: Synthetic oligonucleotide
  Antisense strand to SEQ ID NO: 2234940
ucacaaaggacauucaucu

SEQ ID NO: 2234942 - RNA, 19 nt, Artificial Sequence
  Description of Artificial Sequence: Synthetic oligonucleotide
  Sense strand starting at position 3756 of SEQ ID NO: 1884032
augaauguccuuugugaag

SEQ ID NO: 2234943 - RNA, 19 nt, Artificial Sequence
  Description of Artificial Sequence: Synthetic oligonucleotide
  Antisense strand to SEQ ID NO: 2234942
cuucacaaaggacauucau

SEQ ID NO: 2234944 - RNA, 19 nt, Artificial Sequence
  Description of Artificial Sequence: Synthetic oligonucleotide
  Sense strand starting at position 3781 of SEQ ID NO: 1884032
cugacuguaggauguagaa

SEQ ID NO: 2234945 - RNA, 19 nt, Artificial Sequence
  Description of Artificial Sequence: Synthetic oligonucleotide
  Antisense strand to SEQ ID NO: 2234944
uucuacauccuacagucag

SEQ ID NO: 2234946 - RNA, 19 nt, Artificial Sequence
  Description of Artificial Sequence: Synthetic oligonucleotide
  Sense strand starting at position 3830 of SEQ ID NO: 1884032
gagaucugauucuugguuu

SEQ ID NO: 2234947 - RNA, 19 nt, Artificial Sequence
  Description of Artificial Sequence: Synthetic oligonucleotide
  Antisense strand to SEQ ID NO: 2234946
aaaccaagaaucagaucuc

SEQ ID NO: 2234948 - RNA, 19 nt, Artificial Sequence
  Description of Artificial Sequence: Synthetic oligonucleotide
  Sense strand starting at position 201 of SEQ ID NO: 1884033
guuaguguagccuagaaga

SEQ ID NO: 2234949 - RNA, 19 nt, Artificial Sequence
  Description of Artificial Sequence: Synthetic oligonucleotide
  Antisense strand to SEQ ID NO: 2234948
ucuucuaggcuacacuaac

SEQ ID NO: 2234950 - RNA, 19 nt, Artificial Sequence
  Description of Artificial Sequence: Synthetic oligonucleotide
  Sense strand starting at position 203 of SEQ ID NO: 1884033
uaguguagccuagaagaca

SEQ ID NO: 2234951 - RNA, 19 nt, Artificial Sequence
  Description of Artificial Sequence: Synthetic oligonucleotide
  Antisense strand to SEQ ID NO: 2234950
ugucuucuaggcuacacua

SEQ ID NO: 2234952 - RNA, 19 nt, Artificial Sequence
  Description of Artificial Sequence: Synthetic oligonucleotide
  Sense strand starting at position 739 of SEQ ID NO: 1884033
acuauacuauagucaggau

SEQ ID NO: 2234953 - RNA, 19 nt, Artificial Sequence
  Description of Artificial Sequence: Synthetic oligonucleotide
  Antisense strand to SEQ ID NO: 2234952
auccugacuauaguauagu

SEQ ID NO: 2234954 - RNA, 19 nt, Artificial Sequence
  Description of Artificial Sequence: Synthetic oligonucleotide
  Sense strand starting at position 834 of SEQ ID NO: 1884033
uaguauguuguuuagggau

SEQ ID NO: 2234955 - RNA, 19 nt, Artificial Sequence
  Description of Artificial Sequence: Synthetic oligonucleotide
  Antisense strand to SEQ ID NO: 2234954
aucccuaaacaacauacua

SEQ ID NO: 2234956 - RNA, 19 nt, Artificial Sequence
  Description of Artificial Sequence: Synthetic oligonucleotide
  Sense strand starting at position 916 of SEQ ID NO: 1884033
guaguaauggcaggaauac

SEQ ID NO: 2234957 - RNA, 19 nt, Artificial Sequence
  Description of Artificial Sequence: Synthetic oligonucleotide
  Antisense strand to SEQ ID NO: 2234956
guauuccugccauuacuac

SEQ ID NO: 2234958 - RNA, 19 nt, Artificial Sequence
  Description of Artificial Sequence: Synthetic oligonucleotide
  Sense strand starting at position 938 of SEQ ID NO: 1884033
uuguguugcauuguaguau

SEQ ID NO: 2234959 - RNA, 19 nt, Artificial Sequence
  Description of Artificial Sequence: Synthetic oligonucleotide
  Antisense strand to SEQ ID NO: 2234958
auacuacaaugcaacacaa

SEQ ID NO: 2234960 - RNA, 19 nt, Artificial Sequence
  Description of Artificial Sequence: Synthetic oligonucleotide
  Sense strand starting at position 953 of SEQ ID NO: 1884033
guaucuuguauugauggaa

SEQ ID NO: 2234961 - RNA, 19 nt, Artificial Sequence
  Description of Artificial Sequence: Synthetic oligonucleotide
  Antisense strand to SEQ ID NO: 2234960
uuccaucaauacaagauac

SEQ ID NO: 2234962 - RNA, 19 nt, Artificial Sequence
  Description of Artificial Sequence: Synthetic oligonucleotide
  Sense strand starting at position 956 of SEQ ID NO: 1884033
ucuuguauugauggaaauc

SEQ ID NO: 2234963 - RNA, 19 nt, Artificial Sequence
  Description of Artificial Sequence: Synthetic oligonucleotide
  Antisense strand to SEQ ID NO: 2234962
gauuuccaucaauacaaga

SEQ ID NO: 2234964 - RNA, 19 nt, Artificial Sequence
  Description of Artificial Sequence: Synthetic oligonucleotide
  Sense strand starting at position 1002 of SEQ ID NO: 1884033
ugugaaccuggcugagaua

SEQ ID NO: 2234965 - RNA, 19 nt, Artificial Sequence
  Description of Artificial Sequence: Synthetic oligonucleotide
  Antisense strand to SEQ ID NO: 2234964
uaucucagccagguucaca

SEQ ID NO: 2234966 - RNA, 19 nt, Artificial Sequence
  Description of Artificial Sequence: Synthetic oligonucleotide
  Sense strand starting at position 1003 of SEQ ID NO: 1884033
gugaaccuggcugagauau

SEQ ID NO: 2234967 - RNA, 19 nt, Artificial Sequence
  Description of Artificial Sequence: Synthetic oligonucleotide
  Antisense strand to SEQ ID NO: 2234966
auaucucagccagguucac

SEQ ID NO: 2234968 - RNA, 19 nt, Artificial Sequence
  Description of Artificial Sequence: Synthetic oligonucleotide
  Sense strand starting at position 1033 of SEQ ID NO: 1884033
agucuccuccuccaaagua

SEQ ID NO: 2234969 - RNA, 19 nt, Artificial Sequence
  Description of Artificial Sequence: Synthetic oligonucleotide
  Antisense strand to SEQ ID NO: 2234968
uacuuuggaggaggagacu

SEQ ID NO: 2234970 - RNA, 19 nt, Artificial Sequence
  Description of Artificial Sequence: Synthetic oligonucleotide
  Sense strand starting at position 1440 of SEQ ID NO: 1884033
ugguaaauccuggauagcu

SEQ ID NO: 2234971 - RNA, 19 nt, Artificial Sequence
  Description of Artificial Sequence: Synthetic oligonucleotide
  Antisense strand to SEQ ID NO: 2234970
agcuauccaggauuuacca

SEQ ID NO: 2234972 - RNA, 19 nt, Artificial Sequence
  Description of Artificial Sequence: Synthetic oligonucleotide
  Sense strand starting at position 1448 of SEQ ID NO: 1884033
ccuggauagcuuggaagau

SEQ ID NO: 2234973 - RNA, 19 nt, Artificial Sequence
  Description of Artificial Sequence: Synthetic oligonucleotide
  Antisense strand to SEQ ID NO: 2234972
aucuuccaagcuauccagg

SEQ ID NO: 2234974 - RNA, 19 nt, Artificial Sequence
  Description of Artificial Sequence: Synthetic oligonucleotide
  Sense strand starting at position 1546 of SEQ ID NO: 1884033
cccugacuagauuaguauu

SEQ ID NO: 2234975 - RNA, 19 nt, Artificial Sequence
  Description of Artificial Sequence: Synthetic oligonucleotide
  Antisense strand to SEQ ID NO: 2234974
aauacuaaucuagucaggg

SEQ ID NO: 2234976 - RNA, 19 nt, Artificial Sequence
  Description of Artificial Sequence: Synthetic oligonucleotide
  Sense strand starting at position 1603 of SEQ ID NO: 1884033
ggugguauuugaguauggu

SEQ ID NO: 2234977 - RNA, 19 nt, Artificial Sequence
  Description of Artificial Sequence: Synthetic oligonucleotide
  Antisense strand to SEQ ID NO: 2234976
accauacucaaauaccacc

SEQ ID NO: 2234978 - RNA, 19 nt, Artificial Sequence
  Description of Artificial Sequence: Synthetic oligonucleotide
  Sense strand starting at position 1694 of SEQ ID NO: 1884033
augggagagucuucugguu

SEQ ID NO: 2234979 - RNA, 19 nt, Artificial Sequence
  Description of Artificial Sequence: Synthetic oligonucleotide
  Antisense strand to SEQ ID NO: 2234978
aaccagaagacucucccau

SEQ ID NO: 2234980 - RNA, 19 nt, Artificial Sequence
  Description of Artificial Sequence: Synthetic oligonucleotide
  Sense strand starting at position 1764 of SEQ ID NO: 1884033
aagguacugccagacuuua

SEQ ID NO: 2234981 - RNA, 19 nt, Artificial Sequence
  Description of Artificial Sequence: Synthetic oligonucleotide
  Antisense strand to SEQ ID NO: 2234980
uaaagucuggcaguaccuu

SEQ ID NO: 2234982 - RNA, 19 nt, Artificial Sequence
  Description of Artificial Sequence: Synthetic oligonucleotide
  Sense strand starting at position 2043 of SEQ ID NO: 1884033
aaacauuguggugagggua

SEQ ID NO: 2234983 - RNA, 19 nt, Artificial Sequence
  Description of Artificial Sequence: Synthetic oligonucleotide
  Antisense strand to SEQ ID NO: 2234982
uacccucaccacaauguuu

SEQ ID NO: 2234984 - RNA, 19 nt, Artificial Sequence
  Description of Artificial Sequence: Synthetic oligonucleotide
  Sense strand starting at position 2051 of SEQ ID NO: 1884033
uggugaggguaguuaugaa

SEQ ID NO: 2234985 - RNA, 19 nt, Artificial Sequence
  Description of Artificial Sequence: Synthetic oligonucleotide
  Antisense strand to SEQ ID NO: 2234984
uucauaacuacccucacca

SEQ ID NO: 2234986 - RNA, 19 nt, Artificial Sequence
  Description of Artificial Sequence: Synthetic oligonucleotide
  Sense strand starting at position 2165 of SEQ ID NO: 1884033
uuuaauccugcauagagua

SEQ ID NO: 2234987 - RNA, 19 nt, Artificial Sequence
  Description of Artificial Sequence: Synthetic oligonucleotide
  Antisense strand to SEQ ID NO: 2234986
uacucuaugcaggauuaaa

SEQ ID NO: 2234988 - RNA, 19 nt, Artificial Sequence
  Description of Artificial Sequence: Synthetic oligonucleotide
  Sense strand starting at position 2247 of SEQ ID NO: 1884033
cauggaugauaucauuuga

SEQ ID NO: 2234989 - RNA, 19 nt, Artificial Sequence
  Description of Artificial Sequence: Synthetic oligonucleotide
  Antisense strand to SEQ ID NO: 2234988
ucaaaugauaucauccaug

SEQ ID NO: 2234990 - RNA, 19 nt, Artificial Sequence
  Description of Artificial Sequence: Synthetic oligonucleotide
  Sense strand starting at position 2274 of SEQ ID NO: 1884033
ucaagcuaugcaugaggau

SEQ ID NO: 2234991 - RNA, 19 nt, Artificial Sequence
  Description of Artificial Sequence: Synthetic oligonucleotide
  Antisense strand to SEQ ID NO: 2234990
auccucaugcauagcuuga

SEQ ID NO: 2234992 - RNA, 19 nt, Artificial Sequence
  Description of Artificial Sequence: Synthetic oligonucleotide
  Sense strand starting at position 2275 of SEQ ID NO: 1884033
caagcuaugcaugaggaua

SEQ ID NO: 2234993 - RNA, 19 nt, Artificial Sequence
  Description of Artificial Sequence: Synthetic oligonucleotide
  Antisense strand to SEQ ID NO: 2234992
uauccucaugcauagcuug

SEQ ID NO: 2234994 - RNA, 19 nt, Artificial Sequence
  Description of Artificial Sequence: Synthetic oligonucleotide
  Sense strand starting at position 2289 of SEQ ID NO: 1884033
ggauaaauguuaucuugga

SEQ ID NO: 2234995 - RNA, 19 nt, Artificial Sequence
  Description of Artificial Sequence: Synthetic oligonucleotide
  Antisense strand to SEQ ID NO: 2234994
uccaagauaacauuuaucc

SEQ ID NO: 2234996 - RNA, 19 nt, Artificial Sequence
  Description of Artificial Sequence: Synthetic oligonucleotide
  Sense strand starting at position 2290 of SEQ ID NO: 1884033
gauaaauguuaucuuggac

SEQ ID NO: 2234997 - RNA, 19 nt, Artificial Sequence
  Description of Artificial Sequence: Synthetic oligonucleotide
  Antisense strand to SEQ ID NO: 2234996
guccaagauaacauuuauc

SEQ ID NO: 2234998 - RNA, 19 nt, Artificial Sequence
  Description of Artificial Sequence: Synthetic oligonucleotide
  Sense strand starting at position 2392 of SEQ ID NO: 1884033
acuuaugaguguccugaug

SEQ ID NO: 2234999 - RNA, 19 nt, Artificial Sequence
  Description of Artificial Sequence: Synthetic oligonucleotide
  Antisense strand to SEQ ID NO: 2234998
caucaggacacucauaagu

SEQ ID NO: 2235000 - RNA, 19 nt, Artificial Sequence
  Description of Artificial Sequence: Synthetic oligonucleotide
  Sense strand starting at position 2431 of SEQ ID NO: 1884033
gcauuugcuucuuccaaag

SEQ ID NO: 2235001 - RNA, 19 nt, Artificial Sequence
  Description of Artificial Sequence: Synthetic oligonucleotide
  Antisense strand to SEQ ID NO: 2235000
cuuuggaagaagcaaaugc

SEQ ID NO: 2235002 - RNA, 19 nt, Artificial Sequence
  Description of Artificial Sequence: Synthetic oligonucleotide
  Sense strand starting at position 2488 of SEQ ID NO: 1884033
gcuagauaucaguacacag

SEQ ID NO: 2235003 - RNA, 19 nt, Artificial Sequence
  Description of Artificial Sequence: Synthetic oligonucleotide
  Antisense strand to SEQ ID NO: 2235002
cuguguacugauaucuagc

SEQ ID NO: 2235004 - RNA, 19 nt, Artificial Sequence
  Description of Artificial Sequence: Synthetic oligonucleotide
  Sense strand starting at position 2556 of SEQ ID NO: 1884033
ucuagugaaugaccuauaa

SEQ ID NO: 2235005 - RNA, 19 nt, Artificial Sequence
  Description of Artificial Sequence: Synthetic oligonucleotide
  Antisense strand to SEQ ID NO: 2235004
uuauaggucauucacuaga

SEQ ID NO: 2235006 - RNA, 19 nt, Artificial Sequence
  Description of Artificial Sequence: Synthetic oligonucleotide
  Sense strand starting at position 2752 of SEQ ID NO: 1884033
uccuacuuggucuacugau

SEQ ID NO: 2235007 - RNA, 19 nt, Artificial Sequence
  Description of Artificial Sequence: Synthetic oligonucleotide
  Antisense strand to SEQ ID NO: 2235006
aucaguagaccaaguagga

SEQ ID NO: 2235008 - RNA, 19 nt, Artificial Sequence
  Description of Artificial Sequence: Synthetic oligonucleotide
  Sense strand starting at position 3028 of SEQ ID NO: 1884033
uuaaauugagugggcuuau

SEQ ID NO: 2235009 - RNA, 19 nt, Artificial Sequence
  Description of Artificial Sequence: Synthetic oligonucleotide
  Antisense strand to SEQ ID NO: 2235008
auaagcccacucaauuuaa

SEQ ID NO: 2235010 - RNA, 19 nt, Artificial Sequence
  Description of Artificial Sequence: Synthetic oligonucleotide
  Sense strand starting at position 3137 of SEQ ID NO: 1884033
ugucaaagucccugcauuu

SEQ ID NO: 2235011 - RNA, 19 nt, Artificial Sequence
  Description of Artificial Sequence: Synthetic oligonucleotide
  Antisense strand to SEQ ID NO: 2235010
aaaugcagggacuuugaca

SEQ ID NO: 2235012 - RNA, 19 nt, Artificial Sequence
  Description of Artificial Sequence: Synthetic oligonucleotide
  Sense strand starting at position 3200 of SEQ ID NO: 1884033
ugaugaaguuacccaaucu

SEQ ID NO: 2235013 - RNA, 19 nt, Artificial Sequence
  Description of Artificial Sequence: Synthetic oligonucleotide
  Antisense strand to SEQ ID NO: 2235012
agauuggguaacuucauca

SEQ ID NO: 2235014 - RNA, 19 nt, Artificial Sequence
  Description of Artificial Sequence: Synthetic oligonucleotide
  Sense strand starting at position 3490 of SEQ ID NO: 1884033
guacuuaaaugucucauaa

SEQ ID NO: 2235015 - RNA, 19 nt, Artificial Sequence
  Description of Artificial Sequence: Synthetic oligonucleotide
  Antisense strand to SEQ ID NO: 2235014
uuaugagacauuuaaguac

SEQ ID NO: 2235016 - RNA, 19 nt, Artificial Sequence
  Description of Artificial Sequence: Synthetic oligonucleotide
  Sense strand starting at position 3503 of SEQ ID NO: 1884033
ucauaaagugcucaguaaa

SEQ ID NO: 2235017 - RNA, 19 nt, Artificial Sequence
  Description of Artificial Sequence: Synthetic oligonucleotide
  Antisense strand to SEQ ID NO: 2235016
uuuacugagcacuuuauga

SEQ ID NO: 2235018 - RNA, 19 nt, Artificial Sequence
  Description of Artificial Sequence: Synthetic oligonucleotide
  Sense strand starting at position 3693 of SEQ ID NO: 1884033
gccuuaacugauuacuaag

SEQ ID NO: 2235019 - RNA, 19 nt, Artificial Sequence
  Description of Artificial Sequence: Synthetic oligonucleotide
  Antisense strand to SEQ ID NO: 2235018
cuuaguaaucaguuaaggc

SEQ ID NO: 2235020 - RNA, 19 nt, Artificial Sequence
  Description of Artificial Sequence: Synthetic oligonucleotide
  Sense strand starting at position 3699 of SEQ ID NO: 1884033
acugauuacuaaggauuua

SEQ ID NO: 2235021 - RNA, 19 nt, Artificial Sequence
  Description of Artificial Sequence: Synthetic oligonucleotide
  Antisense strand to SEQ ID NO: 2235020
uaaauccuuaguaaucagu

SEQ ID NO: 2235022 - RNA, 19 nt, Artificial Sequence
  Description of Artificial Sequence: Synthetic oligonucleotide
  Sense strand starting at position 3848 of SEQ ID NO: 1884033
gggauuuacugauauaugu

SEQ ID NO: 2235023 - RNA, 19 nt, Artificial Sequence
  Description of Artificial Sequence: Synthetic oligonucleotide
  Antisense strand to SEQ ID NO: 2235022
acauauaucaguaaauccc

SEQ ID NO: 2235024 - RNA, 19 nt, Artificial Sequence
  Description of Artificial Sequence: Synthetic oligonucleotide
  Sense strand starting at position 3902 of SEQ ID NO: 1884033
aguauuguccuggauguua

SEQ ID NO: 2235025 - RNA, 19 nt, Artificial Sequence
  Description of Artificial Sequence: Synthetic oligonucleotide
  Antisense strand to SEQ ID NO: 2235024
uaacauccaggacaauacu

SEQ ID NO: 2235026 - RNA, 19 nt, Artificial Sequence
  Description of Artificial Sequence: Synthetic oligonucleotide
  Sense strand starting at position 3913 of SEQ ID NO: 1884033
ggauguuacagaggaugua

SEQ ID NO: 2235027 - RNA, 19 nt, Artificial Sequence
  Description of Artificial Sequence: Synthetic oligonucleotide
  Antisense strand to SEQ ID NO: 2235026
uacauccucuguaacaucc

SEQ ID NO: 2235028 - RNA, 19 nt, Artificial Sequence
  Description of Artificial Sequence: Synthetic oligonucleotide
  Sense strand starting at position 334 of SEQ ID NO: 1884034
aauggagucuuuguagaug

SEQ ID NO: 2235029 - RNA, 19 nt, Artificial Sequence
  Description of Artificial Sequence: Synthetic oligonucleotide
  Antisense strand to SEQ ID NO: 2235028
caucuacaaagacuccauu

SEQ ID NO: 2235030 - RNA, 19 nt, Artificial Sequence
  Description of Artificial Sequence: Synthetic oligonucleotide
  Sense strand starting at position 340 of SEQ ID NO: 1884034
gucuuuguagaugaaauug

SEQ ID NO: 2235031 - RNA, 19 nt, Artificial Sequence
  Description of Artificial Sequence: Synthetic oligonucleotide
  Antisense strand to SEQ ID NO: 2235030
caauuucaucuacaaagac

SEQ ID NO: 2235032 - RNA, 19 nt, Artificial Sequence
  Description of Artificial Sequence: Synthetic oligonucleotide
  Sense strand starting at position 345 of SEQ ID NO: 1884034
uguagaugaaauuguuaag

SEQ ID NO: 2235033 - RNA, 19 nt, Artificial Sequence
  Description of Artificial Sequence: Synthetic oligonucleotide
  Antisense strand to SEQ ID NO: 2235032
cuuaacaauuucaucuaca

SEQ ID NO: 2235034 - RNA, 19 nt, Artificial Sequence
  Description of Artificial Sequence: Synthetic oligonucleotide
  Sense strand starting at position 795 of SEQ ID NO: 1884034
uggagaucuaagugaugca

SEQ ID NO: 2235035 - RNA, 19 nt, Artificial Sequence
  Description of Artificial Sequence: Synthetic oligonucleotide
  Antisense strand to SEQ ID NO: 2235034
ugcaucacuuagaucucca

SEQ ID NO: 2235036 - RNA, 19 nt, Artificial Sequence
  Description of Artificial Sequence: Synthetic oligonucleotide
  Sense strand starting at position 985 of SEQ ID NO: 1884034
ugugguacuugauuaugga

SEQ ID NO: 2235037 - RNA, 19 nt, Artificial Sequence
  Description of Artificial Sequence: Synthetic oligonucleotide
  Antisense strand to SEQ ID NO: 2235036
uccauaaucaaguaccaca

SEQ ID NO: 2235038 - RNA, 19 nt, Artificial Sequence
  Description of Artificial Sequence: Synthetic oligonucleotide
  Sense strand starting at position 994 of SEQ ID NO: 1884034
ugauuauggaccuguagca

SEQ ID NO: 2235039 - RNA, 19 nt, Artificial Sequence
  Description of Artificial Sequence: Synthetic oligonucleotide
  Antisense strand to SEQ ID NO: 2235038
ugcuacagguccauaauca

SEQ ID NO: 2235040 - RNA, 19 nt, Artificial Sequence
  Description of Artificial Sequence: Synthetic oligonucleotide
  Sense strand starting at position 1041 of SEQ ID NO: 1884034
cucccugaucccugagaca

SEQ ID NO: 2235041 - RNA, 19 nt, Artificial Sequence
  Description of Artificial Sequence: Synthetic oligonucleotide
  Antisense strand to SEQ ID NO: 2235040
ugucucagggaucagggag

SEQ ID NO: 2235042 - RNA, 19 nt, Artificial Sequence
  Description of Artificial Sequence: Synthetic oligonucleotide
  Sense strand starting at position 1316 of SEQ ID NO: 1884034
cugucucucuuaguuuaaa

SEQ ID NO: 2235043 - RNA, 19 nt, Artificial Sequence
  Description of Artificial Sequence: Synthetic oligonucleotide
  Antisense strand to SEQ ID NO: 2235042
uuuaaacuaagagagacag

SEQ ID NO: 2235044 - RNA, 19 nt, Artificial Sequence
  Description of Artificial Sequence: Synthetic oligonucleotide
  Sense strand starting at position 1317 of SEQ ID NO: 1884034
ugucucucuuaguuuaaau

SEQ ID NO: 2235045 - RNA, 19 nt, Artificial Sequence
  Description of Artificial Sequence: Synthetic oligonucleotide
  Antisense strand to SEQ ID NO: 2235044
auuuaaacuaagagagaca

SEQ ID NO: 2235046 - RNA, 19 nt, Artificial Sequence
  Description of Artificial Sequence: Synthetic oligonucleotide
  Sense strand starting at position 1362 of SEQ ID NO: 1884034
aguugagaaugacauuuau

SEQ ID NO: 2235047 - RNA, 19 nt, Artificial Sequence
  Description of Artificial Sequence: Synthetic oligonucleotide
  Antisense strand to SEQ ID NO: 2235046
auaaaugucauucucaacu

SEQ ID NO: 2235048 - RNA, 19 nt, Artificial Sequence
  Description of Artificial Sequence: Synthetic oligonucleotide
  Sense strand starting at position 1619 of SEQ ID NO: 1884034
gcugucauacuaugauaua

SEQ ID NO: 2235049 - RNA, 19 nt, Artificial Sequence
  Description of Artificial Sequence: Synthetic oligonucleotide
  Antisense strand to SEQ ID NO: 2235048
uauaucauaguaugacagc

SEQ ID NO: 2235050 - RNA, 19 nt, Artificial Sequence
  Description of Artificial Sequence: Synthetic oligonucleotide
  Sense strand starting at position 1641 of SEQ ID NO: 1884034
ccuaauguuuagguuaaac

SEQ ID NO: 2235051 - RNA, 19 nt, Artificial Sequence
  Description of Artificial Sequence: Synthetic oligonucleotide
  Antisense strand to SEQ ID NO: 2235050
guuuaaccuaaacauuagg

SEQ ID NO: 2235052 - RNA, 19 nt, Artificial Sequence
  Description of Artificial Sequence: Synthetic oligonucleotide
  Sense strand starting at position 1768 of SEQ ID NO: 1884034
ugcgaacuccggcaacuua

SEQ ID NO: 2235053 - RNA, 19 nt, Artificial Sequence
  Description of Artificial Sequence: Synthetic oligonucleotide
  Antisense strand to SEQ ID NO: 2235052
uaaguugccggaguucgca

SEQ ID NO: 2235054 - RNA, 19 nt, Artificial Sequence
  Description of Artificial Sequence: Synthetic oligonucleotide
  Sense strand starting at position 2024 of SEQ ID NO: 1884034
uccugauugggccaaagcu

SEQ ID NO: 2235055 - RNA, 19 nt, Artificial Sequence
  Description of Artificial Sequence: Synthetic oligonucleotide
  Antisense strand to SEQ ID NO: 2235054
agcuuuggcccaaucagga

SEQ ID NO: 2235056 - RNA, 19 nt, Artificial Sequence
  Description of Artificial Sequence: Synthetic oligonucleotide
  Sense strand starting at position 2122 of SEQ ID NO: 1884034
gaaugagaguacguugcau

SEQ ID NO: 2235057 - RNA, 19 nt, Artificial Sequence
  Description of Artificial Sequence: Synthetic oligonucleotide
  Antisense strand to SEQ ID NO: 2235056
augcaacguacucucauuc

SEQ ID NO: 2235058 - RNA, 19 nt, Artificial Sequence
  Description of Artificial Sequence: Synthetic oligonucleotide
  Sense strand starting at position 2130 of SEQ ID NO: 1884034
guacguugcauucugcuga

SEQ ID NO: 2235059 - RNA, 19 nt, Artificial Sequence
  Description of Artificial Sequence: Synthetic oligonucleotide
  Antisense strand to SEQ ID NO: 2235058
ucagcagaaugcaacguac

SEQ ID NO: 2235060 - RNA, 19 nt, Artificial Sequence
  Description of Artificial Sequence: Synthetic oligonucleotide
  Sense strand starting at position 2265 of SEQ ID NO: 1884034
gaaacaaguucuccaggcu

SEQ ID NO: 2235061 - RNA, 19 nt, Artificial Sequence
  Description of Artificial Sequence: Synthetic oligonucleotide
  Antisense strand to SEQ ID NO: 2235060
agccuggagaacuuguuuc

SEQ ID NO: 2235062 - RNA, 19 nt, Artificial Sequence
  Description of Artificial Sequence: Synthetic oligonucleotide
  Sense strand starting at position 2334 of SEQ ID NO: 1884034
cuauuaucuccagaagcug

SEQ ID NO: 2235063 - RNA, 19 nt, Artificial Sequence
  Description of Artificial Sequence: Synthetic oligonucleotide
  Antisense strand to SEQ ID NO: 2235062
cagcuucuggagauaauag

SEQ ID NO: 2235064 - RNA, 19 nt, Artificial Sequence
  Description of Artificial Sequence: Synthetic oligonucleotide
  Sense strand starting at position 2953 of SEQ ID NO: 1884034
uugcuuauugcucuuugca

SEQ ID NO: 2235065 - RNA, 19 nt, Artificial Sequence
  Description of Artificial Sequence: Synthetic oligonucleotide
  Antisense strand to SEQ ID NO: 2235064
ugcaaagagcaauaagcaa

SEQ ID NO: 2235066 - RNA, 19 nt, Artificial Sequence
  Description of Artificial Sequence: Synthetic oligonucleotide
  Sense strand starting at position 2974 of SEQ ID NO: 1884034
uggugcacucuuuacaaau

SEQ ID NO: 2235067 - RNA, 19 nt, Artificial Sequence
  Description of Artificial Sequence: Synthetic oligonucleotide
  Antisense strand to SEQ ID NO: 2235066
auuuguaaagagugcacca

SEQ ID NO: 2235068 - RNA, 19 nt, Artificial Sequence
  Description of Artificial Sequence: Synthetic oligonucleotide
  Sense strand starting at position 3125 of SEQ ID NO: 1884034
aucuauuauggugaccuau

SEQ ID NO: 2235069 - RNA, 19 nt, Artificial Sequence
  Description of Artificial Sequence: Synthetic oligonucleotide
  Antisense strand to SEQ ID NO: 2235068
auaggucaccauaauagau

SEQ ID NO: 2235070 - RNA, 19 nt, Artificial Sequence
  Description of Artificial Sequence: Synthetic oligonucleotide
  Sense strand starting at position 3134 of SEQ ID NO: 1884034
ggugaccuaugguuaguga

SEQ ID NO: 2235071 - RNA, 19 nt, Artificial Sequence
  Description of Artificial Sequence: Synthetic oligonucleotide
  Antisense strand to SEQ ID NO: 2235070
ucacuaaccauaggucacc

SEQ ID NO: 2235072 - RNA, 19 nt, Artificial Sequence
  Description of Artificial Sequence: Synthetic oligonucleotide
  Sense strand starting at position 3135 of SEQ ID NO: 1884034
gugaccuaugguuagugau

SEQ ID NO: 2235073 - RNA, 19 nt, Artificial Sequence
  Description of Artificial Sequence: Synthetic oligonucleotide
  Antisense strand to SEQ ID NO: 2235072
aucacuaaccauaggucac

SEQ ID NO: 2235074 - RNA, 19 nt, Artificial Sequence
  Description of Artificial Sequence: Synthetic oligonucleotide
  Sense strand starting at position 3137 of SEQ ID NO: 1884034
gaccuaugguuagugauau

SEQ ID NO: 2235075 - RNA, 19 nt, Artificial Sequence
  Description of Artificial Sequence: Synthetic oligonucleotide
  Antisense strand to SEQ ID NO: 2235074
auaucacuaaccauagguc

SEQ ID NO: 2235076 - RNA, 19 nt, Artificial Sequence
  Description of Artificial Sequence: Synthetic oligonucleotide
  Sense strand starting at position 3145 of SEQ ID NO: 1884034
guuagugauauugcgcauu

SEQ ID NO: 2235077 - RNA, 19 nt, Artificial Sequence
  Description of Artificial Sequence: Synthetic oligonucleotide
  Antisense strand to SEQ ID NO: 2235076
aaugcgcaauaucacuaac

SEQ ID NO: 2235078 - RNA, 19 nt, Artificial Sequence
  Description of Artificial Sequence: Synthetic oligonucleotide
  Sense strand starting at position 3148 of SEQ ID NO: 1884034
agugauauugcgcauuacu

SEQ ID NO: 2235079 - RNA, 19 nt, Artificial Sequence
  Description of Artificial Sequence: Synthetic oligonucleotide
  Antisense strand to SEQ ID NO: 2235078
aguaaugcgcaauaucacu

SEQ ID NO: 2235080 - RNA, 19 nt, Artificial Sequence
  Description of Artificial Sequence: Synthetic oligonucleotide
  Sense strand starting at position 3151 of SEQ ID NO: 1884034
gauauugcgcauuacuauu

SEQ ID NO: 2235081 - RNA, 19 nt, Artificial Sequence
  Description of Artificial Sequence: Synthetic oligonucleotide
  Antisense strand to SEQ ID NO: 2235080
aauaguaaugcgcaauauc

SEQ ID NO: 2235082 - RNA, 19 nt, Artificial Sequence
  Description of Artificial Sequence: Synthetic oligonucleotide
  Sense strand starting at position 3197 of SEQ ID NO: 1884034
aaacuuaauguguaaaggu

SEQ ID NO: 2235083 - RNA, 19 nt, Artificial Sequence
  Description of Artificial Sequence: Synthetic oligonucleotide
  Antisense strand to SEQ ID NO: 2235082
accuuuacacauuaaguuu

SEQ ID NO: 2235084 - RNA, 19 nt, Artificial Sequence
  Description of Artificial Sequence: Synthetic oligonucleotide
  Sense strand starting at position 3276 of SEQ ID NO: 1884034
cucccuguuaugugagaug

SEQ ID NO: 2235085 - RNA, 19 nt, Artificial Sequence
  Description of Artificial Sequence: Synthetic oligonucleotide
  Antisense strand to SEQ ID NO: 2235084
caucucacauaacagggag

SEQ ID NO: 2235086 - RNA, 19 nt, Artificial Sequence
  Description of Artificial Sequence: Synthetic oligonucleotide
  Sense strand starting at position 3281 of SEQ ID NO: 1884034
uguuaugugagaugcaaga

SEQ ID NO: 2235087 - RNA, 19 nt, Artificial Sequence
  Description of Artificial Sequence: Synthetic oligonucleotide
  Antisense strand to SEQ ID NO: 2235086
ucuugcaucucacauaaca

SEQ ID NO: 2235088 - RNA, 19 nt, Artificial Sequence
  Description of Artificial Sequence: Synthetic oligonucleotide
  Sense strand starting at position 3578 of SEQ ID NO: 1884034
gugaguggucuggauagau

SEQ ID NO: 2235089 - RNA, 19 nt, Artificial Sequence
  Description of Artificial Sequence: Synthetic oligonucleotide
  Antisense strand to SEQ ID NO: 2235088
aucuauccagaccacucac

SEQ ID NO: 2235090 - RNA, 19 nt, Artificial Sequence
  Description of Artificial Sequence: Synthetic oligonucleotide
  Sense strand starting at position 3719 of SEQ ID NO: 1884034
ugcucauaagauugagaga

SEQ ID NO: 2235091 - RNA, 19 nt, Artificial Sequence
  Description of Artificial Sequence: Synthetic oligonucleotide
  Antisense strand to SEQ ID NO: 2235090
ucucucaaucuuaugagca

SEQ ID NO: 2235092 - RNA, 19 nt, Artificial Sequence
  Description of Artificial Sequence: Synthetic oligonucleotide
  Sense strand starting at position 3722 of SEQ ID NO: 1884034
ucauaagauugagagaaag

SEQ ID NO: 2235093 - RNA, 19 nt, Artificial Sequence
  Description of Artificial Sequence: Synthetic oligonucleotide
  Antisense strand to SEQ ID NO: 2235092
cuuucucucaaucuuauga

SEQ ID NO: 2235094 - RNA, 19 nt, Artificial Sequence
  Description of Artificial Sequence: Synthetic oligonucleotide
  Sense strand starting at position 3736 of SEQ ID NO: 1884034
gaaagaaguugucuccaca

SEQ ID NO: 2235095 - RNA, 19 nt, Artificial Sequence
  Description of Artificial Sequence: Synthetic oligonucleotide
  Antisense strand to SEQ ID NO: 2235094
uguggagacaacuucuuuc

SEQ ID NO: 2235096 - RNA, 19 nt, Artificial Sequence
  Description of Artificial Sequence: Synthetic oligonucleotide
  Sense strand starting at position 3739 of SEQ ID NO: 1884034
agaaguugucuccacagca

SEQ ID NO: 2235097 - RNA, 19 nt, Artificial Sequence
  Description of Artificial Sequence: Synthetic oligonucleotide
  Antisense strand to SEQ ID NO: 2235096
ugcuguggagacaacuucu

SEQ ID NO: 2235098 - RNA, 19 nt, Artificial Sequence
  Description of Artificial Sequence: Synthetic oligonucleotide
  Sense strand starting at position 3824 of SEQ ID NO: 1884034
cagcuaagaucauugaagu

SEQ ID NO: 2235099 - RNA, 19 nt, Artificial Sequence
  Description of Artificial Sequence: Synthetic oligonucleotide
  Antisense strand to SEQ ID NO: 2235098
acuucaaugaucuuagcug

SEQ ID NO: 2235100 - RNA, 19 nt, Artificial Sequence
  Description of Artificial Sequence: Synthetic oligonucleotide
  Sense strand starting at position 3825 of SEQ ID NO: 1884034
agcuaagaucauugaagua

SEQ ID NO: 2235101 - RNA, 19 nt, Artificial Sequence
  Description of Artificial Sequence: Synthetic oligonucleotide
  Antisense strand to SEQ ID NO: 2235100
uacuucaaugaucuuagcu

SEQ ID NO: 2235102 - RNA, 19 nt, Artificial Sequence
  Description of Artificial Sequence: Synthetic oligonucleotide
  Sense strand starting at position 3913 of SEQ ID NO: 1884034
agaucuuucuuagcuagaa

SEQ ID NO: 2235103 - RNA, 19 nt, Artificial Sequence
  Description of Artificial Sequence: Synthetic oligonucleotide
  Antisense strand to SEQ ID NO: 2235102
uucuagcuaagaaagaucu

SEQ ID NO: 2235104 - RNA, 19 nt, Artificial Sequence
  Description of Artificial Sequence: Synthetic oligonucleotide
  Sense strand starting at position 3981 of SEQ ID NO: 1884034
aaguuaagugaaggguuaa

SEQ ID NO: 2235105 - RNA, 19 nt, Artificial Sequence
  Description of Artificial Sequence: Synthetic oligonucleotide
  Antisense strand to SEQ ID NO: 2235104
uuaacccuucacuuaacuu

SEQ ID NO: 2235106 - RNA, 19 nt, Artificial Sequence
  Description of Artificial Sequence: Synthetic oligonucleotide
  Sense strand starting at position 3982 of SEQ ID NO: 1884034
aguuaagugaaggguuaau

SEQ ID NO: 2235107 - RNA, 19 nt, Artificial Sequence
  Description of Artificial Sequence: Synthetic oligonucleotide
  Antisense strand to SEQ ID NO: 2235106
auuaacccuucacuuaacu

SEQ ID NO: 2235108 - RNA, 19 nt, Artificial Sequence
  Description of Artificial Sequence: Synthetic oligonucleotide
  Sense strand starting at position 266 of SEQ ID NO: 1884036
gugcccauugacugauaaa

SEQ ID NO: 2235109 - RNA, 19 nt, Artificial Sequence
  Description of Artificial Sequence: Synthetic oligonucleotide
  Antisense strand to SEQ ID NO: 2235108
uuuaucagucaaugggcac

SEQ ID NO: 2235110 - RNA, 19 nt, Artificial Sequence
  Description of Artificial Sequence: Synthetic oligonucleotide
  Sense strand starting at position 381 of SEQ ID NO: 1884036
agacauuaugcggagugaa

SEQ ID NO: 2235111 - RNA, 19 nt, Artificial Sequence
  Description of Artificial Sequence: Synthetic oligonucleotide
  Antisense strand to SEQ ID NO: 2235110
uucacuccgcauaaugucu

SEQ ID NO: 2235112 - RNA, 19 nt, Artificial Sequence
  Description of Artificial Sequence: Synthetic oligonucleotide
  Sense strand starting at position 703 of SEQ ID NO: 1884036
ggcugagucagguggaaua

SEQ ID NO: 2235113 - RNA, 19 nt, Artificial Sequence
  Description of Artificial Sequence: Synthetic oligonucleotide
  Antisense strand to SEQ ID NO: 2235112
uauuccaccugacucagcc

SEQ ID NO: 2235114 - RNA, 19 nt, Artificial Sequence
  Description of Artificial Sequence: Synthetic oligonucleotide
  Sense strand starting at position 1136 of SEQ ID NO: 1884036
ggucauguuccagauugag

SEQ ID NO: 2235115 - RNA, 19 nt, Artificial Sequence
  Description of Artificial Sequence: Synthetic oligonucleotide
  Antisense strand to SEQ ID NO: 2235114
cucaaucuggaacaugacc

SEQ ID NO: 2235116 - RNA, 19 nt, Artificial Sequence
  Description of Artificial Sequence: Synthetic oligonucleotide
  Sense strand starting at position 1209 of SEQ ID NO: 1884036
gcuuuacgccugcuggaau

SEQ ID NO: 2235117 - RNA, 19 nt, Artificial Sequence
  Description of Artificial Sequence: Synthetic oligonucleotide
  Antisense strand to SEQ ID NO: 2235116
auuccagcaggcguaaagc

SEQ ID NO: 2235118 - RNA, 19 nt, Artificial Sequence
  Description of Artificial Sequence: Synthetic oligonucleotide
  Sense strand starting at position 1256 of SEQ ID NO: 1884036
acaguacaaguguaacauu

SEQ ID NO: 2235119 - RNA, 19 nt, Artificial Sequence
  Description of Artificial Sequence: Synthetic oligonucleotide
  Antisense strand to SEQ ID NO: 2235118
aauguuacacuuguacugu

SEQ ID NO: 2235120 - RNA, 19 nt, Artificial Sequence
  Description of Artificial Sequence: Synthetic oligonucleotide
  Sense strand starting at position 1326 of SEQ ID NO: 1884036
gguggaggccaaugaaauu

SEQ ID NO: 2235121 - RNA, 19 nt, Artificial Sequence
  Description of Artificial Sequence: Synthetic oligonucleotide
  Antisense strand to SEQ ID NO: 2235120
aauuucauuggccuccacc

SEQ ID NO: 2235122 - RNA, 19 nt, Artificial Sequence
  Description of Artificial Sequence: Synthetic oligonucleotide
  Sense strand starting at position 1631 of SEQ ID NO: 1884036
acuuaaugugauggugaag

SEQ ID NO: 2235123 - RNA, 19 nt, Artificial Sequence
  Description of Artificial Sequence: Synthetic oligonucleotide
  Antisense strand to SEQ ID NO: 2235122
cuucaccaucacauuaagu

SEQ ID NO: 2235124 - RNA, 19 nt, Artificial Sequence
  Description of Artificial Sequence: Synthetic oligonucleotide
  Sense strand starting at position 1634 of SEQ ID NO: 1884036
uaaugugauggugaagcau

SEQ ID NO: 2235125 - RNA, 19 nt, Artificial Sequence
  Description of Artificial Sequence: Synthetic oligonucleotide
  Antisense strand to SEQ ID NO: 2235124
augcuucaccaucacauua

SEQ ID NO: 2235126 - RNA, 19 nt, Artificial Sequence
  Description of Artificial Sequence: Synthetic oligonucleotide
  Sense strand starting at position 1686 of SEQ ID NO: 1884036
uuaccucuagcugagugau

SEQ ID NO: 2235127 - RNA, 19 nt, Artificial Sequence
  Description of Artificial Sequence: Synthetic oligonucleotide
  Antisense strand to SEQ ID NO: 2235126
aucacucagcuagagguaa

SEQ ID NO: 2235128 - RNA, 19 nt, Artificial Sequence
  Description of Artificial Sequence: Synthetic oligonucleotide
  Sense strand starting at position 1701 of SEQ ID NO: 1884036
ugaucuagggccuaguuau

SEQ ID NO: 2235129 - RNA, 19 nt, Artificial Sequence
  Description of Artificial Sequence: Synthetic oligonucleotide
  Antisense strand to SEQ ID NO: 2235128
auaacuaggcccuagauca

SEQ ID NO: 2235130 - RNA, 19 nt, Artificial Sequence
  Description of Artificial Sequence: Synthetic oligonucleotide
  Sense strand starting at position 1778 of SEQ ID NO: 1884036
aguugcuguauggaugaaa

SEQ ID NO: 2235131 - RNA, 19 nt, Artificial Sequence
  Description of Artificial Sequence: Synthetic oligonucleotide
  Antisense strand to SEQ ID NO: 2235130
uuucauccauacagcaacu

SEQ ID NO: 2235132 - RNA, 19 nt, Artificial Sequence
  Description of Artificial Sequence: Synthetic oligonucleotide
  Sense strand starting at position 1834 of SEQ ID NO: 1884036
guaccuaguguggacuaua

SEQ ID NO: 2235133 - RNA, 19 nt, Artificial Sequence
  Description of Artificial Sequence: Synthetic oligonucleotide
  Antisense strand to SEQ ID NO: 2235132
uauaguccacacuagguac

SEQ ID NO: 2235134 - RNA, 19 nt, Artificial Sequence
  Description of Artificial Sequence: Synthetic oligonucleotide
  Sense strand starting at position 1837 of SEQ ID NO: 1884036
ccuaguguggacuauauaa

SEQ ID NO: 2235135 - RNA, 19 nt, Artificial Sequence
  Description of Artificial Sequence: Synthetic oligonucleotide
  Antisense strand to SEQ ID NO: 2235134
uuauauaguccacacuagg

SEQ ID NO: 2235136 - RNA, 19 nt, Artificial Sequence
  Description of Artificial Sequence: Synthetic oligonucleotide
  Sense strand starting at position 1922 of SEQ ID NO: 1884036
auggcauccucauuacuga

SEQ ID NO: 2235137 - RNA, 19 nt, Artificial Sequence
  Description of Artificial Sequence: Synthetic oligonucleotide
  Antisense strand to SEQ ID NO: 2235136
ucaguaaugaggaugccau

SEQ ID NO: 2235138 - RNA, 19 nt, Artificial Sequence
  Description of Artificial Sequence: Synthetic oligonucleotide
  Sense strand starting at position 1929 of SEQ ID NO: 1884036
ccucauuacugacucagga

SEQ ID NO: 2235139 - RNA, 19 nt, Artificial Sequence
  Description of Artificial Sequence: Synthetic oligonucleotide
  Antisense strand to SEQ ID NO: 2235138
uccugagucaguaaugagg

SEQ ID NO: 2235140 - RNA, 19 nt, Artificial Sequence
  Description of Artificial Sequence: Synthetic oligonucleotide
  Sense strand starting at position 1945 of SEQ ID NO: 1884036
ggaugaugugauggagcau

SEQ ID NO: 2235141 - RNA, 19 nt, Artificial Sequence
  Description of Artificial Sequence: Synthetic oligonucleotide
  Antisense strand to SEQ ID NO: 2235140
augcuccaucacaucaucc

SEQ ID NO: 2235142 - RNA, 19 nt, Artificial Sequence
  Description of Artificial Sequence: Synthetic oligonucleotide
  Sense strand starting at position 1957 of SEQ ID NO: 1884036
ggagcaugcacuuacaaga

SEQ ID NO: 2235143 - RNA, 19 nt, Artificial Sequence
  Description of Artificial Sequence: Synthetic oligonucleotide
  Antisense strand to SEQ ID NO: 2235142
ucuuguaagugcaugcucc

SEQ ID NO: 2235144 - RNA, 19 nt, Artificial Sequence
  Description of Artificial Sequence: Synthetic oligonucleotide
  Sense strand starting at position 2008 of SEQ ID NO: 1884036
ccauuuaugcacuguguga

SEQ ID NO: 2235145 - RNA, 19 nt, Artificial Sequence
  Description of Artificial Sequence: Synthetic oligonucleotide
  Antisense strand to SEQ ID NO: 2235144
ucacacagugcauaaaugg

SEQ ID NO: 2235146 - RNA, 19 nt, Artificial Sequence
  Description of Artificial Sequence: Synthetic oligonucleotide
  Sense strand starting at position 2069 of SEQ ID NO: 1884036
cuacuagaauuagcaguaa

SEQ ID NO: 2235147 - RNA, 19 nt, Artificial Sequence
  Description of Artificial Sequence: Synthetic oligonucleotide
  Antisense strand to SEQ ID NO: 2235146
uuacugcuaauucuaguag

SEQ ID NO: 2235148 - RNA, 19 nt, Artificial Sequence
  Description of Artificial Sequence: Synthetic oligonucleotide
  Sense strand starting at position 2137 of SEQ ID NO: 1884036
uuguaaaggcuguaauauu

SEQ ID NO: 2235149 - RNA, 19 nt, Artificial Sequence
  Description of Artificial Sequence: Synthetic oligonucleotide
  Antisense strand to SEQ ID NO: 2235148
aauauuacagccuuuacaa

SEQ ID NO: 2235150 - RNA, 19 nt, Artificial Sequence
  Description of Artificial Sequence: Synthetic oligonucleotide
  Sense strand starting at position 2145 of SEQ ID NO: 1884036
gcuguaauauuucuguuag

SEQ ID NO: 2235151 - RNA, 19 nt, Artificial Sequence
  Description of Artificial Sequence: Synthetic oligonucleotide
  Antisense strand to SEQ ID NO: 2235150
cuaacagaaauauuacagc

SEQ ID NO: 2235152 - RNA, 19 nt, Artificial Sequence
  Description of Artificial Sequence: Synthetic oligonucleotide
  Sense strand starting at position 2192 of SEQ ID NO: 1884036
uuaccucuggccugaaaga

SEQ ID NO: 2235153 - RNA, 19 nt, Artificial Sequence
  Description of Artificial Sequence: Synthetic oligonucleotide
  Antisense strand to SEQ ID NO: 2235152
ucuuucaggccagagguaa

SEQ ID NO: 2235154 - RNA, 19 nt, Artificial Sequence
  Description of Artificial Sequence: Synthetic oligonucleotide
  Sense strand starting at position 2356 of SEQ ID NO: 1884036
cguuaugcucuuucuuagu

SEQ ID NO: 2235155 - RNA, 19 nt, Artificial Sequence
  Description of Artificial Sequence: Synthetic oligonucleotide
  Antisense strand to SEQ ID NO: 2235154
acuaagaaagagcauaacg

SEQ ID NO: 2235156 - RNA, 19 nt, Artificial Sequence
  Description of Artificial Sequence: Synthetic oligonucleotide
  Sense strand starting at position 2376 of SEQ ID NO: 1884036
acaauaaugugucuuaaug

SEQ ID NO: 2235157 - RNA, 19 nt, Artificial Sequence
  Description of Artificial Sequence: Synthetic oligonucleotide
  Antisense strand to SEQ ID NO: 2235156
cauuaagacacauuauugu

SEQ ID NO: 2235158 - RNA, 19 nt, Artificial Sequence
  Description of Artificial Sequence: Synthetic oligonucleotide
  Sense strand starting at position 2674 of SEQ ID NO: 1884036
cuauguacaccuggguaaa

SEQ ID NO: 2235159 - RNA, 19 nt, Artificial Sequence
  Description of Artificial Sequence: Synthetic oligonucleotide
  Antisense strand to SEQ ID NO: 2235158
uuuacccagguguacauag

SEQ ID NO: 2235160 - RNA, 19 nt, Artificial Sequence
  Description of Artificial Sequence: Synthetic oligonucleotide
  Sense strand starting at position 2878 of SEQ ID NO: 1884036
gcacguguaguccuaucua

SEQ ID NO: 2235161 - RNA, 19 nt, Artificial Sequence
  Description of Artificial Sequence: Synthetic oligonucleotide
  Antisense strand to SEQ ID NO: 2235160
uagauaggacuacacgugc

SEQ ID NO: 2235162 - RNA, 19 nt, Artificial Sequence
  Description of Artificial Sequence: Synthetic oligonucleotide
  Sense strand starting at position 2922 of SEQ ID NO: 1884036
gcuugagcccaagaauaga

SEQ ID NO: 2235163 - RNA, 19 nt, Artificial Sequence
  Description of Artificial Sequence: Synthetic oligonucleotide
  Antisense strand to SEQ ID NO: 2235162
ucuauucuugggcucaagc

SEQ ID NO: 2235164 - RNA, 19 nt, Artificial Sequence
  Description of Artificial Sequence: Synthetic oligonucleotide
  Sense strand starting at position 2932 of SEQ ID NO: 1884036
aagaauagaggcuguagua

SEQ ID NO: 2235165 - RNA, 19 nt, Artificial Sequence
  Description of Artificial Sequence: Synthetic oligonucleotide
  Antisense strand to SEQ ID NO: 2235164
uacuacagccucuauucuu

SEQ ID NO: 2235166 - RNA, 19 nt, Artificial Sequence
  Description of Artificial Sequence: Synthetic oligonucleotide
  Sense strand starting at position 3150 of SEQ ID NO: 1884036
augaguugucggucugugu

SEQ ID NO: 2235167 - RNA, 19 nt, Artificial Sequence
  Description of Artificial Sequence: Synthetic oligonucleotide
  Antisense strand to SEQ ID NO: 2235166
acacagaccgacaacucau

SEQ ID NO: 2235168 - RNA, 19 nt, Artificial Sequence
  Description of Artificial Sequence: Synthetic oligonucleotide
  Sense strand starting at position 3151 of SEQ ID NO: 1884036
ugaguugucggucuguguu

SEQ ID NO: 2235169 - RNA, 19 nt, Artificial Sequence
  Description of Artificial Sequence: Synthetic oligonucleotide
  Antisense strand to SEQ ID NO: 2235168
aacacagaccgacaacuca

SEQ ID NO: 2235170 - RNA, 19 nt, Artificial Sequence
  Description of Artificial Sequence: Synthetic oligonucleotide
  Sense strand starting at position 3248 of SEQ ID NO: 1884036
gugagaaagccuugggaaa

SEQ ID NO: 2235171 - RNA, 19 nt, Artificial Sequence
  Description of Artificial Sequence: Synthetic oligonucleotide
  Antisense strand to SEQ ID NO: 2235170
uuucccaaggcuuucucac

SEQ ID NO: 2235172 - RNA, 19 nt, Artificial Sequence
  Description of Artificial Sequence: Synthetic oligonucleotide
  Sense strand starting at position 3358 of SEQ ID NO: 1884036
cccauuuguugugccucaa

SEQ ID NO: 2235173 - RNA, 19 nt, Artificial Sequence
  Description of Artificial Sequence: Synthetic oligonucleotide
  Antisense strand to SEQ ID NO: 2235172
uugaggcacaacaaauggg

SEQ ID NO: 2235174 - RNA, 19 nt, Artificial Sequence
  Description of Artificial Sequence: Synthetic oligonucleotide
  Sense strand starting at position 3566 of SEQ ID NO: 1884036
augauuugguaagagguaa

SEQ ID NO: 2235175 - RNA, 19 nt, Artificial Sequence
  Description of Artificial Sequence: Synthetic oligonucleotide
  Antisense strand to SEQ ID NO: 2235174
uuaccucuuaccaaaucau

SEQ ID NO: 2235176 - RNA, 19 nt, Artificial Sequence
  Description of Artificial Sequence: Synthetic oligonucleotide
  Sense strand starting at position 3578 of SEQ ID NO: 1884036
gagguaaugucuuugaucc

SEQ ID NO: 2235177 - RNA, 19 nt, Artificial Sequence
  Description of Artificial Sequence: Synthetic oligonucleotide
  Antisense strand to SEQ ID NO: 2235176
ggaucaaagacauuaccuc

SEQ ID NO: 2235178 - RNA, 19 nt, Artificial Sequence
  Description of Artificial Sequence: Synthetic oligonucleotide
  Sense strand starting at position 3681 of SEQ ID NO: 1884036
acggaauuguagcugaaga

SEQ ID NO: 2235179 - RNA, 19 nt, Artificial Sequence
  Description of Artificial Sequence: Synthetic oligonucleotide
  Antisense strand to SEQ ID NO: 2235178
ucuucagcuacaauuccgu

SEQ ID NO: 2235180 - RNA, 19 nt, Artificial Sequence
  Description of Artificial Sequence: Synthetic oligonucleotide
  Sense strand starting at position 3682 of SEQ ID NO: 1884036
cggaauuguagcugaagag

SEQ ID NO: 2235181 - RNA, 19 nt, Artificial Sequence
  Description of Artificial Sequence: Synthetic oligonucleotide
  Antisense strand to SEQ ID NO: 2235180
cucuucagcuacaauuccg

SEQ ID NO: 2235182 - RNA, 19 nt, Artificial Sequence
  Description of Artificial Sequence: Synthetic oligonucleotide
  Sense strand starting at position 3744 of SEQ ID NO: 1884036
gauggaccucaugguaaau

SEQ ID NO: 2235183 - RNA, 19 nt, Artificial Sequence
  Description of Artificial Sequence: Synthetic oligonucleotide
  Antisense strand to SEQ ID NO: 2235182
auuuaccaugagguccauc

SEQ ID NO: 2235184 - RNA, 19 nt, Artificial Sequence
  Description of Artificial Sequence: Synthetic oligonucleotide
  Sense strand starting at position 3805 of SEQ ID NO: 1884036
acggaugugaaauggauau

SEQ ID NO: 2235185 - RNA, 19 nt, Artificial Sequence
  Description of Artificial Sequence: Synthetic oligonucleotide
  Antisense strand to SEQ ID NO: 2235184
auauccauuucacauccgu

SEQ ID NO: 2235186 - RNA, 19 nt, Artificial Sequence
  Description of Artificial Sequence: Synthetic oligonucleotide
  Sense strand starting at position 3854 of SEQ ID NO: 1884036
ugaggcaaugguugauuga

SEQ ID NO: 2235187 - RNA, 19 nt, Artificial Sequence
  Description of Artificial Sequence: Synthetic oligonucleotide
  Antisense strand to SEQ ID NO: 2235186
ucaaucaaccauugccuca

SEQ ID NO: 2235188 - RNA, 19 nt, Artificial Sequence
  Description of Artificial Sequence: Synthetic oligonucleotide
  Sense strand starting at position 128 of SEQ ID NO: 1884035
uguguucucaucguuaagu

SEQ ID NO: 2235189 - RNA, 19 nt, Artificial Sequence
  Description of Artificial Sequence: Synthetic oligonucleotide
  Antisense strand to SEQ ID NO: 2235188
acuuaacgaugagaacaca

SEQ ID NO: 2235190 - RNA, 19 nt, Artificial Sequence
  Description of Artificial Sequence: Synthetic oligonucleotide
  Sense strand starting at position 258 of SEQ ID NO: 1884035
agguguguccacuauaaac

SEQ ID NO: 2235191 - RNA, 19 nt, Artificial Sequence
  Description of Artificial Sequence: Synthetic oligonucleotide
  Antisense strand to SEQ ID NO: 2235190
guuuauaguggacacaccu

SEQ ID NO: 2235192 - RNA, 19 nt, Artificial Sequence
  Description of Artificial Sequence: Synthetic oligonucleotide
  Sense strand starting at position 260 of SEQ ID NO: 1884035
guguguccacuauaaacua

SEQ ID NO: 2235193 - RNA, 19 nt, Artificial Sequence
  Description of Artificial Sequence: Synthetic oligonucleotide
  Antisense strand to SEQ ID NO: 2235192
uaguuuauaguggacacac

SEQ ID NO: 2235194 - RNA, 19 nt, Artificial Sequence
  Description of Artificial Sequence: Synthetic oligonucleotide
  Sense strand starting at position 404 of SEQ ID NO: 1884035
guagaugaacugugucuca

SEQ ID NO: 2235195 - RNA, 19 nt, Artificial Sequence
  Description of Artificial Sequence: Synthetic oligonucleotide
  Antisense strand to SEQ ID NO: 2235194
ugagacacaguucaucuac

SEQ ID NO: 2235196 - RNA, 19 nt, Artificial Sequence
  Description of Artificial Sequence: Synthetic oligonucleotide
  Sense strand starting at position 407 of SEQ ID NO: 1884035
gaugaacugugucucagag

SEQ ID NO: 2235197 - RNA, 19 nt, Artificial Sequence
  Description of Artificial Sequence: Synthetic oligonucleotide
  Antisense strand to SEQ ID NO: 2235196
cucugagacacaguucauc

SEQ ID NO: 2235198 - RNA, 19 nt, Artificial Sequence
  Description of Artificial Sequence: Synthetic oligonucleotide
  Sense strand starting at position 413 of SEQ ID NO: 1884035
cugugucucagagggauug

SEQ ID NO: 2235199 - RNA, 19 nt, Artificial Sequence
  Description of Artificial Sequence: Synthetic oligonucleotide
  Antisense strand to SEQ ID NO: 2235198
caaucccucugagacacag

SEQ ID NO: 2235200 - RNA, 19 nt, Artificial Sequence
  Description of Artificial Sequence: Synthetic oligonucleotide
  Sense strand starting at position 580 of SEQ ID NO: 1884035
uuggguaugcuuuacauac

SEQ ID NO: 2235201 - RNA, 19 nt, Artificial Sequence
  Description of Artificial Sequence: Synthetic oligonucleotide
  Antisense strand to SEQ ID NO: 2235200
guauguaaagcauacccaa

SEQ ID NO: 2235202 - RNA, 19 nt, Artificial Sequence
  Description of Artificial Sequence: Synthetic oligonucleotide
  Sense strand starting at position 856 of SEQ ID NO: 1884035
uagacugaguggucaugaa

SEQ ID NO: 2235203 - RNA, 19 nt, Artificial Sequence
  Description of Artificial Sequence: Synthetic oligonucleotide
  Antisense strand to SEQ ID NO: 2235202
uucaugaccacucagucua

SEQ ID NO: 2235204 - RNA, 19 nt, Artificial Sequence
  Description of Artificial Sequence: Synthetic oligonucleotide
  Sense strand starting at position 880 of SEQ ID NO: 1884035
acuguaaugauaggaagua

SEQ ID NO: 2235205 - RNA, 19 nt, Artificial Sequence
  Description of Artificial Sequence: Synthetic oligonucleotide
  Antisense strand to SEQ ID NO: 2235204
uacuuccuaucauuacagu

SEQ ID NO: 2235206 - RNA, 19 nt, Artificial Sequence
  Description of Artificial Sequence: Synthetic oligonucleotide
  Sense strand starting at position 1142 of SEQ ID NO: 1884035
gagaucaauuuguagguga

SEQ ID NO: 2235207 - RNA, 19 nt, Artificial Sequence
  Description of Artificial Sequence: Synthetic oligonucleotide
  Antisense strand to SEQ ID NO: 2235206
ucaccuacaaauugaucuc

SEQ ID NO: 2235208 - RNA, 19 nt, Artificial Sequence
  Description of Artificial Sequence: Synthetic oligonucleotide
  Sense strand starting at position 1189 of SEQ ID NO: 1884035
auacucuauuuagaaggua

SEQ ID NO: 2235209 - RNA, 19 nt, Artificial Sequence
  Description of Artificial Sequence: Synthetic oligonucleotide
  Antisense strand to SEQ ID NO: 2235208
uaccuucuaaauagaguau

SEQ ID NO: 2235210 - RNA, 19 nt, Artificial Sequence
  Description of Artificial Sequence: Synthetic oligonucleotide
  Sense strand starting at position 1197 of SEQ ID NO: 1884035
uuuagaagguauucuaguu

SEQ ID NO: 2235211 - RNA, 19 nt, Artificial Sequence
  Description of Artificial Sequence: Synthetic oligonucleotide
  Antisense strand to SEQ ID NO: 2235210
aacuagaauaccuucuaaa

SEQ ID NO: 2235212 - RNA, 19 nt, Artificial Sequence
  Description of Artificial Sequence: Synthetic oligonucleotide
  Sense strand starting at position 1611 of SEQ ID NO: 1884035
aaaccaaguuucgugauau

SEQ ID NO: 2235213 - RNA, 19 nt, Artificial Sequence
  Description of Artificial Sequence: Synthetic oligonucleotide
  Antisense strand to SEQ ID NO: 2235212
auaucacgaaacuugguuu

SEQ ID NO: 2235214 - RNA, 19 nt, Artificial Sequence
  Description of Artificial Sequence: Synthetic oligonucleotide
  Sense strand starting at position 1798 of SEQ ID NO: 1884035
aaaguagagcaguagaguu

SEQ ID NO: 2235215 - RNA, 19 nt, Artificial Sequence
  Description of Artificial Sequence: Synthetic oligonucleotide
  Antisense strand to SEQ ID NO: 2235214
aacucuacugcucuacuuu

SEQ ID NO: 2235216 - RNA, 19 nt, Artificial Sequence
  Description of Artificial Sequence: Synthetic oligonucleotide
  Sense strand starting at position 2147 of SEQ ID NO: 1884035
ugcugacaacccuauugaa

SEQ ID NO: 2235217 - RNA, 19 nt, Artificial Sequence
  Description of Artificial Sequence: Synthetic oligonucleotide
  Antisense strand to SEQ ID NO: 2235216
uucaauaggguugucagca

SEQ ID NO: 2235218 - RNA, 19 nt, Artificial Sequence
  Description of Artificial Sequence: Synthetic oligonucleotide
  Sense strand starting at position 2288 of SEQ ID NO: 1884035
cucauuagaguguaaguua

SEQ ID NO: 2235219 - RNA, 19 nt, Artificial Sequence
  Description of Artificial Sequence: Synthetic oligonucleotide
  Antisense strand to SEQ ID NO: 2235218
uaacuuacacucuaaugag

SEQ ID NO: 2235220 - RNA, 19 nt, Artificial Sequence
  Description of Artificial Sequence: Synthetic oligonucleotide
  Sense strand starting at position 2291 of SEQ ID NO: 1884035
auuagaguguaaguuacau

SEQ ID NO: 2235221 - RNA, 19 nt, Artificial Sequence
  Description of Artificial Sequence: Synthetic oligonucleotide
  Antisense strand to SEQ ID NO: 2235220
auguaacuuacacucuaau

SEQ ID NO: 2235222 - RNA, 19 nt, Artificial Sequence
  Description of Artificial Sequence: Synthetic oligonucleotide
  Sense strand starting at position 2358 of SEQ ID NO: 1884035
agaauagugcuaggaacau

SEQ ID NO: 2235223 - RNA, 19 nt, Artificial Sequence
  Description of Artificial Sequence: Synthetic oligonucleotide
  Antisense strand to SEQ ID NO: 2235222
auguuccuagcacuauucu

SEQ ID NO: 2235224 - RNA, 19 nt, Artificial Sequence
  Description of Artificial Sequence: Synthetic oligonucleotide
  Sense strand starting at position 2460 of SEQ ID NO: 1884035
gugcuuugagaugaucauu

SEQ ID NO: 2235225 - RNA, 19 nt, Artificial Sequence
  Description of Artificial Sequence: Synthetic oligonucleotide
  Antisense strand to SEQ ID NO: 2235224
aaugaucaucucaaagcac

SEQ ID NO: 2235226 - RNA, 19 nt, Artificial Sequence
  Description of Artificial Sequence: Synthetic oligonucleotide
  Sense strand starting at position 2465 of SEQ ID NO: 1884035
uugagaugaucauucugac

SEQ ID NO: 2235227 - RNA, 19 nt, Artificial Sequence
  Description of Artificial Sequence: Synthetic oligonucleotide
  Antisense strand to SEQ ID NO: 2235226
gucagaaugaucaucucaa

SEQ ID NO: 2235228 - RNA, 19 nt, Artificial Sequence
  Description of Artificial Sequence: Synthetic oligonucleotide
  Sense strand starting at position 2559 of SEQ ID NO: 1884035
agagcaguaguccaaguaa

SEQ ID NO: 2235229 - RNA, 19 nt, Artificial Sequence
  Description of Artificial Sequence: Synthetic oligonucleotide
  Antisense strand to SEQ ID NO: 2235228
uuacuuggacuacugcucu

SEQ ID NO: 2235230 - RNA, 19 nt, Artificial Sequence
  Description of Artificial Sequence: Synthetic oligonucleotide
  Sense strand starting at position 2570 of SEQ ID NO: 1884035
ccaaguaagagguaauggu

SEQ ID NO: 2235231 - RNA, 19 nt, Artificial Sequence
  Description of Artificial Sequence: Synthetic oligonucleotide
  Antisense strand to SEQ ID NO: 2235230
accauuaccucuuacuugg

SEQ ID NO: 2235232 - RNA, 19 nt, Artificial Sequence
  Description of Artificial Sequence: Synthetic oligonucleotide
  Sense strand starting at position 2622 of SEQ ID NO: 1884035
agaaguggauguguccaaa

SEQ ID NO: 2235233 - RNA, 19 nt, Artificial Sequence
  Description of Artificial Sequence: Synthetic oligonucleotide
  Antisense strand to SEQ ID NO: 2235232
uuuggacacauccacuucu

SEQ ID NO: 2235234 - RNA, 19 nt, Artificial Sequence
  Description of Artificial Sequence: Synthetic oligonucleotide
  Sense strand starting at position 2686 of SEQ ID NO: 1884035
gccagaauauaucugguua

SEQ ID NO: 2235235 - RNA, 19 nt, Artificial Sequence
  Description of Artificial Sequence: Synthetic oligonucleotide
  Antisense strand to SEQ ID NO: 2235234
uaaccagauauauucuggc

SEQ ID NO: 2235236 - RNA, 19 nt, Artificial Sequence
  Description of Artificial Sequence: Synthetic oligonucleotide
  Sense strand starting at position 2784 of SEQ ID NO: 1884035
cuaauaaacugguucuugu

SEQ ID NO: 2235237 - RNA, 19 nt, Artificial Sequence
  Description of Artificial Sequence: Synthetic oligonucleotide
  Antisense strand to SEQ ID NO: 2235236
acaagaaccaguuuauuag

SEQ ID NO: 2235238 - RNA, 19 nt, Artificial Sequence
  Description of Artificial Sequence: Synthetic oligonucleotide
  Sense strand starting at position 2795 of SEQ ID NO: 1884035
guucuuguuggagagaguu

SEQ ID NO: 2235239 - RNA, 19 nt, Artificial Sequence
  Description of Artificial Sequence: Synthetic oligonucleotide
  Antisense strand to SEQ ID NO: 2235238
aacucucuccaacaagaac

SEQ ID NO: 2235240 - RNA, 19 nt, Artificial Sequence
  Description of Artificial Sequence: Synthetic oligonucleotide
  Sense strand starting at position 2797 of SEQ ID NO: 1884035
ucuuguuggagagaguuua

SEQ ID NO: 2235241 - RNA, 19 nt, Artificial Sequence
  Description of Artificial Sequence: Synthetic oligonucleotide
  Antisense strand to SEQ ID NO: 2235240
uaaacucucuccaacaaga

SEQ ID NO: 2235242 - RNA, 19 nt, Artificial Sequence
  Description of Artificial Sequence: Synthetic oligonucleotide
  Sense strand starting at position 2805 of SEQ ID NO: 1884035
gagagaguuuaggcaauga

SEQ ID NO: 2235243 - RNA, 19 nt, Artificial Sequence
  Description of Artificial Sequence: Synthetic oligonucleotide
  Antisense strand to SEQ ID NO: 2235242
ucauugccuaaacucucuc

SEQ ID NO: 2235244 - RNA, 19 nt, Artificial Sequence
  Description of Artificial Sequence: Synthetic oligonucleotide
  Sense strand starting at position 2809 of SEQ ID NO: 1884035
gaguuuaggcaaugaucua

SEQ ID NO: 2235245 - RNA, 19 nt, Artificial Sequence
  Description of Artificial Sequence: Synthetic oligonucleotide
  Antisense strand to SEQ ID NO: 2235244
uagaucauugccuaaacuc

SEQ ID NO: 2235246 - RNA, 19 nt, Artificial Sequence
  Description of Artificial Sequence: Synthetic oligonucleotide
  Sense strand starting at position 2849 of SEQ ID NO: 1884035
cuugaauuaccugguaggu

SEQ ID NO: 2235247 - RNA, 19 nt, Artificial Sequence
  Description of Artificial Sequence: Synthetic oligonucleotide
  Antisense strand to SEQ ID NO: 2235246
accuaccagguaauucaag

SEQ ID NO: 2235248 - RNA, 19 nt, Artificial Sequence
  Description of Artificial Sequence: Synthetic oligonucleotide
  Sense strand starting at position 2864 of SEQ ID NO: 1884035
aggugaagguaucauuuac

SEQ ID NO: 2235249 - RNA, 19 nt, Artificial Sequence
  Description of Artificial Sequence: Synthetic oligonucleotide
  Antisense strand to SEQ ID NO: 2235248
guaaaugauaccuucaccu

SEQ ID NO: 2235250 - RNA, 19 nt, Artificial Sequence
  Description of Artificial Sequence: Synthetic oligonucleotide
  Sense strand starting at position 2871 of SEQ ID NO: 1884035
gguaucauuuacugagaga

SEQ ID NO: 2235251 - RNA, 19 nt, Artificial Sequence
  Description of Artificial Sequence: Synthetic oligonucleotide
  Antisense strand to SEQ ID NO: 2235250
ucucucaguaaaugauacc

SEQ ID NO: 2235252 - RNA, 19 nt, Artificial Sequence
  Description of Artificial Sequence: Synthetic oligonucleotide
  Sense strand starting at position 2963 of SEQ ID NO: 1884035
aaggcaaucgguuauauaa

SEQ ID NO: 2235253 - RNA, 19 nt, Artificial Sequence
  Description of Artificial Sequence: Synthetic oligonucleotide
  Antisense strand to SEQ ID NO: 2235252
uuauauaaccgauugccuu

SEQ ID NO: 2235254 - RNA, 19 nt, Artificial Sequence
  Description of Artificial Sequence: Synthetic oligonucleotide
  Sense strand starting at position 3021 of SEQ ID NO: 1884035
auuugaaagucauaaugug

SEQ ID NO: 2235255 - RNA, 19 nt, Artificial Sequence
  Description of Artificial Sequence: Synthetic oligonucleotide
  Antisense strand to SEQ ID NO: 2235254
cacauuaugacuuucaaau

SEQ ID NO: 2235256 - RNA, 19 nt, Artificial Sequence
  Description of Artificial Sequence: Synthetic oligonucleotide
  Sense strand starting at position 3027 of SEQ ID NO: 1884035
aagucauaauguguaaaug

SEQ ID NO: 2235257 - RNA, 19 nt, Artificial Sequence
  Description of Artificial Sequence: Synthetic oligonucleotide
  Antisense strand to SEQ ID NO: 2235256
cauuuacacauuaugacuu

SEQ ID NO: 2235258 - RNA, 19 nt, Artificial Sequence
  Description of Artificial Sequence: Synthetic oligonucleotide
  Sense strand starting at position 3413 of SEQ ID NO: 1884035
guuugcugacccuacuuua

SEQ ID NO: 2235259 - RNA, 19 nt, Artificial Sequence
  Description of Artificial Sequence: Synthetic oligonucleotide
  Antisense strand to SEQ ID NO: 2235258
uaaaguagggucagcaaac

SEQ ID NO: 2235260 - RNA, 19 nt, Artificial Sequence
  Description of Artificial Sequence: Synthetic oligonucleotide
  Sense strand starting at position 3446 of SEQ ID NO: 1884035
acacaaggucucugucacu

SEQ ID NO: 2235261 - RNA, 19 nt, Artificial Sequence
  Description of Artificial Sequence: Synthetic oligonucleotide
  Antisense strand to SEQ ID NO: 2235260
agugacagagaccuugugu

SEQ ID NO: 2235262 - RNA, 19 nt, Artificial Sequence
  Description of Artificial Sequence: Synthetic oligonucleotide
  Sense strand starting at position 3578 of SEQ ID NO: 1884035
augccugccuaauuaaaga

SEQ ID NO: 2235263 - RNA, 19 nt, Artificial Sequence
  Description of Artificial Sequence: Synthetic oligonucleotide
  Antisense strand to SEQ ID NO: 2235262
ucuuuaauuaggcaggcau

SEQ ID NO: 2235264 - RNA, 19 nt, Artificial Sequence
  Description of Artificial Sequence: Synthetic oligonucleotide
  Sense strand starting at position 3866 of SEQ ID NO: 1884035
aucucuguuguguacacaa

SEQ ID NO: 2235265 - RNA, 19 nt, Artificial Sequence
  Description of Artificial Sequence: Synthetic oligonucleotide
  Antisense strand to SEQ ID NO: 2235264
uuguguacacaacagagau

SEQ ID NO: 2235266 - RNA, 19 nt, Artificial Sequence
  Description of Artificial Sequence: Synthetic oligonucleotide
  Sense strand starting at position 3868 of SEQ ID NO: 1884035
cucuguuguguacacaaua

SEQ ID NO: 2235267 - RNA, 19 nt, Artificial Sequence
  Description of Artificial Sequence: Synthetic oligonucleotide
  Antisense strand to SEQ ID NO: 2235266
uauuguguacacaacagag

SEQ ID NO: 2235268 - RNA, 19 nt, Artificial Sequence
  Description of Artificial Sequence: Synthetic oligonucleotide
  Sense strand starting at position 120 of SEQ ID NO: 1884037
aguguuacauuguuacauu

SEQ ID NO: 2235269 - RNA, 19 nt, Artificial Sequence
  Description of Artificial Sequence: Synthetic oligonucleotide
  Antisense strand to SEQ ID NO: 2235268
aauguaacaauguaacacu

SEQ ID NO: 2235270 - RNA, 19 nt, Artificial Sequence
  Description of Artificial Sequence: Synthetic oligonucleotide
  Sense strand starting at position 143 of SEQ ID NO: 1884037
uuagaaagccacgauaacu

SEQ ID NO: 2235271 - RNA, 19 nt, Artificial Sequence
  Description of Artificial Sequence: Synthetic oligonucleotide
  Antisense strand to SEQ ID NO: 2235270
aguuaucguggcuuucuaa

SEQ ID NO: 2235272 - RNA, 19 nt, Artificial Sequence
  Description of Artificial Sequence: Synthetic oligonucleotide
  Sense strand starting at position 274 of SEQ ID NO: 1884037
uuauaugugcauuaagcaa

SEQ ID NO: 2235273 - RNA, 19 nt, Artificial Sequence
  Description of Artificial Sequence: Synthetic oligonucleotide
  Antisense strand to SEQ ID NO: 2235272
uugcuuaaugcacauauaa

SEQ ID NO: 2235274 - RNA, 19 nt, Artificial Sequence
  Description of Artificial Sequence: Synthetic oligonucleotide
  Sense strand starting at position 285 of SEQ ID NO: 1884037
uuaagcaaucuuuguguag

SEQ ID NO: 2235275 - RNA, 19 nt, Artificial Sequence
  Description of Artificial Sequence: Synthetic oligonucleotide
  Antisense strand to SEQ ID NO: 2235274
cuacacaaagauugcuuaa

SEQ ID NO: 2235276 - RNA, 19 nt, Artificial Sequence
  Description of Artificial Sequence: Synthetic oligonucleotide
  Sense strand starting at position 286 of SEQ ID NO: 1884037
uaagcaaucuuuguguaga

SEQ ID NO: 2235277 - RNA, 19 nt, Artificial Sequence
  Description of Artificial Sequence: Synthetic oligonucleotide
  Antisense strand to SEQ ID NO: 2235276
ucuacacaaagauugcuua

SEQ ID NO: 2235278 - RNA, 19 nt, Artificial Sequence
  Description of Artificial Sequence: Synthetic oligonucleotide
  Sense strand starting at position 288 of SEQ ID NO: 1884037
agcaaucuuuguguagaca

SEQ ID NO: 2235279 - RNA, 19 nt, Artificial Sequence
  Description of Artificial Sequence: Synthetic oligonucleotide
  Antisense strand to SEQ ID NO: 2235278
ugucuacacaaagauugcu

SEQ ID NO: 2235280 - RNA, 19 nt, Artificial Sequence
  Description of Artificial Sequence: Synthetic oligonucleotide
  Sense strand starting at position 289 of SEQ ID NO: 1884037
gcaaucuuuguguagacaa

SEQ ID NO: 2235281 - RNA, 19 nt, Artificial Sequence
  Description of Artificial Sequence: Synthetic oligonucleotide
  Antisense strand to SEQ ID NO: 2235280
uugucuacacaaagauugc

SEQ ID NO: 2235282 - RNA, 19 nt, Artificial Sequence
  Description of Artificial Sequence: Synthetic oligonucleotide
  Sense strand starting at position 416 of SEQ ID NO: 1884037
gguacagacguuuaggcau

SEQ ID NO: 2235283 - RNA, 19 nt, Artificial Sequence
  Description of Artificial Sequence: Synthetic oligonucleotide
  Antisense strand to SEQ ID NO: 2235282
augccuaaacgucuguacc

SEQ ID NO: 2235284 - RNA, 19 nt, Artificial Sequence
  Description of Artificial Sequence: Synthetic oligonucleotide
  Sense strand starting at position 424 of SEQ ID NO: 1884037
cguuuaggcaucuauacag

SEQ ID NO: 2235285 - RNA, 19 nt, Artificial Sequence
  Description of Artificial Sequence: Synthetic oligonucleotide
  Antisense strand to SEQ ID NO: 2235284
cuguauagaugccuaaacg

SEQ ID NO: 2235286 - RNA, 19 nt, Artificial Sequence
  Description of Artificial Sequence: Synthetic oligonucleotide
  Sense strand starting at position 545 of SEQ ID NO: 1884037
ggcagauacacucgauuaa

SEQ ID NO: 2235287 - RNA, 19 nt, Artificial Sequence
  Description of Artificial Sequence: Synthetic oligonucleotide
  Antisense strand to SEQ ID NO: 2235286
uuaaucgaguguaucugcc

SEQ ID NO: 2235288 - RNA, 19 nt, Artificial Sequence
  Description of Artificial Sequence: Synthetic oligonucleotide
  Sense strand starting at position 546 of SEQ ID NO: 1884037
gcagauacacucgauuaaa

SEQ ID NO: 2235289 - RNA, 19 nt, Artificial Sequence
  Description of Artificial Sequence: Synthetic oligonucleotide
  Antisense strand to SEQ ID NO: 2235288
uuuaaucgaguguaucugc

SEQ ID NO: 2235290 - RNA, 19 nt, Artificial Sequence
  Description of Artificial Sequence: Synthetic oligonucleotide
  Sense strand starting at position 606 of SEQ ID NO: 1884037
aucugacaguaauuagcua

SEQ ID NO: 2235291 - RNA, 19 nt, Artificial Sequence
  Description of Artificial Sequence: Synthetic oligonucleotide
  Antisense strand to SEQ ID NO: 2235290
uagcuaauuacugucagau

SEQ ID NO: 2235292 - RNA, 19 nt, Artificial Sequence
  Description of Artificial Sequence: Synthetic oligonucleotide
  Sense strand starting at position 644 of SEQ ID NO: 1884037
cuauuauuaguagagcaca

SEQ ID NO: 2235293 - RNA, 19 nt, Artificial Sequence
  Description of Artificial Sequence: Synthetic oligonucleotide
  Antisense strand to SEQ ID NO: 2235292
ugugcucuacuaauaauag

SEQ ID NO: 2235294 - RNA, 19 nt, Artificial Sequence
  Description of Artificial Sequence: Synthetic oligonucleotide
  Sense strand starting at position 655 of SEQ ID NO: 1884037
agagcacagcucgaggauu

SEQ ID NO: 2235295 - RNA, 19 nt, Artificial Sequence
  Description of Artificial Sequence: Synthetic oligonucleotide
  Antisense strand to SEQ ID NO: 2235294
aauccucgagcugugcucu

SEQ ID NO: 2235296 - RNA, 19 nt, Artificial Sequence
  Description of Artificial Sequence: Synthetic oligonucleotide
  Sense strand starting at position 717 of SEQ ID NO: 1884037
aggcgaugguaacuggaua

SEQ ID NO: 2235297 - RNA, 19 nt, Artificial Sequence
  Description of Artificial Sequence: Synthetic oligonucleotide
  Antisense strand to SEQ ID NO: 2235296
uauccaguuaccaucgccu

SEQ ID NO: 2235298 - RNA, 19 nt, Artificial Sequence
  Description of Artificial Sequence: Synthetic oligonucleotide
  Sense strand starting at position 869 of SEQ ID NO: 1884037
aggccaccuagaugagauu

SEQ ID NO: 2235299 - RNA, 19 nt, Artificial Sequence
  Description of Artificial Sequence: Synthetic oligonucleotide
  Antisense strand to SEQ ID NO: 2235298
aaucucaucuagguggccu

SEQ ID NO: 2235300 - RNA, 19 nt, Artificial Sequence
  Description of Artificial Sequence: Synthetic oligonucleotide
  Sense strand starting at position 1417 of SEQ ID NO: 1884037
cuggauuguugggcuagau

SEQ ID NO: 2235301 - RNA, 19 nt, Artificial Sequence
  Description of Artificial Sequence: Synthetic oligonucleotide
  Antisense strand to SEQ ID NO: 2235300
aucuagcccaacaauccag

SEQ ID NO: 2235302 - RNA, 19 nt, Artificial Sequence
  Description of Artificial Sequence: Synthetic oligonucleotide
  Sense strand starting at position 1427 of SEQ ID NO: 1884037
gggcuagauuuaugaaagg

SEQ ID NO: 2235303 - RNA, 19 nt, Artificial Sequence
  Description of Artificial Sequence: Synthetic oligonucleotide
  Antisense strand to SEQ ID NO: 2235302
ccuuucauaaaucuagccc

SEQ ID NO: 2235304 - RNA, 19 nt, Artificial Sequence
  Description of Artificial Sequence: Synthetic oligonucleotide
  Sense strand starting at position 2212 of SEQ ID NO: 1884037
gugucuuaugccgcucgga

SEQ ID NO: 2235305 - RNA, 19 nt, Artificial Sequence
  Description of Artificial Sequence: Synthetic oligonucleotide
  Antisense strand to SEQ ID NO: 2235304
uccgagcggcauaagacac

SEQ ID NO: 2235306 - RNA, 19 nt, Artificial Sequence
  Description of Artificial Sequence: Synthetic oligonucleotide
  Sense strand starting at position 2498 of SEQ ID NO: 1884037
gaguuuccagcucagaguu

SEQ ID NO: 2235307 - RNA, 19 nt, Artificial Sequence
  Description of Artificial Sequence: Synthetic oligonucleotide
  Antisense strand to SEQ ID NO: 2235306
aacucugagcuggaaacuc

SEQ ID NO: 2235308 - RNA, 19 nt, Artificial Sequence
  Description of Artificial Sequence: Synthetic oligonucleotide
  Sense strand starting at position 2506 of SEQ ID NO: 1884037
agcucagaguuuccagaau

SEQ ID NO: 2235309 - RNA, 19 nt, Artificial Sequence
  Description of Artificial Sequence: Synthetic oligonucleotide
  Antisense strand to SEQ ID NO: 2235308
auucuggaaacucugagcu

SEQ ID NO: 2235310 - RNA, 19 nt, Artificial Sequence
  Description of Artificial Sequence: Synthetic oligonucleotide
  Sense strand starting at position 2585 of SEQ ID NO: 1884037
ggcguguagguagagaaau

SEQ ID NO: 2235311 - RNA, 19 nt, Artificial Sequence
  Description of Artificial Sequence: Synthetic oligonucleotide
  Antisense strand to SEQ ID NO: 2235310
auuucucuaccuacacgcc

SEQ ID NO: 2235312 - RNA, 19 nt, Artificial Sequence
  Description of Artificial Sequence: Synthetic oligonucleotide
  Sense strand starting at position 2701 of SEQ ID NO: 1884037
gacagauccugcucucagu

SEQ ID NO: 2235313 - RNA, 19 nt, Artificial Sequence
  Description of Artificial Sequence: Synthetic oligonucleotide
  Antisense strand to SEQ ID NO: 2235312
acugagagcaggaucuguc

SEQ ID NO: 2235314 - RNA, 19 nt, Artificial Sequence
  Description of Artificial Sequence: Synthetic oligonucleotide
  Sense strand starting at position 2825 of SEQ ID NO: 1884037
gaggccgugcacuaagauu

SEQ ID NO: 2235315 - RNA, 19 nt, Artificial Sequence
  Description of Artificial Sequence: Synthetic oligonucleotide
  Antisense strand to SEQ ID NO: 2235314
aaucuuagugcacggccuc

SEQ ID NO: 2235316 - RNA, 19 nt, Artificial Sequence
  Description of Artificial Sequence: Synthetic oligonucleotide
  Sense strand starting at position 2887 of SEQ ID NO: 1884037
gguauuacugccuucguuu

SEQ ID NO: 2235317 - RNA, 19 nt, Artificial Sequence
  Description of Artificial Sequence: Synthetic oligonucleotide
  Antisense strand to SEQ ID NO: 2235316
aaacgaaggcaguaauacc

SEQ ID NO: 2235318 - RNA, 19 nt, Artificial Sequence
  Description of Artificial Sequence: Synthetic oligonucleotide
  Sense strand starting at position 2964 of SEQ ID NO: 1884037
agagcugucgaauaccaaa

SEQ ID NO: 2235319 - RNA, 19 nt, Artificial Sequence
  Description of Artificial Sequence: Synthetic oligonucleotide
  Antisense strand to SEQ ID NO: 2235318
uuugguauucgacagcucu

SEQ ID NO: 2235320 - RNA, 19 nt, Artificial Sequence
  Description of Artificial Sequence: Synthetic oligonucleotide
  Sense strand starting at position 2977 of SEQ ID NO: 1884037
accaaaguuuagucauaac

SEQ ID NO: 2235321 - RNA, 19 nt, Artificial Sequence
  Description of Artificial Sequence: Synthetic oligonucleotide
  Antisense strand to SEQ ID NO: 2235320
guuaugacuaaacuuuggu

SEQ ID NO: 2235322 - RNA, 19 nt, Artificial Sequence
  Description of Artificial Sequence: Synthetic oligonucleotide
  Sense strand starting at position 3024 of SEQ ID NO: 1884037
gcggcugcugccagggaua

SEQ ID NO: 2235323 - RNA, 19 nt, Artificial Sequence
  Description of Artificial Sequence: Synthetic oligonucleotide
  Antisense strand to SEQ ID NO: 2235322
uaucccuggcagcagccgc

SEQ ID NO: 2235324 - RNA, 19 nt, Artificial Sequence
  Description of Artificial Sequence: Synthetic oligonucleotide
  Sense strand starting at position 3027 of SEQ ID NO: 1884037
gcugcugccagggauacaa

SEQ ID NO: 2235325 - RNA, 19 nt, Artificial Sequence
  Description of Artificial Sequence: Synthetic oligonucleotide
  Antisense strand to SEQ ID NO: 2235324
uuguaucccuggcagcagc

SEQ ID NO: 2235326 - RNA, 19 nt, Artificial Sequence
  Description of Artificial Sequence: Synthetic oligonucleotide
  Sense strand starting at position 3136 of SEQ ID NO: 1884037
ggaagugauaagugacaug

SEQ ID NO: 2235327 - RNA, 19 nt, Artificial Sequence
  Description of Artificial Sequence: Synthetic oligonucleotide
  Antisense strand to SEQ ID NO: 2235326
caugucacuuaucacuucc

SEQ ID NO: 2235328 - RNA, 19 nt, Artificial Sequence
  Description of Artificial Sequence: Synthetic oligonucleotide
  Sense strand starting at position 3141 of SEQ ID NO: 1884037
ugauaagugacaugcaugu

SEQ ID NO: 2235329 - RNA, 19 nt, Artificial Sequence
  Description of Artificial Sequence: Synthetic oligonucleotide
  Antisense strand to SEQ ID NO: 2235328
acaugcaugucacuuauca

SEQ ID NO: 2235330 - RNA, 19 nt, Artificial Sequence
  Description of Artificial Sequence: Synthetic oligonucleotide
  Sense strand starting at position 3145 of SEQ ID NO: 1884037
aagugacaugcauguccuu

SEQ ID NO: 2235331 - RNA, 19 nt, Artificial Sequence
  Description of Artificial Sequence: Synthetic oligonucleotide
  Antisense strand to SEQ ID NO: 2235330
aaggacaugcaugucacuu

SEQ ID NO: 2235332 - RNA, 19 nt, Artificial Sequence
  Description of Artificial Sequence: Synthetic oligonucleotide
  Sense strand starting at position 3180 of SEQ ID NO: 1884037
agguucagagccugaaaga

SEQ ID NO: 2235333 - RNA, 19 nt, Artificial Sequence
  Description of Artificial Sequence: Synthetic oligonucleotide
  Antisense strand to SEQ ID NO: 2235332
ucuuucaggcucugaaccu

SEQ ID NO: 2235334 - RNA, 19 nt, Artificial Sequence
  Description of Artificial Sequence: Synthetic oligonucleotide
  Sense strand starting at position 3200 of SEQ ID NO: 1884037
gggacuuccggcuagacga

SEQ ID NO: 2235335 - RNA, 19 nt, Artificial Sequence
  Description of Artificial Sequence: Synthetic oligonucleotide
  Antisense strand to SEQ ID NO: 2235334
ucgucuagccggaaguccc

SEQ ID NO: 2235336 - RNA, 19 nt, Artificial Sequence
  Description of Artificial Sequence: Synthetic oligonucleotide
  Sense strand starting at position 3223 of SEQ ID NO: 1884037
ggagcucuuccuuggagaa

SEQ ID NO: 2235337 - RNA, 19 nt, Artificial Sequence
  Description of Artificial Sequence: Synthetic oligonucleotide
  Antisense strand to SEQ ID NO: 2235336
uucuccaaggaagagcucc

SEQ ID NO: 2235338 - RNA, 19 nt, Artificial Sequence
  Description of Artificial Sequence: Synthetic oligonucleotide
  Sense strand starting at position 3224 of SEQ ID NO: 1884037
gagcucuuccuuggagaac

SEQ ID NO: 2235339 - RNA, 19 nt, Artificial Sequence
  Description of Artificial Sequence: Synthetic oligonucleotide
  Antisense strand to SEQ ID NO: 2235338
guucuccaaggaagagcuc

SEQ ID NO: 2235340 - RNA, 19 nt, Artificial Sequence
  Description of Artificial Sequence: Synthetic oligonucleotide
  Sense strand starting at position 3265 of SEQ ID NO: 1884037
gugucagaaacauguucca

SEQ ID NO: 2235341 - RNA, 19 nt, Artificial Sequence
  Description of Artificial Sequence: Synthetic oligonucleotide
  Antisense strand to SEQ ID NO: 2235340
uggaacauguuucugacac

SEQ ID NO: 2235342 - RNA, 19 nt, Artificial Sequence
  Description of Artificial Sequence: Synthetic oligonucleotide
  Sense strand starting at position 3462 of SEQ ID NO: 1884037
guugguucguggacagcaa

SEQ ID NO: 2235343 - RNA, 19 nt, Artificial Sequence
  Description of Artificial Sequence: Synthetic oligonucleotide
  Antisense strand to SEQ ID NO: 2235342
uugcuguccacgaaccaac

SEQ ID NO: 2235344 - RNA, 19 nt, Artificial Sequence
  Description of Artificial Sequence: Synthetic oligonucleotide
  Sense strand starting at position 3587 of SEQ ID NO: 1884037
cuauacuaguccuugucua

SEQ ID NO: 2235345 - RNA, 19 nt, Artificial Sequence
  Description of Artificial Sequence: Synthetic oligonucleotide
  Antisense strand to SEQ ID NO: 2235344
uagacaaggacuaguauag

SEQ ID NO: 2235346 - RNA, 19 nt, Artificial Sequence
  Description of Artificial Sequence: Synthetic oligonucleotide
  Sense strand starting at position 3717 of SEQ ID NO: 1884037
cgcaaaucucccggacaga

SEQ ID NO: 2235347 - RNA, 19 nt, Artificial Sequence
  Description of Artificial Sequence: Synthetic oligonucleotide
  Antisense strand to SEQ ID NO: 2235346
ucuguccgggagauuugcg

SEQ ID NO: 2235348 - RNA, 19 nt, Artificial Sequence
  Description of Artificial Sequence: Synthetic oligonucleotide
  Sense strand starting at position 97 of SEQ ID NO: 1884038
agguuuaucuucucuguag

SEQ ID NO: 2235349 - RNA, 19 nt, Artificial Sequence
  Description of Artificial Sequence: Synthetic oligonucleotide
  Antisense strand to SEQ ID NO: 2235348
cuacagagaagauaaaccu

SEQ ID NO: 2235350 - RNA, 19 nt, Artificial Sequence
  Description of Artificial Sequence: Synthetic oligonucleotide
  Sense strand starting at position 100 of SEQ ID NO: 1884038
uuuaucuucucuguagcua

SEQ ID NO: 2235351 - RNA, 19 nt, Artificial Sequence
  Description of Artificial Sequence: Synthetic oligonucleotide
  Antisense strand to SEQ ID NO: 2235350
uagcuacagagaagauaaa

SEQ ID NO: 2235352 - RNA, 19 nt, Artificial Sequence
  Description of Artificial Sequence: Synthetic oligonucleotide
  Sense strand starting at position 142 of SEQ ID NO: 1884038
aaugaauugcuguguguca

SEQ ID NO: 2235353 - RNA, 19 nt, Artificial Sequence
  Description of Artificial Sequence: Synthetic oligonucleotide
  Antisense strand to SEQ ID NO: 2235352
ugacacacagcaauucauu

SEQ ID NO: 2235354 - RNA, 19 nt, Artificial Sequence
  Description of Artificial Sequence: Synthetic oligonucleotide
  Sense strand starting at position 144 of SEQ ID NO: 1884038
ugaauugcugugugucagu

SEQ ID NO: 2235355 - RNA, 19 nt, Artificial Sequence
  Description of Artificial Sequence: Synthetic oligonucleotide
  Antisense strand to SEQ ID NO: 2235354
acugacacacagcaauuca

SEQ ID NO: 2235356 - RNA, 19 nt, Artificial Sequence
  Description of Artificial Sequence: Synthetic oligonucleotide
  Sense strand starting at position 155 of SEQ ID NO: 1884038
gugucaguucuguguuaug

SEQ ID NO: 2235357 - RNA, 19 nt, Artificial Sequence
  Description of Artificial Sequence: Synthetic oligonucleotide
  Antisense strand to SEQ ID NO: 2235356
cauaacacagaacugacac

SEQ ID NO: 2235358 - RNA, 19 nt, Artificial Sequence
  Description of Artificial Sequence: Synthetic oligonucleotide
  Sense strand starting at position 166 of SEQ ID NO: 1884038
guguuaugggcugggagga

SEQ ID NO: 2235359 - RNA, 19 nt, Artificial Sequence
  Description of Artificial Sequence: Synthetic oligonucleotide
  Antisense strand to SEQ ID NO: 2235358
uccucccagcccauaacac

SEQ ID NO: 2235360 - RNA, 19 nt, Artificial Sequence
  Description of Artificial Sequence: Synthetic oligonucleotide
  Sense strand starting at position 853 of SEQ ID NO: 1884038
agagucagggucuagucua

SEQ ID NO: 2235361 - RNA, 19 nt, Artificial Sequence
  Description of Artificial Sequence: Synthetic oligonucleotide
  Antisense strand to SEQ ID NO: 2235360
uagacuagacccugacucu

SEQ ID NO: 2235362 - RNA, 19 nt, Artificial Sequence
  Description of Artificial Sequence: Synthetic oligonucleotide
  Sense strand starting at position 877 of SEQ ID NO: 1884038
ggagacagucauggagcaa

SEQ ID NO: 2235363 - RNA, 19 nt, Artificial Sequence
  Description of Artificial Sequence: Synthetic oligonucleotide
  Antisense strand to SEQ ID NO: 2235362
uugcuccaugacugucucc

SEQ ID NO: 2235364 - RNA, 19 nt, Artificial Sequence
  Description of Artificial Sequence: Synthetic oligonucleotide
  Sense strand starting at position 892 of SEQ ID NO: 1884038
gcaaauauuuccuaaguga

SEQ ID NO: 2235365 - RNA, 19 nt, Artificial Sequence
  Description of Artificial Sequence: Synthetic oligonucleotide
  Antisense strand to SEQ ID NO: 2235364
ucacuuaggaaauauuugc

SEQ ID NO: 2235366 - RNA, 19 nt, Artificial Sequence
  Description of Artificial Sequence: Synthetic oligonucleotide
  Sense strand starting at position 912 of SEQ ID NO: 1884038
ggguguucugcccagggua

SEQ ID NO: 2235367 - RNA, 19 nt, Artificial Sequence
  Description of Artificial Sequence: Synthetic oligonucleotide
  Antisense strand to SEQ ID NO: 2235366
uacccugggcagaacaccc

SEQ ID NO: 2235368 - RNA, 19 nt, Artificial Sequence
  Description of Artificial Sequence: Synthetic oligonucleotide
  Sense strand starting at position 914 of SEQ ID NO: 1884038
guguucugcccaggguauu

SEQ ID NO: 2235369 - RNA, 19 nt, Artificial Sequence
  Description of Artificial Sequence: Synthetic oligonucleotide
  Antisense strand to SEQ ID NO: 2235368
aauacccugggcagaacac

SEQ ID NO: 2235370 - RNA, 19 nt, Artificial Sequence
  Description of Artificial Sequence: Synthetic oligonucleotide
  Sense strand starting at position 960 of SEQ ID NO: 1884038
cagacuuaucuagacguca

SEQ ID NO: 2235371 - RNA, 19 nt, Artificial Sequence
  Description of Artificial Sequence: Synthetic oligonucleotide
  Antisense strand to SEQ ID NO: 2235370
ugacgucuagauaagucug

SEQ ID NO: 2235372 - RNA, 19 nt, Artificial Sequence
  Description of Artificial Sequence: Synthetic oligonucleotide
  Sense strand starting at position 1040 of SEQ ID NO: 1884038
uuacuuaagcuauaaggca

SEQ ID NO: 2235373 - RNA, 19 nt, Artificial Sequence
  Description of Artificial Sequence: Synthetic oligonucleotide
  Antisense strand to SEQ ID NO: 2235372
ugccuuauagcuuaaguaa

SEQ ID NO: 2235374 - RNA, 19 nt, Artificial Sequence
  Description of Artificial Sequence: Synthetic oligonucleotide
  Sense strand starting at position 1099 of SEQ ID NO: 1884038
gguagaaguucuuucuguc

SEQ ID NO: 2235375 - RNA, 19 nt, Artificial Sequence
  Description of Artificial Sequence: Synthetic oligonucleotide
  Antisense strand to SEQ ID NO: 2235374
gacagaaagaacuucuacc

SEQ ID NO: 2235376 - RNA, 19 nt, Artificial Sequence
  Description of Artificial Sequence: Synthetic oligonucleotide
  Sense strand starting at position 1111 of SEQ ID NO: 1884038
uucugucucccauaauggu

SEQ ID NO: 2235377 - RNA, 19 nt, Artificial Sequence
  Description of Artificial Sequence: Synthetic oligonucleotide
  Antisense strand to SEQ ID NO: 2235376
accauuaugggagacagaa

SEQ ID NO: 2235378 - RNA, 19 nt, Artificial Sequence
  Description of Artificial Sequence: Synthetic oligonucleotide
  Sense strand starting at position 1326 of SEQ ID NO: 1884038
guagaaccacugcaaauau

SEQ ID NO: 2235379 - RNA, 19 nt, Artificial Sequence
  Description of Artificial Sequence: Synthetic oligonucleotide
  Antisense strand to SEQ ID NO: 2235378
auauuugcagugguucuac

SEQ ID NO: 2235380 - RNA, 19 nt, Artificial Sequence
  Description of Artificial Sequence: Synthetic oligonucleotide
  Sense strand starting at position 1336 of SEQ ID NO: 1884038
ugcaaauaucauggaauga

SEQ ID NO: 2235381 - RNA, 19 nt, Artificial Sequence
  Description of Artificial Sequence: Synthetic oligonucleotide
  Antisense strand to SEQ ID NO: 2235380
ucauuccaugauauuugca

SEQ ID NO: 2235382 - RNA, 19 nt, Artificial Sequence
  Description of Artificial Sequence: Synthetic oligonucleotide
  Sense strand starting at position 1356 of SEQ ID NO: 1884038
ugauuauuauaggaaugag

SEQ ID NO: 2235383 - RNA, 19 nt, Artificial Sequence
  Description of Artificial Sequence: Synthetic oligonucleotide
  Antisense strand to SEQ ID NO: 2235382
cucauuccuauaauaauca

SEQ ID NO: 2235384 - RNA, 19 nt, Artificial Sequence
  Description of Artificial Sequence: Synthetic oligonucleotide
  Sense strand starting at position 1380 of SEQ ID NO: 1884038
acacaauuguuggaggaga

SEQ ID NO: 2235385 - RNA, 19 nt, Artificial Sequence
  Description of Artificial Sequence: Synthetic oligonucleotide
  Antisense strand to SEQ ID NO: 2235384
ucuccuccaacaauugugu

SEQ ID NO: 2235386 - RNA, 19 nt, Artificial Sequence
  Description of Artificial Sequence: Synthetic oligonucleotide
  Sense strand starting at position 1518 of SEQ ID NO: 1884038
agauaaguuuaucuugcuu

SEQ ID NO: 2235387 - RNA, 19 nt, Artificial Sequence
  Description of Artificial Sequence: Synthetic oligonucleotide
  Antisense strand to SEQ ID NO: 2235386
aagcaagauaaacuuaucu

SEQ ID NO: 2235388 - RNA, 19 nt, Artificial Sequence
  Description of Artificial Sequence: Synthetic oligonucleotide
  Sense strand starting at position 1580 of SEQ ID NO: 1884038
agaagauuguugcuucuuc

SEQ ID NO: 2235389 - RNA, 19 nt, Artificial Sequence
  Description of Artificial Sequence: Synthetic oligonucleotide
  Antisense strand to SEQ ID NO: 2235388
gaagaagcaacaaucuucu

SEQ ID NO: 2235390 - RNA, 19 nt, Artificial Sequence
  Description of Artificial Sequence: Synthetic oligonucleotide
  Sense strand starting at position 1602 of SEQ ID NO: 1884038
gauucuacuucugugaguu

SEQ ID NO: 2235391 - RNA, 19 nt, Artificial Sequence
  Description of Artificial Sequence: Synthetic oligonucleotide
  Antisense strand to SEQ ID NO: 2235390
aacucacagaaguagaauc

SEQ ID NO: 2235392 - RNA, 19 nt, Artificial Sequence
  Description of Artificial Sequence: Synthetic oligonucleotide
  Sense strand starting at position 1603 of SEQ ID NO: 1884038
auucuacuucugugaguuc

SEQ ID NO: 2235393 - RNA, 19 nt, Artificial Sequence
  Description of Artificial Sequence: Synthetic oligonucleotide
  Antisense strand to SEQ ID NO: 2235392
gaacucacagaaguagaau

SEQ ID NO: 2235394 - RNA, 19 nt, Artificial Sequence
  Description of Artificial Sequence: Synthetic oligonucleotide
  Sense strand starting at position 1606 of SEQ ID NO: 1884038
cuacuucugugaguucuca

SEQ ID NO: 2235395 - RNA, 19 nt, Artificial Sequence
  Description of Artificial Sequence: Synthetic oligonucleotide
  Antisense strand to SEQ ID NO: 2235394
ugagaacucacagaaguag

SEQ ID NO: 2235396 - RNA, 19 nt, Artificial Sequence
  Description of Artificial Sequence: Synthetic oligonucleotide
  Sense strand starting at position 2302 of SEQ ID NO: 1884038
uccacuuugugccuacaua

SEQ ID NO: 2235397 - RNA, 19 nt, Artificial Sequence
  Description of Artificial Sequence: Synthetic oligonucleotide
  Antisense strand to SEQ ID NO: 2235396
uauguaggcacaaagugga

SEQ ID NO: 2235398 - RNA, 19 nt, Artificial Sequence
  Description of Artificial Sequence: Synthetic oligonucleotide
  Sense strand starting at position 2326 of SEQ ID NO: 1884038
ggagucagccuugggaagu

SEQ ID NO: 2235399 - RNA, 19 nt, Artificial Sequence
  Description of Artificial Sequence: Synthetic oligonucleotide
  Antisense strand to SEQ ID NO: 2235398
acuucccaaggcugacucc

SEQ ID NO: 2235400 - RNA, 19 nt, Artificial Sequence
  Description of Artificial Sequence: Synthetic oligonucleotide
  Sense strand starting at position 2332 of SEQ ID NO: 1884038
agccuugggaagugguauu

SEQ ID NO: 2235401 - RNA, 19 nt, Artificial Sequence
  Description of Artificial Sequence: Synthetic oligonucleotide
  Antisense strand to SEQ ID NO: 2235400
aauaccacuucccaaggcu

SEQ ID NO: 2235402 - RNA, 19 nt, Artificial Sequence
  Description of Artificial Sequence: Synthetic oligonucleotide
  Sense strand starting at position 2525 of SEQ ID NO: 1884038
agaguaauaugagcucaga

SEQ ID NO: 2235403 - RNA, 19 nt, Artificial Sequence
  Description of Artificial Sequence: Synthetic oligonucleotide
  Antisense strand to SEQ ID NO: 2235402
ucugagcucauauuacucu

SEQ ID NO: 2235404 - RNA, 19 nt, Artificial Sequence
  Description of Artificial Sequence: Synthetic oligonucleotide
  Sense strand starting at position 2620 of SEQ ID NO: 1884038
gcggaauuaauggaccagu

SEQ ID NO: 2235405 - RNA, 19 nt, Artificial Sequence
  Description of Artificial Sequence: Synthetic oligonucleotide
  Antisense strand to SEQ ID NO: 2235404
acugguccauuaauuccgc

SEQ ID NO: 2235406 - RNA, 19 nt, Artificial Sequence
  Description of Artificial Sequence: Synthetic oligonucleotide
  Sense strand starting at position 3009 of SEQ ID NO: 1884038
aauggagaauguuacacau

SEQ ID NO: 2235407 - RNA, 19 nt, Artificial Sequence
  Description of Artificial Sequence: Synthetic oligonucleotide
  Antisense strand to SEQ ID NO: 2235406
auguguaacauucuccauu

SEQ ID NO: 2235408 - RNA, 19 nt, Artificial Sequence
  Description of Artificial Sequence: Synthetic oligonucleotide
  Sense strand starting at position 3011 of SEQ ID NO: 1884038
uggagaauguuacacauuu

SEQ ID NO: 2235409 - RNA, 19 nt, Artificial Sequence
  Description of Artificial Sequence: Synthetic oligonucleotide
  Antisense strand to SEQ ID NO: 2235408
aaauguguaacauucucca

SEQ ID NO: 2235410 - RNA, 19 nt, Artificial Sequence
  Description of Artificial Sequence: Synthetic oligonucleotide
  Sense strand starting at position 3064 of SEQ ID NO: 1884038
aaggguuucucucugucau

SEQ ID NO: 2235411 - RNA, 19 nt, Artificial Sequence
  Description of Artificial Sequence: Synthetic oligonucleotide
  Antisense strand to SEQ ID NO: 2235410
augacagagagaaacccuu

SEQ ID NO: 2235412 - RNA, 19 nt, Artificial Sequence
  Description of Artificial Sequence: Synthetic oligonucleotide
  Sense strand starting at position 3065 of SEQ ID NO: 1884038
aggguuucucucugucaua

SEQ ID NO: 2235413 - RNA, 19 nt, Artificial Sequence
  Description of Artificial Sequence: Synthetic oligonucleotide
  Antisense strand to SEQ ID NO: 2235412
uaugacagagagaaacccu

SEQ ID NO: 2235414 - RNA, 19 nt, Artificial Sequence
  Description of Artificial Sequence: Synthetic oligonucleotide
  Sense strand starting at position 3066 of SEQ ID NO: 1884038
ggguuucucucugucauac

SEQ ID NO: 2235415 - RNA, 19 nt, Artificial Sequence
  Description of Artificial Sequence: Synthetic oligonucleotide
  Antisense strand to SEQ ID NO: 2235414
guaugacagagagaaaccc

SEQ ID NO: 2235416 - RNA, 19 nt, Artificial Sequence
  Description of Artificial Sequence: Synthetic oligonucleotide
  Sense strand starting at position 3076 of SEQ ID NO: 1884038
cugucauacaggcaggaau

SEQ ID NO: 2235417 - RNA, 19 nt, Artificial Sequence
  Description of Artificial Sequence: Synthetic oligonucleotide
  Antisense strand to SEQ ID NO: 2235416
auuccugccuguaugacag

SEQ ID NO: 2235418 - RNA, 19 nt, Artificial Sequence
  Description of Artificial Sequence: Synthetic oligonucleotide
  Sense strand starting at position 3297 of SEQ ID NO: 1884038
caaguugaauagugaaaua

SEQ ID NO: 2235419 - RNA, 19 nt, Artificial Sequence
  Description of Artificial Sequence: Synthetic oligonucleotide
  Antisense strand to SEQ ID NO: 2235418
uauuucacuauucaacuug

SEQ ID NO: 2235420 - RNA, 19 nt, Artificial Sequence
  Description of Artificial Sequence: Synthetic oligonucleotide
  Sense strand starting at position 3368 of SEQ ID NO: 1884038
cccagaaauuaucaggaag

SEQ ID NO: 2235421 - RNA, 19 nt, Artificial Sequence
  Description of Artificial Sequence: Synthetic oligonucleotide
  Antisense strand to SEQ ID NO: 2235420
cuuccugauaauuucuggg

SEQ ID NO: 2235422 - RNA, 19 nt, Artificial Sequence
  Description of Artificial Sequence: Synthetic oligonucleotide
  Sense strand starting at position 3370 of SEQ ID NO: 1884038
cagaaauuaucaggaagag

SEQ ID NO: 2235423 - RNA, 19 nt, Artificial Sequence
  Description of Artificial Sequence: Synthetic oligonucleotide
  Antisense strand to SEQ ID NO: 2235422
cucuuccugauaauuucug

SEQ ID NO: 2235424 - RNA, 19 nt, Artificial Sequence
  Description of Artificial Sequence: Synthetic oligonucleotide
  Sense strand starting at position 3752 of SEQ ID NO: 1884038
auagcaaugccugauacaa

SEQ ID NO: 2235425 - RNA, 19 nt, Artificial Sequence
  Description of Artificial Sequence: Synthetic oligonucleotide
  Antisense strand to SEQ ID NO: 2235424
uuguaucaggcauugcuau

SEQ ID NO: 2235426 - RNA, 19 nt, Artificial Sequence
  Description of Artificial Sequence: Synthetic oligonucleotide
  Sense strand starting at position 3754 of SEQ ID NO: 1884038
agcaaugccugauacaaga

SEQ ID NO: 2235427 - RNA, 19 nt, Artificial Sequence
  Description of Artificial Sequence: Synthetic oligonucleotide
  Antisense strand to SEQ ID NO: 2235426
ucuuguaucaggcauugcu

SEQ ID NO: 2235428 - RNA, 19 nt, Artificial Sequence
  Description of Artificial Sequence: Synthetic oligonucleotide
  Sense strand starting at position 148 of SEQ ID NO: 1884039
aucauuagaguuggucaua

SEQ ID NO: 2235429 - RNA, 19 nt, Artificial Sequence
  Description of Artificial Sequence: Synthetic oligonucleotide
  Antisense strand to SEQ ID NO: 2235428
uaugaccaacucuaaugau

SEQ ID NO: 2235430 - RNA, 19 nt, Artificial Sequence
  Description of Artificial Sequence: Synthetic oligonucleotide
  Sense strand starting at position 149 of SEQ ID NO: 1884039
ucauuagaguuggucauaa

SEQ ID NO: 2235431 - RNA, 19 nt, Artificial Sequence
  Description of Artificial Sequence: Synthetic oligonucleotide
  Antisense strand to SEQ ID NO: 2235430
uuaugaccaacucuaauga

SEQ ID NO: 2235432 - RNA, 19 nt, Artificial Sequence
  Description of Artificial Sequence: Synthetic oligonucleotide
  Sense strand starting at position 151 of SEQ ID NO: 1884039
auuagaguuggucauaauc

SEQ ID NO: 2235433 - RNA, 19 nt, Artificial Sequence
  Description of Artificial Sequence: Synthetic oligonucleotide
  Antisense strand to SEQ ID NO: 2235432
gauuaugaccaacucuaau

SEQ ID NO: 2235434 - RNA, 19 nt, Artificial Sequence
  Description of Artificial Sequence: Synthetic oligonucleotide
  Sense strand starting at position 161 of SEQ ID NO: 1884039
gucauaauccaauacgucu

SEQ ID NO: 2235435 - RNA, 19 nt, Artificial Sequence
  Description of Artificial Sequence: Synthetic oligonucleotide
  Antisense strand to SEQ ID NO: 2235434
agacguauuggauuaugac

SEQ ID NO: 2235436 - RNA, 19 nt, Artificial Sequence
  Description of Artificial Sequence: Synthetic oligonucleotide
  Sense strand starting at position 319 of SEQ ID NO: 1884039
ggacucuuacugcacugau

SEQ ID NO: 2235437 - RNA, 19 nt, Artificial Sequence
  Description of Artificial Sequence: Synthetic oligonucleotide
  Antisense strand to SEQ ID NO: 2235436
aucagugcaguaagagucc

SEQ ID NO: 2235438 - RNA, 19 nt, Artificial Sequence
  Description of Artificial Sequence: Synthetic oligonucleotide
  Sense strand starting at position 992 of SEQ ID NO: 1884039
accagaagccuguguuuga

SEQ ID NO: 2235439 - RNA, 19 nt, Artificial Sequence
  Description of Artificial Sequence: Synthetic oligonucleotide
  Antisense strand to SEQ ID NO: 2235438
ucaaacacaggcuucuggu

SEQ ID NO: 2235440 - RNA, 19 nt, Artificial Sequence
  Description of Artificial Sequence: Synthetic oligonucleotide
  Sense strand starting at position 1069 of SEQ ID NO: 1884039
ggcaacaacugucugugaa

SEQ ID NO: 2235441 - RNA, 19 nt, Artificial Sequence
  Description of Artificial Sequence: Synthetic oligonucleotide
  Antisense strand to SEQ ID NO: 2235440
uucacagacaguuguugcc

SEQ ID NO: 2235442 - RNA, 19 nt, Artificial Sequence
  Description of Artificial Sequence: Synthetic oligonucleotide
  Sense strand starting at position 1070 of SEQ ID NO: 1884039
gcaacaacugucugugaau

SEQ ID NO: 2235443 - RNA, 19 nt, Artificial Sequence
  Description of Artificial Sequence: Synthetic oligonucleotide
  Antisense strand to SEQ ID NO: 2235442
auucacagacaguuguugc

SEQ ID NO: 2235444 - RNA, 19 nt, Artificial Sequence
  Description of Artificial Sequence: Synthetic oligonucleotide
  Sense strand starting at position 1128 of SEQ ID NO: 1884039
gacaaagaagcuugguuau

SEQ ID NO: 2235445 - RNA, 19 nt, Artificial Sequence
  Description of Artificial Sequence: Synthetic oligonucleotide
  Antisense strand to SEQ ID NO: 2235444
auaaccaagcuucuuuguc

SEQ ID NO: 2235446 - RNA, 19 nt, Artificial Sequence
  Description of Artificial Sequence: Synthetic oligonucleotide
  Sense strand starting at position 1130 of SEQ ID NO: 1884039
caaagaagcuugguuaucu

SEQ ID NO: 2235447 - RNA, 19 nt, Artificial Sequence
  Description of Artificial Sequence: Synthetic oligonucleotide
  Antisense strand to SEQ ID NO: 2235446
agauaaccaagcuucuuug

SEQ ID NO: 2235448 - RNA, 19 nt, Artificial Sequence
  Description of Artificial Sequence: Synthetic oligonucleotide
  Sense strand starting at position 2029 of SEQ ID NO: 1884039
uugaauuagagagggcuca

SEQ ID NO: 2235449 - RNA, 19 nt, Artificial Sequence
  Description of Artificial Sequence: Synthetic oligonucleotide
  Antisense strand to SEQ ID NO: 2235448
ugagcccucucuaauucaa

SEQ ID NO: 2235450 - RNA, 19 nt, Artificial Sequence
  Description of Artificial Sequence: Synthetic oligonucleotide
  Sense strand starting at position 2030 of SEQ ID NO: 1884039
ugaauuagagagggcucau

SEQ ID NO: 2235451 - RNA, 19 nt, Artificial Sequence
  Description of Artificial Sequence: Synthetic oligonucleotide
  Antisense strand to SEQ ID NO: 2235450
augagcccucucuaauuca

SEQ ID NO: 2235452 - RNA, 19 nt, Artificial Sequence
  Description of Artificial Sequence: Synthetic oligonucleotide
  Sense strand starting at position 2181 of SEQ ID NO: 1884039
gagggaguggccuaguaaa

SEQ ID NO: 2235453 - RNA, 19 nt, Artificial Sequence
  Description of Artificial Sequence: Synthetic oligonucleotide
  Antisense strand to SEQ ID NO: 2235452
uuuacuaggccacucccuc

SEQ ID NO: 2235454 - RNA, 19 nt, Artificial Sequence
  Description of Artificial Sequence: Synthetic oligonucleotide
  Sense strand starting at position 2246 of SEQ ID NO: 1884039
aggguuuacuuguugagga

SEQ ID NO: 2235455 - RNA, 19 nt, Artificial Sequence
  Description of Artificial Sequence: Synthetic oligonucleotide
  Antisense strand to SEQ ID NO: 2235454
uccucaacaaguaaacccu

SEQ ID NO: 2235456 - RNA, 19 nt, Artificial Sequence
  Description of Artificial Sequence: Synthetic oligonucleotide
  Sense strand starting at position 2315 of SEQ ID NO: 1884039
cuuauucgucugcaaguga

SEQ ID NO: 2235457 - RNA, 19 nt, Artificial Sequence
  Description of Artificial Sequence: Synthetic oligonucleotide
  Antisense strand to SEQ ID NO: 2235456
ucacuugcagacgaauaag

SEQ ID NO: 2235458 - RNA, 19 nt, Artificial Sequence
  Description of Artificial Sequence: Synthetic oligonucleotide
  Sense strand starting at position 2344 of SEQ ID NO: 1884039
aggguuaaagcuuaauuac

SEQ ID NO: 2235459 - RNA, 19 nt, Artificial Sequence
  Description of Artificial Sequence: Synthetic oligonucleotide
  Antisense strand to SEQ ID NO: 2235458
guaauuaagcuuuaacccu

SEQ ID NO: 2235460 - RNA, 19 nt, Artificial Sequence
  Description of Artificial Sequence: Synthetic oligonucleotide
  Sense strand starting at position 2508 of SEQ ID NO: 1884039
uuuccugucuguccugaaa

SEQ ID NO: 2235461 - RNA, 19 nt, Artificial Sequence
  Description of Artificial Sequence: Synthetic oligonucleotide
  Antisense strand to SEQ ID NO: 2235460
uuucaggacagacaggaaa

SEQ ID NO: 2235462 - RNA, 19 nt, Artificial Sequence
  Description of Artificial Sequence: Synthetic oligonucleotide
  Sense strand starting at position 3045 of SEQ ID NO: 1884039
cguucuugacaucagacau

SEQ ID NO: 2235463 - RNA, 19 nt, Artificial Sequence
  Description of Artificial Sequence: Synthetic oligonucleotide
  Antisense strand to SEQ ID NO: 2235462
augucugaugucaagaacg

SEQ ID NO: 2235464 - RNA, 19 nt, Artificial Sequence
  Description of Artificial Sequence: Synthetic oligonucleotide
  Sense strand starting at position 3092 of SEQ ID NO: 1884039
aagugaaguuaauugcaau

SEQ ID NO: 2235465 - RNA, 19 nt, Artificial Sequence
  Description of Artificial Sequence: Synthetic oligonucleotide
  Antisense strand to SEQ ID NO: 2235464
auugcaauuaacuucacuu

SEQ ID NO: 2235466 - RNA, 19 nt, Artificial Sequence
  Description of Artificial Sequence: Synthetic oligonucleotide
  Sense strand starting at position 3093 of SEQ ID NO: 1884039
agugaaguuaauugcaaug

SEQ ID NO: 2235467 - RNA, 19 nt, Artificial Sequence
  Description of Artificial Sequence: Synthetic oligonucleotide
  Antisense strand to SEQ ID NO: 2235466
cauugcaauuaacuucacu

SEQ ID NO: 2235468 - RNA, 19 nt, Artificial Sequence
  Description of Artificial Sequence: Synthetic oligonucleotide
  Sense strand starting at position 3098 of SEQ ID NO: 1884039
aguuaauugcaaugagaga

SEQ ID NO: 2235469 - RNA, 19 nt, Artificial Sequence
  Description of Artificial Sequence: Synthetic oligonucleotide
  Antisense strand to SEQ ID NO: 2235468
ucucucauugcaauuaacu

SEQ ID NO: 2235470 - RNA, 19 nt, Artificial Sequence
  Description of Artificial Sequence: Synthetic oligonucleotide
  Sense strand starting at position 3129 of SEQ ID NO: 1884039
gagcuaaucugauuggagg

SEQ ID NO: 2235471 - RNA, 19 nt, Artificial Sequence
  Description of Artificial Sequence: Synthetic oligonucleotide
  Antisense strand to SEQ ID NO: 2235470
ccuccaaucagauuagcuc

SEQ ID NO: 2235472 - RNA, 19 nt, Artificial Sequence
  Description of Artificial Sequence: Synthetic oligonucleotide
  Sense strand starting at position 3162 of SEQ ID NO: 1884039
ugaucacauccaggcaauu

SEQ ID NO: 2235473 - RNA, 19 nt, Artificial Sequence
  Description of Artificial Sequence: Synthetic oligonucleotide
  Antisense strand to SEQ ID NO: 2235472
aauugccuggaugugauca

SEQ ID NO: 2235474 - RNA, 19 nt, Artificial Sequence
  Description of Artificial Sequence: Synthetic oligonucleotide
  Sense strand starting at position 3175 of SEQ ID NO: 1884039
gcaauugcuguuuaauuaa

SEQ ID NO: 2235475 - RNA, 19 nt, Artificial Sequence
  Description of Artificial Sequence: Synthetic oligonucleotide
  Antisense strand to SEQ ID NO: 2235474
uuaauuaaacagcaauugc

SEQ ID NO: 2235476 - RNA, 19 nt, Artificial Sequence
  Description of Artificial Sequence: Synthetic oligonucleotide
  Sense strand starting at position 3187 of SEQ ID NO: 1884039
uaauuaaggcaaugcgauu

SEQ ID NO: 2235477 - RNA, 19 nt, Artificial Sequence
  Description of Artificial Sequence: Synthetic oligonucleotide
  Antisense strand to SEQ ID NO: 2235476
aaucgcauugccuuaauua

SEQ ID NO: 2235478 - RNA, 19 nt, Artificial Sequence
  Description of Artificial Sequence: Synthetic oligonucleotide
  Sense strand starting at position 3193 of SEQ ID NO: 1884039
aggcaaugcgauuaaucac

SEQ ID NO: 2235479 - RNA, 19 nt, Artificial Sequence
  Description of Artificial Sequence: Synthetic oligonucleotide
  Antisense strand to SEQ ID NO: 2235478
gugauuaaucgcauugccu

SEQ ID NO: 2235480 - RNA, 19 nt, Artificial Sequence
  Description of Artificial Sequence: Synthetic oligonucleotide
  Sense strand starting at position 3273 of SEQ ID NO: 1884039
uaaaguaacguuuggaaag

SEQ ID NO: 2235481 - RNA, 19 nt, Artificial Sequence
  Description of Artificial Sequence: Synthetic oligonucleotide
  Antisense strand to SEQ ID NO: 2235480
cuuuccaaacguuacuuua

SEQ ID NO: 2235482 - RNA, 19 nt, Artificial Sequence
  Description of Artificial Sequence: Synthetic oligonucleotide
  Sense strand starting at position 3291 of SEQ ID NO: 1884039
gacagaaacugaguuaggu

SEQ ID NO: 2235483 - RNA, 19 nt, Artificial Sequence
  Description of Artificial Sequence: Synthetic oligonucleotide
  Antisense strand to SEQ ID NO: 2235482
accuaacucaguuucuguc

SEQ ID NO: 2235484 - RNA, 19 nt, Artificial Sequence
  Description of Artificial Sequence: Synthetic oligonucleotide
  Sense strand starting at position 3299 of SEQ ID NO: 1884039
cugaguuaggucugagauu

SEQ ID NO: 2235485 - RNA, 19 nt, Artificial Sequence
  Description of Artificial Sequence: Synthetic oligonucleotide
  Antisense strand to SEQ ID NO: 2235484
aaucucagaccuaacucag

SEQ ID NO: 2235486 - RNA, 19 nt, Artificial Sequence
  Description of Artificial Sequence: Synthetic oligonucleotide
  Sense strand starting at position 3308 of SEQ ID NO: 1884039
gucugagauucuccuuuaa

SEQ ID NO: 2235487 - RNA, 19 nt, Artificial Sequence
  Description of Artificial Sequence: Synthetic oligonucleotide
  Antisense strand to SEQ ID NO: 2235486
uuaaaggagaaucucagac

SEQ ID NO: 2235488 - RNA, 19 nt, Artificial Sequence
  Description of Artificial Sequence: Synthetic oligonucleotide
  Sense strand starting at position 3310 of SEQ ID NO: 1884039
cugagauucuccuuuaaug

SEQ ID NO: 2235489 - RNA, 19 nt, Artificial Sequence
  Description of Artificial Sequence: Synthetic oligonucleotide
  Antisense strand to SEQ ID NO: 2235488
cauuaaaggagaaucucag

SEQ ID NO: 2235490 - RNA, 19 nt, Artificial Sequence
  Description of Artificial Sequence: Synthetic oligonucleotide
  Sense strand starting at position 3350 of SEQ ID NO: 1884039
uugaauucuaaggauacgu

SEQ ID NO: 2235491 - RNA, 19 nt, Artificial Sequence
  Description of Artificial Sequence: Synthetic oligonucleotide
  Antisense strand to SEQ ID NO: 2235490
acguauccuuagaauucaa

SEQ ID NO: 2235492 - RNA, 19 nt, Artificial Sequence
  Description of Artificial Sequence: Synthetic oligonucleotide
  Sense strand starting at position 3354 of SEQ ID NO: 1884039
auucuaaggauacgugaag

SEQ ID NO: 2235493 - RNA, 19 nt, Artificial Sequence
  Description of Artificial Sequence: Synthetic oligonucleotide
  Antisense strand to SEQ ID NO: 2235492
cuucacguauccuuagaau

SEQ ID NO: 2235494 - RNA, 19 nt, Artificial Sequence
  Description of Artificial Sequence: Synthetic oligonucleotide
  Sense strand starting at position 3590 of SEQ ID NO: 1884039
aauugugcuguccaguaua

SEQ ID NO: 2235495 - RNA, 19 nt, Artificial Sequence
  Description of Artificial Sequence: Synthetic oligonucleotide
  Antisense strand to SEQ ID NO: 2235494
uauacuggacagcacaauu

SEQ ID NO: 2235496 - RNA, 19 nt, Artificial Sequence
  Description of Artificial Sequence: Synthetic oligonucleotide
  Sense strand starting at position 3735 of SEQ ID NO: 1884039
guaauagccgcugacauau

SEQ ID NO: 2235497 - RNA, 19 nt, Artificial Sequence
  Description of Artificial Sequence: Synthetic oligonucleotide
  Antisense strand to SEQ ID NO: 2235496
auaugucagcggcuauuac

SEQ ID NO: 2235498 - RNA, 19 nt, Artificial Sequence
  Description of Artificial Sequence: Synthetic oligonucleotide
  Sense strand starting at position 3789 of SEQ ID NO: 1884039
cuauguagaaagugauaga

SEQ ID NO: 2235499 - RNA, 19 nt, Artificial Sequence
  Description of Artificial Sequence: Synthetic oligonucleotide
  Antisense strand to SEQ ID NO: 2235498
ucuaucacuuucuacauag

SEQ ID NO: 2235500 - RNA, 19 nt, Artificial Sequence
  Description of Artificial Sequence: Synthetic oligonucleotide
  Sense strand starting at position 3839 of SEQ ID NO: 1884039
auuagaaaguggcuucuuu

SEQ ID NO: 2235501 - RNA, 19 nt, Artificial Sequence
  Description of Artificial Sequence: Synthetic oligonucleotide
  Antisense strand to SEQ ID NO: 2235500
aaagaagccacuuucuaau

SEQ ID NO: 2235502 - RNA, 19 nt, Artificial Sequence
  Description of Artificial Sequence: Synthetic oligonucleotide
  Sense strand starting at position 3953 of SEQ ID NO: 1884039
gccauaauuuguuuagcag

SEQ ID NO: 2235503 - RNA, 19 nt, Artificial Sequence
  Description of Artificial Sequence: Synthetic oligonucleotide
  Antisense strand to SEQ ID NO: 2235502
cugcuaaacaaauuauggc

SEQ ID NO: 2235504 - RNA, 19 nt, Artificial Sequence
  Description of Artificial Sequence: Synthetic oligonucleotide
  Sense strand starting at position 3967 of SEQ ID NO: 1884039
agcaguucuugacuuggga

SEQ ID NO: 2235505 - RNA, 19 nt, Artificial Sequence
  Description of Artificial Sequence: Synthetic oligonucleotide
  Antisense strand to SEQ ID NO: 2235504
ucccaagucaagaacugcu

SEQ ID NO: 2235506 - RNA, 19 nt, Artificial Sequence
  Description of Artificial Sequence: Synthetic oligonucleotide
  Sense strand starting at position 3970 of SEQ ID NO: 1884039
aguucuugacuugggauaa

SEQ ID NO: 2235507 - RNA, 19 nt, Artificial Sequence
  Description of Artificial Sequence: Synthetic oligonucleotide
  Antisense strand to SEQ ID NO: 2235506
uuaucccaagucaagaacu

SEQ ID NO: 2235508 - RNA, 19 nt, Artificial Sequence
  Description of Artificial Sequence: Synthetic oligonucleotide
  Sense strand starting at position 1 of SEQ ID NO: 1884040
uuugccauggcccauaauu

SEQ ID NO: 2235509 - RNA, 19 nt, Artificial Sequence
  Description of Artificial Sequence: Synthetic oligonucleotide
  Antisense strand to SEQ ID NO: 2235508
aauuaugggccauggcaaa

SEQ ID NO: 2235510 - RNA, 19 nt, Artificial Sequence
  Description of Artificial Sequence: Synthetic oligonucleotide
  Sense strand starting at position 81 of SEQ ID NO: 1884040
guggaagcugugggaaaua

SEQ ID NO: 2235511 - RNA, 19 nt, Artificial Sequence
  Description of Artificial Sequence: Synthetic oligonucleotide
  Antisense strand to SEQ ID NO: 2235510
uauuucccacagcuuccac

SEQ ID NO: 2235512 - RNA, 19 nt, Artificial Sequence
  Description of Artificial Sequence: Synthetic oligonucleotide
  Sense strand starting at position 158 of SEQ ID NO: 1884040
agaucagauuaagaauaag

SEQ ID NO: 2235513 - RNA, 19 nt, Artificial Sequence
  Description of Artificial Sequence: Synthetic oligonucleotide
  Antisense strand to SEQ ID NO: 2235512
cuuauucuuaaucugaucu

SEQ ID NO: 2235514 - RNA, 19 nt, Artificial Sequence
  Description of Artificial Sequence: Synthetic oligonucleotide
  Sense strand starting at position 164 of SEQ ID NO: 1884040
gauuaagaauaagaaggaa

SEQ ID NO: 2235515 - RNA, 19 nt, Artificial Sequence
  Description of Artificial Sequence: Synthetic oligonucleotide
  Antisense strand to SEQ ID NO: 2235514
uuccuucuuauucuuaauc

SEQ ID NO: 2235516 - RNA, 19 nt, Artificial Sequence
  Description of Artificial Sequence: Synthetic oligonucleotide
  Sense strand starting at position 500 of SEQ ID NO: 1884040
agucuuuagggucauaaua

SEQ ID NO: 2235517 - RNA, 19 nt, Artificial Sequence
  Description of Artificial Sequence: Synthetic oligonucleotide
  Antisense strand to SEQ ID NO: 2235516
uauuaugacccuaaagacu

SEQ ID NO: 2235518 - RNA, 19 nt, Artificial Sequence
  Description of Artificial Sequence: Synthetic oligonucleotide
  Sense strand starting at position 560 of SEQ ID NO: 1884040
acagcaaucugcucaaaug

SEQ ID NO: 2235519 - RNA, 19 nt, Artificial Sequence
  Description of Artificial Sequence: Synthetic oligonucleotide
  Antisense strand to SEQ ID NO: 2235518
cauuugagcagauugcugu

SEQ ID NO: 2235520 - RNA, 19 nt, Artificial Sequence
  Description of Artificial Sequence: Synthetic oligonucleotide
  Sense strand starting at position 874 of SEQ ID NO: 1884040
ugccacauuguugagagaa

SEQ ID NO: 2235521 - RNA, 19 nt, Artificial Sequence
  Description of Artificial Sequence: Synthetic oligonucleotide
  Antisense strand to SEQ ID NO: 2235520
uucucucaacaauguggca

SEQ ID NO: 2235522 - RNA, 19 nt, Artificial Sequence
  Description of Artificial Sequence: Synthetic oligonucleotide
  Sense strand starting at position 889 of SEQ ID NO: 1884040
agaauuaagugagccaaua

SEQ ID NO: 2235523 - RNA, 19 nt, Artificial Sequence
  Description of Artificial Sequence: Synthetic oligonucleotide
  Antisense strand to SEQ ID NO: 2235522
uauuggcucacuuaauucu

SEQ ID NO: 2235524 - RNA, 19 nt, Artificial Sequence
  Description of Artificial Sequence: Synthetic oligonucleotide
  Sense strand starting at position 988 of SEQ ID NO: 1884040
uuaggaaguccuuauuguu

SEQ ID NO: 2235525 - RNA, 19 nt, Artificial Sequence
  Description of Artificial Sequence: Synthetic oligonucleotide
  Antisense strand to SEQ ID NO: 2235524
aacaauaaggacuuccuaa

SEQ ID NO: 2235526 - RNA, 19 nt, Artificial Sequence
  Description of Artificial Sequence: Synthetic oligonucleotide
  Sense strand starting at position 1034 of SEQ ID NO: 1884040
ugagcaagaaguuguauag

SEQ ID NO: 2235527 - RNA, 19 nt, Artificial Sequence
  Description of Artificial Sequence: Synthetic oligonucleotide
  Antisense strand to SEQ ID NO: 2235526
cuauacaacuucuugcuca

SEQ ID NO: 2235528 - RNA, 19 nt, Artificial Sequence
  Description of Artificial Sequence: Synthetic oligonucleotide
  Sense strand starting at position 1040 of SEQ ID NO: 1884040
agaaguuguauaggcugaa

SEQ ID NO: 2235529 - RNA, 19 nt, Artificial Sequence
  Description of Artificial Sequence: Synthetic oligonucleotide
  Antisense strand to SEQ ID NO: 2235528
uucagccuauacaacuucu

SEQ ID NO: 2235530 - RNA, 19 nt, Artificial Sequence
  Description of Artificial Sequence: Synthetic oligonucleotide
  Sense strand starting at position 1043 of SEQ ID NO: 1884040
aguuguauaggcugaagag

SEQ ID NO: 2235531 - RNA, 19 nt, Artificial Sequence
  Description of Artificial Sequence: Synthetic oligonucleotide
  Antisense strand to SEQ ID NO: 2235530
cucuucagccuauacaacu

SEQ ID NO: 2235532 - RNA, 19 nt, Artificial Sequence
  Description of Artificial Sequence: Synthetic oligonucleotide
  Sense strand starting at position 1144 of SEQ ID NO: 1884040
aucugucaccauggugauu

SEQ ID NO: 2235533 - RNA, 19 nt, Artificial Sequence
  Description of Artificial Sequence: Synthetic oligonucleotide
  Antisense strand to SEQ ID NO: 2235532
aaucaccauggugacagau

SEQ ID NO: 2235534 - RNA, 19 nt, Artificial Sequence
  Description of Artificial Sequence: Synthetic oligonucleotide
  Sense strand starting at position 1289 of SEQ ID NO: 1884040
cuggcauccucuuugauga

SEQ ID NO: 2235535 - RNA, 19 nt, Artificial Sequence
  Description of Artificial Sequence: Synthetic oligonucleotide
  Antisense strand to SEQ ID NO: 2235534
ucaucaaagaggaugccag

SEQ ID NO: 2235536 - RNA, 19 nt, Artificial Sequence
  Description of Artificial Sequence: Synthetic oligonucleotide
  Sense strand starting at position 1323 of SEQ ID NO: 1884040
ggacaaauauaugagagaa

SEQ ID NO: 2235537 - RNA, 19 nt, Artificial Sequence
  Description of Artificial Sequence: Synthetic oligonucleotide
  Antisense strand to SEQ ID NO: 2235536
uucucucauauauuugucc

SEQ ID NO: 2235538 - RNA, 19 nt, Artificial Sequence
  Description of Artificial Sequence: Synthetic oligonucleotide
  Sense strand starting at position 2065 of SEQ ID NO: 1884040
acuggaaccucugugaaga

SEQ ID NO: 2235539 - RNA, 19 nt, Artificial Sequence
  Description of Artificial Sequence: Synthetic oligonucleotide
  Antisense strand to SEQ ID NO: 2235538
ucuucacagagguuccagu

SEQ ID NO: 2235540 - RNA, 19 nt, Artificial Sequence
  Description of Artificial Sequence: Synthetic oligonucleotide
  Sense strand starting at position 2066 of SEQ ID NO: 1884040
cuggaaccucugugaagau

SEQ ID NO: 2235541 - RNA, 19 nt, Artificial Sequence
  Description of Artificial Sequence: Synthetic oligonucleotide
  Antisense strand to SEQ ID NO: 2235540
aucuucacagagguuccag

SEQ ID NO: 2235542 - RNA, 19 nt, Artificial Sequence
  Description of Artificial Sequence: Synthetic oligonucleotide
  Sense strand starting at position 2157 of SEQ ID NO: 1884040
ggcucauaucuuuaaggca

SEQ ID NO: 2235543 - RNA, 19 nt, Artificial Sequence
  Description of Artificial Sequence: Synthetic oligonucleotide
  Antisense strand to SEQ ID NO: 2235542
ugccuuaaagauaugagcc

SEQ ID NO: 2235544 - RNA, 19 nt, Artificial Sequence
  Description of Artificial Sequence: Synthetic oligonucleotide
  Sense strand starting at position 2195 of SEQ ID NO: 1884040
uguggauuggcucauuggu

SEQ ID NO: 2235545 - RNA, 19 nt, Artificial Sequence
  Description of Artificial Sequence: Synthetic oligonucleotide
  Antisense strand to SEQ ID NO: 2235544
accaaugagccaauccaca

SEQ ID NO: 2235546 - RNA, 19 nt, Artificial Sequence
  Description of Artificial Sequence: Synthetic oligonucleotide
  Sense strand starting at position 2204 of SEQ ID NO: 1884040
gcucauuggucuuuaauuu

SEQ ID NO: 2235547 - RNA, 19 nt, Artificial Sequence
  Description of Artificial Sequence: Synthetic oligonucleotide
  Antisense strand to SEQ ID NO: 2235546
aaauuaaagaccaaugagc

SEQ ID NO: 2235548 - RNA, 19 nt, Artificial Sequence
  Description of Artificial Sequence: Synthetic oligonucleotide
  Sense strand starting at position 2331 of SEQ ID NO: 1884040
cgcccagacuacucagaau

SEQ ID NO: 2235549 - RNA, 19 nt, Artificial Sequence
  Description of Artificial Sequence: Synthetic oligonucleotide
  Antisense strand to SEQ ID NO: 2235548
auucugaguagucugggcg

SEQ ID NO: 2235550 - RNA, 19 nt, Artificial Sequence
  Description of Artificial Sequence: Synthetic oligonucleotide
  Sense strand starting at position 2415 of SEQ ID NO: 1884040
ucagguuucuaaucuguaa

SEQ ID NO: 2235551 - RNA, 19 nt, Artificial Sequence
  Description of Artificial Sequence: Synthetic oligonucleotide
  Antisense strand to SEQ ID NO: 2235550
uuacagauuagaaaccuga

SEQ ID NO: 2235552 - RNA, 19 nt, Artificial Sequence
  Description of Artificial Sequence: Synthetic oligonucleotide
  Sense strand starting at position 2418 of SEQ ID NO: 1884040
gguuucuaaucuguaaaca

SEQ ID NO: 2235553 - RNA, 19 nt, Artificial Sequence
  Description of Artificial Sequence: Synthetic oligonucleotide
  Antisense strand to SEQ ID NO: 2235552
uguuuacagauuagaaacc

SEQ ID NO: 2235554 - RNA, 19 nt, Artificial Sequence
  Description of Artificial Sequence: Synthetic oligonucleotide
  Sense strand starting at position 2419 of SEQ ID NO: 1884040
guuucuaaucuguaaacag

SEQ ID NO: 2235555 - RNA, 19 nt, Artificial Sequence
  Description of Artificial Sequence: Synthetic oligonucleotide
  Antisense strand to SEQ ID NO: 2235554
cuguuuacagauuagaaac

SEQ ID NO: 2235556 - RNA, 19 nt, Artificial Sequence
  Description of Artificial Sequence: Synthetic oligonucleotide
  Sense strand starting at position 2463 of SEQ ID NO: 1884040
ggcuuacccagaggacuaa

SEQ ID NO: 2235557 - RNA, 19 nt, Artificial Sequence
  Description of Artificial Sequence: Synthetic oligonucleotide
  Antisense strand to SEQ ID NO: 2235556
uuaguccucuggguaagcc

SEQ ID NO: 2235558 - RNA, 19 nt, Artificial Sequence
  Description of Artificial Sequence: Synthetic oligonucleotide
  Sense strand starting at position 2533 of SEQ ID NO: 1884040
uuguguuaguuauuaggaa

SEQ ID NO: 2235559 - RNA, 19 nt, Artificial Sequence
  Description of Artificial Sequence: Synthetic oligonucleotide
  Antisense strand to SEQ ID NO: 2235558
uuccuaauaacuaacacaa

SEQ ID NO: 2235560 - RNA, 19 nt, Artificial Sequence
  Description of Artificial Sequence: Synthetic oligonucleotide
  Sense strand starting at position 2545 of SEQ ID NO: 1884040
uuaggaaaguuguuguuau

SEQ ID NO: 2235561 - RNA, 19 nt, Artificial Sequence
  Description of Artificial Sequence: Synthetic oligonucleotide
  Antisense strand to SEQ ID NO: 2235560
auaacaacaacuuuccuaa

SEQ ID NO: 2235562 - RNA, 19 nt, Artificial Sequence
  Description of Artificial Sequence: Synthetic oligonucleotide
  Sense strand starting at position 2559 of SEQ ID NO: 1884040
guuauaugucauggauauc

SEQ ID NO: 2235563 - RNA, 19 nt, Artificial Sequence
  Description of Artificial Sequence: Synthetic oligonucleotide
  Antisense strand to SEQ ID NO: 2235562
gauauccaugacauauaac

SEQ ID NO: 2235564 - RNA, 19 nt, Artificial Sequence
  Description of Artificial Sequence: Synthetic oligonucleotide
  Sense strand starting at position 2562 of SEQ ID NO: 1884040
auaugucauggauaucagu

SEQ ID NO: 2235565 - RNA, 19 nt, Artificial Sequence
  Description of Artificial Sequence: Synthetic oligonucleotide
  Antisense strand to SEQ ID NO: 2235564
acugauauccaugacauau

SEQ ID NO: 2235566 - RNA, 19 nt, Artificial Sequence
  Description of Artificial Sequence: Synthetic oligonucleotide
  Sense strand starting at position 2779 of SEQ ID NO: 1884040
ggguaagcucaugaucuaa

SEQ ID NO: 2235567 - RNA, 19 nt, Artificial Sequence
  Description of Artificial Sequence: Synthetic oligonucleotide
  Antisense strand to SEQ ID NO: 2235566
uuagaucaugagcuuaccc

SEQ ID NO: 2235568 - RNA, 19 nt, Artificial Sequence
  Description of Artificial Sequence: Synthetic oligonucleotide
  Sense strand starting at position 2781 of SEQ ID NO: 1884040
guaagcucaugaucuaaac

SEQ ID NO: 2235569 - RNA, 19 nt, Artificial Sequence
  Description of Artificial Sequence: Synthetic oligonucleotide
  Antisense strand to SEQ ID NO: 2235568
guuuagaucaugagcuuac

SEQ ID NO: 2235570 - RNA, 19 nt, Artificial Sequence
  Description of Artificial Sequence: Synthetic oligonucleotide
  Sense strand starting at position 2817 of SEQ ID NO: 1884040
uguuaucaguccucagaca

SEQ ID NO: 2235571 - RNA, 19 nt, Artificial Sequence
  Description of Artificial Sequence: Synthetic oligonucleotide
  Antisense strand to SEQ ID NO: 2235570
ugucugaggacugauaaca

SEQ ID NO: 2235572 - RNA, 19 nt, Artificial Sequence
  Description of Artificial Sequence: Synthetic oligonucleotide
  Sense strand starting at position 2818 of SEQ ID NO: 1884040
guuaucaguccucagacag

SEQ ID NO: 2235573 - RNA, 19 nt, Artificial Sequence
  Description of Artificial Sequence: Synthetic oligonucleotide
  Antisense strand to SEQ ID NO: 2235572
cugucugaggacugauaac

SEQ ID NO: 2235574 - RNA, 19 nt, Artificial Sequence
  Description of Artificial Sequence: Synthetic oligonucleotide
  Sense strand starting at position 3007 of SEQ ID NO: 1884040
guugguugcagugagaaac

SEQ ID NO: 2235575 - RNA, 19 nt, Artificial Sequence
  Description of Artificial Sequence: Synthetic oligonucleotide
  Antisense strand to SEQ ID NO: 2235574
guuucucacugcaaccaac

SEQ ID NO: 2235576 - RNA, 19 nt, Artificial Sequence
  Description of Artificial Sequence: Synthetic oligonucleotide
  Sense strand starting at position 3296 of SEQ ID NO: 1884040
cagagaaaguccuuguuuc

SEQ ID NO: 2235577 - RNA, 19 nt, Artificial Sequence
  Description of Artificial Sequence: Synthetic oligonucleotide
  Antisense strand to SEQ ID NO: 2235576
gaaacaaggacuuucucug

SEQ ID NO: 2235578 - RNA, 19 nt, Artificial Sequence
  Description of Artificial Sequence: Synthetic oligonucleotide
  Sense strand starting at position 3523 of SEQ ID NO: 1884040
auuccugauguggaguaau

SEQ ID NO: 2235579 - RNA, 19 nt, Artificial Sequence
  Description of Artificial Sequence: Synthetic oligonucleotide
  Antisense strand to SEQ ID NO: 2235578
auuacuccacaucaggaau

SEQ ID NO: 2235580 - RNA, 19 nt, Artificial Sequence
  Description of Artificial Sequence: Synthetic oligonucleotide
  Sense strand starting at position 3526 of SEQ ID NO: 1884040
ccugauguggaguaauagu

SEQ ID NO: 2235581 - RNA, 19 nt, Artificial Sequence
  Description of Artificial Sequence: Synthetic oligonucleotide
  Antisense strand to SEQ ID NO: 2235580
acuauuacuccacaucagg

SEQ ID NO: 2235582 - RNA, 19 nt, Artificial Sequence
  Description of Artificial Sequence: Synthetic oligonucleotide
  Sense strand starting at position 3873 of SEQ ID NO: 1884040
cccuuagauuuagaaguau

SEQ ID NO: 2235583 - RNA, 19 nt, Artificial Sequence
  Description of Artificial Sequence: Synthetic oligonucleotide
  Antisense strand to SEQ ID NO: 2235582
auacuucuaaaucuaaggg

SEQ ID NO: 2235584 - RNA, 19 nt, Artificial Sequence
  Description of Artificial Sequence: Synthetic oligonucleotide
  Sense strand starting at position 3944 of SEQ ID NO: 1884040
auucuaaccugacuguaga

SEQ ID NO: 2235585 - RNA, 19 nt, Artificial Sequence
  Description of Artificial Sequence: Synthetic oligonucleotide
  Antisense strand to SEQ ID NO: 2235584
ucuacagucagguuagaau

SEQ ID NO: 2235586 - RNA, 19 nt, Artificial Sequence
  Description of Artificial Sequence: Synthetic oligonucleotide
  Sense strand starting at position 3945 of SEQ ID NO: 1884040
uucuaaccugacuguagau

SEQ ID NO: 2235587 - RNA, 19 nt, Artificial Sequence
  Description of Artificial Sequence: Synthetic oligonucleotide
  Antisense strand to SEQ ID NO: 2235586
aucuacagucagguuagaa

SEQ ID NO: 2235588 - RNA, 19 nt, Artificial Sequence
  Description of Artificial Sequence: Synthetic oligonucleotide
  Sense strand starting at position 70 of SEQ ID NO: 1884041
uugguuaaggauugcuuaa

SEQ ID NO: 2235589 - RNA, 19 nt, Artificial Sequence
  Description of Artificial Sequence: Synthetic oligonucleotide
  Antisense strand to SEQ ID NO: 2235588
uuaagcaauccuuaaccaa

SEQ ID NO: 2235590 - RNA, 19 nt, Artificial Sequence
  Description of Artificial Sequence: Synthetic oligonucleotide
  Sense strand starting at position 72 of SEQ ID NO: 1884041
gguuaaggauugcuuaaga

SEQ ID NO: 2235591 - RNA, 19 nt, Artificial Sequence
  Description of Artificial Sequence: Synthetic oligonucleotide
  Antisense strand to SEQ ID NO: 2235590
ucuuaagcaauccuuaacc

SEQ ID NO: 2235592 - RNA, 19 nt, Artificial Sequence
  Description of Artificial Sequence: Synthetic oligonucleotide
  Sense strand starting at position 302 of SEQ ID NO: 1884041
ccgucuccucguucaguga

SEQ ID NO: 2235593 - RNA, 19 nt, Artificial Sequence
  Description of Artificial Sequence: Synthetic oligonucleotide
  Antisense strand to SEQ ID NO: 2235592
ucacugaacgaggagacgg

SEQ ID NO: 2235594 - RNA, 19 nt, Artificial Sequence
  Description of Artificial Sequence: Synthetic oligonucleotide
  Sense strand starting at position 375 of SEQ ID NO: 1884041
gggcaaugaacuuaucagu

SEQ ID NO: 2235595 - RNA, 19 nt, Artificial Sequence
  Description of Artificial Sequence: Synthetic oligonucleotide
  Antisense strand to SEQ ID NO: 2235594
acugauaaguucauugccc

SEQ ID NO: 2235596 - RNA, 19 nt, Artificial Sequence
  Description of Artificial Sequence: Synthetic oligonucleotide
  Sense strand starting at position 381 of SEQ ID NO: 1884041
ugaacuuaucaguguuaca

SEQ ID NO: 2235597 - RNA, 19 nt, Artificial Sequence
  Description of Artificial Sequence: Synthetic oligonucleotide
  Antisense strand to SEQ ID NO: 2235596
uguaacacugauaaguuca

SEQ ID NO: 2235598 - RNA, 19 nt, Artificial Sequence
  Description of Artificial Sequence: Synthetic oligonucleotide
  Sense strand starting at position 536 of SEQ ID NO: 1884041
ccaggucucugcucaggau

SEQ ID NO: 2235599 - RNA, 19 nt, Artificial Sequence
  Description of Artificial Sequence: Synthetic oligonucleotide
  Antisense strand to SEQ ID NO: 2235598
auccugagcagagaccugg

SEQ ID NO: 2235600 - RNA, 19 nt, Artificial Sequence
  Description of Artificial Sequence: Synthetic oligonucleotide
  Sense strand starting at position 548 of SEQ ID NO: 1884041
ucaggauuccucugcuagu

SEQ ID NO: 2235601 - RNA, 19 nt, Artificial Sequence
  Description of Artificial Sequence: Synthetic oligonucleotide
  Antisense strand to SEQ ID NO: 2235600
acuagcagaggaauccuga

SEQ ID NO: 2235602 - RNA, 19 nt, Artificial Sequence
  Description of Artificial Sequence: Synthetic oligonucleotide
  Sense strand starting at position 549 of SEQ ID NO: 1884041
caggauuccucugcuagug

SEQ ID NO: 2235603 - RNA, 19 nt, Artificial Sequence
  Description of Artificial Sequence: Synthetic oligonucleotide
  Antisense strand to SEQ ID NO: 2235602
cacuagcagaggaauccug

SEQ ID NO: 2235604 - RNA, 19 nt, Artificial Sequence
  Description of Artificial Sequence: Synthetic oligonucleotide
  Sense strand starting at position 669 of SEQ ID NO: 1884041
gccaguuaaguguuuguuu

SEQ ID NO: 2235605 - RNA, 19 nt, Artificial Sequence
  Description of Artificial Sequence: Synthetic oligonucleotide
  Antisense strand to SEQ ID NO: 2235604
aaacaaacacuuaacuggc

SEQ ID NO: 2235606 - RNA, 19 nt, Artificial Sequence
  Description of Artificial Sequence: Synthetic oligonucleotide
  Sense strand starting at position 754 of SEQ ID NO: 1884041
cugagcuucucuguaacaa

SEQ ID NO: 2235607 - RNA, 19 nt, Artificial Sequence
  Description of Artificial Sequence: Synthetic oligonucleotide
  Antisense strand to SEQ ID NO: 2235606
uuguuacagagaagcucag

SEQ ID NO: 2235608 - RNA, 19 nt, Artificial Sequence
  Description of Artificial Sequence: Synthetic oligonucleotide
  Sense strand starting at position 755 of SEQ ID NO: 1884041
ugagcuucucuguaacaaa

SEQ ID NO: 2235609 - RNA, 19 nt, Artificial Sequence
  Description of Artificial Sequence: Synthetic oligonucleotide
  Antisense strand to SEQ ID NO: 2235608
uuuguuacagagaagcuca

SEQ ID NO: 2235610 - RNA, 19 nt, Artificial Sequence
  Description of Artificial Sequence: Synthetic oligonucleotide
  Sense strand starting at position 812 of SEQ ID NO: 1884041
agcauauauuccucuugua

SEQ ID NO: 2235611 - RNA, 19 nt, Artificial Sequence
  Description of Artificial Sequence: Synthetic oligonucleotide
  Antisense strand to SEQ ID NO: 2235610
uacaagaggaauauaugcu

SEQ ID NO: 2235612 - RNA, 19 nt, Artificial Sequence
  Description of Artificial Sequence: Synthetic oligonucleotide
  Sense strand starting at position 824 of SEQ ID NO: 1884041
ucuuguauccaugggagau

SEQ ID NO: 2235613 - RNA, 19 nt, Artificial Sequence
  Description of Artificial Sequence: Synthetic oligonucleotide
  Antisense strand to SEQ ID NO: 2235612
aucucccauggauacaaga

SEQ ID NO: 2235614 - RNA, 19 nt, Artificial Sequence
  Description of Artificial Sequence: Synthetic oligonucleotide
  Sense strand starting at position 825 of SEQ ID NO: 1884041
cuuguauccaugggagaua

SEQ ID NO: 2235615 - RNA, 19 nt, Artificial Sequence
  Description of Artificial Sequence: Synthetic oligonucleotide
  Antisense strand to SEQ ID NO: 2235614
uaucucccauggauacaag

SEQ ID NO: 2235616 - RNA, 19 nt, Artificial Sequence
  Description of Artificial Sequence: Synthetic oligonucleotide
  Sense strand starting at position 837 of SEQ ID NO: 1884041
ggagauaaaucagagagau

SEQ ID NO: 2235617 - RNA, 19 nt, Artificial Sequence
  Description of Artificial Sequence: Synthetic oligonucleotide
  Antisense strand to SEQ ID NO: 2235616
aucucucugauuuaucucc

SEQ ID NO: 2235618 - RNA, 19 nt, Artificial Sequence
  Description of Artificial Sequence: Synthetic oligonucleotide
  Sense strand starting at position 1014 of SEQ ID NO: 1884041
agagacuucucugauuuag

SEQ ID NO: 2235619 - RNA, 19 nt, Artificial Sequence
  Description of Artificial Sequence: Synthetic oligonucleotide
  Antisense strand to SEQ ID NO: 2235618
cuaaaucagagaagucucu

SEQ ID NO: 2235620 - RNA, 19 nt, Artificial Sequence
  Description of Artificial Sequence: Synthetic oligonucleotide
  Sense strand starting at position 1199 of SEQ ID NO: 1884041
ugggauggcauaugcuaau

SEQ ID NO: 2235621 - RNA, 19 nt, Artificial Sequence
  Description of Artificial Sequence: Synthetic oligonucleotide
  Antisense strand to SEQ ID NO: 2235620
auuagcauaugccauccca

SEQ ID NO: 2235622 - RNA, 19 nt, Artificial Sequence
  Description of Artificial Sequence: Synthetic oligonucleotide
  Sense strand starting at position 1205 of SEQ ID NO: 1884041
ggcauaugcuaaucuccua

SEQ ID NO: 2235623 - RNA, 19 nt, Artificial Sequence
  Description of Artificial Sequence: Synthetic oligonucleotide
  Antisense strand to SEQ ID NO: 2235622
uaggagauuagcauaugcc

SEQ ID NO: 2235624 - RNA, 19 nt, Artificial Sequence
  Description of Artificial Sequence: Synthetic oligonucleotide
  Sense strand starting at position 1228 of SEQ ID NO: 1884041
cacaguuugggauggcaua

SEQ ID NO: 2235625 - RNA, 19 nt, Artificial Sequence
  Description of Artificial Sequence: Synthetic oligonucleotide
  Antisense strand to SEQ ID NO: 2235624
uaugccaucccaaacugug

SEQ ID NO: 2235626 - RNA, 19 nt, Artificial Sequence
  Description of Artificial Sequence: Synthetic oligonucleotide
  Sense strand starting at position 1229 of SEQ ID NO: 1884041
acaguuugggauggcauau

SEQ ID NO: 2235627 - RNA, 19 nt, Artificial Sequence
  Description of Artificial Sequence: Synthetic oligonucleotide
  Antisense strand to SEQ ID NO: 2235626
auaugccaucccaaacugu

SEQ ID NO: 2235628 - RNA, 19 nt, Artificial Sequence
  Description of Artificial Sequence: Synthetic oligonucleotide
  Sense strand starting at position 1387 of SEQ ID NO: 1884041
ucuacaugccucugaagga

SEQ ID NO: 2235629 - RNA, 19 nt, Artificial Sequence
  Description of Artificial Sequence: Synthetic oligonucleotide
  Antisense strand to SEQ ID NO: 2235628
uccuucagaggcauguaga

SEQ ID NO: 2235630 - RNA, 19 nt, Artificial Sequence
  Description of Artificial Sequence: Synthetic oligonucleotide
  Sense strand starting at position 1465 of SEQ ID NO: 1884041
gucucuguuggacauuaau

SEQ ID NO: 2235631 - RNA, 19 nt, Artificial Sequence
  Description of Artificial Sequence: Synthetic oligonucleotide
  Antisense strand to SEQ ID NO: 2235630
auuaauguccaacagagac

SEQ ID NO: 2235632 - RNA, 19 nt, Artificial Sequence
  Description of Artificial Sequence: Synthetic oligonucleotide
  Sense strand starting at position 1515 of SEQ ID NO: 1884041
gaaguacuguaaguugauu

SEQ ID NO: 2235633 - RNA, 19 nt, Artificial Sequence
  Description of Artificial Sequence: Synthetic oligonucleotide
  Antisense strand to SEQ ID NO: 2235632
aaucaacuuacaguacuuc

SEQ ID NO: 2235634 - RNA, 19 nt, Artificial Sequence
  Description of Artificial Sequence: Synthetic oligonucleotide
  Sense strand starting at position 1540 of SEQ ID NO: 1884041
uuacuuccugguggagauu

SEQ ID NO: 2235635 - RNA, 19 nt, Artificial Sequence
  Description of Artificial Sequence: Synthetic oligonucleotide
  Antisense strand to SEQ ID NO: 2235634
aaucuccaccaggaaguaa

SEQ ID NO: 2235636 - RNA, 19 nt, Artificial Sequence
  Description of Artificial Sequence: Synthetic oligonucleotide
  Sense strand starting at position 1622 of SEQ ID NO: 1884041
cauuuaccugcuggugauu

SEQ ID NO: 2235637 - RNA, 19 nt, Artificial Sequence
  Description of Artificial Sequence: Synthetic oligonucleotide
  Antisense strand to SEQ ID NO: 2235636
aaucaccagcagguaaaug

SEQ ID NO: 2235638 - RNA, 19 nt, Artificial Sequence
  Description of Artificial Sequence: Synthetic oligonucleotide
  Sense strand starting at position 1655 of SEQ ID NO: 1884041
aaaugaugccaguguuuga

SEQ ID NO: 2235639 - RNA, 19 nt, Artificial Sequence
  Description of Artificial Sequence: Synthetic oligonucleotide
  Antisense strand to SEQ ID NO: 2235638
ucaaacacuggcaucauuu

SEQ ID NO: 2235640 - RNA, 19 nt, Artificial Sequence
  Description of Artificial Sequence: Synthetic oligonucleotide
  Sense strand starting at position 1853 of SEQ ID NO: 1884041
cugucuaaggcaugggaga

SEQ ID NO: 2235641 - RNA, 19 nt, Artificial Sequence
  Description of Artificial Sequence: Synthetic oligonucleotide
  Antisense strand to SEQ ID NO: 2235640
ucucccaugccuuagacag

SEQ ID NO: 2235642 - RNA, 19 nt, Artificial Sequence
  Description of Artificial Sequence: Synthetic oligonucleotide
  Sense strand starting at position 1854 of SEQ ID NO: 1884041
ugucuaaggcaugggagaa

SEQ ID NO: 2235643 - RNA, 19 nt, Artificial Sequence
  Description of Artificial Sequence: Synthetic oligonucleotide
  Antisense strand to SEQ ID NO: 2235642
uucucccaugccuuagaca

SEQ ID NO: 2235644 - RNA, 19 nt, Artificial Sequence
  Description of Artificial Sequence: Synthetic oligonucleotide
  Sense strand starting at position 1855 of SEQ ID NO: 1884041
gucuaaggcaugggagaaa

SEQ ID NO: 2235645 - RNA, 19 nt, Artificial Sequence
  Description of Artificial Sequence: Synthetic oligonucleotide
  Antisense strand to SEQ ID NO: 2235644
uuucucccaugccuuagac

SEQ ID NO: 2235646 - RNA, 19 nt, Artificial Sequence
  Description of Artificial Sequence: Synthetic oligonucleotide
  Sense strand starting at position 1984 of SEQ ID NO: 1884041
ccaccuuuguggucccaca

SEQ ID NO: 2235647 - RNA, 19 nt, Artificial Sequence
  Description of Artificial Sequence: Synthetic oligonucleotide
  Antisense strand to SEQ ID NO: 2235646
ugugggaccacaaaggugg

SEQ ID NO: 2235648 - RNA, 19 nt, Artificial Sequence
  Description of Artificial Sequence: Synthetic oligonucleotide
  Sense strand starting at position 2203 of SEQ ID NO: 1884041
gccagugugaggcaaagau

SEQ ID NO: 2235649 - RNA, 19 nt, Artificial Sequence
  Description of Artificial Sequence: Synthetic oligonucleotide
  Antisense strand to SEQ ID NO: 2235648
aucuuugccucacacuggc

SEQ ID NO: 2235650 - RNA, 19 nt, Artificial Sequence
  Description of Artificial Sequence: Synthetic oligonucleotide
  Sense strand starting at position 2326 of SEQ ID NO: 1884041
ccagccuggacuugugaga

SEQ ID NO: 2235651 - RNA, 19 nt, Artificial Sequence
  Description of Artificial Sequence: Synthetic oligonucleotide
  Antisense strand to SEQ ID NO: 2235650
ucucacaaguccaggcugg

SEQ ID NO: 2235652 - RNA, 19 nt, Artificial Sequence
  Description of Artificial Sequence: Synthetic oligonucleotide
  Sense strand starting at position 2741 of SEQ ID NO: 1884041
ugggauccaugucuccaaa

SEQ ID NO: 2235653 - RNA, 19 nt, Artificial Sequence
  Description of Artificial Sequence: Synthetic oligonucleotide
  Antisense strand to SEQ ID NO: 2235652
uuuggagacauggauccca

SEQ ID NO: 2235654 - RNA, 19 nt, Artificial Sequence
  Description of Artificial Sequence: Synthetic oligonucleotide
  Sense strand starting at position 2868 of SEQ ID NO: 1884041
cacaguuaccuuuguguag

SEQ ID NO: 2235655 - RNA, 19 nt, Artificial Sequence
  Description of Artificial Sequence: Synthetic oligonucleotide
  Antisense strand to SEQ ID NO: 2235654
cuacacaaagguaacugug

SEQ ID NO: 2235656 - RNA, 19 nt, Artificial Sequence
  Description of Artificial Sequence: Synthetic oligonucleotide
  Sense strand starting at position 3706 of SEQ ID NO: 1884041
cugcaaugaacuuggaagu

SEQ ID NO: 2235657 - RNA, 19 nt, Artificial Sequence
  Description of Artificial Sequence: Synthetic oligonucleotide
  Antisense strand to SEQ ID NO: 2235656
acuuccaaguucauugcag

SEQ ID NO: 2235658 - RNA, 19 nt, Artificial Sequence
  Description of Artificial Sequence: Synthetic oligonucleotide
  Sense strand starting at position 3763 of SEQ ID NO: 1884041
gauauauacugagauuuga

SEQ ID NO: 2235659 - RNA, 19 nt, Artificial Sequence
  Description of Artificial Sequence: Synthetic oligonucleotide
  Antisense strand to SEQ ID NO: 2235658
ucaaaucucaguauauauc

SEQ ID NO: 2235660 - RNA, 19 nt, Artificial Sequence
  Description of Artificial Sequence: Synthetic oligonucleotide
  Sense strand starting at position 3820 of SEQ ID NO: 1884041
ugaggaaccucccuguacu

SEQ ID NO: 2235661 - RNA, 19 nt, Artificial Sequence
  Description of Artificial Sequence: Synthetic oligonucleotide
  Antisense strand to SEQ ID NO: 2235660
aguacagggagguuccuca

SEQ ID NO: 2235662 - RNA, 19 nt, Artificial Sequence
  Description of Artificial Sequence: Synthetic oligonucleotide
  Sense strand starting at position 3821 of SEQ ID NO: 1884041
gaggaaccucccuguacua

SEQ ID NO: 2235663 - RNA, 19 nt, Artificial Sequence
  Description of Artificial Sequence: Synthetic oligonucleotide
  Antisense strand to SEQ ID NO: 2235662
uaguacagggagguuccuc

SEQ ID NO: 2235664 - RNA, 19 nt, Artificial Sequence
  Description of Artificial Sequence: Synthetic oligonucleotide
  Sense strand starting at position 3823 of SEQ ID NO: 1884041
ggaaccucccuguacuaau

SEQ ID NO: 2235665 - RNA, 19 nt, Artificial Sequence
  Description of Artificial Sequence: Synthetic oligonucleotide
  Antisense strand to SEQ ID NO: 2235664
auuaguacagggagguucc

SEQ ID NO: 2235666 - RNA, 19 nt, Artificial Sequence
  Description of Artificial Sequence: Synthetic oligonucleotide
  Sense strand starting at position 3914 of SEQ ID NO: 1884041
ugaugauagucacccuaac

SEQ ID NO: 2235667 - RNA, 19 nt, Artificial Sequence
  Description of Artificial Sequence: Synthetic oligonucleotide
  Antisense strand to SEQ ID NO: 2235666
guuagggugacuaucauca

SEQ ID NO: 2235668 - RNA, 19 nt, Artificial Sequence
  Description of Artificial Sequence: Synthetic oligonucleotide
  Sense strand starting at position 49 of SEQ ID NO: 1884042
gcaaaucucuaagacauag

SEQ ID NO: 2235669 - RNA, 19 nt, Artificial Sequence
  Description of Artificial Sequence: Synthetic oligonucleotide
  Antisense strand to SEQ ID NO: 2235668
cuaugucuuagagauuugc

SEQ ID NO: 2235670 - RNA, 19 nt, Artificial Sequence
  Description of Artificial Sequence: Synthetic oligonucleotide
  Sense strand starting at position 124 of SEQ ID NO: 1884042
cagucuugguuuguuguua

SEQ ID NO: 2235671 - RNA, 19 nt, Artificial Sequence
  Description of Artificial Sequence: Synthetic oligonucleotide
  Antisense strand to SEQ ID NO: 2235670
uaacaacaaaccaagacug

SEQ ID NO: 2235672 - RNA, 19 nt, Artificial Sequence
  Description of Artificial Sequence: Synthetic oligonucleotide
  Sense strand starting at position 142 of SEQ ID NO: 1884042
aaugccauugcuugggaaa

SEQ ID NO: 2235673 - RNA, 19 nt, Artificial Sequence
  Description of Artificial Sequence: Synthetic oligonucleotide
  Antisense strand to SEQ ID NO: 2235672
uuucccaagcaauggcauu

SEQ ID NO: 2235674 - RNA, 19 nt, Artificial Sequence
  Description of Artificial Sequence: Synthetic oligonucleotide
  Sense strand starting at position 426 of SEQ ID NO: 1884042
uguuaagauugcgauaaug

SEQ ID NO: 2235675 - RNA, 19 nt, Artificial Sequence
  Description of Artificial Sequence: Synthetic oligonucleotide
  Antisense strand to SEQ ID NO: 2235674
cauuaucgcaaucuuaaca

SEQ ID NO: 2235676 - RNA, 19 nt, Artificial Sequence
  Description of Artificial Sequence: Synthetic oligonucleotide
  Sense strand starting at position 428 of SEQ ID NO: 1884042
uuaagauugcgauaaugcu

SEQ ID NO: 2235677 - RNA, 19 nt, Artificial Sequence
  Description of Artificial Sequence: Synthetic oligonucleotide
  Antisense strand to SEQ ID NO: 2235676
agcauuaucgcaaucuuaa

SEQ ID NO: 2235678 - RNA, 19 nt, Artificial Sequence
  Description of Artificial Sequence: Synthetic oligonucleotide
  Sense strand starting at position 436 of SEQ ID NO: 1884042
gcgauaaugcuccacucac

SEQ ID NO: 2235679 - RNA, 19 nt, Artificial Sequence
  Description of Artificial Sequence: Synthetic oligonucleotide
  Antisense strand to SEQ ID NO: 2235678
gugaguggagcauuaucgc

SEQ ID NO: 2235680 - RNA, 19 nt, Artificial Sequence
  Description of Artificial Sequence: Synthetic oligonucleotide
  Sense strand starting at position 999 of SEQ ID NO: 1884042
agugacagguuucagugaa

SEQ ID NO: 2235681 - RNA, 19 nt, Artificial Sequence
  Description of Artificial Sequence: Synthetic oligonucleotide
  Antisense strand to SEQ ID NO: 2235680
uucacugaaaccugucacu

SEQ ID NO: 2235682 - RNA, 19 nt, Artificial Sequence
  Description of Artificial Sequence: Synthetic oligonucleotide
  Sense strand starting at position 1242 of SEQ ID NO: 1884042
caugacugugcucaggaau

SEQ ID NO: 2235683 - RNA, 19 nt, Artificial Sequence
  Description of Artificial Sequence: Synthetic oligonucleotide
  Antisense strand to SEQ ID NO: 2235682
auuccugagcacagucaug

SEQ ID NO: 2235684 - RNA, 19 nt, Artificial Sequence
  Description of Artificial Sequence: Synthetic oligonucleotide
  Sense strand starting at position 1266 of SEQ ID NO: 1884042
guugucucaacacagagua

SEQ ID NO: 2235685 - RNA, 19 nt, Artificial Sequence
  Description of Artificial Sequence: Synthetic oligonucleotide
  Antisense strand to SEQ ID NO: 2235684
uacucuguguugagacaac

SEQ ID NO: 2235686 - RNA, 19 nt, Artificial Sequence
  Description of Artificial Sequence: Synthetic oligonucleotide
  Sense strand starting at position 1324 of SEQ ID NO: 1884042
gcccaugauucccauggaa

SEQ ID NO: 2235687 - RNA, 19 nt, Artificial Sequence
  Description of Artificial Sequence: Synthetic oligonucleotide
  Antisense strand to SEQ ID NO: 2235686
uuccaugggaaucaugggc

SEQ ID NO: 2235688 - RNA, 19 nt, Artificial Sequence
  Description of Artificial Sequence: Synthetic oligonucleotide
  Sense strand starting at position 1326 of SEQ ID NO: 1884042
ccaugauucccauggaaac

SEQ ID NO: 2235689 - RNA, 19 nt, Artificial Sequence
  Description of Artificial Sequence: Synthetic oligonucleotide
  Antisense strand to SEQ ID NO: 2235688
guuuccaugggaaucaugg

SEQ ID NO: 2235690 - RNA, 19 nt, Artificial Sequence
  Description of Artificial Sequence: Synthetic oligonucleotide
  Sense strand starting at position 1618 of SEQ ID NO: 1884042
agaaauaacgcccguaaca

SEQ ID NO: 2235691 - RNA, 19 nt, Artificial Sequence
  Description of Artificial Sequence: Synthetic oligonucleotide
  Antisense strand to SEQ ID NO: 2235690
uguuacgggcguuauuucu

SEQ ID NO: 2235692 - RNA, 19 nt, Artificial Sequence
  Description of Artificial Sequence: Synthetic oligonucleotide
  Sense strand starting at position 1620 of SEQ ID NO: 1884042
aaauaacgcccguaacagu

SEQ ID NO: 2235693 - RNA, 19 nt, Artificial Sequence
  Description of Artificial Sequence: Synthetic oligonucleotide
  Antisense strand to SEQ ID NO: 2235692
acuguuacgggcguuauuu

SEQ ID NO: 2235694 - RNA, 19 nt, Artificial Sequence
  Description of Artificial Sequence: Synthetic oligonucleotide
  Sense strand starting at position 1707 of SEQ ID NO: 1884042
ggcagugaugcccggaaua

SEQ ID NO: 2235695 - RNA, 19 nt, Artificial Sequence
  Description of Artificial Sequence: Synthetic oligonucleotide
  Antisense strand to SEQ ID NO: 2235694
uauuccgggcaucacugcc

SEQ ID NO: 2235696 - RNA, 19 nt, Artificial Sequence
  Description of Artificial Sequence: Synthetic oligonucleotide
  Sense strand starting at position 1752 of SEQ ID NO: 1884042
ggcagugcaguugagaaua

SEQ ID NO: 2235697 - RNA, 19 nt, Artificial Sequence
  Description of Artificial Sequence: Synthetic oligonucleotide
  Antisense strand to SEQ ID NO: 2235696
uauucucaacugcacugcc

SEQ ID NO: 2235698 - RNA, 19 nt, Artificial Sequence
  Description of Artificial Sequence: Synthetic oligonucleotide
  Sense strand starting at position 1760 of SEQ ID NO: 1884042
aguugagaauacucaccua

SEQ ID NO: 2235699 - RNA, 19 nt, Artificial Sequence
  Description of Artificial Sequence: Synthetic oligonucleotide
  Antisense strand to SEQ ID NO: 2235698
uaggugaguauucucaacu

SEQ ID NO: 2235700 - RNA, 19 nt, Artificial Sequence
  Description of Artificial Sequence: Synthetic oligonucleotide
  Sense strand starting at position 2018 of SEQ ID NO: 1884042
ccucuaggcuuauucugau

SEQ ID NO: 2235701 - RNA, 19 nt, Artificial Sequence
  Description of Artificial Sequence: Synthetic oligonucleotide
  Antisense strand to SEQ ID NO: 2235700
aucagaauaagccuagagg

SEQ ID NO: 2235702 - RNA, 19 nt, Artificial Sequence
  Description of Artificial Sequence: Synthetic oligonucleotide
  Sense strand starting at position 2022 of SEQ ID NO: 1884042
uaggcuuauucugauugga

SEQ ID NO: 2235703 - RNA, 19 nt, Artificial Sequence
  Description of Artificial Sequence: Synthetic oligonucleotide
  Antisense strand to SEQ ID NO: 2235702
uccaaucagaauaagccua

SEQ ID NO: 2235704 - RNA, 19 nt, Artificial Sequence
  Description of Artificial Sequence: Synthetic oligonucleotide
  Sense strand starting at position 2024 of SEQ ID NO: 1884042
ggcuuauucugauuggacu

SEQ ID NO: 2235705 - RNA, 19 nt, Artificial Sequence
  Description of Artificial Sequence: Synthetic oligonucleotide
  Antisense strand to SEQ ID NO: 2235704
aguccaaucagaauaagcc

SEQ ID NO: 2235706 - RNA, 19 nt, Artificial Sequence
  Description of Artificial Sequence: Synthetic oligonucleotide
  Sense strand starting at position 2025 of SEQ ID NO: 1884042
gcuuauucugauuggacuu

SEQ ID NO: 2235707 - RNA, 19 nt, Artificial Sequence
  Description of Artificial Sequence: Synthetic oligonucleotide
  Antisense strand to SEQ ID NO: 2235706
aaguccaaucagaauaagc

SEQ ID NO: 2235708 - RNA, 19 nt, Artificial Sequence
  Description of Artificial Sequence: Synthetic oligonucleotide
  Sense strand starting at position 2067 of SEQ ID NO: 1884042
gccuaaggcuuacucucau

SEQ ID NO: 2235709 - RNA, 19 nt, Artificial Sequence
  Description of Artificial Sequence: Synthetic oligonucleotide
  Antisense strand to SEQ ID NO: 2235708
augagaguaagccuuaggc

SEQ ID NO: 2235710 - RNA, 19 nt, Artificial Sequence
  Description of Artificial Sequence: Synthetic oligonucleotide
  Sense strand starting at position 2104 of SEQ ID NO: 1884042
ccaggaaccucgguauaua

SEQ ID NO: 2235711 - RNA, 19 nt, Artificial Sequence
  Description of Artificial Sequence: Synthetic oligonucleotide
  Antisense strand to SEQ ID NO: 2235710
uauauaccgagguuccugg

SEQ ID NO: 2235712 - RNA, 19 nt, Artificial Sequence
  Description of Artificial Sequence: Synthetic oligonucleotide
  Sense strand starting at position 2114 of SEQ ID NO: 1884042
cgguauauaaagcaugcua

SEQ ID NO: 2235713 - RNA, 19 nt, Artificial Sequence
  Description of Artificial Sequence: Synthetic oligonucleotide
  Antisense strand to SEQ ID NO: 2235712
uagcaugcuuuauauaccg

SEQ ID NO: 2235714 - RNA, 19 nt, Artificial Sequence
  Description of Artificial Sequence: Synthetic oligonucleotide
  Sense strand starting at position 2222 of SEQ ID NO: 1884042
gugacucaccuguaauucu

SEQ ID NO: 2235715 - RNA, 19 nt, Artificial Sequence
  Description of Artificial Sequence: Synthetic oligonucleotide
  Antisense strand to SEQ ID NO: 2235714
agaauuacaggugagucac

SEQ ID NO: 2235716 - RNA, 19 nt, Artificial Sequence
  Description of Artificial Sequence: Synthetic oligonucleotide
  Sense strand starting at position 2667 of SEQ ID NO: 1884042
aauaguaguccauggugca

SEQ ID NO: 2235717 - RNA, 19 nt, Artificial Sequence
  Description of Artificial Sequence: Synthetic oligonucleotide
  Antisense strand to SEQ ID NO: 2235716
ugcaccauggacuacuauu

SEQ ID NO: 2235718 - RNA, 19 nt, Artificial Sequence
  Description of Artificial Sequence: Synthetic oligonucleotide
  Sense strand starting at position 3126 of SEQ ID NO: 1884042
uuaagaauauuacuggucu

SEQ ID NO: 2235719 - RNA, 19 nt, Artificial Sequence
  Description of Artificial Sequence: Synthetic oligonucleotide
  Antisense strand to SEQ ID NO: 2235718
agaccaguaauauucuuaa

SEQ ID NO: 2235720 - RNA, 19 nt, Artificial Sequence
  Description of Artificial Sequence: Synthetic oligonucleotide
  Sense strand starting at position 3134 of SEQ ID NO: 1884042
auuacuggucuauauagca

SEQ ID NO: 2235721 - RNA, 19 nt, Artificial Sequence
  Description of Artificial Sequence: Synthetic oligonucleotide
  Antisense strand to SEQ ID NO: 2235720
ugcuauauagaccaguaau

SEQ ID NO: 2235722 - RNA, 19 nt, Artificial Sequence
  Description of Artificial Sequence: Synthetic oligonucleotide
  Sense strand starting at position 3208 of SEQ ID NO: 1884042
aguuaucuaucuuaagagc

SEQ ID NO: 2235723 - RNA, 19 nt, Artificial Sequence
  Description of Artificial Sequence: Synthetic oligonucleotide
  Antisense strand to SEQ ID NO: 2235722
gcucuuaagauagauaacu

SEQ ID NO: 2235724 - RNA, 19 nt, Artificial Sequence
  Description of Artificial Sequence: Synthetic oligonucleotide
  Sense strand starting at position 3568 of SEQ ID NO: 1884042
ucagcaacacuuugacagu

SEQ ID NO: 2235725 - RNA, 19 nt, Artificial Sequence
  Description of Artificial Sequence: Synthetic oligonucleotide
  Antisense strand to SEQ ID NO: 2235724
acugucaaaguguugcuga

SEQ ID NO: 2235726 - RNA, 19 nt, Artificial Sequence
  Description of Artificial Sequence: Synthetic oligonucleotide
  Sense strand starting at position 3583 of SEQ ID NO: 1884042
caguauggaugauuacaua

SEQ ID NO: 2235727 - RNA, 19 nt, Artificial Sequence
  Description of Artificial Sequence: Synthetic oligonucleotide
  Antisense strand to SEQ ID NO: 2235726
uauguaaucauccauacug

SEQ ID NO: 2235728 - RNA, 19 nt, Artificial Sequence
  Description of Artificial Sequence: Synthetic oligonucleotide
  Sense strand starting at position 3661 of SEQ ID NO: 1884042
cagcauaaucacggaagca

SEQ ID NO: 2235729 - RNA, 19 nt, Artificial Sequence
  Description of Artificial Sequence: Synthetic oligonucleotide
  Antisense strand to SEQ ID NO: 2235728
ugcuuccgugauuaugcug

SEQ ID NO: 2235730 - RNA, 19 nt, Artificial Sequence
  Description of Artificial Sequence: Synthetic oligonucleotide
  Sense strand starting at position 3760 of SEQ ID NO: 1884042
uuaagagaauuauggcuua

SEQ ID NO: 2235731 - RNA, 19 nt, Artificial Sequence
  Description of Artificial Sequence: Synthetic oligonucleotide
  Antisense strand to SEQ ID NO: 2235730
uaagccauaauucucuuaa

SEQ ID NO: 2235732 - RNA, 19 nt, Artificial Sequence
  Description of Artificial Sequence: Synthetic oligonucleotide
  Sense strand starting at position 3763 of SEQ ID NO: 1884042
agagaauuauggcuuauug

SEQ ID NO: 2235733 - RNA, 19 nt, Artificial Sequence
  Description of Artificial Sequence: Synthetic oligonucleotide
  Antisense strand to SEQ ID NO: 2235732
caauaagccauaauucucu

SEQ ID NO: 2235734 - RNA, 19 nt, Artificial Sequence
  Description of Artificial Sequence: Synthetic oligonucleotide
  Sense strand starting at position 3767 of SEQ ID NO: 1884042
aauuauggcuuauugagua

SEQ ID NO: 2235735 - RNA, 19 nt, Artificial Sequence
  Description of Artificial Sequence: Synthetic oligonucleotide
  Antisense strand to SEQ ID NO: 2235734
uacucaauaagccauaauu

SEQ ID NO: 2235736 - RNA, 19 nt, Artificial Sequence
  Description of Artificial Sequence: Synthetic oligonucleotide
  Sense strand starting at position 3779 of SEQ ID NO: 1884042
uugaguaugccgcaauccu

SEQ ID NO: 2235737 - RNA, 19 nt, Artificial Sequence
  Description of Artificial Sequence: Synthetic oligonucleotide
  Antisense strand to SEQ ID NO: 2235736
aggauugcggcauacucaa

SEQ ID NO: 2235738 - RNA, 19 nt, Artificial Sequence
  Description of Artificial Sequence: Synthetic oligonucleotide
  Sense strand starting at position 3929 of SEQ ID NO: 1884042
cuuuauaaauccuggaagu

SEQ ID NO: 2235739 - RNA, 19 nt, Artificial Sequence
  Description of Artificial Sequence: Synthetic oligonucleotide
  Antisense strand to SEQ ID NO: 2235738
acuuccaggauuuauaaag

SEQ ID NO: 2235740 - RNA, 19 nt, Artificial Sequence
  Description of Artificial Sequence: Synthetic oligonucleotide
  Sense strand starting at position 3930 of SEQ ID NO: 1884042
uuuauaaauccuggaaguu

SEQ ID NO: 2235741 - RNA, 19 nt, Artificial Sequence
  Description of Artificial Sequence: Synthetic oligonucleotide
  Antisense strand to SEQ ID NO: 2235740
aacuuccaggauuuauaaa

SEQ ID NO: 2235742 - RNA, 19 nt, Artificial Sequence
  Description of Artificial Sequence: Synthetic oligonucleotide
  Sense strand starting at position 3965 of SEQ ID NO: 1884042
cgugcugagcaugcuaauu

SEQ ID NO: 2235743 - RNA, 19 nt, Artificial Sequence
  Description of Artificial Sequence: Synthetic oligonucleotide
  Antisense strand to SEQ ID NO: 2235742
aauuagcaugcucagcacg

SEQ ID NO: 2235744 - RNA, 19 nt, Artificial Sequence
  Description of Artificial Sequence: Synthetic oligonucleotide
  Sense strand starting at position 3977 of SEQ ID NO: 1884042
gcuaauucccaguguccuu

SEQ ID NO: 2235745 - RNA, 19 nt, Artificial Sequence
  Description of Artificial Sequence: Synthetic oligonucleotide
  Antisense strand to SEQ ID NO: 2235744
aaggacacugggaauuagc

SEQ ID NO: 2235746 - RNA, 19 nt, Artificial Sequence
  Description of Artificial Sequence: Synthetic oligonucleotide
  Sense strand starting at position 3982 of SEQ ID NO: 1884042
uucccaguguccuuggaaa

SEQ ID NO: 2235747 - RNA, 19 nt, Artificial Sequence
  Description of Artificial Sequence: Synthetic oligonucleotide
  Antisense strand to SEQ ID NO: 2235746
uuuccaaggacacugggaa

SEQ ID NO: 2235748 - RNA, 19 nt, Artificial Sequence
  Description of Artificial Sequence: Synthetic oligonucleotide
  Sense strand starting at position 103 of SEQ ID NO: 1884044
ccuauauuugcaugucaug

SEQ ID NO: 2235749 - RNA, 19 nt, Artificial Sequence
  Description of Artificial Sequence: Synthetic oligonucleotide
  Antisense strand to SEQ ID NO: 2235748
caugacaugcaaauauagg

SEQ ID NO: 2235750 - RNA, 19 nt, Artificial Sequence
  Description of Artificial Sequence: Synthetic oligonucleotide
  Sense strand starting at position 136 of SEQ ID NO: 1884044
uuggacuuaugaguguaau

SEQ ID NO: 2235751 - RNA, 19 nt, Artificial Sequence
  Description of Artificial Sequence: Synthetic oligonucleotide
  Antisense strand to SEQ ID NO: 2235750
auuacacucauaaguccaa

SEQ ID NO: 2235752 - RNA, 19 nt, Artificial Sequence
  Description of Artificial Sequence: Synthetic oligonucleotide
  Sense strand starting at position 137 of SEQ ID NO: 1884044
uggacuuaugaguguaauc

SEQ ID NO: 2235753 - RNA, 19 nt, Artificial Sequence
  Description of Artificial Sequence: Synthetic oligonucleotide
  Antisense strand to SEQ ID NO: 2235752
gauuacacucauaagucca

SEQ ID NO: 2235754 - RNA, 19 nt, Artificial Sequence
  Description of Artificial Sequence: Synthetic oligonucleotide
  Sense strand starting at position 139 of SEQ ID NO: 1884044
gacuuaugaguguaaucuc

SEQ ID NO: 2235755 - RNA, 19 nt, Artificial Sequence
  Description of Artificial Sequence: Synthetic oligonucleotide
  Antisense strand to SEQ ID NO: 2235754
gagauuacacucauaaguc

SEQ ID NO: 2235756 - RNA, 19 nt, Artificial Sequence
  Description of Artificial Sequence: Synthetic oligonucleotide
  Sense strand starting at position 147 of SEQ ID NO: 1884044
aguguaaucucucuagaga

SEQ ID NO: 2235757 - RNA, 19 nt, Artificial Sequence
  Description of Artificial Sequence: Synthetic oligonucleotide
  Antisense strand to SEQ ID NO: 2235756
ucucuagagagauuacacu

SEQ ID NO: 2235758 - RNA, 19 nt, Artificial Sequence
  Description of Artificial Sequence: Synthetic oligonucleotide
  Sense strand starting at position 148 of SEQ ID NO: 1884044
guguaaucucucuagagag

SEQ ID NO: 2235759 - RNA, 19 nt, Artificial Sequence
  Description of Artificial Sequence: Synthetic oligonucleotide
  Antisense strand to SEQ ID NO: 2235758
cucucuagagagauuacac

SEQ ID NO: 2235760 - RNA, 19 nt, Artificial Sequence
  Description of Artificial Sequence: Synthetic oligonucleotide
  Sense strand starting at position 242 of SEQ ID NO: 1884044
gagcaauuuguguguaucu

SEQ ID NO: 2235761 - RNA, 19 nt, Artificial Sequence
  Description of Artificial Sequence: Synthetic oligonucleotide
  Antisense strand to SEQ ID NO: 2235760
agauacacacaaauugcuc

SEQ ID NO: 2235762 - RNA, 19 nt, Artificial Sequence
  Description of Artificial Sequence: Synthetic oligonucleotide
  Sense strand starting at position 244 of SEQ ID NO: 1884044
gcaauuuguguguaucuca

SEQ ID NO: 2235763 - RNA, 19 nt, Artificial Sequence
  Description of Artificial Sequence: Synthetic oligonucleotide
  Antisense strand to SEQ ID NO: 2235762
ugagauacacacaaauugc

SEQ ID NO: 2235764 - RNA, 19 nt, Artificial Sequence
  Description of Artificial Sequence: Synthetic oligonucleotide
  Sense strand starting at position 271 of SEQ ID NO: 1884044
auggaaauguggccaaaua

SEQ ID NO: 2235765 - RNA, 19 nt, Artificial Sequence
  Description of Artificial Sequence: Synthetic oligonucleotide
  Antisense strand to SEQ ID NO: 2235764
uauuuggccacauuuccau

SEQ ID NO: 2235766 - RNA, 19 nt, Artificial Sequence
  Description of Artificial Sequence: Synthetic oligonucleotide
  Sense strand starting at position 399 of SEQ ID NO: 1884044
ggguaacuugugcacugaa

SEQ ID NO: 2235767 - RNA, 19 nt, Artificial Sequence
  Description of Artificial Sequence: Synthetic oligonucleotide
  Antisense strand to SEQ ID NO: 2235766
uucagugcacaaguuaccc

SEQ ID NO: 2235768 - RNA, 19 nt, Artificial Sequence
  Description of Artificial Sequence: Synthetic oligonucleotide
  Sense strand starting at position 469 of SEQ ID NO: 1884044
cuugauuugccaugugcau

SEQ ID NO: 2235769 - RNA, 19 nt, Artificial Sequence
  Description of Artificial Sequence: Synthetic oligonucleotide
  Antisense strand to SEQ ID NO: 2235768
augcacauggcaaaucaag

SEQ ID NO: 2235770 - RNA, 19 nt, Artificial Sequence
  Description of Artificial Sequence: Synthetic oligonucleotide
  Sense strand starting at position 608 of SEQ ID NO: 1884044
aagugauuagaccauguuu

SEQ ID NO: 2235771 - RNA, 19 nt, Artificial Sequence
  Description of Artificial Sequence: Synthetic oligonucleotide
  Antisense strand to SEQ ID NO: 2235770
aaacauggucuaaucacuu

SEQ ID NO: 2235772 - RNA, 19 nt, Artificial Sequence
  Description of Artificial Sequence: Synthetic oligonucleotide
  Sense strand starting at position 610 of SEQ ID NO: 1884044
gugauuagaccauguuuag

SEQ ID NO: 2235773 - RNA, 19 nt, Artificial Sequence
  Description of Artificial Sequence: Synthetic oligonucleotide
  Antisense strand to SEQ ID NO: 2235772
cuaaacauggucuaaucac

SEQ ID NO: 2235774 - RNA, 19 nt, Artificial Sequence
  Description of Artificial Sequence: Synthetic oligonucleotide
  Sense strand starting at position 847 of SEQ ID NO: 1884044
auaucugucucauuagaug

SEQ ID NO: 2235775 - RNA, 19 nt, Artificial Sequence
  Description of Artificial Sequence: Synthetic oligonucleotide
  Antisense strand to SEQ ID NO: 2235774
caucuaaugagacagauau

SEQ ID NO: 2235776 - RNA, 19 nt, Artificial Sequence
  Description of Artificial Sequence: Synthetic oligonucleotide
  Sense strand starting at position 852 of SEQ ID NO: 1884044
ugucucauuagaugagaag

SEQ ID NO: 2235777 - RNA, 19 nt, Artificial Sequence
  Description of Artificial Sequence: Synthetic oligonucleotide
  Antisense strand to SEQ ID NO: 2235776
cuucucaucuaaugagaca

SEQ ID NO: 2235778 - RNA, 19 nt, Artificial Sequence
  Description of Artificial Sequence: Synthetic oligonucleotide
  Sense strand starting at position 1205 of SEQ ID NO: 1884044
gugcuuggaauauagcaaa

SEQ ID NO: 2235779 - RNA, 19 nt, Artificial Sequence
  Description of Artificial Sequence: Synthetic oligonucleotide
  Antisense strand to SEQ ID NO: 2235778
uuugcuauauuccaagcac

SEQ ID NO: 2235780 - RNA, 19 nt, Artificial Sequence
  Description of Artificial Sequence: Synthetic oligonucleotide
  Sense strand starting at position 1322 of SEQ ID NO: 1884044
cgcaauuuacacugcagau

SEQ ID NO: 2235781 - RNA, 19 nt, Artificial Sequence
  Description of Artificial Sequence: Synthetic oligonucleotide
  Antisense strand to SEQ ID NO: 2235780
aucugcaguguaaauugcg

SEQ ID NO: 2235782 - RNA, 19 nt, Artificial Sequence
  Description of Artificial Sequence: Synthetic oligonucleotide
  Sense strand starting at position 1431 of SEQ ID NO: 1884044
gggaaacauuaucucgguu

SEQ ID NO: 2235783 - RNA, 19 nt, Artificial Sequence
  Description of Artificial Sequence: Synthetic oligonucleotide
  Antisense strand to SEQ ID NO: 2235782
aaccgagauaauguuuccc

SEQ ID NO: 2235784 - RNA, 19 nt, Artificial Sequence
  Description of Artificial Sequence: Synthetic oligonucleotide
  Sense strand starting at position 1468 of SEQ ID NO: 1884044
ccacgaauggcccagagau

SEQ ID NO: 2235785 - RNA, 19 nt, Artificial Sequence
  Description of Artificial Sequence: Synthetic oligonucleotide
  Antisense strand to SEQ ID NO: 2235784
aucucugggccauucgugg

SEQ ID NO: 2235786 - RNA, 19 nt, Artificial Sequence
  Description of Artificial Sequence: Synthetic oligonucleotide
  Sense strand starting at position 1481 of SEQ ID NO: 1884044
agagaucauguuugguuua

SEQ ID NO: 2235787 - RNA, 19 nt, Artificial Sequence
  Description of Artificial Sequence: Synthetic oligonucleotide
  Antisense strand to SEQ ID NO: 2235786
uaaaccaaacaugaucucu

SEQ ID NO: 2235788 - RNA, 19 nt, Artificial Sequence
  Description of Artificial Sequence: Synthetic oligonucleotide
  Sense strand starting at position 1546 of SEQ ID NO: 1884044
aguguuaaugcaugaaaga

SEQ ID NO: 2235789 - RNA, 19 nt, Artificial Sequence
  Description of Artificial Sequence: Synthetic oligonucleotide
  Antisense strand to SEQ ID NO: 2235788
ucuuucaugcauuaacacu

SEQ ID NO: 2235790 - RNA, 19 nt, Artificial Sequence
  Description of Artificial Sequence: Synthetic oligonucleotide
  Sense strand starting at position 1547 of SEQ ID NO: 1884044
guguuaaugcaugaaagau

SEQ ID NO: 2235791 - RNA, 19 nt, Artificial Sequence
  Description of Artificial Sequence: Synthetic oligonucleotide
  Antisense strand to SEQ ID NO: 2235790
aucuuucaugcauuaacac

SEQ ID NO: 2235792 - RNA, 19 nt, Artificial Sequence
  Description of Artificial Sequence: Synthetic oligonucleotide
  Sense strand starting at position 1569 of SEQ ID NO: 1884044
uuacauauggccuacuagu

SEQ ID NO: 2235793 - RNA, 19 nt, Artificial Sequence
  Description of Artificial Sequence: Synthetic oligonucleotide
  Antisense strand to SEQ ID NO: 2235792
acuaguaggccauauguaa

SEQ ID NO: 2235794 - RNA, 19 nt, Artificial Sequence
  Description of Artificial Sequence: Synthetic oligonucleotide
  Sense strand starting at position 1861 of SEQ ID NO: 1884044
uucuguucccaccagagga

SEQ ID NO: 2235795 - RNA, 19 nt, Artificial Sequence
  Description of Artificial Sequence: Synthetic oligonucleotide
  Antisense strand to SEQ ID NO: 2235794
uccucuggugggaacagaa

SEQ ID NO: 2235796 - RNA, 19 nt, Artificial Sequence
  Description of Artificial Sequence: Synthetic oligonucleotide
  Sense strand starting at position 2149 of SEQ ID NO: 1884044
ggucacagaccuuauaagu

SEQ ID NO: 2235797 - RNA, 19 nt, Artificial Sequence
  Description of Artificial Sequence: Synthetic oligonucleotide
  Antisense strand to SEQ ID NO: 2235796
acuuauaaggucugugacc

SEQ ID NO: 2235798 - RNA, 19 nt, Artificial Sequence
  Description of Artificial Sequence: Synthetic oligonucleotide
  Sense strand starting at position 2350 of SEQ ID NO: 1884044
agcggaauccaggguaaau

SEQ ID NO: 2235799 - RNA, 19 nt, Artificial Sequence
  Description of Artificial Sequence: Synthetic oligonucleotide
  Antisense strand to SEQ ID NO: 2235798
auuuacccuggauuccgcu

SEQ ID NO: 2235800 - RNA, 19 nt, Artificial Sequence
  Description of Artificial Sequence: Synthetic oligonucleotide
  Sense strand starting at position 2405 of SEQ ID NO: 1884044
aguggucuugggcaagauu

SEQ ID NO: 2235801 - RNA, 19 nt, Artificial Sequence
  Description of Artificial Sequence: Synthetic oligonucleotide
  Antisense strand to SEQ ID NO: 2235800
aaucuugcccaagaccacu

SEQ ID NO: 2235802 - RNA, 19 nt, Artificial Sequence
  Description of Artificial Sequence: Synthetic oligonucleotide
  Sense strand starting at position 2408 of SEQ ID NO: 1884044
ggucuugggcaagauuacu

SEQ ID NO: 2235803 - RNA, 19 nt, Artificial Sequence
  Description of Artificial Sequence: Synthetic oligonucleotide
  Antisense strand to SEQ ID NO: 2235802
aguaaucuugcccaagacc

SEQ ID NO: 2235804 - RNA, 19 nt, Artificial Sequence
  Description of Artificial Sequence: Synthetic oligonucleotide
  Sense strand starting at position 2506 of SEQ ID NO: 1884044
gagauaaucccuugaaugu

SEQ ID NO: 2235805 - RNA, 19 nt, Artificial Sequence
  Description of Artificial Sequence: Synthetic oligonucleotide
  Antisense strand to SEQ ID NO: 2235804
acauucaagggauuaucuc

SEQ ID NO: 2235806 - RNA, 19 nt, Artificial Sequence
  Description of Artificial Sequence: Synthetic oligonucleotide
  Sense strand starting at position 2899 of SEQ ID NO: 1884044
auuggaaccuggguuugau

SEQ ID NO: 2235807 - RNA, 19 nt, Artificial Sequence
  Description of Artificial Sequence: Synthetic oligonucleotide
  Antisense strand to SEQ ID NO: 2235806
aucaaacccagguuccaau

SEQ ID NO: 2235808 - RNA, 19 nt, Artificial Sequence
  Description of Artificial Sequence: Synthetic oligonucleotide
  Sense strand starting at position 2908 of SEQ ID NO: 1884044
uggguuugauucccagauu

SEQ ID NO: 2235809 - RNA, 19 nt, Artificial Sequence
  Description of Artificial Sequence: Synthetic oligonucleotide
  Antisense strand to SEQ ID NO: 2235808
aaucugggaaucaaaccca

SEQ ID NO: 2235810 - RNA, 19 nt, Artificial Sequence
  Description of Artificial Sequence: Synthetic oligonucleotide
  Sense strand starting at position 2911 of SEQ ID NO: 1884044
guuugauucccagauuaug

SEQ ID NO: 2235811 - RNA, 19 nt, Artificial Sequence
  Description of Artificial Sequence: Synthetic oligonucleotide
  Antisense strand to SEQ ID NO: 2235810
cauaaucugggaaucaaac

SEQ ID NO: 2235812 - RNA, 19 nt, Artificial Sequence
  Description of Artificial Sequence: Synthetic oligonucleotide
  Sense strand starting at position 2922 of SEQ ID NO: 1884044
agauuauggcagggaaggu

SEQ ID NO: 2235813 - RNA, 19 nt, Artificial Sequence
  Description of Artificial Sequence: Synthetic oligonucleotide
  Antisense strand to SEQ ID NO: 2235812
accuucccugccauaaucu

SEQ ID NO: 2235814 - RNA, 19 nt, Artificial Sequence
  Description of Artificial Sequence: Synthetic oligonucleotide
  Sense strand starting at position 2932 of SEQ ID NO: 1884044
agggaagguaauuggcauu

SEQ ID NO: 2235815 - RNA, 19 nt, Artificial Sequence
  Description of Artificial Sequence: Synthetic oligonucleotide
  Antisense strand to SEQ ID NO: 2235814
aaugccaauuaccuucccu

SEQ ID NO: 2235816 - RNA, 19 nt, Artificial Sequence
  Description of Artificial Sequence: Synthetic oligonucleotide
  Sense strand starting at position 2938 of SEQ ID NO: 1884044
gguaauuggcauugauuga

SEQ ID NO: 2235817 - RNA, 19 nt, Artificial Sequence
  Description of Artificial Sequence: Synthetic oligonucleotide
  Antisense strand to SEQ ID NO: 2235816
ucaaucaaugccaauuacc

SEQ ID NO: 2235818 - RNA, 19 nt, Artificial Sequence
  Description of Artificial Sequence: Synthetic oligonucleotide
  Sense strand starting at position 2939 of SEQ ID NO: 1884044
guaauuggcauugauugau

SEQ ID NO: 2235819 - RNA, 19 nt, Artificial Sequence
  Description of Artificial Sequence: Synthetic oligonucleotide
  Antisense strand to SEQ ID NO: 2235818
aucaaucaaugccaauuac

SEQ ID NO: 2235820 - RNA, 19 nt, Artificial Sequence
  Description of Artificial Sequence: Synthetic oligonucleotide
  Sense strand starting at position 2942 of SEQ ID NO: 1884044
auuggcauugauugaucau

SEQ ID NO: 2235821 - RNA, 19 nt, Artificial Sequence
  Description of Artificial Sequence: Synthetic oligonucleotide
  Antisense strand to SEQ ID NO: 2235820
augaucaaucaaugccaau

SEQ ID NO: 2235822 - RNA, 19 nt, Artificial Sequence
  Description of Artificial Sequence: Synthetic oligonucleotide
  Sense strand starting at position 2945 of SEQ ID NO: 1884044
ggcauugauugaucaucua

SEQ ID NO: 2235823 - RNA, 19 nt, Artificial Sequence
  Description of Artificial Sequence: Synthetic oligonucleotide
  Antisense strand to SEQ ID NO: 2235822
uagaugaucaaucaaugcc

SEQ ID NO: 2235824 - RNA, 19 nt, Artificial Sequence
  Description of Artificial Sequence: Synthetic oligonucleotide
  Sense strand starting at position 3031 of SEQ ID NO: 1884044
cucugauuugaacgcaagu

SEQ ID NO: 2235825 - RNA, 19 nt, Artificial Sequence
  Description of Artificial Sequence: Synthetic oligonucleotide
  Antisense strand to SEQ ID NO: 2235824
acuugcguucaaaucagag

SEQ ID NO: 2235826 - RNA, 19 nt, Artificial Sequence
  Description of Artificial Sequence: Synthetic oligonucleotide
  Sense strand starting at position 3125 of SEQ ID NO: 1884044
guuuguguccugagcgaug

SEQ ID NO: 2235827 - RNA, 19 nt, Artificial Sequence
  Description of Artificial Sequence: Synthetic oligonucleotide
  Antisense strand to SEQ ID NO: 2235826
caucgcucaggacacaaac

SEQ ID NO: 2235828 - RNA, 19 nt, Artificial Sequence
  Description of Artificial Sequence: Synthetic oligonucleotide
  Sense strand starting at position 7 of SEQ ID NO: 1884043
uggcauggaauccauguua

SEQ ID NO: 2235829 - RNA, 19 nt, Artificial Sequence
  Description of Artificial Sequence: Synthetic oligonucleotide
  Antisense strand to SEQ ID NO: 2235828
uaacauggauuccaugcca

SEQ ID NO: 2235830 - RNA, 19 nt, Artificial Sequence
  Description of Artificial Sequence: Synthetic oligonucleotide
  Sense strand starting at position 136 of SEQ ID NO: 1884043
ccuauauuugcaugucaug

SEQ ID NO: 2235831 - RNA, 19 nt, Artificial Sequence
  Description of Artificial Sequence: Synthetic oligonucleotide
  Antisense strand to SEQ ID NO: 2235830
caugacaugcaaauauagg

SEQ ID NO: 2235832 - RNA, 19 nt, Artificial Sequence
  Description of Artificial Sequence: Synthetic oligonucleotide
  Sense strand starting at position 169 of SEQ ID NO: 1884043
uuggacuuaugaguguaau

SEQ ID NO: 2235833 - RNA, 19 nt, Artificial Sequence
  Description of Artificial Sequence: Synthetic oligonucleotide
  Antisense strand to SEQ ID NO: 2235832
auuacacucauaaguccaa

SEQ ID NO: 2235834 - RNA, 19 nt, Artificial Sequence
  Description of Artificial Sequence: Synthetic oligonucleotide
  Sense strand starting at position 170 of SEQ ID NO: 1884043
uggacuuaugaguguaauc

SEQ ID NO: 2235835 - RNA, 19 nt, Artificial Sequence
  Description of Artificial Sequence: Synthetic oligonucleotide
  Antisense strand to SEQ ID NO: 2235834
gauuacacucauaagucca

SEQ ID NO: 2235836 - RNA, 19 nt, Artificial Sequence
  Description of Artificial Sequence: Synthetic oligonucleotide
  Sense strand starting at position 172 of SEQ ID NO: 1884043
gacuuaugaguguaaucuc

SEQ ID NO: 2235837 - RNA, 19 nt, Artificial Sequence
  Description of Artificial Sequence: Synthetic oligonucleotide
  Antisense strand to SEQ ID NO: 2235836
gagauuacacucauaaguc

SEQ ID NO: 2235838 - RNA, 19 nt, Artificial Sequence
  Description of Artificial Sequence: Synthetic oligonucleotide
  Sense strand starting at position 180 of SEQ ID NO: 1884043
aguguaaucucucuagaga

SEQ ID NO: 2235839 - RNA, 19 nt, Artificial Sequence
  Description of Artificial Sequence: Synthetic oligonucleotide
  Antisense strand to SEQ ID NO: 2235838
ucucuagagagauuacacu

SEQ ID NO: 2235840 - RNA, 19 nt, Artificial Sequence
  Description of Artificial Sequence: Synthetic oligonucleotide
  Sense strand starting at position 181 of SEQ ID NO: 1884043
guguaaucucucuagagag

SEQ ID NO: 2235841 - RNA, 19 nt, Artificial Sequence
  Description of Artificial Sequence: Synthetic oligonucleotide
  Antisense strand to SEQ ID NO: 2235840
cucucuagagagauuacac

SEQ ID NO: 2235842 - RNA, 19 nt, Artificial Sequence
  Description of Artificial Sequence: Synthetic oligonucleotide
  Sense strand starting at position 275 of SEQ ID NO: 1884043
gagcaauuuguguguaucu

SEQ ID NO: 2235843 - RNA, 19 nt, Artificial Sequence
  Description of Artificial Sequence: Synthetic oligonucleotide
  Antisense strand to SEQ ID NO: 2235842
agauacacacaaauugcuc

SEQ ID NO: 2235844 - RNA, 19 nt, Artificial Sequence
  Description of Artificial Sequence: Synthetic oligonucleotide
  Sense strand starting at position 277 of SEQ ID NO: 1884043
gcaauuuguguguaucuca

SEQ ID NO: 2235845 - RNA, 19 nt, Artificial Sequence
  Description of Artificial Sequence: Synthetic oligonucleotide
  Antisense strand to SEQ ID NO: 2235844
ugagauacacacaaauugc

SEQ ID NO: 2235846 - RNA, 19 nt, Artificial Sequence
  Description of Artificial Sequence: Synthetic oligonucleotide
  Sense strand starting at position 304 of SEQ ID NO: 1884043
auggaaauguggccaaaua

SEQ ID NO: 2235847 - RNA, 19 nt, Artificial Sequence
  Description of Artificial Sequence: Synthetic oligonucleotide
  Antisense strand to SEQ ID NO: 2235846
uauuuggccacauuuccau

SEQ ID NO: 2235848 - RNA, 19 nt, Artificial Sequence
  Description of Artificial Sequence: Synthetic oligonucleotide
  Sense strand starting at position 432 of SEQ ID NO: 1884043
ggguaacuugugcacugaa

SEQ ID NO: 2235849 - RNA, 19 nt, Artificial Sequence
  Description of Artificial Sequence: Synthetic oligonucleotide
  Antisense strand to SEQ ID NO: 2235848
uucagugcacaaguuaccc

SEQ ID NO: 2235850 - RNA, 19 nt, Artificial Sequence
  Description of Artificial Sequence: Synthetic oligonucleotide
  Sense strand starting at position 502 of SEQ ID NO: 1884043
cuugauuugccaugugcau

SEQ ID NO: 2235851 - RNA, 19 nt, Artificial Sequence
  Description of Artificial Sequence: Synthetic oligonucleotide
  Antisense strand to SEQ ID NO: 2235850
augcacauggcaaaucaag

SEQ ID NO: 2235852 - RNA, 19 nt, Artificial Sequence
  Description of Artificial Sequence: Synthetic oligonucleotide
  Sense strand starting at position 641 of SEQ ID NO: 1884043
aagugauuagaccauguuu

SEQ ID NO: 2235853 - RNA, 19 nt, Artificial Sequence
  Description of Artificial Sequence: Synthetic oligonucleotide
  Antisense strand to SEQ ID NO: 2235852
aaacauggucuaaucacuu

SEQ ID NO: 2235854 - RNA, 19 nt, Artificial Sequence
  Description of Artificial Sequence: Synthetic oligonucleotide
  Sense strand starting at position 643 of SEQ ID NO: 1884043
gugauuagaccauguuuag

SEQ ID NO: 2235855 - RNA, 19 nt, Artificial Sequence
  Description of Artificial Sequence: Synthetic oligonucleotide
  Antisense strand to SEQ ID NO: 2235854
cuaaacauggucuaaucac

SEQ ID NO: 2235856 - RNA, 19 nt, Artificial Sequence
  Description of Artificial Sequence: Synthetic oligonucleotide
  Sense strand starting at position 880 of SEQ ID NO: 1884043
auaucugucucauuagaug

SEQ ID NO: 2235857 - RNA, 19 nt, Artificial Sequence
  Description of Artificial Sequence: Synthetic oligonucleotide
  Antisense strand to SEQ ID NO: 2235856
caucuaaugagacagauau

SEQ ID NO: 2235858 - RNA, 19 nt, Artificial Sequence
  Description of Artificial Sequence: Synthetic oligonucleotide
  Sense strand starting at position 885 of SEQ ID NO: 1884043
ugucucauuagaugagaag

SEQ ID NO: 2235859 - RNA, 19 nt, Artificial Sequence
  Description of Artificial Sequence: Synthetic oligonucleotide
  Antisense strand to SEQ ID NO: 2235858
cuucucaucuaaugagaca

SEQ ID NO: 2235860 - RNA, 19 nt, Artificial Sequence
  Description of Artificial Sequence: Synthetic oligonucleotide
  Sense strand starting at position 1238 of SEQ ID NO: 1884043
gugcuuggaauauagcaaa

SEQ ID NO: 2235861 - RNA, 19 nt, Artificial Sequence
  Description of Artificial Sequence: Synthetic oligonucleotide
  Antisense strand to SEQ ID NO: 2235860
uuugcuauauuccaagcac

SEQ ID NO: 2235862 - RNA, 19 nt, Artificial Sequence
  Description of Artificial Sequence: Synthetic oligonucleotide
  Sense strand starting at position 1355 of SEQ ID NO: 1884043
cgcaauuuacacugcagau

SEQ ID NO: 2235863 - RNA, 19 nt, Artificial Sequence
  Description of Artificial Sequence: Synthetic oligonucleotide
  Antisense strand to SEQ ID NO: 2235862
aucugcaguguaaauugcg

SEQ ID NO: 2235864 - RNA, 19 nt, Artificial Sequence
  Description of Artificial Sequence: Synthetic oligonucleotide
  Sense strand starting at position 1464 of SEQ ID NO: 1884043
gggaaacauuaucucgguu

SEQ ID NO: 2235865 - RNA, 19 nt, Artificial Sequence
  Description of Artificial Sequence: Synthetic oligonucleotide
  Antisense strand to SEQ ID NO: 2235864
aaccgagauaauguuuccc

SEQ ID NO: 2235866 - RNA, 19 nt, Artificial Sequence
  Description of Artificial Sequence: Synthetic oligonucleotide
  Sense strand starting at position 1501 of SEQ ID NO: 1884043
ccacgaauggcccagagau

SEQ ID NO: 2235867 - RNA, 19 nt, Artificial Sequence
  Description of Artificial Sequence: Synthetic oligonucleotide
  Antisense strand to SEQ ID NO: 2235866
aucucugggccauucgugg

SEQ ID NO: 2235868 - RNA, 19 nt, Artificial Sequence
  Description of Artificial Sequence: Synthetic oligonucleotide
  Sense strand starting at position 1514 of SEQ ID NO: 1884043
agagaucauguuugguuua

SEQ ID NO: 2235869 - RNA, 19 nt, Artificial Sequence
  Description of Artificial Sequence: Synthetic oligonucleotide
  Antisense strand to SEQ ID NO: 2235868
uaaaccaaacaugaucucu

SEQ ID NO: 2235870 - RNA, 19 nt, Artificial Sequence
  Description of Artificial Sequence: Synthetic oligonucleotide
  Sense strand starting at position 1579 of SEQ ID NO: 1884043
aguguuaaugcaugaaaga

SEQ ID NO: 2235871 - RNA, 19 nt, Artificial Sequence
  Description of Artificial Sequence: Synthetic oligonucleotide
  Antisense strand to SEQ ID NO: 2235870
ucuuucaugcauuaacacu

SEQ ID NO: 2235872 - RNA, 19 nt, Artificial Sequence
  Description of Artificial Sequence: Synthetic oligonucleotide
  Sense strand starting at position 1580 of SEQ ID NO: 1884043
guguuaaugcaugaaagau

SEQ ID NO: 2235873 - RNA, 19 nt, Artificial Sequence
  Description of Artificial Sequence: Synthetic oligonucleotide
  Antisense strand to SEQ ID NO: 2235872
aucuuucaugcauuaacac

SEQ ID NO: 2235874 - RNA, 19 nt, Artificial Sequence
  Description of Artificial Sequence: Synthetic oligonucleotide
  Sense strand starting at position 1602 of SEQ ID NO: 1884043
uuacauauggccuacuagu

SEQ ID NO: 2235875 - RNA, 19 nt, Artificial Sequence
  Description of Artificial Sequence: Synthetic oligonucleotide
  Antisense strand to SEQ ID NO: 2235874
acuaguaggccauauguaa

SEQ ID NO: 2235876 - RNA, 19 nt, Artificial Sequence
  Description of Artificial Sequence: Synthetic oligonucleotide
  Sense strand starting at position 1894 of SEQ ID NO: 1884043
uucuguucccaccagagga

SEQ ID NO: 2235877 - RNA, 19 nt, Artificial Sequence
  Description of Artificial Sequence: Synthetic oligonucleotide
  Antisense strand to SEQ ID NO: 2235876
uccucuggugggaacagaa

SEQ ID NO: 2235878 - RNA, 19 nt, Artificial Sequence
  Description of Artificial Sequence: Synthetic oligonucleotide
  Sense strand starting at position 2182 of SEQ ID NO: 1884043
ggucacagaccuuauaagu

SEQ ID NO: 2235879 - RNA, 19 nt, Artificial Sequence
  Description of Artificial Sequence: Synthetic oligonucleotide
  Antisense strand to SEQ ID NO: 2235878
acuuauaaggucugugacc

SEQ ID NO: 2235880 - RNA, 19 nt, Artificial Sequence
  Description of Artificial Sequence: Synthetic oligonucleotide
  Sense strand starting at position 2383 of SEQ ID NO: 1884043
agcggaauccaggguaaau

SEQ ID NO: 2235881 - RNA, 19 nt, Artificial Sequence
  Description of Artificial Sequence: Synthetic oligonucleotide
  Antisense strand to SEQ ID NO: 2235880
auuuacccuggauuccgcu

SEQ ID NO: 2235882 - RNA, 19 nt, Artificial Sequence
  Description of Artificial Sequence: Synthetic oligonucleotide
  Sense strand starting at position 2438 of SEQ ID NO: 1884043
aguggucuugggcaagauu

SEQ ID NO: 2235883 - RNA, 19 nt, Artificial Sequence
  Description of Artificial Sequence: Synthetic oligonucleotide
  Antisense strand to SEQ ID NO: 2235882
aaucuugcccaagaccacu

SEQ ID NO: 2235884 - RNA, 19 nt, Artificial Sequence
  Description of Artificial Sequence: Synthetic oligonucleotide
  Sense strand starting at position 2441 of SEQ ID NO: 1884043
ggucuugggcaagauuacu

SEQ ID NO: 2235885 - RNA, 19 nt, Artificial Sequence
  Description of Artificial Sequence: Synthetic oligonucleotide
  Antisense strand to SEQ ID NO: 2235884
aguaaucuugcccaagacc

SEQ ID NO: 2235886 - RNA, 19 nt, Artificial Sequence
  Description of Artificial Sequence: Synthetic oligonucleotide
  Sense strand starting at position 2539 of SEQ ID NO: 1884043
gagauaaucccuugaaugu

SEQ ID NO: 2235887 - RNA, 19 nt, Artificial Sequence
  Description of Artificial Sequence: Synthetic oligonucleotide
  Antisense strand to SEQ ID NO: 2235886
acauucaagggauuaucuc

SEQ ID NO: 2235888 - RNA, 19 nt, Artificial Sequence
  Description of Artificial Sequence: Synthetic oligonucleotide
  Sense strand starting at position 2932 of SEQ ID NO: 1884043
auuggaaccuggguuugau

SEQ ID NO: 2235889 - RNA, 19 nt, Artificial Sequence
  Description of Artificial Sequence: Synthetic oligonucleotide
  Antisense strand to SEQ ID NO: 2235888
aucaaacccagguuccaau

SEQ ID NO: 2235890 - RNA, 19 nt, Artificial Sequence
  Description of Artificial Sequence: Synthetic oligonucleotide
  Sense strand starting at position 2941 of SEQ ID NO: 1884043
uggguuugauucccagauu

SEQ ID NO: 2235891 - RNA, 19 nt, Artificial Sequence
  Description of Artificial Sequence: Synthetic oligonucleotide
  Antisense strand to SEQ ID NO: 2235890
aaucugggaaucaaaccca

SEQ ID NO: 2235892 - RNA, 19 nt, Artificial Sequence
  Description of Artificial Sequence: Synthetic oligonucleotide
  Sense strand starting at position 2944 of SEQ ID NO: 1884043
guuugauucccagauuaug

SEQ ID NO: 2235893 - RNA, 19 nt, Artificial Sequence
  Description of Artificial Sequence: Synthetic oligonucleotide
  Antisense strand to SEQ ID NO: 2235892
cauaaucugggaaucaaac

SEQ ID NO: 2235894 - RNA, 19 nt, Artificial Sequence
  Description of Artificial Sequence: Synthetic oligonucleotide
  Sense strand starting at position 2955 of SEQ ID NO: 1884043
agauuauggcagggaaggu

SEQ ID NO: 2235895 - RNA, 19 nt, Artificial Sequence
  Description of Artificial Sequence: Synthetic oligonucleotide
  Antisense strand to SEQ ID NO: 2235894
accuucccugccauaaucu

SEQ ID NO: 2235896 - RNA, 19 nt, Artificial Sequence
  Description of Artificial Sequence: Synthetic oligonucleotide
  Sense strand starting at position 2965 of SEQ ID NO: 1884043
agggaagguaauuggcauu

SEQ ID NO: 2235897 - RNA, 19 nt, Artificial Sequence
  Description of Artificial Sequence: Synthetic oligonucleotide
  Antisense strand to SEQ ID NO: 2235896
aaugccaauuaccuucccu

SEQ ID NO: 2235898 - RNA, 19 nt, Artificial Sequence
  Description of Artificial Sequence: Synthetic oligonucleotide
  Sense strand starting at position 2971 of SEQ ID NO: 1884043
gguaauuggcauugauuga

SEQ ID NO: 2235899 - RNA, 19 nt, Artificial Sequence
  Description of Artificial Sequence: Synthetic oligonucleotide
  Antisense strand to SEQ ID NO: 2235898
ucaaucaaugccaauuacc

SEQ ID NO: 2235900 - RNA, 19 nt, Artificial Sequence
  Description of Artificial Sequence: Synthetic oligonucleotide
  Sense strand starting at position 2972 of SEQ ID NO: 1884043
guaauuggcauugauugau

SEQ ID NO: 2235901 - RNA, 19 nt, Artificial Sequence
  Description of Artificial Sequence: Synthetic oligonucleotide
  Antisense strand to SEQ ID NO: 2235900
aucaaucaaugccaauuac

SEQ ID NO: 2235902 - RNA, 19 nt, Artificial Sequence
  Description of Artificial Sequence: Synthetic oligonucleotide
  Sense strand starting at position 2975 of SEQ ID NO: 1884043
auuggcauugauugaucau

SEQ ID NO: 2235903 - RNA, 19 nt, Artificial Sequence
  Description of Artificial Sequence: Synthetic oligonucleotide
  Antisense strand to SEQ ID NO: 2235902
augaucaaucaaugccaau

SEQ ID NO: 2235904 - RNA, 19 nt, Artificial Sequence
  Description of Artificial Sequence: Synthetic oligonucleotide
  Sense strand starting at position 2978 of SEQ ID NO: 1884043
ggcauugauugaucaucua

SEQ ID NO: 2235905 - RNA, 19 nt, Artificial Sequence
  Description of Artificial Sequence: Synthetic oligonucleotide
  Antisense strand to SEQ ID NO: 2235904
uagaugaucaaucaaugcc

SEQ ID NO: 2235906 - RNA, 19 nt, Artificial Sequence
  Description of Artificial Sequence: Synthetic oligonucleotide
  Sense strand starting at position 3064 of SEQ ID NO: 1884043
cucugauuugaacgcaagu

SEQ ID NO: 2235907 - RNA, 19 nt, Artificial Sequence
  Description of Artificial Sequence: Synthetic oligonucleotide
  Antisense strand to SEQ ID NO: 2235906
acuugcguucaaaucagag

SEQ ID NO: 2235908 - RNA, 19 nt, Artificial Sequence
  Description of Artificial Sequence: Synthetic oligonucleotide
  Sense strand starting at position 293 of SEQ ID NO: 1884045
uguggaucuaucuggaagu

SEQ ID NO: 2235909 - RNA, 19 nt, Artificial Sequence
  Description of Artificial Sequence: Synthetic oligonucleotide
  Antisense strand to SEQ ID NO: 2235908
acuuccagauagauccaca

SEQ ID NO: 2235910 - RNA, 19 nt, Artificial Sequence
  Description of Artificial Sequence: Synthetic oligonucleotide
  Sense strand starting at position 294 of SEQ ID NO: 1884045
guggaucuaucuggaagug

SEQ ID NO: 2235911 - RNA, 19 nt, Artificial Sequence
  Description of Artificial Sequence: Synthetic oligonucleotide
  Antisense strand to SEQ ID NO: 2235910
cacuuccagauagauccac

SEQ ID NO: 2235912 - RNA, 19 nt, Artificial Sequence
  Description of Artificial Sequence: Synthetic oligonucleotide
  Sense strand starting at position 310 of SEQ ID NO: 1884045
gugcgaaauugguuccucu

SEQ ID NO: 2235913 - RNA, 19 nt, Artificial Sequence
  Description of Artificial Sequence: Synthetic oligonucleotide
  Antisense strand to SEQ ID NO: 2235912
agaggaaccaauuucgcac

SEQ ID NO: 2235914 - RNA, 19 nt, Artificial Sequence
  Description of Artificial Sequence: Synthetic oligonucleotide
  Sense strand starting at position 313 of SEQ ID NO: 1884045
cgaaauugguuccucuuaa

SEQ ID NO: 2235915 - RNA, 19 nt, Artificial Sequence
  Description of Artificial Sequence: Synthetic oligonucleotide
  Antisense strand to SEQ ID NO: 2235914
uuaagaggaaccaauuucg

SEQ ID NO: 2235916 - RNA, 19 nt, Artificial Sequence
  Description of Artificial Sequence: Synthetic oligonucleotide
  Sense strand starting at position 317 of SEQ ID NO: 1884045
auugguuccucuuaaagag

SEQ ID NO: 2235917 - RNA, 19 nt, Artificial Sequence
  Description of Artificial Sequence: Synthetic oligonucleotide
  Antisense strand to SEQ ID NO: 2235916
cucuuuaagaggaaccaau

SEQ ID NO: 2235918 - RNA, 19 nt, Artificial Sequence
  Description of Artificial Sequence: Synthetic oligonucleotide
  Sense strand starting at position 445 of SEQ ID NO: 1884045
cacaauugauguuggaaua

SEQ ID NO: 2235919 - RNA, 19 nt, Artificial Sequence
  Description of Artificial Sequence: Synthetic oligonucleotide
  Antisense strand to SEQ ID NO: 2235918
uauuccaacaucaauugug

SEQ ID NO: 2235920 - RNA, 19 nt, Artificial Sequence
  Description of Artificial Sequence: Synthetic oligonucleotide
  Sense strand starting at position 446 of SEQ ID NO: 1884045
acaauugauguuggaauau

SEQ ID NO: 2235921 - RNA, 19 nt, Artificial Sequence
  Description of Artificial Sequence: Synthetic oligonucleotide
  Antisense strand to SEQ ID NO: 2235920
auauuccaacaucaauugu

SEQ ID NO: 2235922 - RNA, 19 nt, Artificial Sequence
  Description of Artificial Sequence: Synthetic oligonucleotide
  Sense strand starting at position 455 of SEQ ID NO: 1884045
guuggaauauuauaagaga

SEQ ID NO: 2235923 - RNA, 19 nt, Artificial Sequence
  Description of Artificial Sequence: Synthetic oligonucleotide
  Antisense strand to SEQ ID NO: 2235922
ucucuuauaauauuccaac

SEQ ID NO: 2235924 - RNA, 19 nt, Artificial Sequence
  Description of Artificial Sequence: Synthetic oligonucleotide
  Sense strand starting at position 458 of SEQ ID NO: 1884045
ggaauauuauaagagauac

SEQ ID NO: 2235925 - RNA, 19 nt, Artificial Sequence
  Description of Artificial Sequence: Synthetic oligonucleotide
  Antisense strand to SEQ ID NO: 2235924
guaucucuuauaauauucc

SEQ ID NO: 2235926 - RNA, 19 nt, Artificial Sequence
  Description of Artificial Sequence: Synthetic oligonucleotide
  Sense strand starting at position 494 of SEQ ID NO: 1884045
ccuauuaagugcucugugu

SEQ ID NO: 2235927 - RNA, 19 nt, Artificial Sequence
  Description of Artificial Sequence: Synthetic oligonucleotide
  Antisense strand to SEQ ID NO: 2235926
acacagagcacuuaauagg

SEQ ID NO: 2235928 - RNA, 19 nt, Artificial Sequence
  Description of Artificial Sequence: Synthetic oligonucleotide
  Sense strand starting at position 498 of SEQ ID NO: 1884045
uuaagugcucugugugcuu

SEQ ID NO: 2235929 - RNA, 19 nt, Artificial Sequence
  Description of Artificial Sequence: Synthetic oligonucleotide
  Antisense strand to SEQ ID NO: 2235928
aagcacacagagcacuuaa

SEQ ID NO: 2235930 - RNA, 19 nt, Artificial Sequence
  Description of Artificial Sequence: Synthetic oligonucleotide
  Sense strand starting at position 501 of SEQ ID NO: 1884045
agugcucugugugcuugau

SEQ ID NO: 2235931 - RNA, 19 nt, Artificial Sequence
  Description of Artificial Sequence: Synthetic oligonucleotide
  Antisense strand to SEQ ID NO: 2235930
aucaagcacacagagcacu

SEQ ID NO: 2235932 - RNA, 19 nt, Artificial Sequence
  Description of Artificial Sequence: Synthetic oligonucleotide
  Sense strand starting at position 505 of SEQ ID NO: 1884045
cucugugugcuugaucuca

SEQ ID NO: 2235933 - RNA, 19 nt, Artificial Sequence
  Description of Artificial Sequence: Synthetic oligonucleotide
  Antisense strand to SEQ ID NO: 2235932
ugagaucaagcacacagag

SEQ ID NO: 2235934 - RNA, 19 nt, Artificial Sequence
  Description of Artificial Sequence: Synthetic oligonucleotide
  Sense strand starting at position 507 of SEQ ID NO: 1884045
cugugugcuugaucucauu

SEQ ID NO: 2235935 - RNA, 19 nt, Artificial Sequence
  Description of Artificial Sequence: Synthetic oligonucleotide
  Antisense strand to SEQ ID NO: 2235934
aaugagaucaagcacacag

SEQ ID NO: 2235936 - RNA, 19 nt, Artificial Sequence
  Description of Artificial Sequence: Synthetic oligonucleotide
  Sense strand starting at position 650 of SEQ ID NO: 1884045
aggccaugcucuuuccaca

SEQ ID NO: 2235937 - RNA, 19 nt, Artificial Sequence
  Description of Artificial Sequence: Synthetic oligonucleotide
  Antisense strand to SEQ ID NO: 2235936
uguggaaagagcauggccu

SEQ ID NO: 2235938 - RNA, 19 nt, Artificial Sequence
  Description of Artificial Sequence: Synthetic oligonucleotide
  Sense strand starting at position 655 of SEQ ID NO: 1884045
augcucuuuccacaguacu

SEQ ID NO: 2235939 - RNA, 19 nt, Artificial Sequence
  Description of Artificial Sequence: Synthetic oligonucleotide
  Antisense strand to SEQ ID NO: 2235938
aguacuguggaaagagcau

SEQ ID NO: 2235940 - RNA, 19 nt, Artificial Sequence
  Description of Artificial Sequence: Synthetic oligonucleotide
  Sense strand starting at position 663 of SEQ ID NO: 1884045
uccacaguacuuuguugua

SEQ ID NO: 2235941 - RNA, 19 nt, Artificial Sequence
  Description of Artificial Sequence: Synthetic oligonucleotide
  Antisense strand to SEQ ID NO: 2235940
uacaacaaaguacugugga

SEQ ID NO: 2235942 - RNA, 19 nt, Artificial Sequence
  Description of Artificial Sequence: Synthetic oligonucleotide
  Sense strand starting at position 676 of SEQ ID NO: 1884045
guuguaagugcagagauaa

SEQ ID NO: 2235943 - RNA, 19 nt, Artificial Sequence
  Description of Artificial Sequence: Synthetic oligonucleotide
  Antisense strand to SEQ ID NO: 2235942
uuaucucugcacuuacaac

SEQ ID NO: 2235944 - RNA, 19 nt, Artificial Sequence
  Description of Artificial Sequence: Synthetic oligonucleotide
  Sense strand starting at position 738 of SEQ ID NO: 1884045
aggaaaugguaugagaaag

SEQ ID NO: 2235945 - RNA, 19 nt, Artificial Sequence
  Description of Artificial Sequence: Synthetic oligonucleotide
  Antisense strand to SEQ ID NO: 2235944
cuuucucauaccauuuccu

SEQ ID NO: 2235946 - RNA, 19 nt, Artificial Sequence
  Description of Artificial Sequence: Synthetic oligonucleotide
  Sense strand starting at position 775 of SEQ ID NO: 1884045
agaaguccuucccacugaa

SEQ ID NO: 2235947 - RNA, 19 nt, Artificial Sequence
  Description of Artificial Sequence: Synthetic oligonucleotide
  Antisense strand to SEQ ID NO: 2235946
uucagugggaaggacuucu

SEQ ID NO: 2235948 - RNA, 19 nt, Artificial Sequence
  Description of Artificial Sequence: Synthetic oligonucleotide
  Sense strand starting at position 958 of SEQ ID NO: 1884045
aucuuaugccagcaggaau

SEQ ID NO: 2235949 - RNA, 19 nt, Artificial Sequence
  Description of Artificial Sequence: Synthetic oligonucleotide
  Antisense strand to SEQ ID NO: 2235948
auuccugcuggcauaagau

SEQ ID NO: 2235950 - RNA, 19 nt, Artificial Sequence
  Description of Artificial Sequence: Synthetic oligonucleotide
  Sense strand starting at position 1375 of SEQ ID NO: 1884045
gcuggaaguuaccuuuaag

SEQ ID NO: 2235951 - RNA, 19 nt, Artificial Sequence
  Description of Artificial Sequence: Synthetic oligonucleotide
  Antisense strand to SEQ ID NO: 2235950
cuuaaagguaacuuccagc

SEQ ID NO: 2235952 - RNA, 19 nt, Artificial Sequence
  Description of Artificial Sequence: Synthetic oligonucleotide
  Sense strand starting at position 1412 of SEQ ID NO: 1884045
cccaccugauuaugagauu

SEQ ID NO: 2235953 - RNA, 19 nt, Artificial Sequence
  Description of Artificial Sequence: Synthetic oligonucleotide
  Antisense strand to SEQ ID NO: 2235952
aaucucauaaucagguggg

SEQ ID NO: 2235954 - RNA, 19 nt, Artificial Sequence
  Description of Artificial Sequence: Synthetic oligonucleotide
  Sense strand starting at position 1413 of SEQ ID NO: 1884045
ccaccugauuaugagauuu

SEQ ID NO: 2235955 - RNA, 19 nt, Artificial Sequence
  Description of Artificial Sequence: Synthetic oligonucleotide
  Antisense strand to SEQ ID NO: 2235954
aaaucucauaaucaggugg

SEQ ID NO: 2235956 - RNA, 19 nt, Artificial Sequence
  Description of Artificial Sequence: Synthetic oligonucleotide
  Sense strand starting at position 1999 of SEQ ID NO: 1884045
ucguaagagcucugucucu

SEQ ID NO: 2235957 - RNA, 19 nt, Artificial Sequence
  Description of Artificial Sequence: Synthetic oligonucleotide
  Antisense strand to SEQ ID NO: 2235956
agagacagagcucuuacga

SEQ ID NO: 2235958 - RNA, 19 nt, Artificial Sequence
  Description of Artificial Sequence: Synthetic oligonucleotide
  Sense strand starting at position 2005 of SEQ ID NO: 1884045
gagcucugucucugaaggu

SEQ ID NO: 2235959 - RNA, 19 nt, Artificial Sequence
  Description of Artificial Sequence: Synthetic oligonucleotide
  Antisense strand to SEQ ID NO: 2235958
accuucagagacagagcuc

SEQ ID NO: 2235960 - RNA, 19 nt, Artificial Sequence
  Description of Artificial Sequence: Synthetic oligonucleotide
  Sense strand starting at position 2083 of SEQ ID NO: 1884045
agagaaucacacugagcua

SEQ ID NO: 2235961 - RNA, 19 nt, Artificial Sequence
  Description of Artificial Sequence: Synthetic oligonucleotide
  Antisense strand to SEQ ID NO: 2235960
uagcucagugugauucucu

SEQ ID NO: 2235962 - RNA, 19 nt, Artificial Sequence
  Description of Artificial Sequence: Synthetic oligonucleotide
  Sense strand starting at position 2160 of SEQ ID NO: 1884045
gggucucccugccuuuaga

SEQ ID NO: 2235963 - RNA, 19 nt, Artificial Sequence
  Description of Artificial Sequence: Synthetic oligonucleotide
  Antisense strand to SEQ ID NO: 2235962
ucuaaaggcagggagaccc

SEQ ID NO: 2235964 - RNA, 19 nt, Artificial Sequence
  Description of Artificial Sequence: Synthetic oligonucleotide
  Sense strand starting at position 2173 of SEQ ID NO: 1884045
uuuagagcugccugugauu

SEQ ID NO: 2235965 - RNA, 19 nt, Artificial Sequence
  Description of Artificial Sequence: Synthetic oligonucleotide
  Antisense strand to SEQ ID NO: 2235964
aaucacaggcagcucuaaa

SEQ ID NO: 2235966 - RNA, 19 nt, Artificial Sequence
  Description of Artificial Sequence: Synthetic oligonucleotide
  Sense strand starting at position 2295 of SEQ ID NO: 1884045
ucuugugcuugugugcgaa

SEQ ID NO: 2235967 - RNA, 19 nt, Artificial Sequence
  Description of Artificial Sequence: Synthetic oligonucleotide
  Antisense strand to SEQ ID NO: 2235966
uucgcacacaagcacaaga

SEQ ID NO: 2235968 - RNA, 19 nt, Artificial Sequence
  Description of Artificial Sequence: Synthetic oligonucleotide
  Sense strand starting at position 2307 of SEQ ID NO: 1884045
gugcgaaugugcucuaguu

SEQ ID NO: 2235969 - RNA, 19 nt, Artificial Sequence
  Description of Artificial Sequence: Synthetic oligonucleotide
  Antisense strand to SEQ ID NO: 2235968
aacuagagcacauucgcac

SEQ ID NO: 2235970 - RNA, 19 nt, Artificial Sequence
  Description of Artificial Sequence: Synthetic oligonucleotide
  Sense strand starting at position 2308 of SEQ ID NO: 1884045
ugcgaaugugcucuaguua

SEQ ID NO: 2235971 - RNA, 19 nt, Artificial Sequence
  Description of Artificial Sequence: Synthetic oligonucleotide
  Antisense strand to SEQ ID NO: 2235970
uaacuagagcacauucgca

SEQ ID NO: 2235972 - RNA, 19 nt, Artificial Sequence
  Description of Artificial Sequence: Synthetic oligonucleotide
  Sense strand starting at position 2309 of SEQ ID NO: 1884045
gcgaaugugcucuaguuaa

SEQ ID NO: 2235973 - RNA, 19 nt, Artificial Sequence
  Description of Artificial Sequence: Synthetic oligonucleotide
  Antisense strand to SEQ ID NO: 2235972
uuaacuagagcacauucgc

SEQ ID NO: 2235974 - RNA, 19 nt, Artificial Sequence
  Description of Artificial Sequence: Synthetic oligonucleotide
  Sense strand starting at position 2359 of SEQ ID NO: 1884045
ccucuucucugaucuguga

SEQ ID NO: 2235975 - RNA, 19 nt, Artificial Sequence
  Description of Artificial Sequence: Synthetic oligonucleotide
  Antisense strand to SEQ ID NO: 2235974
ucacagaucagagaagagg

SEQ ID NO: 2235976 - RNA, 19 nt, Artificial Sequence
  Description of Artificial Sequence: Synthetic oligonucleotide
  Sense strand starting at position 2387 of SEQ ID NO: 1884045
gagcacaauuagucaggaa

SEQ ID NO: 2235977 - RNA, 19 nt, Artificial Sequence
  Description of Artificial Sequence: Synthetic oligonucleotide
  Antisense strand to SEQ ID NO: 2235976
uuccugacuaauugugcuc

SEQ ID NO: 2235978 - RNA, 19 nt, Artificial Sequence
  Description of Artificial Sequence: Synthetic oligonucleotide
  Sense strand starting at position 2506 of SEQ ID NO: 1884045
gcuacuccucucuagagca

SEQ ID NO: 2235979 - RNA, 19 nt, Artificial Sequence
  Description of Artificial Sequence: Synthetic oligonucleotide
  Antisense strand to SEQ ID NO: 2235978
ugcucuagagaggaguagc

SEQ ID NO: 2235980 - RNA, 19 nt, Artificial Sequence
  Description of Artificial Sequence: Synthetic oligonucleotide
  Sense strand starting at position 2544 of SEQ ID NO: 1884045
ggucgcauuccucuauguu

SEQ ID NO: 2235981 - RNA, 19 nt, Artificial Sequence
  Description of Artificial Sequence: Synthetic oligonucleotide
  Antisense strand to SEQ ID NO: 2235980
aacauagaggaaugcgacc

SEQ ID NO: 2235982 - RNA, 19 nt, Artificial Sequence
  Description of Artificial Sequence: Synthetic oligonucleotide
  Sense strand starting at position 2545 of SEQ ID NO: 1884045
gucgcauuccucuauguuc

SEQ ID NO: 2235983 - RNA, 19 nt, Artificial Sequence
  Description of Artificial Sequence: Synthetic oligonucleotide
  Antisense strand to SEQ ID NO: 2235982
gaacauagaggaaugcgac

SEQ ID NO: 2235984 - RNA, 19 nt, Artificial Sequence
  Description of Artificial Sequence: Synthetic oligonucleotide
  Sense strand starting at position 2562 of SEQ ID NO: 1884045
ucaguuauccugugcagcu

SEQ ID NO: 2235985 - RNA, 19 nt, Artificial Sequence
  Description of Artificial Sequence: Synthetic oligonucleotide
  Antisense strand to SEQ ID NO: 2235984
agcugcacaggauaacuga

SEQ ID NO: 2235986 - RNA, 19 nt, Artificial Sequence
  Description of Artificial Sequence: Synthetic oligonucleotide
  Sense strand starting at position 2563 of SEQ ID NO: 1884045
caguuauccugugcagcua

SEQ ID NO: 2235987 - RNA, 19 nt, Artificial Sequence
  Description of Artificial Sequence: Synthetic oligonucleotide
  Antisense strand to SEQ ID NO: 2235986
uagcugcacaggauaacug

SEQ ID NO: 2235988 - RNA, 19 nt, Artificial Sequence
  Description of Artificial Sequence: Synthetic oligonucleotide
  Sense strand starting at position 55 of SEQ ID NO: 1884046
ccuugacuuagaugauggu

SEQ ID NO: 2235989 - RNA, 19 nt, Artificial Sequence
  Description of Artificial Sequence: Synthetic oligonucleotide
  Antisense strand to SEQ ID NO: 2235988
accaucaucuaagucaagg

SEQ ID NO: 2235990 - RNA, 19 nt, Artificial Sequence
  Description of Artificial Sequence: Synthetic oligonucleotide
  Sense strand starting at position 59 of SEQ ID NO: 1884046
gacuuagaugaugguuaca

SEQ ID NO: 2235991 - RNA, 19 nt, Artificial Sequence
  Description of Artificial Sequence: Synthetic oligonucleotide
  Antisense strand to SEQ ID NO: 2235990
uguaaccaucaucuaaguc

SEQ ID NO: 2235992 - RNA, 19 nt, Artificial Sequence
  Description of Artificial Sequence: Synthetic oligonucleotide
  Sense strand starting at position 61 of SEQ ID NO: 1884046
cuuagaugaugguuacaaa

SEQ ID NO: 2235993 - RNA, 19 nt, Artificial Sequence
  Description of Artificial Sequence: Synthetic oligonucleotide
  Antisense strand to SEQ ID NO: 2235992
uuuguaaccaucaucuaag

SEQ ID NO: 2235994 - RNA, 19 nt, Artificial Sequence
  Description of Artificial Sequence: Synthetic oligonucleotide
  Sense strand starting at position 102 of SEQ ID NO: 1884046
cuuacuacuugugcauuua

SEQ ID NO: 2235995 - RNA, 19 nt, Artificial Sequence
  Description of Artificial Sequence: Synthetic oligonucleotide
  Antisense strand to SEQ ID NO: 2235994
uaaaugcacaaguaguaag

SEQ ID NO: 2235996 - RNA, 19 nt, Artificial Sequence
  Description of Artificial Sequence: Synthetic oligonucleotide
  Sense strand starting at position 617 of SEQ ID NO: 1884046
ccaggaaacaguggcauau

SEQ ID NO: 2235997 - RNA, 19 nt, Artificial Sequence
  Description of Artificial Sequence: Synthetic oligonucleotide
  Antisense strand to SEQ ID NO: 2235996
auaugccacuguuuccugg

SEQ ID NO: 2235998 - RNA, 19 nt, Artificial Sequence
  Description of Artificial Sequence: Synthetic oligonucleotide
  Sense strand starting at position 711 of SEQ ID NO: 1884046
ccaagacuguacucaggaa

SEQ ID NO: 2235999 - RNA, 19 nt, Artificial Sequence
  Description of Artificial Sequence: Synthetic oligonucleotide
  Antisense strand to SEQ ID NO: 2235998
uuccugaguacagucuugg

SEQ ID NO: 2236000 - RNA, 19 nt, Artificial Sequence
  Description of Artificial Sequence: Synthetic oligonucleotide
  Sense strand starting at position 1006 of SEQ ID NO: 1884046
auuccuaucuauguagauc

SEQ ID NO: 2236001 - RNA, 19 nt, Artificial Sequence
  Description of Artificial Sequence: Synthetic oligonucleotide
  Antisense strand to SEQ ID NO: 2236000
gaucuacauagauaggaau

SEQ ID NO: 2236002 - RNA, 19 nt, Artificial Sequence
  Description of Artificial Sequence: Synthetic oligonucleotide
  Sense strand starting at position 1064 of SEQ ID NO: 1884046
ucagcaagguuacuauaua

SEQ ID NO: 2236003 - RNA, 19 nt, Artificial Sequence
  Description of Artificial Sequence: Synthetic oligonucleotide
  Antisense strand to SEQ ID NO: 2236002
uauauaguaaccuugcuga

SEQ ID NO: 2236004 - RNA, 19 nt, Artificial Sequence
  Description of Artificial Sequence: Synthetic oligonucleotide
  Sense strand starting at position 1326 of SEQ ID NO: 1884046
gcagguucucaacaaaguu

SEQ ID NO: 2236005 - RNA, 19 nt, Artificial Sequence
  Description of Artificial Sequence: Synthetic oligonucleotide
  Antisense strand to SEQ ID NO: 2236004
aacuuuguugagaaccugc

SEQ ID NO: 2236006 - RNA, 19 nt, Artificial Sequence
  Description of Artificial Sequence: Synthetic oligonucleotide
  Sense strand starting at position 1475 of SEQ ID NO: 1884046
agaauugggcuuuaucuau

SEQ ID NO: 2236007 - RNA, 19 nt, Artificial Sequence
  Description of Artificial Sequence: Synthetic oligonucleotide
  Antisense strand to SEQ ID NO: 2236006
auagauaaagcccaauucu

SEQ ID NO: 2236008 - RNA, 19 nt, Artificial Sequence
  Description of Artificial Sequence: Synthetic oligonucleotide
  Sense strand starting at position 1533 of SEQ ID NO: 1884046
ggaacagauucuccuaucu

SEQ ID NO: 2236009 - RNA, 19 nt, Artificial Sequence
  Description of Artificial Sequence: Synthetic oligonucleotide
  Antisense strand to SEQ ID NO: 2236008
agauaggagaaucuguucc

SEQ ID NO: 2236010 - RNA, 19 nt, Artificial Sequence
  Description of Artificial Sequence: Synthetic oligonucleotide
  Sense strand starting at position 1644 of SEQ ID NO: 1884046
agauaugcuccaggcagaa

SEQ ID NO: 2236011 - RNA, 19 nt, Artificial Sequence
  Description of Artificial Sequence: Synthetic oligonucleotide
  Antisense strand to SEQ ID NO: 2236010
uucugccuggagcauaucu

SEQ ID NO: 2236012 - RNA, 19 nt, Artificial Sequence
  Description of Artificial Sequence: Synthetic oligonucleotide
  Sense strand starting at position 1666 of SEQ ID NO: 1884046
gugcccgcuccucugaaau

SEQ ID NO: 2236013 - RNA, 19 nt, Artificial Sequence
  Description of Artificial Sequence: Synthetic oligonucleotide
  Antisense strand to SEQ ID NO: 2236012
auuucagaggagcgggcac

SEQ ID NO: 2236014 - RNA, 19 nt, Artificial Sequence
  Description of Artificial Sequence: Synthetic oligonucleotide
  Sense strand starting at position 1710 of SEQ ID NO: 1884046
ccauauugcgcuguagcaa

SEQ ID NO: 2236015 - RNA, 19 nt, Artificial Sequence
  Description of Artificial Sequence: Synthetic oligonucleotide
  Antisense strand to SEQ ID NO: 2236014
uugcuacagcgcaauaugg

SEQ ID NO: 2236016 - RNA, 19 nt, Artificial Sequence
  Description of Artificial Sequence: Synthetic oligonucleotide
  Sense strand starting at position 1940 of SEQ ID NO: 1884046
auaauugaaggauguguca

SEQ ID NO: 2236017 - RNA, 19 nt, Artificial Sequence
  Description of Artificial Sequence: Synthetic oligonucleotide
  Antisense strand to SEQ ID NO: 2236016
ugacacauccuucaauuau

SEQ ID NO: 2236018 - RNA, 19 nt, Artificial Sequence
  Description of Artificial Sequence: Synthetic oligonucleotide
  Sense strand starting at position 2077 of SEQ ID NO: 1884046
gcaaauaagcauuauguua

SEQ ID NO: 2236019 - RNA, 19 nt, Artificial Sequence
  Description of Artificial Sequence: Synthetic oligonucleotide
  Antisense strand to SEQ ID NO: 2236018
uaacauaaugcuuauuugc

SEQ ID NO: 2236020 - RNA, 19 nt, Artificial Sequence
  Description of Artificial Sequence: Synthetic oligonucleotide
  Sense strand starting at position 2556 of SEQ ID NO: 1884046
agaaaugacuguuucuaga

SEQ ID NO: 2236021 - RNA, 19 nt, Artificial Sequence
  Description of Artificial Sequence: Synthetic oligonucleotide
  Antisense strand to SEQ ID NO: 2236020
ucuagaaacagucauuucu

SEQ ID NO: 2236022 - RNA, 19 nt, Artificial Sequence
  Description of Artificial Sequence: Synthetic oligonucleotide
  Sense strand starting at position 2605 of SEQ ID NO: 1884046
gggacaucuuauucuacca

SEQ ID NO: 2236023 - RNA, 19 nt, Artificial Sequence
  Description of Artificial Sequence: Synthetic oligonucleotide
  Antisense strand to SEQ ID NO: 2236022
ugguagaauaagauguccc

SEQ ID NO: 2236024 - RNA, 19 nt, Artificial Sequence
  Description of Artificial Sequence: Synthetic oligonucleotide
  Sense strand starting at position 2636 of SEQ ID NO: 1884046
gucaucaaagguuauguca

SEQ ID NO: 2236025 - RNA, 19 nt, Artificial Sequence
  Description of Artificial Sequence: Synthetic oligonucleotide
  Antisense strand to SEQ ID NO: 2236024
ugacauaaccuuugaugac

SEQ ID NO: 2236026 - RNA, 19 nt, Artificial Sequence
  Description of Artificial Sequence: Synthetic oligonucleotide
  Sense strand starting at position 2674 of SEQ ID NO: 1884046
uugaaagaguuccuguuga

SEQ ID NO: 2236027 - RNA, 19 nt, Artificial Sequence
  Description of Artificial Sequence: Synthetic oligonucleotide
  Antisense strand to SEQ ID NO: 2236026
ucaacaggaacucuuucaa

SEQ ID NO: 2236028 - RNA, 19 nt, Artificial Sequence
  Description of Artificial Sequence: Synthetic oligonucleotide
  Sense strand starting at position 2679 of SEQ ID NO: 1884046
agaguuccuguugacuuaa

SEQ ID NO: 2236029 - RNA, 19 nt, Artificial Sequence
  Description of Artificial Sequence: Synthetic oligonucleotide
  Antisense strand to SEQ ID NO: 2236028
uuaagucaacaggaacucu

SEQ ID NO: 2236030 - RNA, 19 nt, Artificial Sequence
  Description of Artificial Sequence: Synthetic oligonucleotide
  Sense strand starting at position 2728 of SEQ ID NO: 1884046
agaacuacaguguguugaa

SEQ ID NO: 2236031 - RNA, 19 nt, Artificial Sequence
  Description of Artificial Sequence: Synthetic oligonucleotide
  Antisense strand to SEQ ID NO: 2236030
uucaacacacuguaguucu

SEQ ID NO: 2236032 - RNA, 19 nt, Artificial Sequence
  Description of Artificial Sequence: Synthetic oligonucleotide
  Sense strand starting at position 2729 of SEQ ID NO: 1884046
gaacuacaguguguugaaa

SEQ ID NO: 2236033 - RNA, 19 nt, Artificial Sequence
  Description of Artificial Sequence: Synthetic oligonucleotide
  Antisense strand to SEQ ID NO: 2236032
uuucaacacacuguaguuc

SEQ ID NO: 2236034 - RNA, 19 nt, Artificial Sequence
  Description of Artificial Sequence: Synthetic oligonucleotide
  Sense strand starting at position 2833 of SEQ ID NO: 1884046
agacguacucuguagagaa

SEQ ID NO: 2236035 - RNA, 19 nt, Artificial Sequence
  Description of Artificial Sequence: Synthetic oligonucleotide
  Antisense strand to SEQ ID NO: 2236034
uucucuacagaguacgucu

SEQ ID NO: 2236036 - RNA, 19 nt, Artificial Sequence
  Description of Artificial Sequence: Synthetic oligonucleotide
  Sense strand starting at position 2933 of SEQ ID NO: 1884046
agagauuaaaugugugaca

SEQ ID NO: 2236037 - RNA, 19 nt, Artificial Sequence
  Description of Artificial Sequence: Synthetic oligonucleotide
  Antisense strand to SEQ ID NO: 2236036
ugucacacauuuaaucucu

SEQ ID NO: 2236038 - RNA, 19 nt, Artificial Sequence
  Description of Artificial Sequence: Synthetic oligonucleotide
  Sense strand starting at position 2934 of SEQ ID NO: 1884046
gagauuaaaugugugacau

SEQ ID NO: 2236039 - RNA, 19 nt, Artificial Sequence
  Description of Artificial Sequence: Synthetic oligonucleotide
  Antisense strand to SEQ ID NO: 2236038
augucacacauuuaaucuc

SEQ ID NO: 2236040 - RNA, 19 nt, Artificial Sequence
  Description of Artificial Sequence: Synthetic oligonucleotide
  Sense strand starting at position 2935 of SEQ ID NO: 1884046
agauuaaaugugugacauc

SEQ ID NO: 2236041 - RNA, 19 nt, Artificial Sequence
  Description of Artificial Sequence: Synthetic oligonucleotide
  Antisense strand to SEQ ID NO: 2236040
gaugucacacauuuaaucu

SEQ ID NO: 2236042 - RNA, 19 nt, Artificial Sequence
  Description of Artificial Sequence: Synthetic oligonucleotide
  Sense strand starting at position 3034 of SEQ ID NO: 1884046
agugacuucccaugacaaa

SEQ ID NO: 2236043 - RNA, 19 nt, Artificial Sequence
  Description of Artificial Sequence: Synthetic oligonucleotide
  Antisense strand to SEQ ID NO: 2236042
uuugucaugggaagucacu

SEQ ID NO: 2236044 - RNA, 19 nt, Artificial Sequence
  Description of Artificial Sequence: Synthetic oligonucleotide
  Sense strand starting at position 3165 of SEQ ID NO: 1884046
auucuaugggcaggaaaca

SEQ ID NO: 2236045 - RNA, 19 nt, Artificial Sequence
  Description of Artificial Sequence: Synthetic oligonucleotide
  Antisense strand to SEQ ID NO: 2236044
uguuuccugcccauagaau

SEQ ID NO: 2236046 - RNA, 19 nt, Artificial Sequence
  Description of Artificial Sequence: Synthetic oligonucleotide
  Sense strand starting at position 3346 of SEQ ID NO: 1884046
uuggacuagugacucaauu

SEQ ID NO: 2236047 - RNA, 19 nt, Artificial Sequence
  Description of Artificial Sequence: Synthetic oligonucleotide
  Antisense strand to SEQ ID NO: 2236046
aauugagucacuaguccaa

SEQ ID NO: 2236048 - RNA, 19 nt, Artificial Sequence
  Description of Artificial Sequence: Synthetic oligonucleotide
  Sense strand starting at position 3457 of SEQ ID NO: 1884046
gggagcaaguaaucuauaa

SEQ ID NO: 2236049 - RNA, 19 nt, Artificial Sequence
  Description of Artificial Sequence: Synthetic oligonucleotide
  Antisense strand to SEQ ID NO: 2236048
uuauagauuacuugcuccc

SEQ ID NO: 2236050 - RNA, 19 nt, Artificial Sequence
  Description of Artificial Sequence: Synthetic oligonucleotide
  Sense strand starting at position 3504 of SEQ ID NO: 1884046
uuugucccaggaugaauua

SEQ ID NO: 2236051 - RNA, 19 nt, Artificial Sequence
  Description of Artificial Sequence: Synthetic oligonucleotide
  Antisense strand to SEQ ID NO: 2236050
uaauucauccugggacaaa

SEQ ID NO: 2236052 - RNA, 19 nt, Artificial Sequence
  Description of Artificial Sequence: Synthetic oligonucleotide
  Sense strand starting at position 3594 of SEQ ID NO: 1884046
aaaguuuggacuugaguug

SEQ ID NO: 2236053 - RNA, 19 nt, Artificial Sequence
  Description of Artificial Sequence: Synthetic oligonucleotide
  Antisense strand to SEQ ID NO: 2236052
caacucaaguccaaacuuu

SEQ ID NO: 2236054 - RNA, 19 nt, Artificial Sequence
  Description of Artificial Sequence: Synthetic oligonucleotide
  Sense strand starting at position 3638 of SEQ ID NO: 1884046
gggauauugggauguggua

SEQ ID NO: 2236055 - RNA, 19 nt, Artificial Sequence
  Description of Artificial Sequence: Synthetic oligonucleotide
  Antisense strand to SEQ ID NO: 2236054
uaccacaucccaauauccc

SEQ ID NO: 2236056 - RNA, 19 nt, Artificial Sequence
  Description of Artificial Sequence: Synthetic oligonucleotide
  Sense strand starting at position 3640 of SEQ ID NO: 1884046
gauauugggaugugguaaa

SEQ ID NO: 2236057 - RNA, 19 nt, Artificial Sequence
  Description of Artificial Sequence: Synthetic oligonucleotide
  Antisense strand to SEQ ID NO: 2236056
uuuaccacaucccaauauc

SEQ ID NO: 2236058 - RNA, 19 nt, Artificial Sequence
  Description of Artificial Sequence: Synthetic oligonucleotide
  Sense strand starting at position 3671 of SEQ ID NO: 1884046
gcaggauaggcaugauuau

SEQ ID NO: 2236059 - RNA, 19 nt, Artificial Sequence
  Description of Artificial Sequence: Synthetic oligonucleotide
  Antisense strand to SEQ ID NO: 2236058
auaaucaugccuauccugc

SEQ ID NO: 2236060 - RNA, 19 nt, Artificial Sequence
  Description of Artificial Sequence: Synthetic oligonucleotide
  Sense strand starting at position 3700 of SEQ ID NO: 1884046
gaagguugacuguaguaga

SEQ ID NO: 2236061 - RNA, 19 nt, Artificial Sequence
  Description of Artificial Sequence: Synthetic oligonucleotide
  Antisense strand to SEQ ID NO: 2236060
ucuacuacagucaaccuuc

SEQ ID NO: 2236062 - RNA, 19 nt, Artificial Sequence
  Description of Artificial Sequence: Synthetic oligonucleotide
  Sense strand starting at position 3708 of SEQ ID NO: 1884046
acuguaguagagugaacau

SEQ ID NO: 2236063 - RNA, 19 nt, Artificial Sequence
  Description of Artificial Sequence: Synthetic oligonucleotide
  Antisense strand to SEQ ID NO: 2236062
auguucacucuacuacagu

SEQ ID NO: 2236064 - RNA, 19 nt, Artificial Sequence
  Description of Artificial Sequence: Synthetic oligonucleotide
  Sense strand starting at position 3769 of SEQ ID NO: 1884046
ugaguaugcuaccuaacaa

SEQ ID NO: 2236065 - RNA, 19 nt, Artificial Sequence
  Description of Artificial Sequence: Synthetic oligonucleotide
  Antisense strand to SEQ ID NO: 2236064
uuguuagguagcauacuca

SEQ ID NO: 2236066 - RNA, 19 nt, Artificial Sequence
  Description of Artificial Sequence: Synthetic oligonucleotide
  Sense strand starting at position 3828 of SEQ ID NO: 1884046
gagauagaguaauuauucu

SEQ ID NO: 2236067 - RNA, 19 nt, Artificial Sequence
  Description of Artificial Sequence: Synthetic oligonucleotide
  Antisense strand to SEQ ID NO: 2236066
agaauaauuacucuaucuc

SEQ ID NO: 2236068 - RNA, 19 nt, Artificial Sequence
  Description of Artificial Sequence: Synthetic oligonucleotide
  Sense strand starting at position 120 of SEQ ID NO: 1884047
cuguuccuccgagauagau

SEQ ID NO: 2236069 - RNA, 19 nt, Artificial Sequence
  Description of Artificial Sequence: Synthetic oligonucleotide
  Antisense strand to SEQ ID NO: 2236068
aucuaucucggaggaacag

SEQ ID NO: 2236070 - RNA, 19 nt, Artificial Sequence
  Description of Artificial Sequence: Synthetic oligonucleotide
  Sense strand starting at position 122 of SEQ ID NO: 1884047
guuccuccgagauagauaa

SEQ ID NO: 2236071 - RNA, 19 nt, Artificial Sequence
  Description of Artificial Sequence: Synthetic oligonucleotide
  Antisense strand to SEQ ID NO: 2236070
uuaucuaucucggaggaac

SEQ ID NO: 2236072 - RNA, 19 nt, Artificial Sequence
  Description of Artificial Sequence: Synthetic oligonucleotide
  Sense strand starting at position 192 of SEQ ID NO: 1884047
gaaguccuuccugauaguu

SEQ ID NO: 2236073 - RNA, 19 nt, Artificial Sequence
  Description of Artificial Sequence: Synthetic oligonucleotide
  Antisense strand to SEQ ID NO: 2236072
aacuaucaggaaggacuuc

SEQ ID NO: 2236074 - RNA, 19 nt, Artificial Sequence
  Description of Artificial Sequence: Synthetic oligonucleotide
  Sense strand starting at position 197 of SEQ ID NO: 1884047
ccuuccugauaguuccaga

SEQ ID NO: 2236075 - RNA, 19 nt, Artificial Sequence
  Description of Artificial Sequence: Synthetic oligonucleotide
  Antisense strand to SEQ ID NO: 2236074
ucuggaacuaucaggaagg

SEQ ID NO: 2236076 - RNA, 19 nt, Artificial Sequence
  Description of Artificial Sequence: Synthetic oligonucleotide
  Sense strand starting at position 279 of SEQ ID NO: 1884047
cccuguagugcugaagaag

SEQ ID NO: 2236077 - RNA, 19 nt, Artificial Sequence
  Description of Artificial Sequence: Synthetic oligonucleotide
  Antisense strand to SEQ ID NO: 2236076
cuucuucagcacuacaggg

SEQ ID NO: 2236078 - RNA, 19 nt, Artificial Sequence
  Description of Artificial Sequence: Synthetic oligonucleotide
  Sense strand starting at position 522 of SEQ ID NO: 1884047
ggauguuucucacugacua

SEQ ID NO: 2236079 - RNA, 19 nt, Artificial Sequence
  Description of Artificial Sequence: Synthetic oligonucleotide
  Antisense strand to SEQ ID NO: 2236078
uagucagugagaaacaucc

SEQ ID NO: 2236080 - RNA, 19 nt, Artificial Sequence
  Description of Artificial Sequence: Synthetic oligonucleotide
  Sense strand starting at position 587 of SEQ ID NO: 1884047
gugagcuuaccuuaaaggu

SEQ ID NO: 2236081 - RNA, 19 nt, Artificial Sequence
  Description of Artificial Sequence: Synthetic oligonucleotide
  Antisense strand to SEQ ID NO: 2236080
accuuuaagguaagcucac

SEQ ID NO: 2236082 - RNA, 19 nt, Artificial Sequence
  Description of Artificial Sequence: Synthetic oligonucleotide
  Sense strand starting at position 603 of SEQ ID NO: 1884047
gguacuaaggcaugaaaga

SEQ ID NO: 2236083 - RNA, 19 nt, Artificial Sequence
  Description of Artificial Sequence: Synthetic oligonucleotide
  Antisense strand to SEQ ID NO: 2236082
ucuuucaugccuuaguacc

SEQ ID NO: 2236084 - RNA, 19 nt, Artificial Sequence
  Description of Artificial Sequence: Synthetic oligonucleotide
  Sense strand starting at position 685 of SEQ ID NO: 1884047
aggucaaggguuuaguuaa

SEQ ID NO: 2236085 - RNA, 19 nt, Artificial Sequence
  Description of Artificial Sequence: Synthetic oligonucleotide
  Antisense strand to SEQ ID NO: 2236084
uuaacuaaacccuugaccu

SEQ ID NO: 2236086 - RNA, 19 nt, Artificial Sequence
  Description of Artificial Sequence: Synthetic oligonucleotide
  Sense strand starting at position 723 of SEQ ID NO: 1884047
aaguuccgucuggaaauca

SEQ ID NO: 2236087 - RNA, 19 nt, Artificial Sequence
  Description of Artificial Sequence: Synthetic oligonucleotide
  Antisense strand to SEQ ID NO: 2236086
ugauuuccagacggaacuu

SEQ ID NO: 2236088 - RNA, 19 nt, Artificial Sequence
  Description of Artificial Sequence: Synthetic oligonucleotide
  Sense strand starting at position 854 of SEQ ID NO: 1884047
gacuuuauugcagacagca

SEQ ID NO: 2236089 - RNA, 19 nt, Artificial Sequence
  Description of Artificial Sequence: Synthetic oligonucleotide
  Antisense strand to SEQ ID NO: 2236088
ugcugucugcaauaaaguc

SEQ ID NO: 2236090 - RNA, 19 nt, Artificial Sequence
  Description of Artificial Sequence: Synthetic oligonucleotide
  Sense strand starting at position 901 of SEQ ID NO: 1884047
gugauugagcaauaagcuu

SEQ ID NO: 2236091 - RNA, 19 nt, Artificial Sequence
  Description of Artificial Sequence: Synthetic oligonucleotide
  Antisense strand to SEQ ID NO: 2236090
aagcuuauugcucaaucac

SEQ ID NO: 2236092 - RNA, 19 nt, Artificial Sequence
  Description of Artificial Sequence: Synthetic oligonucleotide
  Sense strand starting at position 999 of SEQ ID NO: 1884047
ucauucucacuagagguua

SEQ ID NO: 2236093 - RNA, 19 nt, Artificial Sequence
  Description of Artificial Sequence: Synthetic oligonucleotide
  Antisense strand to SEQ ID NO: 2236092
uaaccucuagugagaauga

SEQ ID NO: 2236094 - RNA, 19 nt, Artificial Sequence
  Description of Artificial Sequence: Synthetic oligonucleotide
  Sense strand starting at position 1206 of SEQ ID NO: 1884047
ucucauguacuguacaaua

SEQ ID NO: 2236095 - RNA, 19 nt, Artificial Sequence
  Description of Artificial Sequence: Synthetic oligonucleotide
  Antisense strand to SEQ ID NO: 2236094
uauuguacaguacaugaga

SEQ ID NO: 2236096 - RNA, 19 nt, Artificial Sequence
  Description of Artificial Sequence: Synthetic oligonucleotide
  Sense strand starting at position 1208 of SEQ ID NO: 1884047
ucauguacuguacaauagu

SEQ ID NO: 2236097 - RNA, 19 nt, Artificial Sequence
  Description of Artificial Sequence: Synthetic oligonucleotide
  Antisense strand to SEQ ID NO: 2236096
acuauuguacaguacauga

SEQ ID NO: 2236098 - RNA, 19 nt, Artificial Sequence
  Description of Artificial Sequence: Synthetic oligonucleotide
  Sense strand starting at position 1442 of SEQ ID NO: 1884047
ggaacaacguuauugauac

SEQ ID NO: 2236099 - RNA, 19 nt, Artificial Sequence
  Description of Artificial Sequence: Synthetic oligonucleotide
  Antisense strand to SEQ ID NO: 2236098
guaucaauaacguuguucc

SEQ ID NO: 2236100 - RNA, 19 nt, Artificial Sequence
  Description of Artificial Sequence: Synthetic oligonucleotide
  Sense strand starting at position 1514 of SEQ ID NO: 1884047
agucauuauguccacagua

SEQ ID NO: 2236101 - RNA, 19 nt, Artificial Sequence
  Description of Artificial Sequence: Synthetic oligonucleotide
  Antisense strand to SEQ ID NO: 2236100
uacuguggacauaaugacu

SEQ ID NO: 2236102 - RNA, 19 nt, Artificial Sequence
  Description of Artificial Sequence: Synthetic oligonucleotide
  Sense strand starting at position 1580 of SEQ ID NO: 1884047
aaacucuucugguuugaga

SEQ ID NO: 2236103 - RNA, 19 nt, Artificial Sequence
  Description of Artificial Sequence: Synthetic oligonucleotide
  Antisense strand to SEQ ID NO: 2236102
ucucaaaccagaagaguuu

SEQ ID NO: 2236104 - RNA, 19 nt, Artificial Sequence
  Description of Artificial Sequence: Synthetic oligonucleotide
  Sense strand starting at position 1582 of SEQ ID NO: 1884047
acucuucugguuugagaag

SEQ ID NO: 2236105 - RNA, 19 nt, Artificial Sequence
  Description of Artificial Sequence: Synthetic oligonucleotide
  Antisense strand to SEQ ID NO: 2236104
cuucucaaaccagaagagu

SEQ ID NO: 2236106 - RNA, 19 nt, Artificial Sequence
  Description of Artificial Sequence: Synthetic oligonucleotide
  Sense strand starting at position 1589 of SEQ ID NO: 1884047
ugguuugagaagcauguaa

SEQ ID NO: 2236107 - RNA, 19 nt, Artificial Sequence
  Description of Artificial Sequence: Synthetic oligonucleotide
  Antisense strand to SEQ ID NO: 2236106
uuacaugcuucucaaacca

SEQ ID NO: 2236108 - RNA, 19 nt, Artificial Sequence
  Description of Artificial Sequence: Synthetic oligonucleotide
  Sense strand starting at position 1600 of SEQ ID NO: 1884047
gcauguaaccaugaagagu

SEQ ID NO: 2236109 - RNA, 19 nt, Artificial Sequence
  Description of Artificial Sequence: Synthetic oligonucleotide
  Antisense strand to SEQ ID NO: 2236108
acucuucaugguuacaugc

SEQ ID NO: 2236110 - RNA, 19 nt, Artificial Sequence
  Description of Artificial Sequence: Synthetic oligonucleotide
  Sense strand starting at position 1609 of SEQ ID NO: 1884047
caugaagaguuuguuuaua

SEQ ID NO: 2236111 - RNA, 19 nt, Artificial Sequence
  Description of Artificial Sequence: Synthetic oligonucleotide
  Antisense strand to SEQ ID NO: 2236110
uauaaacaaacucuucaug

SEQ ID NO: 2236112 - RNA, 19 nt, Artificial Sequence
  Description of Artificial Sequence: Synthetic oligonucleotide
  Sense strand starting at position 1654 of SEQ ID NO: 1884047
gcaaguaaucuuugcauuu

SEQ ID NO: 2236113 - RNA, 19 nt, Artificial Sequence
  Description of Artificial Sequence: Synthetic oligonucleotide
  Antisense strand to SEQ ID NO: 2236112
aaaugcaaagauuacuugc

SEQ ID NO: 2236114 - RNA, 19 nt, Artificial Sequence
  Description of Artificial Sequence: Synthetic oligonucleotide
  Sense strand starting at position 1820 of SEQ ID NO: 1884047
uaucauuucuuuguagugu

SEQ ID NO: 2236115 - RNA, 19 nt, Artificial Sequence
  Description of Artificial Sequence: Synthetic oligonucleotide
  Antisense strand to SEQ ID NO: 2236114
acacuacaaagaaaugaua

SEQ ID NO: 2236116 - RNA, 19 nt, Artificial Sequence
  Description of Artificial Sequence: Synthetic oligonucleotide
  Sense strand starting at position 2218 of SEQ ID NO: 1884047
guggacaauuaggcugauu

SEQ ID NO: 2236117 - RNA, 19 nt, Artificial Sequence
  Description of Artificial Sequence: Synthetic oligonucleotide
  Antisense strand to SEQ ID NO: 2236116
aaucagccuaauuguccac

SEQ ID NO: 2236118 - RNA, 19 nt, Artificial Sequence
  Description of Artificial Sequence: Synthetic oligonucleotide
  Sense strand starting at position 2333 of SEQ ID NO: 1884047
uaaauuauacgguaguucu

SEQ ID NO: 2236119 - RNA, 19 nt, Artificial Sequence
  Description of Artificial Sequence: Synthetic oligonucleotide
  Antisense strand to SEQ ID NO: 2236118
agaacuaccguauaauuua

SEQ ID NO: 2236120 - RNA, 19 nt, Artificial Sequence
  Description of Artificial Sequence: Synthetic oligonucleotide
  Sense strand starting at position 2657 of SEQ ID NO: 1884047
uuauauguucuggauucuu

SEQ ID NO: 2236121 - RNA, 19 nt, Artificial Sequence
  Description of Artificial Sequence: Synthetic oligonucleotide
  Antisense strand to SEQ ID NO: 2236120
aagaauccagaacauauaa

SEQ ID NO: 2236122 - RNA, 19 nt, Artificial Sequence
  Description of Artificial Sequence: Synthetic oligonucleotide
  Sense strand starting at position 2755 of SEQ ID NO: 1884047
gacaguagaguuggugaga

SEQ ID NO: 2236123 - RNA, 19 nt, Artificial Sequence
  Description of Artificial Sequence: Synthetic oligonucleotide
  Antisense strand to SEQ ID NO: 2236122
ucucaccaacucuacuguc

SEQ ID NO: 2236124 - RNA, 19 nt, Artificial Sequence
  Description of Artificial Sequence: Synthetic oligonucleotide
  Sense strand starting at position 2758 of SEQ ID NO: 1884047
aguagaguuggugagaagu

SEQ ID NO: 2236125 - RNA, 19 nt, Artificial Sequence
  Description of Artificial Sequence: Synthetic oligonucleotide
  Antisense strand to SEQ ID NO: 2236124
acuucucaccaacucuacu

SEQ ID NO: 2236126 - RNA, 19 nt, Artificial Sequence
  Description of Artificial Sequence: Synthetic oligonucleotide
  Sense strand starting at position 2817 of SEQ ID NO: 1884047
ugcuuaugaauuggauaug

SEQ ID NO: 2236127 - RNA, 19 nt, Artificial Sequence
  Description of Artificial Sequence: Synthetic oligonucleotide
  Antisense strand to SEQ ID NO: 2236126
cauauccaauucauaagca

SEQ ID NO: 2236128 - RNA, 19 nt, Artificial Sequence
  Description of Artificial Sequence: Synthetic oligonucleotide
  Sense strand starting at position 2899 of SEQ ID NO: 1884047
auuagaaauguuugccaaa

SEQ ID NO: 2236129 - RNA, 19 nt, Artificial Sequence
  Description of Artificial Sequence: Synthetic oligonucleotide
  Antisense strand to SEQ ID NO: 2236128
uuuggcaaacauuucuaau

SEQ ID NO: 2236130 - RNA, 19 nt, Artificial Sequence
  Description of Artificial Sequence: Synthetic oligonucleotide
  Sense strand starting at position 3033 of SEQ ID NO: 1884047
caggaauggguucggaaau

SEQ ID NO: 2236131 - RNA, 19 nt, Artificial Sequence
  Description of Artificial Sequence: Synthetic oligonucleotide
  Antisense strand to SEQ ID NO: 2236130
auuuccgaacccauuccug

SEQ ID NO: 2236132 - RNA, 19 nt, Artificial Sequence
  Description of Artificial Sequence: Synthetic oligonucleotide
  Sense strand starting at position 3390 of SEQ ID NO: 1884047
acauaaauuggcuggaugu

SEQ ID NO: 2236133 - RNA, 19 nt, Artificial Sequence
  Description of Artificial Sequence: Synthetic oligonucleotide
  Antisense strand to SEQ ID NO: 2236132
acauccagccaauuuaugu

SEQ ID NO: 2236134 - RNA, 19 nt, Artificial Sequence
  Description of Artificial Sequence: Synthetic oligonucleotide
  Sense strand starting at position 3592 of SEQ ID NO: 1884047
aguuuaacucuacauugua

SEQ ID NO: 2236135 - RNA, 19 nt, Artificial Sequence
  Description of Artificial Sequence: Synthetic oligonucleotide
  Antisense strand to SEQ ID NO: 2236134
uacaauguagaguuaaacu

SEQ ID NO: 2236136 - RNA, 19 nt, Artificial Sequence
  Description of Artificial Sequence: Synthetic oligonucleotide
  Sense strand starting at position 3664 of SEQ ID NO: 1884047
aagcacuuugaugggaaau

SEQ ID NO: 2236137 - RNA, 19 nt, Artificial Sequence
  Description of Artificial Sequence: Synthetic oligonucleotide
  Antisense strand to SEQ ID NO: 2236136
auuucccaucaaagugcuu

SEQ ID NO: 2236138 - RNA, 19 nt, Artificial Sequence
  Description of Artificial Sequence: Synthetic oligonucleotide
  Sense strand starting at position 3665 of SEQ ID NO: 1884047
agcacuuugaugggaaauu

SEQ ID NO: 2236139 - RNA, 19 nt, Artificial Sequence
  Description of Artificial Sequence: Synthetic oligonucleotide
  Antisense strand to SEQ ID NO: 2236138
aauuucccaucaaagugcu

SEQ ID NO: 2236140 - RNA, 19 nt, Artificial Sequence
  Description of Artificial Sequence: Synthetic oligonucleotide
  Sense strand starting at position 3674 of SEQ ID NO: 1884047
augggaaauuaguaauuug

SEQ ID NO: 2236141 - RNA, 19 nt, Artificial Sequence
  Description of Artificial Sequence: Synthetic oligonucleotide
  Antisense strand to SEQ ID NO: 2236140
caaauuacuaauuucccau

SEQ ID NO: 2236142 - RNA, 19 nt, Artificial Sequence
  Description of Artificial Sequence: Synthetic oligonucleotide
  Sense strand starting at position 3727 of SEQ ID NO: 1884047
guuucuguucaugaaggga

SEQ ID NO: 2236143 - RNA, 19 nt, Artificial Sequence
  Description of Artificial Sequence: Synthetic oligonucleotide
  Antisense strand to SEQ ID NO: 2236142
ucccuucaugaacagaaac

SEQ ID NO: 2236144 - RNA, 19 nt, Artificial Sequence
  Description of Artificial Sequence: Synthetic oligonucleotide
  Sense strand starting at position 3795 of SEQ ID NO: 1884047
auuguaaaugcuuacuuga

SEQ ID NO: 2236145 - RNA, 19 nt, Artificial Sequence
  Description of Artificial Sequence: Synthetic oligonucleotide
  Antisense strand to SEQ ID NO: 2236144
ucaaguaagcauuuacaau

SEQ ID NO: 2236146 - RNA, 19 nt, Artificial Sequence
  Description of Artificial Sequence: Synthetic oligonucleotide
  Sense strand starting at position 3816 of SEQ ID NO: 1884047
ucuuaaagacuaugugaug

SEQ ID NO: 2236147 - RNA, 19 nt, Artificial Sequence
  Description of Artificial Sequence: Synthetic oligonucleotide
  Antisense strand to SEQ ID NO: 2236146
caucacauagucuuuaaga

SEQ ID NO: 2236148 - RNA, 19 nt, Artificial Sequence
  Description of Artificial Sequence: Synthetic oligonucleotide
  Sense strand starting at position 2056 of SEQ ID NO: 1884048
acgacucuucugggaaaug

SEQ ID NO: 2236149 - RNA, 19 nt, Artificial Sequence
  Description of Artificial Sequence: Synthetic oligonucleotide
  Antisense strand to SEQ ID NO: 2236148
cauuucccagaagagucgu

SEQ ID NO: 2236150 - RNA, 19 nt, Artificial Sequence
  Description of Artificial Sequence: Synthetic oligonucleotide
  Sense strand starting at position 2151 of SEQ ID NO: 1884048
gagcacuuaccguguacca

SEQ ID NO: 2236151 - RNA, 19 nt, Artificial Sequence
  Description of Artificial Sequence: Synthetic oligonucleotide
  Antisense strand to SEQ ID NO: 2236150
ugguacacgguaagugcuc

SEQ ID NO: 2236152 - RNA, 19 nt, Artificial Sequence
  Description of Artificial Sequence: Synthetic oligonucleotide
  Sense strand starting at position 2246 of SEQ ID NO: 1884048
cacugaaucuuugaaaggu

SEQ ID NO: 2236153 - RNA, 19 nt, Artificial Sequence
  Description of Artificial Sequence: Synthetic oligonucleotide
  Antisense strand to SEQ ID NO: 2236152
accuuucaaagauucagug

SEQ ID NO: 2236154 - RNA, 19 nt, Artificial Sequence
  Description of Artificial Sequence: Synthetic oligonucleotide
  Sense strand starting at position 2254 of SEQ ID NO: 1884048
cuuugaaagguucguaauu

SEQ ID NO: 2236155 - RNA, 19 nt, Artificial Sequence
  Description of Artificial Sequence: Synthetic oligonucleotide
  Antisense strand to SEQ ID NO: 2236154
aauuacgaaccuuucaaag

SEQ ID NO: 2236156 - RNA, 19 nt, Artificial Sequence
  Description of Artificial Sequence: Synthetic oligonucleotide
  Sense strand starting at position 2256 of SEQ ID NO: 1884048
uugaaagguucguaauuug

SEQ ID NO: 2236157 - RNA, 19 nt, Artificial Sequence
  Description of Artificial Sequence: Synthetic oligonucleotide
  Antisense strand to SEQ ID NO: 2236156
caaauuacgaaccuuucaa

SEQ ID NO: 2236158 - RNA, 19 nt, Artificial Sequence
  Description of Artificial Sequence: Synthetic oligonucleotide
  Sense strand starting at position 2263 of SEQ ID NO: 1884048
guucguaauuugcucaaga

SEQ ID NO: 2236159 - RNA, 19 nt, Artificial Sequence
  Description of Artificial Sequence: Synthetic oligonucleotide
  Antisense strand to SEQ ID NO: 2236158
ucuugagcaaauuacgaac

SEQ ID NO: 2236160 - RNA, 19 nt, Artificial Sequence
  Description of Artificial Sequence: Synthetic oligonucleotide
  Sense strand starting at position 2276 of SEQ ID NO: 1884048
ucaagaaaguaucugagcu

SEQ ID NO: 2236161 - RNA, 19 nt, Artificial Sequence
  Description of Artificial Sequence: Synthetic oligonucleotide
  Antisense strand to SEQ ID NO: 2236160
agcucagauacuuucuuga

SEQ ID NO: 2236162 - RNA, 19 nt, Artificial Sequence
  Description of Artificial Sequence: Synthetic oligonucleotide
  Sense strand starting at position 2280 of SEQ ID NO: 1884048
gaaaguaucugagcuggau

SEQ ID NO: 2236163 - RNA, 19 nt, Artificial Sequence
  Description of Artificial Sequence: Synthetic oligonucleotide
  Antisense strand to SEQ ID NO: 2236162
auccagcucagauacuuuc

SEQ ID NO: 2236164 - RNA, 19 nt, Artificial Sequence
  Description of Artificial Sequence: Synthetic oligonucleotide
  Sense strand starting at position 2294 of SEQ ID NO: 1884048
uggauuugaucccaagcau

SEQ ID NO: 2236165 - RNA, 19 nt, Artificial Sequence
  Description of Artificial Sequence: Synthetic oligonucleotide
  Antisense strand to SEQ ID NO: 2236164
augcuugggaucaaaucca

SEQ ID NO: 2236166 - RNA, 19 nt, Artificial Sequence
  Description of Artificial Sequence: Synthetic oligonucleotide
  Sense strand starting at position 2329 of SEQ ID NO: 1884048
guccauuaugaggguggaa

SEQ ID NO: 2236167 - RNA, 19 nt, Artificial Sequence
  Description of Artificial Sequence: Synthetic oligonucleotide
  Antisense strand to SEQ ID NO: 2236166
uuccacccucauaauggac

SEQ ID NO: 2236168 - RNA, 19 nt, Artificial Sequence
  Description of Artificial Sequence: Synthetic oligonucleotide
  Sense strand starting at position 2422 of SEQ ID NO: 1884048
ucaaguuaucagcagugag

SEQ ID NO: 2236169 - RNA, 19 nt, Artificial Sequence
  Description of Artificial Sequence: Synthetic oligonucleotide
  Antisense strand to SEQ ID NO: 2236168
cucacugcugauaacuuga

SEQ ID NO: 2236170 - RNA, 19 nt, Artificial Sequence
  Description of Artificial Sequence: Synthetic oligonucleotide
  Sense strand starting at position 2558 of SEQ ID NO: 1884048
ucaagugauccucagaggu

SEQ ID NO: 2236171 - RNA, 19 nt, Artificial Sequence
  Description of Artificial Sequence: Synthetic oligonucleotide
  Antisense strand to SEQ ID NO: 2236170
accucugaggaucacuuga

SEQ ID NO: 2236172 - RNA, 19 nt, Artificial Sequence
  Description of Artificial Sequence: Synthetic oligonucleotide
  Sense strand starting at position 2568 of SEQ ID NO: 1884048
cucagagguagcugggauu

SEQ ID NO: 2236173 - RNA, 19 nt, Artificial Sequence
  Description of Artificial Sequence: Synthetic oligonucleotide
  Antisense strand to SEQ ID NO: 2236172
aaucccagcuaccucugag

SEQ ID NO: 2236174 - RNA, 19 nt, Artificial Sequence
  Description of Artificial Sequence: Synthetic oligonucleotide
  Sense strand starting at position 2718 of SEQ ID NO: 1884048
cuaggauuacaaugugaac

SEQ ID NO: 2236175 - RNA, 19 nt, Artificial Sequence
  Description of Artificial Sequence: Synthetic oligonucleotide
  Antisense strand to SEQ ID NO: 2236174
guucacauuguaauccuag

SEQ ID NO: 2236176 - RNA, 19 nt, Artificial Sequence
  Description of Artificial Sequence: Synthetic oligonucleotide
  Sense strand starting at position 2759 of SEQ ID NO: 1884048
ucuagagcuccagggugua

SEQ ID NO: 2236177 - RNA, 19 nt, Artificial Sequence
  Description of Artificial Sequence: Synthetic oligonucleotide
  Antisense strand to SEQ ID NO: 2236176
uacacccuggagcucuaga

SEQ ID NO: 2236178 - RNA, 19 nt, Artificial Sequence
  Description of Artificial Sequence: Synthetic oligonucleotide
  Sense strand starting at position 2819 of SEQ ID NO: 1884048
uuggaauguucugcaaagu

SEQ ID NO: 2236179 - RNA, 19 nt, Artificial Sequence
  Description of Artificial Sequence: Synthetic oligonucleotide
  Antisense strand to SEQ ID NO: 2236178
acuuugcagaacauuccaa

SEQ ID NO: 2236180 - RNA, 19 nt, Artificial Sequence
  Description of Artificial Sequence: Synthetic oligonucleotide
  Sense strand starting at position 2820 of SEQ ID NO: 1884048
uggaauguucugcaaaguc

SEQ ID NO: 2236181 - RNA, 19 nt, Artificial Sequence
  Description of Artificial Sequence: Synthetic oligonucleotide
  Antisense strand to SEQ ID NO: 2236180
gacuuugcagaacauucca

SEQ ID NO: 2236182 - RNA, 19 nt, Artificial Sequence
  Description of Artificial Sequence: Synthetic oligonucleotide
  Sense strand starting at position 2977 of SEQ ID NO: 1884048
ggagguaucugacuccucu

SEQ ID NO: 2236183 - RNA, 19 nt, Artificial Sequence
  Description of Artificial Sequence: Synthetic oligonucleotide
  Antisense strand to SEQ ID NO: 2236182
agaggagucagauaccucc

SEQ ID NO: 2236184 - RNA, 19 nt, Artificial Sequence
  Description of Artificial Sequence: Synthetic oligonucleotide
  Sense strand starting at position 3003 of SEQ ID NO: 1884048
gaaggcuggguccaucauu

SEQ ID NO: 2236185 - RNA, 19 nt, Artificial Sequence
  Description of Artificial Sequence: Synthetic oligonucleotide
  Antisense strand to SEQ ID NO: 2236184
aaugauggacccagccuuc

SEQ ID NO: 2236186 - RNA, 19 nt, Artificial Sequence
  Description of Artificial Sequence: Synthetic oligonucleotide
  Sense strand starting at position 3104 of SEQ ID NO: 1884048
uugugcaauugguuuccau

SEQ ID NO: 2236187 - RNA, 19 nt, Artificial Sequence
  Description of Artificial Sequence: Synthetic oligonucleotide
  Antisense strand to SEQ ID NO: 2236186
auggaaaccaauugcacaa

SEQ ID NO: 2236188 - RNA, 19 nt, Artificial Sequence
  Description of Artificial Sequence: Synthetic oligonucleotide
  Sense strand starting at position 3112 of SEQ ID NO: 1884048
uugguuuccaugugaacga

SEQ ID NO: 2236189 - RNA, 19 nt, Artificial Sequence
  Description of Artificial Sequence: Synthetic oligonucleotide
  Antisense strand to SEQ ID NO: 2236188
ucguucacauggaaaccaa

SEQ ID NO: 2236190 - RNA, 19 nt, Artificial Sequence
  Description of Artificial Sequence: Synthetic oligonucleotide
  Sense strand starting at position 3308 of SEQ ID NO: 1884048
aggagugagcccuggugua

SEQ ID NO: 2236191 - RNA, 19 nt, Artificial Sequence
  Description of Artificial Sequence: Synthetic oligonucleotide
  Antisense strand to SEQ ID NO: 2236190
uacaccagggcucacuccu

SEQ ID NO: 2236192 - RNA, 19 nt, Artificial Sequence
  Description of Artificial Sequence: Synthetic oligonucleotide
  Sense strand starting at position 3328 of SEQ ID NO: 1884048
ggaggcuucucacuccuua

SEQ ID NO: 2236193 - RNA, 19 nt, Artificial Sequence
  Description of Artificial Sequence: Synthetic oligonucleotide
  Antisense strand to SEQ ID NO: 2236192
uaaggagugagaagccucc

SEQ ID NO: 2236194 - RNA, 19 nt, Artificial Sequence
  Description of Artificial Sequence: Synthetic oligonucleotide
  Sense strand starting at position 3524 of SEQ ID NO: 1884048
ggaaucugguucccuaaga

SEQ ID NO: 2236195 - RNA, 19 nt, Artificial Sequence
  Description of Artificial Sequence: Synthetic oligonucleotide
  Antisense strand to SEQ ID NO: 2236194
ucuuagggaaccagauucc

SEQ ID NO: 2236196 - RNA, 19 nt, Artificial Sequence
  Description of Artificial Sequence: Synthetic oligonucleotide
  Sense strand starting at position 3525 of SEQ ID NO: 1884048
gaaucugguucccuaagag

SEQ ID NO: 2236197 - RNA, 19 nt, Artificial Sequence
  Description of Artificial Sequence: Synthetic oligonucleotide
  Antisense strand to SEQ ID NO: 2236196
cucuuagggaaccagauuc

SEQ ID NO: 2236198 - RNA, 19 nt, Artificial Sequence
  Description of Artificial Sequence: Synthetic oligonucleotide
  Sense strand starting at position 3541 of SEQ ID NO: 1884048
gaggauaaauuguaucauu

SEQ ID NO: 2236199 - RNA, 19 nt, Artificial Sequence
  Description of Artificial Sequence: Synthetic oligonucleotide
  Antisense strand to SEQ ID NO: 2236198
aaugauacaauuuauccuc

SEQ ID NO: 2236200 - RNA, 19 nt, Artificial Sequence
  Description of Artificial Sequence: Synthetic oligonucleotide
  Sense strand starting at position 3575 of SEQ ID NO: 1884048
cagcgauuagagggauuau

SEQ ID NO: 2236201 - RNA, 19 nt, Artificial Sequence
  Description of Artificial Sequence: Synthetic oligonucleotide
  Antisense strand to SEQ ID NO: 2236200
auaaucccucuaaucgcug

SEQ ID NO: 2236202 - RNA, 19 nt, Artificial Sequence
  Description of Artificial Sequence: Synthetic oligonucleotide
  Sense strand starting at position 3625 of SEQ ID NO: 1884048
auaacaguguugccaguga

SEQ ID NO: 2236203 - RNA, 19 nt, Artificial Sequence
  Description of Artificial Sequence: Synthetic oligonucleotide
  Antisense strand to SEQ ID NO: 2236202
ucacuggcaacacuguuau

SEQ ID NO: 2236204 - RNA, 19 nt, Artificial Sequence
  Description of Artificial Sequence: Synthetic oligonucleotide
  Sense strand starting at position 3629 of SEQ ID NO: 1884048
caguguugccagugaaauu

SEQ ID NO: 2236205 - RNA, 19 nt, Artificial Sequence
  Description of Artificial Sequence: Synthetic oligonucleotide
  Antisense strand to SEQ ID NO: 2236204
aauuucacuggcaacacug

SEQ ID NO: 2236206 - RNA, 19 nt, Artificial Sequence
  Description of Artificial Sequence: Synthetic oligonucleotide
  Sense strand starting at position 3630 of SEQ ID NO: 1884048
aguguugccagugaaauuc

SEQ ID NO: 2236207 - RNA, 19 nt, Artificial Sequence
  Description of Artificial Sequence: Synthetic oligonucleotide
  Antisense strand to SEQ ID NO: 2236206
gaauuucacuggcaacacu

SEQ ID NO: 2236208 - RNA, 19 nt, Artificial Sequence
  Description of Artificial Sequence: Synthetic oligonucleotide
  Sense strand starting at position 3688 of SEQ ID NO: 1884048
gcuacagacugaguguuua

SEQ ID NO: 2236209 - RNA, 19 nt, Artificial Sequence
  Description of Artificial Sequence: Synthetic oligonucleotide
  Antisense strand to SEQ ID NO: 2236208
uaaacacucagucuguagc

SEQ ID NO: 2236210 - RNA, 19 nt, Artificial Sequence
  Description of Artificial Sequence: Synthetic oligonucleotide
  Sense strand starting at position 3700 of SEQ ID NO: 1884048
guguuuaugucuccuccca

SEQ ID NO: 2236211 - RNA, 19 nt, Artificial Sequence
  Description of Artificial Sequence: Synthetic oligonucleotide
  Antisense strand to SEQ ID NO: 2236210
ugggaggagacauaaacac

SEQ ID NO: 2236212 - RNA, 19 nt, Artificial Sequence
  Description of Artificial Sequence: Synthetic oligonucleotide
  Sense strand starting at position 3702 of SEQ ID NO: 1884048
guuuaugucuccucccaaa

SEQ ID NO: 2236213 - RNA, 19 nt, Artificial Sequence
  Description of Artificial Sequence: Synthetic oligonucleotide
  Antisense strand to SEQ ID NO: 2236212
uuugggaggagacauaaac

SEQ ID NO: 2236214 - RNA, 19 nt, Artificial Sequence
  Description of Artificial Sequence: Synthetic oligonucleotide
  Sense strand starting at position 3806 of SEQ ID NO: 1884048
ucuaauuaaugggauuagu

SEQ ID NO: 2236215 - RNA, 19 nt, Artificial Sequence
  Description of Artificial Sequence: Synthetic oligonucleotide
  Antisense strand to SEQ ID NO: 2236214
acuaaucccauuaauuaga

SEQ ID NO: 2236216 - RNA, 19 nt, Artificial Sequence
  Description of Artificial Sequence: Synthetic oligonucleotide
  Sense strand starting at position 3815 of SEQ ID NO: 1884048
ugggauuaguauucguaua

SEQ ID NO: 2236217 - RNA, 19 nt, Artificial Sequence
  Description of Artificial Sequence: Synthetic oligonucleotide
  Antisense strand to SEQ ID NO: 2236216
uauacgaauacuaauccca

SEQ ID NO: 2236218 - RNA, 19 nt, Artificial Sequence
  Description of Artificial Sequence: Synthetic oligonucleotide
  Sense strand starting at position 3816 of SEQ ID NO: 1884048
gggauuaguauucguauau

SEQ ID NO: 2236219 - RNA, 19 nt, Artificial Sequence
  Description of Artificial Sequence: Synthetic oligonucleotide
  Antisense strand to SEQ ID NO: 2236218
auauacgaauacuaauccc

SEQ ID NO: 2236220 - RNA, 19 nt, Artificial Sequence
  Description of Artificial Sequence: Synthetic oligonucleotide
  Sense strand starting at position 3817 of SEQ ID NO: 1884048
ggauuaguauucguauaug

SEQ ID NO: 2236221 - RNA, 19 nt, Artificial Sequence
  Description of Artificial Sequence: Synthetic oligonucleotide
  Antisense strand to SEQ ID NO: 2236220
cauauacgaauacuaaucc

SEQ ID NO: 2236222 - RNA, 19 nt, Artificial Sequence
  Description of Artificial Sequence: Synthetic oligonucleotide
  Sense strand starting at position 3820 of SEQ ID NO: 1884048
uuaguauucguauaugagg

SEQ ID NO: 2236223 - RNA, 19 nt, Artificial Sequence
  Description of Artificial Sequence: Synthetic oligonucleotide
  Antisense strand to SEQ ID NO: 2236222
ccucauauacgaauacuaa

SEQ ID NO: 2236224 - RNA, 19 nt, Artificial Sequence
  Description of Artificial Sequence: Synthetic oligonucleotide
  Sense strand starting at position 3822 of SEQ ID NO: 1884048
aguauucguauaugaggga

SEQ ID NO: 2236225 - RNA, 19 nt, Artificial Sequence
  Description of Artificial Sequence: Synthetic oligonucleotide
  Antisense strand to SEQ ID NO: 2236224
ucccucauauacgaauacu

SEQ ID NO: 2236226 - RNA, 19 nt, Artificial Sequence
  Description of Artificial Sequence: Synthetic oligonucleotide
  Sense strand starting at position 3897 of SEQ ID NO: 1884048
gucuaugaacccugaagca

SEQ ID NO: 2236227 - RNA, 19 nt, Artificial Sequence
  Description of Artificial Sequence: Synthetic oligonucleotide
  Antisense strand to SEQ ID NO: 2236226
ugcuucaggguucauagac

SEQ ID NO: 2236228 - RNA, 19 nt, Artificial Sequence
  Description of Artificial Sequence: Synthetic oligonucleotide
  Sense strand starting at position 8 of SEQ ID NO: 1884049
gcaugaguaacauagugag

SEQ ID NO: 2236229 - RNA, 19 nt, Artificial Sequence
  Description of Artificial Sequence: Synthetic oligonucleotide
  Antisense strand to SEQ ID NO: 2236228
cucacuauguuacucaugc

SEQ ID NO: 2236230 - RNA, 19 nt, Artificial Sequence
  Description of Artificial Sequence: Synthetic oligonucleotide
  Sense strand starting at position 102 of SEQ ID NO: 1884049
acaagagagcaguauguuu

SEQ ID NO: 2236231 - RNA, 19 nt, Artificial Sequence
  Description of Artificial Sequence: Synthetic oligonucleotide
  Antisense strand to SEQ ID NO: 2236230
aaacauacugcucucuugu

SEQ ID NO: 2236232 - RNA, 19 nt, Artificial Sequence
  Description of Artificial Sequence: Synthetic oligonucleotide
  Sense strand starting at position 154 of SEQ ID NO: 1884049
agauguauucuggaguguu

SEQ ID NO: 2236233 - RNA, 19 nt, Artificial Sequence
  Description of Artificial Sequence: Synthetic oligonucleotide
  Antisense strand to SEQ ID NO: 2236232
aacacuccagaauacaucu

SEQ ID NO: 2236234 - RNA, 19 nt, Artificial Sequence
  Description of Artificial Sequence: Synthetic oligonucleotide
  Sense strand starting at position 157 of SEQ ID NO: 1884049
uguauucuggaguguuuaa

SEQ ID NO: 2236235 - RNA, 19 nt, Artificial Sequence
  Description of Artificial Sequence: Synthetic oligonucleotide
  Antisense strand to SEQ ID NO: 2236234
uuaaacacuccagaauaca

SEQ ID NO: 2236236 - RNA, 19 nt, Artificial Sequence
  Description of Artificial Sequence: Synthetic oligonucleotide
  Sense strand starting at position 214 of SEQ ID NO: 1884049
augucauucugaguacaua

SEQ ID NO: 2236237 - RNA, 19 nt, Artificial Sequence
  Description of Artificial Sequence: Synthetic oligonucleotide
  Antisense strand to SEQ ID NO: 2236236
uauguacucagaaugacau

SEQ ID NO: 2236238 - RNA, 19 nt, Artificial Sequence
  Description of Artificial Sequence: Synthetic oligonucleotide
  Sense strand starting at position 215 of SEQ ID NO: 1884049
ugucauucugaguacauag

SEQ ID NO: 2236239 - RNA, 19 nt, Artificial Sequence
  Description of Artificial Sequence: Synthetic oligonucleotide
  Antisense strand to SEQ ID NO: 2236238
cuauguacucagaaugaca

SEQ ID NO: 2236240 - RNA, 19 nt, Artificial Sequence
  Description of Artificial Sequence: Synthetic oligonucleotide
  Sense strand starting at position 234 of SEQ ID NO: 1884049
aaccuuaguucuguugagu

SEQ ID NO: 2236241 - RNA, 19 nt, Artificial Sequence
  Description of Artificial Sequence: Synthetic oligonucleotide
  Antisense strand to SEQ ID NO: 2236240
acucaacagaacuaagguu

SEQ ID NO: 2236242 - RNA, 19 nt, Artificial Sequence
  Description of Artificial Sequence: Synthetic oligonucleotide
  Sense strand starting at position 256 of SEQ ID NO: 1884049
ugucuuccauagucagaug

SEQ ID NO: 2236243 - RNA, 19 nt, Artificial Sequence
  Description of Artificial Sequence: Synthetic oligonucleotide
  Antisense strand to SEQ ID NO: 2236242
caucugacuauggaagaca

SEQ ID NO: 2236244 - RNA, 19 nt, Artificial Sequence
  Description of Artificial Sequence: Synthetic oligonucleotide
  Sense strand starting at position 351 of SEQ ID NO: 1884049
ggccaaaugagacauacgu

SEQ ID NO: 2236245 - RNA, 19 nt, Artificial Sequence
  Description of Artificial Sequence: Synthetic oligonucleotide
  Antisense strand to SEQ ID NO: 2236244
acguaugucucauuuggcc

SEQ ID NO: 2236246 - RNA, 19 nt, Artificial Sequence
  Description of Artificial Sequence: Synthetic oligonucleotide
  Sense strand starting at position 487 of SEQ ID NO: 1884049
aguggaguauguuuacaca

SEQ ID NO: 2236247 - RNA, 19 nt, Artificial Sequence
  Description of Artificial Sequence: Synthetic oligonucleotide
  Antisense strand to SEQ ID NO: 2236246
uguguaaacauacuccacu

SEQ ID NO: 2236248 - RNA, 19 nt, Artificial Sequence
  Description of Artificial Sequence: Synthetic oligonucleotide
  Sense strand starting at position 521 of SEQ ID NO: 1884049
uguguauaaagguauaaug

SEQ ID NO: 2236249 - RNA, 19 nt, Artificial Sequence
  Description of Artificial Sequence: Synthetic oligonucleotide
  Antisense strand to SEQ ID NO: 2236248
cauuauaccuuuauacaca

SEQ ID NO: 2236250 - RNA, 19 nt, Artificial Sequence
  Description of Artificial Sequence: Synthetic oligonucleotide
  Sense strand starting at position 722 of SEQ ID NO: 1884049
gguuguuugcugcccauau

SEQ ID NO: 2236251 - RNA, 19 nt, Artificial Sequence
  Description of Artificial Sequence: Synthetic oligonucleotide
  Antisense strand to SEQ ID NO: 2236250
auaugggcagcaaacaacc

SEQ ID NO: 2236252 - RNA, 19 nt, Artificial Sequence
  Description of Artificial Sequence: Synthetic oligonucleotide
  Sense strand starting at position 952 of SEQ ID NO: 1884049
guaauaauaucucuggcau

SEQ ID NO: 2236253 - RNA, 19 nt, Artificial Sequence
  Description of Artificial Sequence: Synthetic oligonucleotide
  Antisense strand to SEQ ID NO: 2236252
augccagagauauuauuac

SEQ ID NO: 2236254 - RNA, 19 nt, Artificial Sequence
  Description of Artificial Sequence: Synthetic oligonucleotide
  Sense strand starting at position 1055 of SEQ ID NO: 1884049
acuguauuguuacccagaa

SEQ ID NO: 2236255 - RNA, 19 nt, Artificial Sequence
  Description of Artificial Sequence: Synthetic oligonucleotide
  Antisense strand to SEQ ID NO: 2236254
uucuggguaacaauacagu

SEQ ID NO: 2236256 - RNA, 19 nt, Artificial Sequence
  Description of Artificial Sequence: Synthetic oligonucleotide
  Sense strand starting at position 1056 of SEQ ID NO: 1884049
cuguauuguuacccagaau

SEQ ID NO: 2236257 - RNA, 19 nt, Artificial Sequence
  Description of Artificial Sequence: Synthetic oligonucleotide
  Antisense strand to SEQ ID NO: 2236256
auucuggguaacaauacag

SEQ ID NO: 2236258 - RNA, 19 nt, Artificial Sequence
  Description of Artificial Sequence: Synthetic oligonucleotide
  Sense strand starting at position 1275 of SEQ ID NO: 1884049
acaggcaaggucugacauu

SEQ ID NO: 2236259 - RNA, 19 nt, Artificial Sequence
  Description of Artificial Sequence: Synthetic oligonucleotide
  Antisense strand to SEQ ID NO: 2236258
aaugucagaccuugccugu

SEQ ID NO: 2236260 - RNA, 19 nt, Artificial Sequence
  Description of Artificial Sequence: Synthetic oligonucleotide
  Sense strand starting at position 1276 of SEQ ID NO: 1884049
caggcaaggucugacauuu

SEQ ID NO: 2236261 - RNA, 19 nt, Artificial Sequence
  Description of Artificial Sequence: Synthetic oligonucleotide
  Antisense strand to SEQ ID NO: 2236260
aaaugucagaccuugccug

SEQ ID NO: 2236262 - RNA, 19 nt, Artificial Sequence
  Description of Artificial Sequence: Synthetic oligonucleotide
  Sense strand starting at position 1399 of SEQ ID NO: 1884049
gguaaauaaugucuguuaa

SEQ ID NO: 2236263 - RNA, 19 nt, Artificial Sequence
  Description of Artificial Sequence: Synthetic oligonucleotide
  Antisense strand to SEQ ID NO: 2236262
uuaacagacauuauuuacc

SEQ ID NO: 2236264 - RNA, 19 nt, Artificial Sequence
  Description of Artificial Sequence: Synthetic oligonucleotide
  Sense strand starting at position 1400 of SEQ ID NO: 1884049
guaaauaaugucuguuaag

SEQ ID NO: 2236265 - RNA, 19 nt, Artificial Sequence
  Description of Artificial Sequence: Synthetic oligonucleotide
  Antisense strand to SEQ ID NO: 2236264
cuuaacagacauuauuuac

SEQ ID NO: 2236266 - RNA, 19 nt, Artificial Sequence
  Description of Artificial Sequence: Synthetic oligonucleotide
  Sense strand starting at position 1438 of SEQ ID NO: 1884049
gacacacuuuguguuaaag

SEQ ID NO: 2236267 - RNA, 19 nt, Artificial Sequence
  Description of Artificial Sequence: Synthetic oligonucleotide
  Antisense strand to SEQ ID NO: 2236266
cuuuaacacaaaguguguc

SEQ ID NO: 2236268 - RNA, 19 nt, Artificial Sequence
  Description of Artificial Sequence: Synthetic oligonucleotide
  Sense strand starting at position 1620 of SEQ ID NO: 1884049
cugguucugguccaaauca

SEQ ID NO: 2236269 - RNA, 19 nt, Artificial Sequence
  Description of Artificial Sequence: Synthetic oligonucleotide
  Antisense strand to SEQ ID NO: 2236268
ugauuuggaccagaaccag

SEQ ID NO: 2236270 - RNA, 19 nt, Artificial Sequence
  Description of Artificial Sequence: Synthetic oligonucleotide
  Sense strand starting at position 2267 of SEQ ID NO: 1884049
ggugguuccuuacuugaag

SEQ ID NO: 2236271 - RNA, 19 nt, Artificial Sequence
  Description of Artificial Sequence: Synthetic oligonucleotide
  Antisense strand to SEQ ID NO: 2236270
cuucaaguaaggaaccacc

SEQ ID NO: 2236272 - RNA, 19 nt, Artificial Sequence
  Description of Artificial Sequence: Synthetic oligonucleotide
  Sense strand starting at position 2432 of SEQ ID NO: 1884049
cuuccaaugagugguaguu

SEQ ID NO: 2236273 - RNA, 19 nt, Artificial Sequence
  Description of Artificial Sequence: Synthetic oligonucleotide
  Antisense strand to SEQ ID NO: 2236272
aacuaccacucauuggaag

SEQ ID NO: 2236274 - RNA, 19 nt, Artificial Sequence
  Description of Artificial Sequence: Synthetic oligonucleotide
  Sense strand starting at position 2458 of SEQ ID NO: 1884049
gcaacuugaccauagcagu

SEQ ID NO: 2236275 - RNA, 19 nt, Artificial Sequence
  Description of Artificial Sequence: Synthetic oligonucleotide
  Antisense strand to SEQ ID NO: 2236274
acugcuauggucaaguugc

SEQ ID NO: 2236276 - RNA, 19 nt, Artificial Sequence
  Description of Artificial Sequence: Synthetic oligonucleotide
  Sense strand starting at position 2600 of SEQ ID NO: 1884049
uucugaaaugcugaaacuu

SEQ ID NO: 2236277 - RNA, 19 nt, Artificial Sequence
  Description of Artificial Sequence: Synthetic oligonucleotide
  Antisense strand to SEQ ID NO: 2236276
aaguuucagcauuucagaa

SEQ ID NO: 2236278 - RNA, 19 nt, Artificial Sequence
  Description of Artificial Sequence: Synthetic oligonucleotide
  Sense strand starting at position 2791 of SEQ ID NO: 1884049
caguaugugccugacagua

SEQ ID NO: 2236279 - RNA, 19 nt, Artificial Sequence
  Description of Artificial Sequence: Synthetic oligonucleotide
  Antisense strand to SEQ ID NO: 2236278
uacugucaggcacauacug

SEQ ID NO: 2236280 - RNA, 19 nt, Artificial Sequence
  Description of Artificial Sequence: Synthetic oligonucleotide
  Sense strand starting at position 2796 of SEQ ID NO: 1884049
ugugccugacaguauucua

SEQ ID NO: 2236281 - RNA, 19 nt, Artificial Sequence
  Description of Artificial Sequence: Synthetic oligonucleotide
  Antisense strand to SEQ ID NO: 2236280
uagaauacugucaggcaca

SEQ ID NO: 2236282 - RNA, 19 nt, Artificial Sequence
  Description of Artificial Sequence: Synthetic oligonucleotide
  Sense strand starting at position 2799 of SEQ ID NO: 1884049
gccugacaguauucuaacu

SEQ ID NO: 2236283 - RNA, 19 nt, Artificial Sequence
  Description of Artificial Sequence: Synthetic oligonucleotide
  Antisense strand to SEQ ID NO: 2236282
aguuagaauacugucaggc

SEQ ID NO: 2236284 - RNA, 19 nt, Artificial Sequence
  Description of Artificial Sequence: Synthetic oligonucleotide
  Sense strand starting at position 2882 of SEQ ID NO: 1884049
uggagaaaguaaguuaucu

SEQ ID NO: 2236285 - RNA, 19 nt, Artificial Sequence
  Description of Artificial Sequence: Synthetic oligonucleotide
  Antisense strand to SEQ ID NO: 2236284
agauaacuuacuuucucca

SEQ ID NO: 2236286 - RNA, 19 nt, Artificial Sequence
  Description of Artificial Sequence: Synthetic oligonucleotide
  Sense strand starting at position 2988 of SEQ ID NO: 1884049
gaaaguguauugguccauu

SEQ ID NO: 2236287 - RNA, 19 nt, Artificial Sequence
  Description of Artificial Sequence: Synthetic oligonucleotide
  Antisense strand to SEQ ID NO: 2236286
aauggaccaauacacuuuc

SEQ ID NO: 2236288 - RNA, 19 nt, Artificial Sequence
  Description of Artificial Sequence: Synthetic oligonucleotide
  Sense strand starting at position 3039 of SEQ ID NO: 1884049
acagguaauuuauaaaggu

SEQ ID NO: 2236289 - RNA, 19 nt, Artificial Sequence
  Description of Artificial Sequence: Synthetic oligonucleotide
  Antisense strand to SEQ ID NO: 2236288
accuuuauaaauuaccugu

SEQ ID NO: 2236290 - RNA, 19 nt, Artificial Sequence
  Description of Artificial Sequence: Synthetic oligonucleotide
  Sense strand starting at position 3090 of SEQ ID NO: 1884049
acucauguuccacaugacu

SEQ ID NO: 2236291 - RNA, 19 nt, Artificial Sequence
  Description of Artificial Sequence: Synthetic oligonucleotide
  Antisense strand to SEQ ID NO: 2236290
agucauguggaacaugagu

SEQ ID NO: 2236292 - RNA, 19 nt, Artificial Sequence
  Description of Artificial Sequence: Synthetic oligonucleotide
  Sense strand starting at position 3552 of SEQ ID NO: 1884049
ucaauuaguguaggcagau

SEQ ID NO: 2236293 - RNA, 19 nt, Artificial Sequence
  Description of Artificial Sequence: Synthetic oligonucleotide
  Antisense strand to SEQ ID NO: 2236292
aucugccuacacuaauuga

SEQ ID NO: 2236294 - RNA, 19 nt, Artificial Sequence
  Description of Artificial Sequence: Synthetic oligonucleotide
  Sense strand starting at position 3553 of SEQ ID NO: 1884049
caauuaguguaggcagaua

SEQ ID NO: 2236295 - RNA, 19 nt, Artificial Sequence
  Description of Artificial Sequence: Synthetic oligonucleotide
  Antisense strand to SEQ ID NO: 2236294
uaucugccuacacuaauug

SEQ ID NO: 2236296 - RNA, 19 nt, Artificial Sequence
  Description of Artificial Sequence: Synthetic oligonucleotide
  Sense strand starting at position 3728 of SEQ ID NO: 1884049
ugaggcaucucugucagau

SEQ ID NO: 2236297 - RNA, 19 nt, Artificial Sequence
  Description of Artificial Sequence: Synthetic oligonucleotide
  Antisense strand to SEQ ID NO: 2236296
aucugacagagaugccuca

SEQ ID NO: 2236298 - RNA, 19 nt, Artificial Sequence
  Description of Artificial Sequence: Synthetic oligonucleotide
  Sense strand starting at position 3740 of SEQ ID NO: 1884049
gucagauguguguauagug

SEQ ID NO: 2236299 - RNA, 19 nt, Artificial Sequence
  Description of Artificial Sequence: Synthetic oligonucleotide
  Antisense strand to SEQ ID NO: 2236298
cacuauacacacaucugac

SEQ ID NO: 2236300 - RNA, 19 nt, Artificial Sequence
  Description of Artificial Sequence: Synthetic oligonucleotide
  Sense strand starting at position 3747 of SEQ ID NO: 1884049
guguguauaguggucugua

SEQ ID NO: 2236301 - RNA, 19 nt, Artificial Sequence
  Description of Artificial Sequence: Synthetic oligonucleotide
  Antisense strand to SEQ ID NO: 2236300
uacagaccacuauacacac

SEQ ID NO: 2236302 - RNA, 19 nt, Artificial Sequence
  Description of Artificial Sequence: Synthetic oligonucleotide
  Sense strand starting at position 3752 of SEQ ID NO: 1884049
uauaguggucuguauaaua

SEQ ID NO: 2236303 - RNA, 19 nt, Artificial Sequence
  Description of Artificial Sequence: Synthetic oligonucleotide
  Antisense strand to SEQ ID NO: 2236302
uauuauacagaccacuaua

SEQ ID NO: 2236304 - RNA, 19 nt, Artificial Sequence
  Description of Artificial Sequence: Synthetic oligonucleotide
  Sense strand starting at position 3871 of SEQ ID NO: 1884049
uucugaucauuugggagau

SEQ ID NO: 2236305 - RNA, 19 nt, Artificial Sequence
  Description of Artificial Sequence: Synthetic oligonucleotide
  Antisense strand to SEQ ID NO: 2236304
aucucccaaaugaucagaa

SEQ ID NO: 2236306 - RNA, 19 nt, Artificial Sequence
  Description of Artificial Sequence: Synthetic oligonucleotide
  Sense strand starting at position 3872 of SEQ ID NO: 1884049
ucugaucauuugggagaug

SEQ ID NO: 2236307 - RNA, 19 nt, Artificial Sequence
  Description of Artificial Sequence: Synthetic oligonucleotide
  Antisense strand to SEQ ID NO: 2236306
caucucccaaaugaucaga

SEQ ID NO: 2236308 - RNA, 19 nt, Artificial Sequence
  Description of Artificial Sequence: Synthetic oligonucleotide
  Sense strand starting at position 2420 of SEQ ID NO: 1884050
aagagaagcgugcaaagaa

SEQ ID NO: 2236309 - RNA, 19 nt, Artificial Sequence
  Description of Artificial Sequence: Synthetic oligonucleotide
  Antisense strand to SEQ ID NO: 2236308
uucuuugcacgcuucucuu

SEQ ID NO: 2236310 - RNA, 19 nt, Artificial Sequence
  Description of Artificial Sequence: Synthetic oligonucleotide
  Sense strand starting at position 2498 of SEQ ID NO: 1884050
cgcugagauaguuauguuu

SEQ ID NO: 2236311 - RNA, 19 nt, Artificial Sequence
  Description of Artificial Sequence: Synthetic oligonucleotide
  Antisense strand to SEQ ID NO: 2236310
aaacauaacuaucucagcg

SEQ ID NO: 2236312 - RNA, 19 nt, Artificial Sequence
  Description of Artificial Sequence: Synthetic oligonucleotide
  Sense strand starting at position 2653 of SEQ ID NO: 1884050
cugggauaguuccucuaag

SEQ ID NO: 2236313 - RNA, 19 nt, Artificial Sequence
  Description of Artificial Sequence: Synthetic oligonucleotide
  Antisense strand to SEQ ID NO: 2236312
cuuagaggaacuaucccag

SEQ ID NO: 2236314 - RNA, 19 nt, Artificial Sequence
  Description of Artificial Sequence: Synthetic oligonucleotide
  Sense strand starting at position 2654 of SEQ ID NO: 1884050
ugggauaguuccucuaaga

SEQ ID NO: 2236315 - RNA, 19 nt, Artificial Sequence
  Description of Artificial Sequence: Synthetic oligonucleotide
  Antisense strand to SEQ ID NO: 2236314
ucuuagaggaacuauccca

SEQ ID NO: 2236316 - RNA, 19 nt, Artificial Sequence
  Description of Artificial Sequence: Synthetic oligonucleotide
  Sense strand starting at position 2696 of SEQ ID NO: 1884050
ggucucuaagcgcuguuaa

SEQ ID NO: 2236317 - RNA, 19 nt, Artificial Sequence
  Description of Artificial Sequence: Synthetic oligonucleotide
  Antisense strand to SEQ ID NO: 2236316
uuaacagcgcuuagagacc

SEQ ID NO: 2236318 - RNA, 19 nt, Artificial Sequence
  Description of Artificial Sequence: Synthetic oligonucleotide
  Sense strand starting at position 2706 of SEQ ID NO: 1884050
cgcuguuaagcggaaccau

SEQ ID NO: 2236319 - RNA, 19 nt, Artificial Sequence
  Description of Artificial Sequence: Synthetic oligonucleotide
  Antisense strand to SEQ ID NO: 2236318
augguuccgcuuaacagcg

SEQ ID NO: 2236320 - RNA, 19 nt, Artificial Sequence
  Description of Artificial Sequence: Synthetic oligonucleotide
  Sense strand starting at position 2759 of SEQ ID NO: 1884050
cggugauacugacugcaga

SEQ ID NO: 2236321 - RNA, 19 nt, Artificial Sequence
  Description of Artificial Sequence: Synthetic oligonucleotide
  Antisense strand to SEQ ID NO: 2236320
ucugcagucaguaucaccg

SEQ ID NO: 2236322 - RNA, 19 nt, Artificial Sequence
  Description of Artificial Sequence: Synthetic oligonucleotide
  Sense strand starting at position 2837 of SEQ ID NO: 1884050
uagggaaccugcuaauaga

SEQ ID NO: 2236323 - RNA, 19 nt, Artificial Sequence
  Description of Artificial Sequence: Synthetic oligonucleotide
  Antisense strand to SEQ ID NO: 2236322
ucuauuagcagguucccua

SEQ ID NO: 2236324 - RNA, 19 nt, Artificial Sequence
  Description of Artificial Sequence: Synthetic oligonucleotide
  Sense strand starting at position 2870 of SEQ ID NO: 1884050
acgggcuucccucaguaaa

SEQ ID NO: 2236325 - RNA, 19 nt, Artificial Sequence
  Description of Artificial Sequence: Synthetic oligonucleotide
  Antisense strand to SEQ ID NO: 2236324
uuuacugagggaagcccgu

SEQ ID NO: 2236326 - RNA, 19 nt, Artificial Sequence
  Description of Artificial Sequence: Synthetic oligonucleotide
  Sense strand starting at position 2910 of SEQ ID NO: 1884050
uuucuaucugagugacucu

SEQ ID NO: 2236327 - RNA, 19 nt, Artificial Sequence
  Description of Artificial Sequence: Synthetic oligonucleotide
  Antisense strand to SEQ ID NO: 2236326
agagucacucagauagaaa

SEQ ID NO: 2236328 - RNA, 19 nt, Artificial Sequence
  Description of Artificial Sequence: Synthetic oligonucleotide
  Sense strand starting at position 2917 of SEQ ID NO: 1884050
cugagugacucuccuuagu

SEQ ID NO: 2236329 - RNA, 19 nt, Artificial Sequence
  Description of Artificial Sequence: Synthetic oligonucleotide
  Antisense strand to SEQ ID NO: 2236328
acuaaggagagucacucag

SEQ ID NO: 2236330 - RNA, 19 nt, Artificial Sequence
  Description of Artificial Sequence: Synthetic oligonucleotide
  Sense strand starting at position 2927 of SEQ ID NO: 1884050
cuccuuagucgugguaaau

SEQ ID NO: 2236331 - RNA, 19 nt, Artificial Sequence
  Description of Artificial Sequence: Synthetic oligonucleotide
  Antisense strand to SEQ ID NO: 2236330
auuuaccacgacuaaggag

SEQ ID NO: 2236332 - RNA, 19 nt, Artificial Sequence
  Description of Artificial Sequence: Synthetic oligonucleotide
  Sense strand starting at position 2933 of SEQ ID NO: 1884050
agucgugguaaauaaauaa

SEQ ID NO: 2236333 - RNA, 19 nt, Artificial Sequence
  Description of Artificial Sequence: Synthetic oligonucleotide
  Antisense strand to SEQ ID NO: 2236332
uuauuuauuuaccacgacu

SEQ ID NO: 2236334 - RNA, 19 nt, Artificial Sequence
  Description of Artificial Sequence: Synthetic oligonucleotide
  Sense strand starting at position 3006 of SEQ ID NO: 1884050
guuuacaugcaguguuuga

SEQ ID NO: 2236335 - RNA, 19 nt, Artificial Sequence
  Description of Artificial Sequence: Synthetic oligonucleotide
  Antisense strand to SEQ ID NO: 2236334
ucaaacacugcauguaaac

SEQ ID NO: 2236336 - RNA, 19 nt, Artificial Sequence
  Description of Artificial Sequence: Synthetic oligonucleotide
  Sense strand starting at position 3098 of SEQ ID NO: 1884050
uugucaguuuauucucaca

SEQ ID NO: 2236337 - RNA, 19 nt, Artificial Sequence
  Description of Artificial Sequence: Synthetic oligonucleotide
  Antisense strand to SEQ ID NO: 2236336
ugugagaauaaacugacaa

SEQ ID NO: 2236338 - RNA, 19 nt, Artificial Sequence
  Description of Artificial Sequence: Synthetic oligonucleotide
  Sense strand starting at position 3138 of SEQ ID NO: 1884050
cucaccauggucuguuaga

SEQ ID NO: 2236339 - RNA, 19 nt, Artificial Sequence
  Description of Artificial Sequence: Synthetic oligonucleotide
  Antisense strand to SEQ ID NO: 2236338
ucuaacagaccauggugag

SEQ ID NO: 2236340 - RNA, 19 nt, Artificial Sequence
  Description of Artificial Sequence: Synthetic oligonucleotide
  Sense strand starting at position 3139 of SEQ ID NO: 1884050
ucaccauggucuguuagaa

SEQ ID NO: 2236341 - RNA, 19 nt, Artificial Sequence
  Description of Artificial Sequence: Synthetic oligonucleotide
  Antisense strand to SEQ ID NO: 2236340
uucuaacagaccaugguga

SEQ ID NO: 2236342 - RNA, 19 nt, Artificial Sequence
  Description of Artificial Sequence: Synthetic oligonucleotide
  Sense strand starting at position 3228 of SEQ ID NO: 1884050
gguguucaucccugugaga

SEQ ID NO: 2236343 - RNA, 19 nt, Artificial Sequence
  Description of Artificial Sequence: Synthetic oligonucleotide
  Antisense strand to SEQ ID NO: 2236342
ucucacagggaugaacacc

SEQ ID NO: 2236344 - RNA, 19 nt, Artificial Sequence
  Description of Artificial Sequence: Synthetic oligonucleotide
  Sense strand starting at position 3309 of SEQ ID NO: 1884050
guguuagagaaguauucuu

SEQ ID NO: 2236345 - RNA, 19 nt, Artificial Sequence
  Description of Artificial Sequence: Synthetic oligonucleotide
  Antisense strand to SEQ ID NO: 2236344
aagaauacuucucuaacac

SEQ ID NO: 2236346 - RNA, 19 nt, Artificial Sequence
  Description of Artificial Sequence: Synthetic oligonucleotide
  Sense strand starting at position 3460 of SEQ ID NO: 1884050
agguguuggcaaggacuaa

SEQ ID NO: 2236347 - RNA, 19 nt, Artificial Sequence
  Description of Artificial Sequence: Synthetic oligonucleotide
  Antisense strand to SEQ ID NO: 2236346
uuaguccuugccaacaccu

SEQ ID NO: 2236348 - RNA, 19 nt, Artificial Sequence
  Description of Artificial Sequence: Synthetic oligonucleotide
  Sense strand starting at position 3461 of SEQ ID NO: 1884050
gguguuggcaaggacuaaa

SEQ ID NO: 2236349 - RNA, 19 nt, Artificial Sequence
  Description of Artificial Sequence: Synthetic oligonucleotide
  Antisense strand to SEQ ID NO: 2236348
uuuaguccuugccaacacc

SEQ ID NO: 2236350 - RNA, 19 nt, Artificial Sequence
  Description of Artificial Sequence: Synthetic oligonucleotide
  Sense strand starting at position 3472 of SEQ ID NO: 1884050
ggacuaaaccaaugcaacu

SEQ ID NO: 2236351 - RNA, 19 nt, Artificial Sequence
  Description of Artificial Sequence: Synthetic oligonucleotide
  Antisense strand to SEQ ID NO: 2236350
aguugcauugguuuagucc

SEQ ID NO: 2236352 - RNA, 19 nt, Artificial Sequence
  Description of Artificial Sequence: Synthetic oligonucleotide
  Sense strand starting at position 3504 of SEQ ID NO: 1884050
agccuaaaucuguaaacug

SEQ ID NO: 2236353 - RNA, 19 nt, Artificial Sequence
  Description of Artificial Sequence: Synthetic oligonucleotide
  Antisense strand to SEQ ID NO: 2236352
caguuuacagauuuaggcu

SEQ ID NO: 2236354 - RNA, 19 nt, Artificial Sequence
  Description of Artificial Sequence: Synthetic oligonucleotide
  Sense strand starting at position 3515 of SEQ ID NO: 1884050
guaaacugguacccuuaaa

SEQ ID NO: 2236355 - RNA, 19 nt, Artificial Sequence
  Description of Artificial Sequence: Synthetic oligonucleotide
  Antisense strand to SEQ ID NO: 2236354
uuuaaggguaccaguuuac

SEQ ID NO: 2236356 - RNA, 19 nt, Artificial Sequence
  Description of Artificial Sequence: Synthetic oligonucleotide
  Sense strand starting at position 3560 of SEQ ID NO: 1884050
cagguaguucuuugacuca

SEQ ID NO: 2236357 - RNA, 19 nt, Artificial Sequence
  Description of Artificial Sequence: Synthetic oligonucleotide
  Antisense strand to SEQ ID NO: 2236356
ugagucaaagaacuaccug

SEQ ID NO: 2236358 - RNA, 19 nt, Artificial Sequence
  Description of Artificial Sequence: Synthetic oligonucleotide
  Sense strand starting at position 3633 of SEQ ID NO: 1884050
gguuccuacuucuuuguua

SEQ ID NO: 2236359 - RNA, 19 nt, Artificial Sequence
  Description of Artificial Sequence: Synthetic oligonucleotide
  Antisense strand to SEQ ID NO: 2236358
uaacaaagaaguaggaacc

SEQ ID NO: 2236360 - RNA, 19 nt, Artificial Sequence
  Description of Artificial Sequence: Synthetic oligonucleotide
  Sense strand starting at position 3634 of SEQ ID NO: 1884050
guuccuacuucuuuguuau

SEQ ID NO: 2236361 - RNA, 19 nt, Artificial Sequence
  Description of Artificial Sequence: Synthetic oligonucleotide
  Antisense strand to SEQ ID NO: 2236360
auaacaaagaaguaggaac

SEQ ID NO: 2236362 - RNA, 19 nt, Artificial Sequence
  Description of Artificial Sequence: Synthetic oligonucleotide
  Sense strand starting at position 3635 of SEQ ID NO: 1884050
uuccuacuucuuuguuaug

SEQ ID NO: 2236363 - RNA, 19 nt, Artificial Sequence
  Description of Artificial Sequence: Synthetic oligonucleotide
  Antisense strand to SEQ ID NO: 2236362
cauaacaaagaaguaggaa

SEQ ID NO: 2236364 - RNA, 19 nt, Artificial Sequence
  Description of Artificial Sequence: Synthetic oligonucleotide
  Sense strand starting at position 3637 of SEQ ID NO: 1884050
ccuacuucuuuguuaugca

SEQ ID NO: 2236365 - RNA, 19 nt, Artificial Sequence
  Description of Artificial Sequence: Synthetic oligonucleotide
  Antisense strand to SEQ ID NO: 2236364
ugcauaacaaagaaguagg

SEQ ID NO: 2236366 - RNA, 19 nt, Artificial Sequence
  Description of Artificial Sequence: Synthetic oligonucleotide
  Sense strand starting at position 3649 of SEQ ID NO: 1884050
uuaugcauuucuccucgua

SEQ ID NO: 2236367 - RNA, 19 nt, Artificial Sequence
  Description of Artificial Sequence: Synthetic oligonucleotide
  Antisense strand to SEQ ID NO: 2236366
uacgaggagaaaugcauaa

SEQ ID NO: 2236368 - RNA, 19 nt, Artificial Sequence
  Description of Artificial Sequence: Synthetic oligonucleotide
  Sense strand starting at position 3651 of SEQ ID NO: 1884050
augcauuucuccucguaga

SEQ ID NO: 2236369 - RNA, 19 nt, Artificial Sequence
  Description of Artificial Sequence: Synthetic oligonucleotide
  Antisense strand to SEQ ID NO: 2236368
ucuacgaggagaaaugcau

SEQ ID NO: 2236370 - RNA, 19 nt, Artificial Sequence
  Description of Artificial Sequence: Synthetic oligonucleotide
  Sense strand starting at position 3652 of SEQ ID NO: 1884050
ugcauuucuccucguagau

SEQ ID NO: 2236371 - RNA, 19 nt, Artificial Sequence
  Description of Artificial Sequence: Synthetic oligonucleotide
  Antisense strand to SEQ ID NO: 2236370
aucuacgaggagaaaugca

SEQ ID NO: 2236372 - RNA, 19 nt, Artificial Sequence
  Description of Artificial Sequence: Synthetic oligonucleotide
  Sense strand starting at position 3656 of SEQ ID NO: 1884050
uuucuccucguagauaaau

SEQ ID NO: 2236373 - RNA, 19 nt, Artificial Sequence
  Description of Artificial Sequence: Synthetic oligonucleotide
  Antisense strand to SEQ ID NO: 2236372
auuuaucuacgaggagaaa

SEQ ID NO: 2236374 - RNA, 19 nt, Artificial Sequence
  Description of Artificial Sequence: Synthetic oligonucleotide
  Sense strand starting at position 3683 of SEQ ID NO: 1884050
cuaacuugaugaguaggua

SEQ ID NO: 2236375 - RNA, 19 nt, Artificial Sequence
  Description of Artificial Sequence: Synthetic oligonucleotide
  Antisense strand to SEQ ID NO: 2236374
uaccuacucaucaaguuag

SEQ ID NO: 2236376 - RNA, 19 nt, Artificial Sequence
  Description of Artificial Sequence: Synthetic oligonucleotide
  Sense strand starting at position 3686 of SEQ ID NO: 1884050
acuugaugaguagguagau

SEQ ID NO: 2236377 - RNA, 19 nt, Artificial Sequence
  Description of Artificial Sequence: Synthetic oligonucleotide
  Antisense strand to SEQ ID NO: 2236376
aucuaccuacucaucaagu

SEQ ID NO: 2236378 - RNA, 19 nt, Artificial Sequence
  Description of Artificial Sequence: Synthetic oligonucleotide
  Sense strand starting at position 3687 of SEQ ID NO: 1884050
cuugaugaguagguagauu

SEQ ID NO: 2236379 - RNA, 19 nt, Artificial Sequence
  Description of Artificial Sequence: Synthetic oligonucleotide
  Antisense strand to SEQ ID NO: 2236378
aaucuaccuacucaucaag

SEQ ID NO: 2236380 - RNA, 19 nt, Artificial Sequence
  Description of Artificial Sequence: Synthetic oligonucleotide
  Sense strand starting at position 3796 of SEQ ID NO: 1884050
aguuaauccuauuaagaug

SEQ ID NO: 2236381 - RNA, 19 nt, Artificial Sequence
  Description of Artificial Sequence: Synthetic oligonucleotide
  Antisense strand to SEQ ID NO: 2236380
caucuuaauaggauuaacu

SEQ ID NO: 2236382 - RNA, 19 nt, Artificial Sequence
  Description of Artificial Sequence: Synthetic oligonucleotide
  Sense strand starting at position 3873 of SEQ ID NO: 1884050
ugguauauagucuaagcaa

SEQ ID NO: 2236383 - RNA, 19 nt, Artificial Sequence
  Description of Artificial Sequence: Synthetic oligonucleotide
  Antisense strand to SEQ ID NO: 2236382
uugcuuagacuauauacca

SEQ ID NO: 2236384 - RNA, 19 nt, Artificial Sequence
  Description of Artificial Sequence: Synthetic oligonucleotide
  Sense strand starting at position 3966 of SEQ ID NO: 1884050
aaguguauugaugggauga

SEQ ID NO: 2236385 - RNA, 19 nt, Artificial Sequence
  Description of Artificial Sequence: Synthetic oligonucleotide
  Antisense strand to SEQ ID NO: 2236384
ucaucccaucaauacacuu

SEQ ID NO: 2236386 - RNA, 19 nt, Artificial Sequence
  Description of Artificial Sequence: Synthetic oligonucleotide
  Sense strand starting at position 3967 of SEQ ID NO: 1884050
aguguauugaugggaugaa

SEQ ID NO: 2236387 - RNA, 19 nt, Artificial Sequence
  Description of Artificial Sequence: Synthetic oligonucleotide
  Antisense strand to SEQ ID NO: 2236386
uucaucccaucaauacacu

SEQ ID NO: 2236388 - RNA, 19 nt, Artificial Sequence
  Description of Artificial Sequence: Synthetic oligonucleotide
  Sense strand starting at position 111 of SEQ ID NO: 1884051
aaacauaccugugaaagga

SEQ ID NO: 2236389 - RNA, 19 nt, Artificial Sequence
  Description of Artificial Sequence: Synthetic oligonucleotide
  Antisense strand to SEQ ID NO: 2236388
uccuuucacagguauguuu

SEQ ID NO: 2236390 - RNA, 19 nt, Artificial Sequence
  Description of Artificial Sequence: Synthetic oligonucleotide
  Sense strand starting at position 456 of SEQ ID NO: 1884051
guagaaacugcuuaacccu

SEQ ID NO: 2236391 - RNA, 19 nt, Artificial Sequence
  Description of Artificial Sequence: Synthetic oligonucleotide
  Antisense strand to SEQ ID NO: 2236390
aggguuaagcaguuucuac

SEQ ID NO: 2236392 - RNA, 19 nt, Artificial Sequence
  Description of Artificial Sequence: Synthetic oligonucleotide
  Sense strand starting at position 485 of SEQ ID NO: 1884051
auuuaucucuguuaugcua

SEQ ID NO: 2236393 - RNA, 19 nt, Artificial Sequence
  Description of Artificial Sequence: Synthetic oligonucleotide
  Antisense strand to SEQ ID NO: 2236392
uagcauaacagagauaaau

SEQ ID NO: 2236394 - RNA, 19 nt, Artificial Sequence
  Description of Artificial Sequence: Synthetic oligonucleotide
  Sense strand starting at position 512 of SEQ ID NO: 1884051
augaguuacuucugcuaag

SEQ ID NO: 2236395 - RNA, 19 nt, Artificial Sequence
  Description of Artificial Sequence: Synthetic oligonucleotide
  Antisense strand to SEQ ID NO: 2236394
cuuagcagaaguaacucau

SEQ ID NO: 2236396 - RNA, 19 nt, Artificial Sequence
  Description of Artificial Sequence: Synthetic oligonucleotide
  Sense strand starting at position 513 of SEQ ID NO: 1884051
ugaguuacuucugcuaaga

SEQ ID NO: 2236397 - RNA, 19 nt, Artificial Sequence
  Description of Artificial Sequence: Synthetic oligonucleotide
  Antisense strand to SEQ ID NO: 2236396
ucuuagcagaaguaacuca

SEQ ID NO: 2236398 - RNA, 19 nt, Artificial Sequence
  Description of Artificial Sequence: Synthetic oligonucleotide
  Sense strand starting at position 515 of SEQ ID NO: 1884051
aguuacuucugcuaagauu

SEQ ID NO: 2236399 - RNA, 19 nt, Artificial Sequence
  Description of Artificial Sequence: Synthetic oligonucleotide
  Antisense strand to SEQ ID NO: 2236398
aaucuuagcagaaguaacu

SEQ ID NO: 2236400 - RNA, 19 nt, Artificial Sequence
  Description of Artificial Sequence: Synthetic oligonucleotide
  Sense strand starting at position 570 of SEQ ID NO: 1884051
gugucaacaucaucaguau

SEQ ID NO: 2236401 - RNA, 19 nt, Artificial Sequence
  Description of Artificial Sequence: Synthetic oligonucleotide
  Antisense strand to SEQ ID NO: 2236400
auacugaugauguugacac

SEQ ID NO: 2236402 - RNA, 19 nt, Artificial Sequence
  Description of Artificial Sequence: Synthetic oligonucleotide
  Sense strand starting at position 605 of SEQ ID NO: 1884051
agaaauauucuguaucugu

SEQ ID NO: 2236403 - RNA, 19 nt, Artificial Sequence
  Description of Artificial Sequence: Synthetic oligonucleotide
  Antisense strand to SEQ ID NO: 2236402
acagauacagaauauuucu

SEQ ID NO: 2236404 - RNA, 19 nt, Artificial Sequence
  Description of Artificial Sequence: Synthetic oligonucleotide
  Sense strand starting at position 730 of SEQ ID NO: 1884051
acauguggcuaccauacua

SEQ ID NO: 2236405 - RNA, 19 nt, Artificial Sequence
  Description of Artificial Sequence: Synthetic oligonucleotide
  Antisense strand to SEQ ID NO: 2236404
uaguaugguagccacaugu

SEQ ID NO: 2236406 - RNA, 19 nt, Artificial Sequence
  Description of Artificial Sequence: Synthetic oligonucleotide
  Sense strand starting at position 760 of SEQ ID NO: 1884051
ccuagauauugacuggacu

SEQ ID NO: 2236407 - RNA, 19 nt, Artificial Sequence
  Description of Artificial Sequence: Synthetic oligonucleotide
  Antisense strand to SEQ ID NO: 2236406
aguccagucaauaucuagg

SEQ ID NO: 2236408 - RNA, 19 nt, Artificial Sequence
  Description of Artificial Sequence: Synthetic oligonucleotide
  Sense strand starting at position 934 of SEQ ID NO: 1884051
uagcaauaucugcaugugu

SEQ ID NO: 2236409 - RNA, 19 nt, Artificial Sequence
  Description of Artificial Sequence: Synthetic oligonucleotide
  Antisense strand to SEQ ID NO: 2236408
acacaugcagauauugcua

SEQ ID NO: 2236410 - RNA, 19 nt, Artificial Sequence
  Description of Artificial Sequence: Synthetic oligonucleotide
  Sense strand starting at position 936 of SEQ ID NO: 1884051
gcaauaucugcauguguga

SEQ ID NO: 2236411 - RNA, 19 nt, Artificial Sequence
  Description of Artificial Sequence: Synthetic oligonucleotide
  Antisense strand to SEQ ID NO: 2236410
ucacacaugcagauauugc

SEQ ID NO: 2236412 - RNA, 19 nt, Artificial Sequence
  Description of Artificial Sequence: Synthetic oligonucleotide
  Sense strand starting at position 939 of SEQ ID NO: 1884051
auaucugcaugugugagau

SEQ ID NO: 2236413 - RNA, 19 nt, Artificial Sequence
  Description of Artificial Sequence: Synthetic oligonucleotide
  Antisense strand to SEQ ID NO: 2236412
aucucacacaugcagauau

SEQ ID NO: 2236414 - RNA, 19 nt, Artificial Sequence
  Description of Artificial Sequence: Synthetic oligonucleotide
  Sense strand starting at position 941 of SEQ ID NO: 1884051
aucugcaugugugagauau

SEQ ID NO: 2236415 - RNA, 19 nt, Artificial Sequence
  Description of Artificial Sequence: Synthetic oligonucleotide
  Antisense strand to SEQ ID NO: 2236414
auaucucacacaugcagau

SEQ ID NO: 2236416 - RNA, 19 nt, Artificial Sequence
  Description of Artificial Sequence: Synthetic oligonucleotide
  Sense strand starting at position 943 of SEQ ID NO: 1884051
cugcaugugugagauauga

SEQ ID NO: 2236417 - RNA, 19 nt, Artificial Sequence
  Description of Artificial Sequence: Synthetic oligonucleotide
  Antisense strand to SEQ ID NO: 2236416
ucauaucucacacaugcag

SEQ ID NO: 2236418 - RNA, 19 nt, Artificial Sequence
  Description of Artificial Sequence: Synthetic oligonucleotide
  Sense strand starting at position 945 of SEQ ID NO: 1884051
gcaugugugagauaugacu

SEQ ID NO: 2236419 - RNA, 19 nt, Artificial Sequence
  Description of Artificial Sequence: Synthetic oligonucleotide
  Antisense strand to SEQ ID NO: 2236418
agucauaucucacacaugc

SEQ ID NO: 2236420 - RNA, 19 nt, Artificial Sequence
  Description of Artificial Sequence: Synthetic oligonucleotide
  Sense strand starting at position 1084 of SEQ ID NO: 1884051
agaauaucgggcugcauaa

SEQ ID NO: 2236421 - RNA, 19 nt, Artificial Sequence
  Description of Artificial Sequence: Synthetic oligonucleotide
  Antisense strand to SEQ ID NO: 2236420
uuaugcagcccgauauucu

SEQ ID NO: 2236422 - RNA, 19 nt, Artificial Sequence
  Description of Artificial Sequence: Synthetic oligonucleotide
  Sense strand starting at position 1182 of SEQ ID NO: 1884051
aaauguuugugucugucua

SEQ ID NO: 2236423 - RNA, 19 nt, Artificial Sequence
  Description of Artificial Sequence: Synthetic oligonucleotide
  Antisense strand to SEQ ID NO: 2236422
uagacagacacaaacauuu

SEQ ID NO: 2236424 - RNA, 19 nt, Artificial Sequence
  Description of Artificial Sequence: Synthetic oligonucleotide
  Sense strand starting at position 1183 of SEQ ID NO: 1884051
aauguuugugucugucuau

SEQ ID NO: 2236425 - RNA, 19 nt, Artificial Sequence
  Description of Artificial Sequence: Synthetic oligonucleotide
  Antisense strand to SEQ ID NO: 2236424
auagacagacacaaacauu

SEQ ID NO: 2236426 - RNA, 19 nt, Artificial Sequence
  Description of Artificial Sequence: Synthetic oligonucleotide
  Sense strand starting at position 1217 of SEQ ID NO: 1884051
gugccaguaaauggauaua

SEQ ID NO: 2236427 - RNA, 19 nt, Artificial Sequence
  Description of Artificial Sequence: Synthetic oligonucleotide
  Antisense strand to SEQ ID NO: 2236426
uauauccauuuacuggcac

SEQ ID NO: 2236428 - RNA, 19 nt, Artificial Sequence
  Description of Artificial Sequence: Synthetic oligonucleotide
  Sense strand starting at position 1228 of SEQ ID NO: 1884051
uggauauaccuaugaucug

SEQ ID NO: 2236429 - RNA, 19 nt, Artificial Sequence
  Description of Artificial Sequence: Synthetic oligonucleotide
  Antisense strand to SEQ ID NO: 2236428
cagaucauagguauaucca

SEQ ID NO: 2236430 - RNA, 19 nt, Artificial Sequence
  Description of Artificial Sequence: Synthetic oligonucleotide
  Sense strand starting at position 1229 of SEQ ID NO: 1884051
ggauauaccuaugaucuga

SEQ ID NO: 2236431 - RNA, 19 nt, Artificial Sequence
  Description of Artificial Sequence: Synthetic oligonucleotide
  Antisense strand to SEQ ID NO: 2236430
ucagaucauagguauaucc

SEQ ID NO: 2236432 - RNA, 19 nt, Artificial Sequence
  Description of Artificial Sequence: Synthetic oligonucleotide
  Sense strand starting at position 1240 of SEQ ID NO: 1884051
ugaucugacuugcagagaa

SEQ ID NO: 2236433 - RNA, 19 nt, Artificial Sequence
  Description of Artificial Sequence: Synthetic oligonucleotide
  Antisense strand to SEQ ID NO: 2236432
uucucugcaagucagauca

SEQ ID NO: 2236434 - RNA, 19 nt, Artificial Sequence
  Description of Artificial Sequence: Synthetic oligonucleotide
  Sense strand starting at position 1265 of SEQ ID NO: 1884051
cuaguaucuuucgugccau

SEQ ID NO: 2236435 - RNA, 19 nt, Artificial Sequence
  Description of Artificial Sequence: Synthetic oligonucleotide
  Antisense strand to SEQ ID NO: 2236434
auggcacgaaagauacuag

SEQ ID NO: 2236436 - RNA, 19 nt, Artificial Sequence
  Description of Artificial Sequence: Synthetic oligonucleotide
  Sense strand starting at position 1268 of SEQ ID NO: 1884051
guaucuuucgugccaugca

SEQ ID NO: 2236437 - RNA, 19 nt, Artificial Sequence
  Description of Artificial Sequence: Synthetic oligonucleotide
  Antisense strand to SEQ ID NO: 2236436
ugcauggcacgaaagauac

SEQ ID NO: 2236438 - RNA, 19 nt, Artificial Sequence
  Description of Artificial Sequence: Synthetic oligonucleotide
  Sense strand starting at position 1271 of SEQ ID NO: 1884051
ucuuucgugccaugcaaua

SEQ ID NO: 2236439 - RNA, 19 nt, Artificial Sequence
  Description of Artificial Sequence: Synthetic oligonucleotide
  Antisense strand to SEQ ID NO: 2236438
uauugcauggcacgaaaga

SEQ ID NO: 2236440 - RNA, 19 nt, Artificial Sequence
  Description of Artificial Sequence: Synthetic oligonucleotide
  Sense strand starting at position 1393 of SEQ ID NO: 1884051
ucaccauaaugucaaggaa

SEQ ID NO: 2236441 - RNA, 19 nt, Artificial Sequence
  Description of Artificial Sequence: Synthetic oligonucleotide
  Antisense strand to SEQ ID NO: 2236440
uuccuugacauuaugguga

SEQ ID NO: 2236442 - RNA, 19 nt, Artificial Sequence
  Description of Artificial Sequence: Synthetic oligonucleotide
  Sense strand starting at position 1479 of SEQ ID NO: 1884051
gagauuauguugcuucucu

SEQ ID NO: 2236443 - RNA, 19 nt, Artificial Sequence
  Description of Artificial Sequence: Synthetic oligonucleotide
  Antisense strand to SEQ ID NO: 2236442
agagaagcaacauaaucuc

SEQ ID NO: 2236444 - RNA, 19 nt, Artificial Sequence
  Description of Artificial Sequence: Synthetic oligonucleotide
  Sense strand starting at position 1480 of SEQ ID NO: 1884051
agauuauguugcuucucua

SEQ ID NO: 2236445 - RNA, 19 nt, Artificial Sequence
  Description of Artificial Sequence: Synthetic oligonucleotide
  Antisense strand to SEQ ID NO: 2236444
uagagaagcaacauaaucu

SEQ ID NO: 2236446 - RNA, 19 nt, Artificial Sequence
  Description of Artificial Sequence: Synthetic oligonucleotide
  Sense strand starting at position 1709 of SEQ ID NO: 1884051
ucuggcagaugcgaaauau

SEQ ID NO: 2236447 - RNA, 19 nt, Artificial Sequence
  Description of Artificial Sequence: Synthetic oligonucleotide
  Antisense strand to SEQ ID NO: 2236446
auauuucgcaucugccaga

SEQ ID NO: 2236448 - RNA, 19 nt, Artificial Sequence
  Description of Artificial Sequence: Synthetic oligonucleotide
  Sense strand starting at position 2250 of SEQ ID NO: 1884051
gaccgugcuccggacgaau

SEQ ID NO: 2236449 - RNA, 19 nt, Artificial Sequence
  Description of Artificial Sequence: Synthetic oligonucleotide
  Antisense strand to SEQ ID NO: 2236448
auucguccggagcacgguc

SEQ ID NO: 2236450 - RNA, 19 nt, Artificial Sequence
  Description of Artificial Sequence: Synthetic oligonucleotide
  Sense strand starting at position 2781 of SEQ ID NO: 1884051
ggcuuucccugagggaaug

SEQ ID NO: 2236451 - RNA, 19 nt, Artificial Sequence
  Description of Artificial Sequence: Synthetic oligonucleotide
  Antisense strand to SEQ ID NO: 2236450
cauucccucagggaaagcc

SEQ ID NO: 2236452 - RNA, 19 nt, Artificial Sequence
  Description of Artificial Sequence: Synthetic oligonucleotide
  Sense strand starting at position 2919 of SEQ ID NO: 1884051
gagccuacauugucaggau

SEQ ID NO: 2236453 - RNA, 19 nt, Artificial Sequence
  Description of Artificial Sequence: Synthetic oligonucleotide
  Antisense strand to SEQ ID NO: 2236452
auccugacaauguaggcuc

SEQ ID NO: 2236454 - RNA, 19 nt, Artificial Sequence
  Description of Artificial Sequence: Synthetic oligonucleotide
  Sense strand starting at position 2923 of SEQ ID NO: 1884051
cuacauugucaggaugcau

SEQ ID NO: 2236455 - RNA, 19 nt, Artificial Sequence
  Description of Artificial Sequence: Synthetic oligonucleotide
  Antisense strand to SEQ ID NO: 2236454
augcauccugacaauguag

SEQ ID NO: 2236456 - RNA, 19 nt, Artificial Sequence
  Description of Artificial Sequence: Synthetic oligonucleotide
  Sense strand starting at position 3117 of SEQ ID NO: 1884051
cuauauacugggugcuaga

SEQ ID NO: 2236457 - RNA, 19 nt, Artificial Sequence
  Description of Artificial Sequence: Synthetic oligonucleotide
  Antisense strand to SEQ ID NO: 2236456
ucuagcacccaguauauag

SEQ ID NO: 2236458 - RNA, 19 nt, Artificial Sequence
  Description of Artificial Sequence: Synthetic oligonucleotide
  Sense strand starting at position 3230 of SEQ ID NO: 1884051
augucaguaucuggguaga

SEQ ID NO: 2236459 - RNA, 19 nt, Artificial Sequence
  Description of Artificial Sequence: Synthetic oligonucleotide
  Antisense strand to SEQ ID NO: 2236458
ucuacccagauacugacau

SEQ ID NO: 2236460 - RNA, 19 nt, Artificial Sequence
  Description of Artificial Sequence: Synthetic oligonucleotide
  Sense strand starting at position 3232 of SEQ ID NO: 1884051
gucaguaucuggguagaua

SEQ ID NO: 2236461 - RNA, 19 nt, Artificial Sequence
  Description of Artificial Sequence: Synthetic oligonucleotide
  Antisense strand to SEQ ID NO: 2236460
uaucuacccagauacugac

SEQ ID NO: 2236462 - RNA, 19 nt, Artificial Sequence
  Description of Artificial Sequence: Synthetic oligonucleotide
  Sense strand starting at position 3243 of SEQ ID NO: 1884051
gguagauaauccuucugac

SEQ ID NO: 2236463 - RNA, 19 nt, Artificial Sequence
  Description of Artificial Sequence: Synthetic oligonucleotide
  Antisense strand to SEQ ID NO: 2236462
gucagaaggauuaucuacc

SEQ ID NO: 2236464 - RNA, 19 nt, Artificial Sequence
  Description of Artificial Sequence: Synthetic oligonucleotide
  Sense strand starting at position 3869 of SEQ ID NO: 1884051
agggauagguguucacaac

SEQ ID NO: 2236465 - RNA, 19 nt, Artificial Sequence
  Description of Artificial Sequence: Synthetic oligonucleotide
  Antisense strand to SEQ ID NO: 2236464
guugugaacaccuaucccu

SEQ ID NO: 2236466 - RNA, 19 nt, Artificial Sequence
  Description of Artificial Sequence: Synthetic oligonucleotide
  Sense strand starting at position 3870 of SEQ ID NO: 1884051
gggauagguguucacaacu

SEQ ID NO: 2236467 - RNA, 19 nt, Artificial Sequence
  Description of Artificial Sequence: Synthetic oligonucleotide
  Antisense strand to SEQ ID NO: 2236466
aguugugaacaccuauccc

SEQ ID NO: 2236468 - RNA, 19 nt, Artificial Sequence
  Description of Artificial Sequence: Synthetic oligonucleotide
  Sense strand starting at position 226 of SEQ ID NO: 1884052
guuaauaaaccguacccau

SEQ ID NO: 2236469 - RNA, 19 nt, Artificial Sequence
  Description of Artificial Sequence: Synthetic oligonucleotide
  Antisense strand to SEQ ID NO: 2236468
auggguacgguuuauuaac

SEQ ID NO: 2236470 - RNA, 19 nt, Artificial Sequence
  Description of Artificial Sequence: Synthetic oligonucleotide
  Sense strand starting at position 248 of SEQ ID NO: 1884052
gaaacuacaguuugaugau

SEQ ID NO: 2236471 - RNA, 19 nt, Artificial Sequence
  Description of Artificial Sequence: Synthetic oligonucleotide
  Antisense strand to SEQ ID NO: 2236470
aucaucaaacuguaguuuc

SEQ ID NO: 2236472 - RNA, 19 nt, Artificial Sequence
  Description of Artificial Sequence: Synthetic oligonucleotide
  Sense strand starting at position 270 of SEQ ID NO: 1884052
gggcgacuguauacgucau

SEQ ID NO: 2236473 - RNA, 19 nt, Artificial Sequence
  Description of Artificial Sequence: Synthetic oligonucleotide
  Antisense strand to SEQ ID NO: 2236472
augacguauacagucgccc

SEQ ID NO: 2236474 - RNA, 19 nt, Artificial Sequence
  Description of Artificial Sequence: Synthetic oligonucleotide
  Sense strand starting at position 439 of SEQ ID NO: 1884052
uggacaucagaccgacuau

SEQ ID NO: 2236475 - RNA, 19 nt, Artificial Sequence
  Description of Artificial Sequence: Synthetic oligonucleotide
  Antisense strand to SEQ ID NO: 2236474
auagucggucugaugucca

SEQ ID NO: 2236476 - RNA, 19 nt, Artificial Sequence
  Description of Artificial Sequence: Synthetic oligonucleotide
  Sense strand starting at position 519 of SEQ ID NO: 1884052
guauuaauccuaugguaga

SEQ ID NO: 2236477 - RNA, 19 nt, Artificial Sequence
  Description of Artificial Sequence: Synthetic oligonucleotide
  Antisense strand to SEQ ID NO: 2236476
ucuaccauaggauuaauac

SEQ ID NO: 2236478 - RNA, 19 nt, Artificial Sequence
  Description of Artificial Sequence: Synthetic oligonucleotide
  Sense strand starting at position 1320 of SEQ ID NO: 1884052
gugguaucggcuucugguu

SEQ ID NO: 2236479 - RNA, 19 nt, Artificial Sequence
  Description of Artificial Sequence: Synthetic oligonucleotide
  Antisense strand to SEQ ID NO: 2236478
aaccagaagccgauaccac

SEQ ID NO: 2236480 - RNA, 19 nt, Artificial Sequence
  Description of Artificial Sequence: Synthetic oligonucleotide
  Sense strand starting at position 1451 of SEQ ID NO: 1884052
cuuucuucugccgaaugga

SEQ ID NO: 2236481 - RNA, 19 nt, Artificial Sequence
  Description of Artificial Sequence: Synthetic oligonucleotide
  Antisense strand to SEQ ID NO: 2236480
uccauucggcagaagaaag

SEQ ID NO: 2236482 - RNA, 19 nt, Artificial Sequence
  Description of Artificial Sequence: Synthetic oligonucleotide
  Sense strand starting at position 1595 of SEQ ID NO: 1884052
gggcgauuucuccgccuca

SEQ ID NO: 2236483 - RNA, 19 nt, Artificial Sequence
  Description of Artificial Sequence: Synthetic oligonucleotide
  Antisense strand to SEQ ID NO: 2236482
ugaggcggagaaaucgccc

SEQ ID NO: 2236484 - RNA, 19 nt, Artificial Sequence
  Description of Artificial Sequence: Synthetic oligonucleotide
  Sense strand starting at position 1647 of SEQ ID NO: 1884052
cccagucuucguuccgauu

SEQ ID NO: 2236485 - RNA, 19 nt, Artificial Sequence
  Description of Artificial Sequence: Synthetic oligonucleotide
  Antisense strand to SEQ ID NO: 2236484
aaucggaacgaagacuggg

SEQ ID NO: 2236486 - RNA, 19 nt, Artificial Sequence
  Description of Artificial Sequence: Synthetic oligonucleotide
  Sense strand starting at position 1802 of SEQ ID NO: 1884052
ucgucuucuccucucgcaa

SEQ ID NO: 2236487 - RNA, 19 nt, Artificial Sequence
  Description of Artificial Sequence: Synthetic oligonucleotide
  Antisense strand to SEQ ID NO: 2236486
uugcgagaggagaagacga

SEQ ID NO: 2236488 - RNA, 19 nt, Artificial Sequence
  Description of Artificial Sequence: Synthetic oligonucleotide
  Sense strand starting at position 1803 of SEQ ID NO: 1884052
cgucuucuccucucgcaaa

SEQ ID NO: 2236489 - RNA, 19 nt, Artificial Sequence
  Description of Artificial Sequence: Synthetic oligonucleotide
  Antisense strand to SEQ ID NO: 2236488
uuugcgagaggagaagacg

SEQ ID NO: 2236490 - RNA, 19 nt, Artificial Sequence
  Description of Artificial Sequence: Synthetic oligonucleotide
  Sense strand starting at position 1837 of SEQ ID NO: 1884052
guuuguucugcugaaucca

SEQ ID NO: 2236491 - RNA, 19 nt, Artificial Sequence
  Description of Artificial Sequence: Synthetic oligonucleotide
  Antisense strand to SEQ ID NO: 2236490
uggauucagcagaacaaac

SEQ ID NO: 2236492 - RNA, 19 nt, Artificial Sequence
  Description of Artificial Sequence: Synthetic oligonucleotide
  Sense strand starting at position 2046 of SEQ ID NO: 1884052
uggagucagcagugaagaa

SEQ ID NO: 2236493 - RNA, 19 nt, Artificial Sequence
  Description of Artificial Sequence: Synthetic oligonucleotide
  Antisense strand to SEQ ID NO: 2236492
uucuucacugcugacucca

SEQ ID NO: 2236494 - RNA, 19 nt, Artificial Sequence
  Description of Artificial Sequence: Synthetic oligonucleotide
  Sense strand starting at position 2047 of SEQ ID NO: 1884052
ggagucagcagugaagaau

SEQ ID NO: 2236495 - RNA, 19 nt, Artificial Sequence
  Description of Artificial Sequence: Synthetic oligonucleotide
  Antisense strand to SEQ ID NO: 2236494
auucuucacugcugacucc

SEQ ID NO: 2236496 - RNA, 19 nt, Artificial Sequence
  Description of Artificial Sequence: Synthetic oligonucleotide
  Sense strand starting at position 2129 of SEQ ID NO: 1884052
gguauugcagaguggugaa

SEQ ID NO: 2236497 - RNA, 19 nt, Artificial Sequence
  Description of Artificial Sequence: Synthetic oligonucleotide
  Antisense strand to SEQ ID NO: 2236496
uucaccacucugcaauacc

SEQ ID NO: 2236498 - RNA, 19 nt, Artificial Sequence
  Description of Artificial Sequence: Synthetic oligonucleotide
  Sense strand starting at position 2175 of SEQ ID NO: 1884052
caaauaguguccuuuggac

SEQ ID NO: 2236499 - RNA, 19 nt, Artificial Sequence
  Description of Artificial Sequence: Synthetic oligonucleotide
  Antisense strand to SEQ ID NO: 2236498
guccaaaggacacuauuug

SEQ ID NO: 2236500 - RNA, 19 nt, Artificial Sequence
  Description of Artificial Sequence: Synthetic oligonucleotide
  Sense strand starting at position 2213 of SEQ ID NO: 1884052
cccucagagugacuacuau

SEQ ID NO: 2236501 - RNA, 19 nt, Artificial Sequence
  Description of Artificial Sequence: Synthetic oligonucleotide
  Antisense strand to SEQ ID NO: 2236500
auaguagucacucugaggg

SEQ ID NO: 2236502 - RNA, 19 nt, Artificial Sequence
  Description of Artificial Sequence: Synthetic oligonucleotide
  Sense strand starting at position 2333 of SEQ ID NO: 1884052
uugacagcagcguaguaaa

SEQ ID NO: 2236503 - RNA, 19 nt, Artificial Sequence
  Description of Artificial Sequence: Synthetic oligonucleotide
  Antisense strand to SEQ ID NO: 2236502
uuuacuacgcugcugucaa

SEQ ID NO: 2236504 - RNA, 19 nt, Artificial Sequence
  Description of Artificial Sequence: Synthetic oligonucleotide
  Sense strand starting at position 2343 of SEQ ID NO: 1884052
cguaguaaaguuuggauuu

SEQ ID NO: 2236505 - RNA, 19 nt, Artificial Sequence
  Description of Artificial Sequence: Synthetic oligonucleotide
  Antisense strand to SEQ ID NO: 2236504
aaauccaaacuuuacuacg

SEQ ID NO: 2236506 - RNA, 19 nt, Artificial Sequence
  Description of Artificial Sequence: Synthetic oligonucleotide
  Sense strand starting at position 2400 of SEQ ID NO: 1884052
uuauuucucuuuguagcau

SEQ ID NO: 2236507 - RNA, 19 nt, Artificial Sequence
  Description of Artificial Sequence: Synthetic oligonucleotide
  Antisense strand to SEQ ID NO: 2236506
augcuacaaagagaaauaa

SEQ ID NO: 2236508 - RNA, 19 nt, Artificial Sequence
  Description of Artificial Sequence: Synthetic oligonucleotide
  Sense strand starting at position 2419 of SEQ ID NO: 1884052
uuauaaccuccugguauga

SEQ ID NO: 2236509 - RNA, 19 nt, Artificial Sequence
  Description of Artificial Sequence: Synthetic oligonucleotide
  Antisense strand to SEQ ID NO: 2236508
ucauaccaggagguuauaa

SEQ ID NO: 2236510 - RNA, 19 nt, Artificial Sequence
  Description of Artificial Sequence: Synthetic oligonucleotide
  Sense strand starting at position 2555 of SEQ ID NO: 1884052
cuuuguaaauacuugcuga

SEQ ID NO: 2236511 - RNA, 19 nt, Artificial Sequence
  Description of Artificial Sequence: Synthetic oligonucleotide
  Antisense strand to SEQ ID NO: 2236510
ucagcaaguauuuacaaag

SEQ ID NO: 2236512 - RNA, 19 nt, Artificial Sequence
  Description of Artificial Sequence: Synthetic oligonucleotide
  Sense strand starting at position 2566 of SEQ ID NO: 1884052
cuugcugaaucaguggaaa

SEQ ID NO: 2236513 - RNA, 19 nt, Artificial Sequence
  Description of Artificial Sequence: Synthetic oligonucleotide
  Antisense strand to SEQ ID NO: 2236512
uuuccacugauucagcaag

SEQ ID NO: 2236514 - RNA, 19 nt, Artificial Sequence
  Description of Artificial Sequence: Synthetic oligonucleotide
  Sense strand starting at position 2641 of SEQ ID NO: 1884052
ggcgaaugaugcaaggaga

SEQ ID NO: 2236515 - RNA, 19 nt, Artificial Sequence
  Description of Artificial Sequence: Synthetic oligonucleotide
  Antisense strand to SEQ ID NO: 2236514
ucuccuugcaucauucgcc

SEQ ID NO: 2236516 - RNA, 19 nt, Artificial Sequence
  Description of Artificial Sequence: Synthetic oligonucleotide
  Sense strand starting at position 2657 of SEQ ID NO: 1884052
agaaguuaucucugaaccu

SEQ ID NO: 2236517 - RNA, 19 nt, Artificial Sequence
  Description of Artificial Sequence: Synthetic oligonucleotide
  Antisense strand to SEQ ID NO: 2236516
agguucagagauaacuucu

SEQ ID NO: 2236518 - RNA, 19 nt, Artificial Sequence
  Description of Artificial Sequence: Synthetic oligonucleotide
  Sense strand starting at position 2805 of SEQ ID NO: 1884052
gggauugguucucugaggu

SEQ ID NO: 2236519 - RNA, 19 nt, Artificial Sequence
  Description of Artificial Sequence: Synthetic oligonucleotide
  Antisense strand to SEQ ID NO: 2236518
accucagagaaccaauccc

SEQ ID NO: 2236520 - RNA, 19 nt, Artificial Sequence
  Description of Artificial Sequence: Synthetic oligonucleotide
  Sense strand starting at position 2873 of SEQ ID NO: 1884052
aucuguuacccucagacau

SEQ ID NO: 2236521 - RNA, 19 nt, Artificial Sequence
  Description of Artificial Sequence: Synthetic oligonucleotide
  Antisense strand to SEQ ID NO: 2236520
augucugaggguaacagau

SEQ ID NO: 2236522 - RNA, 19 nt, Artificial Sequence
  Description of Artificial Sequence: Synthetic oligonucleotide
  Sense strand starting at position 3011 of SEQ ID NO: 1884052
gggaguguuucagcugaaa

SEQ ID NO: 2236523 - RNA, 19 nt, Artificial Sequence
  Description of Artificial Sequence: Synthetic oligonucleotide
  Antisense strand to SEQ ID NO: 2236522
uuucagcugaaacacuccc

SEQ ID NO: 2236524 - RNA, 19 nt, Artificial Sequence
  Description of Artificial Sequence: Synthetic oligonucleotide
  Sense strand starting at position 3086 of SEQ ID NO: 1884052
auuuauaagugguggauuu

SEQ ID NO: 2236525 - RNA, 19 nt, Artificial Sequence
  Description of Artificial Sequence: Synthetic oligonucleotide
  Antisense strand to SEQ ID NO: 2236524
aaauccaccacuuauaaau

SEQ ID NO: 2236526 - RNA, 19 nt, Artificial Sequence
  Description of Artificial Sequence: Synthetic oligonucleotide
  Sense strand starting at position 3159 of SEQ ID NO: 1884052
guagccaccuccucuaaga

SEQ ID NO: 2236527 - RNA, 19 nt, Artificial Sequence
  Description of Artificial Sequence: Synthetic oligonucleotide
  Antisense strand to SEQ ID NO: 2236526
ucuuagaggagguggcuac

SEQ ID NO: 2236528 - RNA, 19 nt, Artificial Sequence
  Description of Artificial Sequence: Synthetic oligonucleotide
  Sense strand starting at position 3232 of SEQ ID NO: 1884052
acaucuuggcagggaaagu

SEQ ID NO: 2236529 - RNA, 19 nt, Artificial Sequence
  Description of Artificial Sequence: Synthetic oligonucleotide
  Antisense strand to SEQ ID NO: 2236528
acuuucccugccaagaugu

SEQ ID NO: 2236530 - RNA, 19 nt, Artificial Sequence
  Description of Artificial Sequence: Synthetic oligonucleotide
  Sense strand starting at position 3273 of SEQ ID NO: 1884052
gcuggaaagcucuaaauaa

SEQ ID NO: 2236531 - RNA, 19 nt, Artificial Sequence
  Description of Artificial Sequence: Synthetic oligonucleotide
  Antisense strand to SEQ ID NO: 2236530
uuauuuagagcuuuccagc

SEQ ID NO: 2236532 - RNA, 19 nt, Artificial Sequence
  Description of Artificial Sequence: Synthetic oligonucleotide
  Sense strand starting at position 3304 of SEQ ID NO: 1884052
uuuaguguauuccucaauc

SEQ ID NO: 2236533 - RNA, 19 nt, Artificial Sequence
  Description of Artificial Sequence: Synthetic oligonucleotide
  Antisense strand to SEQ ID NO: 2236532
gauugaggaauacacuaaa

SEQ ID NO: 2236534 - RNA, 19 nt, Artificial Sequence
  Description of Artificial Sequence: Synthetic oligonucleotide
  Sense strand starting at position 3357 of SEQ ID NO: 1884052
ggagguauccuuggagguc

SEQ ID NO: 2236535 - RNA, 19 nt, Artificial Sequence
  Description of Artificial Sequence: Synthetic oligonucleotide
  Antisense strand to SEQ ID NO: 2236534
gaccuccaaggauaccucc

SEQ ID NO: 2236536 - RNA, 19 nt, Artificial Sequence
  Description of Artificial Sequence: Synthetic oligonucleotide
  Sense strand starting at position 3360 of SEQ ID NO: 1884052
gguauccuuggaggucauu

SEQ ID NO: 2236537 - RNA, 19 nt, Artificial Sequence
  Description of Artificial Sequence: Synthetic oligonucleotide
  Antisense strand to SEQ ID NO: 2236536
aaugaccuccaaggauacc

SEQ ID NO: 2236538 - RNA, 19 nt, Artificial Sequence
  Description of Artificial Sequence: Synthetic oligonucleotide
  Sense strand starting at position 3788 of SEQ ID NO: 1884052
uugaguguuguguaaguga

SEQ ID NO: 2236539 - RNA, 19 nt, Artificial Sequence
  Description of Artificial Sequence: Synthetic oligonucleotide
  Antisense strand to SEQ ID NO: 2236538
ucacuuacacaacacucaa

SEQ ID NO: 2236540 - RNA, 19 nt, Artificial Sequence
  Description of Artificial Sequence: Synthetic oligonucleotide
  Sense strand starting at position 3882 of SEQ ID NO: 1884052
acaagacuuugguugacca

SEQ ID NO: 2236541 - RNA, 19 nt, Artificial Sequence
  Description of Artificial Sequence: Synthetic oligonucleotide
  Antisense strand to SEQ ID NO: 2236540
uggucaaccaaagucuugu

SEQ ID NO: 2236542 - RNA, 19 nt, Artificial Sequence
  Description of Artificial Sequence: Synthetic oligonucleotide
  Sense strand starting at position 3883 of SEQ ID NO: 1884052
caagacuuugguugaccau

SEQ ID NO: 2236543 - RNA, 19 nt, Artificial Sequence
  Description of Artificial Sequence: Synthetic oligonucleotide
  Antisense strand to SEQ ID NO: 2236542
auggucaaccaaagucuug

SEQ ID NO: 2236544 - RNA, 19 nt, Artificial Sequence
  Description of Artificial Sequence: Synthetic oligonucleotide
  Sense strand starting at position 3886 of SEQ ID NO: 1884052
gacuuugguugaccauaac

SEQ ID NO: 2236545 - RNA, 19 nt, Artificial Sequence
  Description of Artificial Sequence: Synthetic oligonucleotide
  Antisense strand to SEQ ID NO: 2236544
guuauggucaaccaaaguc

SEQ ID NO: 2236546 - RNA, 19 nt, Artificial Sequence
  Description of Artificial Sequence: Synthetic oligonucleotide
  Sense strand starting at position 3978 of SEQ ID NO: 1884052
agguguucuuucccaggau

SEQ ID NO: 2236547 - RNA, 19 nt, Artificial Sequence
  Description of Artificial Sequence: Synthetic oligonucleotide
  Antisense strand to SEQ ID NO: 2236546
auccugggaaagaacaccu

SEQ ID NO: 2236548 - RNA, 19 nt, Artificial Sequence
  Description of Artificial Sequence: Synthetic oligonucleotide
  Sense strand starting at position 93 of SEQ ID NO: 1884053
aggguauaaacuggucuau

SEQ ID NO: 2236549 - RNA, 19 nt, Artificial Sequence
  Description of Artificial Sequence: Synthetic oligonucleotide
  Antisense strand to SEQ ID NO: 2236548
auagaccaguuuauacccu

SEQ ID NO: 2236550 - RNA, 19 nt, Artificial Sequence
  Description of Artificial Sequence: Synthetic oligonucleotide
  Sense strand starting at position 140 of SEQ ID NO: 1884053
ggaaucuguuuaccaacua

SEQ ID NO: 2236551 - RNA, 19 nt, Artificial Sequence
  Description of Artificial Sequence: Synthetic oligonucleotide
  Antisense strand to SEQ ID NO: 2236550
uaguugguaaacagauucc

SEQ ID NO: 2236552 - RNA, 19 nt, Artificial Sequence
  Description of Artificial Sequence: Synthetic oligonucleotide
  Sense strand starting at position 216 of SEQ ID NO: 1884053
ugaagaauuuaugacuaca

SEQ ID NO: 2236553 - RNA, 19 nt, Artificial Sequence
  Description of Artificial Sequence: Synthetic oligonucleotide
  Antisense strand to SEQ ID NO: 2236552
uguagucauaaauucuuca

SEQ ID NO: 2236554 - RNA, 19 nt, Artificial Sequence
  Description of Artificial Sequence: Synthetic oligonucleotide
  Sense strand starting at position 270 of SEQ ID NO: 1884053
uuuccaggccgauacaaua

SEQ ID NO: 2236555 - RNA, 19 nt, Artificial Sequence
  Description of Artificial Sequence: Synthetic oligonucleotide
  Antisense strand to SEQ ID NO: 2236554
uauuguaucggccuggaaa

SEQ ID NO: 2236556 - RNA, 19 nt, Artificial Sequence
  Description of Artificial Sequence: Synthetic oligonucleotide
  Sense strand starting at position 369 of SEQ ID NO: 1884053
gcagauuuaucuccugcac

SEQ ID NO: 2236557 - RNA, 19 nt, Artificial Sequence
  Description of Artificial Sequence: Synthetic oligonucleotide
  Antisense strand to SEQ ID NO: 2236556
gugcaggagauaaaucugc

SEQ ID NO: 2236558 - RNA, 19 nt, Artificial Sequence
  Description of Artificial Sequence: Synthetic oligonucleotide
  Sense strand starting at position 420 of SEQ ID NO: 1884053
ccuugaaggguugguaaau

SEQ ID NO: 2236559 - RNA, 19 nt, Artificial Sequence
  Description of Artificial Sequence: Synthetic oligonucleotide
  Antisense strand to SEQ ID NO: 2236558
auuuaccaacccuucaagg

SEQ ID NO: 2236560 - RNA, 19 nt, Artificial Sequence
  Description of Artificial Sequence: Synthetic oligonucleotide
  Sense strand starting at position 435 of SEQ ID NO: 1884053
aaauguuuggccgaauaga

SEQ ID NO: 2236561 - RNA, 19 nt, Artificial Sequence
  Description of Artificial Sequence: Synthetic oligonucleotide
  Antisense strand to SEQ ID NO: 2236560
ucuauucggccaaacauuu

SEQ ID NO: 2236562 - RNA, 19 nt, Artificial Sequence
  Description of Artificial Sequence: Synthetic oligonucleotide
  Sense strand starting at position 443 of SEQ ID NO: 1884053
ggccgaauagaacaucauu

SEQ ID NO: 2236563 - RNA, 19 nt, Artificial Sequence
  Description of Artificial Sequence: Synthetic oligonucleotide
  Antisense strand to SEQ ID NO: 2236562
aaugauguucuauucggcc

SEQ ID NO: 2236564 - RNA, 19 nt, Artificial Sequence
  Description of Artificial Sequence: Synthetic oligonucleotide
  Sense strand starting at position 545 of SEQ ID NO: 1884053
uuuguuacacuaggaggaa

SEQ ID NO: 2236565 - RNA, 19 nt, Artificial Sequence
  Description of Artificial Sequence: Synthetic oligonucleotide
  Antisense strand to SEQ ID NO: 2236564
uuccuccuaguguaacaaa

SEQ ID NO: 2236566 - RNA, 19 nt, Artificial Sequence
  Description of Artificial Sequence: Synthetic oligonucleotide
  Sense strand starting at position 675 of SEQ ID NO: 1884053
gcuauuaggaacugaggau

SEQ ID NO: 2236567 - RNA, 19 nt, Artificial Sequence
  Description of Artificial Sequence: Synthetic oligonucleotide
  Antisense strand to SEQ ID NO: 2236566
auccucaguuccuaauagc

SEQ ID NO: 2236568 - RNA, 19 nt, Artificial Sequence
  Description of Artificial Sequence: Synthetic oligonucleotide
  Sense strand starting at position 922 of SEQ ID NO: 1884053
gguuguauacucuauacac

SEQ ID NO: 2236569 - RNA, 19 nt, Artificial Sequence
  Description of Artificial Sequence: Synthetic oligonucleotide
  Antisense strand to SEQ ID NO: 2236568
guguauagaguauacaacc

SEQ ID NO: 2236570 - RNA, 19 nt, Artificial Sequence
  Description of Artificial Sequence: Synthetic oligonucleotide
  Sense strand starting at position 1062 of SEQ ID NO: 1884053
aaugaugacugucuuauug

SEQ ID NO: 2236571 - RNA, 19 nt, Artificial Sequence
  Description of Artificial Sequence: Synthetic oligonucleotide
  Antisense strand to SEQ ID NO: 2236570
caauaagacagucaucauu

SEQ ID NO: 2236572 - RNA, 19 nt, Artificial Sequence
  Description of Artificial Sequence: Synthetic oligonucleotide
  Sense strand starting at position 1070 of SEQ ID NO: 1884053
cugucuuauugcccuauuu

SEQ ID NO: 2236573 - RNA, 19 nt, Artificial Sequence
  Description of Artificial Sequence: Synthetic oligonucleotide
  Antisense strand to SEQ ID NO: 2236572
aaauagggcaauaagacag

SEQ ID NO: 2236574 - RNA, 19 nt, Artificial Sequence
  Description of Artificial Sequence: Synthetic oligonucleotide
  Sense strand starting at position 1193 of SEQ ID NO: 1884053
gaguuuauccaauauggug

SEQ ID NO: 2236575 - RNA, 19 nt, Artificial Sequence
  Description of Artificial Sequence: Synthetic oligonucleotide
  Antisense strand to SEQ ID NO: 2236574
caccauauuggauaaacuc

SEQ ID NO: 2236576 - RNA, 19 nt, Artificial Sequence
  Description of Artificial Sequence: Synthetic oligonucleotide
  Sense strand starting at position 1202 of SEQ ID NO: 1884053
caauauggugagcagagua

SEQ ID NO: 2236577 - RNA, 19 nt, Artificial Sequence
  Description of Artificial Sequence: Synthetic oligonucleotide
  Antisense strand to SEQ ID NO: 2236576
uacucugcucaccauauug

SEQ ID NO: 2236578 - RNA, 19 nt, Artificial Sequence
  Description of Artificial Sequence: Synthetic oligonucleotide
  Sense strand starting at position 1216 of SEQ ID NO: 1884053
gaguaauagcccugaaaua

SEQ ID NO: 2236579 - RNA, 19 nt, Artificial Sequence
  Description of Artificial Sequence: Synthetic oligonucleotide
  Antisense strand to SEQ ID NO: 2236578
uauuucagggcuauuacuc

SEQ ID NO: 2236580 - RNA, 19 nt, Artificial Sequence
  Description of Artificial Sequence: Synthetic oligonucleotide
  Sense strand starting at position 1217 of SEQ ID NO: 1884053
aguaauagcccugaaauau

SEQ ID NO: 2236581 - RNA, 19 nt, Artificial Sequence
  Description of Artificial Sequence: Synthetic oligonucleotide
  Antisense strand to SEQ ID NO: 2236580
auauuucagggcuauuacu

SEQ ID NO: 2236582 - RNA, 19 nt, Artificial Sequence
  Description of Artificial Sequence: Synthetic oligonucleotide
  Sense strand starting at position 1254 of SEQ ID NO: 1884053
ggaacaugugaaugaguau

SEQ ID NO: 2236583 - RNA, 19 nt, Artificial Sequence
  Description of Artificial Sequence: Synthetic oligonucleotide
  Antisense strand to SEQ ID NO: 2236582
auacucauucacauguucc

SEQ ID NO: 2236584 - RNA, 19 nt, Artificial Sequence
  Description of Artificial Sequence: Synthetic oligonucleotide
  Sense strand starting at position 1257 of SEQ ID NO: 1884053
acaugugaaugaguauauc

SEQ ID NO: 2236585 - RNA, 19 nt, Artificial Sequence
  Description of Artificial Sequence: Synthetic oligonucleotide
  Antisense strand to SEQ ID NO: 2236584
gauauacucauucacaugu

SEQ ID NO: 2236586 - RNA, 19 nt, Artificial Sequence
  Description of Artificial Sequence: Synthetic oligonucleotide
  Sense strand starting at position 1260 of SEQ ID NO: 1884053
ugugaaugaguauaucuca

SEQ ID NO: 2236587 - RNA, 19 nt, Artificial Sequence
  Description of Artificial Sequence: Synthetic oligonucleotide
  Antisense strand to SEQ ID NO: 2236586
ugagauauacucauucaca

SEQ ID NO: 2236588 - RNA, 19 nt, Artificial Sequence
  Description of Artificial Sequence: Synthetic oligonucleotide
  Sense strand starting at position 1283 of SEQ ID NO: 1884053
gcaaaugaaaugugaagau

SEQ ID NO: 2236589 - RNA, 19 nt, Artificial Sequence
  Description of Artificial Sequence: Synthetic oligonucleotide
  Antisense strand to SEQ ID NO: 2236588
aucuucacauuucauuugc

SEQ ID NO: 2236590 - RNA, 19 nt, Artificial Sequence
  Description of Artificial Sequence: Synthetic oligonucleotide
  Sense strand starting at position 1303 of SEQ ID NO: 1884053
ugauuaaggguauggaugu

SEQ ID NO: 2236591 - RNA, 19 nt, Artificial Sequence
  Description of Artificial Sequence: Synthetic oligonucleotide
  Antisense strand to SEQ ID NO: 2236590
acauccauacccuuaauca

SEQ ID NO: 2236592 - RNA, 19 nt, Artificial Sequence
  Description of Artificial Sequence: Synthetic oligonucleotide
  Sense strand starting at position 1448 of SEQ ID NO: 1884053
gcuagcuuugaagauaaag

SEQ ID NO: 2236593 - RNA, 19 nt, Artificial Sequence
  Description of Artificial Sequence: Synthetic oligonucleotide
  Antisense strand to SEQ ID NO: 2236592
cuuuaucuucaaagcuagc

SEQ ID NO: 2236594 - RNA, 19 nt, Artificial Sequence
  Description of Artificial Sequence: Synthetic oligonucleotide
  Sense strand starting at position 1796 of SEQ ID NO: 1884053
aaggaaguuuagcuauaga

SEQ ID NO: 2236595 - RNA, 19 nt, Artificial Sequence
  Description of Artificial Sequence: Synthetic oligonucleotide
  Antisense strand to SEQ ID NO: 2236594
ucuauagcuaaacuuccuu

SEQ ID NO: 2236596 - RNA, 19 nt, Artificial Sequence
  Description of Artificial Sequence: Synthetic oligonucleotide
  Sense strand starting at position 1819 of SEQ ID NO: 1884053
ggacauagaguuugaaguu

SEQ ID NO: 2236597 - RNA, 19 nt, Artificial Sequence
  Description of Artificial Sequence: Synthetic oligonucleotide
  Antisense strand to SEQ ID NO: 2236596
aacuucaaacucuaugucc

SEQ ID NO: 2236598 - RNA, 19 nt, Artificial Sequence
  Description of Artificial Sequence: Synthetic oligonucleotide
  Sense strand starting at position 1927 of SEQ ID NO: 1884053
cuugcagaauaguugaaca

SEQ ID NO: 2236599 - RNA, 19 nt, Artificial Sequence
  Description of Artificial Sequence: Synthetic oligonucleotide
  Antisense strand to SEQ ID NO: 2236598
uguucaacuauucugcaag

SEQ ID NO: 2236600 - RNA, 19 nt, Artificial Sequence
  Description of Artificial Sequence: Synthetic oligonucleotide
  Sense strand starting at position 2407 of SEQ ID NO: 1884053
guuaaagacuggccaaauu

SEQ ID NO: 2236601 - RNA, 19 nt, Artificial Sequence
  Description of Artificial Sequence: Synthetic oligonucleotide
  Antisense strand to SEQ ID NO: 2236600
aauuuggccagucuuuaac

SEQ ID NO: 2236602 - RNA, 19 nt, Artificial Sequence
  Description of Artificial Sequence: Synthetic oligonucleotide
  Sense strand starting at position 2456 of SEQ ID NO: 1884053
ucccuccagugauuaggaa

SEQ ID NO: 2236603 - RNA, 19 nt, Artificial Sequence
  Description of Artificial Sequence: Synthetic oligonucleotide
  Antisense strand to SEQ ID NO: 2236602
uuccuaaucacuggaggga

SEQ ID NO: 2236604 - RNA, 19 nt, Artificial Sequence
  Description of Artificial Sequence: Synthetic oligonucleotide
  Sense strand starting at position 2618 of SEQ ID NO: 1884053
aggcuaggccauuauccaa

SEQ ID NO: 2236605 - RNA, 19 nt, Artificial Sequence
  Description of Artificial Sequence: Synthetic oligonucleotide
  Antisense strand to SEQ ID NO: 2236604
uuggauaauggccuagccu

SEQ ID NO: 2236606 - RNA, 19 nt, Artificial Sequence
  Description of Artificial Sequence: Synthetic oligonucleotide
  Sense strand starting at position 2705 of SEQ ID NO: 1884053
agagguagucacuauggca

SEQ ID NO: 2236607 - RNA, 19 nt, Artificial Sequence
  Description of Artificial Sequence: Synthetic oligonucleotide
  Antisense strand to SEQ ID NO: 2236606
ugccauagugacuaccucu

SEQ ID NO: 2236608 - RNA, 19 nt, Artificial Sequence
  Description of Artificial Sequence: Synthetic oligonucleotide
  Sense strand starting at position 2752 of SEQ ID NO: 1884053
ucagaagguuacucaagua

SEQ ID NO: 2236609 - RNA, 19 nt, Artificial Sequence
  Description of Artificial Sequence: Synthetic oligonucleotide
  Antisense strand to SEQ ID NO: 2236608
uacuugaguaaccuucuga

SEQ ID NO: 2236610 - RNA, 19 nt, Artificial Sequence
  Description of Artificial Sequence: Synthetic oligonucleotide
  Sense strand starting at position 2757 of SEQ ID NO: 1884053
agguuacucaaguagguuu

SEQ ID NO: 2236611 - RNA, 19 nt, Artificial Sequence
  Description of Artificial Sequence: Synthetic oligonucleotide
  Antisense strand to SEQ ID NO: 2236610
aaaccuacuugaguaaccu

SEQ ID NO: 2236612 - RNA, 19 nt, Artificial Sequence
  Description of Artificial Sequence: Synthetic oligonucleotide
  Sense strand starting at position 2778 of SEQ ID NO: 1884053
cuagcugucccagaaagaa

SEQ ID NO: 2236613 - RNA, 19 nt, Artificial Sequence
  Description of Artificial Sequence: Synthetic oligonucleotide
  Antisense strand to SEQ ID NO: 2236612
uucuuucugggacagcuag

SEQ ID NO: 2236614 - RNA, 19 nt, Artificial Sequence
  Description of Artificial Sequence: Synthetic oligonucleotide
  Sense strand starting at position 3114 of SEQ ID NO: 1884053
agggauuauuaaguucuaa

SEQ ID NO: 2236615 - RNA, 19 nt, Artificial Sequence
  Description of Artificial Sequence: Synthetic oligonucleotide
  Antisense strand to SEQ ID NO: 2236614
uuagaacuuaauaaucccu

SEQ ID NO: 2236616 - RNA, 19 nt, Artificial Sequence
  Description of Artificial Sequence: Synthetic oligonucleotide
  Sense strand starting at position 3125 of SEQ ID NO: 1884053
aguucuaaccaaugggaca

SEQ ID NO: 2236617 - RNA, 19 nt, Artificial Sequence
  Description of Artificial Sequence: Synthetic oligonucleotide
  Antisense strand to SEQ ID NO: 2236616
ugucccauugguuagaacu

SEQ ID NO: 2236618 - RNA, 19 nt, Artificial Sequence
  Description of Artificial Sequence: Synthetic oligonucleotide
  Sense strand starting at position 3161 of SEQ ID NO: 1884053
gugcaaaucccagaugaug

SEQ ID NO: 2236619 - RNA, 19 nt, Artificial Sequence
  Description of Artificial Sequence: Synthetic oligonucleotide
  Antisense strand to SEQ ID NO: 2236618
caucaucugggauuugcac

SEQ ID NO: 2236620 - RNA, 19 nt, Artificial Sequence
  Description of Artificial Sequence: Synthetic oligonucleotide
  Sense strand starting at position 3186 of SEQ ID NO: 1884053
agaagauguuacuuucuac

SEQ ID NO: 2236621 - RNA, 19 nt, Artificial Sequence
  Description of Artificial Sequence: Synthetic oligonucleotide
  Antisense strand to SEQ ID NO: 2236620
guagaaaguaacaucuucu

SEQ ID NO: 2236622 - RNA, 19 nt, Artificial Sequence
  Description of Artificial Sequence: Synthetic oligonucleotide
  Sense strand starting at position 3236 of SEQ ID NO: 1884053
ggcuguaguggcagaguca

SEQ ID NO: 2236623 - RNA, 19 nt, Artificial Sequence
  Description of Artificial Sequence: Synthetic oligonucleotide
  Antisense strand to SEQ ID NO: 2236622
ugacucugccacuacagcc

SEQ ID NO: 2236624 - RNA, 19 nt, Artificial Sequence
  Description of Artificial Sequence: Synthetic oligonucleotide
  Sense strand starting at position 3665 of SEQ ID NO: 1884053
cucuccuauggguauguaa

SEQ ID NO: 2236625 - RNA, 19 nt, Artificial Sequence
  Description of Artificial Sequence: Synthetic oligonucleotide
  Antisense strand to SEQ ID NO: 2236624
uuacauacccauaggagag

SEQ ID NO: 2236626 - RNA, 19 nt, Artificial Sequence
  Description of Artificial Sequence: Synthetic oligonucleotide
  Sense strand starting at position 3711 of SEQ ID NO: 1884053
cugauaacucuaugaggua

SEQ ID NO: 2236627 - RNA, 19 nt, Artificial Sequence
  Description of Artificial Sequence: Synthetic oligonucleotide
  Antisense strand to SEQ ID NO: 2236626
uaccucauagaguuaucag

SEQ ID NO: 2236628 - RNA, 19 nt, Artificial Sequence
  Description of Artificial Sequence: Synthetic oligonucleotide
  Sense strand starting at position 50 of SEQ ID NO: 1884054
augacuuaaugacaaagaa

SEQ ID NO: 2236629 - RNA, 19 nt, Artificial Sequence
  Description of Artificial Sequence: Synthetic oligonucleotide
  Antisense strand to SEQ ID NO: 2236628
uucuuugucauuaagucau

SEQ ID NO: 2236630 - RNA, 19 nt, Artificial Sequence
  Description of Artificial Sequence: Synthetic oligonucleotide
  Sense strand starting at position 77 of SEQ ID NO: 1884054
ugcucuuuguaacuaauga

SEQ ID NO: 2236631 - RNA, 19 nt, Artificial Sequence
  Description of Artificial Sequence: Synthetic oligonucleotide
  Antisense strand to SEQ ID NO: 2236630
ucauuaguuacaaagagca

SEQ ID NO: 2236632 - RNA, 19 nt, Artificial Sequence
  Description of Artificial Sequence: Synthetic oligonucleotide
  Sense strand starting at position 85 of SEQ ID NO: 1884054
guaacuaaugacuguguca

SEQ ID NO: 2236633 - RNA, 19 nt, Artificial Sequence
  Description of Artificial Sequence: Synthetic oligonucleotide
  Antisense strand to SEQ ID NO: 2236632
ugacacagucauuaguuac

SEQ ID NO: 2236634 - RNA, 19 nt, Artificial Sequence
  Description of Artificial Sequence: Synthetic oligonucleotide
  Sense strand starting at position 87 of SEQ ID NO: 1884054
aacuaaugacugugucaga

SEQ ID NO: 2236635 - RNA, 19 nt, Artificial Sequence
  Description of Artificial Sequence: Synthetic oligonucleotide
  Antisense strand to SEQ ID NO: 2236634
ucugacacagucauuaguu

SEQ ID NO: 2236636 - RNA, 19 nt, Artificial Sequence
  Description of Artificial Sequence: Synthetic oligonucleotide
  Sense strand starting at position 88 of SEQ ID NO: 1884054
acuaaugacugugucagaa

SEQ ID NO: 2236637 - RNA, 19 nt, Artificial Sequence
  Description of Artificial Sequence: Synthetic oligonucleotide
  Antisense strand to SEQ ID NO: 2236636
uucugacacagucauuagu

SEQ ID NO: 2236638 - RNA, 19 nt, Artificial Sequence
  Description of Artificial Sequence: Synthetic oligonucleotide
  Sense strand starting at position 98 of SEQ ID NO: 1884054
gugucagaacuuggaaauc

SEQ ID NO: 2236639 - RNA, 19 nt, Artificial Sequence
  Description of Artificial Sequence: Synthetic oligonucleotide
  Antisense strand to SEQ ID NO: 2236638
gauuuccaaguucugacac

SEQ ID NO: 2236640 - RNA, 19 nt, Artificial Sequence
  Description of Artificial Sequence: Synthetic oligonucleotide
  Sense strand starting at position 176 of SEQ ID NO: 1884054
cagaucagcagucguaaag

SEQ ID NO: 2236641 - RNA, 19 nt, Artificial Sequence
  Description of Artificial Sequence: Synthetic oligonucleotide
  Antisense strand to SEQ ID NO: 2236640
cuuuacgacugcugaucug

SEQ ID NO: 2236642 - RNA, 19 nt, Artificial Sequence
  Description of Artificial Sequence: Synthetic oligonucleotide
  Sense strand starting at position 482 of SEQ ID NO: 1884054
ccuauagagcuccggaguu

SEQ ID NO: 2236643 - RNA, 19 nt, Artificial Sequence
  Description of Artificial Sequence: Synthetic oligonucleotide
  Antisense strand to SEQ ID NO: 2236642
aacuccggagcucuauagg

SEQ ID NO: 2236644 - RNA, 19 nt, Artificial Sequence
  Description of Artificial Sequence: Synthetic oligonucleotide
  Sense strand starting at position 513 of SEQ ID NO: 1884054
uggauucuucugggucuuu

SEQ ID NO: 2236645 - RNA, 19 nt, Artificial Sequence
  Description of Artificial Sequence: Synthetic oligonucleotide
  Antisense strand to SEQ ID NO: 2236644
aaagacccagaagaaucca

SEQ ID NO: 2236646 - RNA, 19 nt, Artificial Sequence
  Description of Artificial Sequence: Synthetic oligonucleotide
  Sense strand starting at position 514 of SEQ ID NO: 1884054
ggauucuucugggucuuua

SEQ ID NO: 2236647 - RNA, 19 nt, Artificial Sequence
  Description of Artificial Sequence: Synthetic oligonucleotide
  Antisense strand to SEQ ID NO: 2236646
uaaagacccagaagaaucc

SEQ ID NO: 2236648 - RNA, 19 nt, Artificial Sequence
  Description of Artificial Sequence: Synthetic oligonucleotide
  Sense strand starting at position 604 of SEQ ID NO: 1884054
augauacacucacccgaau

SEQ ID NO: 2236649 - RNA, 19 nt, Artificial Sequence
  Description of Artificial Sequence: Synthetic oligonucleotide
  Antisense strand to SEQ ID NO: 2236648
auucgggugaguguaucau

SEQ ID NO: 2236650 - RNA, 19 nt, Artificial Sequence
  Description of Artificial Sequence: Synthetic oligonucleotide
  Sense strand starting at position 968 of SEQ ID NO: 1884054
guuaacuugugccuucuau

SEQ ID NO: 2236651 - RNA, 19 nt, Artificial Sequence
  Description of Artificial Sequence: Synthetic oligonucleotide
  Antisense strand to SEQ ID NO: 2236650
auagaaggcacaaguuaac

SEQ ID NO: 2236652 - RNA, 19 nt, Artificial Sequence
  Description of Artificial Sequence: Synthetic oligonucleotide
  Sense strand starting at position 1078 of SEQ ID NO: 1884054
acgacugaguaaucuaauc

SEQ ID NO: 2236653 - RNA, 19 nt, Artificial Sequence
  Description of Artificial Sequence: Synthetic oligonucleotide
  Antisense strand to SEQ ID NO: 2236652
gauuagauuacucagucgu

SEQ ID NO: 2236654 - RNA, 19 nt, Artificial Sequence
  Description of Artificial Sequence: Synthetic oligonucleotide
  Sense strand starting at position 1167 of SEQ ID NO: 1884054
augauaugaggcugauguu

SEQ ID NO: 2236655 - RNA, 19 nt, Artificial Sequence
  Description of Artificial Sequence: Synthetic oligonucleotide
  Antisense strand to SEQ ID NO: 2236654
aacaucagccucauaucau

SEQ ID NO: 2236656 - RNA, 19 nt, Artificial Sequence
  Description of Artificial Sequence: Synthetic oligonucleotide
  Sense strand starting at position 1452 of SEQ ID NO: 1884054
cagccaguggucuaggaga

SEQ ID NO: 2236657 - RNA, 19 nt, Artificial Sequence
  Description of Artificial Sequence: Synthetic oligonucleotide
  Antisense strand to SEQ ID NO: 2236656
ucuccuagaccacuggcug

SEQ ID NO: 2236658 - RNA, 19 nt, Artificial Sequence
  Description of Artificial Sequence: Synthetic oligonucleotide
  Sense strand starting at position 1454 of SEQ ID NO: 1884054
gccaguggucuaggagaau

SEQ ID NO: 2236659 - RNA, 19 nt, Artificial Sequence
  Description of Artificial Sequence: Synthetic oligonucleotide
  Antisense strand to SEQ ID NO: 2236658
auucuccuagaccacuggc

SEQ ID NO: 2236660 - RNA, 19 nt, Artificial Sequence
  Description of Artificial Sequence: Synthetic oligonucleotide
  Sense strand starting at position 1586 of SEQ ID NO: 1884054
ccaacaagccauugauaga

SEQ ID NO: 2236661 - RNA, 19 nt, Artificial Sequence
  Description of Artificial Sequence: Synthetic oligonucleotide
  Antisense strand to SEQ ID NO: 2236660
ucuaucaauggcuuguugg

SEQ ID NO: 2236662 - RNA, 19 nt, Artificial Sequence
  Description of Artificial Sequence: Synthetic oligonucleotide
  Sense strand starting at position 1708 of SEQ ID NO: 1884054
guaguaaacucacuccuaa

SEQ ID NO: 2236663 - RNA, 19 nt, Artificial Sequence
  Description of Artificial Sequence: Synthetic oligonucleotide
  Antisense strand to SEQ ID NO: 2236662
uuaggagugaguuuacuac

SEQ ID NO: 2236664 - RNA, 19 nt, Artificial Sequence
  Description of Artificial Sequence: Synthetic oligonucleotide
  Sense strand starting at position 1815 of SEQ ID NO: 1884054
auguauguguacccaugua

SEQ ID NO: 2236665 - RNA, 19 nt, Artificial Sequence
  Description of Artificial Sequence: Synthetic oligonucleotide
  Antisense strand to SEQ ID NO: 2236664
uacauggguacacauacau

SEQ ID NO: 2236666 - RNA, 19 nt, Artificial Sequence
  Description of Artificial Sequence: Synthetic oligonucleotide
  Sense strand starting at position 1863 of SEQ ID NO: 1884054
caaggcucucucgaugaau

SEQ ID NO: 2236667 - RNA, 19 nt, Artificial Sequence
  Description of Artificial Sequence: Synthetic oligonucleotide
  Antisense strand to SEQ ID NO: 2236666
auucaucgagagagccuug

SEQ ID NO: 2236668 - RNA, 19 nt, Artificial Sequence
  Description of Artificial Sequence: Synthetic oligonucleotide
  Sense strand starting at position 1865 of SEQ ID NO: 1884054
aggcucucucgaugaaugu

SEQ ID NO: 2236669 - RNA, 19 nt, Artificial Sequence
  Description of Artificial Sequence: Synthetic oligonucleotide
  Antisense strand to SEQ ID NO: 2236668
acauucaucgagagagccu

SEQ ID NO: 2236670 - RNA, 19 nt, Artificial Sequence
  Description of Artificial Sequence: Synthetic oligonucleotide
  Sense strand starting at position 1907 of SEQ ID NO: 1884054
gguggcugccaagauuaaa

SEQ ID NO: 2236671 - RNA, 19 nt, Artificial Sequence
  Description of Artificial Sequence: Synthetic oligonucleotide
  Antisense strand to SEQ ID NO: 2236670
uuuaaucuuggcagccacc

SEQ ID NO: 2236672 - RNA, 19 nt, Artificial Sequence
  Description of Artificial Sequence: Synthetic oligonucleotide
  Sense strand starting at position 1939 of SEQ ID NO: 1884054
uuucuagcccaaggaauau

SEQ ID NO: 2236673 - RNA, 19 nt, Artificial Sequence
  Description of Artificial Sequence: Synthetic oligonucleotide
  Antisense strand to SEQ ID NO: 2236672
auauuccuugggcuagaaa

SEQ ID NO: 2236674 - RNA, 19 nt, Artificial Sequence
  Description of Artificial Sequence: Synthetic oligonucleotide
  Sense strand starting at position 2026 of SEQ ID NO: 1884054
aggauuaugucaccucauc

SEQ ID NO: 2236675 - RNA, 19 nt, Artificial Sequence
  Description of Artificial Sequence: Synthetic oligonucleotide
  Antisense strand to SEQ ID NO: 2236674
gaugaggugacauaauccu

SEQ ID NO: 2236676 - RNA, 19 nt, Artificial Sequence
  Description of Artificial Sequence: Synthetic oligonucleotide
  Sense strand starting at position 2202 of SEQ ID NO: 1884054
gaggcugucucacucugaa

SEQ ID NO: 2236677 - RNA, 19 nt, Artificial Sequence
  Description of Artificial Sequence: Synthetic oligonucleotide
  Antisense strand to SEQ ID NO: 2236676
uucagagugagacagccuc

SEQ ID NO: 2236678 - RNA, 19 nt, Artificial Sequence
  Description of Artificial Sequence: Synthetic oligonucleotide
  Sense strand starting at position 2205 of SEQ ID NO: 1884054
gcugucucacucugaaauc

SEQ ID NO: 2236679 - RNA, 19 nt, Artificial Sequence
  Description of Artificial Sequence: Synthetic oligonucleotide
  Antisense strand to SEQ ID NO: 2236678
gauuucagagugagacagc

SEQ ID NO: 2236680 - RNA, 19 nt, Artificial Sequence
  Description of Artificial Sequence: Synthetic oligonucleotide
  Sense strand starting at position 2214 of SEQ ID NO: 1884054
cucugaaaucugcagguau

SEQ ID NO: 2236681 - RNA, 19 nt, Artificial Sequence
  Description of Artificial Sequence: Synthetic oligonucleotide
  Antisense strand to SEQ ID NO: 2236680
auaccugcagauuucagag

SEQ ID NO: 2236682 - RNA, 19 nt, Artificial Sequence
  Description of Artificial Sequence: Synthetic oligonucleotide
  Sense strand starting at position 2247 of SEQ ID NO: 1884054
gagguaacuugaccucuca

SEQ ID NO: 2236683 - RNA, 19 nt, Artificial Sequence
  Description of Artificial Sequence: Synthetic oligonucleotide
  Antisense strand to SEQ ID NO: 2236682
ugagaggucaaguuaccuc

SEQ ID NO: 2236684 - RNA, 19 nt, Artificial Sequence
  Description of Artificial Sequence: Synthetic oligonucleotide
  Sense strand starting at position 2437 of SEQ ID NO: 1884054
cagaucaagucagaagaua

SEQ ID NO: 2236685 - RNA, 19 nt, Artificial Sequence
  Description of Artificial Sequence: Synthetic oligonucleotide
  Antisense strand to SEQ ID NO: 2236684
uaucuucugacuugaucug

SEQ ID NO: 2236686 - RNA, 19 nt, Artificial Sequence
  Description of Artificial Sequence: Synthetic oligonucleotide
  Sense strand starting at position 2457 of SEQ ID NO: 1884054
augugaacacgcgguuuaa

SEQ ID NO: 2236687 - RNA, 19 nt, Artificial Sequence
  Description of Artificial Sequence: Synthetic oligonucleotide
  Antisense strand to SEQ ID NO: 2236686
uuaaaccgcguguucacau

SEQ ID NO: 2236688 - RNA, 19 nt, Artificial Sequence
  Description of Artificial Sequence: Synthetic oligonucleotide
  Sense strand starting at position 2938 of SEQ ID NO: 1884054
ucuggagucugagcuuaga

SEQ ID NO: 2236689 - RNA, 19 nt, Artificial Sequence
  Description of Artificial Sequence: Synthetic oligonucleotide
  Antisense strand to SEQ ID NO: 2236688
ucuaagcucagacuccaga

SEQ ID NO: 2236690 - RNA, 19 nt, Artificial Sequence
  Description of Artificial Sequence: Synthetic oligonucleotide
  Sense strand starting at position 2941 of SEQ ID NO: 1884054
ggagucugagcuuagagau

SEQ ID NO: 2236691 - RNA, 19 nt, Artificial Sequence
  Description of Artificial Sequence: Synthetic oligonucleotide
  Antisense strand to SEQ ID NO: 2236690
aucucuaagcucagacucc

SEQ ID NO: 2236692 - RNA, 19 nt, Artificial Sequence
  Description of Artificial Sequence: Synthetic oligonucleotide
  Sense strand starting at position 2951 of SEQ ID NO: 1884054
cuuagagauuccucaugga

SEQ ID NO: 2236693 - RNA, 19 nt, Artificial Sequence
  Description of Artificial Sequence: Synthetic oligonucleotide
  Antisense strand to SEQ ID NO: 2236692
uccaugaggaaucucuaag

SEQ ID NO: 2236694 - RNA, 19 nt, Artificial Sequence
  Description of Artificial Sequence: Synthetic oligonucleotide
  Sense strand starting at position 3182 of SEQ ID NO: 1884054
ccuuucuuuccaggucuua

SEQ ID NO: 2236695 - RNA, 19 nt, Artificial Sequence
  Description of Artificial Sequence: Synthetic oligonucleotide
  Antisense strand to SEQ ID NO: 2236694
uaagaccuggaaagaaagg

SEQ ID NO: 2236696 - RNA, 19 nt, Artificial Sequence
  Description of Artificial Sequence: Synthetic oligonucleotide
  Sense strand starting at position 3379 of SEQ ID NO: 1884054
caccaaugguucccaggaa

SEQ ID NO: 2236697 - RNA, 19 nt, Artificial Sequence
  Description of Artificial Sequence: Synthetic oligonucleotide
  Antisense strand to SEQ ID NO: 2236696
uuccugggaaccauuggug

SEQ ID NO: 2236698 - RNA, 19 nt, Artificial Sequence
  Description of Artificial Sequence: Synthetic oligonucleotide
  Sense strand starting at position 3380 of SEQ ID NO: 1884054
accaaugguucccaggaaa

SEQ ID NO: 2236699 - RNA, 19 nt, Artificial Sequence
  Description of Artificial Sequence: Synthetic oligonucleotide
  Antisense strand to SEQ ID NO: 2236698
uuuccugggaaccauuggu

SEQ ID NO: 2236700 - RNA, 19 nt, Artificial Sequence
  Description of Artificial Sequence: Synthetic oligonucleotide
  Sense strand starting at position 3456 of SEQ ID NO: 1884054
ggcugaggcugcucaaagu

SEQ ID NO: 2236701 - RNA, 19 nt, Artificial Sequence
  Description of Artificial Sequence: Synthetic oligonucleotide
  Antisense strand to SEQ ID NO: 2236700
acuuugagcagccucagcc

SEQ ID NO: 2236702 - RNA, 19 nt, Artificial Sequence
  Description of Artificial Sequence: Synthetic oligonucleotide
  Sense strand starting at position 3676 of SEQ ID NO: 1884054
ccaccaugaguuugagagu

SEQ ID NO: 2236703 - RNA, 19 nt, Artificial Sequence
  Description of Artificial Sequence: Synthetic oligonucleotide
  Antisense strand to SEQ ID NO: 2236702
acucucaaacucauggugg

SEQ ID NO: 2236704 - RNA, 19 nt, Artificial Sequence
  Description of Artificial Sequence: Synthetic oligonucleotide
  Sense strand starting at position 3823 of SEQ ID NO: 1884054
gggaauugcaguuggaaga

SEQ ID NO: 2236705 - RNA, 19 nt, Artificial Sequence
  Description of Artificial Sequence: Synthetic oligonucleotide
  Antisense strand to SEQ ID NO: 2236704
ucuuccaacugcaauuccc

SEQ ID NO: 2236706 - RNA, 19 nt, Artificial Sequence
  Description of Artificial Sequence: Synthetic oligonucleotide
  Sense strand starting at position 3940 of SEQ ID NO: 1884054
gguauagaaugaucccauu

SEQ ID NO: 2236707 - RNA, 19 nt, Artificial Sequence
  Description of Artificial Sequence: Synthetic oligonucleotide
  Antisense strand to SEQ ID NO: 2236706
aaugggaucauucuauacc

SEQ ID NO: 2236708 - RNA, 19 nt, Artificial Sequence
  Description of Artificial Sequence: Synthetic oligonucleotide
  Sense strand starting at position 102 of SEQ ID NO: 1884055
cuggguggccacuaacaua

SEQ ID NO: 2236709 - RNA, 19 nt, Artificial Sequence
  Description of Artificial Sequence: Synthetic oligonucleotide
  Antisense strand to SEQ ID NO: 2236708
uauguuaguggccacccag

SEQ ID NO: 2236710 - RNA, 19 nt, Artificial Sequence
  Description of Artificial Sequence: Synthetic oligonucleotide
  Sense strand starting at position 539 of SEQ ID NO: 1884055
uugucauucugggugcaca

SEQ ID NO: 2236711 - RNA, 19 nt, Artificial Sequence
  Description of Artificial Sequence: Synthetic oligonucleotide
  Antisense strand to SEQ ID NO: 2236710
ugugcacccagaaugacaa

SEQ ID NO: 2236712 - RNA, 19 nt, Artificial Sequence
  Description of Artificial Sequence: Synthetic oligonucleotide
  Sense strand starting at position 1080 of SEQ ID NO: 1884055
cagagaugcccugguggga

SEQ ID NO: 2236713 - RNA, 19 nt, Artificial Sequence
  Description of Artificial Sequence: Synthetic oligonucleotide
  Antisense strand to SEQ ID NO: 2236712
ucccaccagggcaucucug

SEQ ID NO: 2236714 - RNA, 19 nt, Artificial Sequence
  Description of Artificial Sequence: Synthetic oligonucleotide
  Sense strand starting at position 1256 of SEQ ID NO: 1884055
gggaguugguggagacaug

SEQ ID NO: 2236715 - RNA, 19 nt, Artificial Sequence
  Description of Artificial Sequence: Synthetic oligonucleotide
  Antisense strand to SEQ ID NO: 2236714
caugucuccaccaacuccc

SEQ ID NO: 2236716 - RNA, 19 nt, Artificial Sequence
  Description of Artificial Sequence: Synthetic oligonucleotide
  Sense strand starting at position 1311 of SEQ ID NO: 1884055
cccaaugugcaauaaguca

SEQ ID NO: 2236717 - RNA, 19 nt, Artificial Sequence
  Description of Artificial Sequence: Synthetic oligonucleotide
  Antisense strand to SEQ ID NO: 2236716
ugacuuauugcacauuggg

SEQ ID NO: 2236718 - RNA, 19 nt, Artificial Sequence
  Description of Artificial Sequence: Synthetic oligonucleotide
  Sense strand starting at position 1559 of SEQ ID NO: 1884055
ggccuugugcuaugggaag

SEQ ID NO: 2236719 - RNA, 19 nt, Artificial Sequence
  Description of Artificial Sequence: Synthetic oligonucleotide
  Antisense strand to SEQ ID NO: 2236718
cuucccauagcacaaggcc

SEQ ID NO: 2236720 - RNA, 19 nt, Artificial Sequence
  Description of Artificial Sequence: Synthetic oligonucleotide
  Sense strand starting at position 1577 of SEQ ID NO: 1884055
gcuggugucacugcagcau

SEQ ID NO: 2236721 - RNA, 19 nt, Artificial Sequence
  Description of Artificial Sequence: Synthetic oligonucleotide
  Antisense strand to SEQ ID NO: 2236720
augcugcagugacaccagc

SEQ ID NO: 2236722 - RNA, 19 nt, Artificial Sequence
  Description of Artificial Sequence: Synthetic oligonucleotide
  Sense strand starting at position 1597 of SEQ ID NO: 1884055
gggcgugagcccugcuaga

SEQ ID NO: 2236723 - RNA, 19 nt, Artificial Sequence
  Description of Artificial Sequence: Synthetic oligonucleotide
  Antisense strand to SEQ ID NO: 2236722
ucuagcagggcucacgccc

SEQ ID NO: 2236724 - RNA, 19 nt, Artificial Sequence
  Description of Artificial Sequence: Synthetic oligonucleotide
  Sense strand starting at position 2047 of SEQ ID NO: 1884055
ccuaaaugagguugugaca

SEQ ID NO: 2236725 - RNA, 19 nt, Artificial Sequence
  Description of Artificial Sequence: Synthetic oligonucleotide
  Antisense strand to SEQ ID NO: 2236724
ugucacaaccucauuuagg

SEQ ID NO: 2236726 - RNA, 19 nt, Artificial Sequence
  Description of Artificial Sequence: Synthetic oligonucleotide
  Sense strand starting at position 2050 of SEQ ID NO: 1884055
aaaugagguugugacaauu

SEQ ID NO: 2236727 - RNA, 19 nt, Artificial Sequence
  Description of Artificial Sequence: Synthetic oligonucleotide
  Antisense strand to SEQ ID NO: 2236726
aauugucacaaccucauuu

SEQ ID NO: 2236728 - RNA, 19 nt, Artificial Sequence
  Description of Artificial Sequence: Synthetic oligonucleotide
  Sense strand starting at position 2082 of SEQ ID NO: 1884055
uaugcagaguacuuagcau

SEQ ID NO: 2236729 - RNA, 19 nt, Artificial Sequence
  Description of Artificial Sequence: Synthetic oligonucleotide
  Antisense strand to SEQ ID NO: 2236728
augcuaaguacucugcaua

SEQ ID NO: 2236730 - RNA, 19 nt, Artificial Sequence
  Description of Artificial Sequence: Synthetic oligonucleotide
  Sense strand starting at position 2094 of SEQ ID NO: 1884055
uuagcauccugccuaguau

SEQ ID NO: 2236731 - RNA, 19 nt, Artificial Sequence
  Description of Artificial Sequence: Synthetic oligonucleotide
  Antisense strand to SEQ ID NO: 2236730
auacuaggcaggaugcuaa

SEQ ID NO: 2236732 - RNA, 19 nt, Artificial Sequence
  Description of Artificial Sequence: Synthetic oligonucleotide
  Sense strand starting at position 2124 of SEQ ID NO: 1884055
uuccuaaauggcuggucau

SEQ ID NO: 2236733 - RNA, 19 nt, Artificial Sequence
  Description of Artificial Sequence: Synthetic oligonucleotide
  Antisense strand to SEQ ID NO: 2236732
augaccagccauuuaggaa

SEQ ID NO: 2236734 - RNA, 19 nt, Artificial Sequence
  Description of Artificial Sequence: Synthetic oligonucleotide
  Sense strand starting at position 2127 of SEQ ID NO: 1884055
cuaaauggcuggucaugua

SEQ ID NO: 2236735 - RNA, 19 nt, Artificial Sequence
  Description of Artificial Sequence: Synthetic oligonucleotide
  Antisense strand to SEQ ID NO: 2236734
uacaugaccagccauuuag

SEQ ID NO: 2236736 - RNA, 19 nt, Artificial Sequence
  Description of Artificial Sequence: Synthetic oligonucleotide
  Sense strand starting at position 2174 of SEQ ID NO: 1884055
cuguucugugcuggaauca

SEQ ID NO: 2236737 - RNA, 19 nt, Artificial Sequence
  Description of Artificial Sequence: Synthetic oligonucleotide
  Antisense strand to SEQ ID NO: 2236736
ugauuccagcacagaacag

SEQ ID NO: 2236738 - RNA, 19 nt, Artificial Sequence
  Description of Artificial Sequence: Synthetic oligonucleotide
  Sense strand starting at position 2289 of SEQ ID NO: 1884055
cucgguuucuaccucugua

SEQ ID NO: 2236739 - RNA, 19 nt, Artificial Sequence
  Description of Artificial Sequence: Synthetic oligonucleotide
  Antisense strand to SEQ ID NO: 2236738
uacagagguagaaaccgag

SEQ ID NO: 2236740 - RNA, 19 nt, Artificial Sequence
  Description of Artificial Sequence: Synthetic oligonucleotide
  Sense strand starting at position 2443 of SEQ ID NO: 1884055
gcccaaacucauggcaguu

SEQ ID NO: 2236741 - RNA, 19 nt, Artificial Sequence
  Description of Artificial Sequence: Synthetic oligonucleotide
  Antisense strand to SEQ ID NO: 2236740
aacugccaugaguuugggc

SEQ ID NO: 2236742 - RNA, 19 nt, Artificial Sequence
  Description of Artificial Sequence: Synthetic oligonucleotide
  Sense strand starting at position 2565 of SEQ ID NO: 1884055
gccaguccuuuauuccauu

SEQ ID NO: 2236743 - RNA, 19 nt, Artificial Sequence
  Description of Artificial Sequence: Synthetic oligonucleotide
  Antisense strand to SEQ ID NO: 2236742
aauggaauaaaggacuggc

SEQ ID NO: 2236744 - RNA, 19 nt, Artificial Sequence
  Description of Artificial Sequence: Synthetic oligonucleotide
  Sense strand starting at position 2575 of SEQ ID NO: 1884055
uauuccauuucguaaagga

SEQ ID NO: 2236745 - RNA, 19 nt, Artificial Sequence
  Description of Artificial Sequence: Synthetic oligonucleotide
  Antisense strand to SEQ ID NO: 2236744
uccuuuacgaaauggaaua

SEQ ID NO: 2236746 - RNA, 19 nt, Artificial Sequence
  Description of Artificial Sequence: Synthetic oligonucleotide
  Sense strand starting at position 2650 of SEQ ID NO: 1884055
ugcuguuguaauuagcaga

SEQ ID NO: 2236747 - RNA, 19 nt, Artificial Sequence
  Description of Artificial Sequence: Synthetic oligonucleotide
  Antisense strand to SEQ ID NO: 2236746
ucugcuaauuacaacagca

SEQ ID NO: 2236748 - RNA, 19 nt, Artificial Sequence
  Description of Artificial Sequence: Synthetic oligonucleotide
  Sense strand starting at position 2655 of SEQ ID NO: 1884055
uuguaauuagcagagcuaa

SEQ ID NO: 2236749 - RNA, 19 nt, Artificial Sequence
  Description of Artificial Sequence: Synthetic oligonucleotide
  Antisense strand to SEQ ID NO: 2236748
uuagcucugcuaauuacaa

SEQ ID NO: 2236750 - RNA, 19 nt, Artificial Sequence
  Description of Artificial Sequence: Synthetic oligonucleotide
  Sense strand starting at position 2697 of SEQ ID NO: 1884055
gggcaagcccuuggcaauu

SEQ ID NO: 2236751 - RNA, 19 nt, Artificial Sequence
  Description of Artificial Sequence: Synthetic oligonucleotide
  Antisense strand to SEQ ID NO: 2236750
aauugccaagggcuugccc

SEQ ID NO: 2236752 - RNA, 19 nt, Artificial Sequence
  Description of Artificial Sequence: Synthetic oligonucleotide
  Sense strand starting at position 2785 of SEQ ID NO: 1884055
agggaugguucucagacau

SEQ ID NO: 2236753 - RNA, 19 nt, Artificial Sequence
  Description of Artificial Sequence: Synthetic oligonucleotide
  Antisense strand to SEQ ID NO: 2236752
augucugagaaccaucccu

SEQ ID NO: 2236754 - RNA, 19 nt, Artificial Sequence
  Description of Artificial Sequence: Synthetic oligonucleotide
  Sense strand starting at position 2797 of SEQ ID NO: 1884055
cagacauaagcgggcauua

SEQ ID NO: 2236755 - RNA, 19 nt, Artificial Sequence
  Description of Artificial Sequence: Synthetic oligonucleotide
  Antisense strand to SEQ ID NO: 2236754
uaaugcccgcuuaugucug

SEQ ID NO: 2236756 - RNA, 19 nt, Artificial Sequence
  Description of Artificial Sequence: Synthetic oligonucleotide
  Sense strand starting at position 2799 of SEQ ID NO: 1884055
gacauaagcgggcauuaga

SEQ ID NO: 2236757 - RNA, 19 nt, Artificial Sequence
  Description of Artificial Sequence: Synthetic oligonucleotide
  Antisense strand to SEQ ID NO: 2236756
ucuaaugcccgcuuauguc

SEQ ID NO: 2236758 - RNA, 19 nt, Artificial Sequence
  Description of Artificial Sequence: Synthetic oligonucleotide
  Sense strand starting at position 2807 of SEQ ID NO: 1884055
cgggcauuagaaugaccua

SEQ ID NO: 2236759 - RNA, 19 nt, Artificial Sequence
  Description of Artificial Sequence: Synthetic oligonucleotide
  Antisense strand to SEQ ID NO: 2236758
uaggucauucuaaugcccg

SEQ ID NO: 2236760 - RNA, 19 nt, Artificial Sequence
  Description of Artificial Sequence: Synthetic oligonucleotide
  Sense strand starting at position 2881 of SEQ ID NO: 1884055
guuucagguugccugugaa

SEQ ID NO: 2236761 - RNA, 19 nt, Artificial Sequence
  Description of Artificial Sequence: Synthetic oligonucleotide
  Antisense strand to SEQ ID NO: 2236760
uucacaggcaaccugaaac

SEQ ID NO: 2236762 - RNA, 19 nt, Artificial Sequence
  Description of Artificial Sequence: Synthetic oligonucleotide
  Sense strand starting at position 3127 of SEQ ID NO: 1884055
uguaguaauucugucugga

SEQ ID NO: 2236763 - RNA, 19 nt, Artificial Sequence
  Description of Artificial Sequence: Synthetic oligonucleotide
  Antisense strand to SEQ ID NO: 2236762
uccagacagaauuacuaca

SEQ ID NO: 2236764 - RNA, 19 nt, Artificial Sequence
  Description of Artificial Sequence: Synthetic oligonucleotide
  Sense strand starting at position 3129 of SEQ ID NO: 1884055
uaguaauucugucuggaag

SEQ ID NO: 2236765 - RNA, 19 nt, Artificial Sequence
  Description of Artificial Sequence: Synthetic oligonucleotide
  Antisense strand to SEQ ID NO: 2236764
cuuccagacagaauuacua

SEQ ID NO: 2236766 - RNA, 19 nt, Artificial Sequence
  Description of Artificial Sequence: Synthetic oligonucleotide
  Sense strand starting at position 3130 of SEQ ID NO: 1884055
aguaauucugucuggaagg

SEQ ID NO: 2236767 - RNA, 19 nt, Artificial Sequence
  Description of Artificial Sequence: Synthetic oligonucleotide
  Antisense strand to SEQ ID NO: 2236766
ccuuccagacagaauuacu

SEQ ID NO: 2236768 - RNA, 19 nt, Artificial Sequence
  Description of Artificial Sequence: Synthetic oligonucleotide
  Sense strand starting at position 3447 of SEQ ID NO: 1884055
ucaguaugugcuccguaca

SEQ ID NO: 2236769 - RNA, 19 nt, Artificial Sequence
  Description of Artificial Sequence: Synthetic oligonucleotide
  Antisense strand to SEQ ID NO: 2236768
uguacggagcacauacuga

SEQ ID NO: 2236770 - RNA, 19 nt, Artificial Sequence
  Description of Artificial Sequence: Synthetic oligonucleotide
  Sense strand starting at position 3450 of SEQ ID NO: 1884055
guaugugcuccguacaugu

SEQ ID NO: 2236771 - RNA, 19 nt, Artificial Sequence
  Description of Artificial Sequence: Synthetic oligonucleotide
  Antisense strand to SEQ ID NO: 2236770
acauguacggagcacauac

SEQ ID NO: 2236772 - RNA, 19 nt, Artificial Sequence
  Description of Artificial Sequence: Synthetic oligonucleotide
  Sense strand starting at position 3508 of SEQ ID NO: 1884055
acagaaugagcuugaaucu

SEQ ID NO: 2236773 - RNA, 19 nt, Artificial Sequence
  Description of Artificial Sequence: Synthetic oligonucleotide
  Antisense strand to SEQ ID NO: 2236772
agauucaagcucauucugu

SEQ ID NO: 2236774 - RNA, 19 nt, Artificial Sequence
  Description of Artificial Sequence: Synthetic oligonucleotide
  Sense strand starting at position 3546 of SEQ ID NO: 1884055
cuaguccuguggcuagaaa

SEQ ID NO: 2236775 - RNA, 19 nt, Artificial Sequence
  Description of Artificial Sequence: Synthetic oligonucleotide
  Antisense strand to SEQ ID NO: 2236774
uuucuagccacaggacuag

SEQ ID NO: 2236776 - RNA, 19 nt, Artificial Sequence
  Description of Artificial Sequence: Synthetic oligonucleotide
  Sense strand starting at position 3574 of SEQ ID NO: 1884055
ccucuuggacuuugguuaa

SEQ ID NO: 2236777 - RNA, 19 nt, Artificial Sequence
  Description of Artificial Sequence: Synthetic oligonucleotide
  Antisense strand to SEQ ID NO: 2236776
uuaaccaaaguccaagagg

SEQ ID NO: 2236778 - RNA, 19 nt, Artificial Sequence
  Description of Artificial Sequence: Synthetic oligonucleotide
  Sense strand starting at position 3713 of SEQ ID NO: 1884055
uagugagggcucgagaaau

SEQ ID NO: 2236779 - RNA, 19 nt, Artificial Sequence
  Description of Artificial Sequence: Synthetic oligonucleotide
  Antisense strand to SEQ ID NO: 2236778
auuucucgagcccucacua

SEQ ID NO: 2236780 - RNA, 19 nt, Artificial Sequence
  Description of Artificial Sequence: Synthetic oligonucleotide
  Sense strand starting at position 3732 of SEQ ID NO: 1884055
gggagagcuauggguguua

SEQ ID NO: 2236781 - RNA, 19 nt, Artificial Sequence
  Description of Artificial Sequence: Synthetic oligonucleotide
  Antisense strand to SEQ ID NO: 2236780
uaacacccauagcucuccc

SEQ ID NO: 2236782 - RNA, 19 nt, Artificial Sequence
  Description of Artificial Sequence: Synthetic oligonucleotide
  Sense strand starting at position 3766 of SEQ ID NO: 1884055
uguuuauuggauuaagcua

SEQ ID NO: 2236783 - RNA, 19 nt, Artificial Sequence
  Description of Artificial Sequence: Synthetic oligonucleotide
  Antisense strand to SEQ ID NO: 2236782
uagcuuaauccaauaaaca

SEQ ID NO: 2236784 - RNA, 19 nt, Artificial Sequence
  Description of Artificial Sequence: Synthetic oligonucleotide
  Sense strand starting at position 3888 of SEQ ID NO: 1884055
acaguaaaggucugaauaa

SEQ ID NO: 2236785 - RNA, 19 nt, Artificial Sequence
  Description of Artificial Sequence: Synthetic oligonucleotide
  Antisense strand to SEQ ID NO: 2236784
uuauucagaccuuuacugu

SEQ ID NO: 2236786 - RNA, 19 nt, Artificial Sequence
  Description of Artificial Sequence: Synthetic oligonucleotide
  Sense strand starting at position 3889 of SEQ ID NO: 1884055
caguaaaggucugaauaaa

SEQ ID NO: 2236787 - RNA, 19 nt, Artificial Sequence
  Description of Artificial Sequence: Synthetic oligonucleotide
  Antisense strand to SEQ ID NO: 2236786
uuuauucagaccuuuacug

SEQ ID NO: 2236788 - RNA, 19 nt, Artificial Sequence
  Description of Artificial Sequence: Synthetic oligonucleotide
  Sense strand starting at position 77 of SEQ ID NO: 1884056
gucugauaauguccaccuu

SEQ ID NO: 2236789 - RNA, 19 nt, Artificial Sequence
  Description of Artificial Sequence: Synthetic oligonucleotide
  Antisense strand to SEQ ID NO: 2236788
aagguggacauuaucagac

SEQ ID NO: 2236790 - RNA, 19 nt, Artificial Sequence
  Description of Artificial Sequence: Synthetic oligonucleotide
  Sense strand starting at position 194 of SEQ ID NO: 1884056
ugugaacugucacugauua

SEQ ID NO: 2236791 - RNA, 19 nt, Artificial Sequence
  Description of Artificial Sequence: Synthetic oligonucleotide
  Antisense strand to SEQ ID NO: 2236790
uaaucagugacaguucaca

SEQ ID NO: 2236792 - RNA, 19 nt, Artificial Sequence
  Description of Artificial Sequence: Synthetic oligonucleotide
  Sense strand starting at position 195 of SEQ ID NO: 1884056
gugaacugucacugauuau

SEQ ID NO: 2236793 - RNA, 19 nt, Artificial Sequence
  Description of Artificial Sequence: Synthetic oligonucleotide
  Antisense strand to SEQ ID NO: 2236792
auaaucagugacaguucac

SEQ ID NO: 2236794 - RNA, 19 nt, Artificial Sequence
  Description of Artificial Sequence: Synthetic oligonucleotide
  Sense strand starting at position 289 of SEQ ID NO: 1884056
uguggucagccacaaaugu

SEQ ID NO: 2236795 - RNA, 19 nt, Artificial Sequence
  Description of Artificial Sequence: Synthetic oligonucleotide
  Antisense strand to SEQ ID NO: 2236794
acauuuguggcugaccaca

SEQ ID NO: 2236796 - RNA, 19 nt, Artificial Sequence
  Description of Artificial Sequence: Synthetic oligonucleotide
  Sense strand starting at position 418 of SEQ ID NO: 1884056
uugcgagcaggagauauau

SEQ ID NO: 2236797 - RNA, 19 nt, Artificial Sequence
  Description of Artificial Sequence: Synthetic oligonucleotide
  Antisense strand to SEQ ID NO: 2236796
auauaucuccugcucgcaa

SEQ ID NO: 2236798 - RNA, 19 nt, Artificial Sequence
  Description of Artificial Sequence: Synthetic oligonucleotide
  Sense strand starting at position 446 of SEQ ID NO: 1884056
acuugauacucagcauggu

SEQ ID NO: 2236799 - RNA, 19 nt, Artificial Sequence
  Description of Artificial Sequence: Synthetic oligonucleotide
  Antisense strand to SEQ ID NO: 2236798
accaugcugaguaucaagu

SEQ ID NO: 2236800 - RNA, 19 nt, Artificial Sequence
  Description of Artificial Sequence: Synthetic oligonucleotide
  Sense strand starting at position 447 of SEQ ID NO: 1884056
cuugauacucagcaugguu

SEQ ID NO: 2236801 - RNA, 19 nt, Artificial Sequence
  Description of Artificial Sequence: Synthetic oligonucleotide
  Antisense strand to SEQ ID NO: 2236800
aaccaugcugaguaucaag

SEQ ID NO: 2236802 - RNA, 19 nt, Artificial Sequence
  Description of Artificial Sequence: Synthetic oligonucleotide
  Sense strand starting at position 493 of SEQ ID NO: 1884056
cugaguguucuggaugguu

SEQ ID NO: 2236803 - RNA, 19 nt, Artificial Sequence
  Description of Artificial Sequence: Synthetic oligonucleotide
  Antisense strand to SEQ ID NO: 2236802
aaccauccagaacacucag

SEQ ID NO: 2236804 - RNA, 19 nt, Artificial Sequence
  Description of Artificial Sequence: Synthetic oligonucleotide
  Sense strand starting at position 532 of SEQ ID NO: 1884056
caaaguugacuuuggaaac

SEQ ID NO: 2236805 - RNA, 19 nt, Artificial Sequence
  Description of Artificial Sequence: Synthetic oligonucleotide
  Antisense strand to SEQ ID NO: 2236804
guuuccaaagucaacuuug

SEQ ID NO: 2236806 - RNA, 19 nt, Artificial Sequence
  Description of Artificial Sequence: Synthetic oligonucleotide
  Sense strand starting at position 571 of SEQ ID NO: 1884056
cugcuuggugcauauagaa

SEQ ID NO: 2236807 - RNA, 19 nt, Artificial Sequence
  Description of Artificial Sequence: Synthetic oligonucleotide
  Antisense strand to SEQ ID NO: 2236806
uucuauaugcaccaagcag

SEQ ID NO: 2236808 - RNA, 19 nt, Artificial Sequence
  Description of Artificial Sequence: Synthetic oligonucleotide
  Sense strand starting at position 607 of SEQ ID NO: 1884056
auaaguuucgaggauuauu

SEQ ID NO: 2236809 - RNA, 19 nt, Artificial Sequence
  Description of Artificial Sequence: Synthetic oligonucleotide
  Antisense strand to SEQ ID NO: 2236808
aauaauccucgaaacuuau

SEQ ID NO: 2236810 - RNA, 19 nt, Artificial Sequence
  Description of Artificial Sequence: Synthetic oligonucleotide
  Sense strand starting at position 1079 of SEQ ID NO: 1884056
caugcauccuuauugagag

SEQ ID NO: 2236811 - RNA, 19 nt, Artificial Sequence
  Description of Artificial Sequence: Synthetic oligonucleotide
  Antisense strand to SEQ ID NO: 2236810
cucucaauaaggaugcaug

SEQ ID NO: 2236812 - RNA, 19 nt, Artificial Sequence
  Description of Artificial Sequence: Synthetic oligonucleotide
  Sense strand starting at position 1091 of SEQ ID NO: 1884056
uugagaguugcauauucua

SEQ ID NO: 2236813 - RNA, 19 nt, Artificial Sequence
  Description of Artificial Sequence: Synthetic oligonucleotide
  Antisense strand to SEQ ID NO: 2236812
uagaauaugcaacucucaa

SEQ ID NO: 2236814 - RNA, 19 nt, Artificial Sequence
  Description of Artificial Sequence: Synthetic oligonucleotide
  Sense strand starting at position 1103 of SEQ ID NO: 1884056
uauucuagggcuugagaau

SEQ ID NO: 2236815 - RNA, 19 nt, Artificial Sequence
  Description of Artificial Sequence: Synthetic oligonucleotide
  Antisense strand to SEQ ID NO: 2236814
auucucaagcccuagaaua

SEQ ID NO: 2236816 - RNA, 19 nt, Artificial Sequence
  Description of Artificial Sequence: Synthetic oligonucleotide
  Sense strand starting at position 1138 of SEQ ID NO: 1884056
aacuuagggccuugcaaga

SEQ ID NO: 2236817 - RNA, 19 nt, Artificial Sequence
  Description of Artificial Sequence: Synthetic oligonucleotide
  Antisense strand to SEQ ID NO: 2236816
ucuugcaaggcccuaaguu

SEQ ID NO: 2236818 - RNA, 19 nt, Artificial Sequence
  Description of Artificial Sequence: Synthetic oligonucleotide
  Sense strand starting at position 1290 of SEQ ID NO: 1884056
caaugauuggucuggagug

SEQ ID NO: 2236819 - RNA, 19 nt, Artificial Sequence
  Description of Artificial Sequence: Synthetic oligonucleotide
  Antisense strand to SEQ ID NO: 2236818
cacuccagaccaaucauug

SEQ ID NO: 2236820 - RNA, 19 nt, Artificial Sequence
  Description of Artificial Sequence: Synthetic oligonucleotide
  Sense strand starting at position 1312 of SEQ ID NO: 1884056
ggaguaggcaugugaacca

SEQ ID NO: 2236821 - RNA, 19 nt, Artificial Sequence
  Description of Artificial Sequence: Synthetic oligonucleotide
  Antisense strand to SEQ ID NO: 2236820
ugguucacaugccuacucc

SEQ ID NO: 2236822 - RNA, 19 nt, Artificial Sequence
  Description of Artificial Sequence: Synthetic oligonucleotide
  Sense strand starting at position 1384 of SEQ ID NO: 1884056
ccucuuuaugcugagauag

SEQ ID NO: 2236823 - RNA, 19 nt, Artificial Sequence
  Description of Artificial Sequence: Synthetic oligonucleotide
  Antisense strand to SEQ ID NO: 2236822
cuaucucagcauaaagagg

SEQ ID NO: 2236824 - RNA, 19 nt, Artificial Sequence
  Description of Artificial Sequence: Synthetic oligonucleotide
  Sense strand starting at position 1779 of SEQ ID NO: 1884056
ucccuagcuccuugggaau

SEQ ID NO: 2236825 - RNA, 19 nt, Artificial Sequence
  Description of Artificial Sequence: Synthetic oligonucleotide
  Antisense strand to SEQ ID NO: 2236824
auucccaaggagcuaggga

SEQ ID NO: 2236826 - RNA, 19 nt, Artificial Sequence
  Description of Artificial Sequence: Synthetic oligonucleotide
  Sense strand starting at position 2015 of SEQ ID NO: 1884056
accugugacuucccucaca

SEQ ID NO: 2236827 - RNA, 19 nt, Artificial Sequence
  Description of Artificial Sequence: Synthetic oligonucleotide
  Antisense strand to SEQ ID NO: 2236826
ugugagggaagucacaggu

SEQ ID NO: 2236828 - RNA, 19 nt, Artificial Sequence
  Description of Artificial Sequence: Synthetic oligonucleotide
  Sense strand starting at position 2072 of SEQ ID NO: 1884056
uuaauaugccuauaaagug

SEQ ID NO: 2236829 - RNA, 19 nt, Artificial Sequence
  Description of Artificial Sequence: Synthetic oligonucleotide
  Antisense strand to SEQ ID NO: 2236828
cacuuuauaggcauauuaa

SEQ ID NO: 2236830 - RNA, 19 nt, Artificial Sequence
  Description of Artificial Sequence: Synthetic oligonucleotide
  Sense strand starting at position 2087 of SEQ ID NO: 1884056
aguggaauucugggacuga

SEQ ID NO: 2236831 - RNA, 19 nt, Artificial Sequence
  Description of Artificial Sequence: Synthetic oligonucleotide
  Antisense strand to SEQ ID NO: 2236830
ucagucccagaauuccacu

SEQ ID NO: 2236832 - RNA, 19 nt, Artificial Sequence
  Description of Artificial Sequence: Synthetic oligonucleotide
  Sense strand starting at position 2243 of SEQ ID NO: 1884056
gcagcuuuccgagaaauua

SEQ ID NO: 2236833 - RNA, 19 nt, Artificial Sequence
  Description of Artificial Sequence: Synthetic oligonucleotide
  Antisense strand to SEQ ID NO: 2236832
uaauuucucggaaagcugc

SEQ ID NO: 2236834 - RNA, 19 nt, Artificial Sequence
  Description of Artificial Sequence: Synthetic oligonucleotide
  Sense strand starting at position 2351 of SEQ ID NO: 1884056
ugcaguauucccuauagua

SEQ ID NO: 2236835 - RNA, 19 nt, Artificial Sequence
  Description of Artificial Sequence: Synthetic oligonucleotide
  Antisense strand to SEQ ID NO: 2236834
uacuauagggaauacugca

SEQ ID NO: 2236836 - RNA, 19 nt, Artificial Sequence
  Description of Artificial Sequence: Synthetic oligonucleotide
  Sense strand starting at position 2376 of SEQ ID NO: 1884056
ggcaguuugagccaucuaa

SEQ ID NO: 2236837 - RNA, 19 nt, Artificial Sequence
  Description of Artificial Sequence: Synthetic oligonucleotide
  Antisense strand to SEQ ID NO: 2236836
uuagauggcucaaacugcc

SEQ ID NO: 2236838 - RNA, 19 nt, Artificial Sequence
  Description of Artificial Sequence: Synthetic oligonucleotide
  Sense strand starting at position 2466 of SEQ ID NO: 1884056
agaauaagcugucucuuua

SEQ ID NO: 2236839 - RNA, 19 nt, Artificial Sequence
  Description of Artificial Sequence: Synthetic oligonucleotide
  Antisense strand to SEQ ID NO: 2236838
uaaagagacagcuuauucu

SEQ ID NO: 2236840 - RNA, 19 nt, Artificial Sequence
  Description of Artificial Sequence: Synthetic oligonucleotide
  Sense strand starting at position 2602 of SEQ ID NO: 1884056
ugugaaauuacaggugucu

SEQ ID NO: 2236841 - RNA, 19 nt, Artificial Sequence
  Description of Artificial Sequence: Synthetic oligonucleotide
  Antisense strand to SEQ ID NO: 2236840
agacaccuguaauuucaca

SEQ ID NO: 2236842 - RNA, 19 nt, Artificial Sequence
  Description of Artificial Sequence: Synthetic oligonucleotide
  Sense strand starting at position 2604 of SEQ ID NO: 1884056
ugaaauuacaggugucugu

SEQ ID NO: 2236843 - RNA, 19 nt, Artificial Sequence
  Description of Artificial Sequence: Synthetic oligonucleotide
  Antisense strand to SEQ ID NO: 2236842
acagacaccuguaauuuca

SEQ ID NO: 2236844 - RNA, 19 nt, Artificial Sequence
  Description of Artificial Sequence: Synthetic oligonucleotide
  Sense strand starting at position 2856 of SEQ ID NO: 1884056
cugccauuuccuggagucu

SEQ ID NO: 2236845 - RNA, 19 nt, Artificial Sequence
  Description of Artificial Sequence: Synthetic oligonucleotide
  Antisense strand to SEQ ID NO: 2236844
agacuccaggaaauggcag

SEQ ID NO: 2236846 - RNA, 19 nt, Artificial Sequence
  Description of Artificial Sequence: Synthetic oligonucleotide
  Sense strand starting at position 2893 of SEQ ID NO: 1884056
ccagcucaucccuaggaca

SEQ ID NO: 2236847 - RNA, 19 nt, Artificial Sequence
  Description of Artificial Sequence: Synthetic oligonucleotide
  Antisense strand to SEQ ID NO: 2236846
uguccuagggaugagcugg

SEQ ID NO: 2236848 - RNA, 19 nt, Artificial Sequence
  Description of Artificial Sequence: Synthetic oligonucleotide
  Sense strand starting at position 3077 of SEQ ID NO: 1884056
cuuugucaccuugaggauu

SEQ ID NO: 2236849 - RNA, 19 nt, Artificial Sequence
  Description of Artificial Sequence: Synthetic oligonucleotide
  Antisense strand to SEQ ID NO: 2236848
aauccucaaggugacaaag

SEQ ID NO: 2236850 - RNA, 19 nt, Artificial Sequence
  Description of Artificial Sequence: Synthetic oligonucleotide
  Sense strand starting at position 3268 of SEQ ID NO: 1884056
cugaaaugccuggaguuau

SEQ ID NO: 2236851 - RNA, 19 nt, Artificial Sequence
  Description of Artificial Sequence: Synthetic oligonucleotide
  Antisense strand to SEQ ID NO: 2236850
auaacuccaggcauuucag

SEQ ID NO: 2236852 - RNA, 19 nt, Artificial Sequence
  Description of Artificial Sequence: Synthetic oligonucleotide
  Sense strand starting at position 3279 of SEQ ID NO: 1884056
ggaguuaucacauguggag

SEQ ID NO: 2236853 - RNA, 19 nt, Artificial Sequence
  Description of Artificial Sequence: Synthetic oligonucleotide
  Antisense strand to SEQ ID NO: 2236852
cuccacaugugauaacucc

SEQ ID NO: 2236854 - RNA, 19 nt, Artificial Sequence
  Description of Artificial Sequence: Synthetic oligonucleotide
  Sense strand starting at position 3293 of SEQ ID NO: 1884056
uggagcaucccucagcuau

SEQ ID NO: 2236855 - RNA, 19 nt, Artificial Sequence
  Description of Artificial Sequence: Synthetic oligonucleotide
  Antisense strand to SEQ ID NO: 2236854
auagcugagggaugcucca

SEQ ID NO: 2236856 - RNA, 19 nt, Artificial Sequence
  Description of Artificial Sequence: Synthetic oligonucleotide
  Sense strand starting at position 3423 of SEQ ID NO: 1884056
aguugucccaaauggugaa

SEQ ID NO: 2236857 - RNA, 19 nt, Artificial Sequence
  Description of Artificial Sequence: Synthetic oligonucleotide
  Antisense strand to SEQ ID NO: 2236856
uucaccauuugggacaacu

SEQ ID NO: 2236858 - RNA, 19 nt, Artificial Sequence
  Description of Artificial Sequence: Synthetic oligonucleotide
  Sense strand starting at position 3655 of SEQ ID NO: 1884056
gcuugucuugcacugucau

SEQ ID NO: 2236859 - RNA, 19 nt, Artificial Sequence
  Description of Artificial Sequence: Synthetic oligonucleotide
  Antisense strand to SEQ ID NO: 2236858
augacagugcaagacaagc

SEQ ID NO: 2236860 - RNA, 19 nt, Artificial Sequence
  Description of Artificial Sequence: Synthetic oligonucleotide
  Sense strand starting at position 3709 of SEQ ID NO: 1884056
guaugacuucuugggucau

SEQ ID NO: 2236861 - RNA, 19 nt, Artificial Sequence
  Description of Artificial Sequence: Synthetic oligonucleotide
  Antisense strand to SEQ ID NO: 2236860
augacccaagaagucauac

SEQ ID NO: 2236862 - RNA, 19 nt, Artificial Sequence
  Description of Artificial Sequence: Synthetic oligonucleotide
  Sense strand starting at position 3918 of SEQ ID NO: 1884056
gccacaucuuaggcagaau

SEQ ID NO: 2236863 - RNA, 19 nt, Artificial Sequence
  Description of Artificial Sequence: Synthetic oligonucleotide
  Antisense strand to SEQ ID NO: 2236862
auucugccuaagauguggc

SEQ ID NO: 2236864 - RNA, 19 nt, Artificial Sequence
  Description of Artificial Sequence: Synthetic oligonucleotide
  Sense strand starting at position 3944 of SEQ ID NO: 1884056
gcuguuucucuggaggaua

SEQ ID NO: 2236865 - RNA, 19 nt, Artificial Sequence
  Description of Artificial Sequence: Synthetic oligonucleotide
  Antisense strand to SEQ ID NO: 2236864
uauccuccagagaaacagc

SEQ ID NO: 2236866 - RNA, 19 nt, Artificial Sequence
  Description of Artificial Sequence: Synthetic oligonucleotide
  Sense strand starting at position 3946 of SEQ ID NO: 1884056
uguuucucuggaggauacu

SEQ ID NO: 2236867 - RNA, 19 nt, Artificial Sequence
  Description of Artificial Sequence: Synthetic oligonucleotide
  Antisense strand to SEQ ID NO: 2236866
aguauccuccagagaaaca

SEQ ID NO: 2236868 - RNA, 19 nt, Artificial Sequence
  Description of Artificial Sequence: Synthetic oligonucleotide
  Sense strand starting at position 77 of SEQ ID NO: 1884057
gggccuagcaaguaacaua

SEQ ID NO: 2236869 - RNA, 19 nt, Artificial Sequence
  Description of Artificial Sequence: Synthetic oligonucleotide
  Antisense strand to SEQ ID NO: 2236868
uauguuacuugcuaggccc

SEQ ID NO: 2236870 - RNA, 19 nt, Artificial Sequence
  Description of Artificial Sequence: Synthetic oligonucleotide
  Sense strand starting at position 449 of SEQ ID NO: 1884057
ucacaaugcuccuugaaga

SEQ ID NO: 2236871 - RNA, 19 nt, Artificial Sequence
  Description of Artificial Sequence: Synthetic oligonucleotide
  Antisense strand to SEQ ID NO: 2236870
ucuucaaggagcauuguga

SEQ ID NO: 2236872 - RNA, 19 nt, Artificial Sequence
  Description of Artificial Sequence: Synthetic oligonucleotide
  Sense strand starting at position 526 of SEQ ID NO: 1884057
cgugucugaagacaaacau

SEQ ID NO: 2236873 - RNA, 19 nt, Artificial Sequence
  Description of Artificial Sequence: Synthetic oligonucleotide
  Antisense strand to SEQ ID NO: 2236872
auguuugucuucagacacg

SEQ ID NO: 2236874 - RNA, 19 nt, Artificial Sequence
  Description of Artificial Sequence: Synthetic oligonucleotide
  Sense strand starting at position 547 of SEQ ID NO: 1884057
ggauguaacagugagaugu

SEQ ID NO: 2236875 - RNA, 19 nt, Artificial Sequence
  Description of Artificial Sequence: Synthetic oligonucleotide
  Antisense strand to SEQ ID NO: 2236874
acaucucacuguuacaucc

SEQ ID NO: 2236876 - RNA, 19 nt, Artificial Sequence
  Description of Artificial Sequence: Synthetic oligonucleotide
  Sense strand starting at position 633 of SEQ ID NO: 1884057
gguugugaucauggaagau

SEQ ID NO: 2236877 - RNA, 19 nt, Artificial Sequence
  Description of Artificial Sequence: Synthetic oligonucleotide
  Antisense strand to SEQ ID NO: 2236876
aucuuccaugaucacaacc

SEQ ID NO: 2236878 - RNA, 19 nt, Artificial Sequence
  Description of Artificial Sequence: Synthetic oligonucleotide
  Sense strand starting at position 726 of SEQ ID NO: 1884057
gcacaauaccugcagaauu

SEQ ID NO: 2236879 - RNA, 19 nt, Artificial Sequence
  Description of Artificial Sequence: Synthetic oligonucleotide
  Antisense strand to SEQ ID NO: 2236878
aauucugcagguauugugc

SEQ ID NO: 2236880 - RNA, 19 nt, Artificial Sequence
  Description of Artificial Sequence: Synthetic oligonucleotide
  Sense strand starting at position 780 of SEQ ID NO: 1884057
ugaucugagucauucugaa

SEQ ID NO: 2236881 - RNA, 19 nt, Artificial Sequence
  Description of Artificial Sequence: Synthetic oligonucleotide
  Antisense strand to SEQ ID NO: 2236880
uucagaaugacucagauca

SEQ ID NO: 2236882 - RNA, 19 nt, Artificial Sequence
  Description of Artificial Sequence: Synthetic oligonucleotide
  Sense strand starting at position 1099 of SEQ ID NO: 1884057
gaaagugauccagggagcu

SEQ ID NO: 2236883 - RNA, 19 nt, Artificial Sequence
  Description of Artificial Sequence: Synthetic oligonucleotide
  Antisense strand to SEQ ID NO: 2236882
agcucccuggaucacuuuc

SEQ ID NO: 2236884 - RNA, 19 nt, Artificial Sequence
  Description of Artificial Sequence: Synthetic oligonucleotide
  Sense strand starting at position 1101 of SEQ ID NO: 1884057
aagugauccagggagcugu

SEQ ID NO: 2236885 - RNA, 19 nt, Artificial Sequence
  Description of Artificial Sequence: Synthetic oligonucleotide
  Antisense strand to SEQ ID NO: 2236884
acagcucccuggaucacuu

SEQ ID NO: 2236886 - RNA, 19 nt, Artificial Sequence
  Description of Artificial Sequence: Synthetic oligonucleotide
  Sense strand starting at position 1201 of SEQ ID NO: 1884057
cuguaauguggaugaucag

SEQ ID NO: 2236887 - RNA, 19 nt, Artificial Sequence
  Description of Artificial Sequence: Synthetic oligonucleotide
  Antisense strand to SEQ ID NO: 2236886
cugaucauccacauuacag

SEQ ID NO: 2236888 - RNA, 19 nt, Artificial Sequence
  Description of Artificial Sequence: Synthetic oligonucleotide
  Sense strand starting at position 1202 of SEQ ID NO: 1884057
uguaauguggaugaucagu

SEQ ID NO: 2236889 - RNA, 19 nt, Artificial Sequence
  Description of Artificial Sequence: Synthetic oligonucleotide
  Antisense strand to SEQ ID NO: 2236888
acugaucauccacauuaca

SEQ ID NO: 2236890 - RNA, 19 nt, Artificial Sequence
  Description of Artificial Sequence: Synthetic oligonucleotide
  Sense strand starting at position 1208 of SEQ ID NO: 1884057
guggaugaucaguaggagu

SEQ ID NO: 2236891 - RNA, 19 nt, Artificial Sequence
  Description of Artificial Sequence: Synthetic oligonucleotide
  Antisense strand to SEQ ID NO: 2236890
acuccuacugaucauccac

SEQ ID NO: 2236892 - RNA, 19 nt, Artificial Sequence
  Description of Artificial Sequence: Synthetic oligonucleotide
  Sense strand starting at position 1210 of SEQ ID NO: 1884057
ggaugaucaguaggaguca

SEQ ID NO: 2236893 - RNA, 19 nt, Artificial Sequence
  Description of Artificial Sequence: Synthetic oligonucleotide
  Antisense strand to SEQ ID NO: 2236892
ugacuccuacugaucaucc

SEQ ID NO: 2236894 - RNA, 19 nt, Artificial Sequence
  Description of Artificial Sequence: Synthetic oligonucleotide
  Sense strand starting at position 1277 of SEQ ID NO: 1884057
cauguugguguugauauga

SEQ ID NO: 2236895 - RNA, 19 nt, Artificial Sequence
  Description of Artificial Sequence: Synthetic oligonucleotide
  Antisense strand to SEQ ID NO: 2236894
ucauaucaacaccaacaug

SEQ ID NO: 2236896 - RNA, 19 nt, Artificial Sequence
  Description of Artificial Sequence: Synthetic oligonucleotide
  Sense strand starting at position 1310 of SEQ ID NO: 1884057
uaauuaugccuggaguaua

SEQ ID NO: 2236897 - RNA, 19 nt, Artificial Sequence
  Description of Artificial Sequence: Synthetic oligonucleotide
  Antisense strand to SEQ ID NO: 2236896
uauacuccaggcauaauua

SEQ ID NO: 2236898 - RNA, 19 nt, Artificial Sequence
  Description of Artificial Sequence: Synthetic oligonucleotide
  Sense strand starting at position 1348 of SEQ ID NO: 1884057
gugagaagugaguggagaa

SEQ ID NO: 2236899 - RNA, 19 nt, Artificial Sequence
  Description of Artificial Sequence: Synthetic oligonucleotide
  Antisense strand to SEQ ID NO: 2236898
uucuccacucacuucucac

SEQ ID NO: 2236900 - RNA, 19 nt, Artificial Sequence
  Description of Artificial Sequence: Synthetic oligonucleotide
  Sense strand starting at position 1400 of SEQ ID NO: 1884057
ggacuuguuaaggaguucu

SEQ ID NO: 2236901 - RNA, 19 nt, Artificial Sequence
  Description of Artificial Sequence: Synthetic oligonucleotide
  Antisense strand to SEQ ID NO: 2236900
agaacuccuuaacaagucc

SEQ ID NO: 2236902 - RNA, 19 nt, Artificial Sequence
  Description of Artificial Sequence: Synthetic oligonucleotide
  Sense strand starting at position 1927 of SEQ ID NO: 1884057
ggucuuggugucaggguau

SEQ ID NO: 2236903 - RNA, 19 nt, Artificial Sequence
  Description of Artificial Sequence: Synthetic oligonucleotide
  Antisense strand to SEQ ID NO: 2236902
auacccugacaccaagacc

SEQ ID NO: 2236904 - RNA, 19 nt, Artificial Sequence
  Description of Artificial Sequence: Synthetic oligonucleotide
  Sense strand starting at position 1953 of SEQ ID NO: 1884057
cuggacuguccaggaugaa

SEQ ID NO: 2236905 - RNA, 19 nt, Artificial Sequence
  Description of Artificial Sequence: Synthetic oligonucleotide
  Antisense strand to SEQ ID NO: 2236904
uucauccuggacaguccag

SEQ ID NO: 2236906 - RNA, 19 nt, Artificial Sequence
  Description of Artificial Sequence: Synthetic oligonucleotide
  Sense strand starting at position 2180 of SEQ ID NO: 1884057
ucagaauuauaguugugga

SEQ ID NO: 2236907 - RNA, 19 nt, Artificial Sequence
  Description of Artificial Sequence: Synthetic oligonucleotide
  Antisense strand to SEQ ID NO: 2236906
uccacaacuauaauucuga

SEQ ID NO: 2236908 - RNA, 19 nt, Artificial Sequence
  Description of Artificial Sequence: Synthetic oligonucleotide
  Sense strand starting at position 2193 of SEQ ID NO: 1884057
uguggaauucccuaucucu

SEQ ID NO: 2236909 - RNA, 19 nt, Artificial Sequence
  Description of Artificial Sequence: Synthetic oligonucleotide
  Antisense strand to SEQ ID NO: 2236908
agagauagggaauuccaca

SEQ ID NO: 2236910 - RNA, 19 nt, Artificial Sequence
  Description of Artificial Sequence: Synthetic oligonucleotide
  Sense strand starting at position 2196 of SEQ ID NO: 1884057
ggaauucccuaucucugaa

SEQ ID NO: 2236911 - RNA, 19 nt, Artificial Sequence
  Description of Artificial Sequence: Synthetic oligonucleotide
  Antisense strand to SEQ ID NO: 2236910
uucagagauagggaauucc

SEQ ID NO: 2236912 - RNA, 19 nt, Artificial Sequence
  Description of Artificial Sequence: Synthetic oligonucleotide
  Sense strand starting at position 2289 of SEQ ID NO: 1884057
guguaaauguuagucauuu

SEQ ID NO: 2236913 - RNA, 19 nt, Artificial Sequence
  Description of Artificial Sequence: Synthetic oligonucleotide
  Antisense strand to SEQ ID NO: 2236912
aaaugacuaacauuuacac

SEQ ID NO: 2236914 - RNA, 19 nt, Artificial Sequence
  Description of Artificial Sequence: Synthetic oligonucleotide
  Sense strand starting at position 2531 of SEQ ID NO: 1884057
aucccucaugaguaguaua

SEQ ID NO: 2236915 - RNA, 19 nt, Artificial Sequence
  Description of Artificial Sequence: Synthetic oligonucleotide
  Antisense strand to SEQ ID NO: 2236914
uauacuacucaugagggau

SEQ ID NO: 2236916 - RNA, 19 nt, Artificial Sequence
  Description of Artificial Sequence: Synthetic oligonucleotide
  Sense strand starting at position 2699 of SEQ ID NO: 1884057
cugaguaggaguggauauu

SEQ ID NO: 2236917 - RNA, 19 nt, Artificial Sequence
  Description of Artificial Sequence: Synthetic oligonucleotide
  Antisense strand to SEQ ID NO: 2236916
aauauccacuccuacucag

SEQ ID NO: 2236918 - RNA, 19 nt, Artificial Sequence
  Description of Artificial Sequence: Synthetic oligonucleotide
  Sense strand starting at position 2809 of SEQ ID NO: 1884057
gagguaagacuguggaacu

SEQ ID NO: 2236919 - RNA, 19 nt, Artificial Sequence
  Description of Artificial Sequence: Synthetic oligonucleotide
  Antisense strand to SEQ ID NO: 2236918
aguuccacagucuuaccuc

SEQ ID NO: 2236920 - RNA, 19 nt, Artificial Sequence
  Description of Artificial Sequence: Synthetic oligonucleotide
  Sense strand starting at position 2972 of SEQ ID NO: 1884057
ucacauacucacugagagu

SEQ ID NO: 2236921 - RNA, 19 nt, Artificial Sequence
  Description of Artificial Sequence: Synthetic oligonucleotide
  Antisense strand to SEQ ID NO: 2236920
acucucagugaguauguga

SEQ ID NO: 2236922 - RNA, 19 nt, Artificial Sequence
  Description of Artificial Sequence: Synthetic oligonucleotide
  Sense strand starting at position 3004 of SEQ ID NO: 1884057
cagcucaaugguuggaaca

SEQ ID NO: 2236923 - RNA, 19 nt, Artificial Sequence
  Description of Artificial Sequence: Synthetic oligonucleotide
  Antisense strand to SEQ ID NO: 2236922
uguuccaaccauugagcug

SEQ ID NO: 2236924 - RNA, 19 nt, Artificial Sequence
  Description of Artificial Sequence: Synthetic oligonucleotide
  Sense strand starting at position 3039 of SEQ ID NO: 1884057
aauguugcuggguaaacua

SEQ ID NO: 2236925 - RNA, 19 nt, Artificial Sequence
  Description of Artificial Sequence: Synthetic oligonucleotide
  Antisense strand to SEQ ID NO: 2236924
uaguuuacccagcaacauu

SEQ ID NO: 2236926 - RNA, 19 nt, Artificial Sequence
  Description of Artificial Sequence: Synthetic oligonucleotide
  Sense strand starting at position 3055 of SEQ ID NO: 1884057
cuaauaaagucaccacgau

SEQ ID NO: 2236927 - RNA, 19 nt, Artificial Sequence
  Description of Artificial Sequence: Synthetic oligonucleotide
  Antisense strand to SEQ ID NO: 2236926
aucguggugacuuuauuag

SEQ ID NO: 2236928 - RNA, 19 nt, Artificial Sequence
  Description of Artificial Sequence: Synthetic oligonucleotide
  Sense strand starting at position 3059 of SEQ ID NO: 1884057
uaaagucaccacgauguua

SEQ ID NO: 2236929 - RNA, 19 nt, Artificial Sequence
  Description of Artificial Sequence: Synthetic oligonucleotide
  Antisense strand to SEQ ID NO: 2236928
uaacaucguggugacuuua

SEQ ID NO: 2236930 - RNA, 19 nt, Artificial Sequence
  Description of Artificial Sequence: Synthetic oligonucleotide
  Sense strand starting at position 3119 of SEQ ID NO: 1884057
ggaaauagcaaaugguuaa

SEQ ID NO: 2236931 - RNA, 19 nt, Artificial Sequence
  Description of Artificial Sequence: Synthetic oligonucleotide
  Antisense strand to SEQ ID NO: 2236930
uuaaccauuugcuauuucc

SEQ ID NO: 2236932 - RNA, 19 nt, Artificial Sequence
  Description of Artificial Sequence: Synthetic oligonucleotide
  Sense strand starting at position 3203 of SEQ ID NO: 1884057
guguauuccagugcuguuu

SEQ ID NO: 2236933 - RNA, 19 nt, Artificial Sequence
  Description of Artificial Sequence: Synthetic oligonucleotide
  Antisense strand to SEQ ID NO: 2236932
aaacagcacuggaauacac

SEQ ID NO: 2236934 - RNA, 19 nt, Artificial Sequence
  Description of Artificial Sequence: Synthetic oligonucleotide
  Sense strand starting at position 3355 of SEQ ID NO: 1884057
uuggcagaaguuuggaaga

SEQ ID NO: 2236935 - RNA, 19 nt, Artificial Sequence
  Description of Artificial Sequence: Synthetic oligonucleotide
  Antisense strand to SEQ ID NO: 2236934
ucuuccaaacuucugccaa

SEQ ID NO: 2236936 - RNA, 19 nt, Artificial Sequence
  Description of Artificial Sequence: Synthetic oligonucleotide
  Sense strand starting at position 3474 of SEQ ID NO: 1884057
cugugaaugcuacagaaug

SEQ ID NO: 2236937 - RNA, 19 nt, Artificial Sequence
  Description of Artificial Sequence: Synthetic oligonucleotide
  Antisense strand to SEQ ID NO: 2236936
cauucuguagcauucacag

SEQ ID NO: 2236938 - RNA, 19 nt, Artificial Sequence
  Description of Artificial Sequence: Synthetic oligonucleotide
  Sense strand starting at position 3654 of SEQ ID NO: 1884057
uccuaaagggauugacuuu

SEQ ID NO: 2236939 - RNA, 19 nt, Artificial Sequence
  Description of Artificial Sequence: Synthetic oligonucleotide
  Antisense strand to SEQ ID NO: 2236938
aaagucaaucccuuuagga

SEQ ID NO: 2236940 - RNA, 19 nt, Artificial Sequence
  Description of Artificial Sequence: Synthetic oligonucleotide
  Sense strand starting at position 3787 of SEQ ID NO: 1884057
gagauagaacagugcauua

SEQ ID NO: 2236941 - RNA, 19 nt, Artificial Sequence
  Description of Artificial Sequence: Synthetic oligonucleotide
  Antisense strand to SEQ ID NO: 2236940
uaaugcacuguucuaucuc

SEQ ID NO: 2236942 - RNA, 19 nt, Artificial Sequence
  Description of Artificial Sequence: Synthetic oligonucleotide
  Sense strand starting at position 3810 of SEQ ID NO: 1884057
aagagucaucacugcagau

SEQ ID NO: 2236943 - RNA, 19 nt, Artificial Sequence
  Description of Artificial Sequence: Synthetic oligonucleotide
  Antisense strand to SEQ ID NO: 2236942
aucugcagugaugacucuu

SEQ ID NO: 2236944 - RNA, 19 nt, Artificial Sequence
  Description of Artificial Sequence: Synthetic oligonucleotide
  Sense strand starting at position 3901 of SEQ ID NO: 1884057
ugagauuauaccuggagca

SEQ ID NO: 2236945 - RNA, 19 nt, Artificial Sequence
  Description of Artificial Sequence: Synthetic oligonucleotide
  Antisense strand to SEQ ID NO: 2236944
ugcuccagguauaaucuca

SEQ ID NO: 2236946 - RNA, 19 nt, Artificial Sequence
  Description of Artificial Sequence: Synthetic oligonucleotide
  Sense strand starting at position 3902 of SEQ ID NO: 1884057
gagauuauaccuggagcaa

SEQ ID NO: 2236947 - RNA, 19 nt, Artificial Sequence
  Description of Artificial Sequence: Synthetic oligonucleotide
  Antisense strand to SEQ ID NO: 2236946
uugcuccagguauaaucuc

SEQ ID NO: 2236948 - RNA, 19 nt, Artificial Sequence
  Description of Artificial Sequence: Synthetic oligonucleotide
  Sense strand starting at position 4 of SEQ ID NO: 1884058
ucugaacuauguucuuaga

SEQ ID NO: 2236949 - RNA, 19 nt, Artificial Sequence
  Description of Artificial Sequence: Synthetic oligonucleotide
  Antisense strand to SEQ ID NO: 2236948
ucuaagaacauaguucaga

SEQ ID NO: 2236950 - RNA, 19 nt, Artificial Sequence
  Description of Artificial Sequence: Synthetic oligonucleotide
  Sense strand starting at position 6 of SEQ ID NO: 1884058
ugaacuauguucuuagacu

SEQ ID NO: 2236951 - RNA, 19 nt, Artificial Sequence
  Description of Artificial Sequence: Synthetic oligonucleotide
  Antisense strand to SEQ ID NO: 2236950
agucuaagaacauaguuca

SEQ ID NO: 2236952 - RNA, 19 nt, Artificial Sequence
  Description of Artificial Sequence: Synthetic oligonucleotide
  Sense strand starting at position 180 of SEQ ID NO: 1884058
ccaaguaacuauguggaau

SEQ ID NO: 2236953 - RNA, 19 nt, Artificial Sequence
  Description of Artificial Sequence: Synthetic oligonucleotide
  Antisense strand to SEQ ID NO: 2236952
auuccacauaguuacuugg

SEQ ID NO: 2236954 - RNA, 19 nt, Artificial Sequence
  Description of Artificial Sequence: Synthetic oligonucleotide
  Sense strand starting at position 284 of SEQ ID NO: 1884058
gguuuaucugaggauguga

SEQ ID NO: 2236955 - RNA, 19 nt, Artificial Sequence
  Description of Artificial Sequence: Synthetic oligonucleotide
  Antisense strand to SEQ ID NO: 2236954
ucacauccucagauaaacc

SEQ ID NO: 2236956 - RNA, 19 nt, Artificial Sequence
  Description of Artificial Sequence: Synthetic oligonucleotide
  Sense strand starting at position 286 of SEQ ID NO: 1884058
uuuaucugaggaugugaaa

SEQ ID NO: 2236957 - RNA, 19 nt, Artificial Sequence
  Description of Artificial Sequence: Synthetic oligonucleotide
  Antisense strand to SEQ ID NO: 2236956
uuucacauccucagauaaa

SEQ ID NO: 2236958 - RNA, 19 nt, Artificial Sequence
  Description of Artificial Sequence: Synthetic oligonucleotide
  Sense strand starting at position 349 of SEQ ID NO: 1884058
gggacugaguucucaaaca

SEQ ID NO: 2236959 - RNA, 19 nt, Artificial Sequence
  Description of Artificial Sequence: Synthetic oligonucleotide
  Antisense strand to SEQ ID NO: 2236958
uguuugagaacucaguccc

SEQ ID NO: 2236960 - RNA, 19 nt, Artificial Sequence
  Description of Artificial Sequence: Synthetic oligonucleotide
  Sense strand starting at position 396 of SEQ ID NO: 1884058
augguuuggagucagcuau

SEQ ID NO: 2236961 - RNA, 19 nt, Artificial Sequence
  Description of Artificial Sequence: Synthetic oligonucleotide
  Antisense strand to SEQ ID NO: 2236960
auagcugacuccaaaccau

SEQ ID NO: 2236962 - RNA, 19 nt, Artificial Sequence
  Description of Artificial Sequence: Synthetic oligonucleotide
  Sense strand starting at position 400 of SEQ ID NO: 1884058
uuuggagucagcuauagac

SEQ ID NO: 2236963 - RNA, 19 nt, Artificial Sequence
  Description of Artificial Sequence: Synthetic oligonucleotide
  Antisense strand to SEQ ID NO: 2236962
gucuauagcugacuccaaa

SEQ ID NO: 2236964 - RNA, 19 nt, Artificial Sequence
  Description of Artificial Sequence: Synthetic oligonucleotide
  Sense strand starting at position 402 of SEQ ID NO: 1884058
uggagucagcuauagacau

SEQ ID NO: 2236965 - RNA, 19 nt, Artificial Sequence
  Description of Artificial Sequence: Synthetic oligonucleotide
  Antisense strand to SEQ ID NO: 2236964
augucuauagcugacucca

SEQ ID NO: 2236966 - RNA, 19 nt, Artificial Sequence
  Description of Artificial Sequence: Synthetic oligonucleotide
  Sense strand starting at position 477 of SEQ ID NO: 1884058
caguuugaagucugacuaa

SEQ ID NO: 2236967 - RNA, 19 nt, Artificial Sequence
  Description of Artificial Sequence: Synthetic oligonucleotide
  Antisense strand to SEQ ID NO: 2236966
uuagucagacuucaaacug

SEQ ID NO: 2236968 - RNA, 19 nt, Artificial Sequence
  Description of Artificial Sequence: Synthetic oligonucleotide
  Sense strand starting at position 480 of SEQ ID NO: 1884058
uuugaagucugacuaaucu

SEQ ID NO: 2236969 - RNA, 19 nt, Artificial Sequence
  Description of Artificial Sequence: Synthetic oligonucleotide
  Antisense strand to SEQ ID NO: 2236968
agauuagucagacuucaaa

SEQ ID NO: 2236970 - RNA, 19 nt, Artificial Sequence
  Description of Artificial Sequence: Synthetic oligonucleotide
  Sense strand starting at position 549 of SEQ ID NO: 1884058
uuaggugucagguacuuua

SEQ ID NO: 2236971 - RNA, 19 nt, Artificial Sequence
  Description of Artificial Sequence: Synthetic oligonucleotide
  Antisense strand to SEQ ID NO: 2236970
uaaaguaccugacaccuaa

SEQ ID NO: 2236972 - RNA, 19 nt, Artificial Sequence
  Description of Artificial Sequence: Synthetic oligonucleotide
  Sense strand starting at position 725 of SEQ ID NO: 1884058
gucugauucugaucacauc

SEQ ID NO: 2236973 - RNA, 19 nt, Artificial Sequence
  Description of Artificial Sequence: Synthetic oligonucleotide
  Antisense strand to SEQ ID NO: 2236972
gaugugaucagaaucagac

SEQ ID NO: 2236974 - RNA, 19 nt, Artificial Sequence
  Description of Artificial Sequence: Synthetic oligonucleotide
  Sense strand starting at position 804 of SEQ ID NO: 1884058
uugauuugcuaagaagaga

SEQ ID NO: 2236975 - RNA, 19 nt, Artificial Sequence
  Description of Artificial Sequence: Synthetic oligonucleotide
  Antisense strand to SEQ ID NO: 2236974
ucucuucuuagcaaaucaa

SEQ ID NO: 2236976 - RNA, 19 nt, Artificial Sequence
  Description of Artificial Sequence: Synthetic oligonucleotide
  Sense strand starting at position 861 of SEQ ID NO: 1884058
cuugauaaguaacuuggaa

SEQ ID NO: 2236977 - RNA, 19 nt, Artificial Sequence
  Description of Artificial Sequence: Synthetic oligonucleotide
  Antisense strand to SEQ ID NO: 2236976
uuccaaguuacuuaucaag

SEQ ID NO: 2236978 - RNA, 19 nt, Artificial Sequence
  Description of Artificial Sequence: Synthetic oligonucleotide
  Sense strand starting at position 894 of SEQ ID NO: 1884058
agaaacaucuugguaggca

SEQ ID NO: 2236979 - RNA, 19 nt, Artificial Sequence
  Description of Artificial Sequence: Synthetic oligonucleotide
  Antisense strand to SEQ ID NO: 2236978
ugccuaccaagauguuucu

SEQ ID NO: 2236980 - RNA, 19 nt, Artificial Sequence
  Description of Artificial Sequence: Synthetic oligonucleotide
  Sense strand starting at position 903 of SEQ ID NO: 1884058
uugguaggcauuugguaau

SEQ ID NO: 2236981 - RNA, 19 nt, Artificial Sequence
  Description of Artificial Sequence: Synthetic oligonucleotide
  Antisense strand to SEQ ID NO: 2236980
auuaccaaaugccuaccaa

SEQ ID NO: 2236982 - RNA, 19 nt, Artificial Sequence
  Description of Artificial Sequence: Synthetic oligonucleotide
  Sense strand starting at position 1101 of SEQ ID NO: 1884058
agauuaguagagugcuuag

SEQ ID NO: 2236983 - RNA, 19 nt, Artificial Sequence
  Description of Artificial Sequence: Synthetic oligonucleotide
  Antisense strand to SEQ ID NO: 2236982
cuaagcacucuacuaaucu

SEQ ID NO: 2236984 - RNA, 19 nt, Artificial Sequence
  Description of Artificial Sequence: Synthetic oligonucleotide
  Sense strand starting at position 1116 of SEQ ID NO: 1884058
uuaguaguuacggaguuga

SEQ ID NO: 2236985 - RNA, 19 nt, Artificial Sequence
  Description of Artificial Sequence: Synthetic oligonucleotide
  Antisense strand to SEQ ID NO: 2236984
ucaacuccguaacuacuaa

SEQ ID NO: 2236986 - RNA, 19 nt, Artificial Sequence
  Description of Artificial Sequence: Synthetic oligonucleotide
  Sense strand starting at position 1127 of SEQ ID NO: 1884058
ggaguugaguuugucuaga

SEQ ID NO: 2236987 - RNA, 19 nt, Artificial Sequence
  Description of Artificial Sequence: Synthetic oligonucleotide
  Antisense strand to SEQ ID NO: 2236986
ucuagacaaacucaacucc

SEQ ID NO: 2236988 - RNA, 19 nt, Artificial Sequence
  Description of Artificial Sequence: Synthetic oligonucleotide
  Sense strand starting at position 1129 of SEQ ID NO: 1884058
aguugaguuugucuagaaa

SEQ ID NO: 2236989 - RNA, 19 nt, Artificial Sequence
  Description of Artificial Sequence: Synthetic oligonucleotide
  Antisense strand to SEQ ID NO: 2236988
uuucuagacaaacucaacu

SEQ ID NO: 2236990 - RNA, 19 nt, Artificial Sequence
  Description of Artificial Sequence: Synthetic oligonucleotide
  Sense strand starting at position 1132 of SEQ ID NO: 1884058
ugaguuugucuagaaaugu

SEQ ID NO: 2236991 - RNA, 19 nt, Artificial Sequence
  Description of Artificial Sequence: Synthetic oligonucleotide
  Antisense strand to SEQ ID NO: 2236990
acauuucuagacaaacuca

SEQ ID NO: 2236992 - RNA, 19 nt, Artificial Sequence
  Description of Artificial Sequence: Synthetic oligonucleotide
  Sense strand starting at position 1274 of SEQ ID NO: 1884058
gcuuaaugugucuacuuaa

SEQ ID NO: 2236993 - RNA, 19 nt, Artificial Sequence
  Description of Artificial Sequence: Synthetic oligonucleotide
  Antisense strand to SEQ ID NO: 2236992
uuaaguagacacauuaagc

SEQ ID NO: 2236994 - RNA, 19 nt, Artificial Sequence
  Description of Artificial Sequence: Synthetic oligonucleotide
  Sense strand starting at position 1377 of SEQ ID NO: 1884058
aauaucuaggcuuguagau

SEQ ID NO: 2236995 - RNA, 19 nt, Artificial Sequence
  Description of Artificial Sequence: Synthetic oligonucleotide
  Antisense strand to SEQ ID NO: 2236994
aucuacaagccuagauauu

SEQ ID NO: 2236996 - RNA, 19 nt, Artificial Sequence
  Description of Artificial Sequence: Synthetic oligonucleotide
  Sense strand starting at position 1384 of SEQ ID NO: 1884058
aggcuuguagauuauggua

SEQ ID NO: 2236997 - RNA, 19 nt, Artificial Sequence
  Description of Artificial Sequence: Synthetic oligonucleotide
  Antisense strand to SEQ ID NO: 2236996
uaccauaaucuacaagccu

SEQ ID NO: 2236998 - RNA, 19 nt, Artificial Sequence
  Description of Artificial Sequence: Synthetic oligonucleotide
  Sense strand starting at position 1993 of SEQ ID NO: 1884058
gucugaauugaaugucaga

SEQ ID NO: 2236999 - RNA, 19 nt, Artificial Sequence
  Description of Artificial Sequence: Synthetic oligonucleotide
  Antisense strand to SEQ ID NO: 2236998
ucugacauucaauucagac

SEQ ID NO: 2237000 - RNA, 19 nt, Artificial Sequence
  Description of Artificial Sequence: Synthetic oligonucleotide
  Sense strand starting at position 2041 of SEQ ID NO: 1884058
gagaacacugcuuagcaga

SEQ ID NO: 2237001 - RNA, 19 nt, Artificial Sequence
  Description of Artificial Sequence: Synthetic oligonucleotide
  Antisense strand to SEQ ID NO: 2237000
ucugcuaagcaguguucuc

SEQ ID NO: 2237002 - RNA, 19 nt, Artificial Sequence
  Description of Artificial Sequence: Synthetic oligonucleotide
  Sense strand starting at position 2057 of SEQ ID NO: 1884058
agauuagguccuggauaac

SEQ ID NO: 2237003 - RNA, 19 nt, Artificial Sequence
  Description of Artificial Sequence: Synthetic oligonucleotide
  Antisense strand to SEQ ID NO: 2237002
guuauccaggaccuaaucu

SEQ ID NO: 2237004 - RNA, 19 nt, Artificial Sequence
  Description of Artificial Sequence: Synthetic oligonucleotide
  Sense strand starting at position 2336 of SEQ ID NO: 1884058
augagaaucgcugauauug

SEQ ID NO: 2237005 - RNA, 19 nt, Artificial Sequence
  Description of Artificial Sequence: Synthetic oligonucleotide
  Antisense strand to SEQ ID NO: 2237004
caauaucagcgauucucau

SEQ ID NO: 2237006 - RNA, 19 nt, Artificial Sequence
  Description of Artificial Sequence: Synthetic oligonucleotide
  Sense strand starting at position 2708 of SEQ ID NO: 1884058
gagaauugucuaggcaacc

SEQ ID NO: 2237007 - RNA, 19 nt, Artificial Sequence
  Description of Artificial Sequence: Synthetic oligonucleotide
  Antisense strand to SEQ ID NO: 2237006
gguugccuagacaauucuc

SEQ ID NO: 2237008 - RNA, 19 nt, Artificial Sequence
  Description of Artificial Sequence: Synthetic oligonucleotide
  Sense strand starting at position 2709 of SEQ ID NO: 1884058
agaauugucuaggcaaccu

SEQ ID NO: 2237009 - RNA, 19 nt, Artificial Sequence
  Description of Artificial Sequence: Synthetic oligonucleotide
  Antisense strand to SEQ ID NO: 2237008
agguugccuagacaauucu

SEQ ID NO: 2237010 - RNA, 19 nt, Artificial Sequence
  Description of Artificial Sequence: Synthetic oligonucleotide
  Sense strand starting at position 2748 of SEQ ID NO: 1884058
ggccucauuccagaucuaa

SEQ ID NO: 2237011 - RNA, 19 nt, Artificial Sequence
  Description of Artificial Sequence: Synthetic oligonucleotide
  Antisense strand to SEQ ID NO: 2237010
uuagaucuggaaugaggcc

SEQ ID NO: 2237012 - RNA, 19 nt, Artificial Sequence
  Description of Artificial Sequence: Synthetic oligonucleotide
  Sense strand starting at position 3042 of SEQ ID NO: 1884058
uggaucauccugcaagcuu

SEQ ID NO: 2237013 - RNA, 19 nt, Artificial Sequence
  Description of Artificial Sequence: Synthetic oligonucleotide
  Antisense strand to SEQ ID NO: 2237012
aagcuugcaggaugaucca

SEQ ID NO: 2237014 - RNA, 19 nt, Artificial Sequence
  Description of Artificial Sequence: Synthetic oligonucleotide
  Sense strand starting at position 3681 of SEQ ID NO: 1884058
agcaaucacucagugaaac

SEQ ID NO: 2237015 - RNA, 19 nt, Artificial Sequence
  Description of Artificial Sequence: Synthetic oligonucleotide
  Antisense strand to SEQ ID NO: 2237014
guuucacugagugauugcu

SEQ ID NO: 2237016 - RNA, 19 nt, Artificial Sequence
  Description of Artificial Sequence: Synthetic oligonucleotide
  Sense strand starting at position 3682 of SEQ ID NO: 1884058
gcaaucacucagugaaacu

SEQ ID NO: 2237017 - RNA, 19 nt, Artificial Sequence
  Description of Artificial Sequence: Synthetic oligonucleotide
  Antisense strand to SEQ ID NO: 2237016
aguuucacugagugauugc

SEQ ID NO: 2237018 - RNA, 19 nt, Artificial Sequence
  Description of Artificial Sequence: Synthetic oligonucleotide
  Sense strand starting at position 3710 of SEQ ID NO: 1884058
ucagaagcuugagucauga

SEQ ID NO: 2237019 - RNA, 19 nt, Artificial Sequence
  Description of Artificial Sequence: Synthetic oligonucleotide
  Antisense strand to SEQ ID NO: 2237018
ucaugacucaagcuucuga

SEQ ID NO: 2237020 - RNA, 19 nt, Artificial Sequence
  Description of Artificial Sequence: Synthetic oligonucleotide
  Sense strand starting at position 3752 of SEQ ID NO: 1884058
gauagauuccauugcacug

SEQ ID NO: 2237021 - RNA, 19 nt, Artificial Sequence
  Description of Artificial Sequence: Synthetic oligonucleotide
  Antisense strand to SEQ ID NO: 2237020
cagugcaauggaaucuauc

SEQ ID NO: 2237022 - RNA, 19 nt, Artificial Sequence
  Description of Artificial Sequence: Synthetic oligonucleotide
  Sense strand starting at position 3900 of SEQ ID NO: 1884058
cgcauacauguggacuauu

SEQ ID NO: 2237023 - RNA, 19 nt, Artificial Sequence
  Description of Artificial Sequence: Synthetic oligonucleotide
  Antisense strand to SEQ ID NO: 2237022
aauaguccacauguaugcg

SEQ ID NO: 2237024 - RNA, 19 nt, Artificial Sequence
  Description of Artificial Sequence: Synthetic oligonucleotide
  Sense strand starting at position 3939 of SEQ ID NO: 1884058
gagugagacccauaugcac

SEQ ID NO: 2237025 - RNA, 19 nt, Artificial Sequence
  Description of Artificial Sequence: Synthetic oligonucleotide
  Antisense strand to SEQ ID NO: 2237024
gugcauaugggucucacuc

SEQ ID NO: 2237026 - RNA, 19 nt, Artificial Sequence
  Description of Artificial Sequence: Synthetic oligonucleotide
  Sense strand starting at position 3965 of SEQ ID NO: 1884058
gagggauggccaugauaca

SEQ ID NO: 2237027 - RNA, 19 nt, Artificial Sequence
  Description of Artificial Sequence: Synthetic oligonucleotide
  Antisense strand to SEQ ID NO: 2237026
uguaucauggccaucccuc

SEQ ID NO: 2237028 - RNA, 19 nt, Artificial Sequence
  Description of Artificial Sequence: Synthetic oligonucleotide
  Sense strand starting at position 107 of SEQ ID NO: 1884059
uggcacugugaguaaugga

SEQ ID NO: 2237029 - RNA, 19 nt, Artificial Sequence
  Description of Artificial Sequence: Synthetic oligonucleotide
  Antisense strand to SEQ ID NO: 2237028
uccauuacucacagugcca

SEQ ID NO: 2237030 - RNA, 19 nt, Artificial Sequence
  Description of Artificial Sequence: Synthetic oligonucleotide
  Sense strand starting at position 112 of SEQ ID NO: 1884059
cugugaguaauggacugua

SEQ ID NO: 2237031 - RNA, 19 nt, Artificial Sequence
  Description of Artificial Sequence: Synthetic oligonucleotide
  Antisense strand to SEQ ID NO: 2237030
uacaguccauuacucacag

SEQ ID NO: 2237032 - RNA, 19 nt, Artificial Sequence
  Description of Artificial Sequence: Synthetic oligonucleotide
  Sense strand starting at position 115 of SEQ ID NO: 1884059
ugaguaauggacuguagca

SEQ ID NO: 2237033 - RNA, 19 nt, Artificial Sequence
  Description of Artificial Sequence: Synthetic oligonucleotide
  Antisense strand to SEQ ID NO: 2237032
ugcuacaguccauuacuca

SEQ ID NO: 2237034 - RNA, 19 nt, Artificial Sequence
  Description of Artificial Sequence: Synthetic oligonucleotide
  Sense strand starting at position 117 of SEQ ID NO: 1884059
aguaauggacuguagcaga

SEQ ID NO: 2237035 - RNA, 19 nt, Artificial Sequence
  Description of Artificial Sequence: Synthetic oligonucleotide
  Antisense strand to SEQ ID NO: 2237034
ucugcuacaguccauuacu

SEQ ID NO: 2237036 - RNA, 19 nt, Artificial Sequence
  Description of Artificial Sequence: Synthetic oligonucleotide
  Sense strand starting at position 265 of SEQ ID NO: 1884059
gagggaguguaucugauca

SEQ ID NO: 2237037 - RNA, 19 nt, Artificial Sequence
  Description of Artificial Sequence: Synthetic oligonucleotide
  Antisense strand to SEQ ID NO: 2237036
ugaucagauacacucccuc

SEQ ID NO: 2237038 - RNA, 19 nt, Artificial Sequence
  Description of Artificial Sequence: Synthetic oligonucleotide
  Sense strand starting at position 269 of SEQ ID NO: 1884059
gaguguaucugaucauggu

SEQ ID NO: 2237039 - RNA, 19 nt, Artificial Sequence
  Description of Artificial Sequence: Synthetic oligonucleotide
  Antisense strand to SEQ ID NO: 2237038
accaugaucagauacacuc

SEQ ID NO: 2237040 - RNA, 19 nt, Artificial Sequence
  Description of Artificial Sequence: Synthetic oligonucleotide
  Sense strand starting at position 270 of SEQ ID NO: 1884059
aguguaucugaucaugguu

SEQ ID NO: 2237041 - RNA, 19 nt, Artificial Sequence
  Description of Artificial Sequence: Synthetic oligonucleotide
  Antisense strand to SEQ ID NO: 2237040
aaccaugaucagauacacu

SEQ ID NO: 2237042 - RNA, 19 nt, Artificial Sequence
  Description of Artificial Sequence: Synthetic oligonucleotide
  Sense strand starting at position 273 of SEQ ID NO: 1884059
guaucugaucaugguuuga

SEQ ID NO: 2237043 - RNA, 19 nt, Artificial Sequence
  Description of Artificial Sequence: Synthetic oligonucleotide
  Antisense strand to SEQ ID NO: 2237042
ucaaaccaugaucagauac

SEQ ID NO: 2237044 - RNA, 19 nt, Artificial Sequence
  Description of Artificial Sequence: Synthetic oligonucleotide
  Sense strand starting at position 275 of SEQ ID NO: 1884059
aucugaucaugguuugaga

SEQ ID NO: 2237045 - RNA, 19 nt, Artificial Sequence
  Description of Artificial Sequence: Synthetic oligonucleotide
  Antisense strand to SEQ ID NO: 2237044
ucucaaaccaugaucagau

SEQ ID NO: 2237046 - RNA, 19 nt, Artificial Sequence
  Description of Artificial Sequence: Synthetic oligonucleotide
  Sense strand starting at position 277 of SEQ ID NO: 1884059
cugaucaugguuugagaaa

SEQ ID NO: 2237047 - RNA, 19 nt, Artificial Sequence
  Description of Artificial Sequence: Synthetic oligonucleotide
  Antisense strand to SEQ ID NO: 2237046
uuucucaaaccaugaucag

SEQ ID NO: 2237048 - RNA, 19 nt, Artificial Sequence
  Description of Artificial Sequence: Synthetic oligonucleotide
  Sense strand starting at position 278 of SEQ ID NO: 1884059
ugaucaugguuugagaaau

SEQ ID NO: 2237049 - RNA, 19 nt, Artificial Sequence
  Description of Artificial Sequence: Synthetic oligonucleotide
  Antisense strand to SEQ ID NO: 2237048
auuucucaaaccaugauca

SEQ ID NO: 2237050 - RNA, 19 nt, Artificial Sequence
  Description of Artificial Sequence: Synthetic oligonucleotide
  Sense strand starting at position 316 of SEQ ID NO: 1884059
aacugaucuugucuaagga

SEQ ID NO: 2237051 - RNA, 19 nt, Artificial Sequence
  Description of Artificial Sequence: Synthetic oligonucleotide
  Antisense strand to SEQ ID NO: 2237050
uccuuagacaagaucaguu

SEQ ID NO: 2237052 - RNA, 19 nt, Artificial Sequence
  Description of Artificial Sequence: Synthetic oligonucleotide
  Sense strand starting at position 368 of SEQ ID NO: 1884059
cucacaucucaaggugaaa

SEQ ID NO: 2237053 - RNA, 19 nt, Artificial Sequence
  Description of Artificial Sequence: Synthetic oligonucleotide
  Antisense strand to SEQ ID NO: 2237052
uuucaccuugagaugugag

SEQ ID NO: 2237054 - RNA, 19 nt, Artificial Sequence
  Description of Artificial Sequence: Synthetic oligonucleotide
  Sense strand starting at position 387 of SEQ ID NO: 1884059
auggauguuucuucugaga

SEQ ID NO: 2237055 - RNA, 19 nt, Artificial Sequence
  Description of Artificial Sequence: Synthetic oligonucleotide
  Antisense strand to SEQ ID NO: 2237054
ucucagaagaaacauccau

SEQ ID NO: 2237056 - RNA, 19 nt, Artificial Sequence
  Description of Artificial Sequence: Synthetic oligonucleotide
  Sense strand starting at position 446 of SEQ ID NO: 1884059
cccaguucugauuguugga

SEQ ID NO: 2237057 - RNA, 19 nt, Artificial Sequence
  Description of Artificial Sequence: Synthetic oligonucleotide
  Antisense strand to SEQ ID NO: 2237056
uccaacaaucagaacuggg

SEQ ID NO: 2237058 - RNA, 19 nt, Artificial Sequence
  Description of Artificial Sequence: Synthetic oligonucleotide
  Sense strand starting at position 448 of SEQ ID NO: 1884059
caguucugauuguuggaaa

SEQ ID NO: 2237059 - RNA, 19 nt, Artificial Sequence
  Description of Artificial Sequence: Synthetic oligonucleotide
  Antisense strand to SEQ ID NO: 2237058
uuuccaacaaucagaacug

SEQ ID NO: 2237060 - RNA, 19 nt, Artificial Sequence
  Description of Artificial Sequence: Synthetic oligonucleotide
  Sense strand starting at position 461 of SEQ ID NO: 1884059
uggaaaggauuacacaaua

SEQ ID NO: 2237061 - RNA, 19 nt, Artificial Sequence
  Description of Artificial Sequence: Synthetic oligonucleotide
  Antisense strand to SEQ ID NO: 2237060
uauuguguaauccuuucca

SEQ ID NO: 2237062 - RNA, 19 nt, Artificial Sequence
  Description of Artificial Sequence: Synthetic oligonucleotide
  Sense strand starting at position 708 of SEQ ID NO: 1884059
uugacauauugcccagacu

SEQ ID NO: 2237063 - RNA, 19 nt, Artificial Sequence
  Description of Artificial Sequence: Synthetic oligonucleotide
  Antisense strand to SEQ ID NO: 2237062
agucugggcaauaugucaa

SEQ ID NO: 2237064 - RNA, 19 nt, Artificial Sequence
  Description of Artificial Sequence: Synthetic oligonucleotide
  Sense strand starting at position 709 of SEQ ID NO: 1884059
ugacauauugcccagacug

SEQ ID NO: 2237065 - RNA, 19 nt, Artificial Sequence
  Description of Artificial Sequence: Synthetic oligonucleotide
  Antisense strand to SEQ ID NO: 2237064
cagucugggcaauauguca

SEQ ID NO: 2237066 - RNA, 19 nt, Artificial Sequence
  Description of Artificial Sequence: Synthetic oligonucleotide
  Sense strand starting at position 838 of SEQ ID NO: 1884059
gacauagaugucugcugga

SEQ ID NO: 2237067 - RNA, 19 nt, Artificial Sequence
  Description of Artificial Sequence: Synthetic oligonucleotide
  Antisense strand to SEQ ID NO: 2237066
uccagcagacaucuauguc

SEQ ID NO: 2237068 - RNA, 19 nt, Artificial Sequence
  Description of Artificial Sequence: Synthetic oligonucleotide
  Sense strand starting at position 843 of SEQ ID NO: 1884059
agaugucugcuggaaugua

SEQ ID NO: 2237069 - RNA, 19 nt, Artificial Sequence
  Description of Artificial Sequence: Synthetic oligonucleotide
  Antisense strand to SEQ ID NO: 2237068
uacauuccagcagacaucu

SEQ ID NO: 2237070 - RNA, 19 nt, Artificial Sequence
  Description of Artificial Sequence: Synthetic oligonucleotide
  Sense strand starting at position 1160 of SEQ ID NO: 1884059
gagggagagucagucucaa

SEQ ID NO: 2237071 - RNA, 19 nt, Artificial Sequence
  Description of Artificial Sequence: Synthetic oligonucleotide
  Antisense strand to SEQ ID NO: 2237070
uugagacugacucucccuc

SEQ ID NO: 2237072 - RNA, 19 nt, Artificial Sequence
  Description of Artificial Sequence: Synthetic oligonucleotide
  Sense strand starting at position 1212 of SEQ ID NO: 1884059
gcagaauuccuagacuuau

SEQ ID NO: 2237073 - RNA, 19 nt, Artificial Sequence
  Description of Artificial Sequence: Synthetic oligonucleotide
  Antisense strand to SEQ ID NO: 2237072
auaagucuaggaauucugc

SEQ ID NO: 2237074 - RNA, 19 nt, Artificial Sequence
  Description of Artificial Sequence: Synthetic oligonucleotide
  Sense strand starting at position 1279 of SEQ ID NO: 1884059
uagguuauccguggaggua

SEQ ID NO: 2237075 - RNA, 19 nt, Artificial Sequence
  Description of Artificial Sequence: Synthetic oligonucleotide
  Antisense strand to SEQ ID NO: 2237074
uaccuccacggauaaccua

SEQ ID NO: 2237076 - RNA, 19 nt, Artificial Sequence
  Description of Artificial Sequence: Synthetic oligonucleotide
  Sense strand starting at position 1280 of SEQ ID NO: 1884059
agguuauccguggagguaa

SEQ ID NO: 2237077 - RNA, 19 nt, Artificial Sequence
  Description of Artificial Sequence: Synthetic oligonucleotide
  Antisense strand to SEQ ID NO: 2237076
uuaccuccacggauaaccu

SEQ ID NO: 2237078 - RNA, 19 nt, Artificial Sequence
  Description of Artificial Sequence: Synthetic oligonucleotide
  Sense strand starting at position 1370 of SEQ ID NO: 1884059
cugaaauauguacaugcuu

SEQ ID NO: 2237079 - RNA, 19 nt, Artificial Sequence
  Description of Artificial Sequence: Synthetic oligonucleotide
  Antisense strand to SEQ ID NO: 2237078
aagcauguacauauuucag

SEQ ID NO: 2237080 - RNA, 19 nt, Artificial Sequence
  Description of Artificial Sequence: Synthetic oligonucleotide
  Sense strand starting at position 1398 of SEQ ID NO: 1884059
aaggaaaugugucuuaugu

SEQ ID NO: 2237081 - RNA, 19 nt, Artificial Sequence
  Description of Artificial Sequence: Synthetic oligonucleotide
  Antisense strand to SEQ ID NO: 2237080
acauaagacacauuuccuu

SEQ ID NO: 2237082 - RNA, 19 nt, Artificial Sequence
  Description of Artificial Sequence: Synthetic oligonucleotide
  Sense strand starting at position 1407 of SEQ ID NO: 1884059
ugucuuaugucguuaaaug

SEQ ID NO: 2237083 - RNA, 19 nt, Artificial Sequence
  Description of Artificial Sequence: Synthetic oligonucleotide
  Antisense strand to SEQ ID NO: 2237082
cauuuaacgacauaagaca

SEQ ID NO: 2237084 - RNA, 19 nt, Artificial Sequence
  Description of Artificial Sequence: Synthetic oligonucleotide
  Sense strand starting at position 1408 of SEQ ID NO: 1884059
gucuuaugucguuaaaugu

SEQ ID NO: 2237085 - RNA, 19 nt, Artificial Sequence
  Description of Artificial Sequence: Synthetic oligonucleotide
  Antisense strand to SEQ ID NO: 2237084
acauuuaacgacauaagac

SEQ ID NO: 2237086 - RNA, 19 nt, Artificial Sequence
  Description of Artificial Sequence: Synthetic oligonucleotide
  Sense strand starting at position 1415 of SEQ ID NO: 1884059
gucguuaaauguucuuuaa

SEQ ID NO: 2237087 - RNA, 19 nt, Artificial Sequence
  Description of Artificial Sequence: Synthetic oligonucleotide
  Antisense strand to SEQ ID NO: 2237086
uuaaagaacauuuaacgac

SEQ ID NO: 2237088 - RNA, 19 nt, Artificial Sequence
  Description of Artificial Sequence: Synthetic oligonucleotide
  Sense strand starting at position 1518 of SEQ ID NO: 1884059
ccuugaugucaacagucua

SEQ ID NO: 2237089 - RNA, 19 nt, Artificial Sequence
  Description of Artificial Sequence: Synthetic oligonucleotide
  Antisense strand to SEQ ID NO: 2237088
uagacuguugacaucaagg

SEQ ID NO: 2237090 - RNA, 19 nt, Artificial Sequence
  Description of Artificial Sequence: Synthetic oligonucleotide
  Sense strand starting at position 1552 of SEQ ID NO: 1884059
cggagaggcuuucuuccaa

SEQ ID NO: 2237091 - RNA, 19 nt, Artificial Sequence
  Description of Artificial Sequence: Synthetic oligonucleotide
  Antisense strand to SEQ ID NO: 2237090
uuggaagaaagccucuccg

SEQ ID NO: 2237092 - RNA, 19 nt, Artificial Sequence
  Description of Artificial Sequence: Synthetic oligonucleotide
  Sense strand starting at position 1571 of SEQ ID NO: 1884059
aaugcagaauugucagcau

SEQ ID NO: 2237093 - RNA, 19 nt, Artificial Sequence
  Description of Artificial Sequence: Synthetic oligonucleotide
  Antisense strand to SEQ ID NO: 2237092
augcugacaauucugcauu

SEQ ID NO: 2237094 - RNA, 19 nt, Artificial Sequence
  Description of Artificial Sequence: Synthetic oligonucleotide
  Sense strand starting at position 1574 of SEQ ID NO: 1884059
gcagaauugucagcauuug

SEQ ID NO: 2237095 - RNA, 19 nt, Artificial Sequence
  Description of Artificial Sequence: Synthetic oligonucleotide
  Antisense strand to SEQ ID NO: 2237094
caaaugcugacaauucugc

SEQ ID NO: 2237096 - RNA, 19 nt, Artificial Sequence
  Description of Artificial Sequence: Synthetic oligonucleotide
  Sense strand starting at position 1586 of SEQ ID NO: 1884059
gcauuugaacgcugaguac

SEQ ID NO: 2237097 - RNA, 19 nt, Artificial Sequence
  Description of Artificial Sequence: Synthetic oligonucleotide
  Antisense strand to SEQ ID NO: 2237096
guacucagcguucaaaugc

SEQ ID NO: 2237098 - RNA, 19 nt, Artificial Sequence
  Description of Artificial Sequence: Synthetic oligonucleotide
  Sense strand starting at position 1761 of SEQ ID NO: 1884059
cacgguuaaccaugaauau

SEQ ID NO: 2237099 - RNA, 19 nt, Artificial Sequence
  Description of Artificial Sequence: Synthetic oligonucleotide
  Antisense strand to SEQ ID NO: 2237098
auauucaugguuaaccgug

SEQ ID NO: 2237100 - RNA, 19 nt, Artificial Sequence
  Description of Artificial Sequence: Synthetic oligonucleotide
  Sense strand starting at position 1773 of SEQ ID NO: 1884059
ugaauaugguaucccugaa

SEQ ID NO: 2237101 - RNA, 19 nt, Artificial Sequence
  Description of Artificial Sequence: Synthetic oligonucleotide
  Antisense strand to SEQ ID NO: 2237100
uucagggauaccauauuca

SEQ ID NO: 2237102 - RNA, 19 nt, Artificial Sequence
  Description of Artificial Sequence: Synthetic oligonucleotide
  Sense strand starting at position 1843 of SEQ ID NO: 1884059
guguauauguagccaauca

SEQ ID NO: 2237103 - RNA, 19 nt, Artificial Sequence
  Description of Artificial Sequence: Synthetic oligonucleotide
  Antisense strand to SEQ ID NO: 2237102
ugauuggcuacauauacac

SEQ ID NO: 2237104 - RNA, 19 nt, Artificial Sequence
  Description of Artificial Sequence: Synthetic oligonucleotide
  Sense strand starting at position 2012 of SEQ ID NO: 1884059
ugaacaccucccugagcua

SEQ ID NO: 2237105 - RNA, 19 nt, Artificial Sequence
  Description of Artificial Sequence: Synthetic oligonucleotide
  Antisense strand to SEQ ID NO: 2237104
uagcucagggagguguuca

SEQ ID NO: 2237106 - RNA, 19 nt, Artificial Sequence
  Description of Artificial Sequence: Synthetic oligonucleotide
  Sense strand starting at position 3327 of SEQ ID NO: 1884059
guguguucucaugcgaacg

SEQ ID NO: 2237107 - RNA, 19 nt, Artificial Sequence
  Description of Artificial Sequence: Synthetic oligonucleotide
  Antisense strand to SEQ ID NO: 2237106
cguucgcaugagaacacac

SEQ ID NO: 2237108 - RNA, 19 nt, Artificial Sequence
  Description of Artificial Sequence: Synthetic oligonucleotide
  Sense strand starting at position 73 of SEQ ID NO: 1884060
guguuaugaagaugagaga

SEQ ID NO: 2237109 - RNA, 19 nt, Artificial Sequence
  Description of Artificial Sequence: Synthetic oligonucleotide
  Antisense strand to SEQ ID NO: 2237108
ucucucaucuucauaacac

SEQ ID NO: 2237110 - RNA, 19 nt, Artificial Sequence
  Description of Artificial Sequence: Synthetic oligonucleotide
  Sense strand starting at position 76 of SEQ ID NO: 1884060
uuaugaagaugagagaaau

SEQ ID NO: 2237111 - RNA, 19 nt, Artificial Sequence
  Description of Artificial Sequence: Synthetic oligonucleotide
  Antisense strand to SEQ ID NO: 2237110
auuucucucaucuucauaa

SEQ ID NO: 2237112 - RNA, 19 nt, Artificial Sequence
  Description of Artificial Sequence: Synthetic oligonucleotide
  Sense strand starting at position 308 of SEQ ID NO: 1884060
agcuguaaaugauuguaaa

SEQ ID NO: 2237113 - RNA, 19 nt, Artificial Sequence
  Description of Artificial Sequence: Synthetic oligonucleotide
  Antisense strand to SEQ ID NO: 2237112
uuuacaaucauuuacagcu

SEQ ID NO: 2237114 - RNA, 19 nt, Artificial Sequence
  Description of Artificial Sequence: Synthetic oligonucleotide
  Sense strand starting at position 689 of SEQ ID NO: 1884060
uugcaauaaguauagaucu

SEQ ID NO: 2237115 - RNA, 19 nt, Artificial Sequence
  Description of Artificial Sequence: Synthetic oligonucleotide
  Antisense strand to SEQ ID NO: 2237114
agaucuauacuuauugcaa

SEQ ID NO: 2237116 - RNA, 19 nt, Artificial Sequence
  Description of Artificial Sequence: Synthetic oligonucleotide
  Sense strand starting at position 735 of SEQ ID NO: 1884060
auaauagcccauuguauag

SEQ ID NO: 2237117 - RNA, 19 nt, Artificial Sequence
  Description of Artificial Sequence: Synthetic oligonucleotide
  Antisense strand to SEQ ID NO: 2237116
cuauacaaugggcuauuau

SEQ ID NO: 2237118 - RNA, 19 nt, Artificial Sequence
  Description of Artificial Sequence: Synthetic oligonucleotide
  Sense strand starting at position 742 of SEQ ID NO: 1884060
cccauuguauaguuauaac

SEQ ID NO: 2237119 - RNA, 19 nt, Artificial Sequence
  Description of Artificial Sequence: Synthetic oligonucleotide
  Antisense strand to SEQ ID NO: 2237118
guuauaacuauacaauggg

SEQ ID NO: 2237120 - RNA, 19 nt, Artificial Sequence
  Description of Artificial Sequence: Synthetic oligonucleotide
  Sense strand starting at position 849 of SEQ ID NO: 1884060
uugugaacuugacuacuga

SEQ ID NO: 2237121 - RNA, 19 nt, Artificial Sequence
  Description of Artificial Sequence: Synthetic oligonucleotide
  Antisense strand to SEQ ID NO: 2237120
ucaguagucaaguucacaa

SEQ ID NO: 2237122 - RNA, 19 nt, Artificial Sequence
  Description of Artificial Sequence: Synthetic oligonucleotide
  Sense strand starting at position 865 of SEQ ID NO: 1884060
ugauuucuguaggauaaau

SEQ ID NO: 2237123 - RNA, 19 nt, Artificial Sequence
  Description of Artificial Sequence: Synthetic oligonucleotide
  Antisense strand to SEQ ID NO: 2237122
auuuauccuacagaaauca

SEQ ID NO: 2237124 - RNA, 19 nt, Artificial Sequence
  Description of Artificial Sequence: Synthetic oligonucleotide
  Sense strand starting at position 1075 of SEQ ID NO: 1884060
cgagacccuguuuaauaua

SEQ ID NO: 2237125 - RNA, 19 nt, Artificial Sequence
  Description of Artificial Sequence: Synthetic oligonucleotide
  Antisense strand to SEQ ID NO: 2237124
uauauuaaacagggucucg

SEQ ID NO: 2237126 - RNA, 19 nt, Artificial Sequence
  Description of Artificial Sequence: Synthetic oligonucleotide
  Sense strand starting at position 1116 of SEQ ID NO: 1884060
auaaaugaugcauaagugu

SEQ ID NO: 2237127 - RNA, 19 nt, Artificial Sequence
  Description of Artificial Sequence: Synthetic oligonucleotide
  Antisense strand to SEQ ID NO: 2237126
acacuuaugcaucauuuau

SEQ ID NO: 2237128 - RNA, 19 nt, Artificial Sequence
  Description of Artificial Sequence: Synthetic oligonucleotide
  Sense strand starting at position 1217 of SEQ ID NO: 1884060
uuugauugccaguauaagu

SEQ ID NO: 2237129 - RNA, 19 nt, Artificial Sequence
  Description of Artificial Sequence: Synthetic oligonucleotide
  Antisense strand to SEQ ID NO: 2237128
acuuauacuggcaaucaaa

SEQ ID NO: 2237130 - RNA, 19 nt, Artificial Sequence
  Description of Artificial Sequence: Synthetic oligonucleotide
  Sense strand starting at position 1447 of SEQ ID NO: 1884060
acccaucucugguccagaa

SEQ ID NO: 2237131 - RNA, 19 nt, Artificial Sequence
  Description of Artificial Sequence: Synthetic oligonucleotide
  Antisense strand to SEQ ID NO: 2237130
uucuggaccagagaugggu

SEQ ID NO: 2237132 - RNA, 19 nt, Artificial Sequence
  Description of Artificial Sequence: Synthetic oligonucleotide
  Sense strand starting at position 2194 of SEQ ID NO: 1884060
uguuuauaugcgagcgaug

SEQ ID NO: 2237133 - RNA, 19 nt, Artificial Sequence
  Description of Artificial Sequence: Synthetic oligonucleotide
  Antisense strand to SEQ ID NO: 2237132
caucgcucgcauauaaaca

SEQ ID NO: 2237134 - RNA, 19 nt, Artificial Sequence
  Description of Artificial Sequence: Synthetic oligonucleotide
  Sense strand starting at position 2524 of SEQ ID NO: 1884060
ucgcaugugauuuggcaaa

SEQ ID NO: 2237135 - RNA, 19 nt, Artificial Sequence
  Description of Artificial Sequence: Synthetic oligonucleotide
  Antisense strand to SEQ ID NO: 2237134
uuugccaaaucacaugcga

SEQ ID NO: 2237136 - RNA, 19 nt, Artificial Sequence
  Description of Artificial Sequence: Synthetic oligonucleotide
  Sense strand starting at position 2541 of SEQ ID NO: 1884060
aagggaaaguuagaaacaa

SEQ ID NO: 2237137 - RNA, 19 nt, Artificial Sequence
  Description of Artificial Sequence: Synthetic oligonucleotide
  Antisense strand to SEQ ID NO: 2237136
uuguuucuaacuuucccuu

SEQ ID NO: 2237138 - RNA, 19 nt, Artificial Sequence
  Description of Artificial Sequence: Synthetic oligonucleotide
  Sense strand starting at position 2561 of SEQ ID NO: 1884060
uuuccauuugcuugugaac

SEQ ID NO: 2237139 - RNA, 19 nt, Artificial Sequence
  Description of Artificial Sequence: Synthetic oligonucleotide
  Antisense strand to SEQ ID NO: 2237138
guucacaagcaaauggaaa

SEQ ID NO: 2237140 - RNA, 19 nt, Artificial Sequence
  Description of Artificial Sequence: Synthetic oligonucleotide
  Sense strand starting at position 2762 of SEQ ID NO: 1884060
gaauguuuauucguaggaa

SEQ ID NO: 2237141 - RNA, 19 nt, Artificial Sequence
  Description of Artificial Sequence: Synthetic oligonucleotide
  Antisense strand to SEQ ID NO: 2237140
uuccuacgaauaaacauuc

SEQ ID NO: 2237142 - RNA, 19 nt, Artificial Sequence
  Description of Artificial Sequence: Synthetic oligonucleotide
  Sense strand starting at position 2782 of SEQ ID NO: 1884060
ccagcagcagauuaauuau

SEQ ID NO: 2237143 - RNA, 19 nt, Artificial Sequence
  Description of Artificial Sequence: Synthetic oligonucleotide
  Antisense strand to SEQ ID NO: 2237142
auaauuaaucugcugcugg

SEQ ID NO: 2237144 - RNA, 19 nt, Artificial Sequence
  Description of Artificial Sequence: Synthetic oligonucleotide
  Sense strand starting at position 2844 of SEQ ID NO: 1884060
ccgggauacuaugucaaca

SEQ ID NO: 2237145 - RNA, 19 nt, Artificial Sequence
  Description of Artificial Sequence: Synthetic oligonucleotide
  Antisense strand to SEQ ID NO: 2237144
uguugacauaguaucccgg

SEQ ID NO: 2237146 - RNA, 19 nt, Artificial Sequence
  Description of Artificial Sequence: Synthetic oligonucleotide
  Sense strand starting at position 2908 of SEQ ID NO: 1884060
gcucaaauucuguaaagga

SEQ ID NO: 2237147 - RNA, 19 nt, Artificial Sequence
  Description of Artificial Sequence: Synthetic oligonucleotide
  Antisense strand to SEQ ID NO: 2237146
uccuuuacagaauuugagc

SEQ ID NO: 2237148 - RNA, 19 nt, Artificial Sequence
  Description of Artificial Sequence: Synthetic oligonucleotide
  Sense strand starting at position 2946 of SEQ ID NO: 1884060
acaagugcaagugaguauu

SEQ ID NO: 2237149 - RNA, 19 nt, Artificial Sequence
  Description of Artificial Sequence: Synthetic oligonucleotide
  Antisense strand to SEQ ID NO: 2237148
aauacucacuugcacuugu

SEQ ID NO: 2237150 - RNA, 19 nt, Artificial Sequence
  Description of Artificial Sequence: Synthetic oligonucleotide
  Sense strand starting at position 2954 of SEQ ID NO: 1884060
aagugaguauuaguuauag

SEQ ID NO: 2237151 - RNA, 19 nt, Artificial Sequence
  Description of Artificial Sequence: Synthetic oligonucleotide
  Antisense strand to SEQ ID NO: 2237150
cuauaacuaauacucacuu

SEQ ID NO: 2237152 - RNA, 19 nt, Artificial Sequence
  Description of Artificial Sequence: Synthetic oligonucleotide
  Sense strand starting at position 2956 of SEQ ID NO: 1884060
gugaguauuaguuauagaa

SEQ ID NO: 2237153 - RNA, 19 nt, Artificial Sequence
  Description of Artificial Sequence: Synthetic oligonucleotide
  Antisense strand to SEQ ID NO: 2237152
uucuauaacuaauacucac

SEQ ID NO: 2237154 - RNA, 19 nt, Artificial Sequence
  Description of Artificial Sequence: Synthetic oligonucleotide
  Sense strand starting at position 2960 of SEQ ID NO: 1884060
guauuaguuauagaacugu

SEQ ID NO: 2237155 - RNA, 19 nt, Artificial Sequence
  Description of Artificial Sequence: Synthetic oligonucleotide
  Antisense strand to SEQ ID NO: 2237154
acaguucuauaacuaauac

SEQ ID NO: 2237156 - RNA, 19 nt, Artificial Sequence
  Description of Artificial Sequence: Synthetic oligonucleotide
  Sense strand starting at position 3138 of SEQ ID NO: 1884060
uaguuugaccuugggauua

SEQ ID NO: 2237157 - RNA, 19 nt, Artificial Sequence
  Description of Artificial Sequence: Synthetic oligonucleotide
  Antisense strand to SEQ ID NO: 2237156
uaaucccaaggucaaacua

SEQ ID NO: 2237158 - RNA, 19 nt, Artificial Sequence
  Description of Artificial Sequence: Synthetic oligonucleotide
  Sense strand starting at position 3165 of SEQ ID NO: 1884060
aguugauacccauaagcau

SEQ ID NO: 2237159 - RNA, 19 nt, Artificial Sequence
  Description of Artificial Sequence: Synthetic oligonucleotide
  Antisense strand to SEQ ID NO: 2237158
augcuuauggguaucaacu

SEQ ID NO: 2237160 - RNA, 19 nt, Artificial Sequence
  Description of Artificial Sequence: Synthetic oligonucleotide
  Sense strand starting at position 3229 of SEQ ID NO: 1884060
uguuaugaugcucauaaag

SEQ ID NO: 2237161 - RNA, 19 nt, Artificial Sequence
  Description of Artificial Sequence: Synthetic oligonucleotide
  Antisense strand to SEQ ID NO: 2237160
cuuuaugagcaucauaaca

SEQ ID NO: 2237162 - RNA, 19 nt, Artificial Sequence
  Description of Artificial Sequence: Synthetic oligonucleotide
  Sense strand starting at position 3305 of SEQ ID NO: 1884060
cagugaugacuaugaugcu

SEQ ID NO: 2237163 - RNA, 19 nt, Artificial Sequence
  Description of Artificial Sequence: Synthetic oligonucleotide
  Antisense strand to SEQ ID NO: 2237162
agcaucauagucaucacug

SEQ ID NO: 2237164 - RNA, 19 nt, Artificial Sequence
  Description of Artificial Sequence: Synthetic oligonucleotide
  Sense strand starting at position 3315 of SEQ ID NO: 1884060
uaugaugcuucugugagaa

SEQ ID NO: 2237165 - RNA, 19 nt, Artificial Sequence
  Description of Artificial Sequence: Synthetic oligonucleotide
  Antisense strand to SEQ ID NO: 2237164
uucucacagaagcaucaua

SEQ ID NO: 2237166 - RNA, 19 nt, Artificial Sequence
  Description of Artificial Sequence: Synthetic oligonucleotide
  Sense strand starting at position 3347 of SEQ ID NO: 1884060
aaagacuuggagugugauu

SEQ ID NO: 2237167 - RNA, 19 nt, Artificial Sequence
  Description of Artificial Sequence: Synthetic oligonucleotide
  Antisense strand to SEQ ID NO: 2237166
aaucacacuccaagucuuu

SEQ ID NO: 2237168 - RNA, 19 nt, Artificial Sequence
  Description of Artificial Sequence: Synthetic oligonucleotide
  Sense strand starting at position 3349 of SEQ ID NO: 1884060
agacuuggagugugauuaa

SEQ ID NO: 2237169 - RNA, 19 nt, Artificial Sequence
  Description of Artificial Sequence: Synthetic oligonucleotide
  Antisense strand to SEQ ID NO: 2237168
uuaaucacacuccaagucu

SEQ ID NO: 2237170 - RNA, 19 nt, Artificial Sequence
  Description of Artificial Sequence: Synthetic oligonucleotide
  Sense strand starting at position 3352 of SEQ ID NO: 1884060
cuuggagugugauuaagac

SEQ ID NO: 2237171 - RNA, 19 nt, Artificial Sequence
  Description of Artificial Sequence: Synthetic oligonucleotide
  Antisense strand to SEQ ID NO: 2237170
gucuuaaucacacuccaag

SEQ ID NO: 2237172 - RNA, 19 nt, Artificial Sequence
  Description of Artificial Sequence: Synthetic oligonucleotide
  Sense strand starting at position 3512 of SEQ ID NO: 1884060
uuacaaacauugucaguaa

SEQ ID NO: 2237173 - RNA, 19 nt, Artificial Sequence
  Description of Artificial Sequence: Synthetic oligonucleotide
  Antisense strand to SEQ ID NO: 2237172
uuacugacaauguuuguaa

SEQ ID NO: 2237174 - RNA, 19 nt, Artificial Sequence
  Description of Artificial Sequence: Synthetic oligonucleotide
  Sense strand starting at position 3603 of SEQ ID NO: 1884060
gcaagucagagguagacau

SEQ ID NO: 2237175 - RNA, 19 nt, Artificial Sequence
  Description of Artificial Sequence: Synthetic oligonucleotide
  Antisense strand to SEQ ID NO: 2237174
augucuaccucugacuugc

SEQ ID NO: 2237176 - RNA, 19 nt, Artificial Sequence
  Description of Artificial Sequence: Synthetic oligonucleotide
  Sense strand starting at position 3738 of SEQ ID NO: 1884060
ggauuagaaccauggcaau

SEQ ID NO: 2237177 - RNA, 19 nt, Artificial Sequence
  Description of Artificial Sequence: Synthetic oligonucleotide
  Antisense strand to SEQ ID NO: 2237176
auugccaugguucuaaucc

SEQ ID NO: 2237178 - RNA, 19 nt, Artificial Sequence
  Description of Artificial Sequence: Synthetic oligonucleotide
  Sense strand starting at position 3894 of SEQ ID NO: 1884060
uuagcugauucuguagaga

SEQ ID NO: 2237179 - RNA, 19 nt, Artificial Sequence
  Description of Artificial Sequence: Synthetic oligonucleotide
  Antisense strand to SEQ ID NO: 2237178
ucucuacagaaucagcuaa

SEQ ID NO: 2237180 - RNA, 19 nt, Artificial Sequence
  Description of Artificial Sequence: Synthetic oligonucleotide
  Sense strand starting at position 3897 of SEQ ID NO: 1884060
gcugauucuguagagaagu

SEQ ID NO: 2237181 - RNA, 19 nt, Artificial Sequence
  Description of Artificial Sequence: Synthetic oligonucleotide
  Antisense strand to SEQ ID NO: 2237180
acuucucuacagaaucagc

SEQ ID NO: 2237182 - RNA, 19 nt, Artificial Sequence
  Description of Artificial Sequence: Synthetic oligonucleotide
  Sense strand starting at position 3899 of SEQ ID NO: 1884060
ugauucuguagagaagucu

SEQ ID NO: 2237183 - RNA, 19 nt, Artificial Sequence
  Description of Artificial Sequence: Synthetic oligonucleotide
  Antisense strand to SEQ ID NO: 2237182
agacuucucuacagaauca

SEQ ID NO: 2237184 - RNA, 19 nt, Artificial Sequence
  Description of Artificial Sequence: Synthetic oligonucleotide
  Sense strand starting at position 3908 of SEQ ID NO: 1884060
agagaagucugaucuggug

SEQ ID NO: 2237185 - RNA, 19 nt, Artificial Sequence
  Description of Artificial Sequence: Synthetic oligonucleotide
  Antisense strand to SEQ ID NO: 2237184
caccagaucagacuucucu

SEQ ID NO: 2237186 - RNA, 19 nt, Artificial Sequence
  Description of Artificial Sequence: Synthetic oligonucleotide
  Sense strand starting at position 3917 of SEQ ID NO: 1884060
ugaucuggugccuaaauuc

SEQ ID NO: 2237187 - RNA, 19 nt, Artificial Sequence
  Description of Artificial Sequence: Synthetic oligonucleotide
  Antisense strand to SEQ ID NO: 2237186
gaauuuaggcaccagauca

SEQ ID NO: 2237188 - RNA, 19 nt, Artificial Sequence
  Description of Artificial Sequence: Synthetic oligonucleotide
  Sense strand starting at position 310 of SEQ ID NO: 1884061
ucaugucaaucaguagacu

SEQ ID NO: 2237189 - RNA, 19 nt, Artificial Sequence
  Description of Artificial Sequence: Synthetic oligonucleotide
  Antisense strand to SEQ ID NO: 2237188
agucuacugauugacauga

SEQ ID NO: 2237190 - RNA, 19 nt, Artificial Sequence
  Description of Artificial Sequence: Synthetic oligonucleotide
  Sense strand starting at position 580 of SEQ ID NO: 1884061
aacaguaguguggaaaguu

SEQ ID NO: 2237191 - RNA, 19 nt, Artificial Sequence
  Description of Artificial Sequence: Synthetic oligonucleotide
  Antisense strand to SEQ ID NO: 2237190
aacuuuccacacuacuguu

SEQ ID NO: 2237192 - RNA, 19 nt, Artificial Sequence
  Description of Artificial Sequence: Synthetic oligonucleotide
  Sense strand starting at position 590 of SEQ ID NO: 1884061
uggaaaguucuaugugagu

SEQ ID NO: 2237193 - RNA, 19 nt, Artificial Sequence
  Description of Artificial Sequence: Synthetic oligonucleotide
  Antisense strand to SEQ ID NO: 2237192
acucacauagaacuuucca

SEQ ID NO: 2237194 - RNA, 19 nt, Artificial Sequence
  Description of Artificial Sequence: Synthetic oligonucleotide
  Sense strand starting at position 592 of SEQ ID NO: 1884061
gaaaguucuaugugaguga

SEQ ID NO: 2237195 - RNA, 19 nt, Artificial Sequence
  Description of Artificial Sequence: Synthetic oligonucleotide
  Antisense strand to SEQ ID NO: 2237194
ucacucacauagaacuuuc

SEQ ID NO: 2237196 - RNA, 19 nt, Artificial Sequence
  Description of Artificial Sequence: Synthetic oligonucleotide
  Sense strand starting at position 626 of SEQ ID NO: 1884061
cugccaccugguuauaaua

SEQ ID NO: 2237197 - RNA, 19 nt, Artificial Sequence
  Description of Artificial Sequence: Synthetic oligonucleotide
  Antisense strand to SEQ ID NO: 2237196
uauuauaaccagguggcag

SEQ ID NO: 2237198 - RNA, 19 nt, Artificial Sequence
  Description of Artificial Sequence: Synthetic oligonucleotide
  Sense strand starting at position 766 of SEQ ID NO: 1884061
gagaucuguccacaucuug

SEQ ID NO: 2237199 - RNA, 19 nt, Artificial Sequence
  Description of Artificial Sequence: Synthetic oligonucleotide
  Antisense strand to SEQ ID NO: 2237198
caagauguggacagaucuc

SEQ ID NO: 2237200 - RNA, 19 nt, Artificial Sequence
  Description of Artificial Sequence: Synthetic oligonucleotide
  Sense strand starting at position 773 of SEQ ID NO: 1884061
guccacaucuugccagaga

SEQ ID NO: 2237201 - RNA, 19 nt, Artificial Sequence
  Description of Artificial Sequence: Synthetic oligonucleotide
  Antisense strand to SEQ ID NO: 2237200
ucucuggcaagauguggac

SEQ ID NO: 2237202 - RNA, 19 nt, Artificial Sequence
  Description of Artificial Sequence: Synthetic oligonucleotide
  Sense strand starting at position 787 of SEQ ID NO: 1884061
agagacucucugggucaua

SEQ ID NO: 2237203 - RNA, 19 nt, Artificial Sequence
  Description of Artificial Sequence: Synthetic oligonucleotide
  Antisense strand to SEQ ID NO: 2237202
uaugacccagagagucucu

SEQ ID NO: 2237204 - RNA, 19 nt, Artificial Sequence
  Description of Artificial Sequence: Synthetic oligonucleotide
  Sense strand starting at position 890 of SEQ ID NO: 1884061
cccagauagggauguaauu

SEQ ID NO: 2237205 - RNA, 19 nt, Artificial Sequence
  Description of Artificial Sequence: Synthetic oligonucleotide
  Antisense strand to SEQ ID NO: 2237204
aauuacaucccuaucuggg

SEQ ID NO: 2237206 - RNA, 19 nt, Artificial Sequence
  Description of Artificial Sequence: Synthetic oligonucleotide
  Sense strand starting at position 903 of SEQ ID NO: 1884061
guaauuugcuauucuaagu

SEQ ID NO: 2237207 - RNA, 19 nt, Artificial Sequence
  Description of Artificial Sequence: Synthetic oligonucleotide
  Antisense strand to SEQ ID NO: 2237206
acuuagaauagcaaauuac

SEQ ID NO: 2237208 - RNA, 19 nt, Artificial Sequence
  Description of Artificial Sequence: Synthetic oligonucleotide
  Sense strand starting at position 911 of SEQ ID NO: 1884061
cuauucuaaguguaaguaa

SEQ ID NO: 2237209 - RNA, 19 nt, Artificial Sequence
  Description of Artificial Sequence: Synthetic oligonucleotide
  Antisense strand to SEQ ID NO: 2237208
uuacuuacacuuagaauag

SEQ ID NO: 2237210 - RNA, 19 nt, Artificial Sequence
  Description of Artificial Sequence: Synthetic oligonucleotide
  Sense strand starting at position 1275 of SEQ ID NO: 1884061
guuaauuaaugagugucaa

SEQ ID NO: 2237211 - RNA, 19 nt, Artificial Sequence
  Description of Artificial Sequence: Synthetic oligonucleotide
  Antisense strand to SEQ ID NO: 2237210
uugacacucauuaauuaac

SEQ ID NO: 2237212 - RNA, 19 nt, Artificial Sequence
  Description of Artificial Sequence: Synthetic oligonucleotide
  Sense strand starting at position 1375 of SEQ ID NO: 1884061
ucaaauuccuuguuguaaa

SEQ ID NO: 2237213 - RNA, 19 nt, Artificial Sequence
  Description of Artificial Sequence: Synthetic oligonucleotide
  Antisense strand to SEQ ID NO: 2237212
uuuacaacaaggaauuuga

SEQ ID NO: 2237214 - RNA, 19 nt, Artificial Sequence
  Description of Artificial Sequence: Synthetic oligonucleotide
  Sense strand starting at position 1386 of SEQ ID NO: 1884061
guuguaaaugccuauggag

SEQ ID NO: 2237215 - RNA, 19 nt, Artificial Sequence
  Description of Artificial Sequence: Synthetic oligonucleotide
  Antisense strand to SEQ ID NO: 2237214
cuccauaggcauuuacaac

SEQ ID NO: 2237216 - RNA, 19 nt, Artificial Sequence
  Description of Artificial Sequence: Synthetic oligonucleotide
  Sense strand starting at position 1388 of SEQ ID NO: 1884061
uguaaaugccuauggagga

SEQ ID NO: 2237217 - RNA, 19 nt, Artificial Sequence
  Description of Artificial Sequence: Synthetic oligonucleotide
  Antisense strand to SEQ ID NO: 2237216
uccuccauaggcauuuaca

SEQ ID NO: 2237218 - RNA, 19 nt, Artificial Sequence
  Description of Artificial Sequence: Synthetic oligonucleotide
  Sense strand starting at position 1478 of SEQ ID NO: 1884061
ucuaaucuggagggaaguu

SEQ ID NO: 2237219 - RNA, 19 nt, Artificial Sequence
  Description of Artificial Sequence: Synthetic oligonucleotide
  Antisense strand to SEQ ID NO: 2237218
aacuucccuccagauuaga

SEQ ID NO: 2237220 - RNA, 19 nt, Artificial Sequence
  Description of Artificial Sequence: Synthetic oligonucleotide
  Sense strand starting at position 1520 of SEQ ID NO: 1884061
aggcuaaagaugugugaca

SEQ ID NO: 2237221 - RNA, 19 nt, Artificial Sequence
  Description of Artificial Sequence: Synthetic oligonucleotide
  Antisense strand to SEQ ID NO: 2237220
ugucacacaucuuuagccu

SEQ ID NO: 2237222 - RNA, 19 nt, Artificial Sequence
  Description of Artificial Sequence: Synthetic oligonucleotide
  Sense strand starting at position 1522 of SEQ ID NO: 1884061
gcuaaagaugugugacaca

SEQ ID NO: 2237223 - RNA, 19 nt, Artificial Sequence
  Description of Artificial Sequence: Synthetic oligonucleotide
  Antisense strand to SEQ ID NO: 2237222
ugugucacacaucuuuagc

SEQ ID NO: 2237224 - RNA, 19 nt, Artificial Sequence
  Description of Artificial Sequence: Synthetic oligonucleotide
  Sense strand starting at position 1527 of SEQ ID NO: 1884061
agaugugugacacauagua

SEQ ID NO: 2237225 - RNA, 19 nt, Artificial Sequence
  Description of Artificial Sequence: Synthetic oligonucleotide
  Antisense strand to SEQ ID NO: 2237224
uacuaugugucacacaucu

SEQ ID NO: 2237226 - RNA, 19 nt, Artificial Sequence
  Description of Artificial Sequence: Synthetic oligonucleotide
  Sense strand starting at position 1529 of SEQ ID NO: 1884061
augugugacacauaguaca

SEQ ID NO: 2237227 - RNA, 19 nt, Artificial Sequence
  Description of Artificial Sequence: Synthetic oligonucleotide
  Antisense strand to SEQ ID NO: 2237226
uguacuaugugucacacau

SEQ ID NO: 2237228 - RNA, 19 nt, Artificial Sequence
  Description of Artificial Sequence: Synthetic oligonucleotide
  Sense strand starting at position 1542 of SEQ ID NO: 1884061
aguacaugcaaguggaauu

SEQ ID NO: 2237229 - RNA, 19 nt, Artificial Sequence
  Description of Artificial Sequence: Synthetic oligonucleotide
  Antisense strand to SEQ ID NO: 2237228
aauuccacuugcauguacu

SEQ ID NO: 2237230 - RNA, 19 nt, Artificial Sequence
  Description of Artificial Sequence: Synthetic oligonucleotide
  Sense strand starting at position 1555 of SEQ ID NO: 1884061
ggaauuuguuucccuuguu

SEQ ID NO: 2237231 - RNA, 19 nt, Artificial Sequence
  Description of Artificial Sequence: Synthetic oligonucleotide
  Antisense strand to SEQ ID NO: 2237230
aacaagggaaacaaauucc

SEQ ID NO: 2237232 - RNA, 19 nt, Artificial Sequence
  Description of Artificial Sequence: Synthetic oligonucleotide
  Sense strand starting at position 1558 of SEQ ID NO: 1884061
auuuguuucccuuguuuaa

SEQ ID NO: 2237233 - RNA, 19 nt, Artificial Sequence
  Description of Artificial Sequence: Synthetic oligonucleotide
  Antisense strand to SEQ ID NO: 2237232
uuaaacaagggaaacaaau

SEQ ID NO: 2237234 - RNA, 19 nt, Artificial Sequence
  Description of Artificial Sequence: Synthetic oligonucleotide
  Sense strand starting at position 1904 of SEQ ID NO: 1884061
aucaauuguuuccuagaga

SEQ ID NO: 2237235 - RNA, 19 nt, Artificial Sequence
  Description of Artificial Sequence: Synthetic oligonucleotide
  Antisense strand to SEQ ID NO: 2237234
ucucuaggaaacaauugau

SEQ ID NO: 2237236 - RNA, 19 nt, Artificial Sequence
  Description of Artificial Sequence: Synthetic oligonucleotide
  Sense strand starting at position 2055 of SEQ ID NO: 1884061
gggaguuucuucucaccac

SEQ ID NO: 2237237 - RNA, 19 nt, Artificial Sequence
  Description of Artificial Sequence: Synthetic oligonucleotide
  Antisense strand to SEQ ID NO: 2237236
guggugagaagaaacuccc

SEQ ID NO: 2237238 - RNA, 19 nt, Artificial Sequence
  Description of Artificial Sequence: Synthetic oligonucleotide
  Sense strand starting at position 2091 of SEQ ID NO: 1884061
cuggguguccuccaacuga

SEQ ID NO: 2237239 - RNA, 19 nt, Artificial Sequence
  Description of Artificial Sequence: Synthetic oligonucleotide
  Antisense strand to SEQ ID NO: 2237238
ucaguuggaggacacccag

SEQ ID NO: 2237240 - RNA, 19 nt, Artificial Sequence
  Description of Artificial Sequence: Synthetic oligonucleotide
  Sense strand starting at position 2246 of SEQ ID NO: 1884061
gacucucccuggguuugau

SEQ ID NO: 2237241 - RNA, 19 nt, Artificial Sequence
  Description of Artificial Sequence: Synthetic oligonucleotide
  Antisense strand to SEQ ID NO: 2237240
aucaaacccagggagaguc

SEQ ID NO: 2237242 - RNA, 19 nt, Artificial Sequence
  Description of Artificial Sequence: Synthetic oligonucleotide
  Sense strand starting at position 2249 of SEQ ID NO: 1884061
ucucccuggguuugauuaa

SEQ ID NO: 2237243 - RNA, 19 nt, Artificial Sequence
  Description of Artificial Sequence: Synthetic oligonucleotide
  Antisense strand to SEQ ID NO: 2237242
uuaaucaaacccagggaga

SEQ ID NO: 2237244 - RNA, 19 nt, Artificial Sequence
  Description of Artificial Sequence: Synthetic oligonucleotide
  Sense strand starting at position 2563 of SEQ ID NO: 1884061
cugagucaaacuugaggua

SEQ ID NO: 2237245 - RNA, 19 nt, Artificial Sequence
  Description of Artificial Sequence: Synthetic oligonucleotide
  Antisense strand to SEQ ID NO: 2237244
uaccucaaguuugacucag

SEQ ID NO: 2237246 - RNA, 19 nt, Artificial Sequence
  Description of Artificial Sequence: Synthetic oligonucleotide
  Sense strand starting at position 2754 of SEQ ID NO: 1884061
uccagagugauaugugagu

SEQ ID NO: 2237247 - RNA, 19 nt, Artificial Sequence
  Description of Artificial Sequence: Synthetic oligonucleotide
  Antisense strand to SEQ ID NO: 2237246
acucacauaucacucugga

SEQ ID NO: 2237248 - RNA, 19 nt, Artificial Sequence
  Description of Artificial Sequence: Synthetic oligonucleotide
  Sense strand starting at position 2824 of SEQ ID NO: 1884061
uccagacucuguucucaga

SEQ ID NO: 2237249 - RNA, 19 nt, Artificial Sequence
  Description of Artificial Sequence: Synthetic oligonucleotide
  Antisense strand to SEQ ID NO: 2237248
ucugagaacagagucugga

SEQ ID NO: 2237250 - RNA, 19 nt, Artificial Sequence
  Description of Artificial Sequence: Synthetic oligonucleotide
  Sense strand starting at position 2883 of SEQ ID NO: 1884061
ugcacuuguguuuaaagag

SEQ ID NO: 2237251 - RNA, 19 nt, Artificial Sequence
  Description of Artificial Sequence: Synthetic oligonucleotide
  Antisense strand to SEQ ID NO: 2237250
cucuuuaaacacaagugca

SEQ ID NO: 2237252 - RNA, 19 nt, Artificial Sequence
  Description of Artificial Sequence: Synthetic oligonucleotide
  Sense strand starting at position 2889 of SEQ ID NO: 1884061
uguguuuaaagagagggua

SEQ ID NO: 2237253 - RNA, 19 nt, Artificial Sequence
  Description of Artificial Sequence: Synthetic oligonucleotide
  Antisense strand to SEQ ID NO: 2237252
uacccucucuuuaaacaca

SEQ ID NO: 2237254 - RNA, 19 nt, Artificial Sequence
  Description of Artificial Sequence: Synthetic oligonucleotide
  Sense strand starting at position 2938 of SEQ ID NO: 1884061
ccagguucugcucaauaag

SEQ ID NO: 2237255 - RNA, 19 nt, Artificial Sequence
  Description of Artificial Sequence: Synthetic oligonucleotide
  Antisense strand to SEQ ID NO: 2237254
cuuauugagcagaaccugg

SEQ ID NO: 2237256 - RNA, 19 nt, Artificial Sequence
  Description of Artificial Sequence: Synthetic oligonucleotide
  Sense strand starting at position 2941 of SEQ ID NO: 1884061
gguucugcucaauaagaau

SEQ ID NO: 2237257 - RNA, 19 nt, Artificial Sequence
  Description of Artificial Sequence: Synthetic oligonucleotide
  Antisense strand to SEQ ID NO: 2237256
auucuuauugagcagaacc

SEQ ID NO: 2237258 - RNA, 19 nt, Artificial Sequence
  Description of Artificial Sequence: Synthetic oligonucleotide
  Sense strand starting at position 3209 of SEQ ID NO: 1884061
uugugucaucuugaaagua

SEQ ID NO: 2237259 - RNA, 19 nt, Artificial Sequence
  Description of Artificial Sequence: Synthetic oligonucleotide
  Antisense strand to SEQ ID NO: 2237258
uacuuucaagaugacacaa

SEQ ID NO: 2237260 - RNA, 19 nt, Artificial Sequence
  Description of Artificial Sequence: Synthetic oligonucleotide
  Sense strand starting at position 3248 of SEQ ID NO: 1884061
cauuucuguuuggaggaga

SEQ ID NO: 2237261 - RNA, 19 nt, Artificial Sequence
  Description of Artificial Sequence: Synthetic oligonucleotide
  Antisense strand to SEQ ID NO: 2237260
ucuccuccaaacagaaaug

SEQ ID NO: 2237262 - RNA, 19 nt, Artificial Sequence
  Description of Artificial Sequence: Synthetic oligonucleotide
  Sense strand starting at position 3264 of SEQ ID NO: 1884061
agaagaugaugucucuuua

SEQ ID NO: 2237263 - RNA, 19 nt, Artificial Sequence
  Description of Artificial Sequence: Synthetic oligonucleotide
  Antisense strand to SEQ ID NO: 2237262
uaaagagacaucaucuucu

SEQ ID NO: 2237264 - RNA, 19 nt, Artificial Sequence
  Description of Artificial Sequence: Synthetic oligonucleotide
  Sense strand starting at position 3316 of SEQ ID NO: 1884061
ugaacuuaucccuguuuga

SEQ ID NO: 2237265 - RNA, 19 nt, Artificial Sequence
  Description of Artificial Sequence: Synthetic oligonucleotide
  Antisense strand to SEQ ID NO: 2237264
ucaaacagggauaaguuca

SEQ ID NO: 2237266 - RNA, 19 nt, Artificial Sequence
  Description of Artificial Sequence: Synthetic oligonucleotide
  Sense strand starting at position 3334 of SEQ ID NO: 1884061
acuguauuugcaggagcau

SEQ ID NO: 2237267 - RNA, 19 nt, Artificial Sequence
  Description of Artificial Sequence: Synthetic oligonucleotide
  Antisense strand to SEQ ID NO: 2237266
augcuccugcaaauacagu

SEQ ID NO: 2237268 - RNA, 19 nt, Artificial Sequence
  Description of Artificial Sequence: Synthetic oligonucleotide
  Sense strand starting at position 7 of SEQ ID NO: 1884062
augugagucaaaggguaca

SEQ ID NO: 2237269 - RNA, 19 nt, Artificial Sequence
  Description of Artificial Sequence: Synthetic oligonucleotide
  Antisense strand to SEQ ID NO: 2237268
uguacccuuugacucacau

SEQ ID NO: 2237270 - RNA, 19 nt, Artificial Sequence
  Description of Artificial Sequence: Synthetic oligonucleotide
  Sense strand starting at position 161 of SEQ ID NO: 1884062
auacuuaugccagguaaag

SEQ ID NO: 2237271 - RNA, 19 nt, Artificial Sequence
  Description of Artificial Sequence: Synthetic oligonucleotide
  Antisense strand to SEQ ID NO: 2237270
cuuuaccuggcauaaguau

SEQ ID NO: 2237272 - RNA, 19 nt, Artificial Sequence
  Description of Artificial Sequence: Synthetic oligonucleotide
  Sense strand starting at position 170 of SEQ ID NO: 1884062
ccagguaaagcauauguua

SEQ ID NO: 2237273 - RNA, 19 nt, Artificial Sequence
  Description of Artificial Sequence: Synthetic oligonucleotide
  Antisense strand to SEQ ID NO: 2237272
uaacauaugcuuuaccugg

SEQ ID NO: 2237274 - RNA, 19 nt, Artificial Sequence
  Description of Artificial Sequence: Synthetic oligonucleotide
  Sense strand starting at position 235 of SEQ ID NO: 1884062
uguuguacaccauauauac

SEQ ID NO: 2237275 - RNA, 19 nt, Artificial Sequence
  Description of Artificial Sequence: Synthetic oligonucleotide
  Antisense strand to SEQ ID NO: 2237274
guauauaugguguacaaca

SEQ ID NO: 2237276 - RNA, 19 nt, Artificial Sequence
  Description of Artificial Sequence: Synthetic oligonucleotide
  Sense strand starting at position 477 of SEQ ID NO: 1884062
ucaguacaaguccagauua

SEQ ID NO: 2237277 - RNA, 19 nt, Artificial Sequence
  Description of Artificial Sequence: Synthetic oligonucleotide
  Antisense strand to SEQ ID NO: 2237276
uaaucuggacuuguacuga

SEQ ID NO: 2237278 - RNA, 19 nt, Artificial Sequence
  Description of Artificial Sequence: Synthetic oligonucleotide
  Sense strand starting at position 653 of SEQ ID NO: 1884062
ugcugcucagcuguaguua

SEQ ID NO: 2237279 - RNA, 19 nt, Artificial Sequence
  Description of Artificial Sequence: Synthetic oligonucleotide
  Antisense strand to SEQ ID NO: 2237278
uaacuacagcugagcagca

SEQ ID NO: 2237280 - RNA, 19 nt, Artificial Sequence
  Description of Artificial Sequence: Synthetic oligonucleotide
  Sense strand starting at position 669 of SEQ ID NO: 1884062
uuagccaacgucugauuua

SEQ ID NO: 2237281 - RNA, 19 nt, Artificial Sequence
  Description of Artificial Sequence: Synthetic oligonucleotide
  Antisense strand to SEQ ID NO: 2237280
uaaaucagacguuggcuaa

SEQ ID NO: 2237282 - RNA, 19 nt, Artificial Sequence
  Description of Artificial Sequence: Synthetic oligonucleotide
  Sense strand starting at position 703 of SEQ ID NO: 1884062
aggagauaaucugucuaac

SEQ ID NO: 2237283 - RNA, 19 nt, Artificial Sequence
  Description of Artificial Sequence: Synthetic oligonucleotide
  Antisense strand to SEQ ID NO: 2237282
guuagacagauuaucuccu

SEQ ID NO: 2237284 - RNA, 19 nt, Artificial Sequence
  Description of Artificial Sequence: Synthetic oligonucleotide
  Sense strand starting at position 808 of SEQ ID NO: 1884062
gugguuguaguagaaauca

SEQ ID NO: 2237285 - RNA, 19 nt, Artificial Sequence
  Description of Artificial Sequence: Synthetic oligonucleotide
  Antisense strand to SEQ ID NO: 2237284
ugauuucuacuacaaccac

SEQ ID NO: 2237286 - RNA, 19 nt, Artificial Sequence
  Description of Artificial Sequence: Synthetic oligonucleotide
  Sense strand starting at position 892 of SEQ ID NO: 1884062
ucagaccugucaucugaaa

SEQ ID NO: 2237287 - RNA, 19 nt, Artificial Sequence
  Description of Artificial Sequence: Synthetic oligonucleotide
  Antisense strand to SEQ ID NO: 2237286
uuucagaugacaggucuga

SEQ ID NO: 2237288 - RNA, 19 nt, Artificial Sequence
  Description of Artificial Sequence: Synthetic oligonucleotide
  Sense strand starting at position 1222 of SEQ ID NO: 1884062
ucaagaugagcccaucauu

SEQ ID NO: 2237289 - RNA, 19 nt, Artificial Sequence
  Description of Artificial Sequence: Synthetic oligonucleotide
  Antisense strand to SEQ ID NO: 2237288
aaugaugggcucaucuuga

SEQ ID NO: 2237290 - RNA, 19 nt, Artificial Sequence
  Description of Artificial Sequence: Synthetic oligonucleotide
  Sense strand starting at position 1340 of SEQ ID NO: 1884062
caggacucucaguguagga

SEQ ID NO: 2237291 - RNA, 19 nt, Artificial Sequence
  Description of Artificial Sequence: Synthetic oligonucleotide
  Antisense strand to SEQ ID NO: 2237290
uccuacacugagaguccug

SEQ ID NO: 2237292 - RNA, 19 nt, Artificial Sequence
  Description of Artificial Sequence: Synthetic oligonucleotide
  Sense strand starting at position 1342 of SEQ ID NO: 1884062
ggacucucaguguaggaau

SEQ ID NO: 2237293 - RNA, 19 nt, Artificial Sequence
  Description of Artificial Sequence: Synthetic oligonucleotide
  Antisense strand to SEQ ID NO: 2237292
auuccuacacugagagucc

SEQ ID NO: 2237294 - RNA, 19 nt, Artificial Sequence
  Description of Artificial Sequence: Synthetic oligonucleotide
  Sense strand starting at position 1479 of SEQ ID NO: 1884062
aggccaucugguuauccau

SEQ ID NO: 2237295 - RNA, 19 nt, Artificial Sequence
  Description of Artificial Sequence: Synthetic oligonucleotide
  Antisense strand to SEQ ID NO: 2237294
auggauaaccagauggccu

SEQ ID NO: 2237296 - RNA, 19 nt, Artificial Sequence
  Description of Artificial Sequence: Synthetic oligonucleotide
  Sense strand starting at position 1485 of SEQ ID NO: 1884062
ucugguuauccaugaucag

SEQ ID NO: 2237297 - RNA, 19 nt, Artificial Sequence
  Description of Artificial Sequence: Synthetic oligonucleotide
  Antisense strand to SEQ ID NO: 2237296
cugaucauggauaaccaga

SEQ ID NO: 2237298 - RNA, 19 nt, Artificial Sequence
  Description of Artificial Sequence: Synthetic oligonucleotide
  Sense strand starting at position 1488 of SEQ ID NO: 1884062
gguuauccaugaucagauu

SEQ ID NO: 2237299 - RNA, 19 nt, Artificial Sequence
  Description of Artificial Sequence: Synthetic oligonucleotide
  Antisense strand to SEQ ID NO: 2237298
aaucugaucauggauaacc

SEQ ID NO: 2237300 - RNA, 19 nt, Artificial Sequence
  Description of Artificial Sequence: Synthetic oligonucleotide
  Sense strand starting at position 1544 of SEQ ID NO: 1884062
aggaaauggcucuggccaa

SEQ ID NO: 2237301 - RNA, 19 nt, Artificial Sequence
  Description of Artificial Sequence: Synthetic oligonucleotide
  Antisense strand to SEQ ID NO: 2237300
uuggccagagccauuuccu

SEQ ID NO: 2237302 - RNA, 19 nt, Artificial Sequence
  Description of Artificial Sequence: Synthetic oligonucleotide
  Sense strand starting at position 1613 of SEQ ID NO: 1884062
acuguaucaagugagguau

SEQ ID NO: 2237303 - RNA, 19 nt, Artificial Sequence
  Description of Artificial Sequence: Synthetic oligonucleotide
  Antisense strand to SEQ ID NO: 2237302
auaccucacuugauacagu

SEQ ID NO: 2237304 - RNA, 19 nt, Artificial Sequence
  Description of Artificial Sequence: Synthetic oligonucleotide
  Sense strand starting at position 1729 of SEQ ID NO: 1884062
ggcccaugacacuauucuu

SEQ ID NO: 2237305 - RNA, 19 nt, Artificial Sequence
  Description of Artificial Sequence: Synthetic oligonucleotide
  Antisense strand to SEQ ID NO: 2237304
aagaauagugucaugggcc

SEQ ID NO: 2237306 - RNA, 19 nt, Artificial Sequence
  Description of Artificial Sequence: Synthetic oligonucleotide
  Sense strand starting at position 2015 of SEQ ID NO: 1884062
aggugagagccucaugauu

SEQ ID NO: 2237307 - RNA, 19 nt, Artificial Sequence
  Description of Artificial Sequence: Synthetic oligonucleotide
  Antisense strand to SEQ ID NO: 2237306
aaucaugaggcucucaccu

SEQ ID NO: 2237308 - RNA, 19 nt, Artificial Sequence
  Description of Artificial Sequence: Synthetic oligonucleotide
  Sense strand starting at position 2190 of SEQ ID NO: 1884062
agaguuaguauguauaggu

SEQ ID NO: 2237309 - RNA, 19 nt, Artificial Sequence
  Description of Artificial Sequence: Synthetic oligonucleotide
  Antisense strand to SEQ ID NO: 2237308
accuauacauacuaacucu

SEQ ID NO: 2237310 - RNA, 19 nt, Artificial Sequence
  Description of Artificial Sequence: Synthetic oligonucleotide
  Sense strand starting at position 2200 of SEQ ID NO: 1884062
uguauagguacauauguau

SEQ ID NO: 2237311 - RNA, 19 nt, Artificial Sequence
  Description of Artificial Sequence: Synthetic oligonucleotide
  Antisense strand to SEQ ID NO: 2237310
auacauauguaccuauaca

SEQ ID NO: 2237312 - RNA, 19 nt, Artificial Sequence
  Description of Artificial Sequence: Synthetic oligonucleotide
  Sense strand starting at position 2406 of SEQ ID NO: 1884062
aguccaugguaauugaaau

SEQ ID NO: 2237313 - RNA, 19 nt, Artificial Sequence
  Description of Artificial Sequence: Synthetic oligonucleotide
  Antisense strand to SEQ ID NO: 2237312
auuucaauuaccauggacu

SEQ ID NO: 2237314 - RNA, 19 nt, Artificial Sequence
  Description of Artificial Sequence: Synthetic oligonucleotide
  Sense strand starting at position 2407 of SEQ ID NO: 1884062
guccaugguaauugaaaug

SEQ ID NO: 2237315 - RNA, 19 nt, Artificial Sequence
  Description of Artificial Sequence: Synthetic oligonucleotide
  Antisense strand to SEQ ID NO: 2237314
cauuucaauuaccauggac

SEQ ID NO: 2237316 - RNA, 19 nt, Artificial Sequence
  Description of Artificial Sequence: Synthetic oligonucleotide
  Sense strand starting at position 2412 of SEQ ID NO: 1884062
ugguaauugaaauggcuga

SEQ ID NO: 2237317 - RNA, 19 nt, Artificial Sequence
  Description of Artificial Sequence: Synthetic oligonucleotide
  Antisense strand to SEQ ID NO: 2237316
ucagccauuucaauuacca

SEQ ID NO: 2237318 - RNA, 19 nt, Artificial Sequence
  Description of Artificial Sequence: Synthetic oligonucleotide
  Sense strand starting at position 2413 of SEQ ID NO: 1884062
gguaauugaaauggcugau

SEQ ID NO: 2237319 - RNA, 19 nt, Artificial Sequence
  Description of Artificial Sequence: Synthetic oligonucleotide
  Antisense strand to SEQ ID NO: 2237318
aucagccauuucaauuacc

SEQ ID NO: 2237320 - RNA, 19 nt, Artificial Sequence
  Description of Artificial Sequence: Synthetic oligonucleotide
  Sense strand starting at position 2552 of SEQ ID NO: 1884062
ugcguagcuauguauauuu

SEQ ID NO: 2237321 - RNA, 19 nt, Artificial Sequence
  Description of Artificial Sequence: Synthetic oligonucleotide
  Antisense strand to SEQ ID NO: 2237320
aaauauacauagcuacgca

SEQ ID NO: 2237322 - RNA, 19 nt, Artificial Sequence
  Description of Artificial Sequence: Synthetic oligonucleotide
  Sense strand starting at position 2615 of SEQ ID NO: 1884062
gaagauccaguauguucua

SEQ ID NO: 2237323 - RNA, 19 nt, Artificial Sequence
  Description of Artificial Sequence: Synthetic oligonucleotide
  Antisense strand to SEQ ID NO: 2237322
uagaacauacuggaucuuc

SEQ ID NO: 2237324 - RNA, 19 nt, Artificial Sequence
  Description of Artificial Sequence: Synthetic oligonucleotide
  Sense strand starting at position 2647 of SEQ ID NO: 1884062
auugacaugugguugaaga

SEQ ID NO: 2237325 - RNA, 19 nt, Artificial Sequence
  Description of Artificial Sequence: Synthetic oligonucleotide
  Antisense strand to SEQ ID NO: 2237324
ucuucaaccacaugucaau

SEQ ID NO: 2237326 - RNA, 19 nt, Artificial Sequence
  Description of Artificial Sequence: Synthetic oligonucleotide
  Sense strand starting at position 2648 of SEQ ID NO: 1884062
uugacaugugguugaagag

SEQ ID NO: 2237327 - RNA, 19 nt, Artificial Sequence
  Description of Artificial Sequence: Synthetic oligonucleotide
  Antisense strand to SEQ ID NO: 2237326
cucuucaaccacaugucaa

SEQ ID NO: 2237328 - RNA, 19 nt, Artificial Sequence
  Description of Artificial Sequence: Synthetic oligonucleotide
  Sense strand starting at position 2649 of SEQ ID NO: 1884062
ugacaugugguugaagagu

SEQ ID NO: 2237329 - RNA, 19 nt, Artificial Sequence
  Description of Artificial Sequence: Synthetic oligonucleotide
  Antisense strand to SEQ ID NO: 2237328
acucuucaaccacauguca

SEQ ID NO: 2237330 - RNA, 19 nt, Artificial Sequence
  Description of Artificial Sequence: Synthetic oligonucleotide
  Sense strand starting at position 2936 of SEQ ID NO: 1884062
ccauaaucaguggagucau

SEQ ID NO: 2237331 - RNA, 19 nt, Artificial Sequence
  Description of Artificial Sequence: Synthetic oligonucleotide
  Antisense strand to SEQ ID NO: 2237330
augacuccacugauuaugg

SEQ ID NO: 2237332 - RNA, 19 nt, Artificial Sequence
  Description of Artificial Sequence: Synthetic oligonucleotide
  Sense strand starting at position 2946 of SEQ ID NO: 1884062
uggagucaucaguagcuga

SEQ ID NO: 2237333 - RNA, 19 nt, Artificial Sequence
  Description of Artificial Sequence: Synthetic oligonucleotide
  Antisense strand to SEQ ID NO: 2237332
ucagcuacugaugacucca

SEQ ID NO: 2237334 - RNA, 19 nt, Artificial Sequence
  Description of Artificial Sequence: Synthetic oligonucleotide
  Sense strand starting at position 2992 of SEQ ID NO: 1884062
aagaaagaucuguggguca

SEQ ID NO: 2237335 - RNA, 19 nt, Artificial Sequence
  Description of Artificial Sequence: Synthetic oligonucleotide
  Antisense strand to SEQ ID NO: 2237334
ugacccacagaucuuucuu

SEQ ID NO: 2237336 - RNA, 19 nt, Artificial Sequence
  Description of Artificial Sequence: Synthetic oligonucleotide
  Sense strand starting at position 2994 of SEQ ID NO: 1884062
gaaagaucugugggucauu

SEQ ID NO: 2237337 - RNA, 19 nt, Artificial Sequence
  Description of Artificial Sequence: Synthetic oligonucleotide
  Antisense strand to SEQ ID NO: 2237336
aaugacccacagaucuuuc

SEQ ID NO: 2237338 - RNA, 19 nt, Artificial Sequence
  Description of Artificial Sequence: Synthetic oligonucleotide
  Sense strand starting at position 3167 of SEQ ID NO: 1884062
caauaugugcaagaguaca

SEQ ID NO: 2237339 - RNA, 19 nt, Artificial Sequence
  Description of Artificial Sequence: Synthetic oligonucleotide
  Antisense strand to SEQ ID NO: 2237338
uguacucuugcacauauug

SEQ ID NO: 2237340 - RNA, 19 nt, Artificial Sequence
  Description of Artificial Sequence: Synthetic oligonucleotide
  Sense strand starting at position 3275 of SEQ ID NO: 1884062
cggugaucuaacuaauguu

SEQ ID NO: 2237341 - RNA, 19 nt, Artificial Sequence
  Description of Artificial Sequence: Synthetic oligonucleotide
  Antisense strand to SEQ ID NO: 2237340
aacauuaguuagaucaccg

SEQ ID NO: 2237342 - RNA, 19 nt, Artificial Sequence
  Description of Artificial Sequence: Synthetic oligonucleotide
  Sense strand starting at position 3308 of SEQ ID NO: 1884062
ugaguauguaaagaaguuu

SEQ ID NO: 2237343 - RNA, 19 nt, Artificial Sequence
  Description of Artificial Sequence: Synthetic oligonucleotide
  Antisense strand to SEQ ID NO: 2237342
aaacuucuuuacauacuca

SEQ ID NO: 2237344 - RNA, 19 nt, Artificial Sequence
  Description of Artificial Sequence: Synthetic oligonucleotide
  Sense strand starting at position 3341 of SEQ ID NO: 1884062
gacaaaguauggguauaau

SEQ ID NO: 2237345 - RNA, 19 nt, Artificial Sequence
  Description of Artificial Sequence: Synthetic oligonucleotide
  Antisense strand to SEQ ID NO: 2237344
auuauacccauacuuuguc

SEQ ID NO: 2237346 - RNA, 19 nt, Artificial Sequence
  Description of Artificial Sequence: Synthetic oligonucleotide
  Sense strand starting at position 3887 of SEQ ID NO: 1884062
uuugucugacuuggaaaug

SEQ ID NO: 2237347 - RNA, 19 nt, Artificial Sequence
  Description of Artificial Sequence: Synthetic oligonucleotide
  Antisense strand to SEQ ID NO: 2237346
cauuuccaagucagacaaa

SEQ ID NO: 2237348 - RNA, 19 nt, Artificial Sequence
  Description of Artificial Sequence: Synthetic oligonucleotide
  Sense strand starting at position 55 of SEQ ID NO: 1884063
ugugguuugauagaucauu

SEQ ID NO: 2237349 - RNA, 19 nt, Artificial Sequence
  Description of Artificial Sequence: Synthetic oligonucleotide
  Antisense strand to SEQ ID NO: 2237348
aaugaucuaucaaaccaca

SEQ ID NO: 2237350 - RNA, 19 nt, Artificial Sequence
  Description of Artificial Sequence: Synthetic oligonucleotide
  Sense strand starting at position 151 of SEQ ID NO: 1884063
aggauaucuugauugcuuu

SEQ ID NO: 2237351 - RNA, 19 nt, Artificial Sequence
  Description of Artificial Sequence: Synthetic oligonucleotide
  Antisense strand to SEQ ID NO: 2237350
aaagcaaucaagauauccu

SEQ ID NO: 2237352 - RNA, 19 nt, Artificial Sequence
  Description of Artificial Sequence: Synthetic oligonucleotide
  Sense strand starting at position 351 of SEQ ID NO: 1884063
uggcuuucccacuagaugu

SEQ ID NO: 2237353 - RNA, 19 nt, Artificial Sequence
  Description of Artificial Sequence: Synthetic oligonucleotide
  Antisense strand to SEQ ID NO: 2237352
acaucuagugggaaagcca

SEQ ID NO: 2237354 - RNA, 19 nt, Artificial Sequence
  Description of Artificial Sequence: Synthetic oligonucleotide
  Sense strand starting at position 361 of SEQ ID NO: 1884063
acuagaugugaaugacagu

SEQ ID NO: 2237355 - RNA, 19 nt, Artificial Sequence
  Description of Artificial Sequence: Synthetic oligonucleotide
  Antisense strand to SEQ ID NO: 2237354
acugucauucacaucuagu

SEQ ID NO: 2237356 - RNA, 19 nt, Artificial Sequence
  Description of Artificial Sequence: Synthetic oligonucleotide
  Sense strand starting at position 613 of SEQ ID NO: 1884063
auaagagcugguuguagau

SEQ ID NO: 2237357 - RNA, 19 nt, Artificial Sequence
  Description of Artificial Sequence: Synthetic oligonucleotide
  Antisense strand to SEQ ID NO: 2237356
aucuacaaccagcucuuau

SEQ ID NO: 2237358 - RNA, 19 nt, Artificial Sequence
  Description of Artificial Sequence: Synthetic oligonucleotide
  Sense strand starting at position 917 of SEQ ID NO: 1884063
gagucauaaguuuaugauu

SEQ ID NO: 2237359 - RNA, 19 nt, Artificial Sequence
  Description of Artificial Sequence: Synthetic oligonucleotide
  Antisense strand to SEQ ID NO: 2237358
aaucauaaacuuaugacuc

SEQ ID NO: 2237360 - RNA, 19 nt, Artificial Sequence
  Description of Artificial Sequence: Synthetic oligonucleotide
  Sense strand starting at position 1158 of SEQ ID NO: 1884063
accauaauguuggucacuu

SEQ ID NO: 2237361 - RNA, 19 nt, Artificial Sequence
  Description of Artificial Sequence: Synthetic oligonucleotide
  Antisense strand to SEQ ID NO: 2237360
aagugaccaacauuauggu

SEQ ID NO: 2237362 - RNA, 19 nt, Artificial Sequence
  Description of Artificial Sequence: Synthetic oligonucleotide
  Sense strand starting at position 1219 of SEQ ID NO: 1884063
aaagcuucccguuauaaga

SEQ ID NO: 2237363 - RNA, 19 nt, Artificial Sequence
  Description of Artificial Sequence: Synthetic oligonucleotide
  Antisense strand to SEQ ID NO: 2237362
ucuuauaacgggaagcuuu

SEQ ID NO: 2237364 - RNA, 19 nt, Artificial Sequence
  Description of Artificial Sequence: Synthetic oligonucleotide
  Sense strand starting at position 1423 of SEQ ID NO: 1884063
uaaugugcaucuuugaaga

SEQ ID NO: 2237365 - RNA, 19 nt, Artificial Sequence
  Description of Artificial Sequence: Synthetic oligonucleotide
  Antisense strand to SEQ ID NO: 2237364
ucuucaaagaugcacauua

SEQ ID NO: 2237366 - RNA, 19 nt, Artificial Sequence
  Description of Artificial Sequence: Synthetic oligonucleotide
  Sense strand starting at position 1468 of SEQ ID NO: 1884063
aaacuaucccugggaaguc

SEQ ID NO: 2237367 - RNA, 19 nt, Artificial Sequence
  Description of Artificial Sequence: Synthetic oligonucleotide
  Antisense strand to SEQ ID NO: 2237366
gacuucccagggauaguuu

SEQ ID NO: 2237368 - RNA, 19 nt, Artificial Sequence
  Description of Artificial Sequence: Synthetic oligonucleotide
  Sense strand starting at position 1478 of SEQ ID NO: 1884063
ugggaagucuauguuuauc

SEQ ID NO: 2237369 - RNA, 19 nt, Artificial Sequence
  Description of Artificial Sequence: Synthetic oligonucleotide
  Antisense strand to SEQ ID NO: 2237368
gauaaacauagacuuccca

SEQ ID NO: 2237370 - RNA, 19 nt, Artificial Sequence
  Description of Artificial Sequence: Synthetic oligonucleotide
  Sense strand starting at position 1584 of SEQ ID NO: 1884063
guugucauugcucaagaua

SEQ ID NO: 2237371 - RNA, 19 nt, Artificial Sequence
  Description of Artificial Sequence: Synthetic oligonucleotide
  Antisense strand to SEQ ID NO: 2237370
uaucuugagcaaugacaac

SEQ ID NO: 2237372 - RNA, 19 nt, Artificial Sequence
  Description of Artificial Sequence: Synthetic oligonucleotide
  Sense strand starting at position 1587 of SEQ ID NO: 1884063
gucauugcucaagauauuc

SEQ ID NO: 2237373 - RNA, 19 nt, Artificial Sequence
  Description of Artificial Sequence: Synthetic oligonucleotide
  Antisense strand to SEQ ID NO: 2237372
gaauaucuugagcaaugac

SEQ ID NO: 2237374 - RNA, 19 nt, Artificial Sequence
  Description of Artificial Sequence: Synthetic oligonucleotide
  Sense strand starting at position 1592 of SEQ ID NO: 1884063
ugcucaagauauucuuaga

SEQ ID NO: 2237375 - RNA, 19 nt, Artificial Sequence
  Description of Artificial Sequence: Synthetic oligonucleotide
  Antisense strand to SEQ ID NO: 2237374
ucuaagaauaucuugagca

SEQ ID NO: 2237376 - RNA, 19 nt, Artificial Sequence
  Description of Artificial Sequence: Synthetic oligonucleotide
  Sense strand starting at position 1606 of SEQ ID NO: 1884063
uuagaacuauuguuuggaa

SEQ ID NO: 2237377 - RNA, 19 nt, Artificial Sequence
  Description of Artificial Sequence: Synthetic oligonucleotide
  Antisense strand to SEQ ID NO: 2237376
uuccaaacaauaguucuaa

SEQ ID NO: 2237378 - RNA, 19 nt, Artificial Sequence
  Description of Artificial Sequence: Synthetic oligonucleotide
  Sense strand starting at position 1607 of SEQ ID NO: 1884063
uagaacuauuguuuggaau

SEQ ID NO: 2237379 - RNA, 19 nt, Artificial Sequence
  Description of Artificial Sequence: Synthetic oligonucleotide
  Antisense strand to SEQ ID NO: 2237378
auuccaaacaauaguucua

SEQ ID NO: 2237380 - RNA, 19 nt, Artificial Sequence
  Description of Artificial Sequence: Synthetic oligonucleotide
  Sense strand starting at position 1608 of SEQ ID NO: 1884063
agaacuauuguuuggaauu

SEQ ID NO: 2237381 - RNA, 19 nt, Artificial Sequence
  Description of Artificial Sequence: Synthetic oligonucleotide
  Antisense strand to SEQ ID NO: 2237380
aauuccaaacaauaguucu

SEQ ID NO: 2237382 - RNA, 19 nt, Artificial Sequence
  Description of Artificial Sequence: Synthetic oligonucleotide
  Sense strand starting at position 1639 of SEQ ID NO: 1884063
guguuuacaagagguacaa

SEQ ID NO: 2237383 - RNA, 19 nt, Artificial Sequence
  Description of Artificial Sequence: Synthetic oligonucleotide
  Antisense strand to SEQ ID NO: 2237382
uuguaccucuuguaaacac

SEQ ID NO: 2237384 - RNA, 19 nt, Artificial Sequence
  Description of Artificial Sequence: Synthetic oligonucleotide
  Sense strand starting at position 2001 of SEQ ID NO: 1884063
uacaguauuggcuaaaguu

SEQ ID NO: 2237385 - RNA, 19 nt, Artificial Sequence
  Description of Artificial Sequence: Synthetic oligonucleotide
  Antisense strand to SEQ ID NO: 2237384
aacuuuagccaauacugua

SEQ ID NO: 2237386 - RNA, 19 nt, Artificial Sequence
  Description of Artificial Sequence: Synthetic oligonucleotide
  Sense strand starting at position 2011 of SEQ ID NO: 1884063
gcuaaaguuccagaaccuu

SEQ ID NO: 2237387 - RNA, 19 nt, Artificial Sequence
  Description of Artificial Sequence: Synthetic oligonucleotide
  Antisense strand to SEQ ID NO: 2237386
aagguucuggaacuuuagc

SEQ ID NO: 2237388 - RNA, 19 nt, Artificial Sequence
  Description of Artificial Sequence: Synthetic oligonucleotide
  Sense strand starting at position 2221 of SEQ ID NO: 1884063
agugucuuacccuauauca

SEQ ID NO: 2237389 - RNA, 19 nt, Artificial Sequence
  Description of Artificial Sequence: Synthetic oligonucleotide
  Antisense strand to SEQ ID NO: 2237388
ugauauaggguaagacacu

SEQ ID NO: 2237390 - RNA, 19 nt, Artificial Sequence
  Description of Artificial Sequence: Synthetic oligonucleotide
  Sense strand starting at position 2292 of SEQ ID NO: 1884063
ccaggcuuggccuaaucaa

SEQ ID NO: 2237391 - RNA, 19 nt, Artificial Sequence
  Description of Artificial Sequence: Synthetic oligonucleotide
  Antisense strand to SEQ ID NO: 2237390
uugauuaggccaagccugg

SEQ ID NO: 2237392 - RNA, 19 nt, Artificial Sequence
  Description of Artificial Sequence: Synthetic oligonucleotide
  Sense strand starting at position 2656 of SEQ ID NO: 1884063
aggguaucugaugagcagu

SEQ ID NO: 2237393 - RNA, 19 nt, Artificial Sequence
  Description of Artificial Sequence: Synthetic oligonucleotide
  Antisense strand to SEQ ID NO: 2237392
acugcucaucagauacccu

SEQ ID NO: 2237394 - RNA, 19 nt, Artificial Sequence
  Description of Artificial Sequence: Synthetic oligonucleotide
  Sense strand starting at position 2718 of SEQ ID NO: 1884063
ggauuaagcugugcaagag

SEQ ID NO: 2237395 - RNA, 19 nt, Artificial Sequence
  Description of Artificial Sequence: Synthetic oligonucleotide
  Antisense strand to SEQ ID NO: 2237394
cucuugcacagcuuaaucc

SEQ ID NO: 2237396 - RNA, 19 nt, Artificial Sequence
  Description of Artificial Sequence: Synthetic oligonucleotide
  Sense strand starting at position 2719 of SEQ ID NO: 1884063
gauuaagcugugcaagagu

SEQ ID NO: 2237397 - RNA, 19 nt, Artificial Sequence
  Description of Artificial Sequence: Synthetic oligonucleotide
  Antisense strand to SEQ ID NO: 2237396
acucuugcacagcuuaauc

SEQ ID NO: 2237398 - RNA, 19 nt, Artificial Sequence
  Description of Artificial Sequence: Synthetic oligonucleotide
  Sense strand starting at position 2742 of SEQ ID NO: 1884063
acaacaagaucuguuugga

SEQ ID NO: 2237399 - RNA, 19 nt, Artificial Sequence
  Description of Artificial Sequence: Synthetic oligonucleotide
  Antisense strand to SEQ ID NO: 2237398
uccaaacagaucuuguugu

SEQ ID NO: 2237400 - RNA, 19 nt, Artificial Sequence
  Description of Artificial Sequence: Synthetic oligonucleotide
  Sense strand starting at position 2767 of SEQ ID NO: 1884063
ugaaauuauccauguuagu

SEQ ID NO: 2237401 - RNA, 19 nt, Artificial Sequence
  Description of Artificial Sequence: Synthetic oligonucleotide
  Antisense strand to SEQ ID NO: 2237400
acuaacauggauaauuuca

SEQ ID NO: 2237402 - RNA, 19 nt, Artificial Sequence
  Description of Artificial Sequence: Synthetic oligonucleotide
  Sense strand starting at position 2786 of SEQ ID NO: 1884063
guagcaagagauuguccaa

SEQ ID NO: 2237403 - RNA, 19 nt, Artificial Sequence
  Description of Artificial Sequence: Synthetic oligonucleotide
  Antisense strand to SEQ ID NO: 2237402
uuggacaaucucuugcuac

SEQ ID NO: 2237404 - RNA, 19 nt, Artificial Sequence
  Description of Artificial Sequence: Synthetic oligonucleotide
  Sense strand starting at position 2939 of SEQ ID NO: 1884063
gaguguucuggguaccacu

SEQ ID NO: 2237405 - RNA, 19 nt, Artificial Sequence
  Description of Artificial Sequence: Synthetic oligonucleotide
  Antisense strand to SEQ ID NO: 2237404
agugguacccagaacacuc

SEQ ID NO: 2237406 - RNA, 19 nt, Artificial Sequence
  Description of Artificial Sequence: Synthetic oligonucleotide
  Sense strand starting at position 2948 of SEQ ID NO: 1884063
ggguaccacuaguuuaaua

SEQ ID NO: 2237407 - RNA, 19 nt, Artificial Sequence
  Description of Artificial Sequence: Synthetic oligonucleotide
  Antisense strand to SEQ ID NO: 2237406
uauuaaacuagugguaccc

SEQ ID NO: 2237408 - RNA, 19 nt, Artificial Sequence
  Description of Artificial Sequence: Synthetic oligonucleotide
  Sense strand starting at position 3424 of SEQ ID NO: 1884063
ccgaguagcagugaacaga

SEQ ID NO: 2237409 - RNA, 19 nt, Artificial Sequence
  Description of Artificial Sequence: Synthetic oligonucleotide
  Antisense strand to SEQ ID NO: 2237408
ucuguucacugcuacucgg

SEQ ID NO: 2237410 - RNA, 19 nt, Artificial Sequence
  Description of Artificial Sequence: Synthetic oligonucleotide
  Sense strand starting at position 3525 of SEQ ID NO: 1884063
acaugauucugagccucua

SEQ ID NO: 2237411 - RNA, 19 nt, Artificial Sequence
  Description of Artificial Sequence: Synthetic oligonucleotide
  Antisense strand to SEQ ID NO: 2237410
uagaggcucagaaucaugu

SEQ ID NO: 2237412 - RNA, 19 nt, Artificial Sequence
  Description of Artificial Sequence: Synthetic oligonucleotide
  Sense strand starting at position 3583 of SEQ ID NO: 1884063
gcacuauuaacagggcuga

SEQ ID NO: 2237413 - RNA, 19 nt, Artificial Sequence
  Description of Artificial Sequence: Synthetic oligonucleotide
  Antisense strand to SEQ ID NO: 2237412
ucagcccuguuaauagugc

SEQ ID NO: 2237414 - RNA, 19 nt, Artificial Sequence
  Description of Artificial Sequence: Synthetic oligonucleotide
  Sense strand starting at position 3639 of SEQ ID NO: 1884063
gguaccucucuacaauagu

SEQ ID NO: 2237415 - RNA, 19 nt, Artificial Sequence
  Description of Artificial Sequence: Synthetic oligonucleotide
  Antisense strand to SEQ ID NO: 2237414
acuauuguagagagguacc

SEQ ID NO: 2237416 - RNA, 19 nt, Artificial Sequence
  Description of Artificial Sequence: Synthetic oligonucleotide
  Sense strand starting at position 3647 of SEQ ID NO: 1884063
ucuacaauaguuugagguu

SEQ ID NO: 2237417 - RNA, 19 nt, Artificial Sequence
  Description of Artificial Sequence: Synthetic oligonucleotide
  Antisense strand to SEQ ID NO: 2237416
aaccucaaacuauuguaga

SEQ ID NO: 2237418 - RNA, 19 nt, Artificial Sequence
  Description of Artificial Sequence: Synthetic oligonucleotide
  Sense strand starting at position 3687 of SEQ ID NO: 1884063
gccugugcaguguuacaua

SEQ ID NO: 2237419 - RNA, 19 nt, Artificial Sequence
  Description of Artificial Sequence: Synthetic oligonucleotide
  Antisense strand to SEQ ID NO: 2237418
uauguaacacugcacaggc

SEQ ID NO: 2237420 - RNA, 19 nt, Artificial Sequence
  Description of Artificial Sequence: Synthetic oligonucleotide
  Sense strand starting at position 3709 of SEQ ID NO: 1884063
auaauaucgcuggacugua

SEQ ID NO: 2237421 - RNA, 19 nt, Artificial Sequence
  Description of Artificial Sequence: Synthetic oligonucleotide
  Antisense strand to SEQ ID NO: 2237420
uacaguccagcgauauuau

SEQ ID NO: 2237422 - RNA, 19 nt, Artificial Sequence
  Description of Artificial Sequence: Synthetic oligonucleotide
  Sense strand starting at position 3917 of SEQ ID NO: 1884063
uucugaacuuggguaaguu

SEQ ID NO: 2237423 - RNA, 19 nt, Artificial Sequence
  Description of Artificial Sequence: Synthetic oligonucleotide
  Antisense strand to SEQ ID NO: 2237422
aacuuacccaaguucagaa

SEQ ID NO: 2237424 - RNA, 19 nt, Artificial Sequence
  Description of Artificial Sequence: Synthetic oligonucleotide
  Sense strand starting at position 3918 of SEQ ID NO: 1884063
ucugaacuuggguaaguua

SEQ ID NO: 2237425 - RNA, 19 nt, Artificial Sequence
  Description of Artificial Sequence: Synthetic oligonucleotide
  Antisense strand to SEQ ID NO: 2237424
uaacuuacccaaguucaga

SEQ ID NO: 2237426 - RNA, 19 nt, Artificial Sequence
  Description of Artificial Sequence: Synthetic oligonucleotide
  Sense strand starting at position 3921 of SEQ ID NO: 1884063
gaacuuggguaaguuauca

SEQ ID NO: 2237427 - RNA, 19 nt, Artificial Sequence
  Description of Artificial Sequence: Synthetic oligonucleotide
  Antisense strand to SEQ ID NO: 2237426
ugauaacuuacccaaguuc

SEQ ID NO: 2237428 - RNA, 19 nt, Artificial Sequence
  Description of Artificial Sequence: Synthetic oligonucleotide
  Sense strand starting at position 164 of SEQ ID NO: 1884064
ugaaauaaucuaugcauag

SEQ ID NO: 2237429 - RNA, 19 nt, Artificial Sequence
  Description of Artificial Sequence: Synthetic oligonucleotide
  Antisense strand to SEQ ID NO: 2237428
cuaugcauagauuauuuca

SEQ ID NO: 2237430 - RNA, 19 nt, Artificial Sequence
  Description of Artificial Sequence: Synthetic oligonucleotide
  Sense strand starting at position 204 of SEQ ID NO: 1884064
gguuguuucguugcaucuu

SEQ ID NO: 2237431 - RNA, 19 nt, Artificial Sequence
  Description of Artificial Sequence: Synthetic oligonucleotide
  Antisense strand to SEQ ID NO: 2237430
aagaugcaacgaaacaacc

SEQ ID NO: 2237432 - RNA, 19 nt, Artificial Sequence
  Description of Artificial Sequence: Synthetic oligonucleotide
  Sense strand starting at position 247 of SEQ ID NO: 1884064
agcacauugguguaaucua

SEQ ID NO: 2237433 - RNA, 19 nt, Artificial Sequence
  Description of Artificial Sequence: Synthetic oligonucleotide
  Antisense strand to SEQ ID NO: 2237432
uagauuacaccaaugugcu

SEQ ID NO: 2237434 - RNA, 19 nt, Artificial Sequence
  Description of Artificial Sequence: Synthetic oligonucleotide
  Sense strand starting at position 276 of SEQ ID NO: 1884064
auuaaagcugauugcauaa

SEQ ID NO: 2237435 - RNA, 19 nt, Artificial Sequence
  Description of Artificial Sequence: Synthetic oligonucleotide
  Antisense strand to SEQ ID NO: 2237434
uuaugcaaucagcuuuaau

SEQ ID NO: 2237436 - RNA, 19 nt, Artificial Sequence
  Description of Artificial Sequence: Synthetic oligonucleotide
  Sense strand starting at position 291 of SEQ ID NO: 1884064
auaacuauuugggaaguua

SEQ ID NO: 2237437 - RNA, 19 nt, Artificial Sequence
  Description of Artificial Sequence: Synthetic oligonucleotide
  Antisense strand to SEQ ID NO: 2237436
uaacuucccaaauaguuau

SEQ ID NO: 2237438 - RNA, 19 nt, Artificial Sequence
  Description of Artificial Sequence: Synthetic oligonucleotide
  Sense strand starting at position 313 of SEQ ID NO: 1884064
uggcuucuugaguacuuga

SEQ ID NO: 2237439 - RNA, 19 nt, Artificial Sequence
  Description of Artificial Sequence: Synthetic oligonucleotide
  Antisense strand to SEQ ID NO: 2237438
ucaaguacucaagaagcca

SEQ ID NO: 2237440 - RNA, 19 nt, Artificial Sequence
  Description of Artificial Sequence: Synthetic oligonucleotide
  Sense strand starting at position 626 of SEQ ID NO: 1884064
agugaaaugcauuaaagca

SEQ ID NO: 2237441 - RNA, 19 nt, Artificial Sequence
  Description of Artificial Sequence: Synthetic oligonucleotide
  Antisense strand to SEQ ID NO: 2237440
ugcuuuaaugcauuucacu

SEQ ID NO: 2237442 - RNA, 19 nt, Artificial Sequence
  Description of Artificial Sequence: Synthetic oligonucleotide
  Sense strand starting at position 643 of SEQ ID NO: 1884064
cagugcguccuugaauuua

SEQ ID NO: 2237443 - RNA, 19 nt, Artificial Sequence
  Description of Artificial Sequence: Synthetic oligonucleotide
  Antisense strand to SEQ ID NO: 2237442
uaaauucaaggacgcacug

SEQ ID NO: 2237444 - RNA, 19 nt, Artificial Sequence
  Description of Artificial Sequence: Synthetic oligonucleotide
  Sense strand starting at position 705 of SEQ ID NO: 1884064
uggcuugagguagggauaa

SEQ ID NO: 2237445 - RNA, 19 nt, Artificial Sequence
  Description of Artificial Sequence: Synthetic oligonucleotide
  Antisense strand to SEQ ID NO: 2237444
uuaucccuaccucaagcca

SEQ ID NO: 2237446 - RNA, 19 nt, Artificial Sequence
  Description of Artificial Sequence: Synthetic oligonucleotide
  Sense strand starting at position 751 of SEQ ID NO: 1884064
guagauuaagcacaaucau

SEQ ID NO: 2237447 - RNA, 19 nt, Artificial Sequence
  Description of Artificial Sequence: Synthetic oligonucleotide
  Antisense strand to SEQ ID NO: 2237446
augauugugcuuaaucuac

SEQ ID NO: 2237448 - RNA, 19 nt, Artificial Sequence
  Description of Artificial Sequence: Synthetic oligonucleotide
  Sense strand starting at position 766 of SEQ ID NO: 1884064
ucauguuaucaagaguaac

SEQ ID NO: 2237449 - RNA, 19 nt, Artificial Sequence
  Description of Artificial Sequence: Synthetic oligonucleotide
  Antisense strand to SEQ ID NO: 2237448
guuacucuugauaacauga

SEQ ID NO: 2237450 - RNA, 19 nt, Artificial Sequence
  Description of Artificial Sequence: Synthetic oligonucleotide
  Sense strand starting at position 769 of SEQ ID NO: 1884064
uguuaucaagaguaacucu

SEQ ID NO: 2237451 - RNA, 19 nt, Artificial Sequence
  Description of Artificial Sequence: Synthetic oligonucleotide
  Antisense strand to SEQ ID NO: 2237450
agaguuacucuugauaaca

SEQ ID NO: 2237452 - RNA, 19 nt, Artificial Sequence
  Description of Artificial Sequence: Synthetic oligonucleotide
  Sense strand starting at position 808 of SEQ ID NO: 1884064
guugaagaacuguguacaa

SEQ ID NO: 2237453 - RNA, 19 nt, Artificial Sequence
  Description of Artificial Sequence: Synthetic oligonucleotide
  Antisense strand to SEQ ID NO: 2237452
uuguacacaguucuucaac

SEQ ID NO: 2237454 - RNA, 19 nt, Artificial Sequence
  Description of Artificial Sequence: Synthetic oligonucleotide
  Sense strand starting at position 904 of SEQ ID NO: 1884064
ggguagucggaugaucaga

SEQ ID NO: 2237455 - RNA, 19 nt, Artificial Sequence
  Description of Artificial Sequence: Synthetic oligonucleotide
  Antisense strand to SEQ ID NO: 2237454
ucugaucauccgacuaccc

SEQ ID NO: 2237456 - RNA, 19 nt, Artificial Sequence
  Description of Artificial Sequence: Synthetic oligonucleotide
  Sense strand starting at position 906 of SEQ ID NO: 1884064
guagucggaugaucagaga

SEQ ID NO: 2237457 - RNA, 19 nt, Artificial Sequence
  Description of Artificial Sequence: Synthetic oligonucleotide
  Antisense strand to SEQ ID NO: 2237456
ucucugaucauccgacuac

SEQ ID NO: 2237458 - RNA, 19 nt, Artificial Sequence
  Description of Artificial Sequence: Synthetic oligonucleotide
  Sense strand starting at position 1026 of SEQ ID NO: 1884064
uuccgauagcuuuaauacu

SEQ ID NO: 2237459 - RNA, 19 nt, Artificial Sequence
  Description of Artificial Sequence: Synthetic oligonucleotide
  Antisense strand to SEQ ID NO: 2237458
aguauuaaagcuaucggaa

SEQ ID NO: 2237460 - RNA, 19 nt, Artificial Sequence
  Description of Artificial Sequence: Synthetic oligonucleotide
  Sense strand starting at position 1055 of SEQ ID NO: 1884064
cuaacacacucgucugaaa

SEQ ID NO: 2237461 - RNA, 19 nt, Artificial Sequence
  Description of Artificial Sequence: Synthetic oligonucleotide
  Antisense strand to SEQ ID NO: 2237460
uuucagacgaguguguuag

SEQ ID NO: 2237462 - RNA, 19 nt, Artificial Sequence
  Description of Artificial Sequence: Synthetic oligonucleotide
  Sense strand starting at position 1526 of SEQ ID NO: 1884064
guggaaaccuuacuaaucu

SEQ ID NO: 2237463 - RNA, 19 nt, Artificial Sequence
  Description of Artificial Sequence: Synthetic oligonucleotide
  Antisense strand to SEQ ID NO: 2237462
agauuaguaagguuuccac

SEQ ID NO: 2237464 - RNA, 19 nt, Artificial Sequence
  Description of Artificial Sequence: Synthetic oligonucleotide
  Sense strand starting at position 1755 of SEQ ID NO: 1884064
uguacuaugguguaucaau

SEQ ID NO: 2237465 - RNA, 19 nt, Artificial Sequence
  Description of Artificial Sequence: Synthetic oligonucleotide
  Antisense strand to SEQ ID NO: 2237464
auugauacaccauaguaca

SEQ ID NO: 2237466 - RNA, 19 nt, Artificial Sequence
  Description of Artificial Sequence: Synthetic oligonucleotide
  Sense strand starting at position 1782 of SEQ ID NO: 1884064
augggaguuacaugcaaau

SEQ ID NO: 2237467 - RNA, 19 nt, Artificial Sequence
  Description of Artificial Sequence: Synthetic oligonucleotide
  Antisense strand to SEQ ID NO: 2237466
auuugcauguaacucccau

SEQ ID NO: 2237468 - RNA, 19 nt, Artificial Sequence
  Description of Artificial Sequence: Synthetic oligonucleotide
  Sense strand starting at position 1856 of SEQ ID NO: 1884064
uuuaguugucaggacaagu

SEQ ID NO: 2237469 - RNA, 19 nt, Artificial Sequence
  Description of Artificial Sequence: Synthetic oligonucleotide
  Antisense strand to SEQ ID NO: 2237468
acuuguccugacaacuaaa

SEQ ID NO: 2237470 - RNA, 19 nt, Artificial Sequence
  Description of Artificial Sequence: Synthetic oligonucleotide
  Sense strand starting at position 2162 of SEQ ID NO: 1884064
cugcuucuaggauaauuaa

SEQ ID NO: 2237471 - RNA, 19 nt, Artificial Sequence
  Description of Artificial Sequence: Synthetic oligonucleotide
  Antisense strand to SEQ ID NO: 2237470
uuaauuauccuagaagcag

SEQ ID NO: 2237472 - RNA, 19 nt, Artificial Sequence
  Description of Artificial Sequence: Synthetic oligonucleotide
  Sense strand starting at position 2212 of SEQ ID NO: 1884064
gagcgaguuggugcugcaa

SEQ ID NO: 2237473 - RNA, 19 nt, Artificial Sequence
  Description of Artificial Sequence: Synthetic oligonucleotide
  Antisense strand to SEQ ID NO: 2237472
uugcagcaccaacucgcuc

SEQ ID NO: 2237474 - RNA, 19 nt, Artificial Sequence
  Description of Artificial Sequence: Synthetic oligonucleotide
  Sense strand starting at position 2402 of SEQ ID NO: 1884064
acgaccuucgcgucauacu

SEQ ID NO: 2237475 - RNA, 19 nt, Artificial Sequence
  Description of Artificial Sequence: Synthetic oligonucleotide
  Antisense strand to SEQ ID NO: 2237474
aguaugacgcgaaggucgu

SEQ ID NO: 2237476 - RNA, 19 nt, Artificial Sequence
  Description of Artificial Sequence: Synthetic oligonucleotide
  Sense strand starting at position 2492 of SEQ ID NO: 1884064
uugcaacagggcuaagauu

SEQ ID NO: 2237477 - RNA, 19 nt, Artificial Sequence
  Description of Artificial Sequence: Synthetic oligonucleotide
  Antisense strand to SEQ ID NO: 2237476
aaucuuagcccuguugcaa

SEQ ID NO: 2237478 - RNA, 19 nt, Artificial Sequence
  Description of Artificial Sequence: Synthetic oligonucleotide
  Sense strand starting at position 2514 of SEQ ID NO: 1884064
gcacuaugacaaugaguug

SEQ ID NO: 2237479 - RNA, 19 nt, Artificial Sequence
  Description of Artificial Sequence: Synthetic oligonucleotide
  Antisense strand to SEQ ID NO: 2237478
caacucauugucauagugc

SEQ ID NO: 2237480 - RNA, 19 nt, Artificial Sequence
  Description of Artificial Sequence: Synthetic oligonucleotide
  Sense strand starting at position 2519 of SEQ ID NO: 1884064
augacaaugaguuguugau

SEQ ID NO: 2237481 - RNA, 19 nt, Artificial Sequence
  Description of Artificial Sequence: Synthetic oligonucleotide
  Antisense strand to SEQ ID NO: 2237480
aucaacaacucauugucau

SEQ ID NO: 2237482 - RNA, 19 nt, Artificial Sequence
  Description of Artificial Sequence: Synthetic oligonucleotide
  Sense strand starting at position 2521 of SEQ ID NO: 1884064
gacaaugaguuguugauug

SEQ ID NO: 2237483 - RNA, 19 nt, Artificial Sequence
  Description of Artificial Sequence: Synthetic oligonucleotide
  Antisense strand to SEQ ID NO: 2237482
caaucaacaacucauuguc

SEQ ID NO: 2237484 - RNA, 19 nt, Artificial Sequence
  Description of Artificial Sequence: Synthetic oligonucleotide
  Sense strand starting at position 2523 of SEQ ID NO: 1884064
caaugaguuguugauuguu

SEQ ID NO: 2237485 - RNA, 19 nt, Artificial Sequence
  Description of Artificial Sequence: Synthetic oligonucleotide
  Antisense strand to SEQ ID NO: 2237484
aacaaucaacaacucauug

SEQ ID NO: 2237486 - RNA, 19 nt, Artificial Sequence
  Description of Artificial Sequence: Synthetic oligonucleotide
  Sense strand starting at position 2665 of SEQ ID NO: 1884064
caggaagugcaaugaugaa

SEQ ID NO: 2237487 - RNA, 19 nt, Artificial Sequence
  Description of Artificial Sequence: Synthetic oligonucleotide
  Antisense strand to SEQ ID NO: 2237486
uucaucauugcacuuccug

SEQ ID NO: 2237488 - RNA, 19 nt, Artificial Sequence
  Description of Artificial Sequence: Synthetic oligonucleotide
  Sense strand starting at position 2783 of SEQ ID NO: 1884064
ucuguaacuagucaggagu

SEQ ID NO: 2237489 - RNA, 19 nt, Artificial Sequence
  Description of Artificial Sequence: Synthetic oligonucleotide
  Antisense strand to SEQ ID NO: 2237488
acuccugacuaguuacaga

SEQ ID NO: 2237490 - RNA, 19 nt, Artificial Sequence
  Description of Artificial Sequence: Synthetic oligonucleotide
  Sense strand starting at position 3074 of SEQ ID NO: 1884064
gaccguuggcuauaagaua

SEQ ID NO: 2237491 - RNA, 19 nt, Artificial Sequence
  Description of Artificial Sequence: Synthetic oligonucleotide
  Antisense strand to SEQ ID NO: 2237490
uaucuuauagccaacgguc

SEQ ID NO: 2237492 - RNA, 19 nt, Artificial Sequence
  Description of Artificial Sequence: Synthetic oligonucleotide
  Sense strand starting at position 3087 of SEQ ID NO: 1884064
aagauaaaguucucaaggu

SEQ ID NO: 2237493 - RNA, 19 nt, Artificial Sequence
  Description of Artificial Sequence: Synthetic oligonucleotide
  Antisense strand to SEQ ID NO: 2237492
accuugagaacuuuaucuu

SEQ ID NO: 2237494 - RNA, 19 nt, Artificial Sequence
  Description of Artificial Sequence: Synthetic oligonucleotide
  Sense strand starting at position 3094 of SEQ ID NO: 1884064
aguucucaagguuacauau

SEQ ID NO: 2237495 - RNA, 19 nt, Artificial Sequence
  Description of Artificial Sequence: Synthetic oligonucleotide
  Antisense strand to SEQ ID NO: 2237494
auauguaaccuugagaacu

SEQ ID NO: 2237496 - RNA, 19 nt, Artificial Sequence
  Description of Artificial Sequence: Synthetic oligonucleotide
  Sense strand starting at position 3271 of SEQ ID NO: 1884064
auauauccaugugucaaac

SEQ ID NO: 2237497 - RNA, 19 nt, Artificial Sequence
  Description of Artificial Sequence: Synthetic oligonucleotide
  Antisense strand to SEQ ID NO: 2237496
guuugacacauggauauau

SEQ ID NO: 2237498 - RNA, 19 nt, Artificial Sequence
  Description of Artificial Sequence: Synthetic oligonucleotide
  Sense strand starting at position 3391 of SEQ ID NO: 1884064
cuacaauuucucuguuugu

SEQ ID NO: 2237499 - RNA, 19 nt, Artificial Sequence
  Description of Artificial Sequence: Synthetic oligonucleotide
  Antisense strand to SEQ ID NO: 2237498
acaaacagagaaauuguag

SEQ ID NO: 2237500 - RNA, 19 nt, Artificial Sequence
  Description of Artificial Sequence: Synthetic oligonucleotide
  Sense strand starting at position 3580 of SEQ ID NO: 1884064
guuaccaaauguccauuaa

SEQ ID NO: 2237501 - RNA, 19 nt, Artificial Sequence
  Description of Artificial Sequence: Synthetic oligonucleotide
  Antisense strand to SEQ ID NO: 2237500
uuaauggacauuugguaac

SEQ ID NO: 2237502 - RNA, 19 nt, Artificial Sequence
  Description of Artificial Sequence: Synthetic oligonucleotide
  Sense strand starting at position 3657 of SEQ ID NO: 1884064
gcaucuuauagagaaugug

SEQ ID NO: 2237503 - RNA, 19 nt, Artificial Sequence
  Description of Artificial Sequence: Synthetic oligonucleotide
  Antisense strand to SEQ ID NO: 2237502
cacauucucuauaagaugc

SEQ ID NO: 2237504 - RNA, 19 nt, Artificial Sequence
  Description of Artificial Sequence: Synthetic oligonucleotide
  Sense strand starting at position 3732 of SEQ ID NO: 1884064
ugugucgcucuauauuuaa

SEQ ID NO: 2237505 - RNA, 19 nt, Artificial Sequence
  Description of Artificial Sequence: Synthetic oligonucleotide
  Antisense strand to SEQ ID NO: 2237504
uuaaauauagagcgacaca

SEQ ID NO: 2237506 - RNA, 19 nt, Artificial Sequence
  Description of Artificial Sequence: Synthetic oligonucleotide
  Sense strand starting at position 3970 of SEQ ID NO: 1884064
auuguugcccaguaacaag

SEQ ID NO: 2237507 - RNA, 19 nt, Artificial Sequence
  Description of Artificial Sequence: Synthetic oligonucleotide
  Antisense strand to SEQ ID NO: 2237506
cuuguuacugggcaacaau

SEQ ID NO: 2237508 - RNA, 19 nt, Artificial Sequence
  Description of Artificial Sequence: Synthetic oligonucleotide
  Sense strand starting at position 104 of SEQ ID NO: 1884065
ucaugacauagcuguggau

SEQ ID NO: 2237509 - RNA, 19 nt, Artificial Sequence
  Description of Artificial Sequence: Synthetic oligonucleotide
  Antisense strand to SEQ ID NO: 2237508
auccacagcuaugucauga

SEQ ID NO: 2237510 - RNA, 19 nt, Artificial Sequence
  Description of Artificial Sequence: Synthetic oligonucleotide
  Sense strand starting at position 116 of SEQ ID NO: 1884065
uguggauggcuggguuaga

SEQ ID NO: 2237511 - RNA, 19 nt, Artificial Sequence
  Description of Artificial Sequence: Synthetic oligonucleotide
  Antisense strand to SEQ ID NO: 2237510
ucuaacccagccauccaca

SEQ ID NO: 2237512 - RNA, 19 nt, Artificial Sequence
  Description of Artificial Sequence: Synthetic oligonucleotide
  Sense strand starting at position 187 of SEQ ID NO: 1884065
aguaaugaaacccgguuau

SEQ ID NO: 2237513 - RNA, 19 nt, Artificial Sequence
  Description of Artificial Sequence: Synthetic oligonucleotide
  Antisense strand to SEQ ID NO: 2237512
auaaccggguuucauuacu

SEQ ID NO: 2237514 - RNA, 19 nt, Artificial Sequence
  Description of Artificial Sequence: Synthetic oligonucleotide
  Sense strand starting at position 335 of SEQ ID NO: 1884065
ccaaguucuguccaacaug

SEQ ID NO: 2237515 - RNA, 19 nt, Artificial Sequence
  Description of Artificial Sequence: Synthetic oligonucleotide
  Antisense strand to SEQ ID NO: 2237514
cauguuggacagaacuugg

SEQ ID NO: 2237516 - RNA, 19 nt, Artificial Sequence
  Description of Artificial Sequence: Synthetic oligonucleotide
  Sense strand starting at position 344 of SEQ ID NO: 1884065
guccaacaugcagacauua

SEQ ID NO: 2237517 - RNA, 19 nt, Artificial Sequence
  Description of Artificial Sequence: Synthetic oligonucleotide
  Antisense strand to SEQ ID NO: 2237516
uaaugucugcauguuggac

SEQ ID NO: 2237518 - RNA, 19 nt, Artificial Sequence
  Description of Artificial Sequence: Synthetic oligonucleotide
  Sense strand starting at position 429 of SEQ ID NO: 1884065
gcuuuaugacaaugcagaa

SEQ ID NO: 2237519 - RNA, 19 nt, Artificial Sequence
  Description of Artificial Sequence: Synthetic oligonucleotide
  Antisense strand to SEQ ID NO: 2237518
uucugcauugucauaaagc

SEQ ID NO: 2237520 - RNA, 19 nt, Artificial Sequence
  Description of Artificial Sequence: Synthetic oligonucleotide
  Sense strand starting at position 463 of SEQ ID NO: 1884065
guuuguugauuccuagauu

SEQ ID NO: 2237521 - RNA, 19 nt, Artificial Sequence
  Description of Artificial Sequence: Synthetic oligonucleotide
  Antisense strand to SEQ ID NO: 2237520
aaucuaggaaucaacaaac

SEQ ID NO: 2237522 - RNA, 19 nt, Artificial Sequence
  Description of Artificial Sequence: Synthetic oligonucleotide
  Sense strand starting at position 466 of SEQ ID NO: 1884065
uguugauuccuagauuaau

SEQ ID NO: 2237523 - RNA, 19 nt, Artificial Sequence
  Description of Artificial Sequence: Synthetic oligonucleotide
  Antisense strand to SEQ ID NO: 2237522
auuaaucuaggaaucaaca

SEQ ID NO: 2237524 - RNA, 19 nt, Artificial Sequence
  Description of Artificial Sequence: Synthetic oligonucleotide
  Sense strand starting at position 648 of SEQ ID NO: 1884065
uuaagaaauuugcaucaug

SEQ ID NO: 2237525 - RNA, 19 nt, Artificial Sequence
  Description of Artificial Sequence: Synthetic oligonucleotide
  Antisense strand to SEQ ID NO: 2237524
caugaugcaaauuucuuaa

SEQ ID NO: 2237526 - RNA, 19 nt, Artificial Sequence
  Description of Artificial Sequence: Synthetic oligonucleotide
  Sense strand starting at position 756 of SEQ ID NO: 1884065
gcaacaugauauguuggaa

SEQ ID NO: 2237527 - RNA, 19 nt, Artificial Sequence
  Description of Artificial Sequence: Synthetic oligonucleotide
  Antisense strand to SEQ ID NO: 2237526
uuccaacauaucauguugc

SEQ ID NO: 2237528 - RNA, 19 nt, Artificial Sequence
  Description of Artificial Sequence: Synthetic oligonucleotide
  Sense strand starting at position 841 of SEQ ID NO: 1884065
cuacguaaucucuauagac

SEQ ID NO: 2237529 - RNA, 19 nt, Artificial Sequence
  Description of Artificial Sequence: Synthetic oligonucleotide
  Antisense strand to SEQ ID NO: 2237528
gucuauagagauuacguag

SEQ ID NO: 2237530 - RNA, 19 nt, Artificial Sequence
  Description of Artificial Sequence: Synthetic oligonucleotide
  Sense strand starting at position 843 of SEQ ID NO: 1884065
acguaaucucuauagaccu

SEQ ID NO: 2237531 - RNA, 19 nt, Artificial Sequence
  Description of Artificial Sequence: Synthetic oligonucleotide
  Antisense strand to SEQ ID NO: 2237530
aggucuauagagauuacgu

SEQ ID NO: 2237532 - RNA, 19 nt, Artificial Sequence
  Description of Artificial Sequence: Synthetic oligonucleotide
  Sense strand starting at position 856 of SEQ ID NO: 1884065
agaccuuggucuccugauu

SEQ ID NO: 2237533 - RNA, 19 nt, Artificial Sequence
  Description of Artificial Sequence: Synthetic oligonucleotide
  Antisense strand to SEQ ID NO: 2237532
aaucaggagaccaaggucu

SEQ ID NO: 2237534 - RNA, 19 nt, Artificial Sequence
  Description of Artificial Sequence: Synthetic oligonucleotide
  Sense strand starting at position 903 of SEQ ID NO: 1884065
acaucauguuguucuaaca

SEQ ID NO: 2237535 - RNA, 19 nt, Artificial Sequence
  Description of Artificial Sequence: Synthetic oligonucleotide
  Antisense strand to SEQ ID NO: 2237534
uguuagaacaacaugaugu

SEQ ID NO: 2237536 - RNA, 19 nt, Artificial Sequence
  Description of Artificial Sequence: Synthetic oligonucleotide
  Sense strand starting at position 962 of SEQ ID NO: 1884065
uggauccauuagguguuaa

SEQ ID NO: 2237537 - RNA, 19 nt, Artificial Sequence
  Description of Artificial Sequence: Synthetic oligonucleotide
  Antisense strand to SEQ ID NO: 2237536
uuaacaccuaauggaucca

SEQ ID NO: 2237538 - RNA, 19 nt, Artificial Sequence
  Description of Artificial Sequence: Synthetic oligonucleotide
  Sense strand starting at position 963 of SEQ ID NO: 1884065
ggauccauuagguguuaag

SEQ ID NO: 2237539 - RNA, 19 nt, Artificial Sequence
  Description of Artificial Sequence: Synthetic oligonucleotide
  Antisense strand to SEQ ID NO: 2237538
cuuaacaccuaauggaucc

SEQ ID NO: 2237540 - RNA, 19 nt, Artificial Sequence
  Description of Artificial Sequence: Synthetic oligonucleotide
  Sense strand starting at position 1059 of SEQ ID NO: 1884065
gugcuuacaacuggaagga

SEQ ID NO: 2237541 - RNA, 19 nt, Artificial Sequence
  Description of Artificial Sequence: Synthetic oligonucleotide
  Antisense strand to SEQ ID NO: 2237540
uccuuccaguuguaagcac

SEQ ID NO: 2237542 - RNA, 19 nt, Artificial Sequence
  Description of Artificial Sequence: Synthetic oligonucleotide
  Sense strand starting at position 1119 of SEQ ID NO: 1884065
auguaaaugugauuguaac

SEQ ID NO: 2237543 - RNA, 19 nt, Artificial Sequence
  Description of Artificial Sequence: Synthetic oligonucleotide
  Antisense strand to SEQ ID NO: 2237542
guuacaaucacauuuacau

SEQ ID NO: 2237544 - RNA, 19 nt, Artificial Sequence
  Description of Artificial Sequence: Synthetic oligonucleotide
  Sense strand starting at position 1120 of SEQ ID NO: 1884065
uguaaaugugauuguaacu

SEQ ID NO: 2237545 - RNA, 19 nt, Artificial Sequence
  Description of Artificial Sequence: Synthetic oligonucleotide
  Antisense strand to SEQ ID NO: 2237544
aguuacaaucacauuuaca

SEQ ID NO: 2237546 - RNA, 19 nt, Artificial Sequence
  Description of Artificial Sequence: Synthetic oligonucleotide
  Sense strand starting at position 1147 of SEQ ID NO: 1884065
gcuguaucuagugaccagu

SEQ ID NO: 2237547 - RNA, 19 nt, Artificial Sequence
  Description of Artificial Sequence: Synthetic oligonucleotide
  Antisense strand to SEQ ID NO: 2237546
acuggucacuagauacagc

SEQ ID NO: 2237548 - RNA, 19 nt, Artificial Sequence
  Description of Artificial Sequence: Synthetic oligonucleotide
  Sense strand starting at position 1197 of SEQ ID NO: 1884065
cuacguuagcacuggaaac

SEQ ID NO: 2237549 - RNA, 19 nt, Artificial Sequence
  Description of Artificial Sequence: Synthetic oligonucleotide
  Antisense strand to SEQ ID NO: 2237548
guuuccagugcuaacguag

SEQ ID NO: 2237550 - RNA, 19 nt, Artificial Sequence
  Description of Artificial Sequence: Synthetic oligonucleotide
  Sense strand starting at position 1257 of SEQ ID NO: 1884065
aggacaucuuucuuugauu

SEQ ID NO: 2237551 - RNA, 19 nt, Artificial Sequence
  Description of Artificial Sequence: Synthetic oligonucleotide
  Antisense strand to SEQ ID NO: 2237550
aaucaaagaaagauguccu

SEQ ID NO: 2237552 - RNA, 19 nt, Artificial Sequence
  Description of Artificial Sequence: Synthetic oligonucleotide
  Sense strand starting at position 1258 of SEQ ID NO: 1884065
ggacaucuuucuuugauuc

SEQ ID NO: 2237553 - RNA, 19 nt, Artificial Sequence
  Description of Artificial Sequence: Synthetic oligonucleotide
  Antisense strand to SEQ ID NO: 2237552
gaaucaaagaaagaugucc

SEQ ID NO: 2237554 - RNA, 19 nt, Artificial Sequence
  Description of Artificial Sequence: Synthetic oligonucleotide
  Sense strand starting at position 1309 of SEQ ID NO: 1884065
uggguaaucucuucucccu

SEQ ID NO: 2237555 - RNA, 19 nt, Artificial Sequence
  Description of Artificial Sequence: Synthetic oligonucleotide
  Antisense strand to SEQ ID NO: 2237554
agggagaagagauuaccca

SEQ ID NO: 2237556 - RNA, 19 nt, Artificial Sequence
  Description of Artificial Sequence: Synthetic oligonucleotide
  Sense strand starting at position 1384 of SEQ ID NO: 1884065
gaguaaauuccuggaaguc

SEQ ID NO: 2237557 - RNA, 19 nt, Artificial Sequence
  Description of Artificial Sequence: Synthetic oligonucleotide
  Antisense strand to SEQ ID NO: 2237556
gacuuccaggaauuuacuc

SEQ ID NO: 2237558 - RNA, 19 nt, Artificial Sequence
  Description of Artificial Sequence: Synthetic oligonucleotide
  Sense strand starting at position 2178 of SEQ ID NO: 1884065
agacuaucuugcucuguca

SEQ ID NO: 2237559 - RNA, 19 nt, Artificial Sequence
  Description of Artificial Sequence: Synthetic oligonucleotide
  Antisense strand to SEQ ID NO: 2237558
ugacagagcaagauagucu

SEQ ID NO: 2237560 - RNA, 19 nt, Artificial Sequence
  Description of Artificial Sequence: Synthetic oligonucleotide
  Sense strand starting at position 2216 of SEQ ID NO: 1884065
gcacgaucucagcucuguu

SEQ ID NO: 2237561 - RNA, 19 nt, Artificial Sequence
  Description of Artificial Sequence: Synthetic oligonucleotide
  Antisense strand to SEQ ID NO: 2237560
aacagagcugagaucgugc

SEQ ID NO: 2237562 - RNA, 19 nt, Artificial Sequence
  Description of Artificial Sequence: Synthetic oligonucleotide
  Sense strand starting at position 2513 of SEQ ID NO: 1884065
acaccuaaguuauuaggga

SEQ ID NO: 2237563 - RNA, 19 nt, Artificial Sequence
  Description of Artificial Sequence: Synthetic oligonucleotide
  Antisense strand to SEQ ID NO: 2237562
ucccuaauaacuuaggugu

SEQ ID NO: 2237564 - RNA, 19 nt, Artificial Sequence
  Description of Artificial Sequence: Synthetic oligonucleotide
  Sense strand starting at position 2685 of SEQ ID NO: 1884065
gccaucaucccugagaucu

SEQ ID NO: 2237565 - RNA, 19 nt, Artificial Sequence
  Description of Artificial Sequence: Synthetic oligonucleotide
  Antisense strand to SEQ ID NO: 2237564
agaucucagggaugauggc

SEQ ID NO: 2237566 - RNA, 19 nt, Artificial Sequence
  Description of Artificial Sequence: Synthetic oligonucleotide
  Sense strand starting at position 2757 of SEQ ID NO: 1884065
uuugcuuugggaggguaua

SEQ ID NO: 2237567 - RNA, 19 nt, Artificial Sequence
  Description of Artificial Sequence: Synthetic oligonucleotide
  Antisense strand to SEQ ID NO: 2237566
uauacccucccaaagcaaa

SEQ ID NO: 2237568 - RNA, 19 nt, Artificial Sequence
  Description of Artificial Sequence: Synthetic oligonucleotide
  Sense strand starting at position 2758 of SEQ ID NO: 1884065
uugcuuugggaggguauau

SEQ ID NO: 2237569 - RNA, 19 nt, Artificial Sequence
  Description of Artificial Sequence: Synthetic oligonucleotide
  Antisense strand to SEQ ID NO: 2237568
auauacccucccaaagcaa

SEQ ID NO: 2237570 - RNA, 19 nt, Artificial Sequence
  Description of Artificial Sequence: Synthetic oligonucleotide
  Sense strand starting at position 2769 of SEQ ID NO: 1884065
ggguauauccaggguccuu

SEQ ID NO: 2237571 - RNA, 19 nt, Artificial Sequence
  Description of Artificial Sequence: Synthetic oligonucleotide
  Antisense strand to SEQ ID NO: 2237570
aaggacccuggauauaccc

SEQ ID NO: 2237572 - RNA, 19 nt, Artificial Sequence
  Description of Artificial Sequence: Synthetic oligonucleotide
  Sense strand starting at position 3346 of SEQ ID NO: 1884065
gcuauacuugaccaagacu

SEQ ID NO: 2237573 - RNA, 19 nt, Artificial Sequence
  Description of Artificial Sequence: Synthetic oligonucleotide
  Antisense strand to SEQ ID NO: 2237572
agucuuggucaaguauagc

SEQ ID NO: 2237574 - RNA, 19 nt, Artificial Sequence
  Description of Artificial Sequence: Synthetic oligonucleotide
  Sense strand starting at position 3381 of SEQ ID NO: 1884065
acuuuauaucugggaagug

SEQ ID NO: 2237575 - RNA, 19 nt, Artificial Sequence
  Description of Artificial Sequence: Synthetic oligonucleotide
  Antisense strand to SEQ ID NO: 2237574
cacuucccagauauaaagu

SEQ ID NO: 2237576 - RNA, 19 nt, Artificial Sequence
  Description of Artificial Sequence: Synthetic oligonucleotide
  Sense strand starting at position 3627 of SEQ ID NO: 1884065
guccuuuguggagaugguu

SEQ ID NO: 2237577 - RNA, 19 nt, Artificial Sequence
  Description of Artificial Sequence: Synthetic oligonucleotide
  Antisense strand to SEQ ID NO: 2237576
aaccaucuccacaaaggac

SEQ ID NO: 2237578 - RNA, 19 nt, Artificial Sequence
  Description of Artificial Sequence: Synthetic oligonucleotide
  Sense strand starting at position 3678 of SEQ ID NO: 1884065
cuuuacaucuugcuggaaa

SEQ ID NO: 2237579 - RNA, 19 nt, Artificial Sequence
  Description of Artificial Sequence: Synthetic oligonucleotide
  Antisense strand to SEQ ID NO: 2237578
uuuccagcaagauguaaag

SEQ ID NO: 2237580 - RNA, 19 nt, Artificial Sequence
  Description of Artificial Sequence: Synthetic oligonucleotide
  Sense strand starting at position 3680 of SEQ ID NO: 1884065
uuacaucuugcuggaaaug

SEQ ID NO: 2237581 - RNA, 19 nt, Artificial Sequence
  Description of Artificial Sequence: Synthetic oligonucleotide
  Antisense strand to SEQ ID NO: 2237580
cauuuccagcaagauguaa

SEQ ID NO: 2237582 - RNA, 19 nt, Artificial Sequence
  Description of Artificial Sequence: Synthetic oligonucleotide
  Sense strand starting at position 3711 of SEQ ID NO: 1884065
acaguucuggauggcaaau

SEQ ID NO: 2237583 - RNA, 19 nt, Artificial Sequence
  Description of Artificial Sequence: Synthetic oligonucleotide
  Antisense strand to SEQ ID NO: 2237582
auuugccauccagaacugu

SEQ ID NO: 2237584 - RNA, 19 nt, Artificial Sequence
  Description of Artificial Sequence: Synthetic oligonucleotide
  Sense strand starting at position 3765 of SEQ ID NO: 1884065
cucagaaagcguuaggcuu

SEQ ID NO: 2237585 - RNA, 19 nt, Artificial Sequence
  Description of Artificial Sequence: Synthetic oligonucleotide
  Antisense strand to SEQ ID NO: 2237584
aagccuaacgcuuucugag

SEQ ID NO: 2237586 - RNA, 19 nt, Artificial Sequence
  Description of Artificial Sequence: Synthetic oligonucleotide
  Sense strand starting at position 3772 of SEQ ID NO: 1884065
agcguuaggcuuuagaaga

SEQ ID NO: 2237587 - RNA, 19 nt, Artificial Sequence
  Description of Artificial Sequence: Synthetic oligonucleotide
  Antisense strand to SEQ ID NO: 2237586
ucuucuaaagccuaacgcu

SEQ ID NO: 2237588 - RNA, 19 nt, Artificial Sequence
  Description of Artificial Sequence: Synthetic oligonucleotide
  Sense strand starting at position 42 of SEQ ID NO: 1884066
cuaguuauauaccucgaag

SEQ ID NO: 2237589 - RNA, 19 nt, Artificial Sequence
  Description of Artificial Sequence: Synthetic oligonucleotide
  Antisense strand to SEQ ID NO: 2237588
cuucgagguauauaacuag

SEQ ID NO: 2237590 - RNA, 19 nt, Artificial Sequence
  Description of Artificial Sequence: Synthetic oligonucleotide
  Sense strand starting at position 44 of SEQ ID NO: 1884066
aguuauauaccucgaagaa

SEQ ID NO: 2237591 - RNA, 19 nt, Artificial Sequence
  Description of Artificial Sequence: Synthetic oligonucleotide
  Antisense strand to SEQ ID NO: 2237590
uucuucgagguauauaacu

SEQ ID NO: 2237592 - RNA, 19 nt, Artificial Sequence
  Description of Artificial Sequence: Synthetic oligonucleotide
  Sense strand starting at position 45 of SEQ ID NO: 1884066
guuauauaccucgaagaau

SEQ ID NO: 2237593 - RNA, 19 nt, Artificial Sequence
  Description of Artificial Sequence: Synthetic oligonucleotide
  Antisense strand to SEQ ID NO: 2237592
auucuucgagguauauaac

SEQ ID NO: 2237594 - RNA, 19 nt, Artificial Sequence
  Description of Artificial Sequence: Synthetic oligonucleotide
  Sense strand starting at position 475 of SEQ ID NO: 1884066
acaacacugugaguggaau

SEQ ID NO: 2237595 - RNA, 19 nt, Artificial Sequence
  Description of Artificial Sequence: Synthetic oligonucleotide
  Antisense strand to SEQ ID NO: 2237594
auuccacucacaguguugu

SEQ ID NO: 2237596 - RNA, 19 nt, Artificial Sequence
  Description of Artificial Sequence: Synthetic oligonucleotide
  Sense strand starting at position 630 of SEQ ID NO: 1884066
uuguauggcaugugauuua

SEQ ID NO: 2237597 - RNA, 19 nt, Artificial Sequence
  Description of Artificial Sequence: Synthetic oligonucleotide
  Antisense strand to SEQ ID NO: 2237596
uaaaucacaugccauacaa

SEQ ID NO: 2237598 - RNA, 19 nt, Artificial Sequence
  Description of Artificial Sequence: Synthetic oligonucleotide
  Sense strand starting at position 694 of SEQ ID NO: 1884066
cgaagucauguuuacugga

SEQ ID NO: 2237599 - RNA, 19 nt, Artificial Sequence
  Description of Artificial Sequence: Synthetic oligonucleotide
  Antisense strand to SEQ ID NO: 2237598
uccaguaaacaugacuucg

SEQ ID NO: 2237600 - RNA, 19 nt, Artificial Sequence
  Description of Artificial Sequence: Synthetic oligonucleotide
  Sense strand starting at position 699 of SEQ ID NO: 1884066
ucauguuuacuggauguaa

SEQ ID NO: 2237601 - RNA, 19 nt, Artificial Sequence
  Description of Artificial Sequence: Synthetic oligonucleotide
  Antisense strand to SEQ ID NO: 2237600
uuacauccaguaaacauga

SEQ ID NO: 2237602 - RNA, 19 nt, Artificial Sequence
  Description of Artificial Sequence: Synthetic oligonucleotide
  Sense strand starting at position 701 of SEQ ID NO: 1884066
auguuuacuggauguaaca

SEQ ID NO: 2237603 - RNA, 19 nt, Artificial Sequence
  Description of Artificial Sequence: Synthetic oligonucleotide
  Antisense strand to SEQ ID NO: 2237602
uguuacauccaguaaacau

SEQ ID NO: 2237604 - RNA, 19 nt, Artificial Sequence
  Description of Artificial Sequence: Synthetic oligonucleotide
  Sense strand starting at position 960 of SEQ ID NO: 1884066
cugcacguaauggauauaa

SEQ ID NO: 2237605 - RNA, 19 nt, Artificial Sequence
  Description of Artificial Sequence: Synthetic oligonucleotide
  Antisense strand to SEQ ID NO: 2237604
uuauauccauuacgugcag

SEQ ID NO: 2237606 - RNA, 19 nt, Artificial Sequence
  Description of Artificial Sequence: Synthetic oligonucleotide
  Sense strand starting at position 962 of SEQ ID NO: 1884066
gcacguaauggauauaaga

SEQ ID NO: 2237607 - RNA, 19 nt, Artificial Sequence
  Description of Artificial Sequence: Synthetic oligonucleotide
  Antisense strand to SEQ ID NO: 2237606
ucuuauauccauuacgugc

SEQ ID NO: 2237608 - RNA, 19 nt, Artificial Sequence
  Description of Artificial Sequence: Synthetic oligonucleotide
  Sense strand starting at position 1093 of SEQ ID NO: 1884066
auuccuagaggugguuaua

SEQ ID NO: 2237609 - RNA, 19 nt, Artificial Sequence
  Description of Artificial Sequence: Synthetic oligonucleotide
  Antisense strand to SEQ ID NO: 2237608
uauaaccaccucuaggaau

SEQ ID NO: 2237610 - RNA, 19 nt, Artificial Sequence
  Description of Artificial Sequence: Synthetic oligonucleotide
  Sense strand starting at position 1096 of SEQ ID NO: 1884066
ccuagaggugguuauauuc

SEQ ID NO: 2237611 - RNA, 19 nt, Artificial Sequence
  Description of Artificial Sequence: Synthetic oligonucleotide
  Antisense strand to SEQ ID NO: 2237610
gaauauaaccaccucuagg

SEQ ID NO: 2237612 - RNA, 19 nt, Artificial Sequence
  Description of Artificial Sequence: Synthetic oligonucleotide
  Sense strand starting at position 1104 of SEQ ID NO: 1884066
ugguuauauucuuuagaac

SEQ ID NO: 2237613 - RNA, 19 nt, Artificial Sequence
  Description of Artificial Sequence: Synthetic oligonucleotide
  Antisense strand to SEQ ID NO: 2237612
guucuaaagaauauaacca

SEQ ID NO: 2237614 - RNA, 19 nt, Artificial Sequence
  Description of Artificial Sequence: Synthetic oligonucleotide
  Sense strand starting at position 1105 of SEQ ID NO: 1884066
gguuauauucuuuagaacc

SEQ ID NO: 2237615 - RNA, 19 nt, Artificial Sequence
  Description of Artificial Sequence: Synthetic oligonucleotide
  Antisense strand to SEQ ID NO: 2237614
gguucuaaagaauauaacc

SEQ ID NO: 2237616 - RNA, 19 nt, Artificial Sequence
  Description of Artificial Sequence: Synthetic oligonucleotide
  Sense strand starting at position 1249 of SEQ ID NO: 1884066
ucauuacaccauugaguuu

SEQ ID NO: 2237617 - RNA, 19 nt, Artificial Sequence
  Description of Artificial Sequence: Synthetic oligonucleotide
  Antisense strand to SEQ ID NO: 2237616
aaacucaaugguguaauga

SEQ ID NO: 2237618 - RNA, 19 nt, Artificial Sequence
  Description of Artificial Sequence: Synthetic oligonucleotide
  Sense strand starting at position 1416 of SEQ ID NO: 1884066
aaauguauagagugacacu

SEQ ID NO: 2237619 - RNA, 19 nt, Artificial Sequence
  Description of Artificial Sequence: Synthetic oligonucleotide
  Antisense strand to SEQ ID NO: 2237618
agugucacucuauacauuu

SEQ ID NO: 2237620 - RNA, 19 nt, Artificial Sequence
  Description of Artificial Sequence: Synthetic oligonucleotide
  Sense strand starting at position 1466 of SEQ ID NO: 1884066
gguguaauaguuuaccuua

SEQ ID NO: 2237621 - RNA, 19 nt, Artificial Sequence
  Description of Artificial Sequence: Synthetic oligonucleotide
  Antisense strand to SEQ ID NO: 2237620
uaagguaaacuauuacacc

SEQ ID NO: 2237622 - RNA, 19 nt, Artificial Sequence
  Description of Artificial Sequence: Synthetic oligonucleotide
  Sense strand starting at position 2104 of SEQ ID NO: 1884066
gagcucuuggugucagugu

SEQ ID NO: 2237623 - RNA, 19 nt, Artificial Sequence
  Description of Artificial Sequence: Synthetic oligonucleotide
  Antisense strand to SEQ ID NO: 2237622
acacugacaccaagagcuc

SEQ ID NO: 2237624 - RNA, 19 nt, Artificial Sequence
  Description of Artificial Sequence: Synthetic oligonucleotide
  Sense strand starting at position 2123 of SEQ ID NO: 1884066
cugucuuaucuuuacuuag

SEQ ID NO: 2237625 - RNA, 19 nt, Artificial Sequence
  Description of Artificial Sequence: Synthetic oligonucleotide
  Antisense strand to SEQ ID NO: 2237624
cuaaguaaagauaagacag

SEQ ID NO: 2237626 - RNA, 19 nt, Artificial Sequence
  Description of Artificial Sequence: Synthetic oligonucleotide
  Sense strand starting at position 2299 of SEQ ID NO: 1884066
ugagauuacuacuccgaga

SEQ ID NO: 2237627 - RNA, 19 nt, Artificial Sequence
  Description of Artificial Sequence: Synthetic oligonucleotide
  Antisense strand to SEQ ID NO: 2237626
ucucggaguaguaaucuca

SEQ ID NO: 2237628 - RNA, 19 nt, Artificial Sequence
  Description of Artificial Sequence: Synthetic oligonucleotide
  Sense strand starting at position 2301 of SEQ ID NO: 1884066
agauuacuacuccgagaau

SEQ ID NO: 2237629 - RNA, 19 nt, Artificial Sequence
  Description of Artificial Sequence: Synthetic oligonucleotide
  Antisense strand to SEQ ID NO: 2237628
auucucggaguaguaaucu

SEQ ID NO: 2237630 - RNA, 19 nt, Artificial Sequence
  Description of Artificial Sequence: Synthetic oligonucleotide
  Sense strand starting at position 2312 of SEQ ID NO: 1884066
ccgagaauuuaacauagac

SEQ ID NO: 2237631 - RNA, 19 nt, Artificial Sequence
  Description of Artificial Sequence: Synthetic oligonucleotide
  Antisense strand to SEQ ID NO: 2237630
gucuauguuaaauucucgg

SEQ ID NO: 2237632 - RNA, 19 nt, Artificial Sequence
  Description of Artificial Sequence: Synthetic oligonucleotide
  Sense strand starting at position 2403 of SEQ ID NO: 1884066
ucaauuagugcuuaaggaa

SEQ ID NO: 2237633 - RNA, 19 nt, Artificial Sequence
  Description of Artificial Sequence: Synthetic oligonucleotide
  Antisense strand to SEQ ID NO: 2237632
uuccuuaagcacuaauuga

SEQ ID NO: 2237634 - RNA, 19 nt, Artificial Sequence
  Description of Artificial Sequence: Synthetic oligonucleotide
  Sense strand starting at position 2628 of SEQ ID NO: 1884066
gcuagauuagacuguuagg

SEQ ID NO: 2237635 - RNA, 19 nt, Artificial Sequence
  Description of Artificial Sequence: Synthetic oligonucleotide
  Antisense strand to SEQ ID NO: 2237634
ccuaacagucuaaucuagc

SEQ ID NO: 2237636 - RNA, 19 nt, Artificial Sequence
  Description of Artificial Sequence: Synthetic oligonucleotide
  Sense strand starting at position 2637 of SEQ ID NO: 1884066
gacuguuaggcucacugau

SEQ ID NO: 2237637 - RNA, 19 nt, Artificial Sequence
  Description of Artificial Sequence: Synthetic oligonucleotide
  Antisense strand to SEQ ID NO: 2237636
aucagugagccuaacaguc

SEQ ID NO: 2237638 - RNA, 19 nt, Artificial Sequence
  Description of Artificial Sequence: Synthetic oligonucleotide
  Sense strand starting at position 2681 of SEQ ID NO: 1884066
ugugguuugguagaugaca

SEQ ID NO: 2237639 - RNA, 19 nt, Artificial Sequence
  Description of Artificial Sequence: Synthetic oligonucleotide
  Antisense strand to SEQ ID NO: 2237638
ugucaucuaccaaaccaca

SEQ ID NO: 2237640 - RNA, 19 nt, Artificial Sequence
  Description of Artificial Sequence: Synthetic oligonucleotide
  Sense strand starting at position 2683 of SEQ ID NO: 1884066
ugguuugguagaugacaau

SEQ ID NO: 2237641 - RNA, 19 nt, Artificial Sequence
  Description of Artificial Sequence: Synthetic oligonucleotide
  Antisense strand to SEQ ID NO: 2237640
auugucaucuaccaaacca

SEQ ID NO: 2237642 - RNA, 19 nt, Artificial Sequence
  Description of Artificial Sequence: Synthetic oligonucleotide
  Sense strand starting at position 2816 of SEQ ID NO: 1884066
cuguauccugaauaggcaa

SEQ ID NO: 2237643 - RNA, 19 nt, Artificial Sequence
  Description of Artificial Sequence: Synthetic oligonucleotide
  Antisense strand to SEQ ID NO: 2237642
uugccuauucaggauacag

SEQ ID NO: 2237644 - RNA, 19 nt, Artificial Sequence
  Description of Artificial Sequence: Synthetic oligonucleotide
  Sense strand starting at position 2890 of SEQ ID NO: 1884066
auauuuguuacucguguca

SEQ ID NO: 2237645 - RNA, 19 nt, Artificial Sequence
  Description of Artificial Sequence: Synthetic oligonucleotide
  Antisense strand to SEQ ID NO: 2237644
ugacacgaguaacaaauau

SEQ ID NO: 2237646 - RNA, 19 nt, Artificial Sequence
  Description of Artificial Sequence: Synthetic oligonucleotide
  Sense strand starting at position 2984 of SEQ ID NO: 1884066
uguauaggauccuuucuua

SEQ ID NO: 2237647 - RNA, 19 nt, Artificial Sequence
  Description of Artificial Sequence: Synthetic oligonucleotide
  Antisense strand to SEQ ID NO: 2237646
uaagaaaggauccuauaca

SEQ ID NO: 2237648 - RNA, 19 nt, Artificial Sequence
  Description of Artificial Sequence: Synthetic oligonucleotide
  Sense strand starting at position 3017 of SEQ ID NO: 1884066
uacacauguguguauagga

SEQ ID NO: 2237649 - RNA, 19 nt, Artificial Sequence
  Description of Artificial Sequence: Synthetic oligonucleotide
  Antisense strand to SEQ ID NO: 2237648
uccuauacacacaugugua

SEQ ID NO: 2237650 - RNA, 19 nt, Artificial Sequence
  Description of Artificial Sequence: Synthetic oligonucleotide
  Sense strand starting at position 3062 of SEQ ID NO: 1884066
uguauuuaguucuugguua

SEQ ID NO: 2237651 - RNA, 19 nt, Artificial Sequence
  Description of Artificial Sequence: Synthetic oligonucleotide
  Antisense strand to SEQ ID NO: 2237650
uaaccaagaacuaaauaca

SEQ ID NO: 2237652 - RNA, 19 nt, Artificial Sequence
  Description of Artificial Sequence: Synthetic oligonucleotide
  Sense strand starting at position 3483 of SEQ ID NO: 1884066
ggccuauaagucuauuaau

SEQ ID NO: 2237653 - RNA, 19 nt, Artificial Sequence
  Description of Artificial Sequence: Synthetic oligonucleotide
  Antisense strand to SEQ ID NO: 2237652
auuaauagacuuauaggcc

SEQ ID NO: 2237654 - RNA, 19 nt, Artificial Sequence
  Description of Artificial Sequence: Synthetic oligonucleotide
  Sense strand starting at position 3554 of SEQ ID NO: 1884066
gugaauuaugcacauguag

SEQ ID NO: 2237655 - RNA, 19 nt, Artificial Sequence
  Description of Artificial Sequence: Synthetic oligonucleotide
  Antisense strand to SEQ ID NO: 2237654
cuacaugugcauaauucac

SEQ ID NO: 2237656 - RNA, 19 nt, Artificial Sequence
  Description of Artificial Sequence: Synthetic oligonucleotide
  Sense strand starting at position 3563 of SEQ ID NO: 1884066
gcacauguaguccaauaug

SEQ ID NO: 2237657 - RNA, 19 nt, Artificial Sequence
  Description of Artificial Sequence: Synthetic oligonucleotide
  Antisense strand to SEQ ID NO: 2237656
cauauuggacuacaugugc

SEQ ID NO: 2237658 - RNA, 19 nt, Artificial Sequence
  Description of Artificial Sequence: Synthetic oligonucleotide
  Sense strand starting at position 3566 of SEQ ID NO: 1884066
cauguaguccaauauguga

SEQ ID NO: 2237659 - RNA, 19 nt, Artificial Sequence
  Description of Artificial Sequence: Synthetic oligonucleotide
  Antisense strand to SEQ ID NO: 2237658
ucacauauuggacuacaug

SEQ ID NO: 2237660 - RNA, 19 nt, Artificial Sequence
  Description of Artificial Sequence: Synthetic oligonucleotide
  Sense strand starting at position 3675 of SEQ ID NO: 1884066
uguuaaagacuaugacuca

SEQ ID NO: 2237661 - RNA, 19 nt, Artificial Sequence
  Description of Artificial Sequence: Synthetic oligonucleotide
  Antisense strand to SEQ ID NO: 2237660
ugagucauagucuuuaaca

SEQ ID NO: 2237662 - RNA, 19 nt, Artificial Sequence
  Description of Artificial Sequence: Synthetic oligonucleotide
  Sense strand starting at position 3697 of SEQ ID NO: 1884066
gcuacagaucuuuaugaca

SEQ ID NO: 2237663 - RNA, 19 nt, Artificial Sequence
  Description of Artificial Sequence: Synthetic oligonucleotide
  Antisense strand to SEQ ID NO: 2237662
ugucauaaagaucuguagc

SEQ ID NO: 2237664 - RNA, 19 nt, Artificial Sequence
  Description of Artificial Sequence: Synthetic oligonucleotide
  Sense strand starting at position 3844 of SEQ ID NO: 1884066
cuuugcacugaguaauauu

SEQ ID NO: 2237665 - RNA, 19 nt, Artificial Sequence
  Description of Artificial Sequence: Synthetic oligonucleotide
  Antisense strand to SEQ ID NO: 2237664
aauauuacucagugcaaag

SEQ ID NO: 2237666 - RNA, 19 nt, Artificial Sequence
  Description of Artificial Sequence: Synthetic oligonucleotide
  Sense strand starting at position 3902 of SEQ ID NO: 1884066
uuauuugccugaguuuauu

SEQ ID NO: 2237667 - RNA, 19 nt, Artificial Sequence
  Description of Artificial Sequence: Synthetic oligonucleotide
  Antisense strand to SEQ ID NO: 2237666
aauaaacucaggcaaauaa

SEQ ID NO: 2237668 - RNA, 19 nt, Artificial Sequence
  Description of Artificial Sequence: Synthetic oligonucleotide
  Sense strand starting at position 105 of SEQ ID NO: 1884067
aauuguauguaggcaaaua

SEQ ID NO: 2237669 - RNA, 19 nt, Artificial Sequence
  Description of Artificial Sequence: Synthetic oligonucleotide
  Antisense strand to SEQ ID NO: 2237668
uauuugccuacauacaauu

SEQ ID NO: 2237670 - RNA, 19 nt, Artificial Sequence
  Description of Artificial Sequence: Synthetic oligonucleotide
  Sense strand starting at position 277 of SEQ ID NO: 1884067
uuggauugcugacuuaaug

SEQ ID NO: 2237671 - RNA, 19 nt, Artificial Sequence
  Description of Artificial Sequence: Synthetic oligonucleotide
  Antisense strand to SEQ ID NO: 2237670
cauuaagucagcaauccaa

SEQ ID NO: 2237672 - RNA, 19 nt, Artificial Sequence
  Description of Artificial Sequence: Synthetic oligonucleotide
  Sense strand starting at position 550 of SEQ ID NO: 1884067
agaagaguguuagcaagag

SEQ ID NO: 2237673 - RNA, 19 nt, Artificial Sequence
  Description of Artificial Sequence: Synthetic oligonucleotide
  Antisense strand to SEQ ID NO: 2237672
cucuugcuaacacucuucu

SEQ ID NO: 2237674 - RNA, 19 nt, Artificial Sequence
  Description of Artificial Sequence: Synthetic oligonucleotide
  Sense strand starting at position 611 of SEQ ID NO: 1884067
gcugaacuccuccacagaa

SEQ ID NO: 2237675 - RNA, 19 nt, Artificial Sequence
  Description of Artificial Sequence: Synthetic oligonucleotide
  Antisense strand to SEQ ID NO: 2237674
uucuguggaggaguucagc

SEQ ID NO: 2237676 - RNA, 19 nt, Artificial Sequence
  Description of Artificial Sequence: Synthetic oligonucleotide
  Sense strand starting at position 625 of SEQ ID NO: 1884067
cagaaaggauuugagcaua

SEQ ID NO: 2237677 - RNA, 19 nt, Artificial Sequence
  Description of Artificial Sequence: Synthetic oligonucleotide
  Antisense strand to SEQ ID NO: 2237676
uaugcucaaauccuuucug

SEQ ID NO: 2237678 - RNA, 19 nt, Artificial Sequence
  Description of Artificial Sequence: Synthetic oligonucleotide
  Sense strand starting at position 665 of SEQ ID NO: 1884067
cucagcagaguuugacaua

SEQ ID NO: 2237679 - RNA, 19 nt, Artificial Sequence
  Description of Artificial Sequence: Synthetic oligonucleotide
  Antisense strand to SEQ ID NO: 2237678
uaugucaaacucugcugag

SEQ ID NO: 2237680 - RNA, 19 nt, Artificial Sequence
  Description of Artificial Sequence: Synthetic oligonucleotide
  Sense strand starting at position 676 of SEQ ID NO: 1884067
uugacauauuuguagauac

SEQ ID NO: 2237681 - RNA, 19 nt, Artificial Sequence
  Description of Artificial Sequence: Synthetic oligonucleotide
  Antisense strand to SEQ ID NO: 2237680
guaucuacaaauaugucaa

SEQ ID NO: 2237682 - RNA, 19 nt, Artificial Sequence
  Description of Artificial Sequence: Synthetic oligonucleotide
  Sense strand starting at position 713 of SEQ ID NO: 1884067
auuauacuccuuuaugguu

SEQ ID NO: 2237683 - RNA, 19 nt, Artificial Sequence
  Description of Artificial Sequence: Synthetic oligonucleotide
  Antisense strand to SEQ ID NO: 2237682
aaccauaaaggaguauaau

SEQ ID NO: 2237684 - RNA, 19 nt, Artificial Sequence
  Description of Artificial Sequence: Synthetic oligonucleotide
  Sense strand starting at position 1316 of SEQ ID NO: 1884067
cagaaagugcuuuacagug

SEQ ID NO: 2237685 - RNA, 19 nt, Artificial Sequence
  Description of Artificial Sequence: Synthetic oligonucleotide
  Antisense strand to SEQ ID NO: 2237684
cacuguaaagcacuuucug

SEQ ID NO: 2237686 - RNA, 19 nt, Artificial Sequence
  Description of Artificial Sequence: Synthetic oligonucleotide
  Sense strand starting at position 1339 of SEQ ID NO: 1884067
auugucuuucuggaguuaa

SEQ ID NO: 2237687 - RNA, 19 nt, Artificial Sequence
  Description of Artificial Sequence: Synthetic oligonucleotide
  Antisense strand to SEQ ID NO: 2237686
uuaacuccagaaagacaau

SEQ ID NO: 2237688 - RNA, 19 nt, Artificial Sequence
  Description of Artificial Sequence: Synthetic oligonucleotide
  Sense strand starting at position 1412 of SEQ ID NO: 1884067
guacauguuggugauaaua

SEQ ID NO: 2237689 - RNA, 19 nt, Artificial Sequence
  Description of Artificial Sequence: Synthetic oligonucleotide
  Antisense strand to SEQ ID NO: 2237688
uauuaucaccaacauguac

SEQ ID NO: 2237690 - RNA, 19 nt, Artificial Sequence
  Description of Artificial Sequence: Synthetic oligonucleotide
  Sense strand starting at position 1526 of SEQ ID NO: 1884067
uauauagagugcuuacaug

SEQ ID NO: 2237691 - RNA, 19 nt, Artificial Sequence
  Description of Artificial Sequence: Synthetic oligonucleotide
  Antisense strand to SEQ ID NO: 2237690
cauguaagcacucuauaua

SEQ ID NO: 2237692 - RNA, 19 nt, Artificial Sequence
  Description of Artificial Sequence: Synthetic oligonucleotide
  Sense strand starting at position 1562 of SEQ ID NO: 1884067
agcacuuuauauguaugaa

SEQ ID NO: 2237693 - RNA, 19 nt, Artificial Sequence
  Description of Artificial Sequence: Synthetic oligonucleotide
  Antisense strand to SEQ ID NO: 2237692
uucauacauauaaagugcu

SEQ ID NO: 2237694 - RNA, 19 nt, Artificial Sequence
  Description of Artificial Sequence: Synthetic oligonucleotide
  Sense strand starting at position 1604 of SEQ ID NO: 1884067
cuaggagguagguauuauc

SEQ ID NO: 2237695 - RNA, 19 nt, Artificial Sequence
  Description of Artificial Sequence: Synthetic oligonucleotide
  Antisense strand to SEQ ID NO: 2237694
gauaauaccuaccuccuag

SEQ ID NO: 2237696 - RNA, 19 nt, Artificial Sequence
  Description of Artificial Sequence: Synthetic oligonucleotide
  Sense strand starting at position 1788 of SEQ ID NO: 1884067
ggaguacccauccaugguu

SEQ ID NO: 2237697 - RNA, 19 nt, Artificial Sequence
  Description of Artificial Sequence: Synthetic oligonucleotide
  Antisense strand to SEQ ID NO: 2237696
aaccauggauggguacucc

SEQ ID NO: 2237698 - RNA, 19 nt, Artificial Sequence
  Description of Artificial Sequence: Synthetic oligonucleotide
  Sense strand starting at position 1837 of SEQ ID NO: 1884067
agaacucuauaggcauuau

SEQ ID NO: 2237699 - RNA, 19 nt, Artificial Sequence
  Description of Artificial Sequence: Synthetic oligonucleotide
  Antisense strand to SEQ ID NO: 2237698
auaaugccuauagaguucu

SEQ ID NO: 2237700 - RNA, 19 nt, Artificial Sequence
  Description of Artificial Sequence: Synthetic oligonucleotide
  Sense strand starting at position 1847 of SEQ ID NO: 1884067
aggcauuaucuuuagguuu

SEQ ID NO: 2237701 - RNA, 19 nt, Artificial Sequence
  Description of Artificial Sequence: Synthetic oligonucleotide
  Antisense strand to SEQ ID NO: 2237700
aaaccuaaagauaaugccu

SEQ ID NO: 2237702 - RNA, 19 nt, Artificial Sequence
  Description of Artificial Sequence: Synthetic oligonucleotide
  Sense strand starting at position 1989 of SEQ ID NO: 1884067
gugcacuguacugacagaa

SEQ ID NO: 2237703 - RNA, 19 nt, Artificial Sequence
  Description of Artificial Sequence: Synthetic oligonucleotide
  Antisense strand to SEQ ID NO: 2237702
uucugucaguacagugcac

SEQ ID NO: 2237704 - RNA, 19 nt, Artificial Sequence
  Description of Artificial Sequence: Synthetic oligonucleotide
  Sense strand starting at position 2049 of SEQ ID NO: 1884067
gaguaugaagaaugucaca

SEQ ID NO: 2237705 - RNA, 19 nt, Artificial Sequence
  Description of Artificial Sequence: Synthetic oligonucleotide
  Antisense strand to SEQ ID NO: 2237704
ugugacauucuucauacuc

SEQ ID NO: 2237706 - RNA, 19 nt, Artificial Sequence
  Description of Artificial Sequence: Synthetic oligonucleotide
  Sense strand starting at position 2359 of SEQ ID NO: 1884067
gcagacuuucuccaaagcu

SEQ ID NO: 2237707 - RNA, 19 nt, Artificial Sequence
  Description of Artificial Sequence: Synthetic oligonucleotide
  Antisense strand to SEQ ID NO: 2237706
agcuuuggagaaagucugc

SEQ ID NO: 2237708 - RNA, 19 nt, Artificial Sequence
  Description of Artificial Sequence: Synthetic oligonucleotide
  Sense strand starting at position 2441 of SEQ ID NO: 1884067
ucaggaacccuacgaagau

SEQ ID NO: 2237709 - RNA, 19 nt, Artificial Sequence
  Description of Artificial Sequence: Synthetic oligonucleotide
  Antisense strand to SEQ ID NO: 2237708
aucuucguaggguuccuga

SEQ ID NO: 2237710 - RNA, 19 nt, Artificial Sequence
  Description of Artificial Sequence: Synthetic oligonucleotide
  Sense strand starting at position 2537 of SEQ ID NO: 1884067
ggacaaauguaaucacguc

SEQ ID NO: 2237711 - RNA, 19 nt, Artificial Sequence
  Description of Artificial Sequence: Synthetic oligonucleotide
  Antisense strand to SEQ ID NO: 2237710
gacgugauuacauuugucc

SEQ ID NO: 2237712 - RNA, 19 nt, Artificial Sequence
  Description of Artificial Sequence: Synthetic oligonucleotide
  Sense strand starting at position 2872 of SEQ ID NO: 1884067
agguaauauucuuuaagca

SEQ ID NO: 2237713 - RNA, 19 nt, Artificial Sequence
  Description of Artificial Sequence: Synthetic oligonucleotide
  Antisense strand to SEQ ID NO: 2237712
ugcuuaaagaauauuaccu

SEQ ID NO: 2237714 - RNA, 19 nt, Artificial Sequence
  Description of Artificial Sequence: Synthetic oligonucleotide
  Sense strand starting at position 2873 of SEQ ID NO: 1884067
gguaauauucuuuaagcaa

SEQ ID NO: 2237715 - RNA, 19 nt, Artificial Sequence
  Description of Artificial Sequence: Synthetic oligonucleotide
  Antisense strand to SEQ ID NO: 2237714
uugcuuaaagaauauuacc

SEQ ID NO: 2237716 - RNA, 19 nt, Artificial Sequence
  Description of Artificial Sequence: Synthetic oligonucleotide
  Sense strand starting at position 3013 of SEQ ID NO: 1884067
aaugcuaauggguguaaga

SEQ ID NO: 2237717 - RNA, 19 nt, Artificial Sequence
  Description of Artificial Sequence: Synthetic oligonucleotide
  Antisense strand to SEQ ID NO: 2237716
ucuuacacccauuagcauu

SEQ ID NO: 2237718 - RNA, 19 nt, Artificial Sequence
  Description of Artificial Sequence: Synthetic oligonucleotide
  Sense strand starting at position 3015 of SEQ ID NO: 1884067
ugcuaauggguguaagaac

SEQ ID NO: 2237719 - RNA, 19 nt, Artificial Sequence
  Description of Artificial Sequence: Synthetic oligonucleotide
  Antisense strand to SEQ ID NO: 2237718
guucuuacacccauuagca

SEQ ID NO: 2237720 - RNA, 19 nt, Artificial Sequence
  Description of Artificial Sequence: Synthetic oligonucleotide
  Sense strand starting at position 3023 of SEQ ID NO: 1884067
gguguaagaaccugacuca

SEQ ID NO: 2237721 - RNA, 19 nt, Artificial Sequence
  Description of Artificial Sequence: Synthetic oligonucleotide
  Antisense strand to SEQ ID NO: 2237720
ugagucagguucuuacacc

SEQ ID NO: 2237722 - RNA, 19 nt, Artificial Sequence
  Description of Artificial Sequence: Synthetic oligonucleotide
  Sense strand starting at position 3171 of SEQ ID NO: 1884067
gugaguaguuauuucaguu

SEQ ID NO: 2237723 - RNA, 19 nt, Artificial Sequence
  Description of Artificial Sequence: Synthetic oligonucleotide
  Antisense strand to SEQ ID NO: 2237722
aacugaaauaacuacucac

SEQ ID NO: 2237724 - RNA, 19 nt, Artificial Sequence
  Description of Artificial Sequence: Synthetic oligonucleotide
  Sense strand starting at position 3387 of SEQ ID NO: 1884067
auaccaugaccucggcaaa

SEQ ID NO: 2237725 - RNA, 19 nt, Artificial Sequence
  Description of Artificial Sequence: Synthetic oligonucleotide
  Antisense strand to SEQ ID NO: 2237724
uuugccgaggucaugguau

SEQ ID NO: 2237726 - RNA, 19 nt, Artificial Sequence
  Description of Artificial Sequence: Synthetic oligonucleotide
  Sense strand starting at position 3441 of SEQ ID NO: 1884067
uggcuaugaguacagauua

SEQ ID NO: 2237727 - RNA, 19 nt, Artificial Sequence
  Description of Artificial Sequence: Synthetic oligonucleotide
  Antisense strand to SEQ ID NO: 2237726
uaaucuguacucauagcca

SEQ ID NO: 2237728 - RNA, 19 nt, Artificial Sequence
  Description of Artificial Sequence: Synthetic oligonucleotide
  Sense strand starting at position 3490 of SEQ ID NO: 1884067
guauuaauaccauacaguu

SEQ ID NO: 2237729 - RNA, 19 nt, Artificial Sequence
  Description of Artificial Sequence: Synthetic oligonucleotide
  Antisense strand to SEQ ID NO: 2237728
aacuguaugguauuaauac

SEQ ID NO: 2237730 - RNA, 19 nt, Artificial Sequence
  Description of Artificial Sequence: Synthetic oligonucleotide
  Sense strand starting at position 3554 of SEQ ID NO: 1884067
agcagcucaguauaaucaa

SEQ ID NO: 2237731 - RNA, 19 nt, Artificial Sequence
  Description of Artificial Sequence: Synthetic oligonucleotide
  Antisense strand to SEQ ID NO: 2237730
uugauuauacugagcugcu

SEQ ID NO: 2237732 - RNA, 19 nt, Artificial Sequence
  Description of Artificial Sequence: Synthetic oligonucleotide
  Sense strand starting at position 3580 of SEQ ID NO: 1884067
cuuuaaagagguugacagu

SEQ ID NO: 2237733 - RNA, 19 nt, Artificial Sequence
  Description of Artificial Sequence: Synthetic oligonucleotide
  Antisense strand to SEQ ID NO: 2237732
acugucaaccucuuuaaag

SEQ ID NO: 2237734 - RNA, 19 nt, Artificial Sequence
  Description of Artificial Sequence: Synthetic oligonucleotide
  Sense strand starting at position 3606 of SEQ ID NO: 1884067
auguaauauccuggaaguu

SEQ ID NO: 2237735 - RNA, 19 nt, Artificial Sequence
  Description of Artificial Sequence: Synthetic oligonucleotide
  Antisense strand to SEQ ID NO: 2237734
aacuuccaggauauuacau

SEQ ID NO: 2237736 - RNA, 19 nt, Artificial Sequence
  Description of Artificial Sequence: Synthetic oligonucleotide
  Sense strand starting at position 3607 of SEQ ID NO: 1884067
uguaauauccuggaaguuu

SEQ ID NO: 2237737 - RNA, 19 nt, Artificial Sequence
  Description of Artificial Sequence: Synthetic oligonucleotide
  Antisense strand to SEQ ID NO: 2237736
aaacuuccaggauauuaca

SEQ ID NO: 2237738 - RNA, 19 nt, Artificial Sequence
  Description of Artificial Sequence: Synthetic oligonucleotide
  Sense strand starting at position 3636 of SEQ ID NO: 1884067
gugcacuucugauuugcau

SEQ ID NO: 2237739 - RNA, 19 nt, Artificial Sequence
  Description of Artificial Sequence: Synthetic oligonucleotide
  Antisense strand to SEQ ID NO: 2237738
augcaaaucagaagugcac

SEQ ID NO: 2237740 - RNA, 19 nt, Artificial Sequence
  Description of Artificial Sequence: Synthetic oligonucleotide
  Sense strand starting at position 3665 of SEQ ID NO: 1884067
gucauuacuggugaauaca

SEQ ID NO: 2237741 - RNA, 19 nt, Artificial Sequence
  Description of Artificial Sequence: Synthetic oligonucleotide
  Antisense strand to SEQ ID NO: 2237740
uguauucaccaguaaugac

SEQ ID NO: 2237742 - RNA, 19 nt, Artificial Sequence
  Description of Artificial Sequence: Synthetic oligonucleotide
  Sense strand starting at position 3711 of SEQ ID NO: 1884067
gauguagauugaucucuga

SEQ ID NO: 2237743 - RNA, 19 nt, Artificial Sequence
  Description of Artificial Sequence: Synthetic oligonucleotide
  Antisense strand to SEQ ID NO: 2237742
ucagagaucaaucuacauc

SEQ ID NO: 2237744 - RNA, 19 nt, Artificial Sequence
  Description of Artificial Sequence: Synthetic oligonucleotide
  Sense strand starting at position 3714 of SEQ ID NO: 1884067
guagauugaucucugauau

SEQ ID NO: 2237745 - RNA, 19 nt, Artificial Sequence
  Description of Artificial Sequence: Synthetic oligonucleotide
  Antisense strand to SEQ ID NO: 2237744
auaucagagaucaaucuac

SEQ ID NO: 2237746 - RNA, 19 nt, Artificial Sequence
  Description of Artificial Sequence: Synthetic oligonucleotide
  Sense strand starting at position 3959 of SEQ ID NO: 1884067
guagaagucgaucacuauu

SEQ ID NO: 2237747 - RNA, 19 nt, Artificial Sequence
  Description of Artificial Sequence: Synthetic oligonucleotide
  Antisense strand to SEQ ID NO: 2237746
aauagugaucgacuucuac

SEQ ID NO: 2237748 - RNA, 19 nt, Artificial Sequence
  Description of Artificial Sequence: Synthetic oligonucleotide
  Sense strand starting at position 14 of SEQ ID NO: 1884068
ccagcagugacuuacgaga

SEQ ID NO: 2237749 - RNA, 19 nt, Artificial Sequence
  Description of Artificial Sequence: Synthetic oligonucleotide
  Antisense strand to SEQ ID NO: 2237748
ucucguaagucacugcugg

SEQ ID NO: 2237750 - RNA, 19 nt, Artificial Sequence
  Description of Artificial Sequence: Synthetic oligonucleotide
  Sense strand starting at position 350 of SEQ ID NO: 1884068
aacucuuggcaagggauua

SEQ ID NO: 2237751 - RNA, 19 nt, Artificial Sequence
  Description of Artificial Sequence: Synthetic oligonucleotide
  Antisense strand to SEQ ID NO: 2237750
uaaucccuugccaagaguu

SEQ ID NO: 2237752 - RNA, 19 nt, Artificial Sequence
  Description of Artificial Sequence: Synthetic oligonucleotide
  Sense strand starting at position 362 of SEQ ID NO: 1884068
gggauuaauucuccugccu

SEQ ID NO: 2237753 - RNA, 19 nt, Artificial Sequence
  Description of Artificial Sequence: Synthetic oligonucleotide
  Antisense strand to SEQ ID NO: 2237752
aggcaggagaauuaauccc

SEQ ID NO: 2237754 - RNA, 19 nt, Artificial Sequence
  Description of Artificial Sequence: Synthetic oligonucleotide
  Sense strand starting at position 438 of SEQ ID NO: 1884068
uuucuugaugucugugaag

SEQ ID NO: 2237755 - RNA, 19 nt, Artificial Sequence
  Description of Artificial Sequence: Synthetic oligonucleotide
  Antisense strand to SEQ ID NO: 2237754
cuucacagacaucaagaaa

SEQ ID NO: 2237756 - RNA, 19 nt, Artificial Sequence
  Description of Artificial Sequence: Synthetic oligonucleotide
  Sense strand starting at position 440 of SEQ ID NO: 1884068
ucuugaugucugugaagac

SEQ ID NO: 2237757 - RNA, 19 nt, Artificial Sequence
  Description of Artificial Sequence: Synthetic oligonucleotide
  Antisense strand to SEQ ID NO: 2237756
gucuucacagacaucaaga

SEQ ID NO: 2237758 - RNA, 19 nt, Artificial Sequence
  Description of Artificial Sequence: Synthetic oligonucleotide
  Sense strand starting at position 592 of SEQ ID NO: 1884068
gguggagugagguguuuga

SEQ ID NO: 2237759 - RNA, 19 nt, Artificial Sequence
  Description of Artificial Sequence: Synthetic oligonucleotide
  Antisense strand to SEQ ID NO: 2237758
ucaaacaccucacuccacc

SEQ ID NO: 2237760 - RNA, 19 nt, Artificial Sequence
  Description of Artificial Sequence: Synthetic oligonucleotide
  Sense strand starting at position 595 of SEQ ID NO: 1884068
ggagugagguguuugauag

SEQ ID NO: 2237761 - RNA, 19 nt, Artificial Sequence
  Description of Artificial Sequence: Synthetic oligonucleotide
  Antisense strand to SEQ ID NO: 2237760
cuaucaaacaccucacucc

SEQ ID NO: 2237762 - RNA, 19 nt, Artificial Sequence
  Description of Artificial Sequence: Synthetic oligonucleotide
  Sense strand starting at position 714 of SEQ ID NO: 1884068
uuguuaaacccucagucua

SEQ ID NO: 2237763 - RNA, 19 nt, Artificial Sequence
  Description of Artificial Sequence: Synthetic oligonucleotide
  Antisense strand to SEQ ID NO: 2237762
uagacugaggguuuaacaa

SEQ ID NO: 2237764 - RNA, 19 nt, Artificial Sequence
  Description of Artificial Sequence: Synthetic oligonucleotide
  Sense strand starting at position 716 of SEQ ID NO: 1884068
guuaaacccucagucuauu

SEQ ID NO: 2237765 - RNA, 19 nt, Artificial Sequence
  Description of Artificial Sequence: Synthetic oligonucleotide
  Antisense strand to SEQ ID NO: 2237764
aauagacugaggguuuaac

SEQ ID NO: 2237766 - RNA, 19 nt, Artificial Sequence
  Description of Artificial Sequence: Synthetic oligonucleotide
  Sense strand starting at position 1090 of SEQ ID NO: 1884068
cagcuuugaccuggauauc

SEQ ID NO: 2237767 - RNA, 19 nt, Artificial Sequence
  Description of Artificial Sequence: Synthetic oligonucleotide
  Antisense strand to SEQ ID NO: 2237766
gauauccaggucaaagcug

SEQ ID NO: 2237768 - RNA, 19 nt, Artificial Sequence
  Description of Artificial Sequence: Synthetic oligonucleotide
  Sense strand starting at position 1091 of SEQ ID NO: 1884068
agcuuugaccuggauaucu

SEQ ID NO: 2237769 - RNA, 19 nt, Artificial Sequence
  Description of Artificial Sequence: Synthetic oligonucleotide
  Antisense strand to SEQ ID NO: 2237768
agauauccaggucaaagcu

SEQ ID NO: 2237770 - RNA, 19 nt, Artificial Sequence
  Description of Artificial Sequence: Synthetic oligonucleotide
  Sense strand starting at position 1182 of SEQ ID NO: 1884068
ggaucaauuucccagggag

SEQ ID NO: 2237771 - RNA, 19 nt, Artificial Sequence
  Description of Artificial Sequence: Synthetic oligonucleotide
  Antisense strand to SEQ ID NO: 2237770
cucccugggaaauugaucc

SEQ ID NO: 2237772 - RNA, 19 nt, Artificial Sequence
  Description of Artificial Sequence: Synthetic oligonucleotide
  Sense strand starting at position 1238 of SEQ ID NO: 1884068
acauguuacucagcacaga

SEQ ID NO: 2237773 - RNA, 19 nt, Artificial Sequence
  Description of Artificial Sequence: Synthetic oligonucleotide
  Antisense strand to SEQ ID NO: 2237772
ucugugcugaguaacaugu

SEQ ID NO: 2237774 - RNA, 19 nt, Artificial Sequence
  Description of Artificial Sequence: Synthetic oligonucleotide
  Sense strand starting at position 1264 of SEQ ID NO: 1884068
cucaguaaauguguggaca

SEQ ID NO: 2237775 - RNA, 19 nt, Artificial Sequence
  Description of Artificial Sequence: Synthetic oligonucleotide
  Antisense strand to SEQ ID NO: 2237774
uguccacacauuuacugag

SEQ ID NO: 2237776 - RNA, 19 nt, Artificial Sequence
  Description of Artificial Sequence: Synthetic oligonucleotide
  Sense strand starting at position 1265 of SEQ ID NO: 1884068
ucaguaaauguguggacau

SEQ ID NO: 2237777 - RNA, 19 nt, Artificial Sequence
  Description of Artificial Sequence: Synthetic oligonucleotide
  Antisense strand to SEQ ID NO: 2237776
auguccacacauuuacuga

SEQ ID NO: 2237778 - RNA, 19 nt, Artificial Sequence
  Description of Artificial Sequence: Synthetic oligonucleotide
  Sense strand starting at position 1339 of SEQ ID NO: 1884068
ucuuacuuggugcauaaua

SEQ ID NO: 2237779 - RNA, 19 nt, Artificial Sequence
  Description of Artificial Sequence: Synthetic oligonucleotide
  Antisense strand to SEQ ID NO: 2237778
uauuaugcaccaaguaaga

SEQ ID NO: 2237780 - RNA, 19 nt, Artificial Sequence
  Description of Artificial Sequence: Synthetic oligonucleotide
  Sense strand starting at position 1341 of SEQ ID NO: 1884068
uuacuuggugcauaauaua

SEQ ID NO: 2237781 - RNA, 19 nt, Artificial Sequence
  Description of Artificial Sequence: Synthetic oligonucleotide
  Antisense strand to SEQ ID NO: 2237780
uauauuaugcaccaaguaa

SEQ ID NO: 2237782 - RNA, 19 nt, Artificial Sequence
  Description of Artificial Sequence: Synthetic oligonucleotide
  Sense strand starting at position 1379 of SEQ ID NO: 1884068
ggauuaacucccugaauuc

SEQ ID NO: 2237783 - RNA, 19 nt, Artificial Sequence
  Description of Artificial Sequence: Synthetic oligonucleotide
  Antisense strand to SEQ ID NO: 2237782
gaauucagggaguuaaucc

SEQ ID NO: 2237784 - RNA, 19 nt, Artificial Sequence
  Description of Artificial Sequence: Synthetic oligonucleotide
  Sense strand starting at position 1438 of SEQ ID NO: 1884068
cugaucugugaagguaaga

SEQ ID NO: 2237785 - RNA, 19 nt, Artificial Sequence
  Description of Artificial Sequence: Synthetic oligonucleotide
  Antisense strand to SEQ ID NO: 2237784
ucuuaccuucacagaucag

SEQ ID NO: 2237786 - RNA, 19 nt, Artificial Sequence
  Description of Artificial Sequence: Synthetic oligonucleotide
  Sense strand starting at position 2104 of SEQ ID NO: 1884068
ccucgagggcucugagaaa

SEQ ID NO: 2237787 - RNA, 19 nt, Artificial Sequence
  Description of Artificial Sequence: Synthetic oligonucleotide
  Antisense strand to SEQ ID NO: 2237786
uuucucagagcccucgagg

SEQ ID NO: 2237788 - RNA, 19 nt, Artificial Sequence
  Description of Artificial Sequence: Synthetic oligonucleotide
  Sense strand starting at position 2169 of SEQ ID NO: 1884068
ggcugugauuugaagacgu

SEQ ID NO: 2237789 - RNA, 19 nt, Artificial Sequence
  Description of Artificial Sequence: Synthetic oligonucleotide
  Antisense strand to SEQ ID NO: 2237788
acgucuucaaaucacagcc

SEQ ID NO: 2237790 - RNA, 19 nt, Artificial Sequence
  Description of Artificial Sequence: Synthetic oligonucleotide
  Sense strand starting at position 2177 of SEQ ID NO: 1884068
uuugaagacguugauuaua

SEQ ID NO: 2237791 - RNA, 19 nt, Artificial Sequence
  Description of Artificial Sequence: Synthetic oligonucleotide
  Antisense strand to SEQ ID NO: 2237790
uauaaucaacgucuucaaa

SEQ ID NO: 2237792 - RNA, 19 nt, Artificial Sequence
  Description of Artificial Sequence: Synthetic oligonucleotide
  Sense strand starting at position 2180 of SEQ ID NO: 1884068
gaagacguugauuauaugu

SEQ ID NO: 2237793 - RNA, 19 nt, Artificial Sequence
  Description of Artificial Sequence: Synthetic oligonucleotide
  Antisense strand to SEQ ID NO: 2237792
acauauaaucaacgucuuc

SEQ ID NO: 2237794 - RNA, 19 nt, Artificial Sequence
  Description of Artificial Sequence: Synthetic oligonucleotide
  Sense strand starting at position 2212 of SEQ ID NO: 1884068
cagagcuugccauaucugu

SEQ ID NO: 2237795 - RNA, 19 nt, Artificial Sequence
  Description of Artificial Sequence: Synthetic oligonucleotide
  Antisense strand to SEQ ID NO: 2237794
acagauauggcaagcucug

SEQ ID NO: 2237796 - RNA, 19 nt, Artificial Sequence
  Description of Artificial Sequence: Synthetic oligonucleotide
  Sense strand starting at position 2218 of SEQ ID NO: 1884068
uugccauaucuguaguaga

SEQ ID NO: 2237797 - RNA, 19 nt, Artificial Sequence
  Description of Artificial Sequence: Synthetic oligonucleotide
  Antisense strand to SEQ ID NO: 2237796
ucuacuacagauauggcaa

SEQ ID NO: 2237798 - RNA, 19 nt, Artificial Sequence
  Description of Artificial Sequence: Synthetic oligonucleotide
  Sense strand starting at position 2828 of SEQ ID NO: 1884068
uaugauuaacgugggcaca

SEQ ID NO: 2237799 - RNA, 19 nt, Artificial Sequence
  Description of Artificial Sequence: Synthetic oligonucleotide
  Antisense strand to SEQ ID NO: 2237798
ugugcccacguuaaucaua

SEQ ID NO: 2237800 - RNA, 19 nt, Artificial Sequence
  Description of Artificial Sequence: Synthetic oligonucleotide
  Sense strand starting at position 2876 of SEQ ID NO: 1884068
cucucaaaccuugguguga

SEQ ID NO: 2237801 - RNA, 19 nt, Artificial Sequence
  Description of Artificial Sequence: Synthetic oligonucleotide
  Antisense strand to SEQ ID NO: 2237800
ucacaccaagguuugagag

SEQ ID NO: 2237802 - RNA, 19 nt, Artificial Sequence
  Description of Artificial Sequence: Synthetic oligonucleotide
  Sense strand starting at position 2880 of SEQ ID NO: 1884068
caaaccuuggugugaggaa

SEQ ID NO: 2237803 - RNA, 19 nt, Artificial Sequence
  Description of Artificial Sequence: Synthetic oligonucleotide
  Antisense strand to SEQ ID NO: 2237802
uuccucacaccaagguuug

SEQ ID NO: 2237804 - RNA, 19 nt, Artificial Sequence
  Description of Artificial Sequence: Synthetic oligonucleotide
  Sense strand starting at position 2945 of SEQ ID NO: 1884068
aucagugguucugcaagga

SEQ ID NO: 2237805 - RNA, 19 nt, Artificial Sequence
  Description of Artificial Sequence: Synthetic oligonucleotide
  Antisense strand to SEQ ID NO: 2237804
uccuugcagaaccacugau

SEQ ID NO: 2237806 - RNA, 19 nt, Artificial Sequence
  Description of Artificial Sequence: Synthetic oligonucleotide
  Sense strand starting at position 3630 of SEQ ID NO: 1884068
aguuacugucaagagucua

SEQ ID NO: 2237807 - RNA, 19 nt, Artificial Sequence
  Description of Artificial Sequence: Synthetic oligonucleotide
  Antisense strand to SEQ ID NO: 2237806
uagacucuugacaguaacu

SEQ ID NO: 2237808 - RNA, 19 nt, Artificial Sequence
  Description of Artificial Sequence: Synthetic oligonucleotide
  Sense strand starting at position 3713 of SEQ ID NO: 1884068
gguuaugaugcccaguuga

SEQ ID NO: 2237809 - RNA, 19 nt, Artificial Sequence
  Description of Artificial Sequence: Synthetic oligonucleotide
  Antisense strand to SEQ ID NO: 2237808
ucaacugggcaucauaacc

SEQ ID NO: 2237810 - RNA, 19 nt, Artificial Sequence
  Description of Artificial Sequence: Synthetic oligonucleotide
  Sense strand starting at position 3749 of SEQ ID NO: 1884068
uugggaugugcuugauauu

SEQ ID NO: 2237811 - RNA, 19 nt, Artificial Sequence
  Description of Artificial Sequence: Synthetic oligonucleotide
  Antisense strand to SEQ ID NO: 2237810
aauaucaagcacaucccaa

SEQ ID NO: 2237812 - RNA, 19 nt, Artificial Sequence
  Description of Artificial Sequence: Synthetic oligonucleotide
  Sense strand starting at position 3750 of SEQ ID NO: 1884068
ugggaugugcuugauauug

SEQ ID NO: 2237813 - RNA, 19 nt, Artificial Sequence
  Description of Artificial Sequence: Synthetic oligonucleotide
  Antisense strand to SEQ ID NO: 2237812
caauaucaagcacauccca

SEQ ID NO: 2237814 - RNA, 19 nt, Artificial Sequence
  Description of Artificial Sequence: Synthetic oligonucleotide
  Sense strand starting at position 3768 of SEQ ID NO: 1884068
guuggcuugagucacuuau

SEQ ID NO: 2237815 - RNA, 19 nt, Artificial Sequence
  Description of Artificial Sequence: Synthetic oligonucleotide
  Antisense strand to SEQ ID NO: 2237814
auaagugacucaagccaac

SEQ ID NO: 2237816 - RNA, 19 nt, Artificial Sequence
  Description of Artificial Sequence: Synthetic oligonucleotide
  Sense strand starting at position 3770 of SEQ ID NO: 1884068
uggcuugagucacuuauug

SEQ ID NO: 2237817 - RNA, 19 nt, Artificial Sequence
  Description of Artificial Sequence: Synthetic oligonucleotide
  Antisense strand to SEQ ID NO: 2237816
caauaagugacucaagcca

SEQ ID NO: 2237818 - RNA, 19 nt, Artificial Sequence
  Description of Artificial Sequence: Synthetic oligonucleotide
  Sense strand starting at position 3772 of SEQ ID NO: 1884068
gcuugagucacuuauuggu

SEQ ID NO: 2237819 - RNA, 19 nt, Artificial Sequence
  Description of Artificial Sequence: Synthetic oligonucleotide
  Antisense strand to SEQ ID NO: 2237818
accaauaagugacucaagc

SEQ ID NO: 2237820 - RNA, 19 nt, Artificial Sequence
  Description of Artificial Sequence: Synthetic oligonucleotide
  Sense strand starting at position 3780 of SEQ ID NO: 1884068
cacuuauugguguggaaua

SEQ ID NO: 2237821 - RNA, 19 nt, Artificial Sequence
  Description of Artificial Sequence: Synthetic oligonucleotide
  Antisense strand to SEQ ID NO: 2237820
uauuccacaccaauaagug

SEQ ID NO: 2237822 - RNA, 19 nt, Artificial Sequence
  Description of Artificial Sequence: Synthetic oligonucleotide
  Sense strand starting at position 3782 of SEQ ID NO: 1884068
cuuauugguguggaauagu

SEQ ID NO: 2237823 - RNA, 19 nt, Artificial Sequence
  Description of Artificial Sequence: Synthetic oligonucleotide
  Antisense strand to SEQ ID NO: 2237822
acuauuccacaccaauaag

SEQ ID NO: 2237824 - RNA, 19 nt, Artificial Sequence
  Description of Artificial Sequence: Synthetic oligonucleotide
  Sense strand starting at position 3785 of SEQ ID NO: 1884068
auugguguggaauagugaa

SEQ ID NO: 2237825 - RNA, 19 nt, Artificial Sequence
  Description of Artificial Sequence: Synthetic oligonucleotide
  Antisense strand to SEQ ID NO: 2237824
uucacuauuccacaccaau

SEQ ID NO: 2237826 - RNA, 19 nt, Artificial Sequence
  Description of Artificial Sequence: Synthetic oligonucleotide
  Sense strand starting at position 3870 of SEQ ID NO: 1884068
uuggaccaguuccuuaauu

SEQ ID NO: 2237827 - RNA, 19 nt, Artificial Sequence
  Description of Artificial Sequence: Synthetic oligonucleotide
  Antisense strand to SEQ ID NO: 2237826
aauuaaggaacugguccaa

SEQ ID NO: 2237828 - RNA, 19 nt, Artificial Sequence
  Description of Artificial Sequence: Synthetic oligonucleotide
  Sense strand starting at position 464 of SEQ ID NO: 1884069
uguuaacaugaauagcaua

SEQ ID NO: 2237829 - RNA, 19 nt, Artificial Sequence
  Description of Artificial Sequence: Synthetic oligonucleotide
  Antisense strand to SEQ ID NO: 2237828
uaugcuauucauguuaaca

SEQ ID NO: 2237830 - RNA, 19 nt, Artificial Sequence
  Description of Artificial Sequence: Synthetic oligonucleotide
  Sense strand starting at position 565 of SEQ ID NO: 1884069
uucuuuaaugucuggcaua

SEQ ID NO: 2237831 - RNA, 19 nt, Artificial Sequence
  Description of Artificial Sequence: Synthetic oligonucleotide
  Antisense strand to SEQ ID NO: 2237830
uaugccagacauuaaagaa

SEQ ID NO: 2237832 - RNA, 19 nt, Artificial Sequence
  Description of Artificial Sequence: Synthetic oligonucleotide
  Sense strand starting at position 570 of SEQ ID NO: 1884069
uaaugucuggcauaacaga

SEQ ID NO: 2237833 - RNA, 19 nt, Artificial Sequence
  Description of Artificial Sequence: Synthetic oligonucleotide
  Antisense strand to SEQ ID NO: 2237832
ucuguuaugccagacauua

SEQ ID NO: 2237834 - RNA, 19 nt, Artificial Sequence
  Description of Artificial Sequence: Synthetic oligonucleotide
  Sense strand starting at position 810 of SEQ ID NO: 1884069
ggacuuagcucuucuagcu

SEQ ID NO: 2237835 - RNA, 19 nt, Artificial Sequence
  Description of Artificial Sequence: Synthetic oligonucleotide
  Antisense strand to SEQ ID NO: 2237834
agcuagaagagcuaagucc

SEQ ID NO: 2237836 - RNA, 19 nt, Artificial Sequence
  Description of Artificial Sequence: Synthetic oligonucleotide
  Sense strand starting at position 864 of SEQ ID NO: 1884069
ucucuuaauuugggaggua

SEQ ID NO: 2237837 - RNA, 19 nt, Artificial Sequence
  Description of Artificial Sequence: Synthetic oligonucleotide
  Antisense strand to SEQ ID NO: 2237836
uaccucccaaauuaagaga

SEQ ID NO: 2237838 - RNA, 19 nt, Artificial Sequence
  Description of Artificial Sequence: Synthetic oligonucleotide
  Sense strand starting at position 876 of SEQ ID NO: 1884069
ggagguaguaauuaugugu

SEQ ID NO: 2237839 - RNA, 19 nt, Artificial Sequence
  Description of Artificial Sequence: Synthetic oligonucleotide
  Antisense strand to SEQ ID NO: 2237838
acacauaauuacuaccucc

SEQ ID NO: 2237840 - RNA, 19 nt, Artificial Sequence
  Description of Artificial Sequence: Synthetic oligonucleotide
  Sense strand starting at position 879 of SEQ ID NO: 1884069
gguaguaauuauguguuua

SEQ ID NO: 2237841 - RNA, 19 nt, Artificial Sequence
  Description of Artificial Sequence: Synthetic oligonucleotide
  Antisense strand to SEQ ID NO: 2237840
uaaacacauaauuacuacc

SEQ ID NO: 2237842 - RNA, 19 nt, Artificial Sequence
  Description of Artificial Sequence: Synthetic oligonucleotide
  Sense strand starting at position 902 of SEQ ID NO: 1884069
cuugucuucuaacuuagga

SEQ ID NO: 2237843 - RNA, 19 nt, Artificial Sequence
  Description of Artificial Sequence: Synthetic oligonucleotide
  Antisense strand to SEQ ID NO: 2237842
uccuaaguuagaagacaag

SEQ ID NO: 2237844 - RNA, 19 nt, Artificial Sequence
  Description of Artificial Sequence: Synthetic oligonucleotide
  Sense strand starting at position 915 of SEQ ID NO: 1884069
uuaggauuccagugucuuu

SEQ ID NO: 2237845 - RNA, 19 nt, Artificial Sequence
  Description of Artificial Sequence: Synthetic oligonucleotide
  Antisense strand to SEQ ID NO: 2237844
aaagacacuggaauccuaa

SEQ ID NO: 2237846 - RNA, 19 nt, Artificial Sequence
  Description of Artificial Sequence: Synthetic oligonucleotide
  Sense strand starting at position 920 of SEQ ID NO: 1884069
auuccagugucuuuccaau

SEQ ID NO: 2237847 - RNA, 19 nt, Artificial Sequence
  Description of Artificial Sequence: Synthetic oligonucleotide
  Antisense strand to SEQ ID NO: 2237846
auuggaaagacacuggaau

SEQ ID NO: 2237848 - RNA, 19 nt, Artificial Sequence
  Description of Artificial Sequence: Synthetic oligonucleotide
  Sense strand starting at position 938 of SEQ ID NO: 1884069
uuauaaauagucugucaac

SEQ ID NO: 2237849 - RNA, 19 nt, Artificial Sequence
  Description of Artificial Sequence: Synthetic oligonucleotide
  Antisense strand to SEQ ID NO: 2237848
guugacagacuauuuauaa

SEQ ID NO: 2237850 - RNA, 19 nt, Artificial Sequence
  Description of Artificial Sequence: Synthetic oligonucleotide
  Sense strand starting at position 1088 of SEQ ID NO: 1884069
guuguuugucucuauugag

SEQ ID NO: 2237851 - RNA, 19 nt, Artificial Sequence
  Description of Artificial Sequence: Synthetic oligonucleotide
  Antisense strand to SEQ ID NO: 2237850
cucaauagagacaaacaac

SEQ ID NO: 2237852 - RNA, 19 nt, Artificial Sequence
  Description of Artificial Sequence: Synthetic oligonucleotide
  Sense strand starting at position 1097 of SEQ ID NO: 1884069
cucuauugagauugugacu

SEQ ID NO: 2237853 - RNA, 19 nt, Artificial Sequence
  Description of Artificial Sequence: Synthetic oligonucleotide
  Antisense strand to SEQ ID NO: 2237852
agucacaaucucaauagag

SEQ ID NO: 2237854 - RNA, 19 nt, Artificial Sequence
  Description of Artificial Sequence: Synthetic oligonucleotide
  Sense strand starting at position 1102 of SEQ ID NO: 1884069
uugagauugugacuuuauu

SEQ ID NO: 2237855 - RNA, 19 nt, Artificial Sequence
  Description of Artificial Sequence: Synthetic oligonucleotide
  Antisense strand to SEQ ID NO: 2237854
aauaaagucacaaucucaa

SEQ ID NO: 2237856 - RNA, 19 nt, Artificial Sequence
  Description of Artificial Sequence: Synthetic oligonucleotide
  Sense strand starting at position 1168 of SEQ ID NO: 1884069
uguccaaauggccauaauu

SEQ ID NO: 2237857 - RNA, 19 nt, Artificial Sequence
  Description of Artificial Sequence: Synthetic oligonucleotide
  Antisense strand to SEQ ID NO: 2237856
aauuauggccauuuggaca

SEQ ID NO: 2237858 - RNA, 19 nt, Artificial Sequence
  Description of Artificial Sequence: Synthetic oligonucleotide
  Sense strand starting at position 1177 of SEQ ID NO: 1884069
ggccauaauuauguugaau

SEQ ID NO: 2237859 - RNA, 19 nt, Artificial Sequence
  Description of Artificial Sequence: Synthetic oligonucleotide
  Antisense strand to SEQ ID NO: 2237858
auucaacauaauuauggcc

SEQ ID NO: 2237860 - RNA, 19 nt, Artificial Sequence
  Description of Artificial Sequence: Synthetic oligonucleotide
  Sense strand starting at position 1615 of SEQ ID NO: 1884069
cggcccaauuucuaaauuu

SEQ ID NO: 2237861 - RNA, 19 nt, Artificial Sequence
  Description of Artificial Sequence: Synthetic oligonucleotide
  Antisense strand to SEQ ID NO: 2237860
aaauuuagaaauugggccg

SEQ ID NO: 2237862 - RNA, 19 nt, Artificial Sequence
  Description of Artificial Sequence: Synthetic oligonucleotide
  Sense strand starting at position 1709 of SEQ ID NO: 1884069
uccuuaagauaugcauuga

SEQ ID NO: 2237863 - RNA, 19 nt, Artificial Sequence
  Description of Artificial Sequence: Synthetic oligonucleotide
  Antisense strand to SEQ ID NO: 2237862
ucaaugcauaucuuaagga

SEQ ID NO: 2237864 - RNA, 19 nt, Artificial Sequence
  Description of Artificial Sequence: Synthetic oligonucleotide
  Sense strand starting at position 1798 of SEQ ID NO: 1884069
ugagauaauuaacagaauc

SEQ ID NO: 2237865 - RNA, 19 nt, Artificial Sequence
  Description of Artificial Sequence: Synthetic oligonucleotide
  Antisense strand to SEQ ID NO: 2237864
gauucuguuaauuaucuca

SEQ ID NO: 2237866 - RNA, 19 nt, Artificial Sequence
  Description of Artificial Sequence: Synthetic oligonucleotide
  Sense strand starting at position 1872 of SEQ ID NO: 1884069
cccaauaugucccuagaga

SEQ ID NO: 2237867 - RNA, 19 nt, Artificial Sequence
  Description of Artificial Sequence: Synthetic oligonucleotide
  Antisense strand to SEQ ID NO: 2237866
ucucuagggacauauuggg

SEQ ID NO: 2237868 - RNA, 19 nt, Artificial Sequence
  Description of Artificial Sequence: Synthetic oligonucleotide
  Sense strand starting at position 1923 of SEQ ID NO: 1884069
ccaggugagcccuguguga

SEQ ID NO: 2237869 - RNA, 19 nt, Artificial Sequence
  Description of Artificial Sequence: Synthetic oligonucleotide
  Antisense strand to SEQ ID NO: 2237868
ucacacagggcucaccugg

SEQ ID NO: 2237870 - RNA, 19 nt, Artificial Sequence
  Description of Artificial Sequence: Synthetic oligonucleotide
  Sense strand starting at position 1925 of SEQ ID NO: 1884069
aggugagcccugugugaca

SEQ ID NO: 2237871 - RNA, 19 nt, Artificial Sequence
  Description of Artificial Sequence: Synthetic oligonucleotide
  Antisense strand to SEQ ID NO: 2237870
ugucacacagggcucaccu

SEQ ID NO: 2237872 - RNA, 19 nt, Artificial Sequence
  Description of Artificial Sequence: Synthetic oligonucleotide
  Sense strand starting at position 2022 of SEQ ID NO: 1884069
agaaguucuugccuuuaac

SEQ ID NO: 2237873 - RNA, 19 nt, Artificial Sequence
  Description of Artificial Sequence: Synthetic oligonucleotide
  Antisense strand to SEQ ID NO: 2237872
guuaaaggcaagaacuucu

SEQ ID NO: 2237874 - RNA, 19 nt, Artificial Sequence
  Description of Artificial Sequence: Synthetic oligonucleotide
  Sense strand starting at position 2095 of SEQ ID NO: 1884069
gagcgaucucauuagccac

SEQ ID NO: 2237875 - RNA, 19 nt, Artificial Sequence
  Description of Artificial Sequence: Synthetic oligonucleotide
  Antisense strand to SEQ ID NO: 2237874
guggcuaaugagaucgcuc

SEQ ID NO: 2237876 - RNA, 19 nt, Artificial Sequence
  Description of Artificial Sequence: Synthetic oligonucleotide
  Sense strand starting at position 2787 of SEQ ID NO: 1884069
ggaggaccuguguguuugu

SEQ ID NO: 2237877 - RNA, 19 nt, Artificial Sequence
  Description of Artificial Sequence: Synthetic oligonucleotide
  Antisense strand to SEQ ID NO: 2237876
acaaacacacagguccucc

SEQ ID NO: 2237878 - RNA, 19 nt, Artificial Sequence
  Description of Artificial Sequence: Synthetic oligonucleotide
  Sense strand starting at position 2866 of SEQ ID NO: 1884069
gaaugugaggcuugaacga

SEQ ID NO: 2237879 - RNA, 19 nt, Artificial Sequence
  Description of Artificial Sequence: Synthetic oligonucleotide
  Antisense strand to SEQ ID NO: 2237878
ucguucaagccucacauuc

SEQ ID NO: 2237880 - RNA, 19 nt, Artificial Sequence
  Description of Artificial Sequence: Synthetic oligonucleotide
  Sense strand starting at position 3010 of SEQ ID NO: 1884069
gaagaucuugugggugaac

SEQ ID NO: 2237881 - RNA, 19 nt, Artificial Sequence
  Description of Artificial Sequence: Synthetic oligonucleotide
  Antisense strand to SEQ ID NO: 2237880
guucacccacaagaucuuc

SEQ ID NO: 2237882 - RNA, 19 nt, Artificial Sequence
  Description of Artificial Sequence: Synthetic oligonucleotide
  Sense strand starting at position 3075 of SEQ ID NO: 1884069
gaacgugaggaaugaacuu

SEQ ID NO: 2237883 - RNA, 19 nt, Artificial Sequence
  Description of Artificial Sequence: Synthetic oligonucleotide
  Antisense strand to SEQ ID NO: 2237882
aaguucauuccucacguuc

SEQ ID NO: 2237884 - RNA, 19 nt, Artificial Sequence
  Description of Artificial Sequence: Synthetic oligonucleotide
  Sense strand starting at position 3287 of SEQ ID NO: 1884069
gcgggugucgccucggaga

SEQ ID NO: 2237885 - RNA, 19 nt, Artificial Sequence
  Description of Artificial Sequence: Synthetic oligonucleotide
  Antisense strand to SEQ ID NO: 2237884
ucuccgaggcgacacccgc

SEQ ID NO: 2237886 - RNA, 19 nt, Artificial Sequence
  Description of Artificial Sequence: Synthetic oligonucleotide
  Sense strand starting at position 3374 of SEQ ID NO: 1884069
cugcguuccgggugauuuc

SEQ ID NO: 2237887 - RNA, 19 nt, Artificial Sequence
  Description of Artificial Sequence: Synthetic oligonucleotide
  Antisense strand to SEQ ID NO: 2237886
gaaaucacccggaacgcag

SEQ ID NO: 2237888 - RNA, 19 nt, Artificial Sequence
  Description of Artificial Sequence: Synthetic oligonucleotide
  Sense strand starting at position 3384 of SEQ ID NO: 1884069
ggugauuucucagaacaag

SEQ ID NO: 2237889 - RNA, 19 nt, Artificial Sequence
  Description of Artificial Sequence: Synthetic oligonucleotide
  Antisense strand to SEQ ID NO: 2237888
cuuguucugagaaaucacc

SEQ ID NO: 2237890 - RNA, 19 nt, Artificial Sequence
  Description of Artificial Sequence: Synthetic oligonucleotide
  Sense strand starting at position 3488 of SEQ ID NO: 1884069
guaugaucauuauugagaa

SEQ ID NO: 2237891 - RNA, 19 nt, Artificial Sequence
  Description of Artificial Sequence: Synthetic oligonucleotide
  Antisense strand to SEQ ID NO: 2237890
uucucaauaaugaucauac

SEQ ID NO: 2237892 - RNA, 19 nt, Artificial Sequence
  Description of Artificial Sequence: Synthetic oligonucleotide
  Sense strand starting at position 3509 of SEQ ID NO: 1884069
agagaaaccuaccaggaaa

SEQ ID NO: 2237893 - RNA, 19 nt, Artificial Sequence
  Description of Artificial Sequence: Synthetic oligonucleotide
  Antisense strand to SEQ ID NO: 2237892
uuuccugguagguuucucu

SEQ ID NO: 2237894 - RNA, 19 nt, Artificial Sequence
  Description of Artificial Sequence: Synthetic oligonucleotide
  Sense strand starting at position 3560 of SEQ ID NO: 1884069
cuguucuguucuccaagua

SEQ ID NO: 2237895 - RNA, 19 nt, Artificial Sequence
  Description of Artificial Sequence: Synthetic oligonucleotide
  Antisense strand to SEQ ID NO: 2237894
uacuuggagaacagaacag

SEQ ID NO: 2237896 - RNA, 19 nt, Artificial Sequence
  Description of Artificial Sequence: Synthetic oligonucleotide
  Sense strand starting at position 3642 of SEQ ID NO: 1884069
ggaaauuggccauaagccu

SEQ ID NO: 2237897 - RNA, 19 nt, Artificial Sequence
  Description of Artificial Sequence: Synthetic oligonucleotide
  Antisense strand to SEQ ID NO: 2237896
aggcuuauggccaauuucc

SEQ ID NO: 2237898 - RNA, 19 nt, Artificial Sequence
  Description of Artificial Sequence: Synthetic oligonucleotide
  Sense strand starting at position 3649 of SEQ ID NO: 1884069
ggccauaagccuugaaaug

SEQ ID NO: 2237899 - RNA, 19 nt, Artificial Sequence
  Description of Artificial Sequence: Synthetic oligonucleotide
  Antisense strand to SEQ ID NO: 2237898
cauuucaaggcuuauggcc

SEQ ID NO: 2237900 - RNA, 19 nt, Artificial Sequence
  Description of Artificial Sequence: Synthetic oligonucleotide
  Sense strand starting at position 3650 of SEQ ID NO: 1884069
gccauaagccuugaaauga

SEQ ID NO: 2237901 - RNA, 19 nt, Artificial Sequence
  Description of Artificial Sequence: Synthetic oligonucleotide
  Antisense strand to SEQ ID NO: 2237900
ucauuucaaggcuuauggc

SEQ ID NO: 2237902 - RNA, 19 nt, Artificial Sequence
  Description of Artificial Sequence: Synthetic oligonucleotide
  Sense strand starting at position 3814 of SEQ ID NO: 1884069
cggaucugguagcuugaga

SEQ ID NO: 2237903 - RNA, 19 nt, Artificial Sequence
  Description of Artificial Sequence: Synthetic oligonucleotide
  Antisense strand to SEQ ID NO: 2237902
ucucaagcuaccagauccg

SEQ ID NO: 2237904 - RNA, 19 nt, Artificial Sequence
  Description of Artificial Sequence: Synthetic oligonucleotide
  Sense strand starting at position 3825 of SEQ ID NO: 1884069
gcuugagaguuguuuaaug

SEQ ID NO: 2237905 - RNA, 19 nt, Artificial Sequence
  Description of Artificial Sequence: Synthetic oligonucleotide
  Antisense strand to SEQ ID NO: 2237904
cauuaaacaacucucaagc

SEQ ID NO: 2237906 - RNA, 19 nt, Artificial Sequence
  Description of Artificial Sequence: Synthetic oligonucleotide
  Sense strand starting at position 3836 of SEQ ID NO: 1884069
guuuaaugccagcauauga

SEQ ID NO: 2237907 - RNA, 19 nt, Artificial Sequence
  Description of Artificial Sequence: Synthetic oligonucleotide
  Antisense strand to SEQ ID NO: 2237906
ucauaugcuggcauuaaac

SEQ ID NO: 2237908 - RNA, 19 nt, Artificial Sequence
  Description of Artificial Sequence: Synthetic oligonucleotide
  Sense strand starting at position 1069 of SEQ ID NO: 1884070
uuuguucuuccugaaagau

SEQ ID NO: 2237909 - RNA, 19 nt, Artificial Sequence
  Description of Artificial Sequence: Synthetic oligonucleotide
  Antisense strand to SEQ ID NO: 2237908
aucuuucaggaagaacaaa

SEQ ID NO: 2237910 - RNA, 19 nt, Artificial Sequence
  Description of Artificial Sequence: Synthetic oligonucleotide
  Sense strand starting at position 1183 of SEQ ID NO: 1884070
aggugucaggaguaccaaa

SEQ ID NO: 2237911 - RNA, 19 nt, Artificial Sequence
  Description of Artificial Sequence: Synthetic oligonucleotide
  Antisense strand to SEQ ID NO: 2237910
uuugguacuccugacaccu

SEQ ID NO: 2237912 - RNA, 19 nt, Artificial Sequence
  Description of Artificial Sequence: Synthetic oligonucleotide
  Sense strand starting at position 1218 of SEQ ID NO: 1884070
aaaucucacgugcaaguuu

SEQ ID NO: 2237913 - RNA, 19 nt, Artificial Sequence
  Description of Artificial Sequence: Synthetic oligonucleotide
  Antisense strand to SEQ ID NO: 2237912
aaacuugcacgugagauuu

SEQ ID NO: 2237914 - RNA, 19 nt, Artificial Sequence
  Description of Artificial Sequence: Synthetic oligonucleotide
  Sense strand starting at position 1243 of SEQ ID NO: 1884070
gggauccuagucugcagau

SEQ ID NO: 2237915 - RNA, 19 nt, Artificial Sequence
  Description of Artificial Sequence: Synthetic oligonucleotide
  Antisense strand to SEQ ID NO: 2237914
aucugcagacuaggauccc

SEQ ID NO: 2237916 - RNA, 19 nt, Artificial Sequence
  Description of Artificial Sequence: Synthetic oligonucleotide
  Sense strand starting at position 1256 of SEQ ID NO: 1884070
gcagaugcuucuguuccua

SEQ ID NO: 2237917 - RNA, 19 nt, Artificial Sequence
  Description of Artificial Sequence: Synthetic oligonucleotide
  Antisense strand to SEQ ID NO: 2237916
uaggaacagaagcaucugc

SEQ ID NO: 2237918 - RNA, 19 nt, Artificial Sequence
  Description of Artificial Sequence: Synthetic oligonucleotide
  Sense strand starting at position 1261 of SEQ ID NO: 1884070
ugcuucuguuccuaugacu

SEQ ID NO: 2237919 - RNA, 19 nt, Artificial Sequence
  Description of Artificial Sequence: Synthetic oligonucleotide
  Antisense strand to SEQ ID NO: 2237918
agucauaggaacagaagca

SEQ ID NO: 2237920 - RNA, 19 nt, Artificial Sequence
  Description of Artificial Sequence: Synthetic oligonucleotide
  Sense strand starting at position 3917 of SEQ ID NO: 1884070
gguugaauuuauuagacug

SEQ ID NO: 2237921 - RNA, 19 nt, Artificial Sequence
  Description of Artificial Sequence: Synthetic oligonucleotide
  Antisense strand to SEQ ID NO: 2237920
cagucuaauaaauucaacc

SEQ ID NO: 2237922 - RNA, 19 nt, Artificial Sequence
  Description of Artificial Sequence: Synthetic oligonucleotide
  Sense strand starting at position 3925 of SEQ ID NO: 1884070
uuauuagacugagagucau

SEQ ID NO: 2237923 - RNA, 19 nt, Artificial Sequence
  Description of Artificial Sequence: Synthetic oligonucleotide
  Antisense strand to SEQ ID NO: 2237922
augacucucagucuaauaa

SEQ ID NO: 2237924 - RNA, 19 nt, Artificial Sequence
  Description of Artificial Sequence: Synthetic oligonucleotide
  Sense strand starting at position 3931 of SEQ ID NO: 1884070
gacugagagucauguuuaa

SEQ ID NO: 2237925 - RNA, 19 nt, Artificial Sequence
  Description of Artificial Sequence: Synthetic oligonucleotide
  Antisense strand to SEQ ID NO: 2237924
uuaaacaugacucucaguc

SEQ ID NO: 2237926 - RNA, 19 nt, Artificial Sequence
  Description of Artificial Sequence: Synthetic oligonucleotide
  Sense strand starting at position 3943 of SEQ ID NO: 1884070
uguuuaagugcagggagau

SEQ ID NO: 2237927 - RNA, 19 nt, Artificial Sequence
  Description of Artificial Sequence: Synthetic oligonucleotide
  Antisense strand to SEQ ID NO: 2237926
aucucccugcacuuaaaca

SEQ ID NO: 2237928 - RNA, 19 nt, Artificial Sequence
  Description of Artificial Sequence: Synthetic oligonucleotide
  Sense strand starting at position 10 of SEQ ID NO: 1884071
ggcagaaaccaaugugaua

SEQ ID NO: 2237929 - RNA, 19 nt, Artificial Sequence
  Description of Artificial Sequence: Synthetic oligonucleotide
  Antisense strand to SEQ ID NO: 2237928
uaucacauugguuucugcc

SEQ ID NO: 2237930 - RNA, 19 nt, Artificial Sequence
  Description of Artificial Sequence: Synthetic oligonucleotide
  Sense strand starting at position 44 of SEQ ID NO: 1884071
gacuaaguccagugauaaa

SEQ ID NO: 2237931 - RNA, 19 nt, Artificial Sequence
  Description of Artificial Sequence: Synthetic oligonucleotide
  Antisense strand to SEQ ID NO: 2237930
uuuaucacuggacuuaguc

SEQ ID NO: 2237932 - RNA, 19 nt, Artificial Sequence
  Description of Artificial Sequence: Synthetic oligonucleotide
  Sense strand starting at position 261 of SEQ ID NO: 1884071
agugacaacuuauuccagu

SEQ ID NO: 2237933 - RNA, 19 nt, Artificial Sequence
  Description of Artificial Sequence: Synthetic oligonucleotide
  Antisense strand to SEQ ID NO: 2237932
acuggaauaaguugucacu

SEQ ID NO: 2237934 - RNA, 19 nt, Artificial Sequence
  Description of Artificial Sequence: Synthetic oligonucleotide
  Sense strand starting at position 361 of SEQ ID NO: 1884071
uagggagcucccugugaga

SEQ ID NO: 2237935 - RNA, 19 nt, Artificial Sequence
  Description of Artificial Sequence: Synthetic oligonucleotide
  Antisense strand to SEQ ID NO: 2237934
ucucacagggagcucccua

SEQ ID NO: 2237936 - RNA, 19 nt, Artificial Sequence
  Description of Artificial Sequence: Synthetic oligonucleotide
  Sense strand starting at position 395 of SEQ ID NO: 1884071
ggaauaagguguucugagg

SEQ ID NO: 2237937 - RNA, 19 nt, Artificial Sequence
  Description of Artificial Sequence: Synthetic oligonucleotide
  Antisense strand to SEQ ID NO: 2237936
ccucagaacaccuuauucc

SEQ ID NO: 2237938 - RNA, 19 nt, Artificial Sequence
  Description of Artificial Sequence: Synthetic oligonucleotide
  Sense strand starting at position 403 of SEQ ID NO: 1884071
guguucugagggugggaaa

SEQ ID NO: 2237939 - RNA, 19 nt, Artificial Sequence
  Description of Artificial Sequence: Synthetic oligonucleotide
  Antisense strand to SEQ ID NO: 2237938
uuucccacccucagaacac

SEQ ID NO: 2237940 - RNA, 19 nt, Artificial Sequence
  Description of Artificial Sequence: Synthetic oligonucleotide
  Sense strand starting at position 404 of SEQ ID NO: 1884071
uguucugagggugggaaau

SEQ ID NO: 2237941 - RNA, 19 nt, Artificial Sequence
  Description of Artificial Sequence: Synthetic oligonucleotide
  Antisense strand to SEQ ID NO: 2237940
auuucccacccucagaaca

SEQ ID NO: 2237942 - RNA, 19 nt, Artificial Sequence
  Description of Artificial Sequence: Synthetic oligonucleotide
  Sense strand starting at position 436 of SEQ ID NO: 1884071
aucugaggaucuguuuauc

SEQ ID NO: 2237943 - RNA, 19 nt, Artificial Sequence
  Description of Artificial Sequence: Synthetic oligonucleotide
  Antisense strand to SEQ ID NO: 2237942
gauaaacagauccucagau

SEQ ID NO: 2237944 - RNA, 19 nt, Artificial Sequence
  Description of Artificial Sequence: Synthetic oligonucleotide
  Sense strand starting at position 439 of SEQ ID NO: 1884071
ugaggaucuguuuauccca

SEQ ID NO: 2237945 - RNA, 19 nt, Artificial Sequence
  Description of Artificial Sequence: Synthetic oligonucleotide
  Antisense strand to SEQ ID NO: 2237944
ugggauaaacagauccuca

SEQ ID NO: 2237946 - RNA, 19 nt, Artificial Sequence
  Description of Artificial Sequence: Synthetic oligonucleotide
  Sense strand starting at position 477 of SEQ ID NO: 1884071
auugcaagagguugggaaa

SEQ ID NO: 2237947 - RNA, 19 nt, Artificial Sequence
  Description of Artificial Sequence: Synthetic oligonucleotide
  Antisense strand to SEQ ID NO: 2237946
uuucccaaccucuugcaau

SEQ ID NO: 2237948 - RNA, 19 nt, Artificial Sequence
  Description of Artificial Sequence: Synthetic oligonucleotide
  Sense strand starting at position 478 of SEQ ID NO: 1884071
uugcaagagguugggaaau

SEQ ID NO: 2237949 - RNA, 19 nt, Artificial Sequence
  Description of Artificial Sequence: Synthetic oligonucleotide
  Antisense strand to SEQ ID NO: 2237948
auuucccaaccucuugcaa

SEQ ID NO: 2237950 - RNA, 19 nt, Artificial Sequence
  Description of Artificial Sequence: Synthetic oligonucleotide
  Sense strand starting at position 488 of SEQ ID NO: 1884071
uugggaaauuuacauauac

SEQ ID NO: 2237951 - RNA, 19 nt, Artificial Sequence
  Description of Artificial Sequence: Synthetic oligonucleotide
  Antisense strand to SEQ ID NO: 2237950
guauauguaaauuucccaa

SEQ ID NO: 2237952 - RNA, 19 nt, Artificial Sequence
  Description of Artificial Sequence: Synthetic oligonucleotide
  Sense strand starting at position 1126 of SEQ ID NO: 1884071
guaagagacuucucugaau

SEQ ID NO: 2237953 - RNA, 19 nt, Artificial Sequence
  Description of Artificial Sequence: Synthetic oligonucleotide
  Antisense strand to SEQ ID NO: 2237952
auucagagaagucucuuac

SEQ ID NO: 2237954 - RNA, 19 nt, Artificial Sequence
  Description of Artificial Sequence: Synthetic oligonucleotide
  Sense strand starting at position 1129 of SEQ ID NO: 1884071
agagacuucucugaauuuc

SEQ ID NO: 2237955 - RNA, 19 nt, Artificial Sequence
  Description of Artificial Sequence: Synthetic oligonucleotide
  Antisense strand to SEQ ID NO: 2237954
gaaauucagagaagucucu

SEQ ID NO: 2237956 - RNA, 19 nt, Artificial Sequence
  Description of Artificial Sequence: Synthetic oligonucleotide
  Sense strand starting at position 1146 of SEQ ID NO: 1884071
ucaguauucucacugauag

SEQ ID NO: 2237957 - RNA, 19 nt, Artificial Sequence
  Description of Artificial Sequence: Synthetic oligonucleotide
  Antisense strand to SEQ ID NO: 2237956
cuaucagugagaauacuga

SEQ ID NO: 2237958 - RNA, 19 nt, Artificial Sequence
  Description of Artificial Sequence: Synthetic oligonucleotide
  Sense strand starting at position 1672 of SEQ ID NO: 1884071
cuccguugggaugacuaaa

SEQ ID NO: 2237959 - RNA, 19 nt, Artificial Sequence
  Description of Artificial Sequence: Synthetic oligonucleotide
  Antisense strand to SEQ ID NO: 2237958
uuuagucaucccaacggag

SEQ ID NO: 2237960 - RNA, 19 nt, Artificial Sequence
  Description of Artificial Sequence: Synthetic oligonucleotide
  Sense strand starting at position 1690 of SEQ ID NO: 1884071
augcuaacuccaugauaag

SEQ ID NO: 2237961 - RNA, 19 nt, Artificial Sequence
  Description of Artificial Sequence: Synthetic oligonucleotide
  Antisense strand to SEQ ID NO: 2237960
cuuaucauggaguuagcau

SEQ ID NO: 2237962 - RNA, 19 nt, Artificial Sequence
  Description of Artificial Sequence: Synthetic oligonucleotide
  Sense strand starting at position 1699 of SEQ ID NO: 1884071
ccaugauaagcacagcuau

SEQ ID NO: 2237963 - RNA, 19 nt, Artificial Sequence
  Description of Artificial Sequence: Synthetic oligonucleotide
  Antisense strand to SEQ ID NO: 2237962
auagcugugcuuaucaugg

SEQ ID NO: 2237964 - RNA, 19 nt, Artificial Sequence
  Description of Artificial Sequence: Synthetic oligonucleotide
  Sense strand starting at position 1824 of SEQ ID NO: 1884071
gaucuucuggcucaguaau

SEQ ID NO: 2237965 - RNA, 19 nt, Artificial Sequence
  Description of Artificial Sequence: Synthetic oligonucleotide
  Antisense strand to SEQ ID NO: 2237964
auuacugagccagaagauc

SEQ ID NO: 2237966 - RNA, 19 nt, Artificial Sequence
  Description of Artificial Sequence: Synthetic oligonucleotide
  Sense strand starting at position 2166 of SEQ ID NO: 1884071
ggauguugagaguggaugu

SEQ ID NO: 2237967 - RNA, 19 nt, Artificial Sequence
  Description of Artificial Sequence: Synthetic oligonucleotide
  Antisense strand to SEQ ID NO: 2237966
acauccacucucaacaucc

SEQ ID NO: 2237968 - RNA, 19 nt, Artificial Sequence
  Description of Artificial Sequence: Synthetic oligonucleotide
  Sense strand starting at position 2179 of SEQ ID NO: 1884071
ggauguugggaauauuguu

SEQ ID NO: 2237969 - RNA, 19 nt, Artificial Sequence
  Description of Artificial Sequence: Synthetic oligonucleotide
  Antisense strand to SEQ ID NO: 2237968
aacaauauucccaacaucc

SEQ ID NO: 2237970 - RNA, 19 nt, Artificial Sequence
  Description of Artificial Sequence: Synthetic oligonucleotide
  Sense strand starting at position 2184 of SEQ ID NO: 1884071
uugggaauauuguuaauca

SEQ ID NO: 2237971 - RNA, 19 nt, Artificial Sequence
  Description of Artificial Sequence: Synthetic oligonucleotide
  Antisense strand to SEQ ID NO: 2237970
ugauuaacaauauucccaa

SEQ ID NO: 2237972 - RNA, 19 nt, Artificial Sequence
  Description of Artificial Sequence: Synthetic oligonucleotide
  Sense strand starting at position 2360 of SEQ ID NO: 1884071
ugcucaggauucucaauua

SEQ ID NO: 2237973 - RNA, 19 nt, Artificial Sequence
  Description of Artificial Sequence: Synthetic oligonucleotide
  Antisense strand to SEQ ID NO: 2237972
uaauugagaauccugagca

SEQ ID NO: 2237974 - RNA, 19 nt, Artificial Sequence
  Description of Artificial Sequence: Synthetic oligonucleotide
  Sense strand starting at position 2754 of SEQ ID NO: 1884071
gaggaacuuuguuuauggu

SEQ ID NO: 2237975 - RNA, 19 nt, Artificial Sequence
  Description of Artificial Sequence: Synthetic oligonucleotide
  Antisense strand to SEQ ID NO: 2237974
accauaaacaaaguuccuc

SEQ ID NO: 2237976 - RNA, 19 nt, Artificial Sequence
  Description of Artificial Sequence: Synthetic oligonucleotide
  Sense strand starting at position 2768 of SEQ ID NO: 1884071
augguuuaacuuugaaaca

SEQ ID NO: 2237977 - RNA, 19 nt, Artificial Sequence
  Description of Artificial Sequence: Synthetic oligonucleotide
  Antisense strand to SEQ ID NO: 2237976
uguuucaaaguuaaaccau

SEQ ID NO: 2237978 - RNA, 19 nt, Artificial Sequence
  Description of Artificial Sequence: Synthetic oligonucleotide
  Sense strand starting at position 2858 of SEQ ID NO: 1884071
accacuuagcugcaagauu

SEQ ID NO: 2237979 - RNA, 19 nt, Artificial Sequence
  Description of Artificial Sequence: Synthetic oligonucleotide
  Antisense strand to SEQ ID NO: 2237978
aaucuugcagcuaaguggu

SEQ ID NO: 2237980 - RNA, 19 nt, Artificial Sequence
  Description of Artificial Sequence: Synthetic oligonucleotide
  Sense strand starting at position 3059 of SEQ ID NO: 1884071
cugugauccuacuuaggau

SEQ ID NO: 2237981 - RNA, 19 nt, Artificial Sequence
  Description of Artificial Sequence: Synthetic oligonucleotide
  Antisense strand to SEQ ID NO: 2237980
auccuaaguaggaucacag

SEQ ID NO: 2237982 - RNA, 19 nt, Artificial Sequence
  Description of Artificial Sequence: Synthetic oligonucleotide
  Sense strand starting at position 3365 of SEQ ID NO: 1884071
uccacaguugcugaaagau

SEQ ID NO: 2237983 - RNA, 19 nt, Artificial Sequence
  Description of Artificial Sequence: Synthetic oligonucleotide
  Antisense strand to SEQ ID NO: 2237982
aucuuucagcaacugugga

SEQ ID NO: 2237984 - RNA, 19 nt, Artificial Sequence
  Description of Artificial Sequence: Synthetic oligonucleotide
  Sense strand starting at position 3420 of SEQ ID NO: 1884071
cacauuucccgugggugua

SEQ ID NO: 2237985 - RNA, 19 nt, Artificial Sequence
  Description of Artificial Sequence: Synthetic oligonucleotide
  Antisense strand to SEQ ID NO: 2237984
uacacccacgggaaaugug

SEQ ID NO: 2237986 - RNA, 19 nt, Artificial Sequence
  Description of Artificial Sequence: Synthetic oligonucleotide
  Sense strand starting at position 3508 of SEQ ID NO: 1884071
uguauucuaccuugggaau

SEQ ID NO: 2237987 - RNA, 19 nt, Artificial Sequence
  Description of Artificial Sequence: Synthetic oligonucleotide
  Antisense strand to SEQ ID NO: 2237986
auucccaagguagaauaca

SEQ ID NO: 2237988 - RNA, 19 nt, Artificial Sequence
  Description of Artificial Sequence: Synthetic oligonucleotide
  Sense strand starting at position 3509 of SEQ ID NO: 1884071
guauucuaccuugggaaug

SEQ ID NO: 2237989 - RNA, 19 nt, Artificial Sequence
  Description of Artificial Sequence: Synthetic oligonucleotide
  Antisense strand to SEQ ID NO: 2237988
cauucccaagguagaauac

SEQ ID NO: 2237990 - RNA, 19 nt, Artificial Sequence
  Description of Artificial Sequence: Synthetic oligonucleotide
  Sense strand starting at position 3514 of SEQ ID NO: 1884071
cuaccuugggaauguagaa

SEQ ID NO: 2237991 - RNA, 19 nt, Artificial Sequence
  Description of Artificial Sequence: Synthetic oligonucleotide
  Antisense strand to SEQ ID NO: 2237990
uucuacauucccaagguag

SEQ ID NO: 2237992 - RNA, 19 nt, Artificial Sequence
  Description of Artificial Sequence: Synthetic oligonucleotide
  Sense strand starting at position 3541 of SEQ ID NO: 1884071
gugagaaguuauccaagac

SEQ ID NO: 2237993 - RNA, 19 nt, Artificial Sequence
  Description of Artificial Sequence: Synthetic oligonucleotide
  Antisense strand to SEQ ID NO: 2237992
gucuuggauaacuucucac

SEQ ID NO: 2237994 - RNA, 19 nt, Artificial Sequence
  Description of Artificial Sequence: Synthetic oligonucleotide
  Sense strand starting at position 3545 of SEQ ID NO: 1884071
gaaguuauccaagacguag

SEQ ID NO: 2237995 - RNA, 19 nt, Artificial Sequence
  Description of Artificial Sequence: Synthetic oligonucleotide
  Antisense strand to SEQ ID NO: 2237994
cuacgucuuggauaacuuc

SEQ ID NO: 2237996 - RNA, 19 nt, Artificial Sequence
  Description of Artificial Sequence: Synthetic oligonucleotide
  Sense strand starting at position 3583 of SEQ ID NO: 1884071
ucagucgcaaacgauaaau

SEQ ID NO: 2237997 - RNA, 19 nt, Artificial Sequence
  Description of Artificial Sequence: Synthetic oligonucleotide
  Antisense strand to SEQ ID NO: 2237996
auuuaucguuugcgacuga

SEQ ID NO: 2237998 - RNA, 19 nt, Artificial Sequence
  Description of Artificial Sequence: Synthetic oligonucleotide
  Sense strand starting at position 3594 of SEQ ID NO: 1884071
cgauaaauguauccuauau

SEQ ID NO: 2237999 - RNA, 19 nt, Artificial Sequence
  Description of Artificial Sequence: Synthetic oligonucleotide
  Antisense strand to SEQ ID NO: 2237998
auauaggauacauuuaucg

SEQ ID NO: 2238000 - RNA, 19 nt, Artificial Sequence
  Description of Artificial Sequence: Synthetic oligonucleotide
  Sense strand starting at position 3656 of SEQ ID NO: 1884071
ccuuccauuugggaaagaa

SEQ ID NO: 2238001 - RNA, 19 nt, Artificial Sequence
  Description of Artificial Sequence: Synthetic oligonucleotide
  Antisense strand to SEQ ID NO: 2238000
uucuuucccaaauggaagg

SEQ ID NO: 2238002 - RNA, 19 nt, Artificial Sequence
  Description of Artificial Sequence: Synthetic oligonucleotide
  Sense strand starting at position 3680 of SEQ ID NO: 1884071
ugguaaacaagguauguca

SEQ ID NO: 2238003 - RNA, 19 nt, Artificial Sequence
  Description of Artificial Sequence: Synthetic oligonucleotide
  Antisense strand to SEQ ID NO: 2238002
ugacauaccuuguuuacca

SEQ ID NO: 2238004 - RNA, 19 nt, Artificial Sequence
  Description of Artificial Sequence: Synthetic oligonucleotide
  Sense strand starting at position 3682 of SEQ ID NO: 1884071
guaaacaagguaugucaua

SEQ ID NO: 2238005 - RNA, 19 nt, Artificial Sequence
  Description of Artificial Sequence: Synthetic oligonucleotide
  Antisense strand to SEQ ID NO: 2238004
uaugacauaccuuguuuac

SEQ ID NO: 2238006 - RNA, 19 nt, Artificial Sequence
  Description of Artificial Sequence: Synthetic oligonucleotide
  Sense strand starting at position 3963 of SEQ ID NO: 1884071
agugauuugcccugccuca

SEQ ID NO: 2238007 - RNA, 19 nt, Artificial Sequence
  Description of Artificial Sequence: Synthetic oligonucleotide
  Antisense strand to SEQ ID NO: 2238006
ugaggcagggcaaaucacu

SEQ ID NO: 2238008 - RNA, 19 nt, Artificial Sequence
  Description of Artificial Sequence: Synthetic oligonucleotide
  Sense strand starting at position 145 of SEQ ID NO: 1884072
aaaugauguuagcuggaga

SEQ ID NO: 2238009 - RNA, 19 nt, Artificial Sequence
  Description of Artificial Sequence: Synthetic oligonucleotide
  Antisense strand to SEQ ID NO: 2238008
ucuccagcuaacaucauuu

SEQ ID NO: 2238010 - RNA, 19 nt, Artificial Sequence
  Description of Artificial Sequence: Synthetic oligonucleotide
  Sense strand starting at position 148 of SEQ ID NO: 1884072
ugauguuagcuggagauag

SEQ ID NO: 2238011 - RNA, 19 nt, Artificial Sequence
  Description of Artificial Sequence: Synthetic oligonucleotide
  Antisense strand to SEQ ID NO: 2238010
cuaucuccagcuaacauca

SEQ ID NO: 2238012 - RNA, 19 nt, Artificial Sequence
  Description of Artificial Sequence: Synthetic oligonucleotide
  Sense strand starting at position 150 of SEQ ID NO: 1884072
auguuagcuggagauaguu

SEQ ID NO: 2238013 - RNA, 19 nt, Artificial Sequence
  Description of Artificial Sequence: Synthetic oligonucleotide
  Antisense strand to SEQ ID NO: 2238012
aacuaucuccagcuaacau

SEQ ID NO: 2238014 - RNA, 19 nt, Artificial Sequence
  Description of Artificial Sequence: Synthetic oligonucleotide
  Sense strand starting at position 318 of SEQ ID NO: 1884072
uuuacauugucagcacuga

SEQ ID NO: 2238015 - RNA, 19 nt, Artificial Sequence
  Description of Artificial Sequence: Synthetic oligonucleotide
  Antisense strand to SEQ ID NO: 2238014
ucagugcugacaauguaaa

SEQ ID NO: 2238016 - RNA, 19 nt, Artificial Sequence
  Description of Artificial Sequence: Synthetic oligonucleotide
  Sense strand starting at position 319 of SEQ ID NO: 1884072
uuacauugucagcacugau

SEQ ID NO: 2238017 - RNA, 19 nt, Artificial Sequence
  Description of Artificial Sequence: Synthetic oligonucleotide
  Antisense strand to SEQ ID NO: 2238016
aucagugcugacaauguaa

SEQ ID NO: 2238018 - RNA, 19 nt, Artificial Sequence
  Description of Artificial Sequence: Synthetic oligonucleotide
  Sense strand starting at position 361 of SEQ ID NO: 1884072
ugcuauuaaggccacagau

SEQ ID NO: 2238019 - RNA, 19 nt, Artificial Sequence
  Description of Artificial Sequence: Synthetic oligonucleotide
  Antisense strand to SEQ ID NO: 2238018
aucuguggccuuaauagca

SEQ ID NO: 2238020 - RNA, 19 nt, Artificial Sequence
  Description of Artificial Sequence: Synthetic oligonucleotide
  Sense strand starting at position 400 of SEQ ID NO: 1884072
uagacucaugcugagaguu

SEQ ID NO: 2238021 - RNA, 19 nt, Artificial Sequence
  Description of Artificial Sequence: Synthetic oligonucleotide
  Antisense strand to SEQ ID NO: 2238020
aacucucagcaugagucua

SEQ ID NO: 2238022 - RNA, 19 nt, Artificial Sequence
  Description of Artificial Sequence: Synthetic oligonucleotide
  Sense strand starting at position 427 of SEQ ID NO: 1884072
guaugcuaacuugacaacu

SEQ ID NO: 2238023 - RNA, 19 nt, Artificial Sequence
  Description of Artificial Sequence: Synthetic oligonucleotide
  Antisense strand to SEQ ID NO: 2238022
aguugucaaguuagcauac

SEQ ID NO: 2238024 - RNA, 19 nt, Artificial Sequence
  Description of Artificial Sequence: Synthetic oligonucleotide
  Sense strand starting at position 437 of SEQ ID NO: 1884072
uugacaacuugaccguuaa

SEQ ID NO: 2238025 - RNA, 19 nt, Artificial Sequence
  Description of Artificial Sequence: Synthetic oligonucleotide
  Antisense strand to SEQ ID NO: 2238024
uuaacggucaaguugucaa

SEQ ID NO: 2238026 - RNA, 19 nt, Artificial Sequence
  Description of Artificial Sequence: Synthetic oligonucleotide
  Sense strand starting at position 441 of SEQ ID NO: 1884072
caacuugaccguuaagauu

SEQ ID NO: 2238027 - RNA, 19 nt, Artificial Sequence
  Description of Artificial Sequence: Synthetic oligonucleotide
  Antisense strand to SEQ ID NO: 2238026
aaucuuaacggucaaguug

SEQ ID NO: 2238028 - RNA, 19 nt, Artificial Sequence
  Description of Artificial Sequence: Synthetic oligonucleotide
  Sense strand starting at position 519 of SEQ ID NO: 1884072
ugaaauuggcuuugucaaa

SEQ ID NO: 2238029 - RNA, 19 nt, Artificial Sequence
  Description of Artificial Sequence: Synthetic oligonucleotide
  Antisense strand to SEQ ID NO: 2238028
uuugacaaagccaauuuca

SEQ ID NO: 2238030 - RNA, 19 nt, Artificial Sequence
  Description of Artificial Sequence: Synthetic oligonucleotide
  Sense strand starting at position 520 of SEQ ID NO: 1884072
gaaauuggcuuugucaaau

SEQ ID NO: 2238031 - RNA, 19 nt, Artificial Sequence
  Description of Artificial Sequence: Synthetic oligonucleotide
  Antisense strand to SEQ ID NO: 2238030
auuugacaaagccaauuuc

SEQ ID NO: 2238032 - RNA, 19 nt, Artificial Sequence
  Description of Artificial Sequence: Synthetic oligonucleotide
  Sense strand starting at position 1138 of SEQ ID NO: 1884072
acagaacauuucugguaca

SEQ ID NO: 2238033 - RNA, 19 nt, Artificial Sequence
  Description of Artificial Sequence: Synthetic oligonucleotide
  Antisense strand to SEQ ID NO: 2238032
uguaccagaaauguucugu

SEQ ID NO: 2238034 - RNA, 19 nt, Artificial Sequence
  Description of Artificial Sequence: Synthetic oligonucleotide
  Sense strand starting at position 1156 of SEQ ID NO: 1884072
accagaagauguguuguuu

SEQ ID NO: 2238035 - RNA, 19 nt, Artificial Sequence
  Description of Artificial Sequence: Synthetic oligonucleotide
  Antisense strand to SEQ ID NO: 2238034
aaacaacacaucuucuggu

SEQ ID NO: 2238036 - RNA, 19 nt, Artificial Sequence
  Description of Artificial Sequence: Synthetic oligonucleotide
  Sense strand starting at position 1198 of SEQ ID NO: 1884072
guaacuccuagugguguga

SEQ ID NO: 2238037 - RNA, 19 nt, Artificial Sequence
  Description of Artificial Sequence: Synthetic oligonucleotide
  Antisense strand to SEQ ID NO: 2238036
ucacaccacuaggaguuac

SEQ ID NO: 2238038 - RNA, 19 nt, Artificial Sequence
  Description of Artificial Sequence: Synthetic oligonucleotide
  Sense strand starting at position 1202 of SEQ ID NO: 1884072
cuccuaguggugugaugga

SEQ ID NO: 2238039 - RNA, 19 nt, Artificial Sequence
  Description of Artificial Sequence: Synthetic oligonucleotide
  Antisense strand to SEQ ID NO: 2238038
uccaucacaccacuaggag

SEQ ID NO: 2238040 - RNA, 19 nt, Artificial Sequence
  Description of Artificial Sequence: Synthetic oligonucleotide
  Sense strand starting at position 1211 of SEQ ID NO: 1884072
gugugauggagcuagccua

SEQ ID NO: 2238041 - RNA, 19 nt, Artificial Sequence
  Description of Artificial Sequence: Synthetic oligonucleotide
  Antisense strand to SEQ ID NO: 2238040
uaggcuagcuccaucacac

SEQ ID NO: 2238042 - RNA, 19 nt, Artificial Sequence
  Description of Artificial Sequence: Synthetic oligonucleotide
  Sense strand starting at position 1587 of SEQ ID NO: 1884072
ggaaacugauggcaagaaa

SEQ ID NO: 2238043 - RNA, 19 nt, Artificial Sequence
  Description of Artificial Sequence: Synthetic oligonucleotide
  Antisense strand to SEQ ID NO: 2238042
uuucuugccaucaguuucc

SEQ ID NO: 2238044 - RNA, 19 nt, Artificial Sequence
  Description of Artificial Sequence: Synthetic oligonucleotide
  Sense strand starting at position 1700 of SEQ ID NO: 1884072
cgagcuuagagugguaaug

SEQ ID NO: 2238045 - RNA, 19 nt, Artificial Sequence
  Description of Artificial Sequence: Synthetic oligonucleotide
  Antisense strand to SEQ ID NO: 2238044
cauuaccacucuaagcucg

SEQ ID NO: 2238046 - RNA, 19 nt, Artificial Sequence
  Description of Artificial Sequence: Synthetic oligonucleotide
  Sense strand starting at position 1850 of SEQ ID NO: 1884072
aggccaaaugccuggauga

SEQ ID NO: 2238047 - RNA, 19 nt, Artificial Sequence
  Description of Artificial Sequence: Synthetic oligonucleotide
  Antisense strand to SEQ ID NO: 2238046
ucauccaggcauuuggccu

SEQ ID NO: 2238048 - RNA, 19 nt, Artificial Sequence
  Description of Artificial Sequence: Synthetic oligonucleotide
  Sense strand starting at position 1851 of SEQ ID NO: 1884072
ggccaaaugccuggaugaa

SEQ ID NO: 2238049 - RNA, 19 nt, Artificial Sequence
  Description of Artificial Sequence: Synthetic oligonucleotide
  Antisense strand to SEQ ID NO: 2238048
uucauccaggcauuuggcc

SEQ ID NO: 2238050 - RNA, 19 nt, Artificial Sequence
  Description of Artificial Sequence: Synthetic oligonucleotide
  Sense strand starting at position 1852 of SEQ ID NO: 1884072
gccaaaugccuggaugaau

SEQ ID NO: 2238051 - RNA, 19 nt, Artificial Sequence
  Description of Artificial Sequence: Synthetic oligonucleotide
  Antisense strand to SEQ ID NO: 2238050
auucauccaggcauuuggc

SEQ ID NO: 2238052 - RNA, 19 nt, Artificial Sequence
  Description of Artificial Sequence: Synthetic oligonucleotide
  Sense strand starting at position 1928 of SEQ ID NO: 1884072
cgaugugcccauggacauu

SEQ ID NO: 2238053 - RNA, 19 nt, Artificial Sequence
  Description of Artificial Sequence: Synthetic oligonucleotide
  Antisense strand to SEQ ID NO: 2238052
aauguccaugggcacaucg

SEQ ID NO: 2238054 - RNA, 19 nt, Artificial Sequence
  Description of Artificial Sequence: Synthetic oligonucleotide
  Sense strand starting at position 2576 of SEQ ID NO: 1884072
guaaguuaauccuugaagg

SEQ ID NO: 2238055 - RNA, 19 nt, Artificial Sequence
  Description of Artificial Sequence: Synthetic oligonucleotide
  Antisense strand to SEQ ID NO: 2238054
ccuucaaggauuaacuuac

SEQ ID NO: 2238056 - RNA, 19 nt, Artificial Sequence
  Description of Artificial Sequence: Synthetic oligonucleotide
  Sense strand starting at position 2737 of SEQ ID NO: 1884072
cgaguauucauugcgugug

SEQ ID NO: 2238057 - RNA, 19 nt, Artificial Sequence
  Description of Artificial Sequence: Synthetic oligonucleotide
  Antisense strand to SEQ ID NO: 2238056
cacacgcaaugaauacucg

SEQ ID NO: 2238058 - RNA, 19 nt, Artificial Sequence
  Description of Artificial Sequence: Synthetic oligonucleotide
  Sense strand starting at position 2763 of SEQ ID NO: 1884072
uuguauuuaugugaacuuc

SEQ ID NO: 2238059 - RNA, 19 nt, Artificial Sequence
  Description of Artificial Sequence: Synthetic oligonucleotide
  Antisense strand to SEQ ID NO: 2238058
gaaguucacauaaauacaa

SEQ ID NO: 2238060 - RNA, 19 nt, Artificial Sequence
  Description of Artificial Sequence: Synthetic oligonucleotide
  Sense strand starting at position 3059 of SEQ ID NO: 1884072
ucucuacagugcuuauauu

SEQ ID NO: 2238061 - RNA, 19 nt, Artificial Sequence
  Description of Artificial Sequence: Synthetic oligonucleotide
  Antisense strand to SEQ ID NO: 2238060
aauauaagcacuguagaga

SEQ ID NO: 2238062 - RNA, 19 nt, Artificial Sequence
  Description of Artificial Sequence: Synthetic oligonucleotide
  Sense strand starting at position 3108 of SEQ ID NO: 1884072
aacgguaagucagauauuu

SEQ ID NO: 2238063 - RNA, 19 nt, Artificial Sequence
  Description of Artificial Sequence: Synthetic oligonucleotide
  Antisense strand to SEQ ID NO: 2238062
aaauaucugacuuaccguu

SEQ ID NO: 2238064 - RNA, 19 nt, Artificial Sequence
  Description of Artificial Sequence: Synthetic oligonucleotide
  Sense strand starting at position 3225 of SEQ ID NO: 1884072
ugacucagcauuugacgua

SEQ ID NO: 2238065 - RNA, 19 nt, Artificial Sequence
  Description of Artificial Sequence: Synthetic oligonucleotide
  Antisense strand to SEQ ID NO: 2238064
uacgucaaaugcugaguca

SEQ ID NO: 2238066 - RNA, 19 nt, Artificial Sequence
  Description of Artificial Sequence: Synthetic oligonucleotide
  Sense strand starting at position 3279 of SEQ ID NO: 1884072
cuugcuuucuauguauaua

SEQ ID NO: 2238067 - RNA, 19 nt, Artificial Sequence
  Description of Artificial Sequence: Synthetic oligonucleotide
  Antisense strand to SEQ ID NO: 2238066
uauauacauagaaagcaag

SEQ ID NO: 2238068 - RNA, 19 nt, Artificial Sequence
  Description of Artificial Sequence: Synthetic oligonucleotide
  Sense strand starting at position 3345 of SEQ ID NO: 1884072
ccuguuuccugguccugau

SEQ ID NO: 2238069 - RNA, 19 nt, Artificial Sequence
  Description of Artificial Sequence: Synthetic oligonucleotide
  Antisense strand to SEQ ID NO: 2238068
aucaggaccaggaaacagg

SEQ ID NO: 2238070 - RNA, 19 nt, Artificial Sequence
  Description of Artificial Sequence: Synthetic oligonucleotide
  Sense strand starting at position 3408 of SEQ ID NO: 1884072
gauggaguuucuuuggcaa

SEQ ID NO: 2238071 - RNA, 19 nt, Artificial Sequence
  Description of Artificial Sequence: Synthetic oligonucleotide
  Antisense strand to SEQ ID NO: 2238070
uugccaaagaaacuccauc

SEQ ID NO: 2238072 - RNA, 19 nt, Artificial Sequence
  Description of Artificial Sequence: Synthetic oligonucleotide
  Sense strand starting at position 3411 of SEQ ID NO: 1884072
ggaguuucuuuggcaaugu

SEQ ID NO: 2238073 - RNA, 19 nt, Artificial Sequence
  Description of Artificial Sequence: Synthetic oligonucleotide
  Antisense strand to SEQ ID NO: 2238072
acauugccaaagaaacucc

SEQ ID NO: 2238074 - RNA, 19 nt, Artificial Sequence
  Description of Artificial Sequence: Synthetic oligonucleotide
  Sense strand starting at position 3515 of SEQ ID NO: 1884072
uacugaaagcaucguguca

SEQ ID NO: 2238075 - RNA, 19 nt, Artificial Sequence
  Description of Artificial Sequence: Synthetic oligonucleotide
  Antisense strand to SEQ ID NO: 2238074
ugacacgaugcuuucagua

SEQ ID NO: 2238076 - RNA, 19 nt, Artificial Sequence
  Description of Artificial Sequence: Synthetic oligonucleotide
  Sense strand starting at position 3529 of SEQ ID NO: 1884072
ugucacaaucggcaugaga

SEQ ID NO: 2238077 - RNA, 19 nt, Artificial Sequence
  Description of Artificial Sequence: Synthetic oligonucleotide
  Antisense strand to SEQ ID NO: 2238076
ucucaugccgauugugaca

SEQ ID NO: 2238078 - RNA, 19 nt, Artificial Sequence
  Description of Artificial Sequence: Synthetic oligonucleotide
  Sense strand starting at position 3531 of SEQ ID NO: 1884072
ucacaaucggcaugagaaa

SEQ ID NO: 2238079 - RNA, 19 nt, Artificial Sequence
  Description of Artificial Sequence: Synthetic oligonucleotide
  Antisense strand to SEQ ID NO: 2238078
uuucucaugccgauuguga

SEQ ID NO: 2238080 - RNA, 19 nt, Artificial Sequence
  Description of Artificial Sequence: Synthetic oligonucleotide
  Sense strand starting at position 3777 of SEQ ID NO: 1884072
caaaguuugcagugagcaa

SEQ ID NO: 2238081 - RNA, 19 nt, Artificial Sequence
  Description of Artificial Sequence: Synthetic oligonucleotide
  Antisense strand to SEQ ID NO: 2238080
uugcucacugcaaacuuug

SEQ ID NO: 2238082 - RNA, 19 nt, Artificial Sequence
  Description of Artificial Sequence: Synthetic oligonucleotide
  Sense strand starting at position 3781 of SEQ ID NO: 1884072
guuugcagugagcaagauu

SEQ ID NO: 2238083 - RNA, 19 nt, Artificial Sequence
  Description of Artificial Sequence: Synthetic oligonucleotide
  Antisense strand to SEQ ID NO: 2238082
aaucuugcucacugcaaac

SEQ ID NO: 2238084 - RNA, 19 nt, Artificial Sequence
  Description of Artificial Sequence: Synthetic oligonucleotide
  Sense strand starting at position 3925 of SEQ ID NO: 1884072
aucaguaauuuccaagaga

SEQ ID NO: 2238085 - RNA, 19 nt, Artificial Sequence
  Description of Artificial Sequence: Synthetic oligonucleotide
  Antisense strand to SEQ ID NO: 2238084
ucucuuggaaauuacugau

SEQ ID NO: 2238086 - RNA, 19 nt, Artificial Sequence
  Description of Artificial Sequence: Synthetic oligonucleotide
  Sense strand starting at position 3936 of SEQ ID NO: 1884072
ccaagagagcauuguguuc

SEQ ID NO: 2238087 - RNA, 19 nt, Artificial Sequence
  Description of Artificial Sequence: Synthetic oligonucleotide
  Antisense strand to SEQ ID NO: 2238086
gaacacaaugcucucuugg

SEQ ID NO: 2238088 - RNA, 19 nt, Artificial Sequence
  Description of Artificial Sequence: Synthetic oligonucleotide
  Sense strand starting at position 1628 of SEQ ID NO: 1884073
aauggauuacccugugcac

SEQ ID NO: 2238089 - RNA, 19 nt, Artificial Sequence
  Description of Artificial Sequence: Synthetic oligonucleotide
  Antisense strand to SEQ ID NO: 2238088
gugcacaggguaauccauu

SEQ ID NO: 2238090 - RNA, 19 nt, Artificial Sequence
  Description of Artificial Sequence: Synthetic oligonucleotide
  Sense strand starting at position 1631 of SEQ ID NO: 1884073
ggauuacccugugcacagu

SEQ ID NO: 2238091 - RNA, 19 nt, Artificial Sequence
  Description of Artificial Sequence: Synthetic oligonucleotide
  Antisense strand to SEQ ID NO: 2238090
acugugcacaggguaaucc

SEQ ID NO: 2238092 - RNA, 19 nt, Artificial Sequence
  Description of Artificial Sequence: Synthetic oligonucleotide
  Sense strand starting at position 1685 of SEQ ID NO: 1884073
gccacuucccucgacgaaa

SEQ ID NO: 2238093 - RNA, 19 nt, Artificial Sequence
  Description of Artificial Sequence: Synthetic oligonucleotide
  Antisense strand to SEQ ID NO: 2238092
uuucgucgagggaaguggc

SEQ ID NO: 2238094 - RNA, 19 nt, Artificial Sequence
  Description of Artificial Sequence: Synthetic oligonucleotide
  Sense strand starting at position 1708 of SEQ ID NO: 1884073
cgacuucauugugacagga

SEQ ID NO: 2238095 - RNA, 19 nt, Artificial Sequence
  Description of Artificial Sequence: Synthetic oligonucleotide
  Antisense strand to SEQ ID NO: 2238094
uccugucacaaugaagucg

SEQ ID NO: 2238096 - RNA, 19 nt, Artificial Sequence
  Description of Artificial Sequence: Synthetic oligonucleotide
  Sense strand starting at position 1834 of SEQ ID NO: 1884073
cugcguucgcgugcaacau

SEQ ID NO: 2238097 - RNA, 19 nt, Artificial Sequence
  Description of Artificial Sequence: Synthetic oligonucleotide
  Antisense strand to SEQ ID NO: 2238096
auguugcacgcgaacgcag

SEQ ID NO: 2238098 - RNA, 19 nt, Artificial Sequence
  Description of Artificial Sequence: Synthetic oligonucleotide
  Sense strand starting at position 1838 of SEQ ID NO: 1884073
guucgcgugcaacauuaaa

SEQ ID NO: 2238099 - RNA, 19 nt, Artificial Sequence
  Description of Artificial Sequence: Synthetic oligonucleotide
  Antisense strand to SEQ ID NO: 2238098
uuuaauguugcacgcgaac

SEQ ID NO: 2238100 - RNA, 19 nt, Artificial Sequence
  Description of Artificial Sequence: Synthetic oligonucleotide
  Sense strand starting at position 1860 of SEQ ID NO: 1884073
cccacaugggcuggugaaa

SEQ ID NO: 2238101 - RNA, 19 nt, Artificial Sequence
  Description of Artificial Sequence: Synthetic oligonucleotide
  Antisense strand to SEQ ID NO: 2238100
uuucaccagcccauguggg

SEQ ID NO: 2238102 - RNA, 19 nt, Artificial Sequence
  Description of Artificial Sequence: Synthetic oligonucleotide
  Sense strand starting at position 2161 of SEQ ID NO: 1884073
aagcacgucuucccggaaa

SEQ ID NO: 2238103 - RNA, 19 nt, Artificial Sequence
  Description of Artificial Sequence: Synthetic oligonucleotide
  Antisense strand to SEQ ID NO: 2238102
uuuccgggaagacgugcuu

SEQ ID NO: 2238104 - RNA, 19 nt, Artificial Sequence
  Description of Artificial Sequence: Synthetic oligonucleotide
  Sense strand starting at position 2234 of SEQ ID NO: 1884073
ccgcgauucggugucucuu

SEQ ID NO: 2238105 - RNA, 19 nt, Artificial Sequence
  Description of Artificial Sequence: Synthetic oligonucleotide
  Antisense strand to SEQ ID NO: 2238104
aagagacaccgaaucgcgg

SEQ ID NO: 2238106 - RNA, 19 nt, Artificial Sequence
  Description of Artificial Sequence: Synthetic oligonucleotide
  Sense strand starting at position 2464 of SEQ ID NO: 1884073
ccucuuguggucguaggua

SEQ ID NO: 2238107 - RNA, 19 nt, Artificial Sequence
  Description of Artificial Sequence: Synthetic oligonucleotide
  Antisense strand to SEQ ID NO: 2238106
uaccuacgaccacaagagg

SEQ ID NO: 2238108 - RNA, 19 nt, Artificial Sequence
  Description of Artificial Sequence: Synthetic oligonucleotide
  Sense strand starting at position 2878 of SEQ ID NO: 1884073
gggcuuacagcucaucuga

SEQ ID NO: 2238109 - RNA, 19 nt, Artificial Sequence
  Description of Artificial Sequence: Synthetic oligonucleotide
  Antisense strand to SEQ ID NO: 2238108
ucagaugagcuguaagccc

SEQ ID NO: 2238110 - RNA, 19 nt, Artificial Sequence
  Description of Artificial Sequence: Synthetic oligonucleotide
  Sense strand starting at position 2880 of SEQ ID NO: 1884073
gcuuacagcucaucugaau

SEQ ID NO: 2238111 - RNA, 19 nt, Artificial Sequence
  Description of Artificial Sequence: Synthetic oligonucleotide
  Antisense strand to SEQ ID NO: 2238110
auucagaugagcuguaagc

SEQ ID NO: 2238112 - RNA, 19 nt, Artificial Sequence
  Description of Artificial Sequence: Synthetic oligonucleotide
  Sense strand starting at position 2889 of SEQ ID NO: 1884073
ucaucugaaucugcuuagu

SEQ ID NO: 2238113 - RNA, 19 nt, Artificial Sequence
  Description of Artificial Sequence: Synthetic oligonucleotide
  Antisense strand to SEQ ID NO: 2238112
acuaagcagauucagauga

SEQ ID NO: 2238114 - RNA, 19 nt, Artificial Sequence
  Description of Artificial Sequence: Synthetic oligonucleotide
  Sense strand starting at position 2919 of SEQ ID NO: 1884073
uuguguuaaccuugcagag

SEQ ID NO: 2238115 - RNA, 19 nt, Artificial Sequence
  Description of Artificial Sequence: Synthetic oligonucleotide
  Antisense strand to SEQ ID NO: 2238114
cucugcaagguuaacacaa

SEQ ID NO: 2238116 - RNA, 19 nt, Artificial Sequence
  Description of Artificial Sequence: Synthetic oligonucleotide
  Sense strand starting at position 3123 of SEQ ID NO: 1884073
guugcuaguggaugucaaa

SEQ ID NO: 2238117 - RNA, 19 nt, Artificial Sequence
  Description of Artificial Sequence: Synthetic oligonucleotide
  Antisense strand to SEQ ID NO: 2238116
uuugacauccacuagcaac

SEQ ID NO: 2238118 - RNA, 19 nt, Artificial Sequence
  Description of Artificial Sequence: Synthetic oligonucleotide
  Sense strand starting at position 3126 of SEQ ID NO: 1884073
gcuaguggaugucaaauuu

SEQ ID NO: 2238119 - RNA, 19 nt, Artificial Sequence
  Description of Artificial Sequence: Synthetic oligonucleotide
  Antisense strand to SEQ ID NO: 2238118
aaauuugacauccacuagc

SEQ ID NO: 2238120 - RNA, 19 nt, Artificial Sequence
  Description of Artificial Sequence: Synthetic oligonucleotide
  Sense strand starting at position 3249 of SEQ ID NO: 1884073
ugugauuugcucugagcac

SEQ ID NO: 2238121 - RNA, 19 nt, Artificial Sequence
  Description of Artificial Sequence: Synthetic oligonucleotide
  Antisense strand to SEQ ID NO: 2238120
gugcucagagcaaaucaca

SEQ ID NO: 2238122 - RNA, 19 nt, Artificial Sequence
  Description of Artificial Sequence: Synthetic oligonucleotide
  Sense strand starting at position 3250 of SEQ ID NO: 1884073
gugauuugcucugagcaca

SEQ ID NO: 2238123 - RNA, 19 nt, Artificial Sequence
  Description of Artificial Sequence: Synthetic oligonucleotide
  Antisense strand to SEQ ID NO: 2238122
ugugcucagagcaaaucac

SEQ ID NO: 2238124 - RNA, 19 nt, Artificial Sequence
  Description of Artificial Sequence: Synthetic oligonucleotide
  Sense strand starting at position 3373 of SEQ ID NO: 1884073
ccgccauuccagugugcuu

SEQ ID NO: 2238125 - RNA, 19 nt, Artificial Sequence
  Description of Artificial Sequence: Synthetic oligonucleotide
  Antisense strand to SEQ ID NO: 2238124
aagcacacuggaauggcgg

SEQ ID NO: 2238126 - RNA, 19 nt, Artificial Sequence
  Description of Artificial Sequence: Synthetic oligonucleotide
  Sense strand starting at position 3378 of SEQ ID NO: 1884073
auuccagugugcuucugau

SEQ ID NO: 2238127 - RNA, 19 nt, Artificial Sequence
  Description of Artificial Sequence: Synthetic oligonucleotide
  Antisense strand to SEQ ID NO: 2238126
aucagaagcacacuggaau

SEQ ID NO: 2238128 - RNA, 19 nt, Artificial Sequence
  Description of Artificial Sequence: Synthetic oligonucleotide
  Sense strand starting at position 3523 of SEQ ID NO: 1884073
gcugcaggaucucauuaua

SEQ ID NO: 2238129 - RNA, 19 nt, Artificial Sequence
  Description of Artificial Sequence: Synthetic oligonucleotide
  Antisense strand to SEQ ID NO: 2238128
uauaaugagauccugcagc

SEQ ID NO: 2238130 - RNA, 19 nt, Artificial Sequence
  Description of Artificial Sequence: Synthetic oligonucleotide
  Sense strand starting at position 3526 of SEQ ID NO: 1884073
gcaggaucucauuauauau

SEQ ID NO: 2238131 - RNA, 19 nt, Artificial Sequence
  Description of Artificial Sequence: Synthetic oligonucleotide
  Antisense strand to SEQ ID NO: 2238130
auauauaaugagauccugc

SEQ ID NO: 2238132 - RNA, 19 nt, Artificial Sequence
  Description of Artificial Sequence: Synthetic oligonucleotide
  Sense strand starting at position 3557 of SEQ ID NO: 1884073
aaggaugucugcuuccuuu

SEQ ID NO: 2238133 - RNA, 19 nt, Artificial Sequence
  Description of Artificial Sequence: Synthetic oligonucleotide
  Antisense strand to SEQ ID NO: 2238132
aaaggaagcagacauccuu

SEQ ID NO: 2238134 - RNA, 19 nt, Artificial Sequence
  Description of Artificial Sequence: Synthetic oligonucleotide
  Sense strand starting at position 3568 of SEQ ID NO: 1884073
cuuccuuucuguccuggaa

SEQ ID NO: 2238135 - RNA, 19 nt, Artificial Sequence
  Description of Artificial Sequence: Synthetic oligonucleotide
  Antisense strand to SEQ ID NO: 2238134
uuccaggacagaaaggaag

SEQ ID NO: 2238136 - RNA, 19 nt, Artificial Sequence
  Description of Artificial Sequence: Synthetic oligonucleotide
  Sense strand starting at position 3605 of SEQ ID NO: 1884073
uccaguugucucuacugau

SEQ ID NO: 2238137 - RNA, 19 nt, Artificial Sequence
  Description of Artificial Sequence: Synthetic oligonucleotide
  Antisense strand to SEQ ID NO: 2238136
aucaguagagacaacugga

SEQ ID NO: 2238138 - RNA, 19 nt, Artificial Sequence
  Description of Artificial Sequence: Synthetic oligonucleotide
  Sense strand starting at position 3611 of SEQ ID NO: 1884073
ugucucuacugauuccauu

SEQ ID NO: 2238139 - RNA, 19 nt, Artificial Sequence
  Description of Artificial Sequence: Synthetic oligonucleotide
  Antisense strand to SEQ ID NO: 2238138
aauggaaucaguagagaca

SEQ ID NO: 2238140 - RNA, 19 nt, Artificial Sequence
  Description of Artificial Sequence: Synthetic oligonucleotide
  Sense strand starting at position 3635 of SEQ ID NO: 1884073
uucuuucuuggcuguaaca

SEQ ID NO: 2238141 - RNA, 19 nt, Artificial Sequence
  Description of Artificial Sequence: Synthetic oligonucleotide
  Antisense strand to SEQ ID NO: 2238140
uguuacagccaagaaagaa

SEQ ID NO: 2238142 - RNA, 19 nt, Artificial Sequence
  Description of Artificial Sequence: Synthetic oligonucleotide
  Sense strand starting at position 3637 of SEQ ID NO: 1884073
cuuucuuggcuguaacaca

SEQ ID NO: 2238143 - RNA, 19 nt, Artificial Sequence
  Description of Artificial Sequence: Synthetic oligonucleotide
  Antisense strand to SEQ ID NO: 2238142
uguguuacagccaagaaag

SEQ ID NO: 2238144 - RNA, 19 nt, Artificial Sequence
  Description of Artificial Sequence: Synthetic oligonucleotide
  Sense strand starting at position 3714 of SEQ ID NO: 1884073
ugccaaauguucuggaaag

SEQ ID NO: 2238145 - RNA, 19 nt, Artificial Sequence
  Description of Artificial Sequence: Synthetic oligonucleotide
  Antisense strand to SEQ ID NO: 2238144
cuuuccagaacauuuggca

SEQ ID NO: 2238146 - RNA, 19 nt, Artificial Sequence
  Description of Artificial Sequence: Synthetic oligonucleotide
  Sense strand starting at position 3736 of SEQ ID NO: 1884073
gaaaguuggcagcgaagga

SEQ ID NO: 2238147 - RNA, 19 nt, Artificial Sequence
  Description of Artificial Sequence: Synthetic oligonucleotide
  Antisense strand to SEQ ID NO: 2238146
uccuucgcugccaacuuuc

SEQ ID NO: 2238148 - RNA, 19 nt, Artificial Sequence
  Description of Artificial Sequence: Synthetic oligonucleotide
  Sense strand starting at position 3809 of SEQ ID NO: 1884073
uccucuggucuguguuuga

SEQ ID NO: 2238149 - RNA, 19 nt, Artificial Sequence
  Description of Artificial Sequence: Synthetic oligonucleotide
  Antisense strand to SEQ ID NO: 2238148
ucaaacacagaccagagga

SEQ ID NO: 2238150 - RNA, 19 nt, Artificial Sequence
  Description of Artificial Sequence: Synthetic oligonucleotide
  Sense strand starting at position 3812 of SEQ ID NO: 1884073
ucuggucuguguuugaaau

SEQ ID NO: 2238151 - RNA, 19 nt, Artificial Sequence
  Description of Artificial Sequence: Synthetic oligonucleotide
  Antisense strand to SEQ ID NO: 2238150
auuucaaacacagaccaga

SEQ ID NO: 2238152 - RNA, 19 nt, Artificial Sequence
  Description of Artificial Sequence: Synthetic oligonucleotide
  Sense strand starting at position 3813 of SEQ ID NO: 1884073
cuggucuguguuugaaauu

SEQ ID NO: 2238153 - RNA, 19 nt, Artificial Sequence
  Description of Artificial Sequence: Synthetic oligonucleotide
  Antisense strand to SEQ ID NO: 2238152
aauuucaaacacagaccag

SEQ ID NO: 2238154 - RNA, 19 nt, Artificial Sequence
  Description of Artificial Sequence: Synthetic oligonucleotide
  Sense strand starting at position 3819 of SEQ ID NO: 1884073
uguguuugaaauuggcuga

SEQ ID NO: 2238155 - RNA, 19 nt, Artificial Sequence
  Description of Artificial Sequence: Synthetic oligonucleotide
  Antisense strand to SEQ ID NO: 2238154
ucagccaauuucaaacaca

SEQ ID NO: 2238156 - RNA, 19 nt, Artificial Sequence
  Description of Artificial Sequence: Synthetic oligonucleotide
  Sense strand starting at position 3820 of SEQ ID NO: 1884073
guguuugaaauuggcugaa

SEQ ID NO: 2238157 - RNA, 19 nt, Artificial Sequence
  Description of Artificial Sequence: Synthetic oligonucleotide
  Antisense strand to SEQ ID NO: 2238156
uucagccaauuucaaacac

SEQ ID NO: 2238158 - RNA, 19 nt, Artificial Sequence
  Description of Artificial Sequence: Synthetic oligonucleotide
  Sense strand starting at position 3843 of SEQ ID NO: 1884073
cauggaauuuaguaggcaa

SEQ ID NO: 2238159 - RNA, 19 nt, Artificial Sequence
  Description of Artificial Sequence: Synthetic oligonucleotide
  Antisense strand to SEQ ID NO: 2238158
uugccuacuaaauuccaug

SEQ ID NO: 2238160 - RNA, 19 nt, Artificial Sequence
  Description of Artificial Sequence: Synthetic oligonucleotide
  Sense strand starting at position 3878 of SEQ ID NO: 1884073
uccucuuaucugcagagga

SEQ ID NO: 2238161 - RNA, 19 nt, Artificial Sequence
  Description of Artificial Sequence: Synthetic oligonucleotide
  Antisense strand to SEQ ID NO: 2238160
uccucugcagauaagagga

SEQ ID NO: 2238162 - RNA, 19 nt, Artificial Sequence
  Description of Artificial Sequence: Synthetic oligonucleotide
  Sense strand starting at position 3920 of SEQ ID NO: 1884073
ggcagugucauugauauag

SEQ ID NO: 2238163 - RNA, 19 nt, Artificial Sequence
  Description of Artificial Sequence: Synthetic oligonucleotide
  Antisense strand to SEQ ID NO: 2238162
cuauaucaaugacacugcc

SEQ ID NO: 2238164 - RNA, 19 nt, Artificial Sequence
  Description of Artificial Sequence: Synthetic oligonucleotide
  Sense strand starting at position 3929 of SEQ ID NO: 1884073
auugauauagcugguguca

SEQ ID NO: 2238165 - RNA, 19 nt, Artificial Sequence
  Description of Artificial Sequence: Synthetic oligonucleotide
  Antisense strand to SEQ ID NO: 2238164
ugacaccagcuauaucaau

SEQ ID NO: 2238166 - RNA, 19 nt, Artificial Sequence
  Description of Artificial Sequence: Synthetic oligonucleotide
  Sense strand starting at position 3942 of SEQ ID NO: 1884073
gugucauuguuaccuucca

SEQ ID NO: 2238167 - RNA, 19 nt, Artificial Sequence
  Description of Artificial Sequence: Synthetic oligonucleotide
  Antisense strand to SEQ ID NO: 2238166
uggaagguaacaaugacac

SEQ ID NO: 2238168 - RNA, 19 nt, Artificial Sequence
  Description of Artificial Sequence: Synthetic oligonucleotide
  Sense strand starting at position 72 of SEQ ID NO: 1884074
acgauuagccaaggacauu

SEQ ID NO: 2238169 - RNA, 19 nt, Artificial Sequence
  Description of Artificial Sequence: Synthetic oligonucleotide
  Antisense strand to SEQ ID NO: 2238168
aauguccuuggcuaaucgu

SEQ ID NO: 2238170 - RNA, 19 nt, Artificial Sequence
  Description of Artificial Sequence: Synthetic oligonucleotide
  Sense strand starting at position 338 of SEQ ID NO: 1884074
ccuggagagucuuugguca

SEQ ID NO: 2238171 - RNA, 19 nt, Artificial Sequence
  Description of Artificial Sequence: Synthetic oligonucleotide
  Antisense strand to SEQ ID NO: 2238170
ugaccaaagacucuccagg

SEQ ID NO: 2238172 - RNA, 19 nt, Artificial Sequence
  Description of Artificial Sequence: Synthetic oligonucleotide
  Sense strand starting at position 349 of SEQ ID NO: 1884074
uuuggucaugcagagauga

SEQ ID NO: 2238173 - RNA, 19 nt, Artificial Sequence
  Description of Artificial Sequence: Synthetic oligonucleotide
  Antisense strand to SEQ ID NO: 2238172
ucaucucugcaugaccaaa

SEQ ID NO: 2238174 - RNA, 19 nt, Artificial Sequence
  Description of Artificial Sequence: Synthetic oligonucleotide
  Sense strand starting at position 424 of SEQ ID NO: 1884074
cacuguuaucaugggagca

SEQ ID NO: 2238175 - RNA, 19 nt, Artificial Sequence
  Description of Artificial Sequence: Synthetic oligonucleotide
  Antisense strand to SEQ ID NO: 2238174
ugcucccaugauaacagug

SEQ ID NO: 2238176 - RNA, 19 nt, Artificial Sequence
  Description of Artificial Sequence: Synthetic oligonucleotide
  Sense strand starting at position 425 of SEQ ID NO: 1884074
acuguuaucaugggagcag

SEQ ID NO: 2238177 - RNA, 19 nt, Artificial Sequence
  Description of Artificial Sequence: Synthetic oligonucleotide
  Antisense strand to SEQ ID NO: 2238176
cugcucccaugauaacagu

SEQ ID NO: 2238178 - RNA, 19 nt, Artificial Sequence
  Description of Artificial Sequence: Synthetic oligonucleotide
  Sense strand starting at position 446 of SEQ ID NO: 1884074
ugagucauggcucaaguuu

SEQ ID NO: 2238179 - RNA, 19 nt, Artificial Sequence
  Description of Artificial Sequence: Synthetic oligonucleotide
  Antisense strand to SEQ ID NO: 2238178
aaacuugagccaugacuca

SEQ ID NO: 2238180 - RNA, 19 nt, Artificial Sequence
  Description of Artificial Sequence: Synthetic oligonucleotide
  Sense strand starting at position 541 of SEQ ID NO: 1884074
guuuauauauggguguaua

SEQ ID NO: 2238181 - RNA, 19 nt, Artificial Sequence
  Description of Artificial Sequence: Synthetic oligonucleotide
  Antisense strand to SEQ ID NO: 2238180
uauacacccauauauaaac

SEQ ID NO: 2238182 - RNA, 19 nt, Artificial Sequence
  Description of Artificial Sequence: Synthetic oligonucleotide
  Sense strand starting at position 797 of SEQ ID NO: 1884074
auucccuccugauugagau

SEQ ID NO: 2238183 - RNA, 19 nt, Artificial Sequence
  Description of Artificial Sequence: Synthetic oligonucleotide
  Antisense strand to SEQ ID NO: 2238182
aucucaaucaggagggaau

SEQ ID NO: 2238184 - RNA, 19 nt, Artificial Sequence
  Description of Artificial Sequence: Synthetic oligonucleotide
  Sense strand starting at position 798 of SEQ ID NO: 1884074
uucccuccugauugagauu

SEQ ID NO: 2238185 - RNA, 19 nt, Artificial Sequence
  Description of Artificial Sequence: Synthetic oligonucleotide
  Antisense strand to SEQ ID NO: 2238184
aaucucaaucaggagggaa

SEQ ID NO: 2238186 - RNA, 19 nt, Artificial Sequence
  Description of Artificial Sequence: Synthetic oligonucleotide
  Sense strand starting at position 801 of SEQ ID NO: 1884074
ccuccugauugagauuucu

SEQ ID NO: 2238187 - RNA, 19 nt, Artificial Sequence
  Description of Artificial Sequence: Synthetic oligonucleotide
  Antisense strand to SEQ ID NO: 2238186
agaaaucucaaucaggagg

SEQ ID NO: 2238188 - RNA, 19 nt, Artificial Sequence
  Description of Artificial Sequence: Synthetic oligonucleotide
  Sense strand starting at position 1146 of SEQ ID NO: 1884074
agacaaagccucugacaca

SEQ ID NO: 2238189 - RNA, 19 nt, Artificial Sequence
  Description of Artificial Sequence: Synthetic oligonucleotide
  Antisense strand to SEQ ID NO: 2238188
ugugucagaggcuuugucu

SEQ ID NO: 2238190 - RNA, 19 nt, Artificial Sequence
  Description of Artificial Sequence: Synthetic oligonucleotide
  Sense strand starting at position 1230 of SEQ ID NO: 1884074
gugccagagccucaucaaa

SEQ ID NO: 2238191 - RNA, 19 nt, Artificial Sequence
  Description of Artificial Sequence: Synthetic oligonucleotide
  Antisense strand to SEQ ID NO: 2238190
uuugaugaggcucuggcac

SEQ ID NO: 2238192 - RNA, 19 nt, Artificial Sequence
  Description of Artificial Sequence: Synthetic oligonucleotide
  Sense strand starting at position 1399 of SEQ ID NO: 1884074
ggcugugaucccuggaaca

SEQ ID NO: 2238193 - RNA, 19 nt, Artificial Sequence
  Description of Artificial Sequence: Synthetic oligonucleotide
  Antisense strand to SEQ ID NO: 2238192
uguuccagggaucacagcc

SEQ ID NO: 2238194 - RNA, 19 nt, Artificial Sequence
  Description of Artificial Sequence: Synthetic oligonucleotide
  Sense strand starting at position 1411 of SEQ ID NO: 1884074
uggaacagauugcccaaua

SEQ ID NO: 2238195 - RNA, 19 nt, Artificial Sequence
  Description of Artificial Sequence: Synthetic oligonucleotide
  Antisense strand to SEQ ID NO: 2238194
uauugggcaaucuguucca

SEQ ID NO: 2238196 - RNA, 19 nt, Artificial Sequence
  Description of Artificial Sequence: Synthetic oligonucleotide
  Sense strand starting at position 1447 of SEQ ID NO: 1884074
caaguugucugauccugaa

SEQ ID NO: 2238197 - RNA, 19 nt, Artificial Sequence
  Description of Artificial Sequence: Synthetic oligonucleotide
  Antisense strand to SEQ ID NO: 2238196
uucaggaucagacaacuug

SEQ ID NO: 2238198 - RNA, 19 nt, Artificial Sequence
  Description of Artificial Sequence: Synthetic oligonucleotide
  Sense strand starting at position 1476 of SEQ ID NO: 1884074
guacaugacuuagcugaua

SEQ ID NO: 2238199 - RNA, 19 nt, Artificial Sequence
  Description of Artificial Sequence: Synthetic oligonucleotide
  Antisense strand to SEQ ID NO: 2238198
uaucagcuaagucauguac

SEQ ID NO: 2238200 - RNA, 19 nt, Artificial Sequence
  Description of Artificial Sequence: Synthetic oligonucleotide
  Sense strand starting at position 1642 of SEQ ID NO: 1884074
cgaguagugcuggaaucau

SEQ ID NO: 2238201 - RNA, 19 nt, Artificial Sequence
  Description of Artificial Sequence: Synthetic oligonucleotide
  Antisense strand to SEQ ID NO: 2238200
augauuccagcacuacucg

SEQ ID NO: 2238202 - RNA, 19 nt, Artificial Sequence
  Description of Artificial Sequence: Synthetic oligonucleotide
  Sense strand starting at position 1741 of SEQ ID NO: 1884074
guaacauugcccgauaacu

SEQ ID NO: 2238203 - RNA, 19 nt, Artificial Sequence
  Description of Artificial Sequence: Synthetic oligonucleotide
  Antisense strand to SEQ ID NO: 2238202
aguuaucgggcaauguuac

SEQ ID NO: 2238204 - RNA, 19 nt, Artificial Sequence
  Description of Artificial Sequence: Synthetic oligonucleotide
  Sense strand starting at position 1858 of SEQ ID NO: 1884074
uuagcauuuguacgggacu

SEQ ID NO: 2238205 - RNA, 19 nt, Artificial Sequence
  Description of Artificial Sequence: Synthetic oligonucleotide
  Antisense strand to SEQ ID NO: 2238204
agucccguacaaaugcuaa

SEQ ID NO: 2238206 - RNA, 19 nt, Artificial Sequence
  Description of Artificial Sequence: Synthetic oligonucleotide
  Sense strand starting at position 1860 of SEQ ID NO: 1884074
agcauuuguacgggacuuu

SEQ ID NO: 2238207 - RNA, 19 nt, Artificial Sequence
  Description of Artificial Sequence: Synthetic oligonucleotide
  Antisense strand to SEQ ID NO: 2238206
aaagucccguacaaaugcu

SEQ ID NO: 2238208 - RNA, 19 nt, Artificial Sequence
  Description of Artificial Sequence: Synthetic oligonucleotide
  Sense strand starting at position 1894 of SEQ ID NO: 1884074
auguguuguguggagaaag

SEQ ID NO: 2238209 - RNA, 19 nt, Artificial Sequence
  Description of Artificial Sequence: Synthetic oligonucleotide
  Antisense strand to SEQ ID NO: 2238208
cuuucuccacacaacacau

SEQ ID NO: 2238210 - RNA, 19 nt, Artificial Sequence
  Description of Artificial Sequence: Synthetic oligonucleotide
  Sense strand starting at position 1896 of SEQ ID NO: 1884074
guguuguguggagaaagga

SEQ ID NO: 2238211 - RNA, 19 nt, Artificial Sequence
  Description of Artificial Sequence: Synthetic oligonucleotide
  Antisense strand to SEQ ID NO: 2238210
uccuuucuccacacaacac

SEQ ID NO: 2238212 - RNA, 19 nt, Artificial Sequence
  Description of Artificial Sequence: Synthetic oligonucleotide
  Sense strand starting at position 2376 of SEQ ID NO: 1884074
gucugccagagguaagaau

SEQ ID NO: 2238213 - RNA, 19 nt, Artificial Sequence
  Description of Artificial Sequence: Synthetic oligonucleotide
  Antisense strand to SEQ ID NO: 2238212
auucuuaccucuggcagac

SEQ ID NO: 2238214 - RNA, 19 nt, Artificial Sequence
  Description of Artificial Sequence: Synthetic oligonucleotide
  Sense strand starting at position 2441 of SEQ ID NO: 1884074
aaugguuuaucuuccgaga

SEQ ID NO: 2238215 - RNA, 19 nt, Artificial Sequence
  Description of Artificial Sequence: Synthetic oligonucleotide
  Antisense strand to SEQ ID NO: 2238214
ucucggaagauaaaccauu

SEQ ID NO: 2238216 - RNA, 19 nt, Artificial Sequence
  Description of Artificial Sequence: Synthetic oligonucleotide
  Sense strand starting at position 2470 of SEQ ID NO: 1884074
agauucugauacgcuauau

SEQ ID NO: 2238217 - RNA, 19 nt, Artificial Sequence
  Description of Artificial Sequence: Synthetic oligonucleotide
  Antisense strand to SEQ ID NO: 2238216
auauagcguaucagaaucu

SEQ ID NO: 2238218 - RNA, 19 nt, Artificial Sequence
  Description of Artificial Sequence: Synthetic oligonucleotide
  Sense strand starting at position 2549 of SEQ ID NO: 1884074
ugggauauuuaacauuaac

SEQ ID NO: 2238219 - RNA, 19 nt, Artificial Sequence
  Description of Artificial Sequence: Synthetic oligonucleotide
  Antisense strand to SEQ ID NO: 2238218
guuaauguuaaauauccca

SEQ ID NO: 2238220 - RNA, 19 nt, Artificial Sequence
  Description of Artificial Sequence: Synthetic oligonucleotide
  Sense strand starting at position 2611 of SEQ ID NO: 1884074
ggacuucuugcaugggaag

SEQ ID NO: 2238221 - RNA, 19 nt, Artificial Sequence
  Description of Artificial Sequence: Synthetic oligonucleotide
  Antisense strand to SEQ ID NO: 2238220
cuucccaugcaagaagucc

SEQ ID NO: 2238222 - RNA, 19 nt, Artificial Sequence
  Description of Artificial Sequence: Synthetic oligonucleotide
  Sense strand starting at position 2727 of SEQ ID NO: 1884074
gcuguugucccgucugcaa

SEQ ID NO: 2238223 - RNA, 19 nt, Artificial Sequence
  Description of Artificial Sequence: Synthetic oligonucleotide
  Antisense strand to SEQ ID NO: 2238222
uugcagacgggacaacagc

SEQ ID NO: 2238224 - RNA, 19 nt, Artificial Sequence
  Description of Artificial Sequence: Synthetic oligonucleotide
  Sense strand starting at position 2930 of SEQ ID NO: 1884074
agacccugcugucugaaau

SEQ ID NO: 2238225 - RNA, 19 nt, Artificial Sequence
  Description of Artificial Sequence: Synthetic oligonucleotide
  Antisense strand to SEQ ID NO: 2238224
auuucagacagcagggucu

SEQ ID NO: 2238226 - RNA, 19 nt, Artificial Sequence
  Description of Artificial Sequence: Synthetic oligonucleotide
  Sense strand starting at position 2942 of SEQ ID NO: 1884074
cugaaauggcaacaguuau

SEQ ID NO: 2238227 - RNA, 19 nt, Artificial Sequence
  Description of Artificial Sequence: Synthetic oligonucleotide
  Antisense strand to SEQ ID NO: 2238226
auaacuguugccauuucag

SEQ ID NO: 2238228 - RNA, 19 nt, Artificial Sequence
  Description of Artificial Sequence: Synthetic oligonucleotide
  Sense strand starting at position 2964 of SEQ ID NO: 1884074
auccauaaauuugauggau

SEQ ID NO: 2238229 - RNA, 19 nt, Artificial Sequence
  Description of Artificial Sequence: Synthetic oligonucleotide
  Antisense strand to SEQ ID NO: 2238228
auccaucaaauuuauggau

SEQ ID NO: 2238230 - RNA, 19 nt, Artificial Sequence
  Description of Artificial Sequence: Synthetic oligonucleotide
  Sense strand starting at position 2966 of SEQ ID NO: 1884074
ccauaaauuugauggauca

SEQ ID NO: 2238231 - RNA, 19 nt, Artificial Sequence
  Description of Artificial Sequence: Synthetic oligonucleotide
  Antisense strand to SEQ ID NO: 2238230
ugauccaucaaauuuaugg

SEQ ID NO: 2238232 - RNA, 19 nt, Artificial Sequence
  Description of Artificial Sequence: Synthetic oligonucleotide
  Sense strand starting at position 2979 of SEQ ID NO: 1884074
ggaucaaagucuuccuucu

SEQ ID NO: 2238233 - RNA, 19 nt, Artificial Sequence
  Description of Artificial Sequence: Synthetic oligonucleotide
  Antisense strand to SEQ ID NO: 2238232
agaaggaagacuuugaucc

SEQ ID NO: 2238234 - RNA, 19 nt, Artificial Sequence
  Description of Artificial Sequence: Synthetic oligonucleotide
  Sense strand starting at position 3020 of SEQ ID NO: 1884074
augaaagugugaccauaua

SEQ ID NO: 2238235 - RNA, 19 nt, Artificial Sequence
  Description of Artificial Sequence: Synthetic oligonucleotide
  Antisense strand to SEQ ID NO: 2238234
uauauggucacacuuucau

SEQ ID NO: 2238236 - RNA, 19 nt, Artificial Sequence
  Description of Artificial Sequence: Synthetic oligonucleotide
  Sense strand starting at position 3500 of SEQ ID NO: 1884074
gauagagcuucuguaucag

SEQ ID NO: 2238237 - RNA, 19 nt, Artificial Sequence
  Description of Artificial Sequence: Synthetic oligonucleotide
  Antisense strand to SEQ ID NO: 2238236
cugauacagaagcucuauc

SEQ ID NO: 2238238 - RNA, 19 nt, Artificial Sequence
  Description of Artificial Sequence: Synthetic oligonucleotide
  Sense strand starting at position 3738 of SEQ ID NO: 1884074
ggcugaccuaccugagagu

SEQ ID NO: 2238239 - RNA, 19 nt, Artificial Sequence
  Description of Artificial Sequence: Synthetic oligonucleotide
  Antisense strand to SEQ ID NO: 2238238
acucucagguaggucagcc

SEQ ID NO: 2238240 - RNA, 19 nt, Artificial Sequence
  Description of Artificial Sequence: Synthetic oligonucleotide
  Sense strand starting at position 3739 of SEQ ID NO: 1884074
gcugaccuaccugagaguu

SEQ ID NO: 2238241 - RNA, 19 nt, Artificial Sequence
  Description of Artificial Sequence: Synthetic oligonucleotide
  Antisense strand to SEQ ID NO: 2238240
aacucucagguaggucagc

SEQ ID NO: 2238242 - RNA, 19 nt, Artificial Sequence
  Description of Artificial Sequence: Synthetic oligonucleotide
  Sense strand starting at position 3803 of SEQ ID NO: 1884074
agagaugaauucuuaaugu

SEQ ID NO: 2238243 - RNA, 19 nt, Artificial Sequence
  Description of Artificial Sequence: Synthetic oligonucleotide
  Antisense strand to SEQ ID NO: 2238242
acauuaagaauucaucucu

SEQ ID NO: 2238244 - RNA, 19 nt, Artificial Sequence
  Description of Artificial Sequence: Synthetic oligonucleotide
  Sense strand starting at position 3912 of SEQ ID NO: 1884074
uaugcaucuguggauauau

SEQ ID NO: 2238245 - RNA, 19 nt, Artificial Sequence
  Description of Artificial Sequence: Synthetic oligonucleotide
  Antisense strand to SEQ ID NO: 2238244
auauauccacagaugcaua

SEQ ID NO: 2238246 - RNA, 19 nt, Artificial Sequence
  Description of Artificial Sequence: Synthetic oligonucleotide
  Sense strand starting at position 3941 of SEQ ID NO: 1884074
aauagugugguguaucuga

SEQ ID NO: 2238247 - RNA, 19 nt, Artificial Sequence
  Description of Artificial Sequence: Synthetic oligonucleotide
  Antisense strand to SEQ ID NO: 2238246
ucagauacaccacacuauu

SEQ ID NO: 2238248 - RNA, 19 nt, Artificial Sequence
  Description of Artificial Sequence: Synthetic oligonucleotide
  Sense strand starting at position 35 of SEQ ID NO: 1884075
uuauacacaucuguggaua

SEQ ID NO: 2238249 - RNA, 19 nt, Artificial Sequence
  Description of Artificial Sequence: Synthetic oligonucleotide
  Antisense strand to SEQ ID NO: 2238248
uauccacagauguguauaa

SEQ ID NO: 2238250 - RNA, 19 nt, Artificial Sequence
  Description of Artificial Sequence: Synthetic oligonucleotide
  Sense strand starting at position 46 of SEQ ID NO: 1884075
uguggauagcauuaacauu

SEQ ID NO: 2238251 - RNA, 19 nt, Artificial Sequence
  Description of Artificial Sequence: Synthetic oligonucleotide
  Antisense strand to SEQ ID NO: 2238250
aauguuaaugcuauccaca

SEQ ID NO: 2238252 - RNA, 19 nt, Artificial Sequence
  Description of Artificial Sequence: Synthetic oligonucleotide
  Sense strand starting at position 445 of SEQ ID NO: 1884075
agaggaggaccuuguuuca

SEQ ID NO: 2238253 - RNA, 19 nt, Artificial Sequence
  Description of Artificial Sequence: Synthetic oligonucleotide
  Antisense strand to SEQ ID NO: 2238252
ugaaacaagguccuccucu

SEQ ID NO: 2238254 - RNA, 19 nt, Artificial Sequence
  Description of Artificial Sequence: Synthetic oligonucleotide
  Sense strand starting at position 448 of SEQ ID NO: 1884075
ggaggaccuuguuucaugu

SEQ ID NO: 2238255 - RNA, 19 nt, Artificial Sequence
  Description of Artificial Sequence: Synthetic oligonucleotide
  Antisense strand to SEQ ID NO: 2238254
acaugaaacaagguccucc

SEQ ID NO: 2238256 - RNA, 19 nt, Artificial Sequence
  Description of Artificial Sequence: Synthetic oligonucleotide
  Sense strand starting at position 478 of SEQ ID NO: 1884075
gagagauacuacuuuccug

SEQ ID NO: 2238257 - RNA, 19 nt, Artificial Sequence
  Description of Artificial Sequence: Synthetic oligonucleotide
  Antisense strand to SEQ ID NO: 2238256
caggaaaguaguaucucuc

SEQ ID NO: 2238258 - RNA, 19 nt, Artificial Sequence
  Description of Artificial Sequence: Synthetic oligonucleotide
  Sense strand starting at position 508 of SEQ ID NO: 1884075
gagccagguccaugaagau

SEQ ID NO: 2238259 - RNA, 19 nt, Artificial Sequence
  Description of Artificial Sequence: Synthetic oligonucleotide
  Antisense strand to SEQ ID NO: 2238258
aucuucauggaccuggcuc

SEQ ID NO: 2238260 - RNA, 19 nt, Artificial Sequence
  Description of Artificial Sequence: Synthetic oligonucleotide
  Sense strand starting at position 521 of SEQ ID NO: 1884075
gaagaucuggccuauguuu

SEQ ID NO: 2238261 - RNA, 19 nt, Artificial Sequence
  Description of Artificial Sequence: Synthetic oligonucleotide
  Antisense strand to SEQ ID NO: 2238260
aaacauaggccagaucuuc

SEQ ID NO: 2238262 - RNA, 19 nt, Artificial Sequence
  Description of Artificial Sequence: Synthetic oligonucleotide
  Sense strand starting at position 532 of SEQ ID NO: 1884075
cuauguuugggaugccaca

SEQ ID NO: 2238263 - RNA, 19 nt, Artificial Sequence
  Description of Artificial Sequence: Synthetic oligonucleotide
  Antisense strand to SEQ ID NO: 2238262
uguggcaucccaaacauag

SEQ ID NO: 2238264 - RNA, 19 nt, Artificial Sequence
  Description of Artificial Sequence: Synthetic oligonucleotide
  Sense strand starting at position 776 of SEQ ID NO: 1884075
cccagaguccuugggaaac

SEQ ID NO: 2238265 - RNA, 19 nt, Artificial Sequence
  Description of Artificial Sequence: Synthetic oligonucleotide
  Antisense strand to SEQ ID NO: 2238264
guuucccaaggacucuggg

SEQ ID NO: 2238266 - RNA, 19 nt, Artificial Sequence
  Description of Artificial Sequence: Synthetic oligonucleotide
  Sense strand starting at position 948 of SEQ ID NO: 1884075
cucaaacgugaaggauuaa

SEQ ID NO: 2238267 - RNA, 19 nt, Artificial Sequence
  Description of Artificial Sequence: Synthetic oligonucleotide
  Antisense strand to SEQ ID NO: 2238266
uuaauccuucacguuugag

SEQ ID NO: 2238268 - RNA, 19 nt, Artificial Sequence
  Description of Artificial Sequence: Synthetic oligonucleotide
  Sense strand starting at position 1015 of SEQ ID NO: 1884075
gguugugcuccaugaggaa

SEQ ID NO: 2238269 - RNA, 19 nt, Artificial Sequence
  Description of Artificial Sequence: Synthetic oligonucleotide
  Antisense strand to SEQ ID NO: 2238268
uuccucauggagcacaacc

SEQ ID NO: 2238270 - RNA, 19 nt, Artificial Sequence
  Description of Artificial Sequence: Synthetic oligonucleotide
  Sense strand starting at position 1260 of SEQ ID NO: 1884075
ggguaauugcaugaauauu

SEQ ID NO: 2238271 - RNA, 19 nt, Artificial Sequence
  Description of Artificial Sequence: Synthetic oligonucleotide
  Antisense strand to SEQ ID NO: 2238270
aauauucaugcaauuaccc

SEQ ID NO: 2238272 - RNA, 19 nt, Artificial Sequence
  Description of Artificial Sequence: Synthetic oligonucleotide
  Sense strand starting at position 1471 of SEQ ID NO: 1884075
gcaagaaguccaugucagg

SEQ ID NO: 2238273 - RNA, 19 nt, Artificial Sequence
  Description of Artificial Sequence: Synthetic oligonucleotide
  Antisense strand to SEQ ID NO: 2238272
ccugacauggacuucuugc

SEQ ID NO: 2238274 - RNA, 19 nt, Artificial Sequence
  Description of Artificial Sequence: Synthetic oligonucleotide
  Sense strand starting at position 1584 of SEQ ID NO: 1884075
cccagaucugguggaauag

SEQ ID NO: 2238275 - RNA, 19 nt, Artificial Sequence
  Description of Artificial Sequence: Synthetic oligonucleotide
  Antisense strand to SEQ ID NO: 2238274
cuauuccaccagaucuggg

SEQ ID NO: 2238276 - RNA, 19 nt, Artificial Sequence
  Description of Artificial Sequence: Synthetic oligonucleotide
  Sense strand starting at position 1600 of SEQ ID NO: 1884075
uagcauauagcguaucaga

SEQ ID NO: 2238277 - RNA, 19 nt, Artificial Sequence
  Description of Artificial Sequence: Synthetic oligonucleotide
  Antisense strand to SEQ ID NO: 2238276
ucugauacgcuauaugcua

SEQ ID NO: 2238278 - RNA, 19 nt, Artificial Sequence
  Description of Artificial Sequence: Synthetic oligonucleotide
  Sense strand starting at position 1613 of SEQ ID NO: 1884075
aucagaaucuaggucuauu

SEQ ID NO: 2238279 - RNA, 19 nt, Artificial Sequence
  Description of Artificial Sequence: Synthetic oligonucleotide
  Antisense strand to SEQ ID NO: 2238278
aauagaccuagauucugau

SEQ ID NO: 2238280 - RNA, 19 nt, Artificial Sequence
  Description of Artificial Sequence: Synthetic oligonucleotide
  Sense strand starting at position 1622 of SEQ ID NO: 1884075
uaggucuauucucucggaa

SEQ ID NO: 2238281 - RNA, 19 nt, Artificial Sequence
  Description of Artificial Sequence: Synthetic oligonucleotide
  Antisense strand to SEQ ID NO: 2238280
uuccgagagaauagaccua

SEQ ID NO: 2238282 - RNA, 19 nt, Artificial Sequence
  Description of Artificial Sequence: Synthetic oligonucleotide
  Sense strand starting at position 1625 of SEQ ID NO: 1884075
gucuauucucucggaagau

SEQ ID NO: 2238283 - RNA, 19 nt, Artificial Sequence
  Description of Artificial Sequence: Synthetic oligonucleotide
  Antisense strand to SEQ ID NO: 2238282
aucuuccgagagaauagac

SEQ ID NO: 2238284 - RNA, 19 nt, Artificial Sequence
  Description of Artificial Sequence: Synthetic oligonucleotide
  Sense strand starting at position 1671 of SEQ ID NO: 1884075
cuagcauguucuuugacca

SEQ ID NO: 2238285 - RNA, 19 nt, Artificial Sequence
  Description of Artificial Sequence: Synthetic oligonucleotide
  Antisense strand to SEQ ID NO: 2238284
uggucaaagaacaugcuag

SEQ ID NO: 2238286 - RNA, 19 nt, Artificial Sequence
  Description of Artificial Sequence: Synthetic oligonucleotide
  Sense strand starting at position 2211 of SEQ ID NO: 1884075
auuaaagucccguacaaau

SEQ ID NO: 2238287 - RNA, 19 nt, Artificial Sequence
  Description of Artificial Sequence: Synthetic oligonucleotide
  Antisense strand to SEQ ID NO: 2238286
auuuguacgggacuuuaau

SEQ ID NO: 2238288 - RNA, 19 nt, Artificial Sequence
  Description of Artificial Sequence: Synthetic oligonucleotide
  Sense strand starting at position 2241 of SEQ ID NO: 1884075
cugaucuugucagcaaacu

SEQ ID NO: 2238289 - RNA, 19 nt, Artificial Sequence
  Description of Artificial Sequence: Synthetic oligonucleotide
  Antisense strand to SEQ ID NO: 2238288
aguuugcugacaagaucag

SEQ ID NO: 2238290 - RNA, 19 nt, Artificial Sequence
  Description of Artificial Sequence: Synthetic oligonucleotide
  Sense strand starting at position 2242 of SEQ ID NO: 1884075
ugaucuugucagcaaacuu

SEQ ID NO: 2238291 - RNA, 19 nt, Artificial Sequence
  Description of Artificial Sequence: Synthetic oligonucleotide
  Antisense strand to SEQ ID NO: 2238290
aaguuugcugacaagauca

SEQ ID NO: 2238292 - RNA, 19 nt, Artificial Sequence
  Description of Artificial Sequence: Synthetic oligonucleotide
  Sense strand starting at position 2283 of SEQ ID NO: 1884075
uucuaugcccacuagucau

SEQ ID NO: 2238293 - RNA, 19 nt, Artificial Sequence
  Description of Artificial Sequence: Synthetic oligonucleotide
  Antisense strand to SEQ ID NO: 2238292
augacuagugggcauagaa

SEQ ID NO: 2238294 - RNA, 19 nt, Artificial Sequence
  Description of Artificial Sequence: Synthetic oligonucleotide
  Sense strand starting at position 2290 of SEQ ID NO: 1884075
cccacuagucauggacaaa

SEQ ID NO: 2238295 - RNA, 19 nt, Artificial Sequence
  Description of Artificial Sequence: Synthetic oligonucleotide
  Antisense strand to SEQ ID NO: 2238294
uuuguccaugacuaguggg

SEQ ID NO: 2238296 - RNA, 19 nt, Artificial Sequence
  Description of Artificial Sequence: Synthetic oligonucleotide
  Sense strand starting at position 2331 of SEQ ID NO: 1884075
ucaguuaucgggcaauguu

SEQ ID NO: 2238297 - RNA, 19 nt, Artificial Sequence
  Description of Artificial Sequence: Synthetic oligonucleotide
  Antisense strand to SEQ ID NO: 2238296
aacauugcccgauaacuga

SEQ ID NO: 2238298 - RNA, 19 nt, Artificial Sequence
  Description of Artificial Sequence: Synthetic oligonucleotide
  Sense strand starting at position 2380 of SEQ ID NO: 1884075
aagggacaauucuaaggaa

SEQ ID NO: 2238299 - RNA, 19 nt, Artificial Sequence
  Description of Artificial Sequence: Synthetic oligonucleotide
  Antisense strand to SEQ ID NO: 2238298
uuccuuagaauugucccuu

SEQ ID NO: 2238300 - RNA, 19 nt, Artificial Sequence
  Description of Artificial Sequence: Synthetic oligonucleotide
  Sense strand starting at position 2430 of SEQ ID NO: 1884075
ggaugauuccagcacuacu

SEQ ID NO: 2238301 - RNA, 19 nt, Artificial Sequence
  Description of Artificial Sequence: Synthetic oligonucleotide
  Antisense strand to SEQ ID NO: 2238300
aguagugcuggaaucaucc

SEQ ID NO: 2238302 - RNA, 19 nt, Artificial Sequence
  Description of Artificial Sequence: Synthetic oligonucleotide
  Sense strand starting at position 2670 of SEQ ID NO: 1884075
caaucuguuccagggauca

SEQ ID NO: 2238303 - RNA, 19 nt, Artificial Sequence
  Description of Artificial Sequence: Synthetic oligonucleotide
  Antisense strand to SEQ ID NO: 2238302
ugaucccuggaacagauug

SEQ ID NO: 2238304 - RNA, 19 nt, Artificial Sequence
  Description of Artificial Sequence: Synthetic oligonucleotide
  Sense strand starting at position 2879 of SEQ ID NO: 1884075
ucauuugccugcgcauuaa

SEQ ID NO: 2238305 - RNA, 19 nt, Artificial Sequence
  Description of Artificial Sequence: Synthetic oligonucleotide
  Antisense strand to SEQ ID NO: 2238304
uuaaugcgcaggcaaauga

SEQ ID NO: 2238306 - RNA, 19 nt, Artificial Sequence
  Description of Artificial Sequence: Synthetic oligonucleotide
  Sense strand starting at position 3013 of SEQ ID NO: 1884075
uguucaauuugggugaguu

SEQ ID NO: 2238307 - RNA, 19 nt, Artificial Sequence
  Description of Artificial Sequence: Synthetic oligonucleotide
  Antisense strand to SEQ ID NO: 2238306
aacucacccaaauugaaca

SEQ ID NO: 2238308 - RNA, 19 nt, Artificial Sequence
  Description of Artificial Sequence: Synthetic oligonucleotide
  Sense strand starting at position 3014 of SEQ ID NO: 1884075
guucaauuugggugaguuc

SEQ ID NO: 2238309 - RNA, 19 nt, Artificial Sequence
  Description of Artificial Sequence: Synthetic oligonucleotide
  Antisense strand to SEQ ID NO: 2238308
gaacucacccaaauugaac

SEQ ID NO: 2238310 - RNA, 19 nt, Artificial Sequence
  Description of Artificial Sequence: Synthetic oligonucleotide
  Sense strand starting at position 3087 of SEQ ID NO: 1884075
ggccauaugcugcauuaca

SEQ ID NO: 2238311 - RNA, 19 nt, Artificial Sequence
  Description of Artificial Sequence: Synthetic oligonucleotide
  Antisense strand to SEQ ID NO: 2238310
uguaaugcagcauauggcc

SEQ ID NO: 2238312 - RNA, 19 nt, Artificial Sequence
  Description of Artificial Sequence: Synthetic oligonucleotide
  Sense strand starting at position 3135 of SEQ ID NO: 1884075
uuagaucccagaugagguu

SEQ ID NO: 2238313 - RNA, 19 nt, Artificial Sequence
  Description of Artificial Sequence: Synthetic oligonucleotide
  Antisense strand to SEQ ID NO: 2238312
aaccucaucugggaucuaa

SEQ ID NO: 2238314 - RNA, 19 nt, Artificial Sequence
  Description of Artificial Sequence: Synthetic oligonucleotide
  Sense strand starting at position 3318 of SEQ ID NO: 1884075
gauguacauaugugugaga

SEQ ID NO: 2238315 - RNA, 19 nt, Artificial Sequence
  Description of Artificial Sequence: Synthetic oligonucleotide
  Antisense strand to SEQ ID NO: 2238314
ucucacacauauguacauc

SEQ ID NO: 2238316 - RNA, 19 nt, Artificial Sequence
  Description of Artificial Sequence: Synthetic oligonucleotide
  Sense strand starting at position 3345 of SEQ ID NO: 1884075
guguguauuuacucauaca

SEQ ID NO: 2238317 - RNA, 19 nt, Artificial Sequence
  Description of Artificial Sequence: Synthetic oligonucleotide
  Antisense strand to SEQ ID NO: 2238316
uguaugaguaaauacacac

SEQ ID NO: 2238318 - RNA, 19 nt, Artificial Sequence
  Description of Artificial Sequence: Synthetic oligonucleotide
  Sense strand starting at position 3409 of SEQ ID NO: 1884075
ucucaugauggguguguga

SEQ ID NO: 2238319 - RNA, 19 nt, Artificial Sequence
  Description of Artificial Sequence: Synthetic oligonucleotide
  Antisense strand to SEQ ID NO: 2238318
ucacacacccaucaugaga

SEQ ID NO: 2238320 - RNA, 19 nt, Artificial Sequence
  Description of Artificial Sequence: Synthetic oligonucleotide
  Sense strand starting at position 3411 of SEQ ID NO: 1884075
ucaugaugggugugugauu

SEQ ID NO: 2238321 - RNA, 19 nt, Artificial Sequence
  Description of Artificial Sequence: Synthetic oligonucleotide
  Antisense strand to SEQ ID NO: 2238320
aaucacacacccaucauga

SEQ ID NO: 2238322 - RNA, 19 nt, Artificial Sequence
  Description of Artificial Sequence: Synthetic oligonucleotide
  Sense strand starting at position 3613 of SEQ ID NO: 1884075
guaccacucugagcuaaac

SEQ ID NO: 2238323 - RNA, 19 nt, Artificial Sequence
  Description of Artificial Sequence: Synthetic oligonucleotide
  Antisense strand to SEQ ID NO: 2238322
guuuagcucagagugguac

SEQ ID NO: 2238324 - RNA, 19 nt, Artificial Sequence
  Description of Artificial Sequence: Synthetic oligonucleotide
  Sense strand starting at position 3655 of SEQ ID NO: 1884075
ccaugauaacagugaguac

SEQ ID NO: 2238325 - RNA, 19 nt, Artificial Sequence
  Description of Artificial Sequence: Synthetic oligonucleotide
  Antisense strand to SEQ ID NO: 2238324
guacucacuguuaucaugg

SEQ ID NO: 2238326 - RNA, 19 nt, Artificial Sequence
  Description of Artificial Sequence: Synthetic oligonucleotide
  Sense strand starting at position 3813 of SEQ ID NO: 1884075
cuugaaccucugugagagu

SEQ ID NO: 2238327 - RNA, 19 nt, Artificial Sequence
  Description of Artificial Sequence: Synthetic oligonucleotide
  Antisense strand to SEQ ID NO: 2238326
acucucacagagguucaag

SEQ ID NO: 2238328 - RNA, 19 nt, Artificial Sequence
  Description of Artificial Sequence: Synthetic oligonucleotide
  Sense strand starting at position 256 of SEQ ID NO: 1884076
acuguuaaaccuggcuaaa

SEQ ID NO: 2238329 - RNA, 19 nt, Artificial Sequence
  Description of Artificial Sequence: Synthetic oligonucleotide
  Antisense strand to SEQ ID NO: 2238328
uuuagccagguuuaacagu

SEQ ID NO: 2238330 - RNA, 19 nt, Artificial Sequence
  Description of Artificial Sequence: Synthetic oligonucleotide
  Sense strand starting at position 258 of SEQ ID NO: 1884076
uguuaaaccuggcuaaaca

SEQ ID NO: 2238331 - RNA, 19 nt, Artificial Sequence
  Description of Artificial Sequence: Synthetic oligonucleotide
  Antisense strand to SEQ ID NO: 2238330
uguuuagccagguuuaaca

SEQ ID NO: 2238332 - RNA, 19 nt, Artificial Sequence
  Description of Artificial Sequence: Synthetic oligonucleotide
  Sense strand starting at position 277 of SEQ ID NO: 1884076
ggugucauuccacagugaa

SEQ ID NO: 2238333 - RNA, 19 nt, Artificial Sequence
  Description of Artificial Sequence: Synthetic oligonucleotide
  Antisense strand to SEQ ID NO: 2238332
uucacuguggaaugacacc

SEQ ID NO: 2238334 - RNA, 19 nt, Artificial Sequence
  Description of Artificial Sequence: Synthetic oligonucleotide
  Sense strand starting at position 280 of SEQ ID NO: 1884076
gucauuccacagugaaguu

SEQ ID NO: 2238335 - RNA, 19 nt, Artificial Sequence
  Description of Artificial Sequence: Synthetic oligonucleotide
  Antisense strand to SEQ ID NO: 2238334
aacuucacuguggaaugac

SEQ ID NO: 2238336 - RNA, 19 nt, Artificial Sequence
  Description of Artificial Sequence: Synthetic oligonucleotide
  Sense strand starting at position 315 of SEQ ID NO: 1884076
cccagaaagugacugcuau

SEQ ID NO: 2238337 - RNA, 19 nt, Artificial Sequence
  Description of Artificial Sequence: Synthetic oligonucleotide
  Antisense strand to SEQ ID NO: 2238336
auagcagucacuuucuggg

SEQ ID NO: 2238338 - RNA, 19 nt, Artificial Sequence
  Description of Artificial Sequence: Synthetic oligonucleotide
  Sense strand starting at position 316 of SEQ ID NO: 1884076
ccagaaagugacugcuauc

SEQ ID NO: 2238339 - RNA, 19 nt, Artificial Sequence
  Description of Artificial Sequence: Synthetic oligonucleotide
  Antisense strand to SEQ ID NO: 2238338
gauagcagucacuuucugg

SEQ ID NO: 2238340 - RNA, 19 nt, Artificial Sequence
  Description of Artificial Sequence: Synthetic oligonucleotide
  Sense strand starting at position 322 of SEQ ID NO: 1884076
agugacugcuaucuaauga

SEQ ID NO: 2238341 - RNA, 19 nt, Artificial Sequence
  Description of Artificial Sequence: Synthetic oligonucleotide
  Antisense strand to SEQ ID NO: 2238340
ucauuagauagcagucacu

SEQ ID NO: 2238342 - RNA, 19 nt, Artificial Sequence
  Description of Artificial Sequence: Synthetic oligonucleotide
  Sense strand starting at position 336 of SEQ ID NO: 1884076
aaugacucagcuuguggau

SEQ ID NO: 2238343 - RNA, 19 nt, Artificial Sequence
  Description of Artificial Sequence: Synthetic oligonucleotide
  Antisense strand to SEQ ID NO: 2238342
auccacaagcugagucauu

SEQ ID NO: 2238344 - RNA, 19 nt, Artificial Sequence
  Description of Artificial Sequence: Synthetic oligonucleotide
  Sense strand starting at position 357 of SEQ ID NO: 1884076
gucgcuaccguugucuuaa

SEQ ID NO: 2238345 - RNA, 19 nt, Artificial Sequence
  Description of Artificial Sequence: Synthetic oligonucleotide
  Antisense strand to SEQ ID NO: 2238344
uuaagacaacgguagcgac

SEQ ID NO: 2238346 - RNA, 19 nt, Artificial Sequence
  Description of Artificial Sequence: Synthetic oligonucleotide
  Sense strand starting at position 539 of SEQ ID NO: 1884076
cugggcuuccaccauaaca

SEQ ID NO: 2238347 - RNA, 19 nt, Artificial Sequence
  Description of Artificial Sequence: Synthetic oligonucleotide
  Antisense strand to SEQ ID NO: 2238346
uguuaugguggaagcccag

SEQ ID NO: 2238348 - RNA, 19 nt, Artificial Sequence
  Description of Artificial Sequence: Synthetic oligonucleotide
  Sense strand starting at position 541 of SEQ ID NO: 1884076
gggcuuccaccauaacacu

SEQ ID NO: 2238349 - RNA, 19 nt, Artificial Sequence
  Description of Artificial Sequence: Synthetic oligonucleotide
  Antisense strand to SEQ ID NO: 2238348
aguguuaugguggaagccc

SEQ ID NO: 2238350 - RNA, 19 nt, Artificial Sequence
  Description of Artificial Sequence: Synthetic oligonucleotide
  Sense strand starting at position 703 of SEQ ID NO: 1884076
acggucucuguguaggaaa

SEQ ID NO: 2238351 - RNA, 19 nt, Artificial Sequence
  Description of Artificial Sequence: Synthetic oligonucleotide
  Antisense strand to SEQ ID NO: 2238350
uuuccuacacagagaccgu

SEQ ID NO: 2238352 - RNA, 19 nt, Artificial Sequence
  Description of Artificial Sequence: Synthetic oligonucleotide
  Sense strand starting at position 752 of SEQ ID NO: 1884076
gugagcugccaauaucgga

SEQ ID NO: 2238353 - RNA, 19 nt, Artificial Sequence
  Description of Artificial Sequence: Synthetic oligonucleotide
  Antisense strand to SEQ ID NO: 2238352
uccgauauuggcagcucac

SEQ ID NO: 2238354 - RNA, 19 nt, Artificial Sequence
  Description of Artificial Sequence: Synthetic oligonucleotide
  Sense strand starting at position 765 of SEQ ID NO: 1884076
aucggaguuuaaguauaau

SEQ ID NO: 2238355 - RNA, 19 nt, Artificial Sequence
  Description of Artificial Sequence: Synthetic oligonucleotide
  Antisense strand to SEQ ID NO: 2238354
auuauacuuaaacuccgau

SEQ ID NO: 2238356 - RNA, 19 nt, Artificial Sequence
  Description of Artificial Sequence: Synthetic oligonucleotide
  Sense strand starting at position 902 of SEQ ID NO: 1884076
guauuuaaggagcgugauu

SEQ ID NO: 2238357 - RNA, 19 nt, Artificial Sequence
  Description of Artificial Sequence: Synthetic oligonucleotide
  Antisense strand to SEQ ID NO: 2238356
aaucacgcuccuuaaauac

SEQ ID NO: 2238358 - RNA, 19 nt, Artificial Sequence
  Description of Artificial Sequence: Synthetic oligonucleotide
  Sense strand starting at position 907 of SEQ ID NO: 1884076
uaaggagcgugauuacuuu

SEQ ID NO: 2238359 - RNA, 19 nt, Artificial Sequence
  Description of Artificial Sequence: Synthetic oligonucleotide
  Antisense strand to SEQ ID NO: 2238358
aaaguaaucacgcuccuua

SEQ ID NO: 2238360 - RNA, 19 nt, Artificial Sequence
  Description of Artificial Sequence: Synthetic oligonucleotide
  Sense strand starting at position 931 of SEQ ID NO: 1884076
cguaguucccagggagaaa

SEQ ID NO: 2238361 - RNA, 19 nt, Artificial Sequence
  Description of Artificial Sequence: Synthetic oligonucleotide
  Antisense strand to SEQ ID NO: 2238360
uuucucccugggaacuacg

SEQ ID NO: 2238362 - RNA, 19 nt, Artificial Sequence
  Description of Artificial Sequence: Synthetic oligonucleotide
  Sense strand starting at position 1199 of SEQ ID NO: 1884076
gggaguacgacaggucuuu

SEQ ID NO: 2238363 - RNA, 19 nt, Artificial Sequence
  Description of Artificial Sequence: Synthetic oligonucleotide
  Antisense strand to SEQ ID NO: 2238362
aaagaccugucguacuccc

SEQ ID NO: 2238364 - RNA, 19 nt, Artificial Sequence
  Description of Artificial Sequence: Synthetic oligonucleotide
  Sense strand starting at position 1204 of SEQ ID NO: 1884076
uacgacaggucuuuauaug

SEQ ID NO: 2238365 - RNA, 19 nt, Artificial Sequence
  Description of Artificial Sequence: Synthetic oligonucleotide
  Antisense strand to SEQ ID NO: 2238364
cauauaaagaccugucgua

SEQ ID NO: 2238366 - RNA, 19 nt, Artificial Sequence
  Description of Artificial Sequence: Synthetic oligonucleotide
  Sense strand starting at position 1205 of SEQ ID NO: 1884076
acgacaggucuuuauauga

SEQ ID NO: 2238367 - RNA, 19 nt, Artificial Sequence
  Description of Artificial Sequence: Synthetic oligonucleotide
  Antisense strand to SEQ ID NO: 2238366
ucauauaaagaccugucgu

SEQ ID NO: 2238368 - RNA, 19 nt, Artificial Sequence
  Description of Artificial Sequence: Synthetic oligonucleotide
  Sense strand starting at position 1291 of SEQ ID NO: 1884076
cagucucuuugaguacaga

SEQ ID NO: 2238369 - RNA, 19 nt, Artificial Sequence
  Description of Artificial Sequence: Synthetic oligonucleotide
  Antisense strand to SEQ ID NO: 2238368
ucuguacucaaagagacug

SEQ ID NO: 2238370 - RNA, 19 nt, Artificial Sequence
  Description of Artificial Sequence: Synthetic oligonucleotide
  Sense strand starting at position 1292 of SEQ ID NO: 1884076
agucucuuugaguacagaa

SEQ ID NO: 2238371 - RNA, 19 nt, Artificial Sequence
  Description of Artificial Sequence: Synthetic oligonucleotide
  Antisense strand to SEQ ID NO: 2238370
uucuguacucaaagagacu

SEQ ID NO: 2238372 - RNA, 19 nt, Artificial Sequence
  Description of Artificial Sequence: Synthetic oligonucleotide
  Sense strand starting at position 1369 of SEQ ID NO: 1884076
guuauagugguggguaaua

SEQ ID NO: 2238373 - RNA, 19 nt, Artificial Sequence
  Description of Artificial Sequence: Synthetic oligonucleotide
  Antisense strand to SEQ ID NO: 2238372
uauuacccaccacuauaac

SEQ ID NO: 2238374 - RNA, 19 nt, Artificial Sequence
  Description of Artificial Sequence: Synthetic oligonucleotide
  Sense strand starting at position 1371 of SEQ ID NO: 1884076
uauagugguggguaauaau

SEQ ID NO: 2238375 - RNA, 19 nt, Artificial Sequence
  Description of Artificial Sequence: Synthetic oligonucleotide
  Antisense strand to SEQ ID NO: 2238374
auuauuacccaccacuaua

SEQ ID NO: 2238376 - RNA, 19 nt, Artificial Sequence
  Description of Artificial Sequence: Synthetic oligonucleotide
  Sense strand starting at position 1381 of SEQ ID NO: 1884076
gguaauaauuuccuuugcu

SEQ ID NO: 2238377 - RNA, 19 nt, Artificial Sequence
  Description of Artificial Sequence: Synthetic oligonucleotide
  Antisense strand to SEQ ID NO: 2238376
agcaaaggaaauuauuacc

SEQ ID NO: 2238378 - RNA, 19 nt, Artificial Sequence
  Description of Artificial Sequence: Synthetic oligonucleotide
  Sense strand starting at position 1416 of SEQ ID NO: 1884076
aaguaaauauguguagaug

SEQ ID NO: 2238379 - RNA, 19 nt, Artificial Sequence
  Description of Artificial Sequence: Synthetic oligonucleotide
  Antisense strand to SEQ ID NO: 2238378
caucuacacauauuuacuu

SEQ ID NO: 2238380 - RNA, 19 nt, Artificial Sequence
  Description of Artificial Sequence: Synthetic oligonucleotide
  Sense strand starting at position 2432 of SEQ ID NO: 1884076
guaucugcugcgccugaga

SEQ ID NO: 2238381 - RNA, 19 nt, Artificial Sequence
  Description of Artificial Sequence: Synthetic oligonucleotide
  Antisense strand to SEQ ID NO: 2238380
ucucaggcgcagcagauac

SEQ ID NO: 2238382 - RNA, 19 nt, Artificial Sequence
  Description of Artificial Sequence: Synthetic oligonucleotide
  Sense strand starting at position 2536 of SEQ ID NO: 1884076
cgaauacgccucgauaaac

SEQ ID NO: 2238383 - RNA, 19 nt, Artificial Sequence
  Description of Artificial Sequence: Synthetic oligonucleotide
  Antisense strand to SEQ ID NO: 2238382
guuuaucgaggcguauucg

SEQ ID NO: 2238384 - RNA, 19 nt, Artificial Sequence
  Description of Artificial Sequence: Synthetic oligonucleotide
  Sense strand starting at position 3215 of SEQ ID NO: 1884076
aggaaaugucgagggugca

SEQ ID NO: 2238385 - RNA, 19 nt, Artificial Sequence
  Description of Artificial Sequence: Synthetic oligonucleotide
  Antisense strand to SEQ ID NO: 2238384
ugcacccucgacauuuccu

SEQ ID NO: 2238386 - RNA, 19 nt, Artificial Sequence
  Description of Artificial Sequence: Synthetic oligonucleotide
  Sense strand starting at position 3389 of SEQ ID NO: 1884076
ugcagauuuguuuggagua

SEQ ID NO: 2238387 - RNA, 19 nt, Artificial Sequence
  Description of Artificial Sequence: Synthetic oligonucleotide
  Antisense strand to SEQ ID NO: 2238386
uacuccaaacaaaucugca

SEQ ID NO: 2238388 - RNA, 19 nt, Artificial Sequence
  Description of Artificial Sequence: Synthetic oligonucleotide
  Sense strand starting at position 3416 of SEQ ID NO: 1884076
uucugaagccuguaaccuu

SEQ ID NO: 2238389 - RNA, 19 nt, Artificial Sequence
  Description of Artificial Sequence: Synthetic oligonucleotide
  Antisense strand to SEQ ID NO: 2238388
aagguuacaggcuucagaa

SEQ ID NO: 2238390 - RNA, 19 nt, Artificial Sequence
  Description of Artificial Sequence: Synthetic oligonucleotide
  Sense strand starting at position 3521 of SEQ ID NO: 1884076
agaucuaaauuucgaagga

SEQ ID NO: 2238391 - RNA, 19 nt, Artificial Sequence
  Description of Artificial Sequence: Synthetic oligonucleotide
  Antisense strand to SEQ ID NO: 2238390
uccuucgaaauuuagaucu

SEQ ID NO: 2238392 - RNA, 19 nt, Artificial Sequence
  Description of Artificial Sequence: Synthetic oligonucleotide
  Sense strand starting at position 3522 of SEQ ID NO: 1884076
gaucuaaauuucgaaggag

SEQ ID NO: 2238393 - RNA, 19 nt, Artificial Sequence
  Description of Artificial Sequence: Synthetic oligonucleotide
  Antisense strand to SEQ ID NO: 2238392
cuccuucgaaauuuagauc

SEQ ID NO: 2238394 - RNA, 19 nt, Artificial Sequence
  Description of Artificial Sequence: Synthetic oligonucleotide
  Sense strand starting at position 3609 of SEQ ID NO: 1884076
gucuaaauuggguggguuu

SEQ ID NO: 2238395 - RNA, 19 nt, Artificial Sequence
  Description of Artificial Sequence: Synthetic oligonucleotide
  Antisense strand to SEQ ID NO: 2238394
aaacccacccaauuuagac

SEQ ID NO: 2238396 - RNA, 19 nt, Artificial Sequence
  Description of Artificial Sequence: Synthetic oligonucleotide
  Sense strand starting at position 3850 of SEQ ID NO: 1884076
ccaggagucgcguggauuu

SEQ ID NO: 2238397 - RNA, 19 nt, Artificial Sequence
  Description of Artificial Sequence: Synthetic oligonucleotide
  Antisense strand to SEQ ID NO: 2238396
aaauccacgcgacuccugg

SEQ ID NO: 2238398 - RNA, 19 nt, Artificial Sequence
  Description of Artificial Sequence: Synthetic oligonucleotide
  Sense strand starting at position 3860 of SEQ ID NO: 1884076
cguggauuugugugcuaca

SEQ ID NO: 2238399 - RNA, 19 nt, Artificial Sequence
  Description of Artificial Sequence: Synthetic oligonucleotide
  Antisense strand to SEQ ID NO: 2238398
uguagcacacaaauccacg

SEQ ID NO: 2238400 - RNA, 19 nt, Artificial Sequence
  Description of Artificial Sequence: Synthetic oligonucleotide
  Sense strand starting at position 3861 of SEQ ID NO: 1884076
guggauuugugugcuacaa

SEQ ID NO: 2238401 - RNA, 19 nt, Artificial Sequence
  Description of Artificial Sequence: Synthetic oligonucleotide
  Antisense strand to SEQ ID NO: 2238400
uuguagcacacaaauccac

SEQ ID NO: 2238402 - RNA, 19 nt, Artificial Sequence
  Description of Artificial Sequence: Synthetic oligonucleotide
  Sense strand starting at position 3901 of SEQ ID NO: 1884076
uguaauacuucucuuggua

SEQ ID NO: 2238403 - RNA, 19 nt, Artificial Sequence
  Description of Artificial Sequence: Synthetic oligonucleotide
  Antisense strand to SEQ ID NO: 2238402
uaccaagagaaguauuaca

SEQ ID NO: 2238404 - RNA, 19 nt, Artificial Sequence
  Description of Artificial Sequence: Synthetic oligonucleotide
  Sense strand starting at position 3940 of SEQ ID NO: 1884076
gaaauuaugcucuguaaug

SEQ ID NO: 2238405 - RNA, 19 nt, Artificial Sequence
  Description of Artificial Sequence: Synthetic oligonucleotide
  Antisense strand to SEQ ID NO: 2238404
cauuacagagcauaauuuc

SEQ ID NO: 2238406 - RNA, 19 nt, Artificial Sequence
  Description of Artificial Sequence: Synthetic oligonucleotide
  Sense strand starting at position 3979 of SEQ ID NO: 1884076
guuuaaacucuuuggguug

SEQ ID NO: 2238407 - RNA, 19 nt, Artificial Sequence
  Description of Artificial Sequence: Synthetic oligonucleotide
  Antisense strand to SEQ ID NO: 2238406
caacccaaagaguuuaaac

SEQ ID NO: 2238408 - RNA, 19 nt, Artificial Sequence
  Description of Artificial Sequence: Synthetic oligonucleotide
  Sense strand starting at position 3053 of SEQ ID NO: 1884077
ugcguucuucucugcacau

SEQ ID NO: 2238409 - RNA, 19 nt, Artificial Sequence
  Description of Artificial Sequence: Synthetic oligonucleotide
  Antisense strand to SEQ ID NO: 2238408
augugcagagaagaacgca

SEQ ID NO: 2238410 - RNA, 19 nt, Artificial Sequence
  Description of Artificial Sequence: Synthetic oligonucleotide
  Sense strand starting at position 3054 of SEQ ID NO: 1884077
gcguucuucucugcacaua

SEQ ID NO: 2238411 - RNA, 19 nt, Artificial Sequence
  Description of Artificial Sequence: Synthetic oligonucleotide
  Antisense strand to SEQ ID NO: 2238410
uaugugcagagaagaacgc

SEQ ID NO: 2238412 - RNA, 19 nt, Artificial Sequence
  Description of Artificial Sequence: Synthetic oligonucleotide
  Sense strand starting at position 3055 of SEQ ID NO: 1884077
cguucuucucugcacauau

SEQ ID NO: 2238413 - RNA, 19 nt, Artificial Sequence
  Description of Artificial Sequence: Synthetic oligonucleotide
  Antisense strand to SEQ ID NO: 2238412
auaugugcagagaagaacg

SEQ ID NO: 2238414 - RNA, 19 nt, Artificial Sequence
  Description of Artificial Sequence: Synthetic oligonucleotide
  Sense strand starting at position 3065 of SEQ ID NO: 1884077
ugcacauauguccggagua

SEQ ID NO: 2238415 - RNA, 19 nt, Artificial Sequence
  Description of Artificial Sequence: Synthetic oligonucleotide
  Antisense strand to SEQ ID NO: 2238414
uacuccggacauaugugca

SEQ ID NO: 2238416 - RNA, 19 nt, Artificial Sequence
  Description of Artificial Sequence: Synthetic oligonucleotide
  Sense strand starting at position 3066 of SEQ ID NO: 1884077
gcacauauguccggaguac

SEQ ID NO: 2238417 - RNA, 19 nt, Artificial Sequence
  Description of Artificial Sequence: Synthetic oligonucleotide
  Antisense strand to SEQ ID NO: 2238416
guacuccggacauaugugc

SEQ ID NO: 2238418 - RNA, 19 nt, Artificial Sequence
  Description of Artificial Sequence: Synthetic oligonucleotide
  Sense strand starting at position 108 of SEQ ID NO: 1884078
gcauaaacgugaccucucu

SEQ ID NO: 2238419 - RNA, 19 nt, Artificial Sequence
  Description of Artificial Sequence: Synthetic oligonucleotide
  Antisense strand to SEQ ID NO: 2238418
agagaggucacguuuaugc

SEQ ID NO: 2238420 - RNA, 19 nt, Artificial Sequence
  Description of Artificial Sequence: Synthetic oligonucleotide
  Sense strand starting at position 159 of SEQ ID NO: 1884078
cagguucuucugugaccca

SEQ ID NO: 2238421 - RNA, 19 nt, Artificial Sequence
  Description of Artificial Sequence: Synthetic oligonucleotide
  Antisense strand to SEQ ID NO: 2238420
ugggucacagaagaaccug

SEQ ID NO: 2238422 - RNA, 19 nt, Artificial Sequence
  Description of Artificial Sequence: Synthetic oligonucleotide
  Sense strand starting at position 301 of SEQ ID NO: 1884078
agagguaugacuugcccau

SEQ ID NO: 2238423 - RNA, 19 nt, Artificial Sequence
  Description of Artificial Sequence: Synthetic oligonucleotide
  Antisense strand to SEQ ID NO: 2238422
augggcaagucauaccucu

SEQ ID NO: 2238424 - RNA, 19 nt, Artificial Sequence
  Description of Artificial Sequence: Synthetic oligonucleotide
  Sense strand starting at position 425 of SEQ ID NO: 1884078
gcaucuuccugccugaaug

SEQ ID NO: 2238425 - RNA, 19 nt, Artificial Sequence
  Description of Artificial Sequence: Synthetic oligonucleotide
  Antisense strand to SEQ ID NO: 2238424
cauucaggcaggaagaugc

SEQ ID NO: 2238426 - RNA, 19 nt, Artificial Sequence
  Description of Artificial Sequence: Synthetic oligonucleotide
  Sense strand starting at position 436 of SEQ ID NO: 1884078
ccugaaugguauuccucuu

SEQ ID NO: 2238427 - RNA, 19 nt, Artificial Sequence
  Description of Artificial Sequence: Synthetic oligonucleotide
  Antisense strand to SEQ ID NO: 2238426
aagaggaauaccauucagg

SEQ ID NO: 2238428 - RNA, 19 nt, Artificial Sequence
  Description of Artificial Sequence: Synthetic oligonucleotide
  Sense strand starting at position 643 of SEQ ID NO: 1884078
aggaauugacggcauggua

SEQ ID NO: 2238429 - RNA, 19 nt, Artificial Sequence
  Description of Artificial Sequence: Synthetic oligonucleotide
  Antisense strand to SEQ ID NO: 2238428
uaccaugccgucaauuccu

SEQ ID NO: 2238430 - RNA, 19 nt, Artificial Sequence
  Description of Artificial Sequence: Synthetic oligonucleotide
  Sense strand starting at position 706 of SEQ ID NO: 1884078
uuacccucuccuugaguuu

SEQ ID NO: 2238431 - RNA, 19 nt, Artificial Sequence
  Description of Artificial Sequence: Synthetic oligonucleotide
  Antisense strand to SEQ ID NO: 2238430
aaacucaaggagaggguaa

SEQ ID NO: 2238432 - RNA, 19 nt, Artificial Sequence
  Description of Artificial Sequence: Synthetic oligonucleotide
  Sense strand starting at position 712 of SEQ ID NO: 1884078
ucuccuugaguuugaggaa

SEQ ID NO: 2238433 - RNA, 19 nt, Artificial Sequence
  Description of Artificial Sequence: Synthetic oligonucleotide
  Antisense strand to SEQ ID NO: 2238432
uuccucaaacucaaggaga

SEQ ID NO: 2238434 - RNA, 19 nt, Artificial Sequence
  Description of Artificial Sequence: Synthetic oligonucleotide
  Sense strand starting at position 732 of SEQ ID NO: 1884078
gaaccauagagguguguag

SEQ ID NO: 2238435 - RNA, 19 nt, Artificial Sequence
  Description of Artificial Sequence: Synthetic oligonucleotide
  Antisense strand to SEQ ID NO: 2238434
cuacacaccucuaugguuc

SEQ ID NO: 2238436 - RNA, 19 nt, Artificial Sequence
  Description of Artificial Sequence: Synthetic oligonucleotide
  Sense strand starting at position 1548 of SEQ ID NO: 1884078
ggagucaauggugggacaa

SEQ ID NO: 2238437 - RNA, 19 nt, Artificial Sequence
  Description of Artificial Sequence: Synthetic oligonucleotide
  Antisense strand to SEQ ID NO: 2238436
uugucccaccauugacucc

SEQ ID NO: 2238438 - RNA, 19 nt, Artificial Sequence
  Description of Artificial Sequence: Synthetic oligonucleotide
  Sense strand starting at position 1664 of SEQ ID NO: 1884078
cugcuuuggccagaaucag

SEQ ID NO: 2238439 - RNA, 19 nt, Artificial Sequence
  Description of Artificial Sequence: Synthetic oligonucleotide
  Antisense strand to SEQ ID NO: 2238438
cugauucuggccaaagcag

SEQ ID NO: 2238440 - RNA, 19 nt, Artificial Sequence
  Description of Artificial Sequence: Synthetic oligonucleotide
  Sense strand starting at position 1769 of SEQ ID NO: 1884078
uacuguguacucugaguau

SEQ ID NO: 2238441 - RNA, 19 nt, Artificial Sequence
  Description of Artificial Sequence: Synthetic oligonucleotide
  Antisense strand to SEQ ID NO: 2238440
auacucagaguacacagua

SEQ ID NO: 2238442 - RNA, 19 nt, Artificial Sequence
  Description of Artificial Sequence: Synthetic oligonucleotide
  Sense strand starting at position 1773 of SEQ ID NO: 1884078
guguacucugaguauguuu

SEQ ID NO: 2238443 - RNA, 19 nt, Artificial Sequence
  Description of Artificial Sequence: Synthetic oligonucleotide
  Antisense strand to SEQ ID NO: 2238442
aaacauacucagaguacac

SEQ ID NO: 2238444 - RNA, 19 nt, Artificial Sequence
  Description of Artificial Sequence: Synthetic oligonucleotide
  Sense strand starting at position 1815 of SEQ ID NO: 1884078
caagccauugcugguaauu

SEQ ID NO: 2238445 - RNA, 19 nt, Artificial Sequence
  Description of Artificial Sequence: Synthetic oligonucleotide
  Antisense strand to SEQ ID NO: 2238444
aauuaccagcaauggcuug

SEQ ID NO: 2238446 - RNA, 19 nt, Artificial Sequence
  Description of Artificial Sequence: Synthetic oligonucleotide
  Sense strand starting at position 1820 of SEQ ID NO: 1884078
cauugcugguaauugagaa

SEQ ID NO: 2238447 - RNA, 19 nt, Artificial Sequence
  Description of Artificial Sequence: Synthetic oligonucleotide
  Antisense strand to SEQ ID NO: 2238446
uucucaauuaccagcaaug

SEQ ID NO: 2238448 - RNA, 19 nt, Artificial Sequence
  Description of Artificial Sequence: Synthetic oligonucleotide
  Sense strand starting at position 1854 of SEQ ID NO: 1884078
uuacaaacgguucguuaau

SEQ ID NO: 2238449 - RNA, 19 nt, Artificial Sequence
  Description of Artificial Sequence: Synthetic oligonucleotide
  Antisense strand to SEQ ID NO: 2238448
auuaacgaaccguuuguaa

SEQ ID NO: 2238450 - RNA, 19 nt, Artificial Sequence
  Description of Artificial Sequence: Synthetic oligonucleotide
  Sense strand starting at position 1855 of SEQ ID NO: 1884078
uacaaacgguucguuaaua

SEQ ID NO: 2238451 - RNA, 19 nt, Artificial Sequence
  Description of Artificial Sequence: Synthetic oligonucleotide
  Antisense strand to SEQ ID NO: 2238450
uauuaacgaaccguuugua

SEQ ID NO: 2238452 - RNA, 19 nt, Artificial Sequence
  Description of Artificial Sequence: Synthetic oligonucleotide
  Sense strand starting at position 1856 of SEQ ID NO: 1884078
acaaacgguucguuaauaa

SEQ ID NO: 2238453 - RNA, 19 nt, Artificial Sequence
  Description of Artificial Sequence: Synthetic oligonucleotide
  Antisense strand to SEQ ID NO: 2238452
uuauuaacgaaccguuugu

SEQ ID NO: 2238454 - RNA, 19 nt, Artificial Sequence
  Description of Artificial Sequence: Synthetic oligonucleotide
  Sense strand starting at position 1952 of SEQ ID NO: 1884078
uggucuggcaguuagugau

SEQ ID NO: 2238455 - RNA, 19 nt, Artificial Sequence
  Description of Artificial Sequence: Synthetic oligonucleotide
  Antisense strand to SEQ ID NO: 2238454
aucacuaacugccagacca

SEQ ID NO: 2238456 - RNA, 19 nt, Artificial Sequence
  Description of Artificial Sequence: Synthetic oligonucleotide
  Sense strand starting at position 1958 of SEQ ID NO: 1884078
ggcaguuagugauucaaag

SEQ ID NO: 2238457 - RNA, 19 nt, Artificial Sequence
  Description of Artificial Sequence: Synthetic oligonucleotide
  Antisense strand to SEQ ID NO: 2238456
cuuugaaucacuaacugcc

SEQ ID NO: 2238458 - RNA, 19 nt, Artificial Sequence
  Description of Artificial Sequence: Synthetic oligonucleotide
  Sense strand starting at position 2111 of SEQ ID NO: 1884078
ggcaccaugucauuugagu

SEQ ID NO: 2238459 - RNA, 19 nt, Artificial Sequence
  Description of Artificial Sequence: Synthetic oligonucleotide
  Antisense strand to SEQ ID NO: 2238458
acucaaaugacauggugcc

SEQ ID NO: 2238460 - RNA, 19 nt, Artificial Sequence
  Description of Artificial Sequence: Synthetic oligonucleotide
  Sense strand starting at position 2297 of SEQ ID NO: 1884078
acgagaucuugcucauaca

SEQ ID NO: 2238461 - RNA, 19 nt, Artificial Sequence
  Description of Artificial Sequence: Synthetic oligonucleotide
  Antisense strand to SEQ ID NO: 2238460
uguaugagcaagaucucgu

SEQ ID NO: 2238462 - RNA, 19 nt, Artificial Sequence
  Description of Artificial Sequence: Synthetic oligonucleotide
  Sense strand starting at position 2298 of SEQ ID NO: 1884078
cgagaucuugcucauacac

SEQ ID NO: 2238463 - RNA, 19 nt, Artificial Sequence
  Description of Artificial Sequence: Synthetic oligonucleotide
  Antisense strand to SEQ ID NO: 2238462
guguaugagcaagaucucg

SEQ ID NO: 2238464 - RNA, 19 nt, Artificial Sequence
  Description of Artificial Sequence: Synthetic oligonucleotide
  Sense strand starting at position 2791 of SEQ ID NO: 1884078
ccugcuucaggagauguga

SEQ ID NO: 2238465 - RNA, 19 nt, Artificial Sequence
  Description of Artificial Sequence: Synthetic oligonucleotide
  Antisense strand to SEQ ID NO: 2238464
ucacaucuccugaagcagg

SEQ ID NO: 2238466 - RNA, 19 nt, Artificial Sequence
  Description of Artificial Sequence: Synthetic oligonucleotide
  Sense strand starting at position 2953 of SEQ ID NO: 1884078
ugucauugugcagagaccu

SEQ ID NO: 2238467 - RNA, 19 nt, Artificial Sequence
  Description of Artificial Sequence: Synthetic oligonucleotide
  Antisense strand to SEQ ID NO: 2238466
aggucucugcacaaugaca

SEQ ID NO: 2238468 - RNA, 19 nt, Artificial Sequence
  Description of Artificial Sequence: Synthetic oligonucleotide
  Sense strand starting at position 2987 of SEQ ID NO: 1884078
uguggaaugacaggaguua

SEQ ID NO: 2238469 - RNA, 19 nt, Artificial Sequence
  Description of Artificial Sequence: Synthetic oligonucleotide
  Antisense strand to SEQ ID NO: 2238468
uaacuccugucauuccaca

SEQ ID NO: 2238470 - RNA, 19 nt, Artificial Sequence
  Description of Artificial Sequence: Synthetic oligonucleotide
  Sense strand starting at position 3133 of SEQ ID NO: 1884078
gauaaaguggccugcauga

SEQ ID NO: 2238471 - RNA, 19 nt, Artificial Sequence
  Description of Artificial Sequence: Synthetic oligonucleotide
  Antisense strand to SEQ ID NO: 2238470
ucaugcaggccacuuuauc

SEQ ID NO: 2238472 - RNA, 19 nt, Artificial Sequence
  Description of Artificial Sequence: Synthetic oligonucleotide
  Sense strand starting at position 3135 of SEQ ID NO: 1884078
uaaaguggccugcaugaua

SEQ ID NO: 2238473 - RNA, 19 nt, Artificial Sequence
  Description of Artificial Sequence: Synthetic oligonucleotide
  Antisense strand to SEQ ID NO: 2238472
uaucaugcaggccacuuua

SEQ ID NO: 2238474 - RNA, 19 nt, Artificial Sequence
  Description of Artificial Sequence: Synthetic oligonucleotide
  Sense strand starting at position 3231 of SEQ ID NO: 1884078
guuuaauugcucgugugua

SEQ ID NO: 2238475 - RNA, 19 nt, Artificial Sequence
  Description of Artificial Sequence: Synthetic oligonucleotide
  Antisense strand to SEQ ID NO: 2238474
uacacacgagcaauuaaac

SEQ ID NO: 2238476 - RNA, 19 nt, Artificial Sequence
  Description of Artificial Sequence: Synthetic oligonucleotide
  Sense strand starting at position 3236 of SEQ ID NO: 1884078
auugcucguguguaaacau

SEQ ID NO: 2238477 - RNA, 19 nt, Artificial Sequence
  Description of Artificial Sequence: Synthetic oligonucleotide
  Antisense strand to SEQ ID NO: 2238476
auguuuacacacgagcaau

SEQ ID NO: 2238478 - RNA, 19 nt, Artificial Sequence
  Description of Artificial Sequence: Synthetic oligonucleotide
  Sense strand starting at position 3345 of SEQ ID NO: 1884078
cuggcuacuccugaucuga

SEQ ID NO: 2238479 - RNA, 19 nt, Artificial Sequence
  Description of Artificial Sequence: Synthetic oligonucleotide
  Antisense strand to SEQ ID NO: 2238478
ucagaucaggaguagccag

SEQ ID NO: 2238480 - RNA, 19 nt, Artificial Sequence
  Description of Artificial Sequence: Synthetic oligonucleotide
  Sense strand starting at position 3444 of SEQ ID NO: 1884078
gguacuagcccagagucua

SEQ ID NO: 2238481 - RNA, 19 nt, Artificial Sequence
  Description of Artificial Sequence: Synthetic oligonucleotide
  Antisense strand to SEQ ID NO: 2238480
uagacucugggcuaguacc

SEQ ID NO: 2238482 - RNA, 19 nt, Artificial Sequence
  Description of Artificial Sequence: Synthetic oligonucleotide
  Sense strand starting at position 3476 of SEQ ID NO: 1884078
cggaaaugagcccaagcuu

SEQ ID NO: 2238483 - RNA, 19 nt, Artificial Sequence
  Description of Artificial Sequence: Synthetic oligonucleotide
  Antisense strand to SEQ ID NO: 2238482
aagcuugggcucauuuccg

SEQ ID NO: 2238484 - RNA, 19 nt, Artificial Sequence
  Description of Artificial Sequence: Synthetic oligonucleotide
  Sense strand starting at position 3535 of SEQ ID NO: 1884078
ugcccuuuagagugugauu

SEQ ID NO: 2238485 - RNA, 19 nt, Artificial Sequence
  Description of Artificial Sequence: Synthetic oligonucleotide
  Antisense strand to SEQ ID NO: 2238484
aaucacacucuaaagggca

SEQ ID NO: 2238486 - RNA, 19 nt, Artificial Sequence
  Description of Artificial Sequence: Synthetic oligonucleotide
  Sense strand starting at position 3628 of SEQ ID NO: 1884078
gacccuguuaggugugaau

SEQ ID NO: 2238487 - RNA, 19 nt, Artificial Sequence
  Description of Artificial Sequence: Synthetic oligonucleotide
  Antisense strand to SEQ ID NO: 2238486
auucacaccuaacaggguc

SEQ ID NO: 2238488 - RNA, 19 nt, Artificial Sequence
  Description of Artificial Sequence: Synthetic oligonucleotide
  Sense strand starting at position 3669 of SEQ ID NO: 1884078
agagaaaucucagcaggcu

SEQ ID NO: 2238489 - RNA, 19 nt, Artificial Sequence
  Description of Artificial Sequence: Synthetic oligonucleotide
  Antisense strand to SEQ ID NO: 2238488
agccugcugagauuucucu

SEQ ID NO: 2238490 - RNA, 19 nt, Artificial Sequence
  Description of Artificial Sequence: Synthetic oligonucleotide
  Sense strand starting at position 3670 of SEQ ID NO: 1884078
gagaaaucucagcaggcuu

SEQ ID NO: 2238491 - RNA, 19 nt, Artificial Sequence
  Description of Artificial Sequence: Synthetic oligonucleotide
  Antisense strand to SEQ ID NO: 2238490
aagccugcugagauuucuc

SEQ ID NO: 2238492 - RNA, 19 nt, Artificial Sequence
  Description of Artificial Sequence: Synthetic oligonucleotide
  Sense strand starting at position 3699 of SEQ ID NO: 1884078
guggguuuccagcagaguc

SEQ ID NO: 2238493 - RNA, 19 nt, Artificial Sequence
  Description of Artificial Sequence: Synthetic oligonucleotide
  Antisense strand to SEQ ID NO: 2238492
gacucugcuggaaacccac

SEQ ID NO: 2238494 - RNA, 19 nt, Artificial Sequence
  Description of Artificial Sequence: Synthetic oligonucleotide
  Sense strand starting at position 3746 of SEQ ID NO: 1884078
ugcuguuucgugggaagag

SEQ ID NO: 2238495 - RNA, 19 nt, Artificial Sequence
  Description of Artificial Sequence: Synthetic oligonucleotide
  Antisense strand to SEQ ID NO: 2238494
cucuucccacgaaacagca

SEQ ID NO: 2238496 - RNA, 19 nt, Artificial Sequence
  Description of Artificial Sequence: Synthetic oligonucleotide
  Sense strand starting at position 3890 of SEQ ID NO: 1884078
aggagaagguccuucccau

SEQ ID NO: 2238497 - RNA, 19 nt, Artificial Sequence
  Description of Artificial Sequence: Synthetic oligonucleotide
  Antisense strand to SEQ ID NO: 2238496
augggaaggaccuucuccu

SEQ ID NO: 2238498 - RNA, 19 nt, Artificial Sequence
  Description of Artificial Sequence: Synthetic oligonucleotide
  Sense strand starting at position 140 of SEQ ID NO: 1884079
uggacuuuauagucacaaa

SEQ ID NO: 2238499 - RNA, 19 nt, Artificial Sequence
  Description of Artificial Sequence: Synthetic oligonucleotide
  Antisense strand to SEQ ID NO: 2238498
uuugugacuauaaagucca

SEQ ID NO: 2238500 - RNA, 19 nt, Artificial Sequence
  Description of Artificial Sequence: Synthetic oligonucleotide
  Sense strand starting at position 236 of SEQ ID NO: 1884079
agcucaaauuuggaggaua

SEQ ID NO: 2238501 - RNA, 19 nt, Artificial Sequence
  Description of Artificial Sequence: Synthetic oligonucleotide
  Antisense strand to SEQ ID NO: 2238500
uauccuccaaauuugagcu

SEQ ID NO: 2238502 - RNA, 19 nt, Artificial Sequence
  Description of Artificial Sequence: Synthetic oligonucleotide
  Sense strand starting at position 302 of SEQ ID NO: 1884079
ggaaucuuauggccucuga

SEQ ID NO: 2238503 - RNA, 19 nt, Artificial Sequence
  Description of Artificial Sequence: Synthetic oligonucleotide
  Antisense strand to SEQ ID NO: 2238502
ucagaggccauaagauucc

SEQ ID NO: 2238504 - RNA, 19 nt, Artificial Sequence
  Description of Artificial Sequence: Synthetic oligonucleotide
  Sense strand starting at position 626 of SEQ ID NO: 1884079
augagaagggcugguuaua

SEQ ID NO: 2238505 - RNA, 19 nt, Artificial Sequence
  Description of Artificial Sequence: Synthetic oligonucleotide
  Antisense strand to SEQ ID NO: 2238504
uauaaccagcccuucucau

SEQ ID NO: 2238506 - RNA, 19 nt, Artificial Sequence
  Description of Artificial Sequence: Synthetic oligonucleotide
  Sense strand starting at position 768 of SEQ ID NO: 1884079
ugguauguccaugauccuu

SEQ ID NO: 2238507 - RNA, 19 nt, Artificial Sequence
  Description of Artificial Sequence: Synthetic oligonucleotide
  Antisense strand to SEQ ID NO: 2238506
aaggaucauggacauacca

SEQ ID NO: 2238508 - RNA, 19 nt, Artificial Sequence
  Description of Artificial Sequence: Synthetic oligonucleotide
  Sense strand starting at position 773 of SEQ ID NO: 1884079
uguccaugauccuuaucag

SEQ ID NO: 2238509 - RNA, 19 nt, Artificial Sequence
  Description of Artificial Sequence: Synthetic oligonucleotide
  Antisense strand to SEQ ID NO: 2238508
cugauaaggaucauggaca

SEQ ID NO: 2238510 - RNA, 19 nt, Artificial Sequence
  Description of Artificial Sequence: Synthetic oligonucleotide
  Sense strand starting at position 774 of SEQ ID NO: 1884079
guccaugauccuuaucaga

SEQ ID NO: 2238511 - RNA, 19 nt, Artificial Sequence
  Description of Artificial Sequence: Synthetic oligonucleotide
  Antisense strand to SEQ ID NO: 2238510
ucugauaaggaucauggac

SEQ ID NO: 2238512 - RNA, 19 nt, Artificial Sequence
  Description of Artificial Sequence: Synthetic oligonucleotide
  Sense strand starting at position 1027 of SEQ ID NO: 1884079
uauuuagaaucagggaaug

SEQ ID NO: 2238513 - RNA, 19 nt, Artificial Sequence
  Description of Artificial Sequence: Synthetic oligonucleotide
  Antisense strand to SEQ ID NO: 2238512
cauucccugauucuaaaua

SEQ ID NO: 2238514 - RNA, 19 nt, Artificial Sequence
  Description of Artificial Sequence: Synthetic oligonucleotide
  Sense strand starting at position 1105 of SEQ ID NO: 1884079
gcagcagaugcugaugaua

SEQ ID NO: 2238515 - RNA, 19 nt, Artificial Sequence
  Description of Artificial Sequence: Synthetic oligonucleotide
  Antisense strand to SEQ ID NO: 2238514
uaucaucagcaucugcugc

SEQ ID NO: 2238516 - RNA, 19 nt, Artificial Sequence
  Description of Artificial Sequence: Synthetic oligonucleotide
  Sense strand starting at position 1108 of SEQ ID NO: 1884079
gcagaugcugaugauauca

SEQ ID NO: 2238517 - RNA, 19 nt, Artificial Sequence
  Description of Artificial Sequence: Synthetic oligonucleotide
  Antisense strand to SEQ ID NO: 2238516
ugauaucaucagcaucugc

SEQ ID NO: 2238518 - RNA, 19 nt, Artificial Sequence
  Description of Artificial Sequence: Synthetic oligonucleotide
  Sense strand starting at position 1719 of SEQ ID NO: 1884079
ggacucagauaauuguaca

SEQ ID NO: 2238519 - RNA, 19 nt, Artificial Sequence
  Description of Artificial Sequence: Synthetic oligonucleotide
  Antisense strand to SEQ ID NO: 2238518
uguacaauuaucugagucc

SEQ ID NO: 2238520 - RNA, 19 nt, Artificial Sequence
  Description of Artificial Sequence: Synthetic oligonucleotide
  Sense strand starting at position 1892 of SEQ ID NO: 1884079
uuggaaauacuauguuaag

SEQ ID NO: 2238521 - RNA, 19 nt, Artificial Sequence
  Description of Artificial Sequence: Synthetic oligonucleotide
  Antisense strand to SEQ ID NO: 2238520
cuuaacauaguauuuccaa

SEQ ID NO: 2238522 - RNA, 19 nt, Artificial Sequence
  Description of Artificial Sequence: Synthetic oligonucleotide
  Sense strand starting at position 1893 of SEQ ID NO: 1884079
uggaaauacuauguuaagu

SEQ ID NO: 2238523 - RNA, 19 nt, Artificial Sequence
  Description of Artificial Sequence: Synthetic oligonucleotide
  Antisense strand to SEQ ID NO: 2238522
acuuaacauaguauuucca

SEQ ID NO: 2238524 - RNA, 19 nt, Artificial Sequence
  Description of Artificial Sequence: Synthetic oligonucleotide
  Sense strand starting at position 2008 of SEQ ID NO: 1884079
guaggauagugauuaccug

SEQ ID NO: 2238525 - RNA, 19 nt, Artificial Sequence
  Description of Artificial Sequence: Synthetic oligonucleotide
  Antisense strand to SEQ ID NO: 2238524
cagguaaucacuauccuac

SEQ ID NO: 2238526 - RNA, 19 nt, Artificial Sequence
  Description of Artificial Sequence: Synthetic oligonucleotide
  Sense strand starting at position 2014 of SEQ ID NO: 1884079
uagugauuaccugggagug

SEQ ID NO: 2238527 - RNA, 19 nt, Artificial Sequence
  Description of Artificial Sequence: Synthetic oligonucleotide
  Antisense strand to SEQ ID NO: 2238526
cacucccagguaaucacua

SEQ ID NO: 2238528 - RNA, 19 nt, Artificial Sequence
  Description of Artificial Sequence: Synthetic oligonucleotide
  Sense strand starting at position 2049 of SEQ ID NO: 1884079
ggcauuauuguguaauaag

SEQ ID NO: 2238529 - RNA, 19 nt, Artificial Sequence
  Description of Artificial Sequence: Synthetic oligonucleotide
  Antisense strand to SEQ ID NO: 2238528
cuuauuacacaauaaugcc

SEQ ID NO: 2238530 - RNA, 19 nt, Artificial Sequence
  Description of Artificial Sequence: Synthetic oligonucleotide
  Sense strand starting at position 2117 of SEQ ID NO: 1884079
gugauaguugcgccacacu

SEQ ID NO: 2238531 - RNA, 19 nt, Artificial Sequence
  Description of Artificial Sequence: Synthetic oligonucleotide
  Antisense strand to SEQ ID NO: 2238530
aguguggcgcaacuaucac

SEQ ID NO: 2238532 - RNA, 19 nt, Artificial Sequence
  Description of Artificial Sequence: Synthetic oligonucleotide
  Sense strand starting at position 2188 of SEQ ID NO: 1884079
auauguauaguuuaccaca

SEQ ID NO: 2238533 - RNA, 19 nt, Artificial Sequence
  Description of Artificial Sequence: Synthetic oligonucleotide
  Antisense strand to SEQ ID NO: 2238532
ugugguaaacuauacauau

SEQ ID NO: 2238534 - RNA, 19 nt, Artificial Sequence
  Description of Artificial Sequence: Synthetic oligonucleotide
  Sense strand starting at position 2253 of SEQ ID NO: 1884079
uggaucacagcuuagcaua

SEQ ID NO: 2238535 - RNA, 19 nt, Artificial Sequence
  Description of Artificial Sequence: Synthetic oligonucleotide
  Antisense strand to SEQ ID NO: 2238534
uaugcuaagcugugaucca

SEQ ID NO: 2238536 - RNA, 19 nt, Artificial Sequence
  Description of Artificial Sequence: Synthetic oligonucleotide
  Sense strand starting at position 2433 of SEQ ID NO: 1884079
ccuauuauggcagaccaau

SEQ ID NO: 2238537 - RNA, 19 nt, Artificial Sequence
  Description of Artificial Sequence: Synthetic oligonucleotide
  Antisense strand to SEQ ID NO: 2238536
auuggucugccauaauagg

SEQ ID NO: 2238538 - RNA, 19 nt, Artificial Sequence
  Description of Artificial Sequence: Synthetic oligonucleotide
  Sense strand starting at position 2485 of SEQ ID NO: 1884079
ugucauuacguggacuaua

SEQ ID NO: 2238539 - RNA, 19 nt, Artificial Sequence
  Description of Artificial Sequence: Synthetic oligonucleotide
  Antisense strand to SEQ ID NO: 2238538
uauaguccacguaaugaca

SEQ ID NO: 2238540 - RNA, 19 nt, Artificial Sequence
  Description of Artificial Sequence: Synthetic oligonucleotide
  Sense strand starting at position 2636 of SEQ ID NO: 1884079
aacagugauuuagauaaag

SEQ ID NO: 2238541 - RNA, 19 nt, Artificial Sequence
  Description of Artificial Sequence: Synthetic oligonucleotide
  Antisense strand to SEQ ID NO: 2238540
cuuuaucuaaaucacuguu

SEQ ID NO: 2238542 - RNA, 19 nt, Artificial Sequence
  Description of Artificial Sequence: Synthetic oligonucleotide
  Sense strand starting at position 2707 of SEQ ID NO: 1884079
agguaaguugaaggucaaa

SEQ ID NO: 2238543 - RNA, 19 nt, Artificial Sequence
  Description of Artificial Sequence: Synthetic oligonucleotide
  Antisense strand to SEQ ID NO: 2238542
uuugaccuucaacuuaccu

SEQ ID NO: 2238544 - RNA, 19 nt, Artificial Sequence
  Description of Artificial Sequence: Synthetic oligonucleotide
  Sense strand starting at position 2743 of SEQ ID NO: 1884079
guuaguagacucuaaauau

SEQ ID NO: 2238545 - RNA, 19 nt, Artificial Sequence
  Description of Artificial Sequence: Synthetic oligonucleotide
  Antisense strand to SEQ ID NO: 2238544
auauuuagagucuacuaac

SEQ ID NO: 2238546 - RNA, 19 nt, Artificial Sequence
  Description of Artificial Sequence: Synthetic oligonucleotide
  Sense strand starting at position 2757 of SEQ ID NO: 1884079
aauaucaguugagugauga

SEQ ID NO: 2238547 - RNA, 19 nt, Artificial Sequence
  Description of Artificial Sequence: Synthetic oligonucleotide
  Antisense strand to SEQ ID NO: 2238546
ucaucacucaacugauauu

SEQ ID NO: 2238548 - RNA, 19 nt, Artificial Sequence
  Description of Artificial Sequence: Synthetic oligonucleotide
  Sense strand starting at position 2758 of SEQ ID NO: 1884079
auaucaguugagugaugaa

SEQ ID NO: 2238549 - RNA, 19 nt, Artificial Sequence
  Description of Artificial Sequence: Synthetic oligonucleotide
  Antisense strand to SEQ ID NO: 2238548
uucaucacucaacugauau

SEQ ID NO: 2238550 - RNA, 19 nt, Artificial Sequence
  Description of Artificial Sequence: Synthetic oligonucleotide
  Sense strand starting at position 2964 of SEQ ID NO: 1884079
guuaucagagaauauacgu

SEQ ID NO: 2238551 - RNA, 19 nt, Artificial Sequence
  Description of Artificial Sequence: Synthetic oligonucleotide
  Antisense strand to SEQ ID NO: 2238550
acguauauucucugauaac

SEQ ID NO: 2238552 - RNA, 19 nt, Artificial Sequence
  Description of Artificial Sequence: Synthetic oligonucleotide
  Sense strand starting at position 2969 of SEQ ID NO: 1884079
cagagaauauacguaggau

SEQ ID NO: 2238553 - RNA, 19 nt, Artificial Sequence
  Description of Artificial Sequence: Synthetic oligonucleotide
  Antisense strand to SEQ ID NO: 2238552
auccuacguauauucucug

SEQ ID NO: 2238554 - RNA, 19 nt, Artificial Sequence
  Description of Artificial Sequence: Synthetic oligonucleotide
  Sense strand starting at position 2972 of SEQ ID NO: 1884079
agaauauacguaggauucu

SEQ ID NO: 2238555 - RNA, 19 nt, Artificial Sequence
  Description of Artificial Sequence: Synthetic oligonucleotide
  Antisense strand to SEQ ID NO: 2238554
agaauccuacguauauucu

SEQ ID NO: 2238556 - RNA, 19 nt, Artificial Sequence
  Description of Artificial Sequence: Synthetic oligonucleotide
  Sense strand starting at position 2978 of SEQ ID NO: 1884079
uacguaggauucuuuaaua

SEQ ID NO: 2238557 - RNA, 19 nt, Artificial Sequence
  Description of Artificial Sequence: Synthetic oligonucleotide
  Antisense strand to SEQ ID NO: 2238556
uauuaaagaauccuacgua

SEQ ID NO: 2238558 - RNA, 19 nt, Artificial Sequence
  Description of Artificial Sequence: Synthetic oligonucleotide
  Sense strand starting at position 3117 of SEQ ID NO: 1884079
aggauuguacaguaguaau

SEQ ID NO: 2238559 - RNA, 19 nt, Artificial Sequence
  Description of Artificial Sequence: Synthetic oligonucleotide
  Antisense strand to SEQ ID NO: 2238558
auuacuacuguacaauccu

SEQ ID NO: 2238560 - RNA, 19 nt, Artificial Sequence
  Description of Artificial Sequence: Synthetic oligonucleotide
  Sense strand starting at position 3216 of SEQ ID NO: 1884079
gaucaaugaucccugugag

SEQ ID NO: 2238561 - RNA, 19 nt, Artificial Sequence
  Description of Artificial Sequence: Synthetic oligonucleotide
  Antisense strand to SEQ ID NO: 2238560
cucacagggaucauugauc

SEQ ID NO: 2238562 - RNA, 19 nt, Artificial Sequence
  Description of Artificial Sequence: Synthetic oligonucleotide
  Sense strand starting at position 3217 of SEQ ID NO: 1884079
aucaaugaucccugugaga

SEQ ID NO: 2238563 - RNA, 19 nt, Artificial Sequence
  Description of Artificial Sequence: Synthetic oligonucleotide
  Antisense strand to SEQ ID NO: 2238562
ucucacagggaucauugau

SEQ ID NO: 2238564 - RNA, 19 nt, Artificial Sequence
  Description of Artificial Sequence: Synthetic oligonucleotide
  Sense strand starting at position 3219 of SEQ ID NO: 1884079
caaugaucccugugagaca

SEQ ID NO: 2238565 - RNA, 19 nt, Artificial Sequence
  Description of Artificial Sequence: Synthetic oligonucleotide
  Antisense strand to SEQ ID NO: 2238564
ugucucacagggaucauug

SEQ ID NO: 2238566 - RNA, 19 nt, Artificial Sequence
  Description of Artificial Sequence: Synthetic oligonucleotide
  Sense strand starting at position 3269 of SEQ ID NO: 1884079
ccagcuaacuccuuggaga

SEQ ID NO: 2238567 - RNA, 19 nt, Artificial Sequence
  Description of Artificial Sequence: Synthetic oligonucleotide
  Antisense strand to SEQ ID NO: 2238566
ucuccaaggaguuagcugg

SEQ ID NO: 2238568 - RNA, 19 nt, Artificial Sequence
  Description of Artificial Sequence: Synthetic oligonucleotide
  Sense strand starting at position 3271 of SEQ ID NO: 1884079
agcuaacuccuuggagaua

SEQ ID NO: 2238569 - RNA, 19 nt, Artificial Sequence
  Description of Artificial Sequence: Synthetic oligonucleotide
  Antisense strand to SEQ ID NO: 2238568
uaucuccaaggaguuagcu

SEQ ID NO: 2238570 - RNA, 19 nt, Artificial Sequence
  Description of Artificial Sequence: Synthetic oligonucleotide
  Sense strand starting at position 3283 of SEQ ID NO: 1884079
ggagauaauuuccaggcaa

SEQ ID NO: 2238571 - RNA, 19 nt, Artificial Sequence
  Description of Artificial Sequence: Synthetic oligonucleotide
  Antisense strand to SEQ ID NO: 2238570
uugccuggaaauuaucucc

SEQ ID NO: 2238572 - RNA, 19 nt, Artificial Sequence
  Description of Artificial Sequence: Synthetic oligonucleotide
  Sense strand starting at position 3606 of SEQ ID NO: 1884079
aaagaaggguaucucaagu

SEQ ID NO: 2238573 - RNA, 19 nt, Artificial Sequence
  Description of Artificial Sequence: Synthetic oligonucleotide
  Antisense strand to SEQ ID NO: 2238572
acuugagauacccuucuuu

SEQ ID NO: 2238574 - RNA, 19 nt, Artificial Sequence
  Description of Artificial Sequence: Synthetic oligonucleotide
  Sense strand starting at position 3752 of SEQ ID NO: 1884079
gcagaaucccaacaagucu

SEQ ID NO: 2238575 - RNA, 19 nt, Artificial Sequence
  Description of Artificial Sequence: Synthetic oligonucleotide
  Antisense strand to SEQ ID NO: 2238574
agacuuguugggauucugc

SEQ ID NO: 2238576 - RNA, 19 nt, Artificial Sequence
  Description of Artificial Sequence: Synthetic oligonucleotide
  Sense strand starting at position 3850 of SEQ ID NO: 1884079
agacaauccucagugcaca

SEQ ID NO: 2238577 - RNA, 19 nt, Artificial Sequence
  Description of Artificial Sequence: Synthetic oligonucleotide
  Antisense strand to SEQ ID NO: 2238576
ugugcacugaggauugucu

SEQ ID NO: 2238578 - RNA, 19 nt, Artificial Sequence
  Description of Artificial Sequence: Synthetic oligonucleotide
  Sense strand starting at position 7 of SEQ ID NO: 1884080
aauucuguauguccgauua

SEQ ID NO: 2238579 - RNA, 19 nt, Artificial Sequence
  Description of Artificial Sequence: Synthetic oligonucleotide
  Antisense strand to SEQ ID NO: 2238578
uaaucggacauacagaauu

SEQ ID NO: 2238580 - RNA, 19 nt, Artificial Sequence
  Description of Artificial Sequence: Synthetic oligonucleotide
  Sense strand starting at position 56 of SEQ ID NO: 1884080
agaucacacgccuaauugu

SEQ ID NO: 2238581 - RNA, 19 nt, Artificial Sequence
  Description of Artificial Sequence: Synthetic oligonucleotide
  Antisense strand to SEQ ID NO: 2238580
acaauuaggcgugugaucu

SEQ ID NO: 2238582 - RNA, 19 nt, Artificial Sequence
  Description of Artificial Sequence: Synthetic oligonucleotide
  Sense strand starting at position 125 of SEQ ID NO: 1884080
uagacaauucuguguuguu

SEQ ID NO: 2238583 - RNA, 19 nt, Artificial Sequence
  Description of Artificial Sequence: Synthetic oligonucleotide
  Antisense strand to SEQ ID NO: 2238582
aacaacacagaauugucua

SEQ ID NO: 2238584 - RNA, 19 nt, Artificial Sequence
  Description of Artificial Sequence: Synthetic oligonucleotide
  Sense strand starting at position 126 of SEQ ID NO: 1884080
agacaauucuguguuguuu

SEQ ID NO: 2238585 - RNA, 19 nt, Artificial Sequence
  Description of Artificial Sequence: Synthetic oligonucleotide
  Antisense strand to SEQ ID NO: 2238584
aaacaacacagaauugucu

SEQ ID NO: 2238586 - RNA, 19 nt, Artificial Sequence
  Description of Artificial Sequence: Synthetic oligonucleotide
  Sense strand starting at position 857 of SEQ ID NO: 1884080
uguggaaaccuguaaugua

SEQ ID NO: 2238587 - RNA, 19 nt, Artificial Sequence
  Description of Artificial Sequence: Synthetic oligonucleotide
  Antisense strand to SEQ ID NO: 2238586
uacauuacagguuuccaca

SEQ ID NO: 2238588 - RNA, 19 nt, Artificial Sequence
  Description of Artificial Sequence: Synthetic oligonucleotide
  Sense strand starting at position 919 of SEQ ID NO: 1884080
guuuaauagcauuaaguuc

SEQ ID NO: 2238589 - RNA, 19 nt, Artificial Sequence
  Description of Artificial Sequence: Synthetic oligonucleotide
  Antisense strand to SEQ ID NO: 2238588
gaacuuaaugcuauuaaac

SEQ ID NO: 2238590 - RNA, 19 nt, Artificial Sequence
  Description of Artificial Sequence: Synthetic oligonucleotide
  Sense strand starting at position 970 of SEQ ID NO: 1884080
gaugccauauugucagaug

SEQ ID NO: 2238591 - RNA, 19 nt, Artificial Sequence
  Description of Artificial Sequence: Synthetic oligonucleotide
  Antisense strand to SEQ ID NO: 2238590
caucugacaauauggcauc

SEQ ID NO: 2238592 - RNA, 19 nt, Artificial Sequence
  Description of Artificial Sequence: Synthetic oligonucleotide
  Sense strand starting at position 987 of SEQ ID NO: 1884080
ugugccauuuaucugugua

SEQ ID NO: 2238593 - RNA, 19 nt, Artificial Sequence
  Description of Artificial Sequence: Synthetic oligonucleotide
  Antisense strand to SEQ ID NO: 2238592
uacacagauaaauggcaca

SEQ ID NO: 2238594 - RNA, 19 nt, Artificial Sequence
  Description of Artificial Sequence: Synthetic oligonucleotide
  Sense strand starting at position 988 of SEQ ID NO: 1884080
gugccauuuaucuguguau

SEQ ID NO: 2238595 - RNA, 19 nt, Artificial Sequence
  Description of Artificial Sequence: Synthetic oligonucleotide
  Antisense strand to SEQ ID NO: 2238594
auacacagauaaauggcac

SEQ ID NO: 2238596 - RNA, 19 nt, Artificial Sequence
  Description of Artificial Sequence: Synthetic oligonucleotide
  Sense strand starting at position 989 of SEQ ID NO: 1884080
ugccauuuaucuguguauu

SEQ ID NO: 2238597 - RNA, 19 nt, Artificial Sequence
  Description of Artificial Sequence: Synthetic oligonucleotide
  Antisense strand to SEQ ID NO: 2238596
aauacacagauaaauggca

SEQ ID NO: 2238598 - RNA, 19 nt, Artificial Sequence
  Description of Artificial Sequence: Synthetic oligonucleotide
  Sense strand starting at position 990 of SEQ ID NO: 1884080
gccauuuaucuguguauua

SEQ ID NO: 2238599 - RNA, 19 nt, Artificial Sequence
  Description of Artificial Sequence: Synthetic oligonucleotide
  Antisense strand to SEQ ID NO: 2238598
uaauacacagauaaauggc

SEQ ID NO: 2238600 - RNA, 19 nt, Artificial Sequence
  Description of Artificial Sequence: Synthetic oligonucleotide
  Sense strand starting at position 1014 of SEQ ID NO: 1884080
ucuccaagaugguuccaau

SEQ ID NO: 2238601 - RNA, 19 nt, Artificial Sequence
  Description of Artificial Sequence: Synthetic oligonucleotide
  Antisense strand to SEQ ID NO: 2238600
auuggaaccaucuuggaga

SEQ ID NO: 2238602 - RNA, 19 nt, Artificial Sequence
  Description of Artificial Sequence: Synthetic oligonucleotide
  Sense strand starting at position 1079 of SEQ ID NO: 1884080
ucuauuaggguuggucuga

SEQ ID NO: 2238603 - RNA, 19 nt, Artificial Sequence
  Description of Artificial Sequence: Synthetic oligonucleotide
  Antisense strand to SEQ ID NO: 2238602
ucagaccaacccuaauaga

SEQ ID NO: 2238604 - RNA, 19 nt, Artificial Sequence
  Description of Artificial Sequence: Synthetic oligonucleotide
  Sense strand starting at position 1088 of SEQ ID NO: 1884080
guuggucugagugaccaau

SEQ ID NO: 2238605 - RNA, 19 nt, Artificial Sequence
  Description of Artificial Sequence: Synthetic oligonucleotide
  Antisense strand to SEQ ID NO: 2238604
auuggucacucagaccaac

SEQ ID NO: 2238606 - RNA, 19 nt, Artificial Sequence
  Description of Artificial Sequence: Synthetic oligonucleotide
  Sense strand starting at position 1090 of SEQ ID NO: 1884080
uggucugagugaccaauca

SEQ ID NO: 2238607 - RNA, 19 nt, Artificial Sequence
  Description of Artificial Sequence: Synthetic oligonucleotide
  Antisense strand to SEQ ID NO: 2238606
ugauuggucacucagacca

SEQ ID NO: 2238608 - RNA, 19 nt, Artificial Sequence
  Description of Artificial Sequence: Synthetic oligonucleotide
  Sense strand starting at position 1110 of SEQ ID NO: 1884080
auaugacagacgugacaua

SEQ ID NO: 2238609 - RNA, 19 nt, Artificial Sequence
  Description of Artificial Sequence: Synthetic oligonucleotide
  Antisense strand to SEQ ID NO: 2238608
uaugucacgucugucauau

SEQ ID NO: 2238610 - RNA, 19 nt, Artificial Sequence
  Description of Artificial Sequence: Synthetic oligonucleotide
  Sense strand starting at position 1134 of SEQ ID NO: 1884080
acagauuacugguugcaca

SEQ ID NO: 2238611 - RNA, 19 nt, Artificial Sequence
  Description of Artificial Sequence: Synthetic oligonucleotide
  Antisense strand to SEQ ID NO: 2238610
ugugcaaccaguaaucugu

SEQ ID NO: 2238612 - RNA, 19 nt, Artificial Sequence
  Description of Artificial Sequence: Synthetic oligonucleotide
  Sense strand starting at position 1233 of SEQ ID NO: 1884080
gagugagguuggaagggau

SEQ ID NO: 2238613 - RNA, 19 nt, Artificial Sequence
  Description of Artificial Sequence: Synthetic oligonucleotide
  Antisense strand to SEQ ID NO: 2238612
aucccuuccaaccucacuc

SEQ ID NO: 2238614 - RNA, 19 nt, Artificial Sequence
  Description of Artificial Sequence: Synthetic oligonucleotide
  Sense strand starting at position 1626 of SEQ ID NO: 1884080
uagugaacucuauauugug

SEQ ID NO: 2238615 - RNA, 19 nt, Artificial Sequence
  Description of Artificial Sequence: Synthetic oligonucleotide
  Antisense strand to SEQ ID NO: 2238614
cacaauauagaguucacua

SEQ ID NO: 2238616 - RNA, 19 nt, Artificial Sequence
  Description of Artificial Sequence: Synthetic oligonucleotide
  Sense strand starting at position 1772 of SEQ ID NO: 1884080
gaugaaagcucagucaaug

SEQ ID NO: 2238617 - RNA, 19 nt, Artificial Sequence
  Description of Artificial Sequence: Synthetic oligonucleotide
  Antisense strand to SEQ ID NO: 2238616
cauugacugagcuuucauc

SEQ ID NO: 2238618 - RNA, 19 nt, Artificial Sequence
  Description of Artificial Sequence: Synthetic oligonucleotide
  Sense strand starting at position 1804 of SEQ ID NO: 1884080
uugcuagauccuuaccugu

SEQ ID NO: 2238619 - RNA, 19 nt, Artificial Sequence
  Description of Artificial Sequence: Synthetic oligonucleotide
  Antisense strand to SEQ ID NO: 2238618
acagguaaggaucuagcaa

SEQ ID NO: 2238620 - RNA, 19 nt, Artificial Sequence
  Description of Artificial Sequence: Synthetic oligonucleotide
  Sense strand starting at position 1806 of SEQ ID NO: 1884080
gcuagauccuuaccuguga

SEQ ID NO: 2238621 - RNA, 19 nt, Artificial Sequence
  Description of Artificial Sequence: Synthetic oligonucleotide
  Antisense strand to SEQ ID NO: 2238620
ucacagguaaggaucuagc

SEQ ID NO: 2238622 - RNA, 19 nt, Artificial Sequence
  Description of Artificial Sequence: Synthetic oligonucleotide
  Sense strand starting at position 1807 of SEQ ID NO: 1884080
cuagauccuuaccugugau

SEQ ID NO: 2238623 - RNA, 19 nt, Artificial Sequence
  Description of Artificial Sequence: Synthetic oligonucleotide
  Antisense strand to SEQ ID NO: 2238622
aucacagguaaggaucuag

SEQ ID NO: 2238624 - RNA, 19 nt, Artificial Sequence
  Description of Artificial Sequence: Synthetic oligonucleotide
  Sense strand starting at position 2008 of SEQ ID NO: 1884080
gauguugagaaauguauug

SEQ ID NO: 2238625 - RNA, 19 nt, Artificial Sequence
  Description of Artificial Sequence: Synthetic oligonucleotide
  Antisense strand to SEQ ID NO: 2238624
caauacauuucucaacauc

SEQ ID NO: 2238626 - RNA, 19 nt, Artificial Sequence
  Description of Artificial Sequence: Synthetic oligonucleotide
  Sense strand starting at position 2015 of SEQ ID NO: 1884080
agaaauguauuggcauaga

SEQ ID NO: 2238627 - RNA, 19 nt, Artificial Sequence
  Description of Artificial Sequence: Synthetic oligonucleotide
  Antisense strand to SEQ ID NO: 2238626
ucuaugccaauacauuucu

SEQ ID NO: 2238628 - RNA, 19 nt, Artificial Sequence
  Description of Artificial Sequence: Synthetic oligonucleotide
  Sense strand starting at position 2146 of SEQ ID NO: 1884080
cugcuuucuaaggagugua

SEQ ID NO: 2238629 - RNA, 19 nt, Artificial Sequence
  Description of Artificial Sequence: Synthetic oligonucleotide
  Antisense strand to SEQ ID NO: 2238628
uacacuccuuagaaagcag

SEQ ID NO: 2238630 - RNA, 19 nt, Artificial Sequence
  Description of Artificial Sequence: Synthetic oligonucleotide
  Sense strand starting at position 2149 of SEQ ID NO: 1884080
cuuucuaaggaguguaaau

SEQ ID NO: 2238631 - RNA, 19 nt, Artificial Sequence
  Description of Artificial Sequence: Synthetic oligonucleotide
  Antisense strand to SEQ ID NO: 2238630
auuuacacuccuuagaaag

SEQ ID NO: 2238632 - RNA, 19 nt, Artificial Sequence
  Description of Artificial Sequence: Synthetic oligonucleotide
  Sense strand starting at position 2208 of SEQ ID NO: 1884080
ccuugcuagguuuggagau

SEQ ID NO: 2238633 - RNA, 19 nt, Artificial Sequence
  Description of Artificial Sequence: Synthetic oligonucleotide
  Antisense strand to SEQ ID NO: 2238632
aucuccaaaccuagcaagg

SEQ ID NO: 2238634 - RNA, 19 nt, Artificial Sequence
  Description of Artificial Sequence: Synthetic oligonucleotide
  Sense strand starting at position 2372 of SEQ ID NO: 1884080
aaacucaugcugugagauu

SEQ ID NO: 2238635 - RNA, 19 nt, Artificial Sequence
  Description of Artificial Sequence: Synthetic oligonucleotide
  Antisense strand to SEQ ID NO: 2238634
aaucucacagcaugaguuu

SEQ ID NO: 2238636 - RNA, 19 nt, Artificial Sequence
  Description of Artificial Sequence: Synthetic oligonucleotide
  Sense strand starting at position 2373 of SEQ ID NO: 1884080
aacucaugcugugagauuu

SEQ ID NO: 2238637 - RNA, 19 nt, Artificial Sequence
  Description of Artificial Sequence: Synthetic oligonucleotide
  Antisense strand to SEQ ID NO: 2238636
aaaucucacagcaugaguu

SEQ ID NO: 2238638 - RNA, 19 nt, Artificial Sequence
  Description of Artificial Sequence: Synthetic oligonucleotide
  Sense strand starting at position 2593 of SEQ ID NO: 1884080
uggcauguaucucuaacaa

SEQ ID NO: 2238639 - RNA, 19 nt, Artificial Sequence
  Description of Artificial Sequence: Synthetic oligonucleotide
  Antisense strand to SEQ ID NO: 2238638
uuguuagagauacaugcca

SEQ ID NO: 2238640 - RNA, 19 nt, Artificial Sequence
  Description of Artificial Sequence: Synthetic oligonucleotide
  Sense strand starting at position 2822 of SEQ ID NO: 1884080
agggcuuugguccacauua

SEQ ID NO: 2238641 - RNA, 19 nt, Artificial Sequence
  Description of Artificial Sequence: Synthetic oligonucleotide
  Antisense strand to SEQ ID NO: 2238640
uaauguggaccaaagcccu

SEQ ID NO: 2238642 - RNA, 19 nt, Artificial Sequence
  Description of Artificial Sequence: Synthetic oligonucleotide
  Sense strand starting at position 2824 of SEQ ID NO: 1884080
ggcuuugguccacauuaga

SEQ ID NO: 2238643 - RNA, 19 nt, Artificial Sequence
  Description of Artificial Sequence: Synthetic oligonucleotide
  Antisense strand to SEQ ID NO: 2238642
ucuaauguggaccaaagcc

SEQ ID NO: 2238644 - RNA, 19 nt, Artificial Sequence
  Description of Artificial Sequence: Synthetic oligonucleotide
  Sense strand starting at position 2876 of SEQ ID NO: 1884080
agcagaugacagugugagu

SEQ ID NO: 2238645 - RNA, 19 nt, Artificial Sequence
  Description of Artificial Sequence: Synthetic oligonucleotide
  Antisense strand to SEQ ID NO: 2238644
acucacacugucaucugcu

SEQ ID NO: 2238646 - RNA, 19 nt, Artificial Sequence
  Description of Artificial Sequence: Synthetic oligonucleotide
  Sense strand starting at position 2911 of SEQ ID NO: 1884080
gggccugguuccucacuaa

SEQ ID NO: 2238647 - RNA, 19 nt, Artificial Sequence
  Description of Artificial Sequence: Synthetic oligonucleotide
  Antisense strand to SEQ ID NO: 2238646
uuagugaggaaccaggccc

SEQ ID NO: 2238648 - RNA, 19 nt, Artificial Sequence
  Description of Artificial Sequence: Synthetic oligonucleotide
  Sense strand starting at position 2923 of SEQ ID NO: 1884080
ucacuaacuuagucaaagu

SEQ ID NO: 2238649 - RNA, 19 nt, Artificial Sequence
  Description of Artificial Sequence: Synthetic oligonucleotide
  Antisense strand to SEQ ID NO: 2238648
acuuugacuaaguuaguga

SEQ ID NO: 2238650 - RNA, 19 nt, Artificial Sequence
  Description of Artificial Sequence: Synthetic oligonucleotide
  Sense strand starting at position 2939 of SEQ ID NO: 1884080
aguaauacuggcugaggga

SEQ ID NO: 2238651 - RNA, 19 nt, Artificial Sequence
  Description of Artificial Sequence: Synthetic oligonucleotide
  Antisense strand to SEQ ID NO: 2238650
ucccucagccaguauuacu

SEQ ID NO: 2238652 - RNA, 19 nt, Artificial Sequence
  Description of Artificial Sequence: Synthetic oligonucleotide
  Sense strand starting at position 3312 of SEQ ID NO: 1884080
uggacaagccugugacuca

SEQ ID NO: 2238653 - RNA, 19 nt, Artificial Sequence
  Description of Artificial Sequence: Synthetic oligonucleotide
  Antisense strand to SEQ ID NO: 2238652
ugagucacaggcuugucca

SEQ ID NO: 2238654 - RNA, 19 nt, Artificial Sequence
  Description of Artificial Sequence: Synthetic oligonucleotide
  Sense strand starting at position 3671 of SEQ ID NO: 1884080
aguguuucuccgcuucuuu

SEQ ID NO: 2238655 - RNA, 19 nt, Artificial Sequence
  Description of Artificial Sequence: Synthetic oligonucleotide
  Antisense strand to SEQ ID NO: 2238654
aaagaagcggagaaacacu

SEQ ID NO: 2238656 - RNA, 19 nt, Artificial Sequence
  Description of Artificial Sequence: Synthetic oligonucleotide
  Sense strand starting at position 3776 of SEQ ID NO: 1884080
gucugcuucccacaugaag

SEQ ID NO: 2238657 - RNA, 19 nt, Artificial Sequence
  Description of Artificial Sequence: Synthetic oligonucleotide
  Antisense strand to SEQ ID NO: 2238656
cuucaugugggaagcagac

SEQ ID NO: 2238658 - RNA, 19 nt, Artificial Sequence
  Description of Artificial Sequence: Synthetic oligonucleotide
  Sense strand starting at position 51 of SEQ ID NO: 1884081
gguauuuacuuacauccca

SEQ ID NO: 2238659 - RNA, 19 nt, Artificial Sequence
  Description of Artificial Sequence: Synthetic oligonucleotide
  Antisense strand to SEQ ID NO: 2238658
ugggauguaaguaaauacc

SEQ ID NO: 2238660 - RNA, 19 nt, Artificial Sequence
  Description of Artificial Sequence: Synthetic oligonucleotide
  Sense strand starting at position 145 of SEQ ID NO: 1884081
uucgguaggugaguaaaua

SEQ ID NO: 2238661 - RNA, 19 nt, Artificial Sequence
  Description of Artificial Sequence: Synthetic oligonucleotide
  Antisense strand to SEQ ID NO: 2238660
uauuuacucaccuaccgaa

SEQ ID NO: 2238662 - RNA, 19 nt, Artificial Sequence
  Description of Artificial Sequence: Synthetic oligonucleotide
  Sense strand starting at position 146 of SEQ ID NO: 1884081
ucgguaggugaguaaauaa

SEQ ID NO: 2238663 - RNA, 19 nt, Artificial Sequence
  Description of Artificial Sequence: Synthetic oligonucleotide
  Antisense strand to SEQ ID NO: 2238662
uuauuuacucaccuaccga

SEQ ID NO: 2238664 - RNA, 19 nt, Artificial Sequence
  Description of Artificial Sequence: Synthetic oligonucleotide
  Sense strand starting at position 239 of SEQ ID NO: 1884081
gaaacugaaguguguauca

SEQ ID NO: 2238665 - RNA, 19 nt, Artificial Sequence
  Description of Artificial Sequence: Synthetic oligonucleotide
  Antisense strand to SEQ ID NO: 2238664
ugauacacacuucaguuuc

SEQ ID NO: 2238666 - RNA, 19 nt, Artificial Sequence
  Description of Artificial Sequence: Synthetic oligonucleotide
  Sense strand starting at position 241 of SEQ ID NO: 1884081
aacugaaguguguaucacu

SEQ ID NO: 2238667 - RNA, 19 nt, Artificial Sequence
  Description of Artificial Sequence: Synthetic oligonucleotide
  Antisense strand to SEQ ID NO: 2238666
agugauacacacuucaguu

SEQ ID NO: 2238668 - RNA, 19 nt, Artificial Sequence
  Description of Artificial Sequence: Synthetic oligonucleotide
  Sense strand starting at position 279 of SEQ ID NO: 1884081
gugcauaaguuuccaaaga

SEQ ID NO: 2238669 - RNA, 19 nt, Artificial Sequence
  Description of Artificial Sequence: Synthetic oligonucleotide
  Antisense strand to SEQ ID NO: 2238668
ucuuuggaaacuuaugcac

SEQ ID NO: 2238670 - RNA, 19 nt, Artificial Sequence
  Description of Artificial Sequence: Synthetic oligonucleotide
  Sense strand starting at position 496 of SEQ ID NO: 1884081
gagugaugaggaugaguca

SEQ ID NO: 2238671 - RNA, 19 nt, Artificial Sequence
  Description of Artificial Sequence: Synthetic oligonucleotide
  Antisense strand to SEQ ID NO: 2238670
ugacucauccucaucacuc

SEQ ID NO: 2238672 - RNA, 19 nt, Artificial Sequence
  Description of Artificial Sequence: Synthetic oligonucleotide
  Sense strand starting at position 519 of SEQ ID NO: 1884081
aggcucauggauuguaaua

SEQ ID NO: 2238673 - RNA, 19 nt, Artificial Sequence
  Description of Artificial Sequence: Synthetic oligonucleotide
  Antisense strand to SEQ ID NO: 2238672
uauuacaauccaugagccu

SEQ ID NO: 2238674 - RNA, 19 nt, Artificial Sequence
  Description of Artificial Sequence: Synthetic oligonucleotide
  Sense strand starting at position 916 of SEQ ID NO: 1884081
uuuauuuaguuguaggaag

SEQ ID NO: 2238675 - RNA, 19 nt, Artificial Sequence
  Description of Artificial Sequence: Synthetic oligonucleotide
  Antisense strand to SEQ ID NO: 2238674
cuuccuacaacuaaauaaa

SEQ ID NO: 2238676 - RNA, 19 nt, Artificial Sequence
  Description of Artificial Sequence: Synthetic oligonucleotide
  Sense strand starting at position 927 of SEQ ID NO: 1884081
guaggaagcccuuagguua

SEQ ID NO: 2238677 - RNA, 19 nt, Artificial Sequence
  Description of Artificial Sequence: Synthetic oligonucleotide
  Antisense strand to SEQ ID NO: 2238676
uaaccuaagggcuuccuac

SEQ ID NO: 2238678 - RNA, 19 nt, Artificial Sequence
  Description of Artificial Sequence: Synthetic oligonucleotide
  Sense strand starting at position 1157 of SEQ ID NO: 1884081
uggccaagccauggaaauu

SEQ ID NO: 2238679 - RNA, 19 nt, Artificial Sequence
  Description of Artificial Sequence: Synthetic oligonucleotide
  Antisense strand to SEQ ID NO: 2238678
aauuuccauggcuuggcca

SEQ ID NO: 2238680 - RNA, 19 nt, Artificial Sequence
  Description of Artificial Sequence: Synthetic oligonucleotide
  Sense strand starting at position 1217 of SEQ ID NO: 1884081
ucauuuaucugagaaaugg

SEQ ID NO: 2238681 - RNA, 19 nt, Artificial Sequence
  Description of Artificial Sequence: Synthetic oligonucleotide
  Antisense strand to SEQ ID NO: 2238680
ccauuucucagauaaauga

SEQ ID NO: 2238682 - RNA, 19 nt, Artificial Sequence
  Description of Artificial Sequence: Synthetic oligonucleotide
  Sense strand starting at position 1303 of SEQ ID NO: 1884081
ugugauguggcucaggaaa

SEQ ID NO: 2238683 - RNA, 19 nt, Artificial Sequence
  Description of Artificial Sequence: Synthetic oligonucleotide
  Antisense strand to SEQ ID NO: 2238682
uuuccugagccacaucaca

SEQ ID NO: 2238684 - RNA, 19 nt, Artificial Sequence
  Description of Artificial Sequence: Synthetic oligonucleotide
  Sense strand starting at position 1325 of SEQ ID NO: 1884081
ucauauucucacuguagga

SEQ ID NO: 2238685 - RNA, 19 nt, Artificial Sequence
  Description of Artificial Sequence: Synthetic oligonucleotide
  Antisense strand to SEQ ID NO: 2238684
uccuacagugagaauauga

SEQ ID NO: 2238686 - RNA, 19 nt, Artificial Sequence
  Description of Artificial Sequence: Synthetic oligonucleotide
  Sense strand starting at position 1561 of SEQ ID NO: 1884081
agaaauccugcaugaguua

SEQ ID NO: 2238687 - RNA, 19 nt, Artificial Sequence
  Description of Artificial Sequence: Synthetic oligonucleotide
  Antisense strand to SEQ ID NO: 2238686
uaacucaugcaggauuucu

SEQ ID NO: 2238688 - RNA, 19 nt, Artificial Sequence
  Description of Artificial Sequence: Synthetic oligonucleotide
  Sense strand starting at position 1564 of SEQ ID NO: 1884081
aauccugcaugaguuagaa

SEQ ID NO: 2238689 - RNA, 19 nt, Artificial Sequence
  Description of Artificial Sequence: Synthetic oligonucleotide
  Antisense strand to SEQ ID NO: 2238688
uucuaacucaugcaggauu

SEQ ID NO: 2238690 - RNA, 19 nt, Artificial Sequence
  Description of Artificial Sequence: Synthetic oligonucleotide
  Sense strand starting at position 1566 of SEQ ID NO: 1884081
uccugcaugaguuagaaag

SEQ ID NO: 2238691 - RNA, 19 nt, Artificial Sequence
  Description of Artificial Sequence: Synthetic oligonucleotide
  Antisense strand to SEQ ID NO: 2238690
cuuucuaacucaugcagga

SEQ ID NO: 2238692 - RNA, 19 nt, Artificial Sequence
  Description of Artificial Sequence: Synthetic oligonucleotide
  Sense strand starting at position 1619 of SEQ ID NO: 1884081
uaucaaacugguuguuaga

SEQ ID NO: 2238693 - RNA, 19 nt, Artificial Sequence
  Description of Artificial Sequence: Synthetic oligonucleotide
  Antisense strand to SEQ ID NO: 2238692
ucuaacaaccaguuugaua

SEQ ID NO: 2238694 - RNA, 19 nt, Artificial Sequence
  Description of Artificial Sequence: Synthetic oligonucleotide
  Sense strand starting at position 1668 of SEQ ID NO: 1884081
guguaaaugcaguaagcaa

SEQ ID NO: 2238695 - RNA, 19 nt, Artificial Sequence
  Description of Artificial Sequence: Synthetic oligonucleotide
  Antisense strand to SEQ ID NO: 2238694
uugcuuacugcauuuacac

SEQ ID NO: 2238696 - RNA, 19 nt, Artificial Sequence
  Description of Artificial Sequence: Synthetic oligonucleotide
  Sense strand starting at position 1765 of SEQ ID NO: 1884081
ggagcaggaccuuguaaca

SEQ ID NO: 2238697 - RNA, 19 nt, Artificial Sequence
  Description of Artificial Sequence: Synthetic oligonucleotide
  Antisense strand to SEQ ID NO: 2238696
uguuacaagguccugcucc

SEQ ID NO: 2238698 - RNA, 19 nt, Artificial Sequence
  Description of Artificial Sequence: Synthetic oligonucleotide
  Sense strand starting at position 1810 of SEQ ID NO: 1884081
gggccuuucccugggaaag

SEQ ID NO: 2238699 - RNA, 19 nt, Artificial Sequence
  Description of Artificial Sequence: Synthetic oligonucleotide
  Antisense strand to SEQ ID NO: 2238698
cuuucccagggaaaggccc

SEQ ID NO: 2238700 - RNA, 19 nt, Artificial Sequence
  Description of Artificial Sequence: Synthetic oligonucleotide
  Sense strand starting at position 2259 of SEQ ID NO: 1884081
cagugaauacuguaggcuu

SEQ ID NO: 2238701 - RNA, 19 nt, Artificial Sequence
  Description of Artificial Sequence: Synthetic oligonucleotide
  Antisense strand to SEQ ID NO: 2238700
aagccuacaguauucacug

SEQ ID NO: 2238702 - RNA, 19 nt, Artificial Sequence
  Description of Artificial Sequence: Synthetic oligonucleotide
  Sense strand starting at position 2273 of SEQ ID NO: 1884081
ggcuuuguaggccauacua

SEQ ID NO: 2238703 - RNA, 19 nt, Artificial Sequence
  Description of Artificial Sequence: Synthetic oligonucleotide
  Antisense strand to SEQ ID NO: 2238702
uaguauggccuacaaagcc

SEQ ID NO: 2238704 - RNA, 19 nt, Artificial Sequence
  Description of Artificial Sequence: Synthetic oligonucleotide
  Sense strand starting at position 2325 of SEQ ID NO: 1884081
cugugaaucaaccguagau

SEQ ID NO: 2238705 - RNA, 19 nt, Artificial Sequence
  Description of Artificial Sequence: Synthetic oligonucleotide
  Antisense strand to SEQ ID NO: 2238704
aucuacgguugauucacag

SEQ ID NO: 2238706 - RNA, 19 nt, Artificial Sequence
  Description of Artificial Sequence: Synthetic oligonucleotide
  Sense strand starting at position 2327 of SEQ ID NO: 1884081
gugaaucaaccguagauaa

SEQ ID NO: 2238707 - RNA, 19 nt, Artificial Sequence
  Description of Artificial Sequence: Synthetic oligonucleotide
  Antisense strand to SEQ ID NO: 2238706
uuaucuacgguugauucac

SEQ ID NO: 2238708 - RNA, 19 nt, Artificial Sequence
  Description of Artificial Sequence: Synthetic oligonucleotide
  Sense strand starting at position 2372 of SEQ ID NO: 1884081
gcuaauaguuuauugacaa

SEQ ID NO: 2238709 - RNA, 19 nt, Artificial Sequence
  Description of Artificial Sequence: Synthetic oligonucleotide
  Antisense strand to SEQ ID NO: 2238708
uugucaauaaacuauuagc

SEQ ID NO: 2238710 - RNA, 19 nt, Artificial Sequence
  Description of Artificial Sequence: Synthetic oligonucleotide
  Sense strand starting at position 2831 of SEQ ID NO: 1884081
ggaacaauucuguggauca

SEQ ID NO: 2238711 - RNA, 19 nt, Artificial Sequence
  Description of Artificial Sequence: Synthetic oligonucleotide
  Antisense strand to SEQ ID NO: 2238710
ugauccacagaauuguucc

SEQ ID NO: 2238712 - RNA, 19 nt, Artificial Sequence
  Description of Artificial Sequence: Synthetic oligonucleotide
  Sense strand starting at position 2842 of SEQ ID NO: 1884081
guggaucaccucugagaca

SEQ ID NO: 2238713 - RNA, 19 nt, Artificial Sequence
  Description of Artificial Sequence: Synthetic oligonucleotide
  Antisense strand to SEQ ID NO: 2238712
ugucucagaggugauccac

SEQ ID NO: 2238714 - RNA, 19 nt, Artificial Sequence
  Description of Artificial Sequence: Synthetic oligonucleotide
  Sense strand starting at position 3109 of SEQ ID NO: 1884081
aggacaaauuucuauggau

SEQ ID NO: 2238715 - RNA, 19 nt, Artificial Sequence
  Description of Artificial Sequence: Synthetic oligonucleotide
  Antisense strand to SEQ ID NO: 2238714
auccauagaaauuuguccu

SEQ ID NO: 2238716 - RNA, 19 nt, Artificial Sequence
  Description of Artificial Sequence: Synthetic oligonucleotide
  Sense strand starting at position 3112 of SEQ ID NO: 1884081
acaaauuucuauggauaag

SEQ ID NO: 2238717 - RNA, 19 nt, Artificial Sequence
  Description of Artificial Sequence: Synthetic oligonucleotide
  Antisense strand to SEQ ID NO: 2238716
cuuauccauagaaauuugu

SEQ ID NO: 2238718 - RNA, 19 nt, Artificial Sequence
  Description of Artificial Sequence: Synthetic oligonucleotide
  Sense strand starting at position 3122 of SEQ ID NO: 1884081
auggauaaggcuggaucau

SEQ ID NO: 2238719 - RNA, 19 nt, Artificial Sequence
  Description of Artificial Sequence: Synthetic oligonucleotide
  Antisense strand to SEQ ID NO: 2238718
augauccagccuuauccau

SEQ ID NO: 2238720 - RNA, 19 nt, Artificial Sequence
  Description of Artificial Sequence: Synthetic oligonucleotide
  Sense strand starting at position 3208 of SEQ ID NO: 1884081
guaggaacgggauguuuga

SEQ ID NO: 2238721 - RNA, 19 nt, Artificial Sequence
  Description of Artificial Sequence: Synthetic oligonucleotide
  Antisense strand to SEQ ID NO: 2238720
ucaaacaucccguuccuac

SEQ ID NO: 2238722 - RNA, 19 nt, Artificial Sequence
  Description of Artificial Sequence: Synthetic oligonucleotide
  Sense strand starting at position 3229 of SEQ ID NO: 1884081
caagcacaccugugagaaa

SEQ ID NO: 2238723 - RNA, 19 nt, Artificial Sequence
  Description of Artificial Sequence: Synthetic oligonucleotide
  Antisense strand to SEQ ID NO: 2238722
uuucucacaggugugcuug

SEQ ID NO: 2238724 - RNA, 19 nt, Artificial Sequence
  Description of Artificial Sequence: Synthetic oligonucleotide
  Sense strand starting at position 3343 of SEQ ID NO: 1884081
ccaggagccgcauacuauu

SEQ ID NO: 2238725 - RNA, 19 nt, Artificial Sequence
  Description of Artificial Sequence: Synthetic oligonucleotide
  Antisense strand to SEQ ID NO: 2238724
aauaguaugcggcuccugg

SEQ ID NO: 2238726 - RNA, 19 nt, Artificial Sequence
  Description of Artificial Sequence: Synthetic oligonucleotide
  Sense strand starting at position 3349 of SEQ ID NO: 1884081
gccgcauacuauuuccuga

SEQ ID NO: 2238727 - RNA, 19 nt, Artificial Sequence
  Description of Artificial Sequence: Synthetic oligonucleotide
  Antisense strand to SEQ ID NO: 2238726
ucaggaaauaguaugcggc

SEQ ID NO: 2238728 - RNA, 19 nt, Artificial Sequence
  Description of Artificial Sequence: Synthetic oligonucleotide
  Sense strand starting at position 3352 of SEQ ID NO: 1884081
gcauacuauuuccugaugu

SEQ ID NO: 2238729 - RNA, 19 nt, Artificial Sequence
  Description of Artificial Sequence: Synthetic oligonucleotide
  Antisense strand to SEQ ID NO: 2238728
acaucaggaaauaguaugc

SEQ ID NO: 2238730 - RNA, 19 nt, Artificial Sequence
  Description of Artificial Sequence: Synthetic oligonucleotide
  Sense strand starting at position 3365 of SEQ ID NO: 1884081
ugauguguaagccagacaa

SEQ ID NO: 2238731 - RNA, 19 nt, Artificial Sequence
  Description of Artificial Sequence: Synthetic oligonucleotide
  Antisense strand to SEQ ID NO: 2238730
uugucuggcuuacacauca

SEQ ID NO: 2238732 - RNA, 19 nt, Artificial Sequence
  Description of Artificial Sequence: Synthetic oligonucleotide
  Sense strand starting at position 3496 of SEQ ID NO: 1884081
uagacaucccaguguauag

SEQ ID NO: 2238733 - RNA, 19 nt, Artificial Sequence
  Description of Artificial Sequence: Synthetic oligonucleotide
  Antisense strand to SEQ ID NO: 2238732
cuauacacugggaugucua

SEQ ID NO: 2238734 - RNA, 19 nt, Artificial Sequence
  Description of Artificial Sequence: Synthetic oligonucleotide
  Sense strand starting at position 3606 of SEQ ID NO: 1884081
acuagaaacuuucuaaggu

SEQ ID NO: 2238735 - RNA, 19 nt, Artificial Sequence
  Description of Artificial Sequence: Synthetic oligonucleotide
  Antisense strand to SEQ ID NO: 2238734
accuuagaaaguuucuagu

SEQ ID NO: 2238736 - RNA, 19 nt, Artificial Sequence
  Description of Artificial Sequence: Synthetic oligonucleotide
  Sense strand starting at position 3719 of SEQ ID NO: 1884081
cuaacugugcacugaucaa

SEQ ID NO: 2238737 - RNA, 19 nt, Artificial Sequence
  Description of Artificial Sequence: Synthetic oligonucleotide
  Antisense strand to SEQ ID NO: 2238736
uugaucagugcacaguuag

SEQ ID NO: 2238738 - RNA, 19 nt, Artificial Sequence
  Description of Artificial Sequence: Synthetic oligonucleotide
  Sense strand starting at position 60 of SEQ ID NO: 1884082
uuuauaguccuggaccauu

SEQ ID NO: 2238739 - RNA, 19 nt, Artificial Sequence
  Description of Artificial Sequence: Synthetic oligonucleotide
  Antisense strand to SEQ ID NO: 2238738
aaugguccaggacuauaaa

SEQ ID NO: 2238740 - RNA, 19 nt, Artificial Sequence
  Description of Artificial Sequence: Synthetic oligonucleotide
  Sense strand starting at position 228 of SEQ ID NO: 1884082
acuggaaucaugugaaguu

SEQ ID NO: 2238741 - RNA, 19 nt, Artificial Sequence
  Description of Artificial Sequence: Synthetic oligonucleotide
  Antisense strand to SEQ ID NO: 2238740
aacuucacaugauuccagu

SEQ ID NO: 2238742 - RNA, 19 nt, Artificial Sequence
  Description of Artificial Sequence: Synthetic oligonucleotide
  Sense strand starting at position 355 of SEQ ID NO: 1884082
uugagagcuugugugaaua

SEQ ID NO: 2238743 - RNA, 19 nt, Artificial Sequence
  Description of Artificial Sequence: Synthetic oligonucleotide
  Antisense strand to SEQ ID NO: 2238742
uauucacacaagcucucaa

SEQ ID NO: 2238744 - RNA, 19 nt, Artificial Sequence
  Description of Artificial Sequence: Synthetic oligonucleotide
  Sense strand starting at position 437 of SEQ ID NO: 1884082
ccugaagguucuucccuua

SEQ ID NO: 2238745 - RNA, 19 nt, Artificial Sequence
  Description of Artificial Sequence: Synthetic oligonucleotide
  Antisense strand to SEQ ID NO: 2238744
uaagggaagaaccuucagg

SEQ ID NO: 2238746 - RNA, 19 nt, Artificial Sequence
  Description of Artificial Sequence: Synthetic oligonucleotide
  Sense strand starting at position 517 of SEQ ID NO: 1884082
agccuuuagcaaugcauga

SEQ ID NO: 2238747 - RNA, 19 nt, Artificial Sequence
  Description of Artificial Sequence: Synthetic oligonucleotide
  Antisense strand to SEQ ID NO: 2238746
ucaugcauugcuaaaggcu

SEQ ID NO: 2238748 - RNA, 19 nt, Artificial Sequence
  Description of Artificial Sequence: Synthetic oligonucleotide
  Sense strand starting at position 653 of SEQ ID NO: 1884082
uguacaauuuagcaaugau

SEQ ID NO: 2238749 - RNA, 19 nt, Artificial Sequence
  Description of Artificial Sequence: Synthetic oligonucleotide
  Antisense strand to SEQ ID NO: 2238748
aucauugcuaaauuguaca

SEQ ID NO: 2238750 - RNA, 19 nt, Artificial Sequence
  Description of Artificial Sequence: Synthetic oligonucleotide
  Sense strand starting at position 660 of SEQ ID NO: 1884082
uuuagcaaugaucgaaacu

SEQ ID NO: 2238751 - RNA, 19 nt, Artificial Sequence
  Description of Artificial Sequence: Synthetic oligonucleotide
  Antisense strand to SEQ ID NO: 2238750
aguuucgaucauugcuaaa

SEQ ID NO: 2238752 - RNA, 19 nt, Artificial Sequence
  Description of Artificial Sequence: Synthetic oligonucleotide
  Sense strand starting at position 695 of SEQ ID NO: 1884082
gggacagauguccagucua

SEQ ID NO: 2238753 - RNA, 19 nt, Artificial Sequence
  Description of Artificial Sequence: Synthetic oligonucleotide
  Antisense strand to SEQ ID NO: 2238752
uagacuggacaucuguccc

SEQ ID NO: 2238754 - RNA, 19 nt, Artificial Sequence
  Description of Artificial Sequence: Synthetic oligonucleotide
  Sense strand starting at position 700 of SEQ ID NO: 1884082
agauguccagucuaguuau

SEQ ID NO: 2238755 - RNA, 19 nt, Artificial Sequence
  Description of Artificial Sequence: Synthetic oligonucleotide
  Antisense strand to SEQ ID NO: 2238754
auaacuagacuggacaucu

SEQ ID NO: 2238756 - RNA, 19 nt, Artificial Sequence
  Description of Artificial Sequence: Synthetic oligonucleotide
  Sense strand starting at position 703 of SEQ ID NO: 1884082
uguccagucuaguuauauu

SEQ ID NO: 2238757 - RNA, 19 nt, Artificial Sequence
  Description of Artificial Sequence: Synthetic oligonucleotide
  Antisense strand to SEQ ID NO: 2238756
aauauaacuagacuggaca

SEQ ID NO: 2238758 - RNA, 19 nt, Artificial Sequence
  Description of Artificial Sequence: Synthetic oligonucleotide
  Sense strand starting at position 720 of SEQ ID NO: 1884082
uuaagaugcuucuuauuga

SEQ ID NO: 2238759 - RNA, 19 nt, Artificial Sequence
  Description of Artificial Sequence: Synthetic oligonucleotide
  Antisense strand to SEQ ID NO: 2238758
ucaauaagaagcaucuuaa

SEQ ID NO: 2238760 - RNA, 19 nt, Artificial Sequence
  Description of Artificial Sequence: Synthetic oligonucleotide
  Sense strand starting at position 723 of SEQ ID NO: 1884082
agaugcuucuuauugaaga

SEQ ID NO: 2238761 - RNA, 19 nt, Artificial Sequence
  Description of Artificial Sequence: Synthetic oligonucleotide
  Antisense strand to SEQ ID NO: 2238760
ucuucaauaagaagcaucu

SEQ ID NO: 2238762 - RNA, 19 nt, Artificial Sequence
  Description of Artificial Sequence: Synthetic oligonucleotide
  Sense strand starting at position 850 of SEQ ID NO: 1884082
auggauuguuaaguugaga

SEQ ID NO: 2238763 - RNA, 19 nt, Artificial Sequence
  Description of Artificial Sequence: Synthetic oligonucleotide
  Antisense strand to SEQ ID NO: 2238762
ucucaacuuaacaauccau

SEQ ID NO: 2238764 - RNA, 19 nt, Artificial Sequence
  Description of Artificial Sequence: Synthetic oligonucleotide
  Sense strand starting at position 877 of SEQ ID NO: 1884082
cggguaguggaauaaacau

SEQ ID NO: 2238765 - RNA, 19 nt, Artificial Sequence
  Description of Artificial Sequence: Synthetic oligonucleotide
  Antisense strand to SEQ ID NO: 2238764
auguuuauuccacuacccg

SEQ ID NO: 2238766 - RNA, 19 nt, Artificial Sequence
  Description of Artificial Sequence: Synthetic oligonucleotide
  Sense strand starting at position 905 of SEQ ID NO: 1884082
guaucacugcauuacucau

SEQ ID NO: 2238767 - RNA, 19 nt, Artificial Sequence
  Description of Artificial Sequence: Synthetic oligonucleotide
  Antisense strand to SEQ ID NO: 2238766
augaguaaugcagugauac

SEQ ID NO: 2238768 - RNA, 19 nt, Artificial Sequence
  Description of Artificial Sequence: Synthetic oligonucleotide
  Sense strand starting at position 1098 of SEQ ID NO: 1884082
augaaagccuuuguuuacu

SEQ ID NO: 2238769 - RNA, 19 nt, Artificial Sequence
  Description of Artificial Sequence: Synthetic oligonucleotide
  Antisense strand to SEQ ID NO: 2238768
aguaaacaaaggcuuucau

SEQ ID NO: 2238770 - RNA, 19 nt, Artificial Sequence
  Description of Artificial Sequence: Synthetic oligonucleotide
  Sense strand starting at position 1104 of SEQ ID NO: 1884082
gccuuuguuuacucacuga

SEQ ID NO: 2238771 - RNA, 19 nt, Artificial Sequence
  Description of Artificial Sequence: Synthetic oligonucleotide
  Antisense strand to SEQ ID NO: 2238770
ucagugaguaaacaaaggc

SEQ ID NO: 2238772 - RNA, 19 nt, Artificial Sequence
  Description of Artificial Sequence: Synthetic oligonucleotide
  Sense strand starting at position 1107 of SEQ ID NO: 1884082
uuuguuuacucacugaaag

SEQ ID NO: 2238773 - RNA, 19 nt, Artificial Sequence
  Description of Artificial Sequence: Synthetic oligonucleotide
  Antisense strand to SEQ ID NO: 2238772
cuuucagugaguaaacaaa

SEQ ID NO: 2238774 - RNA, 19 nt, Artificial Sequence
  Description of Artificial Sequence: Synthetic oligonucleotide
  Sense strand starting at position 1108 of SEQ ID NO: 1884082
uuguuuacucacugaaagu

SEQ ID NO: 2238775 - RNA, 19 nt, Artificial Sequence
  Description of Artificial Sequence: Synthetic oligonucleotide
  Antisense strand to SEQ ID NO: 2238774
acuuucagugaguaaacaa

SEQ ID NO: 2238776 - RNA, 19 nt, Artificial Sequence
  Description of Artificial Sequence: Synthetic oligonucleotide
  Sense strand starting at position 1240 of SEQ ID NO: 1884082
ggcauuuacucuugaagag

SEQ ID NO: 2238777 - RNA, 19 nt, Artificial Sequence
  Description of Artificial Sequence: Synthetic oligonucleotide
  Antisense strand to SEQ ID NO: 2238776
cucuucaagaguaaaugcc

SEQ ID NO: 2238778 - RNA, 19 nt, Artificial Sequence
  Description of Artificial Sequence: Synthetic oligonucleotide
  Sense strand starting at position 1270 of SEQ ID NO: 1884082
gugggaaagccagauaagu

SEQ ID NO: 2238779 - RNA, 19 nt, Artificial Sequence
  Description of Artificial Sequence: Synthetic oligonucleotide
  Antisense strand to SEQ ID NO: 2238778
acuuaucuggcuuucccac

SEQ ID NO: 2238780 - RNA, 19 nt, Artificial Sequence
  Description of Artificial Sequence: Synthetic oligonucleotide
  Sense strand starting at position 1665 of SEQ ID NO: 1884082
gugggaggcacugaguuua

SEQ ID NO: 2238781 - RNA, 19 nt, Artificial Sequence
  Description of Artificial Sequence: Synthetic oligonucleotide
  Antisense strand to SEQ ID NO: 2238780
uaaacucagugccucccac

SEQ ID NO: 2238782 - RNA, 19 nt, Artificial Sequence
  Description of Artificial Sequence: Synthetic oligonucleotide
  Sense strand starting at position 1670 of SEQ ID NO: 1884082
aggcacugaguuuacaaua

SEQ ID NO: 2238783 - RNA, 19 nt, Artificial Sequence
  Description of Artificial Sequence: Synthetic oligonucleotide
  Antisense strand to SEQ ID NO: 2238782
uauuguaaacucagugccu

SEQ ID NO: 2238784 - RNA, 19 nt, Artificial Sequence
  Description of Artificial Sequence: Synthetic oligonucleotide
  Sense strand starting at position 1707 of SEQ ID NO: 1884082
uaggaaugucuacguguga

SEQ ID NO: 2238785 - RNA, 19 nt, Artificial Sequence
  Description of Artificial Sequence: Synthetic oligonucleotide
  Antisense strand to SEQ ID NO: 2238784
ucacacguagacauuccua

SEQ ID NO: 2238786 - RNA, 19 nt, Artificial Sequence
  Description of Artificial Sequence: Synthetic oligonucleotide
  Sense strand starting at position 1779 of SEQ ID NO: 1884082
gggaaugacauccaguugu

SEQ ID NO: 2238787 - RNA, 19 nt, Artificial Sequence
  Description of Artificial Sequence: Synthetic oligonucleotide
  Antisense strand to SEQ ID NO: 2238786
acaacuggaugucauuccc

SEQ ID NO: 2238788 - RNA, 19 nt, Artificial Sequence
  Description of Artificial Sequence: Synthetic oligonucleotide
  Sense strand starting at position 2038 of SEQ ID NO: 1884082
gccauuugcuggccuagau

SEQ ID NO: 2238789 - RNA, 19 nt, Artificial Sequence
  Description of Artificial Sequence: Synthetic oligonucleotide
  Antisense strand to SEQ ID NO: 2238788
aucuaggccagcaaauggc

SEQ ID NO: 2238790 - RNA, 19 nt, Artificial Sequence
  Description of Artificial Sequence: Synthetic oligonucleotide
  Sense strand starting at position 2053 of SEQ ID NO: 1884082
agaugugcacucugcagaa

SEQ ID NO: 2238791 - RNA, 19 nt, Artificial Sequence
  Description of Artificial Sequence: Synthetic oligonucleotide
  Antisense strand to SEQ ID NO: 2238790
uucugcagagugcacaucu

SEQ ID NO: 2238792 - RNA, 19 nt, Artificial Sequence
  Description of Artificial Sequence: Synthetic oligonucleotide
  Sense strand starting at position 2055 of SEQ ID NO: 1884082
augugcacucugcagaaau

SEQ ID NO: 2238793 - RNA, 19 nt, Artificial Sequence
  Description of Artificial Sequence: Synthetic oligonucleotide
  Antisense strand to SEQ ID NO: 2238792
auuucugcagagugcacau

SEQ ID NO: 2238794 - RNA, 19 nt, Artificial Sequence
  Description of Artificial Sequence: Synthetic oligonucleotide
  Sense strand starting at position 2391 of SEQ ID NO: 1884082
gggaaaguguuucuccauu

SEQ ID NO: 2238795 - RNA, 19 nt, Artificial Sequence
  Description of Artificial Sequence: Synthetic oligonucleotide
  Antisense strand to SEQ ID NO: 2238794
aauggagaaacacuuuccc

SEQ ID NO: 2238796 - RNA, 19 nt, Artificial Sequence
  Description of Artificial Sequence: Synthetic oligonucleotide
  Sense strand starting at position 2645 of SEQ ID NO: 1884082
gaguucagugagcggagau

SEQ ID NO: 2238797 - RNA, 19 nt, Artificial Sequence
  Description of Artificial Sequence: Synthetic oligonucleotide
  Antisense strand to SEQ ID NO: 2238796
aucuccgcucacugaacuc

SEQ ID NO: 2238798 - RNA, 19 nt, Artificial Sequence
  Description of Artificial Sequence: Synthetic oligonucleotide
  Sense strand starting at position 2776 of SEQ ID NO: 1884082
ccacucaaugucuacaagu

SEQ ID NO: 2238799 - RNA, 19 nt, Artificial Sequence
  Description of Artificial Sequence: Synthetic oligonucleotide
  Antisense strand to SEQ ID NO: 2238798
acuuguagacauugagugg

SEQ ID NO: 2238800 - RNA, 19 nt, Artificial Sequence
  Description of Artificial Sequence: Synthetic oligonucleotide
  Sense strand starting at position 2956 of SEQ ID NO: 1884082
cuaacaaguuuccuggauu

SEQ ID NO: 2238801 - RNA, 19 nt, Artificial Sequence
  Description of Artificial Sequence: Synthetic oligonucleotide
  Antisense strand to SEQ ID NO: 2238800
aauccaggaaacuuguuag

SEQ ID NO: 2238802 - RNA, 19 nt, Artificial Sequence
  Description of Artificial Sequence: Synthetic oligonucleotide
  Sense strand starting at position 3063 of SEQ ID NO: 1884082
gaacucugcccauguggua

SEQ ID NO: 2238803 - RNA, 19 nt, Artificial Sequence
  Description of Artificial Sequence: Synthetic oligonucleotide
  Antisense strand to SEQ ID NO: 2238802
uaccacaugggcagaguuc

SEQ ID NO: 2238804 - RNA, 19 nt, Artificial Sequence
  Description of Artificial Sequence: Synthetic oligonucleotide
  Sense strand starting at position 3077 of SEQ ID NO: 1884082
ugguaaugaggcuguucua

SEQ ID NO: 2238805 - RNA, 19 nt, Artificial Sequence
  Description of Artificial Sequence: Synthetic oligonucleotide
  Antisense strand to SEQ ID NO: 2238804
uagaacagccucauuacca

SEQ ID NO: 2238806 - RNA, 19 nt, Artificial Sequence
  Description of Artificial Sequence: Synthetic oligonucleotide
  Sense strand starting at position 3086 of SEQ ID NO: 1884082
ggcuguucuagucaggaag

SEQ ID NO: 2238807 - RNA, 19 nt, Artificial Sequence
  Description of Artificial Sequence: Synthetic oligonucleotide
  Antisense strand to SEQ ID NO: 2238806
cuuccugacuagaacagcc

SEQ ID NO: 2238808 - RNA, 19 nt, Artificial Sequence
  Description of Artificial Sequence: Synthetic oligonucleotide
  Sense strand starting at position 3097 of SEQ ID NO: 1884082
ucaggaagcccagggauua

SEQ ID NO: 2238809 - RNA, 19 nt, Artificial Sequence
  Description of Artificial Sequence: Synthetic oligonucleotide
  Antisense strand to SEQ ID NO: 2238808
uaaucccugggcuuccuga

SEQ ID NO: 2238810 - RNA, 19 nt, Artificial Sequence
  Description of Artificial Sequence: Synthetic oligonucleotide
  Sense strand starting at position 3163 of SEQ ID NO: 1884082
uuaugaaaguuggcaaaca

SEQ ID NO: 2238811 - RNA, 19 nt, Artificial Sequence
  Description of Artificial Sequence: Synthetic oligonucleotide
  Antisense strand to SEQ ID NO: 2238810
uguuugccaacuuucauaa

SEQ ID NO: 2238812 - RNA, 19 nt, Artificial Sequence
  Description of Artificial Sequence: Synthetic oligonucleotide
  Sense strand starting at position 3611 of SEQ ID NO: 1884082
caggguauguaacucuaaa

SEQ ID NO: 2238813 - RNA, 19 nt, Artificial Sequence
  Description of Artificial Sequence: Synthetic oligonucleotide
  Antisense strand to SEQ ID NO: 2238812
uuuagaguuacauacccug

SEQ ID NO: 2238814 - RNA, 19 nt, Artificial Sequence
  Description of Artificial Sequence: Synthetic oligonucleotide
  Sense strand starting at position 3820 of SEQ ID NO: 1884082
ucuagauacucagcugaaa

SEQ ID NO: 2238815 - RNA, 19 nt, Artificial Sequence
  Description of Artificial Sequence: Synthetic oligonucleotide
  Antisense strand to SEQ ID NO: 2238814
uuucagcugaguaucuaga

SEQ ID NO: 2238816 - RNA, 19 nt, Artificial Sequence
  Description of Artificial Sequence: Synthetic oligonucleotide
  Sense strand starting at position 3959 of SEQ ID NO: 1884082
uuagcugagcuauacacau

SEQ ID NO: 2238817 - RNA, 19 nt, Artificial Sequence
  Description of Artificial Sequence: Synthetic oligonucleotide
  Antisense strand to SEQ ID NO: 2238816
auguguauagcucagcuaa

SEQ ID NO: 2238818 - RNA, 19 nt, Artificial Sequence
  Description of Artificial Sequence: Synthetic oligonucleotide
  Sense strand starting at position 69 of SEQ ID NO: 1884083
aaggaagguuuaguuguua

SEQ ID NO: 2238819 - RNA, 19 nt, Artificial Sequence
  Description of Artificial Sequence: Synthetic oligonucleotide
  Antisense strand to SEQ ID NO: 2238818
uaacaacuaaaccuuccuu

SEQ ID NO: 2238820 - RNA, 19 nt, Artificial Sequence
  Description of Artificial Sequence: Synthetic oligonucleotide
  Sense strand starting at position 118 of SEQ ID NO: 1884083
ugguauauacaguauguaa

SEQ ID NO: 2238821 - RNA, 19 nt, Artificial Sequence
  Description of Artificial Sequence: Synthetic oligonucleotide
  Antisense strand to SEQ ID NO: 2238820
uuacauacuguauauacca

SEQ ID NO: 2238822 - RNA, 19 nt, Artificial Sequence
  Description of Artificial Sequence: Synthetic oligonucleotide
  Sense strand starting at position 336 of SEQ ID NO: 1884083
agggaagcccugcauuaga

SEQ ID NO: 2238823 - RNA, 19 nt, Artificial Sequence
  Description of Artificial Sequence: Synthetic oligonucleotide
  Antisense strand to SEQ ID NO: 2238822
ucuaaugcagggcuucccu

SEQ ID NO: 2238824 - RNA, 19 nt, Artificial Sequence
  Description of Artificial Sequence: Synthetic oligonucleotide
  Sense strand starting at position 414 of SEQ ID NO: 1884083
gcuuaagauccaugauaac

SEQ ID NO: 2238825 - RNA, 19 nt, Artificial Sequence
  Description of Artificial Sequence: Synthetic oligonucleotide
  Antisense strand to SEQ ID NO: 2238824
guuaucauggaucuuaagc

SEQ ID NO: 2238826 - RNA, 19 nt, Artificial Sequence
  Description of Artificial Sequence: Synthetic oligonucleotide
  Sense strand starting at position 556 of SEQ ID NO: 1884083
uuaaguuuccagcauauga

SEQ ID NO: 2238827 - RNA, 19 nt, Artificial Sequence
  Description of Artificial Sequence: Synthetic oligonucleotide
  Antisense strand to SEQ ID NO: 2238826
ucauaugcuggaaacuuaa

SEQ ID NO: 2238828 - RNA, 19 nt, Artificial Sequence
  Description of Artificial Sequence: Synthetic oligonucleotide
  Sense strand starting at position 667 of SEQ ID NO: 1884083
guugcugucgcuccuuuaa

SEQ ID NO: 2238829 - RNA, 19 nt, Artificial Sequence
  Description of Artificial Sequence: Synthetic oligonucleotide
  Antisense strand to SEQ ID NO: 2238828
uuaaaggagcgacagcaac

SEQ ID NO: 2238830 - RNA, 19 nt, Artificial Sequence
  Description of Artificial Sequence: Synthetic oligonucleotide
  Sense strand starting at position 670 of SEQ ID NO: 1884083
gcugucgcuccuuuaauua

SEQ ID NO: 2238831 - RNA, 19 nt, Artificial Sequence
  Description of Artificial Sequence: Synthetic oligonucleotide
  Antisense strand to SEQ ID NO: 2238830
uaauuaaaggagcgacagc

SEQ ID NO: 2238832 - RNA, 19 nt, Artificial Sequence
  Description of Artificial Sequence: Synthetic oligonucleotide
  Sense strand starting at position 759 of SEQ ID NO: 1884083
uugagaguggcauaaagua

SEQ ID NO: 2238833 - RNA, 19 nt, Artificial Sequence
  Description of Artificial Sequence: Synthetic oligonucleotide
  Antisense strand to SEQ ID NO: 2238832
uacuuuaugccacucucaa

SEQ ID NO: 2238834 - RNA, 19 nt, Artificial Sequence
  Description of Artificial Sequence: Synthetic oligonucleotide
  Sense strand starting at position 874 of SEQ ID NO: 1884083
gggucuaaccaguggaaac

SEQ ID NO: 2238835 - RNA, 19 nt, Artificial Sequence
  Description of Artificial Sequence: Synthetic oligonucleotide
  Antisense strand to SEQ ID NO: 2238834
guuuccacugguuagaccc

SEQ ID NO: 2238836 - RNA, 19 nt, Artificial Sequence
  Description of Artificial Sequence: Synthetic oligonucleotide
  Sense strand starting at position 875 of SEQ ID NO: 1884083
ggucuaaccaguggaaacu

SEQ ID NO: 2238837 - RNA, 19 nt, Artificial Sequence
  Description of Artificial Sequence: Synthetic oligonucleotide
  Antisense strand to SEQ ID NO: 2238836
aguuuccacugguuagacc

SEQ ID NO: 2238838 - RNA, 19 nt, Artificial Sequence
  Description of Artificial Sequence: Synthetic oligonucleotide
  Sense strand starting at position 1011 of SEQ ID NO: 1884083
aguuguagucaacauagau

SEQ ID NO: 2238839 - RNA, 19 nt, Artificial Sequence
  Description of Artificial Sequence: Synthetic oligonucleotide
  Antisense strand to SEQ ID NO: 2238838
aucuauguugacuacaacu

SEQ ID NO: 2238840 - RNA, 19 nt, Artificial Sequence
  Description of Artificial Sequence: Synthetic oligonucleotide
  Sense strand starting at position 1146 of SEQ ID NO: 1884083
guaauacagugacucuaga

SEQ ID NO: 2238841 - RNA, 19 nt, Artificial Sequence
  Description of Artificial Sequence: Synthetic oligonucleotide
  Antisense strand to SEQ ID NO: 2238840
ucuagagucacuguauuac

SEQ ID NO: 2238842 - RNA, 19 nt, Artificial Sequence
  Description of Artificial Sequence: Synthetic oligonucleotide
  Sense strand starting at position 1195 of SEQ ID NO: 1884083
gugugaaauuuccuauugu

SEQ ID NO: 2238843 - RNA, 19 nt, Artificial Sequence
  Description of Artificial Sequence: Synthetic oligonucleotide
  Antisense strand to SEQ ID NO: 2238842
acaauaggaaauuucacac

SEQ ID NO: 2238844 - RNA, 19 nt, Artificial Sequence
  Description of Artificial Sequence: Synthetic oligonucleotide
  Sense strand starting at position 1283 of SEQ ID NO: 1884083
uuauauagguguuugaaca

SEQ ID NO: 2238845 - RNA, 19 nt, Artificial Sequence
  Description of Artificial Sequence: Synthetic oligonucleotide
  Antisense strand to SEQ ID NO: 2238844
uguucaaacaccuauauaa

SEQ ID NO: 2238846 - RNA, 19 nt, Artificial Sequence
  Description of Artificial Sequence: Synthetic oligonucleotide
  Sense strand starting at position 1284 of SEQ ID NO: 1884083
uauauagguguuugaacau

SEQ ID NO: 2238847 - RNA, 19 nt, Artificial Sequence
  Description of Artificial Sequence: Synthetic oligonucleotide
  Antisense strand to SEQ ID NO: 2238846
auguucaaacaccuauaua

SEQ ID NO: 2238848 - RNA, 19 nt, Artificial Sequence
  Description of Artificial Sequence: Synthetic oligonucleotide
  Sense strand starting at position 1444 of SEQ ID NO: 1884083
aggcaaggccaaugauaau

SEQ ID NO: 2238849 - RNA, 19 nt, Artificial Sequence
  Description of Artificial Sequence: Synthetic oligonucleotide
  Antisense strand to SEQ ID NO: 2238848
auuaucauuggccuugccu

SEQ ID NO: 2238850 - RNA, 19 nt, Artificial Sequence
  Description of Artificial Sequence: Synthetic oligonucleotide
  Sense strand starting at position 1539 of SEQ ID NO: 1884083
agaauaauacguggcaaua

SEQ ID NO: 2238851 - RNA, 19 nt, Artificial Sequence
  Description of Artificial Sequence: Synthetic oligonucleotide
  Antisense strand to SEQ ID NO: 2238850
uauugccacguauuauucu

SEQ ID NO: 2238852 - RNA, 19 nt, Artificial Sequence
  Description of Artificial Sequence: Synthetic oligonucleotide
  Sense strand starting at position 1555 of SEQ ID NO: 1884083
auaucuuggcccuggaaug

SEQ ID NO: 2238853 - RNA, 19 nt, Artificial Sequence
  Description of Artificial Sequence: Synthetic oligonucleotide
  Antisense strand to SEQ ID NO: 2238852
cauuccagggccaagauau

SEQ ID NO: 2238854 - RNA, 19 nt, Artificial Sequence
  Description of Artificial Sequence: Synthetic oligonucleotide
  Sense strand starting at position 1556 of SEQ ID NO: 1884083
uaucuuggcccuggaauga

SEQ ID NO: 2238855 - RNA, 19 nt, Artificial Sequence
  Description of Artificial Sequence: Synthetic oligonucleotide
  Antisense strand to SEQ ID NO: 2238854
ucauuccagggccaagaua

SEQ ID NO: 2238856 - RNA, 19 nt, Artificial Sequence
  Description of Artificial Sequence: Synthetic oligonucleotide
  Sense strand starting at position 1605 of SEQ ID NO: 1884083
auuugccugucguuagaaa

SEQ ID NO: 2238857 - RNA, 19 nt, Artificial Sequence
  Description of Artificial Sequence: Synthetic oligonucleotide
  Antisense strand to SEQ ID NO: 2238856
uuucuaacgacaggcaaau

SEQ ID NO: 2238858 - RNA, 19 nt, Artificial Sequence
  Description of Artificial Sequence: Synthetic oligonucleotide
  Sense strand starting at position 1635 of SEQ ID NO: 1884083
ggauuuccaucucaugaug

SEQ ID NO: 2238859 - RNA, 19 nt, Artificial Sequence
  Description of Artificial Sequence: Synthetic oligonucleotide
  Antisense strand to SEQ ID NO: 2238858
caucaugagauggaaaucc

SEQ ID NO: 2238860 - RNA, 19 nt, Artificial Sequence
  Description of Artificial Sequence: Synthetic oligonucleotide
  Sense strand starting at position 1720 of SEQ ID NO: 1884083
aguuaaugagaguggagau

SEQ ID NO: 2238861 - RNA, 19 nt, Artificial Sequence
  Description of Artificial Sequence: Synthetic oligonucleotide
  Antisense strand to SEQ ID NO: 2238860
aucuccacucucauuaacu

SEQ ID NO: 2238862 - RNA, 19 nt, Artificial Sequence
  Description of Artificial Sequence: Synthetic oligonucleotide
  Sense strand starting at position 1730 of SEQ ID NO: 1884083
aguggagaucuccauguau

SEQ ID NO: 2238863 - RNA, 19 nt, Artificial Sequence
  Description of Artificial Sequence: Synthetic oligonucleotide
  Antisense strand to SEQ ID NO: 2238862
auacauggagaucuccacu

SEQ ID NO: 2238864 - RNA, 19 nt, Artificial Sequence
  Description of Artificial Sequence: Synthetic oligonucleotide
  Sense strand starting at position 2269 of SEQ ID NO: 1884083
guauguugcaugcucaugu

SEQ ID NO: 2238865 - RNA, 19 nt, Artificial Sequence
  Description of Artificial Sequence: Synthetic oligonucleotide
  Antisense strand to SEQ ID NO: 2238864
acaugagcaugcaacauac

SEQ ID NO: 2238866 - RNA, 19 nt, Artificial Sequence
  Description of Artificial Sequence: Synthetic oligonucleotide
  Sense strand starting at position 2504 of SEQ ID NO: 1884083
gaacuaguuuagccugaga

SEQ ID NO: 2238867 - RNA, 19 nt, Artificial Sequence
  Description of Artificial Sequence: Synthetic oligonucleotide
  Antisense strand to SEQ ID NO: 2238866
ucucaggcuaaacuaguuc

SEQ ID NO: 2238868 - RNA, 19 nt, Artificial Sequence
  Description of Artificial Sequence: Synthetic oligonucleotide
  Sense strand starting at position 3165 of SEQ ID NO: 1884083
cuaucaguaauguggaaag

SEQ ID NO: 2238869 - RNA, 19 nt, Artificial Sequence
  Description of Artificial Sequence: Synthetic oligonucleotide
  Antisense strand to SEQ ID NO: 2238868
cuuuccacauuacugauag

SEQ ID NO: 2238870 - RNA, 19 nt, Artificial Sequence
  Description of Artificial Sequence: Synthetic oligonucleotide
  Sense strand starting at position 3167 of SEQ ID NO: 1884083
aucaguaauguggaaagca

SEQ ID NO: 2238871 - RNA, 19 nt, Artificial Sequence
  Description of Artificial Sequence: Synthetic oligonucleotide
  Antisense strand to SEQ ID NO: 2238870
ugcuuuccacauuacugau

SEQ ID NO: 2238872 - RNA, 19 nt, Artificial Sequence
  Description of Artificial Sequence: Synthetic oligonucleotide
  Sense strand starting at position 3341 of SEQ ID NO: 1884083
ggcaaauggguucaaguua

SEQ ID NO: 2238873 - RNA, 19 nt, Artificial Sequence
  Description of Artificial Sequence: Synthetic oligonucleotide
  Antisense strand to SEQ ID NO: 2238872
uaacuugaacccauuugcc

SEQ ID NO: 2238874 - RNA, 19 nt, Artificial Sequence
  Description of Artificial Sequence: Synthetic oligonucleotide
  Sense strand starting at position 3557 of SEQ ID NO: 1884083
cuuauaaguucugcagaaa

SEQ ID NO: 2238875 - RNA, 19 nt, Artificial Sequence
  Description of Artificial Sequence: Synthetic oligonucleotide
  Antisense strand to SEQ ID NO: 2238874
uuucugcagaacuuauaag

SEQ ID NO: 2238876 - RNA, 19 nt, Artificial Sequence
  Description of Artificial Sequence: Synthetic oligonucleotide
  Sense strand starting at position 3558 of SEQ ID NO: 1884083
uuauaaguucugcagaaag

SEQ ID NO: 2238877 - RNA, 19 nt, Artificial Sequence
  Description of Artificial Sequence: Synthetic oligonucleotide
  Antisense strand to SEQ ID NO: 2238876
cuuucugcagaacuuauaa

SEQ ID NO: 2238878 - RNA, 19 nt, Artificial Sequence
  Description of Artificial Sequence: Synthetic oligonucleotide
  Sense strand starting at position 3560 of SEQ ID NO: 1884083
auaaguucugcagaaagua

SEQ ID NO: 2238879 - RNA, 19 nt, Artificial Sequence
  Description of Artificial Sequence: Synthetic oligonucleotide
  Antisense strand to SEQ ID NO: 2238878
uacuuucugcagaacuuau

SEQ ID NO: 2238880 - RNA, 19 nt, Artificial Sequence
  Description of Artificial Sequence: Synthetic oligonucleotide
  Sense strand starting at position 3641 of SEQ ID NO: 1884083
ugauuaggugaaugauucu

SEQ ID NO: 2238881 - RNA, 19 nt, Artificial Sequence
  Description of Artificial Sequence: Synthetic oligonucleotide
  Antisense strand to SEQ ID NO: 2238880
agaaucauucaccuaauca

SEQ ID NO: 2238882 - RNA, 19 nt, Artificial Sequence
  Description of Artificial Sequence: Synthetic oligonucleotide
  Sense strand starting at position 3652 of SEQ ID NO: 1884083
augauucugugacuccauu

SEQ ID NO: 2238883 - RNA, 19 nt, Artificial Sequence
  Description of Artificial Sequence: Synthetic oligonucleotide
  Antisense strand to SEQ ID NO: 2238882
aauggagucacagaaucau

SEQ ID NO: 2238884 - RNA, 19 nt, Artificial Sequence
  Description of Artificial Sequence: Synthetic oligonucleotide
  Sense strand starting at position 3704 of SEQ ID NO: 1884083
aacuuauaggguuguauga

SEQ ID NO: 2238885 - RNA, 19 nt, Artificial Sequence
  Description of Artificial Sequence: Synthetic oligonucleotide
  Antisense strand to SEQ ID NO: 2238884
ucauacaacccuauaaguu

SEQ ID NO: 2238886 - RNA, 19 nt, Artificial Sequence
  Description of Artificial Sequence: Synthetic oligonucleotide
  Sense strand starting at position 3740 of SEQ ID NO: 1884083
uuaagaagucaaggaaguu

SEQ ID NO: 2238887 - RNA, 19 nt, Artificial Sequence
  Description of Artificial Sequence: Synthetic oligonucleotide
  Antisense strand to SEQ ID NO: 2238886
aacuuccuugacuucuuaa

SEQ ID NO: 2238888 - RNA, 19 nt, Artificial Sequence
  Description of Artificial Sequence: Synthetic oligonucleotide
  Sense strand starting at position 3770 of SEQ ID NO: 1884083
ugugaucuugauuaugauu

SEQ ID NO: 2238889 - RNA, 19 nt, Artificial Sequence
  Description of Artificial Sequence: Synthetic oligonucleotide
  Antisense strand to SEQ ID NO: 2238888
aaucauaaucaagaucaca

SEQ ID NO: 2238890 - RNA, 19 nt, Artificial Sequence
  Description of Artificial Sequence: Synthetic oligonucleotide
  Sense strand starting at position 3775 of SEQ ID NO: 1884083
ucuugauuaugauuagcaa

SEQ ID NO: 2238891 - RNA, 19 nt, Artificial Sequence
  Description of Artificial Sequence: Synthetic oligonucleotide
  Antisense strand to SEQ ID NO: 2238890
uugcuaaucauaaucaaga

SEQ ID NO: 2238892 - RNA, 19 nt, Artificial Sequence
  Description of Artificial Sequence: Synthetic oligonucleotide
  Sense strand starting at position 3778 of SEQ ID NO: 1884083
ugauuaugauuagcaacuu

SEQ ID NO: 2238893 - RNA, 19 nt, Artificial Sequence
  Description of Artificial Sequence: Synthetic oligonucleotide
  Antisense strand to SEQ ID NO: 2238892
aaguugcuaaucauaauca

SEQ ID NO: 2238894 - RNA, 19 nt, Artificial Sequence
  Description of Artificial Sequence: Synthetic oligonucleotide
  Sense strand starting at position 3805 of SEQ ID NO: 1884083
ccgucaugucugccaguaa

SEQ ID NO: 2238895 - RNA, 19 nt, Artificial Sequence
  Description of Artificial Sequence: Synthetic oligonucleotide
  Antisense strand to SEQ ID NO: 2238894
uuacuggcagacaugacgg

SEQ ID NO: 2238896 - RNA, 19 nt, Artificial Sequence
  Description of Artificial Sequence: Synthetic oligonucleotide
  Sense strand starting at position 3895 of SEQ ID NO: 1884083
uccugaaaggcucagcuau

SEQ ID NO: 2238897 - RNA, 19 nt, Artificial Sequence
  Description of Artificial Sequence: Synthetic oligonucleotide
  Antisense strand to SEQ ID NO: 2238896
auagcugagccuuucagga

SEQ ID NO: 2238898 - RNA, 19 nt, Artificial Sequence
  Description of Artificial Sequence: Synthetic oligonucleotide
  Sense strand starting at position 2028 of SEQ ID NO: 1884084
acugcucucugcuuagcaa

SEQ ID NO: 2238899 - RNA, 19 nt, Artificial Sequence
  Description of Artificial Sequence: Synthetic oligonucleotide
  Antisense strand to SEQ ID NO: 2238898
uugcuaagcagagagcagu

SEQ ID NO: 2238900 - RNA, 19 nt, Artificial Sequence
  Description of Artificial Sequence: Synthetic oligonucleotide
  Sense strand starting at position 2029 of SEQ ID NO: 1884084
cugcucucugcuuagcaau

SEQ ID NO: 2238901 - RNA, 19 nt, Artificial Sequence
  Description of Artificial Sequence: Synthetic oligonucleotide
  Antisense strand to SEQ ID NO: 2238900
auugcuaagcagagagcag

SEQ ID NO: 2238902 - RNA, 19 nt, Artificial Sequence
  Description of Artificial Sequence: Synthetic oligonucleotide
  Sense strand starting at position 2242 of SEQ ID NO: 1884084
uaggccaguccuggaagua

SEQ ID NO: 2238903 - RNA, 19 nt, Artificial Sequence
  Description of Artificial Sequence: Synthetic oligonucleotide
  Antisense strand to SEQ ID NO: 2238902
uacuuccaggacuggccua

SEQ ID NO: 2238904 - RNA, 19 nt, Artificial Sequence
  Description of Artificial Sequence: Synthetic oligonucleotide
  Sense strand starting at position 2464 of SEQ ID NO: 1884084
caggcaucgcaaugugauu

SEQ ID NO: 2238905 - RNA, 19 nt, Artificial Sequence
  Description of Artificial Sequence: Synthetic oligonucleotide
  Antisense strand to SEQ ID NO: 2238904
aaucacauugcgaugccug

SEQ ID NO: 2238906 - RNA, 19 nt, Artificial Sequence
  Description of Artificial Sequence: Synthetic oligonucleotide
  Sense strand starting at position 2507 of SEQ ID NO: 1884084
ccgggauuggagugaguca

SEQ ID NO: 2238907 - RNA, 19 nt, Artificial Sequence
  Description of Artificial Sequence: Synthetic oligonucleotide
  Antisense strand to SEQ ID NO: 2238906
ugacucacuccaaucccgg

SEQ ID NO: 2238908 - RNA, 19 nt, Artificial Sequence
  Description of Artificial Sequence: Synthetic oligonucleotide
  Sense strand starting at position 2514 of SEQ ID NO: 1884084
uggagugagucaggauucu

SEQ ID NO: 2238909 - RNA, 19 nt, Artificial Sequence
  Description of Artificial Sequence: Synthetic oligonucleotide
  Antisense strand to SEQ ID NO: 2238908
agaauccugacucacucca

SEQ ID NO: 2238910 - RNA, 19 nt, Artificial Sequence
  Description of Artificial Sequence: Synthetic oligonucleotide
  Sense strand starting at position 2520 of SEQ ID NO: 1884084
gagucaggauucuggaaag

SEQ ID NO: 2238911 - RNA, 19 nt, Artificial Sequence
  Description of Artificial Sequence: Synthetic oligonucleotide
  Antisense strand to SEQ ID NO: 2238910
cuuuccagaauccugacuc

SEQ ID NO: 2238912 - RNA, 19 nt, Artificial Sequence
  Description of Artificial Sequence: Synthetic oligonucleotide
  Sense strand starting at position 2553 of SEQ ID NO: 1884084
gacuuccagugcugugaga

SEQ ID NO: 2238913 - RNA, 19 nt, Artificial Sequence
  Description of Artificial Sequence: Synthetic oligonucleotide
  Antisense strand to SEQ ID NO: 2238912
ucucacagcacuggaaguc

SEQ ID NO: 2238914 - RNA, 19 nt, Artificial Sequence
  Description of Artificial Sequence: Synthetic oligonucleotide
  Sense strand starting at position 2564 of SEQ ID NO: 1884084
cugugagacuaccuucuuu

SEQ ID NO: 2238915 - RNA, 19 nt, Artificial Sequence
  Description of Artificial Sequence: Synthetic oligonucleotide
  Antisense strand to SEQ ID NO: 2238914
aaagaagguagucucacag

SEQ ID NO: 2238916 - RNA, 19 nt, Artificial Sequence
  Description of Artificial Sequence: Synthetic oligonucleotide
  Sense strand starting at position 2711 of SEQ ID NO: 1884084
cuagauuauuuagaagucu

SEQ ID NO: 2238917 - RNA, 19 nt, Artificial Sequence
  Description of Artificial Sequence: Synthetic oligonucleotide
  Antisense strand to SEQ ID NO: 2238916
agacuucuaaauaaucuag

SEQ ID NO: 2238918 - RNA, 19 nt, Artificial Sequence
  Description of Artificial Sequence: Synthetic oligonucleotide
  Sense strand starting at position 2736 of SEQ ID NO: 1884084
ggauaauaaugagcucagu

SEQ ID NO: 2238919 - RNA, 19 nt, Artificial Sequence
  Description of Artificial Sequence: Synthetic oligonucleotide
  Antisense strand to SEQ ID NO: 2238918
acugagcucauuauuaucc

SEQ ID NO: 2238920 - RNA, 19 nt, Artificial Sequence
  Description of Artificial Sequence: Synthetic oligonucleotide
  Sense strand starting at position 2752 of SEQ ID NO: 1884084
agugaagcccucuaguucu

SEQ ID NO: 2238921 - RNA, 19 nt, Artificial Sequence
  Description of Artificial Sequence: Synthetic oligonucleotide
  Antisense strand to SEQ ID NO: 2238920
agaacuagagggcuucacu

SEQ ID NO: 2238922 - RNA, 19 nt, Artificial Sequence
  Description of Artificial Sequence: Synthetic oligonucleotide
  Sense strand starting at position 2774 of SEQ ID NO: 1884084
ucgaguuucucccuuucuu

SEQ ID NO: 2238923 - RNA, 19 nt, Artificial Sequence
  Description of Artificial Sequence: Synthetic oligonucleotide
  Antisense strand to SEQ ID NO: 2238922
aagaaagggagaaacucga

SEQ ID NO: 2238924 - RNA, 19 nt, Artificial Sequence
  Description of Artificial Sequence: Synthetic oligonucleotide
  Sense strand starting at position 2778 of SEQ ID NO: 1884084
guuucucccuuucuuuaga

SEQ ID NO: 2238925 - RNA, 19 nt, Artificial Sequence
  Description of Artificial Sequence: Synthetic oligonucleotide
  Antisense strand to SEQ ID NO: 2238924
ucuaaagaaagggagaaac

SEQ ID NO: 2238926 - RNA, 19 nt, Artificial Sequence
  Description of Artificial Sequence: Synthetic oligonucleotide
  Sense strand starting at position 2792 of SEQ ID NO: 1884084
uuagaaaugcaguguagag

SEQ ID NO: 2238927 - RNA, 19 nt, Artificial Sequence
  Description of Artificial Sequence: Synthetic oligonucleotide
  Antisense strand to SEQ ID NO: 2238926
cucuacacugcauuucuaa

SEQ ID NO: 2238928 - RNA, 19 nt, Artificial Sequence
  Description of Artificial Sequence: Synthetic oligonucleotide
  Sense strand starting at position 2820 of SEQ ID NO: 1884084
gguggguguggaugaauga

SEQ ID NO: 2238929 - RNA, 19 nt, Artificial Sequence
  Description of Artificial Sequence: Synthetic oligonucleotide
  Antisense strand to SEQ ID NO: 2238928
ucauucauccacacccacc

SEQ ID NO: 2238930 - RNA, 19 nt, Artificial Sequence
  Description of Artificial Sequence: Synthetic oligonucleotide
  Sense strand starting at position 2827 of SEQ ID NO: 1884084
guggaugaaugagagaaga

SEQ ID NO: 2238931 - RNA, 19 nt, Artificial Sequence
  Description of Artificial Sequence: Synthetic oligonucleotide
  Antisense strand to SEQ ID NO: 2238930
ucuucucucauucauccac

SEQ ID NO: 2238932 - RNA, 19 nt, Artificial Sequence
  Description of Artificial Sequence: Synthetic oligonucleotide
  Sense strand starting at position 2846 of SEQ ID NO: 1884084
uggaaauugagcggagagu

SEQ ID NO: 2238933 - RNA, 19 nt, Artificial Sequence
  Description of Artificial Sequence: Synthetic oligonucleotide
  Antisense strand to SEQ ID NO: 2238932
acucuccgcucaauuucca

SEQ ID NO: 2238934 - RNA, 19 nt, Artificial Sequence
  Description of Artificial Sequence: Synthetic oligonucleotide
  Sense strand starting at position 3051 of SEQ ID NO: 1884084
aggguuagcuguccaaacu

SEQ ID NO: 2238935 - RNA, 19 nt, Artificial Sequence
  Description of Artificial Sequence: Synthetic oligonucleotide
  Antisense strand to SEQ ID NO: 2238934
aguuuggacagcuaacccu

SEQ ID NO: 2238936 - RNA, 19 nt, Artificial Sequence
  Description of Artificial Sequence: Synthetic oligonucleotide
  Sense strand starting at position 3052 of SEQ ID NO: 1884084
ggguuagcuguccaaacuc

SEQ ID NO: 2238937 - RNA, 19 nt, Artificial Sequence
  Description of Artificial Sequence: Synthetic oligonucleotide
  Antisense strand to SEQ ID NO: 2238936
gaguuuggacagcuaaccc

SEQ ID NO: 2238938 - RNA, 19 nt, Artificial Sequence
  Description of Artificial Sequence: Synthetic oligonucleotide
  Sense strand starting at position 3216 of SEQ ID NO: 1884084
acgcaauccuuagaagaac

SEQ ID NO: 2238939 - RNA, 19 nt, Artificial Sequence
  Description of Artificial Sequence: Synthetic oligonucleotide
  Antisense strand to SEQ ID NO: 2238938
guucuucuaaggauugcgu

SEQ ID NO: 2238940 - RNA, 19 nt, Artificial Sequence
  Description of Artificial Sequence: Synthetic oligonucleotide
  Sense strand starting at position 3300 of SEQ ID NO: 1884084
gggagcugguccuagggaa

SEQ ID NO: 2238941 - RNA, 19 nt, Artificial Sequence
  Description of Artificial Sequence: Synthetic oligonucleotide
  Antisense strand to SEQ ID NO: 2238940
uucccuaggaccagcuccc

SEQ ID NO: 2238942 - RNA, 19 nt, Artificial Sequence
  Description of Artificial Sequence: Synthetic oligonucleotide
  Sense strand starting at position 3459 of SEQ ID NO: 1884084
gacugaagcugucuaggga

SEQ ID NO: 2238943 - RNA, 19 nt, Artificial Sequence
  Description of Artificial Sequence: Synthetic oligonucleotide
  Antisense strand to SEQ ID NO: 2238942
ucccuagacagcuucaguc

SEQ ID NO: 2238944 - RNA, 19 nt, Artificial Sequence
  Description of Artificial Sequence: Synthetic oligonucleotide
  Sense strand starting at position 3496 of SEQ ID NO: 1884084
uccaguguuccagggcaga

SEQ ID NO: 2238945 - RNA, 19 nt, Artificial Sequence
  Description of Artificial Sequence: Synthetic oligonucleotide
  Antisense strand to SEQ ID NO: 2238944
ucugcccuggaacacugga

SEQ ID NO: 2238946 - RNA, 19 nt, Artificial Sequence
  Description of Artificial Sequence: Synthetic oligonucleotide
  Sense strand starting at position 3619 of SEQ ID NO: 1884084
acuuccuguguccagaaga

SEQ ID NO: 2238947 - RNA, 19 nt, Artificial Sequence
  Description of Artificial Sequence: Synthetic oligonucleotide
  Antisense strand to SEQ ID NO: 2238946
ucuucuggacacaggaagu

SEQ ID NO: 2238948 - RNA, 19 nt, Artificial Sequence
  Description of Artificial Sequence: Synthetic oligonucleotide
  Sense strand starting at position 3652 of SEQ ID NO: 1884084
gagggacagucuggucaga

SEQ ID NO: 2238949 - RNA, 19 nt, Artificial Sequence
  Description of Artificial Sequence: Synthetic oligonucleotide
  Antisense strand to SEQ ID NO: 2238948
ucugaccagacugucccuc

SEQ ID NO: 2238950 - RNA, 19 nt, Artificial Sequence
  Description of Artificial Sequence: Synthetic oligonucleotide
  Sense strand starting at position 3727 of SEQ ID NO: 1884084
ugaugcacgucuguugaau

SEQ ID NO: 2238951 - RNA, 19 nt, Artificial Sequence
  Description of Artificial Sequence: Synthetic oligonucleotide
  Antisense strand to SEQ ID NO: 2238950
auucaacagacgugcauca

SEQ ID NO: 2238952 - RNA, 19 nt, Artificial Sequence
  Description of Artificial Sequence: Synthetic oligonucleotide
  Sense strand starting at position 3729 of SEQ ID NO: 1884084
augcacgucuguugaauuu

SEQ ID NO: 2238953 - RNA, 19 nt, Artificial Sequence
  Description of Artificial Sequence: Synthetic oligonucleotide
  Antisense strand to SEQ ID NO: 2238952
aaauucaacagacgugcau

SEQ ID NO: 2238954 - RNA, 19 nt, Artificial Sequence
  Description of Artificial Sequence: Synthetic oligonucleotide
  Sense strand starting at position 3773 of SEQ ID NO: 1884084
gguggugaguccuagccau

SEQ ID NO: 2238955 - RNA, 19 nt, Artificial Sequence
  Description of Artificial Sequence: Synthetic oligonucleotide
  Antisense strand to SEQ ID NO: 2238954
auggcuaggacucaccacc

SEQ ID NO: 2238956 - RNA, 19 nt, Artificial Sequence
  Description of Artificial Sequence: Synthetic oligonucleotide
  Sense strand starting at position 3779 of SEQ ID NO: 1884084
gaguccuagccauguucuu

SEQ ID NO: 2238957 - RNA, 19 nt, Artificial Sequence
  Description of Artificial Sequence: Synthetic oligonucleotide
  Antisense strand to SEQ ID NO: 2238956
aagaacauggcuaggacuc

SEQ ID NO: 2238958 - RNA, 19 nt, Artificial Sequence
  Description of Artificial Sequence: Synthetic oligonucleotide
  Sense strand starting at position 3931 of SEQ ID NO: 1884084
ggguccuuggcagaacauu

SEQ ID NO: 2238959 - RNA, 19 nt, Artificial Sequence
  Description of Artificial Sequence: Synthetic oligonucleotide
  Antisense strand to SEQ ID NO: 2238958
aauguucugccaaggaccc

SEQ ID NO: 2238960 - RNA, 19 nt, Artificial Sequence
  Description of Artificial Sequence: Synthetic oligonucleotide
  Sense strand starting at position 3966 of SEQ ID NO: 1884084
gcgggaggauguguucauu

SEQ ID NO: 2238961 - RNA, 19 nt, Artificial Sequence
  Description of Artificial Sequence: Synthetic oligonucleotide
  Antisense strand to SEQ ID NO: 2238960
aaugaacacauccucccgc

SEQ ID NO: 2238962 - RNA, 19 nt, Artificial Sequence
  Description of Artificial Sequence: Synthetic oligonucleotide
  Sense strand starting at position 3969 of SEQ ID NO: 1884084
ggaggauguguucauucuc

SEQ ID NO: 2238963 - RNA, 19 nt, Artificial Sequence
  Description of Artificial Sequence: Synthetic oligonucleotide
  Antisense strand to SEQ ID NO: 2238962
gagaaugaacacauccucc

SEQ ID NO: 2238964 - RNA, 19 nt, Artificial Sequence
  Description of Artificial Sequence: Synthetic oligonucleotide
  Sense strand starting at position 87 of SEQ ID NO: 1884085
gagcacaaugcugagaagu

SEQ ID NO: 2238965 - RNA, 19 nt, Artificial Sequence
  Description of Artificial Sequence: Synthetic oligonucleotide
  Antisense strand to SEQ ID NO: 2238964
acuucucagcauugugcuc

SEQ ID NO: 2238966 - RNA, 19 nt, Artificial Sequence
  Description of Artificial Sequence: Synthetic oligonucleotide
  Sense strand starting at position 153 of SEQ ID NO: 1884085
ggcuaauuggaaugaaguu

SEQ ID NO: 2238967 - RNA, 19 nt, Artificial Sequence
  Description of Artificial Sequence: Synthetic oligonucleotide
  Antisense strand to SEQ ID NO: 2238966
aacuucauuccaauuagcc

SEQ ID NO: 2238968 - RNA, 19 nt, Artificial Sequence
  Description of Artificial Sequence: Synthetic oligonucleotide
  Sense strand starting at position 162 of SEQ ID NO: 1884085
gaaugaaguuaggcuuauu

SEQ ID NO: 2238969 - RNA, 19 nt, Artificial Sequence
  Description of Artificial Sequence: Synthetic oligonucleotide
  Antisense strand to SEQ ID NO: 2238968
aauaagccuaacuucauuc

SEQ ID NO: 2238970 - RNA, 19 nt, Artificial Sequence
  Description of Artificial Sequence: Synthetic oligonucleotide
  Sense strand starting at position 165 of SEQ ID NO: 1884085
ugaaguuaggcuuauucuu

SEQ ID NO: 2238971 - RNA, 19 nt, Artificial Sequence
  Description of Artificial Sequence: Synthetic oligonucleotide
  Antisense strand to SEQ ID NO: 2238970
aagaauaagccuaacuuca

SEQ ID NO: 2238972 - RNA, 19 nt, Artificial Sequence
  Description of Artificial Sequence: Synthetic oligonucleotide
  Sense strand starting at position 353 of SEQ ID NO: 1884085
uacagugaggccugacuau

SEQ ID NO: 2238973 - RNA, 19 nt, Artificial Sequence
  Description of Artificial Sequence: Synthetic oligonucleotide
  Antisense strand to SEQ ID NO: 2238972
auagucaggccucacugua

SEQ ID NO: 2238974 - RNA, 19 nt, Artificial Sequence
  Description of Artificial Sequence: Synthetic oligonucleotide
  Sense strand starting at position 597 of SEQ ID NO: 1884085
gagggagccucaucucuga

SEQ ID NO: 2238975 - RNA, 19 nt, Artificial Sequence
  Description of Artificial Sequence: Synthetic oligonucleotide
  Antisense strand to SEQ ID NO: 2238974
ucagagaugaggcucccuc

SEQ ID NO: 2238976 - RNA, 19 nt, Artificial Sequence
  Description of Artificial Sequence: Synthetic oligonucleotide
  Sense strand starting at position 600 of SEQ ID NO: 1884085
ggagccucaucucugagaa

SEQ ID NO: 2238977 - RNA, 19 nt, Artificial Sequence
  Description of Artificial Sequence: Synthetic oligonucleotide
  Antisense strand to SEQ ID NO: 2238976
uucucagagaugaggcucc

SEQ ID NO: 2238978 - RNA, 19 nt, Artificial Sequence
  Description of Artificial Sequence: Synthetic oligonucleotide
  Sense strand starting at position 733 of SEQ ID NO: 1884085
ccagucaaauuuguucgua

SEQ ID NO: 2238979 - RNA, 19 nt, Artificial Sequence
  Description of Artificial Sequence: Synthetic oligonucleotide
  Antisense strand to SEQ ID NO: 2238978
uacgaacaaauuugacugg

SEQ ID NO: 2238980 - RNA, 19 nt, Artificial Sequence
  Description of Artificial Sequence: Synthetic oligonucleotide
  Sense strand starting at position 734 of SEQ ID NO: 1884085
cagucaaauuuguucguaa

SEQ ID NO: 2238981 - RNA, 19 nt, Artificial Sequence
  Description of Artificial Sequence: Synthetic oligonucleotide
  Antisense strand to SEQ ID NO: 2238980
uuacgaacaaauuugacug

SEQ ID NO: 2238982 - RNA, 19 nt, Artificial Sequence
  Description of Artificial Sequence: Synthetic oligonucleotide
  Sense strand starting at position 735 of SEQ ID NO: 1884085
agucaaauuuguucguaau

SEQ ID NO: 2238983 - RNA, 19 nt, Artificial Sequence
  Description of Artificial Sequence: Synthetic oligonucleotide
  Antisense strand to SEQ ID NO: 2238982
auuacgaacaaauuugacu

SEQ ID NO: 2238984 - RNA, 19 nt, Artificial Sequence
  Description of Artificial Sequence: Synthetic oligonucleotide
  Sense strand starting at position 736 of SEQ ID NO: 1884085
gucaaauuuguucguaauc

SEQ ID NO: 2238985 - RNA, 19 nt, Artificial Sequence
  Description of Artificial Sequence: Synthetic oligonucleotide
  Antisense strand to SEQ ID NO: 2238984
gauuacgaacaaauuugac

SEQ ID NO: 2238986 - RNA, 19 nt, Artificial Sequence
  Description of Artificial Sequence: Synthetic oligonucleotide
  Sense strand starting at position 745 of SEQ ID NO: 1884085
guucguaaucaauauagug

SEQ ID NO: 2238987 - RNA, 19 nt, Artificial Sequence
  Description of Artificial Sequence: Synthetic oligonucleotide
  Antisense strand to SEQ ID NO: 2238986
cacuauauugauuacgaac

SEQ ID NO: 2238988 - RNA, 19 nt, Artificial Sequence
  Description of Artificial Sequence: Synthetic oligonucleotide
  Sense strand starting at position 856 of SEQ ID NO: 1884085
augccugguaaaggugaaa

SEQ ID NO: 2238989 - RNA, 19 nt, Artificial Sequence
  Description of Artificial Sequence: Synthetic oligonucleotide
  Antisense strand to SEQ ID NO: 2238988
uuucaccuuuaccaggcau

SEQ ID NO: 2238990 - RNA, 19 nt, Artificial Sequence
  Description of Artificial Sequence: Synthetic oligonucleotide
  Sense strand starting at position 1104 of SEQ ID NO: 1884085
uggauaagguccucuauca

SEQ ID NO: 2238991 - RNA, 19 nt, Artificial Sequence
  Description of Artificial Sequence: Synthetic oligonucleotide
  Antisense strand to SEQ ID NO: 2238990
ugauagaggaccuuaucca

SEQ ID NO: 2238992 - RNA, 19 nt, Artificial Sequence
  Description of Artificial Sequence: Synthetic oligonucleotide
  Sense strand starting at position 1183 of SEQ ID NO: 1884085
gacacaauuucugagugag

SEQ ID NO: 2238993 - RNA, 19 nt, Artificial Sequence
  Description of Artificial Sequence: Synthetic oligonucleotide
  Antisense strand to SEQ ID NO: 2238992
cucacucagaaauuguguc

SEQ ID NO: 2238994 - RNA, 19 nt, Artificial Sequence
  Description of Artificial Sequence: Synthetic oligonucleotide
  Sense strand starting at position 1250 of SEQ ID NO: 1884085
cggaguagccaagagaauu

SEQ ID NO: 2238995 - RNA, 19 nt, Artificial Sequence
  Description of Artificial Sequence: Synthetic oligonucleotide
  Antisense strand to SEQ ID NO: 2238994
aauucucuuggcuacuccg

SEQ ID NO: 2238996 - RNA, 19 nt, Artificial Sequence
  Description of Artificial Sequence: Synthetic oligonucleotide
  Sense strand starting at position 1316 of SEQ ID NO: 1884085
acaccuuacugaguagaag

SEQ ID NO: 2238997 - RNA, 19 nt, Artificial Sequence
  Description of Artificial Sequence: Synthetic oligonucleotide
  Antisense strand to SEQ ID NO: 2238996
cuucuacucaguaaggugu

SEQ ID NO: 2238998 - RNA, 19 nt, Artificial Sequence
  Description of Artificial Sequence: Synthetic oligonucleotide
  Sense strand starting at position 1522 of SEQ ID NO: 1884085
gaagguugucguggagaaa

SEQ ID NO: 2238999 - RNA, 19 nt, Artificial Sequence
  Description of Artificial Sequence: Synthetic oligonucleotide
  Antisense strand to SEQ ID NO: 2238998
uuucuccacgacaaccuuc

SEQ ID NO: 2239000 - RNA, 19 nt, Artificial Sequence
  Description of Artificial Sequence: Synthetic oligonucleotide
  Sense strand starting at position 1555 of SEQ ID NO: 1884085
gaauguuuaguuuagcaca

SEQ ID NO: 2239001 - RNA, 19 nt, Artificial Sequence
  Description of Artificial Sequence: Synthetic oligonucleotide
  Antisense strand to SEQ ID NO: 2239000
ugugcuaaacuaaacauuc

SEQ ID NO: 2239002 - RNA, 19 nt, Artificial Sequence
  Description of Artificial Sequence: Synthetic oligonucleotide
  Sense strand starting at position 2006 of SEQ ID NO: 1884085
agaauccuccgaggguuua

SEQ ID NO: 2239003 - RNA, 19 nt, Artificial Sequence
  Description of Artificial Sequence: Synthetic oligonucleotide
  Antisense strand to SEQ ID NO: 2239002
uaaacccucggaggauucu

SEQ ID NO: 2239004 - RNA, 19 nt, Artificial Sequence
  Description of Artificial Sequence: Synthetic oligonucleotide
  Sense strand starting at position 2024 of SEQ ID NO: 1884085
agaagacuccuuugcccau

SEQ ID NO: 2239005 - RNA, 19 nt, Artificial Sequence
  Description of Artificial Sequence: Synthetic oligonucleotide
  Antisense strand to SEQ ID NO: 2239004
augggcaaaggagucuucu

SEQ ID NO: 2239006 - RNA, 19 nt, Artificial Sequence
  Description of Artificial Sequence: Synthetic oligonucleotide
  Sense strand starting at position 2153 of SEQ ID NO: 1884085
acguguagagcuuaugaag

SEQ ID NO: 2239007 - RNA, 19 nt, Artificial Sequence
  Description of Artificial Sequence: Synthetic oligonucleotide
  Antisense strand to SEQ ID NO: 2239006
cuucauaagcucuacacgu

SEQ ID NO: 2239008 - RNA, 19 nt, Artificial Sequence
  Description of Artificial Sequence: Synthetic oligonucleotide
  Sense strand starting at position 2179 of SEQ ID NO: 1884085
agcagcuucccagacaugu

SEQ ID NO: 2239009 - RNA, 19 nt, Artificial Sequence
  Description of Artificial Sequence: Synthetic oligonucleotide
  Antisense strand to SEQ ID NO: 2239008
acaugucugggaagcugcu

SEQ ID NO: 2239010 - RNA, 19 nt, Artificial Sequence
  Description of Artificial Sequence: Synthetic oligonucleotide
  Sense strand starting at position 2187 of SEQ ID NO: 1884085
cccagacauguagagcuua

SEQ ID NO: 2239011 - RNA, 19 nt, Artificial Sequence
  Description of Artificial Sequence: Synthetic oligonucleotide
  Antisense strand to SEQ ID NO: 2239010
uaagcucuacaugucuggg

SEQ ID NO: 2239012 - RNA, 19 nt, Artificial Sequence
  Description of Artificial Sequence: Synthetic oligonucleotide
  Sense strand starting at position 2475 of SEQ ID NO: 1884085
ucuugcaaagauugaauga

SEQ ID NO: 2239013 - RNA, 19 nt, Artificial Sequence
  Description of Artificial Sequence: Synthetic oligonucleotide
  Antisense strand to SEQ ID NO: 2239012
ucauucaaucuuugcaaga

SEQ ID NO: 2239014 - RNA, 19 nt, Artificial Sequence
  Description of Artificial Sequence: Synthetic oligonucleotide
  Sense strand starting at position 2531 of SEQ ID NO: 1884085
gugaauguccacuaagcag

SEQ ID NO: 2239015 - RNA, 19 nt, Artificial Sequence
  Description of Artificial Sequence: Synthetic oligonucleotide
  Antisense strand to SEQ ID NO: 2239014
cugcuuaguggacauucac

SEQ ID NO: 2239016 - RNA, 19 nt, Artificial Sequence
  Description of Artificial Sequence: Synthetic oligonucleotide
  Sense strand starting at position 3151 of SEQ ID NO: 1884085
guagacucgcaaugagaaa

SEQ ID NO: 2239017 - RNA, 19 nt, Artificial Sequence
  Description of Artificial Sequence: Synthetic oligonucleotide
  Antisense strand to SEQ ID NO: 2239016
uuucucauugcgagucuac

SEQ ID NO: 2239018 - RNA, 19 nt, Artificial Sequence
  Description of Artificial Sequence: Synthetic oligonucleotide
  Sense strand starting at position 3315 of SEQ ID NO: 1884085
uggauacaaccuuggcuaa

SEQ ID NO: 2239019 - RNA, 19 nt, Artificial Sequence
  Description of Artificial Sequence: Synthetic oligonucleotide
  Antisense strand to SEQ ID NO: 2239018
uuagccaagguuguaucca

SEQ ID NO: 2239020 - RNA, 19 nt, Artificial Sequence
  Description of Artificial Sequence: Synthetic oligonucleotide
  Sense strand starting at position 3429 of SEQ ID NO: 1884085
uuaacaagugcucaguaca

SEQ ID NO: 2239021 - RNA, 19 nt, Artificial Sequence
  Description of Artificial Sequence: Synthetic oligonucleotide
  Antisense strand to SEQ ID NO: 2239020
uguacugagcacuuguuaa

SEQ ID NO: 2239022 - RNA, 19 nt, Artificial Sequence
  Description of Artificial Sequence: Synthetic oligonucleotide
  Sense strand starting at position 3432 of SEQ ID NO: 1884085
acaagugcucaguacaaug

SEQ ID NO: 2239023 - RNA, 19 nt, Artificial Sequence
  Description of Artificial Sequence: Synthetic oligonucleotide
  Antisense strand to SEQ ID NO: 2239022
cauuguacugagcacuugu

SEQ ID NO: 2239024 - RNA, 19 nt, Artificial Sequence
  Description of Artificial Sequence: Synthetic oligonucleotide
  Sense strand starting at position 3444 of SEQ ID NO: 1884085
uacaaugagugagcacaua

SEQ ID NO: 2239025 - RNA, 19 nt, Artificial Sequence
  Description of Artificial Sequence: Synthetic oligonucleotide
  Antisense strand to SEQ ID NO: 2239024
uaugugcucacucauugua

SEQ ID NO: 2239026 - RNA, 19 nt, Artificial Sequence
  Description of Artificial Sequence: Synthetic oligonucleotide
  Sense strand starting at position 3508 of SEQ ID NO: 1884085
cguguauacacacaaaugu

SEQ ID NO: 2239027 - RNA, 19 nt, Artificial Sequence
  Description of Artificial Sequence: Synthetic oligonucleotide
  Antisense strand to SEQ ID NO: 2239026
acauuuguguguauacacg

SEQ ID NO: 2239028 - RNA, 19 nt, Artificial Sequence
  Description of Artificial Sequence: Synthetic oligonucleotide
  Sense strand starting at position 3682 of SEQ ID NO: 1884085
uagguauauuuccaggauu

SEQ ID NO: 2239029 - RNA, 19 nt, Artificial Sequence
  Description of Artificial Sequence: Synthetic oligonucleotide
  Antisense strand to SEQ ID NO: 2239028
aauccuggaaauauaccua

SEQ ID NO: 2239030 - RNA, 19 nt, Artificial Sequence
  Description of Artificial Sequence: Synthetic oligonucleotide
  Sense strand starting at position 3806 of SEQ ID NO: 1884085
aaauguaaguugcucagau

SEQ ID NO: 2239031 - RNA, 19 nt, Artificial Sequence
  Description of Artificial Sequence: Synthetic oligonucleotide
  Antisense strand to SEQ ID NO: 2239030
aucugagcaacuuacauuu

SEQ ID NO: 2239032 - RNA, 19 nt, Artificial Sequence
  Description of Artificial Sequence: Synthetic oligonucleotide
  Sense strand starting at position 3808 of SEQ ID NO: 1884085
auguaaguugcucagauua

SEQ ID NO: 2239033 - RNA, 19 nt, Artificial Sequence
  Description of Artificial Sequence: Synthetic oligonucleotide
  Antisense strand to SEQ ID NO: 2239032
uaaucugagcaacuuacau

SEQ ID NO: 2239034 - RNA, 19 nt, Artificial Sequence
  Description of Artificial Sequence: Synthetic oligonucleotide
  Sense strand starting at position 3849 of SEQ ID NO: 1884085
accuauguaucaguuacaa

SEQ ID NO: 2239035 - RNA, 19 nt, Artificial Sequence
  Description of Artificial Sequence: Synthetic oligonucleotide
  Antisense strand to SEQ ID NO: 2239034
uuguaacugauacauaggu

SEQ ID NO: 2239036 - RNA, 19 nt, Artificial Sequence
  Description of Artificial Sequence: Synthetic oligonucleotide
  Sense strand starting at position 3862 of SEQ ID NO: 1884085
uuacaauuguuagccugaa

SEQ ID NO: 2239037 - RNA, 19 nt, Artificial Sequence
  Description of Artificial Sequence: Synthetic oligonucleotide
  Antisense strand to SEQ ID NO: 2239036
uucaggcuaacaauuguaa

SEQ ID NO: 2239038 - RNA, 19 nt, Artificial Sequence
  Description of Artificial Sequence: Synthetic oligonucleotide
  Sense strand starting at position 3882 of SEQ ID NO: 1884085
uuuauagaaggcugacuaa

SEQ ID NO: 2239039 - RNA, 19 nt, Artificial Sequence
  Description of Artificial Sequence: Synthetic oligonucleotide
  Antisense strand to SEQ ID NO: 2239038
uuagucagccuucuauaaa

SEQ ID NO: 2239040 - RNA, 19 nt, Artificial Sequence
  Description of Artificial Sequence: Synthetic oligonucleotide
  Sense strand starting at position 3885 of SEQ ID NO: 1884085
auagaaggcugacuaaagu

SEQ ID NO: 2239041 - RNA, 19 nt, Artificial Sequence
  Description of Artificial Sequence: Synthetic oligonucleotide
  Antisense strand to SEQ ID NO: 2239040
acuuuagucagccuucuau

SEQ ID NO: 2239042 - RNA, 19 nt, Artificial Sequence
  Description of Artificial Sequence: Synthetic oligonucleotide
  Sense strand starting at position 3900 of SEQ ID NO: 1884085
aagugacuacagugucuua

SEQ ID NO: 2239043 - RNA, 19 nt, Artificial Sequence
  Description of Artificial Sequence: Synthetic oligonucleotide
  Antisense strand to SEQ ID NO: 2239042
uaagacacuguagucacuu

SEQ ID NO: 2239044 - RNA, 19 nt, Artificial Sequence
  Description of Artificial Sequence: Synthetic oligonucleotide
  Sense strand starting at position 13 of SEQ ID NO: 1884086
gagguaggucuugauuauc

SEQ ID NO: 2239045 - RNA, 19 nt, Artificial Sequence
  Description of Artificial Sequence: Synthetic oligonucleotide
  Antisense strand to SEQ ID NO: 2239044
gauaaucaagaccuaccuc

SEQ ID NO: 2239046 - RNA, 19 nt, Artificial Sequence
  Description of Artificial Sequence: Synthetic oligonucleotide
  Sense strand starting at position 262 of SEQ ID NO: 1884086
ggguguugaaaugaguaac

SEQ ID NO: 2239047 - RNA, 19 nt, Artificial Sequence
  Description of Artificial Sequence: Synthetic oligonucleotide
  Antisense strand to SEQ ID NO: 2239046
guuacucauuucaacaccc

SEQ ID NO: 2239048 - RNA, 19 nt, Artificial Sequence
  Description of Artificial Sequence: Synthetic oligonucleotide
  Sense strand starting at position 309 of SEQ ID NO: 1884086
aagucaagaggaugcauua

SEQ ID NO: 2239049 - RNA, 19 nt, Artificial Sequence
  Description of Artificial Sequence: Synthetic oligonucleotide
  Antisense strand to SEQ ID NO: 2239048
uaaugcauccucuugacuu

SEQ ID NO: 2239050 - RNA, 19 nt, Artificial Sequence
  Description of Artificial Sequence: Synthetic oligonucleotide
  Sense strand starting at position 321 of SEQ ID NO: 1884086
ugcauuaacugucuacaga

SEQ ID NO: 2239051 - RNA, 19 nt, Artificial Sequence
  Description of Artificial Sequence: Synthetic oligonucleotide
  Antisense strand to SEQ ID NO: 2239050
ucuguagacaguuaaugca

SEQ ID NO: 2239052 - RNA, 19 nt, Artificial Sequence
  Description of Artificial Sequence: Synthetic oligonucleotide
  Sense strand starting at position 322 of SEQ ID NO: 1884086
gcauuaacugucuacagau

SEQ ID NO: 2239053 - RNA, 19 nt, Artificial Sequence
  Description of Artificial Sequence: Synthetic oligonucleotide
  Antisense strand to SEQ ID NO: 2239052
aucuguagacaguuaaugc

SEQ ID NO: 2239054 - RNA, 19 nt, Artificial Sequence
  Description of Artificial Sequence: Synthetic oligonucleotide
  Sense strand starting at position 507 of SEQ ID NO: 1884086
aggaaugauuugccgucuu

SEQ ID NO: 2239055 - RNA, 19 nt, Artificial Sequence
  Description of Artificial Sequence: Synthetic oligonucleotide
  Antisense strand to SEQ ID NO: 2239054
aagacggcaaaucauuccu

SEQ ID NO: 2239056 - RNA, 19 nt, Artificial Sequence
  Description of Artificial Sequence: Synthetic oligonucleotide
  Sense strand starting at position 578 of SEQ ID NO: 1884086
ggcguccgccucagaaaug

SEQ ID NO: 2239057 - RNA, 19 nt, Artificial Sequence
  Description of Artificial Sequence: Synthetic oligonucleotide
  Antisense strand to SEQ ID NO: 2239056
cauuucugaggcggacgcc

SEQ ID NO: 2239058 - RNA, 19 nt, Artificial Sequence
  Description of Artificial Sequence: Synthetic oligonucleotide
  Sense strand starting at position 599 of SEQ ID NO: 1884086
gguguaggugagggaucuu

SEQ ID NO: 2239059 - RNA, 19 nt, Artificial Sequence
  Description of Artificial Sequence: Synthetic oligonucleotide
  Antisense strand to SEQ ID NO: 2239058
aagaucccucaccuacacc

SEQ ID NO: 2239060 - RNA, 19 nt, Artificial Sequence
  Description of Artificial Sequence: Synthetic oligonucleotide
  Sense strand starting at position 610 of SEQ ID NO: 1884086
gggaucuuguugcuuuaac

SEQ ID NO: 2239061 - RNA, 19 nt, Artificial Sequence
  Description of Artificial Sequence: Synthetic oligonucleotide
  Antisense strand to SEQ ID NO: 2239060
guuaaagcaacaagauccc

SEQ ID NO: 2239062 - RNA, 19 nt, Artificial Sequence
  Description of Artificial Sequence: Synthetic oligonucleotide
  Sense strand starting at position 658 of SEQ ID NO: 1884086
agauuuaguucugccuguu

SEQ ID NO: 2239063 - RNA, 19 nt, Artificial Sequence
  Description of Artificial Sequence: Synthetic oligonucleotide
  Antisense strand to SEQ ID NO: 2239062
aacaggcagaacuaaaucu

SEQ ID NO: 2239064 - RNA, 19 nt, Artificial Sequence
  Description of Artificial Sequence: Synthetic oligonucleotide
  Sense strand starting at position 663 of SEQ ID NO: 1884086
uaguucugccuguuaacgu

SEQ ID NO: 2239065 - RNA, 19 nt, Artificial Sequence
  Description of Artificial Sequence: Synthetic oligonucleotide
  Antisense strand to SEQ ID NO: 2239064
acguuaacaggcagaacua

SEQ ID NO: 2239066 - RNA, 19 nt, Artificial Sequence
  Description of Artificial Sequence: Synthetic oligonucleotide
  Sense strand starting at position 716 of SEQ ID NO: 1884086
uacucucuggguuaguuau

SEQ ID NO: 2239067 - RNA, 19 nt, Artificial Sequence
  Description of Artificial Sequence: Synthetic oligonucleotide
  Antisense strand to SEQ ID NO: 2239066
auaacuaacccagagagua

SEQ ID NO: 2239068 - RNA, 19 nt, Artificial Sequence
  Description of Artificial Sequence: Synthetic oligonucleotide
  Sense strand starting at position 962 of SEQ ID NO: 1884086
gcaucucucgcagugaugu

SEQ ID NO: 2239069 - RNA, 19 nt, Artificial Sequence
  Description of Artificial Sequence: Synthetic oligonucleotide
  Antisense strand to SEQ ID NO: 2239068
acaucacugcgagagaugc

SEQ ID NO: 2239070 - RNA, 19 nt, Artificial Sequence
  Description of Artificial Sequence: Synthetic oligonucleotide
  Sense strand starting at position 970 of SEQ ID NO: 1884086
cgcagugaugucaguguaa

SEQ ID NO: 2239071 - RNA, 19 nt, Artificial Sequence
  Description of Artificial Sequence: Synthetic oligonucleotide
  Antisense strand to SEQ ID NO: 2239070
uuacacugacaucacugcg

SEQ ID NO: 2239072 - RNA, 19 nt, Artificial Sequence
  Description of Artificial Sequence: Synthetic oligonucleotide
  Sense strand starting at position 1473 of SEQ ID NO: 1884086
aacucaugugcacacgaau

SEQ ID NO: 2239073 - RNA, 19 nt, Artificial Sequence
  Description of Artificial Sequence: Synthetic oligonucleotide
  Antisense strand to SEQ ID NO: 2239072
auucgugugcacaugaguu

SEQ ID NO: 2239074 - RNA, 19 nt, Artificial Sequence
  Description of Artificial Sequence: Synthetic oligonucleotide
  Sense strand starting at position 1658 of SEQ ID NO: 1884086
uggagugugugauuaccca

SEQ ID NO: 2239075 - RNA, 19 nt, Artificial Sequence
  Description of Artificial Sequence: Synthetic oligonucleotide
  Antisense strand to SEQ ID NO: 2239074
uggguaaucacacacucca

SEQ ID NO: 2239076 - RNA, 19 nt, Artificial Sequence
  Description of Artificial Sequence: Synthetic oligonucleotide
  Sense strand starting at position 1662 of SEQ ID NO: 1884086
gugugugauuacccauuuc

SEQ ID NO: 2239077 - RNA, 19 nt, Artificial Sequence
  Description of Artificial Sequence: Synthetic oligonucleotide
  Antisense strand to SEQ ID NO: 2239076
gaaauggguaaucacacac

SEQ ID NO: 2239078 - RNA, 19 nt, Artificial Sequence
  Description of Artificial Sequence: Synthetic oligonucleotide
  Sense strand starting at position 2044 of SEQ ID NO: 1884086
gcagaauuggguugccaac

SEQ ID NO: 2239079 - RNA, 19 nt, Artificial Sequence
  Description of Artificial Sequence: Synthetic oligonucleotide
  Antisense strand to SEQ ID NO: 2239078
guuggcaacccaauucugc

SEQ ID NO: 2239080 - RNA, 19 nt, Artificial Sequence
  Description of Artificial Sequence: Synthetic oligonucleotide
  Sense strand starting at position 2070 of SEQ ID NO: 1884086
uguugcuagggugaagaua

SEQ ID NO: 2239081 - RNA, 19 nt, Artificial Sequence
  Description of Artificial Sequence: Synthetic oligonucleotide
  Antisense strand to SEQ ID NO: 2239080
uaucuucacccuagcaaca

SEQ ID NO: 2239082 - RNA, 19 nt, Artificial Sequence
  Description of Artificial Sequence: Synthetic oligonucleotide
  Sense strand starting at position 2124 of SEQ ID NO: 1884086
uuaagagaguaugcugaua

SEQ ID NO: 2239083 - RNA, 19 nt, Artificial Sequence
  Description of Artificial Sequence: Synthetic oligonucleotide
  Antisense strand to SEQ ID NO: 2239082
uaucagcauacucucuuaa

SEQ ID NO: 2239084 - RNA, 19 nt, Artificial Sequence
  Description of Artificial Sequence: Synthetic oligonucleotide
  Sense strand starting at position 2166 of SEQ ID NO: 1884086
aucccuagagguugucaua

SEQ ID NO: 2239085 - RNA, 19 nt, Artificial Sequence
  Description of Artificial Sequence: Synthetic oligonucleotide
  Antisense strand to SEQ ID NO: 2239084
uaugacaaccucuagggau

SEQ ID NO: 2239086 - RNA, 19 nt, Artificial Sequence
  Description of Artificial Sequence: Synthetic oligonucleotide
  Sense strand starting at position 2325 of SEQ ID NO: 1884086
uauuguuacgauuagcacu

SEQ ID NO: 2239087 - RNA, 19 nt, Artificial Sequence
  Description of Artificial Sequence: Synthetic oligonucleotide
  Antisense strand to SEQ ID NO: 2239086
agugcuaaucguaacaaua

SEQ ID NO: 2239088 - RNA, 19 nt, Artificial Sequence
  Description of Artificial Sequence: Synthetic oligonucleotide
  Sense strand starting at position 2338 of SEQ ID NO: 1884086
agcacuuugguuuauguca

SEQ ID NO: 2239089 - RNA, 19 nt, Artificial Sequence
  Description of Artificial Sequence: Synthetic oligonucleotide
  Antisense strand to SEQ ID NO: 2239088
ugacauaaaccaaagugcu

SEQ ID NO: 2239090 - RNA, 19 nt, Artificial Sequence
  Description of Artificial Sequence: Synthetic oligonucleotide
  Sense strand starting at position 2346 of SEQ ID NO: 1884086
gguuuaugucaucacagca

SEQ ID NO: 2239091 - RNA, 19 nt, Artificial Sequence
  Description of Artificial Sequence: Synthetic oligonucleotide
  Antisense strand to SEQ ID NO: 2239090
ugcugugaugacauaaacc

SEQ ID NO: 2239092 - RNA, 19 nt, Artificial Sequence
  Description of Artificial Sequence: Synthetic oligonucleotide
  Sense strand starting at position 2435 of SEQ ID NO: 1884086
ugugcauagcuugaguaau

SEQ ID NO: 2239093 - RNA, 19 nt, Artificial Sequence
  Description of Artificial Sequence: Synthetic oligonucleotide
  Antisense strand to SEQ ID NO: 2239092
auuacucaagcuaugcaca

SEQ ID NO: 2239094 - RNA, 19 nt, Artificial Sequence
  Description of Artificial Sequence: Synthetic oligonucleotide
  Sense strand starting at position 2446 of SEQ ID NO: 1884086
ugaguaaucuuuccuguac

SEQ ID NO: 2239095 - RNA, 19 nt, Artificial Sequence
  Description of Artificial Sequence: Synthetic oligonucleotide
  Antisense strand to SEQ ID NO: 2239094
guacaggaaagauuacuca

SEQ ID NO: 2239096 - RNA, 19 nt, Artificial Sequence
  Description of Artificial Sequence: Synthetic oligonucleotide
  Sense strand starting at position 2455 of SEQ ID NO: 1884086
uuuccuguacuugaggaua

SEQ ID NO: 2239097 - RNA, 19 nt, Artificial Sequence
  Description of Artificial Sequence: Synthetic oligonucleotide
  Antisense strand to SEQ ID NO: 2239096
uauccucaaguacaggaaa

SEQ ID NO: 2239098 - RNA, 19 nt, Artificial Sequence
  Description of Artificial Sequence: Synthetic oligonucleotide
  Sense strand starting at position 2548 of SEQ ID NO: 1884086
cucggauuguauccuuaaa

SEQ ID NO: 2239099 - RNA, 19 nt, Artificial Sequence
  Description of Artificial Sequence: Synthetic oligonucleotide
  Antisense strand to SEQ ID NO: 2239098
uuuaaggauacaauccgag

SEQ ID NO: 2239100 - RNA, 19 nt, Artificial Sequence
  Description of Artificial Sequence: Synthetic oligonucleotide
  Sense strand starting at position 2580 of SEQ ID NO: 1884086
uugcauuuagugugccaaa

SEQ ID NO: 2239101 - RNA, 19 nt, Artificial Sequence
  Description of Artificial Sequence: Synthetic oligonucleotide
  Antisense strand to SEQ ID NO: 2239100
uuuggcacacuaaaugcaa

SEQ ID NO: 2239102 - RNA, 19 nt, Artificial Sequence
  Description of Artificial Sequence: Synthetic oligonucleotide
  Sense strand starting at position 2581 of SEQ ID NO: 1884086
ugcauuuagugugccaaau

SEQ ID NO: 2239103 - RNA, 19 nt, Artificial Sequence
  Description of Artificial Sequence: Synthetic oligonucleotide
  Antisense strand to SEQ ID NO: 2239102
auuuggcacacuaaaugca

SEQ ID NO: 2239104 - RNA, 19 nt, Artificial Sequence
  Description of Artificial Sequence: Synthetic oligonucleotide
  Sense strand starting at position 2645 of SEQ ID NO: 1884086
uccaucugaccuuggauua

SEQ ID NO: 2239105 - RNA, 19 nt, Artificial Sequence
  Description of Artificial Sequence: Synthetic oligonucleotide
  Antisense strand to SEQ ID NO: 2239104
uaauccaaggucagaugga

SEQ ID NO: 2239106 - RNA, 19 nt, Artificial Sequence
  Description of Artificial Sequence: Synthetic oligonucleotide
  Sense strand starting at position 2646 of SEQ ID NO: 1884086
ccaucugaccuuggauuaa

SEQ ID NO: 2239107 - RNA, 19 nt, Artificial Sequence
  Description of Artificial Sequence: Synthetic oligonucleotide
  Antisense strand to SEQ ID NO: 2239106
uuaauccaaggucagaugg

SEQ ID NO: 2239108 - RNA, 19 nt, Artificial Sequence
  Description of Artificial Sequence: Synthetic oligonucleotide
  Sense strand starting at position 2656 of SEQ ID NO: 1884086
uuggauuaauggcuuuacu

SEQ ID NO: 2239109 - RNA, 19 nt, Artificial Sequence
  Description of Artificial Sequence: Synthetic oligonucleotide
  Antisense strand to SEQ ID NO: 2239108
aguaaagccauuaauccaa

SEQ ID NO: 2239110 - RNA, 19 nt, Artificial Sequence
  Description of Artificial Sequence: Synthetic oligonucleotide
  Sense strand starting at position 2704 of SEQ ID NO: 1884086
agggaauguuacccaccuu

SEQ ID NO: 2239111 - RNA, 19 nt, Artificial Sequence
  Description of Artificial Sequence: Synthetic oligonucleotide
  Antisense strand to SEQ ID NO: 2239110
aagguggguaacauucccu

SEQ ID NO: 2239112 - RNA, 19 nt, Artificial Sequence
  Description of Artificial Sequence: Synthetic oligonucleotide
  Sense strand starting at position 2723 of SEQ ID NO: 1884086
uuugauucuagguaggagu

SEQ ID NO: 2239113 - RNA, 19 nt, Artificial Sequence
  Description of Artificial Sequence: Synthetic oligonucleotide
  Antisense strand to SEQ ID NO: 2239112
acuccuaccuagaaucaaa

SEQ ID NO: 2239114 - RNA, 19 nt, Artificial Sequence
  Description of Artificial Sequence: Synthetic oligonucleotide
  Sense strand starting at position 2730 of SEQ ID NO: 1884086
cuagguaggaguuggcaaa

SEQ ID NO: 2239115 - RNA, 19 nt, Artificial Sequence
  Description of Artificial Sequence: Synthetic oligonucleotide
  Antisense strand to SEQ ID NO: 2239114
uuugccaacuccuaccuag

SEQ ID NO: 2239116 - RNA, 19 nt, Artificial Sequence
  Description of Artificial Sequence: Synthetic oligonucleotide
  Sense strand starting at position 2820 of SEQ ID NO: 1884086
gccauugugguuuacaaua

SEQ ID NO: 2239117 - RNA, 19 nt, Artificial Sequence
  Description of Artificial Sequence: Synthetic oligonucleotide
  Antisense strand to SEQ ID NO: 2239116
uauuguaaaccacaauggc

SEQ ID NO: 2239118 - RNA, 19 nt, Artificial Sequence
  Description of Artificial Sequence: Synthetic oligonucleotide
  Sense strand starting at position 2970 of SEQ ID NO: 1884086
ucugcugucauggagauga

SEQ ID NO: 2239119 - RNA, 19 nt, Artificial Sequence
  Description of Artificial Sequence: Synthetic oligonucleotide
  Antisense strand to SEQ ID NO: 2239118
ucaucuccaugacagcaga

SEQ ID NO: 2239120 - RNA, 19 nt, Artificial Sequence
  Description of Artificial Sequence: Synthetic oligonucleotide
  Sense strand starting at position 3808 of SEQ ID NO: 1884086
gaguaaguguugcugacag

SEQ ID NO: 2239121 - RNA, 19 nt, Artificial Sequence
  Description of Artificial Sequence: Synthetic oligonucleotide
  Antisense strand to SEQ ID NO: 2239120
cugucagcaacacuuacuc

SEQ ID NO: 2239122 - RNA, 19 nt, Artificial Sequence
  Description of Artificial Sequence: Synthetic oligonucleotide
  Sense strand starting at position 3952 of SEQ ID NO: 1884086
ggaacaaggcuuugauauc

SEQ ID NO: 2239123 - RNA, 19 nt, Artificial Sequence
  Description of Artificial Sequence: Synthetic oligonucleotide
  Antisense strand to SEQ ID NO: 2239122
gauaucaaagccuuguucc

SEQ ID NO: 2239124 - RNA, 19 nt, Artificial Sequence
  Description of Artificial Sequence: Synthetic oligonucleotide
  Sense strand starting at position 2425 of SEQ ID NO: 1884087
caccguucucaaggucaga

SEQ ID NO: 2239125 - RNA, 19 nt, Artificial Sequence
  Description of Artificial Sequence: Synthetic oligonucleotide
  Antisense strand to SEQ ID NO: 2239124
ucugaccuugagaacggug

SEQ ID NO: 2239126 - RNA, 19 nt, Artificial Sequence
  Description of Artificial Sequence: Synthetic oligonucleotide
  Sense strand starting at position 2456 of SEQ ID NO: 1884087
ccagaauuguggccauggu

SEQ ID NO: 2239127 - RNA, 19 nt, Artificial Sequence
  Description of Artificial Sequence: Synthetic oligonucleotide
  Antisense strand to SEQ ID NO: 2239126
accauggccacaauucugg

SEQ ID NO: 2239128 - RNA, 19 nt, Artificial Sequence
  Description of Artificial Sequence: Synthetic oligonucleotide
  Sense strand starting at position 2571 of SEQ ID NO: 1884087
uuucuagucuccgacagag

SEQ ID NO: 2239129 - RNA, 19 nt, Artificial Sequence
  Description of Artificial Sequence: Synthetic oligonucleotide
  Antisense strand to SEQ ID NO: 2239128
cucugucggagacuagaaa

SEQ ID NO: 2239130 - RNA, 19 nt, Artificial Sequence
  Description of Artificial Sequence: Synthetic oligonucleotide
  Sense strand starting at position 2656 of SEQ ID NO: 1884087
gguugccauuucucuaaca

SEQ ID NO: 2239131 - RNA, 19 nt, Artificial Sequence
  Description of Artificial Sequence: Synthetic oligonucleotide
  Antisense strand to SEQ ID NO: 2239130
uguuagagaaauggcaacc

SEQ ID NO: 2239132 - RNA, 19 nt, Artificial Sequence
  Description of Artificial Sequence: Synthetic oligonucleotide
  Sense strand starting at position 2698 of SEQ ID NO: 1884087
gggcuuugguggucauuga

SEQ ID NO: 2239133 - RNA, 19 nt, Artificial Sequence
  Description of Artificial Sequence: Synthetic oligonucleotide
  Antisense strand to SEQ ID NO: 2239132
ucaaugaccaccaaagccc

SEQ ID NO: 2239134 - RNA, 19 nt, Artificial Sequence
  Description of Artificial Sequence: Synthetic oligonucleotide
  Sense strand starting at position 2833 of SEQ ID NO: 1884087
caaggccaccucugugaaa

SEQ ID NO: 2239135 - RNA, 19 nt, Artificial Sequence
  Description of Artificial Sequence: Synthetic oligonucleotide
  Antisense strand to SEQ ID NO: 2239134
uuucacagagguggccuug

SEQ ID NO: 2239136 - RNA, 19 nt, Artificial Sequence
  Description of Artificial Sequence: Synthetic oligonucleotide
  Sense strand starting at position 2881 of SEQ ID NO: 1884087
gcucacuguuugucucaau

SEQ ID NO: 2239137 - RNA, 19 nt, Artificial Sequence
  Description of Artificial Sequence: Synthetic oligonucleotide
  Antisense strand to SEQ ID NO: 2239136
auugagacaaacagugagc

SEQ ID NO: 2239138 - RNA, 19 nt, Artificial Sequence
  Description of Artificial Sequence: Synthetic oligonucleotide
  Sense strand starting at position 2912 of SEQ ID NO: 1884087
cuccuauugccucacguau

SEQ ID NO: 2239139 - RNA, 19 nt, Artificial Sequence
  Description of Artificial Sequence: Synthetic oligonucleotide
  Antisense strand to SEQ ID NO: 2239138
auacgugaggcaauaggag

SEQ ID NO: 2239140 - RNA, 19 nt, Artificial Sequence
  Description of Artificial Sequence: Synthetic oligonucleotide
  Sense strand starting at position 2914 of SEQ ID NO: 1884087
ccuauugccucacguauga

SEQ ID NO: 2239141 - RNA, 19 nt, Artificial Sequence
  Description of Artificial Sequence: Synthetic oligonucleotide
  Antisense strand to SEQ ID NO: 2239140
ucauacgugaggcaauagg

SEQ ID NO: 2239142 - RNA, 19 nt, Artificial Sequence
  Description of Artificial Sequence: Synthetic oligonucleotide
  Sense strand starting at position 2923 of SEQ ID NO: 1884087
ucacguaugagaugaagau

SEQ ID NO: 2239143 - RNA, 19 nt, Artificial Sequence
  Description of Artificial Sequence: Synthetic oligonucleotide
  Antisense strand to SEQ ID NO: 2239142
aucuucaucucauacguga

SEQ ID NO: 2239144 - RNA, 19 nt, Artificial Sequence
  Description of Artificial Sequence: Synthetic oligonucleotide
  Sense strand starting at position 3402 of SEQ ID NO: 1884087
caggcuuccugaugucaug

SEQ ID NO: 2239145 - RNA, 19 nt, Artificial Sequence
  Description of Artificial Sequence: Synthetic oligonucleotide
  Antisense strand to SEQ ID NO: 2239144
caugacaucaggaagccug

SEQ ID NO: 2239146 - RNA, 19 nt, Artificial Sequence
  Description of Artificial Sequence: Synthetic oligonucleotide
  Sense strand starting at position 3414 of SEQ ID NO: 1884087
ugucaugcucaacaguuga

SEQ ID NO: 2239147 - RNA, 19 nt, Artificial Sequence
  Description of Artificial Sequence: Synthetic oligonucleotide
  Antisense strand to SEQ ID NO: 2239146
ucaacuguugagcaugaca

SEQ ID NO: 2239148 - RNA, 19 nt, Artificial Sequence
  Description of Artificial Sequence: Synthetic oligonucleotide
  Sense strand starting at position 3427 of SEQ ID NO: 1884087
aguugacucuugggcugaa

SEQ ID NO: 2239149 - RNA, 19 nt, Artificial Sequence
  Description of Artificial Sequence: Synthetic oligonucleotide
  Antisense strand to SEQ ID NO: 2239148
uucagcccaagagucaacu

SEQ ID NO: 2239150 - RNA, 19 nt, Artificial Sequence
  Description of Artificial Sequence: Synthetic oligonucleotide
  Sense strand starting at position 3428 of SEQ ID NO: 1884087
guugacucuugggcugaaa

SEQ ID NO: 2239151 - RNA, 19 nt, Artificial Sequence
  Description of Artificial Sequence: Synthetic oligonucleotide
  Antisense strand to SEQ ID NO: 2239150
uuucagcccaagagucaac

SEQ ID NO: 2239152 - RNA, 19 nt, Artificial Sequence
  Description of Artificial Sequence: Synthetic oligonucleotide
  Sense strand starting at position 3620 of SEQ ID NO: 1884087
acauguaucugcuccugaa

SEQ ID NO: 2239153 - RNA, 19 nt, Artificial Sequence
  Description of Artificial Sequence: Synthetic oligonucleotide
  Antisense strand to SEQ ID NO: 2239152
uucaggagcagauacaugu

SEQ ID NO: 2239154 - RNA, 19 nt, Artificial Sequence
  Description of Artificial Sequence: Synthetic oligonucleotide
  Sense strand starting at position 3678 of SEQ ID NO: 1884087
cugcuuucugaaugcaaau

SEQ ID NO: 2239155 - RNA, 19 nt, Artificial Sequence
  Description of Artificial Sequence: Synthetic oligonucleotide
  Antisense strand to SEQ ID NO: 2239154
auuugcauucagaaagcag

SEQ ID NO: 2239156 - RNA, 19 nt, Artificial Sequence
  Description of Artificial Sequence: Synthetic oligonucleotide
  Sense strand starting at position 3687 of SEQ ID NO: 1884087
gaaugcaaaugguuguaua

SEQ ID NO: 2239157 - RNA, 19 nt, Artificial Sequence
  Description of Artificial Sequence: Synthetic oligonucleotide
  Antisense strand to SEQ ID NO: 2239156
uauacaaccauuugcauuc

SEQ ID NO: 2239158 - RNA, 19 nt, Artificial Sequence
  Description of Artificial Sequence: Synthetic oligonucleotide
  Sense strand starting at position 3688 of SEQ ID NO: 1884087
aaugcaaaugguuguauau

SEQ ID NO: 2239159 - RNA, 19 nt, Artificial Sequence
  Description of Artificial Sequence: Synthetic oligonucleotide
  Antisense strand to SEQ ID NO: 2239158
auauacaaccauuugcauu

SEQ ID NO: 2239160 - RNA, 19 nt, Artificial Sequence
  Description of Artificial Sequence: Synthetic oligonucleotide
  Sense strand starting at position 3690 of SEQ ID NO: 1884087
ugcaaaugguuguauauag

SEQ ID NO: 2239161 - RNA, 19 nt, Artificial Sequence
  Description of Artificial Sequence: Synthetic oligonucleotide
  Antisense strand to SEQ ID NO: 2239160
cuauauacaaccauuugca

SEQ ID NO: 2239162 - RNA, 19 nt, Artificial Sequence
  Description of Artificial Sequence: Synthetic oligonucleotide
  Sense strand starting at position 3756 of SEQ ID NO: 1884087
guaccagauucgggugcau

SEQ ID NO: 2239163 - RNA, 19 nt, Artificial Sequence
  Description of Artificial Sequence: Synthetic oligonucleotide
  Antisense strand to SEQ ID NO: 2239162
augcacccgaaucugguac

SEQ ID NO: 2239164 - RNA, 19 nt, Artificial Sequence
  Description of Artificial Sequence: Synthetic oligonucleotide
  Sense strand starting at position 3758 of SEQ ID NO: 1884087
accagauucgggugcauuu

SEQ ID NO: 2239165 - RNA, 19 nt, Artificial Sequence
  Description of Artificial Sequence: Synthetic oligonucleotide
  Antisense strand to SEQ ID NO: 2239164
aaaugcacccgaaucuggu

SEQ ID NO: 2239166 - RNA, 19 nt, Artificial Sequence
  Description of Artificial Sequence: Synthetic oligonucleotide
  Sense strand starting at position 3780 of SEQ ID NO: 1884087
gcgcuugcagccuucuauu

SEQ ID NO: 2239167 - RNA, 19 nt, Artificial Sequence
  Description of Artificial Sequence: Synthetic oligonucleotide
  Antisense strand to SEQ ID NO: 2239166
aauagaaggcugcaagcgc

SEQ ID NO: 2239168 - RNA, 19 nt, Artificial Sequence
  Description of Artificial Sequence: Synthetic oligonucleotide
  Sense strand starting at position 3789 of SEQ ID NO: 1884087
gccuucuauuacuuuguca

SEQ ID NO: 2239169 - RNA, 19 nt, Artificial Sequence
  Description of Artificial Sequence: Synthetic oligonucleotide
  Antisense strand to SEQ ID NO: 2239168
ugacaaaguaauagaaggc

SEQ ID NO: 2239170 - RNA, 19 nt, Artificial Sequence
  Description of Artificial Sequence: Synthetic oligonucleotide
  Sense strand starting at position 3791 of SEQ ID NO: 1884087
cuucuauuacuuugucaug

SEQ ID NO: 2239171 - RNA, 19 nt, Artificial Sequence
  Description of Artificial Sequence: Synthetic oligonucleotide
  Antisense strand to SEQ ID NO: 2239170
caugacaaaguaauagaag

SEQ ID NO: 2239172 - RNA, 19 nt, Artificial Sequence
  Description of Artificial Sequence: Synthetic oligonucleotide
  Sense strand starting at position 3793 of SEQ ID NO: 1884087
ucuauuacuuugucaugca

SEQ ID NO: 2239173 - RNA, 19 nt, Artificial Sequence
  Description of Artificial Sequence: Synthetic oligonucleotide
  Antisense strand to SEQ ID NO: 2239172
ugcaugacaaaguaauaga

SEQ ID NO: 2239174 - RNA, 19 nt, Artificial Sequence
  Description of Artificial Sequence: Synthetic oligonucleotide
  Sense strand starting at position 3801 of SEQ ID NO: 1884087
uuugucaugcacuguauga

SEQ ID NO: 2239175 - RNA, 19 nt, Artificial Sequence
  Description of Artificial Sequence: Synthetic oligonucleotide
  Antisense strand to SEQ ID NO: 2239174
ucauacagugcaugacaaa

SEQ ID NO: 2239176 - RNA, 19 nt, Artificial Sequence
  Description of Artificial Sequence: Synthetic oligonucleotide
  Sense strand starting at position 3811 of SEQ ID NO: 1884087
acuguaugaacucgaaugu

SEQ ID NO: 2239177 - RNA, 19 nt, Artificial Sequence
  Description of Artificial Sequence: Synthetic oligonucleotide
  Antisense strand to SEQ ID NO: 2239176
acauucgaguucauacagu

SEQ ID NO: 2239178 - RNA, 19 nt, Artificial Sequence
  Description of Artificial Sequence: Synthetic oligonucleotide
  Sense strand starting at position 3812 of SEQ ID NO: 1884087
cuguaugaacucgaauguu

SEQ ID NO: 2239179 - RNA, 19 nt, Artificial Sequence
  Description of Artificial Sequence: Synthetic oligonucleotide
  Antisense strand to SEQ ID NO: 2239178
aacauucgaguucauacag

SEQ ID NO: 2239180 - RNA, 19 nt, Artificial Sequence
  Description of Artificial Sequence: Synthetic oligonucleotide
  Sense strand starting at position 3820 of SEQ ID NO: 1884087
acucgaauguuuccaagac

SEQ ID NO: 2239181 - RNA, 19 nt, Artificial Sequence
  Description of Artificial Sequence: Synthetic oligonucleotide
  Antisense strand to SEQ ID NO: 2239180
gucuuggaaacauucgagu

SEQ ID NO: 2239182 - RNA, 19 nt, Artificial Sequence
  Description of Artificial Sequence: Synthetic oligonucleotide
  Sense strand starting at position 3821 of SEQ ID NO: 1884087
cucgaauguuuccaagaca

SEQ ID NO: 2239183 - RNA, 19 nt, Artificial Sequence
  Description of Artificial Sequence: Synthetic oligonucleotide
  Antisense strand to SEQ ID NO: 2239182
ugucuuggaaacauucgag

SEQ ID NO: 2239184 - RNA, 19 nt, Artificial Sequence
  Description of Artificial Sequence: Synthetic oligonucleotide
  Sense strand starting at position 3835 of SEQ ID NO: 1884087
agacacuucuuaguaagca

SEQ ID NO: 2239185 - RNA, 19 nt, Artificial Sequence
  Description of Artificial Sequence: Synthetic oligonucleotide
  Antisense strand to SEQ ID NO: 2239184
ugcuuacuaagaagugucu

SEQ ID NO: 2239186 - RNA, 19 nt, Artificial Sequence
  Description of Artificial Sequence: Synthetic oligonucleotide
  Sense strand starting at position 3854 of SEQ ID NO: 1884087
accgccuaguucuccaaua

SEQ ID NO: 2239187 - RNA, 19 nt, Artificial Sequence
  Description of Artificial Sequence: Synthetic oligonucleotide
  Antisense strand to SEQ ID NO: 2239186
uauuggagaacuaggcggu

SEQ ID NO: 2239188 - RNA, 19 nt, Artificial Sequence
  Description of Artificial Sequence: Synthetic oligonucleotide
  Sense strand starting at position 3856 of SEQ ID NO: 1884087
cgccuaguucuccaauacu

SEQ ID NO: 2239189 - RNA, 19 nt, Artificial Sequence
  Description of Artificial Sequence: Synthetic oligonucleotide
  Antisense strand to SEQ ID NO: 2239188
aguauuggagaacuaggcg

SEQ ID NO: 2239190 - RNA, 19 nt, Artificial Sequence
  Description of Artificial Sequence: Synthetic oligonucleotide
  Sense strand starting at position 3908 of SEQ ID NO: 1884087
aggugacacuugcuucuua

SEQ ID NO: 2239191 - RNA, 19 nt, Artificial Sequence
  Description of Artificial Sequence: Synthetic oligonucleotide
  Antisense strand to SEQ ID NO: 2239190
uaagaagcaagugucaccu

SEQ ID NO: 2239192 - RNA, 19 nt, Artificial Sequence
  Description of Artificial Sequence: Synthetic oligonucleotide
  Sense strand starting at position 3909 of SEQ ID NO: 1884087
ggugacacuugcuucuuaa

SEQ ID NO: 2239193 - RNA, 19 nt, Artificial Sequence
  Description of Artificial Sequence: Synthetic oligonucleotide
  Antisense strand to SEQ ID NO: 2239192
uuaagaagcaagugucacc

SEQ ID NO: 2239194 - RNA, 19 nt, Artificial Sequence
  Description of Artificial Sequence: Synthetic oligonucleotide
  Sense strand starting at position 3919 of SEQ ID NO: 1884087
gcuucuuaacugggucuaa

SEQ ID NO: 2239195 - RNA, 19 nt, Artificial Sequence
  Description of Artificial Sequence: Synthetic oligonucleotide
  Antisense strand to SEQ ID NO: 2239194
uuagacccaguuaagaagc

SEQ ID NO: 2239196 - RNA, 19 nt, Artificial Sequence
  Description of Artificial Sequence: Synthetic oligonucleotide
  Sense strand starting at position 3920 of SEQ ID NO: 1884087
cuucuuaacugggucuaau

SEQ ID NO: 2239197 - RNA, 19 nt, Artificial Sequence
  Description of Artificial Sequence: Synthetic oligonucleotide
  Antisense strand to SEQ ID NO: 2239196
auuagacccaguuaagaag

SEQ ID NO: 2239198 - RNA, 19 nt, Artificial Sequence
  Description of Artificial Sequence: Synthetic oligonucleotide
  Sense strand starting at position 3929 of SEQ ID NO: 1884087
ugggucuaaugucaucuua

SEQ ID NO: 2239199 - RNA, 19 nt, Artificial Sequence
  Description of Artificial Sequence: Synthetic oligonucleotide
  Antisense strand to SEQ ID NO: 2239198
uaagaugacauuagaccca

SEQ ID NO: 2239200 - RNA, 19 nt, Artificial Sequence
  Description of Artificial Sequence: Synthetic oligonucleotide
  Sense strand starting at position 3931 of SEQ ID NO: 1884087
ggucuaaugucaucuuaua

SEQ ID NO: 2239201 - RNA, 19 nt, Artificial Sequence
  Description of Artificial Sequence: Synthetic oligonucleotide
  Antisense strand to SEQ ID NO: 2239200
uauaagaugacauuagacc

SEQ ID NO: 2239202 - RNA, 19 nt, Artificial Sequence
  Description of Artificial Sequence: Synthetic oligonucleotide
  Sense strand starting at position 603 of SEQ ID NO: 1884088
cagggaaguaacuguggaa

SEQ ID NO: 2239203 - RNA, 19 nt, Artificial Sequence
  Description of Artificial Sequence: Synthetic oligonucleotide
  Antisense strand to SEQ ID NO: 2239202
uuccacaguuacuucccug

SEQ ID NO: 2239204 - RNA, 19 nt, Artificial Sequence
  Description of Artificial Sequence: Synthetic oligonucleotide
  Sense strand starting at position 651 of SEQ ID NO: 1884088
aggaguucuuaacuuagac

SEQ ID NO: 2239205 - RNA, 19 nt, Artificial Sequence
  Description of Artificial Sequence: Synthetic oligonucleotide
  Antisense strand to SEQ ID NO: 2239204
gucuaaguuaagaacuccu

SEQ ID NO: 2239206 - RNA, 19 nt, Artificial Sequence
  Description of Artificial Sequence: Synthetic oligonucleotide
  Sense strand starting at position 704 of SEQ ID NO: 1884088
cuaggaggucugugcacaa

SEQ ID NO: 2239207 - RNA, 19 nt, Artificial Sequence
  Description of Artificial Sequence: Synthetic oligonucleotide
  Antisense strand to SEQ ID NO: 2239206
uugugcacagaccuccuag

SEQ ID NO: 2239208 - RNA, 19 nt, Artificial Sequence
  Description of Artificial Sequence: Synthetic oligonucleotide
  Sense strand starting at position 781 of SEQ ID NO: 1884088
auuggucauguuuggagga

SEQ ID NO: 2239209 - RNA, 19 nt, Artificial Sequence
  Description of Artificial Sequence: Synthetic oligonucleotide
  Antisense strand to SEQ ID NO: 2239208
uccuccaaacaugaccaau

SEQ ID NO: 2239210 - RNA, 19 nt, Artificial Sequence
  Description of Artificial Sequence: Synthetic oligonucleotide
  Sense strand starting at position 786 of SEQ ID NO: 1884088
ucauguuuggaggacaugu

SEQ ID NO: 2239211 - RNA, 19 nt, Artificial Sequence
  Description of Artificial Sequence: Synthetic oligonucleotide
  Antisense strand to SEQ ID NO: 2239210
acauguccuccaaacauga

SEQ ID NO: 2239212 - RNA, 19 nt, Artificial Sequence
  Description of Artificial Sequence: Synthetic oligonucleotide
  Sense strand starting at position 839 of SEQ ID NO: 1884088
auucuugaccaauguagau

SEQ ID NO: 2239213 - RNA, 19 nt, Artificial Sequence
  Description of Artificial Sequence: Synthetic oligonucleotide
  Antisense strand to SEQ ID NO: 2239212
aucuacauuggucaagaau

SEQ ID NO: 2239214 - RNA, 19 nt, Artificial Sequence
  Description of Artificial Sequence: Synthetic oligonucleotide
  Sense strand starting at position 913 of SEQ ID NO: 1884088
aagcacugguugguauaua

SEQ ID NO: 2239215 - RNA, 19 nt, Artificial Sequence
  Description of Artificial Sequence: Synthetic oligonucleotide
  Antisense strand to SEQ ID NO: 2239214
uauauaccaaccagugcuu

SEQ ID NO: 2239216 - RNA, 19 nt, Artificial Sequence
  Description of Artificial Sequence: Synthetic oligonucleotide
  Sense strand starting at position 940 of SEQ ID NO: 1884088
agauguuguaaacggacau

SEQ ID NO: 2239217 - RNA, 19 nt, Artificial Sequence
  Description of Artificial Sequence: Synthetic oligonucleotide
  Antisense strand to SEQ ID NO: 2239216
auguccguuuacaacaucu

SEQ ID NO: 2239218 - RNA, 19 nt, Artificial Sequence
  Description of Artificial Sequence: Synthetic oligonucleotide
  Sense strand starting at position 941 of SEQ ID NO: 1884088
gauguuguaaacggacaua

SEQ ID NO: 2239219 - RNA, 19 nt, Artificial Sequence
  Description of Artificial Sequence: Synthetic oligonucleotide
  Antisense strand to SEQ ID NO: 2239218
uauguccguuuacaacauc

SEQ ID NO: 2239220 - RNA, 19 nt, Artificial Sequence
  Description of Artificial Sequence: Synthetic oligonucleotide
  Sense strand starting at position 992 of SEQ ID NO: 1884088
gaaacauugucuuugggca

SEQ ID NO: 2239221 - RNA, 19 nt, Artificial Sequence
  Description of Artificial Sequence: Synthetic oligonucleotide
  Antisense strand to SEQ ID NO: 2239220
ugcccaaagacaauguuuc

SEQ ID NO: 2239222 - RNA, 19 nt, Artificial Sequence
  Description of Artificial Sequence: Synthetic oligonucleotide
  Sense strand starting at position 993 of SEQ ID NO: 1884088
aaacauugucuuugggcaa

SEQ ID NO: 2239223 - RNA, 19 nt, Artificial Sequence
  Description of Artificial Sequence: Synthetic oligonucleotide
  Antisense strand to SEQ ID NO: 2239222
uugcccaaagacaauguuu

SEQ ID NO: 2239224 - RNA, 19 nt, Artificial Sequence
  Description of Artificial Sequence: Synthetic oligonucleotide
  Sense strand starting at position 1054 of SEQ ID NO: 1884088
uguguucuggucuagggaa

SEQ ID NO: 2239225 - RNA, 19 nt, Artificial Sequence
  Description of Artificial Sequence: Synthetic oligonucleotide
  Antisense strand to SEQ ID NO: 2239224
uucccuagaccagaacaca

SEQ ID NO: 2239226 - RNA, 19 nt, Artificial Sequence
  Description of Artificial Sequence: Synthetic oligonucleotide
  Sense strand starting at position 1056 of SEQ ID NO: 1884088
uguucuggucuagggaaga

SEQ ID NO: 2239227 - RNA, 19 nt, Artificial Sequence
  Description of Artificial Sequence: Synthetic oligonucleotide
  Antisense strand to SEQ ID NO: 2239226
ucuucccuagaccagaaca

SEQ ID NO: 2239228 - RNA, 19 nt, Artificial Sequence
  Description of Artificial Sequence: Synthetic oligonucleotide
  Sense strand starting at position 1169 of SEQ ID NO: 1884088
uaguguauaugaucagcaa

SEQ ID NO: 2239229 - RNA, 19 nt, Artificial Sequence
  Description of Artificial Sequence: Synthetic oligonucleotide
  Antisense strand to SEQ ID NO: 2239228
uugcugaucauauacacua

SEQ ID NO: 2239230 - RNA, 19 nt, Artificial Sequence
  Description of Artificial Sequence: Synthetic oligonucleotide
  Sense strand starting at position 1170 of SEQ ID NO: 1884088
aguguauaugaucagcaaa

SEQ ID NO: 2239231 - RNA, 19 nt, Artificial Sequence
  Description of Artificial Sequence: Synthetic oligonucleotide
  Antisense strand to SEQ ID NO: 2239230
uuugcugaucauauacacu

SEQ ID NO: 2239232 - RNA, 19 nt, Artificial Sequence
  Description of Artificial Sequence: Synthetic oligonucleotide
  Sense strand starting at position 1172 of SEQ ID NO: 1884088
uguauaugaucagcaaaca

SEQ ID NO: 2239233 - RNA, 19 nt, Artificial Sequence
  Description of Artificial Sequence: Synthetic oligonucleotide
  Antisense strand to SEQ ID NO: 2239232
uguuugcugaucauauaca

SEQ ID NO: 2239234 - RNA, 19 nt, Artificial Sequence
  Description of Artificial Sequence: Synthetic oligonucleotide
  Sense strand starting at position 1298 of SEQ ID NO: 1884088
aggaaagacugucuuccaa

SEQ ID NO: 2239235 - RNA, 19 nt, Artificial Sequence
  Description of Artificial Sequence: Synthetic oligonucleotide
  Antisense strand to SEQ ID NO: 2239234
uuggaagacagucuuuccu

SEQ ID NO: 2239236 - RNA, 19 nt, Artificial Sequence
  Description of Artificial Sequence: Synthetic oligonucleotide
  Sense strand starting at position 1325 of SEQ ID NO: 1884088
uguggauaucgugaacauc

SEQ ID NO: 2239237 - RNA, 19 nt, Artificial Sequence
  Description of Artificial Sequence: Synthetic oligonucleotide
  Antisense strand to SEQ ID NO: 2239236
gauguucacgauauccaca

SEQ ID NO: 2239238 - RNA, 19 nt, Artificial Sequence
  Description of Artificial Sequence: Synthetic oligonucleotide
  Sense strand starting at position 1333 of SEQ ID NO: 1884088
ucgugaacaucaccucuaa

SEQ ID NO: 2239239 - RNA, 19 nt, Artificial Sequence
  Description of Artificial Sequence: Synthetic oligonucleotide
  Antisense strand to SEQ ID NO: 2239238
uuagaggugauguucacga

SEQ ID NO: 2239240 - RNA, 19 nt, Artificial Sequence
  Description of Artificial Sequence: Synthetic oligonucleotide
  Sense strand starting at position 1381 of SEQ ID NO: 1884088
gguugauagaugugagaag

SEQ ID NO: 2239241 - RNA, 19 nt, Artificial Sequence
  Description of Artificial Sequence: Synthetic oligonucleotide
  Antisense strand to SEQ ID NO: 2239240
cuucucacaucuaucaacc

SEQ ID NO: 2239242 - RNA, 19 nt, Artificial Sequence
  Description of Artificial Sequence: Synthetic oligonucleotide
  Sense strand starting at position 1470 of SEQ ID NO: 1884088
gcaguuaaugcggaugaac

SEQ ID NO: 2239243 - RNA, 19 nt, Artificial Sequence
  Description of Artificial Sequence: Synthetic oligonucleotide
  Antisense strand to SEQ ID NO: 2239242
guucauccgcauuaacugc

SEQ ID NO: 2239244 - RNA, 19 nt, Artificial Sequence
  Description of Artificial Sequence: Synthetic oligonucleotide
  Sense strand starting at position 1481 of SEQ ID NO: 1884088
ggaugaacuucuuccauca

SEQ ID NO: 2239245 - RNA, 19 nt, Artificial Sequence
  Description of Artificial Sequence: Synthetic oligonucleotide
  Antisense strand to SEQ ID NO: 2239244
ugauggaagaaguucaucc

SEQ ID NO: 2239246 - RNA, 19 nt, Artificial Sequence
  Description of Artificial Sequence: Synthetic oligonucleotide
  Sense strand starting at position 1509 of SEQ ID NO: 1884088
cauguagcguaaguauuua

SEQ ID NO: 2239247 - RNA, 19 nt, Artificial Sequence
  Description of Artificial Sequence: Synthetic oligonucleotide
  Antisense strand to SEQ ID NO: 2239246
uaaauacuuacgcuacaug

SEQ ID NO: 2239248 - RNA, 19 nt, Artificial Sequence
  Description of Artificial Sequence: Synthetic oligonucleotide
  Sense strand starting at position 1524 of SEQ ID NO: 1884088
uuuagaagugcacauauau

SEQ ID NO: 2239249 - RNA, 19 nt, Artificial Sequence
  Description of Artificial Sequence: Synthetic oligonucleotide
  Antisense strand to SEQ ID NO: 2239248
auauaugugcacuucuaaa

SEQ ID NO: 2239250 - RNA, 19 nt, Artificial Sequence
  Description of Artificial Sequence: Synthetic oligonucleotide
  Sense strand starting at position 1690 of SEQ ID NO: 1884088
ugguucugucuguguauuu

SEQ ID NO: 2239251 - RNA, 19 nt, Artificial Sequence
  Description of Artificial Sequence: Synthetic oligonucleotide
  Antisense strand to SEQ ID NO: 2239250
aaauacacagacagaacca

SEQ ID NO: 2239252 - RNA, 19 nt, Artificial Sequence
  Description of Artificial Sequence: Synthetic oligonucleotide
  Sense strand starting at position 1865 of SEQ ID NO: 1884088
gaaggacugucuucuggga

SEQ ID NO: 2239253 - RNA, 19 nt, Artificial Sequence
  Description of Artificial Sequence: Synthetic oligonucleotide
  Antisense strand to SEQ ID NO: 2239252
ucccagaagacaguccuuc

SEQ ID NO: 2239254 - RNA, 19 nt, Artificial Sequence
  Description of Artificial Sequence: Synthetic oligonucleotide
  Sense strand starting at position 1985 of SEQ ID NO: 1884088
cugguaacuccauaucuag

SEQ ID NO: 2239255 - RNA, 19 nt, Artificial Sequence
  Description of Artificial Sequence: Synthetic oligonucleotide
  Antisense strand to SEQ ID NO: 2239254
cuagauauggaguuaccag

SEQ ID NO: 2239256 - RNA, 19 nt, Artificial Sequence
  Description of Artificial Sequence: Synthetic oligonucleotide
  Sense strand starting at position 2600 of SEQ ID NO: 1884088
ggacucauuaauuggguca

SEQ ID NO: 2239257 - RNA, 19 nt, Artificial Sequence
  Description of Artificial Sequence: Synthetic oligonucleotide
  Antisense strand to SEQ ID NO: 2239256
ugacccaauuaaugagucc

SEQ ID NO: 2239258 - RNA, 19 nt, Artificial Sequence
  Description of Artificial Sequence: Synthetic oligonucleotide
  Sense strand starting at position 2605 of SEQ ID NO: 1884088
cauuaauugggucagcaac

SEQ ID NO: 2239259 - RNA, 19 nt, Artificial Sequence
  Description of Artificial Sequence: Synthetic oligonucleotide
  Antisense strand to SEQ ID NO: 2239258
guugcugacccaauuaaug

SEQ ID NO: 2239260 - RNA, 19 nt, Artificial Sequence
  Description of Artificial Sequence: Synthetic oligonucleotide
  Sense strand starting at position 2682 of SEQ ID NO: 1884088
gaugauaaccauugaugua

SEQ ID NO: 2239261 - RNA, 19 nt, Artificial Sequence
  Description of Artificial Sequence: Synthetic oligonucleotide
  Antisense strand to SEQ ID NO: 2239260
uacaucaaugguuaucauc

SEQ ID NO: 2239262 - RNA, 19 nt, Artificial Sequence
  Description of Artificial Sequence: Synthetic oligonucleotide
  Sense strand starting at position 2782 of SEQ ID NO: 1884088
cuaggacagcucugaucau

SEQ ID NO: 2239263 - RNA, 19 nt, Artificial Sequence
  Description of Artificial Sequence: Synthetic oligonucleotide
  Antisense strand to SEQ ID NO: 2239262
augaucagagcuguccuag

SEQ ID NO: 2239264 - RNA, 19 nt, Artificial Sequence
  Description of Artificial Sequence: Synthetic oligonucleotide
  Sense strand starting at position 2799 of SEQ ID NO: 1884088
auucucuuagaaggauuau

SEQ ID NO: 2239265 - RNA, 19 nt, Artificial Sequence
  Description of Artificial Sequence: Synthetic oligonucleotide
  Antisense strand to SEQ ID NO: 2239264
auaauccuucuaagagaau

SEQ ID NO: 2239266 - RNA, 19 nt, Artificial Sequence
  Description of Artificial Sequence: Synthetic oligonucleotide
  Sense strand starting at position 2970 of SEQ ID NO: 1884088
uccugauugaaauggugua

SEQ ID NO: 2239267 - RNA, 19 nt, Artificial Sequence
  Description of Artificial Sequence: Synthetic oligonucleotide
  Antisense strand to SEQ ID NO: 2239266
uacaccauuucaaucagga

SEQ ID NO: 2239268 - RNA, 19 nt, Artificial Sequence
  Description of Artificial Sequence: Synthetic oligonucleotide
  Sense strand starting at position 2975 of SEQ ID NO: 1884088
auugaaaugguguagugua

SEQ ID NO: 2239269 - RNA, 19 nt, Artificial Sequence
  Description of Artificial Sequence: Synthetic oligonucleotide
  Antisense strand to SEQ ID NO: 2239268
uacacuacaccauuucaau

SEQ ID NO: 2239270 - RNA, 19 nt, Artificial Sequence
  Description of Artificial Sequence: Synthetic oligonucleotide
  Sense strand starting at position 3064 of SEQ ID NO: 1884088
gauacauauugugugaucu

SEQ ID NO: 2239271 - RNA, 19 nt, Artificial Sequence
  Description of Artificial Sequence: Synthetic oligonucleotide
  Antisense strand to SEQ ID NO: 2239270
agaucacacaauauguauc

SEQ ID NO: 2239272 - RNA, 19 nt, Artificial Sequence
  Description of Artificial Sequence: Synthetic oligonucleotide
  Sense strand starting at position 3065 of SEQ ID NO: 1884088
auacauauugugugaucuc

SEQ ID NO: 2239273 - RNA, 19 nt, Artificial Sequence
  Description of Artificial Sequence: Synthetic oligonucleotide
  Antisense strand to SEQ ID NO: 2239272
gagaucacacaauauguau

SEQ ID NO: 2239274 - RNA, 19 nt, Artificial Sequence
  Description of Artificial Sequence: Synthetic oligonucleotide
  Sense strand starting at position 3074 of SEQ ID NO: 1884088
gugugaucucaacaacaua

SEQ ID NO: 2239275 - RNA, 19 nt, Artificial Sequence
  Description of Artificial Sequence: Synthetic oligonucleotide
  Antisense strand to SEQ ID NO: 2239274
uauguuguugagaucacac

SEQ ID NO: 2239276 - RNA, 19 nt, Artificial Sequence
  Description of Artificial Sequence: Synthetic oligonucleotide
  Sense strand starting at position 3104 of SEQ ID NO: 1884088
ucaauuauguguguauaca

SEQ ID NO: 2239277 - RNA, 19 nt, Artificial Sequence
  Description of Artificial Sequence: Synthetic oligonucleotide
  Antisense strand to SEQ ID NO: 2239276
uguauacacacauaauuga

SEQ ID NO: 2239278 - RNA, 19 nt, Artificial Sequence
  Description of Artificial Sequence: Synthetic oligonucleotide
  Sense strand starting at position 3632 of SEQ ID NO: 1884088
agguaauagcuuuauaaac

SEQ ID NO: 2239279 - RNA, 19 nt, Artificial Sequence
  Description of Artificial Sequence: Synthetic oligonucleotide
  Antisense strand to SEQ ID NO: 2239278
guuuauaaagcuauuaccu

SEQ ID NO: 2239280 - RNA, 19 nt, Artificial Sequence
  Description of Artificial Sequence: Synthetic oligonucleotide
  Sense strand starting at position 3663 of SEQ ID NO: 1884088
aguugugagcccuaaguua

SEQ ID NO: 2239281 - RNA, 19 nt, Artificial Sequence
  Description of Artificial Sequence: Synthetic oligonucleotide
  Antisense strand to SEQ ID NO: 2239280
uaacuuagggcucacaacu

SEQ ID NO: 2239282 - RNA, 19 nt, Artificial Sequence
  Description of Artificial Sequence: Synthetic oligonucleotide
  Sense strand starting at position 23 of SEQ ID NO: 1884089
uaauuucgcguuuacugaa

SEQ ID NO: 2239283 - RNA, 19 nt, Artificial Sequence
  Description of Artificial Sequence: Synthetic oligonucleotide
  Antisense strand to SEQ ID NO: 2239282
uucaguaaacgcgaaauua

SEQ ID NO: 2239284 - RNA, 19 nt, Artificial Sequence
  Description of Artificial Sequence: Synthetic oligonucleotide
  Sense strand starting at position 168 of SEQ ID NO: 1884089
ugagaucccuucucaagug

SEQ ID NO: 2239285 - RNA, 19 nt, Artificial Sequence
  Description of Artificial Sequence: Synthetic oligonucleotide
  Antisense strand to SEQ ID NO: 2239284
cacuugagaagggaucuca

SEQ ID NO: 2239286 - RNA, 19 nt, Artificial Sequence
  Description of Artificial Sequence: Synthetic oligonucleotide
  Sense strand starting at position 200 of SEQ ID NO: 1884089
cccugugucguguauuuau

SEQ ID NO: 2239287 - RNA, 19 nt, Artificial Sequence
  Description of Artificial Sequence: Synthetic oligonucleotide
  Antisense strand to SEQ ID NO: 2239286
auaaauacacgacacaggg

SEQ ID NO: 2239288 - RNA, 19 nt, Artificial Sequence
  Description of Artificial Sequence: Synthetic oligonucleotide
  Sense strand starting at position 203 of SEQ ID NO: 1884089
ugugucguguauuuauuau

SEQ ID NO: 2239289 - RNA, 19 nt, Artificial Sequence
  Description of Artificial Sequence: Synthetic oligonucleotide
  Antisense strand to SEQ ID NO: 2239288
auaauaaauacacgacaca

SEQ ID NO: 2239290 - RNA, 19 nt, Artificial Sequence
  Description of Artificial Sequence: Synthetic oligonucleotide
  Sense strand starting at position 280 of SEQ ID NO: 1884089
aguguagaauguuccuaua

SEQ ID NO: 2239291 - RNA, 19 nt, Artificial Sequence
  Description of Artificial Sequence: Synthetic oligonucleotide
  Antisense strand to SEQ ID NO: 2239290
uauaggaacauucuacacu

SEQ ID NO: 2239292 - RNA, 19 nt, Artificial Sequence
  Description of Artificial Sequence: Synthetic oligonucleotide
  Sense strand starting at position 282 of SEQ ID NO: 1884089
uguagaauguuccuauaag

SEQ ID NO: 2239293 - RNA, 19 nt, Artificial Sequence
  Description of Artificial Sequence: Synthetic oligonucleotide
  Antisense strand to SEQ ID NO: 2239292
cuuauaggaacauucuaca

SEQ ID NO: 2239294 - RNA, 19 nt, Artificial Sequence
  Description of Artificial Sequence: Synthetic oligonucleotide
  Sense strand starting at position 440 of SEQ ID NO: 1884089
agaccauugugaguuuaug

SEQ ID NO: 2239295 - RNA, 19 nt, Artificial Sequence
  Description of Artificial Sequence: Synthetic oligonucleotide
  Antisense strand to SEQ ID NO: 2239294
cauaaacucacaauggucu

SEQ ID NO: 2239296 - RNA, 19 nt, Artificial Sequence
  Description of Artificial Sequence: Synthetic oligonucleotide
  Sense strand starting at position 499 of SEQ ID NO: 1884089
uggacacuuuaacuaguau

SEQ ID NO: 2239297 - RNA, 19 nt, Artificial Sequence
  Description of Artificial Sequence: Synthetic oligonucleotide
  Antisense strand to SEQ ID NO: 2239296
auacuaguuaaagugucca

SEQ ID NO: 2239298 - RNA, 19 nt, Artificial Sequence
  Description of Artificial Sequence: Synthetic oligonucleotide
  Sense strand starting at position 584 of SEQ ID NO: 1884089
ugaacuagauugccuagaa

SEQ ID NO: 2239299 - RNA, 19 nt, Artificial Sequence
  Description of Artificial Sequence: Synthetic oligonucleotide
  Antisense strand to SEQ ID NO: 2239298
uucuaggcaaucuaguuca

SEQ ID NO: 2239300 - RNA, 19 nt, Artificial Sequence
  Description of Artificial Sequence: Synthetic oligonucleotide
  Sense strand starting at position 585 of SEQ ID NO: 1884089
gaacuagauugccuagaag

SEQ ID NO: 2239301 - RNA, 19 nt, Artificial Sequence
  Description of Artificial Sequence: Synthetic oligonucleotide
  Antisense strand to SEQ ID NO: 2239300
cuucuaggcaaucuaguuc

SEQ ID NO: 2239302 - RNA, 19 nt, Artificial Sequence
  Description of Artificial Sequence: Synthetic oligonucleotide
  Sense strand starting at position 596 of SEQ ID NO: 1884089
ccuagaagaugcuuuaaug

SEQ ID NO: 2239303 - RNA, 19 nt, Artificial Sequence
  Description of Artificial Sequence: Synthetic oligonucleotide
  Antisense strand to SEQ ID NO: 2239302
cauuaaagcaucuucuagg

SEQ ID NO: 2239304 - RNA, 19 nt, Artificial Sequence
  Description of Artificial Sequence: Synthetic oligonucleotide
  Sense strand starting at position 606 of SEQ ID NO: 1884089
gcuuuaauggucuaaccuu

SEQ ID NO: 2239305 - RNA, 19 nt, Artificial Sequence
  Description of Artificial Sequence: Synthetic oligonucleotide
  Antisense strand to SEQ ID NO: 2239304
aagguuagaccauuaaagc

SEQ ID NO: 2239306 - RNA, 19 nt, Artificial Sequence
  Description of Artificial Sequence: Synthetic oligonucleotide
  Sense strand starting at position 661 of SEQ ID NO: 1884089
uguaaacaucaaugucaga

SEQ ID NO: 2239307 - RNA, 19 nt, Artificial Sequence
  Description of Artificial Sequence: Synthetic oligonucleotide
  Antisense strand to SEQ ID NO: 2239306
ucugacauugauguuuaca

SEQ ID NO: 2239308 - RNA, 19 nt, Artificial Sequence
  Description of Artificial Sequence: Synthetic oligonucleotide
  Sense strand starting at position 952 of SEQ ID NO: 1884089
accagauucuggcugagaa

SEQ ID NO: 2239309 - RNA, 19 nt, Artificial Sequence
  Description of Artificial Sequence: Synthetic oligonucleotide
  Antisense strand to SEQ ID NO: 2239308
uucucagccagaaucuggu

SEQ ID NO: 2239310 - RNA, 19 nt, Artificial Sequence
  Description of Artificial Sequence: Synthetic oligonucleotide
  Sense strand starting at position 953 of SEQ ID NO: 1884089
ccagauucuggcugagaag

SEQ ID NO: 2239311 - RNA, 19 nt, Artificial Sequence
  Description of Artificial Sequence: Synthetic oligonucleotide
  Antisense strand to SEQ ID NO: 2239310
cuucucagccagaaucugg

SEQ ID NO: 2239312 - RNA, 19 nt, Artificial Sequence
  Description of Artificial Sequence: Synthetic oligonucleotide
  Sense strand starting at position 992 of SEQ ID NO: 1884089
acaguauaguuucugaaca

SEQ ID NO: 2239313 - RNA, 19 nt, Artificial Sequence
  Description of Artificial Sequence: Synthetic oligonucleotide
  Antisense strand to SEQ ID NO: 2239312
uguucagaaacuauacugu

SEQ ID NO: 2239314 - RNA, 19 nt, Artificial Sequence
  Description of Artificial Sequence: Synthetic oligonucleotide
  Sense strand starting at position 1026 of SEQ ID NO: 1884089
uuguuaggccaugagguuu

SEQ ID NO: 2239315 - RNA, 19 nt, Artificial Sequence
  Description of Artificial Sequence: Synthetic oligonucleotide
  Antisense strand to SEQ ID NO: 2239314
aaaccucauggccuaacaa

SEQ ID NO: 2239316 - RNA, 19 nt, Artificial Sequence
  Description of Artificial Sequence: Synthetic oligonucleotide
  Sense strand starting at position 1032 of SEQ ID NO: 1884089
ggccaugagguuuauucua

SEQ ID NO: 2239317 - RNA, 19 nt, Artificial Sequence
  Description of Artificial Sequence: Synthetic oligonucleotide
  Antisense strand to SEQ ID NO: 2239316
uagaauaaaccucauggcc

SEQ ID NO: 2239318 - RNA, 19 nt, Artificial Sequence
  Description of Artificial Sequence: Synthetic oligonucleotide
  Sense strand starting at position 1034 of SEQ ID NO: 1884089
ccaugagguuuauucuaac

SEQ ID NO: 2239319 - RNA, 19 nt, Artificial Sequence
  Description of Artificial Sequence: Synthetic oligonucleotide
  Antisense strand to SEQ ID NO: 2239318
guuagaauaaaccucaugg

SEQ ID NO: 2239320 - RNA, 19 nt, Artificial Sequence
  Description of Artificial Sequence: Synthetic oligonucleotide
  Sense strand starting at position 1151 of SEQ ID NO: 1884089
ugcaauugauucucggaua

SEQ ID NO: 2239321 - RNA, 19 nt, Artificial Sequence
  Description of Artificial Sequence: Synthetic oligonucleotide
  Antisense strand to SEQ ID NO: 2239320
uauccgagaaucaauugca

SEQ ID NO: 2239322 - RNA, 19 nt, Artificial Sequence
  Description of Artificial Sequence: Synthetic oligonucleotide
  Sense strand starting at position 1156 of SEQ ID NO: 1884089
uugauucucggauacauua

SEQ ID NO: 2239323 - RNA, 19 nt, Artificial Sequence
  Description of Artificial Sequence: Synthetic oligonucleotide
  Antisense strand to SEQ ID NO: 2239322
uaauguauccgagaaucaa

SEQ ID NO: 2239324 - RNA, 19 nt, Artificial Sequence
  Description of Artificial Sequence: Synthetic oligonucleotide
  Sense strand starting at position 2278 of SEQ ID NO: 1884089
ggcggaagcgcuguccauu

SEQ ID NO: 2239325 - RNA, 19 nt, Artificial Sequence
  Description of Artificial Sequence: Synthetic oligonucleotide
  Antisense strand to SEQ ID NO: 2239324
aauggacagcgcuuccgcc

SEQ ID NO: 2239326 - RNA, 19 nt, Artificial Sequence
  Description of Artificial Sequence: Synthetic oligonucleotide
  Sense strand starting at position 2471 of SEQ ID NO: 1884089
ggaugcccucgugacagaa

SEQ ID NO: 2239327 - RNA, 19 nt, Artificial Sequence
  Description of Artificial Sequence: Synthetic oligonucleotide
  Antisense strand to SEQ ID NO: 2239326
uucugucacgagggcaucc

SEQ ID NO: 2239328 - RNA, 19 nt, Artificial Sequence
  Description of Artificial Sequence: Synthetic oligonucleotide
  Sense strand starting at position 2475 of SEQ ID NO: 1884089
gcccucgugacagaaauca

SEQ ID NO: 2239329 - RNA, 19 nt, Artificial Sequence
  Description of Artificial Sequence: Synthetic oligonucleotide
  Antisense strand to SEQ ID NO: 2239328
ugauuucugucacgagggc

SEQ ID NO: 2239330 - RNA, 19 nt, Artificial Sequence
  Description of Artificial Sequence: Synthetic oligonucleotide
  Sense strand starting at position 2614 of SEQ ID NO: 1884089
cuaaguuguguacaccaga

SEQ ID NO: 2239331 - RNA, 19 nt, Artificial Sequence
  Description of Artificial Sequence: Synthetic oligonucleotide
  Antisense strand to SEQ ID NO: 2239330
ucugguguacacaacuuag

SEQ ID NO: 2239332 - RNA, 19 nt, Artificial Sequence
  Description of Artificial Sequence: Synthetic oligonucleotide
  Sense strand starting at position 2617 of SEQ ID NO: 1884089
aguuguguacaccagacuu

SEQ ID NO: 2239333 - RNA, 19 nt, Artificial Sequence
  Description of Artificial Sequence: Synthetic oligonucleotide
  Antisense strand to SEQ ID NO: 2239332
aagucugguguacacaacu

SEQ ID NO: 2239334 - RNA, 19 nt, Artificial Sequence
  Description of Artificial Sequence: Synthetic oligonucleotide
  Sense strand starting at position 2652 of SEQ ID NO: 1884089
agcccauuguagucauaag

SEQ ID NO: 2239335 - RNA, 19 nt, Artificial Sequence
  Description of Artificial Sequence: Synthetic oligonucleotide
  Antisense strand to SEQ ID NO: 2239334
cuuaugacuacaaugggcu

SEQ ID NO: 2239336 - RNA, 19 nt, Artificial Sequence
  Description of Artificial Sequence: Synthetic oligonucleotide
  Sense strand starting at position 2663 of SEQ ID NO: 1884089
gucauaaguuaacuuugau

SEQ ID NO: 2239337 - RNA, 19 nt, Artificial Sequence
  Description of Artificial Sequence: Synthetic oligonucleotide
  Antisense strand to SEQ ID NO: 2239336
aucaaaguuaacuuaugac

SEQ ID NO: 2239338 - RNA, 19 nt, Artificial Sequence
  Description of Artificial Sequence: Synthetic oligonucleotide
  Sense strand starting at position 2684 of SEQ ID NO: 1884089
augucaucauaauuggaca

SEQ ID NO: 2239339 - RNA, 19 nt, Artificial Sequence
  Description of Artificial Sequence: Synthetic oligonucleotide
  Antisense strand to SEQ ID NO: 2239338
uguccaauuaugaugacau

SEQ ID NO: 2239340 - RNA, 19 nt, Artificial Sequence
  Description of Artificial Sequence: Synthetic oligonucleotide
  Sense strand starting at position 2796 of SEQ ID NO: 1884089
gcagaaagccuacagcauu

SEQ ID NO: 2239341 - RNA, 19 nt, Artificial Sequence
  Description of Artificial Sequence: Synthetic oligonucleotide
  Antisense strand to SEQ ID NO: 2239340
aaugcuguaggcuuucugc

SEQ ID NO: 2239342 - RNA, 19 nt, Artificial Sequence
  Description of Artificial Sequence: Synthetic oligonucleotide
  Sense strand starting at position 2950 of SEQ ID NO: 1884089
ggaacaauuccaggaguuu

SEQ ID NO: 2239343 - RNA, 19 nt, Artificial Sequence
  Description of Artificial Sequence: Synthetic oligonucleotide
  Antisense strand to SEQ ID NO: 2239342
aaacuccuggaauuguucc

SEQ ID NO: 2239344 - RNA, 19 nt, Artificial Sequence
  Description of Artificial Sequence: Synthetic oligonucleotide
  Sense strand starting at position 2966 of SEQ ID NO: 1884089
uuucuuuacugguugauag

SEQ ID NO: 2239345 - RNA, 19 nt, Artificial Sequence
  Description of Artificial Sequence: Synthetic oligonucleotide
  Antisense strand to SEQ ID NO: 2239344
cuaucaaccaguaaagaaa

SEQ ID NO: 2239346 - RNA, 19 nt, Artificial Sequence
  Description of Artificial Sequence: Synthetic oligonucleotide
  Sense strand starting at position 2973 of SEQ ID NO: 1884089
acugguugauagucauuau

SEQ ID NO: 2239347 - RNA, 19 nt, Artificial Sequence
  Description of Artificial Sequence: Synthetic oligonucleotide
  Antisense strand to SEQ ID NO: 2239346
auaaugacuaucaaccagu

SEQ ID NO: 2239348 - RNA, 19 nt, Artificial Sequence
  Description of Artificial Sequence: Synthetic oligonucleotide
  Sense strand starting at position 2976 of SEQ ID NO: 1884089
gguugauagucauuaucuc

SEQ ID NO: 2239349 - RNA, 19 nt, Artificial Sequence
  Description of Artificial Sequence: Synthetic oligonucleotide
  Antisense strand to SEQ ID NO: 2239348
gagauaaugacuaucaacc

SEQ ID NO: 2239350 - RNA, 19 nt, Artificial Sequence
  Description of Artificial Sequence: Synthetic oligonucleotide
  Sense strand starting at position 3036 of SEQ ID NO: 1884089
aucaauuguccugaugcuu

SEQ ID NO: 2239351 - RNA, 19 nt, Artificial Sequence
  Description of Artificial Sequence: Synthetic oligonucleotide
  Antisense strand to SEQ ID NO: 2239350
aagcaucaggacaauugau

SEQ ID NO: 2239352 - RNA, 19 nt, Artificial Sequence
  Description of Artificial Sequence: Synthetic oligonucleotide
  Sense strand starting at position 3056 of SEQ ID NO: 1884089
augcuuucugacugaauca

SEQ ID NO: 2239353 - RNA, 19 nt, Artificial Sequence
  Description of Artificial Sequence: Synthetic oligonucleotide
  Antisense strand to SEQ ID NO: 2239352
ugauucagucagaaagcau

SEQ ID NO: 2239354 - RNA, 19 nt, Artificial Sequence
  Description of Artificial Sequence: Synthetic oligonucleotide
  Sense strand starting at position 3551 of SEQ ID NO: 1884089
gagagaauuugucaguaau

SEQ ID NO: 2239355 - RNA, 19 nt, Artificial Sequence
  Description of Artificial Sequence: Synthetic oligonucleotide
  Antisense strand to SEQ ID NO: 2239354
auuacugacaaauucucuc

SEQ ID NO: 2239356 - RNA, 19 nt, Artificial Sequence
  Description of Artificial Sequence: Synthetic oligonucleotide
  Sense strand starting at position 3706 of SEQ ID NO: 1884089
gauugaguauagguuuguu

SEQ ID NO: 2239357 - RNA, 19 nt, Artificial Sequence
  Description of Artificial Sequence: Synthetic oligonucleotide
  Antisense strand to SEQ ID NO: 2239356
aacaaaccuauacucaauc

SEQ ID NO: 2239358 - RNA, 19 nt, Artificial Sequence
  Description of Artificial Sequence: Synthetic oligonucleotide
  Sense strand starting at position 3718 of SEQ ID NO: 1884089
guuuguuguauggaauuga

SEQ ID NO: 2239359 - RNA, 19 nt, Artificial Sequence
  Description of Artificial Sequence: Synthetic oligonucleotide
  Antisense strand to SEQ ID NO: 2239358
ucaauuccauacaacaaac

SEQ ID NO: 2239360 - RNA, 19 nt, Artificial Sequence
  Description of Artificial Sequence: Synthetic oligonucleotide
  Sense strand starting at position 3793 of SEQ ID NO: 1884089
agaggugaaacuggcaaau

SEQ ID NO: 2239361 - RNA, 19 nt, Artificial Sequence
  Description of Artificial Sequence: Synthetic oligonucleotide
  Antisense strand to SEQ ID NO: 2239360
auuugccaguuucaccucu

SEQ ID NO: 2239362 - RNA, 19 nt, Artificial Sequence
  Description of Artificial Sequence: Synthetic oligonucleotide
  Sense strand starting at position 60 of SEQ ID NO: 1884090
guguuaggcuccuauauag

SEQ ID NO: 2239363 - RNA, 19 nt, Artificial Sequence
  Description of Artificial Sequence: Synthetic oligonucleotide
  Antisense strand to SEQ ID NO: 2239362
cuauauaggagccuaacac

SEQ ID NO: 2239364 - RNA, 19 nt, Artificial Sequence
  Description of Artificial Sequence: Synthetic oligonucleotide
  Sense strand starting at position 67 of SEQ ID NO: 1884090
gcuccuauauaguuauaag

SEQ ID NO: 2239365 - RNA, 19 nt, Artificial Sequence
  Description of Artificial Sequence: Synthetic oligonucleotide
  Antisense strand to SEQ ID NO: 2239364
cuuauaacuauauaggagc

SEQ ID NO: 2239366 - RNA, 19 nt, Artificial Sequence
  Description of Artificial Sequence: Synthetic oligonucleotide
  Sense strand starting at position 214 of SEQ ID NO: 1884090
ccuuaaaucgguugccuca

SEQ ID NO: 2239367 - RNA, 19 nt, Artificial Sequence
  Description of Artificial Sequence: Synthetic oligonucleotide
  Antisense strand to SEQ ID NO: 2239366
ugaggcaaccgauuuaagg

SEQ ID NO: 2239368 - RNA, 19 nt, Artificial Sequence
  Description of Artificial Sequence: Synthetic oligonucleotide
  Sense strand starting at position 221 of SEQ ID NO: 1884090
ucgguugccucauucugaa

SEQ ID NO: 2239369 - RNA, 19 nt, Artificial Sequence
  Description of Artificial Sequence: Synthetic oligonucleotide
  Antisense strand to SEQ ID NO: 2239368
uucagaaugaggcaaccga

SEQ ID NO: 2239370 - RNA, 19 nt, Artificial Sequence
  Description of Artificial Sequence: Synthetic oligonucleotide
  Sense strand starting at position 669 of SEQ ID NO: 1884090
auuuguuaguucuuucuga

SEQ ID NO: 2239371 - RNA, 19 nt, Artificial Sequence
  Description of Artificial Sequence: Synthetic oligonucleotide
  Antisense strand to SEQ ID NO: 2239370
ucagaaagaacuaacaaau

SEQ ID NO: 2239372 - RNA, 19 nt, Artificial Sequence
  Description of Artificial Sequence: Synthetic oligonucleotide
  Sense strand starting at position 670 of SEQ ID NO: 1884090
uuuguuaguucuuucugag

SEQ ID NO: 2239373 - RNA, 19 nt, Artificial Sequence
  Description of Artificial Sequence: Synthetic oligonucleotide
  Antisense strand to SEQ ID NO: 2239372
cucagaaagaacuaacaaa

SEQ ID NO: 2239374 - RNA, 19 nt, Artificial Sequence
  Description of Artificial Sequence: Synthetic oligonucleotide
  Sense strand starting at position 673 of SEQ ID NO: 1884090
guuaguucuuucugagcuc

SEQ ID NO: 2239375 - RNA, 19 nt, Artificial Sequence
  Description of Artificial Sequence: Synthetic oligonucleotide
  Antisense strand to SEQ ID NO: 2239374
gagcucagaaagaacuaac

SEQ ID NO: 2239376 - RNA, 19 nt, Artificial Sequence
  Description of Artificial Sequence: Synthetic oligonucleotide
  Sense strand starting at position 3068 of SEQ ID NO: 1884090
gugaacuggugaguuucua

SEQ ID NO: 2239377 - RNA, 19 nt, Artificial Sequence
  Description of Artificial Sequence: Synthetic oligonucleotide
  Antisense strand to SEQ ID NO: 2239376
uagaaacucaccaguucac

SEQ ID NO: 2239378 - RNA, 19 nt, Artificial Sequence
  Description of Artificial Sequence: Synthetic oligonucleotide
  Sense strand starting at position 3072 of SEQ ID NO: 1884090
acuggugaguuucuacuca

SEQ ID NO: 2239379 - RNA, 19 nt, Artificial Sequence
  Description of Artificial Sequence: Synthetic oligonucleotide
  Antisense strand to SEQ ID NO: 2239378
ugaguagaaacucaccagu

SEQ ID NO: 2239380 - RNA, 19 nt, Artificial Sequence
  Description of Artificial Sequence: Synthetic oligonucleotide
  Sense strand starting at position 3076 of SEQ ID NO: 1884090
gugaguuucuacucagaau

SEQ ID NO: 2239381 - RNA, 19 nt, Artificial Sequence
  Description of Artificial Sequence: Synthetic oligonucleotide
  Antisense strand to SEQ ID NO: 2239380
auucugaguagaaacucac

SEQ ID NO: 2239382 - RNA, 19 nt, Artificial Sequence
  Description of Artificial Sequence: Synthetic oligonucleotide
  Sense strand starting at position 3152 of SEQ ID NO: 1884090
cgagaagaauuauaaauca

SEQ ID NO: 2239383 - RNA, 19 nt, Artificial Sequence
  Description of Artificial Sequence: Synthetic oligonucleotide
  Antisense strand to SEQ ID NO: 2239382
ugauuuauaauucuucucg

SEQ ID NO: 2239384 - RNA, 19 nt, Artificial Sequence
  Description of Artificial Sequence: Synthetic oligonucleotide
  Sense strand starting at position 3754 of SEQ ID NO: 1884090
ugaugacauaguuggucau

SEQ ID NO: 2239385 - RNA, 19 nt, Artificial Sequence
  Description of Artificial Sequence: Synthetic oligonucleotide
  Antisense strand to SEQ ID NO: 2239384
augaccaacuaugucauca

SEQ ID NO: 2239386 - RNA, 19 nt, Artificial Sequence
  Description of Artificial Sequence: Synthetic oligonucleotide
  Sense strand starting at position 3756 of SEQ ID NO: 1884090
augacauaguuggucauca

SEQ ID NO: 2239387 - RNA, 19 nt, Artificial Sequence
  Description of Artificial Sequence: Synthetic oligonucleotide
  Antisense strand to SEQ ID NO: 2239386
ugaugaccaacuaugucau

SEQ ID NO: 2239388 - RNA, 19 nt, Artificial Sequence
  Description of Artificial Sequence: Synthetic oligonucleotide
  Sense strand starting at position 3799 of SEQ ID NO: 1884090
gugagaugucauuacauau

SEQ ID NO: 2239389 - RNA, 19 nt, Artificial Sequence
  Description of Artificial Sequence: Synthetic oligonucleotide
  Antisense strand to SEQ ID NO: 2239388
auauguaaugacaucucac

SEQ ID NO: 2239390 - RNA, 19 nt, Artificial Sequence
  Description of Artificial Sequence: Synthetic oligonucleotide
  Sense strand starting at position 3806 of SEQ ID NO: 1884090
gucauuacauauccaagag

SEQ ID NO: 2239391 - RNA, 19 nt, Artificial Sequence
  Description of Artificial Sequence: Synthetic oligonucleotide
  Antisense strand to SEQ ID NO: 2239390
cucuuggauauguaaugac

SEQ ID NO: 2239392 - RNA, 19 nt, Artificial Sequence
  Description of Artificial Sequence: Synthetic oligonucleotide
  Sense strand starting at position 46 of SEQ ID NO: 1884091
acgugaaaugguuacgaac

SEQ ID NO: 2239393 - RNA, 19 nt, Artificial Sequence
  Description of Artificial Sequence: Synthetic oligonucleotide
  Antisense strand to SEQ ID NO: 2239392
guucguaaccauuucacgu

SEQ ID NO: 2239394 - RNA, 19 nt, Artificial Sequence
  Description of Artificial Sequence: Synthetic oligonucleotide
  Sense strand starting at position 131 of SEQ ID NO: 1884091
gucugaaauguacaguaaa

SEQ ID NO: 2239395 - RNA, 19 nt, Artificial Sequence
  Description of Artificial Sequence: Synthetic oligonucleotide
  Antisense strand to SEQ ID NO: 2239394
uuuacuguacauuucagac

SEQ ID NO: 2239396 - RNA, 19 nt, Artificial Sequence
  Description of Artificial Sequence: Synthetic oligonucleotide
  Sense strand starting at position 149 of SEQ ID NO: 1884091
aguagaaauaacgguaaug

SEQ ID NO: 2239397 - RNA, 19 nt, Artificial Sequence
  Description of Artificial Sequence: Synthetic oligonucleotide
  Antisense strand to SEQ ID NO: 2239396
cauuaccguuauuucuacu

SEQ ID NO: 2239398 - RNA, 19 nt, Artificial Sequence
  Description of Artificial Sequence: Synthetic oligonucleotide
  Sense strand starting at position 151 of SEQ ID NO: 1884091
uagaaauaacgguaauguu

SEQ ID NO: 2239399 - RNA, 19 nt, Artificial Sequence
  Description of Artificial Sequence: Synthetic oligonucleotide
  Antisense strand to SEQ ID NO: 2239398
aacauuaccguuauuucua

SEQ ID NO: 2239400 - RNA, 19 nt, Artificial Sequence
  Description of Artificial Sequence: Synthetic oligonucleotide
  Sense strand starting at position 194 of SEQ ID NO: 1884091
auuugagaaugucagaaag

SEQ ID NO: 2239401 - RNA, 19 nt, Artificial Sequence
  Description of Artificial Sequence: Synthetic oligonucleotide
  Antisense strand to SEQ ID NO: 2239400
cuuucugacauucucaaau

SEQ ID NO: 2239402 - RNA, 19 nt, Artificial Sequence
  Description of Artificial Sequence: Synthetic oligonucleotide
  Sense strand starting at position 242 of SEQ ID NO: 1884091
gaggguuaggcuggaggaa

SEQ ID NO: 2239403 - RNA, 19 nt, Artificial Sequence
  Description of Artificial Sequence: Synthetic oligonucleotide
  Antisense strand to SEQ ID NO: 2239402
uuccuccagccuaacccuc

SEQ ID NO: 2239404 - RNA, 19 nt, Artificial Sequence
  Description of Artificial Sequence: Synthetic oligonucleotide
  Sense strand starting at position 329 of SEQ ID NO: 1884091
cccaguggagugugaagau

SEQ ID NO: 2239405 - RNA, 19 nt, Artificial Sequence
  Description of Artificial Sequence: Synthetic oligonucleotide
  Antisense strand to SEQ ID NO: 2239404
aucuucacacuccacuggg

SEQ ID NO: 2239406 - RNA, 19 nt, Artificial Sequence
  Description of Artificial Sequence: Synthetic oligonucleotide
  Sense strand starting at position 338 of SEQ ID NO: 1884091
gugugaagauaauuagaua

SEQ ID NO: 2239407 - RNA, 19 nt, Artificial Sequence
  Description of Artificial Sequence: Synthetic oligonucleotide
  Antisense strand to SEQ ID NO: 2239406
uaucuaauuaucuucacac

SEQ ID NO: 2239408 - RNA, 19 nt, Artificial Sequence
  Description of Artificial Sequence: Synthetic oligonucleotide
  Sense strand starting at position 389 of SEQ ID NO: 1884091
cugaguuccuaaguuuaaa

SEQ ID NO: 2239409 - RNA, 19 nt, Artificial Sequence
  Description of Artificial Sequence: Synthetic oligonucleotide
  Antisense strand to SEQ ID NO: 2239408
uuuaaacuuaggaacucag

SEQ ID NO: 2239410 - RNA, 19 nt, Artificial Sequence
  Description of Artificial Sequence: Synthetic oligonucleotide
  Sense strand starting at position 435 of SEQ ID NO: 1884091
aaauuucugccuugcggua

SEQ ID NO: 2239411 - RNA, 19 nt, Artificial Sequence
  Description of Artificial Sequence: Synthetic oligonucleotide
  Antisense strand to SEQ ID NO: 2239410
uaccgcaaggcagaaauuu

SEQ ID NO: 2239412 - RNA, 19 nt, Artificial Sequence
  Description of Artificial Sequence: Synthetic oligonucleotide
  Sense strand starting at position 522 of SEQ ID NO: 1884091
accugcaucguacaaauaa

SEQ ID NO: 2239413 - RNA, 19 nt, Artificial Sequence
  Description of Artificial Sequence: Synthetic oligonucleotide
  Antisense strand to SEQ ID NO: 2239412
uuauuuguacgaugcaggu

SEQ ID NO: 2239414 - RNA, 19 nt, Artificial Sequence
  Description of Artificial Sequence: Synthetic oligonucleotide
  Sense strand starting at position 981 of SEQ ID NO: 1884091
ucgcucuuugccgaaauuu

SEQ ID NO: 2239415 - RNA, 19 nt, Artificial Sequence
  Description of Artificial Sequence: Synthetic oligonucleotide
  Antisense strand to SEQ ID NO: 2239414
aaauuucggcaaagagcga

SEQ ID NO: 2239416 - RNA, 19 nt, Artificial Sequence
  Description of Artificial Sequence: Synthetic oligonucleotide
  Sense strand starting at position 2339 of SEQ ID NO: 1884091
gagguauuccucuggagua

SEQ ID NO: 2239417 - RNA, 19 nt, Artificial Sequence
  Description of Artificial Sequence: Synthetic oligonucleotide
  Antisense strand to SEQ ID NO: 2239416
uacuccagaggaauaccuc

SEQ ID NO: 2239418 - RNA, 19 nt, Artificial Sequence
  Description of Artificial Sequence: Synthetic oligonucleotide
  Sense strand starting at position 2341 of SEQ ID NO: 1884091
gguauuccucuggaguaaa

SEQ ID NO: 2239419 - RNA, 19 nt, Artificial Sequence
  Description of Artificial Sequence: Synthetic oligonucleotide
  Antisense strand to SEQ ID NO: 2239418
uuuacuccagaggaauacc

SEQ ID NO: 2239420 - RNA, 19 nt, Artificial Sequence
  Description of Artificial Sequence: Synthetic oligonucleotide
  Sense strand starting at position 2362 of SEQ ID NO: 1884091
gugagccaugugugaauuu

SEQ ID NO: 2239421 - RNA, 19 nt, Artificial Sequence
  Description of Artificial Sequence: Synthetic oligonucleotide
  Antisense strand to SEQ ID NO: 2239420
aaauucacacauggcucac

SEQ ID NO: 2239422 - RNA, 19 nt, Artificial Sequence
  Description of Artificial Sequence: Synthetic oligonucleotide
  Sense strand starting at position 2485 of SEQ ID NO: 1884091
uguaaucaauaagcaugaa

SEQ ID NO: 2239423 - RNA, 19 nt, Artificial Sequence
  Description of Artificial Sequence: Synthetic oligonucleotide
  Antisense strand to SEQ ID NO: 2239422
uucaugcuuauugauuaca

SEQ ID NO: 2239424 - RNA, 19 nt, Artificial Sequence
  Description of Artificial Sequence: Synthetic oligonucleotide
  Sense strand starting at position 2582 of SEQ ID NO: 1884091
ugaguuuccaggcacuaag

SEQ ID NO: 2239425 - RNA, 19 nt, Artificial Sequence
  Description of Artificial Sequence: Synthetic oligonucleotide
  Antisense strand to SEQ ID NO: 2239424
cuuagugccuggaaacuca

SEQ ID NO: 2239426 - RNA, 19 nt, Artificial Sequence
  Description of Artificial Sequence: Synthetic oligonucleotide
  Sense strand starting at position 2913 of SEQ ID NO: 1884091
agacuugaccuccaauguu

SEQ ID NO: 2239427 - RNA, 19 nt, Artificial Sequence
  Description of Artificial Sequence: Synthetic oligonucleotide
  Antisense strand to SEQ ID NO: 2239426
aacauuggaggucaagucu

SEQ ID NO: 2239428 - RNA, 19 nt, Artificial Sequence
  Description of Artificial Sequence: Synthetic oligonucleotide
  Sense strand starting at position 2955 of SEQ ID NO: 1884091
uggcaaacguaauuugcua

SEQ ID NO: 2239429 - RNA, 19 nt, Artificial Sequence
  Description of Artificial Sequence: Synthetic oligonucleotide
  Antisense strand to SEQ ID NO: 2239428
uagcaaauuacguuugcca

SEQ ID NO: 2239430 - RNA, 19 nt, Artificial Sequence
  Description of Artificial Sequence: Synthetic oligonucleotide
  Sense strand starting at position 2976 of SEQ ID NO: 1884091
uggccauggcccuaauaau

SEQ ID NO: 2239431 - RNA, 19 nt, Artificial Sequence
  Description of Artificial Sequence: Synthetic oligonucleotide
  Antisense strand to SEQ ID NO: 2239430
auuauuagggccauggcca

SEQ ID NO: 2239432 - RNA, 19 nt, Artificial Sequence
  Description of Artificial Sequence: Synthetic oligonucleotide
  Sense strand starting at position 3137 of SEQ ID NO: 1884091
aaucgauaccuaugagaug

SEQ ID NO: 2239433 - RNA, 19 nt, Artificial Sequence
  Description of Artificial Sequence: Synthetic oligonucleotide
  Antisense strand to SEQ ID NO: 2239432
caucucauagguaucgauu

SEQ ID NO: 2239434 - RNA, 19 nt, Artificial Sequence
  Description of Artificial Sequence: Synthetic oligonucleotide
  Sense strand starting at position 3146 of SEQ ID NO: 1884091
cuaugagaugcucacuguu

SEQ ID NO: 2239435 - RNA, 19 nt, Artificial Sequence
  Description of Artificial Sequence: Synthetic oligonucleotide
  Antisense strand to SEQ ID NO: 2239434
aacagugagcaucucauag

SEQ ID NO: 2239436 - RNA, 19 nt, Artificial Sequence
  Description of Artificial Sequence: Synthetic oligonucleotide
  Sense strand starting at position 3224 of SEQ ID NO: 1884091
uggauuaguuaguuauuga

SEQ ID NO: 2239437 - RNA, 19 nt, Artificial Sequence
  Description of Artificial Sequence: Synthetic oligonucleotide
  Antisense strand to SEQ ID NO: 2239436
ucaauaacuaacuaaucca

SEQ ID NO: 2239438 - RNA, 19 nt, Artificial Sequence
  Description of Artificial Sequence: Synthetic oligonucleotide
  Sense strand starting at position 3225 of SEQ ID NO: 1884091
ggauuaguuaguuauugau

SEQ ID NO: 2239439 - RNA, 19 nt, Artificial Sequence
  Description of Artificial Sequence: Synthetic oligonucleotide
  Antisense strand to SEQ ID NO: 2239438
aucaauaacuaacuaaucc

SEQ ID NO: 2239440 - RNA, 19 nt, Artificial Sequence
  Description of Artificial Sequence: Synthetic oligonucleotide
  Sense strand starting at position 3266 of SEQ ID NO: 1884091
aguagcucaugauugacau

SEQ ID NO: 2239441 - RNA, 19 nt, Artificial Sequence
  Description of Artificial Sequence: Synthetic oligonucleotide
  Antisense strand to SEQ ID NO: 2239440
augucaaucaugagcuacu

SEQ ID NO: 2239442 - RNA, 19 nt, Artificial Sequence
  Description of Artificial Sequence: Synthetic oligonucleotide
  Sense strand starting at position 3276 of SEQ ID NO: 1884091
gauugacaugcucagccau

SEQ ID NO: 2239443 - RNA, 19 nt, Artificial Sequence
  Description of Artificial Sequence: Synthetic oligonucleotide
  Antisense strand to SEQ ID NO: 2239442
auggcugagcaugucaauc

SEQ ID NO: 2239444 - RNA, 19 nt, Artificial Sequence
  Description of Artificial Sequence: Synthetic oligonucleotide
  Sense strand starting at position 3278 of SEQ ID NO: 1884091
uugacaugcucagccauuu

SEQ ID NO: 2239445 - RNA, 19 nt, Artificial Sequence
  Description of Artificial Sequence: Synthetic oligonucleotide
  Antisense strand to SEQ ID NO: 2239444
aaauggcugagcaugucaa

SEQ ID NO: 2239446 - RNA, 19 nt, Artificial Sequence
  Description of Artificial Sequence: Synthetic oligonucleotide
  Sense strand starting at position 3290 of SEQ ID NO: 1884091
gccauuuaggcuuggcuca

SEQ ID NO: 2239447 - RNA, 19 nt, Artificial Sequence
  Description of Artificial Sequence: Synthetic oligonucleotide
  Antisense strand to SEQ ID NO: 2239446
ugagccaagccuaaauggc

SEQ ID NO: 2239448 - RNA, 19 nt, Artificial Sequence
  Description of Artificial Sequence: Synthetic oligonucleotide
  Sense strand starting at position 3314 of SEQ ID NO: 1884091
ccauucuucuggucugaga

SEQ ID NO: 2239449 - RNA, 19 nt, Artificial Sequence
  Description of Artificial Sequence: Synthetic oligonucleotide
  Antisense strand to SEQ ID NO: 2239448
ucucagaccagaagaaugg

SEQ ID NO: 2239450 - RNA, 19 nt, Artificial Sequence
  Description of Artificial Sequence: Synthetic oligonucleotide
  Sense strand starting at position 3316 of SEQ ID NO: 1884091
auucuucuggucugagaug

SEQ ID NO: 2239451 - RNA, 19 nt, Artificial Sequence
  Description of Artificial Sequence: Synthetic oligonucleotide
  Antisense strand to SEQ ID NO: 2239450
caucucagaccagaagaau

SEQ ID NO: 2239452 - RNA, 19 nt, Artificial Sequence
  Description of Artificial Sequence: Synthetic oligonucleotide
  Sense strand starting at position 3339 of SEQ ID NO: 1884091
ccaucaggcauguauggua

SEQ ID NO: 2239453 - RNA, 19 nt, Artificial Sequence
  Description of Artificial Sequence: Synthetic oligonucleotide
  Antisense strand to SEQ ID NO: 2239452
uaccauacaugccugaugg

SEQ ID NO: 2239454 - RNA, 19 nt, Artificial Sequence
  Description of Artificial Sequence: Synthetic oligonucleotide
  Sense strand starting at position 3652 of SEQ ID NO: 1884091
ccuugcuaugggcauaaau

SEQ ID NO: 2239455 - RNA, 19 nt, Artificial Sequence
  Description of Artificial Sequence: Synthetic oligonucleotide
  Antisense strand to SEQ ID NO: 2239454
auuuaugcccauagcaagg

SEQ ID NO: 2239456 - RNA, 19 nt, Artificial Sequence
  Description of Artificial Sequence: Synthetic oligonucleotide
  Sense strand starting at position 3654 of SEQ ID NO: 1884091
uugcuaugggcauaaauac

SEQ ID NO: 2239457 - RNA, 19 nt, Artificial Sequence
  Description of Artificial Sequence: Synthetic oligonucleotide
  Antisense strand to SEQ ID NO: 2239456
guauuuaugcccauagcaa

SEQ ID NO: 2239458 - RNA, 19 nt, Artificial Sequence
  Description of Artificial Sequence: Synthetic oligonucleotide
  Sense strand starting at position 3679 of SEQ ID NO: 1884091
gaugaagaauugcugccau

SEQ ID NO: 2239459 - RNA, 19 nt, Artificial Sequence
  Description of Artificial Sequence: Synthetic oligonucleotide
  Antisense strand to SEQ ID NO: 2239458
auggcagcaauucuucauc

SEQ ID NO: 2239460 - RNA, 19 nt, Artificial Sequence
  Description of Artificial Sequence: Synthetic oligonucleotide
  Sense strand starting at position 3729 of SEQ ID NO: 1884091
gcauauuagguuuauagaa

SEQ ID NO: 2239461 - RNA, 19 nt, Artificial Sequence
  Description of Artificial Sequence: Synthetic oligonucleotide
  Antisense strand to SEQ ID NO: 2239460
uucuauaaaccuaauaugc

SEQ ID NO: 2239462 - RNA, 19 nt, Artificial Sequence
  Description of Artificial Sequence: Synthetic oligonucleotide
  Sense strand starting at position 3872 of SEQ ID NO: 1884091
uuuccucgaccuuggaaau

SEQ ID NO: 2239463 - RNA, 19 nt, Artificial Sequence
  Description of Artificial Sequence: Synthetic oligonucleotide
  Antisense strand to SEQ ID NO: 2239462
auuuccaaggucgaggaaa

SEQ ID NO: 2239464 - RNA, 19 nt, Artificial Sequence
  Description of Artificial Sequence: Synthetic oligonucleotide
  Sense strand starting at position 3873 of SEQ ID NO: 1884091
uuccucgaccuuggaaaua

SEQ ID NO: 2239465 - RNA, 19 nt, Artificial Sequence
  Description of Artificial Sequence: Synthetic oligonucleotide
  Antisense strand to SEQ ID NO: 2239464
uauuuccaaggucgaggaa

SEQ ID NO: 2239466 - RNA, 19 nt, Artificial Sequence
  Description of Artificial Sequence: Synthetic oligonucleotide
  Sense strand starting at position 3899 of SEQ ID NO: 1884091
gugacacuuccguaauaga

SEQ ID NO: 2239467 - RNA, 19 nt, Artificial Sequence
  Description of Artificial Sequence: Synthetic oligonucleotide
  Antisense strand to SEQ ID NO: 2239466
ucuauuacggaagugucac

SEQ ID NO: 2239468 - RNA, 19 nt, Artificial Sequence
  Description of Artificial Sequence: Synthetic oligonucleotide
  Sense strand starting at position 3951 of SEQ ID NO: 1884091
acuguuuaccacugggaau

SEQ ID NO: 2239469 - RNA, 19 nt, Artificial Sequence
  Description of Artificial Sequence: Synthetic oligonucleotide
  Antisense strand to SEQ ID NO: 2239468
auucccagugguaaacagu

SEQ ID NO: 2239470 - RNA, 19 nt, Artificial Sequence
  Description of Artificial Sequence: Synthetic oligonucleotide
  Sense strand starting at position 3953 of SEQ ID NO: 1884091
uguuuaccacugggaauaa

SEQ ID NO: 2239471 - RNA, 19 nt, Artificial Sequence
  Description of Artificial Sequence: Synthetic oligonucleotide
  Antisense strand to SEQ ID NO: 2239470
uuauucccagugguaaaca

SEQ ID NO: 2239472 - RNA, 19 nt, Artificial Sequence
  Description of Artificial Sequence: Synthetic oligonucleotide
  Sense strand starting at position 3168 of SEQ ID NO: 1884092
gugcaugguugaugggaau

SEQ ID NO: 2239473 - RNA, 19 nt, Artificial Sequence
  Description of Artificial Sequence: Synthetic oligonucleotide
  Antisense strand to SEQ ID NO: 2239472
auucccaucaaccaugcac

SEQ ID NO: 2239474 - RNA, 19 nt, Artificial Sequence
  Description of Artificial Sequence: Synthetic oligonucleotide
  Sense strand starting at position 3405 of SEQ ID NO: 1884092
aggugugaauaaguuuaaa

SEQ ID NO: 2239475 - RNA, 19 nt, Artificial Sequence
  Description of Artificial Sequence: Synthetic oligonucleotide
  Antisense strand to SEQ ID NO: 2239474
uuuaaacuuauucacaccu

SEQ ID NO: 2239476 - RNA, 19 nt, Artificial Sequence
  Description of Artificial Sequence: Synthetic oligonucleotide
  Sense strand starting at position 3574 of SEQ ID NO: 1884092
uguagaacauuacugaagu

SEQ ID NO: 2239477 - RNA, 19 nt, Artificial Sequence
  Description of Artificial Sequence: Synthetic oligonucleotide
  Antisense strand to SEQ ID NO: 2239476
acuucaguaauguucuaca

SEQ ID NO: 2239478 - RNA, 19 nt, Artificial Sequence
  Description of Artificial Sequence: Synthetic oligonucleotide
  Sense strand starting at position 3612 of SEQ ID NO: 1884092
aggaaagauuagugguuau

SEQ ID NO: 2239479 - RNA, 19 nt, Artificial Sequence
  Description of Artificial Sequence: Synthetic oligonucleotide
  Antisense strand to SEQ ID NO: 2239478
auaaccacuaaucuuuccu

SEQ ID NO: 2239480 - RNA, 19 nt, Artificial Sequence
  Description of Artificial Sequence: Synthetic oligonucleotide
  Sense strand starting at position 3622 of SEQ ID NO: 1884092
agugguuaucaaggguuaa

SEQ ID NO: 2239481 - RNA, 19 nt, Artificial Sequence
  Description of Artificial Sequence: Synthetic oligonucleotide
  Antisense strand to SEQ ID NO: 2239480
uuaacccuugauaaccacu

SEQ ID NO: 2239482 - RNA, 19 nt, Artificial Sequence
  Description of Artificial Sequence: Synthetic oligonucleotide
  Sense strand starting at position 3623 of SEQ ID NO: 1884092
gugguuaucaaggguuaaa

SEQ ID NO: 2239483 - RNA, 19 nt, Artificial Sequence
  Description of Artificial Sequence: Synthetic oligonucleotide
  Antisense strand to SEQ ID NO: 2239482
uuuaacccuugauaaccac

SEQ ID NO: 2239484 - RNA, 19 nt, Artificial Sequence
  Description of Artificial Sequence: Synthetic oligonucleotide
  Sense strand starting at position 3635 of SEQ ID NO: 1884092
gguuaaagaugaggugaaa

SEQ ID NO: 2239485 - RNA, 19 nt, Artificial Sequence
  Description of Artificial Sequence: Synthetic oligonucleotide
  Antisense strand to SEQ ID NO: 2239484
uuucaccucaucuuuaacc

SEQ ID NO: 2239486 - RNA, 19 nt, Artificial Sequence
  Description of Artificial Sequence: Synthetic oligonucleotide
  Sense strand starting at position 3665 of SEQ ID NO: 1884092
agauguggcuaggaaagaa

SEQ ID NO: 2239487 - RNA, 19 nt, Artificial Sequence
  Description of Artificial Sequence: Synthetic oligonucleotide
  Antisense strand to SEQ ID NO: 2239486
uucuuuccuagccacaucu

SEQ ID NO: 2239488 - RNA, 19 nt, Artificial Sequence
  Description of Artificial Sequence: Synthetic oligonucleotide
  Sense strand starting at position 3690 of SEQ ID NO: 1884092
gagggauuccgugguaaug

SEQ ID NO: 2239489 - RNA, 19 nt, Artificial Sequence
  Description of Artificial Sequence: Synthetic oligonucleotide
  Antisense strand to SEQ ID NO: 2239488
cauuaccacggaaucccuc

SEQ ID NO: 2239490 - RNA, 19 nt, Artificial Sequence
  Description of Artificial Sequence: Synthetic oligonucleotide
  Sense strand starting at position 3692 of SEQ ID NO: 1884092
gggauuccgugguaaugga

SEQ ID NO: 2239491 - RNA, 19 nt, Artificial Sequence
  Description of Artificial Sequence: Synthetic oligonucleotide
  Antisense strand to SEQ ID NO: 2239490
uccauuaccacggaauccc

SEQ ID NO: 2239492 - RNA, 19 nt, Artificial Sequence
  Description of Artificial Sequence: Synthetic oligonucleotide
  Sense strand starting at position 3696 of SEQ ID NO: 1884092
uuccgugguaauggaaaua

SEQ ID NO: 2239493 - RNA, 19 nt, Artificial Sequence
  Description of Artificial Sequence: Synthetic oligonucleotide
  Antisense strand to SEQ ID NO: 2239492
uauuuccauuaccacggaa

SEQ ID NO: 2239494 - RNA, 19 nt, Artificial Sequence
  Description of Artificial Sequence: Synthetic oligonucleotide
  Sense strand starting at position 3708 of SEQ ID NO: 1884092
ggaaauauucuguauguug

SEQ ID NO: 2239495 - RNA, 19 nt, Artificial Sequence
  Description of Artificial Sequence: Synthetic oligonucleotide
  Antisense strand to SEQ ID NO: 2239494
caacauacagaauauuucc

SEQ ID NO: 2239496 - RNA, 19 nt, Artificial Sequence
  Description of Artificial Sequence: Synthetic oligonucleotide
  Sense strand starting at position 3716 of SEQ ID NO: 1884092
ucuguauguugacuauauc

SEQ ID NO: 2239497 - RNA, 19 nt, Artificial Sequence
  Description of Artificial Sequence: Synthetic oligonucleotide
  Antisense strand to SEQ ID NO: 2239496
gauauagucaacauacaga

SEQ ID NO: 2239498 - RNA, 19 nt, Artificial Sequence
  Description of Artificial Sequence: Synthetic oligonucleotide
  Sense strand starting at position 3717 of SEQ ID NO: 1884092
cuguauguugacuauauca

SEQ ID NO: 2239499 - RNA, 19 nt, Artificial Sequence
  Description of Artificial Sequence: Synthetic oligonucleotide
  Antisense strand to SEQ ID NO: 2239498
ugauauagucaacauacag

SEQ ID NO: 2239500 - RNA, 19 nt, Artificial Sequence
  Description of Artificial Sequence: Synthetic oligonucleotide
  Sense strand starting at position 3719 of SEQ ID NO: 1884092
guauguugacuauaucaac

SEQ ID NO: 2239501 - RNA, 19 nt, Artificial Sequence
  Description of Artificial Sequence: Synthetic oligonucleotide
  Antisense strand to SEQ ID NO: 2239500
guugauauagucaacauac

SEQ ID NO: 2239502 - RNA, 19 nt, Artificial Sequence
  Description of Artificial Sequence: Synthetic oligonucleotide
  Sense strand starting at position 3739 of SEQ ID NO: 1884092
uccacauauugguuaugau

SEQ ID NO: 2239503 - RNA, 19 nt, Artificial Sequence
  Description of Artificial Sequence: Synthetic oligonucleotide
  Antisense strand to SEQ ID NO: 2239502
aucauaaccaauaugugga

SEQ ID NO: 2239504 - RNA, 19 nt, Artificial Sequence
  Description of Artificial Sequence: Synthetic oligonucleotide
  Sense strand starting at position 3799 of SEQ ID NO: 1884092
gagauaagguuacaagaaa

SEQ ID NO: 2239505 - RNA, 19 nt, Artificial Sequence
  Description of Artificial Sequence: Synthetic oligonucleotide
  Antisense strand to SEQ ID NO: 2239504
uuucuuguaaccuuaucuc

SEQ ID NO: 2239506 - RNA, 19 nt, Artificial Sequence
  Description of Artificial Sequence: Synthetic oligonucleotide
  Sense strand starting at position 95 of SEQ ID NO: 1884093
cauuccucagagugagcau

SEQ ID NO: 2239507 - RNA, 19 nt, Artificial Sequence
  Description of Artificial Sequence: Synthetic oligonucleotide
  Antisense strand to SEQ ID NO: 2239506
augcucacucugaggaaug

SEQ ID NO: 2239508 - RNA, 19 nt, Artificial Sequence
  Description of Artificial Sequence: Synthetic oligonucleotide
  Sense strand starting at position 130 of SEQ ID NO: 1884093
guuuaaauccagcaaacgu

SEQ ID NO: 2239509 - RNA, 19 nt, Artificial Sequence
  Description of Artificial Sequence: Synthetic oligonucleotide
  Antisense strand to SEQ ID NO: 2239508
acguuugcuggauuuaaac

SEQ ID NO: 2239510 - RNA, 19 nt, Artificial Sequence
  Description of Artificial Sequence: Synthetic oligonucleotide
  Sense strand starting at position 200 of SEQ ID NO: 1884093
cuggguaugggcuagaaca

SEQ ID NO: 2239511 - RNA, 19 nt, Artificial Sequence
  Description of Artificial Sequence: Synthetic oligonucleotide
  Antisense strand to SEQ ID NO: 2239510
uguucuagcccauacccag

SEQ ID NO: 2239512 - RNA, 19 nt, Artificial Sequence
  Description of Artificial Sequence: Synthetic oligonucleotide
  Sense strand starting at position 235 of SEQ ID NO: 1884093
gcaggaugagccugauagu

SEQ ID NO: 2239513 - RNA, 19 nt, Artificial Sequence
  Description of Artificial Sequence: Synthetic oligonucleotide
  Antisense strand to SEQ ID NO: 2239512
acuaucaggcucauccugc

SEQ ID NO: 2239514 - RNA, 19 nt, Artificial Sequence
  Description of Artificial Sequence: Synthetic oligonucleotide
  Sense strand starting at position 441 of SEQ ID NO: 1884093
agcgaacuaagagaaguuu

SEQ ID NO: 2239515 - RNA, 19 nt, Artificial Sequence
  Description of Artificial Sequence: Synthetic oligonucleotide
  Antisense strand to SEQ ID NO: 2239514
aaacuucucuuaguucgcu

SEQ ID NO: 2239516 - RNA, 19 nt, Artificial Sequence
  Description of Artificial Sequence: Synthetic oligonucleotide
  Sense strand starting at position 540 of SEQ ID NO: 1884093
ccuuccucaccggauuauu

SEQ ID NO: 2239517 - RNA, 19 nt, Artificial Sequence
  Description of Artificial Sequence: Synthetic oligonucleotide
  Antisense strand to SEQ ID NO: 2239516
aauaauccggugaggaagg

SEQ ID NO: 2239518 - RNA, 19 nt, Artificial Sequence
  Description of Artificial Sequence: Synthetic oligonucleotide
  Sense strand starting at position 550 of SEQ ID NO: 1884093
cggauuauugugggaagua

SEQ ID NO: 2239519 - RNA, 19 nt, Artificial Sequence
  Description of Artificial Sequence: Synthetic oligonucleotide
  Antisense strand to SEQ ID NO: 2239518
uacuucccacaauaauccg

SEQ ID NO: 2239520 - RNA, 19 nt, Artificial Sequence
  Description of Artificial Sequence: Synthetic oligonucleotide
  Sense strand starting at position 559 of SEQ ID NO: 1884093
gugggaaguaacugauaug

SEQ ID NO: 2239521 - RNA, 19 nt, Artificial Sequence
  Description of Artificial Sequence: Synthetic oligonucleotide
  Antisense strand to SEQ ID NO: 2239520
cauaucaguuacuucccac

SEQ ID NO: 2239522 - RNA, 19 nt, Artificial Sequence
  Description of Artificial Sequence: Synthetic oligonucleotide
  Sense strand starting at position 626 of SEQ ID NO: 1884093
aggcauuaccaguagguaa

SEQ ID NO: 2239523 - RNA, 19 nt, Artificial Sequence
  Description of Artificial Sequence: Synthetic oligonucleotide
  Antisense strand to SEQ ID NO: 2239522
uuaccuacugguaaugccu

SEQ ID NO: 2239524 - RNA, 19 nt, Artificial Sequence
  Description of Artificial Sequence: Synthetic oligonucleotide
  Sense strand starting at position 633 of SEQ ID NO: 1884093
accaguagguaaucaaaca

SEQ ID NO: 2239525 - RNA, 19 nt, Artificial Sequence
  Description of Artificial Sequence: Synthetic oligonucleotide
  Antisense strand to SEQ ID NO: 2239524
uguuugauuaccuacuggu

SEQ ID NO: 2239526 - RNA, 19 nt, Artificial Sequence
  Description of Artificial Sequence: Synthetic oligonucleotide
  Sense strand starting at position 861 of SEQ ID NO: 1884093
uccggagaccucugcaaag

SEQ ID NO: 2239527 - RNA, 19 nt, Artificial Sequence
  Description of Artificial Sequence: Synthetic oligonucleotide
  Antisense strand to SEQ ID NO: 2239526
cuuugcagaggucuccgga

SEQ ID NO: 2239528 - RNA, 19 nt, Artificial Sequence
  Description of Artificial Sequence: Synthetic oligonucleotide
  Sense strand starting at position 930 of SEQ ID NO: 1884093
gguguugucaguugggaac

SEQ ID NO: 2239529 - RNA, 19 nt, Artificial Sequence
  Description of Artificial Sequence: Synthetic oligonucleotide
  Antisense strand to SEQ ID NO: 2239528
guucccaacugacaacacc

SEQ ID NO: 2239530 - RNA, 19 nt, Artificial Sequence
  Description of Artificial Sequence: Synthetic oligonucleotide
  Sense strand starting at position 936 of SEQ ID NO: 1884093
gucaguugggaacguuaga

SEQ ID NO: 2239531 - RNA, 19 nt, Artificial Sequence
  Description of Artificial Sequence: Synthetic oligonucleotide
  Antisense strand to SEQ ID NO: 2239530
ucuaacguucccaacugac

SEQ ID NO: 2239532 - RNA, 19 nt, Artificial Sequence
  Description of Artificial Sequence: Synthetic oligonucleotide
  Sense strand starting at position 1220 of SEQ ID NO: 1884093
gcgugcucccucgcuaaca

SEQ ID NO: 2239533 - RNA, 19 nt, Artificial Sequence
  Description of Artificial Sequence: Synthetic oligonucleotide
  Antisense strand to SEQ ID NO: 2239532
uguuagcgagggagcacgc

SEQ ID NO: 2239534 - RNA, 19 nt, Artificial Sequence
  Description of Artificial Sequence: Synthetic oligonucleotide
  Sense strand starting at position 1381 of SEQ ID NO: 1884093
ggagaauaaagcuggcaga

SEQ ID NO: 2239535 - RNA, 19 nt, Artificial Sequence
  Description of Artificial Sequence: Synthetic oligonucleotide
  Antisense strand to SEQ ID NO: 2239534
ucugccagcuuuauucucc

SEQ ID NO: 2239536 - RNA, 19 nt, Artificial Sequence
  Description of Artificial Sequence: Synthetic oligonucleotide
  Sense strand starting at position 2179 of SEQ ID NO: 1884093
gcugcuucuagagggagaa

SEQ ID NO: 2239537 - RNA, 19 nt, Artificial Sequence
  Description of Artificial Sequence: Synthetic oligonucleotide
  Antisense strand to SEQ ID NO: 2239536
uucucccucuagaagcagc

SEQ ID NO: 2239538 - RNA, 19 nt, Artificial Sequence
  Description of Artificial Sequence: Synthetic oligonucleotide
  Sense strand starting at position 2289 of SEQ ID NO: 1884093
ggaguugaauuagccagau

SEQ ID NO: 2239539 - RNA, 19 nt, Artificial Sequence
  Description of Artificial Sequence: Synthetic oligonucleotide
  Antisense strand to SEQ ID NO: 2239538
aucuggcuaauucaacucc

SEQ ID NO: 2239540 - RNA, 19 nt, Artificial Sequence
  Description of Artificial Sequence: Synthetic oligonucleotide
  Sense strand starting at position 2299 of SEQ ID NO: 1884093
uagccagaucagggauacu

SEQ ID NO: 2239541 - RNA, 19 nt, Artificial Sequence
  Description of Artificial Sequence: Synthetic oligonucleotide
  Antisense strand to SEQ ID NO: 2239540
aguaucccugaucuggcua

SEQ ID NO: 2239542 - RNA, 19 nt, Artificial Sequence
  Description of Artificial Sequence: Synthetic oligonucleotide
  Sense strand starting at position 2776 of SEQ ID NO: 1884093
ggucuaggcagucaaagaa

SEQ ID NO: 2239543 - RNA, 19 nt, Artificial Sequence
  Description of Artificial Sequence: Synthetic oligonucleotide
  Antisense strand to SEQ ID NO: 2239542
uucuuugacugccuagacc

SEQ ID NO: 2239544 - RNA, 19 nt, Artificial Sequence
  Description of Artificial Sequence: Synthetic oligonucleotide
  Sense strand starting at position 2819 of SEQ ID NO: 1884093
gauguuaaggguuacuuau

SEQ ID NO: 2239545 - RNA, 19 nt, Artificial Sequence
  Description of Artificial Sequence: Synthetic oligonucleotide
  Antisense strand to SEQ ID NO: 2239544
auaaguaacccuuaacauc

SEQ ID NO: 2239546 - RNA, 19 nt, Artificial Sequence
  Description of Artificial Sequence: Synthetic oligonucleotide
  Sense strand starting at position 2909 of SEQ ID NO: 1884093
gauguaaugaguuaagguc

SEQ ID NO: 2239547 - RNA, 19 nt, Artificial Sequence
  Description of Artificial Sequence: Synthetic oligonucleotide
  Antisense strand to SEQ ID NO: 2239546
gaccuuaacucauuacauc

SEQ ID NO: 2239548 - RNA, 19 nt, Artificial Sequence
  Description of Artificial Sequence: Synthetic oligonucleotide
  Sense strand starting at position 2968 of SEQ ID NO: 1884093
gucguuguaagagaagaga

SEQ ID NO: 2239549 - RNA, 19 nt, Artificial Sequence
  Description of Artificial Sequence: Synthetic oligonucleotide
  Antisense strand to SEQ ID NO: 2239548
ucucuucucuuacaacgac

SEQ ID NO: 2239550 - RNA, 19 nt, Artificial Sequence
  Description of Artificial Sequence: Synthetic oligonucleotide
  Sense strand starting at position 3030 of SEQ ID NO: 1884093
cagggaucagcugaugcau

SEQ ID NO: 2239551 - RNA, 19 nt, Artificial Sequence
  Description of Artificial Sequence: Synthetic oligonucleotide
  Antisense strand to SEQ ID NO: 2239550
augcaucagcugaucccug

SEQ ID NO: 2239552 - RNA, 19 nt, Artificial Sequence
  Description of Artificial Sequence: Synthetic oligonucleotide
  Sense strand starting at position 3178 of SEQ ID NO: 1884093
cuuccagagcuguaaguga

SEQ ID NO: 2239553 - RNA, 19 nt, Artificial Sequence
  Description of Artificial Sequence: Synthetic oligonucleotide
  Antisense strand to SEQ ID NO: 2239552
ucacuuacagcucuggaag

SEQ ID NO: 2239554 - RNA, 19 nt, Artificial Sequence
  Description of Artificial Sequence: Synthetic oligonucleotide
  Sense strand starting at position 3316 of SEQ ID NO: 1884093
ugaaacugauugcuuagua

SEQ ID NO: 2239555 - RNA, 19 nt, Artificial Sequence
  Description of Artificial Sequence: Synthetic oligonucleotide
  Antisense strand to SEQ ID NO: 2239554
uacuaagcaaucaguuuca

SEQ ID NO: 2239556 - RNA, 19 nt, Artificial Sequence
  Description of Artificial Sequence: Synthetic oligonucleotide
  Sense strand starting at position 3317 of SEQ ID NO: 1884093
gaaacugauugcuuaguau

SEQ ID NO: 2239557 - RNA, 19 nt, Artificial Sequence
  Description of Artificial Sequence: Synthetic oligonucleotide
  Antisense strand to SEQ ID NO: 2239556
auacuaagcaaucaguuuc

SEQ ID NO: 2239558 - RNA, 19 nt, Artificial Sequence
  Description of Artificial Sequence: Synthetic oligonucleotide
  Sense strand starting at position 3320 of SEQ ID NO: 1884093
acugauugcuuaguauaug

SEQ ID NO: 2239559 - RNA, 19 nt, Artificial Sequence
  Description of Artificial Sequence: Synthetic oligonucleotide
  Antisense strand to SEQ ID NO: 2239558
cauauacuaagcaaucagu

SEQ ID NO: 2239560 - RNA, 19 nt, Artificial Sequence
  Description of Artificial Sequence: Synthetic oligonucleotide
  Sense strand starting at position 3323 of SEQ ID NO: 1884093
gauugcuuaguauaugcaa

SEQ ID NO: 2239561 - RNA, 19 nt, Artificial Sequence
  Description of Artificial Sequence: Synthetic oligonucleotide
  Antisense strand to SEQ ID NO: 2239560
uugcauauacuaagcaauc

SEQ ID NO: 2239562 - RNA, 19 nt, Artificial Sequence
  Description of Artificial Sequence: Synthetic oligonucleotide
  Sense strand starting at position 3708 of SEQ ID NO: 1884093
uacaguguuucuguaccca

SEQ ID NO: 2239563 - RNA, 19 nt, Artificial Sequence
  Description of Artificial Sequence: Synthetic oligonucleotide
  Antisense strand to SEQ ID NO: 2239562
uggguacagaaacacugua

SEQ ID NO: 2239564 - RNA, 19 nt, Artificial Sequence
  Description of Artificial Sequence: Synthetic oligonucleotide
  Sense strand starting at position 3713 of SEQ ID NO: 1884093
uguuucuguacccauggua

SEQ ID NO: 2239565 - RNA, 19 nt, Artificial Sequence
  Description of Artificial Sequence: Synthetic oligonucleotide
  Antisense strand to SEQ ID NO: 2239564
uaccauggguacagaaaca

SEQ ID NO: 2239566 - RNA, 19 nt, Artificial Sequence
  Description of Artificial Sequence: Synthetic oligonucleotide
  Sense strand starting at position 3726 of SEQ ID NO: 1884093
augguaagggcucaguaua

SEQ ID NO: 2239567 - RNA, 19 nt, Artificial Sequence
  Description of Artificial Sequence: Synthetic oligonucleotide
  Antisense strand to SEQ ID NO: 2239566
uauacugagcccuuaccau

SEQ ID NO: 2239568 - RNA, 19 nt, Artificial Sequence
  Description of Artificial Sequence: Synthetic oligonucleotide
  Sense strand starting at position 3740 of SEQ ID NO: 1884093
guauauacugcuggcugau

SEQ ID NO: 2239569 - RNA, 19 nt, Artificial Sequence
  Description of Artificial Sequence: Synthetic oligonucleotide
  Antisense strand to SEQ ID NO: 2239568
aucagccagcaguauauac

SEQ ID NO: 2239570 - RNA, 19 nt, Artificial Sequence
  Description of Artificial Sequence: Synthetic oligonucleotide
  Sense strand starting at position 3897 of SEQ ID NO: 1884093
uuugcuucuccagagcacu

SEQ ID NO: 2239571 - RNA, 19 nt, Artificial Sequence
  Description of Artificial Sequence: Synthetic oligonucleotide
  Antisense strand to SEQ ID NO: 2239570
agugcucuggagaagcaaa

SEQ ID NO: 2239572 - RNA, 19 nt, Artificial Sequence
  Description of Artificial Sequence: Synthetic oligonucleotide
  Sense strand starting at position 3909 of SEQ ID NO: 1884093
gagcacuuagugcauuaua

SEQ ID NO: 2239573 - RNA, 19 nt, Artificial Sequence
  Description of Artificial Sequence: Synthetic oligonucleotide
  Antisense strand to SEQ ID NO: 2239572
uauaaugcacuaagugcuc

SEQ ID NO: 2239574 - RNA, 19 nt, Artificial Sequence
  Description of Artificial Sequence: Synthetic oligonucleotide
  Sense strand starting at position 3917 of SEQ ID NO: 1884093
agugcauuauacccauuau

SEQ ID NO: 2239575 - RNA, 19 nt, Artificial Sequence
  Description of Artificial Sequence: Synthetic oligonucleotide
  Antisense strand to SEQ ID NO: 2239574
auaauggguauaaugcacu

SEQ ID NO: 2239576 - RNA, 19 nt, Artificial Sequence
  Description of Artificial Sequence: Synthetic oligonucleotide
  Sense strand starting at position 3954 of SEQ ID NO: 1884093
gucuuuacucccgagaguc

SEQ ID NO: 2239577 - RNA, 19 nt, Artificial Sequence
  Description of Artificial Sequence: Synthetic oligonucleotide
  Antisense strand to SEQ ID NO: 2239576
gacucucgggaguaaagac

SEQ ID NO: 2239578 - RNA, 19 nt, Artificial Sequence
  Description of Artificial Sequence: Synthetic oligonucleotide
  Sense strand starting at position 3962 of SEQ ID NO: 1884093
ucccgagagucugccugau

SEQ ID NO: 2239579 - RNA, 19 nt, Artificial Sequence
  Description of Artificial Sequence: Synthetic oligonucleotide
  Antisense strand to SEQ ID NO: 2239578
aucaggcagacucucggga

SEQ ID NO: 2239580 - RNA, 19 nt, Artificial Sequence
  Description of Artificial Sequence: Synthetic oligonucleotide
  Sense strand starting at position 3964 of SEQ ID NO: 1884093
ccgagagucugccugauug

SEQ ID NO: 2239581 - RNA, 19 nt, Artificial Sequence
  Description of Artificial Sequence: Synthetic oligonucleotide
  Antisense strand to SEQ ID NO: 2239580
caaucaggcagacucucgg

SEQ ID NO: 2239582 - RNA, 19 nt, Artificial Sequence
  Description of Artificial Sequence: Synthetic oligonucleotide
  Sense strand starting at position 3966 of SEQ ID NO: 1884093
gagagucugccugauugca

SEQ ID NO: 2239583 - RNA, 19 nt, Artificial Sequence
  Description of Artificial Sequence: Synthetic oligonucleotide
  Antisense strand to SEQ ID NO: 2239582
ugcaaucaggcagacucuc

SEQ ID NO: 2239584 - RNA, 19 nt, Artificial Sequence
  Description of Artificial Sequence: Synthetic oligonucleotide
  Sense strand starting at position 3968 of SEQ ID NO: 1884093
gagucugccugauugcaaa

SEQ ID NO: 2239585 - RNA, 19 nt, Artificial Sequence
  Description of Artificial Sequence: Synthetic oligonucleotide
  Antisense strand to SEQ ID NO: 2239584
uuugcaaucaggcagacuc

SEQ ID NO: 2239586 - RNA, 19 nt, Artificial Sequence
  Description of Artificial Sequence: Synthetic oligonucleotide
  Sense strand starting at position 499 of SEQ ID NO: 1884094
ggaggacgucuccauagug

SEQ ID NO: 2239587 - RNA, 19 nt, Artificial Sequence
  Description of Artificial Sequence: Synthetic oligonucleotide
  Antisense strand to SEQ ID NO: 2239586
cacuauggagacguccucc

SEQ ID NO: 2239588 - RNA, 19 nt, Artificial Sequence
  Description of Artificial Sequence: Synthetic oligonucleotide
  Sense strand starting at position 688 of SEQ ID NO: 1884094
uuuccaaagugagaagaau

SEQ ID NO: 2239589 - RNA, 19 nt, Artificial Sequence
  Description of Artificial Sequence: Synthetic oligonucleotide
  Antisense strand to SEQ ID NO: 2239588
auucuucucacuuuggaaa

SEQ ID NO: 2239590 - RNA, 19 nt, Artificial Sequence
  Description of Artificial Sequence: Synthetic oligonucleotide
  Sense strand starting at position 755 of SEQ ID NO: 1884094
gagcaaaggagcugguuua

SEQ ID NO: 2239591 - RNA, 19 nt, Artificial Sequence
  Description of Artificial Sequence: Synthetic oligonucleotide
  Antisense strand to SEQ ID NO: 2239590
uaaaccagcuccuuugcuc

SEQ ID NO: 2239592 - RNA, 19 nt, Artificial Sequence
  Description of Artificial Sequence: Synthetic oligonucleotide
  Sense strand starting at position 756 of SEQ ID NO: 1884094
agcaaaggagcugguuuau

SEQ ID NO: 2239593 - RNA, 19 nt, Artificial Sequence
  Description of Artificial Sequence: Synthetic oligonucleotide
  Antisense strand to SEQ ID NO: 2239592
auaaaccagcuccuuugcu

SEQ ID NO: 2239594 - RNA, 19 nt, Artificial Sequence
  Description of Artificial Sequence: Synthetic oligonucleotide
  Sense strand starting at position 1072 of SEQ ID NO: 1884094
gccaaaguugcugguuuaa

SEQ ID NO: 2239595 - RNA, 19 nt, Artificial Sequence
  Description of Artificial Sequence: Synthetic oligonucleotide
  Antisense strand to SEQ ID NO: 2239594
uuaaaccagcaacuuuggc

SEQ ID NO: 2239596 - RNA, 19 nt, Artificial Sequence
  Description of Artificial Sequence: Synthetic oligonucleotide
  Sense strand starting at position 1074 of SEQ ID NO: 1884094
caaaguugcugguuuaacu

SEQ ID NO: 2239597 - RNA, 19 nt, Artificial Sequence
  Description of Artificial Sequence: Synthetic oligonucleotide
  Antisense strand to SEQ ID NO: 2239596
aguuaaaccagcaacuuug

SEQ ID NO: 2239598 - RNA, 19 nt, Artificial Sequence
  Description of Artificial Sequence: Synthetic oligonucleotide
  Sense strand starting at position 1083 of SEQ ID NO: 1884094
ugguuuaacucaucagagg

SEQ ID NO: 2239599 - RNA, 19 nt, Artificial Sequence
  Description of Artificial Sequence: Synthetic oligonucleotide
  Antisense strand to SEQ ID NO: 2239598
ccucugaugaguuaaacca

SEQ ID NO: 2239600 - RNA, 19 nt, Artificial Sequence
  Description of Artificial Sequence: Synthetic oligonucleotide
  Sense strand starting at position 1084 of SEQ ID NO: 1884094
gguuuaacucaucagaggu

SEQ ID NO: 2239601 - RNA, 19 nt, Artificial Sequence
  Description of Artificial Sequence: Synthetic oligonucleotide
  Antisense strand to SEQ ID NO: 2239600
accucugaugaguuaaacc

SEQ ID NO: 2239602 - RNA, 19 nt, Artificial Sequence
  Description of Artificial Sequence: Synthetic oligonucleotide
  Sense strand starting at position 1143 of SEQ ID NO: 1884094
gcuggaaucggcugugaca

SEQ ID NO: 2239603 - RNA, 19 nt, Artificial Sequence
  Description of Artificial Sequence: Synthetic oligonucleotide
  Antisense strand to SEQ ID NO: 2239602
ugucacagccgauuccagc

SEQ ID NO: 2239604 - RNA, 19 nt, Artificial Sequence
  Description of Artificial Sequence: Synthetic oligonucleotide
  Sense strand starting at position 1145 of SEQ ID NO: 1884094
uggaaucggcugugacaaa

SEQ ID NO: 2239605 - RNA, 19 nt, Artificial Sequence
  Description of Artificial Sequence: Synthetic oligonucleotide
  Antisense strand to SEQ ID NO: 2239604
uuugucacagccgauucca

SEQ ID NO: 2239606 - RNA, 19 nt, Artificial Sequence
  Description of Artificial Sequence: Synthetic oligonucleotide
  Sense strand starting at position 1269 of SEQ ID NO: 1884094
ccucuuagcuggcuuuaaa

SEQ ID NO: 2239607 - RNA, 19 nt, Artificial Sequence
  Description of Artificial Sequence: Synthetic oligonucleotide
  Antisense strand to SEQ ID NO: 2239606
uuuaaagccagcuaagagg

SEQ ID NO: 2239608 - RNA, 19 nt, Artificial Sequence
  Description of Artificial Sequence: Synthetic oligonucleotide
  Sense strand starting at position 2030 of SEQ ID NO: 1884094
cgugguguucucuacgauc

SEQ ID NO: 2239609 - RNA, 19 nt, Artificial Sequence
  Description of Artificial Sequence: Synthetic oligonucleotide
  Antisense strand to SEQ ID NO: 2239608
gaucguagagaacaccacg

SEQ ID NO: 2239610 - RNA, 19 nt, Artificial Sequence
  Description of Artificial Sequence: Synthetic oligonucleotide
  Sense strand starting at position 2113 of SEQ ID NO: 1884094
uuguaaagucgugacaaau

SEQ ID NO: 2239611 - RNA, 19 nt, Artificial Sequence
  Description of Artificial Sequence: Synthetic oligonucleotide
  Antisense strand to SEQ ID NO: 2239610
auuugucacgacuuuacaa

SEQ ID NO: 2239612 - RNA, 19 nt, Artificial Sequence
  Description of Artificial Sequence: Synthetic oligonucleotide
  Sense strand starting at position 2217 of SEQ ID NO: 1884094
guggaaggaucauagcuaa

SEQ ID NO: 2239613 - RNA, 19 nt, Artificial Sequence
  Description of Artificial Sequence: Synthetic oligonucleotide
  Antisense strand to SEQ ID NO: 2239612
uuagcuaugauccuuccac

SEQ ID NO: 2239614 - RNA, 19 nt, Artificial Sequence
  Description of Artificial Sequence: Synthetic oligonucleotide
  Sense strand starting at position 2264 of SEQ ID NO: 1884094
aguuguuuauacucacauu

SEQ ID NO: 2239615 - RNA, 19 nt, Artificial Sequence
  Description of Artificial Sequence: Synthetic oligonucleotide
  Antisense strand to SEQ ID NO: 2239614
aaugugaguauaaacaacu

SEQ ID NO: 2239616 - RNA, 19 nt, Artificial Sequence
  Description of Artificial Sequence: Synthetic oligonucleotide
  Sense strand starting at position 2304 of SEQ ID NO: 1884094
aucuguauuuccugaggga

SEQ ID NO: 2239617 - RNA, 19 nt, Artificial Sequence
  Description of Artificial Sequence: Synthetic oligonucleotide
  Antisense strand to SEQ ID NO: 2239616
ucccucaggaaauacagau

SEQ ID NO: 2239618 - RNA, 19 nt, Artificial Sequence
  Description of Artificial Sequence: Synthetic oligonucleotide
  Sense strand starting at position 2307 of SEQ ID NO: 1884094
uguauuuccugagggagua

SEQ ID NO: 2239619 - RNA, 19 nt, Artificial Sequence
  Description of Artificial Sequence: Synthetic oligonucleotide
  Antisense strand to SEQ ID NO: 2239618
uacucccucaggaaauaca

SEQ ID NO: 2239620 - RNA, 19 nt, Artificial Sequence
  Description of Artificial Sequence: Synthetic oligonucleotide
  Sense strand starting at position 2326 of SEQ ID NO: 1884094
gaaacagauguucggaaca

SEQ ID NO: 2239621 - RNA, 19 nt, Artificial Sequence
  Description of Artificial Sequence: Synthetic oligonucleotide
  Antisense strand to SEQ ID NO: 2239620
uguuccgaacaucuguuuc

SEQ ID NO: 2239622 - RNA, 19 nt, Artificial Sequence
  Description of Artificial Sequence: Synthetic oligonucleotide
  Sense strand starting at position 2328 of SEQ ID NO: 1884094
aacagauguucggaacaau

SEQ ID NO: 2239623 - RNA, 19 nt, Artificial Sequence
  Description of Artificial Sequence: Synthetic oligonucleotide
  Antisense strand to SEQ ID NO: 2239622
auuguuccgaacaucuguu

SEQ ID NO: 2239624 - RNA, 19 nt, Artificial Sequence
  Description of Artificial Sequence: Synthetic oligonucleotide
  Sense strand starting at position 2512 of SEQ ID NO: 1884094
uacguugccuucucuauga

SEQ ID NO: 2239625 - RNA, 19 nt, Artificial Sequence
  Description of Artificial Sequence: Synthetic oligonucleotide
  Antisense strand to SEQ ID NO: 2239624
ucauagagaaggcaacgua

SEQ ID NO: 2239626 - RNA, 19 nt, Artificial Sequence
  Description of Artificial Sequence: Synthetic oligonucleotide
  Sense strand starting at position 2514 of SEQ ID NO: 1884094
cguugccuucucuaugaaa

SEQ ID NO: 2239627 - RNA, 19 nt, Artificial Sequence
  Description of Artificial Sequence: Synthetic oligonucleotide
  Antisense strand to SEQ ID NO: 2239626
uuucauagagaaggcaacg

SEQ ID NO: 2239628 - RNA, 19 nt, Artificial Sequence
  Description of Artificial Sequence: Synthetic oligonucleotide
  Sense strand starting at position 2585 of SEQ ID NO: 1884094
caccgugucccugauccaa

SEQ ID NO: 2239629 - RNA, 19 nt, Artificial Sequence
  Description of Artificial Sequence: Synthetic oligonucleotide
  Antisense strand to SEQ ID NO: 2239628
uuggaucagggacacggug

SEQ ID NO: 2239630 - RNA, 19 nt, Artificial Sequence
  Description of Artificial Sequence: Synthetic oligonucleotide
  Sense strand starting at position 2587 of SEQ ID NO: 1884094
ccgugucccugauccaaau

SEQ ID NO: 2239631 - RNA, 19 nt, Artificial Sequence
  Description of Artificial Sequence: Synthetic oligonucleotide
  Antisense strand to SEQ ID NO: 2239630
auuuggaucagggacacgg

SEQ ID NO: 2239632 - RNA, 19 nt, Artificial Sequence
  Description of Artificial Sequence: Synthetic oligonucleotide
  Sense strand starting at position 2690 of SEQ ID NO: 1884094
uaggaaauugcccgaguca

SEQ ID NO: 2239633 - RNA, 19 nt, Artificial Sequence
  Description of Artificial Sequence: Synthetic oligonucleotide
  Antisense strand to SEQ ID NO: 2239632
ugacucgggcaauuuccua

SEQ ID NO: 2239634 - RNA, 19 nt, Artificial Sequence
  Description of Artificial Sequence: Synthetic oligonucleotide
  Sense strand starting at position 2691 of SEQ ID NO: 1884094
aggaaauugcccgagucac

SEQ ID NO: 2239635 - RNA, 19 nt, Artificial Sequence
  Description of Artificial Sequence: Synthetic oligonucleotide
  Antisense strand to SEQ ID NO: 2239634
gugacucgggcaauuuccu

SEQ ID NO: 2239636 - RNA, 19 nt, Artificial Sequence
  Description of Artificial Sequence: Synthetic oligonucleotide
  Sense strand starting at position 2723 of SEQ ID NO: 1884094
cuggcucggucuccagaaa

SEQ ID NO: 2239637 - RNA, 19 nt, Artificial Sequence
  Description of Artificial Sequence: Synthetic oligonucleotide
  Antisense strand to SEQ ID NO: 2239636
uuucuggagaccgagccag

SEQ ID NO: 2239638 - RNA, 19 nt, Artificial Sequence
  Description of Artificial Sequence: Synthetic oligonucleotide
  Sense strand starting at position 2898 of SEQ ID NO: 1884094
agcugauuccagugcucag

SEQ ID NO: 2239639 - RNA, 19 nt, Artificial Sequence
  Description of Artificial Sequence: Synthetic oligonucleotide
  Antisense strand to SEQ ID NO: 2239638
cugagcacuggaaucagcu

SEQ ID NO: 2239640 - RNA, 19 nt, Artificial Sequence
  Description of Artificial Sequence: Synthetic oligonucleotide
  Sense strand starting at position 2921 of SEQ ID NO: 1884094
gaaaccaugucguucucaa

SEQ ID NO: 2239641 - RNA, 19 nt, Artificial Sequence
  Description of Artificial Sequence: Synthetic oligonucleotide
  Antisense strand to SEQ ID NO: 2239640
uugagaacgacaugguuuc

SEQ ID NO: 2239642 - RNA, 19 nt, Artificial Sequence
  Description of Artificial Sequence: Synthetic oligonucleotide
  Sense strand starting at position 2929 of SEQ ID NO: 1884094
gucguucucaaugccagua

SEQ ID NO: 2239643 - RNA, 19 nt, Artificial Sequence
  Description of Artificial Sequence: Synthetic oligonucleotide
  Antisense strand to SEQ ID NO: 2239642
uacuggcauugagaacgac

SEQ ID NO: 2239644 - RNA, 19 nt, Artificial Sequence
  Description of Artificial Sequence: Synthetic oligonucleotide
  Sense strand starting at position 3014 of SEQ ID NO: 1884094
gugacuuggagcugguuau

SEQ ID NO: 2239645 - RNA, 19 nt, Artificial Sequence
  Description of Artificial Sequence: Synthetic oligonucleotide
  Antisense strand to SEQ ID NO: 2239644
auaaccagcuccaagucac

SEQ ID NO: 2239646 - RNA, 19 nt, Artificial Sequence
  Description of Artificial Sequence: Synthetic oligonucleotide
  Sense strand starting at position 3024 of SEQ ID NO: 1884094
gcugguuaugguugaagga

SEQ ID NO: 2239647 - RNA, 19 nt, Artificial Sequence
  Description of Artificial Sequence: Synthetic oligonucleotide
  Antisense strand to SEQ ID NO: 2239646
uccuucaaccauaaccagc

SEQ ID NO: 2239648 - RNA, 19 nt, Artificial Sequence
  Description of Artificial Sequence: Synthetic oligonucleotide
  Sense strand starting at position 3203 of SEQ ID NO: 1884094
agauuagucuaagaugaaa

SEQ ID NO: 2239649 - RNA, 19 nt, Artificial Sequence
  Description of Artificial Sequence: Synthetic oligonucleotide
  Antisense strand to SEQ ID NO: 2239648
uuucaucuuagacuaaucu

SEQ ID NO: 2239650 - RNA, 19 nt, Artificial Sequence
  Description of Artificial Sequence: Synthetic oligonucleotide
  Sense strand starting at position 3431 of SEQ ID NO: 1884094
ccuauaguacucugccuau

SEQ ID NO: 2239651 - RNA, 19 nt, Artificial Sequence
  Description of Artificial Sequence: Synthetic oligonucleotide
  Antisense strand to SEQ ID NO: 2239650
auaggcagaguacuauagg

SEQ ID NO: 2239652 - RNA, 19 nt, Artificial Sequence
  Description of Artificial Sequence: Synthetic oligonucleotide
  Sense strand starting at position 3437 of SEQ ID NO: 1884094
guacucugccuaugaggaa

SEQ ID NO: 2239653 - RNA, 19 nt, Artificial Sequence
  Description of Artificial Sequence: Synthetic oligonucleotide
  Antisense strand to SEQ ID NO: 2239652
uuccucauaggcagaguac

SEQ ID NO: 2239654 - RNA, 19 nt, Artificial Sequence
  Description of Artificial Sequence: Synthetic oligonucleotide
  Sense strand starting at position 3536 of SEQ ID NO: 1884094
guacucagccuaugaggau

SEQ ID NO: 2239655 - RNA, 19 nt, Artificial Sequence
  Description of Artificial Sequence: Synthetic oligonucleotide
  Antisense strand to SEQ ID NO: 2239654
auccucauaggcugaguac

SEQ ID NO: 2239656 - RNA, 19 nt, Artificial Sequence
  Description of Artificial Sequence: Synthetic oligonucleotide
  Sense strand starting at position 3636 of SEQ ID NO: 1884094
guacucagccucugaggau

SEQ ID NO: 2239657 - RNA, 19 nt, Artificial Sequence
  Description of Artificial Sequence: Synthetic oligonucleotide
  Antisense strand to SEQ ID NO: 2239656
auccucagaggcugaguac

SEQ ID NO: 2239658 - RNA, 19 nt, Artificial Sequence
  Description of Artificial Sequence: Synthetic oligonucleotide
  Sense strand starting at position 3701 of SEQ ID NO: 1884094
ggcgaaguccaggaagacu

SEQ ID NO: 2239659 - RNA, 19 nt, Artificial Sequence
  Description of Artificial Sequence: Synthetic oligonucleotide
  Antisense strand to SEQ ID NO: 2239658
agucuuccuggacuucgcc

SEQ ID NO: 2239660 - RNA, 19 nt, Artificial Sequence
  Description of Artificial Sequence: Synthetic oligonucleotide
  Sense strand starting at position 3959 of SEQ ID NO: 1884094
acuguucucugaguccauu

SEQ ID NO: 2239661 - RNA, 19 nt, Artificial Sequence
  Description of Artificial Sequence: Synthetic oligonucleotide
  Antisense strand to SEQ ID NO: 2239660
aauggacucagagaacagu

SEQ ID NO: 2239662 - RNA, 19 nt, Artificial Sequence
  Description of Artificial Sequence: Synthetic oligonucleotide
  Sense strand starting at position 3981 of SEQ ID NO: 1884094
uggguuuggauggguaagu

SEQ ID NO: 2239663 - RNA, 19 nt, Artificial Sequence
  Description of Artificial Sequence: Synthetic oligonucleotide
  Antisense strand to SEQ ID NO: 2239662
acuuacccauccaaaccca

SEQ ID NO: 2239664 - RNA, 19 nt, Artificial Sequence
  Description of Artificial Sequence: Synthetic oligonucleotide
  Sense strand starting at position 3982 of SEQ ID NO: 1884094
ggguuuggauggguaaguu

SEQ ID NO: 2239665 - RNA, 19 nt, Artificial Sequence
  Description of Artificial Sequence: Synthetic oligonucleotide
  Antisense strand to SEQ ID NO: 2239664
aacuuacccauccaaaccc

SEQ ID NO: 2239666 - RNA, 19 nt, Artificial Sequence
  Description of Artificial Sequence: Synthetic oligonucleotide
  Sense strand starting at position 241 of SEQ ID NO: 1884095
gcuccugcucacuaaugga

SEQ ID NO: 2239667 - RNA, 19 nt, Artificial Sequence
  Description of Artificial Sequence: Synthetic oligonucleotide
  Antisense strand to SEQ ID NO: 2239666
uccauuagugagcaggagc

SEQ ID NO: 2239668 - RNA, 19 nt, Artificial Sequence
  Description of Artificial Sequence: Synthetic oligonucleotide
  Sense strand starting at position 365 of SEQ ID NO: 1884095
uugggaagauucuuucuca

SEQ ID NO: 2239669 - RNA, 19 nt, Artificial Sequence
  Description of Artificial Sequence: Synthetic oligonucleotide
  Antisense strand to SEQ ID NO: 2239668
ugagaaagaaucuucccaa

SEQ ID NO: 2239670 - RNA, 19 nt, Artificial Sequence
  Description of Artificial Sequence: Synthetic oligonucleotide
  Sense strand starting at position 368 of SEQ ID NO: 1884095
ggaagauucuuucucauug

SEQ ID NO: 2239671 - RNA, 19 nt, Artificial Sequence
  Description of Artificial Sequence: Synthetic oligonucleotide
  Antisense strand to SEQ ID NO: 2239670
caaugagaaagaaucuucc

SEQ ID NO: 2239672 - RNA, 19 nt, Artificial Sequence
  Description of Artificial Sequence: Synthetic oligonucleotide
  Sense strand starting at position 372 of SEQ ID NO: 1884095
gauucuuucucauugguag

SEQ ID NO: 2239673 - RNA, 19 nt, Artificial Sequence
  Description of Artificial Sequence: Synthetic oligonucleotide
  Antisense strand to SEQ ID NO: 2239672
cuaccaaugagaaagaauc

SEQ ID NO: 2239674 - RNA, 19 nt, Artificial Sequence
  Description of Artificial Sequence: Synthetic oligonucleotide
  Sense strand starting at position 495 of SEQ ID NO: 1884095
uuugguagaguuugagcua

SEQ ID NO: 2239675 - RNA, 19 nt, Artificial Sequence
  Description of Artificial Sequence: Synthetic oligonucleotide
  Antisense strand to SEQ ID NO: 2239674
uagcucaaacucuaccaaa

SEQ ID NO: 2239676 - RNA, 19 nt, Artificial Sequence
  Description of Artificial Sequence: Synthetic oligonucleotide
  Sense strand starting at position 498 of SEQ ID NO: 1884095
gguagaguuugagcuagac

SEQ ID NO: 2239677 - RNA, 19 nt, Artificial Sequence
  Description of Artificial Sequence: Synthetic oligonucleotide
  Antisense strand to SEQ ID NO: 2239676
gucuagcucaaacucuacc

SEQ ID NO: 2239678 - RNA, 19 nt, Artificial Sequence
  Description of Artificial Sequence: Synthetic oligonucleotide
  Sense strand starting at position 591 of SEQ ID NO: 1884095
gggcuucuuccuggaguga

SEQ ID NO: 2239679 - RNA, 19 nt, Artificial Sequence
  Description of Artificial Sequence: Synthetic oligonucleotide
  Antisense strand to SEQ ID NO: 2239678
ucacuccaggaagaagccc

SEQ ID NO: 2239680 - RNA, 19 nt, Artificial Sequence
  Description of Artificial Sequence: Synthetic oligonucleotide
  Sense strand starting at position 592 of SEQ ID NO: 1884095
ggcuucuuccuggagugaa

SEQ ID NO: 2239681 - RNA, 19 nt, Artificial Sequence
  Description of Artificial Sequence: Synthetic oligonucleotide
  Antisense strand to SEQ ID NO: 2239680
uucacuccaggaagaagcc

SEQ ID NO: 2239682 - RNA, 19 nt, Artificial Sequence
  Description of Artificial Sequence: Synthetic oligonucleotide
  Sense strand starting at position 709 of SEQ ID NO: 1884095
ugaguucacccggaguucu

SEQ ID NO: 2239683 - RNA, 19 nt, Artificial Sequence
  Description of Artificial Sequence: Synthetic oligonucleotide
  Antisense strand to SEQ ID NO: 2239682
agaacuccgggugaacuca

SEQ ID NO: 2239684 - RNA, 19 nt, Artificial Sequence
  Description of Artificial Sequence: Synthetic oligonucleotide
  Sense strand starting at position 740 of SEQ ID NO: 1884095
ccaggauacuguguaucca

SEQ ID NO: 2239685 - RNA, 19 nt, Artificial Sequence
  Description of Artificial Sequence: Synthetic oligonucleotide
  Antisense strand to SEQ ID NO: 2239684
uggauacacaguauccugg

SEQ ID NO: 2239686 - RNA, 19 nt, Artificial Sequence
  Description of Artificial Sequence: Synthetic oligonucleotide
  Sense strand starting at position 741 of SEQ ID NO: 1884095
caggauacuguguauccau

SEQ ID NO: 2239687 - RNA, 19 nt, Artificial Sequence
  Description of Artificial Sequence: Synthetic oligonucleotide
  Antisense strand to SEQ ID NO: 2239686
auggauacacaguauccug

SEQ ID NO: 2239688 - RNA, 19 nt, Artificial Sequence
  Description of Artificial Sequence: Synthetic oligonucleotide
  Sense strand starting at position 750 of SEQ ID NO: 1884095
guguauccauacucgaaua

SEQ ID NO: 2239689 - RNA, 19 nt, Artificial Sequence
  Description of Artificial Sequence: Synthetic oligonucleotide
  Antisense strand to SEQ ID NO: 2239688
uauucgaguauggauacac

SEQ ID NO: 2239690 - RNA, 19 nt, Artificial Sequence
  Description of Artificial Sequence: Synthetic oligonucleotide
  Sense strand starting at position 752 of SEQ ID NO: 1884095
guauccauacucgaauauu

SEQ ID NO: 2239691 - RNA, 19 nt, Artificial Sequence
  Description of Artificial Sequence: Synthetic oligonucleotide
  Antisense strand to SEQ ID NO: 2239690
aauauucgaguauggauac

SEQ ID NO: 2239692 - RNA, 19 nt, Artificial Sequence
  Description of Artificial Sequence: Synthetic oligonucleotide
  Sense strand starting at position 776 of SEQ ID NO: 1884095
ugcaaagucuguuucuaac

SEQ ID NO: 2239693 - RNA, 19 nt, Artificial Sequence
  Description of Artificial Sequence: Synthetic oligonucleotide
  Antisense strand to SEQ ID NO: 2239692
guuagaaacagacuuugca

SEQ ID NO: 2239694 - RNA, 19 nt, Artificial Sequence
  Description of Artificial Sequence: Synthetic oligonucleotide
  Sense strand starting at position 805 of SEQ ID NO: 1884095
ggauaauugcuguggaauu

SEQ ID NO: 2239695 - RNA, 19 nt, Artificial Sequence
  Description of Artificial Sequence: Synthetic oligonucleotide
  Antisense strand to SEQ ID NO: 2239694
aauuccacagcaauuaucc

SEQ ID NO: 2239696 - RNA, 19 nt, Artificial Sequence
  Description of Artificial Sequence: Synthetic oligonucleotide
  Sense strand starting at position 842 of SEQ ID NO: 1884095
cuccaaugcugagcuagau

SEQ ID NO: 2239697 - RNA, 19 nt, Artificial Sequence
  Description of Artificial Sequence: Synthetic oligonucleotide
  Antisense strand to SEQ ID NO: 2239696
aucuagcucagcauuggag

SEQ ID NO: 2239698 - RNA, 19 nt, Artificial Sequence
  Description of Artificial Sequence: Synthetic oligonucleotide
  Sense strand starting at position 867 of SEQ ID NO: 1884095
ucagguuccugggugaaac

SEQ ID NO: 2239699 - RNA, 19 nt, Artificial Sequence
  Description of Artificial Sequence: Synthetic oligonucleotide
  Antisense strand to SEQ ID NO: 2239698
guuucacccaggaaccuga

SEQ ID NO: 2239700 - RNA, 19 nt, Artificial Sequence
  Description of Artificial Sequence: Synthetic oligonucleotide
  Sense strand starting at position 868 of SEQ ID NO: 1884095
cagguuccugggugaaaca

SEQ ID NO: 2239701 - RNA, 19 nt, Artificial Sequence
  Description of Artificial Sequence: Synthetic oligonucleotide
  Antisense strand to SEQ ID NO: 2239700
uguuucacccaggaaccug

SEQ ID NO: 2239702 - RNA, 19 nt, Artificial Sequence
  Description of Artificial Sequence: Synthetic oligonucleotide
  Sense strand starting at position 967 of SEQ ID NO: 1884095
ccaucuagaucugcaguuu

SEQ ID NO: 2239703 - RNA, 19 nt, Artificial Sequence
  Description of Artificial Sequence: Synthetic oligonucleotide
  Antisense strand to SEQ ID NO: 2239702
aaacugcagaucuagaugg

SEQ ID NO: 2239704 - RNA, 19 nt, Artificial Sequence
  Description of Artificial Sequence: Synthetic oligonucleotide
  Sense strand starting at position 1075 of SEQ ID NO: 1884095
agagucagcuugucauuga

SEQ ID NO: 2239705 - RNA, 19 nt, Artificial Sequence
  Description of Artificial Sequence: Synthetic oligonucleotide
  Antisense strand to SEQ ID NO: 2239704
ucaaugacaagcugacucu

SEQ ID NO: 2239706 - RNA, 19 nt, Artificial Sequence
  Description of Artificial Sequence: Synthetic oligonucleotide
  Sense strand starting at position 1078 of SEQ ID NO: 1884095
gucagcuugucauugaaau

SEQ ID NO: 2239707 - RNA, 19 nt, Artificial Sequence
  Description of Artificial Sequence: Synthetic oligonucleotide
  Antisense strand to SEQ ID NO: 2239706
auuucaaugacaagcugac

SEQ ID NO: 2239708 - RNA, 19 nt, Artificial Sequence
  Description of Artificial Sequence: Synthetic oligonucleotide
  Sense strand starting at position 1079 of SEQ ID NO: 1884095
ucagcuugucauugaaauc

SEQ ID NO: 2239709 - RNA, 19 nt, Artificial Sequence
  Description of Artificial Sequence: Synthetic oligonucleotide
  Antisense strand to SEQ ID NO: 2239708
gauuucaaugacaagcuga

SEQ ID NO: 2239710 - RNA, 19 nt, Artificial Sequence
  Description of Artificial Sequence: Synthetic oligonucleotide
  Sense strand starting at position 1197 of SEQ ID NO: 1884095
ggcugacaucugcgaggaa

SEQ ID NO: 2239711 - RNA, 19 nt, Artificial Sequence
  Description of Artificial Sequence: Synthetic oligonucleotide
  Antisense strand to SEQ ID NO: 2239710
uuccucgcagaugucagcc

SEQ ID NO: 2239712 - RNA, 19 nt, Artificial Sequence
  Description of Artificial Sequence: Synthetic oligonucleotide
  Sense strand starting at position 1345 of SEQ ID NO: 1884095
ggagcagauccuugaccca

SEQ ID NO: 2239713 - RNA, 19 nt, Artificial Sequence
  Description of Artificial Sequence: Synthetic oligonucleotide
  Antisense strand to SEQ ID NO: 2239712
ugggucaaggaucugcucc

SEQ ID NO: 2239714 - RNA, 19 nt, Artificial Sequence
  Description of Artificial Sequence: Synthetic oligonucleotide
  Sense strand starting at position 1501 of SEQ ID NO: 1884095
aacgcucgugucccuuaua

SEQ ID NO: 2239715 - RNA, 19 nt, Artificial Sequence
  Description of Artificial Sequence: Synthetic oligonucleotide
  Antisense strand to SEQ ID NO: 2239714
uauaagggacacgagcguu

SEQ ID NO: 2239716 - RNA, 19 nt, Artificial Sequence
  Description of Artificial Sequence: Synthetic oligonucleotide
  Sense strand starting at position 1579 of SEQ ID NO: 1884095
gggucuaaaucugcuccau

SEQ ID NO: 2239717 - RNA, 19 nt, Artificial Sequence
  Description of Artificial Sequence: Synthetic oligonucleotide
  Antisense strand to SEQ ID NO: 2239716
auggagcagauuuagaccc

SEQ ID NO: 2239718 - RNA, 19 nt, Artificial Sequence
  Description of Artificial Sequence: Synthetic oligonucleotide
  Sense strand starting at position 1873 of SEQ ID NO: 1884095
ucuuccuuccagggagaga

SEQ ID NO: 2239719 - RNA, 19 nt, Artificial Sequence
  Description of Artificial Sequence: Synthetic oligonucleotide
  Antisense strand to SEQ ID NO: 2239718
ucucucccuggaaggaaga

SEQ ID NO: 2239720 - RNA, 19 nt, Artificial Sequence
  Description of Artificial Sequence: Synthetic oligonucleotide
  Sense strand starting at position 2031 of SEQ ID NO: 1884095
guugcuuucccugcaguaa

SEQ ID NO: 2239721 - RNA, 19 nt, Artificial Sequence
  Description of Artificial Sequence: Synthetic oligonucleotide
  Antisense strand to SEQ ID NO: 2239720
uuacugcagggaaagcaac

SEQ ID NO: 2239722 - RNA, 19 nt, Artificial Sequence
  Description of Artificial Sequence: Synthetic oligonucleotide
  Sense strand starting at position 2083 of SEQ ID NO: 1884095
ggguaaggguaaucgaagu

SEQ ID NO: 2239723 - RNA, 19 nt, Artificial Sequence
  Description of Artificial Sequence: Synthetic oligonucleotide
  Antisense strand to SEQ ID NO: 2239722
acuucgauuacccuuaccc

SEQ ID NO: 2239724 - RNA, 19 nt, Artificial Sequence
  Description of Artificial Sequence: Synthetic oligonucleotide
  Sense strand starting at position 2126 of SEQ ID NO: 1884095
ccuccuaguuguccucaga

SEQ ID NO: 2239725 - RNA, 19 nt, Artificial Sequence
  Description of Artificial Sequence: Synthetic oligonucleotide
  Antisense strand to SEQ ID NO: 2239724
ucugaggacaacuaggagg

SEQ ID NO: 2239726 - RNA, 19 nt, Artificial Sequence
  Description of Artificial Sequence: Synthetic oligonucleotide
  Sense strand starting at position 2129 of SEQ ID NO: 1884095
ccuaguuguccucagacuc

SEQ ID NO: 2239727 - RNA, 19 nt, Artificial Sequence
  Description of Artificial Sequence: Synthetic oligonucleotide
  Antisense strand to SEQ ID NO: 2239726
gagucugaggacaacuagg

SEQ ID NO: 2239728 - RNA, 19 nt, Artificial Sequence
  Description of Artificial Sequence: Synthetic oligonucleotide
  Sense strand starting at position 2186 of SEQ ID NO: 1884095
ucuugaggucaucguauac

SEQ ID NO: 2239729 - RNA, 19 nt, Artificial Sequence
  Description of Artificial Sequence: Synthetic oligonucleotide
  Antisense strand to SEQ ID NO: 2239728
guauacgaugaccucaaga

SEQ ID NO: 2239730 - RNA, 19 nt, Artificial Sequence
  Description of Artificial Sequence: Synthetic oligonucleotide
  Sense strand starting at position 3086 of SEQ ID NO: 1884095
gggaaaucuucucaagaug

SEQ ID NO: 2239731 - RNA, 19 nt, Artificial Sequence
  Description of Artificial Sequence: Synthetic oligonucleotide
  Antisense strand to SEQ ID NO: 2239730
caucuugagaagauuuccc

SEQ ID NO: 2239732 - RNA, 19 nt, Artificial Sequence
  Description of Artificial Sequence: Synthetic oligonucleotide
  Sense strand starting at position 3327 of SEQ ID NO: 1884095
aguccuguucucuaaaggu

SEQ ID NO: 2239733 - RNA, 19 nt, Artificial Sequence
  Description of Artificial Sequence: Synthetic oligonucleotide
  Antisense strand to SEQ ID NO: 2239732
accuuuagagaacaggacu

SEQ ID NO: 2239734 - RNA, 19 nt, Artificial Sequence
  Description of Artificial Sequence: Synthetic oligonucleotide
  Sense strand starting at position 3348 of SEQ ID NO: 1884095
uggguugggugcuuuagau

SEQ ID NO: 2239735 - RNA, 19 nt, Artificial Sequence
  Description of Artificial Sequence: Synthetic oligonucleotide
  Antisense strand to SEQ ID NO: 2239734
aucuaaagcacccaaccca

SEQ ID NO: 2239736 - RNA, 19 nt, Artificial Sequence
  Description of Artificial Sequence: Synthetic oligonucleotide
  Sense strand starting at position 3358 of SEQ ID NO: 1884095
gcuuuagauucuuuggguc

SEQ ID NO: 2239737 - RNA, 19 nt, Artificial Sequence
  Description of Artificial Sequence: Synthetic oligonucleotide
  Antisense strand to SEQ ID NO: 2239736
gacccaaagaaucuaaagc

SEQ ID NO: 2239738 - RNA, 19 nt, Artificial Sequence
  Description of Artificial Sequence: Synthetic oligonucleotide
  Sense strand starting at position 3871 of SEQ ID NO: 1884095
uaauucuauuguguguuga

SEQ ID NO: 2239739 - RNA, 19 nt, Artificial Sequence
  Description of Artificial Sequence: Synthetic oligonucleotide
  Antisense strand to SEQ ID NO: 2239738
ucaacacacaauagaauua

SEQ ID NO: 2239740 - RNA, 19 nt, Artificial Sequence
  Description of Artificial Sequence: Synthetic oligonucleotide
  Sense strand starting at position 3873 of SEQ ID NO: 1884095
auucuauuguguguugaga

SEQ ID NO: 2239741 - RNA, 19 nt, Artificial Sequence
  Description of Artificial Sequence: Synthetic oligonucleotide
  Antisense strand to SEQ ID NO: 2239740
ucucaacacacaauagaau

SEQ ID NO: 2239742 - RNA, 19 nt, Artificial Sequence
  Description of Artificial Sequence: Synthetic oligonucleotide
  Sense strand starting at position 3884 of SEQ ID NO: 1884095
uguugagaaguuuauuaac

SEQ ID NO: 2239743 - RNA, 19 nt, Artificial Sequence
  Description of Artificial Sequence: Synthetic oligonucleotide
  Antisense strand to SEQ ID NO: 2239742
guuaauaaacuucucaaca

SEQ ID NO: 2239744 - RNA, 19 nt, Artificial Sequence
  Description of Artificial Sequence: Synthetic oligonucleotide
  Sense strand starting at position 3905 of SEQ ID NO: 1884095
ucccaaauagucgauuauu

SEQ ID NO: 2239745 - RNA, 19 nt, Artificial Sequence
  Description of Artificial Sequence: Synthetic oligonucleotide
  Antisense strand to SEQ ID NO: 2239744
aauaaucgacuauuuggga

SEQ ID NO: 2239746 - RNA, 19 nt, Artificial Sequence
  Description of Artificial Sequence: Synthetic oligonucleotide
  Sense strand starting at position 21 of SEQ ID NO: 1884096
gucuacugugguuauaaau

SEQ ID NO: 2239747 - RNA, 19 nt, Artificial Sequence
  Description of Artificial Sequence: Synthetic oligonucleotide
  Antisense strand to SEQ ID NO: 2239746
auuuauaaccacaguagac

SEQ ID NO: 2239748 - RNA, 19 nt, Artificial Sequence
  Description of Artificial Sequence: Synthetic oligonucleotide
  Sense strand starting at position 117 of SEQ ID NO: 1884096
uagugaaaugauuagugca

SEQ ID NO: 2239749 - RNA, 19 nt, Artificial Sequence
  Description of Artificial Sequence: Synthetic oligonucleotide
  Antisense strand to SEQ ID NO: 2239748
ugcacuaaucauuucacua

SEQ ID NO: 2239750 - RNA, 19 nt, Artificial Sequence
  Description of Artificial Sequence: Synthetic oligonucleotide
  Sense strand starting at position 124 of SEQ ID NO: 1884096
augauuagugcacaauagu

SEQ ID NO: 2239751 - RNA, 19 nt, Artificial Sequence
  Description of Artificial Sequence: Synthetic oligonucleotide
  Antisense strand to SEQ ID NO: 2239750
acuauugugcacuaaucau

SEQ ID NO: 2239752 - RNA, 19 nt, Artificial Sequence
  Description of Artificial Sequence: Synthetic oligonucleotide
  Sense strand starting at position 146 of SEQ ID NO: 1884096
cgacuucuacaaugaacca

SEQ ID NO: 2239753 - RNA, 19 nt, Artificial Sequence
  Description of Artificial Sequence: Synthetic oligonucleotide
  Antisense strand to SEQ ID NO: 2239752
ugguucauuguagaagucg

SEQ ID NO: 2239754 - RNA, 19 nt, Artificial Sequence
  Description of Artificial Sequence: Synthetic oligonucleotide
  Sense strand starting at position 259 of SEQ ID NO: 1884096
gagacaaauucucuggagu

SEQ ID NO: 2239755 - RNA, 19 nt, Artificial Sequence
  Description of Artificial Sequence: Synthetic oligonucleotide
  Antisense strand to SEQ ID NO: 2239754
acuccagagaauuugucuc

SEQ ID NO: 2239756 - RNA, 19 nt, Artificial Sequence
  Description of Artificial Sequence: Synthetic oligonucleotide
  Sense strand starting at position 260 of SEQ ID NO: 1884096
agacaaauucucuggagug

SEQ ID NO: 2239757 - RNA, 19 nt, Artificial Sequence
  Description of Artificial Sequence: Synthetic oligonucleotide
  Antisense strand to SEQ ID NO: 2239756
cacuccagagaauuugucu

SEQ ID NO: 2239758 - RNA, 19 nt, Artificial Sequence
  Description of Artificial Sequence: Synthetic oligonucleotide
  Sense strand starting at position 262 of SEQ ID NO: 1884096
acaaauucucuggaguguu

SEQ ID NO: 2239759 - RNA, 19 nt, Artificial Sequence
  Description of Artificial Sequence: Synthetic oligonucleotide
  Antisense strand to SEQ ID NO: 2239758
aacacuccagagaauuugu

SEQ ID NO: 2239760 - RNA, 19 nt, Artificial Sequence
  Description of Artificial Sequence: Synthetic oligonucleotide
  Sense strand starting at position 502 of SEQ ID NO: 1884096
auuacaucagaguaacugu

SEQ ID NO: 2239761 - RNA, 19 nt, Artificial Sequence
  Description of Artificial Sequence: Synthetic oligonucleotide
  Antisense strand to SEQ ID NO: 2239760
acaguuacucugauguaau

SEQ ID NO: 2239762 - RNA, 19 nt, Artificial Sequence
  Description of Artificial Sequence: Synthetic oligonucleotide
  Sense strand starting at position 650 of SEQ ID NO: 1884096
ggaaguaaucuguacucau

SEQ ID NO: 2239763 - RNA, 19 nt, Artificial Sequence
  Description of Artificial Sequence: Synthetic oligonucleotide
  Antisense strand to SEQ ID NO: 2239762
augaguacagauuacuucc

SEQ ID NO: 2239764 - RNA, 19 nt, Artificial Sequence
  Description of Artificial Sequence: Synthetic oligonucleotide
  Sense strand starting at position 846 of SEQ ID NO: 1884096
gauaacaaugauuguuuga

SEQ ID NO: 2239765 - RNA, 19 nt, Artificial Sequence
  Description of Artificial Sequence: Synthetic oligonucleotide
  Antisense strand to SEQ ID NO: 2239764
ucaaacaaucauuguuauc

SEQ ID NO: 2239766 - RNA, 19 nt, Artificial Sequence
  Description of Artificial Sequence: Synthetic oligonucleotide
  Sense strand starting at position 849 of SEQ ID NO: 1884096
aacaaugauuguuugaagu

SEQ ID NO: 2239767 - RNA, 19 nt, Artificial Sequence
  Description of Artificial Sequence: Synthetic oligonucleotide
  Antisense strand to SEQ ID NO: 2239766
acuucaaacaaucauuguu

SEQ ID NO: 2239768 - RNA, 19 nt, Artificial Sequence
  Description of Artificial Sequence: Synthetic oligonucleotide
  Sense strand starting at position 1160 of SEQ ID NO: 1884096
gaaagaugaugucuuuccu

SEQ ID NO: 2239769 - RNA, 19 nt, Artificial Sequence
  Description of Artificial Sequence: Synthetic oligonucleotide
  Antisense strand to SEQ ID NO: 2239768
aggaaagacaucaucuuuc

SEQ ID NO: 2239770 - RNA, 19 nt, Artificial Sequence
  Description of Artificial Sequence: Synthetic oligonucleotide
  Sense strand starting at position 1186 of SEQ ID NO: 1884096
uuaggauugcuguaauaua

SEQ ID NO: 2239771 - RNA, 19 nt, Artificial Sequence
  Description of Artificial Sequence: Synthetic oligonucleotide
  Antisense strand to SEQ ID NO: 2239770
uauauuacagcaauccuaa

SEQ ID NO: 2239772 - RNA, 19 nt, Artificial Sequence
  Description of Artificial Sequence: Synthetic oligonucleotide
  Sense strand starting at position 1348 of SEQ ID NO: 1884096
cgugucuuugcugcuaauu

SEQ ID NO: 2239773 - RNA, 19 nt, Artificial Sequence
  Description of Artificial Sequence: Synthetic oligonucleotide
  Antisense strand to SEQ ID NO: 2239772
aauuagcagcaaagacacg

SEQ ID NO: 2239774 - RNA, 19 nt, Artificial Sequence
  Description of Artificial Sequence: Synthetic oligonucleotide
  Sense strand starting at position 1349 of SEQ ID NO: 1884096
gugucuuugcugcuaauua

SEQ ID NO: 2239775 - RNA, 19 nt, Artificial Sequence
  Description of Artificial Sequence: Synthetic oligonucleotide
  Antisense strand to SEQ ID NO: 2239774
uaauuagcagcaaagacac

SEQ ID NO: 2239776 - RNA, 19 nt, Artificial Sequence
  Description of Artificial Sequence: Synthetic oligonucleotide
  Sense strand starting at position 1622 of SEQ ID NO: 1884096
uagguauguuggguauaaa

SEQ ID NO: 2239777 - RNA, 19 nt, Artificial Sequence
  Description of Artificial Sequence: Synthetic oligonucleotide
  Antisense strand to SEQ ID NO: 2239776
uuuauacccaacauaccua

SEQ ID NO: 2239778 - RNA, 19 nt, Artificial Sequence
  Description of Artificial Sequence: Synthetic oligonucleotide
  Sense strand starting at position 1623 of SEQ ID NO: 1884096
agguauguuggguauaaau

SEQ ID NO: 2239779 - RNA, 19 nt, Artificial Sequence
  Description of Artificial Sequence: Synthetic oligonucleotide
  Antisense strand to SEQ ID NO: 2239778
auuuauacccaacauaccu

SEQ ID NO: 2239780 - RNA, 19 nt, Artificial Sequence
  Description of Artificial Sequence: Synthetic oligonucleotide
  Sense strand starting at position 1625 of SEQ ID NO: 1884096
guauguuggguauaaauug

SEQ ID NO: 2239781 - RNA, 19 nt, Artificial Sequence
  Description of Artificial Sequence: Synthetic oligonucleotide
  Antisense strand to SEQ ID NO: 2239780
caauuuauacccaacauac

SEQ ID NO: 2239782 - RNA, 19 nt, Artificial Sequence
  Description of Artificial Sequence: Synthetic oligonucleotide
  Sense strand starting at position 1630 of SEQ ID NO: 1884096
uuggguauaaauugugaua

SEQ ID NO: 2239783 - RNA, 19 nt, Artificial Sequence
  Description of Artificial Sequence: Synthetic oligonucleotide
  Antisense strand to SEQ ID NO: 2239782
uaucacaauuuauacccaa

SEQ ID NO: 2239784 - RNA, 19 nt, Artificial Sequence
  Description of Artificial Sequence: Synthetic oligonucleotide
  Sense strand starting at position 1742 of SEQ ID NO: 1884096
uggagaaagucugcagaau

SEQ ID NO: 2239785 - RNA, 19 nt, Artificial Sequence
  Description of Artificial Sequence: Synthetic oligonucleotide
  Antisense strand to SEQ ID NO: 2239784
auucugcagacuuucucca

SEQ ID NO: 2239786 - RNA, 19 nt, Artificial Sequence
  Description of Artificial Sequence: Synthetic oligonucleotide
  Sense strand starting at position 1813 of SEQ ID NO: 1884096
ucacaauugugagcuauaa

SEQ ID NO: 2239787 - RNA, 19 nt, Artificial Sequence
  Description of Artificial Sequence: Synthetic oligonucleotide
  Antisense strand to SEQ ID NO: 2239786
uuauagcucacaauuguga

SEQ ID NO: 2239788 - RNA, 19 nt, Artificial Sequence
  Description of Artificial Sequence: Synthetic oligonucleotide
  Sense strand starting at position 2030 of SEQ ID NO: 1884096
cugaaauuccgugaccuug

SEQ ID NO: 2239789 - RNA, 19 nt, Artificial Sequence
  Description of Artificial Sequence: Synthetic oligonucleotide
  Antisense strand to SEQ ID NO: 2239788
caaggucacggaauuucag

SEQ ID NO: 2239790 - RNA, 19 nt, Artificial Sequence
  Description of Artificial Sequence: Synthetic oligonucleotide
  Sense strand starting at position 2257 of SEQ ID NO: 1884096
agauaaugccuauagaguu

SEQ ID NO: 2239791 - RNA, 19 nt, Artificial Sequence
  Description of Artificial Sequence: Synthetic oligonucleotide
  Antisense strand to SEQ ID NO: 2239790
aacucuauaggcauuaucu

SEQ ID NO: 2239792 - RNA, 19 nt, Artificial Sequence
  Description of Artificial Sequence: Synthetic oligonucleotide
  Sense strand starting at position 2265 of SEQ ID NO: 1884096
ccuauagaguucuugaaau

SEQ ID NO: 2239793 - RNA, 19 nt, Artificial Sequence
  Description of Artificial Sequence: Synthetic oligonucleotide
  Antisense strand to SEQ ID NO: 2239792
auuucaagaacucuauagg

SEQ ID NO: 2239794 - RNA, 19 nt, Artificial Sequence
  Description of Artificial Sequence: Synthetic oligonucleotide
  Sense strand starting at position 2290 of SEQ ID NO: 1884096
ggagguaauguuggucaaa

SEQ ID NO: 2239795 - RNA, 19 nt, Artificial Sequence
  Description of Artificial Sequence: Synthetic oligonucleotide
  Antisense strand to SEQ ID NO: 2239794
uuugaccaacauuaccucc

SEQ ID NO: 2239796 - RNA, 19 nt, Artificial Sequence
  Description of Artificial Sequence: Synthetic oligonucleotide
  Sense strand starting at position 2348 of SEQ ID NO: 1884096
aagggcagguguuuaugaa

SEQ ID NO: 2239797 - RNA, 19 nt, Artificial Sequence
  Description of Artificial Sequence: Synthetic oligonucleotide
  Antisense strand to SEQ ID NO: 2239796
uucauaaacaccugcccuu

SEQ ID NO: 2239798 - RNA, 19 nt, Artificial Sequence
  Description of Artificial Sequence: Synthetic oligonucleotide
  Sense strand starting at position 2426 of SEQ ID NO: 1884096
uagguccuugggcaaauua

SEQ ID NO: 2239799 - RNA, 19 nt, Artificial Sequence
  Description of Artificial Sequence: Synthetic oligonucleotide
  Antisense strand to SEQ ID NO: 2239798
uaauuugcccaaggaccua

SEQ ID NO: 2239800 - RNA, 19 nt, Artificial Sequence
  Description of Artificial Sequence: Synthetic oligonucleotide
  Sense strand starting at position 2477 of SEQ ID NO: 1884096
guauguaugguugaugaua

SEQ ID NO: 2239801 - RNA, 19 nt, Artificial Sequence
  Description of Artificial Sequence: Synthetic oligonucleotide
  Antisense strand to SEQ ID NO: 2239800
uaucaucaaccauacauac

SEQ ID NO: 2239802 - RNA, 19 nt, Artificial Sequence
  Description of Artificial Sequence: Synthetic oligonucleotide
  Sense strand starting at position 2581 of SEQ ID NO: 1884096
ucuauauauuugcuaucgu

SEQ ID NO: 2239803 - RNA, 19 nt, Artificial Sequence
  Description of Artificial Sequence: Synthetic oligonucleotide
  Antisense strand to SEQ ID NO: 2239802
acgauagcaaauauauaga

SEQ ID NO: 2239804 - RNA, 19 nt, Artificial Sequence
  Description of Artificial Sequence: Synthetic oligonucleotide
  Sense strand starting at position 2588 of SEQ ID NO: 1884096
auuugcuaucgucaucauu

SEQ ID NO: 2239805 - RNA, 19 nt, Artificial Sequence
  Description of Artificial Sequence: Synthetic oligonucleotide
  Antisense strand to SEQ ID NO: 2239804
aaugaugacgauagcaaau

SEQ ID NO: 2239806 - RNA, 19 nt, Artificial Sequence
  Description of Artificial Sequence: Synthetic oligonucleotide
  Sense strand starting at position 2631 of SEQ ID NO: 1884096
cauagccuagggugaaauu

SEQ ID NO: 2239807 - RNA, 19 nt, Artificial Sequence
  Description of Artificial Sequence: Synthetic oligonucleotide
  Antisense strand to SEQ ID NO: 2239806
aauuucacccuaggcuaug

SEQ ID NO: 2239808 - RNA, 19 nt, Artificial Sequence
  Description of Artificial Sequence: Synthetic oligonucleotide
  Sense strand starting at position 3392 of SEQ ID NO: 1884096
ggaguauaauuugacaaau

SEQ ID NO: 2239809 - RNA, 19 nt, Artificial Sequence
  Description of Artificial Sequence: Synthetic oligonucleotide
  Antisense strand to SEQ ID NO: 2239808
auuugucaaauuauacucc

SEQ ID NO: 2239810 - RNA, 19 nt, Artificial Sequence
  Description of Artificial Sequence: Synthetic oligonucleotide
  Sense strand starting at position 3432 of SEQ ID NO: 1884096
augucaaacucugcugaga

SEQ ID NO: 2239811 - RNA, 19 nt, Artificial Sequence
  Description of Artificial Sequence: Synthetic oligonucleotide
  Antisense strand to SEQ ID NO: 2239810
ucucagcagaguuugacau

SEQ ID NO: 2239812 - RNA, 19 nt, Artificial Sequence
  Description of Artificial Sequence: Synthetic oligonucleotide
  Sense strand starting at position 3435 of SEQ ID NO: 1884096
ucaaacucugcugagaacu

SEQ ID NO: 2239813 - RNA, 19 nt, Artificial Sequence
  Description of Artificial Sequence: Synthetic oligonucleotide
  Antisense strand to SEQ ID NO: 2239812
aguucucagcagaguuuga

SEQ ID NO: 2239814 - RNA, 19 nt, Artificial Sequence
  Description of Artificial Sequence: Synthetic oligonucleotide
  Sense strand starting at position 3478 of SEQ ID NO: 1884096
aaauccuuucuguggagga

SEQ ID NO: 2239815 - RNA, 19 nt, Artificial Sequence
  Description of Artificial Sequence: Synthetic oligonucleotide
  Antisense strand to SEQ ID NO: 2239814
uccuccacagaaaggauuu

SEQ ID NO: 2239816 - RNA, 19 nt, Artificial Sequence
  Description of Artificial Sequence: Synthetic oligonucleotide
  Sense strand starting at position 3480 of SEQ ID NO: 1884096
auccuuucuguggaggagu

SEQ ID NO: 2239817 - RNA, 19 nt, Artificial Sequence
  Description of Artificial Sequence: Synthetic oligonucleotide
  Antisense strand to SEQ ID NO: 2239816
acuccuccacagaaaggau

SEQ ID NO: 2239818 - RNA, 19 nt, Artificial Sequence
  Description of Artificial Sequence: Synthetic oligonucleotide
  Sense strand starting at position 3488 of SEQ ID NO: 1884096
uguggaggaguucagcauu

SEQ ID NO: 2239819 - RNA, 19 nt, Artificial Sequence
  Description of Artificial Sequence: Synthetic oligonucleotide
  Antisense strand to SEQ ID NO: 2239818
aaugcugaacuccuccaca

SEQ ID NO: 2239820 - RNA, 19 nt, Artificial Sequence
  Description of Artificial Sequence: Synthetic oligonucleotide
  Sense strand starting at position 3525 of SEQ ID NO: 1884096
guugguuggcugagucgaa

SEQ ID NO: 2239821 - RNA, 19 nt, Artificial Sequence
  Description of Artificial Sequence: Synthetic oligonucleotide
  Antisense strand to SEQ ID NO: 2239820
uucgacucagccaaccaac

SEQ ID NO: 2239822 - RNA, 19 nt, Artificial Sequence
  Description of Artificial Sequence: Synthetic oligonucleotide
  Sense strand starting at position 3609 of SEQ ID NO: 1884096
acugauaugugagcagaaa

SEQ ID NO: 2239823 - RNA, 19 nt, Artificial Sequence
  Description of Artificial Sequence: Synthetic oligonucleotide
  Antisense strand to SEQ ID NO: 2239822
uuucugcucacauaucagu

SEQ ID NO: 2239824 - RNA, 19 nt, Artificial Sequence
  Description of Artificial Sequence: Synthetic oligonucleotide
  Sense strand starting at position 3803 of SEQ ID NO: 1884096
gagagauauuaggcaucau

SEQ ID NO: 2239825 - RNA, 19 nt, Artificial Sequence
  Description of Artificial Sequence: Synthetic oligonucleotide
  Antisense strand to SEQ ID NO: 2239824
augaugccuaauaucucuc

SEQ ID NO: 2239826 - RNA, 19 nt, Artificial Sequence
  Description of Artificial Sequence: Synthetic oligonucleotide
  Sense strand starting at position 59 of SEQ ID NO: 1884097
gugaacuuccaccgacaau

SEQ ID NO: 2239827 - RNA, 19 nt, Artificial Sequence
  Description of Artificial Sequence: Synthetic oligonucleotide
  Antisense strand to SEQ ID NO: 2239826
auugucgguggaaguucac

SEQ ID NO: 2239828 - RNA, 19 nt, Artificial Sequence
  Description of Artificial Sequence: Synthetic oligonucleotide
  Sense strand starting at position 68 of SEQ ID NO: 1884097
caccgacaaucguuuaaau

SEQ ID NO: 2239829 - RNA, 19 nt, Artificial Sequence
  Description of Artificial Sequence: Synthetic oligonucleotide
  Antisense strand to SEQ ID NO: 2239828
auuuaaacgauugucggug

SEQ ID NO: 2239830 - RNA, 19 nt, Artificial Sequence
  Description of Artificial Sequence: Synthetic oligonucleotide
  Sense strand starting at position 70 of SEQ ID NO: 1884097
ccgacaaucguuuaaauac

SEQ ID NO: 2239831 - RNA, 19 nt, Artificial Sequence
  Description of Artificial Sequence: Synthetic oligonucleotide
  Antisense strand to SEQ ID NO: 2239830
guauuuaaacgauugucgg

SEQ ID NO: 2239832 - RNA, 19 nt, Artificial Sequence
  Description of Artificial Sequence: Synthetic oligonucleotide
  Sense strand starting at position 106 of SEQ ID NO: 1884097
uucuuauugugagcaccua

SEQ ID NO: 2239833 - RNA, 19 nt, Artificial Sequence
  Description of Artificial Sequence: Synthetic oligonucleotide
  Antisense strand to SEQ ID NO: 2239832
uaggugcucacaauaagaa

SEQ ID NO: 2239834 - RNA, 19 nt, Artificial Sequence
  Description of Artificial Sequence: Synthetic oligonucleotide
  Sense strand starting at position 121 of SEQ ID NO: 1884097
ccuacugagcucuguuuaa

SEQ ID NO: 2239835 - RNA, 19 nt, Artificial Sequence
  Description of Artificial Sequence: Synthetic oligonucleotide
  Antisense strand to SEQ ID NO: 2239834
uuaaacagagcucaguagg

SEQ ID NO: 2239836 - RNA, 19 nt, Artificial Sequence
  Description of Artificial Sequence: Synthetic oligonucleotide
  Sense strand starting at position 125 of SEQ ID NO: 1884097
cugagcucuguuuaauauu

SEQ ID NO: 2239837 - RNA, 19 nt, Artificial Sequence
  Description of Artificial Sequence: Synthetic oligonucleotide
  Antisense strand to SEQ ID NO: 2239836
aauauuaaacagagcucag

SEQ ID NO: 2239838 - RNA, 19 nt, Artificial Sequence
  Description of Artificial Sequence: Synthetic oligonucleotide
  Sense strand starting at position 133 of SEQ ID NO: 1884097
uguuuaauauuugggagag

SEQ ID NO: 2239839 - RNA, 19 nt, Artificial Sequence
  Description of Artificial Sequence: Synthetic oligonucleotide
  Antisense strand to SEQ ID NO: 2239838
cucucccaaauauuaaaca

SEQ ID NO: 2239840 - RNA, 19 nt, Artificial Sequence
  Description of Artificial Sequence: Synthetic oligonucleotide
  Sense strand starting at position 134 of SEQ ID NO: 1884097
guuuaauauuugggagagg

SEQ ID NO: 2239841 - RNA, 19 nt, Artificial Sequence
  Description of Artificial Sequence: Synthetic oligonucleotide
  Antisense strand to SEQ ID NO: 2239840
ccucucccaaauauuaaac

SEQ ID NO: 2239842 - RNA, 19 nt, Artificial Sequence
  Description of Artificial Sequence: Synthetic oligonucleotide
  Sense strand starting at position 916 of SEQ ID NO: 1884097
cuucucaggccgugaaaga

SEQ ID NO: 2239843 - RNA, 19 nt, Artificial Sequence
  Description of Artificial Sequence: Synthetic oligonucleotide
  Antisense strand to SEQ ID NO: 2239842
ucuuucacggccugagaag

SEQ ID NO: 2239844 - RNA, 19 nt, Artificial Sequence
  Description of Artificial Sequence: Synthetic oligonucleotide
  Sense strand starting at position 917 of SEQ ID NO: 1884097
uucucaggccgugaaagau

SEQ ID NO: 2239845 - RNA, 19 nt, Artificial Sequence
  Description of Artificial Sequence: Synthetic oligonucleotide
  Antisense strand to SEQ ID NO: 2239844
aucuuucacggccugagaa

SEQ ID NO: 2239846 - RNA, 19 nt, Artificial Sequence
  Description of Artificial Sequence: Synthetic oligonucleotide
  Sense strand starting at position 923 of SEQ ID NO: 1884097
ggccgugaaagaugggaaa

SEQ ID NO: 2239847 - RNA, 19 nt, Artificial Sequence
  Description of Artificial Sequence: Synthetic oligonucleotide
  Antisense strand to SEQ ID NO: 2239846
uuucccaucuuucacggcc

SEQ ID NO: 2239848 - RNA, 19 nt, Artificial Sequence
  Description of Artificial Sequence: Synthetic oligonucleotide
  Sense strand starting at position 990 of SEQ ID NO: 1884097
cuguaccuccugggaugaa

SEQ ID NO: 2239849 - RNA, 19 nt, Artificial Sequence
  Description of Artificial Sequence: Synthetic oligonucleotide
  Antisense strand to SEQ ID NO: 2239848
uucaucccaggagguacag

SEQ ID NO: 2239850 - RNA, 19 nt, Artificial Sequence
  Description of Artificial Sequence: Synthetic oligonucleotide
  Sense strand starting at position 2021 of SEQ ID NO: 1884097
gugagaagcuugguccaaa

SEQ ID NO: 2239851 - RNA, 19 nt, Artificial Sequence
  Description of Artificial Sequence: Synthetic oligonucleotide
  Antisense strand to SEQ ID NO: 2239850
uuuggaccaagcuucucac

SEQ ID NO: 2239852 - RNA, 19 nt, Artificial Sequence
  Description of Artificial Sequence: Synthetic oligonucleotide
  Sense strand starting at position 2022 of SEQ ID NO: 1884097
ugagaagcuugguccaaau

SEQ ID NO: 2239853 - RNA, 19 nt, Artificial Sequence
  Description of Artificial Sequence: Synthetic oligonucleotide
  Antisense strand to SEQ ID NO: 2239852
auuuggaccaagcuucuca

SEQ ID NO: 2239854 - RNA, 19 nt, Artificial Sequence
  Description of Artificial Sequence: Synthetic oligonucleotide
  Sense strand starting at position 2024 of SEQ ID NO: 1884097
agaagcuugguccaaauca

SEQ ID NO: 2239855 - RNA, 19 nt, Artificial Sequence
  Description of Artificial Sequence: Synthetic oligonucleotide
  Antisense strand to SEQ ID NO: 2239854
ugauuuggaccaagcuucu

SEQ ID NO: 2239856 - RNA, 19 nt, Artificial Sequence
  Description of Artificial Sequence: Synthetic oligonucleotide
  Sense strand starting at position 2031 of SEQ ID NO: 1884097
ugguccaaaucaccugaaa

SEQ ID NO: 2239857 - RNA, 19 nt, Artificial Sequence
  Description of Artificial Sequence: Synthetic oligonucleotide
  Antisense strand to SEQ ID NO: 2239856
uuucaggugauuuggacca

SEQ ID NO: 2239858 - RNA, 19 nt, Artificial Sequence
  Description of Artificial Sequence: Synthetic oligonucleotide
  Sense strand starting at position 2061 of SEQ ID NO: 1884097
ugcauaguuuaccugaaga

SEQ ID NO: 2239859 - RNA, 19 nt, Artificial Sequence
  Description of Artificial Sequence: Synthetic oligonucleotide
  Antisense strand to SEQ ID NO: 2239858
ucuucagguaaacuaugca

SEQ ID NO: 2239860 - RNA, 19 nt, Artificial Sequence
  Description of Artificial Sequence: Synthetic oligonucleotide
  Sense strand starting at position 2082 of SEQ ID NO: 1884097
ggauuucuauaauggaauc

SEQ ID NO: 2239861 - RNA, 19 nt, Artificial Sequence
  Description of Artificial Sequence: Synthetic oligonucleotide
  Antisense strand to SEQ ID NO: 2239860
gauuccauuauagaaaucc

SEQ ID NO: 2239862 - RNA, 19 nt, Artificial Sequence
  Description of Artificial Sequence: Synthetic oligonucleotide
  Sense strand starting at position 2241 of SEQ ID NO: 1884097
uuacauacgugcuuggaau

SEQ ID NO: 2239863 - RNA, 19 nt, Artificial Sequence
  Description of Artificial Sequence: Synthetic oligonucleotide
  Antisense strand to SEQ ID NO: 2239862
auuccaagcacguauguaa

SEQ ID NO: 2239864 - RNA, 19 nt, Artificial Sequence
  Description of Artificial Sequence: Synthetic oligonucleotide
  Sense strand starting at position 2242 of SEQ ID NO: 1884097
uacauacgugcuuggaauu

SEQ ID NO: 2239865 - RNA, 19 nt, Artificial Sequence
  Description of Artificial Sequence: Synthetic oligonucleotide
  Antisense strand to SEQ ID NO: 2239864
aauuccaagcacguaugua

SEQ ID NO: 2239866 - RNA, 19 nt, Artificial Sequence
  Description of Artificial Sequence: Synthetic oligonucleotide
  Sense strand starting at position 2306 of SEQ ID NO: 1884097
ggcugaggauaaucuaugu

SEQ ID NO: 2239867 - RNA, 19 nt, Artificial Sequence
  Description of Artificial Sequence: Synthetic oligonucleotide
  Antisense strand to SEQ ID NO: 2239866
acauagauuauccucagcc

SEQ ID NO: 2239868 - RNA, 19 nt, Artificial Sequence
  Description of Artificial Sequence: Synthetic oligonucleotide
  Sense strand starting at position 2310 of SEQ ID NO: 1884097
gaggauaaucuauguggcu

SEQ ID NO: 2239869 - RNA, 19 nt, Artificial Sequence
  Description of Artificial Sequence: Synthetic oligonucleotide
  Antisense strand to SEQ ID NO: 2239868
agccacauagauuauccuc

SEQ ID NO: 2239870 - RNA, 19 nt, Artificial Sequence
  Description of Artificial Sequence: Synthetic oligonucleotide
  Sense strand starting at position 2311 of SEQ ID NO: 1884097
aggauaaucuauguggcuu

SEQ ID NO: 2239871 - RNA, 19 nt, Artificial Sequence
  Description of Artificial Sequence: Synthetic oligonucleotide
  Antisense strand to SEQ ID NO: 2239870
aagccacauagauuauccu

SEQ ID NO: 2239872 - RNA, 19 nt, Artificial Sequence
  Description of Artificial Sequence: Synthetic oligonucleotide
  Sense strand starting at position 2312 of SEQ ID NO: 1884097
ggauaaucuauguggcuuu

SEQ ID NO: 2239873 - RNA, 19 nt, Artificial Sequence
  Description of Artificial Sequence: Synthetic oligonucleotide
  Antisense strand to SEQ ID NO: 2239872
aaagccacauagauuaucc

SEQ ID NO: 2239874 - RNA, 19 nt, Artificial Sequence
  Description of Artificial Sequence: Synthetic oligonucleotide
  Sense strand starting at position 2401 of SEQ ID NO: 1884097
auugauauggguuacaguu

SEQ ID NO: 2239875 - RNA, 19 nt, Artificial Sequence
  Description of Artificial Sequence: Synthetic oligonucleotide
  Antisense strand to SEQ ID NO: 2239874
aacuguaacccauaucaau

SEQ ID NO: 2239876 - RNA, 19 nt, Artificial Sequence
  Description of Artificial Sequence: Synthetic oligonucleotide
  Sense strand starting at position 2700 of SEQ ID NO: 1884097
gauaguguauaaguauguu

SEQ ID NO: 2239877 - RNA, 19 nt, Artificial Sequence
  Description of Artificial Sequence: Synthetic oligonucleotide
  Antisense strand to SEQ ID NO: 2239876
aacauacuuauacacuauc

SEQ ID NO: 2239878 - RNA, 19 nt, Artificial Sequence
  Description of Artificial Sequence: Synthetic oligonucleotide
  Sense strand starting at position 2706 of SEQ ID NO: 1884097
guauaaguauguucuguug

SEQ ID NO: 2239879 - RNA, 19 nt, Artificial Sequence
  Description of Artificial Sequence: Synthetic oligonucleotide
  Antisense strand to SEQ ID NO: 2239878
caacagaacauacuuauac

SEQ ID NO: 2239880 - RNA, 19 nt, Artificial Sequence
  Description of Artificial Sequence: Synthetic oligonucleotide
  Sense strand starting at position 2878 of SEQ ID NO: 1884097
agaguuugcagcuaugagu

SEQ ID NO: 2239881 - RNA, 19 nt, Artificial Sequence
  Description of Artificial Sequence: Synthetic oligonucleotide
  Antisense strand to SEQ ID NO: 2239880
acucauagcugcaaacucu

SEQ ID NO: 2239882 - RNA, 19 nt, Artificial Sequence
  Description of Artificial Sequence: Synthetic oligonucleotide
  Sense strand starting at position 2885 of SEQ ID NO: 1884097
gcagcuaugaguugagaaa

SEQ ID NO: 2239883 - RNA, 19 nt, Artificial Sequence
  Description of Artificial Sequence: Synthetic oligonucleotide
  Antisense strand to SEQ ID NO: 2239882
uuucucaacucauagcugc

SEQ ID NO: 2239884 - RNA, 19 nt, Artificial Sequence
  Description of Artificial Sequence: Synthetic oligonucleotide
  Sense strand starting at position 2927 of SEQ ID NO: 1884097
ugaauaauccacugugccu

SEQ ID NO: 2239885 - RNA, 19 nt, Artificial Sequence
  Description of Artificial Sequence: Synthetic oligonucleotide
  Antisense strand to SEQ ID NO: 2239884
aggcacaguggauuauuca

SEQ ID NO: 2239886 - RNA, 19 nt, Artificial Sequence
  Description of Artificial Sequence: Synthetic oligonucleotide
  Sense strand starting at position 3030 of SEQ ID NO: 1884097
ccuacaugauguuuaaaga

SEQ ID NO: 2239887 - RNA, 19 nt, Artificial Sequence
  Description of Artificial Sequence: Synthetic oligonucleotide
  Antisense strand to SEQ ID NO: 2239886
ucuuuaaacaucauguagg

SEQ ID NO: 2239888 - RNA, 19 nt, Artificial Sequence
  Description of Artificial Sequence: Synthetic oligonucleotide
  Sense strand starting at position 3119 of SEQ ID NO: 1884097
cuauuuaucuaguauccag

SEQ ID NO: 2239889 - RNA, 19 nt, Artificial Sequence
  Description of Artificial Sequence: Synthetic oligonucleotide
  Antisense strand to SEQ ID NO: 2239888
cuggauacuagauaaauag

SEQ ID NO: 2239890 - RNA, 19 nt, Artificial Sequence
  Description of Artificial Sequence: Synthetic oligonucleotide
  Sense strand starting at position 3188 of SEQ ID NO: 1884097
ucacuuucucugcagugau

SEQ ID NO: 2239891 - RNA, 19 nt, Artificial Sequence
  Description of Artificial Sequence: Synthetic oligonucleotide
  Antisense strand to SEQ ID NO: 2239890
aucacugcagagaaaguga

SEQ ID NO: 2239892 - RNA, 19 nt, Artificial Sequence
  Description of Artificial Sequence: Synthetic oligonucleotide
  Sense strand starting at position 3191 of SEQ ID NO: 1884097
cuuucucugcagugauaac

SEQ ID NO: 2239893 - RNA, 19 nt, Artificial Sequence
  Description of Artificial Sequence: Synthetic oligonucleotide
  Antisense strand to SEQ ID NO: 2239892
guuaucacugcagagaaag

SEQ ID NO: 2239894 - RNA, 19 nt, Artificial Sequence
  Description of Artificial Sequence: Synthetic oligonucleotide
  Sense strand starting at position 3628 of SEQ ID NO: 1884097
ccugguccuuugcucaaua

SEQ ID NO: 2239895 - RNA, 19 nt, Artificial Sequence
  Description of Artificial Sequence: Synthetic oligonucleotide
  Antisense strand to SEQ ID NO: 2239894
uauugagcaaaggaccagg

SEQ ID NO: 2239896 - RNA, 19 nt, Artificial Sequence
  Description of Artificial Sequence: Synthetic oligonucleotide
  Sense strand starting at position 3629 of SEQ ID NO: 1884097
cugguccuuugcucaauau

SEQ ID NO: 2239897 - RNA, 19 nt, Artificial Sequence
  Description of Artificial Sequence: Synthetic oligonucleotide
  Antisense strand to SEQ ID NO: 2239896
auauugagcaaaggaccag

SEQ ID NO: 2239898 - RNA, 19 nt, Artificial Sequence
  Description of Artificial Sequence: Synthetic oligonucleotide
  Sense strand starting at position 3630 of SEQ ID NO: 1884097
ugguccuuugcucaauauu

SEQ ID NO: 2239899 - RNA, 19 nt, Artificial Sequence
  Description of Artificial Sequence: Synthetic oligonucleotide
  Antisense strand to SEQ ID NO: 2239898
aauauugagcaaaggacca

SEQ ID NO: 2239900 - RNA, 19 nt, Artificial Sequence
  Description of Artificial Sequence: Synthetic oligonucleotide
  Sense strand starting at position 3680 of SEQ ID NO: 1884097
cuaaaugcucauuguguga

SEQ ID NO: 2239901 - RNA, 19 nt, Artificial Sequence
  Description of Artificial Sequence: Synthetic oligonucleotide
  Antisense strand to SEQ ID NO: 2239900
ucacacaaugagcauuuag

SEQ ID NO: 2239902 - RNA, 19 nt, Artificial Sequence
  Description of Artificial Sequence: Synthetic oligonucleotide
  Sense strand starting at position 3825 of SEQ ID NO: 1884097
uggcuuucuguuggauaua

SEQ ID NO: 2239903 - RNA, 19 nt, Artificial Sequence
  Description of Artificial Sequence: Synthetic oligonucleotide
  Antisense strand to SEQ ID NO: 2239902
uauauccaacagaaagcca

SEQ ID NO: 2239904 - RNA, 19 nt, Artificial Sequence
  Description of Artificial Sequence: Synthetic oligonucleotide
  Sense strand starting at position 3878 of SEQ ID NO: 1884097
uugacaguuuaugcuaaca

SEQ ID NO: 2239905 - RNA, 19 nt, Artificial Sequence
  Description of Artificial Sequence: Synthetic oligonucleotide
  Antisense strand to SEQ ID NO: 2239904
uguuagcauaaacugucaa

SEQ ID NO: 2239906 - RNA, 19 nt, Artificial Sequence
  Description of Artificial Sequence: Synthetic oligonucleotide
  Sense strand starting at position 36 of SEQ ID NO: 1884098
augaaaccaucuuauggga

SEQ ID NO: 2239907 - RNA, 19 nt, Artificial Sequence
  Description of Artificial Sequence: Synthetic oligonucleotide
  Antisense strand to SEQ ID NO: 2239906
ucccauaagaugguuucau

SEQ ID NO: 2239908 - RNA, 19 nt, Artificial Sequence
  Description of Artificial Sequence: Synthetic oligonucleotide
  Sense strand starting at position 283 of SEQ ID NO: 1884098
gaagguauuuauggagaag

SEQ ID NO: 2239909 - RNA, 19 nt, Artificial Sequence
  Description of Artificial Sequence: Synthetic oligonucleotide
  Antisense strand to SEQ ID NO: 2239908
cuucuccauaaauaccuuc

SEQ ID NO: 2239910 - RNA, 19 nt, Artificial Sequence
  Description of Artificial Sequence: Synthetic oligonucleotide
  Sense strand starting at position 345 of SEQ ID NO: 1884098
gaagaaugcuuauuccagg

SEQ ID NO: 2239911 - RNA, 19 nt, Artificial Sequence
  Description of Artificial Sequence: Synthetic oligonucleotide
  Antisense strand to SEQ ID NO: 2239910
ccuggaauaagcauucuuc

SEQ ID NO: 2239912 - RNA, 19 nt, Artificial Sequence
  Description of Artificial Sequence: Synthetic oligonucleotide
  Sense strand starting at position 474 of SEQ ID NO: 1884098
ccacauauggcuugcauau

SEQ ID NO: 2239913 - RNA, 19 nt, Artificial Sequence
  Description of Artificial Sequence: Synthetic oligonucleotide
  Antisense strand to SEQ ID NO: 2239912
auaugcaagccauaugugg

SEQ ID NO: 2239914 - RNA, 19 nt, Artificial Sequence
  Description of Artificial Sequence: Synthetic oligonucleotide
  Sense strand starting at position 631 of SEQ ID NO: 1884098
auaugaauaaguggauugu

SEQ ID NO: 2239915 - RNA, 19 nt, Artificial Sequence
  Description of Artificial Sequence: Synthetic oligonucleotide
  Antisense strand to SEQ ID NO: 2239914
acaauccacuuauucauau

SEQ ID NO: 2239916 - RNA, 19 nt, Artificial Sequence
  Description of Artificial Sequence: Synthetic oligonucleotide
  Sense strand starting at position 635 of SEQ ID NO: 1884098
gaauaaguggauugucauu

SEQ ID NO: 2239917 - RNA, 19 nt, Artificial Sequence
  Description of Artificial Sequence: Synthetic oligonucleotide
  Antisense strand to SEQ ID NO: 2239916
aaugacaauccacuuauuc

SEQ ID NO: 2239918 - RNA, 19 nt, Artificial Sequence
  Description of Artificial Sequence: Synthetic oligonucleotide
  Sense strand starting at position 637 of SEQ ID NO: 1884098
auaaguggauugucauuau

SEQ ID NO: 2239919 - RNA, 19 nt, Artificial Sequence
  Description of Artificial Sequence: Synthetic oligonucleotide
  Antisense strand to SEQ ID NO: 2239918
auaaugacaauccacuuau

SEQ ID NO: 2239920 - RNA, 19 nt, Artificial Sequence
  Description of Artificial Sequence: Synthetic oligonucleotide
  Sense strand starting at position 640 of SEQ ID NO: 1884098
aguggauugucauuauugu

SEQ ID NO: 2239921 - RNA, 19 nt, Artificial Sequence
  Description of Artificial Sequence: Synthetic oligonucleotide
  Antisense strand to SEQ ID NO: 2239920
acaauaaugacaauccacu

SEQ ID NO: 2239922 - RNA, 19 nt, Artificial Sequence
  Description of Artificial Sequence: Synthetic oligonucleotide
  Sense strand starting at position 641 of SEQ ID NO: 1884098
guggauugucauuauuguu

SEQ ID NO: 2239923 - RNA, 19 nt, Artificial Sequence
  Description of Artificial Sequence: Synthetic oligonucleotide
  Antisense strand to SEQ ID NO: 2239922
aacaauaaugacaauccac

SEQ ID NO: 2239924 - RNA, 19 nt, Artificial Sequence
  Description of Artificial Sequence: Synthetic oligonucleotide
  Sense strand starting at position 693 of SEQ ID NO: 1884098
gaacuaaguuggcugugau

SEQ ID NO: 2239925 - RNA, 19 nt, Artificial Sequence
  Description of Artificial Sequence: Synthetic oligonucleotide
  Antisense strand to SEQ ID NO: 2239924
aucacagccaacuuaguuc

SEQ ID NO: 2239926 - RNA, 19 nt, Artificial Sequence
  Description of Artificial Sequence: Synthetic oligonucleotide
  Sense strand starting at position 694 of SEQ ID NO: 1884098
aacuaaguuggcugugaug

SEQ ID NO: 2239927 - RNA, 19 nt, Artificial Sequence
  Description of Artificial Sequence: Synthetic oligonucleotide
  Antisense strand to SEQ ID NO: 2239926
caucacagccaacuuaguu

SEQ ID NO: 2239928 - RNA, 19 nt, Artificial Sequence
  Description of Artificial Sequence: Synthetic oligonucleotide
  Sense strand starting at position 760 of SEQ ID NO: 1884098
ucuugugacaauggacgua

SEQ ID NO: 2239929 - RNA, 19 nt, Artificial Sequence
  Description of Artificial Sequence: Synthetic oligonucleotide
  Antisense strand to SEQ ID NO: 2239928
uacguccauugucacaaga

SEQ ID NO: 2239930 - RNA, 19 nt, Artificial Sequence
  Description of Artificial Sequence: Synthetic oligonucleotide
  Sense strand starting at position 835 of SEQ ID NO: 1884098
aacuguuuccacugaagag

SEQ ID NO: 2239931 - RNA, 19 nt, Artificial Sequence
  Description of Artificial Sequence: Synthetic oligonucleotide
  Antisense strand to SEQ ID NO: 2239930
cucuucaguggaaacaguu

SEQ ID NO: 2239932 - RNA, 19 nt, Artificial Sequence
  Description of Artificial Sequence: Synthetic oligonucleotide
  Sense strand starting at position 998 of SEQ ID NO: 1884098
ggcaucuucccaugaggca

SEQ ID NO: 2239933 - RNA, 19 nt, Artificial Sequence
  Description of Artificial Sequence: Synthetic oligonucleotide
  Antisense strand to SEQ ID NO: 2239932
ugccucaugggaagaugcc

SEQ ID NO: 2239934 - RNA, 19 nt, Artificial Sequence
  Description of Artificial Sequence: Synthetic oligonucleotide
  Sense strand starting at position 2040 of SEQ ID NO: 1884098
agaguuagaucagugcuaa

SEQ ID NO: 2239935 - RNA, 19 nt, Artificial Sequence
  Description of Artificial Sequence: Synthetic oligonucleotide
  Antisense strand to SEQ ID NO: 2239934
uuagcacugaucuaacucu

SEQ ID NO: 2239936 - RNA, 19 nt, Artificial Sequence
  Description of Artificial Sequence: Synthetic oligonucleotide
  Sense strand starting at position 2041 of SEQ ID NO: 1884098
gaguuagaucagugcuaaa

SEQ ID NO: 2239937 - RNA, 19 nt, Artificial Sequence
  Description of Artificial Sequence: Synthetic oligonucleotide
  Antisense strand to SEQ ID NO: 2239936
uuuagcacugaucuaacuc

SEQ ID NO: 2239938 - RNA, 19 nt, Artificial Sequence
  Description of Artificial Sequence: Synthetic oligonucleotide
  Sense strand starting at position 2165 of SEQ ID NO: 1884098
gggcuugaggauuauccau

SEQ ID NO: 2239939 - RNA, 19 nt, Artificial Sequence
  Description of Artificial Sequence: Synthetic oligonucleotide
  Antisense strand to SEQ ID NO: 2239938
auggauaauccucaagccc

SEQ ID NO: 2239940 - RNA, 19 nt, Artificial Sequence
  Description of Artificial Sequence: Synthetic oligonucleotide
  Sense strand starting at position 2167 of SEQ ID NO: 1884098
gcuugaggauuauccauga

SEQ ID NO: 2239941 - RNA, 19 nt, Artificial Sequence
  Description of Artificial Sequence: Synthetic oligonucleotide
  Antisense strand to SEQ ID NO: 2239940
ucauggauaauccucaagc

SEQ ID NO: 2239942 - RNA, 19 nt, Artificial Sequence
  Description of Artificial Sequence: Synthetic oligonucleotide
  Sense strand starting at position 2172 of SEQ ID NO: 1884098
aggauuauccaugagcccu

SEQ ID NO: 2239943 - RNA, 19 nt, Artificial Sequence
  Description of Artificial Sequence: Synthetic oligonucleotide
  Antisense strand to SEQ ID NO: 2239942
agggcucauggauaauccu

SEQ ID NO: 2239944 - RNA, 19 nt, Artificial Sequence
  Description of Artificial Sequence: Synthetic oligonucleotide
  Sense strand starting at position 2192 of SEQ ID NO: 1884098
gguacagugguccagacaa

SEQ ID NO: 2239945 - RNA, 19 nt, Artificial Sequence
  Description of Artificial Sequence: Synthetic oligonucleotide
  Antisense strand to SEQ ID NO: 2239944
uugucuggaccacuguacc

SEQ ID NO: 2239946 - RNA, 19 nt, Artificial Sequence
  Description of Artificial Sequence: Synthetic oligonucleotide
  Sense strand starting at position 2216 of SEQ ID NO: 1884098
aagagaacucauugccugu

SEQ ID NO: 2239947 - RNA, 19 nt, Artificial Sequence
  Description of Artificial Sequence: Synthetic oligonucleotide
  Antisense strand to SEQ ID NO: 2239946
acaggcaaugaguucucuu

SEQ ID NO: 2239948 - RNA, 19 nt, Artificial Sequence
  Description of Artificial Sequence: Synthetic oligonucleotide
  Sense strand starting at position 2248 of SEQ ID NO: 1884098
ccuggauugcucggauuuc

SEQ ID NO: 2239949 - RNA, 19 nt, Artificial Sequence
  Description of Artificial Sequence: Synthetic oligonucleotide
  Antisense strand to SEQ ID NO: 2239948
gaaauccgagcaauccagg

SEQ ID NO: 2239950 - RNA, 19 nt, Artificial Sequence
  Description of Artificial Sequence: Synthetic oligonucleotide
  Sense strand starting at position 2380 of SEQ ID NO: 1884098
gcuggacuugggcauguaa

SEQ ID NO: 2239951 - RNA, 19 nt, Artificial Sequence
  Description of Artificial Sequence: Synthetic oligonucleotide
  Antisense strand to SEQ ID NO: 2239950
uuacaugcccaaguccagc

SEQ ID NO: 2239952 - RNA, 19 nt, Artificial Sequence
  Description of Artificial Sequence: Synthetic oligonucleotide
  Sense strand starting at position 2468 of SEQ ID NO: 1884098
ggucccacucaauagucaa

SEQ ID NO: 2239953 - RNA, 19 nt, Artificial Sequence
  Description of Artificial Sequence: Synthetic oligonucleotide
  Antisense strand to SEQ ID NO: 2239952
uugacuauugagugggacc

SEQ ID NO: 2239954 - RNA, 19 nt, Artificial Sequence
  Description of Artificial Sequence: Synthetic oligonucleotide
  Sense strand starting at position 2781 of SEQ ID NO: 1884098
auacuauuuccaugcguga

SEQ ID NO: 2239955 - RNA, 19 nt, Artificial Sequence
  Description of Artificial Sequence: Synthetic oligonucleotide
  Antisense strand to SEQ ID NO: 2239954
ucacgcauggaaauaguau

SEQ ID NO: 2239956 - RNA, 19 nt, Artificial Sequence
  Description of Artificial Sequence: Synthetic oligonucleotide
  Sense strand starting at position 2785 of SEQ ID NO: 1884098
uauuuccaugcgugauagu

SEQ ID NO: 2239957 - RNA, 19 nt, Artificial Sequence
  Description of Artificial Sequence: Synthetic oligonucleotide
  Antisense strand to SEQ ID NO: 2239956
acuaucacgcauggaaaua

SEQ ID NO: 2239958 - RNA, 19 nt, Artificial Sequence
  Description of Artificial Sequence: Synthetic oligonucleotide
  Sense strand starting at position 2786 of SEQ ID NO: 1884098
auuuccaugcgugauaguu

SEQ ID NO: 2239959 - RNA, 19 nt, Artificial Sequence
  Description of Artificial Sequence: Synthetic oligonucleotide
  Antisense strand to SEQ ID NO: 2239958
aacuaucacgcauggaaau

SEQ ID NO: 2239960 - RNA, 19 nt, Artificial Sequence
  Description of Artificial Sequence: Synthetic oligonucleotide
  Sense strand starting at position 2989 of SEQ ID NO: 1884098
guguuccucuugucaggaa

SEQ ID NO: 2239961 - RNA, 19 nt, Artificial Sequence
  Description of Artificial Sequence: Synthetic oligonucleotide
  Antisense strand to SEQ ID NO: 2239960
uuccugacaagaggaacac

SEQ ID NO: 2239962 - RNA, 19 nt, Artificial Sequence
  Description of Artificial Sequence: Synthetic oligonucleotide
  Sense strand starting at position 2996 of SEQ ID NO: 1884098
ucuugucaggaaggauaau

SEQ ID NO: 2239963 - RNA, 19 nt, Artificial Sequence
  Description of Artificial Sequence: Synthetic oligonucleotide
  Antisense strand to SEQ ID NO: 2239962
auuauccuuccugacaaga

SEQ ID NO: 2239964 - RNA, 19 nt, Artificial Sequence
  Description of Artificial Sequence: Synthetic oligonucleotide
  Sense strand starting at position 3015 of SEQ ID NO: 1884098
aucugugaugcaugaacua

SEQ ID NO: 2239965 - RNA, 19 nt, Artificial Sequence
  Description of Artificial Sequence: Synthetic oligonucleotide
  Antisense strand to SEQ ID NO: 2239964
uaguucaugcaucacagau

SEQ ID NO: 2239966 - RNA, 19 nt, Artificial Sequence
  Description of Artificial Sequence: Synthetic oligonucleotide
  Sense strand starting at position 3067 of SEQ ID NO: 1884098
cauauuucccagcgcagua

SEQ ID NO: 2239967 - RNA, 19 nt, Artificial Sequence
  Description of Artificial Sequence: Synthetic oligonucleotide
  Antisense strand to SEQ ID NO: 2239966
uacugcgcugggaaauaug

SEQ ID NO: 2239968 - RNA, 19 nt, Artificial Sequence
  Description of Artificial Sequence: Synthetic oligonucleotide
  Sense strand starting at position 3102 of SEQ ID NO: 1884098
ucacgucagcauuggagau

SEQ ID NO: 2239969 - RNA, 19 nt, Artificial Sequence
  Description of Artificial Sequence: Synthetic oligonucleotide
  Antisense strand to SEQ ID NO: 2239968
aucuccaaugcugacguga

SEQ ID NO: 2239970 - RNA, 19 nt, Artificial Sequence
  Description of Artificial Sequence: Synthetic oligonucleotide
  Sense strand starting at position 3106 of SEQ ID NO: 1884098
gucagcauuggagauuaau

SEQ ID NO: 2239971 - RNA, 19 nt, Artificial Sequence
  Description of Artificial Sequence: Synthetic oligonucleotide
  Antisense strand to SEQ ID NO: 2239970
auuaaucuccaaugcugac

SEQ ID NO: 2239972 - RNA, 19 nt, Artificial Sequence
  Description of Artificial Sequence: Synthetic oligonucleotide
  Sense strand starting at position 3116 of SEQ ID NO: 1884098
gagauuaauuucugggaaa

SEQ ID NO: 2239973 - RNA, 19 nt, Artificial Sequence
  Description of Artificial Sequence: Synthetic oligonucleotide
  Antisense strand to SEQ ID NO: 2239972
uuucccagaaauuaaucuc

SEQ ID NO: 2239974 - RNA, 19 nt, Artificial Sequence
  Description of Artificial Sequence: Synthetic oligonucleotide
  Sense strand starting at position 3117 of SEQ ID NO: 1884098
agauuaauuucugggaaag

SEQ ID NO: 2239975 - RNA, 19 nt, Artificial Sequence
  Description of Artificial Sequence: Synthetic oligonucleotide
  Antisense strand to SEQ ID NO: 2239974
cuuucccagaaauuaaucu

SEQ ID NO: 2239976 - RNA, 19 nt, Artificial Sequence
  Description of Artificial Sequence: Synthetic oligonucleotide
  Sense strand starting at position 3513 of SEQ ID NO: 1884098
auguuucuagcagacagua

SEQ ID NO: 2239977 - RNA, 19 nt, Artificial Sequence
  Description of Artificial Sequence: Synthetic oligonucleotide
  Antisense strand to SEQ ID NO: 2239976
uacugucugcuagaaacau

SEQ ID NO: 2239978 - RNA, 19 nt, Artificial Sequence
  Description of Artificial Sequence: Synthetic oligonucleotide
  Sense strand starting at position 3521 of SEQ ID NO: 1884098
agcagacaguacucuagaa

SEQ ID NO: 2239979 - RNA, 19 nt, Artificial Sequence
  Description of Artificial Sequence: Synthetic oligonucleotide
  Antisense strand to SEQ ID NO: 2239978
uucuagaguacugucugcu

SEQ ID NO: 2239980 - RNA, 19 nt, Artificial Sequence
  Description of Artificial Sequence: Synthetic oligonucleotide
  Sense strand starting at position 3608 of SEQ ID NO: 1884098
aguucuuagguccauguua

SEQ ID NO: 2239981 - RNA, 19 nt, Artificial Sequence
  Description of Artificial Sequence: Synthetic oligonucleotide
  Antisense strand to SEQ ID NO: 2239980
uaacauggaccuaagaacu

SEQ ID NO: 2239982 - RNA, 19 nt, Artificial Sequence
  Description of Artificial Sequence: Synthetic oligonucleotide
  Sense strand starting at position 3610 of SEQ ID NO: 1884098
uucuuagguccauguuaca

SEQ ID NO: 2239983 - RNA, 19 nt, Artificial Sequence
  Description of Artificial Sequence: Synthetic oligonucleotide
  Antisense strand to SEQ ID NO: 2239982
uguaacauggaccuaagaa

SEQ ID NO: 2239984 - RNA, 19 nt, Artificial Sequence
  Description of Artificial Sequence: Synthetic oligonucleotide
  Sense strand starting at position 3837 of SEQ ID NO: 1884098
uuagaauuagugugucaaa

SEQ ID NO: 2239985 - RNA, 19 nt, Artificial Sequence
  Description of Artificial Sequence: Synthetic oligonucleotide
  Antisense strand to SEQ ID NO: 2239984
uuugacacacuaauucuaa

SEQ ID NO: 2239986 - RNA, 19 nt, Artificial Sequence
  Description of Artificial Sequence: Synthetic oligonucleotide
  Sense strand starting at position 89 of SEQ ID NO: 1884099
gagaacaccuucgugaagu

SEQ ID NO: 2239987 - RNA, 19 nt, Artificial Sequence
  Description of Artificial Sequence: Synthetic oligonucleotide
  Antisense strand to SEQ ID NO: 2239986
acuucacgaagguguucuc

SEQ ID NO: 2239988 - RNA, 19 nt, Artificial Sequence
  Description of Artificial Sequence: Synthetic oligonucleotide
  Sense strand starting at position 91 of SEQ ID NO: 1884099
gaacaccuucgugaaguau

SEQ ID NO: 2239989 - RNA, 19 nt, Artificial Sequence
  Description of Artificial Sequence: Synthetic oligonucleotide
  Antisense strand to SEQ ID NO: 2239988
auacuucacgaagguguuc

SEQ ID NO: 2239990 - RNA, 19 nt, Artificial Sequence
  Description of Artificial Sequence: Synthetic oligonucleotide
  Sense strand starting at position 228 of SEQ ID NO: 1884099
gucagaagaugucuuauca

SEQ ID NO: 2239991 - RNA, 19 nt, Artificial Sequence
  Description of Artificial Sequence: Synthetic oligonucleotide
  Antisense strand to SEQ ID NO: 2239990
ugauaagacaucuucugac

SEQ ID NO: 2239992 - RNA, 19 nt, Artificial Sequence
  Description of Artificial Sequence: Synthetic oligonucleotide
  Sense strand starting at position 268 of SEQ ID NO: 1884099
uugggaagccuuuaaguag

SEQ ID NO: 2239993 - RNA, 19 nt, Artificial Sequence
  Description of Artificial Sequence: Synthetic oligonucleotide
  Antisense strand to SEQ ID NO: 2239992
cuacuuaaaggcuucccaa

SEQ ID NO: 2239994 - RNA, 19 nt, Artificial Sequence
  Description of Artificial Sequence: Synthetic oligonucleotide
  Sense strand starting at position 280 of SEQ ID NO: 1884099
uaaguaguucgacggaaag

SEQ ID NO: 2239995 - RNA, 19 nt, Artificial Sequence
  Description of Artificial Sequence: Synthetic oligonucleotide
  Antisense strand to SEQ ID NO: 2239994
cuuuccgucgaacuacuua

SEQ ID NO: 2239996 - RNA, 19 nt, Artificial Sequence
  Description of Artificial Sequence: Synthetic oligonucleotide
  Sense strand starting at position 460 of SEQ ID NO: 1884099
gguacaaucuucucacaag

SEQ ID NO: 2239997 - RNA, 19 nt, Artificial Sequence
  Description of Artificial Sequence: Synthetic oligonucleotide
  Antisense strand to SEQ ID NO: 2239996
cuugugagaagauuguacc

SEQ ID NO: 2239998 - RNA, 19 nt, Artificial Sequence
  Description of Artificial Sequence: Synthetic oligonucleotide
  Sense strand starting at position 490 of SEQ ID NO: 1884099
gguccauaccuaugacuaa

SEQ ID NO: 2239999 - RNA, 19 nt, Artificial Sequence
  Description of Artificial Sequence: Synthetic oligonucleotide
  Antisense strand to SEQ ID NO: 2239998
uuagucauagguauggacc

SEQ ID NO: 2240000 - RNA, 19 nt, Artificial Sequence
  Description of Artificial Sequence: Synthetic oligonucleotide
  Sense strand starting at position 583 of SEQ ID NO: 1884099
ugucauuggccuuaggagu

SEQ ID NO: 2240001 - RNA, 19 nt, Artificial Sequence
  Description of Artificial Sequence: Synthetic oligonucleotide
  Antisense strand to SEQ ID NO: 2240000
acuccuaaggccaaugaca

SEQ ID NO: 2240002 - RNA, 19 nt, Artificial Sequence
  Description of Artificial Sequence: Synthetic oligonucleotide
  Sense strand starting at position 594 of SEQ ID NO: 1884099
uuaggaguauccucuccga

SEQ ID NO: 2240003 - RNA, 19 nt, Artificial Sequence
  Description of Artificial Sequence: Synthetic oligonucleotide
  Antisense strand to SEQ ID NO: 2240002
ucggagaggauacuccuaa

SEQ ID NO: 2240004 - RNA, 19 nt, Artificial Sequence
  Description of Artificial Sequence: Synthetic oligonucleotide
  Sense strand starting at position 597 of SEQ ID NO: 1884099
ggaguauccucuccgaaga

SEQ ID NO: 2240005 - RNA, 19 nt, Artificial Sequence
  Description of Artificial Sequence: Synthetic oligonucleotide
  Antisense strand to SEQ ID NO: 2240004
ucuucggagaggauacucc

SEQ ID NO: 2240006 - RNA, 19 nt, Artificial Sequence
  Description of Artificial Sequence: Synthetic oligonucleotide
  Sense strand starting at position 598 of SEQ ID NO: 1884099
gaguauccucuccgaagag

SEQ ID NO: 2240007 - RNA, 19 nt, Artificial Sequence
  Description of Artificial Sequence: Synthetic oligonucleotide
  Antisense strand to SEQ ID NO: 2240006
cucuucggagaggauacuc

SEQ ID NO: 2240008 - RNA, 19 nt, Artificial Sequence
  Description of Artificial Sequence: Synthetic oligonucleotide
  Sense strand starting at position 844 of SEQ ID NO: 1884099
cugacuuguuagguuaaga

SEQ ID NO: 2240009 - RNA, 19 nt, Artificial Sequence
  Description of Artificial Sequence: Synthetic oligonucleotide
  Antisense strand to SEQ ID NO: 2240008
ucuuaaccuaacaagucag

SEQ ID NO: 2240010 - RNA, 19 nt, Artificial Sequence
  Description of Artificial Sequence: Synthetic oligonucleotide
  Sense strand starting at position 855 of SEQ ID NO: 1884099
gguuaagaacuccaugcca

SEQ ID NO: 2240011 - RNA, 19 nt, Artificial Sequence
  Description of Artificial Sequence: Synthetic oligonucleotide
  Antisense strand to SEQ ID NO: 2240010
uggcauggaguucuuaacc

SEQ ID NO: 2240012 - RNA, 19 nt, Artificial Sequence
  Description of Artificial Sequence: Synthetic oligonucleotide
  Sense strand starting at position 1014 of SEQ ID NO: 1884099
gcaacaacugguuaauaca

SEQ ID NO: 2240013 - RNA, 19 nt, Artificial Sequence
  Description of Artificial Sequence: Synthetic oligonucleotide
  Antisense strand to SEQ ID NO: 2240012
uguauuaaccaguuguugc

SEQ ID NO: 2240014 - RNA, 19 nt, Artificial Sequence
  Description of Artificial Sequence: Synthetic oligonucleotide
  Sense strand starting at position 1497 of SEQ ID NO: 1884099
ggcuguuaagaacgaagaa

SEQ ID NO: 2240015 - RNA, 19 nt, Artificial Sequence
  Description of Artificial Sequence: Synthetic oligonucleotide
  Antisense strand to SEQ ID NO: 2240014
uucuucguucuuaacagcc

SEQ ID NO: 2240016 - RNA, 19 nt, Artificial Sequence
  Description of Artificial Sequence: Synthetic oligonucleotide
  Sense strand starting at position 2164 of SEQ ID NO: 1884099
uuaccuauagugggacaua

SEQ ID NO: 2240017 - RNA, 19 nt, Artificial Sequence
  Description of Artificial Sequence: Synthetic oligonucleotide
  Antisense strand to SEQ ID NO: 2240016
uaugucccacuauagguaa

SEQ ID NO: 2240018 - RNA, 19 nt, Artificial Sequence
  Description of Artificial Sequence: Synthetic oligonucleotide
  Sense strand starting at position 2425 of SEQ ID NO: 1884099
acuacacgccuagaauuau

SEQ ID NO: 2240019 - RNA, 19 nt, Artificial Sequence
  Description of Artificial Sequence: Synthetic oligonucleotide
  Antisense strand to SEQ ID NO: 2240018
auaauucuaggcguguagu

SEQ ID NO: 2240020 - RNA, 19 nt, Artificial Sequence
  Description of Artificial Sequence: Synthetic oligonucleotide
  Sense strand starting at position 2482 of SEQ ID NO: 1884099
cucuacaucacggagugau

SEQ ID NO: 2240021 - RNA, 19 nt, Artificial Sequence
  Description of Artificial Sequence: Synthetic oligonucleotide
  Antisense strand to SEQ ID NO: 2240020
aucacuccgugauguagag

SEQ ID NO: 2240022 - RNA, 19 nt, Artificial Sequence
  Description of Artificial Sequence: Synthetic oligonucleotide
  Sense strand starting at position 2485 of SEQ ID NO: 1884099
uacaucacggagugaucua

SEQ ID NO: 2240023 - RNA, 19 nt, Artificial Sequence
  Description of Artificial Sequence: Synthetic oligonucleotide
  Antisense strand to SEQ ID NO: 2240022
uagaucacuccgugaugua

SEQ ID NO: 2240024 - RNA, 19 nt, Artificial Sequence
  Description of Artificial Sequence: Synthetic oligonucleotide
  Sense strand starting at position 2494 of SEQ ID NO: 1884099
gagugaucuaaugacugug

SEQ ID NO: 2240025 - RNA, 19 nt, Artificial Sequence
  Description of Artificial Sequence: Synthetic oligonucleotide
  Antisense strand to SEQ ID NO: 2240024
cacagucauuagaucacuc

SEQ ID NO: 2240026 - RNA, 19 nt, Artificial Sequence
  Description of Artificial Sequence: Synthetic oligonucleotide
  Sense strand starting at position 2496 of SEQ ID NO: 1884099
gugaucuaaugacugugau

SEQ ID NO: 2240027 - RNA, 19 nt, Artificial Sequence
  Description of Artificial Sequence: Synthetic oligonucleotide
  Antisense strand to SEQ ID NO: 2240026
aucacagucauuagaucac

SEQ ID NO: 2240028 - RNA, 19 nt, Artificial Sequence
  Description of Artificial Sequence: Synthetic oligonucleotide
  Sense strand starting at position 2497 of SEQ ID NO: 1884099
ugaucuaaugacugugaug

SEQ ID NO: 2240029 - RNA, 19 nt, Artificial Sequence
  Description of Artificial Sequence: Synthetic oligonucleotide
  Antisense strand to SEQ ID NO: 2240028
caucacagucauuagauca

SEQ ID NO: 2240030 - RNA, 19 nt, Artificial Sequence
  Description of Artificial Sequence: Synthetic oligonucleotide
  Sense strand starting at position 2583 of SEQ ID NO: 1884099
gagugaauuaacugacgug

SEQ ID NO: 2240031 - RNA, 19 nt, Artificial Sequence
  Description of Artificial Sequence: Synthetic oligonucleotide
  Antisense strand to SEQ ID NO: 2240030
cacgucaguuaauucacuc

SEQ ID NO: 2240032 - RNA, 19 nt, Artificial Sequence
  Description of Artificial Sequence: Synthetic oligonucleotide
  Sense strand starting at position 2584 of SEQ ID NO: 1884099
agugaauuaacugacgugu

SEQ ID NO: 2240033 - RNA, 19 nt, Artificial Sequence
  Description of Artificial Sequence: Synthetic oligonucleotide
  Antisense strand to SEQ ID NO: 2240032
acacgucaguuaauucacu

SEQ ID NO: 2240034 - RNA, 19 nt, Artificial Sequence
  Description of Artificial Sequence: Synthetic oligonucleotide
  Sense strand starting at position 2590 of SEQ ID NO: 1884099
uuaacugacguguauacau

SEQ ID NO: 2240035 - RNA, 19 nt, Artificial Sequence
  Description of Artificial Sequence: Synthetic oligonucleotide
  Antisense strand to SEQ ID NO: 2240034
auguauacacgucaguuaa

SEQ ID NO: 2240036 - RNA, 19 nt, Artificial Sequence
  Description of Artificial Sequence: Synthetic oligonucleotide
  Sense strand starting at position 2689 of SEQ ID NO: 1884099
uugacuuugugugcauuua

SEQ ID NO: 2240037 - RNA, 19 nt, Artificial Sequence
  Description of Artificial Sequence: Synthetic oligonucleotide
  Antisense strand to SEQ ID NO: 2240036
uaaaugcacacaaagucaa

SEQ ID NO: 2240038 - RNA, 19 nt, Artificial Sequence
  Description of Artificial Sequence: Synthetic oligonucleotide
  Sense strand starting at position 3086 of SEQ ID NO: 1884099
ugccgaaauaguuaucaga

SEQ ID NO: 2240039 - RNA, 19 nt, Artificial Sequence
  Description of Artificial Sequence: Synthetic oligonucleotide
  Antisense strand to SEQ ID NO: 2240038
ucugauaacuauuucggca

SEQ ID NO: 2240040 - RNA, 19 nt, Artificial Sequence
  Description of Artificial Sequence: Synthetic oligonucleotide
  Sense strand starting at position 3088 of SEQ ID NO: 1884099
ccgaaauaguuaucagaau

SEQ ID NO: 2240041 - RNA, 19 nt, Artificial Sequence
  Description of Artificial Sequence: Synthetic oligonucleotide
  Antisense strand to SEQ ID NO: 2240040
auucugauaacuauuucgg

SEQ ID NO: 2240042 - RNA, 19 nt, Artificial Sequence
  Description of Artificial Sequence: Synthetic oligonucleotide
  Sense strand starting at position 3094 of SEQ ID NO: 1884099
uaguuaucagaauacgcuu

SEQ ID NO: 2240043 - RNA, 19 nt, Artificial Sequence
  Description of Artificial Sequence: Synthetic oligonucleotide
  Antisense strand to SEQ ID NO: 2240042
aagcguauucugauaacua

SEQ ID NO: 2240044 - RNA, 19 nt, Artificial Sequence
  Description of Artificial Sequence: Synthetic oligonucleotide
  Sense strand starting at position 3101 of SEQ ID NO: 1884099
cagaauacgcuuuggaaua

SEQ ID NO: 2240045 - RNA, 19 nt, Artificial Sequence
  Description of Artificial Sequence: Synthetic oligonucleotide
  Antisense strand to SEQ ID NO: 2240044
uauuccaaagcguauucug

SEQ ID NO: 2240046 - RNA, 19 nt, Artificial Sequence
  Description of Artificial Sequence: Synthetic oligonucleotide
  Sense strand starting at position 3176 of SEQ ID NO: 1884099
cuugaauacugccuaagaa

SEQ ID NO: 2240047 - RNA, 19 nt, Artificial Sequence
  Description of Artificial Sequence: Synthetic oligonucleotide
  Antisense strand to SEQ ID NO: 2240046
uucuuaggcaguauucaag

SEQ ID NO: 2240048 - RNA, 19 nt, Artificial Sequence
  Description of Artificial Sequence: Synthetic oligonucleotide
  Sense strand starting at position 3208 of SEQ ID NO: 1884099
ugaauuuccuuagaagagu

SEQ ID NO: 2240049 - RNA, 19 nt, Artificial Sequence
  Description of Artificial Sequence: Synthetic oligonucleotide
  Antisense strand to SEQ ID NO: 2240048
acucuucuaaggaaauuca

SEQ ID NO: 2240050 - RNA, 19 nt, Artificial Sequence
  Description of Artificial Sequence: Synthetic oligonucleotide
  Sense strand starting at position 3222 of SEQ ID NO: 1884099
agaguauuuccuugcuagc

SEQ ID NO: 2240051 - RNA, 19 nt, Artificial Sequence
  Description of Artificial Sequence: Synthetic oligonucleotide
  Antisense strand to SEQ ID NO: 2240050
gcuagcaaggaaauacucu

SEQ ID NO: 2240052 - RNA, 19 nt, Artificial Sequence
  Description of Artificial Sequence: Synthetic oligonucleotide
  Sense strand starting at position 3250 of SEQ ID NO: 1884099
uuaugagcugauuaaauuc

SEQ ID NO: 2240053 - RNA, 19 nt, Artificial Sequence
  Description of Artificial Sequence: Synthetic oligonucleotide
  Antisense strand to SEQ ID NO: 2240052
gaauuuaaucagcucauaa

SEQ ID NO: 2240054 - RNA, 19 nt, Artificial Sequence
  Description of Artificial Sequence: Synthetic oligonucleotide
  Sense strand starting at position 3358 of SEQ ID NO: 1884099
guagccuuagaugauaaau

SEQ ID NO: 2240055 - RNA, 19 nt, Artificial Sequence
  Description of Artificial Sequence: Synthetic oligonucleotide
  Antisense strand to SEQ ID NO: 2240054
auuuaucaucuaaggcuac

SEQ ID NO: 2240056 - RNA, 19 nt, Artificial Sequence
  Description of Artificial Sequence: Synthetic oligonucleotide
  Sense strand starting at position 3360 of SEQ ID NO: 1884099
agccuuagaugauaaauuu

SEQ ID NO: 2240057 - RNA, 19 nt, Artificial Sequence
  Description of Artificial Sequence: Synthetic oligonucleotide
  Antisense strand to SEQ ID NO: 2240056
aaauuuaucaucuaaggcu

SEQ ID NO: 2240058 - RNA, 19 nt, Artificial Sequence
  Description of Artificial Sequence: Synthetic oligonucleotide
  Sense strand starting at position 3440 of SEQ ID NO: 1884099
uucuuuaaaguuugacuga

SEQ ID NO: 2240059 - RNA, 19 nt, Artificial Sequence
  Description of Artificial Sequence: Synthetic oligonucleotide
  Antisense strand to SEQ ID NO: 2240058
ucagucaaacuuuaaagaa

SEQ ID NO: 2240060 - RNA, 19 nt, Artificial Sequence
  Description of Artificial Sequence: Synthetic oligonucleotide
  Sense strand starting at position 3463 of SEQ ID NO: 1884099
guaccuucuuggccaagaa

SEQ ID NO: 2240061 - RNA, 19 nt, Artificial Sequence
  Description of Artificial Sequence: Synthetic oligonucleotide
  Antisense strand to SEQ ID NO: 2240060
uucuuggccaagaagguac

SEQ ID NO: 2240062 - RNA, 19 nt, Artificial Sequence
  Description of Artificial Sequence: Synthetic oligonucleotide
  Sense strand starting at position 3675 of SEQ ID NO: 1884099
guuggaaauccaugacauu

SEQ ID NO: 2240063 - RNA, 19 nt, Artificial Sequence
  Description of Artificial Sequence: Synthetic oligonucleotide
  Antisense strand to SEQ ID NO: 2240062
aaugucauggauuuccaac

SEQ ID NO: 2240064 - RNA, 19 nt, Artificial Sequence
  Description of Artificial Sequence: Synthetic oligonucleotide
  Sense strand starting at position 3753 of SEQ ID NO: 1884099
ugauguauuuacccaugcu

SEQ ID NO: 2240065 - RNA, 19 nt, Artificial Sequence
  Description of Artificial Sequence: Synthetic oligonucleotide
  Antisense strand to SEQ ID NO: 2240064
agcauggguaaauacauca

SEQ ID NO: 2240066 - RNA, 19 nt, Artificial Sequence
  Description of Artificial Sequence: Synthetic oligonucleotide
  Sense strand starting at position 147 of SEQ ID NO: 1884100
cagaaucugcacugaugga

SEQ ID NO: 2240067 - RNA, 19 nt, Artificial Sequence
  Description of Artificial Sequence: Synthetic oligonucleotide
  Antisense strand to SEQ ID NO: 2240066
uccaucagugcagauucug

SEQ ID NO: 2240068 - RNA, 19 nt, Artificial Sequence
  Description of Artificial Sequence: Synthetic oligonucleotide
  Sense strand starting at position 151 of SEQ ID NO: 1884100
aucugcacugauggauuaa

SEQ ID NO: 2240069 - RNA, 19 nt, Artificial Sequence
  Description of Artificial Sequence: Synthetic oligonucleotide
  Antisense strand to SEQ ID NO: 2240068
uuaauccaucagugcagau

SEQ ID NO: 2240070 - RNA, 19 nt, Artificial Sequence
  Description of Artificial Sequence: Synthetic oligonucleotide
  Sense strand starting at position 162 of SEQ ID NO: 1884100
uggauuaauggagguucuu

SEQ ID NO: 2240071 - RNA, 19 nt, Artificial Sequence
  Description of Artificial Sequence: Synthetic oligonucleotide
  Antisense strand to SEQ ID NO: 2240070
aagaaccuccauuaaucca

SEQ ID NO: 2240072 - RNA, 19 nt, Artificial Sequence
  Description of Artificial Sequence: Synthetic oligonucleotide
  Sense strand starting at position 168 of SEQ ID NO: 1884100
aauggagguucuuuauacu

SEQ ID NO: 2240073 - RNA, 19 nt, Artificial Sequence
  Description of Artificial Sequence: Synthetic oligonucleotide
  Antisense strand to SEQ ID NO: 2240072
aguauaaagaaccuccauu

SEQ ID NO: 2240074 - RNA, 19 nt, Artificial Sequence
  Description of Artificial Sequence: Synthetic oligonucleotide
  Sense strand starting at position 252 of SEQ ID NO: 1884100
auaguauauggagggugaa

SEQ ID NO: 2240075 - RNA, 19 nt, Artificial Sequence
  Description of Artificial Sequence: Synthetic oligonucleotide
  Antisense strand to SEQ ID NO: 2240074
uucacccuccauauacuau

SEQ ID NO: 2240076 - RNA, 19 nt, Artificial Sequence
  Description of Artificial Sequence: Synthetic oligonucleotide
  Sense strand starting at position 253 of SEQ ID NO: 1884100
uaguauauggagggugaau

SEQ ID NO: 2240077 - RNA, 19 nt, Artificial Sequence
  Description of Artificial Sequence: Synthetic oligonucleotide
  Antisense strand to SEQ ID NO: 2240076
auucacccuccauauacua

SEQ ID NO: 2240078 - RNA, 19 nt, Artificial Sequence
  Description of Artificial Sequence: Synthetic oligonucleotide
  Sense strand starting at position 477 of SEQ ID NO: 1884100
uggaaauggugacucacuu

SEQ ID NO: 2240079 - RNA, 19 nt, Artificial Sequence
  Description of Artificial Sequence: Synthetic oligonucleotide
  Antisense strand to SEQ ID NO: 2240078
aagugagucaccauuucca

SEQ ID NO: 2240080 - RNA, 19 nt, Artificial Sequence
  Description of Artificial Sequence: Synthetic oligonucleotide
  Sense strand starting at position 517 of SEQ ID NO: 1884100
cuuagaagucuguauuaug

SEQ ID NO: 2240081 - RNA, 19 nt, Artificial Sequence
  Description of Artificial Sequence: Synthetic oligonucleotide
  Antisense strand to SEQ ID NO: 2240080
cauaauacagacuucuaag

SEQ ID NO: 2240082 - RNA, 19 nt, Artificial Sequence
  Description of Artificial Sequence: Synthetic oligonucleotide
  Sense strand starting at position 657 of SEQ ID NO: 1884100
augaaauggcugcaaucaa

SEQ ID NO: 2240083 - RNA, 19 nt, Artificial Sequence
  Description of Artificial Sequence: Synthetic oligonucleotide
  Antisense strand to SEQ ID NO: 2240082
uugauugcagccauuucau

SEQ ID NO: 2240084 - RNA, 19 nt, Artificial Sequence
  Description of Artificial Sequence: Synthetic oligonucleotide
  Sense strand starting at position 1610 of SEQ ID NO: 1884100
auuugagccuucuucugua

SEQ ID NO: 2240085 - RNA, 19 nt, Artificial Sequence
  Description of Artificial Sequence: Synthetic oligonucleotide
  Antisense strand to SEQ ID NO: 2240084
uacagaagaaggcucaaau

SEQ ID NO: 2240086 - RNA, 19 nt, Artificial Sequence
  Description of Artificial Sequence: Synthetic oligonucleotide
  Sense strand starting at position 1630 of SEQ ID NO: 1884100
guaugucaccucuauuaaa

SEQ ID NO: 2240087 - RNA, 19 nt, Artificial Sequence
  Description of Artificial Sequence: Synthetic oligonucleotide
  Antisense strand to SEQ ID NO: 2240086
uuuaauagaggugacauac

SEQ ID NO: 2240088 - RNA, 19 nt, Artificial Sequence
  Description of Artificial Sequence: Synthetic oligonucleotide
  Sense strand starting at position 1746 of SEQ ID NO: 1884100
aauauaccucagugugaag

SEQ ID NO: 2240089 - RNA, 19 nt, Artificial Sequence
  Description of Artificial Sequence: Synthetic oligonucleotide
  Antisense strand to SEQ ID NO: 2240088
cuucacacugagguauauu

SEQ ID NO: 2240090 - RNA, 19 nt, Artificial Sequence
  Description of Artificial Sequence: Synthetic oligonucleotide
  Sense strand starting at position 1928 of SEQ ID NO: 1884100
uugauagcccuguacaaug

SEQ ID NO: 2240091 - RNA, 19 nt, Artificial Sequence
  Description of Artificial Sequence: Synthetic oligonucleotide
  Antisense strand to SEQ ID NO: 2240090
cauuguacagggcuaucaa

SEQ ID NO: 2240092 - RNA, 19 nt, Artificial Sequence
  Description of Artificial Sequence: Synthetic oligonucleotide
  Sense strand starting at position 2087 of SEQ ID NO: 1884100
ggcaauaaugaugguuaga

SEQ ID NO: 2240093 - RNA, 19 nt, Artificial Sequence
  Description of Artificial Sequence: Synthetic oligonucleotide
  Antisense strand to SEQ ID NO: 2240092
ucuaaccaucauuauugcc

SEQ ID NO: 2240094 - RNA, 19 nt, Artificial Sequence
  Description of Artificial Sequence: Synthetic oligonucleotide
  Sense strand starting at position 2108 of SEQ ID NO: 1884100
gacuaugacauggguugua

SEQ ID NO: 2240095 - RNA, 19 nt, Artificial Sequence
  Description of Artificial Sequence: Synthetic oligonucleotide
  Antisense strand to SEQ ID NO: 2240094
uacaacccaugucauaguc

SEQ ID NO: 2240096 - RNA, 19 nt, Artificial Sequence
  Description of Artificial Sequence: Synthetic oligonucleotide
  Sense strand starting at position 2143 of SEQ ID NO: 1884100
acaggugaaugguuuauca

SEQ ID NO: 2240097 - RNA, 19 nt, Artificial Sequence
  Description of Artificial Sequence: Synthetic oligonucleotide
  Antisense strand to SEQ ID NO: 2240096
ugauaaaccauucaccugu

SEQ ID NO: 2240098 - RNA, 19 nt, Artificial Sequence
  Description of Artificial Sequence: Synthetic oligonucleotide
  Sense strand starting at position 2145 of SEQ ID NO: 1884100
aggugaaugguuuaucauu

SEQ ID NO: 2240099 - RNA, 19 nt, Artificial Sequence
  Description of Artificial Sequence: Synthetic oligonucleotide
  Antisense strand to SEQ ID NO: 2240098
aaugauaaaccauucaccu

SEQ ID NO: 2240100 - RNA, 19 nt, Artificial Sequence
  Description of Artificial Sequence: Synthetic oligonucleotide
  Sense strand starting at position 2259 of SEQ ID NO: 1884100
agggaagcuuuccuaagga

SEQ ID NO: 2240101 - RNA, 19 nt, Artificial Sequence
  Description of Artificial Sequence: Synthetic oligonucleotide
  Antisense strand to SEQ ID NO: 2240100
uccuuaggaaagcuucccu

SEQ ID NO: 2240102 - RNA, 19 nt, Artificial Sequence
  Description of Artificial Sequence: Synthetic oligonucleotide
  Sense strand starting at position 2355 of SEQ ID NO: 1884100
ugaguaaggccuuaccuca

SEQ ID NO: 2240103 - RNA, 19 nt, Artificial Sequence
  Description of Artificial Sequence: Synthetic oligonucleotide
  Antisense strand to SEQ ID NO: 2240102
ugagguaaggccuuacuca

SEQ ID NO: 2240104 - RNA, 19 nt, Artificial Sequence
  Description of Artificial Sequence: Synthetic oligonucleotide
  Sense strand starting at position 2409 of SEQ ID NO: 1884100
guuggugauggugaccaau

SEQ ID NO: 2240105 - RNA, 19 nt, Artificial Sequence
  Description of Artificial Sequence: Synthetic oligonucleotide
  Antisense strand to SEQ ID NO: 2240104
auuggucaccaucaccaac

SEQ ID NO: 2240106 - RNA, 19 nt, Artificial Sequence
  Description of Artificial Sequence: Synthetic oligonucleotide
  Sense strand starting at position 2489 of SEQ ID NO: 1884100
caaagcuauguuggaaaua

SEQ ID NO: 2240107 - RNA, 19 nt, Artificial Sequence
  Description of Artificial Sequence: Synthetic oligonucleotide
  Antisense strand to SEQ ID NO: 2240106
uauuuccaacauagcuuug

SEQ ID NO: 2240108 - RNA, 19 nt, Artificial Sequence
  Description of Artificial Sequence: Synthetic oligonucleotide
  Sense strand starting at position 2499 of SEQ ID NO: 1884100
uuggaaauaucagcgagag

SEQ ID NO: 2240109 - RNA, 19 nt, Artificial Sequence
  Description of Artificial Sequence: Synthetic oligonucleotide
  Antisense strand to SEQ ID NO: 2240108
cucucgcugauauuuccaa

SEQ ID NO: 2240110 - RNA, 19 nt, Artificial Sequence
  Description of Artificial Sequence: Synthetic oligonucleotide
  Sense strand starting at position 2501 of SEQ ID NO: 1884100
ggaaauaucagcgagagug

SEQ ID NO: 2240111 - RNA, 19 nt, Artificial Sequence
  Description of Artificial Sequence: Synthetic oligonucleotide
  Antisense strand to SEQ ID NO: 2240110
cacucucgcugauauuucc

SEQ ID NO: 2240112 - RNA, 19 nt, Artificial Sequence
  Description of Artificial Sequence: Synthetic oligonucleotide
  Sense strand starting at position 2556 of SEQ ID NO: 1884100
caaaguauuguggaaggcu

SEQ ID NO: 2240113 - RNA, 19 nt, Artificial Sequence
  Description of Artificial Sequence: Synthetic oligonucleotide
  Antisense strand to SEQ ID NO: 2240112
agccuuccacaauacuuug

SEQ ID NO: 2240114 - RNA, 19 nt, Artificial Sequence
  Description of Artificial Sequence: Synthetic oligonucleotide
  Sense strand starting at position 2617 of SEQ ID NO: 1884100
uaugguuuauaagcagaca

SEQ ID NO: 2240115 - RNA, 19 nt, Artificial Sequence
  Description of Artificial Sequence: Synthetic oligonucleotide
  Antisense strand to SEQ ID NO: 2240114
ugucugcuuauaaaccaua

SEQ ID NO: 2240116 - RNA, 19 nt, Artificial Sequence
  Description of Artificial Sequence: Synthetic oligonucleotide
  Sense strand starting at position 2717 of SEQ ID NO: 1884100
gccucuagauaucuggaca

SEQ ID NO: 2240117 - RNA, 19 nt, Artificial Sequence
  Description of Artificial Sequence: Synthetic oligonucleotide
  Antisense strand to SEQ ID NO: 2240116
uguccagauaucuagaggc

SEQ ID NO: 2240118 - RNA, 19 nt, Artificial Sequence
  Description of Artificial Sequence: Synthetic oligonucleotide
  Sense strand starting at position 3050 of SEQ ID NO: 1884100
ccaguuuaucaacauuggu

SEQ ID NO: 2240119 - RNA, 19 nt, Artificial Sequence
  Description of Artificial Sequence: Synthetic oligonucleotide
  Antisense strand to SEQ ID NO: 2240118
accaauguugauaaacugg

SEQ ID NO: 2240120 - RNA, 19 nt, Artificial Sequence
  Description of Artificial Sequence: Synthetic oligonucleotide
  Sense strand starting at position 3129 of SEQ ID NO: 1884100
gcaacauaggccuaggaau

SEQ ID NO: 2240121 - RNA, 19 nt, Artificial Sequence
  Description of Artificial Sequence: Synthetic oligonucleotide
  Antisense strand to SEQ ID NO: 2240120
auuccuaggccuauguugc

SEQ ID NO: 2240122 - RNA, 19 nt, Artificial Sequence
  Description of Artificial Sequence: Synthetic oligonucleotide
  Sense strand starting at position 3226 of SEQ ID NO: 1884100
cuacgucaagacuauuaau

SEQ ID NO: 2240123 - RNA, 19 nt, Artificial Sequence
  Description of Artificial Sequence: Synthetic oligonucleotide
  Antisense strand to SEQ ID NO: 2240122
auuaauagucuugacguag

SEQ ID NO: 2240124 - RNA, 19 nt, Artificial Sequence
  Description of Artificial Sequence: Synthetic oligonucleotide
  Sense strand starting at position 3237 of SEQ ID NO: 1884100
cuauuaauaugggugaaua

SEQ ID NO: 2240125 - RNA, 19 nt, Artificial Sequence
  Description of Artificial Sequence: Synthetic oligonucleotide
  Antisense strand to SEQ ID NO: 2240124
uauucacccauauuaauag

SEQ ID NO: 2240126 - RNA, 19 nt, Artificial Sequence
  Description of Artificial Sequence: Synthetic oligonucleotide
  Sense strand starting at position 3299 of SEQ ID NO: 1884100
gcaacagagcuuuagggua

SEQ ID NO: 2240127 - RNA, 19 nt, Artificial Sequence
  Description of Artificial Sequence: Synthetic oligonucleotide
  Antisense strand to SEQ ID NO: 2240126
uacccuaaagcucuguugc

SEQ ID NO: 2240128 - RNA, 19 nt, Artificial Sequence
  Description of Artificial Sequence: Synthetic oligonucleotide
  Sense strand starting at position 3482 of SEQ ID NO: 1884100
gggccaaaucaugaucucu

SEQ ID NO: 2240129 - RNA, 19 nt, Artificial Sequence
  Description of Artificial Sequence: Synthetic oligonucleotide
  Antisense strand to SEQ ID NO: 2240128
agagaucaugauuuggccc

SEQ ID NO: 2240130 - RNA, 19 nt, Artificial Sequence
  Description of Artificial Sequence: Synthetic oligonucleotide
  Sense strand starting at position 3513 of SEQ ID NO: 1884100
gucugaaagcagcaaauaa

SEQ ID NO: 2240131 - RNA, 19 nt, Artificial Sequence
  Description of Artificial Sequence: Synthetic oligonucleotide
  Antisense strand to SEQ ID NO: 2240130
uuauuugcugcuuucagac

SEQ ID NO: 2240132 - RNA, 19 nt, Artificial Sequence
  Description of Artificial Sequence: Synthetic oligonucleotide
  Sense strand starting at position 3557 of SEQ ID NO: 1884100
ccauaugcagcugaauaua

SEQ ID NO: 2240133 - RNA, 19 nt, Artificial Sequence
  Description of Artificial Sequence: Synthetic oligonucleotide
  Antisense strand to SEQ ID NO: 2240132
uauauucagcugcauaugg

SEQ ID NO: 2240134 - RNA, 19 nt, Artificial Sequence
  Description of Artificial Sequence: Synthetic oligonucleotide
  Sense strand starting at position 3709 of SEQ ID NO: 1884100
gcuucucuagcagagauaa

SEQ ID NO: 2240135 - RNA, 19 nt, Artificial Sequence
  Description of Artificial Sequence: Synthetic oligonucleotide
  Antisense strand to SEQ ID NO: 2240134
uuaucucugcuagagaagc

SEQ ID NO: 2240136 - RNA, 19 nt, Artificial Sequence
  Description of Artificial Sequence: Synthetic oligonucleotide
  Sense strand starting at position 3742 of SEQ ID NO: 1884100
cuugaauauuucuagaaag

SEQ ID NO: 2240137 - RNA, 19 nt, Artificial Sequence
  Description of Artificial Sequence: Synthetic oligonucleotide
  Antisense strand to SEQ ID NO: 2240136
cuuucuagaaauauucaag

SEQ ID NO: 2240138 - RNA, 19 nt, Artificial Sequence
  Description of Artificial Sequence: Synthetic oligonucleotide
  Sense strand starting at position 3790 of SEQ ID NO: 1884100
cuaguagacucuccagaag

SEQ ID NO: 2240139 - RNA, 19 nt, Artificial Sequence
  Description of Artificial Sequence: Synthetic oligonucleotide
  Antisense strand to SEQ ID NO: 2240138
cuucuggagagucuacuag

SEQ ID NO: 2240140 - RNA, 19 nt, Artificial Sequence
  Description of Artificial Sequence: Synthetic oligonucleotide
  Sense strand starting at position 3793 of SEQ ID NO: 1884100
guagacucuccagaagguu

SEQ ID NO: 2240141 - RNA, 19 nt, Artificial Sequence
  Description of Artificial Sequence: Synthetic oligonucleotide
  Antisense strand to SEQ ID NO: 2240140
aaccuucuggagagucuac

SEQ ID NO: 2240142 - RNA, 19 nt, Artificial Sequence
  Description of Artificial Sequence: Synthetic oligonucleotide
  Sense strand starting at position 3902 of SEQ ID NO: 1884100
acuuguuuagagggaaagu

SEQ ID NO: 2240143 - RNA, 19 nt, Artificial Sequence
  Description of Artificial Sequence: Synthetic oligonucleotide
  Antisense strand to SEQ ID NO: 2240142
acuuucccucuaaacaagu

SEQ ID NO: 2240144 - RNA, 19 nt, Artificial Sequence
  Description of Artificial Sequence: Synthetic oligonucleotide
  Sense strand starting at position 3903 of SEQ ID NO: 1884100
cuuguuuagagggaaaguu

SEQ ID NO: 2240145 - RNA, 19 nt, Artificial Sequence
  Description of Artificial Sequence: Synthetic oligonucleotide
  Antisense strand to SEQ ID NO: 2240144
aacuuucccucuaaacaag

SEQ ID NO: 2240146 - RNA, 19 nt, Artificial Sequence
  Description of Artificial Sequence: Synthetic oligonucleotide
  Sense strand starting at position 115 of SEQ ID NO: 1884101
uugaguacauaccucuuua

SEQ ID NO: 2240147 - RNA, 19 nt, Artificial Sequence
  Description of Artificial Sequence: Synthetic oligonucleotide
  Antisense strand to SEQ ID NO: 2240146
uaaagagguauguacucaa

SEQ ID NO: 2240148 - RNA, 19 nt, Artificial Sequence
  Description of Artificial Sequence: Synthetic oligonucleotide
  Sense strand starting at position 119 of SEQ ID NO: 1884101
guacauaccucuuuaucgu

SEQ ID NO: 2240149 - RNA, 19 nt, Artificial Sequence
  Description of Artificial Sequence: Synthetic oligonucleotide
  Antisense strand to SEQ ID NO: 2240148
acgauaaagagguauguac

SEQ ID NO: 2240150 - RNA, 19 nt, Artificial Sequence
  Description of Artificial Sequence: Synthetic oligonucleotide
  Sense strand starting at position 367 of SEQ ID NO: 1884101
ggcagcggauauugaaaua

SEQ ID NO: 2240151 - RNA, 19 nt, Artificial Sequence
  Description of Artificial Sequence: Synthetic oligonucleotide
  Antisense strand to SEQ ID NO: 2240150
uauuucaauauccgcugcc

SEQ ID NO: 2240152 - RNA, 19 nt, Artificial Sequence
  Description of Artificial Sequence: Synthetic oligonucleotide
  Sense strand starting at position 728 of SEQ ID NO: 1884101
cagccuuucgugugacuuu

SEQ ID NO: 2240153 - RNA, 19 nt, Artificial Sequence
  Description of Artificial Sequence: Synthetic oligonucleotide
  Antisense strand to SEQ ID NO: 2240152
aaagucacacgaaaggcug

SEQ ID NO: 2240154 - RNA, 19 nt, Artificial Sequence
  Description of Artificial Sequence: Synthetic oligonucleotide
  Sense strand starting at position 865 of SEQ ID NO: 1884101
uucuuugacccagaaguuc

SEQ ID NO: 2240155 - RNA, 19 nt, Artificial Sequence
  Description of Artificial Sequence: Synthetic oligonucleotide
  Antisense strand to SEQ ID NO: 2240154
gaacuucugggucaaagaa

SEQ ID NO: 2240156 - RNA, 19 nt, Artificial Sequence
  Description of Artificial Sequence: Synthetic oligonucleotide
  Sense strand starting at position 882 of SEQ ID NO: 1884101
ucuaauuucuggcugucua

SEQ ID NO: 2240157 - RNA, 19 nt, Artificial Sequence
  Description of Artificial Sequence: Synthetic oligonucleotide
  Antisense strand to SEQ ID NO: 2240156
uagacagccagaaauuaga

SEQ ID NO: 2240158 - RNA, 19 nt, Artificial Sequence
  Description of Artificial Sequence: Synthetic oligonucleotide
  Sense strand starting at position 892 of SEQ ID NO: 1884101
ggcugucuacccuaaggaa

SEQ ID NO: 2240159 - RNA, 19 nt, Artificial Sequence
  Description of Artificial Sequence: Synthetic oligonucleotide
  Antisense strand to SEQ ID NO: 2240158
uuccuuaggguagacagcc

SEQ ID NO: 2240160 - RNA, 19 nt, Artificial Sequence
  Description of Artificial Sequence: Synthetic oligonucleotide
  Sense strand starting at position 987 of SEQ ID NO: 1884101
gucuaaaugucucauaaau

SEQ ID NO: 2240161 - RNA, 19 nt, Artificial Sequence
  Description of Artificial Sequence: Synthetic oligonucleotide
  Antisense strand to SEQ ID NO: 2240160
auuuaugagacauuuagac

SEQ ID NO: 2240162 - RNA, 19 nt, Artificial Sequence
  Description of Artificial Sequence: Synthetic oligonucleotide
  Sense strand starting at position 1082 of SEQ ID NO: 1884101
aguuuaagguuccagugaa

SEQ ID NO: 2240163 - RNA, 19 nt, Artificial Sequence
  Description of Artificial Sequence: Synthetic oligonucleotide
  Antisense strand to SEQ ID NO: 2240162
uucacuggaaccuuaaacu

SEQ ID NO: 2240164 - RNA, 19 nt, Artificial Sequence
  Description of Artificial Sequence: Synthetic oligonucleotide
  Sense strand starting at position 1333 of SEQ ID NO: 1884101
ggaacaugucuuuagccca

SEQ ID NO: 2240165 - RNA, 19 nt, Artificial Sequence
  Description of Artificial Sequence: Synthetic oligonucleotide
  Antisense strand to SEQ ID NO: 2240164
ugggcuaaagacauguucc

SEQ ID NO: 2240166 - RNA, 19 nt, Artificial Sequence
  Description of Artificial Sequence: Synthetic oligonucleotide
  Sense strand starting at position 1338 of SEQ ID NO: 1884101
augucuuuagcccaagcua

SEQ ID NO: 2240167 - RNA, 19 nt, Artificial Sequence
  Description of Artificial Sequence: Synthetic oligonucleotide
  Antisense strand to SEQ ID NO: 2240166
uagcuugggcuaaagacau

SEQ ID NO: 2240168 - RNA, 19 nt, Artificial Sequence
  Description of Artificial Sequence: Synthetic oligonucleotide
  Sense strand starting at position 1356 of SEQ ID NO: 1884101
acuugagaggcuuagguca

SEQ ID NO: 2240169 - RNA, 19 nt, Artificial Sequence
  Description of Artificial Sequence: Synthetic oligonucleotide
  Antisense strand to SEQ ID NO: 2240168
ugaccuaagccucucaagu

SEQ ID NO: 2240170 - RNA, 19 nt, Artificial Sequence
  Description of Artificial Sequence: Synthetic oligonucleotide
  Sense strand starting at position 1358 of SEQ ID NO: 1884101
uugagaggcuuaggucaga

SEQ ID NO: 2240171 - RNA, 19 nt, Artificial Sequence
  Description of Artificial Sequence: Synthetic oligonucleotide
  Antisense strand to SEQ ID NO: 2240170
ucugaccuaagccucucaa

SEQ ID NO: 2240172 - RNA, 19 nt, Artificial Sequence
  Description of Artificial Sequence: Synthetic oligonucleotide
  Sense strand starting at position 1758 of SEQ ID NO: 1884101
gguagagagucucaguaug

SEQ ID NO: 2240173 - RNA, 19 nt, Artificial Sequence
  Description of Artificial Sequence: Synthetic oligonucleotide
  Antisense strand to SEQ ID NO: 2240172
cauacugagacucucuacc

SEQ ID NO: 2240174 - RNA, 19 nt, Artificial Sequence
  Description of Artificial Sequence: Synthetic oligonucleotide
  Sense strand starting at position 1760 of SEQ ID NO: 1884101
uagagagucucaguauguu

SEQ ID NO: 2240175 - RNA, 19 nt, Artificial Sequence
  Description of Artificial Sequence: Synthetic oligonucleotide
  Antisense strand to SEQ ID NO: 2240174
aacauacugagacucucua

SEQ ID NO: 2240176 - RNA, 19 nt, Artificial Sequence
  Description of Artificial Sequence: Synthetic oligonucleotide
  Sense strand starting at position 1772 of SEQ ID NO: 1884101
guauguugccagggcugau

SEQ ID NO: 2240177 - RNA, 19 nt, Artificial Sequence
  Description of Artificial Sequence: Synthetic oligonucleotide
  Antisense strand to SEQ ID NO: 2240176
aucagcccuggcaacauac

SEQ ID NO: 2240178 - RNA, 19 nt, Artificial Sequence
  Description of Artificial Sequence: Synthetic oligonucleotide
  Sense strand starting at position 1781 of SEQ ID NO: 1884101
cagggcugaucuugaacua

SEQ ID NO: 2240179 - RNA, 19 nt, Artificial Sequence
  Description of Artificial Sequence: Synthetic oligonucleotide
  Antisense strand to SEQ ID NO: 2240178
uaguucaagaucagcccug

SEQ ID NO: 2240180 - RNA, 19 nt, Artificial Sequence
  Description of Artificial Sequence: Synthetic oligonucleotide
  Sense strand starting at position 1791 of SEQ ID NO: 1884101
cuugaacuacugggcuaua

SEQ ID NO: 2240181 - RNA, 19 nt, Artificial Sequence
  Description of Artificial Sequence: Synthetic oligonucleotide
  Antisense strand to SEQ ID NO: 2240180
uauagcccaguaguucaag

SEQ ID NO: 2240182 - RNA, 19 nt, Artificial Sequence
  Description of Artificial Sequence: Synthetic oligonucleotide
  Sense strand starting at position 1843 of SEQ ID NO: 1884101
ggauuacacgcauaaagca

SEQ ID NO: 2240183 - RNA, 19 nt, Artificial Sequence
  Description of Artificial Sequence: Synthetic oligonucleotide
  Antisense strand to SEQ ID NO: 2240182
ugcuuuaugcguguaaucc

SEQ ID NO: 2240184 - RNA, 19 nt, Artificial Sequence
  Description of Artificial Sequence: Synthetic oligonucleotide
  Sense strand starting at position 2080 of SEQ ID NO: 1884101
gccucacuauguugcagaa

SEQ ID NO: 2240185 - RNA, 19 nt, Artificial Sequence
  Description of Artificial Sequence: Synthetic oligonucleotide
  Antisense strand to SEQ ID NO: 2240184
uucugcaacauagugaggc

SEQ ID NO: 2240186 - RNA, 19 nt, Artificial Sequence
  Description of Artificial Sequence: Synthetic oligonucleotide
  Sense strand starting at position 2092 of SEQ ID NO: 1884101
ugcagaagcugaucucaaa

SEQ ID NO: 2240187 - RNA, 19 nt, Artificial Sequence
  Description of Artificial Sequence: Synthetic oligonucleotide
  Antisense strand to SEQ ID NO: 2240186
uuugagaucagcuucugca

SEQ ID NO: 2240188 - RNA, 19 nt, Artificial Sequence
  Description of Artificial Sequence: Synthetic oligonucleotide
  Sense strand starting at position 2184 of SEQ ID NO: 1884101
ggcuuauuacuuuaugguu

SEQ ID NO: 2240189 - RNA, 19 nt, Artificial Sequence
  Description of Artificial Sequence: Synthetic oligonucleotide
  Antisense strand to SEQ ID NO: 2240188
aaccauaaaguaauaagcc

SEQ ID NO: 2240190 - RNA, 19 nt, Artificial Sequence
  Description of Artificial Sequence: Synthetic oligonucleotide
  Sense strand starting at position 2224 of SEQ ID NO: 1884101
ucaguauccuuggguugaa

SEQ ID NO: 2240191 - RNA, 19 nt, Artificial Sequence
  Description of Artificial Sequence: Synthetic oligonucleotide
  Antisense strand to SEQ ID NO: 2240190
uucaacccaaggauacuga

SEQ ID NO: 2240192 - RNA, 19 nt, Artificial Sequence
  Description of Artificial Sequence: Synthetic oligonucleotide
  Sense strand starting at position 2233 of SEQ ID NO: 1884101
uuggguugaagugaucgua

SEQ ID NO: 2240193 - RNA, 19 nt, Artificial Sequence
  Description of Artificial Sequence: Synthetic oligonucleotide
  Antisense strand to SEQ ID NO: 2240192
uacgaucacuucaacccaa

SEQ ID NO: 2240194 - RNA, 19 nt, Artificial Sequence
  Description of Artificial Sequence: Synthetic oligonucleotide
  Sense strand starting at position 2324 of SEQ ID NO: 1884101
cuaacaauguuaugaauga

SEQ ID NO: 2240195 - RNA, 19 nt, Artificial Sequence
  Description of Artificial Sequence: Synthetic oligonucleotide
  Antisense strand to SEQ ID NO: 2240194
ucauucauaacauuguuag

SEQ ID NO: 2240196 - RNA, 19 nt, Artificial Sequence
  Description of Artificial Sequence: Synthetic oligonucleotide
  Sense strand starting at position 2734 of SEQ ID NO: 1884101
uauacaaacguguguacau

SEQ ID NO: 2240197 - RNA, 19 nt, Artificial Sequence
  Description of Artificial Sequence: Synthetic oligonucleotide
  Antisense strand to SEQ ID NO: 2240196
auguacacacguuuguaua

SEQ ID NO: 2240198 - RNA, 19 nt, Artificial Sequence
  Description of Artificial Sequence: Synthetic oligonucleotide
  Sense strand starting at position 2735 of SEQ ID NO: 1884101
auacaaacguguguacaua

SEQ ID NO: 2240199 - RNA, 19 nt, Artificial Sequence
  Description of Artificial Sequence: Synthetic oligonucleotide
  Antisense strand to SEQ ID NO: 2240198
uauguacacacguuuguau

SEQ ID NO: 2240200 - RNA, 19 nt, Artificial Sequence
  Description of Artificial Sequence: Synthetic oligonucleotide
  Sense strand starting at position 2736 of SEQ ID NO: 1884101
uacaaacguguguacauau

SEQ ID NO: 2240201 - RNA, 19 nt, Artificial Sequence
  Description of Artificial Sequence: Synthetic oligonucleotide
  Antisense strand to SEQ ID NO: 2240200
auauguacacacguuugua

SEQ ID NO: 2240202 - RNA, 19 nt, Artificial Sequence
  Description of Artificial Sequence: Synthetic oligonucleotide
  Sense strand starting at position 2917 of SEQ ID NO: 1884101
ccaguuuagauguguauca

SEQ ID NO: 2240203 - RNA, 19 nt, Artificial Sequence
  Description of Artificial Sequence: Synthetic oligonucleotide
  Antisense strand to SEQ ID NO: 2240202
ugauacacaucuaaacugg

SEQ ID NO: 2240204 - RNA, 19 nt, Artificial Sequence
  Description of Artificial Sequence: Synthetic oligonucleotide
  Sense strand starting at position 2918 of SEQ ID NO: 1884101
caguuuagauguguaucaa

SEQ ID NO: 2240205 - RNA, 19 nt, Artificial Sequence
  Description of Artificial Sequence: Synthetic oligonucleotide
  Antisense strand to SEQ ID NO: 2240204
uugauacacaucuaaacug

SEQ ID NO: 2240206 - RNA, 19 nt, Artificial Sequence
  Description of Artificial Sequence: Synthetic oligonucleotide
  Sense strand starting at position 2919 of SEQ ID NO: 1884101
aguuuagauguguaucaau

SEQ ID NO: 2240207 - RNA, 19 nt, Artificial Sequence
  Description of Artificial Sequence: Synthetic oligonucleotide
  Antisense strand to SEQ ID NO: 2240206
auugauacacaucuaaacu

SEQ ID NO: 2240208 - RNA, 19 nt, Artificial Sequence
  Description of Artificial Sequence: Synthetic oligonucleotide
  Sense strand starting at position 2922 of SEQ ID NO: 1884101
uuagauguguaucaaucua

SEQ ID NO: 2240209 - RNA, 19 nt, Artificial Sequence
  Description of Artificial Sequence: Synthetic oligonucleotide
  Antisense strand to SEQ ID NO: 2240208
uagauugauacacaucuaa

SEQ ID NO: 2240210 - RNA, 19 nt, Artificial Sequence
  Description of Artificial Sequence: Synthetic oligonucleotide
  Sense strand starting at position 3453 of SEQ ID NO: 1884101
ugaaguuacuuagugcaga

SEQ ID NO: 2240211 - RNA, 19 nt, Artificial Sequence
  Description of Artificial Sequence: Synthetic oligonucleotide
  Antisense strand to SEQ ID NO: 2240210
ucugcacuaaguaacuuca

SEQ ID NO: 2240212 - RNA, 19 nt, Artificial Sequence
  Description of Artificial Sequence: Synthetic oligonucleotide
  Sense strand starting at position 3454 of SEQ ID NO: 1884101
gaaguuacuuagugcagaa

SEQ ID NO: 2240213 - RNA, 19 nt, Artificial Sequence
  Description of Artificial Sequence: Synthetic oligonucleotide
  Antisense strand to SEQ ID NO: 2240212
uucugcacuaaguaacuuc

SEQ ID NO: 2240214 - RNA, 19 nt, Artificial Sequence
  Description of Artificial Sequence: Synthetic oligonucleotide
  Sense strand starting at position 3456 of SEQ ID NO: 1884101
aguuacuuagugcagaaau

SEQ ID NO: 2240215 - RNA, 19 nt, Artificial Sequence
  Description of Artificial Sequence: Synthetic oligonucleotide
  Antisense strand to SEQ ID NO: 2240214
auuucugcacuaaguaacu

SEQ ID NO: 2240216 - RNA, 19 nt, Artificial Sequence
  Description of Artificial Sequence: Synthetic oligonucleotide
  Sense strand starting at position 3479 of SEQ ID NO: 1884101
ccuucuuaguucucaaagu

SEQ ID NO: 2240217 - RNA, 19 nt, Artificial Sequence
  Description of Artificial Sequence: Synthetic oligonucleotide
  Antisense strand to SEQ ID NO: 2240216
acuuugagaacuaagaagg

SEQ ID NO: 2240218 - RNA, 19 nt, Artificial Sequence
  Description of Artificial Sequence: Synthetic oligonucleotide
  Sense strand starting at position 3480 of SEQ ID NO: 1884101
cuucuuaguucucaaaguu

SEQ ID NO: 2240219 - RNA, 19 nt, Artificial Sequence
  Description of Artificial Sequence: Synthetic oligonucleotide
  Antisense strand to SEQ ID NO: 2240218
aacuuugagaacuaagaag

SEQ ID NO: 2240220 - RNA, 19 nt, Artificial Sequence
  Description of Artificial Sequence: Synthetic oligonucleotide
  Sense strand starting at position 3489 of SEQ ID NO: 1884101
ucucaaaguuacuauaguu

SEQ ID NO: 2240221 - RNA, 19 nt, Artificial Sequence
  Description of Artificial Sequence: Synthetic oligonucleotide
  Antisense strand to SEQ ID NO: 2240220
aacuauaguaacuuugaga

SEQ ID NO: 2240222 - RNA, 19 nt, Artificial Sequence
  Description of Artificial Sequence: Synthetic oligonucleotide
  Sense strand starting at position 3540 of SEQ ID NO: 1884101
aacagauauuggcuguacu

SEQ ID NO: 2240223 - RNA, 19 nt, Artificial Sequence
  Description of Artificial Sequence: Synthetic oligonucleotide
  Antisense strand to SEQ ID NO: 2240222
aguacagccaauaucuguu

SEQ ID NO: 2240224 - RNA, 19 nt, Artificial Sequence
  Description of Artificial Sequence: Synthetic oligonucleotide
  Sense strand starting at position 3543 of SEQ ID NO: 1884101
agauauuggcuguacugau

SEQ ID NO: 2240225 - RNA, 19 nt, Artificial Sequence
  Description of Artificial Sequence: Synthetic oligonucleotide
  Antisense strand to SEQ ID NO: 2240224
aucaguacagccaauaucu

SEQ ID NO: 2240226 - RNA, 19 nt, Artificial Sequence
  Description of Artificial Sequence: Synthetic oligonucleotide
  Sense strand starting at position 246 of SEQ ID NO: 1884102
gaguguuguggcuugcacu

SEQ ID NO: 2240227 - RNA, 19 nt, Artificial Sequence
  Description of Artificial Sequence: Synthetic oligonucleotide
  Antisense strand to SEQ ID NO: 2240226
agugcaagccacaacacuc

SEQ ID NO: 2240228 - RNA, 19 nt, Artificial Sequence
  Description of Artificial Sequence: Synthetic oligonucleotide
  Sense strand starting at position 356 of SEQ ID NO: 1884102
caacgugggcaacagaauu

SEQ ID NO: 2240229 - RNA, 19 nt, Artificial Sequence
  Description of Artificial Sequence: Synthetic oligonucleotide
  Antisense strand to SEQ ID NO: 2240228
aauucuguugcccacguug

SEQ ID NO: 2240230 - RNA, 19 nt, Artificial Sequence
  Description of Artificial Sequence: Synthetic oligonucleotide
  Sense strand starting at position 550 of SEQ ID NO: 1884102
cuguaauacccaggucaau

SEQ ID NO: 2240231 - RNA, 19 nt, Artificial Sequence
  Description of Artificial Sequence: Synthetic oligonucleotide
  Antisense strand to SEQ ID NO: 2240230
auugaccuggguauuacag

SEQ ID NO: 2240232 - RNA, 19 nt, Artificial Sequence
  Description of Artificial Sequence: Synthetic oligonucleotide
  Sense strand starting at position 800 of SEQ ID NO: 1884102
guguuaagagaaggugagu

SEQ ID NO: 2240233 - RNA, 19 nt, Artificial Sequence
  Description of Artificial Sequence: Synthetic oligonucleotide
  Antisense strand to SEQ ID NO: 2240232
acucaccuucucuuaacac

SEQ ID NO: 2240234 - RNA, 19 nt, Artificial Sequence
  Description of Artificial Sequence: Synthetic oligonucleotide
  Sense strand starting at position 825 of SEQ ID NO: 1884102
ugaguagauucccuggguu

SEQ ID NO: 2240235 - RNA, 19 nt, Artificial Sequence
  Description of Artificial Sequence: Synthetic oligonucleotide
  Antisense strand to SEQ ID NO: 2240234
aacccagggaaucuacuca

SEQ ID NO: 2240236 - RNA, 19 nt, Artificial Sequence
  Description of Artificial Sequence: Synthetic oligonucleotide
  Sense strand starting at position 855 of SEQ ID NO: 1884102
ugcauagagaguugauaug

SEQ ID NO: 2240237 - RNA, 19 nt, Artificial Sequence
  Description of Artificial Sequence: Synthetic oligonucleotide
  Antisense strand to SEQ ID NO: 2240236
cauaucaacucucuaugca

SEQ ID NO: 2240238 - RNA, 19 nt, Artificial Sequence
  Description of Artificial Sequence: Synthetic oligonucleotide
  Sense strand starting at position 866 of SEQ ID NO: 1884102
uugauauggugagaaagac

SEQ ID NO: 2240239 - RNA, 19 nt, Artificial Sequence
  Description of Artificial Sequence: Synthetic oligonucleotide
  Antisense strand to SEQ ID NO: 2240238
gucuuucucaccauaucaa

SEQ ID NO: 2240240 - RNA, 19 nt, Artificial Sequence
  Description of Artificial Sequence: Synthetic oligonucleotide
  Sense strand starting at position 1311 of SEQ ID NO: 1884102
uuuagaaauguguacacua

SEQ ID NO: 2240241 - RNA, 19 nt, Artificial Sequence
  Description of Artificial Sequence: Synthetic oligonucleotide
  Antisense strand to SEQ ID NO: 2240240
uaguguacacauuucuaaa

SEQ ID NO: 2240242 - RNA, 19 nt, Artificial Sequence
  Description of Artificial Sequence: Synthetic oligonucleotide
  Sense strand starting at position 1606 of SEQ ID NO: 1884102
uagagugagguccagucua

SEQ ID NO: 2240243 - RNA, 19 nt, Artificial Sequence
  Description of Artificial Sequence: Synthetic oligonucleotide
  Antisense strand to SEQ ID NO: 2240242
uagacuggaccucacucua

SEQ ID NO: 2240244 - RNA, 19 nt, Artificial Sequence
  Description of Artificial Sequence: Synthetic oligonucleotide
  Sense strand starting at position 1693 of SEQ ID NO: 1884102
ggauauacaguuugggcaa

SEQ ID NO: 2240245 - RNA, 19 nt, Artificial Sequence
  Description of Artificial Sequence: Synthetic oligonucleotide
  Antisense strand to SEQ ID NO: 2240244
uugcccaaacuguauaucc

SEQ ID NO: 2240246 - RNA, 19 nt, Artificial Sequence
  Description of Artificial Sequence: Synthetic oligonucleotide
  Sense strand starting at position 1787 of SEQ ID NO: 1884102
ucaaaugaguuaucgauga

SEQ ID NO: 2240247 - RNA, 19 nt, Artificial Sequence
  Description of Artificial Sequence: Synthetic oligonucleotide
  Antisense strand to SEQ ID NO: 2240246
ucaucgauaacucauuuga

SEQ ID NO: 2240248 - RNA, 19 nt, Artificial Sequence
  Description of Artificial Sequence: Synthetic oligonucleotide
  Sense strand starting at position 1791 of SEQ ID NO: 1884102
augaguuaucgaugauggu

SEQ ID NO: 2240249 - RNA, 19 nt, Artificial Sequence
  Description of Artificial Sequence: Synthetic oligonucleotide
  Antisense strand to SEQ ID NO: 2240248
accaucaucgauaacucau

SEQ ID NO: 2240250 - RNA, 19 nt, Artificial Sequence
  Description of Artificial Sequence: Synthetic oligonucleotide
  Sense strand starting at position 1792 of SEQ ID NO: 1884102
ugaguuaucgaugaugguu

SEQ ID NO: 2240251 - RNA, 19 nt, Artificial Sequence
  Description of Artificial Sequence: Synthetic oligonucleotide
  Antisense strand to SEQ ID NO: 2240250
aaccaucaucgauaacuca

SEQ ID NO: 2240252 - RNA, 19 nt, Artificial Sequence
  Description of Artificial Sequence: Synthetic oligonucleotide
  Sense strand starting at position 1853 of SEQ ID NO: 1884102
cugccagauugauuguauu

SEQ ID NO: 2240253 - RNA, 19 nt, Artificial Sequence
  Description of Artificial Sequence: Synthetic oligonucleotide
  Antisense strand to SEQ ID NO: 2240252
aauacaaucaaucuggcag

SEQ ID NO: 2240254 - RNA, 19 nt, Artificial Sequence
  Description of Artificial Sequence: Synthetic oligonucleotide
  Sense strand starting at position 1870 of SEQ ID NO: 1884102
uuguacuuagcuuauauga

SEQ ID NO: 2240255 - RNA, 19 nt, Artificial Sequence
  Description of Artificial Sequence: Synthetic oligonucleotide
  Antisense strand to SEQ ID NO: 2240254
ucauauaagcuaaguacaa

SEQ ID NO: 2240256 - RNA, 19 nt, Artificial Sequence
  Description of Artificial Sequence: Synthetic oligonucleotide
  Sense strand starting at position 1878 of SEQ ID NO: 1884102
agcuuauaugaauguuaac

SEQ ID NO: 2240257 - RNA, 19 nt, Artificial Sequence
  Description of Artificial Sequence: Synthetic oligonucleotide
  Antisense strand to SEQ ID NO: 2240256
guuaacauucauauaagcu

SEQ ID NO: 2240258 - RNA, 19 nt, Artificial Sequence
  Description of Artificial Sequence: Synthetic oligonucleotide
  Sense strand starting at position 2193 of SEQ ID NO: 1884102
ccacuucuggcagaauguu

SEQ ID NO: 2240259 - RNA, 19 nt, Artificial Sequence
  Description of Artificial Sequence: Synthetic oligonucleotide
  Antisense strand to SEQ ID NO: 2240258
aacauucugccagaagugg

SEQ ID NO: 2240260 - RNA, 19 nt, Artificial Sequence
  Description of Artificial Sequence: Synthetic oligonucleotide
  Sense strand starting at position 2394 of SEQ ID NO: 1884102
aaggguguuccauaguaaa

SEQ ID NO: 2240261 - RNA, 19 nt, Artificial Sequence
  Description of Artificial Sequence: Synthetic oligonucleotide
  Antisense strand to SEQ ID NO: 2240260
uuuacuauggaacacccuu

SEQ ID NO: 2240262 - RNA, 19 nt, Artificial Sequence
  Description of Artificial Sequence: Synthetic oligonucleotide
  Sense strand starting at position 2547 of SEQ ID NO: 1884102
gaaggcugcuaccuagaga

SEQ ID NO: 2240263 - RNA, 19 nt, Artificial Sequence
  Description of Artificial Sequence: Synthetic oligonucleotide
  Antisense strand to SEQ ID NO: 2240262
ucucuagguagcagccuuc

SEQ ID NO: 2240264 - RNA, 19 nt, Artificial Sequence
  Description of Artificial Sequence: Synthetic oligonucleotide
  Sense strand starting at position 2550 of SEQ ID NO: 1884102
ggcugcuaccuagagacuu

SEQ ID NO: 2240265 - RNA, 19 nt, Artificial Sequence
  Description of Artificial Sequence: Synthetic oligonucleotide
  Antisense strand to SEQ ID NO: 2240264
aagucucuagguagcagcc

SEQ ID NO: 2240266 - RNA, 19 nt, Artificial Sequence
  Description of Artificial Sequence: Synthetic oligonucleotide
  Sense strand starting at position 2916 of SEQ ID NO: 1884102
acagaaugauacugagaaa

SEQ ID NO: 2240267 - RNA, 19 nt, Artificial Sequence
  Description of Artificial Sequence: Synthetic oligonucleotide
  Antisense strand to SEQ ID NO: 2240266
uuucucaguaucauucugu

SEQ ID NO: 2240268 - RNA, 19 nt, Artificial Sequence
  Description of Artificial Sequence: Synthetic oligonucleotide
  Sense strand starting at position 2992 of SEQ ID NO: 1884102
uaagauaugguauaucugu

SEQ ID NO: 2240269 - RNA, 19 nt, Artificial Sequence
  Description of Artificial Sequence: Synthetic oligonucleotide
  Antisense strand to SEQ ID NO: 2240268
acagauauaccauaucuua

SEQ ID NO: 2240270 - RNA, 19 nt, Artificial Sequence
  Description of Artificial Sequence: Synthetic oligonucleotide
  Sense strand starting at position 3080 of SEQ ID NO: 1884102
guugcagguuucuuaugaa

SEQ ID NO: 2240271 - RNA, 19 nt, Artificial Sequence
  Description of Artificial Sequence: Synthetic oligonucleotide
  Antisense strand to SEQ ID NO: 2240270
uucauaagaaaccugcaac

SEQ ID NO: 2240272 - RNA, 19 nt, Artificial Sequence
  Description of Artificial Sequence: Synthetic oligonucleotide
  Sense strand starting at position 3171 of SEQ ID NO: 1884102
uaucaaguacuuuggagua

SEQ ID NO: 2240273 - RNA, 19 nt, Artificial Sequence
  Description of Artificial Sequence: Synthetic oligonucleotide
  Antisense strand to SEQ ID NO: 2240272
uacuccaaaguacuugaua

SEQ ID NO: 2240274 - RNA, 19 nt, Artificial Sequence
  Description of Artificial Sequence: Synthetic oligonucleotide
  Sense strand starting at position 3184 of SEQ ID NO: 1884102
ggaguagcuucaucaggau

SEQ ID NO: 2240275 - RNA, 19 nt, Artificial Sequence
  Description of Artificial Sequence: Synthetic oligonucleotide
  Antisense strand to SEQ ID NO: 2240274
auccugaugaagcuacucc

SEQ ID NO: 2240276 - RNA, 19 nt, Artificial Sequence
  Description of Artificial Sequence: Synthetic oligonucleotide
  Sense strand starting at position 3220 of SEQ ID NO: 1884102
uugcuugguuaauucuaga

SEQ ID NO: 2240277 - RNA, 19 nt, Artificial Sequence
  Description of Artificial Sequence: Synthetic oligonucleotide
  Antisense strand to SEQ ID NO: 2240276
ucuagaauuaaccaagcaa

SEQ ID NO: 2240278 - RNA, 19 nt, Artificial Sequence
  Description of Artificial Sequence: Synthetic oligonucleotide
  Sense strand starting at position 3225 of SEQ ID NO: 1884102
ugguuaauucuagaguagg

SEQ ID NO: 2240279 - RNA, 19 nt, Artificial Sequence
  Description of Artificial Sequence: Synthetic oligonucleotide
  Antisense strand to SEQ ID NO: 2240278
ccuacucuagaauuaacca

SEQ ID NO: 2240280 - RNA, 19 nt, Artificial Sequence
  Description of Artificial Sequence: Synthetic oligonucleotide
  Sense strand starting at position 3235 of SEQ ID NO: 1884102
uagaguaggcaguaaugua

SEQ ID NO: 2240281 - RNA, 19 nt, Artificial Sequence
  Description of Artificial Sequence: Synthetic oligonucleotide
  Antisense strand to SEQ ID NO: 2240280
uacauuacugccuacucua

SEQ ID NO: 2240282 - RNA, 19 nt, Artificial Sequence
  Description of Artificial Sequence: Synthetic oligonucleotide
  Sense strand starting at position 3313 of SEQ ID NO: 1884102
agcguagugguucaaauau

SEQ ID NO: 2240283 - RNA, 19 nt, Artificial Sequence
  Description of Artificial Sequence: Synthetic oligonucleotide
  Antisense strand to SEQ ID NO: 2240282
auauuugaaccacuacgcu

SEQ ID NO: 2240284 - RNA, 19 nt, Artificial Sequence
  Description of Artificial Sequence: Synthetic oligonucleotide
  Sense strand starting at position 3441 of SEQ ID NO: 1884102
agugaaucauagccauaaa

SEQ ID NO: 2240285 - RNA, 19 nt, Artificial Sequence
  Description of Artificial Sequence: Synthetic oligonucleotide
  Antisense strand to SEQ ID NO: 2240284
uuuauggcuaugauucacu

SEQ ID NO: 2240286 - RNA, 19 nt, Artificial Sequence
  Description of Artificial Sequence: Synthetic oligonucleotide
  Sense strand starting at position 3600 of SEQ ID NO: 1884102
cccgaacugcuuugggauu

SEQ ID NO: 2240287 - RNA, 19 nt, Artificial Sequence
  Description of Artificial Sequence: Synthetic oligonucleotide
  Antisense strand to SEQ ID NO: 2240286
aaucccaaagcaguucggg

SEQ ID NO: 2240288 - RNA, 19 nt, Artificial Sequence
  Description of Artificial Sequence: Synthetic oligonucleotide
  Sense strand starting at position 3747 of SEQ ID NO: 1884102
gagcuuagagcucagaaug

SEQ ID NO: 2240289 - RNA, 19 nt, Artificial Sequence
  Description of Artificial Sequence: Synthetic oligonucleotide
  Antisense strand to SEQ ID NO: 2240288
cauucugagcucuaagcuc

SEQ ID NO: 2240290 - RNA, 19 nt, Artificial Sequence
  Description of Artificial Sequence: Synthetic oligonucleotide
  Sense strand starting at position 3752 of SEQ ID NO: 1884102
uagagcucagaauguaaga

SEQ ID NO: 2240291 - RNA, 19 nt, Artificial Sequence
  Description of Artificial Sequence: Synthetic oligonucleotide
  Antisense strand to SEQ ID NO: 2240290
ucuuacauucugagcucua

SEQ ID NO: 2240292 - RNA, 19 nt, Artificial Sequence
  Description of Artificial Sequence: Synthetic oligonucleotide
  Sense strand starting at position 3763 of SEQ ID NO: 1884102
auguaagaacugugcagua

SEQ ID NO: 2240293 - RNA, 19 nt, Artificial Sequence
  Description of Artificial Sequence: Synthetic oligonucleotide
  Antisense strand to SEQ ID NO: 2240292
uacugcacaguucuuacau

SEQ ID NO: 2240294 - RNA, 19 nt, Artificial Sequence
  Description of Artificial Sequence: Synthetic oligonucleotide
  Sense strand starting at position 3765 of SEQ ID NO: 1884102
guaagaacugugcaguaau

SEQ ID NO: 2240295 - RNA, 19 nt, Artificial Sequence
  Description of Artificial Sequence: Synthetic oligonucleotide
  Antisense strand to SEQ ID NO: 2240294
auuacugcacaguucuuac

SEQ ID NO: 2240296 - RNA, 19 nt, Artificial Sequence
  Description of Artificial Sequence: Synthetic oligonucleotide
  Sense strand starting at position 3768 of SEQ ID NO: 1884102
agaacugugcaguaauugu

SEQ ID NO: 2240297 - RNA, 19 nt, Artificial Sequence
  Description of Artificial Sequence: Synthetic oligonucleotide
  Antisense strand to SEQ ID NO: 2240296
acaauuacugcacaguucu

SEQ ID NO: 2240298 - RNA, 19 nt, Artificial Sequence
  Description of Artificial Sequence: Synthetic oligonucleotide
  Sense strand starting at position 3775 of SEQ ID NO: 1884102
ugcaguaauugucuccuaa

SEQ ID NO: 2240299 - RNA, 19 nt, Artificial Sequence
  Description of Artificial Sequence: Synthetic oligonucleotide
  Antisense strand to SEQ ID NO: 2240298
uuaggagacaauuacugca

SEQ ID NO: 2240300 - RNA, 19 nt, Artificial Sequence
  Description of Artificial Sequence: Synthetic oligonucleotide
  Sense strand starting at position 3779 of SEQ ID NO: 1884102
guaauugucuccuaaauuu

SEQ ID NO: 2240301 - RNA, 19 nt, Artificial Sequence
  Description of Artificial Sequence: Synthetic oligonucleotide
  Antisense strand to SEQ ID NO: 2240300
aaauuuaggagacaauuac

SEQ ID NO: 2240302 - RNA, 19 nt, Artificial Sequence
  Description of Artificial Sequence: Synthetic oligonucleotide
  Sense strand starting at position 3914 of SEQ ID NO: 1884102
aaacaagcucugugagcuu

SEQ ID NO: 2240303 - RNA, 19 nt, Artificial Sequence
  Description of Artificial Sequence: Synthetic oligonucleotide
  Antisense strand to SEQ ID NO: 2240302
aagcucacagagcuuguuu

SEQ ID NO: 2240304 - RNA, 19 nt, Artificial Sequence
  Description of Artificial Sequence: Synthetic oligonucleotide
  Sense strand starting at position 3926 of SEQ ID NO: 1884102
ugagcuucggcuuaaagag

SEQ ID NO: 2240305 - RNA, 19 nt, Artificial Sequence
  Description of Artificial Sequence: Synthetic oligonucleotide
  Antisense strand to SEQ ID NO: 2240304
cucuuuaagccgaagcuca

SEQ ID NO: 2240306 - RNA, 19 nt, Artificial Sequence
  Description of Artificial Sequence: Synthetic oligonucleotide
  Sense strand starting at position 323 of SEQ ID NO: 1884103
gcaugaggcuggucugaaa

SEQ ID NO: 2240307 - RNA, 19 nt, Artificial Sequence
  Description of Artificial Sequence: Synthetic oligonucleotide
  Antisense strand to SEQ ID NO: 2240306
uuucagaccagccucaugc

SEQ ID NO: 2240308 - RNA, 19 nt, Artificial Sequence
  Description of Artificial Sequence: Synthetic oligonucleotide
  Sense strand starting at position 498 of SEQ ID NO: 1884103
auuaauggcuuuccuuaga

SEQ ID NO: 2240309 - RNA, 19 nt, Artificial Sequence
  Description of Artificial Sequence: Synthetic oligonucleotide
  Antisense strand to SEQ ID NO: 2240308
ucuaaggaaagccauuaau

SEQ ID NO: 2240310 - RNA, 19 nt, Artificial Sequence
  Description of Artificial Sequence: Synthetic oligonucleotide
  Sense strand starting at position 540 of SEQ ID NO: 1884103
gcacaauagccucaagaac

SEQ ID NO: 2240311 - RNA, 19 nt, Artificial Sequence
  Description of Artificial Sequence: Synthetic oligonucleotide
  Antisense strand to SEQ ID NO: 2240310
guucuugaggcuauugugc

SEQ ID NO: 2240312 - RNA, 19 nt, Artificial Sequence
  Description of Artificial Sequence: Synthetic oligonucleotide
  Sense strand starting at position 608 of SEQ ID NO: 1884103
ucaacugguuccgucuaca

SEQ ID NO: 2240313 - RNA, 19 nt, Artificial Sequence
  Description of Artificial Sequence: Synthetic oligonucleotide
  Antisense strand to SEQ ID NO: 2240312
uguagacggaaccaguuga

SEQ ID NO: 2240314 - RNA, 19 nt, Artificial Sequence
  Description of Artificial Sequence: Synthetic oligonucleotide
  Sense strand starting at position 659 of SEQ ID NO: 1884103
uuugaaauguuugcugaua

SEQ ID NO: 2240315 - RNA, 19 nt, Artificial Sequence
  Description of Artificial Sequence: Synthetic oligonucleotide
  Antisense strand to SEQ ID NO: 2240314
uaucagcaaacauuucaaa

SEQ ID NO: 2240316 - RNA, 19 nt, Artificial Sequence
  Description of Artificial Sequence: Synthetic oligonucleotide
  Sense strand starting at position 660 of SEQ ID NO: 1884103
uugaaauguuugcugauau

SEQ ID NO: 2240317 - RNA, 19 nt, Artificial Sequence
  Description of Artificial Sequence: Synthetic oligonucleotide
  Antisense strand to SEQ ID NO: 2240316
auaucagcaaacauuucaa

SEQ ID NO: 2240318 - RNA, 19 nt, Artificial Sequence
  Description of Artificial Sequence: Synthetic oligonucleotide
  Sense strand starting at position 701 of SEQ ID NO: 1884103
guuagcagugcuugggaaa

SEQ ID NO: 2240319 - RNA, 19 nt, Artificial Sequence
  Description of Artificial Sequence: Synthetic oligonucleotide
  Antisense strand to SEQ ID NO: 2240318
uuucccaagcacugcuaac

SEQ ID NO: 2240320 - RNA, 19 nt, Artificial Sequence
  Description of Artificial Sequence: Synthetic oligonucleotide
  Sense strand starting at position 702 of SEQ ID NO: 1884103
uuagcagugcuugggaaau

SEQ ID NO: 2240321 - RNA, 19 nt, Artificial Sequence
  Description of Artificial Sequence: Synthetic oligonucleotide
  Antisense strand to SEQ ID NO: 2240320
auuucccaagcacugcuaa

SEQ ID NO: 2240322 - RNA, 19 nt, Artificial Sequence
  Description of Artificial Sequence: Synthetic oligonucleotide
  Sense strand starting at position 1320 of SEQ ID NO: 1884103
gguuccucaaguuaugaag

SEQ ID NO: 2240323 - RNA, 19 nt, Artificial Sequence
  Description of Artificial Sequence: Synthetic oligonucleotide
  Antisense strand to SEQ ID NO: 2240322
cuucauaacuugaggaacc

SEQ ID NO: 2240324 - RNA, 19 nt, Artificial Sequence
  Description of Artificial Sequence: Synthetic oligonucleotide
  Sense strand starting at position 1704 of SEQ ID NO: 1884103
uccuuacuuuguguuacau

SEQ ID NO: 2240325 - RNA, 19 nt, Artificial Sequence
  Description of Artificial Sequence: Synthetic oligonucleotide
  Antisense strand to SEQ ID NO: 2240324
auguaacacaaaguaagga

SEQ ID NO: 2240326 - RNA, 19 nt, Artificial Sequence
  Description of Artificial Sequence: Synthetic oligonucleotide
  Sense strand starting at position 1798 of SEQ ID NO: 1884103
aagaccuuuggaggucuaa

SEQ ID NO: 2240327 - RNA, 19 nt, Artificial Sequence
  Description of Artificial Sequence: Synthetic oligonucleotide
  Antisense strand to SEQ ID NO: 2240326
uuagaccuccaaaggucuu

SEQ ID NO: 2240328 - RNA, 19 nt, Artificial Sequence
  Description of Artificial Sequence: Synthetic oligonucleotide
  Sense strand starting at position 1910 of SEQ ID NO: 1884103
uguagaauaugguuuggaa

SEQ ID NO: 2240329 - RNA, 19 nt, Artificial Sequence
  Description of Artificial Sequence: Synthetic oligonucleotide
  Antisense strand to SEQ ID NO: 2240328
uuccaaaccauauucuaca

SEQ ID NO: 2240330 - RNA, 19 nt, Artificial Sequence
  Description of Artificial Sequence: Synthetic oligonucleotide
  Sense strand starting at position 1912 of SEQ ID NO: 1884103
uagaauaugguuuggaauu

SEQ ID NO: 2240331 - RNA, 19 nt, Artificial Sequence
  Description of Artificial Sequence: Synthetic oligonucleotide
  Antisense strand to SEQ ID NO: 2240330
aauuccaaaccauauucua

SEQ ID NO: 2240332 - RNA, 19 nt, Artificial Sequence
  Description of Artificial Sequence: Synthetic oligonucleotide
  Sense strand starting at position 2113 of SEQ ID NO: 1884103
cucuaacucugguugacuu

SEQ ID NO: 2240333 - RNA, 19 nt, Artificial Sequence
  Description of Artificial Sequence: Synthetic oligonucleotide
  Antisense strand to SEQ ID NO: 2240332
aagucaaccagaguuagag

SEQ ID NO: 2240334 - RNA, 19 nt, Artificial Sequence
  Description of Artificial Sequence: Synthetic oligonucleotide
  Sense strand starting at position 2135 of SEQ ID NO: 1884103
guaugugcaaaccgagaua

SEQ ID NO: 2240335 - RNA, 19 nt, Artificial Sequence
  Description of Artificial Sequence: Synthetic oligonucleotide
  Antisense strand to SEQ ID NO: 2240334
uaucucgguuugcacauac

SEQ ID NO: 2240336 - RNA, 19 nt, Artificial Sequence
  Description of Artificial Sequence: Synthetic oligonucleotide
  Sense strand starting at position 2226 of SEQ ID NO: 1884103
gucucugaucaucggguga

SEQ ID NO: 2240337 - RNA, 19 nt, Artificial Sequence
  Description of Artificial Sequence: Synthetic oligonucleotide
  Antisense strand to SEQ ID NO: 2240336
ucacccgaugaucagagac

SEQ ID NO: 2240338 - RNA, 19 nt, Artificial Sequence
  Description of Artificial Sequence: Synthetic oligonucleotide
  Sense strand starting at position 2304 of SEQ ID NO: 1884103
ggacauugguccucagacc

SEQ ID NO: 2240339 - RNA, 19 nt, Artificial Sequence
  Description of Artificial Sequence: Synthetic oligonucleotide
  Antisense strand to SEQ ID NO: 2240338
ggucugaggaccaaugucc

SEQ ID NO: 2240340 - RNA, 19 nt, Artificial Sequence
  Description of Artificial Sequence: Synthetic oligonucleotide
  Sense strand starting at position 2313 of SEQ ID NO: 1884103
uccucagacccaggauuaa

SEQ ID NO: 2240341 - RNA, 19 nt, Artificial Sequence
  Description of Artificial Sequence: Synthetic oligonucleotide
  Antisense strand to SEQ ID NO: 2240340
uuaauccugggucugagga

SEQ ID NO: 2240342 - RNA, 19 nt, Artificial Sequence
  Description of Artificial Sequence: Synthetic oligonucleotide
  Sense strand starting at position 2380 of SEQ ID NO: 1884103
aguuuccauuguguaaaca

SEQ ID NO: 2240343 - RNA, 19 nt, Artificial Sequence
  Description of Artificial Sequence: Synthetic oligonucleotide
  Antisense strand to SEQ ID NO: 2240342
uguuuacacaauggaaacu

SEQ ID NO: 2240344 - RNA, 19 nt, Artificial Sequence
  Description of Artificial Sequence: Synthetic oligonucleotide
  Sense strand starting at position 2381 of SEQ ID NO: 1884103
guuuccauuguguaaacau

SEQ ID NO: 2240345 - RNA, 19 nt, Artificial Sequence
  Description of Artificial Sequence: Synthetic oligonucleotide
  Antisense strand to SEQ ID NO: 2240344
auguuuacacaauggaaac

SEQ ID NO: 2240346 - RNA, 19 nt, Artificial Sequence
  Description of Artificial Sequence: Synthetic oligonucleotide
  Sense strand starting at position 2413 of SEQ ID NO: 1884103
ggcuuuaauugagugaaag

SEQ ID NO: 2240347 - RNA, 19 nt, Artificial Sequence
  Description of Artificial Sequence: Synthetic oligonucleotide
  Antisense strand to SEQ ID NO: 2240346
cuuucacucaauuaaagcc

SEQ ID NO: 2240348 - RNA, 19 nt, Artificial Sequence
  Description of Artificial Sequence: Synthetic oligonucleotide
  Sense strand starting at position 2414 of SEQ ID NO: 1884103
gcuuuaauugagugaaagg

SEQ ID NO: 2240349 - RNA, 19 nt, Artificial Sequence
  Description of Artificial Sequence: Synthetic oligonucleotide
  Antisense strand to SEQ ID NO: 2240348
ccuuucacucaauuaaagc

SEQ ID NO: 2240350 - RNA, 19 nt, Artificial Sequence
  Description of Artificial Sequence: Synthetic oligonucleotide
  Sense strand starting at position 2437 of SEQ ID NO: 1884103
guuccagcucuguucugua

SEQ ID NO: 2240351 - RNA, 19 nt, Artificial Sequence
  Description of Artificial Sequence: Synthetic oligonucleotide
  Antisense strand to SEQ ID NO: 2240350
uacagaacagagcuggaac

SEQ ID NO: 2240352 - RNA, 19 nt, Artificial Sequence
  Description of Artificial Sequence: Synthetic oligonucleotide
  Sense strand starting at position 2499 of SEQ ID NO: 1884103
gcaacacagagaugauagu

SEQ ID NO: 2240353 - RNA, 19 nt, Artificial Sequence
  Description of Artificial Sequence: Synthetic oligonucleotide
  Antisense strand to SEQ ID NO: 2240352
acuaucaucucuguguugc

SEQ ID NO: 2240354 - RNA, 19 nt, Artificial Sequence
  Description of Artificial Sequence: Synthetic oligonucleotide
  Sense strand starting at position 2521 of SEQ ID NO: 1884103
uuccuuugaaaccguggua

SEQ ID NO: 2240355 - RNA, 19 nt, Artificial Sequence
  Description of Artificial Sequence: Synthetic oligonucleotide
  Antisense strand to SEQ ID NO: 2240354
uaccacgguuucaaaggaa

SEQ ID NO: 2240356 - RNA, 19 nt, Artificial Sequence
  Description of Artificial Sequence: Synthetic oligonucleotide
  Sense strand starting at position 2557 of SEQ ID NO: 1884103
aggauaaguugacagauac

SEQ ID NO: 2240357 - RNA, 19 nt, Artificial Sequence
  Description of Artificial Sequence: Synthetic oligonucleotide
  Antisense strand to SEQ ID NO: 2240356
guaucugucaacuuauccu

SEQ ID NO: 2240358 - RNA, 19 nt, Artificial Sequence
  Description of Artificial Sequence: Synthetic oligonucleotide
  Sense strand starting at position 2575 of SEQ ID NO: 1884103
cgucucacauauguuuaua

SEQ ID NO: 2240359 - RNA, 19 nt, Artificial Sequence
  Description of Artificial Sequence: Synthetic oligonucleotide
  Antisense strand to SEQ ID NO: 2240358
uauaaacauaugugagacg

SEQ ID NO: 2240360 - RNA, 19 nt, Artificial Sequence
  Description of Artificial Sequence: Synthetic oligonucleotide
  Sense strand starting at position 3255 of SEQ ID NO: 1884103
ggcauauaugggugcucaa

SEQ ID NO: 2240361 - RNA, 19 nt, Artificial Sequence
  Description of Artificial Sequence: Synthetic oligonucleotide
  Antisense strand to SEQ ID NO: 2240360
uugagcacccauauaugcc

SEQ ID NO: 2240362 - RNA, 19 nt, Artificial Sequence
  Description of Artificial Sequence: Synthetic oligonucleotide
  Sense strand starting at position 3258 of SEQ ID NO: 1884103
auauaugggugcucaauag

SEQ ID NO: 2240363 - RNA, 19 nt, Artificial Sequence
  Description of Artificial Sequence: Synthetic oligonucleotide
  Antisense strand to SEQ ID NO: 2240362
cuauugagcacccauauau

SEQ ID NO: 2240364 - RNA, 19 nt, Artificial Sequence
  Description of Artificial Sequence: Synthetic oligonucleotide
  Sense strand starting at position 3262 of SEQ ID NO: 1884103
augggugcucaauagacau

SEQ ID NO: 2240365 - RNA, 19 nt, Artificial Sequence
  Description of Artificial Sequence: Synthetic oligonucleotide
  Antisense strand to SEQ ID NO: 2240364
augucuauugagcacccau

SEQ ID NO: 2240366 - RNA, 19 nt, Artificial Sequence
  Description of Artificial Sequence: Synthetic oligonucleotide
  Sense strand starting at position 3273 of SEQ ID NO: 1884103
auagacauuugucgaauga

SEQ ID NO: 2240367 - RNA, 19 nt, Artificial Sequence
  Description of Artificial Sequence: Synthetic oligonucleotide
  Antisense strand to SEQ ID NO: 2240366
ucauucgacaaaugucuau

SEQ ID NO: 2240368 - RNA, 19 nt, Artificial Sequence
  Description of Artificial Sequence: Synthetic oligonucleotide
  Sense strand starting at position 3286 of SEQ ID NO: 1884103
gaaugacuaucagauggua

SEQ ID NO: 2240369 - RNA, 19 nt, Artificial Sequence
  Description of Artificial Sequence: Synthetic oligonucleotide
  Antisense strand to SEQ ID NO: 2240368
uaccaucugauagucauuc

SEQ ID NO: 2240370 - RNA, 19 nt, Artificial Sequence
  Description of Artificial Sequence: Synthetic oligonucleotide
  Sense strand starting at position 3301 of SEQ ID NO: 1884103
gguagacauuucuagaagc

SEQ ID NO: 2240371 - RNA, 19 nt, Artificial Sequence
  Description of Artificial Sequence: Synthetic oligonucleotide
  Antisense strand to SEQ ID NO: 2240370
gcuucuagaaaugucuacc

SEQ ID NO: 2240372 - RNA, 19 nt, Artificial Sequence
  Description of Artificial Sequence: Synthetic oligonucleotide
  Sense strand starting at position 3473 of SEQ ID NO: 1884103
ggucuccagaccuagagua

SEQ ID NO: 2240373 - RNA, 19 nt, Artificial Sequence
  Description of Artificial Sequence: Synthetic oligonucleotide
  Antisense strand to SEQ ID NO: 2240372
uacucuaggucuggagacc

SEQ ID NO: 2240374 - RNA, 19 nt, Artificial Sequence
  Description of Artificial Sequence: Synthetic oligonucleotide
  Sense strand starting at position 3486 of SEQ ID NO: 1884103
agaguauaauagcuuugaa

SEQ ID NO: 2240375 - RNA, 19 nt, Artificial Sequence
  Description of Artificial Sequence: Synthetic oligonucleotide
  Antisense strand to SEQ ID NO: 2240374
uucaaagcuauuauacucu

SEQ ID NO: 2240376 - RNA, 19 nt, Artificial Sequence
  Description of Artificial Sequence: Synthetic oligonucleotide
  Sense strand starting at position 3652 of SEQ ID NO: 1884103
ucugaauuggucugcuuua

SEQ ID NO: 2240377 - RNA, 19 nt, Artificial Sequence
  Description of Artificial Sequence: Synthetic oligonucleotide
  Antisense strand to SEQ ID NO: 2240376
uaaagcagaccaauucaga

SEQ ID NO: 2240378 - RNA, 19 nt, Artificial Sequence
  Description of Artificial Sequence: Synthetic oligonucleotide
  Sense strand starting at position 3653 of SEQ ID NO: 1884103
cugaauuggucugcuuuau

SEQ ID NO: 2240379 - RNA, 19 nt, Artificial Sequence
  Description of Artificial Sequence: Synthetic oligonucleotide
  Antisense strand to SEQ ID NO: 2240378
auaaagcagaccaauucag

SEQ ID NO: 2240380 - RNA, 19 nt, Artificial Sequence
  Description of Artificial Sequence: Synthetic oligonucleotide
  Sense strand starting at position 3657 of SEQ ID NO: 1884103
auuggucugcuuuauacuu

SEQ ID NO: 2240381 - RNA, 19 nt, Artificial Sequence
  Description of Artificial Sequence: Synthetic oligonucleotide
  Antisense strand to SEQ ID NO: 2240380
aaguauaaagcagaccaau

SEQ ID NO: 2240382 - RNA, 19 nt, Artificial Sequence
  Description of Artificial Sequence: Synthetic oligonucleotide
  Sense strand starting at position 3680 of SEQ ID NO: 1884103
caaagauagucacuguggu

SEQ ID NO: 2240383 - RNA, 19 nt, Artificial Sequence
  Description of Artificial Sequence: Synthetic oligonucleotide
  Antisense strand to SEQ ID NO: 2240382
accacagugacuaucuuug

SEQ ID NO: 2240384 - RNA, 19 nt, Artificial Sequence
  Description of Artificial Sequence: Synthetic oligonucleotide
  Sense strand starting at position 3942 of SEQ ID NO: 1884103
aguguauugaauggugaga

SEQ ID NO: 2240385 - RNA, 19 nt, Artificial Sequence
  Description of Artificial Sequence: Synthetic oligonucleotide
  Antisense strand to SEQ ID NO: 2240384
ucucaccauucaauacacu

SEQ ID NO: 2240386 - RNA, 19 nt, Artificial Sequence
  Description of Artificial Sequence: Synthetic oligonucleotide
  Sense strand starting at position 68 of SEQ ID NO: 1884104
acagauaucucccuuugga

SEQ ID NO: 2240387 - RNA, 19 nt, Artificial Sequence
  Description of Artificial Sequence: Synthetic oligonucleotide
  Antisense strand to SEQ ID NO: 2240386
uccaaagggagauaucugu

SEQ ID NO: 2240388 - RNA, 19 nt, Artificial Sequence
  Description of Artificial Sequence: Synthetic oligonucleotide
  Sense strand starting at position 190 of SEQ ID NO: 1884104
uucuguuuccgacagaaau

SEQ ID NO: 2240389 - RNA, 19 nt, Artificial Sequence
  Description of Artificial Sequence: Synthetic oligonucleotide
  Antisense strand to SEQ ID NO: 2240388
auuucugucggaaacagaa

SEQ ID NO: 2240390 - RNA, 19 nt, Artificial Sequence
  Description of Artificial Sequence: Synthetic oligonucleotide
  Sense strand starting at position 200 of SEQ ID NO: 1884104
gacagaaauccagguguca

SEQ ID NO: 2240391 - RNA, 19 nt, Artificial Sequence
  Description of Artificial Sequence: Synthetic oligonucleotide
  Antisense strand to SEQ ID NO: 2240390
ugacaccuggauuucuguc

SEQ ID NO: 2240392 - RNA, 19 nt, Artificial Sequence
  Description of Artificial Sequence: Synthetic oligonucleotide
  Sense strand starting at position 381 of SEQ ID NO: 1884104
gcaggucuuguccacauau

SEQ ID NO: 2240393 - RNA, 19 nt, Artificial Sequence
  Description of Artificial Sequence: Synthetic oligonucleotide
  Antisense strand to SEQ ID NO: 2240392
auauguggacaagaccugc

SEQ ID NO: 2240394 - RNA, 19 nt, Artificial Sequence
  Description of Artificial Sequence: Synthetic oligonucleotide
  Sense strand starting at position 383 of SEQ ID NO: 1884104
aggucuuguccacauauau

SEQ ID NO: 2240395 - RNA, 19 nt, Artificial Sequence
  Description of Artificial Sequence: Synthetic oligonucleotide
  Antisense strand to SEQ ID NO: 2240394
auauauguggacaagaccu

SEQ ID NO: 2240396 - RNA, 19 nt, Artificial Sequence
  Description of Artificial Sequence: Synthetic oligonucleotide
  Sense strand starting at position 725 of SEQ ID NO: 1884104
aggcuucucugacccuaga

SEQ ID NO: 2240397 - RNA, 19 nt, Artificial Sequence
  Description of Artificial Sequence: Synthetic oligonucleotide
  Antisense strand to SEQ ID NO: 2240396
ucuagggucagagaagccu

SEQ ID NO: 2240398 - RNA, 19 nt, Artificial Sequence
  Description of Artificial Sequence: Synthetic oligonucleotide
  Sense strand starting at position 883 of SEQ ID NO: 1884104
auccauauuuguuggaaga

SEQ ID NO: 2240399 - RNA, 19 nt, Artificial Sequence
  Description of Artificial Sequence: Synthetic oligonucleotide
  Antisense strand to SEQ ID NO: 2240398
ucuuccaacaaauauggau

SEQ ID NO: 2240400 - RNA, 19 nt, Artificial Sequence
  Description of Artificial Sequence: Synthetic oligonucleotide
  Sense strand starting at position 885 of SEQ ID NO: 1884104
ccauauuuguuggaagaau

SEQ ID NO: 2240401 - RNA, 19 nt, Artificial Sequence
  Description of Artificial Sequence: Synthetic oligonucleotide
  Antisense strand to SEQ ID NO: 2240400
auucuuccaacaaauaugg

SEQ ID NO: 2240402 - RNA, 19 nt, Artificial Sequence
  Description of Artificial Sequence: Synthetic oligonucleotide
  Sense strand starting at position 1001 of SEQ ID NO: 1884104
uccagauuggcugguagau

SEQ ID NO: 2240403 - RNA, 19 nt, Artificial Sequence
  Description of Artificial Sequence: Synthetic oligonucleotide
  Antisense strand to SEQ ID NO: 2240402
aucuaccagccaaucugga

SEQ ID NO: 2240404 - RNA, 19 nt, Artificial Sequence
  Description of Artificial Sequence: Synthetic oligonucleotide
  Sense strand starting at position 1090 of SEQ ID NO: 1884104
ggcuuaauauguguugaaa

SEQ ID NO: 2240405 - RNA, 19 nt, Artificial Sequence
  Description of Artificial Sequence: Synthetic oligonucleotide
  Antisense strand to SEQ ID NO: 2240404
uuucaacacauauuaagcc

SEQ ID NO: 2240406 - RNA, 19 nt, Artificial Sequence
  Description of Artificial Sequence: Synthetic oligonucleotide
  Sense strand starting at position 1125 of SEQ ID NO: 1884104
gugcucaucccuugagaga

SEQ ID NO: 2240407 - RNA, 19 nt, Artificial Sequence
  Description of Artificial Sequence: Synthetic oligonucleotide
  Antisense strand to SEQ ID NO: 2240406
ucucucaagggaugagcac

SEQ ID NO: 2240408 - RNA, 19 nt, Artificial Sequence
  Description of Artificial Sequence: Synthetic oligonucleotide
  Sense strand starting at position 1126 of SEQ ID NO: 1884104
ugcucaucccuugagagaa

SEQ ID NO: 2240409 - RNA, 19 nt, Artificial Sequence
  Description of Artificial Sequence: Synthetic oligonucleotide
  Antisense strand to SEQ ID NO: 2240408
uucucucaagggaugagca

SEQ ID NO: 2240410 - RNA, 19 nt, Artificial Sequence
  Description of Artificial Sequence: Synthetic oligonucleotide
  Sense strand starting at position 1643 of SEQ ID NO: 1884104
ggaaaucagccuugccacu

SEQ ID NO: 2240411 - RNA, 19 nt, Artificial Sequence
  Description of Artificial Sequence: Synthetic oligonucleotide
  Antisense strand to SEQ ID NO: 2240410
aguggcaaggcugauuucc

SEQ ID NO: 2240412 - RNA, 19 nt, Artificial Sequence
  Description of Artificial Sequence: Synthetic oligonucleotide
  Sense strand starting at position 1776 of SEQ ID NO: 1884104
cugggugagcucuguuaag

SEQ ID NO: 2240413 - RNA, 19 nt, Artificial Sequence
  Description of Artificial Sequence: Synthetic oligonucleotide
  Antisense strand to SEQ ID NO: 2240412
cuuaacagagcucacccag

SEQ ID NO: 2240414 - RNA, 19 nt, Artificial Sequence
  Description of Artificial Sequence: Synthetic oligonucleotide
  Sense strand starting at position 1906 of SEQ ID NO: 1884104
gggacuugucauggcucca

SEQ ID NO: 2240415 - RNA, 19 nt, Artificial Sequence
  Description of Artificial Sequence: Synthetic oligonucleotide
  Antisense strand to SEQ ID NO: 2240414
uggagccaugacaaguccc

SEQ ID NO: 2240416 - RNA, 19 nt, Artificial Sequence
  Description of Artificial Sequence: Synthetic oligonucleotide
  Sense strand starting at position 2399 of SEQ ID NO: 1884104
ggcuacggugaggauuaaa

SEQ ID NO: 2240417 - RNA, 19 nt, Artificial Sequence
  Description of Artificial Sequence: Synthetic oligonucleotide
  Antisense strand to SEQ ID NO: 2240416
uuuaauccucaccguagcc

SEQ ID NO: 2240418 - RNA, 19 nt, Artificial Sequence
  Description of Artificial Sequence: Synthetic oligonucleotide
  Sense strand starting at position 2413 of SEQ ID NO: 1884104
uuaaaugagcuagguaaag

SEQ ID NO: 2240419 - RNA, 19 nt, Artificial Sequence
  Description of Artificial Sequence: Synthetic oligonucleotide
  Antisense strand to SEQ ID NO: 2240418
cuuuaccuagcucauuuaa

SEQ ID NO: 2240420 - RNA, 19 nt, Artificial Sequence
  Description of Artificial Sequence: Synthetic oligonucleotide
  Sense strand starting at position 2424 of SEQ ID NO: 1884104
agguaaagcauuugcaagu

SEQ ID NO: 2240421 - RNA, 19 nt, Artificial Sequence
  Description of Artificial Sequence: Synthetic oligonucleotide
  Antisense strand to SEQ ID NO: 2240420
acuugcaaaugcuuuaccu

SEQ ID NO: 2240422 - RNA, 19 nt, Artificial Sequence
  Description of Artificial Sequence: Synthetic oligonucleotide
  Sense strand starting at position 2425 of SEQ ID NO: 1884104
gguaaagcauuugcaaguu

SEQ ID NO: 2240423 - RNA, 19 nt, Artificial Sequence
  Description of Artificial Sequence: Synthetic oligonucleotide
  Antisense strand to SEQ ID NO: 2240422
aacuugcaaaugcuuuacc

SEQ ID NO: 2240424 - RNA, 19 nt, Artificial Sequence
  Description of Artificial Sequence: Synthetic oligonucleotide
  Sense strand starting at position 2531 of SEQ ID NO: 1884104
ggcccauauccugggagaa

SEQ ID NO: 2240425 - RNA, 19 nt, Artificial Sequence
  Description of Artificial Sequence: Synthetic oligonucleotide
  Antisense strand to SEQ ID NO: 2240424
uucucccaggauaugggcc

SEQ ID NO: 2240426 - RNA, 19 nt, Artificial Sequence
  Description of Artificial Sequence: Synthetic oligonucleotide
  Sense strand starting at position 2532 of SEQ ID NO: 1884104
gcccauauccugggagaag

SEQ ID NO: 2240427 - RNA, 19 nt, Artificial Sequence
  Description of Artificial Sequence: Synthetic oligonucleotide
  Antisense strand to SEQ ID NO: 2240426
cuucucccaggauaugggc

SEQ ID NO: 2240428 - RNA, 19 nt, Artificial Sequence
  Description of Artificial Sequence: Synthetic oligonucleotide
  Sense strand starting at position 2626 of SEQ ID NO: 1884104
gguagaaaucauggucucu

SEQ ID NO: 2240429 - RNA, 19 nt, Artificial Sequence
  Description of Artificial Sequence: Synthetic oligonucleotide
  Antisense strand to SEQ ID NO: 2240428
agagaccaugauuucuacc

SEQ ID NO: 2240430 - RNA, 19 nt, Artificial Sequence
  Description of Artificial Sequence: Synthetic oligonucleotide
  Sense strand starting at position 2628 of SEQ ID NO: 1884104
uagaaaucauggucucuag

SEQ ID NO: 2240431 - RNA, 19 nt, Artificial Sequence
  Description of Artificial Sequence: Synthetic oligonucleotide
  Antisense strand to SEQ ID NO: 2240430
cuagagaccaugauuucua

SEQ ID NO: 2240432 - RNA, 19 nt, Artificial Sequence
  Description of Artificial Sequence: Synthetic oligonucleotide
  Sense strand starting at position 2733 of SEQ ID NO: 1884104
uuggacugguuaucugaga

SEQ ID NO: 2240433 - RNA, 19 nt, Artificial Sequence
  Description of Artificial Sequence: Synthetic oligonucleotide
  Antisense strand to SEQ ID NO: 2240432
ucucagauaaccaguccaa

SEQ ID NO: 2240434 - RNA, 19 nt, Artificial Sequence
  Description of Artificial Sequence: Synthetic oligonucleotide
  Sense strand starting at position 2877 of SEQ ID NO: 1884104
ugggcucauccaugugauu

SEQ ID NO: 2240435 - RNA, 19 nt, Artificial Sequence
  Description of Artificial Sequence: Synthetic oligonucleotide
  Antisense strand to SEQ ID NO: 2240434
aaucacauggaugagccca

SEQ ID NO: 2240436 - RNA, 19 nt, Artificial Sequence
  Description of Artificial Sequence: Synthetic oligonucleotide
  Sense strand starting at position 2940 of SEQ ID NO: 1884104
cugaaacaggccuguacau

SEQ ID NO: 2240437 - RNA, 19 nt, Artificial Sequence
  Description of Artificial Sequence: Synthetic oligonucleotide
  Antisense strand to SEQ ID NO: 2240436
auguacaggccuguuucag

SEQ ID NO: 2240438 - RNA, 19 nt, Artificial Sequence
  Description of Artificial Sequence: Synthetic oligonucleotide
  Sense strand starting at position 2974 of SEQ ID NO: 1884104
gugcuugugccacugaugu

SEQ ID NO: 2240439 - RNA, 19 nt, Artificial Sequence
  Description of Artificial Sequence: Synthetic oligonucleotide
  Antisense strand to SEQ ID NO: 2240438
acaucaguggcacaagcac

SEQ ID NO: 2240440 - RNA, 19 nt, Artificial Sequence
  Description of Artificial Sequence: Synthetic oligonucleotide
  Sense strand starting at position 3142 of SEQ ID NO: 1884104
gaagacaugugggaaacaa

SEQ ID NO: 2240441 - RNA, 19 nt, Artificial Sequence
  Description of Artificial Sequence: Synthetic oligonucleotide
  Antisense strand to SEQ ID NO: 2240440
uuguuucccacaugucuuc

SEQ ID NO: 2240442 - RNA, 19 nt, Artificial Sequence
  Description of Artificial Sequence: Synthetic oligonucleotide
  Sense strand starting at position 3184 of SEQ ID NO: 1884104
agguuaaacuggucuguau

SEQ ID NO: 2240443 - RNA, 19 nt, Artificial Sequence
  Description of Artificial Sequence: Synthetic oligonucleotide
  Antisense strand to SEQ ID NO: 2240442
auacagaccaguuuaaccu

SEQ ID NO: 2240444 - RNA, 19 nt, Artificial Sequence
  Description of Artificial Sequence: Synthetic oligonucleotide
  Sense strand starting at position 3186 of SEQ ID NO: 1884104
guuaaacuggucuguauac

SEQ ID NO: 2240445 - RNA, 19 nt, Artificial Sequence
  Description of Artificial Sequence: Synthetic oligonucleotide
  Antisense strand to SEQ ID NO: 2240444
guauacagaccaguuuaac

SEQ ID NO: 2240446 - RNA, 19 nt, Artificial Sequence
  Description of Artificial Sequence: Synthetic oligonucleotide
  Sense strand starting at position 3312 of SEQ ID NO: 1884104
cuagcauucuuccuguaug

SEQ ID NO: 2240447 - RNA, 19 nt, Artificial Sequence
  Description of Artificial Sequence: Synthetic oligonucleotide
  Antisense strand to SEQ ID NO: 2240446
cauacaggaagaaugcuag

SEQ ID NO: 2240448 - RNA, 19 nt, Artificial Sequence
  Description of Artificial Sequence: Synthetic oligonucleotide
  Sense strand starting at position 3380 of SEQ ID NO: 1884104
ccaugaugcugagcuccaa

SEQ ID NO: 2240449 - RNA, 19 nt, Artificial Sequence
  Description of Artificial Sequence: Synthetic oligonucleotide
  Antisense strand to SEQ ID NO: 2240448
uuggagcucagcaucaugg

SEQ ID NO: 2240450 - RNA, 19 nt, Artificial Sequence
  Description of Artificial Sequence: Synthetic oligonucleotide
  Sense strand starting at position 3545 of SEQ ID NO: 1884104
cccagaagugugggaguca

SEQ ID NO: 2240451 - RNA, 19 nt, Artificial Sequence
  Description of Artificial Sequence: Synthetic oligonucleotide
  Antisense strand to SEQ ID NO: 2240450
ugacucccacacuucuggg

SEQ ID NO: 2240452 - RNA, 19 nt, Artificial Sequence
  Description of Artificial Sequence: Synthetic oligonucleotide
  Sense strand starting at position 3626 of SEQ ID NO: 1884104
uccaucucccgagaagguu

SEQ ID NO: 2240453 - RNA, 19 nt, Artificial Sequence
  Description of Artificial Sequence: Synthetic oligonucleotide
  Antisense strand to SEQ ID NO: 2240452
aaccuucucgggagaugga

SEQ ID NO: 2240454 - RNA, 19 nt, Artificial Sequence
  Description of Artificial Sequence: Synthetic oligonucleotide
  Sense strand starting at position 3634 of SEQ ID NO: 1884104
ccgagaagguuccucaaau

SEQ ID NO: 2240455 - RNA, 19 nt, Artificial Sequence
  Description of Artificial Sequence: Synthetic oligonucleotide
  Antisense strand to SEQ ID NO: 2240454
auuugaggaaccuucucgg

SEQ ID NO: 2240456 - RNA, 19 nt, Artificial Sequence
  Description of Artificial Sequence: Synthetic oligonucleotide
  Sense strand starting at position 3635 of SEQ ID NO: 1884104
cgagaagguuccucaaaug

SEQ ID NO: 2240457 - RNA, 19 nt, Artificial Sequence
  Description of Artificial Sequence: Synthetic oligonucleotide
  Antisense strand to SEQ ID NO: 2240456
cauuugaggaaccuucucg

SEQ ID NO: 2240458 - RNA, 19 nt, Artificial Sequence
  Description of Artificial Sequence: Synthetic oligonucleotide
  Sense strand starting at position 3854 of SEQ ID NO: 1884104
ggcauaucagccuaagaug

SEQ ID NO: 2240459 - RNA, 19 nt, Artificial Sequence
  Description of Artificial Sequence: Synthetic oligonucleotide
  Antisense strand to SEQ ID NO: 2240458
caucuuaggcugauaugcc

SEQ ID NO: 2240460 - RNA, 19 nt, Artificial Sequence
  Description of Artificial Sequence: Synthetic oligonucleotide
  Sense strand starting at position 3902 of SEQ ID NO: 1884104
aauugaucgcagcauguua

SEQ ID NO: 2240461 - RNA, 19 nt, Artificial Sequence
  Description of Artificial Sequence: Synthetic oligonucleotide
  Antisense strand to SEQ ID NO: 2240460
uaacaugcugcgaucaauu

SEQ ID NO: 2240462 - RNA, 19 nt, Artificial Sequence
  Description of Artificial Sequence: Synthetic oligonucleotide
  Sense strand starting at position 3962 of SEQ ID NO: 1884104
ugucuaggcaucgagacaa

SEQ ID NO: 2240463 - RNA, 19 nt, Artificial Sequence
  Description of Artificial Sequence: Synthetic oligonucleotide
  Antisense strand to SEQ ID NO: 2240462
uugucucgaugccuagaca

SEQ ID NO: 2240464 - RNA, 19 nt, Artificial Sequence
  Description of Artificial Sequence: Synthetic oligonucleotide
  Sense strand starting at position 3983 of SEQ ID NO: 1884104
ggcucaccuccuugaaggu

SEQ ID NO: 2240465 - RNA, 19 nt, Artificial Sequence
  Description of Artificial Sequence: Synthetic oligonucleotide
  Antisense strand to SEQ ID NO: 2240464
accuucaaggaggugagcc

SEQ ID NO: 2240466 - RNA, 19 nt, Artificial Sequence
  Description of Artificial Sequence: Synthetic oligonucleotide
  Sense strand starting at position 12 of SEQ ID NO: 1884105
cuuguacuccuggagucaa

SEQ ID NO: 2240467 - RNA, 19 nt, Artificial Sequence
  Description of Artificial Sequence: Synthetic oligonucleotide
  Antisense strand to SEQ ID NO: 2240466
uugacuccaggaguacaag

SEQ ID NO: 2240468 - RNA, 19 nt, Artificial Sequence
  Description of Artificial Sequence: Synthetic oligonucleotide
  Sense strand starting at position 222 of SEQ ID NO: 1884105
cugucccuggucuauaaga

SEQ ID NO: 2240469 - RNA, 19 nt, Artificial Sequence
  Description of Artificial Sequence: Synthetic oligonucleotide
  Antisense strand to SEQ ID NO: 2240468
ucuuauagaccagggacag

SEQ ID NO: 2240470 - RNA, 19 nt, Artificial Sequence
  Description of Artificial Sequence: Synthetic oligonucleotide
  Sense strand starting at position 224 of SEQ ID NO: 1884105
gucccuggucuauaagacu

SEQ ID NO: 2240471 - RNA, 19 nt, Artificial Sequence
  Description of Artificial Sequence: Synthetic oligonucleotide
  Antisense strand to SEQ ID NO: 2240470
agucuuauagaccagggac

SEQ ID NO: 2240472 - RNA, 19 nt, Artificial Sequence
  Description of Artificial Sequence: Synthetic oligonucleotide
  Sense strand starting at position 255 of SEQ ID NO: 1884105
aauucuagugcugauguaa

SEQ ID NO: 2240473 - RNA, 19 nt, Artificial Sequence
  Description of Artificial Sequence: Synthetic oligonucleotide
  Antisense strand to SEQ ID NO: 2240472
uuacaucagcacuagaauu

SEQ ID NO: 2240474 - RNA, 19 nt, Artificial Sequence
  Description of Artificial Sequence: Synthetic oligonucleotide
  Sense strand starting at position 306 of SEQ ID NO: 1884105
uuccuaaaguauguacaau

SEQ ID NO: 2240475 - RNA, 19 nt, Artificial Sequence
  Description of Artificial Sequence: Synthetic oligonucleotide
  Antisense strand to SEQ ID NO: 2240474
auuguacauacuuuaggaa

SEQ ID NO: 2240476 - RNA, 19 nt, Artificial Sequence
  Description of Artificial Sequence: Synthetic oligonucleotide
  Sense strand starting at position 332 of SEQ ID NO: 1884105
uuuaaagcugcauaauaug

SEQ ID NO: 2240477 - RNA, 19 nt, Artificial Sequence
  Description of Artificial Sequence: Synthetic oligonucleotide
  Antisense strand to SEQ ID NO: 2240476
cauauuaugcagcuuuaaa

SEQ ID NO: 2240478 - RNA, 19 nt, Artificial Sequence
  Description of Artificial Sequence: Synthetic oligonucleotide
  Sense strand starting at position 518 of SEQ ID NO: 1884105
cgugacaaacauuagcuaa

SEQ ID NO: 2240479 - RNA, 19 nt, Artificial Sequence
  Description of Artificial Sequence: Synthetic oligonucleotide
  Antisense strand to SEQ ID NO: 2240478
uuagcuaauguuugucacg

SEQ ID NO: 2240480 - RNA, 19 nt, Artificial Sequence
  Description of Artificial Sequence: Synthetic oligonucleotide
  Sense strand starting at position 671 of SEQ ID NO: 1884105
acaagauaugaguguguga

SEQ ID NO: 2240481 - RNA, 19 nt, Artificial Sequence
  Description of Artificial Sequence: Synthetic oligonucleotide
  Antisense strand to SEQ ID NO: 2240480
ucacacacucauaucuugu

SEQ ID NO: 2240482 - RNA, 19 nt, Artificial Sequence
  Description of Artificial Sequence: Synthetic oligonucleotide
  Sense strand starting at position 673 of SEQ ID NO: 1884105
aagauaugagugugugaac

SEQ ID NO: 2240483 - RNA, 19 nt, Artificial Sequence
  Description of Artificial Sequence: Synthetic oligonucleotide
  Antisense strand to SEQ ID NO: 2240482
guucacacacucauaucuu

SEQ ID NO: 2240484 - RNA, 19 nt, Artificial Sequence
  Description of Artificial Sequence: Synthetic oligonucleotide
  Sense strand starting at position 674 of SEQ ID NO: 1884105
agauaugagugugugaacu

SEQ ID NO: 2240485 - RNA, 19 nt, Artificial Sequence
  Description of Artificial Sequence: Synthetic oligonucleotide
  Antisense strand to SEQ ID NO: 2240484
aguucacacacucauaucu

SEQ ID NO: 2240486 - RNA, 19 nt, Artificial Sequence
  Description of Artificial Sequence: Synthetic oligonucleotide
  Sense strand starting at position 678 of SEQ ID NO: 1884105
augagugugugaacucguu

SEQ ID NO: 2240487 - RNA, 19 nt, Artificial Sequence
  Description of Artificial Sequence: Synthetic oligonucleotide
  Antisense strand to SEQ ID NO: 2240486
aacgaguucacacacucau

SEQ ID NO: 2240488 - RNA, 19 nt, Artificial Sequence
  Description of Artificial Sequence: Synthetic oligonucleotide
  Sense strand starting at position 684 of SEQ ID NO: 1884105
gugugaacucguucauugc

SEQ ID NO: 2240489 - RNA, 19 nt, Artificial Sequence
  Description of Artificial Sequence: Synthetic oligonucleotide
  Antisense strand to SEQ ID NO: 2240488
gcaaugaacgaguucacac

SEQ ID NO: 2240490 - RNA, 19 nt, Artificial Sequence
  Description of Artificial Sequence: Synthetic oligonucleotide
  Sense strand starting at position 1009 of SEQ ID NO: 1884105
uugauaacugcuggauaua

SEQ ID NO: 2240491 - RNA, 19 nt, Artificial Sequence
  Description of Artificial Sequence: Synthetic oligonucleotide
  Antisense strand to SEQ ID NO: 2240490
uauauccagcaguuaucaa

SEQ ID NO: 2240492 - RNA, 19 nt, Artificial Sequence
  Description of Artificial Sequence: Synthetic oligonucleotide
  Sense strand starting at position 1018 of SEQ ID NO: 1884105
gcuggauauaaagguaauc

SEQ ID NO: 2240493 - RNA, 19 nt, Artificial Sequence
  Description of Artificial Sequence: Synthetic oligonucleotide
  Antisense strand to SEQ ID NO: 2240492
gauuaccuuuauauccagc

SEQ ID NO: 2240494 - RNA, 19 nt, Artificial Sequence
  Description of Artificial Sequence: Synthetic oligonucleotide
  Sense strand starting at position 1029 of SEQ ID NO: 1884105
agguaaucuugucccaaag

SEQ ID NO: 2240495 - RNA, 19 nt, Artificial Sequence
  Description of Artificial Sequence: Synthetic oligonucleotide
  Antisense strand to SEQ ID NO: 2240494
cuuugggacaagauuaccu

SEQ ID NO: 2240496 - RNA, 19 nt, Artificial Sequence
  Description of Artificial Sequence: Synthetic oligonucleotide
  Sense strand starting at position 1168 of SEQ ID NO: 1884105
aucacaauuccugguugaa

SEQ ID NO: 2240497 - RNA, 19 nt, Artificial Sequence
  Description of Artificial Sequence: Synthetic oligonucleotide
  Antisense strand to SEQ ID NO: 2240496
uucaaccaggaauugugau

SEQ ID NO: 2240498 - RNA, 19 nt, Artificial Sequence
  Description of Artificial Sequence: Synthetic oligonucleotide
  Sense strand starting at position 1171 of SEQ ID NO: 1884105
acaauuccugguugaacca

SEQ ID NO: 2240499 - RNA, 19 nt, Artificial Sequence
  Description of Artificial Sequence: Synthetic oligonucleotide
  Antisense strand to SEQ ID NO: 2240498
ugguucaaccaggaauugu

SEQ ID NO: 2240500 - RNA, 19 nt, Artificial Sequence
  Description of Artificial Sequence: Synthetic oligonucleotide
  Sense strand starting at position 1189 of SEQ ID NO: 1884105
agaauugccuaucuaugaa

SEQ ID NO: 2240501 - RNA, 19 nt, Artificial Sequence
  Description of Artificial Sequence: Synthetic oligonucleotide
  Antisense strand to SEQ ID NO: 2240500
uucauagauaggcaauucu

SEQ ID NO: 2240502 - RNA, 19 nt, Artificial Sequence
  Description of Artificial Sequence: Synthetic oligonucleotide
  Sense strand starting at position 1192 of SEQ ID NO: 1884105
auugccuaucuaugaagga

SEQ ID NO: 2240503 - RNA, 19 nt, Artificial Sequence
  Description of Artificial Sequence: Synthetic oligonucleotide
  Antisense strand to SEQ ID NO: 2240502
uccuucauagauaggcaau

SEQ ID NO: 2240504 - RNA, 19 nt, Artificial Sequence
  Description of Artificial Sequence: Synthetic oligonucleotide
  Sense strand starting at position 1296 of SEQ ID NO: 1884105
gucaauugugaggacuucu

SEQ ID NO: 2240505 - RNA, 19 nt, Artificial Sequence
  Description of Artificial Sequence: Synthetic oligonucleotide
  Antisense strand to SEQ ID NO: 2240504
agaaguccucacaauugac

SEQ ID NO: 2240506 - RNA, 19 nt, Artificial Sequence
  Description of Artificial Sequence: Synthetic oligonucleotide
  Sense strand starting at position 1400 of SEQ ID NO: 1884105
ccugaugagaauuggcauu

SEQ ID NO: 2240507 - RNA, 19 nt, Artificial Sequence
  Description of Artificial Sequence: Synthetic oligonucleotide
  Antisense strand to SEQ ID NO: 2240506
aaugccaauucucaucagg

SEQ ID NO: 2240508 - RNA, 19 nt, Artificial Sequence
  Description of Artificial Sequence: Synthetic oligonucleotide
  Sense strand starting at position 1402 of SEQ ID NO: 1884105
ugaugagaauuggcauuau

SEQ ID NO: 2240509 - RNA, 19 nt, Artificial Sequence
  Description of Artificial Sequence: Synthetic oligonucleotide
  Antisense strand to SEQ ID NO: 2240508
auaaugccaauucucauca

SEQ ID NO: 2240510 - RNA, 19 nt, Artificial Sequence
  Description of Artificial Sequence: Synthetic oligonucleotide
  Sense strand starting at position 1406 of SEQ ID NO: 1884105
gagaauuggcauuauaagc

SEQ ID NO: 2240511 - RNA, 19 nt, Artificial Sequence
  Description of Artificial Sequence: Synthetic oligonucleotide
  Antisense strand to SEQ ID NO: 2240510
gcuuauaaugccaauucuc

SEQ ID NO: 2240512 - RNA, 19 nt, Artificial Sequence
  Description of Artificial Sequence: Synthetic oligonucleotide
  Sense strand starting at position 1481 of SEQ ID NO: 1884105
accacaauugggugauucu

SEQ ID NO: 2240513 - RNA, 19 nt, Artificial Sequence
  Description of Artificial Sequence: Synthetic oligonucleotide
  Antisense strand to SEQ ID NO: 2240512
agaaucacccaauuguggu

SEQ ID NO: 2240514 - RNA, 19 nt, Artificial Sequence
  Description of Artificial Sequence: Synthetic oligonucleotide
  Sense strand starting at position 1549 of SEQ ID NO: 1884105
gauaacucccaguaggguu

SEQ ID NO: 2240515 - RNA, 19 nt, Artificial Sequence
  Description of Artificial Sequence: Synthetic oligonucleotide
  Antisense strand to SEQ ID NO: 2240514
aacccuacugggaguuauc

SEQ ID NO: 2240516 - RNA, 19 nt, Artificial Sequence
  Description of Artificial Sequence: Synthetic oligonucleotide
  Sense strand starting at position 1619 of SEQ ID NO: 1884105
acuuucugagauggguaaa

SEQ ID NO: 2240517 - RNA, 19 nt, Artificial Sequence
  Description of Artificial Sequence: Synthetic oligonucleotide
  Antisense strand to SEQ ID NO: 2240516
uuuacccaucucagaaagu

SEQ ID NO: 2240518 - RNA, 19 nt, Artificial Sequence
  Description of Artificial Sequence: Synthetic oligonucleotide
  Sense strand starting at position 1620 of SEQ ID NO: 1884105
cuuucugagauggguaaag

SEQ ID NO: 2240519 - RNA, 19 nt, Artificial Sequence
  Description of Artificial Sequence: Synthetic oligonucleotide
  Antisense strand to SEQ ID NO: 2240518
cuuuacccaucucagaaag

SEQ ID NO: 2240520 - RNA, 19 nt, Artificial Sequence
  Description of Artificial Sequence: Synthetic oligonucleotide
  Sense strand starting at position 1642 of SEQ ID NO: 1884105
ugugcuagacuccaaggaa

SEQ ID NO: 2240521 - RNA, 19 nt, Artificial Sequence
  Description of Artificial Sequence: Synthetic oligonucleotide
  Antisense strand to SEQ ID NO: 2240520
uuccuuggagucuagcaca

SEQ ID NO: 2240522 - RNA, 19 nt, Artificial Sequence
  Description of Artificial Sequence: Synthetic oligonucleotide
  Sense strand starting at position 1683 of SEQ ID NO: 1884105
ugacuccuguccucaaaga

SEQ ID NO: 2240523 - RNA, 19 nt, Artificial Sequence
  Description of Artificial Sequence: Synthetic oligonucleotide
  Antisense strand to SEQ ID NO: 2240522
ucuuugaggacaggaguca

SEQ ID NO: 2240524 - RNA, 19 nt, Artificial Sequence
  Description of Artificial Sequence: Synthetic oligonucleotide
  Sense strand starting at position 1732 of SEQ ID NO: 1884105
gcaaacaaauagguauaau

SEQ ID NO: 2240525 - RNA, 19 nt, Artificial Sequence
  Description of Artificial Sequence: Synthetic oligonucleotide
  Antisense strand to SEQ ID NO: 2240524
auuauaccuauuuguuugc

SEQ ID NO: 2240526 - RNA, 19 nt, Artificial Sequence
  Description of Artificial Sequence: Synthetic oligonucleotide
  Sense strand starting at position 1804 of SEQ ID NO: 1884105
ggagcacaggaugguuaua

SEQ ID NO: 2240527 - RNA, 19 nt, Artificial Sequence
  Description of Artificial Sequence: Synthetic oligonucleotide
  Antisense strand to SEQ ID NO: 2240526
uauaaccauccugugcucc

SEQ ID NO: 2240528 - RNA, 19 nt, Artificial Sequence
  Description of Artificial Sequence: Synthetic oligonucleotide
  Sense strand starting at position 1806 of SEQ ID NO: 1884105
agcacaggaugguuauaua

SEQ ID NO: 2240529 - RNA, 19 nt, Artificial Sequence
  Description of Artificial Sequence: Synthetic oligonucleotide
  Antisense strand to SEQ ID NO: 2240528
uauauaaccauccugugcu

SEQ ID NO: 2240530 - RNA, 19 nt, Artificial Sequence
  Description of Artificial Sequence: Synthetic oligonucleotide
  Sense strand starting at position 1995 of SEQ ID NO: 1884105
guaggugauucguugauuu

SEQ ID NO: 2240531 - RNA, 19 nt, Artificial Sequence
  Description of Artificial Sequence: Synthetic oligonucleotide
  Antisense strand to SEQ ID NO: 2240530
aaaucaacgaaucaccuac

SEQ ID NO: 2240532 - RNA, 19 nt, Artificial Sequence
  Description of Artificial Sequence: Synthetic oligonucleotide
  Sense strand starting at position 2294 of SEQ ID NO: 1884105
gaaggagccuggguauuau

SEQ ID NO: 2240533 - RNA, 19 nt, Artificial Sequence
  Description of Artificial Sequence: Synthetic oligonucleotide
  Antisense strand to SEQ ID NO: 2240532
auaauacccaggcuccuuc

SEQ ID NO: 2240534 - RNA, 19 nt, Artificial Sequence
  Description of Artificial Sequence: Synthetic oligonucleotide
  Sense strand starting at position 2475 of SEQ ID NO: 1884105
agauaacguaacugauaug

SEQ ID NO: 2240535 - RNA, 19 nt, Artificial Sequence
  Description of Artificial Sequence: Synthetic oligonucleotide
  Antisense strand to SEQ ID NO: 2240534
cauaucaguuacguuaucu

SEQ ID NO: 2240536 - RNA, 19 nt, Artificial Sequence
  Description of Artificial Sequence: Synthetic oligonucleotide
  Sense strand starting at position 2583 of SEQ ID NO: 1884105
aaguaucaugugcacagaa

SEQ ID NO: 2240537 - RNA, 19 nt, Artificial Sequence
  Description of Artificial Sequence: Synthetic oligonucleotide
  Antisense strand to SEQ ID NO: 2240536
uucugugcacaugauacuu

SEQ ID NO: 2240538 - RNA, 19 nt, Artificial Sequence
  Description of Artificial Sequence: Synthetic oligonucleotide
  Sense strand starting at position 2585 of SEQ ID NO: 1884105
guaucaugugcacagaaau

SEQ ID NO: 2240539 - RNA, 19 nt, Artificial Sequence
  Description of Artificial Sequence: Synthetic oligonucleotide
  Antisense strand to SEQ ID NO: 2240538
auuucugugcacaugauac

SEQ ID NO: 2240540 - RNA, 19 nt, Artificial Sequence
  Description of Artificial Sequence: Synthetic oligonucleotide
  Sense strand starting at position 3399 of SEQ ID NO: 1884105
agggugugaugagugagau

SEQ ID NO: 2240541 - RNA, 19 nt, Artificial Sequence
  Description of Artificial Sequence: Synthetic oligonucleotide
  Antisense strand to SEQ ID NO: 2240540
aucucacucaucacacccu

SEQ ID NO: 2240542 - RNA, 19 nt, Artificial Sequence
  Description of Artificial Sequence: Synthetic oligonucleotide
  Sense strand starting at position 3400 of SEQ ID NO: 1884105
gggugugaugagugagaua

SEQ ID NO: 2240543 - RNA, 19 nt, Artificial Sequence
  Description of Artificial Sequence: Synthetic oligonucleotide
  Antisense strand to SEQ ID NO: 2240542
uaucucacucaucacaccc

SEQ ID NO: 2240544 - RNA, 19 nt, Artificial Sequence
  Description of Artificial Sequence: Synthetic oligonucleotide
  Sense strand starting at position 3601 of SEQ ID NO: 1884105
aucccaguugcuuauaaug

SEQ ID NO: 2240545 - RNA, 19 nt, Artificial Sequence
  Description of Artificial Sequence: Synthetic oligonucleotide
  Antisense strand to SEQ ID NO: 2240544
cauuauaagcaacugggau

SEQ ID NO: 2240546 - RNA, 19 nt, Artificial Sequence
  Description of Artificial Sequence: Synthetic oligonucleotide
  Sense strand starting at position 25 of SEQ ID NO: 1884106
ugguauugcgcaucacuuu

SEQ ID NO: 2240547 - RNA, 19 nt, Artificial Sequence
  Description of Artificial Sequence: Synthetic oligonucleotide
  Antisense strand to SEQ ID NO: 2240546
aaagugaugcgcaauacca

SEQ ID NO: 2240548 - RNA, 19 nt, Artificial Sequence
  Description of Artificial Sequence: Synthetic oligonucleotide
  Sense strand starting at position 89 of SEQ ID NO: 1884106
acauuaaauugguuuggau

SEQ ID NO: 2240549 - RNA, 19 nt, Artificial Sequence
  Description of Artificial Sequence: Synthetic oligonucleotide
  Antisense strand to SEQ ID NO: 2240548
auccaaaccaauuuaaugu

SEQ ID NO: 2240550 - RNA, 19 nt, Artificial Sequence
  Description of Artificial Sequence: Synthetic oligonucleotide
  Sense strand starting at position 91 of SEQ ID NO: 1884106
auuaaauugguuuggaugu

SEQ ID NO: 2240551 - RNA, 19 nt, Artificial Sequence
  Description of Artificial Sequence: Synthetic oligonucleotide
  Antisense strand to SEQ ID NO: 2240550
acauccaaaccaauuuaau

SEQ ID NO: 2240552 - RNA, 19 nt, Artificial Sequence
  Description of Artificial Sequence: Synthetic oligonucleotide
  Sense strand starting at position 830 of SEQ ID NO: 1884106
aguaguauuaaguauguga

SEQ ID NO: 2240553 - RNA, 19 nt, Artificial Sequence
  Description of Artificial Sequence: Synthetic oligonucleotide
  Antisense strand to SEQ ID NO: 2240552
ucacauacuuaauacuacu

SEQ ID NO: 2240554 - RNA, 19 nt, Artificial Sequence
  Description of Artificial Sequence: Synthetic oligonucleotide
  Sense strand starting at position 832 of SEQ ID NO: 1884106
uaguauuaaguaugugaga

SEQ ID NO: 2240555 - RNA, 19 nt, Artificial Sequence
  Description of Artificial Sequence: Synthetic oligonucleotide
  Antisense strand to SEQ ID NO: 2240554
ucucacauacuuaauacua

SEQ ID NO: 2240556 - RNA, 19 nt, Artificial Sequence
  Description of Artificial Sequence: Synthetic oligonucleotide
  Sense strand starting at position 833 of SEQ ID NO: 1884106
aguauuaaguaugugagaa

SEQ ID NO: 2240557 - RNA, 19 nt, Artificial Sequence
  Description of Artificial Sequence: Synthetic oligonucleotide
  Antisense strand to SEQ ID NO: 2240556
uucucacauacuuaauacu

SEQ ID NO: 2240558 - RNA, 19 nt, Artificial Sequence
  Description of Artificial Sequence: Synthetic oligonucleotide
  Sense strand starting at position 834 of SEQ ID NO: 1884106
guauuaaguaugugagaaa

SEQ ID NO: 2240559 - RNA, 19 nt, Artificial Sequence
  Description of Artificial Sequence: Synthetic oligonucleotide
  Antisense strand to SEQ ID NO: 2240558
uuucucacauacuuaauac

SEQ ID NO: 2240560 - RNA, 19 nt, Artificial Sequence
  Description of Artificial Sequence: Synthetic oligonucleotide
  Sense strand starting at position 1426 of SEQ ID NO: 1884106
gaugguuuccauuaaacga

SEQ ID NO: 2240561 - RNA, 19 nt, Artificial Sequence
  Description of Artificial Sequence: Synthetic oligonucleotide
  Antisense strand to SEQ ID NO: 2240560
ucguuuaauggaaaccauc

SEQ ID NO: 2240562 - RNA, 19 nt, Artificial Sequence
  Description of Artificial Sequence: Synthetic oligonucleotide
  Sense strand starting at position 1457 of SEQ ID NO: 1884106
acagaucuuuguguacuga

SEQ ID NO: 2240563 - RNA, 19 nt, Artificial Sequence
  Description of Artificial Sequence: Synthetic oligonucleotide
  Antisense strand to SEQ ID NO: 2240562
ucaguacacaaagaucugu

SEQ ID NO: 2240564 - RNA, 19 nt, Artificial Sequence
  Description of Artificial Sequence: Synthetic oligonucleotide
  Sense strand starting at position 1466 of SEQ ID NO: 1884106
uguguacugacaugggaag

SEQ ID NO: 2240565 - RNA, 19 nt, Artificial Sequence
  Description of Artificial Sequence: Synthetic oligonucleotide
  Antisense strand to SEQ ID NO: 2240564
cuucccaugucaguacaca

SEQ ID NO: 2240566 - RNA, 19 nt, Artificial Sequence
  Description of Artificial Sequence: Synthetic oligonucleotide
  Sense strand starting at position 1467 of SEQ ID NO: 1884106
guguacugacaugggaaga

SEQ ID NO: 2240567 - RNA, 19 nt, Artificial Sequence
  Description of Artificial Sequence: Synthetic oligonucleotide
  Antisense strand to SEQ ID NO: 2240566
ucuucccaugucaguacac

SEQ ID NO: 2240568 - RNA, 19 nt, Artificial Sequence
  Description of Artificial Sequence: Synthetic oligonucleotide
  Sense strand starting at position 1483 of SEQ ID NO: 1884106
agaugucccaaguaacguu

SEQ ID NO: 2240569 - RNA, 19 nt, Artificial Sequence
  Description of Artificial Sequence: Synthetic oligonucleotide
  Antisense strand to SEQ ID NO: 2240568
aacguuacuugggacaucu

SEQ ID NO: 2240570 - RNA, 19 nt, Artificial Sequence
  Description of Artificial Sequence: Synthetic oligonucleotide
  Sense strand starting at position 1558 of SEQ ID NO: 1884106
gggucuugucccuagacca

SEQ ID NO: 2240571 - RNA, 19 nt, Artificial Sequence
  Description of Artificial Sequence: Synthetic oligonucleotide
  Antisense strand to SEQ ID NO: 2240570
uggucuagggacaagaccc

SEQ ID NO: 2240572 - RNA, 19 nt, Artificial Sequence
  Description of Artificial Sequence: Synthetic oligonucleotide
  Sense strand starting at position 1583 of SEQ ID NO: 1884106
uuagcaucacuggaaacuu

SEQ ID NO: 2240573 - RNA, 19 nt, Artificial Sequence
  Description of Artificial Sequence: Synthetic oligonucleotide
  Antisense strand to SEQ ID NO: 2240572
aaguuuccagugaugcuaa

SEQ ID NO: 2240574 - RNA, 19 nt, Artificial Sequence
  Description of Artificial Sequence: Synthetic oligonucleotide
  Sense strand starting at position 1594 of SEQ ID NO: 1884106
ggaaacuuguuagugcaaa

SEQ ID NO: 2240575 - RNA, 19 nt, Artificial Sequence
  Description of Artificial Sequence: Synthetic oligonucleotide
  Antisense strand to SEQ ID NO: 2240574
uuugcacuaacaaguuucc

SEQ ID NO: 2240576 - RNA, 19 nt, Artificial Sequence
  Description of Artificial Sequence: Synthetic oligonucleotide
  Sense strand starting at position 1958 of SEQ ID NO: 1884106
cgagauugguaggcaguga

SEQ ID NO: 2240577 - RNA, 19 nt, Artificial Sequence
  Description of Artificial Sequence: Synthetic oligonucleotide
  Antisense strand to SEQ ID NO: 2240576
ucacugccuaccaaucucg

SEQ ID NO: 2240578 - RNA, 19 nt, Artificial Sequence
  Description of Artificial Sequence: Synthetic oligonucleotide
  Sense strand starting at position 2015 of SEQ ID NO: 1884106
gauaucugucagggaguca

SEQ ID NO: 2240579 - RNA, 19 nt, Artificial Sequence
  Description of Artificial Sequence: Synthetic oligonucleotide
  Antisense strand to SEQ ID NO: 2240578
ugacucccugacagauauc

SEQ ID NO: 2240580 - RNA, 19 nt, Artificial Sequence
  Description of Artificial Sequence: Synthetic oligonucleotide
  Sense strand starting at position 2016 of SEQ ID NO: 1884106
auaucugucagggagucau

SEQ ID NO: 2240581 - RNA, 19 nt, Artificial Sequence
  Description of Artificial Sequence: Synthetic oligonucleotide
  Antisense strand to SEQ ID NO: 2240580
augacucccugacagauau

SEQ ID NO: 2240582 - RNA, 19 nt, Artificial Sequence
  Description of Artificial Sequence: Synthetic oligonucleotide
  Sense strand starting at position 2020 of SEQ ID NO: 1884106
cugucagggagucauuacu

SEQ ID NO: 2240583 - RNA, 19 nt, Artificial Sequence
  Description of Artificial Sequence: Synthetic oligonucleotide
  Antisense strand to SEQ ID NO: 2240582
aguaaugacucccugacag

SEQ ID NO: 2240584 - RNA, 19 nt, Artificial Sequence
  Description of Artificial Sequence: Synthetic oligonucleotide
  Sense strand starting at position 2028 of SEQ ID NO: 1884106
gagucauuacuauggaaac

SEQ ID NO: 2240585 - RNA, 19 nt, Artificial Sequence
  Description of Artificial Sequence: Synthetic oligonucleotide
  Antisense strand to SEQ ID NO: 2240584
guuuccauaguaaugacuc

SEQ ID NO: 2240586 - RNA, 19 nt, Artificial Sequence
  Description of Artificial Sequence: Synthetic oligonucleotide
  Sense strand starting at position 2075 of SEQ ID NO: 1884106
aggcauucuuguguaaaga

SEQ ID NO: 2240587 - RNA, 19 nt, Artificial Sequence
  Description of Artificial Sequence: Synthetic oligonucleotide
  Antisense strand to SEQ ID NO: 2240586
ucuuuacacaagaaugccu

SEQ ID NO: 2240588 - RNA, 19 nt, Artificial Sequence
  Description of Artificial Sequence: Synthetic oligonucleotide
  Sense strand starting at position 2076 of SEQ ID NO: 1884106
ggcauucuuguguaaagaa

SEQ ID NO: 2240589 - RNA, 19 nt, Artificial Sequence
  Description of Artificial Sequence: Synthetic oligonucleotide
  Antisense strand to SEQ ID NO: 2240588
uucuuuacacaagaaugcc

SEQ ID NO: 2240590 - RNA, 19 nt, Artificial Sequence
  Description of Artificial Sequence: Synthetic oligonucleotide
  Sense strand starting at position 2084 of SEQ ID NO: 1884106
uguguaaagaauuggcaau

SEQ ID NO: 2240591 - RNA, 19 nt, Artificial Sequence
  Description of Artificial Sequence: Synthetic oligonucleotide
  Antisense strand to SEQ ID NO: 2240590
auugccaauucuuuacaca

SEQ ID NO: 2240592 - RNA, 19 nt, Artificial Sequence
  Description of Artificial Sequence: Synthetic oligonucleotide
  Sense strand starting at position 2086 of SEQ ID NO: 1884106
uguaaagaauuggcaauga

SEQ ID NO: 2240593 - RNA, 19 nt, Artificial Sequence
  Description of Artificial Sequence: Synthetic oligonucleotide
  Antisense strand to SEQ ID NO: 2240592
ucauugccaauucuuuaca

SEQ ID NO: 2240594 - RNA, 19 nt, Artificial Sequence
  Description of Artificial Sequence: Synthetic oligonucleotide
  Sense strand starting at position 2398 of SEQ ID NO: 1884106
cuucuuaggguuugaagua

SEQ ID NO: 2240595 - RNA, 19 nt, Artificial Sequence
  Description of Artificial Sequence: Synthetic oligonucleotide
  Antisense strand to SEQ ID NO: 2240594
uacuucaaacccuaagaag

SEQ ID NO: 2240596 - RNA, 19 nt, Artificial Sequence
  Description of Artificial Sequence: Synthetic oligonucleotide
  Sense strand starting at position 2603 of SEQ ID NO: 1884106
gacuaauucugauugcagg

SEQ ID NO: 2240597 - RNA, 19 nt, Artificial Sequence
  Description of Artificial Sequence: Synthetic oligonucleotide
  Antisense strand to SEQ ID NO: 2240596
ccugcaaucagaauuaguc

SEQ ID NO: 2240598 - RNA, 19 nt, Artificial Sequence
  Description of Artificial Sequence: Synthetic oligonucleotide
  Sense strand starting at position 2619 of SEQ ID NO: 1884106
agggaagugcaugguucaa

SEQ ID NO: 2240599 - RNA, 19 nt, Artificial Sequence
  Description of Artificial Sequence: Synthetic oligonucleotide
  Antisense strand to SEQ ID NO: 2240598
uugaaccaugcacuucccu

SEQ ID NO: 2240600 - RNA, 19 nt, Artificial Sequence
  Description of Artificial Sequence: Synthetic oligonucleotide
  Sense strand starting at position 2621 of SEQ ID NO: 1884106
ggaagugcaugguucaaga

SEQ ID NO: 2240601 - RNA, 19 nt, Artificial Sequence
  Description of Artificial Sequence: Synthetic oligonucleotide
  Antisense strand to SEQ ID NO: 2240600
ucuugaaccaugcacuucc

SEQ ID NO: 2240602 - RNA, 19 nt, Artificial Sequence
  Description of Artificial Sequence: Synthetic oligonucleotide
  Sense strand starting at position 2657 of SEQ ID NO: 1884106
aaguuagucugggucuuaa

SEQ ID NO: 2240603 - RNA, 19 nt, Artificial Sequence
  Description of Artificial Sequence: Synthetic oligonucleotide
  Antisense strand to SEQ ID NO: 2240602
uuaagacccagacuaacuu

SEQ ID NO: 2240604 - RNA, 19 nt, Artificial Sequence
  Description of Artificial Sequence: Synthetic oligonucleotide
  Sense strand starting at position 2683 of SEQ ID NO: 1884106
ggacucuugagaggcucaa

SEQ ID NO: 2240605 - RNA, 19 nt, Artificial Sequence
  Description of Artificial Sequence: Synthetic oligonucleotide
  Antisense strand to SEQ ID NO: 2240604
uugagccucucaagagucc

SEQ ID NO: 2240606 - RNA, 19 nt, Artificial Sequence
  Description of Artificial Sequence: Synthetic oligonucleotide
  Sense strand starting at position 2726 of SEQ ID NO: 1884106
auuguugcuggugagauaa

SEQ ID NO: 2240607 - RNA, 19 nt, Artificial Sequence
  Description of Artificial Sequence: Synthetic oligonucleotide
  Antisense strand to SEQ ID NO: 2240606
uuaucucaccagcaacaau

SEQ ID NO: 2240608 - RNA, 19 nt, Artificial Sequence
  Description of Artificial Sequence: Synthetic oligonucleotide
  Sense strand starting at position 2734 of SEQ ID NO: 1884106
uggugagauaauggaguaa

SEQ ID NO: 2240609 - RNA, 19 nt, Artificial Sequence
  Description of Artificial Sequence: Synthetic oligonucleotide
  Antisense strand to SEQ ID NO: 2240608
uuacuccauuaucucacca

SEQ ID NO: 2240610 - RNA, 19 nt, Artificial Sequence
  Description of Artificial Sequence: Synthetic oligonucleotide
  Sense strand starting at position 2793 of SEQ ID NO: 1884106
guuacuuuagggcaaagau

SEQ ID NO: 2240611 - RNA, 19 nt, Artificial Sequence
  Description of Artificial Sequence: Synthetic oligonucleotide
  Antisense strand to SEQ ID NO: 2240610
aucuuugcccuaaaguaac

SEQ ID NO: 2240612 - RNA, 19 nt, Artificial Sequence
  Description of Artificial Sequence: Synthetic oligonucleotide
  Sense strand starting at position 2843 of SEQ ID NO: 1884106
uaagacuccuaguugugau

SEQ ID NO: 2240613 - RNA, 19 nt, Artificial Sequence
  Description of Artificial Sequence: Synthetic oligonucleotide
  Antisense strand to SEQ ID NO: 2240612
aucacaacuaggagucuua

SEQ ID NO: 2240614 - RNA, 19 nt, Artificial Sequence
  Description of Artificial Sequence: Synthetic oligonucleotide
  Sense strand starting at position 3243 of SEQ ID NO: 1884106
cugugagaugggcacuuua

SEQ ID NO: 2240615 - RNA, 19 nt, Artificial Sequence
  Description of Artificial Sequence: Synthetic oligonucleotide
  Antisense strand to SEQ ID NO: 2240614
uaaagugcccaucucacag

SEQ ID NO: 2240616 - RNA, 19 nt, Artificial Sequence
  Description of Artificial Sequence: Synthetic oligonucleotide
  Sense strand starting at position 3351 of SEQ ID NO: 1884106
uggugagaucacgagguaa

SEQ ID NO: 2240617 - RNA, 19 nt, Artificial Sequence
  Description of Artificial Sequence: Synthetic oligonucleotide
  Antisense strand to SEQ ID NO: 2240616
uuaccucgugaucucacca

SEQ ID NO: 2240618 - RNA, 19 nt, Artificial Sequence
  Description of Artificial Sequence: Synthetic oligonucleotide
  Sense strand starting at position 3480 of SEQ ID NO: 1884106
ucgucuauagacugaaauc

SEQ ID NO: 2240619 - RNA, 19 nt, Artificial Sequence
  Description of Artificial Sequence: Synthetic oligonucleotide
  Antisense strand to SEQ ID NO: 2240618
gauuucagucuauagacga

SEQ ID NO: 2240620 - RNA, 19 nt, Artificial Sequence
  Description of Artificial Sequence: Synthetic oligonucleotide
  Sense strand starting at position 3688 of SEQ ID NO: 1884106
cuaguccucguccaauauu

SEQ ID NO: 2240621 - RNA, 19 nt, Artificial Sequence
  Description of Artificial Sequence: Synthetic oligonucleotide
  Antisense strand to SEQ ID NO: 2240620
aauauuggacgaggacuag

SEQ ID NO: 2240622 - RNA, 19 nt, Artificial Sequence
  Description of Artificial Sequence: Synthetic oligonucleotide
  Sense strand starting at position 3702 of SEQ ID NO: 1884106
auauuacgucacuggguga

SEQ ID NO: 2240623 - RNA, 19 nt, Artificial Sequence
  Description of Artificial Sequence: Synthetic oligonucleotide
  Antisense strand to SEQ ID NO: 2240622
ucacccagugacguaauau

SEQ ID NO: 2240624 - RNA, 19 nt, Artificial Sequence
  Description of Artificial Sequence: Synthetic oligonucleotide
  Sense strand starting at position 3772 of SEQ ID NO: 1884106
aucuaagggucuucggaaa

SEQ ID NO: 2240625 - RNA, 19 nt, Artificial Sequence
  Description of Artificial Sequence: Synthetic oligonucleotide
  Antisense strand to SEQ ID NO: 2240624
uuuccgaagacccuuagau

SEQ ID NO: 2240626 - RNA, 19 nt, Artificial Sequence
  Description of Artificial Sequence: Synthetic oligonucleotide
  Sense strand starting at position 1 of SEQ ID NO: 1884107
gaugcuuccuuguuugauc

SEQ ID NO: 2240627 - RNA, 19 nt, Artificial Sequence
  Description of Artificial Sequence: Synthetic oligonucleotide
  Antisense strand to SEQ ID NO: 2240626
gaucaaacaaggaagcauc

SEQ ID NO: 2240628 - RNA, 19 nt, Artificial Sequence
  Description of Artificial Sequence: Synthetic oligonucleotide
  Sense strand starting at position 113 of SEQ ID NO: 1884107
uuacauuaugcugggaaac

SEQ ID NO: 2240629 - RNA, 19 nt, Artificial Sequence
  Description of Artificial Sequence: Synthetic oligonucleotide
  Antisense strand to SEQ ID NO: 2240628
guuucccagcauaauguaa

SEQ ID NO: 2240630 - RNA, 19 nt, Artificial Sequence
  Description of Artificial Sequence: Synthetic oligonucleotide
  Sense strand starting at position 115 of SEQ ID NO: 1884107
acauuaugcugggaaacca

SEQ ID NO: 2240631 - RNA, 19 nt, Artificial Sequence
  Description of Artificial Sequence: Synthetic oligonucleotide
  Antisense strand to SEQ ID NO: 2240630
ugguuucccagcauaaugu

SEQ ID NO: 2240632 - RNA, 19 nt, Artificial Sequence
  Description of Artificial Sequence: Synthetic oligonucleotide
  Sense strand starting at position 144 of SEQ ID NO: 1884107
gaaggagugcuucaccgga

SEQ ID NO: 2240633 - RNA, 19 nt, Artificial Sequence
  Description of Artificial Sequence: Synthetic oligonucleotide
  Antisense strand to SEQ ID NO: 2240632
uccggugaagcacuccuuc

SEQ ID NO: 2240634 - RNA, 19 nt, Artificial Sequence
  Description of Artificial Sequence: Synthetic oligonucleotide
  Sense strand starting at position 357 of SEQ ID NO: 1884107
accuuugucuggcucacau

SEQ ID NO: 2240635 - RNA, 19 nt, Artificial Sequence
  Description of Artificial Sequence: Synthetic oligonucleotide
  Antisense strand to SEQ ID NO: 2240634
augugagccagacaaaggu

SEQ ID NO: 2240636 - RNA, 19 nt, Artificial Sequence
  Description of Artificial Sequence: Synthetic oligonucleotide
  Sense strand starting at position 609 of SEQ ID NO: 1884107
gaaugucccugggaaauuu

SEQ ID NO: 2240637 - RNA, 19 nt, Artificial Sequence
  Description of Artificial Sequence: Synthetic oligonucleotide
  Antisense strand to SEQ ID NO: 2240636
aaauuucccagggacauuc

SEQ ID NO: 2240638 - RNA, 19 nt, Artificial Sequence
  Description of Artificial Sequence: Synthetic oligonucleotide
  Sense strand starting at position 854 of SEQ ID NO: 1884107
gcagucuuaaccuguaggu

SEQ ID NO: 2240639 - RNA, 19 nt, Artificial Sequence
  Description of Artificial Sequence: Synthetic oligonucleotide
  Antisense strand to SEQ ID NO: 2240638
accuacagguuaagacugc

SEQ ID NO: 2240640 - RNA, 19 nt, Artificial Sequence
  Description of Artificial Sequence: Synthetic oligonucleotide
  Sense strand starting at position 856 of SEQ ID NO: 1884107
agucuuaaccuguagguca

SEQ ID NO: 2240641 - RNA, 19 nt, Artificial Sequence
  Description of Artificial Sequence: Synthetic oligonucleotide
  Antisense strand to SEQ ID NO: 2240640
ugaccuacagguuaagacu

SEQ ID NO: 2240642 - RNA, 19 nt, Artificial Sequence
  Description of Artificial Sequence: Synthetic oligonucleotide
  Sense strand starting at position 858 of SEQ ID NO: 1884107
ucuuaaccuguaggucaaa

SEQ ID NO: 2240643 - RNA, 19 nt, Artificial Sequence
  Description of Artificial Sequence: Synthetic oligonucleotide
  Antisense strand to SEQ ID NO: 2240642
uuugaccuacagguuaaga

SEQ ID NO: 2240644 - RNA, 19 nt, Artificial Sequence
  Description of Artificial Sequence: Synthetic oligonucleotide
  Sense strand starting at position 990 of SEQ ID NO: 1884107
gaggaucuguaagagauca

SEQ ID NO: 2240645 - RNA, 19 nt, Artificial Sequence
  Description of Artificial Sequence: Synthetic oligonucleotide
  Antisense strand to SEQ ID NO: 2240644
ugaucucuuacagauccuc

SEQ ID NO: 2240646 - RNA, 19 nt, Artificial Sequence
  Description of Artificial Sequence: Synthetic oligonucleotide
  Sense strand starting at position 1550 of SEQ ID NO: 1884107
gagagaggcuuugaagaau

SEQ ID NO: 2240647 - RNA, 19 nt, Artificial Sequence
  Description of Artificial Sequence: Synthetic oligonucleotide
  Antisense strand to SEQ ID NO: 2240646
auucuucaaagccucucuc

SEQ ID NO: 2240648 - RNA, 19 nt, Artificial Sequence
  Description of Artificial Sequence: Synthetic oligonucleotide
  Sense strand starting at position 1685 of SEQ ID NO: 1884107
gcaggaugcgauggaagau

SEQ ID NO: 2240649 - RNA, 19 nt, Artificial Sequence
  Description of Artificial Sequence: Synthetic oligonucleotide
  Antisense strand to SEQ ID NO: 2240648
aucuuccaucgcauccugc

SEQ ID NO: 2240650 - RNA, 19 nt, Artificial Sequence
  Description of Artificial Sequence: Synthetic oligonucleotide
  Sense strand starting at position 1725 of SEQ ID NO: 1884107
ggccguacuauagaagacu

SEQ ID NO: 2240651 - RNA, 19 nt, Artificial Sequence
  Description of Artificial Sequence: Synthetic oligonucleotide
  Antisense strand to SEQ ID NO: 2240650
agucuucuauaguacggcc

SEQ ID NO: 2240652 - RNA, 19 nt, Artificial Sequence
  Description of Artificial Sequence: Synthetic oligonucleotide
  Sense strand starting at position 1740 of SEQ ID NO: 1884107
gacuuucuggcaggguaaa

SEQ ID NO: 2240653 - RNA, 19 nt, Artificial Sequence
  Description of Artificial Sequence: Synthetic oligonucleotide
  Antisense strand to SEQ ID NO: 2240652
uuuacccugccagaaaguc

SEQ ID NO: 2240654 - RNA, 19 nt, Artificial Sequence
  Description of Artificial Sequence: Synthetic oligonucleotide
  Sense strand starting at position 1774 of SEQ ID NO: 1884107
cccugacgucuuugagcau

SEQ ID NO: 2240655 - RNA, 19 nt, Artificial Sequence
  Description of Artificial Sequence: Synthetic oligonucleotide
  Antisense strand to SEQ ID NO: 2240654
augcucaaagacgucaggg

SEQ ID NO: 2240656 - RNA, 19 nt, Artificial Sequence
  Description of Artificial Sequence: Synthetic oligonucleotide
  Sense strand starting at position 1777 of SEQ ID NO: 1884107
ugacgucuuugagcauaag

SEQ ID NO: 2240657 - RNA, 19 nt, Artificial Sequence
  Description of Artificial Sequence: Synthetic oligonucleotide
  Antisense strand to SEQ ID NO: 2240656
cuuaugcucaaagacguca

SEQ ID NO: 2240658 - RNA, 19 nt, Artificial Sequence
  Description of Artificial Sequence: Synthetic oligonucleotide
  Sense strand starting at position 1778 of SEQ ID NO: 1884107
gacgucuuugagcauaaga

SEQ ID NO: 2240659 - RNA, 19 nt, Artificial Sequence
  Description of Artificial Sequence: Synthetic oligonucleotide
  Antisense strand to SEQ ID NO: 2240658
ucuuaugcucaaagacguc

SEQ ID NO: 2240660 - RNA, 19 nt, Artificial Sequence
  Description of Artificial Sequence: Synthetic oligonucleotide
  Sense strand starting at position 1780 of SEQ ID NO: 1884107
cgucuuugagcauaagagu

SEQ ID NO: 2240661 - RNA, 19 nt, Artificial Sequence
  Description of Artificial Sequence: Synthetic oligonucleotide
  Antisense strand to SEQ ID NO: 2240660
acucuuaugcucaaagacg

SEQ ID NO: 2240662 - RNA, 19 nt, Artificial Sequence
  Description of Artificial Sequence: Synthetic oligonucleotide
  Sense strand starting at position 1901 of SEQ ID NO: 1884107
cggccuuggcauugauguu

SEQ ID NO: 2240663 - RNA, 19 nt, Artificial Sequence
  Description of Artificial Sequence: Synthetic oligonucleotide
  Antisense strand to SEQ ID NO: 2240662
aacaucaaugccaaggccg

SEQ ID NO: 2240664 - RNA, 19 nt, Artificial Sequence
  Description of Artificial Sequence: Synthetic oligonucleotide
  Sense strand starting at position 2048 of SEQ ID NO: 1884107
cugugaaucgucucccguu

SEQ ID NO: 2240665 - RNA, 19 nt, Artificial Sequence
  Description of Artificial Sequence: Synthetic oligonucleotide
  Antisense strand to SEQ ID NO: 2240664
aacgggagacgauucacag

SEQ ID NO: 2240666 - RNA, 19 nt, Artificial Sequence
  Description of Artificial Sequence: Synthetic oligonucleotide
  Sense strand starting at position 2060 of SEQ ID NO: 1884107
ucccguucccaggaugagu

SEQ ID NO: 2240667 - RNA, 19 nt, Artificial Sequence
  Description of Artificial Sequence: Synthetic oligonucleotide
  Antisense strand to SEQ ID NO: 2240666
acucauccugggaacggga

SEQ ID NO: 2240668 - RNA, 19 nt, Artificial Sequence
  Description of Artificial Sequence: Synthetic oligonucleotide
  Sense strand starting at position 2062 of SEQ ID NO: 1884107
ccguucccaggaugaguaa

SEQ ID NO: 2240669 - RNA, 19 nt, Artificial Sequence
  Description of Artificial Sequence: Synthetic oligonucleotide
  Antisense strand to SEQ ID NO: 2240668
uuacucauccugggaacgg

SEQ ID NO: 2240670 - RNA, 19 nt, Artificial Sequence
  Description of Artificial Sequence: Synthetic oligonucleotide
  Sense strand starting at position 2104 of SEQ ID NO: 1884107
uaaggaacuugugauacca

SEQ ID NO: 2240671 - RNA, 19 nt, Artificial Sequence
  Description of Artificial Sequence: Synthetic oligonucleotide
  Antisense strand to SEQ ID NO: 2240670
ugguaucacaaguuccuua

SEQ ID NO: 2240672 - RNA, 19 nt, Artificial Sequence
  Description of Artificial Sequence: Synthetic oligonucleotide
  Sense strand starting at position 2129 of SEQ ID NO: 1884107
cuccuauuccagggagggu

SEQ ID NO: 2240673 - RNA, 19 nt, Artificial Sequence
  Description of Artificial Sequence: Synthetic oligonucleotide
  Antisense strand to SEQ ID NO: 2240672
acccucccuggaauaggag

SEQ ID NO: 2240674 - RNA, 19 nt, Artificial Sequence
  Description of Artificial Sequence: Synthetic oligonucleotide
  Sense strand starting at position 2365 of SEQ ID NO: 1884107
agggcaucucuaugcaaac

SEQ ID NO: 2240675 - RNA, 19 nt, Artificial Sequence
  Description of Artificial Sequence: Synthetic oligonucleotide
  Antisense strand to SEQ ID NO: 2240674
guuugcauagagaugcccu

SEQ ID NO: 2240676 - RNA, 19 nt, Artificial Sequence
  Description of Artificial Sequence: Synthetic oligonucleotide
  Sense strand starting at position 2525 of SEQ ID NO: 1884107
gaaagaguucccugaagca

SEQ ID NO: 2240677 - RNA, 19 nt, Artificial Sequence
  Description of Artificial Sequence: Synthetic oligonucleotide
  Antisense strand to SEQ ID NO: 2240676
ugcuucagggaacucuuuc

SEQ ID NO: 2240678 - RNA, 19 nt, Artificial Sequence
  Description of Artificial Sequence: Synthetic oligonucleotide
  Sense strand starting at position 2756 of SEQ ID NO: 1884107
gccggugcuccuuaaauaa

SEQ ID NO: 2240679 - RNA, 19 nt, Artificial Sequence
  Description of Artificial Sequence: Synthetic oligonucleotide
  Antisense strand to SEQ ID NO: 2240678
uuauuuaaggagcaccggc

SEQ ID NO: 2240680 - RNA, 19 nt, Artificial Sequence
  Description of Artificial Sequence: Synthetic oligonucleotide
  Sense strand starting at position 2819 of SEQ ID NO: 1884107
uggcucuucugagaaagga

SEQ ID NO: 2240681 - RNA, 19 nt, Artificial Sequence
  Description of Artificial Sequence: Synthetic oligonucleotide
  Antisense strand to SEQ ID NO: 2240680
uccuuucucagaagagcca

SEQ ID NO: 2240682 - RNA, 19 nt, Artificial Sequence
  Description of Artificial Sequence: Synthetic oligonucleotide
  Sense strand starting at position 2942 of SEQ ID NO: 1884107
cuuggucucuaacugaguu

SEQ ID NO: 2240683 - RNA, 19 nt, Artificial Sequence
  Description of Artificial Sequence: Synthetic oligonucleotide
  Antisense strand to SEQ ID NO: 2240682
aacucaguuagagaccaag

SEQ ID NO: 2240684 - RNA, 19 nt, Artificial Sequence
  Description of Artificial Sequence: Synthetic oligonucleotide
  Sense strand starting at position 3168 of SEQ ID NO: 1884107
ggaaggaauggcggugaaa

SEQ ID NO: 2240685 - RNA, 19 nt, Artificial Sequence
  Description of Artificial Sequence: Synthetic oligonucleotide
  Antisense strand to SEQ ID NO: 2240684
uuucaccgccauuccuucc

SEQ ID NO: 2240686 - RNA, 19 nt, Artificial Sequence
  Description of Artificial Sequence: Synthetic oligonucleotide
  Sense strand starting at position 3469 of SEQ ID NO: 1884107
cccagaguuugaguuggga

SEQ ID NO: 2240687 - RNA, 19 nt, Artificial Sequence
  Description of Artificial Sequence: Synthetic oligonucleotide
  Antisense strand to SEQ ID NO: 2240686
ucccaacucaaacucuggg

SEQ ID NO: 2240688 - RNA, 19 nt, Artificial Sequence
  Description of Artificial Sequence: Synthetic oligonucleotide
  Sense strand starting at position 3471 of SEQ ID NO: 1884107
cagaguuugaguugggaaa

SEQ ID NO: 2240689 - RNA, 19 nt, Artificial Sequence
  Description of Artificial Sequence: Synthetic oligonucleotide
  Antisense strand to SEQ ID NO: 2240688
uuucccaacucaaacucug

SEQ ID NO: 2240690 - RNA, 19 nt, Artificial Sequence
  Description of Artificial Sequence: Synthetic oligonucleotide
  Sense strand starting at position 3472 of SEQ ID NO: 1884107
agaguuugaguugggaaag

SEQ ID NO: 2240691 - RNA, 19 nt, Artificial Sequence
  Description of Artificial Sequence: Synthetic oligonucleotide
  Antisense strand to SEQ ID NO: 2240690
cuuucccaacucaaacucu

SEQ ID NO: 2240692 - RNA, 19 nt, Artificial Sequence
  Description of Artificial Sequence: Synthetic oligonucleotide
  Sense strand starting at position 3538 of SEQ ID NO: 1884107
ucaggaaguucuuucugau

SEQ ID NO: 2240693 - RNA, 19 nt, Artificial Sequence
  Description of Artificial Sequence: Synthetic oligonucleotide
  Antisense strand to SEQ ID NO: 2240692
aucagaaagaacuuccuga

SEQ ID NO: 2240694 - RNA, 19 nt, Artificial Sequence
  Description of Artificial Sequence: Synthetic oligonucleotide
  Sense strand starting at position 3544 of SEQ ID NO: 1884107
aguucuuucugauaccaag

SEQ ID NO: 2240695 - RNA, 19 nt, Artificial Sequence
  Description of Artificial Sequence: Synthetic oligonucleotide
  Antisense strand to SEQ ID NO: 2240694
cuugguaucagaaagaacu

SEQ ID NO: 2240696 - RNA, 19 nt, Artificial Sequence
  Description of Artificial Sequence: Synthetic oligonucleotide
  Sense strand starting at position 3637 of SEQ ID NO: 1884107
ggucuugggccagaacuca

SEQ ID NO: 2240697 - RNA, 19 nt, Artificial Sequence
  Description of Artificial Sequence: Synthetic oligonucleotide
  Antisense strand to SEQ ID NO: 2240696
ugaguucuggcccaagacc

SEQ ID NO: 2240698 - RNA, 19 nt, Artificial Sequence
  Description of Artificial Sequence: Synthetic oligonucleotide
  Sense strand starting at position 3657 of SEQ ID NO: 1884107
ggcagcucuacugaggaaa

SEQ ID NO: 2240699 - RNA, 19 nt, Artificial Sequence
  Description of Artificial Sequence: Synthetic oligonucleotide
  Antisense strand to SEQ ID NO: 2240698
uuuccucaguagagcugcc

SEQ ID NO: 2240700 - RNA, 19 nt, Artificial Sequence
  Description of Artificial Sequence: Synthetic oligonucleotide
  Sense strand starting at position 3708 of SEQ ID NO: 1884107
agagaagagucaucaguau

SEQ ID NO: 2240701 - RNA, 19 nt, Artificial Sequence
  Description of Artificial Sequence: Synthetic oligonucleotide
  Antisense strand to SEQ ID NO: 2240700
auacugaugacucuucucu

SEQ ID NO: 2240702 - RNA, 19 nt, Artificial Sequence
  Description of Artificial Sequence: Synthetic oligonucleotide
  Sense strand starting at position 3712 of SEQ ID NO: 1884107
aagagucaucaguauugug

SEQ ID NO: 2240703 - RNA, 19 nt, Artificial Sequence
  Description of Artificial Sequence: Synthetic oligonucleotide
  Antisense strand to SEQ ID NO: 2240702
cacaauacugaugacucuu

SEQ ID NO: 2240704 - RNA, 19 nt, Artificial Sequence
  Description of Artificial Sequence: Synthetic oligonucleotide
  Sense strand starting at position 3719 of SEQ ID NO: 1884107
aucaguauugugcaaugga

SEQ ID NO: 2240705 - RNA, 19 nt, Artificial Sequence
  Description of Artificial Sequence: Synthetic oligonucleotide
  Antisense strand to SEQ ID NO: 2240704
uccauugcacaauacugau

SEQ ID NO: 2240706 - RNA, 19 nt, Artificial Sequence
  Description of Artificial Sequence: Synthetic oligonucleotide
  Sense strand starting at position 387 of SEQ ID NO: 1884108
aagggaauuuacugcggau

SEQ ID NO: 2240707 - RNA, 19 nt, Artificial Sequence
  Description of Artificial Sequence: Synthetic oligonucleotide
  Antisense strand to SEQ ID NO: 2240706
auccgcaguaaauucccuu

SEQ ID NO: 2240708 - RNA, 19 nt, Artificial Sequence
  Description of Artificial Sequence: Synthetic oligonucleotide
  Sense strand starting at position 617 of SEQ ID NO: 1884108
aaagcauucggacgagagu

SEQ ID NO: 2240709 - RNA, 19 nt, Artificial Sequence
  Description of Artificial Sequence: Synthetic oligonucleotide
  Antisense strand to SEQ ID NO: 2240708
acucucguccgaaugcuuu

SEQ ID NO: 2240710 - RNA, 19 nt, Artificial Sequence
  Description of Artificial Sequence: Synthetic oligonucleotide
  Sense strand starting at position 790 of SEQ ID NO: 1884108
ccaagaguccuacgguugu

SEQ ID NO: 2240711 - RNA, 19 nt, Artificial Sequence
  Description of Artificial Sequence: Synthetic oligonucleotide
  Antisense strand to SEQ ID NO: 2240710
acaaccguaggacucuugg

SEQ ID NO: 2240712 - RNA, 19 nt, Artificial Sequence
  Description of Artificial Sequence: Synthetic oligonucleotide
  Sense strand starting at position 794 of SEQ ID NO: 1884108
gaguccuacgguuguggau

SEQ ID NO: 2240713 - RNA, 19 nt, Artificial Sequence
  Description of Artificial Sequence: Synthetic oligonucleotide
  Antisense strand to SEQ ID NO: 2240712
auccacaaccguaggacuc

SEQ ID NO: 2240714 - RNA, 19 nt, Artificial Sequence
  Description of Artificial Sequence: Synthetic oligonucleotide
  Sense strand starting at position 871 of SEQ ID NO: 1884108
aaguuugauuuaggcuuaa

SEQ ID NO: 2240715 - RNA, 19 nt, Artificial Sequence
  Description of Artificial Sequence: Synthetic oligonucleotide
  Antisense strand to SEQ ID NO: 2240714
uuaagccuaaaucaaacuu

SEQ ID NO: 2240716 - RNA, 19 nt, Artificial Sequence
  Description of Artificial Sequence: Synthetic oligonucleotide
  Sense strand starting at position 888 of SEQ ID NO: 1884108
aaagaaaugucauucuggu

SEQ ID NO: 2240717 - RNA, 19 nt, Artificial Sequence
  Description of Artificial Sequence: Synthetic oligonucleotide
  Antisense strand to SEQ ID NO: 2240716
accagaaugacauuucuuu

SEQ ID NO: 2240718 - RNA, 19 nt, Artificial Sequence
  Description of Artificial Sequence: Synthetic oligonucleotide
  Sense strand starting at position 937 of SEQ ID NO: 1884108
cucauauacucgcccggaa

SEQ ID NO: 2240719 - RNA, 19 nt, Artificial Sequence
  Description of Artificial Sequence: Synthetic oligonucleotide
  Antisense strand to SEQ ID NO: 2240718
uuccgggcgaguauaugag

SEQ ID NO: 2240720 - RNA, 19 nt, Artificial Sequence
  Description of Artificial Sequence: Synthetic oligonucleotide
  Sense strand starting at position 939 of SEQ ID NO: 1884108
cauauacucgcccggaauu

SEQ ID NO: 2240721 - RNA, 19 nt, Artificial Sequence
  Description of Artificial Sequence: Synthetic oligonucleotide
  Antisense strand to SEQ ID NO: 2240720
aauuccgggcgaguauaug

SEQ ID NO: 2240722 - RNA, 19 nt, Artificial Sequence
  Description of Artificial Sequence: Synthetic oligonucleotide
  Sense strand starting at position 940 of SEQ ID NO: 1884108
auauacucgcccggaauuu

SEQ ID NO: 2240723 - RNA, 19 nt, Artificial Sequence
  Description of Artificial Sequence: Synthetic oligonucleotide
  Antisense strand to SEQ ID NO: 2240722
aaauuccgggcgaguauau

SEQ ID NO: 2240724 - RNA, 19 nt, Artificial Sequence
  Description of Artificial Sequence: Synthetic oligonucleotide
  Sense strand starting at position 2163 of SEQ ID NO: 1884108
cgcgauugcaucuucuuga

SEQ ID NO: 2240725 - RNA, 19 nt, Artificial Sequence
  Description of Artificial Sequence: Synthetic oligonucleotide
  Antisense strand to SEQ ID NO: 2240724
ucaagaagaugcaaucgcg

SEQ ID NO: 2240726 - RNA, 19 nt, Artificial Sequence
  Description of Artificial Sequence: Synthetic oligonucleotide
  Sense strand starting at position 2166 of SEQ ID NO: 1884108
gauugcaucuucuugagca

SEQ ID NO: 2240727 - RNA, 19 nt, Artificial Sequence
  Description of Artificial Sequence: Synthetic oligonucleotide
  Antisense strand to SEQ ID NO: 2240726
ugcucaagaagaugcaauc

SEQ ID NO: 2240728 - RNA, 19 nt, Artificial Sequence
  Description of Artificial Sequence: Synthetic oligonucleotide
  Sense strand starting at position 2170 of SEQ ID NO: 1884108
gcaucuucuugagcacagu

SEQ ID NO: 2240729 - RNA, 19 nt, Artificial Sequence
  Description of Artificial Sequence: Synthetic oligonucleotide
  Antisense strand to SEQ ID NO: 2240728
acugugcucaagaagaugc

SEQ ID NO: 2240730 - RNA, 19 nt, Artificial Sequence
  Description of Artificial Sequence: Synthetic oligonucleotide
  Sense strand starting at position 2207 of SEQ ID NO: 1884108
cguuucuuacucggaugga

SEQ ID NO: 2240731 - RNA, 19 nt, Artificial Sequence
  Description of Artificial Sequence: Synthetic oligonucleotide
  Antisense strand to SEQ ID NO: 2240730
uccauccgaguaagaaacg

SEQ ID NO: 2240732 - RNA, 19 nt, Artificial Sequence
  Description of Artificial Sequence: Synthetic oligonucleotide
  Sense strand starting at position 2303 of SEQ ID NO: 1884108
ggagacuuggcugaggcaa

SEQ ID NO: 2240733 - RNA, 19 nt, Artificial Sequence
  Description of Artificial Sequence: Synthetic oligonucleotide
  Antisense strand to SEQ ID NO: 2240732
uugccucagccaagucucc

SEQ ID NO: 2240734 - RNA, 19 nt, Artificial Sequence
  Description of Artificial Sequence: Synthetic oligonucleotide
  Sense strand starting at position 2491 of SEQ ID NO: 1884108
gcaccauccuggucacaaa

SEQ ID NO: 2240735 - RNA, 19 nt, Artificial Sequence
  Description of Artificial Sequence: Synthetic oligonucleotide
  Antisense strand to SEQ ID NO: 2240734
uuugugaccaggauggugc

SEQ ID NO: 2240736 - RNA, 19 nt, Artificial Sequence
  Description of Artificial Sequence: Synthetic oligonucleotide
  Sense strand starting at position 2811 of SEQ ID NO: 1884108
uugggacucgcuuacaaag

SEQ ID NO: 2240737 - RNA, 19 nt, Artificial Sequence
  Description of Artificial Sequence: Synthetic oligonucleotide
  Antisense strand to SEQ ID NO: 2240736
cuuuguaagcgagucccaa

SEQ ID NO: 2240738 - RNA, 19 nt, Artificial Sequence
  Description of Artificial Sequence: Synthetic oligonucleotide
  Sense strand starting at position 2863 of SEQ ID NO: 1884108
gaauuccugcuccguauca

SEQ ID NO: 2240739 - RNA, 19 nt, Artificial Sequence
  Description of Artificial Sequence: Synthetic oligonucleotide
  Antisense strand to SEQ ID NO: 2240738
ugauacggagcaggaauuc

SEQ ID NO: 2240740 - RNA, 19 nt, Artificial Sequence
  Description of Artificial Sequence: Synthetic oligonucleotide
  Sense strand starting at position 2944 of SEQ ID NO: 1884108
cuugaauccuuguugcaua

SEQ ID NO: 2240741 - RNA, 19 nt, Artificial Sequence
  Description of Artificial Sequence: Synthetic oligonucleotide
  Antisense strand to SEQ ID NO: 2240740
uaugcaacaaggauucaag

SEQ ID NO: 2240742 - RNA, 19 nt, Artificial Sequence
  Description of Artificial Sequence: Synthetic oligonucleotide
  Sense strand starting at position 2967 of SEQ ID NO: 1884108
gaauuucgauccgagucuu

SEQ ID NO: 2240743 - RNA, 19 nt, Artificial Sequence
  Description of Artificial Sequence: Synthetic oligonucleotide
  Antisense strand to SEQ ID NO: 2240742
aagacucggaucgaaauuc

SEQ ID NO: 2240744 - RNA, 19 nt, Artificial Sequence
  Description of Artificial Sequence: Synthetic oligonucleotide
  Sense strand starting at position 2992 of SEQ ID NO: 1884108
aggacuugacuuugcaaag

SEQ ID NO: 2240745 - RNA, 19 nt, Artificial Sequence
  Description of Artificial Sequence: Synthetic oligonucleotide
  Antisense strand to SEQ ID NO: 2240744
cuuugcaaagucaaguccu

SEQ ID NO: 2240746 - RNA, 19 nt, Artificial Sequence
  Description of Artificial Sequence: Synthetic oligonucleotide
  Sense strand starting at position 2993 of SEQ ID NO: 1884108
ggacuugacuuugcaaagu

SEQ ID NO: 2240747 - RNA, 19 nt, Artificial Sequence
  Description of Artificial Sequence: Synthetic oligonucleotide
  Antisense strand to SEQ ID NO: 2240746
acuuugcaaagucaagucc

SEQ ID NO: 2240748 - RNA, 19 nt, Artificial Sequence
  Description of Artificial Sequence: Synthetic oligonucleotide
  Sense strand starting at position 3068 of SEQ ID NO: 1884108
aagacauguuuguuugguu

SEQ ID NO: 2240749 - RNA, 19 nt, Artificial Sequence
  Description of Artificial Sequence: Synthetic oligonucleotide
  Antisense strand to SEQ ID NO: 2240748
aaccaaacaaacaugucuu

SEQ ID NO: 2240750 - RNA, 19 nt, Artificial Sequence
  Description of Artificial Sequence: Synthetic oligonucleotide
  Sense strand starting at position 3167 of SEQ ID NO: 1884108
auugccuaccucgauuaau

SEQ ID NO: 2240751 - RNA, 19 nt, Artificial Sequence
  Description of Artificial Sequence: Synthetic oligonucleotide
  Antisense strand to SEQ ID NO: 2240750
auuaaucgagguaggcaau

SEQ ID NO: 2240752 - RNA, 19 nt, Artificial Sequence
  Description of Artificial Sequence: Synthetic oligonucleotide
  Sense strand starting at position 3204 of SEQ ID NO: 1884108
gaaugaucuuuguuuaaga

SEQ ID NO: 2240753 - RNA, 19 nt, Artificial Sequence
  Description of Artificial Sequence: Synthetic oligonucleotide
  Antisense strand to SEQ ID NO: 2240752
ucuuaaacaaagaucauuc

SEQ ID NO: 2240754 - RNA, 19 nt, Artificial Sequence
  Description of Artificial Sequence: Synthetic oligonucleotide
  Sense strand starting at position 3330 of SEQ ID NO: 1884108
agaagaugguaucuguucu

SEQ ID NO: 2240755 - RNA, 19 nt, Artificial Sequence
  Description of Artificial Sequence: Synthetic oligonucleotide
  Antisense strand to SEQ ID NO: 2240754
agaacagauaccaucuucu

SEQ ID NO: 2240756 - RNA, 19 nt, Artificial Sequence
  Description of Artificial Sequence: Synthetic oligonucleotide
  Sense strand starting at position 3340 of SEQ ID NO: 1884108
aucuguucucgcugagaca

SEQ ID NO: 2240757 - RNA, 19 nt, Artificial Sequence
  Description of Artificial Sequence: Synthetic oligonucleotide
  Antisense strand to SEQ ID NO: 2240756
ugucucagcgagaacagau

SEQ ID NO: 2240758 - RNA, 19 nt, Artificial Sequence
  Description of Artificial Sequence: Synthetic oligonucleotide
  Sense strand starting at position 3349 of SEQ ID NO: 1884108
cgcugagacacugaaacau

SEQ ID NO: 2240759 - RNA, 19 nt, Artificial Sequence
  Description of Artificial Sequence: Synthetic oligonucleotide
  Antisense strand to SEQ ID NO: 2240758
auguuucagugucucagcg

SEQ ID NO: 2240760 - RNA, 19 nt, Artificial Sequence
  Description of Artificial Sequence: Synthetic oligonucleotide
  Sense strand starting at position 3358 of SEQ ID NO: 1884108
acugaaacaucaguuguau

SEQ ID NO: 2240761 - RNA, 19 nt, Artificial Sequence
  Description of Artificial Sequence: Synthetic oligonucleotide
  Antisense strand to SEQ ID NO: 2240760
auacaacugauguuucagu

SEQ ID NO: 2240762 - RNA, 19 nt, Artificial Sequence
  Description of Artificial Sequence: Synthetic oligonucleotide
  Sense strand starting at position 3449 of SEQ ID NO: 1884108
ggugauuauugagcuccua

SEQ ID NO: 2240763 - RNA, 19 nt, Artificial Sequence
  Description of Artificial Sequence: Synthetic oligonucleotide
  Antisense strand to SEQ ID NO: 2240762
uaggagcucaauaaucacc

SEQ ID NO: 2240764 - RNA, 19 nt, Artificial Sequence
  Description of Artificial Sequence: Synthetic oligonucleotide
  Sense strand starting at position 3530 of SEQ ID NO: 1884108
ugcagaggcuucucauuaa

SEQ ID NO: 2240765 - RNA, 19 nt, Artificial Sequence
  Description of Artificial Sequence: Synthetic oligonucleotide
  Antisense strand to SEQ ID NO: 2240764
uuaaugagaagccucugca

SEQ ID NO: 2240766 - RNA, 19 nt, Artificial Sequence
  Description of Artificial Sequence: Synthetic oligonucleotide
  Sense strand starting at position 3577 of SEQ ID NO: 1884108
aagcuauauugugcagcaa

SEQ ID NO: 2240767 - RNA, 19 nt, Artificial Sequence
  Description of Artificial Sequence: Synthetic oligonucleotide
  Antisense strand to SEQ ID NO: 2240766
uugcugcacaauauagcuu

SEQ ID NO: 2240768 - RNA, 19 nt, Artificial Sequence
  Description of Artificial Sequence: Synthetic oligonucleotide
  Sense strand starting at position 3635 of SEQ ID NO: 1884108
ucauaucuuccuggugcau

SEQ ID NO: 2240769 - RNA, 19 nt, Artificial Sequence
  Description of Artificial Sequence: Synthetic oligonucleotide
  Antisense strand to SEQ ID NO: 2240768
augcaccaggaagauauga

SEQ ID NO: 2240770 - RNA, 19 nt, Artificial Sequence
  Description of Artificial Sequence: Synthetic oligonucleotide
  Sense strand starting at position 3708 of SEQ ID NO: 1884108
uuaccauagcuuugucuuu

SEQ ID NO: 2240771 - RNA, 19 nt, Artificial Sequence
  Description of Artificial Sequence: Synthetic oligonucleotide
  Antisense strand to SEQ ID NO: 2240770
aaagacaaagcuaugguaa

SEQ ID NO: 2240772 - RNA, 19 nt, Artificial Sequence
  Description of Artificial Sequence: Synthetic oligonucleotide
  Sense strand starting at position 3717 of SEQ ID NO: 1884108
cuuugucuuucugugaucu

SEQ ID NO: 2240773 - RNA, 19 nt, Artificial Sequence
  Description of Artificial Sequence: Synthetic oligonucleotide
  Antisense strand to SEQ ID NO: 2240772
agaucacagaaagacaaag

SEQ ID NO: 2240774 - RNA, 19 nt, Artificial Sequence
  Description of Artificial Sequence: Synthetic oligonucleotide
  Sense strand starting at position 3721 of SEQ ID NO: 1884108
gucuuucugugaucucuug

SEQ ID NO: 2240775 - RNA, 19 nt, Artificial Sequence
  Description of Artificial Sequence: Synthetic oligonucleotide
  Antisense strand to SEQ ID NO: 2240774
caagagaucacagaaagac

SEQ ID NO: 2240776 - RNA, 19 nt, Artificial Sequence
  Description of Artificial Sequence: Synthetic oligonucleotide
  Sense strand starting at position 3794 of SEQ ID NO: 1884108
gaggaugaguuccacugaa

SEQ ID NO: 2240777 - RNA, 19 nt, Artificial Sequence
  Description of Artificial Sequence: Synthetic oligonucleotide
  Antisense strand to SEQ ID NO: 2240776
uucaguggaacucauccuc

SEQ ID NO: 2240778 - RNA, 19 nt, Artificial Sequence
  Description of Artificial Sequence: Synthetic oligonucleotide
  Sense strand starting at position 3834 of SEQ ID NO: 1884108
ugaaguugccauggauuau

SEQ ID NO: 2240779 - RNA, 19 nt, Artificial Sequence
  Description of Artificial Sequence: Synthetic oligonucleotide
  Antisense strand to SEQ ID NO: 2240778
auaauccauggcaacuuca

SEQ ID NO: 2240780 - RNA, 19 nt, Artificial Sequence
  Description of Artificial Sequence: Synthetic oligonucleotide
  Sense strand starting at position 3947 of SEQ ID NO: 1884108
ugaagagaguucucacaau

SEQ ID NO: 2240781 - RNA, 19 nt, Artificial Sequence
  Description of Artificial Sequence: Synthetic oligonucleotide
  Antisense strand to SEQ ID NO: 2240780
auugugagaacucucuuca

SEQ ID NO: 2240782 - RNA, 19 nt, Artificial Sequence
  Description of Artificial Sequence: Synthetic oligonucleotide
  Sense strand starting at position 3958 of SEQ ID NO: 1884108
cucacaauuuccuggguua

SEQ ID NO: 2240783 - RNA, 19 nt, Artificial Sequence
  Description of Artificial Sequence: Synthetic oligonucleotide
  Antisense strand to SEQ ID NO: 2240782
uaacccaggaaauugugag

SEQ ID NO: 2240784 - RNA, 19 nt, Artificial Sequence
  Description of Artificial Sequence: Synthetic oligonucleotide
  Sense strand starting at position 3971 of SEQ ID NO: 1884108
ggguuaaauguacaugcua

SEQ ID NO: 2240785 - RNA, 19 nt, Artificial Sequence
  Description of Artificial Sequence: Synthetic oligonucleotide
  Antisense strand to SEQ ID NO: 2240784
uagcauguacauuuaaccc

SEQ ID NO: 2240786 - RNA, 19 nt, Artificial Sequence
  Description of Artificial Sequence: Synthetic oligonucleotide
  Sense strand starting at position 245 of SEQ ID NO: 1884109
ggaggugacuaucagauga

SEQ ID NO: 2240787 - RNA, 19 nt, Artificial Sequence
  Description of Artificial Sequence: Synthetic oligonucleotide
  Antisense strand to SEQ ID NO: 2240786
ucaucugauagucaccucc

SEQ ID NO: 2240788 - RNA, 19 nt, Artificial Sequence
  Description of Artificial Sequence: Synthetic oligonucleotide
  Sense strand starting at position 247 of SEQ ID NO: 1884109
aggugacuaucagaugaga

SEQ ID NO: 2240789 - RNA, 19 nt, Artificial Sequence
  Description of Artificial Sequence: Synthetic oligonucleotide
  Antisense strand to SEQ ID NO: 2240788
ucucaucugauagucaccu

SEQ ID NO: 2240790 - RNA, 19 nt, Artificial Sequence
  Description of Artificial Sequence: Synthetic oligonucleotide
  Sense strand starting at position 249 of SEQ ID NO: 1884109
gugacuaucagaugagauu

SEQ ID NO: 2240791 - RNA, 19 nt, Artificial Sequence
  Description of Artificial Sequence: Synthetic oligonucleotide
  Antisense strand to SEQ ID NO: 2240790
aaucucaucugauagucac

SEQ ID NO: 2240792 - RNA, 19 nt, Artificial Sequence
  Description of Artificial Sequence: Synthetic oligonucleotide
  Sense strand starting at position 261 of SEQ ID NO: 1884109
ugagauuagugcuaggcuu

SEQ ID NO: 2240793 - RNA, 19 nt, Artificial Sequence
  Description of Artificial Sequence: Synthetic oligonucleotide
  Antisense strand to SEQ ID NO: 2240792
aagccuagcacuaaucuca

SEQ ID NO: 2240794 - RNA, 19 nt, Artificial Sequence
  Description of Artificial Sequence: Synthetic oligonucleotide
  Sense strand starting at position 358 of SEQ ID NO: 1884109
cugggcucauuggugauaa

SEQ ID NO: 2240795 - RNA, 19 nt, Artificial Sequence
  Description of Artificial Sequence: Synthetic oligonucleotide
  Antisense strand to SEQ ID NO: 2240794
uuaucaccaaugagcccag

SEQ ID NO: 2240796 - RNA, 19 nt, Artificial Sequence
  Description of Artificial Sequence: Synthetic oligonucleotide
  Sense strand starting at position 359 of SEQ ID NO: 1884109
ugggcucauuggugauaaa

SEQ ID NO: 2240797 - RNA, 19 nt, Artificial Sequence
  Description of Artificial Sequence: Synthetic oligonucleotide
  Antisense strand to SEQ ID NO: 2240796
uuuaucaccaaugagccca

SEQ ID NO: 2240798 - RNA, 19 nt, Artificial Sequence
  Description of Artificial Sequence: Synthetic oligonucleotide
  Sense strand starting at position 360 of SEQ ID NO: 1884109
gggcucauuggugauaaag

SEQ ID NO: 2240799 - RNA, 19 nt, Artificial Sequence
  Description of Artificial Sequence: Synthetic oligonucleotide
  Antisense strand to SEQ ID NO: 2240798
cuuuaucaccaaugagccc

SEQ ID NO: 2240800 - RNA, 19 nt, Artificial Sequence
  Description of Artificial Sequence: Synthetic oligonucleotide
  Sense strand starting at position 483 of SEQ ID NO: 1884109
agccgacugucauucuuua

SEQ ID NO: 2240801 - RNA, 19 nt, Artificial Sequence
  Description of Artificial Sequence: Synthetic oligonucleotide
  Antisense strand to SEQ ID NO: 2240800
uaaagaaugacagucggcu

SEQ ID NO: 2240802 - RNA, 19 nt, Artificial Sequence
  Description of Artificial Sequence: Synthetic oligonucleotide
  Sense strand starting at position 677 of SEQ ID NO: 1884109
ccaggcucuggucaucaga

SEQ ID NO: 2240803 - RNA, 19 nt, Artificial Sequence
  Description of Artificial Sequence: Synthetic oligonucleotide
  Antisense strand to SEQ ID NO: 2240802
ucugaugaccagagccugg

SEQ ID NO: 2240804 - RNA, 19 nt, Artificial Sequence
  Description of Artificial Sequence: Synthetic oligonucleotide
  Sense strand starting at position 805 of SEQ ID NO: 1884109
ugacuaaugugacguccaa

SEQ ID NO: 2240805 - RNA, 19 nt, Artificial Sequence
  Description of Artificial Sequence: Synthetic oligonucleotide
  Antisense strand to SEQ ID NO: 2240804
uuggacgucacauuaguca

SEQ ID NO: 2240806 - RNA, 19 nt, Artificial Sequence
  Description of Artificial Sequence: Synthetic oligonucleotide
  Sense strand starting at position 929 of SEQ ID NO: 1884109
acugaaauuucugaccaga

SEQ ID NO: 2240807 - RNA, 19 nt, Artificial Sequence
  Description of Artificial Sequence: Synthetic oligonucleotide
  Antisense strand to SEQ ID NO: 2240806
ucuggucagaaauuucagu

SEQ ID NO: 2240808 - RNA, 19 nt, Artificial Sequence
  Description of Artificial Sequence: Synthetic oligonucleotide
  Sense strand starting at position 1151 of SEQ ID NO: 1884109
gcgccugucguuucagcua

SEQ ID NO: 2240809 - RNA, 19 nt, Artificial Sequence
  Description of Artificial Sequence: Synthetic oligonucleotide
  Antisense strand to SEQ ID NO: 2240808
uagcugaaacgacaggcgc

SEQ ID NO: 2240810 - RNA, 19 nt, Artificial Sequence
  Description of Artificial Sequence: Synthetic oligonucleotide
  Sense strand starting at position 1184 of SEQ ID NO: 1884109
acaggaaagucgcuuaaac

SEQ ID NO: 2240811 - RNA, 19 nt, Artificial Sequence
  Description of Artificial Sequence: Synthetic oligonucleotide
  Antisense strand to SEQ ID NO: 2240810
guuuaagcgacuuuccugu

SEQ ID NO: 2240812 - RNA, 19 nt, Artificial Sequence
  Description of Artificial Sequence: Synthetic oligonucleotide
  Sense strand starting at position 1380 of SEQ ID NO: 1884109
ccgccacccgcuuguauaa

SEQ ID NO: 2240813 - RNA, 19 nt, Artificial Sequence
  Description of Artificial Sequence: Synthetic oligonucleotide
  Antisense strand to SEQ ID NO: 2240812
uuauacaagcggguggcgg

SEQ ID NO: 2240814 - RNA, 19 nt, Artificial Sequence
  Description of Artificial Sequence: Synthetic oligonucleotide
  Sense strand starting at position 1418 of SEQ ID NO: 1884109
gcagcuucguagucugcaa

SEQ ID NO: 2240815 - RNA, 19 nt, Artificial Sequence
  Description of Artificial Sequence: Synthetic oligonucleotide
  Antisense strand to SEQ ID NO: 2240814
uugcagacuacgaagcugc

SEQ ID NO: 2240816 - RNA, 19 nt, Artificial Sequence
  Description of Artificial Sequence: Synthetic oligonucleotide
  Sense strand starting at position 1422 of SEQ ID NO: 1884109
cuucguagucugcaaagaa

SEQ ID NO: 2240817 - RNA, 19 nt, Artificial Sequence
  Description of Artificial Sequence: Synthetic oligonucleotide
  Antisense strand to SEQ ID NO: 2240816
uucuuugcagacuacgaag

SEQ ID NO: 2240818 - RNA, 19 nt, Artificial Sequence
  Description of Artificial Sequence: Synthetic oligonucleotide
  Sense strand starting at position 1451 of SEQ ID NO: 1884109
gaaugaguuguggauccuc

SEQ ID NO: 2240819 - RNA, 19 nt, Artificial Sequence
  Description of Artificial Sequence: Synthetic oligonucleotide
  Antisense strand to SEQ ID NO: 2240818
gaggauccacaacucauuc

SEQ ID NO: 2240820 - RNA, 19 nt, Artificial Sequence
  Description of Artificial Sequence: Synthetic oligonucleotide
  Sense strand starting at position 1583 of SEQ ID NO: 1884109
cggucagacuggucacaga

SEQ ID NO: 2240821 - RNA, 19 nt, Artificial Sequence
  Description of Artificial Sequence: Synthetic oligonucleotide
  Antisense strand to SEQ ID NO: 2240820
ucugugaccagucugaccg

SEQ ID NO: 2240822 - RNA, 19 nt, Artificial Sequence
  Description of Artificial Sequence: Synthetic oligonucleotide
  Sense strand starting at position 1950 of SEQ ID NO: 1884109
cucaaagaaguauaugcau

SEQ ID NO: 2240823 - RNA, 19 nt, Artificial Sequence
  Description of Artificial Sequence: Synthetic oligonucleotide
  Antisense strand to SEQ ID NO: 2240822
augcauauacuucuuugag

SEQ ID NO: 2240824 - RNA, 19 nt, Artificial Sequence
  Description of Artificial Sequence: Synthetic oligonucleotide
  Sense strand starting at position 2091 of SEQ ID NO: 1884109
acggagauccugugggagu

SEQ ID NO: 2240825 - RNA, 19 nt, Artificial Sequence
  Description of Artificial Sequence: Synthetic oligonucleotide
  Antisense strand to SEQ ID NO: 2240824
acucccacaggaucuccgu

SEQ ID NO: 2240826 - RNA, 19 nt, Artificial Sequence
  Description of Artificial Sequence: Synthetic oligonucleotide
  Sense strand starting at position 2132 of SEQ ID NO: 1884109
ggccgaguucccagaggca

SEQ ID NO: 2240827 - RNA, 19 nt, Artificial Sequence
  Description of Artificial Sequence: Synthetic oligonucleotide
  Antisense strand to SEQ ID NO: 2240826
ugccucugggaacucggcc

SEQ ID NO: 2240828 - RNA, 19 nt, Artificial Sequence
  Description of Artificial Sequence: Synthetic oligonucleotide
  Sense strand starting at position 2562 of SEQ ID NO: 1884109
agcacacgugagcaagaau

SEQ ID NO: 2240829 - RNA, 19 nt, Artificial Sequence
  Description of Artificial Sequence: Synthetic oligonucleotide
  Antisense strand to SEQ ID NO: 2240828
auucuugcucacgugugcu

SEQ ID NO: 2240830 - RNA, 19 nt, Artificial Sequence
  Description of Artificial Sequence: Synthetic oligonucleotide
  Sense strand starting at position 2573 of SEQ ID NO: 1884109
gcaagaaucgcuuguccag

SEQ ID NO: 2240831 - RNA, 19 nt, Artificial Sequence
  Description of Artificial Sequence: Synthetic oligonucleotide
  Antisense strand to SEQ ID NO: 2240830
cuggacaagcgauucuugc

SEQ ID NO: 2240832 - RNA, 19 nt, Artificial Sequence
  Description of Artificial Sequence: Synthetic oligonucleotide
  Sense strand starting at position 3330 of SEQ ID NO: 1884109
gccagagucucaggacuga

SEQ ID NO: 2240833 - RNA, 19 nt, Artificial Sequence
  Description of Artificial Sequence: Synthetic oligonucleotide
  Antisense strand to SEQ ID NO: 2240832
ucaguccugagacucuggc

SEQ ID NO: 2240834 - RNA, 19 nt, Artificial Sequence
  Description of Artificial Sequence: Synthetic oligonucleotide
  Sense strand starting at position 3591 of SEQ ID NO: 1884109
uugacuguuguacgcgaga

SEQ ID NO: 2240835 - RNA, 19 nt, Artificial Sequence
  Description of Artificial Sequence: Synthetic oligonucleotide
  Antisense strand to SEQ ID NO: 2240834
ucucgcguacaacagucaa

SEQ ID NO: 2240836 - RNA, 19 nt, Artificial Sequence
  Description of Artificial Sequence: Synthetic oligonucleotide
  Sense strand starting at position 3593 of SEQ ID NO: 1884109
gacuguuguacgcgagagu

SEQ ID NO: 2240837 - RNA, 19 nt, Artificial Sequence
  Description of Artificial Sequence: Synthetic oligonucleotide
  Antisense strand to SEQ ID NO: 2240836
acucucgcguacaacaguc

SEQ ID NO: 2240838 - RNA, 19 nt, Artificial Sequence
  Description of Artificial Sequence: Synthetic oligonucleotide
  Sense strand starting at position 3890 of SEQ ID NO: 1884109
aggugauugucacgaccag

SEQ ID NO: 2240839 - RNA, 19 nt, Artificial Sequence
  Description of Artificial Sequence: Synthetic oligonucleotide
  Antisense strand to SEQ ID NO: 2240838
cuggucgugacaaucaccu

SEQ ID NO: 2240840 - RNA, 19 nt, Artificial Sequence
  Description of Artificial Sequence: Synthetic oligonucleotide
  Sense strand starting at position 3935 of SEQ ID NO: 1884109
gcacaucagucggucacaa

SEQ ID NO: 2240841 - RNA, 19 nt, Artificial Sequence
  Description of Artificial Sequence: Synthetic oligonucleotide
  Antisense strand to SEQ ID NO: 2240840
uugugaccgacugaugugc

SEQ ID NO: 2240842 - RNA, 19 nt, Artificial Sequence
  Description of Artificial Sequence: Synthetic oligonucleotide
  Sense strand starting at position 93 of SEQ ID NO: 1884110
cugggcucauuggugauaa

SEQ ID NO: 2240843 - RNA, 19 nt, Artificial Sequence
  Description of Artificial Sequence: Synthetic oligonucleotide
  Antisense strand to SEQ ID NO: 2240842
uuaucaccaaugagcccag

SEQ ID NO: 2240844 - RNA, 19 nt, Artificial Sequence
  Description of Artificial Sequence: Synthetic oligonucleotide
  Sense strand starting at position 94 of SEQ ID NO: 1884110
ugggcucauuggugauaaa

SEQ ID NO: 2240845 - RNA, 19 nt, Artificial Sequence
  Description of Artificial Sequence: Synthetic oligonucleotide
  Antisense strand to SEQ ID NO: 2240844
uuuaucaccaaugagccca

SEQ ID NO: 2240846 - RNA, 19 nt, Artificial Sequence
  Description of Artificial Sequence: Synthetic oligonucleotide
  Sense strand starting at position 95 of SEQ ID NO: 1884110
gggcucauuggugauaaag

SEQ ID NO: 2240847 - RNA, 19 nt, Artificial Sequence
  Description of Artificial Sequence: Synthetic oligonucleotide
  Antisense strand to SEQ ID NO: 2240846
cuuuaucaccaaugagccc

SEQ ID NO: 2240848 - RNA, 19 nt, Artificial Sequence
  Description of Artificial Sequence: Synthetic oligonucleotide
  Sense strand starting at position 218 of SEQ ID NO: 1884110
agccgacugucauucuuua

SEQ ID NO: 2240849 - RNA, 19 nt, Artificial Sequence
  Description of Artificial Sequence: Synthetic oligonucleotide
  Antisense strand to SEQ ID NO: 2240848
uaaagaaugacagucggcu

SEQ ID NO: 2240850 - RNA, 19 nt, Artificial Sequence
  Description of Artificial Sequence: Synthetic oligonucleotide
  Sense strand starting at position 412 of SEQ ID NO: 1884110
ccaggcucuggucaucaga

SEQ ID NO: 2240851 - RNA, 19 nt, Artificial Sequence
  Description of Artificial Sequence: Synthetic oligonucleotide
  Antisense strand to SEQ ID NO: 2240850
ucugaugaccagagccugg

SEQ ID NO: 2240852 - RNA, 19 nt, Artificial Sequence
  Description of Artificial Sequence: Synthetic oligonucleotide
  Sense strand starting at position 540 of SEQ ID NO: 1884110
ugacuaaugugacguccaa

SEQ ID NO: 2240853 - RNA, 19 nt, Artificial Sequence
  Description of Artificial Sequence: Synthetic oligonucleotide
  Antisense strand to SEQ ID NO: 2240852
uuggacgucacauuaguca

SEQ ID NO: 2240854 - RNA, 19 nt, Artificial Sequence
  Description of Artificial Sequence: Synthetic oligonucleotide
  Sense strand starting at position 664 of SEQ ID NO: 1884110
acugaaauuucugaccaga

SEQ ID NO: 2240855 - RNA, 19 nt, Artificial Sequence
  Description of Artificial Sequence: Synthetic oligonucleotide
  Antisense strand to SEQ ID NO: 2240854
ucuggucagaaauuucagu

SEQ ID NO: 2240856 - RNA, 19 nt, Artificial Sequence
  Description of Artificial Sequence: Synthetic oligonucleotide
  Sense strand starting at position 886 of SEQ ID NO: 1884110
gcgccugucguuucagcua

SEQ ID NO: 2240857 - RNA, 19 nt, Artificial Sequence
  Description of Artificial Sequence: Synthetic oligonucleotide
  Antisense strand to SEQ ID NO: 2240856
uagcugaaacgacaggcgc

SEQ ID NO: 2240858 - RNA, 19 nt, Artificial Sequence
  Description of Artificial Sequence: Synthetic oligonucleotide
  Sense strand starting at position 919 of SEQ ID NO: 1884110
acaggaaagucgcuuaaac

SEQ ID NO: 2240859 - RNA, 19 nt, Artificial Sequence
  Description of Artificial Sequence: Synthetic oligonucleotide
  Antisense strand to SEQ ID NO: 2240858
guuuaagcgacuuuccugu

SEQ ID NO: 2240860 - RNA, 19 nt, Artificial Sequence
  Description of Artificial Sequence: Synthetic oligonucleotide
  Sense strand starting at position 1115 of SEQ ID NO: 1884110
ccgccacccgcuuguauaa

SEQ ID NO: 2240861 - RNA, 19 nt, Artificial Sequence
  Description of Artificial Sequence: Synthetic oligonucleotide
  Antisense strand to SEQ ID NO: 2240860
uuauacaagcggguggcgg

SEQ ID NO: 2240862 - RNA, 19 nt, Artificial Sequence
  Description of Artificial Sequence: Synthetic oligonucleotide
  Sense strand starting at position 1153 of SEQ ID NO: 1884110
gcagcuucguagucugcaa

SEQ ID NO: 2240863 - RNA, 19 nt, Artificial Sequence
  Description of Artificial Sequence: Synthetic oligonucleotide
  Antisense strand to SEQ ID NO: 2240862
uugcagacuacgaagcugc

SEQ ID NO: 2240864 - RNA, 19 nt, Artificial Sequence
  Description of Artificial Sequence: Synthetic oligonucleotide
  Sense strand starting at position 1157 of SEQ ID NO: 1884110
cuucguagucugcaaagaa

SEQ ID NO: 2240865 - RNA, 19 nt, Artificial Sequence
  Description of Artificial Sequence: Synthetic oligonucleotide
  Antisense strand to SEQ ID NO: 2240864
uucuuugcagacuacgaag

SEQ ID NO: 2240866 - RNA, 19 nt, Artificial Sequence
  Description of Artificial Sequence: Synthetic oligonucleotide
  Sense strand starting at position 1186 of SEQ ID NO: 1884110
gaaugaguuguggauccuc

SEQ ID NO: 2240867 - RNA, 19 nt, Artificial Sequence
  Description of Artificial Sequence: Synthetic oligonucleotide
  Antisense strand to SEQ ID NO: 2240866
gaggauccacaacucauuc

SEQ ID NO: 2240868 - RNA, 19 nt, Artificial Sequence
  Description of Artificial Sequence: Synthetic oligonucleotide
  Sense strand starting at position 1318 of SEQ ID NO: 1884110
cggucagacuggucacaga

SEQ ID NO: 2240869 - RNA, 19 nt, Artificial Sequence
  Description of Artificial Sequence: Synthetic oligonucleotide
  Antisense strand to SEQ ID NO: 2240868
ucugugaccagucugaccg

SEQ ID NO: 2240870 - RNA, 19 nt, Artificial Sequence
  Description of Artificial Sequence: Synthetic oligonucleotide
  Sense strand starting at position 1685 of SEQ ID NO: 1884110
cucaaagaaguauaugcau

SEQ ID NO: 2240871 - RNA, 19 nt, Artificial Sequence
  Description of Artificial Sequence: Synthetic oligonucleotide
  Antisense strand to SEQ ID NO: 2240870
augcauauacuucuuugag

SEQ ID NO: 2240872 - RNA, 19 nt, Artificial Sequence
  Description of Artificial Sequence: Synthetic oligonucleotide
  Sense strand starting at position 1826 of SEQ ID NO: 1884110
acggagauccugugggagu

SEQ ID NO: 2240873 - RNA, 19 nt, Artificial Sequence
  Description of Artificial Sequence: Synthetic oligonucleotide
  Antisense strand to SEQ ID NO: 2240872
acucccacaggaucuccgu

SEQ ID NO: 2240874 - RNA, 19 nt, Artificial Sequence
  Description of Artificial Sequence: Synthetic oligonucleotide
  Sense strand starting at position 1867 of SEQ ID NO: 1884110
ggccgaguucccagaggca

SEQ ID NO: 2240875 - RNA, 19 nt, Artificial Sequence
  Description of Artificial Sequence: Synthetic oligonucleotide
  Antisense strand to SEQ ID NO: 2240874
ugccucugggaacucggcc

SEQ ID NO: 2240876 - RNA, 19 nt, Artificial Sequence
  Description of Artificial Sequence: Synthetic oligonucleotide
  Sense strand starting at position 2297 of SEQ ID NO: 1884110
agcacacgugagcaagaau

SEQ ID NO: 2240877 - RNA, 19 nt, Artificial Sequence
  Description of Artificial Sequence: Synthetic oligonucleotide
  Antisense strand to SEQ ID NO: 2240876
auucuugcucacgugugcu

SEQ ID NO: 2240878 - RNA, 19 nt, Artificial Sequence
  Description of Artificial Sequence: Synthetic oligonucleotide
  Sense strand starting at position 2308 of SEQ ID NO: 1884110
gcaagaaucgcuuguccag

SEQ ID NO: 2240879 - RNA, 19 nt, Artificial Sequence
  Description of Artificial Sequence: Synthetic oligonucleotide
  Antisense strand to SEQ ID NO: 2240878
cuggacaagcgauucuugc

SEQ ID NO: 2240880 - RNA, 19 nt, Artificial Sequence
  Description of Artificial Sequence: Synthetic oligonucleotide
  Sense strand starting at position 3065 of SEQ ID NO: 1884110
gccagagucucaggacuga

SEQ ID NO: 2240881 - RNA, 19 nt, Artificial Sequence
  Description of Artificial Sequence: Synthetic oligonucleotide
  Antisense strand to SEQ ID NO: 2240880
ucaguccugagacucuggc

SEQ ID NO: 2240882 - RNA, 19 nt, Artificial Sequence
  Description of Artificial Sequence: Synthetic oligonucleotide
  Sense strand starting at position 3326 of SEQ ID NO: 1884110
uugacuguuguacgcgaga

SEQ ID NO: 2240883 - RNA, 19 nt, Artificial Sequence
  Description of Artificial Sequence: Synthetic oligonucleotide
  Antisense strand to SEQ ID NO: 2240882
ucucgcguacaacagucaa

SEQ ID NO: 2240884 - RNA, 19 nt, Artificial Sequence
  Description of Artificial Sequence: Synthetic oligonucleotide
  Sense strand starting at position 3328 of SEQ ID NO: 1884110
gacuguuguacgcgagagu

SEQ ID NO: 2240885 - RNA, 19 nt, Artificial Sequence
  Description of Artificial Sequence: Synthetic oligonucleotide
  Antisense strand to SEQ ID NO: 2240884
acucucgcguacaacaguc

SEQ ID NO: 2240886 - RNA, 19 nt, Artificial Sequence
  Description of Artificial Sequence: Synthetic oligonucleotide
  Sense strand starting at position 3625 of SEQ ID NO: 1884110
aggugauugucacgaccag

SEQ ID NO: 2240887 - RNA, 19 nt, Artificial Sequence
  Description of Artificial Sequence: Synthetic oligonucleotide
  Antisense strand to SEQ ID NO: 2240886
cuggucgugacaaucaccu

SEQ ID NO: 2240888 - RNA, 19 nt, Artificial Sequence
  Description of Artificial Sequence: Synthetic oligonucleotide
  Sense strand starting at position 3670 of SEQ ID NO: 1884110
gcacaucagucggucacaa

SEQ ID NO: 2240889 - RNA, 19 nt, Artificial Sequence
  Description of Artificial Sequence: Synthetic oligonucleotide
  Antisense strand to SEQ ID NO: 2240888
uugugaccgacugaugugc

SEQ ID NO: 2240890 - RNA, 19 nt, Artificial Sequence
  Description of Artificial Sequence: Synthetic oligonucleotide
  Sense strand starting at position 3 of SEQ ID NO: 1884111
uugcaugaauuugagaaac

SEQ ID NO: 2240891 - RNA, 19 nt, Artificial Sequence
  Description of Artificial Sequence: Synthetic oligonucleotide
  Antisense strand to SEQ ID NO: 2240890
guuucucaaauucaugcaa

SEQ ID NO: 2240892 - RNA, 19 nt, Artificial Sequence
  Description of Artificial Sequence: Synthetic oligonucleotide
  Sense strand starting at position 149 of SEQ ID NO: 1884111
cugugaugucagcauaaag

SEQ ID NO: 2240893 - RNA, 19 nt, Artificial Sequence
  Description of Artificial Sequence: Synthetic oligonucleotide
  Antisense strand to SEQ ID NO: 2240892
cuuuaugcugacaucacag

SEQ ID NO: 2240894 - RNA, 19 nt, Artificial Sequence
  Description of Artificial Sequence: Synthetic oligonucleotide
  Sense strand starting at position 170 of SEQ ID NO: 1884111
gcaaauagauguuucuaaa

SEQ ID NO: 2240895 - RNA, 19 nt, Artificial Sequence
  Description of Artificial Sequence: Synthetic oligonucleotide
  Antisense strand to SEQ ID NO: 2240894
uuuagaaacaucuauuugc

SEQ ID NO: 2240896 - RNA, 19 nt, Artificial Sequence
  Description of Artificial Sequence: Synthetic oligonucleotide
  Sense strand starting at position 223 of SEQ ID NO: 1884111
acugcauagcauuaaagga

SEQ ID NO: 2240897 - RNA, 19 nt, Artificial Sequence
  Description of Artificial Sequence: Synthetic oligonucleotide
  Antisense strand to SEQ ID NO: 2240896
uccuuuaaugcuaugcagu

SEQ ID NO: 2240898 - RNA, 19 nt, Artificial Sequence
  Description of Artificial Sequence: Synthetic oligonucleotide
  Sense strand starting at position 246 of SEQ ID NO: 1884111
ucuacuuuaugggugaaag

SEQ ID NO: 2240899 - RNA, 19 nt, Artificial Sequence
  Description of Artificial Sequence: Synthetic oligonucleotide
  Antisense strand to SEQ ID NO: 2240898
cuuucacccauaaaguaga

SEQ ID NO: 2240900 - RNA, 19 nt, Artificial Sequence
  Description of Artificial Sequence: Synthetic oligonucleotide
  Sense strand starting at position 247 of SEQ ID NO: 1884111
cuacuuuaugggugaaaga

SEQ ID NO: 2240901 - RNA, 19 nt, Artificial Sequence
  Description of Artificial Sequence: Synthetic oligonucleotide
  Antisense strand to SEQ ID NO: 2240900
ucuuucacccauaaaguag

SEQ ID NO: 2240902 - RNA, 19 nt, Artificial Sequence
  Description of Artificial Sequence: Synthetic oligonucleotide
  Sense strand starting at position 270 of SEQ ID NO: 1884111
aaagguuagaguggucacu

SEQ ID NO: 2240903 - RNA, 19 nt, Artificial Sequence
  Description of Artificial Sequence: Synthetic oligonucleotide
  Antisense strand to SEQ ID NO: 2240902
agugaccacucuaaccuuu

SEQ ID NO: 2240904 - RNA, 19 nt, Artificial Sequence
  Description of Artificial Sequence: Synthetic oligonucleotide
  Sense strand starting at position 311 of SEQ ID NO: 1884111
uuccguuagcaauaaauag

SEQ ID NO: 2240905 - RNA, 19 nt, Artificial Sequence
  Description of Artificial Sequence: Synthetic oligonucleotide
  Antisense strand to SEQ ID NO: 2240904
cuauuuauugcuaacggaa

SEQ ID NO: 2240906 - RNA, 19 nt, Artificial Sequence
  Description of Artificial Sequence: Synthetic oligonucleotide
  Sense strand starting at position 354 of SEQ ID NO: 1884111
uggaaucuccacuguuuaa

SEQ ID NO: 2240907 - RNA, 19 nt, Artificial Sequence
  Description of Artificial Sequence: Synthetic oligonucleotide
  Antisense strand to SEQ ID NO: 2240906
uuaaacaguggagauucca

SEQ ID NO: 2240908 - RNA, 19 nt, Artificial Sequence
  Description of Artificial Sequence: Synthetic oligonucleotide
  Sense strand starting at position 515 of SEQ ID NO: 1884111
caagauucgugaucuaaua

SEQ ID NO: 2240909 - RNA, 19 nt, Artificial Sequence
  Description of Artificial Sequence: Synthetic oligonucleotide
  Antisense strand to SEQ ID NO: 2240908
uauuagaucacgaaucuug

SEQ ID NO: 2240910 - RNA, 19 nt, Artificial Sequence
  Description of Artificial Sequence: Synthetic oligonucleotide
  Sense strand starting at position 711 of SEQ ID NO: 1884111
gaauccuucccacgagaug

SEQ ID NO: 2240911 - RNA, 19 nt, Artificial Sequence
  Description of Artificial Sequence: Synthetic oligonucleotide
  Antisense strand to SEQ ID NO: 2240910
caucucgugggaaggauuc

SEQ ID NO: 2240912 - RNA, 19 nt, Artificial Sequence
  Description of Artificial Sequence: Synthetic oligonucleotide
  Sense strand starting at position 725 of SEQ ID NO: 1884111
agaugaacacucgguaaau

SEQ ID NO: 2240913 - RNA, 19 nt, Artificial Sequence
  Description of Artificial Sequence: Synthetic oligonucleotide
  Antisense strand to SEQ ID NO: 2240912
auuuaccgaguguucaucu

SEQ ID NO: 2240914 - RNA, 19 nt, Artificial Sequence
  Description of Artificial Sequence: Synthetic oligonucleotide
  Sense strand starting at position 726 of SEQ ID NO: 1884111
gaugaacacucgguaaaua

SEQ ID NO: 2240915 - RNA, 19 nt, Artificial Sequence
  Description of Artificial Sequence: Synthetic oligonucleotide
  Antisense strand to SEQ ID NO: 2240914
uauuuaccgaguguucauc

SEQ ID NO: 2240916 - RNA, 19 nt, Artificial Sequence
  Description of Artificial Sequence: Synthetic oligonucleotide
  Sense strand starting at position 746 of SEQ ID NO: 1884111
uaagguguacuugauaguu

SEQ ID NO: 2240917 - RNA, 19 nt, Artificial Sequence
  Description of Artificial Sequence: Synthetic oligonucleotide
  Antisense strand to SEQ ID NO: 2240916
aacuaucaaguacaccuua

SEQ ID NO: 2240918 - RNA, 19 nt, Artificial Sequence
  Description of Artificial Sequence: Synthetic oligonucleotide
  Sense strand starting at position 751 of SEQ ID NO: 1884111
uguacuugauaguugggaa

SEQ ID NO: 2240919 - RNA, 19 nt, Artificial Sequence
  Description of Artificial Sequence: Synthetic oligonucleotide
  Antisense strand to SEQ ID NO: 2240918
uucccaacuaucaaguaca

SEQ ID NO: 2240920 - RNA, 19 nt, Artificial Sequence
  Description of Artificial Sequence: Synthetic oligonucleotide
  Sense strand starting at position 752 of SEQ ID NO: 1884111
guacuugauaguugggaaa

SEQ ID NO: 2240921 - RNA, 19 nt, Artificial Sequence
  Description of Artificial Sequence: Synthetic oligonucleotide
  Antisense strand to SEQ ID NO: 2240920
uuucccaacuaucaaguac

SEQ ID NO: 2240922 - RNA, 19 nt, Artificial Sequence
  Description of Artificial Sequence: Synthetic oligonucleotide
  Sense strand starting at position 964 of SEQ ID NO: 1884111
gggacuguacugcguauuu

SEQ ID NO: 2240923 - RNA, 19 nt, Artificial Sequence
  Description of Artificial Sequence: Synthetic oligonucleotide
  Antisense strand to SEQ ID NO: 2240922
aaauacgcaguacaguccc

SEQ ID NO: 2240924 - RNA, 19 nt, Artificial Sequence
  Description of Artificial Sequence: Synthetic oligonucleotide
  Sense strand starting at position 1013 of SEQ ID NO: 1884111
guaacaagauuaucaagug

SEQ ID NO: 2240925 - RNA, 19 nt, Artificial Sequence
  Description of Artificial Sequence: Synthetic oligonucleotide
  Antisense strand to SEQ ID NO: 2240924
cacuugauaaucuuguuac

SEQ ID NO: 2240926 - RNA, 19 nt, Artificial Sequence
  Description of Artificial Sequence: Synthetic oligonucleotide
  Sense strand starting at position 1038 of SEQ ID NO: 1884111
guaggauucuaauccagau

SEQ ID NO: 2240927 - RNA, 19 nt, Artificial Sequence
  Description of Artificial Sequence: Synthetic oligonucleotide
  Antisense strand to SEQ ID NO: 2240926
aucuggauuagaauccuac

SEQ ID NO: 2240928 - RNA, 19 nt, Artificial Sequence
  Description of Artificial Sequence: Synthetic oligonucleotide
  Sense strand starting at position 1063 of SEQ ID NO: 1884111
acucgaaauccaggacuuu

SEQ ID NO: 2240929 - RNA, 19 nt, Artificial Sequence
  Description of Artificial Sequence: Synthetic oligonucleotide
  Antisense strand to SEQ ID NO: 2240928
aaaguccuggauuucgagu

SEQ ID NO: 2240930 - RNA, 19 nt, Artificial Sequence
  Description of Artificial Sequence: Synthetic oligonucleotide
  Sense strand starting at position 1103 of SEQ ID NO: 1884111
ugggaauauuaggugaagu

SEQ ID NO: 2240931 - RNA, 19 nt, Artificial Sequence
  Description of Artificial Sequence: Synthetic oligonucleotide
  Antisense strand to SEQ ID NO: 2240930
acuucaccuaauauuccca

SEQ ID NO: 2240932 - RNA, 19 nt, Artificial Sequence
  Description of Artificial Sequence: Synthetic oligonucleotide
  Sense strand starting at position 1104 of SEQ ID NO: 1884111
gggaauauuaggugaaguu

SEQ ID NO: 2240933 - RNA, 19 nt, Artificial Sequence
  Description of Artificial Sequence: Synthetic oligonucleotide
  Antisense strand to SEQ ID NO: 2240932
aacuucaccuaauauuccc

SEQ ID NO: 2240934 - RNA, 19 nt, Artificial Sequence
  Description of Artificial Sequence: Synthetic oligonucleotide
  Sense strand starting at position 1160 of SEQ ID NO: 1884111
acuguuucccaagauugcu

SEQ ID NO: 2240935 - RNA, 19 nt, Artificial Sequence
  Description of Artificial Sequence: Synthetic oligonucleotide
  Antisense strand to SEQ ID NO: 2240934
agcaaucuugggaaacagu

SEQ ID NO: 2240936 - RNA, 19 nt, Artificial Sequence
  Description of Artificial Sequence: Synthetic oligonucleotide
  Sense strand starting at position 1169 of SEQ ID NO: 1884111
caagauugcuacuuaggga

SEQ ID NO: 2240937 - RNA, 19 nt, Artificial Sequence
  Description of Artificial Sequence: Synthetic oligonucleotide
  Antisense strand to SEQ ID NO: 2240936
ucccuaaguagcaaucuug

SEQ ID NO: 2240938 - RNA, 19 nt, Artificial Sequence
  Description of Artificial Sequence: Synthetic oligonucleotide
  Sense strand starting at position 1285 of SEQ ID NO: 1884111
ccuugacguccuugaaaga

SEQ ID NO: 2240939 - RNA, 19 nt, Artificial Sequence
  Description of Artificial Sequence: Synthetic oligonucleotide
  Antisense strand to SEQ ID NO: 2240938
ucuuucaaggacgucaagg

SEQ ID NO: 2240940 - RNA, 19 nt, Artificial Sequence
  Description of Artificial Sequence: Synthetic oligonucleotide
  Sense strand starting at position 1366 of SEQ ID NO: 1884111
aauggaaguguuuggaaga

SEQ ID NO: 2240941 - RNA, 19 nt, Artificial Sequence
  Description of Artificial Sequence: Synthetic oligonucleotide
  Antisense strand to SEQ ID NO: 2240940
ucuuccaaacacuuccauu

SEQ ID NO: 2240942 - RNA, 19 nt, Artificial Sequence
  Description of Artificial Sequence: Synthetic oligonucleotide
  Sense strand starting at position 1456 of SEQ ID NO: 1884111
ggcgauugagucuaggaaa

SEQ ID NO: 2240943 - RNA, 19 nt, Artificial Sequence
  Description of Artificial Sequence: Synthetic oligonucleotide
  Antisense strand to SEQ ID NO: 2240942
uuuccuagacucaaucgcc

SEQ ID NO: 2240944 - RNA, 19 nt, Artificial Sequence
  Description of Artificial Sequence: Synthetic oligonucleotide
  Sense strand starting at position 1468 of SEQ ID NO: 1884111
uaggaaagauucucgagca

SEQ ID NO: 2240945 - RNA, 19 nt, Artificial Sequence
  Description of Artificial Sequence: Synthetic oligonucleotide
  Antisense strand to SEQ ID NO: 2240944
ugcucgagaaucuuuccua

SEQ ID NO: 2240946 - RNA, 19 nt, Artificial Sequence
  Description of Artificial Sequence: Synthetic oligonucleotide
  Sense strand starting at position 1520 of SEQ ID NO: 1884111
ggcaaugggcucgaauuca

SEQ ID NO: 2240947 - RNA, 19 nt, Artificial Sequence
  Description of Artificial Sequence: Synthetic oligonucleotide
  Antisense strand to SEQ ID NO: 2240946
ugaauucgagcccauugcc

SEQ ID NO: 2240948 - RNA, 19 nt, Artificial Sequence
  Description of Artificial Sequence: Synthetic oligonucleotide
  Sense strand starting at position 2673 of SEQ ID NO: 1884111
aaguguauuggguacaguu

SEQ ID NO: 2240949 - RNA, 19 nt, Artificial Sequence
  Description of Artificial Sequence: Synthetic oligonucleotide
  Antisense strand to SEQ ID NO: 2240948
aacuguacccaauacacuu

SEQ ID NO: 2240950 - RNA, 19 nt, Artificial Sequence
  Description of Artificial Sequence: Synthetic oligonucleotide
  Sense strand starting at position 2869 of SEQ ID NO: 1884111
uucuguuaagcgucuucga

SEQ ID NO: 2240951 - RNA, 19 nt, Artificial Sequence
  Description of Artificial Sequence: Synthetic oligonucleotide
  Antisense strand to SEQ ID NO: 2240950
ucgaagacgcuuaacagaa

SEQ ID NO: 2240952 - RNA, 19 nt, Artificial Sequence
  Description of Artificial Sequence: Synthetic oligonucleotide
  Sense strand starting at position 2870 of SEQ ID NO: 1884111
ucuguuaagcgucuucgau

SEQ ID NO: 2240953 - RNA, 19 nt, Artificial Sequence
  Description of Artificial Sequence: Synthetic oligonucleotide
  Antisense strand to SEQ ID NO: 2240952
aucgaagacgcuuaacaga

SEQ ID NO: 2240954 - RNA, 19 nt, Artificial Sequence
  Description of Artificial Sequence: Synthetic oligonucleotide
  Sense strand starting at position 2871 of SEQ ID NO: 1884111
cuguuaagcgucuucgaua

SEQ ID NO: 2240955 - RNA, 19 nt, Artificial Sequence
  Description of Artificial Sequence: Synthetic oligonucleotide
  Antisense strand to SEQ ID NO: 2240954
uaucgaagacgcuuaacag

SEQ ID NO: 2240956 - RNA, 19 nt, Artificial Sequence
  Description of Artificial Sequence: Synthetic oligonucleotide
  Sense strand starting at position 3103 of SEQ ID NO: 1884111
guaauaacauagguauuac

SEQ ID NO: 2240957 - RNA, 19 nt, Artificial Sequence
  Description of Artificial Sequence: Synthetic oligonucleotide
  Antisense strand to SEQ ID NO: 2240956
guaauaccuauguuauuac

SEQ ID NO: 2240958 - RNA, 19 nt, Artificial Sequence
  Description of Artificial Sequence: Synthetic oligonucleotide
  Sense strand starting at position 3331 of SEQ ID NO: 1884111
cucuuagaacagugaccaa

SEQ ID NO: 2240959 - RNA, 19 nt, Artificial Sequence
  Description of Artificial Sequence: Synthetic oligonucleotide
  Antisense strand to SEQ ID NO: 2240958
uuggucacuguucuaagag

SEQ ID NO: 2240960 - RNA, 19 nt, Artificial Sequence
  Description of Artificial Sequence: Synthetic oligonucleotide
  Sense strand starting at position 3756 of SEQ ID NO: 1884111
uugcaaacugaaugucaau

SEQ ID NO: 2240961 - RNA, 19 nt, Artificial Sequence
  Description of Artificial Sequence: Synthetic oligonucleotide
  Antisense strand to SEQ ID NO: 2240960
auugacauucaguuugcaa

SEQ ID NO: 2240962 - RNA, 19 nt, Artificial Sequence
  Description of Artificial Sequence: Synthetic oligonucleotide
  Sense strand starting at position 3802 of SEQ ID NO: 1884111
ucuguagaacuccauguaa

SEQ ID NO: 2240963 - RNA, 19 nt, Artificial Sequence
  Description of Artificial Sequence: Synthetic oligonucleotide
  Antisense strand to SEQ ID NO: 2240962
uuacauggaguucuacaga

SEQ ID NO: 2240964 - RNA, 19 nt, Artificial Sequence
  Description of Artificial Sequence: Synthetic oligonucleotide
  Sense strand starting at position 3804 of SEQ ID NO: 1884111
uguagaacuccauguaaua

SEQ ID NO: 2240965 - RNA, 19 nt, Artificial Sequence
  Description of Artificial Sequence: Synthetic oligonucleotide
  Antisense strand to SEQ ID NO: 2240964
uauuacauggaguucuaca

SEQ ID NO: 2240966 - RNA, 19 nt, Artificial Sequence
  Description of Artificial Sequence: Synthetic oligonucleotide
  Sense strand starting at position 3886 of SEQ ID NO: 1884111
aauggucaucugugaaucu

SEQ ID NO: 2240967 - RNA, 19 nt, Artificial Sequence
  Description of Artificial Sequence: Synthetic oligonucleotide
  Antisense strand to SEQ ID NO: 2240966
agauucacagaugaccauu

SEQ ID NO: 2240968 - RNA, 19 nt, Artificial Sequence
  Description of Artificial Sequence: Synthetic oligonucleotide
  Sense strand starting at position 3938 of SEQ ID NO: 1884111
cguauuguaauggauggau

SEQ ID NO: 2240969 - RNA, 19 nt, Artificial Sequence
  Description of Artificial Sequence: Synthetic oligonucleotide
  Antisense strand to SEQ ID NO: 2240968
auccauccauuacaauacg

SEQ ID NO: 2240970 - RNA, 19 nt, Artificial Sequence
  Description of Artificial Sequence: Synthetic oligonucleotide
  Sense strand starting at position 182 of SEQ ID NO: 1884112
ggacaugcuccugagcuaa

SEQ ID NO: 2240971 - RNA, 19 nt, Artificial Sequence
  Description of Artificial Sequence: Synthetic oligonucleotide
  Antisense strand to SEQ ID NO: 2240970
uuagcucaggagcaugucc

SEQ ID NO: 2240972 - RNA, 19 nt, Artificial Sequence
  Description of Artificial Sequence: Synthetic oligonucleotide
  Sense strand starting at position 243 of SEQ ID NO: 1884112
cccucagucuugguccaaa

SEQ ID NO: 2240973 - RNA, 19 nt, Artificial Sequence
  Description of Artificial Sequence: Synthetic oligonucleotide
  Antisense strand to SEQ ID NO: 2240972
uuuggaccaagacugaggg

SEQ ID NO: 2240974 - RNA, 19 nt, Artificial Sequence
  Description of Artificial Sequence: Synthetic oligonucleotide
  Sense strand starting at position 246 of SEQ ID NO: 1884112
ucagucuugguccaaaugu

SEQ ID NO: 2240975 - RNA, 19 nt, Artificial Sequence
  Description of Artificial Sequence: Synthetic oligonucleotide
  Antisense strand to SEQ ID NO: 2240974
acauuuggaccaagacuga

SEQ ID NO: 2240976 - RNA, 19 nt, Artificial Sequence
  Description of Artificial Sequence: Synthetic oligonucleotide
  Sense strand starting at position 273 of SEQ ID NO: 1884112
gugaccauccugugugcaa

SEQ ID NO: 2240977 - RNA, 19 nt, Artificial Sequence
  Description of Artificial Sequence: Synthetic oligonucleotide
  Antisense strand to SEQ ID NO: 2240976
uugcacacaggauggucac

SEQ ID NO: 2240978 - RNA, 19 nt, Artificial Sequence
  Description of Artificial Sequence: Synthetic oligonucleotide
  Sense strand starting at position 633 of SEQ ID NO: 1884112
cuccucuuuccugaguuau

SEQ ID NO: 2240979 - RNA, 19 nt, Artificial Sequence
  Description of Artificial Sequence: Synthetic oligonucleotide
  Antisense strand to SEQ ID NO: 2240978
auaacucaggaaagaggag

SEQ ID NO: 2240980 - RNA, 19 nt, Artificial Sequence
  Description of Artificial Sequence: Synthetic oligonucleotide
  Sense strand starting at position 905 of SEQ ID NO: 1884112
ucaguugcaucauaaauga

SEQ ID NO: 2240981 - RNA, 19 nt, Artificial Sequence
  Description of Artificial Sequence: Synthetic oligonucleotide
  Antisense strand to SEQ ID NO: 2240980
ucauuuaugaugcaacuga

SEQ ID NO: 2240982 - RNA, 19 nt, Artificial Sequence
  Description of Artificial Sequence: Synthetic oligonucleotide
  Sense strand starting at position 1599 of SEQ ID NO: 1884112
ggcauacauuucucgcuuu

SEQ ID NO: 2240983 - RNA, 19 nt, Artificial Sequence
  Description of Artificial Sequence: Synthetic oligonucleotide
  Antisense strand to SEQ ID NO: 2240982
aaagcgagaaauguaugcc

SEQ ID NO: 2240984 - RNA, 19 nt, Artificial Sequence
  Description of Artificial Sequence: Synthetic oligonucleotide
  Sense strand starting at position 1670 of SEQ ID NO: 1884112
ucggaauguuccucgugca

SEQ ID NO: 2240985 - RNA, 19 nt, Artificial Sequence
  Description of Artificial Sequence: Synthetic oligonucleotide
  Antisense strand to SEQ ID NO: 2240984
ugcacgaggaacauuccga

SEQ ID NO: 2240986 - RNA, 19 nt, Artificial Sequence
  Description of Artificial Sequence: Synthetic oligonucleotide
  Sense strand starting at position 1671 of SEQ ID NO: 1884112
cggaauguuccucgugcaa

SEQ ID NO: 2240987 - RNA, 19 nt, Artificial Sequence
  Description of Artificial Sequence: Synthetic oligonucleotide
  Antisense strand to SEQ ID NO: 2240986
uugcacgaggaacauuccg

SEQ ID NO: 2240988 - RNA, 19 nt, Artificial Sequence
  Description of Artificial Sequence: Synthetic oligonucleotide
  Sense strand starting at position 1686 of SEQ ID NO: 1884112
gcaaacgucccagagagau

SEQ ID NO: 2240989 - RNA, 19 nt, Artificial Sequence
  Description of Artificial Sequence: Synthetic oligonucleotide
  Antisense strand to SEQ ID NO: 2240988
aucucucugggacguuugc

SEQ ID NO: 2240990 - RNA, 19 nt, Artificial Sequence
  Description of Artificial Sequence: Synthetic oligonucleotide
  Sense strand starting at position 1701 of SEQ ID NO: 1884112
agauuuagcccuugcaggu

SEQ ID NO: 2240991 - RNA, 19 nt, Artificial Sequence
  Description of Artificial Sequence: Synthetic oligonucleotide
  Antisense strand to SEQ ID NO: 2240990
accugcaagggcuaaaucu

SEQ ID NO: 2240992 - RNA, 19 nt, Artificial Sequence
  Description of Artificial Sequence: Synthetic oligonucleotide
  Sense strand starting at position 1717 of SEQ ID NO: 1884112
gguggcuaguuaucgugau

SEQ ID NO: 2240993 - RNA, 19 nt, Artificial Sequence
  Description of Artificial Sequence: Synthetic oligonucleotide
  Antisense strand to SEQ ID NO: 2240992
aucacgauaacuagccacc

SEQ ID NO: 2240994 - RNA, 19 nt, Artificial Sequence
  Description of Artificial Sequence: Synthetic oligonucleotide
  Sense strand starting at position 1721 of SEQ ID NO: 1884112
gcuaguuaucgugaugccu

SEQ ID NO: 2240995 - RNA, 19 nt, Artificial Sequence
  Description of Artificial Sequence: Synthetic oligonucleotide
  Antisense strand to SEQ ID NO: 2240994
aggcaucacgauaacuagc

SEQ ID NO: 2240996 - RNA, 19 nt, Artificial Sequence
  Description of Artificial Sequence: Synthetic oligonucleotide
  Sense strand starting at position 1912 of SEQ ID NO: 1884112
ggaacuguuccaggcauca

SEQ ID NO: 2240997 - RNA, 19 nt, Artificial Sequence
  Description of Artificial Sequence: Synthetic oligonucleotide
  Antisense strand to SEQ ID NO: 2240996
ugaugccuggaacaguucc

SEQ ID NO: 2240998 - RNA, 19 nt, Artificial Sequence
  Description of Artificial Sequence: Synthetic oligonucleotide
  Sense strand starting at position 1986 of SEQ ID NO: 1884112
ggaggugaugcccggaaca

SEQ ID NO: 2240999 - RNA, 19 nt, Artificial Sequence
  Description of Artificial Sequence: Synthetic oligonucleotide
  Antisense strand to SEQ ID NO: 2240998
uguuccgggcaucaccucc

SEQ ID NO: 2241000 - RNA, 19 nt, Artificial Sequence
  Description of Artificial Sequence: Synthetic oligonucleotide
  Sense strand starting at position 2029 of SEQ ID NO: 1884112
acccauuaguggccuugaa

SEQ ID NO: 2241001 - RNA, 19 nt, Artificial Sequence
  Description of Artificial Sequence: Synthetic oligonucleotide
  Antisense strand to SEQ ID NO: 2241000
uucaaggccacuaaugggu

SEQ ID NO: 2241002 - RNA, 19 nt, Artificial Sequence
  Description of Artificial Sequence: Synthetic oligonucleotide
  Sense strand starting at position 2033 of SEQ ID NO: 1884112
auuaguggccuugaaauca

SEQ ID NO: 2241003 - RNA, 19 nt, Artificial Sequence
  Description of Artificial Sequence: Synthetic oligonucleotide
  Antisense strand to SEQ ID NO: 2241002
ugauuucaaggccacuaau

SEQ ID NO: 2241004 - RNA, 19 nt, Artificial Sequence
  Description of Artificial Sequence: Synthetic oligonucleotide
  Sense strand starting at position 2116 of SEQ ID NO: 1884112
uacaguauugucugaggug

SEQ ID NO: 2241005 - RNA, 19 nt, Artificial Sequence
  Description of Artificial Sequence: Synthetic oligonucleotide
  Antisense strand to SEQ ID NO: 2241004
caccucagacaauacugua

SEQ ID NO: 2241006 - RNA, 19 nt, Artificial Sequence
  Description of Artificial Sequence: Synthetic oligonucleotide
  Sense strand starting at position 2121 of SEQ ID NO: 1884112
uauugucugaggugaagua

SEQ ID NO: 2241007 - RNA, 19 nt, Artificial Sequence
  Description of Artificial Sequence: Synthetic oligonucleotide
  Antisense strand to SEQ ID NO: 2241006
uacuucaccucagacaaua

SEQ ID NO: 2241008 - RNA, 19 nt, Artificial Sequence
  Description of Artificial Sequence: Synthetic oligonucleotide
  Sense strand starting at position 2122 of SEQ ID NO: 1884112
auugucugaggugaaguau

SEQ ID NO: 2241009 - RNA, 19 nt, Artificial Sequence
  Description of Artificial Sequence: Synthetic oligonucleotide
  Antisense strand to SEQ ID NO: 2241008
auacuucaccucagacaau

SEQ ID NO: 2241010 - RNA, 19 nt, Artificial Sequence
  Description of Artificial Sequence: Synthetic oligonucleotide
  Sense strand starting at position 2131 of SEQ ID NO: 1884112
ggugaaguauuguuucagg

SEQ ID NO: 2241011 - RNA, 19 nt, Artificial Sequence
  Description of Artificial Sequence: Synthetic oligonucleotide
  Antisense strand to SEQ ID NO: 2241010
ccugaaacaauacuucacc

SEQ ID NO: 2241012 - RNA, 19 nt, Artificial Sequence
  Description of Artificial Sequence: Synthetic oligonucleotide
  Sense strand starting at position 2172 of SEQ ID NO: 1884112
ggcagaaacuaucaaauca

SEQ ID NO: 2241013 - RNA, 19 nt, Artificial Sequence
  Description of Artificial Sequence: Synthetic oligonucleotide
  Antisense strand to SEQ ID NO: 2241012
ugauuugauaguuucugcc

SEQ ID NO: 2241014 - RNA, 19 nt, Artificial Sequence
  Description of Artificial Sequence: Synthetic oligonucleotide
  Sense strand starting at position 2280 of SEQ ID NO: 1884112
cuguccuuccgagaaacaa

SEQ ID NO: 2241015 - RNA, 19 nt, Artificial Sequence
  Description of Artificial Sequence: Synthetic oligonucleotide
  Antisense strand to SEQ ID NO: 2241014
uuguuucucggaaggacag

SEQ ID NO: 2241016 - RNA, 19 nt, Artificial Sequence
  Description of Artificial Sequence: Synthetic oligonucleotide
  Sense strand starting at position 2778 of SEQ ID NO: 1884112
ggaccucacuuucugacaa

SEQ ID NO: 2241017 - RNA, 19 nt, Artificial Sequence
  Description of Artificial Sequence: Synthetic oligonucleotide
  Antisense strand to SEQ ID NO: 2241016
uugucagaaagugaggucc

SEQ ID NO: 2241018 - RNA, 19 nt, Artificial Sequence
  Description of Artificial Sequence: Synthetic oligonucleotide
  Sense strand starting at position 2782 of SEQ ID NO: 1884112
cucacuuucugacaaguga

SEQ ID NO: 2241019 - RNA, 19 nt, Artificial Sequence
  Description of Artificial Sequence: Synthetic oligonucleotide
  Antisense strand to SEQ ID NO: 2241018
ucacuugucagaaagugag

SEQ ID NO: 2241020 - RNA, 19 nt, Artificial Sequence
  Description of Artificial Sequence: Synthetic oligonucleotide
  Sense strand starting at position 2786 of SEQ ID NO: 1884112
cuuucugacaagugagugu

SEQ ID NO: 2241021 - RNA, 19 nt, Artificial Sequence
  Description of Artificial Sequence: Synthetic oligonucleotide
  Antisense strand to SEQ ID NO: 2241020
acacucacuugucagaaag

SEQ ID NO: 2241022 - RNA, 19 nt, Artificial Sequence
  Description of Artificial Sequence: Synthetic oligonucleotide
  Sense strand starting at position 2790 of SEQ ID NO: 1884112
cugacaagugaguguugaa

SEQ ID NO: 2241023 - RNA, 19 nt, Artificial Sequence
  Description of Artificial Sequence: Synthetic oligonucleotide
  Antisense strand to SEQ ID NO: 2241022
uucaacacucacuugucag

SEQ ID NO: 2241024 - RNA, 19 nt, Artificial Sequence
  Description of Artificial Sequence: Synthetic oligonucleotide
  Sense strand starting at position 3125 of SEQ ID NO: 1884112
gcuggaaaucuuggaacuc

SEQ ID NO: 2241025 - RNA, 19 nt, Artificial Sequence
  Description of Artificial Sequence: Synthetic oligonucleotide
  Antisense strand to SEQ ID NO: 2241024
gaguuccaagauuuccagc

SEQ ID NO: 2241026 - RNA, 19 nt, Artificial Sequence
  Description of Artificial Sequence: Synthetic oligonucleotide
  Sense strand starting at position 3126 of SEQ ID NO: 1884112
cuggaaaucuuggaacucu

SEQ ID NO: 2241027 - RNA, 19 nt, Artificial Sequence
  Description of Artificial Sequence: Synthetic oligonucleotide
  Antisense strand to SEQ ID NO: 2241026
agaguuccaagauuuccag

SEQ ID NO: 2241028 - RNA, 19 nt, Artificial Sequence
  Description of Artificial Sequence: Synthetic oligonucleotide
  Sense strand starting at position 3191 of SEQ ID NO: 1884112
uuguucugagacugaguuu

SEQ ID NO: 2241029 - RNA, 19 nt, Artificial Sequence
  Description of Artificial Sequence: Synthetic oligonucleotide
  Antisense strand to SEQ ID NO: 2241028
aaacucagucucagaacaa

SEQ ID NO: 2241030 - RNA, 19 nt, Artificial Sequence
  Description of Artificial Sequence: Synthetic oligonucleotide
  Sense strand starting at position 3302 of SEQ ID NO: 1884112
uccggaauagcugaaauua

SEQ ID NO: 2241031 - RNA, 19 nt, Artificial Sequence
  Description of Artificial Sequence: Synthetic oligonucleotide
  Antisense strand to SEQ ID NO: 2241030
uaauuucagcuauuccgga

SEQ ID NO: 2241032 - RNA, 19 nt, Artificial Sequence
  Description of Artificial Sequence: Synthetic oligonucleotide
  Sense strand starting at position 3513 of SEQ ID NO: 1884112
gggaaaugccaucaucuuu

SEQ ID NO: 2241033 - RNA, 19 nt, Artificial Sequence
  Description of Artificial Sequence: Synthetic oligonucleotide
  Antisense strand to SEQ ID NO: 2241032
aaagaugauggcauuuccc

SEQ ID NO: 2241034 - RNA, 19 nt, Artificial Sequence
  Description of Artificial Sequence: Synthetic oligonucleotide
  Sense strand starting at position 3539 of SEQ ID NO: 1884112
uaggguuuauaaggauuua

SEQ ID NO: 2241035 - RNA, 19 nt, Artificial Sequence
  Description of Artificial Sequence: Synthetic oligonucleotide
  Antisense strand to SEQ ID NO: 2241034
uaaauccuuauaaacccua

SEQ ID NO: 2241036 - RNA, 19 nt, Artificial Sequence
  Description of Artificial Sequence: Synthetic oligonucleotide
  Sense strand starting at position 3776 of SEQ ID NO: 1884112
gaacgccuggucugaagua

SEQ ID NO: 2241037 - RNA, 19 nt, Artificial Sequence
  Description of Artificial Sequence: Synthetic oligonucleotide
  Antisense strand to SEQ ID NO: 2241036
uacuucagaccaggcguuc

SEQ ID NO: 2241038 - RNA, 19 nt, Artificial Sequence
  Description of Artificial Sequence: Synthetic oligonucleotide
  Sense strand starting at position 3849 of SEQ ID NO: 1884112
gugccuggccuauaaggau

SEQ ID NO: 2241039 - RNA, 19 nt, Artificial Sequence
  Description of Artificial Sequence: Synthetic oligonucleotide
  Antisense strand to SEQ ID NO: 2241038
auccuuauaggccaggcac

SEQ ID NO: 2241040 - RNA, 19 nt, Artificial Sequence
  Description of Artificial Sequence: Synthetic oligonucleotide
  Sense strand starting at position 3858 of SEQ ID NO: 1884112
cuauaaggaucuuaaugug

SEQ ID NO: 2241041 - RNA, 19 nt, Artificial Sequence
  Description of Artificial Sequence: Synthetic oligonucleotide
  Antisense strand to SEQ ID NO: 2241040
cacauuaagauccuuauag

SEQ ID NO: 2241042 - RNA, 19 nt, Artificial Sequence
  Description of Artificial Sequence: Synthetic oligonucleotide
  Sense strand starting at position 3870 of SEQ ID NO: 1884112
uaauguggcucugcaacua

SEQ ID NO: 2241043 - RNA, 19 nt, Artificial Sequence
  Description of Artificial Sequence: Synthetic oligonucleotide
  Antisense strand to SEQ ID NO: 2241042
uaguugcagagccacauua

SEQ ID NO: 2241044 - RNA, 19 nt, Artificial Sequence
  Description of Artificial Sequence: Synthetic oligonucleotide
  Sense strand starting at position 3957 of SEQ ID NO: 1884112
ccaauauaagcaugaggua

SEQ ID NO: 2241045 - RNA, 19 nt, Artificial Sequence
  Description of Artificial Sequence: Synthetic oligonucleotide
  Antisense strand to SEQ ID NO: 2241044
uaccucaugcuuauauugg

SEQ ID NO: 2241046 - RNA, 19 nt, Artificial Sequence
  Description of Artificial Sequence: Synthetic oligonucleotide
  Sense strand starting at position 3969 of SEQ ID NO: 1884112
ugagguauagaccguaacu

SEQ ID NO: 2241047 - RNA, 19 nt, Artificial Sequence
  Description of Artificial Sequence: Synthetic oligonucleotide
  Antisense strand to SEQ ID NO: 2241046
aguuacggucuauaccuca

SEQ ID NO: 2241048 - RNA, 19 nt, Artificial Sequence
  Description of Artificial Sequence: Synthetic oligonucleotide
  Sense strand starting at position 3971 of SEQ ID NO: 1884112
agguauagaccguaacuca

SEQ ID NO: 2241049 - RNA, 19 nt, Artificial Sequence
  Description of Artificial Sequence: Synthetic oligonucleotide
  Antisense strand to SEQ ID NO: 2241048
ugaguuacggucuauaccu

SEQ ID NO: 2241050 - RNA, 19 nt, Artificial Sequence
  Description of Artificial Sequence: Synthetic oligonucleotide
  Sense strand starting at position 14 of SEQ ID NO: 1884113
cuugguuaaucugucauuu

SEQ ID NO: 2241051 - RNA, 19 nt, Artificial Sequence
  Description of Artificial Sequence: Synthetic oligonucleotide
  Antisense strand to SEQ ID NO: 2241050
aaaugacagauuaaccaag

SEQ ID NO: 2241052 - RNA, 19 nt, Artificial Sequence
  Description of Artificial Sequence: Synthetic oligonucleotide
  Sense strand starting at position 38 of SEQ ID NO: 1884113
uggaaugaguaguugcaga

SEQ ID NO: 2241053 - RNA, 19 nt, Artificial Sequence
  Description of Artificial Sequence: Synthetic oligonucleotide
  Antisense strand to SEQ ID NO: 2241052
ucugcaacuacucauucca

SEQ ID NO: 2241054 - RNA, 19 nt, Artificial Sequence
  Description of Artificial Sequence: Synthetic oligonucleotide
  Sense strand starting at position 307 of SEQ ID NO: 1884113
agcugaaaucguggccacu

SEQ ID NO: 2241055 - RNA, 19 nt, Artificial Sequence
  Description of Artificial Sequence: Synthetic oligonucleotide
  Antisense strand to SEQ ID NO: 2241054
aguggccacgauuucagcu

SEQ ID NO: 2241056 - RNA, 19 nt, Artificial Sequence
  Description of Artificial Sequence: Synthetic oligonucleotide
  Sense strand starting at position 917 of SEQ ID NO: 1884113
guaugagucuuggugguau

SEQ ID NO: 2241057 - RNA, 19 nt, Artificial Sequence
  Description of Artificial Sequence: Synthetic oligonucleotide
  Antisense strand to SEQ ID NO: 2241056
auaccaccaagacucauac

SEQ ID NO: 2241058 - RNA, 19 nt, Artificial Sequence
  Description of Artificial Sequence: Synthetic oligonucleotide
  Sense strand starting at position 999 of SEQ ID NO: 1884113
gccacaaggugucugaaga

SEQ ID NO: 2241059 - RNA, 19 nt, Artificial Sequence
  Description of Artificial Sequence: Synthetic oligonucleotide
  Antisense strand to SEQ ID NO: 2241058
ucuucagacaccuuguggc

SEQ ID NO: 2241060 - RNA, 19 nt, Artificial Sequence
  Description of Artificial Sequence: Synthetic oligonucleotide
  Sense strand starting at position 1079 of SEQ ID NO: 1884113
ggugcucugacaugacagu

SEQ ID NO: 2241061 - RNA, 19 nt, Artificial Sequence
  Description of Artificial Sequence: Synthetic oligonucleotide
  Antisense strand to SEQ ID NO: 2241060
acugucaugucagagcacc

SEQ ID NO: 2241062 - RNA, 19 nt, Artificial Sequence
  Description of Artificial Sequence: Synthetic oligonucleotide
  Sense strand starting at position 1166 of SEQ ID NO: 1884113
ccaguccucggccagagaa

SEQ ID NO: 2241063 - RNA, 19 nt, Artificial Sequence
  Description of Artificial Sequence: Synthetic oligonucleotide
  Antisense strand to SEQ ID NO: 2241062
uucucuggccgaggacugg

SEQ ID NO: 2241064 - RNA, 19 nt, Artificial Sequence
  Description of Artificial Sequence: Synthetic oligonucleotide
  Sense strand starting at position 1238 of SEQ ID NO: 1884113
gggugcuaccucuguuuga

SEQ ID NO: 2241065 - RNA, 19 nt, Artificial Sequence
  Description of Artificial Sequence: Synthetic oligonucleotide
  Antisense strand to SEQ ID NO: 2241064
ucaaacagagguagcaccc

SEQ ID NO: 2241066 - RNA, 19 nt, Artificial Sequence
  Description of Artificial Sequence: Synthetic oligonucleotide
  Sense strand starting at position 1260 of SEQ ID NO: 1884113
gugacugacaacugugcuu

SEQ ID NO: 2241067 - RNA, 19 nt, Artificial Sequence
  Description of Artificial Sequence: Synthetic oligonucleotide
  Antisense strand to SEQ ID NO: 2241066
aagcacaguugucagucac

SEQ ID NO: 2241068 - RNA, 19 nt, Artificial Sequence
  Description of Artificial Sequence: Synthetic oligonucleotide
  Sense strand starting at position 1265 of SEQ ID NO: 1884113
ugacaacugugcuuucuua

SEQ ID NO: 2241069 - RNA, 19 nt, Artificial Sequence
  Description of Artificial Sequence: Synthetic oligonucleotide
  Antisense strand to SEQ ID NO: 2241068
uaagaaagcacaguuguca

SEQ ID NO: 2241070 - RNA, 19 nt, Artificial Sequence
  Description of Artificial Sequence: Synthetic oligonucleotide
  Sense strand starting at position 1275 of SEQ ID NO: 1884113
gcuuucuuaggguggaguu

SEQ ID NO: 2241071 - RNA, 19 nt, Artificial Sequence
  Description of Artificial Sequence: Synthetic oligonucleotide
  Antisense strand to SEQ ID NO: 2241070
aacuccacccuaagaaagc

SEQ ID NO: 2241072 - RNA, 19 nt, Artificial Sequence
  Description of Artificial Sequence: Synthetic oligonucleotide
  Sense strand starting at position 1305 of SEQ ID NO: 1884113
gugacugucugcuugagau

SEQ ID NO: 2241073 - RNA, 19 nt, Artificial Sequence
  Description of Artificial Sequence: Synthetic oligonucleotide
  Antisense strand to SEQ ID NO: 2241072
aucucaagcagacagucac

SEQ ID NO: 2241074 - RNA, 19 nt, Artificial Sequence
  Description of Artificial Sequence: Synthetic oligonucleotide
  Sense strand starting at position 1307 of SEQ ID NO: 1884113
gacugucugcuugagauac

SEQ ID NO: 2241075 - RNA, 19 nt, Artificial Sequence
  Description of Artificial Sequence: Synthetic oligonucleotide
  Antisense strand to SEQ ID NO: 2241074
guaucucaagcagacaguc

SEQ ID NO: 2241076 - RNA, 19 nt, Artificial Sequence
  Description of Artificial Sequence: Synthetic oligonucleotide
  Sense strand starting at position 1371 of SEQ ID NO: 1884113
gaagucgucccagaggcuu

SEQ ID NO: 2241077 - RNA, 19 nt, Artificial Sequence
  Description of Artificial Sequence: Synthetic oligonucleotide
  Antisense strand to SEQ ID NO: 2241076
aagccucugggacgacuuc

SEQ ID NO: 2241078 - RNA, 19 nt, Artificial Sequence
  Description of Artificial Sequence: Synthetic oligonucleotide
  Sense strand starting at position 1468 of SEQ ID NO: 1884113
cccugagaaguguggacuu

SEQ ID NO: 2241079 - RNA, 19 nt, Artificial Sequence
  Description of Artificial Sequence: Synthetic oligonucleotide
  Antisense strand to SEQ ID NO: 2241078
aaguccacacuucucaggg

SEQ ID NO: 2241080 - RNA, 19 nt, Artificial Sequence
  Description of Artificial Sequence: Synthetic oligonucleotide
  Sense strand starting at position 1508 of SEQ ID NO: 1884113
gaaggucuugccuaggcau

SEQ ID NO: 2241081 - RNA, 19 nt, Artificial Sequence
  Description of Artificial Sequence: Synthetic oligonucleotide
  Antisense strand to SEQ ID NO: 2241080
augccuaggcaagaccuuc

SEQ ID NO: 2241082 - RNA, 19 nt, Artificial Sequence
  Description of Artificial Sequence: Synthetic oligonucleotide
  Sense strand starting at position 1529 of SEQ ID NO: 1884113
gguagaccuguuugaugca

SEQ ID NO: 2241083 - RNA, 19 nt, Artificial Sequence
  Description of Artificial Sequence: Synthetic oligonucleotide
  Antisense strand to SEQ ID NO: 2241082
ugcaucaaacaggucuacc

SEQ ID NO: 2241084 - RNA, 19 nt, Artificial Sequence
  Description of Artificial Sequence: Synthetic oligonucleotide
  Sense strand starting at position 1747 of SEQ ID NO: 1884113
auuugauaguuucugccuu

SEQ ID NO: 2241085 - RNA, 19 nt, Artificial Sequence
  Description of Artificial Sequence: Synthetic oligonucleotide
  Antisense strand to SEQ ID NO: 2241084
aaggcagaaacuaucaaau

SEQ ID NO: 2241086 - RNA, 19 nt, Artificial Sequence
  Description of Artificial Sequence: Synthetic oligonucleotide
  Sense strand starting at position 1751 of SEQ ID NO: 1884113
gauaguuucugccuugaug

SEQ ID NO: 2241087 - RNA, 19 nt, Artificial Sequence
  Description of Artificial Sequence: Synthetic oligonucleotide
  Antisense strand to SEQ ID NO: 2241086
caucaaggcagaaacuauc

SEQ ID NO: 2241088 - RNA, 19 nt, Artificial Sequence
  Description of Artificial Sequence: Synthetic oligonucleotide
  Sense strand starting at position 1759 of SEQ ID NO: 1884113
cugccuugaugccuagaca

SEQ ID NO: 2241089 - RNA, 19 nt, Artificial Sequence
  Description of Artificial Sequence: Synthetic oligonucleotide
  Antisense strand to SEQ ID NO: 2241088
ugucuaggcaucaaggcag

SEQ ID NO: 2241090 - RNA, 19 nt, Artificial Sequence
  Description of Artificial Sequence: Synthetic oligonucleotide
  Sense strand starting at position 1760 of SEQ ID NO: 1884113
ugccuugaugccuagacaa

SEQ ID NO: 2241091 - RNA, 19 nt, Artificial Sequence
  Description of Artificial Sequence: Synthetic oligonucleotide
  Antisense strand to SEQ ID NO: 2241090
uugucuaggcaucaaggca

SEQ ID NO: 2241092 - RNA, 19 nt, Artificial Sequence
  Description of Artificial Sequence: Synthetic oligonucleotide
  Sense strand starting at position 1856 of SEQ ID NO: 1884113
gaaagauucuggucuuauu

SEQ ID NO: 2241093 - RNA, 19 nt, Artificial Sequence
  Description of Artificial Sequence: Synthetic oligonucleotide
  Antisense strand to SEQ ID NO: 2241092
aauaagaccagaaucuuuc

SEQ ID NO: 2241094 - RNA, 19 nt, Artificial Sequence
  Description of Artificial Sequence: Synthetic oligonucleotide
  Sense strand starting at position 1867 of SEQ ID NO: 1884113
gucuuauuccaguaaauug

SEQ ID NO: 2241095 - RNA, 19 nt, Artificial Sequence
  Description of Artificial Sequence: Synthetic oligonucleotide
  Antisense strand to SEQ ID NO: 2241094
caauuuacuggaauaagac

SEQ ID NO: 2241096 - RNA, 19 nt, Artificial Sequence
  Description of Artificial Sequence: Synthetic oligonucleotide
  Sense strand starting at position 2000 of SEQ ID NO: 1884113
ggaacugaugccuggaaca

SEQ ID NO: 2241097 - RNA, 19 nt, Artificial Sequence
  Description of Artificial Sequence: Synthetic oligonucleotide
  Antisense strand to SEQ ID NO: 2241096
uguuccaggcaucaguucc

SEQ ID NO: 2241098 - RNA, 19 nt, Artificial Sequence
  Description of Artificial Sequence: Synthetic oligonucleotide
  Sense strand starting at position 2002 of SEQ ID NO: 1884113
aacugaugccuggaacagu

SEQ ID NO: 2241099 - RNA, 19 nt, Artificial Sequence
  Description of Artificial Sequence: Synthetic oligonucleotide
  Antisense strand to SEQ ID NO: 2241098
acuguuccaggcaucaguu

SEQ ID NO: 2241100 - RNA, 19 nt, Artificial Sequence
  Description of Artificial Sequence: Synthetic oligonucleotide
  Sense strand starting at position 2058 of SEQ ID NO: 1884113
gcaaguucuagguggucca

SEQ ID NO: 2241101 - RNA, 19 nt, Artificial Sequence
  Description of Artificial Sequence: Synthetic oligonucleotide
  Antisense strand to SEQ ID NO: 2241100
uggaccaccuagaacuugc

SEQ ID NO: 2241102 - RNA, 19 nt, Artificial Sequence
  Description of Artificial Sequence: Synthetic oligonucleotide
  Sense strand starting at position 2190 of SEQ ID NO: 1884113
gguggaaggcaucacgaua

SEQ ID NO: 2241103 - RNA, 19 nt, Artificial Sequence
  Description of Artificial Sequence: Synthetic oligonucleotide
  Antisense strand to SEQ ID NO: 2241102
uaucgugaugccuuccacc

SEQ ID NO: 2241104 - RNA, 19 nt, Artificial Sequence
  Description of Artificial Sequence: Synthetic oligonucleotide
  Sense strand starting at position 2225 of SEQ ID NO: 1884113
ggcuaaaucucucugggac

SEQ ID NO: 2241105 - RNA, 19 nt, Artificial Sequence
  Description of Artificial Sequence: Synthetic oligonucleotide
  Antisense strand to SEQ ID NO: 2241104
gucccagagagauuuagcc

SEQ ID NO: 2241106 - RNA, 19 nt, Artificial Sequence
  Description of Artificial Sequence: Synthetic oligonucleotide
  Sense strand starting at position 2228 of SEQ ID NO: 1884113
uaaaucucucugggacguu

SEQ ID NO: 2241107 - RNA, 19 nt, Artificial Sequence
  Description of Artificial Sequence: Synthetic oligonucleotide
  Antisense strand to SEQ ID NO: 2241106
aacgucccagagagauuua

SEQ ID NO: 2241108 - RNA, 19 nt, Artificial Sequence
  Description of Artificial Sequence: Synthetic oligonucleotide
  Sense strand starting at position 2239 of SEQ ID NO: 1884113
gggacguuugcacgaggaa

SEQ ID NO: 2241109 - RNA, 19 nt, Artificial Sequence
  Description of Artificial Sequence: Synthetic oligonucleotide
  Antisense strand to SEQ ID NO: 2241108
uuccucgugcaaacguccc

SEQ ID NO: 2241110 - RNA, 19 nt, Artificial Sequence
  Description of Artificial Sequence: Synthetic oligonucleotide
  Sense strand starting at position 2240 of SEQ ID NO: 1884113
ggacguuugcacgaggaac

SEQ ID NO: 2241111 - RNA, 19 nt, Artificial Sequence
  Description of Artificial Sequence: Synthetic oligonucleotide
  Antisense strand to SEQ ID NO: 2241110
guuccucgugcaaacgucc

SEQ ID NO: 2241112 - RNA, 19 nt, Artificial Sequence
  Description of Artificial Sequence: Synthetic oligonucleotide
  Sense strand starting at position 2242 of SEQ ID NO: 1884113
acguuugcacgaggaacau

SEQ ID NO: 2241113 - RNA, 19 nt, Artificial Sequence
  Description of Artificial Sequence: Synthetic oligonucleotide
  Antisense strand to SEQ ID NO: 2241112
auguuccucgugcaaacgu

SEQ ID NO: 2241114 - RNA, 19 nt, Artificial Sequence
  Description of Artificial Sequence: Synthetic oligonucleotide
  Sense strand starting at position 2289 of SEQ ID NO: 1884113
ggaucugguagcugaggaa

SEQ ID NO: 2241115 - RNA, 19 nt, Artificial Sequence
  Description of Artificial Sequence: Synthetic oligonucleotide
  Antisense strand to SEQ ID NO: 2241114
uuccucagcuaccagaucc

SEQ ID NO: 2241116 - RNA, 19 nt, Artificial Sequence
  Description of Artificial Sequence: Synthetic oligonucleotide
  Sense strand starting at position 3169 of SEQ ID NO: 1884113
uggcuugguccuugguaga

SEQ ID NO: 2241117 - RNA, 19 nt, Artificial Sequence
  Description of Artificial Sequence: Synthetic oligonucleotide
  Antisense strand to SEQ ID NO: 2241116
ucuaccaaggaccaagcca

SEQ ID NO: 2241118 - RNA, 19 nt, Artificial Sequence
  Description of Artificial Sequence: Synthetic oligonucleotide
  Sense strand starting at position 3179 of SEQ ID NO: 1884113
cuugguagaugcuuugagu

SEQ ID NO: 2241119 - RNA, 19 nt, Artificial Sequence
  Description of Artificial Sequence: Synthetic oligonucleotide
  Antisense strand to SEQ ID NO: 2241118
acucaaagcaucuaccaag

SEQ ID NO: 2241120 - RNA, 19 nt, Artificial Sequence
  Description of Artificial Sequence: Synthetic oligonucleotide
  Sense strand starting at position 3250 of SEQ ID NO: 1884113
gcaugugucaauggaugug

SEQ ID NO: 2241121 - RNA, 19 nt, Artificial Sequence
  Description of Artificial Sequence: Synthetic oligonucleotide
  Antisense strand to SEQ ID NO: 2241120
cacauccauugacacaugc

SEQ ID NO: 2241122 - RNA, 19 nt, Artificial Sequence
  Description of Artificial Sequence: Synthetic oligonucleotide
  Sense strand starting at position 3253 of SEQ ID NO: 1884113
ugugucaauggaugugaau

SEQ ID NO: 2241123 - RNA, 19 nt, Artificial Sequence
  Description of Artificial Sequence: Synthetic oligonucleotide
  Antisense strand to SEQ ID NO: 2241122
auucacauccauugacaca

SEQ ID NO: 2241124 - RNA, 19 nt, Artificial Sequence
  Description of Artificial Sequence: Synthetic oligonucleotide
  Sense strand starting at position 3632 of SEQ ID NO: 1884113
ggaggauugugguugcaca

SEQ ID NO: 2241125 - RNA, 19 nt, Artificial Sequence
  Description of Artificial Sequence: Synthetic oligonucleotide
  Antisense strand to SEQ ID NO: 2241124
ugugcaaccacaauccucc

SEQ ID NO: 2241126 - RNA, 19 nt, Artificial Sequence
  Description of Artificial Sequence: Synthetic oligonucleotide
  Sense strand starting at position 3740 of SEQ ID NO: 1884113
ucaggagcauguccaaaua

SEQ ID NO: 2241127 - RNA, 19 nt, Artificial Sequence
  Description of Artificial Sequence: Synthetic oligonucleotide
  Antisense strand to SEQ ID NO: 2241126
uauuuggacaugcuccuga

SEQ ID NO: 2241128 - RNA, 19 nt, Artificial Sequence
  Description of Artificial Sequence: Synthetic oligonucleotide
  Sense strand starting at position 3967 of SEQ ID NO: 1884113
ggaggugugggcugaauua

SEQ ID NO: 2241129 - RNA, 19 nt, Artificial Sequence
  Description of Artificial Sequence: Synthetic oligonucleotide
  Antisense strand to SEQ ID NO: 2241128
uaauucagcccacaccucc

SEQ ID NO: 2241130 - RNA, 19 nt, Artificial Sequence
  Description of Artificial Sequence: Synthetic oligonucleotide
  Sense strand starting at position 755 of SEQ ID NO: 1884114
uguuccuaucacuauguau

SEQ ID NO: 2241131 - RNA, 19 nt, Artificial Sequence
  Description of Artificial Sequence: Synthetic oligonucleotide
  Antisense strand to SEQ ID NO: 2241130
auacauagugauaggaaca

SEQ ID NO: 2241132 - RNA, 19 nt, Artificial Sequence
  Description of Artificial Sequence: Synthetic oligonucleotide
  Sense strand starting at position 766 of SEQ ID NO: 1884114
cuauguauucuccagucca

SEQ ID NO: 2241133 - RNA, 19 nt, Artificial Sequence
  Description of Artificial Sequence: Synthetic oligonucleotide
  Antisense strand to SEQ ID NO: 2241132
uggacuggagaauacauag

SEQ ID NO: 2241134 - RNA, 19 nt, Artificial Sequence
  Description of Artificial Sequence: Synthetic oligonucleotide
  Sense strand starting at position 974 of SEQ ID NO: 1884114
agaacuagauuccaacuga

SEQ ID NO: 2241135 - RNA, 19 nt, Artificial Sequence
  Description of Artificial Sequence: Synthetic oligonucleotide
  Antisense strand to SEQ ID NO: 2241134
ucaguuggaaucuaguucu

SEQ ID NO: 2241136 - RNA, 19 nt, Artificial Sequence
  Description of Artificial Sequence: Synthetic oligonucleotide
  Sense strand starting at position 1035 of SEQ ID NO: 1884114
auuaaagucuuccuuaagu

SEQ ID NO: 2241137 - RNA, 19 nt, Artificial Sequence
  Description of Artificial Sequence: Synthetic oligonucleotide
  Antisense strand to SEQ ID NO: 2241136
acuuaaggaagacuuuaau

SEQ ID NO: 2241138 - RNA, 19 nt, Artificial Sequence
  Description of Artificial Sequence: Synthetic oligonucleotide
  Sense strand starting at position 1237 of SEQ ID NO: 1884114
ucaugcuucuugguauaau

SEQ ID NO: 2241139 - RNA, 19 nt, Artificial Sequence
  Description of Artificial Sequence: Synthetic oligonucleotide
  Antisense strand to SEQ ID NO: 2241138
auuauaccaagaagcauga

SEQ ID NO: 2241140 - RNA, 19 nt, Artificial Sequence
  Description of Artificial Sequence: Synthetic oligonucleotide
  Sense strand starting at position 1240 of SEQ ID NO: 1884114
ugcuucuugguauaauuaa

SEQ ID NO: 2241141 - RNA, 19 nt, Artificial Sequence
  Description of Artificial Sequence: Synthetic oligonucleotide
  Antisense strand to SEQ ID NO: 2241140
uuaauuauaccaagaagca

SEQ ID NO: 2241142 - RNA, 19 nt, Artificial Sequence
  Description of Artificial Sequence: Synthetic oligonucleotide
  Sense strand starting at position 1349 of SEQ ID NO: 1884114
guuccauaauaaguaguga

SEQ ID NO: 2241143 - RNA, 19 nt, Artificial Sequence
  Description of Artificial Sequence: Synthetic oligonucleotide
  Antisense strand to SEQ ID NO: 2241142
ucacuacuuauuauggaac

SEQ ID NO: 2241144 - RNA, 19 nt, Artificial Sequence
  Description of Artificial Sequence: Synthetic oligonucleotide
  Sense strand starting at position 1363 of SEQ ID NO: 1884114
agugacagccaauauaauu

SEQ ID NO: 2241145 - RNA, 19 nt, Artificial Sequence
  Description of Artificial Sequence: Synthetic oligonucleotide
  Antisense strand to SEQ ID NO: 2241144
aauuauauuggcugucacu

SEQ ID NO: 2241146 - RNA, 19 nt, Artificial Sequence
  Description of Artificial Sequence: Synthetic oligonucleotide
  Sense strand starting at position 1391 of SEQ ID NO: 1884114
ugaguauaauucguccuca

SEQ ID NO: 2241147 - RNA, 19 nt, Artificial Sequence
  Description of Artificial Sequence: Synthetic oligonucleotide
  Antisense strand to SEQ ID NO: 2241146
ugaggacgaauuauacuca

SEQ ID NO: 2241148 - RNA, 19 nt, Artificial Sequence
  Description of Artificial Sequence: Synthetic oligonucleotide
  Sense strand starting at position 1392 of SEQ ID NO: 1884114
gaguauaauucguccucac

SEQ ID NO: 2241149 - RNA, 19 nt, Artificial Sequence
  Description of Artificial Sequence: Synthetic oligonucleotide
  Antisense strand to SEQ ID NO: 2241148
gugaggacgaauuauacuc

SEQ ID NO: 2241150 - RNA, 19 nt, Artificial Sequence
  Description of Artificial Sequence: Synthetic oligonucleotide
  Sense strand starting at position 1649 of SEQ ID NO: 1884114
ugcagagagugcccugaaa

SEQ ID NO: 2241151 - RNA, 19 nt, Artificial Sequence
  Description of Artificial Sequence: Synthetic oligonucleotide
  Antisense strand to SEQ ID NO: 2241150
uuucagggcacucucugca

SEQ ID NO: 2241152 - RNA, 19 nt, Artificial Sequence
  Description of Artificial Sequence: Synthetic oligonucleotide
  Sense strand starting at position 1651 of SEQ ID NO: 1884114
cagagagugcccugaaaua

SEQ ID NO: 2241153 - RNA, 19 nt, Artificial Sequence
  Description of Artificial Sequence: Synthetic oligonucleotide
  Antisense strand to SEQ ID NO: 2241152
uauuucagggcacucucug

SEQ ID NO: 2241154 - RNA, 19 nt, Artificial Sequence
  Description of Artificial Sequence: Synthetic oligonucleotide
  Sense strand starting at position 1719 of SEQ ID NO: 1884114
auuuguuauugggaauguu

SEQ ID NO: 2241155 - RNA, 19 nt, Artificial Sequence
  Description of Artificial Sequence: Synthetic oligonucleotide
  Antisense strand to SEQ ID NO: 2241154
aacauucccaauaacaaau

SEQ ID NO: 2241156 - RNA, 19 nt, Artificial Sequence
  Description of Artificial Sequence: Synthetic oligonucleotide
  Sense strand starting at position 2187 of SEQ ID NO: 1884114
ugacuuauuugacagccaa

SEQ ID NO: 2241157 - RNA, 19 nt, Artificial Sequence
  Description of Artificial Sequence: Synthetic oligonucleotide
  Antisense strand to SEQ ID NO: 2241156
uuggcugucaaauaaguca

SEQ ID NO: 2241158 - RNA, 19 nt, Artificial Sequence
  Description of Artificial Sequence: Synthetic oligonucleotide
  Sense strand starting at position 2286 of SEQ ID NO: 1884114
gggccacagaucuauguaa

SEQ ID NO: 2241159 - RNA, 19 nt, Artificial Sequence
  Description of Artificial Sequence: Synthetic oligonucleotide
  Antisense strand to SEQ ID NO: 2241158
uuacauagaucuguggccc

SEQ ID NO: 2241160 - RNA, 19 nt, Artificial Sequence
  Description of Artificial Sequence: Synthetic oligonucleotide
  Sense strand starting at position 2386 of SEQ ID NO: 1884114
auuucuaucugcuugcaga

SEQ ID NO: 2241161 - RNA, 19 nt, Artificial Sequence
  Description of Artificial Sequence: Synthetic oligonucleotide
  Antisense strand to SEQ ID NO: 2241160
ucugcaagcagauagaaau

SEQ ID NO: 2241162 - RNA, 19 nt, Artificial Sequence
  Description of Artificial Sequence: Synthetic oligonucleotide
  Sense strand starting at position 2448 of SEQ ID NO: 1884114
caugaaguguguccauuuc

SEQ ID NO: 2241163 - RNA, 19 nt, Artificial Sequence
  Description of Artificial Sequence: Synthetic oligonucleotide
  Antisense strand to SEQ ID NO: 2241162
gaaauggacacacuucaug

SEQ ID NO: 2241164 - RNA, 19 nt, Artificial Sequence
  Description of Artificial Sequence: Synthetic oligonucleotide
  Sense strand starting at position 2454 of SEQ ID NO: 1884114
guguguccauuucuccaau

SEQ ID NO: 2241165 - RNA, 19 nt, Artificial Sequence
  Description of Artificial Sequence: Synthetic oligonucleotide
  Antisense strand to SEQ ID NO: 2241164
auuggagaaauggacacac

SEQ ID NO: 2241166 - RNA, 19 nt, Artificial Sequence
  Description of Artificial Sequence: Synthetic oligonucleotide
  Sense strand starting at position 2525 of SEQ ID NO: 1884114
uaguaugaguuucuagaua

SEQ ID NO: 2241167 - RNA, 19 nt, Artificial Sequence
  Description of Artificial Sequence: Synthetic oligonucleotide
  Antisense strand to SEQ ID NO: 2241166
uaucuagaaacucauacua

SEQ ID NO: 2241168 - RNA, 19 nt, Artificial Sequence
  Description of Artificial Sequence: Synthetic oligonucleotide
  Sense strand starting at position 2641 of SEQ ID NO: 1884114
cuaccaguccugggauugu

SEQ ID NO: 2241169 - RNA, 19 nt, Artificial Sequence
  Description of Artificial Sequence: Synthetic oligonucleotide
  Antisense strand to SEQ ID NO: 2241168
acaaucccaggacugguag

SEQ ID NO: 2241170 - RNA, 19 nt, Artificial Sequence
  Description of Artificial Sequence: Synthetic oligonucleotide
  Sense strand starting at position 2672 of SEQ ID NO: 1884114
uuggccuuucccugguaau

SEQ ID NO: 2241171 - RNA, 19 nt, Artificial Sequence
  Description of Artificial Sequence: Synthetic oligonucleotide
  Antisense strand to SEQ ID NO: 2241170
auuaccagggaaaggccaa

SEQ ID NO: 2241172 - RNA, 19 nt, Artificial Sequence
  Description of Artificial Sequence: Synthetic oligonucleotide
  Sense strand starting at position 2673 of SEQ ID NO: 1884114
uggccuuucccugguaauu

SEQ ID NO: 2241173 - RNA, 19 nt, Artificial Sequence
  Description of Artificial Sequence: Synthetic oligonucleotide
  Antisense strand to SEQ ID NO: 2241172
aauuaccagggaaaggcca

SEQ ID NO: 2241174 - RNA, 19 nt, Artificial Sequence
  Description of Artificial Sequence: Synthetic oligonucleotide
  Sense strand starting at position 3171 of SEQ ID NO: 1884114
aggguacugcuuugaagaa

SEQ ID NO: 2241175 - RNA, 19 nt, Artificial Sequence
  Description of Artificial Sequence: Synthetic oligonucleotide
  Antisense strand to SEQ ID NO: 2241174
uucuucaaagcaguacccu

SEQ ID NO: 2241176 - RNA, 19 nt, Artificial Sequence
  Description of Artificial Sequence: Synthetic oligonucleotide
  Sense strand starting at position 3315 of SEQ ID NO: 1884114
ccaggucuugcuuaugaaa

SEQ ID NO: 2241177 - RNA, 19 nt, Artificial Sequence
  Description of Artificial Sequence: Synthetic oligonucleotide
  Antisense strand to SEQ ID NO: 2241176
uuucauaagcaagaccugg

SEQ ID NO: 2241178 - RNA, 19 nt, Artificial Sequence
  Description of Artificial Sequence: Synthetic oligonucleotide
  Sense strand starting at position 3360 of SEQ ID NO: 1884114
cuaaguaaggucugcucua

SEQ ID NO: 2241179 - RNA, 19 nt, Artificial Sequence
  Description of Artificial Sequence: Synthetic oligonucleotide
  Antisense strand to SEQ ID NO: 2241178
uagagcagaccuuacuuag

SEQ ID NO: 2241180 - RNA, 19 nt, Artificial Sequence
  Description of Artificial Sequence: Synthetic oligonucleotide
  Sense strand starting at position 3361 of SEQ ID NO: 1884114
uaaguaaggucugcucuaa

SEQ ID NO: 2241181 - RNA, 19 nt, Artificial Sequence
  Description of Artificial Sequence: Synthetic oligonucleotide
  Antisense strand to SEQ ID NO: 2241180
uuagagcagaccuuacuua

SEQ ID NO: 2241182 - RNA, 19 nt, Artificial Sequence
  Description of Artificial Sequence: Synthetic oligonucleotide
  Sense strand starting at position 3398 of SEQ ID NO: 1884114
caagguacugguuaucacu

SEQ ID NO: 2241183 - RNA, 19 nt, Artificial Sequence
  Description of Artificial Sequence: Synthetic oligonucleotide
  Antisense strand to SEQ ID NO: 2241182
agugauaaccaguaccuug

SEQ ID NO: 2241184 - RNA, 19 nt, Artificial Sequence
  Description of Artificial Sequence: Synthetic oligonucleotide
  Sense strand starting at position 3406 of SEQ ID NO: 1884114
ugguuaucacuuugacuau

SEQ ID NO: 2241185 - RNA, 19 nt, Artificial Sequence
  Description of Artificial Sequence: Synthetic oligonucleotide
  Antisense strand to SEQ ID NO: 2241184
auagucaaagugauaacca

SEQ ID NO: 2241186 - RNA, 19 nt, Artificial Sequence
  Description of Artificial Sequence: Synthetic oligonucleotide
  Sense strand starting at position 3447 of SEQ ID NO: 1884114
uggauuaaccaguguucua

SEQ ID NO: 2241187 - RNA, 19 nt, Artificial Sequence
  Description of Artificial Sequence: Synthetic oligonucleotide
  Antisense strand to SEQ ID NO: 2241186
uagaacacugguuaaucca

SEQ ID NO: 2241188 - RNA, 19 nt, Artificial Sequence
  Description of Artificial Sequence: Synthetic oligonucleotide
  Sense strand starting at position 3528 of SEQ ID NO: 1884114
ggaccuguaccuugauucu

SEQ ID NO: 2241189 - RNA, 19 nt, Artificial Sequence
  Description of Artificial Sequence: Synthetic oligonucleotide
  Antisense strand to SEQ ID NO: 2241188
agaaucaagguacaggucc

SEQ ID NO: 2241190 - RNA, 19 nt, Artificial Sequence
  Description of Artificial Sequence: Synthetic oligonucleotide
  Sense strand starting at position 3552 of SEQ ID NO: 1884114
ugcacaggucuccaucaau

SEQ ID NO: 2241191 - RNA, 19 nt, Artificial Sequence
  Description of Artificial Sequence: Synthetic oligonucleotide
  Antisense strand to SEQ ID NO: 2241190
auugauggagaccugugca

SEQ ID NO: 2241192 - RNA, 19 nt, Artificial Sequence
  Description of Artificial Sequence: Synthetic oligonucleotide
  Sense strand starting at position 3649 of SEQ ID NO: 1884114
gugaaaucauaggccaauu

SEQ ID NO: 2241193 - RNA, 19 nt, Artificial Sequence
  Description of Artificial Sequence: Synthetic oligonucleotide
  Antisense strand to SEQ ID NO: 2241192
aauuggccuaugauuucac

SEQ ID NO: 2241194 - RNA, 19 nt, Artificial Sequence
  Description of Artificial Sequence: Synthetic oligonucleotide
  Sense strand starting at position 3684 of SEQ ID NO: 1884114
ccacauuugccugguuaau

SEQ ID NO: 2241195 - RNA, 19 nt, Artificial Sequence
  Description of Artificial Sequence: Synthetic oligonucleotide
  Antisense strand to SEQ ID NO: 2241194
auuaaccaggcaaaugugg

SEQ ID NO: 2241196 - RNA, 19 nt, Artificial Sequence
  Description of Artificial Sequence: Synthetic oligonucleotide
  Sense strand starting at position 3701 of SEQ ID NO: 1884114
auacaaaguaggugauagu

SEQ ID NO: 2241197 - RNA, 19 nt, Artificial Sequence
  Description of Artificial Sequence: Synthetic oligonucleotide
  Antisense strand to SEQ ID NO: 2241196
acuaucaccuacuuuguau

SEQ ID NO: 2241198 - RNA, 19 nt, Artificial Sequence
  Description of Artificial Sequence: Synthetic oligonucleotide
  Sense strand starting at position 3745 of SEQ ID NO: 1884114
ugaugacuaugugagauaa

SEQ ID NO: 2241199 - RNA, 19 nt, Artificial Sequence
  Description of Artificial Sequence: Synthetic oligonucleotide
  Antisense strand to SEQ ID NO: 2241198
uuaucucacauagucauca

SEQ ID NO: 2241200 - RNA, 19 nt, Artificial Sequence
  Description of Artificial Sequence: Synthetic oligonucleotide
  Sense strand starting at position 3747 of SEQ ID NO: 1884114
augacuaugugagauaaua

SEQ ID NO: 2241201 - RNA, 19 nt, Artificial Sequence
  Description of Artificial Sequence: Synthetic oligonucleotide
  Antisense strand to SEQ ID NO: 2241200
uauuaucucacauagucau

SEQ ID NO: 2241202 - RNA, 19 nt, Artificial Sequence
  Description of Artificial Sequence: Synthetic oligonucleotide
  Sense strand starting at position 3774 of SEQ ID NO: 1884114
gcacauguugucuauccca

SEQ ID NO: 2241203 - RNA, 19 nt, Artificial Sequence
  Description of Artificial Sequence: Synthetic oligonucleotide
  Antisense strand to SEQ ID NO: 2241202
ugggauagacaacaugugc

SEQ ID NO: 2241204 - RNA, 19 nt, Artificial Sequence
  Description of Artificial Sequence: Synthetic oligonucleotide
  Sense strand starting at position 3781 of SEQ ID NO: 1884114
uugucuaucccagaguaga

SEQ ID NO: 2241205 - RNA, 19 nt, Artificial Sequence
  Description of Artificial Sequence: Synthetic oligonucleotide
  Antisense strand to SEQ ID NO: 2241204
ucuacucugggauagacaa

SEQ ID NO: 2241206 - RNA, 19 nt, Artificial Sequence
  Description of Artificial Sequence: Synthetic oligonucleotide
  Sense strand starting at position 3809 of SEQ ID NO: 1884114
agauacugguuucuuuaua

SEQ ID NO: 2241207 - RNA, 19 nt, Artificial Sequence
  Description of Artificial Sequence: Synthetic oligonucleotide
  Antisense strand to SEQ ID NO: 2241206
uauaaagaaaccaguaucu

SEQ ID NO: 2241208 - RNA, 19 nt, Artificial Sequence
  Description of Artificial Sequence: Synthetic oligonucleotide
  Sense strand starting at position 3860 of SEQ ID NO: 1884114
uggaaagucuuaccugaau

SEQ ID NO: 2241209 - RNA, 19 nt, Artificial Sequence
  Description of Artificial Sequence: Synthetic oligonucleotide
  Antisense strand to SEQ ID NO: 2241208
auucagguaagacuuucca

SEQ ID NO: 2241210 - RNA, 19 nt, Artificial Sequence
  Description of Artificial Sequence: Synthetic oligonucleotide
  Sense strand starting at position 143 of SEQ ID NO: 1884115
gaaucucacuuggugggaa

SEQ ID NO: 2241211 - RNA, 19 nt, Artificial Sequence
  Description of Artificial Sequence: Synthetic oligonucleotide
  Antisense strand to SEQ ID NO: 2241210
uucccaccaagugagauuc

SEQ ID NO: 2241212 - RNA, 19 nt, Artificial Sequence
  Description of Artificial Sequence: Synthetic oligonucleotide
  Sense strand starting at position 384 of SEQ ID NO: 1884115
gagcgcaguguugccauua

SEQ ID NO: 2241213 - RNA, 19 nt, Artificial Sequence
  Description of Artificial Sequence: Synthetic oligonucleotide
  Antisense strand to SEQ ID NO: 2241212
uaauggcaacacugcgcuc

SEQ ID NO: 2241214 - RNA, 19 nt, Artificial Sequence
  Description of Artificial Sequence: Synthetic oligonucleotide
  Sense strand starting at position 580 of SEQ ID NO: 1884115
uuuagaacagcuuagaugu

SEQ ID NO: 2241215 - RNA, 19 nt, Artificial Sequence
  Description of Artificial Sequence: Synthetic oligonucleotide
  Antisense strand to SEQ ID NO: 2241214
acaucuaagcuguucuaaa

SEQ ID NO: 2241216 - RNA, 19 nt, Artificial Sequence
  Description of Artificial Sequence: Synthetic oligonucleotide
  Sense strand starting at position 588 of SEQ ID NO: 1884115
agcuuagauguacagaauu

SEQ ID NO: 2241217 - RNA, 19 nt, Artificial Sequence
  Description of Artificial Sequence: Synthetic oligonucleotide
  Antisense strand to SEQ ID NO: 2241216
aauucuguacaucuaagcu

SEQ ID NO: 2241218 - RNA, 19 nt, Artificial Sequence
  Description of Artificial Sequence: Synthetic oligonucleotide
  Sense strand starting at position 666 of SEQ ID NO: 1884115
auauauugagaugguacau

SEQ ID NO: 2241219 - RNA, 19 nt, Artificial Sequence
  Description of Artificial Sequence: Synthetic oligonucleotide
  Antisense strand to SEQ ID NO: 2241218
auguaccaucucaauauau

SEQ ID NO: 2241220 - RNA, 19 nt, Artificial Sequence
  Description of Artificial Sequence: Synthetic oligonucleotide
  Sense strand starting at position 780 of SEQ ID NO: 1884115
ccagauuccuaugcaggau

SEQ ID NO: 2241221 - RNA, 19 nt, Artificial Sequence
  Description of Artificial Sequence: Synthetic oligonucleotide
  Antisense strand to SEQ ID NO: 2241220
auccugcauaggaaucugg

SEQ ID NO: 2241222 - RNA, 19 nt, Artificial Sequence
  Description of Artificial Sequence: Synthetic oligonucleotide
  Sense strand starting at position 784 of SEQ ID NO: 1884115
auuccuaugcaggauauca

SEQ ID NO: 2241223 - RNA, 19 nt, Artificial Sequence
  Description of Artificial Sequence: Synthetic oligonucleotide
  Antisense strand to SEQ ID NO: 2241222
ugauauccugcauaggaau

SEQ ID NO: 2241224 - RNA, 19 nt, Artificial Sequence
  Description of Artificial Sequence: Synthetic oligonucleotide
  Sense strand starting at position 867 of SEQ ID NO: 1884115
ugaugaccucgacaguucu

SEQ ID NO: 2241225 - RNA, 19 nt, Artificial Sequence
  Description of Artificial Sequence: Synthetic oligonucleotide
  Antisense strand to SEQ ID NO: 2241224
agaacugucgaggucauca

SEQ ID NO: 2241226 - RNA, 19 nt, Artificial Sequence
  Description of Artificial Sequence: Synthetic oligonucleotide
  Sense strand starting at position 916 of SEQ ID NO: 1884115
gaacauauguuucuugaga

SEQ ID NO: 2241227 - RNA, 19 nt, Artificial Sequence
  Description of Artificial Sequence: Synthetic oligonucleotide
  Antisense strand to SEQ ID NO: 2241226
ucucaagaaacauauguuc

SEQ ID NO: 2241228 - RNA, 19 nt, Artificial Sequence
  Description of Artificial Sequence: Synthetic oligonucleotide
  Sense strand starting at position 917 of SEQ ID NO: 1884115
aacauauguuucuugagag

SEQ ID NO: 2241229 - RNA, 19 nt, Artificial Sequence
  Description of Artificial Sequence: Synthetic oligonucleotide
  Antisense strand to SEQ ID NO: 2241228
cucucaagaaacauauguu

SEQ ID NO: 2241230 - RNA, 19 nt, Artificial Sequence
  Description of Artificial Sequence: Synthetic oligonucleotide
  Sense strand starting at position 924 of SEQ ID NO: 1884115
guuucuugagagcagggau

SEQ ID NO: 2241231 - RNA, 19 nt, Artificial Sequence
  Description of Artificial Sequence: Synthetic oligonucleotide
  Antisense strand to SEQ ID NO: 2241230
aucccugcucucaagaaac

SEQ ID NO: 2241232 - RNA, 19 nt, Artificial Sequence
  Description of Artificial Sequence: Synthetic oligonucleotide
  Sense strand starting at position 968 of SEQ ID NO: 1884115
gugugugauagggaucuga

SEQ ID NO: 2241233 - RNA, 19 nt, Artificial Sequence
  Description of Artificial Sequence: Synthetic oligonucleotide
  Antisense strand to SEQ ID NO: 2241232
ucagaucccuaucacacac

SEQ ID NO: 2241234 - RNA, 19 nt, Artificial Sequence
  Description of Artificial Sequence: Synthetic oligonucleotide
  Sense strand starting at position 972 of SEQ ID NO: 1884115
gugauagggaucugaugua

SEQ ID NO: 2241235 - RNA, 19 nt, Artificial Sequence
  Description of Artificial Sequence: Synthetic oligonucleotide
  Antisense strand to SEQ ID NO: 2241234
uacaucagaucccuaucac

SEQ ID NO: 2241236 - RNA, 19 nt, Artificial Sequence
  Description of Artificial Sequence: Synthetic oligonucleotide
  Sense strand starting at position 1347 of SEQ ID NO: 1884115
guaggcagugacuaauaaa

SEQ ID NO: 2241237 - RNA, 19 nt, Artificial Sequence
  Description of Artificial Sequence: Synthetic oligonucleotide
  Antisense strand to SEQ ID NO: 2241236
uuuauuagucacugccuac

SEQ ID NO: 2241238 - RNA, 19 nt, Artificial Sequence
  Description of Artificial Sequence: Synthetic oligonucleotide
  Sense strand starting at position 1371 of SEQ ID NO: 1884115
gcugccuuggguugauuua

SEQ ID NO: 2241239 - RNA, 19 nt, Artificial Sequence
  Description of Artificial Sequence: Synthetic oligonucleotide
  Antisense strand to SEQ ID NO: 2241238
uaaaucaacccaaggcagc

SEQ ID NO: 2241240 - RNA, 19 nt, Artificial Sequence
  Description of Artificial Sequence: Synthetic oligonucleotide
  Sense strand starting at position 1391 of SEQ ID NO: 1884115
aaaguagaguacucugauc

SEQ ID NO: 2241241 - RNA, 19 nt, Artificial Sequence
  Description of Artificial Sequence: Synthetic oligonucleotide
  Antisense strand to SEQ ID NO: 2241240
gaucagaguacucuacuuu

SEQ ID NO: 2241242 - RNA, 19 nt, Artificial Sequence
  Description of Artificial Sequence: Synthetic oligonucleotide
  Sense strand starting at position 1396 of SEQ ID NO: 1884115
agaguacucugaucauagg

SEQ ID NO: 2241243 - RNA, 19 nt, Artificial Sequence
  Description of Artificial Sequence: Synthetic oligonucleotide
  Antisense strand to SEQ ID NO: 2241242
ccuaugaucagaguacucu

SEQ ID NO: 2241244 - RNA, 19 nt, Artificial Sequence
  Description of Artificial Sequence: Synthetic oligonucleotide
  Sense strand starting at position 1527 of SEQ ID NO: 1884115
ggguccaggaaucauguua

SEQ ID NO: 2241245 - RNA, 19 nt, Artificial Sequence
  Description of Artificial Sequence: Synthetic oligonucleotide
  Antisense strand to SEQ ID NO: 2241244
uaacaugauuccuggaccc

SEQ ID NO: 2241246 - RNA, 19 nt, Artificial Sequence
  Description of Artificial Sequence: Synthetic oligonucleotide
  Sense strand starting at position 1790 of SEQ ID NO: 1884115
ggaaguaauccuugaacuu

SEQ ID NO: 2241247 - RNA, 19 nt, Artificial Sequence
  Description of Artificial Sequence: Synthetic oligonucleotide
  Antisense strand to SEQ ID NO: 2241246
aaguucaaggauuacuucc

SEQ ID NO: 2241248 - RNA, 19 nt, Artificial Sequence
  Description of Artificial Sequence: Synthetic oligonucleotide
  Sense strand starting at position 1853 of SEQ ID NO: 1884115
agaguuucugaagaguuuc

SEQ ID NO: 2241249 - RNA, 19 nt, Artificial Sequence
  Description of Artificial Sequence: Synthetic oligonucleotide
  Antisense strand to SEQ ID NO: 2241248
gaaacucuucagaaacucu

SEQ ID NO: 2241250 - RNA, 19 nt, Artificial Sequence
  Description of Artificial Sequence: Synthetic oligonucleotide
  Sense strand starting at position 2063 of SEQ ID NO: 1884115
aaauaaaguugagugagua

SEQ ID NO: 2241251 - RNA, 19 nt, Artificial Sequence
  Description of Artificial Sequence: Synthetic oligonucleotide
  Antisense strand to SEQ ID NO: 2241250
uacucacucaacuuuauuu

SEQ ID NO: 2241252 - RNA, 19 nt, Artificial Sequence
  Description of Artificial Sequence: Synthetic oligonucleotide
  Sense strand starting at position 2064 of SEQ ID NO: 1884115
aauaaaguugagugaguag

SEQ ID NO: 2241253 - RNA, 19 nt, Artificial Sequence
  Description of Artificial Sequence: Synthetic oligonucleotide
  Antisense strand to SEQ ID NO: 2241252
cuacucacucaacuuuauu

SEQ ID NO: 2241254 - RNA, 19 nt, Artificial Sequence
  Description of Artificial Sequence: Synthetic oligonucleotide
  Sense strand starting at position 2067 of SEQ ID NO: 1884115
aaaguugagugaguagaau

SEQ ID NO: 2241255 - RNA, 19 nt, Artificial Sequence
  Description of Artificial Sequence: Synthetic oligonucleotide
  Antisense strand to SEQ ID NO: 2241254
auucuacucacucaacuuu

SEQ ID NO: 2241256 - RNA, 19 nt, Artificial Sequence
  Description of Artificial Sequence: Synthetic oligonucleotide
  Sense strand starting at position 2073 of SEQ ID NO: 1884115
gagugaguagaaugagguu

SEQ ID NO: 2241257 - RNA, 19 nt, Artificial Sequence
  Description of Artificial Sequence: Synthetic oligonucleotide
  Antisense strand to SEQ ID NO: 2241256
aaccucauucuacucacuc

SEQ ID NO: 2241258 - RNA, 19 nt, Artificial Sequence
  Description of Artificial Sequence: Synthetic oligonucleotide
  Sense strand starting at position 2140 of SEQ ID NO: 1884115
cagagauaucgcugaggau

SEQ ID NO: 2241259 - RNA, 19 nt, Artificial Sequence
  Description of Artificial Sequence: Synthetic oligonucleotide
  Antisense strand to SEQ ID NO: 2241258
auccucagcgauaucucug

SEQ ID NO: 2241260 - RNA, 19 nt, Artificial Sequence
  Description of Artificial Sequence: Synthetic oligonucleotide
  Sense strand starting at position 2153 of SEQ ID NO: 1884115
gaggauuugugauaugaua

SEQ ID NO: 2241261 - RNA, 19 nt, Artificial Sequence
  Description of Artificial Sequence: Synthetic oligonucleotide
  Antisense strand to SEQ ID NO: 2241260
uaucauaucacaaauccuc

SEQ ID NO: 2241262 - RNA, 19 nt, Artificial Sequence
  Description of Artificial Sequence: Synthetic oligonucleotide
  Sense strand starting at position 2162 of SEQ ID NO: 1884115
ugauaugauacuggugauu

SEQ ID NO: 2241263 - RNA, 19 nt, Artificial Sequence
  Description of Artificial Sequence: Synthetic oligonucleotide
  Antisense strand to SEQ ID NO: 2241262
aaucaccaguaucauauca

SEQ ID NO: 2241264 - RNA, 19 nt, Artificial Sequence
  Description of Artificial Sequence: Synthetic oligonucleotide
  Sense strand starting at position 2265 of SEQ ID NO: 1884115
acaguaucaggguagguua

SEQ ID NO: 2241265 - RNA, 19 nt, Artificial Sequence
  Description of Artificial Sequence: Synthetic oligonucleotide
  Antisense strand to SEQ ID NO: 2241264
uaaccuacccugauacugu

SEQ ID NO: 2241266 - RNA, 19 nt, Artificial Sequence
  Description of Artificial Sequence: Synthetic oligonucleotide
  Sense strand starting at position 2307 of SEQ ID NO: 1884115
agcuuucugcaauaaugac

SEQ ID NO: 2241267 - RNA, 19 nt, Artificial Sequence
  Description of Artificial Sequence: Synthetic oligonucleotide
  Antisense strand to SEQ ID NO: 2241266
gucauuauugcagaaagcu

SEQ ID NO: 2241268 - RNA, 19 nt, Artificial Sequence
  Description of Artificial Sequence: Synthetic oligonucleotide
  Sense strand starting at position 2329 of SEQ ID NO: 1884115
uugaguaagaaugguacau

SEQ ID NO: 2241269 - RNA, 19 nt, Artificial Sequence
  Description of Artificial Sequence: Synthetic oligonucleotide
  Antisense strand to SEQ ID NO: 2241268
auguaccauucuuacucaa

SEQ ID NO: 2241270 - RNA, 19 nt, Artificial Sequence
  Description of Artificial Sequence: Synthetic oligonucleotide
  Sense strand starting at position 2349 of SEQ ID NO: 1884115
gauauuuaaugguacaaag

SEQ ID NO: 2241271 - RNA, 19 nt, Artificial Sequence
  Description of Artificial Sequence: Synthetic oligonucleotide
  Antisense strand to SEQ ID NO: 2241270
cuuuguaccauuaaauauc

SEQ ID NO: 2241272 - RNA, 19 nt, Artificial Sequence
  Description of Artificial Sequence: Synthetic oligonucleotide
  Sense strand starting at position 2471 of SEQ ID NO: 1884115
cugagauacuggcuaaaua

SEQ ID NO: 2241273 - RNA, 19 nt, Artificial Sequence
  Description of Artificial Sequence: Synthetic oligonucleotide
  Antisense strand to SEQ ID NO: 2241272
uauuuagccaguaucucag

SEQ ID NO: 2241274 - RNA, 19 nt, Artificial Sequence
  Description of Artificial Sequence: Synthetic oligonucleotide
  Sense strand starting at position 2752 of SEQ ID NO: 1884115
aucuauguuguaugagaga

SEQ ID NO: 2241275 - RNA, 19 nt, Artificial Sequence
  Description of Artificial Sequence: Synthetic oligonucleotide
  Antisense strand to SEQ ID NO: 2241274
ucucucauacaacauagau

SEQ ID NO: 2241276 - RNA, 19 nt, Artificial Sequence
  Description of Artificial Sequence: Synthetic oligonucleotide
  Sense strand starting at position 2761 of SEQ ID NO: 1884115
guaugagagacaggucuaa

SEQ ID NO: 2241277 - RNA, 19 nt, Artificial Sequence
  Description of Artificial Sequence: Synthetic oligonucleotide
  Antisense strand to SEQ ID NO: 2241276
uuagaccugucucucauac

SEQ ID NO: 2241278 - RNA, 19 nt, Artificial Sequence
  Description of Artificial Sequence: Synthetic oligonucleotide
  Sense strand starting at position 2963 of SEQ ID NO: 1884115
aguuauuaauacuucugga

SEQ ID NO: 2241279 - RNA, 19 nt, Artificial Sequence
  Description of Artificial Sequence: Synthetic oligonucleotide
  Antisense strand to SEQ ID NO: 2241278
uccagaaguauuaauaacu

SEQ ID NO: 2241280 - RNA, 19 nt, Artificial Sequence
  Description of Artificial Sequence: Synthetic oligonucleotide
  Sense strand starting at position 3366 of SEQ ID NO: 1884115
ucucuaaguccaugacaga

SEQ ID NO: 2241281 - RNA, 19 nt, Artificial Sequence
  Description of Artificial Sequence: Synthetic oligonucleotide
  Antisense strand to SEQ ID NO: 2241280
ucugucauggacuuagaga

SEQ ID NO: 2241282 - RNA, 19 nt, Artificial Sequence
  Description of Artificial Sequence: Synthetic oligonucleotide
  Sense strand starting at position 3484 of SEQ ID NO: 1884115
uggugcagaccuggaauaa

SEQ ID NO: 2241283 - RNA, 19 nt, Artificial Sequence
  Description of Artificial Sequence: Synthetic oligonucleotide
  Antisense strand to SEQ ID NO: 2241282
uuauuccaggucugcacca

SEQ ID NO: 2241284 - RNA, 19 nt, Artificial Sequence
  Description of Artificial Sequence: Synthetic oligonucleotide
  Sense strand starting at position 3584 of SEQ ID NO: 1884115
ucuaaagaguccuuagaua

SEQ ID NO: 2241285 - RNA, 19 nt, Artificial Sequence
  Description of Artificial Sequence: Synthetic oligonucleotide
  Antisense strand to SEQ ID NO: 2241284
uaucuaaggacucuuuaga

SEQ ID NO: 2241286 - RNA, 19 nt, Artificial Sequence
  Description of Artificial Sequence: Synthetic oligonucleotide
  Sense strand starting at position 3592 of SEQ ID NO: 1884115
guccuuagauaacugaaau

SEQ ID NO: 2241287 - RNA, 19 nt, Artificial Sequence
  Description of Artificial Sequence: Synthetic oligonucleotide
  Antisense strand to SEQ ID NO: 2241286
auuucaguuaucuaaggac

SEQ ID NO: 2241288 - RNA, 19 nt, Artificial Sequence
  Description of Artificial Sequence: Synthetic oligonucleotide
  Sense strand starting at position 3766 of SEQ ID NO: 1884115
gucaauccauuacuggauu

SEQ ID NO: 2241289 - RNA, 19 nt, Artificial Sequence
  Description of Artificial Sequence: Synthetic oligonucleotide
  Antisense strand to SEQ ID NO: 2241288
aauccaguaauggauugac

SEQ ID NO: 2241290 - RNA, 19 nt, Artificial Sequence
  Description of Artificial Sequence: Synthetic oligonucleotide
  Sense strand starting at position 65 of SEQ ID NO: 1884116
aggaauacccauugaguuc

SEQ ID NO: 2241291 - RNA, 19 nt, Artificial Sequence
  Description of Artificial Sequence: Synthetic oligonucleotide
  Antisense strand to SEQ ID NO: 2241290
gaacucaauggguauuccu

SEQ ID NO: 2241292 - RNA, 19 nt, Artificial Sequence
  Description of Artificial Sequence: Synthetic oligonucleotide
  Sense strand starting at position 152 of SEQ ID NO: 1884116
ucgggaacgaucuggcuaa

SEQ ID NO: 2241293 - RNA, 19 nt, Artificial Sequence
  Description of Artificial Sequence: Synthetic oligonucleotide
  Antisense strand to SEQ ID NO: 2241292
uuagccagaucguucccga

SEQ ID NO: 2241294 - RNA, 19 nt, Artificial Sequence
  Description of Artificial Sequence: Synthetic oligonucleotide
  Sense strand starting at position 156 of SEQ ID NO: 1884116
gaacgaucuggcuaagggu

SEQ ID NO: 2241295 - RNA, 19 nt, Artificial Sequence
  Description of Artificial Sequence: Synthetic oligonucleotide
  Antisense strand to SEQ ID NO: 2241294
acccuuagccagaucguuc

SEQ ID NO: 2241296 - RNA, 19 nt, Artificial Sequence
  Description of Artificial Sequence: Synthetic oligonucleotide
  Sense strand starting at position 269 of SEQ ID NO: 1884116
caaagugggcccugaaaca

SEQ ID NO: 2241297 - RNA, 19 nt, Artificial Sequence
  Description of Artificial Sequence: Synthetic oligonucleotide
  Antisense strand to SEQ ID NO: 2241296
uguuucagggcccacuuug

SEQ ID NO: 2241298 - RNA, 19 nt, Artificial Sequence
  Description of Artificial Sequence: Synthetic oligonucleotide
  Sense strand starting at position 289 of SEQ ID NO: 1884116
uccucuguccucuauggga

SEQ ID NO: 2241299 - RNA, 19 nt, Artificial Sequence
  Description of Artificial Sequence: Synthetic oligonucleotide
  Antisense strand to SEQ ID NO: 2241298
ucccauagaggacagagga

SEQ ID NO: 2241300 - RNA, 19 nt, Artificial Sequence
  Description of Artificial Sequence: Synthetic oligonucleotide
  Sense strand starting at position 291 of SEQ ID NO: 1884116
cucuguccucuaugggaau

SEQ ID NO: 2241301 - RNA, 19 nt, Artificial Sequence
  Description of Artificial Sequence: Synthetic oligonucleotide
  Antisense strand to SEQ ID NO: 2241300
auucccauagaggacagag

SEQ ID NO: 2241302 - RNA, 19 nt, Artificial Sequence
  Description of Artificial Sequence: Synthetic oligonucleotide
  Sense strand starting at position 486 of SEQ ID NO: 1884116
agaggauaugcuggcagau

SEQ ID NO: 2241303 - RNA, 19 nt, Artificial Sequence
  Description of Artificial Sequence: Synthetic oligonucleotide
  Antisense strand to SEQ ID NO: 2241302
aucugccagcauauccucu

SEQ ID NO: 2241304 - RNA, 19 nt, Artificial Sequence
  Description of Artificial Sequence: Synthetic oligonucleotide
  Sense strand starting at position 558 of SEQ ID NO: 1884116
ucugucugauaucuguauu

SEQ ID NO: 2241305 - RNA, 19 nt, Artificial Sequence
  Description of Artificial Sequence: Synthetic oligonucleotide
  Antisense strand to SEQ ID NO: 2241304
aauacagauaucagacaga

SEQ ID NO: 2241306 - RNA, 19 nt, Artificial Sequence
  Description of Artificial Sequence: Synthetic oligonucleotide
  Sense strand starting at position 561 of SEQ ID NO: 1884116
gucugauaucuguauucga

SEQ ID NO: 2241307 - RNA, 19 nt, Artificial Sequence
  Description of Artificial Sequence: Synthetic oligonucleotide
  Antisense strand to SEQ ID NO: 2241306
ucgaauacagauaucagac

SEQ ID NO: 2241308 - RNA, 19 nt, Artificial Sequence
  Description of Artificial Sequence: Synthetic oligonucleotide
  Sense strand starting at position 564 of SEQ ID NO: 1884116
ugauaucuguauucgacag

SEQ ID NO: 2241309 - RNA, 19 nt, Artificial Sequence
  Description of Artificial Sequence: Synthetic oligonucleotide
  Antisense strand to SEQ ID NO: 2241308
cugucgaauacagauauca

SEQ ID NO: 2241310 - RNA, 19 nt, Artificial Sequence
  Description of Artificial Sequence: Synthetic oligonucleotide
  Sense strand starting at position 568 of SEQ ID NO: 1884116
aucuguauucgacagugac

SEQ ID NO: 2241311 - RNA, 19 nt, Artificial Sequence
  Description of Artificial Sequence: Synthetic oligonucleotide
  Antisense strand to SEQ ID NO: 2241310
gucacugucgaauacagau

SEQ ID NO: 2241312 - RNA, 19 nt, Artificial Sequence
  Description of Artificial Sequence: Synthetic oligonucleotide
  Sense strand starting at position 686 of SEQ ID NO: 1884116
ggccucuuccaccaaggaa

SEQ ID NO: 2241313 - RNA, 19 nt, Artificial Sequence
  Description of Artificial Sequence: Synthetic oligonucleotide
  Antisense strand to SEQ ID NO: 2241312
uuccuugguggaagaggcc

SEQ ID NO: 2241314 - RNA, 19 nt, Artificial Sequence
  Description of Artificial Sequence: Synthetic oligonucleotide
  Sense strand starting at position 717 of SEQ ID NO: 1884116
cauggaguuuguucuccua

SEQ ID NO: 2241315 - RNA, 19 nt, Artificial Sequence
  Description of Artificial Sequence: Synthetic oligonucleotide
  Antisense strand to SEQ ID NO: 2241314
uaggagaacaaacuccaug

SEQ ID NO: 2241316 - RNA, 19 nt, Artificial Sequence
  Description of Artificial Sequence: Synthetic oligonucleotide
  Sense strand starting at position 719 of SEQ ID NO: 1884116
uggaguuuguucuccuaca

SEQ ID NO: 2241317 - RNA, 19 nt, Artificial Sequence
  Description of Artificial Sequence: Synthetic oligonucleotide
  Antisense strand to SEQ ID NO: 2241316
uguaggagaacaaacucca

SEQ ID NO: 2241318 - RNA, 19 nt, Artificial Sequence
  Description of Artificial Sequence: Synthetic oligonucleotide
  Sense strand starting at position 720 of SEQ ID NO: 1884116
ggaguuuguucuccuacag

SEQ ID NO: 2241319 - RNA, 19 nt, Artificial Sequence
  Description of Artificial Sequence: Synthetic oligonucleotide
  Antisense strand to SEQ ID NO: 2241318
cuguaggagaacaaacucc

SEQ ID NO: 2241320 - RNA, 19 nt, Artificial Sequence
  Description of Artificial Sequence: Synthetic oligonucleotide
  Sense strand starting at position 737 of SEQ ID NO: 1884116
aggcaauuucucuguuguc

SEQ ID NO: 2241321 - RNA, 19 nt, Artificial Sequence
  Description of Artificial Sequence: Synthetic oligonucleotide
  Antisense strand to SEQ ID NO: 2241320
gacaacagagaaauugccu

SEQ ID NO: 2241322 - RNA, 19 nt, Artificial Sequence
  Description of Artificial Sequence: Synthetic oligonucleotide
  Sense strand starting at position 738 of SEQ ID NO: 1884116
ggcaauuucucuguugucu

SEQ ID NO: 2241323 - RNA, 19 nt, Artificial Sequence
  Description of Artificial Sequence: Synthetic oligonucleotide
  Antisense strand to SEQ ID NO: 2241322
agacaacagagaaauugcc

SEQ ID NO: 2241324 - RNA, 19 nt, Artificial Sequence
  Description of Artificial Sequence: Synthetic oligonucleotide
  Sense strand starting at position 814 of SEQ ID NO: 1884116
ggaauaaacugccucuuau

SEQ ID NO: 2241325 - RNA, 19 nt, Artificial Sequence
  Description of Artificial Sequence: Synthetic oligonucleotide
  Antisense strand to SEQ ID NO: 2241324
auaagaggcaguuuauucc

SEQ ID NO: 2241326 - RNA, 19 nt, Artificial Sequence
  Description of Artificial Sequence: Synthetic oligonucleotide
  Sense strand starting at position 920 of SEQ ID NO: 1884116
cugcauguacagcaauaau

SEQ ID NO: 2241327 - RNA, 19 nt, Artificial Sequence
  Description of Artificial Sequence: Synthetic oligonucleotide
  Antisense strand to SEQ ID NO: 2241326
auuauugcuguacaugcag

SEQ ID NO: 2241328 - RNA, 19 nt, Artificial Sequence
  Description of Artificial Sequence: Synthetic oligonucleotide
  Sense strand starting at position 987 of SEQ ID NO: 1884116
cugccaaagcaaugggaua

SEQ ID NO: 2241329 - RNA, 19 nt, Artificial Sequence
  Description of Artificial Sequence: Synthetic oligonucleotide
  Antisense strand to SEQ ID NO: 2241328
uaucccauugcuuuggcag

SEQ ID NO: 2241330 - RNA, 19 nt, Artificial Sequence
  Description of Artificial Sequence: Synthetic oligonucleotide
  Sense strand starting at position 1154 of SEQ ID NO: 1884116
cccauuacugcauguaaag

SEQ ID NO: 2241331 - RNA, 19 nt, Artificial Sequence
  Description of Artificial Sequence: Synthetic oligonucleotide
  Antisense strand to SEQ ID NO: 2241330
cuuuacaugcaguaauggg

SEQ ID NO: 2241332 - RNA, 19 nt, Artificial Sequence
  Description of Artificial Sequence: Synthetic oligonucleotide
  Sense strand starting at position 1226 of SEQ ID NO: 1884116
gcagacagguaacuuauaa

SEQ ID NO: 2241333 - RNA, 19 nt, Artificial Sequence
  Description of Artificial Sequence: Synthetic oligonucleotide
  Antisense strand to SEQ ID NO: 2241332
uuauaaguuaccugucugc

SEQ ID NO: 2241334 - RNA, 19 nt, Artificial Sequence
  Description of Artificial Sequence: Synthetic oligonucleotide
  Sense strand starting at position 1278 of SEQ ID NO: 1884116
gggaguugucccuagacug

SEQ ID NO: 2241335 - RNA, 19 nt, Artificial Sequence
  Description of Artificial Sequence: Synthetic oligonucleotide
  Antisense strand to SEQ ID NO: 2241334
cagucuagggacaacuccc

SEQ ID NO: 2241336 - RNA, 19 nt, Artificial Sequence
  Description of Artificial Sequence: Synthetic oligonucleotide
  Sense strand starting at position 1294 of SEQ ID NO: 1884116
cuguauucucucuagccca

SEQ ID NO: 2241337 - RNA, 19 nt, Artificial Sequence
  Description of Artificial Sequence: Synthetic oligonucleotide
  Antisense strand to SEQ ID NO: 2241336
ugggcuagagagaauacag

SEQ ID NO: 2241338 - RNA, 19 nt, Artificial Sequence
  Description of Artificial Sequence: Synthetic oligonucleotide
  Sense strand starting at position 1307 of SEQ ID NO: 1884116
agcccaggucaagauugau

SEQ ID NO: 2241339 - RNA, 19 nt, Artificial Sequence
  Description of Artificial Sequence: Synthetic oligonucleotide
  Antisense strand to SEQ ID NO: 2241338
aucaaucuugaccugggcu

SEQ ID NO: 2241340 - RNA, 19 nt, Artificial Sequence
  Description of Artificial Sequence: Synthetic oligonucleotide
  Sense strand starting at position 1520 of SEQ ID NO: 1884116
agcauuaugcaagagacuu

SEQ ID NO: 2241341 - RNA, 19 nt, Artificial Sequence
  Description of Artificial Sequence: Synthetic oligonucleotide
  Antisense strand to SEQ ID NO: 2241340
aagucucuugcauaaugcu

SEQ ID NO: 2241342 - RNA, 19 nt, Artificial Sequence
  Description of Artificial Sequence: Synthetic oligonucleotide
  Sense strand starting at position 1621 of SEQ ID NO: 1884116
caaguacugcuuuaaagga

SEQ ID NO: 2241343 - RNA, 19 nt, Artificial Sequence
  Description of Artificial Sequence: Synthetic oligonucleotide
  Antisense strand to SEQ ID NO: 2241342
uccuuuaaagcaguacuug

SEQ ID NO: 2241344 - RNA, 19 nt, Artificial Sequence
  Description of Artificial Sequence: Synthetic oligonucleotide
  Sense strand starting at position 1629 of SEQ ID NO: 1884116
gcuuuaaaggacugucacu

SEQ ID NO: 2241345 - RNA, 19 nt, Artificial Sequence
  Description of Artificial Sequence: Synthetic oligonucleotide
  Antisense strand to SEQ ID NO: 2241344
agugacaguccuuuaaagc

SEQ ID NO: 2241346 - RNA, 19 nt, Artificial Sequence
  Description of Artificial Sequence: Synthetic oligonucleotide
  Sense strand starting at position 1699 of SEQ ID NO: 1884116
cagugaugucaccaggcca

SEQ ID NO: 2241347 - RNA, 19 nt, Artificial Sequence
  Description of Artificial Sequence: Synthetic oligonucleotide
  Antisense strand to SEQ ID NO: 2241346
uggccuggugacaucacug

SEQ ID NO: 2241348 - RNA, 19 nt, Artificial Sequence
  Description of Artificial Sequence: Synthetic oligonucleotide
  Sense strand starting at position 1853 of SEQ ID NO: 1884116
cuaucuaugccagguacua

SEQ ID NO: 2241349 - RNA, 19 nt, Artificial Sequence
  Description of Artificial Sequence: Synthetic oligonucleotide
  Antisense strand to SEQ ID NO: 2241348
uaguaccuggcauagauag

SEQ ID NO: 2241350 - RNA, 19 nt, Artificial Sequence
  Description of Artificial Sequence: Synthetic oligonucleotide
  Sense strand starting at position 1985 of SEQ ID NO: 1884116
gcaggaccggccugaauaa

SEQ ID NO: 2241351 - RNA, 19 nt, Artificial Sequence
  Description of Artificial Sequence: Synthetic oligonucleotide
  Antisense strand to SEQ ID NO: 2241350
uuauucaggccgguccugc

SEQ ID NO: 2241352 - RNA, 19 nt, Artificial Sequence
  Description of Artificial Sequence: Synthetic oligonucleotide
  Sense strand starting at position 2006 of SEQ ID NO: 1884116
auccuaacgccagaucaaa

SEQ ID NO: 2241353 - RNA, 19 nt, Artificial Sequence
  Description of Artificial Sequence: Synthetic oligonucleotide
  Antisense strand to SEQ ID NO: 2241352
uuugaucuggcguuaggau

SEQ ID NO: 2241354 - RNA, 19 nt, Artificial Sequence
  Description of Artificial Sequence: Synthetic oligonucleotide
  Sense strand starting at position 2694 of SEQ ID NO: 1884116
caagcaucgggaugagaag

SEQ ID NO: 2241355 - RNA, 19 nt, Artificial Sequence
  Description of Artificial Sequence: Synthetic oligonucleotide
  Antisense strand to SEQ ID NO: 2241354
cuucucaucccgaugcuug

SEQ ID NO: 2241356 - RNA, 19 nt, Artificial Sequence
  Description of Artificial Sequence: Synthetic oligonucleotide
  Sense strand starting at position 2713 of SEQ ID NO: 1884116
caagcaucaggaugagagu

SEQ ID NO: 2241357 - RNA, 19 nt, Artificial Sequence
  Description of Artificial Sequence: Synthetic oligonucleotide
  Antisense strand to SEQ ID NO: 2241356
acucucauccugaugcuug

SEQ ID NO: 2241358 - RNA, 19 nt, Artificial Sequence
  Description of Artificial Sequence: Synthetic oligonucleotide
  Sense strand starting at position 2967 of SEQ ID NO: 1884116
ucaagaaacccucaggugu

SEQ ID NO: 2241359 - RNA, 19 nt, Artificial Sequence
  Description of Artificial Sequence: Synthetic oligonucleotide
  Antisense strand to SEQ ID NO: 2241358
acaccugaggguuucuuga

SEQ ID NO: 2241360 - RNA, 19 nt, Artificial Sequence
  Description of Artificial Sequence: Synthetic oligonucleotide
  Sense strand starting at position 2997 of SEQ ID NO: 1884116
aggagaagaugugaagauu

SEQ ID NO: 2241361 - RNA, 19 nt, Artificial Sequence
  Description of Artificial Sequence: Synthetic oligonucleotide
  Antisense strand to SEQ ID NO: 2241360
aaucuucacaucuucuccu

SEQ ID NO: 2241362 - RNA, 19 nt, Artificial Sequence
  Description of Artificial Sequence: Synthetic oligonucleotide
  Sense strand starting at position 3184 of SEQ ID NO: 1884116
ucagguauaccuugcuuaa

SEQ ID NO: 2241363 - RNA, 19 nt, Artificial Sequence
  Description of Artificial Sequence: Synthetic oligonucleotide
  Antisense strand to SEQ ID NO: 2241362
uuaagcaagguauaccuga

SEQ ID NO: 2241364 - RNA, 19 nt, Artificial Sequence
  Description of Artificial Sequence: Synthetic oligonucleotide
  Sense strand starting at position 3638 of SEQ ID NO: 1884116
cucuguagcuguuuaagga

SEQ ID NO: 2241365 - RNA, 19 nt, Artificial Sequence
  Description of Artificial Sequence: Synthetic oligonucleotide
  Antisense strand to SEQ ID NO: 2241364
uccuuaaacagcuacagag

SEQ ID NO: 2241366 - RNA, 19 nt, Artificial Sequence
  Description of Artificial Sequence: Synthetic oligonucleotide
  Sense strand starting at position 3724 of SEQ ID NO: 1884116
ggaguugagagcuacaguc

SEQ ID NO: 2241367 - RNA, 19 nt, Artificial Sequence
  Description of Artificial Sequence: Synthetic oligonucleotide
  Antisense strand to SEQ ID NO: 2241366
gacuguagcucucaacucc

SEQ ID NO: 2241368 - RNA, 19 nt, Artificial Sequence
  Description of Artificial Sequence: Synthetic oligonucleotide
  Sense strand starting at position 3812 of SEQ ID NO: 1884116
cccucaccgguauaaguaa

SEQ ID NO: 2241369 - RNA, 19 nt, Artificial Sequence
  Description of Artificial Sequence: Synthetic oligonucleotide
  Antisense strand to SEQ ID NO: 2241368
uuacuuauaccggugaggg

SEQ ID NO: 2241370 - RNA, 19 nt, Artificial Sequence
  Description of Artificial Sequence: Synthetic oligonucleotide
  Sense strand starting at position 108 of SEQ ID NO: 1884117
ggcguuuggauuugacaca

SEQ ID NO: 2241371 - RNA, 19 nt, Artificial Sequence
  Description of Artificial Sequence: Synthetic oligonucleotide
  Antisense strand to SEQ ID NO: 2241370
ugugucaaauccaaacgcc

SEQ ID NO: 2241372 - RNA, 19 nt, Artificial Sequence
  Description of Artificial Sequence: Synthetic oligonucleotide
  Sense strand starting at position 167 of SEQ ID NO: 1884117
ugcugagaaccugacugua

SEQ ID NO: 2241373 - RNA, 19 nt, Artificial Sequence
  Description of Artificial Sequence: Synthetic oligonucleotide
  Antisense strand to SEQ ID NO: 2241372
uacagucagguucucagca

SEQ ID NO: 2241374 - RNA, 19 nt, Artificial Sequence
  Description of Artificial Sequence: Synthetic oligonucleotide
  Sense strand starting at position 257 of SEQ ID NO: 1884117
uguuuagcuccuuaaacag

SEQ ID NO: 2241375 - RNA, 19 nt, Artificial Sequence
  Description of Artificial Sequence: Synthetic oligonucleotide
  Antisense strand to SEQ ID NO: 2241374
cuguuuaaggagcuaaaca

SEQ ID NO: 2241376 - RNA, 19 nt, Artificial Sequence
  Description of Artificial Sequence: Synthetic oligonucleotide
  Sense strand starting at position 938 of SEQ ID NO: 1884117
accugaggguuucuugacu

SEQ ID NO: 2241377 - RNA, 19 nt, Artificial Sequence
  Description of Artificial Sequence: Synthetic oligonucleotide
  Antisense strand to SEQ ID NO: 2241376
agucaagaaacccucaggu

SEQ ID NO: 2241378 - RNA, 19 nt, Artificial Sequence
  Description of Artificial Sequence: Synthetic oligonucleotide
  Sense strand starting at position 1015 of SEQ ID NO: 1884117
gcgcuuugaggguugucua

SEQ ID NO: 2241379 - RNA, 19 nt, Artificial Sequence
  Description of Artificial Sequence: Synthetic oligonucleotide
  Antisense strand to SEQ ID NO: 2241378
uagacaacccucaaagcgc

SEQ ID NO: 2241380 - RNA, 19 nt, Artificial Sequence
  Description of Artificial Sequence: Synthetic oligonucleotide
  Sense strand starting at position 1018 of SEQ ID NO: 1884117
cuuugaggguugucuaaug

SEQ ID NO: 2241381 - RNA, 19 nt, Artificial Sequence
  Description of Artificial Sequence: Synthetic oligonucleotide
  Antisense strand to SEQ ID NO: 2241380
cauuagacaacccucaaag

SEQ ID NO: 2241382 - RNA, 19 nt, Artificial Sequence
  Description of Artificial Sequence: Synthetic oligonucleotide
  Sense strand starting at position 1036 of SEQ ID NO: 1884117
guugaaaugcucuacugaa

SEQ ID NO: 2241383 - RNA, 19 nt, Artificial Sequence
  Description of Artificial Sequence: Synthetic oligonucleotide
  Antisense strand to SEQ ID NO: 2241382
uucaguagagcauuucaac

SEQ ID NO: 2241384 - RNA, 19 nt, Artificial Sequence
  Description of Artificial Sequence: Synthetic oligonucleotide
  Sense strand starting at position 1068 of SEQ ID NO: 1884117
ugaggucccuccuuagauu

SEQ ID NO: 2241385 - RNA, 19 nt, Artificial Sequence
  Description of Artificial Sequence: Synthetic oligonucleotide
  Antisense strand to SEQ ID NO: 2241384
aaucuaaggagggaccuca

SEQ ID NO: 2241386 - RNA, 19 nt, Artificial Sequence
  Description of Artificial Sequence: Synthetic oligonucleotide
  Sense strand starting at position 1069 of SEQ ID NO: 1884117
gaggucccuccuuagauua

SEQ ID NO: 2241387 - RNA, 19 nt, Artificial Sequence
  Description of Artificial Sequence: Synthetic oligonucleotide
  Antisense strand to SEQ ID NO: 2241386
uaaucuaaggagggaccuc

SEQ ID NO: 2241388 - RNA, 19 nt, Artificial Sequence
  Description of Artificial Sequence: Synthetic oligonucleotide
  Sense strand starting at position 1670 of SEQ ID NO: 1884117
caggaacaguccucgaguu

SEQ ID NO: 2241389 - RNA, 19 nt, Artificial Sequence
  Description of Artificial Sequence: Synthetic oligonucleotide
  Antisense strand to SEQ ID NO: 2241388
aacucgaggacuguuccug

SEQ ID NO: 2241390 - RNA, 19 nt, Artificial Sequence
  Description of Artificial Sequence: Synthetic oligonucleotide
  Sense strand starting at position 1676 of SEQ ID NO: 1884117
caguccucgaguuggauuu

SEQ ID NO: 2241391 - RNA, 19 nt, Artificial Sequence
  Description of Artificial Sequence: Synthetic oligonucleotide
  Antisense strand to SEQ ID NO: 2241390
aaauccaacucgaggacug

SEQ ID NO: 2241392 - RNA, 19 nt, Artificial Sequence
  Description of Artificial Sequence: Synthetic oligonucleotide
  Sense strand starting at position 1904 of SEQ ID NO: 1884117
uggcguuaggaucauuauu

SEQ ID NO: 2241393 - RNA, 19 nt, Artificial Sequence
  Description of Artificial Sequence: Synthetic oligonucleotide
  Antisense strand to SEQ ID NO: 2241392
aauaaugauccuaacgcca

SEQ ID NO: 2241394 - RNA, 19 nt, Artificial Sequence
  Description of Artificial Sequence: Synthetic oligonucleotide
  Sense strand starting at position 2032 of SEQ ID NO: 1884117
uugaaugaguaucuaguau

SEQ ID NO: 2241395 - RNA, 19 nt, Artificial Sequence
  Description of Artificial Sequence: Synthetic oligonucleotide
  Antisense strand to SEQ ID NO: 2241394
auacuagauacucauucaa

SEQ ID NO: 2241396 - RNA, 19 nt, Artificial Sequence
  Description of Artificial Sequence: Synthetic oligonucleotide
  Sense strand starting at position 2149 of SEQ ID NO: 1884117
gcugaaagguuauuaugac

SEQ ID NO: 2241397 - RNA, 19 nt, Artificial Sequence
  Description of Artificial Sequence: Synthetic oligonucleotide
  Antisense strand to SEQ ID NO: 2241396
gucauaauaaccuuucagc

SEQ ID NO: 2241398 - RNA, 19 nt, Artificial Sequence
  Description of Artificial Sequence: Synthetic oligonucleotide
  Sense strand starting at position 2273 of SEQ ID NO: 1884117
gagugacaguccuuuaaag

SEQ ID NO: 2241399 - RNA, 19 nt, Artificial Sequence
  Description of Artificial Sequence: Synthetic oligonucleotide
  Antisense strand to SEQ ID NO: 2241398
cuuuaaaggacugucacuc

SEQ ID NO: 2241400 - RNA, 19 nt, Artificial Sequence
  Description of Artificial Sequence: Synthetic oligonucleotide
  Sense strand starting at position 2275 of SEQ ID NO: 1884117
gugacaguccuuuaaagca

SEQ ID NO: 2241401 - RNA, 19 nt, Artificial Sequence
  Description of Artificial Sequence: Synthetic oligonucleotide
  Antisense strand to SEQ ID NO: 2241400
ugcuuuaaaggacugucac

SEQ ID NO: 2241402 - RNA, 19 nt, Artificial Sequence
  Description of Artificial Sequence: Synthetic oligonucleotide
  Sense strand starting at position 2283 of SEQ ID NO: 1884117
ccuuuaaagcaguacuuga

SEQ ID NO: 2241403 - RNA, 19 nt, Artificial Sequence
  Description of Artificial Sequence: Synthetic oligonucleotide
  Antisense strand to SEQ ID NO: 2241402
ucaaguacugcuuuaaagg

SEQ ID NO: 2241404 - RNA, 19 nt, Artificial Sequence
  Description of Artificial Sequence: Synthetic oligonucleotide
  Sense strand starting at position 2293 of SEQ ID NO: 1884117
aguacuugacagcaguuua

SEQ ID NO: 2241405 - RNA, 19 nt, Artificial Sequence
  Description of Artificial Sequence: Synthetic oligonucleotide
  Antisense strand to SEQ ID NO: 2241404
uaaacugcugucaaguacu

SEQ ID NO: 2241406 - RNA, 19 nt, Artificial Sequence
  Description of Artificial Sequence: Synthetic oligonucleotide
  Sense strand starting at position 2498 of SEQ ID NO: 1884117
uuggaaaugcauugaucuc

SEQ ID NO: 2241407 - RNA, 19 nt, Artificial Sequence
  Description of Artificial Sequence: Synthetic oligonucleotide
  Antisense strand to SEQ ID NO: 2241406
gagaucaaugcauuuccaa

SEQ ID NO: 2241408 - RNA, 19 nt, Artificial Sequence
  Description of Artificial Sequence: Synthetic oligonucleotide
  Sense strand starting at position 2550 of SEQ ID NO: 1884117
agaacaaugcccuguguga

SEQ ID NO: 2241409 - RNA, 19 nt, Artificial Sequence
  Description of Artificial Sequence: Synthetic oligonucleotide
  Antisense strand to SEQ ID NO: 2241408
ucacacagggcauuguucu

SEQ ID NO: 2241410 - RNA, 19 nt, Artificial Sequence
  Description of Artificial Sequence: Synthetic oligonucleotide
  Sense strand starting at position 2599 of SEQ ID NO: 1884117
aaucuugaccugggcuaga

SEQ ID NO: 2241411 - RNA, 19 nt, Artificial Sequence
  Description of Artificial Sequence: Synthetic oligonucleotide
  Antisense strand to SEQ ID NO: 2241410
ucuagcccaggucaagauu

SEQ ID NO: 2241412 - RNA, 19 nt, Artificial Sequence
  Description of Artificial Sequence: Synthetic oligonucleotide
  Sense strand starting at position 2978 of SEQ ID NO: 1884117
ucaggauuauugcuguaca

SEQ ID NO: 2241413 - RNA, 19 nt, Artificial Sequence
  Description of Artificial Sequence: Synthetic oligonucleotide
  Antisense strand to SEQ ID NO: 2241412
uguacagcaauaauccuga

SEQ ID NO: 2241414 - RNA, 19 nt, Artificial Sequence
  Description of Artificial Sequence: Synthetic oligonucleotide
  Sense strand starting at position 3017 of SEQ ID NO: 1884117
gugggccuugucuauaaau

SEQ ID NO: 2241415 - RNA, 19 nt, Artificial Sequence
  Description of Artificial Sequence: Synthetic oligonucleotide
  Antisense strand to SEQ ID NO: 2241414
auuuauagacaaggcccac

SEQ ID NO: 2241416 - RNA, 19 nt, Artificial Sequence
  Description of Artificial Sequence: Synthetic oligonucleotide
  Sense strand starting at position 3019 of SEQ ID NO: 1884117
gggccuugucuauaaauau

SEQ ID NO: 2241417 - RNA, 19 nt, Artificial Sequence
  Description of Artificial Sequence: Synthetic oligonucleotide
  Antisense strand to SEQ ID NO: 2241416
auauuuauagacaaggccc

SEQ ID NO: 2241418 - RNA, 19 nt, Artificial Sequence
  Description of Artificial Sequence: Synthetic oligonucleotide
  Sense strand starting at position 3048 of SEQ ID NO: 1884117
uaauaaggguuuguguuua

SEQ ID NO: 2241419 - RNA, 19 nt, Artificial Sequence
  Description of Artificial Sequence: Synthetic oligonucleotide
  Antisense strand to SEQ ID NO: 2241418
uaaacacaaacccuuauua

SEQ ID NO: 2241420 - RNA, 19 nt, Artificial Sequence
  Description of Artificial Sequence: Synthetic oligonucleotide
  Sense strand starting at position 3052 of SEQ ID NO: 1884117
aaggguuuguguuuauaaa

SEQ ID NO: 2241421 - RNA, 19 nt, Artificial Sequence
  Description of Artificial Sequence: Synthetic oligonucleotide
  Antisense strand to SEQ ID NO: 2241420
uuuauaaacacaaacccuu

SEQ ID NO: 2241422 - RNA, 19 nt, Artificial Sequence
  Description of Artificial Sequence: Synthetic oligonucleotide
  Sense strand starting at position 3053 of SEQ ID NO: 1884117
aggguuuguguuuauaaag

SEQ ID NO: 2241423 - RNA, 19 nt, Artificial Sequence
  Description of Artificial Sequence: Synthetic oligonucleotide
  Antisense strand to SEQ ID NO: 2241422
cuuuauaaacacaaacccu

SEQ ID NO: 2241424 - RNA, 19 nt, Artificial Sequence
  Description of Artificial Sequence: Synthetic oligonucleotide
  Sense strand starting at position 3074 of SEQ ID NO: 1884117
cuuugaagcccucagauaa

SEQ ID NO: 2241425 - RNA, 19 nt, Artificial Sequence
  Description of Artificial Sequence: Synthetic oligonucleotide
  Antisense strand to SEQ ID NO: 2241424
uuaucugagggcuucaaag

SEQ ID NO: 2241426 - RNA, 19 nt, Artificial Sequence
  Description of Artificial Sequence: Synthetic oligonucleotide
  Sense strand starting at position 3130 of SEQ ID NO: 1884117
aggagucacugccuaaagu

SEQ ID NO: 2241427 - RNA, 19 nt, Artificial Sequence
  Description of Artificial Sequence: Synthetic oligonucleotide
  Antisense strand to SEQ ID NO: 2241426
acuuuaggcagugacuccu

SEQ ID NO: 2241428 - RNA, 19 nt, Artificial Sequence
  Description of Artificial Sequence: Synthetic oligonucleotide
  Sense strand starting at position 3172 of SEQ ID NO: 1884117
agagaaauugccuguagga

SEQ ID NO: 2241429 - RNA, 19 nt, Artificial Sequence
  Description of Artificial Sequence: Synthetic oligonucleotide
  Antisense strand to SEQ ID NO: 2241428
uccuacaggcaauuucucu

SEQ ID NO: 2241430 - RNA, 19 nt, Artificial Sequence
  Description of Artificial Sequence: Synthetic oligonucleotide
  Sense strand starting at position 3211 of SEQ ID NO: 1884117
caagcauuccuugguggaa

SEQ ID NO: 2241431 - RNA, 19 nt, Artificial Sequence
  Description of Artificial Sequence: Synthetic oligonucleotide
  Antisense strand to SEQ ID NO: 2241430
uuccaccaaggaaugcuug

SEQ ID NO: 2241432 - RNA, 19 nt, Artificial Sequence
  Description of Artificial Sequence: Synthetic oligonucleotide
  Sense strand starting at position 3332 of SEQ ID NO: 1884117
gaggucacugucgaauaca

SEQ ID NO: 2241433 - RNA, 19 nt, Artificial Sequence
  Description of Artificial Sequence: Synthetic oligonucleotide
  Antisense strand to SEQ ID NO: 2241432
uguauucgacagugaccuc

SEQ ID NO: 2241434 - RNA, 19 nt, Artificial Sequence
  Description of Artificial Sequence: Synthetic oligonucleotide
  Sense strand starting at position 3335 of SEQ ID NO: 1884117
gucacugucgaauacagau

SEQ ID NO: 2241435 - RNA, 19 nt, Artificial Sequence
  Description of Artificial Sequence: Synthetic oligonucleotide
  Antisense strand to SEQ ID NO: 2241434
aucuguauucgacagugac

SEQ ID NO: 2241436 - RNA, 19 nt, Artificial Sequence
  Description of Artificial Sequence: Synthetic oligonucleotide
  Sense strand starting at position 3365 of SEQ ID NO: 1884117
augugauuaccagggagug

SEQ ID NO: 2241437 - RNA, 19 nt, Artificial Sequence
  Description of Artificial Sequence: Synthetic oligonucleotide
  Antisense strand to SEQ ID NO: 2241436
cacucccugguaaucacau

SEQ ID NO: 2241438 - RNA, 19 nt, Artificial Sequence
  Description of Artificial Sequence: Synthetic oligonucleotide
  Sense strand starting at position 3366 of SEQ ID NO: 1884117
ugugauuaccagggaguga

SEQ ID NO: 2241439 - RNA, 19 nt, Artificial Sequence
  Description of Artificial Sequence: Synthetic oligonucleotide
  Antisense strand to SEQ ID NO: 2241438
ucacucccugguaaucaca

SEQ ID NO: 2241440 - RNA, 19 nt, Artificial Sequence
  Description of Artificial Sequence: Synthetic oligonucleotide
  Sense strand starting at position 3604 of SEQ ID NO: 1884117
aggguuggauucccauaga

SEQ ID NO: 2241441 - RNA, 19 nt, Artificial Sequence
  Description of Artificial Sequence: Synthetic oligonucleotide
  Antisense strand to SEQ ID NO: 2241440
ucuaugggaauccaacccu

SEQ ID NO: 2241442 - RNA, 19 nt, Artificial Sequence
  Description of Artificial Sequence: Synthetic oligonucleotide
  Sense strand starting at position 3756 of SEQ ID NO: 1884117
cagaucguucccgaaccua

SEQ ID NO: 2241443 - RNA, 19 nt, Artificial Sequence
  Description of Artificial Sequence: Synthetic oligonucleotide
  Antisense strand to SEQ ID NO: 2241442
uagguucgggaacgaucug

SEQ ID NO: 2241444 - RNA, 19 nt, Artificial Sequence
  Description of Artificial Sequence: Synthetic oligonucleotide
  Sense strand starting at position 3834 of SEQ ID NO: 1884117
uauagaacucaauggguau

SEQ ID NO: 2241445 - RNA, 19 nt, Artificial Sequence
  Description of Artificial Sequence: Synthetic oligonucleotide
  Antisense strand to SEQ ID NO: 2241444
auacccauugaguucuaua

SEQ ID NO: 2241446 - RNA, 19 nt, Artificial Sequence
  Description of Artificial Sequence: Synthetic oligonucleotide
  Sense strand starting at position 3841 of SEQ ID NO: 1884117
cucaauggguauuccuuua

SEQ ID NO: 2241447 - RNA, 19 nt, Artificial Sequence
  Description of Artificial Sequence: Synthetic oligonucleotide
  Antisense strand to SEQ ID NO: 2241446
uaaaggaauacccauugag

SEQ ID NO: 2241448 - RNA, 19 nt, Artificial Sequence
  Description of Artificial Sequence: Synthetic oligonucleotide
  Sense strand starting at position 3846 of SEQ ID NO: 1884117
uggguauuccuuuauuauu

SEQ ID NO: 2241449 - RNA, 19 nt, Artificial Sequence
  Description of Artificial Sequence: Synthetic oligonucleotide
  Antisense strand to SEQ ID NO: 2241448
aauaauaaaggaauaccca

SEQ ID NO: 2241450 - RNA, 19 nt, Artificial Sequence
  Description of Artificial Sequence: Synthetic oligonucleotide
  Sense strand starting at position 12 of SEQ ID NO: 1884118
cugcguuguccacacaacu

SEQ ID NO: 2241451 - RNA, 19 nt, Artificial Sequence
  Description of Artificial Sequence: Synthetic oligonucleotide
  Antisense strand to SEQ ID NO: 2241450
aguuguguggacaacgcag

SEQ ID NO: 2241452 - RNA, 19 nt, Artificial Sequence
  Description of Artificial Sequence: Synthetic oligonucleotide
  Sense strand starting at position 211 of SEQ ID NO: 1884118
gucaauuuauucuggagaa

SEQ ID NO: 2241453 - RNA, 19 nt, Artificial Sequence
  Description of Artificial Sequence: Synthetic oligonucleotide
  Antisense strand to SEQ ID NO: 2241452
uucuccagaauaaauugac

SEQ ID NO: 2241454 - RNA, 19 nt, Artificial Sequence
  Description of Artificial Sequence: Synthetic oligonucleotide
  Sense strand starting at position 212 of SEQ ID NO: 1884118
ucaauuuauucuggagaaa

SEQ ID NO: 2241455 - RNA, 19 nt, Artificial Sequence
  Description of Artificial Sequence: Synthetic oligonucleotide
  Antisense strand to SEQ ID NO: 2241454
uuucuccagaauaaauuga

SEQ ID NO: 2241456 - RNA, 19 nt, Artificial Sequence
  Description of Artificial Sequence: Synthetic oligonucleotide
  Sense strand starting at position 229 of SEQ ID NO: 1884118
aaacaucuuuguucugcga

SEQ ID NO: 2241457 - RNA, 19 nt, Artificial Sequence
  Description of Artificial Sequence: Synthetic oligonucleotide
  Antisense strand to SEQ ID NO: 2241456
ucgcagaacaaagauguuu

SEQ ID NO: 2241458 - RNA, 19 nt, Artificial Sequence
  Description of Artificial Sequence: Synthetic oligonucleotide
  Sense strand starting at position 233 of SEQ ID NO: 1884118
aucuuuguucugcgaguga

SEQ ID NO: 2241459 - RNA, 19 nt, Artificial Sequence
  Description of Artificial Sequence: Synthetic oligonucleotide
  Antisense strand to SEQ ID NO: 2241458
ucacucgcagaacaaagau

SEQ ID NO: 2241460 - RNA, 19 nt, Artificial Sequence
  Description of Artificial Sequence: Synthetic oligonucleotide
  Sense strand starting at position 254 of SEQ ID NO: 1884118
gggagccauuuccaacaau

SEQ ID NO: 2241461 - RNA, 19 nt, Artificial Sequence
  Description of Artificial Sequence: Synthetic oligonucleotide
  Antisense strand to SEQ ID NO: 2241460
auuguuggaaauggcuccc

SEQ ID NO: 2241462 - RNA, 19 nt, Artificial Sequence
  Description of Artificial Sequence: Synthetic oligonucleotide
  Sense strand starting at position 316 of SEQ ID NO: 1884118
aggcuuguucuucgaggca

SEQ ID NO: 2241463 - RNA, 19 nt, Artificial Sequence
  Description of Artificial Sequence: Synthetic oligonucleotide
  Antisense strand to SEQ ID NO: 2241462
ugccucgaagaacaagccu

SEQ ID NO: 2241464 - RNA, 19 nt, Artificial Sequence
  Description of Artificial Sequence: Synthetic oligonucleotide
  Sense strand starting at position 445 of SEQ ID NO: 1884118
aaauaaauuuggugguuag

SEQ ID NO: 2241465 - RNA, 19 nt, Artificial Sequence
  Description of Artificial Sequence: Synthetic oligonucleotide
  Antisense strand to SEQ ID NO: 2241464
cuaaccaccaaauuuauuu

SEQ ID NO: 2241466 - RNA, 19 nt, Artificial Sequence
  Description of Artificial Sequence: Synthetic oligonucleotide
  Sense strand starting at position 519 of SEQ ID NO: 1884118
caacguugccauuguaaac

SEQ ID NO: 2241467 - RNA, 19 nt, Artificial Sequence
  Description of Artificial Sequence: Synthetic oligonucleotide
  Antisense strand to SEQ ID NO: 2241466
guuuacaauggcaacguug

SEQ ID NO: 2241468 - RNA, 19 nt, Artificial Sequence
  Description of Artificial Sequence: Synthetic oligonucleotide
  Sense strand starting at position 606 of SEQ ID NO: 1884118
ucucccagcucgucagaau

SEQ ID NO: 2241469 - RNA, 19 nt, Artificial Sequence
  Description of Artificial Sequence: Synthetic oligonucleotide
  Antisense strand to SEQ ID NO: 2241468
auucugacgagcugggaga

SEQ ID NO: 2241470 - RNA, 19 nt, Artificial Sequence
  Description of Artificial Sequence: Synthetic oligonucleotide
  Sense strand starting at position 815 of SEQ ID NO: 1884118
ucacuaguugugggaccuu

SEQ ID NO: 2241471 - RNA, 19 nt, Artificial Sequence
  Description of Artificial Sequence: Synthetic oligonucleotide
  Antisense strand to SEQ ID NO: 2241470
aaggucccacaacuaguga

SEQ ID NO: 2241472 - RNA, 19 nt, Artificial Sequence
  Description of Artificial Sequence: Synthetic oligonucleotide
  Sense strand starting at position 884 of SEQ ID NO: 1884118
gguugugagaauugaguca

SEQ ID NO: 2241473 - RNA, 19 nt, Artificial Sequence
  Description of Artificial Sequence: Synthetic oligonucleotide
  Antisense strand to SEQ ID NO: 2241472
ugacucaauucucacaacc

SEQ ID NO: 2241474 - RNA, 19 nt, Artificial Sequence
  Description of Artificial Sequence: Synthetic oligonucleotide
  Sense strand starting at position 940 of SEQ ID NO: 1884118
ucaagugcucaauaagagu

SEQ ID NO: 2241475 - RNA, 19 nt, Artificial Sequence
  Description of Artificial Sequence: Synthetic oligonucleotide
  Antisense strand to SEQ ID NO: 2241474
acucuuauugagcacuuga

SEQ ID NO: 2241476 - RNA, 19 nt, Artificial Sequence
  Description of Artificial Sequence: Synthetic oligonucleotide
  Sense strand starting at position 988 of SEQ ID NO: 1884118
aggacaauuguuuauguuu

SEQ ID NO: 2241477 - RNA, 19 nt, Artificial Sequence
  Description of Artificial Sequence: Synthetic oligonucleotide
  Antisense strand to SEQ ID NO: 2241476
aaacauaaacaauuguccu

SEQ ID NO: 2241478 - RNA, 19 nt, Artificial Sequence
  Description of Artificial Sequence: Synthetic oligonucleotide
  Sense strand starting at position 993 of SEQ ID NO: 1884118
aauuguuuauguuuggaag

SEQ ID NO: 2241479 - RNA, 19 nt, Artificial Sequence
  Description of Artificial Sequence: Synthetic oligonucleotide
  Antisense strand to SEQ ID NO: 2241478
cuuccaaacauaaacaauu

SEQ ID NO: 2241480 - RNA, 19 nt, Artificial Sequence
  Description of Artificial Sequence: Synthetic oligonucleotide
  Sense strand starting at position 1007 of SEQ ID NO: 1884118
ggaaguaggcuuuggagau

SEQ ID NO: 2241481 - RNA, 19 nt, Artificial Sequence
  Description of Artificial Sequence: Synthetic oligonucleotide
  Antisense strand to SEQ ID NO: 2241480
aucuccaaagccuacuucc

SEQ ID NO: 2241482 - RNA, 19 nt, Artificial Sequence
  Description of Artificial Sequence: Synthetic oligonucleotide
  Sense strand starting at position 1008 of SEQ ID NO: 1884118
gaaguaggcuuuggagaug

SEQ ID NO: 2241483 - RNA, 19 nt, Artificial Sequence
  Description of Artificial Sequence: Synthetic oligonucleotide
  Antisense strand to SEQ ID NO: 2241482
caucuccaaagccuacuuc

SEQ ID NO: 2241484 - RNA, 19 nt, Artificial Sequence
  Description of Artificial Sequence: Synthetic oligonucleotide
  Sense strand starting at position 1180 of SEQ ID NO: 1884118
gggacuuguccaggagccu

SEQ ID NO: 2241485 - RNA, 19 nt, Artificial Sequence
  Description of Artificial Sequence: Synthetic oligonucleotide
  Antisense strand to SEQ ID NO: 2241484
aggcuccuggacaaguccc

SEQ ID NO: 2241486 - RNA, 19 nt, Artificial Sequence
  Description of Artificial Sequence: Synthetic oligonucleotide
  Sense strand starting at position 1189 of SEQ ID NO: 1884118
ccaggagccucugcaaguu

SEQ ID NO: 2241487 - RNA, 19 nt, Artificial Sequence
  Description of Artificial Sequence: Synthetic oligonucleotide
  Antisense strand to SEQ ID NO: 2241486
aacuugcagaggcuccugg

SEQ ID NO: 2241488 - RNA, 19 nt, Artificial Sequence
  Description of Artificial Sequence: Synthetic oligonucleotide
  Sense strand starting at position 1527 of SEQ ID NO: 1884118
uuccuuggcccggaaacuu

SEQ ID NO: 2241489 - RNA, 19 nt, Artificial Sequence
  Description of Artificial Sequence: Synthetic oligonucleotide
  Antisense strand to SEQ ID NO: 2241488
aaguuuccgggccaaggaa

SEQ ID NO: 2241490 - RNA, 19 nt, Artificial Sequence
  Description of Artificial Sequence: Synthetic oligonucleotide
  Sense strand starting at position 1537 of SEQ ID NO: 1884118
cggaaacuugcuggaacuu

SEQ ID NO: 2241491 - RNA, 19 nt, Artificial Sequence
  Description of Artificial Sequence: Synthetic oligonucleotide
  Antisense strand to SEQ ID NO: 2241490
aaguuccagcaaguuuccg

SEQ ID NO: 2241492 - RNA, 19 nt, Artificial Sequence
  Description of Artificial Sequence: Synthetic oligonucleotide
  Sense strand starting at position 1775 of SEQ ID NO: 1884118
agagcaagguuuccacaau

SEQ ID NO: 2241493 - RNA, 19 nt, Artificial Sequence
  Description of Artificial Sequence: Synthetic oligonucleotide
  Antisense strand to SEQ ID NO: 2241492
auuguggaaaccuugcucu

SEQ ID NO: 2241494 - RNA, 19 nt, Artificial Sequence
  Description of Artificial Sequence: Synthetic oligonucleotide
  Sense strand starting at position 1776 of SEQ ID NO: 1884118
gagcaagguuuccacaauc

SEQ ID NO: 2241495 - RNA, 19 nt, Artificial Sequence
  Description of Artificial Sequence: Synthetic oligonucleotide
  Antisense strand to SEQ ID NO: 2241494
gauuguggaaaccuugcuc

SEQ ID NO: 2241496 - RNA, 19 nt, Artificial Sequence
  Description of Artificial Sequence: Synthetic oligonucleotide
  Sense strand starting at position 1855 of SEQ ID NO: 1884118
gcgaaguggugagucugua

SEQ ID NO: 2241497 - RNA, 19 nt, Artificial Sequence
  Description of Artificial Sequence: Synthetic oligonucleotide
  Antisense strand to SEQ ID NO: 2241496
uacagacucaccacuucgc

SEQ ID NO: 2241498 - RNA, 19 nt, Artificial Sequence
  Description of Artificial Sequence: Synthetic oligonucleotide
  Sense strand starting at position 1859 of SEQ ID NO: 1884118
aguggugagucuguaacca

SEQ ID NO: 2241499 - RNA, 19 nt, Artificial Sequence
  Description of Artificial Sequence: Synthetic oligonucleotide
  Antisense strand to SEQ ID NO: 2241498
ugguuacagacucaccacu

SEQ ID NO: 2241500 - RNA, 19 nt, Artificial Sequence
  Description of Artificial Sequence: Synthetic oligonucleotide
  Sense strand starting at position 1863 of SEQ ID NO: 1884118
gugagucuguaaccagaga

SEQ ID NO: 2241501 - RNA, 19 nt, Artificial Sequence
  Description of Artificial Sequence: Synthetic oligonucleotide
  Antisense strand to SEQ ID NO: 2241500
ucucugguuacagacucac

SEQ ID NO: 2241502 - RNA, 19 nt, Artificial Sequence
  Description of Artificial Sequence: Synthetic oligonucleotide
  Sense strand starting at position 2136 of SEQ ID NO: 1884118
aggaaacucucugaacaua

SEQ ID NO: 2241503 - RNA, 19 nt, Artificial Sequence
  Description of Artificial Sequence: Synthetic oligonucleotide
  Antisense strand to SEQ ID NO: 2241502
uauguucagagaguuuccu

SEQ ID NO: 2241504 - RNA, 19 nt, Artificial Sequence
  Description of Artificial Sequence: Synthetic oligonucleotide
  Sense strand starting at position 2296 of SEQ ID NO: 1884118
ggcuacucauccuuucuga

SEQ ID NO: 2241505 - RNA, 19 nt, Artificial Sequence
  Description of Artificial Sequence: Synthetic oligonucleotide
  Antisense strand to SEQ ID NO: 2241504
ucagaaaggaugaguagcc

SEQ ID NO: 2241506 - RNA, 19 nt, Artificial Sequence
  Description of Artificial Sequence: Synthetic oligonucleotide
  Sense strand starting at position 2398 of SEQ ID NO: 1884118
caggcaugguuccauuaua

SEQ ID NO: 2241507 - RNA, 19 nt, Artificial Sequence
  Description of Artificial Sequence: Synthetic oligonucleotide
  Antisense strand to SEQ ID NO: 2241506
uauaauggaaccaugccug

SEQ ID NO: 2241508 - RNA, 19 nt, Artificial Sequence
  Description of Artificial Sequence: Synthetic oligonucleotide
  Sense strand starting at position 2529 of SEQ ID NO: 1884118
ugauccgaguucugaauuu

SEQ ID NO: 2241509 - RNA, 19 nt, Artificial Sequence
  Description of Artificial Sequence: Synthetic oligonucleotide
  Antisense strand to SEQ ID NO: 2241508
aaauucagaacucggauca

SEQ ID NO: 2241510 - RNA, 19 nt, Artificial Sequence
  Description of Artificial Sequence: Synthetic oligonucleotide
  Sense strand starting at position 2547 of SEQ ID NO: 1884118
ucagcagcauuugaucauu

SEQ ID NO: 2241511 - RNA, 19 nt, Artificial Sequence
  Description of Artificial Sequence: Synthetic oligonucleotide
  Antisense strand to SEQ ID NO: 2241510
aaugaucaaaugcugcuga

SEQ ID NO: 2241512 - RNA, 19 nt, Artificial Sequence
  Description of Artificial Sequence: Synthetic oligonucleotide
  Sense strand starting at position 2625 of SEQ ID NO: 1884118
aggacuuaauuagguauga

SEQ ID NO: 2241513 - RNA, 19 nt, Artificial Sequence
  Description of Artificial Sequence: Synthetic oligonucleotide
  Antisense strand to SEQ ID NO: 2241512
ucauaccuaauuaaguccu

SEQ ID NO: 2241514 - RNA, 19 nt, Artificial Sequence
  Description of Artificial Sequence: Synthetic oligonucleotide
  Sense strand starting at position 2892 of SEQ ID NO: 1884118
gcaaguucuguucagggau

SEQ ID NO: 2241515 - RNA, 19 nt, Artificial Sequence
  Description of Artificial Sequence: Synthetic oligonucleotide
  Antisense strand to SEQ ID NO: 2241514
aucccugaacagaacuugc

SEQ ID NO: 2241516 - RNA, 19 nt, Artificial Sequence
  Description of Artificial Sequence: Synthetic oligonucleotide
  Sense strand starting at position 2940 of SEQ ID NO: 1884118
ccugucauugcaggcaaga

SEQ ID NO: 2241517 - RNA, 19 nt, Artificial Sequence
  Description of Artificial Sequence: Synthetic oligonucleotide
  Antisense strand to SEQ ID NO: 2241516
ucuugccugcaaugacagg

SEQ ID NO: 2241518 - RNA, 19 nt, Artificial Sequence
  Description of Artificial Sequence: Synthetic oligonucleotide
  Sense strand starting at position 2994 of SEQ ID NO: 1884118
cugguuaggcaucaaacga

SEQ ID NO: 2241519 - RNA, 19 nt, Artificial Sequence
  Description of Artificial Sequence: Synthetic oligonucleotide
  Antisense strand to SEQ ID NO: 2241518
ucguuugaugccuaaccag

SEQ ID NO: 2241520 - RNA, 19 nt, Artificial Sequence
  Description of Artificial Sequence: Synthetic oligonucleotide
  Sense strand starting at position 3009 of SEQ ID NO: 1884118
acgaaucaaucuucucuga

SEQ ID NO: 2241521 - RNA, 19 nt, Artificial Sequence
  Description of Artificial Sequence: Synthetic oligonucleotide
  Antisense strand to SEQ ID NO: 2241520
ucagagaagauugauucgu

SEQ ID NO: 2241522 - RNA, 19 nt, Artificial Sequence
  Description of Artificial Sequence: Synthetic oligonucleotide
  Sense strand starting at position 3078 of SEQ ID NO: 1884118
cccugaggaucugcaaagu

SEQ ID NO: 2241523 - RNA, 19 nt, Artificial Sequence
  Description of Artificial Sequence: Synthetic oligonucleotide
  Antisense strand to SEQ ID NO: 2241522
acuuugcagauccucaggg

SEQ ID NO: 2241524 - RNA, 19 nt, Artificial Sequence
  Description of Artificial Sequence: Synthetic oligonucleotide
  Sense strand starting at position 3236 of SEQ ID NO: 1884118
gaggcucaggucuaaacuu

SEQ ID NO: 2241525 - RNA, 19 nt, Artificial Sequence
  Description of Artificial Sequence: Synthetic oligonucleotide
  Antisense strand to SEQ ID NO: 2241524
aaguuuagaccugagccuc

SEQ ID NO: 2241526 - RNA, 19 nt, Artificial Sequence
  Description of Artificial Sequence: Synthetic oligonucleotide
  Sense strand starting at position 3503 of SEQ ID NO: 1884118
ucagaaagcuccuccagca

SEQ ID NO: 2241527 - RNA, 19 nt, Artificial Sequence
  Description of Artificial Sequence: Synthetic oligonucleotide
  Antisense strand to SEQ ID NO: 2241526
ugcuggaggagcuuucuga

SEQ ID NO: 2241528 - RNA, 19 nt, Artificial Sequence
  Description of Artificial Sequence: Synthetic oligonucleotide
  Sense strand starting at position 3747 of SEQ ID NO: 1884118
augagaggauucuuuccca

SEQ ID NO: 2241529 - RNA, 19 nt, Artificial Sequence
  Description of Artificial Sequence: Synthetic oligonucleotide
  Antisense strand to SEQ ID NO: 2241528
ugggaaagaauccucucau

SEQ ID NO: 2241530 - RNA, 19 nt, Artificial Sequence
  Description of Artificial Sequence: Synthetic oligonucleotide
  Sense strand starting at position 196 of SEQ ID NO: 1884119
augauaugcugucugaaau

SEQ ID NO: 2241531 - RNA, 19 nt, Artificial Sequence
  Description of Artificial Sequence: Synthetic oligonucleotide
  Antisense strand to SEQ ID NO: 2241530
auuucagacagcauaucau

SEQ ID NO: 2241532 - RNA, 19 nt, Artificial Sequence
  Description of Artificial Sequence: Synthetic oligonucleotide
  Sense strand starting at position 197 of SEQ ID NO: 1884119
ugauaugcugucugaaauc

SEQ ID NO: 2241533 - RNA, 19 nt, Artificial Sequence
  Description of Artificial Sequence: Synthetic oligonucleotide
  Antisense strand to SEQ ID NO: 2241532
gauuucagacagcauauca

SEQ ID NO: 2241534 - RNA, 19 nt, Artificial Sequence
  Description of Artificial Sequence: Synthetic oligonucleotide
  Sense strand starting at position 231 of SEQ ID NO: 1884119
cagcuugcucaugaguuga

SEQ ID NO: 2241535 - RNA, 19 nt, Artificial Sequence
  Description of Artificial Sequence: Synthetic oligonucleotide
  Antisense strand to SEQ ID NO: 2241534
ucaacucaugagcaagcug

SEQ ID NO: 2241536 - RNA, 19 nt, Artificial Sequence
  Description of Artificial Sequence: Synthetic oligonucleotide
  Sense strand starting at position 236 of SEQ ID NO: 1884119
ugcucaugaguugauaacu

SEQ ID NO: 2241537 - RNA, 19 nt, Artificial Sequence
  Description of Artificial Sequence: Synthetic oligonucleotide
  Antisense strand to SEQ ID NO: 2241536
aguuaucaacucaugagca

SEQ ID NO: 2241538 - RNA, 19 nt, Artificial Sequence
  Description of Artificial Sequence: Synthetic oligonucleotide
  Sense strand starting at position 241 of SEQ ID NO: 1884119
augaguugauaacuguuaa

SEQ ID NO: 2241539 - RNA, 19 nt, Artificial Sequence
  Description of Artificial Sequence: Synthetic oligonucleotide
  Antisense strand to SEQ ID NO: 2241538
uuaacaguuaucaacucau

SEQ ID NO: 2241540 - RNA, 19 nt, Artificial Sequence
  Description of Artificial Sequence: Synthetic oligonucleotide
  Sense strand starting at position 242 of SEQ ID NO: 1884119
ugaguugauaacuguuaag

SEQ ID NO: 2241541 - RNA, 19 nt, Artificial Sequence
  Description of Artificial Sequence: Synthetic oligonucleotide
  Antisense strand to SEQ ID NO: 2241540
cuuaacaguuaucaacuca

SEQ ID NO: 2241542 - RNA, 19 nt, Artificial Sequence
  Description of Artificial Sequence: Synthetic oligonucleotide
  Sense strand starting at position 498 of SEQ ID NO: 1884119
augguacugucccuaaaug

SEQ ID NO: 2241543 - RNA, 19 nt, Artificial Sequence
  Description of Artificial Sequence: Synthetic oligonucleotide
  Antisense strand to SEQ ID NO: 2241542
cauuuagggacaguaccau

SEQ ID NO: 2241544 - RNA, 19 nt, Artificial Sequence
  Description of Artificial Sequence: Synthetic oligonucleotide
  Sense strand starting at position 499 of SEQ ID NO: 1884119
ugguacugucccuaaaugu

SEQ ID NO: 2241545 - RNA, 19 nt, Artificial Sequence
  Description of Artificial Sequence: Synthetic oligonucleotide
  Antisense strand to SEQ ID NO: 2241544
acauuuagggacaguacca

SEQ ID NO: 2241546 - RNA, 19 nt, Artificial Sequence
  Description of Artificial Sequence: Synthetic oligonucleotide
  Sense strand starting at position 521 of SEQ ID NO: 1884119
guguuaacauagccugaca

SEQ ID NO: 2241547 - RNA, 19 nt, Artificial Sequence
  Description of Artificial Sequence: Synthetic oligonucleotide
  Antisense strand to SEQ ID NO: 2241546
ugucaggcuauguuaacac

SEQ ID NO: 2241548 - RNA, 19 nt, Artificial Sequence
  Description of Artificial Sequence: Synthetic oligonucleotide
  Sense strand starting at position 523 of SEQ ID NO: 1884119
guuaacauagccugacaaa

SEQ ID NO: 2241549 - RNA, 19 nt, Artificial Sequence
  Description of Artificial Sequence: Synthetic oligonucleotide
  Antisense strand to SEQ ID NO: 2241548
uuugucaggcuauguuaac

SEQ ID NO: 2241550 - RNA, 19 nt, Artificial Sequence
  Description of Artificial Sequence: Synthetic oligonucleotide
  Sense strand starting at position 596 of SEQ ID NO: 1884119
guuuguuaagaucagguga

SEQ ID NO: 2241551 - RNA, 19 nt, Artificial Sequence
  Description of Artificial Sequence: Synthetic oligonucleotide
  Antisense strand to SEQ ID NO: 2241550
ucaccugaucuuaacaaac

SEQ ID NO: 2241552 - RNA, 19 nt, Artificial Sequence
  Description of Artificial Sequence: Synthetic oligonucleotide
  Sense strand starting at position 1080 of SEQ ID NO: 1884119
guaaauggcuaaccacuua

SEQ ID NO: 2241553 - RNA, 19 nt, Artificial Sequence
  Description of Artificial Sequence: Synthetic oligonucleotide
  Antisense strand to SEQ ID NO: 2241552
uaagugguuagccauuuac

SEQ ID NO: 2241554 - RNA, 19 nt, Artificial Sequence
  Description of Artificial Sequence: Synthetic oligonucleotide
  Sense strand starting at position 1103 of SEQ ID NO: 1884119
uuugauucucuuuauagug

SEQ ID NO: 2241555 - RNA, 19 nt, Artificial Sequence
  Description of Artificial Sequence: Synthetic oligonucleotide
  Antisense strand to SEQ ID NO: 2241554
cacuauaaagagaaucaaa

SEQ ID NO: 2241556 - RNA, 19 nt, Artificial Sequence
  Description of Artificial Sequence: Synthetic oligonucleotide
  Sense strand starting at position 1203 of SEQ ID NO: 1884119
gauacaauagaguggucua

SEQ ID NO: 2241557 - RNA, 19 nt, Artificial Sequence
  Description of Artificial Sequence: Synthetic oligonucleotide
  Antisense strand to SEQ ID NO: 2241556
uagaccacucuauuguauc

SEQ ID NO: 2241558 - RNA, 19 nt, Artificial Sequence
  Description of Artificial Sequence: Synthetic oligonucleotide
  Sense strand starting at position 1206 of SEQ ID NO: 1884119
acaauagaguggucuaagu

SEQ ID NO: 2241559 - RNA, 19 nt, Artificial Sequence
  Description of Artificial Sequence: Synthetic oligonucleotide
  Antisense strand to SEQ ID NO: 2241558
acuuagaccacucuauugu

SEQ ID NO: 2241560 - RNA, 19 nt, Artificial Sequence
  Description of Artificial Sequence: Synthetic oligonucleotide
  Sense strand starting at position 1208 of SEQ ID NO: 1884119
aauagaguggucuaaguug

SEQ ID NO: 2241561 - RNA, 19 nt, Artificial Sequence
  Description of Artificial Sequence: Synthetic oligonucleotide
  Antisense strand to SEQ ID NO: 2241560
caacuuagaccacucuauu

SEQ ID NO: 2241562 - RNA, 19 nt, Artificial Sequence
  Description of Artificial Sequence: Synthetic oligonucleotide
  Sense strand starting at position 1269 of SEQ ID NO: 1884119
acucaauaggcuuagagca

SEQ ID NO: 2241563 - RNA, 19 nt, Artificial Sequence
  Description of Artificial Sequence: Synthetic oligonucleotide
  Antisense strand to SEQ ID NO: 2241562
ugcucuaagccuauugagu

SEQ ID NO: 2241564 - RNA, 19 nt, Artificial Sequence
  Description of Artificial Sequence: Synthetic oligonucleotide
  Sense strand starting at position 1388 of SEQ ID NO: 1884119
ccaggaaugcccgaaacua

SEQ ID NO: 2241565 - RNA, 19 nt, Artificial Sequence
  Description of Artificial Sequence: Synthetic oligonucleotide
  Antisense strand to SEQ ID NO: 2241564
uaguuucgggcauuccugg

SEQ ID NO: 2241566 - RNA, 19 nt, Artificial Sequence
  Description of Artificial Sequence: Synthetic oligonucleotide
  Sense strand starting at position 1601 of SEQ ID NO: 1884119
ugccuauguaaugagauga

SEQ ID NO: 2241567 - RNA, 19 nt, Artificial Sequence
  Description of Artificial Sequence: Synthetic oligonucleotide
  Antisense strand to SEQ ID NO: 2241566
ucaucucauuacauaggca

SEQ ID NO: 2241568 - RNA, 19 nt, Artificial Sequence
  Description of Artificial Sequence: Synthetic oligonucleotide
  Sense strand starting at position 1624 of SEQ ID NO: 1884119
aggugagugacacaugcau

SEQ ID NO: 2241569 - RNA, 19 nt, Artificial Sequence
  Description of Artificial Sequence: Synthetic oligonucleotide
  Antisense strand to SEQ ID NO: 2241568
augcaugugucacucaccu

SEQ ID NO: 2241570 - RNA, 19 nt, Artificial Sequence
  Description of Artificial Sequence: Synthetic oligonucleotide
  Sense strand starting at position 1677 of SEQ ID NO: 1884119
uucuguauuccugaauaug

SEQ ID NO: 2241571 - RNA, 19 nt, Artificial Sequence
  Description of Artificial Sequence: Synthetic oligonucleotide
  Antisense strand to SEQ ID NO: 2241570
cauauucaggaauacagaa

SEQ ID NO: 2241572 - RNA, 19 nt, Artificial Sequence
  Description of Artificial Sequence: Synthetic oligonucleotide
  Sense strand starting at position 1680 of SEQ ID NO: 1884119
uguauuccugaauaugugu

SEQ ID NO: 2241573 - RNA, 19 nt, Artificial Sequence
  Description of Artificial Sequence: Synthetic oligonucleotide
  Antisense strand to SEQ ID NO: 2241572
acacauauucaggaauaca

SEQ ID NO: 2241574 - RNA, 19 nt, Artificial Sequence
  Description of Artificial Sequence: Synthetic oligonucleotide
  Sense strand starting at position 1685 of SEQ ID NO: 1884119
uccugaauauguguuacag

SEQ ID NO: 2241575 - RNA, 19 nt, Artificial Sequence
  Description of Artificial Sequence: Synthetic oligonucleotide
  Antisense strand to SEQ ID NO: 2241574
cuguaacacauauucagga

SEQ ID NO: 2241576 - RNA, 19 nt, Artificial Sequence
  Description of Artificial Sequence: Synthetic oligonucleotide
  Sense strand starting at position 1696 of SEQ ID NO: 1884119
uguuacagucccugacuua

SEQ ID NO: 2241577 - RNA, 19 nt, Artificial Sequence
  Description of Artificial Sequence: Synthetic oligonucleotide
  Antisense strand to SEQ ID NO: 2241576
uaagucagggacuguaaca

SEQ ID NO: 2241578 - RNA, 19 nt, Artificial Sequence
  Description of Artificial Sequence: Synthetic oligonucleotide
  Sense strand starting at position 1898 of SEQ ID NO: 1884119
uuuacagauugagauuuga

SEQ ID NO: 2241579 - RNA, 19 nt, Artificial Sequence
  Description of Artificial Sequence: Synthetic oligonucleotide
  Antisense strand to SEQ ID NO: 2241578
ucaaaucucaaucuguaaa

SEQ ID NO: 2241580 - RNA, 19 nt, Artificial Sequence
  Description of Artificial Sequence: Synthetic oligonucleotide
  Sense strand starting at position 1989 of SEQ ID NO: 1884119
auuagaccugcuuacagua

SEQ ID NO: 2241581 - RNA, 19 nt, Artificial Sequence
  Description of Artificial Sequence: Synthetic oligonucleotide
  Antisense strand to SEQ ID NO: 2241580
uacuguaagcaggucuaau

SEQ ID NO: 2241582 - RNA, 19 nt, Artificial Sequence
  Description of Artificial Sequence: Synthetic oligonucleotide
  Sense strand starting at position 2075 of SEQ ID NO: 1884119
ggaagcacucuauggcaga

SEQ ID NO: 2241583 - RNA, 19 nt, Artificial Sequence
  Description of Artificial Sequence: Synthetic oligonucleotide
  Antisense strand to SEQ ID NO: 2241582
ucugccauagagugcuucc

SEQ ID NO: 2241584 - RNA, 19 nt, Artificial Sequence
  Description of Artificial Sequence: Synthetic oligonucleotide
  Sense strand starting at position 2106 of SEQ ID NO: 1884119
guauccauauugcuaggau

SEQ ID NO: 2241585 - RNA, 19 nt, Artificial Sequence
  Description of Artificial Sequence: Synthetic oligonucleotide
  Antisense strand to SEQ ID NO: 2241584
auccuagcaauauggauac

SEQ ID NO: 2241586 - RNA, 19 nt, Artificial Sequence
  Description of Artificial Sequence: Synthetic oligonucleotide
  Sense strand starting at position 2109 of SEQ ID NO: 1884119
uccauauugcuaggaucac

SEQ ID NO: 2241587 - RNA, 19 nt, Artificial Sequence
  Description of Artificial Sequence: Synthetic oligonucleotide
  Antisense strand to SEQ ID NO: 2241586
gugauccuagcaauaugga

SEQ ID NO: 2241588 - RNA, 19 nt, Artificial Sequence
  Description of Artificial Sequence: Synthetic oligonucleotide
  Sense strand starting at position 2196 of SEQ ID NO: 1884119
gcaacagucuaucugauaa

SEQ ID NO: 2241589 - RNA, 19 nt, Artificial Sequence
  Description of Artificial Sequence: Synthetic oligonucleotide
  Antisense strand to SEQ ID NO: 2241588
uuaucagauagacuguugc

SEQ ID NO: 2241590 - RNA, 19 nt, Artificial Sequence
  Description of Artificial Sequence: Synthetic oligonucleotide
  Sense strand starting at position 2258 of SEQ ID NO: 1884119
cguagagaugcuggacaaa

SEQ ID NO: 2241591 - RNA, 19 nt, Artificial Sequence
  Description of Artificial Sequence: Synthetic oligonucleotide
  Antisense strand to SEQ ID NO: 2241590
uuuguccagcaucucuacg

SEQ ID NO: 2241592 - RNA, 19 nt, Artificial Sequence
  Description of Artificial Sequence: Synthetic oligonucleotide
  Sense strand starting at position 2513 of SEQ ID NO: 1884119
gugcacaaugaccaaauau

SEQ ID NO: 2241593 - RNA, 19 nt, Artificial Sequence
  Description of Artificial Sequence: Synthetic oligonucleotide
  Antisense strand to SEQ ID NO: 2241592
auauuuggucauugugcac

SEQ ID NO: 2241594 - RNA, 19 nt, Artificial Sequence
  Description of Artificial Sequence: Synthetic oligonucleotide
  Sense strand starting at position 2646 of SEQ ID NO: 1884119
agguuaagggugcaauguu

SEQ ID NO: 2241595 - RNA, 19 nt, Artificial Sequence
  Description of Artificial Sequence: Synthetic oligonucleotide
  Antisense strand to SEQ ID NO: 2241594
aacauugcacccuuaaccu

SEQ ID NO: 2241596 - RNA, 19 nt, Artificial Sequence
  Description of Artificial Sequence: Synthetic oligonucleotide
  Sense strand starting at position 2726 of SEQ ID NO: 1884119
augacuuucuggcuuuaga

SEQ ID NO: 2241597 - RNA, 19 nt, Artificial Sequence
  Description of Artificial Sequence: Synthetic oligonucleotide
  Antisense strand to SEQ ID NO: 2241596
ucuaaagccagaaagucau

SEQ ID NO: 2241598 - RNA, 19 nt, Artificial Sequence
  Description of Artificial Sequence: Synthetic oligonucleotide
  Sense strand starting at position 2729 of SEQ ID NO: 1884119
acuuucuggcuuuagaauu

SEQ ID NO: 2241599 - RNA, 19 nt, Artificial Sequence
  Description of Artificial Sequence: Synthetic oligonucleotide
  Antisense strand to SEQ ID NO: 2241598
aauucuaaagccagaaagu

SEQ ID NO: 2241600 - RNA, 19 nt, Artificial Sequence
  Description of Artificial Sequence: Synthetic oligonucleotide
  Sense strand starting at position 3075 of SEQ ID NO: 1884119
uagaauuucuaguagguuu

SEQ ID NO: 2241601 - RNA, 19 nt, Artificial Sequence
  Description of Artificial Sequence: Synthetic oligonucleotide
  Antisense strand to SEQ ID NO: 2241600
aaaccuacuagaaauucua

SEQ ID NO: 2241602 - RNA, 19 nt, Artificial Sequence
  Description of Artificial Sequence: Synthetic oligonucleotide
  Sense strand starting at position 3451 of SEQ ID NO: 1884119
ggagcuuggcuugagcaaa

SEQ ID NO: 2241603 - RNA, 19 nt, Artificial Sequence
  Description of Artificial Sequence: Synthetic oligonucleotide
  Antisense strand to SEQ ID NO: 2241602
uuugcucaagccaagcucc

SEQ ID NO: 2241604 - RNA, 19 nt, Artificial Sequence
  Description of Artificial Sequence: Synthetic oligonucleotide
  Sense strand starting at position 3675 of SEQ ID NO: 1884119
ucuuaucagcuugaaguuu

SEQ ID NO: 2241605 - RNA, 19 nt, Artificial Sequence
  Description of Artificial Sequence: Synthetic oligonucleotide
  Antisense strand to SEQ ID NO: 2241604
aaacuucaagcugauaaga

SEQ ID NO: 2241606 - RNA, 19 nt, Artificial Sequence
  Description of Artificial Sequence: Synthetic oligonucleotide
  Sense strand starting at position 3727 of SEQ ID NO: 1884119
ucaauaaucuagucaacga

SEQ ID NO: 2241607 - RNA, 19 nt, Artificial Sequence
  Description of Artificial Sequence: Synthetic oligonucleotide
  Antisense strand to SEQ ID NO: 2241606
ucguugacuagauuauuga

SEQ ID NO: 2241608 - RNA, 19 nt, Artificial Sequence
  Description of Artificial Sequence: Synthetic oligonucleotide
  Sense strand starting at position 3848 of SEQ ID NO: 1884119
aagcccaucguguaugaau

SEQ ID NO: 2241609 - RNA, 19 nt, Artificial Sequence
  Description of Artificial Sequence: Synthetic oligonucleotide
  Antisense strand to SEQ ID NO: 2241608
auucauacacgaugggcuu

SEQ ID NO: 2241610 - RNA, 19 nt, Artificial Sequence
  Description of Artificial Sequence: Synthetic oligonucleotide
  Sense strand starting at position 485 of SEQ ID NO: 1884120
caaggagacuucgacuaca

SEQ ID NO: 2241611 - RNA, 19 nt, Artificial Sequence
  Description of Artificial Sequence: Synthetic oligonucleotide
  Antisense strand to SEQ ID NO: 2241610
uguagucgaagucuccuug

SEQ ID NO: 2241612 - RNA, 19 nt, Artificial Sequence
  Description of Artificial Sequence: Synthetic oligonucleotide
  Sense strand starting at position 609 of SEQ ID NO: 1884120
caccuuggcuuuccagaga

SEQ ID NO: 2241613 - RNA, 19 nt, Artificial Sequence
  Description of Artificial Sequence: Synthetic oligonucleotide
  Antisense strand to SEQ ID NO: 2241612
ucucuggaaagccaaggug

SEQ ID NO: 2241614 - RNA, 19 nt, Artificial Sequence
  Description of Artificial Sequence: Synthetic oligonucleotide
  Sense strand starting at position 947 of SEQ ID NO: 1884120
aggcuuugagacugagcuu

SEQ ID NO: 2241615 - RNA, 19 nt, Artificial Sequence
  Description of Artificial Sequence: Synthetic oligonucleotide
  Antisense strand to SEQ ID NO: 2241614
aagcucagucucaaagccu

SEQ ID NO: 2241616 - RNA, 19 nt, Artificial Sequence
  Description of Artificial Sequence: Synthetic oligonucleotide
  Sense strand starting at position 950 of SEQ ID NO: 1884120
cuuugagacugagcuugau

SEQ ID NO: 2241617 - RNA, 19 nt, Artificial Sequence
  Description of Artificial Sequence: Synthetic oligonucleotide
  Antisense strand to SEQ ID NO: 2241616
aucaagcucagucucaaag

SEQ ID NO: 2241618 - RNA, 19 nt, Artificial Sequence
  Description of Artificial Sequence: Synthetic oligonucleotide
  Sense strand starting at position 953 of SEQ ID NO: 1884120
ugagacugagcuugauaga

SEQ ID NO: 2241619 - RNA, 19 nt, Artificial Sequence
  Description of Artificial Sequence: Synthetic oligonucleotide
  Antisense strand to SEQ ID NO: 2241618
ucuaucaagcucagucuca

SEQ ID NO: 2241620 - RNA, 19 nt, Artificial Sequence
  Description of Artificial Sequence: Synthetic oligonucleotide
  Sense strand starting at position 956 of SEQ ID NO: 1884120
gacugagcuugauagagag

SEQ ID NO: 2241621 - RNA, 19 nt, Artificial Sequence
  Description of Artificial Sequence: Synthetic oligonucleotide
  Antisense strand to SEQ ID NO: 2241620
cucucuaucaagcucaguc

SEQ ID NO: 2241622 - RNA, 19 nt, Artificial Sequence
  Description of Artificial Sequence: Synthetic oligonucleotide
  Sense strand starting at position 962 of SEQ ID NO: 1884120
gcuugauagagagguagga

SEQ ID NO: 2241623 - RNA, 19 nt, Artificial Sequence
  Description of Artificial Sequence: Synthetic oligonucleotide
  Antisense strand to SEQ ID NO: 2241622
uccuaccucucuaucaagc

SEQ ID NO: 2241624 - RNA, 19 nt, Artificial Sequence
  Description of Artificial Sequence: Synthetic oligonucleotide
  Sense strand starting at position 1105 of SEQ ID NO: 1884120
ucaggaauggugugaggau

SEQ ID NO: 2241625 - RNA, 19 nt, Artificial Sequence
  Description of Artificial Sequence: Synthetic oligonucleotide
  Antisense strand to SEQ ID NO: 2241624
auccucacaccauuccuga

SEQ ID NO: 2241626 - RNA, 19 nt, Artificial Sequence
  Description of Artificial Sequence: Synthetic oligonucleotide
  Sense strand starting at position 1106 of SEQ ID NO: 1884120
caggaauggugugaggauu

SEQ ID NO: 2241627 - RNA, 19 nt, Artificial Sequence
  Description of Artificial Sequence: Synthetic oligonucleotide
  Antisense strand to SEQ ID NO: 2241626
aauccucacaccauuccug

SEQ ID NO: 2241628 - RNA, 19 nt, Artificial Sequence
  Description of Artificial Sequence: Synthetic oligonucleotide
  Sense strand starting at position 1112 of SEQ ID NO: 1884120
uggugugaggauugaggua

SEQ ID NO: 2241629 - RNA, 19 nt, Artificial Sequence
  Description of Artificial Sequence: Synthetic oligonucleotide
  Antisense strand to SEQ ID NO: 2241628
uaccucaauccucacacca

SEQ ID NO: 2241630 - RNA, 19 nt, Artificial Sequence
  Description of Artificial Sequence: Synthetic oligonucleotide
  Sense strand starting at position 1114 of SEQ ID NO: 1884120
gugugaggauugagguaau

SEQ ID NO: 2241631 - RNA, 19 nt, Artificial Sequence
  Description of Artificial Sequence: Synthetic oligonucleotide
  Antisense strand to SEQ ID NO: 2241630
auuaccucaauccucacac

SEQ ID NO: 2241632 - RNA, 19 nt, Artificial Sequence
  Description of Artificial Sequence: Synthetic oligonucleotide
  Sense strand starting at position 1125 of SEQ ID NO: 1884120
gagguaauguccuuaggau

SEQ ID NO: 2241633 - RNA, 19 nt, Artificial Sequence
  Description of Artificial Sequence: Synthetic oligonucleotide
  Antisense strand to SEQ ID NO: 2241632
auccuaaggacauuaccuc

SEQ ID NO: 2241634 - RNA, 19 nt, Artificial Sequence
  Description of Artificial Sequence: Synthetic oligonucleotide
  Sense strand starting at position 1126 of SEQ ID NO: 1884120
agguaauguccuuaggaug

SEQ ID NO: 2241635 - RNA, 19 nt, Artificial Sequence
  Description of Artificial Sequence: Synthetic oligonucleotide
  Antisense strand to SEQ ID NO: 2241634
cauccuaaggacauuaccu

SEQ ID NO: 2241636 - RNA, 19 nt, Artificial Sequence
  Description of Artificial Sequence: Synthetic oligonucleotide
  Sense strand starting at position 1408 of SEQ ID NO: 1884120
gugagucaucuucgcuuau

SEQ ID NO: 2241637 - RNA, 19 nt, Artificial Sequence
  Description of Artificial Sequence: Synthetic oligonucleotide
  Antisense strand to SEQ ID NO: 2241636
auaagcgaagaugacucac

SEQ ID NO: 2241638 - RNA, 19 nt, Artificial Sequence
  Description of Artificial Sequence: Synthetic oligonucleotide
  Sense strand starting at position 1409 of SEQ ID NO: 1884120
ugagucaucuucgcuuaug

SEQ ID NO: 2241639 - RNA, 19 nt, Artificial Sequence
  Description of Artificial Sequence: Synthetic oligonucleotide
  Antisense strand to SEQ ID NO: 2241638
cauaagcgaagaugacuca

SEQ ID NO: 2241640 - RNA, 19 nt, Artificial Sequence
  Description of Artificial Sequence: Synthetic oligonucleotide
  Sense strand starting at position 1410 of SEQ ID NO: 1884120
gagucaucuucgcuuauga

SEQ ID NO: 2241641 - RNA, 19 nt, Artificial Sequence
  Description of Artificial Sequence: Synthetic oligonucleotide
  Antisense strand to SEQ ID NO: 2241640
ucauaagcgaagaugacuc

SEQ ID NO: 2241642 - RNA, 19 nt, Artificial Sequence
  Description of Artificial Sequence: Synthetic oligonucleotide
  Sense strand starting at position 1412 of SEQ ID NO: 1884120
gucaucuucgcuuaugauu

SEQ ID NO: 2241643 - RNA, 19 nt, Artificial Sequence
  Description of Artificial Sequence: Synthetic oligonucleotide
  Antisense strand to SEQ ID NO: 2241642
aaucauaagcgaagaugac

SEQ ID NO: 2241644 - RNA, 19 nt, Artificial Sequence
  Description of Artificial Sequence: Synthetic oligonucleotide
  Sense strand starting at position 1558 of SEQ ID NO: 1884120
cgaaguagauguuuaaguu

SEQ ID NO: 2241645 - RNA, 19 nt, Artificial Sequence
  Description of Artificial Sequence: Synthetic oligonucleotide
  Antisense strand to SEQ ID NO: 2241644
aacuuaaacaucuacuucg

SEQ ID NO: 2241646 - RNA, 19 nt, Artificial Sequence
  Description of Artificial Sequence: Synthetic oligonucleotide
  Sense strand starting at position 1559 of SEQ ID NO: 1884120
gaaguagauguuuaaguuu

SEQ ID NO: 2241647 - RNA, 19 nt, Artificial Sequence
  Description of Artificial Sequence: Synthetic oligonucleotide
  Antisense strand to SEQ ID NO: 2241646
aaacuuaaacaucuacuuc

SEQ ID NO: 2241648 - RNA, 19 nt, Artificial Sequence
  Description of Artificial Sequence: Synthetic oligonucleotide
  Sense strand starting at position 1703 of SEQ ID NO: 1884120
cacuaaguuggguggcauu

SEQ ID NO: 2241649 - RNA, 19 nt, Artificial Sequence
  Description of Artificial Sequence: Synthetic oligonucleotide
  Antisense strand to SEQ ID NO: 2241648
aaugccacccaacuuagug

SEQ ID NO: 2241650 - RNA, 19 nt, Artificial Sequence
  Description of Artificial Sequence: Synthetic oligonucleotide
  Sense strand starting at position 1869 of SEQ ID NO: 1884120
uccagagacucagcuuguu

SEQ ID NO: 2241651 - RNA, 19 nt, Artificial Sequence
  Description of Artificial Sequence: Synthetic oligonucleotide
  Antisense strand to SEQ ID NO: 2241650
aacaagcugagucucugga

SEQ ID NO: 2241652 - RNA, 19 nt, Artificial Sequence
  Description of Artificial Sequence: Synthetic oligonucleotide
  Sense strand starting at position 1875 of SEQ ID NO: 1884120
gacucagcuuguucugaga

SEQ ID NO: 2241653 - RNA, 19 nt, Artificial Sequence
  Description of Artificial Sequence: Synthetic oligonucleotide
  Antisense strand to SEQ ID NO: 2241652
ucucagaacaagcugaguc

SEQ ID NO: 2241654 - RNA, 19 nt, Artificial Sequence
  Description of Artificial Sequence: Synthetic oligonucleotide
  Sense strand starting at position 1928 of SEQ ID NO: 1884120
gccuguguggugcucagau

SEQ ID NO: 2241655 - RNA, 19 nt, Artificial Sequence
  Description of Artificial Sequence: Synthetic oligonucleotide
  Antisense strand to SEQ ID NO: 2241654
aucugagcaccacacaggc

SEQ ID NO: 2241656 - RNA, 19 nt, Artificial Sequence
  Description of Artificial Sequence: Synthetic oligonucleotide
  Sense strand starting at position 1930 of SEQ ID NO: 1884120
cuguguggugcucagauca

SEQ ID NO: 2241657 - RNA, 19 nt, Artificial Sequence
  Description of Artificial Sequence: Synthetic oligonucleotide
  Antisense strand to SEQ ID NO: 2241656
ugaucugagcaccacacag

SEQ ID NO: 2241658 - RNA, 19 nt, Artificial Sequence
  Description of Artificial Sequence: Synthetic oligonucleotide
  Sense strand starting at position 2027 of SEQ ID NO: 1884120
uggcuuagcucagcgauca

SEQ ID NO: 2241659 - RNA, 19 nt, Artificial Sequence
  Description of Artificial Sequence: Synthetic oligonucleotide
  Antisense strand to SEQ ID NO: 2241658
ugaucgcugagcuaagcca

SEQ ID NO: 2241660 - RNA, 19 nt, Artificial Sequence
  Description of Artificial Sequence: Synthetic oligonucleotide
  Sense strand starting at position 2334 of SEQ ID NO: 1884120
gccagcacguauuuaauga

SEQ ID NO: 2241661 - RNA, 19 nt, Artificial Sequence
  Description of Artificial Sequence: Synthetic oligonucleotide
  Antisense strand to SEQ ID NO: 2241660
ucauuaaauacgugcuggc

SEQ ID NO: 2241662 - RNA, 19 nt, Artificial Sequence
  Description of Artificial Sequence: Synthetic oligonucleotide
  Sense strand starting at position 2844 of SEQ ID NO: 1884120
agcgcugugcuuuggaaga

SEQ ID NO: 2241663 - RNA, 19 nt, Artificial Sequence
  Description of Artificial Sequence: Synthetic oligonucleotide
  Antisense strand to SEQ ID NO: 2241662
ucuuccaaagcacagcgcu

SEQ ID NO: 2241664 - RNA, 19 nt, Artificial Sequence
  Description of Artificial Sequence: Synthetic oligonucleotide
  Sense strand starting at position 2914 of SEQ ID NO: 1884120
uggagaacuguuggcaucu

SEQ ID NO: 2241665 - RNA, 19 nt, Artificial Sequence
  Description of Artificial Sequence: Synthetic oligonucleotide
  Antisense strand to SEQ ID NO: 2241664
agaugccaacaguucucca

SEQ ID NO: 2241666 - RNA, 19 nt, Artificial Sequence
  Description of Artificial Sequence: Synthetic oligonucleotide
  Sense strand starting at position 3153 of SEQ ID NO: 1884120
agagauggcuccuccaaac

SEQ ID NO: 2241667 - RNA, 19 nt, Artificial Sequence
  Description of Artificial Sequence: Synthetic oligonucleotide
  Antisense strand to SEQ ID NO: 2241666
guuuggaggagccaucucu

SEQ ID NO: 2241668 - RNA, 19 nt, Artificial Sequence
  Description of Artificial Sequence: Synthetic oligonucleotide
  Sense strand starting at position 3228 of SEQ ID NO: 1884120
ggaaaccugcauugucaga

SEQ ID NO: 2241669 - RNA, 19 nt, Artificial Sequence
  Description of Artificial Sequence: Synthetic oligonucleotide
  Antisense strand to SEQ ID NO: 2241668
ucugacaaugcagguuucc

SEQ ID NO: 2241670 - RNA, 19 nt, Artificial Sequence
  Description of Artificial Sequence: Synthetic oligonucleotide
  Sense strand starting at position 3287 of SEQ ID NO: 1884120
gcuaauucucccggcgacu

SEQ ID NO: 2241671 - RNA, 19 nt, Artificial Sequence
  Description of Artificial Sequence: Synthetic oligonucleotide
  Antisense strand to SEQ ID NO: 2241670
agucgccgggagaauuagc

SEQ ID NO: 2241672 - RNA, 19 nt, Artificial Sequence
  Description of Artificial Sequence: Synthetic oligonucleotide
  Sense strand starting at position 3313 of SEQ ID NO: 1884120
ggguuauuaccacguaaua

SEQ ID NO: 2241673 - RNA, 19 nt, Artificial Sequence
  Description of Artificial Sequence: Synthetic oligonucleotide
  Antisense strand to SEQ ID NO: 2241672
uauuacgugguaauaaccc

SEQ ID NO: 2241674 - RNA, 19 nt, Artificial Sequence
  Description of Artificial Sequence: Synthetic oligonucleotide
  Sense strand starting at position 3365 of SEQ ID NO: 1884120
auuaacuugucccuaguua

SEQ ID NO: 2241675 - RNA, 19 nt, Artificial Sequence
  Description of Artificial Sequence: Synthetic oligonucleotide
  Antisense strand to SEQ ID NO: 2241674
uaacuagggacaaguuaau

SEQ ID NO: 2241676 - RNA, 19 nt, Artificial Sequence
  Description of Artificial Sequence: Synthetic oligonucleotide
  Sense strand starting at position 3366 of SEQ ID NO: 1884120
uuaacuugucccuaguuac

SEQ ID NO: 2241677 - RNA, 19 nt, Artificial Sequence
  Description of Artificial Sequence: Synthetic oligonucleotide
  Antisense strand to SEQ ID NO: 2241676
guaacuagggacaaguuaa

SEQ ID NO: 2241678 - RNA, 19 nt, Artificial Sequence
  Description of Artificial Sequence: Synthetic oligonucleotide
  Sense strand starting at position 3378 of SEQ ID NO: 1884120
uaguuacagaguuggaagu

SEQ ID NO: 2241679 - RNA, 19 nt, Artificial Sequence
  Description of Artificial Sequence: Synthetic oligonucleotide
  Antisense strand to SEQ ID NO: 2241678
acuuccaacucuguaacua

SEQ ID NO: 2241680 - RNA, 19 nt, Artificial Sequence
  Description of Artificial Sequence: Synthetic oligonucleotide
  Sense strand starting at position 3480 of SEQ ID NO: 1884120
agagaaaguaucggguaca

SEQ ID NO: 2241681 - RNA, 19 nt, Artificial Sequence
  Description of Artificial Sequence: Synthetic oligonucleotide
  Antisense strand to SEQ ID NO: 2241680
uguacccgauacuuucucu

SEQ ID NO: 2241682 - RNA, 19 nt, Artificial Sequence
  Description of Artificial Sequence: Synthetic oligonucleotide
  Sense strand starting at position 3523 of SEQ ID NO: 1884120
ggaagucaauuacaucuuu

SEQ ID NO: 2241683 - RNA, 19 nt, Artificial Sequence
  Description of Artificial Sequence: Synthetic oligonucleotide
  Antisense strand to SEQ ID NO: 2241682
aaagauguaauugacuucc

SEQ ID NO: 2241684 - RNA, 19 nt, Artificial Sequence
  Description of Artificial Sequence: Synthetic oligonucleotide
  Sense strand starting at position 3588 of SEQ ID NO: 1884120
gggcaaauauaauugugaa

SEQ ID NO: 2241685 - RNA, 19 nt, Artificial Sequence
  Description of Artificial Sequence: Synthetic oligonucleotide
  Antisense strand to SEQ ID NO: 2241684
uucacaauuauauuugccc

SEQ ID NO: 2241686 - RNA, 19 nt, Artificial Sequence
  Description of Artificial Sequence: Synthetic oligonucleotide
  Sense strand starting at position 3871 of SEQ ID NO: 1884120
cacagauuauuuggaagua

SEQ ID NO: 2241687 - RNA, 19 nt, Artificial Sequence
  Description of Artificial Sequence: Synthetic oligonucleotide
  Antisense strand to SEQ ID NO: 2241686
uacuuccaaauaaucugug

SEQ ID NO: 2241688 - RNA, 19 nt, Artificial Sequence
  Description of Artificial Sequence: Synthetic oligonucleotide
  Sense strand starting at position 3872 of SEQ ID NO: 1884120
acagauuauuuggaaguaa

SEQ ID NO: 2241689 - RNA, 19 nt, Artificial Sequence
  Description of Artificial Sequence: Synthetic oligonucleotide
  Antisense strand to SEQ ID NO: 2241688
uuacuuccaaauaaucugu

SEQ ID NO: 2241690 - RNA, 19 nt, Artificial Sequence
  Description of Artificial Sequence: Synthetic oligonucleotide
  Sense strand starting at position 278 of SEQ ID NO: 1884121
gaaguagauguuuaaguuu

SEQ ID NO: 2241691 - RNA, 19 nt, Artificial Sequence
  Description of Artificial Sequence: Synthetic oligonucleotide
  Antisense strand to SEQ ID NO: 2241690
aaacuuaaacaucuacuuc

SEQ ID NO: 2241692 - RNA, 19 nt, Artificial Sequence
  Description of Artificial Sequence: Synthetic oligonucleotide
  Sense strand starting at position 588 of SEQ ID NO: 1884121
uccagagacucagcuuguu

SEQ ID NO: 2241693 - RNA, 19 nt, Artificial Sequence
  Description of Artificial Sequence: Synthetic oligonucleotide
  Antisense strand to SEQ ID NO: 2241692
aacaagcugagucucugga

SEQ ID NO: 2241694 - RNA, 19 nt, Artificial Sequence
  Description of Artificial Sequence: Synthetic oligonucleotide
  Sense strand starting at position 594 of SEQ ID NO: 1884121
gacucagcuuguucugaga

SEQ ID NO: 2241695 - RNA, 19 nt, Artificial Sequence
  Description of Artificial Sequence: Synthetic oligonucleotide
  Antisense strand to SEQ ID NO: 2241694
ucucagaacaagcugaguc

SEQ ID NO: 2241696 - RNA, 19 nt, Artificial Sequence
  Description of Artificial Sequence: Synthetic oligonucleotide
  Sense strand starting at position 647 of SEQ ID NO: 1884121
gccuguguggugcucagau

SEQ ID NO: 2241697 - RNA, 19 nt, Artificial Sequence
  Description of Artificial Sequence: Synthetic oligonucleotide
  Antisense strand to SEQ ID NO: 2241696
aucugagcaccacacaggc

SEQ ID NO: 2241698 - RNA, 19 nt, Artificial Sequence
  Description of Artificial Sequence: Synthetic oligonucleotide
  Sense strand starting at position 1053 of SEQ ID NO: 1884121
gccagcacguauuuaauga

SEQ ID NO: 2241699 - RNA, 19 nt, Artificial Sequence
  Description of Artificial Sequence: Synthetic oligonucleotide
  Antisense strand to SEQ ID NO: 2241698
ucauuaaauacgugcuggc

SEQ ID NO: 2241700 - RNA, 19 nt, Artificial Sequence
  Description of Artificial Sequence: Synthetic oligonucleotide
  Sense strand starting at position 1633 of SEQ ID NO: 1884121
uggagaacuguuggcaucu

SEQ ID NO: 2241701 - RNA, 19 nt, Artificial Sequence
  Description of Artificial Sequence: Synthetic oligonucleotide
  Antisense strand to SEQ ID NO: 2241700
agaugccaacaguucucca

SEQ ID NO: 2241702 - RNA, 19 nt, Artificial Sequence
  Description of Artificial Sequence: Synthetic oligonucleotide
  Sense strand starting at position 1872 of SEQ ID NO: 1884121
agagauggcuccuccaaac

SEQ ID NO: 2241703 - RNA, 19 nt, Artificial Sequence
  Description of Artificial Sequence: Synthetic oligonucleotide
  Antisense strand to SEQ ID NO: 2241702
guuuggaggagccaucucu

SEQ ID NO: 2241704 - RNA, 19 nt, Artificial Sequence
  Description of Artificial Sequence: Synthetic oligonucleotide
  Sense strand starting at position 1947 of SEQ ID NO: 1884121
ggaaaccugcauugucaga

SEQ ID NO: 2241705 - RNA, 19 nt, Artificial Sequence
  Description of Artificial Sequence: Synthetic oligonucleotide
  Antisense strand to SEQ ID NO: 2241704
ucugacaaugcagguuucc

SEQ ID NO: 2241706 - RNA, 19 nt, Artificial Sequence
  Description of Artificial Sequence: Synthetic oligonucleotide
  Sense strand starting at position 2032 of SEQ ID NO: 1884121
ggguuauuaccacguaaua

SEQ ID NO: 2241707 - RNA, 19 nt, Artificial Sequence
  Description of Artificial Sequence: Synthetic oligonucleotide
  Antisense strand to SEQ ID NO: 2241706
uauuacgugguaauaaccc

SEQ ID NO: 2241708 - RNA, 19 nt, Artificial Sequence
  Description of Artificial Sequence: Synthetic oligonucleotide
  Sense strand starting at position 2084 of SEQ ID NO: 1884121
auuaacuugucccuaguua

SEQ ID NO: 2241709 - RNA, 19 nt, Artificial Sequence
  Description of Artificial Sequence: Synthetic oligonucleotide
  Antisense strand to SEQ ID NO: 2241708
uaacuagggacaaguuaau

SEQ ID NO: 2241710 - RNA, 19 nt, Artificial Sequence
  Description of Artificial Sequence: Synthetic oligonucleotide
  Sense strand starting at position 2085 of SEQ ID NO: 1884121
uuaacuugucccuaguuac

SEQ ID NO: 2241711 - RNA, 19 nt, Artificial Sequence
  Description of Artificial Sequence: Synthetic oligonucleotide
  Antisense strand to SEQ ID NO: 2241710
guaacuagggacaaguuaa

SEQ ID NO: 2241712 - RNA, 19 nt, Artificial Sequence
  Description of Artificial Sequence: Synthetic oligonucleotide
  Sense strand starting at position 2097 of SEQ ID NO: 1884121
uaguuacagaguuggaagu

SEQ ID NO: 2241713 - RNA, 19 nt, Artificial Sequence
  Description of Artificial Sequence: Synthetic oligonucleotide
  Antisense strand to SEQ ID NO: 2241712
acuuccaacucuguaacua

SEQ ID NO: 2241714 - RNA, 19 nt, Artificial Sequence
  Description of Artificial Sequence: Synthetic oligonucleotide
  Sense strand starting at position 2199 of SEQ ID NO: 1884121
agagaaaguaucggguaca

SEQ ID NO: 2241715 - RNA, 19 nt, Artificial Sequence
  Description of Artificial Sequence: Synthetic oligonucleotide
  Antisense strand to SEQ ID NO: 2241714
uguacccgauacuuucucu

SEQ ID NO: 2241716 - RNA, 19 nt, Artificial Sequence
  Description of Artificial Sequence: Synthetic oligonucleotide
  Sense strand starting at position 2307 of SEQ ID NO: 1884121
gggcaaauauaauugugaa

SEQ ID NO: 2241717 - RNA, 19 nt, Artificial Sequence
  Description of Artificial Sequence: Synthetic oligonucleotide
  Antisense strand to SEQ ID NO: 2241716
uucacaauuauauuugccc

SEQ ID NO: 2241718 - RNA, 19 nt, Artificial Sequence
  Description of Artificial Sequence: Synthetic oligonucleotide
  Sense strand starting at position 2590 of SEQ ID NO: 1884121
cacagauuauuuggaagua

SEQ ID NO: 2241719 - RNA, 19 nt, Artificial Sequence
  Description of Artificial Sequence: Synthetic oligonucleotide
  Antisense strand to SEQ ID NO: 2241718
uacuuccaaauaaucugug

SEQ ID NO: 2241720 - RNA, 19 nt, Artificial Sequence
  Description of Artificial Sequence: Synthetic oligonucleotide
  Sense strand starting at position 2591 of SEQ ID NO: 1884121
acagauuauuuggaaguaa

SEQ ID NO: 2241721 - RNA, 19 nt, Artificial Sequence
  Description of Artificial Sequence: Synthetic oligonucleotide
  Antisense strand to SEQ ID NO: 2241720
uuacuuccaaauaaucugu

SEQ ID NO: 2241722 - RNA, 19 nt, Artificial Sequence
  Description of Artificial Sequence: Synthetic oligonucleotide
  Sense strand starting at position 2781 of SEQ ID NO: 1884121
accacaauuccuggcuaga

SEQ ID NO: 2241723 - RNA, 19 nt, Artificial Sequence
  Description of Artificial Sequence: Synthetic oligonucleotide
  Antisense strand to SEQ ID NO: 2241722
ucuagccaggaauuguggu

SEQ ID NO: 2241724 - RNA, 19 nt, Artificial Sequence
  Description of Artificial Sequence: Synthetic oligonucleotide
  Sense strand starting at position 2830 of SEQ ID NO: 1884121
gccagaaugaccuggguuu

SEQ ID NO: 2241725 - RNA, 19 nt, Artificial Sequence
  Description of Artificial Sequence: Synthetic oligonucleotide
  Antisense strand to SEQ ID NO: 2241724
aaacccaggucauucuggc

SEQ ID NO: 2241726 - RNA, 19 nt, Artificial Sequence
  Description of Artificial Sequence: Synthetic oligonucleotide
  Sense strand starting at position 2939 of SEQ ID NO: 1884121
cucacaugguuguuacaaa

SEQ ID NO: 2241727 - RNA, 19 nt, Artificial Sequence
  Description of Artificial Sequence: Synthetic oligonucleotide
  Antisense strand to SEQ ID NO: 2241726
uuuguaacaaccaugugag

SEQ ID NO: 2241728 - RNA, 19 nt, Artificial Sequence
  Description of Artificial Sequence: Synthetic oligonucleotide
  Sense strand starting at position 2979 of SEQ ID NO: 1884121
auguaaagaguuuggcaua

SEQ ID NO: 2241729 - RNA, 19 nt, Artificial Sequence
  Description of Artificial Sequence: Synthetic oligonucleotide
  Antisense strand to SEQ ID NO: 2241728
uaugccaaacucuuuacau

SEQ ID NO: 2241730 - RNA, 19 nt, Artificial Sequence
  Description of Artificial Sequence: Synthetic oligonucleotide
  Sense strand starting at position 2984 of SEQ ID NO: 1884121
aagaguuuggcauaagcca

SEQ ID NO: 2241731 - RNA, 19 nt, Artificial Sequence
  Description of Artificial Sequence: Synthetic oligonucleotide
  Antisense strand to SEQ ID NO: 2241730
uggcuuaugccaaacucuu

SEQ ID NO: 2241732 - RNA, 19 nt, Artificial Sequence
  Description of Artificial Sequence: Synthetic oligonucleotide
  Sense strand starting at position 2991 of SEQ ID NO: 1884121
uggcauaagccagggaaua

SEQ ID NO: 2241733 - RNA, 19 nt, Artificial Sequence
  Description of Artificial Sequence: Synthetic oligonucleotide
  Antisense strand to SEQ ID NO: 2241732
uauucccuggcuuaugcca

SEQ ID NO: 2241734 - RNA, 19 nt, Artificial Sequence
  Description of Artificial Sequence: Synthetic oligonucleotide
  Sense strand starting at position 2993 of SEQ ID NO: 1884121
gcauaagccagggaauagu

SEQ ID NO: 2241735 - RNA, 19 nt, Artificial Sequence
  Description of Artificial Sequence: Synthetic oligonucleotide
  Antisense strand to SEQ ID NO: 2241734
acuauucccuggcuuaugc

SEQ ID NO: 2241736 - RNA, 19 nt, Artificial Sequence
  Description of Artificial Sequence: Synthetic oligonucleotide
  Sense strand starting at position 3002 of SEQ ID NO: 1884121
agggaauaguaucuguuau

SEQ ID NO: 2241737 - RNA, 19 nt, Artificial Sequence
  Description of Artificial Sequence: Synthetic oligonucleotide
  Antisense strand to SEQ ID NO: 2241736
auaacagauacuauucccu

SEQ ID NO: 2241738 - RNA, 19 nt, Artificial Sequence
  Description of Artificial Sequence: Synthetic oligonucleotide
  Sense strand starting at position 3003 of SEQ ID NO: 1884121
gggaauaguaucuguuauu

SEQ ID NO: 2241739 - RNA, 19 nt, Artificial Sequence
  Description of Artificial Sequence: Synthetic oligonucleotide
  Antisense strand to SEQ ID NO: 2241738
aauaacagauacuauuccc

SEQ ID NO: 2241740 - RNA, 19 nt, Artificial Sequence
  Description of Artificial Sequence: Synthetic oligonucleotide
  Sense strand starting at position 3189 of SEQ ID NO: 1884121
acugaacucucagugaugu

SEQ ID NO: 2241741 - RNA, 19 nt, Artificial Sequence
  Description of Artificial Sequence: Synthetic oligonucleotide
  Antisense strand to SEQ ID NO: 2241740
acaucacugagaguucagu

SEQ ID NO: 2241742 - RNA, 19 nt, Artificial Sequence
  Description of Artificial Sequence: Synthetic oligonucleotide
  Sense strand starting at position 3200 of SEQ ID NO: 1884121
agugaugucuuaucuuaua

SEQ ID NO: 2241743 - RNA, 19 nt, Artificial Sequence
  Description of Artificial Sequence: Synthetic oligonucleotide
  Antisense strand to SEQ ID NO: 2241742
uauaagauaagacaucacu

SEQ ID NO: 2241744 - RNA, 19 nt, Artificial Sequence
  Description of Artificial Sequence: Synthetic oligonucleotide
  Sense strand starting at position 3213 of SEQ ID NO: 1884121
cuuauaaggcucuagucuu

SEQ ID NO: 2241745 - RNA, 19 nt, Artificial Sequence
  Description of Artificial Sequence: Synthetic oligonucleotide
  Antisense strand to SEQ ID NO: 2241744
aagacuagagccuuauaag

SEQ ID NO: 2241746 - RNA, 19 nt, Artificial Sequence
  Description of Artificial Sequence: Synthetic oligonucleotide
  Sense strand starting at position 3233 of SEQ ID NO: 1884121
uccuccaugcaaugugaaa

SEQ ID NO: 2241747 - RNA, 19 nt, Artificial Sequence
  Description of Artificial Sequence: Synthetic oligonucleotide
  Antisense strand to SEQ ID NO: 2241746
uuucacauugcauggagga

SEQ ID NO: 2241748 - RNA, 19 nt, Artificial Sequence
  Description of Artificial Sequence: Synthetic oligonucleotide
  Sense strand starting at position 3383 of SEQ ID NO: 1884121
ugcugaaagaaugguugau

SEQ ID NO: 2241749 - RNA, 19 nt, Artificial Sequence
  Description of Artificial Sequence: Synthetic oligonucleotide
  Antisense strand to SEQ ID NO: 2241748
aucaaccauucuuucagca

SEQ ID NO: 2241750 - RNA, 19 nt, Artificial Sequence
  Description of Artificial Sequence: Synthetic oligonucleotide
  Sense strand starting at position 3436 of SEQ ID NO: 1884121
auuccuucugccugagaca

SEQ ID NO: 2241751 - RNA, 19 nt, Artificial Sequence
  Description of Artificial Sequence: Synthetic oligonucleotide
  Antisense strand to SEQ ID NO: 2241750
ugucucaggcagaaggaau

SEQ ID NO: 2241752 - RNA, 19 nt, Artificial Sequence
  Description of Artificial Sequence: Synthetic oligonucleotide
  Sense strand starting at position 3485 of SEQ ID NO: 1884121
cucucugaaugggucaaau

SEQ ID NO: 2241753 - RNA, 19 nt, Artificial Sequence
  Description of Artificial Sequence: Synthetic oligonucleotide
  Antisense strand to SEQ ID NO: 2241752
auuugacccauucagagag

SEQ ID NO: 2241754 - RNA, 19 nt, Artificial Sequence
  Description of Artificial Sequence: Synthetic oligonucleotide
  Sense strand starting at position 3552 of SEQ ID NO: 1884121
ggguuuaucacugguuaaa

SEQ ID NO: 2241755 - RNA, 19 nt, Artificial Sequence
  Description of Artificial Sequence: Synthetic oligonucleotide
  Antisense strand to SEQ ID NO: 2241754
uuuaaccagugauaaaccc

SEQ ID NO: 2241756 - RNA, 19 nt, Artificial Sequence
  Description of Artificial Sequence: Synthetic oligonucleotide
  Sense strand starting at position 3584 of SEQ ID NO: 1884121
uuguuacuuauuuguguga

SEQ ID NO: 2241757 - RNA, 19 nt, Artificial Sequence
  Description of Artificial Sequence: Synthetic oligonucleotide
  Antisense strand to SEQ ID NO: 2241756
ucacacaaauaaguaacaa

SEQ ID NO: 2241758 - RNA, 19 nt, Artificial Sequence
  Description of Artificial Sequence: Synthetic oligonucleotide
  Sense strand starting at position 3597 of SEQ ID NO: 1884121
gugugauuaccagauaguc

SEQ ID NO: 2241759 - RNA, 19 nt, Artificial Sequence
  Description of Artificial Sequence: Synthetic oligonucleotide
  Antisense strand to SEQ ID NO: 2241758
gacuaucugguaaucacac

SEQ ID NO: 2241760 - RNA, 19 nt, Artificial Sequence
  Description of Artificial Sequence: Synthetic oligonucleotide
  Sense strand starting at position 3605 of SEQ ID NO: 1884121
accagauagucuuucuucu

SEQ ID NO: 2241761 - RNA, 19 nt, Artificial Sequence
  Description of Artificial Sequence: Synthetic oligonucleotide
  Antisense strand to SEQ ID NO: 2241760
agaagaaagacuaucuggu

SEQ ID NO: 2241762 - RNA, 19 nt, Artificial Sequence
  Description of Artificial Sequence: Synthetic oligonucleotide
  Sense strand starting at position 3693 of SEQ ID NO: 1884121
uggcuaauuguugaaugca

SEQ ID NO: 2241763 - RNA, 19 nt, Artificial Sequence
  Description of Artificial Sequence: Synthetic oligonucleotide
  Antisense strand to SEQ ID NO: 2241762
ugcauucaacaauuagcca

SEQ ID NO: 2241764 - RNA, 19 nt, Artificial Sequence
  Description of Artificial Sequence: Synthetic oligonucleotide
  Sense strand starting at position 3830 of SEQ ID NO: 1884121
ggaaauuaaucuccaggca

SEQ ID NO: 2241765 - RNA, 19 nt, Artificial Sequence
  Description of Artificial Sequence: Synthetic oligonucleotide
  Antisense strand to SEQ ID NO: 2241764
ugccuggagauuaauuucc

SEQ ID NO: 2241766 - RNA, 19 nt, Artificial Sequence
  Description of Artificial Sequence: Synthetic oligonucleotide
  Sense strand starting at position 3869 of SEQ ID NO: 1884121
aacuauucuggagguaaua

SEQ ID NO: 2241767 - RNA, 19 nt, Artificial Sequence
  Description of Artificial Sequence: Synthetic oligonucleotide
  Antisense strand to SEQ ID NO: 2241766
uauuaccuccagaauaguu

SEQ ID NO: 2241768 - RNA, 19 nt, Artificial Sequence
  Description of Artificial Sequence: Synthetic oligonucleotide
  Sense strand starting at position 3918 of SEQ ID NO: 1884121
ucauacagauuguugaaua

SEQ ID NO: 2241769 - RNA, 19 nt, Artificial Sequence
  Description of Artificial Sequence: Synthetic oligonucleotide
  Antisense strand to SEQ ID NO: 2241768
uauucaacaaucuguauga

SEQ ID NO: 2241770 - RNA, 19 nt, Artificial Sequence
  Description of Artificial Sequence: Synthetic oligonucleotide
  Sense strand starting at position 44 of SEQ ID NO: 1884122
uugccuguggccgagaauu

SEQ ID NO: 2241771 - RNA, 19 nt, Artificial Sequence
  Description of Artificial Sequence: Synthetic oligonucleotide
  Antisense strand to SEQ ID NO: 2241770
aauucucggccacaggcaa

SEQ ID NO: 2241772 - RNA, 19 nt, Artificial Sequence
  Description of Artificial Sequence: Synthetic oligonucleotide
  Sense strand starting at position 46 of SEQ ID NO: 1884122
gccuguggccgagaauugu

SEQ ID NO: 2241773 - RNA, 19 nt, Artificial Sequence
  Description of Artificial Sequence: Synthetic oligonucleotide
  Antisense strand to SEQ ID NO: 2241772
acaauucucggccacaggc

SEQ ID NO: 2241774 - RNA, 19 nt, Artificial Sequence
  Description of Artificial Sequence: Synthetic oligonucleotide
  Sense strand starting at position 55 of SEQ ID NO: 1884122
cgagaauugugccuccaag

SEQ ID NO: 2241775 - RNA, 19 nt, Artificial Sequence
  Description of Artificial Sequence: Synthetic oligonucleotide
  Antisense strand to SEQ ID NO: 2241774
cuuggaggcacaauucucg

SEQ ID NO: 2241776 - RNA, 19 nt, Artificial Sequence
  Description of Artificial Sequence: Synthetic oligonucleotide
  Sense strand starting at position 98 of SEQ ID NO: 1884122
gguucugucccagaggcua

SEQ ID NO: 2241777 - RNA, 19 nt, Artificial Sequence
  Description of Artificial Sequence: Synthetic oligonucleotide
  Antisense strand to SEQ ID NO: 2241776
uagccucugggacagaacc

SEQ ID NO: 2241778 - RNA, 19 nt, Artificial Sequence
  Description of Artificial Sequence: Synthetic oligonucleotide
  Sense strand starting at position 254 of SEQ ID NO: 1884122
ggcccaaugucacugugua

SEQ ID NO: 2241779 - RNA, 19 nt, Artificial Sequence
  Description of Artificial Sequence: Synthetic oligonucleotide
  Antisense strand to SEQ ID NO: 2241778
uacacagugacauugggcc

SEQ ID NO: 2241780 - RNA, 19 nt, Artificial Sequence
  Description of Artificial Sequence: Synthetic oligonucleotide
  Sense strand starting at position 483 of SEQ ID NO: 1884122
gguaauggcacuugacuuu

SEQ ID NO: 2241781 - RNA, 19 nt, Artificial Sequence
  Description of Artificial Sequence: Synthetic oligonucleotide
  Antisense strand to SEQ ID NO: 2241780
aaagucaagugccauuacc

SEQ ID NO: 2241782 - RNA, 19 nt, Artificial Sequence
  Description of Artificial Sequence: Synthetic oligonucleotide
  Sense strand starting at position 534 of SEQ ID NO: 1884122
gcagaugugacacaaguca

SEQ ID NO: 2241783 - RNA, 19 nt, Artificial Sequence
  Description of Artificial Sequence: Synthetic oligonucleotide
  Antisense strand to SEQ ID NO: 2241782
ugacuugugucacaucugc

SEQ ID NO: 2241784 - RNA, 19 nt, Artificial Sequence
  Description of Artificial Sequence: Synthetic oligonucleotide
  Sense strand starting at position 570 of SEQ ID NO: 1884122
ccugguugucuuuacagag

SEQ ID NO: 2241785 - RNA, 19 nt, Artificial Sequence
  Description of Artificial Sequence: Synthetic oligonucleotide
  Antisense strand to SEQ ID NO: 2241784
cucuguaaagacaaccagg

SEQ ID NO: 2241786 - RNA, 19 nt, Artificial Sequence
  Description of Artificial Sequence: Synthetic oligonucleotide
  Sense strand starting at position 648 of SEQ ID NO: 1884122
ccaugugaguuggcaugaa

SEQ ID NO: 2241787 - RNA, 19 nt, Artificial Sequence
  Description of Artificial Sequence: Synthetic oligonucleotide
  Antisense strand to SEQ ID NO: 2241786
uucaugccaacucacaugg

SEQ ID NO: 2241788 - RNA, 19 nt, Artificial Sequence
  Description of Artificial Sequence: Synthetic oligonucleotide
  Sense strand starting at position 652 of SEQ ID NO: 1884122
gugaguuggcaugaacaua

SEQ ID NO: 2241789 - RNA, 19 nt, Artificial Sequence
  Description of Artificial Sequence: Synthetic oligonucleotide
  Antisense strand to SEQ ID NO: 2241788
uauguucaugccaacucac

SEQ ID NO: 2241790 - RNA, 19 nt, Artificial Sequence
  Description of Artificial Sequence: Synthetic oligonucleotide
  Sense strand starting at position 673 of SEQ ID NO: 1884122
agaauagaggucugagagu

SEQ ID NO: 2241791 - RNA, 19 nt, Artificial Sequence
  Description of Artificial Sequence: Synthetic oligonucleotide
  Antisense strand to SEQ ID NO: 2241790
acucucagaccucuauucu

SEQ ID NO: 2241792 - RNA, 19 nt, Artificial Sequence
  Description of Artificial Sequence: Synthetic oligonucleotide
  Sense strand starting at position 726 of SEQ ID NO: 1884122
cuagcuggcuccuuuauuu

SEQ ID NO: 2241793 - RNA, 19 nt, Artificial Sequence
  Description of Artificial Sequence: Synthetic oligonucleotide
  Antisense strand to SEQ ID NO: 2241792
aaauaaaggagccagcuag

SEQ ID NO: 2241794 - RNA, 19 nt, Artificial Sequence
  Description of Artificial Sequence: Synthetic oligonucleotide
  Sense strand starting at position 780 of SEQ ID NO: 1884122
ugacaaucccaucacguuu

SEQ ID NO: 2241795 - RNA, 19 nt, Artificial Sequence
  Description of Artificial Sequence: Synthetic oligonucleotide
  Antisense strand to SEQ ID NO: 2241794
aaacgugaugggauuguca

SEQ ID NO: 2241796 - RNA, 19 nt, Artificial Sequence
  Description of Artificial Sequence: Synthetic oligonucleotide
  Sense strand starting at position 1005 of SEQ ID NO: 1884122
aucugucuugagggucaca

SEQ ID NO: 2241797 - RNA, 19 nt, Artificial Sequence
  Description of Artificial Sequence: Synthetic oligonucleotide
  Antisense strand to SEQ ID NO: 2241796
ugugacccucaagacagau

SEQ ID NO: 2241798 - RNA, 19 nt, Artificial Sequence
  Description of Artificial Sequence: Synthetic oligonucleotide
  Sense strand starting at position 1017 of SEQ ID NO: 1884122
ggucacaaccagugugagu

SEQ ID NO: 2241799 - RNA, 19 nt, Artificial Sequence
  Description of Artificial Sequence: Synthetic oligonucleotide
  Antisense strand to SEQ ID NO: 2241798
acucacacugguugugacc

SEQ ID NO: 2241800 - RNA, 19 nt, Artificial Sequence
  Description of Artificial Sequence: Synthetic oligonucleotide
  Sense strand starting at position 1036 of SEQ ID NO: 1884122
ggaugugauaaaugcaggu

SEQ ID NO: 2241801 - RNA, 19 nt, Artificial Sequence
  Description of Artificial Sequence: Synthetic oligonucleotide
  Antisense strand to SEQ ID NO: 2241800
accugcauuuaucacaucc

SEQ ID NO: 2241802 - RNA, 19 nt, Artificial Sequence
  Description of Artificial Sequence: Synthetic oligonucleotide
  Sense strand starting at position 1054 of SEQ ID NO: 1884122
ugcagcuuagaugauaaau

SEQ ID NO: 2241803 - RNA, 19 nt, Artificial Sequence
  Description of Artificial Sequence: Synthetic oligonucleotide
  Antisense strand to SEQ ID NO: 2241802
auuuaucaucuaagcugca

SEQ ID NO: 2241804 - RNA, 19 nt, Artificial Sequence
  Description of Artificial Sequence: Synthetic oligonucleotide
  Sense strand starting at position 1092 of SEQ ID NO: 1884122
ggaagagaccagugcaugu

SEQ ID NO: 2241805 - RNA, 19 nt, Artificial Sequence
  Description of Artificial Sequence: Synthetic oligonucleotide
  Antisense strand to SEQ ID NO: 2241804
acaugcacuggucucuucc

SEQ ID NO: 2241806 - RNA, 19 nt, Artificial Sequence
  Description of Artificial Sequence: Synthetic oligonucleotide
  Sense strand starting at position 1605 of SEQ ID NO: 1884122
ggaaccucuugguugcaaa

SEQ ID NO: 2241807 - RNA, 19 nt, Artificial Sequence
  Description of Artificial Sequence: Synthetic oligonucleotide
  Antisense strand to SEQ ID NO: 2241806
uuugcaaccaagagguucc

SEQ ID NO: 2241808 - RNA, 19 nt, Artificial Sequence
  Description of Artificial Sequence: Synthetic oligonucleotide
  Sense strand starting at position 2166 of SEQ ID NO: 1884122
gggacugguuucccuagaa

SEQ ID NO: 2241809 - RNA, 19 nt, Artificial Sequence
  Description of Artificial Sequence: Synthetic oligonucleotide
  Antisense strand to SEQ ID NO: 2241808
uucuagggaaaccaguccc

SEQ ID NO: 2241810 - RNA, 19 nt, Artificial Sequence
  Description of Artificial Sequence: Synthetic oligonucleotide
  Sense strand starting at position 2370 of SEQ ID NO: 1884122
accugaaugcucugggcca

SEQ ID NO: 2241811 - RNA, 19 nt, Artificial Sequence
  Description of Artificial Sequence: Synthetic oligonucleotide
  Antisense strand to SEQ ID NO: 2241810
uggcccagagcauucaggu

SEQ ID NO: 2241812 - RNA, 19 nt, Artificial Sequence
  Description of Artificial Sequence: Synthetic oligonucleotide
  Sense strand starting at position 2404 of SEQ ID NO: 1884122
gguguccugucauccacaa

SEQ ID NO: 2241813 - RNA, 19 nt, Artificial Sequence
  Description of Artificial Sequence: Synthetic oligonucleotide
  Antisense strand to SEQ ID NO: 2241812
uuguggaugacaggacacc

SEQ ID NO: 2241814 - RNA, 19 nt, Artificial Sequence
  Description of Artificial Sequence: Synthetic oligonucleotide
  Sense strand starting at position 2647 of SEQ ID NO: 1884122
agcuaugaagggcguuauu

SEQ ID NO: 2241815 - RNA, 19 nt, Artificial Sequence
  Description of Artificial Sequence: Synthetic oligonucleotide
  Antisense strand to SEQ ID NO: 2241814
aauaacgcccuucauagcu

SEQ ID NO: 2241816 - RNA, 19 nt, Artificial Sequence
  Description of Artificial Sequence: Synthetic oligonucleotide
  Sense strand starting at position 2675 of SEQ ID NO: 1884122
uuuggacacguuuagguua

SEQ ID NO: 2241817 - RNA, 19 nt, Artificial Sequence
  Description of Artificial Sequence: Synthetic oligonucleotide
  Antisense strand to SEQ ID NO: 2241816
uaaccuaaacguguccaaa

SEQ ID NO: 2241818 - RNA, 19 nt, Artificial Sequence
  Description of Artificial Sequence: Synthetic oligonucleotide
  Sense strand starting at position 2678 of SEQ ID NO: 1884122
ggacacguuuagguuagaa

SEQ ID NO: 2241819 - RNA, 19 nt, Artificial Sequence
  Description of Artificial Sequence: Synthetic oligonucleotide
  Antisense strand to SEQ ID NO: 2241818
uucuaaccuaaacgugucc

SEQ ID NO: 2241820 - RNA, 19 nt, Artificial Sequence
  Description of Artificial Sequence: Synthetic oligonucleotide
  Sense strand starting at position 2680 of SEQ ID NO: 1884122
acacguuuagguuagaaga

SEQ ID NO: 2241821 - RNA, 19 nt, Artificial Sequence
  Description of Artificial Sequence: Synthetic oligonucleotide
  Antisense strand to SEQ ID NO: 2241820
ucuucuaaccuaaacgugu

SEQ ID NO: 2241822 - RNA, 19 nt, Artificial Sequence
  Description of Artificial Sequence: Synthetic oligonucleotide
  Sense strand starting at position 3048 of SEQ ID NO: 1884122
gaagaugaauugucuccca

SEQ ID NO: 2241823 - RNA, 19 nt, Artificial Sequence
  Description of Artificial Sequence: Synthetic oligonucleotide
  Antisense strand to SEQ ID NO: 2241822
ugggagacaauucaucuuc

SEQ ID NO: 2241824 - RNA, 19 nt, Artificial Sequence
  Description of Artificial Sequence: Synthetic oligonucleotide
  Sense strand starting at position 3051 of SEQ ID NO: 1884122
gaugaauugucucccaguc

SEQ ID NO: 2241825 - RNA, 19 nt, Artificial Sequence
  Description of Artificial Sequence: Synthetic oligonucleotide
  Antisense strand to SEQ ID NO: 2241824
gacugggagacaauucauc

SEQ ID NO: 2241826 - RNA, 19 nt, Artificial Sequence
  Description of Artificial Sequence: Synthetic oligonucleotide
  Sense strand starting at position 3117 of SEQ ID NO: 1884122
agccuuaauguagaacuga

SEQ ID NO: 2241827 - RNA, 19 nt, Artificial Sequence
  Description of Artificial Sequence: Synthetic oligonucleotide
  Antisense strand to SEQ ID NO: 2241826
ucaguucuacauuaaggcu

SEQ ID NO: 2241828 - RNA, 19 nt, Artificial Sequence
  Description of Artificial Sequence: Synthetic oligonucleotide
  Sense strand starting at position 3154 of SEQ ID NO: 1884122
gcaguugagugacucaaga

SEQ ID NO: 2241829 - RNA, 19 nt, Artificial Sequence
  Description of Artificial Sequence: Synthetic oligonucleotide
  Antisense strand to SEQ ID NO: 2241828
ucuugagucacucaacugc

SEQ ID NO: 2241830 - RNA, 19 nt, Artificial Sequence
  Description of Artificial Sequence: Synthetic oligonucleotide
  Sense strand starting at position 3279 of SEQ ID NO: 1884122
ggcugaucccagugaugca

SEQ ID NO: 2241831 - RNA, 19 nt, Artificial Sequence
  Description of Artificial Sequence: Synthetic oligonucleotide
  Antisense strand to SEQ ID NO: 2241830
ugcaucacugggaucagcc

SEQ ID NO: 2241832 - RNA, 19 nt, Artificial Sequence
  Description of Artificial Sequence: Synthetic oligonucleotide
  Sense strand starting at position 3525 of SEQ ID NO: 1884122
cuagguaaggaguauguuu

SEQ ID NO: 2241833 - RNA, 19 nt, Artificial Sequence
  Description of Artificial Sequence: Synthetic oligonucleotide
  Antisense strand to SEQ ID NO: 2241832
aaacauacuccuuaccuag

SEQ ID NO: 2241834 - RNA, 19 nt, Artificial Sequence
  Description of Artificial Sequence: Synthetic oligonucleotide
  Sense strand starting at position 3532 of SEQ ID NO: 1884122
aggaguauguuugucacau

SEQ ID NO: 2241835 - RNA, 19 nt, Artificial Sequence
  Description of Artificial Sequence: Synthetic oligonucleotide
  Antisense strand to SEQ ID NO: 2241834
augugacaaacauacuccu

SEQ ID NO: 2241836 - RNA, 19 nt, Artificial Sequence
  Description of Artificial Sequence: Synthetic oligonucleotide
  Sense strand starting at position 3533 of SEQ ID NO: 1884122
ggaguauguuugucacaug

SEQ ID NO: 2241837 - RNA, 19 nt, Artificial Sequence
  Description of Artificial Sequence: Synthetic oligonucleotide
  Antisense strand to SEQ ID NO: 2241836
caugugacaaacauacucc

SEQ ID NO: 2241838 - RNA, 19 nt, Artificial Sequence
  Description of Artificial Sequence: Synthetic oligonucleotide
  Sense strand starting at position 3728 of SEQ ID NO: 1884122
gcguuuccuccugcugauu

SEQ ID NO: 2241839 - RNA, 19 nt, Artificial Sequence
  Description of Artificial Sequence: Synthetic oligonucleotide
  Antisense strand to SEQ ID NO: 2241838
aaucagcaggaggaaacgc

SEQ ID NO: 2241840 - RNA, 19 nt, Artificial Sequence
  Description of Artificial Sequence: Synthetic oligonucleotide
  Sense strand starting at position 3838 of SEQ ID NO: 1884122
gggagacgucuguaagcau

SEQ ID NO: 2241841 - RNA, 19 nt, Artificial Sequence
  Description of Artificial Sequence: Synthetic oligonucleotide
  Antisense strand to SEQ ID NO: 2241840
augcuuacagacgucuccc

SEQ ID NO: 2241842 - RNA, 19 nt, Artificial Sequence
  Description of Artificial Sequence: Synthetic oligonucleotide
  Sense strand starting at position 3890 of SEQ ID NO: 1884122
acagacacuuugggaauaa

SEQ ID NO: 2241843 - RNA, 19 nt, Artificial Sequence
  Description of Artificial Sequence: Synthetic oligonucleotide
  Antisense strand to SEQ ID NO: 2241842
uuauucccaaagugucugu

SEQ ID NO: 2241844 - RNA, 19 nt, Artificial Sequence
  Description of Artificial Sequence: Synthetic oligonucleotide
  Sense strand starting at position 3927 of SEQ ID NO: 1884122
aagaguuagcaccauguca

SEQ ID NO: 2241845 - RNA, 19 nt, Artificial Sequence
  Description of Artificial Sequence: Synthetic oligonucleotide
  Antisense strand to SEQ ID NO: 2241844
ugacauggugcuaacucuu

SEQ ID NO: 2241846 - RNA, 19 nt, Artificial Sequence
  Description of Artificial Sequence: Synthetic oligonucleotide
  Sense strand starting at position 3929 of SEQ ID NO: 1884122
gaguuagcaccaugucaag

SEQ ID NO: 2241847 - RNA, 19 nt, Artificial Sequence
  Description of Artificial Sequence: Synthetic oligonucleotide
  Antisense strand to SEQ ID NO: 2241846
cuugacauggugcuaacuc

SEQ ID NO: 2241848 - RNA, 19 nt, Artificial Sequence
  Description of Artificial Sequence: Synthetic oligonucleotide
  Sense strand starting at position 3935 of SEQ ID NO: 1884122
gcaccaugucaaggcagaa

SEQ ID NO: 2241849 - RNA, 19 nt, Artificial Sequence
  Description of Artificial Sequence: Synthetic oligonucleotide
  Antisense strand to SEQ ID NO: 2241848
uucugccuugacauggugc

SEQ ID NO: 2241850 - RNA, 19 nt, Artificial Sequence
  Description of Artificial Sequence: Synthetic oligonucleotide
  Sense strand starting at position 22 of SEQ ID NO: 1884123
auugguaguaccugagaaa

SEQ ID NO: 2241851 - RNA, 19 nt, Artificial Sequence
  Description of Artificial Sequence: Synthetic oligonucleotide
  Antisense strand to SEQ ID NO: 2241850
uuucucagguacuaccaau

SEQ ID NO: 2241852 - RNA, 19 nt, Artificial Sequence
  Description of Artificial Sequence: Synthetic oligonucleotide
  Sense strand starting at position 161 of SEQ ID NO: 1884123
uuauuaaaugacuggcuuu

SEQ ID NO: 2241853 - RNA, 19 nt, Artificial Sequence
  Description of Artificial Sequence: Synthetic oligonucleotide
  Antisense strand to SEQ ID NO: 2241852
aaagccagucauuuaauaa

SEQ ID NO: 2241854 - RNA, 19 nt, Artificial Sequence
  Description of Artificial Sequence: Synthetic oligonucleotide
  Sense strand starting at position 211 of SEQ ID NO: 1884123
ggaaucacauaguuucuga

SEQ ID NO: 2241855 - RNA, 19 nt, Artificial Sequence
  Description of Artificial Sequence: Synthetic oligonucleotide
  Antisense strand to SEQ ID NO: 2241854
ucagaaacuaugugauucc

SEQ ID NO: 2241856 - RNA, 19 nt, Artificial Sequence
  Description of Artificial Sequence: Synthetic oligonucleotide
  Sense strand starting at position 219 of SEQ ID NO: 1884123
auaguuucugauggaguag

SEQ ID NO: 2241857 - RNA, 19 nt, Artificial Sequence
  Description of Artificial Sequence: Synthetic oligonucleotide
  Antisense strand to SEQ ID NO: 2241856
cuacuccaucagaaacuau

SEQ ID NO: 2241858 - RNA, 19 nt, Artificial Sequence
  Description of Artificial Sequence: Synthetic oligonucleotide
  Sense strand starting at position 273 of SEQ ID NO: 1884123
gugugagagcuccauaaac

SEQ ID NO: 2241859 - RNA, 19 nt, Artificial Sequence
  Description of Artificial Sequence: Synthetic oligonucleotide
  Antisense strand to SEQ ID NO: 2241858
guuuauggagcucucacac

SEQ ID NO: 2241860 - RNA, 19 nt, Artificial Sequence
  Description of Artificial Sequence: Synthetic oligonucleotide
  Sense strand starting at position 354 of SEQ ID NO: 1884123
ugguuugcauuugcagaga

SEQ ID NO: 2241861 - RNA, 19 nt, Artificial Sequence
  Description of Artificial Sequence: Synthetic oligonucleotide
  Antisense strand to SEQ ID NO: 2241860
ucucugcaaaugcaaacca

SEQ ID NO: 2241862 - RNA, 19 nt, Artificial Sequence
  Description of Artificial Sequence: Synthetic oligonucleotide
  Sense strand starting at position 458 of SEQ ID NO: 1884123
uuguuugaugaggaguuga

SEQ ID NO: 2241863 - RNA, 19 nt, Artificial Sequence
  Description of Artificial Sequence: Synthetic oligonucleotide
  Antisense strand to SEQ ID NO: 2241862
ucaacuccucaucaaacaa

SEQ ID NO: 2241864 - RNA, 19 nt, Artificial Sequence
  Description of Artificial Sequence: Synthetic oligonucleotide
  Sense strand starting at position 673 of SEQ ID NO: 1884123
cuuuauuagcaugaaagcu

SEQ ID NO: 2241865 - RNA, 19 nt, Artificial Sequence
  Description of Artificial Sequence: Synthetic oligonucleotide
  Antisense strand to SEQ ID NO: 2241864
agcuuucaugcuaauaaag

SEQ ID NO: 2241866 - RNA, 19 nt, Artificial Sequence
  Description of Artificial Sequence: Synthetic oligonucleotide
  Sense strand starting at position 896 of SEQ ID NO: 1884123
agauuuacuuaguggaaag

SEQ ID NO: 2241867 - RNA, 19 nt, Artificial Sequence
  Description of Artificial Sequence: Synthetic oligonucleotide
  Antisense strand to SEQ ID NO: 2241866
cuuuccacuaaguaaaucu

SEQ ID NO: 2241868 - RNA, 19 nt, Artificial Sequence
  Description of Artificial Sequence: Synthetic oligonucleotide
  Sense strand starting at position 1177 of SEQ ID NO: 1884123
uguguuucccaguagggau

SEQ ID NO: 2241869 - RNA, 19 nt, Artificial Sequence
  Description of Artificial Sequence: Synthetic oligonucleotide
  Antisense strand to SEQ ID NO: 2241868
aucccuacugggaaacaca

SEQ ID NO: 2241870 - RNA, 19 nt, Artificial Sequence
  Description of Artificial Sequence: Synthetic oligonucleotide
  Sense strand starting at position 1223 of SEQ ID NO: 1884123
acucuaguuguccaauaua

SEQ ID NO: 2241871 - RNA, 19 nt, Artificial Sequence
  Description of Artificial Sequence: Synthetic oligonucleotide
  Antisense strand to SEQ ID NO: 2241870
uauauuggacaacuagagu

SEQ ID NO: 2241872 - RNA, 19 nt, Artificial Sequence
  Description of Artificial Sequence: Synthetic oligonucleotide
  Sense strand starting at position 1264 of SEQ ID NO: 1884123
agucauugugcuuugucuu

SEQ ID NO: 2241873 - RNA, 19 nt, Artificial Sequence
  Description of Artificial Sequence: Synthetic oligonucleotide
  Antisense strand to SEQ ID NO: 2241872
aagacaaagcacaaugacu

SEQ ID NO: 2241874 - RNA, 19 nt, Artificial Sequence
  Description of Artificial Sequence: Synthetic oligonucleotide
  Sense strand starting at position 1271 of SEQ ID NO: 1884123
gugcuuugucuuucucuca

SEQ ID NO: 2241875 - RNA, 19 nt, Artificial Sequence
  Description of Artificial Sequence: Synthetic oligonucleotide
  Antisense strand to SEQ ID NO: 2241874
ugagagaaagacaaagcac

SEQ ID NO: 2241876 - RNA, 19 nt, Artificial Sequence
  Description of Artificial Sequence: Synthetic oligonucleotide
  Sense strand starting at position 1432 of SEQ ID NO: 1884123
cauauagggcacugguaaa

SEQ ID NO: 2241877 - RNA, 19 nt, Artificial Sequence
  Description of Artificial Sequence: Synthetic oligonucleotide
  Antisense strand to SEQ ID NO: 2241876
uuuaccagugcccuauaug

SEQ ID NO: 2241878 - RNA, 19 nt, Artificial Sequence
  Description of Artificial Sequence: Synthetic oligonucleotide
  Sense strand starting at position 1439 of SEQ ID NO: 1884123
ggcacugguaaauaaagua

SEQ ID NO: 2241879 - RNA, 19 nt, Artificial Sequence
  Description of Artificial Sequence: Synthetic oligonucleotide
  Antisense strand to SEQ ID NO: 2241878
uacuuuauuuaccagugcc

SEQ ID NO: 2241880 - RNA, 19 nt, Artificial Sequence
  Description of Artificial Sequence: Synthetic oligonucleotide
  Sense strand starting at position 1500 of SEQ ID NO: 1884123
uuuagagauuucuagggua

SEQ ID NO: 2241881 - RNA, 19 nt, Artificial Sequence
  Description of Artificial Sequence: Synthetic oligonucleotide
  Antisense strand to SEQ ID NO: 2241880
uacccuagaaaucucuaaa

SEQ ID NO: 2241882 - RNA, 19 nt, Artificial Sequence
  Description of Artificial Sequence: Synthetic oligonucleotide
  Sense strand starting at position 1503 of SEQ ID NO: 1884123
agagauuucuaggguaaua

SEQ ID NO: 2241883 - RNA, 19 nt, Artificial Sequence
  Description of Artificial Sequence: Synthetic oligonucleotide
  Antisense strand to SEQ ID NO: 2241882
uauuacccuagaaaucucu

SEQ ID NO: 2241884 - RNA, 19 nt, Artificial Sequence
  Description of Artificial Sequence: Synthetic oligonucleotide
  Sense strand starting at position 1516 of SEQ ID NO: 1884123
guaauaagcagaugaagua

SEQ ID NO: 2241885 - RNA, 19 nt, Artificial Sequence
  Description of Artificial Sequence: Synthetic oligonucleotide
  Antisense strand to SEQ ID NO: 2241884
uacuucaucugcuuauuac

SEQ ID NO: 2241886 - RNA, 19 nt, Artificial Sequence
  Description of Artificial Sequence: Synthetic oligonucleotide
  Sense strand starting at position 1777 of SEQ ID NO: 1884123
guguuaaauauugagucuu

SEQ ID NO: 2241887 - RNA, 19 nt, Artificial Sequence
  Description of Artificial Sequence: Synthetic oligonucleotide
  Antisense strand to SEQ ID NO: 2241886
aagacucaauauuuaacac

SEQ ID NO: 2241888 - RNA, 19 nt, Artificial Sequence
  Description of Artificial Sequence: Synthetic oligonucleotide
  Sense strand starting at position 1843 of SEQ ID NO: 1884123
agcaucuuccaagguacaa

SEQ ID NO: 2241889 - RNA, 19 nt, Artificial Sequence
  Description of Artificial Sequence: Synthetic oligonucleotide
  Antisense strand to SEQ ID NO: 2241888
uuguaccuuggaagaugcu

SEQ ID NO: 2241890 - RNA, 19 nt, Artificial Sequence
  Description of Artificial Sequence: Synthetic oligonucleotide
  Sense strand starting at position 1855 of SEQ ID NO: 1884123
gguacaauugcauaucugu

SEQ ID NO: 2241891 - RNA, 19 nt, Artificial Sequence
  Description of Artificial Sequence: Synthetic oligonucleotide
  Antisense strand to SEQ ID NO: 2241890
acagauaugcaauuguacc

SEQ ID NO: 2241892 - RNA, 19 nt, Artificial Sequence
  Description of Artificial Sequence: Synthetic oligonucleotide
  Sense strand starting at position 2184 of SEQ ID NO: 1884123
ugaagagcuccagaguguu

SEQ ID NO: 2241893 - RNA, 19 nt, Artificial Sequence
  Description of Artificial Sequence: Synthetic oligonucleotide
  Antisense strand to SEQ ID NO: 2241892
aacacucuggagcucuuca

SEQ ID NO: 2241894 - RNA, 19 nt, Artificial Sequence
  Description of Artificial Sequence: Synthetic oligonucleotide
  Sense strand starting at position 2673 of SEQ ID NO: 1884123
aagccaauguccuugauga

SEQ ID NO: 2241895 - RNA, 19 nt, Artificial Sequence
  Description of Artificial Sequence: Synthetic oligonucleotide
  Antisense strand to SEQ ID NO: 2241894
ucaucaaggacauuggcuu

SEQ ID NO: 2241896 - RNA, 19 nt, Artificial Sequence
  Description of Artificial Sequence: Synthetic oligonucleotide
  Sense strand starting at position 2674 of SEQ ID NO: 1884123
agccaauguccuugaugaa

SEQ ID NO: 2241897 - RNA, 19 nt, Artificial Sequence
  Description of Artificial Sequence: Synthetic oligonucleotide
  Antisense strand to SEQ ID NO: 2241896
uucaucaaggacauuggcu

SEQ ID NO: 2241898 - RNA, 19 nt, Artificial Sequence
  Description of Artificial Sequence: Synthetic oligonucleotide
  Sense strand starting at position 2900 of SEQ ID NO: 1884123
gucaaucuuccagagucag

SEQ ID NO: 2241899 - RNA, 19 nt, Artificial Sequence
  Description of Artificial Sequence: Synthetic oligonucleotide
  Antisense strand to SEQ ID NO: 2241898
cugacucuggaagauugac

SEQ ID NO: 2241900 - RNA, 19 nt, Artificial Sequence
  Description of Artificial Sequence: Synthetic oligonucleotide
  Sense strand starting at position 2917 of SEQ ID NO: 1884123
agugacugucucuauuacu

SEQ ID NO: 2241901 - RNA, 19 nt, Artificial Sequence
  Description of Artificial Sequence: Synthetic oligonucleotide
  Antisense strand to SEQ ID NO: 2241900
aguaauagagacagucacu

SEQ ID NO: 2241902 - RNA, 19 nt, Artificial Sequence
  Description of Artificial Sequence: Synthetic oligonucleotide
  Sense strand starting at position 2923 of SEQ ID NO: 1884123
ugucucuauuacuugggau

SEQ ID NO: 2241903 - RNA, 19 nt, Artificial Sequence
  Description of Artificial Sequence: Synthetic oligonucleotide
  Antisense strand to SEQ ID NO: 2241902
aucccaaguaauagagaca

SEQ ID NO: 2241904 - RNA, 19 nt, Artificial Sequence
  Description of Artificial Sequence: Synthetic oligonucleotide
  Sense strand starting at position 3107 of SEQ ID NO: 1884123
agaguuuacuucucuggaa

SEQ ID NO: 2241905 - RNA, 19 nt, Artificial Sequence
  Description of Artificial Sequence: Synthetic oligonucleotide
  Antisense strand to SEQ ID NO: 2241904
uuccagagaaguaaacucu

SEQ ID NO: 2241906 - RNA, 19 nt, Artificial Sequence
  Description of Artificial Sequence: Synthetic oligonucleotide
  Sense strand starting at position 3108 of SEQ ID NO: 1884123
gaguuuacuucucuggaaa

SEQ ID NO: 2241907 - RNA, 19 nt, Artificial Sequence
  Description of Artificial Sequence: Synthetic oligonucleotide
  Antisense strand to SEQ ID NO: 2241906
uuuccagagaaguaaacuc

SEQ ID NO: 2241908 - RNA, 19 nt, Artificial Sequence
  Description of Artificial Sequence: Synthetic oligonucleotide
  Sense strand starting at position 3109 of SEQ ID NO: 1884123
aguuuacuucucuggaaau

SEQ ID NO: 2241909 - RNA, 19 nt, Artificial Sequence
  Description of Artificial Sequence: Synthetic oligonucleotide
  Antisense strand to SEQ ID NO: 2241908
auuuccagagaaguaaacu

SEQ ID NO: 2241910 - RNA, 19 nt, Artificial Sequence
  Description of Artificial Sequence: Synthetic oligonucleotide
  Sense strand starting at position 3163 of SEQ ID NO: 1884123
agaauaaaguucuccaagu

SEQ ID NO: 2241911 - RNA, 19 nt, Artificial Sequence
  Description of Artificial Sequence: Synthetic oligonucleotide
  Antisense strand to SEQ ID NO: 2241910
acuuggagaacuuuauucu

SEQ ID NO: 2241912 - RNA, 19 nt, Artificial Sequence
  Description of Artificial Sequence: Synthetic oligonucleotide
  Sense strand starting at position 3172 of SEQ ID NO: 1884123
uucuccaaguagucaaaua

SEQ ID NO: 2241913 - RNA, 19 nt, Artificial Sequence
  Description of Artificial Sequence: Synthetic oligonucleotide
  Antisense strand to SEQ ID NO: 2241912
uauuugacuacuuggagaa

SEQ ID NO: 2241914 - RNA, 19 nt, Artificial Sequence
  Description of Artificial Sequence: Synthetic oligonucleotide
  Sense strand starting at position 3411 of SEQ ID NO: 1884123
auacaaagcuguccaagaa

SEQ ID NO: 2241915 - RNA, 19 nt, Artificial Sequence
  Description of Artificial Sequence: Synthetic oligonucleotide
  Antisense strand to SEQ ID NO: 2241914
uucuuggacagcuuuguau

SEQ ID NO: 2241916 - RNA, 19 nt, Artificial Sequence
  Description of Artificial Sequence: Synthetic oligonucleotide
  Sense strand starting at position 3446 of SEQ ID NO: 1884123
guauaauaucuuggacuag

SEQ ID NO: 2241917 - RNA, 19 nt, Artificial Sequence
  Description of Artificial Sequence: Synthetic oligonucleotide
  Antisense strand to SEQ ID NO: 2241916
cuaguccaagauauuauac

SEQ ID NO: 2241918 - RNA, 19 nt, Artificial Sequence
  Description of Artificial Sequence: Synthetic oligonucleotide
  Sense strand starting at position 3472 of SEQ ID NO: 1884123
auaaauuacccucaguguu

SEQ ID NO: 2241919 - RNA, 19 nt, Artificial Sequence
  Description of Artificial Sequence: Synthetic oligonucleotide
  Antisense strand to SEQ ID NO: 2241918
aacacugaggguaauuuau

SEQ ID NO: 2241920 - RNA, 19 nt, Artificial Sequence
  Description of Artificial Sequence: Synthetic oligonucleotide
  Sense strand starting at position 3480 of SEQ ID NO: 1884123
cccucaguguuaucaaaga

SEQ ID NO: 2241921 - RNA, 19 nt, Artificial Sequence
  Description of Artificial Sequence: Synthetic oligonucleotide
  Antisense strand to SEQ ID NO: 2241920
ucuuugauaacacugaggg

SEQ ID NO: 2241922 - RNA, 19 nt, Artificial Sequence
  Description of Artificial Sequence: Synthetic oligonucleotide
  Sense strand starting at position 3614 of SEQ ID NO: 1884123
cauggaaacccaggucuaa

SEQ ID NO: 2241923 - RNA, 19 nt, Artificial Sequence
  Description of Artificial Sequence: Synthetic oligonucleotide
  Antisense strand to SEQ ID NO: 2241922
uuagaccuggguuuccaug

SEQ ID NO: 2241924 - RNA, 19 nt, Artificial Sequence
  Description of Artificial Sequence: Synthetic oligonucleotide
  Sense strand starting at position 3922 of SEQ ID NO: 1884123
ucucauuuacgcuguguga

SEQ ID NO: 2241925 - RNA, 19 nt, Artificial Sequence
  Description of Artificial Sequence: Synthetic oligonucleotide
  Antisense strand to SEQ ID NO: 2241924
ucacacagcguaaaugaga

SEQ ID NO: 2241926 - RNA, 19 nt, Artificial Sequence
  Description of Artificial Sequence: Synthetic oligonucleotide
  Sense strand starting at position 3924 of SEQ ID NO: 1884123
ucauuuacgcugugugaau

SEQ ID NO: 2241927 - RNA, 19 nt, Artificial Sequence
  Description of Artificial Sequence: Synthetic oligonucleotide
  Antisense strand to SEQ ID NO: 2241926
auucacacagcguaaauga

SEQ ID NO: 2241928 - RNA, 19 nt, Artificial Sequence
  Description of Artificial Sequence: Synthetic oligonucleotide
  Sense strand starting at position 3925 of SEQ ID NO: 1884123
cauuuacgcugugugaauc

SEQ ID NO: 2241929 - RNA, 19 nt, Artificial Sequence
  Description of Artificial Sequence: Synthetic oligonucleotide
  Antisense strand to SEQ ID NO: 2241928
gauucacacagcguaaaug

SEQ ID NO: 2241930 - RNA, 19 nt, Artificial Sequence
  Description of Artificial Sequence: Synthetic oligonucleotide
  Sense strand starting at position 117 of SEQ ID NO: 1884124
aguauaaguucccuucuca

SEQ ID NO: 2241931 - RNA, 19 nt, Artificial Sequence
  Description of Artificial Sequence: Synthetic oligonucleotide
  Antisense strand to SEQ ID NO: 2241930
ugagaagggaacuuauacu

SEQ ID NO: 2241932 - RNA, 19 nt, Artificial Sequence
  Description of Artificial Sequence: Synthetic oligonucleotide
  Sense strand starting at position 427 of SEQ ID NO: 1884124
cuuuccucacuguaauguu

SEQ ID NO: 2241933 - RNA, 19 nt, Artificial Sequence
  Description of Artificial Sequence: Synthetic oligonucleotide
  Antisense strand to SEQ ID NO: 2241932
aacauuacagugaggaaag

SEQ ID NO: 2241934 - RNA, 19 nt, Artificial Sequence
  Description of Artificial Sequence: Synthetic oligonucleotide
  Sense strand starting at position 619 of SEQ ID NO: 1884124
uaaaucacuguguauguga

SEQ ID NO: 2241935 - RNA, 19 nt, Artificial Sequence
  Description of Artificial Sequence: Synthetic oligonucleotide
  Antisense strand to SEQ ID NO: 2241934
ucacauacacagugauuua

SEQ ID NO: 2241936 - RNA, 19 nt, Artificial Sequence
  Description of Artificial Sequence: Synthetic oligonucleotide
  Sense strand starting at position 1089 of SEQ ID NO: 1884124
uaagacuuguguuucuaag

SEQ ID NO: 2241937 - RNA, 19 nt, Artificial Sequence
  Description of Artificial Sequence: Synthetic oligonucleotide
  Antisense strand to SEQ ID NO: 2241936
cuuagaaacacaagucuua

SEQ ID NO: 2241938 - RNA, 19 nt, Artificial Sequence
  Description of Artificial Sequence: Synthetic oligonucleotide
  Sense strand starting at position 1091 of SEQ ID NO: 1884124
agacuuguguuucuaagaa

SEQ ID NO: 2241939 - RNA, 19 nt, Artificial Sequence
  Description of Artificial Sequence: Synthetic oligonucleotide
  Antisense strand to SEQ ID NO: 2241938
uucuuagaaacacaagucu

SEQ ID NO: 2241940 - RNA, 19 nt, Artificial Sequence
  Description of Artificial Sequence: Synthetic oligonucleotide
  Sense strand starting at position 1098 of SEQ ID NO: 1884124
uguuucuaagaaugucaaa

SEQ ID NO: 2241941 - RNA, 19 nt, Artificial Sequence
  Description of Artificial Sequence: Synthetic oligonucleotide
  Antisense strand to SEQ ID NO: 2241940
uuugacauucuuagaaaca

SEQ ID NO: 2241942 - RNA, 19 nt, Artificial Sequence
  Description of Artificial Sequence: Synthetic oligonucleotide
  Sense strand starting at position 1110 of SEQ ID NO: 1884124
ugucaaauguuagucacca

SEQ ID NO: 2241943 - RNA, 19 nt, Artificial Sequence
  Description of Artificial Sequence: Synthetic oligonucleotide
  Antisense strand to SEQ ID NO: 2241942
uggugacuaacauuugaca

SEQ ID NO: 2241944 - RNA, 19 nt, Artificial Sequence
  Description of Artificial Sequence: Synthetic oligonucleotide
  Sense strand starting at position 1111 of SEQ ID NO: 1884124
gucaaauguuagucaccac

SEQ ID NO: 2241945 - RNA, 19 nt, Artificial Sequence
  Description of Artificial Sequence: Synthetic oligonucleotide
  Antisense strand to SEQ ID NO: 2241944
guggugacuaacauuugac

SEQ ID NO: 2241946 - RNA, 19 nt, Artificial Sequence
  Description of Artificial Sequence: Synthetic oligonucleotide
  Sense strand starting at position 1189 of SEQ ID NO: 1884124
uucccuuagagaugcgaua

SEQ ID NO: 2241947 - RNA, 19 nt, Artificial Sequence
  Description of Artificial Sequence: Synthetic oligonucleotide
  Antisense strand to SEQ ID NO: 2241946
uaucgcaucucuaagggaa

SEQ ID NO: 2241948 - RNA, 19 nt, Artificial Sequence
  Description of Artificial Sequence: Synthetic oligonucleotide
  Sense strand starting at position 1191 of SEQ ID NO: 1884124
cccuuagagaugcgauaaa

SEQ ID NO: 2241949 - RNA, 19 nt, Artificial Sequence
  Description of Artificial Sequence: Synthetic oligonucleotide
  Antisense strand to SEQ ID NO: 2241948
uuuaucgcaucucuaaggg

SEQ ID NO: 2241950 - RNA, 19 nt, Artificial Sequence
  Description of Artificial Sequence: Synthetic oligonucleotide
  Sense strand starting at position 1238 of SEQ ID NO: 1884124
ggcuuugaauuccuaauuc

SEQ ID NO: 2241951 - RNA, 19 nt, Artificial Sequence
  Description of Artificial Sequence: Synthetic oligonucleotide
  Antisense strand to SEQ ID NO: 2241950
gaauuaggaauucaaagcc

SEQ ID NO: 2241952 - RNA, 19 nt, Artificial Sequence
  Description of Artificial Sequence: Synthetic oligonucleotide
  Sense strand starting at position 1776 of SEQ ID NO: 1884124
guaguaaagcacuaaauau

SEQ ID NO: 2241953 - RNA, 19 nt, Artificial Sequence
  Description of Artificial Sequence: Synthetic oligonucleotide
  Antisense strand to SEQ ID NO: 2241952
auauuuagugcuuuacuac

SEQ ID NO: 2241954 - RNA, 19 nt, Artificial Sequence
  Description of Artificial Sequence: Synthetic oligonucleotide
  Sense strand starting at position 1987 of SEQ ID NO: 1884124
ugagaauucugacucuacc

SEQ ID NO: 2241955 - RNA, 19 nt, Artificial Sequence
  Description of Artificial Sequence: Synthetic oligonucleotide
  Antisense strand to SEQ ID NO: 2241954
gguagagucagaauucuca

SEQ ID NO: 2241956 - RNA, 19 nt, Artificial Sequence
  Description of Artificial Sequence: Synthetic oligonucleotide
  Sense strand starting at position 1996 of SEQ ID NO: 1884124
ugacucuaccugcagacau

SEQ ID NO: 2241957 - RNA, 19 nt, Artificial Sequence
  Description of Artificial Sequence: Synthetic oligonucleotide
  Antisense strand to SEQ ID NO: 2241956
augucugcagguagaguca

SEQ ID NO: 2241958 - RNA, 19 nt, Artificial Sequence
  Description of Artificial Sequence: Synthetic oligonucleotide
  Sense strand starting at position 2063 of SEQ ID NO: 1884124
gcaggucaaacaggugaaa

SEQ ID NO: 2241959 - RNA, 19 nt, Artificial Sequence
  Description of Artificial Sequence: Synthetic oligonucleotide
  Antisense strand to SEQ ID NO: 2241958
uuucaccuguuugaccugc

SEQ ID NO: 2241960 - RNA, 19 nt, Artificial Sequence
  Description of Artificial Sequence: Synthetic oligonucleotide
  Sense strand starting at position 2265 of SEQ ID NO: 1884124
gauacuaagguauguugca

SEQ ID NO: 2241961 - RNA, 19 nt, Artificial Sequence
  Description of Artificial Sequence: Synthetic oligonucleotide
  Antisense strand to SEQ ID NO: 2241960
ugcaacauaccuuaguauc

SEQ ID NO: 2241962 - RNA, 19 nt, Artificial Sequence
  Description of Artificial Sequence: Synthetic oligonucleotide
  Sense strand starting at position 2266 of SEQ ID NO: 1884124
auacuaagguauguugcaa

SEQ ID NO: 2241963 - RNA, 19 nt, Artificial Sequence
  Description of Artificial Sequence: Synthetic oligonucleotide
  Antisense strand to SEQ ID NO: 2241962
uugcaacauaccuuaguau

SEQ ID NO: 2241964 - RNA, 19 nt, Artificial Sequence
  Description of Artificial Sequence: Synthetic oligonucleotide
  Sense strand starting at position 2345 of SEQ ID NO: 1884124
augggaauaccugggcuaa

SEQ ID NO: 2241965 - RNA, 19 nt, Artificial Sequence
  Description of Artificial Sequence: Synthetic oligonucleotide
  Antisense strand to SEQ ID NO: 2241964
uuagcccagguauucccau

SEQ ID NO: 2241966 - RNA, 19 nt, Artificial Sequence
  Description of Artificial Sequence: Synthetic oligonucleotide
  Sense strand starting at position 2511 of SEQ ID NO: 1884124
cugagagguuaaguaagua

SEQ ID NO: 2241967 - RNA, 19 nt, Artificial Sequence
  Description of Artificial Sequence: Synthetic oligonucleotide
  Antisense strand to SEQ ID NO: 2241966
uacuuacuuaaccucucag

SEQ ID NO: 2241968 - RNA, 19 nt, Artificial Sequence
  Description of Artificial Sequence: Synthetic oligonucleotide
  Sense strand starting at position 2655 of SEQ ID NO: 1884124
cccacuccugaguaugagu

SEQ ID NO: 2241969 - RNA, 19 nt, Artificial Sequence
  Description of Artificial Sequence: Synthetic oligonucleotide
  Antisense strand to SEQ ID NO: 2241968
acucauacucaggaguggg

SEQ ID NO: 2241970 - RNA, 19 nt, Artificial Sequence
  Description of Artificial Sequence: Synthetic oligonucleotide
  Sense strand starting at position 2657 of SEQ ID NO: 1884124
cacuccugaguaugaguaa

SEQ ID NO: 2241971 - RNA, 19 nt, Artificial Sequence
  Description of Artificial Sequence: Synthetic oligonucleotide
  Antisense strand to SEQ ID NO: 2241970
uuacucauacucaggagug

SEQ ID NO: 2241972 - RNA, 19 nt, Artificial Sequence
  Description of Artificial Sequence: Synthetic oligonucleotide
  Sense strand starting at position 2660 of SEQ ID NO: 1884124
uccugaguaugaguaaaga

SEQ ID NO: 2241973 - RNA, 19 nt, Artificial Sequence
  Description of Artificial Sequence: Synthetic oligonucleotide
  Antisense strand to SEQ ID NO: 2241972
ucuuuacucauacucagga

SEQ ID NO: 2241974 - RNA, 19 nt, Artificial Sequence
  Description of Artificial Sequence: Synthetic oligonucleotide
  Sense strand starting at position 2728 of SEQ ID NO: 1884124
aacugaaagucagugguaa

SEQ ID NO: 2241975 - RNA, 19 nt, Artificial Sequence
  Description of Artificial Sequence: Synthetic oligonucleotide
  Antisense strand to SEQ ID NO: 2241974
uuaccacugacuuucaguu

SEQ ID NO: 2241976 - RNA, 19 nt, Artificial Sequence
  Description of Artificial Sequence: Synthetic oligonucleotide
  Sense strand starting at position 2729 of SEQ ID NO: 1884124
acugaaagucagugguaau

SEQ ID NO: 2241977 - RNA, 19 nt, Artificial Sequence
  Description of Artificial Sequence: Synthetic oligonucleotide
  Antisense strand to SEQ ID NO: 2241976
auuaccacugacuuucagu

SEQ ID NO: 2241978 - RNA, 19 nt, Artificial Sequence
  Description of Artificial Sequence: Synthetic oligonucleotide
  Sense strand starting at position 2730 of SEQ ID NO: 1884124
cugaaagucagugguaaug

SEQ ID NO: 2241979 - RNA, 19 nt, Artificial Sequence
  Description of Artificial Sequence: Synthetic oligonucleotide
  Antisense strand to SEQ ID NO: 2241978
cauuaccacugacuuucag

SEQ ID NO: 2241980 - RNA, 19 nt, Artificial Sequence
  Description of Artificial Sequence: Synthetic oligonucleotide
  Sense strand starting at position 2742 of SEQ ID NO: 1884124
gguaaugggcauuaacuuu

SEQ ID NO: 2241981 - RNA, 19 nt, Artificial Sequence
  Description of Artificial Sequence: Synthetic oligonucleotide
  Antisense strand to SEQ ID NO: 2241980
aaaguuaaugcccauuacc

SEQ ID NO: 2241982 - RNA, 19 nt, Artificial Sequence
  Description of Artificial Sequence: Synthetic oligonucleotide
  Sense strand starting at position 2896 of SEQ ID NO: 1884124
auguuaauuugaguuugcu

SEQ ID NO: 2241983 - RNA, 19 nt, Artificial Sequence
  Description of Artificial Sequence: Synthetic oligonucleotide
  Antisense strand to SEQ ID NO: 2241982
agcaaacucaaauuaacau

SEQ ID NO: 2241984 - RNA, 19 nt, Artificial Sequence
  Description of Artificial Sequence: Synthetic oligonucleotide
  Sense strand starting at position 2904 of SEQ ID NO: 1884124
uugaguuugcuagaacgua

SEQ ID NO: 2241985 - RNA, 19 nt, Artificial Sequence
  Description of Artificial Sequence: Synthetic oligonucleotide
  Antisense strand to SEQ ID NO: 2241984
uacguucuagcaaacucaa

SEQ ID NO: 2241986 - RNA, 19 nt, Artificial Sequence
  Description of Artificial Sequence: Synthetic oligonucleotide
  Sense strand starting at position 3266 of SEQ ID NO: 1884124
ccugucacugauuaaagca

SEQ ID NO: 2241987 - RNA, 19 nt, Artificial Sequence
  Description of Artificial Sequence: Synthetic oligonucleotide
  Antisense strand to SEQ ID NO: 2241986
ugcuuuaaucagugacagg

SEQ ID NO: 2241988 - RNA, 19 nt, Artificial Sequence
  Description of Artificial Sequence: Synthetic oligonucleotide
  Sense strand starting at position 3445 of SEQ ID NO: 1884124
agggaaacggcguaacauu

SEQ ID NO: 2241989 - RNA, 19 nt, Artificial Sequence
  Description of Artificial Sequence: Synthetic oligonucleotide
  Antisense strand to SEQ ID NO: 2241988
aauguuacgccguuucccu

SEQ ID NO: 2241990 - RNA, 19 nt, Artificial Sequence
  Description of Artificial Sequence: Synthetic oligonucleotide
  Sense strand starting at position 3496 of SEQ ID NO: 1884124
ccacaaacuuuauucggau

SEQ ID NO: 2241991 - RNA, 19 nt, Artificial Sequence
  Description of Artificial Sequence: Synthetic oligonucleotide
  Antisense strand to SEQ ID NO: 2241990
auccgaauaaaguuugugg

SEQ ID NO: 2241992 - RNA, 19 nt, Artificial Sequence
  Description of Artificial Sequence: Synthetic oligonucleotide
  Sense strand starting at position 3579 of SEQ ID NO: 1884124
uguagaucuguguaacuac

SEQ ID NO: 2241993 - RNA, 19 nt, Artificial Sequence
  Description of Artificial Sequence: Synthetic oligonucleotide
  Antisense strand to SEQ ID NO: 2241992
guaguuacacagaucuaca

SEQ ID NO: 2241994 - RNA, 19 nt, Artificial Sequence
  Description of Artificial Sequence: Synthetic oligonucleotide
  Sense strand starting at position 3632 of SEQ ID NO: 1884124
caaggcuccuuugugaacu

SEQ ID NO: 2241995 - RNA, 19 nt, Artificial Sequence
  Description of Artificial Sequence: Synthetic oligonucleotide
  Antisense strand to SEQ ID NO: 2241994
aguucacaaaggagccuug

SEQ ID NO: 2241996 - RNA, 19 nt, Artificial Sequence
  Description of Artificial Sequence: Synthetic oligonucleotide
  Sense strand starting at position 3793 of SEQ ID NO: 1884124
ucuagagauucguccagac

SEQ ID NO: 2241997 - RNA, 19 nt, Artificial Sequence
  Description of Artificial Sequence: Synthetic oligonucleotide
  Antisense strand to SEQ ID NO: 2241996
gucuggacgaaucucuaga

SEQ ID NO: 2241998 - RNA, 19 nt, Artificial Sequence
  Description of Artificial Sequence: Synthetic oligonucleotide
  Sense strand starting at position 3795 of SEQ ID NO: 1884124
uagagauucguccagacug

SEQ ID NO: 2241999 - RNA, 19 nt, Artificial Sequence
  Description of Artificial Sequence: Synthetic oligonucleotide
  Antisense strand to SEQ ID NO: 2241998
cagucuggacgaaucucua

SEQ ID NO: 2242000 - RNA, 19 nt, Artificial Sequence
  Description of Artificial Sequence: Synthetic oligonucleotide
  Sense strand starting at position 3797 of SEQ ID NO: 1884124
gagauucguccagacuguu

SEQ ID NO: 2242001 - RNA, 19 nt, Artificial Sequence
  Description of Artificial Sequence: Synthetic oligonucleotide
  Antisense strand to SEQ ID NO: 2242000
aacagucuggacgaaucuc

SEQ ID NO: 2242002 - RNA, 19 nt, Artificial Sequence
  Description of Artificial Sequence: Synthetic oligonucleotide
  Sense strand starting at position 3813 of SEQ ID NO: 1884124
guuccuuguaucuagaguu

SEQ ID NO: 2242003 - RNA, 19 nt, Artificial Sequence
  Description of Artificial Sequence: Synthetic oligonucleotide
  Antisense strand to SEQ ID NO: 2242002
aacucuagauacaaggaac

SEQ ID NO: 2242004 - RNA, 19 nt, Artificial Sequence
  Description of Artificial Sequence: Synthetic oligonucleotide
  Sense strand starting at position 3849 of SEQ ID NO: 1884124
auauuuccaugguauggau

SEQ ID NO: 2242005 - RNA, 19 nt, Artificial Sequence
  Description of Artificial Sequence: Synthetic oligonucleotide
  Antisense strand to SEQ ID NO: 2242004
auccauaccauggaaauau

SEQ ID NO: 2242006 - RNA, 19 nt, Artificial Sequence
  Description of Artificial Sequence: Synthetic oligonucleotide
  Sense strand starting at position 3869 of SEQ ID NO: 1884124
gaugaccaguuguuuaacu

SEQ ID NO: 2242007 - RNA, 19 nt, Artificial Sequence
  Description of Artificial Sequence: Synthetic oligonucleotide
  Antisense strand to SEQ ID NO: 2242006
aguuaaacaacuggucauc

SEQ ID NO: 2242008 - RNA, 19 nt, Artificial Sequence
  Description of Artificial Sequence: Synthetic oligonucleotide
  Sense strand starting at position 3871 of SEQ ID NO: 1884124
ugaccaguuguuuaacugu

SEQ ID NO: 2242009 - RNA, 19 nt, Artificial Sequence
  Description of Artificial Sequence: Synthetic oligonucleotide
  Antisense strand to SEQ ID NO: 2242008
acaguuaaacaacugguca

SEQ ID NO: 2242010 - RNA, 19 nt, Artificial Sequence
  Description of Artificial Sequence: Synthetic oligonucleotide
  Sense strand starting at position 27 of SEQ ID NO: 1884125
gggagaagcugucagguga

SEQ ID NO: 2242011 - RNA, 19 nt, Artificial Sequence
  Description of Artificial Sequence: Synthetic oligonucleotide
  Antisense strand to SEQ ID NO: 2242010
ucaccugacagcuucuccc

SEQ ID NO: 2242012 - RNA, 19 nt, Artificial Sequence
  Description of Artificial Sequence: Synthetic oligonucleotide
  Sense strand starting at position 215 of SEQ ID NO: 1884125
aggagacucuuggcagcaa

SEQ ID NO: 2242013 - RNA, 19 nt, Artificial Sequence
  Description of Artificial Sequence: Synthetic oligonucleotide
  Antisense strand to SEQ ID NO: 2242012
uugcugccaagagucuccu

SEQ ID NO: 2242014 - RNA, 19 nt, Artificial Sequence
  Description of Artificial Sequence: Synthetic oligonucleotide
  Sense strand starting at position 269 of SEQ ID NO: 1884125
ggcuucuugaccuggguga

SEQ ID NO: 2242015 - RNA, 19 nt, Artificial Sequence
  Description of Artificial Sequence: Synthetic oligonucleotide
  Antisense strand to SEQ ID NO: 2242014
ucacccaggucaagaagcc

SEQ ID NO: 2242016 - RNA, 19 nt, Artificial Sequence
  Description of Artificial Sequence: Synthetic oligonucleotide
  Sense strand starting at position 303 of SEQ ID NO: 1884125
ucaagaacuugcuggagua

SEQ ID NO: 2242017 - RNA, 19 nt, Artificial Sequence
  Description of Artificial Sequence: Synthetic oligonucleotide
  Antisense strand to SEQ ID NO: 2242016
uacuccagcaaguucuuga

SEQ ID NO: 2242018 - RNA, 19 nt, Artificial Sequence
  Description of Artificial Sequence: Synthetic oligonucleotide
  Sense strand starting at position 304 of SEQ ID NO: 1884125
caagaacuugcuggaguaa

SEQ ID NO: 2242019 - RNA, 19 nt, Artificial Sequence
  Description of Artificial Sequence: Synthetic oligonucleotide
  Antisense strand to SEQ ID NO: 2242018
uuacuccagcaaguucuug

SEQ ID NO: 2242020 - RNA, 19 nt, Artificial Sequence
  Description of Artificial Sequence: Synthetic oligonucleotide
  Sense strand starting at position 317 of SEQ ID NO: 1884125
gaguaacaguccuggaaac

SEQ ID NO: 2242021 - RNA, 19 nt, Artificial Sequence
  Description of Artificial Sequence: Synthetic oligonucleotide
  Antisense strand to SEQ ID NO: 2242020
guuuccaggacuguuacuc

SEQ ID NO: 2242022 - RNA, 19 nt, Artificial Sequence
  Description of Artificial Sequence: Synthetic oligonucleotide
  Sense strand starting at position 318 of SEQ ID NO: 1884125
aguaacaguccuggaaacu

SEQ ID NO: 2242023 - RNA, 19 nt, Artificial Sequence
  Description of Artificial Sequence: Synthetic oligonucleotide
  Antisense strand to SEQ ID NO: 2242022
aguuuccaggacuguuacu

SEQ ID NO: 2242024 - RNA, 19 nt, Artificial Sequence
  Description of Artificial Sequence: Synthetic oligonucleotide
  Sense strand starting at position 319 of SEQ ID NO: 1884125
guaacaguccuggaaacuc

SEQ ID NO: 2242025 - RNA, 19 nt, Artificial Sequence
  Description of Artificial Sequence: Synthetic oligonucleotide
  Antisense strand to SEQ ID NO: 2242024
gaguuuccaggacuguuac

SEQ ID NO: 2242026 - RNA, 19 nt, Artificial Sequence
  Description of Artificial Sequence: Synthetic oligonucleotide
  Sense strand starting at position 385 of SEQ ID NO: 1884125
ggagguuccaguuaccaga

SEQ ID NO: 2242027 - RNA, 19 nt, Artificial Sequence
  Description of Artificial Sequence: Synthetic oligonucleotide
  Antisense strand to SEQ ID NO: 2242026
ucugguaacuggaaccucc

SEQ ID NO: 2242028 - RNA, 19 nt, Artificial Sequence
  Description of Artificial Sequence: Synthetic oligonucleotide
  Sense strand starting at position 608 of SEQ ID NO: 1884125
aggcauauuugucagggca

SEQ ID NO: 2242029 - RNA, 19 nt, Artificial Sequence
  Description of Artificial Sequence: Synthetic oligonucleotide
  Antisense strand to SEQ ID NO: 2242028
ugcccugacaaauaugccu

SEQ ID NO: 2242030 - RNA, 19 nt, Artificial Sequence
  Description of Artificial Sequence: Synthetic oligonucleotide
  Sense strand starting at position 610 of SEQ ID NO: 1884125
gcauauuugucagggcaua

SEQ ID NO: 2242031 - RNA, 19 nt, Artificial Sequence
  Description of Artificial Sequence: Synthetic oligonucleotide
  Antisense strand to SEQ ID NO: 2242030
uaugcccugacaaauaugc

SEQ ID NO: 2242032 - RNA, 19 nt, Artificial Sequence
  Description of Artificial Sequence: Synthetic oligonucleotide
  Sense strand starting at position 623 of SEQ ID NO: 1884125
ggcauaagcccuugacaca

SEQ ID NO: 2242033 - RNA, 19 nt, Artificial Sequence
  Description of Artificial Sequence: Synthetic oligonucleotide
  Antisense strand to SEQ ID NO: 2242032
ugugucaagggcuuaugcc

SEQ ID NO: 2242034 - RNA, 19 nt, Artificial Sequence
  Description of Artificial Sequence: Synthetic oligonucleotide
  Sense strand starting at position 703 of SEQ ID NO: 1884125
caugcagcucucuggcaua

SEQ ID NO: 2242035 - RNA, 19 nt, Artificial Sequence
  Description of Artificial Sequence: Synthetic oligonucleotide
  Antisense strand to SEQ ID NO: 2242034
uaugccagagagcugcaug

SEQ ID NO: 2242036 - RNA, 19 nt, Artificial Sequence
  Description of Artificial Sequence: Synthetic oligonucleotide
  Sense strand starting at position 763 of SEQ ID NO: 1884125
cucgauauuugaggaaguc

SEQ ID NO: 2242037 - RNA, 19 nt, Artificial Sequence
  Description of Artificial Sequence: Synthetic oligonucleotide
  Antisense strand to SEQ ID NO: 2242036
gacuuccucaaauaucgag

SEQ ID NO: 2242038 - RNA, 19 nt, Artificial Sequence
  Description of Artificial Sequence: Synthetic oligonucleotide
  Sense strand starting at position 969 of SEQ ID NO: 1884125
ccugguugagcucgucaau

SEQ ID NO: 2242039 - RNA, 19 nt, Artificial Sequence
  Description of Artificial Sequence: Synthetic oligonucleotide
  Antisense strand to SEQ ID NO: 2242038
auugacgagcucaaccagg

SEQ ID NO: 2242040 - RNA, 19 nt, Artificial Sequence
  Description of Artificial Sequence: Synthetic oligonucleotide
  Sense strand starting at position 972 of SEQ ID NO: 1884125
gguugagcucgucaaucag

SEQ ID NO: 2242041 - RNA, 19 nt, Artificial Sequence
  Description of Artificial Sequence: Synthetic oligonucleotide
  Antisense strand to SEQ ID NO: 2242040
cugauugacgagcucaacc

SEQ ID NO: 2242042 - RNA, 19 nt, Artificial Sequence
  Description of Artificial Sequence: Synthetic oligonucleotide
  Sense strand starting at position 1020 of SEQ ID NO: 1884125
ggcgguucaguuggaucaa

SEQ ID NO: 2242043 - RNA, 19 nt, Artificial Sequence
  Description of Artificial Sequence: Synthetic oligonucleotide
  Antisense strand to SEQ ID NO: 2242042
uugauccaacugaaccgcc

SEQ ID NO: 2242044 - RNA, 19 nt, Artificial Sequence
  Description of Artificial Sequence: Synthetic oligonucleotide
  Sense strand starting at position 1044 of SEQ ID NO: 1884125
cgguguuauucuucccucu

SEQ ID NO: 2242045 - RNA, 19 nt, Artificial Sequence
  Description of Artificial Sequence: Synthetic oligonucleotide
  Antisense strand to SEQ ID NO: 2242044
agagggaagaauaacaccg

SEQ ID NO: 2242046 - RNA, 19 nt, Artificial Sequence
  Description of Artificial Sequence: Synthetic oligonucleotide
  Sense strand starting at position 1046 of SEQ ID NO: 1884125
guguuauucuucccucuuu

SEQ ID NO: 2242047 - RNA, 19 nt, Artificial Sequence
  Description of Artificial Sequence: Synthetic oligonucleotide
  Antisense strand to SEQ ID NO: 2242046
aaagagggaagaauaacac

SEQ ID NO: 2242048 - RNA, 19 nt, Artificial Sequence
  Description of Artificial Sequence: Synthetic oligonucleotide
  Sense strand starting at position 1071 of SEQ ID NO: 1884125
cgaugauguacucaaaguu

SEQ ID NO: 2242049 - RNA, 19 nt, Artificial Sequence
  Description of Artificial Sequence: Synthetic oligonucleotide
  Antisense strand to SEQ ID NO: 2242048
aacuuugaguacaucaucg

SEQ ID NO: 2242050 - RNA, 19 nt, Artificial Sequence
  Description of Artificial Sequence: Synthetic oligonucleotide
  Sense strand starting at position 1278 of SEQ ID NO: 1884125
guaccauucucucugcuuu

SEQ ID NO: 2242051 - RNA, 19 nt, Artificial Sequence
  Description of Artificial Sequence: Synthetic oligonucleotide
  Antisense strand to SEQ ID NO: 2242050
aaagcagagagaaugguac

SEQ ID NO: 2242052 - RNA, 19 nt, Artificial Sequence
  Description of Artificial Sequence: Synthetic oligonucleotide
  Sense strand starting at position 1296 of SEQ ID NO: 1884125
ucacauguguuugaacaug

SEQ ID NO: 2242053 - RNA, 19 nt, Artificial Sequence
  Description of Artificial Sequence: Synthetic oligonucleotide
  Antisense strand to SEQ ID NO: 2242052
cauguucaaacacauguga

SEQ ID NO: 2242054 - RNA, 19 nt, Artificial Sequence
  Description of Artificial Sequence: Synthetic oligonucleotide
  Sense strand starting at position 1301 of SEQ ID NO: 1884125
uguguuugaacauguccua

SEQ ID NO: 2242055 - RNA, 19 nt, Artificial Sequence
  Description of Artificial Sequence: Synthetic oligonucleotide
  Antisense strand to SEQ ID NO: 2242054
uaggacauguucaaacaca

SEQ ID NO: 2242056 - RNA, 19 nt, Artificial Sequence
  Description of Artificial Sequence: Synthetic oligonucleotide
  Sense strand starting at position 1304 of SEQ ID NO: 1884125
guuugaacauguccuaaag

SEQ ID NO: 2242057 - RNA, 19 nt, Artificial Sequence
  Description of Artificial Sequence: Synthetic oligonucleotide
  Antisense strand to SEQ ID NO: 2242056
cuuuaggacauguucaaac

SEQ ID NO: 2242058 - RNA, 19 nt, Artificial Sequence
  Description of Artificial Sequence: Synthetic oligonucleotide
  Sense strand starting at position 1306 of SEQ ID NO: 1884125
uugaacauguccuaaagaa

SEQ ID NO: 2242059 - RNA, 19 nt, Artificial Sequence
  Description of Artificial Sequence: Synthetic oligonucleotide
  Antisense strand to SEQ ID NO: 2242058
uucuuuaggacauguucaa

SEQ ID NO: 2242060 - RNA, 19 nt, Artificial Sequence
  Description of Artificial Sequence: Synthetic oligonucleotide
  Sense strand starting at position 1667 of SEQ ID NO: 1884125
gccgcuuuccuucuccuaa

SEQ ID NO: 2242061 - RNA, 19 nt, Artificial Sequence
  Description of Artificial Sequence: Synthetic oligonucleotide
  Antisense strand to SEQ ID NO: 2242060
uuaggagaaggaaagcggc

SEQ ID NO: 2242062 - RNA, 19 nt, Artificial Sequence
  Description of Artificial Sequence: Synthetic oligonucleotide
  Sense strand starting at position 2086 of SEQ ID NO: 1884125
gaugcuugccuccguuagu

SEQ ID NO: 2242063 - RNA, 19 nt, Artificial Sequence
  Description of Artificial Sequence: Synthetic oligonucleotide
  Antisense strand to SEQ ID NO: 2242062
acuaacggaggcaagcauc
